United States Patent Application Publication US 2005/0255487 A1 - sequence listing, part 22

SEQ ID NO: 587405 - RNA, 19 nt, Homo sapiens
  misc_RNA (1)...(19): siRNA sense strand
guugaaagcuccgaguuug

SEQ ID NO: 587406 - RNA, 19 nt, Homo sapiens
  misc_RNA (1)...(19): siRNA sense strand
ggaagaauucuguggaaga

SEQ ID NO: 587407 - RNA, 19 nt, Homo sapiens
  misc_RNA (1)...(19): siRNA sense strand
gaagucagcagacacuaga

SEQ ID NO: 587408 - RNA, 19 nt, Homo sapiens
  misc_RNA (1)...(19): siRNA sense strand
gauuaaaugugcaguuugg

SEQ ID NO: 587409 - RNA, 19 nt, Homo sapiens
  misc_RNA (1)...(19): siRNA sense strand
ccaaguacacagcagaaua

SEQ ID NO: 587410 - RNA, 19 nt, Homo sapiens
  misc_RNA (1)...(19): siRNA sense strand
gaagaauucuguggaagag

SEQ ID NO: 587411 - RNA, 19 nt, Homo sapiens
  misc_RNA (1)...(19): siRNA sense strand
gcacgaccauugaaaauau

SEQ ID NO: 587412 - RNA, 19 nt, Homo sapiens
  misc_RNA (1)...(19): siRNA sense strand
gcagaugucacaggauuaa

SEQ ID NO: 587413 - RNA, 19 nt, Homo sapiens
  misc_RNA (1)...(19): siRNA sense strand
gaagggaauucagacacaa

SEQ ID NO: 587414 - RNA, 19 nt, Homo sapiens
  misc_RNA (1)...(19): siRNA sense strand
acaauaagacacagacuuu

SEQ ID NO: 587415 - RNA, 19 nt, Homo sapiens
  misc_RNA (1)...(19): siRNA sense strand
cugacaagcucaucacuga

SEQ ID NO: 587416 - RNA, 19 nt, Homo sapiens
  misc_RNA (1)...(19): siRNA sense strand
gaauuuagaggugaagaaa

SEQ ID NO: 587417 - RNA, 19 nt, Homo sapiens
  misc_RNA (1)...(19): siRNA sense strand
aaacaagucugcagguucu

SEQ ID NO: 587418 - RNA, 19 nt, Homo sapiens
  misc_RNA (1)...(19): siRNA sense strand
cagcagagccaaucacaga

SEQ ID NO: 587419 - RNA, 19 nt, Homo sapiens
  misc_RNA (1)...(19): siRNA sense strand
aaaucaggaugaaugcaua

SEQ ID NO: 587420 - RNA, 19 nt, Homo sapiens
  misc_RNA (1)...(19): siRNA sense strand
gagccuagcuaauaaucca

SEQ ID NO: 587421 - RNA, 19 nt, Homo sapiens
  misc_RNA (1)...(19): siRNA sense strand
gcaaugucuuccucuuaug

SEQ ID NO: 587422 - RNA, 19 nt, Homo sapiens
  misc_RNA (1)...(19): siRNA sense strand
gaauuugggucagaaccuu

SEQ ID NO: 587423 - RNA, 19 nt, Homo sapiens
  misc_RNA (1)...(19): siRNA sense strand
caaauucgcaacacaacaa

SEQ ID NO: 587424 - RNA, 19 nt, Homo sapiens
  misc_RNA (1)...(19): siRNA sense strand
caaagagaauagagagaag

SEQ ID NO: 587425 - RNA, 19 nt, Homo sapiens
  misc_RNA (1)...(19): siRNA sense strand
ccaaacaagucugcagguu

SEQ ID NO: 587426 - RNA, 19 nt, Homo sapiens
  misc_RNA (1)...(19): siRNA sense strand
ccaguggacuacuauggaa

SEQ ID NO: 587427 - RNA, 19 nt, Homo sapiens
  misc_RNA (1)...(19): siRNA sense strand
ccaaagcccugugaguuca

SEQ ID NO: 587428 - RNA, 19 nt, Homo sapiens
  misc_RNA (1)...(19): siRNA sense strand
gugaacaaagcuaucaaua

SEQ ID NO: 587429 - RNA, 19 nt, Homo sapiens
  misc_RNA (1)...(19): siRNA sense strand
uauacaacuuccgucauua

SEQ ID NO: 587430 - RNA, 19 nt, Homo sapiens
  misc_RNA (1)...(19): siRNA sense strand
gaaaggaagaggcggcaau

SEQ ID NO: 587431 - RNA, 19 nt, Homo sapiens
  misc_RNA (1)...(19): siRNA sense strand
gagaugggagccuagcuaa

SEQ ID NO: 587432 - RNA, 19 nt, Homo sapiens
  misc_RNA (1)...(19): siRNA sense strand
auauacaacuuccgucauu

SEQ ID NO: 587433 - RNA, 19 nt, Homo sapiens
  misc_RNA (1)...(19): siRNA sense strand
acaagucacccuacaacua

SEQ ID NO: 587434 - RNA, 19 nt, Homo sapiens
  misc_RNA (1)...(19): siRNA sense strand
caacagaagacuggacuga

SEQ ID NO: 587435 - RNA, 19 nt, Homo sapiens
  misc_RNA (1)...(19): siRNA sense strand
cuacaacuacuacuucuug

SEQ ID NO: 587436 - RNA, 19 nt, Homo sapiens
  misc_RNA (1)...(19): siRNA sense strand
ggaauucagacacaacuuc

SEQ ID NO: 587437 - RNA, 19 nt, Homo sapiens
  misc_RNA (1)...(19): siRNA sense strand
uagcaaugucuuccucuua

SEQ ID NO: 587438 - RNA, 19 nt, Homo sapiens
  misc_RNA (1)...(19): siRNA sense strand
aaccuucucucucugaauu

SEQ ID NO: 587439 - RNA, 19 nt, Homo sapiens
  misc_RNA (1)...(19): siRNA sense strand
gcaaucaaguggacaaacc

SEQ ID NO: 587440 - RNA, 19 nt, Homo sapiens
  misc_RNA (1)...(19): siRNA sense strand
cugguucugucuacaauaa

SEQ ID NO: 587441 - RNA, 19 nt, Homo sapiens
  misc_RNA (1)...(19): siRNA sense strand
uuaagugagccuuugaaua

SEQ ID NO: 587442 - RNA, 19 nt, Homo sapiens
  misc_RNA (1)...(19): siRNA sense strand
aaacacaucaaacuugcua

SEQ ID NO: 587443 - RNA, 19 nt, Homo sapiens
  misc_RNA (1)...(19): siRNA sense strand
caaguacacagcagaauag

SEQ ID NO: 587444 - RNA, 19 nt, Homo sapiens
  misc_RNA (1)...(19): siRNA sense strand
gcauaguggcccuacauga

SEQ ID NO: 587445 - RNA, 19 nt, Homo sapiens
  misc_RNA (1)...(19): siRNA sense strand
gaguaucagugucuucaag

SEQ ID NO: 587446 - RNA, 19 nt, Homo sapiens
  misc_RNA (1)...(19): siRNA sense strand
caacgcaaccacagaaaca

SEQ ID NO: 587447 - RNA, 19 nt, Homo sapiens
  misc_RNA (1)...(19): siRNA sense strand
acagaagacuggacugaag

SEQ ID NO: 587448 - RNA, 19 nt, Homo sapiens
  misc_RNA (1)...(19): siRNA sense strand
caucaaauacucacaacau

SEQ ID NO: 587449 - RNA, 19 nt, Homo sapiens
  misc_RNA (1)...(19): siRNA sense strand
ugacuucagugagcaguga

SEQ ID NO: 587450 - RNA, 19 nt, Homo sapiens
  misc_RNA (1)...(19): siRNA sense strand
aggauuaaaugugcaguuu

SEQ ID NO: 587451 - RNA, 19 nt, Homo sapiens
  misc_RNA (1)...(19): siRNA sense strand
ggaaacaacaaccggaaag

SEQ ID NO: 587452 - RNA, 19 nt, Homo sapiens
  misc_RNA (1)...(19): siRNA sense strand
gaucagcuccaagcaguga

SEQ ID NO: 587453 - RNA, 19 nt, Homo sapiens
  misc_RNA (1)...(19): siRNA sense strand
caacaucccaguccucagu

SEQ ID NO: 587454 - RNA, 19 nt, Homo sapiens
  misc_RNA (1)...(19): siRNA sense strand
cucaggaucugucaaacaa

SEQ ID NO: 587455 - RNA, 19 nt, Homo sapiens
  misc_RNA (1)...(19): siRNA sense strand
ccaggaaccaucaugaaug

SEQ ID NO: 587456 - RNA, 19 nt, Homo sapiens
  misc_RNA (1)...(19): siRNA sense strand
guagcaaugucuuccucuu

SEQ ID NO: 587457 - RNA, 19 nt, Homo sapiens
  misc_RNA (1)...(19): siRNA sense strand
gccuuugaauacaucuuua

SEQ ID NO: 587458 - RNA, 19 nt, Homo sapiens
  misc_RNA (1)...(19): siRNA sense strand
ggagaugugaacaaagcua

SEQ ID NO: 587459 - RNA, 19 nt, Homo sapiens
  misc_RNA (1)...(19): siRNA sense strand
cgaccuccgucucaaguuc

SEQ ID NO: 587460 - RNA, 19 nt, Homo sapiens
  misc_RNA (1)...(19): siRNA sense strand
ccaacuccuuugaaacuuc

SEQ ID NO: 587461 - RNA, 19 nt, Homo sapiens
  misc_RNA (1)...(19): siRNA sense strand
aaucguggcagagaauuua

SEQ ID NO: 587462 - RNA, 19 nt, Homo sapiens
  misc_RNA (1)...(19): siRNA sense strand
gggagacuguaggguguaa

SEQ ID NO: 587463 - RNA, 19 nt, Homo sapiens
  misc_RNA (1)...(19): siRNA sense strand
gaauucagacacaacuuca

SEQ ID NO: 587464 - RNA, 19 nt, Homo sapiens
  misc_RNA (1)...(19): siRNA sense strand
gguucugucuacaauaaga

SEQ ID NO: 587465 - RNA, 19 nt, Homo sapiens
  misc_RNA (1)...(19): siRNA sense strand
gaacuccacauauacaacu

SEQ ID NO: 587466 - RNA, 19 nt, Homo sapiens
  misc_RNA (1)...(19): siRNA sense strand
ucacaaauucgcaacacaa

SEQ ID NO: 587467 - RNA, 19 nt, Homo sapiens
  misc_RNA (1)...(19): siRNA sense strand
gaagaaaagcgagaaagaa

SEQ ID NO: 587468 - RNA, 19 nt, Homo sapiens
  misc_RNA (1)...(19): siRNA sense strand
acaaagagaauagagagaa

SEQ ID NO: 587469 - RNA, 19 nt, Homo sapiens
  misc_RNA (1)...(19): siRNA sense strand
ccaccuggcuauagcuaca

SEQ ID NO: 587470 - RNA, 19 nt, Homo sapiens
  misc_RNA (1)...(19): siRNA sense strand
cagcagcccuucgugaauc

SEQ ID NO: 587471 - RNA, 19 nt, Homo sapiens
  misc_RNA (1)...(19): siRNA sense strand
gcagcgaccuccgucucaa

SEQ ID NO: 587472 - RNA, 19 nt, Homo sapiens
  misc_RNA (1)...(19): siRNA sense strand
caaugucuuccucuuauga

SEQ ID NO: 587473 - RNA, 19 nt, Homo sapiens
  misc_RNA (1)...(19): siRNA sense strand
gaugucacaggauuaaaug

SEQ ID NO: 587474 - RNA, 19 nt, Homo sapiens
  misc_RNA (1)...(19): siRNA sense strand
caagucacccuacaacuac

SEQ ID NO: 587475 - RNA, 19 nt, Homo sapiens
  misc_RNA (1)...(19): siRNA sense strand
gaagaguggacaacagaag

SEQ ID NO: 587476 - RNA, 19 nt, Homo sapiens
  misc_RNA (1)...(19): siRNA sense strand
guaauggagaugugaacaa

SEQ ID NO: 587477 - RNA, 19 nt, Homo sapiens
  misc_RNA (1)...(19): siRNA sense strand
gagaauagagagaagaaaa

SEQ ID NO: 587478 - RNA, 19 nt, Homo sapiens
  misc_RNA (1)...(19): siRNA sense strand
cagggacgccuccaccuuu

SEQ ID NO: 587479 - RNA, 19 nt, Homo sapiens
  misc_RNA (1)...(19): siRNA sense strand
caaaggaguaucagugucu

SEQ ID NO: 587480 - RNA, 19 nt, Homo sapiens
  misc_RNA (1)...(19): siRNA sense strand
ggccagcacggcuacagua

SEQ ID NO: 587481 - RNA, 19 nt, Homo sapiens
  misc_RNA (1)...(19): siRNA sense strand
gcccagugccuuccaguau

SEQ ID NO: 587482 - RNA, 19 nt, Homo sapiens
  misc_RNA (1)...(19): siRNA sense strand
ucucucagcuuagcaguuc

SEQ ID NO: 587483 - RNA, 19 nt, Homo sapiens
  misc_RNA (1)...(19): siRNA sense strand
caguacagaacuccacaua

SEQ ID NO: 587484 - RNA, 19 nt, Homo sapiens
  misc_RNA (1)...(19): siRNA sense strand
cagagaauuuagaggugaa

SEQ ID NO: 587485 - RNA, 19 nt, Homo sapiens
  misc_RNA (1)...(19): siRNA sense strand
caaaggggcuuggaagaau

SEQ ID NO: 587486 - RNA, 19 nt, Homo sapiens
  misc_RNA (1)...(19): siRNA sense strand
acacuagacacuccaaaga

SEQ ID NO: 587487 - RNA, 19 nt, Homo sapiens
  misc_RNA (1)...(19): siRNA sense strand
agcaaugucuuccucuuau

SEQ ID NO: 587488 - RNA, 19 nt, Homo sapiens
  misc_RNA (1)...(19): siRNA sense strand
cauaguggcccuacaugau

SEQ ID NO: 587489 - RNA, 19 nt, Homo sapiens
  misc_RNA (1)...(19): siRNA sense strand
gcuuguauucgaagucuuu

SEQ ID NO: 587490 - RNA, 19 nt, Homo sapiens
  misc_RNA (1)...(19): siRNA sense strand
guacagaacuccacauaua

SEQ ID NO: 587491 - RNA, 19 nt, Homo sapiens
  misc_RNA (1)...(19): siRNA sense strand
gaagccaacuccuuugaaa

SEQ ID NO: 587492 - RNA, 19 nt, Homo sapiens
  misc_RNA (1)...(19): siRNA sense strand
ggacaaaccuucagaucgu

SEQ ID NO: 587493 - RNA, 19 nt, Homo sapiens
  misc_RNA (1)...(19): siRNA sense strand
caacauagcucaggaucug

SEQ ID NO: 587494 - RNA, 19 nt, Homo sapiens
  misc_RNA (1)...(19): siRNA sense strand
gaugggagccuagcuaaua

SEQ ID NO: 587495 - RNA, 19 nt, Homo sapiens
  misc_RNA (1)...(19): siRNA sense strand
ggcaacagcugaacagaug

SEQ ID NO: 587496 - RNA, 19 nt, Homo sapiens
  misc_RNA (1)...(19): siRNA sense strand
gaacuggcaucaaauacuc

SEQ ID NO: 587497 - RNA, 19 nt, Homo sapiens
  misc_RNA (1)...(19): siRNA sense strand
cagcagaugucacaggauu

SEQ ID NO: 587498 - RNA, 19 nt, Homo sapiens
  misc_RNA (1)...(19): siRNA sense strand
acacuggucuucccuacua

SEQ ID NO: 587499 - RNA, 19 nt, Homo sapiens
  misc_RNA (1)...(19): siRNA sense strand
ggaagggaauucagacaca

SEQ ID NO: 587500 - RNA, 19 nt, Homo sapiens
  misc_RNA (1)...(19): siRNA sense strand
uaagugagccuuugaauac

SEQ ID NO: 587501 - RNA, 19 nt, Homo sapiens
  misc_RNA (1)...(19): siRNA sense strand
uaauggagaugugaacaaa

SEQ ID NO: 587502 - RNA, 19 nt, Homo sapiens
  misc_RNA (1)...(19): siRNA sense strand
ccacuggucuaccugauau

SEQ ID NO: 587503 - RNA, 19 nt, Homo sapiens
  misc_RNA (1)...(19): siRNA sense strand
gcacaaccaguaccucgua

SEQ ID NO: 587504 - RNA, 19 nt, Homo sapiens
  misc_RNA (1)...(19): siRNA sense strand
gaucaucgcaggcaccaaa

SEQ ID NO: 587505 - RNA, 19 nt, Homo sapiens
  misc_RNA (1)...(19): siRNA sense strand
guugaaagcuccgaguuug

SEQ ID NO: 587506 - RNA, 19 nt, Homo sapiens
  misc_RNA (1)...(19): siRNA sense strand
ggaagaauucuguggaaga

SEQ ID NO: 587507 - RNA, 19 nt, Homo sapiens
  misc_RNA (1)...(19): siRNA sense strand
gaagucagcagacacuaga

SEQ ID NO: 587508 - RNA, 19 nt, Homo sapiens
  misc_RNA (1)...(19): siRNA sense strand
gauuaaaugugcaguuugg

SEQ ID NO: 587509 - RNA, 19 nt, Homo sapiens
  misc_RNA (1)...(19): siRNA sense strand
ccaaguacacagcagaaua

SEQ ID NO: 587510 - RNA, 19 nt, Homo sapiens
  misc_RNA (1)...(19): siRNA sense strand
gaagaauucuguggaagag

SEQ ID NO: 587511 - RNA, 19 nt, Homo sapiens
  misc_RNA (1)...(19): siRNA sense strand
gcacgaccauugaaaauau

SEQ ID NO: 587512 - RNA, 19 nt, Homo sapiens
  misc_RNA (1)...(19): siRNA sense strand
gcagaugucacaggauuaa

SEQ ID NO: 587513 - RNA, 19 nt, Homo sapiens
  misc_RNA (1)...(19): siRNA sense strand
gaagggaauucagacacaa

SEQ ID NO: 587514 - RNA, 19 nt, Homo sapiens
  misc_RNA (1)...(19): siRNA sense strand
acaauaagacacagacuuu

SEQ ID NO: 587515 - RNA, 19 nt, Homo sapiens
  misc_RNA (1)...(19): siRNA sense strand
cugacaagcucaucacuga

SEQ ID NO: 587516 - RNA, 19 nt, Homo sapiens
  misc_RNA (1)...(19): siRNA sense strand
gaauuuagaggugaagaaa

SEQ ID NO: 587517 - RNA, 19 nt, Homo sapiens
  misc_RNA (1)...(19): siRNA sense strand
aaacaagucugcagguucu

SEQ ID NO: 587518 - RNA, 19 nt, Homo sapiens
  misc_RNA (1)...(19): siRNA sense strand
cagcagagccaaucacaga

SEQ ID NO: 587519 - RNA, 19 nt, Homo sapiens
  misc_RNA (1)...(19): siRNA sense strand
aaaucaggaugaaugcaua

SEQ ID NO: 587520 - RNA, 19 nt, Homo sapiens
  misc_RNA (1)...(19): siRNA sense strand
gagccuagcuaauaaucca

SEQ ID NO: 587521 - RNA, 19 nt, Homo sapiens
  misc_RNA (1)...(19): siRNA sense strand
gcaaugucuuccucuuaug

SEQ ID NO: 587522 - RNA, 19 nt, Homo sapiens
  misc_RNA (1)...(19): siRNA sense strand
gaauuugggucagaaccuu

SEQ ID NO: 587523 - RNA, 19 nt, Homo sapiens
  misc_RNA (1)...(19): siRNA sense strand
caaauucgcaacacaacaa

SEQ ID NO: 587524 - RNA, 19 nt, Homo sapiens
  misc_RNA (1)...(19): siRNA sense strand
caaagagaauagagagaag

SEQ ID NO: 587525 - RNA, 19 nt, Homo sapiens
  misc_RNA (1)...(19): siRNA sense strand
ccaaacaagucugcagguu

SEQ ID NO: 587526 - RNA, 19 nt, Homo sapiens
  misc_RNA (1)...(19): siRNA sense strand
ccaguggacuacuauggaa

SEQ ID NO: 587527 - RNA, 19 nt, Homo sapiens
  misc_RNA (1)...(19): siRNA sense strand
ccaaagcccugugaguuca

SEQ ID NO: 587528 - RNA, 19 nt, Homo sapiens
  misc_RNA (1)...(19): siRNA sense strand
gugaacaaagcuaucaaua

SEQ ID NO: 587529 - RNA, 19 nt, Homo sapiens
  misc_RNA (1)...(19): siRNA sense strand
uauacaacuuccgucauua

SEQ ID NO: 587530 - RNA, 19 nt, Homo sapiens
  misc_RNA (1)...(19): siRNA sense strand
gaaaggaagaggcggcaau

SEQ ID NO: 587531 - RNA, 19 nt, Homo sapiens
  misc_RNA (1)...(19): siRNA sense strand
gagaugggagccuagcuaa

SEQ ID NO: 587532 - RNA, 19 nt, Homo sapiens
  misc_RNA (1)...(19): siRNA sense strand
auauacaacuuccgucauu

SEQ ID NO: 587533 - RNA, 19 nt, Homo sapiens
  misc_RNA (1)...(19): siRNA sense strand
acaagucacccuacaacua

SEQ ID NO: 587534 - RNA, 19 nt, Homo sapiens
  misc_RNA (1)...(19): siRNA sense strand
caacagaagacuggacuga

SEQ ID NO: 587535 - RNA, 19 nt, Homo sapiens
  misc_RNA (1)...(19): siRNA sense strand
cuacaacuacuacuucuug

SEQ ID NO: 587536 - RNA, 19 nt, Homo sapiens
  misc_RNA (1)...(19): siRNA sense strand
ggaauucagacacaacuuc

SEQ ID NO: 587537 - RNA, 19 nt, Homo sapiens
  misc_RNA (1)...(19): siRNA sense strand
uagcaaugucuuccucuua

SEQ ID NO: 587538 - RNA, 19 nt, Homo sapiens
  misc_RNA (1)...(19): siRNA sense strand
aaccuucucucucugaauu

SEQ ID NO: 587539 - RNA, 19 nt, Homo sapiens
  misc_RNA (1)...(19): siRNA sense strand
gcaaucaaguggacaaacc

SEQ ID NO: 587540 - RNA, 19 nt, Homo sapiens
  misc_RNA (1)...(19): siRNA sense strand
cugguucugucuacaauaa

SEQ ID NO: 587541 - RNA, 19 nt, Homo sapiens
  misc_RNA (1)...(19): siRNA sense strand
uuaagugagccuuugaaua

SEQ ID NO: 587542 - RNA, 19 nt, Homo sapiens
  misc_RNA (1)...(19): siRNA sense strand
aaacacaucaaacuugcua

SEQ ID NO: 587543 - RNA, 19 nt, Homo sapiens
  misc_RNA (1)...(19): siRNA sense strand
caaguacacagcagaauag

SEQ ID NO: 587544 - RNA, 19 nt, Homo sapiens
  misc_RNA (1)...(19): siRNA sense strand
gcauaguggcccuacauga

SEQ ID NO: 587545 - RNA, 19 nt, Homo sapiens
  misc_RNA (1)...(19): siRNA sense strand
gaguaucagugucuucaag

SEQ ID NO: 587546 - RNA, 19 nt, Homo sapiens
  misc_RNA (1)...(19): siRNA sense strand
caacgcaaccacagaaaca

SEQ ID NO: 587547 - RNA, 19 nt, Homo sapiens
  misc_RNA (1)...(19): siRNA sense strand
acagaagacuggacugaag

SEQ ID NO: 587548 - RNA, 19 nt, Homo sapiens
  misc_RNA (1)...(19): siRNA sense strand
caucaaauacucacaacau

SEQ ID NO: 587549 - RNA, 19 nt, Homo sapiens
  misc_RNA (1)...(19): siRNA sense strand
ugacuucagugagcaguga

SEQ ID NO: 587550 - RNA, 19 nt, Homo sapiens
  misc_RNA (1)...(19): siRNA sense strand
aggauuaaaugugcaguuu

SEQ ID NO: 587551 - RNA, 19 nt, Homo sapiens
  misc_RNA (1)...(19): siRNA sense strand
ggaaacaacaaccggaaag

SEQ ID NO: 587552 - RNA, 19 nt, Homo sapiens
  misc_RNA (1)...(19): siRNA sense strand
gaucagcuccaagcaguga

SEQ ID NO: 587553 - RNA, 19 nt, Homo sapiens
  misc_RNA (1)...(19): siRNA sense strand
caacaucccaguccucagu

SEQ ID NO: 587554 - RNA, 19 nt, Homo sapiens
  misc_RNA (1)...(19): siRNA sense strand
cucaggaucugucaaacaa

SEQ ID NO: 587555 - RNA, 19 nt, Homo sapiens
  misc_RNA (1)...(19): siRNA sense strand
ccaggaaccaucaugaaug

SEQ ID NO: 587556 - RNA, 19 nt, Homo sapiens
  misc_RNA (1)...(19): siRNA sense strand
guagcaaugucuuccucuu

SEQ ID NO: 587557 - RNA, 19 nt, Homo sapiens
  misc_RNA (1)...(19): siRNA sense strand
gccuuugaauacaucuuua

SEQ ID NO: 587558 - RNA, 19 nt, Homo sapiens
  misc_RNA (1)...(19): siRNA sense strand
ggagaugugaacaaagcua

SEQ ID NO: 587559 - RNA, 19 nt, Homo sapiens
  misc_RNA (1)...(19): siRNA sense strand
cgaccuccgucucaaguuc

SEQ ID NO: 587560 - RNA, 19 nt, Homo sapiens
  misc_RNA (1)...(19): siRNA sense strand
ccaacuccuuugaaacuuc

SEQ ID NO: 587561 - RNA, 19 nt, Homo sapiens
  misc_RNA (1)...(19): siRNA sense strand
aaucguggcagagaauuua

SEQ ID NO: 587562 - RNA, 19 nt, Homo sapiens
  misc_RNA (1)...(19): siRNA sense strand
gggagacuguaggguguaa

SEQ ID NO: 587563 - RNA, 19 nt, Homo sapiens
  misc_RNA (1)...(19): siRNA sense strand
gaauucagacacaacuuca

SEQ ID NO: 587564 - RNA, 19 nt, Homo sapiens
  misc_RNA (1)...(19): siRNA sense strand
gguucugucuacaauaaga

SEQ ID NO: 587565 - RNA, 19 nt, Homo sapiens
  misc_RNA (1)...(19): siRNA sense strand
gaacuccacauauacaacu

SEQ ID NO: 587566 - RNA, 19 nt, Homo sapiens
  misc_RNA (1)...(19): siRNA sense strand
ucacaaauucgcaacacaa

SEQ ID NO: 587567 - RNA, 19 nt, Homo sapiens
  misc_RNA (1)...(19): siRNA sense strand
gaagaaaagcgagaaagaa

SEQ ID NO: 587568 - RNA, 19 nt, Homo sapiens
  misc_RNA (1)...(19): siRNA sense strand
acaaagagaauagagagaa

SEQ ID NO: 587569 - RNA, 19 nt, Homo sapiens
  misc_RNA (1)...(19): siRNA sense strand
ccaccuggcuauagcuaca

SEQ ID NO: 587570 - RNA, 19 nt, Homo sapiens
  misc_RNA (1)...(19): siRNA sense strand
cagcagcccuucgugaauc

SEQ ID NO: 587571 - RNA, 19 nt, Homo sapiens
  misc_RNA (1)...(19): siRNA sense strand
gcagcgaccuccgucucaa

SEQ ID NO: 587572 - RNA, 19 nt, Homo sapiens
  misc_RNA (1)...(19): siRNA sense strand
caaugucuuccucuuauga

SEQ ID NO: 587573 - RNA, 19 nt, Homo sapiens
  misc_RNA (1)...(19): siRNA sense strand
gaugucacaggauuaaaug

SEQ ID NO: 587574 - RNA, 19 nt, Homo sapiens
  misc_RNA (1)...(19): siRNA sense strand
caagucacccuacaacuac

SEQ ID NO: 587575 - RNA, 19 nt, Homo sapiens
  misc_RNA (1)...(19): siRNA sense strand
gaagaguggacaacagaag

SEQ ID NO: 587576 - RNA, 19 nt, Homo sapiens
  misc_RNA (1)...(19): siRNA sense strand
guaauggagaugugaacaa

SEQ ID NO: 587577 - RNA, 19 nt, Homo sapiens
  misc_RNA (1)...(19): siRNA sense strand
gagaauagagagaagaaaa

SEQ ID NO: 587578 - RNA, 19 nt, Homo sapiens
  misc_RNA (1)...(19): siRNA sense strand
cagggacgccuccaccuuu

SEQ ID NO: 587579 - RNA, 19 nt, Homo sapiens
  misc_RNA (1)...(19): siRNA sense strand
caaaggaguaucagugucu

SEQ ID NO: 587580 - RNA, 19 nt, Homo sapiens
  misc_RNA (1)...(19): siRNA sense strand
ggccagcacggcuacagua

SEQ ID NO: 587581 - RNA, 19 nt, Homo sapiens
  misc_RNA (1)...(19): siRNA sense strand
gcccagugccuuccaguau

SEQ ID NO: 587582 - RNA, 19 nt, Homo sapiens
  misc_RNA (1)...(19): siRNA sense strand
ucucucagcuuagcaguuc

SEQ ID NO: 587583 - RNA, 19 nt, Homo sapiens
  misc_RNA (1)...(19): siRNA sense strand
caguacagaacuccacaua

SEQ ID NO: 587584 - RNA, 19 nt, Homo sapiens
  misc_RNA (1)...(19): siRNA sense strand
cagagaauuuagaggugaa

SEQ ID NO: 587585 - RNA, 19 nt, Homo sapiens
  misc_RNA (1)...(19): siRNA sense strand
caaaggggcuuggaagaau

SEQ ID NO: 587586 - RNA, 19 nt, Homo sapiens
  misc_RNA (1)...(19): siRNA sense strand
acacuagacacuccaaaga

SEQ ID NO: 587587 - RNA, 19 nt, Homo sapiens
  misc_RNA (1)...(19): siRNA sense strand
agcaaugucuuccucuuau

SEQ ID NO: 587588 - RNA, 19 nt, Homo sapiens
  misc_RNA (1)...(19): siRNA sense strand
cauaguggcccuacaugau

SEQ ID NO: 587589 - RNA, 19 nt, Homo sapiens
  misc_RNA (1)...(19): siRNA sense strand
gcuuguauucgaagucuuu

SEQ ID NO: 587590 - RNA, 19 nt, Homo sapiens
  misc_RNA (1)...(19): siRNA sense strand
ggacaaaccuucagaucgu

SEQ ID NO: 587591 - RNA, 19 nt, Homo sapiens
  misc_RNA (1)...(19): siRNA sense strand
caacauagcucaggaucug

SEQ ID NO: 587592 - RNA, 19 nt, Homo sapiens
  misc_RNA (1)...(19): siRNA sense strand
ggcaacagcugaacagaug

SEQ ID NO: 587593 - RNA, 19 nt, Homo sapiens
  misc_RNA (1)...(19): siRNA sense strand
gaacuggcaucaaauacuc

SEQ ID NO: 587594 - RNA, 19 nt, Homo sapiens
  misc_RNA (1)...(19): siRNA sense strand
ggaagggaauucagacaca

SEQ ID NO: 587595 - RNA, 19 nt, Homo sapiens
  misc_RNA (1)...(19): siRNA sense strand
uaauggagaugugaacaaa

SEQ ID NO: 587596 - RNA, 19 nt, Homo sapiens
  misc_RNA (1)...(19): siRNA sense strand
ggaagaauucuguggaaga

SEQ ID NO: 587597 - RNA, 19 nt, Homo sapiens
  misc_RNA (1)...(19): siRNA sense strand
gaagaauucuguggaagag

SEQ ID NO: 587598 - RNA, 19 nt, Homo sapiens
  misc_RNA (1)...(19): siRNA sense strand
gaagggaauucagacacaa

SEQ ID NO: 587599 - RNA, 19 nt, Homo sapiens
  misc_RNA (1)...(19): siRNA sense strand
gaauuuagaggugaagaaa

SEQ ID NO: 587600 - RNA, 19 nt, Homo sapiens
  misc_RNA (1)...(19): siRNA sense strand
aaaucaggaugaaugcaua

SEQ ID NO: 587601 - RNA, 19 nt, Homo sapiens
  misc_RNA (1)...(19): siRNA sense strand
caaagagaauagagagaag

SEQ ID NO: 587602 - RNA, 19 nt, Homo sapiens
  misc_RNA (1)...(19): siRNA sense strand
gugaacaaagcuaucaaua

SEQ ID NO: 587603 - RNA, 19 nt, Homo sapiens
  misc_RNA (1)...(19): siRNA sense strand
gaaaggaagaggcggcaau

SEQ ID NO: 587604 - RNA, 19 nt, Homo sapiens
  misc_RNA (1)...(19): siRNA sense strand
caacagaagacuggacuga

SEQ ID NO: 587605 - RNA, 19 nt, Homo sapiens
  misc_RNA (1)...(19): siRNA sense strand
ggaauucagacacaacuuc

SEQ ID NO: 587606 - RNA, 19 nt, Homo sapiens
  misc_RNA (1)...(19): siRNA sense strand
gcaaucaaguggacaaacc

SEQ ID NO: 587607 - RNA, 19 nt, Homo sapiens
  misc_RNA (1)...(19): siRNA sense strand
gcauaguggcccuacauga

SEQ ID NO: 587608 - RNA, 19 nt, Homo sapiens
  misc_RNA (1)...(19): siRNA sense strand
acagaagacuggacugaag

SEQ ID NO: 587609 - RNA, 19 nt, Homo sapiens
  misc_RNA (1)...(19): siRNA sense strand
caacgcaaccacagaaaca

SEQ ID NO: 587610 - RNA, 19 nt, Homo sapiens
  misc_RNA (1)...(19): siRNA sense strand
ugacuucagugagcaguga

SEQ ID NO: 587611 - RNA, 19 nt, Homo sapiens
  misc_RNA (1)...(19): siRNA sense strand
caucaaauacucacaacau

SEQ ID NO: 587612 - RNA, 19 nt, Homo sapiens
  misc_RNA (1)...(19): siRNA sense strand
ggaaacaacaaccggaaag

SEQ ID NO: 587613 - RNA, 19 nt, Homo sapiens
  misc_RNA (1)...(19): siRNA sense strand
cucaggaucugucaaacaa

SEQ ID NO: 587614 - RNA, 19 nt, Homo sapiens
  misc_RNA (1)...(19): siRNA sense strand
ggagaugugaacaaagcua

SEQ ID NO: 587615 - RNA, 19 nt, Homo sapiens
  misc_RNA (1)...(19): siRNA sense strand
aaucguggcagagaauuua

SEQ ID NO: 587616 - RNA, 19 nt, Homo sapiens
  misc_RNA (1)...(19): siRNA sense strand
gggagacuguaggguguaa

SEQ ID NO: 587617 - RNA, 19 nt, Homo sapiens
  misc_RNA (1)...(19): siRNA sense strand
gaauucagacacaacuuca

SEQ ID NO: 587618 - RNA, 19 nt, Homo sapiens
  misc_RNA (1)...(19): siRNA sense strand
gaagaaaagcgagaaagaa

SEQ ID NO: 587619 - RNA, 19 nt, Homo sapiens
  misc_RNA (1)...(19): siRNA sense strand
guaauggagaugugaacaa

SEQ ID NO: 587620 - RNA, 19 nt, Homo sapiens
  misc_RNA (1)...(19): siRNA sense strand
gaagaguggacaacagaag

SEQ ID NO: 587621 - RNA, 19 nt, Homo sapiens
  misc_RNA (1)...(19): siRNA sense strand
acaaagagaauagagagaa

SEQ ID NO: 587622 - RNA, 19 nt, Homo sapiens
  misc_RNA (1)...(19): siRNA sense strand
gagaauagagagaagaaaa

SEQ ID NO: 587623 - RNA, 19 nt, Homo sapiens
  misc_RNA (1)...(19): siRNA sense strand
cagagaauuuagaggugaa

SEQ ID NO: 587624 - RNA, 19 nt, Homo sapiens
  misc_RNA (1)...(19): siRNA sense strand
cauaguggcccuacaugau

SEQ ID NO: 587625 - RNA, 19 nt, Homo sapiens
  misc_RNA (1)...(19): siRNA sense strand
caaaggggcuuggaagaau

SEQ ID NO: 587626 - RNA, 19 nt, Homo sapiens
  misc_RNA (1)...(19): siRNA sense strand
caacaaccggaaaggaaga

SEQ ID NO: 587627 - RNA, 19 nt, Homo sapiens
  misc_RNA (1)...(19): siRNA sense strand
gacuguaggguguaagaaa

SEQ ID NO: 587628 - RNA, 19 nt, Homo sapiens
  misc_RNA (1)...(19): siRNA sense strand
ggaagaguggacaacagaa

SEQ ID NO: 587629 - RNA, 19 nt, Homo sapiens
  misc_RNA (1)...(19): siRNA sense strand
ucaaauacucacaacauag

SEQ ID NO: 587630 - RNA, 19 nt, Homo sapiens
  misc_RNA (1)...(19): siRNA sense strand
gagaugugaacaaagcuau

SEQ ID NO: 587631 - RNA, 19 nt, Homo sapiens
  misc_RNA (1)...(19): siRNA sense strand
gaugugaacaaagcuauca

SEQ ID NO: 587632 - RNA, 19 nt, Homo sapiens
  misc_RNA (1)...(19): siRNA sense strand
gcgucucgcucaagugauc

SEQ ID NO: 587633 - RNA, 19 nt, Homo sapiens
  misc_RNA (1)...(19): siRNA sense strand
gagacuguaggguguaaga

SEQ ID NO: 587634 - RNA, 19 nt, Homo sapiens
  misc_RNA (1)...(19): siRNA sense strand
gggcuuggaagaauucugu

SEQ ID NO: 587635 - RNA, 19 nt, Homo sapiens
  misc_RNA (1)...(19): siRNA sense strand
gcucaggaucugucaaaca

SEQ ID NO: 587636 - RNA, 19 nt, Homo sapiens
  misc_RNA (1)...(19): siRNA sense strand
aaacaacaaccggaaagga

SEQ ID NO: 587637 - RNA, 19 nt, Homo sapiens
  misc_RNA (1)...(19): siRNA sense strand
uagcucaggaucugucaaa

SEQ ID NO: 587638 - RNA, 19 nt, Homo sapiens
  misc_RNA (1)...(19): siRNA sense strand
uaguggcccuacaugauug

SEQ ID NO: 587639 - RNA, 19 nt, Homo sapiens
  misc_RNA (1)...(19): siRNA sense strand
cagaagacuggacugaaga

SEQ ID NO: 587640 - RNA, 19 nt, Homo sapiens
  misc_RNA (1)...(19): siRNA sense strand
caggaucugucaaacaaaa

SEQ ID NO: 587641 - RNA, 19 nt, Homo sapiens
  misc_RNA (1)...(19): siRNA sense strand
caaauacucacaacauagc

SEQ ID NO: 587642 - RNA, 19 nt, Homo sapiens
  misc_RNA (1)...(19): siRNA sense strand
ucagugagcagugaccauu

SEQ ID NO: 587643 - RNA, 19 nt, Homo sapiens
  misc_RNA (1)...(19): siRNA sense strand
cggcaaucguggcagagaa

SEQ ID NO: 587644 - RNA, 19 nt, Homo sapiens
  misc_RNA (1)...(19): siRNA sense strand
acagaugcgucucgcucaa

SEQ ID NO: 587645 - RNA, 19 nt, Homo sapiens
  misc_RNA (1)...(19): siRNA sense strand
uuggaagaauucuguggaa

SEQ ID NO: 587646 - RNA, 19 nt, Homo sapiens
  misc_RNA (1)...(19): siRNA sense strand
aacaacaaccggaaaggaa

SEQ ID NO: 587647 - RNA, 19 nt, Homo sapiens
  misc_RNA (1)...(19): siRNA sense strand
gaaacaacaaccggaaagg

SEQ ID NO: 587648 - RNA, 19 nt, Homo sapiens
  misc_RNA (1)...(19): siRNA sense strand
aaucaacgcaaccacagaa

SEQ ID NO: 587649 - RNA, 19 nt, Homo sapiens
  misc_RNA (1)...(19): siRNA sense strand
gcaaucguggcagagaauu

SEQ ID NO: 587650 - RNA, 19 nt, Homo sapiens
  misc_RNA (1)...(19): siRNA sense strand
caaucguggcagagaauuu

SEQ ID NO: 587651 - RNA, 19 nt, Homo sapiens
  misc_RNA (1)...(19): siRNA sense strand
caacuucaugggagacugu

SEQ ID NO: 587652 - RNA, 19 nt, Homo sapiens
  misc_RNA (1)...(19): siRNA sense strand
auaguggcccuacaugauu

SEQ ID NO: 587653 - RNA, 19 nt, Homo sapiens
  misc_RNA (1)...(19): siRNA sense strand
gcaaccacagaaacaagug

SEQ ID NO: 587654 - RNA, 19 nt, Homo sapiens
  misc_RNA (1)...(19): siRNA sense strand
ucaaguggacaaaccuuca

SEQ ID NO: 587655 - RNA, 19 nt, Homo sapiens
  misc_RNA (1)...(19): siRNA sense strand
uggaagaguggacaacaga

SEQ ID NO: 587656 - RNA, 19 nt, Homo sapiens
  misc_RNA (1)...(19): siRNA sense strand
aagagaauagagagaagaa

SEQ ID NO: 587657 - RNA, 19 nt, Homo sapiens
  misc_RNA (1)...(19): siRNA sense strand
guggaagaguggacaacag

SEQ ID NO: 587658 - RNA, 19 nt, Homo sapiens
  misc_RNA (1)...(19): siRNA sense strand
agugagcagugaccauugu

SEQ ID NO: 587659 - RNA, 19 nt, Homo sapiens
  misc_RNA (1)...(19): siRNA sense strand
aaagagaauagagagaaga

SEQ ID NO: 587660 - RNA, 19 nt, Homo sapiens
  misc_RNA (1)...(19): siRNA sense strand
gaaaagcgagaaagaaucg

SEQ ID NO: 587661 - RNA, 19 nt, Homo sapiens
  misc_RNA (1)...(19): siRNA sense strand
gcugggagcugacacaaua

SEQ ID NO: 587662 - RNA, 19 nt, Homo sapiens
  misc_RNA (1)...(19): siRNA sense strand
ggaauuggcaagugucuua

SEQ ID NO: 587663 - RNA, 19 nt, Homo sapiens
  misc_RNA (1)...(19): siRNA sense strand
gcaagugucuuaaguacau

SEQ ID NO: 587664 - RNA, 19 nt, Homo sapiens
  misc_RNA (1)...(19): siRNA sense strand
gaucacagcugcccaaugc

SEQ ID NO: 587665 - RNA, 19 nt, Homo sapiens
  misc_RNA (1)...(19): siRNA sense strand
ggaaguauaccaagccuuu

SEQ ID NO: 587666 - RNA, 19 nt, Homo sapiens
  misc_RNA (1)...(19): siRNA sense strand
gaagacgcauucaguuuca

SEQ ID NO: 587667 - RNA, 19 nt, Homo sapiens
  misc_RNA (1)...(19): siRNA sense strand
gaucccaugugcuccuuua

SEQ ID NO: 587668 - RNA, 19 nt, Homo sapiens
  misc_RNA (1)...(19): siRNA sense strand
gaagggauauuugacuaug

SEQ ID NO: 587669 - RNA, 19 nt, Homo sapiens
  misc_RNA (1)...(19): siRNA sense strand
caacaaauccucaacuaca

SEQ ID NO: 587670 - RNA, 19 nt, Homo sapiens
  misc_RNA (1)...(19): siRNA sense strand
gaacaggugacgugucuga

SEQ ID NO: 587671 - RNA, 19 nt, Homo sapiens
  misc_RNA (1)...(19): siRNA sense strand
cagcauaugguccugauua

SEQ ID NO: 587672 - RNA, 19 nt, Homo sapiens
  misc_RNA (1)...(19): siRNA sense strand
ccagaucugugaaagugua

SEQ ID NO: 587673 - RNA, 19 nt, Homo sapiens
  misc_RNA (1)...(19): siRNA sense strand
ccaguauggugcauucuuu

SEQ ID NO: 587674 - RNA, 19 nt, Homo sapiens
  misc_RNA (1)...(19): siRNA sense strand
ggaaaacacuauccucuga

SEQ ID NO: 587675 - RNA, 19 nt, Homo sapiens
  misc_RNA (1)...(19): siRNA sense strand
uuaaguacauccuucaaug

SEQ ID NO: 587676 - RNA, 19 nt, Homo sapiens
  misc_RNA (1)...(19): siRNA sense strand
ccaaagcaguggucuuaca

SEQ ID NO: 587677 - RNA, 19 nt, Homo sapiens
  misc_RNA (1)...(19): siRNA sense strand
uagaauaugggcuagguua

SEQ ID NO: 587678 - RNA, 19 nt, Homo sapiens
  misc_RNA (1)...(19): siRNA sense strand
aagcagaugaggauaguua

SEQ ID NO: 587679 - RNA, 19 nt, Homo sapiens
  misc_RNA (1)...(19): siRNA sense strand
gaggauaguuaagccuaaa

SEQ ID NO: 587680 - RNA, 19 nt, Homo sapiens
  misc_RNA (1)...(19): siRNA sense strand
gacggaaugugcaaaguag

SEQ ID NO: 587681 - RNA, 19 nt, Homo sapiens
  misc_RNA (1)...(19): siRNA sense strand
gcuauaaccuugccaacac

SEQ ID NO: 587682 - RNA, 19 nt, Homo sapiens
  misc_RNA (1)...(19): siRNA sense strand
gaaguauaccaagccuuua

SEQ ID NO: 587683 - RNA, 19 nt, Homo sapiens
  misc_RNA (1)...(19): siRNA sense strand
aauaugggcuagguuauga

SEQ ID NO: 587684 - RNA, 19 nt, Homo sapiens
  misc_RNA (1)...(19): siRNA sense strand
ccacugaagggauauuuga

SEQ ID NO: 587685 - RNA, 19 nt, Homo sapiens
  misc_RNA (1)...(19): siRNA sense strand
gaauaugggcuagguuaug

SEQ ID NO: 587686 - RNA, 19 nt, Homo sapiens
  misc_RNA (1)...(19): siRNA sense strand
gugaaaguguacuaaagga

SEQ ID NO: 587687 - RNA, 19 nt, Homo sapiens
  misc_RNA (1)...(19): siRNA sense strand
uaccagaucugugaaagug

SEQ ID NO: 587688 - RNA, 19 nt, Homo sapiens
  misc_RNA (1)...(19): siRNA sense strand
uagaagacgcauucaguuu

SEQ ID NO: 587689 - RNA, 19 nt, Homo sapiens
  misc_RNA (1)...(19): siRNA sense strand
guagaagacgcauucaguu

SEQ ID NO: 587690 - RNA, 19 nt, Homo sapiens
  misc_RNA (1)...(19): siRNA sense strand
uauggugcauucuuugauu

SEQ ID NO: 587691 - RNA, 19 nt, Homo sapiens
  misc_RNA (1)...(19): siRNA sense strand
aagggaaucugaagcaugu

SEQ ID NO: 587692 - RNA, 19 nt, Homo sapiens
  misc_RNA (1)...(19): siRNA sense strand
gccaagagggcgaugauga

SEQ ID NO: 587693 - RNA, 19 nt, Homo sapiens
  misc_RNA (1)...(19): siRNA sense strand
uccaacaaauccucaacua

SEQ ID NO: 587694 - RNA, 19 nt, Homo sapiens
  misc_RNA (1)...(19): siRNA sense strand
cugaagggauauuugacua

SEQ ID NO: 587695 - RNA, 19 nt, Homo sapiens
  misc_RNA (1)...(19): siRNA sense strand
gacggaaauuugagcguau

SEQ ID NO: 587696 - RNA, 19 nt, Homo sapiens
  misc_RNA (1)...(19): siRNA sense strand
ugaggauaguuaagccuaa

SEQ ID NO: 587697 - RNA, 19 nt, Homo sapiens
  misc_RNA (1)...(19): siRNA sense strand
aauauuaccagaucuguga

SEQ ID NO: 587698 - RNA, 19 nt, Homo sapiens
  misc_RNA (1)...(19): siRNA sense strand
ugacggaaugugcaaagua

SEQ ID NO: 587699 - RNA, 19 nt, Homo sapiens
  misc_RNA (1)...(19): siRNA sense strand
cauccggacuccauagaau

SEQ ID NO: 587700 - RNA, 19 nt, Homo sapiens
  misc_RNA (1)...(19): siRNA sense strand
ugacuaugcagcagcuaua

SEQ ID NO: 587701 - RNA, 19 nt, Homo sapiens
  misc_RNA (1)...(19): siRNA sense strand
caggugacgugucugaugu

SEQ ID NO: 587702 - RNA, 19 nt, Homo sapiens
  misc_RNA (1)...(19): siRNA sense strand
gaagggacgguacuacagu

SEQ ID NO: 587703 - RNA, 19 nt, Homo sapiens
  misc_RNA (1)...(19): siRNA sense strand
ucccaaagcaguggucuua

SEQ ID NO: 587704 - RNA, 19 nt, Homo sapiens
  misc_RNA (1)...(19): siRNA sense strand
ccgugucccugcacaaauu

SEQ ID NO: 587705 - RNA, 19 nt, Homo sapiens
  misc_RNA (1)...(19): siRNA sense strand
cugauuaugugcuggaaau

SEQ ID NO: 587706 - RNA, 19 nt, Homo sapiens
  misc_RNA (1)...(19): siRNA sense strand
ggucccgguuuauaucuau

SEQ ID NO: 587707 - RNA, 19 nt, Homo sapiens
  misc_RNA (1)...(19): siRNA sense strand
caggauggcauacaagaug

SEQ ID NO: 587708 - RNA, 19 nt, Homo sapiens
  misc_RNA (1)...(19): siRNA sense strand
gcucgaugcuggacauacu

SEQ ID NO: 587709 - RNA, 19 nt, Homo sapiens
  misc_RNA (1)...(19): siRNA sense strand
uggaggagauggccaccuu

SEQ ID NO: 587710 - RNA, 19 nt, Homo sapiens
  misc_RNA (1)...(19): siRNA sense strand
gcaaaguagcaauuaacug

SEQ ID NO: 587711 - RNA, 19 nt, Homo sapiens
  misc_RNA (1)...(19): siRNA sense strand
gggccaguauggugcauuc

SEQ ID NO: 587712 - RNA, 19 nt, Homo sapiens
  misc_RNA (1)...(19): siRNA sense strand
ccacacugaugcuuaucug

SEQ ID NO: 587713 - RNA, 19 nt, Homo sapiens
  misc_RNA (1)...(19): siRNA sense strand
uaucuauagucccgaguau

SEQ ID NO: 587714 - RNA, 19 nt, Homo sapiens
  misc_RNA (1)...(19): siRNA sense strand
caaagggaaucugaagcau

SEQ ID NO: 587715 - RNA, 19 nt, Homo sapiens
  misc_RNA (1)...(19): siRNA sense strand
gcaaugagccccaccgaau

SEQ ID NO: 587716 - RNA, 19 nt, Homo sapiens
  misc_RNA (1)...(19): siRNA sense strand
gaucugugaaaguguacua

SEQ ID NO: 587717 - RNA, 19 nt, Homo sapiens
  misc_RNA (1)...(19): siRNA sense strand
ugugcaaaguagcaauuaa

SEQ ID NO: 587718 - RNA, 19 nt, Homo sapiens
  misc_RNA (1)...(19): siRNA sense strand
cccagccacugaagggaua

SEQ ID NO: 587719 - RNA, 19 nt, Homo sapiens
  misc_RNA (1)...(19): siRNA sense strand
cccaugugcuccuuuaaca

SEQ ID NO: 587720 - RNA, 19 nt, Homo sapiens
  misc_RNA (1)...(19): siRNA sense strand
gaaauuugagcguauucuc

SEQ ID NO: 587721 - RNA, 19 nt, Homo sapiens
  misc_RNA (1)...(19): siRNA sense strand
cgauugcgacggaaauuug

SEQ ID NO: 587722 - RNA, 19 nt, Homo sapiens
  misc_RNA (1)...(19): siRNA sense strand
ggugacgugucugauguug

SEQ ID NO: 587723 - RNA, 19 nt, Homo sapiens
  misc_RNA (1)...(19): siRNA sense strand
ucaaagggaaucugaagca

SEQ ID NO: 587724 - RNA, 19 nt, Homo sapiens
  misc_RNA (1)...(19): siRNA sense strand
gugacucccuggccaagau

SEQ ID NO: 587725 - RNA, 19 nt, Homo sapiens
  misc_RNA (1)...(19): siRNA sense strand
ccaagagggcgaugaugau

SEQ ID NO: 587726 - RNA, 19 nt, Homo sapiens
  misc_RNA (1)...(19): siRNA sense strand
caaauccucaacuacauca

SEQ ID NO: 587727 - RNA, 19 nt, Homo sapiens
  misc_RNA (1)...(19): siRNA sense strand
uggcaagugucuuaaguac

SEQ ID NO: 587728 - RNA, 19 nt, Homo sapiens
  misc_RNA (1)...(19): siRNA sense strand
gaauuggcaagugucuuaa

SEQ ID NO: 587729 - RNA, 19 nt, Homo sapiens
  misc_RNA (1)...(19): siRNA sense strand
ggaagggacgguacuacag

SEQ ID NO: 587730 - RNA, 19 nt, Homo sapiens
  misc_RNA (1)...(19): siRNA sense strand
ggauuuggaucugcaccau

SEQ ID NO: 587731 - RNA, 19 nt, Homo sapiens
  misc_RNA (1)...(19): siRNA sense strand
ccaagccuuuaaucccaaa

SEQ ID NO: 587732 - RNA, 19 nt, Homo sapiens
  misc_RNA (1)...(19): siRNA sense strand
aaaguguacuaaaggaagu

SEQ ID NO: 587733 - RNA, 19 nt, Homo sapiens
  misc_RNA (1)...(19): siRNA sense strand
agaagacgcauucaguuuc

SEQ ID NO: 587734 - RNA, 19 nt, Homo sapiens
  misc_RNA (1)...(19): siRNA sense strand
gaugcuguccugggaauau

SEQ ID NO: 587735 - RNA, 19 nt, Homo sapiens
  misc_RNA (1)...(19): siRNA sense strand
cauucaggauggcauacaa

SEQ ID NO: 587736 - RNA, 19 nt, Homo sapiens
  misc_RNA (1)...(19): siRNA sense strand
gggaagggacgguacuaca

SEQ ID NO: 587737 - RNA, 19 nt, Homo sapiens
  misc_RNA (1)...(19): siRNA sense strand
gaccgugucccugcacaaa

SEQ ID NO: 587738 - RNA, 19 nt, Homo sapiens
  misc_RNA (1)...(19): siRNA sense strand
ucuauagucccgaguaugu

SEQ ID NO: 587739 - RNA, 19 nt, Homo sapiens
  misc_RNA (1)...(19): siRNA sense strand
caucaaagggaaucugaag

SEQ ID NO: 587740 - RNA, 19 nt, Homo sapiens
  misc_RNA (1)...(19): siRNA sense strand
aaguauaccaagccuuuaa

SEQ ID NO: 587741 - RNA, 19 nt, Homo sapiens
  misc_RNA (1)...(19): siRNA sense strand
aacaaauccucaacuacau

SEQ ID NO: 587742 - RNA, 19 nt, Homo sapiens
  misc_RNA (1)...(19): siRNA sense strand
gauaguuaagccuaaagug

SEQ ID NO: 587743 - RNA, 19 nt, Homo sapiens
  misc_RNA (1)...(19): siRNA sense strand
gcaaagaaagaugaagcau

SEQ ID NO: 587744 - RNA, 19 nt, Homo sapiens
  misc_RNA (1)...(19): siRNA sense strand
ccaccgaauccaacaaauc

SEQ ID NO: 587745 - RNA, 19 nt, Homo sapiens
  misc_RNA (1)...(19): siRNA sense strand
cuuccacacugaugcuuau

SEQ ID NO: 587746 - RNA, 19 nt, Homo sapiens
  misc_RNA (1)...(19): siRNA sense strand
ccgaguaugucaguaugug

SEQ ID NO: 587747 - RNA, 19 nt, Homo sapiens
  misc_RNA (1)...(19): siRNA sense strand
ugaaaguguacuaaaggaa

SEQ ID NO: 587748 - RNA, 19 nt, Homo sapiens
  misc_RNA (1)...(19): siRNA sense strand
aggaacaggugacgugucu

SEQ ID NO: 587749 - RNA, 19 nt, Homo sapiens
  misc_RNA (1)...(19): siRNA sense strand
gauugcgacggaaauuuga

SEQ ID NO: 587750 - RNA, 19 nt, Homo sapiens
  misc_RNA (1)...(19): siRNA sense strand
gcagaugaggauaguuaag

SEQ ID NO: 587751 - RNA, 19 nt, Homo sapiens
  misc_RNA (1)...(19): siRNA sense strand
ggugcauucuuugauugaa

SEQ ID NO: 587752 - RNA, 19 nt, Homo sapiens
  misc_RNA (1)...(19): siRNA sense strand
aggauggcauacaagauga

SEQ ID NO: 587753 - RNA, 19 nt, Homo sapiens
  misc_RNA (1)...(19): siRNA sense strand
cauaagcagaugaggauag

SEQ ID NO: 587754 - RNA, 19 nt, Homo sapiens
  misc_RNA (1)...(19): siRNA sense strand
cuacguggauuuggaucug

SEQ ID NO: 587755 - RNA, 19 nt, Homo sapiens
  misc_RNA (1)...(19): siRNA sense strand
ucuggaggguggcaucaug

SEQ ID NO: 587756 - RNA, 19 nt, Homo sapiens
  misc_RNA (1)...(19): siRNA sense strand
gaucauccggacuccauag

SEQ ID NO: 587757 - RNA, 19 nt, Homo sapiens
  misc_RNA (1)...(19): siRNA sense strand
gugcauucuuugauugaag

SEQ ID NO: 587758 - RNA, 19 nt, Homo sapiens
  misc_RNA (1)...(19): siRNA sense strand
gcauaagcagaugaggaua

SEQ ID NO: 587759 - RNA, 19 nt, Homo sapiens
  misc_RNA (1)...(19): siRNA sense strand
uccagaaggucagccaaga

SEQ ID NO: 587760 - RNA, 19 nt, Homo sapiens
  misc_RNA (1)...(19): siRNA sense strand
uaaguacauccuucaaugg

SEQ ID NO: 587761 - RNA, 19 nt, Homo sapiens
  misc_RNA (1)...(19): siRNA sense strand
gaacagaucucagaaauga

SEQ ID NO: 587762 - RNA, 19 nt, Homo sapiens
  misc_RNA (1)...(19): siRNA sense strand
gcaaggagguguauuucua

SEQ ID NO: 587763 - RNA, 19 nt, Homo sapiens
  misc_RNA (1)...(19): siRNA sense strand
cuacacagguuccuacaua

SEQ ID NO: 587764 - RNA, 19 nt, Homo sapiens
  misc_RNA (1)...(19): siRNA sense strand
gaaggacgauuacuagcaa

SEQ ID NO: 587765 - RNA, 19 nt, Homo sapiens
  misc_RNA (1)...(19): siRNA sense strand
gguguucgcuuuaaugguu

SEQ ID NO: 587766 - RNA, 19 nt, Homo sapiens
  misc_RNA (1)...(19): siRNA sense strand
caucagacuuggaaagauu

SEQ ID NO: 587767 - RNA, 19 nt, Homo sapiens
  misc_RNA (1)...(19): siRNA sense strand
acaauuggcuuaacuucaa

SEQ ID NO: 587768 - RNA, 19 nt, Homo sapiens
  misc_RNA (1)...(19): siRNA sense strand
gguugaagacaucauauua

SEQ ID NO: 587769 - RNA, 19 nt, Homo sapiens
  misc_RNA (1)...(19): siRNA sense strand
gcgacugccuugccauuaa

SEQ ID NO: 587770 - RNA, 19 nt, Homo sapiens
  misc_RNA (1)...(19): siRNA sense strand
gaaauuccacuucgaguuc

SEQ ID NO: 587771 - RNA, 19 nt, Homo sapiens
  misc_RNA (1)...(19): siRNA sense strand
uuggaaagauucacgcuua

SEQ ID NO: 587772 - RNA, 19 nt, Homo sapiens
  misc_RNA (1)...(19): siRNA sense strand
gaacuugacccuggacuau

SEQ ID NO: 587773 - RNA, 19 nt, Homo sapiens
  misc_RNA (1)...(19): siRNA sense strand
guagagagcuaugguuaca

SEQ ID NO: 587774 - RNA, 19 nt, Homo sapiens
  misc_RNA (1)...(19): siRNA sense strand
acuauuaccucuuggauau

SEQ ID NO: 587775 - RNA, 19 nt, Homo sapiens
  misc_RNA (1)...(19): siRNA sense strand
gcugggaccuugaugacaa

SEQ ID NO: 587776 - RNA, 19 nt, Homo sapiens
  misc_RNA (1)...(19): siRNA sense strand
ggaccuugaugacaacaau

SEQ ID NO: 587777 - RNA, 19 nt, Homo sapiens
  misc_RNA (1)...(19): siRNA sense strand
gcuaugguguucgcuuuaa

SEQ ID NO: 587778 - RNA, 19 nt, Homo sapiens
  misc_RNA (1)...(19): siRNA sense strand
cgagaagggugugcaagaa

SEQ ID NO: 587779 - RNA, 19 nt, Homo sapiens
  misc_RNA (1)...(19): siRNA sense strand
gagcaauucaagugugaua

SEQ ID NO: 587780 - RNA, 19 nt, Homo sapiens
  misc_RNA (1)...(19): siRNA sense strand
ucucagaaaugaauaugga

SEQ ID NO: 587781 - RNA, 19 nt, Homo sapiens
  misc_RNA (1)...(19): siRNA sense strand
agagggaaguuaacagcua

SEQ ID NO: 587782 - RNA, 19 nt, Homo sapiens
  misc_RNA (1)...(19): siRNA sense strand
gagaaagccugagcgaucu

SEQ ID NO: 587783 - RNA, 19 nt, Homo sapiens
  misc_RNA (1)...(19): siRNA sense strand
caauucaagugugauacua

SEQ ID NO: 587784 - RNA, 19 nt, Homo sapiens
  misc_RNA (1)...(19): siRNA sense strand
gcauugaacagaucucaga

SEQ ID NO: 587785 - RNA, 19 nt, Homo sapiens
  misc_RNA (1)...(19): siRNA sense strand
cagcuaugguguucgcuuu

SEQ ID NO: 587786 - RNA, 19 nt, Homo sapiens
  misc_RNA (1)...(19): siRNA sense strand
ucaccacuauuaccucuug

SEQ ID NO: 587787 - RNA, 19 nt, Homo sapiens
  misc_RNA (1)...(19): siRNA sense strand
caacauuuccuguaucaag

SEQ ID NO: 587788 - RNA, 19 nt, Homo sapiens
  misc_RNA (1)...(19): siRNA sense strand
cuacuguccucaccacuau

SEQ ID NO: 587789 - RNA, 19 nt, Homo sapiens
  misc_RNA (1)...(19): siRNA sense strand
ccagucccaucccgaaauu

SEQ ID NO: 587790 - RNA, 19 nt, Homo sapiens
  misc_RNA (1)...(19): siRNA sense strand
gauaagcuccccaacauuu

SEQ ID NO: 587791 - RNA, 19 nt, Homo sapiens
  misc_RNA (1)...(19): siRNA sense strand
cccuggaucugcauaaauu

SEQ ID NO: 587792 - RNA, 19 nt, Homo sapiens
  misc_RNA (1)...(19): siRNA sense strand
caaggccauugauaucuau

SEQ ID NO: 587793 - RNA, 19 nt, Homo sapiens
  misc_RNA (1)...(19): siRNA sense strand
gaaagauucacgcuuagca

SEQ ID NO: 587794 - RNA, 19 nt, Homo sapiens
  misc_RNA (1)...(19): siRNA sense strand
ucccaaaggucgacaagug

SEQ ID NO: 587795 - RNA, 19 nt, Homo sapiens
  misc_RNA (1)...(19): siRNA sense strand
gaaagccucagcccacuca

SEQ ID NO: 587796 - RNA, 19 nt, Homo sapiens
  misc_RNA (1)...(19): siRNA sense strand
ggaaggacgauuacuagca

SEQ ID NO: 587797 - RNA, 19 nt, Homo sapiens
  misc_RNA (1)...(19): siRNA sense strand
acucacaucugcgggauaa

SEQ ID NO: 587798 - RNA, 19 nt, Homo sapiens
  misc_RNA (1)...(19): siRNA sense strand
caugaagauuccaaugaga

SEQ ID NO: 587799 - RNA, 19 nt, Homo sapiens
  misc_RNA (1)...(19): siRNA sense strand
ugacugaggagcugcauau

SEQ ID NO: 587800 - RNA, 19 nt, Homo sapiens
  misc_RNA (1)...(19): siRNA sense strand
ccaugaagauuccaaugag

SEQ ID NO: 587801 - RNA, 19 nt, Homo sapiens
  misc_RNA (1)...(19): siRNA sense strand
uaacagcuaccuugugcaa

SEQ ID NO: 587802 - RNA, 19 nt, Homo sapiens
  misc_RNA (1)...(19): siRNA sense strand
ucacgagcauugaacagau

SEQ ID NO: 587803 - RNA, 19 nt, Homo sapiens
  misc_RNA (1)...(19): siRNA sense strand
gcagccagggugacaauug

SEQ ID NO: 587804 - RNA, 19 nt, Homo sapiens
  misc_RNA (1)...(19): siRNA sense strand
uugaacagaucucagaaau

SEQ ID NO: 587805 - RNA, 19 nt, Homo sapiens
  misc_RNA (1)...(19): siRNA sense strand
gagaccacccugaacuuga

SEQ ID NO: 587806 - RNA, 19 nt, Homo sapiens
  misc_RNA (1)...(19): siRNA sense strand
uacauacgccugauacuga

SEQ ID NO: 587807 - RNA, 19 nt, Homo sapiens
  misc_RNA (1)...(19): siRNA sense strand
uaaauucccuauggacaag

SEQ ID NO: 587808 - RNA, 19 nt, Homo sapiens
  misc_RNA (1)...(19): siRNA sense strand
gcgagaagggugugcaaga

SEQ ID NO: 587809 - RNA, 19 nt, Homo sapiens
  misc_RNA (1)...(19): siRNA sense strand
cuagcaaggagguguauuu

SEQ ID NO: 587810 - RNA, 19 nt, Homo sapiens
  misc_RNA (1)...(19): siRNA sense strand
aauauggacuacacgauca

SEQ ID NO: 587811 - RNA, 19 nt, Homo sapiens
  misc_RNA (1)...(19): siRNA sense strand
caagugugauacuaacagu

SEQ ID NO: 587812 - RNA, 19 nt, Homo sapiens
  misc_RNA (1)...(19): siRNA sense strand
gcauaucccucaguucacu

SEQ ID NO: 587813 - RNA, 19 nt, Homo sapiens
  misc_RNA (1)...(19): siRNA sense strand
gcuacuuucugaacagcaa

SEQ ID NO: 587814 - RNA, 19 nt, Homo sapiens
  misc_RNA (1)...(19): siRNA sense strand
cagaaaugaauauggacua

SEQ ID NO: 587815 - RNA, 19 nt, Homo sapiens
  misc_RNA (1)...(19): siRNA sense strand
ccucuucccucuggccuuu

SEQ ID NO: 587816 - RNA, 19 nt, Homo sapiens
  misc_RNA (1)...(19): siRNA sense strand
gccaagagaaggacaguag

SEQ ID NO: 587817 - RNA, 19 nt, Homo sapiens
  misc_RNA (1)...(19): siRNA sense strand
uuaaggagcaauucaagug

SEQ ID NO: 587818 - RNA, 19 nt, Homo sapiens
  misc_RNA (1)...(19): siRNA sense strand
gagcgacugccuugccauu

SEQ ID NO: 587819 - RNA, 19 nt, Homo sapiens
  misc_RNA (1)...(19): siRNA sense strand
cggcacagcuaugguguuc

SEQ ID NO: 587820 - RNA, 19 nt, Homo sapiens
  misc_RNA (1)...(19): siRNA sense strand
gggaacgccauccacauga

SEQ ID NO: 587821 - RNA, 19 nt, Homo sapiens
  misc_RNA (1)...(19): siRNA sense strand
uguggagaaucgcguguuu

SEQ ID NO: 587822 - RNA, 19 nt, Homo sapiens
  misc_RNA (1)...(19): siRNA sense strand
gaaccucuucaacugcaaa

SEQ ID NO: 587823 - RNA, 19 nt, Homo sapiens
  misc_RNA (1)...(19): siRNA sense strand
cccaacauuuccuguauca

SEQ ID NO: 587824 - RNA, 19 nt, Homo sapiens
  misc_RNA (1)...(19): siRNA sense strand
gacaauuggcuuaacuuca

SEQ ID NO: 587825 - RNA, 19 nt, Homo sapiens
  misc_RNA (1)...(19): siRNA sense strand
caagucuacuggccuacug

SEQ ID NO: 587826 - RNA, 19 nt, Homo sapiens
  misc_RNA (1)...(19): siRNA sense strand
aagauucacgcuuagcaua

SEQ ID NO: 587827 - RNA, 19 nt, Homo sapiens
  misc_RNA (1)...(19): siRNA sense strand
ccaggcugaugacaguauu

SEQ ID NO: 587828 - RNA, 19 nt, Homo sapiens
  misc_RNA (1)...(19): siRNA sense strand
ggugacaauuggcuuaacu

SEQ ID NO: 587829 - RNA, 19 nt, Homo sapiens
  misc_RNA (1)...(19): siRNA sense strand
ugguagagagcuaugguua

SEQ ID NO: 587830 - RNA, 19 nt, Homo sapiens
  misc_RNA (1)...(19): siRNA sense strand
ccugacugcuacuuucuga

SEQ ID NO: 587831 - RNA, 19 nt, Homo sapiens
  misc_RNA (1)...(19): siRNA sense strand
cgacugccuugccauuaag

SEQ ID NO: 587832 - RNA, 19 nt, Homo sapiens
  misc_RNA (1)...(19): siRNA sense strand
ggacaguagcucagagucu

SEQ ID NO: 587833 - RNA, 19 nt, Homo sapiens
  misc_RNA (1)...(19): siRNA sense strand
gaaaugaauauggacuaca

SEQ ID NO: 587834 - RNA, 19 nt, Homo sapiens
  misc_RNA (1)...(19): siRNA sense strand
uguccuugcuggaguaugu

SEQ ID NO: 587835 - RNA, 19 nt, Homo sapiens
  misc_RNA (1)...(19): siRNA sense strand
uuacacgguugaagacauc

SEQ ID NO: 587836 - RNA, 19 nt, Homo sapiens
  misc_RNA (1)...(19): siRNA sense strand
ggaacgccauccacaugac

SEQ ID NO: 587837 - RNA, 19 nt, Homo sapiens
  misc_RNA (1)...(19): siRNA sense strand
acagaucucagaaaugaau

SEQ ID NO: 587838 - RNA, 19 nt, Homo sapiens
  misc_RNA (1)...(19): siRNA sense strand
acauacgccugauacugaa

SEQ ID NO: 587839 - RNA, 19 nt, Homo sapiens
  misc_RNA (1)...(19): siRNA sense strand
uaacuucaaugcucauccu

SEQ ID NO: 587840 - RNA, 19 nt, Homo sapiens
  misc_RNA (1)...(19): siRNA sense strand
gcaauucaagugugauacu

SEQ ID NO: 587841 - RNA, 19 nt, Homo sapiens
  misc_RNA (1)...(19): siRNA sense strand
ccugcaaccuggugguaga

SEQ ID NO: 587842 - RNA, 19 nt, Homo sapiens
  misc_RNA (1)...(19): siRNA sense strand
gagaagggugugcaagaag

SEQ ID NO: 587843 - RNA, 19 nt, Homo sapiens
  misc_RNA (1)...(19): siRNA sense strand
cagggugacaauuggcuua

SEQ ID NO: 587844 - RNA, 19 nt, Homo sapiens
  misc_RNA (1)...(19): siRNA sense strand
cagccagggugacaauugg

SEQ ID NO: 587845 - RNA, 19 nt, Homo sapiens
  misc_RNA (1)...(19): siRNA sense strand
cugcauaucccucaguuca

SEQ ID NO: 587846 - RNA, 19 nt, Homo sapiens
  misc_RNA (1)...(19): siRNA sense strand
acuaucggaugcaugagaa

SEQ ID NO: 587847 - RNA, 19 nt, Homo sapiens
  misc_RNA (1)...(19): siRNA sense strand
ccauuaaggagcaauucaa

SEQ ID NO: 587848 - RNA, 19 nt, Homo sapiens
  misc_RNA (1)...(19): siRNA sense strand
aaaugaauauggacuacac

SEQ ID NO: 587849 - RNA, 19 nt, Homo sapiens
  misc_RNA (1)...(19): siRNA sense strand
ugaccaccaucgacucaca

SEQ ID NO: 587850 - RNA, 19 nt, Homo sapiens
  misc_RNA (1)...(19): siRNA sense strand
gcauccgacucaccacuac

SEQ ID NO: 587851 - RNA, 19 nt, Homo sapiens
  misc_RNA (1)...(19): siRNA sense strand
ugaugugacuguggagaau

SEQ ID NO: 587852 - RNA, 19 nt, Homo sapiens
  misc_RNA (1)...(19): siRNA sense strand
cuccuucgaucucuuuaau

SEQ ID NO: 587853 - RNA, 19 nt, Homo sapiens
  misc_RNA (1)...(19): siRNA sense strand
aggagcaauucaaguguga

SEQ ID NO: 587854 - RNA, 19 nt, Homo sapiens
  misc_RNA (1)...(19): siRNA sense strand
gaugacaacaaugacaaga

SEQ ID NO: 587855 - RNA, 19 nt, Homo sapiens
  misc_RNA (1)...(19): siRNA sense strand
gauacugaaguuccagguu

SEQ ID NO: 587856 - RNA, 19 nt, Homo sapiens
  misc_RNA (1)...(19): siRNA sense strand
ggacgauuacuagcaagga

SEQ ID NO: 587857 - RNA, 19 nt, Homo sapiens
  misc_RNA (1)...(19): siRNA sense strand
guuacacgguugaagacau

SEQ ID NO: 587858 - RNA, 19 nt, Homo sapiens
  misc_RNA (1)...(19): siRNA sense strand
ucuauauccucgugugcuu

SEQ ID NO: 587859 - RNA, 19 nt, Homo sapiens
  misc_RNA (1)...(19): siRNA sense strand
agaaaugaauauggacuac

SEQ ID NO: 587860 - RNA, 19 nt, Homo sapiens
  misc_RNA (1)...(19): siRNA sense strand
acuacacgaucacgauguu

SEQ ID NO: 587861 - RNA, 19 nt, Homo sapiens
  misc_RNA (1)...(19): siRNA sense strand
uaaaggagcugcaggagaa

SEQ ID NO: 587862 - RNA, 19 nt, Homo sapiens
  misc_RNA (1)...(19): siRNA sense strand
gacaacaucuggacaguga

SEQ ID NO: 587863 - RNA, 19 nt, Homo sapiens
  misc_RNA (1)...(19): siRNA sense strand
gaagaagcgugacauacau

SEQ ID NO: 587864 - RNA, 19 nt, Homo sapiens
  misc_RNA (1)...(19): siRNA sense strand
agaagaaucucgacagaau

SEQ ID NO: 587865 - RNA, 19 nt, Homo sapiens
  misc_RNA (1)...(19): siRNA sense strand
gguggaggcucgaacauug

SEQ ID NO: 587866 - RNA, 19 nt, Homo sapiens
  misc_RNA (1)...(19): siRNA sense strand
gaagagcccugguauucca

SEQ ID NO: 587867 - RNA, 19 nt, Homo sapiens
  misc_RNA (1)...(19): siRNA sense strand
gaacauugaaggaagagaa

SEQ ID NO: 587868 - RNA, 19 nt, Homo sapiens
  misc_RNA (1)...(19): siRNA sense strand
gaagaaucucgacagaaua

SEQ ID NO: 587869 - RNA, 19 nt, Homo sapiens
  misc_RNA (1)...(19): siRNA sense strand
gacaaucagucaacucaau

SEQ ID NO: 587870 - RNA, 19 nt, Homo sapiens
  misc_RNA (1)...(19): siRNA sense strand
gagcuuguccgaacucaaa

SEQ ID NO: 587871 - RNA, 19 nt, Homo sapiens
  misc_RNA (1)...(19): siRNA sense strand
uggaacagcuacaagauga

SEQ ID NO: 587872 - RNA, 19 nt, Homo sapiens
  misc_RNA (1)...(19): siRNA sense strand
caaucaacauccucacauu

SEQ ID NO: 587873 - RNA, 19 nt, Homo sapiens
  misc_RNA (1)...(19): siRNA sense strand
gagagacugugugaacaaa

SEQ ID NO: 587874 - RNA, 19 nt, Homo sapiens
  misc_RNA (1)...(19): siRNA sense strand
agaaacaaguggaacauca

SEQ ID NO: 587875 - RNA, 19 nt, Homo sapiens
  misc_RNA (1)...(19): siRNA sense strand
agaaggagauggaggacaa

SEQ ID NO: 587876 - RNA, 19 nt, Homo sapiens
  misc_RNA (1)...(19): siRNA sense strand
gaggagaggcuguggaaga

SEQ ID NO: 587877 - RNA, 19 nt, Homo sapiens
  misc_RNA (1)...(19): siRNA sense strand
guaccaagaacuagcagua

SEQ ID NO: 587878 - RNA, 19 nt, Homo sapiens
  misc_RNA (1)...(19): siRNA sense strand
caaaggaagagcccuggua

SEQ ID NO: 587879 - RNA, 19 nt, Homo sapiens
  misc_RNA (1)...(19): siRNA sense strand
gaaauacacaaagcacaaa

SEQ ID NO: 587880 - RNA, 19 nt, Homo sapiens
  misc_RNA (1)...(19): siRNA sense strand
ugaaacagcagaagaaaca

SEQ ID NO: 587881 - RNA, 19 nt, Homo sapiens
  misc_RNA (1)...(19): siRNA sense strand
ggacggagcaguggagaga

SEQ ID NO: 587882 - RNA, 19 nt, Homo sapiens
  misc_RNA (1)...(19): siRNA sense strand
gcuacaagaugaggccaaa

SEQ ID NO: 587883 - RNA, 19 nt, Homo sapiens
  misc_RNA (1)...(19): siRNA sense strand
uggaaggucuggagggaaa

SEQ ID NO: 587884 - RNA, 19 nt, Homo sapiens
  misc_RNA (1)...(19): siRNA sense strand
gaauaucagcaaaggaaga

SEQ ID NO: 587885 - RNA, 19 nt, Homo sapiens
  misc_RNA (1)...(19): siRNA sense strand
gagaggauguggaaaaugu

SEQ ID NO: 587886 - RNA, 19 nt, Homo sapiens
  misc_RNA (1)...(19): siRNA sense strand
gcagaagaaacaaguggaa

SEQ ID NO: 587887 - RNA, 19 nt, Homo sapiens
  misc_RNA (1)...(19): siRNA sense strand
gcuggaagaagcaaagaaa

SEQ ID NO: 587888 - RNA, 19 nt, Homo sapiens
  misc_RNA (1)...(19): siRNA sense strand
ucgaggaucugaacaacga

SEQ ID NO: 587889 - RNA, 19 nt, Homo sapiens
  misc_RNA (1)...(19): siRNA sense strand
gagcagaggcuacgcaaac

SEQ ID NO: 587890 - RNA, 19 nt, Homo sapiens
  misc_RNA (1)...(19): siRNA sense strand
caaauggagcgguuagaga

SEQ ID NO: 587891 - RNA, 19 nt, Homo sapiens
  misc_RNA (1)...(19): siRNA sense strand
ggagagacugugugaacaa

SEQ ID NO: 587892 - RNA, 19 nt, Homo sapiens
  misc_RNA (1)...(19): siRNA sense strand
gcaguuggagcagcaagua

SEQ ID NO: 587893 - RNA, 19 nt, Homo sapiens
  misc_RNA (1)...(19): siRNA sense strand
uuagaagaaucucgacaga

SEQ ID NO: 587894 - RNA, 19 nt, Homo sapiens
  misc_RNA (1)...(19): siRNA sense strand
gaacaucagcuggaagaag

SEQ ID NO: 587895 - RNA, 19 nt, Homo sapiens
  misc_RNA (1)...(19): siRNA sense strand
aagaauaucagcaaaggaa

SEQ ID NO: 587896 - RNA, 19 nt, Homo sapiens
  misc_RNA (1)...(19): siRNA sense strand
gguuacagcagaccauaaa

SEQ ID NO: 587897 - RNA, 19 nt, Homo sapiens
  misc_RNA (1)...(19): siRNA sense strand
gaagaccacccuuuaccau

SEQ ID NO: 587898 - RNA, 19 nt, Homo sapiens
  misc_RNA (1)...(19): siRNA sense strand
aagaaucucgacagaauaa

SEQ ID NO: 587899 - RNA, 19 nt, Homo sapiens
  misc_RNA (1)...(19): siRNA sense strand
cuacacagcagcaggaaga

SEQ ID NO: 587900 - RNA, 19 nt, Homo sapiens
  misc_RNA (1)...(19): siRNA sense strand
gaagagaagaagcgugaca

SEQ ID NO: 587901 - RNA, 19 nt, Homo sapiens
  misc_RNA (1)...(19): siRNA sense strand
gaagaaacaaguggaacau

SEQ ID NO: 587902 - RNA, 19 nt, Homo sapiens
  misc_RNA (1)...(19): siRNA sense strand
gaaucucgacagaauaaau

SEQ ID NO: 587903 - RNA, 19 nt, Homo sapiens
  misc_RNA (1)...(19): siRNA sense strand
gaggagaggcugcgaaagg

SEQ ID NO: 587904 - RNA, 19 nt, Homo sapiens
  misc_RNA (1)...(19): siRNA sense strand
ggauagccaguaccaagaa

SEQ ID NO: 587905 - RNA, 19 nt, Homo sapiens
  misc_RNA (1)...(19): siRNA sense strand
ugaaauacacaaagcacaa

SEQ ID NO: 587906 - RNA, 19 nt, Homo sapiens
  misc_RNA (1)...(19): siRNA sense strand
gcaaagaaaacaaacaaug

SEQ ID NO: 587907 - RNA, 19 nt, Homo sapiens
  misc_RNA (1)...(19): siRNA sense strand
gagacgagagcuuggauuc

SEQ ID NO: 587908 - RNA, 19 nt, Homo sapiens
  misc_RNA (1)...(19): siRNA sense strand
agaagaagcgugacauaca

SEQ ID NO: 587909 - RNA, 19 nt, Homo sapiens
  misc_RNA (1)...(19): siRNA sense strand
gacaguagcccugagacaa

SEQ ID NO: 587910 - RNA, 19 nt, Homo sapiens
  misc_RNA (1)...(19): siRNA sense strand
uuauggaccucccgaagga

SEQ ID NO: 587911 - RNA, 19 nt, Homo sapiens
  misc_RNA (1)...(19): siRNA sense strand
ugacauacaucggauacag

SEQ ID NO: 587912 - RNA, 19 nt, Homo sapiens
  misc_RNA (1)...(19): siRNA sense strand
gagcgagacgaauaugcua

SEQ ID NO: 587913 - RNA, 19 nt, Homo sapiens
  misc_RNA (1)...(19): siRNA sense strand
gcacaaauggagcgguuag

SEQ ID NO: 587914 - RNA, 19 nt, Homo sapiens
  misc_RNA (1)...(19): siRNA sense strand
ucagucaacucaaugaaaa

SEQ ID NO: 587915 - RNA, 19 nt, Homo sapiens
  misc_RNA (1)...(19): siRNA sense strand
cgaagaagaguccaaggau

SEQ ID NO: 587916 - RNA, 19 nt, Homo sapiens
  misc_RNA (1)...(19): siRNA sense strand
caacauccucacauuggaa

SEQ ID NO: 587917 - RNA, 19 nt, Homo sapiens
  misc_RNA (1)...(19): siRNA sense strand
gcgagacgaauaugcuaaa

SEQ ID NO: 587918 - RNA, 19 nt, Homo sapiens
  misc_RNA (1)...(19): siRNA sense strand
agagaagaagcgugacaua

SEQ ID NO: 587919 - RNA, 19 nt, Homo sapiens
  misc_RNA (1)...(19): siRNA sense strand
gagaagaagcgugacauac

SEQ ID NO: 587920 - RNA, 19 nt, Homo sapiens
  misc_RNA (1)...(19): siRNA sense strand
acaaugaaauacacaaagc

SEQ ID NO: 587921 - RNA, 19 nt, Homo sapiens
  misc_RNA (1)...(19): siRNA sense strand
aggagaggcuguggaagaa

SEQ ID NO: 587922 - RNA, 19 nt, Homo sapiens
  misc_RNA (1)...(19): siRNA sense strand
agacgaauaugcuaaacac

SEQ ID NO: 587923 - RNA, 19 nt, Homo sapiens
  misc_RNA (1)...(19): siRNA sense strand
uaaaacaaguccagcuaga

SEQ ID NO: 587924 - RNA, 19 nt, Homo sapiens
  misc_RNA (1)...(19): siRNA sense strand
ucaacauccucacauugga

SEQ ID NO: 587925 - RNA, 19 nt, Homo sapiens
  misc_RNA (1)...(19): siRNA sense strand
cauugaaacagcagaagaa

SEQ ID NO: 587926 - RNA, 19 nt, Homo sapiens
  misc_RNA (1)...(19): siRNA sense strand
gugagaggcugcgaaagca

SEQ ID NO: 587927 - RNA, 19 nt, Homo sapiens
  misc_RNA (1)...(19): siRNA sense strand
gcuagagcgagacgaauau

SEQ ID NO: 587928 - RNA, 19 nt, Homo sapiens
  misc_RNA (1)...(19): siRNA sense strand
gggauagccaguaccaaga

SEQ ID NO: 587929 - RNA, 19 nt, Homo sapiens
  misc_RNA (1)...(19): siRNA sense strand
agaccacccuuuaccauac

SEQ ID NO: 587930 - RNA, 19 nt, Homo sapiens
  misc_RNA (1)...(19): siRNA sense strand
aggaagagcccugguauuc

SEQ ID NO: 587931 - RNA, 19 nt, Homo sapiens
  misc_RNA (1)...(19): siRNA sense strand
aaagagcgcacugcaguug

SEQ ID NO: 587932 - RNA, 19 nt, Homo sapiens
  misc_RNA (1)...(19): siRNA sense strand
cagcaggagcaaagacaaa

SEQ ID NO: 587933 - RNA, 19 nt, Homo sapiens
  misc_RNA (1)...(19): siRNA sense strand
aaaggaagagcccugguau

SEQ ID NO: 587934 - RNA, 19 nt, Homo sapiens
  misc_RNA (1)...(19): siRNA sense strand
gaaacaaguggaacaucag

SEQ ID NO: 587935 - RNA, 19 nt, Homo sapiens
  misc_RNA (1)...(19): siRNA sense strand
caguagcccuggagucaag

SEQ ID NO: 587936 - RNA, 19 nt, Homo sapiens
  misc_RNA (1)...(19): siRNA sense strand
gcugaacgcacacgugaca

SEQ ID NO: 587937 - RNA, 19 nt, Homo sapiens
  misc_RNA (1)...(19): siRNA sense strand
ggaaaaggcagacuugaag

SEQ ID NO: 587938 - RNA, 19 nt, Homo sapiens
  misc_RNA (1)...(19): siRNA sense strand
ggcaggagaggauguggaa

SEQ ID NO: 587939 - RNA, 19 nt, Homo sapiens
  misc_RNA (1)...(19): siRNA sense strand
aagaccacccuuuaccaua

SEQ ID NO: 587940 - RNA, 19 nt, Homo sapiens
  misc_RNA (1)...(19): siRNA sense strand
agacgaggagcaccuagaa

SEQ ID NO: 587941 - RNA, 19 nt, Homo sapiens
  misc_RNA (1)...(19): siRNA sense strand
gaaccacaagcucgacaag

SEQ ID NO: 587942 - RNA, 19 nt, Homo sapiens
  misc_RNA (1)...(19): siRNA sense strand
caaucagucaacucaauga

SEQ ID NO: 587943 - RNA, 19 nt, Homo sapiens
  misc_RNA (1)...(19): siRNA sense strand
gguuagagacaaucaacau

SEQ ID NO: 587944 - RNA, 19 nt, Homo sapiens
  misc_RNA (1)...(19): siRNA sense strand
gaggaggagaggcugcaaa

SEQ ID NO: 587945 - RNA, 19 nt, Homo sapiens
  misc_RNA (1)...(19): siRNA sense strand
ugaccucugugguggaaca

SEQ ID NO: 587946 - RNA, 19 nt, Homo sapiens
  misc_RNA (1)...(19): siRNA sense strand
gagacgaauaugcuaaaca

SEQ ID NO: 587947 - RNA, 19 nt, Homo sapiens
  misc_RNA (1)...(19): siRNA sense strand
acuugaagaccacccuuua

SEQ ID NO: 587948 - RNA, 19 nt, Homo sapiens
  misc_RNA (1)...(19): siRNA sense strand
ggagagacgagagcuugga

SEQ ID NO: 587949 - RNA, 19 nt, Homo sapiens
  misc_RNA (1)...(19): siRNA sense strand
gcccugagacaaccacuuc

SEQ ID NO: 587950 - RNA, 19 nt, Homo sapiens
  misc_RNA (1)...(19): siRNA sense strand
ggugagaggcugcgaaagc

SEQ ID NO: 587951 - RNA, 19 nt, Homo sapiens
  misc_RNA (1)...(19): siRNA sense strand
aaucaacauccucacauug

SEQ ID NO: 587952 - RNA, 19 nt, Homo sapiens
  misc_RNA (1)...(19): siRNA sense strand
gccacgagcagcuuuaugg

SEQ ID NO: 587953 - RNA, 19 nt, Homo sapiens
  misc_RNA (1)...(19): siRNA sense strand
gaggccacgagcagcuuua

SEQ ID NO: 587954 - RNA, 19 nt, Homo sapiens
  misc_RNA (1)...(19): siRNA sense strand
gaaggaggagaggcuacaa

SEQ ID NO: 587955 - RNA, 19 nt, Homo sapiens
  misc_RNA (1)...(19): siRNA sense strand
aggagaggcugcgaaagga

SEQ ID NO: 587956 - RNA, 19 nt, Homo sapiens
  misc_RNA (1)...(19): siRNA sense strand
caggagagacugugugaac

SEQ ID NO: 587957 - RNA, 19 nt, Homo sapiens
  misc_RNA (1)...(19): siRNA sense strand
cccaugauguuagaagaau

SEQ ID NO: 587958 - RNA, 19 nt, Homo sapiens
  misc_RNA (1)...(19): siRNA sense strand
gcuaaaagaauaucagcaa

SEQ ID NO: 587959 - RNA, 19 nt, Homo sapiens
  misc_RNA (1)...(19): siRNA sense strand
ggaggccacgagcagcuuu

SEQ ID NO: 587960 - RNA, 19 nt, Homo sapiens
  misc_RNA (1)...(19): siRNA sense strand
ccuugagucuccuuagcaa

SEQ ID NO: 587961 - RNA, 19 nt, Homo sapiens
  misc_RNA (1)...(19): siRNA sense strand
ggagaaggguuucccagua

SEQ ID NO: 587962 - RNA, 19 nt, Homo sapiens
  misc_RNA (1)...(19): siRNA sense strand
gagaaggguuucccaguaa

SEQ ID NO: 587963 - RNA, 19 nt, Homo sapiens
  misc_RNA (1)...(19): siRNA sense strand
gaaguuuccuggauacuau

SEQ ID NO: 587964 - RNA, 19 nt, Homo sapiens
  misc_RNA (1)...(19): siRNA sense strand
gagacaaccuacuuuaaga

SEQ ID NO: 587965 - RNA, 19 nt, Homo sapiens
  misc_RNA (1)...(19): siRNA sense strand
uuaagaaguuuccuggaua

SEQ ID NO: 587966 - RNA, 19 nt, Homo sapiens
  misc_RNA (1)...(19): siRNA sense strand
gagaugagccugucaccaa

SEQ ID NO: 587967 - RNA, 19 nt, Homo sapiens
  misc_RNA (1)...(19): siRNA sense strand
ccacaaccuucaaguaugu

SEQ ID NO: 587968 - RNA, 19 nt, Homo sapiens
  misc_RNA (1)...(19): siRNA sense strand
gcaccuggcuugccuaaaa

SEQ ID NO: 587969 - RNA, 19 nt, Homo sapiens
  misc_RNA (1)...(19): siRNA sense strand
ucaagaagcagauuagaga

SEQ ID NO: 587970 - RNA, 19 nt, Homo sapiens
  misc_RNA (1)...(19): siRNA sense strand
ccacauauccggacgugaa

SEQ ID NO: 587971 - RNA, 19 nt, Homo sapiens
  misc_RNA (1)...(19): siRNA sense strand
ggaagauugcucagaauga

SEQ ID NO: 587972 - RNA, 19 nt, Homo sapiens
  misc_RNA (1)...(19): siRNA sense strand
caacuuugaugugacuaaa

SEQ ID NO: 587973 - RNA, 19 nt, Homo sapiens
  misc_RNA (1)...(19): siRNA sense strand
ggaccaggauggcuauuac

SEQ ID NO: 587974 - RNA, 19 nt, Homo sapiens
  misc_RNA (1)...(19): siRNA sense strand
aauacaaggugaccaaguu

SEQ ID NO: 587975 - RNA, 19 nt, Homo sapiens
  misc_RNA (1)...(19): siRNA sense strand
ccgaggagcucaagaagca

SEQ ID NO: 587976 - RNA, 19 nt, Homo sapiens
  misc_RNA (1)...(19): siRNA sense strand
gugaaugccucuacugcuu

SEQ ID NO: 587977 - RNA, 19 nt, Homo sapiens
  misc_RNA (1)...(19): siRNA sense strand
ggagucagcacuuguggaa

SEQ ID NO: 587978 - RNA, 19 nt, Homo sapiens
  misc_RNA (1)...(19): siRNA sense strand
gaaugccucuacugcuuug

SEQ ID NO: 587979 - RNA, 19 nt, Homo sapiens
  misc_RNA (1)...(19): siRNA sense strand
gaagauugcucagaaugac

SEQ ID NO: 587980 - RNA, 19 nt, Homo sapiens
  misc_RNA (1)...(19): siRNA sense strand
guggacaccuucuggcaaa

SEQ ID NO: 587981 - RNA, 19 nt, Homo sapiens
  misc_RNA (1)...(19): siRNA sense strand
ccacucagaucacauacca

SEQ ID NO: 587982 - RNA, 19 nt, Homo sapiens
  misc_RNA (1)...(19): siRNA sense strand
gagcucaagaagcagauua

SEQ ID NO: 587983 - RNA, 19 nt, Homo sapiens
  misc_RNA (1)...(19): siRNA sense strand
gauuccagcugcagucuuc

SEQ ID NO: 587984 - RNA, 19 nt, Homo sapiens
  misc_RNA (1)...(19): siRNA sense strand
acaauguacuggaucgaaa

SEQ ID NO: 587985 - RNA, 19 nt, Homo sapiens
  misc_RNA (1)...(19): siRNA sense strand
gugaacggaucuuggauuc

SEQ ID NO: 587986 - RNA, 19 nt, Homo sapiens
  misc_RNA (1)...(19): siRNA sense strand
gggaaaaucuucauugagu

SEQ ID NO: 587987 - RNA, 19 nt, Homo sapiens
  misc_RNA (1)...(19): siRNA sense strand
ggagaccacucagaucaca

SEQ ID NO: 587988 - RNA, 19 nt, Homo sapiens
  misc_RNA (1)...(19): siRNA sense strand
guuggaaggugaagcugaa

SEQ ID NO: 587989 - RNA, 19 nt, Homo sapiens
  misc_RNA (1)...(19): siRNA sense strand
gccacaaccuucaaguaug

SEQ ID NO: 587990 - RNA, 19 nt, Homo sapiens
  misc_RNA (1)...(19): siRNA sense strand
guacaacuuugaugugacu

SEQ ID NO: 587991 - RNA, 19 nt, Homo sapiens
  misc_RNA (1)...(19): siRNA sense strand
agagacagguggccacaug

SEQ ID NO: 587992 - RNA, 19 nt, Homo sapiens
  misc_RNA (1)...(19): siRNA sense strand
gaucacauaccaucagcuu

SEQ ID NO: 587993 - RNA, 19 nt, Homo sapiens
  misc_RNA (1)...(19): siRNA sense strand
ucagcaauguucuccgaaa

SEQ ID NO: 587994 - RNA, 19 nt, Homo sapiens
  misc_RNA (1)...(19): siRNA sense strand
aagguuaucugguguucaa

SEQ ID NO: 587995 - RNA, 19 nt, Homo sapiens
  misc_RNA (1)...(19): siRNA sense strand
gcagaagugucaggagaag

SEQ ID NO: 587996 - RNA, 19 nt, Homo sapiens
  misc_RNA (1)...(19): siRNA sense strand
uaagaaguuuccuggauac

SEQ ID NO: 587997 - RNA, 19 nt, Homo sapiens
  misc_RNA (1)...(19): siRNA sense strand
caacuaccaacaucugcua

SEQ ID NO: 587998 - RNA, 19 nt, Homo sapiens
  misc_RNA (1)...(19): siRNA sense strand
gaucaugcgcacagucuau

SEQ ID NO: 587999 - RNA, 19 nt, Homo sapiens
  misc_RNA (1)...(19): siRNA sense strand
gcuuugcacuccauugugu

SEQ ID NO: 588000 - RNA, 19 nt, Homo sapiens
  misc_RNA (1)...(19): siRNA sense strand
gaaaacagggcauucagaa

SEQ ID NO: 588001 - RNA, 19 nt, Homo sapiens
  misc_RNA (1)...(19): siRNA sense strand
gcagucuucucaucacuac

SEQ ID NO: 588002 - RNA, 19 nt, Homo sapiens
  misc_RNA (1)...(19): siRNA sense strand
uuuccuggauacuauguua

SEQ ID NO: 588003 - RNA, 19 nt, Homo sapiens
  misc_RNA (1)...(19): siRNA sense strand
gggagacauugccaaggaa

SEQ ID NO: 588004 - RNA, 19 nt, Homo sapiens
  misc_RNA (1)...(19): siRNA sense strand
gagccugucaccaagcaua

SEQ ID NO: 588005 - RNA, 19 nt, Homo sapiens
  misc_RNA (1)...(19): siRNA sense strand
agacauugccaaggaauuu

SEQ ID NO: 588006 - RNA, 19 nt, Homo sapiens
  misc_RNA (1)...(19): siRNA sense strand
gagguggagucagcacuug

SEQ ID NO: 588007 - RNA, 19 nt, Homo sapiens
  misc_RNA (1)...(19): siRNA sense strand
cagcacuuguggaacauga

SEQ ID NO: 588008 - RNA, 19 nt, Homo sapiens
  misc_RNA (1)...(19): siRNA sense strand
gaucgaaauguccaugaga

SEQ ID NO: 588009 - RNA, 19 nt, Homo sapiens
  misc_RNA (1)...(19): siRNA sense strand
ugucaucagucaccucuuc

SEQ ID NO: 588010 - RNA, 19 nt, Homo sapiens
  misc_RNA (1)...(19): siRNA sense strand
gggcauccuugcagguguu

SEQ ID NO: 588011 - RNA, 19 nt, Homo sapiens
  misc_RNA (1)...(19): siRNA sense strand
ugacuuccaugcagaggau

SEQ ID NO: 588012 - RNA, 19 nt, Homo sapiens
  misc_RNA (1)...(19): siRNA sense strand
ugaugugacuaaagggaaa

SEQ ID NO: 588013 - RNA, 19 nt, Homo sapiens
  misc_RNA (1)...(19): siRNA sense strand
gaaggguuucccaguaaga

SEQ ID NO: 588014 - RNA, 19 nt, Homo sapiens
  misc_RNA (1)...(19): siRNA sense strand
gaaaagauuggccccauug

SEQ ID NO: 588015 - RNA, 19 nt, Homo sapiens
  misc_RNA (1)...(19): siRNA sense strand
accaacaucugcuacaaug

SEQ ID NO: 588016 - RNA, 19 nt, Homo sapiens
  misc_RNA (1)...(19): siRNA sense strand
gggaccaggauggcuauua

SEQ ID NO: 588017 - RNA, 19 nt, Homo sapiens
  misc_RNA (1)...(19): siRNA sense strand
uuuaagaaguuuccuggau

SEQ ID NO: 588018 - RNA, 19 nt, Homo sapiens
  misc_RNA (1)...(19): siRNA sense strand
aaggugaagcugaagguua

SEQ ID NO: 588019 - RNA, 19 nt, Homo sapiens
  misc_RNA (1)...(19): siRNA sense strand
ggaucgaaauguccaugag

SEQ ID NO: 588020 - RNA, 19 nt, Homo sapiens
  misc_RNA (1)...(19): siRNA sense strand
cagacuacauccagaaugc

SEQ ID NO: 588021 - RNA, 19 nt, Homo sapiens
  misc_RNA (1)...(19): siRNA sense strand
agucagcacuuguggaaca

SEQ ID NO: 588022 - RNA, 19 nt, Homo sapiens
  misc_RNA (1)...(19): siRNA sense strand
ugagacaaccuacuuuaag

SEQ ID NO: 588023 - RNA, 19 nt, Homo sapiens
  misc_RNA (1)...(19): siRNA sense strand
cacgaacgcuuugagacaa

SEQ ID NO: 588024 - RNA, 19 nt, Homo sapiens
  misc_RNA (1)...(19): siRNA sense strand
ccacgaacgcuuugagaca

SEQ ID NO: 588025 - RNA, 19 nt, Homo sapiens
  misc_RNA (1)...(19): siRNA sense strand
gagcaacuaccaacaucug

SEQ ID NO: 588026 - RNA, 19 nt, Homo sapiens
  misc_RNA (1)...(19): siRNA sense strand
cgguacaacuuugauguga

SEQ ID NO: 588027 - RNA, 19 nt, Homo sapiens
  misc_RNA (1)...(19): siRNA sense strand
aggugaagcugaagguuau

SEQ ID NO: 588028 - RNA, 19 nt, Homo sapiens
  misc_RNA (1)...(19): siRNA sense strand
cagcugcagucuucucauc

SEQ ID NO: 588029 - RNA, 19 nt, Homo sapiens
  misc_RNA (1)...(19): siRNA sense strand
agaccacucagaucacaua

SEQ ID NO: 588030 - RNA, 19 nt, Homo sapiens
  misc_RNA (1)...(19): siRNA sense strand
gggaaaagcuugugaaccu

SEQ ID NO: 588031 - RNA, 19 nt, Homo sapiens
  misc_RNA (1)...(19): siRNA sense strand
cuggaucacuggcaggauu

SEQ ID NO: 588032 - RNA, 19 nt, Homo sapiens
  misc_RNA (1)...(19): siRNA sense strand
ucacauaccaucagcuucu

SEQ ID NO: 588033 - RNA, 19 nt, Homo sapiens
  misc_RNA (1)...(19): siRNA sense strand
caagaagcagauuagagaa

SEQ ID NO: 588034 - RNA, 19 nt, Homo sapiens
  misc_RNA (1)...(19): siRNA sense strand
ucaccgaggagcucaagaa

SEQ ID NO: 588035 - RNA, 19 nt, Homo sapiens
  misc_RNA (1)...(19): siRNA sense strand
ccaaggaauuuuacuggaa

SEQ ID NO: 588036 - RNA, 19 nt, Homo sapiens
  misc_RNA (1)...(19): siRNA sense strand
cuaccaacaucugcuacaa

SEQ ID NO: 588037 - RNA, 19 nt, Homo sapiens
  misc_RNA (1)...(19): siRNA sense strand
gcagacauugguuggauca

SEQ ID NO: 588038 - RNA, 19 nt, Homo sapiens
  misc_RNA (1)...(19): siRNA sense strand
gcagaucucauggaaccaa

SEQ ID NO: 588039 - RNA, 19 nt, Homo sapiens
  misc_RNA (1)...(19): siRNA sense strand
gcccauuccuucgguacaa

SEQ ID NO: 588040 - RNA, 19 nt, Homo sapiens
  misc_RNA (1)...(19): siRNA sense strand
ugguguagcuccugcaauc

SEQ ID NO: 588041 - RNA, 19 nt, Homo sapiens
  misc_RNA (1)...(19): siRNA sense strand
acaaauacaaggugaccaa

SEQ ID NO: 588042 - RNA, 19 nt, Homo sapiens
  misc_RNA (1)...(19): siRNA sense strand
guccaagugugucaguuca

SEQ ID NO: 588043 - RNA, 19 nt, Homo sapiens
  misc_RNA (1)...(19): siRNA sense strand
gagcccgaguggugugaug

SEQ ID NO: 588044 - RNA, 19 nt, Homo sapiens
  misc_RNA (1)...(19): siRNA sense strand
cuccugcaauccugaauga

SEQ ID NO: 588045 - RNA, 19 nt, Homo sapiens
  misc_RNA (1)...(19): siRNA sense strand
ugaaugccucuacugcuuu

SEQ ID NO: 588046 - RNA, 19 nt, Homo sapiens
  misc_RNA (1)...(19): siRNA sense strand
ccaucuacaugccuaugau

SEQ ID NO: 588047 - RNA, 19 nt, Homo sapiens
  misc_RNA (1)...(19): siRNA sense strand
uggcaggauugaugacaug

SEQ ID NO: 588048 - RNA, 19 nt, Homo sapiens
  misc_RNA (1)...(19): siRNA sense strand
ucacuggcaggauugauga

SEQ ID NO: 588049 - RNA, 19 nt, Homo sapiens
  misc_RNA (1)...(19): siRNA sense strand
agacaaccuacuuuaagaa

SEQ ID NO: 588050 - RNA, 19 nt, Homo sapiens
  misc_RNA (1)...(19): siRNA sense strand
gaaccacgaacgcuuugag

SEQ ID NO: 588051 - RNA, 19 nt, Homo sapiens
  misc_RNA (1)...(19): siRNA sense strand
gaaggugaagcugaagguu

SEQ ID NO: 588052 - RNA, 19 nt, Homo sapiens
  misc_RNA (1)...(19): siRNA sense strand
gacagguggccacauguug

SEQ ID NO: 588053 - RNA, 19 nt, Homo sapiens
  misc_RNA (1)...(19): siRNA sense strand
uagccacaaccuucaagua

SEQ ID NO: 588054 - RNA, 19 nt, Homo sapiens
  misc_RNA (1)...(19): siRNA sense strand
uaagaggucaugcccagau

SEQ ID NO: 588055 - RNA, 19 nt, Homo sapiens
  misc_RNA (1)...(19): siRNA sense strand
cggcagacauugguuggau

SEQ ID NO: 588056 - RNA, 19 nt, Homo sapiens
  misc_RNA (1)...(19): siRNA sense strand
aagaagcagauuagagaaa

SEQ ID NO: 588057 - RNA, 19 nt, Homo sapiens
  misc_RNA (1)...(19): siRNA sense strand
ggaagaguuggaaggugaa

SEQ ID NO: 588058 - RNA, 19 nt, Homo sapiens
  misc_RNA (1)...(19): siRNA sense strand
gagacauugccaaggaauu

SEQ ID NO: 588059 - RNA, 19 nt, Homo sapiens
  misc_RNA (1)...(19): siRNA sense strand
uuugagacaaccuacuuua

SEQ ID NO: 588060 - RNA, 19 nt, Homo sapiens
  misc_RNA (1)...(19): siRNA sense strand
ggggagacauugccaagga

SEQ ID NO: 588061 - RNA, 19 nt, Homo sapiens
  misc_RNA (1)...(19): siRNA sense strand
ggagaaggguuucccagua

SEQ ID NO: 588062 - RNA, 19 nt, Homo sapiens
  misc_RNA (1)...(19): siRNA sense strand
gagaaggguuucccaguaa

SEQ ID NO: 588063 - RNA, 19 nt, Homo sapiens
  misc_RNA (1)...(19): siRNA sense strand
gaaguuuccuggauacuau

SEQ ID NO: 588064 - RNA, 19 nt, Homo sapiens
  misc_RNA (1)...(19): siRNA sense strand
gagacaaccuacuuuaaga

SEQ ID NO: 588065 - RNA, 19 nt, Homo sapiens
  misc_RNA (1)...(19): siRNA sense strand
uuaagaaguuuccuggaua

SEQ ID NO: 588066 - RNA, 19 nt, Homo sapiens
  misc_RNA (1)...(19): siRNA sense strand
gagaugagccugucaccaa

SEQ ID NO: 588067 - RNA, 19 nt, Homo sapiens
  misc_RNA (1)...(19): siRNA sense strand
ccacaaccuucaaguaugu

SEQ ID NO: 588068 - RNA, 19 nt, Homo sapiens
  misc_RNA (1)...(19): siRNA sense strand
gcaccuggcuugccuaaaa

SEQ ID NO: 588069 - RNA, 19 nt, Homo sapiens
  misc_RNA (1)...(19): siRNA sense strand
ucaagaagcagauuagaga

SEQ ID NO: 588070 - RNA, 19 nt, Homo sapiens
  misc_RNA (1)...(19): siRNA sense strand
ccacauauccggacgugaa

SEQ ID NO: 588071 - RNA, 19 nt, Homo sapiens
  misc_RNA (1)...(19): siRNA sense strand
ggaagauugcucagaauga

SEQ ID NO: 588072 - RNA, 19 nt, Homo sapiens
  misc_RNA (1)...(19): siRNA sense strand
ggaccaggauggcuauuac

SEQ ID NO: 588073 - RNA, 19 nt, Homo sapiens
  misc_RNA (1)...(19): siRNA sense strand
aauacaaggugaccaaguu

SEQ ID NO: 588074 - RNA, 19 nt, Homo sapiens
  misc_RNA (1)...(19): siRNA sense strand
ccgaggagcucaagaagca

SEQ ID NO: 588075 - RNA, 19 nt, Homo sapiens
  misc_RNA (1)...(19): siRNA sense strand
gugaaugccucuacugcuu

SEQ ID NO: 588076 - RNA, 19 nt, Homo sapiens
  misc_RNA (1)...(19): siRNA sense strand
ggagucagcacuuguggaa

SEQ ID NO: 588077 - RNA, 19 nt, Homo sapiens
  misc_RNA (1)...(19): siRNA sense strand
gaaugccucuacugcuuug

SEQ ID NO: 588078 - RNA, 19 nt, Homo sapiens
  misc_RNA (1)...(19): siRNA sense strand
gaagauugcucagaaugac

SEQ ID NO: 588079 - RNA, 19 nt, Homo sapiens
  misc_RNA (1)...(19): siRNA sense strand
guggacaccuucuggcaaa

SEQ ID NO: 588080 - RNA, 19 nt, Homo sapiens
  misc_RNA (1)...(19): siRNA sense strand
ccacucagaucacauacca

SEQ ID NO: 588081 - RNA, 19 nt, Homo sapiens
  misc_RNA (1)...(19): siRNA sense strand
gagcucaagaagcagauua

SEQ ID NO: 588082 - RNA, 19 nt, Homo sapiens
  misc_RNA (1)...(19): siRNA sense strand
gauuccagcugcagucuuc

SEQ ID NO: 588083 - RNA, 19 nt, Homo sapiens
  misc_RNA (1)...(19): siRNA sense strand
gugaacggaucuuggauuc

SEQ ID NO: 588084 - RNA, 19 nt, Homo sapiens
  misc_RNA (1)...(19): siRNA sense strand
acaauguacuggaucgaaa

SEQ ID NO: 588085 - RNA, 19 nt, Homo sapiens
  misc_RNA (1)...(19): siRNA sense strand
ggagaccacucagaucaca

SEQ ID NO: 588086 - RNA, 19 nt, Homo sapiens
  misc_RNA (1)...(19): siRNA sense strand
guuggaaggugaagcugaa

SEQ ID NO: 588087 - RNA, 19 nt, Homo sapiens
  misc_RNA (1)...(19): siRNA sense strand
gccacaaccuucaaguaug

SEQ ID NO: 588088 - RNA, 19 nt, Homo sapiens
  misc_RNA (1)...(19): siRNA sense strand
gaucacauaccaucagcuu

SEQ ID NO: 588089 - RNA, 19 nt, Homo sapiens
  misc_RNA (1)...(19): siRNA sense strand
agagacagguggccacaug

SEQ ID NO: 588090 - RNA, 19 nt, Homo sapiens
  misc_RNA (1)...(19): siRNA sense strand
ucagcaauguucuccgaaa

SEQ ID NO: 588091 - RNA, 19 nt, Homo sapiens
  misc_RNA (1)...(19): siRNA sense strand
aagguuaucugguguucaa

SEQ ID NO: 588092 - RNA, 19 nt, Homo sapiens
  misc_RNA (1)...(19): siRNA sense strand
gcagaagugucaggagaag

SEQ ID NO: 588093 - RNA, 19 nt, Homo sapiens
  misc_RNA (1)...(19): siRNA sense strand
uaagaaguuuccuggauac

SEQ ID NO: 588094 - RNA, 19 nt, Homo sapiens
  misc_RNA (1)...(19): siRNA sense strand
gaaaacagggcauucagaa

SEQ ID NO: 588095 - RNA, 19 nt, Homo sapiens
  misc_RNA (1)...(19): siRNA sense strand
gaucaugcgcacagucuau

SEQ ID NO: 588096 - RNA, 19 nt, Homo sapiens
  misc_RNA (1)...(19): siRNA sense strand
caacuaccaacaucugcua

SEQ ID NO: 588097 - RNA, 19 nt, Homo sapiens
  misc_RNA (1)...(19): siRNA sense strand
gcuuugcacuccauugugu

SEQ ID NO: 588098 - RNA, 19 nt, Homo sapiens
  misc_RNA (1)...(19): siRNA sense strand
gcagucuucucaucacuac

SEQ ID NO: 588099 - RNA, 19 nt, Homo sapiens
  misc_RNA (1)...(19): siRNA sense strand
uuuccuggauacuauguua

SEQ ID NO: 588100 - RNA, 19 nt, Homo sapiens
  misc_RNA (1)...(19): siRNA sense strand
gagccugucaccaagcaua

SEQ ID NO: 588101 - RNA, 19 nt, Homo sapiens
  misc_RNA (1)...(19): siRNA sense strand
gagguggagucagcacuug

SEQ ID NO: 588102 - RNA, 19 nt, Homo sapiens
  misc_RNA (1)...(19): siRNA sense strand
cagcacuuguggaacauga

SEQ ID NO: 588103 - RNA, 19 nt, Homo sapiens
  misc_RNA (1)...(19): siRNA sense strand
ugacuuccaugcagaggau

SEQ ID NO: 588104 - RNA, 19 nt, Homo sapiens
  misc_RNA (1)...(19): siRNA sense strand
ugucaucagucaccucuuc

SEQ ID NO: 588105 - RNA, 19 nt, Homo sapiens
  misc_RNA (1)...(19): siRNA sense strand
gaucgaaauguccaugaga

SEQ ID NO: 588106 - RNA, 19 nt, Homo sapiens
  misc_RNA (1)...(19): siRNA sense strand
gggcauccuugcagguguu

SEQ ID NO: 588107 - RNA, 19 nt, Homo sapiens
  misc_RNA (1)...(19): siRNA sense strand
gaaggguuucccaguaaga

SEQ ID NO: 588108 - RNA, 19 nt, Homo sapiens
  misc_RNA (1)...(19): siRNA sense strand
gaaaagauuggccccauug

SEQ ID NO: 588109 - RNA, 19 nt, Homo sapiens
  misc_RNA (1)...(19): siRNA sense strand
aaggugaagcugaagguua

SEQ ID NO: 588110 - RNA, 19 nt, Homo sapiens
  misc_RNA (1)...(19): siRNA sense strand
accaacaucugcuacaaug

SEQ ID NO: 588111 - RNA, 19 nt, Homo sapiens
  misc_RNA (1)...(19): siRNA sense strand
gggaccaggauggcuauua

SEQ ID NO: 588112 - RNA, 19 nt, Homo sapiens
  misc_RNA (1)...(19): siRNA sense strand
uuuaagaaguuuccuggau

SEQ ID NO: 588113 - RNA, 19 nt, Homo sapiens
  misc_RNA (1)...(19): siRNA sense strand
agaccacucagaucacaua

SEQ ID NO: 588114 - RNA, 19 nt, Homo sapiens
  misc_RNA (1)...(19): siRNA sense strand
cagacuacauccagaaugc

SEQ ID NO: 588115 - RNA, 19 nt, Homo sapiens
  misc_RNA (1)...(19): siRNA sense strand
agucagcacuuguggaaca

SEQ ID NO: 588116 - RNA, 19 nt, Homo sapiens
  misc_RNA (1)...(19): siRNA sense strand
ggaucgaaauguccaugag

SEQ ID NO: 588117 - RNA, 19 nt, Homo sapiens
  misc_RNA (1)...(19): siRNA sense strand
gagcaacuaccaacaucug

SEQ ID NO: 588118 - RNA, 19 nt, Homo sapiens
  misc_RNA (1)...(19): siRNA sense strand
ugagacaaccuacuuuaag

SEQ ID NO: 588119 - RNA, 19 nt, Homo sapiens
  misc_RNA (1)...(19): siRNA sense strand
cacgaacgcuuugagacaa

SEQ ID NO: 588120 - RNA, 19 nt, Homo sapiens
  misc_RNA (1)...(19): siRNA sense strand
ccacgaacgcuuugagaca

SEQ ID NO: 588121 - RNA, 19 nt, Homo sapiens
  misc_RNA (1)...(19): siRNA sense strand
aggugaagcugaagguuau

SEQ ID NO: 588122 - RNA, 19 nt, Homo sapiens
  misc_RNA (1)...(19): siRNA sense strand
cagcugcagucuucucauc

SEQ ID NO: 588123 - RNA, 19 nt, Homo sapiens
  misc_RNA (1)...(19): siRNA sense strand
gggaaaagcuugugaaccu

SEQ ID NO: 588124 - RNA, 19 nt, Homo sapiens
  misc_RNA (1)...(19): siRNA sense strand
cuggaucacuggcaggauu

SEQ ID NO: 588125 - RNA, 19 nt, Homo sapiens
  misc_RNA (1)...(19): siRNA sense strand
gcagaucucauggaaccaa

SEQ ID NO: 588126 - RNA, 19 nt, Homo sapiens
  misc_RNA (1)...(19): siRNA sense strand
caagaagcagauuagagaa

SEQ ID NO: 588127 - RNA, 19 nt, Homo sapiens
  misc_RNA (1)...(19): siRNA sense strand
ucaccgaggagcucaagaa

SEQ ID NO: 588128 - RNA, 19 nt, Homo sapiens
  misc_RNA (1)...(19): siRNA sense strand
ucacauaccaucagcuucu

SEQ ID NO: 588129 - RNA, 19 nt, Homo sapiens
  misc_RNA (1)...(19): siRNA sense strand
gcagacauugguuggauca

SEQ ID NO: 588130 - RNA, 19 nt, Homo sapiens
  misc_RNA (1)...(19): siRNA sense strand
cuaccaacaucugcuacaa

SEQ ID NO: 588131 - RNA, 19 nt, Homo sapiens
  misc_RNA (1)...(19): siRNA sense strand
acaaauacaaggugaccaa

SEQ ID NO: 588132 - RNA, 19 nt, Homo sapiens
  misc_RNA (1)...(19): siRNA sense strand
ugguguagcuccugcaauc

SEQ ID NO: 588133 - RNA, 19 nt, Homo sapiens
  misc_RNA (1)...(19): siRNA sense strand
gagcccgaguggugugaug

SEQ ID NO: 588134 - RNA, 19 nt, Homo sapiens
  misc_RNA (1)...(19): siRNA sense strand
guccaagugugucaguuca

SEQ ID NO: 588135 - RNA, 19 nt, Homo sapiens
  misc_RNA (1)...(19): siRNA sense strand
cuccugcaauccugaauga

SEQ ID NO: 588136 - RNA, 19 nt, Homo sapiens
  misc_RNA (1)...(19): siRNA sense strand
ugaaugccucuacugcuuu

SEQ ID NO: 588137 - RNA, 19 nt, Homo sapiens
  misc_RNA (1)...(19): siRNA sense strand
ccaucuacaugccuaugau

SEQ ID NO: 588138 - RNA, 19 nt, Homo sapiens
  misc_RNA (1)...(19): siRNA sense strand
uggcaggauugaugacaug

SEQ ID NO: 588139 - RNA, 19 nt, Homo sapiens
  misc_RNA (1)...(19): siRNA sense strand
ucacuggcaggauugauga

SEQ ID NO: 588140 - RNA, 19 nt, Homo sapiens
  misc_RNA (1)...(19): siRNA sense strand
agacaaccuacuuuaagaa

SEQ ID NO: 588141 - RNA, 19 nt, Homo sapiens
  misc_RNA (1)...(19): siRNA sense strand
gaaccacgaacgcuuugag

SEQ ID NO: 588142 - RNA, 19 nt, Homo sapiens
  misc_RNA (1)...(19): siRNA sense strand
gaaggugaagcugaagguu

SEQ ID NO: 588143 - RNA, 19 nt, Homo sapiens
  misc_RNA (1)...(19): siRNA sense strand
gacagguggccacauguug

SEQ ID NO: 588144 - RNA, 19 nt, Homo sapiens
  misc_RNA (1)...(19): siRNA sense strand
uagccacaaccuucaagua

SEQ ID NO: 588145 - RNA, 19 nt, Homo sapiens
  misc_RNA (1)...(19): siRNA sense strand
uaagaggucaugcccagau

SEQ ID NO: 588146 - RNA, 19 nt, Homo sapiens
  misc_RNA (1)...(19): siRNA sense strand
cggcagacauugguuggau

SEQ ID NO: 588147 - RNA, 19 nt, Homo sapiens
  misc_RNA (1)...(19): siRNA sense strand
aagaagcagauuagagaaa

SEQ ID NO: 588148 - RNA, 19 nt, Homo sapiens
  misc_RNA (1)...(19): siRNA sense strand
ggaagaguuggaaggugaa

SEQ ID NO: 588149 - RNA, 19 nt, Homo sapiens
  misc_RNA (1)...(19): siRNA sense strand
uuugagacaaccuacuuua

SEQ ID NO: 588150 - RNA, 19 nt, Homo sapiens
  misc_RNA (1)...(19): siRNA sense strand
ucacuacagaugccuucua

SEQ ID NO: 588151 - RNA, 19 nt, Homo sapiens
  misc_RNA (1)...(19): siRNA sense strand
gaagggugaaugccucuac

SEQ ID NO: 588152 - RNA, 19 nt, Homo sapiens
  misc_RNA (1)...(19): siRNA sense strand
ggacaccugcugaguacag

SEQ ID NO: 588153 - RNA, 19 nt, Homo sapiens
  misc_RNA (1)...(19): siRNA sense strand
gcuuugagacaaccuacuu

SEQ ID NO: 588154 - RNA, 19 nt, Homo sapiens
  misc_RNA (1)...(19): siRNA sense strand
ggaaggugaagcugaaggu

SEQ ID NO: 588155 - RNA, 19 nt, Homo sapiens
  misc_RNA (1)...(19): siRNA sense strand
gggaccgaguggccaucua

SEQ ID NO: 588156 - RNA, 19 nt, Homo sapiens
  misc_RNA (1)...(19): siRNA sense strand
gcucaugaaguuuggagau

SEQ ID NO: 588157 - RNA, 19 nt, Homo sapiens
  misc_RNA (1)...(19): siRNA sense strand
acaaggugaccaaguucua

SEQ ID NO: 588158 - RNA, 19 nt, Homo sapiens
  misc_RNA (1)...(19): siRNA sense strand
ggaaccaagggauugacuu

SEQ ID NO: 588159 - RNA, 19 nt, Homo sapiens
  misc_RNA (1)...(19): siRNA sense strand
acgaggcccugcagaagug

SEQ ID NO: 588160 - RNA, 19 nt, Homo sapiens
  misc_RNA (1)...(19): siRNA sense strand
cuacagaugccuucuacag

SEQ ID NO: 588161 - RNA, 19 nt, Homo sapiens
  misc_RNA (1)...(19): siRNA sense strand
ggaaagacagggaagauug

SEQ ID NO: 588162 - RNA, 19 nt, Homo sapiens
  misc_RNA (1)...(19): siRNA sense strand
gaaaggagaagagguggua

SEQ ID NO: 588163 - RNA, 19 nt, Homo sapiens
  misc_RNA (1)...(19): siRNA sense strand
gaagaggccagggcaauuu

SEQ ID NO: 588164 - RNA, 19 nt, Homo sapiens
  misc_RNA (1)...(19): siRNA sense strand
cagaaagccuggaacaugu

SEQ ID NO: 588165 - RNA, 19 nt, Homo sapiens
  misc_RNA (1)...(19): siRNA sense strand
gaagagaggcugagaagcu

SEQ ID NO: 588166 - RNA, 19 nt, Homo sapiens
  misc_RNA (1)...(19): siRNA sense strand
gagaaggccugugaaagca

SEQ ID NO: 588167 - RNA, 19 nt, Homo sapiens
  misc_RNA (1)...(19): siRNA sense strand
ccagagaaacugaggauga

SEQ ID NO: 588168 - RNA, 19 nt, Homo sapiens
  misc_RNA (1)...(19): siRNA sense strand
ggagaugacagaagacaug

SEQ ID NO: 588169 - RNA, 19 nt, Homo sapiens
  misc_RNA (1)...(19): siRNA sense strand
ggaagaagaggcuguugga

SEQ ID NO: 588170 - RNA, 19 nt, Homo sapiens
  misc_RNA (1)...(19): siRNA sense strand
ugacagaacauccagaaga

SEQ ID NO: 588171 - RNA, 19 nt, Homo sapiens
  misc_RNA (1)...(19): siRNA sense strand
ccgagagucugaacuauca

SEQ ID NO: 588172 - RNA, 19 nt, Homo sapiens
  misc_RNA (1)...(19): siRNA sense strand
gaagugaacagagaagaga

SEQ ID NO: 588173 - RNA, 19 nt, Homo sapiens
  misc_RNA (1)...(19): siRNA sense strand
gaaagacagggaagauugu

SEQ ID NO: 588174 - RNA, 19 nt, Homo sapiens
  misc_RNA (1)...(19): siRNA sense strand
caaggagacugagccagaa

SEQ ID NO: 588175 - RNA, 19 nt, Homo sapiens
  misc_RNA (1)...(19): siRNA sense strand
gacagaacauccagaagag

SEQ ID NO: 588176 - RNA, 19 nt, Homo sapiens
  misc_RNA (1)...(19): siRNA sense strand
ggagaaggccugugaaagc

SEQ ID NO: 588177 - RNA, 19 nt, Homo sapiens
  misc_RNA (1)...(19): siRNA sense strand
gcaugcaggugggcaagaa

SEQ ID NO: 588178 - RNA, 19 nt, Homo sapiens
  misc_RNA (1)...(19): siRNA sense strand
gagaagagaggcugagaag

SEQ ID NO: 588179 - RNA, 19 nt, Homo sapiens
  misc_RNA (1)...(19): siRNA sense strand
gcacugaaagaacagaaga

SEQ ID NO: 588180 - RNA, 19 nt, Homo sapiens
  misc_RNA (1)...(19): siRNA sense strand
ggaagaggccagggcaauu

SEQ ID NO: 588181 - RNA, 19 nt, Homo sapiens
  misc_RNA (1)...(19): siRNA sense strand
ggacauggagagaggaaau

SEQ ID NO: 588182 - RNA, 19 nt, Homo sapiens
  misc_RNA (1)...(19): siRNA sense strand
ggacgcuguuggaagaaga

SEQ ID NO: 588183 - RNA, 19 nt, Homo sapiens
  misc_RNA (1)...(19): siRNA sense strand
cagacagacucaauaugga

SEQ ID NO: 588184 - RNA, 19 nt, Homo sapiens
  misc_RNA (1)...(19): siRNA sense strand
gccuggagaugacagaaga

SEQ ID NO: 588185 - RNA, 19 nt, Homo sapiens
  misc_RNA (1)...(19): siRNA sense strand
ugacagaagacaugaagug

SEQ ID NO: 588186 - RNA, 19 nt, Homo sapiens
  misc_RNA (1)...(19): siRNA sense strand
guaaggaggcugagaugag

SEQ ID NO: 588187 - RNA, 19 nt, Homo sapiens
  misc_RNA (1)...(19): siRNA sense strand
ggcugggacucgaaagaaa

SEQ ID NO: 588188 - RNA, 19 nt, Homo sapiens
  misc_RNA (1)...(19): siRNA sense strand
gaccgagagucugaacuau

SEQ ID NO: 588189 - RNA, 19 nt, Homo sapiens
  misc_RNA (1)...(19): siRNA sense strand
gagagggccuggagaugac

SEQ ID NO: 588190 - RNA, 19 nt, Homo sapiens
  misc_RNA (1)...(19): siRNA sense strand
gcaaggcugggacucgaaa

SEQ ID NO: 588191 - RNA, 19 nt, Homo sapiens
  misc_RNA (1)...(19): siRNA sense strand
ucagacagacucaauaugg

SEQ ID NO: 588192 - RNA, 19 nt, Homo sapiens
  misc_RNA (1)...(19): siRNA sense strand
ugagagggccuggagauga

SEQ ID NO: 588193 - RNA, 19 nt, Homo sapiens
  misc_RNA (1)...(19): siRNA sense strand
ggagggcucagcagaggaa

SEQ ID NO: 588194 - RNA, 19 nt, Homo sapiens
  misc_RNA (1)...(19): siRNA sense strand
ggcggaggcugacagaaca

SEQ ID NO: 588195 - RNA, 19 nt, Homo sapiens
  misc_RNA (1)...(19): siRNA sense strand
gcaggaagugaacagagaa

SEQ ID NO: 588196 - RNA, 19 nt, Homo sapiens
  misc_RNA (1)...(19): siRNA sense strand
ggaggaagccaggacaauc

SEQ ID NO: 588197 - RNA, 19 nt, Homo sapiens
  misc_RNA (1)...(19): siRNA sense strand
gggaaagacagggaagauu

SEQ ID NO: 588198 - RNA, 19 nt, Homo sapiens
  misc_RNA (1)...(19): siRNA sense strand
cagagaaacugaggaugag

SEQ ID NO: 588199 - RNA, 19 nt, Homo sapiens
  misc_RNA (1)...(19): siRNA sense strand
gagaaaggacauggagaga

SEQ ID NO: 588200 - RNA, 19 nt, Homo sapiens
  misc_RNA (1)...(19): siRNA sense strand
gagcuuugagggccaggua

SEQ ID NO: 588201 - RNA, 19 nt, Homo sapiens
  misc_RNA (1)...(19): siRNA sense strand
gacucaauauggagcaguu

SEQ ID NO: 588202 - RNA, 19 nt, Homo sapiens
  misc_RNA (1)...(19): siRNA sense strand
gaugacagaagacaugaag

SEQ ID NO: 588203 - RNA, 19 nt, Homo sapiens
  misc_RNA (1)...(19): siRNA sense strand
aguggacgcuguuggaaga

SEQ ID NO: 588204 - RNA, 19 nt, Homo sapiens
  misc_RNA (1)...(19): siRNA sense strand
gcugacagaacauccagaa

SEQ ID NO: 588205 - RNA, 19 nt, Homo sapiens
  misc_RNA (1)...(19): siRNA sense strand
gacauggagagaggaaaua

SEQ ID NO: 588206 - RNA, 19 nt, Homo sapiens
  misc_RNA (1)...(19): siRNA sense strand
gaggaagccaggacaaucu

SEQ ID NO: 588207 - RNA, 19 nt, Homo sapiens
  misc_RNA (1)...(19): siRNA sense strand
ggagucccaugagcaggaa

SEQ ID NO: 588208 - RNA, 19 nt, Homo sapiens
  misc_RNA (1)...(19): siRNA sense strand
ggaccuggagggccuuaga

SEQ ID NO: 588209 - RNA, 19 nt, Homo sapiens
  misc_RNA (1)...(19): siRNA sense strand
gcacgagaaaggacaugga

SEQ ID NO: 588210 - RNA, 19 nt, Homo sapiens
  misc_RNA (1)...(19): siRNA sense strand
ggaaugggguggccucaca

SEQ ID NO: 588211 - RNA, 19 nt, Homo sapiens
  misc_RNA (1)...(19): siRNA sense strand
ggaagugaacagagaagag

SEQ ID NO: 588212 - RNA, 19 nt, Homo sapiens
  misc_RNA (1)...(19): siRNA sense strand
gcagaggcagccaaguaga

SEQ ID NO: 588213 - RNA, 19 nt, Homo sapiens
  misc_RNA (1)...(19): siRNA sense strand
gcaggugggcaagaauuug

SEQ ID NO: 588214 - RNA, 19 nt, Homo sapiens
  misc_RNA (1)...(19): siRNA sense strand
gaagaggucagggcaagag

SEQ ID NO: 588215 - RNA, 19 nt, Homo sapiens
  misc_RNA (1)...(19): siRNA sense strand
gagaugacagaagacauga

SEQ ID NO: 588216 - RNA, 19 nt, Homo sapiens
  misc_RNA (1)...(19): siRNA sense strand
gaaagccuggaacauguca

SEQ ID NO: 588217 - RNA, 19 nt, Homo sapiens
  misc_RNA (1)...(19): siRNA sense strand
acacacagcgucaccaaag

SEQ ID NO: 588218 - RNA, 19 nt, Homo sapiens
  misc_RNA (1)...(19): siRNA sense strand
ggacaaccucaggcaaaga

SEQ ID NO: 588219 - RNA, 19 nt, Homo sapiens
  misc_RNA (1)...(19): siRNA sense strand
ccugggcacugaaagaaca

SEQ ID NO: 588220 - RNA, 19 nt, Homo sapiens
  misc_RNA (1)...(19): siRNA sense strand
gaagauuguagaggaggaa

SEQ ID NO: 588221 - RNA, 19 nt, Homo sapiens
  misc_RNA (1)...(19): siRNA sense strand
agacagggaagauuguaga

SEQ ID NO: 588222 - RNA, 19 nt, Homo sapiens
  misc_RNA (1)...(19): siRNA sense strand
gggaaaaccgcacgagaaa

SEQ ID NO: 588223 - RNA, 19 nt, Homo sapiens
  misc_RNA (1)...(19): siRNA sense strand
ggugagcccuuuccccaaa

SEQ ID NO: 588224 - RNA, 19 nt, Homo sapiens
  misc_RNA (1)...(19): siRNA sense strand
guggagaaggccugugaaa

SEQ ID NO: 588225 - RNA, 19 nt, Homo sapiens
  misc_RNA (1)...(19): siRNA sense strand
gggaagaggccagggcaau

SEQ ID NO: 588226 - RNA, 19 nt, Homo sapiens
  misc_RNA (1)...(19): siRNA sense strand
gaagaagaggcuguuggau

SEQ ID NO: 588227 - RNA, 19 nt, Homo sapiens
  misc_RNA (1)...(19): siRNA sense strand
gguagaggccgaggaaucu

SEQ ID NO: 588228 - RNA, 19 nt, Homo sapiens
  misc_RNA (1)...(19): siRNA sense strand
gacuagcuguggccuacug

SEQ ID NO: 588229 - RNA, 19 nt, Homo sapiens
  misc_RNA (1)...(19): siRNA sense strand
ggggaaggcuggugcuguu

SEQ ID NO: 588230 - RNA, 19 nt, Homo sapiens
  misc_RNA (1)...(19): siRNA sense strand
gcgugcaccucucgagaag

SEQ ID NO: 588231 - RNA, 19 nt, Homo sapiens
  misc_RNA (1)...(19): siRNA sense strand
ggguagaggccgaggaauc

SEQ ID NO: 588232 - RNA, 19 nt, Homo sapiens
  misc_RNA (1)...(19): siRNA sense strand
gacgaggccuggacaaccu

SEQ ID NO: 588233 - RNA, 19 nt, Homo sapiens
  misc_RNA (1)...(19): siRNA sense strand
gaaaaccgcacgagaaagg

SEQ ID NO: 588234 - RNA, 19 nt, Homo sapiens
  misc_RNA (1)...(19): siRNA sense strand
gugcaccucucgagaagcu

SEQ ID NO: 588235 - RNA, 19 nt, Homo sapiens
  misc_RNA (1)...(19): siRNA sense strand
gcugagagggccuggagau

SEQ ID NO: 588236 - RNA, 19 nt, Homo sapiens
  misc_RNA (1)...(19): siRNA sense strand
agcaggaagugaacagaga

SEQ ID NO: 588237 - RNA, 19 nt, Homo sapiens
  misc_RNA (1)...(19): siRNA sense strand
aaagacagggaagauugua

SEQ ID NO: 588238 - RNA, 19 nt, Homo sapiens
  misc_RNA (1)...(19): siRNA sense strand
gguaaggaggcugagauga

SEQ ID NO: 588239 - RNA, 19 nt, Homo sapiens
  misc_RNA (1)...(19): siRNA sense strand
ccuagaggcuacuggaaaa

SEQ ID NO: 588240 - RNA, 19 nt, Homo sapiens
  misc_RNA (1)...(19): siRNA sense strand
cgaaggggcugggaaagga

SEQ ID NO: 588241 - RNA, 19 nt, Homo sapiens
  misc_RNA (1)...(19): siRNA sense strand
cuaagcaacccgaggaaag

SEQ ID NO: 588242 - RNA, 19 nt, Homo sapiens
  misc_RNA (1)...(19): siRNA sense strand
gguccugggcacugaaaga

SEQ ID NO: 588243 - RNA, 19 nt, Homo sapiens
  misc_RNA (1)...(19): siRNA sense strand
ggaagaggucagggcaaga

SEQ ID NO: 588244 - RNA, 19 nt, Homo sapiens
  misc_RNA (1)...(19): siRNA sense strand
agagagaacagagggaaga

SEQ ID NO: 588245 - RNA, 19 nt, Homo sapiens
  misc_RNA (1)...(19): siRNA sense strand
ggcagaggcagccaaguag

SEQ ID NO: 588246 - RNA, 19 nt, Homo sapiens
  misc_RNA (1)...(19): siRNA sense strand
agaggccuaugccagagaa

SEQ ID NO: 588247 - RNA, 19 nt, Homo sapiens
  misc_RNA (1)...(19): siRNA sense strand
gggacaaccgggagaugga

SEQ ID NO: 588248 - RNA, 19 nt, Homo sapiens
  misc_RNA (1)...(19): siRNA sense strand
ccacuuggaggccagaaag

SEQ ID NO: 588249 - RNA, 19 nt, Homo sapiens
  misc_RNA (1)...(19): siRNA sense strand
gagaggaggccaggacaac

SEQ ID NO: 588250 - RNA, 19 nt, Homo sapiens
  misc_RNA (1)...(19): siRNA sense strand
cccaugagcaggaagugaa

SEQ ID NO: 588251 - RNA, 19 nt, Homo sapiens
  misc_RNA (1)...(19): siRNA sense strand
ucacacacagcgucaccaa

SEQ ID NO: 588252 - RNA, 19 nt, Homo sapiens
  misc_RNA (1)...(19): siRNA sense strand
caggauggaagagcuggua

SEQ ID NO: 588253 - RNA, 19 nt, Homo sapiens
  misc_RNA (1)...(19): siRNA sense strand
gcaccuuugucuccuaccu

SEQ ID NO: 588254 - RNA, 19 nt, Homo sapiens
  misc_RNA (1)...(19): siRNA sense strand
cagaggccaaggagacuga

SEQ ID NO: 588255 - RNA, 19 nt, Homo sapiens
  misc_RNA (1)...(19): siRNA sense strand
ggaagccaggacaaucuca

SEQ ID NO: 588256 - RNA, 19 nt, Homo sapiens
  misc_RNA (1)...(19): siRNA sense strand
gggaggaagccaggacaau

SEQ ID NO: 588257 - RNA, 19 nt, Homo sapiens
  misc_RNA (1)...(19): siRNA sense strand
ggaaagacagggaagauug

SEQ ID NO: 588258 - RNA, 19 nt, Homo sapiens
  misc_RNA (1)...(19): siRNA sense strand
gaaaggagaagagguggua

SEQ ID NO: 588259 - RNA, 19 nt, Homo sapiens
  misc_RNA (1)...(19): siRNA sense strand
gaagaggccagggcaauuu

SEQ ID NO: 588260 - RNA, 19 nt, Homo sapiens
  misc_RNA (1)...(19): siRNA sense strand
cagaaagccuggaacaugu

SEQ ID NO: 588261 - RNA, 19 nt, Homo sapiens
  misc_RNA (1)...(19): siRNA sense strand
gaagagaggcugagaagcu

SEQ ID NO: 588262 - RNA, 19 nt, Homo sapiens
  misc_RNA (1)...(19): siRNA sense strand
gagaaggccugugaaagca

SEQ ID NO: 588263 - RNA, 19 nt, Homo sapiens
  misc_RNA (1)...(19): siRNA sense strand
ccagagaaacugaggauga

SEQ ID NO: 588264 - RNA, 19 nt, Homo sapiens
  misc_RNA (1)...(19): siRNA sense strand
ggagaugacagaagacaug

SEQ ID NO: 588265 - RNA, 19 nt, Homo sapiens
  misc_RNA (1)...(19): siRNA sense strand
ggaagaagaggcuguugga

SEQ ID NO: 588266 - RNA, 19 nt, Homo sapiens
  misc_RNA (1)...(19): siRNA sense strand
ugacagaacauccagaaga

SEQ ID NO: 588267 - RNA, 19 nt, Homo sapiens
  misc_RNA (1)...(19): siRNA sense strand
ccgagagucugaacuauca

SEQ ID NO: 588268 - RNA, 19 nt, Homo sapiens
  misc_RNA (1)...(19): siRNA sense strand
gaagugaacagagaagaga

SEQ ID NO: 588269 - RNA, 19 nt, Homo sapiens
  misc_RNA (1)...(19): siRNA sense strand
gaaagacagggaagauugu

SEQ ID NO: 588270 - RNA, 19 nt, Homo sapiens
  misc_RNA (1)...(19): siRNA sense strand
caaggagacugagccagaa

SEQ ID NO: 588271 - RNA, 19 nt, Homo sapiens
  misc_RNA (1)...(19): siRNA sense strand
gacagaacauccagaagag

SEQ ID NO: 588272 - RNA, 19 nt, Homo sapiens
  misc_RNA (1)...(19): siRNA sense strand
ggagaaggccugugaaagc

SEQ ID NO: 588273 - RNA, 19 nt, Homo sapiens
  misc_RNA (1)...(19): siRNA sense strand
gcaugcaggugggcaagaa

SEQ ID NO: 588274 - RNA, 19 nt, Homo sapiens
  misc_RNA (1)...(19): siRNA sense strand
gagaagagaggcugagaag

SEQ ID NO: 588275 - RNA, 19 nt, Homo sapiens
  misc_RNA (1)...(19): siRNA sense strand
gcacugaaagaacagaaga

SEQ ID NO: 588276 - RNA, 19 nt, Homo sapiens
  misc_RNA (1)...(19): siRNA sense strand
ggaagaggccagggcaauu

SEQ ID NO: 588277 - RNA, 19 nt, Homo sapiens
  misc_RNA (1)...(19): siRNA sense strand
ggacauggagagaggaaau

SEQ ID NO: 588278 - RNA, 19 nt, Homo sapiens
  misc_RNA (1)...(19): siRNA sense strand
ggacgcuguuggaagaaga

SEQ ID NO: 588279 - RNA, 19 nt, Homo sapiens
  misc_RNA (1)...(19): siRNA sense strand
cagacagacucaauaugga

SEQ ID NO: 588280 - RNA, 19 nt, Homo sapiens
  misc_RNA (1)...(19): siRNA sense strand
gccuggagaugacagaaga

SEQ ID NO: 588281 - RNA, 19 nt, Homo sapiens
  misc_RNA (1)...(19): siRNA sense strand
ugacagaagacaugaagug

SEQ ID NO: 588282 - RNA, 19 nt, Homo sapiens
  misc_RNA (1)...(19): siRNA sense strand
guaaggaggcugagaugag

SEQ ID NO: 588283 - RNA, 19 nt, Homo sapiens
  misc_RNA (1)...(19): siRNA sense strand
ggcugggacucgaaagaaa

SEQ ID NO: 588284 - RNA, 19 nt, Homo sapiens
  misc_RNA (1)...(19): siRNA sense strand
gaccgagagucugaacuau

SEQ ID NO: 588285 - RNA, 19 nt, Homo sapiens
  misc_RNA (1)...(19): siRNA sense strand
gagagggccuggagaugac

SEQ ID NO: 588286 - RNA, 19 nt, Homo sapiens
  misc_RNA (1)...(19): siRNA sense strand
gcaaggcugggacucgaaa

SEQ ID NO: 588287 - RNA, 19 nt, Homo sapiens
  misc_RNA (1)...(19): siRNA sense strand
ucagacagacucaauaugg

SEQ ID NO: 588288 - RNA, 19 nt, Homo sapiens
  misc_RNA (1)...(19): siRNA sense strand
ugagagggccuggagauga

SEQ ID NO: 588289 - RNA, 19 nt, Homo sapiens
  misc_RNA (1)...(19): siRNA sense strand
ggagggcucagcagaggaa

SEQ ID NO: 588290 - RNA, 19 nt, Homo sapiens
  misc_RNA (1)...(19): siRNA sense strand
ggcggaggcugacagaaca

SEQ ID NO: 588291 - RNA, 19 nt, Homo sapiens
  misc_RNA (1)...(19): siRNA sense strand
gcaggaagugaacagagaa

SEQ ID NO: 588292 - RNA, 19 nt, Homo sapiens
  misc_RNA (1)...(19): siRNA sense strand
ggaggaagccaggacaauc

SEQ ID NO: 588293 - RNA, 19 nt, Homo sapiens
  misc_RNA (1)...(19): siRNA sense strand
gggaaagacagggaagauu

SEQ ID NO: 588294 - RNA, 19 nt, Homo sapiens
  misc_RNA (1)...(19): siRNA sense strand
cagagaaacugaggaugag

SEQ ID NO: 588295 - RNA, 19 nt, Homo sapiens
  misc_RNA (1)...(19): siRNA sense strand
gagaaaggacauggagaga

SEQ ID NO: 588296 - RNA, 19 nt, Homo sapiens
  misc_RNA (1)...(19): siRNA sense strand
gagcuuugagggccaggua

SEQ ID NO: 588297 - RNA, 19 nt, Homo sapiens
  misc_RNA (1)...(19): siRNA sense strand
gacucaauauggagcaguu

SEQ ID NO: 588298 - RNA, 19 nt, Homo sapiens
  misc_RNA (1)...(19): siRNA sense strand
gaugacagaagacaugaag

SEQ ID NO: 588299 - RNA, 19 nt, Homo sapiens
  misc_RNA (1)...(19): siRNA sense strand
aguggacgcuguuggaaga

SEQ ID NO: 588300 - RNA, 19 nt, Homo sapiens
  misc_RNA (1)...(19): siRNA sense strand
gcugacagaacauccagaa

SEQ ID NO: 588301 - RNA, 19 nt, Homo sapiens
  misc_RNA (1)...(19): siRNA sense strand
gacauggagagaggaaaua

SEQ ID NO: 588302 - RNA, 19 nt, Homo sapiens
  misc_RNA (1)...(19): siRNA sense strand
gaggaagccaggacaaucu

SEQ ID NO: 588303 - RNA, 19 nt, Homo sapiens
  misc_RNA (1)...(19): siRNA sense strand
ggagucccaugagcaggaa

SEQ ID NO: 588304 - RNA, 19 nt, Homo sapiens
  misc_RNA (1)...(19): siRNA sense strand
ggaccuggagggccuuaga

SEQ ID NO: 588305 - RNA, 19 nt, Homo sapiens
  misc_RNA (1)...(19): siRNA sense strand
gcacgagaaaggacaugga

SEQ ID NO: 588306 - RNA, 19 nt, Homo sapiens
  misc_RNA (1)...(19): siRNA sense strand
ggaaugggguggccucaca

SEQ ID NO: 588307 - RNA, 19 nt, Homo sapiens
  misc_RNA (1)...(19): siRNA sense strand
ggaagugaacagagaagag

SEQ ID NO: 588308 - RNA, 19 nt, Homo sapiens
  misc_RNA (1)...(19): siRNA sense strand
gcagaggcagccaaguaga

SEQ ID NO: 588309 - RNA, 19 nt, Homo sapiens
  misc_RNA (1)...(19): siRNA sense strand
gcaggugggcaagaauuug

SEQ ID NO: 588310 - RNA, 19 nt, Homo sapiens
  misc_RNA (1)...(19): siRNA sense strand
gaagaggucagggcaagag

SEQ ID NO: 588311 - RNA, 19 nt, Homo sapiens
  misc_RNA (1)...(19): siRNA sense strand
gagaugacagaagacauga

SEQ ID NO: 588312 - RNA, 19 nt, Homo sapiens
  misc_RNA (1)...(19): siRNA sense strand
gaaagccuggaacauguca

SEQ ID NO: 588313 - RNA, 19 nt, Homo sapiens
  misc_RNA (1)...(19): siRNA sense strand
acacacagcgucaccaaag

SEQ ID NO: 588314 - RNA, 19 nt, Homo sapiens
  misc_RNA (1)...(19): siRNA sense strand
ggacaaccucaggcaaaga

SEQ ID NO: 588315 - RNA, 19 nt, Homo sapiens
  misc_RNA (1)...(19): siRNA sense strand
ccugggcacugaaagaaca

SEQ ID NO: 588316 - RNA, 19 nt, Homo sapiens
  misc_RNA (1)...(19): siRNA sense strand
gaagauuguagaggaggaa

SEQ ID NO: 588317 - RNA, 19 nt, Homo sapiens
  misc_RNA (1)...(19): siRNA sense strand
agacagggaagauuguaga

SEQ ID NO: 588318 - RNA, 19 nt, Homo sapiens
  misc_RNA (1)...(19): siRNA sense strand
gggaaaaccgcacgagaaa

SEQ ID NO: 588319 - RNA, 19 nt, Homo sapiens
  misc_RNA (1)...(19): siRNA sense strand
ggugagcccuuuccccaaa

SEQ ID NO: 588320 - RNA, 19 nt, Homo sapiens
  misc_RNA (1)...(19): siRNA sense strand
guggagaaggccugugaaa

SEQ ID NO: 588321 - RNA, 19 nt, Homo sapiens
  misc_RNA (1)...(19): siRNA sense strand
gggaagaggccagggcaau

SEQ ID NO: 588322 - RNA, 19 nt, Homo sapiens
  misc_RNA (1)...(19): siRNA sense strand
gaagaagaggcuguuggau

SEQ ID NO: 588323 - RNA, 19 nt, Homo sapiens
  misc_RNA (1)...(19): siRNA sense strand
gguagaggccgaggaaucu

SEQ ID NO: 588324 - RNA, 19 nt, Homo sapiens
  misc_RNA (1)...(19): siRNA sense strand
gacuagcuguggccuacug

SEQ ID NO: 588325 - RNA, 19 nt, Homo sapiens
  misc_RNA (1)...(19): siRNA sense strand
ggggaaggcuggugcuguu

SEQ ID NO: 588326 - RNA, 19 nt, Homo sapiens
  misc_RNA (1)...(19): siRNA sense strand
gcgugcaccucucgagaag

SEQ ID NO: 588327 - RNA, 19 nt, Homo sapiens
  misc_RNA (1)...(19): siRNA sense strand
ggguagaggccgaggaauc

SEQ ID NO: 588328 - RNA, 19 nt, Homo sapiens
  misc_RNA (1)...(19): siRNA sense strand
gacgaggccuggacaaccu

SEQ ID NO: 588329 - RNA, 19 nt, Homo sapiens
  misc_RNA (1)...(19): siRNA sense strand
gaaaaccgcacgagaaagg

SEQ ID NO: 588330 - RNA, 19 nt, Homo sapiens
  misc_RNA (1)...(19): siRNA sense strand
gugcaccucucgagaagcu

SEQ ID NO: 588331 - RNA, 19 nt, Homo sapiens
  misc_RNA (1)...(19): siRNA sense strand
gcugagagggccuggagau

SEQ ID NO: 588332 - RNA, 19 nt, Homo sapiens
  misc_RNA (1)...(19): siRNA sense strand
agcaggaagugaacagaga

SEQ ID NO: 588333 - RNA, 19 nt, Homo sapiens
  misc_RNA (1)...(19): siRNA sense strand
aaagacagggaagauugua

SEQ ID NO: 588334 - RNA, 19 nt, Homo sapiens
  misc_RNA (1)...(19): siRNA sense strand
gguaaggaggcugagauga

SEQ ID NO: 588335 - RNA, 19 nt, Homo sapiens
  misc_RNA (1)...(19): siRNA sense strand
ccuagaggcuacuggaaaa

SEQ ID NO: 588336 - RNA, 19 nt, Homo sapiens
  misc_RNA (1)...(19): siRNA sense strand
cgaaggggcugggaaagga

SEQ ID NO: 588337 - RNA, 19 nt, Homo sapiens
  misc_RNA (1)...(19): siRNA sense strand
cuaagcaacccgaggaaag

SEQ ID NO: 588338 - RNA, 19 nt, Homo sapiens
  misc_RNA (1)...(19): siRNA sense strand
gguccugggcacugaaaga

SEQ ID NO: 588339 - RNA, 19 nt, Homo sapiens
  misc_RNA (1)...(19): siRNA sense strand
ggaagaggucagggcaaga

SEQ ID NO: 588340 - RNA, 19 nt, Homo sapiens
  misc_RNA (1)...(19): siRNA sense strand
agagagaacagagggaaga

SEQ ID NO: 588341 - RNA, 19 nt, Homo sapiens
  misc_RNA (1)...(19): siRNA sense strand
ggcagaggcagccaaguag

SEQ ID NO: 588342 - RNA, 19 nt, Homo sapiens
  misc_RNA (1)...(19): siRNA sense strand
agaggccuaugccagagaa

SEQ ID NO: 588343 - RNA, 19 nt, Homo sapiens
  misc_RNA (1)...(19): siRNA sense strand
gggacaaccgggagaugga

SEQ ID NO: 588344 - RNA, 19 nt, Homo sapiens
  misc_RNA (1)...(19): siRNA sense strand
ccacuuggaggccagaaag

SEQ ID NO: 588345 - RNA, 19 nt, Homo sapiens
  misc_RNA (1)...(19): siRNA sense strand
gagaggaggccaggacaac

SEQ ID NO: 588346 - RNA, 19 nt, Homo sapiens
  misc_RNA (1)...(19): siRNA sense strand
cccaugagcaggaagugaa

SEQ ID NO: 588347 - RNA, 19 nt, Homo sapiens
  misc_RNA (1)...(19): siRNA sense strand
ucacacacagcgucaccaa

SEQ ID NO: 588348 - RNA, 19 nt, Homo sapiens
  misc_RNA (1)...(19): siRNA sense strand
caggauggaagagcuggua

SEQ ID NO: 588349 - RNA, 19 nt, Homo sapiens
  misc_RNA (1)...(19): siRNA sense strand
gcaccuuugucuccuaccu

SEQ ID NO: 588350 - RNA, 19 nt, Homo sapiens
  misc_RNA (1)...(19): siRNA sense strand
cagaggccaaggagacuga

SEQ ID NO: 588351 - RNA, 19 nt, Homo sapiens
  misc_RNA (1)...(19): siRNA sense strand
ggaagccaggacaaucuca

SEQ ID NO: 588352 - RNA, 19 nt, Homo sapiens
  misc_RNA (1)...(19): siRNA sense strand
gggaggaagccaggacaau

SEQ ID NO: 588353 - RNA, 19 nt, Homo sapiens
  misc_RNA (1)...(19): siRNA sense strand
gcaagagguuaaagaagua

SEQ ID NO: 588354 - RNA, 19 nt, Homo sapiens
  misc_RNA (1)...(19): siRNA sense strand
ccagaaacaucgaaacaaa

SEQ ID NO: 588355 - RNA, 19 nt, Homo sapiens
  misc_RNA (1)...(19): siRNA sense strand
uagaugaccuccuggcuua

SEQ ID NO: 588356 - RNA, 19 nt, Homo sapiens
  misc_RNA (1)...(19): siRNA sense strand
gggaugagcuagaaauuca

SEQ ID NO: 588357 - RNA, 19 nt, Homo sapiens
  misc_RNA (1)...(19): siRNA sense strand
ggucaacuauucugcauga

SEQ ID NO: 588358 - RNA, 19 nt, Homo sapiens
  misc_RNA (1)...(19): siRNA sense strand
ucaccaaccugcucaugua

SEQ ID NO: 588359 - RNA, 19 nt, Homo sapiens
  misc_RNA (1)...(19): siRNA sense strand
gaaggugcauuuccaguca

SEQ ID NO: 588360 - RNA, 19 nt, Homo sapiens
  misc_RNA (1)...(19): siRNA sense strand
uaagaaagaaggugcauuu

SEQ ID NO: 588361 - RNA, 19 nt, Homo sapiens
  misc_RNA (1)...(19): siRNA sense strand
gggaguuacuuaccaauga

SEQ ID NO: 588362 - RNA, 19 nt, Homo sapiens
  misc_RNA (1)...(19): siRNA sense strand
aaacuuggcuggcucucua

SEQ ID NO: 588363 - RNA, 19 nt, Homo sapiens
  misc_RNA (1)...(19): siRNA sense strand
gaaaggcaacuauucagaa

SEQ ID NO: 588364 - RNA, 19 nt, Homo sapiens
  misc_RNA (1)...(19): siRNA sense strand
guucugcccuggauucuaa

SEQ ID NO: 588365 - RNA, 19 nt, Homo sapiens
  misc_RNA (1)...(19): siRNA sense strand
caaauaagcacauccacuu

SEQ ID NO: 588366 - RNA, 19 nt, Homo sapiens
  misc_RNA (1)...(19): siRNA sense strand
ggcaagagguuaaagaagu

SEQ ID NO: 588367 - RNA, 19 nt, Homo sapiens
  misc_RNA (1)...(19): siRNA sense strand
gcacagccguccugguaug

SEQ ID NO: 588368 - RNA, 19 nt, Homo sapiens
  misc_RNA (1)...(19): siRNA sense strand
caacacgucugcaccuuca

SEQ ID NO: 588369 - RNA, 19 nt, Homo sapiens
  misc_RNA (1)...(19): siRNA sense strand
gcucagauuugcucauuag

SEQ ID NO: 588370 - RNA, 19 nt, Homo sapiens
  misc_RNA (1)...(19): siRNA sense strand
aaaggcaacuauucagaaa

SEQ ID NO: 588371 - RNA, 19 nt, Homo sapiens
  misc_RNA (1)...(19): siRNA sense strand
auucuaagcugaagguuaa

SEQ ID NO: 588372 - RNA, 19 nt, Homo sapiens
  misc_RNA (1)...(19): siRNA sense strand
caacuauucugcaugaaag

SEQ ID NO: 588373 - RNA, 19 nt, Homo sapiens
  misc_RNA (1)...(19): siRNA sense strand
gcagugcaguugugaaagu

SEQ ID NO: 588374 - RNA, 19 nt, Homo sapiens
  misc_RNA (1)...(19): siRNA sense strand
ggucugagaguccuaauga

SEQ ID NO: 588375 - RNA, 19 nt, Homo sapiens
  misc_RNA (1)...(19): siRNA sense strand
gauggaagccucucagugu

SEQ ID NO: 588376 - RNA, 19 nt, Homo sapiens
  misc_RNA (1)...(19): siRNA sense strand
gggcagagcuacagagcau

SEQ ID NO: 588377 - RNA, 19 nt, Homo sapiens
  misc_RNA (1)...(19): siRNA sense strand
ccagaucaagcuacucuua

SEQ ID NO: 588378 - RNA, 19 nt, Homo sapiens
  misc_RNA (1)...(19): siRNA sense strand
gaauugagaaagugacuga

SEQ ID NO: 588379 - RNA, 19 nt, Homo sapiens
  misc_RNA (1)...(19): siRNA sense strand
gagcagugcaguugugaaa

SEQ ID NO: 588380 - RNA, 19 nt, Homo sapiens
  misc_RNA (1)...(19): siRNA sense strand
agaaauggauccacaugug

SEQ ID NO: 588381 - RNA, 19 nt, Homo sapiens
  misc_RNA (1)...(19): siRNA sense strand
gaaagacacgcugcagaaa

SEQ ID NO: 588382 - RNA, 19 nt, Homo sapiens
  misc_RNA (1)...(19): siRNA sense strand
ggccaagaguucugccuuu

SEQ ID NO: 588383 - RNA, 19 nt, Homo sapiens
  misc_RNA (1)...(19): siRNA sense strand
gcucuugguuucagcuuug

SEQ ID NO: 588384 - RNA, 19 nt, Homo sapiens
  misc_RNA (1)...(19): siRNA sense strand
ccaaugaguccaccaauca

SEQ ID NO: 588385 - RNA, 19 nt, Homo sapiens
  misc_RNA (1)...(19): siRNA sense strand
cagcauccaucgucgaguu

SEQ ID NO: 588386 - RNA, 19 nt, Homo sapiens
  misc_RNA (1)...(19): siRNA sense strand
gaaauggauccacaugugu

SEQ ID NO: 588387 - RNA, 19 nt, Homo sapiens
  misc_RNA (1)...(19): siRNA sense strand
gaggcccugugcucuauaa

SEQ ID NO: 588388 - RNA, 19 nt, Homo sapiens
  misc_RNA (1)...(19): siRNA sense strand
ggaaauuaaucggguugga

SEQ ID NO: 588389 - RNA, 19 nt, Homo sapiens
  misc_RNA (1)...(19): siRNA sense strand
gcacauccacuuugaguac

SEQ ID NO: 588390 - RNA, 19 nt, Homo sapiens
  misc_RNA (1)...(19): siRNA sense strand
caagcuacucuuagaaauu

SEQ ID NO: 588391 - RNA, 19 nt, Homo sapiens
  misc_RNA (1)...(19): siRNA sense strand
gaaagcagcaccagcaacu

SEQ ID NO: 588392 - RNA, 19 nt, Homo sapiens
  misc_RNA (1)...(19): siRNA sense strand
ggagaagccgcucuuguuc

SEQ ID NO: 588393 - RNA, 19 nt, Homo sapiens
  misc_RNA (1)...(19): siRNA sense strand
aagacacgcugcagaaaug

SEQ ID NO: 588394 - RNA, 19 nt, Homo sapiens
  misc_RNA (1)...(19): siRNA sense strand
ugaaagacacgcugcagaa

SEQ ID NO: 588395 - RNA, 19 nt, Homo sapiens
  misc_RNA (1)...(19): siRNA sense strand
gccaagcccucacagacuu

SEQ ID NO: 588396 - RNA, 19 nt, Homo sapiens
  misc_RNA (1)...(19): siRNA sense strand
gauucuaagcugaagguua

SEQ ID NO: 588397 - RNA, 19 nt, Homo sapiens
  misc_RNA (1)...(19): siRNA sense strand
ucagagagcucagagaaac

SEQ ID NO: 588398 - RNA, 19 nt, Homo sapiens
  misc_RNA (1)...(19): siRNA sense strand
ccacacaggccaagaguuc

SEQ ID NO: 588399 - RNA, 19 nt, Homo sapiens
  misc_RNA (1)...(19): siRNA sense strand
ccagaaaggcaacuauuca

SEQ ID NO: 588400 - RNA, 19 nt, Homo sapiens
  misc_RNA (1)...(19): siRNA sense strand
ggcuggcucucuaguauga

SEQ ID NO: 588401 - RNA, 19 nt, Homo sapiens
  misc_RNA (1)...(19): siRNA sense strand
ccacugagcaugacaagca

SEQ ID NO: 588402 - RNA, 19 nt, Homo sapiens
  misc_RNA (1)...(19): siRNA sense strand
aagccagacuccagaauug

SEQ ID NO: 588403 - RNA, 19 nt, Homo sapiens
  misc_RNA (1)...(19): siRNA sense strand
gcaacaggaugcccucaac

SEQ ID NO: 588404 - RNA, 19 nt, Homo sapiens
  misc_RNA (1)...(19): siRNA sense strand
guagcggccucuccaugaa

SEQ ID NO: 588405 - RNA, 19 nt, Homo sapiens
  misc_RNA (1)...(19): siRNA sense strand
gggccgagaucgagcacaa

SEQ ID NO: 588406 - RNA, 19 nt, Homo sapiens
  misc_RNA (1)...(19): siRNA sense strand
cagcuggauucuucuaguu

SEQ ID NO: 588407 - RNA, 19 nt, Homo sapiens
  misc_RNA (1)...(19): siRNA sense strand
aagcugcacucaguucuuu

SEQ ID NO: 588408 - RNA, 19 nt, Homo sapiens
  misc_RNA (1)...(19): siRNA sense strand
gcagagcuacagagcauug

SEQ ID NO: 588409 - RNA, 19 nt, Homo sapiens
  misc_RNA (1)...(19): siRNA sense strand
gcaacuccccuucaaauaa

SEQ ID NO: 588410 - RNA, 19 nt, Homo sapiens
  misc_RNA (1)...(19): siRNA sense strand
ggauccacauguguaauga

SEQ ID NO: 588411 - RNA, 19 nt, Homo sapiens
  misc_RNA (1)...(19): siRNA sense strand
gaucaagcuacucuuagaa

SEQ ID NO: 588412 - RNA, 19 nt, Homo sapiens
  misc_RNA (1)...(19): siRNA sense strand
ccaaguggcaagagguuaa

SEQ ID NO: 588413 - RNA, 19 nt, Homo sapiens
  misc_RNA (1)...(19): siRNA sense strand
aagcuacucuuagaaauuc

SEQ ID NO: 588414 - RNA, 19 nt, Homo sapiens
  misc_RNA (1)...(19): siRNA sense strand
gcugaagguuaaacuagau

SEQ ID NO: 588415 - RNA, 19 nt, Homo sapiens
  misc_RNA (1)...(19): siRNA sense strand
caucagcccuuguguacag

SEQ ID NO: 588416 - RNA, 19 nt, Homo sapiens
  misc_RNA (1)...(19): siRNA sense strand
auaagcacauccacuuuga

SEQ ID NO: 588417 - RNA, 19 nt, Homo sapiens
  misc_RNA (1)...(19): siRNA sense strand
gcagaaauggauccacaug

SEQ ID NO: 588418 - RNA, 19 nt, Homo sapiens
  misc_RNA (1)...(19): siRNA sense strand
gcagcagugucacauccaa

SEQ ID NO: 588419 - RNA, 19 nt, Homo sapiens
  misc_RNA (1)...(19): siRNA sense strand
gcacucaguucuuuucaug

SEQ ID NO: 588420 - RNA, 19 nt, Homo sapiens
  misc_RNA (1)...(19): siRNA sense strand
gccaagaguucugccuuug

SEQ ID NO: 588421 - RNA, 19 nt, Homo sapiens
  misc_RNA (1)...(19): siRNA sense strand
ugaagggucucgcgggaau

SEQ ID NO: 588422 - RNA, 19 nt, Homo sapiens
  misc_RNA (1)...(19): siRNA sense strand
ucaagcuacucuuagaaau

SEQ ID NO: 588423 - RNA, 19 nt, Homo sapiens
  misc_RNA (1)...(19): siRNA sense strand
gaucugcguuaccucaaca

SEQ ID NO: 588424 - RNA, 19 nt, Homo sapiens
  misc_RNA (1)...(19): siRNA sense strand
gguaucaaggcucagauuu

SEQ ID NO: 588425 - RNA, 19 nt, Homo sapiens
  misc_RNA (1)...(19): siRNA sense strand
caagccagacuccagaauu

SEQ ID NO: 588426 - RNA, 19 nt, Homo sapiens
  misc_RNA (1)...(19): siRNA sense strand
ugccaaaggugacauuaca

SEQ ID NO: 588427 - RNA, 19 nt, Homo sapiens
  misc_RNA (1)...(19): siRNA sense strand
acucaucacugcccaagga

SEQ ID NO: 588428 - RNA, 19 nt, Homo sapiens
  misc_RNA (1)...(19): siRNA sense strand
gguuucagcuuugcaggaa

SEQ ID NO: 588429 - RNA, 19 nt, Homo sapiens
  misc_RNA (1)...(19): siRNA sense strand
gauaugaugcagcaacugu

SEQ ID NO: 588430 - RNA, 19 nt, Homo sapiens
  misc_RNA (1)...(19): siRNA sense strand
guaucaaggcucagauuug

SEQ ID NO: 588431 - RNA, 19 nt, Homo sapiens
  misc_RNA (1)...(19): siRNA sense strand
guuccuggcuccuuguuca

SEQ ID NO: 588432 - RNA, 19 nt, Homo sapiens
  misc_RNA (1)...(19): siRNA sense strand
uaaaucaaccagaaacauc

SEQ ID NO: 588433 - RNA, 19 nt, Homo sapiens
  misc_RNA (1)...(19): siRNA sense strand
cagaucagguuuggacuuc

SEQ ID NO: 588434 - RNA, 19 nt, Homo sapiens
  misc_RNA (1)...(19): siRNA sense strand
cgcugcagcugcuuuauga

SEQ ID NO: 588435 - RNA, 19 nt, Homo sapiens
  misc_RNA (1)...(19): siRNA sense strand
cagcugggaugugcuaugu

SEQ ID NO: 588436 - RNA, 19 nt, Homo sapiens
  misc_RNA (1)...(19): siRNA sense strand
agaucaagcuacucuuaga

SEQ ID NO: 588437 - RNA, 19 nt, Homo sapiens
  misc_RNA (1)...(19): siRNA sense strand
ccacauguguaaugaagac

SEQ ID NO: 588438 - RNA, 19 nt, Homo sapiens
  misc_RNA (1)...(19): siRNA sense strand
cuguaugguucaaguagua

SEQ ID NO: 588439 - RNA, 19 nt, Homo sapiens
  misc_RNA (1)...(19): siRNA sense strand
ggaguuacuuaccaaugag

SEQ ID NO: 588440 - RNA, 19 nt, Homo sapiens
  misc_RNA (1)...(19): siRNA sense strand
gcaacuauucagaaacuuc

SEQ ID NO: 588441 - RNA, 19 nt, Homo sapiens
  misc_RNA (1)...(19): siRNA sense strand
gaucagguuuggacuucuc

SEQ ID NO: 588442 - RNA, 19 nt, Homo sapiens
  misc_RNA (1)...(19): siRNA sense strand
caagaguucugccuuugac

SEQ ID NO: 588443 - RNA, 19 nt, Homo sapiens
  misc_RNA (1)...(19): siRNA sense strand
gaaggacugcugccagauc

SEQ ID NO: 588444 - RNA, 19 nt, Homo sapiens
  misc_RNA (1)...(19): siRNA sense strand
uaucaaggcucagauuugc

SEQ ID NO: 588445 - RNA, 19 nt, Homo sapiens
  misc_RNA (1)...(19): siRNA sense strand
gcccugugcucuauaaugc

SEQ ID NO: 588446 - RNA, 19 nt, Homo sapiens
  misc_RNA (1)...(19): siRNA sense strand
ucuuagaaauuccggagaa

SEQ ID NO: 588447 - RNA, 19 nt, Homo sapiens
  misc_RNA (1)...(19): siRNA sense strand
gcaccuucauuauucaaac

SEQ ID NO: 588448 - RNA, 19 nt, Homo sapiens
  misc_RNA (1)...(19): siRNA sense strand
cgucugcaccuucauuauu

SEQ ID NO: 588449 - RNA, 19 nt, Homo sapiens
  misc_RNA (1)...(19): siRNA sense strand
aguaguagcugccuaugag

SEQ ID NO: 588450 - RNA, 19 nt, Homo sapiens
  misc_RNA (1)...(19): siRNA sense strand
cugcacagccguccuggua

SEQ ID NO: 588451 - RNA, 19 nt, Homo sapiens
  misc_RNA (1)...(19): siRNA sense strand
uggagaagccgcucuuguu

SEQ ID NO: 588452 - RNA, 19 nt, Homo sapiens
  misc_RNA (1)...(19): siRNA sense strand
ucaacuauucugcaugaaa

SEQ ID NO: 588453 - RNA, 19 nt, Homo sapiens
  misc_RNA (1)...(19): siRNA sense strand
ggaccaacaugcucuacua

SEQ ID NO: 588454 - RNA, 19 nt, Homo sapiens
  misc_RNA (1)...(19): siRNA sense strand
guauguggcuuccauggua

SEQ ID NO: 588455 - RNA, 19 nt, Homo sapiens
  misc_RNA (1)...(19): siRNA sense strand
gcaagaagcaccucacaga

SEQ ID NO: 588456 - RNA, 19 nt, Homo sapiens
  misc_RNA (1)...(19): siRNA sense strand
ggagacuauuuccgaguua

SEQ ID NO: 588457 - RNA, 19 nt, Homo sapiens
  misc_RNA (1)...(19): siRNA sense strand
ggagagauccugucugugu

SEQ ID NO: 588458 - RNA, 19 nt, Homo sapiens
  misc_RNA (1)...(19): siRNA sense strand
ugacgagcauguacaauga

SEQ ID NO: 588459 - RNA, 19 nt, Homo sapiens
  misc_RNA (1)...(19): siRNA sense strand
gcacaucgccaucgagaga

SEQ ID NO: 588460 - RNA, 19 nt, Homo sapiens
  misc_RNA (1)...(19): siRNA sense strand
ugagagaccugugccguuu

SEQ ID NO: 588461 - RNA, 19 nt, Homo sapiens
  misc_RNA (1)...(19): siRNA sense strand
uggaggagcucaccaacaa

SEQ ID NO: 588462 - RNA, 19 nt, Homo sapiens
  misc_RNA (1)...(19): siRNA sense strand
gccuggagcuguucaaguu

SEQ ID NO: 588463 - RNA, 19 nt, Homo sapiens
  misc_RNA (1)...(19): siRNA sense strand
caucuaugccgucaugaua

SEQ ID NO: 588464 - RNA, 19 nt, Homo sapiens
  misc_RNA (1)...(19): siRNA sense strand
gagagauccugucuguguu

SEQ ID NO: 588465 - RNA, 19 nt, Homo sapiens
  misc_RNA (1)...(19): siRNA sense strand
gagcauguacaaugagauu

SEQ ID NO: 588466 - RNA, 19 nt, Homo sapiens
  misc_RNA (1)...(19): siRNA sense strand
uccgagggauucaguauuu

SEQ ID NO: 588467 - RNA, 19 nt, Homo sapiens
  misc_RNA (1)...(19): siRNA sense strand
guggacagcuacagugaga

SEQ ID NO: 588468 - RNA, 19 nt, Homo sapiens
  misc_RNA (1)...(19): siRNA sense strand
ucagccaccucaaggagua

SEQ ID NO: 588469 - RNA, 19 nt, Homo sapiens
  misc_RNA (1)...(19): siRNA sense strand
ggacaagugggacagauuc

SEQ ID NO: 588470 - RNA, 19 nt, Homo sapiens
  misc_RNA (1)...(19): siRNA sense strand
gaccuggaguucacugaga

SEQ ID NO: 588471 - RNA, 19 nt, Homo sapiens
  misc_RNA (1)...(19): siRNA sense strand
agaagcaccucacagacaa

SEQ ID NO: 588472 - RNA, 19 nt, Homo sapiens
  misc_RNA (1)...(19): siRNA sense strand
gcaagaacaucuggaagcu

SEQ ID NO: 588473 - RNA, 19 nt, Homo sapiens
  misc_RNA (1)...(19): siRNA sense strand
gcugcuggccuauguaauu

SEQ ID NO: 588474 - RNA, 19 nt, Homo sapiens
  misc_RNA (1)...(19): siRNA sense strand
cuucaaggcugucuucauc

SEQ ID NO: 588475 - RNA, 19 nt, Homo sapiens
  misc_RNA (1)...(19): siRNA sense strand
caccauggcugccuacuac

SEQ ID NO: 588476 - RNA, 19 nt, Homo sapiens
  misc_RNA (1)...(19): siRNA sense strand
ggacagcuacagugagaug

SEQ ID NO: 588477 - RNA, 19 nt, Homo sapiens
  misc_RNA (1)...(19): siRNA sense strand
cccgauagcuccuacaaca

SEQ ID NO: 588478 - RNA, 19 nt, Homo sapiens
  misc_RNA (1)...(19): siRNA sense strand
ugagaacuaugacuucaag

SEQ ID NO: 588479 - RNA, 19 nt, Homo sapiens
  misc_RNA (1)...(19): siRNA sense strand
agaagaugauccugagaga

SEQ ID NO: 588480 - RNA, 19 nt, Homo sapiens
  misc_RNA (1)...(19): siRNA sense strand
ggaggagucuacuucuuuu

SEQ ID NO: 588481 - RNA, 19 nt, Homo sapiens
  misc_RNA (1)...(19): siRNA sense strand
ccugugccguuucauguuu

SEQ ID NO: 588482 - RNA, 19 nt, Homo sapiens
  misc_RNA (1)...(19): siRNA sense strand
gaucgcaggaguaucuuug

SEQ ID NO: 588483 - RNA, 19 nt, Homo sapiens
  misc_RNA (1)...(19): siRNA sense strand
gaggagcucaccaacaaga

SEQ ID NO: 588484 - RNA, 19 nt, Homo sapiens
  misc_RNA (1)...(19): siRNA sense strand
guucaaagacccugagaca

SEQ ID NO: 588485 - RNA, 19 nt, Homo sapiens
  misc_RNA (1)...(19): siRNA sense strand
ucaagcgcaucuucuacuu

SEQ ID NO: 588486 - RNA, 19 nt, Homo sapiens
  misc_RNA (1)...(19): siRNA sense strand
gugagacugucaacaagau

SEQ ID NO: 588487 - RNA, 19 nt, Homo sapiens
  misc_RNA (1)...(19): siRNA sense strand
ccaccugccuggagcuguu

SEQ ID NO: 588488 - RNA, 19 nt, Homo sapiens
  misc_RNA (1)...(19): siRNA sense strand
cuggagagauccugucugu

SEQ ID NO: 588489 - RNA, 19 nt, Homo sapiens
  misc_RNA (1)...(19): siRNA sense strand
gaggcaagugcucgagaua

SEQ ID NO: 588490 - RNA, 19 nt, Homo sapiens
  misc_RNA (1)...(19): siRNA sense strand
gcacaggagagcaagaaca

SEQ ID NO: 588491 - RNA, 19 nt, Homo sapiens
  misc_RNA (1)...(19): siRNA sense strand
aagcgcaucuucuacuuca

SEQ ID NO: 588492 - RNA, 19 nt, Homo sapiens
  misc_RNA (1)...(19): siRNA sense strand
ucacugagaacuaugacuu

SEQ ID NO: 588493 - RNA, 19 nt, Homo sapiens
  misc_RNA (1)...(19): siRNA sense strand
cuacaucgucuucuuguuc

SEQ ID NO: 588494 - RNA, 19 nt, Homo sapiens
  misc_RNA (1)...(19): siRNA sense strand
ccuauguaauucucaccua

SEQ ID NO: 588495 - RNA, 19 nt, Homo sapiens
  misc_RNA (1)...(19): siRNA sense strand
ggcaagugcucgagauagg

SEQ ID NO: 588496 - RNA, 19 nt, Homo sapiens
  misc_RNA (1)...(19): siRNA sense strand
ugaagccguugcucagaau

SEQ ID NO: 588497 - RNA, 19 nt, Homo sapiens
  misc_RNA (1)...(19): siRNA sense strand
agaggacgcugaggucuuc

SEQ ID NO: 588498 - RNA, 19 nt, Homo sapiens
  misc_RNA (1)...(19): siRNA sense strand
ucacagacaacgaguucaa

SEQ ID NO: 588499 - RNA, 19 nt, Homo sapiens
  misc_RNA (1)...(19): siRNA sense strand
gugacgagcauguacaaug

SEQ ID NO: 588500 - RNA, 19 nt, Homo sapiens
  misc_RNA (1)...(19): siRNA sense strand
gcagacacuggaagaacuu

SEQ ID NO: 588501 - RNA, 19 nt, Homo sapiens
  misc_RNA (1)...(19): siRNA sense strand
agaagacccucaggcucua

SEQ ID NO: 588502 - RNA, 19 nt, Homo sapiens
  misc_RNA (1)...(19): siRNA sense strand
ucaaggcugucuucaucau

SEQ ID NO: 588503 - RNA, 19 nt, Homo sapiens
  misc_RNA (1)...(19): siRNA sense strand
uggugacgcugauugaaga

SEQ ID NO: 588504 - RNA, 19 nt, Homo sapiens
  misc_RNA (1)...(19): siRNA sense strand
gaccugugccguuucaugu

SEQ ID NO: 588505 - RNA, 19 nt, Homo sapiens
  misc_RNA (1)...(19): siRNA sense strand
cgaugaagacccuguuugu

SEQ ID NO: 588506 - RNA, 19 nt, Homo sapiens
  misc_RNA (1)...(19): siRNA sense strand
uaggaggagucuacuucuu

SEQ ID NO: 588507 - RNA, 19 nt, Homo sapiens
  misc_RNA (1)...(19): siRNA sense strand
agagauccugucuguguua

SEQ ID NO: 588508 - RNA, 19 nt, Homo sapiens
  misc_RNA (1)...(19): siRNA sense strand
uggagacuauuuccgaguu

SEQ ID NO: 588509 - RNA, 19 nt, Homo sapiens
  misc_RNA (1)...(19): siRNA sense strand
gcaaacggacagccugaag

SEQ ID NO: 588510 - RNA, 19 nt, Homo sapiens
  misc_RNA (1)...(19): siRNA sense strand
gggugagacugucaacaag

SEQ ID NO: 588511 - RNA, 19 nt, Homo sapiens
  misc_RNA (1)...(19): siRNA sense strand
guuaggaggagucuacuuc

SEQ ID NO: 588512 - RNA, 19 nt, Homo sapiens
  misc_RNA (1)...(19): siRNA sense strand
caucuucuacuucaacuuc

SEQ ID NO: 588513 - RNA, 19 nt, Homo sapiens
  misc_RNA (1)...(19): siRNA sense strand
ggucuuggccuauauucuc

SEQ ID NO: 588514 - RNA, 19 nt, Homo sapiens
  misc_RNA (1)...(19): siRNA sense strand
aaacggacagccugaagga

SEQ ID NO: 588515 - RNA, 19 nt, Homo sapiens
  misc_RNA (1)...(19): siRNA sense strand
ucgcaggaguaucuuugaa

SEQ ID NO: 588516 - RNA, 19 nt, Homo sapiens
  misc_RNA (1)...(19): siRNA sense strand
ggcagacacuggaagaacu

SEQ ID NO: 588517 - RNA, 19 nt, Homo sapiens
  misc_RNA (1)...(19): siRNA sense strand
gaugaagacccuguuugug

SEQ ID NO: 588518 - RNA, 19 nt, Homo sapiens
  misc_RNA (1)...(19): siRNA sense strand
aggaggagucuacuucuuu

SEQ ID NO: 588519 - RNA, 19 nt, Homo sapiens
  misc_RNA (1)...(19): siRNA sense strand
gaagccguugcucagaaua

SEQ ID NO: 588520 - RNA, 19 nt, Homo sapiens
  misc_RNA (1)...(19): siRNA sense strand
ugaaagccaugcucaaccu

SEQ ID NO: 588521 - RNA, 19 nt, Homo sapiens
  misc_RNA (1)...(19): siRNA sense strand
gagcaagaagcaccucaca

SEQ ID NO: 588522 - RNA, 19 nt, Homo sapiens
  misc_RNA (1)...(19): siRNA sense strand
ucaacuuccuggucuacug

SEQ ID NO: 588523 - RNA, 19 nt, Homo sapiens
  misc_RNA (1)...(19): siRNA sense strand
gccuguacaugaucaucuu

SEQ ID NO: 588524 - RNA, 19 nt, Homo sapiens
  misc_RNA (1)...(19): siRNA sense strand
ccaacaugcucuacuacac

SEQ ID NO: 588525 - RNA, 19 nt, Homo sapiens
  misc_RNA (1)...(19): siRNA sense strand
uugaagccguugcucagaa

SEQ ID NO: 588526 - RNA, 19 nt, Homo sapiens
  misc_RNA (1)...(19): siRNA sense strand
gcauguacaaugagauucu

SEQ ID NO: 588527 - RNA, 19 nt, Homo sapiens
  misc_RNA (1)...(19): siRNA sense strand
aaguuuaucugcgacaguu

SEQ ID NO: 588528 - RNA, 19 nt, Homo sapiens
  misc_RNA (1)...(19): siRNA sense strand
gcucagcccgaggaaguuu

SEQ ID NO: 588529 - RNA, 19 nt, Homo sapiens
  misc_RNA (1)...(19): siRNA sense strand
uaugaucgcaggaguaucu

SEQ ID NO: 588530 - RNA, 19 nt, Homo sapiens
  misc_RNA (1)...(19): siRNA sense strand
ggugagacugucaacaaga

SEQ ID NO: 588531 - RNA, 19 nt, Homo sapiens
  misc_RNA (1)...(19): siRNA sense strand
cagacaacgaguucaaaga

SEQ ID NO: 588532 - RNA, 19 nt, Homo sapiens
  misc_RNA (1)...(19): siRNA sense strand
uugaagacgggaagaauga

SEQ ID NO: 588533 - RNA, 19 nt, Homo sapiens
  misc_RNA (1)...(19): siRNA sense strand
gauugaagacgggaagaau

SEQ ID NO: 588534 - RNA, 19 nt, Homo sapiens
  misc_RNA (1)...(19): siRNA sense strand
agagaccugugccguuuca

SEQ ID NO: 588535 - RNA, 19 nt, Homo sapiens
  misc_RNA (1)...(19): siRNA sense strand
guacuucagccaccucaag

SEQ ID NO: 588536 - RNA, 19 nt, Homo sapiens
  misc_RNA (1)...(19): siRNA sense strand
uggcuugccucccuuuaag

SEQ ID NO: 588537 - RNA, 19 nt, Homo sapiens
  misc_RNA (1)...(19): siRNA sense strand
cgaaguuugugacgagcau

SEQ ID NO: 588538 - RNA, 19 nt, Homo sapiens
  misc_RNA (1)...(19): siRNA sense strand
ugaacuggaccaccuggaa

SEQ ID NO: 588539 - RNA, 19 nt, Homo sapiens
  misc_RNA (1)...(19): siRNA sense strand
gagauccugucuguguuag

SEQ ID NO: 588540 - RNA, 19 nt, Homo sapiens
  misc_RNA (1)...(19): siRNA sense strand
ccgaguuacuggagagauc

SEQ ID NO: 588541 - RNA, 19 nt, Homo sapiens
  misc_RNA (1)...(19): siRNA sense strand
acacggacagcuacuacaa

SEQ ID NO: 588542 - RNA, 19 nt, Homo sapiens
  misc_RNA (1)...(19): siRNA sense strand
gacuaccgguggugcuuca

SEQ ID NO: 588543 - RNA, 19 nt, Homo sapiens
  misc_RNA (1)...(19): siRNA sense strand
caggagagcaagaacaucu

SEQ ID NO: 588544 - RNA, 19 nt, Homo sapiens
  misc_RNA (1)...(19): siRNA sense strand
gauggcuugccucccuuua

SEQ ID NO: 588545 - RNA, 19 nt, Homo sapiens
  misc_RNA (1)...(19): siRNA sense strand
aagaagcaccucacagaca

SEQ ID NO: 588546 - RNA, 19 nt, Homo sapiens
  misc_RNA (1)...(19): siRNA sense strand
cagcuacagugagaugcuu

SEQ ID NO: 588547 - RNA, 19 nt, Homo sapiens
  misc_RNA (1)...(19): siRNA sense strand
ucuacugccuguacaugau

SEQ ID NO: 588548 - RNA, 19 nt, Homo sapiens
  misc_RNA (1)...(19): siRNA sense strand
gaaguuuaucugcgacagu

SEQ ID NO: 588549 - RNA, 19 nt, Homo sapiens
  misc_RNA (1)...(19): siRNA sense strand
caacgugggcaucaucaac

SEQ ID NO: 588550 - RNA, 19 nt, Homo sapiens
  misc_RNA (1)...(19): siRNA sense strand
gagacuauuuccgaguuac

SEQ ID NO: 588551 - RNA, 19 nt, Homo sapiens
  misc_RNA (1)...(19): siRNA sense strand
ucaccauggcugccuacua

SEQ ID NO: 588552 - RNA, 19 nt, Homo sapiens
  misc_RNA (1)...(19): siRNA sense strand
ugggugagacugucaacaa

SEQ ID NO: 588553 - RNA, 19 nt, Homo sapiens
  misc_RNA (1)...(19): siRNA sense strand
ggaccaacaugcucuacua

SEQ ID NO: 588554 - RNA, 19 nt, Homo sapiens
  misc_RNA (1)...(19): siRNA sense strand
guauguggcuuccauggua

SEQ ID NO: 588555 - RNA, 19 nt, Homo sapiens
  misc_RNA (1)...(19): siRNA sense strand
gcaagaagcaccucacaga

SEQ ID NO: 588556 - RNA, 19 nt, Homo sapiens
  misc_RNA (1)...(19): siRNA sense strand
ggagacuauuuccgaguua

SEQ ID NO: 588557 - RNA, 19 nt, Homo sapiens
  misc_RNA (1)...(19): siRNA sense strand
ggagagauccugucugugu

SEQ ID NO: 588558 - RNA, 19 nt, Homo sapiens
  misc_RNA (1)...(19): siRNA sense strand
ugacgagcauguacaauga

SEQ ID NO: 588559 - RNA, 19 nt, Homo sapiens
  misc_RNA (1)...(19): siRNA sense strand
gcacaucgccaucgagaga

SEQ ID NO: 588560 - RNA, 19 nt, Homo sapiens
  misc_RNA (1)...(19): siRNA sense strand
ugagagaccugugccguuu

SEQ ID NO: 588561 - RNA, 19 nt, Homo sapiens
  misc_RNA (1)...(19): siRNA sense strand
uggaggagcucaccaacaa

SEQ ID NO: 588562 - RNA, 19 nt, Homo sapiens
  misc_RNA (1)...(19): siRNA sense strand
gccuggagcuguucaaguu

SEQ ID NO: 588563 - RNA, 19 nt, Homo sapiens
  misc_RNA (1)...(19): siRNA sense strand
caucuaugccgucaugaua

SEQ ID NO: 588564 - RNA, 19 nt, Homo sapiens
  misc_RNA (1)...(19): siRNA sense strand
gagagauccugucuguguu

SEQ ID NO: 588565 - RNA, 19 nt, Homo sapiens
  misc_RNA (1)...(19): siRNA sense strand
gagcauguacaaugagauu

SEQ ID NO: 588566 - RNA, 19 nt, Homo sapiens
  misc_RNA (1)...(19): siRNA sense strand
uccgagggauucaguauuu

SEQ ID NO: 588567 - RNA, 19 nt, Homo sapiens
  misc_RNA (1)...(19): siRNA sense strand
guggacagcuacagugaga

SEQ ID NO: 588568 - RNA, 19 nt, Homo sapiens
  misc_RNA (1)...(19): siRNA sense strand
ucagccaccucaaggagua

SEQ ID NO: 588569 - RNA, 19 nt, Homo sapiens
  misc_RNA (1)...(19): siRNA sense strand
ggacaagugggacagauuc

SEQ ID NO: 588570 - RNA, 19 nt, Homo sapiens
  misc_RNA (1)...(19): siRNA sense strand
gaccuggaguucacugaga

SEQ ID NO: 588571 - RNA, 19 nt, Homo sapiens
  misc_RNA (1)...(19): siRNA sense strand
agaagcaccucacagacaa

SEQ ID NO: 588572 - RNA, 19 nt, Homo sapiens
  misc_RNA (1)...(19): siRNA sense strand
gcaagaacaucuggaagcu

SEQ ID NO: 588573 - RNA, 19 nt, Homo sapiens
  misc_RNA (1)...(19): siRNA sense strand
gcugcuggccuauguaauu

SEQ ID NO: 588574 - RNA, 19 nt, Homo sapiens
  misc_RNA (1)...(19): siRNA sense strand
cuucaaggcugucuucauc

SEQ ID NO: 588575 - RNA, 19 nt, Homo sapiens
  misc_RNA (1)...(19): siRNA sense strand
caccauggcugccuacuac

SEQ ID NO: 588576 - RNA, 19 nt, Homo sapiens
  misc_RNA (1)...(19): siRNA sense strand
ggacagcuacagugagaug

SEQ ID NO: 588577 - RNA, 19 nt, Homo sapiens
  misc_RNA (1)...(19): siRNA sense strand
cccgauagcuccuacaaca

SEQ ID NO: 588578 - RNA, 19 nt, Homo sapiens
  misc_RNA (1)...(19): siRNA sense strand
ugagaacuaugacuucaag

SEQ ID NO: 588579 - RNA, 19 nt, Homo sapiens
  misc_RNA (1)...(19): siRNA sense strand
agaagaugauccugagaga

SEQ ID NO: 588580 - RNA, 19 nt, Homo sapiens
  misc_RNA (1)...(19): siRNA sense strand
ggaggagucuacuucuuuu

SEQ ID NO: 588581 - RNA, 19 nt, Homo sapiens
  misc_RNA (1)...(19): siRNA sense strand
ccugugccguuucauguuu

SEQ ID NO: 588582 - RNA, 19 nt, Homo sapiens
  misc_RNA (1)...(19): siRNA sense strand
gaucgcaggaguaucuuug

SEQ ID NO: 588583 - RNA, 19 nt, Homo sapiens
  misc_RNA (1)...(19): siRNA sense strand
gaggagcucaccaacaaga

SEQ ID NO: 588584 - RNA, 19 nt, Homo sapiens
  misc_RNA (1)...(19): siRNA sense strand
guucaaagacccugagaca

SEQ ID NO: 588585 - RNA, 19 nt, Homo sapiens
  misc_RNA (1)...(19): siRNA sense strand
ucaagcgcaucuucuacuu

SEQ ID NO: 588586 - RNA, 19 nt, Homo sapiens
  misc_RNA (1)...(19): siRNA sense strand
gugagacugucaacaagau

SEQ ID NO: 588587 - RNA, 19 nt, Homo sapiens
  misc_RNA (1)...(19): siRNA sense strand
ccaccugccuggagcuguu

SEQ ID NO: 588588 - RNA, 19 nt, Homo sapiens
  misc_RNA (1)...(19): siRNA sense strand
cuggagagauccugucugu

SEQ ID NO: 588589 - RNA, 19 nt, Homo sapiens
  misc_RNA (1)...(19): siRNA sense strand
gaggcaagugcucgagaua

SEQ ID NO: 588590 - RNA, 19 nt, Homo sapiens
  misc_RNA (1)...(19): siRNA sense strand
gcacaggagagcaagaaca

SEQ ID NO: 588591 - RNA, 19 nt, Homo sapiens
  misc_RNA (1)...(19): siRNA sense strand
aagcgcaucuucuacuuca

SEQ ID NO: 588592 - RNA, 19 nt, Homo sapiens
  misc_RNA (1)...(19): siRNA sense strand
ucacugagaacuaugacuu

SEQ ID NO: 588593 - RNA, 19 nt, Homo sapiens
  misc_RNA (1)...(19): siRNA sense strand
cuacaucgucuucuuguuc

SEQ ID NO: 588594 - RNA, 19 nt, Homo sapiens
  misc_RNA (1)...(19): siRNA sense strand
ccuauguaauucucaccua

SEQ ID NO: 588595 - RNA, 19 nt, Homo sapiens
  misc_RNA (1)...(19): siRNA sense strand
ggcaagugcucgagauagg

SEQ ID NO: 588596 - RNA, 19 nt, Homo sapiens
  misc_RNA (1)...(19): siRNA sense strand
ugaagccguugcucagaau

SEQ ID NO: 588597 - RNA, 19 nt, Homo sapiens
  misc_RNA (1)...(19): siRNA sense strand
agaggacgcugaggucuuc

SEQ ID NO: 588598 - RNA, 19 nt, Homo sapiens
  misc_RNA (1)...(19): siRNA sense strand
ucacagacaacgaguucaa

SEQ ID NO: 588599 - RNA, 19 nt, Homo sapiens
  misc_RNA (1)...(19): siRNA sense strand
gugacgagcauguacaaug

SEQ ID NO: 588600 - RNA, 19 nt, Homo sapiens
  misc_RNA (1)...(19): siRNA sense strand
gcagacacuggaagaacuu

SEQ ID NO: 588601 - RNA, 19 nt, Homo sapiens
  misc_RNA (1)...(19): siRNA sense strand
agaagacccucaggcucua

SEQ ID NO: 588602 - RNA, 19 nt, Homo sapiens
  misc_RNA (1)...(19): siRNA sense strand
ucaaggcugucuucaucau

SEQ ID NO: 588603 - RNA, 19 nt, Homo sapiens
  misc_RNA (1)...(19): siRNA sense strand
uggugacgcugauugaaga

SEQ ID NO: 588604 - RNA, 19 nt, Homo sapiens
  misc_RNA (1)...(19): siRNA sense strand
gaccugugccguuucaugu

SEQ ID NO: 588605 - RNA, 19 nt, Homo sapiens
  misc_RNA (1)...(19): siRNA sense strand
cgaugaagacccuguuugu

SEQ ID NO: 588606 - RNA, 19 nt, Homo sapiens
  misc_RNA (1)...(19): siRNA sense strand
uaggaggagucuacuucuu

SEQ ID NO: 588607 - RNA, 19 nt, Homo sapiens
  misc_RNA (1)...(19): siRNA sense strand
agagauccugucuguguua

SEQ ID NO: 588608 - RNA, 19 nt, Homo sapiens
  misc_RNA (1)...(19): siRNA sense strand
uggagacuauuuccgaguu

SEQ ID NO: 588609 - RNA, 19 nt, Homo sapiens
  misc_RNA (1)...(19): siRNA sense strand
gcaaacggacagccugaag

SEQ ID NO: 588610 - RNA, 19 nt, Homo sapiens
  misc_RNA (1)...(19): siRNA sense strand
gggugagacugucaacaag

SEQ ID NO: 588611 - RNA, 19 nt, Homo sapiens
  misc_RNA (1)...(19): siRNA sense strand
guuaggaggagucuacuuc

SEQ ID NO: 588612 - RNA, 19 nt, Homo sapiens
  misc_RNA (1)...(19): siRNA sense strand
caucuucuacuucaacuuc

SEQ ID NO: 588613 - RNA, 19 nt, Homo sapiens
  misc_RNA (1)...(19): siRNA sense strand
ggucuuggccuauauucuc

SEQ ID NO: 588614 - RNA, 19 nt, Homo sapiens
  misc_RNA (1)...(19): siRNA sense strand
aaacggacagccugaagga

SEQ ID NO: 588615 - RNA, 19 nt, Homo sapiens
  misc_RNA (1)...(19): siRNA sense strand
ucgcaggaguaucuuugaa

SEQ ID NO: 588616 - RNA, 19 nt, Homo sapiens
  misc_RNA (1)...(19): siRNA sense strand
ggcagacacuggaagaacu

SEQ ID NO: 588617 - RNA, 19 nt, Homo sapiens
  misc_RNA (1)...(19): siRNA sense strand
gaugaagacccuguuugug

SEQ ID NO: 588618 - RNA, 19 nt, Homo sapiens
  misc_RNA (1)...(19): siRNA sense strand
aggaggagucuacuucuuu

SEQ ID NO: 588619 - RNA, 19 nt, Homo sapiens
  misc_RNA (1)...(19): siRNA sense strand
gaagccguugcucagaaua

SEQ ID NO: 588620 - RNA, 19 nt, Homo sapiens
  misc_RNA (1)...(19): siRNA sense strand
ugaaagccaugcucaaccu

SEQ ID NO: 588621 - RNA, 19 nt, Homo sapiens
  misc_RNA (1)...(19): siRNA sense strand
gagcaagaagcaccucaca

SEQ ID NO: 588622 - RNA, 19 nt, Homo sapiens
  misc_RNA (1)...(19): siRNA sense strand
ucaacuuccuggucuacug

SEQ ID NO: 588623 - RNA, 19 nt, Homo sapiens
  misc_RNA (1)...(19): siRNA sense strand
gccuguacaugaucaucuu

SEQ ID NO: 588624 - RNA, 19 nt, Homo sapiens
  misc_RNA (1)...(19): siRNA sense strand
ccaacaugcucuacuacac

SEQ ID NO: 588625 - RNA, 19 nt, Homo sapiens
  misc_RNA (1)...(19): siRNA sense strand
uugaagccguugcucagaa

SEQ ID NO: 588626 - RNA, 19 nt, Homo sapiens
  misc_RNA (1)...(19): siRNA sense strand
gcauguacaaugagauucu

SEQ ID NO: 588627 - RNA, 19 nt, Homo sapiens
  misc_RNA (1)...(19): siRNA sense strand
aaguuuaucugcgacaguu

SEQ ID NO: 588628 - RNA, 19 nt, Homo sapiens
  misc_RNA (1)...(19): siRNA sense strand
gcucagcccgaggaaguuu

SEQ ID NO: 588629 - RNA, 19 nt, Homo sapiens
  misc_RNA (1)...(19): siRNA sense strand
uaugaucgcaggaguaucu

SEQ ID NO: 588630 - RNA, 19 nt, Homo sapiens
  misc_RNA (1)...(19): siRNA sense strand
ggugagacugucaacaaga

SEQ ID NO: 588631 - RNA, 19 nt, Homo sapiens
  misc_RNA (1)...(19): siRNA sense strand
cagacaacgaguucaaaga

SEQ ID NO: 588632 - RNA, 19 nt, Homo sapiens
  misc_RNA (1)...(19): siRNA sense strand
uugaagacgggaagaauga

SEQ ID NO: 588633 - RNA, 19 nt, Homo sapiens
  misc_RNA (1)...(19): siRNA sense strand
gauugaagacgggaagaau

SEQ ID NO: 588634 - RNA, 19 nt, Homo sapiens
  misc_RNA (1)...(19): siRNA sense strand
agagaccugugccguuuca

SEQ ID NO: 588635 - RNA, 19 nt, Homo sapiens
  misc_RNA (1)...(19): siRNA sense strand
guacuucagccaccucaag

SEQ ID NO: 588636 - RNA, 19 nt, Homo sapiens
  misc_RNA (1)...(19): siRNA sense strand
uggcuugccucccuuuaag

SEQ ID NO: 588637 - RNA, 19 nt, Homo sapiens
  misc_RNA (1)...(19): siRNA sense strand
cgaaguuugugacgagcau

SEQ ID NO: 588638 - RNA, 19 nt, Homo sapiens
  misc_RNA (1)...(19): siRNA sense strand
ugaacuggaccaccuggaa

SEQ ID NO: 588639 - RNA, 19 nt, Homo sapiens
  misc_RNA (1)...(19): siRNA sense strand
gagauccugucuguguuag

SEQ ID NO: 588640 - RNA, 19 nt, Homo sapiens
  misc_RNA (1)...(19): siRNA sense strand
ccgaguuacuggagagauc

SEQ ID NO: 588641 - RNA, 19 nt, Homo sapiens
  misc_RNA (1)...(19): siRNA sense strand
acacggacagcuacuacaa

SEQ ID NO: 588642 - RNA, 19 nt, Homo sapiens
  misc_RNA (1)...(19): siRNA sense strand
gacuaccgguggugcuuca

SEQ ID NO: 588643 - RNA, 19 nt, Homo sapiens
  misc_RNA (1)...(19): siRNA sense strand
caggagagcaagaacaucu

SEQ ID NO: 588644 - RNA, 19 nt, Homo sapiens
  misc_RNA (1)...(19): siRNA sense strand
gauggcuugccucccuuua

SEQ ID NO: 588645 - RNA, 19 nt, Homo sapiens
  misc_RNA (1)...(19): siRNA sense strand
aagaagcaccucacagaca

SEQ ID NO: 588646 - RNA, 19 nt, Homo sapiens
  misc_RNA (1)...(19): siRNA sense strand
cagcuacagugagaugcuu

SEQ ID NO: 588647 - RNA, 19 nt, Homo sapiens
  misc_RNA (1)...(19): siRNA sense strand
ucuacugccuguacaugau

SEQ ID NO: 588648 - RNA, 19 nt, Homo sapiens
  misc_RNA (1)...(19): siRNA sense strand
gaaguuuaucugcgacagu

SEQ ID NO: 588649 - RNA, 19 nt, Homo sapiens
  misc_RNA (1)...(19): siRNA sense strand
caacgugggcaucaucaac

SEQ ID NO: 588650 - RNA, 19 nt, Homo sapiens
  misc_RNA (1)...(19): siRNA sense strand
gagacuauuuccgaguuac

SEQ ID NO: 588651 - RNA, 19 nt, Homo sapiens
  misc_RNA (1)...(19): siRNA sense strand
ucaccauggcugccuacua

SEQ ID NO: 588652 - RNA, 19 nt, Homo sapiens
  misc_RNA (1)...(19): siRNA sense strand
ugggugagacugucaacaa

SEQ ID NO: 588653 - RNA, 19 nt, Homo sapiens
  misc_RNA (1)...(19): siRNA sense strand
ggaccaacaugcucuacua

SEQ ID NO: 588654 - RNA, 19 nt, Homo sapiens
  misc_RNA (1)...(19): siRNA sense strand
guauguggcuuccauggua

SEQ ID NO: 588655 - RNA, 19 nt, Homo sapiens
  misc_RNA (1)...(19): siRNA sense strand
gcaagaagcaccucacaga

SEQ ID NO: 588656 - RNA, 19 nt, Homo sapiens
  misc_RNA (1)...(19): siRNA sense strand
ggagacuauuuccgaguua

SEQ ID NO: 588657 - RNA, 19 nt, Homo sapiens
  misc_RNA (1)...(19): siRNA sense strand
ggagagauccugucugugu

SEQ ID NO: 588658 - RNA, 19 nt, Homo sapiens
  misc_RNA (1)...(19): siRNA sense strand
ugacgagcauguacaauga

SEQ ID NO: 588659 - RNA, 19 nt, Homo sapiens
  misc_RNA (1)...(19): siRNA sense strand
gcacaucgccaucgagaga

SEQ ID NO: 588660 - RNA, 19 nt, Homo sapiens
  misc_RNA (1)...(19): siRNA sense strand
ugagagaccugugccguuu

SEQ ID NO: 588661 - RNA, 19 nt, Homo sapiens
  misc_RNA (1)...(19): siRNA sense strand
uggaggagcucaccaacaa

SEQ ID NO: 588662 - RNA, 19 nt, Homo sapiens
  misc_RNA (1)...(19): siRNA sense strand
gccuggagcuguucaaguu

SEQ ID NO: 588663 - RNA, 19 nt, Homo sapiens
  misc_RNA (1)...(19): siRNA sense strand
caucuaugccgucaugaua

SEQ ID NO: 588664 - RNA, 19 nt, Homo sapiens
  misc_RNA (1)...(19): siRNA sense strand
gagagauccugucuguguu

SEQ ID NO: 588665 - RNA, 19 nt, Homo sapiens
  misc_RNA (1)...(19): siRNA sense strand
gagcauguacaaugagauu

SEQ ID NO: 588666 - RNA, 19 nt, Homo sapiens
  misc_RNA (1)...(19): siRNA sense strand
uccgagggauucaguauuu

SEQ ID NO: 588667 - RNA, 19 nt, Homo sapiens
  misc_RNA (1)...(19): siRNA sense strand
guggacagcuacagugaga

SEQ ID NO: 588668 - RNA, 19 nt, Homo sapiens
  misc_RNA (1)...(19): siRNA sense strand
ucagccaccucaaggagua

SEQ ID NO: 588669 - RNA, 19 nt, Homo sapiens
  misc_RNA (1)...(19): siRNA sense strand
ggacaagugggacagauuc

SEQ ID NO: 588670 - RNA, 19 nt, Homo sapiens
  misc_RNA (1)...(19): siRNA sense strand
gaccuggaguucacugaga

SEQ ID NO: 588671 - RNA, 19 nt, Homo sapiens
  misc_RNA (1)...(19): siRNA sense strand
agaagcaccucacagacaa

SEQ ID NO: 588672 - RNA, 19 nt, Homo sapiens
  misc_RNA (1)...(19): siRNA sense strand
gcaagaacaucuggaagcu

SEQ ID NO: 588673 - RNA, 19 nt, Homo sapiens
  misc_RNA (1)...(19): siRNA sense strand
gcugcuggccuauguaauu

SEQ ID NO: 588674 - RNA, 19 nt, Homo sapiens
  misc_RNA (1)...(19): siRNA sense strand
cuucaaggcugucuucauc

SEQ ID NO: 588675 - RNA, 19 nt, Homo sapiens
  misc_RNA (1)...(19): siRNA sense strand
caccauggcugccuacuac

SEQ ID NO: 588676 - RNA, 19 nt, Homo sapiens
  misc_RNA (1)...(19): siRNA sense strand
ggacagcuacagugagaug

SEQ ID NO: 588677 - RNA, 19 nt, Homo sapiens
  misc_RNA (1)...(19): siRNA sense strand
cccgauagcuccuacaaca

SEQ ID NO: 588678 - RNA, 19 nt, Homo sapiens
  misc_RNA (1)...(19): siRNA sense strand
ugagaacuaugacuucaag

SEQ ID NO: 588679 - RNA, 19 nt, Homo sapiens
  misc_RNA (1)...(19): siRNA sense strand
agaagaugauccugagaga

SEQ ID NO: 588680 - RNA, 19 nt, Homo sapiens
  misc_RNA (1)...(19): siRNA sense strand
ggaggagucuacuucuuuu

SEQ ID NO: 588681 - RNA, 19 nt, Homo sapiens
  misc_RNA (1)...(19): siRNA sense strand
ccugugccguuucauguuu

SEQ ID NO: 588682 - RNA, 19 nt, Homo sapiens
  misc_RNA (1)...(19): siRNA sense strand
gaucgcaggaguaucuuug

SEQ ID NO: 588683 - RNA, 19 nt, Homo sapiens
  misc_RNA (1)...(19): siRNA sense strand
gaggagcucaccaacaaga

SEQ ID NO: 588684 - RNA, 19 nt, Homo sapiens
  misc_RNA (1)...(19): siRNA sense strand
guucaaagacccugagaca

SEQ ID NO: 588685 - RNA, 19 nt, Homo sapiens
  misc_RNA (1)...(19): siRNA sense strand
ucaagcgcaucuucuacuu

SEQ ID NO: 588686 - RNA, 19 nt, Homo sapiens
  misc_RNA (1)...(19): siRNA sense strand
gugagacugucaacaagau

SEQ ID NO: 588687 - RNA, 19 nt, Homo sapiens
  misc_RNA (1)...(19): siRNA sense strand
ccaccugccuggagcuguu

SEQ ID NO: 588688 - RNA, 19 nt, Homo sapiens
  misc_RNA (1)...(19): siRNA sense strand
cuggagagauccugucugu

SEQ ID NO: 588689 - RNA, 19 nt, Homo sapiens
  misc_RNA (1)...(19): siRNA sense strand
gaggcaagugcucgagaua

SEQ ID NO: 588690 - RNA, 19 nt, Homo sapiens
  misc_RNA (1)...(19): siRNA sense strand
gcacaggagagcaagaaca

SEQ ID NO: 588691 - RNA, 19 nt, Homo sapiens
  misc_RNA (1)...(19): siRNA sense strand
aagcgcaucuucuacuuca

SEQ ID NO: 588692 - RNA, 19 nt, Homo sapiens
  misc_RNA (1)...(19): siRNA sense strand
ucacugagaacuaugacuu

SEQ ID NO: 588693 - RNA, 19 nt, Homo sapiens
  misc_RNA (1)...(19): siRNA sense strand
cuacaucgucuucuuguuc

SEQ ID NO: 588694 - RNA, 19 nt, Homo sapiens
  misc_RNA (1)...(19): siRNA sense strand
ccuauguaauucucaccua

SEQ ID NO: 588695 - RNA, 19 nt, Homo sapiens
  misc_RNA (1)...(19): siRNA sense strand
ggcaagugcucgagauagg

SEQ ID NO: 588696 - RNA, 19 nt, Homo sapiens
  misc_RNA (1)...(19): siRNA sense strand
ugaagccguugcucagaau

SEQ ID NO: 588697 - RNA, 19 nt, Homo sapiens
  misc_RNA (1)...(19): siRNA sense strand
agaggacgcugaggucuuc

SEQ ID NO: 588698 - RNA, 19 nt, Homo sapiens
  misc_RNA (1)...(19): siRNA sense strand
ucacagacaacgaguucaa

SEQ ID NO: 588699 - RNA, 19 nt, Homo sapiens
  misc_RNA (1)...(19): siRNA sense strand
gugacgagcauguacaaug

SEQ ID NO: 588700 - RNA, 19 nt, Homo sapiens
  misc_RNA (1)...(19): siRNA sense strand
gcagacacuggaagaacuu

SEQ ID NO: 588701 - RNA, 19 nt, Homo sapiens
  misc_RNA (1)...(19): siRNA sense strand
agaagacccucaggcucua

SEQ ID NO: 588702 - RNA, 19 nt, Homo sapiens
  misc_RNA (1)...(19): siRNA sense strand
ucaaggcugucuucaucau

SEQ ID NO: 588703 - RNA, 19 nt, Homo sapiens
  misc_RNA (1)...(19): siRNA sense strand
uggugacgcugauugaaga

SEQ ID NO: 588704 - RNA, 19 nt, Homo sapiens
  misc_RNA (1)...(19): siRNA sense strand
gaccugugccguuucaugu

SEQ ID NO: 588705 - RNA, 19 nt, Homo sapiens
  misc_RNA (1)...(19): siRNA sense strand
cgaugaagacccuguuugu

SEQ ID NO: 588706 - RNA, 19 nt, Homo sapiens
  misc_RNA (1)...(19): siRNA sense strand
uaggaggagucuacuucuu

SEQ ID NO: 588707 - RNA, 19 nt, Homo sapiens
  misc_RNA (1)...(19): siRNA sense strand
agagauccugucuguguua

SEQ ID NO: 588708 - RNA, 19 nt, Homo sapiens
  misc_RNA (1)...(19): siRNA sense strand
uggagacuauuuccgaguu

SEQ ID NO: 588709 - RNA, 19 nt, Homo sapiens
  misc_RNA (1)...(19): siRNA sense strand
gcaaacggacagccugaag

SEQ ID NO: 588710 - RNA, 19 nt, Homo sapiens
  misc_RNA (1)...(19): siRNA sense strand
gggugagacugucaacaag

SEQ ID NO: 588711 - RNA, 19 nt, Homo sapiens
  misc_RNA (1)...(19): siRNA sense strand
guuaggaggagucuacuuc

SEQ ID NO: 588712 - RNA, 19 nt, Homo sapiens
  misc_RNA (1)...(19): siRNA sense strand
caucuucuacuucaacuuc

SEQ ID NO: 588713 - RNA, 19 nt, Homo sapiens
  misc_RNA (1)...(19): siRNA sense strand
ggucuuggccuauauucuc

SEQ ID NO: 588714 - RNA, 19 nt, Homo sapiens
  misc_RNA (1)...(19): siRNA sense strand
aaacggacagccugaagga

SEQ ID NO: 588715 - RNA, 19 nt, Homo sapiens
  misc_RNA (1)...(19): siRNA sense strand
ucgcaggaguaucuuugaa

SEQ ID NO: 588716 - RNA, 19 nt, Homo sapiens
  misc_RNA (1)...(19): siRNA sense strand
ggcagacacuggaagaacu

SEQ ID NO: 588717 - RNA, 19 nt, Homo sapiens
  misc_RNA (1)...(19): siRNA sense strand
gaugaagacccuguuugug

SEQ ID NO: 588718 - RNA, 19 nt, Homo sapiens
  misc_RNA (1)...(19): siRNA sense strand
aggaggagucuacuucuuu

SEQ ID NO: 588719 - RNA, 19 nt, Homo sapiens
  misc_RNA (1)...(19): siRNA sense strand
gaagccguugcucagaaua

SEQ ID NO: 588720 - RNA, 19 nt, Homo sapiens
  misc_RNA (1)...(19): siRNA sense strand
ugaaagccaugcucaaccu

SEQ ID NO: 588721 - RNA, 19 nt, Homo sapiens
  misc_RNA (1)...(19): siRNA sense strand
gagcaagaagcaccucaca

SEQ ID NO: 588722 - RNA, 19 nt, Homo sapiens
  misc_RNA (1)...(19): siRNA sense strand
ucaacuuccuggucuacug

SEQ ID NO: 588723 - RNA, 19 nt, Homo sapiens
  misc_RNA (1)...(19): siRNA sense strand
gccuguacaugaucaucuu

SEQ ID NO: 588724 - RNA, 19 nt, Homo sapiens
  misc_RNA (1)...(19): siRNA sense strand
ccaacaugcucuacuacac

SEQ ID NO: 588725 - RNA, 19 nt, Homo sapiens
  misc_RNA (1)...(19): siRNA sense strand
uugaagccguugcucagaa

SEQ ID NO: 588726 - RNA, 19 nt, Homo sapiens
  misc_RNA (1)...(19): siRNA sense strand
gcauguacaaugagauucu

SEQ ID NO: 588727 - RNA, 19 nt, Homo sapiens
  misc_RNA (1)...(19): siRNA sense strand
aaguuuaucugcgacaguu

SEQ ID NO: 588728 - RNA, 19 nt, Homo sapiens
  misc_RNA (1)...(19): siRNA sense strand
gcucagcccgaggaaguuu

SEQ ID NO: 588729 - RNA, 19 nt, Homo sapiens
  misc_RNA (1)...(19): siRNA sense strand
uaugaucgcaggaguaucu

SEQ ID NO: 588730 - RNA, 19 nt, Homo sapiens
  misc_RNA (1)...(19): siRNA sense strand
ggugagacugucaacaaga

SEQ ID NO: 588731 - RNA, 19 nt, Homo sapiens
  misc_RNA (1)...(19): siRNA sense strand
cagacaacgaguucaaaga

SEQ ID NO: 588732 - RNA, 19 nt, Homo sapiens
  misc_RNA (1)...(19): siRNA sense strand
uugaagacgggaagaauga

SEQ ID NO: 588733 - RNA, 19 nt, Homo sapiens
  misc_RNA (1)...(19): siRNA sense strand
gauugaagacgggaagaau

SEQ ID NO: 588734 - RNA, 19 nt, Homo sapiens
  misc_RNA (1)...(19): siRNA sense strand
agagaccugugccguuuca

SEQ ID NO: 588735 - RNA, 19 nt, Homo sapiens
  misc_RNA (1)...(19): siRNA sense strand
guacuucagccaccucaag

SEQ ID NO: 588736 - RNA, 19 nt, Homo sapiens
  misc_RNA (1)...(19): siRNA sense strand
uggcuugccucccuuuaag

SEQ ID NO: 588737 - RNA, 19 nt, Homo sapiens
  misc_RNA (1)...(19): siRNA sense strand
cgaaguuugugacgagcau

SEQ ID NO: 588738 - RNA, 19 nt, Homo sapiens
  misc_RNA (1)...(19): siRNA sense strand
ugaacuggaccaccuggaa

SEQ ID NO: 588739 - RNA, 19 nt, Homo sapiens
  misc_RNA (1)...(19): siRNA sense strand
gagauccugucuguguuag

SEQ ID NO: 588740 - RNA, 19 nt, Homo sapiens
  misc_RNA (1)...(19): siRNA sense strand
ccgaguuacuggagagauc

SEQ ID NO: 588741 - RNA, 19 nt, Homo sapiens
  misc_RNA (1)...(19): siRNA sense strand
acacggacagcuacuacaa

SEQ ID NO: 588742 - RNA, 19 nt, Homo sapiens
  misc_RNA (1)...(19): siRNA sense strand
gacuaccgguggugcuuca

SEQ ID NO: 588743 - RNA, 19 nt, Homo sapiens
  misc_RNA (1)...(19): siRNA sense strand
caggagagcaagaacaucu

SEQ ID NO: 588744 - RNA, 19 nt, Homo sapiens
  misc_RNA (1)...(19): siRNA sense strand
gauggcuugccucccuuua

SEQ ID NO: 588745 - RNA, 19 nt, Homo sapiens
  misc_RNA (1)...(19): siRNA sense strand
aagaagcaccucacagaca

SEQ ID NO: 588746 - RNA, 19 nt, Homo sapiens
  misc_RNA (1)...(19): siRNA sense strand
cagcuacagugagaugcuu

SEQ ID NO: 588747 - RNA, 19 nt, Homo sapiens
  misc_RNA (1)...(19): siRNA sense strand
ucuacugccuguacaugau

SEQ ID NO: 588748 - RNA, 19 nt, Homo sapiens
  misc_RNA (1)...(19): siRNA sense strand
gaaguuuaucugcgacagu

SEQ ID NO: 588749 - RNA, 19 nt, Homo sapiens
  misc_RNA (1)...(19): siRNA sense strand
caacgugggcaucaucaac

SEQ ID NO: 588750 - RNA, 19 nt, Homo sapiens
  misc_RNA (1)...(19): siRNA sense strand
gagacuauuuccgaguuac

SEQ ID NO: 588751 - RNA, 19 nt, Homo sapiens
  misc_RNA (1)...(19): siRNA sense strand
ucaccauggcugccuacua

SEQ ID NO: 588752 - RNA, 19 nt, Homo sapiens
  misc_RNA (1)...(19): siRNA sense strand
ugggugagacugucaacaa

SEQ ID NO: 588753 - RNA, 19 nt, Homo sapiens
  misc_RNA (1)...(19): siRNA sense strand
ggaccaacaugcucuacua

SEQ ID NO: 588754 - RNA, 19 nt, Homo sapiens
  misc_RNA (1)...(19): siRNA sense strand
guauguggcuuccauggua

SEQ ID NO: 588755 - RNA, 19 nt, Homo sapiens
  misc_RNA (1)...(19): siRNA sense strand
gcaagaagcaccucacaga

SEQ ID NO: 588756 - RNA, 19 nt, Homo sapiens
  misc_RNA (1)...(19): siRNA sense strand
ggagacuauuuccgaguua

SEQ ID NO: 588757 - RNA, 19 nt, Homo sapiens
  misc_RNA (1)...(19): siRNA sense strand
ggagagauccugucugugu

SEQ ID NO: 588758 - RNA, 19 nt, Homo sapiens
  misc_RNA (1)...(19): siRNA sense strand
ugacgagcauguacaauga

SEQ ID NO: 588759 - RNA, 19 nt, Homo sapiens
  misc_RNA (1)...(19): siRNA sense strand
gcacaucgccaucgagaga

SEQ ID NO: 588760 - RNA, 19 nt, Homo sapiens
  misc_RNA (1)...(19): siRNA sense strand
ugagagaccugugccguuu

SEQ ID NO: 588761 - RNA, 19 nt, Homo sapiens
  misc_RNA (1)...(19): siRNA sense strand
uggaggagcucaccaacaa

SEQ ID NO: 588762 - RNA, 19 nt, Homo sapiens
  misc_RNA (1)...(19): siRNA sense strand
gccuggagcuguucaaguu

SEQ ID NO: 588763 - RNA, 19 nt, Homo sapiens
  misc_RNA (1)...(19): siRNA sense strand
caucuaugccgucaugaua

SEQ ID NO: 588764 - RNA, 19 nt, Homo sapiens
  misc_RNA (1)...(19): siRNA sense strand
gagagauccugucuguguu

SEQ ID NO: 588765 - RNA, 19 nt, Homo sapiens
  misc_RNA (1)...(19): siRNA sense strand
gagcauguacaaugagauu

SEQ ID NO: 588766 - RNA, 19 nt, Homo sapiens
  misc_RNA (1)...(19): siRNA sense strand
uccgagggauucaguauuu

SEQ ID NO: 588767 - RNA, 19 nt, Homo sapiens
  misc_RNA (1)...(19): siRNA sense strand
guggacagcuacagugaga

SEQ ID NO: 588768 - RNA, 19 nt, Homo sapiens
  misc_RNA (1)...(19): siRNA sense strand
ucagccaccucaaggagua

SEQ ID NO: 588769 - RNA, 19 nt, Homo sapiens
  misc_RNA (1)...(19): siRNA sense strand
ggacaagugggacagauuc

SEQ ID NO: 588770 - RNA, 19 nt, Homo sapiens
  misc_RNA (1)...(19): siRNA sense strand
gaccuggaguucacugaga

SEQ ID NO: 588771 - RNA, 19 nt, Homo sapiens
  misc_RNA (1)...(19): siRNA sense strand
agaagcaccucacagacaa

SEQ ID NO: 588772 - RNA, 19 nt, Homo sapiens
  misc_RNA (1)...(19): siRNA sense strand
gcaagaacaucuggaagcu

SEQ ID NO: 588773 - RNA, 19 nt, Homo sapiens
  misc_RNA (1)...(19): siRNA sense strand
gcugcuggccuauguaauu

SEQ ID NO: 588774 - RNA, 19 nt, Homo sapiens
  misc_RNA (1)...(19): siRNA sense strand
cuucaaggcugucuucauc

SEQ ID NO: 588775 - RNA, 19 nt, Homo sapiens
  misc_RNA (1)...(19): siRNA sense strand
caccauggcugccuacuac

SEQ ID NO: 588776 - RNA, 19 nt, Homo sapiens
  misc_RNA (1)...(19): siRNA sense strand
ggacagcuacagugagaug

SEQ ID NO: 588777 - RNA, 19 nt, Homo sapiens
  misc_RNA (1)...(19): siRNA sense strand
cccgauagcuccuacaaca

SEQ ID NO: 588778 - RNA, 19 nt, Homo sapiens
  misc_RNA (1)...(19): siRNA sense strand
ugagaacuaugacuucaag

SEQ ID NO: 588779 - RNA, 19 nt, Homo sapiens
  misc_RNA (1)...(19): siRNA sense strand
agaagaugauccugagaga

SEQ ID NO: 588780 - RNA, 19 nt, Homo sapiens
  misc_RNA (1)...(19): siRNA sense strand
ggaggagucuacuucuuuu

SEQ ID NO: 588781 - RNA, 19 nt, Homo sapiens
  misc_RNA (1)...(19): siRNA sense strand
ccugugccguuucauguuu

SEQ ID NO: 588782 - RNA, 19 nt, Homo sapiens
  misc_RNA (1)...(19): siRNA sense strand
gaucgcaggaguaucuuug

SEQ ID NO: 588783 - RNA, 19 nt, Homo sapiens
  misc_RNA (1)...(19): siRNA sense strand
gaggagcucaccaacaaga

SEQ ID NO: 588784 - RNA, 19 nt, Homo sapiens
  misc_RNA (1)...(19): siRNA sense strand
guucaaagacccugagaca

SEQ ID NO: 588785 - RNA, 19 nt, Homo sapiens
  misc_RNA (1)...(19): siRNA sense strand
ucaagcgcaucuucuacuu

SEQ ID NO: 588786 - RNA, 19 nt, Homo sapiens
  misc_RNA (1)...(19): siRNA sense strand
gugagacugucaacaagau

SEQ ID NO: 588787 - RNA, 19 nt, Homo sapiens
  misc_RNA (1)...(19): siRNA sense strand
ccaccugccuggagcuguu

SEQ ID NO: 588788 - RNA, 19 nt, Homo sapiens
  misc_RNA (1)...(19): siRNA sense strand
cuggagagauccugucugu

SEQ ID NO: 588789 - RNA, 19 nt, Homo sapiens
  misc_RNA (1)...(19): siRNA sense strand
gaggcaagugcucgagaua

SEQ ID NO: 588790 - RNA, 19 nt, Homo sapiens
  misc_RNA (1)...(19): siRNA sense strand
gcacaggagagcaagaaca

SEQ ID NO: 588791 - RNA, 19 nt, Homo sapiens
  misc_RNA (1)...(19): siRNA sense strand
aagcgcaucuucuacuuca

SEQ ID NO: 588792 - RNA, 19 nt, Homo sapiens
  misc_RNA (1)...(19): siRNA sense strand
ucacugagaacuaugacuu

SEQ ID NO: 588793 - RNA, 19 nt, Homo sapiens
  misc_RNA (1)...(19): siRNA sense strand
cuacaucgucuucuuguuc

SEQ ID NO: 588794 - RNA, 19 nt, Homo sapiens
  misc_RNA (1)...(19): siRNA sense strand
ccuauguaauucucaccua

SEQ ID NO: 588795 - RNA, 19 nt, Homo sapiens
  misc_RNA (1)...(19): siRNA sense strand
ggcaagugcucgagauagg

SEQ ID NO: 588796 - RNA, 19 nt, Homo sapiens
  misc_RNA (1)...(19): siRNA sense strand
ugaagccguugcucagaau

SEQ ID NO: 588797 - RNA, 19 nt, Homo sapiens
  misc_RNA (1)...(19): siRNA sense strand
agaggacgcugaggucuuc

SEQ ID NO: 588798 - RNA, 19 nt, Homo sapiens
  misc_RNA (1)...(19): siRNA sense strand
ucacagacaacgaguucaa

SEQ ID NO: 588799 - RNA, 19 nt, Homo sapiens
  misc_RNA (1)...(19): siRNA sense strand
gugacgagcauguacaaug

SEQ ID NO: 588800 - RNA, 19 nt, Homo sapiens
  misc_RNA (1)...(19): siRNA sense strand
gcagacacuggaagaacuu

SEQ ID NO: 588801 - RNA, 19 nt, Homo sapiens
  misc_RNA (1)...(19): siRNA sense strand
agaagacccucaggcucua

SEQ ID NO: 588802 - RNA, 19 nt, Homo sapiens
  misc_RNA (1)...(19): siRNA sense strand
ucaaggcugucuucaucau

SEQ ID NO: 588803 - RNA, 19 nt, Homo sapiens
  misc_RNA (1)...(19): siRNA sense strand
uggugacgcugauugaaga

SEQ ID NO: 588804 - RNA, 19 nt, Homo sapiens
  misc_RNA (1)...(19): siRNA sense strand
gaccugugccguuucaugu

SEQ ID NO: 588805 - RNA, 19 nt, Homo sapiens
  misc_RNA (1)...(19): siRNA sense strand
cgaugaagacccuguuugu

SEQ ID NO: 588806 - RNA, 19 nt, Homo sapiens
  misc_RNA (1)...(19): siRNA sense strand
uaggaggagucuacuucuu

SEQ ID NO: 588807 - RNA, 19 nt, Homo sapiens
  misc_RNA (1)...(19): siRNA sense strand
agagauccugucuguguua

SEQ ID NO: 588808 - RNA, 19 nt, Homo sapiens
  misc_RNA (1)...(19): siRNA sense strand
uggagacuauuuccgaguu

SEQ ID NO: 588809 - RNA, 19 nt, Homo sapiens
  misc_RNA (1)...(19): siRNA sense strand
gcaaacggacagccugaag

SEQ ID NO: 588810 - RNA, 19 nt, Homo sapiens
  misc_RNA (1)...(19): siRNA sense strand
gggugagacugucaacaag

SEQ ID NO: 588811 - RNA, 19 nt, Homo sapiens
  misc_RNA (1)...(19): siRNA sense strand
guuaggaggagucuacuuc

SEQ ID NO: 588812 - RNA, 19 nt, Homo sapiens
  misc_RNA (1)...(19): siRNA sense strand
caucuucuacuucaacuuc

SEQ ID NO: 588813 - RNA, 19 nt, Homo sapiens
  misc_RNA (1)...(19): siRNA sense strand
ggucuuggccuauauucuc

SEQ ID NO: 588814 - RNA, 19 nt, Homo sapiens
  misc_RNA (1)...(19): siRNA sense strand
aaacggacagccugaagga

SEQ ID NO: 588815 - RNA, 19 nt, Homo sapiens
  misc_RNA (1)...(19): siRNA sense strand
ucgcaggaguaucuuugaa

SEQ ID NO: 588816 - RNA, 19 nt, Homo sapiens
  misc_RNA (1)...(19): siRNA sense strand
ggcagacacuggaagaacu

SEQ ID NO: 588817 - RNA, 19 nt, Homo sapiens
  misc_RNA (1)...(19): siRNA sense strand
gaugaagacccuguuugug

SEQ ID NO: 588818 - RNA, 19 nt, Homo sapiens
  misc_RNA (1)...(19): siRNA sense strand
aggaggagucuacuucuuu

SEQ ID NO: 588819 - RNA, 19 nt, Homo sapiens
  misc_RNA (1)...(19): siRNA sense strand
gaagccguugcucagaaua

SEQ ID NO: 588820 - RNA, 19 nt, Homo sapiens
  misc_RNA (1)...(19): siRNA sense strand
ugaaagccaugcucaaccu

SEQ ID NO: 588821 - RNA, 19 nt, Homo sapiens
  misc_RNA (1)...(19): siRNA sense strand
gagcaagaagcaccucaca

SEQ ID NO: 588822 - RNA, 19 nt, Homo sapiens
  misc_RNA (1)...(19): siRNA sense strand
ucaacuuccuggucuacug

SEQ ID NO: 588823 - RNA, 19 nt, Homo sapiens
  misc_RNA (1)...(19): siRNA sense strand
gccuguacaugaucaucuu

SEQ ID NO: 588824 - RNA, 19 nt, Homo sapiens
  misc_RNA (1)...(19): siRNA sense strand
ccaacaugcucuacuacac

SEQ ID NO: 588825 - RNA, 19 nt, Homo sapiens
  misc_RNA (1)...(19): siRNA sense strand
uugaagccguugcucagaa

SEQ ID NO: 588826 - RNA, 19 nt, Homo sapiens
  misc_RNA (1)...(19): siRNA sense strand
gcauguacaaugagauucu

SEQ ID NO: 588827 - RNA, 19 nt, Homo sapiens
  misc_RNA (1)...(19): siRNA sense strand
aaguuuaucugcgacaguu

SEQ ID NO: 588828 - RNA, 19 nt, Homo sapiens
  misc_RNA (1)...(19): siRNA sense strand
gcucagcccgaggaaguuu

SEQ ID NO: 588829 - RNA, 19 nt, Homo sapiens
  misc_RNA (1)...(19): siRNA sense strand
uaugaucgcaggaguaucu

SEQ ID NO: 588830 - RNA, 19 nt, Homo sapiens
  misc_RNA (1)...(19): siRNA sense strand
ggugagacugucaacaaga

SEQ ID NO: 588831 - RNA, 19 nt, Homo sapiens
  misc_RNA (1)...(19): siRNA sense strand
cagacaacgaguucaaaga

SEQ ID NO: 588832 - RNA, 19 nt, Homo sapiens
  misc_RNA (1)...(19): siRNA sense strand
uugaagacgggaagaauga

SEQ ID NO: 588833 - RNA, 19 nt, Homo sapiens
  misc_RNA (1)...(19): siRNA sense strand
gauugaagacgggaagaau

SEQ ID NO: 588834 - RNA, 19 nt, Homo sapiens
  misc_RNA (1)...(19): siRNA sense strand
agagaccugugccguuuca

SEQ ID NO: 588835 - RNA, 19 nt, Homo sapiens
  misc_RNA (1)...(19): siRNA sense strand
guacuucagccaccucaag

SEQ ID NO: 588836 - RNA, 19 nt, Homo sapiens
  misc_RNA (1)...(19): siRNA sense strand
uggcuugccucccuuuaag

SEQ ID NO: 588837 - RNA, 19 nt, Homo sapiens
  misc_RNA (1)...(19): siRNA sense strand
cgaaguuugugacgagcau

SEQ ID NO: 588838 - RNA, 19 nt, Homo sapiens
  misc_RNA (1)...(19): siRNA sense strand
ugaacuggaccaccuggaa

SEQ ID NO: 588839 - RNA, 19 nt, Homo sapiens
  misc_RNA (1)...(19): siRNA sense strand
gagauccugucuguguuag

SEQ ID NO: 588840 - RNA, 19 nt, Homo sapiens
  misc_RNA (1)...(19): siRNA sense strand
ccgaguuacuggagagauc

SEQ ID NO: 588841 - RNA, 19 nt, Homo sapiens
  misc_RNA (1)...(19): siRNA sense strand
acacggacagcuacuacaa

SEQ ID NO: 588842 - RNA, 19 nt, Homo sapiens
  misc_RNA (1)...(19): siRNA sense strand
gacuaccgguggugcuuca

SEQ ID NO: 588843 - RNA, 19 nt, Homo sapiens
  misc_RNA (1)...(19): siRNA sense strand
caggagagcaagaacaucu

SEQ ID NO: 588844 - RNA, 19 nt, Homo sapiens
  misc_RNA (1)...(19): siRNA sense strand
gauggcuugccucccuuua

SEQ ID NO: 588845 - RNA, 19 nt, Homo sapiens
  misc_RNA (1)...(19): siRNA sense strand
aagaagcaccucacagaca

SEQ ID NO: 588846 - RNA, 19 nt, Homo sapiens
  misc_RNA (1)...(19): siRNA sense strand
cagcuacagugagaugcuu

SEQ ID NO: 588847 - RNA, 19 nt, Homo sapiens
  misc_RNA (1)...(19): siRNA sense strand
ucuacugccuguacaugau

SEQ ID NO: 588848 - RNA, 19 nt, Homo sapiens
  misc_RNA (1)...(19): siRNA sense strand
gaaguuuaucugcgacagu

SEQ ID NO: 588849 - RNA, 19 nt, Homo sapiens
  misc_RNA (1)...(19): siRNA sense strand
caacgugggcaucaucaac

SEQ ID NO: 588850 - RNA, 19 nt, Homo sapiens
  misc_RNA (1)...(19): siRNA sense strand
gagacuauuuccgaguuac

SEQ ID NO: 588851 - RNA, 19 nt, Homo sapiens
  misc_RNA (1)...(19): siRNA sense strand
ucaccauggcugccuacua

SEQ ID NO: 588852 - RNA, 19 nt, Homo sapiens
  misc_RNA (1)...(19): siRNA sense strand
ugggugagacugucaacaa

SEQ ID NO: 588853 - RNA, 19 nt, Homo sapiens
  misc_RNA (1)...(19): siRNA sense strand
caacagaaccagacaggua

SEQ ID NO: 588854 - RNA, 19 nt, Homo sapiens
  misc_RNA (1)...(19): siRNA sense strand
uaaagacacucaaccagaa

SEQ ID NO: 588855 - RNA, 19 nt, Homo sapiens
  misc_RNA (1)...(19): siRNA sense strand
uaccuucacucgaaacuua

SEQ ID NO: 588856 - RNA, 19 nt, Homo sapiens
  misc_RNA (1)...(19): siRNA sense strand
aaucugagcuuauuucugu

SEQ ID NO: 588857 - RNA, 19 nt, Homo sapiens
  misc_RNA (1)...(19): siRNA sense strand
gccgauaccuucacucgaa

SEQ ID NO: 588858 - RNA, 19 nt, Homo sapiens
  misc_RNA (1)...(19): siRNA sense strand
gcccagaaguuuagggaaa

SEQ ID NO: 588859 - RNA, 19 nt, Homo sapiens
  misc_RNA (1)...(19): siRNA sense strand
gggaaucucuggcaaaguc

SEQ ID NO: 588860 - RNA, 19 nt, Homo sapiens
  misc_RNA (1)...(19): siRNA sense strand
gugggaaccuugucacauu

SEQ ID NO: 588861 - RNA, 19 nt, Homo sapiens
  misc_RNA (1)...(19): siRNA sense strand
guuccaagaugucuccuuu

SEQ ID NO: 588862 - RNA, 19 nt, Homo sapiens
  misc_RNA (1)...(19): siRNA sense strand
gugagaaucugagcuuauu

SEQ ID NO: 588863 - RNA, 19 nt, Homo sapiens
  misc_RNA (1)...(19): siRNA sense strand
ccacagguauuuggaagaa

SEQ ID NO: 588864 - RNA, 19 nt, Homo sapiens
  misc_RNA (1)...(19): siRNA sense strand
gggaaaagcugcaagaaau

SEQ ID NO: 588865 - RNA, 19 nt, Homo sapiens
  misc_RNA (1)...(19): siRNA sense strand
gacaagagccacagguauu

SEQ ID NO: 588866 - RNA, 19 nt, Homo sapiens
  misc_RNA (1)...(19): siRNA sense strand
gcugugggcuccucagaga

SEQ ID NO: 588867 - RNA, 19 nt, Homo sapiens
  misc_RNA (1)...(19): siRNA sense strand
ggagcaggcugaccacauc

SEQ ID NO: 588868 - RNA, 19 nt, Homo sapiens
  misc_RNA (1)...(19): siRNA sense strand
cggaaaccguguguacuua

SEQ ID NO: 588869 - RNA, 19 nt, Homo sapiens
  misc_RNA (1)...(19): siRNA sense strand
ccagacagguaacaucaug

SEQ ID NO: 588870 - RNA, 19 nt, Homo sapiens
  misc_RNA (1)...(19): siRNA sense strand
ggacaagagccacagguau

SEQ ID NO: 588871 - RNA, 19 nt, Homo sapiens
  misc_RNA (1)...(19): siRNA sense strand
gaaaccguguguacuuauc

SEQ ID NO: 588872 - RNA, 19 nt, Homo sapiens
  misc_RNA (1)...(19): siRNA sense strand
acucgaaacuuaacucuca

SEQ ID NO: 588873 - RNA, 19 nt, Homo sapiens
  misc_RNA (1)...(19): siRNA sense strand
gagugagaaucugagcuua

SEQ ID NO: 588874 - RNA, 19 nt, Homo sapiens
  misc_RNA (1)...(19): siRNA sense strand
gacgggaucuauaacaaca

SEQ ID NO: 588875 - RNA, 19 nt, Homo sapiens
  misc_RNA (1)...(19): siRNA sense strand
gaagccaacuauggaggaa

SEQ ID NO: 588876 - RNA, 19 nt, Homo sapiens
  misc_RNA (1)...(19): siRNA sense strand
ggaugcaaacagccaguua

SEQ ID NO: 588877 - RNA, 19 nt, Homo sapiens
  misc_RNA (1)...(19): siRNA sense strand
gagaaucugagcuuauuuc

SEQ ID NO: 588878 - RNA, 19 nt, Homo sapiens
  misc_RNA (1)...(19): siRNA sense strand
gaaccagacagguaacauc

SEQ ID NO: 588879 - RNA, 19 nt, Homo sapiens
  misc_RNA (1)...(19): siRNA sense strand
ggagggccuuguccaguuc

SEQ ID NO: 588880 - RNA, 19 nt, Homo sapiens
  misc_RNA (1)...(19): siRNA sense strand
gugacgggaucuauaacaa

SEQ ID NO: 588881 - RNA, 19 nt, Homo sapiens
  misc_RNA (1)...(19): siRNA sense strand
ccuauggccugacccagaa

SEQ ID NO: 588882 - RNA, 19 nt, Homo sapiens
  misc_RNA (1)...(19): siRNA sense strand
caagaaauaaagacacuca

SEQ ID NO: 588883 - RNA, 19 nt, Homo sapiens
  misc_RNA (1)...(19): siRNA sense strand
gaaaagcugcaagaaauaa

SEQ ID NO: 588884 - RNA, 19 nt, Homo sapiens
  misc_RNA (1)...(19): siRNA sense strand
ugcagaugcuccagaauga

SEQ ID NO: 588885 - RNA, 19 nt, Homo sapiens
  misc_RNA (1)...(19): siRNA sense strand
gugggaauccucuacauug

SEQ ID NO: 588886 - RNA, 19 nt, Homo sapiens
  misc_RNA (1)...(19): siRNA sense strand
ugacuggauucuacaagau

SEQ ID NO: 588887 - RNA, 19 nt, Homo sapiens
  misc_RNA (1)...(19): siRNA sense strand
ggaaaagcugcaagaaaua

SEQ ID NO: 588888 - RNA, 19 nt, Homo sapiens
  misc_RNA (1)...(19): siRNA sense strand
ggaaaccguguguacuuau

SEQ ID NO: 588889 - RNA, 19 nt, Homo sapiens
  misc_RNA (1)...(19): siRNA sense strand
gccuacaguucgaagcuuu

SEQ ID NO: 588890 - RNA, 19 nt, Homo sapiens
  misc_RNA (1)...(19): siRNA sense strand
gggacaagagccacaggua

SEQ ID NO: 588891 - RNA, 19 nt, Homo sapiens
  misc_RNA (1)...(19): siRNA sense strand
gaaagugggaauccucuac

SEQ ID NO: 588892 - RNA, 19 nt, Homo sapiens
  misc_RNA (1)...(19): siRNA sense strand
ggcgaagcccagaaguuua

SEQ ID NO: 588893 - RNA, 19 nt, Homo sapiens
  misc_RNA (1)...(19): siRNA sense strand
ugggaaccuugucacauuu

SEQ ID NO: 588894 - RNA, 19 nt, Homo sapiens
  misc_RNA (1)...(19): siRNA sense strand
ggaaccuugucacauuugu

SEQ ID NO: 588895 - RNA, 19 nt, Homo sapiens
  misc_RNA (1)...(19): siRNA sense strand
ccaagaaggugggaaaaug

SEQ ID NO: 588896 - RNA, 19 nt, Homo sapiens
  misc_RNA (1)...(19): siRNA sense strand
ccgccuucguugucaguua

SEQ ID NO: 588897 - RNA, 19 nt, Homo sapiens
  misc_RNA (1)...(19): siRNA sense strand
ccacauccucuuucuggaa

SEQ ID NO: 588898 - RNA, 19 nt, Homo sapiens
  misc_RNA (1)...(19): siRNA sense strand
gcgaagcccagaaguuuag

SEQ ID NO: 588899 - RNA, 19 nt, Homo sapiens
  misc_RNA (1)...(19): siRNA sense strand
gcgggaaucucuggcaaag

SEQ ID NO: 588900 - RNA, 19 nt, Homo sapiens
  misc_RNA (1)...(19): siRNA sense strand
ucacauuuguucucuacca

SEQ ID NO: 588901 - RNA, 19 nt, Homo sapiens
  misc_RNA (1)...(19): siRNA sense strand
gcucagugcuucucaucac

SEQ ID NO: 588902 - RNA, 19 nt, Homo sapiens
  misc_RNA (1)...(19): siRNA sense strand
ugagugauucucugaguga

SEQ ID NO: 588903 - RNA, 19 nt, Homo sapiens
  misc_RNA (1)...(19): siRNA sense strand
acaagagccacagguauuu

SEQ ID NO: 588904 - RNA, 19 nt, Homo sapiens
  misc_RNA (1)...(19): siRNA sense strand
cacccaggcuguggaggua

SEQ ID NO: 588905 - RNA, 19 nt, Homo sapiens
  misc_RNA (1)...(19): siRNA sense strand
cauguccauucucaccaua

SEQ ID NO: 588906 - RNA, 19 nt, Homo sapiens
  misc_RNA (1)...(19): siRNA sense strand
accagcagcucauggagaa

SEQ ID NO: 588907 - RNA, 19 nt, Homo sapiens
  misc_RNA (1)...(19): siRNA sense strand
gaaccuugucacauuuguu

SEQ ID NO: 588908 - RNA, 19 nt, Homo sapiens
  misc_RNA (1)...(19): siRNA sense strand
ggccaugccuacaguucga

SEQ ID NO: 588909 - RNA, 19 nt, Homo sapiens
  misc_RNA (1)...(19): siRNA sense strand
ccgccucacugacuggauu

SEQ ID NO: 588910 - RNA, 19 nt, Homo sapiens
  misc_RNA (1)...(19): siRNA sense strand
acagguauuuggaagaagu

SEQ ID NO: 588911 - RNA, 19 nt, Homo sapiens
  misc_RNA (1)...(19): siRNA sense strand
gaaacuuaacucucauguc

SEQ ID NO: 588912 - RNA, 19 nt, Homo sapiens
  misc_RNA (1)...(19): siRNA sense strand
cugacuggauucuacaaga

SEQ ID NO: 588913 - RNA, 19 nt, Homo sapiens
  misc_RNA (1)...(19): siRNA sense strand
gucaacuccuggaccacua

SEQ ID NO: 588914 - RNA, 19 nt, Homo sapiens
  misc_RNA (1)...(19): siRNA sense strand
ccgauaccuucacucgaaa

SEQ ID NO: 588915 - RNA, 19 nt, Homo sapiens
  misc_RNA (1)...(19): siRNA sense strand
gggcuaugacacagaggua

SEQ ID NO: 588916 - RNA, 19 nt, Homo sapiens
  misc_RNA (1)...(19): siRNA sense strand
uaacucucauguccauucu

SEQ ID NO: 588917 - RNA, 19 nt, Homo sapiens
  misc_RNA (1)...(19): siRNA sense strand
ccggaaaccguguguacuu

SEQ ID NO: 588918 - RNA, 19 nt, Homo sapiens
  misc_RNA (1)...(19): siRNA sense strand
gaagugcaggugcgggaau

SEQ ID NO: 588919 - RNA, 19 nt, Homo sapiens
  misc_RNA (1)...(19): siRNA sense strand
ugagugagaaucugagcuu

SEQ ID NO: 588920 - RNA, 19 nt, Homo sapiens
  misc_RNA (1)...(19): siRNA sense strand
gugcagugcuggaguucgu

SEQ ID NO: 588921 - RNA, 19 nt, Homo sapiens
  misc_RNA (1)...(19): siRNA sense strand
acucucauguccauucuca

SEQ ID NO: 588922 - RNA, 19 nt, Homo sapiens
  misc_RNA (1)...(19): siRNA sense strand
aagaaaauauugccuaugg

SEQ ID NO: 588923 - RNA, 19 nt, Homo sapiens
  misc_RNA (1)...(19): siRNA sense strand
caagagccacagguauuug

SEQ ID NO: 588924 - RNA, 19 nt, Homo sapiens
  misc_RNA (1)...(19): siRNA sense strand
ugagcuuauuucuguggua

SEQ ID NO: 588925 - RNA, 19 nt, Homo sapiens
  misc_RNA (1)...(19): siRNA sense strand
aacagaaccagacagguaa

SEQ ID NO: 588926 - RNA, 19 nt, Homo sapiens
  misc_RNA (1)...(19): siRNA sense strand
ugggugacgggaucuauaa

SEQ ID NO: 588927 - RNA, 19 nt, Homo sapiens
  misc_RNA (1)...(19): siRNA sense strand
ugucacauuuguucucuac

SEQ ID NO: 588928 - RNA, 19 nt, Homo sapiens
  misc_RNA (1)...(19): siRNA sense strand
acacguccacccugaguga

SEQ ID NO: 588929 - RNA, 19 nt, Homo sapiens
  misc_RNA (1)...(19): siRNA sense strand
gugggugacgggaucuaua

SEQ ID NO: 588930 - RNA, 19 nt, Homo sapiens
  misc_RNA (1)...(19): siRNA sense strand
agggcuggcuggcugcuuu

SEQ ID NO: 588931 - RNA, 19 nt, Homo sapiens
  misc_RNA (1)...(19): siRNA sense strand
gagccacagguauuuggaa

SEQ ID NO: 588932 - RNA, 19 nt, Homo sapiens
  misc_RNA (1)...(19): siRNA sense strand
gcuguggccuaugcaguca

SEQ ID NO: 588933 - RNA, 19 nt, Homo sapiens
  misc_RNA (1)...(19): siRNA sense strand
aaauaaagacacucaacca

SEQ ID NO: 588934 - RNA, 19 nt, Homo sapiens
  misc_RNA (1)...(19): siRNA sense strand
gugcgaggccuaugucucu

SEQ ID NO: 588935 - RNA, 19 nt, Homo sapiens
  misc_RNA (1)...(19): siRNA sense strand
ccugagugauucucugagu

SEQ ID NO: 588936 - RNA, 19 nt, Homo sapiens
  misc_RNA (1)...(19): siRNA sense strand
ccacgugcacagccacuug

SEQ ID NO: 588937 - RNA, 19 nt, Homo sapiens
  misc_RNA (1)...(19): siRNA sense strand
gaaucugagcuuauuucug

SEQ ID NO: 588938 - RNA, 19 nt, Homo sapiens
  misc_RNA (1)...(19): siRNA sense strand
cgccuucguugucaguuau

SEQ ID NO: 588939 - RNA, 19 nt, Homo sapiens
  misc_RNA (1)...(19): siRNA sense strand
cauuuguucucuaccagau

SEQ ID NO: 588940 - RNA, 19 nt, Homo sapiens
  misc_RNA (1)...(19): siRNA sense strand
cugcagaugcuccagaaug

SEQ ID NO: 588941 - RNA, 19 nt, Homo sapiens
  misc_RNA (1)...(19): siRNA sense strand
gagcauugauccggaaacc

SEQ ID NO: 588942 - RNA, 19 nt, Homo sapiens
  misc_RNA (1)...(19): siRNA sense strand
ugacccagaagccaacuau

SEQ ID NO: 588943 - RNA, 19 nt, Homo sapiens
  misc_RNA (1)...(19): siRNA sense strand
ggugacgggaucuauaaca

SEQ ID NO: 588944 - RNA, 19 nt, Homo sapiens
  misc_RNA (1)...(19): siRNA sense strand
gaacccaccagcagcucau

SEQ ID NO: 588945 - RNA, 19 nt, Homo sapiens
  misc_RNA (1)...(19): siRNA sense strand
agccaacuauggaggaaau

SEQ ID NO: 588946 - RNA, 19 nt, Homo sapiens
  misc_RNA (1)...(19): siRNA sense strand
uccaagaugucuccuuugc

SEQ ID NO: 588947 - RNA, 19 nt, Homo sapiens
  misc_RNA (1)...(19): siRNA sense strand
gggaaaaugguaccaguug

SEQ ID NO: 588948 - RNA, 19 nt, Homo sapiens
  misc_RNA (1)...(19): siRNA sense strand
gggaaccuugucacauuug

SEQ ID NO: 588949 - RNA, 19 nt, Homo sapiens
  misc_RNA (1)...(19): siRNA sense strand
ugggaauccucuacauugg

SEQ ID NO: 588950 - RNA, 19 nt, Homo sapiens
  misc_RNA (1)...(19): siRNA sense strand
cccagaagccaacuaugga

SEQ ID NO: 588951 - RNA, 19 nt, Homo sapiens
  misc_RNA (1)...(19): siRNA sense strand
gagauaggcuugcacuuaa

SEQ ID NO: 588952 - RNA, 19 nt, Homo sapiens
  misc_RNA (1)...(19): siRNA sense strand
gaacuuauccagaguguga

SEQ ID NO: 588953 - RNA, 19 nt, Homo sapiens
  misc_RNA (1)...(19): siRNA sense strand
gagcugaccucaagggaaa

SEQ ID NO: 588954 - RNA, 19 nt, Homo sapiens
  misc_RNA (1)...(19): siRNA sense strand
ugacagaugugcaagauga

SEQ ID NO: 588955 - RNA, 19 nt, Homo sapiens
  misc_RNA (1)...(19): siRNA sense strand
gcucaaacauucaaacuuc

SEQ ID NO: 588956 - RNA, 19 nt, Homo sapiens
  misc_RNA (1)...(19): siRNA sense strand
gcacugggaugauguaguc

SEQ ID NO: 588957 - RNA, 19 nt, Homo sapiens
  misc_RNA (1)...(19): siRNA sense strand
gcaaugggcaugcagauga

SEQ ID NO: 588958 - RNA, 19 nt, Homo sapiens
  misc_RNA (1)...(19): siRNA sense strand
guacuacuaugcccucuau

SEQ ID NO: 588959 - RNA, 19 nt, Homo sapiens
  misc_RNA (1)...(19): siRNA sense strand
cgagauaggcuugcacuua

SEQ ID NO: 588960 - RNA, 19 nt, Homo sapiens
  misc_RNA (1)...(19): siRNA sense strand
gaacuucaaugccaaccau

SEQ ID NO: 588961 - RNA, 19 nt, Homo sapiens
  misc_RNA (1)...(19): siRNA sense strand
ugaaagggcucggcaguug

SEQ ID NO: 588962 - RNA, 19 nt, Homo sapiens
  misc_RNA (1)...(19): siRNA sense strand
guaccgauauuucuccuau

SEQ ID NO: 588963 - RNA, 19 nt, Homo sapiens
  misc_RNA (1)...(19): siRNA sense strand
gaccuggccugcucauuga

SEQ ID NO: 588964 - RNA, 19 nt, Homo sapiens
  misc_RNA (1)...(19): siRNA sense strand
ggagggagauccgagagaa

SEQ ID NO: 588965 - RNA, 19 nt, Homo sapiens
  misc_RNA (1)...(19): siRNA sense strand
gggaugauguagucuguga

SEQ ID NO: 588966 - RNA, 19 nt, Homo sapiens
  misc_RNA (1)...(19): siRNA sense strand
ggaaggcaccuaugaggaa

SEQ ID NO: 588967 - RNA, 19 nt, Homo sapiens
  misc_RNA (1)...(19): siRNA sense strand
gcaaacacauggccaacca

SEQ ID NO: 588968 - RNA, 19 nt, Homo sapiens
  misc_RNA (1)...(19): siRNA sense strand
ggaccuggccugcucauug

SEQ ID NO: 588969 - RNA, 19 nt, Homo sapiens
  misc_RNA (1)...(19): siRNA sense strand
caacggcacuuugcuacuu

SEQ ID NO: 588970 - RNA, 19 nt, Homo sapiens
  misc_RNA (1)...(19): siRNA sense strand
cgacugggccuacugcuaa

SEQ ID NO: 588971 - RNA, 19 nt, Homo sapiens
  misc_RNA (1)...(19): siRNA sense strand
gaaggcaccuaugaggaaa

SEQ ID NO: 588972 - RNA, 19 nt, Homo sapiens
  misc_RNA (1)...(19): siRNA sense strand
ggacagaggcacugaugga

SEQ ID NO: 588973 - RNA, 19 nt, Homo sapiens
  misc_RNA (1)...(19): siRNA sense strand
cgacguggguggugcuuug

SEQ ID NO: 588974 - RNA, 19 nt, Homo sapiens
  misc_RNA (1)...(19): siRNA sense strand
cagaacaacugcgggauga

SEQ ID NO: 588975 - RNA, 19 nt, Homo sapiens
  misc_RNA (1)...(19): siRNA sense strand
gcgcaggaguugcaacaga

SEQ ID NO: 588976 - RNA, 19 nt, Homo sapiens
  misc_RNA (1)...(19): siRNA sense strand
gugcaagccuggagugguu

SEQ ID NO: 588977 - RNA, 19 nt, Homo sapiens
  misc_RNA (1)...(19): siRNA sense strand
gauugugacucucguggaa

SEQ ID NO: 588978 - RNA, 19 nt, Homo sapiens
  misc_RNA (1)...(19): siRNA sense strand
gccaaugccugcgcuguuu

SEQ ID NO: 588979 - RNA, 19 nt, Homo sapiens
  misc_RNA (1)...(19): siRNA sense strand
ugugauggaugucagcaua

SEQ ID NO: 588980 - RNA, 19 nt, Homo sapiens
  misc_RNA (1)...(19): siRNA sense strand
gaaccugacucgucuacac

SEQ ID NO: 588981 - RNA, 19 nt, Homo sapiens
  misc_RNA (1)...(19): siRNA sense strand
aaaggugcauugcugguuu

SEQ ID NO: 588982 - RNA, 19 nt, Homo sapiens
  misc_RNA (1)...(19): siRNA sense strand
gaauguagucaccagcuuu

SEQ ID NO: 588983 - RNA, 19 nt, Homo sapiens
  misc_RNA (1)...(19): siRNA sense strand
gcagaacgucgugccaaua

SEQ ID NO: 588984 - RNA, 19 nt, Homo sapiens
  misc_RNA (1)...(19): siRNA sense strand
ccuacaagcugcaucugaa

SEQ ID NO: 588985 - RNA, 19 nt, Homo sapiens
  misc_RNA (1)...(19): siRNA sense strand
ggccgaaccuggcaugugu

SEQ ID NO: 588986 - RNA, 19 nt, Homo sapiens
  misc_RNA (1)...(19): siRNA sense strand
ccaggaacuucaagaacuu

SEQ ID NO: 588987 - RNA, 19 nt, Homo sapiens
  misc_RNA (1)...(19): siRNA sense strand
ggaccuggaggcugaguuu

SEQ ID NO: 588988 - RNA, 19 nt, Homo sapiens
  misc_RNA (1)...(19): siRNA sense strand
cuacaacaccugccaguga

SEQ ID NO: 588989 - RNA, 19 nt, Homo sapiens
  misc_RNA (1)...(19): siRNA sense strand
gaaacgggcaggaaauagu

SEQ ID NO: 588990 - RNA, 19 nt, Homo sapiens
  misc_RNA (1)...(19): siRNA sense strand
cgaccagcaucuugacuug

SEQ ID NO: 588991 - RNA, 19 nt, Homo sapiens
  misc_RNA (1)...(19): siRNA sense strand
caaugucucugucgaacug

SEQ ID NO: 588992 - RNA, 19 nt, Homo sapiens
  misc_RNA (1)...(19): siRNA sense strand
gagggcaggugcucgaugu

SEQ ID NO: 588993 - RNA, 19 nt, Homo sapiens
  misc_RNA (1)...(19): siRNA sense strand
ggugcaaccuggcuacuuc

SEQ ID NO: 588994 - RNA, 19 nt, Homo sapiens
  misc_RNA (1)...(19): siRNA sense strand
caacacacguggccucaac

SEQ ID NO: 588995 - RNA, 19 nt, Homo sapiens
  misc_RNA (1)...(19): siRNA sense strand
ggaauuggaaggcaccuau

SEQ ID NO: 588996 - RNA, 19 nt, Homo sapiens
  misc_RNA (1)...(19): siRNA sense strand
gaauauucccagcagauug

SEQ ID NO: 588997 - RNA, 19 nt, Homo sapiens
  misc_RNA (1)...(19): siRNA sense strand
gcaagacuucucccucuga

SEQ ID NO: 588998 - RNA, 19 nt, Homo sapiens
  misc_RNA (1)...(19): siRNA sense strand
gcaagccgcucaggacaag

SEQ ID NO: 588999 - RNA, 19 nt, Homo sapiens
  misc_RNA (1)...(19): siRNA sense strand
aggcagaccugacagaugu

SEQ ID NO: 589000 - RNA, 19 nt, Homo sapiens
  misc_RNA (1)...(19): siRNA sense strand
gcaaugggcagaguuggaa

SEQ ID NO: 589001 - RNA, 19 nt, Homo sapiens
  misc_RNA (1)...(19): siRNA sense strand
ggaacaggccaaccaggaa

SEQ ID NO: 589002 - RNA, 19 nt, Homo sapiens
  misc_RNA (1)...(19): siRNA sense strand
gguacuugauauuuccuaa

SEQ ID NO: 589003 - RNA, 19 nt, Homo sapiens
  misc_RNA (1)...(19): siRNA sense strand
cagaaccuguugaagauca

SEQ ID NO: 589004 - RNA, 19 nt, Homo sapiens
  misc_RNA (1)...(19): siRNA sense strand
ccuggaggcucugaaauug

SEQ ID NO: 589005 - RNA, 19 nt, Homo sapiens
  misc_RNA (1)...(19): siRNA sense strand
gcaaccugcugggcacaaa

SEQ ID NO: 589006 - RNA, 19 nt, Homo sapiens
  misc_RNA (1)...(19): siRNA sense strand
ccacaugccagguacuuga

SEQ ID NO: 589007 - RNA, 19 nt, Homo sapiens
  misc_RNA (1)...(19): siRNA sense strand
uggaggcucugaaauugaa

SEQ ID NO: 589008 - RNA, 19 nt, Homo sapiens
  misc_RNA (1)...(19): siRNA sense strand
caaccaggaacuucaagaa

SEQ ID NO: 589009 - RNA, 19 nt, Homo sapiens
  misc_RNA (1)...(19): siRNA sense strand
gaaaggugcauugcugguu

SEQ ID NO: 589010 - RNA, 19 nt, Homo sapiens
  misc_RNA (1)...(19): siRNA sense strand
ggaagugcccagccugaga

SEQ ID NO: 589011 - RNA, 19 nt, Homo sapiens
  misc_RNA (1)...(19): siRNA sense strand
ccacggcacugggaugaug

SEQ ID NO: 589012 - RNA, 19 nt, Homo sapiens
  misc_RNA (1)...(19): siRNA sense strand
gaguaaggcagcccaguug

SEQ ID NO: 589013 - RNA, 19 nt, Homo sapiens
  misc_RNA (1)...(19): siRNA sense strand
gauccuggcacguacugua

SEQ ID NO: 589014 - RNA, 19 nt, Homo sapiens
  misc_RNA (1)...(19): siRNA sense strand
gagcugcggcgugaaauug

SEQ ID NO: 589015 - RNA, 19 nt, Homo sapiens
  misc_RNA (1)...(19): siRNA sense strand
gaggcugaguuucauuuca

SEQ ID NO: 589016 - RNA, 19 nt, Homo sapiens
  misc_RNA (1)...(19): siRNA sense strand
gccagguacuugauauuuc

SEQ ID NO: 589017 - RNA, 19 nt, Homo sapiens
  misc_RNA (1)...(19): siRNA sense strand
ggagcugggcugaggauga

SEQ ID NO: 589018 - RNA, 19 nt, Homo sapiens
  misc_RNA (1)...(19): siRNA sense strand
gagcugggcugaggaugag

SEQ ID NO: 589019 - RNA, 19 nt, Homo sapiens
  misc_RNA (1)...(19): siRNA sense strand
ugacucgucuacacacguu

SEQ ID NO: 589020 - RNA, 19 nt, Homo sapiens
  misc_RNA (1)...(19): siRNA sense strand
gaggagcugcggcgugaaa

SEQ ID NO: 589021 - RNA, 19 nt, Homo sapiens
  misc_RNA (1)...(19): siRNA sense strand
gcagugccaugccugugau

SEQ ID NO: 589022 - RNA, 19 nt, Homo sapiens
  misc_RNA (1)...(19): siRNA sense strand
ggacuuggcagcccguaca

SEQ ID NO: 589023 - RNA, 19 nt, Homo sapiens
  misc_RNA (1)...(19): siRNA sense strand
gggcugaggaugagaaaca

SEQ ID NO: 589024 - RNA, 19 nt, Homo sapiens
  misc_RNA (1)...(19): siRNA sense strand
gagccugacagacauaaau

SEQ ID NO: 589025 - RNA, 19 nt, Homo sapiens
  misc_RNA (1)...(19): siRNA sense strand
ccuggcauguguaccgaua

SEQ ID NO: 589026 - RNA, 19 nt, Homo sapiens
  misc_RNA (1)...(19): siRNA sense strand
gggcggacuuguucugagu

SEQ ID NO: 589027 - RNA, 19 nt, Homo sapiens
  misc_RNA (1)...(19): siRNA sense strand
uggcauguguaccgauauu

SEQ ID NO: 589028 - RNA, 19 nt, Homo sapiens
  misc_RNA (1)...(19): siRNA sense strand
ggugagcacugugaaaggu

SEQ ID NO: 589029 - RNA, 19 nt, Homo sapiens
  misc_RNA (1)...(19): siRNA sense strand
gcauguguaccgauauuuc

SEQ ID NO: 589030 - RNA, 19 nt, Homo sapiens
  misc_RNA (1)...(19): siRNA sense strand
gaugcgauccuggcacgua

SEQ ID NO: 589031 - RNA, 19 nt, Homo sapiens
  misc_RNA (1)...(19): siRNA sense strand
ucaagaacuuauccagagu

SEQ ID NO: 589032 - RNA, 19 nt, Homo sapiens
  misc_RNA (1)...(19): siRNA sense strand
ggaggugugugugauggau

SEQ ID NO: 589033 - RNA, 19 nt, Homo sapiens
  misc_RNA (1)...(19): siRNA sense strand
gaggacggccauagucaug

SEQ ID NO: 589034 - RNA, 19 nt, Homo sapiens
  misc_RNA (1)...(19): siRNA sense strand
gcgagcagugucaggauuu

SEQ ID NO: 589035 - RNA, 19 nt, Homo sapiens
  misc_RNA (1)...(19): siRNA sense strand
gcugugauucccaugauga

SEQ ID NO: 589036 - RNA, 19 nt, Homo sapiens
  misc_RNA (1)...(19): siRNA sense strand
gggcugauccugauagcau

SEQ ID NO: 589037 - RNA, 19 nt, Homo sapiens
  misc_RNA (1)...(19): siRNA sense strand
gcccgugcguucucaggaa

SEQ ID NO: 589038 - RNA, 19 nt, Homo sapiens
  misc_RNA (1)...(19): siRNA sense strand
gggcugcgaugugaagcuu

SEQ ID NO: 589039 - RNA, 19 nt, Homo sapiens
  misc_RNA (1)...(19): siRNA sense strand
agauugagccauccacuga

SEQ ID NO: 589040 - RNA, 19 nt, Homo sapiens
  misc_RNA (1)...(19): siRNA sense strand
gaaacagaaggcagagaca

SEQ ID NO: 589041 - RNA, 19 nt, Homo sapiens
  misc_RNA (1)...(19): siRNA sense strand
aggagaagcugggcauugu

SEQ ID NO: 589042 - RNA, 19 nt, Homo sapiens
  misc_RNA (1)...(19): siRNA sense strand
ccaaugccugcgcuguuua

SEQ ID NO: 589043 - RNA, 19 nt, Homo sapiens
  misc_RNA (1)...(19): siRNA sense strand
gugugccgcuccugugauu

SEQ ID NO: 589044 - RNA, 19 nt, Homo sapiens
  misc_RNA (1)...(19): siRNA sense strand
agucaugccuguaggaagu

SEQ ID NO: 589045 - RNA, 19 nt, Homo sapiens
  misc_RNA (1)...(19): siRNA sense strand
ugaaggcgaggucaucuau

SEQ ID NO: 589046 - RNA, 19 nt, Homo sapiens
  misc_RNA (1)...(19): siRNA sense strand
aagguucacugaguucuga

SEQ ID NO: 589047 - RNA, 19 nt, Homo sapiens
  misc_RNA (1)...(19): siRNA sense strand
gugagcaacucggcaagug

SEQ ID NO: 589048 - RNA, 19 nt, Homo sapiens
  misc_RNA (1)...(19): siRNA sense strand
gcaagaugagaacuucaau

SEQ ID NO: 589049 - RNA, 19 nt, Homo sapiens
  misc_RNA (1)...(19): siRNA sense strand
uugugacucucguggaaua

SEQ ID NO: 589050 - RNA, 19 nt, Homo sapiens
  misc_RNA (1)...(19): siRNA sense strand
ugagugcagugggaacauu

SEQ ID NO: 589051 - RNA, 19 nt, Homo sapiens
  misc_RNA (1)...(19): siRNA sense strand
gcacaugcccuucacaaua

SEQ ID NO: 589052 - RNA, 19 nt, Homo sapiens
  misc_RNA (1)...(19): siRNA sense strand
guaacuggcuuccuuuaaa

SEQ ID NO: 589053 - RNA, 19 nt, Homo sapiens
  misc_RNA (1)...(19): siRNA sense strand
ggaaauggagcauggaaua

SEQ ID NO: 589054 - RNA, 19 nt, Homo sapiens
  misc_RNA (1)...(19): siRNA sense strand
caugaagucugucgcuaua

SEQ ID NO: 589055 - RNA, 19 nt, Homo sapiens
  misc_RNA (1)...(19): siRNA sense strand
gaacaacaaagucuugaug

SEQ ID NO: 589056 - RNA, 19 nt, Homo sapiens
  misc_RNA (1)...(19): siRNA sense strand
gaaacaacgucuggccauu

SEQ ID NO: 589057 - RNA, 19 nt, Homo sapiens
  misc_RNA (1)...(19): siRNA sense strand
ggaccugccucuccucguu

SEQ ID NO: 589058 - RNA, 19 nt, Homo sapiens
  misc_RNA (1)...(19): siRNA sense strand
gggcucagcuggucacugu

SEQ ID NO: 589059 - RNA, 19 nt, Homo sapiens
  misc_RNA (1)...(19): siRNA sense strand
gacaggugcugcuggauga

SEQ ID NO: 589060 - RNA, 19 nt, Homo sapiens
  misc_RNA (1)...(19): siRNA sense strand
uaaagaggcccuugaacaa

SEQ ID NO: 589061 - RNA, 19 nt, Homo sapiens
  misc_RNA (1)...(19): siRNA sense strand
ugaagucugucgcuauaaa

SEQ ID NO: 589062 - RNA, 19 nt, Homo sapiens
  misc_RNA (1)...(19): siRNA sense strand
uaacuggcuuccuuuaaau

SEQ ID NO: 589063 - RNA, 19 nt, Homo sapiens
  misc_RNA (1)...(19): siRNA sense strand
gauaccacccugaugagua

SEQ ID NO: 589064 - RNA, 19 nt, Homo sapiens
  misc_RNA (1)...(19): siRNA sense strand
gaaauggagcauggaauau

SEQ ID NO: 589065 - RNA, 19 nt, Homo sapiens
  misc_RNA (1)...(19): siRNA sense strand
auaccacccugaugaguaa

SEQ ID NO: 589066 - RNA, 19 nt, Homo sapiens
  misc_RNA (1)...(19): siRNA sense strand
cacaugcccuucacaauag

SEQ ID NO: 589067 - RNA, 19 nt, Homo sapiens
  misc_RNA (1)...(19): siRNA sense strand
agacauuaaucccucacua

SEQ ID NO: 589068 - RNA, 19 nt, Homo sapiens
  misc_RNA (1)...(19): siRNA sense strand
caagacgucuccuuugcau

SEQ ID NO: 589069 - RNA, 19 nt, Homo sapiens
  misc_RNA (1)...(19): siRNA sense strand
aaauggagcauggaauaua

SEQ ID NO: 589070 - RNA, 19 nt, Homo sapiens
  misc_RNA (1)...(19): siRNA sense strand
gaguaacuggcuuccuuua

SEQ ID NO: 589071 - RNA, 19 nt, Homo sapiens
  misc_RNA (1)...(19): siRNA sense strand
cauggaauauacacagaug

SEQ ID NO: 589072 - RNA, 19 nt, Homo sapiens
  misc_RNA (1)...(19): siRNA sense strand
aagaggcccuugaacaaug

SEQ ID NO: 589073 - RNA, 19 nt, Homo sapiens
  misc_RNA (1)...(19): siRNA sense strand
acaacaaagucuugaugug

SEQ ID NO: 589074 - RNA, 19 nt, Homo sapiens
  misc_RNA (1)...(19): siRNA sense strand
gcagacccugguauacaua

SEQ ID NO: 589075 - RNA, 19 nt, Homo sapiens
  misc_RNA (1)...(19): siRNA sense strand
cgaggagcaugaagucugu

SEQ ID NO: 589076 - RNA, 19 nt, Homo sapiens
  misc_RNA (1)...(19): siRNA sense strand
gacauuaaucccucacuau

SEQ ID NO: 589077 - RNA, 19 nt, Homo sapiens
  misc_RNA (1)...(19): siRNA sense strand
gcaugaagucugucgcuau

SEQ ID NO: 589078 - RNA, 19 nt, Homo sapiens
  misc_RNA (1)...(19): siRNA sense strand
agacgucuccuuugcauau

SEQ ID NO: 589079 - RNA, 19 nt, Homo sapiens
  misc_RNA (1)...(19): siRNA sense strand
ggaggcugcuucaccuaca

SEQ ID NO: 589080 - RNA, 19 nt, Homo sapiens
  misc_RNA (1)...(19): siRNA sense strand
caccaugucucgaaucaac

SEQ ID NO: 589081 - RNA, 19 nt, Homo sapiens
  misc_RNA (1)...(19): siRNA sense strand
caacacccgccaucaggaa

SEQ ID NO: 589082 - RNA, 19 nt, Homo sapiens
  misc_RNA (1)...(19): siRNA sense strand
gccaggaccucgguuucuu

SEQ ID NO: 589083 - RNA, 19 nt, Homo sapiens
  misc_RNA (1)...(19): siRNA sense strand
gcuauaaagaggcccuuga

SEQ ID NO: 589084 - RNA, 19 nt, Homo sapiens
  misc_RNA (1)...(19): siRNA sense strand
acauuaaucccucacuauu

SEQ ID NO: 589085 - RNA, 19 nt, Homo sapiens
  misc_RNA (1)...(19): siRNA sense strand
auaaagaggcccuugaaca

SEQ ID NO: 589086 - RNA, 19 nt, Homo sapiens
  misc_RNA (1)...(19): siRNA sense strand
ucaugugccucuucuccuu

SEQ ID NO: 589087 - RNA, 19 nt, Homo sapiens
  misc_RNA (1)...(19): siRNA sense strand
ggugaacaacaaagucuug

SEQ ID NO: 589088 - RNA, 19 nt, Homo sapiens
  misc_RNA (1)...(19): siRNA sense strand
gcagaccguucgcaguuuu

SEQ ID NO: 589089 - RNA, 19 nt, Homo sapiens
  misc_RNA (1)...(19): siRNA sense strand
cagcggagaagguguacaa

SEQ ID NO: 589090 - RNA, 19 nt, Homo sapiens
  misc_RNA (1)...(19): siRNA sense strand
aaacaacgucuggccauug

SEQ ID NO: 589091 - RNA, 19 nt, Homo sapiens
  misc_RNA (1)...(19): siRNA sense strand
ggaccaggugaacaacaaa

SEQ ID NO: 589092 - RNA, 19 nt, Homo sapiens
  misc_RNA (1)...(19): siRNA sense strand
augaguaacuggcuuccuu

SEQ ID NO: 589093 - RNA, 19 nt, Homo sapiens
  misc_RNA (1)...(19): siRNA sense strand
ccagugccaucuucuucau

SEQ ID NO: 589094 - RNA, 19 nt, Homo sapiens
  misc_RNA (1)...(19): siRNA sense strand
gcacagccaggugguuuca

SEQ ID NO: 589095 - RNA, 19 nt, Homo sapiens
  misc_RNA (1)...(19): siRNA sense strand
gaaaagcccaucucacagu

SEQ ID NO: 589096 - RNA, 19 nt, Homo sapiens
  misc_RNA (1)...(19): siRNA sense strand
cuauaaagaggcccuugaa

SEQ ID NO: 589097 - RNA, 19 nt, Homo sapiens
  misc_RNA (1)...(19): siRNA sense strand
guacaacacccgccaucag

SEQ ID NO: 589098 - RNA, 19 nt, Homo sapiens
  misc_RNA (1)...(19): siRNA sense strand
cggcugagcucggauacca

SEQ ID NO: 589099 - RNA, 19 nt, Homo sapiens
  misc_RNA (1)...(19): siRNA sense strand
auuaaucccucacuauucu

SEQ ID NO: 589100 - RNA, 19 nt, Homo sapiens
  misc_RNA (1)...(19): siRNA sense strand
gaagucugucgcuauaaag

SEQ ID NO: 589101 - RNA, 19 nt, Homo sapiens
  misc_RNA (1)...(19): siRNA sense strand
uagcagcggagaaggugua

SEQ ID NO: 589102 - RNA, 19 nt, Homo sapiens
  misc_RNA (1)...(19): siRNA sense strand
gcugguggacgcggcuuua

SEQ ID NO: 589103 - RNA, 19 nt, Homo sapiens
  misc_RNA (1)...(19): siRNA sense strand
ucggauaccacccugauga

SEQ ID NO: 589104 - RNA, 19 nt, Homo sapiens
  misc_RNA (1)...(19): siRNA sense strand
cauuaaucccucacuauuc

SEQ ID NO: 589105 - RNA, 19 nt, Homo sapiens
  misc_RNA (1)...(19): siRNA sense strand
aaagaggcccuugaacaau

SEQ ID NO: 589106 - RNA, 19 nt, Homo sapiens
  misc_RNA (1)...(19): siRNA sense strand
uacaccaugucucgaauca

SEQ ID NO: 589107 - RNA, 19 nt, Homo sapiens
  misc_RNA (1)...(19): siRNA sense strand
aauggagcauggaauauac

SEQ ID NO: 589108 - RNA, 19 nt, Homo sapiens
  misc_RNA (1)...(19): siRNA sense strand
aagcccaucucacaguaug

SEQ ID NO: 589109 - RNA, 19 nt, Homo sapiens
  misc_RNA (1)...(19): siRNA sense strand
gagggcugcugggauuugu

SEQ ID NO: 589110 - RNA, 19 nt, Homo sapiens
  misc_RNA (1)...(19): siRNA sense strand
ucacggcugagcucggaua

SEQ ID NO: 589111 - RNA, 19 nt, Homo sapiens
  misc_RNA (1)...(19): siRNA sense strand
gugcagacccugguauaca

SEQ ID NO: 589112 - RNA, 19 nt, Homo sapiens
  misc_RNA (1)...(19): siRNA sense strand
cagccugcuuuccuuuaug

SEQ ID NO: 589113 - RNA, 19 nt, Homo sapiens
  misc_RNA (1)...(19): siRNA sense strand
ugaguaacuggcuuccuuu

SEQ ID NO: 589114 - RNA, 19 nt, Homo sapiens
  misc_RNA (1)...(19): siRNA sense strand
aaaagcccaucucacagua

SEQ ID NO: 589115 - RNA, 19 nt, Homo sapiens
  misc_RNA (1)...(19): siRNA sense strand
ucaaggggcugacguuuac

SEQ ID NO: 589116 - RNA, 19 nt, Homo sapiens
  misc_RNA (1)...(19): siRNA sense strand
caaugucggcagcuguauu

SEQ ID NO: 589117 - RNA, 19 nt, Homo sapiens
  misc_RNA (1)...(19): siRNA sense strand
gcggagaagguguacaaca

SEQ ID NO: 589118 - RNA, 19 nt, Homo sapiens
  misc_RNA (1)...(19): siRNA sense strand
ugcgaagccuggugaaagu

SEQ ID NO: 589119 - RNA, 19 nt, Homo sapiens
  misc_RNA (1)...(19): siRNA sense strand
aggaccaggugaacaacaa

SEQ ID NO: 589120 - RNA, 19 nt, Homo sapiens
  misc_RNA (1)...(19): siRNA sense strand
ggaccgacagccaaaucug

SEQ ID NO: 589121 - RNA, 19 nt, Homo sapiens
  misc_RNA (1)...(19): siRNA sense strand
gaggaggcugcuucaccua

SEQ ID NO: 589122 - RNA, 19 nt, Homo sapiens
  misc_RNA (1)...(19): siRNA sense strand
agccugcuuuccuuuauga

SEQ ID NO: 589123 - RNA, 19 nt, Homo sapiens
  misc_RNA (1)...(19): siRNA sense strand
gagcaggaccaggugaaca

SEQ ID NO: 589124 - RNA, 19 nt, Homo sapiens
  misc_RNA (1)...(19): siRNA sense strand
ccucgacucacccuccuuu

SEQ ID NO: 589125 - RNA, 19 nt, Homo sapiens
  misc_RNA (1)...(19): siRNA sense strand
gguggacgcggcuuuacug

SEQ ID NO: 589126 - RNA, 19 nt, Homo sapiens
  misc_RNA (1)...(19): siRNA sense strand
gcauggaauauacacagau

SEQ ID NO: 589127 - RNA, 19 nt, Homo sapiens
  misc_RNA (1)...(19): siRNA sense strand
caauagcagcggagaaggu

SEQ ID NO: 589128 - RNA, 19 nt, Homo sapiens
  misc_RNA (1)...(19): siRNA sense strand
gcucggauaccacccugau

SEQ ID NO: 589129 - RNA, 19 nt, Homo sapiens
  misc_RNA (1)...(19): siRNA sense strand
acagccaggugguuucagu

SEQ ID NO: 589130 - RNA, 19 nt, Homo sapiens
  misc_RNA (1)...(19): siRNA sense strand
ugcagacccugguauacau

SEQ ID NO: 589131 - RNA, 19 nt, Homo sapiens
  misc_RNA (1)...(19): siRNA sense strand
cgacucacccuccuuucuc

SEQ ID NO: 589132 - RNA, 19 nt, Homo sapiens
  misc_RNA (1)...(19): siRNA sense strand
uaaaugccaaugugcucuu

SEQ ID NO: 589133 - RNA, 19 nt, Homo sapiens
  misc_RNA (1)...(19): siRNA sense strand
aguaacuggcuuccuuuaa

SEQ ID NO: 589134 - RNA, 19 nt, Homo sapiens
  misc_RNA (1)...(19): siRNA sense strand
caggaaauggagcauggaa

SEQ ID NO: 589135 - RNA, 19 nt, Homo sapiens
  misc_RNA (1)...(19): siRNA sense strand
gcccaucucacaguaugaa

SEQ ID NO: 589136 - RNA, 19 nt, Homo sapiens
  misc_RNA (1)...(19): siRNA sense strand
ggagcugcagagaagguuu

SEQ ID NO: 589137 - RNA, 19 nt, Homo sapiens
  misc_RNA (1)...(19): siRNA sense strand
caagggcugccaggacuau

SEQ ID NO: 589138 - RNA, 19 nt, Homo sapiens
  misc_RNA (1)...(19): siRNA sense strand
cugcuuuccuuuaugaucu

SEQ ID NO: 589139 - RNA, 19 nt, Homo sapiens
  misc_RNA (1)...(19): siRNA sense strand
aaugucggcagcuguauug

SEQ ID NO: 589140 - RNA, 19 nt, Homo sapiens
  misc_RNA (1)...(19): siRNA sense strand
gcacaugcccuucacaaua

SEQ ID NO: 589141 - RNA, 19 nt, Homo sapiens
  misc_RNA (1)...(19): siRNA sense strand
guaacuggcuuccuuuaaa

SEQ ID NO: 589142 - RNA, 19 nt, Homo sapiens
  misc_RNA (1)...(19): siRNA sense strand
ggaaauggagcauggaaua

SEQ ID NO: 589143 - RNA, 19 nt, Homo sapiens
  misc_RNA (1)...(19): siRNA sense strand
caugaagucugucgcuaua

SEQ ID NO: 589144 - RNA, 19 nt, Homo sapiens
  misc_RNA (1)...(19): siRNA sense strand
gaacaacaaagucuugaug

SEQ ID NO: 589145 - RNA, 19 nt, Homo sapiens
  misc_RNA (1)...(19): siRNA sense strand
gaaacaacgucuggccauu

SEQ ID NO: 589146 - RNA, 19 nt, Homo sapiens
  misc_RNA (1)...(19): siRNA sense strand
ggaccugccucuccucguu

SEQ ID NO: 589147 - RNA, 19 nt, Homo sapiens
  misc_RNA (1)...(19): siRNA sense strand
gggcucagcuggucacugu

SEQ ID NO: 589148 - RNA, 19 nt, Homo sapiens
  misc_RNA (1)...(19): siRNA sense strand
gacaggugcugcuggauga

SEQ ID NO: 589149 - RNA, 19 nt, Homo sapiens
  misc_RNA (1)...(19): siRNA sense strand
uaaagaggcccuugaacaa

SEQ ID NO: 589150 - RNA, 19 nt, Homo sapiens
  misc_RNA (1)...(19): siRNA sense strand
ugaagucugucgcuauaaa

SEQ ID NO: 589151 - RNA, 19 nt, Homo sapiens
  misc_RNA (1)...(19): siRNA sense strand
uaacuggcuuccuuuaaau

SEQ ID NO: 589152 - RNA, 19 nt, Homo sapiens
  misc_RNA (1)...(19): siRNA sense strand
gauaccacccugaugagua

SEQ ID NO: 589153 - RNA, 19 nt, Homo sapiens
  misc_RNA (1)...(19): siRNA sense strand
gaaauggagcauggaauau

SEQ ID NO: 589154 - RNA, 19 nt, Homo sapiens
  misc_RNA (1)...(19): siRNA sense strand
auaccacccugaugaguaa

SEQ ID NO: 589155 - RNA, 19 nt, Homo sapiens
  misc_RNA (1)...(19): siRNA sense strand
cacaugcccuucacaauag

SEQ ID NO: 589156 - RNA, 19 nt, Homo sapiens
  misc_RNA (1)...(19): siRNA sense strand
agacauuaaucccucacua

SEQ ID NO: 589157 - RNA, 19 nt, Homo sapiens
  misc_RNA (1)...(19): siRNA sense strand
caagacgucuccuuugcau

SEQ ID NO: 589158 - RNA, 19 nt, Homo sapiens
  misc_RNA (1)...(19): siRNA sense strand
aaauggagcauggaauaua

SEQ ID NO: 589159 - RNA, 19 nt, Homo sapiens
  misc_RNA (1)...(19): siRNA sense strand
gaguaacuggcuuccuuua

SEQ ID NO: 589160 - RNA, 19 nt, Homo sapiens
  misc_RNA (1)...(19): siRNA sense strand
cauggaauauacacagaug

SEQ ID NO: 589161 - RNA, 19 nt, Homo sapiens
  misc_RNA (1)...(19): siRNA sense strand
aagaggcccuugaacaaug

SEQ ID NO: 589162 - RNA, 19 nt, Homo sapiens
  misc_RNA (1)...(19): siRNA sense strand
acaacaaagucuugaugug

SEQ ID NO: 589163 - RNA, 19 nt, Homo sapiens
  misc_RNA (1)...(19): siRNA sense strand
gcagacccugguauacaua

SEQ ID NO: 589164 - RNA, 19 nt, Homo sapiens
  misc_RNA (1)...(19): siRNA sense strand
cgaggagcaugaagucugu

SEQ ID NO: 589165 - RNA, 19 nt, Homo sapiens
  misc_RNA (1)...(19): siRNA sense strand
gacauuaaucccucacuau

SEQ ID NO: 589166 - RNA, 19 nt, Homo sapiens
  misc_RNA (1)...(19): siRNA sense strand
gcaugaagucugucgcuau

SEQ ID NO: 589167 - RNA, 19 nt, Homo sapiens
  misc_RNA (1)...(19): siRNA sense strand
agacgucuccuuugcauau

SEQ ID NO: 589168 - RNA, 19 nt, Homo sapiens
  misc_RNA (1)...(19): siRNA sense strand
ggaggcugcuucaccuaca

SEQ ID NO: 589169 - RNA, 19 nt, Homo sapiens
  misc_RNA (1)...(19): siRNA sense strand
caccaugucucgaaucaac

SEQ ID NO: 589170 - RNA, 19 nt, Homo sapiens
  misc_RNA (1)...(19): siRNA sense strand
caacacccgccaucaggaa

SEQ ID NO: 589171 - RNA, 19 nt, Homo sapiens
  misc_RNA (1)...(19): siRNA sense strand
gccaggaccucgguuucuu

SEQ ID NO: 589172 - RNA, 19 nt, Homo sapiens
  misc_RNA (1)...(19): siRNA sense strand
gcuauaaagaggcccuuga

SEQ ID NO: 589173 - RNA, 19 nt, Homo sapiens
  misc_RNA (1)...(19): siRNA sense strand
acauuaaucccucacuauu

SEQ ID NO: 589174 - RNA, 19 nt, Homo sapiens
  misc_RNA (1)...(19): siRNA sense strand
auaaagaggcccuugaaca

SEQ ID NO: 589175 - RNA, 19 nt, Homo sapiens
  misc_RNA (1)...(19): siRNA sense strand
ucaugugccucuucuccuu

SEQ ID NO: 589176 - RNA, 19 nt, Homo sapiens
  misc_RNA (1)...(19): siRNA sense strand
ggugaacaacaaagucuug

SEQ ID NO: 589177 - RNA, 19 nt, Homo sapiens
  misc_RNA (1)...(19): siRNA sense strand
gcagaccguucgcaguuuu

SEQ ID NO: 589178 - RNA, 19 nt, Homo sapiens
  misc_RNA (1)...(19): siRNA sense strand
cagcggagaagguguacaa

SEQ ID NO: 589179 - RNA, 19 nt, Homo sapiens
  misc_RNA (1)...(19): siRNA sense strand
aaacaacgucuggccauug

SEQ ID NO: 589180 - RNA, 19 nt, Homo sapiens
  misc_RNA (1)...(19): siRNA sense strand
ggaccaggugaacaacaaa

SEQ ID NO: 589181 - RNA, 19 nt, Homo sapiens
  misc_RNA (1)...(19): siRNA sense strand
augaguaacuggcuuccuu

SEQ ID NO: 589182 - RNA, 19 nt, Homo sapiens
  misc_RNA (1)...(19): siRNA sense strand
ccagugccaucuucuucau

SEQ ID NO: 589183 - RNA, 19 nt, Homo sapiens
  misc_RNA (1)...(19): siRNA sense strand
gcacagccaggugguuuca

SEQ ID NO: 589184 - RNA, 19 nt, Homo sapiens
  misc_RNA (1)...(19): siRNA sense strand
gaaaagcccaucucacagu

SEQ ID NO: 589185 - RNA, 19 nt, Homo sapiens
  misc_RNA (1)...(19): siRNA sense strand
cuauaaagaggcccuugaa

SEQ ID NO: 589186 - RNA, 19 nt, Homo sapiens
  misc_RNA (1)...(19): siRNA sense strand
guacaacacccgccaucag

SEQ ID NO: 589187 - RNA, 19 nt, Homo sapiens
  misc_RNA (1)...(19): siRNA sense strand
cggcugagcucggauacca

SEQ ID NO: 589188 - RNA, 19 nt, Homo sapiens
  misc_RNA (1)...(19): siRNA sense strand
auuaaucccucacuauucu

SEQ ID NO: 589189 - RNA, 19 nt, Homo sapiens
  misc_RNA (1)...(19): siRNA sense strand
gaagucugucgcuauaaag

SEQ ID NO: 589190 - RNA, 19 nt, Homo sapiens
  misc_RNA (1)...(19): siRNA sense strand
uagcagcggagaaggugua

SEQ ID NO: 589191 - RNA, 19 nt, Homo sapiens
  misc_RNA (1)...(19): siRNA sense strand
gcugguggacgcggcuuua

SEQ ID NO: 589192 - RNA, 19 nt, Homo sapiens
  misc_RNA (1)...(19): siRNA sense strand
ucggauaccacccugauga

SEQ ID NO: 589193 - RNA, 19 nt, Homo sapiens
  misc_RNA (1)...(19): siRNA sense strand
cauuaaucccucacuauuc

SEQ ID NO: 589194 - RNA, 19 nt, Homo sapiens
  misc_RNA (1)...(19): siRNA sense strand
aaagaggcccuugaacaau

SEQ ID NO: 589195 - RNA, 19 nt, Homo sapiens
  misc_RNA (1)...(19): siRNA sense strand
uacaccaugucucgaauca

SEQ ID NO: 589196 - RNA, 19 nt, Homo sapiens
  misc_RNA (1)...(19): siRNA sense strand
aauggagcauggaauauac

SEQ ID NO: 589197 - RNA, 19 nt, Homo sapiens
  misc_RNA (1)...(19): siRNA sense strand
aagcccaucucacaguaug

SEQ ID NO: 589198 - RNA, 19 nt, Homo sapiens
  misc_RNA (1)...(19): siRNA sense strand
gagggcugcugggauuugu

SEQ ID NO: 589199 - RNA, 19 nt, Homo sapiens
  misc_RNA (1)...(19): siRNA sense strand
ucacggcugagcucggaua

SEQ ID NO: 589200 - RNA, 19 nt, Homo sapiens
  misc_RNA (1)...(19): siRNA sense strand
gugcagacccugguauaca

SEQ ID NO: 589201 - RNA, 19 nt, Homo sapiens
  misc_RNA (1)...(19): siRNA sense strand
cagccugcuuuccuuuaug

SEQ ID NO: 589202 - RNA, 19 nt, Homo sapiens
  misc_RNA (1)...(19): siRNA sense strand
ugaguaacuggcuuccuuu

SEQ ID NO: 589203 - RNA, 19 nt, Homo sapiens
  misc_RNA (1)...(19): siRNA sense strand
aaaagcccaucucacagua

SEQ ID NO: 589204 - RNA, 19 nt, Homo sapiens
  misc_RNA (1)...(19): siRNA sense strand
ucaaggggcugacguuuac

SEQ ID NO: 589205 - RNA, 19 nt, Homo sapiens
  misc_RNA (1)...(19): siRNA sense strand
caaugucggcagcuguauu

SEQ ID NO: 589206 - RNA, 19 nt, Homo sapiens
  misc_RNA (1)...(19): siRNA sense strand
gcggagaagguguacaaca

SEQ ID NO: 589207 - RNA, 19 nt, Homo sapiens
  misc_RNA (1)...(19): siRNA sense strand
ugcgaagccuggugaaagu

SEQ ID NO: 589208 - RNA, 19 nt, Homo sapiens
  misc_RNA (1)...(19): siRNA sense strand
aggaccaggugaacaacaa

SEQ ID NO: 589209 - RNA, 19 nt, Homo sapiens
  misc_RNA (1)...(19): siRNA sense strand
ggaccgacagccaaaucug

SEQ ID NO: 589210 - RNA, 19 nt, Homo sapiens
  misc_RNA (1)...(19): siRNA sense strand
gaggaggcugcuucaccua

SEQ ID NO: 589211 - RNA, 19 nt, Homo sapiens
  misc_RNA (1)...(19): siRNA sense strand
agccugcuuuccuuuauga

SEQ ID NO: 589212 - RNA, 19 nt, Homo sapiens
  misc_RNA (1)...(19): siRNA sense strand
gagcaggaccaggugaaca

SEQ ID NO: 589213 - RNA, 19 nt, Homo sapiens
  misc_RNA (1)...(19): siRNA sense strand
ccucgacucacccuccuuu

SEQ ID NO: 589214 - RNA, 19 nt, Homo sapiens
  misc_RNA (1)...(19): siRNA sense strand
gguggacgcggcuuuacug

SEQ ID NO: 589215 - RNA, 19 nt, Homo sapiens
  misc_RNA (1)...(19): siRNA sense strand
gcauggaauauacacagau

SEQ ID NO: 589216 - RNA, 19 nt, Homo sapiens
  misc_RNA (1)...(19): siRNA sense strand
caauagcagcggagaaggu

SEQ ID NO: 589217 - RNA, 19 nt, Homo sapiens
  misc_RNA (1)...(19): siRNA sense strand
gcucggauaccacccugau

SEQ ID NO: 589218 - RNA, 19 nt, Homo sapiens
  misc_RNA (1)...(19): siRNA sense strand
acagccaggugguuucagu

SEQ ID NO: 589219 - RNA, 19 nt, Homo sapiens
  misc_RNA (1)...(19): siRNA sense strand
ugcagacccugguauacau

SEQ ID NO: 589220 - RNA, 19 nt, Homo sapiens
  misc_RNA (1)...(19): siRNA sense strand
cgacucacccuccuuucuc

SEQ ID NO: 589221 - RNA, 19 nt, Homo sapiens
  misc_RNA (1)...(19): siRNA sense strand
uaaaugccaaugugcucuu

SEQ ID NO: 589222 - RNA, 19 nt, Homo sapiens
  misc_RNA (1)...(19): siRNA sense strand
aguaacuggcuuccuuuaa

SEQ ID NO: 589223 - RNA, 19 nt, Homo sapiens
  misc_RNA (1)...(19): siRNA sense strand
caggaaauggagcauggaa

SEQ ID NO: 589224 - RNA, 19 nt, Homo sapiens
  misc_RNA (1)...(19): siRNA sense strand
gcccaucucacaguaugaa

SEQ ID NO: 589225 - RNA, 19 nt, Homo sapiens
  misc_RNA (1)...(19): siRNA sense strand
ggagcugcagagaagguuu

SEQ ID NO: 589226 - RNA, 19 nt, Homo sapiens
  misc_RNA (1)...(19): siRNA sense strand
caagggcugccaggacuau

SEQ ID NO: 589227 - RNA, 19 nt, Homo sapiens
  misc_RNA (1)...(19): siRNA sense strand
cugcuuuccuuuaugaucu

SEQ ID NO: 589228 - RNA, 19 nt, Homo sapiens
  misc_RNA (1)...(19): siRNA sense strand
aaugucggcagcuguauug

SEQ ID NO: 589229 - RNA, 19 nt, Homo sapiens
  misc_RNA (1)...(19): siRNA sense strand
gcacaugcccuucacaaua

SEQ ID NO: 589230 - RNA, 19 nt, Homo sapiens
  misc_RNA (1)...(19): siRNA sense strand
guaacuggcuuccuuuaaa

SEQ ID NO: 589231 - RNA, 19 nt, Homo sapiens
  misc_RNA (1)...(19): siRNA sense strand
ggaaauggagcauggaaua

SEQ ID NO: 589232 - RNA, 19 nt, Homo sapiens
  misc_RNA (1)...(19): siRNA sense strand
caugaagucugucgcuaua

SEQ ID NO: 589233 - RNA, 19 nt, Homo sapiens
  misc_RNA (1)...(19): siRNA sense strand
gaacaacaaagucuugaug

SEQ ID NO: 589234 - RNA, 19 nt, Homo sapiens
  misc_RNA (1)...(19): siRNA sense strand
gaaacaacgucuggccauu

SEQ ID NO: 589235 - RNA, 19 nt, Homo sapiens
  misc_RNA (1)...(19): siRNA sense strand
ggaccugccucuccucguu

SEQ ID NO: 589236 - RNA, 19 nt, Homo sapiens
  misc_RNA (1)...(19): siRNA sense strand
gggcucagcuggucacugu

SEQ ID NO: 589237 - RNA, 19 nt, Homo sapiens
  misc_RNA (1)...(19): siRNA sense strand
gacaggugcugcuggauga

SEQ ID NO: 589238 - RNA, 19 nt, Homo sapiens
  misc_RNA (1)...(19): siRNA sense strand
uaaagaggcccuugaacaa

SEQ ID NO: 589239 - RNA, 19 nt, Homo sapiens
  misc_RNA (1)...(19): siRNA sense strand
ugaagucugucgcuauaaa

SEQ ID NO: 589240 - RNA, 19 nt, Homo sapiens
  misc_RNA (1)...(19): siRNA sense strand
uaacuggcuuccuuuaaau

SEQ ID NO: 589241 - RNA, 19 nt, Homo sapiens
  misc_RNA (1)...(19): siRNA sense strand
gauaccacccugaugagua

SEQ ID NO: 589242 - RNA, 19 nt, Homo sapiens
  misc_RNA (1)...(19): siRNA sense strand
gaaauggagcauggaauau

SEQ ID NO: 589243 - RNA, 19 nt, Homo sapiens
  misc_RNA (1)...(19): siRNA sense strand
auaccacccugaugaguaa

SEQ ID NO: 589244 - RNA, 19 nt, Homo sapiens
  misc_RNA (1)...(19): siRNA sense strand
cacaugcccuucacaauag

SEQ ID NO: 589245 - RNA, 19 nt, Homo sapiens
  misc_RNA (1)...(19): siRNA sense strand
agacauuaaucccucacua

SEQ ID NO: 589246 - RNA, 19 nt, Homo sapiens
  misc_RNA (1)...(19): siRNA sense strand
caagacgucuccuuugcau

SEQ ID NO: 589247 - RNA, 19 nt, Homo sapiens
  misc_RNA (1)...(19): siRNA sense strand
aaauggagcauggaauaua

SEQ ID NO: 589248 - RNA, 19 nt, Homo sapiens
  misc_RNA (1)...(19): siRNA sense strand
gaguaacuggcuuccuuua

SEQ ID NO: 589249 - RNA, 19 nt, Homo sapiens
  misc_RNA (1)...(19): siRNA sense strand
cauggaauauacacagaug

SEQ ID NO: 589250 - RNA, 19 nt, Homo sapiens
  misc_RNA (1)...(19): siRNA sense strand
aagaggcccuugaacaaug

SEQ ID NO: 589251 - RNA, 19 nt, Homo sapiens
  misc_RNA (1)...(19): siRNA sense strand
acaacaaagucuugaugug

SEQ ID NO: 589252 - RNA, 19 nt, Homo sapiens
  misc_RNA (1)...(19): siRNA sense strand
gcagacccugguauacaua

SEQ ID NO: 589253 - RNA, 19 nt, Homo sapiens
  misc_RNA (1)...(19): siRNA sense strand
cgaggagcaugaagucugu

SEQ ID NO: 589254 - RNA, 19 nt, Homo sapiens
  misc_RNA (1)...(19): siRNA sense strand
gacauuaaucccucacuau

SEQ ID NO: 589255 - RNA, 19 nt, Homo sapiens
  misc_RNA (1)...(19): siRNA sense strand
gcaugaagucugucgcuau

SEQ ID NO: 589256 - RNA, 19 nt, Homo sapiens
  misc_RNA (1)...(19): siRNA sense strand
agacgucuccuuugcauau

SEQ ID NO: 589257 - RNA, 19 nt, Homo sapiens
  misc_RNA (1)...(19): siRNA sense strand
ggaggcugcuucaccuaca

SEQ ID NO: 589258 - RNA, 19 nt, Homo sapiens
  misc_RNA (1)...(19): siRNA sense strand
caccaugucucgaaucaac

SEQ ID NO: 589259 - RNA, 19 nt, Homo sapiens
  misc_RNA (1)...(19): siRNA sense strand
caacacccgccaucaggaa

SEQ ID NO: 589260 - RNA, 19 nt, Homo sapiens
  misc_RNA (1)...(19): siRNA sense strand
gccaggaccucgguuucuu

SEQ ID NO: 589261 - RNA, 19 nt, Homo sapiens
  misc_RNA (1)...(19): siRNA sense strand
gcuauaaagaggcccuuga

SEQ ID NO: 589262 - RNA, 19 nt, Homo sapiens
  misc_RNA (1)...(19): siRNA sense strand
acauuaaucccucacuauu

SEQ ID NO: 589263 - RNA, 19 nt, Homo sapiens
  misc_RNA (1)...(19): siRNA sense strand
auaaagaggcccuugaaca

SEQ ID NO: 589264 - RNA, 19 nt, Homo sapiens
  misc_RNA (1)...(19): siRNA sense strand
ucaugugccucuucuccuu

SEQ ID NO: 589265 - RNA, 19 nt, Homo sapiens
  misc_RNA (1)...(19): siRNA sense strand
ggugaacaacaaagucuug

SEQ ID NO: 589266 - RNA, 19 nt, Homo sapiens
  misc_RNA (1)...(19): siRNA sense strand
gcagaccguucgcaguuuu

SEQ ID NO: 589267 - RNA, 19 nt, Homo sapiens
  misc_RNA (1)...(19): siRNA sense strand
cagcggagaagguguacaa

SEQ ID NO: 589268 - RNA, 19 nt, Homo sapiens
  misc_RNA (1)...(19): siRNA sense strand
aaacaacgucuggccauug

SEQ ID NO: 589269 - RNA, 19 nt, Homo sapiens
  misc_RNA (1)...(19): siRNA sense strand
ggaccaggugaacaacaaa

SEQ ID NO: 589270 - RNA, 19 nt, Homo sapiens
  misc_RNA (1)...(19): siRNA sense strand
augaguaacuggcuuccuu

SEQ ID NO: 589271 - RNA, 19 nt, Homo sapiens
  misc_RNA (1)...(19): siRNA sense strand
ccagugccaucuucuucau

SEQ ID NO: 589272 - RNA, 19 nt, Homo sapiens
  misc_RNA (1)...(19): siRNA sense strand
gcacagccaggugguuuca

SEQ ID NO: 589273 - RNA, 19 nt, Homo sapiens
  misc_RNA (1)...(19): siRNA sense strand
gaaaagcccaucucacagu

SEQ ID NO: 589274 - RNA, 19 nt, Homo sapiens
  misc_RNA (1)...(19): siRNA sense strand
cuauaaagaggcccuugaa

SEQ ID NO: 589275 - RNA, 19 nt, Homo sapiens
  misc_RNA (1)...(19): siRNA sense strand
guacaacacccgccaucag

SEQ ID NO: 589276 - RNA, 19 nt, Homo sapiens
  misc_RNA (1)...(19): siRNA sense strand
cggcugagcucggauacca

SEQ ID NO: 589277 - RNA, 19 nt, Homo sapiens
  misc_RNA (1)...(19): siRNA sense strand
auuaaucccucacuauucu

SEQ ID NO: 589278 - RNA, 19 nt, Homo sapiens
  misc_RNA (1)...(19): siRNA sense strand
gaagucugucgcuauaaag

SEQ ID NO: 589279 - RNA, 19 nt, Homo sapiens
  misc_RNA (1)...(19): siRNA sense strand
uagcagcggagaaggugua

SEQ ID NO: 589280 - RNA, 19 nt, Homo sapiens
  misc_RNA (1)...(19): siRNA sense strand
gcugguggacgcggcuuua

SEQ ID NO: 589281 - RNA, 19 nt, Homo sapiens
  misc_RNA (1)...(19): siRNA sense strand
ucggauaccacccugauga

SEQ ID NO: 589282 - RNA, 19 nt, Homo sapiens
  misc_RNA (1)...(19): siRNA sense strand
cauuaaucccucacuauuc

SEQ ID NO: 589283 - RNA, 19 nt, Homo sapiens
  misc_RNA (1)...(19): siRNA sense strand
aaagaggcccuugaacaau

SEQ ID NO: 589284 - RNA, 19 nt, Homo sapiens
  misc_RNA (1)...(19): siRNA sense strand
uacaccaugucucgaauca

SEQ ID NO: 589285 - RNA, 19 nt, Homo sapiens
  misc_RNA (1)...(19): siRNA sense strand
aauggagcauggaauauac

SEQ ID NO: 589286 - RNA, 19 nt, Homo sapiens
  misc_RNA (1)...(19): siRNA sense strand
aagcccaucucacaguaug

SEQ ID NO: 589287 - RNA, 19 nt, Homo sapiens
  misc_RNA (1)...(19): siRNA sense strand
gagggcugcugggauuugu

SEQ ID NO: 589288 - RNA, 19 nt, Homo sapiens
  misc_RNA (1)...(19): siRNA sense strand
ucacggcugagcucggaua

SEQ ID NO: 589289 - RNA, 19 nt, Homo sapiens
  misc_RNA (1)...(19): siRNA sense strand
gugcagacccugguauaca

SEQ ID NO: 589290 - RNA, 19 nt, Homo sapiens
  misc_RNA (1)...(19): siRNA sense strand
cagccugcuuuccuuuaug

SEQ ID NO: 589291 - RNA, 19 nt, Homo sapiens
  misc_RNA (1)...(19): siRNA sense strand
ugaguaacuggcuuccuuu

SEQ ID NO: 589292 - RNA, 19 nt, Homo sapiens
  misc_RNA (1)...(19): siRNA sense strand
aaaagcccaucucacagua

SEQ ID NO: 589293 - RNA, 19 nt, Homo sapiens
  misc_RNA (1)...(19): siRNA sense strand
ucaaggggcugacguuuac

SEQ ID NO: 589294 - RNA, 19 nt, Homo sapiens
  misc_RNA (1)...(19): siRNA sense strand
caaugucggcagcuguauu

SEQ ID NO: 589295 - RNA, 19 nt, Homo sapiens
  misc_RNA (1)...(19): siRNA sense strand
gcggagaagguguacaaca

SEQ ID NO: 589296 - RNA, 19 nt, Homo sapiens
  misc_RNA (1)...(19): siRNA sense strand
ugcgaagccuggugaaagu

SEQ ID NO: 589297 - RNA, 19 nt, Homo sapiens
  misc_RNA (1)...(19): siRNA sense strand
aggaccaggugaacaacaa

SEQ ID NO: 589298 - RNA, 19 nt, Homo sapiens
  misc_RNA (1)...(19): siRNA sense strand
ggaccgacagccaaaucug

SEQ ID NO: 589299 - RNA, 19 nt, Homo sapiens
  misc_RNA (1)...(19): siRNA sense strand
gaggaggcugcuucaccua

SEQ ID NO: 589300 - RNA, 19 nt, Homo sapiens
  misc_RNA (1)...(19): siRNA sense strand
agccugcuuuccuuuauga

SEQ ID NO: 589301 - RNA, 19 nt, Homo sapiens
  misc_RNA (1)...(19): siRNA sense strand
gagcaggaccaggugaaca

SEQ ID NO: 589302 - RNA, 19 nt, Homo sapiens
  misc_RNA (1)...(19): siRNA sense strand
ccucgacucacccuccuuu

SEQ ID NO: 589303 - RNA, 19 nt, Homo sapiens
  misc_RNA (1)...(19): siRNA sense strand
gguggacgcggcuuuacug

SEQ ID NO: 589304 - RNA, 19 nt, Homo sapiens
  misc_RNA (1)...(19): siRNA sense strand
gcauggaauauacacagau

SEQ ID NO: 589305 - RNA, 19 nt, Homo sapiens
  misc_RNA (1)...(19): siRNA sense strand
caauagcagcggagaaggu

SEQ ID NO: 589306 - RNA, 19 nt, Homo sapiens
  misc_RNA (1)...(19): siRNA sense strand
gcucggauaccacccugau

SEQ ID NO: 589307 - RNA, 19 nt, Homo sapiens
  misc_RNA (1)...(19): siRNA sense strand
acagccaggugguuucagu

SEQ ID NO: 589308 - RNA, 19 nt, Homo sapiens
  misc_RNA (1)...(19): siRNA sense strand
ugcagacccugguauacau

SEQ ID NO: 589309 - RNA, 19 nt, Homo sapiens
  misc_RNA (1)...(19): siRNA sense strand
cgacucacccuccuuucuc

SEQ ID NO: 589310 - RNA, 19 nt, Homo sapiens
  misc_RNA (1)...(19): siRNA sense strand
uaaaugccaaugugcucuu

SEQ ID NO: 589311 - RNA, 19 nt, Homo sapiens
  misc_RNA (1)...(19): siRNA sense strand
aguaacuggcuuccuuuaa

SEQ ID NO: 589312 - RNA, 19 nt, Homo sapiens
  misc_RNA (1)...(19): siRNA sense strand
caggaaauggagcauggaa

SEQ ID NO: 589313 - RNA, 19 nt, Homo sapiens
  misc_RNA (1)...(19): siRNA sense strand
gcccaucucacaguaugaa

SEQ ID NO: 589314 - RNA, 19 nt, Homo sapiens
  misc_RNA (1)...(19): siRNA sense strand
ggagcugcagagaagguuu

SEQ ID NO: 589315 - RNA, 19 nt, Homo sapiens
  misc_RNA (1)...(19): siRNA sense strand
caagggcugccaggacuau

SEQ ID NO: 589316 - RNA, 19 nt, Homo sapiens
  misc_RNA (1)...(19): siRNA sense strand
cugcuuuccuuuaugaucu

SEQ ID NO: 589317 - RNA, 19 nt, Homo sapiens
  misc_RNA (1)...(19): siRNA sense strand
aaugucggcagcuguauug

SEQ ID NO: 589318 - RNA, 19 nt, Homo sapiens
  misc_RNA (1)...(19): siRNA sense strand
gcacaugcccuucacaaua

SEQ ID NO: 589319 - RNA, 19 nt, Homo sapiens
  misc_RNA (1)...(19): siRNA sense strand
guaacuggcuuccuuuaaa

SEQ ID NO: 589320 - RNA, 19 nt, Homo sapiens
  misc_RNA (1)...(19): siRNA sense strand
ggaaauggagcauggaaua

SEQ ID NO: 589321 - RNA, 19 nt, Homo sapiens
  misc_RNA (1)...(19): siRNA sense strand
caugaagucugucgcuaua

SEQ ID NO: 589322 - RNA, 19 nt, Homo sapiens
  misc_RNA (1)...(19): siRNA sense strand
gaacaacaaagucuugaug

SEQ ID NO: 589323 - RNA, 19 nt, Homo sapiens
  misc_RNA (1)...(19): siRNA sense strand
gaaacaacgucuggccauu

SEQ ID NO: 589324 - RNA, 19 nt, Homo sapiens
  misc_RNA (1)...(19): siRNA sense strand
ggaccugccucuccucguu

SEQ ID NO: 589325 - RNA, 19 nt, Homo sapiens
  misc_RNA (1)...(19): siRNA sense strand
gggcucagcuggucacugu

SEQ ID NO: 589326 - RNA, 19 nt, Homo sapiens
  misc_RNA (1)...(19): siRNA sense strand
gacaggugcugcuggauga

SEQ ID NO: 589327 - RNA, 19 nt, Homo sapiens
  misc_RNA (1)...(19): siRNA sense strand
uaaagaggcccuugaacaa

SEQ ID NO: 589328 - RNA, 19 nt, Homo sapiens
  misc_RNA (1)...(19): siRNA sense strand
ugaagucugucgcuauaaa

SEQ ID NO: 589329 - RNA, 19 nt, Homo sapiens
  misc_RNA (1)...(19): siRNA sense strand
uaacuggcuuccuuuaaau

SEQ ID NO: 589330 - RNA, 19 nt, Homo sapiens
  misc_RNA (1)...(19): siRNA sense strand
gauaccacccugaugagua

SEQ ID NO: 589331 - RNA, 19 nt, Homo sapiens
  misc_RNA (1)...(19): siRNA sense strand
gaaauggagcauggaauau

SEQ ID NO: 589332 - RNA, 19 nt, Homo sapiens
  misc_RNA (1)...(19): siRNA sense strand
auaccacccugaugaguaa

SEQ ID NO: 589333 - RNA, 19 nt, Homo sapiens
  misc_RNA (1)...(19): siRNA sense strand
cacaugcccuucacaauag

SEQ ID NO: 589334 - RNA, 19 nt, Homo sapiens
  misc_RNA (1)...(19): siRNA sense strand
agacauuaaucccucacua

SEQ ID NO: 589335 - RNA, 19 nt, Homo sapiens
  misc_RNA (1)...(19): siRNA sense strand
caagacgucuccuuugcau

SEQ ID NO: 589336 - RNA, 19 nt, Homo sapiens
  misc_RNA (1)...(19): siRNA sense strand
aaauggagcauggaauaua

SEQ ID NO: 589337 - RNA, 19 nt, Homo sapiens
  misc_RNA (1)...(19): siRNA sense strand
gaguaacuggcuuccuuua

SEQ ID NO: 589338 - RNA, 19 nt, Homo sapiens
  misc_RNA (1)...(19): siRNA sense strand
cauggaauauacacagaug

SEQ ID NO: 589339 - RNA, 19 nt, Homo sapiens
  misc_RNA (1)...(19): siRNA sense strand
aagaggcccuugaacaaug

SEQ ID NO: 589340 - RNA, 19 nt, Homo sapiens
  misc_RNA (1)...(19): siRNA sense strand
acaacaaagucuugaugug

SEQ ID NO: 589341 - RNA, 19 nt, Homo sapiens
  misc_RNA (1)...(19): siRNA sense strand
gcagacccugguauacaua

SEQ ID NO: 589342 - RNA, 19 nt, Homo sapiens
  misc_RNA (1)...(19): siRNA sense strand
cgaggagcaugaagucugu

SEQ ID NO: 589343 - RNA, 19 nt, Homo sapiens
  misc_RNA (1)...(19): siRNA sense strand
gacauuaaucccucacuau

SEQ ID NO: 589344 - RNA, 19 nt, Homo sapiens
  misc_RNA (1)...(19): siRNA sense strand
gcaugaagucugucgcuau

SEQ ID NO: 589345 - RNA, 19 nt, Homo sapiens
  misc_RNA (1)...(19): siRNA sense strand
agacgucuccuuugcauau

SEQ ID NO: 589346 - RNA, 19 nt, Homo sapiens
  misc_RNA (1)...(19): siRNA sense strand
ggaggcugcuucaccuaca

SEQ ID NO: 589347 - RNA, 19 nt, Homo sapiens
  misc_RNA (1)...(19): siRNA sense strand
caccaugucucgaaucaac

SEQ ID NO: 589348 - RNA, 19 nt, Homo sapiens
  misc_RNA (1)...(19): siRNA sense strand
caacacccgccaucaggaa

SEQ ID NO: 589349 - RNA, 19 nt, Homo sapiens
  misc_RNA (1)...(19): siRNA sense strand
gccaggaccucgguuucuu

SEQ ID NO: 589350 - RNA, 19 nt, Homo sapiens
  misc_RNA (1)...(19): siRNA sense strand
gcuauaaagaggcccuuga

SEQ ID NO: 589351 - RNA, 19 nt, Homo sapiens
  misc_RNA (1)...(19): siRNA sense strand
acauuaaucccucacuauu

SEQ ID NO: 589352 - RNA, 19 nt, Homo sapiens
  misc_RNA (1)...(19): siRNA sense strand
auaaagaggcccuugaaca

SEQ ID NO: 589353 - RNA, 19 nt, Homo sapiens
  misc_RNA (1)...(19): siRNA sense strand
ucaugugccucuucuccuu

SEQ ID NO: 589354 - RNA, 19 nt, Homo sapiens
  misc_RNA (1)...(19): siRNA sense strand
ggugaacaacaaagucuug

SEQ ID NO: 589355 - RNA, 19 nt, Homo sapiens
  misc_RNA (1)...(19): siRNA sense strand
gcagaccguucgcaguuuu

SEQ ID NO: 589356 - RNA, 19 nt, Homo sapiens
  misc_RNA (1)...(19): siRNA sense strand
cagcggagaagguguacaa

SEQ ID NO: 589357 - RNA, 19 nt, Homo sapiens
  misc_RNA (1)...(19): siRNA sense strand
aaacaacgucuggccauug

SEQ ID NO: 589358 - RNA, 19 nt, Homo sapiens
  misc_RNA (1)...(19): siRNA sense strand
ggaccaggugaacaacaaa

SEQ ID NO: 589359 - RNA, 19 nt, Homo sapiens
  misc_RNA (1)...(19): siRNA sense strand
augaguaacuggcuuccuu

SEQ ID NO: 589360 - RNA, 19 nt, Homo sapiens
  misc_RNA (1)...(19): siRNA sense strand
ccagugccaucuucuucau

SEQ ID NO: 589361 - RNA, 19 nt, Homo sapiens
  misc_RNA (1)...(19): siRNA sense strand
gcacagccaggugguuuca

SEQ ID NO: 589362 - RNA, 19 nt, Homo sapiens
  misc_RNA (1)...(19): siRNA sense strand
gaaaagcccaucucacagu

SEQ ID NO: 589363 - RNA, 19 nt, Homo sapiens
  misc_RNA (1)...(19): siRNA sense strand
cuauaaagaggcccuugaa

SEQ ID NO: 589364 - RNA, 19 nt, Homo sapiens
  misc_RNA (1)...(19): siRNA sense strand
guacaacacccgccaucag

SEQ ID NO: 589365 - RNA, 19 nt, Homo sapiens
  misc_RNA (1)...(19): siRNA sense strand
cggcugagcucggauacca

SEQ ID NO: 589366 - RNA, 19 nt, Homo sapiens
  misc_RNA (1)...(19): siRNA sense strand
auuaaucccucacuauucu

SEQ ID NO: 589367 - RNA, 19 nt, Homo sapiens
  misc_RNA (1)...(19): siRNA sense strand
gaagucugucgcuauaaag

SEQ ID NO: 589368 - RNA, 19 nt, Homo sapiens
  misc_RNA (1)...(19): siRNA sense strand
uagcagcggagaaggugua

SEQ ID NO: 589369 - RNA, 19 nt, Homo sapiens
  misc_RNA (1)...(19): siRNA sense strand
gcugguggacgcggcuuua

SEQ ID NO: 589370 - RNA, 19 nt, Homo sapiens
  misc_RNA (1)...(19): siRNA sense strand
ucggauaccacccugauga

SEQ ID NO: 589371 - RNA, 19 nt, Homo sapiens
  misc_RNA (1)...(19): siRNA sense strand
cauuaaucccucacuauuc

SEQ ID NO: 589372 - RNA, 19 nt, Homo sapiens
  misc_RNA (1)...(19): siRNA sense strand
aaagaggcccuugaacaau

SEQ ID NO: 589373 - RNA, 19 nt, Homo sapiens
  misc_RNA (1)...(19): siRNA sense strand
uacaccaugucucgaauca

SEQ ID NO: 589374 - RNA, 19 nt, Homo sapiens
  misc_RNA (1)...(19): siRNA sense strand
aauggagcauggaauauac

SEQ ID NO: 589375 - RNA, 19 nt, Homo sapiens
  misc_RNA (1)...(19): siRNA sense strand
aagcccaucucacaguaug

SEQ ID NO: 589376 - RNA, 19 nt, Homo sapiens
  misc_RNA (1)...(19): siRNA sense strand
gagggcugcugggauuugu

SEQ ID NO: 589377 - RNA, 19 nt, Homo sapiens
  misc_RNA (1)...(19): siRNA sense strand
ucacggcugagcucggaua

SEQ ID NO: 589378 - RNA, 19 nt, Homo sapiens
  misc_RNA (1)...(19): siRNA sense strand
gugcagacccugguauaca

SEQ ID NO: 589379 - RNA, 19 nt, Homo sapiens
  misc_RNA (1)...(19): siRNA sense strand
cagccugcuuuccuuuaug

SEQ ID NO: 589380 - RNA, 19 nt, Homo sapiens
  misc_RNA (1)...(19): siRNA sense strand
ugaguaacuggcuuccuuu

SEQ ID NO: 589381 - RNA, 19 nt, Homo sapiens
  misc_RNA (1)...(19): siRNA sense strand
aaaagcccaucucacagua

SEQ ID NO: 589382 - RNA, 19 nt, Homo sapiens
  misc_RNA (1)...(19): siRNA sense strand
ucaaggggcugacguuuac

SEQ ID NO: 589383 - RNA, 19 nt, Homo sapiens
  misc_RNA (1)...(19): siRNA sense strand
caaugucggcagcuguauu

SEQ ID NO: 589384 - RNA, 19 nt, Homo sapiens
  misc_RNA (1)...(19): siRNA sense strand
gcggagaagguguacaaca

SEQ ID NO: 589385 - RNA, 19 nt, Homo sapiens
  misc_RNA (1)...(19): siRNA sense strand
ugcgaagccuggugaaagu

SEQ ID NO: 589386 - RNA, 19 nt, Homo sapiens
  misc_RNA (1)...(19): siRNA sense strand
aggaccaggugaacaacaa

SEQ ID NO: 589387 - RNA, 19 nt, Homo sapiens
  misc_RNA (1)...(19): siRNA sense strand
ggaccgacagccaaaucug

SEQ ID NO: 589388 - RNA, 19 nt, Homo sapiens
  misc_RNA (1)...(19): siRNA sense strand
gaggaggcugcuucaccua

SEQ ID NO: 589389 - RNA, 19 nt, Homo sapiens
  misc_RNA (1)...(19): siRNA sense strand
agccugcuuuccuuuauga

SEQ ID NO: 589390 - RNA, 19 nt, Homo sapiens
  misc_RNA (1)...(19): siRNA sense strand
gagcaggaccaggugaaca

SEQ ID NO: 589391 - RNA, 19 nt, Homo sapiens
  misc_RNA (1)...(19): siRNA sense strand
ccucgacucacccuccuuu

SEQ ID NO: 589392 - RNA, 19 nt, Homo sapiens
  misc_RNA (1)...(19): siRNA sense strand
gguggacgcggcuuuacug

SEQ ID NO: 589393 - RNA, 19 nt, Homo sapiens
  misc_RNA (1)...(19): siRNA sense strand
gcauggaauauacacagau

SEQ ID NO: 589394 - RNA, 19 nt, Homo sapiens
  misc_RNA (1)...(19): siRNA sense strand
caauagcagcggagaaggu

SEQ ID NO: 589395 - RNA, 19 nt, Homo sapiens
  misc_RNA (1)...(19): siRNA sense strand
gcucggauaccacccugau

SEQ ID NO: 589396 - RNA, 19 nt, Homo sapiens
  misc_RNA (1)...(19): siRNA sense strand
acagccaggugguuucagu

SEQ ID NO: 589397 - RNA, 19 nt, Homo sapiens
  misc_RNA (1)...(19): siRNA sense strand
ugcagacccugguauacau

SEQ ID NO: 589398 - RNA, 19 nt, Homo sapiens
  misc_RNA (1)...(19): siRNA sense strand
cgacucacccuccuuucuc

SEQ ID NO: 589399 - RNA, 19 nt, Homo sapiens
  misc_RNA (1)...(19): siRNA sense strand
uaaaugccaaugugcucuu

SEQ ID NO: 589400 - RNA, 19 nt, Homo sapiens
  misc_RNA (1)...(19): siRNA sense strand
aguaacuggcuuccuuuaa

SEQ ID NO: 589401 - RNA, 19 nt, Homo sapiens
  misc_RNA (1)...(19): siRNA sense strand
caggaaauggagcauggaa

SEQ ID NO: 589402 - RNA, 19 nt, Homo sapiens
  misc_RNA (1)...(19): siRNA sense strand
gcccaucucacaguaugaa

SEQ ID NO: 589403 - RNA, 19 nt, Homo sapiens
  misc_RNA (1)...(19): siRNA sense strand
ggagcugcagagaagguuu

SEQ ID NO: 589404 - RNA, 19 nt, Homo sapiens
  misc_RNA (1)...(19): siRNA sense strand
caagggcugccaggacuau

SEQ ID NO: 589405 - RNA, 19 nt, Homo sapiens
  misc_RNA (1)...(19): siRNA sense strand
cugcuuuccuuuaugaucu

SEQ ID NO: 589406 - RNA, 19 nt, Homo sapiens
  misc_RNA (1)...(19): siRNA sense strand
aaugucggcagcuguauug

SEQ ID NO: 589407 - RNA, 19 nt, Homo sapiens
  misc_RNA (1)...(19): siRNA sense strand
gaggagggcucagagguaa

SEQ ID NO: 589408 - RNA, 19 nt, Homo sapiens
  misc_RNA (1)...(19): siRNA sense strand
ccaacuggaugcugucuug

SEQ ID NO: 589409 - RNA, 19 nt, Homo sapiens
  misc_RNA (1)...(19): siRNA sense strand
gaaccagcuucguuacuca

SEQ ID NO: 589410 - RNA, 19 nt, Homo sapiens
  misc_RNA (1)...(19): siRNA sense strand
gcaagagucgugaugugua

SEQ ID NO: 589411 - RNA, 19 nt, Homo sapiens
  misc_RNA (1)...(19): siRNA sense strand
ccucagacacccacaauaa

SEQ ID NO: 589412 - RNA, 19 nt, Homo sapiens
  misc_RNA (1)...(19): siRNA sense strand
gcucagagguaaccaacag

SEQ ID NO: 589413 - RNA, 19 nt, Homo sapiens
  misc_RNA (1)...(19): siRNA sense strand
ggaaccagcuucguuacuc

SEQ ID NO: 589414 - RNA, 19 nt, Homo sapiens
  misc_RNA (1)...(19): siRNA sense strand
gcagcgauccaacacauau

SEQ ID NO: 589415 - RNA, 19 nt, Homo sapiens
  misc_RNA (1)...(19): siRNA sense strand
gaaaucagagcuggagaug

SEQ ID NO: 589416 - RNA, 19 nt, Homo sapiens
  misc_RNA (1)...(19): siRNA sense strand
cagcuucguuacucagaaa

SEQ ID NO: 589417 - RNA, 19 nt, Homo sapiens
  misc_RNA (1)...(19): siRNA sense strand
cagcaagagucgugaugug

SEQ ID NO: 589418 - RNA, 19 nt, Homo sapiens
  misc_RNA (1)...(19): siRNA sense strand
caacaugcagcgcuggaaa

SEQ ID NO: 589419 - RNA, 19 nt, Homo sapiens
  misc_RNA (1)...(19): siRNA sense strand
ggacagggagcgucuggau

SEQ ID NO: 589420 - RNA, 19 nt, Homo sapiens
  misc_RNA (1)...(19): siRNA sense strand
gauguacgaacgacaguga

SEQ ID NO: 589421 - RNA, 19 nt, Homo sapiens
  misc_RNA (1)...(19): siRNA sense strand
gaagauccuacgagagaug

SEQ ID NO: 589422 - RNA, 19 nt, Homo sapiens
  misc_RNA (1)...(19): siRNA sense strand
caagagucgugauguguac

SEQ ID NO: 589423 - RNA, 19 nt, Homo sapiens
  misc_RNA (1)...(19): siRNA sense strand
gcgagaacacgccacugua

SEQ ID NO: 589424 - RNA, 19 nt, Homo sapiens
  misc_RNA (1)...(19): siRNA sense strand
cauaugugaucaagcuguu

SEQ ID NO: 589425 - RNA, 19 nt, Homo sapiens
  misc_RNA (1)...(19): siRNA sense strand
acagggagcgucuggauga

SEQ ID NO: 589426 - RNA, 19 nt, Homo sapiens
  misc_RNA (1)...(19): siRNA sense strand
acacucaucuaucgcaaca

SEQ ID NO: 589427 - RNA, 19 nt, Homo sapiens
  misc_RNA (1)...(19): siRNA sense strand
gaaggugaaaguggagaaa

SEQ ID NO: 589428 - RNA, 19 nt, Homo sapiens
  misc_RNA (1)...(19): siRNA sense strand
gagguaaccaacagcaaga

SEQ ID NO: 589429 - RNA, 19 nt, Homo sapiens
  misc_RNA (1)...(19): siRNA sense strand
ggaagaagaggagggagau

SEQ ID NO: 589430 - RNA, 19 nt, Homo sapiens
  misc_RNA (1)...(19): siRNA sense strand
acucaucuaucgcaacaug

SEQ ID NO: 589431 - RNA, 19 nt, Homo sapiens
  misc_RNA (1)...(19): siRNA sense strand
caucggaaccagcuucguu

SEQ ID NO: 589432 - RNA, 19 nt, Homo sapiens
  misc_RNA (1)...(19): siRNA sense strand
ugaaaguggagaaaucaga

SEQ ID NO: 589433 - RNA, 19 nt, Homo sapiens
  misc_RNA (1)...(19): siRNA sense strand
ggaugaggaagcugggaaa

SEQ ID NO: 589434 - RNA, 19 nt, Homo sapiens
  misc_RNA (1)...(19): siRNA sense strand
ccgcagcgauccaacacau

SEQ ID NO: 589435 - RNA, 19 nt, Homo sapiens
  misc_RNA (1)...(19): siRNA sense strand
acacgccacuguacccaau

SEQ ID NO: 589436 - RNA, 19 nt, Homo sapiens
  misc_RNA (1)...(19): siRNA sense strand
ggugaaaguggagaaauca

SEQ ID NO: 589437 - RNA, 19 nt, Homo sapiens
  misc_RNA (1)...(19): siRNA sense strand
augaagauccuacgagaga

SEQ ID NO: 589438 - RNA, 19 nt, Homo sapiens
  misc_RNA (1)...(19): siRNA sense strand
gcguggacuuggcccaguu

SEQ ID NO: 589439 - RNA, 19 nt, Homo sapiens
  misc_RNA (1)...(19): siRNA sense strand
ccagcuucguuacucagaa

SEQ ID NO: 589440 - RNA, 19 nt, Homo sapiens
  misc_RNA (1)...(19): siRNA sense strand
gguggaaggaggccucuca

SEQ ID NO: 589441 - RNA, 19 nt, Homo sapiens
  misc_RNA (1)...(19): siRNA sense strand
ugaggaagcugggaaaaca

SEQ ID NO: 589442 - RNA, 19 nt, Homo sapiens
  misc_RNA (1)...(19): siRNA sense strand
gaagaggagggagauggau

SEQ ID NO: 589443 - RNA, 19 nt, Homo sapiens
  misc_RNA (1)...(19): siRNA sense strand
gaagaagaggagggagaug

SEQ ID NO: 589444 - RNA, 19 nt, Homo sapiens
  misc_RNA (1)...(19): siRNA sense strand
cgagaacacgccacuguac

SEQ ID NO: 589445 - RNA, 19 nt, Homo sapiens
  misc_RNA (1)...(19): siRNA sense strand
cagaaagcaugaagauccu

SEQ ID NO: 589446 - RNA, 19 nt, Homo sapiens
  misc_RNA (1)...(19): siRNA sense strand
ccuccacacucaucuaucg

SEQ ID NO: 589447 - RNA, 19 nt, Homo sapiens
  misc_RNA (1)...(19): siRNA sense strand
gcaacaugcagcgcuggaa

SEQ ID NO: 589448 - RNA, 19 nt, Homo sapiens
  misc_RNA (1)...(19): siRNA sense strand
ucagacacccacaauaagg

SEQ ID NO: 589449 - RNA, 19 nt, Homo sapiens
  misc_RNA (1)...(19): siRNA sense strand
agaggagggagauggauga

SEQ ID NO: 589450 - RNA, 19 nt, Homo sapiens
  misc_RNA (1)...(19): siRNA sense strand
cagacacccacaauaagga

SEQ ID NO: 589451 - RNA, 19 nt, Homo sapiens
  misc_RNA (1)...(19): siRNA sense strand
caccagcggaggaagaaga

SEQ ID NO: 589452 - RNA, 19 nt, Homo sapiens
  misc_RNA (1)...(19): siRNA sense strand
guaguacccuuucuuauua

SEQ ID NO: 589453 - RNA, 19 nt, Homo sapiens
  misc_RNA (1)...(19): siRNA sense strand
caaagaagaugucagagaa

SEQ ID NO: 589454 - RNA, 19 nt, Homo sapiens
  misc_RNA (1)...(19): siRNA sense strand
ucacucaacugccuuauaa

SEQ ID NO: 589455 - RNA, 19 nt, Homo sapiens
  misc_RNA (1)...(19): siRNA sense strand
gaauuuggcuguagcagau

SEQ ID NO: 589456 - RNA, 19 nt, Homo sapiens
  misc_RNA (1)...(19): siRNA sense strand
gaaaguggccaagaaauau

SEQ ID NO: 589457 - RNA, 19 nt, Homo sapiens
  misc_RNA (1)...(19): siRNA sense strand
gaucugcauuggauuugua

SEQ ID NO: 589458 - RNA, 19 nt, Homo sapiens
  misc_RNA (1)...(19): siRNA sense strand
gaagaugccaaacauuaaa

SEQ ID NO: 589459 - RNA, 19 nt, Homo sapiens
  misc_RNA (1)...(19): siRNA sense strand
caaggacacucaugaagau

SEQ ID NO: 589460 - RNA, 19 nt, Homo sapiens
  misc_RNA (1)...(19): siRNA sense strand
gaauggcacuuaugacuac

SEQ ID NO: 589461 - RNA, 19 nt, Homo sapiens
  misc_RNA (1)...(19): siRNA sense strand
ucaacugccuuauaacauu

SEQ ID NO: 589462 - RNA, 19 nt, Homo sapiens
  misc_RNA (1)...(19): siRNA sense strand
ugaaaguggccaagaaaua

SEQ ID NO: 589463 - RNA, 19 nt, Homo sapiens
  misc_RNA (1)...(19): siRNA sense strand
gcaaggacacucaugaaga

SEQ ID NO: 589464 - RNA, 19 nt, Homo sapiens
  misc_RNA (1)...(19): siRNA sense strand
ugaaaugaauggcacuuau

SEQ ID NO: 589465 - RNA, 19 nt, Homo sapiens
  misc_RNA (1)...(19): siRNA sense strand
gaacagaaccagucaacag

SEQ ID NO: 589466 - RNA, 19 nt, Homo sapiens
  misc_RNA (1)...(19): siRNA sense strand
agacagauauguggcagua

SEQ ID NO: 589467 - RNA, 19 nt, Homo sapiens
  misc_RNA (1)...(19): siRNA sense strand
gaagaugucagagaauuug

SEQ ID NO: 589468 - RNA, 19 nt, Homo sapiens
  misc_RNA (1)...(19): siRNA sense strand
cuagagaucugcauuggau

SEQ ID NO: 589469 - RNA, 19 nt, Homo sapiens
  misc_RNA (1)...(19): siRNA sense strand
gacaaaguguggaggaguu

SEQ ID NO: 589470 - RNA, 19 nt, Homo sapiens
  misc_RNA (1)...(19): siRNA sense strand
gaaaugaauggcacuuaug

SEQ ID NO: 589471 - RNA, 19 nt, Homo sapiens
  misc_RNA (1)...(19): siRNA sense strand
caacugccuuauaacauug

SEQ ID NO: 589472 - RNA, 19 nt, Homo sapiens
  misc_RNA (1)...(19): siRNA sense strand
ggacaucgccauccaaguc

SEQ ID NO: 589473 - RNA, 19 nt, Homo sapiens
  misc_RNA (1)...(19): siRNA sense strand
aaauauggguccuggagaa

SEQ ID NO: 589474 - RNA, 19 nt, Homo sapiens
  misc_RNA (1)...(19): siRNA sense strand
cagauuuacuccuucuauu

SEQ ID NO: 589475 - RNA, 19 nt, Homo sapiens
  misc_RNA (1)...(19): siRNA sense strand
cagaaccagucaacagauu

SEQ ID NO: 589476 - RNA, 19 nt, Homo sapiens
  misc_RNA (1)...(19): siRNA sense strand
caugcuggaucaucuguuu

SEQ ID NO: 589477 - RNA, 19 nt, Homo sapiens
  misc_RNA (1)...(19): siRNA sense strand
aagaagaugucagagaauu

SEQ ID NO: 589478 - RNA, 19 nt, Homo sapiens
  misc_RNA (1)...(19): siRNA sense strand
ccaugguaguggcaauuua

SEQ ID NO: 589479 - RNA, 19 nt, Homo sapiens
  misc_RNA (1)...(19): siRNA sense strand
gcucacagucguuauaguu

SEQ ID NO: 589480 - RNA, 19 nt, Homo sapiens
  misc_RNA (1)...(19): siRNA sense strand
gaagacagagacaaagugu

SEQ ID NO: 589481 - RNA, 19 nt, Homo sapiens
  misc_RNA (1)...(19): siRNA sense strand
gaaccagucaacagauuau

SEQ ID NO: 589482 - RNA, 19 nt, Homo sapiens
  misc_RNA (1)...(19): siRNA sense strand
ugaagaugccaaacauuaa

SEQ ID NO: 589483 - RNA, 19 nt, Homo sapiens
  misc_RNA (1)...(19): siRNA sense strand
gcagauuuacuccuucuau

SEQ ID NO: 589484 - RNA, 19 nt, Homo sapiens
  misc_RNA (1)...(19): siRNA sense strand
gauauguggcaguaacuaa

SEQ ID NO: 589485 - RNA, 19 nt, Homo sapiens
  misc_RNA (1)...(19): siRNA sense strand
uaucaaagaagaugucaga

SEQ ID NO: 589486 - RNA, 19 nt, Homo sapiens
  misc_RNA (1)...(19): siRNA sense strand
ggaaaaccaugcuggauca

SEQ ID NO: 589487 - RNA, 19 nt, Homo sapiens
  misc_RNA (1)...(19): siRNA sense strand
caauaugaacugaucugua

SEQ ID NO: 589488 - RNA, 19 nt, Homo sapiens
  misc_RNA (1)...(19): siRNA sense strand
uguaguacccuuucuuauu

SEQ ID NO: 589489 - RNA, 19 nt, Homo sapiens
  misc_RNA (1)...(19): siRNA sense strand
gcuaggugcauucccauuu

SEQ ID NO: 589490 - RNA, 19 nt, Homo sapiens
  misc_RNA (1)...(19): siRNA sense strand
uaugggagcaucuuucaaa

SEQ ID NO: 589491 - RNA, 19 nt, Homo sapiens
  misc_RNA (1)...(19): siRNA sense strand
ucaaagaagaugucagaga

SEQ ID NO: 589492 - RNA, 19 nt, Homo sapiens
  misc_RNA (1)...(19): siRNA sense strand
augaagaugccaaacauua

SEQ ID NO: 589493 - RNA, 19 nt, Homo sapiens
  misc_RNA (1)...(19): siRNA sense strand
ucaugaagaugccaaacau

SEQ ID NO: 589494 - RNA, 19 nt, Homo sapiens
  misc_RNA (1)...(19): siRNA sense strand
caaguucugccgagccaua

SEQ ID NO: 589495 - RNA, 19 nt, Homo sapiens
  misc_RNA (1)...(19): siRNA sense strand
caagaaacagagaaccaaa

SEQ ID NO: 589496 - RNA, 19 nt, Homo sapiens
  misc_RNA (1)...(19): siRNA sense strand
ccuaggaacaucaaugaaa

SEQ ID NO: 589497 - RNA, 19 nt, Homo sapiens
  misc_RNA (1)...(19): siRNA sense strand
cuaggaacaucaaugaaag

SEQ ID NO: 589498 - RNA, 19 nt, Homo sapiens
  misc_RNA (1)...(19): siRNA sense strand
uuaugaaaguggccaagaa

SEQ ID NO: 589499 - RNA, 19 nt, Homo sapiens
  misc_RNA (1)...(19): siRNA sense strand
gauuuacuccuucuauuca

SEQ ID NO: 589500 - RNA, 19 nt, Homo sapiens
  misc_RNA (1)...(19): siRNA sense strand
ccagucaacagauuauuau

SEQ ID NO: 589501 - RNA, 19 nt, Homo sapiens
  misc_RNA (1)...(19): siRNA sense strand
gagaagacagagacaaagu

SEQ ID NO: 589502 - RNA, 19 nt, Homo sapiens
  misc_RNA (1)...(19): siRNA sense strand
cuacagagccaaccaguac

SEQ ID NO: 589503 - RNA, 19 nt, Homo sapiens
  misc_RNA (1)...(19): siRNA sense strand
aaaccaugcuggaucaucu

SEQ ID NO: 589504 - RNA, 19 nt, Homo sapiens
  misc_RNA (1)...(19): siRNA sense strand
gagccaaccaguacuuuua

SEQ ID NO: 589505 - RNA, 19 nt, Homo sapiens
  misc_RNA (1)...(19): siRNA sense strand
ugaauggcacuuaugacua

SEQ ID NO: 589506 - RNA, 19 nt, Homo sapiens
  misc_RNA (1)...(19): siRNA sense strand
cacaauaguuuucgucauu

SEQ ID NO: 589507 - RNA, 19 nt, Homo sapiens
  misc_RNA (1)...(19): siRNA sense strand
aaaugaauggcacuuauga

SEQ ID NO: 589508 - RNA, 19 nt, Homo sapiens
  misc_RNA (1)...(19): siRNA sense strand
uguagcagauuuacuccuu

SEQ ID NO: 589509 - RNA, 19 nt, Homo sapiens
  misc_RNA (1)...(19): siRNA sense strand
ucaacccaauccuuuaugu

SEQ ID NO: 589510 - RNA, 19 nt, Homo sapiens
  misc_RNA (1)...(19): siRNA sense strand
gaucaccagcugcaacaug

SEQ ID NO: 589511 - RNA, 19 nt, Homo sapiens
  misc_RNA (1)...(19): siRNA sense strand
aacccaauccuuuauguuu

SEQ ID NO: 589512 - RNA, 19 nt, Homo sapiens
  misc_RNA (1)...(19): siRNA sense strand
aaacuacguuaugaaagug

SEQ ID NO: 589513 - RNA, 19 nt, Homo sapiens
  misc_RNA (1)...(19): siRNA sense strand
uaugaaaguggccaagaaa

SEQ ID NO: 589514 - RNA, 19 nt, Homo sapiens
  misc_RNA (1)...(19): siRNA sense strand
uaaacuuugucucuggaau

SEQ ID NO: 589515 - RNA, 19 nt, Homo sapiens
  misc_RNA (1)...(19): siRNA sense strand
agaaccagucaacagauua

SEQ ID NO: 589516 - RNA, 19 nt, Homo sapiens
  misc_RNA (1)...(19): siRNA sense strand
cagcaaggacacucaugaa

SEQ ID NO: 589517 - RNA, 19 nt, Homo sapiens
  misc_RNA (1)...(19): siRNA sense strand
agagaucugcauuggauuu

SEQ ID NO: 589518 - RNA, 19 nt, Homo sapiens
  misc_RNA (1)...(19): siRNA sense strand
ugcaggcaauuccauggua

SEQ ID NO: 589519 - RNA, 19 nt, Homo sapiens
  misc_RNA (1)...(19): siRNA sense strand
cagagaauuugcaaaaguu

SEQ ID NO: 589520 - RNA, 19 nt, Homo sapiens
  misc_RNA (1)...(19): siRNA sense strand
acagauauguggcaguaac

SEQ ID NO: 589521 - RNA, 19 nt, Homo sapiens
  misc_RNA (1)...(19): siRNA sense strand
gcaguucauggguggguuu

SEQ ID NO: 589522 - RNA, 19 nt, Homo sapiens
  misc_RNA (1)...(19): siRNA sense strand
uggagaagacagagacaaa

SEQ ID NO: 589523 - RNA, 19 nt, Homo sapiens
  misc_RNA (1)...(19): siRNA sense strand
caacccaauccuuuauguu

SEQ ID NO: 589524 - RNA, 19 nt, Homo sapiens
  misc_RNA (1)...(19): siRNA sense strand
gaaccaaaacagaugugua

SEQ ID NO: 589525 - RNA, 19 nt, Homo sapiens
  misc_RNA (1)...(19): siRNA sense strand
ggagaagacagagacaaag

SEQ ID NO: 589526 - RNA, 19 nt, Homo sapiens
  misc_RNA (1)...(19): siRNA sense strand
agaagaugucagagaauuu

SEQ ID NO: 589527 - RNA, 19 nt, Homo sapiens
  misc_RNA (1)...(19): siRNA sense strand
ucacagucguuauaguuuu

SEQ ID NO: 589528 - RNA, 19 nt, Homo sapiens
  misc_RNA (1)...(19): siRNA sense strand
uaaaaguucugcucacagu

SEQ ID NO: 589529 - RNA, 19 nt, Homo sapiens
  misc_RNA (1)...(19): siRNA sense strand
ugauucaaaugcuagagau

SEQ ID NO: 589530 - RNA, 19 nt, Homo sapiens
  misc_RNA (1)...(19): siRNA sense strand
uaccuaggaacaucaauga

SEQ ID NO: 589531 - RNA, 19 nt, Homo sapiens
  misc_RNA (1)...(19): siRNA sense strand
cauccugaauuuggcugua

SEQ ID NO: 589532 - RNA, 19 nt, Homo sapiens
  misc_RNA (1)...(19): siRNA sense strand
guucugcucacagucguua

SEQ ID NO: 589533 - RNA, 19 nt, Homo sapiens
  misc_RNA (1)...(19): siRNA sense strand
caugguaguggcaauuuau

SEQ ID NO: 589534 - RNA, 19 nt, Homo sapiens
  misc_RNA (1)...(19): siRNA sense strand
gggaaaauaaugugcaaaa

SEQ ID NO: 589535 - RNA, 19 nt, Homo sapiens
  misc_RNA (1)...(19): siRNA sense strand
uguacacacuaaacuuugu

SEQ ID NO: 589536 - RNA, 19 nt, Homo sapiens
  misc_RNA (1)...(19): siRNA sense strand
ccaguacuuuuagcauuua

SEQ ID NO: 589537 - RNA, 19 nt, Homo sapiens
  misc_RNA (1)...(19): siRNA sense strand
cugcauuggauuuguagua

SEQ ID NO: 589538 - RNA, 19 nt, Homo sapiens
  misc_RNA (1)...(19): siRNA sense strand
aaacuuugucucuggaaug

SEQ ID NO: 589539 - RNA, 19 nt, Homo sapiens
  misc_RNA (1)...(19): siRNA sense strand
gagcaaacgcauggacauc

SEQ ID NO: 589540 - RNA, 19 nt, Homo sapiens
  misc_RNA (1)...(19): siRNA sense strand
uuuguaguacccuuucuua

SEQ ID NO: 589541 - RNA, 19 nt, Homo sapiens
  misc_RNA (1)...(19): siRNA sense strand
gagaucugcauuggauuug

SEQ ID NO: 589542 - RNA, 19 nt, Homo sapiens
  misc_RNA (1)...(19): siRNA sense strand
uagcagauuuacuccuucu

SEQ ID NO: 589543 - RNA, 19 nt, Homo sapiens
  misc_RNA (1)...(19): siRNA sense strand
ucagagaauuugcaaaagu

SEQ ID NO: 589544 - RNA, 19 nt, Homo sapiens
  misc_RNA (1)...(19): siRNA sense strand
ggaguuuccuuuugauucu

SEQ ID NO: 589545 - RNA, 19 nt, Homo sapiens
  misc_RNA (1)...(19): siRNA sense strand
gaugucagagaauuugcaa

SEQ ID NO: 589546 - RNA, 19 nt, Homo sapiens
  misc_RNA (1)...(19): siRNA sense strand
accagucaacagauuauua

SEQ ID NO: 589547 - RNA, 19 nt, Homo sapiens
  misc_RNA (1)...(19): siRNA sense strand
cuuguacacacuaaacuuu

SEQ ID NO: 589548 - RNA, 19 nt, Homo sapiens
  misc_RNA (1)...(19): siRNA sense strand
ccucaacccaauccuuuau

SEQ ID NO: 589549 - RNA, 19 nt, Homo sapiens
  misc_RNA (1)...(19): siRNA sense strand
gccucaacccaauccuuua

SEQ ID NO: 589550 - RNA, 19 nt, Homo sapiens
  misc_RNA (1)...(19): siRNA sense strand
acagcaaggacacucauga

SEQ ID NO: 589551 - RNA, 19 nt, Homo sapiens
  misc_RNA (1)...(19): siRNA sense strand
acagcugccucaacccaau

SEQ ID NO: 589552 - RNA, 19 nt, Homo sapiens
  misc_RNA (1)...(19): siRNA sense strand
guaguacccuuucuuauua

SEQ ID NO: 589553 - RNA, 19 nt, Homo sapiens
  misc_RNA (1)...(19): siRNA sense strand
caaagaagaugucagagaa

SEQ ID NO: 589554 - RNA, 19 nt, Homo sapiens
  misc_RNA (1)...(19): siRNA sense strand
ucacucaacugccuuauaa

SEQ ID NO: 589555 - RNA, 19 nt, Homo sapiens
  misc_RNA (1)...(19): siRNA sense strand
gaauuuggcuguagcagau

SEQ ID NO: 589556 - RNA, 19 nt, Homo sapiens
  misc_RNA (1)...(19): siRNA sense strand
gaaaguggccaagaaauau

SEQ ID NO: 589557 - RNA, 19 nt, Homo sapiens
  misc_RNA (1)...(19): siRNA sense strand
gaucugcauuggauuugua

SEQ ID NO: 589558 - RNA, 19 nt, Homo sapiens
  misc_RNA (1)...(19): siRNA sense strand
gaagaugccaaacauuaaa

SEQ ID NO: 589559 - RNA, 19 nt, Homo sapiens
  misc_RNA (1)...(19): siRNA sense strand
caaggacacucaugaagau

SEQ ID NO: 589560 - RNA, 19 nt, Homo sapiens
  misc_RNA (1)...(19): siRNA sense strand
gaauggcacuuaugacuac

SEQ ID NO: 589561 - RNA, 19 nt, Homo sapiens
  misc_RNA (1)...(19): siRNA sense strand
ucaacugccuuauaacauu

SEQ ID NO: 589562 - RNA, 19 nt, Homo sapiens
  misc_RNA (1)...(19): siRNA sense strand
ugaaaguggccaagaaaua

SEQ ID NO: 589563 - RNA, 19 nt, Homo sapiens
  misc_RNA (1)...(19): siRNA sense strand
gcaaggacacucaugaaga

SEQ ID NO: 589564 - RNA, 19 nt, Homo sapiens
  misc_RNA (1)...(19): siRNA sense strand
ugaaaugaauggcacuuau

SEQ ID NO: 589565 - RNA, 19 nt, Homo sapiens
  misc_RNA (1)...(19): siRNA sense strand
gaacagaaccagucaacag

SEQ ID NO: 589566 - RNA, 19 nt, Homo sapiens
  misc_RNA (1)...(19): siRNA sense strand
agacagauauguggcagua

SEQ ID NO: 589567 - RNA, 19 nt, Homo sapiens
  misc_RNA (1)...(19): siRNA sense strand
gaagaugucagagaauuug

SEQ ID NO: 589568 - RNA, 19 nt, Homo sapiens
  misc_RNA (1)...(19): siRNA sense strand
cuagagaucugcauuggau

SEQ ID NO: 589569 - RNA, 19 nt, Homo sapiens
  misc_RNA (1)...(19): siRNA sense strand
gacaaaguguggaggaguu

SEQ ID NO: 589570 - RNA, 19 nt, Homo sapiens
  misc_RNA (1)...(19): siRNA sense strand
gaaaugaauggcacuuaug

SEQ ID NO: 589571 - RNA, 19 nt, Homo sapiens
  misc_RNA (1)...(19): siRNA sense strand
caacugccuuauaacauug

SEQ ID NO: 589572 - RNA, 19 nt, Homo sapiens
  misc_RNA (1)...(19): siRNA sense strand
ggacaucgccauccaaguc

SEQ ID NO: 589573 - RNA, 19 nt, Homo sapiens
  misc_RNA (1)...(19): siRNA sense strand
aaauauggguccuggagaa

SEQ ID NO: 589574 - RNA, 19 nt, Homo sapiens
  misc_RNA (1)...(19): siRNA sense strand
cagauuuacuccuucuauu

SEQ ID NO: 589575 - RNA, 19 nt, Homo sapiens
  misc_RNA (1)...(19): siRNA sense strand
cagaaccagucaacagauu

SEQ ID NO: 589576 - RNA, 19 nt, Homo sapiens
  misc_RNA (1)...(19): siRNA sense strand
caugcuggaucaucuguuu

SEQ ID NO: 589577 - RNA, 19 nt, Homo sapiens
  misc_RNA (1)...(19): siRNA sense strand
aagaagaugucagagaauu

SEQ ID NO: 589578 - RNA, 19 nt, Homo sapiens
  misc_RNA (1)...(19): siRNA sense strand
ccaugguaguggcaauuua

SEQ ID NO: 589579 - RNA, 19 nt, Homo sapiens
  misc_RNA (1)...(19): siRNA sense strand
gcucacagucguuauaguu

SEQ ID NO: 589580 - RNA, 19 nt, Homo sapiens
  misc_RNA (1)...(19): siRNA sense strand
gaagacagagacaaagugu

SEQ ID NO: 589581 - RNA, 19 nt, Homo sapiens
  misc_RNA (1)...(19): siRNA sense strand
gaaccagucaacagauuau

SEQ ID NO: 589582 - RNA, 19 nt, Homo sapiens
  misc_RNA (1)...(19): siRNA sense strand
ugaagaugccaaacauuaa

SEQ ID NO: 589583 - RNA, 19 nt, Homo sapiens
  misc_RNA (1)...(19): siRNA sense strand
gcagauuuacuccuucuau

SEQ ID NO: 589584 - RNA, 19 nt, Homo sapiens
  misc_RNA (1)...(19): siRNA sense strand
gauauguggcaguaacuaa

SEQ ID NO: 589585 - RNA, 19 nt, Homo sapiens
  misc_RNA (1)...(19): siRNA sense strand
uaucaaagaagaugucaga

SEQ ID NO: 589586 - RNA, 19 nt, Homo sapiens
  misc_RNA (1)...(19): siRNA sense strand
ggaaaaccaugcuggauca

SEQ ID NO: 589587 - RNA, 19 nt, Homo sapiens
  misc_RNA (1)...(19): siRNA sense strand
caauaugaacugaucugua

SEQ ID NO: 589588 - RNA, 19 nt, Homo sapiens
  misc_RNA (1)...(19): siRNA sense strand
uguaguacccuuucuuauu

SEQ ID NO: 589589 - RNA, 19 nt, Homo sapiens
  misc_RNA (1)...(19): siRNA sense strand
gcuaggugcauucccauuu

SEQ ID NO: 589590 - RNA, 19 nt, Homo sapiens
  misc_RNA (1)...(19): siRNA sense strand
uaugggagcaucuuucaaa

SEQ ID NO: 589591 - RNA, 19 nt, Homo sapiens
  misc_RNA (1)...(19): siRNA sense strand
ucaaagaagaugucagaga

SEQ ID NO: 589592 - RNA, 19 nt, Homo sapiens
  misc_RNA (1)...(19): siRNA sense strand
augaagaugccaaacauua

SEQ ID NO: 589593 - RNA, 19 nt, Homo sapiens
  misc_RNA (1)...(19): siRNA sense strand
ucaugaagaugccaaacau

SEQ ID NO: 589594 - RNA, 19 nt, Homo sapiens
  misc_RNA (1)...(19): siRNA sense strand
caaguucugccgagccaua

SEQ ID NO: 589595 - RNA, 19 nt, Homo sapiens
  misc_RNA (1)...(19): siRNA sense strand
caagaaacagagaaccaaa

SEQ ID NO: 589596 - RNA, 19 nt, Homo sapiens
  misc_RNA (1)...(19): siRNA sense strand
ccuaggaacaucaaugaaa

SEQ ID NO: 589597 - RNA, 19 nt, Homo sapiens
  misc_RNA (1)...(19): siRNA sense strand
cuaggaacaucaaugaaag

SEQ ID NO: 589598 - RNA, 19 nt, Homo sapiens
  misc_RNA (1)...(19): siRNA sense strand
uuaugaaaguggccaagaa

SEQ ID NO: 589599 - RNA, 19 nt, Homo sapiens
  misc_RNA (1)...(19): siRNA sense strand
gauuuacuccuucuauuca

SEQ ID NO: 589600 - RNA, 19 nt, Homo sapiens
  misc_RNA (1)...(19): siRNA sense strand
ccagucaacagauuauuau

SEQ ID NO: 589601 - RNA, 19 nt, Homo sapiens
  misc_RNA (1)...(19): siRNA sense strand
gagaagacagagacaaagu

SEQ ID NO: 589602 - RNA, 19 nt, Homo sapiens
  misc_RNA (1)...(19): siRNA sense strand
cuacagagccaaccaguac

SEQ ID NO: 589603 - RNA, 19 nt, Homo sapiens
  misc_RNA (1)...(19): siRNA sense strand
aaaccaugcuggaucaucu

SEQ ID NO: 589604 - RNA, 19 nt, Homo sapiens
  misc_RNA (1)...(19): siRNA sense strand
gagccaaccaguacuuuua

SEQ ID NO: 589605 - RNA, 19 nt, Homo sapiens
  misc_RNA (1)...(19): siRNA sense strand
ugaauggcacuuaugacua

SEQ ID NO: 589606 - RNA, 19 nt, Homo sapiens
  misc_RNA (1)...(19): siRNA sense strand
cacaauaguuuucgucauu

SEQ ID NO: 589607 - RNA, 19 nt, Homo sapiens
  misc_RNA (1)...(19): siRNA sense strand
aaaugaauggcacuuauga

SEQ ID NO: 589608 - RNA, 19 nt, Homo sapiens
  misc_RNA (1)...(19): siRNA sense strand
uguagcagauuuacuccuu

SEQ ID NO: 589609 - RNA, 19 nt, Homo sapiens
  misc_RNA (1)...(19): siRNA sense strand
ucaacccaauccuuuaugu

SEQ ID NO: 589610 - RNA, 19 nt, Homo sapiens
  misc_RNA (1)...(19): siRNA sense strand
gaucaccagcugcaacaug

SEQ ID NO: 589611 - RNA, 19 nt, Homo sapiens
  misc_RNA (1)...(19): siRNA sense strand
aacccaauccuuuauguuu

SEQ ID NO: 589612 - RNA, 19 nt, Homo sapiens
  misc_RNA (1)...(19): siRNA sense strand
aaacuacguuaugaaagug

SEQ ID NO: 589613 - RNA, 19 nt, Homo sapiens
  misc_RNA (1)...(19): siRNA sense strand
uaugaaaguggccaagaaa

SEQ ID NO: 589614 - RNA, 19 nt, Homo sapiens
  misc_RNA (1)...(19): siRNA sense strand
uaaacuuugucucuggaau

SEQ ID NO: 589615 - RNA, 19 nt, Homo sapiens
  misc_RNA (1)...(19): siRNA sense strand
agaaccagucaacagauua

SEQ ID NO: 589616 - RNA, 19 nt, Homo sapiens
  misc_RNA (1)...(19): siRNA sense strand
cagcaaggacacucaugaa

SEQ ID NO: 589617 - RNA, 19 nt, Homo sapiens
  misc_RNA (1)...(19): siRNA sense strand
agagaucugcauuggauuu

SEQ ID NO: 589618 - RNA, 19 nt, Homo sapiens
  misc_RNA (1)...(19): siRNA sense strand
ugcaggcaauuccauggua

SEQ ID NO: 589619 - RNA, 19 nt, Homo sapiens
  misc_RNA (1)...(19): siRNA sense strand
cagagaauuugcaaaaguu

SEQ ID NO: 589620 - RNA, 19 nt, Homo sapiens
  misc_RNA (1)...(19): siRNA sense strand
acagauauguggcaguaac

SEQ ID NO: 589621 - RNA, 19 nt, Homo sapiens
  misc_RNA (1)...(19): siRNA sense strand
gcaguucauggguggguuu

SEQ ID NO: 589622 - RNA, 19 nt, Homo sapiens
  misc_RNA (1)...(19): siRNA sense strand
uggagaagacagagacaaa

SEQ ID NO: 589623 - RNA, 19 nt, Homo sapiens
  misc_RNA (1)...(19): siRNA sense strand
caacccaauccuuuauguu

SEQ ID NO: 589624 - RNA, 19 nt, Homo sapiens
  misc_RNA (1)...(19): siRNA sense strand
gaaccaaaacagaugugua

SEQ ID NO: 589625 - RNA, 19 nt, Homo sapiens
  misc_RNA (1)...(19): siRNA sense strand
ggagaagacagagacaaag

SEQ ID NO: 589626 - RNA, 19 nt, Homo sapiens
  misc_RNA (1)...(19): siRNA sense strand
agaagaugucagagaauuu

SEQ ID NO: 589627 - RNA, 19 nt, Homo sapiens
  misc_RNA (1)...(19): siRNA sense strand
ucacagucguuauaguuuu

SEQ ID NO: 589628 - RNA, 19 nt, Homo sapiens
  misc_RNA (1)...(19): siRNA sense strand
uaaaaguucugcucacagu

SEQ ID NO: 589629 - RNA, 19 nt, Homo sapiens
  misc_RNA (1)...(19): siRNA sense strand
ugauucaaaugcuagagau

SEQ ID NO: 589630 - RNA, 19 nt, Homo sapiens
  misc_RNA (1)...(19): siRNA sense strand
uaccuaggaacaucaauga

SEQ ID NO: 589631 - RNA, 19 nt, Homo sapiens
  misc_RNA (1)...(19): siRNA sense strand
cauccugaauuuggcugua

SEQ ID NO: 589632 - RNA, 19 nt, Homo sapiens
  misc_RNA (1)...(19): siRNA sense strand
guucugcucacagucguua

SEQ ID NO: 589633 - RNA, 19 nt, Homo sapiens
  misc_RNA (1)...(19): siRNA sense strand
caugguaguggcaauuuau

SEQ ID NO: 589634 - RNA, 19 nt, Homo sapiens
  misc_RNA (1)...(19): siRNA sense strand
gggaaaauaaugugcaaaa

SEQ ID NO: 589635 - RNA, 19 nt, Homo sapiens
  misc_RNA (1)...(19): siRNA sense strand
uguacacacuaaacuuugu

SEQ ID NO: 589636 - RNA, 19 nt, Homo sapiens
  misc_RNA (1)...(19): siRNA sense strand
ccaguacuuuuagcauuua

SEQ ID NO: 589637 - RNA, 19 nt, Homo sapiens
  misc_RNA (1)...(19): siRNA sense strand
cugcauuggauuuguagua

SEQ ID NO: 589638 - RNA, 19 nt, Homo sapiens
  misc_RNA (1)...(19): siRNA sense strand
aaacuuugucucuggaaug

SEQ ID NO: 589639 - RNA, 19 nt, Homo sapiens
  misc_RNA (1)...(19): siRNA sense strand
gagcaaacgcauggacauc

SEQ ID NO: 589640 - RNA, 19 nt, Homo sapiens
  misc_RNA (1)...(19): siRNA sense strand
uuuguaguacccuuucuua

SEQ ID NO: 589641 - RNA, 19 nt, Homo sapiens
  misc_RNA (1)...(19): siRNA sense strand
gagaucugcauuggauuug

SEQ ID NO: 589642 - RNA, 19 nt, Homo sapiens
  misc_RNA (1)...(19): siRNA sense strand
uagcagauuuacuccuucu

SEQ ID NO: 589643 - RNA, 19 nt, Homo sapiens
  misc_RNA (1)...(19): siRNA sense strand
ucagagaauuugcaaaagu

SEQ ID NO: 589644 - RNA, 19 nt, Homo sapiens
  misc_RNA (1)...(19): siRNA sense strand
ggaguuuccuuuugauucu

SEQ ID NO: 589645 - RNA, 19 nt, Homo sapiens
  misc_RNA (1)...(19): siRNA sense strand
gaugucagagaauuugcaa

SEQ ID NO: 589646 - RNA, 19 nt, Homo sapiens
  misc_RNA (1)...(19): siRNA sense strand
accagucaacagauuauua

SEQ ID NO: 589647 - RNA, 19 nt, Homo sapiens
  misc_RNA (1)...(19): siRNA sense strand
cuuguacacacuaaacuuu

SEQ ID NO: 589648 - RNA, 19 nt, Homo sapiens
  misc_RNA (1)...(19): siRNA sense strand
ccucaacccaauccuuuau

SEQ ID NO: 589649 - RNA, 19 nt, Homo sapiens
  misc_RNA (1)...(19): siRNA sense strand
gccucaacccaauccuuua

SEQ ID NO: 589650 - RNA, 19 nt, Homo sapiens
  misc_RNA (1)...(19): siRNA sense strand
acagcaaggacacucauga

SEQ ID NO: 589651 - RNA, 19 nt, Homo sapiens
  misc_RNA (1)...(19): siRNA sense strand
acagcugccucaacccaau

SEQ ID NO: 589652 - RNA, 19 nt, Homo sapiens
  misc_RNA (1)...(19): siRNA sense strand
ggaaauggccgaagagaaa

SEQ ID NO: 589653 - RNA, 19 nt, Homo sapiens
  misc_RNA (1)...(19): siRNA sense strand
caucgaaccucaaagauuu

SEQ ID NO: 589654 - RNA, 19 nt, Homo sapiens
  misc_RNA (1)...(19): siRNA sense strand
gcugaugacugucguuaua

SEQ ID NO: 589655 - RNA, 19 nt, Homo sapiens
  misc_RNA (1)...(19): siRNA sense strand
caacaacauuucagacaaa

SEQ ID NO: 589656 - RNA, 19 nt, Homo sapiens
  misc_RNA (1)...(19): siRNA sense strand
caaagaggauguacauuca

SEQ ID NO: 589657 - RNA, 19 nt, Homo sapiens
  misc_RNA (1)...(19): siRNA sense strand
gaaacucccuuauaguaca

SEQ ID NO: 589658 - RNA, 19 nt, Homo sapiens
  misc_RNA (1)...(19): siRNA sense strand
ugaacuccaugcacaaaua

SEQ ID NO: 589659 - RNA, 19 nt, Homo sapiens
  misc_RNA (1)...(19): siRNA sense strand
ggacaucgaaccucaaaga

SEQ ID NO: 589660 - RNA, 19 nt, Homo sapiens
  misc_RNA (1)...(19): siRNA sense strand
gcaccgagauggucauuac

SEQ ID NO: 589661 - RNA, 19 nt, Homo sapiens
  misc_RNA (1)...(19): siRNA sense strand
gaaacucaccaacaacauu

SEQ ID NO: 589662 - RNA, 19 nt, Homo sapiens
  misc_RNA (1)...(19): siRNA sense strand
ccaaugacaucuugaaacu

SEQ ID NO: 589663 - RNA, 19 nt, Homo sapiens
  misc_RNA (1)...(19): siRNA sense strand
ccaaagaggauguacauuc

SEQ ID NO: 589664 - RNA, 19 nt, Homo sapiens
  misc_RNA (1)...(19): siRNA sense strand
ggacaagcauggccuacca

SEQ ID NO: 589665 - RNA, 19 nt, Homo sapiens
  misc_RNA (1)...(19): siRNA sense strand
ccaacaacauuucagacaa

SEQ ID NO: 589666 - RNA, 19 nt, Homo sapiens
  misc_RNA (1)...(19): siRNA sense strand
ccaugaggguguuugauga

SEQ ID NO: 589667 - RNA, 19 nt, Homo sapiens
  misc_RNA (1)...(19): siRNA sense strand
gaggguguuugaugaaaga

SEQ ID NO: 589668 - RNA, 19 nt, Homo sapiens
  misc_RNA (1)...(19): siRNA sense strand
gaaccucaaagauuuaugu

SEQ ID NO: 589669 - RNA, 19 nt, Homo sapiens
  misc_RNA (1)...(19): siRNA sense strand
agacaaacauggauuuacu

SEQ ID NO: 589670 - RNA, 19 nt, Homo sapiens
  misc_RNA (1)...(19): siRNA sense strand
cugcauaccagaaugauaa

SEQ ID NO: 589671 - RNA, 19 nt, Homo sapiens
  misc_RNA (1)...(19): siRNA sense strand
caucugaggccuuugaaga

SEQ ID NO: 589672 - RNA, 19 nt, Homo sapiens
  misc_RNA (1)...(19): siRNA sense strand
gagaaugggaccucugaug

SEQ ID NO: 589673 - RNA, 19 nt, Homo sapiens
  misc_RNA (1)...(19): siRNA sense strand
gcaccuggaggcuaaagaa

SEQ ID NO: 589674 - RNA, 19 nt, Homo sapiens
  misc_RNA (1)...(19): siRNA sense strand
ugaugacugucguuauaaa

SEQ ID NO: 589675 - RNA, 19 nt, Homo sapiens
  misc_RNA (1)...(19): siRNA sense strand
uugaaacucccuuauagua

SEQ ID NO: 589676 - RNA, 19 nt, Homo sapiens
  misc_RNA (1)...(19): siRNA sense strand
aaacucaccaacaacauuu

SEQ ID NO: 589677 - RNA, 19 nt, Homo sapiens
  misc_RNA (1)...(19): siRNA sense strand
agucgucacuuuccacaaa

SEQ ID NO: 589678 - RNA, 19 nt, Homo sapiens
  misc_RNA (1)...(19): siRNA sense strand
cauuauagcugcugaugac

SEQ ID NO: 589679 - RNA, 19 nt, Homo sapiens
  misc_RNA (1)...(19): siRNA sense strand
guacauuucggacauacuu

SEQ ID NO: 589680 - RNA, 19 nt, Homo sapiens
  misc_RNA (1)...(19): siRNA sense strand
ccauggagcccgaagaaga

SEQ ID NO: 589681 - RNA, 19 nt, Homo sapiens
  misc_RNA (1)...(19): siRNA sense strand
gguggaugguggcugguaa

SEQ ID NO: 589682 - RNA, 19 nt, Homo sapiens
  misc_RNA (1)...(19): siRNA sense strand
ucuugaaacucccuuauag

SEQ ID NO: 589683 - RNA, 19 nt, Homo sapiens
  misc_RNA (1)...(19): siRNA sense strand
gaccauggagcccgaagaa

SEQ ID NO: 589684 - RNA, 19 nt, Homo sapiens
  misc_RNA (1)...(19): siRNA sense strand
gaaaugccaaagaggaugu

SEQ ID NO: 589685 - RNA, 19 nt, Homo sapiens
  misc_RNA (1)...(19): siRNA sense strand
agaaugggaccucugauga

SEQ ID NO: 589686 - RNA, 19 nt, Homo sapiens
  misc_RNA (1)...(19): siRNA sense strand
uauaguacauuucggacau

SEQ ID NO: 589687 - RNA, 19 nt, Homo sapiens
  misc_RNA (1)...(19): siRNA sense strand
caacauuucagacaaacau

SEQ ID NO: 589688 - RNA, 19 nt, Homo sapiens
  misc_RNA (1)...(19): siRNA sense strand
gauguucugggcuggauaa

SEQ ID NO: 589689 - RNA, 19 nt, Homo sapiens
  misc_RNA (1)...(19): siRNA sense strand
gaugaguccuccagugaac

SEQ ID NO: 589690 - RNA, 19 nt, Homo sapiens
  misc_RNA (1)...(19): siRNA sense strand
aaacugaaacucaccaaca

SEQ ID NO: 589691 - RNA, 19 nt, Homo sapiens
  misc_RNA (1)...(19): siRNA sense strand
aaauagacaacaacccuuu

SEQ ID NO: 589692 - RNA, 19 nt, Homo sapiens
  misc_RNA (1)...(19): siRNA sense strand
ccuggaggcuaaagaacuu

SEQ ID NO: 589693 - RNA, 19 nt, Homo sapiens
  misc_RNA (1)...(19): siRNA sense strand
ucagacaaacauggauuua

SEQ ID NO: 589694 - RNA, 19 nt, Homo sapiens
  misc_RNA (1)...(19): siRNA sense strand
uauagcugcugaugacugu

SEQ ID NO: 589695 - RNA, 19 nt, Homo sapiens
  misc_RNA (1)...(19): siRNA sense strand
uguaagagccaaugacauc

SEQ ID NO: 589696 - RNA, 19 nt, Homo sapiens
  misc_RNA (1)...(19): siRNA sense strand
ccagcgaacugcagagcau

SEQ ID NO: 589697 - RNA, 19 nt, Homo sapiens
  misc_RNA (1)...(19): siRNA sense strand
gagccaaugacaucuugaa

SEQ ID NO: 589698 - RNA, 19 nt, Homo sapiens
  misc_RNA (1)...(19): siRNA sense strand
gcgcaucugaggccuuuga

SEQ ID NO: 589699 - RNA, 19 nt, Homo sapiens
  misc_RNA (1)...(19): siRNA sense strand
cauuuaaagugagauguuc

SEQ ID NO: 589700 - RNA, 19 nt, Homo sapiens
  misc_RNA (1)...(19): siRNA sense strand
gaaugggaccucugaugag

SEQ ID NO: 589701 - RNA, 19 nt, Homo sapiens
  misc_RNA (1)...(19): siRNA sense strand
gagauguucugggcuggau

SEQ ID NO: 589702 - RNA, 19 nt, Homo sapiens
  misc_RNA (1)...(19): siRNA sense strand
aacugaaacucaccaacaa

SEQ ID NO: 589703 - RNA, 19 nt, Homo sapiens
  misc_RNA (1)...(19): siRNA sense strand
augauaagauaacccaguu

SEQ ID NO: 589704 - RNA, 19 nt, Homo sapiens
  misc_RNA (1)...(19): siRNA sense strand
ucaucgcugugacugcaua

SEQ ID NO: 589705 - RNA, 19 nt, Homo sapiens
  misc_RNA (1)...(19): siRNA sense strand
gaacuccaugcacaaauac

SEQ ID NO: 589706 - RNA, 19 nt, Homo sapiens
  misc_RNA (1)...(19): siRNA sense strand
gaugacugucguuauaaau

SEQ ID NO: 589707 - RNA, 19 nt, Homo sapiens
  misc_RNA (1)...(19): siRNA sense strand
gacugucguuauaaauuuc

SEQ ID NO: 589708 - RNA, 19 nt, Homo sapiens
  misc_RNA (1)...(19): siRNA sense strand
ccauuuaaagugagauguu

SEQ ID NO: 589709 - RNA, 19 nt, Homo sapiens
  misc_RNA (1)...(19): siRNA sense strand
acaucgaaccucaaagauu

SEQ ID NO: 589710 - RNA, 19 nt, Homo sapiens
  misc_RNA (1)...(19): siRNA sense strand
ugacugcauaccagaauga

SEQ ID NO: 589711 - RNA, 19 nt, Homo sapiens
  misc_RNA (1)...(19): siRNA sense strand
ucaccaacaacauuucaga

SEQ ID NO: 589712 - RNA, 19 nt, Homo sapiens
  misc_RNA (1)...(19): siRNA sense strand
ggacucgggcucugaacuc

SEQ ID NO: 589713 - RNA, 19 nt, Homo sapiens
  misc_RNA (1)...(19): siRNA sense strand
ggccuaccauccguuccua

SEQ ID NO: 589714 - RNA, 19 nt, Homo sapiens
  misc_RNA (1)...(19): siRNA sense strand
uuuccuccauuuaaaguga

SEQ ID NO: 589715 - RNA, 19 nt, Homo sapiens
  misc_RNA (1)...(19): siRNA sense strand
auaguacauuucggacaua

SEQ ID NO: 589716 - RNA, 19 nt, Homo sapiens
  misc_RNA (1)...(19): siRNA sense strand
cacuggaaauggccgaaga

SEQ ID NO: 589717 - RNA, 19 nt, Homo sapiens
  misc_RNA (1)...(19): siRNA sense strand
caaacucugcgcggagaaa

SEQ ID NO: 589718 - RNA, 19 nt, Homo sapiens
  misc_RNA (1)...(19): siRNA sense strand
ucgcccgacucacgccaua

SEQ ID NO: 589719 - RNA, 19 nt, Homo sapiens
  misc_RNA (1)...(19): siRNA sense strand
gacauuauagcugcugaug

SEQ ID NO: 589720 - RNA, 19 nt, Homo sapiens
  misc_RNA (1)...(19): siRNA sense strand
cugaugaguccuccaguga

SEQ ID NO: 589721 - RNA, 19 nt, Homo sapiens
  misc_RNA (1)...(19): siRNA sense strand
ugaaacucccuuauaguac

SEQ ID NO: 589722 - RNA, 19 nt, Homo sapiens
  misc_RNA (1)...(19): siRNA sense strand
gugacugcauaccagaaug

SEQ ID NO: 589723 - RNA, 19 nt, Homo sapiens
  misc_RNA (1)...(19): siRNA sense strand
gagcauccagcgguugguu

SEQ ID NO: 589724 - RNA, 19 nt, Homo sapiens
  misc_RNA (1)...(19): siRNA sense strand
gacucgggcucugaacuca

SEQ ID NO: 589725 - RNA, 19 nt, Homo sapiens
  misc_RNA (1)...(19): siRNA sense strand
aaugggaccucugaugagu

SEQ ID NO: 589726 - RNA, 19 nt, Homo sapiens
  misc_RNA (1)...(19): siRNA sense strand
ugaggguguuugaugaaag

SEQ ID NO: 589727 - RNA, 19 nt, Homo sapiens
  misc_RNA (1)...(19): siRNA sense strand
caugaggguguuugaugaa

SEQ ID NO: 589728 - RNA, 19 nt, Homo sapiens
  misc_RNA (1)...(19): siRNA sense strand
ugagagauccggucauucc

SEQ ID NO: 589729 - RNA, 19 nt, Homo sapiens
  misc_RNA (1)...(19): siRNA sense strand
cauaccagaaugauaagau

SEQ ID NO: 589730 - RNA, 19 nt, Homo sapiens
  misc_RNA (1)...(19): siRNA sense strand
gacaucgaaccucaaagau

SEQ ID NO: 589731 - RNA, 19 nt, Homo sapiens
  misc_RNA (1)...(19): siRNA sense strand
uggccaagccgaucaugga

SEQ ID NO: 589732 - RNA, 19 nt, Homo sapiens
  misc_RNA (1)...(19): siRNA sense strand
gcauccagcgguugguuag

SEQ ID NO: 589733 - RNA, 19 nt, Homo sapiens
  misc_RNA (1)...(19): siRNA sense strand
aaacucccuuauaguacau

SEQ ID NO: 589734 - RNA, 19 nt, Homo sapiens
  misc_RNA (1)...(19): siRNA sense strand
caucuugaaacucccuuau

SEQ ID NO: 589735 - RNA, 19 nt, Homo sapiens
  misc_RNA (1)...(19): siRNA sense strand
gccaaugacaucuugaaac

SEQ ID NO: 589736 - RNA, 19 nt, Homo sapiens
  misc_RNA (1)...(19): siRNA sense strand
ucacuuuccacaaacugaa

SEQ ID NO: 589737 - RNA, 19 nt, Homo sapiens
  misc_RNA (1)...(19): siRNA sense strand
ggaaauggccgaagagaaa

SEQ ID NO: 589738 - RNA, 19 nt, Homo sapiens
  misc_RNA (1)...(19): siRNA sense strand
caucgaaccucaaagauuu

SEQ ID NO: 589739 - RNA, 19 nt, Homo sapiens
  misc_RNA (1)...(19): siRNA sense strand
gcugaugacugucguuaua

SEQ ID NO: 589740 - RNA, 19 nt, Homo sapiens
  misc_RNA (1)...(19): siRNA sense strand
caacaacauuucagacaaa

SEQ ID NO: 589741 - RNA, 19 nt, Homo sapiens
  misc_RNA (1)...(19): siRNA sense strand
caaagaggauguacauuca

SEQ ID NO: 589742 - RNA, 19 nt, Homo sapiens
  misc_RNA (1)...(19): siRNA sense strand
gaaacucccuuauaguaca

SEQ ID NO: 589743 - RNA, 19 nt, Homo sapiens
  misc_RNA (1)...(19): siRNA sense strand
ugaacuccaugcacaaaua

SEQ ID NO: 589744 - RNA, 19 nt, Homo sapiens
  misc_RNA (1)...(19): siRNA sense strand
ggacaucgaaccucaaaga

SEQ ID NO: 589745 - RNA, 19 nt, Homo sapiens
  misc_RNA (1)...(19): siRNA sense strand
gcaccgagauggucauuac

SEQ ID NO: 589746 - RNA, 19 nt, Homo sapiens
  misc_RNA (1)...(19): siRNA sense strand
gaaacucaccaacaacauu

SEQ ID NO: 589747 - RNA, 19 nt, Homo sapiens
  misc_RNA (1)...(19): siRNA sense strand
ccaaugacaucuugaaacu

SEQ ID NO: 589748 - RNA, 19 nt, Homo sapiens
  misc_RNA (1)...(19): siRNA sense strand
ccaaagaggauguacauuc

SEQ ID NO: 589749 - RNA, 19 nt, Homo sapiens
  misc_RNA (1)...(19): siRNA sense strand
ggacaagcauggccuacca

SEQ ID NO: 589750 - RNA, 19 nt, Homo sapiens
  misc_RNA (1)...(19): siRNA sense strand
ccaacaacauuucagacaa

SEQ ID NO: 589751 - RNA, 19 nt, Homo sapiens
  misc_RNA (1)...(19): siRNA sense strand
ccaugaggguguuugauga

SEQ ID NO: 589752 - RNA, 19 nt, Homo sapiens
  misc_RNA (1)...(19): siRNA sense strand
gaggguguuugaugaaaga

SEQ ID NO: 589753 - RNA, 19 nt, Homo sapiens
  misc_RNA (1)...(19): siRNA sense strand
gaaccucaaagauuuaugu

SEQ ID NO: 589754 - RNA, 19 nt, Homo sapiens
  misc_RNA (1)...(19): siRNA sense strand
agacaaacauggauuuacu

SEQ ID NO: 589755 - RNA, 19 nt, Homo sapiens
  misc_RNA (1)...(19): siRNA sense strand
cugcauaccagaaugauaa

SEQ ID NO: 589756 - RNA, 19 nt, Homo sapiens
  misc_RNA (1)...(19): siRNA sense strand
caucugaggccuuugaaga

SEQ ID NO: 589757 - RNA, 19 nt, Homo sapiens
  misc_RNA (1)...(19): siRNA sense strand
gagaaugggaccucugaug

SEQ ID NO: 589758 - RNA, 19 nt, Homo sapiens
  misc_RNA (1)...(19): siRNA sense strand
gcaccuggaggcuaaagaa

SEQ ID NO: 589759 - RNA, 19 nt, Homo sapiens
  misc_RNA (1)...(19): siRNA sense strand
ugaugacugucguuauaaa

SEQ ID NO: 589760 - RNA, 19 nt, Homo sapiens
  misc_RNA (1)...(19): siRNA sense strand
uugaaacucccuuauagua

SEQ ID NO: 589761 - RNA, 19 nt, Homo sapiens
  misc_RNA (1)...(19): siRNA sense strand
aaacucaccaacaacauuu

SEQ ID NO: 589762 - RNA, 19 nt, Homo sapiens
  misc_RNA (1)...(19): siRNA sense strand
agucgucacuuuccacaaa

SEQ ID NO: 589763 - RNA, 19 nt, Homo sapiens
  misc_RNA (1)...(19): siRNA sense strand
cauuauagcugcugaugac

SEQ ID NO: 589764 - RNA, 19 nt, Homo sapiens
  misc_RNA (1)...(19): siRNA sense strand
guacauuucggacauacuu

SEQ ID NO: 589765 - RNA, 19 nt, Homo sapiens
  misc_RNA (1)...(19): siRNA sense strand
ccauggagcccgaagaaga

SEQ ID NO: 589766 - RNA, 19 nt, Homo sapiens
  misc_RNA (1)...(19): siRNA sense strand
gguggaugguggcugguaa

SEQ ID NO: 589767 - RNA, 19 nt, Homo sapiens
  misc_RNA (1)...(19): siRNA sense strand
ucuugaaacucccuuauag

SEQ ID NO: 589768 - RNA, 19 nt, Homo sapiens
  misc_RNA (1)...(19): siRNA sense strand
gaccauggagcccgaagaa

SEQ ID NO: 589769 - RNA, 19 nt, Homo sapiens
  misc_RNA (1)...(19): siRNA sense strand
gaaaugccaaagaggaugu

SEQ ID NO: 589770 - RNA, 19 nt, Homo sapiens
  misc_RNA (1)...(19): siRNA sense strand
agaaugggaccucugauga

SEQ ID NO: 589771 - RNA, 19 nt, Homo sapiens
  misc_RNA (1)...(19): siRNA sense strand
uauaguacauuucggacau

SEQ ID NO: 589772 - RNA, 19 nt, Homo sapiens
  misc_RNA (1)...(19): siRNA sense strand
caacauuucagacaaacau

SEQ ID NO: 589773 - RNA, 19 nt, Homo sapiens
  misc_RNA (1)...(19): siRNA sense strand
gauguucugggcuggauaa

SEQ ID NO: 589774 - RNA, 19 nt, Homo sapiens
  misc_RNA (1)...(19): siRNA sense strand
gaugaguccuccagugaac

SEQ ID NO: 589775 - RNA, 19 nt, Homo sapiens
  misc_RNA (1)...(19): siRNA sense strand
aaacugaaacucaccaaca

SEQ ID NO: 589776 - RNA, 19 nt, Homo sapiens
  misc_RNA (1)...(19): siRNA sense strand
aaauagacaacaacccuuu

SEQ ID NO: 589777 - RNA, 19 nt, Homo sapiens
  misc_RNA (1)...(19): siRNA sense strand
ccuggaggcuaaagaacuu

SEQ ID NO: 589778 - RNA, 19 nt, Homo sapiens
  misc_RNA (1)...(19): siRNA sense strand
ucagacaaacauggauuua

SEQ ID NO: 589779 - RNA, 19 nt, Homo sapiens
  misc_RNA (1)...(19): siRNA sense strand
uauagcugcugaugacugu

SEQ ID NO: 589780 - RNA, 19 nt, Homo sapiens
  misc_RNA (1)...(19): siRNA sense strand
uguaagagccaaugacauc

SEQ ID NO: 589781 - RNA, 19 nt, Homo sapiens
  misc_RNA (1)...(19): siRNA sense strand
ccagcgaacugcagagcau

SEQ ID NO: 589782 - RNA, 19 nt, Homo sapiens
  misc_RNA (1)...(19): siRNA sense strand
gagccaaugacaucuugaa

SEQ ID NO: 589783 - RNA, 19 nt, Homo sapiens
  misc_RNA (1)...(19): siRNA sense strand
gcgcaucugaggccuuuga

SEQ ID NO: 589784 - RNA, 19 nt, Homo sapiens
  misc_RNA (1)...(19): siRNA sense strand
cauuuaaagugagauguuc

SEQ ID NO: 589785 - RNA, 19 nt, Homo sapiens
  misc_RNA (1)...(19): siRNA sense strand
gaaugggaccucugaugag

SEQ ID NO: 589786 - RNA, 19 nt, Homo sapiens
  misc_RNA (1)...(19): siRNA sense strand
gagauguucugggcuggau

SEQ ID NO: 589787 - RNA, 19 nt, Homo sapiens
  misc_RNA (1)...(19): siRNA sense strand
aacugaaacucaccaacaa

SEQ ID NO: 589788 - RNA, 19 nt, Homo sapiens
  misc_RNA (1)...(19): siRNA sense strand
augauaagauaacccaguu

SEQ ID NO: 589789 - RNA, 19 nt, Homo sapiens
  misc_RNA (1)...(19): siRNA sense strand
ucaucgcugugacugcaua

SEQ ID NO: 589790 - RNA, 19 nt, Homo sapiens
  misc_RNA (1)...(19): siRNA sense strand
gaacuccaugcacaaauac

SEQ ID NO: 589791 - RNA, 19 nt, Homo sapiens
  misc_RNA (1)...(19): siRNA sense strand
gaugacugucguuauaaau

SEQ ID NO: 589792 - RNA, 19 nt, Homo sapiens
  misc_RNA (1)...(19): siRNA sense strand
gacugucguuauaaauuuc

SEQ ID NO: 589793 - RNA, 19 nt, Homo sapiens
  misc_RNA (1)...(19): siRNA sense strand
ccauuuaaagugagauguu

SEQ ID NO: 589794 - RNA, 19 nt, Homo sapiens
  misc_RNA (1)...(19): siRNA sense strand
acaucgaaccucaaagauu

SEQ ID NO: 589795 - RNA, 19 nt, Homo sapiens
  misc_RNA (1)...(19): siRNA sense strand
ugacugcauaccagaauga

SEQ ID NO: 589796 - RNA, 19 nt, Homo sapiens
  misc_RNA (1)...(19): siRNA sense strand
ucaccaacaacauuucaga

SEQ ID NO: 589797 - RNA, 19 nt, Homo sapiens
  misc_RNA (1)...(19): siRNA sense strand
ggacucgggcucugaacuc

SEQ ID NO: 589798 - RNA, 19 nt, Homo sapiens
  misc_RNA (1)...(19): siRNA sense strand
ggccuaccauccguuccua

SEQ ID NO: 589799 - RNA, 19 nt, Homo sapiens
  misc_RNA (1)...(19): siRNA sense strand
uuuccuccauuuaaaguga

SEQ ID NO: 589800 - RNA, 19 nt, Homo sapiens
  misc_RNA (1)...(19): siRNA sense strand
auaguacauuucggacaua

SEQ ID NO: 589801 - RNA, 19 nt, Homo sapiens
  misc_RNA (1)...(19): siRNA sense strand
cacuggaaauggccgaaga

SEQ ID NO: 589802 - RNA, 19 nt, Homo sapiens
  misc_RNA (1)...(19): siRNA sense strand
caaacucugcgcggagaaa

SEQ ID NO: 589803 - RNA, 19 nt, Homo sapiens
  misc_RNA (1)...(19): siRNA sense strand
ucgcccgacucacgccaua

SEQ ID NO: 589804 - RNA, 19 nt, Homo sapiens
  misc_RNA (1)...(19): siRNA sense strand
gacauuauagcugcugaug

SEQ ID NO: 589805 - RNA, 19 nt, Homo sapiens
  misc_RNA (1)...(19): siRNA sense strand
cugaugaguccuccaguga

SEQ ID NO: 589806 - RNA, 19 nt, Homo sapiens
  misc_RNA (1)...(19): siRNA sense strand
ugaaacucccuuauaguac

SEQ ID NO: 589807 - RNA, 19 nt, Homo sapiens
  misc_RNA (1)...(19): siRNA sense strand
gugacugcauaccagaaug

SEQ ID NO: 589808 - RNA, 19 nt, Homo sapiens
  misc_RNA (1)...(19): siRNA sense strand
gagcauccagcgguugguu

SEQ ID NO: 589809 - RNA, 19 nt, Homo sapiens
  misc_RNA (1)...(19): siRNA sense strand
gacucgggcucugaacuca

SEQ ID NO: 589810 - RNA, 19 nt, Homo sapiens
  misc_RNA (1)...(19): siRNA sense strand
aaugggaccucugaugagu

SEQ ID NO: 589811 - RNA, 19 nt, Homo sapiens
  misc_RNA (1)...(19): siRNA sense strand
ugaggguguuugaugaaag

SEQ ID NO: 589812 - RNA, 19 nt, Homo sapiens
  misc_RNA (1)...(19): siRNA sense strand
caugaggguguuugaugaa

SEQ ID NO: 589813 - RNA, 19 nt, Homo sapiens
  misc_RNA (1)...(19): siRNA sense strand
ugagagauccggucauucc

SEQ ID NO: 589814 - RNA, 19 nt, Homo sapiens
  misc_RNA (1)...(19): siRNA sense strand
cauaccagaaugauaagau

SEQ ID NO: 589815 - RNA, 19 nt, Homo sapiens
  misc_RNA (1)...(19): siRNA sense strand
gacaucgaaccucaaagau

SEQ ID NO: 589816 - RNA, 19 nt, Homo sapiens
  misc_RNA (1)...(19): siRNA sense strand
uggccaagccgaucaugga

SEQ ID NO: 589817 - RNA, 19 nt, Homo sapiens
  misc_RNA (1)...(19): siRNA sense strand
gcauccagcgguugguuag

SEQ ID NO: 589818 - RNA, 19 nt, Homo sapiens
  misc_RNA (1)...(19): siRNA sense strand
aaacucccuuauaguacau

SEQ ID NO: 589819 - RNA, 19 nt, Homo sapiens
  misc_RNA (1)...(19): siRNA sense strand
caucuugaaacucccuuau

SEQ ID NO: 589820 - RNA, 19 nt, Homo sapiens
  misc_RNA (1)...(19): siRNA sense strand
gccaaugacaucuugaaac

SEQ ID NO: 589821 - RNA, 19 nt, Homo sapiens
  misc_RNA (1)...(19): siRNA sense strand
ucacuuuccacaaacugaa

SEQ ID NO: 589822 - RNA, 19 nt, Homo sapiens
  misc_RNA (1)...(19): siRNA sense strand
uaagggagauuucuacaaa

SEQ ID NO: 589823 - RNA, 19 nt, Homo sapiens
  misc_RNA (1)...(19): siRNA sense strand
cagaucaccuucagucuua

SEQ ID NO: 589824 - RNA, 19 nt, Homo sapiens
  misc_RNA (1)...(19): siRNA sense strand
gaaauuaacuggaucuacu

SEQ ID NO: 589825 - RNA, 19 nt, Homo sapiens
  misc_RNA (1)...(19): siRNA sense strand
gaaaugcuccaaaguguaa

SEQ ID NO: 589826 - RNA, 19 nt, Homo sapiens
  misc_RNA (1)...(19): siRNA sense strand
gauaugauccgccaaauga

SEQ ID NO: 589827 - RNA, 19 nt, Homo sapiens
  misc_RNA (1)...(19): siRNA sense strand
caaagaugcuaucaaagaa

SEQ ID NO: 589828 - RNA, 19 nt, Homo sapiens
  misc_RNA (1)...(19): siRNA sense strand
gaaauugaaucagcgauau

SEQ ID NO: 589829 - RNA, 19 nt, Homo sapiens
  misc_RNA (1)...(19): siRNA sense strand
gacaggaggugaugaagaa

SEQ ID NO: 589830 - RNA, 19 nt, Homo sapiens
  misc_RNA (1)...(19): siRNA sense strand
gaacugacuuuacccaauc

SEQ ID NO: 589831 - RNA, 19 nt, Homo sapiens
  misc_RNA (1)...(19): siRNA sense strand
guaaagucauuaaggagua

SEQ ID NO: 589832 - RNA, 19 nt, Homo sapiens
  misc_RNA (1)...(19): siRNA sense strand
uaaauaagcucaguguuca

SEQ ID NO: 589833 - RNA, 19 nt, Homo sapiens
  misc_RNA (1)...(19): siRNA sense strand
gagauagaguuccuuguga

SEQ ID NO: 589834 - RNA, 19 nt, Homo sapiens
  misc_RNA (1)...(19): siRNA sense strand
ggaguacccuggaaaggaa

SEQ ID NO: 589835 - RNA, 19 nt, Homo sapiens
  misc_RNA (1)...(19): siRNA sense strand
ggagguagaucagauugaa

SEQ ID NO: 589836 - RNA, 19 nt, Homo sapiens
  misc_RNA (1)...(19): siRNA sense strand
gaaagcaaccaccuaauuc

SEQ ID NO: 589837 - RNA, 19 nt, Homo sapiens
  misc_RNA (1)...(19): siRNA sense strand
ggauaaagcauacaccaaa

SEQ ID NO: 589838 - RNA, 19 nt, Homo sapiens
  misc_RNA (1)...(19): siRNA sense strand
ggccaaaggucauauaaag

SEQ ID NO: 589839 - RNA, 19 nt, Homo sapiens
  misc_RNA (1)...(19): siRNA sense strand
cagcagcgauucagugauu

SEQ ID NO: 589840 - RNA, 19 nt, Homo sapiens
  misc_RNA (1)...(19): siRNA sense strand
ccaaagaugcuaucaaaga

SEQ ID NO: 589841 - RNA, 19 nt, Homo sapiens
  misc_RNA (1)...(19): siRNA sense strand
uaagaucuuugaacaggua

SEQ ID NO: 589842 - RNA, 19 nt, Homo sapiens
  misc_RNA (1)...(19): siRNA sense strand
ggaccaaauuugauaagau

SEQ ID NO: 589843 - RNA, 19 nt, Homo sapiens
  misc_RNA (1)...(19): siRNA sense strand
gcacaccacugccuguuuc

SEQ ID NO: 589844 - RNA, 19 nt, Homo sapiens
  misc_RNA (1)...(19): siRNA sense strand
ggaaauugaaucagcgaua

SEQ ID NO: 589845 - RNA, 19 nt, Homo sapiens
  misc_RNA (1)...(19): siRNA sense strand
guuaccaacuugcauuuaa

SEQ ID NO: 589846 - RNA, 19 nt, Homo sapiens
  misc_RNA (1)...(19): siRNA sense strand
gauggaaggcugugaauau

SEQ ID NO: 589847 - RNA, 19 nt, Homo sapiens
  misc_RNA (1)...(19): siRNA sense strand
gaacaggauaucgaaauaa

SEQ ID NO: 589848 - RNA, 19 nt, Homo sapiens
  misc_RNA (1)...(19): siRNA sense strand
agaacaggauaucgaaaua

SEQ ID NO: 589849 - RNA, 19 nt, Homo sapiens
  misc_RNA (1)...(19): siRNA sense strand
ggaucuacuucuagucuaa

SEQ ID NO: 589850 - RNA, 19 nt, Homo sapiens
  misc_RNA (1)...(19): siRNA sense strand
cagauugaauugaaacuga

SEQ ID NO: 589851 - RNA, 19 nt, Homo sapiens
  misc_RNA (1)...(19): siRNA sense strand
gcacuuugaagguuugaua

SEQ ID NO: 589852 - RNA, 19 nt, Homo sapiens
  misc_RNA (1)...(19): siRNA sense strand
caucuucccuguuggauau

SEQ ID NO: 589853 - RNA, 19 nt, Homo sapiens
  misc_RNA (1)...(19): siRNA sense strand
uaaaggagguagaucagau

SEQ ID NO: 589854 - RNA, 19 nt, Homo sapiens
  misc_RNA (1)...(19): siRNA sense strand
gcaacucuuucucgauuga

SEQ ID NO: 589855 - RNA, 19 nt, Homo sapiens
  misc_RNA (1)...(19): siRNA sense strand
gaguaaaguuggaauucuu

SEQ ID NO: 589856 - RNA, 19 nt, Homo sapiens
  misc_RNA (1)...(19): siRNA sense strand
gcaaauggaagaaguaaag

SEQ ID NO: 589857 - RNA, 19 nt, Homo sapiens
  misc_RNA (1)...(19): siRNA sense strand
gaccaaauuugauaagauc

SEQ ID NO: 589858 - RNA, 19 nt, Homo sapiens
  misc_RNA (1)...(19): siRNA sense strand
gcuaaagaguacagauuau

SEQ ID NO: 589859 - RNA, 19 nt, Homo sapiens
  misc_RNA (1)...(19): siRNA sense strand
ccagucaccucaacaaugu

SEQ ID NO: 589860 - RNA, 19 nt, Homo sapiens
  misc_RNA (1)...(19): siRNA sense strand
ugccaaagaugcuaucaaa

SEQ ID NO: 589861 - RNA, 19 nt, Homo sapiens
  misc_RNA (1)...(19): siRNA sense strand
gagcugaacaaccuaauug

SEQ ID NO: 589862 - RNA, 19 nt, Homo sapiens
  misc_RNA (1)...(19): siRNA sense strand
gaaaguagcaaaugaaagc

SEQ ID NO: 589863 - RNA, 19 nt, Homo sapiens
  misc_RNA (1)...(19): siRNA sense strand
ggacccugcuucuuuccua

SEQ ID NO: 589864 - RNA, 19 nt, Homo sapiens
  misc_RNA (1)...(19): siRNA sense strand
gggcuaacauccagucaau

SEQ ID NO: 589865 - RNA, 19 nt, Homo sapiens
  misc_RNA (1)...(19): siRNA sense strand
ggagaaaguagcaaaugaa

SEQ ID NO: 589866 - RNA, 19 nt, Homo sapiens
  misc_RNA (1)...(19): siRNA sense strand
ugaacaaccuaauugcauu

SEQ ID NO: 589867 - RNA, 19 nt, Homo sapiens
  misc_RNA (1)...(19): siRNA sense strand
ucagucaucuucccuguug

SEQ ID NO: 589868 - RNA, 19 nt, Homo sapiens
  misc_RNA (1)...(19): siRNA sense strand
ggaaaugcuccaaagugua

SEQ ID NO: 589869 - RNA, 19 nt, Homo sapiens
  misc_RNA (1)...(19): siRNA sense strand
gaucugguguuacaaugga

SEQ ID NO: 589870 - RNA, 19 nt, Homo sapiens
  misc_RNA (1)...(19): siRNA sense strand
gggaggaggaaguaaguua

SEQ ID NO: 589871 - RNA, 19 nt, Homo sapiens
  misc_RNA (1)...(19): siRNA sense strand
gagaaaguagcaaaugaaa

SEQ ID NO: 589872 - RNA, 19 nt, Homo sapiens
  misc_RNA (1)...(19): siRNA sense strand
gaaggacuaacaaagaauu

SEQ ID NO: 589873 - RNA, 19 nt, Homo sapiens
  misc_RNA (1)...(19): siRNA sense strand
aaggagaucuugcuucuuc

SEQ ID NO: 589874 - RNA, 19 nt, Homo sapiens
  misc_RNA (1)...(19): siRNA sense strand
gacaggaccaaauuugaua

SEQ ID NO: 589875 - RNA, 19 nt, Homo sapiens
  misc_RNA (1)...(19): siRNA sense strand
ggaaggcugugaauaugca

SEQ ID NO: 589876 - RNA, 19 nt, Homo sapiens
  misc_RNA (1)...(19): siRNA sense strand
gauaaccucuacaagaaag

SEQ ID NO: 589877 - RNA, 19 nt, Homo sapiens
  misc_RNA (1)...(19): siRNA sense strand
caacuugcauuuaacaaac

SEQ ID NO: 589878 - RNA, 19 nt, Homo sapiens
  misc_RNA (1)...(19): siRNA sense strand
gaaaaucucaugucuagaa

SEQ ID NO: 589879 - RNA, 19 nt, Homo sapiens
  misc_RNA (1)...(19): siRNA sense strand
ggaccuggauggaggaaca

SEQ ID NO: 589880 - RNA, 19 nt, Homo sapiens
  misc_RNA (1)...(19): siRNA sense strand
aaacaugucugccucugau

SEQ ID NO: 589881 - RNA, 19 nt, Homo sapiens
  misc_RNA (1)...(19): siRNA sense strand
caagaugacuggcacaacu

SEQ ID NO: 589882 - RNA, 19 nt, Homo sapiens
  misc_RNA (1)...(19): siRNA sense strand
ugaaagcaaccaccuaauu

SEQ ID NO: 589883 - RNA, 19 nt, Homo sapiens
  misc_RNA (1)...(19): siRNA sense strand
agaguuaaaugcaagagaa

SEQ ID NO: 589884 - RNA, 19 nt, Homo sapiens
  misc_RNA (1)...(19): siRNA sense strand
gcaaaugaaagccagaaga

SEQ ID NO: 589885 - RNA, 19 nt, Homo sapiens
  misc_RNA (1)...(19): siRNA sense strand
ucagaggaguauuuguuaa

SEQ ID NO: 589886 - RNA, 19 nt, Homo sapiens
  misc_RNA (1)...(19): siRNA sense strand
ggcuaaagaguacagauua

SEQ ID NO: 589887 - RNA, 19 nt, Homo sapiens
  misc_RNA (1)...(19): siRNA sense strand
gcggaagccuuugcagaaa

SEQ ID NO: 589888 - RNA, 19 nt, Homo sapiens
  misc_RNA (1)...(19): siRNA sense strand
caaacaagaacuucguaaa

SEQ ID NO: 589889 - RNA, 19 nt, Homo sapiens
  misc_RNA (1)...(19): siRNA sense strand
ccaaauaaggcaaauggaa

SEQ ID NO: 589890 - RNA, 19 nt, Homo sapiens
  misc_RNA (1)...(19): siRNA sense strand
caaaguaugccuggaacua

SEQ ID NO: 589891 - RNA, 19 nt, Homo sapiens
  misc_RNA (1)...(19): siRNA sense strand
gaacagguacuaagugaac

SEQ ID NO: 589892 - RNA, 19 nt, Homo sapiens
  misc_RNA (1)...(19): siRNA sense strand
caggauaucgaaauaauga

SEQ ID NO: 589893 - RNA, 19 nt, Homo sapiens
  misc_RNA (1)...(19): siRNA sense strand
uauaagcacuuugaagguu

SEQ ID NO: 589894 - RNA, 19 nt, Homo sapiens
  misc_RNA (1)...(19): siRNA sense strand
gcaaccaccuaauucaucu

SEQ ID NO: 589895 - RNA, 19 nt, Homo sapiens
  misc_RNA (1)...(19): siRNA sense strand
gcucacagcuuuuggaaga

SEQ ID NO: 589896 - RNA, 19 nt, Homo sapiens
  misc_RNA (1)...(19): siRNA sense strand
gauuauuguuccagcauug

SEQ ID NO: 589897 - RNA, 19 nt, Homo sapiens
  misc_RNA (1)...(19): siRNA sense strand
uuugauagcucgcuguuau

SEQ ID NO: 589898 - RNA, 19 nt, Homo sapiens
  misc_RNA (1)...(19): siRNA sense strand
gaggaguauuuguuaaugu

SEQ ID NO: 589899 - RNA, 19 nt, Homo sapiens
  misc_RNA (1)...(19): siRNA sense strand
aaagaaagcaagaaguuug

SEQ ID NO: 589900 - RNA, 19 nt, Homo sapiens
  misc_RNA (1)...(19): siRNA sense strand
gaggaaaugcuccaaagug

SEQ ID NO: 589901 - RNA, 19 nt, Homo sapiens
  misc_RNA (1)...(19): siRNA sense strand
gagcaguuaugaggaaaug

SEQ ID NO: 589902 - RNA, 19 nt, Homo sapiens
  misc_RNA (1)...(19): siRNA sense strand
gagaagaacaggauaucga

SEQ ID NO: 589903 - RNA, 19 nt, Homo sapiens
  misc_RNA (1)...(19): siRNA sense strand
gcuaacauccagucaauca

SEQ ID NO: 589904 - RNA, 19 nt, Homo sapiens
  misc_RNA (1)...(19): siRNA sense strand
uggagaaaguagcaaauga

SEQ ID NO: 589905 - RNA, 19 nt, Homo sapiens
  misc_RNA (1)...(19): siRNA sense strand
gcagaacaggacuucauaa

SEQ ID NO: 589906 - RNA, 19 nt, Homo sapiens
  misc_RNA (1)...(19): siRNA sense strand
cuaaagaaagcaagaaguu

SEQ ID NO: 589907 - RNA, 19 nt, Homo sapiens
  misc_RNA (1)...(19): siRNA sense strand
gauuauuuaucccgacuau

SEQ ID NO: 589908 - RNA, 19 nt, Homo sapiens
  misc_RNA (1)...(19): siRNA sense strand
aaucaagcaugcauuacaa

SEQ ID NO: 589909 - RNA, 19 nt, Homo sapiens
  misc_RNA (1)...(19): siRNA sense strand
uucaggacauucuggauua

SEQ ID NO: 589910 - RNA, 19 nt, Homo sapiens
  misc_RNA (1)...(19): siRNA sense strand
cuaaauaagcucaguguuc

SEQ ID NO: 589911 - RNA, 19 nt, Homo sapiens
  misc_RNA (1)...(19): siRNA sense strand
auagagauuugcuccgaua

SEQ ID NO: 589912 - RNA, 19 nt, Homo sapiens
  misc_RNA (1)...(19): siRNA sense strand
caucauccauuucauagag

SEQ ID NO: 589913 - RNA, 19 nt, Homo sapiens
  misc_RNA (1)...(19): siRNA sense strand
agaugaauaccaagaguua

SEQ ID NO: 589914 - RNA, 19 nt, Homo sapiens
  misc_RNA (1)...(19): siRNA sense strand
ugaagaauuugcuggacuu

SEQ ID NO: 589915 - RNA, 19 nt, Homo sapiens
  misc_RNA (1)...(19): siRNA sense strand
uuaacuggaucuacuucua

SEQ ID NO: 589916 - RNA, 19 nt, Homo sapiens
  misc_RNA (1)...(19): siRNA sense strand
ugaugaaauugcuagauga

SEQ ID NO: 589917 - RNA, 19 nt, Homo sapiens
  misc_RNA (1)...(19): siRNA sense strand
gaagaacaggauaucgaaa

SEQ ID NO: 589918 - RNA, 19 nt, Homo sapiens
  misc_RNA (1)...(19): siRNA sense strand
gcaagagaagaacaggaua

SEQ ID NO: 589919 - RNA, 19 nt, Homo sapiens
  misc_RNA (1)...(19): siRNA sense strand
gauaaagcauacaccaaac

SEQ ID NO: 589920 - RNA, 19 nt, Homo sapiens
  misc_RNA (1)...(19): siRNA sense strand
caaaugcauuaguaaccaa

SEQ ID NO: 589921 - RNA, 19 nt, Homo sapiens
  misc_RNA (1)...(19): siRNA sense strand
ggauuauuguuccagcauu

SEQ ID NO: 589922 - RNA, 19 nt, Homo sapiens
  misc_RNA (1)...(19): siRNA sense strand
uaagggagauuucuacaaa

SEQ ID NO: 589923 - RNA, 19 nt, Homo sapiens
  misc_RNA (1)...(19): siRNA sense strand
cagaucaccuucagucuua

SEQ ID NO: 589924 - RNA, 19 nt, Homo sapiens
  misc_RNA (1)...(19): siRNA sense strand
gaaauuaacuggaucuacu

SEQ ID NO: 589925 - RNA, 19 nt, Homo sapiens
  misc_RNA (1)...(19): siRNA sense strand
gaaaugcuccaaaguguaa

SEQ ID NO: 589926 - RNA, 19 nt, Homo sapiens
  misc_RNA (1)...(19): siRNA sense strand
gauaugauccgccaaauga

SEQ ID NO: 589927 - RNA, 19 nt, Homo sapiens
  misc_RNA (1)...(19): siRNA sense strand
caaagaugcuaucaaagaa

SEQ ID NO: 589928 - RNA, 19 nt, Homo sapiens
  misc_RNA (1)...(19): siRNA sense strand
gaaauugaaucagcgauau

SEQ ID NO: 589929 - RNA, 19 nt, Homo sapiens
  misc_RNA (1)...(19): siRNA sense strand
gacaggaggugaugaagaa

SEQ ID NO: 589930 - RNA, 19 nt, Homo sapiens
  misc_RNA (1)...(19): siRNA sense strand
gaacugacuuuacccaauc

SEQ ID NO: 589931 - RNA, 19 nt, Homo sapiens
  misc_RNA (1)...(19): siRNA sense strand
guaaagucauuaaggagua

SEQ ID NO: 589932 - RNA, 19 nt, Homo sapiens
  misc_RNA (1)...(19): siRNA sense strand
uaaauaagcucaguguuca

SEQ ID NO: 589933 - RNA, 19 nt, Homo sapiens
  misc_RNA (1)...(19): siRNA sense strand
gagauagaguuccuuguga

SEQ ID NO: 589934 - RNA, 19 nt, Homo sapiens
  misc_RNA (1)...(19): siRNA sense strand
ggaguacccuggaaaggaa

SEQ ID NO: 589935 - RNA, 19 nt, Homo sapiens
  misc_RNA (1)...(19): siRNA sense strand
ggagguagaucagauugaa

SEQ ID NO: 589936 - RNA, 19 nt, Homo sapiens
  misc_RNA (1)...(19): siRNA sense strand
gaaagcaaccaccuaauuc

SEQ ID NO: 589937 - RNA, 19 nt, Homo sapiens
  misc_RNA (1)...(19): siRNA sense strand
ggauaaagcauacaccaaa

SEQ ID NO: 589938 - RNA, 19 nt, Homo sapiens
  misc_RNA (1)...(19): siRNA sense strand
ggccaaaggucauauaaag

SEQ ID NO: 589939 - RNA, 19 nt, Homo sapiens
  misc_RNA (1)...(19): siRNA sense strand
cagcagcgauucagugauu

SEQ ID NO: 589940 - RNA, 19 nt, Homo sapiens
  misc_RNA (1)...(19): siRNA sense strand
ccaaagaugcuaucaaaga

SEQ ID NO: 589941 - RNA, 19 nt, Homo sapiens
  misc_RNA (1)...(19): siRNA sense strand
uaagaucuuugaacaggua

SEQ ID NO: 589942 - RNA, 19 nt, Homo sapiens
  misc_RNA (1)...(19): siRNA sense strand
ggaccaaauuugauaagau

SEQ ID NO: 589943 - RNA, 19 nt, Homo sapiens
  misc_RNA (1)...(19): siRNA sense strand
gcacaccacugccuguuuc

SEQ ID NO: 589944 - RNA, 19 nt, Homo sapiens
  misc_RNA (1)...(19): siRNA sense strand
ggaaauugaaucagcgaua

SEQ ID NO: 589945 - RNA, 19 nt, Homo sapiens
  misc_RNA (1)...(19): siRNA sense strand
guuaccaacuugcauuuaa

SEQ ID NO: 589946 - RNA, 19 nt, Homo sapiens
  misc_RNA (1)...(19): siRNA sense strand
gauggaaggcugugaauau

SEQ ID NO: 589947 - RNA, 19 nt, Homo sapiens
  misc_RNA (1)...(19): siRNA sense strand
gaacaggauaucgaaauaa

SEQ ID NO: 589948 - RNA, 19 nt, Homo sapiens
  misc_RNA (1)...(19): siRNA sense strand
agaacaggauaucgaaaua

SEQ ID NO: 589949 - RNA, 19 nt, Homo sapiens
  misc_RNA (1)...(19): siRNA sense strand
ggaucuacuucuagucuaa

SEQ ID NO: 589950 - RNA, 19 nt, Homo sapiens
  misc_RNA (1)...(19): siRNA sense strand
cagauugaauugaaacuga

SEQ ID NO: 589951 - RNA, 19 nt, Homo sapiens
  misc_RNA (1)...(19): siRNA sense strand
gcacuuugaagguuugaua

SEQ ID NO: 589952 - RNA, 19 nt, Homo sapiens
  misc_RNA (1)...(19): siRNA sense strand
caucuucccuguuggauau

SEQ ID NO: 589953 - RNA, 19 nt, Homo sapiens
  misc_RNA (1)...(19): siRNA sense strand
uaaaggagguagaucagau

SEQ ID NO: 589954 - RNA, 19 nt, Homo sapiens
  misc_RNA (1)...(19): siRNA sense strand
gcaacucuuucucgauuga

SEQ ID NO: 589955 - RNA, 19 nt, Homo sapiens
  misc_RNA (1)...(19): siRNA sense strand
gaguaaaguuggaauucuu

SEQ ID NO: 589956 - RNA, 19 nt, Homo sapiens
  misc_RNA (1)...(19): siRNA sense strand
gcaaauggaagaaguaaag

SEQ ID NO: 589957 - RNA, 19 nt, Homo sapiens
  misc_RNA (1)...(19): siRNA sense strand
gaccaaauuugauaagauc

SEQ ID NO: 589958 - RNA, 19 nt, Homo sapiens
  misc_RNA (1)...(19): siRNA sense strand
gcuaaagaguacagauuau

SEQ ID NO: 589959 - RNA, 19 nt, Homo sapiens
  misc_RNA (1)...(19): siRNA sense strand
ccagucaccucaacaaugu

SEQ ID NO: 589960 - RNA, 19 nt, Homo sapiens
  misc_RNA (1)...(19): siRNA sense strand
ugccaaagaugcuaucaaa

SEQ ID NO: 589961 - RNA, 19 nt, Homo sapiens
  misc_RNA (1)...(19): siRNA sense strand
gagcugaacaaccuaauug

SEQ ID NO: 589962 - RNA, 19 nt, Homo sapiens
  misc_RNA (1)...(19): siRNA sense strand
gaaaguagcaaaugaaagc

SEQ ID NO: 589963 - RNA, 19 nt, Homo sapiens
  misc_RNA (1)...(19): siRNA sense strand
ggacccugcuucuuuccua

SEQ ID NO: 589964 - RNA, 19 nt, Homo sapiens
  misc_RNA (1)...(19): siRNA sense strand
gggcuaacauccagucaau

SEQ ID NO: 589965 - RNA, 19 nt, Homo sapiens
  misc_RNA (1)...(19): siRNA sense strand
ggagaaaguagcaaaugaa

SEQ ID NO: 589966 - RNA, 19 nt, Homo sapiens
  misc_RNA (1)...(19): siRNA sense strand
ugaacaaccuaauugcauu

SEQ ID NO: 589967 - RNA, 19 nt, Homo sapiens
  misc_RNA (1)...(19): siRNA sense strand
ucagucaucuucccuguug

SEQ ID NO: 589968 - RNA, 19 nt, Homo sapiens
  misc_RNA (1)...(19): siRNA sense strand
ggaaaugcuccaaagugua

SEQ ID NO: 589969 - RNA, 19 nt, Homo sapiens
  misc_RNA (1)...(19): siRNA sense strand
gaucugguguuacaaugga

SEQ ID NO: 589970 - RNA, 19 nt, Homo sapiens
  misc_RNA (1)...(19): siRNA sense strand
gggaggaggaaguaaguua

SEQ ID NO: 589971 - RNA, 19 nt, Homo sapiens
  misc_RNA (1)...(19): siRNA sense strand
gagaaaguagcaaaugaaa

SEQ ID NO: 589972 - RNA, 19 nt, Homo sapiens
  misc_RNA (1)...(19): siRNA sense strand
gaaggacuaacaaagaauu

SEQ ID NO: 589973 - RNA, 19 nt, Homo sapiens
  misc_RNA (1)...(19): siRNA sense strand
aaggagaucuugcuucuuc

SEQ ID NO: 589974 - RNA, 19 nt, Homo sapiens
  misc_RNA (1)...(19): siRNA sense strand
gacaggaccaaauuugaua

SEQ ID NO: 589975 - RNA, 19 nt, Homo sapiens
  misc_RNA (1)...(19): siRNA sense strand
ggaaggcugugaauaugca

SEQ ID NO: 589976 - RNA, 19 nt, Homo sapiens
  misc_RNA (1)...(19): siRNA sense strand
gauaaccucuacaagaaag

SEQ ID NO: 589977 - RNA, 19 nt, Homo sapiens
  misc_RNA (1)...(19): siRNA sense strand
caacuugcauuuaacaaac

SEQ ID NO: 589978 - RNA, 19 nt, Homo sapiens
  misc_RNA (1)...(19): siRNA sense strand
gaaaaucucaugucuagaa

SEQ ID NO: 589979 - RNA, 19 nt, Homo sapiens
  misc_RNA (1)...(19): siRNA sense strand
ggaccuggauggaggaaca

SEQ ID NO: 589980 - RNA, 19 nt, Homo sapiens
  misc_RNA (1)...(19): siRNA sense strand
aaacaugucugccucugau

SEQ ID NO: 589981 - RNA, 19 nt, Homo sapiens
  misc_RNA (1)...(19): siRNA sense strand
caagaugacuggcacaacu

SEQ ID NO: 589982 - RNA, 19 nt, Homo sapiens
  misc_RNA (1)...(19): siRNA sense strand
ugaaagcaaccaccuaauu

SEQ ID NO: 589983 - RNA, 19 nt, Homo sapiens
  misc_RNA (1)...(19): siRNA sense strand
agaguuaaaugcaagagaa

SEQ ID NO: 589984 - RNA, 19 nt, Homo sapiens
  misc_RNA (1)...(19): siRNA sense strand
gcaaaugaaagccagaaga

SEQ ID NO: 589985 - RNA, 19 nt, Homo sapiens
  misc_RNA (1)...(19): siRNA sense strand
ucagaggaguauuuguuaa

SEQ ID NO: 589986 - RNA, 19 nt, Homo sapiens
  misc_RNA (1)...(19): siRNA sense strand
ggcuaaagaguacagauua

SEQ ID NO: 589987 - RNA, 19 nt, Homo sapiens
  misc_RNA (1)...(19): siRNA sense strand
gcggaagccuuugcagaaa

SEQ ID NO: 589988 - RNA, 19 nt, Homo sapiens
  misc_RNA (1)...(19): siRNA sense strand
caaacaagaacuucguaaa

SEQ ID NO: 589989 - RNA, 19 nt, Homo sapiens
  misc_RNA (1)...(19): siRNA sense strand
ccaaauaaggcaaauggaa

SEQ ID NO: 589990 - RNA, 19 nt, Homo sapiens
  misc_RNA (1)...(19): siRNA sense strand
caaaguaugccuggaacua

SEQ ID NO: 589991 - RNA, 19 nt, Homo sapiens
  misc_RNA (1)...(19): siRNA sense strand
gaacagguacuaagugaac

SEQ ID NO: 589992 - RNA, 19 nt, Homo sapiens
  misc_RNA (1)...(19): siRNA sense strand
caggauaucgaaauaauga

SEQ ID NO: 589993 - RNA, 19 nt, Homo sapiens
  misc_RNA (1)...(19): siRNA sense strand
uauaagcacuuugaagguu

SEQ ID NO: 589994 - RNA, 19 nt, Homo sapiens
  misc_RNA (1)...(19): siRNA sense strand
gcaaccaccuaauucaucu

SEQ ID NO: 589995 - RNA, 19 nt, Homo sapiens
  misc_RNA (1)...(19): siRNA sense strand
gcucacagcuuuuggaaga

SEQ ID NO: 589996 - RNA, 19 nt, Homo sapiens
  misc_RNA (1)...(19): siRNA sense strand
gauuauuguuccagcauug

SEQ ID NO: 589997 - RNA, 19 nt, Homo sapiens
  misc_RNA (1)...(19): siRNA sense strand
uuugauagcucgcuguuau

SEQ ID NO: 589998 - RNA, 19 nt, Homo sapiens
  misc_RNA (1)...(19): siRNA sense strand
gaggaguauuuguuaaugu

SEQ ID NO: 589999 - RNA, 19 nt, Homo sapiens
  misc_RNA (1)...(19): siRNA sense strand
aaagaaagcaagaaguuug

SEQ ID NO: 590000 - RNA, 19 nt, Homo sapiens
  misc_RNA (1)...(19): siRNA sense strand
gaggaaaugcuccaaagug

SEQ ID NO: 590001 - RNA, 19 nt, Homo sapiens
  misc_RNA (1)...(19): siRNA sense strand
gagcaguuaugaggaaaug

SEQ ID NO: 590002 - RNA, 19 nt, Homo sapiens
  misc_RNA (1)...(19): siRNA sense strand
gagaagaacaggauaucga

SEQ ID NO: 590003 - RNA, 19 nt, Homo sapiens
  misc_RNA (1)...(19): siRNA sense strand
gcuaacauccagucaauca

SEQ ID NO: 590004 - RNA, 19 nt, Homo sapiens
  misc_RNA (1)...(19): siRNA sense strand
uggagaaaguagcaaauga

SEQ ID NO: 590005 - RNA, 19 nt, Homo sapiens
  misc_RNA (1)...(19): siRNA sense strand
gcagaacaggacuucauaa

SEQ ID NO: 590006 - RNA, 19 nt, Homo sapiens
  misc_RNA (1)...(19): siRNA sense strand
cuaaagaaagcaagaaguu

SEQ ID NO: 590007 - RNA, 19 nt, Homo sapiens
  misc_RNA (1)...(19): siRNA sense strand
gauuauuuaucccgacuau

SEQ ID NO: 590008 - RNA, 19 nt, Homo sapiens
  misc_RNA (1)...(19): siRNA sense strand
aaucaagcaugcauuacaa

SEQ ID NO: 590009 - RNA, 19 nt, Homo sapiens
  misc_RNA (1)...(19): siRNA sense strand
uucaggacauucuggauua

SEQ ID NO: 590010 - RNA, 19 nt, Homo sapiens
  misc_RNA (1)...(19): siRNA sense strand
cuaaauaagcucaguguuc

SEQ ID NO: 590011 - RNA, 19 nt, Homo sapiens
  misc_RNA (1)...(19): siRNA sense strand
auagagauuugcuccgaua

SEQ ID NO: 590012 - RNA, 19 nt, Homo sapiens
  misc_RNA (1)...(19): siRNA sense strand
caucauccauuucauagag

SEQ ID NO: 590013 - RNA, 19 nt, Homo sapiens
  misc_RNA (1)...(19): siRNA sense strand
agaugaauaccaagaguua

SEQ ID NO: 590014 - RNA, 19 nt, Homo sapiens
  misc_RNA (1)...(19): siRNA sense strand
ugaagaauuugcuggacuu

SEQ ID NO: 590015 - RNA, 19 nt, Homo sapiens
  misc_RNA (1)...(19): siRNA sense strand
uuaacuggaucuacuucua

SEQ ID NO: 590016 - RNA, 19 nt, Homo sapiens
  misc_RNA (1)...(19): siRNA sense strand
ugaugaaauugcuagauga

SEQ ID NO: 590017 - RNA, 19 nt, Homo sapiens
  misc_RNA (1)...(19): siRNA sense strand
gaagaacaggauaucgaaa

SEQ ID NO: 590018 - RNA, 19 nt, Homo sapiens
  misc_RNA (1)...(19): siRNA sense strand
gcaagagaagaacaggaua

SEQ ID NO: 590019 - RNA, 19 nt, Homo sapiens
  misc_RNA (1)...(19): siRNA sense strand
gauaaagcauacaccaaac

SEQ ID NO: 590020 - RNA, 19 nt, Homo sapiens
  misc_RNA (1)...(19): siRNA sense strand
caaaugcauuaguaaccaa

SEQ ID NO: 590021 - RNA, 19 nt, Homo sapiens
  misc_RNA (1)...(19): siRNA sense strand
ggauuauuguuccagcauu

SEQ ID NO: 590022 - RNA, 19 nt, Homo sapiens
  misc_RNA (1)...(19): siRNA sense strand
ggaagcagauuacugguuu

SEQ ID NO: 590023 - RNA, 19 nt, Homo sapiens
  misc_RNA (1)...(19): siRNA sense strand
gcagauuacugguuuauga

SEQ ID NO: 590024 - RNA, 19 nt, Homo sapiens
  misc_RNA (1)...(19): siRNA sense strand
gagcagaaaguucggauua

SEQ ID NO: 590025 - RNA, 19 nt, Homo sapiens
  misc_RNA (1)...(19): siRNA sense strand
gcagaaaguucggauuaaa

SEQ ID NO: 590026 - RNA, 19 nt, Homo sapiens
  misc_RNA (1)...(19): siRNA sense strand
guacaucccugccagauuc

SEQ ID NO: 590027 - RNA, 19 nt, Homo sapiens
  misc_RNA (1)...(19): siRNA sense strand
gaagaugggugaccucaag

SEQ ID NO: 590028 - RNA, 19 nt, Homo sapiens
  misc_RNA (1)...(19): siRNA sense strand
gaaaccggauuccaacuau

SEQ ID NO: 590029 - RNA, 19 nt, Homo sapiens
  misc_RNA (1)...(19): siRNA sense strand
caaggaagccuaccagauu

SEQ ID NO: 590030 - RNA, 19 nt, Homo sapiens
  misc_RNA (1)...(19): siRNA sense strand
gagagcagguuuaaugaug

SEQ ID NO: 590031 - RNA, 19 nt, Homo sapiens
  misc_RNA (1)...(19): siRNA sense strand
gggcaucucuaaagugaaa

SEQ ID NO: 590032 - RNA, 19 nt, Homo sapiens
  misc_RNA (1)...(19): siRNA sense strand
uacaagaccuccgauauuu

SEQ ID NO: 590033 - RNA, 19 nt, Homo sapiens
  misc_RNA (1)...(19): siRNA sense strand
guacaagaccuccgauauu

SEQ ID NO: 590034 - RNA, 19 nt, Homo sapiens
  misc_RNA (1)...(19): siRNA sense strand
gaagcagauuacugguuua

SEQ ID NO: 590035 - RNA, 19 nt, Homo sapiens
  misc_RNA (1)...(19): siRNA sense strand
ugagaagcauccugaguuu

SEQ ID NO: 590036 - RNA, 19 nt, Homo sapiens
  misc_RNA (1)...(19): siRNA sense strand
gaaacaaagaugcuaauca

SEQ ID NO: 590037 - RNA, 19 nt, Homo sapiens
  misc_RNA (1)...(19): siRNA sense strand
gaaccucgcgcuugaaaug

SEQ ID NO: 590038 - RNA, 19 nt, Homo sapiens
  misc_RNA (1)...(19): siRNA sense strand
ugauggaacucaacugauu

SEQ ID NO: 590039 - RNA, 19 nt, Homo sapiens
  misc_RNA (1)...(19): siRNA sense strand
gaaaggaucgggcacugaa

SEQ ID NO: 590040 - RNA, 19 nt, Homo sapiens
  misc_RNA (1)...(19): siRNA sense strand
uggagucucucauucguua

SEQ ID NO: 590041 - RNA, 19 nt, Homo sapiens
  misc_RNA (1)...(19): siRNA sense strand
ggaugacccuggcccauga

SEQ ID NO: 590042 - RNA, 19 nt, Homo sapiens
  misc_RNA (1)...(19): siRNA sense strand
gcuagaagguuuagauuuu

SEQ ID NO: 590043 - RNA, 19 nt, Homo sapiens
  misc_RNA (1)...(19): siRNA sense strand
caaagaugcuaaucaccaa

SEQ ID NO: 590044 - RNA, 19 nt, Homo sapiens
  misc_RNA (1)...(19): siRNA sense strand
gcugagaccuaccugaaga

SEQ ID NO: 590045 - RNA, 19 nt, Homo sapiens
  misc_RNA (1)...(19): siRNA sense strand
ggacaaaugauggucagua

SEQ ID NO: 590046 - RNA, 19 nt, Homo sapiens
  misc_RNA (1)...(19): siRNA sense strand
aggagaagauuaucaagaa

SEQ ID NO: 590047 - RNA, 19 nt, Homo sapiens
  misc_RNA (1)...(19): siRNA sense strand
gccgagcacuguauaaaug

SEQ ID NO: 590048 - RNA, 19 nt, Homo sapiens
  misc_RNA (1)...(19): siRNA sense strand
gaaaacagauuggaaagga

SEQ ID NO: 590049 - RNA, 19 nt, Homo sapiens
  misc_RNA (1)...(19): siRNA sense strand
gcagauggagucucucauu

SEQ ID NO: 590050 - RNA, 19 nt, Homo sapiens
  misc_RNA (1)...(19): siRNA sense strand
gcggagagcagguuuaaug

SEQ ID NO: 590051 - RNA, 19 nt, Homo sapiens
  misc_RNA (1)...(19): siRNA sense strand
gcagagcuguaccaugguu

SEQ ID NO: 590052 - RNA, 19 nt, Homo sapiens
  misc_RNA (1)...(19): siRNA sense strand
gggaugaggccuuugcuuu

SEQ ID NO: 590053 - RNA, 19 nt, Homo sapiens
  misc_RNA (1)...(19): siRNA sense strand
uggaagcgcuagaagguuu

SEQ ID NO: 590054 - RNA, 19 nt, Homo sapiens
  misc_RNA (1)...(19): siRNA sense strand
aaacaaagaugcuaaucac

SEQ ID NO: 590055 - RNA, 19 nt, Homo sapiens
  misc_RNA (1)...(19): siRNA sense strand
ucagaggacuuaucagaca

SEQ ID NO: 590056 - RNA, 19 nt, Homo sapiens
  misc_RNA (1)...(19): siRNA sense strand
gcaguccgcucccauguac

SEQ ID NO: 590057 - RNA, 19 nt, Homo sapiens
  misc_RNA (1)...(19): siRNA sense strand
agaagcauccugaguuuaa

SEQ ID NO: 590058 - RNA, 19 nt, Homo sapiens
  misc_RNA (1)...(19): siRNA sense strand
cuccaugucuucuccauuu

SEQ ID NO: 590059 - RNA, 19 nt, Homo sapiens
  misc_RNA (1)...(19): siRNA sense strand
gcagagaacgaucgcuuug

SEQ ID NO: 590060 - RNA, 19 nt, Homo sapiens
  misc_RNA (1)...(19): siRNA sense strand
auaggaaacuguucaagga

SEQ ID NO: 590061 - RNA, 19 nt, Homo sapiens
  misc_RNA (1)...(19): siRNA sense strand
gacaagcaaguaucucuuu

SEQ ID NO: 590062 - RNA, 19 nt, Homo sapiens
  misc_RNA (1)...(19): siRNA sense strand
aacaacagcucccagauuc

SEQ ID NO: 590063 - RNA, 19 nt, Homo sapiens
  misc_RNA (1)...(19): siRNA sense strand
ggaugaggccuuugcuuug

SEQ ID NO: 590064 - RNA, 19 nt, Homo sapiens
  misc_RNA (1)...(19): siRNA sense strand
gaccauggcuggguugaca

SEQ ID NO: 590065 - RNA, 19 nt, Homo sapiens
  misc_RNA (1)...(19): siRNA sense strand
ucuaugaguuguauucaga

SEQ ID NO: 590066 - RNA, 19 nt, Homo sapiens
  misc_RNA (1)...(19): siRNA sense strand
guguugacguggagagaua

SEQ ID NO: 590067 - RNA, 19 nt, Homo sapiens
  misc_RNA (1)...(19): siRNA sense strand
gcacaguccaugggcuuua

SEQ ID NO: 590068 - RNA, 19 nt, Homo sapiens
  misc_RNA (1)...(19): siRNA sense strand
ggacuuaucagacaugcau

SEQ ID NO: 590069 - RNA, 19 nt, Homo sapiens
  misc_RNA (1)...(19): siRNA sense strand
gacaaaugauggucaguac

SEQ ID NO: 590070 - RNA, 19 nt, Homo sapiens
  misc_RNA (1)...(19): siRNA sense strand
gaggacccguucacagcua

SEQ ID NO: 590071 - RNA, 19 nt, Homo sapiens
  misc_RNA (1)...(19): siRNA sense strand
aaacaacagcucccagauu

SEQ ID NO: 590072 - RNA, 19 nt, Homo sapiens
  misc_RNA (1)...(19): siRNA sense strand
ugacagacagcuagagauu

SEQ ID NO: 590073 - RNA, 19 nt, Homo sapiens
  misc_RNA (1)...(19): siRNA sense strand
gaacgaucgcuuugaggaa

SEQ ID NO: 590074 - RNA, 19 nt, Homo sapiens
  misc_RNA (1)...(19): siRNA sense strand
ggagaagauuaucaagaag

SEQ ID NO: 590075 - RNA, 19 nt, Homo sapiens
  misc_RNA (1)...(19): siRNA sense strand
gagcucaucagcagcauug

SEQ ID NO: 590076 - RNA, 19 nt, Homo sapiens
  misc_RNA (1)...(19): siRNA sense strand
uacaauggcuccaagaucu

SEQ ID NO: 590077 - RNA, 19 nt, Homo sapiens
  misc_RNA (1)...(19): siRNA sense strand
ugcaucagcuacuuuacua

SEQ ID NO: 590078 - RNA, 19 nt, Homo sapiens
  misc_RNA (1)...(19): siRNA sense strand
gagaagcauccugaguuua

SEQ ID NO: 590079 - RNA, 19 nt, Homo sapiens
  misc_RNA (1)...(19): siRNA sense strand
gagaaccucgcgcuugaaa

SEQ ID NO: 590080 - RNA, 19 nt, Homo sapiens
  misc_RNA (1)...(19): siRNA sense strand
gauaaagccgagcacugua

SEQ ID NO: 590081 - RNA, 19 nt, Homo sapiens
  misc_RNA (1)...(19): siRNA sense strand
gacaaucucuuugcuaucg

SEQ ID NO: 590082 - RNA, 19 nt, Homo sapiens
  misc_RNA (1)...(19): siRNA sense strand
cagauggagucucucauuc

SEQ ID NO: 590083 - RNA, 19 nt, Homo sapiens
  misc_RNA (1)...(19): siRNA sense strand
ccagaaagcguuccacaag

SEQ ID NO: 590084 - RNA, 19 nt, Homo sapiens
  misc_RNA (1)...(19): siRNA sense strand
gcgcugggaugaggccuuu

SEQ ID NO: 590085 - RNA, 19 nt, Homo sapiens
  misc_RNA (1)...(19): siRNA sense strand
caaagaaacaaagaugcua

SEQ ID NO: 590086 - RNA, 19 nt, Homo sapiens
  misc_RNA (1)...(19): siRNA sense strand
gcugaagaauggacagauc

SEQ ID NO: 590087 - RNA, 19 nt, Homo sapiens
  misc_RNA (1)...(19): siRNA sense strand
cgaaaccggauuccaacua

SEQ ID NO: 590088 - RNA, 19 nt, Homo sapiens
  misc_RNA (1)...(19): siRNA sense strand
gaugaggccuuugcuuugg

SEQ ID NO: 590089 - RNA, 19 nt, Homo sapiens
  misc_RNA (1)...(19): siRNA sense strand
caagaccuccgauauuuag

SEQ ID NO: 590090 - RNA, 19 nt, Homo sapiens
  misc_RNA (1)...(19): siRNA sense strand
uggacaaucucuuugcuau

SEQ ID NO: 590091 - RNA, 19 nt, Homo sapiens
  misc_RNA (1)...(19): siRNA sense strand
agaagucugucuccaaaca

SEQ ID NO: 590092 - RNA, 19 nt, Homo sapiens
  misc_RNA (1)...(19): siRNA sense strand
gauggaacucaacugauuu

SEQ ID NO: 590093 - RNA, 19 nt, Homo sapiens
  misc_RNA (1)...(19): siRNA sense strand
gugagaagcauccugaguu

SEQ ID NO: 590094 - RNA, 19 nt, Homo sapiens
  misc_RNA (1)...(19): siRNA sense strand
acaagaccuccgauauuua

SEQ ID NO: 590095 - RNA, 19 nt, Homo sapiens
  misc_RNA (1)...(19): siRNA sense strand
guaaaggagaagauuauca

SEQ ID NO: 590096 - RNA, 19 nt, Homo sapiens
  misc_RNA (1)...(19): siRNA sense strand
ucaaugggaucaucagcau

SEQ ID NO: 590097 - RNA, 19 nt, Homo sapiens
  misc_RNA (1)...(19): siRNA sense strand
ccacgacagugaggaguug

SEQ ID NO: 590098 - RNA, 19 nt, Homo sapiens
  misc_RNA (1)...(19): siRNA sense strand
gcaagguggcucagaguuc

SEQ ID NO: 590099 - RNA, 19 nt, Homo sapiens
  misc_RNA (1)...(19): siRNA sense strand
uccaugggcuuuacaagga

SEQ ID NO: 590100 - RNA, 19 nt, Homo sapiens
  misc_RNA (1)...(19): siRNA sense strand
gaugacagacagcuagaga

SEQ ID NO: 590101 - RNA, 19 nt, Homo sapiens
  misc_RNA (1)...(19): siRNA sense strand
ucgggcaucucuaaaguga

SEQ ID NO: 590102 - RNA, 19 nt, Homo sapiens
  misc_RNA (1)...(19): siRNA sense strand
uaaagccgagcacuguaua

SEQ ID NO: 590103 - RNA, 19 nt, Homo sapiens
  misc_RNA (1)...(19): siRNA sense strand
gugaggacaugcucugcuu

SEQ ID NO: 590104 - RNA, 19 nt, Homo sapiens
  misc_RNA (1)...(19): siRNA sense strand
ggguaaaggagaagauuau

SEQ ID NO: 590105 - RNA, 19 nt, Homo sapiens
  misc_RNA (1)...(19): siRNA sense strand
ccugaucacugagcagaaa

SEQ ID NO: 590106 - RNA, 19 nt, Homo sapiens
  misc_RNA (1)...(19): siRNA sense strand
gaaaucgauuggcuaucca

SEQ ID NO: 590107 - RNA, 19 nt, Homo sapiens
  misc_RNA (1)...(19): siRNA sense strand
ggaagcgcuagaagguuua

SEQ ID NO: 590108 - RNA, 19 nt, Homo sapiens
  misc_RNA (1)...(19): siRNA sense strand
ggcgugaacuggccaugga

SEQ ID NO: 590109 - RNA, 19 nt, Homo sapiens
  misc_RNA (1)...(19): siRNA sense strand
aaggaagccuaccagauug

SEQ ID NO: 590110 - RNA, 19 nt, Homo sapiens
  misc_RNA (1)...(19): siRNA sense strand
gagaagauuaucaagaagu

SEQ ID NO: 590111 - RNA, 19 nt, Homo sapiens
  misc_RNA (1)...(19): siRNA sense strand
gagaaaauccucaucuaug

SEQ ID NO: 590112 - RNA, 19 nt, Homo sapiens
  misc_RNA (1)...(19): siRNA sense strand
acaacccgcugcucaacaa

SEQ ID NO: 590113 - RNA, 19 nt, Homo sapiens
  misc_RNA (1)...(19): siRNA sense strand
gauggagucucucauucgu

SEQ ID NO: 590114 - RNA, 19 nt, Homo sapiens
  misc_RNA (1)...(19): siRNA sense strand
ggaaaggaucgggcacuga

SEQ ID NO: 590115 - RNA, 19 nt, Homo sapiens
  misc_RNA (1)...(19): siRNA sense strand
gaucgggcacugaacuuug

SEQ ID NO: 590116 - RNA, 19 nt, Homo sapiens
  misc_RNA (1)...(19): siRNA sense strand
agaaaguucggauuaaaug

SEQ ID NO: 590117 - RNA, 19 nt, Homo sapiens
  misc_RNA (1)...(19): siRNA sense strand
gaagcauccugaguuuaag

SEQ ID NO: 590118 - RNA, 19 nt, Homo sapiens
  misc_RNA (1)...(19): siRNA sense strand
caccucugauggcaccuua

SEQ ID NO: 590119 - RNA, 19 nt, Homo sapiens
  misc_RNA (1)...(19): siRNA sense strand
uguaugacaucgacaccaa

SEQ ID NO: 590120 - RNA, 19 nt, Homo sapiens
  misc_RNA (1)...(19): siRNA sense strand
gaagcuggccgugguagau

SEQ ID NO: 590121 - RNA, 19 nt, Homo sapiens
  misc_RNA (1)...(19): siRNA sense strand
cuaccuaccucaagaagcu

SEQ ID NO: 590122 - RNA, 19 nt, Homo sapiens
  misc_RNA (1)...(19): siRNA sense strand
ggaagcagauuacugguuu

SEQ ID NO: 590123 - RNA, 19 nt, Homo sapiens
  misc_RNA (1)...(19): siRNA sense strand
gcagauuacugguuuauga

SEQ ID NO: 590124 - RNA, 19 nt, Homo sapiens
  misc_RNA (1)...(19): siRNA sense strand
gagcagaaaguucggauua

SEQ ID NO: 590125 - RNA, 19 nt, Homo sapiens
  misc_RNA (1)...(19): siRNA sense strand
gcagaaaguucggauuaaa

SEQ ID NO: 590126 - RNA, 19 nt, Homo sapiens
  misc_RNA (1)...(19): siRNA sense strand
guacaucccugccagauuc

SEQ ID NO: 590127 - RNA, 19 nt, Homo sapiens
  misc_RNA (1)...(19): siRNA sense strand
gaagaugggugaccucaag

SEQ ID NO: 590128 - RNA, 19 nt, Homo sapiens
  misc_RNA (1)...(19): siRNA sense strand
gaaaccggauuccaacuau

SEQ ID NO: 590129 - RNA, 19 nt, Homo sapiens
  misc_RNA (1)...(19): siRNA sense strand
caaggaagccuaccagauu

SEQ ID NO: 590130 - RNA, 19 nt, Homo sapiens
  misc_RNA (1)...(19): siRNA sense strand
gagagcagguuuaaugaug

SEQ ID NO: 590131 - RNA, 19 nt, Homo sapiens
  misc_RNA (1)...(19): siRNA sense strand
gggcaucucuaaagugaaa

SEQ ID NO: 590132 - RNA, 19 nt, Homo sapiens
  misc_RNA (1)...(19): siRNA sense strand
uacaagaccuccgauauuu

SEQ ID NO: 590133 - RNA, 19 nt, Homo sapiens
  misc_RNA (1)...(19): siRNA sense strand
guacaagaccuccgauauu

SEQ ID NO: 590134 - RNA, 19 nt, Homo sapiens
  misc_RNA (1)...(19): siRNA sense strand
gaagcagauuacugguuua

SEQ ID NO: 590135 - RNA, 19 nt, Homo sapiens
  misc_RNA (1)...(19): siRNA sense strand
ugagaagcauccugaguuu

SEQ ID NO: 590136 - RNA, 19 nt, Homo sapiens
  misc_RNA (1)...(19): siRNA sense strand
gaaacaaagaugcuaauca

SEQ ID NO: 590137 - RNA, 19 nt, Homo sapiens
  misc_RNA (1)...(19): siRNA sense strand
gaaccucgcgcuugaaaug

SEQ ID NO: 590138 - RNA, 19 nt, Homo sapiens
  misc_RNA (1)...(19): siRNA sense strand
ugauggaacucaacugauu

SEQ ID NO: 590139 - RNA, 19 nt, Homo sapiens
  misc_RNA (1)...(19): siRNA sense strand
gaaaggaucgggcacugaa

SEQ ID NO: 590140 - RNA, 19 nt, Homo sapiens
  misc_RNA (1)...(19): siRNA sense strand
uggagucucucauucguua

SEQ ID NO: 590141 - RNA, 19 nt, Homo sapiens
  misc_RNA (1)...(19): siRNA sense strand
ggaugacccuggcccauga

SEQ ID NO: 590142 - RNA, 19 nt, Homo sapiens
  misc_RNA (1)...(19): siRNA sense strand
gcuagaagguuuagauuuu

SEQ ID NO: 590143 - RNA, 19 nt, Homo sapiens
  misc_RNA (1)...(19): siRNA sense strand
caaagaugcuaaucaccaa

SEQ ID NO: 590144 - RNA, 19 nt, Homo sapiens
  misc_RNA (1)...(19): siRNA sense strand
gcugagaccuaccugaaga

SEQ ID NO: 590145 - RNA, 19 nt, Homo sapiens
  misc_RNA (1)...(19): siRNA sense strand
ggacaaaugauggucagua

SEQ ID NO: 590146 - RNA, 19 nt, Homo sapiens
  misc_RNA (1)...(19): siRNA sense strand
aggagaagauuaucaagaa

SEQ ID NO: 590147 - RNA, 19 nt, Homo sapiens
  misc_RNA (1)...(19): siRNA sense strand
gccgagcacuguauaaaug

SEQ ID NO: 590148 - RNA, 19 nt, Homo sapiens
  misc_RNA (1)...(19): siRNA sense strand
gaaaacagauuggaaagga

SEQ ID NO: 590149 - RNA, 19 nt, Homo sapiens
  misc_RNA (1)...(19): siRNA sense strand
gcagauggagucucucauu

SEQ ID NO: 590150 - RNA, 19 nt, Homo sapiens
  misc_RNA (1)...(19): siRNA sense strand
gcggagagcagguuuaaug

SEQ ID NO: 590151 - RNA, 19 nt, Homo sapiens
  misc_RNA (1)...(19): siRNA sense strand
gcagagcuguaccaugguu

SEQ ID NO: 590152 - RNA, 19 nt, Homo sapiens
  misc_RNA (1)...(19): siRNA sense strand
gggaugaggccuuugcuuu

SEQ ID NO: 590153 - RNA, 19 nt, Homo sapiens
  misc_RNA (1)...(19): siRNA sense strand
uggaagcgcuagaagguuu

SEQ ID NO: 590154 - RNA, 19 nt, Homo sapiens
  misc_RNA (1)...(19): siRNA sense strand
aaacaaagaugcuaaucac

SEQ ID NO: 590155 - RNA, 19 nt, Homo sapiens
  misc_RNA (1)...(19): siRNA sense strand
ucagaggacuuaucagaca

SEQ ID NO: 590156 - RNA, 19 nt, Homo sapiens
  misc_RNA (1)...(19): siRNA sense strand
gcaguccgcucccauguac

SEQ ID NO: 590157 - RNA, 19 nt, Homo sapiens
  misc_RNA (1)...(19): siRNA sense strand
agaagcauccugaguuuaa

SEQ ID NO: 590158 - RNA, 19 nt, Homo sapiens
  misc_RNA (1)...(19): siRNA sense strand
cuccaugucuucuccauuu

SEQ ID NO: 590159 - RNA, 19 nt, Homo sapiens
  misc_RNA (1)...(19): siRNA sense strand
gcagagaacgaucgcuuug

SEQ ID NO: 590160 - RNA, 19 nt, Homo sapiens
  misc_RNA (1)...(19): siRNA sense strand
auaggaaacuguucaagga

SEQ ID NO: 590161 - RNA, 19 nt, Homo sapiens
  misc_RNA (1)...(19): siRNA sense strand
gacaagcaaguaucucuuu

SEQ ID NO: 590162 - RNA, 19 nt, Homo sapiens
  misc_RNA (1)...(19): siRNA sense strand
aacaacagcucccagauuc

SEQ ID NO: 590163 - RNA, 19 nt, Homo sapiens
  misc_RNA (1)...(19): siRNA sense strand
ggaugaggccuuugcuuug

SEQ ID NO: 590164 - RNA, 19 nt, Homo sapiens
  misc_RNA (1)...(19): siRNA sense strand
gaccauggcuggguugaca

SEQ ID NO: 590165 - RNA, 19 nt, Homo sapiens
  misc_RNA (1)...(19): siRNA sense strand
ucuaugaguuguauucaga

SEQ ID NO: 590166 - RNA, 19 nt, Homo sapiens
  misc_RNA (1)...(19): siRNA sense strand
guguugacguggagagaua

SEQ ID NO: 590167 - RNA, 19 nt, Homo sapiens
  misc_RNA (1)...(19): siRNA sense strand
gcacaguccaugggcuuua

SEQ ID NO: 590168 - RNA, 19 nt, Homo sapiens
  misc_RNA (1)...(19): siRNA sense strand
ggacuuaucagacaugcau

SEQ ID NO: 590169 - RNA, 19 nt, Homo sapiens
  misc_RNA (1)...(19): siRNA sense strand
gacaaaugauggucaguac

SEQ ID NO: 590170 - RNA, 19 nt, Homo sapiens
  misc_RNA (1)...(19): siRNA sense strand
gaggacccguucacagcua

SEQ ID NO: 590171 - RNA, 19 nt, Homo sapiens
  misc_RNA (1)...(19): siRNA sense strand
aaacaacagcucccagauu

SEQ ID NO: 590172 - RNA, 19 nt, Homo sapiens
  misc_RNA (1)...(19): siRNA sense strand
ugacagacagcuagagauu

SEQ ID NO: 590173 - RNA, 19 nt, Homo sapiens
  misc_RNA (1)...(19): siRNA sense strand
gaacgaucgcuuugaggaa

SEQ ID NO: 590174 - RNA, 19 nt, Homo sapiens
  misc_RNA (1)...(19): siRNA sense strand
ggagaagauuaucaagaag

SEQ ID NO: 590175 - RNA, 19 nt, Homo sapiens
  misc_RNA (1)...(19): siRNA sense strand
gagcucaucagcagcauug

SEQ ID NO: 590176 - RNA, 19 nt, Homo sapiens
  misc_RNA (1)...(19): siRNA sense strand
uacaauggcuccaagaucu

SEQ ID NO: 590177 - RNA, 19 nt, Homo sapiens
  misc_RNA (1)...(19): siRNA sense strand
ugcaucagcuacuuuacua

SEQ ID NO: 590178 - RNA, 19 nt, Homo sapiens
  misc_RNA (1)...(19): siRNA sense strand
gagaagcauccugaguuua

SEQ ID NO: 590179 - RNA, 19 nt, Homo sapiens
  misc_RNA (1)...(19): siRNA sense strand
gagaaccucgcgcuugaaa

SEQ ID NO: 590180 - RNA, 19 nt, Homo sapiens
  misc_RNA (1)...(19): siRNA sense strand
gauaaagccgagcacugua

SEQ ID NO: 590181 - RNA, 19 nt, Homo sapiens
  misc_RNA (1)...(19): siRNA sense strand
gacaaucucuuugcuaucg

SEQ ID NO: 590182 - RNA, 19 nt, Homo sapiens
  misc_RNA (1)...(19): siRNA sense strand
cagauggagucucucauuc

SEQ ID NO: 590183 - RNA, 19 nt, Homo sapiens
  misc_RNA (1)...(19): siRNA sense strand
ccagaaagcguuccacaag

SEQ ID NO: 590184 - RNA, 19 nt, Homo sapiens
  misc_RNA (1)...(19): siRNA sense strand
gcgcugggaugaggccuuu

SEQ ID NO: 590185 - RNA, 19 nt, Homo sapiens
  misc_RNA (1)...(19): siRNA sense strand
caaagaaacaaagaugcua

SEQ ID NO: 590186 - RNA, 19 nt, Homo sapiens
  misc_RNA (1)...(19): siRNA sense strand
gcugaagaauggacagauc

SEQ ID NO: 590187 - RNA, 19 nt, Homo sapiens
  misc_RNA (1)...(19): siRNA sense strand
cgaaaccggauuccaacua

SEQ ID NO: 590188 - RNA, 19 nt, Homo sapiens
  misc_RNA (1)...(19): siRNA sense strand
gaugaggccuuugcuuugg

SEQ ID NO: 590189 - RNA, 19 nt, Homo sapiens
  misc_RNA (1)...(19): siRNA sense strand
caagaccuccgauauuuag

SEQ ID NO: 590190 - RNA, 19 nt, Homo sapiens
  misc_RNA (1)...(19): siRNA sense strand
uggacaaucucuuugcuau

SEQ ID NO: 590191 - RNA, 19 nt, Homo sapiens
  misc_RNA (1)...(19): siRNA sense strand
agaagucugucuccaaaca

SEQ ID NO: 590192 - RNA, 19 nt, Homo sapiens
  misc_RNA (1)...(19): siRNA sense strand
gauggaacucaacugauuu

SEQ ID NO: 590193 - RNA, 19 nt, Homo sapiens
  misc_RNA (1)...(19): siRNA sense strand
gugagaagcauccugaguu

SEQ ID NO: 590194 - RNA, 19 nt, Homo sapiens
  misc_RNA (1)...(19): siRNA sense strand
acaagaccuccgauauuua

SEQ ID NO: 590195 - RNA, 19 nt, Homo sapiens
  misc_RNA (1)...(19): siRNA sense strand
guaaaggagaagauuauca

SEQ ID NO: 590196 - RNA, 19 nt, Homo sapiens
  misc_RNA (1)...(19): siRNA sense strand
ucaaugggaucaucagcau

SEQ ID NO: 590197 - RNA, 19 nt, Homo sapiens
  misc_RNA (1)...(19): siRNA sense strand
ccacgacagugaggaguug

SEQ ID NO: 590198 - RNA, 19 nt, Homo sapiens
  misc_RNA (1)...(19): siRNA sense strand
gcaagguggcucagaguuc

SEQ ID NO: 590199 - RNA, 19 nt, Homo sapiens
  misc_RNA (1)...(19): siRNA sense strand
uccaugggcuuuacaagga

SEQ ID NO: 590200 - RNA, 19 nt, Homo sapiens
  misc_RNA (1)...(19): siRNA sense strand
gaugacagacagcuagaga

SEQ ID NO: 590201 - RNA, 19 nt, Homo sapiens
  misc_RNA (1)...(19): siRNA sense strand
ucgggcaucucuaaaguga

SEQ ID NO: 590202 - RNA, 19 nt, Homo sapiens
  misc_RNA (1)...(19): siRNA sense strand
uaaagccgagcacuguaua

SEQ ID NO: 590203 - RNA, 19 nt, Homo sapiens
  misc_RNA (1)...(19): siRNA sense strand
gugaggacaugcucugcuu

SEQ ID NO: 590204 - RNA, 19 nt, Homo sapiens
  misc_RNA (1)...(19): siRNA sense strand
ggguaaaggagaagauuau

SEQ ID NO: 590205 - RNA, 19 nt, Homo sapiens
  misc_RNA (1)...(19): siRNA sense strand
ccugaucacugagcagaaa

SEQ ID NO: 590206 - RNA, 19 nt, Homo sapiens
  misc_RNA (1)...(19): siRNA sense strand
gaaaucgauuggcuaucca

SEQ ID NO: 590207 - RNA, 19 nt, Homo sapiens
  misc_RNA (1)...(19): siRNA sense strand
ggaagcgcuagaagguuua

SEQ ID NO: 590208 - RNA, 19 nt, Homo sapiens
  misc_RNA (1)...(19): siRNA sense strand
ggcgugaacuggccaugga

SEQ ID NO: 590209 - RNA, 19 nt, Homo sapiens
  misc_RNA (1)...(19): siRNA sense strand
aaggaagccuaccagauug

SEQ ID NO: 590210 - RNA, 19 nt, Homo sapiens
  misc_RNA (1)...(19): siRNA sense strand
gagaagauuaucaagaagu

SEQ ID NO: 590211 - RNA, 19 nt, Homo sapiens
  misc_RNA (1)...(19): siRNA sense strand
gagaaaauccucaucuaug

SEQ ID NO: 590212 - RNA, 19 nt, Homo sapiens
  misc_RNA (1)...(19): siRNA sense strand
acaacccgcugcucaacaa

SEQ ID NO: 590213 - RNA, 19 nt, Homo sapiens
  misc_RNA (1)...(19): siRNA sense strand
gauggagucucucauucgu

SEQ ID NO: 590214 - RNA, 19 nt, Homo sapiens
  misc_RNA (1)...(19): siRNA sense strand
ggaaaggaucgggcacuga

SEQ ID NO: 590215 - RNA, 19 nt, Homo sapiens
  misc_RNA (1)...(19): siRNA sense strand
gaucgggcacugaacuuug

SEQ ID NO: 590216 - RNA, 19 nt, Homo sapiens
  misc_RNA (1)...(19): siRNA sense strand
agaaaguucggauuaaaug

SEQ ID NO: 590217 - RNA, 19 nt, Homo sapiens
  misc_RNA (1)...(19): siRNA sense strand
gaagcauccugaguuuaag

SEQ ID NO: 590218 - RNA, 19 nt, Homo sapiens
  misc_RNA (1)...(19): siRNA sense strand
caccucugauggcaccuua

SEQ ID NO: 590219 - RNA, 19 nt, Homo sapiens
  misc_RNA (1)...(19): siRNA sense strand
uguaugacaucgacaccaa

SEQ ID NO: 590220 - RNA, 19 nt, Homo sapiens
  misc_RNA (1)...(19): siRNA sense strand
gaagcuggccgugguagau

SEQ ID NO: 590221 - RNA, 19 nt, Homo sapiens
  misc_RNA (1)...(19): siRNA sense strand
cuaccuaccucaagaagcu

SEQ ID NO: 590222 - RNA, 19 nt, Homo sapiens
  misc_RNA (1)...(19): siRNA sense strand
ggaagcagauuacugguuu

SEQ ID NO: 590223 - RNA, 19 nt, Homo sapiens
  misc_RNA (1)...(19): siRNA sense strand
gcagauuacugguuuauga

SEQ ID NO: 590224 - RNA, 19 nt, Homo sapiens
  misc_RNA (1)...(19): siRNA sense strand
gagcagaaaguucggauua

SEQ ID NO: 590225 - RNA, 19 nt, Homo sapiens
  misc_RNA (1)...(19): siRNA sense strand
gcagaaaguucggauuaaa

SEQ ID NO: 590226 - RNA, 19 nt, Homo sapiens
  misc_RNA (1)...(19): siRNA sense strand
guacaucccugccagauuc

SEQ ID NO: 590227 - RNA, 19 nt, Homo sapiens
  misc_RNA (1)...(19): siRNA sense strand
gaagaugggugaccucaag

SEQ ID NO: 590228 - RNA, 19 nt, Homo sapiens
  misc_RNA (1)...(19): siRNA sense strand
gaaaccggauuccaacuau

SEQ ID NO: 590229 - RNA, 19 nt, Homo sapiens
  misc_RNA (1)...(19): siRNA sense strand
caaggaagccuaccagauu

SEQ ID NO: 590230 - RNA, 19 nt, Homo sapiens
  misc_RNA (1)...(19): siRNA sense strand
gagagcagguuuaaugaug

SEQ ID NO: 590231 - RNA, 19 nt, Homo sapiens
  misc_RNA (1)...(19): siRNA sense strand
gggcaucucuaaagugaaa

SEQ ID NO: 590232 - RNA, 19 nt, Homo sapiens
  misc_RNA (1)...(19): siRNA sense strand
uacaagaccuccgauauuu

SEQ ID NO: 590233 - RNA, 19 nt, Homo sapiens
  misc_RNA (1)...(19): siRNA sense strand
guacaagaccuccgauauu

SEQ ID NO: 590234 - RNA, 19 nt, Homo sapiens
  misc_RNA (1)...(19): siRNA sense strand
gaagcagauuacugguuua

SEQ ID NO: 590235 - RNA, 19 nt, Homo sapiens
  misc_RNA (1)...(19): siRNA sense strand
ugagaagcauccugaguuu

SEQ ID NO: 590236 - RNA, 19 nt, Homo sapiens
  misc_RNA (1)...(19): siRNA sense strand
gaaacaaagaugcuaauca

SEQ ID NO: 590237 - RNA, 19 nt, Homo sapiens
  misc_RNA (1)...(19): siRNA sense strand
gaaccucgcgcuugaaaug

SEQ ID NO: 590238 - RNA, 19 nt, Homo sapiens
  misc_RNA (1)...(19): siRNA sense strand
ugauggaacucaacugauu

SEQ ID NO: 590239 - RNA, 19 nt, Homo sapiens
  misc_RNA (1)...(19): siRNA sense strand
gaaaggaucgggcacugaa

SEQ ID NO: 590240 - RNA, 19 nt, Homo sapiens
  misc_RNA (1)...(19): siRNA sense strand
uggagucucucauucguua

SEQ ID NO: 590241 - RNA, 19 nt, Homo sapiens
  misc_RNA (1)...(19): siRNA sense strand
ggaugacccuggcccauga

SEQ ID NO: 590242 - RNA, 19 nt, Homo sapiens
  misc_RNA (1)...(19): siRNA sense strand
gcuagaagguuuagauuuu

SEQ ID NO: 590243 - RNA, 19 nt, Homo sapiens
  misc_RNA (1)...(19): siRNA sense strand
caaagaugcuaaucaccaa

SEQ ID NO: 590244 - RNA, 19 nt, Homo sapiens
  misc_RNA (1)...(19): siRNA sense strand
gcugagaccuaccugaaga

SEQ ID NO: 590245 - RNA, 19 nt, Homo sapiens
  misc_RNA (1)...(19): siRNA sense strand
ggacaaaugauggucagua

SEQ ID NO: 590246 - RNA, 19 nt, Homo sapiens
  misc_RNA (1)...(19): siRNA sense strand
aggagaagauuaucaagaa

SEQ ID NO: 590247 - RNA, 19 nt, Homo sapiens
  misc_RNA (1)...(19): siRNA sense strand
gccgagcacuguauaaaug

SEQ ID NO: 590248 - RNA, 19 nt, Homo sapiens
  misc_RNA (1)...(19): siRNA sense strand
gaaaacagauuggaaagga

SEQ ID NO: 590249 - RNA, 19 nt, Homo sapiens
  misc_RNA (1)...(19): siRNA sense strand
gcagauggagucucucauu

SEQ ID NO: 590250 - RNA, 19 nt, Homo sapiens
  misc_RNA (1)...(19): siRNA sense strand
gcggagagcagguuuaaug

SEQ ID NO: 590251 - RNA, 19 nt, Homo sapiens
  misc_RNA (1)...(19): siRNA sense strand
gcagagcuguaccaugguu

SEQ ID NO: 590252 - RNA, 19 nt, Homo sapiens
  misc_RNA (1)...(19): siRNA sense strand
gggaugaggccuuugcuuu

SEQ ID NO: 590253 - RNA, 19 nt, Homo sapiens
  misc_RNA (1)...(19): siRNA sense strand
uggaagcgcuagaagguuu

SEQ ID NO: 590254 - RNA, 19 nt, Homo sapiens
  misc_RNA (1)...(19): siRNA sense strand
aaacaaagaugcuaaucac

SEQ ID NO: 590255 - RNA, 19 nt, Homo sapiens
  misc_RNA (1)...(19): siRNA sense strand
ucagaggacuuaucagaca

SEQ ID NO: 590256 - RNA, 19 nt, Homo sapiens
  misc_RNA (1)...(19): siRNA sense strand
gcaguccgcucccauguac

SEQ ID NO: 590257 - RNA, 19 nt, Homo sapiens
  misc_RNA (1)...(19): siRNA sense strand
agaagcauccugaguuuaa

SEQ ID NO: 590258 - RNA, 19 nt, Homo sapiens
  misc_RNA (1)...(19): siRNA sense strand
cuccaugucuucuccauuu

SEQ ID NO: 590259 - RNA, 19 nt, Homo sapiens
  misc_RNA (1)...(19): siRNA sense strand
gcagagaacgaucgcuuug

SEQ ID NO: 590260 - RNA, 19 nt, Homo sapiens
  misc_RNA (1)...(19): siRNA sense strand
auaggaaacuguucaagga

SEQ ID NO: 590261 - RNA, 19 nt, Homo sapiens
  misc_RNA (1)...(19): siRNA sense strand
gacaagcaaguaucucuuu

SEQ ID NO: 590262 - RNA, 19 nt, Homo sapiens
  misc_RNA (1)...(19): siRNA sense strand
aacaacagcucccagauuc

SEQ ID NO: 590263 - RNA, 19 nt, Homo sapiens
  misc_RNA (1)...(19): siRNA sense strand
ggaugaggccuuugcuuug

SEQ ID NO: 590264 - RNA, 19 nt, Homo sapiens
  misc_RNA (1)...(19): siRNA sense strand
gaccauggcuggguugaca

SEQ ID NO: 590265 - RNA, 19 nt, Homo sapiens
  misc_RNA (1)...(19): siRNA sense strand
ucuaugaguuguauucaga

SEQ ID NO: 590266 - RNA, 19 nt, Homo sapiens
  misc_RNA (1)...(19): siRNA sense strand
guguugacguggagagaua

SEQ ID NO: 590267 - RNA, 19 nt, Homo sapiens
  misc_RNA (1)...(19): siRNA sense strand
gcacaguccaugggcuuua

SEQ ID NO: 590268 - RNA, 19 nt, Homo sapiens
  misc_RNA (1)...(19): siRNA sense strand
ggacuuaucagacaugcau

SEQ ID NO: 590269 - RNA, 19 nt, Homo sapiens
  misc_RNA (1)...(19): siRNA sense strand
gacaaaugauggucaguac

SEQ ID NO: 590270 - RNA, 19 nt, Homo sapiens
  misc_RNA (1)...(19): siRNA sense strand
gaggacccguucacagcua

SEQ ID NO: 590271 - RNA, 19 nt, Homo sapiens
  misc_RNA (1)...(19): siRNA sense strand
aaacaacagcucccagauu

SEQ ID NO: 590272 - RNA, 19 nt, Homo sapiens
  misc_RNA (1)...(19): siRNA sense strand
ugacagacagcuagagauu

SEQ ID NO: 590273 - RNA, 19 nt, Homo sapiens
  misc_RNA (1)...(19): siRNA sense strand
gaacgaucgcuuugaggaa

SEQ ID NO: 590274 - RNA, 19 nt, Homo sapiens
  misc_RNA (1)...(19): siRNA sense strand
ggagaagauuaucaagaag

SEQ ID NO: 590275 - RNA, 19 nt, Homo sapiens
  misc_RNA (1)...(19): siRNA sense strand
gagcucaucagcagcauug

SEQ ID NO: 590276 - RNA, 19 nt, Homo sapiens
  misc_RNA (1)...(19): siRNA sense strand
uacaauggcuccaagaucu

SEQ ID NO: 590277 - RNA, 19 nt, Homo sapiens
  misc_RNA (1)...(19): siRNA sense strand
ugcaucagcuacuuuacua

SEQ ID NO: 590278 - RNA, 19 nt, Homo sapiens
  misc_RNA (1)...(19): siRNA sense strand
gagaagcauccugaguuua

SEQ ID NO: 590279 - RNA, 19 nt, Homo sapiens
  misc_RNA (1)...(19): siRNA sense strand
gagaaccucgcgcuugaaa

SEQ ID NO: 590280 - RNA, 19 nt, Homo sapiens
  misc_RNA (1)...(19): siRNA sense strand
gauaaagccgagcacugua

SEQ ID NO: 590281 - RNA, 19 nt, Homo sapiens
  misc_RNA (1)...(19): siRNA sense strand
gacaaucucuuugcuaucg

SEQ ID NO: 590282 - RNA, 19 nt, Homo sapiens
  misc_RNA (1)...(19): siRNA sense strand
cagauggagucucucauuc

SEQ ID NO: 590283 - RNA, 19 nt, Homo sapiens
  misc_RNA (1)...(19): siRNA sense strand
ccagaaagcguuccacaag

SEQ ID NO: 590284 - RNA, 19 nt, Homo sapiens
  misc_RNA (1)...(19): siRNA sense strand
gcgcugggaugaggccuuu

SEQ ID NO: 590285 - RNA, 19 nt, Homo sapiens
  misc_RNA (1)...(19): siRNA sense strand
caaagaaacaaagaugcua

SEQ ID NO: 590286 - RNA, 19 nt, Homo sapiens
  misc_RNA (1)...(19): siRNA sense strand
gcugaagaauggacagauc

SEQ ID NO: 590287 - RNA, 19 nt, Homo sapiens
  misc_RNA (1)...(19): siRNA sense strand
cgaaaccggauuccaacua

SEQ ID NO: 590288 - RNA, 19 nt, Homo sapiens
  misc_RNA (1)...(19): siRNA sense strand
gaugaggccuuugcuuugg

SEQ ID NO: 590289 - RNA, 19 nt, Homo sapiens
  misc_RNA (1)...(19): siRNA sense strand
caagaccuccgauauuuag

SEQ ID NO: 590290 - RNA, 19 nt, Homo sapiens
  misc_RNA (1)...(19): siRNA sense strand
uggacaaucucuuugcuau

SEQ ID NO: 590291 - RNA, 19 nt, Homo sapiens
  misc_RNA (1)...(19): siRNA sense strand
agaagucugucuccaaaca

SEQ ID NO: 590292 - RNA, 19 nt, Homo sapiens
  misc_RNA (1)...(19): siRNA sense strand
gauggaacucaacugauuu

SEQ ID NO: 590293 - RNA, 19 nt, Homo sapiens
  misc_RNA (1)...(19): siRNA sense strand
gugagaagcauccugaguu

SEQ ID NO: 590294 - RNA, 19 nt, Homo sapiens
  misc_RNA (1)...(19): siRNA sense strand
acaagaccuccgauauuua

SEQ ID NO: 590295 - RNA, 19 nt, Homo sapiens
  misc_RNA (1)...(19): siRNA sense strand
guaaaggagaagauuauca

SEQ ID NO: 590296 - RNA, 19 nt, Homo sapiens
  misc_RNA (1)...(19): siRNA sense strand
ucaaugggaucaucagcau

SEQ ID NO: 590297 - RNA, 19 nt, Homo sapiens
  misc_RNA (1)...(19): siRNA sense strand
ccacgacagugaggaguug

SEQ ID NO: 590298 - RNA, 19 nt, Homo sapiens
  misc_RNA (1)...(19): siRNA sense strand
gcaagguggcucagaguuc

SEQ ID NO: 590299 - RNA, 19 nt, Homo sapiens
  misc_RNA (1)...(19): siRNA sense strand
uccaugggcuuuacaagga

SEQ ID NO: 590300 - RNA, 19 nt, Homo sapiens
  misc_RNA (1)...(19): siRNA sense strand
gaugacagacagcuagaga

SEQ ID NO: 590301 - RNA, 19 nt, Homo sapiens
  misc_RNA (1)...(19): siRNA sense strand
ucgggcaucucuaaaguga

SEQ ID NO: 590302 - RNA, 19 nt, Homo sapiens
  misc_RNA (1)...(19): siRNA sense strand
uaaagccgagcacuguaua

SEQ ID NO: 590303 - RNA, 19 nt, Homo sapiens
  misc_RNA (1)...(19): siRNA sense strand
gugaggacaugcucugcuu

SEQ ID NO: 590304 - RNA, 19 nt, Homo sapiens
  misc_RNA (1)...(19): siRNA sense strand
ggguaaaggagaagauuau

SEQ ID NO: 590305 - RNA, 19 nt, Homo sapiens
  misc_RNA (1)...(19): siRNA sense strand
ccugaucacugagcagaaa

SEQ ID NO: 590306 - RNA, 19 nt, Homo sapiens
  misc_RNA (1)...(19): siRNA sense strand
gaaaucgauuggcuaucca

SEQ ID NO: 590307 - RNA, 19 nt, Homo sapiens
  misc_RNA (1)...(19): siRNA sense strand
ggaagcgcuagaagguuua

SEQ ID NO: 590308 - RNA, 19 nt, Homo sapiens
  misc_RNA (1)...(19): siRNA sense strand
ggcgugaacuggccaugga

SEQ ID NO: 590309 - RNA, 19 nt, Homo sapiens
  misc_RNA (1)...(19): siRNA sense strand
aaggaagccuaccagauug

SEQ ID NO: 590310 - RNA, 19 nt, Homo sapiens
  misc_RNA (1)...(19): siRNA sense strand
gagaagauuaucaagaagu

SEQ ID NO: 590311 - RNA, 19 nt, Homo sapiens
  misc_RNA (1)...(19): siRNA sense strand
gagaaaauccucaucuaug

SEQ ID NO: 590312 - RNA, 19 nt, Homo sapiens
  misc_RNA (1)...(19): siRNA sense strand
acaacccgcugcucaacaa

SEQ ID NO: 590313 - RNA, 19 nt, Homo sapiens
  misc_RNA (1)...(19): siRNA sense strand
gauggagucucucauucgu

SEQ ID NO: 590314 - RNA, 19 nt, Homo sapiens
  misc_RNA (1)...(19): siRNA sense strand
ggaaaggaucgggcacuga

SEQ ID NO: 590315 - RNA, 19 nt, Homo sapiens
  misc_RNA (1)...(19): siRNA sense strand
gaucgggcacugaacuuug

SEQ ID NO: 590316 - RNA, 19 nt, Homo sapiens
  misc_RNA (1)...(19): siRNA sense strand
agaaaguucggauuaaaug

SEQ ID NO: 590317 - RNA, 19 nt, Homo sapiens
  misc_RNA (1)...(19): siRNA sense strand
gaagcauccugaguuuaag

SEQ ID NO: 590318 - RNA, 19 nt, Homo sapiens
  misc_RNA (1)...(19): siRNA sense strand
caccucugauggcaccuua

SEQ ID NO: 590319 - RNA, 19 nt, Homo sapiens
  misc_RNA (1)...(19): siRNA sense strand
uguaugacaucgacaccaa

SEQ ID NO: 590320 - RNA, 19 nt, Homo sapiens
  misc_RNA (1)...(19): siRNA sense strand
gaagcuggccgugguagau

SEQ ID NO: 590321 - RNA, 19 nt, Homo sapiens
  misc_RNA (1)...(19): siRNA sense strand
cuaccuaccucaagaagcu

SEQ ID NO: 590322 - RNA, 19 nt, Homo sapiens
  misc_RNA (1)...(19): siRNA sense strand
ggaagcagauuacugguuu

SEQ ID NO: 590323 - RNA, 19 nt, Homo sapiens
  misc_RNA (1)...(19): siRNA sense strand
gcagauuacugguuuauga

SEQ ID NO: 590324 - RNA, 19 nt, Homo sapiens
  misc_RNA (1)...(19): siRNA sense strand
gagcagaaaguucggauua

SEQ ID NO: 590325 - RNA, 19 nt, Homo sapiens
  misc_RNA (1)...(19): siRNA sense strand
gcagaaaguucggauuaaa

SEQ ID NO: 590326 - RNA, 19 nt, Homo sapiens
  misc_RNA (1)...(19): siRNA sense strand
guacaucccugccagauuc

SEQ ID NO: 590327 - RNA, 19 nt, Homo sapiens
  misc_RNA (1)...(19): siRNA sense strand
gaagaugggugaccucaag

SEQ ID NO: 590328 - RNA, 19 nt, Homo sapiens
  misc_RNA (1)...(19): siRNA sense strand
gaaaccggauuccaacuau

SEQ ID NO: 590329 - RNA, 19 nt, Homo sapiens
  misc_RNA (1)...(19): siRNA sense strand
caaggaagccuaccagauu

SEQ ID NO: 590330 - RNA, 19 nt, Homo sapiens
  misc_RNA (1)...(19): siRNA sense strand
gagagcagguuuaaugaug

SEQ ID NO: 590331 - RNA, 19 nt, Homo sapiens
  misc_RNA (1)...(19): siRNA sense strand
gggcaucucuaaagugaaa

SEQ ID NO: 590332 - RNA, 19 nt, Homo sapiens
  misc_RNA (1)...(19): siRNA sense strand
uacaagaccuccgauauuu

SEQ ID NO: 590333 - RNA, 19 nt, Homo sapiens
  misc_RNA (1)...(19): siRNA sense strand
guacaagaccuccgauauu

SEQ ID NO: 590334 - RNA, 19 nt, Homo sapiens
  misc_RNA (1)...(19): siRNA sense strand
gaagcagauuacugguuua

SEQ ID NO: 590335 - RNA, 19 nt, Homo sapiens
  misc_RNA (1)...(19): siRNA sense strand
ugagaagcauccugaguuu

SEQ ID NO: 590336 - RNA, 19 nt, Homo sapiens
  misc_RNA (1)...(19): siRNA sense strand
gaaacaaagaugcuaauca

SEQ ID NO: 590337 - RNA, 19 nt, Homo sapiens
  misc_RNA (1)...(19): siRNA sense strand
gaaccucgcgcuugaaaug

SEQ ID NO: 590338 - RNA, 19 nt, Homo sapiens
  misc_RNA (1)...(19): siRNA sense strand
ugauggaacucaacugauu

SEQ ID NO: 590339 - RNA, 19 nt, Homo sapiens
  misc_RNA (1)...(19): siRNA sense strand
gaaaggaucgggcacugaa

SEQ ID NO: 590340 - RNA, 19 nt, Homo sapiens
  misc_RNA (1)...(19): siRNA sense strand
uggagucucucauucguua

SEQ ID NO: 590341 - RNA, 19 nt, Homo sapiens
  misc_RNA (1)...(19): siRNA sense strand
ggaugacccuggcccauga

SEQ ID NO: 590342 - RNA, 19 nt, Homo sapiens
  misc_RNA (1)...(19): siRNA sense strand
gcuagaagguuuagauuuu

SEQ ID NO: 590343 - RNA, 19 nt, Homo sapiens
  misc_RNA (1)...(19): siRNA sense strand
caaagaugcuaaucaccaa

SEQ ID NO: 590344 - RNA, 19 nt, Homo sapiens
  misc_RNA (1)...(19): siRNA sense strand
gcugagaccuaccugaaga

SEQ ID NO: 590345 - RNA, 19 nt, Homo sapiens
  misc_RNA (1)...(19): siRNA sense strand
ggacaaaugauggucagua

SEQ ID NO: 590346 - RNA, 19 nt, Homo sapiens
  misc_RNA (1)...(19): siRNA sense strand
aggagaagauuaucaagaa

SEQ ID NO: 590347 - RNA, 19 nt, Homo sapiens
  misc_RNA (1)...(19): siRNA sense strand
gccgagcacuguauaaaug

SEQ ID NO: 590348 - RNA, 19 nt, Homo sapiens
  misc_RNA (1)...(19): siRNA sense strand
gaaaacagauuggaaagga

SEQ ID NO: 590349 - RNA, 19 nt, Homo sapiens
  misc_RNA (1)...(19): siRNA sense strand
gcagauggagucucucauu

SEQ ID NO: 590350 - RNA, 19 nt, Homo sapiens
  misc_RNA (1)...(19): siRNA sense strand
gcggagagcagguuuaaug

SEQ ID NO: 590351 - RNA, 19 nt, Homo sapiens
  misc_RNA (1)...(19): siRNA sense strand
gcagagcuguaccaugguu

SEQ ID NO: 590352 - RNA, 19 nt, Homo sapiens
  misc_RNA (1)...(19): siRNA sense strand
gggaugaggccuuugcuuu

SEQ ID NO: 590353 - RNA, 19 nt, Homo sapiens
  misc_RNA (1)...(19): siRNA sense strand
uggaagcgcuagaagguuu

SEQ ID NO: 590354 - RNA, 19 nt, Homo sapiens
  misc_RNA (1)...(19): siRNA sense strand
aaacaaagaugcuaaucac

SEQ ID NO: 590355 - RNA, 19 nt, Homo sapiens
  misc_RNA (1)...(19): siRNA sense strand
ucagaggacuuaucagaca

SEQ ID NO: 590356 - RNA, 19 nt, Homo sapiens
  misc_RNA (1)...(19): siRNA sense strand
gcaguccgcucccauguac

SEQ ID NO: 590357 - RNA, 19 nt, Homo sapiens
  misc_RNA (1)...(19): siRNA sense strand
agaagcauccugaguuuaa

SEQ ID NO: 590358 - RNA, 19 nt, Homo sapiens
  misc_RNA (1)...(19): siRNA sense strand
cuccaugucuucuccauuu

SEQ ID NO: 590359 - RNA, 19 nt, Homo sapiens
  misc_RNA (1)...(19): siRNA sense strand
gcagagaacgaucgcuuug

SEQ ID NO: 590360 - RNA, 19 nt, Homo sapiens
  misc_RNA (1)...(19): siRNA sense strand
auaggaaacuguucaagga

SEQ ID NO: 590361 - RNA, 19 nt, Homo sapiens
  misc_RNA (1)...(19): siRNA sense strand
gacaagcaaguaucucuuu

SEQ ID NO: 590362 - RNA, 19 nt, Homo sapiens
  misc_RNA (1)...(19): siRNA sense strand
aacaacagcucccagauuc

SEQ ID NO: 590363 - RNA, 19 nt, Homo sapiens
  misc_RNA (1)...(19): siRNA sense strand
ggaugaggccuuugcuuug

SEQ ID NO: 590364 - RNA, 19 nt, Homo sapiens
  misc_RNA (1)...(19): siRNA sense strand
gaccauggcuggguugaca

SEQ ID NO: 590365 - RNA, 19 nt, Homo sapiens
  misc_RNA (1)...(19): siRNA sense strand
ucuaugaguuguauucaga

SEQ ID NO: 590366 - RNA, 19 nt, Homo sapiens
  misc_RNA (1)...(19): siRNA sense strand
guguugacguggagagaua

SEQ ID NO: 590367 - RNA, 19 nt, Homo sapiens
  misc_RNA (1)...(19): siRNA sense strand
gcacaguccaugggcuuua

SEQ ID NO: 590368 - RNA, 19 nt, Homo sapiens
  misc_RNA (1)...(19): siRNA sense strand
ggacuuaucagacaugcau

SEQ ID NO: 590369 - RNA, 19 nt, Homo sapiens
  misc_RNA (1)...(19): siRNA sense strand
gacaaaugauggucaguac

SEQ ID NO: 590370 - RNA, 19 nt, Homo sapiens
  misc_RNA (1)...(19): siRNA sense strand
gaggacccguucacagcua

SEQ ID NO: 590371 - RNA, 19 nt, Homo sapiens
  misc_RNA (1)...(19): siRNA sense strand
aaacaacagcucccagauu

SEQ ID NO: 590372 - RNA, 19 nt, Homo sapiens
  misc_RNA (1)...(19): siRNA sense strand
ugacagacagcuagagauu

SEQ ID NO: 590373 - RNA, 19 nt, Homo sapiens
  misc_RNA (1)...(19): siRNA sense strand
gaacgaucgcuuugaggaa

SEQ ID NO: 590374 - RNA, 19 nt, Homo sapiens
  misc_RNA (1)...(19): siRNA sense strand
ggagaagauuaucaagaag

SEQ ID NO: 590375 - RNA, 19 nt, Homo sapiens
  misc_RNA (1)...(19): siRNA sense strand
gagcucaucagcagcauug

SEQ ID NO: 590376 - RNA, 19 nt, Homo sapiens
  misc_RNA (1)...(19): siRNA sense strand
uacaauggcuccaagaucu

SEQ ID NO: 590377 - RNA, 19 nt, Homo sapiens
  misc_RNA (1)...(19): siRNA sense strand
ugcaucagcuacuuuacua

SEQ ID NO: 590378 - RNA, 19 nt, Homo sapiens
  misc_RNA (1)...(19): siRNA sense strand
gagaagcauccugaguuua

SEQ ID NO: 590379 - RNA, 19 nt, Homo sapiens
  misc_RNA (1)...(19): siRNA sense strand
gagaaccucgcgcuugaaa

SEQ ID NO: 590380 - RNA, 19 nt, Homo sapiens
  misc_RNA (1)...(19): siRNA sense strand
gauaaagccgagcacugua

SEQ ID NO: 590381 - RNA, 19 nt, Homo sapiens
  misc_RNA (1)...(19): siRNA sense strand
gacaaucucuuugcuaucg

SEQ ID NO: 590382 - RNA, 19 nt, Homo sapiens
  misc_RNA (1)...(19): siRNA sense strand
cagauggagucucucauuc

SEQ ID NO: 590383 - RNA, 19 nt, Homo sapiens
  misc_RNA (1)...(19): siRNA sense strand
ccagaaagcguuccacaag

SEQ ID NO: 590384 - RNA, 19 nt, Homo sapiens
  misc_RNA (1)...(19): siRNA sense strand
gcgcugggaugaggccuuu

SEQ ID NO: 590385 - RNA, 19 nt, Homo sapiens
  misc_RNA (1)...(19): siRNA sense strand
caaagaaacaaagaugcua

SEQ ID NO: 590386 - RNA, 19 nt, Homo sapiens
  misc_RNA (1)...(19): siRNA sense strand
gcugaagaauggacagauc

SEQ ID NO: 590387 - RNA, 19 nt, Homo sapiens
  misc_RNA (1)...(19): siRNA sense strand
cgaaaccggauuccaacua

SEQ ID NO: 590388 - RNA, 19 nt, Homo sapiens
  misc_RNA (1)...(19): siRNA sense strand
gaugaggccuuugcuuugg

SEQ ID NO: 590389 - RNA, 19 nt, Homo sapiens
  misc_RNA (1)...(19): siRNA sense strand
caagaccuccgauauuuag

SEQ ID NO: 590390 - RNA, 19 nt, Homo sapiens
  misc_RNA (1)...(19): siRNA sense strand
uggacaaucucuuugcuau

SEQ ID NO: 590391 - RNA, 19 nt, Homo sapiens
  misc_RNA (1)...(19): siRNA sense strand
agaagucugucuccaaaca

SEQ ID NO: 590392 - RNA, 19 nt, Homo sapiens
  misc_RNA (1)...(19): siRNA sense strand
gauggaacucaacugauuu

SEQ ID NO: 590393 - RNA, 19 nt, Homo sapiens
  misc_RNA (1)...(19): siRNA sense strand
gugagaagcauccugaguu

SEQ ID NO: 590394 - RNA, 19 nt, Homo sapiens
  misc_RNA (1)...(19): siRNA sense strand
acaagaccuccgauauuua

SEQ ID NO: 590395 - RNA, 19 nt, Homo sapiens
  misc_RNA (1)...(19): siRNA sense strand
guaaaggagaagauuauca

SEQ ID NO: 590396 - RNA, 19 nt, Homo sapiens
  misc_RNA (1)...(19): siRNA sense strand
ucaaugggaucaucagcau

SEQ ID NO: 590397 - RNA, 19 nt, Homo sapiens
  misc_RNA (1)...(19): siRNA sense strand
ccacgacagugaggaguug

SEQ ID NO: 590398 - RNA, 19 nt, Homo sapiens
  misc_RNA (1)...(19): siRNA sense strand
gcaagguggcucagaguuc

SEQ ID NO: 590399 - RNA, 19 nt, Homo sapiens
  misc_RNA (1)...(19): siRNA sense strand
uccaugggcuuuacaagga

SEQ ID NO: 590400 - RNA, 19 nt, Homo sapiens
  misc_RNA (1)...(19): siRNA sense strand
gaugacagacagcuagaga

SEQ ID NO: 590401 - RNA, 19 nt, Homo sapiens
  misc_RNA (1)...(19): siRNA sense strand
ucgggcaucucuaaaguga

SEQ ID NO: 590402 - RNA, 19 nt, Homo sapiens
  misc_RNA (1)...(19): siRNA sense strand
uaaagccgagcacuguaua

SEQ ID NO: 590403 - RNA, 19 nt, Homo sapiens
  misc_RNA (1)...(19): siRNA sense strand
gugaggacaugcucugcuu

SEQ ID NO: 590404 - RNA, 19 nt, Homo sapiens
  misc_RNA (1)...(19): siRNA sense strand
ggguaaaggagaagauuau

SEQ ID NO: 590405 - RNA, 19 nt, Homo sapiens
  misc_RNA (1)...(19): siRNA sense strand
ccugaucacugagcagaaa

SEQ ID NO: 590406 - RNA, 19 nt, Homo sapiens
  misc_RNA (1)...(19): siRNA sense strand
gaaaucgauuggcuaucca

SEQ ID NO: 590407 - RNA, 19 nt, Homo sapiens
  misc_RNA (1)...(19): siRNA sense strand
ggaagcgcuagaagguuua

SEQ ID NO: 590408 - RNA, 19 nt, Homo sapiens
  misc_RNA (1)...(19): siRNA sense strand
ggcgugaacuggccaugga

SEQ ID NO: 590409 - RNA, 19 nt, Homo sapiens
  misc_RNA (1)...(19): siRNA sense strand
aaggaagccuaccagauug

SEQ ID NO: 590410 - RNA, 19 nt, Homo sapiens
  misc_RNA (1)...(19): siRNA sense strand
gagaagauuaucaagaagu

SEQ ID NO: 590411 - RNA, 19 nt, Homo sapiens
  misc_RNA (1)...(19): siRNA sense strand
gagaaaauccucaucuaug

SEQ ID NO: 590412 - RNA, 19 nt, Homo sapiens
  misc_RNA (1)...(19): siRNA sense strand
acaacccgcugcucaacaa

SEQ ID NO: 590413 - RNA, 19 nt, Homo sapiens
  misc_RNA (1)...(19): siRNA sense strand
gauggagucucucauucgu

SEQ ID NO: 590414 - RNA, 19 nt, Homo sapiens
  misc_RNA (1)...(19): siRNA sense strand
ggaaaggaucgggcacuga

SEQ ID NO: 590415 - RNA, 19 nt, Homo sapiens
  misc_RNA (1)...(19): siRNA sense strand
gaucgggcacugaacuuug

SEQ ID NO: 590416 - RNA, 19 nt, Homo sapiens
  misc_RNA (1)...(19): siRNA sense strand
agaaaguucggauuaaaug

SEQ ID NO: 590417 - RNA, 19 nt, Homo sapiens
  misc_RNA (1)...(19): siRNA sense strand
gaagcauccugaguuuaag

SEQ ID NO: 590418 - RNA, 19 nt, Homo sapiens
  misc_RNA (1)...(19): siRNA sense strand
caccucugauggcaccuua

SEQ ID NO: 590419 - RNA, 19 nt, Homo sapiens
  misc_RNA (1)...(19): siRNA sense strand
uguaugacaucgacaccaa

SEQ ID NO: 590420 - RNA, 19 nt, Homo sapiens
  misc_RNA (1)...(19): siRNA sense strand
gaagcuggccgugguagau

SEQ ID NO: 590421 - RNA, 19 nt, Homo sapiens
  misc_RNA (1)...(19): siRNA sense strand
cuaccuaccucaagaagcu

SEQ ID NO: 590422 - RNA, 19 nt, Homo sapiens
  misc_RNA (1)...(19): siRNA sense strand
caagaagaccaggauaauu

SEQ ID NO: 590423 - RNA, 19 nt, Homo sapiens
  misc_RNA (1)...(19): siRNA sense strand
caacaagaagaccaggaua

SEQ ID NO: 590424 - RNA, 19 nt, Homo sapiens
  misc_RNA (1)...(19): siRNA sense strand
gcaacgacgaggaguuaaa

SEQ ID NO: 590425 - RNA, 19 nt, Homo sapiens
  misc_RNA (1)...(19): siRNA sense strand
aagaagaccaggauaauuc

SEQ ID NO: 590426 - RNA, 19 nt, Homo sapiens
  misc_RNA (1)...(19): siRNA sense strand
ccgcaacgacgaggaguua

SEQ ID NO: 590427 - RNA, 19 nt, Homo sapiens
  misc_RNA (1)...(19): siRNA sense strand
gcacagacugcugcgcaaa

SEQ ID NO: 590428 - RNA, 19 nt, Homo sapiens
  misc_RNA (1)...(19): siRNA sense strand
aacaagaagaccaggauaa

SEQ ID NO: 590429 - RNA, 19 nt, Homo sapiens
  misc_RNA (1)...(19): siRNA sense strand
acaagaagaccaggauaau

SEQ ID NO: 590430 - RNA, 19 nt, Homo sapiens
  misc_RNA (1)...(19): siRNA sense strand
cgacgaggaguuaaacaag

SEQ ID NO: 590431 - RNA, 19 nt, Homo sapiens
  misc_RNA (1)...(19): siRNA sense strand
gcggcaaagugcgagcaaa

SEQ ID NO: 590432 - RNA, 19 nt, Homo sapiens
  misc_RNA (1)...(19): siRNA sense strand
gcgcgugacaacaagaaga

SEQ ID NO: 590433 - RNA, 19 nt, Homo sapiens
  misc_RNA (1)...(19): siRNA sense strand
caacgacgaggaguuaaac

SEQ ID NO: 590434 - RNA, 19 nt, Homo sapiens
  misc_RNA (1)...(19): siRNA sense strand
acaagcugcugggcaaagu

SEQ ID NO: 590435 - RNA, 19 nt, Homo sapiens
  misc_RNA (1)...(19): siRNA sense strand
caagaagaccaggauaauu

SEQ ID NO: 590436 - RNA, 19 nt, Homo sapiens
  misc_RNA (1)...(19): siRNA sense strand
caacaagaagaccaggaua

SEQ ID NO: 590437 - RNA, 19 nt, Homo sapiens
  misc_RNA (1)...(19): siRNA sense strand
gcaacgacgaggaguuaaa

SEQ ID NO: 590438 - RNA, 19 nt, Homo sapiens
  misc_RNA (1)...(19): siRNA sense strand
aagaagaccaggauaauuc

SEQ ID NO: 590439 - RNA, 19 nt, Homo sapiens
  misc_RNA (1)...(19): siRNA sense strand
ccgcaacgacgaggaguua

SEQ ID NO: 590440 - RNA, 19 nt, Homo sapiens
  misc_RNA (1)...(19): siRNA sense strand
gcacagacugcugcgcaaa

SEQ ID NO: 590441 - RNA, 19 nt, Homo sapiens
  misc_RNA (1)...(19): siRNA sense strand
aacaagaagaccaggauaa

SEQ ID NO: 590442 - RNA, 19 nt, Homo sapiens
  misc_RNA (1)...(19): siRNA sense strand
acaagaagaccaggauaau

SEQ ID NO: 590443 - RNA, 19 nt, Homo sapiens
  misc_RNA (1)...(19): siRNA sense strand
cgacgaggaguuaaacaag

SEQ ID NO: 590444 - RNA, 19 nt, Homo sapiens
  misc_RNA (1)...(19): siRNA sense strand
gcggcaaagugcgagcaaa

SEQ ID NO: 590445 - RNA, 19 nt, Homo sapiens
  misc_RNA (1)...(19): siRNA sense strand
gcgcgugacaacaagaaga

SEQ ID NO: 590446 - RNA, 19 nt, Homo sapiens
  misc_RNA (1)...(19): siRNA sense strand
caacgacgaggaguuaaac

SEQ ID NO: 590447 - RNA, 19 nt, Homo sapiens
  misc_RNA (1)...(19): siRNA sense strand
acaagcugcugggcaaagu

SEQ ID NO: 590448 - RNA, 19 nt, Homo sapiens
  misc_RNA (1)...(19): siRNA sense strand
gaaauugagccacuguauu

SEQ ID NO: 590449 - RNA, 19 nt, Homo sapiens
  misc_RNA (1)...(19): siRNA sense strand
gaacuggauauucuucuuu

SEQ ID NO: 590450 - RNA, 19 nt, Homo sapiens
  misc_RNA (1)...(19): siRNA sense strand
gagaugaaauccauuacca

SEQ ID NO: 590451 - RNA, 19 nt, Homo sapiens
  misc_RNA (1)...(19): siRNA sense strand
aagcaacgauuccagaaga

SEQ ID NO: 590452 - RNA, 19 nt, Homo sapiens
  misc_RNA (1)...(19): siRNA sense strand
cuagagagaugaaauccau

SEQ ID NO: 590453 - RNA, 19 nt, Homo sapiens
  misc_RNA (1)...(19): siRNA sense strand
gaaacaaaggaaucuacaa

SEQ ID NO: 590454 - RNA, 19 nt, Homo sapiens
  misc_RNA (1)...(19): siRNA sense strand
cuacaaagccaucagugaa

SEQ ID NO: 590455 - RNA, 19 nt, Homo sapiens
  misc_RNA (1)...(19): siRNA sense strand
caaagcagcauggcucaaa

SEQ ID NO: 590456 - RNA, 19 nt, Homo sapiens
  misc_RNA (1)...(19): siRNA sense strand
agagagaugaaauccauua

SEQ ID NO: 590457 - RNA, 19 nt, Homo sapiens
  misc_RNA (1)...(19): siRNA sense strand
gcaaucuuccuucaccaaa

SEQ ID NO: 590458 - RNA, 19 nt, Homo sapiens
  misc_RNA (1)...(19): siRNA sense strand
ggaaacaaaggaaucuaca

SEQ ID NO: 590459 - RNA, 19 nt, Homo sapiens
  misc_RNA (1)...(19): siRNA sense strand
caaagcaacgauuccagaa

SEQ ID NO: 590460 - RNA, 19 nt, Homo sapiens
  misc_RNA (1)...(19): siRNA sense strand
acaaaggaaucuacaaagc

SEQ ID NO: 590461 - RNA, 19 nt, Homo sapiens
  misc_RNA (1)...(19): siRNA sense strand
cacaagcaaucuuccuuca

SEQ ID NO: 590462 - RNA, 19 nt, Homo sapiens
  misc_RNA (1)...(19): siRNA sense strand
ugaacuggauauucuucuu

SEQ ID NO: 590463 - RNA, 19 nt, Homo sapiens
  misc_RNA (1)...(19): siRNA sense strand
gcuguugacgcucucuaua

SEQ ID NO: 590464 - RNA, 19 nt, Homo sapiens
  misc_RNA (1)...(19): siRNA sense strand
cagcuucuguccuucuuca

SEQ ID NO: 590465 - RNA, 19 nt, Homo sapiens
  misc_RNA (1)...(19): siRNA sense strand
auucuucuuuccuggauua

SEQ ID NO: 590466 - RNA, 19 nt, Homo sapiens
  misc_RNA (1)...(19): siRNA sense strand
ggacuuucauagccuuagg

SEQ ID NO: 590467 - RNA, 19 nt, Homo sapiens
  misc_RNA (1)...(19): siRNA sense strand
gcagaaauugagccacugu

SEQ ID NO: 590468 - RNA, 19 nt, Homo sapiens
  misc_RNA (1)...(19): siRNA sense strand
gguguggguugcuguuagu

SEQ ID NO: 590469 - RNA, 19 nt, Homo sapiens
  misc_RNA (1)...(19): siRNA sense strand
agaaauugagccacuguau

SEQ ID NO: 590470 - RNA, 19 nt, Homo sapiens
  misc_RNA (1)...(19): siRNA sense strand
gagguguggguugcuguua

SEQ ID NO: 590471 - RNA, 19 nt, Homo sapiens
  misc_RNA (1)...(19): siRNA sense strand
gcaagaaaauacgcuuugu

SEQ ID NO: 590472 - RNA, 19 nt, Homo sapiens
  misc_RNA (1)...(19): siRNA sense strand
uguugacgcucucuauauc

SEQ ID NO: 590473 - RNA, 19 nt, Homo sapiens
  misc_RNA (1)...(19): siRNA sense strand
guuagucacucugucucuu

SEQ ID NO: 590474 - RNA, 19 nt, Homo sapiens
  misc_RNA (1)...(19): siRNA sense strand
ccaagcacaagcaaucuuc

SEQ ID NO: 590475 - RNA, 19 nt, Homo sapiens
  misc_RNA (1)...(19): siRNA sense strand
gacgcucucuauaucaaag

SEQ ID NO: 590476 - RNA, 19 nt, Homo sapiens
  misc_RNA (1)...(19): siRNA sense strand
gauuccagaagaccgcaua

SEQ ID NO: 590477 - RNA, 19 nt, Homo sapiens
  misc_RNA (1)...(19): siRNA sense strand
gcaaggcugcaagaaaaua

SEQ ID NO: 590478 - RNA, 19 nt, Homo sapiens
  misc_RNA (1)...(19): siRNA sense strand
aaagcagcauggcucaaag

SEQ ID NO: 590479 - RNA, 19 nt, Homo sapiens
  misc_RNA (1)...(19): siRNA sense strand
ucuacaaagccaucaguga

SEQ ID NO: 590480 - RNA, 19 nt, Homo sapiens
  misc_RNA (1)...(19): siRNA sense strand
gcagcauggcucaaagcaa

SEQ ID NO: 590481 - RNA, 19 nt, Homo sapiens
  misc_RNA (1)...(19): siRNA sense strand
gaggacuuucauagccuua

SEQ ID NO: 590482 - RNA, 19 nt, Homo sapiens
  misc_RNA (1)...(19): siRNA sense strand
cagaaauugagccacugua

SEQ ID NO: 590483 - RNA, 19 nt, Homo sapiens
  misc_RNA (1)...(19): siRNA sense strand
acaaagccaucagugaacu

SEQ ID NO: 590484 - RNA, 19 nt, Homo sapiens
  misc_RNA (1)...(19): siRNA sense strand
ggauuggaaacaaaggaau

SEQ ID NO: 590485 - RNA, 19 nt, Homo sapiens
  misc_RNA (1)...(19): siRNA sense strand
cagcuagagagaugaaauc

SEQ ID NO: 590486 - RNA, 19 nt, Homo sapiens
  misc_RNA (1)...(19): siRNA sense strand
gaacuucccuuaagaguca

SEQ ID NO: 590487 - RNA, 19 nt, Homo sapiens
  misc_RNA (1)...(19): siRNA sense strand
ggaaugaccuggcagauca

SEQ ID NO: 590488 - RNA, 19 nt, Homo sapiens
  misc_RNA (1)...(19): siRNA sense strand
ccaagucgcuggagccauu

SEQ ID NO: 590489 - RNA, 19 nt, Homo sapiens
  misc_RNA (1)...(19): siRNA sense strand
gggaacaacuucaguccaa

SEQ ID NO: 590490 - RNA, 19 nt, Homo sapiens
  misc_RNA (1)...(19): siRNA sense strand
ugagcacgcugaaggcuua

SEQ ID NO: 590491 - RNA, 19 nt, Homo sapiens
  misc_RNA (1)...(19): siRNA sense strand
caaccuagaacuucccuua

SEQ ID NO: 590492 - RNA, 19 nt, Homo sapiens
  misc_RNA (1)...(19): siRNA sense strand
gcagagagccaguguuugu

SEQ ID NO: 590493 - RNA, 19 nt, Homo sapiens
  misc_RNA (1)...(19): siRNA sense strand
uaaccagacugugacauuu

SEQ ID NO: 590494 - RNA, 19 nt, Homo sapiens
  misc_RNA (1)...(19): siRNA sense strand
gcaagaagugccaagauug

SEQ ID NO: 590495 - RNA, 19 nt, Homo sapiens
  misc_RNA (1)...(19): siRNA sense strand
gggccagguucuccuauuu

SEQ ID NO: 590496 - RNA, 19 nt, Homo sapiens
  misc_RNA (1)...(19): siRNA sense strand
gaaaacagcccacugaugu

SEQ ID NO: 590497 - RNA, 19 nt, Homo sapiens
  misc_RNA (1)...(19): siRNA sense strand
ggacuguggucugccauug

SEQ ID NO: 590498 - RNA, 19 nt, Homo sapiens
  misc_RNA (1)...(19): siRNA sense strand
gggaagaaaggcccaacua

SEQ ID NO: 590499 - RNA, 19 nt, Homo sapiens
  misc_RNA (1)...(19): siRNA sense strand
gaacuccuccuuccugcuu

SEQ ID NO: 590500 - RNA, 19 nt, Homo sapiens
  misc_RNA (1)...(19): siRNA sense strand
uccaagggcugcaguucua

SEQ ID NO: 590501 - RNA, 19 nt, Homo sapiens
  misc_RNA (1)...(19): siRNA sense strand
ccuagaacuucccuuaaga

SEQ ID NO: 590502 - RNA, 19 nt, Homo sapiens
  misc_RNA (1)...(19): siRNA sense strand
caaugguggucgugugauu

SEQ ID NO: 590503 - RNA, 19 nt, Homo sapiens
  misc_RNA (1)...(19): siRNA sense strand
ggagagguaucgcccugau

SEQ ID NO: 590504 - RNA, 19 nt, Homo sapiens
  misc_RNA (1)...(19): siRNA sense strand
gugaauuacugcuacaauc

SEQ ID NO: 590505 - RNA, 19 nt, Homo sapiens
  misc_RNA (1)...(19): siRNA sense strand
ggagaugcuuuuccacuuu

SEQ ID NO: 590506 - RNA, 19 nt, Homo sapiens
  misc_RNA (1)...(19): siRNA sense strand
ccuaugcccuguuucucua

SEQ ID NO: 590507 - RNA, 19 nt, Homo sapiens
  misc_RNA (1)...(19): siRNA sense strand
ggagugaggagcccaggaa

SEQ ID NO: 590508 - RNA, 19 nt, Homo sapiens
  misc_RNA (1)...(19): siRNA sense strand
gccauucacucuggagauu

SEQ ID NO: 590509 - RNA, 19 nt, Homo sapiens
  misc_RNA (1)...(19): siRNA sense strand
gcagggacgacgggacuua

SEQ ID NO: 590510 - RNA, 19 nt, Homo sapiens
  misc_RNA (1)...(19): siRNA sense strand
gggcagaccacgcugauuc

SEQ ID NO: 590511 - RNA, 19 nt, Homo sapiens
  misc_RNA (1)...(19): siRNA sense strand
gggaagacgugcgcgaugu

SEQ ID NO: 590512 - RNA, 19 nt, Homo sapiens
  misc_RNA (1)...(19): siRNA sense strand
gcaagcaucggacuucaca

SEQ ID NO: 590513 - RNA, 19 nt, Homo sapiens
  misc_RNA (1)...(19): siRNA sense strand
gaauuacugcuacaaucaa

SEQ ID NO: 590514 - RNA, 19 nt, Homo sapiens
  misc_RNA (1)...(19): siRNA sense strand
ugacaagcccuaccucugu

SEQ ID NO: 590515 - RNA, 19 nt, Homo sapiens
  misc_RNA (1)...(19): siRNA sense strand
gcuccugggcugaacauuu

SEQ ID NO: 590516 - RNA, 19 nt, Homo sapiens
  misc_RNA (1)...(19): siRNA sense strand
ccagcugccuuccaacuuc

SEQ ID NO: 590517 - RNA, 19 nt, Homo sapiens
  misc_RNA (1)...(19): siRNA sense strand
gcaccgacuuggagcucuu

SEQ ID NO: 590518 - RNA, 19 nt, Homo sapiens
  misc_RNA (1)...(19): siRNA sense strand
gaaacucgacgcguucuuc

SEQ ID NO: 590519 - RNA, 19 nt, Homo sapiens
  misc_RNA (1)...(19): siRNA sense strand
cagaugcgauggcuacaag

SEQ ID NO: 590520 - RNA, 19 nt, Homo sapiens
  misc_RNA (1)...(19): siRNA sense strand
caaggccacugcuacaucu

SEQ ID NO: 590521 - RNA, 19 nt, Homo sapiens
  misc_RNA (1)...(19): siRNA sense strand
gccaguguuuguacaauca

SEQ ID NO: 590522 - RNA, 19 nt, Homo sapiens
  misc_RNA (1)...(19): siRNA sense strand
agcaagaagugccaagauu

SEQ ID NO: 590523 - RNA, 19 nt, Homo sapiens
  misc_RNA (1)...(19): siRNA sense strand
ggauuagaaagaucacaaa

SEQ ID NO: 590524 - RNA, 19 nt, Homo sapiens
  misc_RNA (1)...(19): siRNA sense strand
gggcuacugugaccaugga

SEQ ID NO: 590525 - RNA, 19 nt, Homo sapiens
  misc_RNA (1)...(19): siRNA sense strand
acuuggagcucuuugagaa

SEQ ID NO: 590526 - RNA, 19 nt, Homo sapiens
  misc_RNA (1)...(19): siRNA sense strand
ggaagaaaggcccaacuac

SEQ ID NO: 590527 - RNA, 19 nt, Homo sapiens
  misc_RNA (1)...(19): siRNA sense strand
ggucaaugcccacgccuau

SEQ ID NO: 590528 - RNA, 19 nt, Homo sapiens
  misc_RNA (1)...(19): siRNA sense strand
gaucaucuucccagaguca

SEQ ID NO: 590529 - RNA, 19 nt, Homo sapiens
  misc_RNA (1)...(19): siRNA sense strand
caaguggaacgaaucgauu

SEQ ID NO: 590530 - RNA, 19 nt, Homo sapiens
  misc_RNA (1)...(19): siRNA sense strand
ggagcucuuuccuguguca

SEQ ID NO: 590531 - RNA, 19 nt, Homo sapiens
  misc_RNA (1)...(19): siRNA sense strand
cuccugggcugaacauuug

SEQ ID NO: 590532 - RNA, 19 nt, Homo sapiens
  misc_RNA (1)...(19): siRNA sense strand
caggccgagucuuggauua

SEQ ID NO: 590533 - RNA, 19 nt, Homo sapiens
  misc_RNA (1)...(19): siRNA sense strand
gcucuuuccugugucagaa

SEQ ID NO: 590534 - RNA, 19 nt, Homo sapiens
  misc_RNA (1)...(19): siRNA sense strand
ucauugacuuccugaacaa

SEQ ID NO: 590535 - RNA, 19 nt, Homo sapiens
  misc_RNA (1)...(19): siRNA sense strand
guucuucggcaucuucuuu

SEQ ID NO: 590536 - RNA, 19 nt, Homo sapiens
  misc_RNA (1)...(19): siRNA sense strand
gaagacgugcgcgauguga

SEQ ID NO: 590537 - RNA, 19 nt, Homo sapiens
  misc_RNA (1)...(19): siRNA sense strand
ggccgagucuuggauuaga

SEQ ID NO: 590538 - RNA, 19 nt, Homo sapiens
  misc_RNA (1)...(19): siRNA sense strand
ugaauuacugcuacaauca

SEQ ID NO: 590539 - RNA, 19 nt, Homo sapiens
  misc_RNA (1)...(19): siRNA sense strand
aguccugcccugugaauua

SEQ ID NO: 590540 - RNA, 19 nt, Homo sapiens
  misc_RNA (1)...(19): siRNA sense strand
gcagcguccuuggcaguug

SEQ ID NO: 590541 - RNA, 19 nt, Homo sapiens
  misc_RNA (1)...(19): siRNA sense strand
gugagcaccugagcaugaa

SEQ ID NO: 590542 - RNA, 19 nt, Homo sapiens
  misc_RNA (1)...(19): siRNA sense strand
gagccaguguuuguacaau

SEQ ID NO: 590543 - RNA, 19 nt, Homo sapiens
  misc_RNA (1)...(19): siRNA sense strand
gagagccaguguuuguaca

SEQ ID NO: 590544 - RNA, 19 nt, Homo sapiens
  misc_RNA (1)...(19): siRNA sense strand
ggaauacgagacguucuau

SEQ ID NO: 590545 - RNA, 19 nt, Homo sapiens
  misc_RNA (1)...(19): siRNA sense strand
cgacgggacuuacgauucc

SEQ ID NO: 590546 - RNA, 19 nt, Homo sapiens
  misc_RNA (1)...(19): siRNA sense strand
gaacauuugaucuccaacu

SEQ ID NO: 590547 - RNA, 19 nt, Homo sapiens
  misc_RNA (1)...(19): siRNA sense strand
guccaacugucaaccuaga

SEQ ID NO: 590548 - RNA, 19 nt, Homo sapiens
  misc_RNA (1)...(19): siRNA sense strand
gcuccucucuccgugauuc

SEQ ID NO: 590549 - RNA, 19 nt, Homo sapiens
  misc_RNA (1)...(19): siRNA sense strand
acgccacccucaaucagua

SEQ ID NO: 590550 - RNA, 19 nt, Homo sapiens
  misc_RNA (1)...(19): siRNA sense strand
ccacaucaccaccuuggau

SEQ ID NO: 590551 - RNA, 19 nt, Homo sapiens
  misc_RNA (1)...(19): siRNA sense strand
gaacaacuucaguccaacu

SEQ ID NO: 590552 - RNA, 19 nt, Homo sapiens
  misc_RNA (1)...(19): siRNA sense strand
ucaguuacaccuucaaugg

SEQ ID NO: 590553 - RNA, 19 nt, Homo sapiens
  misc_RNA (1)...(19): siRNA sense strand
aaccaguccugcccuguga

SEQ ID NO: 590554 - RNA, 19 nt, Homo sapiens
  misc_RNA (1)...(19): siRNA sense strand
caacgggacaggccuccuu

SEQ ID NO: 590555 - RNA, 19 nt, Homo sapiens
  misc_RNA (1)...(19): siRNA sense strand
gguggaggcguucuuauac

SEQ ID NO: 590556 - RNA, 19 nt, Homo sapiens
  misc_RNA (1)...(19): siRNA sense strand
ggugguggaggcguucuua

SEQ ID NO: 590557 - RNA, 19 nt, Homo sapiens
  misc_RNA (1)...(19): siRNA sense strand
gaacgccacccucaaucag

SEQ ID NO: 590558 - RNA, 19 nt, Homo sapiens
  misc_RNA (1)...(19): siRNA sense strand
gcaggccgagucuuggauu

SEQ ID NO: 590559 - RNA, 19 nt, Homo sapiens
  misc_RNA (1)...(19): siRNA sense strand
ugguggaggcguucuuaua

SEQ ID NO: 590560 - RNA, 19 nt, Homo sapiens
  misc_RNA (1)...(19): siRNA sense strand
gacgggagcagguccuaug

SEQ ID NO: 590561 - RNA, 19 nt, Homo sapiens
  misc_RNA (1)...(19): siRNA sense strand
gccgagucuuggauuagaa

SEQ ID NO: 590562 - RNA, 19 nt, Homo sapiens
  misc_RNA (1)...(19): siRNA sense strand
acacgagggaagucaguaa

SEQ ID NO: 590563 - RNA, 19 nt, Homo sapiens
  misc_RNA (1)...(19): siRNA sense strand
ugugagcaccugagcauga

SEQ ID NO: 590564 - RNA, 19 nt, Homo sapiens
  misc_RNA (1)...(19): siRNA sense strand
ggaagacgugcgcgaugug

SEQ ID NO: 590565 - RNA, 19 nt, Homo sapiens
  misc_RNA (1)...(19): siRNA sense strand
ggacgacgggacuuacgau

SEQ ID NO: 590566 - RNA, 19 nt, Homo sapiens
  misc_RNA (1)...(19): siRNA sense strand
ccaaguggaacgaaucgau

SEQ ID NO: 590567 - RNA, 19 nt, Homo sapiens
  misc_RNA (1)...(19): siRNA sense strand
gaccacauuuuaucaggaa

SEQ ID NO: 590568 - RNA, 19 nt, Homo sapiens
  misc_RNA (1)...(19): siRNA sense strand
augcagagagccaguguuu

SEQ ID NO: 590569 - RNA, 19 nt, Homo sapiens
  misc_RNA (1)...(19): siRNA sense strand
gaauacgagacguucuaug

SEQ ID NO: 590570 - RNA, 19 nt, Homo sapiens
  misc_RNA (1)...(19): siRNA sense strand
ugaucgcgcucuccaacau

SEQ ID NO: 590571 - RNA, 19 nt, Homo sapiens
  misc_RNA (1)...(19): siRNA sense strand
ccuuggauggugucaguua

SEQ ID NO: 590572 - RNA, 19 nt, Homo sapiens
  misc_RNA (1)...(19): siRNA sense strand
cagcugccuuccaacuuca

SEQ ID NO: 590573 - RNA, 19 nt, Homo sapiens
  misc_RNA (1)...(19): siRNA sense strand
gcagcuguguguccuucuc

SEQ ID NO: 590574 - RNA, 19 nt, Homo sapiens
  misc_RNA (1)...(19): siRNA sense strand
cacagacaauggccagauc

SEQ ID NO: 590575 - RNA, 19 nt, Homo sapiens
  misc_RNA (1)...(19): siRNA sense strand
gcacgcugaaggcuuacuu

SEQ ID NO: 590576 - RNA, 19 nt, Homo sapiens
  misc_RNA (1)...(19): siRNA sense strand
cgaacgccacccucaauca

SEQ ID NO: 590577 - RNA, 19 nt, Homo sapiens
  misc_RNA (1)...(19): siRNA sense strand
cugaacauuugaucuccaa

SEQ ID NO: 590578 - RNA, 19 nt, Homo sapiens
  misc_RNA (1)...(19): siRNA sense strand
gagaugcuuuuccacuuug

SEQ ID NO: 590579 - RNA, 19 nt, Homo sapiens
  misc_RNA (1)...(19): siRNA sense strand
ggggagcucuuuccugugu

SEQ ID NO: 590580 - RNA, 19 nt, Homo sapiens
  misc_RNA (1)...(19): siRNA sense strand
cagagagccaguguuugua

SEQ ID NO: 590581 - RNA, 19 nt, Homo sapiens
  misc_RNA (1)...(19): siRNA sense strand
caacgcaagcaucggacuu

SEQ ID NO: 590582 - RNA, 19 nt, Homo sapiens
  misc_RNA (1)...(19): siRNA sense strand
gggcugaacauuugaucuc

SEQ ID NO: 590583 - RNA, 19 nt, Homo sapiens
  misc_RNA (1)...(19): siRNA sense strand
caacuucaccccuguuuuc

SEQ ID NO: 590584 - RNA, 19 nt, Homo sapiens
  misc_RNA (1)...(19): siRNA sense strand
auaaccagacugugacauu

SEQ ID NO: 590585 - RNA, 19 nt, Homo sapiens
  misc_RNA (1)...(19): siRNA sense strand
gugaggagcccaggaacga

SEQ ID NO: 590586 - RNA, 19 nt, Homo sapiens
  misc_RNA (1)...(19): siRNA sense strand
gaacuucccuuaagaguca

SEQ ID NO: 590587 - RNA, 19 nt, Homo sapiens
  misc_RNA (1)...(19): siRNA sense strand
ggaaugaccuggcagauca

SEQ ID NO: 590588 - RNA, 19 nt, Homo sapiens
  misc_RNA (1)...(19): siRNA sense strand
ccaagucgcuggagccauu

SEQ ID NO: 590589 - RNA, 19 nt, Homo sapiens
  misc_RNA (1)...(19): siRNA sense strand
gggaacaacuucaguccaa

SEQ ID NO: 590590 - RNA, 19 nt, Homo sapiens
  misc_RNA (1)...(19): siRNA sense strand
ugagcacgcugaaggcuua

SEQ ID NO: 590591 - RNA, 19 nt, Homo sapiens
  misc_RNA (1)...(19): siRNA sense strand
caaccuagaacuucccuua

SEQ ID NO: 590592 - RNA, 19 nt, Homo sapiens
  misc_RNA (1)...(19): siRNA sense strand
gcagagagccaguguuugu

SEQ ID NO: 590593 - RNA, 19 nt, Homo sapiens
  misc_RNA (1)...(19): siRNA sense strand
uaaccagacugugacauuu

SEQ ID NO: 590594 - RNA, 19 nt, Homo sapiens
  misc_RNA (1)...(19): siRNA sense strand
gcaagaagugccaagauug

SEQ ID NO: 590595 - RNA, 19 nt, Homo sapiens
  misc_RNA (1)...(19): siRNA sense strand
gggccagguucuccuauuu

SEQ ID NO: 590596 - RNA, 19 nt, Homo sapiens
  misc_RNA (1)...(19): siRNA sense strand
gaaaacagcccacugaugu

SEQ ID NO: 590597 - RNA, 19 nt, Homo sapiens
  misc_RNA (1)...(19): siRNA sense strand
ggacuguggucugccauug

SEQ ID NO: 590598 - RNA, 19 nt, Homo sapiens
  misc_RNA (1)...(19): siRNA sense strand
gggaagaaaggcccaacua

SEQ ID NO: 590599 - RNA, 19 nt, Homo sapiens
  misc_RNA (1)...(19): siRNA sense strand
gaacuccuccuuccugcuu

SEQ ID NO: 590600 - RNA, 19 nt, Homo sapiens
  misc_RNA (1)...(19): siRNA sense strand
uccaagggcugcaguucua

SEQ ID NO: 590601 - RNA, 19 nt, Homo sapiens
  misc_RNA (1)...(19): siRNA sense strand
ccuagaacuucccuuaaga

SEQ ID NO: 590602 - RNA, 19 nt, Homo sapiens
  misc_RNA (1)...(19): siRNA sense strand
caaugguggucgugugauu

SEQ ID NO: 590603 - RNA, 19 nt, Homo sapiens
  misc_RNA (1)...(19): siRNA sense strand
ggagagguaucgcccugau

SEQ ID NO: 590604 - RNA, 19 nt, Homo sapiens
  misc_RNA (1)...(19): siRNA sense strand
gugaauuacugcuacaauc

SEQ ID NO: 590605 - RNA, 19 nt, Homo sapiens
  misc_RNA (1)...(19): siRNA sense strand
ggagaugcuuuuccacuuu

SEQ ID NO: 590606 - RNA, 19 nt, Homo sapiens
  misc_RNA (1)...(19): siRNA sense strand
ccuaugcccuguuucucua

SEQ ID NO: 590607 - RNA, 19 nt, Homo sapiens
  misc_RNA (1)...(19): siRNA sense strand
ggagugaggagcccaggaa

SEQ ID NO: 590608 - RNA, 19 nt, Homo sapiens
  misc_RNA (1)...(19): siRNA sense strand
gccauucacucuggagauu

SEQ ID NO: 590609 - RNA, 19 nt, Homo sapiens
  misc_RNA (1)...(19): siRNA sense strand
gcagggacgacgggacuua

SEQ ID NO: 590610 - RNA, 19 nt, Homo sapiens
  misc_RNA (1)...(19): siRNA sense strand
gggcagaccacgcugauuc

SEQ ID NO: 590611 - RNA, 19 nt, Homo sapiens
  misc_RNA (1)...(19): siRNA sense strand
gggaagacgugcgcgaugu

SEQ ID NO: 590612 - RNA, 19 nt, Homo sapiens
  misc_RNA (1)...(19): siRNA sense strand
gcaagcaucggacuucaca

SEQ ID NO: 590613 - RNA, 19 nt, Homo sapiens
  misc_RNA (1)...(19): siRNA sense strand
gaauuacugcuacaaucaa

SEQ ID NO: 590614 - RNA, 19 nt, Homo sapiens
  misc_RNA (1)...(19): siRNA sense strand
ugacaagcccuaccucugu

SEQ ID NO: 590615 - RNA, 19 nt, Homo sapiens
  misc_RNA (1)...(19): siRNA sense strand
gcuccugggcugaacauuu

SEQ ID NO: 590616 - RNA, 19 nt, Homo sapiens
  misc_RNA (1)...(19): siRNA sense strand
ccagcugccuuccaacuuc

SEQ ID NO: 590617 - RNA, 19 nt, Homo sapiens
  misc_RNA (1)...(19): siRNA sense strand
gcaccgacuuggagcucuu

SEQ ID NO: 590618 - RNA, 19 nt, Homo sapiens
  misc_RNA (1)...(19): siRNA sense strand
gaaacucgacgcguucuuc

SEQ ID NO: 590619 - RNA, 19 nt, Homo sapiens
  misc_RNA (1)...(19): siRNA sense strand
cagaugcgauggcuacaag

SEQ ID NO: 590620 - RNA, 19 nt, Homo sapiens
  misc_RNA (1)...(19): siRNA sense strand
caaggccacugcuacaucu

SEQ ID NO: 590621 - RNA, 19 nt, Homo sapiens
  misc_RNA (1)...(19): siRNA sense strand
gccaguguuuguacaauca

SEQ ID NO: 590622 - RNA, 19 nt, Homo sapiens
  misc_RNA (1)...(19): siRNA sense strand
agcaagaagugccaagauu

SEQ ID NO: 590623 - RNA, 19 nt, Homo sapiens
  misc_RNA (1)...(19): siRNA sense strand
ggauuagaaagaucacaaa

SEQ ID NO: 590624 - RNA, 19 nt, Homo sapiens
  misc_RNA (1)...(19): siRNA sense strand
gggcuacugugaccaugga

SEQ ID NO: 590625 - RNA, 19 nt, Homo sapiens
  misc_RNA (1)...(19): siRNA sense strand
acuuggagcucuuugagaa

SEQ ID NO: 590626 - RNA, 19 nt, Homo sapiens
  misc_RNA (1)...(19): siRNA sense strand
ggaagaaaggcccaacuac

SEQ ID NO: 590627 - RNA, 19 nt, Homo sapiens
  misc_RNA (1)...(19): siRNA sense strand
ggucaaugcccacgccuau

SEQ ID NO: 590628 - RNA, 19 nt, Homo sapiens
  misc_RNA (1)...(19): siRNA sense strand
gaucaucuucccagaguca

SEQ ID NO: 590629 - RNA, 19 nt, Homo sapiens
  misc_RNA (1)...(19): siRNA sense strand
caaguggaacgaaucgauu

SEQ ID NO: 590630 - RNA, 19 nt, Homo sapiens
  misc_RNA (1)...(19): siRNA sense strand
ggagcucuuuccuguguca

SEQ ID NO: 590631 - RNA, 19 nt, Homo sapiens
  misc_RNA (1)...(19): siRNA sense strand
cuccugggcugaacauuug

SEQ ID NO: 590632 - RNA, 19 nt, Homo sapiens
  misc_RNA (1)...(19): siRNA sense strand
caggccgagucuuggauua

SEQ ID NO: 590633 - RNA, 19 nt, Homo sapiens
  misc_RNA (1)...(19): siRNA sense strand
gcucuuuccugugucagaa

SEQ ID NO: 590634 - RNA, 19 nt, Homo sapiens
  misc_RNA (1)...(19): siRNA sense strand
ucauugacuuccugaacaa

SEQ ID NO: 590635 - RNA, 19 nt, Homo sapiens
  misc_RNA (1)...(19): siRNA sense strand
guucuucggcaucuucuuu

SEQ ID NO: 590636 - RNA, 19 nt, Homo sapiens
  misc_RNA (1)...(19): siRNA sense strand
gaagacgugcgcgauguga

SEQ ID NO: 590637 - RNA, 19 nt, Homo sapiens
  misc_RNA (1)...(19): siRNA sense strand
ggccgagucuuggauuaga

SEQ ID NO: 590638 - RNA, 19 nt, Homo sapiens
  misc_RNA (1)...(19): siRNA sense strand
ugaauuacugcuacaauca

SEQ ID NO: 590639 - RNA, 19 nt, Homo sapiens
  misc_RNA (1)...(19): siRNA sense strand
aguccugcccugugaauua

SEQ ID NO: 590640 - RNA, 19 nt, Homo sapiens
  misc_RNA (1)...(19): siRNA sense strand
gcagcguccuuggcaguug

SEQ ID NO: 590641 - RNA, 19 nt, Homo sapiens
  misc_RNA (1)...(19): siRNA sense strand
gugagcaccugagcaugaa

SEQ ID NO: 590642 - RNA, 19 nt, Homo sapiens
  misc_RNA (1)...(19): siRNA sense strand
gagccaguguuuguacaau

SEQ ID NO: 590643 - RNA, 19 nt, Homo sapiens
  misc_RNA (1)...(19): siRNA sense strand
gagagccaguguuuguaca

SEQ ID NO: 590644 - RNA, 19 nt, Homo sapiens
  misc_RNA (1)...(19): siRNA sense strand
ggaauacgagacguucuau

SEQ ID NO: 590645 - RNA, 19 nt, Homo sapiens
  misc_RNA (1)...(19): siRNA sense strand
cgacgggacuuacgauucc

SEQ ID NO: 590646 - RNA, 19 nt, Homo sapiens
  misc_RNA (1)...(19): siRNA sense strand
gaacauuugaucuccaacu

SEQ ID NO: 590647 - RNA, 19 nt, Homo sapiens
  misc_RNA (1)...(19): siRNA sense strand
guccaacugucaaccuaga

SEQ ID NO: 590648 - RNA, 19 nt, Homo sapiens
  misc_RNA (1)...(19): siRNA sense strand
gcuccucucuccgugauuc

SEQ ID NO: 590649 - RNA, 19 nt, Homo sapiens
  misc_RNA (1)...(19): siRNA sense strand
acgccacccucaaucagua

SEQ ID NO: 590650 - RNA, 19 nt, Homo sapiens
  misc_RNA (1)...(19): siRNA sense strand
ccacaucaccaccuuggau

SEQ ID NO: 590651 - RNA, 19 nt, Homo sapiens
  misc_RNA (1)...(19): siRNA sense strand
gaacaacuucaguccaacu

SEQ ID NO: 590652 - RNA, 19 nt, Homo sapiens
  misc_RNA (1)...(19): siRNA sense strand
ucaguuacaccuucaaugg

SEQ ID NO: 590653 - RNA, 19 nt, Homo sapiens
  misc_RNA (1)...(19): siRNA sense strand
aaccaguccugcccuguga

SEQ ID NO: 590654 - RNA, 19 nt, Homo sapiens
  misc_RNA (1)...(19): siRNA sense strand
caacgggacaggccuccuu

SEQ ID NO: 590655 - RNA, 19 nt, Homo sapiens
  misc_RNA (1)...(19): siRNA sense strand
gguggaggcguucuuauac

SEQ ID NO: 590656 - RNA, 19 nt, Homo sapiens
  misc_RNA (1)...(19): siRNA sense strand
ggugguggaggcguucuua

SEQ ID NO: 590657 - RNA, 19 nt, Homo sapiens
  misc_RNA (1)...(19): siRNA sense strand
gaacgccacccucaaucag

SEQ ID NO: 590658 - RNA, 19 nt, Homo sapiens
  misc_RNA (1)...(19): siRNA sense strand
gcaggccgagucuuggauu

SEQ ID NO: 590659 - RNA, 19 nt, Homo sapiens
  misc_RNA (1)...(19): siRNA sense strand
ugguggaggcguucuuaua

SEQ ID NO: 590660 - RNA, 19 nt, Homo sapiens
  misc_RNA (1)...(19): siRNA sense strand
gacgggagcagguccuaug

SEQ ID NO: 590661 - RNA, 19 nt, Homo sapiens
  misc_RNA (1)...(19): siRNA sense strand
gccgagucuuggauuagaa

SEQ ID NO: 590662 - RNA, 19 nt, Homo sapiens
  misc_RNA (1)...(19): siRNA sense strand
acacgagggaagucaguaa

SEQ ID NO: 590663 - RNA, 19 nt, Homo sapiens
  misc_RNA (1)...(19): siRNA sense strand
ugugagcaccugagcauga

SEQ ID NO: 590664 - RNA, 19 nt, Homo sapiens
  misc_RNA (1)...(19): siRNA sense strand
ggaagacgugcgcgaugug

SEQ ID NO: 590665 - RNA, 19 nt, Homo sapiens
  misc_RNA (1)...(19): siRNA sense strand
ggacgacgggacuuacgau

SEQ ID NO: 590666 - RNA, 19 nt, Homo sapiens
  misc_RNA (1)...(19): siRNA sense strand
ccaaguggaacgaaucgau

SEQ ID NO: 590667 - RNA, 19 nt, Homo sapiens
  misc_RNA (1)...(19): siRNA sense strand
gaccacauuuuaucaggaa

SEQ ID NO: 590668 - RNA, 19 nt, Homo sapiens
  misc_RNA (1)...(19): siRNA sense strand
augcagagagccaguguuu

SEQ ID NO: 590669 - RNA, 19 nt, Homo sapiens
  misc_RNA (1)...(19): siRNA sense strand
gaauacgagacguucuaug

SEQ ID NO: 590670 - RNA, 19 nt, Homo sapiens
  misc_RNA (1)...(19): siRNA sense strand
ugaucgcgcucuccaacau

SEQ ID NO: 590671 - RNA, 19 nt, Homo sapiens
  misc_RNA (1)...(19): siRNA sense strand
ccuuggauggugucaguua

SEQ ID NO: 590672 - RNA, 19 nt, Homo sapiens
  misc_RNA (1)...(19): siRNA sense strand
cagcugccuuccaacuuca

SEQ ID NO: 590673 - RNA, 19 nt, Homo sapiens
  misc_RNA (1)...(19): siRNA sense strand
gcagcuguguguccuucuc

SEQ ID NO: 590674 - RNA, 19 nt, Homo sapiens
  misc_RNA (1)...(19): siRNA sense strand
cacagacaauggccagauc

SEQ ID NO: 590675 - RNA, 19 nt, Homo sapiens
  misc_RNA (1)...(19): siRNA sense strand
gcacgcugaaggcuuacuu

SEQ ID NO: 590676 - RNA, 19 nt, Homo sapiens
  misc_RNA (1)...(19): siRNA sense strand
cgaacgccacccucaauca

SEQ ID NO: 590677 - RNA, 19 nt, Homo sapiens
  misc_RNA (1)...(19): siRNA sense strand
cugaacauuugaucuccaa

SEQ ID NO: 590678 - RNA, 19 nt, Homo sapiens
  misc_RNA (1)...(19): siRNA sense strand
gagaugcuuuuccacuuug

SEQ ID NO: 590679 - RNA, 19 nt, Homo sapiens
  misc_RNA (1)...(19): siRNA sense strand
ggggagcucuuuccugugu

SEQ ID NO: 590680 - RNA, 19 nt, Homo sapiens
  misc_RNA (1)...(19): siRNA sense strand
cagagagccaguguuugua

SEQ ID NO: 590681 - RNA, 19 nt, Homo sapiens
  misc_RNA (1)...(19): siRNA sense strand
caacgcaagcaucggacuu

SEQ ID NO: 590682 - RNA, 19 nt, Homo sapiens
  misc_RNA (1)...(19): siRNA sense strand
gggcugaacauuugaucuc

SEQ ID NO: 590683 - RNA, 19 nt, Homo sapiens
  misc_RNA (1)...(19): siRNA sense strand
caacuucaccccuguuuuc

SEQ ID NO: 590684 - RNA, 19 nt, Homo sapiens
  misc_RNA (1)...(19): siRNA sense strand
auaaccagacugugacauu

SEQ ID NO: 590685 - RNA, 19 nt, Homo sapiens
  misc_RNA (1)...(19): siRNA sense strand
gugaggagcccaggaacga

SEQ ID NO: 590686 - RNA, 19 nt, Homo sapiens
  misc_RNA (1)...(19): siRNA sense strand
gaacuucccuuaagaguca

SEQ ID NO: 590687 - RNA, 19 nt, Homo sapiens
  misc_RNA (1)...(19): siRNA sense strand
ggaaugaccuggcagauca

SEQ ID NO: 590688 - RNA, 19 nt, Homo sapiens
  misc_RNA (1)...(19): siRNA sense strand
ccaagucgcuggagccauu

SEQ ID NO: 590689 - RNA, 19 nt, Homo sapiens
  misc_RNA (1)...(19): siRNA sense strand
gggaacaacuucaguccaa

SEQ ID NO: 590690 - RNA, 19 nt, Homo sapiens
  misc_RNA (1)...(19): siRNA sense strand
ugagcacgcugaaggcuua

SEQ ID NO: 590691 - RNA, 19 nt, Homo sapiens
  misc_RNA (1)...(19): siRNA sense strand
caaccuagaacuucccuua

SEQ ID NO: 590692 - RNA, 19 nt, Homo sapiens
  misc_RNA (1)...(19): siRNA sense strand
gcagagagccaguguuugu

SEQ ID NO: 590693 - RNA, 19 nt, Homo sapiens
  misc_RNA (1)...(19): siRNA sense strand
uaaccagacugugacauuu

SEQ ID NO: 590694 - RNA, 19 nt, Homo sapiens
  misc_RNA (1)...(19): siRNA sense strand
gcaagaagugccaagauug

SEQ ID NO: 590695 - RNA, 19 nt, Homo sapiens
  misc_RNA (1)...(19): siRNA sense strand
gggccagguucuccuauuu

SEQ ID NO: 590696 - RNA, 19 nt, Homo sapiens
  misc_RNA (1)...(19): siRNA sense strand
gaaaacagcccacugaugu

SEQ ID NO: 590697 - RNA, 19 nt, Homo sapiens
  misc_RNA (1)...(19): siRNA sense strand
ggacuguggucugccauug

SEQ ID NO: 590698 - RNA, 19 nt, Homo sapiens
  misc_RNA (1)...(19): siRNA sense strand
gggaagaaaggcccaacua

SEQ ID NO: 590699 - RNA, 19 nt, Homo sapiens
  misc_RNA (1)...(19): siRNA sense strand
gaacuccuccuuccugcuu

SEQ ID NO: 590700 - RNA, 19 nt, Homo sapiens
  misc_RNA (1)...(19): siRNA sense strand
uccaagggcugcaguucua

SEQ ID NO: 590701 - RNA, 19 nt, Homo sapiens
  misc_RNA (1)...(19): siRNA sense strand
ccuagaacuucccuuaaga

SEQ ID NO: 590702 - RNA, 19 nt, Homo sapiens
  misc_RNA (1)...(19): siRNA sense strand
caaugguggucgugugauu

SEQ ID NO: 590703 - RNA, 19 nt, Homo sapiens
  misc_RNA (1)...(19): siRNA sense strand
ggagagguaucgcccugau

SEQ ID NO: 590704 - RNA, 19 nt, Homo sapiens
  misc_RNA (1)...(19): siRNA sense strand
gugaauuacugcuacaauc

SEQ ID NO: 590705 - RNA, 19 nt, Homo sapiens
  misc_RNA (1)...(19): siRNA sense strand
ggagaugcuuuuccacuuu

SEQ ID NO: 590706 - RNA, 19 nt, Homo sapiens
  misc_RNA (1)...(19): siRNA sense strand
ccuaugcccuguuucucua

SEQ ID NO: 590707 - RNA, 19 nt, Homo sapiens
  misc_RNA (1)...(19): siRNA sense strand
ggagugaggagcccaggaa

SEQ ID NO: 590708 - RNA, 19 nt, Homo sapiens
  misc_RNA (1)...(19): siRNA sense strand
gccauucacucuggagauu

SEQ ID NO: 590709 - RNA, 19 nt, Homo sapiens
  misc_RNA (1)...(19): siRNA sense strand
gcagggacgacgggacuua

SEQ ID NO: 590710 - RNA, 19 nt, Homo sapiens
  misc_RNA (1)...(19): siRNA sense strand
gggcagaccacgcugauuc

SEQ ID NO: 590711 - RNA, 19 nt, Homo sapiens
  misc_RNA (1)...(19): siRNA sense strand
gggaagacgugcgcgaugu

SEQ ID NO: 590712 - RNA, 19 nt, Homo sapiens
  misc_RNA (1)...(19): siRNA sense strand
gcaagcaucggacuucaca

SEQ ID NO: 590713 - RNA, 19 nt, Homo sapiens
  misc_RNA (1)...(19): siRNA sense strand
gaauuacugcuacaaucaa

SEQ ID NO: 590714 - RNA, 19 nt, Homo sapiens
  misc_RNA (1)...(19): siRNA sense strand
ugacaagcccuaccucugu

SEQ ID NO: 590715 - RNA, 19 nt, Homo sapiens
  misc_RNA (1)...(19): siRNA sense strand
gcuccugggcugaacauuu

SEQ ID NO: 590716 - RNA, 19 nt, Homo sapiens
  misc_RNA (1)...(19): siRNA sense strand
ccagcugccuuccaacuuc

SEQ ID NO: 590717 - RNA, 19 nt, Homo sapiens
  misc_RNA (1)...(19): siRNA sense strand
gcaccgacuuggagcucuu

SEQ ID NO: 590718 - RNA, 19 nt, Homo sapiens
  misc_RNA (1)...(19): siRNA sense strand
gaaacucgacgcguucuuc

SEQ ID NO: 590719 - RNA, 19 nt, Homo sapiens
  misc_RNA (1)...(19): siRNA sense strand
cagaugcgauggcuacaag

SEQ ID NO: 590720 - RNA, 19 nt, Homo sapiens
  misc_RNA (1)...(19): siRNA sense strand
caaggccacugcuacaucu

SEQ ID NO: 590721 - RNA, 19 nt, Homo sapiens
  misc_RNA (1)...(19): siRNA sense strand
gccaguguuuguacaauca

SEQ ID NO: 590722 - RNA, 19 nt, Homo sapiens
  misc_RNA (1)...(19): siRNA sense strand
agcaagaagugccaagauu

SEQ ID NO: 590723 - RNA, 19 nt, Homo sapiens
  misc_RNA (1)...(19): siRNA sense strand
ggauuagaaagaucacaaa

SEQ ID NO: 590724 - RNA, 19 nt, Homo sapiens
  misc_RNA (1)...(19): siRNA sense strand
gggcuacugugaccaugga

SEQ ID NO: 590725 - RNA, 19 nt, Homo sapiens
  misc_RNA (1)...(19): siRNA sense strand
acuuggagcucuuugagaa

SEQ ID NO: 590726 - RNA, 19 nt, Homo sapiens
  misc_RNA (1)...(19): siRNA sense strand
ggaagaaaggcccaacuac

SEQ ID NO: 590727 - RNA, 19 nt, Homo sapiens
  misc_RNA (1)...(19): siRNA sense strand
ggucaaugcccacgccuau

SEQ ID NO: 590728 - RNA, 19 nt, Homo sapiens
  misc_RNA (1)...(19): siRNA sense strand
gaucaucuucccagaguca

SEQ ID NO: 590729 - RNA, 19 nt, Homo sapiens
  misc_RNA (1)...(19): siRNA sense strand
caaguggaacgaaucgauu

SEQ ID NO: 590730 - RNA, 19 nt, Homo sapiens
  misc_RNA (1)...(19): siRNA sense strand
ggagcucuuuccuguguca

SEQ ID NO: 590731 - RNA, 19 nt, Homo sapiens
  misc_RNA (1)...(19): siRNA sense strand
cuccugggcugaacauuug

SEQ ID NO: 590732 - RNA, 19 nt, Homo sapiens
  misc_RNA (1)...(19): siRNA sense strand
caggccgagucuuggauua

SEQ ID NO: 590733 - RNA, 19 nt, Homo sapiens
  misc_RNA (1)...(19): siRNA sense strand
gcucuuuccugugucagaa

SEQ ID NO: 590734 - RNA, 19 nt, Homo sapiens
  misc_RNA (1)...(19): siRNA sense strand
ucauugacuuccugaacaa

SEQ ID NO: 590735 - RNA, 19 nt, Homo sapiens
  misc_RNA (1)...(19): siRNA sense strand
guucuucggcaucuucuuu

SEQ ID NO: 590736 - RNA, 19 nt, Homo sapiens
  misc_RNA (1)...(19): siRNA sense strand
gaagacgugcgcgauguga

SEQ ID NO: 590737 - RNA, 19 nt, Homo sapiens
  misc_RNA (1)...(19): siRNA sense strand
ggccgagucuuggauuaga

SEQ ID NO: 590738 - RNA, 19 nt, Homo sapiens
  misc_RNA (1)...(19): siRNA sense strand
ugaauuacugcuacaauca

SEQ ID NO: 590739 - RNA, 19 nt, Homo sapiens
  misc_RNA (1)...(19): siRNA sense strand
aguccugcccugugaauua

SEQ ID NO: 590740 - RNA, 19 nt, Homo sapiens
  misc_RNA (1)...(19): siRNA sense strand
gcagcguccuuggcaguug

SEQ ID NO: 590741 - RNA, 19 nt, Homo sapiens
  misc_RNA (1)...(19): siRNA sense strand
gugagcaccugagcaugaa

SEQ ID NO: 590742 - RNA, 19 nt, Homo sapiens
  misc_RNA (1)...(19): siRNA sense strand
gagccaguguuuguacaau

SEQ ID NO: 590743 - RNA, 19 nt, Homo sapiens
  misc_RNA (1)...(19): siRNA sense strand
gagagccaguguuuguaca

SEQ ID NO: 590744 - RNA, 19 nt, Homo sapiens
  misc_RNA (1)...(19): siRNA sense strand
ggaauacgagacguucuau

SEQ ID NO: 590745 - RNA, 19 nt, Homo sapiens
  misc_RNA (1)...(19): siRNA sense strand
cgacgggacuuacgauucc

SEQ ID NO: 590746 - RNA, 19 nt, Homo sapiens
  misc_RNA (1)...(19): siRNA sense strand
gaacauuugaucuccaacu

SEQ ID NO: 590747 - RNA, 19 nt, Homo sapiens
  misc_RNA (1)...(19): siRNA sense strand
guccaacugucaaccuaga

SEQ ID NO: 590748 - RNA, 19 nt, Homo sapiens
  misc_RNA (1)...(19): siRNA sense strand
gcuccucucuccgugauuc

SEQ ID NO: 590749 - RNA, 19 nt, Homo sapiens
  misc_RNA (1)...(19): siRNA sense strand
acgccacccucaaucagua

SEQ ID NO: 590750 - RNA, 19 nt, Homo sapiens
  misc_RNA (1)...(19): siRNA sense strand
ccacaucaccaccuuggau

SEQ ID NO: 590751 - RNA, 19 nt, Homo sapiens
  misc_RNA (1)...(19): siRNA sense strand
gaacaacuucaguccaacu

SEQ ID NO: 590752 - RNA, 19 nt, Homo sapiens
  misc_RNA (1)...(19): siRNA sense strand
ucaguuacaccuucaaugg

SEQ ID NO: 590753 - RNA, 19 nt, Homo sapiens
  misc_RNA (1)...(19): siRNA sense strand
aaccaguccugcccuguga

SEQ ID NO: 590754 - RNA, 19 nt, Homo sapiens
  misc_RNA (1)...(19): siRNA sense strand
caacgggacaggccuccuu

SEQ ID NO: 590755 - RNA, 19 nt, Homo sapiens
  misc_RNA (1)...(19): siRNA sense strand
gguggaggcguucuuauac

SEQ ID NO: 590756 - RNA, 19 nt, Homo sapiens
  misc_RNA (1)...(19): siRNA sense strand
ggugguggaggcguucuua

SEQ ID NO: 590757 - RNA, 19 nt, Homo sapiens
  misc_RNA (1)...(19): siRNA sense strand
gaacgccacccucaaucag

SEQ ID NO: 590758 - RNA, 19 nt, Homo sapiens
  misc_RNA (1)...(19): siRNA sense strand
gcaggccgagucuuggauu

SEQ ID NO: 590759 - RNA, 19 nt, Homo sapiens
  misc_RNA (1)...(19): siRNA sense strand
ugguggaggcguucuuaua

SEQ ID NO: 590760 - RNA, 19 nt, Homo sapiens
  misc_RNA (1)...(19): siRNA sense strand
gacgggagcagguccuaug

SEQ ID NO: 590761 - RNA, 19 nt, Homo sapiens
  misc_RNA (1)...(19): siRNA sense strand
gccgagucuuggauuagaa

SEQ ID NO: 590762 - RNA, 19 nt, Homo sapiens
  misc_RNA (1)...(19): siRNA sense strand
acacgagggaagucaguaa

SEQ ID NO: 590763 - RNA, 19 nt, Homo sapiens
  misc_RNA (1)...(19): siRNA sense strand
ugugagcaccugagcauga

SEQ ID NO: 590764 - RNA, 19 nt, Homo sapiens
  misc_RNA (1)...(19): siRNA sense strand
ggaagacgugcgcgaugug

SEQ ID NO: 590765 - RNA, 19 nt, Homo sapiens
  misc_RNA (1)...(19): siRNA sense strand
ggacgacgggacuuacgau

SEQ ID NO: 590766 - RNA, 19 nt, Homo sapiens
  misc_RNA (1)...(19): siRNA sense strand
ccaaguggaacgaaucgau

SEQ ID NO: 590767 - RNA, 19 nt, Homo sapiens
  misc_RNA (1)...(19): siRNA sense strand
gaccacauuuuaucaggaa

SEQ ID NO: 590768 - RNA, 19 nt, Homo sapiens
  misc_RNA (1)...(19): siRNA sense strand
augcagagagccaguguuu

SEQ ID NO: 590769 - RNA, 19 nt, Homo sapiens
  misc_RNA (1)...(19): siRNA sense strand
gaauacgagacguucuaug

SEQ ID NO: 590770 - RNA, 19 nt, Homo sapiens
  misc_RNA (1)...(19): siRNA sense strand
ugaucgcgcucuccaacau

SEQ ID NO: 590771 - RNA, 19 nt, Homo sapiens
  misc_RNA (1)...(19): siRNA sense strand
ccuuggauggugucaguua

SEQ ID NO: 590772 - RNA, 19 nt, Homo sapiens
  misc_RNA (1)...(19): siRNA sense strand
cagcugccuuccaacuuca

SEQ ID NO: 590773 - RNA, 19 nt, Homo sapiens
  misc_RNA (1)...(19): siRNA sense strand
gcagcuguguguccuucuc

SEQ ID NO: 590774 - RNA, 19 nt, Homo sapiens
  misc_RNA (1)...(19): siRNA sense strand
cacagacaauggccagauc

SEQ ID NO: 590775 - RNA, 19 nt, Homo sapiens
  misc_RNA (1)...(19): siRNA sense strand
gcacgcugaaggcuuacuu

SEQ ID NO: 590776 - RNA, 19 nt, Homo sapiens
  misc_RNA (1)...(19): siRNA sense strand
cgaacgccacccucaauca

SEQ ID NO: 590777 - RNA, 19 nt, Homo sapiens
  misc_RNA (1)...(19): siRNA sense strand
cugaacauuugaucuccaa

SEQ ID NO: 590778 - RNA, 19 nt, Homo sapiens
  misc_RNA (1)...(19): siRNA sense strand
gagaugcuuuuccacuuug

SEQ ID NO: 590779 - RNA, 19 nt, Homo sapiens
  misc_RNA (1)...(19): siRNA sense strand
ggggagcucuuuccugugu

SEQ ID NO: 590780 - RNA, 19 nt, Homo sapiens
  misc_RNA (1)...(19): siRNA sense strand
cagagagccaguguuugua

SEQ ID NO: 590781 - RNA, 19 nt, Homo sapiens
  misc_RNA (1)...(19): siRNA sense strand
caacgcaagcaucggacuu

SEQ ID NO: 590782 - RNA, 19 nt, Homo sapiens
  misc_RNA (1)...(19): siRNA sense strand
gggcugaacauuugaucuc

SEQ ID NO: 590783 - RNA, 19 nt, Homo sapiens
  misc_RNA (1)...(19): siRNA sense strand
caacuucaccccuguuuuc

SEQ ID NO: 590784 - RNA, 19 nt, Homo sapiens
  misc_RNA (1)...(19): siRNA sense strand
auaaccagacugugacauu

SEQ ID NO: 590785 - RNA, 19 nt, Homo sapiens
  misc_RNA (1)...(19): siRNA sense strand
gugaggagcccaggaacga

SEQ ID NO: 590786 - RNA, 19 nt, Homo sapiens
  misc_RNA (1)...(19): siRNA sense strand
ccuaugcccuguuucucua

SEQ ID NO: 590787 - RNA, 19 nt, Homo sapiens
  misc_RNA (1)...(19): siRNA sense strand
ggauuagaaagaucacaaa

SEQ ID NO: 590788 - RNA, 19 nt, Homo sapiens
  misc_RNA (1)...(19): siRNA sense strand
ggucaaugcccacgccuau

SEQ ID NO: 590789 - RNA, 19 nt, Homo sapiens
  misc_RNA (1)...(19): siRNA sense strand
gaucaucuucccagaguca

SEQ ID NO: 590790 - RNA, 19 nt, Homo sapiens
  misc_RNA (1)...(19): siRNA sense strand
caggccgagucuuggauua

SEQ ID NO: 590791 - RNA, 19 nt, Homo sapiens
  misc_RNA (1)...(19): siRNA sense strand
ggccgagucuuggauuaga

SEQ ID NO: 590792 - RNA, 19 nt, Homo sapiens
  misc_RNA (1)...(19): siRNA sense strand
ggaauacgagacguucuau

SEQ ID NO: 590793 - RNA, 19 nt, Homo sapiens
  misc_RNA (1)...(19): siRNA sense strand
gcuccucucuccgugauuc

SEQ ID NO: 590794 - RNA, 19 nt, Homo sapiens
  misc_RNA (1)...(19): siRNA sense strand
gcaggccgagucuuggauu

SEQ ID NO: 590795 - RNA, 19 nt, Homo sapiens
  misc_RNA (1)...(19): siRNA sense strand
gacgggagcagguccuaug

SEQ ID NO: 590796 - RNA, 19 nt, Homo sapiens
  misc_RNA (1)...(19): siRNA sense strand
gccgagucuuggauuagaa

SEQ ID NO: 590797 - RNA, 19 nt, Homo sapiens
  misc_RNA (1)...(19): siRNA sense strand
gaccacauuuuaucaggaa

SEQ ID NO: 590798 - RNA, 19 nt, Homo sapiens
  misc_RNA (1)...(19): siRNA sense strand
gaauacgagacguucuaug

SEQ ID NO: 590799 - RNA, 19 nt, Homo sapiens
  misc_RNA (1)...(19): siRNA sense strand
cacagacaauggccagauc

SEQ ID NO: 590800 - RNA, 19 nt, Homo sapiens
  misc_RNA (1)...(19): siRNA sense strand
ggaggaccguggacuucac

SEQ ID NO: 590801 - RNA, 19 nt, Homo sapiens
  misc_RNA (1)...(19): siRNA sense strand
aauacgagacguucuaugg

SEQ ID NO: 590802 - RNA, 19 nt, Homo sapiens
  misc_RNA (1)...(19): siRNA sense strand
cugggacgaugcugacuuc

SEQ ID NO: 590803 - RNA, 19 nt, Homo sapiens
  misc_RNA (1)...(19): siRNA sense strand
aggaauacgagacguucua

SEQ ID NO: 590804 - RNA, 19 nt, Homo sapiens
  misc_RNA (1)...(19): siRNA sense strand
ggaaugaccuggcagauca

SEQ ID NO: 590805 - RNA, 19 nt, Homo sapiens
  misc_RNA (1)...(19): siRNA sense strand
ccaagucgcuggagccauu

SEQ ID NO: 590806 - RNA, 19 nt, Homo sapiens
  misc_RNA (1)...(19): siRNA sense strand
gcagagagccaguguuugu

SEQ ID NO: 590807 - RNA, 19 nt, Homo sapiens
  misc_RNA (1)...(19): siRNA sense strand
uaaccagacugugacauuu

SEQ ID NO: 590808 - RNA, 19 nt, Homo sapiens
  misc_RNA (1)...(19): siRNA sense strand
gcaagaagugccaagauug

SEQ ID NO: 590809 - RNA, 19 nt, Homo sapiens
  misc_RNA (1)...(19): siRNA sense strand
gaaaacagcccacugaugu

SEQ ID NO: 590810 - RNA, 19 nt, Homo sapiens
  misc_RNA (1)...(19): siRNA sense strand
ggacuguggucugccauug

SEQ ID NO: 590811 - RNA, 19 nt, Homo sapiens
  misc_RNA (1)...(19): siRNA sense strand
gggaagaaaggcccaacua

SEQ ID NO: 590812 - RNA, 19 nt, Homo sapiens
  misc_RNA (1)...(19): siRNA sense strand
gaacuccuccuuccugcuu

SEQ ID NO: 590813 - RNA, 19 nt, Homo sapiens
  misc_RNA (1)...(19): siRNA sense strand
uccaagggcugcaguucua

SEQ ID NO: 590814 - RNA, 19 nt, Homo sapiens
  misc_RNA (1)...(19): siRNA sense strand
caaugguggucgugugauu

SEQ ID NO: 590815 - RNA, 19 nt, Homo sapiens
  misc_RNA (1)...(19): siRNA sense strand
ggagagguaucgcccugau

SEQ ID NO: 590816 - RNA, 19 nt, Homo sapiens
  misc_RNA (1)...(19): siRNA sense strand
ggagaugcuuuuccacuuu

SEQ ID NO: 590817 - RNA, 19 nt, Homo sapiens
  misc_RNA (1)...(19): siRNA sense strand
ccuaugcccuguuucucua

SEQ ID NO: 590818 - RNA, 19 nt, Homo sapiens
  misc_RNA (1)...(19): siRNA sense strand
gccauucacucuggagauu

SEQ ID NO: 590819 - RNA, 19 nt, Homo sapiens
  misc_RNA (1)...(19): siRNA sense strand
gcagggacgacgggacuua

SEQ ID NO: 590820 - RNA, 19 nt, Homo sapiens
  misc_RNA (1)...(19): siRNA sense strand
gggcagaccacgcugauuc

SEQ ID NO: 590821 - RNA, 19 nt, Homo sapiens
  misc_RNA (1)...(19): siRNA sense strand
gcaagcaucggacuucaca

SEQ ID NO: 590822 - RNA, 19 nt, Homo sapiens
  misc_RNA (1)...(19): siRNA sense strand
ugacaagcccuaccucugu

SEQ ID NO: 590823 - RNA, 19 nt, Homo sapiens
  misc_RNA (1)...(19): siRNA sense strand
gcuccugggcugaacauuu

SEQ ID NO: 590824 - RNA, 19 nt, Homo sapiens
  misc_RNA (1)...(19): siRNA sense strand
ccagcugccuuccaacuuc

SEQ ID NO: 590825 - RNA, 19 nt, Homo sapiens
  misc_RNA (1)...(19): siRNA sense strand
gcaccgacuuggagcucuu

SEQ ID NO: 590826 - RNA, 19 nt, Homo sapiens
  misc_RNA (1)...(19): siRNA sense strand
gccaguguuuguacaauca

SEQ ID NO: 590827 - RNA, 19 nt, Homo sapiens
  misc_RNA (1)...(19): siRNA sense strand
agcaagaagugccaagauu

SEQ ID NO: 590828 - RNA, 19 nt, Homo sapiens
  misc_RNA (1)...(19): siRNA sense strand
ggauuagaaagaucacaaa

SEQ ID NO: 590829 - RNA, 19 nt, Homo sapiens
  misc_RNA (1)...(19): siRNA sense strand
acuuggagcucuuugagaa

SEQ ID NO: 590830 - RNA, 19 nt, Homo sapiens
  misc_RNA (1)...(19): siRNA sense strand
ggaagaaaggcccaacuac

SEQ ID NO: 590831 - RNA, 19 nt, Homo sapiens
  misc_RNA (1)...(19): siRNA sense strand
ggucaaugcccacgccuau

SEQ ID NO: 590832 - RNA, 19 nt, Homo sapiens
  misc_RNA (1)...(19): siRNA sense strand
gaucaucuucccagaguca

SEQ ID NO: 590833 - RNA, 19 nt, Homo sapiens
  misc_RNA (1)...(19): siRNA sense strand
ggagcucuuuccuguguca

SEQ ID NO: 590834 - RNA, 19 nt, Homo sapiens
  misc_RNA (1)...(19): siRNA sense strand
cuccugggcugaacauuug

SEQ ID NO: 590835 - RNA, 19 nt, Homo sapiens
  misc_RNA (1)...(19): siRNA sense strand
caggccgagucuuggauua

SEQ ID NO: 590836 - RNA, 19 nt, Homo sapiens
  misc_RNA (1)...(19): siRNA sense strand
gcucuuuccugugucagaa

SEQ ID NO: 590837 - RNA, 19 nt, Homo sapiens
  misc_RNA (1)...(19): siRNA sense strand
ggccgagucuuggauuaga

SEQ ID NO: 590838 - RNA, 19 nt, Homo sapiens
  misc_RNA (1)...(19): siRNA sense strand
gcagcguccuuggcaguug

SEQ ID NO: 590839 - RNA, 19 nt, Homo sapiens
  misc_RNA (1)...(19): siRNA sense strand
gagccaguguuuguacaau

SEQ ID NO: 590840 - RNA, 19 nt, Homo sapiens
  misc_RNA (1)...(19): siRNA sense strand
gagagccaguguuuguaca

SEQ ID NO: 590841 - RNA, 19 nt, Homo sapiens
  misc_RNA (1)...(19): siRNA sense strand
ggaauacgagacguucuau

SEQ ID NO: 590842 - RNA, 19 nt, Homo sapiens
  misc_RNA (1)...(19): siRNA sense strand
cgacgggacuuacgauucc

SEQ ID NO: 590843 - RNA, 19 nt, Homo sapiens
  misc_RNA (1)...(19): siRNA sense strand
gaacauuugaucuccaacu

SEQ ID NO: 590844 - RNA, 19 nt, Homo sapiens
  misc_RNA (1)...(19): siRNA sense strand
gcuccucucuccgugauuc

SEQ ID NO: 590845 - RNA, 19 nt, Homo sapiens
  misc_RNA (1)...(19): siRNA sense strand
acgccacccucaaucagua

SEQ ID NO: 590846 - RNA, 19 nt, Homo sapiens
  misc_RNA (1)...(19): siRNA sense strand
ccacaucaccaccuuggau

SEQ ID NO: 590847 - RNA, 19 nt, Homo sapiens
  misc_RNA (1)...(19): siRNA sense strand
ucaguuacaccuucaaugg

SEQ ID NO: 590848 - RNA, 19 nt, Homo sapiens
  misc_RNA (1)...(19): siRNA sense strand
aaccaguccugcccuguga

SEQ ID NO: 590849 - RNA, 19 nt, Homo sapiens
  misc_RNA (1)...(19): siRNA sense strand
caacgggacaggccuccuu

SEQ ID NO: 590850 - RNA, 19 nt, Homo sapiens
  misc_RNA (1)...(19): siRNA sense strand
gaacgccacccucaaucag

SEQ ID NO: 590851 - RNA, 19 nt, Homo sapiens
  misc_RNA (1)...(19): siRNA sense strand
gcaggccgagucuuggauu

SEQ ID NO: 590852 - RNA, 19 nt, Homo sapiens
  misc_RNA (1)...(19): siRNA sense strand
gacgggagcagguccuaug

SEQ ID NO: 590853 - RNA, 19 nt, Homo sapiens
  misc_RNA (1)...(19): siRNA sense strand
gccgagucuuggauuagaa

SEQ ID NO: 590854 - RNA, 19 nt, Homo sapiens
  misc_RNA (1)...(19): siRNA sense strand
acacgagggaagucaguaa

SEQ ID NO: 590855 - RNA, 19 nt, Homo sapiens
  misc_RNA (1)...(19): siRNA sense strand
gaccacauuuuaucaggaa

SEQ ID NO: 590856 - RNA, 19 nt, Homo sapiens
  misc_RNA (1)...(19): siRNA sense strand
augcagagagccaguguuu

SEQ ID NO: 590857 - RNA, 19 nt, Homo sapiens
  misc_RNA (1)...(19): siRNA sense strand
ugaucgcgcucuccaacau

SEQ ID NO: 590858 - RNA, 19 nt, Homo sapiens
  misc_RNA (1)...(19): siRNA sense strand
ccuuggauggugucaguua

SEQ ID NO: 590859 - RNA, 19 nt, Homo sapiens
  misc_RNA (1)...(19): siRNA sense strand
ggacgacgggacuuacgau

SEQ ID NO: 590860 - RNA, 19 nt, Homo sapiens
  misc_RNA (1)...(19): siRNA sense strand
gaauacgagacguucuaug

SEQ ID NO: 590861 - RNA, 19 nt, Homo sapiens
  misc_RNA (1)...(19): siRNA sense strand
cacagacaauggccagauc

SEQ ID NO: 590862 - RNA, 19 nt, Homo sapiens
  misc_RNA (1)...(19): siRNA sense strand
cgaacgccacccucaauca

SEQ ID NO: 590863 - RNA, 19 nt, Homo sapiens
  misc_RNA (1)...(19): siRNA sense strand
cugaacauuugaucuccaa

SEQ ID NO: 590864 - RNA, 19 nt, Homo sapiens
  misc_RNA (1)...(19): siRNA sense strand
cagcugccuuccaacuuca

SEQ ID NO: 590865 - RNA, 19 nt, Homo sapiens
  misc_RNA (1)...(19): siRNA sense strand
gagaugcuuuuccacuuug

SEQ ID NO: 590866 - RNA, 19 nt, Homo sapiens
  misc_RNA (1)...(19): siRNA sense strand
ggggagcucuuuccugugu

SEQ ID NO: 590867 - RNA, 19 nt, Homo sapiens
  misc_RNA (1)...(19): siRNA sense strand
cagagagccaguguuugua

SEQ ID NO: 590868 - RNA, 19 nt, Homo sapiens
  misc_RNA (1)...(19): siRNA sense strand
caacgcaagcaucggacuu

SEQ ID NO: 590869 - RNA, 19 nt, Homo sapiens
  misc_RNA (1)...(19): siRNA sense strand
gggcugaacauuugaucuc

SEQ ID NO: 590870 - RNA, 19 nt, Homo sapiens
  misc_RNA (1)...(19): siRNA sense strand
caacuucaccccuguuuuc

SEQ ID NO: 590871 - RNA, 19 nt, Homo sapiens
  misc_RNA (1)...(19): siRNA sense strand
ggaaugacaagcccuaccu

SEQ ID NO: 590872 - RNA, 19 nt, Homo sapiens
  misc_RNA (1)...(19): siRNA sense strand
auaaccagacugugacauu

SEQ ID NO: 590873 - RNA, 19 nt, Homo sapiens
  misc_RNA (1)...(19): siRNA sense strand
aauacgagacguucuaugg

SEQ ID NO: 590874 - RNA, 19 nt, Homo sapiens
  misc_RNA (1)...(19): siRNA sense strand
agacagcugcaccgacuug

SEQ ID NO: 590875 - RNA, 19 nt, Homo sapiens
  misc_RNA (1)...(19): siRNA sense strand
uccguguccugcuggauaa

SEQ ID NO: 590876 - RNA, 19 nt, Homo sapiens
  misc_RNA (1)...(19): siRNA sense strand
ggaggaccguggacuucac

SEQ ID NO: 590877 - RNA, 19 nt, Homo sapiens
  misc_RNA (1)...(19): siRNA sense strand
cugggacgaugcugacuuc

SEQ ID NO: 590878 - RNA, 19 nt, Homo sapiens
  misc_RNA (1)...(19): siRNA sense strand
ccacgugggcugugcuaca

SEQ ID NO: 590879 - RNA, 19 nt, Homo sapiens
  misc_RNA (1)...(19): siRNA sense strand
aggaauacgagacguucua

SEQ ID NO: 590880 - RNA, 19 nt, Homo sapiens
  misc_RNA (1)...(19): siRNA sense strand
uuggagcucuuugagaaug

SEQ ID NO: 590881 - RNA, 19 nt, Homo sapiens
  misc_RNA (1)...(19): siRNA sense strand
ggacaccgaucuucucuug

SEQ ID NO: 590882 - RNA, 19 nt, Homo sapiens
  misc_RNA (1)...(19): siRNA sense strand
ggaagaggcugaaguugug

SEQ ID NO: 590883 - RNA, 19 nt, Homo sapiens
  misc_RNA (1)...(19): siRNA sense strand
acaaagcacuagccacuua

SEQ ID NO: 590884 - RNA, 19 nt, Homo sapiens
  misc_RNA (1)...(19): siRNA sense strand
ugaagaagaagaagaguua

SEQ ID NO: 590885 - RNA, 19 nt, Homo sapiens
  misc_RNA (1)...(19): siRNA sense strand
gaaccugccugcccugaau

SEQ ID NO: 590886 - RNA, 19 nt, Homo sapiens
  misc_RNA (1)...(19): siRNA sense strand
ggacacgccuggcagaaau

SEQ ID NO: 590887 - RNA, 19 nt, Homo sapiens
  misc_RNA (1)...(19): siRNA sense strand
ggaccucccuagaaagaaa

SEQ ID NO: 590888 - RNA, 19 nt, Homo sapiens
  misc_RNA (1)...(19): siRNA sense strand
gaaccacgcaucaacauug

SEQ ID NO: 590889 - RNA, 19 nt, Homo sapiens
  misc_RNA (1)...(19): siRNA sense strand
ggccaaaggugaugugaug

SEQ ID NO: 590890 - RNA, 19 nt, Homo sapiens
  misc_RNA (1)...(19): siRNA sense strand
gcaacaaauucgcccauca

SEQ ID NO: 590891 - RNA, 19 nt, Homo sapiens
  misc_RNA (1)...(19): siRNA sense strand
gaagauaggaaauccacaa

SEQ ID NO: 590892 - RNA, 19 nt, Homo sapiens
  misc_RNA (1)...(19): siRNA sense strand
caaugcagauaccucagua

SEQ ID NO: 590893 - RNA, 19 nt, Homo sapiens
  misc_RNA (1)...(19): siRNA sense strand
agaaaucccugaacuccaa

SEQ ID NO: 590894 - RNA, 19 nt, Homo sapiens
  misc_RNA (1)...(19): siRNA sense strand
acagucagcugaagaccua

SEQ ID NO: 590895 - RNA, 19 nt, Homo sapiens
  misc_RNA (1)...(19): siRNA sense strand
cccaagggcaccuguauua

SEQ ID NO: 590896 - RNA, 19 nt, Homo sapiens
  misc_RNA (1)...(19): siRNA sense strand
gcaccuguauuaugacuac

SEQ ID NO: 590897 - RNA, 19 nt, Homo sapiens
  misc_RNA (1)...(19): siRNA sense strand
gaucaaacccaucaaggau

SEQ ID NO: 590898 - RNA, 19 nt, Homo sapiens
  misc_RNA (1)...(19): siRNA sense strand
aagggcaccuguauuauga

SEQ ID NO: 590899 - RNA, 19 nt, Homo sapiens
  misc_RNA (1)...(19): siRNA sense strand
gaugguugcucuggaaaug

SEQ ID NO: 590900 - RNA, 19 nt, Homo sapiens
  misc_RNA (1)...(19): siRNA sense strand
gaccuacucuagugacaga

SEQ ID NO: 590901 - RNA, 19 nt, Homo sapiens
  misc_RNA (1)...(19): siRNA sense strand
caaguggaccucccuagaa

SEQ ID NO: 590902 - RNA, 19 nt, Homo sapiens
  misc_RNA (1)...(19): siRNA sense strand
guugggaggugucauggaa

SEQ ID NO: 590903 - RNA, 19 nt, Homo sapiens
  misc_RNA (1)...(19): siRNA sense strand
acacaaggccacacuggua

SEQ ID NO: 590904 - RNA, 19 nt, Homo sapiens
  misc_RNA (1)...(19): siRNA sense strand
ggaagaagauaggaaaucc

SEQ ID NO: 590905 - RNA, 19 nt, Homo sapiens
  misc_RNA (1)...(19): siRNA sense strand
caaaggugaugugaugguu

SEQ ID NO: 590906 - RNA, 19 nt, Homo sapiens
  misc_RNA (1)...(19): siRNA sense strand
gagagcagacuguagaugu

SEQ ID NO: 590907 - RNA, 19 nt, Homo sapiens
  misc_RNA (1)...(19): siRNA sense strand
acaccgaucuucucuugga

SEQ ID NO: 590908 - RNA, 19 nt, Homo sapiens
  misc_RNA (1)...(19): siRNA sense strand
ucccugaacuccaagauau

SEQ ID NO: 590909 - RNA, 19 nt, Homo sapiens
  misc_RNA (1)...(19): siRNA sense strand
ucaagaccgugcaggagaa

SEQ ID NO: 590910 - RNA, 19 nt, Homo sapiens
  misc_RNA (1)...(19): siRNA sense strand
gggugacgcagaacuauaa

SEQ ID NO: 590911 - RNA, 19 nt, Homo sapiens
  misc_RNA (1)...(19): siRNA sense strand
caagggcaccuguauuaug

SEQ ID NO: 590912 - RNA, 19 nt, Homo sapiens
  misc_RNA (1)...(19): siRNA sense strand
cugaagaccuacucuagug

SEQ ID NO: 590913 - RNA, 19 nt, Homo sapiens
  misc_RNA (1)...(19): siRNA sense strand
caaggaguguggcaaaguc

SEQ ID NO: 590914 - RNA, 19 nt, Homo sapiens
  misc_RNA (1)...(19): siRNA sense strand
gcuuugcacucucuguuug

SEQ ID NO: 590915 - RNA, 19 nt, Homo sapiens
  misc_RNA (1)...(19): siRNA sense strand
ggaagcaucagccgagugu

SEQ ID NO: 590916 - RNA, 19 nt, Homo sapiens
  misc_RNA (1)...(19): siRNA sense strand
uacagaagauggugaaguc

SEQ ID NO: 590917 - RNA, 19 nt, Homo sapiens
  misc_RNA (1)...(19): siRNA sense strand
ugugacaagugaagaagaa

SEQ ID NO: 590918 - RNA, 19 nt, Homo sapiens
  misc_RNA (1)...(19): siRNA sense strand
ugcagcagcaccaguauua

SEQ ID NO: 590919 - RNA, 19 nt, Homo sapiens
  misc_RNA (1)...(19): siRNA sense strand
gauaggaaauccacaaaag

SEQ ID NO: 590920 - RNA, 19 nt, Homo sapiens
  misc_RNA (1)...(19): siRNA sense strand
aaguggaccucccuagaaa

SEQ ID NO: 590921 - RNA, 19 nt, Homo sapiens
  misc_RNA (1)...(19): siRNA sense strand
gcaguuugaugccaagaac

SEQ ID NO: 590922 - RNA, 19 nt, Homo sapiens
  misc_RNA (1)...(19): siRNA sense strand
ggauccaccucaacaacau

SEQ ID NO: 590923 - RNA, 19 nt, Homo sapiens
  misc_RNA (1)...(19): siRNA sense strand
gucauccuuuagcaaauua

SEQ ID NO: 590924 - RNA, 19 nt, Homo sapiens
  misc_RNA (1)...(19): siRNA sense strand
gacaagugaagaagaagaa

SEQ ID NO: 590925 - RNA, 19 nt, Homo sapiens
  misc_RNA (1)...(19): siRNA sense strand
agagugaggugccgaaguc

SEQ ID NO: 590926 - RNA, 19 nt, Homo sapiens
  misc_RNA (1)...(19): siRNA sense strand
ucacagcacaugcaacaga

SEQ ID NO: 590927 - RNA, 19 nt, Homo sapiens
  misc_RNA (1)...(19): siRNA sense strand
gacuguagauguugaacca

SEQ ID NO: 590928 - RNA, 19 nt, Homo sapiens
  misc_RNA (1)...(19): siRNA sense strand
caacauuggcuugagauuc

SEQ ID NO: 590929 - RNA, 19 nt, Homo sapiens
  misc_RNA (1)...(19): siRNA sense strand
ccaagaacaagcugacaug

SEQ ID NO: 590930 - RNA, 19 nt, Homo sapiens
  misc_RNA (1)...(19): siRNA sense strand
gcaguugggaggugucaug

SEQ ID NO: 590931 - RNA, 19 nt, Homo sapiens
  misc_RNA (1)...(19): siRNA sense strand
agagcagacuguagauguu

SEQ ID NO: 590932 - RNA, 19 nt, Homo sapiens
  misc_RNA (1)...(19): siRNA sense strand
agacgcagccgcaacaaau

SEQ ID NO: 590933 - RNA, 19 nt, Homo sapiens
  misc_RNA (1)...(19): siRNA sense strand
ggaggacccggaagaagau

SEQ ID NO: 590934 - RNA, 19 nt, Homo sapiens
  misc_RNA (1)...(19): siRNA sense strand
ggaggaggacccggaagaa

SEQ ID NO: 590935 - RNA, 19 nt, Homo sapiens
  misc_RNA (1)...(19): siRNA sense strand
agaagauggugaaguccaa

SEQ ID NO: 590936 - RNA, 19 nt, Homo sapiens
  misc_RNA (1)...(19): siRNA sense strand
ugucauccuuuagcaaauu

SEQ ID NO: 590937 - RNA, 19 nt, Homo sapiens
  misc_RNA (1)...(19): siRNA sense strand
ugaauuugcuuugcacucu

SEQ ID NO: 590938 - RNA, 19 nt, Homo sapiens
  misc_RNA (1)...(19): siRNA sense strand
guggagggaccaauucuga

SEQ ID NO: 590939 - RNA, 19 nt, Homo sapiens
  misc_RNA (1)...(19): siRNA sense strand
ccaucugccugaaggaguu

SEQ ID NO: 590940 - RNA, 19 nt, Homo sapiens
  misc_RNA (1)...(19): siRNA sense strand
cauggaagaggcugaaguu

SEQ ID NO: 590941 - RNA, 19 nt, Homo sapiens
  misc_RNA (1)...(19): siRNA sense strand
ccgaaaugcacacaugaaa

SEQ ID NO: 590942 - RNA, 19 nt, Homo sapiens
  misc_RNA (1)...(19): siRNA sense strand
gagcagacuguagauguug

SEQ ID NO: 590943 - RNA, 19 nt, Homo sapiens
  misc_RNA (1)...(19): siRNA sense strand
gagcagcagcagcaacaga

SEQ ID NO: 590944 - RNA, 19 nt, Homo sapiens
  misc_RNA (1)...(19): siRNA sense strand
ccgaucuucucuuggauga

SEQ ID NO: 590945 - RNA, 19 nt, Homo sapiens
  misc_RNA (1)...(19): siRNA sense strand
caagugaagaagaagaaga

SEQ ID NO: 590946 - RNA, 19 nt, Homo sapiens
  misc_RNA (1)...(19): siRNA sense strand
ccacuuacagcaaagacuu

SEQ ID NO: 590947 - RNA, 19 nt, Homo sapiens
  misc_RNA (1)...(19): siRNA sense strand
aagcagaaaucccugaacu

SEQ ID NO: 590948 - RNA, 19 nt, Homo sapiens
  misc_RNA (1)...(19): siRNA sense strand
cagaugcaccuaccugaug

SEQ ID NO: 590949 - RNA, 19 nt, Homo sapiens
  misc_RNA (1)...(19): siRNA sense strand
guaucuccaugcaagaaau

SEQ ID NO: 590950 - RNA, 19 nt, Homo sapiens
  misc_RNA (1)...(19): siRNA sense strand
gcaaggaguguggcaaagu

SEQ ID NO: 590951 - RNA, 19 nt, Homo sapiens
  misc_RNA (1)...(19): siRNA sense strand
gaggaacaacagaggcaaa

SEQ ID NO: 590952 - RNA, 19 nt, Homo sapiens
  misc_RNA (1)...(19): siRNA sense strand
aagccgaaaugcacacaug

SEQ ID NO: 590953 - RNA, 19 nt, Homo sapiens
  misc_RNA (1)...(19): siRNA sense strand
ugugaugguugcucuggaa

SEQ ID NO: 590954 - RNA, 19 nt, Homo sapiens
  misc_RNA (1)...(19): siRNA sense strand
aagcugacaugcuccaucu

SEQ ID NO: 590955 - RNA, 19 nt, Homo sapiens
  misc_RNA (1)...(19): siRNA sense strand
ccagcugagucugaucaaa

SEQ ID NO: 590956 - RNA, 19 nt, Homo sapiens
  misc_RNA (1)...(19): siRNA sense strand
gaggacagucagcugaaga

SEQ ID NO: 590957 - RNA, 19 nt, Homo sapiens
  misc_RNA (1)...(19): siRNA sense strand
guggcaaagucuucuucaa

SEQ ID NO: 590958 - RNA, 19 nt, Homo sapiens
  misc_RNA (1)...(19): siRNA sense strand
acuagccacuuacagcaaa

SEQ ID NO: 590959 - RNA, 19 nt, Homo sapiens
  misc_RNA (1)...(19): siRNA sense strand
ccagguggagggaccaauu

SEQ ID NO: 590960 - RNA, 19 nt, Homo sapiens
  misc_RNA (1)...(19): siRNA sense strand
guacagaagauggugaagu

SEQ ID NO: 590961 - RNA, 19 nt, Homo sapiens
  misc_RNA (1)...(19): siRNA sense strand
gcuucagggugacgcagaa

SEQ ID NO: 590962 - RNA, 19 nt, Homo sapiens
  misc_RNA (1)...(19): siRNA sense strand
uggaagaggcugaaguugu

SEQ ID NO: 590963 - RNA, 19 nt, Homo sapiens
  misc_RNA (1)...(19): siRNA sense strand
ugggaggugucauggaaga

SEQ ID NO: 590964 - RNA, 19 nt, Homo sapiens
  misc_RNA (1)...(19): siRNA sense strand
gcugaagaccuacucuagu

SEQ ID NO: 590965 - RNA, 19 nt, Homo sapiens
  misc_RNA (1)...(19): siRNA sense strand
ggaguguggcaaagucuuc

SEQ ID NO: 590966 - RNA, 19 nt, Homo sapiens
  misc_RNA (1)...(19): siRNA sense strand
caaaagaagaagagaguga

SEQ ID NO: 590967 - RNA, 19 nt, Homo sapiens
  misc_RNA (1)...(19): siRNA sense strand
gaaauccacaaaagaagaa

SEQ ID NO: 590968 - RNA, 19 nt, Homo sapiens
  misc_RNA (1)...(19): siRNA sense strand
gugaagaagaagaagaguu

SEQ ID NO: 590969 - RNA, 19 nt, Homo sapiens
  misc_RNA (1)...(19): siRNA sense strand
guggaccucccuagaaaga

SEQ ID NO: 590970 - RNA, 19 nt, Homo sapiens
  misc_RNA (1)...(19): siRNA sense strand
gaagcccuggccagaacua

SEQ ID NO: 590971 - RNA, 19 nt, Homo sapiens
  misc_RNA (1)...(19): siRNA sense strand
cuucagcaauguccucauc

SEQ ID NO: 590972 - RNA, 19 nt, Homo sapiens
  misc_RNA (1)...(19): siRNA sense strand
gcucggggcucuucagcaa

SEQ ID NO: 590973 - RNA, 19 nt, Homo sapiens
  misc_RNA (1)...(19): siRNA sense strand
ucaaguggccaacccaaag

SEQ ID NO: 590974 - RNA, 19 nt, Homo sapiens
  misc_RNA (1)...(19): siRNA sense strand
gcaggguucaaugcagaua

SEQ ID NO: 590975 - RNA, 19 nt, Homo sapiens
  misc_RNA (1)...(19): siRNA sense strand
gaccagcugagucugauca

SEQ ID NO: 590976 - RNA, 19 nt, Homo sapiens
  misc_RNA (1)...(19): siRNA sense strand
gaaaugcacacaugaaaac

SEQ ID NO: 590977 - RNA, 19 nt, Homo sapiens
  misc_RNA (1)...(19): siRNA sense strand
ggaaauccacaaaagaaga

SEQ ID NO: 590978 - RNA, 19 nt, Homo sapiens
  misc_RNA (1)...(19): siRNA sense strand
aaugucauccuuuagcaaa

SEQ ID NO: 590979 - RNA, 19 nt, Homo sapiens
  misc_RNA (1)...(19): siRNA sense strand
cuucugaauuugugcuguu

SEQ ID NO: 590980 - RNA, 19 nt, Homo sapiens
  misc_RNA (1)...(19): siRNA sense strand
gcccuggccagaacuagaa

SEQ ID NO: 590981 - RNA, 19 nt, Homo sapiens
  misc_RNA (1)...(19): siRNA sense strand
ggacaccgaucuucucuug

SEQ ID NO: 590982 - RNA, 19 nt, Homo sapiens
  misc_RNA (1)...(19): siRNA sense strand
ggaagaggcugaaguugug

SEQ ID NO: 590983 - RNA, 19 nt, Homo sapiens
  misc_RNA (1)...(19): siRNA sense strand
acaaagcacuagccacuua

SEQ ID NO: 590984 - RNA, 19 nt, Homo sapiens
  misc_RNA (1)...(19): siRNA sense strand
ugaagaagaagaagaguua

SEQ ID NO: 590985 - RNA, 19 nt, Homo sapiens
  misc_RNA (1)...(19): siRNA sense strand
gaaccugccugcccugaau

SEQ ID NO: 590986 - RNA, 19 nt, Homo sapiens
  misc_RNA (1)...(19): siRNA sense strand
ggacacgccuggcagaaau

SEQ ID NO: 590987 - RNA, 19 nt, Homo sapiens
  misc_RNA (1)...(19): siRNA sense strand
ggaccucccuagaaagaaa

SEQ ID NO: 590988 - RNA, 19 nt, Homo sapiens
  misc_RNA (1)...(19): siRNA sense strand
gaaccacgcaucaacauug

SEQ ID NO: 590989 - RNA, 19 nt, Homo sapiens
  misc_RNA (1)...(19): siRNA sense strand
ggccaaaggugaugugaug

SEQ ID NO: 590990 - RNA, 19 nt, Homo sapiens
  misc_RNA (1)...(19): siRNA sense strand
gcaacaaauucgcccauca

SEQ ID NO: 590991 - RNA, 19 nt, Homo sapiens
  misc_RNA (1)...(19): siRNA sense strand
gaagauaggaaauccacaa

SEQ ID NO: 590992 - RNA, 19 nt, Homo sapiens
  misc_RNA (1)...(19): siRNA sense strand
caaugcagauaccucagua

SEQ ID NO: 590993 - RNA, 19 nt, Homo sapiens
  misc_RNA (1)...(19): siRNA sense strand
agaaaucccugaacuccaa

SEQ ID NO: 590994 - RNA, 19 nt, Homo sapiens
  misc_RNA (1)...(19): siRNA sense strand
acagucagcugaagaccua

SEQ ID NO: 590995 - RNA, 19 nt, Homo sapiens
  misc_RNA (1)...(19): siRNA sense strand
cccaagggcaccuguauua

SEQ ID NO: 590996 - RNA, 19 nt, Homo sapiens
  misc_RNA (1)...(19): siRNA sense strand
gcaccuguauuaugacuac

SEQ ID NO: 590997 - RNA, 19 nt, Homo sapiens
  misc_RNA (1)...(19): siRNA sense strand
gaucaaacccaucaaggau

SEQ ID NO: 590998 - RNA, 19 nt, Homo sapiens
  misc_RNA (1)...(19): siRNA sense strand
aagggcaccuguauuauga

SEQ ID NO: 590999 - RNA, 19 nt, Homo sapiens
  misc_RNA (1)...(19): siRNA sense strand
gaugguugcucuggaaaug

SEQ ID NO: 591000 - RNA, 19 nt, Homo sapiens
  misc_RNA (1)...(19): siRNA sense strand
gaccuacucuagugacaga

SEQ ID NO: 591001 - RNA, 19 nt, Homo sapiens
  misc_RNA (1)...(19): siRNA sense strand
caaguggaccucccuagaa

SEQ ID NO: 591002 - RNA, 19 nt, Homo sapiens
  misc_RNA (1)...(19): siRNA sense strand
guugggaggugucauggaa

SEQ ID NO: 591003 - RNA, 19 nt, Homo sapiens
  misc_RNA (1)...(19): siRNA sense strand
acacaaggccacacuggua

SEQ ID NO: 591004 - RNA, 19 nt, Homo sapiens
  misc_RNA (1)...(19): siRNA sense strand
ggaagaagauaggaaaucc

SEQ ID NO: 591005 - RNA, 19 nt, Homo sapiens
  misc_RNA (1)...(19): siRNA sense strand
caaaggugaugugaugguu

SEQ ID NO: 591006 - RNA, 19 nt, Homo sapiens
  misc_RNA (1)...(19): siRNA sense strand
gagagcagacuguagaugu

SEQ ID NO: 591007 - RNA, 19 nt, Homo sapiens
  misc_RNA (1)...(19): siRNA sense strand
acaccgaucuucucuugga

SEQ ID NO: 591008 - RNA, 19 nt, Homo sapiens
  misc_RNA (1)...(19): siRNA sense strand
ucccugaacuccaagauau

SEQ ID NO: 591009 - RNA, 19 nt, Homo sapiens
  misc_RNA (1)...(19): siRNA sense strand
ucaagaccgugcaggagaa

SEQ ID NO: 591010 - RNA, 19 nt, Homo sapiens
  misc_RNA (1)...(19): siRNA sense strand
gggugacgcagaacuauaa

SEQ ID NO: 591011 - RNA, 19 nt, Homo sapiens
  misc_RNA (1)...(19): siRNA sense strand
caagggcaccuguauuaug

SEQ ID NO: 591012 - RNA, 19 nt, Homo sapiens
  misc_RNA (1)...(19): siRNA sense strand
cugaagaccuacucuagug

SEQ ID NO: 591013 - RNA, 19 nt, Homo sapiens
  misc_RNA (1)...(19): siRNA sense strand
caaggaguguggcaaaguc

SEQ ID NO: 591014 - RNA, 19 nt, Homo sapiens
  misc_RNA (1)...(19): siRNA sense strand
gcuuugcacucucuguuug

SEQ ID NO: 591015 - RNA, 19 nt, Homo sapiens
  misc_RNA (1)...(19): siRNA sense strand
ggaagcaucagccgagugu

SEQ ID NO: 591016 - RNA, 19 nt, Homo sapiens
  misc_RNA (1)...(19): siRNA sense strand
uacagaagauggugaaguc

SEQ ID NO: 591017 - RNA, 19 nt, Homo sapiens
  misc_RNA (1)...(19): siRNA sense strand
ugugacaagugaagaagaa

SEQ ID NO: 591018 - RNA, 19 nt, Homo sapiens
  misc_RNA (1)...(19): siRNA sense strand
ugcagcagcaccaguauua

SEQ ID NO: 591019 - RNA, 19 nt, Homo sapiens
  misc_RNA (1)...(19): siRNA sense strand
gauaggaaauccacaaaag

SEQ ID NO: 591020 - RNA, 19 nt, Homo sapiens
  misc_RNA (1)...(19): siRNA sense strand
aaguggaccucccuagaaa

SEQ ID NO: 591021 - RNA, 19 nt, Homo sapiens
  misc_RNA (1)...(19): siRNA sense strand
gcaguuugaugccaagaac

SEQ ID NO: 591022 - RNA, 19 nt, Homo sapiens
  misc_RNA (1)...(19): siRNA sense strand
ggauccaccucaacaacau

SEQ ID NO: 591023 - RNA, 19 nt, Homo sapiens
  misc_RNA (1)...(19): siRNA sense strand
gucauccuuuagcaaauua

SEQ ID NO: 591024 - RNA, 19 nt, Homo sapiens
  misc_RNA (1)...(19): siRNA sense strand
gacaagugaagaagaagaa

SEQ ID NO: 591025 - RNA, 19 nt, Homo sapiens
  misc_RNA (1)...(19): siRNA sense strand
agagugaggugccgaaguc

SEQ ID NO: 591026 - RNA, 19 nt, Homo sapiens
  misc_RNA (1)...(19): siRNA sense strand
ucacagcacaugcaacaga

SEQ ID NO: 591027 - RNA, 19 nt, Homo sapiens
  misc_RNA (1)...(19): siRNA sense strand
gacuguagauguugaacca

SEQ ID NO: 591028 - RNA, 19 nt, Homo sapiens
  misc_RNA (1)...(19): siRNA sense strand
caacauuggcuugagauuc

SEQ ID NO: 591029 - RNA, 19 nt, Homo sapiens
  misc_RNA (1)...(19): siRNA sense strand
ccaagaacaagcugacaug

SEQ ID NO: 591030 - RNA, 19 nt, Homo sapiens
  misc_RNA (1)...(19): siRNA sense strand
gcaguugggaggugucaug

SEQ ID NO: 591031 - RNA, 19 nt, Homo sapiens
  misc_RNA (1)...(19): siRNA sense strand
agagcagacuguagauguu

SEQ ID NO: 591032 - RNA, 19 nt, Homo sapiens
  misc_RNA (1)...(19): siRNA sense strand
agacgcagccgcaacaaau

SEQ ID NO: 591033 - RNA, 19 nt, Homo sapiens
  misc_RNA (1)...(19): siRNA sense strand
ggaggacccggaagaagau

SEQ ID NO: 591034 - RNA, 19 nt, Homo sapiens
  misc_RNA (1)...(19): siRNA sense strand
ggaggaggacccggaagaa

SEQ ID NO: 591035 - RNA, 19 nt, Homo sapiens
  misc_RNA (1)...(19): siRNA sense strand
agaagauggugaaguccaa

SEQ ID NO: 591036 - RNA, 19 nt, Homo sapiens
  misc_RNA (1)...(19): siRNA sense strand
ugucauccuuuagcaaauu

SEQ ID NO: 591037 - RNA, 19 nt, Homo sapiens
  misc_RNA (1)...(19): siRNA sense strand
ugaauuugcuuugcacucu

SEQ ID NO: 591038 - RNA, 19 nt, Homo sapiens
  misc_RNA (1)...(19): siRNA sense strand
guggagggaccaauucuga

SEQ ID NO: 591039 - RNA, 19 nt, Homo sapiens
  misc_RNA (1)...(19): siRNA sense strand
ccaucugccugaaggaguu

SEQ ID NO: 591040 - RNA, 19 nt, Homo sapiens
  misc_RNA (1)...(19): siRNA sense strand
cauggaagaggcugaaguu

SEQ ID NO: 591041 - RNA, 19 nt, Homo sapiens
  misc_RNA (1)...(19): siRNA sense strand
ccgaaaugcacacaugaaa

SEQ ID NO: 591042 - RNA, 19 nt, Homo sapiens
  misc_RNA (1)...(19): siRNA sense strand
gagcagacuguagauguug

SEQ ID NO: 591043 - RNA, 19 nt, Homo sapiens
  misc_RNA (1)...(19): siRNA sense strand
gagcagcagcagcaacaga

SEQ ID NO: 591044 - RNA, 19 nt, Homo sapiens
  misc_RNA (1)...(19): siRNA sense strand
ccgaucuucucuuggauga

SEQ ID NO: 591045 - RNA, 19 nt, Homo sapiens
  misc_RNA (1)...(19): siRNA sense strand
caagugaagaagaagaaga

SEQ ID NO: 591046 - RNA, 19 nt, Homo sapiens
  misc_RNA (1)...(19): siRNA sense strand
ccacuuacagcaaagacuu

SEQ ID NO: 591047 - RNA, 19 nt, Homo sapiens
  misc_RNA (1)...(19): siRNA sense strand
aagcagaaaucccugaacu

SEQ ID NO: 591048 - RNA, 19 nt, Homo sapiens
  misc_RNA (1)...(19): siRNA sense strand
cagaugcaccuaccugaug

SEQ ID NO: 591049 - RNA, 19 nt, Homo sapiens
  misc_RNA (1)...(19): siRNA sense strand
guaucuccaugcaagaaau

SEQ ID NO: 591050 - RNA, 19 nt, Homo sapiens
  misc_RNA (1)...(19): siRNA sense strand
gcaaggaguguggcaaagu

SEQ ID NO: 591051 - RNA, 19 nt, Homo sapiens
  misc_RNA (1)...(19): siRNA sense strand
gaggaacaacagaggcaaa

SEQ ID NO: 591052 - RNA, 19 nt, Homo sapiens
  misc_RNA (1)...(19): siRNA sense strand
aagccgaaaugcacacaug

SEQ ID NO: 591053 - RNA, 19 nt, Homo sapiens
  misc_RNA (1)...(19): siRNA sense strand
ugugaugguugcucuggaa

SEQ ID NO: 591054 - RNA, 19 nt, Homo sapiens
  misc_RNA (1)...(19): siRNA sense strand
aagcugacaugcuccaucu

SEQ ID NO: 591055 - RNA, 19 nt, Homo sapiens
  misc_RNA (1)...(19): siRNA sense strand
ccagcugagucugaucaaa

SEQ ID NO: 591056 - RNA, 19 nt, Homo sapiens
  misc_RNA (1)...(19): siRNA sense strand
gaggacagucagcugaaga

SEQ ID NO: 591057 - RNA, 19 nt, Homo sapiens
  misc_RNA (1)...(19): siRNA sense strand
guggcaaagucuucuucaa

SEQ ID NO: 591058 - RNA, 19 nt, Homo sapiens
  misc_RNA (1)...(19): siRNA sense strand
acuagccacuuacagcaaa

SEQ ID NO: 591059 - RNA, 19 nt, Homo sapiens
  misc_RNA (1)...(19): siRNA sense strand
ccagguggagggaccaauu

SEQ ID NO: 591060 - RNA, 19 nt, Homo sapiens
  misc_RNA (1)...(19): siRNA sense strand
guacagaagauggugaagu

SEQ ID NO: 591061 - RNA, 19 nt, Homo sapiens
  misc_RNA (1)...(19): siRNA sense strand
gcuucagggugacgcagaa

SEQ ID NO: 591062 - RNA, 19 nt, Homo sapiens
  misc_RNA (1)...(19): siRNA sense strand
uggaagaggcugaaguugu

SEQ ID NO: 591063 - RNA, 19 nt, Homo sapiens
  misc_RNA (1)...(19): siRNA sense strand
ugggaggugucauggaaga

SEQ ID NO: 591064 - RNA, 19 nt, Homo sapiens
  misc_RNA (1)...(19): siRNA sense strand
gcugaagaccuacucuagu

SEQ ID NO: 591065 - RNA, 19 nt, Homo sapiens
  misc_RNA (1)...(19): siRNA sense strand
ggaguguggcaaagucuuc

SEQ ID NO: 591066 - RNA, 19 nt, Homo sapiens
  misc_RNA (1)...(19): siRNA sense strand
caaaagaagaagagaguga

SEQ ID NO: 591067 - RNA, 19 nt, Homo sapiens
  misc_RNA (1)...(19): siRNA sense strand
gaaauccacaaaagaagaa

SEQ ID NO: 591068 - RNA, 19 nt, Homo sapiens
  misc_RNA (1)...(19): siRNA sense strand
gugaagaagaagaagaguu

SEQ ID NO: 591069 - RNA, 19 nt, Homo sapiens
  misc_RNA (1)...(19): siRNA sense strand
guggaccucccuagaaaga

SEQ ID NO: 591070 - RNA, 19 nt, Homo sapiens
  misc_RNA (1)...(19): siRNA sense strand
gaagcccuggccagaacua

SEQ ID NO: 591071 - RNA, 19 nt, Homo sapiens
  misc_RNA (1)...(19): siRNA sense strand
cuucagcaauguccucauc

SEQ ID NO: 591072 - RNA, 19 nt, Homo sapiens
  misc_RNA (1)...(19): siRNA sense strand
gcucggggcucuucagcaa

SEQ ID NO: 591073 - RNA, 19 nt, Homo sapiens
  misc_RNA (1)...(19): siRNA sense strand
ucaaguggccaacccaaag

SEQ ID NO: 591074 - RNA, 19 nt, Homo sapiens
  misc_RNA (1)...(19): siRNA sense strand
gcaggguucaaugcagaua

SEQ ID NO: 591075 - RNA, 19 nt, Homo sapiens
  misc_RNA (1)...(19): siRNA sense strand
gaccagcugagucugauca

SEQ ID NO: 591076 - RNA, 19 nt, Homo sapiens
  misc_RNA (1)...(19): siRNA sense strand
gaaaugcacacaugaaaac

SEQ ID NO: 591077 - RNA, 19 nt, Homo sapiens
  misc_RNA (1)...(19): siRNA sense strand
ggaaauccacaaaagaaga

SEQ ID NO: 591078 - RNA, 19 nt, Homo sapiens
  misc_RNA (1)...(19): siRNA sense strand
aaugucauccuuuagcaaa

SEQ ID NO: 591079 - RNA, 19 nt, Homo sapiens
  misc_RNA (1)...(19): siRNA sense strand
cuucugaauuugugcuguu

SEQ ID NO: 591080 - RNA, 19 nt, Homo sapiens
  misc_RNA (1)...(19): siRNA sense strand
gcccuggccagaacuagaa

SEQ ID NO: 591081 - RNA, 19 nt, Homo sapiens
  misc_RNA (1)...(19): siRNA sense strand
gaauucaggucaacaauau

SEQ ID NO: 591082 - RNA, 19 nt, Homo sapiens
  misc_RNA (1)...(19): siRNA sense strand
ggacaccgaucuucucuug

SEQ ID NO: 591083 - RNA, 19 nt, Homo sapiens
  misc_RNA (1)...(19): siRNA sense strand
ggaagaggcugaaguugug

SEQ ID NO: 591084 - RNA, 19 nt, Homo sapiens
  misc_RNA (1)...(19): siRNA sense strand
acaaagcacuagccacuua

SEQ ID NO: 591085 - RNA, 19 nt, Homo sapiens
  misc_RNA (1)...(19): siRNA sense strand
ugaagaagaagaagaguua

SEQ ID NO: 591086 - RNA, 19 nt, Homo sapiens
  misc_RNA (1)...(19): siRNA sense strand
gaaccugccugcccugaau

SEQ ID NO: 591087 - RNA, 19 nt, Homo sapiens
  misc_RNA (1)...(19): siRNA sense strand
ggacacgccuggcagaaau

SEQ ID NO: 591088 - RNA, 19 nt, Homo sapiens
  misc_RNA (1)...(19): siRNA sense strand
ggaccucccuagaaagaaa

SEQ ID NO: 591089 - RNA, 19 nt, Homo sapiens
  misc_RNA (1)...(19): siRNA sense strand
gaaccacgcaucaacauug

SEQ ID NO: 591090 - RNA, 19 nt, Homo sapiens
  misc_RNA (1)...(19): siRNA sense strand
ggccaaaggugaugugaug

SEQ ID NO: 591091 - RNA, 19 nt, Homo sapiens
  misc_RNA (1)...(19): siRNA sense strand
uacacaagcuggacucuuu

SEQ ID NO: 591092 - RNA, 19 nt, Homo sapiens
  misc_RNA (1)...(19): siRNA sense strand
gcaacaaauucgcccauca

SEQ ID NO: 591093 - RNA, 19 nt, Homo sapiens
  misc_RNA (1)...(19): siRNA sense strand
gaagauaggaaauccacaa

SEQ ID NO: 591094 - RNA, 19 nt, Homo sapiens
  misc_RNA (1)...(19): siRNA sense strand
caaugcagauaccucagua

SEQ ID NO: 591095 - RNA, 19 nt, Homo sapiens
  misc_RNA (1)...(19): siRNA sense strand
agaaaucccugaacuccaa

SEQ ID NO: 591096 - RNA, 19 nt, Homo sapiens
  misc_RNA (1)...(19): siRNA sense strand
acagucagcugaagaccua

SEQ ID NO: 591097 - RNA, 19 nt, Homo sapiens
  misc_RNA (1)...(19): siRNA sense strand
ccacugauggcuaccaaua

SEQ ID NO: 591098 - RNA, 19 nt, Homo sapiens
  misc_RNA (1)...(19): siRNA sense strand
cccaagggcaccuguauua

SEQ ID NO: 591099 - RNA, 19 nt, Homo sapiens
  misc_RNA (1)...(19): siRNA sense strand
gcaccuguauuaugacuac

SEQ ID NO: 591100 - RNA, 19 nt, Homo sapiens
  misc_RNA (1)...(19): siRNA sense strand
gaucaaacccaucaaggau

SEQ ID NO: 591101 - RNA, 19 nt, Homo sapiens
  misc_RNA (1)...(19): siRNA sense strand
aagggcaccuguauuauga

SEQ ID NO: 591102 - RNA, 19 nt, Homo sapiens
  misc_RNA (1)...(19): siRNA sense strand
gaugguugcucuggaaaug

SEQ ID NO: 591103 - RNA, 19 nt, Homo sapiens
  misc_RNA (1)...(19): siRNA sense strand
gaccuacucuagugacaga

SEQ ID NO: 591104 - RNA, 19 nt, Homo sapiens
  misc_RNA (1)...(19): siRNA sense strand
cgaauucaggucaacaaua

SEQ ID NO: 591105 - RNA, 19 nt, Homo sapiens
  misc_RNA (1)...(19): siRNA sense strand
caaguggaccucccuagaa

SEQ ID NO: 591106 - RNA, 19 nt, Homo sapiens
  misc_RNA (1)...(19): siRNA sense strand
guugggaggugucauggaa

SEQ ID NO: 591107 - RNA, 19 nt, Homo sapiens
  misc_RNA (1)...(19): siRNA sense strand
acacaaggccacacuggua

SEQ ID NO: 591108 - RNA, 19 nt, Homo sapiens
  misc_RNA (1)...(19): siRNA sense strand
ggaagaagauaggaaaucc

SEQ ID NO: 591109 - RNA, 19 nt, Homo sapiens
  misc_RNA (1)...(19): siRNA sense strand
caaaggugaugugaugguu

SEQ ID NO: 591110 - RNA, 19 nt, Homo sapiens
  misc_RNA (1)...(19): siRNA sense strand
gagagcagacuguagaugu

SEQ ID NO: 591111 - RNA, 19 nt, Homo sapiens
  misc_RNA (1)...(19): siRNA sense strand
acaccgaucuucucuugga

SEQ ID NO: 591112 - RNA, 19 nt, Homo sapiens
  misc_RNA (1)...(19): siRNA sense strand
ucccugaacuccaagauau

SEQ ID NO: 591113 - RNA, 19 nt, Homo sapiens
  misc_RNA (1)...(19): siRNA sense strand
caagggcaccuguauuaug

SEQ ID NO: 591114 - RNA, 19 nt, Homo sapiens
  misc_RNA (1)...(19): siRNA sense strand
gggugacgcagaacuauaa

SEQ ID NO: 591115 - RNA, 19 nt, Homo sapiens
  misc_RNA (1)...(19): siRNA sense strand
ucaagaccgugcaggagaa

SEQ ID NO: 591116 - RNA, 19 nt, Homo sapiens
  misc_RNA (1)...(19): siRNA sense strand
cugaagaccuacucuagug

SEQ ID NO: 591117 - RNA, 19 nt, Homo sapiens
  misc_RNA (1)...(19): siRNA sense strand
caaggaguguggcaaaguc

SEQ ID NO: 591118 - RNA, 19 nt, Homo sapiens
  misc_RNA (1)...(19): siRNA sense strand
gcuuugcacucucuguuug

SEQ ID NO: 591119 - RNA, 19 nt, Homo sapiens
  misc_RNA (1)...(19): siRNA sense strand
ggaagcaucagccgagugu

SEQ ID NO: 591120 - RNA, 19 nt, Homo sapiens
  misc_RNA (1)...(19): siRNA sense strand
uacagaagauggugaaguc

SEQ ID NO: 591121 - RNA, 19 nt, Homo sapiens
  misc_RNA (1)...(19): siRNA sense strand
ugugacaagugaagaagaa

SEQ ID NO: 591122 - RNA, 19 nt, Homo sapiens
  misc_RNA (1)...(19): siRNA sense strand
guacaagaccaaccaugug

SEQ ID NO: 591123 - RNA, 19 nt, Homo sapiens
  misc_RNA (1)...(19): siRNA sense strand
gauaggaaauccacaaaag

SEQ ID NO: 591124 - RNA, 19 nt, Homo sapiens
  misc_RNA (1)...(19): siRNA sense strand
aaguggaccucccuagaaa

SEQ ID NO: 591125 - RNA, 19 nt, Homo sapiens
  misc_RNA (1)...(19): siRNA sense strand
gcaguuugaugccaagaac

SEQ ID NO: 591126 - RNA, 19 nt, Homo sapiens
  misc_RNA (1)...(19): siRNA sense strand
ggauccaccucaacaacau

SEQ ID NO: 591127 - RNA, 19 nt, Homo sapiens
  misc_RNA (1)...(19): siRNA sense strand
ugcagcagcaccaguauua

SEQ ID NO: 591128 - RNA, 19 nt, Homo sapiens
  misc_RNA (1)...(19): siRNA sense strand
gucauccuuuagcaaauua

SEQ ID NO: 591129 - RNA, 19 nt, Homo sapiens
  misc_RNA (1)...(19): siRNA sense strand
ucacagcacaugcaacaga

SEQ ID NO: 591130 - RNA, 19 nt, Homo sapiens
  misc_RNA (1)...(19): siRNA sense strand
agagugaggugccgaaguc

SEQ ID NO: 591131 - RNA, 19 nt, Homo sapiens
  misc_RNA (1)...(19): siRNA sense strand
gaccagcaacuguacaaga

SEQ ID NO: 591132 - RNA, 19 nt, Homo sapiens
  misc_RNA (1)...(19): siRNA sense strand
gacaagugaagaagaagaa

SEQ ID NO: 591133 - RNA, 19 nt, Homo sapiens
  misc_RNA (1)...(19): siRNA sense strand
gacuguagauguugaacca

SEQ ID NO: 591134 - RNA, 19 nt, Homo sapiens
  misc_RNA (1)...(19): siRNA sense strand
caacauuggcuugagauuc

SEQ ID NO: 591135 - RNA, 19 nt, Homo sapiens
  misc_RNA (1)...(19): siRNA sense strand
ccaagaacaagcugacaug

SEQ ID NO: 591136 - RNA, 19 nt, Homo sapiens
  misc_RNA (1)...(19): siRNA sense strand
gcaguugggaggugucaug

SEQ ID NO: 591137 - RNA, 19 nt, Homo sapiens
  misc_RNA (1)...(19): siRNA sense strand
agagcagacuguagauguu

SEQ ID NO: 591138 - RNA, 19 nt, Homo sapiens
  misc_RNA (1)...(19): siRNA sense strand
agacgcagccgcaacaaau

SEQ ID NO: 591139 - RNA, 19 nt, Homo sapiens
  misc_RNA (1)...(19): siRNA sense strand
ggaggacccggaagaagau

SEQ ID NO: 591140 - RNA, 19 nt, Homo sapiens
  misc_RNA (1)...(19): siRNA sense strand
ggaggaggacccggaagaa

SEQ ID NO: 591141 - RNA, 19 nt, Homo sapiens
  misc_RNA (1)...(19): siRNA sense strand
agaagauggugaaguccaa

SEQ ID NO: 591142 - RNA, 19 nt, Homo sapiens
  misc_RNA (1)...(19): siRNA sense strand
ugucauccuuuagcaaauu

SEQ ID NO: 591143 - RNA, 19 nt, Homo sapiens
  misc_RNA (1)...(19): siRNA sense strand
ugaauuugcuuugcacucu

SEQ ID NO: 591144 - RNA, 19 nt, Homo sapiens
  misc_RNA (1)...(19): siRNA sense strand
guggagggaccaauucuga

SEQ ID NO: 591145 - RNA, 19 nt, Homo sapiens
  misc_RNA (1)...(19): siRNA sense strand
ccaucugccugaaggaguu

SEQ ID NO: 591146 - RNA, 19 nt, Homo sapiens
  misc_RNA (1)...(19): siRNA sense strand
cauggaagaggcugaaguu

SEQ ID NO: 591147 - RNA, 19 nt, Homo sapiens
  misc_RNA (1)...(19): siRNA sense strand
ccgaaaugcacacaugaaa

SEQ ID NO: 591148 - RNA, 19 nt, Homo sapiens
  misc_RNA (1)...(19): siRNA sense strand
gagcagacuguagauguug

SEQ ID NO: 591149 - RNA, 19 nt, Homo sapiens
  misc_RNA (1)...(19): siRNA sense strand
gagcagcagcagcaacaga

SEQ ID NO: 591150 - RNA, 19 nt, Homo sapiens
  misc_RNA (1)...(19): siRNA sense strand
ccgaucuucucuuggauga

SEQ ID NO: 591151 - RNA, 19 nt, Homo sapiens
  misc_RNA (1)...(19): siRNA sense strand
caagugaagaagaagaaga

SEQ ID NO: 591152 - RNA, 19 nt, Homo sapiens
  misc_RNA (1)...(19): siRNA sense strand
ccacuuacagcaaagacuu

SEQ ID NO: 591153 - RNA, 19 nt, Homo sapiens
  misc_RNA (1)...(19): siRNA sense strand
aagcagaaaucccugaacu

SEQ ID NO: 591154 - RNA, 19 nt, Homo sapiens
  misc_RNA (1)...(19): siRNA sense strand
gcuuaccagcggugucuua

SEQ ID NO: 591155 - RNA, 19 nt, Homo sapiens
  misc_RNA (1)...(19): siRNA sense strand
cagaugcaccuaccugaug

SEQ ID NO: 591156 - RNA, 19 nt, Homo sapiens
  misc_RNA (1)...(19): siRNA sense strand
guaucuccaugcaagaaau

SEQ ID NO: 591157 - RNA, 19 nt, Homo sapiens
  misc_RNA (1)...(19): siRNA sense strand
gcaaggaguguggcaaagu

SEQ ID NO: 591158 - RNA, 19 nt, Homo sapiens
  misc_RNA (1)...(19): siRNA sense strand
gaggaacaacagaggcaaa

SEQ ID NO: 591159 - RNA, 19 nt, Homo sapiens
  misc_RNA (1)...(19): siRNA sense strand
aagccgaaaugcacacaug

SEQ ID NO: 591160 - RNA, 19 nt, Homo sapiens
  misc_RNA (1)...(19): siRNA sense strand
ugugaugguugcucuggaa

SEQ ID NO: 591161 - RNA, 19 nt, Homo sapiens
  misc_RNA (1)...(19): siRNA sense strand
aagcugacaugcuccaucu

SEQ ID NO: 591162 - RNA, 19 nt, Homo sapiens
  misc_RNA (1)...(19): siRNA sense strand
ccagcugagucugaucaaa

SEQ ID NO: 591163 - RNA, 19 nt, Homo sapiens
  misc_RNA (1)...(19): siRNA sense strand
gaggacagucagcugaaga

SEQ ID NO: 591164 - RNA, 19 nt, Homo sapiens
  misc_RNA (1)...(19): siRNA sense strand
guggcaaagucuucuucaa

SEQ ID NO: 591165 - RNA, 19 nt, Homo sapiens
  misc_RNA (1)...(19): siRNA sense strand
acuagccacuuacagcaaa

SEQ ID NO: 591166 - RNA, 19 nt, Homo sapiens
  misc_RNA (1)...(19): siRNA sense strand
ccagguggagggaccaauu

SEQ ID NO: 591167 - RNA, 19 nt, Homo sapiens
  misc_RNA (1)...(19): siRNA sense strand
ccagguguuugccaaccaa

SEQ ID NO: 591168 - RNA, 19 nt, Homo sapiens
  misc_RNA (1)...(19): siRNA sense strand
acugauggcuaccaauaca

SEQ ID NO: 591169 - RNA, 19 nt, Homo sapiens
  misc_RNA (1)...(19): siRNA sense strand
gcuucagggugacgcagaa

SEQ ID NO: 591170 - RNA, 19 nt, Homo sapiens
  misc_RNA (1)...(19): siRNA sense strand
uggaagaggcugaaguugu

SEQ ID NO: 591171 - RNA, 19 nt, Homo sapiens
  misc_RNA (1)...(19): siRNA sense strand
ugggaggugucauggaaga

SEQ ID NO: 591172 - RNA, 19 nt, Homo sapiens
  misc_RNA (1)...(19): siRNA sense strand
guacagaagauggugaagu

SEQ ID NO: 591173 - RNA, 19 nt, Homo sapiens
  misc_RNA (1)...(19): siRNA sense strand
gcucggggcucuucagcaa

SEQ ID NO: 591174 - RNA, 19 nt, Homo sapiens
  misc_RNA (1)...(19): siRNA sense strand
ggaguguggcaaagucuuc

SEQ ID NO: 591175 - RNA, 19 nt, Homo sapiens
  misc_RNA (1)...(19): siRNA sense strand
caaaagaagaagagaguga

SEQ ID NO: 591176 - RNA, 19 nt, Homo sapiens
  misc_RNA (1)...(19): siRNA sense strand
gaaauccacaaaagaagaa

SEQ ID NO: 591177 - RNA, 19 nt, Homo sapiens
  misc_RNA (1)...(19): siRNA sense strand
gugaagaagaagaagaguu

SEQ ID NO: 591178 - RNA, 19 nt, Homo sapiens
  misc_RNA (1)...(19): siRNA sense strand
guggaccucccuagaaaga

SEQ ID NO: 591179 - RNA, 19 nt, Homo sapiens
  misc_RNA (1)...(19): siRNA sense strand
gaagcccuggccagaacua

SEQ ID NO: 591180 - RNA, 19 nt, Homo sapiens
  misc_RNA (1)...(19): siRNA sense strand
cuucagcaauguccucauc

SEQ ID NO: 591181 - RNA, 19 nt, Homo sapiens
  misc_RNA (1)...(19): siRNA sense strand
ggacagaggucuccuacac

SEQ ID NO: 591182 - RNA, 19 nt, Homo sapiens
  misc_RNA (1)...(19): siRNA sense strand
uuaacgagcugcccgagaa

SEQ ID NO: 591183 - RNA, 19 nt, Homo sapiens
  misc_RNA (1)...(19): siRNA sense strand
ggccggacaucgugguuaa

SEQ ID NO: 591184 - RNA, 19 nt, Homo sapiens
  misc_RNA (1)...(19): siRNA sense strand
ccaaagucaagaaguauuu

SEQ ID NO: 591185 - RNA, 19 nt, Homo sapiens
  misc_RNA (1)...(19): siRNA sense strand
cuacggagccugcauagga

SEQ ID NO: 591186 - RNA, 19 nt, Homo sapiens
  misc_RNA (1)...(19): siRNA sense strand
ggccucggcugacuacuuc

SEQ ID NO: 591187 - RNA, 19 nt, Homo sapiens
  misc_RNA (1)...(19): siRNA sense strand
gagagggcuucaucaccaa

SEQ ID NO: 591188 - RNA, 19 nt, Homo sapiens
  misc_RNA (1)...(19): siRNA sense strand
guacugggcaggcugguau

SEQ ID NO: 591189 - RNA, 19 nt, Homo sapiens
  misc_RNA (1)...(19): siRNA sense strand
gaaaaucuucuacuuccua

SEQ ID NO: 591190 - RNA, 19 nt, Homo sapiens
  misc_RNA (1)...(19): siRNA sense strand
ugucacauccuacgaaaug

SEQ ID NO: 591191 - RNA, 19 nt, Homo sapiens
  misc_RNA (1)...(19): siRNA sense strand
gcaccuaccaacucaaagu

SEQ ID NO: 591192 - RNA, 19 nt, Homo sapiens
  misc_RNA (1)...(19): siRNA sense strand
gcagggacacccaguacug

SEQ ID NO: 591193 - RNA, 19 nt, Homo sapiens
  misc_RNA (1)...(19): siRNA sense strand
ccucaugacccucuggaaa

SEQ ID NO: 591194 - RNA, 19 nt, Homo sapiens
  misc_RNA (1)...(19): siRNA sense strand
caagaaguauuuugucaca

SEQ ID NO: 591195 - RNA, 19 nt, Homo sapiens
  misc_RNA (1)...(19): siRNA sense strand
gagcuguuguccagauuuu

SEQ ID NO: 591196 - RNA, 19 nt, Homo sapiens
  misc_RNA (1)...(19): siRNA sense strand
uacgaaaugugccucaagu

SEQ ID NO: 591197 - RNA, 19 nt, Homo sapiens
  misc_RNA (1)...(19): siRNA sense strand
gaagaggauauguuugcau

SEQ ID NO: 591198 - RNA, 19 nt, Homo sapiens
  misc_RNA (1)...(19): siRNA sense strand
gagcccacgggacagauuu

SEQ ID NO: 591199 - RNA, 19 nt, Homo sapiens
  misc_RNA (1)...(19): siRNA sense strand
uacggagccugcauaggaa

SEQ ID NO: 591200 - RNA, 19 nt, Homo sapiens
  misc_RNA (1)...(19): siRNA sense strand
gcgcaacccgugugcugaa

SEQ ID NO: 591201 - RNA, 19 nt, Homo sapiens
  misc_RNA (1)...(19): siRNA sense strand
aagcagcccuggacagcau

SEQ ID NO: 591202 - RNA, 19 nt, Homo sapiens
  misc_RNA (1)...(19): siRNA sense strand
caacccgugugcugaagag

SEQ ID NO: 591203 - RNA, 19 nt, Homo sapiens
  misc_RNA (1)...(19): siRNA sense strand
ggaccucaucgaccucaug

SEQ ID NO: 591204 - RNA, 19 nt, Homo sapiens
  misc_RNA (1)...(19): siRNA sense strand
gugcugaagaggauauguu

SEQ ID NO: 591205 - RNA, 19 nt, Homo sapiens
  misc_RNA (1)...(19): siRNA sense strand
ggagcuacuagacacauuc

SEQ ID NO: 591206 - RNA, 19 nt, Homo sapiens
  misc_RNA (1)...(19): siRNA sense strand
ugaagaggauauguuugca

SEQ ID NO: 591207 - RNA, 19 nt, Homo sapiens
  misc_RNA (1)...(19): siRNA sense strand
ggagcccacgggacagauu

SEQ ID NO: 591208 - RNA, 19 nt, Homo sapiens
  misc_RNA (1)...(19): siRNA sense strand
gcagcccuggacagcauua

SEQ ID NO: 591209 - RNA, 19 nt, Homo sapiens
  misc_RNA (1)...(19): siRNA sense strand
ccuacaccuucucagacua

SEQ ID NO: 591210 - RNA, 19 nt, Homo sapiens
  misc_RNA (1)...(19): siRNA sense strand
cuacugggaggagcuacua

SEQ ID NO: 591211 - RNA, 19 nt, Homo sapiens
  misc_RNA (1)...(19): siRNA sense strand
uguaaaggcugccaaguua

SEQ ID NO: 591212 - RNA, 19 nt, Homo sapiens
  misc_RNA (1)...(19): siRNA sense strand
caugaaaccuuuaaccuuu

SEQ ID NO: 591213 - RNA, 19 nt, Homo sapiens
  misc_RNA (1)...(19): siRNA sense strand
gaauauaacuaaccaacug

SEQ ID NO: 591214 - RNA, 19 nt, Homo sapiens
  misc_RNA (1)...(19): siRNA sense strand
caacagugauucccugaaa

SEQ ID NO: 591215 - RNA, 19 nt, Homo sapiens
  misc_RNA (1)...(19): siRNA sense strand
ggaaagaauucguaagcuu

SEQ ID NO: 591216 - RNA, 19 nt, Homo sapiens
  misc_RNA (1)...(19): siRNA sense strand
gcacaacacucgcuccaau

SEQ ID NO: 591217 - RNA, 19 nt, Homo sapiens
  misc_RNA (1)...(19): siRNA sense strand
caggaaaccaguacaauua

SEQ ID NO: 591218 - RNA, 19 nt, Homo sapiens
  misc_RNA (1)...(19): siRNA sense strand
gaauggaaacgacagaaua

SEQ ID NO: 591219 - RNA, 19 nt, Homo sapiens
  misc_RNA (1)...(19): siRNA sense strand
ggaugaaacucaauguaga

SEQ ID NO: 591220 - RNA, 19 nt, Homo sapiens
  misc_RNA (1)...(19): siRNA sense strand
ggucaucgcugcaucugaa

SEQ ID NO: 591221 - RNA, 19 nt, Homo sapiens
  misc_RNA (1)...(19): siRNA sense strand
gggaauccaugaaaccuuu

SEQ ID NO: 591222 - RNA, 19 nt, Homo sapiens
  misc_RNA (1)...(19): siRNA sense strand
gcgcaaagaaggccauaua

SEQ ID NO: 591223 - RNA, 19 nt, Homo sapiens
  misc_RNA (1)...(19): siRNA sense strand
gguccuggcucaacaguga

SEQ ID NO: 591224 - RNA, 19 nt, Homo sapiens
  misc_RNA (1)...(19): siRNA sense strand
gaaacucaauguagaagag

SEQ ID NO: 591225 - RNA, 19 nt, Homo sapiens
  misc_RNA (1)...(19): siRNA sense strand
gugauauucuugcccuuua

SEQ ID NO: 591226 - RNA, 19 nt, Homo sapiens
  misc_RNA (1)...(19): siRNA sense strand
gcaggaaaccaguacaauu

SEQ ID NO: 591227 - RNA, 19 nt, Homo sapiens
  misc_RNA (1)...(19): siRNA sense strand
gaagagggacuguauagca

SEQ ID NO: 591228 - RNA, 19 nt, Homo sapiens
  misc_RNA (1)...(19): siRNA sense strand
caaagaaggccauauacau

SEQ ID NO: 591229 - RNA, 19 nt, Homo sapiens
  misc_RNA (1)...(19): siRNA sense strand
ggcuguugcucucuucuua

SEQ ID NO: 591230 - RNA, 19 nt, Homo sapiens
  misc_RNA (1)...(19): siRNA sense strand
gcaaagaaggccauauaca

SEQ ID NO: 591231 - RNA, 19 nt, Homo sapiens
  misc_RNA (1)...(19): siRNA sense strand
accgagaucucaaacauaa

SEQ ID NO: 591232 - RNA, 19 nt, Homo sapiens
  misc_RNA (1)...(19): siRNA sense strand
ggaaaccaguacaauuaca

SEQ ID NO: 591233 - RNA, 19 nt, Homo sapiens
  misc_RNA (1)...(19): siRNA sense strand
cauggaugaugauguaauu

SEQ ID NO: 591234 - RNA, 19 nt, Homo sapiens
  misc_RNA (1)...(19): siRNA sense strand
gauauucaccucaguuugu

SEQ ID NO: 591235 - RNA, 19 nt, Homo sapiens
  misc_RNA (1)...(19): siRNA sense strand
uuggcuaucuugacuauaa

SEQ ID NO: 591236 - RNA, 19 nt, Homo sapiens
  misc_RNA (1)...(19): siRNA sense strand
gcucucuucuuacugguuu

SEQ ID NO: 591237 - RNA, 19 nt, Homo sapiens
  misc_RNA (1)...(19): siRNA sense strand
caacaccuccucugcuuau

SEQ ID NO: 591238 - RNA, 19 nt, Homo sapiens
  misc_RNA (1)...(19): siRNA sense strand
aaccuaauccgaagauaua

SEQ ID NO: 591239 - RNA, 19 nt, Homo sapiens
  misc_RNA (1)...(19): siRNA sense strand
ggaugaugauguaauugug

SEQ ID NO: 591240 - RNA, 19 nt, Homo sapiens
  misc_RNA (1)...(19): siRNA sense strand
gaucucaaacauaaaguga

SEQ ID NO: 591241 - RNA, 19 nt, Homo sapiens
  misc_RNA (1)...(19): siRNA sense strand
acaggcaaauucaaccuaa

SEQ ID NO: 591242 - RNA, 19 nt, Homo sapiens
  misc_RNA (1)...(19): siRNA sense strand
gaugaaacucaauguagaa

SEQ ID NO: 591243 - RNA, 19 nt, Homo sapiens
  misc_RNA (1)...(19): siRNA sense strand
uugcaaaccugacggaaug

SEQ ID NO: 591244 - RNA, 19 nt, Homo sapiens
  misc_RNA (1)...(19): siRNA sense strand
aaagaaggccauauacaug

SEQ ID NO: 591245 - RNA, 19 nt, Homo sapiens
  misc_RNA (1)...(19): siRNA sense strand
uggaaacgacagaauauaa

SEQ ID NO: 591246 - RNA, 19 nt, Homo sapiens
  misc_RNA (1)...(19): siRNA sense strand
gcaguuuguuaaggaauga

SEQ ID NO: 591247 - RNA, 19 nt, Homo sapiens
  misc_RNA (1)...(19): siRNA sense strand
uaaacagcauucagcacaa

SEQ ID NO: 591248 - RNA, 19 nt, Homo sapiens
  misc_RNA (1)...(19): siRNA sense strand
ggagauuccuguggucauc

SEQ ID NO: 591249 - RNA, 19 nt, Homo sapiens
  misc_RNA (1)...(19): siRNA sense strand
gauauaccgagaucucaaa

SEQ ID NO: 591250 - RNA, 19 nt, Homo sapiens
  misc_RNA (1)...(19): siRNA sense strand
guagaagagggacuguaua

SEQ ID NO: 591251 - RNA, 19 nt, Homo sapiens
  misc_RNA (1)...(19): siRNA sense strand
gacagaauauaacuaacca

SEQ ID NO: 591252 - RNA, 19 nt, Homo sapiens
  misc_RNA (1)...(19): siRNA sense strand
caaccuaauccgaagauau

SEQ ID NO: 591253 - RNA, 19 nt, Homo sapiens
  misc_RNA (1)...(19): siRNA sense strand
cacaacaccuccucugcuu

SEQ ID NO: 591254 - RNA, 19 nt, Homo sapiens
  misc_RNA (1)...(19): siRNA sense strand
cagcuugagcaguuuguua

SEQ ID NO: 591255 - RNA, 19 nt, Homo sapiens
  misc_RNA (1)...(19): siRNA sense strand
ggacugcuucauauacuga

SEQ ID NO: 591256 - RNA, 19 nt, Homo sapiens
  misc_RNA (1)...(19): siRNA sense strand
gagggacuguauagcagaa

SEQ ID NO: 591257 - RNA, 19 nt, Homo sapiens
  misc_RNA (1)...(19): siRNA sense strand
gauucagccucuacuaaag

SEQ ID NO: 591258 - RNA, 19 nt, Homo sapiens
  misc_RNA (1)...(19): siRNA sense strand
gccucaaccuauagacuuu

SEQ ID NO: 591259 - RNA, 19 nt, Homo sapiens
  misc_RNA (1)...(19): siRNA sense strand
ggaauggaaacgacagaau

SEQ ID NO: 591260 - RNA, 19 nt, Homo sapiens
  misc_RNA (1)...(19): siRNA sense strand
gcacugaagccaggacaug

SEQ ID NO: 591261 - RNA, 19 nt, Homo sapiens
  misc_RNA (1)...(19): siRNA sense strand
aacacucgcuccaauguga

SEQ ID NO: 591262 - RNA, 19 nt, Homo sapiens
  misc_RNA (1)...(19): siRNA sense strand
gagcaggaaaccaguacaa

SEQ ID NO: 591263 - RNA, 19 nt, Homo sapiens
  misc_RNA (1)...(19): siRNA sense strand
guaauugugcaaggugaua

SEQ ID NO: 591264 - RNA, 19 nt, Homo sapiens
  misc_RNA (1)...(19): siRNA sense strand
ggaaacgacagaauauaac

SEQ ID NO: 591265 - RNA, 19 nt, Homo sapiens
  misc_RNA (1)...(19): siRNA sense strand
gugauucagccucuacuaa

SEQ ID NO: 591266 - RNA, 19 nt, Homo sapiens
  misc_RNA (1)...(19): siRNA sense strand
ccaugaaaccuuuaaccuu

SEQ ID NO: 591267 - RNA, 19 nt, Homo sapiens
  misc_RNA (1)...(19): siRNA sense strand
ccgaagauauaccgagauc

SEQ ID NO: 591268 - RNA, 19 nt, Homo sapiens
  misc_RNA (1)...(19): siRNA sense strand
gaaaccaguacaauuacau

SEQ ID NO: 591269 - RNA, 19 nt, Homo sapiens
  misc_RNA (1)...(19): siRNA sense strand
ggaauccaugaaaccuuua

SEQ ID NO: 591270 - RNA, 19 nt, Homo sapiens
  misc_RNA (1)...(19): siRNA sense strand
gaaacgacagaauauaacu

SEQ ID NO: 591271 - RNA, 19 nt, Homo sapiens
  misc_RNA (1)...(19): siRNA sense strand
uucguaagcuuuccaugaa

SEQ ID NO: 591272 - RNA, 19 nt, Homo sapiens
  misc_RNA (1)...(19): siRNA sense strand
ugauucagccucuacuaaa

SEQ ID NO: 591273 - RNA, 19 nt, Homo sapiens
  misc_RNA (1)...(19): siRNA sense strand
uaaggaaugagguuacaga

SEQ ID NO: 591274 - RNA, 19 nt, Homo sapiens
  misc_RNA (1)...(19): siRNA sense strand
cauuggcuaucuugacuau

SEQ ID NO: 591275 - RNA, 19 nt, Homo sapiens
  misc_RNA (1)...(19): siRNA sense strand
uucagaagauugugauuca

SEQ ID NO: 591276 - RNA, 19 nt, Homo sapiens
  misc_RNA (1)...(19): siRNA sense strand
auaccgagaucucaaacau

SEQ ID NO: 591277 - RNA, 19 nt, Homo sapiens
  misc_RNA (1)...(19): siRNA sense strand
gaaaagcaucagauacaaa

SEQ ID NO: 591278 - RNA, 19 nt, Homo sapiens
  misc_RNA (1)...(19): siRNA sense strand
cuucauauacugauguuug

SEQ ID NO: 591279 - RNA, 19 nt, Homo sapiens
  misc_RNA (1)...(19): siRNA sense strand
gcugccaaguuacuccauu

SEQ ID NO: 591280 - RNA, 19 nt, Homo sapiens
  misc_RNA (1)...(19): siRNA sense strand
uagaagagggacuguauag

SEQ ID NO: 591281 - RNA, 19 nt, Homo sapiens
  misc_RNA (1)...(19): siRNA sense strand
gaauccaugaaaccuuuaa

SEQ ID NO: 591282 - RNA, 19 nt, Homo sapiens
  misc_RNA (1)...(19): siRNA sense strand
guuaaggaaugagguuaca

SEQ ID NO: 591283 - RNA, 19 nt, Homo sapiens
  misc_RNA (1)...(19): siRNA sense strand
ccaaaugcucuccgacaug

SEQ ID NO: 591284 - RNA, 19 nt, Homo sapiens
  misc_RNA (1)...(19): siRNA sense strand
gcuccaaugugauuuucua

SEQ ID NO: 591285 - RNA, 19 nt, Homo sapiens
  misc_RNA (1)...(19): siRNA sense strand
auucuugcccuuuacaaua

SEQ ID NO: 591286 - RNA, 19 nt, Homo sapiens
  misc_RNA (1)...(19): siRNA sense strand
ggugauauucuugcccuuu

SEQ ID NO: 591287 - RNA, 19 nt, Homo sapiens
  misc_RNA (1)...(19): siRNA sense strand
cgagaucucaaacauaaag

SEQ ID NO: 591288 - RNA, 19 nt, Homo sapiens
  misc_RNA (1)...(19): siRNA sense strand
ccaucgauccuauguggaa

SEQ ID NO: 591289 - RNA, 19 nt, Homo sapiens
  misc_RNA (1)...(19): siRNA sense strand
ugugcaaggugauauucuu

SEQ ID NO: 591290 - RNA, 19 nt, Homo sapiens
  misc_RNA (1)...(19): siRNA sense strand
auauucaccucaguuugua

SEQ ID NO: 591291 - RNA, 19 nt, Homo sapiens
  misc_RNA (1)...(19): siRNA sense strand
gagguuacagauucaggaa

SEQ ID NO: 591292 - RNA, 19 nt, Homo sapiens
  misc_RNA (1)...(19): siRNA sense strand
caacaauacagcagaccau

SEQ ID NO: 591293 - RNA, 19 nt, Homo sapiens
  misc_RNA (1)...(19): siRNA sense strand
ugagcaguuuguuaaggaa

SEQ ID NO: 591294 - RNA, 19 nt, Homo sapiens
  misc_RNA (1)...(19): siRNA sense strand
uguagaagagggacuguau

SEQ ID NO: 591295 - RNA, 19 nt, Homo sapiens
  misc_RNA (1)...(19): siRNA sense strand
aaaccugacggaauggaaa

SEQ ID NO: 591296 - RNA, 19 nt, Homo sapiens
  misc_RNA (1)...(19): siRNA sense strand
gcagcuauaaacagcauuc

SEQ ID NO: 591297 - RNA, 19 nt, Homo sapiens
  misc_RNA (1)...(19): siRNA sense strand
ggccucaaccuauagacuu

SEQ ID NO: 591298 - RNA, 19 nt, Homo sapiens
  misc_RNA (1)...(19): siRNA sense strand
cauaacuuccucagcuuga

SEQ ID NO: 591299 - RNA, 19 nt, Homo sapiens
  misc_RNA (1)...(19): siRNA sense strand
ucuccgacaugcaguagau

SEQ ID NO: 591300 - RNA, 19 nt, Homo sapiens
  misc_RNA (1)...(19): siRNA sense strand
uugagcaguuuguuaagga

SEQ ID NO: 591301 - RNA, 19 nt, Homo sapiens
  misc_RNA (1)...(19): siRNA sense strand
uaaacaucaucaucuuggu

SEQ ID NO: 591302 - RNA, 19 nt, Homo sapiens
  misc_RNA (1)...(19): siRNA sense strand
aauggaaacgacagaauau

SEQ ID NO: 591303 - RNA, 19 nt, Homo sapiens
  misc_RNA (1)...(19): siRNA sense strand
uacauuggcuaucuugacu

SEQ ID NO: 591304 - RNA, 19 nt, Homo sapiens
  misc_RNA (1)...(19): siRNA sense strand
ucaaccuaauccgaagaua

SEQ ID NO: 591305 - RNA, 19 nt, Homo sapiens
  misc_RNA (1)...(19): siRNA sense strand
aaacgauauucaccucagu

SEQ ID NO: 591306 - RNA, 19 nt, Homo sapiens
  misc_RNA (1)...(19): siRNA sense strand
uaacuaaccaacuggaaaa

SEQ ID NO: 591307 - RNA, 19 nt, Homo sapiens
  misc_RNA (1)...(19): siRNA sense strand
caauacagcagaccaucuc

SEQ ID NO: 591308 - RNA, 19 nt, Homo sapiens
  misc_RNA (1)...(19): siRNA sense strand
acucuaccaucgauccuau

SEQ ID NO: 591309 - RNA, 19 nt, Homo sapiens
  misc_RNA (1)...(19): siRNA sense strand
uggaugaaacucaauguag

SEQ ID NO: 591310 - RNA, 19 nt, Homo sapiens
  misc_RNA (1)...(19): siRNA sense strand
uggcuaucuugacuauaaa

SEQ ID NO: 591311 - RNA, 19 nt, Homo sapiens
  misc_RNA (1)...(19): siRNA sense strand
uguaaaggcugccaaguua

SEQ ID NO: 591312 - RNA, 19 nt, Homo sapiens
  misc_RNA (1)...(19): siRNA sense strand
caugaaaccuuuaaccuuu

SEQ ID NO: 591313 - RNA, 19 nt, Homo sapiens
  misc_RNA (1)...(19): siRNA sense strand
gaauauaacuaaccaacug

SEQ ID NO: 591314 - RNA, 19 nt, Homo sapiens
  misc_RNA (1)...(19): siRNA sense strand
caacagugauucccugaaa

SEQ ID NO: 591315 - RNA, 19 nt, Homo sapiens
  misc_RNA (1)...(19): siRNA sense strand
ggaaagaauucguaagcuu

SEQ ID NO: 591316 - RNA, 19 nt, Homo sapiens
  misc_RNA (1)...(19): siRNA sense strand
gcacaacacucgcuccaau

SEQ ID NO: 591317 - RNA, 19 nt, Homo sapiens
  misc_RNA (1)...(19): siRNA sense strand
caggaaaccaguacaauua

SEQ ID NO: 591318 - RNA, 19 nt, Homo sapiens
  misc_RNA (1)...(19): siRNA sense strand
gaauggaaacgacagaaua

SEQ ID NO: 591319 - RNA, 19 nt, Homo sapiens
  misc_RNA (1)...(19): siRNA sense strand
ggaugaaacucaauguaga

SEQ ID NO: 591320 - RNA, 19 nt, Homo sapiens
  misc_RNA (1)...(19): siRNA sense strand
ggucaucgcugcaucugaa

SEQ ID NO: 591321 - RNA, 19 nt, Homo sapiens
  misc_RNA (1)...(19): siRNA sense strand
gggaauccaugaaaccuuu

SEQ ID NO: 591322 - RNA, 19 nt, Homo sapiens
  misc_RNA (1)...(19): siRNA sense strand
gcgcaaagaaggccauaua

SEQ ID NO: 591323 - RNA, 19 nt, Homo sapiens
  misc_RNA (1)...(19): siRNA sense strand
gguccuggcucaacaguga

SEQ ID NO: 591324 - RNA, 19 nt, Homo sapiens
  misc_RNA (1)...(19): siRNA sense strand
gaaacucaauguagaagag

SEQ ID NO: 591325 - RNA, 19 nt, Homo sapiens
  misc_RNA (1)...(19): siRNA sense strand
gugauauucuugcccuuua

SEQ ID NO: 591326 - RNA, 19 nt, Homo sapiens
  misc_RNA (1)...(19): siRNA sense strand
gcaggaaaccaguacaauu

SEQ ID NO: 591327 - RNA, 19 nt, Homo sapiens
  misc_RNA (1)...(19): siRNA sense strand
gaagagggacuguauagca

SEQ ID NO: 591328 - RNA, 19 nt, Homo sapiens
  misc_RNA (1)...(19): siRNA sense strand
caaagaaggccauauacau

SEQ ID NO: 591329 - RNA, 19 nt, Homo sapiens
  misc_RNA (1)...(19): siRNA sense strand
ggcuguugcucucuucuua

SEQ ID NO: 591330 - RNA, 19 nt, Homo sapiens
  misc_RNA (1)...(19): siRNA sense strand
gcaaagaaggccauauaca

SEQ ID NO: 591331 - RNA, 19 nt, Homo sapiens
  misc_RNA (1)...(19): siRNA sense strand
accgagaucucaaacauaa

SEQ ID NO: 591332 - RNA, 19 nt, Homo sapiens
  misc_RNA (1)...(19): siRNA sense strand
ggaaaccaguacaauuaca

SEQ ID NO: 591333 - RNA, 19 nt, Homo sapiens
  misc_RNA (1)...(19): siRNA sense strand
cauggaugaugauguaauu

SEQ ID NO: 591334 - RNA, 19 nt, Homo sapiens
  misc_RNA (1)...(19): siRNA sense strand
gauauucaccucaguuugu

SEQ ID NO: 591335 - RNA, 19 nt, Homo sapiens
  misc_RNA (1)...(19): siRNA sense strand
uuggcuaucuugacuauaa

SEQ ID NO: 591336 - RNA, 19 nt, Homo sapiens
  misc_RNA (1)...(19): siRNA sense strand
gcucucuucuuacugguuu

SEQ ID NO: 591337 - RNA, 19 nt, Homo sapiens
  misc_RNA (1)...(19): siRNA sense strand
caacaccuccucugcuuau

SEQ ID NO: 591338 - RNA, 19 nt, Homo sapiens
  misc_RNA (1)...(19): siRNA sense strand
aaccuaauccgaagauaua

SEQ ID NO: 591339 - RNA, 19 nt, Homo sapiens
  misc_RNA (1)...(19): siRNA sense strand
ggaugaugauguaauugug

SEQ ID NO: 591340 - RNA, 19 nt, Homo sapiens
  misc_RNA (1)...(19): siRNA sense strand
gaucucaaacauaaaguga

SEQ ID NO: 591341 - RNA, 19 nt, Homo sapiens
  misc_RNA (1)...(19): siRNA sense strand
acaggcaaauucaaccuaa

SEQ ID NO: 591342 - RNA, 19 nt, Homo sapiens
  misc_RNA (1)...(19): siRNA sense strand
gaugaaacucaauguagaa

SEQ ID NO: 591343 - RNA, 19 nt, Homo sapiens
  misc_RNA (1)...(19): siRNA sense strand
uugcaaaccugacggaaug

SEQ ID NO: 591344 - RNA, 19 nt, Homo sapiens
  misc_RNA (1)...(19): siRNA sense strand
aaagaaggccauauacaug

SEQ ID NO: 591345 - RNA, 19 nt, Homo sapiens
  misc_RNA (1)...(19): siRNA sense strand
uggaaacgacagaauauaa

SEQ ID NO: 591346 - RNA, 19 nt, Homo sapiens
  misc_RNA (1)...(19): siRNA sense strand
gcaguuuguuaaggaauga

SEQ ID NO: 591347 - RNA, 19 nt, Homo sapiens
  misc_RNA (1)...(19): siRNA sense strand
uaaacagcauucagcacaa

SEQ ID NO: 591348 - RNA, 19 nt, Homo sapiens
  misc_RNA (1)...(19): siRNA sense strand
ggagauuccuguggucauc

SEQ ID NO: 591349 - RNA, 19 nt, Homo sapiens
  misc_RNA (1)...(19): siRNA sense strand
gauauaccgagaucucaaa

SEQ ID NO: 591350 - RNA, 19 nt, Homo sapiens
  misc_RNA (1)...(19): siRNA sense strand
guagaagagggacuguaua

SEQ ID NO: 591351 - RNA, 19 nt, Homo sapiens
  misc_RNA (1)...(19): siRNA sense strand
gacagaauauaacuaacca

SEQ ID NO: 591352 - RNA, 19 nt, Homo sapiens
  misc_RNA (1)...(19): siRNA sense strand
caaccuaauccgaagauau

SEQ ID NO: 591353 - RNA, 19 nt, Homo sapiens
  misc_RNA (1)...(19): siRNA sense strand
cacaacaccuccucugcuu

SEQ ID NO: 591354 - RNA, 19 nt, Homo sapiens
  misc_RNA (1)...(19): siRNA sense strand
cagcuugagcaguuuguua

SEQ ID NO: 591355 - RNA, 19 nt, Homo sapiens
  misc_RNA (1)...(19): siRNA sense strand
ggacugcuucauauacuga

SEQ ID NO: 591356 - RNA, 19 nt, Homo sapiens
  misc_RNA (1)...(19): siRNA sense strand
gagggacuguauagcagaa

SEQ ID NO: 591357 - RNA, 19 nt, Homo sapiens
  misc_RNA (1)...(19): siRNA sense strand
gauucagccucuacuaaag

SEQ ID NO: 591358 - RNA, 19 nt, Homo sapiens
  misc_RNA (1)...(19): siRNA sense strand
gccucaaccuauagacuuu

SEQ ID NO: 591359 - RNA, 19 nt, Homo sapiens
  misc_RNA (1)...(19): siRNA sense strand
ggaauggaaacgacagaau

SEQ ID NO: 591360 - RNA, 19 nt, Homo sapiens
  misc_RNA (1)...(19): siRNA sense strand
gcacugaagccaggacaug

SEQ ID NO: 591361 - RNA, 19 nt, Homo sapiens
  misc_RNA (1)...(19): siRNA sense strand
aacacucgcuccaauguga

SEQ ID NO: 591362 - RNA, 19 nt, Homo sapiens
  misc_RNA (1)...(19): siRNA sense strand
gagcaggaaaccaguacaa

SEQ ID NO: 591363 - RNA, 19 nt, Homo sapiens
  misc_RNA (1)...(19): siRNA sense strand
guaauugugcaaggugaua

SEQ ID NO: 591364 - RNA, 19 nt, Homo sapiens
  misc_RNA (1)...(19): siRNA sense strand
ggaaacgacagaauauaac

SEQ ID NO: 591365 - RNA, 19 nt, Homo sapiens
  misc_RNA (1)...(19): siRNA sense strand
gugauucagccucuacuaa

SEQ ID NO: 591366 - RNA, 19 nt, Homo sapiens
  misc_RNA (1)...(19): siRNA sense strand
ccaugaaaccuuuaaccuu

SEQ ID NO: 591367 - RNA, 19 nt, Homo sapiens
  misc_RNA (1)...(19): siRNA sense strand
ccgaagauauaccgagauc

SEQ ID NO: 591368 - RNA, 19 nt, Homo sapiens
  misc_RNA (1)...(19): siRNA sense strand
gaaaccaguacaauuacau

SEQ ID NO: 591369 - RNA, 19 nt, Homo sapiens
  misc_RNA (1)...(19): siRNA sense strand
ggaauccaugaaaccuuua

SEQ ID NO: 591370 - RNA, 19 nt, Homo sapiens
  misc_RNA (1)...(19): siRNA sense strand
gaaacgacagaauauaacu

SEQ ID NO: 591371 - RNA, 19 nt, Homo sapiens
  misc_RNA (1)...(19): siRNA sense strand
uucguaagcuuuccaugaa

SEQ ID NO: 591372 - RNA, 19 nt, Homo sapiens
  misc_RNA (1)...(19): siRNA sense strand
ugauucagccucuacuaaa

SEQ ID NO: 591373 - RNA, 19 nt, Homo sapiens
  misc_RNA (1)...(19): siRNA sense strand
uaaggaaugagguuacaga

SEQ ID NO: 591374 - RNA, 19 nt, Homo sapiens
  misc_RNA (1)...(19): siRNA sense strand
cauuggcuaucuugacuau

SEQ ID NO: 591375 - RNA, 19 nt, Homo sapiens
  misc_RNA (1)...(19): siRNA sense strand
uucagaagauugugauuca

SEQ ID NO: 591376 - RNA, 19 nt, Homo sapiens
  misc_RNA (1)...(19): siRNA sense strand
auaccgagaucucaaacau

SEQ ID NO: 591377 - RNA, 19 nt, Homo sapiens
  misc_RNA (1)...(19): siRNA sense strand
gaaaagcaucagauacaaa

SEQ ID NO: 591378 - RNA, 19 nt, Homo sapiens
  misc_RNA (1)...(19): siRNA sense strand
cuucauauacugauguuug

SEQ ID NO: 591379 - RNA, 19 nt, Homo sapiens
  misc_RNA (1)...(19): siRNA sense strand
gcugccaaguuacuccauu

SEQ ID NO: 591380 - RNA, 19 nt, Homo sapiens
  misc_RNA (1)...(19): siRNA sense strand
uagaagagggacuguauag

SEQ ID NO: 591381 - RNA, 19 nt, Homo sapiens
  misc_RNA (1)...(19): siRNA sense strand
gaauccaugaaaccuuuaa

SEQ ID NO: 591382 - RNA, 19 nt, Homo sapiens
  misc_RNA (1)...(19): siRNA sense strand
guuaaggaaugagguuaca

SEQ ID NO: 591383 - RNA, 19 nt, Homo sapiens
  misc_RNA (1)...(19): siRNA sense strand
ccaaaugcucuccgacaug

SEQ ID NO: 591384 - RNA, 19 nt, Homo sapiens
  misc_RNA (1)...(19): siRNA sense strand
gcuccaaugugauuuucua

SEQ ID NO: 591385 - RNA, 19 nt, Homo sapiens
  misc_RNA (1)...(19): siRNA sense strand
auucuugcccuuuacaaua

SEQ ID NO: 591386 - RNA, 19 nt, Homo sapiens
  misc_RNA (1)...(19): siRNA sense strand
ggugauauucuugcccuuu

SEQ ID NO: 591387 - RNA, 19 nt, Homo sapiens
  misc_RNA (1)...(19): siRNA sense strand
cgagaucucaaacauaaag

SEQ ID NO: 591388 - RNA, 19 nt, Homo sapiens
  misc_RNA (1)...(19): siRNA sense strand
ccaucgauccuauguggaa

SEQ ID NO: 591389 - RNA, 19 nt, Homo sapiens
  misc_RNA (1)...(19): siRNA sense strand
ugugcaaggugauauucuu

SEQ ID NO: 591390 - RNA, 19 nt, Homo sapiens
  misc_RNA (1)...(19): siRNA sense strand
auauucaccucaguuugua

SEQ ID NO: 591391 - RNA, 19 nt, Homo sapiens
  misc_RNA (1)...(19): siRNA sense strand
gagguuacagauucaggaa

SEQ ID NO: 591392 - RNA, 19 nt, Homo sapiens
  misc_RNA (1)...(19): siRNA sense strand
caacaauacagcagaccau

SEQ ID NO: 591393 - RNA, 19 nt, Homo sapiens
  misc_RNA (1)...(19): siRNA sense strand
ugagcaguuuguuaaggaa

SEQ ID NO: 591394 - RNA, 19 nt, Homo sapiens
  misc_RNA (1)...(19): siRNA sense strand
uguagaagagggacuguau

SEQ ID NO: 591395 - RNA, 19 nt, Homo sapiens
  misc_RNA (1)...(19): siRNA sense strand
aaaccugacggaauggaaa

SEQ ID NO: 591396 - RNA, 19 nt, Homo sapiens
  misc_RNA (1)...(19): siRNA sense strand
gcagcuauaaacagcauuc

SEQ ID NO: 591397 - RNA, 19 nt, Homo sapiens
  misc_RNA (1)...(19): siRNA sense strand
ggccucaaccuauagacuu

SEQ ID NO: 591398 - RNA, 19 nt, Homo sapiens
  misc_RNA (1)...(19): siRNA sense strand
cauaacuuccucagcuuga

SEQ ID NO: 591399 - RNA, 19 nt, Homo sapiens
  misc_RNA (1)...(19): siRNA sense strand
ucuccgacaugcaguagau

SEQ ID NO: 591400 - RNA, 19 nt, Homo sapiens
  misc_RNA (1)...(19): siRNA sense strand
uugagcaguuuguuaagga

SEQ ID NO: 591401 - RNA, 19 nt, Homo sapiens
  misc_RNA (1)...(19): siRNA sense strand
uaaacaucaucaucuuggu

SEQ ID NO: 591402 - RNA, 19 nt, Homo sapiens
  misc_RNA (1)...(19): siRNA sense strand
aauggaaacgacagaauau

SEQ ID NO: 591403 - RNA, 19 nt, Homo sapiens
  misc_RNA (1)...(19): siRNA sense strand
uacauuggcuaucuugacu

SEQ ID NO: 591404 - RNA, 19 nt, Homo sapiens
  misc_RNA (1)...(19): siRNA sense strand
ucaaccuaauccgaagaua

SEQ ID NO: 591405 - RNA, 19 nt, Homo sapiens
  misc_RNA (1)...(19): siRNA sense strand
aaacgauauucaccucagu

SEQ ID NO: 591406 - RNA, 19 nt, Homo sapiens
  misc_RNA (1)...(19): siRNA sense strand
uaacuaaccaacuggaaaa

SEQ ID NO: 591407 - RNA, 19 nt, Homo sapiens
  misc_RNA (1)...(19): siRNA sense strand
caauacagcagaccaucuc

SEQ ID NO: 591408 - RNA, 19 nt, Homo sapiens
  misc_RNA (1)...(19): siRNA sense strand
acucuaccaucgauccuau

SEQ ID NO: 591409 - RNA, 19 nt, Homo sapiens
  misc_RNA (1)...(19): siRNA sense strand
uggaugaaacucaauguag

SEQ ID NO: 591410 - RNA, 19 nt, Homo sapiens
  misc_RNA (1)...(19): siRNA sense strand
uggcuaucuugacuauaaa

SEQ ID NO: 591411 - RNA, 19 nt, Homo sapiens
  misc_RNA (1)...(19): siRNA sense strand
ugaaacaccuggauucuua

SEQ ID NO: 591412 - RNA, 19 nt, Homo sapiens
  misc_RNA (1)...(19): siRNA sense strand
gcaaagagguugagagcuu

SEQ ID NO: 591413 - RNA, 19 nt, Homo sapiens
  misc_RNA (1)...(19): siRNA sense strand
ggaaacccaugaccaacua

SEQ ID NO: 591414 - RNA, 19 nt, Homo sapiens
  misc_RNA (1)...(19): siRNA sense strand
caacaacuaugacaugaug

SEQ ID NO: 591415 - RNA, 19 nt, Homo sapiens
  misc_RNA (1)...(19): siRNA sense strand
caaaggagaucagggauga

SEQ ID NO: 591416 - RNA, 19 nt, Homo sapiens
  misc_RNA (1)...(19): siRNA sense strand
gaacugauccuggagauga

SEQ ID NO: 591417 - RNA, 19 nt, Homo sapiens
  misc_RNA (1)...(19): siRNA sense strand
gaucagggaugaauaugug

SEQ ID NO: 591418 - RNA, 19 nt, Homo sapiens
  misc_RNA (1)...(19): siRNA sense strand
gaaggaggcugaggcuuug

SEQ ID NO: 591419 - RNA, 19 nt, Homo sapiens
  misc_RNA (1)...(19): siRNA sense strand
gggcugagcucaucaacau

SEQ ID NO: 591420 - RNA, 19 nt, Homo sapiens
  misc_RNA (1)...(19): siRNA sense strand
agacggcccugcugaagua

SEQ ID NO: 591421 - RNA, 19 nt, Homo sapiens
  misc_RNA (1)...(19): siRNA sense strand
agauuuaccugucuuacua

SEQ ID NO: 591422 - RNA, 19 nt, Homo sapiens
  misc_RNA (1)...(19): siRNA sense strand
ggaaggagcagcuuguguu

SEQ ID NO: 591423 - RNA, 19 nt, Homo sapiens
  misc_RNA (1)...(19): siRNA sense strand
aggcaaaucuggaggauga

SEQ ID NO: 591424 - RNA, 19 nt, Homo sapiens
  misc_RNA (1)...(19): siRNA sense strand
ucaagagagugagaauaua

SEQ ID NO: 591425 - RNA, 19 nt, Homo sapiens
  misc_RNA (1)...(19): siRNA sense strand
ggacacaggaauucauuga

SEQ ID NO: 591426 - RNA, 19 nt, Homo sapiens
  misc_RNA (1)...(19): siRNA sense strand
gaaggagcagcuuguguuu

SEQ ID NO: 591427 - RNA, 19 nt, Homo sapiens
  misc_RNA (1)...(19): siRNA sense strand
ggagaucagggaugaauau

SEQ ID NO: 591428 - RNA, 19 nt, Homo sapiens
  misc_RNA (1)...(19): siRNA sense strand
gaucaacaacuaugacaug

SEQ ID NO: 591429 - RNA, 19 nt, Homo sapiens
  misc_RNA (1)...(19): siRNA sense strand
gagcagauguugggagcuu

SEQ ID NO: 591430 - RNA, 19 nt, Homo sapiens
  misc_RNA (1)...(19): siRNA sense strand
guagaucuccgucacuauu

SEQ ID NO: 591431 - RNA, 19 nt, Homo sapiens
  misc_RNA (1)...(19): siRNA sense strand
ugacgaagauccgagaguu

SEQ ID NO: 591432 - RNA, 19 nt, Homo sapiens
  misc_RNA (1)...(19): siRNA sense strand
gaauauagcaucucuacac

SEQ ID NO: 591433 - RNA, 19 nt, Homo sapiens
  misc_RNA (1)...(19): siRNA sense strand
ugaaggaggcugaggcuuu

SEQ ID NO: 591434 - RNA, 19 nt, Homo sapiens
  misc_RNA (1)...(19): siRNA sense strand
ccagacaauuccuaaugaa

SEQ ID NO: 591435 - RNA, 19 nt, Homo sapiens
  misc_RNA (1)...(19): siRNA sense strand
gagaguuuauccuccagaa

SEQ ID NO: 591436 - RNA, 19 nt, Homo sapiens
  misc_RNA (1)...(19): siRNA sense strand
gaacggaccaugcaauugc

SEQ ID NO: 591437 - RNA, 19 nt, Homo sapiens
  misc_RNA (1)...(19): siRNA sense strand
gagcaagauuuaccugucu

SEQ ID NO: 591438 - RNA, 19 nt, Homo sapiens
  misc_RNA (1)...(19): siRNA sense strand
gcauaagcccaacuucuga

SEQ ID NO: 591439 - RNA, 19 nt, Homo sapiens
  misc_RNA (1)...(19): siRNA sense strand
agaaauggcaccaguauca

SEQ ID NO: 591440 - RNA, 19 nt, Homo sapiens
  misc_RNA (1)...(19): siRNA sense strand
acaccuggauucuuaucua

SEQ ID NO: 591441 - RNA, 19 nt, Homo sapiens
  misc_RNA (1)...(19): siRNA sense strand
caaggcagccgcagucaga

SEQ ID NO: 591442 - RNA, 19 nt, Homo sapiens
  misc_RNA (1)...(19): siRNA sense strand
gaguuuauccuccagaaga

SEQ ID NO: 591443 - RNA, 19 nt, Homo sapiens
  misc_RNA (1)...(19): siRNA sense strand
cagcuuguguuucugauca

SEQ ID NO: 591444 - RNA, 19 nt, Homo sapiens
  misc_RNA (1)...(19): siRNA sense strand
gaaaucaucaguggaaucu

SEQ ID NO: 591445 - RNA, 19 nt, Homo sapiens
  misc_RNA (1)...(19): siRNA sense strand
caagagagugagaauauag

SEQ ID NO: 591446 - RNA, 19 nt, Homo sapiens
  misc_RNA (1)...(19): siRNA sense strand
gcacuacgcccuccuagac

SEQ ID NO: 591447 - RNA, 19 nt, Homo sapiens
  misc_RNA (1)...(19): siRNA sense strand
ggaguuggauaucacuucu

SEQ ID NO: 591448 - RNA, 19 nt, Homo sapiens
  misc_RNA (1)...(19): siRNA sense strand
uacagcagauugaacagaa

SEQ ID NO: 591449 - RNA, 19 nt, Homo sapiens
  misc_RNA (1)...(19): siRNA sense strand
gauguaaugcggaguuuca

SEQ ID NO: 591450 - RNA, 19 nt, Homo sapiens
  misc_RNA (1)...(19): siRNA sense strand
agguggagguggagaauuu

SEQ ID NO: 591451 - RNA, 19 nt, Homo sapiens
  misc_RNA (1)...(19): siRNA sense strand
ucaaggcagugacgaagau

SEQ ID NO: 591452 - RNA, 19 nt, Homo sapiens
  misc_RNA (1)...(19): siRNA sense strand
guguagaucuccgucacua

SEQ ID NO: 591453 - RNA, 19 nt, Homo sapiens
  misc_RNA (1)...(19): siRNA sense strand
caacauucaccaccuuaug

SEQ ID NO: 591454 - RNA, 19 nt, Homo sapiens
  misc_RNA (1)...(19): siRNA sense strand
gcugggaccucagauaugg

SEQ ID NO: 591455 - RNA, 19 nt, Homo sapiens
  misc_RNA (1)...(19): siRNA sense strand
ugacagagcccagguucuu

SEQ ID NO: 591456 - RNA, 19 nt, Homo sapiens
  misc_RNA (1)...(19): siRNA sense strand
uccagaagauuuauuccuu

SEQ ID NO: 591457 - RNA, 19 nt, Homo sapiens
  misc_RNA (1)...(19): siRNA sense strand
acgaagauccgagaguuua

SEQ ID NO: 591458 - RNA, 19 nt, Homo sapiens
  misc_RNA (1)...(19): siRNA sense strand
caucaacauucaccaccuu

SEQ ID NO: 591459 - RNA, 19 nt, Homo sapiens
  misc_RNA (1)...(19): siRNA sense strand
gagcagcuuguguuucuga

SEQ ID NO: 591460 - RNA, 19 nt, Homo sapiens
  misc_RNA (1)...(19): siRNA sense strand
gcgaauaccuuuucaucug

SEQ ID NO: 591461 - RNA, 19 nt, Homo sapiens
  misc_RNA (1)...(19): siRNA sense strand
gaggaugaguuaguaaagg

SEQ ID NO: 591462 - RNA, 19 nt, Homo sapiens
  misc_RNA (1)...(19): siRNA sense strand
gggcugggaccucagauau

SEQ ID NO: 591463 - RNA, 19 nt, Homo sapiens
  misc_RNA (1)...(19): siRNA sense strand
uauagcaucucuacacaac

SEQ ID NO: 591464 - RNA, 19 nt, Homo sapiens
  misc_RNA (1)...(19): siRNA sense strand
ccuccgcucuugucaguau

SEQ ID NO: 591465 - RNA, 19 nt, Homo sapiens
  misc_RNA (1)...(19): siRNA sense strand
guucagagcguccgaagca

SEQ ID NO: 591466 - RNA, 19 nt, Homo sapiens
  misc_RNA (1)...(19): siRNA sense strand
gaacagucaggagccauga

SEQ ID NO: 591467 - RNA, 19 nt, Homo sapiens
  misc_RNA (1)...(19): siRNA sense strand
ucuggaggaugaguuagua

SEQ ID NO: 591468 - RNA, 19 nt, Homo sapiens
  misc_RNA (1)...(19): siRNA sense strand
ucagaaauggcaccaguau

SEQ ID NO: 591469 - RNA, 19 nt, Homo sapiens
  misc_RNA (1)...(19): siRNA sense strand
ucaggaaacccaugaccaa

SEQ ID NO: 591470 - RNA, 19 nt, Homo sapiens
  misc_RNA (1)...(19): siRNA sense strand
ggaaaucaucaguggaauc

SEQ ID NO: 591471 - RNA, 19 nt, Homo sapiens
  misc_RNA (1)...(19): siRNA sense strand
uagcaucucuacacaacca

SEQ ID NO: 591472 - RNA, 19 nt, Homo sapiens
  misc_RNA (1)...(19): siRNA sense strand
gcugagcucaucaacauuc

SEQ ID NO: 591473 - RNA, 19 nt, Homo sapiens
  misc_RNA (1)...(19): siRNA sense strand
guucuccgguuccguaaca

SEQ ID NO: 591474 - RNA, 19 nt, Homo sapiens
  misc_RNA (1)...(19): siRNA sense strand
ggccguacacucagcauga

SEQ ID NO: 591475 - RNA, 19 nt, Homo sapiens
  misc_RNA (1)...(19): siRNA sense strand
gagacgcugagcaagauuu

SEQ ID NO: 591476 - RNA, 19 nt, Homo sapiens
  misc_RNA (1)...(19): siRNA sense strand
gacgaagauccgagaguuu

SEQ ID NO: 591477 - RNA, 19 nt, Homo sapiens
  misc_RNA (1)...(19): siRNA sense strand
gccaugaacauucgacuuc

SEQ ID NO: 591478 - RNA, 19 nt, Homo sapiens
  misc_RNA (1)...(19): siRNA sense strand
cgaaaucgccaggcaguuc

SEQ ID NO: 591479 - RNA, 19 nt, Homo sapiens
  misc_RNA (1)...(19): siRNA sense strand
aaucaucaguggaaucucu

SEQ ID NO: 591480 - RNA, 19 nt, Homo sapiens
  misc_RNA (1)...(19): siRNA sense strand
aaaucuggaggaugaguua

SEQ ID NO: 591481 - RNA, 19 nt, Homo sapiens
  misc_RNA (1)...(19): siRNA sense strand
accagacaauuccuaauga

SEQ ID NO: 591482 - RNA, 19 nt, Homo sapiens
  misc_RNA (1)...(19): siRNA sense strand
gaaacaccuggauucuuau

SEQ ID NO: 591483 - RNA, 19 nt, Homo sapiens
  misc_RNA (1)...(19): siRNA sense strand
aauauagcaucucuacaca

SEQ ID NO: 591484 - RNA, 19 nt, Homo sapiens
  misc_RNA (1)...(19): siRNA sense strand
gcgaauggagcagauguug

SEQ ID NO: 591485 - RNA, 19 nt, Homo sapiens
  misc_RNA (1)...(19): siRNA sense strand
ucaaccagacaauuccuaa

SEQ ID NO: 591486 - RNA, 19 nt, Homo sapiens
  misc_RNA (1)...(19): siRNA sense strand
guaaaggaagcucuuaaaa

SEQ ID NO: 591487 - RNA, 19 nt, Homo sapiens
  misc_RNA (1)...(19): siRNA sense strand
gcucugagauccggacacu

SEQ ID NO: 591488 - RNA, 19 nt, Homo sapiens
  misc_RNA (1)...(19): siRNA sense strand
ggaggaugaguuaguaaag

SEQ ID NO: 591489 - RNA, 19 nt, Homo sapiens
  misc_RNA (1)...(19): siRNA sense strand
ugguggagcucaagaagca

SEQ ID NO: 591490 - RNA, 19 nt, Homo sapiens
  misc_RNA (1)...(19): siRNA sense strand
aggaugaguuaguaaagga

SEQ ID NO: 591491 - RNA, 19 nt, Homo sapiens
  misc_RNA (1)...(19): siRNA sense strand
aggcugaggcuuugauuga

SEQ ID NO: 591492 - RNA, 19 nt, Homo sapiens
  misc_RNA (1)...(19): siRNA sense strand
gaugcugggugugcugaug

SEQ ID NO: 591493 - RNA, 19 nt, Homo sapiens
  misc_RNA (1)...(19): siRNA sense strand
aggagcagcuuguguuucu

SEQ ID NO: 591494 - RNA, 19 nt, Homo sapiens
  misc_RNA (1)...(19): siRNA sense strand
gaagauccgagaguuuauc

SEQ ID NO: 591495 - RNA, 19 nt, Homo sapiens
  misc_RNA (1)...(19): siRNA sense strand
ggauuauauucaagagagu

SEQ ID NO: 591496 - RNA, 19 nt, Homo sapiens
  misc_RNA (1)...(19): siRNA sense strand
gaaauggcaccaguaucau

SEQ ID NO: 591497 - RNA, 19 nt, Homo sapiens
  misc_RNA (1)...(19): siRNA sense strand
caggaaccacugcaacuug

SEQ ID NO: 591498 - RNA, 19 nt, Homo sapiens
  misc_RNA (1)...(19): siRNA sense strand
aguuggauaucacuucuga

SEQ ID NO: 591499 - RNA, 19 nt, Homo sapiens
  misc_RNA (1)...(19): siRNA sense strand
gagcaacagcaaaggagau

SEQ ID NO: 591500 - RNA, 19 nt, Homo sapiens
  misc_RNA (1)...(19): siRNA sense strand
gcugauccguggcuuuggu

SEQ ID NO: 591501 - RNA, 19 nt, Homo sapiens
  misc_RNA (1)...(19): siRNA sense strand
aaaggaagcucuuaaaacg

SEQ ID NO: 591502 - RNA, 19 nt, Homo sapiens
  misc_RNA (1)...(19): siRNA sense strand
ugacugcuacgaugccauu

SEQ ID NO: 591503 - RNA, 19 nt, Homo sapiens
  misc_RNA (1)...(19): siRNA sense strand
uggagacgcugagcaagau

SEQ ID NO: 591504 - RNA, 19 nt, Homo sapiens
  misc_RNA (1)...(19): siRNA sense strand
cagguucuucuaucaguuu

SEQ ID NO: 591505 - RNA, 19 nt, Homo sapiens
  misc_RNA (1)...(19): siRNA sense strand
aguaaaggaagcucuuaaa

SEQ ID NO: 591506 - RNA, 19 nt, Homo sapiens
  misc_RNA (1)...(19): siRNA sense strand
acagcagauugaacagaaa

SEQ ID NO: 591507 - RNA, 19 nt, Homo sapiens
  misc_RNA (1)...(19): siRNA sense strand
agacgcugagcaagauuua

SEQ ID NO: 591508 - RNA, 19 nt, Homo sapiens
  misc_RNA (1)...(19): siRNA sense strand
cauucgggauuauauucaa

SEQ ID NO: 591509 - RNA, 19 nt, Homo sapiens
  misc_RNA (1)...(19): siRNA sense strand
uucaagagagugagaauau

SEQ ID NO: 591510 - RNA, 19 nt, Homo sapiens
  misc_RNA (1)...(19): siRNA sense strand
cagcugauccguggcuuug

SEQ ID NO: 591511 - RNA, 19 nt, Homo sapiens
  misc_RNA (1)...(19): siRNA sense strand
ugaaacaccuggauucuua

SEQ ID NO: 591512 - RNA, 19 nt, Homo sapiens
  misc_RNA (1)...(19): siRNA sense strand
gcaaagagguugagagcuu

SEQ ID NO: 591513 - RNA, 19 nt, Homo sapiens
  misc_RNA (1)...(19): siRNA sense strand
ggaaacccaugaccaacua

SEQ ID NO: 591514 - RNA, 19 nt, Homo sapiens
  misc_RNA (1)...(19): siRNA sense strand
caacaacuaugacaugaug

SEQ ID NO: 591515 - RNA, 19 nt, Homo sapiens
  misc_RNA (1)...(19): siRNA sense strand
caaaggagaucagggauga

SEQ ID NO: 591516 - RNA, 19 nt, Homo sapiens
  misc_RNA (1)...(19): siRNA sense strand
gaacugauccuggagauga

SEQ ID NO: 591517 - RNA, 19 nt, Homo sapiens
  misc_RNA (1)...(19): siRNA sense strand
gaucagggaugaauaugug

SEQ ID NO: 591518 - RNA, 19 nt, Homo sapiens
  misc_RNA (1)...(19): siRNA sense strand
gaaggaggcugaggcuuug

SEQ ID NO: 591519 - RNA, 19 nt, Homo sapiens
  misc_RNA (1)...(19): siRNA sense strand
gggcugagcucaucaacau

SEQ ID NO: 591520 - RNA, 19 nt, Homo sapiens
  misc_RNA (1)...(19): siRNA sense strand
agacggcccugcugaagua

SEQ ID NO: 591521 - RNA, 19 nt, Homo sapiens
  misc_RNA (1)...(19): siRNA sense strand
agauuuaccugucuuacua

SEQ ID NO: 591522 - RNA, 19 nt, Homo sapiens
  misc_RNA (1)...(19): siRNA sense strand
ggaaggagcagcuuguguu

SEQ ID NO: 591523 - RNA, 19 nt, Homo sapiens
  misc_RNA (1)...(19): siRNA sense strand
aggcaaaucuggaggauga

SEQ ID NO: 591524 - RNA, 19 nt, Homo sapiens
  misc_RNA (1)...(19): siRNA sense strand
ucaagagagugagaauaua

SEQ ID NO: 591525 - RNA, 19 nt, Homo sapiens
  misc_RNA (1)...(19): siRNA sense strand
ggacacaggaauucauuga

SEQ ID NO: 591526 - RNA, 19 nt, Homo sapiens
  misc_RNA (1)...(19): siRNA sense strand
gaaggagcagcuuguguuu

SEQ ID NO: 591527 - RNA, 19 nt, Homo sapiens
  misc_RNA (1)...(19): siRNA sense strand
ggagaucagggaugaauau

SEQ ID NO: 591528 - RNA, 19 nt, Homo sapiens
  misc_RNA (1)...(19): siRNA sense strand
gaucaacaacuaugacaug

SEQ ID NO: 591529 - RNA, 19 nt, Homo sapiens
  misc_RNA (1)...(19): siRNA sense strand
gagcagauguugggagcuu

SEQ ID NO: 591530 - RNA, 19 nt, Homo sapiens
  misc_RNA (1)...(19): siRNA sense strand
guagaucuccgucacuauu

SEQ ID NO: 591531 - RNA, 19 nt, Homo sapiens
  misc_RNA (1)...(19): siRNA sense strand
ugacgaagauccgagaguu

SEQ ID NO: 591532 - RNA, 19 nt, Homo sapiens
  misc_RNA (1)...(19): siRNA sense strand
gaauauagcaucucuacac

SEQ ID NO: 591533 - RNA, 19 nt, Homo sapiens
  misc_RNA (1)...(19): siRNA sense strand
ugaaggaggcugaggcuuu

SEQ ID NO: 591534 - RNA, 19 nt, Homo sapiens
  misc_RNA (1)...(19): siRNA sense strand
ccagacaauuccuaaugaa

SEQ ID NO: 591535 - RNA, 19 nt, Homo sapiens
  misc_RNA (1)...(19): siRNA sense strand
gagaguuuauccuccagaa

SEQ ID NO: 591536 - RNA, 19 nt, Homo sapiens
  misc_RNA (1)...(19): siRNA sense strand
gaacggaccaugcaauugc

SEQ ID NO: 591537 - RNA, 19 nt, Homo sapiens
  misc_RNA (1)...(19): siRNA sense strand
gagcaagauuuaccugucu

SEQ ID NO: 591538 - RNA, 19 nt, Homo sapiens
  misc_RNA (1)...(19): siRNA sense strand
gcauaagcccaacuucuga

SEQ ID NO: 591539 - RNA, 19 nt, Homo sapiens
  misc_RNA (1)...(19): siRNA sense strand
agaaauggcaccaguauca

SEQ ID NO: 591540 - RNA, 19 nt, Homo sapiens
  misc_RNA (1)...(19): siRNA sense strand
acaccuggauucuuaucua

SEQ ID NO: 591541 - RNA, 19 nt, Homo sapiens
  misc_RNA (1)...(19): siRNA sense strand
caaggcagccgcagucaga

SEQ ID NO: 591542 - RNA, 19 nt, Homo sapiens
  misc_RNA (1)...(19): siRNA sense strand
gaguuuauccuccagaaga

SEQ ID NO: 591543 - RNA, 19 nt, Homo sapiens
  misc_RNA (1)...(19): siRNA sense strand
cagcuuguguuucugauca

SEQ ID NO: 591544 - RNA, 19 nt, Homo sapiens
  misc_RNA (1)...(19): siRNA sense strand
gaaaucaucaguggaaucu

SEQ ID NO: 591545 - RNA, 19 nt, Homo sapiens
  misc_RNA (1)...(19): siRNA sense strand
caagagagugagaauauag

SEQ ID NO: 591546 - RNA, 19 nt, Homo sapiens
  misc_RNA (1)...(19): siRNA sense strand
gcacuacgcccuccuagac

SEQ ID NO: 591547 - RNA, 19 nt, Homo sapiens
  misc_RNA (1)...(19): siRNA sense strand
ggaguuggauaucacuucu

SEQ ID NO: 591548 - RNA, 19 nt, Homo sapiens
  misc_RNA (1)...(19): siRNA sense strand
uacagcagauugaacagaa

SEQ ID NO: 591549 - RNA, 19 nt, Homo sapiens
  misc_RNA (1)...(19): siRNA sense strand
gauguaaugcggaguuuca

SEQ ID NO: 591550 - RNA, 19 nt, Homo sapiens
  misc_RNA (1)...(19): siRNA sense strand
agguggagguggagaauuu

SEQ ID NO: 591551 - RNA, 19 nt, Homo sapiens
  misc_RNA (1)...(19): siRNA sense strand
ucaaggcagugacgaagau

SEQ ID NO: 591552 - RNA, 19 nt, Homo sapiens
  misc_RNA (1)...(19): siRNA sense strand
guguagaucuccgucacua

SEQ ID NO: 591553 - RNA, 19 nt, Homo sapiens
  misc_RNA (1)...(19): siRNA sense strand
caacauucaccaccuuaug

SEQ ID NO: 591554 - RNA, 19 nt, Homo sapiens
  misc_RNA (1)...(19): siRNA sense strand
gcugggaccucagauaugg

SEQ ID NO: 591555 - RNA, 19 nt, Homo sapiens
  misc_RNA (1)...(19): siRNA sense strand
ugacagagcccagguucuu

SEQ ID NO: 591556 - RNA, 19 nt, Homo sapiens
  misc_RNA (1)...(19): siRNA sense strand
uccagaagauuuauuccuu

SEQ ID NO: 591557 - RNA, 19 nt, Homo sapiens
  misc_RNA (1)...(19): siRNA sense strand
acgaagauccgagaguuua

SEQ ID NO: 591558 - RNA, 19 nt, Homo sapiens
  misc_RNA (1)...(19): siRNA sense strand
caucaacauucaccaccuu

SEQ ID NO: 591559 - RNA, 19 nt, Homo sapiens
  misc_RNA (1)...(19): siRNA sense strand
gagcagcuuguguuucuga

SEQ ID NO: 591560 - RNA, 19 nt, Homo sapiens
  misc_RNA (1)...(19): siRNA sense strand
gcgaauaccuuuucaucug

SEQ ID NO: 591561 - RNA, 19 nt, Homo sapiens
  misc_RNA (1)...(19): siRNA sense strand
gaggaugaguuaguaaagg

SEQ ID NO: 591562 - RNA, 19 nt, Homo sapiens
  misc_RNA (1)...(19): siRNA sense strand
gggcugggaccucagauau

SEQ ID NO: 591563 - RNA, 19 nt, Homo sapiens
  misc_RNA (1)...(19): siRNA sense strand
uauagcaucucuacacaac

SEQ ID NO: 591564 - RNA, 19 nt, Homo sapiens
  misc_RNA (1)...(19): siRNA sense strand
ccuccgcucuugucaguau

SEQ ID NO: 591565 - RNA, 19 nt, Homo sapiens
  misc_RNA (1)...(19): siRNA sense strand
guucagagcguccgaagca

SEQ ID NO: 591566 - RNA, 19 nt, Homo sapiens
  misc_RNA (1)...(19): siRNA sense strand
gaacagucaggagccauga

SEQ ID NO: 591567 - RNA, 19 nt, Homo sapiens
  misc_RNA (1)...(19): siRNA sense strand
ucuggaggaugaguuagua

SEQ ID NO: 591568 - RNA, 19 nt, Homo sapiens
  misc_RNA (1)...(19): siRNA sense strand
ucagaaauggcaccaguau

SEQ ID NO: 591569 - RNA, 19 nt, Homo sapiens
  misc_RNA (1)...(19): siRNA sense strand
ucaggaaacccaugaccaa

SEQ ID NO: 591570 - RNA, 19 nt, Homo sapiens
  misc_RNA (1)...(19): siRNA sense strand
ggaaaucaucaguggaauc

SEQ ID NO: 591571 - RNA, 19 nt, Homo sapiens
  misc_RNA (1)...(19): siRNA sense strand
uagcaucucuacacaacca

SEQ ID NO: 591572 - RNA, 19 nt, Homo sapiens
  misc_RNA (1)...(19): siRNA sense strand
gcugagcucaucaacauuc

SEQ ID NO: 591573 - RNA, 19 nt, Homo sapiens
  misc_RNA (1)...(19): siRNA sense strand
guucuccgguuccguaaca

SEQ ID NO: 591574 - RNA, 19 nt, Homo sapiens
  misc_RNA (1)...(19): siRNA sense strand
ggccguacacucagcauga

SEQ ID NO: 591575 - RNA, 19 nt, Homo sapiens
  misc_RNA (1)...(19): siRNA sense strand
gagacgcugagcaagauuu

SEQ ID NO: 591576 - RNA, 19 nt, Homo sapiens
  misc_RNA (1)...(19): siRNA sense strand
gacgaagauccgagaguuu

SEQ ID NO: 591577 - RNA, 19 nt, Homo sapiens
  misc_RNA (1)...(19): siRNA sense strand
gccaugaacauucgacuuc

SEQ ID NO: 591578 - RNA, 19 nt, Homo sapiens
  misc_RNA (1)...(19): siRNA sense strand
cgaaaucgccaggcaguuc

SEQ ID NO: 591579 - RNA, 19 nt, Homo sapiens
  misc_RNA (1)...(19): siRNA sense strand
aaucaucaguggaaucucu

SEQ ID NO: 591580 - RNA, 19 nt, Homo sapiens
  misc_RNA (1)...(19): siRNA sense strand
aaaucuggaggaugaguua

SEQ ID NO: 591581 - RNA, 19 nt, Homo sapiens
  misc_RNA (1)...(19): siRNA sense strand
accagacaauuccuaauga

SEQ ID NO: 591582 - RNA, 19 nt, Homo sapiens
  misc_RNA (1)...(19): siRNA sense strand
gaaacaccuggauucuuau

SEQ ID NO: 591583 - RNA, 19 nt, Homo sapiens
  misc_RNA (1)...(19): siRNA sense strand
aauauagcaucucuacaca

SEQ ID NO: 591584 - RNA, 19 nt, Homo sapiens
  misc_RNA (1)...(19): siRNA sense strand
gcgaauggagcagauguug

SEQ ID NO: 591585 - RNA, 19 nt, Homo sapiens
  misc_RNA (1)...(19): siRNA sense strand
ucaaccagacaauuccuaa

SEQ ID NO: 591586 - RNA, 19 nt, Homo sapiens
  misc_RNA (1)...(19): siRNA sense strand
guaaaggaagcucuuaaaa

SEQ ID NO: 591587 - RNA, 19 nt, Homo sapiens
  misc_RNA (1)...(19): siRNA sense strand
gcucugagauccggacacu

SEQ ID NO: 591588 - RNA, 19 nt, Homo sapiens
  misc_RNA (1)...(19): siRNA sense strand
ggaggaugaguuaguaaag

SEQ ID NO: 591589 - RNA, 19 nt, Homo sapiens
  misc_RNA (1)...(19): siRNA sense strand
ugguggagcucaagaagca

SEQ ID NO: 591590 - RNA, 19 nt, Homo sapiens
  misc_RNA (1)...(19): siRNA sense strand
aggaugaguuaguaaagga

SEQ ID NO: 591591 - RNA, 19 nt, Homo sapiens
  misc_RNA (1)...(19): siRNA sense strand
aggcugaggcuuugauuga

SEQ ID NO: 591592 - RNA, 19 nt, Homo sapiens
  misc_RNA (1)...(19): siRNA sense strand
gaugcugggugugcugaug

SEQ ID NO: 591593 - RNA, 19 nt, Homo sapiens
  misc_RNA (1)...(19): siRNA sense strand
aggagcagcuuguguuucu

SEQ ID NO: 591594 - RNA, 19 nt, Homo sapiens
  misc_RNA (1)...(19): siRNA sense strand
gaagauccgagaguuuauc

SEQ ID NO: 591595 - RNA, 19 nt, Homo sapiens
  misc_RNA (1)...(19): siRNA sense strand
ggauuauauucaagagagu

SEQ ID NO: 591596 - RNA, 19 nt, Homo sapiens
  misc_RNA (1)...(19): siRNA sense strand
gaaauggcaccaguaucau

SEQ ID NO: 591597 - RNA, 19 nt, Homo sapiens
  misc_RNA (1)...(19): siRNA sense strand
caggaaccacugcaacuug

SEQ ID NO: 591598 - RNA, 19 nt, Homo sapiens
  misc_RNA (1)...(19): siRNA sense strand
aguuggauaucacuucuga

SEQ ID NO: 591599 - RNA, 19 nt, Homo sapiens
  misc_RNA (1)...(19): siRNA sense strand
gagcaacagcaaaggagau

SEQ ID NO: 591600 - RNA, 19 nt, Homo sapiens
  misc_RNA (1)...(19): siRNA sense strand
gcugauccguggcuuuggu

SEQ ID NO: 591601 - RNA, 19 nt, Homo sapiens
  misc_RNA (1)...(19): siRNA sense strand
aaaggaagcucuuaaaacg

SEQ ID NO: 591602 - RNA, 19 nt, Homo sapiens
  misc_RNA (1)...(19): siRNA sense strand
ugacugcuacgaugccauu

SEQ ID NO: 591603 - RNA, 19 nt, Homo sapiens
  misc_RNA (1)...(19): siRNA sense strand
uggagacgcugagcaagau

SEQ ID NO: 591604 - RNA, 19 nt, Homo sapiens
  misc_RNA (1)...(19): siRNA sense strand
cagguucuucuaucaguuu

SEQ ID NO: 591605 - RNA, 19 nt, Homo sapiens
  misc_RNA (1)...(19): siRNA sense strand
aguaaaggaagcucuuaaa

SEQ ID NO: 591606 - RNA, 19 nt, Homo sapiens
  misc_RNA (1)...(19): siRNA sense strand
acagcagauugaacagaaa

SEQ ID NO: 591607 - RNA, 19 nt, Homo sapiens
  misc_RNA (1)...(19): siRNA sense strand
agacgcugagcaagauuua

SEQ ID NO: 591608 - RNA, 19 nt, Homo sapiens
  misc_RNA (1)...(19): siRNA sense strand
cauucgggauuauauucaa

SEQ ID NO: 591609 - RNA, 19 nt, Homo sapiens
  misc_RNA (1)...(19): siRNA sense strand
uucaagagagugagaauau

SEQ ID NO: 591610 - RNA, 19 nt, Homo sapiens
  misc_RNA (1)...(19): siRNA sense strand
cagcugauccguggcuuug

SEQ ID NO: 591611 - RNA, 19 nt, Homo sapiens
  misc_RNA (1)...(19): siRNA sense strand
ucaagaagcucaugauuug

SEQ ID NO: 591612 - RNA, 19 nt, Homo sapiens
  misc_RNA (1)...(19): siRNA sense strand
uaaggaagcugaagaaaug

SEQ ID NO: 591613 - RNA, 19 nt, Homo sapiens
  misc_RNA (1)...(19): siRNA sense strand
aaauaaagcugcacucuau

SEQ ID NO: 591614 - RNA, 19 nt, Homo sapiens
  misc_RNA (1)...(19): siRNA sense strand
uaagaaggcagaacaguua

SEQ ID NO: 591615 - RNA, 19 nt, Homo sapiens
  misc_RNA (1)...(19): siRNA sense strand
uaaaguugcuucagucuug

SEQ ID NO: 591616 - RNA, 19 nt, Homo sapiens
  misc_RNA (1)...(19): siRNA sense strand
gcucagacauauauggaua

SEQ ID NO: 591617 - RNA, 19 nt, Homo sapiens
  misc_RNA (1)...(19): siRNA sense strand
gcagaaagagcuauuggua

SEQ ID NO: 591618 - RNA, 19 nt, Homo sapiens
  misc_RNA (1)...(19): siRNA sense strand
guacagugaugcugagaaa

SEQ ID NO: 591619 - RNA, 19 nt, Homo sapiens
  misc_RNA (1)...(19): siRNA sense strand
gcaguagaauguuguguga

SEQ ID NO: 591620 - RNA, 19 nt, Homo sapiens
  misc_RNA (1)...(19): siRNA sense strand
gaacagaggcugcuucaag

SEQ ID NO: 591621 - RNA, 19 nt, Homo sapiens
  misc_RNA (1)...(19): siRNA sense strand
caacagcucaugaagauuu

SEQ ID NO: 591622 - RNA, 19 nt, Homo sapiens
  misc_RNA (1)...(19): siRNA sense strand
gacauuugcuucaucauug

SEQ ID NO: 591623 - RNA, 19 nt, Homo sapiens
  misc_RNA (1)...(19): siRNA sense strand
guauagcucugggaaauuu

SEQ ID NO: 591624 - RNA, 19 nt, Homo sapiens
  misc_RNA (1)...(19): siRNA sense strand
uagaggagauugcaauuga

SEQ ID NO: 591625 - RNA, 19 nt, Homo sapiens
  misc_RNA (1)...(19): siRNA sense strand
gaaauggaaacugcaaaua

SEQ ID NO: 591626 - RNA, 19 nt, Homo sapiens
  misc_RNA (1)...(19): siRNA sense strand
gcagaacaguuaauuaaac

SEQ ID NO: 591627 - RNA, 19 nt, Homo sapiens
  misc_RNA (1)...(19): siRNA sense strand
cugauacacugcuagauua

SEQ ID NO: 591628 - RNA, 19 nt, Homo sapiens
  misc_RNA (1)...(19): siRNA sense strand
guacugagagcuuuggaua

SEQ ID NO: 591629 - RNA, 19 nt, Homo sapiens
  misc_RNA (1)...(19): siRNA sense strand
agaaucagaugcugcagua

SEQ ID NO: 591630 - RNA, 19 nt, Homo sapiens
  misc_RNA (1)...(19): siRNA sense strand
agaaagagcuauugguauc

SEQ ID NO: 591631 - RNA, 19 nt, Homo sapiens
  misc_RNA (1)...(19): siRNA sense strand
gaaauuacgagaaaguguu

SEQ ID NO: 591632 - RNA, 19 nt, Homo sapiens
  misc_RNA (1)...(19): siRNA sense strand
gauuaucgaggucucauua

SEQ ID NO: 591633 - RNA, 19 nt, Homo sapiens
  misc_RNA (1)...(19): siRNA sense strand
gcaccugucuucacuccaa

SEQ ID NO: 591634 - RNA, 19 nt, Homo sapiens
  misc_RNA (1)...(19): siRNA sense strand
gaaaugcacaucaaagcaa

SEQ ID NO: 591635 - RNA, 19 nt, Homo sapiens
  misc_RNA (1)...(19): siRNA sense strand
gugcaguccuuccugauuu

SEQ ID NO: 591636 - RNA, 19 nt, Homo sapiens
  misc_RNA (1)...(19): siRNA sense strand
gaucggcaauauucaguga

SEQ ID NO: 591637 - RNA, 19 nt, Homo sapiens
  misc_RNA (1)...(19): siRNA sense strand
caucuggcuucuuuauaua

SEQ ID NO: 591638 - RNA, 19 nt, Homo sapiens
  misc_RNA (1)...(19): siRNA sense strand
gucagucuguugcaauuua

SEQ ID NO: 591639 - RNA, 19 nt, Homo sapiens
  misc_RNA (1)...(19): siRNA sense strand
acgagaaaguguuugaaua

SEQ ID NO: 591640 - RNA, 19 nt, Homo sapiens
  misc_RNA (1)...(19): siRNA sense strand
gcaauugggaagaaacuuu

SEQ ID NO: 591641 - RNA, 19 nt, Homo sapiens
  misc_RNA (1)...(19): siRNA sense strand
caucaaagcaauucagauu

SEQ ID NO: 591642 - RNA, 19 nt, Homo sapiens
  misc_RNA (1)...(19): siRNA sense strand
caaauaaagcugcacucua

SEQ ID NO: 591643 - RNA, 19 nt, Homo sapiens
  misc_RNA (1)...(19): siRNA sense strand
gauguuuacuacaagcuuu

SEQ ID NO: 591644 - RNA, 19 nt, Homo sapiens
  misc_RNA (1)...(19): siRNA sense strand
ggugaaagcacuuauuuua

SEQ ID NO: 591645 - RNA, 19 nt, Homo sapiens
  misc_RNA (1)...(19): siRNA sense strand
cgagaaaguguuugaauau

SEQ ID NO: 591646 - RNA, 19 nt, Homo sapiens
  misc_RNA (1)...(19): siRNA sense strand
gggcuacaguggacuagaa

SEQ ID NO: 591647 - RNA, 19 nt, Homo sapiens
  misc_RNA (1)...(19): siRNA sense strand
ggacaucuggcuucuuuau

SEQ ID NO: 591648 - RNA, 19 nt, Homo sapiens
  misc_RNA (1)...(19): siRNA sense strand
gaaggcagaacaguuaauu

SEQ ID NO: 591649 - RNA, 19 nt, Homo sapiens
  misc_RNA (1)...(19): siRNA sense strand
gagaaaguguuugaauauc

SEQ ID NO: 591650 - RNA, 19 nt, Homo sapiens
  misc_RNA (1)...(19): siRNA sense strand
acaguggacuagaauauga

SEQ ID NO: 591651 - RNA, 19 nt, Homo sapiens
  misc_RNA (1)...(19): siRNA sense strand
gaagaaaugcacaucaaag

SEQ ID NO: 591652 - RNA, 19 nt, Homo sapiens
  misc_RNA (1)...(19): siRNA sense strand
gaucaugguguuaaaguug

SEQ ID NO: 591653 - RNA, 19 nt, Homo sapiens
  misc_RNA (1)...(19): siRNA sense strand
ugggacaucuggcuucuuu

SEQ ID NO: 591654 - RNA, 19 nt, Homo sapiens
  misc_RNA (1)...(19): siRNA sense strand
ccgagaacauccaguuuga

SEQ ID NO: 591655 - RNA, 19 nt, Homo sapiens
  misc_RNA (1)...(19): siRNA sense strand
ggaaacugcaaauaucauu

SEQ ID NO: 591656 - RNA, 19 nt, Homo sapiens
  misc_RNA (1)...(19): siRNA sense strand
cauuggaaauuacgagaaa

SEQ ID NO: 591657 - RNA, 19 nt, Homo sapiens
  misc_RNA (1)...(19): siRNA sense strand
acugagagcuuuggauaaa

SEQ ID NO: 591658 - RNA, 19 nt, Homo sapiens
  misc_RNA (1)...(19): siRNA sense strand
acaucuggcuucuuuauau

SEQ ID NO: 591659 - RNA, 19 nt, Homo sapiens
  misc_RNA (1)...(19): siRNA sense strand
ugagaugcuucauugguuu

SEQ ID NO: 591660 - RNA, 19 nt, Homo sapiens
  misc_RNA (1)...(19): siRNA sense strand
gauggaucaugguguuaaa

SEQ ID NO: 591661 - RNA, 19 nt, Homo sapiens
  misc_RNA (1)...(19): siRNA sense strand
ggaucaugguguuaaaguu

SEQ ID NO: 591662 - RNA, 19 nt, Homo sapiens
  misc_RNA (1)...(19): siRNA sense strand
ugacaugaaucaguaugaa

SEQ ID NO: 591663 - RNA, 19 nt, Homo sapiens
  misc_RNA (1)...(19): siRNA sense strand
gcucuuauauagcagaauc

SEQ ID NO: 591664 - RNA, 19 nt, Homo sapiens
  misc_RNA (1)...(19): siRNA sense strand
caguauagcucugggaaau

SEQ ID NO: 591665 - RNA, 19 nt, Homo sapiens
  misc_RNA (1)...(19): siRNA sense strand
aaagacauuugcuucauca

SEQ ID NO: 591666 - RNA, 19 nt, Homo sapiens
  misc_RNA (1)...(19): siRNA sense strand
cgaggucucauuaaacuuu

SEQ ID NO: 591667 - RNA, 19 nt, Homo sapiens
  misc_RNA (1)...(19): siRNA sense strand
acagcaggcuuaccaguga

SEQ ID NO: 591668 - RNA, 19 nt, Homo sapiens
  misc_RNA (1)...(19): siRNA sense strand
aguaggcggugcucuuaua

SEQ ID NO: 591669 - RNA, 19 nt, Homo sapiens
  misc_RNA (1)...(19): siRNA sense strand
ggaauuuaauguacagacu

SEQ ID NO: 591670 - RNA, 19 nt, Homo sapiens
  misc_RNA (1)...(19): siRNA sense strand
ggaaaccuuggaagacuuu

SEQ ID NO: 591671 - RNA, 19 nt, Homo sapiens
  misc_RNA (1)...(19): siRNA sense strand
aggcagaacaguuaauuaa

SEQ ID NO: 591672 - RNA, 19 nt, Homo sapiens
  misc_RNA (1)...(19): siRNA sense strand
gaaaguguuugaauaucac

SEQ ID NO: 591673 - RNA, 19 nt, Homo sapiens
  misc_RNA (1)...(19): siRNA sense strand
ggacuagaauaugauuauc

SEQ ID NO: 591674 - RNA, 19 nt, Homo sapiens
  misc_RNA (1)...(19): siRNA sense strand
aauggaaacugcaaauauc

SEQ ID NO: 591675 - RNA, 19 nt, Homo sapiens
  misc_RNA (1)...(19): siRNA sense strand
gaggagauugcaauugauu

SEQ ID NO: 591676 - RNA, 19 nt, Homo sapiens
  misc_RNA (1)...(19): siRNA sense strand
agaaauuacagcaggcuua

SEQ ID NO: 591677 - RNA, 19 nt, Homo sapiens
  misc_RNA (1)...(19): siRNA sense strand
ugaaaguugugguggaugu

SEQ ID NO: 591678 - RNA, 19 nt, Homo sapiens
  misc_RNA (1)...(19): siRNA sense strand
caacagggacgcuuauguc

SEQ ID NO: 591679 - RNA, 19 nt, Homo sapiens
  misc_RNA (1)...(19): siRNA sense strand
ucaggcagcccuugacauu

SEQ ID NO: 591680 - RNA, 19 nt, Homo sapiens
  misc_RNA (1)...(19): siRNA sense strand
ucauuugggugaagaaaca

SEQ ID NO: 591681 - RNA, 19 nt, Homo sapiens
  misc_RNA (1)...(19): siRNA sense strand
ggaaauuacgagaaagugu

SEQ ID NO: 591682 - RNA, 19 nt, Homo sapiens
  misc_RNA (1)...(19): siRNA sense strand
uuaucgaggucucauuaaa

SEQ ID NO: 591683 - RNA, 19 nt, Homo sapiens
  misc_RNA (1)...(19): siRNA sense strand
cugaagaaaugcacaucaa

SEQ ID NO: 591684 - RNA, 19 nt, Homo sapiens
  misc_RNA (1)...(19): siRNA sense strand
aacagaggcugcuucaaga

SEQ ID NO: 591685 - RNA, 19 nt, Homo sapiens
  misc_RNA (1)...(19): siRNA sense strand
aaacauggccagcaagcaa

SEQ ID NO: 591686 - RNA, 19 nt, Homo sapiens
  misc_RNA (1)...(19): siRNA sense strand
uucuaaggcuuguguagua

SEQ ID NO: 591687 - RNA, 19 nt, Homo sapiens
  misc_RNA (1)...(19): siRNA sense strand
acuacaagcuuuaccaaca

SEQ ID NO: 591688 - RNA, 19 nt, Homo sapiens
  misc_RNA (1)...(19): siRNA sense strand
gauccaaacacccaaaaua

SEQ ID NO: 591689 - RNA, 19 nt, Homo sapiens
  misc_RNA (1)...(19): siRNA sense strand
ugugugagguugcuucaug

SEQ ID NO: 591690 - RNA, 19 nt, Homo sapiens
  misc_RNA (1)...(19): siRNA sense strand
agcaacagcucaugaagau

SEQ ID NO: 591691 - RNA, 19 nt, Homo sapiens
  misc_RNA (1)...(19): siRNA sense strand
ugugguggaugucuuaaga

SEQ ID NO: 591692 - RNA, 19 nt, Homo sapiens
  misc_RNA (1)...(19): siRNA sense strand
ucaguaggcggugcucuua

SEQ ID NO: 591693 - RNA, 19 nt, Homo sapiens
  misc_RNA (1)...(19): siRNA sense strand
gacaucuggcuucuuuaua

SEQ ID NO: 591694 - RNA, 19 nt, Homo sapiens
  misc_RNA (1)...(19): siRNA sense strand
ccaguuugauguuuacuac

SEQ ID NO: 591695 - RNA, 19 nt, Homo sapiens
  misc_RNA (1)...(19): siRNA sense strand
gacauuagacagucagugu

SEQ ID NO: 591696 - RNA, 19 nt, Homo sapiens
  misc_RNA (1)...(19): siRNA sense strand
ggcagaacaguuaauuaaa

SEQ ID NO: 591697 - RNA, 19 nt, Homo sapiens
  misc_RNA (1)...(19): siRNA sense strand
gcaucgaggcaaugaaaga

SEQ ID NO: 591698 - RNA, 19 nt, Homo sapiens
  misc_RNA (1)...(19): siRNA sense strand
gaaacuuuauuugcgaucu

SEQ ID NO: 591699 - RNA, 19 nt, Homo sapiens
  misc_RNA (1)...(19): siRNA sense strand
gaggcaaugaaagaaauua

SEQ ID NO: 591700 - RNA, 19 nt, Homo sapiens
  misc_RNA (1)...(19): siRNA sense strand
gcaaauaaagcugcacucu

SEQ ID NO: 591701 - RNA, 19 nt, Homo sapiens
  misc_RNA (1)...(19): siRNA sense strand
gacaugaaucaguaugaaa

SEQ ID NO: 591702 - RNA, 19 nt, Homo sapiens
  misc_RNA (1)...(19): siRNA sense strand
ugaagaaaugcacaucaaa

SEQ ID NO: 591703 - RNA, 19 nt, Homo sapiens
  misc_RNA (1)...(19): siRNA sense strand
gaaagagcuauugguauca

SEQ ID NO: 591704 - RNA, 19 nt, Homo sapiens
  misc_RNA (1)...(19): siRNA sense strand
gugcaucgaggcaaugaaa

SEQ ID NO: 591705 - RNA, 19 nt, Homo sapiens
  misc_RNA (1)...(19): siRNA sense strand
aaucagaugcugcaguaaa

SEQ ID NO: 591706 - RNA, 19 nt, Homo sapiens
  misc_RNA (1)...(19): siRNA sense strand
cagggacgcuuaugucaac

SEQ ID NO: 591707 - RNA, 19 nt, Homo sapiens
  misc_RNA (1)...(19): siRNA sense strand
guaugaaaaugcugagaaa

SEQ ID NO: 591708 - RNA, 19 nt, Homo sapiens
  misc_RNA (1)...(19): siRNA sense strand
cagaaagagcuauugguau

SEQ ID NO: 591709 - RNA, 19 nt, Homo sapiens
  misc_RNA (1)...(19): siRNA sense strand
cauuagacagucaguguuu

SEQ ID NO: 591710 - RNA, 19 nt, Homo sapiens
  misc_RNA (1)...(19): siRNA sense strand
gcuaaaguacugagagcuu

SEQ ID NO: 591711 - RNA, 19 nt, Homo sapiens
  misc_RNA (1)...(19): siRNA sense strand
ggacggagauuacaucaau

SEQ ID NO: 591712 - RNA, 19 nt, Homo sapiens
  misc_RNA (1)...(19): siRNA sense strand
gaacccaucugcucuguga

SEQ ID NO: 591713 - RNA, 19 nt, Homo sapiens
  misc_RNA (1)...(19): siRNA sense strand
ggagaaauguguccacuac

SEQ ID NO: 591714 - RNA, 19 nt, Homo sapiens
  misc_RNA (1)...(19): siRNA sense strand
ccaagcaacuggaagaaga

SEQ ID NO: 591715 - RNA, 19 nt, Homo sapiens
  misc_RNA (1)...(19): siRNA sense strand
ggaggucacccuacacuuu

SEQ ID NO: 591716 - RNA, 19 nt, Homo sapiens
  misc_RNA (1)...(19): siRNA sense strand
gcacagccguugaccuugu

SEQ ID NO: 591717 - RNA, 19 nt, Homo sapiens
  misc_RNA (1)...(19): siRNA sense strand
ugaaagagugcccagaaua

SEQ ID NO: 591718 - RNA, 19 nt, Homo sapiens
  misc_RNA (1)...(19): siRNA sense strand
gcugaaagcccgaggagaa

SEQ ID NO: 591719 - RNA, 19 nt, Homo sapiens
  misc_RNA (1)...(19): siRNA sense strand
gagcacagccguugaccuu

SEQ ID NO: 591720 - RNA, 19 nt, Homo sapiens
  misc_RNA (1)...(19): siRNA sense strand
gaaagagugcccagaauac

SEQ ID NO: 591721 - RNA, 19 nt, Homo sapiens
  misc_RNA (1)...(19): siRNA sense strand
gaaggagaaggucuacauu

SEQ ID NO: 591722 - RNA, 19 nt, Homo sapiens
  misc_RNA (1)...(19): siRNA sense strand
gcaacuggaagaagaauuc

SEQ ID NO: 591723 - RNA, 19 nt, Homo sapiens
  misc_RNA (1)...(19): siRNA sense strand
ggaaggagaaggucuacau

SEQ ID NO: 591724 - RNA, 19 nt, Homo sapiens
  misc_RNA (1)...(19): siRNA sense strand
gaagugucccucauuguca

SEQ ID NO: 591725 - RNA, 19 nt, Homo sapiens
  misc_RNA (1)...(19): siRNA sense strand
ccacagaagaggaaaccua

SEQ ID NO: 591726 - RNA, 19 nt, Homo sapiens
  misc_RNA (1)...(19): siRNA sense strand
agaaauguguccacuacug

SEQ ID NO: 591727 - RNA, 19 nt, Homo sapiens
  misc_RNA (1)...(19): siRNA sense strand
ggaagugucccucauuguc

SEQ ID NO: 591728 - RNA, 19 nt, Homo sapiens
  misc_RNA (1)...(19): siRNA sense strand
uuacaucaaugccaacuac

SEQ ID NO: 591729 - RNA, 19 nt, Homo sapiens
  misc_RNA (1)...(19): siRNA sense strand
cggcagagcaguaccaguu

SEQ ID NO: 591730 - RNA, 19 nt, Homo sapiens
  misc_RNA (1)...(19): siRNA sense strand
caugaaagagugcccagaa

SEQ ID NO: 591731 - RNA, 19 nt, Homo sapiens
  misc_RNA (1)...(19): siRNA sense strand
gccaggaggacggagauua

SEQ ID NO: 591732 - RNA, 19 nt, Homo sapiens
  misc_RNA (1)...(19): siRNA sense strand
gagagggcaaggagaaaug

SEQ ID NO: 591733 - RNA, 19 nt, Homo sapiens
  misc_RNA (1)...(19): siRNA sense strand
gaggucacccuacacuuuc

SEQ ID NO: 591734 - RNA, 19 nt, Homo sapiens
  misc_RNA (1)...(19): siRNA sense strand
gaaagcccgaggagaagug

SEQ ID NO: 591735 - RNA, 19 nt, Homo sapiens
  misc_RNA (1)...(19): siRNA sense strand
ggaggacggagauuacauc

SEQ ID NO: 591736 - RNA, 19 nt, Homo sapiens
  misc_RNA (1)...(19): siRNA sense strand
gcuaugacgggaaggagaa

SEQ ID NO: 591737 - RNA, 19 nt, Homo sapiens
  misc_RNA (1)...(19): siRNA sense strand
caacuacauccgaggcuau

SEQ ID NO: 591738 - RNA, 19 nt, Homo sapiens
  misc_RNA (1)...(19): siRNA sense strand
gcuccaauguggcucugau

SEQ ID NO: 591739 - RNA, 19 nt, Homo sapiens
  misc_RNA (1)...(19): siRNA sense strand
cagaagaggaaaccuaugg

SEQ ID NO: 591740 - RNA, 19 nt, Homo sapiens
  misc_RNA (1)...(19): siRNA sense strand
gggagaugguguggcaaga

SEQ ID NO: 591741 - RNA, 19 nt, Homo sapiens
  misc_RNA (1)...(19): siRNA sense strand
gcauccaggacaugaaaga

SEQ ID NO: 591742 - RNA, 19 nt, Homo sapiens
  misc_RNA (1)...(19): siRNA sense strand
caagcaacuggaagaagaa

SEQ ID NO: 591743 - RNA, 19 nt, Homo sapiens
  misc_RNA (1)...(19): siRNA sense strand
caucaaugccaacuacauc

SEQ ID NO: 591744 - RNA, 19 nt, Homo sapiens
  misc_RNA (1)...(19): siRNA sense strand
cacagaagaggaaaccuau

SEQ ID NO: 591745 - RNA, 19 nt, Homo sapiens
  misc_RNA (1)...(19): siRNA sense strand
ccguugaccuugucuuugg

SEQ ID NO: 591746 - RNA, 19 nt, Homo sapiens
  misc_RNA (1)...(19): siRNA sense strand
gacggagauuacaucaaug

SEQ ID NO: 591747 - RNA, 19 nt, Homo sapiens
  misc_RNA (1)...(19): siRNA sense strand
gaccaucagacaccagaau

SEQ ID NO: 591748 - RNA, 19 nt, Homo sapiens
  misc_RNA (1)...(19): siRNA sense strand
caguaaagcacauccucuu

SEQ ID NO: 591749 - RNA, 19 nt, Homo sapiens
  misc_RNA (1)...(19): siRNA sense strand
aggagaaggucuacauugc

SEQ ID NO: 591750 - RNA, 19 nt, Homo sapiens
  misc_RNA (1)...(19): siRNA sense strand
aaggagaaggucuacauug

SEQ ID NO: 591751 - RNA, 19 nt, Homo sapiens
  misc_RNA (1)...(19): siRNA sense strand
ccacgcgaauuggcuguca

SEQ ID NO: 591752 - RNA, 19 nt, Homo sapiens
  misc_RNA (1)...(19): siRNA sense strand
aaguggacauucuggguau

SEQ ID NO: 591753 - RNA, 19 nt, Homo sapiens
  misc_RNA (1)...(19): siRNA sense strand
gaugguguggcaagaggaa

SEQ ID NO: 591754 - RNA, 19 nt, Homo sapiens
  misc_RNA (1)...(19): siRNA sense strand
gacauucuggguauugugu

SEQ ID NO: 591755 - RNA, 19 nt, Homo sapiens
  misc_RNA (1)...(19): siRNA sense strand
ggacauucuggguauugug

SEQ ID NO: 591756 - RNA, 19 nt, Homo sapiens
  misc_RNA (1)...(19): siRNA sense strand
ccacuacuggcccacagaa

SEQ ID NO: 591757 - RNA, 19 nt, Homo sapiens
  misc_RNA (1)...(19): siRNA sense strand
ccgcauccaggacaugaaa

SEQ ID NO: 591758 - RNA, 19 nt, Homo sapiens
  misc_RNA (1)...(19): siRNA sense strand
uccaaggaccgauacaaga

SEQ ID NO: 591759 - RNA, 19 nt, Homo sapiens
  misc_RNA (1)...(19): siRNA sense strand
gaggacggagauuacauca

SEQ ID NO: 591760 - RNA, 19 nt, Homo sapiens
  misc_RNA (1)...(19): siRNA sense strand
ccaggaggacggagauuac

SEQ ID NO: 591761 - RNA, 19 nt, Homo sapiens
  misc_RNA (1)...(19): siRNA sense strand
augaaagagugcccagaau

SEQ ID NO: 591762 - RNA, 19 nt, Homo sapiens
  misc_RNA (1)...(19): siRNA sense strand
ucauugucaugcucacuca

SEQ ID NO: 591763 - RNA, 19 nt, Homo sapiens
  misc_RNA (1)...(19): siRNA sense strand
ccaaggaccgauacaagac

SEQ ID NO: 591764 - RNA, 19 nt, Homo sapiens
  misc_RNA (1)...(19): siRNA sense strand
uagaacccaucugcucugu

SEQ ID NO: 591765 - RNA, 19 nt, Homo sapiens
  misc_RNA (1)...(19): siRNA sense strand
aaagagugcccagaauaca

SEQ ID NO: 591766 - RNA, 19 nt, Homo sapiens
  misc_RNA (1)...(19): siRNA sense strand
ggacggagauuacaucaau

SEQ ID NO: 591767 - RNA, 19 nt, Homo sapiens
  misc_RNA (1)...(19): siRNA sense strand
gaacccaucugcucuguga

SEQ ID NO: 591768 - RNA, 19 nt, Homo sapiens
  misc_RNA (1)...(19): siRNA sense strand
ggagaaauguguccacuac

SEQ ID NO: 591769 - RNA, 19 nt, Homo sapiens
  misc_RNA (1)...(19): siRNA sense strand
ccaagcaacuggaagaaga

SEQ ID NO: 591770 - RNA, 19 nt, Homo sapiens
  misc_RNA (1)...(19): siRNA sense strand
ggaggucacccuacacuuu

SEQ ID NO: 591771 - RNA, 19 nt, Homo sapiens
  misc_RNA (1)...(19): siRNA sense strand
gcacagccguugaccuugu

SEQ ID NO: 591772 - RNA, 19 nt, Homo sapiens
  misc_RNA (1)...(19): siRNA sense strand
ugaaagagugcccagaaua

SEQ ID NO: 591773 - RNA, 19 nt, Homo sapiens
  misc_RNA (1)...(19): siRNA sense strand
gcugaaagcccgaggagaa

SEQ ID NO: 591774 - RNA, 19 nt, Homo sapiens
  misc_RNA (1)...(19): siRNA sense strand
gagcacagccguugaccuu

SEQ ID NO: 591775 - RNA, 19 nt, Homo sapiens
  misc_RNA (1)...(19): siRNA sense strand
gaaagagugcccagaauac

SEQ ID NO: 591776 - RNA, 19 nt, Homo sapiens
  misc_RNA (1)...(19): siRNA sense strand
gaaggagaaggucuacauu

SEQ ID NO: 591777 - RNA, 19 nt, Homo sapiens
  misc_RNA (1)...(19): siRNA sense strand
gcaacuggaagaagaauuc

SEQ ID NO: 591778 - RNA, 19 nt, Homo sapiens
  misc_RNA (1)...(19): siRNA sense strand
ggaaggagaaggucuacau

SEQ ID NO: 591779 - RNA, 19 nt, Homo sapiens
  misc_RNA (1)...(19): siRNA sense strand
gaagugucccucauuguca

SEQ ID NO: 591780 - RNA, 19 nt, Homo sapiens
  misc_RNA (1)...(19): siRNA sense strand
ccacagaagaggaaaccua

SEQ ID NO: 591781 - RNA, 19 nt, Homo sapiens
  misc_RNA (1)...(19): siRNA sense strand
agaaauguguccacuacug

SEQ ID NO: 591782 - RNA, 19 nt, Homo sapiens
  misc_RNA (1)...(19): siRNA sense strand
ggaagugucccucauuguc

SEQ ID NO: 591783 - RNA, 19 nt, Homo sapiens
  misc_RNA (1)...(19): siRNA sense strand
uuacaucaaugccaacuac

SEQ ID NO: 591784 - RNA, 19 nt, Homo sapiens
  misc_RNA (1)...(19): siRNA sense strand
cggcagagcaguaccaguu

SEQ ID NO: 591785 - RNA, 19 nt, Homo sapiens
  misc_RNA (1)...(19): siRNA sense strand
caugaaagagugcccagaa

SEQ ID NO: 591786 - RNA, 19 nt, Homo sapiens
  misc_RNA (1)...(19): siRNA sense strand
gccaggaggacggagauua

SEQ ID NO: 591787 - RNA, 19 nt, Homo sapiens
  misc_RNA (1)...(19): siRNA sense strand
gagagggcaaggagaaaug

SEQ ID NO: 591788 - RNA, 19 nt, Homo sapiens
  misc_RNA (1)...(19): siRNA sense strand
gaggucacccuacacuuuc

SEQ ID NO: 591789 - RNA, 19 nt, Homo sapiens
  misc_RNA (1)...(19): siRNA sense strand
gaaagcccgaggagaagug

SEQ ID NO: 591790 - RNA, 19 nt, Homo sapiens
  misc_RNA (1)...(19): siRNA sense strand
ggaggacggagauuacauc

SEQ ID NO: 591791 - RNA, 19 nt, Homo sapiens
  misc_RNA (1)...(19): siRNA sense strand
gcuaugacgggaaggagaa

SEQ ID NO: 591792 - RNA, 19 nt, Homo sapiens
  misc_RNA (1)...(19): siRNA sense strand
gcuccaauguggcucugau

SEQ ID NO: 591793 - RNA, 19 nt, Homo sapiens
  misc_RNA (1)...(19): siRNA sense strand
caacuacauccgaggcuau

SEQ ID NO: 591794 - RNA, 19 nt, Homo sapiens
  misc_RNA (1)...(19): siRNA sense strand
cagaagaggaaaccuaugg

SEQ ID NO: 591795 - RNA, 19 nt, Homo sapiens
  misc_RNA (1)...(19): siRNA sense strand
gggagaugguguggcaaga

SEQ ID NO: 591796 - RNA, 19 nt, Homo sapiens
  misc_RNA (1)...(19): siRNA sense strand
gcauccaggacaugaaaga

SEQ ID NO: 591797 - RNA, 19 nt, Homo sapiens
  misc_RNA (1)...(19): siRNA sense strand
caagcaacuggaagaagaa

SEQ ID NO: 591798 - RNA, 19 nt, Homo sapiens
  misc_RNA (1)...(19): siRNA sense strand
caucaaugccaacuacauc

SEQ ID NO: 591799 - RNA, 19 nt, Homo sapiens
  misc_RNA (1)...(19): siRNA sense strand
ccguugaccuugucuuugg

SEQ ID NO: 591800 - RNA, 19 nt, Homo sapiens
  misc_RNA (1)...(19): siRNA sense strand
cacagaagaggaaaccuau

SEQ ID NO: 591801 - RNA, 19 nt, Homo sapiens
  misc_RNA (1)...(19): siRNA sense strand
gacggagauuacaucaaug

SEQ ID NO: 591802 - RNA, 19 nt, Homo sapiens
  misc_RNA (1)...(19): siRNA sense strand
gaccaucagacaccagaau

SEQ ID NO: 591803 - RNA, 19 nt, Homo sapiens
  misc_RNA (1)...(19): siRNA sense strand
caguaaagcacauccucuu

SEQ ID NO: 591804 - RNA, 19 nt, Homo sapiens
  misc_RNA (1)...(19): siRNA sense strand
aggagaaggucuacauugc

SEQ ID NO: 591805 - RNA, 19 nt, Homo sapiens
  misc_RNA (1)...(19): siRNA sense strand
aaggagaaggucuacauug

SEQ ID NO: 591806 - RNA, 19 nt, Homo sapiens
  misc_RNA (1)...(19): siRNA sense strand
ccacgcgaauuggcuguca

SEQ ID NO: 591807 - RNA, 19 nt, Homo sapiens
  misc_RNA (1)...(19): siRNA sense strand
aaguggacauucuggguau

SEQ ID NO: 591808 - RNA, 19 nt, Homo sapiens
  misc_RNA (1)...(19): siRNA sense strand
gaugguguggcaagaggaa

SEQ ID NO: 591809 - RNA, 19 nt, Homo sapiens
  misc_RNA (1)...(19): siRNA sense strand
gacauucuggguauugugu

SEQ ID NO: 591810 - RNA, 19 nt, Homo sapiens
  misc_RNA (1)...(19): siRNA sense strand
ggacauucuggguauugug

SEQ ID NO: 591811 - RNA, 19 nt, Homo sapiens
  misc_RNA (1)...(19): siRNA sense strand
ccacuacuggcccacagaa

SEQ ID NO: 591812 - RNA, 19 nt, Homo sapiens
  misc_RNA (1)...(19): siRNA sense strand
ccgcauccaggacaugaaa

SEQ ID NO: 591813 - RNA, 19 nt, Homo sapiens
  misc_RNA (1)...(19): siRNA sense strand
uccaaggaccgauacaaga

SEQ ID NO: 591814 - RNA, 19 nt, Homo sapiens
  misc_RNA (1)...(19): siRNA sense strand
gaggacggagauuacauca

SEQ ID NO: 591815 - RNA, 19 nt, Homo sapiens
  misc_RNA (1)...(19): siRNA sense strand
ccaggaggacggagauuac

SEQ ID NO: 591816 - RNA, 19 nt, Homo sapiens
  misc_RNA (1)...(19): siRNA sense strand
augaaagagugcccagaau

SEQ ID NO: 591817 - RNA, 19 nt, Homo sapiens
  misc_RNA (1)...(19): siRNA sense strand
ucauugucaugcucacuca

SEQ ID NO: 591818 - RNA, 19 nt, Homo sapiens
  misc_RNA (1)...(19): siRNA sense strand
ccaaggaccgauacaagac

SEQ ID NO: 591819 - RNA, 19 nt, Homo sapiens
  misc_RNA (1)...(19): siRNA sense strand
aaagagugcccagaauaca

SEQ ID NO: 591820 - RNA, 19 nt, Homo sapiens
  misc_RNA (1)...(19): siRNA sense strand
uagaacccaucugcucugu

SEQ ID NO: 591821 - RNA, 19 nt, Homo sapiens
  misc_RNA (1)...(19): siRNA sense strand
ggacggagauuacaucaau

SEQ ID NO: 591822 - RNA, 19 nt, Homo sapiens
  misc_RNA (1)...(19): siRNA sense strand
gaacccaucugcucuguga

SEQ ID NO: 591823 - RNA, 19 nt, Homo sapiens
  misc_RNA (1)...(19): siRNA sense strand
ggagaaauguguccacuac

SEQ ID NO: 591824 - RNA, 19 nt, Homo sapiens
  misc_RNA (1)...(19): siRNA sense strand
ccaagcaacuggaagaaga

SEQ ID NO: 591825 - RNA, 19 nt, Homo sapiens
  misc_RNA (1)...(19): siRNA sense strand
ggaggucacccuacacuuu

SEQ ID NO: 591826 - RNA, 19 nt, Homo sapiens
  misc_RNA (1)...(19): siRNA sense strand
gcacagccguugaccuugu

SEQ ID NO: 591827 - RNA, 19 nt, Homo sapiens
  misc_RNA (1)...(19): siRNA sense strand
ugaaagagugcccagaaua

SEQ ID NO: 591828 - RNA, 19 nt, Homo sapiens
  misc_RNA (1)...(19): siRNA sense strand
gcugaaagcccgaggagaa

SEQ ID NO: 591829 - RNA, 19 nt, Homo sapiens
  misc_RNA (1)...(19): siRNA sense strand
gagcacagccguugaccuu

SEQ ID NO: 591830 - RNA, 19 nt, Homo sapiens
  misc_RNA (1)...(19): siRNA sense strand
gaaagagugcccagaauac

SEQ ID NO: 591831 - RNA, 19 nt, Homo sapiens
  misc_RNA (1)...(19): siRNA sense strand
gaaggagaaggucuacauu

SEQ ID NO: 591832 - RNA, 19 nt, Homo sapiens
  misc_RNA (1)...(19): siRNA sense strand
gcaacuggaagaagaauuc

SEQ ID NO: 591833 - RNA, 19 nt, Homo sapiens
  misc_RNA (1)...(19): siRNA sense strand
ggaaggagaaggucuacau

SEQ ID NO: 591834 - RNA, 19 nt, Homo sapiens
  misc_RNA (1)...(19): siRNA sense strand
gaagugucccucauuguca

SEQ ID NO: 591835 - RNA, 19 nt, Homo sapiens
  misc_RNA (1)...(19): siRNA sense strand
ccacagaagaggaaaccua

SEQ ID NO: 591836 - RNA, 19 nt, Homo sapiens
  misc_RNA (1)...(19): siRNA sense strand
agaaauguguccacuacug

SEQ ID NO: 591837 - RNA, 19 nt, Homo sapiens
  misc_RNA (1)...(19): siRNA sense strand
ggaagugucccucauuguc

SEQ ID NO: 591838 - RNA, 19 nt, Homo sapiens
  misc_RNA (1)...(19): siRNA sense strand
uuacaucaaugccaacuac

SEQ ID NO: 591839 - RNA, 19 nt, Homo sapiens
  misc_RNA (1)...(19): siRNA sense strand
cggcagagcaguaccaguu

SEQ ID NO: 591840 - RNA, 19 nt, Homo sapiens
  misc_RNA (1)...(19): siRNA sense strand
caugaaagagugcccagaa

SEQ ID NO: 591841 - RNA, 19 nt, Homo sapiens
  misc_RNA (1)...(19): siRNA sense strand
gccaggaggacggagauua

SEQ ID NO: 591842 - RNA, 19 nt, Homo sapiens
  misc_RNA (1)...(19): siRNA sense strand
gagagggcaaggagaaaug

SEQ ID NO: 591843 - RNA, 19 nt, Homo sapiens
  misc_RNA (1)...(19): siRNA sense strand
gaggucacccuacacuuuc

SEQ ID NO: 591844 - RNA, 19 nt, Homo sapiens
  misc_RNA (1)...(19): siRNA sense strand
gaaagcccgaggagaagug

SEQ ID NO: 591845 - RNA, 19 nt, Homo sapiens
  misc_RNA (1)...(19): siRNA sense strand
ggaggacggagauuacauc

SEQ ID NO: 591846 - RNA, 19 nt, Homo sapiens
  misc_RNA (1)...(19): siRNA sense strand
gcuaugacgggaaggagaa

SEQ ID NO: 591847 - RNA, 19 nt, Homo sapiens
  misc_RNA (1)...(19): siRNA sense strand
caacuacauccgaggcuau

SEQ ID NO: 591848 - RNA, 19 nt, Homo sapiens
  misc_RNA (1)...(19): siRNA sense strand
gcuccaauguggcucugau

SEQ ID NO: 591849 - RNA, 19 nt, Homo sapiens
  misc_RNA (1)...(19): siRNA sense strand
cagaagaggaaaccuaugg

SEQ ID NO: 591850 - RNA, 19 nt, Homo sapiens
  misc_RNA (1)...(19): siRNA sense strand
gggagaugguguggcaaga

SEQ ID NO: 591851 - RNA, 19 nt, Homo sapiens
  misc_RNA (1)...(19): siRNA sense strand
gcauccaggacaugaaaga

SEQ ID NO: 591852 - RNA, 19 nt, Homo sapiens
  misc_RNA (1)...(19): siRNA sense strand
caagcaacuggaagaagaa

SEQ ID NO: 591853 - RNA, 19 nt, Homo sapiens
  misc_RNA (1)...(19): siRNA sense strand
caucaaugccaacuacauc

SEQ ID NO: 591854 - RNA, 19 nt, Homo sapiens
  misc_RNA (1)...(19): siRNA sense strand
cacagaagaggaaaccuau

SEQ ID NO: 591855 - RNA, 19 nt, Homo sapiens
  misc_RNA (1)...(19): siRNA sense strand
ccguugaccuugucuuugg

SEQ ID NO: 591856 - RNA, 19 nt, Homo sapiens
  misc_RNA (1)...(19): siRNA sense strand
gacggagauuacaucaaug

SEQ ID NO: 591857 - RNA, 19 nt, Homo sapiens
  misc_RNA (1)...(19): siRNA sense strand
gaccaucagacaccagaau

SEQ ID NO: 591858 - RNA, 19 nt, Homo sapiens
  misc_RNA (1)...(19): siRNA sense strand
caguaaagcacauccucuu

SEQ ID NO: 591859 - RNA, 19 nt, Homo sapiens
  misc_RNA (1)...(19): siRNA sense strand
aggagaaggucuacauugc

SEQ ID NO: 591860 - RNA, 19 nt, Homo sapiens
  misc_RNA (1)...(19): siRNA sense strand
aaggagaaggucuacauug

SEQ ID NO: 591861 - RNA, 19 nt, Homo sapiens
  misc_RNA (1)...(19): siRNA sense strand
ccacgcgaauuggcuguca

SEQ ID NO: 591862 - RNA, 19 nt, Homo sapiens
  misc_RNA (1)...(19): siRNA sense strand
aaguggacauucuggguau

SEQ ID NO: 591863 - RNA, 19 nt, Homo sapiens
  misc_RNA (1)...(19): siRNA sense strand
gaugguguggcaagaggaa

SEQ ID NO: 591864 - RNA, 19 nt, Homo sapiens
  misc_RNA (1)...(19): siRNA sense strand
gacauucuggguauugugu

SEQ ID NO: 591865 - RNA, 19 nt, Homo sapiens
  misc_RNA (1)...(19): siRNA sense strand
ggacauucuggguauugug

SEQ ID NO: 591866 - RNA, 19 nt, Homo sapiens
  misc_RNA (1)...(19): siRNA sense strand
ccacuacuggcccacagaa

SEQ ID NO: 591867 - RNA, 19 nt, Homo sapiens
  misc_RNA (1)...(19): siRNA sense strand
ccgcauccaggacaugaaa

SEQ ID NO: 591868 - RNA, 19 nt, Homo sapiens
  misc_RNA (1)...(19): siRNA sense strand
uccaaggaccgauacaaga

SEQ ID NO: 591869 - RNA, 19 nt, Homo sapiens
  misc_RNA (1)...(19): siRNA sense strand
gaggacggagauuacauca

SEQ ID NO: 591870 - RNA, 19 nt, Homo sapiens
  misc_RNA (1)...(19): siRNA sense strand
ccaggaggacggagauuac

SEQ ID NO: 591871 - RNA, 19 nt, Homo sapiens
  misc_RNA (1)...(19): siRNA sense strand
augaaagagugcccagaau

SEQ ID NO: 591872 - RNA, 19 nt, Homo sapiens
  misc_RNA (1)...(19): siRNA sense strand
ucauugucaugcucacuca

SEQ ID NO: 591873 - RNA, 19 nt, Homo sapiens
  misc_RNA (1)...(19): siRNA sense strand
ccaaggaccgauacaagac

SEQ ID NO: 591874 - RNA, 19 nt, Homo sapiens
  misc_RNA (1)...(19): siRNA sense strand
uagaacccaucugcucugu

SEQ ID NO: 591875 - RNA, 19 nt, Homo sapiens
  misc_RNA (1)...(19): siRNA sense strand
aaagagugcccagaauaca

SEQ ID NO: 591876 - RNA, 19 nt, Homo sapiens
  misc_RNA (1)...(19): siRNA sense strand
ccuggacgcugaugaguuc

SEQ ID NO: 591877 - RNA, 19 nt, Homo sapiens
  misc_RNA (1)...(19): siRNA sense strand
ugucaucgcagcugcauuu

SEQ ID NO: 591878 - RNA, 19 nt, Homo sapiens
  misc_RNA (1)...(19): siRNA sense strand
gugagugccuccaugaaca

SEQ ID NO: 591879 - RNA, 19 nt, Homo sapiens
  misc_RNA (1)...(19): siRNA sense strand
gagggugugugcaggaagu

SEQ ID NO: 591880 - RNA, 19 nt, Homo sapiens
  misc_RNA (1)...(19): siRNA sense strand
ggaauuccaggacuacuac

SEQ ID NO: 591881 - RNA, 19 nt, Homo sapiens
  misc_RNA (1)...(19): siRNA sense strand
uggcggaauuccaggacua

SEQ ID NO: 591882 - RNA, 19 nt, Homo sapiens
  misc_RNA (1)...(19): siRNA sense strand
ggcagggucuggccaaacu

SEQ ID NO: 591883 - RNA, 19 nt, Homo sapiens
  misc_RNA (1)...(19): siRNA sense strand
gagaaacuccgggcacagu

SEQ ID NO: 591884 - RNA, 19 nt, Homo sapiens
  misc_RNA (1)...(19): siRNA sense strand
ggaguucguggccaugaug

SEQ ID NO: 591885 - RNA, 19 nt, Homo sapiens
  misc_RNA (1)...(19): siRNA sense strand
cagagggugugugcaggaa

SEQ ID NO: 591886 - RNA, 19 nt, Homo sapiens
  misc_RNA (1)...(19): siRNA sense strand
cggaauuccaggacuacua

SEQ ID NO: 591887 - RNA, 19 nt, Homo sapiens
  misc_RNA (1)...(19): siRNA sense strand
ggaagugggaccgcaaugg

SEQ ID NO: 591888 - RNA, 19 nt, Homo sapiens
  misc_RNA (1)...(19): siRNA sense strand
cgcuggaucuggaggaguu

SEQ ID NO: 591889 - RNA, 19 nt, Homo sapiens
  misc_RNA (1)...(19): siRNA sense strand
gaggaguucguggccauga

SEQ ID NO: 591890 - RNA, 19 nt, Homo sapiens
  misc_RNA (1)...(19): siRNA sense strand
ugaacacggaugaggaguu

SEQ ID NO: 591891 - RNA, 19 nt, Homo sapiens
  misc_RNA (1)...(19): siRNA sense strand
ccuggacgcugaugaguuc

SEQ ID NO: 591892 - RNA, 19 nt, Homo sapiens
  misc_RNA (1)...(19): siRNA sense strand
ugucaucgcagcugcauuu

SEQ ID NO: 591893 - RNA, 19 nt, Homo sapiens
  misc_RNA (1)...(19): siRNA sense strand
gugagugccuccaugaaca

SEQ ID NO: 591894 - RNA, 19 nt, Homo sapiens
  misc_RNA (1)...(19): siRNA sense strand
gagggugugugcaggaagu

SEQ ID NO: 591895 - RNA, 19 nt, Homo sapiens
  misc_RNA (1)...(19): siRNA sense strand
ggaauuccaggacuacuac

SEQ ID NO: 591896 - RNA, 19 nt, Homo sapiens
  misc_RNA (1)...(19): siRNA sense strand
uggcggaauuccaggacua

SEQ ID NO: 591897 - RNA, 19 nt, Homo sapiens
  misc_RNA (1)...(19): siRNA sense strand
ggcagggucuggccaaacu

SEQ ID NO: 591898 - RNA, 19 nt, Homo sapiens
  misc_RNA (1)...(19): siRNA sense strand
gagaaacuccgggcacagu

SEQ ID NO: 591899 - RNA, 19 nt, Homo sapiens
  misc_RNA (1)...(19): siRNA sense strand
ggaguucguggccaugaug

SEQ ID NO: 591900 - RNA, 19 nt, Homo sapiens
  misc_RNA (1)...(19): siRNA sense strand
cagagggugugugcaggaa

SEQ ID NO: 591901 - RNA, 19 nt, Homo sapiens
  misc_RNA (1)...(19): siRNA sense strand
cggaauuccaggacuacua

SEQ ID NO: 591902 - RNA, 19 nt, Homo sapiens
  misc_RNA (1)...(19): siRNA sense strand
ggaagugggaccgcaaugg

SEQ ID NO: 591903 - RNA, 19 nt, Homo sapiens
  misc_RNA (1)...(19): siRNA sense strand
cgcuggaucuggaggaguu

SEQ ID NO: 591904 - RNA, 19 nt, Homo sapiens
  misc_RNA (1)...(19): siRNA sense strand
gaggaguucguggccauga

SEQ ID NO: 591905 - RNA, 19 nt, Homo sapiens
  misc_RNA (1)...(19): siRNA sense strand
ugaacacggaugaggaguu

SEQ ID NO: 591906 - RNA, 19 nt, Homo sapiens
  misc_RNA (1)...(19): siRNA sense strand
uagcuaagauguguuugua

SEQ ID NO: 591907 - RNA, 19 nt, Homo sapiens
  misc_RNA (1)...(19): siRNA sense strand
gcuaagauguguuuguacu

SEQ ID NO: 591908 - RNA, 19 nt, Homo sapiens
  misc_RNA (1)...(19): siRNA sense strand
gggaagaauuugccauuuu

SEQ ID NO: 591909 - RNA, 19 nt, Homo sapiens
  misc_RNA (1)...(19): siRNA sense strand
guacuuuggaucugcauuu

SEQ ID NO: 591910 - RNA, 19 nt, Homo sapiens
  misc_RNA (1)...(19): siRNA sense strand
ggagggcccugggaagaau

SEQ ID NO: 591911 - RNA, 19 nt, Homo sapiens
  misc_RNA (1)...(19): siRNA sense strand
ggaagaauuugccauuuuc

SEQ ID NO: 591912 - RNA, 19 nt, Homo sapiens
  misc_RNA (1)...(19): siRNA sense strand
gaaaacaaguggucguuac

SEQ ID NO: 591913 - RNA, 19 nt, Homo sapiens
  misc_RNA (1)...(19): siRNA sense strand
ggucguuacuagcuaagau

SEQ ID NO: 591914 - RNA, 19 nt, Homo sapiens
  misc_RNA (1)...(19): siRNA sense strand
guuacuagcuaagaugugu

SEQ ID NO: 591915 - RNA, 19 nt, Homo sapiens
  misc_RNA (1)...(19): siRNA sense strand
ugggaagaauuugccauuu

SEQ ID NO: 591916 - RNA, 19 nt, Homo sapiens
  misc_RNA (1)...(19): siRNA sense strand
aaacaaguggucguuacua

SEQ ID NO: 591917 - RNA, 19 nt, Homo sapiens
  misc_RNA (1)...(19): siRNA sense strand
aagauguguuuguacuuug

SEQ ID NO: 591918 - RNA, 19 nt, Homo sapiens
  misc_RNA (1)...(19): siRNA sense strand
ggaaaacaaguggucguua

SEQ ID NO: 591919 - RNA, 19 nt, Homo sapiens
  misc_RNA (1)...(19): siRNA sense strand
aacaaguggucguuacuag

SEQ ID NO: 591920 - RNA, 19 nt, Homo sapiens
  misc_RNA (1)...(19): siRNA sense strand
cagagcauccggagguuca

SEQ ID NO: 591921 - RNA, 19 nt, Homo sapiens
  misc_RNA (1)...(19): siRNA sense strand
caaguggucguuacuagcu

SEQ ID NO: 591922 - RNA, 19 nt, Homo sapiens
  misc_RNA (1)...(19): siRNA sense strand
gccagagcauccggagguu

SEQ ID NO: 591923 - RNA, 19 nt, Homo sapiens
  misc_RNA (1)...(19): siRNA sense strand
ccaacugcuuaaaacauaa

SEQ ID NO: 591924 - RNA, 19 nt, Homo sapiens
  misc_RNA (1)...(19): siRNA sense strand
aguaagacaccaacugcuu

SEQ ID NO: 591925 - RNA, 19 nt, Homo sapiens
  misc_RNA (1)...(19): siRNA sense strand
acacauggaucuaagagaa

SEQ ID NO: 591926 - RNA, 19 nt, Homo sapiens
  misc_RNA (1)...(19): siRNA sense strand
gccagcagcuuucacagaa

SEQ ID NO: 591927 - RNA, 19 nt, Homo sapiens
  misc_RNA (1)...(19): siRNA sense strand
gaagagacuacaaaugaug

SEQ ID NO: 591928 - RNA, 19 nt, Homo sapiens
  misc_RNA (1)...(19): siRNA sense strand
gagaugaagagacuacaaa

SEQ ID NO: 591929 - RNA, 19 nt, Homo sapiens
  misc_RNA (1)...(19): siRNA sense strand
caaaugauguuccccauau

SEQ ID NO: 591930 - RNA, 19 nt, Homo sapiens
  misc_RNA (1)...(19): siRNA sense strand
gagaagagggagaugaaga

SEQ ID NO: 591931 - RNA, 19 nt, Homo sapiens
  misc_RNA (1)...(19): siRNA sense strand
ugaagagacuacaaaugau

SEQ ID NO: 591932 - RNA, 19 nt, Homo sapiens
  misc_RNA (1)...(19): siRNA sense strand
gaugaagagacuacaaaug

SEQ ID NO: 591933 - RNA, 19 nt, Homo sapiens
  misc_RNA (1)...(19): siRNA sense strand
augaagagacuacaaauga

SEQ ID NO: 591934 - RNA, 19 nt, Homo sapiens
  misc_RNA (1)...(19): siRNA sense strand
cugcuaggaucggauauuu

SEQ ID NO: 591935 - RNA, 19 nt, Homo sapiens
  misc_RNA (1)...(19): siRNA sense strand
gagcuguaaugcugcuguu

SEQ ID NO: 591936 - RNA, 19 nt, Homo sapiens
  misc_RNA (1)...(19): siRNA sense strand
gaagagggagaugaagaga

SEQ ID NO: 591937 - RNA, 19 nt, Homo sapiens
  misc_RNA (1)...(19): siRNA sense strand
ggagaugaagagacuacaa

SEQ ID NO: 591938 - RNA, 19 nt, Homo sapiens
  misc_RNA (1)...(19): siRNA sense strand
uaagagaagagggagauga

SEQ ID NO: 591939 - RNA, 19 nt, Homo sapiens
  misc_RNA (1)...(19): siRNA sense strand
agucaguucugcuugcaaa

SEQ ID NO: 591940 - RNA, 19 nt, Homo sapiens
  misc_RNA (1)...(19): siRNA sense strand
agagggagaugaagagacu

SEQ ID NO: 591941 - RNA, 19 nt, Homo sapiens
  misc_RNA (1)...(19): siRNA sense strand
ggacacauggaucuaagag

SEQ ID NO: 591942 - RNA, 19 nt, Homo sapiens
  misc_RNA (1)...(19): siRNA sense strand
acauggaucuaagagaaga

SEQ ID NO: 591943 - RNA, 19 nt, Homo sapiens
  misc_RNA (1)...(19): siRNA sense strand
aagagaagagggagaugaa

SEQ ID NO: 591944 - RNA, 19 nt, Homo sapiens
  misc_RNA (1)...(19): siRNA sense strand
caguucugcuugcaaagga

SEQ ID NO: 591945 - RNA, 19 nt, Homo sapiens
  misc_RNA (1)...(19): siRNA sense strand
gauccaccagggucugauu

SEQ ID NO: 591946 - RNA, 19 nt, Homo sapiens
  misc_RNA (1)...(19): siRNA sense strand
uaugagaagcugcuaggau

SEQ ID NO: 591947 - RNA, 19 nt, Homo sapiens
  misc_RNA (1)...(19): siRNA sense strand
cccaaggacucagggacaa

SEQ ID NO: 591948 - RNA, 19 nt, Homo sapiens
  misc_RNA (1)...(19): siRNA sense strand
ucagaaagcuggcaaagaa

SEQ ID NO: 591949 - RNA, 19 nt, Homo sapiens
  misc_RNA (1)...(19): siRNA sense strand
gaauugauguuucucauga

SEQ ID NO: 591950 - RNA, 19 nt, Homo sapiens
  misc_RNA (1)...(19): siRNA sense strand
gaaguguccucaaauugua

SEQ ID NO: 591951 - RNA, 19 nt, Homo sapiens
  misc_RNA (1)...(19): siRNA sense strand
ggcagagccugaagaauuu

SEQ ID NO: 591952 - RNA, 19 nt, Homo sapiens
  misc_RNA (1)...(19): siRNA sense strand
agacagcaguggagaauug

SEQ ID NO: 591953 - RNA, 19 nt, Homo sapiens
  misc_RNA (1)...(19): siRNA sense strand
cgaaagaggcaaauaugaa

SEQ ID NO: 591954 - RNA, 19 nt, Homo sapiens
  misc_RNA (1)...(19): siRNA sense strand
uaugaaguguccucaaauu

SEQ ID NO: 591955 - RNA, 19 nt, Homo sapiens
  misc_RNA (1)...(19): siRNA sense strand
ugacaaaccaagaggauuu

SEQ ID NO: 591956 - RNA, 19 nt, Homo sapiens
  misc_RNA (1)...(19): siRNA sense strand
aauaugaaguguccucaaa

SEQ ID NO: 591957 - RNA, 19 nt, Homo sapiens
  misc_RNA (1)...(19): siRNA sense strand
gacagcaaaucaaagaaga

SEQ ID NO: 591958 - RNA, 19 nt, Homo sapiens
  misc_RNA (1)...(19): siRNA sense strand
ugaagaauuugucguggaa

SEQ ID NO: 591959 - RNA, 19 nt, Homo sapiens
  misc_RNA (1)...(19): siRNA sense strand
gaaagaggcaaauaugaag

SEQ ID NO: 591960 - RNA, 19 nt, Homo sapiens
  misc_RNA (1)...(19): siRNA sense strand
gaugacagcaaaucaaaga

SEQ ID NO: 591961 - RNA, 19 nt, Homo sapiens
  misc_RNA (1)...(19): siRNA sense strand
caacaaaacuacauugcaa

SEQ ID NO: 591962 - RNA, 19 nt, Homo sapiens
  misc_RNA (1)...(19): siRNA sense strand
aaacagaauggaaagagua

SEQ ID NO: 591963 - RNA, 19 nt, Homo sapiens
  misc_RNA (1)...(19): siRNA sense strand
uggaagggauuuacagaug

SEQ ID NO: 591964 - RNA, 19 nt, Homo sapiens
  misc_RNA (1)...(19): siRNA sense strand
gcgaaagaggcaaauauga

SEQ ID NO: 591965 - RNA, 19 nt, Homo sapiens
  misc_RNA (1)...(19): siRNA sense strand
aagagaugcugcugacaaa

SEQ ID NO: 591966 - RNA, 19 nt, Homo sapiens
  misc_RNA (1)...(19): siRNA sense strand
agaauugauugaagcguuu

SEQ ID NO: 591967 - RNA, 19 nt, Homo sapiens
  misc_RNA (1)...(19): siRNA sense strand
gaaauggaaagauucagau

SEQ ID NO: 591968 - RNA, 19 nt, Homo sapiens
  misc_RNA (1)...(19): siRNA sense strand
cagaagaugaagcucaaua

SEQ ID NO: 591969 - RNA, 19 nt, Homo sapiens
  misc_RNA (1)...(19): siRNA sense strand
gagacuaacuuggcauucu

SEQ ID NO: 591970 - RNA, 19 nt, Homo sapiens
  misc_RNA (1)...(19): siRNA sense strand
gauccugaaagaauaauug

SEQ ID NO: 591971 - RNA, 19 nt, Homo sapiens
  misc_RNA (1)...(19): siRNA sense strand
augggaaaguggaauauuu

SEQ ID NO: 591972 - RNA, 19 nt, Homo sapiens
  misc_RNA (1)...(19): siRNA sense strand
ugaaugggaaaguggaaua

SEQ ID NO: 591973 - RNA, 19 nt, Homo sapiens
  misc_RNA (1)...(19): siRNA sense strand
ugaaguguccucaaauugu

SEQ ID NO: 591974 - RNA, 19 nt, Homo sapiens
  misc_RNA (1)...(19): siRNA sense strand
ugaaucugaugacagcaaa

SEQ ID NO: 591975 - RNA, 19 nt, Homo sapiens
  misc_RNA (1)...(19): siRNA sense strand
cucaugaaauggaaagauu

SEQ ID NO: 591976 - RNA, 19 nt, Homo sapiens
  misc_RNA (1)...(19): siRNA sense strand
agacuaacuuggcauucuu

SEQ ID NO: 591977 - RNA, 19 nt, Homo sapiens
  misc_RNA (1)...(19): siRNA sense strand
aguacuagaucgacgugua

SEQ ID NO: 591978 - RNA, 19 nt, Homo sapiens
  misc_RNA (1)...(19): siRNA sense strand
agaagaugaagcucaauaa

SEQ ID NO: 591979 - RNA, 19 nt, Homo sapiens
  misc_RNA (1)...(19): siRNA sense strand
gaagggauuuacagaugcu

SEQ ID NO: 591980 - RNA, 19 nt, Homo sapiens
  misc_RNA (1)...(19): siRNA sense strand
aaagagaugcugcugacaa

SEQ ID NO: 591981 - RNA, 19 nt, Homo sapiens
  misc_RNA (1)...(19): siRNA sense strand
cagcaaaucaaagaagaaa

SEQ ID NO: 591982 - RNA, 19 nt, Homo sapiens
  misc_RNA (1)...(19): siRNA sense strand
uuacagaugcugacaauac

SEQ ID NO: 591983 - RNA, 19 nt, Homo sapiens
  misc_RNA (1)...(19): siRNA sense strand
gaaguggaagggauuuaca

SEQ ID NO: 591984 - RNA, 19 nt, Homo sapiens
  misc_RNA (1)...(19): siRNA sense strand
ugauugaagcguuucuuaa

SEQ ID NO: 591985 - RNA, 19 nt, Homo sapiens
  misc_RNA (1)...(19): siRNA sense strand
aagcguuucuuaacucuca

SEQ ID NO: 591986 - RNA, 19 nt, Homo sapiens
  misc_RNA (1)...(19): siRNA sense strand
uaucugacagugaaucuga

SEQ ID NO: 591987 - RNA, 19 nt, Homo sapiens
  misc_RNA (1)...(19): siRNA sense strand
gagagacuaacuuggcauu

SEQ ID NO: 591988 - RNA, 19 nt, Homo sapiens
  misc_RNA (1)...(19): siRNA sense strand
gaaugggaaaguggaauau

SEQ ID NO: 591989 - RNA, 19 nt, Homo sapiens
  misc_RNA (1)...(19): siRNA sense strand
ggcgaaagaggcaaauaug

SEQ ID NO: 591990 - RNA, 19 nt, Homo sapiens
  misc_RNA (1)...(19): siRNA sense strand
gauugaagcguuucuuaac

SEQ ID NO: 591991 - RNA, 19 nt, Homo sapiens
  misc_RNA (1)...(19): siRNA sense strand
gacagugaaucugaugaca

SEQ ID NO: 591992 - RNA, 19 nt, Homo sapiens
  misc_RNA (1)...(19): siRNA sense strand
uuuagauuguccagaauug

SEQ ID NO: 591993 - RNA, 19 nt, Homo sapiens
  misc_RNA (1)...(19): siRNA sense strand
uccagaagaugaagcucaa

SEQ ID NO: 591994 - RNA, 19 nt, Homo sapiens
  misc_RNA (1)...(19): siRNA sense strand
cuagaucgacguguaguga

SEQ ID NO: 591995 - RNA, 19 nt, Homo sapiens
  misc_RNA (1)...(19): siRNA sense strand
guacuagaucgacguguag

SEQ ID NO: 591996 - RNA, 19 nt, Homo sapiens
  misc_RNA (1)...(19): siRNA sense strand
cagaugcugacaauacuug

SEQ ID NO: 591997 - RNA, 19 nt, Homo sapiens
  misc_RNA (1)...(19): siRNA sense strand
cagaaagcuggcaaagaaa

SEQ ID NO: 591998 - RNA, 19 nt, Homo sapiens
  misc_RNA (1)...(19): siRNA sense strand
gcaguggagaauugauguu

SEQ ID NO: 591999 - RNA, 19 nt, Homo sapiens
  misc_RNA (1)...(19): siRNA sense strand
uugauugaagcguuucuua

SEQ ID NO: 592000 - RNA, 19 nt, Homo sapiens
  misc_RNA (1)...(19): siRNA sense strand
ggauuugccagaggucuug

SEQ ID NO: 592001 - RNA, 19 nt, Homo sapiens
  misc_RNA (1)...(19): siRNA sense strand
gcaaaucaaagaagaaaag

SEQ ID NO: 592002 - RNA, 19 nt, Homo sapiens
  misc_RNA (1)...(19): siRNA sense strand
ugacagcaaaucaaagaag

SEQ ID NO: 592003 - RNA, 19 nt, Homo sapiens
  misc_RNA (1)...(19): siRNA sense strand
uggcgaaagaggcaaauau

SEQ ID NO: 592004 - RNA, 19 nt, Homo sapiens
  misc_RNA (1)...(19): siRNA sense strand
agaucgacguguagugaau

SEQ ID NO: 592005 - RNA, 19 nt, Homo sapiens
  misc_RNA (1)...(19): siRNA sense strand
gaagaauuugucguggaaa

SEQ ID NO: 592006 - RNA, 19 nt, Homo sapiens
  misc_RNA (1)...(19): siRNA sense strand
aauggaaagauucagauga

SEQ ID NO: 592007 - RNA, 19 nt, Homo sapiens
  misc_RNA (1)...(19): siRNA sense strand
caguggagaauugauguuu

SEQ ID NO: 592008 - RNA, 19 nt, Homo sapiens
  misc_RNA (1)...(19): siRNA sense strand
gcugacaaaccaagaggau

SEQ ID NO: 592009 - RNA, 19 nt, Homo sapiens
  misc_RNA (1)...(19): siRNA sense strand
ugaagcguuucuuaacucu

SEQ ID NO: 592010 - RNA, 19 nt, Homo sapiens
  misc_RNA (1)...(19): siRNA sense strand
uacagaugcugacaauacu

SEQ ID NO: 592011 - RNA, 19 nt, Homo sapiens
  misc_RNA (1)...(19): siRNA sense strand
cagcaguggagaauugaug

SEQ ID NO: 592012 - RNA, 19 nt, Homo sapiens
  misc_RNA (1)...(19): siRNA sense strand
ggaaccugaagaaaauuua

SEQ ID NO: 592013 - RNA, 19 nt, Homo sapiens
  misc_RNA (1)...(19): siRNA sense strand
auggaaagauucagaugag

SEQ ID NO: 592014 - RNA, 19 nt, Homo sapiens
  misc_RNA (1)...(19): siRNA sense strand
uugaagcguuucuuaacuc

SEQ ID NO: 592015 - RNA, 19 nt, Homo sapiens
  misc_RNA (1)...(19): siRNA sense strand
uguagugaaugggaaagug

SEQ ID NO: 592016 - RNA, 19 nt, Homo sapiens
  misc_RNA (1)...(19): siRNA sense strand
gaucgacguguagugaaug

SEQ ID NO: 592017 - RNA, 19 nt, Homo sapiens
  misc_RNA (1)...(19): siRNA sense strand
ucagaaagcuggcaaagaa

SEQ ID NO: 592018 - RNA, 19 nt, Homo sapiens
  misc_RNA (1)...(19): siRNA sense strand
gaauugauguuucucauga

SEQ ID NO: 592019 - RNA, 19 nt, Homo sapiens
  misc_RNA (1)...(19): siRNA sense strand
gaaguguccucaaauugua

SEQ ID NO: 592020 - RNA, 19 nt, Homo sapiens
  misc_RNA (1)...(19): siRNA sense strand
ggcagagccugaagaauuu

SEQ ID NO: 592021 - RNA, 19 nt, Homo sapiens
  misc_RNA (1)...(19): siRNA sense strand
agacagcaguggagaauug

SEQ ID NO: 592022 - RNA, 19 nt, Homo sapiens
  misc_RNA (1)...(19): siRNA sense strand
cgaaagaggcaaauaugaa

SEQ ID NO: 592023 - RNA, 19 nt, Homo sapiens
  misc_RNA (1)...(19): siRNA sense strand
uaugaaguguccucaaauu

SEQ ID NO: 592024 - RNA, 19 nt, Homo sapiens
  misc_RNA (1)...(19): siRNA sense strand
ugacaaaccaagaggauuu

SEQ ID NO: 592025 - RNA, 19 nt, Homo sapiens
  misc_RNA (1)...(19): siRNA sense strand
aauaugaaguguccucaaa

SEQ ID NO: 592026 - RNA, 19 nt, Homo sapiens
  misc_RNA (1)...(19): siRNA sense strand
gacagcaaaucaaagaaga

SEQ ID NO: 592027 - RNA, 19 nt, Homo sapiens
  misc_RNA (1)...(19): siRNA sense strand
ugaagaauuugucguggaa

SEQ ID NO: 592028 - RNA, 19 nt, Homo sapiens
  misc_RNA (1)...(19): siRNA sense strand
gaaagaggcaaauaugaag

SEQ ID NO: 592029 - RNA, 19 nt, Homo sapiens
  misc_RNA (1)...(19): siRNA sense strand
gaugacagcaaaucaaaga

SEQ ID NO: 592030 - RNA, 19 nt, Homo sapiens
  misc_RNA (1)...(19): siRNA sense strand
caacaaaacuacauugcaa

SEQ ID NO: 592031 - RNA, 19 nt, Homo sapiens
  misc_RNA (1)...(19): siRNA sense strand
aaacagaauggaaagagua

SEQ ID NO: 592032 - RNA, 19 nt, Homo sapiens
  misc_RNA (1)...(19): siRNA sense strand
uggaagggauuuacagaug

SEQ ID NO: 592033 - RNA, 19 nt, Homo sapiens
  misc_RNA (1)...(19): siRNA sense strand
gcgaaagaggcaaauauga

SEQ ID NO: 592034 - RNA, 19 nt, Homo sapiens
  misc_RNA (1)...(19): siRNA sense strand
aagagaugcugcugacaaa

SEQ ID NO: 592035 - RNA, 19 nt, Homo sapiens
  misc_RNA (1)...(19): siRNA sense strand
agaauugauugaagcguuu

SEQ ID NO: 592036 - RNA, 19 nt, Homo sapiens
  misc_RNA (1)...(19): siRNA sense strand
gaaauggaaagauucagau

SEQ ID NO: 592037 - RNA, 19 nt, Homo sapiens
  misc_RNA (1)...(19): siRNA sense strand
cagaagaugaagcucaaua

SEQ ID NO: 592038 - RNA, 19 nt, Homo sapiens
  misc_RNA (1)...(19): siRNA sense strand
gagacuaacuuggcauucu

SEQ ID NO: 592039 - RNA, 19 nt, Homo sapiens
  misc_RNA (1)...(19): siRNA sense strand
gauccugaaagaauaauug

SEQ ID NO: 592040 - RNA, 19 nt, Homo sapiens
  misc_RNA (1)...(19): siRNA sense strand
augggaaaguggaauauuu

SEQ ID NO: 592041 - RNA, 19 nt, Homo sapiens
  misc_RNA (1)...(19): siRNA sense strand
ugaaugggaaaguggaaua

SEQ ID NO: 592042 - RNA, 19 nt, Homo sapiens
  misc_RNA (1)...(19): siRNA sense strand
ugaaguguccucaaauugu

SEQ ID NO: 592043 - RNA, 19 nt, Homo sapiens
  misc_RNA (1)...(19): siRNA sense strand
ugaaucugaugacagcaaa

SEQ ID NO: 592044 - RNA, 19 nt, Homo sapiens
  misc_RNA (1)...(19): siRNA sense strand
cucaugaaauggaaagauu

SEQ ID NO: 592045 - RNA, 19 nt, Homo sapiens
  misc_RNA (1)...(19): siRNA sense strand
agacuaacuuggcauucuu

SEQ ID NO: 592046 - RNA, 19 nt, Homo sapiens
  misc_RNA (1)...(19): siRNA sense strand
aguacuagaucgacgugua

SEQ ID NO: 592047 - RNA, 19 nt, Homo sapiens
  misc_RNA (1)...(19): siRNA sense strand
agaagaugaagcucaauaa

SEQ ID NO: 592048 - RNA, 19 nt, Homo sapiens
  misc_RNA (1)...(19): siRNA sense strand
gaagggauuuacagaugcu

SEQ ID NO: 592049 - RNA, 19 nt, Homo sapiens
  misc_RNA (1)...(19): siRNA sense strand
aaagagaugcugcugacaa

SEQ ID NO: 592050 - RNA, 19 nt, Homo sapiens
  misc_RNA (1)...(19): siRNA sense strand
cagcaaaucaaagaagaaa

SEQ ID NO: 592051 - RNA, 19 nt, Homo sapiens
  misc_RNA (1)...(19): siRNA sense strand
uuacagaugcugacaauac

SEQ ID NO: 592052 - RNA, 19 nt, Homo sapiens
  misc_RNA (1)...(19): siRNA sense strand
gaaguggaagggauuuaca

SEQ ID NO: 592053 - RNA, 19 nt, Homo sapiens
  misc_RNA (1)...(19): siRNA sense strand
ugauugaagcguuucuuaa

SEQ ID NO: 592054 - RNA, 19 nt, Homo sapiens
  misc_RNA (1)...(19): siRNA sense strand
aagcguuucuuaacucuca

SEQ ID NO: 592055 - RNA, 19 nt, Homo sapiens
  misc_RNA (1)...(19): siRNA sense strand
uaucugacagugaaucuga

SEQ ID NO: 592056 - RNA, 19 nt, Homo sapiens
  misc_RNA (1)...(19): siRNA sense strand
gagagacuaacuuggcauu

SEQ ID NO: 592057 - RNA, 19 nt, Homo sapiens
  misc_RNA (1)...(19): siRNA sense strand
gaaugggaaaguggaauau

SEQ ID NO: 592058 - RNA, 19 nt, Homo sapiens
  misc_RNA (1)...(19): siRNA sense strand
ggcgaaagaggcaaauaug

SEQ ID NO: 592059 - RNA, 19 nt, Homo sapiens
  misc_RNA (1)...(19): siRNA sense strand
gauugaagcguuucuuaac

SEQ ID NO: 592060 - RNA, 19 nt, Homo sapiens
  misc_RNA (1)...(19): siRNA sense strand
gacagugaaucugaugaca

SEQ ID NO: 592061 - RNA, 19 nt, Homo sapiens
  misc_RNA (1)...(19): siRNA sense strand
uuuagauuguccagaauug

SEQ ID NO: 592062 - RNA, 19 nt, Homo sapiens
  misc_RNA (1)...(19): siRNA sense strand
uccagaagaugaagcucaa

SEQ ID NO: 592063 - RNA, 19 nt, Homo sapiens
  misc_RNA (1)...(19): siRNA sense strand
cuagaucgacguguaguga

SEQ ID NO: 592064 - RNA, 19 nt, Homo sapiens
  misc_RNA (1)...(19): siRNA sense strand
guacuagaucgacguguag

SEQ ID NO: 592065 - RNA, 19 nt, Homo sapiens
  misc_RNA (1)...(19): siRNA sense strand
cagaugcugacaauacuug

SEQ ID NO: 592066 - RNA, 19 nt, Homo sapiens
  misc_RNA (1)...(19): siRNA sense strand
cagaaagcuggcaaagaaa

SEQ ID NO: 592067 - RNA, 19 nt, Homo sapiens
  misc_RNA (1)...(19): siRNA sense strand
gcaguggagaauugauguu

SEQ ID NO: 592068 - RNA, 19 nt, Homo sapiens
  misc_RNA (1)...(19): siRNA sense strand
uugauugaagcguuucuua

SEQ ID NO: 592069 - RNA, 19 nt, Homo sapiens
  misc_RNA (1)...(19): siRNA sense strand
ggauuugccagaggucuug

SEQ ID NO: 592070 - RNA, 19 nt, Homo sapiens
  misc_RNA (1)...(19): siRNA sense strand
gcaaaucaaagaagaaaag

SEQ ID NO: 592071 - RNA, 19 nt, Homo sapiens
  misc_RNA (1)...(19): siRNA sense strand
ugacagcaaaucaaagaag

SEQ ID NO: 592072 - RNA, 19 nt, Homo sapiens
  misc_RNA (1)...(19): siRNA sense strand
uggcgaaagaggcaaauau

SEQ ID NO: 592073 - RNA, 19 nt, Homo sapiens
  misc_RNA (1)...(19): siRNA sense strand
agaucgacguguagugaau

SEQ ID NO: 592074 - RNA, 19 nt, Homo sapiens
  misc_RNA (1)...(19): siRNA sense strand
gaagaauuugucguggaaa

SEQ ID NO: 592075 - RNA, 19 nt, Homo sapiens
  misc_RNA (1)...(19): siRNA sense strand
aauggaaagauucagauga

SEQ ID NO: 592076 - RNA, 19 nt, Homo sapiens
  misc_RNA (1)...(19): siRNA sense strand
caguggagaauugauguuu

SEQ ID NO: 592077 - RNA, 19 nt, Homo sapiens
  misc_RNA (1)...(19): siRNA sense strand
gcugacaaaccaagaggau

SEQ ID NO: 592078 - RNA, 19 nt, Homo sapiens
  misc_RNA (1)...(19): siRNA sense strand
ugaagcguuucuuaacucu

SEQ ID NO: 592079 - RNA, 19 nt, Homo sapiens
  misc_RNA (1)...(19): siRNA sense strand
uacagaugcugacaauacu

SEQ ID NO: 592080 - RNA, 19 nt, Homo sapiens
  misc_RNA (1)...(19): siRNA sense strand
cagcaguggagaauugaug

SEQ ID NO: 592081 - RNA, 19 nt, Homo sapiens
  misc_RNA (1)...(19): siRNA sense strand
ggaaccugaagaaaauuua

SEQ ID NO: 592082 - RNA, 19 nt, Homo sapiens
  misc_RNA (1)...(19): siRNA sense strand
auggaaagauucagaugag

SEQ ID NO: 592083 - RNA, 19 nt, Homo sapiens
  misc_RNA (1)...(19): siRNA sense strand
uugaagcguuucuuaacuc

SEQ ID NO: 592084 - RNA, 19 nt, Homo sapiens
  misc_RNA (1)...(19): siRNA sense strand
uguagugaaugggaaagug

SEQ ID NO: 592085 - RNA, 19 nt, Homo sapiens
  misc_RNA (1)...(19): siRNA sense strand
gaucgacguguagugaaug

SEQ ID NO: 592086 - RNA, 19 nt, Homo sapiens
  misc_RNA (1)...(19): siRNA sense strand
gaagaaaggugucaagaac

SEQ ID NO: 592087 - RNA, 19 nt, Homo sapiens
  misc_RNA (1)...(19): siRNA sense strand
caucacgccuagagaauua

SEQ ID NO: 592088 - RNA, 19 nt, Homo sapiens
  misc_RNA (1)...(19): siRNA sense strand
cgacaaagcuugggcugaa

SEQ ID NO: 592089 - RNA, 19 nt, Homo sapiens
  misc_RNA (1)...(19): siRNA sense strand
cagcagaccucgcaggaaa

SEQ ID NO: 592090 - RNA, 19 nt, Homo sapiens
  misc_RNA (1)...(19): siRNA sense strand
gaugagaacuugaugaaaa

SEQ ID NO: 592091 - RNA, 19 nt, Homo sapiens
  misc_RNA (1)...(19): siRNA sense strand
gggagaagguggccucguu

SEQ ID NO: 592092 - RNA, 19 nt, Homo sapiens
  misc_RNA (1)...(19): siRNA sense strand
gguccucucuccuuuggua

SEQ ID NO: 592093 - RNA, 19 nt, Homo sapiens
  misc_RNA (1)...(19): siRNA sense strand
ucacggcgcugaccucaca

SEQ ID NO: 592094 - RNA, 19 nt, Homo sapiens
  misc_RNA (1)...(19): siRNA sense strand
gcaaacaacagaacuacca

SEQ ID NO: 592095 - RNA, 19 nt, Homo sapiens
  misc_RNA (1)...(19): siRNA sense strand
ggaaacaucacgccuagag

SEQ ID NO: 592096 - RNA, 19 nt, Homo sapiens
  misc_RNA (1)...(19): siRNA sense strand
gagcgcagcuuccucuacu

SEQ ID NO: 592097 - RNA, 19 nt, Homo sapiens
  misc_RNA (1)...(19): siRNA sense strand
ugccaaaccuggagaacuu

SEQ ID NO: 592098 - RNA, 19 nt, Homo sapiens
  misc_RNA (1)...(19): siRNA sense strand
aaacaucacgccuagagaa

SEQ ID NO: 592099 - RNA, 19 nt, Homo sapiens
  misc_RNA (1)...(19): siRNA sense strand
gacgacauguccaccaaau

SEQ ID NO: 592100 - RNA, 19 nt, Homo sapiens
  misc_RNA (1)...(19): siRNA sense strand
caacugguccucucuccuu

SEQ ID NO: 592101 - RNA, 19 nt, Homo sapiens
  misc_RNA (1)...(19): siRNA sense strand
gaaacccuccauuaccaaa

SEQ ID NO: 592102 - RNA, 19 nt, Homo sapiens
  misc_RNA (1)...(19): siRNA sense strand
ccucacagguggagaacau

SEQ ID NO: 592103 - RNA, 19 nt, Homo sapiens
  misc_RNA (1)...(19): siRNA sense strand
cccaggaaacccuccauua

SEQ ID NO: 592104 - RNA, 19 nt, Homo sapiens
  misc_RNA (1)...(19): siRNA sense strand
cgacauguccaccaaaucu

SEQ ID NO: 592105 - RNA, 19 nt, Homo sapiens
  misc_RNA (1)...(19): siRNA sense strand
cgucgccgcugaugccaaa

SEQ ID NO: 592106 - RNA, 19 nt, Homo sapiens
  misc_RNA (1)...(19): siRNA sense strand
gaaacaucacgccuagaga

SEQ ID NO: 592107 - RNA, 19 nt, Homo sapiens
  misc_RNA (1)...(19): siRNA sense strand
agaagaaaggugucaagaa

SEQ ID NO: 592108 - RNA, 19 nt, Homo sapiens
  misc_RNA (1)...(19): siRNA sense strand
ucgccaaggacuauuauaa

SEQ ID NO: 592109 - RNA, 19 nt, Homo sapiens
  misc_RNA (1)...(19): siRNA sense strand
ggacagcgccaaccccuuu

SEQ ID NO: 592110 - RNA, 19 nt, Homo sapiens
  misc_RNA (1)...(19): siRNA sense strand
auuauaacccgcagccuua

SEQ ID NO: 592111 - RNA, 19 nt, Homo sapiens
  misc_RNA (1)...(19): siRNA sense strand
ccaggaaacccuccauuac

SEQ ID NO: 592112 - RNA, 19 nt, Homo sapiens
  misc_RNA (1)...(19): siRNA sense strand
ggaaacccuccauuaccaa

SEQ ID NO: 592113 - RNA, 19 nt, Homo sapiens
  misc_RNA (1)...(19): siRNA sense strand
ggccaaguaugaugagaac

SEQ ID NO: 592114 - RNA, 19 nt, Homo sapiens
  misc_RNA (1)...(19): siRNA sense strand
gaccucuccugacgacaug

SEQ ID NO: 592115 - RNA, 19 nt, Homo sapiens
  misc_RNA (1)...(19): siRNA sense strand
ccgcucaccuuccuacagu

SEQ ID NO: 592116 - RNA, 19 nt, Homo sapiens
  misc_RNA (1)...(19): siRNA sense strand
gagaaggccgacaaagcuu

SEQ ID NO: 592117 - RNA, 19 nt, Homo sapiens
  misc_RNA (1)...(19): siRNA sense strand
cgacagcuucuccaaguuc

SEQ ID NO: 592118 - RNA, 19 nt, Homo sapiens
  misc_RNA (1)...(19): siRNA sense strand
gcagaagaaaggugucaag

SEQ ID NO: 592119 - RNA, 19 nt, Homo sapiens
  misc_RNA (1)...(19): siRNA sense strand
cuggagaacuuucccuaca

SEQ ID NO: 592120 - RNA, 19 nt, Homo sapiens
  misc_RNA (1)...(19): siRNA sense strand
gcaaaggggacacccauga

SEQ ID NO: 592121 - RNA, 19 nt, Homo sapiens
  misc_RNA (1)...(19): siRNA sense strand
accaaaaccucgccaagua

SEQ ID NO: 592122 - RNA, 19 nt, Homo sapiens
  misc_RNA (1)...(19): siRNA sense strand
cagcagcuuuugacuguuu

SEQ ID NO: 592123 - RNA, 19 nt, Homo sapiens
  misc_RNA (1)...(19): siRNA sense strand
gaagcugcagaacgacauu

SEQ ID NO: 592124 - RNA, 19 nt, Homo sapiens
  misc_RNA (1)...(19): siRNA sense strand
gaguacuccucccuaugug

SEQ ID NO: 592125 - RNA, 19 nt, Homo sapiens
  misc_RNA (1)...(19): siRNA sense strand
guguccaccuguucuguga

SEQ ID NO: 592126 - RNA, 19 nt, Homo sapiens
  misc_RNA (1)...(19): siRNA sense strand
aggaaacccuccauuacca

SEQ ID NO: 592127 - RNA, 19 nt, Homo sapiens
  misc_RNA (1)...(19): siRNA sense strand
gccaaggacuauuauaacc

SEQ ID NO: 592128 - RNA, 19 nt, Homo sapiens
  misc_RNA (1)...(19): siRNA sense strand
ccaaaucugacgacuccuu

SEQ ID NO: 592129 - RNA, 19 nt, Homo sapiens
  misc_RNA (1)...(19): siRNA sense strand
ugagaaggccgacaaagcu

SEQ ID NO: 592130 - RNA, 19 nt, Homo sapiens
  misc_RNA (1)...(19): siRNA sense strand
ggcagcggguccagaaucu

SEQ ID NO: 592131 - RNA, 19 nt, Homo sapiens
  misc_RNA (1)...(19): siRNA sense strand
cgaagggagcggcuacuca

SEQ ID NO: 592132 - RNA, 19 nt, Homo sapiens
  misc_RNA (1)...(19): siRNA sense strand
cagaagaaaggugucaaga

SEQ ID NO: 592133 - RNA, 19 nt, Homo sapiens
  misc_RNA (1)...(19): siRNA sense strand
cucgacagcuucuccaagu

SEQ ID NO: 592134 - RNA, 19 nt, Homo sapiens
  misc_RNA (1)...(19): siRNA sense strand
gcagcaagccacccuucuc

SEQ ID NO: 592135 - RNA, 19 nt, Homo sapiens
  misc_RNA (1)...(19): siRNA sense strand
gcagaccucgcaggaaaca

SEQ ID NO: 592136 - RNA, 19 nt, Homo sapiens
  misc_RNA (1)...(19): siRNA sense strand
gacaaagcuugggcugaag

SEQ ID NO: 592137 - RNA, 19 nt, Homo sapiens
  misc_RNA (1)...(19): siRNA sense strand
cagcggguccagaaucuuc

SEQ ID NO: 592138 - RNA, 19 nt, Homo sapiens
  misc_RNA (1)...(19): siRNA sense strand
gaaggaggaccuggaagcu

SEQ ID NO: 592139 - RNA, 19 nt, Homo sapiens
  misc_RNA (1)...(19): siRNA sense strand
cugcagggguggccaagua

SEQ ID NO: 592140 - RNA, 19 nt, Homo sapiens
  misc_RNA (1)...(19): siRNA sense strand
cagcagcaagcccuucaga

SEQ ID NO: 592141 - RNA, 19 nt, Homo sapiens
  misc_RNA (1)...(19): siRNA sense strand
gcucaccuuccuacaguuc

SEQ ID NO: 592142 - RNA, 19 nt, Homo sapiens
  misc_RNA (1)...(19): siRNA sense strand
caucacgccuagagaauua

SEQ ID NO: 592143 - RNA, 19 nt, Homo sapiens
  misc_RNA (1)...(19): siRNA sense strand
cagcagaccucgcaggaaa

SEQ ID NO: 592144 - RNA, 19 nt, Homo sapiens
  misc_RNA (1)...(19): siRNA sense strand
gaugagaacuugaugaaaa

SEQ ID NO: 592145 - RNA, 19 nt, Homo sapiens
  misc_RNA (1)...(19): siRNA sense strand
gcaaacaacagaacuacca

SEQ ID NO: 592146 - RNA, 19 nt, Homo sapiens
  misc_RNA (1)...(19): siRNA sense strand
ggaaacaucacgccuagag

SEQ ID NO: 592147 - RNA, 19 nt, Homo sapiens
  misc_RNA (1)...(19): siRNA sense strand
aaacaucacgccuagagaa

SEQ ID NO: 592148 - RNA, 19 nt, Homo sapiens
  misc_RNA (1)...(19): siRNA sense strand
gaaacaucacgccuagaga

SEQ ID NO: 592149 - RNA, 19 nt, Homo sapiens
  misc_RNA (1)...(19): siRNA sense strand
ucgccaaggacuauuauaa

SEQ ID NO: 592150 - RNA, 19 nt, Homo sapiens
  misc_RNA (1)...(19): siRNA sense strand
auuauaacccgcagccuua

SEQ ID NO: 592151 - RNA, 19 nt, Homo sapiens
  misc_RNA (1)...(19): siRNA sense strand
ggccaaguaugaugagaac

SEQ ID NO: 592152 - RNA, 19 nt, Homo sapiens
  misc_RNA (1)...(19): siRNA sense strand
gaagcugcagaacgacauu

SEQ ID NO: 592153 - RNA, 19 nt, Homo sapiens
  misc_RNA (1)...(19): siRNA sense strand
gccaaggacuauuauaacc

SEQ ID NO: 592154 - RNA, 19 nt, Homo sapiens
  misc_RNA (1)...(19): siRNA sense strand
gcagaccucgcaggaaaca

SEQ ID NO: 592155 - RNA, 19 nt, Homo sapiens
  misc_RNA (1)...(19): siRNA sense strand
cugcagggguggccaagua

SEQ ID NO: 592156 - RNA, 19 nt, Homo sapiens
  misc_RNA (1)...(19): siRNA sense strand
gaagaaaggugucaagaac

SEQ ID NO: 592157 - RNA, 19 nt, Homo sapiens
  misc_RNA (1)...(19): siRNA sense strand
caucacgccuagagaauua

SEQ ID NO: 592158 - RNA, 19 nt, Homo sapiens
  misc_RNA (1)...(19): siRNA sense strand
cgacaaagcuugggcugaa

SEQ ID NO: 592159 - RNA, 19 nt, Homo sapiens
  misc_RNA (1)...(19): siRNA sense strand
cagcagaccucgcaggaaa

SEQ ID NO: 592160 - RNA, 19 nt, Homo sapiens
  misc_RNA (1)...(19): siRNA sense strand
gaugagaacuugaugaaaa

SEQ ID NO: 592161 - RNA, 19 nt, Homo sapiens
  misc_RNA (1)...(19): siRNA sense strand
gggagaagguggccucguu

SEQ ID NO: 592162 - RNA, 19 nt, Homo sapiens
  misc_RNA (1)...(19): siRNA sense strand
gguccucucuccuuuggua

SEQ ID NO: 592163 - RNA, 19 nt, Homo sapiens
  misc_RNA (1)...(19): siRNA sense strand
ucacggcgcugaccucaca

SEQ ID NO: 592164 - RNA, 19 nt, Homo sapiens
  misc_RNA (1)...(19): siRNA sense strand
gcaaacaacagaacuacca

SEQ ID NO: 592165 - RNA, 19 nt, Homo sapiens
  misc_RNA (1)...(19): siRNA sense strand
ggaaacaucacgccuagag

SEQ ID NO: 592166 - RNA, 19 nt, Homo sapiens
  misc_RNA (1)...(19): siRNA sense strand
gagcgcagcuuccucuacu

SEQ ID NO: 592167 - RNA, 19 nt, Homo sapiens
  misc_RNA (1)...(19): siRNA sense strand
ugccaaaccuggagaacuu

SEQ ID NO: 592168 - RNA, 19 nt, Homo sapiens
  misc_RNA (1)...(19): siRNA sense strand
aaacaucacgccuagagaa

SEQ ID NO: 592169 - RNA, 19 nt, Homo sapiens
  misc_RNA (1)...(19): siRNA sense strand
gacgacauguccaccaaau

SEQ ID NO: 592170 - RNA, 19 nt, Homo sapiens
  misc_RNA (1)...(19): siRNA sense strand
caacugguccucucuccuu

SEQ ID NO: 592171 - RNA, 19 nt, Homo sapiens
  misc_RNA (1)...(19): siRNA sense strand
gaaacccuccauuaccaaa

SEQ ID NO: 592172 - RNA, 19 nt, Homo sapiens
  misc_RNA (1)...(19): siRNA sense strand
ccucacagguggagaacau

SEQ ID NO: 592173 - RNA, 19 nt, Homo sapiens
  misc_RNA (1)...(19): siRNA sense strand
cccaggaaacccuccauua

SEQ ID NO: 592174 - RNA, 19 nt, Homo sapiens
  misc_RNA (1)...(19): siRNA sense strand
cgacauguccaccaaaucu

SEQ ID NO: 592175 - RNA, 19 nt, Homo sapiens
  misc_RNA (1)...(19): siRNA sense strand
cgucgccgcugaugccaaa

SEQ ID NO: 592176 - RNA, 19 nt, Homo sapiens
  misc_RNA (1)...(19): siRNA sense strand
gaaacaucacgccuagaga

SEQ ID NO: 592177 - RNA, 19 nt, Homo sapiens
  misc_RNA (1)...(19): siRNA sense strand
agaagaaaggugucaagaa

SEQ ID NO: 592178 - RNA, 19 nt, Homo sapiens
  misc_RNA (1)...(19): siRNA sense strand
ucgccaaggacuauuauaa

SEQ ID NO: 592179 - RNA, 19 nt, Homo sapiens
  misc_RNA (1)...(19): siRNA sense strand
ggacagcgccaaccccuuu

SEQ ID NO: 592180 - RNA, 19 nt, Homo sapiens
  misc_RNA (1)...(19): siRNA sense strand
auuauaacccgcagccuua

SEQ ID NO: 592181 - RNA, 19 nt, Homo sapiens
  misc_RNA (1)...(19): siRNA sense strand
ccaggaaacccuccauuac

SEQ ID NO: 592182 - RNA, 19 nt, Homo sapiens
  misc_RNA (1)...(19): siRNA sense strand
ggaaacccuccauuaccaa

SEQ ID NO: 592183 - RNA, 19 nt, Homo sapiens
  misc_RNA (1)...(19): siRNA sense strand
ggccaaguaugaugagaac

SEQ ID NO: 592184 - RNA, 19 nt, Homo sapiens
  misc_RNA (1)...(19): siRNA sense strand
gaccucuccugacgacaug

SEQ ID NO: 592185 - RNA, 19 nt, Homo sapiens
  misc_RNA (1)...(19): siRNA sense strand
ccgcucaccuuccuacagu

SEQ ID NO: 592186 - RNA, 19 nt, Homo sapiens
  misc_RNA (1)...(19): siRNA sense strand
gagaaggccgacaaagcuu

SEQ ID NO: 592187 - RNA, 19 nt, Homo sapiens
  misc_RNA (1)...(19): siRNA sense strand
cgacagcuucuccaaguuc

SEQ ID NO: 592188 - RNA, 19 nt, Homo sapiens
  misc_RNA (1)...(19): siRNA sense strand
gcagaagaaaggugucaag

SEQ ID NO: 592189 - RNA, 19 nt, Homo sapiens
  misc_RNA (1)...(19): siRNA sense strand
cuggagaacuuucccuaca

SEQ ID NO: 592190 - RNA, 19 nt, Homo sapiens
  misc_RNA (1)...(19): siRNA sense strand
gcaaaggggacacccauga

SEQ ID NO: 592191 - RNA, 19 nt, Homo sapiens
  misc_RNA (1)...(19): siRNA sense strand
accaaaaccucgccaagua

SEQ ID NO: 592192 - RNA, 19 nt, Homo sapiens
  misc_RNA (1)...(19): siRNA sense strand
cagcagcuuuugacuguuu

SEQ ID NO: 592193 - RNA, 19 nt, Homo sapiens
  misc_RNA (1)...(19): siRNA sense strand
gaagcugcagaacgacauu

SEQ ID NO: 592194 - RNA, 19 nt, Homo sapiens
  misc_RNA (1)...(19): siRNA sense strand
gaguacuccucccuaugug

SEQ ID NO: 592195 - RNA, 19 nt, Homo sapiens
  misc_RNA (1)...(19): siRNA sense strand
guguccaccuguucuguga

SEQ ID NO: 592196 - RNA, 19 nt, Homo sapiens
  misc_RNA (1)...(19): siRNA sense strand
aggaaacccuccauuacca

SEQ ID NO: 592197 - RNA, 19 nt, Homo sapiens
  misc_RNA (1)...(19): siRNA sense strand
gccaaggacuauuauaacc

SEQ ID NO: 592198 - RNA, 19 nt, Homo sapiens
  misc_RNA (1)...(19): siRNA sense strand
ccaaaucugacgacuccuu

SEQ ID NO: 592199 - RNA, 19 nt, Homo sapiens
  misc_RNA (1)...(19): siRNA sense strand
ugagaaggccgacaaagcu

SEQ ID NO: 592200 - RNA, 19 nt, Homo sapiens
  misc_RNA (1)...(19): siRNA sense strand
ggcagcggguccagaaucu

SEQ ID NO: 592201 - RNA, 19 nt, Homo sapiens
  misc_RNA (1)...(19): siRNA sense strand
cgaagggagcggcuacuca

SEQ ID NO: 592202 - RNA, 19 nt, Homo sapiens
  misc_RNA (1)...(19): siRNA sense strand
cagaagaaaggugucaaga

SEQ ID NO: 592203 - RNA, 19 nt, Homo sapiens
  misc_RNA (1)...(19): siRNA sense strand
cucgacagcuucuccaagu

SEQ ID NO: 592204 - RNA, 19 nt, Homo sapiens
  misc_RNA (1)...(19): siRNA sense strand
gcagcaagccacccuucuc

SEQ ID NO: 592205 - RNA, 19 nt, Homo sapiens
  misc_RNA (1)...(19): siRNA sense strand
gcagaccucgcaggaaaca

SEQ ID NO: 592206 - RNA, 19 nt, Homo sapiens
  misc_RNA (1)...(19): siRNA sense strand
gacaaagcuugggcugaag

SEQ ID NO: 592207 - RNA, 19 nt, Homo sapiens
  misc_RNA (1)...(19): siRNA sense strand
cagcggguccagaaucuuc

SEQ ID NO: 592208 - RNA, 19 nt, Homo sapiens
  misc_RNA (1)...(19): siRNA sense strand
gaaggaggaccuggaagcu

SEQ ID NO: 592209 - RNA, 19 nt, Homo sapiens
  misc_RNA (1)...(19): siRNA sense strand
cugcagggguggccaagua

SEQ ID NO: 592210 - RNA, 19 nt, Homo sapiens
  misc_RNA (1)...(19): siRNA sense strand
cagcagcaagcccuucaga

SEQ ID NO: 592211 - RNA, 19 nt, Homo sapiens
  misc_RNA (1)...(19): siRNA sense strand
gcucaccuuccuacaguuc

SEQ ID NO: 592212 - RNA, 19 nt, Homo sapiens
  misc_RNA (1)...(19): siRNA sense strand
gaagguggcugcaacuaug

SEQ ID NO: 592213 - RNA, 19 nt, Homo sapiens
  misc_RNA (1)...(19): siRNA sense strand
ggacagaccuccguauuca

SEQ ID NO: 592214 - RNA, 19 nt, Homo sapiens
  misc_RNA (1)...(19): siRNA sense strand
gggaaaaucuguaaugaua

SEQ ID NO: 592215 - RNA, 19 nt, Homo sapiens
  misc_RNA (1)...(19): siRNA sense strand
ggagucaacuguagcagaa

SEQ ID NO: 592216 - RNA, 19 nt, Homo sapiens
  misc_RNA (1)...(19): siRNA sense strand
ggagucaacuguagcagaa

SEQ ID NO: 592217 - RNA, 19 nt, Homo sapiens
  misc_RNA (1)...(19): siRNA sense strand
ccaaugacuucacgucuuu

SEQ ID NO: 592218 - RNA, 19 nt, Homo sapiens
  misc_RNA (1)...(19): siRNA sense strand
agacuacgcuucacugauu

SEQ ID NO: 592219 - RNA, 19 nt, Homo sapiens
  misc_RNA (1)...(19): siRNA sense strand
gcucaggacacgagucuua

SEQ ID NO: 592220 - RNA, 19 nt, Homo sapiens
  misc_RNA (1)...(19): siRNA sense strand
gaauucugguuaucgcaua

SEQ ID NO: 592221 - RNA, 19 nt, Homo sapiens
  misc_RNA (1)...(19): siRNA sense strand
gcucaggacacgagucuua

SEQ ID NO: 592222 - RNA, 19 nt, Homo sapiens
  misc_RNA (1)...(19): siRNA sense strand
gcaccaaccugcucugucu

SEQ ID NO: 592223 - RNA, 19 nt, Homo sapiens
  misc_RNA (1)...(19): siRNA sense strand
cgaagacgcuggugucauc

SEQ ID NO: 592224 - RNA, 19 nt, Homo sapiens
  misc_RNA (1)...(19): siRNA sense strand
gauaccaggcaaauauuua

SEQ ID NO: 592225 - RNA, 19 nt, Homo sapiens
  misc_RNA (1)...(19): siRNA sense strand
ccagaaaguuggccuguca

SEQ ID NO: 592226 - RNA, 19 nt, Homo sapiens
  misc_RNA (1)...(19): siRNA sense strand
aaauugugguggcuucuua

SEQ ID NO: 592227 - RNA, 19 nt, Homo sapiens
  misc_RNA (1)...(19): siRNA sense strand
ucacgucuuugacuuauga

SEQ ID NO: 592228 - RNA, 19 nt, Homo sapiens
  misc_RNA (1)...(19): siRNA sense strand
ucagagauguccagcuuga

SEQ ID NO: 592229 - RNA, 19 nt, Homo sapiens
  misc_RNA (1)...(19): siRNA sense strand
ggacaccaaugaugccaau

SEQ ID NO: 592230 - RNA, 19 nt, Homo sapiens
  misc_RNA (1)...(19): siRNA sense strand
ggacaccaaugaugccaau

SEQ ID NO: 592231 - RNA, 19 nt, Homo sapiens
  misc_RNA (1)...(19): siRNA sense strand
ugaagacgcuggugucauc

SEQ ID NO: 592232 - RNA, 19 nt, Homo sapiens
  misc_RNA (1)...(19): siRNA sense strand
ggacaccaaugaugccaau

SEQ ID NO: 592233 - RNA, 19 nt, Homo sapiens
  misc_RNA (1)...(19): siRNA sense strand
ugaagacgcuggugucauc

SEQ ID NO: 592234 - RNA, 19 nt, Homo sapiens
  misc_RNA (1)...(19): siRNA sense strand
ggacaccaaugaugccaau

SEQ ID NO: 592235 - RNA, 19 nt, Homo sapiens
  misc_RNA (1)...(19): siRNA sense strand
ugaagacgcuggugucauc

SEQ ID NO: 592236 - RNA, 19 nt, Homo sapiens
  misc_RNA (1)...(19): siRNA sense strand
ggacaccaaugaugccaau

SEQ ID NO: 592237 - RNA, 19 nt, Homo sapiens
  misc_RNA (1)...(19): siRNA sense strand
ugaagacgcuggugucauc

SEQ ID NO: 592238 - RNA, 19 nt, Homo sapiens
  misc_RNA (1)...(19): siRNA sense strand
ugaagacgcuggugucauc

SEQ ID NO: 592239 - RNA, 19 nt, Homo sapiens
  misc_RNA (1)...(19): siRNA sense strand
gaagugaauucugguuauc

SEQ ID NO: 592240 - RNA, 19 nt, Homo sapiens
  misc_RNA (1)...(19): siRNA sense strand
uaaguguguuugggaaaua

SEQ ID NO: 592241 - RNA, 19 nt, Homo sapiens
  misc_RNA (1)...(19): siRNA sense strand
gcagaaugcuucagaacac

SEQ ID NO: 592242 - RNA, 19 nt, Homo sapiens
  misc_RNA (1)...(19): siRNA sense strand
caugucagcuccaggaaau

SEQ ID NO: 592243 - RNA, 19 nt, Homo sapiens
  misc_RNA (1)...(19): siRNA sense strand
gaaauccuccauucugaug

SEQ ID NO: 592244 - RNA, 19 nt, Homo sapiens
  misc_RNA (1)...(19): siRNA sense strand
caaaacaacuaccguguga

SEQ ID NO: 592245 - RNA, 19 nt, Homo sapiens
  misc_RNA (1)...(19): siRNA sense strand
ggugucaucugcucaggaa

SEQ ID NO: 592246 - RNA, 19 nt, Homo sapiens
  misc_RNA (1)...(19): siRNA sense strand
ggacaccagugacgccaau

SEQ ID NO: 592247 - RNA, 19 nt, Homo sapiens
  misc_RNA (1)...(19): siRNA sense strand
ugagguuggucaauuuaaa

SEQ ID NO: 592248 - RNA, 19 nt, Homo sapiens
  misc_RNA (1)...(19): siRNA sense strand
ugaagaugcugguguuauc

SEQ ID NO: 592249 - RNA, 19 nt, Homo sapiens
  misc_RNA (1)...(19): siRNA sense strand
gaauggauacuacgagugu

SEQ ID NO: 592250 - RNA, 19 nt, Homo sapiens
  misc_RNA (1)...(19): siRNA sense strand
caacuguaaucaucgugaa

SEQ ID NO: 592251 - RNA, 19 nt, Homo sapiens
  misc_RNA (1)...(19): siRNA sense strand
cgccgaaccuggugauauu

SEQ ID NO: 592252 - RNA, 19 nt, Homo sapiens
  misc_RNA (1)...(19): siRNA sense strand
ccacagucauccuugaaau

SEQ ID NO: 592253 - RNA, 19 nt, Homo sapiens
  misc_RNA (1)...(19): siRNA sense strand
ccauccacguugcuaauaa

SEQ ID NO: 592254 - RNA, 19 nt, Homo sapiens
  misc_RNA (1)...(19): siRNA sense strand
caacuuaccggcauugaca

SEQ ID NO: 592255 - RNA, 19 nt, Homo sapiens
  misc_RNA (1)...(19): siRNA sense strand
gccagaggcuccuucacuu

SEQ ID NO: 592256 - RNA, 19 nt, Homo sapiens
  misc_RNA (1)...(19): siRNA sense strand
ugacugugaucuucagaga

SEQ ID NO: 592257 - RNA, 19 nt, Homo sapiens
  misc_RNA (1)...(19): siRNA sense strand
gaccacagcaucacaagga

SEQ ID NO: 592258 - RNA, 19 nt, Homo sapiens
  misc_RNA (1)...(19): siRNA sense strand
caucgacuauuccaacuuc

SEQ ID NO: 592259 - RNA, 19 nt, Homo sapiens
  misc_RNA (1)...(19): siRNA sense strand
ggaccugaauccaguuugg

SEQ ID NO: 592260 - RNA, 19 nt, Homo sapiens
  misc_RNA (1)...(19): siRNA sense strand
gaagugacaucaguuucca

SEQ ID NO: 592261 - RNA, 19 nt, Homo sapiens
  misc_RNA (1)...(19): siRNA sense strand
guugaaaucuuugauggau

SEQ ID NO: 592262 - RNA, 19 nt, Homo sapiens
  misc_RNA (1)...(19): siRNA sense strand
cauccuacccugcauacua

SEQ ID NO: 592263 - RNA, 19 nt, Homo sapiens
  misc_RNA (1)...(19): siRNA sense strand
uaaauucuacuacgacaga

SEQ ID NO: 592264 - RNA, 19 nt, Homo sapiens
  misc_RNA (1)...(19): siRNA sense strand
gcucagccacccaaauaaa

SEQ ID NO: 592265 - RNA, 19 nt, Homo sapiens
  misc_RNA (1)...(19): siRNA sense strand
gaugacuccuggaccauuc

SEQ ID NO: 592266 - RNA, 19 nt, Homo sapiens
  misc_RNA (1)...(19): siRNA sense strand
cuucagagauguccagcuu

SEQ ID NO: 592267 - RNA, 19 nt, Homo sapiens
  misc_RNA (1)...(19): siRNA sense strand
ggugucaucugcucagcuu

SEQ ID NO: 592268 - RNA, 19 nt, Homo sapiens
  misc_RNA (1)...(19): siRNA sense strand
gaaguccaguauggcaauu

SEQ ID NO: 592269 - RNA, 19 nt, Homo sapiens
  misc_RNA (1)...(19): siRNA sense strand
ucucauugcucgaguuugu

SEQ ID NO: 592270 - RNA, 19 nt, Homo sapiens
  misc_RNA (1)...(19): siRNA sense strand
ggaacuauccaaacaaugc

SEQ ID NO: 592271 - RNA, 19 nt, Homo sapiens
  misc_RNA (1)...(19): siRNA sense strand
ggugucaucugcucagcuu

SEQ ID NO: 592272 - RNA, 19 nt, Homo sapiens
  misc_RNA (1)...(19): siRNA sense strand
ggugucaucugcucagcuu

SEQ ID NO: 592273 - RNA, 19 nt, Homo sapiens
  misc_RNA (1)...(19): siRNA sense strand
gccaaccucucgugcauca

SEQ ID NO: 592274 - RNA, 19 nt, Homo sapiens
  misc_RNA (1)...(19): siRNA sense strand
guucagggccuuccacuuc

SEQ ID NO: 592275 - RNA, 19 nt, Homo sapiens
  misc_RNA (1)...(19): siRNA sense strand
cugaaauccuccauucuga

SEQ ID NO: 592276 - RNA, 19 nt, Homo sapiens
  misc_RNA (1)...(19): siRNA sense strand
gaaccaggacuuguacguu

SEQ ID NO: 592277 - RNA, 19 nt, Homo sapiens
  misc_RNA (1)...(19): siRNA sense strand
caaacaaugccaagugugu

SEQ ID NO: 592278 - RNA, 19 nt, Homo sapiens
  misc_RNA (1)...(19): siRNA sense strand
gaauccaguuuggcucuga

SEQ ID NO: 592279 - RNA, 19 nt, Homo sapiens
  misc_RNA (1)...(19): siRNA sense strand
gaguggagguccuauacca

SEQ ID NO: 592280 - RNA, 19 nt, Homo sapiens
  misc_RNA (1)...(19): siRNA sense strand
caacaucacccguccaaac

SEQ ID NO: 592281 - RNA, 19 nt, Homo sapiens
  misc_RNA (1)...(19): siRNA sense strand
aaugauaccaggcaaauau

SEQ ID NO: 592282 - RNA, 19 nt, Homo sapiens
  misc_RNA (1)...(19): siRNA sense strand
gaaauuggaggcacaccau

SEQ ID NO: 592283 - RNA, 19 nt, Homo sapiens
  misc_RNA (1)...(19): siRNA sense strand
gaguggagguccuguaucg

SEQ ID NO: 592284 - RNA, 19 nt, Homo sapiens
  misc_RNA (1)...(19): siRNA sense strand
gaguggagguccuauacca

SEQ ID NO: 592285 - RNA, 19 nt, Homo sapiens
  misc_RNA (1)...(19): siRNA sense strand
ccauugcccuggaugaugu

SEQ ID NO: 592286 - RNA, 19 nt, Homo sapiens
  misc_RNA (1)...(19): siRNA sense strand
ucaagcaggcagacaauga

SEQ ID NO: 592287 - RNA, 19 nt, Homo sapiens
  misc_RNA (1)...(19): siRNA sense strand
gaccucacaugcaucaaca

SEQ ID NO: 592288 - RNA, 19 nt, Homo sapiens
  misc_RNA (1)...(19): siRNA sense strand
caacuguggccaucaugaa

SEQ ID NO: 592289 - RNA, 19 nt, Homo sapiens
  misc_RNA (1)...(19): siRNA sense strand
aaccugggcuucaguaauc

SEQ ID NO: 592290 - RNA, 19 nt, Homo sapiens
  misc_RNA (1)...(19): siRNA sense strand
caacuguggccaucaugaa

SEQ ID NO: 592291 - RNA, 19 nt, Homo sapiens
  misc_RNA (1)...(19): siRNA sense strand
caacuguggccaucaugaa

SEQ ID NO: 592292 - RNA, 19 nt, Homo sapiens
  misc_RNA (1)...(19): siRNA sense strand
gggacaaguucuaucuaca

SEQ ID NO: 592293 - RNA, 19 nt, Homo sapiens
  misc_RNA (1)...(19): siRNA sense strand
gcugaaauccuccauucug

SEQ ID NO: 592294 - RNA, 19 nt, Homo sapiens
  misc_RNA (1)...(19): siRNA sense strand
acaaugacaccaucgacua

SEQ ID NO: 592295 - RNA, 19 nt, Homo sapiens
  misc_RNA (1)...(19): siRNA sense strand
gcauaaaccugggcuucag

SEQ ID NO: 592296 - RNA, 19 nt, Homo sapiens
  misc_RNA (1)...(19): siRNA sense strand
caacuguggccaucacgaa

SEQ ID NO: 592297 - RNA, 19 nt, Homo sapiens
  misc_RNA (1)...(19): siRNA sense strand
gauggaucauugaauagca

SEQ ID NO: 592298 - RNA, 19 nt, Homo sapiens
  misc_RNA (1)...(19): siRNA sense strand
ggcaaauauuuacaucuuc

SEQ ID NO: 592299 - RNA, 19 nt, Homo sapiens
  misc_RNA (1)...(19): siRNA sense strand
guaaugauaccaggcaaau

SEQ ID NO: 592300 - RNA, 19 nt, Homo sapiens
  misc_RNA (1)...(19): siRNA sense strand
cugcucagccacccaaaua

SEQ ID NO: 592301 - RNA, 19 nt, Homo sapiens
  misc_RNA (1)...(19): siRNA sense strand
ccguguaccugcguuguaa

SEQ ID NO: 592302 - RNA, 19 nt, Homo sapiens
  misc_RNA (1)...(19): siRNA sense strand
gacaccauguacauugcua

SEQ ID NO: 592303 - RNA, 19 nt, Homo sapiens
  misc_RNA (1)...(19): siRNA sense strand
uaucgacaccugcuccuuu

SEQ ID NO: 592304 - RNA, 19 nt, Homo sapiens
  misc_RNA (1)...(19): siRNA sense strand
ccaacaaugcuaagugugu

SEQ ID NO: 592305 - RNA, 19 nt, Homo sapiens
  misc_RNA (1)...(19): siRNA sense strand
gucuuugacuuaugaucua

SEQ ID NO: 592306 - RNA, 19 nt, Homo sapiens
  misc_RNA (1)...(19): siRNA sense strand
cgggaacuauccaaacaau

SEQ ID NO: 592307 - RNA, 19 nt, Homo sapiens
  misc_RNA (1)...(19): siRNA sense strand
ccaggcaaauauuuacauc

SEQ ID NO: 592308 - RNA, 19 nt, Homo sapiens
  misc_RNA (1)...(19): siRNA sense strand
ggacaaguucuaucuacag

SEQ ID NO: 592309 - RNA, 19 nt, Homo sapiens
  misc_RNA (1)...(19): siRNA sense strand
ucccacaacuguaaucauc

SEQ ID NO: 592310 - RNA, 19 nt, Homo sapiens
  misc_RNA (1)...(19): siRNA sense strand
cuaccgaggcuguguguug

SEQ ID NO: 592311 - RNA, 19 nt, Homo sapiens
  misc_RNA (1)...(19): siRNA sense strand
gcugcagaaugcuucagaa

SEQ ID NO: 592312 - RNA, 19 nt, Homo sapiens
  misc_RNA (1)...(19): siRNA sense strand
gaagguggcugcaacuaug

SEQ ID NO: 592313 - RNA, 19 nt, Homo sapiens
  misc_RNA (1)...(19): siRNA sense strand
ggacagaccuccguauuca

SEQ ID NO: 592314 - RNA, 19 nt, Homo sapiens
  misc_RNA (1)...(19): siRNA sense strand
gggaaaaucuguaaugaua

SEQ ID NO: 592315 - RNA, 19 nt, Homo sapiens
  misc_RNA (1)...(19): siRNA sense strand
ggagucaacuguagcagaa

SEQ ID NO: 592316 - RNA, 19 nt, Homo sapiens
  misc_RNA (1)...(19): siRNA sense strand
ggagucaacuguagcagaa

SEQ ID NO: 592317 - RNA, 19 nt, Homo sapiens
  misc_RNA (1)...(19): siRNA sense strand
ccaaugacuucacgucuuu

SEQ ID NO: 592318 - RNA, 19 nt, Homo sapiens
  misc_RNA (1)...(19): siRNA sense strand
agacuacgcuucacugauu

SEQ ID NO: 592319 - RNA, 19 nt, Homo sapiens
  misc_RNA (1)...(19): siRNA sense strand
gcucaggacacgagucuua

SEQ ID NO: 592320 - RNA, 19 nt, Homo sapiens
  misc_RNA (1)...(19): siRNA sense strand
gaauucugguuaucgcaua

SEQ ID NO: 592321 - RNA, 19 nt, Homo sapiens
  misc_RNA (1)...(19): siRNA sense strand
gcucaggacacgagucuua

SEQ ID NO: 592322 - RNA, 19 nt, Homo sapiens
  misc_RNA (1)...(19): siRNA sense strand
gcaccaaccugcucugucu

SEQ ID NO: 592323 - RNA, 19 nt, Homo sapiens
  misc_RNA (1)...(19): siRNA sense strand
cgaagacgcuggugucauc

SEQ ID NO: 592324 - RNA, 19 nt, Homo sapiens
  misc_RNA (1)...(19): siRNA sense strand
gauaccaggcaaauauuua

SEQ ID NO: 592325 - RNA, 19 nt, Homo sapiens
  misc_RNA (1)...(19): siRNA sense strand
ccagaaaguuggccuguca

SEQ ID NO: 592326 - RNA, 19 nt, Homo sapiens
  misc_RNA (1)...(19): siRNA sense strand
aaauugugguggcuucuua

SEQ ID NO: 592327 - RNA, 19 nt, Homo sapiens
  misc_RNA (1)...(19): siRNA sense strand
ucacgucuuugacuuauga

SEQ ID NO: 592328 - RNA, 19 nt, Homo sapiens
  misc_RNA (1)...(19): siRNA sense strand
ucagagauguccagcuuga

SEQ ID NO: 592329 - RNA, 19 nt, Homo sapiens
  misc_RNA (1)...(19): siRNA sense strand
ggacaccaaugaugccaau

SEQ ID NO: 592330 - RNA, 19 nt, Homo sapiens
  misc_RNA (1)...(19): siRNA sense strand
ggacaccaaugaugccaau

SEQ ID NO: 592331 - RNA, 19 nt, Homo sapiens
  misc_RNA (1)...(19): siRNA sense strand
ugaagacgcuggugucauc

SEQ ID NO: 592332 - RNA, 19 nt, Homo sapiens
  misc_RNA (1)...(19): siRNA sense strand
ggacaccaaugaugccaau

SEQ ID NO: 592333 - RNA, 19 nt, Homo sapiens
  misc_RNA (1)...(19): siRNA sense strand
ugaagacgcuggugucauc

SEQ ID NO: 592334 - RNA, 19 nt, Homo sapiens
  misc_RNA (1)...(19): siRNA sense strand
ggacaccaaugaugccaau

SEQ ID NO: 592335 - RNA, 19 nt, Homo sapiens
  misc_RNA (1)...(19): siRNA sense strand
ugaagacgcuggugucauc

SEQ ID NO: 592336 - RNA, 19 nt, Homo sapiens
  misc_RNA (1)...(19): siRNA sense strand
ggacaccaaugaugccaau

SEQ ID NO: 592337 - RNA, 19 nt, Homo sapiens
  misc_RNA (1)...(19): siRNA sense strand
ugaagacgcuggugucauc

SEQ ID NO: 592338 - RNA, 19 nt, Homo sapiens
  misc_RNA (1)...(19): siRNA sense strand
ggacaccaaugaugccaau

SEQ ID NO: 592339 - RNA, 19 nt, Homo sapiens
  misc_RNA (1)...(19): siRNA sense strand
ugaagacgcuggugucauc

SEQ ID NO: 592340 - RNA, 19 nt, Homo sapiens
  misc_RNA (1)...(19): siRNA sense strand
ggacaccaaugaugccaau

SEQ ID NO: 592341 - RNA, 19 nt, Homo sapiens
  misc_RNA (1)...(19): siRNA sense strand
ugaagacgcuggugucauc

SEQ ID NO: 592342 - RNA, 19 nt, Homo sapiens
  misc_RNA (1)...(19): siRNA sense strand
ugaagacgcuggugucauc

SEQ ID NO: 592343 - RNA, 19 nt, Homo sapiens
  misc_RNA (1)...(19): siRNA sense strand
ugaagacgcuggugucauc

SEQ ID NO: 592344 - RNA, 19 nt, Homo sapiens
  misc_RNA (1)...(19): siRNA sense strand
gaagugaauucugguuauc

SEQ ID NO: 592345 - RNA, 19 nt, Homo sapiens
  misc_RNA (1)...(19): siRNA sense strand
uaaguguguuugggaaaua

SEQ ID NO: 592346 - RNA, 19 nt, Homo sapiens
  misc_RNA (1)...(19): siRNA sense strand
gcagaaugcuucagaacac

SEQ ID NO: 592347 - RNA, 19 nt, Homo sapiens
  misc_RNA (1)...(19): siRNA sense strand
caugucagcuccaggaaau

SEQ ID NO: 592348 - RNA, 19 nt, Homo sapiens
  misc_RNA (1)...(19): siRNA sense strand
gaaauccuccauucugaug

SEQ ID NO: 592349 - RNA, 19 nt, Homo sapiens
  misc_RNA (1)...(19): siRNA sense strand
caaaacaacuaccguguga

SEQ ID NO: 592350 - RNA, 19 nt, Homo sapiens
  misc_RNA (1)...(19): siRNA sense strand
ggugucaucugcucaggaa

SEQ ID NO: 592351 - RNA, 19 nt, Homo sapiens
  misc_RNA (1)...(19): siRNA sense strand
ggacaccagugacgccaau

SEQ ID NO: 592352 - RNA, 19 nt, Homo sapiens
  misc_RNA (1)...(19): siRNA sense strand
ugagguuggucaauuuaaa

SEQ ID NO: 592353 - RNA, 19 nt, Homo sapiens
  misc_RNA (1)...(19): siRNA sense strand
ggacaccagugacgccaau

SEQ ID NO: 592354 - RNA, 19 nt, Homo sapiens
  misc_RNA (1)...(19): siRNA sense strand
ugaagaugcugguguuauc

SEQ ID NO: 592355 - RNA, 19 nt, Homo sapiens
  misc_RNA (1)...(19): siRNA sense strand
gaauggauacuacgagugu

SEQ ID NO: 592356 - RNA, 19 nt, Homo sapiens
  misc_RNA (1)...(19): siRNA sense strand
caacuguaaucaucgugaa

SEQ ID NO: 592357 - RNA, 19 nt, Homo sapiens
  misc_RNA (1)...(19): siRNA sense strand
cgccgaaccuggugauauu

SEQ ID NO: 592358 - RNA, 19 nt, Homo sapiens
  misc_RNA (1)...(19): siRNA sense strand
ccacagucauccuugaaau

SEQ ID NO: 592359 - RNA, 19 nt, Homo sapiens
  misc_RNA (1)...(19): siRNA sense strand
ccauccacguugcuaauaa

SEQ ID NO: 592360 - RNA, 19 nt, Homo sapiens
  misc_RNA (1)...(19): siRNA sense strand
caacuuaccggcauugaca

SEQ ID NO: 592361 - RNA, 19 nt, Homo sapiens
  misc_RNA (1)...(19): siRNA sense strand
gccagaggcuccuucacuu

SEQ ID NO: 592362 - RNA, 19 nt, Homo sapiens
  misc_RNA (1)...(19): siRNA sense strand
ugacugugaucuucagaga

SEQ ID NO: 592363 - RNA, 19 nt, Homo sapiens
  misc_RNA (1)...(19): siRNA sense strand
gaccacagcaucacaagga

SEQ ID NO: 592364 - RNA, 19 nt, Homo sapiens
  misc_RNA (1)...(19): siRNA sense strand
caucgacuauuccaacuuc

SEQ ID NO: 592365 - RNA, 19 nt, Homo sapiens
  misc_RNA (1)...(19): siRNA sense strand
ggaccugaauccaguuugg

SEQ ID NO: 592366 - RNA, 19 nt, Homo sapiens
  misc_RNA (1)...(19): siRNA sense strand
gaagugacaucaguuucca

SEQ ID NO: 592367 - RNA, 19 nt, Homo sapiens
  misc_RNA (1)...(19): siRNA sense strand
guugaaaucuuugauggau

SEQ ID NO: 592368 - RNA, 19 nt, Homo sapiens
  misc_RNA (1)...(19): siRNA sense strand
cauccuacccugcauacua

SEQ ID NO: 592369 - RNA, 19 nt, Homo sapiens
  misc_RNA (1)...(19): siRNA sense strand
uaaauucuacuacgacaga

SEQ ID NO: 592370 - RNA, 19 nt, Homo sapiens
  misc_RNA (1)...(19): siRNA sense strand
gcucagccacccaaauaaa

SEQ ID NO: 592371 - RNA, 19 nt, Homo sapiens
  misc_RNA (1)...(19): siRNA sense strand
ggaccugaauccaguuugg

SEQ ID NO: 592372 - RNA, 19 nt, Homo sapiens
  misc_RNA (1)...(19): siRNA sense strand
gaugacuccuggaccauuc

SEQ ID NO: 592373 - RNA, 19 nt, Homo sapiens
  misc_RNA (1)...(19): siRNA sense strand
cuucagagauguccagcuu

SEQ ID NO: 592374 - RNA, 19 nt, Homo sapiens
  misc_RNA (1)...(19): siRNA sense strand
ggugucaucugcucagcuu

SEQ ID NO: 592375 - RNA, 19 nt, Homo sapiens
  misc_RNA (1)...(19): siRNA sense strand
gaaguccaguauggcaauu

SEQ ID NO: 592376 - RNA, 19 nt, Homo sapiens
  misc_RNA (1)...(19): siRNA sense strand
ucucauugcucgaguuugu

SEQ ID NO: 592377 - RNA, 19 nt, Homo sapiens
  misc_RNA (1)...(19): siRNA sense strand
ggaacuauccaaacaaugc

SEQ ID NO: 592378 - RNA, 19 nt, Homo sapiens
  misc_RNA (1)...(19): siRNA sense strand
ggugucaucugcucagcuu

SEQ ID NO: 592379 - RNA, 19 nt, Homo sapiens
  misc_RNA (1)...(19): siRNA sense strand
ggugucaucugcucagcuu

SEQ ID NO: 592380 - RNA, 19 nt, Homo sapiens
  misc_RNA (1)...(19): siRNA sense strand
ggugucaucugcucagcuu

SEQ ID NO: 592381 - RNA, 19 nt, Homo sapiens
  misc_RNA (1)...(19): siRNA sense strand
gccaaccucucgugcauca

SEQ ID NO: 592382 - RNA, 19 nt, Homo sapiens
  misc_RNA (1)...(19): siRNA sense strand
guucagggccuuccacuuc

SEQ ID NO: 592383 - RNA, 19 nt, Homo sapiens
  misc_RNA (1)...(19): siRNA sense strand
cugaaauccuccauucuga

SEQ ID NO: 592384 - RNA, 19 nt, Homo sapiens
  misc_RNA (1)...(19): siRNA sense strand
gaaccaggacuuguacguu

SEQ ID NO: 592385 - RNA, 19 nt, Homo sapiens
  misc_RNA (1)...(19): siRNA sense strand
caaacaaugccaagugugu

SEQ ID NO: 592386 - RNA, 19 nt, Homo sapiens
  misc_RNA (1)...(19): siRNA sense strand
gaauccaguuuggcucuga

SEQ ID NO: 592387 - RNA, 19 nt, Homo sapiens
  misc_RNA (1)...(19): siRNA sense strand
gaguggagguccuauacca

SEQ ID NO: 592388 - RNA, 19 nt, Homo sapiens
  misc_RNA (1)...(19): siRNA sense strand
caacaucacccguccaaac

SEQ ID NO: 592389 - RNA, 19 nt, Homo sapiens
  misc_RNA (1)...(19): siRNA sense strand
aaugauaccaggcaaauau

SEQ ID NO: 592390 - RNA, 19 nt, Homo sapiens
  misc_RNA (1)...(19): siRNA sense strand
gaaauuggaggcacaccau

SEQ ID NO: 592391 - RNA, 19 nt, Homo sapiens
  misc_RNA (1)...(19): siRNA sense strand
gaguggagguccuguaucg

SEQ ID NO: 592392 - RNA, 19 nt, Homo sapiens
  misc_RNA (1)...(19): siRNA sense strand
gaguggagguccuauacca

SEQ ID NO: 592393 - RNA, 19 nt, Homo sapiens
  misc_RNA (1)...(19): siRNA sense strand
ccauugcccuggaugaugu

SEQ ID NO: 592394 - RNA, 19 nt, Homo sapiens
  misc_RNA (1)...(19): siRNA sense strand
ucaagcaggcagacaauga

SEQ ID NO: 592395 - RNA, 19 nt, Homo sapiens
  misc_RNA (1)...(19): siRNA sense strand
gaccucacaugcaucaaca

SEQ ID NO: 592396 - RNA, 19 nt, Homo sapiens
  misc_RNA (1)...(19): siRNA sense strand
gaccucacaugcaucaaca

SEQ ID NO: 592397 - RNA, 19 nt, Homo sapiens
  misc_RNA (1)...(19): siRNA sense strand
caacuguggccaucaugaa

SEQ ID NO: 592398 - RNA, 19 nt, Homo sapiens
  misc_RNA (1)...(19): siRNA sense strand
aaccugggcuucaguaauc

SEQ ID NO: 592399 - RNA, 19 nt, Homo sapiens
  misc_RNA (1)...(19): siRNA sense strand
caacuguggccaucaugaa

SEQ ID NO: 592400 - RNA, 19 nt, Homo sapiens
  misc_RNA (1)...(19): siRNA sense strand
caacuguggccaucaugaa

SEQ ID NO: 592401 - RNA, 19 nt, Homo sapiens
  misc_RNA (1)...(19): siRNA sense strand
caacuguggccaucaugaa

SEQ ID NO: 592402 - RNA, 19 nt, Homo sapiens
  misc_RNA (1)...(19): siRNA sense strand
caacuguggccaucaugaa

SEQ ID NO: 592403 - RNA, 19 nt, Homo sapiens
  misc_RNA (1)...(19): siRNA sense strand
caacuguggccaucaugaa

SEQ ID NO: 592404 - RNA, 19 nt, Homo sapiens
  misc_RNA (1)...(19): siRNA sense strand
gggacaaguucuaucuaca

SEQ ID NO: 592405 - RNA, 19 nt, Homo sapiens
  misc_RNA (1)...(19): siRNA sense strand
gcugaaauccuccauucug

SEQ ID NO: 592406 - RNA, 19 nt, Homo sapiens
  misc_RNA (1)...(19): siRNA sense strand
acaaugacaccaucgacua

SEQ ID NO: 592407 - RNA, 19 nt, Homo sapiens
  misc_RNA (1)...(19): siRNA sense strand
gcauaaaccugggcuucag

SEQ ID NO: 592408 - RNA, 19 nt, Homo sapiens
  misc_RNA (1)...(19): siRNA sense strand
caacuguggccaucacgaa

SEQ ID NO: 592409 - RNA, 19 nt, Homo sapiens
  misc_RNA (1)...(19): siRNA sense strand
gauggaucauugaauagca

SEQ ID NO: 592410 - RNA, 19 nt, Homo sapiens
  misc_RNA (1)...(19): siRNA sense strand
ggcaaauauuuacaucuuc

SEQ ID NO: 592411 - RNA, 19 nt, Homo sapiens
  misc_RNA (1)...(19): siRNA sense strand
guaaugauaccaggcaaau

SEQ ID NO: 592412 - RNA, 19 nt, Homo sapiens
  misc_RNA (1)...(19): siRNA sense strand
gaagguggcugcaacuaug

SEQ ID NO: 592413 - RNA, 19 nt, Homo sapiens
  misc_RNA (1)...(19): siRNA sense strand
ggacagaccuccguauuca

SEQ ID NO: 592414 - RNA, 19 nt, Homo sapiens
  misc_RNA (1)...(19): siRNA sense strand
gggaaaaucuguaaugaua

SEQ ID NO: 592415 - RNA, 19 nt, Homo sapiens
  misc_RNA (1)...(19): siRNA sense strand
ggagucaacuguagcagaa

SEQ ID NO: 592416 - RNA, 19 nt, Homo sapiens
  misc_RNA (1)...(19): siRNA sense strand
ggagucaacuguagcagaa

SEQ ID NO: 592417 - RNA, 19 nt, Homo sapiens
  misc_RNA (1)...(19): siRNA sense strand
ccaaugacuucacgucuuu

SEQ ID NO: 592418 - RNA, 19 nt, Homo sapiens
  misc_RNA (1)...(19): siRNA sense strand
agacuacgcuucacugauu

SEQ ID NO: 592419 - RNA, 19 nt, Homo sapiens
  misc_RNA (1)...(19): siRNA sense strand
gcucaggacacgagucuua

SEQ ID NO: 592420 - RNA, 19 nt, Homo sapiens
  misc_RNA (1)...(19): siRNA sense strand
gaauucugguuaucgcaua

SEQ ID NO: 592421 - RNA, 19 nt, Homo sapiens
  misc_RNA (1)...(19): siRNA sense strand
gcucaggacacgagucuua

SEQ ID NO: 592422 - RNA, 19 nt, Homo sapiens
  misc_RNA (1)...(19): siRNA sense strand
gcaccaaccugcucugucu

SEQ ID NO: 592423 - RNA, 19 nt, Homo sapiens
  misc_RNA (1)...(19): siRNA sense strand
cgaagacgcuggugucauc

SEQ ID NO: 592424 - RNA, 19 nt, Homo sapiens
  misc_RNA (1)...(19): siRNA sense strand
gauaccaggcaaauauuua

SEQ ID NO: 592425 - RNA, 19 nt, Homo sapiens
  misc_RNA (1)...(19): siRNA sense strand
ccagaaaguuggccuguca

SEQ ID NO: 592426 - RNA, 19 nt, Homo sapiens
  misc_RNA (1)...(19): siRNA sense strand
aaauugugguggcuucuua

SEQ ID NO: 592427 - RNA, 19 nt, Homo sapiens
  misc_RNA (1)...(19): siRNA sense strand
ucacgucuuugacuuauga

SEQ ID NO: 592428 - RNA, 19 nt, Homo sapiens
  misc_RNA (1)...(19): siRNA sense strand
ucagagauguccagcuuga

SEQ ID NO: 592429 - RNA, 19 nt, Homo sapiens
  misc_RNA (1)...(19): siRNA sense strand
ggacaccaaugaugccaau

SEQ ID NO: 592430 - RNA, 19 nt, Homo sapiens
  misc_RNA (1)...(19): siRNA sense strand
ggacaccaaugaugccaau

SEQ ID NO: 592431 - RNA, 19 nt, Homo sapiens
  misc_RNA (1)...(19): siRNA sense strand
ugaagacgcuggugucauc

SEQ ID NO: 592432 - RNA, 19 nt, Homo sapiens
  misc_RNA (1)...(19): siRNA sense strand
ggacaccaaugaugccaau

SEQ ID NO: 592433 - RNA, 19 nt, Homo sapiens
  misc_RNA (1)...(19): siRNA sense strand
ugaagacgcuggugucauc

SEQ ID NO: 592434 - RNA, 19 nt, Homo sapiens
  misc_RNA (1)...(19): siRNA sense strand
ggacaccaaugaugccaau

SEQ ID NO: 592435 - RNA, 19 nt, Homo sapiens
  misc_RNA (1)...(19): siRNA sense strand
ugaagacgcuggugucauc

SEQ ID NO: 592436 - RNA, 19 nt, Homo sapiens
  misc_RNA (1)...(19): siRNA sense strand
ggacaccaaugaugccaau

SEQ ID NO: 592437 - RNA, 19 nt, Homo sapiens
  misc_RNA (1)...(19): siRNA sense strand
ugaagacgcuggugucauc

SEQ ID NO: 592438 - RNA, 19 nt, Homo sapiens
  misc_RNA (1)...(19): siRNA sense strand
ggacaccaaugaugccaau

SEQ ID NO: 592439 - RNA, 19 nt, Homo sapiens
  misc_RNA (1)...(19): siRNA sense strand
ugaagacgcuggugucauc

SEQ ID NO: 592440 - RNA, 19 nt, Homo sapiens
  misc_RNA (1)...(19): siRNA sense strand
ggacaccaaugaugccaau

SEQ ID NO: 592441 - RNA, 19 nt, Homo sapiens
  misc_RNA (1)...(19): siRNA sense strand
ugaagacgcuggugucauc

SEQ ID NO: 592442 - RNA, 19 nt, Homo sapiens
  misc_RNA (1)...(19): siRNA sense strand
ugaagacgcuggugucauc

SEQ ID NO: 592443 - RNA, 19 nt, Homo sapiens
  misc_RNA (1)...(19): siRNA sense strand
ugaagacgcuggugucauc

SEQ ID NO: 592444 - RNA, 19 nt, Homo sapiens
  misc_RNA (1)...(19): siRNA sense strand
gaagugaauucugguuauc

SEQ ID NO: 592445 - RNA, 19 nt, Homo sapiens
  misc_RNA (1)...(19): siRNA sense strand
uaaguguguuugggaaaua

SEQ ID NO: 592446 - RNA, 19 nt, Homo sapiens
  misc_RNA (1)...(19): siRNA sense strand
gcagaaugcuucagaacac

SEQ ID NO: 592447 - RNA, 19 nt, Homo sapiens
  misc_RNA (1)...(19): siRNA sense strand
caugucagcuccaggaaau

SEQ ID NO: 592448 - RNA, 19 nt, Homo sapiens
  misc_RNA (1)...(19): siRNA sense strand
gaaauccuccauucugaug

SEQ ID NO: 592449 - RNA, 19 nt, Homo sapiens
  misc_RNA (1)...(19): siRNA sense strand
caaaacaacuaccguguga

SEQ ID NO: 592450 - RNA, 19 nt, Homo sapiens
  misc_RNA (1)...(19): siRNA sense strand
ggugucaucugcucaggaa

SEQ ID NO: 592451 - RNA, 19 nt, Homo sapiens
  misc_RNA (1)...(19): siRNA sense strand
ggacaccagugacgccaau

SEQ ID NO: 592452 - RNA, 19 nt, Homo sapiens
  misc_RNA (1)...(19): siRNA sense strand
ugagguuggucaauuuaaa

SEQ ID NO: 592453 - RNA, 19 nt, Homo sapiens
  misc_RNA (1)...(19): siRNA sense strand
ggacaccagugacgccaau

SEQ ID NO: 592454 - RNA, 19 nt, Homo sapiens
  misc_RNA (1)...(19): siRNA sense strand
ugaagaugcugguguuauc

SEQ ID NO: 592455 - RNA, 19 nt, Homo sapiens
  misc_RNA (1)...(19): siRNA sense strand
gaauggauacuacgagugu

SEQ ID NO: 592456 - RNA, 19 nt, Homo sapiens
  misc_RNA (1)...(19): siRNA sense strand
caacuguaaucaucgugaa

SEQ ID NO: 592457 - RNA, 19 nt, Homo sapiens
  misc_RNA (1)...(19): siRNA sense strand
cgccgaaccuggugauauu

SEQ ID NO: 592458 - RNA, 19 nt, Homo sapiens
  misc_RNA (1)...(19): siRNA sense strand
ccacagucauccuugaaau

SEQ ID NO: 592459 - RNA, 19 nt, Homo sapiens
  misc_RNA (1)...(19): siRNA sense strand
ccauccacguugcuaauaa

SEQ ID NO: 592460 - RNA, 19 nt, Homo sapiens
  misc_RNA (1)...(19): siRNA sense strand
caacuuaccggcauugaca

SEQ ID NO: 592461 - RNA, 19 nt, Homo sapiens
  misc_RNA (1)...(19): siRNA sense strand
gccagaggcuccuucacuu

SEQ ID NO: 592462 - RNA, 19 nt, Homo sapiens
  misc_RNA (1)...(19): siRNA sense strand
ugacugugaucuucagaga

SEQ ID NO: 592463 - RNA, 19 nt, Homo sapiens
  misc_RNA (1)...(19): siRNA sense strand
gaccacagcaucacaagga

SEQ ID NO: 592464 - RNA, 19 nt, Homo sapiens
  misc_RNA (1)...(19): siRNA sense strand
caucgacuauuccaacuuc

SEQ ID NO: 592465 - RNA, 19 nt, Homo sapiens
  misc_RNA (1)...(19): siRNA sense strand
ggaccugaauccaguuugg

SEQ ID NO: 592466 - RNA, 19 nt, Homo sapiens
  misc_RNA (1)...(19): siRNA sense strand
gaagugacaucaguuucca

SEQ ID NO: 592467 - RNA, 19 nt, Homo sapiens
  misc_RNA (1)...(19): siRNA sense strand
guugaaaucuuugauggau

SEQ ID NO: 592468 - RNA, 19 nt, Homo sapiens
  misc_RNA (1)...(19): siRNA sense strand
cauccuacccugcauacua

SEQ ID NO: 592469 - RNA, 19 nt, Homo sapiens
  misc_RNA (1)...(19): siRNA sense strand
uaaauucuacuacgacaga

SEQ ID NO: 592470 - RNA, 19 nt, Homo sapiens
  misc_RNA (1)...(19): siRNA sense strand
gcucagccacccaaauaaa

SEQ ID NO: 592471 - RNA, 19 nt, Homo sapiens
  misc_RNA (1)...(19): siRNA sense strand
ggaccugaauccaguuugg

SEQ ID NO: 592472 - RNA, 19 nt, Homo sapiens
  misc_RNA (1)...(19): siRNA sense strand
gaugacuccuggaccauuc

SEQ ID NO: 592473 - RNA, 19 nt, Homo sapiens
  misc_RNA (1)...(19): siRNA sense strand
cuucagagauguccagcuu

SEQ ID NO: 592474 - RNA, 19 nt, Homo sapiens
  misc_RNA (1)...(19): siRNA sense strand
ggugucaucugcucagcuu

SEQ ID NO: 592475 - RNA, 19 nt, Homo sapiens
  misc_RNA (1)...(19): siRNA sense strand
gaaguccaguauggcaauu

SEQ ID NO: 592476 - RNA, 19 nt, Homo sapiens
  misc_RNA (1)...(19): siRNA sense strand
ucucauugcucgaguuugu

SEQ ID NO: 592477 - RNA, 19 nt, Homo sapiens
  misc_RNA (1)...(19): siRNA sense strand
ggaacuauccaaacaaugc

SEQ ID NO: 592478 - RNA, 19 nt, Homo sapiens
  misc_RNA (1)...(19): siRNA sense strand
ggugucaucugcucagcuu

SEQ ID NO: 592479 - RNA, 19 nt, Homo sapiens
  misc_RNA (1)...(19): siRNA sense strand
ggugucaucugcucagcuu

SEQ ID NO: 592480 - RNA, 19 nt, Homo sapiens
  misc_RNA (1)...(19): siRNA sense strand
ggugucaucugcucagcuu

SEQ ID NO: 592481 - RNA, 19 nt, Homo sapiens
  misc_RNA (1)...(19): siRNA sense strand
gccaaccucucgugcauca

SEQ ID NO: 592482 - RNA, 19 nt, Homo sapiens
  misc_RNA (1)...(19): siRNA sense strand
guucagggccuuccacuuc

SEQ ID NO: 592483 - RNA, 19 nt, Homo sapiens
  misc_RNA (1)...(19): siRNA sense strand
cugaaauccuccauucuga

SEQ ID NO: 592484 - RNA, 19 nt, Homo sapiens
  misc_RNA (1)...(19): siRNA sense strand
gaaccaggacuuguacguu

SEQ ID NO: 592485 - RNA, 19 nt, Homo sapiens
  misc_RNA (1)...(19): siRNA sense strand
caaacaaugccaagugugu

SEQ ID NO: 592486 - RNA, 19 nt, Homo sapiens
  misc_RNA (1)...(19): siRNA sense strand
gaauccaguuuggcucuga

SEQ ID NO: 592487 - RNA, 19 nt, Homo sapiens
  misc_RNA (1)...(19): siRNA sense strand
gaguggagguccuauacca

SEQ ID NO: 592488 - RNA, 19 nt, Homo sapiens
  misc_RNA (1)...(19): siRNA sense strand
caacaucacccguccaaac

SEQ ID NO: 592489 - RNA, 19 nt, Homo sapiens
  misc_RNA (1)...(19): siRNA sense strand
aaugauaccaggcaaauau

SEQ ID NO: 592490 - RNA, 19 nt, Homo sapiens
  misc_RNA (1)...(19): siRNA sense strand
gaaauuggaggcacaccau

SEQ ID NO: 592491 - RNA, 19 nt, Homo sapiens
  misc_RNA (1)...(19): siRNA sense strand
gaguggagguccuguaucg

SEQ ID NO: 592492 - RNA, 19 nt, Homo sapiens
  misc_RNA (1)...(19): siRNA sense strand
gaguggagguccuauacca

SEQ ID NO: 592493 - RNA, 19 nt, Homo sapiens
  misc_RNA (1)...(19): siRNA sense strand
ccauugcccuggaugaugu

SEQ ID NO: 592494 - RNA, 19 nt, Homo sapiens
  misc_RNA (1)...(19): siRNA sense strand
ucaagcaggcagacaauga

SEQ ID NO: 592495 - RNA, 19 nt, Homo sapiens
  misc_RNA (1)...(19): siRNA sense strand
ccauugcccuggaugaugu

SEQ ID NO: 592496 - RNA, 19 nt, Homo sapiens
  misc_RNA (1)...(19): siRNA sense strand
gaccucacaugcaucaaca

SEQ ID NO: 592497 - RNA, 19 nt, Homo sapiens
  misc_RNA (1)...(19): siRNA sense strand
gaccucacaugcaucaaca

SEQ ID NO: 592498 - RNA, 19 nt, Homo sapiens
  misc_RNA (1)...(19): siRNA sense strand
caacuguggccaucaugaa

SEQ ID NO: 592499 - RNA, 19 nt, Homo sapiens
  misc_RNA (1)...(19): siRNA sense strand
aaccugggcuucaguaauc

SEQ ID NO: 592500 - RNA, 19 nt, Homo sapiens
  misc_RNA (1)...(19): siRNA sense strand
caacuguggccaucaugaa

SEQ ID NO: 592501 - RNA, 19 nt, Homo sapiens
  misc_RNA (1)...(19): siRNA sense strand
caacuguggccaucaugaa

SEQ ID NO: 592502 - RNA, 19 nt, Homo sapiens
  misc_RNA (1)...(19): siRNA sense strand
caacuguggccaucaugaa

SEQ ID NO: 592503 - RNA, 19 nt, Homo sapiens
  misc_RNA (1)...(19): siRNA sense strand
caacuguggccaucaugaa

SEQ ID NO: 592504 - RNA, 19 nt, Homo sapiens
  misc_RNA (1)...(19): siRNA sense strand
caacuguggccaucaugaa

SEQ ID NO: 592505 - RNA, 19 nt, Homo sapiens
  misc_RNA (1)...(19): siRNA sense strand
gggacaaguucuaucuaca

SEQ ID NO: 592506 - RNA, 19 nt, Homo sapiens
  misc_RNA (1)...(19): siRNA sense strand
gcugaaauccuccauucug

SEQ ID NO: 592507 - RNA, 19 nt, Homo sapiens
  misc_RNA (1)...(19): siRNA sense strand
acaaugacaccaucgacua

SEQ ID NO: 592508 - RNA, 19 nt, Homo sapiens
  misc_RNA (1)...(19): siRNA sense strand
gcauaaaccugggcuucag

SEQ ID NO: 592509 - RNA, 19 nt, Homo sapiens
  misc_RNA (1)...(19): siRNA sense strand
caacuguggccaucacgaa

SEQ ID NO: 592510 - RNA, 19 nt, Homo sapiens
  misc_RNA (1)...(19): siRNA sense strand
guaaugauaccaggcaaau

SEQ ID NO: 592511 - RNA, 19 nt, Homo sapiens
  misc_RNA (1)...(19): siRNA sense strand
ggcaaauauuuacaucuuc

SEQ ID NO: 592512 - RNA, 19 nt, Homo sapiens
  misc_RNA (1)...(19): siRNA sense strand
gcagggagauuggagauua

SEQ ID NO: 592513 - RNA, 19 nt, Homo sapiens
  misc_RNA (1)...(19): siRNA sense strand
gaacauagaccugauauau

SEQ ID NO: 592514 - RNA, 19 nt, Homo sapiens
  misc_RNA (1)...(19): siRNA sense strand
ggacugugcuguuaauuca

SEQ ID NO: 592515 - RNA, 19 nt, Homo sapiens
  misc_RNA (1)...(19): siRNA sense strand
ggaacuauguacuuuguga

SEQ ID NO: 592516 - RNA, 19 nt, Homo sapiens
  misc_RNA (1)...(19): siRNA sense strand
gaaaugaucaaccuuuaug

SEQ ID NO: 592517 - RNA, 19 nt, Homo sapiens
  misc_RNA (1)...(19): siRNA sense strand
gaggauaauuucucuaagu

SEQ ID NO: 592518 - RNA, 19 nt, Homo sapiens
  misc_RNA (1)...(19): siRNA sense strand
ggacagagaauuugaccuu

SEQ ID NO: 592519 - RNA, 19 nt, Homo sapiens
  misc_RNA (1)...(19): siRNA sense strand
ccagaaguguuacagauau

SEQ ID NO: 592520 - RNA, 19 nt, Homo sapiens
  misc_RNA (1)...(19): siRNA sense strand
gcacugggaugucuacucu

SEQ ID NO: 592521 - RNA, 19 nt, Homo sapiens
  misc_RNA (1)...(19): siRNA sense strand
ggaaguccuuaucuuaaug

SEQ ID NO: 592522 - RNA, 19 nt, Homo sapiens
  misc_RNA (1)...(19): siRNA sense strand
guguaagacuccaauaauu

SEQ ID NO: 592523 - RNA, 19 nt, Homo sapiens
  misc_RNA (1)...(19): siRNA sense strand
ggaauccgaugugcauuga

SEQ ID NO: 592524 - RNA, 19 nt, Homo sapiens
  misc_RNA (1)...(19): siRNA sense strand
gcacuaagaccuggaaaug

SEQ ID NO: 592525 - RNA, 19 nt, Homo sapiens
  misc_RNA (1)...(19): siRNA sense strand
ggacagguagugaaucaaa

SEQ ID NO: 592526 - RNA, 19 nt, Homo sapiens
  misc_RNA (1)...(19): siRNA sense strand
gggaaguccuuaucuuaau

SEQ ID NO: 592527 - RNA, 19 nt, Homo sapiens
  misc_RNA (1)...(19): siRNA sense strand
cuacaaugaugccgcagua

SEQ ID NO: 592528 - RNA, 19 nt, Homo sapiens
  misc_RNA (1)...(19): siRNA sense strand
ggaaacccaucaccaccaa

SEQ ID NO: 592529 - RNA, 19 nt, Homo sapiens
  misc_RNA (1)...(19): siRNA sense strand
auaauggacuccuccuaua

SEQ ID NO: 592530 - RNA, 19 nt, Homo sapiens
  misc_RNA (1)...(19): siRNA sense strand
gguagugaaucaaaugaau

SEQ ID NO: 592531 - RNA, 19 nt, Homo sapiens
  misc_RNA (1)...(19): siRNA sense strand
gaauuugaccuucuaagau

SEQ ID NO: 592532 - RNA, 19 nt, Homo sapiens
  misc_RNA (1)...(19): siRNA sense strand
aagaggccauugcaaauuu

SEQ ID NO: 592533 - RNA, 19 nt, Homo sapiens
  misc_RNA (1)...(19): siRNA sense strand
ugggaugucuacucuauaa

SEQ ID NO: 592534 - RNA, 19 nt, Homo sapiens
  misc_RNA (1)...(19): siRNA sense strand
cugaaaugaucaaccuuua

SEQ ID NO: 592535 - RNA, 19 nt, Homo sapiens
  misc_RNA (1)...(19): siRNA sense strand
ggugggaacuauguacuuu

SEQ ID NO: 592536 - RNA, 19 nt, Homo sapiens
  misc_RNA (1)...(19): siRNA sense strand
uaauaagguucaugcuuga

SEQ ID NO: 592537 - RNA, 19 nt, Homo sapiens
  misc_RNA (1)...(19): siRNA sense strand
agagcuaucuggucacaaa

SEQ ID NO: 592538 - RNA, 19 nt, Homo sapiens
  misc_RNA (1)...(19): siRNA sense strand
cagaauaacagauaccauu

SEQ ID NO: 592539 - RNA, 19 nt, Homo sapiens
  misc_RNA (1)...(19): siRNA sense strand
uaacagaagaggaacuauu

SEQ ID NO: 592540 - RNA, 19 nt, Homo sapiens
  misc_RNA (1)...(19): siRNA sense strand
ccugauauauuucaagugu

SEQ ID NO: 592541 - RNA, 19 nt, Homo sapiens
  misc_RNA (1)...(19): siRNA sense strand
caacacagcagcaacagau

SEQ ID NO: 592542 - RNA, 19 nt, Homo sapiens
  misc_RNA (1)...(19): siRNA sense strand
ugaauucgguaaccauaga

SEQ ID NO: 592543 - RNA, 19 nt, Homo sapiens
  misc_RNA (1)...(19): siRNA sense strand
caagguugcaucaguguaa

SEQ ID NO: 592544 - RNA, 19 nt, Homo sapiens
  misc_RNA (1)...(19): siRNA sense strand
gaguuaauguaguagaaga

SEQ ID NO: 592545 - RNA, 19 nt, Homo sapiens
  misc_RNA (1)...(19): siRNA sense strand
guccuuaucuuaauggaau

SEQ ID NO: 592546 - RNA, 19 nt, Homo sapiens
  misc_RNA (1)...(19): siRNA sense strand
uaaguuaacagaagaggaa

SEQ ID NO: 592547 - RNA, 19 nt, Homo sapiens
  misc_RNA (1)...(19): siRNA sense strand
gauuacagcaacuccauuu

SEQ ID NO: 592548 - RNA, 19 nt, Homo sapiens
  misc_RNA (1)...(19): siRNA sense strand
uacagaaccagaaguguua

SEQ ID NO: 592549 - RNA, 19 nt, Homo sapiens
  misc_RNA (1)...(19): siRNA sense strand
agauggaguuaauguagua

SEQ ID NO: 592550 - RNA, 19 nt, Homo sapiens
  misc_RNA (1)...(19): siRNA sense strand
ccagugugcugaccauuca

SEQ ID NO: 592551 - RNA, 19 nt, Homo sapiens
  misc_RNA (1)...(19): siRNA sense strand
gugaagcuguugcaagguu

SEQ ID NO: 592552 - RNA, 19 nt, Homo sapiens
  misc_RNA (1)...(19): siRNA sense strand
uaaagaggccauugcaaau

SEQ ID NO: 592553 - RNA, 19 nt, Homo sapiens
  misc_RNA (1)...(19): siRNA sense strand
ugccagaccucaauguuug

SEQ ID NO: 592554 - RNA, 19 nt, Homo sapiens
  misc_RNA (1)...(19): siRNA sense strand
gaccugauauauuucaagu

SEQ ID NO: 592555 - RNA, 19 nt, Homo sapiens
  misc_RNA (1)...(19): siRNA sense strand
cuauguacuuugugacuuu

SEQ ID NO: 592556 - RNA, 19 nt, Homo sapiens
  misc_RNA (1)...(19): siRNA sense strand
gaaugauggugggaacuau

SEQ ID NO: 592557 - RNA, 19 nt, Homo sapiens
  misc_RNA (1)...(19): siRNA sense strand
gcgaauguaugucaauaac

SEQ ID NO: 592558 - RNA, 19 nt, Homo sapiens
  misc_RNA (1)...(19): siRNA sense strand
caauccaccugauauguca

SEQ ID NO: 592559 - RNA, 19 nt, Homo sapiens
  misc_RNA (1)...(19): siRNA sense strand
ggcaucaccugaauaucuu

SEQ ID NO: 592560 - RNA, 19 nt, Homo sapiens
  misc_RNA (1)...(19): siRNA sense strand
caacagaugcuucaacaac

SEQ ID NO: 592561 - RNA, 19 nt, Homo sapiens
  misc_RNA (1)...(19): siRNA sense strand
caacagaaaccucaauugc

SEQ ID NO: 592562 - RNA, 19 nt, Homo sapiens
  misc_RNA (1)...(19): siRNA sense strand
guaagacuccaauaauuca

SEQ ID NO: 592563 - RNA, 19 nt, Homo sapiens
  misc_RNA (1)...(19): siRNA sense strand
uauuuggacugugcuguua

SEQ ID NO: 592564 - RNA, 19 nt, Homo sapiens
  misc_RNA (1)...(19): siRNA sense strand
ucacaaaucagaagaacau

SEQ ID NO: 592565 - RNA, 19 nt, Homo sapiens
  misc_RNA (1)...(19): siRNA sense strand
uaacaugccagaccucaau

SEQ ID NO: 592566 - RNA, 19 nt, Homo sapiens
  misc_RNA (1)...(19): siRNA sense strand
auaaagaggccauugcaaa

SEQ ID NO: 592567 - RNA, 19 nt, Homo sapiens
  misc_RNA (1)...(19): siRNA sense strand
ucagcaggcuuucuuucaa

SEQ ID NO: 592568 - RNA, 19 nt, Homo sapiens
  misc_RNA (1)...(19): siRNA sense strand
gcaacuccauuuacagcau

SEQ ID NO: 592569 - RNA, 19 nt, Homo sapiens
  misc_RNA (1)...(19): siRNA sense strand
gaaccagaaguguuacaga

SEQ ID NO: 592570 - RNA, 19 nt, Homo sapiens
  misc_RNA (1)...(19): siRNA sense strand
ucuccaacaucaauaauuc

SEQ ID NO: 592571 - RNA, 19 nt, Homo sapiens
  misc_RNA (1)...(19): siRNA sense strand
caaccuuuauggagggaaa

SEQ ID NO: 592572 - RNA, 19 nt, Homo sapiens
  misc_RNA (1)...(19): siRNA sense strand
cagaaguguuacagauauu

SEQ ID NO: 592573 - RNA, 19 nt, Homo sapiens
  misc_RNA (1)...(19): siRNA sense strand
aagcgaauguaugucaaua

SEQ ID NO: 592574 - RNA, 19 nt, Homo sapiens
  misc_RNA (1)...(19): siRNA sense strand
gcaccaagacaaagaccaa

SEQ ID NO: 592575 - RNA, 19 nt, Homo sapiens
  misc_RNA (1)...(19): siRNA sense strand
gaaccagauccggaacaua

SEQ ID NO: 592576 - RNA, 19 nt, Homo sapiens
  misc_RNA (1)...(19): siRNA sense strand
cauaauggacuccuccuau

SEQ ID NO: 592577 - RNA, 19 nt, Homo sapiens
  misc_RNA (1)...(19): siRNA sense strand
gugcugaccauucaaaguu

SEQ ID NO: 592578 - RNA, 19 nt, Homo sapiens
  misc_RNA (1)...(19): siRNA sense strand
ggaacauagaccugauaua

SEQ ID NO: 592579 - RNA, 19 nt, Homo sapiens
  misc_RNA (1)...(19): siRNA sense strand
cagaagaacaucagcaauc

SEQ ID NO: 592580 - RNA, 19 nt, Homo sapiens
  misc_RNA (1)...(19): siRNA sense strand
ucaauugcaccaagacaaa

SEQ ID NO: 592581 - RNA, 19 nt, Homo sapiens
  misc_RNA (1)...(19): siRNA sense strand
aauaacagauaccauugga

SEQ ID NO: 592582 - RNA, 19 nt, Homo sapiens
  misc_RNA (1)...(19): siRNA sense strand
ucaccgggaucugaaggua

SEQ ID NO: 592583 - RNA, 19 nt, Homo sapiens
  misc_RNA (1)...(19): siRNA sense strand
ccaaauaaaagccagaaua

SEQ ID NO: 592584 - RNA, 19 nt, Homo sapiens
  misc_RNA (1)...(19): siRNA sense strand
agaccucaauguuuguaaa

SEQ ID NO: 592585 - RNA, 19 nt, Homo sapiens
  misc_RNA (1)...(19): siRNA sense strand
gacagguagugaaucaaau

SEQ ID NO: 592586 - RNA, 19 nt, Homo sapiens
  misc_RNA (1)...(19): siRNA sense strand
ucucuaaguuaacagaaga

SEQ ID NO: 592587 - RNA, 19 nt, Homo sapiens
  misc_RNA (1)...(19): siRNA sense strand
aaagccagaauaacagaua

SEQ ID NO: 592588 - RNA, 19 nt, Homo sapiens
  misc_RNA (1)...(19): siRNA sense strand
acagaugcuucaacaacaa

SEQ ID NO: 592589 - RNA, 19 nt, Homo sapiens
  misc_RNA (1)...(19): siRNA sense strand
uaugggaaguccuuaucuu

SEQ ID NO: 592590 - RNA, 19 nt, Homo sapiens
  misc_RNA (1)...(19): siRNA sense strand
ggaacuauuggacagagaa

SEQ ID NO: 592591 - RNA, 19 nt, Homo sapiens
  misc_RNA (1)...(19): siRNA sense strand
gcaauccaccugauauguc

SEQ ID NO: 592592 - RNA, 19 nt, Homo sapiens
  misc_RNA (1)...(19): siRNA sense strand
gauaaagaggccauugcaa

SEQ ID NO: 592593 - RNA, 19 nt, Homo sapiens
  misc_RNA (1)...(19): siRNA sense strand
ggugaauucgguaaccaua

SEQ ID NO: 592594 - RNA, 19 nt, Homo sapiens
  misc_RNA (1)...(19): siRNA sense strand
uaucugugauggcaacuuc

SEQ ID NO: 592595 - RNA, 19 nt, Homo sapiens
  misc_RNA (1)...(19): siRNA sense strand
aaagauggaguuaauguag

SEQ ID NO: 592596 - RNA, 19 nt, Homo sapiens
  misc_RNA (1)...(19): siRNA sense strand
gaugucuacucuauaaacu

SEQ ID NO: 592597 - RNA, 19 nt, Homo sapiens
  misc_RNA (1)...(19): siRNA sense strand
aauuugaccuucuaagauc

SEQ ID NO: 592598 - RNA, 19 nt, Homo sapiens
  misc_RNA (1)...(19): siRNA sense strand
aaagaggccauugcaaauu

SEQ ID NO: 592599 - RNA, 19 nt, Homo sapiens
  misc_RNA (1)...(19): siRNA sense strand
gcagcaguaucaacaugca

SEQ ID NO: 592600 - RNA, 19 nt, Homo sapiens
  misc_RNA (1)...(19): siRNA sense strand
ccaaaggccaacucugcua

SEQ ID NO: 592601 - RNA, 19 nt, Homo sapiens
  misc_RNA (1)...(19): siRNA sense strand
uuacagaaccagaaguguu

SEQ ID NO: 592602 - RNA, 19 nt, Homo sapiens
  misc_RNA (1)...(19): siRNA sense strand
ucacaguauccuacaauga

SEQ ID NO: 592603 - RNA, 19 nt, Homo sapiens
  misc_RNA (1)...(19): siRNA sense strand
uacagcaacuccauuuaca

SEQ ID NO: 592604 - RNA, 19 nt, Homo sapiens
  misc_RNA (1)...(19): siRNA sense strand
gcauagaguacuccagcaa

SEQ ID NO: 592605 - RNA, 19 nt, Homo sapiens
  misc_RNA (1)...(19): siRNA sense strand
gaagcgaauguaugucaau

SEQ ID NO: 592606 - RNA, 19 nt, Homo sapiens
  misc_RNA (1)...(19): siRNA sense strand
gaauaacagauaccauugg

SEQ ID NO: 592607 - RNA, 19 nt, Homo sapiens
  misc_RNA (1)...(19): siRNA sense strand
gaugugcauugaagcgaau

SEQ ID NO: 592608 - RNA, 19 nt, Homo sapiens
  misc_RNA (1)...(19): siRNA sense strand
aaccagaaguguuacagau

SEQ ID NO: 592609 - RNA, 19 nt, Homo sapiens
  misc_RNA (1)...(19): siRNA sense strand
gcaucacaguauccuacaa

SEQ ID NO: 592610 - RNA, 19 nt, Homo sapiens
  misc_RNA (1)...(19): siRNA sense strand
ugggaaguccuuaucuuaa

SEQ ID NO: 592611 - RNA, 19 nt, Homo sapiens
  misc_RNA (1)...(19): siRNA sense strand
agaguucucaccagccuua

SEQ ID NO: 592612 - RNA, 19 nt, Homo sapiens
  misc_RNA (1)...(19): siRNA sense strand
gcagggagauuggagauua

SEQ ID NO: 592613 - RNA, 19 nt, Homo sapiens
  misc_RNA (1)...(19): siRNA sense strand
gaacauagaccugauauau

SEQ ID NO: 592614 - RNA, 19 nt, Homo sapiens
  misc_RNA (1)...(19): siRNA sense strand
ggacugugcuguuaauuca

SEQ ID NO: 592615 - RNA, 19 nt, Homo sapiens
  misc_RNA (1)...(19): siRNA sense strand
ggaacuauguacuuuguga

SEQ ID NO: 592616 - RNA, 19 nt, Homo sapiens
  misc_RNA (1)...(19): siRNA sense strand
gaaaugaucaaccuuuaug

SEQ ID NO: 592617 - RNA, 19 nt, Homo sapiens
  misc_RNA (1)...(19): siRNA sense strand
gaggauaauuucucuaagu

SEQ ID NO: 592618 - RNA, 19 nt, Homo sapiens
  misc_RNA (1)...(19): siRNA sense strand
ggacagagaauuugaccuu

SEQ ID NO: 592619 - RNA, 19 nt, Homo sapiens
  misc_RNA (1)...(19): siRNA sense strand
ccagaaguguuacagauau

SEQ ID NO: 592620 - RNA, 19 nt, Homo sapiens
  misc_RNA (1)...(19): siRNA sense strand
gcacugggaugucuacucu

SEQ ID NO: 592621 - RNA, 19 nt, Homo sapiens
  misc_RNA (1)...(19): siRNA sense strand
ggaaguccuuaucuuaaug

SEQ ID NO: 592622 - RNA, 19 nt, Homo sapiens
  misc_RNA (1)...(19): siRNA sense strand
guguaagacuccaauaauu

SEQ ID NO: 592623 - RNA, 19 nt, Homo sapiens
  misc_RNA (1)...(19): siRNA sense strand
ggaauccgaugugcauuga

SEQ ID NO: 592624 - RNA, 19 nt, Homo sapiens
  misc_RNA (1)...(19): siRNA sense strand
gcacuaagaccuggaaaug

SEQ ID NO: 592625 - RNA, 19 nt, Homo sapiens
  misc_RNA (1)...(19): siRNA sense strand
ggacagguagugaaucaaa

SEQ ID NO: 592626 - RNA, 19 nt, Homo sapiens
  misc_RNA (1)...(19): siRNA sense strand
gggaaguccuuaucuuaau

SEQ ID NO: 592627 - RNA, 19 nt, Homo sapiens
  misc_RNA (1)...(19): siRNA sense strand
cuacaaugaugccgcagua

SEQ ID NO: 592628 - RNA, 19 nt, Homo sapiens
  misc_RNA (1)...(19): siRNA sense strand
ggaaacccaucaccaccaa

SEQ ID NO: 592629 - RNA, 19 nt, Homo sapiens
  misc_RNA (1)...(19): siRNA sense strand
auaauggacuccuccuaua

SEQ ID NO: 592630 - RNA, 19 nt, Homo sapiens
  misc_RNA (1)...(19): siRNA sense strand
gguagugaaucaaaugaau

SEQ ID NO: 592631 - RNA, 19 nt, Homo sapiens
  misc_RNA (1)...(19): siRNA sense strand
gaauuugaccuucuaagau

SEQ ID NO: 592632 - RNA, 19 nt, Homo sapiens
  misc_RNA (1)...(19): siRNA sense strand
aagaggccauugcaaauuu

SEQ ID NO: 592633 - RNA, 19 nt, Homo sapiens
  misc_RNA (1)...(19): siRNA sense strand
ugggaugucuacucuauaa

SEQ ID NO: 592634 - RNA, 19 nt, Homo sapiens
  misc_RNA (1)...(19): siRNA sense strand
cugaaaugaucaaccuuua

SEQ ID NO: 592635 - RNA, 19 nt, Homo sapiens
  misc_RNA (1)...(19): siRNA sense strand
ggugggaacuauguacuuu

SEQ ID NO: 592636 - RNA, 19 nt, Homo sapiens
  misc_RNA (1)...(19): siRNA sense strand
uaauaagguucaugcuuga

SEQ ID NO: 592637 - RNA, 19 nt, Homo sapiens
  misc_RNA (1)...(19): siRNA sense strand
agagcuaucuggucacaaa

SEQ ID NO: 592638 - RNA, 19 nt, Homo sapiens
  misc_RNA (1)...(19): siRNA sense strand
cagaauaacagauaccauu

SEQ ID NO: 592639 - RNA, 19 nt, Homo sapiens
  misc_RNA (1)...(19): siRNA sense strand
uaacagaagaggaacuauu

SEQ ID NO: 592640 - RNA, 19 nt, Homo sapiens
  misc_RNA (1)...(19): siRNA sense strand
ccugauauauuucaagugu

SEQ ID NO: 592641 - RNA, 19 nt, Homo sapiens
  misc_RNA (1)...(19): siRNA sense strand
caacacagcagcaacagau

SEQ ID NO: 592642 - RNA, 19 nt, Homo sapiens
  misc_RNA (1)...(19): siRNA sense strand
ugaauucgguaaccauaga

SEQ ID NO: 592643 - RNA, 19 nt, Homo sapiens
  misc_RNA (1)...(19): siRNA sense strand
caagguugcaucaguguaa

SEQ ID NO: 592644 - RNA, 19 nt, Homo sapiens
  misc_RNA (1)...(19): siRNA sense strand
gaguuaauguaguagaaga

SEQ ID NO: 592645 - RNA, 19 nt, Homo sapiens
  misc_RNA (1)...(19): siRNA sense strand
guccuuaucuuaauggaau

SEQ ID NO: 592646 - RNA, 19 nt, Homo sapiens
  misc_RNA (1)...(19): siRNA sense strand
uaaguuaacagaagaggaa

SEQ ID NO: 592647 - RNA, 19 nt, Homo sapiens
  misc_RNA (1)...(19): siRNA sense strand
gauuacagcaacuccauuu

SEQ ID NO: 592648 - RNA, 19 nt, Homo sapiens
  misc_RNA (1)...(19): siRNA sense strand
uacagaaccagaaguguua

SEQ ID NO: 592649 - RNA, 19 nt, Homo sapiens
  misc_RNA (1)...(19): siRNA sense strand
agauggaguuaauguagua

SEQ ID NO: 592650 - RNA, 19 nt, Homo sapiens
  misc_RNA (1)...(19): siRNA sense strand
ccagugugcugaccauuca

SEQ ID NO: 592651 - RNA, 19 nt, Homo sapiens
  misc_RNA (1)...(19): siRNA sense strand
gugaagcuguugcaagguu

SEQ ID NO: 592652 - RNA, 19 nt, Homo sapiens
  misc_RNA (1)...(19): siRNA sense strand
uaaagaggccauugcaaau

SEQ ID NO: 592653 - RNA, 19 nt, Homo sapiens
  misc_RNA (1)...(19): siRNA sense strand
ugccagaccucaauguuug

SEQ ID NO: 592654 - RNA, 19 nt, Homo sapiens
  misc_RNA (1)...(19): siRNA sense strand
gaccugauauauuucaagu

SEQ ID NO: 592655 - RNA, 19 nt, Homo sapiens
  misc_RNA (1)...(19): siRNA sense strand
cuauguacuuugugacuuu

SEQ ID NO: 592656 - RNA, 19 nt, Homo sapiens
  misc_RNA (1)...(19): siRNA sense strand
gaaugauggugggaacuau

SEQ ID NO: 592657 - RNA, 19 nt, Homo sapiens
  misc_RNA (1)...(19): siRNA sense strand
gcgaauguaugucaauaac

SEQ ID NO: 592658 - RNA, 19 nt, Homo sapiens
  misc_RNA (1)...(19): siRNA sense strand
caauccaccugauauguca

SEQ ID NO: 592659 - RNA, 19 nt, Homo sapiens
  misc_RNA (1)...(19): siRNA sense strand
ggcaucaccugaauaucuu

SEQ ID NO: 592660 - RNA, 19 nt, Homo sapiens
  misc_RNA (1)...(19): siRNA sense strand
caacagaugcuucaacaac

SEQ ID NO: 592661 - RNA, 19 nt, Homo sapiens
  misc_RNA (1)...(19): siRNA sense strand
caacagaaaccucaauugc

SEQ ID NO: 592662 - RNA, 19 nt, Homo sapiens
  misc_RNA (1)...(19): siRNA sense strand
guaagacuccaauaauuca

SEQ ID NO: 592663 - RNA, 19 nt, Homo sapiens
  misc_RNA (1)...(19): siRNA sense strand
uauuuggacugugcuguua

SEQ ID NO: 592664 - RNA, 19 nt, Homo sapiens
  misc_RNA (1)...(19): siRNA sense strand
ucacaaaucagaagaacau

SEQ ID NO: 592665 - RNA, 19 nt, Homo sapiens
  misc_RNA (1)...(19): siRNA sense strand
uaacaugccagaccucaau

SEQ ID NO: 592666 - RNA, 19 nt, Homo sapiens
  misc_RNA (1)...(19): siRNA sense strand
auaaagaggccauugcaaa

SEQ ID NO: 592667 - RNA, 19 nt, Homo sapiens
  misc_RNA (1)...(19): siRNA sense strand
ucagcaggcuuucuuucaa

SEQ ID NO: 592668 - RNA, 19 nt, Homo sapiens
  misc_RNA (1)...(19): siRNA sense strand
gcaacuccauuuacagcau

SEQ ID NO: 592669 - RNA, 19 nt, Homo sapiens
  misc_RNA (1)...(19): siRNA sense strand
gaaccagaaguguuacaga

SEQ ID NO: 592670 - RNA, 19 nt, Homo sapiens
  misc_RNA (1)...(19): siRNA sense strand
ucuccaacaucaauaauuc

SEQ ID NO: 592671 - RNA, 19 nt, Homo sapiens
  misc_RNA (1)...(19): siRNA sense strand
caaccuuuauggagggaaa

SEQ ID NO: 592672 - RNA, 19 nt, Homo sapiens
  misc_RNA (1)...(19): siRNA sense strand
cagaaguguuacagauauu

SEQ ID NO: 592673 - RNA, 19 nt, Homo sapiens
  misc_RNA (1)...(19): siRNA sense strand
aagcgaauguaugucaaua

SEQ ID NO: 592674 - RNA, 19 nt, Homo sapiens
  misc_RNA (1)...(19): siRNA sense strand
gcaccaagacaaagaccaa

SEQ ID NO: 592675 - RNA, 19 nt, Homo sapiens
  misc_RNA (1)...(19): siRNA sense strand
gaaccagauccggaacaua

SEQ ID NO: 592676 - RNA, 19 nt, Homo sapiens
  misc_RNA (1)...(19): siRNA sense strand
cauaauggacuccuccuau

SEQ ID NO: 592677 - RNA, 19 nt, Homo sapiens
  misc_RNA (1)...(19): siRNA sense strand
gugcugaccauucaaaguu

SEQ ID NO: 592678 - RNA, 19 nt, Homo sapiens
  misc_RNA (1)...(19): siRNA sense strand
ggaacauagaccugauaua

SEQ ID NO: 592679 - RNA, 19 nt, Homo sapiens
  misc_RNA (1)...(19): siRNA sense strand
cagaagaacaucagcaauc

SEQ ID NO: 592680 - RNA, 19 nt, Homo sapiens
  misc_RNA (1)...(19): siRNA sense strand
ucaauugcaccaagacaaa

SEQ ID NO: 592681 - RNA, 19 nt, Homo sapiens
  misc_RNA (1)...(19): siRNA sense strand
aauaacagauaccauugga

SEQ ID NO: 592682 - RNA, 19 nt, Homo sapiens
  misc_RNA (1)...(19): siRNA sense strand
ucaccgggaucugaaggua

SEQ ID NO: 592683 - RNA, 19 nt, Homo sapiens
  misc_RNA (1)...(19): siRNA sense strand
ccaaauaaaagccagaaua

SEQ ID NO: 592684 - RNA, 19 nt, Homo sapiens
  misc_RNA (1)...(19): siRNA sense strand
agaccucaauguuuguaaa

SEQ ID NO: 592685 - RNA, 19 nt, Homo sapiens
  misc_RNA (1)...(19): siRNA sense strand
gacagguagugaaucaaau

SEQ ID NO: 592686 - RNA, 19 nt, Homo sapiens
  misc_RNA (1)...(19): siRNA sense strand
ucucuaaguuaacagaaga

SEQ ID NO: 592687 - RNA, 19 nt, Homo sapiens
  misc_RNA (1)...(19): siRNA sense strand
aaagccagaauaacagaua

SEQ ID NO: 592688 - RNA, 19 nt, Homo sapiens
  misc_RNA (1)...(19): siRNA sense strand
acagaugcuucaacaacaa

SEQ ID NO: 592689 - RNA, 19 nt, Homo sapiens
  misc_RNA (1)...(19): siRNA sense strand
uaugggaaguccuuaucuu

SEQ ID NO: 592690 - RNA, 19 nt, Homo sapiens
  misc_RNA (1)...(19): siRNA sense strand
ggaacuauuggacagagaa

SEQ ID NO: 592691 - RNA, 19 nt, Homo sapiens
  misc_RNA (1)...(19): siRNA sense strand
gcaauccaccugauauguc

SEQ ID NO: 592692 - RNA, 19 nt, Homo sapiens
  misc_RNA (1)...(19): siRNA sense strand
gauaaagaggccauugcaa

SEQ ID NO: 592693 - RNA, 19 nt, Homo sapiens
  misc_RNA (1)...(19): siRNA sense strand
ggugaauucgguaaccaua

SEQ ID NO: 592694 - RNA, 19 nt, Homo sapiens
  misc_RNA (1)...(19): siRNA sense strand
uaucugugauggcaacuuc

SEQ ID NO: 592695 - RNA, 19 nt, Homo sapiens
  misc_RNA (1)...(19): siRNA sense strand
aaagauggaguuaauguag

SEQ ID NO: 592696 - RNA, 19 nt, Homo sapiens
  misc_RNA (1)...(19): siRNA sense strand
gaugucuacucuauaaacu

SEQ ID NO: 592697 - RNA, 19 nt, Homo sapiens
  misc_RNA (1)...(19): siRNA sense strand
aauuugaccuucuaagauc

SEQ ID NO: 592698 - RNA, 19 nt, Homo sapiens
  misc_RNA (1)...(19): siRNA sense strand
aaagaggccauugcaaauu

SEQ ID NO: 592699 - RNA, 19 nt, Homo sapiens
  misc_RNA (1)...(19): siRNA sense strand
gcagcaguaucaacaugca

SEQ ID NO: 592700 - RNA, 19 nt, Homo sapiens
  misc_RNA (1)...(19): siRNA sense strand
ccaaaggccaacucugcua

SEQ ID NO: 592701 - RNA, 19 nt, Homo sapiens
  misc_RNA (1)...(19): siRNA sense strand
uuacagaaccagaaguguu

SEQ ID NO: 592702 - RNA, 19 nt, Homo sapiens
  misc_RNA (1)...(19): siRNA sense strand
ucacaguauccuacaauga

SEQ ID NO: 592703 - RNA, 19 nt, Homo sapiens
  misc_RNA (1)...(19): siRNA sense strand
uacagcaacuccauuuaca

SEQ ID NO: 592704 - RNA, 19 nt, Homo sapiens
  misc_RNA (1)...(19): siRNA sense strand
gcauagaguacuccagcaa

SEQ ID NO: 592705 - RNA, 19 nt, Homo sapiens
  misc_RNA (1)...(19): siRNA sense strand
gaagcgaauguaugucaau

SEQ ID NO: 592706 - RNA, 19 nt, Homo sapiens
  misc_RNA (1)...(19): siRNA sense strand
gaauaacagauaccauugg

SEQ ID NO: 592707 - RNA, 19 nt, Homo sapiens
  misc_RNA (1)...(19): siRNA sense strand
gaugugcauugaagcgaau

SEQ ID NO: 592708 - RNA, 19 nt, Homo sapiens
  misc_RNA (1)...(19): siRNA sense strand
aaccagaaguguuacagau

SEQ ID NO: 592709 - RNA, 19 nt, Homo sapiens
  misc_RNA (1)...(19): siRNA sense strand
gcaucacaguauccuacaa

SEQ ID NO: 592710 - RNA, 19 nt, Homo sapiens
  misc_RNA (1)...(19): siRNA sense strand
ugggaaguccuuaucuuaa

SEQ ID NO: 592711 - RNA, 19 nt, Homo sapiens
  misc_RNA (1)...(19): siRNA sense strand
agaguucucaccagccuua

SEQ ID NO: 592712 - RNA, 19 nt, Homo sapiens
  misc_RNA (1)...(19): siRNA sense strand
gcucagagaguaaauauga

SEQ ID NO: 592713 - RNA, 19 nt, Homo sapiens
  misc_RNA (1)...(19): siRNA sense strand
ccaagauagugguguauaa

SEQ ID NO: 592714 - RNA, 19 nt, Homo sapiens
  misc_RNA (1)...(19): siRNA sense strand
ggaauuccaucugcggaua

SEQ ID NO: 592715 - RNA, 19 nt, Homo sapiens
  misc_RNA (1)...(19): siRNA sense strand
gaacuucuccgagguauuc

SEQ ID NO: 592716 - RNA, 19 nt, Homo sapiens
  misc_RNA (1)...(19): siRNA sense strand
cauuaaugaucccaagaua

SEQ ID NO: 592717 - RNA, 19 nt, Homo sapiens
  misc_RNA (1)...(19): siRNA sense strand
gcacaaaauccgugucuua

SEQ ID NO: 592718 - RNA, 19 nt, Homo sapiens
  misc_RNA (1)...(19): siRNA sense strand
ucucugugcuggcauuuaa

SEQ ID NO: 592719 - RNA, 19 nt, Homo sapiens
  misc_RNA (1)...(19): siRNA sense strand
gugcaggucuggucuuuag

SEQ ID NO: 592720 - RNA, 19 nt, Homo sapiens
  misc_RNA (1)...(19): siRNA sense strand
cgacagagcaaacccgaaa

SEQ ID NO: 592721 - RNA, 19 nt, Homo sapiens
  misc_RNA (1)...(19): siRNA sense strand
aauaugagaucgccucugu

SEQ ID NO: 592722 - RNA, 19 nt, Homo sapiens
  misc_RNA (1)...(19): siRNA sense strand
ggaaaaugaucacggaguu

SEQ ID NO: 592723 - RNA, 19 nt, Homo sapiens
  misc_RNA (1)...(19): siRNA sense strand
gacaaggaacgacaacauu

SEQ ID NO: 592724 - RNA, 19 nt, Homo sapiens
  misc_RNA (1)...(19): siRNA sense strand
gaauggcacugcaaaauag

SEQ ID NO: 592725 - RNA, 19 nt, Homo sapiens
  misc_RNA (1)...(19): siRNA sense strand
gagcucagagaguaaauau

SEQ ID NO: 592726 - RNA, 19 nt, Homo sapiens
  misc_RNA (1)...(19): siRNA sense strand
gaacacccuucagauccuu

SEQ ID NO: 592727 - RNA, 19 nt, Homo sapiens
  misc_RNA (1)...(19): siRNA sense strand
uuaaucacgugacuuggaa

SEQ ID NO: 592728 - RNA, 19 nt, Homo sapiens
  misc_RNA (1)...(19): siRNA sense strand
gaacgacaacauucccaau

SEQ ID NO: 592729 - RNA, 19 nt, Homo sapiens
  misc_RNA (1)...(19): siRNA sense strand
gcaguugggagcuaugaug

SEQ ID NO: 592730 - RNA, 19 nt, Homo sapiens
  misc_RNA (1)...(19): siRNA sense strand
guugggagcuaugauggaa

SEQ ID NO: 592731 - RNA, 19 nt, Homo sapiens
  misc_RNA (1)...(19): siRNA sense strand
gaauuccaucugcggauaa

SEQ ID NO: 592732 - RNA, 19 nt, Homo sapiens
  misc_RNA (1)...(19): siRNA sense strand
gaaaaugggcauaggaaug

SEQ ID NO: 592733 - RNA, 19 nt, Homo sapiens
  misc_RNA (1)...(19): siRNA sense strand
gcaaagauuacgugagcau

SEQ ID NO: 592734 - RNA, 19 nt, Homo sapiens
  misc_RNA (1)...(19): siRNA sense strand
uuaaugaucccaagauagu

SEQ ID NO: 592735 - RNA, 19 nt, Homo sapiens
  misc_RNA (1)...(19): siRNA sense strand
ggauaaccgucugguccuu

SEQ ID NO: 592736 - RNA, 19 nt, Homo sapiens
  misc_RNA (1)...(19): siRNA sense strand
agauagugguguauaagga

SEQ ID NO: 592737 - RNA, 19 nt, Homo sapiens
  misc_RNA (1)...(19): siRNA sense strand
caaaauccgugucuuacau

SEQ ID NO: 592738 - RNA, 19 nt, Homo sapiens
  misc_RNA (1)...(19): siRNA sense strand
agauucugcuguacucauu

SEQ ID NO: 592739 - RNA, 19 nt, Homo sapiens
  misc_RNA (1)...(19): siRNA sense strand
aagcuugucugcagggaau

SEQ ID NO: 592740 - RNA, 19 nt, Homo sapiens
  misc_RNA (1)...(19): siRNA sense strand
cgauggcccuccucagcaa

SEQ ID NO: 592741 - RNA, 19 nt, Homo sapiens
  misc_RNA (1)...(19): siRNA sense strand
cgacaaggaacgacaacau

SEQ ID NO: 592742 - RNA, 19 nt, Homo sapiens
  misc_RNA (1)...(19): siRNA sense strand
cgaauggcacugcaaaaua

SEQ ID NO: 592743 - RNA, 19 nt, Homo sapiens
  misc_RNA (1)...(19): siRNA sense strand
acacgugccuagaccagau

SEQ ID NO: 592744 - RNA, 19 nt, Homo sapiens
  misc_RNA (1)...(19): siRNA sense strand
gucccagucuccuuacaga

SEQ ID NO: 592745 - RNA, 19 nt, Homo sapiens
  misc_RNA (1)...(19): siRNA sense strand
ucagagaguaaauaugaga

SEQ ID NO: 592746 - RNA, 19 nt, Homo sapiens
  misc_RNA (1)...(19): siRNA sense strand
acaagauucugcuguacuc

SEQ ID NO: 592747 - RNA, 19 nt, Homo sapiens
  misc_RNA (1)...(19): siRNA sense strand
caaauacccgaaagcuugu

SEQ ID NO: 592748 - RNA, 19 nt, Homo sapiens
  misc_RNA (1)...(19): siRNA sense strand
acaaggaacgacaacauuc

SEQ ID NO: 592749 - RNA, 19 nt, Homo sapiens
  misc_RNA (1)...(19): siRNA sense strand
caacaccacggaauuccau

SEQ ID NO: 592750 - RNA, 19 nt, Homo sapiens
  misc_RNA (1)...(19): siRNA sense strand
ccagcuuacucugcaaguu

SEQ ID NO: 592751 - RNA, 19 nt, Homo sapiens
  misc_RNA (1)...(19): siRNA sense strand
gggcauccugcagccauua

SEQ ID NO: 592752 - RNA, 19 nt, Homo sapiens
  misc_RNA (1)...(19): siRNA sense strand
cagcuuacucugcaaguuc

SEQ ID NO: 592753 - RNA, 19 nt, Homo sapiens
  misc_RNA (1)...(19): siRNA sense strand
cucccgagcucagagagua

SEQ ID NO: 592754 - RNA, 19 nt, Homo sapiens
  misc_RNA (1)...(19): siRNA sense strand
caagauagugguguauaag

SEQ ID NO: 592755 - RNA, 19 nt, Homo sapiens
  misc_RNA (1)...(19): siRNA sense strand
gccgguuguuguccacgua

SEQ ID NO: 592756 - RNA, 19 nt, Homo sapiens
  misc_RNA (1)...(19): siRNA sense strand
ggacacccaggaucucaca

SEQ ID NO: 592757 - RNA, 19 nt, Homo sapiens
  misc_RNA (1)...(19): siRNA sense strand
uuacaucaaauacccgaaa

SEQ ID NO: 592758 - RNA, 19 nt, Homo sapiens
  misc_RNA (1)...(19): siRNA sense strand
auccgugucuuacaucaaa

SEQ ID NO: 592759 - RNA, 19 nt, Homo sapiens
  misc_RNA (1)...(19): siRNA sense strand
cuacauggcgcuggcagaa

SEQ ID NO: 592760 - RNA, 19 nt, Homo sapiens
  misc_RNA (1)...(19): siRNA sense strand
cauuuaguccugacagcua

SEQ ID NO: 592761 - RNA, 19 nt, Homo sapiens
  misc_RNA (1)...(19): siRNA sense strand
gcuacuuccuggcgacaag

SEQ ID NO: 592762 - RNA, 19 nt, Homo sapiens
  misc_RNA (1)...(19): siRNA sense strand
ucacgugacuuggaaaaug

SEQ ID NO: 592763 - RNA, 19 nt, Homo sapiens
  misc_RNA (1)...(19): siRNA sense strand
cagacacugaaaccuguua

SEQ ID NO: 592764 - RNA, 19 nt, Homo sapiens
  misc_RNA (1)...(19): siRNA sense strand
acaccugcuuggaguacaa

SEQ ID NO: 592765 - RNA, 19 nt, Homo sapiens
  misc_RNA (1)...(19): siRNA sense strand
gaaaaugaucacggaguuu

SEQ ID NO: 592766 - RNA, 19 nt, Homo sapiens
  misc_RNA (1)...(19): siRNA sense strand
gcaggucuggucuuuagag

SEQ ID NO: 592767 - RNA, 19 nt, Homo sapiens
  misc_RNA (1)...(19): siRNA sense strand
uguauaaggaggccgagaa

SEQ ID NO: 592768 - RNA, 19 nt, Homo sapiens
  misc_RNA (1)...(19): siRNA sense strand
gcaucuucgucugcaguga

SEQ ID NO: 592769 - RNA, 19 nt, Homo sapiens
  misc_RNA (1)...(19): siRNA sense strand
cgagcucagagaguaaaua

SEQ ID NO: 592770 - RNA, 19 nt, Homo sapiens
  misc_RNA (1)...(19): siRNA sense strand
ccauuaaugaucccaagau

SEQ ID NO: 592771 - RNA, 19 nt, Homo sapiens
  misc_RNA (1)...(19): siRNA sense strand
gcccgaauggcacugcaaa

SEQ ID NO: 592772 - RNA, 19 nt, Homo sapiens
  misc_RNA (1)...(19): siRNA sense strand
uagaccagauccagcacau

SEQ ID NO: 592773 - RNA, 19 nt, Homo sapiens
  misc_RNA (1)...(19): siRNA sense strand
ugggagcuaugauggaaag

SEQ ID NO: 592774 - RNA, 19 nt, Homo sapiens
  misc_RNA (1)...(19): siRNA sense strand
ggcgcgacugcaaagauua

SEQ ID NO: 592775 - RNA, 19 nt, Homo sapiens
  misc_RNA (1)...(19): siRNA sense strand
cagacucgcucuucauccu

SEQ ID NO: 592776 - RNA, 19 nt, Homo sapiens
  misc_RNA (1)...(19): siRNA sense strand
ggacaccugcuuggaguac

SEQ ID NO: 592777 - RNA, 19 nt, Homo sapiens
  misc_RNA (1)...(19): siRNA sense strand
gaaagagguucagaaauuu

SEQ ID NO: 592778 - RNA, 19 nt, Homo sapiens
  misc_RNA (1)...(19): siRNA sense strand
gaaauuugcccuaugucua

SEQ ID NO: 592779 - RNA, 19 nt, Homo sapiens
  misc_RNA (1)...(19): siRNA sense strand
gagacacacugcccauuga

SEQ ID NO: 592780 - RNA, 19 nt, Homo sapiens
  misc_RNA (1)...(19): siRNA sense strand
agaaagcggugaagcagaa

SEQ ID NO: 592781 - RNA, 19 nt, Homo sapiens
  misc_RNA (1)...(19): siRNA sense strand
ggaccgaaauuugcccuau

SEQ ID NO: 592782 - RNA, 19 nt, Homo sapiens
  misc_RNA (1)...(19): siRNA sense strand
ggagacacacugcccauug

SEQ ID NO: 592783 - RNA, 19 nt, Homo sapiens
  misc_RNA (1)...(19): siRNA sense strand
cuacaaaugcaucaagaaa

SEQ ID NO: 592784 - RNA, 19 nt, Homo sapiens
  misc_RNA (1)...(19): siRNA sense strand
guucagaaauuugucaaca

SEQ ID NO: 592785 - RNA, 19 nt, Homo sapiens
  misc_RNA (1)...(19): siRNA sense strand
gaccgaaauuugcccuaug

SEQ ID NO: 592786 - RNA, 19 nt, Homo sapiens
  misc_RNA (1)...(19): siRNA sense strand
ccaggaggcuuacgaugag

SEQ ID NO: 592787 - RNA, 19 nt, Homo sapiens
  misc_RNA (1)...(19): siRNA sense strand
acaaaugcaucaagaaagc

SEQ ID NO: 592788 - RNA, 19 nt, Homo sapiens
  misc_RNA (1)...(19): siRNA sense strand
aaauuugcccuaugucuau

SEQ ID NO: 592789 - RNA, 19 nt, Homo sapiens
  misc_RNA (1)...(19): siRNA sense strand
aggaguaccaggaggcuua

SEQ ID NO: 592790 - RNA, 19 nt, Homo sapiens
  misc_RNA (1)...(19): siRNA sense strand
ucaagaaagcggugaagca

SEQ ID NO: 592791 - RNA, 19 nt, Homo sapiens
  misc_RNA (1)...(19): siRNA sense strand
ccaccugugugauaauggu

SEQ ID NO: 592792 - RNA, 19 nt, Homo sapiens
  misc_RNA (1)...(19): siRNA sense strand
aaagagguucagaaauuug

SEQ ID NO: 592793 - RNA, 19 nt, Homo sapiens
  misc_RNA (1)...(19): siRNA sense strand
cgaaauuugcccuaugucu

SEQ ID NO: 592794 - RNA, 19 nt, Homo sapiens
  misc_RNA (1)...(19): siRNA sense strand
ugugugaggaccgaaauuu

SEQ ID NO: 592795 - RNA, 19 nt, Homo sapiens
  misc_RNA (1)...(19): siRNA sense strand
accgaaauuugcccuaugu

SEQ ID NO: 592796 - RNA, 19 nt, Homo sapiens
  misc_RNA (1)...(19): siRNA sense strand
aauuugcccuaugucuaua

SEQ ID NO: 592797 - RNA, 19 nt, Homo sapiens
  misc_RNA (1)...(19): siRNA sense strand
gagguucagaaauuuguca

SEQ ID NO: 592798 - RNA, 19 nt, Homo sapiens
  misc_RNA (1)...(19): siRNA sense strand
accaggaggcuuacgauga

SEQ ID NO: 592799 - RNA, 19 nt, Homo sapiens
  misc_RNA (1)...(19): siRNA sense strand
gugugaggaccgaaauuug

SEQ ID NO: 592800 - RNA, 19 nt, Homo sapiens
  misc_RNA (1)...(19): siRNA sense strand
gaagagcucuguuaucaau

SEQ ID NO: 592801 - RNA, 19 nt, Homo sapiens
  misc_RNA (1)...(19): siRNA sense strand
gcacagaugucacuacaga

SEQ ID NO: 592802 - RNA, 19 nt, Homo sapiens
  misc_RNA (1)...(19): siRNA sense strand
gauacuagcuacugugaaa

SEQ ID NO: 592803 - RNA, 19 nt, Homo sapiens
  misc_RNA (1)...(19): siRNA sense strand
gggaagagcucuguuauca

SEQ ID NO: 592804 - RNA, 19 nt, Homo sapiens
  misc_RNA (1)...(19): siRNA sense strand
cuggauagcuggauugaua

SEQ ID NO: 592805 - RNA, 19 nt, Homo sapiens
  misc_RNA (1)...(19): siRNA sense strand
gagaugaccugguguuagu

SEQ ID NO: 592806 - RNA, 19 nt, Homo sapiens
  misc_RNA (1)...(19): siRNA sense strand
caucagagccagaauauau

SEQ ID NO: 592807 - RNA, 19 nt, Homo sapiens
  misc_RNA (1)...(19): siRNA sense strand
gaaccuguuucuccacuga

SEQ ID NO: 592808 - RNA, 19 nt, Homo sapiens
  misc_RNA (1)...(19): siRNA sense strand
gcaaggauauaaagacaag

SEQ ID NO: 592809 - RNA, 19 nt, Homo sapiens
  misc_RNA (1)...(19): siRNA sense strand
gaagcaacauauaagaauc

SEQ ID NO: 592810 - RNA, 19 nt, Homo sapiens
  misc_RNA (1)...(19): siRNA sense strand
ugaaggaacugauggagau

SEQ ID NO: 592811 - RNA, 19 nt, Homo sapiens
  misc_RNA (1)...(19): siRNA sense strand
ccuagaugcugaugucuuu

SEQ ID NO: 592812 - RNA, 19 nt, Homo sapiens
  misc_RNA (1)...(19): siRNA sense strand
gaauagccacugaagauga

SEQ ID NO: 592813 - RNA, 19 nt, Homo sapiens
  misc_RNA (1)...(19): siRNA sense strand
cauaauggauucaguaaac

SEQ ID NO: 592814 - RNA, 19 nt, Homo sapiens
  misc_RNA (1)...(19): siRNA sense strand
gacaagcuuuccaucauug

SEQ ID NO: 592815 - RNA, 19 nt, Homo sapiens
  misc_RNA (1)...(19): siRNA sense strand
gaaaugcaaggauauaaag

SEQ ID NO: 592816 - RNA, 19 nt, Homo sapiens
  misc_RNA (1)...(19): siRNA sense strand
ggauaaaguucucccuagu

SEQ ID NO: 592817 - RNA, 19 nt, Homo sapiens
  misc_RNA (1)...(19): siRNA sense strand
ccuggcagcugaagauaaa

SEQ ID NO: 592818 - RNA, 19 nt, Homo sapiens
  misc_RNA (1)...(19): siRNA sense strand
gcaaaggaaguucuuagug

SEQ ID NO: 592819 - RNA, 19 nt, Homo sapiens
  misc_RNA (1)...(19): siRNA sense strand
agacaagcuuuccaucauu

SEQ ID NO: 592820 - RNA, 19 nt, Homo sapiens
  misc_RNA (1)...(19): siRNA sense strand
ggcacuugcugaaggauuu

SEQ ID NO: 592821 - RNA, 19 nt, Homo sapiens
  misc_RNA (1)...(19): siRNA sense strand
guagaaaugcaaggauaua

SEQ ID NO: 592822 - RNA, 19 nt, Homo sapiens
  misc_RNA (1)...(19): siRNA sense strand
uagcuggauugauaaguuu

SEQ ID NO: 592823 - RNA, 19 nt, Homo sapiens
  misc_RNA (1)...(19): siRNA sense strand
aagccuaucuuaugacaga

SEQ ID NO: 592824 - RNA, 19 nt, Homo sapiens
  misc_RNA (1)...(19): siRNA sense strand
gacagcacauggaaagaug

SEQ ID NO: 592825 - RNA, 19 nt, Homo sapiens
  misc_RNA (1)...(19): siRNA sense strand
acagaaggaucagaugaaa

SEQ ID NO: 592826 - RNA, 19 nt, Homo sapiens
  misc_RNA (1)...(19): siRNA sense strand
uauaaccaauugcuuccua

SEQ ID NO: 592827 - RNA, 19 nt, Homo sapiens
  misc_RNA (1)...(19): siRNA sense strand
gcagacagcacauggaaag

SEQ ID NO: 592828 - RNA, 19 nt, Homo sapiens
  misc_RNA (1)...(19): siRNA sense strand
gagagaugaccugguguua

SEQ ID NO: 592829 - RNA, 19 nt, Homo sapiens
  misc_RNA (1)...(19): siRNA sense strand
ugguagaaaugcaaggaua

SEQ ID NO: 592830 - RNA, 19 nt, Homo sapiens
  misc_RNA (1)...(19): siRNA sense strand
uaaagccuaucuuaugaca

SEQ ID NO: 592831 - RNA, 19 nt, Homo sapiens
  misc_RNA (1)...(19): siRNA sense strand
ccaauugcuuccuaagugu

SEQ ID NO: 592832 - RNA, 19 nt, Homo sapiens
  misc_RNA (1)...(19): siRNA sense strand
aggauuucaugcaagauua

SEQ ID NO: 592833 - RNA, 19 nt, Homo sapiens
  misc_RNA (1)...(19): siRNA sense strand
gacagaaggaucagaugaa

SEQ ID NO: 592834 - RNA, 19 nt, Homo sapiens
  misc_RNA (1)...(19): siRNA sense strand
ggaguuuguuacugaagga

SEQ ID NO: 592835 - RNA, 19 nt, Homo sapiens
  misc_RNA (1)...(19): siRNA sense strand
gcaauguugugggauaaag

SEQ ID NO: 592836 - RNA, 19 nt, Homo sapiens
  misc_RNA (1)...(19): siRNA sense strand
gauaaaguucucccuagug

SEQ ID NO: 592837 - RNA, 19 nt, Homo sapiens
  misc_RNA (1)...(19): siRNA sense strand
ugauggagauaaagccuau

SEQ ID NO: 592838 - RNA, 19 nt, Homo sapiens
  misc_RNA (1)...(19): siRNA sense strand
caugcaagauuacaggaau

SEQ ID NO: 592839 - RNA, 19 nt, Homo sapiens
  misc_RNA (1)...(19): siRNA sense strand
aaugcaauguugugggaua

SEQ ID NO: 592840 - RNA, 19 nt, Homo sapiens
  misc_RNA (1)...(19): siRNA sense strand
caagauuacaggaauuuca

SEQ ID NO: 592841 - RNA, 19 nt, Homo sapiens
  misc_RNA (1)...(19): siRNA sense strand
cgcaaacucugaaucaaca

SEQ ID NO: 592842 - RNA, 19 nt, Homo sapiens
  misc_RNA (1)...(19): siRNA sense strand
aagacaagcuuuccaucau

SEQ ID NO: 592843 - RNA, 19 nt, Homo sapiens
  misc_RNA (1)...(19): siRNA sense strand
ugacagaaggaucagauga

SEQ ID NO: 592844 - RNA, 19 nt, Homo sapiens
  misc_RNA (1)...(19): siRNA sense strand
gaaggaacugauggagaua

SEQ ID NO: 592845 - RNA, 19 nt, Homo sapiens
  misc_RNA (1)...(19): siRNA sense strand
auaagaauccggaacuuga

SEQ ID NO: 592846 - RNA, 19 nt, Homo sapiens
  misc_RNA (1)...(19): siRNA sense strand
caucauuggugaggugcua

SEQ ID NO: 592847 - RNA, 19 nt, Homo sapiens
  misc_RNA (1)...(19): siRNA sense strand
ucgaauagccacugaagau

SEQ ID NO: 592848 - RNA, 19 nt, Homo sapiens
  misc_RNA (1)...(19): siRNA sense strand
ggucgcaaacucugaauca

SEQ ID NO: 592849 - RNA, 19 nt, Homo sapiens
  misc_RNA (1)...(19): siRNA sense strand
ggaagagcucuguuaucaa

SEQ ID NO: 592850 - RNA, 19 nt, Homo sapiens
  misc_RNA (1)...(19): siRNA sense strand
gaacugauggagauaaagc

SEQ ID NO: 592851 - RNA, 19 nt, Homo sapiens
  misc_RNA (1)...(19): siRNA sense strand
auagcuggauugauaaguu

SEQ ID NO: 592852 - RNA, 19 nt, Homo sapiens
  misc_RNA (1)...(19): siRNA sense strand
gcucuguuaucaaugcaau

SEQ ID NO: 592853 - RNA, 19 nt, Homo sapiens
  misc_RNA (1)...(19): siRNA sense strand
ggaaguucuuagugcuaga

SEQ ID NO: 592854 - RNA, 19 nt, Homo sapiens
  misc_RNA (1)...(19): siRNA sense strand
uguuaucaaugcaauguug

SEQ ID NO: 592855 - RNA, 19 nt, Homo sapiens
  misc_RNA (1)...(19): siRNA sense strand
gguagaaaugcaaggauau

SEQ ID NO: 592856 - RNA, 19 nt, Homo sapiens
  misc_RNA (1)...(19): siRNA sense strand
uacuggaguuuguuacuga

SEQ ID NO: 592857 - RNA, 19 nt, Homo sapiens
  misc_RNA (1)...(19): siRNA sense strand
aaacagauacuagcuacug

SEQ ID NO: 592858 - RNA, 19 nt, Homo sapiens
  misc_RNA (1)...(19): siRNA sense strand
cuagugggauuggccauau

SEQ ID NO: 592859 - RNA, 19 nt, Homo sapiens
  misc_RNA (1)...(19): siRNA sense strand
accaauugcuuccuaagug

SEQ ID NO: 592860 - RNA, 19 nt, Homo sapiens
  misc_RNA (1)...(19): siRNA sense strand
gaucgaauagccacugaag

SEQ ID NO: 592861 - RNA, 19 nt, Homo sapiens
  misc_RNA (1)...(19): siRNA sense strand
uccggaacuugaucgaaua

SEQ ID NO: 592862 - RNA, 19 nt, Homo sapiens
  misc_RNA (1)...(19): siRNA sense strand
uuacugaaggaucacauuu

SEQ ID NO: 592863 - RNA, 19 nt, Homo sapiens
  misc_RNA (1)...(19): siRNA sense strand
uagaagcacagaaucguau

SEQ ID NO: 592864 - RNA, 19 nt, Homo sapiens
  misc_RNA (1)...(19): siRNA sense strand
aggaacugauggagauaaa

SEQ ID NO: 592865 - RNA, 19 nt, Homo sapiens
  misc_RNA (1)...(19): siRNA sense strand
gauuacaggaauuucagaa

SEQ ID NO: 592866 - RNA, 19 nt, Homo sapiens
  misc_RNA (1)...(19): siRNA sense strand
uagugggauuggccauaua

SEQ ID NO: 592867 - RNA, 19 nt, Homo sapiens
  misc_RNA (1)...(19): siRNA sense strand
gcacaggggaugccagaaa

SEQ ID NO: 592868 - RNA, 19 nt, Homo sapiens
  misc_RNA (1)...(19): siRNA sense strand
auaaccaauugcuuccuaa

SEQ ID NO: 592869 - RNA, 19 nt, Homo sapiens
  misc_RNA (1)...(19): siRNA sense strand
cagauacuagcuacuguga

SEQ ID NO: 592870 - RNA, 19 nt, Homo sapiens
  misc_RNA (1)...(19): siRNA sense strand
gguggaggagcucaaaguu

SEQ ID NO: 592871 - RNA, 19 nt, Homo sapiens
  misc_RNA (1)...(19): siRNA sense strand
aauagccacugaagaugau

SEQ ID NO: 592872 - RNA, 19 nt, Homo sapiens
  misc_RNA (1)...(19): siRNA sense strand
aaaccuggcagcugaagau

SEQ ID NO: 592873 - RNA, 19 nt, Homo sapiens
  misc_RNA (1)...(19): siRNA sense strand
gcaucagagccagaauaua

SEQ ID NO: 592874 - RNA, 19 nt, Homo sapiens
  misc_RNA (1)...(19): siRNA sense strand
gaccugguguuaguagaca

SEQ ID NO: 592875 - RNA, 19 nt, Homo sapiens
  misc_RNA (1)...(19): siRNA sense strand
gggauuggccauauaacca

SEQ ID NO: 592876 - RNA, 19 nt, Homo sapiens
  misc_RNA (1)...(19): siRNA sense strand
guuuguuacugaaggauca

SEQ ID NO: 592877 - RNA, 19 nt, Homo sapiens
  misc_RNA (1)...(19): siRNA sense strand
cagcaaaggaaguucuuag

SEQ ID NO: 592878 - RNA, 19 nt, Homo sapiens
  misc_RNA (1)...(19): siRNA sense strand
uauaagaauccggaacuug

SEQ ID NO: 592879 - RNA, 19 nt, Homo sapiens
  misc_RNA (1)...(19): siRNA sense strand
aggcacagaugucacuaca

SEQ ID NO: 592880 - RNA, 19 nt, Homo sapiens
  misc_RNA (1)...(19): siRNA sense strand
guggaggagcucaaaguug

SEQ ID NO: 592881 - RNA, 19 nt, Homo sapiens
  misc_RNA (1)...(19): siRNA sense strand
acacaugaagguggcauuu

SEQ ID NO: 592882 - RNA, 19 nt, Homo sapiens
  misc_RNA (1)...(19): siRNA sense strand
uuagaagcacagaaucgua

SEQ ID NO: 592883 - RNA, 19 nt, Homo sapiens
  misc_RNA (1)...(19): siRNA sense strand
gaugcugaugucuuuguuu

SEQ ID NO: 592884 - RNA, 19 nt, Homo sapiens
  misc_RNA (1)...(19): siRNA sense strand
acuuugugcuggcuaagaa

SEQ ID NO: 592885 - RNA, 19 nt, Homo sapiens
  misc_RNA (1)...(19): siRNA sense strand
acacuaaugaauacggaaa

SEQ ID NO: 592886 - RNA, 19 nt, Homo sapiens
  misc_RNA (1)...(19): siRNA sense strand
gugugaagacaguuaauca

SEQ ID NO: 592887 - RNA, 19 nt, Homo sapiens
  misc_RNA (1)...(19): siRNA sense strand
aagagugugaagacaguua

SEQ ID NO: 592888 - RNA, 19 nt, Homo sapiens
  misc_RNA (1)...(19): siRNA sense strand
cgaauagccacugaagaug

SEQ ID NO: 592889 - RNA, 19 nt, Homo sapiens
  misc_RNA (1)...(19): siRNA sense strand
cauauaagaauccggaacu

SEQ ID NO: 592890 - RNA, 19 nt, Homo sapiens
  misc_RNA (1)...(19): siRNA sense strand
cugcaucagagccagaaua

SEQ ID NO: 592891 - RNA, 19 nt, Homo sapiens
  misc_RNA (1)...(19): siRNA sense strand
gauaaguuuugccuagaug

SEQ ID NO: 592892 - RNA, 19 nt, Homo sapiens
  misc_RNA (1)...(19): siRNA sense strand
ugagagaugaccugguguu

SEQ ID NO: 592893 - RNA, 19 nt, Homo sapiens
  misc_RNA (1)...(19): siRNA sense strand
uaagaauccggaacuugau

SEQ ID NO: 592894 - RNA, 19 nt, Homo sapiens
  misc_RNA (1)...(19): siRNA sense strand
agugggaagagcucuguua

SEQ ID NO: 592895 - RNA, 19 nt, Homo sapiens
  misc_RNA (1)...(19): siRNA sense strand
uuacuggaguuuguuacug

SEQ ID NO: 592896 - RNA, 19 nt, Homo sapiens
  misc_RNA (1)...(19): siRNA sense strand
aaacucugaaucaacacua

SEQ ID NO: 592897 - RNA, 19 nt, Homo sapiens
  misc_RNA (1)...(19): siRNA sense strand
ggacaagcagugggaagag

SEQ ID NO: 592898 - RNA, 19 nt, Homo sapiens
  misc_RNA (1)...(19): siRNA sense strand
gcacacuaucagagcuaaa

SEQ ID NO: 592899 - RNA, 19 nt, Homo sapiens
  misc_RNA (1)...(19): siRNA sense strand
augcaaggauauaaagaca

SEQ ID NO: 592900 - RNA, 19 nt, Homo sapiens
  misc_RNA (1)...(19): siRNA sense strand
gaagagcucuguuaucaau

SEQ ID NO: 592901 - RNA, 19 nt, Homo sapiens
  misc_RNA (1)...(19): siRNA sense strand
gcacagaugucacuacaga

SEQ ID NO: 592902 - RNA, 19 nt, Homo sapiens
  misc_RNA (1)...(19): siRNA sense strand
gauacuagcuacugugaaa

SEQ ID NO: 592903 - RNA, 19 nt, Homo sapiens
  misc_RNA (1)...(19): siRNA sense strand
gggaagagcucuguuauca

SEQ ID NO: 592904 - RNA, 19 nt, Homo sapiens
  misc_RNA (1)...(19): siRNA sense strand
cuggauagcuggauugaua

SEQ ID NO: 592905 - RNA, 19 nt, Homo sapiens
  misc_RNA (1)...(19): siRNA sense strand
aaacugaggaugauuguua

SEQ ID NO: 592906 - RNA, 19 nt, Homo sapiens
  misc_RNA (1)...(19): siRNA sense strand
guucagaguuucauccuaa

SEQ ID NO: 592907 - RNA, 19 nt, Homo sapiens
  misc_RNA (1)...(19): siRNA sense strand
ccaaagaaauagaucaguu

SEQ ID NO: 592908 - RNA, 19 nt, Homo sapiens
  misc_RNA (1)...(19): siRNA sense strand
gagaugaccugguguuagu

SEQ ID NO: 592909 - RNA, 19 nt, Homo sapiens
  misc_RNA (1)...(19): siRNA sense strand
aaacugcagucaccaagua

SEQ ID NO: 592910 - RNA, 19 nt, Homo sapiens
  misc_RNA (1)...(19): siRNA sense strand
caucagagccagaauauau

SEQ ID NO: 592911 - RNA, 19 nt, Homo sapiens
  misc_RNA (1)...(19): siRNA sense strand
acuccuaucuguuucauua

SEQ ID NO: 592912 - RNA, 19 nt, Homo sapiens
  misc_RNA (1)...(19): siRNA sense strand
gaaccuguuucuccacuga

SEQ ID NO: 592913 - RNA, 19 nt, Homo sapiens
  misc_RNA (1)...(19): siRNA sense strand
gggcuggucuucccuugua

SEQ ID NO: 592914 - RNA, 19 nt, Homo sapiens
  misc_RNA (1)...(19): siRNA sense strand
gcaaggauauaaagacaag

SEQ ID NO: 592915 - RNA, 19 nt, Homo sapiens
  misc_RNA (1)...(19): siRNA sense strand
gaugaaauuugucgacugu

SEQ ID NO: 592916 - RNA, 19 nt, Homo sapiens
  misc_RNA (1)...(19): siRNA sense strand
caagaaauuugaucucagu

SEQ ID NO: 592917 - RNA, 19 nt, Homo sapiens
  misc_RNA (1)...(19): siRNA sense strand
gaagcaacauauaagaauc

SEQ ID NO: 592918 - RNA, 19 nt, Homo sapiens
  misc_RNA (1)...(19): siRNA sense strand
gcuggaaacuccuaucugu

SEQ ID NO: 592919 - RNA, 19 nt, Homo sapiens
  misc_RNA (1)...(19): siRNA sense strand
ugaaggaacugauggagau

SEQ ID NO: 592920 - RNA, 19 nt, Homo sapiens
  misc_RNA (1)...(19): siRNA sense strand
ccuagaugcugaugucuuu

SEQ ID NO: 592921 - RNA, 19 nt, Homo sapiens
  misc_RNA (1)...(19): siRNA sense strand
uaucagagccuaucuuuca

SEQ ID NO: 592922 - RNA, 19 nt, Homo sapiens
  misc_RNA (1)...(19): siRNA sense strand
gaauagccacugaagauga

SEQ ID NO: 592923 - RNA, 19 nt, Homo sapiens
  misc_RNA (1)...(19): siRNA sense strand
cauaauggauucaguaaac

SEQ ID NO: 592924 - RNA, 19 nt, Homo sapiens
  misc_RNA (1)...(19): siRNA sense strand
gacaagcuuuccaucauug

SEQ ID NO: 592925 - RNA, 19 nt, Homo sapiens
  misc_RNA (1)...(19): siRNA sense strand
gaaauaaagcuguucaacu

SEQ ID NO: 592926 - RNA, 19 nt, Homo sapiens
  misc_RNA (1)...(19): siRNA sense strand
gaagaacucaugauuacau

SEQ ID NO: 592927 - RNA, 19 nt, Homo sapiens
  misc_RNA (1)...(19): siRNA sense strand
gcaaugacagaugaaauuu

SEQ ID NO: 592928 - RNA, 19 nt, Homo sapiens
  misc_RNA (1)...(19): siRNA sense strand
gaaaugcaaggauauaaag

SEQ ID NO: 592929 - RNA, 19 nt, Homo sapiens
  misc_RNA (1)...(19): siRNA sense strand
caggaagaacucaugauua

SEQ ID NO: 592930 - RNA, 19 nt, Homo sapiens
  misc_RNA (1)...(19): siRNA sense strand
gauaaacuacauacacuga

SEQ ID NO: 592931 - RNA, 19 nt, Homo sapiens
  misc_RNA (1)...(19): siRNA sense strand
ggauaaaguucucccuagu

SEQ ID NO: 592932 - RNA, 19 nt, Homo sapiens
  misc_RNA (1)...(19): siRNA sense strand
ccuggcagcugaagauaaa

SEQ ID NO: 592933 - RNA, 19 nt, Homo sapiens
  misc_RNA (1)...(19): siRNA sense strand
acaaauagcuaccacuuuu

SEQ ID NO: 592934 - RNA, 19 nt, Homo sapiens
  misc_RNA (1)...(19): siRNA sense strand
guauggagcuuuguaucuu

SEQ ID NO: 592935 - RNA, 19 nt, Homo sapiens
  misc_RNA (1)...(19): siRNA sense strand
gaacucaugauuacauuag

SEQ ID NO: 592936 - RNA, 19 nt, Homo sapiens
  misc_RNA (1)...(19): siRNA sense strand
gcaaaggaaguucuuagug

SEQ ID NO: 592937 - RNA, 19 nt, Homo sapiens
  misc_RNA (1)...(19): siRNA sense strand
agacaagcuuuccaucauu

SEQ ID NO: 592938 - RNA, 19 nt, Homo sapiens
  misc_RNA (1)...(19): siRNA sense strand
caacaaauagcuaccacuu

SEQ ID NO: 592939 - RNA, 19 nt, Homo sapiens
  misc_RNA (1)...(19): siRNA sense strand
ggaagaaauuuggcugauc

SEQ ID NO: 592940 - RNA, 19 nt, Homo sapiens
  misc_RNA (1)...(19): siRNA sense strand
gaugguaugggaagaaauu

SEQ ID NO: 592941 - RNA, 19 nt, Homo sapiens
  misc_RNA (1)...(19): siRNA sense strand
ggcacuugcugaaggauuu

SEQ ID NO: 592942 - RNA, 19 nt, Homo sapiens
  misc_RNA (1)...(19): siRNA sense strand
cagcugguauacaggauaa

SEQ ID NO: 592943 - RNA, 19 nt, Homo sapiens
  misc_RNA (1)...(19): siRNA sense strand
caaagaaauagaucaguug

SEQ ID NO: 592944 - RNA, 19 nt, Homo sapiens
  misc_RNA (1)...(19): siRNA sense strand
guagaaaugcaaggauaua

SEQ ID NO: 592945 - RNA, 19 nt, Homo sapiens
  misc_RNA (1)...(19): siRNA sense strand
ggaagaagaaauugcuaga

SEQ ID NO: 592946 - RNA, 19 nt, Homo sapiens
  misc_RNA (1)...(19): siRNA sense strand
ucagcucccuagaucuuua

SEQ ID NO: 592947 - RNA, 19 nt, Homo sapiens
  misc_RNA (1)...(19): siRNA sense strand
uagcuggauugauaaguuu

SEQ ID NO: 592948 - RNA, 19 nt, Homo sapiens
  misc_RNA (1)...(19): siRNA sense strand
aagccuaucuuaugacaga

SEQ ID NO: 592949 - RNA, 19 nt, Homo sapiens
  misc_RNA (1)...(19): siRNA sense strand
gaagaaauugcuagauuac

SEQ ID NO: 592950 - RNA, 19 nt, Homo sapiens
  misc_RNA (1)...(19): siRNA sense strand
aaagggugcuccuaggauu

SEQ ID NO: 592951 - RNA, 19 nt, Homo sapiens
  misc_RNA (1)...(19): siRNA sense strand
gacagcacauggaaagaug

SEQ ID NO: 592952 - RNA, 19 nt, Homo sapiens
  misc_RNA (1)...(19): siRNA sense strand
acagaaggaucagaugaaa

SEQ ID NO: 592953 - RNA, 19 nt, Homo sapiens
  misc_RNA (1)...(19): siRNA sense strand
uauaaccaauugcuuccua

SEQ ID NO: 592954 - RNA, 19 nt, Homo sapiens
  misc_RNA (1)...(19): siRNA sense strand
ggagugauuuggaaaacua

SEQ ID NO: 592955 - RNA, 19 nt, Homo sapiens
  misc_RNA (1)...(19): siRNA sense strand
gaacuucuaugggcaucau

SEQ ID NO: 592956 - RNA, 19 nt, Homo sapiens
  misc_RNA (1)...(19): siRNA sense strand
gcagacagcacauggaaag

SEQ ID NO: 592957 - RNA, 19 nt, Homo sapiens
  misc_RNA (1)...(19): siRNA sense strand
gagagaugaccugguguua

SEQ ID NO: 592958 - RNA, 19 nt, Homo sapiens
  misc_RNA (1)...(19): siRNA sense strand
aggaagaacucaugauuac

SEQ ID NO: 592959 - RNA, 19 nt, Homo sapiens
  misc_RNA (1)...(19): siRNA sense strand
uaaacuacauacacugauc

SEQ ID NO: 592960 - RNA, 19 nt, Homo sapiens
  misc_RNA (1)...(19): siRNA sense strand
caugugcaaugacagauga

SEQ ID NO: 592961 - RNA, 19 nt, Homo sapiens
  misc_RNA (1)...(19): siRNA sense strand
ugguagaaaugcaaggaua

SEQ ID NO: 592962 - RNA, 19 nt, Homo sapiens
  misc_RNA (1)...(19): siRNA sense strand
uaaagccuaucuuaugaca

SEQ ID NO: 592963 - RNA, 19 nt, Homo sapiens
  misc_RNA (1)...(19): siRNA sense strand
ccaauugcuuccuaagugu

SEQ ID NO: 592964 - RNA, 19 nt, Homo sapiens
  misc_RNA (1)...(19): siRNA sense strand
cacaaguuauguucagauu

SEQ ID NO: 592965 - RNA, 19 nt, Homo sapiens
  misc_RNA (1)...(19): siRNA sense strand
aggauuucaugcaagauua

SEQ ID NO: 592966 - RNA, 19 nt, Homo sapiens
  misc_RNA (1)...(19): siRNA sense strand
acugaucccuugcaagaaa

SEQ ID NO: 592967 - RNA, 19 nt, Homo sapiens
  misc_RNA (1)...(19): siRNA sense strand
acacugaucccuugcaaga

SEQ ID NO: 592968 - RNA, 19 nt, Homo sapiens
  misc_RNA (1)...(19): siRNA sense strand
ggaguuuguuacugaagga

SEQ ID NO: 592969 - RNA, 19 nt, Homo sapiens
  misc_RNA (1)...(19): siRNA sense strand
gacagaaggaucagaugaa

SEQ ID NO: 592970 - RNA, 19 nt, Homo sapiens
  misc_RNA (1)...(19): siRNA sense strand
gcaauguugugggauaaag

SEQ ID NO: 592971 - RNA, 19 nt, Homo sapiens
  misc_RNA (1)...(19): siRNA sense strand
aaauagaucaguuggagaa

SEQ ID NO: 592972 - RNA, 19 nt, Homo sapiens
  misc_RNA (1)...(19): siRNA sense strand
ggagcgagccuuuaaacag

SEQ ID NO: 592973 - RNA, 19 nt, Homo sapiens
  misc_RNA (1)...(19): siRNA sense strand
gagcuuuguaucuuuauga

SEQ ID NO: 592974 - RNA, 19 nt, Homo sapiens
  misc_RNA (1)...(19): siRNA sense strand
uauggagcuuuguaucuuu

SEQ ID NO: 592975 - RNA, 19 nt, Homo sapiens
  misc_RNA (1)...(19): siRNA sense strand
gaggauauuguauuucguu

SEQ ID NO: 592976 - RNA, 19 nt, Homo sapiens
  misc_RNA (1)...(19): siRNA sense strand
gauaaaguucucccuagug

SEQ ID NO: 592977 - RNA, 19 nt, Homo sapiens
  misc_RNA (1)...(19): siRNA sense strand
ugauggagauaaagccuau

SEQ ID NO: 592978 - RNA, 19 nt, Homo sapiens
  misc_RNA (1)...(19): siRNA sense strand
ugaaguaaacgccuuagug

SEQ ID NO: 592979 - RNA, 19 nt, Homo sapiens
  misc_RNA (1)...(19): siRNA sense strand
gggaagaaauuuggcugau

SEQ ID NO: 592980 - RNA, 19 nt, Homo sapiens
  misc_RNA (1)...(19): siRNA sense strand
caugcaagauuacaggaau

SEQ ID NO: 592981 - RNA, 19 nt, Homo sapiens
  misc_RNA (1)...(19): siRNA sense strand
aaugcaauguugugggaua

SEQ ID NO: 592982 - RNA, 19 nt, Homo sapiens
  misc_RNA (1)...(19): siRNA sense strand
gaagaagaaauugcuagau

SEQ ID NO: 592983 - RNA, 19 nt, Homo sapiens
  misc_RNA (1)...(19): siRNA sense strand
uguaaacuaugcaacugaa

SEQ ID NO: 592984 - RNA, 19 nt, Homo sapiens
  misc_RNA (1)...(19): siRNA sense strand
ucuaugggcaucauuauug

SEQ ID NO: 592985 - RNA, 19 nt, Homo sapiens
  misc_RNA (1)...(19): siRNA sense strand
caagauuacaggaauuuca

SEQ ID NO: 592986 - RNA, 19 nt, Homo sapiens
  misc_RNA (1)...(19): siRNA sense strand
cgcaaacucugaaucaaca

SEQ ID NO: 592987 - RNA, 19 nt, Homo sapiens
  misc_RNA (1)...(19): siRNA sense strand
auaagaauccggaacuuga

SEQ ID NO: 592988 - RNA, 19 nt, Homo sapiens
  misc_RNA (1)...(19): siRNA sense strand
aagacaagcuuuccaucau

SEQ ID NO: 592989 - RNA, 19 nt, Homo sapiens
  misc_RNA (1)...(19): siRNA sense strand
caucauuggugaggugcua

SEQ ID NO: 592990 - RNA, 19 nt, Homo sapiens
  misc_RNA (1)...(19): siRNA sense strand
ugacagaaggaucagauga

SEQ ID NO: 592991 - RNA, 19 nt, Homo sapiens
  misc_RNA (1)...(19): siRNA sense strand
gaaggaacugauggagaua

SEQ ID NO: 592992 - RNA, 19 nt, Homo sapiens
  misc_RNA (1)...(19): siRNA sense strand
ucgaugcaccgaugaagua

SEQ ID NO: 592993 - RNA, 19 nt, Homo sapiens
  misc_RNA (1)...(19): siRNA sense strand
ggaagagcucuguuaucaa

SEQ ID NO: 592994 - RNA, 19 nt, Homo sapiens
  misc_RNA (1)...(19): siRNA sense strand
ucgaauagccacugaagau

SEQ ID NO: 592995 - RNA, 19 nt, Homo sapiens
  misc_RNA (1)...(19): siRNA sense strand
ugaaauuugucgacugucu

SEQ ID NO: 592996 - RNA, 19 nt, Homo sapiens
  misc_RNA (1)...(19): siRNA sense strand
ggucgcaaacucugaauca

SEQ ID NO: 592997 - RNA, 19 nt, Homo sapiens
  misc_RNA (1)...(19): siRNA sense strand
gaacugauggagauaaagc

SEQ ID NO: 592998 - RNA, 19 nt, Homo sapiens
  misc_RNA (1)...(19): siRNA sense strand
acaggaagaacucaugauu

SEQ ID NO: 592999 - RNA, 19 nt, Homo sapiens
  misc_RNA (1)...(19): siRNA sense strand
auagcuggauugauaaguu

SEQ ID NO: 593000 - RNA, 19 nt, Homo sapiens
  misc_RNA (1)...(19): siRNA sense strand
ggagggcgcuacaaaguuu

SEQ ID NO: 593001 - RNA, 19 nt, Homo sapiens
  misc_RNA (1)...(19): siRNA sense strand
ggaaggacauugagcuuga

SEQ ID NO: 593002 - RNA, 19 nt, Homo sapiens
  misc_RNA (1)...(19): siRNA sense strand
gaugaaagcuggugggaau

SEQ ID NO: 593003 - RNA, 19 nt, Homo sapiens
  misc_RNA (1)...(19): siRNA sense strand
acauugagcuugagaagau

SEQ ID NO: 593004 - RNA, 19 nt, Homo sapiens
  misc_RNA (1)...(19): siRNA sense strand
aagacuggcugaaugauga

SEQ ID NO: 593005 - RNA, 19 nt, Homo sapiens
  misc_RNA (1)...(19): siRNA sense strand
ggacaaggcuuuugaagac

SEQ ID NO: 593006 - RNA, 19 nt, Homo sapiens
  misc_RNA (1)...(19): siRNA sense strand
ccaaggagggcgcuacaaa

SEQ ID NO: 593007 - RNA, 19 nt, Homo sapiens
  misc_RNA (1)...(19): siRNA sense strand
gaagacuggcugaaugaug

SEQ ID NO: 593008 - RNA, 19 nt, Homo sapiens
  misc_RNA (1)...(19): siRNA sense strand
gaacgagaacguccucaag

SEQ ID NO: 593009 - RNA, 19 nt, Homo sapiens
  misc_RNA (1)...(19): siRNA sense strand
gaccucggcuccuaucaag

SEQ ID NO: 593010 - RNA, 19 nt, Homo sapiens
  misc_RNA (1)...(19): siRNA sense strand
ggugaaggagggaaagauu

SEQ ID NO: 593011 - RNA, 19 nt, Homo sapiens
  misc_RNA (1)...(19): siRNA sense strand
aagaugacuuccucaacaa

SEQ ID NO: 593012 - RNA, 19 nt, Homo sapiens
  misc_RNA (1)...(19): siRNA sense strand
ggacauugagcuugagaag

SEQ ID NO: 593013 - RNA, 19 nt, Homo sapiens
  misc_RNA (1)...(19): siRNA sense strand
gugaaggagggaaagauuu

SEQ ID NO: 593014 - RNA, 19 nt, Homo sapiens
  misc_RNA (1)...(19): siRNA sense strand
gccacagccugaacgagaa

SEQ ID NO: 593015 - RNA, 19 nt, Homo sapiens
  misc_RNA (1)...(19): siRNA sense strand
uggagucucaggaggauua

SEQ ID NO: 593016 - RNA, 19 nt, Homo sapiens
  misc_RNA (1)...(19): siRNA sense strand
ugggagaccuuuggaagug

SEQ ID NO: 593017 - RNA, 19 nt, Homo sapiens
  misc_RNA (1)...(19): siRNA sense strand
ggacaaguggaaggacauu

SEQ ID NO: 593018 - RNA, 19 nt, Homo sapiens
  misc_RNA (1)...(19): siRNA sense strand
uuugaagacuggcugaaug

SEQ ID NO: 593019 - RNA, 19 nt, Homo sapiens
  misc_RNA (1)...(19): siRNA sense strand
acaaguggaaggacauuga

SEQ ID NO: 593020 - RNA, 19 nt, Homo sapiens
  misc_RNA (1)...(19): siRNA sense strand
ggccacaguuaucagaaca

SEQ ID NO: 593021 - RNA, 19 nt, Homo sapiens
  misc_RNA (1)...(19): siRNA sense strand
uuugugcgcucuguuacua

SEQ ID NO: 593022 - RNA, 19 nt, Homo sapiens
  misc_RNA (1)...(19): siRNA sense strand
gaagugcugagcccaccaa

SEQ ID NO: 593023 - RNA, 19 nt, Homo sapiens
  misc_RNA (1)...(19): siRNA sense strand
gaaggacauugagcuugag

SEQ ID NO: 593024 - RNA, 19 nt, Homo sapiens
  misc_RNA (1)...(19): siRNA sense strand
caaggagggcgcuacaaag

SEQ ID NO: 593025 - RNA, 19 nt, Homo sapiens
  misc_RNA (1)...(19): siRNA sense strand
gugcugagcccaccaagac

SEQ ID NO: 593026 - RNA, 19 nt, Homo sapiens
  misc_RNA (1)...(19): siRNA sense strand
ggguucaccucagcuuugu

SEQ ID NO: 593027 - RNA, 19 nt, Homo sapiens
  misc_RNA (1)...(19): siRNA sense strand
caacguuuguuuugagugu

SEQ ID NO: 593028 - RNA, 19 nt, Homo sapiens
  misc_RNA (1)...(19): siRNA sense strand
cgccaccgccucagaagaa

SEQ ID NO: 593029 - RNA, 19 nt, Homo sapiens
  misc_RNA (1)...(19): siRNA sense strand
gagggccacaguuaucaga

SEQ ID NO: 593030 - RNA, 19 nt, Homo sapiens
  misc_RNA (1)...(19): siRNA sense strand
gagcuucugggagaccuuu

SEQ ID NO: 593031 - RNA, 19 nt, Homo sapiens
  misc_RNA (1)...(19): siRNA sense strand
gaguguggcgcguucaauc

SEQ ID NO: 593032 - RNA, 19 nt, Homo sapiens
  misc_RNA (1)...(19): siRNA sense strand
gggccacaguuaucagaac

SEQ ID NO: 593033 - RNA, 19 nt, Homo sapiens
  misc_RNA (1)...(19): siRNA sense strand
gcaggaugagaacaacguu

SEQ ID NO: 593034 - RNA, 19 nt, Homo sapiens
  misc_RNA (1)...(19): siRNA sense strand
agucaucaccugcccagaa

SEQ ID NO: 593035 - RNA, 19 nt, Homo sapiens
  misc_RNA (1)...(19): siRNA sense strand
gaaagcuggugggaaugcu

SEQ ID NO: 593036 - RNA, 19 nt, Homo sapiens
  misc_RNA (1)...(19): siRNA sense strand
gacauugagcuugagaaga

SEQ ID NO: 593037 - RNA, 19 nt, Homo sapiens
  misc_RNA (1)...(19): siRNA sense strand
augaugaccucggcuccua

SEQ ID NO: 593038 - RNA, 19 nt, Homo sapiens
  misc_RNA (1)...(19): siRNA sense strand
gccaccgccucagaagaaa

SEQ ID NO: 593039 - RNA, 19 nt, Homo sapiens
  misc_RNA (1)...(19): siRNA sense strand
ccaguggggucucucaguu

SEQ ID NO: 593040 - RNA, 19 nt, Homo sapiens
  misc_RNA (1)...(19): siRNA sense strand
gucaucaccugcccagaac

SEQ ID NO: 593041 - RNA, 19 nt, Homo sapiens
  misc_RNA (1)...(19): siRNA sense strand
ccaccaacaggaacagcaa

SEQ ID NO: 593042 - RNA, 19 nt, Homo sapiens
  misc_RNA (1)...(19): siRNA sense strand
ggagggcgcuacaaaguuu

SEQ ID NO: 593043 - RNA, 19 nt, Homo sapiens
  misc_RNA (1)...(19): siRNA sense strand
ggaaggacauugagcuuga

SEQ ID NO: 593044 - RNA, 19 nt, Homo sapiens
  misc_RNA (1)...(19): siRNA sense strand
gaugaaagcuggugggaau

SEQ ID NO: 593045 - RNA, 19 nt, Homo sapiens
  misc_RNA (1)...(19): siRNA sense strand
acauugagcuugagaagau

SEQ ID NO: 593046 - RNA, 19 nt, Homo sapiens
  misc_RNA (1)...(19): siRNA sense strand
aagacuggcugaaugauga

SEQ ID NO: 593047 - RNA, 19 nt, Homo sapiens
  misc_RNA (1)...(19): siRNA sense strand
ggacaaggcuuuugaagac

SEQ ID NO: 593048 - RNA, 19 nt, Homo sapiens
  misc_RNA (1)...(19): siRNA sense strand
ccaaggagggcgcuacaaa

SEQ ID NO: 593049 - RNA, 19 nt, Homo sapiens
  misc_RNA (1)...(19): siRNA sense strand
gaagacuggcugaaugaug

SEQ ID NO: 593050 - RNA, 19 nt, Homo sapiens
  misc_RNA (1)...(19): siRNA sense strand
gaacgagaacguccucaag

SEQ ID NO: 593051 - RNA, 19 nt, Homo sapiens
  misc_RNA (1)...(19): siRNA sense strand
gaccucggcuccuaucaag

SEQ ID NO: 593052 - RNA, 19 nt, Homo sapiens
  misc_RNA (1)...(19): siRNA sense strand
ggugaaggagggaaagauu

SEQ ID NO: 593053 - RNA, 19 nt, Homo sapiens
  misc_RNA (1)...(19): siRNA sense strand
aagaugacuuccucaacaa

SEQ ID NO: 593054 - RNA, 19 nt, Homo sapiens
  misc_RNA (1)...(19): siRNA sense strand
ggacauugagcuugagaag

SEQ ID NO: 593055 - RNA, 19 nt, Homo sapiens
  misc_RNA (1)...(19): siRNA sense strand
gugaaggagggaaagauuu

SEQ ID NO: 593056 - RNA, 19 nt, Homo sapiens
  misc_RNA (1)...(19): siRNA sense strand
gccacagccugaacgagaa

SEQ ID NO: 593057 - RNA, 19 nt, Homo sapiens
  misc_RNA (1)...(19): siRNA sense strand
uggagucucaggaggauua

SEQ ID NO: 593058 - RNA, 19 nt, Homo sapiens
  misc_RNA (1)...(19): siRNA sense strand
ugggagaccuuuggaagug

SEQ ID NO: 593059 - RNA, 19 nt, Homo sapiens
  misc_RNA (1)...(19): siRNA sense strand
ggacaaguggaaggacauu

SEQ ID NO: 593060 - RNA, 19 nt, Homo sapiens
  misc_RNA (1)...(19): siRNA sense strand
uuugaagacuggcugaaug

SEQ ID NO: 593061 - RNA, 19 nt, Homo sapiens
  misc_RNA (1)...(19): siRNA sense strand
acaaguggaaggacauuga

SEQ ID NO: 593062 - RNA, 19 nt, Homo sapiens
  misc_RNA (1)...(19): siRNA sense strand
ggccacaguuaucagaaca

SEQ ID NO: 593063 - RNA, 19 nt, Homo sapiens
  misc_RNA (1)...(19): siRNA sense strand
uuugugcgcucuguuacua

SEQ ID NO: 593064 - RNA, 19 nt, Homo sapiens
  misc_RNA (1)...(19): siRNA sense strand
gaagugcugagcccaccaa

SEQ ID NO: 593065 - RNA, 19 nt, Homo sapiens
  misc_RNA (1)...(19): siRNA sense strand
gaaggacauugagcuugag

SEQ ID NO: 593066 - RNA, 19 nt, Homo sapiens
  misc_RNA (1)...(19): siRNA sense strand
caaggagggcgcuacaaag

SEQ ID NO: 593067 - RNA, 19 nt, Homo sapiens
  misc_RNA (1)...(19): siRNA sense strand
gugcugagcccaccaagac

SEQ ID NO: 593068 - RNA, 19 nt, Homo sapiens
  misc_RNA (1)...(19): siRNA sense strand
ggguucaccucagcuuugu

SEQ ID NO: 593069 - RNA, 19 nt, Homo sapiens
  misc_RNA (1)...(19): siRNA sense strand
caacguuuguuuugagugu

SEQ ID NO: 593070 - RNA, 19 nt, Homo sapiens
  misc_RNA (1)...(19): siRNA sense strand
cgccaccgccucagaagaa

SEQ ID NO: 593071 - RNA, 19 nt, Homo sapiens
  misc_RNA (1)...(19): siRNA sense strand
gagggccacaguuaucaga

SEQ ID NO: 593072 - RNA, 19 nt, Homo sapiens
  misc_RNA (1)...(19): siRNA sense strand
gagcuucugggagaccuuu

SEQ ID NO: 593073 - RNA, 19 nt, Homo sapiens
  misc_RNA (1)...(19): siRNA sense strand
gaguguggcgcguucaauc

SEQ ID NO: 593074 - RNA, 19 nt, Homo sapiens
  misc_RNA (1)...(19): siRNA sense strand
gggccacaguuaucagaac

SEQ ID NO: 593075 - RNA, 19 nt, Homo sapiens
  misc_RNA (1)...(19): siRNA sense strand
gcaggaugagaacaacguu

SEQ ID NO: 593076 - RNA, 19 nt, Homo sapiens
  misc_RNA (1)...(19): siRNA sense strand
agucaucaccugcccagaa

SEQ ID NO: 593077 - RNA, 19 nt, Homo sapiens
  misc_RNA (1)...(19): siRNA sense strand
gaaagcuggugggaaugcu

SEQ ID NO: 593078 - RNA, 19 nt, Homo sapiens
  misc_RNA (1)...(19): siRNA sense strand
gacauugagcuugagaaga

SEQ ID NO: 593079 - RNA, 19 nt, Homo sapiens
  misc_RNA (1)...(19): siRNA sense strand
augaugaccucggcuccua

SEQ ID NO: 593080 - RNA, 19 nt, Homo sapiens
  misc_RNA (1)...(19): siRNA sense strand
gccaccgccucagaagaaa

SEQ ID NO: 593081 - RNA, 19 nt, Homo sapiens
  misc_RNA (1)...(19): siRNA sense strand
ccaguggggucucucaguu

SEQ ID NO: 593082 - RNA, 19 nt, Homo sapiens
  misc_RNA (1)...(19): siRNA sense strand
gucaucaccugcccagaac

SEQ ID NO: 593083 - RNA, 19 nt, Homo sapiens
  misc_RNA (1)...(19): siRNA sense strand
ccaccaacaggaacagcaa

SEQ ID NO: 593084 - RNA, 19 nt, Homo sapiens
  misc_RNA (1)...(19): siRNA sense strand
gaaaguaacuaugaagcua

SEQ ID NO: 593085 - RNA, 19 nt, Homo sapiens
  misc_RNA (1)...(19): siRNA sense strand
gaucuucucuuccuguuaa

SEQ ID NO: 593086 - RNA, 19 nt, Homo sapiens
  misc_RNA (1)...(19): siRNA sense strand
gcaccuggguucagcaaua

SEQ ID NO: 593087 - RNA, 19 nt, Homo sapiens
  misc_RNA (1)...(19): siRNA sense strand
gcaaagagaagcucauuau

SEQ ID NO: 593088 - RNA, 19 nt, Homo sapiens
  misc_RNA (1)...(19): siRNA sense strand
gauaaugguugccaaaugu

SEQ ID NO: 593089 - RNA, 19 nt, Homo sapiens
  misc_RNA (1)...(19): siRNA sense strand
aagagaagcucauuauuug

SEQ ID NO: 593090 - RNA, 19 nt, Homo sapiens
  misc_RNA (1)...(19): siRNA sense strand
gaaauacugugacuuugau

SEQ ID NO: 593091 - RNA, 19 nt, Homo sapiens
  misc_RNA (1)...(19): siRNA sense strand
uaacgaaagugcugucuau

SEQ ID NO: 593092 - RNA, 19 nt, Homo sapiens
  misc_RNA (1)...(19): siRNA sense strand
caacacagccauauugauu

SEQ ID NO: 593093 - RNA, 19 nt, Homo sapiens
  misc_RNA (1)...(19): siRNA sense strand
uauggaaacucguuacuuu

SEQ ID NO: 593094 - RNA, 19 nt, Homo sapiens
  misc_RNA (1)...(19): siRNA sense strand
gcaaagaugauccaauuga

SEQ ID NO: 593095 - RNA, 19 nt, Homo sapiens
  misc_RNA (1)...(19): siRNA sense strand
gaagagcuaaugaauauga

SEQ ID NO: 593096 - RNA, 19 nt, Homo sapiens
  misc_RNA (1)...(19): siRNA sense strand
gcauacaguugggauauaa

SEQ ID NO: 593097 - RNA, 19 nt, Homo sapiens
  misc_RNA (1)...(19): siRNA sense strand
ggacuggugucuauuacuu

SEQ ID NO: 593098 - RNA, 19 nt, Homo sapiens
  misc_RNA (1)...(19): siRNA sense strand
ggaagggucuuuagcaucu

SEQ ID NO: 593099 - RNA, 19 nt, Homo sapiens
  misc_RNA (1)...(19): siRNA sense strand
caaagaugauccaauugaa

SEQ ID NO: 593100 - RNA, 19 nt, Homo sapiens
  misc_RNA (1)...(19): siRNA sense strand
uggcaaagaugauccaauu

SEQ ID NO: 593101 - RNA, 19 nt, Homo sapiens
  misc_RNA (1)...(19): siRNA sense strand
ugcauuagcuucagacuuu

SEQ ID NO: 593102 - RNA, 19 nt, Homo sapiens
  misc_RNA (1)...(19): siRNA sense strand
ggaaagauucaucagcaua

SEQ ID NO: 593103 - RNA, 19 nt, Homo sapiens
  misc_RNA (1)...(19): siRNA sense strand
guagaagucacucaauaua

SEQ ID NO: 593104 - RNA, 19 nt, Homo sapiens
  misc_RNA (1)...(19): siRNA sense strand
gaucugaaaguaacuauga

SEQ ID NO: 593105 - RNA, 19 nt, Homo sapiens
  misc_RNA (1)...(19): siRNA sense strand
gcacaaggagauaguguuu

SEQ ID NO: 593106 - RNA, 19 nt, Homo sapiens
  misc_RNA (1)...(19): siRNA sense strand
ggaaagcgaggcaaauuau

SEQ ID NO: 593107 - RNA, 19 nt, Homo sapiens
  misc_RNA (1)...(19): siRNA sense strand
caucucagcugguuacaug

SEQ ID NO: 593108 - RNA, 19 nt, Homo sapiens
  misc_RNA (1)...(19): siRNA sense strand
cgaaagugcugucuaugug

SEQ ID NO: 593109 - RNA, 19 nt, Homo sapiens
  misc_RNA (1)...(19): siRNA sense strand
gaggauaugcuacaagaaa

SEQ ID NO: 593110 - RNA, 19 nt, Homo sapiens
  misc_RNA (1)...(19): siRNA sense strand
gaacaauauucucaaggau

SEQ ID NO: 593111 - RNA, 19 nt, Homo sapiens
  misc_RNA (1)...(19): siRNA sense strand
cacaggaacugggaaauuu

SEQ ID NO: 593112 - RNA, 19 nt, Homo sapiens
  misc_RNA (1)...(19): siRNA sense strand
uaacugagucugugaacua

SEQ ID NO: 593113 - RNA, 19 nt, Homo sapiens
  misc_RNA (1)...(19): siRNA sense strand
uaaauuggcugcauuagcu

SEQ ID NO: 593114 - RNA, 19 nt, Homo sapiens
  misc_RNA (1)...(19): siRNA sense strand
uaaagaaggagucaacauu

SEQ ID NO: 593115 - RNA, 19 nt, Homo sapiens
  misc_RNA (1)...(19): siRNA sense strand
gaaaggaaagcgaggcaaa

SEQ ID NO: 593116 - RNA, 19 nt, Homo sapiens
  misc_RNA (1)...(19): siRNA sense strand
agcaauacgucacugauua

SEQ ID NO: 593117 - RNA, 19 nt, Homo sapiens
  misc_RNA (1)...(19): siRNA sense strand
gaaagauucaucagcauau

SEQ ID NO: 593118 - RNA, 19 nt, Homo sapiens
  misc_RNA (1)...(19): siRNA sense strand
aaagcgaggcaaauuauua

SEQ ID NO: 593119 - RNA, 19 nt, Homo sapiens
  misc_RNA (1)...(19): siRNA sense strand
ccaguaaucgggaaagaua

SEQ ID NO: 593120 - RNA, 19 nt, Homo sapiens
  misc_RNA (1)...(19): siRNA sense strand
auccaugucucaucuauua

SEQ ID NO: 593121 - RNA, 19 nt, Homo sapiens
  misc_RNA (1)...(19): siRNA sense strand
uaaguuauccguuugcaaa

SEQ ID NO: 593122 - RNA, 19 nt, Homo sapiens
  misc_RNA (1)...(19): siRNA sense strand
ggagguaucccaaguagau

SEQ ID NO: 593123 - RNA, 19 nt, Homo sapiens
  misc_RNA (1)...(19): siRNA sense strand
guguagaccugauggauga

SEQ ID NO: 593124 - RNA, 19 nt, Homo sapiens
  misc_RNA (1)...(19): siRNA sense strand
guucaaacaucaguaaaug

SEQ ID NO: 593125 - RNA, 19 nt, Homo sapiens
  misc_RNA (1)...(19): siRNA sense strand
gaacuucagcugccaccua

SEQ ID NO: 593126 - RNA, 19 nt, Homo sapiens
  misc_RNA (1)...(19): siRNA sense strand
gaagauaaugguugccaaa

SEQ ID NO: 593127 - RNA, 19 nt, Homo sapiens
  misc_RNA (1)...(19): siRNA sense strand
gugaagaucuuacagaaac

SEQ ID NO: 593128 - RNA, 19 nt, Homo sapiens
  misc_RNA (1)...(19): siRNA sense strand
ggaauauauugaugaggaa

SEQ ID NO: 593129 - RNA, 19 nt, Homo sapiens
  misc_RNA (1)...(19): siRNA sense strand
cagaggauaugcuacaaga

SEQ ID NO: 593130 - RNA, 19 nt, Homo sapiens
  misc_RNA (1)...(19): siRNA sense strand
gagaaauacugugacuuug

SEQ ID NO: 593131 - RNA, 19 nt, Homo sapiens
  misc_RNA (1)...(19): siRNA sense strand
ucaucaaguuggcuuauuu

SEQ ID NO: 593132 - RNA, 19 nt, Homo sapiens
  misc_RNA (1)...(19): siRNA sense strand
ugaaguaucuaaagacagu

SEQ ID NO: 593133 - RNA, 19 nt, Homo sapiens
  misc_RNA (1)...(19): siRNA sense strand
gaaacucguuacuuugcaa

SEQ ID NO: 593134 - RNA, 19 nt, Homo sapiens
  misc_RNA (1)...(19): siRNA sense strand
cauccgaacgguaauaaua

SEQ ID NO: 593135 - RNA, 19 nt, Homo sapiens
  misc_RNA (1)...(19): siRNA sense strand
agagaagaaucacuagaaa

SEQ ID NO: 593136 - RNA, 19 nt, Homo sapiens
  misc_RNA (1)...(19): siRNA sense strand
gaaacucuuuguauagaag

SEQ ID NO: 593137 - RNA, 19 nt, Homo sapiens
  misc_RNA (1)...(19): siRNA sense strand
ugaacaauauucucaagga

SEQ ID NO: 593138 - RNA, 19 nt, Homo sapiens
  misc_RNA (1)...(19): siRNA sense strand
gguuauguuucucagcuua

SEQ ID NO: 593139 - RNA, 19 nt, Homo sapiens
  misc_RNA (1)...(19): siRNA sense strand
gcuuaaaguccaauccuua

SEQ ID NO: 593140 - RNA, 19 nt, Homo sapiens
  misc_RNA (1)...(19): siRNA sense strand
gcaaauauggaaacucguu

SEQ ID NO: 593141 - RNA, 19 nt, Homo sapiens
  misc_RNA (1)...(19): siRNA sense strand
ggagucaacauucgauauu

SEQ ID NO: 593142 - RNA, 19 nt, Homo sapiens
  misc_RNA (1)...(19): siRNA sense strand
gacaguauauuugugaaga

SEQ ID NO: 593143 - RNA, 19 nt, Homo sapiens
  misc_RNA (1)...(19): siRNA sense strand
gauggaauaccuacagaaa

SEQ ID NO: 593144 - RNA, 19 nt, Homo sapiens
  misc_RNA (1)...(19): siRNA sense strand
gagucaacauucgauauuu

SEQ ID NO: 593145 - RNA, 19 nt, Homo sapiens
  misc_RNA (1)...(19): siRNA sense strand
cauggaagcccuaacauug

SEQ ID NO: 593146 - RNA, 19 nt, Homo sapiens
  misc_RNA (1)...(19): siRNA sense strand
agagaaauacugugacuuu

SEQ ID NO: 593147 - RNA, 19 nt, Homo sapiens
  misc_RNA (1)...(19): siRNA sense strand
cagcuuaagucuguggaua

SEQ ID NO: 593148 - RNA, 19 nt, Homo sapiens
  misc_RNA (1)...(19): siRNA sense strand
ggauucugauucugaacua

SEQ ID NO: 593149 - RNA, 19 nt, Homo sapiens
  misc_RNA (1)...(19): siRNA sense strand
gaaaaugugucuauauugg

SEQ ID NO: 593150 - RNA, 19 nt, Homo sapiens
  misc_RNA (1)...(19): siRNA sense strand
guaaaugggaauuagauga

SEQ ID NO: 593151 - RNA, 19 nt, Homo sapiens
  misc_RNA (1)...(19): siRNA sense strand
ggaauuuuaucuccuagua

SEQ ID NO: 593152 - RNA, 19 nt, Homo sapiens
  misc_RNA (1)...(19): siRNA sense strand
gaguaaauuggcugcauua

SEQ ID NO: 593153 - RNA, 19 nt, Homo sapiens
  misc_RNA (1)...(19): siRNA sense strand
cuucuuggcuugaguaaau

SEQ ID NO: 593154 - RNA, 19 nt, Homo sapiens
  misc_RNA (1)...(19): siRNA sense strand
ccaguuugcugaucagaau

SEQ ID NO: 593155 - RNA, 19 nt, Homo sapiens
  misc_RNA (1)...(19): siRNA sense strand
gcagagaaauacugugacu

SEQ ID NO: 593156 - RNA, 19 nt, Homo sapiens
  misc_RNA (1)...(19): siRNA sense strand
gagauggaauaccuacaga

SEQ ID NO: 593157 - RNA, 19 nt, Homo sapiens
  misc_RNA (1)...(19): siRNA sense strand
gauggccacucgacuguug

SEQ ID NO: 593158 - RNA, 19 nt, Homo sapiens
  misc_RNA (1)...(19): siRNA sense strand
gggaaaaugugucuauauu

SEQ ID NO: 593159 - RNA, 19 nt, Homo sapiens
  misc_RNA (1)...(19): siRNA sense strand
ccacaccacuccauaacug

SEQ ID NO: 593160 - RNA, 19 nt, Homo sapiens
  misc_RNA (1)...(19): siRNA sense strand
acaaggagauaguguuuua

SEQ ID NO: 593161 - RNA, 19 nt, Homo sapiens
  misc_RNA (1)...(19): siRNA sense strand
gaaguggugaucaauguga

SEQ ID NO: 593162 - RNA, 19 nt, Homo sapiens
  misc_RNA (1)...(19): siRNA sense strand
gggcugaaguggugaucaa

SEQ ID NO: 593163 - RNA, 19 nt, Homo sapiens
  misc_RNA (1)...(19): siRNA sense strand
caacucauuggucuauaua

SEQ ID NO: 593164 - RNA, 19 nt, Homo sapiens
  misc_RNA (1)...(19): siRNA sense strand
gaacaucucagcugguuac

SEQ ID NO: 593165 - RNA, 19 nt, Homo sapiens
  misc_RNA (1)...(19): siRNA sense strand
gaaagcgaggcaaauuauu

SEQ ID NO: 593166 - RNA, 19 nt, Homo sapiens
  misc_RNA (1)...(19): siRNA sense strand
gagaagcucauuauuugga

SEQ ID NO: 593167 - RNA, 19 nt, Homo sapiens
  misc_RNA (1)...(19): siRNA sense strand
gggcuugucuggugugcaa

SEQ ID NO: 593168 - RNA, 19 nt, Homo sapiens
  misc_RNA (1)...(19): siRNA sense strand
gcuuaagucuguggauaaa

SEQ ID NO: 593169 - RNA, 19 nt, Homo sapiens
  misc_RNA (1)...(19): siRNA sense strand
caaccugacuccugcagau

SEQ ID NO: 593170 - RNA, 19 nt, Homo sapiens
  misc_RNA (1)...(19): siRNA sense strand
ccauauugauugcuuugaa

SEQ ID NO: 593171 - RNA, 19 nt, Homo sapiens
  misc_RNA (1)...(19): siRNA sense strand
caaagagaagcucauuauu

SEQ ID NO: 593172 - RNA, 19 nt, Homo sapiens
  misc_RNA (1)...(19): siRNA sense strand
gaagagaagaaucacuaga

SEQ ID NO: 593173 - RNA, 19 nt, Homo sapiens
  misc_RNA (1)...(19): siRNA sense strand
uagaagagaagaaucacua

SEQ ID NO: 593174 - RNA, 19 nt, Homo sapiens
  misc_RNA (1)...(19): siRNA sense strand
ggaccaaacagugagagua

SEQ ID NO: 593175 - RNA, 19 nt, Homo sapiens
  misc_RNA (1)...(19): siRNA sense strand
ucaggaagccaacuaauuc

SEQ ID NO: 593176 - RNA, 19 nt, Homo sapiens
  misc_RNA (1)...(19): siRNA sense strand
ccaaaugucagaugcaguu

SEQ ID NO: 593177 - RNA, 19 nt, Homo sapiens
  misc_RNA (1)...(19): siRNA sense strand
caaauauggaaacucguua

SEQ ID NO: 593178 - RNA, 19 nt, Homo sapiens
  misc_RNA (1)...(19): siRNA sense strand
ucucuuaucuccucuucuu

SEQ ID NO: 593179 - RNA, 19 nt, Homo sapiens
  misc_RNA (1)...(19): siRNA sense strand
gcaauacgucacugauuau

SEQ ID NO: 593180 - RNA, 19 nt, Homo sapiens
  misc_RNA (1)...(19): siRNA sense strand
cuguagaagucacucaaua

SEQ ID NO: 593181 - RNA, 19 nt, Homo sapiens
  misc_RNA (1)...(19): siRNA sense strand
ucagugcgaugccaguauu

SEQ ID NO: 593182 - RNA, 19 nt, Homo sapiens
  misc_RNA (1)...(19): siRNA sense strand
ggacuuguuggaauauauu

SEQ ID NO: 593183 - RNA, 19 nt, Homo sapiens
  misc_RNA (1)...(19): siRNA sense strand
gaaaauagaagagcuaaug

SEQ ID NO: 593184 - RNA, 19 nt, Homo sapiens
  misc_RNA (1)...(19): siRNA sense strand
ggaauuguauggagacauu

SEQ ID NO: 593185 - RNA, 19 nt, Homo sapiens
  misc_RNA (1)...(19): siRNA sense strand
gaggugggcuuuaacauug

SEQ ID NO: 593186 - RNA, 19 nt, Homo sapiens
  misc_RNA (1)...(19): siRNA sense strand
acagugcgcuccaaccuua

SEQ ID NO: 593187 - RNA, 19 nt, Homo sapiens
  misc_RNA (1)...(19): siRNA sense strand
cagcagaguuggaggaauu

SEQ ID NO: 593188 - RNA, 19 nt, Homo sapiens
  misc_RNA (1)...(19): siRNA sense strand
ggaccuggcuccggaauuc

SEQ ID NO: 593189 - RNA, 19 nt, Homo sapiens
  misc_RNA (1)...(19): siRNA sense strand
ggagauggcagcagaguug

SEQ ID NO: 593190 - RNA, 19 nt, Homo sapiens
  misc_RNA (1)...(19): siRNA sense strand
gcaccaaccucauguuugc

SEQ ID NO: 593191 - RNA, 19 nt, Homo sapiens
  misc_RNA (1)...(19): siRNA sense strand
ccacauuuauggagacaau

SEQ ID NO: 593192 - RNA, 19 nt, Homo sapiens
  misc_RNA (1)...(19): siRNA sense strand
ccucauguuugccuucuuu

SEQ ID NO: 593193 - RNA, 19 nt, Homo sapiens
  misc_RNA (1)...(19): siRNA sense strand
caagaccugucccuacguu

SEQ ID NO: 593194 - RNA, 19 nt, Homo sapiens
  misc_RNA (1)...(19): siRNA sense strand
gaaucccuguuguuacuau

SEQ ID NO: 593195 - RNA, 19 nt, Homo sapiens
  misc_RNA (1)...(19): siRNA sense strand
ucuccaacgugagcuauua

SEQ ID NO: 593196 - RNA, 19 nt, Homo sapiens
  misc_RNA (1)...(19): siRNA sense strand
gcagcugaguggcuauuuc

SEQ ID NO: 593197 - RNA, 19 nt, Homo sapiens
  misc_RNA (1)...(19): siRNA sense strand
uaucaacugcggcucuuua

SEQ ID NO: 593198 - RNA, 19 nt, Homo sapiens
  misc_RNA (1)...(19): siRNA sense strand
gcuguucgguguccaguuc

SEQ ID NO: 593199 - RNA, 19 nt, Homo sapiens
  misc_RNA (1)...(19): siRNA sense strand
ggugcuggauggagaaaug

SEQ ID NO: 593200 - RNA, 19 nt, Homo sapiens
  misc_RNA (1)...(19): siRNA sense strand
caacucagcacaugacuac

SEQ ID NO: 593201 - RNA, 19 nt, Homo sapiens
  misc_RNA (1)...(19): siRNA sense strand
gggagaguaugauagagau

SEQ ID NO: 593202 - RNA, 19 nt, Homo sapiens
  misc_RNA (1)...(19): siRNA sense strand
gcauugccauggaguucaa

SEQ ID NO: 593203 - RNA, 19 nt, Homo sapiens
  misc_RNA (1)...(19): siRNA sense strand
ccaaagggaagaagcaguu

SEQ ID NO: 593204 - RNA, 19 nt, Homo sapiens
  misc_RNA (1)...(19): siRNA sense strand
gaaccaaagggaagaagca

SEQ ID NO: 593205 - RNA, 19 nt, Homo sapiens
  misc_RNA (1)...(19): siRNA sense strand
cgaggugggcuuuaacauu

SEQ ID NO: 593206 - RNA, 19 nt, Homo sapiens
  misc_RNA (1)...(19): siRNA sense strand
gcggcgaggugggcuuuaa

SEQ ID NO: 593207 - RNA, 19 nt, Homo sapiens
  misc_RNA (1)...(19): siRNA sense strand
gugaaucccuguuguuacu

SEQ ID NO: 593208 - RNA, 19 nt, Homo sapiens
  misc_RNA (1)...(19): siRNA sense strand
cagugaaucccuguuguua

SEQ ID NO: 593209 - RNA, 19 nt, Homo sapiens
  misc_RNA (1)...(19): siRNA sense strand
gagaguaugauagagauug

SEQ ID NO: 593210 - RNA, 19 nt, Homo sapiens
  misc_RNA (1)...(19): siRNA sense strand
aagaagcaguugccagaug

SEQ ID NO: 593211 - RNA, 19 nt, Homo sapiens
  misc_RNA (1)...(19): siRNA sense strand
gaagaggcgccuguguuga

SEQ ID NO: 593212 - RNA, 19 nt, Homo sapiens
  misc_RNA (1)...(19): siRNA sense strand
caacugcggcucuuuaagg

SEQ ID NO: 593213 - RNA, 19 nt, Homo sapiens
  misc_RNA (1)...(19): siRNA sense strand
gcauguggcuguggauguc

SEQ ID NO: 593214 - RNA, 19 nt, Homo sapiens
  misc_RNA (1)...(19): siRNA sense strand
uagaagaggcgccuguguu

SEQ ID NO: 593215 - RNA, 19 nt, Homo sapiens
  misc_RNA (1)...(19): siRNA sense strand
agaagaggcgccuguguug

SEQ ID NO: 593216 - RNA, 19 nt, Homo sapiens
  misc_RNA (1)...(19): siRNA sense strand
ccucugugccuaaagauug

SEQ ID NO: 593217 - RNA, 19 nt, Homo sapiens
  misc_RNA (1)...(19): siRNA sense strand
gcuuuaacauugucaagac

SEQ ID NO: 593218 - RNA, 19 nt, Homo sapiens
  misc_RNA (1)...(19): siRNA sense strand
aaagugccauccaaacucu

SEQ ID NO: 593219 - RNA, 19 nt, Homo sapiens
  misc_RNA (1)...(19): siRNA sense strand
ggaguucaaccaucucuac

SEQ ID NO: 593220 - RNA, 19 nt, Homo sapiens
  misc_RNA (1)...(19): siRNA sense strand
cugcagcccuucaaugagu

SEQ ID NO: 593221 - RNA, 19 nt, Homo sapiens
  misc_RNA (1)...(19): siRNA sense strand
aagcuggucugccucaaca

SEQ ID NO: 593222 - RNA, 19 nt, Homo sapiens
  misc_RNA (1)...(19): siRNA sense strand
ccaaggcaccaaccucaug

SEQ ID NO: 593223 - RNA, 19 nt, Homo sapiens
  misc_RNA (1)...(19): siRNA sense strand
acacuucacccaccaguuc

SEQ ID NO: 593224 - RNA, 19 nt, Homo sapiens
  misc_RNA (1)...(19): siRNA sense strand
uuccugggcucaugcugua

SEQ ID NO: 593225 - RNA, 19 nt, Homo sapiens
  misc_RNA (1)...(19): siRNA sense strand
gccagugaaucccuguugu

SEQ ID NO: 593226 - RNA, 19 nt, Homo sapiens
  misc_RNA (1)...(19): siRNA sense strand
ucaagacggccacacugaa

SEQ ID NO: 593227 - RNA, 19 nt, Homo sapiens
  misc_RNA (1)...(19): siRNA sense strand
cuauuacacucguauucug

SEQ ID NO: 593228 - RNA, 19 nt, Homo sapiens
  misc_RNA (1)...(19): siRNA sense strand
caacgugagcuauuacacu

SEQ ID NO: 593229 - RNA, 19 nt, Homo sapiens
  misc_RNA (1)...(19): siRNA sense strand
caagacggccacacugaag

SEQ ID NO: 593230 - RNA, 19 nt, Homo sapiens
  misc_RNA (1)...(19): siRNA sense strand
ccagugaaucccuguuguu

SEQ ID NO: 593231 - RNA, 19 nt, Homo sapiens
  misc_RNA (1)...(19): siRNA sense strand
ggagucucuugcucugguu

SEQ ID NO: 593232 - RNA, 19 nt, Homo sapiens
  misc_RNA (1)...(19): siRNA sense strand
ccacacccaugggaaccaa

SEQ ID NO: 593233 - RNA, 19 nt, Homo sapiens
  misc_RNA (1)...(19): siRNA sense strand
ccauccaaacucuaucuuu

SEQ ID NO: 593234 - RNA, 19 nt, Homo sapiens
  misc_RNA (1)...(19): siRNA sense strand
cagaguuggaggaauugua

SEQ ID NO: 593235 - RNA, 19 nt, Homo sapiens
  misc_RNA (1)...(19): siRNA sense strand
gaagaagcaguugccagau

SEQ ID NO: 593236 - RNA, 19 nt, Homo sapiens
  misc_RNA (1)...(19): siRNA sense strand
ggagguguuugggcugcuu

SEQ ID NO: 593237 - RNA, 19 nt, Homo sapiens
  misc_RNA (1)...(19): siRNA sense strand
ggaagccgagcacauuugg

SEQ ID NO: 593238 - RNA, 19 nt, Homo sapiens
  misc_RNA (1)...(19): siRNA sense strand
gcagcagaguuggaggaau

SEQ ID NO: 593239 - RNA, 19 nt, Homo sapiens
  misc_RNA (1)...(19): siRNA sense strand
gaaaagugccauccaaacu

SEQ ID NO: 593240 - RNA, 19 nt, Homo sapiens
  misc_RNA (1)...(19): siRNA sense strand
agaguuggaggaauuguau

SEQ ID NO: 593241 - RNA, 19 nt, Homo sapiens
  misc_RNA (1)...(19): siRNA sense strand
gagcuauuacacucguauu

SEQ ID NO: 593242 - RNA, 19 nt, Homo sapiens
  misc_RNA (1)...(19): siRNA sense strand
gucaagacggccacacuga

SEQ ID NO: 593243 - RNA, 19 nt, Homo sapiens
  misc_RNA (1)...(19): siRNA sense strand
ggagaguaugauagagauu

SEQ ID NO: 593244 - RNA, 19 nt, Homo sapiens
  misc_RNA (1)...(19): siRNA sense strand
guagaagaggcgccugugu

SEQ ID NO: 593245 - RNA, 19 nt, Homo sapiens
  misc_RNA (1)...(19): siRNA sense strand
ccaauaccgcaaccgcauu

SEQ ID NO: 593246 - RNA, 19 nt, Homo sapiens
  misc_RNA (1)...(19): siRNA sense strand
ucugggaguuugucaaugc

SEQ ID NO: 593247 - RNA, 19 nt, Homo sapiens
  misc_RNA (1)...(19): siRNA sense strand
guucugggaguuugucaau

SEQ ID NO: 593248 - RNA, 19 nt, Homo sapiens
  misc_RNA (1)...(19): siRNA sense strand
caaggcaccaaccucaugu

SEQ ID NO: 593249 - RNA, 19 nt, Homo sapiens
  misc_RNA (1)...(19): siRNA sense strand
gcuauuacacucguauucu

SEQ ID NO: 593250 - RNA, 19 nt, Homo sapiens
  misc_RNA (1)...(19): siRNA sense strand
ggcaccaaccucauguuug

SEQ ID NO: 593251 - RNA, 19 nt, Homo sapiens
  misc_RNA (1)...(19): siRNA sense strand
uacaucagcugggagucuu

SEQ ID NO: 593252 - RNA, 19 nt, Homo sapiens
  misc_RNA (1)...(19): siRNA sense strand
caaagggaagaagcaguug

SEQ ID NO: 593253 - RNA, 19 nt, Homo sapiens
  misc_RNA (1)...(19): siRNA sense strand
gaggaauuguauggagaca

SEQ ID NO: 593254 - RNA, 19 nt, Homo sapiens
  misc_RNA (1)...(19): siRNA sense strand
aagaggcgccuguguugau

SEQ ID NO: 593255 - RNA, 19 nt, Homo sapiens
  misc_RNA (1)...(19): siRNA sense strand
ggaauuguauggagacauu

SEQ ID NO: 593256 - RNA, 19 nt, Homo sapiens
  misc_RNA (1)...(19): siRNA sense strand
gaggugggcuuuaacauug

SEQ ID NO: 593257 - RNA, 19 nt, Homo sapiens
  misc_RNA (1)...(19): siRNA sense strand
acagugcgcuccaaccuua

SEQ ID NO: 593258 - RNA, 19 nt, Homo sapiens
  misc_RNA (1)...(19): siRNA sense strand
cagcagaguuggaggaauu

SEQ ID NO: 593259 - RNA, 19 nt, Homo sapiens
  misc_RNA (1)...(19): siRNA sense strand
ggaccuggcuccggaauuc

SEQ ID NO: 593260 - RNA, 19 nt, Homo sapiens
  misc_RNA (1)...(19): siRNA sense strand
ggagauggcagcagaguug

SEQ ID NO: 593261 - RNA, 19 nt, Homo sapiens
  misc_RNA (1)...(19): siRNA sense strand
gcaccaaccucauguuugc

SEQ ID NO: 593262 - RNA, 19 nt, Homo sapiens
  misc_RNA (1)...(19): siRNA sense strand
ccacauuuauggagacaau

SEQ ID NO: 593263 - RNA, 19 nt, Homo sapiens
  misc_RNA (1)...(19): siRNA sense strand
ccucauguuugccuucuuu

SEQ ID NO: 593264 - RNA, 19 nt, Homo sapiens
  misc_RNA (1)...(19): siRNA sense strand
caagaccugucccuacguu

SEQ ID NO: 593265 - RNA, 19 nt, Homo sapiens
  misc_RNA (1)...(19): siRNA sense strand
gaaucccuguuguuacuau

SEQ ID NO: 593266 - RNA, 19 nt, Homo sapiens
  misc_RNA (1)...(19): siRNA sense strand
ucuccaacgugagcuauua

SEQ ID NO: 593267 - RNA, 19 nt, Homo sapiens
  misc_RNA (1)...(19): siRNA sense strand
gcagcugaguggcuauuuc

SEQ ID NO: 593268 - RNA, 19 nt, Homo sapiens
  misc_RNA (1)...(19): siRNA sense strand
uaucaacugcggcucuuua

SEQ ID NO: 593269 - RNA, 19 nt, Homo sapiens
  misc_RNA (1)...(19): siRNA sense strand
gcuguucgguguccaguuc

SEQ ID NO: 593270 - RNA, 19 nt, Homo sapiens
  misc_RNA (1)...(19): siRNA sense strand
ggugcuggauggagaaaug

SEQ ID NO: 593271 - RNA, 19 nt, Homo sapiens
  misc_RNA (1)...(19): siRNA sense strand
caacucagcacaugacuac

SEQ ID NO: 593272 - RNA, 19 nt, Homo sapiens
  misc_RNA (1)...(19): siRNA sense strand
gggagaguaugauagagau

SEQ ID NO: 593273 - RNA, 19 nt, Homo sapiens
  misc_RNA (1)...(19): siRNA sense strand
gcauugccauggaguucaa

SEQ ID NO: 593274 - RNA, 19 nt, Homo sapiens
  misc_RNA (1)...(19): siRNA sense strand
ccaaagggaagaagcaguu

SEQ ID NO: 593275 - RNA, 19 nt, Homo sapiens
  misc_RNA (1)...(19): siRNA sense strand
gaaccaaagggaagaagca

SEQ ID NO: 593276 - RNA, 19 nt, Homo sapiens
  misc_RNA (1)...(19): siRNA sense strand
cgaggugggcuuuaacauu

SEQ ID NO: 593277 - RNA, 19 nt, Homo sapiens
  misc_RNA (1)...(19): siRNA sense strand
gcggcgaggugggcuuuaa

SEQ ID NO: 593278 - RNA, 19 nt, Homo sapiens
  misc_RNA (1)...(19): siRNA sense strand
gugaaucccuguuguuacu

SEQ ID NO: 593279 - RNA, 19 nt, Homo sapiens
  misc_RNA (1)...(19): siRNA sense strand
cagugaaucccuguuguua

SEQ ID NO: 593280 - RNA, 19 nt, Homo sapiens
  misc_RNA (1)...(19): siRNA sense strand
gagaguaugauagagauug

SEQ ID NO: 593281 - RNA, 19 nt, Homo sapiens
  misc_RNA (1)...(19): siRNA sense strand
aagaagcaguugccagaug

SEQ ID NO: 593282 - RNA, 19 nt, Homo sapiens
  misc_RNA (1)...(19): siRNA sense strand
gaagaggcgccuguguuga

SEQ ID NO: 593283 - RNA, 19 nt, Homo sapiens
  misc_RNA (1)...(19): siRNA sense strand
caacugcggcucuuuaagg

SEQ ID NO: 593284 - RNA, 19 nt, Homo sapiens
  misc_RNA (1)...(19): siRNA sense strand
gcauguggcuguggauguc

SEQ ID NO: 593285 - RNA, 19 nt, Homo sapiens
  misc_RNA (1)...(19): siRNA sense strand
uagaagaggcgccuguguu

SEQ ID NO: 593286 - RNA, 19 nt, Homo sapiens
  misc_RNA (1)...(19): siRNA sense strand
agaagaggcgccuguguug

SEQ ID NO: 593287 - RNA, 19 nt, Homo sapiens
  misc_RNA (1)...(19): siRNA sense strand
ccucugugccuaaagauug

SEQ ID NO: 593288 - RNA, 19 nt, Homo sapiens
  misc_RNA (1)...(19): siRNA sense strand
gcuuuaacauugucaagac

SEQ ID NO: 593289 - RNA, 19 nt, Homo sapiens
  misc_RNA (1)...(19): siRNA sense strand
aaagugccauccaaacucu

SEQ ID NO: 593290 - RNA, 19 nt, Homo sapiens
  misc_RNA (1)...(19): siRNA sense strand
ggaguucaaccaucucuac

SEQ ID NO: 593291 - RNA, 19 nt, Homo sapiens
  misc_RNA (1)...(19): siRNA sense strand
cugcagcccuucaaugagu

SEQ ID NO: 593292 - RNA, 19 nt, Homo sapiens
  misc_RNA (1)...(19): siRNA sense strand
aagcuggucugccucaaca

SEQ ID NO: 593293 - RNA, 19 nt, Homo sapiens
  misc_RNA (1)...(19): siRNA sense strand
ccaaggcaccaaccucaug

SEQ ID NO: 593294 - RNA, 19 nt, Homo sapiens
  misc_RNA (1)...(19): siRNA sense strand
acacuucacccaccaguuc

SEQ ID NO: 593295 - RNA, 19 nt, Homo sapiens
  misc_RNA (1)...(19): siRNA sense strand
uuccugggcucaugcugua

SEQ ID NO: 593296 - RNA, 19 nt, Homo sapiens
  misc_RNA (1)...(19): siRNA sense strand
gccagugaaucccuguugu

SEQ ID NO: 593297 - RNA, 19 nt, Homo sapiens
  misc_RNA (1)...(19): siRNA sense strand
ucaagacggccacacugaa

SEQ ID NO: 593298 - RNA, 19 nt, Homo sapiens
  misc_RNA (1)...(19): siRNA sense strand
cuauuacacucguauucug

SEQ ID NO: 593299 - RNA, 19 nt, Homo sapiens
  misc_RNA (1)...(19): siRNA sense strand
caacgugagcuauuacacu

SEQ ID NO: 593300 - RNA, 19 nt, Homo sapiens
  misc_RNA (1)...(19): siRNA sense strand
caagacggccacacugaag

SEQ ID NO: 593301 - RNA, 19 nt, Homo sapiens
  misc_RNA (1)...(19): siRNA sense strand
ccagugaaucccuguuguu

SEQ ID NO: 593302 - RNA, 19 nt, Homo sapiens
  misc_RNA (1)...(19): siRNA sense strand
ggagucucuugcucugguu

SEQ ID NO: 593303 - RNA, 19 nt, Homo sapiens
  misc_RNA (1)...(19): siRNA sense strand
ccacacccaugggaaccaa

SEQ ID NO: 593304 - RNA, 19 nt, Homo sapiens
  misc_RNA (1)...(19): siRNA sense strand
ccauccaaacucuaucuuu

SEQ ID NO: 593305 - RNA, 19 nt, Homo sapiens
  misc_RNA (1)...(19): siRNA sense strand
cagaguuggaggaauugua

SEQ ID NO: 593306 - RNA, 19 nt, Homo sapiens
  misc_RNA (1)...(19): siRNA sense strand
gaagaagcaguugccagau

SEQ ID NO: 593307 - RNA, 19 nt, Homo sapiens
  misc_RNA (1)...(19): siRNA sense strand
ggagguguuugggcugcuu

SEQ ID NO: 593308 - RNA, 19 nt, Homo sapiens
  misc_RNA (1)...(19): siRNA sense strand
ggaagccgagcacauuugg

SEQ ID NO: 593309 - RNA, 19 nt, Homo sapiens
  misc_RNA (1)...(19): siRNA sense strand
gcagcagaguuggaggaau

SEQ ID NO: 593310 - RNA, 19 nt, Homo sapiens
  misc_RNA (1)...(19): siRNA sense strand
gaaaagugccauccaaacu

SEQ ID NO: 593311 - RNA, 19 nt, Homo sapiens
  misc_RNA (1)...(19): siRNA sense strand
agaguuggaggaauuguau

SEQ ID NO: 593312 - RNA, 19 nt, Homo sapiens
  misc_RNA (1)...(19): siRNA sense strand
gagcuauuacacucguauu

SEQ ID NO: 593313 - RNA, 19 nt, Homo sapiens
  misc_RNA (1)...(19): siRNA sense strand
gucaagacggccacacuga

SEQ ID NO: 593314 - RNA, 19 nt, Homo sapiens
  misc_RNA (1)...(19): siRNA sense strand
ggagaguaugauagagauu

SEQ ID NO: 593315 - RNA, 19 nt, Homo sapiens
  misc_RNA (1)...(19): siRNA sense strand
guagaagaggcgccugugu

SEQ ID NO: 593316 - RNA, 19 nt, Homo sapiens
  misc_RNA (1)...(19): siRNA sense strand
ccaauaccgcaaccgcauu

SEQ ID NO: 593317 - RNA, 19 nt, Homo sapiens
  misc_RNA (1)...(19): siRNA sense strand
ucugggaguuugucaaugc

SEQ ID NO: 593318 - RNA, 19 nt, Homo sapiens
  misc_RNA (1)...(19): siRNA sense strand
guucugggaguuugucaau

SEQ ID NO: 593319 - RNA, 19 nt, Homo sapiens
  misc_RNA (1)...(19): siRNA sense strand
caaggcaccaaccucaugu

SEQ ID NO: 593320 - RNA, 19 nt, Homo sapiens
  misc_RNA (1)...(19): siRNA sense strand
gcuauuacacucguauucu

SEQ ID NO: 593321 - RNA, 19 nt, Homo sapiens
  misc_RNA (1)...(19): siRNA sense strand
ggcaccaaccucauguuug

SEQ ID NO: 593322 - RNA, 19 nt, Homo sapiens
  misc_RNA (1)...(19): siRNA sense strand
uacaucagcugggagucuu

SEQ ID NO: 593323 - RNA, 19 nt, Homo sapiens
  misc_RNA (1)...(19): siRNA sense strand
caaagggaagaagcaguug

SEQ ID NO: 593324 - RNA, 19 nt, Homo sapiens
  misc_RNA (1)...(19): siRNA sense strand
gaggaauuguauggagaca

SEQ ID NO: 593325 - RNA, 19 nt, Homo sapiens
  misc_RNA (1)...(19): siRNA sense strand
aagaggcgccuguguugau

SEQ ID NO: 593326 - RNA, 19 nt, Homo sapiens
  misc_RNA (1)...(19): siRNA sense strand
ggaauacuaucaccucuua

SEQ ID NO: 593327 - RNA, 19 nt, Homo sapiens
  misc_RNA (1)...(19): siRNA sense strand
gagaauggaucuuguguac

SEQ ID NO: 593328 - RNA, 19 nt, Homo sapiens
  misc_RNA (1)...(19): siRNA sense strand
ggaauuaaugccuggaaua

SEQ ID NO: 593329 - RNA, 19 nt, Homo sapiens
  misc_RNA (1)...(19): siRNA sense strand
ccagaaauguguccugaga

SEQ ID NO: 593330 - RNA, 19 nt, Homo sapiens
  misc_RNA (1)...(19): siRNA sense strand
ucauagaccugcaagcaaa

SEQ ID NO: 593331 - RNA, 19 nt, Homo sapiens
  misc_RNA (1)...(19): siRNA sense strand
gaauggaucuuguguaccu

SEQ ID NO: 593332 - RNA, 19 nt, Homo sapiens
  misc_RNA (1)...(19): siRNA sense strand
gcacauaccacugucauca

SEQ ID NO: 593333 - RNA, 19 nt, Homo sapiens
  misc_RNA (1)...(19): siRNA sense strand
acauaccacugucaucaua

SEQ ID NO: 593334 - RNA, 19 nt, Homo sapiens
  misc_RNA (1)...(19): siRNA sense strand
agaaauguguccugagaau

SEQ ID NO: 593335 - RNA, 19 nt, Homo sapiens
  misc_RNA (1)...(19): siRNA sense strand
auuaaugccuggaauacua

SEQ ID NO: 593336 - RNA, 19 nt, Homo sapiens
  misc_RNA (1)...(19): siRNA sense strand
uuacucagcuccagacucu

SEQ ID NO: 593337 - RNA, 19 nt, Homo sapiens
  misc_RNA (1)...(19): siRNA sense strand
gccacaacaugucaacugu

SEQ ID NO: 593338 - RNA, 19 nt, Homo sapiens
  misc_RNA (1)...(19): siRNA sense strand
uaucaccucuuauauagac

SEQ ID NO: 593339 - RNA, 19 nt, Homo sapiens
  misc_RNA (1)...(19): siRNA sense strand
gaauuaaugccuggaauac

SEQ ID NO: 593340 - RNA, 19 nt, Homo sapiens
  misc_RNA (1)...(19): siRNA sense strand
caacaccuuccguggcuuu

SEQ ID NO: 593341 - RNA, 19 nt, Homo sapiens
  misc_RNA (1)...(19): siRNA sense strand
gaaauguguccugagaaug

SEQ ID NO: 593342 - RNA, 19 nt, Homo sapiens
  misc_RNA (1)...(19): siRNA sense strand
gcccguugcugccugaauc

SEQ ID NO: 593343 - RNA, 19 nt, Homo sapiens
  misc_RNA (1)...(19): siRNA sense strand
ucucacugcuuauguucuu

SEQ ID NO: 593344 - RNA, 19 nt, Homo sapiens
  misc_RNA (1)...(19): siRNA sense strand
gcaguguguuugugcugau

SEQ ID NO: 593345 - RNA, 19 nt, Homo sapiens
  misc_RNA (1)...(19): siRNA sense strand
ucagaagggcaccaucuug

SEQ ID NO: 593346 - RNA, 19 nt, Homo sapiens
  misc_RNA (1)...(19): siRNA sense strand
caucauagaccugcaagca

SEQ ID NO: 593347 - RNA, 19 nt, Homo sapiens
  misc_RNA (1)...(19): siRNA sense strand
gaaaagccaagacuucaug

SEQ ID NO: 593348 - RNA, 19 nt, Homo sapiens
  misc_RNA (1)...(19): siRNA sense strand
aaaggugacuuggccaaca

SEQ ID NO: 593349 - RNA, 19 nt, Homo sapiens
  misc_RNA (1)...(19): siRNA sense strand
ccucuuauauagacaacca

SEQ ID NO: 593350 - RNA, 19 nt, Homo sapiens
  misc_RNA (1)...(19): siRNA sense strand
ggcucguucucacugcuua

SEQ ID NO: 593351 - RNA, 19 nt, Homo sapiens
  misc_RNA (1)...(19): siRNA sense strand
aagaaccuuugcaauaaca

SEQ ID NO: 593352 - RNA, 19 nt, Homo sapiens
  misc_RNA (1)...(19): siRNA sense strand
auaccacugucaucauaga

SEQ ID NO: 593353 - RNA, 19 nt, Homo sapiens
  misc_RNA (1)...(19): siRNA sense strand
ugagaauggaucuugugua

SEQ ID NO: 593354 - RNA, 19 nt, Homo sapiens
  misc_RNA (1)...(19): siRNA sense strand
uauagacaaccaaaucugu

SEQ ID NO: 593355 - RNA, 19 nt, Homo sapiens
  misc_RNA (1)...(19): siRNA sense strand
gaggaauuaaugccuggaa

SEQ ID NO: 593356 - RNA, 19 nt, Homo sapiens
  misc_RNA (1)...(19): siRNA sense strand
aaauguguccugagaaugg

SEQ ID NO: 593357 - RNA, 19 nt, Homo sapiens
  misc_RNA (1)...(19): siRNA sense strand
cguucucacugcuuauguu

SEQ ID NO: 593358 - RNA, 19 nt, Homo sapiens
  misc_RNA (1)...(19): siRNA sense strand
gauacugccacaacauguc

SEQ ID NO: 593359 - RNA, 19 nt, Homo sapiens
  misc_RNA (1)...(19): siRNA sense strand
ggaauacuaucaccucuua

SEQ ID NO: 593360 - RNA, 19 nt, Homo sapiens
  misc_RNA (1)...(19): siRNA sense strand
gagaauggaucuuguguac

SEQ ID NO: 593361 - RNA, 19 nt, Homo sapiens
  misc_RNA (1)...(19): siRNA sense strand
ggaauuaaugccuggaaua

SEQ ID NO: 593362 - RNA, 19 nt, Homo sapiens
  misc_RNA (1)...(19): siRNA sense strand
ccagaaauguguccugaga

SEQ ID NO: 593363 - RNA, 19 nt, Homo sapiens
  misc_RNA (1)...(19): siRNA sense strand
ucauagaccugcaagcaaa

SEQ ID NO: 593364 - RNA, 19 nt, Homo sapiens
  misc_RNA (1)...(19): siRNA sense strand
gaauggaucuuguguaccu

SEQ ID NO: 593365 - RNA, 19 nt, Homo sapiens
  misc_RNA (1)...(19): siRNA sense strand
gcacauaccacugucauca

SEQ ID NO: 593366 - RNA, 19 nt, Homo sapiens
  misc_RNA (1)...(19): siRNA sense strand
acauaccacugucaucaua

SEQ ID NO: 593367 - RNA, 19 nt, Homo sapiens
  misc_RNA (1)...(19): siRNA sense strand
agaaauguguccugagaau

SEQ ID NO: 593368 - RNA, 19 nt, Homo sapiens
  misc_RNA (1)...(19): siRNA sense strand
auuaaugccuggaauacua

SEQ ID NO: 593369 - RNA, 19 nt, Homo sapiens
  misc_RNA (1)...(19): siRNA sense strand
uuacucagcuccagacucu

SEQ ID NO: 593370 - RNA, 19 nt, Homo sapiens
  misc_RNA (1)...(19): siRNA sense strand
gccacaacaugucaacugu

SEQ ID NO: 593371 - RNA, 19 nt, Homo sapiens
  misc_RNA (1)...(19): siRNA sense strand
uaucaccucuuauauagac

SEQ ID NO: 593372 - RNA, 19 nt, Homo sapiens
  misc_RNA (1)...(19): siRNA sense strand
gaauuaaugccuggaauac

SEQ ID NO: 593373 - RNA, 19 nt, Homo sapiens
  misc_RNA (1)...(19): siRNA sense strand
caacaccuuccguggcuuu

SEQ ID NO: 593374 - RNA, 19 nt, Homo sapiens
  misc_RNA (1)...(19): siRNA sense strand
gaaauguguccugagaaug

SEQ ID NO: 593375 - RNA, 19 nt, Homo sapiens
  misc_RNA (1)...(19): siRNA sense strand
gcccguugcugccugaauc

SEQ ID NO: 593376 - RNA, 19 nt, Homo sapiens
  misc_RNA (1)...(19): siRNA sense strand
ucucacugcuuauguucuu

SEQ ID NO: 593377 - RNA, 19 nt, Homo sapiens
  misc_RNA (1)...(19): siRNA sense strand
gcaguguguuugugcugau

SEQ ID NO: 593378 - RNA, 19 nt, Homo sapiens
  misc_RNA (1)...(19): siRNA sense strand
ucagaagggcaccaucuug

SEQ ID NO: 593379 - RNA, 19 nt, Homo sapiens
  misc_RNA (1)...(19): siRNA sense strand
caucauagaccugcaagca

SEQ ID NO: 593380 - RNA, 19 nt, Homo sapiens
  misc_RNA (1)...(19): siRNA sense strand
gaaaagccaagacuucaug

SEQ ID NO: 593381 - RNA, 19 nt, Homo sapiens
  misc_RNA (1)...(19): siRNA sense strand
aaaggugacuuggccaaca

SEQ ID NO: 593382 - RNA, 19 nt, Homo sapiens
  misc_RNA (1)...(19): siRNA sense strand
ccucuuauauagacaacca

SEQ ID NO: 593383 - RNA, 19 nt, Homo sapiens
  misc_RNA (1)...(19): siRNA sense strand
ggcucguucucacugcuua

SEQ ID NO: 593384 - RNA, 19 nt, Homo sapiens
  misc_RNA (1)...(19): siRNA sense strand
aagaaccuuugcaauaaca

SEQ ID NO: 593385 - RNA, 19 nt, Homo sapiens
  misc_RNA (1)...(19): siRNA sense strand
auaccacugucaucauaga

SEQ ID NO: 593386 - RNA, 19 nt, Homo sapiens
  misc_RNA (1)...(19): siRNA sense strand
ugagaauggaucuugugua

SEQ ID NO: 593387 - RNA, 19 nt, Homo sapiens
  misc_RNA (1)...(19): siRNA sense strand
uauagacaaccaaaucugu

SEQ ID NO: 593388 - RNA, 19 nt, Homo sapiens
  misc_RNA (1)...(19): siRNA sense strand
gaggaauuaaugccuggaa

SEQ ID NO: 593389 - RNA, 19 nt, Homo sapiens
  misc_RNA (1)...(19): siRNA sense strand
aaauguguccugagaaugg

SEQ ID NO: 593390 - RNA, 19 nt, Homo sapiens
  misc_RNA (1)...(19): siRNA sense strand
cguucucacugcuuauguu

SEQ ID NO: 593391 - RNA, 19 nt, Homo sapiens
  misc_RNA (1)...(19): siRNA sense strand
gauacugccacaacauguc

SEQ ID NO: 593392 - RNA, 19 nt, Homo sapiens
  misc_RNA (1)...(19): siRNA sense strand
ccaaggccgucaccaagua

SEQ ID NO: 593393 - RNA, 19 nt, Homo sapiens
  misc_RNA (1)...(19): siRNA sense strand
cgaagaaagccgugacuaa

SEQ ID NO: 593394 - RNA, 19 nt, Homo sapiens
  misc_RNA (1)...(19): siRNA sense strand
gaagaaagccgugacuaag

SEQ ID NO: 593395 - RNA, 19 nt, Homo sapiens
  misc_RNA (1)...(19): siRNA sense strand
ugacuaaggcgcagaagaa

SEQ ID NO: 593396 - RNA, 19 nt, Homo sapiens
  misc_RNA (1)...(19): siRNA sense strand
gaagaaggacggcaagaag

SEQ ID NO: 593397 - RNA, 19 nt, Homo sapiens
  misc_RNA (1)...(19): siRNA sense strand
guacaccagcgcuaaguaa

SEQ ID NO: 593398 - RNA, 19 nt, Homo sapiens
  misc_RNA (1)...(19): siRNA sense strand
ccaagaagggcucgaagaa

SEQ ID NO: 593399 - RNA, 19 nt, Homo sapiens
  misc_RNA (1)...(19): siRNA sense strand
aagaagggcucgaagaaag

SEQ ID NO: 593400 - RNA, 19 nt, Homo sapiens
  misc_RNA (1)...(19): siRNA sense strand
caagaagggcucgaagaaa

SEQ ID NO: 593401 - RNA, 19 nt, Homo sapiens
  misc_RNA (1)...(19): siRNA sense strand
aacaagcgcucgaccauca

SEQ ID NO: 593402 - RNA, 19 nt, Homo sapiens
  misc_RNA (1)...(19): siRNA sense strand
gcaccaaggccgucaccaa

SEQ ID NO: 593403 - RNA, 19 nt, Homo sapiens
  misc_RNA (1)...(19): siRNA sense strand
acaccggcaucuccucuaa

SEQ ID NO: 593404 - RNA, 19 nt, Homo sapiens
  misc_RNA (1)...(19): siRNA sense strand
ccaaguacaccagcgcuaa

SEQ ID NO: 593405 - RNA, 19 nt, Homo sapiens
  misc_RNA (1)...(19): siRNA sense strand
gcuacuccguauacgugua

SEQ ID NO: 593406 - RNA, 19 nt, Homo sapiens
  misc_RNA (1)...(19): siRNA sense strand
cuaaggcgcagaagaagga

SEQ ID NO: 593407 - RNA, 19 nt, Homo sapiens
  misc_RNA (1)...(19): siRNA sense strand
ccguauacguguacaaggu

SEQ ID NO: 593408 - RNA, 19 nt, Homo sapiens
  misc_RNA (1)...(19): siRNA sense strand
agaagaaggacggcaagaa

SEQ ID NO: 593409 - RNA, 19 nt, Homo sapiens
  misc_RNA (1)...(19): siRNA sense strand
cgucaacgacaucuucgaa

SEQ ID NO: 593410 - RNA, 19 nt, Homo sapiens
  misc_RNA (1)...(19): siRNA sense strand
ccucuaaggccaugggaau

SEQ ID NO: 593411 - RNA, 19 nt, Homo sapiens
  misc_RNA (1)...(19): siRNA sense strand
caugaacuccuucgucaac

SEQ ID NO: 593412 - RNA, 19 nt, Homo sapiens
  misc_RNA (1)...(19): siRNA sense strand
gguggugucuugcccaaua

SEQ ID NO: 593413 - RNA, 19 nt, Homo sapiens
  misc_RNA (1)...(19): siRNA sense strand
caagaagacccguaucauc

SEQ ID NO: 593414 - RNA, 19 nt, Homo sapiens
  misc_RNA (1)...(19): siRNA sense strand
agacugagagccaccauaa

SEQ ID NO: 593415 - RNA, 19 nt, Homo sapiens
  misc_RNA (1)...(19): siRNA sense strand
ccaccauaaggccaaauaa

SEQ ID NO: 593416 - RNA, 19 nt, Homo sapiens
  misc_RNA (1)...(19): siRNA sense strand
guaccugaccgcugagauc

SEQ ID NO: 593417 - RNA, 19 nt, Homo sapiens
  misc_RNA (1)...(19): siRNA sense strand
gccaccauaaggccaaaua

SEQ ID NO: 593418 - RNA, 19 nt, Homo sapiens
  misc_RNA (1)...(19): siRNA sense strand
gagccaccauaaggccaaa

SEQ ID NO: 593419 - RNA, 19 nt, Homo sapiens
  misc_RNA (1)...(19): siRNA sense strand
acaacaagaagacccguau

SEQ ID NO: 593420 - RNA, 19 nt, Homo sapiens
  misc_RNA (1)...(19): siRNA sense strand
caagcaaggcgguaaagcu

SEQ ID NO: 593421 - RNA, 19 nt, Homo sapiens
  misc_RNA (1)...(19): siRNA sense strand
gcaacgacgaggagcucaa

SEQ ID NO: 593422 - RNA, 19 nt, Homo sapiens
  misc_RNA (1)...(19): siRNA sense strand
cgacgaggagcucaacaag

SEQ ID NO: 593423 - RNA, 19 nt, Homo sapiens
  misc_RNA (1)...(19): siRNA sense strand
guggugucuugcccaauau

SEQ ID NO: 593424 - RNA, 19 nt, Homo sapiens
  misc_RNA (1)...(19): siRNA sense strand
caacaagaagacccguauc

SEQ ID NO: 593425 - RNA, 19 nt, Homo sapiens
  misc_RNA (1)...(19): siRNA sense strand
gugcugcugccuaagaaga

SEQ ID NO: 593426 - RNA, 19 nt, Homo sapiens
  misc_RNA (1)...(19): siRNA sense strand
aacaagaagacccguauca

SEQ ID NO: 593427 - RNA, 19 nt, Homo sapiens
  misc_RNA (1)...(19): siRNA sense strand
caacaagcugcugggcaaa

SEQ ID NO: 593428 - RNA, 19 nt, Homo sapiens
  misc_RNA (1)...(19): siRNA sense strand
acaagcugcugggcaaagu

SEQ ID NO: 593429 - RNA, 19 nt, Homo sapiens
  misc_RNA (1)...(19): siRNA sense strand
gaacagaaguuucacaaug

SEQ ID NO: 593430 - RNA, 19 nt, Homo sapiens
  misc_RNA (1)...(19): siRNA sense strand
gaagcaggcaucaagauua

SEQ ID NO: 593431 - RNA, 19 nt, Homo sapiens
  misc_RNA (1)...(19): siRNA sense strand
caacauaacgucucugauu

SEQ ID NO: 593432 - RNA, 19 nt, Homo sapiens
  misc_RNA (1)...(19): siRNA sense strand
gaaccugucucuccucgaa

SEQ ID NO: 593433 - RNA, 19 nt, Homo sapiens
  misc_RNA (1)...(19): siRNA sense strand
gacaauugcuuccugcuuu

SEQ ID NO: 593434 - RNA, 19 nt, Homo sapiens
  misc_RNA (1)...(19): siRNA sense strand
uaacgucucugauuucuca

SEQ ID NO: 593435 - RNA, 19 nt, Homo sapiens
  misc_RNA (1)...(19): siRNA sense strand
gccaauaccucccuuacuu

SEQ ID NO: 593436 - RNA, 19 nt, Homo sapiens
  misc_RNA (1)...(19): siRNA sense strand
gcacuuaaguauucaucga

SEQ ID NO: 593437 - RNA, 19 nt, Homo sapiens
  misc_RNA (1)...(19): siRNA sense strand
ggacccaaaucuucuuaga

SEQ ID NO: 593438 - RNA, 19 nt, Homo sapiens
  misc_RNA (1)...(19): siRNA sense strand
gaaagagaacagagacaaa

SEQ ID NO: 593439 - RNA, 19 nt, Homo sapiens
  misc_RNA (1)...(19): siRNA sense strand
caaacaagauggcagucaa

SEQ ID NO: 593440 - RNA, 19 nt, Homo sapiens
  misc_RNA (1)...(19): siRNA sense strand
ccacagugcucuucauagu

SEQ ID NO: 593441 - RNA, 19 nt, Homo sapiens
  misc_RNA (1)...(19): siRNA sense strand
gaucaguacuccuccuguu

SEQ ID NO: 593442 - RNA, 19 nt, Homo sapiens
  misc_RNA (1)...(19): siRNA sense strand
ucacugcagucuauaauuc

SEQ ID NO: 593443 - RNA, 19 nt, Homo sapiens
  misc_RNA (1)...(19): siRNA sense strand
gcucagcucucuacacaag

SEQ ID NO: 593444 - RNA, 19 nt, Homo sapiens
  misc_RNA (1)...(19): siRNA sense strand
cgaagaagcgcauaacaug

SEQ ID NO: 593445 - RNA, 19 nt, Homo sapiens
  misc_RNA (1)...(19): siRNA sense strand
uaacacagucccuaucaaa

SEQ ID NO: 593446 - RNA, 19 nt, Homo sapiens
  misc_RNA (1)...(19): siRNA sense strand
agaauaagcacaccucaaa

SEQ ID NO: 593447 - RNA, 19 nt, Homo sapiens
  misc_RNA (1)...(19): siRNA sense strand
aagaguggcuugaaagaga

SEQ ID NO: 593448 - RNA, 19 nt, Homo sapiens
  misc_RNA (1)...(19): siRNA sense strand
aacauaacgucucugauuu

SEQ ID NO: 593449 - RNA, 19 nt, Homo sapiens
  misc_RNA (1)...(19): siRNA sense strand
ugacuggucugagcauauu

SEQ ID NO: 593450 - RNA, 19 nt, Homo sapiens
  misc_RNA (1)...(19): siRNA sense strand
ggagauccuucaccaccaa

SEQ ID NO: 593451 - RNA, 19 nt, Homo sapiens
  misc_RNA (1)...(19): siRNA sense strand
gacaaacccguaucacauu

SEQ ID NO: 593452 - RNA, 19 nt, Homo sapiens
  misc_RNA (1)...(19): siRNA sense strand
uaagcacaccucaaacuaa

SEQ ID NO: 593453 - RNA, 19 nt, Homo sapiens
  misc_RNA (1)...(19): siRNA sense strand
gagcaaaggauacuauuuu

SEQ ID NO: 593454 - RNA, 19 nt, Homo sapiens
  misc_RNA (1)...(19): siRNA sense strand
ucacauguccgaaauuugu

SEQ ID NO: 593455 - RNA, 19 nt, Homo sapiens
  misc_RNA (1)...(19): siRNA sense strand
gcgcauaacaugggaacua

SEQ ID NO: 593456 - RNA, 19 nt, Homo sapiens
  misc_RNA (1)...(19): siRNA sense strand
caguuacucuccacaagaa

SEQ ID NO: 593457 - RNA, 19 nt, Homo sapiens
  misc_RNA (1)...(19): siRNA sense strand
gacaacaaauuaaggaacu

SEQ ID NO: 593458 - RNA, 19 nt, Homo sapiens
  misc_RNA (1)...(19): siRNA sense strand
ccaaucauacuucuaauag

SEQ ID NO: 593459 - RNA, 19 nt, Homo sapiens
  misc_RNA (1)...(19): siRNA sense strand
agauagggauuacagaaga

SEQ ID NO: 593460 - RNA, 19 nt, Homo sapiens
  misc_RNA (1)...(19): siRNA sense strand
acagugcucuucauaguuc

SEQ ID NO: 593461 - RNA, 19 nt, Homo sapiens
  misc_RNA (1)...(19): siRNA sense strand
gaaaacaaauacagugaca

SEQ ID NO: 593462 - RNA, 19 nt, Homo sapiens
  misc_RNA (1)...(19): siRNA sense strand
cuacaauugucgaacagaa

SEQ ID NO: 593463 - RNA, 19 nt, Homo sapiens
  misc_RNA (1)...(19): siRNA sense strand
aaacuucagaugcaccuua

SEQ ID NO: 593464 - RNA, 19 nt, Homo sapiens
  misc_RNA (1)...(19): siRNA sense strand
uauuagcucuucugggaaa

SEQ ID NO: 593465 - RNA, 19 nt, Homo sapiens
  misc_RNA (1)...(19): siRNA sense strand
gauccuucaccaccaaaua

SEQ ID NO: 593466 - RNA, 19 nt, Homo sapiens
  misc_RNA (1)...(19): siRNA sense strand
ggugaucacagacaugaaa

SEQ ID NO: 593467 - RNA, 19 nt, Homo sapiens
  misc_RNA (1)...(19): siRNA sense strand
ccacgcugcagcuuaauaa

SEQ ID NO: 593468 - RNA, 19 nt, Homo sapiens
  misc_RNA (1)...(19): siRNA sense strand
gaugacuggucugagcaua

SEQ ID NO: 593469 - RNA, 19 nt, Homo sapiens
  misc_RNA (1)...(19): siRNA sense strand
gagacaaacccguaucaca

SEQ ID NO: 593470 - RNA, 19 nt, Homo sapiens
  misc_RNA (1)...(19): siRNA sense strand
ccaaaagaguggcuugaaa

SEQ ID NO: 593471 - RNA, 19 nt, Homo sapiens
  misc_RNA (1)...(19): siRNA sense strand
cgauccacguguucauuaa

SEQ ID NO: 593472 - RNA, 19 nt, Homo sapiens
  misc_RNA (1)...(19): siRNA sense strand
cagcacaggucacaguaag

SEQ ID NO: 593473 - RNA, 19 nt, Homo sapiens
  misc_RNA (1)...(19): siRNA sense strand
ucaaguagccagagaaguc

SEQ ID NO: 593474 - RNA, 19 nt, Homo sapiens
  misc_RNA (1)...(19): siRNA sense strand
ucacagacaugaaaagaug

SEQ ID NO: 593475 - RNA, 19 nt, Homo sapiens
  misc_RNA (1)...(19): siRNA sense strand
aaagauagggauuacagaa

SEQ ID NO: 593476 - RNA, 19 nt, Homo sapiens
  misc_RNA (1)...(19): siRNA sense strand
caguagcggugaucacaga

SEQ ID NO: 593477 - RNA, 19 nt, Homo sapiens
  misc_RNA (1)...(19): siRNA sense strand
cuacuacaauugucgaaca

SEQ ID NO: 593478 - RNA, 19 nt, Homo sapiens
  misc_RNA (1)...(19): siRNA sense strand
ucagaugcaccuuaugauu

SEQ ID NO: 593479 - RNA, 19 nt, Homo sapiens
  misc_RNA (1)...(19): siRNA sense strand
acccaaaucuucuuagaca

SEQ ID NO: 593480 - RNA, 19 nt, Homo sapiens
  misc_RNA (1)...(19): siRNA sense strand
cagaugcaccuuaugauuc

SEQ ID NO: 593481 - RNA, 19 nt, Homo sapiens
  misc_RNA (1)...(19): siRNA sense strand
gcgaagaagcgcauaacau

SEQ ID NO: 593482 - RNA, 19 nt, Homo sapiens
  misc_RNA (1)...(19): siRNA sense strand
ccaaaucuucuuagacaau

SEQ ID NO: 593483 - RNA, 19 nt, Homo sapiens
  misc_RNA (1)...(19): siRNA sense strand
ucacauucuucuaauccaa

SEQ ID NO: 593484 - RNA, 19 nt, Homo sapiens
  misc_RNA (1)...(19): siRNA sense strand
gagagcaaaggauacuauu

SEQ ID NO: 593485 - RNA, 19 nt, Homo sapiens
  misc_RNA (1)...(19): siRNA sense strand
cauaacaugggaacuauuc

SEQ ID NO: 593486 - RNA, 19 nt, Homo sapiens
  misc_RNA (1)...(19): siRNA sense strand
ucuaaucagucuccgaugu

SEQ ID NO: 593487 - RNA, 19 nt, Homo sapiens
  misc_RNA (1)...(19): siRNA sense strand
ccaucugcuuucaacauaa

SEQ ID NO: 593488 - RNA, 19 nt, Homo sapiens
  misc_RNA (1)...(19): siRNA sense strand
cgcugcagcuuaauaauuc

SEQ ID NO: 593489 - RNA, 19 nt, Homo sapiens
  misc_RNA (1)...(19): siRNA sense strand
agacaaacccguaucacau

SEQ ID NO: 593490 - RNA, 19 nt, Homo sapiens
  misc_RNA (1)...(19): siRNA sense strand
cacaagcccagccaucuaa

SEQ ID NO: 593491 - RNA, 19 nt, Homo sapiens
  misc_RNA (1)...(19): siRNA sense strand
gagaagcaggcaucaagau

SEQ ID NO: 593492 - RNA, 19 nt, Homo sapiens
  misc_RNA (1)...(19): siRNA sense strand
gcgcucaaguagccagaga

SEQ ID NO: 593493 - RNA, 19 nt, Homo sapiens
  misc_RNA (1)...(19): siRNA sense strand
gcccagccaucuaaucagu

SEQ ID NO: 593494 - RNA, 19 nt, Homo sapiens
  misc_RNA (1)...(19): siRNA sense strand
gcucuucauaguucaaauu

SEQ ID NO: 593495 - RNA, 19 nt, Homo sapiens
  misc_RNA (1)...(19): siRNA sense strand
caacaaauuaaggaacuug

SEQ ID NO: 593496 - RNA, 19 nt, Homo sapiens
  misc_RNA (1)...(19): siRNA sense strand
ucaccuggucccaaucaua

SEQ ID NO: 593497 - RNA, 19 nt, Homo sapiens
  misc_RNA (1)...(19): siRNA sense strand
aagccucacugcagucuau

SEQ ID NO: 593498 - RNA, 19 nt, Homo sapiens
  misc_RNA (1)...(19): siRNA sense strand
acaauugcuuccugcuuug

SEQ ID NO: 593499 - RNA, 19 nt, Homo sapiens
  misc_RNA (1)...(19): siRNA sense strand
caaccacagugcucuucau

SEQ ID NO: 593500 - RNA, 19 nt, Homo sapiens
  misc_RNA (1)...(19): siRNA sense strand
auucacauguccgaaauuu

SEQ ID NO: 593501 - RNA, 19 nt, Homo sapiens
  misc_RNA (1)...(19): siRNA sense strand
ccgauccacguguucauua

SEQ ID NO: 593502 - RNA, 19 nt, Homo sapiens
  misc_RNA (1)...(19): siRNA sense strand
cugcucagcucucuacaca

SEQ ID NO: 593503 - RNA, 19 nt, Homo sapiens
  misc_RNA (1)...(19): siRNA sense strand
accaucugcuuucaacaua

SEQ ID NO: 593504 - RNA, 19 nt, Homo sapiens
  misc_RNA (1)...(19): siRNA sense strand
gcaaacaagauggcaguca

SEQ ID NO: 593505 - RNA, 19 nt, Homo sapiens
  misc_RNA (1)...(19): siRNA sense strand
aacagaaguuucacaaugg

SEQ ID NO: 593506 - RNA, 19 nt, Homo sapiens
  misc_RNA (1)...(19): siRNA sense strand
gauagggauuacagaagag

SEQ ID NO: 593507 - RNA, 19 nt, Homo sapiens
  misc_RNA (1)...(19): siRNA sense strand
cagagaagcaggcaucaag

SEQ ID NO: 593508 - RNA, 19 nt, Homo sapiens
  misc_RNA (1)...(19): siRNA sense strand
gucccaaucauacuucuaa

SEQ ID NO: 593509 - RNA, 19 nt, Homo sapiens
  misc_RNA (1)...(19): siRNA sense strand
caucacagccaaagguuag

SEQ ID NO: 593510 - RNA, 19 nt, Homo sapiens
  misc_RNA (1)...(19): siRNA sense strand
guacuccuccuguuucauc

SEQ ID NO: 593511 - RNA, 19 nt, Homo sapiens
  misc_RNA (1)...(19): siRNA sense strand
aaacuaacacagucccuau

SEQ ID NO: 593512 - RNA, 19 nt, Homo sapiens
  misc_RNA (1)...(19): siRNA sense strand
accaggcacuuaaguauuc

SEQ ID NO: 593513 - RNA, 19 nt, Homo sapiens
  misc_RNA (1)...(19): siRNA sense strand
gagaucugauaguccugaa

SEQ ID NO: 593514 - RNA, 19 nt, Homo sapiens
  misc_RNA (1)...(19): siRNA sense strand
cuucuaauccaagcaauaa

SEQ ID NO: 593515 - RNA, 19 nt, Homo sapiens
  misc_RNA (1)...(19): siRNA sense strand
cgagagcaaaggauacuau

SEQ ID NO: 593516 - RNA, 19 nt, Homo sapiens
  misc_RNA (1)...(19): siRNA sense strand
cauaacgucucugauuucu

SEQ ID NO: 593517 - RNA, 19 nt, Homo sapiens
  misc_RNA (1)...(19): siRNA sense strand
acaaacccguaucacauuc

SEQ ID NO: 593518 - RNA, 19 nt, Homo sapiens
  misc_RNA (1)...(19): siRNA sense strand
gcaagcaacagccacuagu

SEQ ID NO: 593519 - RNA, 19 nt, Homo sapiens
  misc_RNA (1)...(19): siRNA sense strand
ugaaagagaacagagacaa

SEQ ID NO: 593520 - RNA, 19 nt, Homo sapiens
  misc_RNA (1)...(19): siRNA sense strand
cuucagaugcaccuuauga

SEQ ID NO: 593521 - RNA, 19 nt, Homo sapiens
  misc_RNA (1)...(19): siRNA sense strand
uaaggaacuugaaaagcua

SEQ ID NO: 593522 - RNA, 19 nt, Homo sapiens
  misc_RNA (1)...(19): siRNA sense strand
gagacaacaaauuaaggaa

SEQ ID NO: 593523 - RNA, 19 nt, Homo sapiens
  misc_RNA (1)...(19): siRNA sense strand
guccgaaauuuguacugaa

SEQ ID NO: 593524 - RNA, 19 nt, Homo sapiens
  misc_RNA (1)...(19): siRNA sense strand
aagcaggcaucaagauuac

SEQ ID NO: 593525 - RNA, 19 nt, Homo sapiens
  misc_RNA (1)...(19): siRNA sense strand
gcacuagcagcacacuuca

SEQ ID NO: 593526 - RNA, 19 nt, Homo sapiens
  misc_RNA (1)...(19): siRNA sense strand
gccuguaacugcugacaag

SEQ ID NO: 593527 - RNA, 19 nt, Homo sapiens
  misc_RNA (1)...(19): siRNA sense strand
acacaagcccagccaucua

SEQ ID NO: 593528 - RNA, 19 nt, Homo sapiens
  misc_RNA (1)...(19): siRNA sense strand
aaaucagaauuccuucaug

SEQ ID NO: 593529 - RNA, 19 nt, Homo sapiens
  misc_RNA (1)...(19): siRNA sense strand
gaacagaaguuucacaaug

SEQ ID NO: 593530 - RNA, 19 nt, Homo sapiens
  misc_RNA (1)...(19): siRNA sense strand
gaagcaggcaucaagauua

SEQ ID NO: 593531 - RNA, 19 nt, Homo sapiens
  misc_RNA (1)...(19): siRNA sense strand
caacauaacgucucugauu

SEQ ID NO: 593532 - RNA, 19 nt, Homo sapiens
  misc_RNA (1)...(19): siRNA sense strand
gaaccugucucuccucgaa

SEQ ID NO: 593533 - RNA, 19 nt, Homo sapiens
  misc_RNA (1)...(19): siRNA sense strand
gacaauugcuuccugcuuu

SEQ ID NO: 593534 - RNA, 19 nt, Homo sapiens
  misc_RNA (1)...(19): siRNA sense strand
uaacgucucugauuucuca

SEQ ID NO: 593535 - RNA, 19 nt, Homo sapiens
  misc_RNA (1)...(19): siRNA sense strand
gccaauaccucccuuacuu

SEQ ID NO: 593536 - RNA, 19 nt, Homo sapiens
  misc_RNA (1)...(19): siRNA sense strand
ggacccaaaucuucuuaga

SEQ ID NO: 593537 - RNA, 19 nt, Homo sapiens
  misc_RNA (1)...(19): siRNA sense strand
gaaagagaacagagacaaa

SEQ ID NO: 593538 - RNA, 19 nt, Homo sapiens
  misc_RNA (1)...(19): siRNA sense strand
caaacaagauggcagucaa

SEQ ID NO: 593539 - RNA, 19 nt, Homo sapiens
  misc_RNA (1)...(19): siRNA sense strand
ccacagugcucuucauagu

SEQ ID NO: 593540 - RNA, 19 nt, Homo sapiens
  misc_RNA (1)...(19): siRNA sense strand
gaucaguacuccuccuguu

SEQ ID NO: 593541 - RNA, 19 nt, Homo sapiens
  misc_RNA (1)...(19): siRNA sense strand
ucacugcagucuauaauuc

SEQ ID NO: 593542 - RNA, 19 nt, Homo sapiens
  misc_RNA (1)...(19): siRNA sense strand
gcucagcucucuacacaag

SEQ ID NO: 593543 - RNA, 19 nt, Homo sapiens
  misc_RNA (1)...(19): siRNA sense strand
cgaagaagcgcauaacaug

SEQ ID NO: 593544 - RNA, 19 nt, Homo sapiens
  misc_RNA (1)...(19): siRNA sense strand
uaacacagucccuaucaaa

SEQ ID NO: 593545 - RNA, 19 nt, Homo sapiens
  misc_RNA (1)...(19): siRNA sense strand
agaauaagcacaccucaaa

SEQ ID NO: 593546 - RNA, 19 nt, Homo sapiens
  misc_RNA (1)...(19): siRNA sense strand
aagaguggcuugaaagaga

SEQ ID NO: 593547 - RNA, 19 nt, Homo sapiens
  misc_RNA (1)...(19): siRNA sense strand
aacauaacgucucugauuu

SEQ ID NO: 593548 - RNA, 19 nt, Homo sapiens
  misc_RNA (1)...(19): siRNA sense strand
ugacuggucugagcauauu

SEQ ID NO: 593549 - RNA, 19 nt, Homo sapiens
  misc_RNA (1)...(19): siRNA sense strand
ggagauccuucaccaccaa

SEQ ID NO: 593550 - RNA, 19 nt, Homo sapiens
  misc_RNA (1)...(19): siRNA sense strand
gacaaacccguaucacauu

SEQ ID NO: 593551 - RNA, 19 nt, Homo sapiens
  misc_RNA (1)...(19): siRNA sense strand
uaagcacaccucaaacuaa

SEQ ID NO: 593552 - RNA, 19 nt, Homo sapiens
  misc_RNA (1)...(19): siRNA sense strand
gagcaaaggauacuauuuu

SEQ ID NO: 593553 - RNA, 19 nt, Homo sapiens
  misc_RNA (1)...(19): siRNA sense strand
ucacauguccgaaauuugu

SEQ ID NO: 593554 - RNA, 19 nt, Homo sapiens
  misc_RNA (1)...(19): siRNA sense strand
gcgcauaacaugggaacua

SEQ ID NO: 593555 - RNA, 19 nt, Homo sapiens
  misc_RNA (1)...(19): siRNA sense strand
caguuacucuccacaagaa

SEQ ID NO: 593556 - RNA, 19 nt, Homo sapiens
  misc_RNA (1)...(19): siRNA sense strand
gacaacaaauuaaggaacu

SEQ ID NO: 593557 - RNA, 19 nt, Homo sapiens
  misc_RNA (1)...(19): siRNA sense strand
ccaaucauacuucuaauag

SEQ ID NO: 593558 - RNA, 19 nt, Homo sapiens
  misc_RNA (1)...(19): siRNA sense strand
agauagggauuacagaaga

SEQ ID NO: 593559 - RNA, 19 nt, Homo sapiens
  misc_RNA (1)...(19): siRNA sense strand
acagugcucuucauaguuc

SEQ ID NO: 593560 - RNA, 19 nt, Homo sapiens
  misc_RNA (1)...(19): siRNA sense strand
gaaaacaaauacagugaca

SEQ ID NO: 593561 - RNA, 19 nt, Homo sapiens
  misc_RNA (1)...(19): siRNA sense strand
cuacaauugucgaacagaa

SEQ ID NO: 593562 - RNA, 19 nt, Homo sapiens
  misc_RNA (1)...(19): siRNA sense strand
aaacuucagaugcaccuua

SEQ ID NO: 593563 - RNA, 19 nt, Homo sapiens
  misc_RNA (1)...(19): siRNA sense strand
uauuagcucuucugggaaa

SEQ ID NO: 593564 - RNA, 19 nt, Homo sapiens
  misc_RNA (1)...(19): siRNA sense strand
gauccuucaccaccaaaua

SEQ ID NO: 593565 - RNA, 19 nt, Homo sapiens
  misc_RNA (1)...(19): siRNA sense strand
ccacgcugcagcuuaauaa

SEQ ID NO: 593566 - RNA, 19 nt, Homo sapiens
  misc_RNA (1)...(19): siRNA sense strand
gaugacuggucugagcaua

SEQ ID NO: 593567 - RNA, 19 nt, Homo sapiens
  misc_RNA (1)...(19): siRNA sense strand
gagacaaacccguaucaca

SEQ ID NO: 593568 - RNA, 19 nt, Homo sapiens
  misc_RNA (1)...(19): siRNA sense strand
ccaaaagaguggcuugaaa

SEQ ID NO: 593569 - RNA, 19 nt, Homo sapiens
  misc_RNA (1)...(19): siRNA sense strand
cgauccacguguucauuaa

SEQ ID NO: 593570 - RNA, 19 nt, Homo sapiens
  misc_RNA (1)...(19): siRNA sense strand
cuacuacaauugucgaaca

SEQ ID NO: 593571 - RNA, 19 nt, Homo sapiens
  misc_RNA (1)...(19): siRNA sense strand
ucaaguagccagagaaguc

SEQ ID NO: 593572 - RNA, 19 nt, Homo sapiens
  misc_RNA (1)...(19): siRNA sense strand
cagcacaggucacaguaag

SEQ ID NO: 593573 - RNA, 19 nt, Homo sapiens
  misc_RNA (1)...(19): siRNA sense strand
aaagauagggauuacagaa

SEQ ID NO: 593574 - RNA, 19 nt, Homo sapiens
  misc_RNA (1)...(19): siRNA sense strand
ucagaugcaccuuaugauu

SEQ ID NO: 593575 - RNA, 19 nt, Homo sapiens
  misc_RNA (1)...(19): siRNA sense strand
acccaaaucuucuuagaca

SEQ ID NO: 593576 - RNA, 19 nt, Homo sapiens
  misc_RNA (1)...(19): siRNA sense strand
cagaugcaccuuaugauuc

SEQ ID NO: 593577 - RNA, 19 nt, Homo sapiens
  misc_RNA (1)...(19): siRNA sense strand
gcgaagaagcgcauaacau

SEQ ID NO: 593578 - RNA, 19 nt, Homo sapiens
  misc_RNA (1)...(19): siRNA sense strand
ccaaaucuucuuagacaau

SEQ ID NO: 593579 - RNA, 19 nt, Homo sapiens
  misc_RNA (1)...(19): siRNA sense strand
ucacauucuucuaauccaa

SEQ ID NO: 593580 - RNA, 19 nt, Homo sapiens
  misc_RNA (1)...(19): siRNA sense strand
gagagcaaaggauacuauu

SEQ ID NO: 593581 - RNA, 19 nt, Homo sapiens
  misc_RNA (1)...(19): siRNA sense strand
cauaacaugggaacuauuc

SEQ ID NO: 593582 - RNA, 19 nt, Homo sapiens
  misc_RNA (1)...(19): siRNA sense strand
ucuaaucagucuccgaugu

SEQ ID NO: 593583 - RNA, 19 nt, Homo sapiens
  misc_RNA (1)...(19): siRNA sense strand
ccaucugcuuucaacauaa

SEQ ID NO: 593584 - RNA, 19 nt, Homo sapiens
  misc_RNA (1)...(19): siRNA sense strand
cgcugcagcuuaauaauuc

SEQ ID NO: 593585 - RNA, 19 nt, Homo sapiens
  misc_RNA (1)...(19): siRNA sense strand
agacaaacccguaucacau

SEQ ID NO: 593586 - RNA, 19 nt, Homo sapiens
  misc_RNA (1)...(19): siRNA sense strand
cacaagcccagccaucuaa

SEQ ID NO: 593587 - RNA, 19 nt, Homo sapiens
  misc_RNA (1)...(19): siRNA sense strand
gagaagcaggcaucaagau

SEQ ID NO: 593588 - RNA, 19 nt, Homo sapiens
  misc_RNA (1)...(19): siRNA sense strand
gcgcucaaguagccagaga

SEQ ID NO: 593589 - RNA, 19 nt, Homo sapiens
  misc_RNA (1)...(19): siRNA sense strand
gcccagccaucuaaucagu

SEQ ID NO: 593590 - RNA, 19 nt, Homo sapiens
  misc_RNA (1)...(19): siRNA sense strand
gcucuucauaguucaaauu

SEQ ID NO: 593591 - RNA, 19 nt, Homo sapiens
  misc_RNA (1)...(19): siRNA sense strand
caacaaauuaaggaacuug

SEQ ID NO: 593592 - RNA, 19 nt, Homo sapiens
  misc_RNA (1)...(19): siRNA sense strand
ucaccuggucccaaucaua

SEQ ID NO: 593593 - RNA, 19 nt, Homo sapiens
  misc_RNA (1)...(19): siRNA sense strand
aagccucacugcagucuau

SEQ ID NO: 593594 - RNA, 19 nt, Homo sapiens
  misc_RNA (1)...(19): siRNA sense strand
acaauugcuuccugcuuug

SEQ ID NO: 593595 - RNA, 19 nt, Homo sapiens
  misc_RNA (1)...(19): siRNA sense strand
aacagaaguuucacaaugg

SEQ ID NO: 593596 - RNA, 19 nt, Homo sapiens
  misc_RNA (1)...(19): siRNA sense strand
auucacauguccgaaauuu

SEQ ID NO: 593597 - RNA, 19 nt, Homo sapiens
  misc_RNA (1)...(19): siRNA sense strand
caaccacagugcucuucau

SEQ ID NO: 593598 - RNA, 19 nt, Homo sapiens
  misc_RNA (1)...(19): siRNA sense strand
ccgauccacguguucauua

SEQ ID NO: 593599 - RNA, 19 nt, Homo sapiens
  misc_RNA (1)...(19): siRNA sense strand
cugcucagcucucuacaca

SEQ ID NO: 593600 - RNA, 19 nt, Homo sapiens
  misc_RNA (1)...(19): siRNA sense strand
accaucugcuuucaacaua

SEQ ID NO: 593601 - RNA, 19 nt, Homo sapiens
  misc_RNA (1)...(19): siRNA sense strand
gcaaacaagauggcaguca

SEQ ID NO: 593602 - RNA, 19 nt, Homo sapiens
  misc_RNA (1)...(19): siRNA sense strand
gauagggauuacagaagag

SEQ ID NO: 593603 - RNA, 19 nt, Homo sapiens
  misc_RNA (1)...(19): siRNA sense strand
gagaucugauaguccugaa

SEQ ID NO: 593604 - RNA, 19 nt, Homo sapiens
  misc_RNA (1)...(19): siRNA sense strand
cagagaagcaggcaucaag

SEQ ID NO: 593605 - RNA, 19 nt, Homo sapiens
  misc_RNA (1)...(19): siRNA sense strand
gucccaaucauacuucuaa

SEQ ID NO: 593606 - RNA, 19 nt, Homo sapiens
  misc_RNA (1)...(19): siRNA sense strand
caucacagccaaagguuag

SEQ ID NO: 593607 - RNA, 19 nt, Homo sapiens
  misc_RNA (1)...(19): siRNA sense strand
guacuccuccuguuucauc

SEQ ID NO: 593608 - RNA, 19 nt, Homo sapiens
  misc_RNA (1)...(19): siRNA sense strand
aaacuaacacagucccuau

SEQ ID NO: 593609 - RNA, 19 nt, Homo sapiens
  misc_RNA (1)...(19): siRNA sense strand
cuucuaauccaagcaauaa

SEQ ID NO: 593610 - RNA, 19 nt, Homo sapiens
  misc_RNA (1)...(19): siRNA sense strand
cgagagcaaaggauacuau

SEQ ID NO: 593611 - RNA, 19 nt, Homo sapiens
  misc_RNA (1)...(19): siRNA sense strand
cauaacgucucugauuucu

SEQ ID NO: 593612 - RNA, 19 nt, Homo sapiens
  misc_RNA (1)...(19): siRNA sense strand
acaaacccguaucacauuc

SEQ ID NO: 593613 - RNA, 19 nt, Homo sapiens
  misc_RNA (1)...(19): siRNA sense strand
gcaagcaacagccacuagu

SEQ ID NO: 593614 - RNA, 19 nt, Homo sapiens
  misc_RNA (1)...(19): siRNA sense strand
ugaaagagaacagagacaa

SEQ ID NO: 593615 - RNA, 19 nt, Homo sapiens
  misc_RNA (1)...(19): siRNA sense strand
cuucagaugcaccuuauga

SEQ ID NO: 593616 - RNA, 19 nt, Homo sapiens
  misc_RNA (1)...(19): siRNA sense strand
uaaggaacuugaaaagcua

SEQ ID NO: 593617 - RNA, 19 nt, Homo sapiens
  misc_RNA (1)...(19): siRNA sense strand
gagacaacaaauuaaggaa

SEQ ID NO: 593618 - RNA, 19 nt, Homo sapiens
  misc_RNA (1)...(19): siRNA sense strand
guccgaaauuuguacugaa

SEQ ID NO: 593619 - RNA, 19 nt, Homo sapiens
  misc_RNA (1)...(19): siRNA sense strand
aagcaggcaucaagauuac

SEQ ID NO: 593620 - RNA, 19 nt, Homo sapiens
  misc_RNA (1)...(19): siRNA sense strand
gcacuagcagcacacuuca

SEQ ID NO: 593621 - RNA, 19 nt, Homo sapiens
  misc_RNA (1)...(19): siRNA sense strand
gccuguaacugcugacaag

SEQ ID NO: 593622 - RNA, 19 nt, Homo sapiens
  misc_RNA (1)...(19): siRNA sense strand
acacaagcccagccaucua

SEQ ID NO: 593623 - RNA, 19 nt, Homo sapiens
  misc_RNA (1)...(19): siRNA sense strand
gaccaucugcuuucaacau

SEQ ID NO: 593624 - RNA, 19 nt, Homo sapiens
  misc_RNA (1)...(19): siRNA sense strand
aaaucagaauuccuucaug

SEQ ID NO: 593625 - RNA, 19 nt, Homo sapiens
  misc_RNA (1)...(19): siRNA sense strand
ugagacaacaaauuaagga

SEQ ID NO: 593626 - RNA, 19 nt, Homo sapiens
  misc_RNA (1)...(19): siRNA sense strand
agaagcaggcaucaagauu

SEQ ID NO: 593627 - RNA, 19 nt, Homo sapiens
  misc_RNA (1)...(19): siRNA sense strand
gacagcacaggucacagua

SEQ ID NO: 593628 - RNA, 19 nt, Homo sapiens
  misc_RNA (1)...(19): siRNA sense strand
gaucuuuaguccgaguaug

SEQ ID NO: 593629 - RNA, 19 nt, Homo sapiens
  misc_RNA (1)...(19): siRNA sense strand
gaacagaaguuucacaaug

SEQ ID NO: 593630 - RNA, 19 nt, Homo sapiens
  misc_RNA (1)...(19): siRNA sense strand
gaagcaggcaucaagauua

SEQ ID NO: 593631 - RNA, 19 nt, Homo sapiens
  misc_RNA (1)...(19): siRNA sense strand
caacauaacgucucugauu

SEQ ID NO: 593632 - RNA, 19 nt, Homo sapiens
  misc_RNA (1)...(19): siRNA sense strand
gaaccugucucuccucgaa

SEQ ID NO: 593633 - RNA, 19 nt, Homo sapiens
  misc_RNA (1)...(19): siRNA sense strand
gacaauugcuuccugcuuu

SEQ ID NO: 593634 - RNA, 19 nt, Homo sapiens
  misc_RNA (1)...(19): siRNA sense strand
uaacgucucugauuucuca

SEQ ID NO: 593635 - RNA, 19 nt, Homo sapiens
  misc_RNA (1)...(19): siRNA sense strand
gccaauaccucccuuacuu

SEQ ID NO: 593636 - RNA, 19 nt, Homo sapiens
  misc_RNA (1)...(19): siRNA sense strand
gcacuuaaguauucaucga

SEQ ID NO: 593637 - RNA, 19 nt, Homo sapiens
  misc_RNA (1)...(19): siRNA sense strand
ggacccaaaucuucuuaga

SEQ ID NO: 593638 - RNA, 19 nt, Homo sapiens
  misc_RNA (1)...(19): siRNA sense strand
gaaagagaacagagacaaa

SEQ ID NO: 593639 - RNA, 19 nt, Homo sapiens
  misc_RNA (1)...(19): siRNA sense strand
caaacaagauggcagucaa

SEQ ID NO: 593640 - RNA, 19 nt, Homo sapiens
  misc_RNA (1)...(19): siRNA sense strand
ccacagugcucuucauagu

SEQ ID NO: 593641 - RNA, 19 nt, Homo sapiens
  misc_RNA (1)...(19): siRNA sense strand
gaucaguacuccuccuguu

SEQ ID NO: 593642 - RNA, 19 nt, Homo sapiens
  misc_RNA (1)...(19): siRNA sense strand
ucacugcagucuauaauuc

SEQ ID NO: 593643 - RNA, 19 nt, Homo sapiens
  misc_RNA (1)...(19): siRNA sense strand
gcucagcucucuacacaag

SEQ ID NO: 593644 - RNA, 19 nt, Homo sapiens
  misc_RNA (1)...(19): siRNA sense strand
cgaagaagcgcauaacaug

SEQ ID NO: 593645 - RNA, 19 nt, Homo sapiens
  misc_RNA (1)...(19): siRNA sense strand
uaacacagucccuaucaaa

SEQ ID NO: 593646 - RNA, 19 nt, Homo sapiens
  misc_RNA (1)...(19): siRNA sense strand
agaauaagcacaccucaaa

SEQ ID NO: 593647 - RNA, 19 nt, Homo sapiens
  misc_RNA (1)...(19): siRNA sense strand
aagaguggcuugaaagaga

SEQ ID NO: 593648 - RNA, 19 nt, Homo sapiens
  misc_RNA (1)...(19): siRNA sense strand
aacauaacgucucugauuu

SEQ ID NO: 593649 - RNA, 19 nt, Homo sapiens
  misc_RNA (1)...(19): siRNA sense strand
ugacuggucugagcauauu

SEQ ID NO: 593650 - RNA, 19 nt, Homo sapiens
  misc_RNA (1)...(19): siRNA sense strand
ggagauccuucaccaccaa

SEQ ID NO: 593651 - RNA, 19 nt, Homo sapiens
  misc_RNA (1)...(19): siRNA sense strand
gacaaacccguaucacauu

SEQ ID NO: 593652 - RNA, 19 nt, Homo sapiens
  misc_RNA (1)...(19): siRNA sense strand
uaagcacaccucaaacuaa

SEQ ID NO: 593653 - RNA, 19 nt, Homo sapiens
  misc_RNA (1)...(19): siRNA sense strand
gagcaaaggauacuauuuu

SEQ ID NO: 593654 - RNA, 19 nt, Homo sapiens
  misc_RNA (1)...(19): siRNA sense strand
ucacauguccgaaauuugu

SEQ ID NO: 593655 - RNA, 19 nt, Homo sapiens
  misc_RNA (1)...(19): siRNA sense strand
gcgcauaacaugggaacua

SEQ ID NO: 593656 - RNA, 19 nt, Homo sapiens
  misc_RNA (1)...(19): siRNA sense strand
caguuacucuccacaagaa

SEQ ID NO: 593657 - RNA, 19 nt, Homo sapiens
  misc_RNA (1)...(19): siRNA sense strand
gacaacaaauuaaggaacu

SEQ ID NO: 593658 - RNA, 19 nt, Homo sapiens
  misc_RNA (1)...(19): siRNA sense strand
ccaaucauacuucuaauag

SEQ ID NO: 593659 - RNA, 19 nt, Homo sapiens
  misc_RNA (1)...(19): siRNA sense strand
agauagggauuacagaaga

SEQ ID NO: 593660 - RNA, 19 nt, Homo sapiens
  misc_RNA (1)...(19): siRNA sense strand
acagugcucuucauaguuc

SEQ ID NO: 593661 - RNA, 19 nt, Homo sapiens
  misc_RNA (1)...(19): siRNA sense strand
gaaaacaaauacagugaca

SEQ ID NO: 593662 - RNA, 19 nt, Homo sapiens
  misc_RNA (1)...(19): siRNA sense strand
cuacaauugucgaacagaa

SEQ ID NO: 593663 - RNA, 19 nt, Homo sapiens
  misc_RNA (1)...(19): siRNA sense strand
aaacuucagaugcaccuua

SEQ ID NO: 593664 - RNA, 19 nt, Homo sapiens
  misc_RNA (1)...(19): siRNA sense strand
uauuagcucuucugggaaa

SEQ ID NO: 593665 - RNA, 19 nt, Homo sapiens
  misc_RNA (1)...(19): siRNA sense strand
gauccuucaccaccaaaua

SEQ ID NO: 593666 - RNA, 19 nt, Homo sapiens
  misc_RNA (1)...(19): siRNA sense strand
ggugaucacagacaugaaa

SEQ ID NO: 593667 - RNA, 19 nt, Homo sapiens
  misc_RNA (1)...(19): siRNA sense strand
ccacgcugcagcuuaauaa

SEQ ID NO: 593668 - RNA, 19 nt, Homo sapiens
  misc_RNA (1)...(19): siRNA sense strand
gaugacuggucugagcaua

SEQ ID NO: 593669 - RNA, 19 nt, Homo sapiens
  misc_RNA (1)...(19): siRNA sense strand
gagacaaacccguaucaca

SEQ ID NO: 593670 - RNA, 19 nt, Homo sapiens
  misc_RNA (1)...(19): siRNA sense strand
ccaaaagaguggcuugaaa

SEQ ID NO: 593671 - RNA, 19 nt, Homo sapiens
  misc_RNA (1)...(19): siRNA sense strand
cgauccacguguucauuaa

SEQ ID NO: 593672 - RNA, 19 nt, Homo sapiens
  misc_RNA (1)...(19): siRNA sense strand
cagcacaggucacaguaag

SEQ ID NO: 593673 - RNA, 19 nt, Homo sapiens
  misc_RNA (1)...(19): siRNA sense strand
ucaaguagccagagaaguc

SEQ ID NO: 593674 - RNA, 19 nt, Homo sapiens
  misc_RNA (1)...(19): siRNA sense strand
ucacagacaugaaaagaug

SEQ ID NO: 593675 - RNA, 19 nt, Homo sapiens
  misc_RNA (1)...(19): siRNA sense strand
aaagauagggauuacagaa

SEQ ID NO: 593676 - RNA, 19 nt, Homo sapiens
  misc_RNA (1)...(19): siRNA sense strand
caguagcggugaucacaga

SEQ ID NO: 593677 - RNA, 19 nt, Homo sapiens
  misc_RNA (1)...(19): siRNA sense strand
cuacuacaauugucgaaca

SEQ ID NO: 593678 - RNA, 19 nt, Homo sapiens
  misc_RNA (1)...(19): siRNA sense strand
ucagaugcaccuuaugauu

SEQ ID NO: 593679 - RNA, 19 nt, Homo sapiens
  misc_RNA (1)...(19): siRNA sense strand
acccaaaucuucuuagaca

SEQ ID NO: 593680 - RNA, 19 nt, Homo sapiens
  misc_RNA (1)...(19): siRNA sense strand
cagaugcaccuuaugauuc

SEQ ID NO: 593681 - RNA, 19 nt, Homo sapiens
  misc_RNA (1)...(19): siRNA sense strand
gcgaagaagcgcauaacau

SEQ ID NO: 593682 - RNA, 19 nt, Homo sapiens
  misc_RNA (1)...(19): siRNA sense strand
ccaaaucuucuuagacaau

SEQ ID NO: 593683 - RNA, 19 nt, Homo sapiens
  misc_RNA (1)...(19): siRNA sense strand
ucacauucuucuaauccaa

SEQ ID NO: 593684 - RNA, 19 nt, Homo sapiens
  misc_RNA (1)...(19): siRNA sense strand
gagagcaaaggauacuauu

SEQ ID NO: 593685 - RNA, 19 nt, Homo sapiens
  misc_RNA (1)...(19): siRNA sense strand
cauaacaugggaacuauuc

SEQ ID NO: 593686 - RNA, 19 nt, Homo sapiens
  misc_RNA (1)...(19): siRNA sense strand
ucuaaucagucuccgaugu

SEQ ID NO: 593687 - RNA, 19 nt, Homo sapiens
  misc_RNA (1)...(19): siRNA sense strand
ccaucugcuuucaacauaa

SEQ ID NO: 593688 - RNA, 19 nt, Homo sapiens
  misc_RNA (1)...(19): siRNA sense strand
cgcugcagcuuaauaauuc

SEQ ID NO: 593689 - RNA, 19 nt, Homo sapiens
  misc_RNA (1)...(19): siRNA sense strand
agacaaacccguaucacau

SEQ ID NO: 593690 - RNA, 19 nt, Homo sapiens
  misc_RNA (1)...(19): siRNA sense strand
cacaagcccagccaucuaa

SEQ ID NO: 593691 - RNA, 19 nt, Homo sapiens
  misc_RNA (1)...(19): siRNA sense strand
gagaagcaggcaucaagau

SEQ ID NO: 593692 - RNA, 19 nt, Homo sapiens
  misc_RNA (1)...(19): siRNA sense strand
gcgcucaaguagccagaga

SEQ ID NO: 593693 - RNA, 19 nt, Homo sapiens
  misc_RNA (1)...(19): siRNA sense strand
gcccagccaucuaaucagu

SEQ ID NO: 593694 - RNA, 19 nt, Homo sapiens
  misc_RNA (1)...(19): siRNA sense strand
gcucuucauaguucaaauu

SEQ ID NO: 593695 - RNA, 19 nt, Homo sapiens
  misc_RNA (1)...(19): siRNA sense strand
caacaaauuaaggaacuug

SEQ ID NO: 593696 - RNA, 19 nt, Homo sapiens
  misc_RNA (1)...(19): siRNA sense strand
ucaccuggucccaaucaua

SEQ ID NO: 593697 - RNA, 19 nt, Homo sapiens
  misc_RNA (1)...(19): siRNA sense strand
aagccucacugcagucuau

SEQ ID NO: 593698 - RNA, 19 nt, Homo sapiens
  misc_RNA (1)...(19): siRNA sense strand
acaauugcuuccugcuuug

SEQ ID NO: 593699 - RNA, 19 nt, Homo sapiens
  misc_RNA (1)...(19): siRNA sense strand
caaccacagugcucuucau

SEQ ID NO: 593700 - RNA, 19 nt, Homo sapiens
  misc_RNA (1)...(19): siRNA sense strand
auucacauguccgaaauuu

SEQ ID NO: 593701 - RNA, 19 nt, Homo sapiens
  misc_RNA (1)...(19): siRNA sense strand
ccgauccacguguucauua

SEQ ID NO: 593702 - RNA, 19 nt, Homo sapiens
  misc_RNA (1)...(19): siRNA sense strand
cugcucagcucucuacaca

SEQ ID NO: 593703 - RNA, 19 nt, Homo sapiens
  misc_RNA (1)...(19): siRNA sense strand
accaucugcuuucaacaua

SEQ ID NO: 593704 - RNA, 19 nt, Homo sapiens
  misc_RNA (1)...(19): siRNA sense strand
gcaaacaagauggcaguca

SEQ ID NO: 593705 - RNA, 19 nt, Homo sapiens
  misc_RNA (1)...(19): siRNA sense strand
aacagaaguuucacaaugg

SEQ ID NO: 593706 - RNA, 19 nt, Homo sapiens
  misc_RNA (1)...(19): siRNA sense strand
gauagggauuacagaagag

SEQ ID NO: 593707 - RNA, 19 nt, Homo sapiens
  misc_RNA (1)...(19): siRNA sense strand
cagagaagcaggcaucaag

SEQ ID NO: 593708 - RNA, 19 nt, Homo sapiens
  misc_RNA (1)...(19): siRNA sense strand
gucccaaucauacuucuaa

SEQ ID NO: 593709 - RNA, 19 nt, Homo sapiens
  misc_RNA (1)...(19): siRNA sense strand
caucacagccaaagguuag

SEQ ID NO: 593710 - RNA, 19 nt, Homo sapiens
  misc_RNA (1)...(19): siRNA sense strand
guacuccuccuguuucauc

SEQ ID NO: 593711 - RNA, 19 nt, Homo sapiens
  misc_RNA (1)...(19): siRNA sense strand
aaacuaacacagucccuau

SEQ ID NO: 593712 - RNA, 19 nt, Homo sapiens
  misc_RNA (1)...(19): siRNA sense strand
accaggcacuuaaguauuc

SEQ ID NO: 593713 - RNA, 19 nt, Homo sapiens
  misc_RNA (1)...(19): siRNA sense strand
gagaucugauaguccugaa

SEQ ID NO: 593714 - RNA, 19 nt, Homo sapiens
  misc_RNA (1)...(19): siRNA sense strand
cuucuaauccaagcaauaa

SEQ ID NO: 593715 - RNA, 19 nt, Homo sapiens
  misc_RNA (1)...(19): siRNA sense strand
cgagagcaaaggauacuau

SEQ ID NO: 593716 - RNA, 19 nt, Homo sapiens
  misc_RNA (1)...(19): siRNA sense strand
cauaacgucucugauuucu

SEQ ID NO: 593717 - RNA, 19 nt, Homo sapiens
  misc_RNA (1)...(19): siRNA sense strand
acaaacccguaucacauuc

SEQ ID NO: 593718 - RNA, 19 nt, Homo sapiens
  misc_RNA (1)...(19): siRNA sense strand
gcaagcaacagccacuagu

SEQ ID NO: 593719 - RNA, 19 nt, Homo sapiens
  misc_RNA (1)...(19): siRNA sense strand
ugaaagagaacagagacaa

SEQ ID NO: 593720 - RNA, 19 nt, Homo sapiens
  misc_RNA (1)...(19): siRNA sense strand
cuucagaugcaccuuauga

SEQ ID NO: 593721 - RNA, 19 nt, Homo sapiens
  misc_RNA (1)...(19): siRNA sense strand
uaaggaacuugaaaagcua

SEQ ID NO: 593722 - RNA, 19 nt, Homo sapiens
  misc_RNA (1)...(19): siRNA sense strand
gagacaacaaauuaaggaa

SEQ ID NO: 593723 - RNA, 19 nt, Homo sapiens
  misc_RNA (1)...(19): siRNA sense strand
guccgaaauuuguacugaa

SEQ ID NO: 593724 - RNA, 19 nt, Homo sapiens
  misc_RNA (1)...(19): siRNA sense strand
aagcaggcaucaagauuac

SEQ ID NO: 593725 - RNA, 19 nt, Homo sapiens
  misc_RNA (1)...(19): siRNA sense strand
gcacuagcagcacacuuca

SEQ ID NO: 593726 - RNA, 19 nt, Homo sapiens
  misc_RNA (1)...(19): siRNA sense strand
gccuguaacugcugacaag

SEQ ID NO: 593727 - RNA, 19 nt, Homo sapiens
  misc_RNA (1)...(19): siRNA sense strand
acacaagcccagccaucua

SEQ ID NO: 593728 - RNA, 19 nt, Homo sapiens
  misc_RNA (1)...(19): siRNA sense strand
aaaucagaauuccuucaug

SEQ ID NO: 593729 - RNA, 19 nt, Homo sapiens
  misc_RNA (1)...(19): siRNA sense strand
gaagaaggcuggaaacaga

SEQ ID NO: 593730 - RNA, 19 nt, Homo sapiens
  misc_RNA (1)...(19): siRNA sense strand
ccacagggcugaucuauga

SEQ ID NO: 593731 - RNA, 19 nt, Homo sapiens
  misc_RNA (1)...(19): siRNA sense strand
ggugagggcuucaauguca

SEQ ID NO: 593732 - RNA, 19 nt, Homo sapiens
  misc_RNA (1)...(19): siRNA sense strand
gcaagauccucauuguaga

SEQ ID NO: 593733 - RNA, 19 nt, Homo sapiens
  misc_RNA (1)...(19): siRNA sense strand
ucacugaccucgccuucaa

SEQ ID NO: 593734 - RNA, 19 nt, Homo sapiens
  misc_RNA (1)...(19): siRNA sense strand
gcuauaagcccaagaaguc

SEQ ID NO: 593735 - RNA, 19 nt, Homo sapiens
  misc_RNA (1)...(19): siRNA sense strand
cugaagaccuggagacaga

SEQ ID NO: 593736 - RNA, 19 nt, Homo sapiens
  misc_RNA (1)...(19): siRNA sense strand
gaagcuagcggaggugauu

SEQ ID NO: 593737 - RNA, 19 nt, Homo sapiens
  misc_RNA (1)...(19): siRNA sense strand
ggaggaagaaccuaugaau

SEQ ID NO: 593738 - RNA, 19 nt, Homo sapiens
  misc_RNA (1)...(19): siRNA sense strand
ccagcaagauccucauugu

SEQ ID NO: 593739 - RNA, 19 nt, Homo sapiens
  misc_RNA (1)...(19): siRNA sense strand
uagcggaggugauucugaa

SEQ ID NO: 593740 - RNA, 19 nt, Homo sapiens
  misc_RNA (1)...(19): siRNA sense strand
cugaguaccuggcugcuuu

SEQ ID NO: 593741 - RNA, 19 nt, Homo sapiens
  misc_RNA (1)...(19): siRNA sense strand
ccuggugucugcuggauuu

SEQ ID NO: 593742 - RNA, 19 nt, Homo sapiens
  misc_RNA (1)...(19): siRNA sense strand
ggaagaaccuaugaaucuc

SEQ ID NO: 593743 - RNA, 19 nt, Homo sapiens
  misc_RNA (1)...(19): siRNA sense strand
gacaagagcaagcgaagug

SEQ ID NO: 593744 - RNA, 19 nt, Homo sapiens
  misc_RNA (1)...(19): siRNA sense strand
gcagauacccucggcugaa

SEQ ID NO: 593745 - RNA, 19 nt, Homo sapiens
  misc_RNA (1)...(19): siRNA sense strand
uggcugcucuucuggguaa

SEQ ID NO: 593746 - RNA, 19 nt, Homo sapiens
  misc_RNA (1)...(19): siRNA sense strand
gagcaaggccagcaagauc

SEQ ID NO: 593747 - RNA, 19 nt, Homo sapiens
  misc_RNA (1)...(19): siRNA sense strand
ccacuuugcccaguccuua

SEQ ID NO: 593748 - RNA, 19 nt, Homo sapiens
  misc_RNA (1)...(19): siRNA sense strand
gggcuucaaugucaaugug

SEQ ID NO: 593749 - RNA, 19 nt, Homo sapiens
  misc_RNA (1)...(19): siRNA sense strand
gcagcguggucaagcagaa

SEQ ID NO: 593750 - RNA, 19 nt, Homo sapiens
  misc_RNA (1)...(19): siRNA sense strand
agaauccacugcuccgaaa

SEQ ID NO: 593751 - RNA, 19 nt, Homo sapiens
  misc_RNA (1)...(19): siRNA sense strand
gcacccagcaaaccuucua

SEQ ID NO: 593752 - RNA, 19 nt, Homo sapiens
  misc_RNA (1)...(19): siRNA sense strand
ccauguuucugccaaaugu

SEQ ID NO: 593753 - RNA, 19 nt, Homo sapiens
  misc_RNA (1)...(19): siRNA sense strand
gcccuugcccuuccacuuu

SEQ ID NO: 593754 - RNA, 19 nt, Homo sapiens
  misc_RNA (1)...(19): siRNA sense strand
ccaugcagaucauucaaca

SEQ ID NO: 593755 - RNA, 19 nt, Homo sapiens
  misc_RNA (1)...(19): siRNA sense strand
gcaccaccaccucuuccua

SEQ ID NO: 593756 - RNA, 19 nt, Homo sapiens
  misc_RNA (1)...(19): siRNA sense strand
cagcaagauccucauugua

SEQ ID NO: 593757 - RNA, 19 nt, Homo sapiens
  misc_RNA (1)...(19): siRNA sense strand
cuggguggcuaccauguuu

SEQ ID NO: 593758 - RNA, 19 nt, Homo sapiens
  misc_RNA (1)...(19): siRNA sense strand
gaacaguccaucccaacag

SEQ ID NO: 593759 - RNA, 19 nt, Homo sapiens
  misc_RNA (1)...(19): siRNA sense strand
gaggaagaaccuaugaauc

SEQ ID NO: 593760 - RNA, 19 nt, Homo sapiens
  misc_RNA (1)...(19): siRNA sense strand
gaggaggaagaaccuauga

SEQ ID NO: 593761 - RNA, 19 nt, Homo sapiens
  misc_RNA (1)...(19): siRNA sense strand
gccaugggcuucugcuucu

SEQ ID NO: 593762 - RNA, 19 nt, Homo sapiens
  misc_RNA (1)...(19): siRNA sense strand
ugaccucgccuucaaagug

SEQ ID NO: 593763 - RNA, 19 nt, Homo sapiens
  misc_RNA (1)...(19): siRNA sense strand
aagaaccuaugaaucucua

SEQ ID NO: 593764 - RNA, 19 nt, Homo sapiens
  misc_RNA (1)...(19): siRNA sense strand
cauccuggcugaagauagg

SEQ ID NO: 593765 - RNA, 19 nt, Homo sapiens
  misc_RNA (1)...(19): siRNA sense strand
gaagaaccuaugaaucucu

SEQ ID NO: 593766 - RNA, 19 nt, Homo sapiens
  misc_RNA (1)...(19): siRNA sense strand
ggaaggccucccuggaaga

SEQ ID NO: 593767 - RNA, 19 nt, Homo sapiens
  misc_RNA (1)...(19): siRNA sense strand
aggaagaaccuaugaaucu

SEQ ID NO: 593768 - RNA, 19 nt, Homo sapiens
  misc_RNA (1)...(19): siRNA sense strand
acacugacaccaucuggaa

SEQ ID NO: 593769 - RNA, 19 nt, Homo sapiens
  misc_RNA (1)...(19): siRNA sense strand
ccagcaaaccuucuaccaa

SEQ ID NO: 593770 - RNA, 19 nt, Homo sapiens
  misc_RNA (1)...(19): siRNA sense strand
ggaggaggaagaaccuaug

SEQ ID NO: 593771 - RNA, 19 nt, Homo sapiens
  misc_RNA (1)...(19): siRNA sense strand
gccaggggcugacaaagaa

SEQ ID NO: 593772 - RNA, 19 nt, Homo sapiens
  misc_RNA (1)...(19): siRNA sense strand
acagaaacccaaccucaau

SEQ ID NO: 593773 - RNA, 19 nt, Homo sapiens
  misc_RNA (1)...(19): siRNA sense strand
gcggugagggcuucaaugu

SEQ ID NO: 593774 - RNA, 19 nt, Homo sapiens
  misc_RNA (1)...(19): siRNA sense strand
ucucugagcccaaccugaa

SEQ ID NO: 593775 - RNA, 19 nt, Homo sapiens
  misc_RNA (1)...(19): siRNA sense strand
acacgccgaugcccgaguu

SEQ ID NO: 593776 - RNA, 19 nt, Homo sapiens
  misc_RNA (1)...(19): siRNA sense strand
gaagaaguggaggcaguga

SEQ ID NO: 593777 - RNA, 19 nt, Homo sapiens
  misc_RNA (1)...(19): siRNA sense strand
accugaagcugcgcuauaa

SEQ ID NO: 593778 - RNA, 19 nt, Homo sapiens
  misc_RNA (1)...(19): siRNA sense strand
ggucagccaagccgaguga

SEQ ID NO: 593779 - RNA, 19 nt, Homo sapiens
  misc_RNA (1)...(19): siRNA sense strand
ggugucugcuggauuugau

SEQ ID NO: 593780 - RNA, 19 nt, Homo sapiens
  misc_RNA (1)...(19): siRNA sense strand
ccagugugcucuacaucuc

SEQ ID NO: 593781 - RNA, 19 nt, Homo sapiens
  misc_RNA (1)...(19): siRNA sense strand
ugcagucgguccacucuga

SEQ ID NO: 593782 - RNA, 19 nt, Homo sapiens
  misc_RNA (1)...(19): siRNA sense strand
gcagagacccucggagacu

SEQ ID NO: 593783 - RNA, 19 nt, Homo sapiens
  misc_RNA (1)...(19): siRNA sense strand
ugauccgggugcacaguaa

SEQ ID NO: 593784 - RNA, 19 nt, Homo sapiens
  misc_RNA (1)...(19): siRNA sense strand
ugacgcagcaacugaugaa

SEQ ID NO: 593785 - RNA, 19 nt, Homo sapiens
  misc_RNA (1)...(19): siRNA sense strand
gaagaccuggagacagaug

SEQ ID NO: 593786 - RNA, 19 nt, Homo sapiens
  misc_RNA (1)...(19): siRNA sense strand
cagccaagccgagugagaa

SEQ ID NO: 593787 - RNA, 19 nt, Homo sapiens
  misc_RNA (1)...(19): siRNA sense strand
cagauacccucggcugaag

SEQ ID NO: 593788 - RNA, 19 nt, Homo sapiens
  misc_RNA (1)...(19): siRNA sense strand
ggcagcuucuccacaagga

SEQ ID NO: 593789 - RNA, 19 nt, Homo sapiens
  misc_RNA (1)...(19): siRNA sense strand
cagaaacccaaccucaaug

SEQ ID NO: 593790 - RNA, 19 nt, Homo sapiens
  misc_RNA (1)...(19): siRNA sense strand
cuaccauguuucugccaaa

SEQ ID NO: 593791 - RNA, 19 nt, Homo sapiens
  misc_RNA (1)...(19): siRNA sense strand
gcucagccgccucaaacug

SEQ ID NO: 593792 - RNA, 19 nt, Homo sapiens
  misc_RNA (1)...(19): siRNA sense strand
ugacgacggcaacuucuuc

SEQ ID NO: 593793 - RNA, 19 nt, Homo sapiens
  misc_RNA (1)...(19): siRNA sense strand
cucgugagcuaaagaaugg

SEQ ID NO: 593794 - RNA, 19 nt, Homo sapiens
  misc_RNA (1)...(19): siRNA sense strand
gcaggacccauccgacucu

SEQ ID NO: 593795 - RNA, 19 nt, Homo sapiens
  misc_RNA (1)...(19): siRNA sense strand
ggcaacggcacccagcaaa

SEQ ID NO: 593796 - RNA, 19 nt, Homo sapiens
  misc_RNA (1)...(19): siRNA sense strand
agcaagauccucauuguag

SEQ ID NO: 593797 - RNA, 19 nt, Homo sapiens
  misc_RNA (1)...(19): siRNA sense strand
ggacaccaugcagaucauu

SEQ ID NO: 593798 - RNA, 19 nt, Homo sapiens
  misc_RNA (1)...(19): siRNA sense strand
caggacaccaugcagauca

SEQ ID NO: 593799 - RNA, 19 nt, Homo sapiens
  misc_RNA (1)...(19): siRNA sense strand
uggcacagcggauguuugu

SEQ ID NO: 593800 - RNA, 19 nt, Homo sapiens
  misc_RNA (1)...(19): siRNA sense strand
gcaaaccuucuaccaagac

SEQ ID NO: 593801 - RNA, 19 nt, Homo sapiens
  misc_RNA (1)...(19): siRNA sense strand
aaccugaagcugcgcuaua

SEQ ID NO: 593802 - RNA, 19 nt, Homo sapiens
  misc_RNA (1)...(19): siRNA sense strand
ggaaacagaaacccaaccu

SEQ ID NO: 593803 - RNA, 19 nt, Homo sapiens
  misc_RNA (1)...(19): siRNA sense strand
ggacaagagcaagcgaagu

SEQ ID NO: 593804 - RNA, 19 nt, Homo sapiens
  misc_RNA (1)...(19): siRNA sense strand
caccagagcccacauugcu

SEQ ID NO: 593805 - RNA, 19 nt, Homo sapiens
  misc_RNA (1)...(19): siRNA sense strand
ccaugacgacggcaacuuc

SEQ ID NO: 593806 - RNA, 19 nt, Homo sapiens
  misc_RNA (1)...(19): siRNA sense strand
ggaguggggcuguggauga

SEQ ID NO: 593807 - RNA, 19 nt, Homo sapiens
  misc_RNA (1)...(19): siRNA sense strand
ugcggcagcuucuccacaa

SEQ ID NO: 593808 - RNA, 19 nt, Homo sapiens
  misc_RNA (1)...(19): siRNA sense strand
gauccgggugcacaguaaa

SEQ ID NO: 593809 - RNA, 19 nt, Homo sapiens
  misc_RNA (1)...(19): siRNA sense strand
cagaagaaggcuggaaaca

SEQ ID NO: 593810 - RNA, 19 nt, Homo sapiens
  misc_RNA (1)...(19): siRNA sense strand
caguggugcuggccuugga

SEQ ID NO: 593811 - RNA, 19 nt, Homo sapiens
  misc_RNA (1)...(19): siRNA sense strand
ccagcagcguggucaagca

SEQ ID NO: 593812 - RNA, 19 nt, Homo sapiens
  misc_RNA (1)...(19): siRNA sense strand
gaaggccucccuggaagag

SEQ ID NO: 593813 - RNA, 19 nt, Homo sapiens
  misc_RNA (1)...(19): siRNA sense strand
ucaaugccauccgcucucu

SEQ ID NO: 593814 - RNA, 19 nt, Homo sapiens
  misc_RNA (1)...(19): siRNA sense strand
gugagggcuucaaugucaa

SEQ ID NO: 593815 - RNA, 19 nt, Homo sapiens
  misc_RNA (1)...(19): siRNA sense strand
gaagaaggcuggaaacaga

SEQ ID NO: 593816 - RNA, 19 nt, Homo sapiens
  misc_RNA (1)...(19): siRNA sense strand
ccacagggcugaucuauga

SEQ ID NO: 593817 - RNA, 19 nt, Homo sapiens
  misc_RNA (1)...(19): siRNA sense strand
ggugagggcuucaauguca

SEQ ID NO: 593818 - RNA, 19 nt, Homo sapiens
  misc_RNA (1)...(19): siRNA sense strand
gcaagauccucauuguaga

SEQ ID NO: 593819 - RNA, 19 nt, Homo sapiens
  misc_RNA (1)...(19): siRNA sense strand
ucacugaccucgccuucaa

SEQ ID NO: 593820 - RNA, 19 nt, Homo sapiens
  misc_RNA (1)...(19): siRNA sense strand
gcuauaagcccaagaaguc

SEQ ID NO: 593821 - RNA, 19 nt, Homo sapiens
  misc_RNA (1)...(19): siRNA sense strand
cugaagaccuggagacaga

SEQ ID NO: 593822 - RNA, 19 nt, Homo sapiens
  misc_RNA (1)...(19): siRNA sense strand
gaagcuagcggaggugauu

SEQ ID NO: 593823 - RNA, 19 nt, Homo sapiens
  misc_RNA (1)...(19): siRNA sense strand
ggaggaagaaccuaugaau

SEQ ID NO: 593824 - RNA, 19 nt, Homo sapiens
  misc_RNA (1)...(19): siRNA sense strand
ccagcaagauccucauugu

SEQ ID NO: 593825 - RNA, 19 nt, Homo sapiens
  misc_RNA (1)...(19): siRNA sense strand
uagcggaggugauucugaa

SEQ ID NO: 593826 - RNA, 19 nt, Homo sapiens
  misc_RNA (1)...(19): siRNA sense strand
cugaguaccuggcugcuuu

SEQ ID NO: 593827 - RNA, 19 nt, Homo sapiens
  misc_RNA (1)...(19): siRNA sense strand
ccuggugucugcuggauuu

SEQ ID NO: 593828 - RNA, 19 nt, Homo sapiens
  misc_RNA (1)...(19): siRNA sense strand
ggaagaaccuaugaaucuc

SEQ ID NO: 593829 - RNA, 19 nt, Homo sapiens
  misc_RNA (1)...(19): siRNA sense strand
gacaagagcaagcgaagug

SEQ ID NO: 593830 - RNA, 19 nt, Homo sapiens
  misc_RNA (1)...(19): siRNA sense strand
gcagauacccucggcugaa

SEQ ID NO: 593831 - RNA, 19 nt, Homo sapiens
  misc_RNA (1)...(19): siRNA sense strand
uggcugcucuucuggguaa

SEQ ID NO: 593832 - RNA, 19 nt, Homo sapiens
  misc_RNA (1)...(19): siRNA sense strand
gagcaaggccagcaagauc

SEQ ID NO: 593833 - RNA, 19 nt, Homo sapiens
  misc_RNA (1)...(19): siRNA sense strand
ccacuuugcccaguccuua

SEQ ID NO: 593834 - RNA, 19 nt, Homo sapiens
  misc_RNA (1)...(19): siRNA sense strand
gggcuucaaugucaaugug

SEQ ID NO: 593835 - RNA, 19 nt, Homo sapiens
  misc_RNA (1)...(19): siRNA sense strand
gcagcguggucaagcagaa

SEQ ID NO: 593836 - RNA, 19 nt, Homo sapiens
  misc_RNA (1)...(19): siRNA sense strand
agaauccacugcuccgaaa

SEQ ID NO: 593837 - RNA, 19 nt, Homo sapiens
  misc_RNA (1)...(19): siRNA sense strand
gcacccagcaaaccuucua

SEQ ID NO: 593838 - RNA, 19 nt, Homo sapiens
  misc_RNA (1)...(19): siRNA sense strand
ccauguuucugccaaaugu

SEQ ID NO: 593839 - RNA, 19 nt, Homo sapiens
  misc_RNA (1)...(19): siRNA sense strand
gcccuugcccuuccacuuu

SEQ ID NO: 593840 - RNA, 19 nt, Homo sapiens
  misc_RNA (1)...(19): siRNA sense strand
ccaugcagaucauucaaca

SEQ ID NO: 593841 - RNA, 19 nt, Homo sapiens
  misc_RNA (1)...(19): siRNA sense strand
gcaccaccaccucuuccua

SEQ ID NO: 593842 - RNA, 19 nt, Homo sapiens
  misc_RNA (1)...(19): siRNA sense strand
cagcaagauccucauugua

SEQ ID NO: 593843 - RNA, 19 nt, Homo sapiens
  misc_RNA (1)...(19): siRNA sense strand
cuggguggcuaccauguuu

SEQ ID NO: 593844 - RNA, 19 nt, Homo sapiens
  misc_RNA (1)...(19): siRNA sense strand
gaacaguccaucccaacag

SEQ ID NO: 593845 - RNA, 19 nt, Homo sapiens
  misc_RNA (1)...(19): siRNA sense strand
gaggaagaaccuaugaauc

SEQ ID NO: 593846 - RNA, 19 nt, Homo sapiens
  misc_RNA (1)...(19): siRNA sense strand
gaggaggaagaaccuauga

SEQ ID NO: 593847 - RNA, 19 nt, Homo sapiens
  misc_RNA (1)...(19): siRNA sense strand
gccaugggcuucugcuucu

SEQ ID NO: 593848 - RNA, 19 nt, Homo sapiens
  misc_RNA (1)...(19): siRNA sense strand
ugaccucgccuucaaagug

SEQ ID NO: 593849 - RNA, 19 nt, Homo sapiens
  misc_RNA (1)...(19): siRNA sense strand
aagaaccuaugaaucucua

SEQ ID NO: 593850 - RNA, 19 nt, Homo sapiens
  misc_RNA (1)...(19): siRNA sense strand
cauccuggcugaagauagg

SEQ ID NO: 593851 - RNA, 19 nt, Homo sapiens
  misc_RNA (1)...(19): siRNA sense strand
gaagaaccuaugaaucucu

SEQ ID NO: 593852 - RNA, 19 nt, Homo sapiens
  misc_RNA (1)...(19): siRNA sense strand
ggaaggccucccuggaaga

SEQ ID NO: 593853 - RNA, 19 nt, Homo sapiens
  misc_RNA (1)...(19): siRNA sense strand
aggaagaaccuaugaaucu

SEQ ID NO: 593854 - RNA, 19 nt, Homo sapiens
  misc_RNA (1)...(19): siRNA sense strand
acacugacaccaucuggaa

SEQ ID NO: 593855 - RNA, 19 nt, Homo sapiens
  misc_RNA (1)...(19): siRNA sense strand
ccagcaaaccuucuaccaa

SEQ ID NO: 593856 - RNA, 19 nt, Homo sapiens
  misc_RNA (1)...(19): siRNA sense strand
ggaggaggaagaaccuaug

SEQ ID NO: 593857 - RNA, 19 nt, Homo sapiens
  misc_RNA (1)...(19): siRNA sense strand
gccaggggcugacaaagaa

SEQ ID NO: 593858 - RNA, 19 nt, Homo sapiens
  misc_RNA (1)...(19): siRNA sense strand
acagaaacccaaccucaau

SEQ ID NO: 593859 - RNA, 19 nt, Homo sapiens
  misc_RNA (1)...(19): siRNA sense strand
gcggugagggcuucaaugu

SEQ ID NO: 593860 - RNA, 19 nt, Homo sapiens
  misc_RNA (1)...(19): siRNA sense strand
ucucugagcccaaccugaa

SEQ ID NO: 593861 - RNA, 19 nt, Homo sapiens
  misc_RNA (1)...(19): siRNA sense strand
acacgccgaugcccgaguu

SEQ ID NO: 593862 - RNA, 19 nt, Homo sapiens
  misc_RNA (1)...(19): siRNA sense strand
gaagaaguggaggcaguga

SEQ ID NO: 593863 - RNA, 19 nt, Homo sapiens
  misc_RNA (1)...(19): siRNA sense strand
accugaagcugcgcuauaa

SEQ ID NO: 593864 - RNA, 19 nt, Homo sapiens
  misc_RNA (1)...(19): siRNA sense strand
ggucagccaagccgaguga

SEQ ID NO: 593865 - RNA, 19 nt, Homo sapiens
  misc_RNA (1)...(19): siRNA sense strand
ggugucugcuggauuugau

SEQ ID NO: 593866 - RNA, 19 nt, Homo sapiens
  misc_RNA (1)...(19): siRNA sense strand
ccagugugcucuacaucuc

SEQ ID NO: 593867 - RNA, 19 nt, Homo sapiens
  misc_RNA (1)...(19): siRNA sense strand
ugcagucgguccacucuga

SEQ ID NO: 593868 - RNA, 19 nt, Homo sapiens
  misc_RNA (1)...(19): siRNA sense strand
gcagagacccucggagacu

SEQ ID NO: 593869 - RNA, 19 nt, Homo sapiens
  misc_RNA (1)...(19): siRNA sense strand
ugauccgggugcacaguaa

SEQ ID NO: 593870 - RNA, 19 nt, Homo sapiens
  misc_RNA (1)...(19): siRNA sense strand
ugacgcagcaacugaugaa

SEQ ID NO: 593871 - RNA, 19 nt, Homo sapiens
  misc_RNA (1)...(19): siRNA sense strand
gaagaccuggagacagaug

SEQ ID NO: 593872 - RNA, 19 nt, Homo sapiens
  misc_RNA (1)...(19): siRNA sense strand
cagccaagccgagugagaa

SEQ ID NO: 593873 - RNA, 19 nt, Homo sapiens
  misc_RNA (1)...(19): siRNA sense strand
cagauacccucggcugaag

SEQ ID NO: 593874 - RNA, 19 nt, Homo sapiens
  misc_RNA (1)...(19): siRNA sense strand
ggcagcuucuccacaagga

SEQ ID NO: 593875 - RNA, 19 nt, Homo sapiens
  misc_RNA (1)...(19): siRNA sense strand
cagaaacccaaccucaaug

SEQ ID NO: 593876 - RNA, 19 nt, Homo sapiens
  misc_RNA (1)...(19): siRNA sense strand
cuaccauguuucugccaaa

SEQ ID NO: 593877 - RNA, 19 nt, Homo sapiens
  misc_RNA (1)...(19): siRNA sense strand
gcucagccgccucaaacug

SEQ ID NO: 593878 - RNA, 19 nt, Homo sapiens
  misc_RNA (1)...(19): siRNA sense strand
ugacgacggcaacuucuuc

SEQ ID NO: 593879 - RNA, 19 nt, Homo sapiens
  misc_RNA (1)...(19): siRNA sense strand
cucgugagcuaaagaaugg

SEQ ID NO: 593880 - RNA, 19 nt, Homo sapiens
  misc_RNA (1)...(19): siRNA sense strand
gcaggacccauccgacucu

SEQ ID NO: 593881 - RNA, 19 nt, Homo sapiens
  misc_RNA (1)...(19): siRNA sense strand
ggcaacggcacccagcaaa

SEQ ID NO: 593882 - RNA, 19 nt, Homo sapiens
  misc_RNA (1)...(19): siRNA sense strand
agcaagauccucauuguag

SEQ ID NO: 593883 - RNA, 19 nt, Homo sapiens
  misc_RNA (1)...(19): siRNA sense strand
ggacaccaugcagaucauu

SEQ ID NO: 593884 - RNA, 19 nt, Homo sapiens
  misc_RNA (1)...(19): siRNA sense strand
caggacaccaugcagauca

SEQ ID NO: 593885 - RNA, 19 nt, Homo sapiens
  misc_RNA (1)...(19): siRNA sense strand
uggcacagcggauguuugu

SEQ ID NO: 593886 - RNA, 19 nt, Homo sapiens
  misc_RNA (1)...(19): siRNA sense strand
gcaaaccuucuaccaagac

SEQ ID NO: 593887 - RNA, 19 nt, Homo sapiens
  misc_RNA (1)...(19): siRNA sense strand
aaccugaagcugcgcuaua

SEQ ID NO: 593888 - RNA, 19 nt, Homo sapiens
  misc_RNA (1)...(19): siRNA sense strand
ggaaacagaaacccaaccu

SEQ ID NO: 593889 - RNA, 19 nt, Homo sapiens
  misc_RNA (1)...(19): siRNA sense strand
ggacaagagcaagcgaagu

SEQ ID NO: 593890 - RNA, 19 nt, Homo sapiens
  misc_RNA (1)...(19): siRNA sense strand
caccagagcccacauugcu

SEQ ID NO: 593891 - RNA, 19 nt, Homo sapiens
  misc_RNA (1)...(19): siRNA sense strand
ccaugacgacggcaacuuc

SEQ ID NO: 593892 - RNA, 19 nt, Homo sapiens
  misc_RNA (1)...(19): siRNA sense strand
ggaguggggcuguggauga

SEQ ID NO: 593893 - RNA, 19 nt, Homo sapiens
  misc_RNA (1)...(19): siRNA sense strand
ugcggcagcuucuccacaa

SEQ ID NO: 593894 - RNA, 19 nt, Homo sapiens
  misc_RNA (1)...(19): siRNA sense strand
gauccgggugcacaguaaa

SEQ ID NO: 593895 - RNA, 19 nt, Homo sapiens
  misc_RNA (1)...(19): siRNA sense strand
cagaagaaggcuggaaaca

SEQ ID NO: 593896 - RNA, 19 nt, Homo sapiens
  misc_RNA (1)...(19): siRNA sense strand
caguggugcuggccuugga

SEQ ID NO: 593897 - RNA, 19 nt, Homo sapiens
  misc_RNA (1)...(19): siRNA sense strand
ccagcagcguggucaagca

SEQ ID NO: 593898 - RNA, 19 nt, Homo sapiens
  misc_RNA (1)...(19): siRNA sense strand
gaaggccucccuggaagag

SEQ ID NO: 593899 - RNA, 19 nt, Homo sapiens
  misc_RNA (1)...(19): siRNA sense strand
ucaaugccauccgcucucu

SEQ ID NO: 593900 - RNA, 19 nt, Homo sapiens
  misc_RNA (1)...(19): siRNA sense strand
gugagggcuucaaugucaa

SEQ ID NO: 593901 - RNA, 19 nt, Homo sapiens
  misc_RNA (1)...(19): siRNA sense strand
ggacugagauugcuuacaa

SEQ ID NO: 593902 - RNA, 19 nt, Homo sapiens
  misc_RNA (1)...(19): siRNA sense strand
ucacugggcucccucuuua

SEQ ID NO: 593903 - RNA, 19 nt, Homo sapiens
  misc_RNA (1)...(19): siRNA sense strand
gcaagaguauaguauggua

SEQ ID NO: 593904 - RNA, 19 nt, Homo sapiens
  misc_RNA (1)...(19): siRNA sense strand
ggucauauuugagaacaua

SEQ ID NO: 593905 - RNA, 19 nt, Homo sapiens
  misc_RNA (1)...(19): siRNA sense strand
cugaauaacuugaguguga

SEQ ID NO: 593906 - RNA, 19 nt, Homo sapiens
  misc_RNA (1)...(19): siRNA sense strand
gcaaugagagcaagaguau

SEQ ID NO: 593907 - RNA, 19 nt, Homo sapiens
  misc_RNA (1)...(19): siRNA sense strand
gaacucaucugugcagcuu

SEQ ID NO: 593908 - RNA, 19 nt, Homo sapiens
  misc_RNA (1)...(19): siRNA sense strand
caaacuugcugaacauaug

SEQ ID NO: 593909 - RNA, 19 nt, Homo sapiens
  misc_RNA (1)...(19): siRNA sense strand
gaauagaaagucaccauga

SEQ ID NO: 593910 - RNA, 19 nt, Homo sapiens
  misc_RNA (1)...(19): siRNA sense strand
uauaaugacuggucugaug

SEQ ID NO: 593911 - RNA, 19 nt, Homo sapiens
  misc_RNA (1)...(19): siRNA sense strand
uaacaaugcugcuuaugca

SEQ ID NO: 593912 - RNA, 19 nt, Homo sapiens
  misc_RNA (1)...(19): siRNA sense strand
ucgcaaagauucucaauac

SEQ ID NO: 593913 - RNA, 19 nt, Homo sapiens
  misc_RNA (1)...(19): siRNA sense strand
gagcaagaguauaguaugg

SEQ ID NO: 593914 - RNA, 19 nt, Homo sapiens
  misc_RNA (1)...(19): siRNA sense strand
gaaaaucagcgcaggcuua

SEQ ID NO: 593915 - RNA, 19 nt, Homo sapiens
  misc_RNA (1)...(19): siRNA sense strand
gaaaacagaacaaggaaaa

SEQ ID NO: 593916 - RNA, 19 nt, Homo sapiens
  misc_RNA (1)...(19): siRNA sense strand
gaaaagccuuauauucuug

SEQ ID NO: 593917 - RNA, 19 nt, Homo sapiens
  misc_RNA (1)...(19): siRNA sense strand
gcaaagauucucaauacuc

SEQ ID NO: 593918 - RNA, 19 nt, Homo sapiens
  misc_RNA (1)...(19): siRNA sense strand
ugacuggucugaugaugau

SEQ ID NO: 593919 - RNA, 19 nt, Homo sapiens
  misc_RNA (1)...(19): siRNA sense strand
uagaaagucaccaugauuu

SEQ ID NO: 593920 - RNA, 19 nt, Homo sapiens
  misc_RNA (1)...(19): siRNA sense strand
gagauugcuuacaaauaug

SEQ ID NO: 593921 - RNA, 19 nt, Homo sapiens
  misc_RNA (1)...(19): siRNA sense strand
gaagaaaacagaacaagga

SEQ ID NO: 593922 - RNA, 19 nt, Homo sapiens
  misc_RNA (1)...(19): siRNA sense strand
aaaugaaccuacucagaau

SEQ ID NO: 593923 - RNA, 19 nt, Homo sapiens
  misc_RNA (1)...(19): siRNA sense strand
gaugaugacagcaaugaga

SEQ ID NO: 593924 - RNA, 19 nt, Homo sapiens
  misc_RNA (1)...(19): siRNA sense strand
ugauaagguucugggaaua

SEQ ID NO: 593925 - RNA, 19 nt, Homo sapiens
  misc_RNA (1)...(19): siRNA sense strand
cuaauuccauuucugacuu

SEQ ID NO: 593926 - RNA, 19 nt, Homo sapiens
  misc_RNA (1)...(19): siRNA sense strand
ugggcucccucuuuaauaa

SEQ ID NO: 593927 - RNA, 19 nt, Homo sapiens
  misc_RNA (1)...(19): siRNA sense strand
gaaaugaagaaaccaaacu

SEQ ID NO: 593928 - RNA, 19 nt, Homo sapiens
  misc_RNA (1)...(19): siRNA sense strand
ggucugaugaugaugauga

SEQ ID NO: 593929 - RNA, 19 nt, Homo sapiens
  misc_RNA (1)...(19): siRNA sense strand
auacaugaaucaagugugu

SEQ ID NO: 593930 - RNA, 19 nt, Homo sapiens
  misc_RNA (1)...(19): siRNA sense strand
gaaaaugaaccuacucaga

SEQ ID NO: 593931 - RNA, 19 nt, Homo sapiens
  misc_RNA (1)...(19): siRNA sense strand
gcacaugcuugcuaauucc

SEQ ID NO: 593932 - RNA, 19 nt, Homo sapiens
  misc_RNA (1)...(19): siRNA sense strand
ccaauugucgcaaagauuc

SEQ ID NO: 593933 - RNA, 19 nt, Homo sapiens
  misc_RNA (1)...(19): siRNA sense strand
gaaccuacucagaaucaau

SEQ ID NO: 593934 - RNA, 19 nt, Homo sapiens
  misc_RNA (1)...(19): siRNA sense strand
gagagcaagaguauaguau

SEQ ID NO: 593935 - RNA, 19 nt, Homo sapiens
  misc_RNA (1)...(19): siRNA sense strand
ggguaacaaugcugcuuau

SEQ ID NO: 593936 - RNA, 19 nt, Homo sapiens
  misc_RNA (1)...(19): siRNA sense strand
uaauugcucuggguaacaa

SEQ ID NO: 593937 - RNA, 19 nt, Homo sapiens
  misc_RNA (1)...(19): siRNA sense strand
gggcuacgccaggaaagua

SEQ ID NO: 593938 - RNA, 19 nt, Homo sapiens
  misc_RNA (1)...(19): siRNA sense strand
ggccaaacuugcugaacau

SEQ ID NO: 593939 - RNA, 19 nt, Homo sapiens
  misc_RNA (1)...(19): siRNA sense strand
aauagaaagucaccaugau

SEQ ID NO: 593940 - RNA, 19 nt, Homo sapiens
  misc_RNA (1)...(19): siRNA sense strand
ucaagugugugcugauaag

SEQ ID NO: 593941 - RNA, 19 nt, Homo sapiens
  misc_RNA (1)...(19): siRNA sense strand
guucuuugcuugguugaga

SEQ ID NO: 593942 - RNA, 19 nt, Homo sapiens
  misc_RNA (1)...(19): siRNA sense strand
ugaauaacuugagugugaa

SEQ ID NO: 593943 - RNA, 19 nt, Homo sapiens
  misc_RNA (1)...(19): siRNA sense strand
cugauaagguucugggaau

SEQ ID NO: 593944 - RNA, 19 nt, Homo sapiens
  misc_RNA (1)...(19): siRNA sense strand
aaacuucuggucauauuug

SEQ ID NO: 593945 - RNA, 19 nt, Homo sapiens
  misc_RNA (1)...(19): siRNA sense strand
cagcgcaggcuuaaaguau

SEQ ID NO: 593946 - RNA, 19 nt, Homo sapiens
  misc_RNA (1)...(19): siRNA sense strand
gcgcaggcuuaaaguauac

SEQ ID NO: 593947 - RNA, 19 nt, Homo sapiens
  misc_RNA (1)...(19): siRNA sense strand
ucccaaagagccaggaaua

SEQ ID NO: 593948 - RNA, 19 nt, Homo sapiens
  misc_RNA (1)...(19): siRNA sense strand
gaaaauucauggccaaacu

SEQ ID NO: 593949 - RNA, 19 nt, Homo sapiens
  misc_RNA (1)...(19): siRNA sense strand
gcucagggcccaaguacca

SEQ ID NO: 593950 - RNA, 19 nt, Homo sapiens
  misc_RNA (1)...(19): siRNA sense strand
acaaucacuucucgcuuga

SEQ ID NO: 593951 - RNA, 19 nt, Homo sapiens
  misc_RNA (1)...(19): siRNA sense strand
gggcucggauugggacuga

SEQ ID NO: 593952 - RNA, 19 nt, Homo sapiens
  misc_RNA (1)...(19): siRNA sense strand
uuucaagugugugcugaua

SEQ ID NO: 593953 - RNA, 19 nt, Homo sapiens
  misc_RNA (1)...(19): siRNA sense strand
gaaaauccagccaugacua

SEQ ID NO: 593954 - RNA, 19 nt, Homo sapiens
  misc_RNA (1)...(19): siRNA sense strand
gggaaaugaagaaaccaaa

SEQ ID NO: 593955 - RNA, 19 nt, Homo sapiens
  misc_RNA (1)...(19): siRNA sense strand
gacugagauugcuuacaaa

SEQ ID NO: 593956 - RNA, 19 nt, Homo sapiens
  misc_RNA (1)...(19): siRNA sense strand
ugagagcaagaguauagua

SEQ ID NO: 593957 - RNA, 19 nt, Homo sapiens
  misc_RNA (1)...(19): siRNA sense strand
gcuggacugagauugcuua

SEQ ID NO: 593958 - RNA, 19 nt, Homo sapiens
  misc_RNA (1)...(19): siRNA sense strand
gcuuuaauuguccugaaua

SEQ ID NO: 593959 - RNA, 19 nt, Homo sapiens
  misc_RNA (1)...(19): siRNA sense strand
aaugagagcaagaguauag

SEQ ID NO: 593960 - RNA, 19 nt, Homo sapiens
  misc_RNA (1)...(19): siRNA sense strand
uggccaaacuugcugaaca

SEQ ID NO: 593961 - RNA, 19 nt, Homo sapiens
  misc_RNA (1)...(19): siRNA sense strand
ucuuaaacuucuggucaua

SEQ ID NO: 593962 - RNA, 19 nt, Homo sapiens
  misc_RNA (1)...(19): siRNA sense strand
ggcuuaaaguauacaugaa

SEQ ID NO: 593963 - RNA, 19 nt, Homo sapiens
  misc_RNA (1)...(19): siRNA sense strand
gggaucccauaguuaagga

SEQ ID NO: 593964 - RNA, 19 nt, Homo sapiens
  misc_RNA (1)...(19): siRNA sense strand
guaacaaugcugcuuaugc

SEQ ID NO: 593965 - RNA, 19 nt, Homo sapiens
  misc_RNA (1)...(19): siRNA sense strand
cgccugcuauugcauuuau

SEQ ID NO: 593966 - RNA, 19 nt, Homo sapiens
  misc_RNA (1)...(19): siRNA sense strand
gauaagguucugggaauag

SEQ ID NO: 593967 - RNA, 19 nt, Homo sapiens
  misc_RNA (1)...(19): siRNA sense strand
aaaaugaaccuacucagaa

SEQ ID NO: 593968 - RNA, 19 nt, Homo sapiens
  misc_RNA (1)...(19): siRNA sense strand
gagaacaaagaaguuauuc

SEQ ID NO: 593969 - RNA, 19 nt, Homo sapiens
  misc_RNA (1)...(19): siRNA sense strand
gguauaaugacuggucuga

SEQ ID NO: 593970 - RNA, 19 nt, Homo sapiens
  misc_RNA (1)...(19): siRNA sense strand
ccaaacuugcugaacauau

SEQ ID NO: 593971 - RNA, 19 nt, Homo sapiens
  misc_RNA (1)...(19): siRNA sense strand
caugcuugcuaauuccauu

SEQ ID NO: 593972 - RNA, 19 nt, Homo sapiens
  misc_RNA (1)...(19): siRNA sense strand
gaucccauaguuaaggaaa

SEQ ID NO: 593973 - RNA, 19 nt, Homo sapiens
  misc_RNA (1)...(19): siRNA sense strand
ggaagaaaaugaaccuacu

SEQ ID NO: 593974 - RNA, 19 nt, Homo sapiens
  misc_RNA (1)...(19): siRNA sense strand
gaaacuccuuuugaauuug

SEQ ID NO: 593975 - RNA, 19 nt, Homo sapiens
  misc_RNA (1)...(19): siRNA sense strand
ggaaaugaagaaaccaaac

SEQ ID NO: 593976 - RNA, 19 nt, Homo sapiens
  misc_RNA (1)...(19): siRNA sense strand
uaaugaguaucagcacaug

SEQ ID NO: 593977 - RNA, 19 nt, Homo sapiens
  misc_RNA (1)...(19): siRNA sense strand
agcgcaggcuuaaaguaua

SEQ ID NO: 593978 - RNA, 19 nt, Homo sapiens
  misc_RNA (1)...(19): siRNA sense strand
gcauuuauagacugacuag

SEQ ID NO: 593979 - RNA, 19 nt, Homo sapiens
  misc_RNA (1)...(19): siRNA sense strand
aaucagcgcaggcuuaaag

SEQ ID NO: 593980 - RNA, 19 nt, Homo sapiens
  misc_RNA (1)...(19): siRNA sense strand
cuuaugcauuuaacagaga

SEQ ID NO: 593981 - RNA, 19 nt, Homo sapiens
  misc_RNA (1)...(19): siRNA sense strand
auagaaagucaccaugauu

SEQ ID NO: 593982 - RNA, 19 nt, Homo sapiens
  misc_RNA (1)...(19): siRNA sense strand
gggaauagaaagucaccau

SEQ ID NO: 593983 - RNA, 19 nt, Homo sapiens
  misc_RNA (1)...(19): siRNA sense strand
agugugugcugauaagguu

SEQ ID NO: 593984 - RNA, 19 nt, Homo sapiens
  misc_RNA (1)...(19): siRNA sense strand
cugagauugcuuacaaaua

SEQ ID NO: 593985 - RNA, 19 nt, Homo sapiens
  misc_RNA (1)...(19): siRNA sense strand
gaauaacuugagugugaau

SEQ ID NO: 593986 - RNA, 19 nt, Homo sapiens
  misc_RNA (1)...(19): siRNA sense strand
ggcuuuaauuguccugaau

SEQ ID NO: 593987 - RNA, 19 nt, Homo sapiens
  misc_RNA (1)...(19): siRNA sense strand
gggcccaaguaccaucuuc

SEQ ID NO: 593988 - RNA, 19 nt, Homo sapiens
  misc_RNA (1)...(19): siRNA sense strand
uggguaacaaugcugcuua

SEQ ID NO: 593989 - RNA, 19 nt, Homo sapiens
  misc_RNA (1)...(19): siRNA sense strand
aggcuuaaaguauacauga

SEQ ID NO: 593990 - RNA, 19 nt, Homo sapiens
  misc_RNA (1)...(19): siRNA sense strand
gaccgcaggccuggugauu

SEQ ID NO: 593991 - RNA, 19 nt, Homo sapiens
  misc_RNA (1)...(19): siRNA sense strand
ugaugaugaugacagcaau

SEQ ID NO: 593992 - RNA, 19 nt, Homo sapiens
  misc_RNA (1)...(19): siRNA sense strand
caaaugggaagaaaaugaa

SEQ ID NO: 593993 - RNA, 19 nt, Homo sapiens
  misc_RNA (1)...(19): siRNA sense strand
uaacuugagugugaaugcu

SEQ ID NO: 593994 - RNA, 19 nt, Homo sapiens
  misc_RNA (1)...(19): siRNA sense strand
cccaaagagccaggaauaa

SEQ ID NO: 593995 - RNA, 19 nt, Homo sapiens
  misc_RNA (1)...(19): siRNA sense strand
ggcgccugcuauugcauuu

SEQ ID NO: 593996 - RNA, 19 nt, Homo sapiens
  misc_RNA (1)...(19): siRNA sense strand
auaagguucugggaauaga

SEQ ID NO: 593997 - RNA, 19 nt, Homo sapiens
  misc_RNA (1)...(19): siRNA sense strand
gcuggcgccugcuauugca

SEQ ID NO: 593998 - RNA, 19 nt, Homo sapiens
  misc_RNA (1)...(19): siRNA sense strand
acaugaaucaaguguguga

SEQ ID NO: 593999 - RNA, 19 nt, Homo sapiens
  misc_RNA (1)...(19): siRNA sense strand
aaccuacucagaaucaauu

SEQ ID NO: 594000 - RNA, 19 nt, Homo sapiens
  misc_RNA (1)...(19): siRNA sense strand
gccaaacuugcugaacaua

SEQ ID NO: 594001 - RNA, 19 nt, Homo sapiens
  misc_RNA (1)...(19): siRNA sense strand
ggacugagauugcuuacaa

SEQ ID NO: 594002 - RNA, 19 nt, Homo sapiens
  misc_RNA (1)...(19): siRNA sense strand
ucacugggcucccucuuua

SEQ ID NO: 594003 - RNA, 19 nt, Homo sapiens
  misc_RNA (1)...(19): siRNA sense strand
gcaagaguauaguauggua

SEQ ID NO: 594004 - RNA, 19 nt, Homo sapiens
  misc_RNA (1)...(19): siRNA sense strand
ggucauauuugagaacaua

SEQ ID NO: 594005 - RNA, 19 nt, Homo sapiens
  misc_RNA (1)...(19): siRNA sense strand
cugaauaacuugaguguga

SEQ ID NO: 594006 - RNA, 19 nt, Homo sapiens
  misc_RNA (1)...(19): siRNA sense strand
gcaaugagagcaagaguau

SEQ ID NO: 594007 - RNA, 19 nt, Homo sapiens
  misc_RNA (1)...(19): siRNA sense strand
gaacucaucugugcagcuu

SEQ ID NO: 594008 - RNA, 19 nt, Homo sapiens
  misc_RNA (1)...(19): siRNA sense strand
caaacuugcugaacauaug

SEQ ID NO: 594009 - RNA, 19 nt, Homo sapiens
  misc_RNA (1)...(19): siRNA sense strand
gaauagaaagucaccauga

SEQ ID NO: 594010 - RNA, 19 nt, Homo sapiens
  misc_RNA (1)...(19): siRNA sense strand
uauaaugacuggucugaug

SEQ ID NO: 594011 - RNA, 19 nt, Homo sapiens
  misc_RNA (1)...(19): siRNA sense strand
uaacaaugcugcuuaugca

SEQ ID NO: 594012 - RNA, 19 nt, Homo sapiens
  misc_RNA (1)...(19): siRNA sense strand
ucgcaaagauucucaauac

SEQ ID NO: 594013 - RNA, 19 nt, Homo sapiens
  misc_RNA (1)...(19): siRNA sense strand
gagcaagaguauaguaugg

SEQ ID NO: 594014 - RNA, 19 nt, Homo sapiens
  misc_RNA (1)...(19): siRNA sense strand
gaaaaucagcgcaggcuua

SEQ ID NO: 594015 - RNA, 19 nt, Homo sapiens
  misc_RNA (1)...(19): siRNA sense strand
gaaaacagaacaaggaaaa

SEQ ID NO: 594016 - RNA, 19 nt, Homo sapiens
  misc_RNA (1)...(19): siRNA sense strand
gaaaagccuuauauucuug

SEQ ID NO: 594017 - RNA, 19 nt, Homo sapiens
  misc_RNA (1)...(19): siRNA sense strand
gcaaagauucucaauacuc

SEQ ID NO: 594018 - RNA, 19 nt, Homo sapiens
  misc_RNA (1)...(19): siRNA sense strand
ugacuggucugaugaugau

SEQ ID NO: 594019 - RNA, 19 nt, Homo sapiens
  misc_RNA (1)...(19): siRNA sense strand
uagaaagucaccaugauuu

SEQ ID NO: 594020 - RNA, 19 nt, Homo sapiens
  misc_RNA (1)...(19): siRNA sense strand
gagauugcuuacaaauaug

SEQ ID NO: 594021 - RNA, 19 nt, Homo sapiens
  misc_RNA (1)...(19): siRNA sense strand
gaagaaaacagaacaagga

SEQ ID NO: 594022 - RNA, 19 nt, Homo sapiens
  misc_RNA (1)...(19): siRNA sense strand
aaaugaaccuacucagaau

SEQ ID NO: 594023 - RNA, 19 nt, Homo sapiens
  misc_RNA (1)...(19): siRNA sense strand
gaugaugacagcaaugaga

SEQ ID NO: 594024 - RNA, 19 nt, Homo sapiens
  misc_RNA (1)...(19): siRNA sense strand
ugauaagguucugggaaua

SEQ ID NO: 594025 - RNA, 19 nt, Homo sapiens
  misc_RNA (1)...(19): siRNA sense strand
cuaauuccauuucugacuu

SEQ ID NO: 594026 - RNA, 19 nt, Homo sapiens
  misc_RNA (1)...(19): siRNA sense strand
ugggcucccucuuuaauaa

SEQ ID NO: 594027 - RNA, 19 nt, Homo sapiens
  misc_RNA (1)...(19): siRNA sense strand
gaaaugaagaaaccaaacu

SEQ ID NO: 594028 - RNA, 19 nt, Homo sapiens
  misc_RNA (1)...(19): siRNA sense strand
ggucugaugaugaugauga

SEQ ID NO: 594029 - RNA, 19 nt, Homo sapiens
  misc_RNA (1)...(19): siRNA sense strand
auacaugaaucaagugugu

SEQ ID NO: 594030 - RNA, 19 nt, Homo sapiens
  misc_RNA (1)...(19): siRNA sense strand
gaaaaugaaccuacucaga

SEQ ID NO: 594031 - RNA, 19 nt, Homo sapiens
  misc_RNA (1)...(19): siRNA sense strand
gcacaugcuugcuaauucc

SEQ ID NO: 594032 - RNA, 19 nt, Homo sapiens
  misc_RNA (1)...(19): siRNA sense strand
ccaauugucgcaaagauuc

SEQ ID NO: 594033 - RNA, 19 nt, Homo sapiens
  misc_RNA (1)...(19): siRNA sense strand
gaaccuacucagaaucaau

SEQ ID NO: 594034 - RNA, 19 nt, Homo sapiens
  misc_RNA (1)...(19): siRNA sense strand
gagagcaagaguauaguau

SEQ ID NO: 594035 - RNA, 19 nt, Homo sapiens
  misc_RNA (1)...(19): siRNA sense strand
ggguaacaaugcugcuuau

SEQ ID NO: 594036 - RNA, 19 nt, Homo sapiens
  misc_RNA (1)...(19): siRNA sense strand
uaauugcucuggguaacaa

SEQ ID NO: 594037 - RNA, 19 nt, Homo sapiens
  misc_RNA (1)...(19): siRNA sense strand
gggcuacgccaggaaagua

SEQ ID NO: 594038 - RNA, 19 nt, Homo sapiens
  misc_RNA (1)...(19): siRNA sense strand
ggccaaacuugcugaacau

SEQ ID NO: 594039 - RNA, 19 nt, Homo sapiens
  misc_RNA (1)...(19): siRNA sense strand
aauagaaagucaccaugau

SEQ ID NO: 594040 - RNA, 19 nt, Homo sapiens
  misc_RNA (1)...(19): siRNA sense strand
ucaagugugugcugauaag

SEQ ID NO: 594041 - RNA, 19 nt, Homo sapiens
  misc_RNA (1)...(19): siRNA sense strand
guucuuugcuugguugaga

SEQ ID NO: 594042 - RNA, 19 nt, Homo sapiens
  misc_RNA (1)...(19): siRNA sense strand
ugaauaacuugagugugaa

SEQ ID NO: 594043 - RNA, 19 nt, Homo sapiens
  misc_RNA (1)...(19): siRNA sense strand
cugauaagguucugggaau

SEQ ID NO: 594044 - RNA, 19 nt, Homo sapiens
  misc_RNA (1)...(19): siRNA sense strand
aaacuucuggucauauuug

SEQ ID NO: 594045 - RNA, 19 nt, Homo sapiens
  misc_RNA (1)...(19): siRNA sense strand
cagcgcaggcuuaaaguau

SEQ ID NO: 594046 - RNA, 19 nt, Homo sapiens
  misc_RNA (1)...(19): siRNA sense strand
gcgcaggcuuaaaguauac

SEQ ID NO: 594047 - RNA, 19 nt, Homo sapiens
  misc_RNA (1)...(19): siRNA sense strand
ucccaaagagccaggaaua

SEQ ID NO: 594048 - RNA, 19 nt, Homo sapiens
  misc_RNA (1)...(19): siRNA sense strand
gaaaauucauggccaaacu

SEQ ID NO: 594049 - RNA, 19 nt, Homo sapiens
  misc_RNA (1)...(19): siRNA sense strand
gcucagggcccaaguacca

SEQ ID NO: 594050 - RNA, 19 nt, Homo sapiens
  misc_RNA (1)...(19): siRNA sense strand
acaaucacuucucgcuuga

SEQ ID NO: 594051 - RNA, 19 nt, Homo sapiens
  misc_RNA (1)...(19): siRNA sense strand
gggcucggauugggacuga

SEQ ID NO: 594052 - RNA, 19 nt, Homo sapiens
  misc_RNA (1)...(19): siRNA sense strand
uuucaagugugugcugaua

SEQ ID NO: 594053 - RNA, 19 nt, Homo sapiens
  misc_RNA (1)...(19): siRNA sense strand
gaaaauccagccaugacua

SEQ ID NO: 594054 - RNA, 19 nt, Homo sapiens
  misc_RNA (1)...(19): siRNA sense strand
gggaaaugaagaaaccaaa

SEQ ID NO: 594055 - RNA, 19 nt, Homo sapiens
  misc_RNA (1)...(19): siRNA sense strand
gacugagauugcuuacaaa

SEQ ID NO: 594056 - RNA, 19 nt, Homo sapiens
  misc_RNA (1)...(19): siRNA sense strand
ugagagcaagaguauagua

SEQ ID NO: 594057 - RNA, 19 nt, Homo sapiens
  misc_RNA (1)...(19): siRNA sense strand
gcuggacugagauugcuua

SEQ ID NO: 594058 - RNA, 19 nt, Homo sapiens
  misc_RNA (1)...(19): siRNA sense strand
gcuuuaauuguccugaaua

SEQ ID NO: 594059 - RNA, 19 nt, Homo sapiens
  misc_RNA (1)...(19): siRNA sense strand
aaugagagcaagaguauag

SEQ ID NO: 594060 - RNA, 19 nt, Homo sapiens
  misc_RNA (1)...(19): siRNA sense strand
uggccaaacuugcugaaca

SEQ ID NO: 594061 - RNA, 19 nt, Homo sapiens
  misc_RNA (1)...(19): siRNA sense strand
ucuuaaacuucuggucaua

SEQ ID NO: 594062 - RNA, 19 nt, Homo sapiens
  misc_RNA (1)...(19): siRNA sense strand
ggcuuaaaguauacaugaa

SEQ ID NO: 594063 - RNA, 19 nt, Homo sapiens
  misc_RNA (1)...(19): siRNA sense strand
gggaucccauaguuaagga

SEQ ID NO: 594064 - RNA, 19 nt, Homo sapiens
  misc_RNA (1)...(19): siRNA sense strand
guaacaaugcugcuuaugc

SEQ ID NO: 594065 - RNA, 19 nt, Homo sapiens
  misc_RNA (1)...(19): siRNA sense strand
cgccugcuauugcauuuau

SEQ ID NO: 594066 - RNA, 19 nt, Homo sapiens
  misc_RNA (1)...(19): siRNA sense strand
gauaagguucugggaauag

SEQ ID NO: 594067 - RNA, 19 nt, Homo sapiens
  misc_RNA (1)...(19): siRNA sense strand
aaaaugaaccuacucagaa

SEQ ID NO: 594068 - RNA, 19 nt, Homo sapiens
  misc_RNA (1)...(19): siRNA sense strand
gagaacaaagaaguuauuc

SEQ ID NO: 594069 - RNA, 19 nt, Homo sapiens
  misc_RNA (1)...(19): siRNA sense strand
gguauaaugacuggucuga

SEQ ID NO: 594070 - RNA, 19 nt, Homo sapiens
  misc_RNA (1)...(19): siRNA sense strand
ccaaacuugcugaacauau

SEQ ID NO: 594071 - RNA, 19 nt, Homo sapiens
  misc_RNA (1)...(19): siRNA sense strand
caugcuugcuaauuccauu

SEQ ID NO: 594072 - RNA, 19 nt, Homo sapiens
  misc_RNA (1)...(19): siRNA sense strand
gaucccauaguuaaggaaa

SEQ ID NO: 594073 - RNA, 19 nt, Homo sapiens
  misc_RNA (1)...(19): siRNA sense strand
ggaagaaaaugaaccuacu

SEQ ID NO: 594074 - RNA, 19 nt, Homo sapiens
  misc_RNA (1)...(19): siRNA sense strand
gaaacuccuuuugaauuug

SEQ ID NO: 594075 - RNA, 19 nt, Homo sapiens
  misc_RNA (1)...(19): siRNA sense strand
ggaaaugaagaaaccaaac

SEQ ID NO: 594076 - RNA, 19 nt, Homo sapiens
  misc_RNA (1)...(19): siRNA sense strand
uaaugaguaucagcacaug

SEQ ID NO: 594077 - RNA, 19 nt, Homo sapiens
  misc_RNA (1)...(19): siRNA sense strand
agcgcaggcuuaaaguaua

SEQ ID NO: 594078 - RNA, 19 nt, Homo sapiens
  misc_RNA (1)...(19): siRNA sense strand
gcauuuauagacugacuag

SEQ ID NO: 594079 - RNA, 19 nt, Homo sapiens
  misc_RNA (1)...(19): siRNA sense strand
aaucagcgcaggcuuaaag

SEQ ID NO: 594080 - RNA, 19 nt, Homo sapiens
  misc_RNA (1)...(19): siRNA sense strand
cuuaugcauuuaacagaga

SEQ ID NO: 594081 - RNA, 19 nt, Homo sapiens
  misc_RNA (1)...(19): siRNA sense strand
auagaaagucaccaugauu

SEQ ID NO: 594082 - RNA, 19 nt, Homo sapiens
  misc_RNA (1)...(19): siRNA sense strand
gggaauagaaagucaccau

SEQ ID NO: 594083 - RNA, 19 nt, Homo sapiens
  misc_RNA (1)...(19): siRNA sense strand
agugugugcugauaagguu

SEQ ID NO: 594084 - RNA, 19 nt, Homo sapiens
  misc_RNA (1)...(19): siRNA sense strand
cugagauugcuuacaaaua

SEQ ID NO: 594085 - RNA, 19 nt, Homo sapiens
  misc_RNA (1)...(19): siRNA sense strand
gaauaacuugagugugaau

SEQ ID NO: 594086 - RNA, 19 nt, Homo sapiens
  misc_RNA (1)...(19): siRNA sense strand
ggcuuuaauuguccugaau

SEQ ID NO: 594087 - RNA, 19 nt, Homo sapiens
  misc_RNA (1)...(19): siRNA sense strand
gggcccaaguaccaucuuc

SEQ ID NO: 594088 - RNA, 19 nt, Homo sapiens
  misc_RNA (1)...(19): siRNA sense strand
uggguaacaaugcugcuua

SEQ ID NO: 594089 - RNA, 19 nt, Homo sapiens
  misc_RNA (1)...(19): siRNA sense strand
aggcuuaaaguauacauga

SEQ ID NO: 594090 - RNA, 19 nt, Homo sapiens
  misc_RNA (1)...(19): siRNA sense strand
gaccgcaggccuggugauu

SEQ ID NO: 594091 - RNA, 19 nt, Homo sapiens
  misc_RNA (1)...(19): siRNA sense strand
ugaugaugaugacagcaau

SEQ ID NO: 594092 - RNA, 19 nt, Homo sapiens
  misc_RNA (1)...(19): siRNA sense strand
caaaugggaagaaaaugaa

SEQ ID NO: 594093 - RNA, 19 nt, Homo sapiens
  misc_RNA (1)...(19): siRNA sense strand
uaacuugagugugaaugcu

SEQ ID NO: 594094 - RNA, 19 nt, Homo sapiens
  misc_RNA (1)...(19): siRNA sense strand
cccaaagagccaggaauaa

SEQ ID NO: 594095 - RNA, 19 nt, Homo sapiens
  misc_RNA (1)...(19): siRNA sense strand
ggcgccugcuauugcauuu

SEQ ID NO: 594096 - RNA, 19 nt, Homo sapiens
  misc_RNA (1)...(19): siRNA sense strand
auaagguucugggaauaga

SEQ ID NO: 594097 - RNA, 19 nt, Homo sapiens
  misc_RNA (1)...(19): siRNA sense strand
gcuggcgccugcuauugca

SEQ ID NO: 594098 - RNA, 19 nt, Homo sapiens
  misc_RNA (1)...(19): siRNA sense strand
acaugaaucaaguguguga

SEQ ID NO: 594099 - RNA, 19 nt, Homo sapiens
  misc_RNA (1)...(19): siRNA sense strand
aaccuacucagaaucaauu

SEQ ID NO: 594100 - RNA, 19 nt, Homo sapiens
  misc_RNA (1)...(19): siRNA sense strand
gccaaacuugcugaacaua

SEQ ID NO: 594101 - RNA, 19 nt, Homo sapiens
  misc_RNA (1)...(19): siRNA sense strand
ggacugagauugcuuacaa

SEQ ID NO: 594102 - RNA, 19 nt, Homo sapiens
  misc_RNA (1)...(19): siRNA sense strand
ucacugggcucccucuuua

SEQ ID NO: 594103 - RNA, 19 nt, Homo sapiens
  misc_RNA (1)...(19): siRNA sense strand
gcaagaguauaguauggua

SEQ ID NO: 594104 - RNA, 19 nt, Homo sapiens
  misc_RNA (1)...(19): siRNA sense strand
ggucauauuugagaacaua

SEQ ID NO: 594105 - RNA, 19 nt, Homo sapiens
  misc_RNA (1)...(19): siRNA sense strand
cugaauaacuugaguguga

SEQ ID NO: 594106 - RNA, 19 nt, Homo sapiens
  misc_RNA (1)...(19): siRNA sense strand
gcaaugagagcaagaguau

SEQ ID NO: 594107 - RNA, 19 nt, Homo sapiens
  misc_RNA (1)...(19): siRNA sense strand
gaacucaucugugcagcuu

SEQ ID NO: 594108 - RNA, 19 nt, Homo sapiens
  misc_RNA (1)...(19): siRNA sense strand
caaacuugcugaacauaug

SEQ ID NO: 594109 - RNA, 19 nt, Homo sapiens
  misc_RNA (1)...(19): siRNA sense strand
gaauagaaagucaccauga

SEQ ID NO: 594110 - RNA, 19 nt, Homo sapiens
  misc_RNA (1)...(19): siRNA sense strand
uauaaugacuggucugaug

SEQ ID NO: 594111 - RNA, 19 nt, Homo sapiens
  misc_RNA (1)...(19): siRNA sense strand
uaacaaugcugcuuaugca

SEQ ID NO: 594112 - RNA, 19 nt, Homo sapiens
  misc_RNA (1)...(19): siRNA sense strand
ucgcaaagauucucaauac

SEQ ID NO: 594113 - RNA, 19 nt, Homo sapiens
  misc_RNA (1)...(19): siRNA sense strand
gagcaagaguauaguaugg

SEQ ID NO: 594114 - RNA, 19 nt, Homo sapiens
  misc_RNA (1)...(19): siRNA sense strand
gaaaaucagcgcaggcuua

SEQ ID NO: 594115 - RNA, 19 nt, Homo sapiens
  misc_RNA (1)...(19): siRNA sense strand
gaaaacagaacaaggaaaa

SEQ ID NO: 594116 - RNA, 19 nt, Homo sapiens
  misc_RNA (1)...(19): siRNA sense strand
gaaaagccuuauauucuug

SEQ ID NO: 594117 - RNA, 19 nt, Homo sapiens
  misc_RNA (1)...(19): siRNA sense strand
gcaaagauucucaauacuc

SEQ ID NO: 594118 - RNA, 19 nt, Homo sapiens
  misc_RNA (1)...(19): siRNA sense strand
ugacuggucugaugaugau

SEQ ID NO: 594119 - RNA, 19 nt, Homo sapiens
  misc_RNA (1)...(19): siRNA sense strand
uagaaagucaccaugauuu

SEQ ID NO: 594120 - RNA, 19 nt, Homo sapiens
  misc_RNA (1)...(19): siRNA sense strand
gagauugcuuacaaauaug

SEQ ID NO: 594121 - RNA, 19 nt, Homo sapiens
  misc_RNA (1)...(19): siRNA sense strand
gaagaaaacagaacaagga

SEQ ID NO: 594122 - RNA, 19 nt, Homo sapiens
  misc_RNA (1)...(19): siRNA sense strand
aaaugaaccuacucagaau

SEQ ID NO: 594123 - RNA, 19 nt, Homo sapiens
  misc_RNA (1)...(19): siRNA sense strand
gaugaugacagcaaugaga

SEQ ID NO: 594124 - RNA, 19 nt, Homo sapiens
  misc_RNA (1)...(19): siRNA sense strand
ugauaagguucugggaaua

SEQ ID NO: 594125 - RNA, 19 nt, Homo sapiens
  misc_RNA (1)...(19): siRNA sense strand
cuaauuccauuucugacuu

SEQ ID NO: 594126 - RNA, 19 nt, Homo sapiens
  misc_RNA (1)...(19): siRNA sense strand
ugggcucccucuuuaauaa

SEQ ID NO: 594127 - RNA, 19 nt, Homo sapiens
  misc_RNA (1)...(19): siRNA sense strand
gaaaugaagaaaccaaacu

SEQ ID NO: 594128 - RNA, 19 nt, Homo sapiens
  misc_RNA (1)...(19): siRNA sense strand
ggucugaugaugaugauga

SEQ ID NO: 594129 - RNA, 19 nt, Homo sapiens
  misc_RNA (1)...(19): siRNA sense strand
auacaugaaucaagugugu

SEQ ID NO: 594130 - RNA, 19 nt, Homo sapiens
  misc_RNA (1)...(19): siRNA sense strand
gaaaaugaaccuacucaga

SEQ ID NO: 594131 - RNA, 19 nt, Homo sapiens
  misc_RNA (1)...(19): siRNA sense strand
gcacaugcuugcuaauucc

SEQ ID NO: 594132 - RNA, 19 nt, Homo sapiens
  misc_RNA (1)...(19): siRNA sense strand
ccaauugucgcaaagauuc

SEQ ID NO: 594133 - RNA, 19 nt, Homo sapiens
  misc_RNA (1)...(19): siRNA sense strand
gaaccuacucagaaucaau

SEQ ID NO: 594134 - RNA, 19 nt, Homo sapiens
  misc_RNA (1)...(19): siRNA sense strand
gagagcaagaguauaguau

SEQ ID NO: 594135 - RNA, 19 nt, Homo sapiens
  misc_RNA (1)...(19): siRNA sense strand
ggguaacaaugcugcuuau

SEQ ID NO: 594136 - RNA, 19 nt, Homo sapiens
  misc_RNA (1)...(19): siRNA sense strand
uaauugcucuggguaacaa

SEQ ID NO: 594137 - RNA, 19 nt, Homo sapiens
  misc_RNA (1)...(19): siRNA sense strand
gggcuacgccaggaaagua

SEQ ID NO: 594138 - RNA, 19 nt, Homo sapiens
  misc_RNA (1)...(19): siRNA sense strand
ggccaaacuugcugaacau

SEQ ID NO: 594139 - RNA, 19 nt, Homo sapiens
  misc_RNA (1)...(19): siRNA sense strand
aauagaaagucaccaugau

SEQ ID NO: 594140 - RNA, 19 nt, Homo sapiens
  misc_RNA (1)...(19): siRNA sense strand
ucaagugugugcugauaag

SEQ ID NO: 594141 - RNA, 19 nt, Homo sapiens
  misc_RNA (1)...(19): siRNA sense strand
guucuuugcuugguugaga

SEQ ID NO: 594142 - RNA, 19 nt, Homo sapiens
  misc_RNA (1)...(19): siRNA sense strand
ugaauaacuugagugugaa

SEQ ID NO: 594143 - RNA, 19 nt, Homo sapiens
  misc_RNA (1)...(19): siRNA sense strand
cugauaagguucugggaau

SEQ ID NO: 594144 - RNA, 19 nt, Homo sapiens
  misc_RNA (1)...(19): siRNA sense strand
aaacuucuggucauauuug

SEQ ID NO: 594145 - RNA, 19 nt, Homo sapiens
  misc_RNA (1)...(19): siRNA sense strand
cagcgcaggcuuaaaguau

SEQ ID NO: 594146 - RNA, 19 nt, Homo sapiens
  misc_RNA (1)...(19): siRNA sense strand
gcgcaggcuuaaaguauac

SEQ ID NO: 594147 - RNA, 19 nt, Homo sapiens
  misc_RNA (1)...(19): siRNA sense strand
ucccaaagagccaggaaua

SEQ ID NO: 594148 - RNA, 19 nt, Homo sapiens
  misc_RNA (1)...(19): siRNA sense strand
gaaaauucauggccaaacu

SEQ ID NO: 594149 - RNA, 19 nt, Homo sapiens
  misc_RNA (1)...(19): siRNA sense strand
gcucagggcccaaguacca

SEQ ID NO: 594150 - RNA, 19 nt, Homo sapiens
  misc_RNA (1)...(19): siRNA sense strand
acaaucacuucucgcuuga

SEQ ID NO: 594151 - RNA, 19 nt, Homo sapiens
  misc_RNA (1)...(19): siRNA sense strand
gggcucggauugggacuga

SEQ ID NO: 594152 - RNA, 19 nt, Homo sapiens
  misc_RNA (1)...(19): siRNA sense strand
uuucaagugugugcugaua

SEQ ID NO: 594153 - RNA, 19 nt, Homo sapiens
  misc_RNA (1)...(19): siRNA sense strand
gaaaauccagccaugacua

SEQ ID NO: 594154 - RNA, 19 nt, Homo sapiens
  misc_RNA (1)...(19): siRNA sense strand
gggaaaugaagaaaccaaa

SEQ ID NO: 594155 - RNA, 19 nt, Homo sapiens
  misc_RNA (1)...(19): siRNA sense strand
gacugagauugcuuacaaa

SEQ ID NO: 594156 - RNA, 19 nt, Homo sapiens
  misc_RNA (1)...(19): siRNA sense strand
ugagagcaagaguauagua

SEQ ID NO: 594157 - RNA, 19 nt, Homo sapiens
  misc_RNA (1)...(19): siRNA sense strand
gcuggacugagauugcuua

SEQ ID NO: 594158 - RNA, 19 nt, Homo sapiens
  misc_RNA (1)...(19): siRNA sense strand
gcuuuaauuguccugaaua

SEQ ID NO: 594159 - RNA, 19 nt, Homo sapiens
  misc_RNA (1)...(19): siRNA sense strand
aaugagagcaagaguauag

SEQ ID NO: 594160 - RNA, 19 nt, Homo sapiens
  misc_RNA (1)...(19): siRNA sense strand
uggccaaacuugcugaaca

SEQ ID NO: 594161 - RNA, 19 nt, Homo sapiens
  misc_RNA (1)...(19): siRNA sense strand
ucuuaaacuucuggucaua

SEQ ID NO: 594162 - RNA, 19 nt, Homo sapiens
  misc_RNA (1)...(19): siRNA sense strand
ggcuuaaaguauacaugaa

SEQ ID NO: 594163 - RNA, 19 nt, Homo sapiens
  misc_RNA (1)...(19): siRNA sense strand
gggaucccauaguuaagga

SEQ ID NO: 594164 - RNA, 19 nt, Homo sapiens
  misc_RNA (1)...(19): siRNA sense strand
guaacaaugcugcuuaugc

SEQ ID NO: 594165 - RNA, 19 nt, Homo sapiens
  misc_RNA (1)...(19): siRNA sense strand
cgccugcuauugcauuuau

SEQ ID NO: 594166 - RNA, 19 nt, Homo sapiens
  misc_RNA (1)...(19): siRNA sense strand
gauaagguucugggaauag

SEQ ID NO: 594167 - RNA, 19 nt, Homo sapiens
  misc_RNA (1)...(19): siRNA sense strand
aaaaugaaccuacucagaa

SEQ ID NO: 594168 - RNA, 19 nt, Homo sapiens
  misc_RNA (1)...(19): siRNA sense strand
gagaacaaagaaguuauuc

SEQ ID NO: 594169 - RNA, 19 nt, Homo sapiens
  misc_RNA (1)...(19): siRNA sense strand
gguauaaugacuggucuga

SEQ ID NO: 594170 - RNA, 19 nt, Homo sapiens
  misc_RNA (1)...(19): siRNA sense strand
ccaaacuugcugaacauau

SEQ ID NO: 594171 - RNA, 19 nt, Homo sapiens
  misc_RNA (1)...(19): siRNA sense strand
caugcuugcuaauuccauu

SEQ ID NO: 594172 - RNA, 19 nt, Homo sapiens
  misc_RNA (1)...(19): siRNA sense strand
gaucccauaguuaaggaaa

SEQ ID NO: 594173 - RNA, 19 nt, Homo sapiens
  misc_RNA (1)...(19): siRNA sense strand
ggaagaaaaugaaccuacu

SEQ ID NO: 594174 - RNA, 19 nt, Homo sapiens
  misc_RNA (1)...(19): siRNA sense strand
gaaacuccuuuugaauuug

SEQ ID NO: 594175 - RNA, 19 nt, Homo sapiens
  misc_RNA (1)...(19): siRNA sense strand
ggaaaugaagaaaccaaac

SEQ ID NO: 594176 - RNA, 19 nt, Homo sapiens
  misc_RNA (1)...(19): siRNA sense strand
uaaugaguaucagcacaug

SEQ ID NO: 594177 - RNA, 19 nt, Homo sapiens
  misc_RNA (1)...(19): siRNA sense strand
agcgcaggcuuaaaguaua

SEQ ID NO: 594178 - RNA, 19 nt, Homo sapiens
  misc_RNA (1)...(19): siRNA sense strand
gcauuuauagacugacuag

SEQ ID NO: 594179 - RNA, 19 nt, Homo sapiens
  misc_RNA (1)...(19): siRNA sense strand
aaucagcgcaggcuuaaag

SEQ ID NO: 594180 - RNA, 19 nt, Homo sapiens
  misc_RNA (1)...(19): siRNA sense strand
cuuaugcauuuaacagaga

SEQ ID NO: 594181 - RNA, 19 nt, Homo sapiens
  misc_RNA (1)...(19): siRNA sense strand
auagaaagucaccaugauu

SEQ ID NO: 594182 - RNA, 19 nt, Homo sapiens
  misc_RNA (1)...(19): siRNA sense strand
gggaauagaaagucaccau

SEQ ID NO: 594183 - RNA, 19 nt, Homo sapiens
  misc_RNA (1)...(19): siRNA sense strand
agugugugcugauaagguu

SEQ ID NO: 594184 - RNA, 19 nt, Homo sapiens
  misc_RNA (1)...(19): siRNA sense strand
cugagauugcuuacaaaua

SEQ ID NO: 594185 - RNA, 19 nt, Homo sapiens
  misc_RNA (1)...(19): siRNA sense strand
gaauaacuugagugugaau

SEQ ID NO: 594186 - RNA, 19 nt, Homo sapiens
  misc_RNA (1)...(19): siRNA sense strand
ggcuuuaauuguccugaau

SEQ ID NO: 594187 - RNA, 19 nt, Homo sapiens
  misc_RNA (1)...(19): siRNA sense strand
gggcccaaguaccaucuuc

SEQ ID NO: 594188 - RNA, 19 nt, Homo sapiens
  misc_RNA (1)...(19): siRNA sense strand
uggguaacaaugcugcuua

SEQ ID NO: 594189 - RNA, 19 nt, Homo sapiens
  misc_RNA (1)...(19): siRNA sense strand
aggcuuaaaguauacauga

SEQ ID NO: 594190 - RNA, 19 nt, Homo sapiens
  misc_RNA (1)...(19): siRNA sense strand
gaccgcaggccuggugauu

SEQ ID NO: 594191 - RNA, 19 nt, Homo sapiens
  misc_RNA (1)...(19): siRNA sense strand
ugaugaugaugacagcaau

SEQ ID NO: 594192 - RNA, 19 nt, Homo sapiens
  misc_RNA (1)...(19): siRNA sense strand
caaaugggaagaaaaugaa

SEQ ID NO: 594193 - RNA, 19 nt, Homo sapiens
  misc_RNA (1)...(19): siRNA sense strand
uaacuugagugugaaugcu

SEQ ID NO: 594194 - RNA, 19 nt, Homo sapiens
  misc_RNA (1)...(19): siRNA sense strand
cccaaagagccaggaauaa

SEQ ID NO: 594195 - RNA, 19 nt, Homo sapiens
  misc_RNA (1)...(19): siRNA sense strand
ggcgccugcuauugcauuu

SEQ ID NO: 594196 - RNA, 19 nt, Homo sapiens
  misc_RNA (1)...(19): siRNA sense strand
auaagguucugggaauaga

SEQ ID NO: 594197 - RNA, 19 nt, Homo sapiens
  misc_RNA (1)...(19): siRNA sense strand
gcuggcgccugcuauugca

SEQ ID NO: 594198 - RNA, 19 nt, Homo sapiens
  misc_RNA (1)...(19): siRNA sense strand
acaugaaucaaguguguga

SEQ ID NO: 594199 - RNA, 19 nt, Homo sapiens
  misc_RNA (1)...(19): siRNA sense strand
aaccuacucagaaucaauu

SEQ ID NO: 594200 - RNA, 19 nt, Homo sapiens
  misc_RNA (1)...(19): siRNA sense strand
gccaaacuugcugaacaua

SEQ ID NO: 594201 - RNA, 19 nt, Homo sapiens
  misc_RNA (1)...(19): siRNA sense strand
ggaaagacauuguguuauu

SEQ ID NO: 594202 - RNA, 19 nt, Homo sapiens
  misc_RNA (1)...(19): siRNA sense strand
gaauagacccggcauguua

SEQ ID NO: 594203 - RNA, 19 nt, Homo sapiens
  misc_RNA (1)...(19): siRNA sense strand
gaagagaaauggagucaca

SEQ ID NO: 594204 - RNA, 19 nt, Homo sapiens
  misc_RNA (1)...(19): siRNA sense strand
ggagucacaugcaaacuuu

SEQ ID NO: 594205 - RNA, 19 nt, Homo sapiens
  misc_RNA (1)...(19): siRNA sense strand
gcagauuuaccaccaauua

SEQ ID NO: 594206 - RNA, 19 nt, Homo sapiens
  misc_RNA (1)...(19): siRNA sense strand
gaaauggagucacaugcaa

SEQ ID NO: 594207 - RNA, 19 nt, Homo sapiens
  misc_RNA (1)...(19): siRNA sense strand
cagaggagcuuguaucaau

SEQ ID NO: 594208 - RNA, 19 nt, Homo sapiens
  misc_RNA (1)...(19): siRNA sense strand
ggaaauauaucaguagagu

SEQ ID NO: 594209 - RNA, 19 nt, Homo sapiens
  misc_RNA (1)...(19): siRNA sense strand
gaaggagaauguugcaaau

SEQ ID NO: 594210 - RNA, 19 nt, Homo sapiens
  misc_RNA (1)...(19): siRNA sense strand
gaacaaauagaagagcuua

SEQ ID NO: 594211 - RNA, 19 nt, Homo sapiens
  misc_RNA (1)...(19): siRNA sense strand
ggagaauguugcaaauauu

SEQ ID NO: 594212 - RNA, 19 nt, Homo sapiens
  misc_RNA (1)...(19): siRNA sense strand
gcaaggcaaugcaaacgaa

SEQ ID NO: 594213 - RNA, 19 nt, Homo sapiens
  misc_RNA (1)...(19): siRNA sense strand
gcagauaguuggaggaaag

SEQ ID NO: 594214 - RNA, 19 nt, Homo sapiens
  misc_RNA (1)...(19): siRNA sense strand
gaucggccauugauagauu

SEQ ID NO: 594215 - RNA, 19 nt, Homo sapiens
  misc_RNA (1)...(19): siRNA sense strand
ccagauaggcagacaguua

SEQ ID NO: 594216 - RNA, 19 nt, Homo sapiens
  misc_RNA (1)...(19): siRNA sense strand
gcaaggaauagaucuuaua

SEQ ID NO: 594217 - RNA, 19 nt, Homo sapiens
  misc_RNA (1)...(19): siRNA sense strand
aaagggaaauggaaagaaa

SEQ ID NO: 594218 - RNA, 19 nt, Homo sapiens
  misc_RNA (1)...(19): siRNA sense strand
caggaaagacauuguguua

SEQ ID NO: 594219 - RNA, 19 nt, Homo sapiens
  misc_RNA (1)...(19): siRNA sense strand
gaugacgccuuucaauguu

SEQ ID NO: 594220 - RNA, 19 nt, Homo sapiens
  misc_RNA (1)...(19): siRNA sense strand
ggaaagagcaaaucagagu

SEQ ID NO: 594221 - RNA, 19 nt, Homo sapiens
  misc_RNA (1)...(19): siRNA sense strand
gaauacuaauugcaacuga

SEQ ID NO: 594222 - RNA, 19 nt, Homo sapiens
  misc_RNA (1)...(19): siRNA sense strand
ggaaauagagaugaacaaa

SEQ ID NO: 594223 - RNA, 19 nt, Homo sapiens
  misc_RNA (1)...(19): siRNA sense strand
aggaauagaucuuauagga

SEQ ID NO: 594224 - RNA, 19 nt, Homo sapiens
  misc_RNA (1)...(19): siRNA sense strand
aaacaaagugggcagauuu

SEQ ID NO: 594225 - RNA, 19 nt, Homo sapiens
  misc_RNA (1)...(19): siRNA sense strand
caaagucauugucuucguu

SEQ ID NO: 594226 - RNA, 19 nt, Homo sapiens
  misc_RNA (1)...(19): siRNA sense strand
gaccuaauacuuggaaaua

SEQ ID NO: 594227 - RNA, 19 nt, Homo sapiens
  misc_RNA (1)...(19): siRNA sense strand
ggacugguguuuccauuac

SEQ ID NO: 594228 - RNA, 19 nt, Homo sapiens
  misc_RNA (1)...(19): siRNA sense strand
agaacaaccagaaucauua

SEQ ID NO: 594229 - RNA, 19 nt, Homo sapiens
  misc_RNA (1)...(19): siRNA sense strand
ggagaaagcauuagagaac

SEQ ID NO: 594230 - RNA, 19 nt, Homo sapiens
  misc_RNA (1)...(19): siRNA sense strand
cuuaucaagugaccuaaua

SEQ ID NO: 594231 - RNA, 19 nt, Homo sapiens
  misc_RNA (1)...(19): siRNA sense strand
ugaaugaucugcaaaugag

SEQ ID NO: 594232 - RNA, 19 nt, Homo sapiens
  misc_RNA (1)...(19): siRNA sense strand
caaccagaaucauuaguca

SEQ ID NO: 594233 - RNA, 19 nt, Homo sapiens
  misc_RNA (1)...(19): siRNA sense strand
gaaagagcaaaucagagua

SEQ ID NO: 594234 - RNA, 19 nt, Homo sapiens
  misc_RNA (1)...(19): siRNA sense strand
caacaccuauucagucaca

SEQ ID NO: 594235 - RNA, 19 nt, Homo sapiens
  misc_RNA (1)...(19): siRNA sense strand
aagcagugauagacaauuu

SEQ ID NO: 594236 - RNA, 19 nt, Homo sapiens
  misc_RNA (1)...(19): siRNA sense strand
gaaaagcuguugcggauca

SEQ ID NO: 594237 - RNA, 19 nt, Homo sapiens
  misc_RNA (1)...(19): siRNA sense strand
cggcgaagcucgacagugu

SEQ ID NO: 594238 - RNA, 19 nt, Homo sapiens
  misc_RNA (1)...(19): siRNA sense strand
aaagauggaagcacagaua

SEQ ID NO: 594239 - RNA, 19 nt, Homo sapiens
  misc_RNA (1)...(19): siRNA sense strand
acagagagaucgggagaaa

SEQ ID NO: 594240 - RNA, 19 nt, Homo sapiens
  misc_RNA (1)...(19): siRNA sense strand
cgcacaaucuuauuugaaa

SEQ ID NO: 594241 - RNA, 19 nt, Homo sapiens
  misc_RNA (1)...(19): siRNA sense strand
gaacaggaaagacauugug

SEQ ID NO: 594242 - RNA, 19 nt, Homo sapiens
  misc_RNA (1)...(19): siRNA sense strand
ggagaucggccauugauag

SEQ ID NO: 594243 - RNA, 19 nt, Homo sapiens
  misc_RNA (1)...(19): siRNA sense strand
aaacaccacaauccaaaua

SEQ ID NO: 594244 - RNA, 19 nt, Homo sapiens
  misc_RNA (1)...(19): siRNA sense strand
gagaugaacaaauagaaga

SEQ ID NO: 594245 - RNA, 19 nt, Homo sapiens
  misc_RNA (1)...(19): siRNA sense strand
ucagaaugcggaauugaua

SEQ ID NO: 594246 - RNA, 19 nt, Homo sapiens
  misc_RNA (1)...(19): siRNA sense strand
aggagaauguugcaaauau

SEQ ID NO: 594247 - RNA, 19 nt, Homo sapiens
  misc_RNA (1)...(19): siRNA sense strand
aauccuaccugcacauuug

SEQ ID NO: 594248 - RNA, 19 nt, Homo sapiens
  misc_RNA (1)...(19): siRNA sense strand
gagaggaagguuugaaaug

SEQ ID NO: 594249 - RNA, 19 nt, Homo sapiens
  misc_RNA (1)...(19): siRNA sense strand
gaacaaccagaaucauuag

SEQ ID NO: 594250 - RNA, 19 nt, Homo sapiens
  misc_RNA (1)...(19): siRNA sense strand
ggaucuaguugcuguaagu

SEQ ID NO: 594251 - RNA, 19 nt, Homo sapiens
  misc_RNA (1)...(19): siRNA sense strand
ccacaagugccaugucaaa

SEQ ID NO: 594252 - RNA, 19 nt, Homo sapiens
  misc_RNA (1)...(19): siRNA sense strand
gccaacaccuauucaguca

SEQ ID NO: 594253 - RNA, 19 nt, Homo sapiens
  misc_RNA (1)...(19): siRNA sense strand
ggcccaagaaguuucauua

SEQ ID NO: 594254 - RNA, 19 nt, Homo sapiens
  misc_RNA (1)...(19): siRNA sense strand
caacuuugacuagaaauga

SEQ ID NO: 594255 - RNA, 19 nt, Homo sapiens
  misc_RNA (1)...(19): siRNA sense strand
gcggaggaguugaaucgaa

SEQ ID NO: 594256 - RNA, 19 nt, Homo sapiens
  misc_RNA (1)...(19): siRNA sense strand
ucaaguagaaggagaaugu

SEQ ID NO: 594257 - RNA, 19 nt, Homo sapiens
  misc_RNA (1)...(19): siRNA sense strand
gcaacucccggaagauuga

SEQ ID NO: 594258 - RNA, 19 nt, Homo sapiens
  misc_RNA (1)...(19): siRNA sense strand
caccacaauccaaauaaua

SEQ ID NO: 594259 - RNA, 19 nt, Homo sapiens
  misc_RNA (1)...(19): siRNA sense strand
gaggacugguguuuccauu

SEQ ID NO: 594260 - RNA, 19 nt, Homo sapiens
  misc_RNA (1)...(19): siRNA sense strand
gauacugcauuccaaccuu

SEQ ID NO: 594261 - RNA, 19 nt, Homo sapiens
  misc_RNA (1)...(19): siRNA sense strand
gccucugaauugauuaaua

SEQ ID NO: 594262 - RNA, 19 nt, Homo sapiens
  misc_RNA (1)...(19): siRNA sense strand
gcagggaggacugguguuu

SEQ ID NO: 594263 - RNA, 19 nt, Homo sapiens
  misc_RNA (1)...(19): siRNA sense strand
gcacaaucuuauuugaaag

SEQ ID NO: 594264 - RNA, 19 nt, Homo sapiens
  misc_RNA (1)...(19): siRNA sense strand
guguuuccauuacaacuuu

SEQ ID NO: 594265 - RNA, 19 nt, Homo sapiens
  misc_RNA (1)...(19): siRNA sense strand
ggaauagacccggcauguu

SEQ ID NO: 594266 - RNA, 19 nt, Homo sapiens
  misc_RNA (1)...(19): siRNA sense strand
gguugccucugaauugauu

SEQ ID NO: 594267 - RNA, 19 nt, Homo sapiens
  misc_RNA (1)...(19): siRNA sense strand
gcauggagauagagaacag

SEQ ID NO: 594268 - RNA, 19 nt, Homo sapiens
  misc_RNA (1)...(19): siRNA sense strand
gaaagcaaaagcagugaua

SEQ ID NO: 594269 - RNA, 19 nt, Homo sapiens
  misc_RNA (1)...(19): siRNA sense strand
cuacauggccucauucagu

SEQ ID NO: 594270 - RNA, 19 nt, Homo sapiens
  misc_RNA (1)...(19): siRNA sense strand
caacaaacaccacaaucca

SEQ ID NO: 594271 - RNA, 19 nt, Homo sapiens
  misc_RNA (1)...(19): siRNA sense strand
gauagauugggaucaaauu

SEQ ID NO: 594272 - RNA, 19 nt, Homo sapiens
  misc_RNA (1)...(19): siRNA sense strand
gcccaagaaguuucauuaa

SEQ ID NO: 594273 - RNA, 19 nt, Homo sapiens
  misc_RNA (1)...(19): siRNA sense strand
caaggaaggcccaagaagu

SEQ ID NO: 594274 - RNA, 19 nt, Homo sapiens
  misc_RNA (1)...(19): siRNA sense strand
ggcaaagugagaauacuaa

SEQ ID NO: 594275 - RNA, 19 nt, Homo sapiens
  misc_RNA (1)...(19): siRNA sense strand
uacauggccucauucaguu

SEQ ID NO: 594276 - RNA, 19 nt, Homo sapiens
  misc_RNA (1)...(19): siRNA sense strand
auaaagggcuucggagugu

SEQ ID NO: 594277 - RNA, 19 nt, Homo sapiens
  misc_RNA (1)...(19): siRNA sense strand
ucaauguuauccugagguu

SEQ ID NO: 594278 - RNA, 19 nt, Homo sapiens
  misc_RNA (1)...(19): siRNA sense strand
cacauuugaugacgccuuu

SEQ ID NO: 594279 - RNA, 19 nt, Homo sapiens
  misc_RNA (1)...(19): siRNA sense strand
gauaguuggaggaaagaaa

SEQ ID NO: 594280 - RNA, 19 nt, Homo sapiens
  misc_RNA (1)...(19): siRNA sense strand
agauugggaucaaauuaga

SEQ ID NO: 594281 - RNA, 19 nt, Homo sapiens
  misc_RNA (1)...(19): siRNA sense strand
caaaagcagugauagacaa

SEQ ID NO: 594282 - RNA, 19 nt, Homo sapiens
  misc_RNA (1)...(19): siRNA sense strand
ugaggcacaucaacggaaa

SEQ ID NO: 594283 - RNA, 19 nt, Homo sapiens
  misc_RNA (1)...(19): siRNA sense strand
gagaaagcauuagagaacu

SEQ ID NO: 594284 - RNA, 19 nt, Homo sapiens
  misc_RNA (1)...(19): siRNA sense strand
ucgucaaucugaagaauau

SEQ ID NO: 594285 - RNA, 19 nt, Homo sapiens
  misc_RNA (1)...(19): siRNA sense strand
ugaguaacuucgucaaucu

SEQ ID NO: 594286 - RNA, 19 nt, Homo sapiens
  misc_RNA (1)...(19): siRNA sense strand
guacaacaaacaccacaau

SEQ ID NO: 594287 - RNA, 19 nt, Homo sapiens
  misc_RNA (1)...(19): siRNA sense strand
gggcagauuuaccaccaau

SEQ ID NO: 594288 - RNA, 19 nt, Homo sapiens
  misc_RNA (1)...(19): siRNA sense strand
gagaucggccauugauaga

SEQ ID NO: 594289 - RNA, 19 nt, Homo sapiens
  misc_RNA (1)...(19): siRNA sense strand
gaagcacagauaacaaugu

SEQ ID NO: 594290 - RNA, 19 nt, Homo sapiens
  misc_RNA (1)...(19): siRNA sense strand
gauggaagcacagauaaca

SEQ ID NO: 594291 - RNA, 19 nt, Homo sapiens
  misc_RNA (1)...(19): siRNA sense strand
ggaucaaauuagagaggaa

SEQ ID NO: 594292 - RNA, 19 nt, Homo sapiens
  misc_RNA (1)...(19): siRNA sense strand
agaaggagaauguugcaaa

SEQ ID NO: 594293 - RNA, 19 nt, Homo sapiens
  misc_RNA (1)...(19): siRNA sense strand
caaggaauagaucuuauag

SEQ ID NO: 594294 - RNA, 19 nt, Homo sapiens
  misc_RNA (1)...(19): siRNA sense strand
uaacgugggaugacuugaa

SEQ ID NO: 594295 - RNA, 19 nt, Homo sapiens
  misc_RNA (1)...(19): siRNA sense strand
acaaacaccacaauccaaa

SEQ ID NO: 594296 - RNA, 19 nt, Homo sapiens
  misc_RNA (1)...(19): siRNA sense strand
gauuuaccaccaauuaaga

SEQ ID NO: 594297 - RNA, 19 nt, Homo sapiens
  misc_RNA (1)...(19): siRNA sense strand
aaggaaggcccaagaaguu

SEQ ID NO: 594298 - RNA, 19 nt, Homo sapiens
  misc_RNA (1)...(19): siRNA sense strand
agaaagcauuagagaacuu

SEQ ID NO: 594299 - RNA, 19 nt, Homo sapiens
  misc_RNA (1)...(19): siRNA sense strand
gcaaugcaaacgaaagcaa

SEQ ID NO: 594300 - RNA, 19 nt, Homo sapiens
  misc_RNA (1)...(19): siRNA sense strand
gaaacgaccuauccccaau

SEQ ID NO: 594301 - RNA, 19 nt, Homo sapiens
  misc_RNA (1)...(19): siRNA sense strand
gaaagaaguucgaagguuu

SEQ ID NO: 594302 - RNA, 19 nt, Homo sapiens
  misc_RNA (1)...(19): siRNA sense strand
caacagggcuuauuaaugu

SEQ ID NO: 594303 - RNA, 19 nt, Homo sapiens
  misc_RNA (1)...(19): siRNA sense strand
ccacagggcuuauuaauau

SEQ ID NO: 594304 - RNA, 19 nt, Homo sapiens
  misc_RNA (1)...(19): siRNA sense strand
ggaauuucauccacgauua

SEQ ID NO: 594305 - RNA, 19 nt, Homo sapiens
  misc_RNA (1)...(19): siRNA sense strand
caccagagcugauaaauau

SEQ ID NO: 594306 - RNA, 19 nt, Homo sapiens
  misc_RNA (1)...(19): siRNA sense strand
gaagagagagugguaaaua

SEQ ID NO: 594307 - RNA, 19 nt, Homo sapiens
  misc_RNA (1)...(19): siRNA sense strand
gauaacgucuugucaaaug

SEQ ID NO: 594308 - RNA, 19 nt, Homo sapiens
  misc_RNA (1)...(19): siRNA sense strand
gauaaugucuugucaacug

SEQ ID NO: 594309 - RNA, 19 nt, Homo sapiens
  misc_RNA (1)...(19): siRNA sense strand
caccagagcuuauuaacuu

SEQ ID NO: 594310 - RNA, 19 nt, Homo sapiens
  misc_RNA (1)...(19): siRNA sense strand
uaccagggcuugcuuauuu

SEQ ID NO: 594311 - RNA, 19 nt, Homo sapiens
  misc_RNA (1)...(19): siRNA sense strand
gauaacaucuugucaacug

SEQ ID NO: 594312 - RNA, 19 nt, Homo sapiens
  misc_RNA (1)...(19): siRNA sense strand
ccaccagcauuuauuaaua

SEQ ID NO: 594313 - RNA, 19 nt, Homo sapiens
  misc_RNA (1)...(19): siRNA sense strand
uaccaggacuuacuuauuu

SEQ ID NO: 594314 - RNA, 19 nt, Homo sapiens
  misc_RNA (1)...(19): siRNA sense strand
ccaaauacaccacaaauau

SEQ ID NO: 594315 - RNA, 19 nt, Homo sapiens
  misc_RNA (1)...(19): siRNA sense strand
guacaaggaucuaugaaag

SEQ ID NO: 594316 - RNA, 19 nt, Homo sapiens
  misc_RNA (1)...(19): siRNA sense strand
gugaagagaggauaaauaa

SEQ ID NO: 594317 - RNA, 19 nt, Homo sapiens
  misc_RNA (1)...(19): siRNA sense strand
gaaggcgcuuaaagaaaua

SEQ ID NO: 594318 - RNA, 19 nt, Homo sapiens
  misc_RNA (1)...(19): siRNA sense strand
caccacagcuuguucauau

SEQ ID NO: 594319 - RNA, 19 nt, Homo sapiens
  misc_RNA (1)...(19): siRNA sense strand
gaaagucaagagacaauuu

SEQ ID NO: 594320 - RNA, 19 nt, Homo sapiens
  misc_RNA (1)...(19): siRNA sense strand
aagaugagcugcuuuacaa

SEQ ID NO: 594321 - RNA, 19 nt, Homo sapiens
  misc_RNA (1)...(19): siRNA sense strand
gguaacaucuugucaacug

SEQ ID NO: 594322 - RNA, 19 nt, Homo sapiens
  misc_RNA (1)...(19): siRNA sense strand
gguauuccauccaugagua

SEQ ID NO: 594323 - RNA, 19 nt, Homo sapiens
  misc_RNA (1)...(19): siRNA sense strand
gguauuccauccaugagua

SEQ ID NO: 594324 - RNA, 19 nt, Homo sapiens
  misc_RNA (1)...(19): siRNA sense strand
uauccgggcuuauuaauau

SEQ ID NO: 594325 - RNA, 19 nt, Homo sapiens
  misc_RNA (1)...(19): siRNA sense strand
gaggagugaugaaguaaau

SEQ ID NO: 594326 - RNA, 19 nt, Homo sapiens
  misc_RNA (1)...(19): siRNA sense strand
gauaacgucuugucaacug

SEQ ID NO: 594327 - RNA, 19 nt, Homo sapiens
  misc_RNA (1)...(19): siRNA sense strand
caaggaagcagcaagguuu

SEQ ID NO: 594328 - RNA, 19 nt, Homo sapiens
  misc_RNA (1)...(19): siRNA sense strand
agaaggcgcuuaaagaaau

SEQ ID NO: 594329 - RNA, 19 nt, Homo sapiens
  misc_RNA (1)...(19): siRNA sense strand
gugaagagaagaaagauaa

SEQ ID NO: 594330 - RNA, 19 nt, Homo sapiens
  misc_RNA (1)...(19): siRNA sense strand
ucacaagucucagcaaaga

SEQ ID NO: 594331 - RNA, 19 nt, Homo sapiens
  misc_RNA (1)...(19): siRNA sense strand
gguauuucaugcagaagua

SEQ ID NO: 594332 - RNA, 19 nt, Homo sapiens
  misc_RNA (1)...(19): siRNA sense strand
gacagacacugguauuuca

SEQ ID NO: 594333 - RNA, 19 nt, Homo sapiens
  misc_RNA (1)...(19): siRNA sense strand
aagagagagugguaaauaa

SEQ ID NO: 594334 - RNA, 19 nt, Homo sapiens
  misc_RNA (1)...(19): siRNA sense strand
caacauccgugaagagaag

SEQ ID NO: 594335 - RNA, 19 nt, Homo sapiens
  misc_RNA (1)...(19): siRNA sense strand
cauaugcuaccauuacuua

SEQ ID NO: 594336 - RNA, 19 nt, Homo sapiens
  misc_RNA (1)...(19): siRNA sense strand
gagaaggcgcuuaaagaaa

SEQ ID NO: 594337 - RNA, 19 nt, Homo sapiens
  misc_RNA (1)...(19): siRNA sense strand
gucaggagcugguauuuca

SEQ ID NO: 594338 - RNA, 19 nt, Homo sapiens
  misc_RNA (1)...(19): siRNA sense strand
cgaccacggcguauuaaua

SEQ ID NO: 594339 - RNA, 19 nt, Homo sapiens
  misc_RNA (1)...(19): siRNA sense strand
ugaaagaaguucgaagguu

SEQ ID NO: 594340 - RNA, 19 nt, Homo sapiens
  misc_RNA (1)...(19): siRNA sense strand
caacagggcaucaaagcaa

SEQ ID NO: 594341 - RNA, 19 nt, Homo sapiens
  misc_RNA (1)...(19): siRNA sense strand
caauauccgugaagagaga

SEQ ID NO: 594342 - RNA, 19 nt, Homo sapiens
  misc_RNA (1)...(19): siRNA sense strand
ggaagaugcugcagucacu

SEQ ID NO: 594343 - RNA, 19 nt, Homo sapiens
  misc_RNA (1)...(19): siRNA sense strand
gaagagaggauaaauaacg

SEQ ID NO: 594344 - RNA, 19 nt, Homo sapiens
  misc_RNA (1)...(19): siRNA sense strand
aaugaggagugaugaagua

SEQ ID NO: 594345 - RNA, 19 nt, Homo sapiens
  misc_RNA (1)...(19): siRNA sense strand
cgagaaggcgcuuaaagaa

SEQ ID NO: 594346 - RNA, 19 nt, Homo sapiens
  misc_RNA (1)...(19): siRNA sense strand
guaaauaaccaaccacuac

SEQ ID NO: 594347 - RNA, 19 nt, Homo sapiens
  misc_RNA (1)...(19): siRNA sense strand
ccagggaucugcauucuac

SEQ ID NO: 594348 - RNA, 19 nt, Homo sapiens
  misc_RNA (1)...(19): siRNA sense strand
gaagagaggauggaaaaua

SEQ ID NO: 594349 - RNA, 19 nt, Homo sapiens
  misc_RNA (1)...(19): siRNA sense strand
gaccacggcguauuaauau

SEQ ID NO: 594350 - RNA, 19 nt, Homo sapiens
  misc_RNA (1)...(19): siRNA sense strand
gaagauggaaaguggcaaa

SEQ ID NO: 594351 - RNA, 19 nt, Homo sapiens
  misc_RNA (1)...(19): siRNA sense strand
gagcuaguauuccagcaau

SEQ ID NO: 594352 - RNA, 19 nt, Homo sapiens
  misc_RNA (1)...(19): siRNA sense strand
gaccaaccgcaaccuaaua

SEQ ID NO: 594353 - RNA, 19 nt, Homo sapiens
  misc_RNA (1)...(19): siRNA sense strand
uaccaucgcucacaauauc

SEQ ID NO: 594354 - RNA, 19 nt, Homo sapiens
  misc_RNA (1)...(19): siRNA sense strand
gaggagaagaugacaaaug

SEQ ID NO: 594355 - RNA, 19 nt, Homo sapiens
  misc_RNA (1)...(19): siRNA sense strand
gaaaauggccaaucucgaa

SEQ ID NO: 594356 - RNA, 19 nt, Homo sapiens
  misc_RNA (1)...(19): siRNA sense strand
guucaaccagugauuauuu

SEQ ID NO: 594357 - RNA, 19 nt, Homo sapiens
  misc_RNA (1)...(19): siRNA sense strand
gccaaauacaccacaaaua

SEQ ID NO: 594358 - RNA, 19 nt, Homo sapiens
  misc_RNA (1)...(19): siRNA sense strand
caaugucugugaagagaga

SEQ ID NO: 594359 - RNA, 19 nt, Homo sapiens
  misc_RNA (1)...(19): siRNA sense strand
gcugguauuucaugcagaa

SEQ ID NO: 594360 - RNA, 19 nt, Homo sapiens
  misc_RNA (1)...(19): siRNA sense strand
caacugguguuucauccau

SEQ ID NO: 594361 - RNA, 19 nt, Homo sapiens
  misc_RNA (1)...(19): siRNA sense strand
gaagagaagauggaaagug

SEQ ID NO: 594362 - RNA, 19 nt, Homo sapiens
  misc_RNA (1)...(19): siRNA sense strand
ggcagcaacugguguuuca

SEQ ID NO: 594363 - RNA, 19 nt, Homo sapiens
  misc_RNA (1)...(19): siRNA sense strand
ucaccagagcugauaaaua

SEQ ID NO: 594364 - RNA, 19 nt, Homo sapiens
  misc_RNA (1)...(19): siRNA sense strand
ccugauaacuccuugucaa

SEQ ID NO: 594365 - RNA, 19 nt, Homo sapiens
  misc_RNA (1)...(19): siRNA sense strand
ccuauguguuuacaaauga

SEQ ID NO: 594366 - RNA, 19 nt, Homo sapiens
  misc_RNA (1)...(19): siRNA sense strand
gagacacucuucaucuaag

SEQ ID NO: 594367 - RNA, 19 nt, Homo sapiens
  misc_RNA (1)...(19): siRNA sense strand
ggaagcagcaagguuuaaa

SEQ ID NO: 594368 - RNA, 19 nt, Homo sapiens
  misc_RNA (1)...(19): siRNA sense strand
gguggaaacugugccaaau

SEQ ID NO: 594369 - RNA, 19 nt, Homo sapiens
  misc_RNA (1)...(19): siRNA sense strand
ccagagcugauaaauauga

SEQ ID NO: 594370 - RNA, 19 nt, Homo sapiens
  misc_RNA (1)...(19): siRNA sense strand
gaaguaccagggaucugua

SEQ ID NO: 594371 - RNA, 19 nt, Homo sapiens
  misc_RNA (1)...(19): siRNA sense strand
ccaccugguuguauuaauc

SEQ ID NO: 594372 - RNA, 19 nt, Homo sapiens
  misc_RNA (1)...(19): siRNA sense strand
aggauaacgucuugucaaa

SEQ ID NO: 594373 - RNA, 19 nt, Homo sapiens
  misc_RNA (1)...(19): siRNA sense strand
ucuaagagaaggaagagua

SEQ ID NO: 594374 - RNA, 19 nt, Homo sapiens
  misc_RNA (1)...(19): siRNA sense strand
gguacaaggaucuaugaaa

SEQ ID NO: 594375 - RNA, 19 nt, Homo sapiens
  misc_RNA (1)...(19): siRNA sense strand
caaauacaccacaaauauc

SEQ ID NO: 594376 - RNA, 19 nt, Homo sapiens
  misc_RNA (1)...(19): siRNA sense strand
guucuauccgggcuuauua

SEQ ID NO: 594377 - RNA, 19 nt, Homo sapiens
  misc_RNA (1)...(19): siRNA sense strand
gcaccaauggccuguauuc

SEQ ID NO: 594378 - RNA, 19 nt, Homo sapiens
  misc_RNA (1)...(19): siRNA sense strand
gaguauguccucgugguua

SEQ ID NO: 594379 - RNA, 19 nt, Homo sapiens
  misc_RNA (1)...(19): siRNA sense strand
ggauccauaugcuaccauu

SEQ ID NO: 594380 - RNA, 19 nt, Homo sapiens
  misc_RNA (1)...(19): siRNA sense strand
caaaugaugggcagcaaau

SEQ ID NO: 594381 - RNA, 19 nt, Homo sapiens
  misc_RNA (1)...(19): siRNA sense strand
ggaucuguaugcuaccauu

SEQ ID NO: 594382 - RNA, 19 nt, Homo sapiens
  misc_RNA (1)...(19): siRNA sense strand
aaauaacggccaaccagua

SEQ ID NO: 594383 - RNA, 19 nt, Homo sapiens
  misc_RNA (1)...(19): siRNA sense strand
gcaaaugaggagugaugaa

SEQ ID NO: 594384 - RNA, 19 nt, Homo sapiens
  misc_RNA (1)...(19): siRNA sense strand
gguauuccacccaugagua

SEQ ID NO: 594385 - RNA, 19 nt, Homo sapiens
  misc_RNA (1)...(19): siRNA sense strand
ggcaggagcugguauucca

SEQ ID NO: 594386 - RNA, 19 nt, Homo sapiens
  misc_RNA (1)...(19): siRNA sense strand
gauaugccagccaugagua

SEQ ID NO: 594387 - RNA, 19 nt, Homo sapiens
  misc_RNA (1)...(19): siRNA sense strand
aagagaagauggaaaauga

SEQ ID NO: 594388 - RNA, 19 nt, Homo sapiens
  misc_RNA (1)...(19): siRNA sense strand
gccuauguguuuacaaaug

SEQ ID NO: 594389 - RNA, 19 nt, Homo sapiens
  misc_RNA (1)...(19): siRNA sense strand
ccacggcguauuaauauga

SEQ ID NO: 594390 - RNA, 19 nt, Homo sapiens
  misc_RNA (1)...(19): siRNA sense strand
gccaaccaguagcugauaa

SEQ ID NO: 594391 - RNA, 19 nt, Homo sapiens
  misc_RNA (1)...(19): siRNA sense strand
gcuaccaucgcucacaaua

SEQ ID NO: 594392 - RNA, 19 nt, Homo sapiens
  misc_RNA (1)...(19): siRNA sense strand
gaugacaaauggccaacag

SEQ ID NO: 594393 - RNA, 19 nt, Homo sapiens
  misc_RNA (1)...(19): siRNA sense strand
aggagaagaugacaaaugg

SEQ ID NO: 594394 - RNA, 19 nt, Homo sapiens
  misc_RNA (1)...(19): siRNA sense strand
ucaaccaacuccaccugaa

SEQ ID NO: 594395 - RNA, 19 nt, Homo sapiens
  misc_RNA (1)...(19): siRNA sense strand
aaagauaacagccaaccaa

SEQ ID NO: 594396 - RNA, 19 nt, Homo sapiens
  misc_RNA (1)...(19): siRNA sense strand
gaagagaagaaagauaaca

SEQ ID NO: 594397 - RNA, 19 nt, Homo sapiens
  misc_RNA (1)...(19): siRNA sense strand
cagcaccaauggccuguau

SEQ ID NO: 594398 - RNA, 19 nt, Homo sapiens
  misc_RNA (1)...(19): siRNA sense strand
gaucuguaugcuaccauua

SEQ ID NO: 594399 - RNA, 19 nt, Homo sapiens
  misc_RNA (1)...(19): siRNA sense strand
gagguacaaggaucuauga

SEQ ID NO: 594400 - RNA, 19 nt, Homo sapiens
  misc_RNA (1)...(19): siRNA sense strand
ccaagcagcauccgauaau

SEQ ID NO: 594401 - RNA, 19 nt, Homo sapiens
  misc_RNA (1)...(19): siRNA sense strand
gaacagagcuuacuuauuc

SEQ ID NO: 594402 - RNA, 19 nt, Homo sapiens
  misc_RNA (1)...(19): siRNA sense strand
gaucaaagcuuauacucaa

SEQ ID NO: 594403 - RNA, 19 nt, Homo sapiens
  misc_RNA (1)...(19): siRNA sense strand
gcauguacauagacaaaua

SEQ ID NO: 594404 - RNA, 19 nt, Homo sapiens
  misc_RNA (1)...(19): siRNA sense strand
gggagaaacugcuguugua

SEQ ID NO: 594405 - RNA, 19 nt, Homo sapiens
  misc_RNA (1)...(19): siRNA sense strand
ggagagaucuuaggacuau

SEQ ID NO: 594406 - RNA, 19 nt, Homo sapiens
  misc_RNA (1)...(19): siRNA sense strand
caacagauguauacaauag

SEQ ID NO: 594407 - RNA, 19 nt, Homo sapiens
  misc_RNA (1)...(19): siRNA sense strand
gaaacuaccugcaggaauc

SEQ ID NO: 594408 - RNA, 19 nt, Homo sapiens
  misc_RNA (1)...(19): siRNA sense strand
ggaggcagaucaauaagaa

SEQ ID NO: 594409 - RNA, 19 nt, Homo sapiens
  misc_RNA (1)...(19): siRNA sense strand
ugucaaagcugaaagacua

SEQ ID NO: 594410 - RNA, 19 nt, Homo sapiens
  misc_RNA (1)...(19): siRNA sense strand
gaggagaaaccauccauua

SEQ ID NO: 594411 - RNA, 19 nt, Homo sapiens
  misc_RNA (1)...(19): siRNA sense strand
ggaaggagcuggagucaac

SEQ ID NO: 594412 - RNA, 19 nt, Homo sapiens
  misc_RNA (1)...(19): siRNA sense strand
acaagaagauagaguagua

SEQ ID NO: 594413 - RNA, 19 nt, Homo sapiens
  misc_RNA (1)...(19): siRNA sense strand
ggaugaagcugacauucuu

SEQ ID NO: 594414 - RNA, 19 nt, Homo sapiens
  misc_RNA (1)...(19): siRNA sense strand
caaaguagcagcauuguga

SEQ ID NO: 594415 - RNA, 19 nt, Homo sapiens
  misc_RNA (1)...(19): siRNA sense strand
ucaaggacauggacaaauu

SEQ ID NO: 594416 - RNA, 19 nt, Homo sapiens
  misc_RNA (1)...(19): siRNA sense strand
cauagaugcugccauuaua

SEQ ID NO: 594417 - RNA, 19 nt, Homo sapiens
  misc_RNA (1)...(19): siRNA sense strand
ucagaagacuguaaagaaa

SEQ ID NO: 594418 - RNA, 19 nt, Homo sapiens
  misc_RNA (1)...(19): siRNA sense strand
ggaaagaguacauugauga

SEQ ID NO: 594419 - RNA, 19 nt, Homo sapiens
  misc_RNA (1)...(19): siRNA sense strand
gagacaaaccacauaaaua

SEQ ID NO: 594420 - RNA, 19 nt, Homo sapiens
  misc_RNA (1)...(19): siRNA sense strand
ccaagcagauuauagugua

SEQ ID NO: 594421 - RNA, 19 nt, Homo sapiens
  misc_RNA (1)...(19): siRNA sense strand
gaauuuggcuuacggagau

SEQ ID NO: 594422 - RNA, 19 nt, Homo sapiens
  misc_RNA (1)...(19): siRNA sense strand
gaaaguaaaucagugagau

SEQ ID NO: 594423 - RNA, 19 nt, Homo sapiens
  misc_RNA (1)...(19): siRNA sense strand
caaacuuguuccagacuua

SEQ ID NO: 594424 - RNA, 19 nt, Homo sapiens
  misc_RNA (1)...(19): siRNA sense strand
gaagucauaagucgaauaa

SEQ ID NO: 594425 - RNA, 19 nt, Homo sapiens
  misc_RNA (1)...(19): siRNA sense strand
acacagagucucagaaaua

SEQ ID NO: 594426 - RNA, 19 nt, Homo sapiens
  misc_RNA (1)...(19): siRNA sense strand
aaagaaagcugucauuagg

SEQ ID NO: 594427 - RNA, 19 nt, Homo sapiens
  misc_RNA (1)...(19): siRNA sense strand
gaagaagugccuaauauag

SEQ ID NO: 594428 - RNA, 19 nt, Homo sapiens
  misc_RNA (1)...(19): siRNA sense strand
gaacgaacacaagaagaua

SEQ ID NO: 594429 - RNA, 19 nt, Homo sapiens
  misc_RNA (1)...(19): siRNA sense strand
gaaagugucuacugaucau

SEQ ID NO: 594430 - RNA, 19 nt, Homo sapiens
  misc_RNA (1)...(19): siRNA sense strand
ggaggaagauaauaguugu

SEQ ID NO: 594431 - RNA, 19 nt, Homo sapiens
  misc_RNA (1)...(19): siRNA sense strand
gaauauagcuuuucucaag

SEQ ID NO: 594432 - RNA, 19 nt, Homo sapiens
  misc_RNA (1)...(19): siRNA sense strand
ggaagaagcuaaacaugcu

SEQ ID NO: 594433 - RNA, 19 nt, Homo sapiens
  misc_RNA (1)...(19): siRNA sense strand
aaacaagucugcuucuuca

SEQ ID NO: 594434 - RNA, 19 nt, Homo sapiens
  misc_RNA (1)...(19): siRNA sense strand
ggacacagagucucagaaa

SEQ ID NO: 594435 - RNA, 19 nt, Homo sapiens
  misc_RNA (1)...(19): siRNA sense strand
ugcgacagcuucuuuguua

SEQ ID NO: 594436 - RNA, 19 nt, Homo sapiens
  misc_RNA (1)...(19): siRNA sense strand
cagaagacauacagaaaga

SEQ ID NO: 594437 - RNA, 19 nt, Homo sapiens
  misc_RNA (1)...(19): siRNA sense strand
gcaauucgaacugcauuua

SEQ ID NO: 594438 - RNA, 19 nt, Homo sapiens
  misc_RNA (1)...(19): siRNA sense strand
gcuagaaguugaagcagaa

SEQ ID NO: 594439 - RNA, 19 nt, Homo sapiens
  misc_RNA (1)...(19): siRNA sense strand
uaggaaagcugugauauca

SEQ ID NO: 594440 - RNA, 19 nt, Homo sapiens
  misc_RNA (1)...(19): siRNA sense strand
ggagaaaccauccauuaug

SEQ ID NO: 594441 - RNA, 19 nt, Homo sapiens
  misc_RNA (1)...(19): siRNA sense strand
gaaauuauugagccaguuu

SEQ ID NO: 594442 - RNA, 19 nt, Homo sapiens
  misc_RNA (1)...(19): siRNA sense strand
gaaauguguugguucuuca

SEQ ID NO: 594443 - RNA, 19 nt, Homo sapiens
  misc_RNA (1)...(19): siRNA sense strand
gauaccagccaacaauaua

SEQ ID NO: 594444 - RNA, 19 nt, Homo sapiens
  misc_RNA (1)...(19): siRNA sense strand
ggcauuucauuauggauua

SEQ ID NO: 594445 - RNA, 19 nt, Homo sapiens
  misc_RNA (1)...(19): siRNA sense strand
ucagugaucuuauuagcuu

SEQ ID NO: 594446 - RNA, 19 nt, Homo sapiens
  misc_RNA (1)...(19): siRNA sense strand
ggaaacaacagauguauac

SEQ ID NO: 594447 - RNA, 19 nt, Homo sapiens
  misc_RNA (1)...(19): siRNA sense strand
gauauacuccagugacuaa

SEQ ID NO: 594448 - RNA, 19 nt, Homo sapiens
  misc_RNA (1)...(19): siRNA sense strand
gauacacaauugcaacuau

SEQ ID NO: 594449 - RNA, 19 nt, Homo sapiens
  misc_RNA (1)...(19): siRNA sense strand
guguauagcuugccuuuca

SEQ ID NO: 594450 - RNA, 19 nt, Homo sapiens
  misc_RNA (1)...(19): siRNA sense strand
ggucaugcauuuagaagau

SEQ ID NO: 594451 - RNA, 19 nt, Homo sapiens
  misc_RNA (1)...(19): siRNA sense strand
uuucuuaugucccuucuua

SEQ ID NO: 594452 - RNA, 19 nt, Homo sapiens
  misc_RNA (1)...(19): siRNA sense strand
agaaacugcuguuguagaa

SEQ ID NO: 594453 - RNA, 19 nt, Homo sapiens
  misc_RNA (1)...(19): siRNA sense strand
gaagauaauaguuguggaa

SEQ ID NO: 594454 - RNA, 19 nt, Homo sapiens
  misc_RNA (1)...(19): siRNA sense strand
cacaugcacuugauuuaaa

SEQ ID NO: 594455 - RNA, 19 nt, Homo sapiens
  misc_RNA (1)...(19): siRNA sense strand
caagugacaugaaagaagu

SEQ ID NO: 594456 - RNA, 19 nt, Homo sapiens
  misc_RNA (1)...(19): siRNA sense strand
ggcaaaagcacaauuauua

SEQ ID NO: 594457 - RNA, 19 nt, Homo sapiens
  misc_RNA (1)...(19): siRNA sense strand
caacuauucuucauuaugc

SEQ ID NO: 594458 - RNA, 19 nt, Homo sapiens
  misc_RNA (1)...(19): siRNA sense strand
gaaauuaugaggaguuauc

SEQ ID NO: 594459 - RNA, 19 nt, Homo sapiens
  misc_RNA (1)...(19): siRNA sense strand
gcccauauccucuaauuau

SEQ ID NO: 594460 - RNA, 19 nt, Homo sapiens
  misc_RNA (1)...(19): siRNA sense strand
ggaugaagaugaagauguc

SEQ ID NO: 594461 - RNA, 19 nt, Homo sapiens
  misc_RNA (1)...(19): siRNA sense strand
caaugaggaugaagaugaa

SEQ ID NO: 594462 - RNA, 19 nt, Homo sapiens
  misc_RNA (1)...(19): siRNA sense strand
uagguugccugauuucuuu

SEQ ID NO: 594463 - RNA, 19 nt, Homo sapiens
  misc_RNA (1)...(19): siRNA sense strand
gcucacacuuaauaguaua

SEQ ID NO: 594464 - RNA, 19 nt, Homo sapiens
  misc_RNA (1)...(19): siRNA sense strand
ggagucaacuaaagcuguu

SEQ ID NO: 594465 - RNA, 19 nt, Homo sapiens
  misc_RNA (1)...(19): siRNA sense strand
guacaacaucuaaagagua

SEQ ID NO: 594466 - RNA, 19 nt, Homo sapiens
  misc_RNA (1)...(19): siRNA sense strand
caguuauucuguucacuua

SEQ ID NO: 594467 - RNA, 19 nt, Homo sapiens
  misc_RNA (1)...(19): siRNA sense strand
ggagacaaaccacauaaau

SEQ ID NO: 594468 - RNA, 19 nt, Homo sapiens
  misc_RNA (1)...(19): siRNA sense strand
agaagugccuaauauagaa

SEQ ID NO: 594469 - RNA, 19 nt, Homo sapiens
  misc_RNA (1)...(19): siRNA sense strand
caaagauacugcugcuaga

SEQ ID NO: 594470 - RNA, 19 nt, Homo sapiens
  misc_RNA (1)...(19): siRNA sense strand
gaugaaauguuugaagcaa

SEQ ID NO: 594471 - RNA, 19 nt, Homo sapiens
  misc_RNA (1)...(19): siRNA sense strand
gaaagaguacauugaugaa

SEQ ID NO: 594472 - RNA, 19 nt, Homo sapiens
  misc_RNA (1)...(19): siRNA sense strand
gaauaacacaugcacuuga

SEQ ID NO: 594473 - RNA, 19 nt, Homo sapiens
  misc_RNA (1)...(19): siRNA sense strand
uuacugcaaugccaccuua

SEQ ID NO: 594474 - RNA, 19 nt, Homo sapiens
  misc_RNA (1)...(19): siRNA sense strand
aggaagaaauggauucaaa

SEQ ID NO: 594475 - RNA, 19 nt, Homo sapiens
  misc_RNA (1)...(19): siRNA sense strand
gaaauugaccaagcagauu

SEQ ID NO: 594476 - RNA, 19 nt, Homo sapiens
  misc_RNA (1)...(19): siRNA sense strand
uaacauccagucucucuaa

SEQ ID NO: 594477 - RNA, 19 nt, Homo sapiens
  misc_RNA (1)...(19): siRNA sense strand
uaacacaugcacuugauuu

SEQ ID NO: 594478 - RNA, 19 nt, Homo sapiens
  misc_RNA (1)...(19): siRNA sense strand
cuaaauacaucucuuucug

SEQ ID NO: 594479 - RNA, 19 nt, Homo sapiens
  misc_RNA (1)...(19): siRNA sense strand
caacaguacuaugguuuau

SEQ ID NO: 594480 - RNA, 19 nt, Homo sapiens
  misc_RNA (1)...(19): siRNA sense strand
uaaugacagugacuaugua

SEQ ID NO: 594481 - RNA, 19 nt, Homo sapiens
  misc_RNA (1)...(19): siRNA sense strand
agaaagcugucauuaggaa

SEQ ID NO: 594482 - RNA, 19 nt, Homo sapiens
  misc_RNA (1)...(19): siRNA sense strand
ugaaauguuugaagcaaga

SEQ ID NO: 594483 - RNA, 19 nt, Homo sapiens
  misc_RNA (1)...(19): siRNA sense strand
gcacaggucaugcauuuag

SEQ ID NO: 594484 - RNA, 19 nt, Homo sapiens
  misc_RNA (1)...(19): siRNA sense strand
gagcuggagucaacuaaag

SEQ ID NO: 594485 - RNA, 19 nt, Homo sapiens
  misc_RNA (1)...(19): siRNA sense strand
gaacaguacaacaucuaaa

SEQ ID NO: 594486 - RNA, 19 nt, Homo sapiens
  misc_RNA (1)...(19): siRNA sense strand
ggagauuauucuucagaga

SEQ ID NO: 594487 - RNA, 19 nt, Homo sapiens
  misc_RNA (1)...(19): siRNA sense strand
gaacaggaaagaguacauu

SEQ ID NO: 594488 - RNA, 19 nt, Homo sapiens
  misc_RNA (1)...(19): siRNA sense strand
ugaagaagugccuaauaua

SEQ ID NO: 594489 - RNA, 19 nt, Homo sapiens
  misc_RNA (1)...(19): siRNA sense strand
aaacugcuguuguagaaau

SEQ ID NO: 594490 - RNA, 19 nt, Homo sapiens
  misc_RNA (1)...(19): siRNA sense strand
gaacaagaggaggaagaua

SEQ ID NO: 594491 - RNA, 19 nt, Homo sapiens
  misc_RNA (1)...(19): siRNA sense strand
cauggugucugggcaguua

SEQ ID NO: 594492 - RNA, 19 nt, Homo sapiens
  misc_RNA (1)...(19): siRNA sense strand
gcaacuaaauacaucucuu

SEQ ID NO: 594493 - RNA, 19 nt, Homo sapiens
  misc_RNA (1)...(19): siRNA sense strand
caacauauaccuggagcua

SEQ ID NO: 594494 - RNA, 19 nt, Homo sapiens
  misc_RNA (1)...(19): siRNA sense strand
ucaaagauaaccaagcuaa

SEQ ID NO: 594495 - RNA, 19 nt, Homo sapiens
  misc_RNA (1)...(19): siRNA sense strand
uauauucuauguccucuug

SEQ ID NO: 594496 - RNA, 19 nt, Homo sapiens
  misc_RNA (1)...(19): siRNA sense strand
gcacauguggcgagcaauu

SEQ ID NO: 594497 - RNA, 19 nt, Homo sapiens
  misc_RNA (1)...(19): siRNA sense strand
ggucauuuaucuauucugu

SEQ ID NO: 594498 - RNA, 19 nt, Homo sapiens
  misc_RNA (1)...(19): siRNA sense strand
guucaguacucauuucaug

SEQ ID NO: 594499 - RNA, 19 nt, Homo sapiens
  misc_RNA (1)...(19): siRNA sense strand
agacagucauucaaauuug

SEQ ID NO: 594500 - RNA, 19 nt, Homo sapiens
  misc_RNA (1)...(19): siRNA sense strand
uuauggagcugucaaagga

SEQ ID NO: 594501 - RNA, 19 nt, Homo sapiens
  misc_RNA (1)...(19): siRNA sense strand
gaacagagcuuacuuauuc

SEQ ID NO: 594502 - RNA, 19 nt, Homo sapiens
  misc_RNA (1)...(19): siRNA sense strand
gaucaaagcuuauacucaa

SEQ ID NO: 594503 - RNA, 19 nt, Homo sapiens
  misc_RNA (1)...(19): siRNA sense strand
gcauguacauagacaaaua

SEQ ID NO: 594504 - RNA, 19 nt, Homo sapiens
  misc_RNA (1)...(19): siRNA sense strand
gggagaaacugcuguugua

SEQ ID NO: 594505 - RNA, 19 nt, Homo sapiens
  misc_RNA (1)...(19): siRNA sense strand
ggagagaucuuaggacuau

SEQ ID NO: 594506 - RNA, 19 nt, Homo sapiens
  misc_RNA (1)...(19): siRNA sense strand
caacagauguauacaauag

SEQ ID NO: 594507 - RNA, 19 nt, Homo sapiens
  misc_RNA (1)...(19): siRNA sense strand
gaaacuaccugcaggaauc

SEQ ID NO: 594508 - RNA, 19 nt, Homo sapiens
  misc_RNA (1)...(19): siRNA sense strand
ggaggcagaucaauaagaa

SEQ ID NO: 594509 - RNA, 19 nt, Homo sapiens
  misc_RNA (1)...(19): siRNA sense strand
ugucaaagcugaaagacua

SEQ ID NO: 594510 - RNA, 19 nt, Homo sapiens
  misc_RNA (1)...(19): siRNA sense strand
gaggagaaaccauccauua

SEQ ID NO: 594511 - RNA, 19 nt, Homo sapiens
  misc_RNA (1)...(19): siRNA sense strand
ggaaggagcuggagucaac

SEQ ID NO: 594512 - RNA, 19 nt, Homo sapiens
  misc_RNA (1)...(19): siRNA sense strand
acaagaagauagaguagua

SEQ ID NO: 594513 - RNA, 19 nt, Homo sapiens
  misc_RNA (1)...(19): siRNA sense strand
ggaugaagcugacauucuu

SEQ ID NO: 594514 - RNA, 19 nt, Homo sapiens
  misc_RNA (1)...(19): siRNA sense strand
caaaguagcagcauuguga

SEQ ID NO: 594515 - RNA, 19 nt, Homo sapiens
  misc_RNA (1)...(19): siRNA sense strand
ucaaggacauggacaaauu

SEQ ID NO: 594516 - RNA, 19 nt, Homo sapiens
  misc_RNA (1)...(19): siRNA sense strand
cauagaugcugccauuaua

SEQ ID NO: 594517 - RNA, 19 nt, Homo sapiens
  misc_RNA (1)...(19): siRNA sense strand
ucagaagacuguaaagaaa

SEQ ID NO: 594518 - RNA, 19 nt, Homo sapiens
  misc_RNA (1)...(19): siRNA sense strand
ggaaagaguacauugauga

SEQ ID NO: 594519 - RNA, 19 nt, Homo sapiens
  misc_RNA (1)...(19): siRNA sense strand
gagacaaaccacauaaaua

SEQ ID NO: 594520 - RNA, 19 nt, Homo sapiens
  misc_RNA (1)...(19): siRNA sense strand
ccaagcagauuauagugua

SEQ ID NO: 594521 - RNA, 19 nt, Homo sapiens
  misc_RNA (1)...(19): siRNA sense strand
gaauuuggcuuacggagau

SEQ ID NO: 594522 - RNA, 19 nt, Homo sapiens
  misc_RNA (1)...(19): siRNA sense strand
gaaaguaaaucagugagau

SEQ ID NO: 594523 - RNA, 19 nt, Homo sapiens
  misc_RNA (1)...(19): siRNA sense strand
caaacuuguuccagacuua

SEQ ID NO: 594524 - RNA, 19 nt, Homo sapiens
  misc_RNA (1)...(19): siRNA sense strand
gaagucauaagucgaauaa

SEQ ID NO: 594525 - RNA, 19 nt, Homo sapiens
  misc_RNA (1)...(19): siRNA sense strand
acacagagucucagaaaua

SEQ ID NO: 594526 - RNA, 19 nt, Homo sapiens
  misc_RNA (1)...(19): siRNA sense strand
aaagaaagcugucauuagg

SEQ ID NO: 594527 - RNA, 19 nt, Homo sapiens
  misc_RNA (1)...(19): siRNA sense strand
gaagaagugccuaauauag

SEQ ID NO: 594528 - RNA, 19 nt, Homo sapiens
  misc_RNA (1)...(19): siRNA sense strand
gaacgaacacaagaagaua

SEQ ID NO: 594529 - RNA, 19 nt, Homo sapiens
  misc_RNA (1)...(19): siRNA sense strand
gaaagugucuacugaucau

SEQ ID NO: 594530 - RNA, 19 nt, Homo sapiens
  misc_RNA (1)...(19): siRNA sense strand
ggaggaagauaauaguugu

SEQ ID NO: 594531 - RNA, 19 nt, Homo sapiens
  misc_RNA (1)...(19): siRNA sense strand
gaauauagcuuuucucaag

SEQ ID NO: 594532 - RNA, 19 nt, Homo sapiens
  misc_RNA (1)...(19): siRNA sense strand
ggaagaagcuaaacaugcu

SEQ ID NO: 594533 - RNA, 19 nt, Homo sapiens
  misc_RNA (1)...(19): siRNA sense strand
aaacaagucugcuucuuca

SEQ ID NO: 594534 - RNA, 19 nt, Homo sapiens
  misc_RNA (1)...(19): siRNA sense strand
ggacacagagucucagaaa

SEQ ID NO: 594535 - RNA, 19 nt, Homo sapiens
  misc_RNA (1)...(19): siRNA sense strand
ugcgacagcuucuuuguua

SEQ ID NO: 594536 - RNA, 19 nt, Homo sapiens
  misc_RNA (1)...(19): siRNA sense strand
cagaagacauacagaaaga

SEQ ID NO: 594537 - RNA, 19 nt, Homo sapiens
  misc_RNA (1)...(19): siRNA sense strand
gcaauucgaacugcauuua

SEQ ID NO: 594538 - RNA, 19 nt, Homo sapiens
  misc_RNA (1)...(19): siRNA sense strand
gcuagaaguugaagcagaa

SEQ ID NO: 594539 - RNA, 19 nt, Homo sapiens
  misc_RNA (1)...(19): siRNA sense strand
uaggaaagcugugauauca

SEQ ID NO: 594540 - RNA, 19 nt, Homo sapiens
  misc_RNA (1)...(19): siRNA sense strand
ggagaaaccauccauuaug

SEQ ID NO: 594541 - RNA, 19 nt, Homo sapiens
  misc_RNA (1)...(19): siRNA sense strand
gaaauuauugagccaguuu

SEQ ID NO: 594542 - RNA, 19 nt, Homo sapiens
  misc_RNA (1)...(19): siRNA sense strand
gaaauguguugguucuuca

SEQ ID NO: 594543 - RNA, 19 nt, Homo sapiens
  misc_RNA (1)...(19): siRNA sense strand
gauaccagccaacaauaua

SEQ ID NO: 594544 - RNA, 19 nt, Homo sapiens
  misc_RNA (1)...(19): siRNA sense strand
ggcauuucauuauggauua

SEQ ID NO: 594545 - RNA, 19 nt, Homo sapiens
  misc_RNA (1)...(19): siRNA sense strand
ucagugaucuuauuagcuu

SEQ ID NO: 594546 - RNA, 19 nt, Homo sapiens
  misc_RNA (1)...(19): siRNA sense strand
ggaaacaacagauguauac

SEQ ID NO: 594547 - RNA, 19 nt, Homo sapiens
  misc_RNA (1)...(19): siRNA sense strand
gauauacuccagugacuaa

SEQ ID NO: 594548 - RNA, 19 nt, Homo sapiens
  misc_RNA (1)...(19): siRNA sense strand
gauacacaauugcaacuau

SEQ ID NO: 594549 - RNA, 19 nt, Homo sapiens
  misc_RNA (1)...(19): siRNA sense strand
guguauagcuugccuuuca

SEQ ID NO: 594550 - RNA, 19 nt, Homo sapiens
  misc_RNA (1)...(19): siRNA sense strand
ggucaugcauuuagaagau

SEQ ID NO: 594551 - RNA, 19 nt, Homo sapiens
  misc_RNA (1)...(19): siRNA sense strand
uuucuuaugucccuucuua

SEQ ID NO: 594552 - RNA, 19 nt, Homo sapiens
  misc_RNA (1)...(19): siRNA sense strand
agaaacugcuguuguagaa

SEQ ID NO: 594553 - RNA, 19 nt, Homo sapiens
  misc_RNA (1)...(19): siRNA sense strand
gaagauaauaguuguggaa

SEQ ID NO: 594554 - RNA, 19 nt, Homo sapiens
  misc_RNA (1)...(19): siRNA sense strand
cacaugcacuugauuuaaa

SEQ ID NO: 594555 - RNA, 19 nt, Homo sapiens
  misc_RNA (1)...(19): siRNA sense strand
caagugacaugaaagaagu

SEQ ID NO: 594556 - RNA, 19 nt, Homo sapiens
  misc_RNA (1)...(19): siRNA sense strand
ggcaaaagcacaauuauua

SEQ ID NO: 594557 - RNA, 19 nt, Homo sapiens
  misc_RNA (1)...(19): siRNA sense strand
caacuauucuucauuaugc

SEQ ID NO: 594558 - RNA, 19 nt, Homo sapiens
  misc_RNA (1)...(19): siRNA sense strand
gaaauuaugaggaguuauc

SEQ ID NO: 594559 - RNA, 19 nt, Homo sapiens
  misc_RNA (1)...(19): siRNA sense strand
gcccauauccucuaauuau

SEQ ID NO: 594560 - RNA, 19 nt, Homo sapiens
  misc_RNA (1)...(19): siRNA sense strand
ggaugaagaugaagauguc

SEQ ID NO: 594561 - RNA, 19 nt, Homo sapiens
  misc_RNA (1)...(19): siRNA sense strand
caaugaggaugaagaugaa

SEQ ID NO: 594562 - RNA, 19 nt, Homo sapiens
  misc_RNA (1)...(19): siRNA sense strand
uagguugccugauuucuuu

SEQ ID NO: 594563 - RNA, 19 nt, Homo sapiens
  misc_RNA (1)...(19): siRNA sense strand
gcucacacuuaauaguaua

SEQ ID NO: 594564 - RNA, 19 nt, Homo sapiens
  misc_RNA (1)...(19): siRNA sense strand
ggagucaacuaaagcuguu

SEQ ID NO: 594565 - RNA, 19 nt, Homo sapiens
  misc_RNA (1)...(19): siRNA sense strand
guacaacaucuaaagagua

SEQ ID NO: 594566 - RNA, 19 nt, Homo sapiens
  misc_RNA (1)...(19): siRNA sense strand
caguuauucuguucacuua

SEQ ID NO: 594567 - RNA, 19 nt, Homo sapiens
  misc_RNA (1)...(19): siRNA sense strand
ggagacaaaccacauaaau

SEQ ID NO: 594568 - RNA, 19 nt, Homo sapiens
  misc_RNA (1)...(19): siRNA sense strand
agaagugccuaauauagaa

SEQ ID NO: 594569 - RNA, 19 nt, Homo sapiens
  misc_RNA (1)...(19): siRNA sense strand
caaagauacugcugcuaga

SEQ ID NO: 594570 - RNA, 19 nt, Homo sapiens
  misc_RNA (1)...(19): siRNA sense strand
gaugaaauguuugaagcaa

SEQ ID NO: 594571 - RNA, 19 nt, Homo sapiens
  misc_RNA (1)...(19): siRNA sense strand
gaaagaguacauugaugaa

SEQ ID NO: 594572 - RNA, 19 nt, Homo sapiens
  misc_RNA (1)...(19): siRNA sense strand
gaauaacacaugcacuuga

SEQ ID NO: 594573 - RNA, 19 nt, Homo sapiens
  misc_RNA (1)...(19): siRNA sense strand
uuacugcaaugccaccuua

SEQ ID NO: 594574 - RNA, 19 nt, Homo sapiens
  misc_RNA (1)...(19): siRNA sense strand
aggaagaaauggauucaaa

SEQ ID NO: 594575 - RNA, 19 nt, Homo sapiens
  misc_RNA (1)...(19): siRNA sense strand
gaaauugaccaagcagauu

SEQ ID NO: 594576 - RNA, 19 nt, Homo sapiens
  misc_RNA (1)...(19): siRNA sense strand
uaacauccagucucucuaa

SEQ ID NO: 594577 - RNA, 19 nt, Homo sapiens
  misc_RNA (1)...(19): siRNA sense strand
uaacacaugcacuugauuu

SEQ ID NO: 594578 - RNA, 19 nt, Homo sapiens
  misc_RNA (1)...(19): siRNA sense strand
cuaaauacaucucuuucug

SEQ ID NO: 594579 - RNA, 19 nt, Homo sapiens
  misc_RNA (1)...(19): siRNA sense strand
caacaguacuaugguuuau

SEQ ID NO: 594580 - RNA, 19 nt, Homo sapiens
  misc_RNA (1)...(19): siRNA sense strand
uaaugacagugacuaugua

SEQ ID NO: 594581 - RNA, 19 nt, Homo sapiens
  misc_RNA (1)...(19): siRNA sense strand
agaaagcugucauuaggaa

SEQ ID NO: 594582 - RNA, 19 nt, Homo sapiens
  misc_RNA (1)...(19): siRNA sense strand
ugaaauguuugaagcaaga

SEQ ID NO: 594583 - RNA, 19 nt, Homo sapiens
  misc_RNA (1)...(19): siRNA sense strand
gcacaggucaugcauuuag

SEQ ID NO: 594584 - RNA, 19 nt, Homo sapiens
  misc_RNA (1)...(19): siRNA sense strand
gagcuggagucaacuaaag

SEQ ID NO: 594585 - RNA, 19 nt, Homo sapiens
  misc_RNA (1)...(19): siRNA sense strand
gaacaguacaacaucuaaa

SEQ ID NO: 594586 - RNA, 19 nt, Homo sapiens
  misc_RNA (1)...(19): siRNA sense strand
ggagauuauucuucagaga

SEQ ID NO: 594587 - RNA, 19 nt, Homo sapiens
  misc_RNA (1)...(19): siRNA sense strand
gaacaggaaagaguacauu

SEQ ID NO: 594588 - RNA, 19 nt, Homo sapiens
  misc_RNA (1)...(19): siRNA sense strand
ugaagaagugccuaauaua

SEQ ID NO: 594589 - RNA, 19 nt, Homo sapiens
  misc_RNA (1)...(19): siRNA sense strand
aaacugcuguuguagaaau

SEQ ID NO: 594590 - RNA, 19 nt, Homo sapiens
  misc_RNA (1)...(19): siRNA sense strand
gaacaagaggaggaagaua

SEQ ID NO: 594591 - RNA, 19 nt, Homo sapiens
  misc_RNA (1)...(19): siRNA sense strand
cauggugucugggcaguua

SEQ ID NO: 594592 - RNA, 19 nt, Homo sapiens
  misc_RNA (1)...(19): siRNA sense strand
gcaacuaaauacaucucuu

SEQ ID NO: 594593 - RNA, 19 nt, Homo sapiens
  misc_RNA (1)...(19): siRNA sense strand
caacauauaccuggagcua

SEQ ID NO: 594594 - RNA, 19 nt, Homo sapiens
  misc_RNA (1)...(19): siRNA sense strand
ucaaagauaaccaagcuaa

SEQ ID NO: 594595 - RNA, 19 nt, Homo sapiens
  misc_RNA (1)...(19): siRNA sense strand
uauauucuauguccucuug

SEQ ID NO: 594596 - RNA, 19 nt, Homo sapiens
  misc_RNA (1)...(19): siRNA sense strand
gcacauguggcgagcaauu

SEQ ID NO: 594597 - RNA, 19 nt, Homo sapiens
  misc_RNA (1)...(19): siRNA sense strand
ggucauuuaucuauucugu

SEQ ID NO: 594598 - RNA, 19 nt, Homo sapiens
  misc_RNA (1)...(19): siRNA sense strand
guucaguacucauuucaug

SEQ ID NO: 594599 - RNA, 19 nt, Homo sapiens
  misc_RNA (1)...(19): siRNA sense strand
agacagucauucaaauuug

SEQ ID NO: 594600 - RNA, 19 nt, Homo sapiens
  misc_RNA (1)...(19): siRNA sense strand
uuauggagcugucaaagga

SEQ ID NO: 594601 - RNA, 19 nt, Homo sapiens
  misc_RNA (1)...(19): siRNA sense strand
ggacuuaucuuuguucauu

SEQ ID NO: 594602 - RNA, 19 nt, Homo sapiens
  misc_RNA (1)...(19): siRNA sense strand
guauaaaggugcacaugua

SEQ ID NO: 594603 - RNA, 19 nt, Homo sapiens
  misc_RNA (1)...(19): siRNA sense strand
gcaagcagguugguguuua

SEQ ID NO: 594604 - RNA, 19 nt, Homo sapiens
  misc_RNA (1)...(19): siRNA sense strand
ucagugaacuugcuaauga

SEQ ID NO: 594605 - RNA, 19 nt, Homo sapiens
  misc_RNA (1)...(19): siRNA sense strand
gaaaguggcagacaaaguu

SEQ ID NO: 594606 - RNA, 19 nt, Homo sapiens
  misc_RNA (1)...(19): siRNA sense strand
cauggaaacccaauuauua

SEQ ID NO: 594607 - RNA, 19 nt, Homo sapiens
  misc_RNA (1)...(19): siRNA sense strand
gcacaccacugcuuagaga

SEQ ID NO: 594608 - RNA, 19 nt, Homo sapiens
  misc_RNA (1)...(19): siRNA sense strand
ccaaaucccuggaaagaga

SEQ ID NO: 594609 - RNA, 19 nt, Homo sapiens
  misc_RNA (1)...(19): siRNA sense strand
ggaaaauucuaccagauua

SEQ ID NO: 594610 - RNA, 19 nt, Homo sapiens
  misc_RNA (1)...(19): siRNA sense strand
gauagcaggcuuugaagua

SEQ ID NO: 594611 - RNA, 19 nt, Homo sapiens
  misc_RNA (1)...(19): siRNA sense strand
gaauauacucgcccuauga

SEQ ID NO: 594612 - RNA, 19 nt, Homo sapiens
  misc_RNA (1)...(19): siRNA sense strand
ggaacaggaucuuuguaga

SEQ ID NO: 594613 - RNA, 19 nt, Homo sapiens
  misc_RNA (1)...(19): siRNA sense strand
guaaauuguagcccuauua

SEQ ID NO: 594614 - RNA, 19 nt, Homo sapiens
  misc_RNA (1)...(19): siRNA sense strand
gcagacaaaguuauaauug

SEQ ID NO: 594615 - RNA, 19 nt, Homo sapiens
  misc_RNA (1)...(19): siRNA sense strand
uagagcagcuuguguaugu

SEQ ID NO: 594616 - RNA, 19 nt, Homo sapiens
  misc_RNA (1)...(19): siRNA sense strand
gaacagcgugucccacaaa

SEQ ID NO: 594617 - RNA, 19 nt, Homo sapiens
  misc_RNA (1)...(19): siRNA sense strand
caaauuaggacaaacaguu

SEQ ID NO: 594618 - RNA, 19 nt, Homo sapiens
  misc_RNA (1)...(19): siRNA sense strand
cagaugaagugguucuaaa

SEQ ID NO: 594619 - RNA, 19 nt, Homo sapiens
  misc_RNA (1)...(19): siRNA sense strand
gcugaacauuucuacagua

SEQ ID NO: 594620 - RNA, 19 nt, Homo sapiens
  misc_RNA (1)...(19): siRNA sense strand
gggaauauaugaggauaau

SEQ ID NO: 594621 - RNA, 19 nt, Homo sapiens
  misc_RNA (1)...(19): siRNA sense strand
aaacaacuuugcaggugua

SEQ ID NO: 594622 - RNA, 19 nt, Homo sapiens
  misc_RNA (1)...(19): siRNA sense strand
caauggacauggagugcua

SEQ ID NO: 594623 - RNA, 19 nt, Homo sapiens
  misc_RNA (1)...(19): siRNA sense strand
gaggacaauucauagagaa

SEQ ID NO: 594624 - RNA, 19 nt, Homo sapiens
  misc_RNA (1)...(19): siRNA sense strand
ggacgaggccuuauugaag

SEQ ID NO: 594625 - RNA, 19 nt, Homo sapiens
  misc_RNA (1)...(19): siRNA sense strand
gaagaggacaauucauaga

SEQ ID NO: 594626 - RNA, 19 nt, Homo sapiens
  misc_RNA (1)...(19): siRNA sense strand
uggauuaccucaaauagug

SEQ ID NO: 594627 - RNA, 19 nt, Homo sapiens
  misc_RNA (1)...(19): siRNA sense strand
acaguaacccugcaagaua

SEQ ID NO: 594628 - RNA, 19 nt, Homo sapiens
  misc_RNA (1)...(19): siRNA sense strand
ugacaaaucugcacaacac

SEQ ID NO: 594629 - RNA, 19 nt, Homo sapiens
  misc_RNA (1)...(19): siRNA sense strand
ugaagaugcuuauguugga

SEQ ID NO: 594630 - RNA, 19 nt, Homo sapiens
  misc_RNA (1)...(19): siRNA sense strand
gaacauuucuacaguaacc

SEQ ID NO: 594631 - RNA, 19 nt, Homo sapiens
  misc_RNA (1)...(19): siRNA sense strand
gacaaggaguaauagaaga

SEQ ID NO: 594632 - RNA, 19 nt, Homo sapiens
  misc_RNA (1)...(19): siRNA sense strand
guuuaacccugaugacaaa

SEQ ID NO: 594633 - RNA, 19 nt, Homo sapiens
  misc_RNA (1)...(19): siRNA sense strand
caccacugcuuagagauua

SEQ ID NO: 594634 - RNA, 19 nt, Homo sapiens
  misc_RNA (1)...(19): siRNA sense strand
aggagaaacugccagauga

SEQ ID NO: 594635 - RNA, 19 nt, Homo sapiens
  misc_RNA (1)...(19): siRNA sense strand
ggacaaggaguaauagaag

SEQ ID NO: 594636 - RNA, 19 nt, Homo sapiens
  misc_RNA (1)...(19): siRNA sense strand
aaagggacaaggaguaaua

SEQ ID NO: 594637 - RNA, 19 nt, Homo sapiens
  misc_RNA (1)...(19): siRNA sense strand
aggaggaguuuacaucuuu

SEQ ID NO: 594638 - RNA, 19 nt, Homo sapiens
  misc_RNA (1)...(19): siRNA sense strand
ggaaaucaaggaggaguuu

SEQ ID NO: 594639 - RNA, 19 nt, Homo sapiens
  misc_RNA (1)...(19): siRNA sense strand
aauagugacccaacaauaa

SEQ ID NO: 594640 - RNA, 19 nt, Homo sapiens
  misc_RNA (1)...(19): siRNA sense strand
guguauggauuaccucaaa

SEQ ID NO: 594641 - RNA, 19 nt, Homo sapiens
  misc_RNA (1)...(19): siRNA sense strand
uggaaacgauuauauaugg

SEQ ID NO: 594642 - RNA, 19 nt, Homo sapiens
  misc_RNA (1)...(19): siRNA sense strand
ggaaacgauuauauaugga

SEQ ID NO: 594643 - RNA, 19 nt, Homo sapiens
  misc_RNA (1)...(19): siRNA sense strand
ggaaggcucugaagaugcu

SEQ ID NO: 594644 - RNA, 19 nt, Homo sapiens
  misc_RNA (1)...(19): siRNA sense strand
caguaacccugcaagauau

SEQ ID NO: 594645 - RNA, 19 nt, Homo sapiens
  misc_RNA (1)...(19): siRNA sense strand
gaaacugccagaugaagug

SEQ ID NO: 594646 - RNA, 19 nt, Homo sapiens
  misc_RNA (1)...(19): siRNA sense strand
gacauggagugcuagaaga

SEQ ID NO: 594647 - RNA, 19 nt, Homo sapiens
  misc_RNA (1)...(19): siRNA sense strand
aggaauauauguccaugaa

SEQ ID NO: 594648 - RNA, 19 nt, Homo sapiens
  misc_RNA (1)...(19): siRNA sense strand
gaacaggaucuuuguagag

SEQ ID NO: 594649 - RNA, 19 nt, Homo sapiens
  misc_RNA (1)...(19): siRNA sense strand
gugcaagagugucuggaaa

SEQ ID NO: 594650 - RNA, 19 nt, Homo sapiens
  misc_RNA (1)...(19): siRNA sense strand
caagcagguugguguuuau

SEQ ID NO: 594651 - RNA, 19 nt, Homo sapiens
  misc_RNA (1)...(19): siRNA sense strand
gaaaucaaggaggaguuua

SEQ ID NO: 594652 - RNA, 19 nt, Homo sapiens
  misc_RNA (1)...(19): siRNA sense strand
ggaagaggacaauucauag

SEQ ID NO: 594653 - RNA, 19 nt, Homo sapiens
  misc_RNA (1)...(19): siRNA sense strand
uggcauggguuacuuugaa

SEQ ID NO: 594654 - RNA, 19 nt, Homo sapiens
  misc_RNA (1)...(19): siRNA sense strand
aaucauggaaacccaauua

SEQ ID NO: 594655 - RNA, 19 nt, Homo sapiens
  misc_RNA (1)...(19): siRNA sense strand
gagcaugucccaccaucaa

SEQ ID NO: 594656 - RNA, 19 nt, Homo sapiens
  misc_RNA (1)...(19): siRNA sense strand
aacaguaucuucaggagaa

SEQ ID NO: 594657 - RNA, 19 nt, Homo sapiens
  misc_RNA (1)...(19): siRNA sense strand
gagcagcuuguguauguaa

SEQ ID NO: 594658 - RNA, 19 nt, Homo sapiens
  misc_RNA (1)...(19): siRNA sense strand
gaaaguugcaauauacaca

SEQ ID NO: 594659 - RNA, 19 nt, Homo sapiens
  misc_RNA (1)...(19): siRNA sense strand
cugaacauuucuacaguaa

SEQ ID NO: 594660 - RNA, 19 nt, Homo sapiens
  misc_RNA (1)...(19): siRNA sense strand
ggauuuaugugcaugaaaa

SEQ ID NO: 594661 - RNA, 19 nt, Homo sapiens
  misc_RNA (1)...(19): siRNA sense strand
aauuguagcccuauuauug

SEQ ID NO: 594662 - RNA, 19 nt, Homo sapiens
  misc_RNA (1)...(19): siRNA sense strand
ggacauggagugcuagaag

SEQ ID NO: 594663 - RNA, 19 nt, Homo sapiens
  misc_RNA (1)...(19): siRNA sense strand
gcagguugguguuuauuuu

SEQ ID NO: 594664 - RNA, 19 nt, Homo sapiens
  misc_RNA (1)...(19): siRNA sense strand
aggaagaggacaauucaua

SEQ ID NO: 594665 - RNA, 19 nt, Homo sapiens
  misc_RNA (1)...(19): siRNA sense strand
ggaggaguuuacaucuuug

SEQ ID NO: 594666 - RNA, 19 nt, Homo sapiens
  misc_RNA (1)...(19): siRNA sense strand
guauggauuaccucaaaua

SEQ ID NO: 594667 - RNA, 19 nt, Homo sapiens
  misc_RNA (1)...(19): siRNA sense strand
cauaccaacuucguagaaa

SEQ ID NO: 594668 - RNA, 19 nt, Homo sapiens
  misc_RNA (1)...(19): siRNA sense strand
ggagaaacugccagaugaa

SEQ ID NO: 594669 - RNA, 19 nt, Homo sapiens
  misc_RNA (1)...(19): siRNA sense strand
gcaaugcauuagcaggaau

SEQ ID NO: 594670 - RNA, 19 nt, Homo sapiens
  misc_RNA (1)...(19): siRNA sense strand
gauggacgaggccuuauug

SEQ ID NO: 594671 - RNA, 19 nt, Homo sapiens
  misc_RNA (1)...(19): siRNA sense strand
aaauagugacccaacaaua

SEQ ID NO: 594672 - RNA, 19 nt, Homo sapiens
  misc_RNA (1)...(19): siRNA sense strand
caaugcacaccacugcuua

SEQ ID NO: 594673 - RNA, 19 nt, Homo sapiens
  misc_RNA (1)...(19): siRNA sense strand
ugaauauacucgcccuaug

SEQ ID NO: 594674 - RNA, 19 nt, Homo sapiens
  misc_RNA (1)...(19): siRNA sense strand
gggacaaggaguaauagaa

SEQ ID NO: 594675 - RNA, 19 nt, Homo sapiens
  misc_RNA (1)...(19): siRNA sense strand
cuacagugguucgauguga

SEQ ID NO: 594676 - RNA, 19 nt, Homo sapiens
  misc_RNA (1)...(19): siRNA sense strand
uagcaggcuuugaaguaaa

SEQ ID NO: 594677 - RNA, 19 nt, Homo sapiens
  misc_RNA (1)...(19): siRNA sense strand
uaggauagcaggcuuugaa

SEQ ID NO: 594678 - RNA, 19 nt, Homo sapiens
  misc_RNA (1)...(19): siRNA sense strand
uagcugggauuuggguuaa

SEQ ID NO: 594679 - RNA, 19 nt, Homo sapiens
  misc_RNA (1)...(19): siRNA sense strand
uauaaaggugcacauguaa

SEQ ID NO: 594680 - RNA, 19 nt, Homo sapiens
  misc_RNA (1)...(19): siRNA sense strand
ggcauggguuacuuugaaa

SEQ ID NO: 594681 - RNA, 19 nt, Homo sapiens
  misc_RNA (1)...(19): siRNA sense strand
ggaaaguggcagacaaagu

SEQ ID NO: 594682 - RNA, 19 nt, Homo sapiens
  misc_RNA (1)...(19): siRNA sense strand
gaagaugcuuauguuggau

SEQ ID NO: 594683 - RNA, 19 nt, Homo sapiens
  misc_RNA (1)...(19): siRNA sense strand
cagcgugucccacaaagaa

SEQ ID NO: 594684 - RNA, 19 nt, Homo sapiens
  misc_RNA (1)...(19): siRNA sense strand
agaggacaauucauagaga

SEQ ID NO: 594685 - RNA, 19 nt, Homo sapiens
  misc_RNA (1)...(19): siRNA sense strand
gcagacuggaggaauauau

SEQ ID NO: 594686 - RNA, 19 nt, Homo sapiens
  misc_RNA (1)...(19): siRNA sense strand
ggauauaugacaauaaggu

SEQ ID NO: 594687 - RNA, 19 nt, Homo sapiens
  misc_RNA (1)...(19): siRNA sense strand
gcucugaagaugcuuaugu

SEQ ID NO: 594688 - RNA, 19 nt, Homo sapiens
  misc_RNA (1)...(19): siRNA sense strand
gcuagaagacaaugauauc

SEQ ID NO: 594689 - RNA, 19 nt, Homo sapiens
  misc_RNA (1)...(19): siRNA sense strand
ggugauggacgaggccuua

SEQ ID NO: 594690 - RNA, 19 nt, Homo sapiens
  misc_RNA (1)...(19): siRNA sense strand
caacuuugcagguguaugg

SEQ ID NO: 594691 - RNA, 19 nt, Homo sapiens
  misc_RNA (1)...(19): siRNA sense strand
cagggaauauaugaggaua

SEQ ID NO: 594692 - RNA, 19 nt, Homo sapiens
  misc_RNA (1)...(19): siRNA sense strand
uacaguugguucugcagua

SEQ ID NO: 594693 - RNA, 19 nt, Homo sapiens
  misc_RNA (1)...(19): siRNA sense strand
agaagaaaccggauacaca

SEQ ID NO: 594694 - RNA, 19 nt, Homo sapiens
  misc_RNA (1)...(19): siRNA sense strand
gaaaagggacaaggaguaa

SEQ ID NO: 594695 - RNA, 19 nt, Homo sapiens
  misc_RNA (1)...(19): siRNA sense strand
auagcaggcuuugaaguaa

SEQ ID NO: 594696 - RNA, 19 nt, Homo sapiens
  misc_RNA (1)...(19): siRNA sense strand
gcaauauacacagaaauag

SEQ ID NO: 594697 - RNA, 19 nt, Homo sapiens
  misc_RNA (1)...(19): siRNA sense strand
guugcaauauacacagaaa

SEQ ID NO: 594698 - RNA, 19 nt, Homo sapiens
  misc_RNA (1)...(19): siRNA sense strand
ggaauauauguccaugaaa

SEQ ID NO: 594699 - RNA, 19 nt, Homo sapiens
  misc_RNA (1)...(19): siRNA sense strand
gcauuagcaggaauucaaa

SEQ ID NO: 594700 - RNA, 19 nt, Homo sapiens
  misc_RNA (1)...(19): siRNA sense strand
aaaggaagaggacaauuca

SEQ ID NO: 594701 - RNA, 19 nt, Homo sapiens
  misc_RNA (1)...(19): siRNA sense strand
ggacuuaucuuuguucauu

SEQ ID NO: 594702 - RNA, 19 nt, Homo sapiens
  misc_RNA (1)...(19): siRNA sense strand
guauaaaggugcacaugua

SEQ ID NO: 594703 - RNA, 19 nt, Homo sapiens
  misc_RNA (1)...(19): siRNA sense strand
gcaagcagguugguguuua

SEQ ID NO: 594704 - RNA, 19 nt, Homo sapiens
  misc_RNA (1)...(19): siRNA sense strand
ucagugaacuugcuaauga

SEQ ID NO: 594705 - RNA, 19 nt, Homo sapiens
  misc_RNA (1)...(19): siRNA sense strand
gaaaguggcagacaaaguu

SEQ ID NO: 594706 - RNA, 19 nt, Homo sapiens
  misc_RNA (1)...(19): siRNA sense strand
cauggaaacccaauuauua

SEQ ID NO: 594707 - RNA, 19 nt, Homo sapiens
  misc_RNA (1)...(19): siRNA sense strand
gcacaccacugcuuagaga

SEQ ID NO: 594708 - RNA, 19 nt, Homo sapiens
  misc_RNA (1)...(19): siRNA sense strand
ccaaaucccuggaaagaga

SEQ ID NO: 594709 - RNA, 19 nt, Homo sapiens
  misc_RNA (1)...(19): siRNA sense strand
ggaaaauucuaccagauua

SEQ ID NO: 594710 - RNA, 19 nt, Homo sapiens
  misc_RNA (1)...(19): siRNA sense strand
gauagcaggcuuugaagua

SEQ ID NO: 594711 - RNA, 19 nt, Homo sapiens
  misc_RNA (1)...(19): siRNA sense strand
gaauauacucgcccuauga

SEQ ID NO: 594712 - RNA, 19 nt, Homo sapiens
  misc_RNA (1)...(19): siRNA sense strand
ggaacaggaucuuuguaga

SEQ ID NO: 594713 - RNA, 19 nt, Homo sapiens
  misc_RNA (1)...(19): siRNA sense strand
guaaauuguagcccuauua

SEQ ID NO: 594714 - RNA, 19 nt, Homo sapiens
  misc_RNA (1)...(19): siRNA sense strand
gcagacaaaguuauaauug

SEQ ID NO: 594715 - RNA, 19 nt, Homo sapiens
  misc_RNA (1)...(19): siRNA sense strand
uagagcagcuuguguaugu

SEQ ID NO: 594716 - RNA, 19 nt, Homo sapiens
  misc_RNA (1)...(19): siRNA sense strand
gaacagcgugucccacaaa

SEQ ID NO: 594717 - RNA, 19 nt, Homo sapiens
  misc_RNA (1)...(19): siRNA sense strand
caaauuaggacaaacaguu

SEQ ID NO: 594718 - RNA, 19 nt, Homo sapiens
  misc_RNA (1)...(19): siRNA sense strand
cagaugaagugguucuaaa

SEQ ID NO: 594719 - RNA, 19 nt, Homo sapiens
  misc_RNA (1)...(19): siRNA sense strand
gcugaacauuucuacagua

SEQ ID NO: 594720 - RNA, 19 nt, Homo sapiens
  misc_RNA (1)...(19): siRNA sense strand
gggaauauaugaggauaau

SEQ ID NO: 594721 - RNA, 19 nt, Homo sapiens
  misc_RNA (1)...(19): siRNA sense strand
aaacaacuuugcaggugua

SEQ ID NO: 594722 - RNA, 19 nt, Homo sapiens
  misc_RNA (1)...(19): siRNA sense strand
caauggacauggagugcua

SEQ ID NO: 594723 - RNA, 19 nt, Homo sapiens
  misc_RNA (1)...(19): siRNA sense strand
gaggacaauucauagagaa

SEQ ID NO: 594724 - RNA, 19 nt, Homo sapiens
  misc_RNA (1)...(19): siRNA sense strand
ggacgaggccuuauugaag

SEQ ID NO: 594725 - RNA, 19 nt, Homo sapiens
  misc_RNA (1)...(19): siRNA sense strand
gaagaggacaauucauaga

SEQ ID NO: 594726 - RNA, 19 nt, Homo sapiens
  misc_RNA (1)...(19): siRNA sense strand
uggauuaccucaaauagug

SEQ ID NO: 594727 - RNA, 19 nt, Homo sapiens
  misc_RNA (1)...(19): siRNA sense strand
acaguaacccugcaagaua

SEQ ID NO: 594728 - RNA, 19 nt, Homo sapiens
  misc_RNA (1)...(19): siRNA sense strand
ugacaaaucugcacaacac

SEQ ID NO: 594729 - RNA, 19 nt, Homo sapiens
  misc_RNA (1)...(19): siRNA sense strand
ugaagaugcuuauguugga

SEQ ID NO: 594730 - RNA, 19 nt, Homo sapiens
  misc_RNA (1)...(19): siRNA sense strand
gaacauuucuacaguaacc

SEQ ID NO: 594731 - RNA, 19 nt, Homo sapiens
  misc_RNA (1)...(19): siRNA sense strand
gacaaggaguaauagaaga

SEQ ID NO: 594732 - RNA, 19 nt, Homo sapiens
  misc_RNA (1)...(19): siRNA sense strand
guuuaacccugaugacaaa

SEQ ID NO: 594733 - RNA, 19 nt, Homo sapiens
  misc_RNA (1)...(19): siRNA sense strand
caccacugcuuagagauua

SEQ ID NO: 594734 - RNA, 19 nt, Homo sapiens
  misc_RNA (1)...(19): siRNA sense strand
aggagaaacugccagauga

SEQ ID NO: 594735 - RNA, 19 nt, Homo sapiens
  misc_RNA (1)...(19): siRNA sense strand
ggacaaggaguaauagaag

SEQ ID NO: 594736 - RNA, 19 nt, Homo sapiens
  misc_RNA (1)...(19): siRNA sense strand
aaagggacaaggaguaaua

SEQ ID NO: 594737 - RNA, 19 nt, Homo sapiens
  misc_RNA (1)...(19): siRNA sense strand
aggaggaguuuacaucuuu

SEQ ID NO: 594738 - RNA, 19 nt, Homo sapiens
  misc_RNA (1)...(19): siRNA sense strand
ggaaaucaaggaggaguuu

SEQ ID NO: 594739 - RNA, 19 nt, Homo sapiens
  misc_RNA (1)...(19): siRNA sense strand
aauagugacccaacaauaa

SEQ ID NO: 594740 - RNA, 19 nt, Homo sapiens
  misc_RNA (1)...(19): siRNA sense strand
guguauggauuaccucaaa

SEQ ID NO: 594741 - RNA, 19 nt, Homo sapiens
  misc_RNA (1)...(19): siRNA sense strand
uggaaacgauuauauaugg

SEQ ID NO: 594742 - RNA, 19 nt, Homo sapiens
  misc_RNA (1)...(19): siRNA sense strand
ggaaacgauuauauaugga

SEQ ID NO: 594743 - RNA, 19 nt, Homo sapiens
  misc_RNA (1)...(19): siRNA sense strand
ggaaggcucugaagaugcu

SEQ ID NO: 594744 - RNA, 19 nt, Homo sapiens
  misc_RNA (1)...(19): siRNA sense strand
caguaacccugcaagauau

SEQ ID NO: 594745 - RNA, 19 nt, Homo sapiens
  misc_RNA (1)...(19): siRNA sense strand
gaaacugccagaugaagug

SEQ ID NO: 594746 - RNA, 19 nt, Homo sapiens
  misc_RNA (1)...(19): siRNA sense strand
gacauggagugcuagaaga

SEQ ID NO: 594747 - RNA, 19 nt, Homo sapiens
  misc_RNA (1)...(19): siRNA sense strand
aggaauauauguccaugaa

SEQ ID NO: 594748 - RNA, 19 nt, Homo sapiens
  misc_RNA (1)...(19): siRNA sense strand
gaacaggaucuuuguagag

SEQ ID NO: 594749 - RNA, 19 nt, Homo sapiens
  misc_RNA (1)...(19): siRNA sense strand
gugcaagagugucuggaaa

SEQ ID NO: 594750 - RNA, 19 nt, Homo sapiens
  misc_RNA (1)...(19): siRNA sense strand
caagcagguugguguuuau

SEQ ID NO: 594751 - RNA, 19 nt, Homo sapiens
  misc_RNA (1)...(19): siRNA sense strand
gaaaucaaggaggaguuua

SEQ ID NO: 594752 - RNA, 19 nt, Homo sapiens
  misc_RNA (1)...(19): siRNA sense strand
ggaagaggacaauucauag

SEQ ID NO: 594753 - RNA, 19 nt, Homo sapiens
  misc_RNA (1)...(19): siRNA sense strand
uggcauggguuacuuugaa

SEQ ID NO: 594754 - RNA, 19 nt, Homo sapiens
  misc_RNA (1)...(19): siRNA sense strand
aaucauggaaacccaauua

SEQ ID NO: 594755 - RNA, 19 nt, Homo sapiens
  misc_RNA (1)...(19): siRNA sense strand
gagcaugucccaccaucaa

SEQ ID NO: 594756 - RNA, 19 nt, Homo sapiens
  misc_RNA (1)...(19): siRNA sense strand
aacaguaucuucaggagaa

SEQ ID NO: 594757 - RNA, 19 nt, Homo sapiens
  misc_RNA (1)...(19): siRNA sense strand
gagcagcuuguguauguaa

SEQ ID NO: 594758 - RNA, 19 nt, Homo sapiens
  misc_RNA (1)...(19): siRNA sense strand
gaaaguugcaauauacaca

SEQ ID NO: 594759 - RNA, 19 nt, Homo sapiens
  misc_RNA (1)...(19): siRNA sense strand
cugaacauuucuacaguaa

SEQ ID NO: 594760 - RNA, 19 nt, Homo sapiens
  misc_RNA (1)...(19): siRNA sense strand
ggauuuaugugcaugaaaa

SEQ ID NO: 594761 - RNA, 19 nt, Homo sapiens
  misc_RNA (1)...(19): siRNA sense strand
aauuguagcccuauuauug

SEQ ID NO: 594762 - RNA, 19 nt, Homo sapiens
  misc_RNA (1)...(19): siRNA sense strand
ggacauggagugcuagaag

SEQ ID NO: 594763 - RNA, 19 nt, Homo sapiens
  misc_RNA (1)...(19): siRNA sense strand
gcagguugguguuuauuuu

SEQ ID NO: 594764 - RNA, 19 nt, Homo sapiens
  misc_RNA (1)...(19): siRNA sense strand
aggaagaggacaauucaua

SEQ ID NO: 594765 - RNA, 19 nt, Homo sapiens
  misc_RNA (1)...(19): siRNA sense strand
ggaggaguuuacaucuuug

SEQ ID NO: 594766 - RNA, 19 nt, Homo sapiens
  misc_RNA (1)...(19): siRNA sense strand
guauggauuaccucaaaua

SEQ ID NO: 594767 - RNA, 19 nt, Homo sapiens
  misc_RNA (1)...(19): siRNA sense strand
cauaccaacuucguagaaa

SEQ ID NO: 594768 - RNA, 19 nt, Homo sapiens
  misc_RNA (1)...(19): siRNA sense strand
ggagaaacugccagaugaa

SEQ ID NO: 594769 - RNA, 19 nt, Homo sapiens
  misc_RNA (1)...(19): siRNA sense strand
gcaaugcauuagcaggaau

SEQ ID NO: 594770 - RNA, 19 nt, Homo sapiens
  misc_RNA (1)...(19): siRNA sense strand
gauggacgaggccuuauug

SEQ ID NO: 594771 - RNA, 19 nt, Homo sapiens
  misc_RNA (1)...(19): siRNA sense strand
aaauagugacccaacaaua

SEQ ID NO: 594772 - RNA, 19 nt, Homo sapiens
  misc_RNA (1)...(19): siRNA sense strand
caaugcacaccacugcuua

SEQ ID NO: 594773 - RNA, 19 nt, Homo sapiens
  misc_RNA (1)...(19): siRNA sense strand
ugaauauacucgcccuaug

SEQ ID NO: 594774 - RNA, 19 nt, Homo sapiens
  misc_RNA (1)...(19): siRNA sense strand
gggacaaggaguaauagaa

SEQ ID NO: 594775 - RNA, 19 nt, Homo sapiens
  misc_RNA (1)...(19): siRNA sense strand
cuacagugguucgauguga

SEQ ID NO: 594776 - RNA, 19 nt, Homo sapiens
  misc_RNA (1)...(19): siRNA sense strand
uagcaggcuuugaaguaaa

SEQ ID NO: 594777 - RNA, 19 nt, Homo sapiens
  misc_RNA (1)...(19): siRNA sense strand
uaggauagcaggcuuugaa

SEQ ID NO: 594778 - RNA, 19 nt, Homo sapiens
  misc_RNA (1)...(19): siRNA sense strand
uagcugggauuuggguuaa

SEQ ID NO: 594779 - RNA, 19 nt, Homo sapiens
  misc_RNA (1)...(19): siRNA sense strand
uauaaaggugcacauguaa

SEQ ID NO: 594780 - RNA, 19 nt, Homo sapiens
  misc_RNA (1)...(19): siRNA sense strand
ggcauggguuacuuugaaa

SEQ ID NO: 594781 - RNA, 19 nt, Homo sapiens
  misc_RNA (1)...(19): siRNA sense strand
ggaaaguggcagacaaagu

SEQ ID NO: 594782 - RNA, 19 nt, Homo sapiens
  misc_RNA (1)...(19): siRNA sense strand
gaagaugcuuauguuggau

SEQ ID NO: 594783 - RNA, 19 nt, Homo sapiens
  misc_RNA (1)...(19): siRNA sense strand
cagcgugucccacaaagaa

SEQ ID NO: 594784 - RNA, 19 nt, Homo sapiens
  misc_RNA (1)...(19): siRNA sense strand
agaggacaauucauagaga

SEQ ID NO: 594785 - RNA, 19 nt, Homo sapiens
  misc_RNA (1)...(19): siRNA sense strand
gcagacuggaggaauauau

SEQ ID NO: 594786 - RNA, 19 nt, Homo sapiens
  misc_RNA (1)...(19): siRNA sense strand
ggauauaugacaauaaggu

SEQ ID NO: 594787 - RNA, 19 nt, Homo sapiens
  misc_RNA (1)...(19): siRNA sense strand
gcucugaagaugcuuaugu

SEQ ID NO: 594788 - RNA, 19 nt, Homo sapiens
  misc_RNA (1)...(19): siRNA sense strand
gcuagaagacaaugauauc

SEQ ID NO: 594789 - RNA, 19 nt, Homo sapiens
  misc_RNA (1)...(19): siRNA sense strand
ggugauggacgaggccuua

SEQ ID NO: 594790 - RNA, 19 nt, Homo sapiens
  misc_RNA (1)...(19): siRNA sense strand
caacuuugcagguguaugg

SEQ ID NO: 594791 - RNA, 19 nt, Homo sapiens
  misc_RNA (1)...(19): siRNA sense strand
cagggaauauaugaggaua

SEQ ID NO: 594792 - RNA, 19 nt, Homo sapiens
  misc_RNA (1)...(19): siRNA sense strand
uacaguugguucugcagua

SEQ ID NO: 594793 - RNA, 19 nt, Homo sapiens
  misc_RNA (1)...(19): siRNA sense strand
agaagaaaccggauacaca

SEQ ID NO: 594794 - RNA, 19 nt, Homo sapiens
  misc_RNA (1)...(19): siRNA sense strand
gaaaagggacaaggaguaa

SEQ ID NO: 594795 - RNA, 19 nt, Homo sapiens
  misc_RNA (1)...(19): siRNA sense strand
auagcaggcuuugaaguaa

SEQ ID NO: 594796 - RNA, 19 nt, Homo sapiens
  misc_RNA (1)...(19): siRNA sense strand
gcaauauacacagaaauag

SEQ ID NO: 594797 - RNA, 19 nt, Homo sapiens
  misc_RNA (1)...(19): siRNA sense strand
guugcaauauacacagaaa

SEQ ID NO: 594798 - RNA, 19 nt, Homo sapiens
  misc_RNA (1)...(19): siRNA sense strand
ggaauauauguccaugaaa

SEQ ID NO: 594799 - RNA, 19 nt, Homo sapiens
  misc_RNA (1)...(19): siRNA sense strand
gcauuagcaggaauucaaa

SEQ ID NO: 594800 - RNA, 19 nt, Homo sapiens
  misc_RNA (1)...(19): siRNA sense strand
aaaggaagaggacaauuca

SEQ ID NO: 594801 - RNA, 19 nt, Homo sapiens
  misc_RNA (1)...(19): siRNA sense strand
ggacuuaucuuuguucauu

SEQ ID NO: 594802 - RNA, 19 nt, Homo sapiens
  misc_RNA (1)...(19): siRNA sense strand
guauaaaggugcacaugua

SEQ ID NO: 594803 - RNA, 19 nt, Homo sapiens
  misc_RNA (1)...(19): siRNA sense strand
gcaagcagguugguguuua

SEQ ID NO: 594804 - RNA, 19 nt, Homo sapiens
  misc_RNA (1)...(19): siRNA sense strand
ucagugaacuugcuaauga

SEQ ID NO: 594805 - RNA, 19 nt, Homo sapiens
  misc_RNA (1)...(19): siRNA sense strand
gaaaguggcagacaaaguu

SEQ ID NO: 594806 - RNA, 19 nt, Homo sapiens
  misc_RNA (1)...(19): siRNA sense strand
cauggaaacccaauuauua

SEQ ID NO: 594807 - RNA, 19 nt, Homo sapiens
  misc_RNA (1)...(19): siRNA sense strand
gcacaccacugcuuagaga

SEQ ID NO: 594808 - RNA, 19 nt, Homo sapiens
  misc_RNA (1)...(19): siRNA sense strand
ccaaaucccuggaaagaga

SEQ ID NO: 594809 - RNA, 19 nt, Homo sapiens
  misc_RNA (1)...(19): siRNA sense strand
ggaaaauucuaccagauua

SEQ ID NO: 594810 - RNA, 19 nt, Homo sapiens
  misc_RNA (1)...(19): siRNA sense strand
gauagcaggcuuugaagua

SEQ ID NO: 594811 - RNA, 19 nt, Homo sapiens
  misc_RNA (1)...(19): siRNA sense strand
gaauauacucgcccuauga

SEQ ID NO: 594812 - RNA, 19 nt, Homo sapiens
  misc_RNA (1)...(19): siRNA sense strand
ggaacaggaucuuuguaga

SEQ ID NO: 594813 - RNA, 19 nt, Homo sapiens
  misc_RNA (1)...(19): siRNA sense strand
guaaauuguagcccuauua

SEQ ID NO: 594814 - RNA, 19 nt, Homo sapiens
  misc_RNA (1)...(19): siRNA sense strand
gcagacaaaguuauaauug

SEQ ID NO: 594815 - RNA, 19 nt, Homo sapiens
  misc_RNA (1)...(19): siRNA sense strand
uagagcagcuuguguaugu

SEQ ID NO: 594816 - RNA, 19 nt, Homo sapiens
  misc_RNA (1)...(19): siRNA sense strand
gaacagcgugucccacaaa

SEQ ID NO: 594817 - RNA, 19 nt, Homo sapiens
  misc_RNA (1)...(19): siRNA sense strand
caaauuaggacaaacaguu

SEQ ID NO: 594818 - RNA, 19 nt, Homo sapiens
  misc_RNA (1)...(19): siRNA sense strand
cagaugaagugguucuaaa

SEQ ID NO: 594819 - RNA, 19 nt, Homo sapiens
  misc_RNA (1)...(19): siRNA sense strand
gcugaacauuucuacagua

SEQ ID NO: 594820 - RNA, 19 nt, Homo sapiens
  misc_RNA (1)...(19): siRNA sense strand
gggaauauaugaggauaau

SEQ ID NO: 594821 - RNA, 19 nt, Homo sapiens
  misc_RNA (1)...(19): siRNA sense strand
aaacaacuuugcaggugua

SEQ ID NO: 594822 - RNA, 19 nt, Homo sapiens
  misc_RNA (1)...(19): siRNA sense strand
caauggacauggagugcua

SEQ ID NO: 594823 - RNA, 19 nt, Homo sapiens
  misc_RNA (1)...(19): siRNA sense strand
gaggacaauucauagagaa

SEQ ID NO: 594824 - RNA, 19 nt, Homo sapiens
  misc_RNA (1)...(19): siRNA sense strand
ggacgaggccuuauugaag

SEQ ID NO: 594825 - RNA, 19 nt, Homo sapiens
  misc_RNA (1)...(19): siRNA sense strand
gaagaggacaauucauaga

SEQ ID NO: 594826 - RNA, 19 nt, Homo sapiens
  misc_RNA (1)...(19): siRNA sense strand
uggauuaccucaaauagug

SEQ ID NO: 594827 - RNA, 19 nt, Homo sapiens
  misc_RNA (1)...(19): siRNA sense strand
acaguaacccugcaagaua

SEQ ID NO: 594828 - RNA, 19 nt, Homo sapiens
  misc_RNA (1)...(19): siRNA sense strand
ugacaaaucugcacaacac

SEQ ID NO: 594829 - RNA, 19 nt, Homo sapiens
  misc_RNA (1)...(19): siRNA sense strand
ugaagaugcuuauguugga

SEQ ID NO: 594830 - RNA, 19 nt, Homo sapiens
  misc_RNA (1)...(19): siRNA sense strand
gaacauuucuacaguaacc

SEQ ID NO: 594831 - RNA, 19 nt, Homo sapiens
  misc_RNA (1)...(19): siRNA sense strand
gacaaggaguaauagaaga

SEQ ID NO: 594832 - RNA, 19 nt, Homo sapiens
  misc_RNA (1)...(19): siRNA sense strand
guuuaacccugaugacaaa

SEQ ID NO: 594833 - RNA, 19 nt, Homo sapiens
  misc_RNA (1)...(19): siRNA sense strand
caccacugcuuagagauua

SEQ ID NO: 594834 - RNA, 19 nt, Homo sapiens
  misc_RNA (1)...(19): siRNA sense strand
aggagaaacugccagauga

SEQ ID NO: 594835 - RNA, 19 nt, Homo sapiens
  misc_RNA (1)...(19): siRNA sense strand
ggacaaggaguaauagaag

SEQ ID NO: 594836 - RNA, 19 nt, Homo sapiens
  misc_RNA (1)...(19): siRNA sense strand
aaagggacaaggaguaaua

SEQ ID NO: 594837 - RNA, 19 nt, Homo sapiens
  misc_RNA (1)...(19): siRNA sense strand
aggaggaguuuacaucuuu

SEQ ID NO: 594838 - RNA, 19 nt, Homo sapiens
  misc_RNA (1)...(19): siRNA sense strand
ggaaaucaaggaggaguuu

SEQ ID NO: 594839 - RNA, 19 nt, Homo sapiens
  misc_RNA (1)...(19): siRNA sense strand
aauagugacccaacaauaa

SEQ ID NO: 594840 - RNA, 19 nt, Homo sapiens
  misc_RNA (1)...(19): siRNA sense strand
guguauggauuaccucaaa

SEQ ID NO: 594841 - RNA, 19 nt, Homo sapiens
  misc_RNA (1)...(19): siRNA sense strand
uggaaacgauuauauaugg

SEQ ID NO: 594842 - RNA, 19 nt, Homo sapiens
  misc_RNA (1)...(19): siRNA sense strand
ggaaacgauuauauaugga

SEQ ID NO: 594843 - RNA, 19 nt, Homo sapiens
  misc_RNA (1)...(19): siRNA sense strand
ggaaggcucugaagaugcu

SEQ ID NO: 594844 - RNA, 19 nt, Homo sapiens
  misc_RNA (1)...(19): siRNA sense strand
caguaacccugcaagauau

SEQ ID NO: 594845 - RNA, 19 nt, Homo sapiens
  misc_RNA (1)...(19): siRNA sense strand
gaaacugccagaugaagug

SEQ ID NO: 594846 - RNA, 19 nt, Homo sapiens
  misc_RNA (1)...(19): siRNA sense strand
gacauggagugcuagaaga

SEQ ID NO: 594847 - RNA, 19 nt, Homo sapiens
  misc_RNA (1)...(19): siRNA sense strand
aggaauauauguccaugaa

SEQ ID NO: 594848 - RNA, 19 nt, Homo sapiens
  misc_RNA (1)...(19): siRNA sense strand
gaacaggaucuuuguagag

SEQ ID NO: 594849 - RNA, 19 nt, Homo sapiens
  misc_RNA (1)...(19): siRNA sense strand
gugcaagagugucuggaaa

SEQ ID NO: 594850 - RNA, 19 nt, Homo sapiens
  misc_RNA (1)...(19): siRNA sense strand
caagcagguugguguuuau

SEQ ID NO: 594851 - RNA, 19 nt, Homo sapiens
  misc_RNA (1)...(19): siRNA sense strand
gaaaucaaggaggaguuua

SEQ ID NO: 594852 - RNA, 19 nt, Homo sapiens
  misc_RNA (1)...(19): siRNA sense strand
ggaagaggacaauucauag

SEQ ID NO: 594853 - RNA, 19 nt, Homo sapiens
  misc_RNA (1)...(19): siRNA sense strand
uggcauggguuacuuugaa

SEQ ID NO: 594854 - RNA, 19 nt, Homo sapiens
  misc_RNA (1)...(19): siRNA sense strand
aaucauggaaacccaauua

SEQ ID NO: 594855 - RNA, 19 nt, Homo sapiens
  misc_RNA (1)...(19): siRNA sense strand
gagcaugucccaccaucaa

SEQ ID NO: 594856 - RNA, 19 nt, Homo sapiens
  misc_RNA (1)...(19): siRNA sense strand
aacaguaucuucaggagaa

SEQ ID NO: 594857 - RNA, 19 nt, Homo sapiens
  misc_RNA (1)...(19): siRNA sense strand
gagcagcuuguguauguaa

SEQ ID NO: 594858 - RNA, 19 nt, Homo sapiens
  misc_RNA (1)...(19): siRNA sense strand
gaaaguugcaauauacaca

SEQ ID NO: 594859 - RNA, 19 nt, Homo sapiens
  misc_RNA (1)...(19): siRNA sense strand
cugaacauuucuacaguaa

SEQ ID NO: 594860 - RNA, 19 nt, Homo sapiens
  misc_RNA (1)...(19): siRNA sense strand
ggauuuaugugcaugaaaa

SEQ ID NO: 594861 - RNA, 19 nt, Homo sapiens
  misc_RNA (1)...(19): siRNA sense strand
aauuguagcccuauuauug

SEQ ID NO: 594862 - RNA, 19 nt, Homo sapiens
  misc_RNA (1)...(19): siRNA sense strand
ggacauggagugcuagaag

SEQ ID NO: 594863 - RNA, 19 nt, Homo sapiens
  misc_RNA (1)...(19): siRNA sense strand
gcagguugguguuuauuuu

SEQ ID NO: 594864 - RNA, 19 nt, Homo sapiens
  misc_RNA (1)...(19): siRNA sense strand
aggaagaggacaauucaua

SEQ ID NO: 594865 - RNA, 19 nt, Homo sapiens
  misc_RNA (1)...(19): siRNA sense strand
ggaggaguuuacaucuuug

SEQ ID NO: 594866 - RNA, 19 nt, Homo sapiens
  misc_RNA (1)...(19): siRNA sense strand
guauggauuaccucaaaua

SEQ ID NO: 594867 - RNA, 19 nt, Homo sapiens
  misc_RNA (1)...(19): siRNA sense strand
cauaccaacuucguagaaa

SEQ ID NO: 594868 - RNA, 19 nt, Homo sapiens
  misc_RNA (1)...(19): siRNA sense strand
ggagaaacugccagaugaa

SEQ ID NO: 594869 - RNA, 19 nt, Homo sapiens
  misc_RNA (1)...(19): siRNA sense strand
gcaaugcauuagcaggaau

SEQ ID NO: 594870 - RNA, 19 nt, Homo sapiens
  misc_RNA (1)...(19): siRNA sense strand
gauggacgaggccuuauug

SEQ ID NO: 594871 - RNA, 19 nt, Homo sapiens
  misc_RNA (1)...(19): siRNA sense strand
aaauagugacccaacaaua

SEQ ID NO: 594872 - RNA, 19 nt, Homo sapiens
  misc_RNA (1)...(19): siRNA sense strand
caaugcacaccacugcuua

SEQ ID NO: 594873 - RNA, 19 nt, Homo sapiens
  misc_RNA (1)...(19): siRNA sense strand
ugaauauacucgcccuaug

SEQ ID NO: 594874 - RNA, 19 nt, Homo sapiens
  misc_RNA (1)...(19): siRNA sense strand
gggacaaggaguaauagaa

SEQ ID NO: 594875 - RNA, 19 nt, Homo sapiens
  misc_RNA (1)...(19): siRNA sense strand
cuacagugguucgauguga

SEQ ID NO: 594876 - RNA, 19 nt, Homo sapiens
  misc_RNA (1)...(19): siRNA sense strand
uagcaggcuuugaaguaaa

SEQ ID NO: 594877 - RNA, 19 nt, Homo sapiens
  misc_RNA (1)...(19): siRNA sense strand
uaggauagcaggcuuugaa

SEQ ID NO: 594878 - RNA, 19 nt, Homo sapiens
  misc_RNA (1)...(19): siRNA sense strand
uagcugggauuuggguuaa

SEQ ID NO: 594879 - RNA, 19 nt, Homo sapiens
  misc_RNA (1)...(19): siRNA sense strand
uauaaaggugcacauguaa

SEQ ID NO: 594880 - RNA, 19 nt, Homo sapiens
  misc_RNA (1)...(19): siRNA sense strand
ggcauggguuacuuugaaa

SEQ ID NO: 594881 - RNA, 19 nt, Homo sapiens
  misc_RNA (1)...(19): siRNA sense strand
ggaaaguggcagacaaagu

SEQ ID NO: 594882 - RNA, 19 nt, Homo sapiens
  misc_RNA (1)...(19): siRNA sense strand
gaagaugcuuauguuggau

SEQ ID NO: 594883 - RNA, 19 nt, Homo sapiens
  misc_RNA (1)...(19): siRNA sense strand
cagcgugucccacaaagaa

SEQ ID NO: 594884 - RNA, 19 nt, Homo sapiens
  misc_RNA (1)...(19): siRNA sense strand
agaggacaauucauagaga

SEQ ID NO: 594885 - RNA, 19 nt, Homo sapiens
  misc_RNA (1)...(19): siRNA sense strand
gcagacuggaggaauauau

SEQ ID NO: 594886 - RNA, 19 nt, Homo sapiens
  misc_RNA (1)...(19): siRNA sense strand
ggauauaugacaauaaggu

SEQ ID NO: 594887 - RNA, 19 nt, Homo sapiens
  misc_RNA (1)...(19): siRNA sense strand
gcucugaagaugcuuaugu

SEQ ID NO: 594888 - RNA, 19 nt, Homo sapiens
  misc_RNA (1)...(19): siRNA sense strand
gcuagaagacaaugauauc

SEQ ID NO: 594889 - RNA, 19 nt, Homo sapiens
  misc_RNA (1)...(19): siRNA sense strand
ggugauggacgaggccuua

SEQ ID NO: 594890 - RNA, 19 nt, Homo sapiens
  misc_RNA (1)...(19): siRNA sense strand
caacuuugcagguguaugg

SEQ ID NO: 594891 - RNA, 19 nt, Homo sapiens
  misc_RNA (1)...(19): siRNA sense strand
cagggaauauaugaggaua

SEQ ID NO: 594892 - RNA, 19 nt, Homo sapiens
  misc_RNA (1)...(19): siRNA sense strand
uacaguugguucugcagua

SEQ ID NO: 594893 - RNA, 19 nt, Homo sapiens
  misc_RNA (1)...(19): siRNA sense strand
agaagaaaccggauacaca

SEQ ID NO: 594894 - RNA, 19 nt, Homo sapiens
  misc_RNA (1)...(19): siRNA sense strand
gaaaagggacaaggaguaa

SEQ ID NO: 594895 - RNA, 19 nt, Homo sapiens
  misc_RNA (1)...(19): siRNA sense strand
auagcaggcuuugaaguaa

SEQ ID NO: 594896 - RNA, 19 nt, Homo sapiens
  misc_RNA (1)...(19): siRNA sense strand
gcaauauacacagaaauag

SEQ ID NO: 594897 - RNA, 19 nt, Homo sapiens
  misc_RNA (1)...(19): siRNA sense strand
guugcaauauacacagaaa

SEQ ID NO: 594898 - RNA, 19 nt, Homo sapiens
  misc_RNA (1)...(19): siRNA sense strand
ggaauauauguccaugaaa

SEQ ID NO: 594899 - RNA, 19 nt, Homo sapiens
  misc_RNA (1)...(19): siRNA sense strand
gcauuagcaggaauucaaa

SEQ ID NO: 594900 - RNA, 19 nt, Homo sapiens
  misc_RNA (1)...(19): siRNA sense strand
aaaggaagaggacaauuca

SEQ ID NO: 594901 - RNA, 19 nt, Homo sapiens
  misc_RNA (1)...(19): siRNA sense strand
gaauaaacauguacuguga

SEQ ID NO: 594902 - RNA, 19 nt, Homo sapiens
  misc_RNA (1)...(19): siRNA sense strand
gcaauugacuccucuaaga

SEQ ID NO: 594903 - RNA, 19 nt, Homo sapiens
  misc_RNA (1)...(19): siRNA sense strand
gagaggaaaucaucuguuu

SEQ ID NO: 594904 - RNA, 19 nt, Homo sapiens
  misc_RNA (1)...(19): siRNA sense strand
gaacagagcaaaguuuaua

SEQ ID NO: 594905 - RNA, 19 nt, Homo sapiens
  misc_RNA (1)...(19): siRNA sense strand
caauagagaugaugaaaug

SEQ ID NO: 594906 - RNA, 19 nt, Homo sapiens
  misc_RNA (1)...(19): siRNA sense strand
caaguggacuguucacaua

SEQ ID NO: 594907 - RNA, 19 nt, Homo sapiens
  misc_RNA (1)...(19): siRNA sense strand
ggaaagauaucgucaagca

SEQ ID NO: 594908 - RNA, 19 nt, Homo sapiens
  misc_RNA (1)...(19): siRNA sense strand
gaguagagcuggauuuaau

SEQ ID NO: 594909 - RNA, 19 nt, Homo sapiens
  misc_RNA (1)...(19): siRNA sense strand
caacauaguaucugucaua

SEQ ID NO: 594910 - RNA, 19 nt, Homo sapiens
  misc_RNA (1)...(19): siRNA sense strand
gaagugaggaugccuguuu

SEQ ID NO: 594911 - RNA, 19 nt, Homo sapiens
  misc_RNA (1)...(19): siRNA sense strand
ucagacaacuccaaucaaa

SEQ ID NO: 594912 - RNA, 19 nt, Homo sapiens
  misc_RNA (1)...(19): siRNA sense strand
gcaaguuacugcaaugaau

SEQ ID NO: 594913 - RNA, 19 nt, Homo sapiens
  misc_RNA (1)...(19): siRNA sense strand
gcgauaaacuacaagaaug

SEQ ID NO: 594914 - RNA, 19 nt, Homo sapiens
  misc_RNA (1)...(19): siRNA sense strand
gcugauagcuauguucuug

SEQ ID NO: 594915 - RNA, 19 nt, Homo sapiens
  misc_RNA (1)...(19): siRNA sense strand
ucaauggucuguuucgaaa

SEQ ID NO: 594916 - RNA, 19 nt, Homo sapiens
  misc_RNA (1)...(19): siRNA sense strand
gaagaagcaauuacacauu

SEQ ID NO: 594917 - RNA, 19 nt, Homo sapiens
  misc_RNA (1)...(19): siRNA sense strand
gaagagagaccguguagag

SEQ ID NO: 594918 - RNA, 19 nt, Homo sapiens
  misc_RNA (1)...(19): siRNA sense strand
gagaguagagcuggauuua

SEQ ID NO: 594919 - RNA, 19 nt, Homo sapiens
  misc_RNA (1)...(19): siRNA sense strand
ggaguugcuucuagcgaua

SEQ ID NO: 594920 - RNA, 19 nt, Homo sapiens
  misc_RNA (1)...(19): siRNA sense strand
agagagggcuaaagaagaa

SEQ ID NO: 594921 - RNA, 19 nt, Homo sapiens
  misc_RNA (1)...(19): siRNA sense strand
gcauccaaguggguuauua

SEQ ID NO: 594922 - RNA, 19 nt, Homo sapiens
  misc_RNA (1)...(19): siRNA sense strand
ugaaagaaacagaguguaa

SEQ ID NO: 594923 - RNA, 19 nt, Homo sapiens
  misc_RNA (1)...(19): siRNA sense strand
gaugaaaugccuuuaugaa

SEQ ID NO: 594924 - RNA, 19 nt, Homo sapiens
  misc_RNA (1)...(19): siRNA sense strand
cagaugaaaugccuuuaug

SEQ ID NO: 594925 - RNA, 19 nt, Homo sapiens
  misc_RNA (1)...(19): siRNA sense strand
gggauaugcucaagaagug

SEQ ID NO: 594926 - RNA, 19 nt, Homo sapiens
  misc_RNA (1)...(19): siRNA sense strand
ccaaguggguuauuacaca

SEQ ID NO: 594927 - RNA, 19 nt, Homo sapiens
  misc_RNA (1)...(19): siRNA sense strand
gaucagacaacuccaauca

SEQ ID NO: 594928 - RNA, 19 nt, Homo sapiens
  misc_RNA (1)...(19): siRNA sense strand
gcauagacgugccagagau

SEQ ID NO: 594929 - RNA, 19 nt, Homo sapiens
  misc_RNA (1)...(19): siRNA sense strand
uuacaaggguucaaucugu

SEQ ID NO: 594930 - RNA, 19 nt, Homo sapiens
  misc_RNA (1)...(19): siRNA sense strand
caaaggauauugauuaccu

SEQ ID NO: 594931 - RNA, 19 nt, Homo sapiens
  misc_RNA (1)...(19): siRNA sense strand
gaaagaaacagaguguaau

SEQ ID NO: 594932 - RNA, 19 nt, Homo sapiens
  misc_RNA (1)...(19): siRNA sense strand
gaagaacccaucacagcaa

SEQ ID NO: 594933 - RNA, 19 nt, Homo sapiens
  misc_RNA (1)...(19): siRNA sense strand
gcaguuaguccaagauaug

SEQ ID NO: 594934 - RNA, 19 nt, Homo sapiens
  misc_RNA (1)...(19): siRNA sense strand
cagagagaauaaacaugua

SEQ ID NO: 594935 - RNA, 19 nt, Homo sapiens
  misc_RNA (1)...(19): siRNA sense strand
gcuggaagcgcaauucauu

SEQ ID NO: 594936 - RNA, 19 nt, Homo sapiens
  misc_RNA (1)...(19): siRNA sense strand
guauccagcauuugcauua

SEQ ID NO: 594937 - RNA, 19 nt, Homo sapiens
  misc_RNA (1)...(19): siRNA sense strand
gaucagaugaaaugccuuu

SEQ ID NO: 594938 - RNA, 19 nt, Homo sapiens
  misc_RNA (1)...(19): siRNA sense strand
uaccuaugcuuucagagua

SEQ ID NO: 594939 - RNA, 19 nt, Homo sapiens
  misc_RNA (1)...(19): siRNA sense strand
ggagaacgaggaaucaaug

SEQ ID NO: 594940 - RNA, 19 nt, Homo sapiens
  misc_RNA (1)...(19): siRNA sense strand
cuauaggcaugcagaaauu

SEQ ID NO: 594941 - RNA, 19 nt, Homo sapiens
  misc_RNA (1)...(19): siRNA sense strand
ucacaaccauuuaccuuag

SEQ ID NO: 594942 - RNA, 19 nt, Homo sapiens
  misc_RNA (1)...(19): siRNA sense strand
gcaagguuaccauuaagaa

SEQ ID NO: 594943 - RNA, 19 nt, Homo sapiens
  misc_RNA (1)...(19): siRNA sense strand
aaggcaagguuaccauuaa

SEQ ID NO: 594944 - RNA, 19 nt, Homo sapiens
  misc_RNA (1)...(19): siRNA sense strand
ggugaagagucaaauaucu

SEQ ID NO: 594945 - RNA, 19 nt, Homo sapiens
  misc_RNA (1)...(19): siRNA sense strand
aggaaucaauggucuguuu

SEQ ID NO: 594946 - RNA, 19 nt, Homo sapiens
  misc_RNA (1)...(19): siRNA sense strand
ucaccuacuucuucuaaug

SEQ ID NO: 594947 - RNA, 19 nt, Homo sapiens
  misc_RNA (1)...(19): siRNA sense strand
gaaguguguggaacaagua

SEQ ID NO: 594948 - RNA, 19 nt, Homo sapiens
  misc_RNA (1)...(19): siRNA sense strand
gagagagggcuaaagaaga

SEQ ID NO: 594949 - RNA, 19 nt, Homo sapiens
  misc_RNA (1)...(19): siRNA sense strand
gaacaugaaacagagagaa

SEQ ID NO: 594950 - RNA, 19 nt, Homo sapiens
  misc_RNA (1)...(19): siRNA sense strand
gaggaugccuguuuugauu

SEQ ID NO: 594951 - RNA, 19 nt, Homo sapiens
  misc_RNA (1)...(19): siRNA sense strand
cauguacugugaauuaugu

SEQ ID NO: 594952 - RNA, 19 nt, Homo sapiens
  misc_RNA (1)...(19): siRNA sense strand
ggagagagggcuaaagaag

SEQ ID NO: 594953 - RNA, 19 nt, Homo sapiens
  misc_RNA (1)...(19): siRNA sense strand
gccauuaugugugaccuuu

SEQ ID NO: 594954 - RNA, 19 nt, Homo sapiens
  misc_RNA (1)...(19): siRNA sense strand
caacaaguauugggauuuu

SEQ ID NO: 594955 - RNA, 19 nt, Homo sapiens
  misc_RNA (1)...(19): siRNA sense strand
gaggaacagagcaaaguuu

SEQ ID NO: 594956 - RNA, 19 nt, Homo sapiens
  misc_RNA (1)...(19): siRNA sense strand
ucauggaauugauagcuaa

SEQ ID NO: 594957 - RNA, 19 nt, Homo sapiens
  misc_RNA (1)...(19): siRNA sense strand
gaagagaggaaaucaucug

SEQ ID NO: 594958 - RNA, 19 nt, Homo sapiens
  misc_RNA (1)...(19): siRNA sense strand
gcuaaagaagaagcaauua

SEQ ID NO: 594959 - RNA, 19 nt, Homo sapiens
  misc_RNA (1)...(19): siRNA sense strand
uaugagcagugccuacaaa

SEQ ID NO: 594960 - RNA, 19 nt, Homo sapiens
  misc_RNA (1)...(19): siRNA sense strand
caugaaacagagagaauaa

SEQ ID NO: 594961 - RNA, 19 nt, Homo sapiens
  misc_RNA (1)...(19): siRNA sense strand
ggagauacuggcauuacaa

SEQ ID NO: 594962 - RNA, 19 nt, Homo sapiens
  misc_RNA (1)...(19): siRNA sense strand
aagcuuagacuacaucauu

SEQ ID NO: 594963 - RNA, 19 nt, Homo sapiens
  misc_RNA (1)...(19): siRNA sense strand
gagagaccguguagagagu

SEQ ID NO: 594964 - RNA, 19 nt, Homo sapiens
  misc_RNA (1)...(19): siRNA sense strand
ugauagcuauguucuugaa

SEQ ID NO: 594965 - RNA, 19 nt, Homo sapiens
  misc_RNA (1)...(19): siRNA sense strand
gcagcuccaccucagaaua

SEQ ID NO: 594966 - RNA, 19 nt, Homo sapiens
  misc_RNA (1)...(19): siRNA sense strand
gaaacagagagaauaaaca

SEQ ID NO: 594967 - RNA, 19 nt, Homo sapiens
  misc_RNA (1)...(19): siRNA sense strand
ggaaacuauuguggaaaga

SEQ ID NO: 594968 - RNA, 19 nt, Homo sapiens
  misc_RNA (1)...(19): siRNA sense strand
gagauacuggcauuacaaa

SEQ ID NO: 594969 - RNA, 19 nt, Homo sapiens
  misc_RNA (1)...(19): siRNA sense strand
gaacaccuccugcugaacu

SEQ ID NO: 594970 - RNA, 19 nt, Homo sapiens
  misc_RNA (1)...(19): siRNA sense strand
uaaguugggugguaaucau

SEQ ID NO: 594971 - RNA, 19 nt, Homo sapiens
  misc_RNA (1)...(19): siRNA sense strand
aaaggcaagguuaccauua

SEQ ID NO: 594972 - RNA, 19 nt, Homo sapiens
  misc_RNA (1)...(19): siRNA sense strand
caaguggguuauuacacaa

SEQ ID NO: 594973 - RNA, 19 nt, Homo sapiens
  misc_RNA (1)...(19): siRNA sense strand
gcuauguucuugaauaucg

SEQ ID NO: 594974 - RNA, 19 nt, Homo sapiens
  misc_RNA (1)...(19): siRNA sense strand
acagaucagucuugcuuug

SEQ ID NO: 594975 - RNA, 19 nt, Homo sapiens
  misc_RNA (1)...(19): siRNA sense strand
gcccagaacaugaaacaga

SEQ ID NO: 594976 - RNA, 19 nt, Homo sapiens
  misc_RNA (1)...(19): siRNA sense strand
ugauguggaucuuggagaa

SEQ ID NO: 594977 - RNA, 19 nt, Homo sapiens
  misc_RNA (1)...(19): siRNA sense strand
ggaugcaguuaguccaaga

SEQ ID NO: 594978 - RNA, 19 nt, Homo sapiens
  misc_RNA (1)...(19): siRNA sense strand
uagagaugaugaaauguca

SEQ ID NO: 594979 - RNA, 19 nt, Homo sapiens
  misc_RNA (1)...(19): siRNA sense strand
gaauacagaaagccacaga

SEQ ID NO: 594980 - RNA, 19 nt, Homo sapiens
  misc_RNA (1)...(19): siRNA sense strand
guggaaagauaucgucaag

SEQ ID NO: 594981 - RNA, 19 nt, Homo sapiens
  misc_RNA (1)...(19): siRNA sense strand
aaacuucacuuuggaaacu

SEQ ID NO: 594982 - RNA, 19 nt, Homo sapiens
  misc_RNA (1)...(19): siRNA sense strand
ugugggauaugcucaagaa

SEQ ID NO: 594983 - RNA, 19 nt, Homo sapiens
  misc_RNA (1)...(19): siRNA sense strand
guggaggaauucagcuuga

SEQ ID NO: 594984 - RNA, 19 nt, Homo sapiens
  misc_RNA (1)...(19): siRNA sense strand
ugacugugauaaaggcaaa

SEQ ID NO: 594985 - RNA, 19 nt, Homo sapiens
  misc_RNA (1)...(19): siRNA sense strand
ggacuguagugcaaguuac

SEQ ID NO: 594986 - RNA, 19 nt, Homo sapiens
  misc_RNA (1)...(19): siRNA sense strand
gguucaaucuguaguccuu

SEQ ID NO: 594987 - RNA, 19 nt, Homo sapiens
  misc_RNA (1)...(19): siRNA sense strand
ggaaaacaguaguaccuau

SEQ ID NO: 594988 - RNA, 19 nt, Homo sapiens
  misc_RNA (1)...(19): siRNA sense strand
ugacuccucuaagaaacua

SEQ ID NO: 594989 - RNA, 19 nt, Homo sapiens
  misc_RNA (1)...(19): siRNA sense strand
gagaauaaacauguacugu

SEQ ID NO: 594990 - RNA, 19 nt, Homo sapiens
  misc_RNA (1)...(19): siRNA sense strand
guaaaccaccaccucaaga

SEQ ID NO: 594991 - RNA, 19 nt, Homo sapiens
  misc_RNA (1)...(19): siRNA sense strand
ucagcuuccucuuugauga

SEQ ID NO: 594992 - RNA, 19 nt, Homo sapiens
  misc_RNA (1)...(19): siRNA sense strand
acagaaagccacagaaucu

SEQ ID NO: 594993 - RNA, 19 nt, Homo sapiens
  misc_RNA (1)...(19): siRNA sense strand
caauugacuccucuaagaa

SEQ ID NO: 594994 - RNA, 19 nt, Homo sapiens
  misc_RNA (1)...(19): siRNA sense strand
aaagccaggugaagaguca

SEQ ID NO: 594995 - RNA, 19 nt, Homo sapiens
  misc_RNA (1)...(19): siRNA sense strand
uaacuucagacccaagauu

SEQ ID NO: 594996 - RNA, 19 nt, Homo sapiens
  misc_RNA (1)...(19): siRNA sense strand
uaaaccaccaccucaagaa

SEQ ID NO: 594997 - RNA, 19 nt, Homo sapiens
  misc_RNA (1)...(19): siRNA sense strand
cauuggagauacuggcauu

SEQ ID NO: 594998 - RNA, 19 nt, Homo sapiens
  misc_RNA (1)...(19): siRNA sense strand
gagugaauuuggcuacauc

SEQ ID NO: 594999 - RNA, 19 nt, Homo sapiens
  misc_RNA (1)...(19): siRNA sense strand
ggaacagagcaaaguuuau

SEQ ID NO: 595000 - RNA, 19 nt, Homo sapiens
  misc_RNA (1)...(19): siRNA sense strand
acagagagaauaaacaugu

SEQ ID NO: 595001 - RNA, 19 nt, Homo sapiens
  misc_RNA (1)...(19): siRNA sense strand
ccucuaaacucaacuauga

SEQ ID NO: 595002 - RNA, 19 nt, Homo sapiens
  misc_RNA (1)...(19): siRNA sense strand
auaaugcucugauuccuaa

SEQ ID NO: 595003 - RNA, 19 nt, Homo sapiens
  misc_RNA (1)...(19): siRNA sense strand
guuagaagaauuccuauug

SEQ ID NO: 595004 - RNA, 19 nt, Homo sapiens
  misc_RNA (1)...(19): siRNA sense strand
cgaaagaagaauauacuga

SEQ ID NO: 595005 - RNA, 19 nt, Homo sapiens
  misc_RNA (1)...(19): siRNA sense strand
gguguuaaaucuacaagca

SEQ ID NO: 595006 - RNA, 19 nt, Homo sapiens
  misc_RNA (1)...(19): siRNA sense strand
ccaaugcgcagacgaaaga

SEQ ID NO: 595007 - RNA, 19 nt, Homo sapiens
  misc_RNA (1)...(19): siRNA sense strand
gauaaugcucugauuccua

SEQ ID NO: 595008 - RNA, 19 nt, Homo sapiens
  misc_RNA (1)...(19): siRNA sense strand
uagaagaauuccuauugga

SEQ ID NO: 595009 - RNA, 19 nt, Homo sapiens
  misc_RNA (1)...(19): siRNA sense strand
gcagacgaaagaagaauau

SEQ ID NO: 595010 - RNA, 19 nt, Homo sapiens
  misc_RNA (1)...(19): siRNA sense strand
acaagcaagacauauguua

SEQ ID NO: 595011 - RNA, 19 nt, Homo sapiens
  misc_RNA (1)...(19): siRNA sense strand
uauuggagguguuaaaucu

SEQ ID NO: 595012 - RNA, 19 nt, Homo sapiens
  misc_RNA (1)...(19): siRNA sense strand
ggagagagaagcugaaagc

SEQ ID NO: 595013 - RNA, 19 nt, Homo sapiens
  misc_RNA (1)...(19): siRNA sense strand
gaugauaaugcucugauuc

SEQ ID NO: 595014 - RNA, 19 nt, Homo sapiens
  misc_RNA (1)...(19): siRNA sense strand
caagcaagacauauguuau

SEQ ID NO: 595015 - RNA, 19 nt, Homo sapiens
  misc_RNA (1)...(19): siRNA sense strand
gacuuaaagaagcagauua

SEQ ID NO: 595016 - RNA, 19 nt, Homo sapiens
  misc_RNA (1)...(19): siRNA sense strand
uuagaagaauuccuauugg

SEQ ID NO: 595017 - RNA, 19 nt, Homo sapiens
  misc_RNA (1)...(19): siRNA sense strand
uaugauaccgucaccuuug

SEQ ID NO: 595018 - RNA, 19 nt, Homo sapiens
  misc_RNA (1)...(19): siRNA sense strand
ugaugauaaugcucugauu

SEQ ID NO: 595019 - RNA, 19 nt, Homo sapiens
  misc_RNA (1)...(19): siRNA sense strand
gaaccagcgauggcaacua

SEQ ID NO: 595020 - RNA, 19 nt, Homo sapiens
  misc_RNA (1)...(19): siRNA sense strand
uguuauaagucgaacugaa

SEQ ID NO: 595021 - RNA, 19 nt, Homo sapiens
  misc_RNA (1)...(19): siRNA sense strand
cuacaagcaagacauaugu

SEQ ID NO: 595022 - RNA, 19 nt, Homo sapiens
  misc_RNA (1)...(19): siRNA sense strand
uuaaagaagcagauuaugg

SEQ ID NO: 595023 - RNA, 19 nt, Homo sapiens
  misc_RNA (1)...(19): siRNA sense strand
aaucuacaagcaagacaua

SEQ ID NO: 595024 - RNA, 19 nt, Homo sapiens
  misc_RNA (1)...(19): siRNA sense strand
gcaagacauauguuauaag

SEQ ID NO: 595025 - RNA, 19 nt, Homo sapiens
  misc_RNA (1)...(19): siRNA sense strand
gacgaaagaagaauauacu

SEQ ID NO: 595026 - RNA, 19 nt, Homo sapiens
  misc_RNA (1)...(19): siRNA sense strand
ccugugugcauuauaaauu

SEQ ID NO: 595027 - RNA, 19 nt, Homo sapiens
  misc_RNA (1)...(19): siRNA sense strand
caucucccucugcgacuua

SEQ ID NO: 595028 - RNA, 19 nt, Homo sapiens
  misc_RNA (1)...(19): siRNA sense strand
ucaccaaugcgcagacgaa

SEQ ID NO: 595029 - RNA, 19 nt, Homo sapiens
  misc_RNA (1)...(19): siRNA sense strand
cgacuuaaagaagcagauu

SEQ ID NO: 595030 - RNA, 19 nt, Homo sapiens
  misc_RNA (1)...(19): siRNA sense strand
aaccagcgauggcaacuac

SEQ ID NO: 595031 - RNA, 19 nt, Homo sapiens
  misc_RNA (1)...(19): siRNA sense strand
augauaccgucaccuuuga

SEQ ID NO: 595032 - RNA, 19 nt, Homo sapiens
  misc_RNA (1)...(19): siRNA sense strand
gauaccgucaccuuugaug

SEQ ID NO: 595033 - RNA, 19 nt, Homo sapiens
  misc_RNA (1)...(19): siRNA sense strand
ggagguguuaaaucuacaa

SEQ ID NO: 595034 - RNA, 19 nt, Homo sapiens
  misc_RNA (1)...(19): siRNA sense strand
guuauaagucgaacugaac

SEQ ID NO: 595035 - RNA, 19 nt, Homo sapiens
  misc_RNA (1)...(19): siRNA sense strand
cagcgauggcaacuacaaa

SEQ ID NO: 595036 - RNA, 19 nt, Homo sapiens
  misc_RNA (1)...(19): siRNA sense strand
gaccugcagaucaccaaug

SEQ ID NO: 595037 - RNA, 19 nt, Homo sapiens
  misc_RNA (1)...(19): siRNA sense strand
agacgaaagaagaauauac

SEQ ID NO: 595038 - RNA, 19 nt, Homo sapiens
  misc_RNA (1)...(19): siRNA sense strand
cagacgaaagaagaauaua

SEQ ID NO: 595039 - RNA, 19 nt, Homo sapiens
  misc_RNA (1)...(19): siRNA sense strand
ccucuaaacucaacuauga

SEQ ID NO: 595040 - RNA, 19 nt, Homo sapiens
  misc_RNA (1)...(19): siRNA sense strand
auaaugcucugauuccuaa

SEQ ID NO: 595041 - RNA, 19 nt, Homo sapiens
  misc_RNA (1)...(19): siRNA sense strand
guuagaagaauuccuauug

SEQ ID NO: 595042 - RNA, 19 nt, Homo sapiens
  misc_RNA (1)...(19): siRNA sense strand
cgaaagaagaauauacuga

SEQ ID NO: 595043 - RNA, 19 nt, Homo sapiens
  misc_RNA (1)...(19): siRNA sense strand
gguguuaaaucuacaagca

SEQ ID NO: 595044 - RNA, 19 nt, Homo sapiens
  misc_RNA (1)...(19): siRNA sense strand
ccaaugcgcagacgaaaga

SEQ ID NO: 595045 - RNA, 19 nt, Homo sapiens
  misc_RNA (1)...(19): siRNA sense strand
gauaaugcucugauuccua

SEQ ID NO: 595046 - RNA, 19 nt, Homo sapiens
  misc_RNA (1)...(19): siRNA sense strand
uagaagaauuccuauugga

SEQ ID NO: 595047 - RNA, 19 nt, Homo sapiens
  misc_RNA (1)...(19): siRNA sense strand
gcagacgaaagaagaauau

SEQ ID NO: 595048 - RNA, 19 nt, Homo sapiens
  misc_RNA (1)...(19): siRNA sense strand
acaagcaagacauauguua

SEQ ID NO: 595049 - RNA, 19 nt, Homo sapiens
  misc_RNA (1)...(19): siRNA sense strand
uauuggagguguuaaaucu

SEQ ID NO: 595050 - RNA, 19 nt, Homo sapiens
  misc_RNA (1)...(19): siRNA sense strand
ggagagagaagcugaaagc

SEQ ID NO: 595051 - RNA, 19 nt, Homo sapiens
  misc_RNA (1)...(19): siRNA sense strand
gaugauaaugcucugauuc

SEQ ID NO: 595052 - RNA, 19 nt, Homo sapiens
  misc_RNA (1)...(19): siRNA sense strand
caagcaagacauauguuau

SEQ ID NO: 595053 - RNA, 19 nt, Homo sapiens
  misc_RNA (1)...(19): siRNA sense strand
gacuuaaagaagcagauua

SEQ ID NO: 595054 - RNA, 19 nt, Homo sapiens
  misc_RNA (1)...(19): siRNA sense strand
uuagaagaauuccuauugg

SEQ ID NO: 595055 - RNA, 19 nt, Homo sapiens
  misc_RNA (1)...(19): siRNA sense strand
uaugauaccgucaccuuug

SEQ ID NO: 595056 - RNA, 19 nt, Homo sapiens
  misc_RNA (1)...(19): siRNA sense strand
ugaugauaaugcucugauu

SEQ ID NO: 595057 - RNA, 19 nt, Homo sapiens
  misc_RNA (1)...(19): siRNA sense strand
gaaccagcgauggcaacua

SEQ ID NO: 595058 - RNA, 19 nt, Homo sapiens
  misc_RNA (1)...(19): siRNA sense strand
uguuauaagucgaacugaa

SEQ ID NO: 595059 - RNA, 19 nt, Homo sapiens
  misc_RNA (1)...(19): siRNA sense strand
cuacaagcaagacauaugu

SEQ ID NO: 595060 - RNA, 19 nt, Homo sapiens
  misc_RNA (1)...(19): siRNA sense strand
uuaaagaagcagauuaugg

SEQ ID NO: 595061 - RNA, 19 nt, Homo sapiens
  misc_RNA (1)...(19): siRNA sense strand
aaucuacaagcaagacaua

SEQ ID NO: 595062 - RNA, 19 nt, Homo sapiens
  misc_RNA (1)...(19): siRNA sense strand
gcaagacauauguuauaag

SEQ ID NO: 595063 - RNA, 19 nt, Homo sapiens
  misc_RNA (1)...(19): siRNA sense strand
gacgaaagaagaauauacu

SEQ ID NO: 595064 - RNA, 19 nt, Homo sapiens
  misc_RNA (1)...(19): siRNA sense strand
ccugugugcauuauaaauu

SEQ ID NO: 595065 - RNA, 19 nt, Homo sapiens
  misc_RNA (1)...(19): siRNA sense strand
caucucccucugcgacuua

SEQ ID NO: 595066 - RNA, 19 nt, Homo sapiens
  misc_RNA (1)...(19): siRNA sense strand
ucaccaaugcgcagacgaa

SEQ ID NO: 595067 - RNA, 19 nt, Homo sapiens
  misc_RNA (1)...(19): siRNA sense strand
cgacuuaaagaagcagauu

SEQ ID NO: 595068 - RNA, 19 nt, Homo sapiens
  misc_RNA (1)...(19): siRNA sense strand
aaccagcgauggcaacuac

SEQ ID NO: 595069 - RNA, 19 nt, Homo sapiens
  misc_RNA (1)...(19): siRNA sense strand
augauaccgucaccuuuga

SEQ ID NO: 595070 - RNA, 19 nt, Homo sapiens
  misc_RNA (1)...(19): siRNA sense strand
gauaccgucaccuuugaug

SEQ ID NO: 595071 - RNA, 19 nt, Homo sapiens
  misc_RNA (1)...(19): siRNA sense strand
ggagguguuaaaucuacaa

SEQ ID NO: 595072 - RNA, 19 nt, Homo sapiens
  misc_RNA (1)...(19): siRNA sense strand
guuauaagucgaacugaac

SEQ ID NO: 595073 - RNA, 19 nt, Homo sapiens
  misc_RNA (1)...(19): siRNA sense strand
cagcgauggcaacuacaaa

SEQ ID NO: 595074 - RNA, 19 nt, Homo sapiens
  misc_RNA (1)...(19): siRNA sense strand
gaccugcagaucaccaaug

SEQ ID NO: 595075 - RNA, 19 nt, Homo sapiens
  misc_RNA (1)...(19): siRNA sense strand
agacgaaagaagaauauac

SEQ ID NO: 595076 - RNA, 19 nt, Homo sapiens
  misc_RNA (1)...(19): siRNA sense strand
cagacgaaagaagaauaua

SEQ ID NO: 595077 - RNA, 19 nt, Homo sapiens
  misc_RNA (1)...(19): siRNA sense strand
ccucuaaacucaacuauga

SEQ ID NO: 595078 - RNA, 19 nt, Homo sapiens
  misc_RNA (1)...(19): siRNA sense strand
auaaugcucugauuccuaa

SEQ ID NO: 595079 - RNA, 19 nt, Homo sapiens
  misc_RNA (1)...(19): siRNA sense strand
guuagaagaauuccuauug

SEQ ID NO: 595080 - RNA, 19 nt, Homo sapiens
  misc_RNA (1)...(19): siRNA sense strand
cgaaagaagaauauacuga

SEQ ID NO: 595081 - RNA, 19 nt, Homo sapiens
  misc_RNA (1)...(19): siRNA sense strand
gguguuaaaucuacaagca

SEQ ID NO: 595082 - RNA, 19 nt, Homo sapiens
  misc_RNA (1)...(19): siRNA sense strand
ccaaugcgcagacgaaaga

SEQ ID NO: 595083 - RNA, 19 nt, Homo sapiens
  misc_RNA (1)...(19): siRNA sense strand
gauaaugcucugauuccua

SEQ ID NO: 595084 - RNA, 19 nt, Homo sapiens
  misc_RNA (1)...(19): siRNA sense strand
uagaagaauuccuauugga

SEQ ID NO: 595085 - RNA, 19 nt, Homo sapiens
  misc_RNA (1)...(19): siRNA sense strand
gcagacgaaagaagaauau

SEQ ID NO: 595086 - RNA, 19 nt, Homo sapiens
  misc_RNA (1)...(19): siRNA sense strand
acaagcaagacauauguua

SEQ ID NO: 595087 - RNA, 19 nt, Homo sapiens
  misc_RNA (1)...(19): siRNA sense strand
uauuggagguguuaaaucu

SEQ ID NO: 595088 - RNA, 19 nt, Homo sapiens
  misc_RNA (1)...(19): siRNA sense strand
ggagagagaagcugaaagc

SEQ ID NO: 595089 - RNA, 19 nt, Homo sapiens
  misc_RNA (1)...(19): siRNA sense strand
gaugauaaugcucugauuc

SEQ ID NO: 595090 - RNA, 19 nt, Homo sapiens
  misc_RNA (1)...(19): siRNA sense strand
caagcaagacauauguuau

SEQ ID NO: 595091 - RNA, 19 nt, Homo sapiens
  misc_RNA (1)...(19): siRNA sense strand
gacuuaaagaagcagauua

SEQ ID NO: 595092 - RNA, 19 nt, Homo sapiens
  misc_RNA (1)...(19): siRNA sense strand
uuagaagaauuccuauugg

SEQ ID NO: 595093 - RNA, 19 nt, Homo sapiens
  misc_RNA (1)...(19): siRNA sense strand
uaugauaccgucaccuuug

SEQ ID NO: 595094 - RNA, 19 nt, Homo sapiens
  misc_RNA (1)...(19): siRNA sense strand
ugaugauaaugcucugauu

SEQ ID NO: 595095 - RNA, 19 nt, Homo sapiens
  misc_RNA (1)...(19): siRNA sense strand
gaaccagcgauggcaacua

SEQ ID NO: 595096 - RNA, 19 nt, Homo sapiens
  misc_RNA (1)...(19): siRNA sense strand
uguuauaagucgaacugaa

SEQ ID NO: 595097 - RNA, 19 nt, Homo sapiens
  misc_RNA (1)...(19): siRNA sense strand
cuacaagcaagacauaugu

SEQ ID NO: 595098 - RNA, 19 nt, Homo sapiens
  misc_RNA (1)...(19): siRNA sense strand
uuaaagaagcagauuaugg

SEQ ID NO: 595099 - RNA, 19 nt, Homo sapiens
  misc_RNA (1)...(19): siRNA sense strand
aaucuacaagcaagacaua

SEQ ID NO: 595100 - RNA, 19 nt, Homo sapiens
  misc_RNA (1)...(19): siRNA sense strand
gcaagacauauguuauaag

SEQ ID NO: 595101 - RNA, 19 nt, Homo sapiens
  misc_RNA (1)...(19): siRNA sense strand
gacgaaagaagaauauacu

SEQ ID NO: 595102 - RNA, 19 nt, Homo sapiens
  misc_RNA (1)...(19): siRNA sense strand
ccugugugcauuauaaauu

SEQ ID NO: 595103 - RNA, 19 nt, Homo sapiens
  misc_RNA (1)...(19): siRNA sense strand
caucucccucugcgacuua

SEQ ID NO: 595104 - RNA, 19 nt, Homo sapiens
  misc_RNA (1)...(19): siRNA sense strand
ucaccaaugcgcagacgaa

SEQ ID NO: 595105 - RNA, 19 nt, Homo sapiens
  misc_RNA (1)...(19): siRNA sense strand
cgacuuaaagaagcagauu

SEQ ID NO: 595106 - RNA, 19 nt, Homo sapiens
  misc_RNA (1)...(19): siRNA sense strand
aaccagcgauggcaacuac

SEQ ID NO: 595107 - RNA, 19 nt, Homo sapiens
  misc_RNA (1)...(19): siRNA sense strand
augauaccgucaccuuuga

SEQ ID NO: 595108 - RNA, 19 nt, Homo sapiens
  misc_RNA (1)...(19): siRNA sense strand
gauaccgucaccuuugaug

SEQ ID NO: 595109 - RNA, 19 nt, Homo sapiens
  misc_RNA (1)...(19): siRNA sense strand
ggagguguuaaaucuacaa

SEQ ID NO: 595110 - RNA, 19 nt, Homo sapiens
  misc_RNA (1)...(19): siRNA sense strand
guuauaagucgaacugaac

SEQ ID NO: 595111 - RNA, 19 nt, Homo sapiens
  misc_RNA (1)...(19): siRNA sense strand
cagcgauggcaacuacaaa

SEQ ID NO: 595112 - RNA, 19 nt, Homo sapiens
  misc_RNA (1)...(19): siRNA sense strand
gaccugcagaucaccaaug

SEQ ID NO: 595113 - RNA, 19 nt, Homo sapiens
  misc_RNA (1)...(19): siRNA sense strand
agacgaaagaagaauauac

SEQ ID NO: 595114 - RNA, 19 nt, Homo sapiens
  misc_RNA (1)...(19): siRNA sense strand
cagacgaaagaagaauaua

SEQ ID NO: 595115 - RNA, 19 nt, Homo sapiens
  misc_RNA (1)...(19): siRNA sense strand
gcaaggaugugauuauuga

SEQ ID NO: 595116 - RNA, 19 nt, Homo sapiens
  misc_RNA (1)...(19): siRNA sense strand
aaacaucugucgaaacuaa

SEQ ID NO: 595117 - RNA, 19 nt, Homo sapiens
  misc_RNA (1)...(19): siRNA sense strand
gagggaggcugaauuuauu

SEQ ID NO: 595118 - RNA, 19 nt, Homo sapiens
  misc_RNA (1)...(19): siRNA sense strand
uaaauaacauggcccacua

SEQ ID NO: 595119 - RNA, 19 nt, Homo sapiens
  misc_RNA (1)...(19): siRNA sense strand
caacaacuccugcacagua

SEQ ID NO: 595120 - RNA, 19 nt, Homo sapiens
  misc_RNA (1)...(19): siRNA sense strand
gaggaggugucugaaauaa

SEQ ID NO: 595121 - RNA, 19 nt, Homo sapiens
  misc_RNA (1)...(19): siRNA sense strand
gaaugugccugaaauccaa

SEQ ID NO: 595122 - RNA, 19 nt, Homo sapiens
  misc_RNA (1)...(19): siRNA sense strand
ggacagggucauuugcuua

SEQ ID NO: 595123 - RNA, 19 nt, Homo sapiens
  misc_RNA (1)...(19): siRNA sense strand
gaagauauccucgccaaga

SEQ ID NO: 595124 - RNA, 19 nt, Homo sapiens
  misc_RNA (1)...(19): siRNA sense strand
gcaccaggaacaacauuua

SEQ ID NO: 595125 - RNA, 19 nt, Homo sapiens
  misc_RNA (1)...(19): siRNA sense strand
gaucaucuuugacacauuc

SEQ ID NO: 595126 - RNA, 19 nt, Homo sapiens
  misc_RNA (1)...(19): siRNA sense strand
gacaagcccugcuggagaa

SEQ ID NO: 595127 - RNA, 19 nt, Homo sapiens
  misc_RNA (1)...(19): siRNA sense strand
ccacucauccugucgaaua

SEQ ID NO: 595128 - RNA, 19 nt, Homo sapiens
  misc_RNA (1)...(19): siRNA sense strand
ugacaggccuucugcaguu

SEQ ID NO: 595129 - RNA, 19 nt, Homo sapiens
  misc_RNA (1)...(19): siRNA sense strand
gcuggaaucucaggaguuu

SEQ ID NO: 595130 - RNA, 19 nt, Homo sapiens
  misc_RNA (1)...(19): siRNA sense strand
ggaggugucugaaauaaaa

SEQ ID NO: 595131 - RNA, 19 nt, Homo sapiens
  misc_RNA (1)...(19): siRNA sense strand
ccaaguggcuccuacaaag

SEQ ID NO: 595132 - RNA, 19 nt, Homo sapiens
  misc_RNA (1)...(19): siRNA sense strand
gaaaacaucugucgaaacu

SEQ ID NO: 595133 - RNA, 19 nt, Homo sapiens
  misc_RNA (1)...(19): siRNA sense strand
uaagugaauuuccagagaa

SEQ ID NO: 595134 - RNA, 19 nt, Homo sapiens
  misc_RNA (1)...(19): siRNA sense strand
gaauaugggaugagcauug

SEQ ID NO: 595135 - RNA, 19 nt, Homo sapiens
  misc_RNA (1)...(19): siRNA sense strand
ggaggaggugucugaaaua

SEQ ID NO: 595136 - RNA, 19 nt, Homo sapiens
  misc_RNA (1)...(19): siRNA sense strand
uguccaaucucccacauuu

SEQ ID NO: 595137 - RNA, 19 nt, Homo sapiens
  misc_RNA (1)...(19): siRNA sense strand
gagcaaauacaaacauguu

SEQ ID NO: 595138 - RNA, 19 nt, Homo sapiens
  misc_RNA (1)...(19): siRNA sense strand
caaaucaccaccuggagua

SEQ ID NO: 595139 - RNA, 19 nt, Homo sapiens
  misc_RNA (1)...(19): siRNA sense strand
cgaaagagcauuccagaca

SEQ ID NO: 595140 - RNA, 19 nt, Homo sapiens
  misc_RNA (1)...(19): siRNA sense strand
gagcugauguuccguaaaa

SEQ ID NO: 595141 - RNA, 19 nt, Homo sapiens
  misc_RNA (1)...(19): siRNA sense strand
agcaagagaugagcaaaua

SEQ ID NO: 595142 - RNA, 19 nt, Homo sapiens
  misc_RNA (1)...(19): siRNA sense strand
ccacacggcaggauuauug

SEQ ID NO: 595143 - RNA, 19 nt, Homo sapiens
  misc_RNA (1)...(19): siRNA sense strand
ucacugaugucauuauugg

SEQ ID NO: 595144 - RNA, 19 nt, Homo sapiens
  misc_RNA (1)...(19): siRNA sense strand
ccagguuggugacaguaua

SEQ ID NO: 595145 - RNA, 19 nt, Homo sapiens
  misc_RNA (1)...(19): siRNA sense strand
uuauugaucuguugugcua

SEQ ID NO: 595146 - RNA, 19 nt, Homo sapiens
  misc_RNA (1)...(19): siRNA sense strand
gaaggaagaggccucacuu

SEQ ID NO: 595147 - RNA, 19 nt, Homo sapiens
  misc_RNA (1)...(19): siRNA sense strand
gcaccagcaugaagauauc

SEQ ID NO: 595148 - RNA, 19 nt, Homo sapiens
  misc_RNA (1)...(19): siRNA sense strand
gagacacugugaacauguu

SEQ ID NO: 595149 - RNA, 19 nt, Homo sapiens
  misc_RNA (1)...(19): siRNA sense strand
gugggcagauuucuauuga

SEQ ID NO: 595150 - RNA, 19 nt, Homo sapiens
  misc_RNA (1)...(19): siRNA sense strand
gcauugagagcccaaaguu

SEQ ID NO: 595151 - RNA, 19 nt, Homo sapiens
  misc_RNA (1)...(19): siRNA sense strand
gacaguauauugugagcau

SEQ ID NO: 595152 - RNA, 19 nt, Homo sapiens
  misc_RNA (1)...(19): siRNA sense strand
gguccguggucguuuguuu

SEQ ID NO: 595153 - RNA, 19 nt, Homo sapiens
  misc_RNA (1)...(19): siRNA sense strand
ccgcaaggaugugauuauu

SEQ ID NO: 595154 - RNA, 19 nt, Homo sapiens
  misc_RNA (1)...(19): siRNA sense strand
ggucauuggugauucaucu

SEQ ID NO: 595155 - RNA, 19 nt, Homo sapiens
  misc_RNA (1)...(19): siRNA sense strand
gaauggagaagaugaugga

SEQ ID NO: 595156 - RNA, 19 nt, Homo sapiens
  misc_RNA (1)...(19): siRNA sense strand
ucaggaguuugaccacuuu

SEQ ID NO: 595157 - RNA, 19 nt, Homo sapiens
  misc_RNA (1)...(19): siRNA sense strand
caagaaauggcaccaggaa

SEQ ID NO: 595158 - RNA, 19 nt, Homo sapiens
  misc_RNA (1)...(19): siRNA sense strand
uuaagugaauuuccagaga

SEQ ID NO: 595159 - RNA, 19 nt, Homo sapiens
  misc_RNA (1)...(19): siRNA sense strand
caacuccugcacaguauuu

SEQ ID NO: 595160 - RNA, 19 nt, Homo sapiens
  misc_RNA (1)...(19): siRNA sense strand
gagcauuccagacacauau

SEQ ID NO: 595161 - RNA, 19 nt, Homo sapiens
  misc_RNA (1)...(19): siRNA sense strand
gaaauggcaccaggaacaa

SEQ ID NO: 595162 - RNA, 19 nt, Homo sapiens
  misc_RNA (1)...(19): siRNA sense strand
guuagucuaucucaaucaa

SEQ ID NO: 595163 - RNA, 19 nt, Homo sapiens
  misc_RNA (1)...(19): siRNA sense strand
ucauaaagcugccaaaauc

SEQ ID NO: 595164 - RNA, 19 nt, Homo sapiens
  misc_RNA (1)...(19): siRNA sense strand
ggagacguuuaccacagaa

SEQ ID NO: 595165 - RNA, 19 nt, Homo sapiens
  misc_RNA (1)...(19): siRNA sense strand
caagagaugagcaaauaca

SEQ ID NO: 595166 - RNA, 19 nt, Homo sapiens
  misc_RNA (1)...(19): siRNA sense strand
ugaaccauauggacccaaa

SEQ ID NO: 595167 - RNA, 19 nt, Homo sapiens
  misc_RNA (1)...(19): siRNA sense strand
ccaccaaguucucgacagu

SEQ ID NO: 595168 - RNA, 19 nt, Homo sapiens
  misc_RNA (1)...(19): siRNA sense strand
ucucgacagugaagcgaua

SEQ ID NO: 595169 - RNA, 19 nt, Homo sapiens
  misc_RNA (1)...(19): siRNA sense strand
gagaugagcaaauacaaac

SEQ ID NO: 595170 - RNA, 19 nt, Homo sapiens
  misc_RNA (1)...(19): siRNA sense strand
cauauggacccaaaucaga

SEQ ID NO: 595171 - RNA, 19 nt, Homo sapiens
  misc_RNA (1)...(19): siRNA sense strand
gaaauaaaauccuccuacu

SEQ ID NO: 595172 - RNA, 19 nt, Homo sapiens
  misc_RNA (1)...(19): siRNA sense strand
ggagugugcauuugauugu

SEQ ID NO: 595173 - RNA, 19 nt, Homo sapiens
  misc_RNA (1)...(19): siRNA sense strand
gggacagggucauuugcuu

SEQ ID NO: 595174 - RNA, 19 nt, Homo sapiens
  misc_RNA (1)...(19): siRNA sense strand
gaggcugaauuuauugaca

SEQ ID NO: 595175 - RNA, 19 nt, Homo sapiens
  misc_RNA (1)...(19): siRNA sense strand
ccaagaagcaugacuuugc

SEQ ID NO: 595176 - RNA, 19 nt, Homo sapiens
  misc_RNA (1)...(19): siRNA sense strand
aauaugggaugagcauuga

SEQ ID NO: 595177 - RNA, 19 nt, Homo sapiens
  misc_RNA (1)...(19): siRNA sense strand
uuacaccacuccagcugaa

SEQ ID NO: 595178 - RNA, 19 nt, Homo sapiens
  misc_RNA (1)...(19): siRNA sense strand
agugugcauuugauuguua

SEQ ID NO: 595179 - RNA, 19 nt, Homo sapiens
  misc_RNA (1)...(19): siRNA sense strand
cagagcugauguuccguaa

SEQ ID NO: 595180 - RNA, 19 nt, Homo sapiens
  misc_RNA (1)...(19): siRNA sense strand
agagggaggcugaauuuau

SEQ ID NO: 595181 - RNA, 19 nt, Homo sapiens
  misc_RNA (1)...(19): siRNA sense strand
uggagaaugugccugaaau

SEQ ID NO: 595182 - RNA, 19 nt, Homo sapiens
  misc_RNA (1)...(19): siRNA sense strand
aagcaugacuuugccauca

SEQ ID NO: 595183 - RNA, 19 nt, Homo sapiens
  misc_RNA (1)...(19): siRNA sense strand
ggcaugcaaucgugguuug

SEQ ID NO: 595184 - RNA, 19 nt, Homo sapiens
  misc_RNA (1)...(19): siRNA sense strand
aggaggaggugucugaaau

SEQ ID NO: 595185 - RNA, 19 nt, Homo sapiens
  misc_RNA (1)...(19): siRNA sense strand
gcagugauauugggaagcu

SEQ ID NO: 595186 - RNA, 19 nt, Homo sapiens
  misc_RNA (1)...(19): siRNA sense strand
caagggauuguuccugaaa

SEQ ID NO: 595187 - RNA, 19 nt, Homo sapiens
  misc_RNA (1)...(19): siRNA sense strand
gcugugccaucauccaugu

SEQ ID NO: 595188 - RNA, 19 nt, Homo sapiens
  misc_RNA (1)...(19): siRNA sense strand
gcucuugccuuggguucuu

SEQ ID NO: 595189 - RNA, 19 nt, Homo sapiens
  misc_RNA (1)...(19): siRNA sense strand
ccacacgacuggcuuuuga

SEQ ID NO: 595190 - RNA, 19 nt, Homo sapiens
  misc_RNA (1)...(19): siRNA sense strand
auugaaaccucccaacuuc

SEQ ID NO: 595191 - RNA, 19 nt, Homo sapiens
  misc_RNA (1)...(19): siRNA sense strand
ggacggagacacugugaac

SEQ ID NO: 595192 - RNA, 19 nt, Homo sapiens
  misc_RNA (1)...(19): siRNA sense strand
ucuuuauacugcagugaua

SEQ ID NO: 595193 - RNA, 19 nt, Homo sapiens
  misc_RNA (1)...(19): siRNA sense strand
cgaaacuaaugcuggaauc

SEQ ID NO: 595194 - RNA, 19 nt, Homo sapiens
  misc_RNA (1)...(19): siRNA sense strand
gaugagaaagacugguuug

SEQ ID NO: 595195 - RNA, 19 nt, Homo sapiens
  misc_RNA (1)...(19): siRNA sense strand
gccaguacccgcuguagga

SEQ ID NO: 595196 - RNA, 19 nt, Homo sapiens
  misc_RNA (1)...(19): siRNA sense strand
ggccaagaagcaugacuuu

SEQ ID NO: 595197 - RNA, 19 nt, Homo sapiens
  misc_RNA (1)...(19): siRNA sense strand
gcagccgugucaacucuuc

SEQ ID NO: 595198 - RNA, 19 nt, Homo sapiens
  misc_RNA (1)...(19): siRNA sense strand
gcucaagguuuuaauguuc

SEQ ID NO: 595199 - RNA, 19 nt, Homo sapiens
  misc_RNA (1)...(19): siRNA sense strand
aaagagcauuccagacaca

SEQ ID NO: 595200 - RNA, 19 nt, Homo sapiens
  misc_RNA (1)...(19): siRNA sense strand
gaaguguuagucuaucuca

SEQ ID NO: 595201 - RNA, 19 nt, Homo sapiens
  misc_RNA (1)...(19): siRNA sense strand
ucaagggauuguuccugaa

SEQ ID NO: 595202 - RNA, 19 nt, Homo sapiens
  misc_RNA (1)...(19): siRNA sense strand
auagagggaggcugaauuu

SEQ ID NO: 595203 - RNA, 19 nt, Homo sapiens
  misc_RNA (1)...(19): siRNA sense strand
guuuguuucuccaagguuu

SEQ ID NO: 595204 - RNA, 19 nt, Homo sapiens
  misc_RNA (1)...(19): siRNA sense strand
gaggaaguguuagucuauc

SEQ ID NO: 595205 - RNA, 19 nt, Homo sapiens
  misc_RNA (1)...(19): siRNA sense strand
cauugagagcccaaaguua

SEQ ID NO: 595206 - RNA, 19 nt, Homo sapiens
  misc_RNA (1)...(19): siRNA sense strand
gaagaugauggacggaauc

SEQ ID NO: 595207 - RNA, 19 nt, Homo sapiens
  misc_RNA (1)...(19): siRNA sense strand
gugacaauguugcccaauc

SEQ ID NO: 595208 - RNA, 19 nt, Homo sapiens
  misc_RNA (1)...(19): siRNA sense strand
uguaggaauuggcacaguu

SEQ ID NO: 595209 - RNA, 19 nt, Homo sapiens
  misc_RNA (1)...(19): siRNA sense strand
uuaagacccucguguucug

SEQ ID NO: 595210 - RNA, 19 nt, Homo sapiens
  misc_RNA (1)...(19): siRNA sense strand
agaaauggcaccaggaaca

SEQ ID NO: 595211 - RNA, 19 nt, Homo sapiens
  misc_RNA (1)...(19): siRNA sense strand
gagcguuuccugcagaugu

SEQ ID NO: 595212 - RNA, 19 nt, Homo sapiens
  misc_RNA (1)...(19): siRNA sense strand
gaccacucauccugucgaa

SEQ ID NO: 595213 - RNA, 19 nt, Homo sapiens
  misc_RNA (1)...(19): siRNA sense strand
guuuggcgauuucuucaau

SEQ ID NO: 595214 - RNA, 19 nt, Homo sapiens
  misc_RNA (1)...(19): siRNA sense strand
cauguucaguccagaaugg

SEQ ID NO: 595215 - RNA, 19 nt, Homo sapiens
  misc_RNA (1)...(19): siRNA sense strand
ggacagaccuggagaacga

SEQ ID NO: 595216 - RNA, 19 nt, Homo sapiens
  misc_RNA (1)...(19): siRNA sense strand
gcacugaccucaagauugg

SEQ ID NO: 595217 - RNA, 19 nt, Homo sapiens
  misc_RNA (1)...(19): siRNA sense strand
cgaggacgaugacugcuua

SEQ ID NO: 595218 - RNA, 19 nt, Homo sapiens
  misc_RNA (1)...(19): siRNA sense strand
gaagaugagcuccauauag

SEQ ID NO: 595219 - RNA, 19 nt, Homo sapiens
  misc_RNA (1)...(19): siRNA sense strand
gcaauaagaccaucucagu

SEQ ID NO: 595220 - RNA, 19 nt, Homo sapiens
  misc_RNA (1)...(19): siRNA sense strand
caacaacccacaugacauu

SEQ ID NO: 595221 - RNA, 19 nt, Homo sapiens
  misc_RNA (1)...(19): siRNA sense strand
cauuaagccuugaagauga

SEQ ID NO: 595222 - RNA, 19 nt, Homo sapiens
  misc_RNA (1)...(19): siRNA sense strand
ggacugacucgggcaauaa

SEQ ID NO: 595223 - RNA, 19 nt, Homo sapiens
  misc_RNA (1)...(19): siRNA sense strand
gaaaacaacagaagaagaa

SEQ ID NO: 595224 - RNA, 19 nt, Homo sapiens
  misc_RNA (1)...(19): siRNA sense strand
gcaaaugaagacaguaaga

SEQ ID NO: 595225 - RNA, 19 nt, Homo sapiens
  misc_RNA (1)...(19): siRNA sense strand
gcauuaagccuugaagaug

SEQ ID NO: 595226 - RNA, 19 nt, Homo sapiens
  misc_RNA (1)...(19): siRNA sense strand
gcucacacaucugcacuga

SEQ ID NO: 595227 - RNA, 19 nt, Homo sapiens
  misc_RNA (1)...(19): siRNA sense strand
agggagaacugcucagauu

SEQ ID NO: 595228 - RNA, 19 nt, Homo sapiens
  misc_RNA (1)...(19): siRNA sense strand
aagaugggcucaacaguca

SEQ ID NO: 595229 - RNA, 19 nt, Homo sapiens
  misc_RNA (1)...(19): siRNA sense strand
aagaugagcuccauauagg

SEQ ID NO: 595230 - RNA, 19 nt, Homo sapiens
  misc_RNA (1)...(19): siRNA sense strand
ccagaucugugucaauuac

SEQ ID NO: 595231 - RNA, 19 nt, Homo sapiens
  misc_RNA (1)...(19): siRNA sense strand
ccuugaagaugauggacua

SEQ ID NO: 595232 - RNA, 19 nt, Homo sapiens
  misc_RNA (1)...(19): siRNA sense strand
gaacgagugucugcacaac

SEQ ID NO: 595233 - RNA, 19 nt, Homo sapiens
  misc_RNA (1)...(19): siRNA sense strand
ucaauuacaagggcuauuu

SEQ ID NO: 595234 - RNA, 19 nt, Homo sapiens
  misc_RNA (1)...(19): siRNA sense strand
caucugcacugaccucaag

SEQ ID NO: 595235 - RNA, 19 nt, Homo sapiens
  misc_RNA (1)...(19): siRNA sense strand
ggcacuagauguggaaguu

SEQ ID NO: 595236 - RNA, 19 nt, Homo sapiens
  misc_RNA (1)...(19): siRNA sense strand
gaacuauucacgccucauc

SEQ ID NO: 595237 - RNA, 19 nt, Homo sapiens
  misc_RNA (1)...(19): siRNA sense strand
caaggccagugacccgaaa

SEQ ID NO: 595238 - RNA, 19 nt, Homo sapiens
  misc_RNA (1)...(19): siRNA sense strand
aagaagaccugugcagaca

SEQ ID NO: 595239 - RNA, 19 nt, Homo sapiens
  misc_RNA (1)...(19): siRNA sense strand
gagccacccuuuugggaua

SEQ ID NO: 595240 - RNA, 19 nt, Homo sapiens
  misc_RNA (1)...(19): siRNA sense strand
gagcccaucccuaaucuuc

SEQ ID NO: 595241 - RNA, 19 nt, Homo sapiens
  misc_RNA (1)...(19): siRNA sense strand
agccagaucugugucaauu

SEQ ID NO: 595242 - RNA, 19 nt, Homo sapiens
  misc_RNA (1)...(19): siRNA sense strand
ggagaacugcucagauugg

SEQ ID NO: 595243 - RNA, 19 nt, Homo sapiens
  misc_RNA (1)...(19): siRNA sense strand
gaucaucgugcccauagug

SEQ ID NO: 595244 - RNA, 19 nt, Homo sapiens
  misc_RNA (1)...(19): siRNA sense strand
ucaauggccuggaaaucuc

SEQ ID NO: 595245 - RNA, 19 nt, Homo sapiens
  misc_RNA (1)...(19): siRNA sense strand
uaauggaggcugugaauac

SEQ ID NO: 595246 - RNA, 19 nt, Homo sapiens
  misc_RNA (1)...(19): siRNA sense strand
caaaugaagacaguaagau

SEQ ID NO: 595247 - RNA, 19 nt, Homo sapiens
  misc_RNA (1)...(19): siRNA sense strand
acgagugucugcacaacaa

SEQ ID NO: 595248 - RNA, 19 nt, Homo sapiens
  misc_RNA (1)...(19): siRNA sense strand
caacccagucuacaggaaa

SEQ ID NO: 595249 - RNA, 19 nt, Homo sapiens
  misc_RNA (1)...(19): siRNA sense strand
caagauuggcuuugaaugc

SEQ ID NO: 595250 - RNA, 19 nt, Homo sapiens
  misc_RNA (1)...(19): siRNA sense strand
cugcgaggguucauguauu

SEQ ID NO: 595251 - RNA, 19 nt, Homo sapiens
  misc_RNA (1)...(19): siRNA sense strand
gaccucuccuaccguaaga

SEQ ID NO: 595252 - RNA, 19 nt, Homo sapiens
  misc_RNA (1)...(19): siRNA sense strand
gggaccaggccaagauuga

SEQ ID NO: 595253 - RNA, 19 nt, Homo sapiens
  misc_RNA (1)...(19): siRNA sense strand
ugcgaggguucauguauug

SEQ ID NO: 595254 - RNA, 19 nt, Homo sapiens
  misc_RNA (1)...(19): siRNA sense strand
ggaagcggaagaacaccaa

SEQ ID NO: 595255 - RNA, 19 nt, Homo sapiens
  misc_RNA (1)...(19): siRNA sense strand
ggcauuaagccuugaagau

SEQ ID NO: 595256 - RNA, 19 nt, Homo sapiens
  misc_RNA (1)...(19): siRNA sense strand
ucagauuggccaugucuau

SEQ ID NO: 595257 - RNA, 19 nt, Homo sapiens
  misc_RNA (1)...(19): siRNA sense strand
gcagccagaucugugucaa

SEQ ID NO: 595258 - RNA, 19 nt, Homo sapiens
  misc_RNA (1)...(19): siRNA sense strand
aaaugaagacaguaagaug

SEQ ID NO: 595259 - RNA, 19 nt, Homo sapiens
  misc_RNA (1)...(19): siRNA sense strand
uggacugacucgggcaaua

SEQ ID NO: 595260 - RNA, 19 nt, Homo sapiens
  misc_RNA (1)...(19): siRNA sense strand
gcacucucuucagccguaa

SEQ ID NO: 595261 - RNA, 19 nt, Homo sapiens
  misc_RNA (1)...(19): siRNA sense strand
gggagaacugcucagauug

SEQ ID NO: 595262 - RNA, 19 nt, Homo sapiens
  misc_RNA (1)...(19): siRNA sense strand
aaacaacagaagaagaaga

SEQ ID NO: 595263 - RNA, 19 nt, Homo sapiens
  misc_RNA (1)...(19): siRNA sense strand
cagccacucucccaaguac

SEQ ID NO: 595264 - RNA, 19 nt, Homo sapiens
  misc_RNA (1)...(19): siRNA sense strand
aagauuggcuuugaaugca

SEQ ID NO: 595265 - RNA, 19 nt, Homo sapiens
  misc_RNA (1)...(19): siRNA sense strand
ugauagcccuccugugcau

SEQ ID NO: 595266 - RNA, 19 nt, Homo sapiens
  misc_RNA (1)...(19): siRNA sense strand
ugggauagcuguguuugag

SEQ ID NO: 595267 - RNA, 19 nt, Homo sapiens
  misc_RNA (1)...(19): siRNA sense strand
gaucuccuccacugacuuc

SEQ ID NO: 595268 - RNA, 19 nt, Homo sapiens
  misc_RNA (1)...(19): siRNA sense strand
gaccaggccaagauugaga

SEQ ID NO: 595269 - RNA, 19 nt, Homo sapiens
  misc_RNA (1)...(19): siRNA sense strand
gaucuauagcgccuacaug

SEQ ID NO: 595270 - RNA, 19 nt, Homo sapiens
  misc_RNA (1)...(19): siRNA sense strand
ccaccaaucgcaucuacug

SEQ ID NO: 595271 - RNA, 19 nt, Homo sapiens
  misc_RNA (1)...(19): siRNA sense strand
agauggaccuacugaccaa

SEQ ID NO: 595272 - RNA, 19 nt, Homo sapiens
  misc_RNA (1)...(19): siRNA sense strand
caagggcuauuuuaagugu

SEQ ID NO: 595273 - RNA, 19 nt, Homo sapiens
  misc_RNA (1)...(19): siRNA sense strand
ggacgaugacugcuuagac

SEQ ID NO: 595274 - RNA, 19 nt, Homo sapiens
  misc_RNA (1)...(19): siRNA sense strand
gccagaucugugucaauua

SEQ ID NO: 595275 - RNA, 19 nt, Homo sapiens
  misc_RNA (1)...(19): siRNA sense strand
ccugauggcuccgaugagu

SEQ ID NO: 595276 - RNA, 19 nt, Homo sapiens
  misc_RNA (1)...(19): siRNA sense strand
gguguguccugcagagaag

SEQ ID NO: 595277 - RNA, 19 nt, Homo sapiens
  misc_RNA (1)...(19): siRNA sense strand
gggaucaucgugcccauag

SEQ ID NO: 595278 - RNA, 19 nt, Homo sapiens
  misc_RNA (1)...(19): siRNA sense strand
gcacuagauguggaaguug

SEQ ID NO: 595279 - RNA, 19 nt, Homo sapiens
  misc_RNA (1)...(19): siRNA sense strand
gaugcgacgaggacgauga

SEQ ID NO: 595280 - RNA, 19 nt, Homo sapiens
  misc_RNA (1)...(19): siRNA sense strand
ggaaaacaacagaagaaga

SEQ ID NO: 595281 - RNA, 19 nt, Homo sapiens
  misc_RNA (1)...(19): siRNA sense strand
ggacccaccagccacaagu

SEQ ID NO: 595282 - RNA, 19 nt, Homo sapiens
  misc_RNA (1)...(19): siRNA sense strand
gaagcggaagaacaccaaa

SEQ ID NO: 595283 - RNA, 19 nt, Homo sapiens
  misc_RNA (1)...(19): siRNA sense strand
gagcuccagaugccuguga

SEQ ID NO: 595284 - RNA, 19 nt, Homo sapiens
  misc_RNA (1)...(19): siRNA sense strand
gucagacaauauugaaugg

SEQ ID NO: 595285 - RNA, 19 nt, Homo sapiens
  misc_RNA (1)...(19): siRNA sense strand
agaucugugucaauuacaa

SEQ ID NO: 595286 - RNA, 19 nt, Homo sapiens
  misc_RNA (1)...(19): siRNA sense strand
acaacccagucuacaggaa

SEQ ID NO: 595287 - RNA, 19 nt, Homo sapiens
  misc_RNA (1)...(19): siRNA sense strand
gaggacgacugccccaaga

SEQ ID NO: 595288 - RNA, 19 nt, Homo sapiens
  misc_RNA (1)...(19): siRNA sense strand
cuaauggaggcugugaaua

SEQ ID NO: 595289 - RNA, 19 nt, Homo sapiens
  misc_RNA (1)...(19): siRNA sense strand
ccuaauggaggcugugaau

SEQ ID NO: 595290 - RNA, 19 nt, Homo sapiens
  misc_RNA (1)...(19): siRNA sense strand
uagcuguguuugaggacaa

SEQ ID NO: 595291 - RNA, 19 nt, Homo sapiens
  misc_RNA (1)...(19): siRNA sense strand
caacagaaagacgcugauc

SEQ ID NO: 595292 - RNA, 19 nt, Homo sapiens
  misc_RNA (1)...(19): siRNA sense strand
caacggaaucacccuggau

SEQ ID NO: 595293 - RNA, 19 nt, Homo sapiens
  misc_RNA (1)...(19): siRNA sense strand
acaguaagaugggcucaac

SEQ ID NO: 595294 - RNA, 19 nt, Homo sapiens
  misc_RNA (1)...(19): siRNA sense strand
gaaccucaacaacccacau

SEQ ID NO: 595295 - RNA, 19 nt, Homo sapiens
  misc_RNA (1)...(19): siRNA sense strand
uacaagggcuauuuuaagu

SEQ ID NO: 595296 - RNA, 19 nt, Homo sapiens
  misc_RNA (1)...(19): siRNA sense strand
cagccaagagcuccagaug

SEQ ID NO: 595297 - RNA, 19 nt, Homo sapiens
  misc_RNA (1)...(19): siRNA sense strand
acagaaagacgcugaucuc

SEQ ID NO: 595298 - RNA, 19 nt, Homo sapiens
  misc_RNA (1)...(19): siRNA sense strand
gaauggcccaacggaauca

SEQ ID NO: 595299 - RNA, 19 nt, Homo sapiens
  misc_RNA (1)...(19): siRNA sense strand
uggugaagcggaacuauuc

SEQ ID NO: 595300 - RNA, 19 nt, Homo sapiens
  misc_RNA (1)...(19): siRNA sense strand
gaggaucgaccuggugaag

SEQ ID NO: 595301 - RNA, 19 nt, Homo sapiens
  misc_RNA (1)...(19): siRNA sense strand
gagaugcgacgaggacgau

SEQ ID NO: 595302 - RNA, 19 nt, Homo sapiens
  misc_RNA (1)...(19): siRNA sense strand
aauggcggcugcucacaca

SEQ ID NO: 595303 - RNA, 19 nt, Homo sapiens
  misc_RNA (1)...(19): siRNA sense strand
ccagccacucucccaagua

SEQ ID NO: 595304 - RNA, 19 nt, Homo sapiens
  misc_RNA (1)...(19): siRNA sense strand
gcucaauggccuggaaauc

SEQ ID NO: 595305 - RNA, 19 nt, Homo sapiens
  misc_RNA (1)...(19): siRNA sense strand
ucaguggaggcaacagaaa

SEQ ID NO: 595306 - RNA, 19 nt, Homo sapiens
  misc_RNA (1)...(19): siRNA sense strand
ugaauggcccaacggaauc

SEQ ID NO: 595307 - RNA, 19 nt, Homo sapiens
  misc_RNA (1)...(19): siRNA sense strand
ucuccuaccguaagaucua

SEQ ID NO: 595308 - RNA, 19 nt, Homo sapiens
  misc_RNA (1)...(19): siRNA sense strand
cuggguagacuccaagcua

SEQ ID NO: 595309 - RNA, 19 nt, Homo sapiens
  misc_RNA (1)...(19): siRNA sense strand
gcucagauuggccaugucu

SEQ ID NO: 595310 - RNA, 19 nt, Homo sapiens
  misc_RNA (1)...(19): siRNA sense strand
guaagaugggcucaacagu

SEQ ID NO: 595311 - RNA, 19 nt, Homo sapiens
  misc_RNA (1)...(19): siRNA sense strand
ggacagaccuggagaacga

SEQ ID NO: 595312 - RNA, 19 nt, Homo sapiens
  misc_RNA (1)...(19): siRNA sense strand
gcacugaccucaagauugg

SEQ ID NO: 595313 - RNA, 19 nt, Homo sapiens
  misc_RNA (1)...(19): siRNA sense strand
cgaggacgaugacugcuua

SEQ ID NO: 595314 - RNA, 19 nt, Homo sapiens
  misc_RNA (1)...(19): siRNA sense strand
gaagaugagcuccauauag

SEQ ID NO: 595315 - RNA, 19 nt, Homo sapiens
  misc_RNA (1)...(19): siRNA sense strand
gcaauaagaccaucucagu

SEQ ID NO: 595316 - RNA, 19 nt, Homo sapiens
  misc_RNA (1)...(19): siRNA sense strand
caacaacccacaugacauu

SEQ ID NO: 595317 - RNA, 19 nt, Homo sapiens
  misc_RNA (1)...(19): siRNA sense strand
cauuaagccuugaagauga

SEQ ID NO: 595318 - RNA, 19 nt, Homo sapiens
  misc_RNA (1)...(19): siRNA sense strand
ggacugacucgggcaauaa

SEQ ID NO: 595319 - RNA, 19 nt, Homo sapiens
  misc_RNA (1)...(19): siRNA sense strand
gaaaacaacagaagaagaa

SEQ ID NO: 595320 - RNA, 19 nt, Homo sapiens
  misc_RNA (1)...(19): siRNA sense strand
gcaaaugaagacaguaaga

SEQ ID NO: 595321 - RNA, 19 nt, Homo sapiens
  misc_RNA (1)...(19): siRNA sense strand
gcauuaagccuugaagaug

SEQ ID NO: 595322 - RNA, 19 nt, Homo sapiens
  misc_RNA (1)...(19): siRNA sense strand
gcucacacaucugcacuga

SEQ ID NO: 595323 - RNA, 19 nt, Homo sapiens
  misc_RNA (1)...(19): siRNA sense strand
agggagaacugcucagauu

SEQ ID NO: 595324 - RNA, 19 nt, Homo sapiens
  misc_RNA (1)...(19): siRNA sense strand
aagaugggcucaacaguca

SEQ ID NO: 595325 - RNA, 19 nt, Homo sapiens
  misc_RNA (1)...(19): siRNA sense strand
aagaugagcuccauauagg

SEQ ID NO: 595326 - RNA, 19 nt, Homo sapiens
  misc_RNA (1)...(19): siRNA sense strand
ccagaucugugucaauuac

SEQ ID NO: 595327 - RNA, 19 nt, Homo sapiens
  misc_RNA (1)...(19): siRNA sense strand
ccuugaagaugauggacua

SEQ ID NO: 595328 - RNA, 19 nt, Homo sapiens
  misc_RNA (1)...(19): siRNA sense strand
gaacgagugucugcacaac

SEQ ID NO: 595329 - RNA, 19 nt, Homo sapiens
  misc_RNA (1)...(19): siRNA sense strand
ucaauuacaagggcuauuu

SEQ ID NO: 595330 - RNA, 19 nt, Homo sapiens
  misc_RNA (1)...(19): siRNA sense strand
caucugcacugaccucaag

SEQ ID NO: 595331 - RNA, 19 nt, Homo sapiens
  misc_RNA (1)...(19): siRNA sense strand
ggcacuagauguggaaguu

SEQ ID NO: 595332 - RNA, 19 nt, Homo sapiens
  misc_RNA (1)...(19): siRNA sense strand
gaacuauucacgccucauc

SEQ ID NO: 595333 - RNA, 19 nt, Homo sapiens
  misc_RNA (1)...(19): siRNA sense strand
caaggccagugacccgaaa

SEQ ID NO: 595334 - RNA, 19 nt, Homo sapiens
  misc_RNA (1)...(19): siRNA sense strand
aagaagaccugugcagaca

SEQ ID NO: 595335 - RNA, 19 nt, Homo sapiens
  misc_RNA (1)...(19): siRNA sense strand
gagccacccuuuugggaua

SEQ ID NO: 595336 - RNA, 19 nt, Homo sapiens
  misc_RNA (1)...(19): siRNA sense strand
gagcccaucccuaaucuuc

SEQ ID NO: 595337 - RNA, 19 nt, Homo sapiens
  misc_RNA (1)...(19): siRNA sense strand
agccagaucugugucaauu

SEQ ID NO: 595338 - RNA, 19 nt, Homo sapiens
  misc_RNA (1)...(19): siRNA sense strand
ggagaacugcucagauugg

SEQ ID NO: 595339 - RNA, 19 nt, Homo sapiens
  misc_RNA (1)...(19): siRNA sense strand
gaucaucgugcccauagug

SEQ ID NO: 595340 - RNA, 19 nt, Homo sapiens
  misc_RNA (1)...(19): siRNA sense strand
ucaauggccuggaaaucuc

SEQ ID NO: 595341 - RNA, 19 nt, Homo sapiens
  misc_RNA (1)...(19): siRNA sense strand
uaauggaggcugugaauac

SEQ ID NO: 595342 - RNA, 19 nt, Homo sapiens
  misc_RNA (1)...(19): siRNA sense strand
caaaugaagacaguaagau

SEQ ID NO: 595343 - RNA, 19 nt, Homo sapiens
  misc_RNA (1)...(19): siRNA sense strand
acgagugucugcacaacaa

SEQ ID NO: 595344 - RNA, 19 nt, Homo sapiens
  misc_RNA (1)...(19): siRNA sense strand
caacccagucuacaggaaa

SEQ ID NO: 595345 - RNA, 19 nt, Homo sapiens
  misc_RNA (1)...(19): siRNA sense strand
caagauuggcuuugaaugc

SEQ ID NO: 595346 - RNA, 19 nt, Homo sapiens
  misc_RNA (1)...(19): siRNA sense strand
cugcgaggguucauguauu

SEQ ID NO: 595347 - RNA, 19 nt, Homo sapiens
  misc_RNA (1)...(19): siRNA sense strand
gaccucuccuaccguaaga

SEQ ID NO: 595348 - RNA, 19 nt, Homo sapiens
  misc_RNA (1)...(19): siRNA sense strand
gggaccaggccaagauuga

SEQ ID NO: 595349 - RNA, 19 nt, Homo sapiens
  misc_RNA (1)...(19): siRNA sense strand
ugcgaggguucauguauug

SEQ ID NO: 595350 - RNA, 19 nt, Homo sapiens
  misc_RNA (1)...(19): siRNA sense strand
ggaagcggaagaacaccaa

SEQ ID NO: 595351 - RNA, 19 nt, Homo sapiens
  misc_RNA (1)...(19): siRNA sense strand
ggcauuaagccuugaagau

SEQ ID NO: 595352 - RNA, 19 nt, Homo sapiens
  misc_RNA (1)...(19): siRNA sense strand
ucagauuggccaugucuau

SEQ ID NO: 595353 - RNA, 19 nt, Homo sapiens
  misc_RNA (1)...(19): siRNA sense strand
gcagccagaucugugucaa

SEQ ID NO: 595354 - RNA, 19 nt, Homo sapiens
  misc_RNA (1)...(19): siRNA sense strand
aaaugaagacaguaagaug

SEQ ID NO: 595355 - RNA, 19 nt, Homo sapiens
  misc_RNA (1)...(19): siRNA sense strand
uggacugacucgggcaaua

SEQ ID NO: 595356 - RNA, 19 nt, Homo sapiens
  misc_RNA (1)...(19): siRNA sense strand
gcacucucuucagccguaa

SEQ ID NO: 595357 - RNA, 19 nt, Homo sapiens
  misc_RNA (1)...(19): siRNA sense strand
gggagaacugcucagauug

SEQ ID NO: 595358 - RNA, 19 nt, Homo sapiens
  misc_RNA (1)...(19): siRNA sense strand
aaacaacagaagaagaaga

SEQ ID NO: 595359 - RNA, 19 nt, Homo sapiens
  misc_RNA (1)...(19): siRNA sense strand
cagccacucucccaaguac

SEQ ID NO: 595360 - RNA, 19 nt, Homo sapiens
  misc_RNA (1)...(19): siRNA sense strand
aagauuggcuuugaaugca

SEQ ID NO: 595361 - RNA, 19 nt, Homo sapiens
  misc_RNA (1)...(19): siRNA sense strand
ugauagcccuccugugcau

SEQ ID NO: 595362 - RNA, 19 nt, Homo sapiens
  misc_RNA (1)...(19): siRNA sense strand
ugggauagcuguguuugag

SEQ ID NO: 595363 - RNA, 19 nt, Homo sapiens
  misc_RNA (1)...(19): siRNA sense strand
gaucuccuccacugacuuc

SEQ ID NO: 595364 - RNA, 19 nt, Homo sapiens
  misc_RNA (1)...(19): siRNA sense strand
gaccaggccaagauugaga

SEQ ID NO: 595365 - RNA, 19 nt, Homo sapiens
  misc_RNA (1)...(19): siRNA sense strand
gaucuauagcgccuacaug

SEQ ID NO: 595366 - RNA, 19 nt, Homo sapiens
  misc_RNA (1)...(19): siRNA sense strand
ccaccaaucgcaucuacug

SEQ ID NO: 595367 - RNA, 19 nt, Homo sapiens
  misc_RNA (1)...(19): siRNA sense strand
agauggaccuacugaccaa

SEQ ID NO: 595368 - RNA, 19 nt, Homo sapiens
  misc_RNA (1)...(19): siRNA sense strand
caagggcuauuuuaagugu

SEQ ID NO: 595369 - RNA, 19 nt, Homo sapiens
  misc_RNA (1)...(19): siRNA sense strand
ggacgaugacugcuuagac

SEQ ID NO: 595370 - RNA, 19 nt, Homo sapiens
  misc_RNA (1)...(19): siRNA sense strand
gccagaucugugucaauua

SEQ ID NO: 595371 - RNA, 19 nt, Homo sapiens
  misc_RNA (1)...(19): siRNA sense strand
ccugauggcuccgaugagu

SEQ ID NO: 595372 - RNA, 19 nt, Homo sapiens
  misc_RNA (1)...(19): siRNA sense strand
gguguguccugcagagaag

SEQ ID NO: 595373 - RNA, 19 nt, Homo sapiens
  misc_RNA (1)...(19): siRNA sense strand
gggaucaucgugcccauag

SEQ ID NO: 595374 - RNA, 19 nt, Homo sapiens
  misc_RNA (1)...(19): siRNA sense strand
gcacuagauguggaaguug

SEQ ID NO: 595375 - RNA, 19 nt, Homo sapiens
  misc_RNA (1)...(19): siRNA sense strand
gaugcgacgaggacgauga

SEQ ID NO: 595376 - RNA, 19 nt, Homo sapiens
  misc_RNA (1)...(19): siRNA sense strand
ggaaaacaacagaagaaga

SEQ ID NO: 595377 - RNA, 19 nt, Homo sapiens
  misc_RNA (1)...(19): siRNA sense strand
ggacccaccagccacaagu

SEQ ID NO: 595378 - RNA, 19 nt, Homo sapiens
  misc_RNA (1)...(19): siRNA sense strand
gaagcggaagaacaccaaa

SEQ ID NO: 595379 - RNA, 19 nt, Homo sapiens
  misc_RNA (1)...(19): siRNA sense strand
gagcuccagaugccuguga

SEQ ID NO: 595380 - RNA, 19 nt, Homo sapiens
  misc_RNA (1)...(19): siRNA sense strand
gucagacaauauugaaugg

SEQ ID NO: 595381 - RNA, 19 nt, Homo sapiens
  misc_RNA (1)...(19): siRNA sense strand
agaucugugucaauuacaa

SEQ ID NO: 595382 - RNA, 19 nt, Homo sapiens
  misc_RNA (1)...(19): siRNA sense strand
acaacccagucuacaggaa

SEQ ID NO: 595383 - RNA, 19 nt, Homo sapiens
  misc_RNA (1)...(19): siRNA sense strand
gaggacgacugccccaaga

SEQ ID NO: 595384 - RNA, 19 nt, Homo sapiens
  misc_RNA (1)...(19): siRNA sense strand
cuaauggaggcugugaaua

SEQ ID NO: 595385 - RNA, 19 nt, Homo sapiens
  misc_RNA (1)...(19): siRNA sense strand
ccuaauggaggcugugaau

SEQ ID NO: 595386 - RNA, 19 nt, Homo sapiens
  misc_RNA (1)...(19): siRNA sense strand
uagcuguguuugaggacaa

SEQ ID NO: 595387 - RNA, 19 nt, Homo sapiens
  misc_RNA (1)...(19): siRNA sense strand
caacagaaagacgcugauc

SEQ ID NO: 595388 - RNA, 19 nt, Homo sapiens
  misc_RNA (1)...(19): siRNA sense strand
caacggaaucacccuggau

SEQ ID NO: 595389 - RNA, 19 nt, Homo sapiens
  misc_RNA (1)...(19): siRNA sense strand
acaguaagaugggcucaac

SEQ ID NO: 595390 - RNA, 19 nt, Homo sapiens
  misc_RNA (1)...(19): siRNA sense strand
gaaccucaacaacccacau

SEQ ID NO: 595391 - RNA, 19 nt, Homo sapiens
  misc_RNA (1)...(19): siRNA sense strand
uacaagggcuauuuuaagu

SEQ ID NO: 595392 - RNA, 19 nt, Homo sapiens
  misc_RNA (1)...(19): siRNA sense strand
cagccaagagcuccagaug

SEQ ID NO: 595393 - RNA, 19 nt, Homo sapiens
  misc_RNA (1)...(19): siRNA sense strand
acagaaagacgcugaucuc

SEQ ID NO: 595394 - RNA, 19 nt, Homo sapiens
  misc_RNA (1)...(19): siRNA sense strand
gaauggcccaacggaauca

SEQ ID NO: 595395 - RNA, 19 nt, Homo sapiens
  misc_RNA (1)...(19): siRNA sense strand
uggugaagcggaacuauuc

SEQ ID NO: 595396 - RNA, 19 nt, Homo sapiens
  misc_RNA (1)...(19): siRNA sense strand
gaggaucgaccuggugaag

SEQ ID NO: 595397 - RNA, 19 nt, Homo sapiens
  misc_RNA (1)...(19): siRNA sense strand
gagaugcgacgaggacgau

SEQ ID NO: 595398 - RNA, 19 nt, Homo sapiens
  misc_RNA (1)...(19): siRNA sense strand
aauggcggcugcucacaca

SEQ ID NO: 595399 - RNA, 19 nt, Homo sapiens
  misc_RNA (1)...(19): siRNA sense strand
ccagccacucucccaagua

SEQ ID NO: 595400 - RNA, 19 nt, Homo sapiens
  misc_RNA (1)...(19): siRNA sense strand
gcucaauggccuggaaauc

SEQ ID NO: 595401 - RNA, 19 nt, Homo sapiens
  misc_RNA (1)...(19): siRNA sense strand
ucaguggaggcaacagaaa

SEQ ID NO: 595402 - RNA, 19 nt, Homo sapiens
  misc_RNA (1)...(19): siRNA sense strand
ugaauggcccaacggaauc

SEQ ID NO: 595403 - RNA, 19 nt, Homo sapiens
  misc_RNA (1)...(19): siRNA sense strand
ucuccuaccguaagaucua

SEQ ID NO: 595404 - RNA, 19 nt, Homo sapiens
  misc_RNA (1)...(19): siRNA sense strand
cuggguagacuccaagcua

SEQ ID NO: 595405 - RNA, 19 nt, Homo sapiens
  misc_RNA (1)...(19): siRNA sense strand
gcucagauuggccaugucu

SEQ ID NO: 595406 - RNA, 19 nt, Homo sapiens
  misc_RNA (1)...(19): siRNA sense strand
guaagaugggcucaacagu

SEQ ID NO: 595407 - RNA, 19 nt, Homo sapiens
  misc_RNA (1)...(19): siRNA sense strand
ggacagaccuggagaacga

SEQ ID NO: 595408 - RNA, 19 nt, Homo sapiens
  misc_RNA (1)...(19): siRNA sense strand
gcacugaccucaagauugg

SEQ ID NO: 595409 - RNA, 19 nt, Homo sapiens
  misc_RNA (1)...(19): siRNA sense strand
cgaggacgaugacugcuua

SEQ ID NO: 595410 - RNA, 19 nt, Homo sapiens
  misc_RNA (1)...(19): siRNA sense strand
gaagaugagcuccauauag

SEQ ID NO: 595411 - RNA, 19 nt, Homo sapiens
  misc_RNA (1)...(19): siRNA sense strand
gcaauaagaccaucucagu

SEQ ID NO: 595412 - RNA, 19 nt, Homo sapiens
  misc_RNA (1)...(19): siRNA sense strand
caacaacccacaugacauu

SEQ ID NO: 595413 - RNA, 19 nt, Homo sapiens
  misc_RNA (1)...(19): siRNA sense strand
cauuaagccuugaagauga

SEQ ID NO: 595414 - RNA, 19 nt, Homo sapiens
  misc_RNA (1)...(19): siRNA sense strand
ggacugacucgggcaauaa

SEQ ID NO: 595415 - RNA, 19 nt, Homo sapiens
  misc_RNA (1)...(19): siRNA sense strand
gaaaacaacagaagaagaa

SEQ ID NO: 595416 - RNA, 19 nt, Homo sapiens
  misc_RNA (1)...(19): siRNA sense strand
gcaaaugaagacaguaaga

SEQ ID NO: 595417 - RNA, 19 nt, Homo sapiens
  misc_RNA (1)...(19): siRNA sense strand
gcauuaagccuugaagaug

SEQ ID NO: 595418 - RNA, 19 nt, Homo sapiens
  misc_RNA (1)...(19): siRNA sense strand
gcucacacaucugcacuga

SEQ ID NO: 595419 - RNA, 19 nt, Homo sapiens
  misc_RNA (1)...(19): siRNA sense strand
agggagaacugcucagauu

SEQ ID NO: 595420 - RNA, 19 nt, Homo sapiens
  misc_RNA (1)...(19): siRNA sense strand
aagaugggcucaacaguca

SEQ ID NO: 595421 - RNA, 19 nt, Homo sapiens
  misc_RNA (1)...(19): siRNA sense strand
aagaugagcuccauauagg

SEQ ID NO: 595422 - RNA, 19 nt, Homo sapiens
  misc_RNA (1)...(19): siRNA sense strand
ccagaucugugucaauuac

SEQ ID NO: 595423 - RNA, 19 nt, Homo sapiens
  misc_RNA (1)...(19): siRNA sense strand
ccuugaagaugauggacua

SEQ ID NO: 595424 - RNA, 19 nt, Homo sapiens
  misc_RNA (1)...(19): siRNA sense strand
gaacgagugucugcacaac

SEQ ID NO: 595425 - RNA, 19 nt, Homo sapiens
  misc_RNA (1)...(19): siRNA sense strand
ucaauuacaagggcuauuu

SEQ ID NO: 595426 - RNA, 19 nt, Homo sapiens
  misc_RNA (1)...(19): siRNA sense strand
caucugcacugaccucaag

SEQ ID NO: 595427 - RNA, 19 nt, Homo sapiens
  misc_RNA (1)...(19): siRNA sense strand
ggcacuagauguggaaguu

SEQ ID NO: 595428 - RNA, 19 nt, Homo sapiens
  misc_RNA (1)...(19): siRNA sense strand
gaacuauucacgccucauc

SEQ ID NO: 595429 - RNA, 19 nt, Homo sapiens
  misc_RNA (1)...(19): siRNA sense strand
caaggccagugacccgaaa

SEQ ID NO: 595430 - RNA, 19 nt, Homo sapiens
  misc_RNA (1)...(19): siRNA sense strand
aagaagaccugugcagaca

SEQ ID NO: 595431 - RNA, 19 nt, Homo sapiens
  misc_RNA (1)...(19): siRNA sense strand
gagccacccuuuugggaua

SEQ ID NO: 595432 - RNA, 19 nt, Homo sapiens
  misc_RNA (1)...(19): siRNA sense strand
gagcccaucccuaaucuuc

SEQ ID NO: 595433 - RNA, 19 nt, Homo sapiens
  misc_RNA (1)...(19): siRNA sense strand
agccagaucugugucaauu

SEQ ID NO: 595434 - RNA, 19 nt, Homo sapiens
  misc_RNA (1)...(19): siRNA sense strand
ggagaacugcucagauugg

SEQ ID NO: 595435 - RNA, 19 nt, Homo sapiens
  misc_RNA (1)...(19): siRNA sense strand
gaucaucgugcccauagug

SEQ ID NO: 595436 - RNA, 19 nt, Homo sapiens
  misc_RNA (1)...(19): siRNA sense strand
ucaauggccuggaaaucuc

SEQ ID NO: 595437 - RNA, 19 nt, Homo sapiens
  misc_RNA (1)...(19): siRNA sense strand
uaauggaggcugugaauac

SEQ ID NO: 595438 - RNA, 19 nt, Homo sapiens
  misc_RNA (1)...(19): siRNA sense strand
caaaugaagacaguaagau

SEQ ID NO: 595439 - RNA, 19 nt, Homo sapiens
  misc_RNA (1)...(19): siRNA sense strand
acgagugucugcacaacaa

SEQ ID NO: 595440 - RNA, 19 nt, Homo sapiens
  misc_RNA (1)...(19): siRNA sense strand
caacccagucuacaggaaa

SEQ ID NO: 595441 - RNA, 19 nt, Homo sapiens
  misc_RNA (1)...(19): siRNA sense strand
caagauuggcuuugaaugc

SEQ ID NO: 595442 - RNA, 19 nt, Homo sapiens
  misc_RNA (1)...(19): siRNA sense strand
cugcgaggguucauguauu

SEQ ID NO: 595443 - RNA, 19 nt, Homo sapiens
  misc_RNA (1)...(19): siRNA sense strand
gaccucuccuaccguaaga

SEQ ID NO: 595444 - RNA, 19 nt, Homo sapiens
  misc_RNA (1)...(19): siRNA sense strand
gggaccaggccaagauuga

SEQ ID NO: 595445 - RNA, 19 nt, Homo sapiens
  misc_RNA (1)...(19): siRNA sense strand
ugcgaggguucauguauug

SEQ ID NO: 595446 - RNA, 19 nt, Homo sapiens
  misc_RNA (1)...(19): siRNA sense strand
ggaagcggaagaacaccaa

SEQ ID NO: 595447 - RNA, 19 nt, Homo sapiens
  misc_RNA (1)...(19): siRNA sense strand
ggcauuaagccuugaagau

SEQ ID NO: 595448 - RNA, 19 nt, Homo sapiens
  misc_RNA (1)...(19): siRNA sense strand
ucagauuggccaugucuau

SEQ ID NO: 595449 - RNA, 19 nt, Homo sapiens
  misc_RNA (1)...(19): siRNA sense strand
gcagccagaucugugucaa

SEQ ID NO: 595450 - RNA, 19 nt, Homo sapiens
  misc_RNA (1)...(19): siRNA sense strand
aaaugaagacaguaagaug

SEQ ID NO: 595451 - RNA, 19 nt, Homo sapiens
  misc_RNA (1)...(19): siRNA sense strand
uggacugacucgggcaaua

SEQ ID NO: 595452 - RNA, 19 nt, Homo sapiens
  misc_RNA (1)...(19): siRNA sense strand
gcacucucuucagccguaa

SEQ ID NO: 595453 - RNA, 19 nt, Homo sapiens
  misc_RNA (1)...(19): siRNA sense strand
gggagaacugcucagauug

SEQ ID NO: 595454 - RNA, 19 nt, Homo sapiens
  misc_RNA (1)...(19): siRNA sense strand
aaacaacagaagaagaaga

SEQ ID NO: 595455 - RNA, 19 nt, Homo sapiens
  misc_RNA (1)...(19): siRNA sense strand
cagccacucucccaaguac

SEQ ID NO: 595456 - RNA, 19 nt, Homo sapiens
  misc_RNA (1)...(19): siRNA sense strand
aagauuggcuuugaaugca

SEQ ID NO: 595457 - RNA, 19 nt, Homo sapiens
  misc_RNA (1)...(19): siRNA sense strand
ugauagcccuccugugcau

SEQ ID NO: 595458 - RNA, 19 nt, Homo sapiens
  misc_RNA (1)...(19): siRNA sense strand
ugggauagcuguguuugag

SEQ ID NO: 595459 - RNA, 19 nt, Homo sapiens
  misc_RNA (1)...(19): siRNA sense strand
gaucuccuccacugacuuc

SEQ ID NO: 595460 - RNA, 19 nt, Homo sapiens
  misc_RNA (1)...(19): siRNA sense strand
gaccaggccaagauugaga

SEQ ID NO: 595461 - RNA, 19 nt, Homo sapiens
  misc_RNA (1)...(19): siRNA sense strand
gaucuauagcgccuacaug

SEQ ID NO: 595462 - RNA, 19 nt, Homo sapiens
  misc_RNA (1)...(19): siRNA sense strand
ccaccaaucgcaucuacug

SEQ ID NO: 595463 - RNA, 19 nt, Homo sapiens
  misc_RNA (1)...(19): siRNA sense strand
agauggaccuacugaccaa

SEQ ID NO: 595464 - RNA, 19 nt, Homo sapiens
  misc_RNA (1)...(19): siRNA sense strand
caagggcuauuuuaagugu

SEQ ID NO: 595465 - RNA, 19 nt, Homo sapiens
  misc_RNA (1)...(19): siRNA sense strand
ggacgaugacugcuuagac

SEQ ID NO: 595466 - RNA, 19 nt, Homo sapiens
  misc_RNA (1)...(19): siRNA sense strand
gccagaucugugucaauua

SEQ ID NO: 595467 - RNA, 19 nt, Homo sapiens
  misc_RNA (1)...(19): siRNA sense strand
ccugauggcuccgaugagu

SEQ ID NO: 595468 - RNA, 19 nt, Homo sapiens
  misc_RNA (1)...(19): siRNA sense strand
gguguguccugcagagaag

SEQ ID NO: 595469 - RNA, 19 nt, Homo sapiens
  misc_RNA (1)...(19): siRNA sense strand
gggaucaucgugcccauag

SEQ ID NO: 595470 - RNA, 19 nt, Homo sapiens
  misc_RNA (1)...(19): siRNA sense strand
gcacuagauguggaaguug

SEQ ID NO: 595471 - RNA, 19 nt, Homo sapiens
  misc_RNA (1)...(19): siRNA sense strand
gaugcgacgaggacgauga

SEQ ID NO: 595472 - RNA, 19 nt, Homo sapiens
  misc_RNA (1)...(19): siRNA sense strand
ggaaaacaacagaagaaga

SEQ ID NO: 595473 - RNA, 19 nt, Homo sapiens
  misc_RNA (1)...(19): siRNA sense strand
ggacccaccagccacaagu

SEQ ID NO: 595474 - RNA, 19 nt, Homo sapiens
  misc_RNA (1)...(19): siRNA sense strand
gaagcggaagaacaccaaa

SEQ ID NO: 595475 - RNA, 19 nt, Homo sapiens
  misc_RNA (1)...(19): siRNA sense strand
gagcuccagaugccuguga

SEQ ID NO: 595476 - RNA, 19 nt, Homo sapiens
  misc_RNA (1)...(19): siRNA sense strand
gucagacaauauugaaugg

SEQ ID NO: 595477 - RNA, 19 nt, Homo sapiens
  misc_RNA (1)...(19): siRNA sense strand
agaucugugucaauuacaa

SEQ ID NO: 595478 - RNA, 19 nt, Homo sapiens
  misc_RNA (1)...(19): siRNA sense strand
acaacccagucuacaggaa

SEQ ID NO: 595479 - RNA, 19 nt, Homo sapiens
  misc_RNA (1)...(19): siRNA sense strand
gaggacgacugccccaaga

SEQ ID NO: 595480 - RNA, 19 nt, Homo sapiens
  misc_RNA (1)...(19): siRNA sense strand
cuaauggaggcugugaaua

SEQ ID NO: 595481 - RNA, 19 nt, Homo sapiens
  misc_RNA (1)...(19): siRNA sense strand
ccuaauggaggcugugaau

SEQ ID NO: 595482 - RNA, 19 nt, Homo sapiens
  misc_RNA (1)...(19): siRNA sense strand
uagcuguguuugaggacaa

SEQ ID NO: 595483 - RNA, 19 nt, Homo sapiens
  misc_RNA (1)...(19): siRNA sense strand
caacagaaagacgcugauc

SEQ ID NO: 595484 - RNA, 19 nt, Homo sapiens
  misc_RNA (1)...(19): siRNA sense strand
caacggaaucacccuggau

SEQ ID NO: 595485 - RNA, 19 nt, Homo sapiens
  misc_RNA (1)...(19): siRNA sense strand
acaguaagaugggcucaac

SEQ ID NO: 595486 - RNA, 19 nt, Homo sapiens
  misc_RNA (1)...(19): siRNA sense strand
gaaccucaacaacccacau

SEQ ID NO: 595487 - RNA, 19 nt, Homo sapiens
  misc_RNA (1)...(19): siRNA sense strand
uacaagggcuauuuuaagu

SEQ ID NO: 595488 - RNA, 19 nt, Homo sapiens
  misc_RNA (1)...(19): siRNA sense strand
cagccaagagcuccagaug

SEQ ID NO: 595489 - RNA, 19 nt, Homo sapiens
  misc_RNA (1)...(19): siRNA sense strand
acagaaagacgcugaucuc

SEQ ID NO: 595490 - RNA, 19 nt, Homo sapiens
  misc_RNA (1)...(19): siRNA sense strand
gaauggcccaacggaauca

SEQ ID NO: 595491 - RNA, 19 nt, Homo sapiens
  misc_RNA (1)...(19): siRNA sense strand
uggugaagcggaacuauuc

SEQ ID NO: 595492 - RNA, 19 nt, Homo sapiens
  misc_RNA (1)...(19): siRNA sense strand
gaggaucgaccuggugaag

SEQ ID NO: 595493 - RNA, 19 nt, Homo sapiens
  misc_RNA (1)...(19): siRNA sense strand
gagaugcgacgaggacgau

SEQ ID NO: 595494 - RNA, 19 nt, Homo sapiens
  misc_RNA (1)...(19): siRNA sense strand
aauggcggcugcucacaca

SEQ ID NO: 595495 - RNA, 19 nt, Homo sapiens
  misc_RNA (1)...(19): siRNA sense strand
ccagccacucucccaagua

SEQ ID NO: 595496 - RNA, 19 nt, Homo sapiens
  misc_RNA (1)...(19): siRNA sense strand
gcucaauggccuggaaauc

SEQ ID NO: 595497 - RNA, 19 nt, Homo sapiens
  misc_RNA (1)...(19): siRNA sense strand
ucaguggaggcaacagaaa

SEQ ID NO: 595498 - RNA, 19 nt, Homo sapiens
  misc_RNA (1)...(19): siRNA sense strand
ugaauggcccaacggaauc

SEQ ID NO: 595499 - RNA, 19 nt, Homo sapiens
  misc_RNA (1)...(19): siRNA sense strand
ucuccuaccguaagaucua

SEQ ID NO: 595500 - RNA, 19 nt, Homo sapiens
  misc_RNA (1)...(19): siRNA sense strand
cuggguagacuccaagcua

SEQ ID NO: 595501 - RNA, 19 nt, Homo sapiens
  misc_RNA (1)...(19): siRNA sense strand
gcucagauuggccaugucu

SEQ ID NO: 595502 - RNA, 19 nt, Homo sapiens
  misc_RNA (1)...(19): siRNA sense strand
guaagaugggcucaacagu

SEQ ID NO: 595503 - RNA, 19 nt, Homo sapiens
  misc_RNA (1)...(19): siRNA sense strand
gcacauggauggaggacaa

SEQ ID NO: 595504 - RNA, 19 nt, Homo sapiens
  misc_RNA (1)...(19): siRNA sense strand
gcaaagaccgcucagauga

SEQ ID NO: 595505 - RNA, 19 nt, Homo sapiens
  misc_RNA (1)...(19): siRNA sense strand
gacaaaggaucacaucaug

SEQ ID NO: 595506 - RNA, 19 nt, Homo sapiens
  misc_RNA (1)...(19): siRNA sense strand
caaaggcuaugcguacgua

SEQ ID NO: 595507 - RNA, 19 nt, Homo sapiens
  misc_RNA (1)...(19): siRNA sense strand
ggauuuaucaggagugaaa

SEQ ID NO: 595508 - RNA, 19 nt, Homo sapiens
  misc_RNA (1)...(19): siRNA sense strand
caaaggaucacaucaugga

SEQ ID NO: 595509 - RNA, 19 nt, Homo sapiens
  misc_RNA (1)...(19): siRNA sense strand
guacguagaguuugagaau

SEQ ID NO: 595510 - RNA, 19 nt, Homo sapiens
  misc_RNA (1)...(19): siRNA sense strand
gaucacaucauggagauau

SEQ ID NO: 595511 - RNA, 19 nt, Homo sapiens
  misc_RNA (1)...(19): siRNA sense strand
aaggaucgcucaaaagaua

SEQ ID NO: 595512 - RNA, 19 nt, Homo sapiens
  misc_RNA (1)...(19): siRNA sense strand
ggagauauuuuccaccuau

SEQ ID NO: 595513 - RNA, 19 nt, Homo sapiens
  misc_RNA (1)...(19): siRNA sense strand
agaaggcgcugaagcacau

SEQ ID NO: 595514 - RNA, 19 nt, Homo sapiens
  misc_RNA (1)...(19): siRNA sense strand
ggaaugugacaaaggauca

SEQ ID NO: 595515 - RNA, 19 nt, Homo sapiens
  misc_RNA (1)...(19): siRNA sense strand
ccaccaaggagucgaguga

SEQ ID NO: 595516 - RNA, 19 nt, Homo sapiens
  misc_RNA (1)...(19): siRNA sense strand
cagaugagaaguccaagga

SEQ ID NO: 595517 - RNA, 19 nt, Homo sapiens
  misc_RNA (1)...(19): siRNA sense strand
ccaaauccaaaccaccuaa

SEQ ID NO: 595518 - RNA, 19 nt, Homo sapiens
  misc_RNA (1)...(19): siRNA sense strand
gcauccagccgcucaggaa

SEQ ID NO: 595519 - RNA, 19 nt, Homo sapiens
  misc_RNA (1)...(19): siRNA sense strand
gauggaggacaaauugaug

SEQ ID NO: 595520 - RNA, 19 nt, Homo sapiens
  misc_RNA (1)...(19): siRNA sense strand
ggauggaggacaaauugau

SEQ ID NO: 595521 - RNA, 19 nt, Homo sapiens
  misc_RNA (1)...(19): siRNA sense strand
ugacaaaggaucacaucau

SEQ ID NO: 595522 - RNA, 19 nt, Homo sapiens
  misc_RNA (1)...(19): siRNA sense strand
ucacaucauggagauauuu

SEQ ID NO: 595523 - RNA, 19 nt, Homo sapiens
  misc_RNA (1)...(19): siRNA sense strand
caaauccaaaccaccuaaa

SEQ ID NO: 595524 - RNA, 19 nt, Homo sapiens
  misc_RNA (1)...(19): siRNA sense strand
ccaaggagucgagugagaa

SEQ ID NO: 595525 - RNA, 19 nt, Homo sapiens
  misc_RNA (1)...(19): siRNA sense strand
guuugagaauccagaugaa

SEQ ID NO: 595526 - RNA, 19 nt, Homo sapiens
  misc_RNA (1)...(19): siRNA sense strand
gcuccaacuccucccgaua

SEQ ID NO: 595527 - RNA, 19 nt, Homo sapiens
  misc_RNA (1)...(19): siRNA sense strand
cccggaaugugacaaagga

SEQ ID NO: 595528 - RNA, 19 nt, Homo sapiens
  misc_RNA (1)...(19): siRNA sense strand
cuccaacuccucccgauaa

SEQ ID NO: 595529 - RNA, 19 nt, Homo sapiens
  misc_RNA (1)...(19): siRNA sense strand
gggagacucacccggaaug

SEQ ID NO: 595530 - RNA, 19 nt, Homo sapiens
  misc_RNA (1)...(19): siRNA sense strand
ccaaggaucgcucaaaaga

SEQ ID NO: 595531 - RNA, 19 nt, Homo sapiens
  misc_RNA (1)...(19): siRNA sense strand
ggagucgagugagaaggau

SEQ ID NO: 595532 - RNA, 19 nt, Homo sapiens
  misc_RNA (1)...(19): siRNA sense strand
guccaaggaucgcucaaaa

SEQ ID NO: 595533 - RNA, 19 nt, Homo sapiens
  misc_RNA (1)...(19): siRNA sense strand
gcuaugcguacguagaguu

SEQ ID NO: 595534 - RNA, 19 nt, Homo sapiens
  misc_RNA (1)...(19): siRNA sense strand
augcguacguagaguuuga

SEQ ID NO: 595535 - RNA, 19 nt, Homo sapiens
  misc_RNA (1)...(19): siRNA sense strand
cauggauggaggacaaauu

SEQ ID NO: 595536 - RNA, 19 nt, Homo sapiens
  misc_RNA (1)...(19): siRNA sense strand
ccacggaugaggagaaggu

SEQ ID NO: 595537 - RNA, 19 nt, Homo sapiens
  misc_RNA (1)...(19): siRNA sense strand
cgcaaagaccgcucagaug

SEQ ID NO: 595538 - RNA, 19 nt, Homo sapiens
  misc_RNA (1)...(19): siRNA sense strand
caaaccaccuaaaagagau

SEQ ID NO: 595539 - RNA, 19 nt, Homo sapiens
  misc_RNA (1)...(19): siRNA sense strand
accaaggagucgagugaga

SEQ ID NO: 595540 - RNA, 19 nt, Homo sapiens
  misc_RNA (1)...(19): siRNA sense strand
ccgagaaggcgcugaagca

SEQ ID NO: 595541 - RNA, 19 nt, Homo sapiens
  misc_RNA (1)...(19): siRNA sense strand
cuccuaagcccaccaaagu

SEQ ID NO: 595542 - RNA, 19 nt, Homo sapiens
  misc_RNA (1)...(19): siRNA sense strand
ccaaaccaccuaaaagaga

SEQ ID NO: 595543 - RNA, 19 nt, Homo sapiens
  misc_RNA (1)...(19): siRNA sense strand
acgcaaagaccgcucagau

SEQ ID NO: 595544 - RNA, 19 nt, Homo sapiens
  misc_RNA (1)...(19): siRNA sense strand
gcacauggauggaggacaa

SEQ ID NO: 595545 - RNA, 19 nt, Homo sapiens
  misc_RNA (1)...(19): siRNA sense strand
gcaaagaccgcucagauga

SEQ ID NO: 595546 - RNA, 19 nt, Homo sapiens
  misc_RNA (1)...(19): siRNA sense strand
gacaaaggaucacaucaug

SEQ ID NO: 595547 - RNA, 19 nt, Homo sapiens
  misc_RNA (1)...(19): siRNA sense strand
caaaggcuaugcguacgua

SEQ ID NO: 595548 - RNA, 19 nt, Homo sapiens
  misc_RNA (1)...(19): siRNA sense strand
ggauuuaucaggagugaaa

SEQ ID NO: 595549 - RNA, 19 nt, Homo sapiens
  misc_RNA (1)...(19): siRNA sense strand
caaaggaucacaucaugga

SEQ ID NO: 595550 - RNA, 19 nt, Homo sapiens
  misc_RNA (1)...(19): siRNA sense strand
guacguagaguuugagaau

SEQ ID NO: 595551 - RNA, 19 nt, Homo sapiens
  misc_RNA (1)...(19): siRNA sense strand
gaucacaucauggagauau

SEQ ID NO: 595552 - RNA, 19 nt, Homo sapiens
  misc_RNA (1)...(19): siRNA sense strand
aaggaucgcucaaaagaua

SEQ ID NO: 595553 - RNA, 19 nt, Homo sapiens
  misc_RNA (1)...(19): siRNA sense strand
ggagauauuuuccaccuau

SEQ ID NO: 595554 - RNA, 19 nt, Homo sapiens
  misc_RNA (1)...(19): siRNA sense strand
agaaggcgcugaagcacau

SEQ ID NO: 595555 - RNA, 19 nt, Homo sapiens
  misc_RNA (1)...(19): siRNA sense strand
ggaaugugacaaaggauca

SEQ ID NO: 595556 - RNA, 19 nt, Homo sapiens
  misc_RNA (1)...(19): siRNA sense strand
ccaccaaggagucgaguga

SEQ ID NO: 595557 - RNA, 19 nt, Homo sapiens
  misc_RNA (1)...(19): siRNA sense strand
cagaugagaaguccaagga

SEQ ID NO: 595558 - RNA, 19 nt, Homo sapiens
  misc_RNA (1)...(19): siRNA sense strand
ccaaauccaaaccaccuaa

SEQ ID NO: 595559 - RNA, 19 nt, Homo sapiens
  misc_RNA (1)...(19): siRNA sense strand
gcauccagccgcucaggaa

SEQ ID NO: 595560 - RNA, 19 nt, Homo sapiens
  misc_RNA (1)...(19): siRNA sense strand
gauggaggacaaauugaug

SEQ ID NO: 595561 - RNA, 19 nt, Homo sapiens
  misc_RNA (1)...(19): siRNA sense strand
ggauggaggacaaauugau

SEQ ID NO: 595562 - RNA, 19 nt, Homo sapiens
  misc_RNA (1)...(19): siRNA sense strand
ugacaaaggaucacaucau

SEQ ID NO: 595563 - RNA, 19 nt, Homo sapiens
  misc_RNA (1)...(19): siRNA sense strand
ucacaucauggagauauuu

SEQ ID NO: 595564 - RNA, 19 nt, Homo sapiens
  misc_RNA (1)...(19): siRNA sense strand
caaauccaaaccaccuaaa

SEQ ID NO: 595565 - RNA, 19 nt, Homo sapiens
  misc_RNA (1)...(19): siRNA sense strand
ccaaggagucgagugagaa

SEQ ID NO: 595566 - RNA, 19 nt, Homo sapiens
  misc_RNA (1)...(19): siRNA sense strand
guuugagaauccagaugaa

SEQ ID NO: 595567 - RNA, 19 nt, Homo sapiens
  misc_RNA (1)...(19): siRNA sense strand
gcuccaacuccucccgaua

SEQ ID NO: 595568 - RNA, 19 nt, Homo sapiens
  misc_RNA (1)...(19): siRNA sense strand
cccggaaugugacaaagga

SEQ ID NO: 595569 - RNA, 19 nt, Homo sapiens
  misc_RNA (1)...(19): siRNA sense strand
cuccaacuccucccgauaa

SEQ ID NO: 595570 - RNA, 19 nt, Homo sapiens
  misc_RNA (1)...(19): siRNA sense strand
gggagacucacccggaaug

SEQ ID NO: 595571 - RNA, 19 nt, Homo sapiens
  misc_RNA (1)...(19): siRNA sense strand
ccaaggaucgcucaaaaga

SEQ ID NO: 595572 - RNA, 19 nt, Homo sapiens
  misc_RNA (1)...(19): siRNA sense strand
ggagucgagugagaaggau

SEQ ID NO: 595573 - RNA, 19 nt, Homo sapiens
  misc_RNA (1)...(19): siRNA sense strand
guccaaggaucgcucaaaa

SEQ ID NO: 595574 - RNA, 19 nt, Homo sapiens
  misc_RNA (1)...(19): siRNA sense strand
gcuaugcguacguagaguu

SEQ ID NO: 595575 - RNA, 19 nt, Homo sapiens
  misc_RNA (1)...(19): siRNA sense strand
augcguacguagaguuuga

SEQ ID NO: 595576 - RNA, 19 nt, Homo sapiens
  misc_RNA (1)...(19): siRNA sense strand
cauggauggaggacaaauu

SEQ ID NO: 595577 - RNA, 19 nt, Homo sapiens
  misc_RNA (1)...(19): siRNA sense strand
ccacggaugaggagaaggu

SEQ ID NO: 595578 - RNA, 19 nt, Homo sapiens
  misc_RNA (1)...(19): siRNA sense strand
cgcaaagaccgcucagaug

SEQ ID NO: 595579 - RNA, 19 nt, Homo sapiens
  misc_RNA (1)...(19): siRNA sense strand
caaaccaccuaaaagagau

SEQ ID NO: 595580 - RNA, 19 nt, Homo sapiens
  misc_RNA (1)...(19): siRNA sense strand
accaaggagucgagugaga

SEQ ID NO: 595581 - RNA, 19 nt, Homo sapiens
  misc_RNA (1)...(19): siRNA sense strand
ccgagaaggcgcugaagca

SEQ ID NO: 595582 - RNA, 19 nt, Homo sapiens
  misc_RNA (1)...(19): siRNA sense strand
cuccuaagcccaccaaagu

SEQ ID NO: 595583 - RNA, 19 nt, Homo sapiens
  misc_RNA (1)...(19): siRNA sense strand
ccaaaccaccuaaaagaga

SEQ ID NO: 595584 - RNA, 19 nt, Homo sapiens
  misc_RNA (1)...(19): siRNA sense strand
acgcaaagaccgcucagau

SEQ ID NO: 595585 - RNA, 19 nt, Homo sapiens
  misc_RNA (1)...(19): siRNA sense strand
gaaagaugaugaagaaaug

SEQ ID NO: 595586 - RNA, 19 nt, Homo sapiens
  misc_RNA (1)...(19): siRNA sense strand
ggacagggauggagaguga

SEQ ID NO: 595587 - RNA, 19 nt, Homo sapiens
  misc_RNA (1)...(19): siRNA sense strand
aaaccaagcuuaauccuuu

SEQ ID NO: 595588 - RNA, 19 nt, Homo sapiens
  misc_RNA (1)...(19): siRNA sense strand
ccaagcggcuggauuaugu

SEQ ID NO: 595589 - RNA, 19 nt, Homo sapiens
  misc_RNA (1)...(19): siRNA sense strand
acacuaugcuaaucaauug

SEQ ID NO: 595590 - RNA, 19 nt, Homo sapiens
  misc_RNA (1)...(19): siRNA sense strand
cuaaagaacuucccuugca

SEQ ID NO: 595591 - RNA, 19 nt, Homo sapiens
  misc_RNA (1)...(19): siRNA sense strand
gaugugcuaucuauggauu

SEQ ID NO: 595592 - RNA, 19 nt, Homo sapiens
  misc_RNA (1)...(19): siRNA sense strand
gaaugggcacuaugaauug

SEQ ID NO: 595593 - RNA, 19 nt, Homo sapiens
  misc_RNA (1)...(19): siRNA sense strand
ugacguuccuucagauuug

SEQ ID NO: 595594 - RNA, 19 nt, Homo sapiens
  misc_RNA (1)...(19): siRNA sense strand
cuggaugcauucaaaguua

SEQ ID NO: 595595 - RNA, 19 nt, Homo sapiens
  misc_RNA (1)...(19): siRNA sense strand
uaauugacguuccuucaga

SEQ ID NO: 595596 - RNA, 19 nt, Homo sapiens
  misc_RNA (1)...(19): siRNA sense strand
gaagacuggcugaagauga

SEQ ID NO: 595597 - RNA, 19 nt, Homo sapiens
  misc_RNA (1)...(19): siRNA sense strand
gaugccucauggagaauua

SEQ ID NO: 595598 - RNA, 19 nt, Homo sapiens
  misc_RNA (1)...(19): siRNA sense strand
gcaaaagacuacaccauuc

SEQ ID NO: 595599 - RNA, 19 nt, Homo sapiens
  misc_RNA (1)...(19): siRNA sense strand
gaagaaggacugggagaga

SEQ ID NO: 595600 - RNA, 19 nt, Homo sapiens
  misc_RNA (1)...(19): siRNA sense strand
aaaguuaccagaagaagaa

SEQ ID NO: 595601 - RNA, 19 nt, Homo sapiens
  misc_RNA (1)...(19): siRNA sense strand
gaugcuuucugagugguua

SEQ ID NO: 595602 - RNA, 19 nt, Homo sapiens
  misc_RNA (1)...(19): siRNA sense strand
ggauuucccuuuugaggua

SEQ ID NO: 595603 - RNA, 19 nt, Homo sapiens
  misc_RNA (1)...(19): siRNA sense strand
gagaaugggcacuaugaau

SEQ ID NO: 595604 - RNA, 19 nt, Homo sapiens
  misc_RNA (1)...(19): siRNA sense strand
acacaaggccucugagaau

SEQ ID NO: 595605 - RNA, 19 nt, Homo sapiens
  misc_RNA (1)...(19): siRNA sense strand
caccagcuccagcagauua

SEQ ID NO: 595606 - RNA, 19 nt, Homo sapiens
  misc_RNA (1)...(19): siRNA sense strand
agaaugggcacuaugaauu

SEQ ID NO: 595607 - RNA, 19 nt, Homo sapiens
  misc_RNA (1)...(19): siRNA sense strand
gauggagagugaggaagaa

SEQ ID NO: 595608 - RNA, 19 nt, Homo sapiens
  misc_RNA (1)...(19): siRNA sense strand
ggagagaaaaccaagcuua

SEQ ID NO: 595609 - RNA, 19 nt, Homo sapiens
  misc_RNA (1)...(19): siRNA sense strand
ggauggagagugaggaaga

SEQ ID NO: 595610 - RNA, 19 nt, Homo sapiens
  misc_RNA (1)...(19): siRNA sense strand
aggagaaacucacacacaa

SEQ ID NO: 595611 - RNA, 19 nt, Homo sapiens
  misc_RNA (1)...(19): siRNA sense strand
ucuacuggaugcauucaaa

SEQ ID NO: 595612 - RNA, 19 nt, Homo sapiens
  misc_RNA (1)...(19): siRNA sense strand
ccagacugauuuccgauuc

SEQ ID NO: 595613 - RNA, 19 nt, Homo sapiens
  misc_RNA (1)...(19): siRNA sense strand
aagaguggcuacuguguca

SEQ ID NO: 595614 - RNA, 19 nt, Homo sapiens
  misc_RNA (1)...(19): siRNA sense strand
ugugugaugugcuaucuau

SEQ ID NO: 595615 - RNA, 19 nt, Homo sapiens
  misc_RNA (1)...(19): siRNA sense strand
caaaguuaccagaagaaga

SEQ ID NO: 595616 - RNA, 19 nt, Homo sapiens
  misc_RNA (1)...(19): siRNA sense strand
aggcgaaacucaacagcaa

SEQ ID NO: 595617 - RNA, 19 nt, Homo sapiens
  misc_RNA (1)...(19): siRNA sense strand
agacugauuuccgauucua

SEQ ID NO: 595618 - RNA, 19 nt, Homo sapiens
  misc_RNA (1)...(19): siRNA sense strand
ugagguagauggacuucuc

SEQ ID NO: 595619 - RNA, 19 nt, Homo sapiens
  misc_RNA (1)...(19): siRNA sense strand
aagaaggacugggagagaa

SEQ ID NO: 595620 - RNA, 19 nt, Homo sapiens
  misc_RNA (1)...(19): siRNA sense strand
caccaagaguggcuacugu

SEQ ID NO: 595621 - RNA, 19 nt, Homo sapiens
  misc_RNA (1)...(19): siRNA sense strand
cacaaggccucugagaaug

SEQ ID NO: 595622 - RNA, 19 nt, Homo sapiens
  misc_RNA (1)...(19): siRNA sense strand
ccgaaagccugugugaugu

SEQ ID NO: 595623 - RNA, 19 nt, Homo sapiens
  misc_RNA (1)...(19): siRNA sense strand
gugaugugcuaucuaugga

SEQ ID NO: 595624 - RNA, 19 nt, Homo sapiens
  misc_RNA (1)...(19): siRNA sense strand
gaaguuaccaaaacacuau

SEQ ID NO: 595625 - RNA, 19 nt, Homo sapiens
  misc_RNA (1)...(19): siRNA sense strand
cuggaugccucauggagaa

SEQ ID NO: 595626 - RNA, 19 nt, Homo sapiens
  misc_RNA (1)...(19): siRNA sense strand
acaagaagagccagaagga

SEQ ID NO: 595627 - RNA, 19 nt, Homo sapiens
  misc_RNA (1)...(19): siRNA sense strand
aaaccagaccuacuacguu

SEQ ID NO: 595628 - RNA, 19 nt, Homo sapiens
  misc_RNA (1)...(19): siRNA sense strand
gacuacaccauucuagauu

SEQ ID NO: 595629 - RNA, 19 nt, Homo sapiens
  misc_RNA (1)...(19): siRNA sense strand
cauucuagauugcauuuac

SEQ ID NO: 595630 - RNA, 19 nt, Homo sapiens
  misc_RNA (1)...(19): siRNA sense strand
gagagaaaaccaagcuuaa

SEQ ID NO: 595631 - RNA, 19 nt, Homo sapiens
  misc_RNA (1)...(19): siRNA sense strand
ccuacuacguucuggaugu

SEQ ID NO: 595632 - RNA, 19 nt, Homo sapiens
  misc_RNA (1)...(19): siRNA sense strand
uacuggaacugcagaaauc

SEQ ID NO: 595633 - RNA, 19 nt, Homo sapiens
  misc_RNA (1)...(19): siRNA sense strand
ucacacacaaggccucuga

SEQ ID NO: 595634 - RNA, 19 nt, Homo sapiens
  misc_RNA (1)...(19): siRNA sense strand
aggaaggcaugaaggagaa

SEQ ID NO: 595635 - RNA, 19 nt, Homo sapiens
  misc_RNA (1)...(19): siRNA sense strand
ggcaccagcuccagcagau

SEQ ID NO: 595636 - RNA, 19 nt, Homo sapiens
  misc_RNA (1)...(19): siRNA sense strand
ggugucagauguccuuggu

SEQ ID NO: 595637 - RNA, 19 nt, Homo sapiens
  misc_RNA (1)...(19): siRNA sense strand
guagauggacuucucuucu

SEQ ID NO: 595638 - RNA, 19 nt, Homo sapiens
  misc_RNA (1)...(19): siRNA sense strand
caauugaugcuuucugagu

SEQ ID NO: 595639 - RNA, 19 nt, Homo sapiens
  misc_RNA (1)...(19): siRNA sense strand
ggagaaacucacacacaag

SEQ ID NO: 595640 - RNA, 19 nt, Homo sapiens
  misc_RNA (1)...(19): siRNA sense strand
cccgaaagccugugugaug

SEQ ID NO: 595641 - RNA, 19 nt, Homo sapiens
  misc_RNA (1)...(19): siRNA sense strand
gcauucaaaguuaccagaa

SEQ ID NO: 595642 - RNA, 19 nt, Homo sapiens
  misc_RNA (1)...(19): siRNA sense strand
ugugaaccaugccagaaga

SEQ ID NO: 595643 - RNA, 19 nt, Homo sapiens
  misc_RNA (1)...(19): siRNA sense strand
caagaagagccagaaggaa

SEQ ID NO: 595644 - RNA, 19 nt, Homo sapiens
  misc_RNA (1)...(19): siRNA sense strand
auucaaaguuaccagaaga

SEQ ID NO: 595645 - RNA, 19 nt, Homo sapiens
  misc_RNA (1)...(19): siRNA sense strand
caacagguuuucuucacuu

SEQ ID NO: 595646 - RNA, 19 nt, Homo sapiens
  misc_RNA (1)...(19): siRNA sense strand
ccaccaagccagacuaugc

SEQ ID NO: 595647 - RNA, 19 nt, Homo sapiens
  misc_RNA (1)...(19): siRNA sense strand
uaugauugccagacugauu

SEQ ID NO: 595648 - RNA, 19 nt, Homo sapiens
  misc_RNA (1)...(19): siRNA sense strand
cgauucuacuggaugcauu

SEQ ID NO: 595649 - RNA, 19 nt, Homo sapiens
  misc_RNA (1)...(19): siRNA sense strand
gcacaagaagagccagaag

SEQ ID NO: 595650 - RNA, 19 nt, Homo sapiens
  misc_RNA (1)...(19): siRNA sense strand
gaauuggagcaccugucua

SEQ ID NO: 595651 - RNA, 19 nt, Homo sapiens
  misc_RNA (1)...(19): siRNA sense strand
acuacaccauucuagauug

SEQ ID NO: 595652 - RNA, 19 nt, Homo sapiens
  misc_RNA (1)...(19): siRNA sense strand
ggaggcaacaggcgaaacu

SEQ ID NO: 595653 - RNA, 19 nt, Homo sapiens
  misc_RNA (1)...(19): siRNA sense strand
cccaguacaaguccaagua

SEQ ID NO: 595654 - RNA, 19 nt, Homo sapiens
  misc_RNA (1)...(19): siRNA sense strand
agaaggaaggcaugaagga

SEQ ID NO: 595655 - RNA, 19 nt, Homo sapiens
  misc_RNA (1)...(19): siRNA sense strand
aagccugugugaugugcua

SEQ ID NO: 595656 - RNA, 19 nt, Homo sapiens
  misc_RNA (1)...(19): siRNA sense strand
gagaaaaccaagcuuaauc

SEQ ID NO: 595657 - RNA, 19 nt, Homo sapiens
  misc_RNA (1)...(19): siRNA sense strand
agacuacaccauucuagau

SEQ ID NO: 595658 - RNA, 19 nt, Homo sapiens
  misc_RNA (1)...(19): siRNA sense strand
ccaaaacacuaugcuaauc

SEQ ID NO: 595659 - RNA, 19 nt, Homo sapiens
  misc_RNA (1)...(19): siRNA sense strand
ugucuacucccaaguugaa

SEQ ID NO: 595660 - RNA, 19 nt, Homo sapiens
  misc_RNA (1)...(19): siRNA sense strand
gauuauggagcacaagaag

SEQ ID NO: 595661 - RNA, 19 nt, Homo sapiens
  misc_RNA (1)...(19): siRNA sense strand
caacaggcgaaacucaaca

SEQ ID NO: 595662 - RNA, 19 nt, Homo sapiens
  misc_RNA (1)...(19): siRNA sense strand
guuaauugacguuccuuca

SEQ ID NO: 595663 - RNA, 19 nt, Homo sapiens
  misc_RNA (1)...(19): siRNA sense strand
ucaagaaguuaccaaaaca

SEQ ID NO: 595664 - RNA, 19 nt, Homo sapiens
  misc_RNA (1)...(19): siRNA sense strand
ggcaacaggcgaaacucaa

SEQ ID NO: 595665 - RNA, 19 nt, Homo sapiens
  misc_RNA (1)...(19): siRNA sense strand
ugaaggagaaacucacaca

SEQ ID NO: 595666 - RNA, 19 nt, Homo sapiens
  misc_RNA (1)...(19): siRNA sense strand
gcaacaggcgaaacucaac

SEQ ID NO: 595667 - RNA, 19 nt, Homo sapiens
  misc_RNA (1)...(19): siRNA sense strand
cugagaaugggcacuauga

SEQ ID NO: 595668 - RNA, 19 nt, Homo sapiens
  misc_RNA (1)...(19): siRNA sense strand
cacacaaggccucugagaa

SEQ ID NO: 595669 - RNA, 19 nt, Homo sapiens
  misc_RNA (1)...(19): siRNA sense strand
ccagaaggaaggcaugaag

SEQ ID NO: 595670 - RNA, 19 nt, Homo sapiens
  misc_RNA (1)...(19): siRNA sense strand
ucagauguccuugguguag

SEQ ID NO: 595671 - RNA, 19 nt, Homo sapiens
  misc_RNA (1)...(19): siRNA sense strand
uaucuauggauuucccuuu

SEQ ID NO: 595672 - RNA, 19 nt, Homo sapiens
  misc_RNA (1)...(19): siRNA sense strand
gcggcuggauuaugugaac

SEQ ID NO: 595673 - RNA, 19 nt, Homo sapiens
  misc_RNA (1)...(19): siRNA sense strand
agaaggacugggagagaaa

SEQ ID NO: 595674 - RNA, 19 nt, Homo sapiens
  misc_RNA (1)...(19): siRNA sense strand
cauucaaaguuaccagaag

SEQ ID NO: 595675 - RNA, 19 nt, Homo sapiens
  misc_RNA (1)...(19): siRNA sense strand
cuacuacguucuggaugug

SEQ ID NO: 595676 - RNA, 19 nt, Homo sapiens
  misc_RNA (1)...(19): siRNA sense strand
cagaagacuggcugaagau

SEQ ID NO: 595677 - RNA, 19 nt, Homo sapiens
  misc_RNA (1)...(19): siRNA sense strand
ccaagaguggcuacugugu

SEQ ID NO: 595678 - RNA, 19 nt, Homo sapiens
  misc_RNA (1)...(19): siRNA sense strand
ccugucuacucccaaguug

SEQ ID NO: 595679 - RNA, 19 nt, Homo sapiens
  misc_RNA (1)...(19): siRNA sense strand
cagauuauggagcacaaga

SEQ ID NO: 595680 - RNA, 19 nt, Homo sapiens
  misc_RNA (1)...(19): siRNA sense strand
uaaaccagaccuacuacgu

SEQ ID NO: 595681 - RNA, 19 nt, Homo sapiens
  misc_RNA (1)...(19): siRNA sense strand
gaaacucaacagcaaaaga

SEQ ID NO: 595682 - RNA, 19 nt, Homo sapiens
  misc_RNA (1)...(19): siRNA sense strand
gaccaccaagccagacuau

SEQ ID NO: 595683 - RNA, 19 nt, Homo sapiens
  misc_RNA (1)...(19): siRNA sense strand
ugagaaugggcacuaugaa

SEQ ID NO: 595684 - RNA, 19 nt, Homo sapiens
  misc_RNA (1)...(19): siRNA sense strand
acacacaaggccucugaga

SEQ ID NO: 595685 - RNA, 19 nt, Homo sapiens
  misc_RNA (1)...(19): siRNA sense strand
gaaauuaccuccagagaaa

SEQ ID NO: 595686 - RNA, 19 nt, Homo sapiens
  misc_RNA (1)...(19): siRNA sense strand
ccacucagcugacauauga

SEQ ID NO: 595687 - RNA, 19 nt, Homo sapiens
  misc_RNA (1)...(19): siRNA sense strand
gaaggaacaugaaguggaa

SEQ ID NO: 595688 - RNA, 19 nt, Homo sapiens
  misc_RNA (1)...(19): siRNA sense strand
cugauaaggucaacaauua

SEQ ID NO: 595689 - RNA, 19 nt, Homo sapiens
  misc_RNA (1)...(19): siRNA sense strand
gaucaucucugcagcauuc

SEQ ID NO: 595690 - RNA, 19 nt, Homo sapiens
  misc_RNA (1)...(19): siRNA sense strand
ccacaggacugcagaagaa

SEQ ID NO: 595691 - RNA, 19 nt, Homo sapiens
  misc_RNA (1)...(19): siRNA sense strand
gaaauuugcaccuaagaaa

SEQ ID NO: 595692 - RNA, 19 nt, Homo sapiens
  misc_RNA (1)...(19): siRNA sense strand
ucaaagaugucacuacuuc

SEQ ID NO: 595693 - RNA, 19 nt, Homo sapiens
  misc_RNA (1)...(19): siRNA sense strand
gcacaguauucacuauuga

SEQ ID NO: 595694 - RNA, 19 nt, Homo sapiens
  misc_RNA (1)...(19): siRNA sense strand
cagcugaugugaagaauau

SEQ ID NO: 595695 - RNA, 19 nt, Homo sapiens
  misc_RNA (1)...(19): siRNA sense strand
gcuuagaucucauuccauu

SEQ ID NO: 595696 - RNA, 19 nt, Homo sapiens
  misc_RNA (1)...(19): siRNA sense strand
ccacuaaacuaaugaaugg

SEQ ID NO: 595697 - RNA, 19 nt, Homo sapiens
  misc_RNA (1)...(19): siRNA sense strand
gaucaaagaugucacuacu

SEQ ID NO: 595698 - RNA, 19 nt, Homo sapiens
  misc_RNA (1)...(19): siRNA sense strand
gaauggaaccaguuggaua

SEQ ID NO: 595699 - RNA, 19 nt, Homo sapiens
  misc_RNA (1)...(19): siRNA sense strand
uaacaccucuugccacuca

SEQ ID NO: 595700 - RNA, 19 nt, Homo sapiens
  misc_RNA (1)...(19): siRNA sense strand
ucagaacaguuaugugaaa

SEQ ID NO: 595701 - RNA, 19 nt, Homo sapiens
  misc_RNA (1)...(19): siRNA sense strand
gcaaguggccaauaugaug

SEQ ID NO: 595702 - RNA, 19 nt, Homo sapiens
  misc_RNA (1)...(19): siRNA sense strand
cagagaaauuugcaccuaa

SEQ ID NO: 595703 - RNA, 19 nt, Homo sapiens
  misc_RNA (1)...(19): siRNA sense strand
ggaagcaaggcaauaguuu

SEQ ID NO: 595704 - RNA, 19 nt, Homo sapiens
  misc_RNA (1)...(19): siRNA sense strand
gaagauggagguacagaau

SEQ ID NO: 595705 - RNA, 19 nt, Homo sapiens
  misc_RNA (1)...(19): siRNA sense strand
gaguacagcuuagaucuca

SEQ ID NO: 595706 - RNA, 19 nt, Homo sapiens
  misc_RNA (1)...(19): siRNA sense strand
ccagagaaauuugcaccua

SEQ ID NO: 595707 - RNA, 19 nt, Homo sapiens
  misc_RNA (1)...(19): siRNA sense strand
gaggaaagacacaaugcua

SEQ ID NO: 595708 - RNA, 19 nt, Homo sapiens
  misc_RNA (1)...(19): siRNA sense strand
gcaguuuguuucccaguug

SEQ ID NO: 595709 - RNA, 19 nt, Homo sapiens
  misc_RNA (1)...(19): siRNA sense strand
cagaauugaucaaagaugu

SEQ ID NO: 595710 - RNA, 19 nt, Homo sapiens
  misc_RNA (1)...(19): siRNA sense strand
gaagccagaauucaauauu

SEQ ID NO: 595711 - RNA, 19 nt, Homo sapiens
  misc_RNA (1)...(19): siRNA sense strand
gaauagacacugauaaggu

SEQ ID NO: 595712 - RNA, 19 nt, Homo sapiens
  misc_RNA (1)...(19): siRNA sense strand
caaaagcacucguugauca

SEQ ID NO: 595713 - RNA, 19 nt, Homo sapiens
  misc_RNA (1)...(19): siRNA sense strand
ggauggaugauguuaauga

SEQ ID NO: 595714 - RNA, 19 nt, Homo sapiens
  misc_RNA (1)...(19): siRNA sense strand
gagcacauauugaccuuac

SEQ ID NO: 595715 - RNA, 19 nt, Homo sapiens
  misc_RNA (1)...(19): siRNA sense strand
gaagcaaggcaauaguuug

SEQ ID NO: 595716 - RNA, 19 nt, Homo sapiens
  misc_RNA (1)...(19): siRNA sense strand
gaaacaauuacccaacuau

SEQ ID NO: 595717 - RNA, 19 nt, Homo sapiens
  misc_RNA (1)...(19): siRNA sense strand
auaccuaacuggacccuuu

SEQ ID NO: 595718 - RNA, 19 nt, Homo sapiens
  misc_RNA (1)...(19): siRNA sense strand
gaucaagguguuaagacua

SEQ ID NO: 595719 - RNA, 19 nt, Homo sapiens
  misc_RNA (1)...(19): siRNA sense strand
gaaagacacaaugcuaaga

SEQ ID NO: 595720 - RNA, 19 nt, Homo sapiens
  misc_RNA (1)...(19): siRNA sense strand
agaaacaauuacccaacua

SEQ ID NO: 595721 - RNA, 19 nt, Homo sapiens
  misc_RNA (1)...(19): siRNA sense strand
gagaucaagcaguuuguuu

SEQ ID NO: 595722 - RNA, 19 nt, Homo sapiens
  misc_RNA (1)...(19): siRNA sense strand
gcaauaguuugggaugaau

SEQ ID NO: 595723 - RNA, 19 nt, Homo sapiens
  misc_RNA (1)...(19): siRNA sense strand
gagugaaccuaaacguguu

SEQ ID NO: 595724 - RNA, 19 nt, Homo sapiens
  misc_RNA (1)...(19): siRNA sense strand
ggcaauaguuugggaugaa

SEQ ID NO: 595725 - RNA, 19 nt, Homo sapiens
  misc_RNA (1)...(19): siRNA sense strand
ggcuagaguugauggauau

SEQ ID NO: 595726 - RNA, 19 nt, Homo sapiens
  misc_RNA (1)...(19): siRNA sense strand
agauggagguacagaauau

SEQ ID NO: 595727 - RNA, 19 nt, Homo sapiens
  misc_RNA (1)...(19): siRNA sense strand
gauccgagauaagaacuuc

SEQ ID NO: 595728 - RNA, 19 nt, Homo sapiens
  misc_RNA (1)...(19): siRNA sense strand
gcgaacagcgguugaagga

SEQ ID NO: 595729 - RNA, 19 nt, Homo sapiens
  misc_RNA (1)...(19): siRNA sense strand
gcugagauccgagauaaga

SEQ ID NO: 595730 - RNA, 19 nt, Homo sapiens
  misc_RNA (1)...(19): siRNA sense strand
gaguuuaugucuggaauag

SEQ ID NO: 595731 - RNA, 19 nt, Homo sapiens
  misc_RNA (1)...(19): siRNA sense strand
gcaaaccauaccucaauug

SEQ ID NO: 595732 - RNA, 19 nt, Homo sapiens
  misc_RNA (1)...(19): siRNA sense strand
gaugaaauuuauggcauuc

SEQ ID NO: 595733 - RNA, 19 nt, Homo sapiens
  misc_RNA (1)...(19): siRNA sense strand
cagcuuagaucucauucca

SEQ ID NO: 595734 - RNA, 19 nt, Homo sapiens
  misc_RNA (1)...(19): siRNA sense strand
ggcguaaccuucgcugaaa

SEQ ID NO: 595735 - RNA, 19 nt, Homo sapiens
  misc_RNA (1)...(19): siRNA sense strand
ggaaagacacaaugcuaag

SEQ ID NO: 595736 - RNA, 19 nt, Homo sapiens
  misc_RNA (1)...(19): siRNA sense strand
gaggagcucuaugcugaga

SEQ ID NO: 595737 - RNA, 19 nt, Homo sapiens
  misc_RNA (1)...(19): siRNA sense strand
gcgaguuccuggacaagug

SEQ ID NO: 595738 - RNA, 19 nt, Homo sapiens
  misc_RNA (1)...(19): siRNA sense strand
uugcagaauugaucaaaga

SEQ ID NO: 595739 - RNA, 19 nt, Homo sapiens
  misc_RNA (1)...(19): siRNA sense strand
gcugaugugaagaauauaa

SEQ ID NO: 595740 - RNA, 19 nt, Homo sapiens
  misc_RNA (1)...(19): siRNA sense strand
ugaaauuaccuccagagaa

SEQ ID NO: 595741 - RNA, 19 nt, Homo sapiens
  misc_RNA (1)...(19): siRNA sense strand
guacagcuuagaucucauu

SEQ ID NO: 595742 - RNA, 19 nt, Homo sapiens
  misc_RNA (1)...(19): siRNA sense strand
gggcguaaccuucgcugaa

SEQ ID NO: 595743 - RNA, 19 nt, Homo sapiens
  misc_RNA (1)...(19): siRNA sense strand
ggagcucuaugcugagauc

SEQ ID NO: 595744 - RNA, 19 nt, Homo sapiens
  misc_RNA (1)...(19): siRNA sense strand
agaaugcgcucggcaagug

SEQ ID NO: 595745 - RNA, 19 nt, Homo sapiens
  misc_RNA (1)...(19): siRNA sense strand
gagggugcauucaaagagu

SEQ ID NO: 595746 - RNA, 19 nt, Homo sapiens
  misc_RNA (1)...(19): siRNA sense strand
ugaaggaucugggugucuu

SEQ ID NO: 595747 - RNA, 19 nt, Homo sapiens
  misc_RNA (1)...(19): siRNA sense strand
gauaaggucaacaauuaca

SEQ ID NO: 595748 - RNA, 19 nt, Homo sapiens
  misc_RNA (1)...(19): siRNA sense strand
gcaggaagcaaggcaauag

SEQ ID NO: 595749 - RNA, 19 nt, Homo sapiens
  misc_RNA (1)...(19): siRNA sense strand
ggaagauggagguacagaa

SEQ ID NO: 595750 - RNA, 19 nt, Homo sapiens
  misc_RNA (1)...(19): siRNA sense strand
cagaaacaauuacccaacu

SEQ ID NO: 595751 - RNA, 19 nt, Homo sapiens
  misc_RNA (1)...(19): siRNA sense strand
caagaaagcaaagaucauc

SEQ ID NO: 595752 - RNA, 19 nt, Homo sapiens
  misc_RNA (1)...(19): siRNA sense strand
gaaauuuauggcauucaga

SEQ ID NO: 595753 - RNA, 19 nt, Homo sapiens
  misc_RNA (1)...(19): siRNA sense strand
caaguggccaauaugauga

SEQ ID NO: 595754 - RNA, 19 nt, Homo sapiens
  misc_RNA (1)...(19): siRNA sense strand
gcaagaaagcaaagaucau

SEQ ID NO: 595755 - RNA, 19 nt, Homo sapiens
  misc_RNA (1)...(19): siRNA sense strand
aagagagaguuuacaggaa

SEQ ID NO: 595756 - RNA, 19 nt, Homo sapiens
  misc_RNA (1)...(19): siRNA sense strand
aggcuagaguugauggaua

SEQ ID NO: 595757 - RNA, 19 nt, Homo sapiens
  misc_RNA (1)...(19): siRNA sense strand
gauggaugauguuaaugag

SEQ ID NO: 595758 - RNA, 19 nt, Homo sapiens
  misc_RNA (1)...(19): siRNA sense strand
ggaagccagaauucaauau

SEQ ID NO: 595759 - RNA, 19 nt, Homo sapiens
  misc_RNA (1)...(19): siRNA sense strand
ggagguacagaauauguca

SEQ ID NO: 595760 - RNA, 19 nt, Homo sapiens
  misc_RNA (1)...(19): siRNA sense strand
guuggaagauggagguaca

SEQ ID NO: 595761 - RNA, 19 nt, Homo sapiens
  misc_RNA (1)...(19): siRNA sense strand
ggaguuuaugucuggaaua

SEQ ID NO: 595762 - RNA, 19 nt, Homo sapiens
  misc_RNA (1)...(19): siRNA sense strand
gaauugaucaaagauguca

SEQ ID NO: 595763 - RNA, 19 nt, Homo sapiens
  misc_RNA (1)...(19): siRNA sense strand
gcagcugaugugaagaaua

SEQ ID NO: 595764 - RNA, 19 nt, Homo sapiens
  misc_RNA (1)...(19): siRNA sense strand
cuggauggaugauguuaau

SEQ ID NO: 595765 - RNA, 19 nt, Homo sapiens
  misc_RNA (1)...(19): siRNA sense strand
gcagaauugaucaaagaug

SEQ ID NO: 595766 - RNA, 19 nt, Homo sapiens
  misc_RNA (1)...(19): siRNA sense strand
gacccaggcuagaguugau

SEQ ID NO: 595767 - RNA, 19 nt, Homo sapiens
  misc_RNA (1)...(19): siRNA sense strand
gccggcagcugaugugaag

SEQ ID NO: 595768 - RNA, 19 nt, Homo sapiens
  misc_RNA (1)...(19): siRNA sense strand
guucacacuuaaaggaaau

SEQ ID NO: 595769 - RNA, 19 nt, Homo sapiens
  misc_RNA (1)...(19): siRNA sense strand
uuacccaacuauacggaaa

SEQ ID NO: 595770 - RNA, 19 nt, Homo sapiens
  misc_RNA (1)...(19): siRNA sense strand
aauagugggcucaaacaaa

SEQ ID NO: 595771 - RNA, 19 nt, Homo sapiens
  misc_RNA (1)...(19): siRNA sense strand
augcugagauccgagauaa

SEQ ID NO: 595772 - RNA, 19 nt, Homo sapiens
  misc_RNA (1)...(19): siRNA sense strand
aaacagggcgaugguggua

SEQ ID NO: 595773 - RNA, 19 nt, Homo sapiens
  misc_RNA (1)...(19): siRNA sense strand
ugaucggaauguggauuua

SEQ ID NO: 595774 - RNA, 19 nt, Homo sapiens
  misc_RNA (1)...(19): siRNA sense strand
cagggaggaguacagcuua

SEQ ID NO: 595775 - RNA, 19 nt, Homo sapiens
  misc_RNA (1)...(19): siRNA sense strand
cagaacaguuaugugaaau

SEQ ID NO: 595776 - RNA, 19 nt, Homo sapiens
  misc_RNA (1)...(19): siRNA sense strand
acacuuaaaggaaaucguu

SEQ ID NO: 595777 - RNA, 19 nt, Homo sapiens
  misc_RNA (1)...(19): siRNA sense strand
gaucucuuauccauggaau

SEQ ID NO: 595778 - RNA, 19 nt, Homo sapiens
  misc_RNA (1)...(19): siRNA sense strand
ugaucaggaugaagagaga

SEQ ID NO: 595779 - RNA, 19 nt, Homo sapiens
  misc_RNA (1)...(19): siRNA sense strand
guaauagugggcucaaaca

SEQ ID NO: 595780 - RNA, 19 nt, Homo sapiens
  misc_RNA (1)...(19): siRNA sense strand
ggaacaggaguuuaugucu

SEQ ID NO: 595781 - RNA, 19 nt, Homo sapiens
  misc_RNA (1)...(19): siRNA sense strand
uaaauuaaccguggaacag

SEQ ID NO: 595782 - RNA, 19 nt, Homo sapiens
  misc_RNA (1)...(19): siRNA sense strand
gagaaauuugcaccuaaga

SEQ ID NO: 595783 - RNA, 19 nt, Homo sapiens
  misc_RNA (1)...(19): siRNA sense strand
agagaaauuugcaccuaag

SEQ ID NO: 595784 - RNA, 19 nt, Homo sapiens
  misc_RNA (1)...(19): siRNA sense strand
ggaauagacacugauaagg

SEQ ID NO: 595785 - RNA, 19 nt, Homo sapiens
  misc_RNA (1)...(19): siRNA sense strand
gaaguggacugaauguuua

SEQ ID NO: 595786 - RNA, 19 nt, Homo sapiens
  misc_RNA (1)...(19): siRNA sense strand
ggacagaaauuacuucaau

SEQ ID NO: 595787 - RNA, 19 nt, Homo sapiens
  misc_RNA (1)...(19): siRNA sense strand
ggacaaauguguguugaau

SEQ ID NO: 595788 - RNA, 19 nt, Homo sapiens
  misc_RNA (1)...(19): siRNA sense strand
ggaaguggacugaauguuu

SEQ ID NO: 595789 - RNA, 19 nt, Homo sapiens
  misc_RNA (1)...(19): siRNA sense strand
gcauauacauggacaaauc

SEQ ID NO: 595790 - RNA, 19 nt, Homo sapiens
  misc_RNA (1)...(19): siRNA sense strand
caagacagacugcagguua

SEQ ID NO: 595791 - RNA, 19 nt, Homo sapiens
  misc_RNA (1)...(19): siRNA sense strand
gcacaggacuggauuuacu

SEQ ID NO: 595792 - RNA, 19 nt, Homo sapiens
  misc_RNA (1)...(19): siRNA sense strand
ucaauuugccugacauuua

SEQ ID NO: 595793 - RNA, 19 nt, Homo sapiens
  misc_RNA (1)...(19): siRNA sense strand
gaaaguguauucauuaucc

SEQ ID NO: 595794 - RNA, 19 nt, Homo sapiens
  misc_RNA (1)...(19): siRNA sense strand
gcugaaggauuaaacaaug

SEQ ID NO: 595795 - RNA, 19 nt, Homo sapiens
  misc_RNA (1)...(19): siRNA sense strand
caauuugccugacauuuau

SEQ ID NO: 595796 - RNA, 19 nt, Homo sapiens
  misc_RNA (1)...(19): siRNA sense strand
agaaaugacuucaguaucu

SEQ ID NO: 595797 - RNA, 19 nt, Homo sapiens
  misc_RNA (1)...(19): siRNA sense strand
ugaaugaaguagacaaaga

SEQ ID NO: 595798 - RNA, 19 nt, Homo sapiens
  misc_RNA (1)...(19): siRNA sense strand
gcgccuaacugaauacaug

SEQ ID NO: 595799 - RNA, 19 nt, Homo sapiens
  misc_RNA (1)...(19): siRNA sense strand
ggaauuacacaaaguugaa

SEQ ID NO: 595800 - RNA, 19 nt, Homo sapiens
  misc_RNA (1)...(19): siRNA sense strand
acaaagacauggagagugu

SEQ ID NO: 595801 - RNA, 19 nt, Homo sapiens
  misc_RNA (1)...(19): siRNA sense strand
gaagcucugugcccucuau

SEQ ID NO: 595802 - RNA, 19 nt, Homo sapiens
  misc_RNA (1)...(19): siRNA sense strand
gagcacaggacuggauuua

SEQ ID NO: 595803 - RNA, 19 nt, Homo sapiens
  misc_RNA (1)...(19): siRNA sense strand
gaaaugacuucaguaucug

SEQ ID NO: 595804 - RNA, 19 nt, Homo sapiens
  misc_RNA (1)...(19): siRNA sense strand
gaaaggaugcaguguguag

SEQ ID NO: 595805 - RNA, 19 nt, Homo sapiens
  misc_RNA (1)...(19): siRNA sense strand
ccaauggcaucaagaaaca

SEQ ID NO: 595806 - RNA, 19 nt, Homo sapiens
  misc_RNA (1)...(19): siRNA sense strand
gaaggcuacauucaagaua

SEQ ID NO: 595807 - RNA, 19 nt, Homo sapiens
  misc_RNA (1)...(19): siRNA sense strand
gaauguuuauacaguguug

SEQ ID NO: 595808 - RNA, 19 nt, Homo sapiens
  misc_RNA (1)...(19): siRNA sense strand
auacuuaccucauccacaa

SEQ ID NO: 595809 - RNA, 19 nt, Homo sapiens
  misc_RNA (1)...(19): siRNA sense strand
gcccagauguauaauuuua

SEQ ID NO: 595810 - RNA, 19 nt, Homo sapiens
  misc_RNA (1)...(19): siRNA sense strand
gaagaacagcaaacagaug

SEQ ID NO: 595811 - RNA, 19 nt, Homo sapiens
  misc_RNA (1)...(19): siRNA sense strand
cugcccagauguauaauuu

SEQ ID NO: 595812 - RNA, 19 nt, Homo sapiens
  misc_RNA (1)...(19): siRNA sense strand
acaaagagcagcccgcaaa

SEQ ID NO: 595813 - RNA, 19 nt, Homo sapiens
  misc_RNA (1)...(19): siRNA sense strand
agagauagaucaagcuagu

SEQ ID NO: 595814 - RNA, 19 nt, Homo sapiens
  misc_RNA (1)...(19): siRNA sense strand
ggagagauagaucaagcua

SEQ ID NO: 595815 - RNA, 19 nt, Homo sapiens
  misc_RNA (1)...(19): siRNA sense strand
cgaugccaguuauauuuaa

SEQ ID NO: 595816 - RNA, 19 nt, Homo sapiens
  misc_RNA (1)...(19): siRNA sense strand
cuacagcgccuaacugaau

SEQ ID NO: 595817 - RNA, 19 nt, Homo sapiens
  misc_RNA (1)...(19): siRNA sense strand
gaacacaaugaggcauaua

SEQ ID NO: 595818 - RNA, 19 nt, Homo sapiens
  misc_RNA (1)...(19): siRNA sense strand
gaaaugccagugccggauu

SEQ ID NO: 595819 - RNA, 19 nt, Homo sapiens
  misc_RNA (1)...(19): siRNA sense strand
aaggcuacauucaagauaa

SEQ ID NO: 595820 - RNA, 19 nt, Homo sapiens
  misc_RNA (1)...(19): siRNA sense strand
agaucaagcuagugaagaa

SEQ ID NO: 595821 - RNA, 19 nt, Homo sapiens
  misc_RNA (1)...(19): siRNA sense strand
ccagaaaugacuucaguau

SEQ ID NO: 595822 - RNA, 19 nt, Homo sapiens
  misc_RNA (1)...(19): siRNA sense strand
gaaaauguauuggaaugga

SEQ ID NO: 595823 - RNA, 19 nt, Homo sapiens
  misc_RNA (1)...(19): siRNA sense strand
guauggcaauguggaaauu

SEQ ID NO: 595824 - RNA, 19 nt, Homo sapiens
  misc_RNA (1)...(19): siRNA sense strand
uuaaugagccucugagcuu

SEQ ID NO: 595825 - RNA, 19 nt, Homo sapiens
  misc_RNA (1)...(19): siRNA sense strand
ugaaguagacaaagacaug

SEQ ID NO: 595826 - RNA, 19 nt, Homo sapiens
  misc_RNA (1)...(19): siRNA sense strand
caaguuugccuucuccuau

SEQ ID NO: 595827 - RNA, 19 nt, Homo sapiens
  misc_RNA (1)...(19): siRNA sense strand
caaaguugaaggcuacauu

SEQ ID NO: 595828 - RNA, 19 nt, Homo sapiens
  misc_RNA (1)...(19): siRNA sense strand
uggaaaggaugcagugugu

SEQ ID NO: 595829 - RNA, 19 nt, Homo sapiens
  misc_RNA (1)...(19): siRNA sense strand
ggagcauacuuaccucauc

SEQ ID NO: 595830 - RNA, 19 nt, Homo sapiens
  misc_RNA (1)...(19): siRNA sense strand
cacgaugccaguuauauuu

SEQ ID NO: 595831 - RNA, 19 nt, Homo sapiens
  misc_RNA (1)...(19): siRNA sense strand
gaagaguguagaagcagaa

SEQ ID NO: 595832 - RNA, 19 nt, Homo sapiens
  misc_RNA (1)...(19): siRNA sense strand
gcuacugggacagaaauua

SEQ ID NO: 595833 - RNA, 19 nt, Homo sapiens
  misc_RNA (1)...(19): siRNA sense strand
ggcaauguggaaauuauaa

SEQ ID NO: 595834 - RNA, 19 nt, Homo sapiens
  misc_RNA (1)...(19): siRNA sense strand
gaagcagaacccaaaggaa

SEQ ID NO: 595835 - RNA, 19 nt, Homo sapiens
  misc_RNA (1)...(19): siRNA sense strand
gaucacgaugccaguuaua

SEQ ID NO: 595836 - RNA, 19 nt, Homo sapiens
  misc_RNA (1)...(19): siRNA sense strand
uaucugcuguugcuucuca

SEQ ID NO: 595837 - RNA, 19 nt, Homo sapiens
  misc_RNA (1)...(19): siRNA sense strand
cauggaaaauggagagaua

SEQ ID NO: 595838 - RNA, 19 nt, Homo sapiens
  misc_RNA (1)...(19): siRNA sense strand
aagaagaacagcaaacaga

SEQ ID NO: 595839 - RNA, 19 nt, Homo sapiens
  misc_RNA (1)...(19): siRNA sense strand
gaacccaaaggaaccauca

SEQ ID NO: 595840 - RNA, 19 nt, Homo sapiens
  misc_RNA (1)...(19): siRNA sense strand
caagaaacacagaacaagu

SEQ ID NO: 595841 - RNA, 19 nt, Homo sapiens
  misc_RNA (1)...(19): siRNA sense strand
uacagcgccuaacugaaua

SEQ ID NO: 595842 - RNA, 19 nt, Homo sapiens
  misc_RNA (1)...(19): siRNA sense strand
uaugggaaguggacugaau

SEQ ID NO: 595843 - RNA, 19 nt, Homo sapiens
  misc_RNA (1)...(19): siRNA sense strand
ggagcuccuugaacacaau

SEQ ID NO: 595844 - RNA, 19 nt, Homo sapiens
  misc_RNA (1)...(19): siRNA sense strand
uuucauggcucuaucuauc

SEQ ID NO: 595845 - RNA, 19 nt, Homo sapiens
  misc_RNA (1)...(19): siRNA sense strand
ucacgaugccaguuauauu

SEQ ID NO: 595846 - RNA, 19 nt, Homo sapiens
  misc_RNA (1)...(19): siRNA sense strand
cgaacaguauggcaaugug

SEQ ID NO: 595847 - RNA, 19 nt, Homo sapiens
  misc_RNA (1)...(19): siRNA sense strand
acaaugaggcauauacaug

SEQ ID NO: 595848 - RNA, 19 nt, Homo sapiens
  misc_RNA (1)...(19): siRNA sense strand
ccuuggagcuccuugaaca

SEQ ID NO: 595849 - RNA, 19 nt, Homo sapiens
  misc_RNA (1)...(19): siRNA sense strand
cugaaggauuaaacaauga

SEQ ID NO: 595850 - RNA, 19 nt, Homo sapiens
  misc_RNA (1)...(19): siRNA sense strand
aagaaacacagaacaaguu

SEQ ID NO: 595851 - RNA, 19 nt, Homo sapiens
  misc_RNA (1)...(19): siRNA sense strand
cugaauacauggagcauac

SEQ ID NO: 595852 - RNA, 19 nt, Homo sapiens
  misc_RNA (1)...(19): siRNA sense strand
gccggauucugaaagugua

SEQ ID NO: 595853 - RNA, 19 nt, Homo sapiens
  misc_RNA (1)...(19): siRNA sense strand
auacagaagagaagaagaa

SEQ ID NO: 595854 - RNA, 19 nt, Homo sapiens
  misc_RNA (1)...(19): siRNA sense strand
gaauacauggagcauacuu

SEQ ID NO: 595855 - RNA, 19 nt, Homo sapiens
  misc_RNA (1)...(19): siRNA sense strand
aagaacagcaaacagauga

SEQ ID NO: 595856 - RNA, 19 nt, Homo sapiens
  misc_RNA (1)...(19): siRNA sense strand
gaucgaacaguauggcaau

SEQ ID NO: 595857 - RNA, 19 nt, Homo sapiens
  misc_RNA (1)...(19): siRNA sense strand
uguagaagcagaacccaaa

SEQ ID NO: 595858 - RNA, 19 nt, Homo sapiens
  misc_RNA (1)...(19): siRNA sense strand
gaagaagaacagcaaacag

SEQ ID NO: 595859 - RNA, 19 nt, Homo sapiens
  misc_RNA (1)...(19): siRNA sense strand
cugaggaguuggaugaaau

SEQ ID NO: 595860 - RNA, 19 nt, Homo sapiens
  misc_RNA (1)...(19): siRNA sense strand
ccacaagacuggggacaaa

SEQ ID NO: 595861 - RNA, 19 nt, Homo sapiens
  misc_RNA (1)...(19): siRNA sense strand
gacaaauguguguugaauu

SEQ ID NO: 595862 - RNA, 19 nt, Homo sapiens
  misc_RNA (1)...(19): siRNA sense strand
guauuggaauggaacuauc

SEQ ID NO: 595863 - RNA, 19 nt, Homo sapiens
  misc_RNA (1)...(19): siRNA sense strand
gacaucagagccauggaaa

SEQ ID NO: 595864 - RNA, 19 nt, Homo sapiens
  misc_RNA (1)...(19): siRNA sense strand
gagagugugauucccaaga

SEQ ID NO: 595865 - RNA, 19 nt, Homo sapiens
  misc_RNA (1)...(19): siRNA sense strand
ggacugaauguuuauacag

SEQ ID NO: 595866 - RNA, 19 nt, Homo sapiens
  misc_RNA (1)...(19): siRNA sense strand
ugaacacaaugaggcauau

SEQ ID NO: 595867 - RNA, 19 nt, Homo sapiens
  misc_RNA (1)...(19): siRNA sense strand
ggaaaggaugcagugugua

SEQ ID NO: 595868 - RNA, 19 nt, Homo sapiens
  misc_RNA (1)...(19): siRNA sense strand
cagaaaauguauuggaaug

SEQ ID NO: 595869 - RNA, 19 nt, Homo sapiens
  misc_RNA (1)...(19): siRNA sense strand
ccaaucagugcauuucaug

SEQ ID NO: 595870 - RNA, 19 nt, Homo sapiens
  misc_RNA (1)...(19): siRNA sense strand
agacauggagagugugauu

SEQ ID NO: 595871 - RNA, 19 nt, Homo sapiens
  misc_RNA (1)...(19): siRNA sense strand
gaaugaaguagacaaagac

SEQ ID NO: 595872 - RNA, 19 nt, Homo sapiens
  misc_RNA (1)...(19): siRNA sense strand
cugccacguuugacgcuua

SEQ ID NO: 595873 - RNA, 19 nt, Homo sapiens
  misc_RNA (1)...(19): siRNA sense strand
ccugcugugugcauaauau

SEQ ID NO: 595874 - RNA, 19 nt, Homo sapiens
  misc_RNA (1)...(19): siRNA sense strand
aagaucacgaugccaguua

SEQ ID NO: 595875 - RNA, 19 nt, Homo sapiens
  misc_RNA (1)...(19): siRNA sense strand
caaggccaguucacucucu

SEQ ID NO: 595876 - RNA, 19 nt, Homo sapiens
  misc_RNA (1)...(19): siRNA sense strand
gcagcuacugggacagaaa

SEQ ID NO: 595877 - RNA, 19 nt, Homo sapiens
  misc_RNA (1)...(19): siRNA sense strand
guccuaaucccuacaaugg

SEQ ID NO: 595878 - RNA, 19 nt, Homo sapiens
  misc_RNA (1)...(19): siRNA sense strand
aaacagguccaagucagaa

SEQ ID NO: 595879 - RNA, 19 nt, Homo sapiens
  misc_RNA (1)...(19): siRNA sense strand
gaucaagcuagugaagaaa

SEQ ID NO: 595880 - RNA, 19 nt, Homo sapiens
  misc_RNA (1)...(19): siRNA sense strand
cagaagagaagaagaacag

SEQ ID NO: 595881 - RNA, 19 nt, Homo sapiens
  misc_RNA (1)...(19): siRNA sense strand
aggcuacauucaagauaaa

SEQ ID NO: 595882 - RNA, 19 nt, Homo sapiens
  misc_RNA (1)...(19): siRNA sense strand
guagcugcguuugcuguau

SEQ ID NO: 595883 - RNA, 19 nt, Homo sapiens
  misc_RNA (1)...(19): siRNA sense strand
ugacaucagagccauggaa

SEQ ID NO: 595884 - RNA, 19 nt, Homo sapiens
  misc_RNA (1)...(19): siRNA sense strand
agauagaucaagcuaguga

SEQ ID NO: 595885 - RNA, 19 nt, Homo sapiens
  misc_RNA (1)...(19): siRNA sense strand
gaaguggacugaauguuua

SEQ ID NO: 595886 - RNA, 19 nt, Homo sapiens
  misc_RNA (1)...(19): siRNA sense strand
ggacagaaauuacuucaau

SEQ ID NO: 595887 - RNA, 19 nt, Homo sapiens
  misc_RNA (1)...(19): siRNA sense strand
ggacaaauguguguugaau

SEQ ID NO: 595888 - RNA, 19 nt, Homo sapiens
  misc_RNA (1)...(19): siRNA sense strand
ggaaguggacugaauguuu

SEQ ID NO: 595889 - RNA, 19 nt, Homo sapiens
  misc_RNA (1)...(19): siRNA sense strand
gcauauacauggacaaauc

SEQ ID NO: 595890 - RNA, 19 nt, Homo sapiens
  misc_RNA (1)...(19): siRNA sense strand
caagacagacugcagguua

SEQ ID NO: 595891 - RNA, 19 nt, Homo sapiens
  misc_RNA (1)...(19): siRNA sense strand
gcacaggacuggauuuacu

SEQ ID NO: 595892 - RNA, 19 nt, Homo sapiens
  misc_RNA (1)...(19): siRNA sense strand
ucaauuugccugacauuua

SEQ ID NO: 595893 - RNA, 19 nt, Homo sapiens
  misc_RNA (1)...(19): siRNA sense strand
gaaaguguauucauuaucc

SEQ ID NO: 595894 - RNA, 19 nt, Homo sapiens
  misc_RNA (1)...(19): siRNA sense strand
gcugaaggauuaaacaaug

SEQ ID NO: 595895 - RNA, 19 nt, Homo sapiens
  misc_RNA (1)...(19): siRNA sense strand
caauuugccugacauuuau

SEQ ID NO: 595896 - RNA, 19 nt, Homo sapiens
  misc_RNA (1)...(19): siRNA sense strand
cacugaacaucaugaauua

SEQ ID NO: 595897 - RNA, 19 nt, Homo sapiens
  misc_RNA (1)...(19): siRNA sense strand
agaaaugacuucaguaucu

SEQ ID NO: 595898 - RNA, 19 nt, Homo sapiens
  misc_RNA (1)...(19): siRNA sense strand
ugaaugaaguagacaaaga

SEQ ID NO: 595899 - RNA, 19 nt, Homo sapiens
  misc_RNA (1)...(19): siRNA sense strand
gcgccuaacugaauacaug

SEQ ID NO: 595900 - RNA, 19 nt, Homo sapiens
  misc_RNA (1)...(19): siRNA sense strand
ccacugaacaucaugaauu

SEQ ID NO: 595901 - RNA, 19 nt, Homo sapiens
  misc_RNA (1)...(19): siRNA sense strand
acaaagacauggagagugu

SEQ ID NO: 595902 - RNA, 19 nt, Homo sapiens
  misc_RNA (1)...(19): siRNA sense strand
gaagcucugugcccucuau

SEQ ID NO: 595903 - RNA, 19 nt, Homo sapiens
  misc_RNA (1)...(19): siRNA sense strand
ggaauuacacaaaguugaa

SEQ ID NO: 595904 - RNA, 19 nt, Homo sapiens
  misc_RNA (1)...(19): siRNA sense strand
gagcacaggacuggauuua

SEQ ID NO: 595905 - RNA, 19 nt, Homo sapiens
  misc_RNA (1)...(19): siRNA sense strand
gaaaugacuucaguaucug

SEQ ID NO: 595906 - RNA, 19 nt, Homo sapiens
  misc_RNA (1)...(19): siRNA sense strand
ccaauggcaucaagaaaca

SEQ ID NO: 595907 - RNA, 19 nt, Homo sapiens
  misc_RNA (1)...(19): siRNA sense strand
gaaaggaugcaguguguag

SEQ ID NO: 595908 - RNA, 19 nt, Homo sapiens
  misc_RNA (1)...(19): siRNA sense strand
ggagagcauuugggcagua

SEQ ID NO: 595909 - RNA, 19 nt, Homo sapiens
  misc_RNA (1)...(19): siRNA sense strand
gaaaggucccugaguagau

SEQ ID NO: 595910 - RNA, 19 nt, Homo sapiens
  misc_RNA (1)...(19): siRNA sense strand
gaauguuuauacaguguug

SEQ ID NO: 595911 - RNA, 19 nt, Homo sapiens
  misc_RNA (1)...(19): siRNA sense strand
gaaggcuacauucaagaua

SEQ ID NO: 595912 - RNA, 19 nt, Homo sapiens
  misc_RNA (1)...(19): siRNA sense strand
auacuuaccucauccacaa

SEQ ID NO: 595913 - RNA, 19 nt, Homo sapiens
  misc_RNA (1)...(19): siRNA sense strand
gcccagauguauaauuuua

SEQ ID NO: 595914 - RNA, 19 nt, Homo sapiens
  misc_RNA (1)...(19): siRNA sense strand
gaagaacagcaaacagaug

SEQ ID NO: 595915 - RNA, 19 nt, Homo sapiens
  misc_RNA (1)...(19): siRNA sense strand
gaggacgaguucuaugaug

SEQ ID NO: 595916 - RNA, 19 nt, Homo sapiens
  misc_RNA (1)...(19): siRNA sense strand
acaaagagcagcccgcaaa

SEQ ID NO: 595917 - RNA, 19 nt, Homo sapiens
  misc_RNA (1)...(19): siRNA sense strand
agagauagaucaagcuagu

SEQ ID NO: 595918 - RNA, 19 nt, Homo sapiens
  misc_RNA (1)...(19): siRNA sense strand
ggagagauagaucaagcua

SEQ ID NO: 595919 - RNA, 19 nt, Homo sapiens
  misc_RNA (1)...(19): siRNA sense strand
cugcccagauguauaauuu

SEQ ID NO: 595920 - RNA, 19 nt, Homo sapiens
  misc_RNA (1)...(19): siRNA sense strand
cgaugccaguuauauuuaa

SEQ ID NO: 595921 - RNA, 19 nt, Homo sapiens
  misc_RNA (1)...(19): siRNA sense strand
uggagacgcuggccacuga

SEQ ID NO: 595922 - RNA, 19 nt, Homo sapiens
  misc_RNA (1)...(19): siRNA sense strand
cuacagcgccuaacugaau

SEQ ID NO: 595923 - RNA, 19 nt, Homo sapiens
  misc_RNA (1)...(19): siRNA sense strand
aaaggucccugaguagauu

SEQ ID NO: 595924 - RNA, 19 nt, Homo sapiens
  misc_RNA (1)...(19): siRNA sense strand
gaaaugccagugccggauu

SEQ ID NO: 595925 - RNA, 19 nt, Homo sapiens
  misc_RNA (1)...(19): siRNA sense strand
gaacacaaugaggcauaua

SEQ ID NO: 595926 - RNA, 19 nt, Homo sapiens
  misc_RNA (1)...(19): siRNA sense strand
uccgaaaggucccugagua

SEQ ID NO: 595927 - RNA, 19 nt, Homo sapiens
  misc_RNA (1)...(19): siRNA sense strand
agaucaagcuagugaagaa

SEQ ID NO: 595928 - RNA, 19 nt, Homo sapiens
  misc_RNA (1)...(19): siRNA sense strand
aaggcuacauucaagauaa

SEQ ID NO: 595929 - RNA, 19 nt, Homo sapiens
  misc_RNA (1)...(19): siRNA sense strand
ccagaaaugacuucaguau

SEQ ID NO: 595930 - RNA, 19 nt, Homo sapiens
  misc_RNA (1)...(19): siRNA sense strand
gaaaauguauuggaaugga

SEQ ID NO: 595931 - RNA, 19 nt, Homo sapiens
  misc_RNA (1)...(19): siRNA sense strand
gcgaggacgaguucuauga

SEQ ID NO: 595932 - RNA, 19 nt, Homo sapiens
  misc_RNA (1)...(19): siRNA sense strand
guauggcaauguggaaauu

SEQ ID NO: 595933 - RNA, 19 nt, Homo sapiens
  misc_RNA (1)...(19): siRNA sense strand
ugacagcacgcuccuuuga

SEQ ID NO: 595934 - RNA, 19 nt, Homo sapiens
  misc_RNA (1)...(19): siRNA sense strand
ugaaguagacaaagacaug

SEQ ID NO: 595935 - RNA, 19 nt, Homo sapiens
  misc_RNA (1)...(19): siRNA sense strand
caaaguugaaggcuacauu

SEQ ID NO: 595936 - RNA, 19 nt, Homo sapiens
  misc_RNA (1)...(19): siRNA sense strand
uggaaaggaugcagugugu

SEQ ID NO: 595937 - RNA, 19 nt, Homo sapiens
  misc_RNA (1)...(19): siRNA sense strand
ggagcauacuuaccucauc

SEQ ID NO: 595938 - RNA, 19 nt, Homo sapiens
  misc_RNA (1)...(19): siRNA sense strand
uuaaugagccucugagcuu

SEQ ID NO: 595939 - RNA, 19 nt, Homo sapiens
  misc_RNA (1)...(19): siRNA sense strand
caaguuugccuucuccuau

SEQ ID NO: 595940 - RNA, 19 nt, Homo sapiens
  misc_RNA (1)...(19): siRNA sense strand
cacgaugccaguuauauuu

SEQ ID NO: 595941 - RNA, 19 nt, Homo sapiens
  misc_RNA (1)...(19): siRNA sense strand
gaagaguguagaagcagaa

SEQ ID NO: 595942 - RNA, 19 nt, Homo sapiens
  misc_RNA (1)...(19): siRNA sense strand
gcuacugggacagaaauua

SEQ ID NO: 595943 - RNA, 19 nt, Homo sapiens
  misc_RNA (1)...(19): siRNA sense strand
ggcaauguggaaauuauaa

SEQ ID NO: 595944 - RNA, 19 nt, Homo sapiens
  misc_RNA (1)...(19): siRNA sense strand
gaagcagaacccaaaggaa

SEQ ID NO: 595945 - RNA, 19 nt, Homo sapiens
  misc_RNA (1)...(19): siRNA sense strand
cacagaauguccgaagaaa

SEQ ID NO: 595946 - RNA, 19 nt, Homo sapiens
  misc_RNA (1)...(19): siRNA sense strand
gaucacgaugccaguuaua

SEQ ID NO: 595947 - RNA, 19 nt, Homo sapiens
  misc_RNA (1)...(19): siRNA sense strand
caagaaacacagaacaagu

SEQ ID NO: 595948 - RNA, 19 nt, Homo sapiens
  misc_RNA (1)...(19): siRNA sense strand
cauggaaaauggagagaua

SEQ ID NO: 595949 - RNA, 19 nt, Homo sapiens
  misc_RNA (1)...(19): siRNA sense strand
aagaagaacagcaaacaga

SEQ ID NO: 595950 - RNA, 19 nt, Homo sapiens
  misc_RNA (1)...(19): siRNA sense strand
uaaauuggaacaagagcaa

SEQ ID NO: 595951 - RNA, 19 nt, Homo sapiens
  misc_RNA (1)...(19): siRNA sense strand
gaacccaaaggaaccauca

SEQ ID NO: 595952 - RNA, 19 nt, Homo sapiens
  misc_RNA (1)...(19): siRNA sense strand
uaucugcuguugcuucuca

SEQ ID NO: 595953 - RNA, 19 nt, Homo sapiens
  misc_RNA (1)...(19): siRNA sense strand
uacagcgccuaacugaaua

SEQ ID NO: 595954 - RNA, 19 nt, Homo sapiens
  misc_RNA (1)...(19): siRNA sense strand
uaugggaaguggacugaau

SEQ ID NO: 595955 - RNA, 19 nt, Homo sapiens
  misc_RNA (1)...(19): siRNA sense strand
ggagcuccuugaacacaau

SEQ ID NO: 595956 - RNA, 19 nt, Homo sapiens
  misc_RNA (1)...(19): siRNA sense strand
uuucauggcucuaucuauc

SEQ ID NO: 595957 - RNA, 19 nt, Homo sapiens
  misc_RNA (1)...(19): siRNA sense strand
aagaaacacagaacaaguu

SEQ ID NO: 595958 - RNA, 19 nt, Homo sapiens
  misc_RNA (1)...(19): siRNA sense strand
cgaacaguauggcaaugug

SEQ ID NO: 595959 - RNA, 19 nt, Homo sapiens
  misc_RNA (1)...(19): siRNA sense strand
acaaugaggcauauacaug

SEQ ID NO: 595960 - RNA, 19 nt, Homo sapiens
  misc_RNA (1)...(19): siRNA sense strand
ccuuggagcuccuugaaca

SEQ ID NO: 595961 - RNA, 19 nt, Homo sapiens
  misc_RNA (1)...(19): siRNA sense strand
cugaaggauuaaacaauga

SEQ ID NO: 595962 - RNA, 19 nt, Homo sapiens
  misc_RNA (1)...(19): siRNA sense strand
ucacgaugccaguuauauu

SEQ ID NO: 595963 - RNA, 19 nt, Homo sapiens
  misc_RNA (1)...(19): siRNA sense strand
cugaauacauggagcauac

SEQ ID NO: 595964 - RNA, 19 nt, Homo sapiens
  misc_RNA (1)...(19): siRNA sense strand
gccggauucugaaagugua

SEQ ID NO: 595965 - RNA, 19 nt, Homo sapiens
  misc_RNA (1)...(19): siRNA sense strand
auacagaagagaagaagaa

SEQ ID NO: 595966 - RNA, 19 nt, Homo sapiens
  misc_RNA (1)...(19): siRNA sense strand
gaagaggaaggagagcauu

SEQ ID NO: 595967 - RNA, 19 nt, Homo sapiens
  misc_RNA (1)...(19): siRNA sense strand
gagcauuugggcaguagaa

SEQ ID NO: 595968 - RNA, 19 nt, Homo sapiens
  misc_RNA (1)...(19): siRNA sense strand
aagaacagcaaacagauga

SEQ ID NO: 595969 - RNA, 19 nt, Homo sapiens
  misc_RNA (1)...(19): siRNA sense strand
gaucgaacaguauggcaau

SEQ ID NO: 595970 - RNA, 19 nt, Homo sapiens
  misc_RNA (1)...(19): siRNA sense strand
uguagaagcagaacccaaa

SEQ ID NO: 595971 - RNA, 19 nt, Homo sapiens
  misc_RNA (1)...(19): siRNA sense strand
gaauacauggagcauacuu

SEQ ID NO: 595972 - RNA, 19 nt, Homo sapiens
  misc_RNA (1)...(19): siRNA sense strand
gaagaagaacagcaaacag

SEQ ID NO: 595973 - RNA, 19 nt, Homo sapiens
  misc_RNA (1)...(19): siRNA sense strand
cugaggaguuggaugaaau

SEQ ID NO: 595974 - RNA, 19 nt, Homo sapiens
  misc_RNA (1)...(19): siRNA sense strand
acacagaauguccgaagaa

SEQ ID NO: 595975 - RNA, 19 nt, Homo sapiens
  misc_RNA (1)...(19): siRNA sense strand
gacaaauguguguugaauu

SEQ ID NO: 595976 - RNA, 19 nt, Homo sapiens
  misc_RNA (1)...(19): siRNA sense strand
ccacaagacuggggacaaa

SEQ ID NO: 595977 - RNA, 19 nt, Homo sapiens
  misc_RNA (1)...(19): siRNA sense strand
guauuggaauggaacuauc

SEQ ID NO: 595978 - RNA, 19 nt, Homo sapiens
  misc_RNA (1)...(19): siRNA sense strand
gacaucagagccauggaaa

SEQ ID NO: 595979 - RNA, 19 nt, Homo sapiens
  misc_RNA (1)...(19): siRNA sense strand
gagagugugauucccaaga

SEQ ID NO: 595980 - RNA, 19 nt, Homo sapiens
  misc_RNA (1)...(19): siRNA sense strand
ggacugaauguuuauacag

SEQ ID NO: 595981 - RNA, 19 nt, Homo sapiens
  misc_RNA (1)...(19): siRNA sense strand
augaugcgcugucagauuc

SEQ ID NO: 595982 - RNA, 19 nt, Homo sapiens
  misc_RNA (1)...(19): siRNA sense strand
ugaacacaaugaggcauau

SEQ ID NO: 595983 - RNA, 19 nt, Homo sapiens
  misc_RNA (1)...(19): siRNA sense strand
cgaaaggucccugaguaga

SEQ ID NO: 595984 - RNA, 19 nt, Homo sapiens
  misc_RNA (1)...(19): siRNA sense strand
ggaaaggaugcagugugua

SEQ ID NO: 595985 - RNA, 19 nt, Homo sapiens
  misc_RNA (1)...(19): siRNA sense strand
gaaguggacugaauguuua

SEQ ID NO: 595986 - RNA, 19 nt, Homo sapiens
  misc_RNA (1)...(19): siRNA sense strand
ggacagaaauuacuucaau

SEQ ID NO: 595987 - RNA, 19 nt, Homo sapiens
  misc_RNA (1)...(19): siRNA sense strand
ggacaaauguguguugaau

SEQ ID NO: 595988 - RNA, 19 nt, Homo sapiens
  misc_RNA (1)...(19): siRNA sense strand
ggaaguggacugaauguuu

SEQ ID NO: 595989 - RNA, 19 nt, Homo sapiens
  misc_RNA (1)...(19): siRNA sense strand
gcauauacauggacaaauc

SEQ ID NO: 595990 - RNA, 19 nt, Homo sapiens
  misc_RNA (1)...(19): siRNA sense strand
caagacagacugcagguua

SEQ ID NO: 595991 - RNA, 19 nt, Homo sapiens
  misc_RNA (1)...(19): siRNA sense strand
gcacaggacuggauuuacu

SEQ ID NO: 595992 - RNA, 19 nt, Homo sapiens
  misc_RNA (1)...(19): siRNA sense strand
ucaauuugccugacauuua

SEQ ID NO: 595993 - RNA, 19 nt, Homo sapiens
  misc_RNA (1)...(19): siRNA sense strand
gaaaguguauucauuaucc

SEQ ID NO: 595994 - RNA, 19 nt, Homo sapiens
  misc_RNA (1)...(19): siRNA sense strand
gcugaaggauuaaacaaug

SEQ ID NO: 595995 - RNA, 19 nt, Homo sapiens
  misc_RNA (1)...(19): siRNA sense strand
caauuugccugacauuuau

SEQ ID NO: 595996 - RNA, 19 nt, Homo sapiens
  misc_RNA (1)...(19): siRNA sense strand
cacugaacaucaugaauua

SEQ ID NO: 595997 - RNA, 19 nt, Homo sapiens
  misc_RNA (1)...(19): siRNA sense strand
agaaaugacuucaguaucu

SEQ ID NO: 595998 - RNA, 19 nt, Homo sapiens
  misc_RNA (1)...(19): siRNA sense strand
ugaaugaaguagacaaaga

SEQ ID NO: 595999 - RNA, 19 nt, Homo sapiens
  misc_RNA (1)...(19): siRNA sense strand
gcgccuaacugaauacaug

SEQ ID NO: 596000 - RNA, 19 nt, Homo sapiens
  misc_RNA (1)...(19): siRNA sense strand
ccacugaacaucaugaauu

SEQ ID NO: 596001 - RNA, 19 nt, Homo sapiens
  misc_RNA (1)...(19): siRNA sense strand
acaaagacauggagagugu

SEQ ID NO: 596002 - RNA, 19 nt, Homo sapiens
  misc_RNA (1)...(19): siRNA sense strand
gaagcucugugcccucuau

SEQ ID NO: 596003 - RNA, 19 nt, Homo sapiens
  misc_RNA (1)...(19): siRNA sense strand
ggaauuacacaaaguugaa

SEQ ID NO: 596004 - RNA, 19 nt, Homo sapiens
  misc_RNA (1)...(19): siRNA sense strand
gagcacaggacuggauuua

SEQ ID NO: 596005 - RNA, 19 nt, Homo sapiens
  misc_RNA (1)...(19): siRNA sense strand
gaaaugacuucaguaucug

SEQ ID NO: 596006 - RNA, 19 nt, Homo sapiens
  misc_RNA (1)...(19): siRNA sense strand
ccaauggcaucaagaaaca

SEQ ID NO: 596007 - RNA, 19 nt, Homo sapiens
  misc_RNA (1)...(19): siRNA sense strand
gaaaggaugcaguguguag

SEQ ID NO: 596008 - RNA, 19 nt, Homo sapiens
  misc_RNA (1)...(19): siRNA sense strand
ggagagcauuugggcagua

SEQ ID NO: 596009 - RNA, 19 nt, Homo sapiens
  misc_RNA (1)...(19): siRNA sense strand
gaaaggucccugaguagau

SEQ ID NO: 596010 - RNA, 19 nt, Homo sapiens
  misc_RNA (1)...(19): siRNA sense strand
gaauguuuauacaguguug

SEQ ID NO: 596011 - RNA, 19 nt, Homo sapiens
  misc_RNA (1)...(19): siRNA sense strand
gaaggcuacauucaagaua

SEQ ID NO: 596012 - RNA, 19 nt, Homo sapiens
  misc_RNA (1)...(19): siRNA sense strand
auacuuaccucauccacaa

SEQ ID NO: 596013 - RNA, 19 nt, Homo sapiens
  misc_RNA (1)...(19): siRNA sense strand
gcccagauguauaauuuua

SEQ ID NO: 596014 - RNA, 19 nt, Homo sapiens
  misc_RNA (1)...(19): siRNA sense strand
gaagaacagcaaacagaug

SEQ ID NO: 596015 - RNA, 19 nt, Homo sapiens
  misc_RNA (1)...(19): siRNA sense strand
gaggacgaguucuaugaug

SEQ ID NO: 596016 - RNA, 19 nt, Homo sapiens
  misc_RNA (1)...(19): siRNA sense strand
acaaagagcagcccgcaaa

SEQ ID NO: 596017 - RNA, 19 nt, Homo sapiens
  misc_RNA (1)...(19): siRNA sense strand
agagauagaucaagcuagu

SEQ ID NO: 596018 - RNA, 19 nt, Homo sapiens
  misc_RNA (1)...(19): siRNA sense strand
ggagagauagaucaagcua

SEQ ID NO: 596019 - RNA, 19 nt, Homo sapiens
  misc_RNA (1)...(19): siRNA sense strand
cugcccagauguauaauuu

SEQ ID NO: 596020 - RNA, 19 nt, Homo sapiens
  misc_RNA (1)...(19): siRNA sense strand
cgaugccaguuauauuuaa

SEQ ID NO: 596021 - RNA, 19 nt, Homo sapiens
  misc_RNA (1)...(19): siRNA sense strand
uggagacgcuggccacuga

SEQ ID NO: 596022 - RNA, 19 nt, Homo sapiens
  misc_RNA (1)...(19): siRNA sense strand
cuacagcgccuaacugaau

SEQ ID NO: 596023 - RNA, 19 nt, Homo sapiens
  misc_RNA (1)...(19): siRNA sense strand
aaaggucccugaguagauu

SEQ ID NO: 596024 - RNA, 19 nt, Homo sapiens
  misc_RNA (1)...(19): siRNA sense strand
gaaaugccagugccggauu

SEQ ID NO: 596025 - RNA, 19 nt, Homo sapiens
  misc_RNA (1)...(19): siRNA sense strand
gaacacaaugaggcauaua

SEQ ID NO: 596026 - RNA, 19 nt, Homo sapiens
  misc_RNA (1)...(19): siRNA sense strand
uccgaaaggucccugagua

SEQ ID NO: 596027 - RNA, 19 nt, Homo sapiens
  misc_RNA (1)...(19): siRNA sense strand
agaucaagcuagugaagaa

SEQ ID NO: 596028 - RNA, 19 nt, Homo sapiens
  misc_RNA (1)...(19): siRNA sense strand
aaggcuacauucaagauaa

SEQ ID NO: 596029 - RNA, 19 nt, Homo sapiens
  misc_RNA (1)...(19): siRNA sense strand
ccagaaaugacuucaguau

SEQ ID NO: 596030 - RNA, 19 nt, Homo sapiens
  misc_RNA (1)...(19): siRNA sense strand
gaaaauguauuggaaugga

SEQ ID NO: 596031 - RNA, 19 nt, Homo sapiens
  misc_RNA (1)...(19): siRNA sense strand
gcgaggacgaguucuauga

SEQ ID NO: 596032 - RNA, 19 nt, Homo sapiens
  misc_RNA (1)...(19): siRNA sense strand
guauggcaauguggaaauu

SEQ ID NO: 596033 - RNA, 19 nt, Homo sapiens
  misc_RNA (1)...(19): siRNA sense strand
ugacagcacgcuccuuuga

SEQ ID NO: 596034 - RNA, 19 nt, Homo sapiens
  misc_RNA (1)...(19): siRNA sense strand
ugaaguagacaaagacaug

SEQ ID NO: 596035 - RNA, 19 nt, Homo sapiens
  misc_RNA (1)...(19): siRNA sense strand
caaaguugaaggcuacauu

SEQ ID NO: 596036 - RNA, 19 nt, Homo sapiens
  misc_RNA (1)...(19): siRNA sense strand
uggaaaggaugcagugugu

SEQ ID NO: 596037 - RNA, 19 nt, Homo sapiens
  misc_RNA (1)...(19): siRNA sense strand
ggagcauacuuaccucauc

SEQ ID NO: 596038 - RNA, 19 nt, Homo sapiens
  misc_RNA (1)...(19): siRNA sense strand
uuaaugagccucugagcuu

SEQ ID NO: 596039 - RNA, 19 nt, Homo sapiens
  misc_RNA (1)...(19): siRNA sense strand
caaguuugccuucuccuau

SEQ ID NO: 596040 - RNA, 19 nt, Homo sapiens
  misc_RNA (1)...(19): siRNA sense strand
cacgaugccaguuauauuu

SEQ ID NO: 596041 - RNA, 19 nt, Homo sapiens
  misc_RNA (1)...(19): siRNA sense strand
gaagaguguagaagcagaa

SEQ ID NO: 596042 - RNA, 19 nt, Homo sapiens
  misc_RNA (1)...(19): siRNA sense strand
gcuacugggacagaaauua

SEQ ID NO: 596043 - RNA, 19 nt, Homo sapiens
  misc_RNA (1)...(19): siRNA sense strand
ggcaauguggaaauuauaa

SEQ ID NO: 596044 - RNA, 19 nt, Homo sapiens
  misc_RNA (1)...(19): siRNA sense strand
gaagcagaacccaaaggaa

SEQ ID NO: 596045 - RNA, 19 nt, Homo sapiens
  misc_RNA (1)...(19): siRNA sense strand
cacagaauguccgaagaaa

SEQ ID NO: 596046 - RNA, 19 nt, Homo sapiens
  misc_RNA (1)...(19): siRNA sense strand
gaucacgaugccaguuaua

SEQ ID NO: 596047 - RNA, 19 nt, Homo sapiens
  misc_RNA (1)...(19): siRNA sense strand
caagaaacacagaacaagu

SEQ ID NO: 596048 - RNA, 19 nt, Homo sapiens
  misc_RNA (1)...(19): siRNA sense strand
cauggaaaauggagagaua

SEQ ID NO: 596049 - RNA, 19 nt, Homo sapiens
  misc_RNA (1)...(19): siRNA sense strand
aagaagaacagcaaacaga

SEQ ID NO: 596050 - RNA, 19 nt, Homo sapiens
  misc_RNA (1)...(19): siRNA sense strand
uaaauuggaacaagagcaa

SEQ ID NO: 596051 - RNA, 19 nt, Homo sapiens
  misc_RNA (1)...(19): siRNA sense strand
gaacccaaaggaaccauca

SEQ ID NO: 596052 - RNA, 19 nt, Homo sapiens
  misc_RNA (1)...(19): siRNA sense strand
uaucugcuguugcuucuca

SEQ ID NO: 596053 - RNA, 19 nt, Homo sapiens
  misc_RNA (1)...(19): siRNA sense strand
uacagcgccuaacugaaua

SEQ ID NO: 596054 - RNA, 19 nt, Homo sapiens
  misc_RNA (1)...(19): siRNA sense strand
uaugggaaguggacugaau

SEQ ID NO: 596055 - RNA, 19 nt, Homo sapiens
  misc_RNA (1)...(19): siRNA sense strand
ggagcuccuugaacacaau

SEQ ID NO: 596056 - RNA, 19 nt, Homo sapiens
  misc_RNA (1)...(19): siRNA sense strand
uuucauggcucuaucuauc

SEQ ID NO: 596057 - RNA, 19 nt, Homo sapiens
  misc_RNA (1)...(19): siRNA sense strand
aagaaacacagaacaaguu

SEQ ID NO: 596058 - RNA, 19 nt, Homo sapiens
  misc_RNA (1)...(19): siRNA sense strand
cgaacaguauggcaaugug

SEQ ID NO: 596059 - RNA, 19 nt, Homo sapiens
  misc_RNA (1)...(19): siRNA sense strand
acaaugaggcauauacaug

SEQ ID NO: 596060 - RNA, 19 nt, Homo sapiens
  misc_RNA (1)...(19): siRNA sense strand
ccuuggagcuccuugaaca

SEQ ID NO: 596061 - RNA, 19 nt, Homo sapiens
  misc_RNA (1)...(19): siRNA sense strand
cugaaggauuaaacaauga

SEQ ID NO: 596062 - RNA, 19 nt, Homo sapiens
  misc_RNA (1)...(19): siRNA sense strand
ucacgaugccaguuauauu

SEQ ID NO: 596063 - RNA, 19 nt, Homo sapiens
  misc_RNA (1)...(19): siRNA sense strand
cugaauacauggagcauac

SEQ ID NO: 596064 - RNA, 19 nt, Homo sapiens
  misc_RNA (1)...(19): siRNA sense strand
gccggauucugaaagugua

SEQ ID NO: 596065 - RNA, 19 nt, Homo sapiens
  misc_RNA (1)...(19): siRNA sense strand
auacagaagagaagaagaa

SEQ ID NO: 596066 - RNA, 19 nt, Homo sapiens
  misc_RNA (1)...(19): siRNA sense strand
gaagaggaaggagagcauu

SEQ ID NO: 596067 - RNA, 19 nt, Homo sapiens
  misc_RNA (1)...(19): siRNA sense strand
gagcauuugggcaguagaa

SEQ ID NO: 596068 - RNA, 19 nt, Homo sapiens
  misc_RNA (1)...(19): siRNA sense strand
aagaacagcaaacagauga

SEQ ID NO: 596069 - RNA, 19 nt, Homo sapiens
  misc_RNA (1)...(19): siRNA sense strand
gaucgaacaguauggcaau

SEQ ID NO: 596070 - RNA, 19 nt, Homo sapiens
  misc_RNA (1)...(19): siRNA sense strand
uguagaagcagaacccaaa

SEQ ID NO: 596071 - RNA, 19 nt, Homo sapiens
  misc_RNA (1)...(19): siRNA sense strand
gaauacauggagcauacuu

SEQ ID NO: 596072 - RNA, 19 nt, Homo sapiens
  misc_RNA (1)...(19): siRNA sense strand
gaagaagaacagcaaacag

SEQ ID NO: 596073 - RNA, 19 nt, Homo sapiens
  misc_RNA (1)...(19): siRNA sense strand
cugaggaguuggaugaaau

SEQ ID NO: 596074 - RNA, 19 nt, Homo sapiens
  misc_RNA (1)...(19): siRNA sense strand
acacagaauguccgaagaa

SEQ ID NO: 596075 - RNA, 19 nt, Homo sapiens
  misc_RNA (1)...(19): siRNA sense strand
gacaaauguguguugaauu

SEQ ID NO: 596076 - RNA, 19 nt, Homo sapiens
  misc_RNA (1)...(19): siRNA sense strand
ccacaagacuggggacaaa

SEQ ID NO: 596077 - RNA, 19 nt, Homo sapiens
  misc_RNA (1)...(19): siRNA sense strand
guauuggaauggaacuauc

SEQ ID NO: 596078 - RNA, 19 nt, Homo sapiens
  misc_RNA (1)...(19): siRNA sense strand
gacaucagagccauggaaa

SEQ ID NO: 596079 - RNA, 19 nt, Homo sapiens
  misc_RNA (1)...(19): siRNA sense strand
gagagugugauucccaaga

SEQ ID NO: 596080 - RNA, 19 nt, Homo sapiens
  misc_RNA (1)...(19): siRNA sense strand
ggacugaauguuuauacag

SEQ ID NO: 596081 - RNA, 19 nt, Homo sapiens
  misc_RNA (1)...(19): siRNA sense strand
augaugcgcugucagauuc

SEQ ID NO: 596082 - RNA, 19 nt, Homo sapiens
  misc_RNA (1)...(19): siRNA sense strand
ugaacacaaugaggcauau

SEQ ID NO: 596083 - RNA, 19 nt, Homo sapiens
  misc_RNA (1)...(19): siRNA sense strand
cgaaaggucccugaguaga

SEQ ID NO: 596084 - RNA, 19 nt, Homo sapiens
  misc_RNA (1)...(19): siRNA sense strand
ggaaaggaugcagugugua

SEQ ID NO: 596085 - RNA, 19 nt, Homo sapiens
  misc_RNA (1)...(19): siRNA sense strand
acaaugagcucuuggacua

SEQ ID NO: 596086 - RNA, 19 nt, Homo sapiens
  misc_RNA (1)...(19): siRNA sense strand
gggcuuggcuaucacauuu

SEQ ID NO: 596087 - RNA, 19 nt, Homo sapiens
  misc_RNA (1)...(19): siRNA sense strand
aagaagaacugcccgcaua

SEQ ID NO: 596088 - RNA, 19 nt, Homo sapiens
  misc_RNA (1)...(19): siRNA sense strand
ggaugaaugugauaagaug

SEQ ID NO: 596089 - RNA, 19 nt, Homo sapiens
  misc_RNA (1)...(19): siRNA sense strand
uuagugagcugccugauga

SEQ ID NO: 596090 - RNA, 19 nt, Homo sapiens
  misc_RNA (1)...(19): siRNA sense strand
uaugagcgcuucucuaaau

SEQ ID NO: 596091 - RNA, 19 nt, Homo sapiens
  misc_RNA (1)...(19): siRNA sense strand
cgucagaaguccagcauga

SEQ ID NO: 596092 - RNA, 19 nt, Homo sapiens
  misc_RNA (1)...(19): siRNA sense strand
gaagaggugcugaagaaga

SEQ ID NO: 596093 - RNA, 19 nt, Homo sapiens
  misc_RNA (1)...(19): siRNA sense strand
agaacgauguggacaauga

SEQ ID NO: 596094 - RNA, 19 nt, Homo sapiens
  misc_RNA (1)...(19): siRNA sense strand
gugauaagaugcuugaaca

SEQ ID NO: 596095 - RNA, 19 nt, Homo sapiens
  misc_RNA (1)...(19): siRNA sense strand
ugagcugccugaugagaua

SEQ ID NO: 596096 - RNA, 19 nt, Homo sapiens
  misc_RNA (1)...(19): siRNA sense strand
gguaucagcaguuuaaaga

SEQ ID NO: 596097 - RNA, 19 nt, Homo sapiens
  misc_RNA (1)...(19): siRNA sense strand
gggaaagacagcaguguuu

SEQ ID NO: 596098 - RNA, 19 nt, Homo sapiens
  misc_RNA (1)...(19): siRNA sense strand
gcgcuucucuaaauacaug

SEQ ID NO: 596099 - RNA, 19 nt, Homo sapiens
  misc_RNA (1)...(19): siRNA sense strand
aauaugagcgcuucucuaa

SEQ ID NO: 596100 - RNA, 19 nt, Homo sapiens
  misc_RNA (1)...(19): siRNA sense strand
ccaagauccucaaugaugu

SEQ ID NO: 596101 - RNA, 19 nt, Homo sapiens
  misc_RNA (1)...(19): siRNA sense strand
agaagcaggucaugauguu

SEQ ID NO: 596102 - RNA, 19 nt, Homo sapiens
  misc_RNA (1)...(19): siRNA sense strand
gccaagauccucaaugaug

SEQ ID NO: 596103 - RNA, 19 nt, Homo sapiens
  misc_RNA (1)...(19): siRNA sense strand
agacaucuccuccuacauu

SEQ ID NO: 596104 - RNA, 19 nt, Homo sapiens
  misc_RNA (1)...(19): siRNA sense strand
augaagaggugcugaagaa

SEQ ID NO: 596105 - RNA, 19 nt, Homo sapiens
  misc_RNA (1)...(19): siRNA sense strand
aagaggugcugaagaagaa

SEQ ID NO: 596106 - RNA, 19 nt, Homo sapiens
  misc_RNA (1)...(19): siRNA sense strand
gaauaugagcgcuucucua

SEQ ID NO: 596107 - RNA, 19 nt, Homo sapiens
  misc_RNA (1)...(19): siRNA sense strand
gaaagacagcaguguuugu

SEQ ID NO: 596108 - RNA, 19 nt, Homo sapiens
  misc_RNA (1)...(19): siRNA sense strand
gucaugauguucagugcua

SEQ ID NO: 596109 - RNA, 19 nt, Homo sapiens
  misc_RNA (1)...(19): siRNA sense strand
ggaaagacagcaguguuug

SEQ ID NO: 596110 - RNA, 19 nt, Homo sapiens
  misc_RNA (1)...(19): siRNA sense strand
gaaauaagagccucaaccu

SEQ ID NO: 596111 - RNA, 19 nt, Homo sapiens
  misc_RNA (1)...(19): siRNA sense strand
gacaucuccuccuacauug

SEQ ID NO: 596112 - RNA, 19 nt, Homo sapiens
  misc_RNA (1)...(19): siRNA sense strand
ggaguuggcuuuucagauc

SEQ ID NO: 596113 - RNA, 19 nt, Homo sapiens
  misc_RNA (1)...(19): siRNA sense strand
gguggucugucuaucaaga

SEQ ID NO: 596114 - RNA, 19 nt, Homo sapiens
  misc_RNA (1)...(19): siRNA sense strand
gucaagggcuccuaugucu

SEQ ID NO: 596115 - RNA, 19 nt, Homo sapiens
  misc_RNA (1)...(19): siRNA sense strand
ccacagcucuggcuuucgu

SEQ ID NO: 596116 - RNA, 19 nt, Homo sapiens
  misc_RNA (1)...(19): siRNA sense strand
gagcgcuucucuaaauaca

SEQ ID NO: 596117 - RNA, 19 nt, Homo sapiens
  misc_RNA (1)...(19): siRNA sense strand
ugagaaugaugccaagauc

SEQ ID NO: 596118 - RNA, 19 nt, Homo sapiens
  misc_RNA (1)...(19): siRNA sense strand
gugcaucccucaggccauu

SEQ ID NO: 596119 - RNA, 19 nt, Homo sapiens
  misc_RNA (1)...(19): siRNA sense strand
ugacaugccugaggauucu

SEQ ID NO: 596120 - RNA, 19 nt, Homo sapiens
  misc_RNA (1)...(19): siRNA sense strand
ugaaggacaacgagaagaa

SEQ ID NO: 596121 - RNA, 19 nt, Homo sapiens
  misc_RNA (1)...(19): siRNA sense strand
gcagcaguacuacgugaaa

SEQ ID NO: 596122 - RNA, 19 nt, Homo sapiens
  misc_RNA (1)...(19): siRNA sense strand
aaagagauccguccagucu

SEQ ID NO: 596123 - RNA, 19 nt, Homo sapiens
  misc_RNA (1)...(19): siRNA sense strand
caaccucaaacacauuaaa

SEQ ID NO: 596124 - RNA, 19 nt, Homo sapiens
  misc_RNA (1)...(19): siRNA sense strand
gcagaacuucccagccauu

SEQ ID NO: 596125 - RNA, 19 nt, Homo sapiens
  misc_RNA (1)...(19): siRNA sense strand
augccaagauccucaauga

SEQ ID NO: 596126 - RNA, 19 nt, Homo sapiens
  misc_RNA (1)...(19): siRNA sense strand
gagaagcaggucaugaugu

SEQ ID NO: 596127 - RNA, 19 nt, Homo sapiens
  misc_RNA (1)...(19): siRNA sense strand
gaugaugagacgaaguuga

SEQ ID NO: 596128 - RNA, 19 nt, Homo sapiens
  misc_RNA (1)...(19): siRNA sense strand
agagaacgauguggacaau

SEQ ID NO: 596129 - RNA, 19 nt, Homo sapiens
  misc_RNA (1)...(19): siRNA sense strand
gaauucuuguggcuaccaa

SEQ ID NO: 596130 - RNA, 19 nt, Homo sapiens
  misc_RNA (1)...(19): siRNA sense strand
gcuuugagcauccgucaga

SEQ ID NO: 596131 - RNA, 19 nt, Homo sapiens
  misc_RNA (1)...(19): siRNA sense strand
gaagaacugcccgcauauc

SEQ ID NO: 596132 - RNA, 19 nt, Homo sapiens
  misc_RNA (1)...(19): siRNA sense strand
gaugaagaggugcugaaga

SEQ ID NO: 596133 - RNA, 19 nt, Homo sapiens
  misc_RNA (1)...(19): siRNA sense strand
ucuuugaccuucuggaugu

SEQ ID NO: 596134 - RNA, 19 nt, Homo sapiens
  misc_RNA (1)...(19): siRNA sense strand
gcuuggcuaucacauuugu

SEQ ID NO: 596135 - RNA, 19 nt, Homo sapiens
  misc_RNA (1)...(19): siRNA sense strand
gggugaacauugcuuuuaa

SEQ ID NO: 596136 - RNA, 19 nt, Homo sapiens
  misc_RNA (1)...(19): siRNA sense strand
guggugaucuuugugaagu

SEQ ID NO: 596137 - RNA, 19 nt, Homo sapiens
  misc_RNA (1)...(19): siRNA sense strand
ccaagucgggcaugggaaa

SEQ ID NO: 596138 - RNA, 19 nt, Homo sapiens
  misc_RNA (1)...(19): siRNA sense strand
gccgcaaguucaugcaaga

SEQ ID NO: 596139 - RNA, 19 nt, Homo sapiens
  misc_RNA (1)...(19): siRNA sense strand
auaagagccucaaccucaa

SEQ ID NO: 596140 - RNA, 19 nt, Homo sapiens
  misc_RNA (1)...(19): siRNA sense strand
uuucaacgacgaauucuug

SEQ ID NO: 596141 - RNA, 19 nt, Homo sapiens
  misc_RNA (1)...(19): siRNA sense strand
caucuccuccuacauugaa

SEQ ID NO: 596142 - RNA, 19 nt, Homo sapiens
  misc_RNA (1)...(19): siRNA sense strand
auagacaucuccuccuaca

SEQ ID NO: 596143 - RNA, 19 nt, Homo sapiens
  misc_RNA (1)...(19): siRNA sense strand
ggaauaugagcgcuucucu

SEQ ID NO: 596144 - RNA, 19 nt, Homo sapiens
  misc_RNA (1)...(19): siRNA sense strand
uaagagccucaaccucaaa

SEQ ID NO: 596145 - RNA, 19 nt, Homo sapiens
  misc_RNA (1)...(19): siRNA sense strand
gaucagcaaggaauaugag

SEQ ID NO: 596146 - RNA, 19 nt, Homo sapiens
  misc_RNA (1)...(19): siRNA sense strand
gcuccuaugucuccaucca

SEQ ID NO: 596147 - RNA, 19 nt, Homo sapiens
  misc_RNA (1)...(19): siRNA sense strand
gucgggauguccaggaaau

SEQ ID NO: 596148 - RNA, 19 nt, Homo sapiens
  misc_RNA (1)...(19): siRNA sense strand
ucuuguggcuaccaaccua

SEQ ID NO: 596149 - RNA, 19 nt, Homo sapiens
  misc_RNA (1)...(19): siRNA sense strand
aaugagcucuuggacuaug

SEQ ID NO: 596150 - RNA, 19 nt, Homo sapiens
  misc_RNA (1)...(19): siRNA sense strand
ggacuaugaagaugaugag

SEQ ID NO: 596151 - RNA, 19 nt, Homo sapiens
  misc_RNA (1)...(19): siRNA sense strand
cgagaagcaggucaugaug

SEQ ID NO: 596152 - RNA, 19 nt, Homo sapiens
  misc_RNA (1)...(19): siRNA sense strand
gcgucgggauguccaggaa

SEQ ID NO: 596153 - RNA, 19 nt, Homo sapiens
  misc_RNA (1)...(19): siRNA sense strand
cgggauguccaggaaauuu

SEQ ID NO: 596154 - RNA, 19 nt, Homo sapiens
  misc_RNA (1)...(19): siRNA sense strand
cauugucgacuguggcuuu

SEQ ID NO: 596155 - RNA, 19 nt, Homo sapiens
  misc_RNA (1)...(19): siRNA sense strand
acgugaaacugaaggacaa

SEQ ID NO: 596156 - RNA, 19 nt, Homo sapiens
  misc_RNA (1)...(19): siRNA sense strand
aguacuacgugaaacugaa

SEQ ID NO: 596157 - RNA, 19 nt, Homo sapiens
  misc_RNA (1)...(19): siRNA sense strand
guucaugcaagauccaaug

SEQ ID NO: 596158 - RNA, 19 nt, Homo sapiens
  misc_RNA (1)...(19): siRNA sense strand
uuacugggcaggugucugu

SEQ ID NO: 596159 - RNA, 19 nt, Homo sapiens
  misc_RNA (1)...(19): siRNA sense strand
ugaaugugauaagaugcuu

SEQ ID NO: 596160 - RNA, 19 nt, Homo sapiens
  misc_RNA (1)...(19): siRNA sense strand
augagcgcuucucuaaaua

SEQ ID NO: 596161 - RNA, 19 nt, Homo sapiens
  misc_RNA (1)...(19): siRNA sense strand
gaacgauguggacaaugag

SEQ ID NO: 596162 - RNA, 19 nt, Homo sapiens
  misc_RNA (1)...(19): siRNA sense strand
uuggaugaaugugauaaga

SEQ ID NO: 596163 - RNA, 19 nt, Homo sapiens
  misc_RNA (1)...(19): siRNA sense strand
caagauccucaaugaugug

SEQ ID NO: 596164 - RNA, 19 nt, Homo sapiens
  misc_RNA (1)...(19): siRNA sense strand
uggaugaugagacgaaguu

SEQ ID NO: 596165 - RNA, 19 nt, Homo sapiens
  misc_RNA (1)...(19): siRNA sense strand
cagagaacgauguggacaa

SEQ ID NO: 596166 - RNA, 19 nt, Homo sapiens
  misc_RNA (1)...(19): siRNA sense strand
ucagaucagcaaggaauau

SEQ ID NO: 596167 - RNA, 19 nt, Homo sapiens
  misc_RNA (1)...(19): siRNA sense strand
ggacaucgagcgggugaac

SEQ ID NO: 596168 - RNA, 19 nt, Homo sapiens
  misc_RNA (1)...(19): siRNA sense strand
gccgaggcauggacaucga

SEQ ID NO: 596169 - RNA, 19 nt, Homo sapiens
  misc_RNA (1)...(19): siRNA sense strand
ucagaaguccagcaugagu

SEQ ID NO: 596170 - RNA, 19 nt, Homo sapiens
  misc_RNA (1)...(19): siRNA sense strand
ggugaucuuugugaagucu

SEQ ID NO: 596171 - RNA, 19 nt, Homo sapiens
  misc_RNA (1)...(19): siRNA sense strand
gcucuuugaccuucuggau

SEQ ID NO: 596172 - RNA, 19 nt, Homo sapiens
  misc_RNA (1)...(19): siRNA sense strand
gaaggacaacgagaagaac

SEQ ID NO: 596173 - RNA, 19 nt, Homo sapiens
  misc_RNA (1)...(19): siRNA sense strand
cauccacagcucuggcuuu

SEQ ID NO: 596174 - RNA, 19 nt, Homo sapiens
  misc_RNA (1)...(19): siRNA sense strand
ggaugucaagggcuccuau

SEQ ID NO: 596175 - RNA, 19 nt, Homo sapiens
  misc_RNA (1)...(19): siRNA sense strand
gcucuggcuuucgugacuu

SEQ ID NO: 596176 - RNA, 19 nt, Homo sapiens
  misc_RNA (1)...(19): siRNA sense strand
cguccagucugccgcaagu

SEQ ID NO: 596177 - RNA, 19 nt, Homo sapiens
  misc_RNA (1)...(19): siRNA sense strand
agaagaacugcccgcauau

SEQ ID NO: 596178 - RNA, 19 nt, Homo sapiens
  misc_RNA (1)...(19): siRNA sense strand
acaaugagcucuuggacua

SEQ ID NO: 596179 - RNA, 19 nt, Homo sapiens
  misc_RNA (1)...(19): siRNA sense strand
gggcuuggcuaucacauuu

SEQ ID NO: 596180 - RNA, 19 nt, Homo sapiens
  misc_RNA (1)...(19): siRNA sense strand
aagaagaacugcccgcaua

SEQ ID NO: 596181 - RNA, 19 nt, Homo sapiens
  misc_RNA (1)...(19): siRNA sense strand
ggaugaaugugauaagaug

SEQ ID NO: 596182 - RNA, 19 nt, Homo sapiens
  misc_RNA (1)...(19): siRNA sense strand
uuagugagcugccugauga

SEQ ID NO: 596183 - RNA, 19 nt, Homo sapiens
  misc_RNA (1)...(19): siRNA sense strand
uaugagcgcuucucuaaau

SEQ ID NO: 596184 - RNA, 19 nt, Homo sapiens
  misc_RNA (1)...(19): siRNA sense strand
cgucagaaguccagcauga

SEQ ID NO: 596185 - RNA, 19 nt, Homo sapiens
  misc_RNA (1)...(19): siRNA sense strand
gaagaggugcugaagaaga

SEQ ID NO: 596186 - RNA, 19 nt, Homo sapiens
  misc_RNA (1)...(19): siRNA sense strand
agaacgauguggacaauga

SEQ ID NO: 596187 - RNA, 19 nt, Homo sapiens
  misc_RNA (1)...(19): siRNA sense strand
gugauaagaugcuugaaca

SEQ ID NO: 596188 - RNA, 19 nt, Homo sapiens
  misc_RNA (1)...(19): siRNA sense strand
ugagcugccugaugagaua

SEQ ID NO: 596189 - RNA, 19 nt, Homo sapiens
  misc_RNA (1)...(19): siRNA sense strand
gguaucagcaguuuaaaga

SEQ ID NO: 596190 - RNA, 19 nt, Homo sapiens
  misc_RNA (1)...(19): siRNA sense strand
gggaaagacagcaguguuu

SEQ ID NO: 596191 - RNA, 19 nt, Homo sapiens
  misc_RNA (1)...(19): siRNA sense strand
gcgcuucucuaaauacaug

SEQ ID NO: 596192 - RNA, 19 nt, Homo sapiens
  misc_RNA (1)...(19): siRNA sense strand
aauaugagcgcuucucuaa

SEQ ID NO: 596193 - RNA, 19 nt, Homo sapiens
  misc_RNA (1)...(19): siRNA sense strand
ccaagauccucaaugaugu

SEQ ID NO: 596194 - RNA, 19 nt, Homo sapiens
  misc_RNA (1)...(19): siRNA sense strand
agaagcaggucaugauguu

SEQ ID NO: 596195 - RNA, 19 nt, Homo sapiens
  misc_RNA (1)...(19): siRNA sense strand
gccaagauccucaaugaug

SEQ ID NO: 596196 - RNA, 19 nt, Homo sapiens
  misc_RNA (1)...(19): siRNA sense strand
agacaucuccuccuacauu

SEQ ID NO: 596197 - RNA, 19 nt, Homo sapiens
  misc_RNA (1)...(19): siRNA sense strand
augaagaggugcugaagaa

SEQ ID NO: 596198 - RNA, 19 nt, Homo sapiens
  misc_RNA (1)...(19): siRNA sense strand
aagaggugcugaagaagaa

SEQ ID NO: 596199 - RNA, 19 nt, Homo sapiens
  misc_RNA (1)...(19): siRNA sense strand
gaauaugagcgcuucucua

SEQ ID NO: 596200 - RNA, 19 nt, Homo sapiens
  misc_RNA (1)...(19): siRNA sense strand
gaaagacagcaguguuugu

SEQ ID NO: 596201 - RNA, 19 nt, Homo sapiens
  misc_RNA (1)...(19): siRNA sense strand
gucaugauguucagugcua

SEQ ID NO: 596202 - RNA, 19 nt, Homo sapiens
  misc_RNA (1)...(19): siRNA sense strand
ggaaagacagcaguguuug

SEQ ID NO: 596203 - RNA, 19 nt, Homo sapiens
  misc_RNA (1)...(19): siRNA sense strand
gaaauaagagccucaaccu

SEQ ID NO: 596204 - RNA, 19 nt, Homo sapiens
  misc_RNA (1)...(19): siRNA sense strand
gacaucuccuccuacauug

SEQ ID NO: 596205 - RNA, 19 nt, Homo sapiens
  misc_RNA (1)...(19): siRNA sense strand
ggaguuggcuuuucagauc

SEQ ID NO: 596206 - RNA, 19 nt, Homo sapiens
  misc_RNA (1)...(19): siRNA sense strand
gguggucugucuaucaaga

SEQ ID NO: 596207 - RNA, 19 nt, Homo sapiens
  misc_RNA (1)...(19): siRNA sense strand
gucaagggcuccuaugucu

SEQ ID NO: 596208 - RNA, 19 nt, Homo sapiens
  misc_RNA (1)...(19): siRNA sense strand
ccacagcucuggcuuucgu

SEQ ID NO: 596209 - RNA, 19 nt, Homo sapiens
  misc_RNA (1)...(19): siRNA sense strand
gagcgcuucucuaaauaca

SEQ ID NO: 596210 - RNA, 19 nt, Homo sapiens
  misc_RNA (1)...(19): siRNA sense strand
ugagaaugaugccaagauc

SEQ ID NO: 596211 - RNA, 19 nt, Homo sapiens
  misc_RNA (1)...(19): siRNA sense strand
gugcaucccucaggccauu

SEQ ID NO: 596212 - RNA, 19 nt, Homo sapiens
  misc_RNA (1)...(19): siRNA sense strand
ugacaugccugaggauucu

SEQ ID NO: 596213 - RNA, 19 nt, Homo sapiens
  misc_RNA (1)...(19): siRNA sense strand
ugaaggacaacgagaagaa

SEQ ID NO: 596214 - RNA, 19 nt, Homo sapiens
  misc_RNA (1)...(19): siRNA sense strand
gcagcaguacuacgugaaa

SEQ ID NO: 596215 - RNA, 19 nt, Homo sapiens
  misc_RNA (1)...(19): siRNA sense strand
aaagagauccguccagucu

SEQ ID NO: 596216 - RNA, 19 nt, Homo sapiens
  misc_RNA (1)...(19): siRNA sense strand
caaccucaaacacauuaaa

SEQ ID NO: 596217 - RNA, 19 nt, Homo sapiens
  misc_RNA (1)...(19): siRNA sense strand
gcagaacuucccagccauu

SEQ ID NO: 596218 - RNA, 19 nt, Homo sapiens
  misc_RNA (1)...(19): siRNA sense strand
augccaagauccucaauga

SEQ ID NO: 596219 - RNA, 19 nt, Homo sapiens
  misc_RNA (1)...(19): siRNA sense strand
gagaagcaggucaugaugu

SEQ ID NO: 596220 - RNA, 19 nt, Homo sapiens
  misc_RNA (1)...(19): siRNA sense strand
gaugaugagacgaaguuga

SEQ ID NO: 596221 - RNA, 19 nt, Homo sapiens
  misc_RNA (1)...(19): siRNA sense strand
agagaacgauguggacaau

SEQ ID NO: 596222 - RNA, 19 nt, Homo sapiens
  misc_RNA (1)...(19): siRNA sense strand
gaauucuuguggcuaccaa

SEQ ID NO: 596223 - RNA, 19 nt, Homo sapiens
  misc_RNA (1)...(19): siRNA sense strand
gcuuugagcauccgucaga

SEQ ID NO: 596224 - RNA, 19 nt, Homo sapiens
  misc_RNA (1)...(19): siRNA sense strand
gaagaacugcccgcauauc

SEQ ID NO: 596225 - RNA, 19 nt, Homo sapiens
  misc_RNA (1)...(19): siRNA sense strand
gaugaagaggugcugaaga

SEQ ID NO: 596226 - RNA, 19 nt, Homo sapiens
  misc_RNA (1)...(19): siRNA sense strand
ucuuugaccuucuggaugu

SEQ ID NO: 596227 - RNA, 19 nt, Homo sapiens
  misc_RNA (1)...(19): siRNA sense strand
gcuuggcuaucacauuugu

SEQ ID NO: 596228 - RNA, 19 nt, Homo sapiens
  misc_RNA (1)...(19): siRNA sense strand
gggugaacauugcuuuuaa

SEQ ID NO: 596229 - RNA, 19 nt, Homo sapiens
  misc_RNA (1)...(19): siRNA sense strand
guggugaucuuugugaagu

SEQ ID NO: 596230 - RNA, 19 nt, Homo sapiens
  misc_RNA (1)...(19): siRNA sense strand
ccaagucgggcaugggaaa

SEQ ID NO: 596231 - RNA, 19 nt, Homo sapiens
  misc_RNA (1)...(19): siRNA sense strand
gccgcaaguucaugcaaga

SEQ ID NO: 596232 - RNA, 19 nt, Homo sapiens
  misc_RNA (1)...(19): siRNA sense strand
auaagagccucaaccucaa

SEQ ID NO: 596233 - RNA, 19 nt, Homo sapiens
  misc_RNA (1)...(19): siRNA sense strand
uuucaacgacgaauucuug

SEQ ID NO: 596234 - RNA, 19 nt, Homo sapiens
  misc_RNA (1)...(19): siRNA sense strand
caucuccuccuacauugaa

SEQ ID NO: 596235 - RNA, 19 nt, Homo sapiens
  misc_RNA (1)...(19): siRNA sense strand
auagacaucuccuccuaca

SEQ ID NO: 596236 - RNA, 19 nt, Homo sapiens
  misc_RNA (1)...(19): siRNA sense strand
ggaauaugagcgcuucucu

SEQ ID NO: 596237 - RNA, 19 nt, Homo sapiens
  misc_RNA (1)...(19): siRNA sense strand
uaagagccucaaccucaaa

SEQ ID NO: 596238 - RNA, 19 nt, Homo sapiens
  misc_RNA (1)...(19): siRNA sense strand
gaucagcaaggaauaugag

SEQ ID NO: 596239 - RNA, 19 nt, Homo sapiens
  misc_RNA (1)...(19): siRNA sense strand
gcuccuaugucuccaucca

SEQ ID NO: 596240 - RNA, 19 nt, Homo sapiens
  misc_RNA (1)...(19): siRNA sense strand
gucgggauguccaggaaau

SEQ ID NO: 596241 - RNA, 19 nt, Homo sapiens
  misc_RNA (1)...(19): siRNA sense strand
ucuuguggcuaccaaccua

SEQ ID NO: 596242 - RNA, 19 nt, Homo sapiens
  misc_RNA (1)...(19): siRNA sense strand
aaugagcucuuggacuaug

SEQ ID NO: 596243 - RNA, 19 nt, Homo sapiens
  misc_RNA (1)...(19): siRNA sense strand
ggacuaugaagaugaugag

SEQ ID NO: 596244 - RNA, 19 nt, Homo sapiens
  misc_RNA (1)...(19): siRNA sense strand
cgagaagcaggucaugaug

SEQ ID NO: 596245 - RNA, 19 nt, Homo sapiens
  misc_RNA (1)...(19): siRNA sense strand
gcgucgggauguccaggaa

SEQ ID NO: 596246 - RNA, 19 nt, Homo sapiens
  misc_RNA (1)...(19): siRNA sense strand
cgggauguccaggaaauuu

SEQ ID NO: 596247 - RNA, 19 nt, Homo sapiens
  misc_RNA (1)...(19): siRNA sense strand
cauugucgacuguggcuuu

SEQ ID NO: 596248 - RNA, 19 nt, Homo sapiens
  misc_RNA (1)...(19): siRNA sense strand
acgugaaacugaaggacaa

SEQ ID NO: 596249 - RNA, 19 nt, Homo sapiens
  misc_RNA (1)...(19): siRNA sense strand
aguacuacgugaaacugaa

SEQ ID NO: 596250 - RNA, 19 nt, Homo sapiens
  misc_RNA (1)...(19): siRNA sense strand
guucaugcaagauccaaug

SEQ ID NO: 596251 - RNA, 19 nt, Homo sapiens
  misc_RNA (1)...(19): siRNA sense strand
uuacugggcaggugucugu

SEQ ID NO: 596252 - RNA, 19 nt, Homo sapiens
  misc_RNA (1)...(19): siRNA sense strand
ugaaugugauaagaugcuu

SEQ ID NO: 596253 - RNA, 19 nt, Homo sapiens
  misc_RNA (1)...(19): siRNA sense strand
augagcgcuucucuaaaua

SEQ ID NO: 596254 - RNA, 19 nt, Homo sapiens
  misc_RNA (1)...(19): siRNA sense strand
gaacgauguggacaaugag

SEQ ID NO: 596255 - RNA, 19 nt, Homo sapiens
  misc_RNA (1)...(19): siRNA sense strand
uuggaugaaugugauaaga

SEQ ID NO: 596256 - RNA, 19 nt, Homo sapiens
  misc_RNA (1)...(19): siRNA sense strand
caagauccucaaugaugug

SEQ ID NO: 596257 - RNA, 19 nt, Homo sapiens
  misc_RNA (1)...(19): siRNA sense strand
uggaugaugagacgaaguu

SEQ ID NO: 596258 - RNA, 19 nt, Homo sapiens
  misc_RNA (1)...(19): siRNA sense strand
cagagaacgauguggacaa

SEQ ID NO: 596259 - RNA, 19 nt, Homo sapiens
  misc_RNA (1)...(19): siRNA sense strand
ucagaucagcaaggaauau

SEQ ID NO: 596260 - RNA, 19 nt, Homo sapiens
  misc_RNA (1)...(19): siRNA sense strand
ggacaucgagcgggugaac

SEQ ID NO: 596261 - RNA, 19 nt, Homo sapiens
  misc_RNA (1)...(19): siRNA sense strand
gccgaggcauggacaucga

SEQ ID NO: 596262 - RNA, 19 nt, Homo sapiens
  misc_RNA (1)...(19): siRNA sense strand
ucagaaguccagcaugagu

SEQ ID NO: 596263 - RNA, 19 nt, Homo sapiens
  misc_RNA (1)...(19): siRNA sense strand
ggugaucuuugugaagucu

SEQ ID NO: 596264 - RNA, 19 nt, Homo sapiens
  misc_RNA (1)...(19): siRNA sense strand
gcucuuugaccuucuggau

SEQ ID NO: 596265 - RNA, 19 nt, Homo sapiens
  misc_RNA (1)...(19): siRNA sense strand
gaaggacaacgagaagaac

SEQ ID NO: 596266 - RNA, 19 nt, Homo sapiens
  misc_RNA (1)...(19): siRNA sense strand
cauccacagcucuggcuuu

SEQ ID NO: 596267 - RNA, 19 nt, Homo sapiens
  misc_RNA (1)...(19): siRNA sense strand
ggaugucaagggcuccuau

SEQ ID NO: 596268 - RNA, 19 nt, Homo sapiens
  misc_RNA (1)...(19): siRNA sense strand
gcucuggcuuucgugacuu

SEQ ID NO: 596269 - RNA, 19 nt, Homo sapiens
  misc_RNA (1)...(19): siRNA sense strand
cguccagucugccgcaagu

SEQ ID NO: 596270 - RNA, 19 nt, Homo sapiens
  misc_RNA (1)...(19): siRNA sense strand
agaagaacugcccgcauau

SEQ ID NO: 596271 - RNA, 19 nt, Homo sapiens
  misc_RNA (1)...(19): siRNA sense strand
agaaauggcugauaguuua

SEQ ID NO: 596272 - RNA, 19 nt, Homo sapiens
  misc_RNA (1)...(19): siRNA sense strand
ugaaagaacuggaagaauu

SEQ ID NO: 596273 - RNA, 19 nt, Homo sapiens
  misc_RNA (1)...(19): siRNA sense strand
ggaaggagauacaaucauu

SEQ ID NO: 596274 - RNA, 19 nt, Homo sapiens
  misc_RNA (1)...(19): siRNA sense strand
caucaaagcugacagagaa

SEQ ID NO: 596275 - RNA, 19 nt, Homo sapiens
  misc_RNA (1)...(19): siRNA sense strand
ggaauuaugugcugcugua

SEQ ID NO: 596276 - RNA, 19 nt, Homo sapiens
  misc_RNA (1)...(19): siRNA sense strand
caaagaagaggccaauuua

SEQ ID NO: 596277 - RNA, 19 nt, Homo sapiens
  misc_RNA (1)...(19): siRNA sense strand
agaaagggcuuaugacaaa

SEQ ID NO: 596278 - RNA, 19 nt, Homo sapiens
  misc_RNA (1)...(19): siRNA sense strand
uaaagagcguucaagaaua

SEQ ID NO: 596279 - RNA, 19 nt, Homo sapiens
  misc_RNA (1)...(19): siRNA sense strand
ugaaaucccuguucuuaaa

SEQ ID NO: 596280 - RNA, 19 nt, Homo sapiens
  misc_RNA (1)...(19): siRNA sense strand
gaacagacuaagaugauua

SEQ ID NO: 596281 - RNA, 19 nt, Homo sapiens
  misc_RNA (1)...(19): siRNA sense strand
gcgaagaauuggaagauaa

SEQ ID NO: 596282 - RNA, 19 nt, Homo sapiens
  misc_RNA (1)...(19): siRNA sense strand
aaagagcguucaagaauaa

SEQ ID NO: 596283 - RNA, 19 nt, Homo sapiens
  misc_RNA (1)...(19): siRNA sense strand
gaacaaggaguaccagaaa

SEQ ID NO: 596284 - RNA, 19 nt, Homo sapiens
  misc_RNA (1)...(19): siRNA sense strand
gcugauaguuuaggaguua

SEQ ID NO: 596285 - RNA, 19 nt, Homo sapiens
  misc_RNA (1)...(19): siRNA sense strand
gaugaaaucccuguucuua

SEQ ID NO: 596286 - RNA, 19 nt, Homo sapiens
  misc_RNA (1)...(19): siRNA sense strand
gaaacacaguucauauaga

SEQ ID NO: 596287 - RNA, 19 nt, Homo sapiens
  misc_RNA (1)...(19): siRNA sense strand
guaaagaagugucugaauc

SEQ ID NO: 596288 - RNA, 19 nt, Homo sapiens
  misc_RNA (1)...(19): siRNA sense strand
ggaagaagaagaugaagaa

SEQ ID NO: 596289 - RNA, 19 nt, Homo sapiens
  misc_RNA (1)...(19): siRNA sense strand
aaaggaaucucaaaggaaa

SEQ ID NO: 596290 - RNA, 19 nt, Homo sapiens
  misc_RNA (1)...(19): siRNA sense strand
guaccuaccucugcacaua

SEQ ID NO: 596291 - RNA, 19 nt, Homo sapiens
  misc_RNA (1)...(19): siRNA sense strand
gaaggaaacacaguucaua

SEQ ID NO: 596292 - RNA, 19 nt, Homo sapiens
  misc_RNA (1)...(19): siRNA sense strand
guauuucccugcaagauaa

SEQ ID NO: 596293 - RNA, 19 nt, Homo sapiens
  misc_RNA (1)...(19): siRNA sense strand
ggaagaagaggaagaagaa

SEQ ID NO: 596294 - RNA, 19 nt, Homo sapiens
  misc_RNA (1)...(19): siRNA sense strand
gaaagaacuggaagaauug

SEQ ID NO: 596295 - RNA, 19 nt, Homo sapiens
  misc_RNA (1)...(19): siRNA sense strand
gaacaugacccucaguaug

SEQ ID NO: 596296 - RNA, 19 nt, Homo sapiens
  misc_RNA (1)...(19): siRNA sense strand
gaauaugacucugaugaug

SEQ ID NO: 596297 - RNA, 19 nt, Homo sapiens
  misc_RNA (1)...(19): siRNA sense strand
caagccagguccuaacaua

SEQ ID NO: 596298 - RNA, 19 nt, Homo sapiens
  misc_RNA (1)...(19): siRNA sense strand
guaaagaaaugagcucaga

SEQ ID NO: 596299 - RNA, 19 nt, Homo sapiens
  misc_RNA (1)...(19): siRNA sense strand
gagcaaaggcuauuauugu

SEQ ID NO: 596300 - RNA, 19 nt, Homo sapiens
  misc_RNA (1)...(19): siRNA sense strand
ugauguggcugcuacuuua

SEQ ID NO: 596301 - RNA, 19 nt, Homo sapiens
  misc_RNA (1)...(19): siRNA sense strand
gaaaagaccuggagaaaac

SEQ ID NO: 596302 - RNA, 19 nt, Homo sapiens
  misc_RNA (1)...(19): siRNA sense strand
ggaagcaggucaggugaaa

SEQ ID NO: 596303 - RNA, 19 nt, Homo sapiens
  misc_RNA (1)...(19): siRNA sense strand
gaauucaccucaaaagaua

SEQ ID NO: 596304 - RNA, 19 nt, Homo sapiens
  misc_RNA (1)...(19): siRNA sense strand
ugaacgagaugcacaagaa

SEQ ID NO: 596305 - RNA, 19 nt, Homo sapiens
  misc_RNA (1)...(19): siRNA sense strand
ccaaagaagaggccaauuu

SEQ ID NO: 596306 - RNA, 19 nt, Homo sapiens
  misc_RNA (1)...(19): siRNA sense strand
gaagaggaagaacguauaa

SEQ ID NO: 596307 - RNA, 19 nt, Homo sapiens
  misc_RNA (1)...(19): siRNA sense strand
gcaagaagcucuggcuaag

SEQ ID NO: 596308 - RNA, 19 nt, Homo sapiens
  misc_RNA (1)...(19): siRNA sense strand
gacacuaaaugcuaucaaa

SEQ ID NO: 596309 - RNA, 19 nt, Homo sapiens
  misc_RNA (1)...(19): siRNA sense strand
caaaggcuauuauuguaga

SEQ ID NO: 596310 - RNA, 19 nt, Homo sapiens
  misc_RNA (1)...(19): siRNA sense strand
agaagaagaugaagaaagu

SEQ ID NO: 596311 - RNA, 19 nt, Homo sapiens
  misc_RNA (1)...(19): siRNA sense strand
gaagagagaagaggaagaa

SEQ ID NO: 596312 - RNA, 19 nt, Homo sapiens
  misc_RNA (1)...(19): siRNA sense strand
gaagaaagggcuuaugaca

SEQ ID NO: 596313 - RNA, 19 nt, Homo sapiens
  misc_RNA (1)...(19): siRNA sense strand
ugccuuggcugcagaaaua

SEQ ID NO: 596314 - RNA, 19 nt, Homo sapiens
  misc_RNA (1)...(19): siRNA sense strand
gagaugaaaugcagaagag

SEQ ID NO: 596315 - RNA, 19 nt, Homo sapiens
  misc_RNA (1)...(19): siRNA sense strand
guagaagggcccauuguaa

SEQ ID NO: 596316 - RNA, 19 nt, Homo sapiens
  misc_RNA (1)...(19): siRNA sense strand
ggacuuugaugaagaugau

SEQ ID NO: 596317 - RNA, 19 nt, Homo sapiens
  misc_RNA (1)...(19): siRNA sense strand
gggaagcuauggccaguga

SEQ ID NO: 596318 - RNA, 19 nt, Homo sapiens
  misc_RNA (1)...(19): siRNA sense strand
cacagcagcuagaaaguaa

SEQ ID NO: 596319 - RNA, 19 nt, Homo sapiens
  misc_RNA (1)...(19): siRNA sense strand
uaaagaagaggaacgauug

SEQ ID NO: 596320 - RNA, 19 nt, Homo sapiens
  misc_RNA (1)...(19): siRNA sense strand
aagagugacuggcagcuua

SEQ ID NO: 596321 - RNA, 19 nt, Homo sapiens
  misc_RNA (1)...(19): siRNA sense strand
cuacagauauucuuguuag

SEQ ID NO: 596322 - RNA, 19 nt, Homo sapiens
  misc_RNA (1)...(19): siRNA sense strand
gcagugaagccaacagaaa

SEQ ID NO: 596323 - RNA, 19 nt, Homo sapiens
  misc_RNA (1)...(19): siRNA sense strand
ggaaacacaguucauauag

SEQ ID NO: 596324 - RNA, 19 nt, Homo sapiens
  misc_RNA (1)...(19): siRNA sense strand
caaagugacuguugauacu

SEQ ID NO: 596325 - RNA, 19 nt, Homo sapiens
  misc_RNA (1)...(19): siRNA sense strand
agaagugucugaaucaaug

SEQ ID NO: 596326 - RNA, 19 nt, Homo sapiens
  misc_RNA (1)...(19): siRNA sense strand
caggaaugcuaauuauuga

SEQ ID NO: 596327 - RNA, 19 nt, Homo sapiens
  misc_RNA (1)...(19): siRNA sense strand
aagaugauauccugaaaga

SEQ ID NO: 596328 - RNA, 19 nt, Homo sapiens
  misc_RNA (1)...(19): siRNA sense strand
caucuacacuggguucuuu

SEQ ID NO: 596329 - RNA, 19 nt, Homo sapiens
  misc_RNA (1)...(19): siRNA sense strand
gcuagaaaguaaagaagug

SEQ ID NO: 596330 - RNA, 19 nt, Homo sapiens
  misc_RNA (1)...(19): siRNA sense strand
gcaccaaggaugacauuga

SEQ ID NO: 596331 - RNA, 19 nt, Homo sapiens
  misc_RNA (1)...(19): siRNA sense strand
ggaugaggauaacaguaaa

SEQ ID NO: 596332 - RNA, 19 nt, Homo sapiens
  misc_RNA (1)...(19): siRNA sense strand
gaaggaaggagauacaauc

SEQ ID NO: 596333 - RNA, 19 nt, Homo sapiens
  misc_RNA (1)...(19): siRNA sense strand
ccaggaaugcuaauuauug

SEQ ID NO: 596334 - RNA, 19 nt, Homo sapiens
  misc_RNA (1)...(19): siRNA sense strand
gaagaggccaauuuaugaa

SEQ ID NO: 596335 - RNA, 19 nt, Homo sapiens
  misc_RNA (1)...(19): siRNA sense strand
gaagaagaaagacagaaga

SEQ ID NO: 596336 - RNA, 19 nt, Homo sapiens
  misc_RNA (1)...(19): siRNA sense strand
ccaccaauguuccucuuga

SEQ ID NO: 596337 - RNA, 19 nt, Homo sapiens
  misc_RNA (1)...(19): siRNA sense strand
gaaacagaaacaagaagaa

SEQ ID NO: 596338 - RNA, 19 nt, Homo sapiens
  misc_RNA (1)...(19): siRNA sense strand
gcacaagaaauggcugaua

SEQ ID NO: 596339 - RNA, 19 nt, Homo sapiens
  misc_RNA (1)...(19): siRNA sense strand
ggagugaugaugaugauga

SEQ ID NO: 596340 - RNA, 19 nt, Homo sapiens
  misc_RNA (1)...(19): siRNA sense strand
gaagugcccuaugcaggaa

SEQ ID NO: 596341 - RNA, 19 nt, Homo sapiens
  misc_RNA (1)...(19): siRNA sense strand
guaaagaagaggaacgauu

SEQ ID NO: 596342 - RNA, 19 nt, Homo sapiens
  misc_RNA (1)...(19): siRNA sense strand
ugaagaaagugaagaagag

SEQ ID NO: 596343 - RNA, 19 nt, Homo sapiens
  misc_RNA (1)...(19): siRNA sense strand
gaauugauccaugaguuaa

SEQ ID NO: 596344 - RNA, 19 nt, Homo sapiens
  misc_RNA (1)...(19): siRNA sense strand
gugaagaaccaguaugaaa

SEQ ID NO: 596345 - RNA, 19 nt, Homo sapiens
  misc_RNA (1)...(19): siRNA sense strand
ccuauuaucugcguacuug

SEQ ID NO: 596346 - RNA, 19 nt, Homo sapiens
  misc_RNA (1)...(19): siRNA sense strand
uuaaagagcguucaagaau

SEQ ID NO: 596347 - RNA, 19 nt, Homo sapiens
  misc_RNA (1)...(19): siRNA sense strand
cacaagaaauggcugauag

SEQ ID NO: 596348 - RNA, 19 nt, Homo sapiens
  misc_RNA (1)...(19): siRNA sense strand
ugaauugauccaugaguua

SEQ ID NO: 596349 - RNA, 19 nt, Homo sapiens
  misc_RNA (1)...(19): siRNA sense strand
gaagaugaaaucccuguuc

SEQ ID NO: 596350 - RNA, 19 nt, Homo sapiens
  misc_RNA (1)...(19): siRNA sense strand
gauucgaggccuccuguua

SEQ ID NO: 596351 - RNA, 19 nt, Homo sapiens
  misc_RNA (1)...(19): siRNA sense strand
uaaagaagugucugaauca

SEQ ID NO: 596352 - RNA, 19 nt, Homo sapiens
  misc_RNA (1)...(19): siRNA sense strand
agaagaggccaauuuauga

SEQ ID NO: 596353 - RNA, 19 nt, Homo sapiens
  misc_RNA (1)...(19): siRNA sense strand
uaaagaggaagaagaaaga

SEQ ID NO: 596354 - RNA, 19 nt, Homo sapiens
  misc_RNA (1)...(19): siRNA sense strand
gcaggacuuugaugaagau

SEQ ID NO: 596355 - RNA, 19 nt, Homo sapiens
  misc_RNA (1)...(19): siRNA sense strand
caagaaacagaaacaagaa

SEQ ID NO: 596356 - RNA, 19 nt, Homo sapiens
  misc_RNA (1)...(19): siRNA sense strand
gaacgagaugcacaagaaa

SEQ ID NO: 596357 - RNA, 19 nt, Homo sapiens
  misc_RNA (1)...(19): siRNA sense strand
ccuuguggcuuauaaagaa

SEQ ID NO: 596358 - RNA, 19 nt, Homo sapiens
  misc_RNA (1)...(19): siRNA sense strand
ggaacaaggaguaccagaa

SEQ ID NO: 596359 - RNA, 19 nt, Homo sapiens
  misc_RNA (1)...(19): siRNA sense strand
gaugauauccugaaagaac

SEQ ID NO: 596360 - RNA, 19 nt, Homo sapiens
  misc_RNA (1)...(19): siRNA sense strand
gcacaggugauggagguua

SEQ ID NO: 596361 - RNA, 19 nt, Homo sapiens
  misc_RNA (1)...(19): siRNA sense strand
agcaaaggcuauuauugua

SEQ ID NO: 596362 - RNA, 19 nt, Homo sapiens
  misc_RNA (1)...(19): siRNA sense strand
ugaagaugauauccugaaa

SEQ ID NO: 596363 - RNA, 19 nt, Homo sapiens
  misc_RNA (1)...(19): siRNA sense strand
gguaucacacaacaaauuu

SEQ ID NO: 596364 - RNA, 19 nt, Homo sapiens
  misc_RNA (1)...(19): siRNA sense strand
cagaggaggaugaggauaa

SEQ ID NO: 596365 - RNA, 19 nt, Homo sapiens
  misc_RNA (1)...(19): siRNA sense strand
caucagaagugcccuaugc

SEQ ID NO: 596366 - RNA, 19 nt, Homo sapiens
  misc_RNA (1)...(19): siRNA sense strand
aagaugaauugauccauga

SEQ ID NO: 596367 - RNA, 19 nt, Homo sapiens
  misc_RNA (1)...(19): siRNA sense strand
gagugaagaaccaguauga

SEQ ID NO: 596368 - RNA, 19 nt, Homo sapiens
  misc_RNA (1)...(19): siRNA sense strand
ucaaccuucucaaaucuaa

SEQ ID NO: 596369 - RNA, 19 nt, Homo sapiens
  misc_RNA (1)...(19): siRNA sense strand
gaagggaaacuuuuaacua

SEQ ID NO: 596370 - RNA, 19 nt, Homo sapiens
  misc_RNA (1)...(19): siRNA sense strand
gcauaaagaaguagaagca

SEQ ID NO: 596371 - RNA, 19 nt, Homo sapiens
  misc_RNA (1)...(19): siRNA sense strand
ggaaggagcucaguaaugu

SEQ ID NO: 596372 - RNA, 19 nt, Homo sapiens
  misc_RNA (1)...(19): siRNA sense strand
gaaggcagaucgcuuguuc

SEQ ID NO: 596373 - RNA, 19 nt, Homo sapiens
  misc_RNA (1)...(19): siRNA sense strand
gaagaccuaugccaucuau

SEQ ID NO: 596374 - RNA, 19 nt, Homo sapiens
  misc_RNA (1)...(19): siRNA sense strand
ggacguagccgccacauuc

SEQ ID NO: 596375 - RNA, 19 nt, Homo sapiens
  misc_RNA (1)...(19): siRNA sense strand
cagcugaucuccaaguauu

SEQ ID NO: 596376 - RNA, 19 nt, Homo sapiens
  misc_RNA (1)...(19): siRNA sense strand
gaacaaaccaaguuacauc

SEQ ID NO: 596377 - RNA, 19 nt, Homo sapiens
  misc_RNA (1)...(19): siRNA sense strand
ucacugauguggauaaauc

SEQ ID NO: 596378 - RNA, 19 nt, Homo sapiens
  misc_RNA (1)...(19): siRNA sense strand
gaaggagugucccauuaca

SEQ ID NO: 596379 - RNA, 19 nt, Homo sapiens
  misc_RNA (1)...(19): siRNA sense strand
gugcauauccgcccuguuu

SEQ ID NO: 596380 - RNA, 19 nt, Homo sapiens
  misc_RNA (1)...(19): siRNA sense strand
caaguuacauccacuacca

SEQ ID NO: 596381 - RNA, 19 nt, Homo sapiens
  misc_RNA (1)...(19): siRNA sense strand
aaccauggcuucuauguca

SEQ ID NO: 596382 - RNA, 19 nt, Homo sapiens
  misc_RNA (1)...(19): siRNA sense strand
ccaaugacacugaccacua

SEQ ID NO: 596383 - RNA, 19 nt, Homo sapiens
  misc_RNA (1)...(19): siRNA sense strand
ugauggcucuaacuacuuu

SEQ ID NO: 596384 - RNA, 19 nt, Homo sapiens
  misc_RNA (1)...(19): siRNA sense strand
gcacacugcuguacaacac

SEQ ID NO: 596385 - RNA, 19 nt, Homo sapiens
  misc_RNA (1)...(19): siRNA sense strand
gagcugcaccugucauuca

SEQ ID NO: 596386 - RNA, 19 nt, Homo sapiens
  misc_RNA (1)...(19): siRNA sense strand
gcucaguaauguccucuca

SEQ ID NO: 596387 - RNA, 19 nt, Homo sapiens
  misc_RNA (1)...(19): siRNA sense strand
caaugacacugaccacuac

SEQ ID NO: 596388 - RNA, 19 nt, Homo sapiens
  misc_RNA (1)...(19): siRNA sense strand
gagaacaaaccaaguuaca

SEQ ID NO: 596389 - RNA, 19 nt, Homo sapiens
  misc_RNA (1)...(19): siRNA sense strand
guacaacacccacccauac

SEQ ID NO: 596390 - RNA, 19 nt, Homo sapiens
  misc_RNA (1)...(19): siRNA sense strand
gaaaugcacgcuguacuag

SEQ ID NO: 596391 - RNA, 19 nt, Homo sapiens
  misc_RNA (1)...(19): siRNA sense strand
gacccugucaguuguauuu

SEQ ID NO: 596392 - RNA, 19 nt, Homo sapiens
  misc_RNA (1)...(19): siRNA sense strand
agaaaugcacgcuguacua

SEQ ID NO: 596393 - RNA, 19 nt, Homo sapiens
  misc_RNA (1)...(19): siRNA sense strand
ggcagcugaucuccaagua

SEQ ID NO: 596394 - RNA, 19 nt, Homo sapiens
  misc_RNA (1)...(19): siRNA sense strand
caagguuuccauccaguuu

SEQ ID NO: 596395 - RNA, 19 nt, Homo sapiens
  misc_RNA (1)...(19): siRNA sense strand
ugacacugaccacuacuuu

SEQ ID NO: 596396 - RNA, 19 nt, Homo sapiens
  misc_RNA (1)...(19): siRNA sense strand
agaccuaugccaucuauga

SEQ ID NO: 596397 - RNA, 19 nt, Homo sapiens
  misc_RNA (1)...(19): siRNA sense strand
ggacaacgagacauuagag

SEQ ID NO: 596398 - RNA, 19 nt, Homo sapiens
  misc_RNA (1)...(19): siRNA sense strand
ggacaucaccaccuacaac

SEQ ID NO: 596399 - RNA, 19 nt, Homo sapiens
  misc_RNA (1)...(19): siRNA sense strand
gggaggaacuugucaucac

SEQ ID NO: 596400 - RNA, 19 nt, Homo sapiens
  misc_RNA (1)...(19): siRNA sense strand
ggaaggagugucccauuac

SEQ ID NO: 596401 - RNA, 19 nt, Homo sapiens
  misc_RNA (1)...(19): siRNA sense strand
ccaggacaacgagacauua

SEQ ID NO: 596402 - RNA, 19 nt, Homo sapiens
  misc_RNA (1)...(19): siRNA sense strand
gcaccugucauucacacaa

SEQ ID NO: 596403 - RNA, 19 nt, Homo sapiens
  misc_RNA (1)...(19): siRNA sense strand
ggcagacccugucaguugu

SEQ ID NO: 596404 - RNA, 19 nt, Homo sapiens
  misc_RNA (1)...(19): siRNA sense strand
ggaagaccuaugccaucua

SEQ ID NO: 596405 - RNA, 19 nt, Homo sapiens
  misc_RNA (1)...(19): siRNA sense strand
aggcagacccugucaguug

SEQ ID NO: 596406 - RNA, 19 nt, Homo sapiens
  misc_RNA (1)...(19): siRNA sense strand
ucaccaagguuuccaucca

SEQ ID NO: 596407 - RNA, 19 nt, Homo sapiens
  misc_RNA (1)...(19): siRNA sense strand
gaucaacaacucucgaaac

SEQ ID NO: 596408 - RNA, 19 nt, Homo sapiens
  misc_RNA (1)...(19): siRNA sense strand
ucagagagccgagucuaug

SEQ ID NO: 596409 - RNA, 19 nt, Homo sapiens
  misc_RNA (1)...(19): siRNA sense strand
ccugguaucugcggcugua

SEQ ID NO: 596410 - RNA, 19 nt, Homo sapiens
  misc_RNA (1)...(19): siRNA sense strand
caacucagucaccaagguu

SEQ ID NO: 596411 - RNA, 19 nt, Homo sapiens
  misc_RNA (1)...(19): siRNA sense strand
gugcacacccucaccauca

SEQ ID NO: 596412 - RNA, 19 nt, Homo sapiens
  misc_RNA (1)...(19): siRNA sense strand
ccuaugccaucuaugacuu

SEQ ID NO: 596413 - RNA, 19 nt, Homo sapiens
  misc_RNA (1)...(19): siRNA sense strand
gcgccucucucaacuucau

SEQ ID NO: 596414 - RNA, 19 nt, Homo sapiens
  misc_RNA (1)...(19): siRNA sense strand
cuacggcuccuucuacaau

SEQ ID NO: 596415 - RNA, 19 nt, Homo sapiens
  misc_RNA (1)...(19): siRNA sense strand
ccaacucagucaccaaggu

SEQ ID NO: 596416 - RNA, 19 nt, Homo sapiens
  misc_RNA (1)...(19): siRNA sense strand
acaccgccaugaucaacaa

SEQ ID NO: 596417 - RNA, 19 nt, Homo sapiens
  misc_RNA (1)...(19): siRNA sense strand
gcagacccugucaguugua

SEQ ID NO: 596418 - RNA, 19 nt, Homo sapiens
  misc_RNA (1)...(19): siRNA sense strand
gcgcugggauucggagcuu

SEQ ID NO: 596419 - RNA, 19 nt, Homo sapiens
  misc_RNA (1)...(19): siRNA sense strand
ccacuacuuucugcgcuau

SEQ ID NO: 596420 - RNA, 19 nt, Homo sapiens
  misc_RNA (1)...(19): siRNA sense strand
ggagaacaaaccaaguuac

SEQ ID NO: 596421 - RNA, 19 nt, Homo sapiens
  misc_RNA (1)...(19): siRNA sense strand
gcagcugaucuccaaguau

SEQ ID NO: 596422 - RNA, 19 nt, Homo sapiens
  misc_RNA (1)...(19): siRNA sense strand
ucugauggcucuaacuacu

SEQ ID NO: 596423 - RNA, 19 nt, Homo sapiens
  misc_RNA (1)...(19): siRNA sense strand
aaggagaacaaaccaaguu

SEQ ID NO: 596424 - RNA, 19 nt, Homo sapiens
  misc_RNA (1)...(19): siRNA sense strand
cggaagaccuaugccaucu

SEQ ID NO: 596425 - RNA, 19 nt, Homo sapiens
  misc_RNA (1)...(19): siRNA sense strand
aaugcacgcuguacuagca

SEQ ID NO: 596426 - RNA, 19 nt, Homo sapiens
  misc_RNA (1)...(19): siRNA sense strand
gaucuccaaguauucucua

SEQ ID NO: 596427 - RNA, 19 nt, Homo sapiens
  misc_RNA (1)...(19): siRNA sense strand
ucucugauggcucuaacua

SEQ ID NO: 596428 - RNA, 19 nt, Homo sapiens
  misc_RNA (1)...(19): siRNA sense strand
aggagaacaaaccaaguua

SEQ ID NO: 596429 - RNA, 19 nt, Homo sapiens
  misc_RNA (1)...(19): siRNA sense strand
uggaaggagcucaguaaug

SEQ ID NO: 596430 - RNA, 19 nt, Homo sapiens
  misc_RNA (1)...(19): siRNA sense strand
gcacucggaagaccuaugc

SEQ ID NO: 596431 - RNA, 19 nt, Homo sapiens
  misc_RNA (1)...(19): siRNA sense strand
acacugaccacuacuuucu

SEQ ID NO: 596432 - RNA, 19 nt, Homo sapiens
  misc_RNA (1)...(19): siRNA sense strand
cccugggucuggccaauga

SEQ ID NO: 596433 - RNA, 19 nt, Homo sapiens
  misc_RNA (1)...(19): siRNA sense strand
gcagaaaugcacgcuguac

SEQ ID NO: 596434 - RNA, 19 nt, Homo sapiens
  misc_RNA (1)...(19): siRNA sense strand
gucauucacacaaggcuuu

SEQ ID NO: 596435 - RNA, 19 nt, Homo sapiens
  misc_RNA (1)...(19): siRNA sense strand
ccaagggcaaggagaacaa

SEQ ID NO: 596436 - RNA, 19 nt, Homo sapiens
  misc_RNA (1)...(19): siRNA sense strand
ugccaucuaugacuugcuu

SEQ ID NO: 596437 - RNA, 19 nt, Homo sapiens
  misc_RNA (1)...(19): siRNA sense strand
cuacauaucaggacgucau

SEQ ID NO: 596438 - RNA, 19 nt, Homo sapiens
  misc_RNA (1)...(19): siRNA sense strand
ccugucaguuguauuugau

SEQ ID NO: 596439 - RNA, 19 nt, Homo sapiens
  misc_RNA (1)...(19): siRNA sense strand
ugucacugauguggauaaa

SEQ ID NO: 596440 - RNA, 19 nt, Homo sapiens
  misc_RNA (1)...(19): siRNA sense strand
gguaucugcggcuguaugu

SEQ ID NO: 596441 - RNA, 19 nt, Homo sapiens
  misc_RNA (1)...(19): siRNA sense strand
cuuggaaggagcucaguaa

SEQ ID NO: 596442 - RNA, 19 nt, Homo sapiens
  misc_RNA (1)...(19): siRNA sense strand
caaccaggacaacgagaca

SEQ ID NO: 596443 - RNA, 19 nt, Homo sapiens
  misc_RNA (1)...(19): siRNA sense strand
uguacaacacccacccaua

SEQ ID NO: 596444 - RNA, 19 nt, Homo sapiens
  misc_RNA (1)...(19): siRNA sense strand
gggagcugcaccugucauu

SEQ ID NO: 596445 - RNA, 19 nt, Homo sapiens
  misc_RNA (1)...(19): siRNA sense strand
cugcgccucucucaacuuc

SEQ ID NO: 596446 - RNA, 19 nt, Homo sapiens
  misc_RNA (1)...(19): siRNA sense strand
caagggcaaggagaacaaa

SEQ ID NO: 596447 - RNA, 19 nt, Homo sapiens
  misc_RNA (1)...(19): siRNA sense strand
uuacaggcucuuucccaaa

SEQ ID NO: 596448 - RNA, 19 nt, Homo sapiens
  misc_RNA (1)...(19): siRNA sense strand
cccugucaguuguauuuga

SEQ ID NO: 596449 - RNA, 19 nt, Homo sapiens
  misc_RNA (1)...(19): siRNA sense strand
uccuggagaugcugauuca

SEQ ID NO: 596450 - RNA, 19 nt, Homo sapiens
  misc_RNA (1)...(19): siRNA sense strand
caaggagaacaaaccaagu

SEQ ID NO: 596451 - RNA, 19 nt, Homo sapiens
  misc_RNA (1)...(19): siRNA sense strand
cagagagccgagucuaugu

SEQ ID NO: 596452 - RNA, 19 nt, Homo sapiens
  misc_RNA (1)...(19): siRNA sense strand
gaacaacccuccagucaug

SEQ ID NO: 596453 - RNA, 19 nt, Homo sapiens
  misc_RNA (1)...(19): siRNA sense strand
gggaagaucugcacuguga

SEQ ID NO: 596454 - RNA, 19 nt, Homo sapiens
  misc_RNA (1)...(19): siRNA sense strand
gaagggaaauggucaagga

SEQ ID NO: 596455 - RNA, 19 nt, Homo sapiens
  misc_RNA (1)...(19): siRNA sense strand
gcaaucuugugccauauuu

SEQ ID NO: 596456 - RNA, 19 nt, Homo sapiens
  misc_RNA (1)...(19): siRNA sense strand
ggaaaagucugcaaucuug

SEQ ID NO: 596457 - RNA, 19 nt, Homo sapiens
  misc_RNA (1)...(19): siRNA sense strand
ucagggaccuuuccuauuc

SEQ ID NO: 596458 - RNA, 19 nt, Homo sapiens
  misc_RNA (1)...(19): siRNA sense strand
gggcagcugugaacauuga

SEQ ID NO: 596459 - RNA, 19 nt, Homo sapiens
  misc_RNA (1)...(19): siRNA sense strand
gagggcagcugugaacauu

SEQ ID NO: 596460 - RNA, 19 nt, Homo sapiens
  misc_RNA (1)...(19): siRNA sense strand
gggaacaccugaacuacug

SEQ ID NO: 596461 - RNA, 19 nt, Homo sapiens
  misc_RNA (1)...(19): siRNA sense strand
ggaaauggucaaggagaua

SEQ ID NO: 596462 - RNA, 19 nt, Homo sapiens
  misc_RNA (1)...(19): siRNA sense strand
agacggaccugcugaaugg

SEQ ID NO: 596463 - RNA, 19 nt, Homo sapiens
  misc_RNA (1)...(19): siRNA sense strand
gaugaaggcagaagggaaa

SEQ ID NO: 596464 - RNA, 19 nt, Homo sapiens
  misc_RNA (1)...(19): siRNA sense strand
gaagguguccugcuacauc

SEQ ID NO: 596465 - RNA, 19 nt, Homo sapiens
  misc_RNA (1)...(19): siRNA sense strand
cagguggucucgcugauga

SEQ ID NO: 596466 - RNA, 19 nt, Homo sapiens
  misc_RNA (1)...(19): siRNA sense strand
guaccuggacuucaucgua

SEQ ID NO: 596467 - RNA, 19 nt, Homo sapiens
  misc_RNA (1)...(19): siRNA sense strand
gcgcugggcuugcugucuu

SEQ ID NO: 596468 - RNA, 19 nt, Homo sapiens
  misc_RNA (1)...(19): siRNA sense strand
gacgugcccuuucagauca

SEQ ID NO: 596469 - RNA, 19 nt, Homo sapiens
  misc_RNA (1)...(19): siRNA sense strand
ggaaguccacgcugaugaa

SEQ ID NO: 596470 - RNA, 19 nt, Homo sapiens
  misc_RNA (1)...(19): siRNA sense strand
gggaaauggucaaggagau

SEQ ID NO: 596471 - RNA, 19 nt, Homo sapiens
  misc_RNA (1)...(19): siRNA sense strand
ucugcaaucuugugccaua

SEQ ID NO: 596472 - RNA, 19 nt, Homo sapiens
  misc_RNA (1)...(19): siRNA sense strand
ccuauuugguccucaggua

SEQ ID NO: 596473 - RNA, 19 nt, Homo sapiens
  misc_RNA (1)...(19): siRNA sense strand
gauacaagacccuccugaa

SEQ ID NO: 596474 - RNA, 19 nt, Homo sapiens
  misc_RNA (1)...(19): siRNA sense strand
ggagaugggagucuuucuu

SEQ ID NO: 596475 - RNA, 19 nt, Homo sapiens
  misc_RNA (1)...(19): siRNA sense strand
gagaugggagucuuucuuc

SEQ ID NO: 596476 - RNA, 19 nt, Homo sapiens
  misc_RNA (1)...(19): siRNA sense strand
auacaagacccuccugaaa

SEQ ID NO: 596477 - RNA, 19 nt, Homo sapiens
  misc_RNA (1)...(19): siRNA sense strand
gaagaucugcacugugaca

SEQ ID NO: 596478 - RNA, 19 nt, Homo sapiens
  misc_RNA (1)...(19): siRNA sense strand
ggaacgaaaccaagaaggu

SEQ ID NO: 596479 - RNA, 19 nt, Homo sapiens
  misc_RNA (1)...(19): siRNA sense strand
gggaucggccuccucauug

SEQ ID NO: 596480 - RNA, 19 nt, Homo sapiens
  misc_RNA (1)...(19): siRNA sense strand
ggucugaacugcccaaccu

SEQ ID NO: 596481 - RNA, 19 nt, Homo sapiens
  misc_RNA (1)...(19): siRNA sense strand
acaagacccuccugaaagg

SEQ ID NO: 596482 - RNA, 19 nt, Homo sapiens
  misc_RNA (1)...(19): siRNA sense strand
ucauuggccugcuguacuu

SEQ ID NO: 596483 - RNA, 19 nt, Homo sapiens
  misc_RNA (1)...(19): siRNA sense strand
gaggugaacccuuuucuuu

SEQ ID NO: 596484 - RNA, 19 nt, Homo sapiens
  misc_RNA (1)...(19): siRNA sense strand
ggacccugguggaggaaga

SEQ ID NO: 596485 - RNA, 19 nt, Homo sapiens
  misc_RNA (1)...(19): siRNA sense strand
cgcaucaccucgcacauug

SEQ ID NO: 596486 - RNA, 19 nt, Homo sapiens
  misc_RNA (1)...(19): siRNA sense strand
ugacucagaccacaagaga

SEQ ID NO: 596487 - RNA, 19 nt, Homo sapiens
  misc_RNA (1)...(19): siRNA sense strand
ccaugaaugccagcaguua

SEQ ID NO: 596488 - RNA, 19 nt, Homo sapiens
  misc_RNA (1)...(19): siRNA sense strand
gcgcaucaccucgcacauu

SEQ ID NO: 596489 - RNA, 19 nt, Homo sapiens
  misc_RNA (1)...(19): siRNA sense strand
gaggugguguccagcaaca

SEQ ID NO: 596490 - RNA, 19 nt, Homo sapiens
  misc_RNA (1)...(19): siRNA sense strand
gugaacaacccuccaguca

SEQ ID NO: 596491 - RNA, 19 nt, Homo sapiens
  misc_RNA (1)...(19): siRNA sense strand
caacuccggcuuccucuuc

SEQ ID NO: 596492 - RNA, 19 nt, Homo sapiens
  misc_RNA (1)...(19): siRNA sense strand
gguggaggaagaaaggaua

SEQ ID NO: 596493 - RNA, 19 nt, Homo sapiens
  misc_RNA (1)...(19): siRNA sense strand
gcagacgugcccuuucaga

SEQ ID NO: 596494 - RNA, 19 nt, Homo sapiens
  misc_RNA (1)...(19): siRNA sense strand
gagacggaccugcugaaug

SEQ ID NO: 596495 - RNA, 19 nt, Homo sapiens
  misc_RNA (1)...(19): siRNA sense strand
cgaguacggugaucagaac

SEQ ID NO: 596496 - RNA, 19 nt, Homo sapiens
  misc_RNA (1)...(19): siRNA sense strand
gaugaaagggcucgcucaa

SEQ ID NO: 596497 - RNA, 19 nt, Homo sapiens
  misc_RNA (1)...(19): siRNA sense strand
caucuccuaugucagguau

SEQ ID NO: 596498 - RNA, 19 nt, Homo sapiens
  misc_RNA (1)...(19): siRNA sense strand
ggucauccucuccaucuau

SEQ ID NO: 596499 - RNA, 19 nt, Homo sapiens
  misc_RNA (1)...(19): siRNA sense strand
ugccauauuugagggauuu

SEQ ID NO: 596500 - RNA, 19 nt, Homo sapiens
  misc_RNA (1)...(19): siRNA sense strand
ggaucggccuccucauugg

SEQ ID NO: 596501 - RNA, 19 nt, Homo sapiens
  misc_RNA (1)...(19): siRNA sense strand
gggaaguccacgcugauga

SEQ ID NO: 596502 - RNA, 19 nt, Homo sapiens
  misc_RNA (1)...(19): siRNA sense strand
gcgaguacggugaucagaa

SEQ ID NO: 596503 - RNA, 19 nt, Homo sapiens
  misc_RNA (1)...(19): siRNA sense strand
cgcuggagcuggugaacaa

SEQ ID NO: 596504 - RNA, 19 nt, Homo sapiens
  misc_RNA (1)...(19): siRNA sense strand
ggaggaagaaaggauacaa

SEQ ID NO: 596505 - RNA, 19 nt, Homo sapiens
  misc_RNA (1)...(19): siRNA sense strand
guacggugaucagaacagu

SEQ ID NO: 596506 - RNA, 19 nt, Homo sapiens
  misc_RNA (1)...(19): siRNA sense strand
gcccagcgccaaacucuuc

SEQ ID NO: 596507 - RNA, 19 nt, Homo sapiens
  misc_RNA (1)...(19): siRNA sense strand
gcugaauggacaucugaaa

SEQ ID NO: 596508 - RNA, 19 nt, Homo sapiens
  misc_RNA (1)...(19): siRNA sense strand
caccugaacuacugguaca

SEQ ID NO: 596509 - RNA, 19 nt, Homo sapiens
  misc_RNA (1)...(19): siRNA sense strand
ggucggcaccgccaugaau

SEQ ID NO: 596510 - RNA, 19 nt, Homo sapiens
  misc_RNA (1)...(19): siRNA sense strand
gaaggcagaagggaaaugg

SEQ ID NO: 596511 - RNA, 19 nt, Homo sapiens
  misc_RNA (1)...(19): siRNA sense strand
gcaacauggaggccacuga

SEQ ID NO: 596512 - RNA, 19 nt, Homo sapiens
  misc_RNA (1)...(19): siRNA sense strand
gaaauggucaaggagauac

SEQ ID NO: 596513 - RNA, 19 nt, Homo sapiens
  misc_RNA (1)...(19): siRNA sense strand
cgacgagacgugccacuuc

SEQ ID NO: 596514 - RNA, 19 nt, Homo sapiens
  misc_RNA (1)...(19): siRNA sense strand
ggaagaaaggauacaagac

SEQ ID NO: 596515 - RNA, 19 nt, Homo sapiens
  misc_RNA (1)...(19): siRNA sense strand
ugccuacuguucugacauu

SEQ ID NO: 596516 - RNA, 19 nt, Homo sapiens
  misc_RNA (1)...(19): siRNA sense strand
ccucaugccuacuguucug

SEQ ID NO: 596517 - RNA, 19 nt, Homo sapiens
  misc_RNA (1)...(19): siRNA sense strand
aaucuugugccauauuuga

SEQ ID NO: 596518 - RNA, 19 nt, Homo sapiens
  misc_RNA (1)...(19): siRNA sense strand
uccggaagguguccugcua

SEQ ID NO: 596519 - RNA, 19 nt, Homo sapiens
  misc_RNA (1)...(19): siRNA sense strand
uacaagacccuccugaaag

SEQ ID NO: 596520 - RNA, 19 nt, Homo sapiens
  misc_RNA (1)...(19): siRNA sense strand
gaacagucggcuggugaga

SEQ ID NO: 596521 - RNA, 19 nt, Homo sapiens
  misc_RNA (1)...(19): siRNA sense strand
ccacaacccagcagauuuu

SEQ ID NO: 596522 - RNA, 19 nt, Homo sapiens
  misc_RNA (1)...(19): siRNA sense strand
gcagaagggaaauggucaa

SEQ ID NO: 596523 - RNA, 19 nt, Homo sapiens
  misc_RNA (1)...(19): siRNA sense strand
ugacagcgcugggcuugcu

SEQ ID NO: 596524 - RNA, 19 nt, Homo sapiens
  misc_RNA (1)...(19): siRNA sense strand
gcagcaucguguacuggau

SEQ ID NO: 596525 - RNA, 19 nt, Homo sapiens
  misc_RNA (1)...(19): siRNA sense strand
acucagaccacaagagaga

SEQ ID NO: 596526 - RNA, 19 nt, Homo sapiens
  misc_RNA (1)...(19): siRNA sense strand
cagcugugaacauugaauu

SEQ ID NO: 596527 - RNA, 19 nt, Homo sapiens
  misc_RNA (1)...(19): siRNA sense strand
ggagggcagcugugaacau

SEQ ID NO: 596528 - RNA, 19 nt, Homo sapiens
  misc_RNA (1)...(19): siRNA sense strand
augccgaggugaacccuuu

SEQ ID NO: 596529 - RNA, 19 nt, Homo sapiens
  misc_RNA (1)...(19): siRNA sense strand
ccaaacucuucgagcuguu

SEQ ID NO: 596530 - RNA, 19 nt, Homo sapiens
  misc_RNA (1)...(19): siRNA sense strand
ccgggaagaucugcacugu

SEQ ID NO: 596531 - RNA, 19 nt, Homo sapiens
  misc_RNA (1)...(19): siRNA sense strand
gucauccucuccaucuaug

SEQ ID NO: 596532 - RNA, 19 nt, Homo sapiens
  misc_RNA (1)...(19): siRNA sense strand
ugucagguauggguucgaa

SEQ ID NO: 596533 - RNA, 19 nt, Homo sapiens
  misc_RNA (1)...(19): siRNA sense strand
gaggaagaaaggauacaag

SEQ ID NO: 596534 - RNA, 19 nt, Homo sapiens
  misc_RNA (1)...(19): siRNA sense strand
ccuacuaccuggccaagac

SEQ ID NO: 596535 - RNA, 19 nt, Homo sapiens
  misc_RNA (1)...(19): siRNA sense strand
cggaagguguccugcuaca

SEQ ID NO: 596536 - RNA, 19 nt, Homo sapiens
  misc_RNA (1)...(19): siRNA sense strand
agacgugcccuuucagauc

SEQ ID NO: 596537 - RNA, 19 nt, Homo sapiens
  misc_RNA (1)...(19): siRNA sense strand
ggaccuuccucagcaucau

SEQ ID NO: 596538 - RNA, 19 nt, Homo sapiens
  misc_RNA (1)...(19): siRNA sense strand
aguccacgcugaugaacau

SEQ ID NO: 596539 - RNA, 19 nt, Homo sapiens
  misc_RNA (1)...(19): siRNA sense strand
agacgugccacuuccagaa

SEQ ID NO: 596540 - RNA, 19 nt, Homo sapiens
  misc_RNA (1)...(19): siRNA sense strand
gggucauccucuccaucua

SEQ ID NO: 596541 - RNA, 19 nt, Homo sapiens
  misc_RNA (1)...(19): siRNA sense strand
ggugaacccuuuucuuugg

SEQ ID NO: 596542 - RNA, 19 nt, Homo sapiens
  misc_RNA (1)...(19): siRNA sense strand
ucaaggacaauguguguac

SEQ ID NO: 596543 - RNA, 19 nt, Homo sapiens
  misc_RNA (1)...(19): siRNA sense strand
aagguguccugcuacauca

SEQ ID NO: 596544 - RNA, 19 nt, Homo sapiens
  misc_RNA (1)...(19): siRNA sense strand
uccgggaaguucaauagug

SEQ ID NO: 596545 - RNA, 19 nt, Homo sapiens
  misc_RNA (1)...(19): siRNA sense strand
cccugcagguggccacuuu

SEQ ID NO: 596546 - RNA, 19 nt, Homo sapiens
  misc_RNA (1)...(19): siRNA sense strand
aggaagaaaggauacaaga

SEQ ID NO: 596547 - RNA, 19 nt, Homo sapiens
  misc_RNA (1)...(19): siRNA sense strand
ugagggauuugggucugaa

SEQ ID NO: 596548 - RNA, 19 nt, Homo sapiens
  misc_RNA (1)...(19): siRNA sense strand
ccgccucauugccuauuug

SEQ ID NO: 596549 - RNA, 19 nt, Homo sapiens
  misc_RNA (1)...(19): siRNA sense strand
gcuuagaccgggaagaucu

SEQ ID NO: 596550 - RNA, 19 nt, Homo sapiens
  misc_RNA (1)...(19): siRNA sense strand
cagcagauuuugucaugga

SEQ ID NO: 596551 - RNA, 19 nt, Homo sapiens
  misc_RNA (1)...(19): siRNA sense strand
ggugguguccagcaacaug

SEQ ID NO: 596552 - RNA, 19 nt, Homo sapiens
  misc_RNA (1)...(19): siRNA sense strand
gaacaacccuccagucaug

SEQ ID NO: 596553 - RNA, 19 nt, Homo sapiens
  misc_RNA (1)...(19): siRNA sense strand
gggaagaucugcacuguga

SEQ ID NO: 596554 - RNA, 19 nt, Homo sapiens
  misc_RNA (1)...(19): siRNA sense strand
gaagggaaauggucaagga

SEQ ID NO: 596555 - RNA, 19 nt, Homo sapiens
  misc_RNA (1)...(19): siRNA sense strand
gcaaucuugugccauauuu

SEQ ID NO: 596556 - RNA, 19 nt, Homo sapiens
  misc_RNA (1)...(19): siRNA sense strand
ggaaaagucugcaaucuug

SEQ ID NO: 596557 - RNA, 19 nt, Homo sapiens
  misc_RNA (1)...(19): siRNA sense strand
ucagggaccuuuccuauuc

SEQ ID NO: 596558 - RNA, 19 nt, Homo sapiens
  misc_RNA (1)...(19): siRNA sense strand
gggcagcugugaacauuga

SEQ ID NO: 596559 - RNA, 19 nt, Homo sapiens
  misc_RNA (1)...(19): siRNA sense strand
gagggcagcugugaacauu

SEQ ID NO: 596560 - RNA, 19 nt, Homo sapiens
  misc_RNA (1)...(19): siRNA sense strand
gggaacaccugaacuacug

SEQ ID NO: 596561 - RNA, 19 nt, Homo sapiens
  misc_RNA (1)...(19): siRNA sense strand
ggaaauggucaaggagaua

SEQ ID NO: 596562 - RNA, 19 nt, Homo sapiens
  misc_RNA (1)...(19): siRNA sense strand
agacggaccugcugaaugg

SEQ ID NO: 596563 - RNA, 19 nt, Homo sapiens
  misc_RNA (1)...(19): siRNA sense strand
gaugaaggcagaagggaaa

SEQ ID NO: 596564 - RNA, 19 nt, Homo sapiens
  misc_RNA (1)...(19): siRNA sense strand
gaagguguccugcuacauc

SEQ ID NO: 596565 - RNA, 19 nt, Homo sapiens
  misc_RNA (1)...(19): siRNA sense strand
cagguggucucgcugauga

SEQ ID NO: 596566 - RNA, 19 nt, Homo sapiens
  misc_RNA (1)...(19): siRNA sense strand
guaccuggacuucaucgua

SEQ ID NO: 596567 - RNA, 19 nt, Homo sapiens
  misc_RNA (1)...(19): siRNA sense strand
gcgcugggcuugcugucuu

SEQ ID NO: 596568 - RNA, 19 nt, Homo sapiens
  misc_RNA (1)...(19): siRNA sense strand
gacgugcccuuucagauca

SEQ ID NO: 596569 - RNA, 19 nt, Homo sapiens
  misc_RNA (1)...(19): siRNA sense strand
ggaaguccacgcugaugaa

SEQ ID NO: 596570 - RNA, 19 nt, Homo sapiens
  misc_RNA (1)...(19): siRNA sense strand
gggaaauggucaaggagau

SEQ ID NO: 596571 - RNA, 19 nt, Homo sapiens
  misc_RNA (1)...(19): siRNA sense strand
ucugcaaucuugugccaua

SEQ ID NO: 596572 - RNA, 19 nt, Homo sapiens
  misc_RNA (1)...(19): siRNA sense strand
ccuauuugguccucaggua

SEQ ID NO: 596573 - RNA, 19 nt, Homo sapiens
  misc_RNA (1)...(19): siRNA sense strand
gauacaagacccuccugaa

SEQ ID NO: 596574 - RNA, 19 nt, Homo sapiens
  misc_RNA (1)...(19): siRNA sense strand
ggagaugggagucuuucuu

SEQ ID NO: 596575 - RNA, 19 nt, Homo sapiens
  misc_RNA (1)...(19): siRNA sense strand
gagaugggagucuuucuuc

SEQ ID NO: 596576 - RNA, 19 nt, Homo sapiens
  misc_RNA (1)...(19): siRNA sense strand
auacaagacccuccugaaa

SEQ ID NO: 596577 - RNA, 19 nt, Homo sapiens
  misc_RNA (1)...(19): siRNA sense strand
gaagaucugcacugugaca

SEQ ID NO: 596578 - RNA, 19 nt, Homo sapiens
  misc_RNA (1)...(19): siRNA sense strand
ggaacgaaaccaagaaggu

SEQ ID NO: 596579 - RNA, 19 nt, Homo sapiens
  misc_RNA (1)...(19): siRNA sense strand
gggaucggccuccucauug

SEQ ID NO: 596580 - RNA, 19 nt, Homo sapiens
  misc_RNA (1)...(19): siRNA sense strand
ggucugaacugcccaaccu

SEQ ID NO: 596581 - RNA, 19 nt, Homo sapiens
  misc_RNA (1)...(19): siRNA sense strand
acaagacccuccugaaagg

SEQ ID NO: 596582 - RNA, 19 nt, Homo sapiens
  misc_RNA (1)...(19): siRNA sense strand
ucauuggccugcuguacuu

SEQ ID NO: 596583 - RNA, 19 nt, Homo sapiens
  misc_RNA (1)...(19): siRNA sense strand
gaggugaacccuuuucuuu

SEQ ID NO: 596584 - RNA, 19 nt, Homo sapiens
  misc_RNA (1)...(19): siRNA sense strand
ggacccugguggaggaaga

SEQ ID NO: 596585 - RNA, 19 nt, Homo sapiens
  misc_RNA (1)...(19): siRNA sense strand
cgcaucaccucgcacauug

SEQ ID NO: 596586 - RNA, 19 nt, Homo sapiens
  misc_RNA (1)...(19): siRNA sense strand
ugacucagaccacaagaga

SEQ ID NO: 596587 - RNA, 19 nt, Homo sapiens
  misc_RNA (1)...(19): siRNA sense strand
ccaugaaugccagcaguua

SEQ ID NO: 596588 - RNA, 19 nt, Homo sapiens
  misc_RNA (1)...(19): siRNA sense strand
gcgcaucaccucgcacauu

SEQ ID NO: 596589 - RNA, 19 nt, Homo sapiens
  misc_RNA (1)...(19): siRNA sense strand
gaggugguguccagcaaca

SEQ ID NO: 596590 - RNA, 19 nt, Homo sapiens
  misc_RNA (1)...(19): siRNA sense strand
gugaacaacccuccaguca

SEQ ID NO: 596591 - RNA, 19 nt, Homo sapiens
  misc_RNA (1)...(19): siRNA sense strand
caacuccggcuuccucuuc

SEQ ID NO: 596592 - RNA, 19 nt, Homo sapiens
  misc_RNA (1)...(19): siRNA sense strand
gguggaggaagaaaggaua

SEQ ID NO: 596593 - RNA, 19 nt, Homo sapiens
  misc_RNA (1)...(19): siRNA sense strand
gcagacgugcccuuucaga

SEQ ID NO: 596594 - RNA, 19 nt, Homo sapiens
  misc_RNA (1)...(19): siRNA sense strand
gagacggaccugcugaaug

SEQ ID NO: 596595 - RNA, 19 nt, Homo sapiens
  misc_RNA (1)...(19): siRNA sense strand
cgaguacggugaucagaac

SEQ ID NO: 596596 - RNA, 19 nt, Homo sapiens
  misc_RNA (1)...(19): siRNA sense strand
gaugaaagggcucgcucaa

SEQ ID NO: 596597 - RNA, 19 nt, Homo sapiens
  misc_RNA (1)...(19): siRNA sense strand
caucuccuaugucagguau

SEQ ID NO: 596598 - RNA, 19 nt, Homo sapiens
  misc_RNA (1)...(19): siRNA sense strand
ggucauccucuccaucuau

SEQ ID NO: 596599 - RNA, 19 nt, Homo sapiens
  misc_RNA (1)...(19): siRNA sense strand
ugccauauuugagggauuu

SEQ ID NO: 596600 - RNA, 19 nt, Homo sapiens
  misc_RNA (1)...(19): siRNA sense strand
ggaucggccuccucauugg

SEQ ID NO: 596601 - RNA, 19 nt, Homo sapiens
  misc_RNA (1)...(19): siRNA sense strand
gggaaguccacgcugauga

SEQ ID NO: 596602 - RNA, 19 nt, Homo sapiens
  misc_RNA (1)...(19): siRNA sense strand
gcgaguacggugaucagaa

SEQ ID NO: 596603 - RNA, 19 nt, Homo sapiens
  misc_RNA (1)...(19): siRNA sense strand
cgcuggagcuggugaacaa

SEQ ID NO: 596604 - RNA, 19 nt, Homo sapiens
  misc_RNA (1)...(19): siRNA sense strand
ggaggaagaaaggauacaa

SEQ ID NO: 596605 - RNA, 19 nt, Homo sapiens
  misc_RNA (1)...(19): siRNA sense strand
guacggugaucagaacagu

SEQ ID NO: 596606 - RNA, 19 nt, Homo sapiens
  misc_RNA (1)...(19): siRNA sense strand
gcccagcgccaaacucuuc

SEQ ID NO: 596607 - RNA, 19 nt, Homo sapiens
  misc_RNA (1)...(19): siRNA sense strand
gcugaauggacaucugaaa

SEQ ID NO: 596608 - RNA, 19 nt, Homo sapiens
  misc_RNA (1)...(19): siRNA sense strand
caccugaacuacugguaca

SEQ ID NO: 596609 - RNA, 19 nt, Homo sapiens
  misc_RNA (1)...(19): siRNA sense strand
ggucggcaccgccaugaau

SEQ ID NO: 596610 - RNA, 19 nt, Homo sapiens
  misc_RNA (1)...(19): siRNA sense strand
gaaggcagaagggaaaugg

SEQ ID NO: 596611 - RNA, 19 nt, Homo sapiens
  misc_RNA (1)...(19): siRNA sense strand
gcaacauggaggccacuga

SEQ ID NO: 596612 - RNA, 19 nt, Homo sapiens
  misc_RNA (1)...(19): siRNA sense strand
gaaauggucaaggagauac

SEQ ID NO: 596613 - RNA, 19 nt, Homo sapiens
  misc_RNA (1)...(19): siRNA sense strand
cgacgagacgugccacuuc

SEQ ID NO: 596614 - RNA, 19 nt, Homo sapiens
  misc_RNA (1)...(19): siRNA sense strand
ggaagaaaggauacaagac

SEQ ID NO: 596615 - RNA, 19 nt, Homo sapiens
  misc_RNA (1)...(19): siRNA sense strand
ugccuacuguucugacauu

SEQ ID NO: 596616 - RNA, 19 nt, Homo sapiens
  misc_RNA (1)...(19): siRNA sense strand
ccucaugccuacuguucug

SEQ ID NO: 596617 - RNA, 19 nt, Homo sapiens
  misc_RNA (1)...(19): siRNA sense strand
aaucuugugccauauuuga

SEQ ID NO: 596618 - RNA, 19 nt, Homo sapiens
  misc_RNA (1)...(19): siRNA sense strand
uccggaagguguccugcua

SEQ ID NO: 596619 - RNA, 19 nt, Homo sapiens
  misc_RNA (1)...(19): siRNA sense strand
uacaagacccuccugaaag

SEQ ID NO: 596620 - RNA, 19 nt, Homo sapiens
  misc_RNA (1)...(19): siRNA sense strand
gaacagucggcuggugaga

SEQ ID NO: 596621 - RNA, 19 nt, Homo sapiens
  misc_RNA (1)...(19): siRNA sense strand
ccacaacccagcagauuuu

SEQ ID NO: 596622 - RNA, 19 nt, Homo sapiens
  misc_RNA (1)...(19): siRNA sense strand
gcagaagggaaauggucaa

SEQ ID NO: 596623 - RNA, 19 nt, Homo sapiens
  misc_RNA (1)...(19): siRNA sense strand
ugacagcgcugggcuugcu

SEQ ID NO: 596624 - RNA, 19 nt, Homo sapiens
  misc_RNA (1)...(19): siRNA sense strand
gcagcaucguguacuggau

SEQ ID NO: 596625 - RNA, 19 nt, Homo sapiens
  misc_RNA (1)...(19): siRNA sense strand
acucagaccacaagagaga

SEQ ID NO: 596626 - RNA, 19 nt, Homo sapiens
  misc_RNA (1)...(19): siRNA sense strand
cagcugugaacauugaauu

SEQ ID NO: 596627 - RNA, 19 nt, Homo sapiens
  misc_RNA (1)...(19): siRNA sense strand
ggagggcagcugugaacau

SEQ ID NO: 596628 - RNA, 19 nt, Homo sapiens
  misc_RNA (1)...(19): siRNA sense strand
augccgaggugaacccuuu

SEQ ID NO: 596629 - RNA, 19 nt, Homo sapiens
  misc_RNA (1)...(19): siRNA sense strand
ccaaacucuucgagcuguu

SEQ ID NO: 596630 - RNA, 19 nt, Homo sapiens
  misc_RNA (1)...(19): siRNA sense strand
ccgggaagaucugcacugu

SEQ ID NO: 596631 - RNA, 19 nt, Homo sapiens
  misc_RNA (1)...(19): siRNA sense strand
gucauccucuccaucuaug

SEQ ID NO: 596632 - RNA, 19 nt, Homo sapiens
  misc_RNA (1)...(19): siRNA sense strand
ugucagguauggguucgaa

SEQ ID NO: 596633 - RNA, 19 nt, Homo sapiens
  misc_RNA (1)...(19): siRNA sense strand
gaggaagaaaggauacaag

SEQ ID NO: 596634 - RNA, 19 nt, Homo sapiens
  misc_RNA (1)...(19): siRNA sense strand
ccuacuaccuggccaagac

SEQ ID NO: 596635 - RNA, 19 nt, Homo sapiens
  misc_RNA (1)...(19): siRNA sense strand
cggaagguguccugcuaca

SEQ ID NO: 596636 - RNA, 19 nt, Homo sapiens
  misc_RNA (1)...(19): siRNA sense strand
agacgugcccuuucagauc

SEQ ID NO: 596637 - RNA, 19 nt, Homo sapiens
  misc_RNA (1)...(19): siRNA sense strand
ggaccuuccucagcaucau

SEQ ID NO: 596638 - RNA, 19 nt, Homo sapiens
  misc_RNA (1)...(19): siRNA sense strand
aguccacgcugaugaacau

SEQ ID NO: 596639 - RNA, 19 nt, Homo sapiens
  misc_RNA (1)...(19): siRNA sense strand
agacgugccacuuccagaa

SEQ ID NO: 596640 - RNA, 19 nt, Homo sapiens
  misc_RNA (1)...(19): siRNA sense strand
gggucauccucuccaucua

SEQ ID NO: 596641 - RNA, 19 nt, Homo sapiens
  misc_RNA (1)...(19): siRNA sense strand
ggugaacccuuuucuuugg

SEQ ID NO: 596642 - RNA, 19 nt, Homo sapiens
  misc_RNA (1)...(19): siRNA sense strand
ucaaggacaauguguguac

SEQ ID NO: 596643 - RNA, 19 nt, Homo sapiens
  misc_RNA (1)...(19): siRNA sense strand
aagguguccugcuacauca

SEQ ID NO: 596644 - RNA, 19 nt, Homo sapiens
  misc_RNA (1)...(19): siRNA sense strand
uccgggaaguucaauagug

SEQ ID NO: 596645 - RNA, 19 nt, Homo sapiens
  misc_RNA (1)...(19): siRNA sense strand
cccugcagguggccacuuu

SEQ ID NO: 596646 - RNA, 19 nt, Homo sapiens
  misc_RNA (1)...(19): siRNA sense strand
aggaagaaaggauacaaga

SEQ ID NO: 596647 - RNA, 19 nt, Homo sapiens
  misc_RNA (1)...(19): siRNA sense strand
ugagggauuugggucugaa

SEQ ID NO: 596648 - RNA, 19 nt, Homo sapiens
  misc_RNA (1)...(19): siRNA sense strand
ccgccucauugccuauuug

SEQ ID NO: 596649 - RNA, 19 nt, Homo sapiens
  misc_RNA (1)...(19): siRNA sense strand
gcuuagaccgggaagaucu

SEQ ID NO: 596650 - RNA, 19 nt, Homo sapiens
  misc_RNA (1)...(19): siRNA sense strand
cagcagauuuugucaugga

SEQ ID NO: 596651 - RNA, 19 nt, Homo sapiens
  misc_RNA (1)...(19): siRNA sense strand
ggugguguccagcaacaug

SEQ ID NO: 596652 - RNA, 19 nt, Homo sapiens
  misc_RNA (1)...(19): siRNA sense strand
cuacaucccucuucucuua

SEQ ID NO: 596653 - RNA, 19 nt, Homo sapiens
  misc_RNA (1)...(19): siRNA sense strand
gaacagagagucaagcaaa

SEQ ID NO: 596654 - RNA, 19 nt, Homo sapiens
  misc_RNA (1)...(19): siRNA sense strand
cguaaugccucuaauguaa

SEQ ID NO: 596655 - RNA, 19 nt, Homo sapiens
  misc_RNA (1)...(19): siRNA sense strand
ugaggaagcuggagaauuc

SEQ ID NO: 596656 - RNA, 19 nt, Homo sapiens
  misc_RNA (1)...(19): siRNA sense strand
uuacauaccuuuaguggaa

SEQ ID NO: 596657 - RNA, 19 nt, Homo sapiens
  misc_RNA (1)...(19): siRNA sense strand
gaagcaagauggaacuguu

SEQ ID NO: 596658 - RNA, 19 nt, Homo sapiens
  misc_RNA (1)...(19): siRNA sense strand
gacaaaggcauuuccaaua

SEQ ID NO: 596659 - RNA, 19 nt, Homo sapiens
  misc_RNA (1)...(19): siRNA sense strand
ggagucagcuguacuagca

SEQ ID NO: 596660 - RNA, 19 nt, Homo sapiens
  misc_RNA (1)...(19): siRNA sense strand
ggaguuugccaaugaauuu

SEQ ID NO: 596661 - RNA, 19 nt, Homo sapiens
  misc_RNA (1)...(19): siRNA sense strand
ggaggaugauuugggaaua

SEQ ID NO: 596662 - RNA, 19 nt, Homo sapiens
  misc_RNA (1)...(19): siRNA sense strand
gaauauaguguccuuauca

SEQ ID NO: 596663 - RNA, 19 nt, Homo sapiens
  misc_RNA (1)...(19): siRNA sense strand
ggaugacaguguucccaua

SEQ ID NO: 596664 - RNA, 19 nt, Homo sapiens
  misc_RNA (1)...(19): siRNA sense strand
ggacacagaggccuucauu

SEQ ID NO: 596665 - RNA, 19 nt, Homo sapiens
  misc_RNA (1)...(19): siRNA sense strand
acagaggccuucauuaguu

SEQ ID NO: 596666 - RNA, 19 nt, Homo sapiens
  misc_RNA (1)...(19): siRNA sense strand
ccaaggagguggacagcaa

SEQ ID NO: 596667 - RNA, 19 nt, Homo sapiens
  misc_RNA (1)...(19): siRNA sense strand
aauaugaacuggucuacaa

SEQ ID NO: 596668 - RNA, 19 nt, Homo sapiens
  misc_RNA (1)...(19): siRNA sense strand
gaacaucugaaccaaagaa

SEQ ID NO: 596669 - RNA, 19 nt, Homo sapiens
  misc_RNA (1)...(19): siRNA sense strand
aagaggaguuugccaauga

SEQ ID NO: 596670 - RNA, 19 nt, Homo sapiens
  misc_RNA (1)...(19): siRNA sense strand
aaggauagaugaugaaauc

SEQ ID NO: 596671 - RNA, 19 nt, Homo sapiens
  misc_RNA (1)...(19): siRNA sense strand
acaaaggcauuuccaauag

SEQ ID NO: 596672 - RNA, 19 nt, Homo sapiens
  misc_RNA (1)...(19): siRNA sense strand
cuuuaggacuucugaaaua

SEQ ID NO: 596673 - RNA, 19 nt, Homo sapiens
  misc_RNA (1)...(19): siRNA sense strand
gauaauuccugagaacuuc

SEQ ID NO: 596674 - RNA, 19 nt, Homo sapiens
  misc_RNA (1)...(19): siRNA sense strand
ggauguacguuguuaccaa

SEQ ID NO: 596675 - RNA, 19 nt, Homo sapiens
  misc_RNA (1)...(19): siRNA sense strand
acagauggauguuaucaga

SEQ ID NO: 596676 - RNA, 19 nt, Homo sapiens
  misc_RNA (1)...(19): siRNA sense strand
caucugaaccaaagaaauu

SEQ ID NO: 596677 - RNA, 19 nt, Homo sapiens
  misc_RNA (1)...(19): siRNA sense strand
ccaagaggaugacaguguu

SEQ ID NO: 596678 - RNA, 19 nt, Homo sapiens
  misc_RNA (1)...(19): siRNA sense strand
uggaaggacugguguuauu

SEQ ID NO: 596679 - RNA, 19 nt, Homo sapiens
  misc_RNA (1)...(19): siRNA sense strand
ggaauauaguguccuuauc

SEQ ID NO: 596680 - RNA, 19 nt, Homo sapiens
  misc_RNA (1)...(19): siRNA sense strand
gcuaaaagaugggauaauu

SEQ ID NO: 596681 - RNA, 19 nt, Homo sapiens
  misc_RNA (1)...(19): siRNA sense strand
cuacaucaaugccaacuuc

SEQ ID NO: 596682 - RNA, 19 nt, Homo sapiens
  misc_RNA (1)...(19): siRNA sense strand
caccaaauguucccaaauc

SEQ ID NO: 596683 - RNA, 19 nt, Homo sapiens
  misc_RNA (1)...(19): siRNA sense strand
acaccugaaucauuuauug

SEQ ID NO: 596684 - RNA, 19 nt, Homo sapiens
  misc_RNA (1)...(19): siRNA sense strand
cuacaacuguggcugagaa

SEQ ID NO: 596685 - RNA, 19 nt, Homo sapiens
  misc_RNA (1)...(19): siRNA sense strand
ccucuucucuuauuacaau

SEQ ID NO: 596686 - RNA, 19 nt, Homo sapiens
  misc_RNA (1)...(19): siRNA sense strand
agagacagauggauguuau

SEQ ID NO: 596687 - RNA, 19 nt, Homo sapiens
  misc_RNA (1)...(19): siRNA sense strand
cuacaacccuccuggacuu

SEQ ID NO: 596688 - RNA, 19 nt, Homo sapiens
  misc_RNA (1)...(19): siRNA sense strand
gaggaugauuugggaauau

SEQ ID NO: 596689 - RNA, 19 nt, Homo sapiens
  misc_RNA (1)...(19): siRNA sense strand
gaaggacugguguuauuug

SEQ ID NO: 596690 - RNA, 19 nt, Homo sapiens
  misc_RNA (1)...(19): siRNA sense strand
ggaaggacugguguuauuu

SEQ ID NO: 596691 - RNA, 19 nt, Homo sapiens
  misc_RNA (1)...(19): siRNA sense strand
uggcaugcauggaguauga

SEQ ID NO: 596692 - RNA, 19 nt, Homo sapiens
  misc_RNA (1)...(19): siRNA sense strand
gaaccaggagucagcugua

SEQ ID NO: 596693 - RNA, 19 nt, Homo sapiens
  misc_RNA (1)...(19): siRNA sense strand
gguguuauuugugcuauug

SEQ ID NO: 596694 - RNA, 19 nt, Homo sapiens
  misc_RNA (1)...(19): siRNA sense strand
caaccaauauuuccucacu

SEQ ID NO: 596695 - RNA, 19 nt, Homo sapiens
  misc_RNA (1)...(19): siRNA sense strand
gggauguucuaauucuaaa

SEQ ID NO: 596696 - RNA, 19 nt, Homo sapiens
  misc_RNA (1)...(19): siRNA sense strand
caaaggcauuuccaauagu

SEQ ID NO: 596697 - RNA, 19 nt, Homo sapiens
  misc_RNA (1)...(19): siRNA sense strand
gagggauguucuaauucua

SEQ ID NO: 596698 - RNA, 19 nt, Homo sapiens
  misc_RNA (1)...(19): siRNA sense strand
uuugagggauguucuaauu

SEQ ID NO: 596699 - RNA, 19 nt, Homo sapiens
  misc_RNA (1)...(19): siRNA sense strand
gcccaaagcaagaaaauua

SEQ ID NO: 596700 - RNA, 19 nt, Homo sapiens
  misc_RNA (1)...(19): siRNA sense strand
ugaauucuccaaccaauau

SEQ ID NO: 596701 - RNA, 19 nt, Homo sapiens
  misc_RNA (1)...(19): siRNA sense strand
aaaggcauuuccaauaguu

SEQ ID NO: 596702 - RNA, 19 nt, Homo sapiens
  misc_RNA (1)...(19): siRNA sense strand
cuaaaucaagcacuucuuu

SEQ ID NO: 596703 - RNA, 19 nt, Homo sapiens
  misc_RNA (1)...(19): siRNA sense strand
auuauucacugccauauga

SEQ ID NO: 596704 - RNA, 19 nt, Homo sapiens
  misc_RNA (1)...(19): siRNA sense strand
ggagcuaaauuacaguuuu

SEQ ID NO: 596705 - RNA, 19 nt, Homo sapiens
  misc_RNA (1)...(19): siRNA sense strand
ggacccaaggcuuauauug

SEQ ID NO: 596706 - RNA, 19 nt, Homo sapiens
  misc_RNA (1)...(19): siRNA sense strand
cuagugcucuugguguaua

SEQ ID NO: 596707 - RNA, 19 nt, Homo sapiens
  misc_RNA (1)...(19): siRNA sense strand
acacagaggccuucauuag

SEQ ID NO: 596708 - RNA, 19 nt, Homo sapiens
  misc_RNA (1)...(19): siRNA sense strand
uauaguguccuuaucauug

SEQ ID NO: 596709 - RNA, 19 nt, Homo sapiens
  misc_RNA (1)...(19): siRNA sense strand
aaaccuauccuacaacugu

SEQ ID NO: 596710 - RNA, 19 nt, Homo sapiens
  misc_RNA (1)...(19): siRNA sense strand
ccucagcugugaagguaaa

SEQ ID NO: 596711 - RNA, 19 nt, Homo sapiens
  misc_RNA (1)...(19): siRNA sense strand
ccaauaacacggaccaaau

SEQ ID NO: 596712 - RNA, 19 nt, Homo sapiens
  misc_RNA (1)...(19): siRNA sense strand
ggauaauuccugagaacuu

SEQ ID NO: 596713 - RNA, 19 nt, Homo sapiens
  misc_RNA (1)...(19): siRNA sense strand
gggaauauaguguccuuau

SEQ ID NO: 596714 - RNA, 19 nt, Homo sapiens
  misc_RNA (1)...(19): siRNA sense strand
gauuccagcuacaucaaug

SEQ ID NO: 596715 - RNA, 19 nt, Homo sapiens
  misc_RNA (1)...(19): siRNA sense strand
gacaaaaccuauccuacaa

SEQ ID NO: 596716 - RNA, 19 nt, Homo sapiens
  misc_RNA (1)...(19): siRNA sense strand
gaacuucaguguuuucagu

SEQ ID NO: 596717 - RNA, 19 nt, Homo sapiens
  misc_RNA (1)...(19): siRNA sense strand
gcauuguauuccugagaaa

SEQ ID NO: 596718 - RNA, 19 nt, Homo sapiens
  misc_RNA (1)...(19): siRNA sense strand
agauaaacauucuggaaca

SEQ ID NO: 596719 - RNA, 19 nt, Homo sapiens
  misc_RNA (1)...(19): siRNA sense strand
ccaaugaauuucugaagcu

SEQ ID NO: 596720 - RNA, 19 nt, Homo sapiens
  misc_RNA (1)...(19): siRNA sense strand
ugagggauguucuaauucu

SEQ ID NO: 596721 - RNA, 19 nt, Homo sapiens
  misc_RNA (1)...(19): siRNA sense strand
cuaucuaccaguuucauua

SEQ ID NO: 596722 - RNA, 19 nt, Homo sapiens
  misc_RNA (1)...(19): siRNA sense strand
uggaacaucugaaccaaag

SEQ ID NO: 596723 - RNA, 19 nt, Homo sapiens
  misc_RNA (1)...(19): siRNA sense strand
caaauguucccaaauccuu

SEQ ID NO: 596724 - RNA, 19 nt, Homo sapiens
  misc_RNA (1)...(19): siRNA sense strand
gguaccaguucuaagaugu

SEQ ID NO: 596725 - RNA, 19 nt, Homo sapiens
  misc_RNA (1)...(19): siRNA sense strand
cuaaacaccaaauacguaa

SEQ ID NO: 596726 - RNA, 19 nt, Homo sapiens
  misc_RNA (1)...(19): siRNA sense strand
ggaccaaaucaacuccuuu

SEQ ID NO: 596727 - RNA, 19 nt, Homo sapiens
  misc_RNA (1)...(19): siRNA sense strand
agaauuggccagaccauga

SEQ ID NO: 596728 - RNA, 19 nt, Homo sapiens
  misc_RNA (1)...(19): siRNA sense strand
agaccaagcaagaguguaa

SEQ ID NO: 596729 - RNA, 19 nt, Homo sapiens
  misc_RNA (1)...(19): siRNA sense strand
agauggauguuaucagaga

SEQ ID NO: 596730 - RNA, 19 nt, Homo sapiens
  misc_RNA (1)...(19): siRNA sense strand
aaacgcaggaacaauauga

SEQ ID NO: 596731 - RNA, 19 nt, Homo sapiens
  misc_RNA (1)...(19): siRNA sense strand
ccaguuucauuacaagaau

SEQ ID NO: 596732 - RNA, 19 nt, Homo sapiens
  misc_RNA (1)...(19): siRNA sense strand
caucccucuucucuuauua

SEQ ID NO: 596733 - RNA, 19 nt, Homo sapiens
  misc_RNA (1)...(19): siRNA sense strand
guaaugccucuaauguaaa

SEQ ID NO: 596734 - RNA, 19 nt, Homo sapiens
  misc_RNA (1)...(19): siRNA sense strand
ucuaaacaccaaauacgua

SEQ ID NO: 596735 - RNA, 19 nt, Homo sapiens
  misc_RNA (1)...(19): siRNA sense strand
gcaggaacaauaugaacug

SEQ ID NO: 596736 - RNA, 19 nt, Homo sapiens
  misc_RNA (1)...(19): siRNA sense strand
gaugaggcccaaagcaaga

SEQ ID NO: 596737 - RNA, 19 nt, Homo sapiens
  misc_RNA (1)...(19): siRNA sense strand
gaugacaguguucccauau

SEQ ID NO: 596738 - RNA, 19 nt, Homo sapiens
  misc_RNA (1)...(19): siRNA sense strand
caagugguaccaguucuaa

SEQ ID NO: 596739 - RNA, 19 nt, Homo sapiens
  misc_RNA (1)...(19): siRNA sense strand
uaaagcaccaugacucuag

SEQ ID NO: 596740 - RNA, 19 nt, Homo sapiens
  misc_RNA (1)...(19): siRNA sense strand
caauaacacggaccaaauc

SEQ ID NO: 596741 - RNA, 19 nt, Homo sapiens
  misc_RNA (1)...(19): siRNA sense strand
aaagaggaguuugccaaug

SEQ ID NO: 596742 - RNA, 19 nt, Homo sapiens
  misc_RNA (1)...(19): siRNA sense strand
gaugggauaauuccugaga

SEQ ID NO: 596743 - RNA, 19 nt, Homo sapiens
  misc_RNA (1)...(19): siRNA sense strand
auacuuagaccaagcaaga

SEQ ID NO: 596744 - RNA, 19 nt, Homo sapiens
  misc_RNA (1)...(19): siRNA sense strand
ggacaccugaaucauuuau

SEQ ID NO: 596745 - RNA, 19 nt, Homo sapiens
  misc_RNA (1)...(19): siRNA sense strand
caagcagacucuuauucuc

SEQ ID NO: 596746 - RNA, 19 nt, Homo sapiens
  misc_RNA (1)...(19): siRNA sense strand
caagcaaagcauuguauuc

SEQ ID NO: 596747 - RNA, 19 nt, Homo sapiens
  misc_RNA (1)...(19): siRNA sense strand
ugcagaaguuccuggauga

SEQ ID NO: 596748 - RNA, 19 nt, Homo sapiens
  misc_RNA (1)...(19): siRNA sense strand
caaguacaaggcagacaaa

SEQ ID NO: 596749 - RNA, 19 nt, Homo sapiens
  misc_RNA (1)...(19): siRNA sense strand
ugauuuaccugagaagcaa

SEQ ID NO: 596750 - RNA, 19 nt, Homo sapiens
  misc_RNA (1)...(19): siRNA sense strand
ccaggagucagcuguacua

SEQ ID NO: 596751 - RNA, 19 nt, Homo sapiens
  misc_RNA (1)...(19): siRNA sense strand
ucacugaauucuccaacca

SEQ ID NO: 596752 - RNA, 19 nt, Homo sapiens
  misc_RNA (1)...(19): siRNA sense strand
cuacaucccucuucucuua

SEQ ID NO: 596753 - RNA, 19 nt, Homo sapiens
  misc_RNA (1)...(19): siRNA sense strand
gaacagagagucaagcaaa

SEQ ID NO: 596754 - RNA, 19 nt, Homo sapiens
  misc_RNA (1)...(19): siRNA sense strand
cguaaugccucuaauguaa

SEQ ID NO: 596755 - RNA, 19 nt, Homo sapiens
  misc_RNA (1)...(19): siRNA sense strand
ugaggaagcuggagaauuc

SEQ ID NO: 596756 - RNA, 19 nt, Homo sapiens
  misc_RNA (1)...(19): siRNA sense strand
uuacauaccuuuaguggaa

SEQ ID NO: 596757 - RNA, 19 nt, Homo sapiens
  misc_RNA (1)...(19): siRNA sense strand
gaagcaagauggaacuguu

SEQ ID NO: 596758 - RNA, 19 nt, Homo sapiens
  misc_RNA (1)...(19): siRNA sense strand
gacaaaggcauuuccaaua

SEQ ID NO: 596759 - RNA, 19 nt, Homo sapiens
  misc_RNA (1)...(19): siRNA sense strand
ggagucagcuguacuagca

SEQ ID NO: 596760 - RNA, 19 nt, Homo sapiens
  misc_RNA (1)...(19): siRNA sense strand
ggaguuugccaaugaauuu

SEQ ID NO: 596761 - RNA, 19 nt, Homo sapiens
  misc_RNA (1)...(19): siRNA sense strand
ggaggaugauuugggaaua

SEQ ID NO: 596762 - RNA, 19 nt, Homo sapiens
  misc_RNA (1)...(19): siRNA sense strand
gaauauaguguccuuauca

SEQ ID NO: 596763 - RNA, 19 nt, Homo sapiens
  misc_RNA (1)...(19): siRNA sense strand
ggaugacaguguucccaua

SEQ ID NO: 596764 - RNA, 19 nt, Homo sapiens
  misc_RNA (1)...(19): siRNA sense strand
ggacacagaggccuucauu

SEQ ID NO: 596765 - RNA, 19 nt, Homo sapiens
  misc_RNA (1)...(19): siRNA sense strand
acagaggccuucauuaguu

SEQ ID NO: 596766 - RNA, 19 nt, Homo sapiens
  misc_RNA (1)...(19): siRNA sense strand
ccaaggagguggacagcaa

SEQ ID NO: 596767 - RNA, 19 nt, Homo sapiens
  misc_RNA (1)...(19): siRNA sense strand
aauaugaacuggucuacaa

SEQ ID NO: 596768 - RNA, 19 nt, Homo sapiens
  misc_RNA (1)...(19): siRNA sense strand
gaacaucugaaccaaagaa

SEQ ID NO: 596769 - RNA, 19 nt, Homo sapiens
  misc_RNA (1)...(19): siRNA sense strand
aagaggaguuugccaauga

SEQ ID NO: 596770 - RNA, 19 nt, Homo sapiens
  misc_RNA (1)...(19): siRNA sense strand
aaggauagaugaugaaauc

SEQ ID NO: 596771 - RNA, 19 nt, Homo sapiens
  misc_RNA (1)...(19): siRNA sense strand
acaaaggcauuuccaauag

SEQ ID NO: 596772 - RNA, 19 nt, Homo sapiens
  misc_RNA (1)...(19): siRNA sense strand
cuuuaggacuucugaaaua

SEQ ID NO: 596773 - RNA, 19 nt, Homo sapiens
  misc_RNA (1)...(19): siRNA sense strand
gauaauuccugagaacuuc

SEQ ID NO: 596774 - RNA, 19 nt, Homo sapiens
  misc_RNA (1)...(19): siRNA sense strand
ggauguacguuguuaccaa

SEQ ID NO: 596775 - RNA, 19 nt, Homo sapiens
  misc_RNA (1)...(19): siRNA sense strand
acagauggauguuaucaga

SEQ ID NO: 596776 - RNA, 19 nt, Homo sapiens
  misc_RNA (1)...(19): siRNA sense strand
caucugaaccaaagaaauu

SEQ ID NO: 596777 - RNA, 19 nt, Homo sapiens
  misc_RNA (1)...(19): siRNA sense strand
ccaagaggaugacaguguu

SEQ ID NO: 596778 - RNA, 19 nt, Homo sapiens
  misc_RNA (1)...(19): siRNA sense strand
uggaaggacugguguuauu

SEQ ID NO: 596779 - RNA, 19 nt, Homo sapiens
  misc_RNA (1)...(19): siRNA sense strand
ggaauauaguguccuuauc

SEQ ID NO: 596780 - RNA, 19 nt, Homo sapiens
  misc_RNA (1)...(19): siRNA sense strand
gcuaaaagaugggauaauu

SEQ ID NO: 596781 - RNA, 19 nt, Homo sapiens
  misc_RNA (1)...(19): siRNA sense strand
cuacaucaaugccaacuuc

SEQ ID NO: 596782 - RNA, 19 nt, Homo sapiens
  misc_RNA (1)...(19): siRNA sense strand
caccaaauguucccaaauc

SEQ ID NO: 596783 - RNA, 19 nt, Homo sapiens
  misc_RNA (1)...(19): siRNA sense strand
acaccugaaucauuuauug

SEQ ID NO: 596784 - RNA, 19 nt, Homo sapiens
  misc_RNA (1)...(19): siRNA sense strand
cuacaacuguggcugagaa

SEQ ID NO: 596785 - RNA, 19 nt, Homo sapiens
  misc_RNA (1)...(19): siRNA sense strand
ccucuucucuuauuacaau

SEQ ID NO: 596786 - RNA, 19 nt, Homo sapiens
  misc_RNA (1)...(19): siRNA sense strand
agagacagauggauguuau

SEQ ID NO: 596787 - RNA, 19 nt, Homo sapiens
  misc_RNA (1)...(19): siRNA sense strand
cuacaacccuccuggacuu

SEQ ID NO: 596788 - RNA, 19 nt, Homo sapiens
  misc_RNA (1)...(19): siRNA sense strand
gaggaugauuugggaauau

SEQ ID NO: 596789 - RNA, 19 nt, Homo sapiens
  misc_RNA (1)...(19): siRNA sense strand
gaaggacugguguuauuug

SEQ ID NO: 596790 - RNA, 19 nt, Homo sapiens
  misc_RNA (1)...(19): siRNA sense strand
ggaaggacugguguuauuu

SEQ ID NO: 596791 - RNA, 19 nt, Homo sapiens
  misc_RNA (1)...(19): siRNA sense strand
uggcaugcauggaguauga

SEQ ID NO: 596792 - RNA, 19 nt, Homo sapiens
  misc_RNA (1)...(19): siRNA sense strand
gaaccaggagucagcugua

SEQ ID NO: 596793 - RNA, 19 nt, Homo sapiens
  misc_RNA (1)...(19): siRNA sense strand
gguguuauuugugcuauug

SEQ ID NO: 596794 - RNA, 19 nt, Homo sapiens
  misc_RNA (1)...(19): siRNA sense strand
caaccaauauuuccucacu

SEQ ID NO: 596795 - RNA, 19 nt, Homo sapiens
  misc_RNA (1)...(19): siRNA sense strand
gggauguucuaauucuaaa

SEQ ID NO: 596796 - RNA, 19 nt, Homo sapiens
  misc_RNA (1)...(19): siRNA sense strand
caaaggcauuuccaauagu

SEQ ID NO: 596797 - RNA, 19 nt, Homo sapiens
  misc_RNA (1)...(19): siRNA sense strand
gagggauguucuaauucua

SEQ ID NO: 596798 - RNA, 19 nt, Homo sapiens
  misc_RNA (1)...(19): siRNA sense strand
uuugagggauguucuaauu

SEQ ID NO: 596799 - RNA, 19 nt, Homo sapiens
  misc_RNA (1)...(19): siRNA sense strand
gcccaaagcaagaaaauua

SEQ ID NO: 596800 - RNA, 19 nt, Homo sapiens
  misc_RNA (1)...(19): siRNA sense strand
ugaauucuccaaccaauau

SEQ ID NO: 596801 - RNA, 19 nt, Homo sapiens
  misc_RNA (1)...(19): siRNA sense strand
aaaggcauuuccaauaguu

SEQ ID NO: 596802 - RNA, 19 nt, Homo sapiens
  misc_RNA (1)...(19): siRNA sense strand
cuaaaucaagcacuucuuu

SEQ ID NO: 596803 - RNA, 19 nt, Homo sapiens
  misc_RNA (1)...(19): siRNA sense strand
auuauucacugccauauga

SEQ ID NO: 596804 - RNA, 19 nt, Homo sapiens
  misc_RNA (1)...(19): siRNA sense strand
ggagcuaaauuacaguuuu

SEQ ID NO: 596805 - RNA, 19 nt, Homo sapiens
  misc_RNA (1)...(19): siRNA sense strand
ggacccaaggcuuauauug

SEQ ID NO: 596806 - RNA, 19 nt, Homo sapiens
  misc_RNA (1)...(19): siRNA sense strand
cuagugcucuugguguaua

SEQ ID NO: 596807 - RNA, 19 nt, Homo sapiens
  misc_RNA (1)...(19): siRNA sense strand
acacagaggccuucauuag

SEQ ID NO: 596808 - RNA, 19 nt, Homo sapiens
  misc_RNA (1)...(19): siRNA sense strand
uauaguguccuuaucauug

SEQ ID NO: 596809 - RNA, 19 nt, Homo sapiens
  misc_RNA (1)...(19): siRNA sense strand
aaaccuauccuacaacugu

SEQ ID NO: 596810 - RNA, 19 nt, Homo sapiens
  misc_RNA (1)...(19): siRNA sense strand
ccucagcugugaagguaaa

SEQ ID NO: 596811 - RNA, 19 nt, Homo sapiens
  misc_RNA (1)...(19): siRNA sense strand
ccaauaacacggaccaaau

SEQ ID NO: 596812 - RNA, 19 nt, Homo sapiens
  misc_RNA (1)...(19): siRNA sense strand
ggauaauuccugagaacuu

SEQ ID NO: 596813 - RNA, 19 nt, Homo sapiens
  misc_RNA (1)...(19): siRNA sense strand
gggaauauaguguccuuau

SEQ ID NO: 596814 - RNA, 19 nt, Homo sapiens
  misc_RNA (1)...(19): siRNA sense strand
gauuccagcuacaucaaug

SEQ ID NO: 596815 - RNA, 19 nt, Homo sapiens
  misc_RNA (1)...(19): siRNA sense strand
gacaaaaccuauccuacaa

SEQ ID NO: 596816 - RNA, 19 nt, Homo sapiens
  misc_RNA (1)...(19): siRNA sense strand
gaacuucaguguuuucagu

SEQ ID NO: 596817 - RNA, 19 nt, Homo sapiens
  misc_RNA (1)...(19): siRNA sense strand
gcauuguauuccugagaaa

SEQ ID NO: 596818 - RNA, 19 nt, Homo sapiens
  misc_RNA (1)...(19): siRNA sense strand
agauaaacauucuggaaca

SEQ ID NO: 596819 - RNA, 19 nt, Homo sapiens
  misc_RNA (1)...(19): siRNA sense strand
ccaaugaauuucugaagcu

SEQ ID NO: 596820 - RNA, 19 nt, Homo sapiens
  misc_RNA (1)...(19): siRNA sense strand
ugagggauguucuaauucu

SEQ ID NO: 596821 - RNA, 19 nt, Homo sapiens
  misc_RNA (1)...(19): siRNA sense strand
cuaucuaccaguuucauua

SEQ ID NO: 596822 - RNA, 19 nt, Homo sapiens
  misc_RNA (1)...(19): siRNA sense strand
uggaacaucugaaccaaag

SEQ ID NO: 596823 - RNA, 19 nt, Homo sapiens
  misc_RNA (1)...(19): siRNA sense strand
caaauguucccaaauccuu

SEQ ID NO: 596824 - RNA, 19 nt, Homo sapiens
  misc_RNA (1)...(19): siRNA sense strand
gguaccaguucuaagaugu

SEQ ID NO: 596825 - RNA, 19 nt, Homo sapiens
  misc_RNA (1)...(19): siRNA sense strand
cuaaacaccaaauacguaa

SEQ ID NO: 596826 - RNA, 19 nt, Homo sapiens
  misc_RNA (1)...(19): siRNA sense strand
ggaccaaaucaacuccuuu

SEQ ID NO: 596827 - RNA, 19 nt, Homo sapiens
  misc_RNA (1)...(19): siRNA sense strand
agaauuggccagaccauga

SEQ ID NO: 596828 - RNA, 19 nt, Homo sapiens
  misc_RNA (1)...(19): siRNA sense strand
agaccaagcaagaguguaa

SEQ ID NO: 596829 - RNA, 19 nt, Homo sapiens
  misc_RNA (1)...(19): siRNA sense strand
agauggauguuaucagaga

SEQ ID NO: 596830 - RNA, 19 nt, Homo sapiens
  misc_RNA (1)...(19): siRNA sense strand
aaacgcaggaacaauauga

SEQ ID NO: 596831 - RNA, 19 nt, Homo sapiens
  misc_RNA (1)...(19): siRNA sense strand
ccaguuucauuacaagaau

SEQ ID NO: 596832 - RNA, 19 nt, Homo sapiens
  misc_RNA (1)...(19): siRNA sense strand
caucccucuucucuuauua

SEQ ID NO: 596833 - RNA, 19 nt, Homo sapiens
  misc_RNA (1)...(19): siRNA sense strand
guaaugccucuaauguaaa

SEQ ID NO: 596834 - RNA, 19 nt, Homo sapiens
  misc_RNA (1)...(19): siRNA sense strand
ucuaaacaccaaauacgua

SEQ ID NO: 596835 - RNA, 19 nt, Homo sapiens
  misc_RNA (1)...(19): siRNA sense strand
gcaggaacaauaugaacug

SEQ ID NO: 596836 - RNA, 19 nt, Homo sapiens
  misc_RNA (1)...(19): siRNA sense strand
gaugaggcccaaagcaaga

SEQ ID NO: 596837 - RNA, 19 nt, Homo sapiens
  misc_RNA (1)...(19): siRNA sense strand
gaugacaguguucccauau

SEQ ID NO: 596838 - RNA, 19 nt, Homo sapiens
  misc_RNA (1)...(19): siRNA sense strand
caagugguaccaguucuaa

SEQ ID NO: 596839 - RNA, 19 nt, Homo sapiens
  misc_RNA (1)...(19): siRNA sense strand
uaaagcaccaugacucuag

SEQ ID NO: 596840 - RNA, 19 nt, Homo sapiens
  misc_RNA (1)...(19): siRNA sense strand
caauaacacggaccaaauc

SEQ ID NO: 596841 - RNA, 19 nt, Homo sapiens
  misc_RNA (1)...(19): siRNA sense strand
aaagaggaguuugccaaug

SEQ ID NO: 596842 - RNA, 19 nt, Homo sapiens
  misc_RNA (1)...(19): siRNA sense strand
gaugggauaauuccugaga

SEQ ID NO: 596843 - RNA, 19 nt, Homo sapiens
  misc_RNA (1)...(19): siRNA sense strand
auacuuagaccaagcaaga

SEQ ID NO: 596844 - RNA, 19 nt, Homo sapiens
  misc_RNA (1)...(19): siRNA sense strand
ggacaccugaaucauuuau

SEQ ID NO: 596845 - RNA, 19 nt, Homo sapiens
  misc_RNA (1)...(19): siRNA sense strand
caagcagacucuuauucuc

SEQ ID NO: 596846 - RNA, 19 nt, Homo sapiens
  misc_RNA (1)...(19): siRNA sense strand
caagcaaagcauuguauuc

SEQ ID NO: 596847 - RNA, 19 nt, Homo sapiens
  misc_RNA (1)...(19): siRNA sense strand
ugcagaaguuccuggauga

SEQ ID NO: 596848 - RNA, 19 nt, Homo sapiens
  misc_RNA (1)...(19): siRNA sense strand
caaguacaaggcagacaaa

SEQ ID NO: 596849 - RNA, 19 nt, Homo sapiens
  misc_RNA (1)...(19): siRNA sense strand
ugauuuaccugagaagcaa

SEQ ID NO: 596850 - RNA, 19 nt, Homo sapiens
  misc_RNA (1)...(19): siRNA sense strand
ccaggagucagcuguacua

SEQ ID NO: 596851 - RNA, 19 nt, Homo sapiens
  misc_RNA (1)...(19): siRNA sense strand
ucacugaauucuccaacca

SEQ ID NO: 596852 - RNA, 19 nt, Homo sapiens
  misc_RNA (1)...(19): siRNA sense strand
ggacuuccaucgauucuau

SEQ ID NO: 596853 - RNA, 19 nt, Homo sapiens
  misc_RNA (1)...(19): siRNA sense strand
gaagagcgauggugugaag

SEQ ID NO: 596854 - RNA, 19 nt, Homo sapiens
  misc_RNA (1)...(19): siRNA sense strand
ugacagagcagcugauuga

SEQ ID NO: 596855 - RNA, 19 nt, Homo sapiens
  misc_RNA (1)...(19): siRNA sense strand
aauaagaugcugaccauua

SEQ ID NO: 596856 - RNA, 19 nt, Homo sapiens
  misc_RNA (1)...(19): siRNA sense strand
auaagaugcugaccauuaa

SEQ ID NO: 596857 - RNA, 19 nt, Homo sapiens
  misc_RNA (1)...(19): siRNA sense strand
ggaguaugcugccaagauc

SEQ ID NO: 596858 - RNA, 19 nt, Homo sapiens
  misc_RNA (1)...(19): siRNA sense strand
gcggaaacaggaaauuaua

SEQ ID NO: 596859 - RNA, 19 nt, Homo sapiens
  misc_RNA (1)...(19): siRNA sense strand
ccaagaucaucaacacaaa

SEQ ID NO: 596860 - RNA, 19 nt, Homo sapiens
  misc_RNA (1)...(19): siRNA sense strand
ucaauaagaugcugaccau

SEQ ID NO: 596861 - RNA, 19 nt, Homo sapiens
  misc_RNA (1)...(19): siRNA sense strand
ggacaccacuaccugaucu

SEQ ID NO: 596862 - RNA, 19 nt, Homo sapiens
  misc_RNA (1)...(19): siRNA sense strand
gcagcugauugaagccaua

SEQ ID NO: 596863 - RNA, 19 nt, Homo sapiens
  misc_RNA (1)...(19): siRNA sense strand
ggaacuguuugaagauauc

SEQ ID NO: 596864 - RNA, 19 nt, Homo sapiens
  misc_RNA (1)...(19): siRNA sense strand
gggaacuguuugaagauau

SEQ ID NO: 596865 - RNA, 19 nt, Homo sapiens
  misc_RNA (1)...(19): siRNA sense strand
cagugaagcuggcagacuu

SEQ ID NO: 596866 - RNA, 19 nt, Homo sapiens
  misc_RNA (1)...(19): siRNA sense strand
cauaagcaauggagauuuu

SEQ ID NO: 596867 - RNA, 19 nt, Homo sapiens
  misc_RNA (1)...(19): siRNA sense strand
gcacaccaccauccugaau

SEQ ID NO: 596868 - RNA, 19 nt, Homo sapiens
  misc_RNA (1)...(19): siRNA sense strand
cagaagugcugcggaagga

SEQ ID NO: 596869 - RNA, 19 nt, Homo sapiens
  misc_RNA (1)...(19): siRNA sense strand
ggaugaagacaccaaagug

SEQ ID NO: 596870 - RNA, 19 nt, Homo sapiens
  misc_RNA (1)...(19): siRNA sense strand
caacaucguccgacuacau

SEQ ID NO: 596871 - RNA, 19 nt, Homo sapiens
  misc_RNA (1)...(19): siRNA sense strand
gugcggaaacaggaaauua

SEQ ID NO: 596872 - RNA, 19 nt, Homo sapiens
  misc_RNA (1)...(19): siRNA sense strand
gaaacugaagggagccauu

SEQ ID NO: 596873 - RNA, 19 nt, Homo sapiens
  misc_RNA (1)...(19): siRNA sense strand
gccaagaucaucaacacaa

SEQ ID NO: 596874 - RNA, 19 nt, Homo sapiens
  misc_RNA (1)...(19): siRNA sense strand
gcaggcaugguuuggguuu

SEQ ID NO: 596875 - RNA, 19 nt, Homo sapiens
  misc_RNA (1)...(19): siRNA sense strand
gaucguccacuuccacaga

SEQ ID NO: 596876 - RNA, 19 nt, Homo sapiens
  misc_RNA (1)...(19): siRNA sense strand
uggacugccugaagaaguu

SEQ ID NO: 596877 - RNA, 19 nt, Homo sapiens
  misc_RNA (1)...(19): siRNA sense strand
cggaaacaggaaauuauaa

SEQ ID NO: 596878 - RNA, 19 nt, Homo sapiens
  misc_RNA (1)...(19): siRNA sense strand
gagccauucucaccacgau

SEQ ID NO: 596879 - RNA, 19 nt, Homo sapiens
  misc_RNA (1)...(19): siRNA sense strand
gaucaucaacacaaagaag

SEQ ID NO: 596880 - RNA, 19 nt, Homo sapiens
  misc_RNA (1)...(19): siRNA sense strand
gugcgacccuggcaugaca

SEQ ID NO: 596881 - RNA, 19 nt, Homo sapiens
  misc_RNA (1)...(19): siRNA sense strand
gagcagcaggcaugguuug

SEQ ID NO: 596882 - RNA, 19 nt, Homo sapiens
  misc_RNA (1)...(19): siRNA sense strand
gggagcagcaggcaugguu

SEQ ID NO: 596883 - RNA, 19 nt, Homo sapiens
  misc_RNA (1)...(19): siRNA sense strand
gcaccaacaccaccaucga

SEQ ID NO: 596884 - RNA, 19 nt, Homo sapiens
  misc_RNA (1)...(19): siRNA sense strand
gaccauuaacccauccaaa

SEQ ID NO: 596885 - RNA, 19 nt, Homo sapiens
  misc_RNA (1)...(19): siRNA sense strand
caacaccaccaucgaggau

SEQ ID NO: 596886 - RNA, 19 nt, Homo sapiens
  misc_RNA (1)...(19): siRNA sense strand
ggggaacuguuugaagaua

SEQ ID NO: 596887 - RNA, 19 nt, Homo sapiens
  misc_RNA (1)...(19): siRNA sense strand
ggauaucucuccccagaag

SEQ ID NO: 596888 - RNA, 19 nt, Homo sapiens
  misc_RNA (1)...(19): siRNA sense strand
aagaagagcgaugguguga

SEQ ID NO: 596889 - RNA, 19 nt, Homo sapiens
  misc_RNA (1)...(19): siRNA sense strand
caaagugcggaaacaggaa

SEQ ID NO: 596890 - RNA, 19 nt, Homo sapiens
  misc_RNA (1)...(19): siRNA sense strand
ggaccugaagccugagaau

SEQ ID NO: 596891 - RNA, 19 nt, Homo sapiens
  misc_RNA (1)...(19): siRNA sense strand
aauggcagaucguccacuu

SEQ ID NO: 596892 - RNA, 19 nt, Homo sapiens
  misc_RNA (1)...(19): siRNA sense strand
acaccaaagugcggaaaca

SEQ ID NO: 596893 - RNA, 19 nt, Homo sapiens
  misc_RNA (1)...(19): siRNA sense strand
ccagagaccaucagaagcu

SEQ ID NO: 596894 - RNA, 19 nt, Homo sapiens
  misc_RNA (1)...(19): siRNA sense strand
ggagcagcaggcaugguuu

SEQ ID NO: 596895 - RNA, 19 nt, Homo sapiens
  misc_RNA (1)...(19): siRNA sense strand
cagaggagggacaccacua

SEQ ID NO: 596896 - RNA, 19 nt, Homo sapiens
  misc_RNA (1)...(19): siRNA sense strand
caagggugccgcagugaag

SEQ ID NO: 596897 - RNA, 19 nt, Homo sapiens
  misc_RNA (1)...(19): siRNA sense strand
guggggaacuguuugaaga

SEQ ID NO: 596898 - RNA, 19 nt, Homo sapiens
  misc_RNA (1)...(19): siRNA sense strand
cauccugcaugcacagaca

SEQ ID NO: 596899 - RNA, 19 nt, Homo sapiens
  misc_RNA (1)...(19): siRNA sense strand
uaccagcucuucgaggaau

SEQ ID NO: 596900 - RNA, 19 nt, Homo sapiens
  misc_RNA (1)...(19): siRNA sense strand
caacacaaagaagcuguca

SEQ ID NO: 596901 - RNA, 19 nt, Homo sapiens
  misc_RNA (1)...(19): siRNA sense strand
aagaucaucaacacaaaga

SEQ ID NO: 596902 - RNA, 19 nt, Homo sapiens
  misc_RNA (1)...(19): siRNA sense strand
ugauugaagccauaagcaa

SEQ ID NO: 596903 - RNA, 19 nt, Homo sapiens
  misc_RNA (1)...(19): siRNA sense strand
gaccguggacugccugaag

SEQ ID NO: 596904 - RNA, 19 nt, Homo sapiens
  misc_RNA (1)...(19): siRNA sense strand
caagaucaucaacacaaag

SEQ ID NO: 596905 - RNA, 19 nt, Homo sapiens
  misc_RNA (1)...(19): siRNA sense strand
aaacugaagggagccauuc

SEQ ID NO: 596906 - RNA, 19 nt, Homo sapiens
  misc_RNA (1)...(19): siRNA sense strand
uggcaugacagccuucgaa

SEQ ID NO: 596907 - RNA, 19 nt, Homo sapiens
  misc_RNA (1)...(19): siRNA sense strand
guaccagcucuucgaggaa

SEQ ID NO: 596908 - RNA, 19 nt, Homo sapiens
  misc_RNA (1)...(19): siRNA sense strand
ggacuuccaucgauucuau

SEQ ID NO: 596909 - RNA, 19 nt, Homo sapiens
  misc_RNA (1)...(19): siRNA sense strand
gaagagcgauggugugaag

SEQ ID NO: 596910 - RNA, 19 nt, Homo sapiens
  misc_RNA (1)...(19): siRNA sense strand
ugacagagcagcugauuga

SEQ ID NO: 596911 - RNA, 19 nt, Homo sapiens
  misc_RNA (1)...(19): siRNA sense strand
aauaagaugcugaccauua

SEQ ID NO: 596912 - RNA, 19 nt, Homo sapiens
  misc_RNA (1)...(19): siRNA sense strand
auaagaugcugaccauuaa

SEQ ID NO: 596913 - RNA, 19 nt, Homo sapiens
  misc_RNA (1)...(19): siRNA sense strand
ggaguaugcugccaagauc

SEQ ID NO: 596914 - RNA, 19 nt, Homo sapiens
  misc_RNA (1)...(19): siRNA sense strand
gcggaaacaggaaauuaua

SEQ ID NO: 596915 - RNA, 19 nt, Homo sapiens
  misc_RNA (1)...(19): siRNA sense strand
ccaagaucaucaacacaaa

SEQ ID NO: 596916 - RNA, 19 nt, Homo sapiens
  misc_RNA (1)...(19): siRNA sense strand
ucaauaagaugcugaccau

SEQ ID NO: 596917 - RNA, 19 nt, Homo sapiens
  misc_RNA (1)...(19): siRNA sense strand
ggacaccacuaccugaucu

SEQ ID NO: 596918 - RNA, 19 nt, Homo sapiens
  misc_RNA (1)...(19): siRNA sense strand
gcagcugauugaagccaua

SEQ ID NO: 596919 - RNA, 19 nt, Homo sapiens
  misc_RNA (1)...(19): siRNA sense strand
ggaacuguuugaagauauc

SEQ ID NO: 596920 - RNA, 19 nt, Homo sapiens
  misc_RNA (1)...(19): siRNA sense strand
gggaacuguuugaagauau

SEQ ID NO: 596921 - RNA, 19 nt, Homo sapiens
  misc_RNA (1)...(19): siRNA sense strand
cagugaagcuggcagacuu

SEQ ID NO: 596922 - RNA, 19 nt, Homo sapiens
  misc_RNA (1)...(19): siRNA sense strand
cauaagcaauggagauuuu

SEQ ID NO: 596923 - RNA, 19 nt, Homo sapiens
  misc_RNA (1)...(19): siRNA sense strand
gcacaccaccauccugaau

SEQ ID NO: 596924 - RNA, 19 nt, Homo sapiens
  misc_RNA (1)...(19): siRNA sense strand
cagaagugcugcggaagga

SEQ ID NO: 596925 - RNA, 19 nt, Homo sapiens
  misc_RNA (1)...(19): siRNA sense strand
ggaugaagacaccaaagug

SEQ ID NO: 596926 - RNA, 19 nt, Homo sapiens
  misc_RNA (1)...(19): siRNA sense strand
caacaucguccgacuacau

SEQ ID NO: 596927 - RNA, 19 nt, Homo sapiens
  misc_RNA (1)...(19): siRNA sense strand
gugcggaaacaggaaauua

SEQ ID NO: 596928 - RNA, 19 nt, Homo sapiens
  misc_RNA (1)...(19): siRNA sense strand
gaaacugaagggagccauu

SEQ ID NO: 596929 - RNA, 19 nt, Homo sapiens
  misc_RNA (1)...(19): siRNA sense strand
gccaagaucaucaacacaa

SEQ ID NO: 596930 - RNA, 19 nt, Homo sapiens
  misc_RNA (1)...(19): siRNA sense strand
gcaggcaugguuuggguuu

SEQ ID NO: 596931 - RNA, 19 nt, Homo sapiens
  misc_RNA (1)...(19): siRNA sense strand
gaucguccacuuccacaga

SEQ ID NO: 596932 - RNA, 19 nt, Homo sapiens
  misc_RNA (1)...(19): siRNA sense strand
uggacugccugaagaaguu

SEQ ID NO: 596933 - RNA, 19 nt, Homo sapiens
  misc_RNA (1)...(19): siRNA sense strand
cggaaacaggaaauuauaa

SEQ ID NO: 596934 - RNA, 19 nt, Homo sapiens
  misc_RNA (1)...(19): siRNA sense strand
gagccauucucaccacgau

SEQ ID NO: 596935 - RNA, 19 nt, Homo sapiens
  misc_RNA (1)...(19): siRNA sense strand
gaucaucaacacaaagaag

SEQ ID NO: 596936 - RNA, 19 nt, Homo sapiens
  misc_RNA (1)...(19): siRNA sense strand
gugcgacccuggcaugaca

SEQ ID NO: 596937 - RNA, 19 nt, Homo sapiens
  misc_RNA (1)...(19): siRNA sense strand
gagcagcaggcaugguuug

SEQ ID NO: 596938 - RNA, 19 nt, Homo sapiens
  misc_RNA (1)...(19): siRNA sense strand
gggagcagcaggcaugguu

SEQ ID NO: 596939 - RNA, 19 nt, Homo sapiens
  misc_RNA (1)...(19): siRNA sense strand
gcaccaacaccaccaucga

SEQ ID NO: 596940 - RNA, 19 nt, Homo sapiens
  misc_RNA (1)...(19): siRNA sense strand
gaccauuaacccauccaaa

SEQ ID NO: 596941 - RNA, 19 nt, Homo sapiens
  misc_RNA (1)...(19): siRNA sense strand
caacaccaccaucgaggau

SEQ ID NO: 596942 - RNA, 19 nt, Homo sapiens
  misc_RNA (1)...(19): siRNA sense strand
ggggaacuguuugaagaua

SEQ ID NO: 596943 - RNA, 19 nt, Homo sapiens
  misc_RNA (1)...(19): siRNA sense strand
ggauaucucuccccagaag

SEQ ID NO: 596944 - RNA, 19 nt, Homo sapiens
  misc_RNA (1)...(19): siRNA sense strand
aagaagagcgaugguguga

SEQ ID NO: 596945 - RNA, 19 nt, Homo sapiens
  misc_RNA (1)...(19): siRNA sense strand
caaagugcggaaacaggaa

SEQ ID NO: 596946 - RNA, 19 nt, Homo sapiens
  misc_RNA (1)...(19): siRNA sense strand
ggaccugaagccugagaau

SEQ ID NO: 596947 - RNA, 19 nt, Homo sapiens
  misc_RNA (1)...(19): siRNA sense strand
aauggcagaucguccacuu

SEQ ID NO: 596948 - RNA, 19 nt, Homo sapiens
  misc_RNA (1)...(19): siRNA sense strand
acaccaaagugcggaaaca

SEQ ID NO: 596949 - RNA, 19 nt, Homo sapiens
  misc_RNA (1)...(19): siRNA sense strand
ccagagaccaucagaagcu

SEQ ID NO: 596950 - RNA, 19 nt, Homo sapiens
  misc_RNA (1)...(19): siRNA sense strand
ggagcagcaggcaugguuu

SEQ ID NO: 596951 - RNA, 19 nt, Homo sapiens
  misc_RNA (1)...(19): siRNA sense strand
cagaggagggacaccacua

SEQ ID NO: 596952 - RNA, 19 nt, Homo sapiens
  misc_RNA (1)...(19): siRNA sense strand
caagggugccgcagugaag

SEQ ID NO: 596953 - RNA, 19 nt, Homo sapiens
  misc_RNA (1)...(19): siRNA sense strand
guggggaacuguuugaaga

SEQ ID NO: 596954 - RNA, 19 nt, Homo sapiens
  misc_RNA (1)...(19): siRNA sense strand
cauccugcaugcacagaca

SEQ ID NO: 596955 - RNA, 19 nt, Homo sapiens
  misc_RNA (1)...(19): siRNA sense strand
uaccagcucuucgaggaau

SEQ ID NO: 596956 - RNA, 19 nt, Homo sapiens
  misc_RNA (1)...(19): siRNA sense strand
caacacaaagaagcuguca

SEQ ID NO: 596957 - RNA, 19 nt, Homo sapiens
  misc_RNA (1)...(19): siRNA sense strand
aagaucaucaacacaaaga

SEQ ID NO: 596958 - RNA, 19 nt, Homo sapiens
  misc_RNA (1)...(19): siRNA sense strand
ugauugaagccauaagcaa

SEQ ID NO: 596959 - RNA, 19 nt, Homo sapiens
  misc_RNA (1)...(19): siRNA sense strand
gaccguggacugccugaag

SEQ ID NO: 596960 - RNA, 19 nt, Homo sapiens
  misc_RNA (1)...(19): siRNA sense strand
caagaucaucaacacaaag

SEQ ID NO: 596961 - RNA, 19 nt, Homo sapiens
  misc_RNA (1)...(19): siRNA sense strand
aaacugaagggagccauuc

SEQ ID NO: 596962 - RNA, 19 nt, Homo sapiens
  misc_RNA (1)...(19): siRNA sense strand
uggcaugacagccuucgaa

SEQ ID NO: 596963 - RNA, 19 nt, Homo sapiens
  misc_RNA (1)...(19): siRNA sense strand
guaccagcucuucgaggaa

SEQ ID NO: 596964 - RNA, 19 nt, Homo sapiens
  misc_RNA (1)...(19): siRNA sense strand
gaaauacucuucauucaag

SEQ ID NO: 596965 - RNA, 19 nt, Homo sapiens
  misc_RNA (1)...(19): siRNA sense strand
ggacuaugcuaugaauuua

SEQ ID NO: 596966 - RNA, 19 nt, Homo sapiens
  misc_RNA (1)...(19): siRNA sense strand
gagaagcacuggauccaaa

SEQ ID NO: 596967 - RNA, 19 nt, Homo sapiens
  misc_RNA (1)...(19): siRNA sense strand
cagauggaaucacaaauaa

SEQ ID NO: 596968 - RNA, 19 nt, Homo sapiens
  misc_RNA (1)...(19): siRNA sense strand
gaaacaaggugauguacag

SEQ ID NO: 596969 - RNA, 19 nt, Homo sapiens
  misc_RNA (1)...(19): siRNA sense strand
gaagagaugacuuggauga

SEQ ID NO: 596970 - RNA, 19 nt, Homo sapiens
  misc_RNA (1)...(19): siRNA sense strand
acaacuaccuggcauauga

SEQ ID NO: 596971 - RNA, 19 nt, Homo sapiens
  misc_RNA (1)...(19): siRNA sense strand
ugaaggagauucuuuccaa

SEQ ID NO: 596972 - RNA, 19 nt, Homo sapiens
  misc_RNA (1)...(19): siRNA sense strand
gauguacaguucauugauu

SEQ ID NO: 596973 - RNA, 19 nt, Homo sapiens
  misc_RNA (1)...(19): siRNA sense strand
gaaacaccauggaggaugu

SEQ ID NO: 596974 - RNA, 19 nt, Homo sapiens
  misc_RNA (1)...(19): siRNA sense strand
gguaugcaauuguucguuu

SEQ ID NO: 596975 - RNA, 19 nt, Homo sapiens
  misc_RNA (1)...(19): siRNA sense strand
gcagaugaagacauuaaua

SEQ ID NO: 596976 - RNA, 19 nt, Homo sapiens
  misc_RNA (1)...(19): siRNA sense strand
ggacugaaguuacugaaaa

SEQ ID NO: 596977 - RNA, 19 nt, Homo sapiens
  misc_RNA (1)...(19): siRNA sense strand
ccacaggauuugcagauga

SEQ ID NO: 596978 - RNA, 19 nt, Homo sapiens
  misc_RNA (1)...(19): siRNA sense strand
guagaaauacucuucauuc

SEQ ID NO: 596979 - RNA, 19 nt, Homo sapiens
  misc_RNA (1)...(19): siRNA sense strand
cauaaugaccuauugugua

SEQ ID NO: 596980 - RNA, 19 nt, Homo sapiens
  misc_RNA (1)...(19): siRNA sense strand
ggcuaaagaugggaaagua

SEQ ID NO: 596981 - RNA, 19 nt, Homo sapiens
  misc_RNA (1)...(19): siRNA sense strand
acagauggaaucacaaaua

SEQ ID NO: 596982 - RNA, 19 nt, Homo sapiens
  misc_RNA (1)...(19): siRNA sense strand
guaaagaguuuucgagugu

SEQ ID NO: 596983 - RNA, 19 nt, Homo sapiens
  misc_RNA (1)...(19): siRNA sense strand
gggcucaccuguugugcuu

SEQ ID NO: 596984 - RNA, 19 nt, Homo sapiens
  misc_RNA (1)...(19): siRNA sense strand
ugacuuggaugaaggagau

SEQ ID NO: 596985 - RNA, 19 nt, Homo sapiens
  misc_RNA (1)...(19): siRNA sense strand
ggugagaauuuauggcaau

SEQ ID NO: 596986 - RNA, 19 nt, Homo sapiens
  misc_RNA (1)...(19): siRNA sense strand
gucaguggcugcgugcuua

SEQ ID NO: 596987 - RNA, 19 nt, Homo sapiens
  misc_RNA (1)...(19): siRNA sense strand
ugagugauguagacuauag

SEQ ID NO: 596988 - RNA, 19 nt, Homo sapiens
  misc_RNA (1)...(19): siRNA sense strand
cgaucgagaugaggaagua

SEQ ID NO: 596989 - RNA, 19 nt, Homo sapiens
  misc_RNA (1)...(19): siRNA sense strand
caacucuacuguaccuuca

SEQ ID NO: 596990 - RNA, 19 nt, Homo sapiens
  misc_RNA (1)...(19): siRNA sense strand
auagagaacuacagaguca

SEQ ID NO: 596991 - RNA, 19 nt, Homo sapiens
  misc_RNA (1)...(19): siRNA sense strand
gcucaccuguugugcuuug

SEQ ID NO: 596992 - RNA, 19 nt, Homo sapiens
  misc_RNA (1)...(19): siRNA sense strand
uacuguaccuucaauaaug

SEQ ID NO: 596993 - RNA, 19 nt, Homo sapiens
  misc_RNA (1)...(19): siRNA sense strand
ggagguagaaauacucuuc

SEQ ID NO: 596994 - RNA, 19 nt, Homo sapiens
  misc_RNA (1)...(19): siRNA sense strand
ugagaaacaaggugaugua

SEQ ID NO: 596995 - RNA, 19 nt, Homo sapiens
  misc_RNA (1)...(19): siRNA sense strand
gcaccacaacucuacugua

SEQ ID NO: 596996 - RNA, 19 nt, Homo sapiens
  misc_RNA (1)...(19): siRNA sense strand
gugagaauuuauggcaaua

SEQ ID NO: 596997 - RNA, 19 nt, Homo sapiens
  misc_RNA (1)...(19): siRNA sense strand
aggaagagaugacuuggau

SEQ ID NO: 596998 - RNA, 19 nt, Homo sapiens
  misc_RNA (1)...(19): siRNA sense strand
caccacaacucuacuguac

SEQ ID NO: 596999 - RNA, 19 nt, Homo sapiens
  misc_RNA (1)...(19): siRNA sense strand
gauggaaucacaaauaaac

SEQ ID NO: 597000 - RNA, 19 nt, Homo sapiens
  misc_RNA (1)...(19): siRNA sense strand
aaccugggcucaccuguug

SEQ ID NO: 597001 - RNA, 19 nt, Homo sapiens
  misc_RNA (1)...(19): siRNA sense strand
cuaaagaugggaaaguauu

SEQ ID NO: 597002 - RNA, 19 nt, Homo sapiens
  misc_RNA (1)...(19): siRNA sense strand
ucacagauggaaucacaaa

SEQ ID NO: 597003 - RNA, 19 nt, Homo sapiens
  misc_RNA (1)...(19): siRNA sense strand
caagccaaauacuccacua

SEQ ID NO: 597004 - RNA, 19 nt, Homo sapiens
  misc_RNA (1)...(19): siRNA sense strand
ugcauuggcuucucauuuc

SEQ ID NO: 597005 - RNA, 19 nt, Homo sapiens
  misc_RNA (1)...(19): siRNA sense strand
acaaggugauguacaguuc

SEQ ID NO: 597006 - RNA, 19 nt, Homo sapiens
  misc_RNA (1)...(19): siRNA sense strand
cugcagcucuucacagaug

SEQ ID NO: 597007 - RNA, 19 nt, Homo sapiens
  misc_RNA (1)...(19): siRNA sense strand
auaauggacuaugcuauga

SEQ ID NO: 597008 - RNA, 19 nt, Homo sapiens
  misc_RNA (1)...(19): siRNA sense strand
ccagauagagaacuacaga

SEQ ID NO: 597009 - RNA, 19 nt, Homo sapiens
  misc_RNA (1)...(19): siRNA sense strand
ccuugaagccuacaaagaa

SEQ ID NO: 597010 - RNA, 19 nt, Homo sapiens
  misc_RNA (1)...(19): siRNA sense strand
gguagaaauacucuucauu

SEQ ID NO: 597011 - RNA, 19 nt, Homo sapiens
  misc_RNA (1)...(19): siRNA sense strand
ugaaaaggagguagaaaua

SEQ ID NO: 597012 - RNA, 19 nt, Homo sapiens
  misc_RNA (1)...(19): siRNA sense strand
gaugaggaaguaaagaguu

SEQ ID NO: 597013 - RNA, 19 nt, Homo sapiens
  misc_RNA (1)...(19): siRNA sense strand
ucauucaagucaaucaguu

SEQ ID NO: 597014 - RNA, 19 nt, Homo sapiens
  misc_RNA (1)...(19): siRNA sense strand
gcugcgugcuuaccuugaa

SEQ ID NO: 597015 - RNA, 19 nt, Homo sapiens
  misc_RNA (1)...(19): siRNA sense strand
ugaauauucuggauacaac

SEQ ID NO: 597016 - RNA, 19 nt, Homo sapiens
  misc_RNA (1)...(19): siRNA sense strand
ggaugaaggagauucuuuc

SEQ ID NO: 597017 - RNA, 19 nt, Homo sapiens
  misc_RNA (1)...(19): siRNA sense strand
cacaggauuugcagaugaa

SEQ ID NO: 597018 - RNA, 19 nt, Homo sapiens
  misc_RNA (1)...(19): siRNA sense strand
uggacuaugcuaugaauuu

SEQ ID NO: 597019 - RNA, 19 nt, Homo sapiens
  misc_RNA (1)...(19): siRNA sense strand
ccacaacucuacuguaccu

SEQ ID NO: 597020 - RNA, 19 nt, Homo sapiens
  misc_RNA (1)...(19): siRNA sense strand
gccugagguuacugcauua

SEQ ID NO: 597021 - RNA, 19 nt, Homo sapiens
  misc_RNA (1)...(19): siRNA sense strand
aaugaccuauuguguaaga

SEQ ID NO: 597022 - RNA, 19 nt, Homo sapiens
  misc_RNA (1)...(19): siRNA sense strand
aauaaaagguuccuaagug

SEQ ID NO: 597023 - RNA, 19 nt, Homo sapiens
  misc_RNA (1)...(19): siRNA sense strand
cuucacagauggaaucaca

SEQ ID NO: 597024 - RNA, 19 nt, Homo sapiens
  misc_RNA (1)...(19): siRNA sense strand
gauacaacuaccuggcaua

SEQ ID NO: 597025 - RNA, 19 nt, Homo sapiens
  misc_RNA (1)...(19): siRNA sense strand
ccacuauugaguuugauuu

SEQ ID NO: 597026 - RNA, 19 nt, Homo sapiens
  misc_RNA (1)...(19): siRNA sense strand
ugaagccuacaaagaauuu

SEQ ID NO: 597027 - RNA, 19 nt, Homo sapiens
  misc_RNA (1)...(19): siRNA sense strand
guaguccuggugagaauuu

SEQ ID NO: 597028 - RNA, 19 nt, Homo sapiens
  misc_RNA (1)...(19): siRNA sense strand
ugugagugauguagacuau

SEQ ID NO: 597029 - RNA, 19 nt, Homo sapiens
  misc_RNA (1)...(19): siRNA sense strand
augaggaaguaaagaguuu

SEQ ID NO: 597030 - RNA, 19 nt, Homo sapiens
  misc_RNA (1)...(19): siRNA sense strand
gaaggauccaccagucugu

SEQ ID NO: 597031 - RNA, 19 nt, Homo sapiens
  misc_RNA (1)...(19): siRNA sense strand
gagaugaggaaguaaagag

SEQ ID NO: 597032 - RNA, 19 nt, Homo sapiens
  misc_RNA (1)...(19): siRNA sense strand
ucaauaauggacuaugcua

SEQ ID NO: 597033 - RNA, 19 nt, Homo sapiens
  misc_RNA (1)...(19): siRNA sense strand
gcuaaagaugggaaaguau

SEQ ID NO: 597034 - RNA, 19 nt, Homo sapiens
  misc_RNA (1)...(19): siRNA sense strand
agccugagguuacugcauu

SEQ ID NO: 597035 - RNA, 19 nt, Homo sapiens
  misc_RNA (1)...(19): siRNA sense strand
gauugugggcuuugauuca

SEQ ID NO: 597036 - RNA, 19 nt, Homo sapiens
  misc_RNA (1)...(19): siRNA sense strand
gcauuggcuucucauuucu

SEQ ID NO: 597037 - RNA, 19 nt, Homo sapiens
  misc_RNA (1)...(19): siRNA sense strand
ggugauguacaguucauug

SEQ ID NO: 597038 - RNA, 19 nt, Homo sapiens
  misc_RNA (1)...(19): siRNA sense strand
guugugcuuugccauaaug

SEQ ID NO: 597039 - RNA, 19 nt, Homo sapiens
  misc_RNA (1)...(19): siRNA sense strand
aauaauggacuaugcuaug

SEQ ID NO: 597040 - RNA, 19 nt, Homo sapiens
  misc_RNA (1)...(19): siRNA sense strand
cauuaaaagugccugagua

SEQ ID NO: 597041 - RNA, 19 nt, Homo sapiens
  misc_RNA (1)...(19): siRNA sense strand
guacaguucauugauuaug

SEQ ID NO: 597042 - RNA, 19 nt, Homo sapiens
  misc_RNA (1)...(19): siRNA sense strand
agagaugacuuggaugaag

SEQ ID NO: 597043 - RNA, 19 nt, Homo sapiens
  misc_RNA (1)...(19): siRNA sense strand
uaccuucaauaauggacua

SEQ ID NO: 597044 - RNA, 19 nt, Homo sapiens
  misc_RNA (1)...(19): siRNA sense strand
ugagguuacugcauuaaaa

SEQ ID NO: 597045 - RNA, 19 nt, Homo sapiens
  misc_RNA (1)...(19): siRNA sense strand
gggauugugggcuuugauu

SEQ ID NO: 597046 - RNA, 19 nt, Homo sapiens
  misc_RNA (1)...(19): siRNA sense strand
gcuuugccauaaugaccua

SEQ ID NO: 597047 - RNA, 19 nt, Homo sapiens
  misc_RNA (1)...(19): siRNA sense strand
gauguaguccuggugagaa

SEQ ID NO: 597048 - RNA, 19 nt, Homo sapiens
  misc_RNA (1)...(19): siRNA sense strand
ucuacuguaccuucaauaa

SEQ ID NO: 597049 - RNA, 19 nt, Homo sapiens
  misc_RNA (1)...(19): siRNA sense strand
caaccugggcucaccuguu

SEQ ID NO: 597050 - RNA, 19 nt, Homo sapiens
  misc_RNA (1)...(19): siRNA sense strand
aaguauuucucucucauuc

SEQ ID NO: 597051 - RNA, 19 nt, Homo sapiens
  misc_RNA (1)...(19): siRNA sense strand
aauggacuaugcuaugaau

SEQ ID NO: 597052 - RNA, 19 nt, Homo sapiens
  misc_RNA (1)...(19): siRNA sense strand
aaaugaagccugagguuac

SEQ ID NO: 597053 - RNA, 19 nt, Homo sapiens
  misc_RNA (1)...(19): siRNA sense strand
gaagccuacaaagaauuua

SEQ ID NO: 597054 - RNA, 19 nt, Homo sapiens
  misc_RNA (1)...(19): siRNA sense strand
cuugaagccuacaaagaau

SEQ ID NO: 597055 - RNA, 19 nt, Homo sapiens
  misc_RNA (1)...(19): siRNA sense strand
gcuccgacaacaggaauuu

SEQ ID NO: 597056 - RNA, 19 nt, Homo sapiens
  misc_RNA (1)...(19): siRNA sense strand
aaagguuccuaagugauau

SEQ ID NO: 597057 - RNA, 19 nt, Homo sapiens
  misc_RNA (1)...(19): siRNA sense strand
cuacuguaccuucaauaau

SEQ ID NO: 597058 - RNA, 19 nt, Homo sapiens
  misc_RNA (1)...(19): siRNA sense strand
guuauuagucgaucgagau

SEQ ID NO: 597059 - RNA, 19 nt, Homo sapiens
  misc_RNA (1)...(19): siRNA sense strand
gcucuucacagauggaauc

SEQ ID NO: 597060 - RNA, 19 nt, Homo sapiens
  misc_RNA (1)...(19): siRNA sense strand
ggagaagcacuggauccaa

SEQ ID NO: 597061 - RNA, 19 nt, Homo sapiens
  misc_RNA (1)...(19): siRNA sense strand
caauaauggacuaugcuau

SEQ ID NO: 597062 - RNA, 19 nt, Homo sapiens
  misc_RNA (1)...(19): siRNA sense strand
ggauguaguccuggugaga

SEQ ID NO: 597063 - RNA, 19 nt, Homo sapiens
  misc_RNA (1)...(19): siRNA sense strand
ccauaaugaccuauugugu

SEQ ID NO: 597064 - RNA, 19 nt, Homo sapiens
  misc_RNA (1)...(19): siRNA sense strand
gaccucagcuccacgaaua

SEQ ID NO: 597065 - RNA, 19 nt, Homo sapiens
  misc_RNA (1)...(19): siRNA sense strand
ucaaauagcagucaagauu

SEQ ID NO: 597066 - RNA, 19 nt, Homo sapiens
  misc_RNA (1)...(19): siRNA sense strand
uacagcagcuacugauuua

SEQ ID NO: 597067 - RNA, 19 nt, Homo sapiens
  misc_RNA (1)...(19): siRNA sense strand
gcauggaguugucuaagga

SEQ ID NO: 597068 - RNA, 19 nt, Homo sapiens
  misc_RNA (1)...(19): siRNA sense strand
ccacgaauaugcccacaga

SEQ ID NO: 597069 - RNA, 19 nt, Homo sapiens
  misc_RNA (1)...(19): siRNA sense strand
gaaacuguguucccugcaa

SEQ ID NO: 597070 - RNA, 19 nt, Homo sapiens
  misc_RNA (1)...(19): siRNA sense strand
gacgaaacuugucggcuuu

SEQ ID NO: 597071 - RNA, 19 nt, Homo sapiens
  misc_RNA (1)...(19): siRNA sense strand
gaauguggcuucggcuaug

SEQ ID NO: 597072 - RNA, 19 nt, Homo sapiens
  misc_RNA (1)...(19): siRNA sense strand
gggagauggugccgacuuu

SEQ ID NO: 597073 - RNA, 19 nt, Homo sapiens
  misc_RNA (1)...(19): siRNA sense strand
ggaguugucuaaggaaugu

SEQ ID NO: 597074 - RNA, 19 nt, Homo sapiens
  misc_RNA (1)...(19): siRNA sense strand
ggagaguggugcugucauc

SEQ ID NO: 597075 - RNA, 19 nt, Homo sapiens
  misc_RNA (1)...(19): siRNA sense strand
ggucacaggacauucagua

SEQ ID NO: 597076 - RNA, 19 nt, Homo sapiens
  misc_RNA (1)...(19): siRNA sense strand
gacaguuuauggagaagaa

SEQ ID NO: 597077 - RNA, 19 nt, Homo sapiens
  misc_RNA (1)...(19): siRNA sense strand
agagacaguuuauggagaa

SEQ ID NO: 597078 - RNA, 19 nt, Homo sapiens
  misc_RNA (1)...(19): siRNA sense strand
guccaucuguggcgaguuu

SEQ ID NO: 597079 - RNA, 19 nt, Homo sapiens
  misc_RNA (1)...(19): siRNA sense strand
ugucaucuauuguaagaga

SEQ ID NO: 597080 - RNA, 19 nt, Homo sapiens
  misc_RNA (1)...(19): siRNA sense strand
cacaggacauucaguacaa

SEQ ID NO: 597081 - RNA, 19 nt, Homo sapiens
  misc_RNA (1)...(19): siRNA sense strand
ggaucggucuggaaacugu

SEQ ID NO: 597082 - RNA, 19 nt, Homo sapiens
  misc_RNA (1)...(19): siRNA sense strand
gcuacuagaacaagagaaa

SEQ ID NO: 597083 - RNA, 19 nt, Homo sapiens
  misc_RNA (1)...(19): siRNA sense strand
uaacaacacacugguagaa

SEQ ID NO: 597084 - RNA, 19 nt, Homo sapiens
  misc_RNA (1)...(19): siRNA sense strand
gaagacauucauucucuca

SEQ ID NO: 597085 - RNA, 19 nt, Homo sapiens
  misc_RNA (1)...(19): siRNA sense strand
uuacagcagcuacugauuu

SEQ ID NO: 597086 - RNA, 19 nt, Homo sapiens
  misc_RNA (1)...(19): siRNA sense strand
ggacugcuugccaggauuu

SEQ ID NO: 597087 - RNA, 19 nt, Homo sapiens
  misc_RNA (1)...(19): siRNA sense strand
gagacccuccuccuccuua

SEQ ID NO: 597088 - RNA, 19 nt, Homo sapiens
  misc_RNA (1)...(19): siRNA sense strand
uaggcuauuugucauguaa

SEQ ID NO: 597089 - RNA, 19 nt, Homo sapiens
  misc_RNA (1)...(19): siRNA sense strand
agacauucauucucucaau

SEQ ID NO: 597090 - RNA, 19 nt, Homo sapiens
  misc_RNA (1)...(19): siRNA sense strand
caggaugcacuaacuauga

SEQ ID NO: 597091 - RNA, 19 nt, Homo sapiens
  misc_RNA (1)...(19): siRNA sense strand
caacacacugguagaauca

SEQ ID NO: 597092 - RNA, 19 nt, Homo sapiens
  misc_RNA (1)...(19): siRNA sense strand
ggaauguggcuucggcuau

SEQ ID NO: 597093 - RNA, 19 nt, Homo sapiens
  misc_RNA (1)...(19): siRNA sense strand
guaagagacaguuuaugga

SEQ ID NO: 597094 - RNA, 19 nt, Homo sapiens
  misc_RNA (1)...(19): siRNA sense strand
cauccucugugucaucuau

SEQ ID NO: 597095 - RNA, 19 nt, Homo sapiens
  misc_RNA (1)...(19): siRNA sense strand
gcucaacgucuuuggauuc

SEQ ID NO: 597096 - RNA, 19 nt, Homo sapiens
  misc_RNA (1)...(19): siRNA sense strand
gacauucauucucucaauc

SEQ ID NO: 597097 - RNA, 19 nt, Homo sapiens
  misc_RNA (1)...(19): siRNA sense strand
ugugucaucuauuguaaga

SEQ ID NO: 597098 - RNA, 19 nt, Homo sapiens
  misc_RNA (1)...(19): siRNA sense strand
acaacacacugguagaauc

SEQ ID NO: 597099 - RNA, 19 nt, Homo sapiens
  misc_RNA (1)...(19): siRNA sense strand
gcuacugauuuaucuagau

SEQ ID NO: 597100 - RNA, 19 nt, Homo sapiens
  misc_RNA (1)...(19): siRNA sense strand
ggauucaaauagcagucaa

SEQ ID NO: 597101 - RNA, 19 nt, Homo sapiens
  misc_RNA (1)...(19): siRNA sense strand
uauaggaagacgaaacuug

SEQ ID NO: 597102 - RNA, 19 nt, Homo sapiens
  misc_RNA (1)...(19): siRNA sense strand
uaaaagugcuacuagaaca

SEQ ID NO: 597103 - RNA, 19 nt, Homo sapiens
  misc_RNA (1)...(19): siRNA sense strand
ucugugucaucuauuguaa

SEQ ID NO: 597104 - RNA, 19 nt, Homo sapiens
  misc_RNA (1)...(19): siRNA sense strand
ugaacucacuggagaagac

SEQ ID NO: 597105 - RNA, 19 nt, Homo sapiens
  misc_RNA (1)...(19): siRNA sense strand
uuacuaggcuauuugucau

SEQ ID NO: 597106 - RNA, 19 nt, Homo sapiens
  misc_RNA (1)...(19): siRNA sense strand
ucagggaucggucuggaaa

SEQ ID NO: 597107 - RNA, 19 nt, Homo sapiens
  misc_RNA (1)...(19): siRNA sense strand
gcuuucagaaggcaaauug

SEQ ID NO: 597108 - RNA, 19 nt, Homo sapiens
  misc_RNA (1)...(19): siRNA sense strand
guggugacaacaucucuuu

SEQ ID NO: 597109 - RNA, 19 nt, Homo sapiens
  misc_RNA (1)...(19): siRNA sense strand
uguaagagacaguuuaugg

SEQ ID NO: 597110 - RNA, 19 nt, Homo sapiens
  misc_RNA (1)...(19): siRNA sense strand
ugagaagccagcuagauca

SEQ ID NO: 597111 - RNA, 19 nt, Homo sapiens
  misc_RNA (1)...(19): siRNA sense strand
ggcauggaguugucuaagg

SEQ ID NO: 597112 - RNA, 19 nt, Homo sapiens
  misc_RNA (1)...(19): siRNA sense strand
ccagcuagaucaggagagu

SEQ ID NO: 597113 - RNA, 19 nt, Homo sapiens
  misc_RNA (1)...(19): siRNA sense strand
gguagaaucagcaucaacu

SEQ ID NO: 597114 - RNA, 19 nt, Homo sapiens
  misc_RNA (1)...(19): siRNA sense strand
cagcagcuacugauuuauc

SEQ ID NO: 597115 - RNA, 19 nt, Homo sapiens
  misc_RNA (1)...(19): siRNA sense strand
ucagaaggcaaauuguuca

SEQ ID NO: 597116 - RNA, 19 nt, Homo sapiens
  misc_RNA (1)...(19): siRNA sense strand
gggacugcuugccaggauu

SEQ ID NO: 597117 - RNA, 19 nt, Homo sapiens
  misc_RNA (1)...(19): siRNA sense strand
ucacaggacauucaguaca

SEQ ID NO: 597118 - RNA, 19 nt, Homo sapiens
  misc_RNA (1)...(19): siRNA sense strand
ggccaggcauggaguuguc

SEQ ID NO: 597119 - RNA, 19 nt, Homo sapiens
  misc_RNA (1)...(19): siRNA sense strand
uucaagacauggagugugu

SEQ ID NO: 597120 - RNA, 19 nt, Homo sapiens
  misc_RNA (1)...(19): siRNA sense strand
ugaaucaggagacuguaga

SEQ ID NO: 597121 - RNA, 19 nt, Homo sapiens
  misc_RNA (1)...(19): siRNA sense strand
gagauggugccgacuuucu

SEQ ID NO: 597122 - RNA, 19 nt, Homo sapiens
  misc_RNA (1)...(19): siRNA sense strand
gcagcuacugauuuaucua

SEQ ID NO: 597123 - RNA, 19 nt, Homo sapiens
  misc_RNA (1)...(19): siRNA sense strand
gcuggucucugcggucaca

SEQ ID NO: 597124 - RNA, 19 nt, Homo sapiens
  misc_RNA (1)...(19): siRNA sense strand
cauggguggugacaacauc

SEQ ID NO: 597125 - RNA, 19 nt, Homo sapiens
  misc_RNA (1)...(19): siRNA sense strand
gauggugccgacuuucuuc

SEQ ID NO: 597126 - RNA, 19 nt, Homo sapiens
  misc_RNA (1)...(19): siRNA sense strand
ggcuauuugucauguaaag

SEQ ID NO: 597127 - RNA, 19 nt, Homo sapiens
  misc_RNA (1)...(19): siRNA sense strand
uagaaucagcaucaacuca

SEQ ID NO: 597128 - RNA, 19 nt, Homo sapiens
  misc_RNA (1)...(19): siRNA sense strand
aguccagucucauucugaa

SEQ ID NO: 597129 - RNA, 19 nt, Homo sapiens
  misc_RNA (1)...(19): siRNA sense strand
gcucauccucugugucauc

SEQ ID NO: 597130 - RNA, 19 nt, Homo sapiens
  misc_RNA (1)...(19): siRNA sense strand
cuaggcuauuugucaugua

SEQ ID NO: 597131 - RNA, 19 nt, Homo sapiens
  misc_RNA (1)...(19): siRNA sense strand
gaugcacuaacuaugagaa

SEQ ID NO: 597132 - RNA, 19 nt, Homo sapiens
  misc_RNA (1)...(19): siRNA sense strand
gaacucacuggagaagaca

SEQ ID NO: 597133 - RNA, 19 nt, Homo sapiens
  misc_RNA (1)...(19): siRNA sense strand
caacucaggaugcacuaac

SEQ ID NO: 597134 - RNA, 19 nt, Homo sapiens
  misc_RNA (1)...(19): siRNA sense strand
guagacagcaagaauucag

SEQ ID NO: 597135 - RNA, 19 nt, Homo sapiens
  misc_RNA (1)...(19): siRNA sense strand
cagcuacugauuuaucuag

SEQ ID NO: 597136 - RNA, 19 nt, Homo sapiens
  misc_RNA (1)...(19): siRNA sense strand
ccaguccagucucauucug

SEQ ID NO: 597137 - RNA, 19 nt, Homo sapiens
  misc_RNA (1)...(19): siRNA sense strand
auaggaagacgaaacuugu

SEQ ID NO: 597138 - RNA, 19 nt, Homo sapiens
  misc_RNA (1)...(19): siRNA sense strand
guuccaguccagucucauu

SEQ ID NO: 597139 - RNA, 19 nt, Homo sapiens
  misc_RNA (1)...(19): siRNA sense strand
ucccauccaugugcuguga

SEQ ID NO: 597140 - RNA, 19 nt, Homo sapiens
  misc_RNA (1)...(19): siRNA sense strand
guauuacuaggcuauuugu

SEQ ID NO: 597141 - RNA, 19 nt, Homo sapiens
  misc_RNA (1)...(19): siRNA sense strand
gaccucagcuccacgaaua

SEQ ID NO: 597142 - RNA, 19 nt, Homo sapiens
  misc_RNA (1)...(19): siRNA sense strand
ucaaauagcagucaagauu

SEQ ID NO: 597143 - RNA, 19 nt, Homo sapiens
  misc_RNA (1)...(19): siRNA sense strand
uacagcagcuacugauuua

SEQ ID NO: 597144 - RNA, 19 nt, Homo sapiens
  misc_RNA (1)...(19): siRNA sense strand
gcauggaguugucuaagga

SEQ ID NO: 597145 - RNA, 19 nt, Homo sapiens
  misc_RNA (1)...(19): siRNA sense strand
ccacgaauaugcccacaga

SEQ ID NO: 597146 - RNA, 19 nt, Homo sapiens
  misc_RNA (1)...(19): siRNA sense strand
gaaacuguguucccugcaa

SEQ ID NO: 597147 - RNA, 19 nt, Homo sapiens
  misc_RNA (1)...(19): siRNA sense strand
gacgaaacuugucggcuuu

SEQ ID NO: 597148 - RNA, 19 nt, Homo sapiens
  misc_RNA (1)...(19): siRNA sense strand
gaauguggcuucggcuaug

SEQ ID NO: 597149 - RNA, 19 nt, Homo sapiens
  misc_RNA (1)...(19): siRNA sense strand
gggagauggugccgacuuu

SEQ ID NO: 597150 - RNA, 19 nt, Homo sapiens
  misc_RNA (1)...(19): siRNA sense strand
ggaguugucuaaggaaugu

SEQ ID NO: 597151 - RNA, 19 nt, Homo sapiens
  misc_RNA (1)...(19): siRNA sense strand
ggagaguggugcugucauc

SEQ ID NO: 597152 - RNA, 19 nt, Homo sapiens
  misc_RNA (1)...(19): siRNA sense strand
ggucacaggacauucagua

SEQ ID NO: 597153 - RNA, 19 nt, Homo sapiens
  misc_RNA (1)...(19): siRNA sense strand
gacaguuuauggagaagaa

SEQ ID NO: 597154 - RNA, 19 nt, Homo sapiens
  misc_RNA (1)...(19): siRNA sense strand
agagacaguuuauggagaa

SEQ ID NO: 597155 - RNA, 19 nt, Homo sapiens
  misc_RNA (1)...(19): siRNA sense strand
guccaucuguggcgaguuu

SEQ ID NO: 597156 - RNA, 19 nt, Homo sapiens
  misc_RNA (1)...(19): siRNA sense strand
ugucaucuauuguaagaga

SEQ ID NO: 597157 - RNA, 19 nt, Homo sapiens
  misc_RNA (1)...(19): siRNA sense strand
cacaggacauucaguacaa

SEQ ID NO: 597158 - RNA, 19 nt, Homo sapiens
  misc_RNA (1)...(19): siRNA sense strand
ggaucggucuggaaacugu

SEQ ID NO: 597159 - RNA, 19 nt, Homo sapiens
  misc_RNA (1)...(19): siRNA sense strand
gcuacuagaacaagagaaa

SEQ ID NO: 597160 - RNA, 19 nt, Homo sapiens
  misc_RNA (1)...(19): siRNA sense strand
uaacaacacacugguagaa

SEQ ID NO: 597161 - RNA, 19 nt, Homo sapiens
  misc_RNA (1)...(19): siRNA sense strand
gaagacauucauucucuca

SEQ ID NO: 597162 - RNA, 19 nt, Homo sapiens
  misc_RNA (1)...(19): siRNA sense strand
uuacagcagcuacugauuu

SEQ ID NO: 597163 - RNA, 19 nt, Homo sapiens
  misc_RNA (1)...(19): siRNA sense strand
ggacugcuugccaggauuu

SEQ ID NO: 597164 - RNA, 19 nt, Homo sapiens
  misc_RNA (1)...(19): siRNA sense strand
gagacccuccuccuccuua

SEQ ID NO: 597165 - RNA, 19 nt, Homo sapiens
  misc_RNA (1)...(19): siRNA sense strand
uaggcuauuugucauguaa

SEQ ID NO: 597166 - RNA, 19 nt, Homo sapiens
  misc_RNA (1)...(19): siRNA sense strand
agacauucauucucucaau

SEQ ID NO: 597167 - RNA, 19 nt, Homo sapiens
  misc_RNA (1)...(19): siRNA sense strand
caggaugcacuaacuauga

SEQ ID NO: 597168 - RNA, 19 nt, Homo sapiens
  misc_RNA (1)...(19): siRNA sense strand
caacacacugguagaauca

SEQ ID NO: 597169 - RNA, 19 nt, Homo sapiens
  misc_RNA (1)...(19): siRNA sense strand
ggaauguggcuucggcuau

SEQ ID NO: 597170 - RNA, 19 nt, Homo sapiens
  misc_RNA (1)...(19): siRNA sense strand
guaagagacaguuuaugga

SEQ ID NO: 597171 - RNA, 19 nt, Homo sapiens
  misc_RNA (1)...(19): siRNA sense strand
cauccucugugucaucuau

SEQ ID NO: 597172 - RNA, 19 nt, Homo sapiens
  misc_RNA (1)...(19): siRNA sense strand
gcucaacgucuuuggauuc

SEQ ID NO: 597173 - RNA, 19 nt, Homo sapiens
  misc_RNA (1)...(19): siRNA sense strand
gacauucauucucucaauc

SEQ ID NO: 597174 - RNA, 19 nt, Homo sapiens
  misc_RNA (1)...(19): siRNA sense strand
ugugucaucuauuguaaga

SEQ ID NO: 597175 - RNA, 19 nt, Homo sapiens
  misc_RNA (1)...(19): siRNA sense strand
acaacacacugguagaauc

SEQ ID NO: 597176 - RNA, 19 nt, Homo sapiens
  misc_RNA (1)...(19): siRNA sense strand
gcuacugauuuaucuagau

SEQ ID NO: 597177 - RNA, 19 nt, Homo sapiens
  misc_RNA (1)...(19): siRNA sense strand
ggauucaaauagcagucaa

SEQ ID NO: 597178 - RNA, 19 nt, Homo sapiens
  misc_RNA (1)...(19): siRNA sense strand
uauaggaagacgaaacuug

SEQ ID NO: 597179 - RNA, 19 nt, Homo sapiens
  misc_RNA (1)...(19): siRNA sense strand
uaaaagugcuacuagaaca

SEQ ID NO: 597180 - RNA, 19 nt, Homo sapiens
  misc_RNA (1)...(19): siRNA sense strand
ucugugucaucuauuguaa

SEQ ID NO: 597181 - RNA, 19 nt, Homo sapiens
  misc_RNA (1)...(19): siRNA sense strand
ugaacucacuggagaagac

SEQ ID NO: 597182 - RNA, 19 nt, Homo sapiens
  misc_RNA (1)...(19): siRNA sense strand
uuacuaggcuauuugucau

SEQ ID NO: 597183 - RNA, 19 nt, Homo sapiens
  misc_RNA (1)...(19): siRNA sense strand
ucagggaucggucuggaaa

SEQ ID NO: 597184 - RNA, 19 nt, Homo sapiens
  misc_RNA (1)...(19): siRNA sense strand
gcuuucagaaggcaaauug

SEQ ID NO: 597185 - RNA, 19 nt, Homo sapiens
  misc_RNA (1)...(19): siRNA sense strand
guggugacaacaucucuuu

SEQ ID NO: 597186 - RNA, 19 nt, Homo sapiens
  misc_RNA (1)...(19): siRNA sense strand
uguaagagacaguuuaugg

SEQ ID NO: 597187 - RNA, 19 nt, Homo sapiens
  misc_RNA (1)...(19): siRNA sense strand
ugagaagccagcuagauca

SEQ ID NO: 597188 - RNA, 19 nt, Homo sapiens
  misc_RNA (1)...(19): siRNA sense strand
ggcauggaguugucuaagg

SEQ ID NO: 597189 - RNA, 19 nt, Homo sapiens
  misc_RNA (1)...(19): siRNA sense strand
ccagcuagaucaggagagu

SEQ ID NO: 597190 - RNA, 19 nt, Homo sapiens
  misc_RNA (1)...(19): siRNA sense strand
gguagaaucagcaucaacu

SEQ ID NO: 597191 - RNA, 19 nt, Homo sapiens
  misc_RNA (1)...(19): siRNA sense strand
cagcagcuacugauuuauc

SEQ ID NO: 597192 - RNA, 19 nt, Homo sapiens
  misc_RNA (1)...(19): siRNA sense strand
ucagaaggcaaauuguuca

SEQ ID NO: 597193 - RNA, 19 nt, Homo sapiens
  misc_RNA (1)...(19): siRNA sense strand
gggacugcuugccaggauu

SEQ ID NO: 597194 - RNA, 19 nt, Homo sapiens
  misc_RNA (1)...(19): siRNA sense strand
ucacaggacauucaguaca

SEQ ID NO: 597195 - RNA, 19 nt, Homo sapiens
  misc_RNA (1)...(19): siRNA sense strand
ggccaggcauggaguuguc

SEQ ID NO: 597196 - RNA, 19 nt, Homo sapiens
  misc_RNA (1)...(19): siRNA sense strand
uucaagacauggagugugu

SEQ ID NO: 597197 - RNA, 19 nt, Homo sapiens
  misc_RNA (1)...(19): siRNA sense strand
ugaaucaggagacuguaga

SEQ ID NO: 597198 - RNA, 19 nt, Homo sapiens
  misc_RNA (1)...(19): siRNA sense strand
gagauggugccgacuuucu

SEQ ID NO: 597199 - RNA, 19 nt, Homo sapiens
  misc_RNA (1)...(19): siRNA sense strand
gcagcuacugauuuaucua

SEQ ID NO: 597200 - RNA, 19 nt, Homo sapiens
  misc_RNA (1)...(19): siRNA sense strand
gcuggucucugcggucaca

SEQ ID NO: 597201 - RNA, 19 nt, Homo sapiens
  misc_RNA (1)...(19): siRNA sense strand
cauggguggugacaacauc

SEQ ID NO: 597202 - RNA, 19 nt, Homo sapiens
  misc_RNA (1)...(19): siRNA sense strand
gauggugccgacuuucuuc

SEQ ID NO: 597203 - RNA, 19 nt, Homo sapiens
  misc_RNA (1)...(19): siRNA sense strand
ggcuauuugucauguaaag

SEQ ID NO: 597204 - RNA, 19 nt, Homo sapiens
  misc_RNA (1)...(19): siRNA sense strand
uagaaucagcaucaacuca

SEQ ID NO: 597205 - RNA, 19 nt, Homo sapiens
  misc_RNA (1)...(19): siRNA sense strand
aguccagucucauucugaa

SEQ ID NO: 597206 - RNA, 19 nt, Homo sapiens
  misc_RNA (1)...(19): siRNA sense strand
gcucauccucugugucauc

SEQ ID NO: 597207 - RNA, 19 nt, Homo sapiens
  misc_RNA (1)...(19): siRNA sense strand
cuaggcuauuugucaugua

SEQ ID NO: 597208 - RNA, 19 nt, Homo sapiens
  misc_RNA (1)...(19): siRNA sense strand
gaugcacuaacuaugagaa

SEQ ID NO: 597209 - RNA, 19 nt, Homo sapiens
  misc_RNA (1)...(19): siRNA sense strand
gaacucacuggagaagaca

SEQ ID NO: 597210 - RNA, 19 nt, Homo sapiens
  misc_RNA (1)...(19): siRNA sense strand
caacucaggaugcacuaac

SEQ ID NO: 597211 - RNA, 19 nt, Homo sapiens
  misc_RNA (1)...(19): siRNA sense strand
guagacagcaagaauucag

SEQ ID NO: 597212 - RNA, 19 nt, Homo sapiens
  misc_RNA (1)...(19): siRNA sense strand
cagcuacugauuuaucuag

SEQ ID NO: 597213 - RNA, 19 nt, Homo sapiens
  misc_RNA (1)...(19): siRNA sense strand
ccaguccagucucauucug

SEQ ID NO: 597214 - RNA, 19 nt, Homo sapiens
  misc_RNA (1)...(19): siRNA sense strand
auaggaagacgaaacuugu

SEQ ID NO: 597215 - RNA, 19 nt, Homo sapiens
  misc_RNA (1)...(19): siRNA sense strand
guuccaguccagucucauu

SEQ ID NO: 597216 - RNA, 19 nt, Homo sapiens
  misc_RNA (1)...(19): siRNA sense strand
ucccauccaugugcuguga

SEQ ID NO: 597217 - RNA, 19 nt, Homo sapiens
  misc_RNA (1)...(19): siRNA sense strand
guauuacuaggcuauuugu

SEQ ID NO: 597218 - RNA, 19 nt, Homo sapiens
  misc_RNA (1)...(19): siRNA sense strand
gcagggagaucgagucuau

SEQ ID NO: 597219 - RNA, 19 nt, Homo sapiens
  misc_RNA (1)...(19): siRNA sense strand
ucuauacgcugaagaaauu

SEQ ID NO: 597220 - RNA, 19 nt, Homo sapiens
  misc_RNA (1)...(19): siRNA sense strand
ccgaaucaccaucaagaaa

SEQ ID NO: 597221 - RNA, 19 nt, Homo sapiens
  misc_RNA (1)...(19): siRNA sense strand
ucaagaaacgcuucaaggu

SEQ ID NO: 597222 - RNA, 19 nt, Homo sapiens
  misc_RNA (1)...(19): siRNA sense strand
gaaucaccaucaagaaacg

SEQ ID NO: 597223 - RNA, 19 nt, Homo sapiens
  misc_RNA (1)...(19): siRNA sense strand
gagucuauacgcugaagaa

SEQ ID NO: 597224 - RNA, 19 nt, Homo sapiens
  misc_RNA (1)...(19): siRNA sense strand
cgacaccgaaucaccauca

SEQ ID NO: 597225 - RNA, 19 nt, Homo sapiens
  misc_RNA (1)...(19): siRNA sense strand
caccgaaucaccaucaaga

SEQ ID NO: 597226 - RNA, 19 nt, Homo sapiens
  misc_RNA (1)...(19): siRNA sense strand
cgaaucaccaucaagaaac

SEQ ID NO: 597227 - RNA, 19 nt, Homo sapiens
  misc_RNA (1)...(19): siRNA sense strand
gacaccgaaucaccaucaa

SEQ ID NO: 597228 - RNA, 19 nt, Homo sapiens
  misc_RNA (1)...(19): siRNA sense strand
gagcagggagaucgagucu

SEQ ID NO: 597229 - RNA, 19 nt, Homo sapiens
  misc_RNA (1)...(19): siRNA sense strand
ugaggaggauguagcauua

SEQ ID NO: 597230 - RNA, 19 nt, Homo sapiens
  misc_RNA (1)...(19): siRNA sense strand
gguaugauguuugugaaua

SEQ ID NO: 597231 - RNA, 19 nt, Homo sapiens
  misc_RNA (1)...(19): siRNA sense strand
gcauuaacuucauauggua

SEQ ID NO: 597232 - RNA, 19 nt, Homo sapiens
  misc_RNA (1)...(19): siRNA sense strand
gaccagagguaugauguuu

SEQ ID NO: 597233 - RNA, 19 nt, Homo sapiens
  misc_RNA (1)...(19): siRNA sense strand
gcucaugccuccaaucuag

SEQ ID NO: 597234 - RNA, 19 nt, Homo sapiens
  misc_RNA (1)...(19): siRNA sense strand
ggaaggcucaucuuuauca

SEQ ID NO: 597235 - RNA, 19 nt, Homo sapiens
  misc_RNA (1)...(19): siRNA sense strand
gcaagaugcaggaggagua

SEQ ID NO: 597236 - RNA, 19 nt, Homo sapiens
  misc_RNA (1)...(19): siRNA sense strand
cauggaaggcucaucuuua

SEQ ID NO: 597237 - RNA, 19 nt, Homo sapiens
  misc_RNA (1)...(19): siRNA sense strand
guaugugacucucaucaug

SEQ ID NO: 597238 - RNA, 19 nt, Homo sapiens
  misc_RNA (1)...(19): siRNA sense strand
ccagagguaugauguuugu

SEQ ID NO: 597239 - RNA, 19 nt, Homo sapiens
  misc_RNA (1)...(19): siRNA sense strand
ggacgacaauucugugcau

SEQ ID NO: 597240 - RNA, 19 nt, Homo sapiens
  misc_RNA (1)...(19): siRNA sense strand
ggauguagcauuaacuuca

SEQ ID NO: 597241 - RNA, 19 nt, Homo sapiens
  misc_RNA (1)...(19): siRNA sense strand
guacgcuacuuucucuuug

SEQ ID NO: 597242 - RNA, 19 nt, Homo sapiens
  misc_RNA (1)...(19): siRNA sense strand
caauguggacuuuguugua

SEQ ID NO: 597243 - RNA, 19 nt, Homo sapiens
  misc_RNA (1)...(19): siRNA sense strand
gcuauugguugcagucugu

SEQ ID NO: 597244 - RNA, 19 nt, Homo sapiens
  misc_RNA (1)...(19): siRNA sense strand
gagguaugauguuugugaa

SEQ ID NO: 597245 - RNA, 19 nt, Homo sapiens
  misc_RNA (1)...(19): siRNA sense strand
gcauggaaggcucaucuuu

SEQ ID NO: 597246 - RNA, 19 nt, Homo sapiens
  misc_RNA (1)...(19): siRNA sense strand
ucacaauucugcuacucuu

SEQ ID NO: 597247 - RNA, 19 nt, Homo sapiens
  misc_RNA (1)...(19): siRNA sense strand
ucaucgagcucaaucaaca

SEQ ID NO: 597248 - RNA, 19 nt, Homo sapiens
  misc_RNA (1)...(19): siRNA sense strand
gauguagcauuaacuucau

SEQ ID NO: 597249 - RNA, 19 nt, Homo sapiens
  misc_RNA (1)...(19): siRNA sense strand
auggaaggcucaucuuuau

SEQ ID NO: 597250 - RNA, 19 nt, Homo sapiens
  misc_RNA (1)...(19): siRNA sense strand
ucacugugcucuucuccau

SEQ ID NO: 597251 - RNA, 19 nt, Homo sapiens
  misc_RNA (1)...(19): siRNA sense strand
gaggauguagcauuaacuu

SEQ ID NO: 597252 - RNA, 19 nt, Homo sapiens
  misc_RNA (1)...(19): siRNA sense strand
ccagcucaauguggacuuu

SEQ ID NO: 597253 - RNA, 19 nt, Homo sapiens
  misc_RNA (1)...(19): siRNA sense strand
agacaggagugcccuuuac

SEQ ID NO: 597254 - RNA, 19 nt, Homo sapiens
  misc_RNA (1)...(19): siRNA sense strand
ucucuuugcucucuguuuc

SEQ ID NO: 597255 - RNA, 19 nt, Homo sapiens
  misc_RNA (1)...(19): siRNA sense strand
ugauggcccucacauucuu

SEQ ID NO: 597256 - RNA, 19 nt, Homo sapiens
  misc_RNA (1)...(19): siRNA sense strand
ugauggagcugaggaggau

SEQ ID NO: 597257 - RNA, 19 nt, Homo sapiens
  misc_RNA (1)...(19): siRNA sense strand
ccugagcucugcauucucu

SEQ ID NO: 597258 - RNA, 19 nt, Homo sapiens
  misc_RNA (1)...(19): siRNA sense strand
acucuuagcauuucucuuc

SEQ ID NO: 597259 - RNA, 19 nt, Homo sapiens
  misc_RNA (1)...(19): siRNA sense strand
ucacauucuucgucuccaa

SEQ ID NO: 597260 - RNA, 19 nt, Homo sapiens
  misc_RNA (1)...(19): siRNA sense strand
ccugauggcccucacauuc

SEQ ID NO: 597261 - RNA, 19 nt, Homo sapiens
  misc_RNA (1)...(19): siRNA sense strand
caucaucgagcucaaucaa

SEQ ID NO: 597262 - RNA, 19 nt, Homo sapiens
  misc_RNA (1)...(19): siRNA sense strand
gacgacaauucugugcauu

SEQ ID NO: 597263 - RNA, 19 nt, Homo sapiens
  misc_RNA (1)...(19): siRNA sense strand
guagacaggagugcccuuu

SEQ ID NO: 597264 - RNA, 19 nt, Homo sapiens
  misc_RNA (1)...(19): siRNA sense strand
agagguaugauguuuguga

SEQ ID NO: 597265 - RNA, 19 nt, Homo sapiens
  misc_RNA (1)...(19): siRNA sense strand
gugcucuucuccaucauca

SEQ ID NO: 597266 - RNA, 19 nt, Homo sapiens
  misc_RNA (1)...(19): siRNA sense strand
ccauucagccgcagacugu

SEQ ID NO: 597267 - RNA, 19 nt, Homo sapiens
  misc_RNA (1)...(19): siRNA sense strand
caucaugaccagagguaug

SEQ ID NO: 597268 - RNA, 19 nt, Homo sapiens
  misc_RNA (1)...(19): siRNA sense strand
agaugcaggaggaguauaa

SEQ ID NO: 597269 - RNA, 19 nt, Homo sapiens
  misc_RNA (1)...(19): siRNA sense strand
ccagagcccgagacaguga

SEQ ID NO: 597270 - RNA, 19 nt, Homo sapiens
  misc_RNA (1)...(19): siRNA sense strand
gaacuggaagcagcaugga

SEQ ID NO: 597271 - RNA, 19 nt, Homo sapiens
  misc_RNA (1)...(19): siRNA sense strand
cgagcucaaucaacaaacu

SEQ ID NO: 597272 - RNA, 19 nt, Homo sapiens
  misc_RNA (1)...(19): siRNA sense strand
agcauuaacuucauauggu

SEQ ID NO: 597273 - RNA, 19 nt, Homo sapiens
  misc_RNA (1)...(19): siRNA sense strand
uagacaggagugcccuuua

SEQ ID NO: 597274 - RNA, 19 nt, Homo sapiens
  misc_RNA (1)...(19): siRNA sense strand
gcucuucuccaucaucauc

SEQ ID NO: 597275 - RNA, 19 nt, Homo sapiens
  misc_RNA (1)...(19): siRNA sense strand
uagcauuucucuuccucau

SEQ ID NO: 597276 - RNA, 19 nt, Homo sapiens
  misc_RNA (1)...(19): siRNA sense strand
aaaucauuauugccacuga

SEQ ID NO: 597277 - RNA, 19 nt, Homo sapiens
  misc_RNA (1)...(19): siRNA sense strand
ccuggucuauguccucuuc

SEQ ID NO: 597278 - RNA, 19 nt, Homo sapiens
  misc_RNA (1)...(19): siRNA sense strand
gaggaggauguagcauuaa

SEQ ID NO: 597279 - RNA, 19 nt, Homo sapiens
  misc_RNA (1)...(19): siRNA sense strand
acugugcucuucuccauca

SEQ ID NO: 597280 - RNA, 19 nt, Homo sapiens
  misc_RNA (1)...(19): siRNA sense strand
gcaucguggucacaauucu

SEQ ID NO: 597281 - RNA, 19 nt, Homo sapiens
  misc_RNA (1)...(19): siRNA sense strand
gcagucuguugcaaaucau

SEQ ID NO: 597282 - RNA, 19 nt, Homo sapiens
  misc_RNA (1)...(19): siRNA sense strand
caagaugcaggaggaguau

SEQ ID NO: 597283 - RNA, 19 nt, Homo sapiens
  misc_RNA (1)...(19): siRNA sense strand
cacaauucugcuacucuua

SEQ ID NO: 597284 - RNA, 19 nt, Homo sapiens
  misc_RNA (1)...(19): siRNA sense strand
cguacgcuacuuucucuuu

SEQ ID NO: 597285 - RNA, 19 nt, Homo sapiens
  misc_RNA (1)...(19): siRNA sense strand
ggucacaauucugcuacuc

SEQ ID NO: 597286 - RNA, 19 nt, Homo sapiens
  misc_RNA (1)...(19): siRNA sense strand
gacuguugaucccacacaa

SEQ ID NO: 597287 - RNA, 19 nt, Homo sapiens
  misc_RNA (1)...(19): siRNA sense strand
ccaacacagcuuccaagug

SEQ ID NO: 597288 - RNA, 19 nt, Homo sapiens
  misc_RNA (1)...(19): siRNA sense strand
gcucaauguggacuuuguu

SEQ ID NO: 597289 - RNA, 19 nt, Homo sapiens
  misc_RNA (1)...(19): siRNA sense strand
cauuauugccacugaguau

SEQ ID NO: 597290 - RNA, 19 nt, Homo sapiens
  misc_RNA (1)...(19): siRNA sense strand
ccacccagcuccucuuccu

SEQ ID NO: 597291 - RNA, 19 nt, Homo sapiens
  misc_RNA (1)...(19): siRNA sense strand
gacaggagugcccuuuaca

SEQ ID NO: 597292 - RNA, 19 nt, Homo sapiens
  misc_RNA (1)...(19): siRNA sense strand
uagcauuaacuucauaugg

SEQ ID NO: 597293 - RNA, 19 nt, Homo sapiens
  misc_RNA (1)...(19): siRNA sense strand
caggagugcccuuuacaag

SEQ ID NO: 597294 - RNA, 19 nt, Homo sapiens
  misc_RNA (1)...(19): siRNA sense strand
gaaggcucaucuuuaucac

SEQ ID NO: 597295 - RNA, 19 nt, Homo sapiens
  misc_RNA (1)...(19): siRNA sense strand
ucccugagcucugcauucu

SEQ ID NO: 597296 - RNA, 19 nt, Homo sapiens
  misc_RNA (1)...(19): siRNA sense strand
ccuccaaucuagugaagcu

SEQ ID NO: 597297 - RNA, 19 nt, Homo sapiens
  misc_RNA (1)...(19): siRNA sense strand
cagcauggaaggcucaucu

SEQ ID NO: 597298 - RNA, 19 nt, Homo sapiens
  misc_RNA (1)...(19): siRNA sense strand
cuccaaagccaccuucugu

SEQ ID NO: 597299 - RNA, 19 nt, Homo sapiens
  misc_RNA (1)...(19): siRNA sense strand
acaauucugcuacucuuag

SEQ ID NO: 597300 - RNA, 19 nt, Homo sapiens
  misc_RNA (1)...(19): siRNA sense strand
caacaaagaugauaccaaa

SEQ ID NO: 597301 - RNA, 19 nt, Homo sapiens
  misc_RNA (1)...(19): siRNA sense strand
gcagagaaguuuaauuuga

SEQ ID NO: 597302 - RNA, 19 nt, Homo sapiens
  misc_RNA (1)...(19): siRNA sense strand
gaagagaggaugagaauga

SEQ ID NO: 597303 - RNA, 19 nt, Homo sapiens
  misc_RNA (1)...(19): siRNA sense strand
ggaacgacaucauuuaaga

SEQ ID NO: 597304 - RNA, 19 nt, Homo sapiens
  misc_RNA (1)...(19): siRNA sense strand
gcauguaccuuguguagaa

SEQ ID NO: 597305 - RNA, 19 nt, Homo sapiens
  misc_RNA (1)...(19): siRNA sense strand
ggaacgagaauucuuaaua

SEQ ID NO: 597306 - RNA, 19 nt, Homo sapiens
  misc_RNA (1)...(19): siRNA sense strand
gaaaggaacuucguagcaa

SEQ ID NO: 597307 - RNA, 19 nt, Homo sapiens
  misc_RNA (1)...(19): siRNA sense strand
gaauauguccggaaacuuu

SEQ ID NO: 597308 - RNA, 19 nt, Homo sapiens
  misc_RNA (1)...(19): siRNA sense strand
ugacagagguuccaguaaa

SEQ ID NO: 597309 - RNA, 19 nt, Homo sapiens
  misc_RNA (1)...(19): siRNA sense strand
gaauacagauuaccuuaca

SEQ ID NO: 597310 - RNA, 19 nt, Homo sapiens
  misc_RNA (1)...(19): siRNA sense strand
gaauaaagaguccaacaaa

SEQ ID NO: 597311 - RNA, 19 nt, Homo sapiens
  misc_RNA (1)...(19): siRNA sense strand
gaagaacaaucuggaaaug

SEQ ID NO: 597312 - RNA, 19 nt, Homo sapiens
  misc_RNA (1)...(19): siRNA sense strand
gaagugaaagacuauguua

SEQ ID NO: 597313 - RNA, 19 nt, Homo sapiens
  misc_RNA (1)...(19): siRNA sense strand
cauaguagaugcuuuccua

SEQ ID NO: 597314 - RNA, 19 nt, Homo sapiens
  misc_RNA (1)...(19): siRNA sense strand
gaccauccauuuccuauug

SEQ ID NO: 597315 - RNA, 19 nt, Homo sapiens
  misc_RNA (1)...(19): siRNA sense strand
ggagacauguggacgguuu

SEQ ID NO: 597316 - RNA, 19 nt, Homo sapiens
  misc_RNA (1)...(19): siRNA sense strand
ggcaaauucucaauccuua

SEQ ID NO: 597317 - RNA, 19 nt, Homo sapiens
  misc_RNA (1)...(19): siRNA sense strand
gauaauuaguccagagaaa

SEQ ID NO: 597318 - RNA, 19 nt, Homo sapiens
  misc_RNA (1)...(19): siRNA sense strand
cagauuaccuuacagauuc

SEQ ID NO: 597319 - RNA, 19 nt, Homo sapiens
  misc_RNA (1)...(19): siRNA sense strand
caagauugguugcuacauu

SEQ ID NO: 597320 - RNA, 19 nt, Homo sapiens
  misc_RNA (1)...(19): siRNA sense strand
gaacaugggccuggaauug

SEQ ID NO: 597321 - RNA, 19 nt, Homo sapiens
  misc_RNA (1)...(19): siRNA sense strand
caacagcccuuccagaauc

SEQ ID NO: 597322 - RNA, 19 nt, Homo sapiens
  misc_RNA (1)...(19): siRNA sense strand
aaagaaacaucaagaggaa

SEQ ID NO: 597323 - RNA, 19 nt, Homo sapiens
  misc_RNA (1)...(19): siRNA sense strand
ugaagaggaugaagaagaa

SEQ ID NO: 597324 - RNA, 19 nt, Homo sapiens
  misc_RNA (1)...(19): siRNA sense strand
gaagauauucgauuaggaa

SEQ ID NO: 597325 - RNA, 19 nt, Homo sapiens
  misc_RNA (1)...(19): siRNA sense strand
gcacuauucuggacacaug

SEQ ID NO: 597326 - RNA, 19 nt, Homo sapiens
  misc_RNA (1)...(19): siRNA sense strand
gagcaucuuuucagaauua

SEQ ID NO: 597327 - RNA, 19 nt, Homo sapiens
  misc_RNA (1)...(19): siRNA sense strand
gagaauacagauuaccuua

SEQ ID NO: 597328 - RNA, 19 nt, Homo sapiens
  misc_RNA (1)...(19): siRNA sense strand
gaagaggaggguucugaua

SEQ ID NO: 597329 - RNA, 19 nt, Homo sapiens
  misc_RNA (1)...(19): siRNA sense strand
gaagauagacauaaacagu

SEQ ID NO: 597330 - RNA, 19 nt, Homo sapiens
  misc_RNA (1)...(19): siRNA sense strand
aaggaucucucuaagguua

SEQ ID NO: 597331 - RNA, 19 nt, Homo sapiens
  misc_RNA (1)...(19): siRNA sense strand
ggaaucagcuguuauuuuc

SEQ ID NO: 597332 - RNA, 19 nt, Homo sapiens
  misc_RNA (1)...(19): siRNA sense strand
uagauuacaugaucaguga

SEQ ID NO: 597333 - RNA, 19 nt, Homo sapiens
  misc_RNA (1)...(19): siRNA sense strand
agaagagacuggaagauga

SEQ ID NO: 597334 - RNA, 19 nt, Homo sapiens
  misc_RNA (1)...(19): siRNA sense strand
gcaacgaaguggugaaucu

SEQ ID NO: 597335 - RNA, 19 nt, Homo sapiens
  misc_RNA (1)...(19): siRNA sense strand
uaaaugagccagaagaaga

SEQ ID NO: 597336 - RNA, 19 nt, Homo sapiens
  misc_RNA (1)...(19): siRNA sense strand
gagcaaaugaugagaaaga

SEQ ID NO: 597337 - RNA, 19 nt, Homo sapiens
  misc_RNA (1)...(19): siRNA sense strand
gcaagaacaagaagauuau

SEQ ID NO: 597338 - RNA, 19 nt, Homo sapiens
  misc_RNA (1)...(19): siRNA sense strand
ggcaagaacaagaagauua

SEQ ID NO: 597339 - RNA, 19 nt, Homo sapiens
  misc_RNA (1)...(19): siRNA sense strand
gauuaggaauggagguuaa

SEQ ID NO: 597340 - RNA, 19 nt, Homo sapiens
  misc_RNA (1)...(19): siRNA sense strand
ugauauugcuggacuugua

SEQ ID NO: 597341 - RNA, 19 nt, Homo sapiens
  misc_RNA (1)...(19): siRNA sense strand
agaacaaucuggaaaugaa

SEQ ID NO: 597342 - RNA, 19 nt, Homo sapiens
  misc_RNA (1)...(19): siRNA sense strand
ggacacauguggccaguac

SEQ ID NO: 597343 - RNA, 19 nt, Homo sapiens
  misc_RNA (1)...(19): siRNA sense strand
guacaaggaucucucuaag

SEQ ID NO: 597344 - RNA, 19 nt, Homo sapiens
  misc_RNA (1)...(19): siRNA sense strand
ugaugacaccuuagaauua

SEQ ID NO: 597345 - RNA, 19 nt, Homo sapiens
  misc_RNA (1)...(19): siRNA sense strand
gauggaguguuagaagaua

SEQ ID NO: 597346 - RNA, 19 nt, Homo sapiens
  misc_RNA (1)...(19): siRNA sense strand
ccugauggcucuccaaguu

SEQ ID NO: 597347 - RNA, 19 nt, Homo sapiens
  misc_RNA (1)...(19): siRNA sense strand
gaacaagaagagaggauga

SEQ ID NO: 597348 - RNA, 19 nt, Homo sapiens
  misc_RNA (1)...(19): siRNA sense strand
gaacugcuaagaccaaaga

SEQ ID NO: 597349 - RNA, 19 nt, Homo sapiens
  misc_RNA (1)...(19): siRNA sense strand
gaugacaccuuagaauuag

SEQ ID NO: 597350 - RNA, 19 nt, Homo sapiens
  misc_RNA (1)...(19): siRNA sense strand
gcaacaggcagaacaagaa

SEQ ID NO: 597351 - RNA, 19 nt, Homo sapiens
  misc_RNA (1)...(19): siRNA sense strand
ggaaaugaaagugaaguaa

SEQ ID NO: 597352 - RNA, 19 nt, Homo sapiens
  misc_RNA (1)...(19): siRNA sense strand
gaaagaagcaagcaaugca

SEQ ID NO: 597353 - RNA, 19 nt, Homo sapiens
  misc_RNA (1)...(19): siRNA sense strand
ccaggaauauguccggaaa

SEQ ID NO: 597354 - RNA, 19 nt, Homo sapiens
  misc_RNA (1)...(19): siRNA sense strand
gaaggcagaggaagaauca

SEQ ID NO: 597355 - RNA, 19 nt, Homo sapiens
  misc_RNA (1)...(19): siRNA sense strand
ugaaaccgaugaagagaau

SEQ ID NO: 597356 - RNA, 19 nt, Homo sapiens
  misc_RNA (1)...(19): siRNA sense strand
acagggagcuccagaauac

SEQ ID NO: 597357 - RNA, 19 nt, Homo sapiens
  misc_RNA (1)...(19): siRNA sense strand
gaacgacaucauuuaagaa

SEQ ID NO: 597358 - RNA, 19 nt, Homo sapiens
  misc_RNA (1)...(19): siRNA sense strand
aggaagagaauacagauua

SEQ ID NO: 597359 - RNA, 19 nt, Homo sapiens
  misc_RNA (1)...(19): siRNA sense strand
ggaugaagaagaagaagaa

SEQ ID NO: 597360 - RNA, 19 nt, Homo sapiens
  misc_RNA (1)...(19): siRNA sense strand
ccaaagaucaaacucugua

SEQ ID NO: 597361 - RNA, 19 nt, Homo sapiens
  misc_RNA (1)...(19): siRNA sense strand
acaaggaucucucuaaggu

SEQ ID NO: 597362 - RNA, 19 nt, Homo sapiens
  misc_RNA (1)...(19): siRNA sense strand
gaaacuucuugaugaacaa

SEQ ID NO: 597363 - RNA, 19 nt, Homo sapiens
  misc_RNA (1)...(19): siRNA sense strand
ugguaaaccuggagaauau

SEQ ID NO: 597364 - RNA, 19 nt, Homo sapiens
  misc_RNA (1)...(19): siRNA sense strand
gaaccucauugauuugaag

SEQ ID NO: 597365 - RNA, 19 nt, Homo sapiens
  misc_RNA (1)...(19): siRNA sense strand
ugaagagaauacugaggua

SEQ ID NO: 597366 - RNA, 19 nt, Homo sapiens
  misc_RNA (1)...(19): siRNA sense strand
ggaagagaauacagauuac

SEQ ID NO: 597367 - RNA, 19 nt, Homo sapiens
  misc_RNA (1)...(19): siRNA sense strand
caccuaacaucaccaaguu

SEQ ID NO: 597368 - RNA, 19 nt, Homo sapiens
  misc_RNA (1)...(19): siRNA sense strand
gaagggagcaccuaaugca

SEQ ID NO: 597369 - RNA, 19 nt, Homo sapiens
  misc_RNA (1)...(19): siRNA sense strand
uaaaggcgguggacuuaag

SEQ ID NO: 597370 - RNA, 19 nt, Homo sapiens
  misc_RNA (1)...(19): siRNA sense strand
gaacaaucuggaaaugaaa

SEQ ID NO: 597371 - RNA, 19 nt, Homo sapiens
  misc_RNA (1)...(19): siRNA sense strand
gacaaagacucaaaagauu

SEQ ID NO: 597372 - RNA, 19 nt, Homo sapiens
  misc_RNA (1)...(19): siRNA sense strand
guuggagaaucuagaaauu

SEQ ID NO: 597373 - RNA, 19 nt, Homo sapiens
  misc_RNA (1)...(19): siRNA sense strand
ucaugucucuguagugauu

SEQ ID NO: 597374 - RNA, 19 nt, Homo sapiens
  misc_RNA (1)...(19): siRNA sense strand
ggaggguucugauaaugau

SEQ ID NO: 597375 - RNA, 19 nt, Homo sapiens
  misc_RNA (1)...(19): siRNA sense strand
ggccuggaauugauauauu

SEQ ID NO: 597376 - RNA, 19 nt, Homo sapiens
  misc_RNA (1)...(19): siRNA sense strand
cugcagagaaguuuaauuu

SEQ ID NO: 597377 - RNA, 19 nt, Homo sapiens
  misc_RNA (1)...(19): siRNA sense strand
ggagcucagugaagauaga

SEQ ID NO: 597378 - RNA, 19 nt, Homo sapiens
  misc_RNA (1)...(19): siRNA sense strand
gcaaacaccaaucgugaga

SEQ ID NO: 597379 - RNA, 19 nt, Homo sapiens
  misc_RNA (1)...(19): siRNA sense strand
gaggaggguucugauaaug

SEQ ID NO: 597380 - RNA, 19 nt, Homo sapiens
  misc_RNA (1)...(19): siRNA sense strand
cguuguggauggaguguua

SEQ ID NO: 597381 - RNA, 19 nt, Homo sapiens
  misc_RNA (1)...(19): siRNA sense strand
caacccaccuccagcugaa

SEQ ID NO: 597382 - RNA, 19 nt, Homo sapiens
  misc_RNA (1)...(19): siRNA sense strand
gcaccucugcucucucuuu

SEQ ID NO: 597383 - RNA, 19 nt, Homo sapiens
  misc_RNA (1)...(19): siRNA sense strand
gaagagaauacugagguaa

SEQ ID NO: 597384 - RNA, 19 nt, Homo sapiens
  misc_RNA (1)...(19): siRNA sense strand
gagaagaagaggaggaaga

SEQ ID NO: 597385 - RNA, 19 nt, Homo sapiens
  misc_RNA (1)...(19): siRNA sense strand
ugaaguaaaugagccagaa

SEQ ID NO: 597386 - RNA, 19 nt, Homo sapiens
  misc_RNA (1)...(19): siRNA sense strand
cagugaagauagacauaaa

SEQ ID NO: 597387 - RNA, 19 nt, Homo sapiens
  misc_RNA (1)...(19): siRNA sense strand
ggccaaacgucagcaagaa

SEQ ID NO: 597388 - RNA, 19 nt, Homo sapiens
  misc_RNA (1)...(19): siRNA sense strand
gaagaaaaguuuggagguu

SEQ ID NO: 597389 - RNA, 19 nt, Homo sapiens
  misc_RNA (1)...(19): siRNA sense strand
caucagcagugccaaguuc

SEQ ID NO: 597390 - RNA, 19 nt, Homo sapiens
  misc_RNA (1)...(19): siRNA sense strand
ugguagagaaugcauauua

SEQ ID NO: 597391 - RNA, 19 nt, Homo sapiens
  misc_RNA (1)...(19): siRNA sense strand
gauuucagauuucauguac

SEQ ID NO: 597392 - RNA, 19 nt, Homo sapiens
  misc_RNA (1)...(19): siRNA sense strand
gaucucaucucaagcucau

SEQ ID NO: 597393 - RNA, 19 nt, Homo sapiens
  misc_RNA (1)...(19): siRNA sense strand
ggucuuuccuuaaucuaug

SEQ ID NO: 597394 - RNA, 19 nt, Homo sapiens
  misc_RNA (1)...(19): siRNA sense strand
aaaggaacuucguagcaaa

SEQ ID NO: 597395 - RNA, 19 nt, Homo sapiens
  misc_RNA (1)...(19): siRNA sense strand
cgacaucauuuaagaaagg

SEQ ID NO: 597396 - RNA, 19 nt, Homo sapiens
  misc_RNA (1)...(19): siRNA sense strand
gcacccugcuggagacaug

SEQ ID NO: 597397 - RNA, 19 nt, Homo sapiens
  misc_RNA (1)...(19): siRNA sense strand
gcgguggacuuaagcaugu

SEQ ID NO: 597398 - RNA, 19 nt, Homo sapiens
  misc_RNA (1)...(19): siRNA sense strand
gacuagugcucuaccaaga

SEQ ID NO: 597399 - RNA, 19 nt, Homo sapiens
  misc_RNA (1)...(19): siRNA sense strand
caucuggaaugugaaauau

SEQ ID NO: 597400 - RNA, 19 nt, Homo sapiens
  misc_RNA (1)...(19): siRNA sense strand
caacaaagaugauaccaaa

SEQ ID NO: 597401 - RNA, 19 nt, Homo sapiens
  misc_RNA (1)...(19): siRNA sense strand
gcagagaaguuuaauuuga

SEQ ID NO: 597402 - RNA, 19 nt, Homo sapiens
  misc_RNA (1)...(19): siRNA sense strand
gaagagaggaugagaauga

SEQ ID NO: 597403 - RNA, 19 nt, Homo sapiens
  misc_RNA (1)...(19): siRNA sense strand
ggaacgacaucauuuaaga

SEQ ID NO: 597404 - RNA, 19 nt, Homo sapiens
  misc_RNA (1)...(19): siRNA sense strand
gcauguaccuuguguagaa

SEQ ID NO: 597405 - RNA, 19 nt, Homo sapiens
  misc_RNA (1)...(19): siRNA sense strand
ggaacgagaauucuuaaua

SEQ ID NO: 597406 - RNA, 19 nt, Homo sapiens
  misc_RNA (1)...(19): siRNA sense strand
gaaaggaacuucguagcaa

SEQ ID NO: 597407 - RNA, 19 nt, Homo sapiens
  misc_RNA (1)...(19): siRNA sense strand
gaauauguccggaaacuuu

SEQ ID NO: 597408 - RNA, 19 nt, Homo sapiens
  misc_RNA (1)...(19): siRNA sense strand
ugacagagguuccaguaaa

SEQ ID NO: 597409 - RNA, 19 nt, Homo sapiens
  misc_RNA (1)...(19): siRNA sense strand
gaauacagauuaccuuaca

SEQ ID NO: 597410 - RNA, 19 nt, Homo sapiens
  misc_RNA (1)...(19): siRNA sense strand
gaauaaagaguccaacaaa

SEQ ID NO: 597411 - RNA, 19 nt, Homo sapiens
  misc_RNA (1)...(19): siRNA sense strand
gaagaacaaucuggaaaug

SEQ ID NO: 597412 - RNA, 19 nt, Homo sapiens
  misc_RNA (1)...(19): siRNA sense strand
gaagugaaagacuauguua

SEQ ID NO: 597413 - RNA, 19 nt, Homo sapiens
  misc_RNA (1)...(19): siRNA sense strand
cauaguagaugcuuuccua

SEQ ID NO: 597414 - RNA, 19 nt, Homo sapiens
  misc_RNA (1)...(19): siRNA sense strand
gaccauccauuuccuauug

SEQ ID NO: 597415 - RNA, 19 nt, Homo sapiens
  misc_RNA (1)...(19): siRNA sense strand
ggagacauguggacgguuu

SEQ ID NO: 597416 - RNA, 19 nt, Homo sapiens
  misc_RNA (1)...(19): siRNA sense strand
ggcaaauucucaauccuua

SEQ ID NO: 597417 - RNA, 19 nt, Homo sapiens
  misc_RNA (1)...(19): siRNA sense strand
gauaauuaguccagagaaa

SEQ ID NO: 597418 - RNA, 19 nt, Homo sapiens
  misc_RNA (1)...(19): siRNA sense strand
cagauuaccuuacagauuc

SEQ ID NO: 597419 - RNA, 19 nt, Homo sapiens
  misc_RNA (1)...(19): siRNA sense strand
caagauugguugcuacauu

SEQ ID NO: 597420 - RNA, 19 nt, Homo sapiens
  misc_RNA (1)...(19): siRNA sense strand
gaacaugggccuggaauug

SEQ ID NO: 597421 - RNA, 19 nt, Homo sapiens
  misc_RNA (1)...(19): siRNA sense strand
caacagcccuuccagaauc

SEQ ID NO: 597422 - RNA, 19 nt, Homo sapiens
  misc_RNA (1)...(19): siRNA sense strand
aaagaaacaucaagaggaa

SEQ ID NO: 597423 - RNA, 19 nt, Homo sapiens
  misc_RNA (1)...(19): siRNA sense strand
ugaagaggaugaagaagaa

SEQ ID NO: 597424 - RNA, 19 nt, Homo sapiens
  misc_RNA (1)...(19): siRNA sense strand
gaagauauucgauuaggaa

SEQ ID NO: 597425 - RNA, 19 nt, Homo sapiens
  misc_RNA (1)...(19): siRNA sense strand
gcacuauucuggacacaug

SEQ ID NO: 597426 - RNA, 19 nt, Homo sapiens
  misc_RNA (1)...(19): siRNA sense strand
gagcaucuuuucagaauua

SEQ ID NO: 597427 - RNA, 19 nt, Homo sapiens
  misc_RNA (1)...(19): siRNA sense strand
gagaauacagauuaccuua

SEQ ID NO: 597428 - RNA, 19 nt, Homo sapiens
  misc_RNA (1)...(19): siRNA sense strand
gaagaggaggguucugaua

SEQ ID NO: 597429 - RNA, 19 nt, Homo sapiens
  misc_RNA (1)...(19): siRNA sense strand
gaagauagacauaaacagu

SEQ ID NO: 597430 - RNA, 19 nt, Homo sapiens
  misc_RNA (1)...(19): siRNA sense strand
aaggaucucucuaagguua

SEQ ID NO: 597431 - RNA, 19 nt, Homo sapiens
  misc_RNA (1)...(19): siRNA sense strand
ggaaucagcuguuauuuuc

SEQ ID NO: 597432 - RNA, 19 nt, Homo sapiens
  misc_RNA (1)...(19): siRNA sense strand
uagauuacaugaucaguga

SEQ ID NO: 597433 - RNA, 19 nt, Homo sapiens
  misc_RNA (1)...(19): siRNA sense strand
agaagagacuggaagauga

SEQ ID NO: 597434 - RNA, 19 nt, Homo sapiens
  misc_RNA (1)...(19): siRNA sense strand
gcaacgaaguggugaaucu

SEQ ID NO: 597435 - RNA, 19 nt, Homo sapiens
  misc_RNA (1)...(19): siRNA sense strand
uaaaugagccagaagaaga

SEQ ID NO: 597436 - RNA, 19 nt, Homo sapiens
  misc_RNA (1)...(19): siRNA sense strand
gagcaaaugaugagaaaga

SEQ ID NO: 597437 - RNA, 19 nt, Homo sapiens
  misc_RNA (1)...(19): siRNA sense strand
gcaagaacaagaagauuau

SEQ ID NO: 597438 - RNA, 19 nt, Homo sapiens
  misc_RNA (1)...(19): siRNA sense strand
ggcaagaacaagaagauua

SEQ ID NO: 597439 - RNA, 19 nt, Homo sapiens
  misc_RNA (1)...(19): siRNA sense strand
gauuaggaauggagguuaa

SEQ ID NO: 597440 - RNA, 19 nt, Homo sapiens
  misc_RNA (1)...(19): siRNA sense strand
ugauauugcuggacuugua

SEQ ID NO: 597441 - RNA, 19 nt, Homo sapiens
  misc_RNA (1)...(19): siRNA sense strand
agaacaaucuggaaaugaa

SEQ ID NO: 597442 - RNA, 19 nt, Homo sapiens
  misc_RNA (1)...(19): siRNA sense strand
ggacacauguggccaguac

SEQ ID NO: 597443 - RNA, 19 nt, Homo sapiens
  misc_RNA (1)...(19): siRNA sense strand
guacaaggaucucucuaag

SEQ ID NO: 597444 - RNA, 19 nt, Homo sapiens
  misc_RNA (1)...(19): siRNA sense strand
ugaugacaccuuagaauua

SEQ ID NO: 597445 - RNA, 19 nt, Homo sapiens
  misc_RNA (1)...(19): siRNA sense strand
gauggaguguuagaagaua

SEQ ID NO: 597446 - RNA, 19 nt, Homo sapiens
  misc_RNA (1)...(19): siRNA sense strand
ccugauggcucuccaaguu

SEQ ID NO: 597447 - RNA, 19 nt, Homo sapiens
  misc_RNA (1)...(19): siRNA sense strand
gaacaagaagagaggauga

SEQ ID NO: 597448 - RNA, 19 nt, Homo sapiens
  misc_RNA (1)...(19): siRNA sense strand
gaacugcuaagaccaaaga

SEQ ID NO: 597449 - RNA, 19 nt, Homo sapiens
  misc_RNA (1)...(19): siRNA sense strand
gaugacaccuuagaauuag

SEQ ID NO: 597450 - RNA, 19 nt, Homo sapiens
  misc_RNA (1)...(19): siRNA sense strand
gcaacaggcagaacaagaa

SEQ ID NO: 597451 - RNA, 19 nt, Homo sapiens
  misc_RNA (1)...(19): siRNA sense strand
ggaaaugaaagugaaguaa

SEQ ID NO: 597452 - RNA, 19 nt, Homo sapiens
  misc_RNA (1)...(19): siRNA sense strand
gaaagaagcaagcaaugca

SEQ ID NO: 597453 - RNA, 19 nt, Homo sapiens
  misc_RNA (1)...(19): siRNA sense strand
ccaggaauauguccggaaa

SEQ ID NO: 597454 - RNA, 19 nt, Homo sapiens
  misc_RNA (1)...(19): siRNA sense strand
gaaggcagaggaagaauca

SEQ ID NO: 597455 - RNA, 19 nt, Homo sapiens
  misc_RNA (1)...(19): siRNA sense strand
ugaaaccgaugaagagaau

SEQ ID NO: 597456 - RNA, 19 nt, Homo sapiens
  misc_RNA (1)...(19): siRNA sense strand
acagggagcuccagaauac

SEQ ID NO: 597457 - RNA, 19 nt, Homo sapiens
  misc_RNA (1)...(19): siRNA sense strand
gaacgacaucauuuaagaa

SEQ ID NO: 597458 - RNA, 19 nt, Homo sapiens
  misc_RNA (1)...(19): siRNA sense strand
aggaagagaauacagauua

SEQ ID NO: 597459 - RNA, 19 nt, Homo sapiens
  misc_RNA (1)...(19): siRNA sense strand
ggaugaagaagaagaagaa

SEQ ID NO: 597460 - RNA, 19 nt, Homo sapiens
  misc_RNA (1)...(19): siRNA sense strand
ccaaagaucaaacucugua

SEQ ID NO: 597461 - RNA, 19 nt, Homo sapiens
  misc_RNA (1)...(19): siRNA sense strand
acaaggaucucucuaaggu

SEQ ID NO: 597462 - RNA, 19 nt, Homo sapiens
  misc_RNA (1)...(19): siRNA sense strand
gaaacuucuugaugaacaa

SEQ ID NO: 597463 - RNA, 19 nt, Homo sapiens
  misc_RNA (1)...(19): siRNA sense strand
ugguaaaccuggagaauau

SEQ ID NO: 597464 - RNA, 19 nt, Homo sapiens
  misc_RNA (1)...(19): siRNA sense strand
gaaccucauugauuugaag

SEQ ID NO: 597465 - RNA, 19 nt, Homo sapiens
  misc_RNA (1)...(19): siRNA sense strand
ugaagagaauacugaggua

SEQ ID NO: 597466 - RNA, 19 nt, Homo sapiens
  misc_RNA (1)...(19): siRNA sense strand
ggaagagaauacagauuac

SEQ ID NO: 597467 - RNA, 19 nt, Homo sapiens
  misc_RNA (1)...(19): siRNA sense strand
caccuaacaucaccaaguu

SEQ ID NO: 597468 - RNA, 19 nt, Homo sapiens
  misc_RNA (1)...(19): siRNA sense strand
gaagggagcaccuaaugca

SEQ ID NO: 597469 - RNA, 19 nt, Homo sapiens
  misc_RNA (1)...(19): siRNA sense strand
uaaaggcgguggacuuaag

SEQ ID NO: 597470 - RNA, 19 nt, Homo sapiens
  misc_RNA (1)...(19): siRNA sense strand
gaacaaucuggaaaugaaa

SEQ ID NO: 597471 - RNA, 19 nt, Homo sapiens
  misc_RNA (1)...(19): siRNA sense strand
gacaaagacucaaaagauu

SEQ ID NO: 597472 - RNA, 19 nt, Homo sapiens
  misc_RNA (1)...(19): siRNA sense strand
guuggagaaucuagaaauu

SEQ ID NO: 597473 - RNA, 19 nt, Homo sapiens
  misc_RNA (1)...(19): siRNA sense strand
ucaugucucuguagugauu

SEQ ID NO: 597474 - RNA, 19 nt, Homo sapiens
  misc_RNA (1)...(19): siRNA sense strand
ggaggguucugauaaugau

SEQ ID NO: 597475 - RNA, 19 nt, Homo sapiens
  misc_RNA (1)...(19): siRNA sense strand
ggccuggaauugauauauu

SEQ ID NO: 597476 - RNA, 19 nt, Homo sapiens
  misc_RNA (1)...(19): siRNA sense strand
cugcagagaaguuuaauuu

SEQ ID NO: 597477 - RNA, 19 nt, Homo sapiens
  misc_RNA (1)...(19): siRNA sense strand
ggagcucagugaagauaga

SEQ ID NO: 597478 - RNA, 19 nt, Homo sapiens
  misc_RNA (1)...(19): siRNA sense strand
gcaaacaccaaucgugaga

SEQ ID NO: 597479 - RNA, 19 nt, Homo sapiens
  misc_RNA (1)...(19): siRNA sense strand
gaggaggguucugauaaug

SEQ ID NO: 597480 - RNA, 19 nt, Homo sapiens
  misc_RNA (1)...(19): siRNA sense strand
cguuguggauggaguguua

SEQ ID NO: 597481 - RNA, 19 nt, Homo sapiens
  misc_RNA (1)...(19): siRNA sense strand
caacccaccuccagcugaa

SEQ ID NO: 597482 - RNA, 19 nt, Homo sapiens
  misc_RNA (1)...(19): siRNA sense strand
gcaccucugcucucucuuu

SEQ ID NO: 597483 - RNA, 19 nt, Homo sapiens
  misc_RNA (1)...(19): siRNA sense strand
gaagagaauacugagguaa

SEQ ID NO: 597484 - RNA, 19 nt, Homo sapiens
  misc_RNA (1)...(19): siRNA sense strand
gagaagaagaggaggaaga

SEQ ID NO: 597485 - RNA, 19 nt, Homo sapiens
  misc_RNA (1)...(19): siRNA sense strand
ugaaguaaaugagccagaa

SEQ ID NO: 597486 - RNA, 19 nt, Homo sapiens
  misc_RNA (1)...(19): siRNA sense strand
cagugaagauagacauaaa

SEQ ID NO: 597487 - RNA, 19 nt, Homo sapiens
  misc_RNA (1)...(19): siRNA sense strand
ggccaaacgucagcaagaa

SEQ ID NO: 597488 - RNA, 19 nt, Homo sapiens
  misc_RNA (1)...(19): siRNA sense strand
gaagaaaaguuuggagguu

SEQ ID NO: 597489 - RNA, 19 nt, Homo sapiens
  misc_RNA (1)...(19): siRNA sense strand
caucagcagugccaaguuc

SEQ ID NO: 597490 - RNA, 19 nt, Homo sapiens
  misc_RNA (1)...(19): siRNA sense strand
ugguagagaaugcauauua

SEQ ID NO: 597491 - RNA, 19 nt, Homo sapiens
  misc_RNA (1)...(19): siRNA sense strand
gauuucagauuucauguac

SEQ ID NO: 597492 - RNA, 19 nt, Homo sapiens
  misc_RNA (1)...(19): siRNA sense strand
gaucucaucucaagcucau

SEQ ID NO: 597493 - RNA, 19 nt, Homo sapiens
  misc_RNA (1)...(19): siRNA sense strand
ggucuuuccuuaaucuaug

SEQ ID NO: 597494 - RNA, 19 nt, Homo sapiens
  misc_RNA (1)...(19): siRNA sense strand
aaaggaacuucguagcaaa

SEQ ID NO: 597495 - RNA, 19 nt, Homo sapiens
  misc_RNA (1)...(19): siRNA sense strand
cgacaucauuuaagaaagg

SEQ ID NO: 597496 - RNA, 19 nt, Homo sapiens
  misc_RNA (1)...(19): siRNA sense strand
gcacccugcuggagacaug

SEQ ID NO: 597497 - RNA, 19 nt, Homo sapiens
  misc_RNA (1)...(19): siRNA sense strand
gcgguggacuuaagcaugu

SEQ ID NO: 597498 - RNA, 19 nt, Homo sapiens
  misc_RNA (1)...(19): siRNA sense strand
gacuagugcucuaccaaga

SEQ ID NO: 597499 - RNA, 19 nt, Homo sapiens
  misc_RNA (1)...(19): siRNA sense strand
caucuggaaugugaaauau

SEQ ID NO: 597500 - RNA, 19 nt, Homo sapiens
  misc_RNA (1)...(19): siRNA sense strand
ggacagagauguggacuuu

SEQ ID NO: 597501 - RNA, 19 nt, Homo sapiens
  misc_RNA (1)...(19): siRNA sense strand
ggagaggcauggacauuaa

SEQ ID NO: 597502 - RNA, 19 nt, Homo sapiens
  misc_RNA (1)...(19): siRNA sense strand
caagauggcauaugaauug

SEQ ID NO: 597503 - RNA, 19 nt, Homo sapiens
  misc_RNA (1)...(19): siRNA sense strand
aaacagcgcucgccuuaug

SEQ ID NO: 597504 - RNA, 19 nt, Homo sapiens
  misc_RNA (1)...(19): siRNA sense strand
ucacagauaugacuaagga

SEQ ID NO: 597505 - RNA, 19 nt, Homo sapiens
  misc_RNA (1)...(19): siRNA sense strand
gcauggaacuaccagaauu

SEQ ID NO: 597506 - RNA, 19 nt, Homo sapiens
  misc_RNA (1)...(19): siRNA sense strand
gagaaaggcuacagguuca

SEQ ID NO: 597507 - RNA, 19 nt, Homo sapiens
  misc_RNA (1)...(19): siRNA sense strand
gcacuucuccaaugucuuu

SEQ ID NO: 597508 - RNA, 19 nt, Homo sapiens
  misc_RNA (1)...(19): siRNA sense strand
gaugugagcugugaugaau

SEQ ID NO: 597509 - RNA, 19 nt, Homo sapiens
  misc_RNA (1)...(19): siRNA sense strand
cgacaaggcugcaggaaag

SEQ ID NO: 597510 - RNA, 19 nt, Homo sapiens
  misc_RNA (1)...(19): siRNA sense strand
ucacagccguggagaguaa

SEQ ID NO: 597511 - RNA, 19 nt, Homo sapiens
  misc_RNA (1)...(19): siRNA sense strand
gacaagguguuuaaugaga

SEQ ID NO: 597512 - RNA, 19 nt, Homo sapiens
  misc_RNA (1)...(19): siRNA sense strand
gagaccagcucaucuaucu

SEQ ID NO: 597513 - RNA, 19 nt, Homo sapiens
  misc_RNA (1)...(19): siRNA sense strand
gugaauccaucaugaagaa

SEQ ID NO: 597514 - RNA, 19 nt, Homo sapiens
  misc_RNA (1)...(19): siRNA sense strand
caaauuggcuggccgaacu

SEQ ID NO: 597515 - RNA, 19 nt, Homo sapiens
  misc_RNA (1)...(19): siRNA sense strand
cacaguaucugcagagcua

SEQ ID NO: 597516 - RNA, 19 nt, Homo sapiens
  misc_RNA (1)...(19): siRNA sense strand
ggccagagauuggacauau

SEQ ID NO: 597517 - RNA, 19 nt, Homo sapiens
  misc_RNA (1)...(19): siRNA sense strand
acaaacagcgcucgccuua

SEQ ID NO: 597518 - RNA, 19 nt, Homo sapiens
  misc_RNA (1)...(19): siRNA sense strand
gcucccaagugguuuauga

SEQ ID NO: 597519 - RNA, 19 nt, Homo sapiens
  misc_RNA (1)...(19): siRNA sense strand
gcauggacauuaagcagau

SEQ ID NO: 597520 - RNA, 19 nt, Homo sapiens
  misc_RNA (1)...(19): siRNA sense strand
gacuuugcauucacagaua

SEQ ID NO: 597521 - RNA, 19 nt, Homo sapiens
  misc_RNA (1)...(19): siRNA sense strand
ggagagcaccagcuacauu

SEQ ID NO: 597522 - RNA, 19 nt, Homo sapiens
  misc_RNA (1)...(19): siRNA sense strand
uauacaagguggagaacaa

SEQ ID NO: 597523 - RNA, 19 nt, Homo sapiens
  misc_RNA (1)...(19): siRNA sense strand
ggaacgagcacuucuccaa

SEQ ID NO: 597524 - RNA, 19 nt, Homo sapiens
  misc_RNA (1)...(19): siRNA sense strand
aggacaagguguuuaauga

SEQ ID NO: 597525 - RNA, 19 nt, Homo sapiens
  misc_RNA (1)...(19): siRNA sense strand
ccaaacugcuauggaauug

SEQ ID NO: 597526 - RNA, 19 nt, Homo sapiens
  misc_RNA (1)...(19): siRNA sense strand
gcaaauacaaagugaucuu

SEQ ID NO: 597527 - RNA, 19 nt, Homo sapiens
  misc_RNA (1)...(19): siRNA sense strand
gaacuugcaggcccaguau

SEQ ID NO: 597528 - RNA, 19 nt, Homo sapiens
  misc_RNA (1)...(19): siRNA sense strand
caagguguuuaaugagauu

SEQ ID NO: 597529 - RNA, 19 nt, Homo sapiens
  misc_RNA (1)...(19): siRNA sense strand
acagagauguggacuuugu

SEQ ID NO: 597530 - RNA, 19 nt, Homo sapiens
  misc_RNA (1)...(19): siRNA sense strand
gaaugggccuucucuuugc

SEQ ID NO: 597531 - RNA, 19 nt, Homo sapiens
  misc_RNA (1)...(19): siRNA sense strand
gagcauggaacuaccagaa

SEQ ID NO: 597532 - RNA, 19 nt, Homo sapiens
  misc_RNA (1)...(19): siRNA sense strand
gcaggugucgccuauagaa

SEQ ID NO: 597533 - RNA, 19 nt, Homo sapiens
  misc_RNA (1)...(19): siRNA sense strand
ugaaugggccuucucuuug

SEQ ID NO: 597534 - RNA, 19 nt, Homo sapiens
  misc_RNA (1)...(19): siRNA sense strand
gaacgagcacuucuccaau

SEQ ID NO: 597535 - RNA, 19 nt, Homo sapiens
  misc_RNA (1)...(19): siRNA sense strand
cacuguagcucaggccuua

SEQ ID NO: 597536 - RNA, 19 nt, Homo sapiens
  misc_RNA (1)...(19): siRNA sense strand
aagaauaugcgauacauug

SEQ ID NO: 597537 - RNA, 19 nt, Homo sapiens
  misc_RNA (1)...(19): siRNA sense strand
gcaggaaagauuacugaug

SEQ ID NO: 597538 - RNA, 19 nt, Homo sapiens
  misc_RNA (1)...(19): siRNA sense strand
gagagcaccagcuacauug

SEQ ID NO: 597539 - RNA, 19 nt, Homo sapiens
  misc_RNA (1)...(19): siRNA sense strand
cgugugagauggugcuuga

SEQ ID NO: 597540 - RNA, 19 nt, Homo sapiens
  misc_RNA (1)...(19): siRNA sense strand
caaugucuuuggcuucuug

SEQ ID NO: 597541 - RNA, 19 nt, Homo sapiens
  misc_RNA (1)...(19): siRNA sense strand
gagcacuucuccaaugucu

SEQ ID NO: 597542 - RNA, 19 nt, Homo sapiens
  misc_RNA (1)...(19): siRNA sense strand
gcaagcuggugaccgacaa

SEQ ID NO: 597543 - RNA, 19 nt, Homo sapiens
  misc_RNA (1)...(19): siRNA sense strand
cuacauugaggaacacaua

SEQ ID NO: 597544 - RNA, 19 nt, Homo sapiens
  misc_RNA (1)...(19): siRNA sense strand
ggaacuugcaggcccagua

SEQ ID NO: 597545 - RNA, 19 nt, Homo sapiens
  misc_RNA (1)...(19): siRNA sense strand
uagacaagcuauacaaggu

SEQ ID NO: 597546 - RNA, 19 nt, Homo sapiens
  misc_RNA (1)...(19): siRNA sense strand
gaaaggcuacagguucauu

SEQ ID NO: 597547 - RNA, 19 nt, Homo sapiens
  misc_RNA (1)...(19): siRNA sense strand
gcucaacugcagugacuuu

SEQ ID NO: 597548 - RNA, 19 nt, Homo sapiens
  misc_RNA (1)...(19): siRNA sense strand
cggcgaguaugaucugaaa

SEQ ID NO: 597549 - RNA, 19 nt, Homo sapiens
  misc_RNA (1)...(19): siRNA sense strand
ucucagcacucucuaugga

SEQ ID NO: 597550 - RNA, 19 nt, Homo sapiens
  misc_RNA (1)...(19): siRNA sense strand
cgacagcagucacaaacag

SEQ ID NO: 597551 - RNA, 19 nt, Homo sapiens
  misc_RNA (1)...(19): siRNA sense strand
gagagaaaggcuacagguu

SEQ ID NO: 597552 - RNA, 19 nt, Homo sapiens
  misc_RNA (1)...(19): siRNA sense strand
ucaagaauaugcgauacau

SEQ ID NO: 597553 - RNA, 19 nt, Homo sapiens
  misc_RNA (1)...(19): siRNA sense strand
acauuaagcagaugaagaa

SEQ ID NO: 597554 - RNA, 19 nt, Homo sapiens
  misc_RNA (1)...(19): siRNA sense strand
uuaaugagauucggaacga

SEQ ID NO: 597555 - RNA, 19 nt, Homo sapiens
  misc_RNA (1)...(19): siRNA sense strand
gaggacaagguguuuaaug

SEQ ID NO: 597556 - RNA, 19 nt, Homo sapiens
  misc_RNA (1)...(19): siRNA sense strand
gaaguagacaagcuauaca

SEQ ID NO: 597557 - RNA, 19 nt, Homo sapiens
  misc_RNA (1)...(19): siRNA sense strand
ggccaugagugaggugaaa

SEQ ID NO: 597558 - RNA, 19 nt, Homo sapiens
  misc_RNA (1)...(19): siRNA sense strand
cugcuaaccuucuccaauc

SEQ ID NO: 597559 - RNA, 19 nt, Homo sapiens
  misc_RNA (1)...(19): siRNA sense strand
gaaagccugcgccucaugu

SEQ ID NO: 597560 - RNA, 19 nt, Homo sapiens
  misc_RNA (1)...(19): siRNA sense strand
gaauccaucaugaagaaga

SEQ ID NO: 597561 - RNA, 19 nt, Homo sapiens
  misc_RNA (1)...(19): siRNA sense strand
gcccucagcuccaaugaac

SEQ ID NO: 597562 - RNA, 19 nt, Homo sapiens
  misc_RNA (1)...(19): siRNA sense strand
cggcaggugucgccuauag

SEQ ID NO: 597563 - RNA, 19 nt, Homo sapiens
  misc_RNA (1)...(19): siRNA sense strand
ccagcuacauugaggaaca

SEQ ID NO: 597564 - RNA, 19 nt, Homo sapiens
  misc_RNA (1)...(19): siRNA sense strand
cauaugaauuguggaggaa

SEQ ID NO: 597565 - RNA, 19 nt, Homo sapiens
  misc_RNA (1)...(19): siRNA sense strand
ucucuuugcugccucuuga

SEQ ID NO: 597566 - RNA, 19 nt, Homo sapiens
  misc_RNA (1)...(19): siRNA sense strand
ggagaugugagcugugaug

SEQ ID NO: 597567 - RNA, 19 nt, Homo sapiens
  misc_RNA (1)...(19): siRNA sense strand
ugaggaagagggaaucuau

SEQ ID NO: 597568 - RNA, 19 nt, Homo sapiens
  misc_RNA (1)...(19): siRNA sense strand
gacauuaagcagaugaaga

SEQ ID NO: 597569 - RNA, 19 nt, Homo sapiens
  misc_RNA (1)...(19): siRNA sense strand
ggacaagguguuuaaugag

SEQ ID NO: 597570 - RNA, 19 nt, Homo sapiens
  misc_RNA (1)...(19): siRNA sense strand
ggaggaggauggcgaaacc

SEQ ID NO: 597571 - RNA, 19 nt, Homo sapiens
  misc_RNA (1)...(19): siRNA sense strand
gacaaggcuuccagugagu

SEQ ID NO: 597572 - RNA, 19 nt, Homo sapiens
  misc_RNA (1)...(19): siRNA sense strand
cggagaggcauggacauua

SEQ ID NO: 597573 - RNA, 19 nt, Homo sapiens
  misc_RNA (1)...(19): siRNA sense strand
ugaaggugcuacucaaugc

SEQ ID NO: 597574 - RNA, 19 nt, Homo sapiens
  misc_RNA (1)...(19): siRNA sense strand
ggaagagggaaucuaugga

SEQ ID NO: 597575 - RNA, 19 nt, Homo sapiens
  misc_RNA (1)...(19): siRNA sense strand
guucuugggugguuguaca

SEQ ID NO: 597576 - RNA, 19 nt, Homo sapiens
  misc_RNA (1)...(19): siRNA sense strand
ccaagauggcauaugaauu

SEQ ID NO: 597577 - RNA, 19 nt, Homo sapiens
  misc_RNA (1)...(19): siRNA sense strand
cauggaacuaccagaauuu

SEQ ID NO: 597578 - RNA, 19 nt, Homo sapiens
  misc_RNA (1)...(19): siRNA sense strand
uggccgaacucgcaaauac

SEQ ID NO: 597579 - RNA, 19 nt, Homo sapiens
  misc_RNA (1)...(19): siRNA sense strand
gaaagugccccgagacaug

SEQ ID NO: 597580 - RNA, 19 nt, Homo sapiens
  misc_RNA (1)...(19): siRNA sense strand
ggauuaccgaucucugaaa

SEQ ID NO: 597581 - RNA, 19 nt, Homo sapiens
  misc_RNA (1)...(19): siRNA sense strand
gaagcaacacgaaguagac

SEQ ID NO: 597582 - RNA, 19 nt, Homo sapiens
  misc_RNA (1)...(19): siRNA sense strand
agauggugcuugaggaaga

SEQ ID NO: 597583 - RNA, 19 nt, Homo sapiens
  misc_RNA (1)...(19): siRNA sense strand
cgaguaugaucugaaagug

SEQ ID NO: 597584 - RNA, 19 nt, Homo sapiens
  misc_RNA (1)...(19): siRNA sense strand
gcgaguaugaucugaaagu

SEQ ID NO: 597585 - RNA, 19 nt, Homo sapiens
  misc_RNA (1)...(19): siRNA sense strand
aacgagcacuucuccaaug

SEQ ID NO: 597586 - RNA, 19 nt, Homo sapiens
  misc_RNA (1)...(19): siRNA sense strand
gugugggagugucgacuuu

SEQ ID NO: 597587 - RNA, 19 nt, Homo sapiens
  misc_RNA (1)...(19): siRNA sense strand
ggauuacuuucuggaagga

SEQ ID NO: 597588 - RNA, 19 nt, Homo sapiens
  misc_RNA (1)...(19): siRNA sense strand
gaacucgcaaauacaaagu

SEQ ID NO: 597589 - RNA, 19 nt, Homo sapiens
  misc_RNA (1)...(19): siRNA sense strand
ggacggcgaguaugaucug

SEQ ID NO: 597590 - RNA, 19 nt, Homo sapiens
  misc_RNA (1)...(19): siRNA sense strand
gauuaccgaucucugaaaa

SEQ ID NO: 597591 - RNA, 19 nt, Homo sapiens
  misc_RNA (1)...(19): siRNA sense strand
gccugugaauccaucauga

SEQ ID NO: 597592 - RNA, 19 nt, Homo sapiens
  misc_RNA (1)...(19): siRNA sense strand
ccgaggacaagguguuuaa

SEQ ID NO: 597593 - RNA, 19 nt, Homo sapiens
  misc_RNA (1)...(19): siRNA sense strand
caaggcugcaggaaagauu

SEQ ID NO: 597594 - RNA, 19 nt, Homo sapiens
  misc_RNA (1)...(19): siRNA sense strand
gcaacacgaaguagacaag

SEQ ID NO: 597595 - RNA, 19 nt, Homo sapiens
  misc_RNA (1)...(19): siRNA sense strand
acacgaaguagacaagcua

SEQ ID NO: 597596 - RNA, 19 nt, Homo sapiens
  misc_RNA (1)...(19): siRNA sense strand
gggccuugaugagguggua

SEQ ID NO: 597597 - RNA, 19 nt, Homo sapiens
  misc_RNA (1)...(19): siRNA sense strand
cgaaguagacaagcuauac

SEQ ID NO: 597598 - RNA, 19 nt, Homo sapiens
  misc_RNA (1)...(19): siRNA sense strand
aagacaaggcuuccaguga

SEQ ID NO: 597599 - RNA, 19 nt, Homo sapiens
  misc_RNA (1)...(19): siRNA sense strand
cagauaugacuaaggaaga

SEQ ID NO: 597600 - RNA, 19 nt, Homo sapiens
  misc_RNA (1)...(19): siRNA sense strand
gccaucgucugcuacauua

SEQ ID NO: 597601 - RNA, 19 nt, Homo sapiens
  misc_RNA (1)...(19): siRNA sense strand
gagcacagcguccuggaua

SEQ ID NO: 597602 - RNA, 19 nt, Homo sapiens
  misc_RNA (1)...(19): siRNA sense strand
ggacaaugguggccguaga

SEQ ID NO: 597603 - RNA, 19 nt, Homo sapiens
  misc_RNA (1)...(19): siRNA sense strand
cggaggagcuagcugagua

SEQ ID NO: 597604 - RNA, 19 nt, Homo sapiens
  misc_RNA (1)...(19): siRNA sense strand
ggaaacggcccaccaagga

SEQ ID NO: 597605 - RNA, 19 nt, Homo sapiens
  misc_RNA (1)...(19): siRNA sense strand
ccucuguucuggauuauga

SEQ ID NO: 597606 - RNA, 19 nt, Homo sapiens
  misc_RNA (1)...(19): siRNA sense strand
gagcugccaucgcgcaaug

SEQ ID NO: 597607 - RNA, 19 nt, Homo sapiens
  misc_RNA (1)...(19): siRNA sense strand
caaccugucuguggaguuc

SEQ ID NO: 597608 - RNA, 19 nt, Homo sapiens
  misc_RNA (1)...(19): siRNA sense strand
cgacugaugugggccaaga

SEQ ID NO: 597609 - RNA, 19 nt, Homo sapiens
  misc_RNA (1)...(19): siRNA sense strand
gagcaacccggacccuauu

SEQ ID NO: 597610 - RNA, 19 nt, Homo sapiens
  misc_RNA (1)...(19): siRNA sense strand
ggugucugguacuucaaua

SEQ ID NO: 597611 - RNA, 19 nt, Homo sapiens
  misc_RNA (1)...(19): siRNA sense strand
gcuuugacuucccggauga

SEQ ID NO: 597612 - RNA, 19 nt, Homo sapiens
  misc_RNA (1)...(19): siRNA sense strand
cugccucuguucuggauua

SEQ ID NO: 597613 - RNA, 19 nt, Homo sapiens
  misc_RNA (1)...(19): siRNA sense strand
cauggugucugguacuuca

SEQ ID NO: 597614 - RNA, 19 nt, Homo sapiens
  misc_RNA (1)...(19): siRNA sense strand
gcaaugugaccgugaacga

SEQ ID NO: 597615 - RNA, 19 nt, Homo sapiens
  misc_RNA (1)...(19): siRNA sense strand
ggagcuagcugaguaugcu

SEQ ID NO: 597616 - RNA, 19 nt, Homo sapiens
  misc_RNA (1)...(19): siRNA sense strand
ugaaauccgggucaaguga

SEQ ID NO: 597617 - RNA, 19 nt, Homo sapiens
  misc_RNA (1)...(19): siRNA sense strand
ugauugccaucgucugcua

SEQ ID NO: 597618 - RNA, 19 nt, Homo sapiens
  misc_RNA (1)...(19): siRNA sense strand
caacaccacccugcaguuc

SEQ ID NO: 597619 - RNA, 19 nt, Homo sapiens
  misc_RNA (1)...(19): siRNA sense strand
gcacagcguccuggauauc

SEQ ID NO: 597620 - RNA, 19 nt, Homo sapiens
  misc_RNA (1)...(19): siRNA sense strand
cgaggaugauggagaguac

SEQ ID NO: 597621 - RNA, 19 nt, Homo sapiens
  misc_RNA (1)...(19): siRNA sense strand
cagcauggacgucaaguac

SEQ ID NO: 597622 - RNA, 19 nt, Homo sapiens
  misc_RNA (1)...(19): siRNA sense strand
gaccugggccugcgaaacu

SEQ ID NO: 597623 - RNA, 19 nt, Homo sapiens
  misc_RNA (1)...(19): siRNA sense strand
gcuacaaccaguacaccuu

SEQ ID NO: 597624 - RNA, 19 nt, Homo sapiens
  misc_RNA (1)...(19): siRNA sense strand
caagucgcgcacccaagua

SEQ ID NO: 597625 - RNA, 19 nt, Homo sapiens
  misc_RNA (1)...(19): siRNA sense strand
gcugaaauccgggucaagu

SEQ ID NO: 597626 - RNA, 19 nt, Homo sapiens
  misc_RNA (1)...(19): siRNA sense strand
ucaagucgcgcacccaagu

SEQ ID NO: 597627 - RNA, 19 nt, Homo sapiens
  misc_RNA (1)...(19): siRNA sense strand
ggaggagcuagcugaguau

SEQ ID NO: 597628 - RNA, 19 nt, Homo sapiens
  misc_RNA (1)...(19): siRNA sense strand
gcauggugccggacaacug

SEQ ID NO: 597629 - RNA, 19 nt, Homo sapiens
  misc_RNA (1)...(19): siRNA sense strand
acaccacccugcaguucga

SEQ ID NO: 597630 - RNA, 19 nt, Homo sapiens
  misc_RNA (1)...(19): siRNA sense strand
caaccaguacaccuucuca

SEQ ID NO: 597631 - RNA, 19 nt, Homo sapiens
  misc_RNA (1)...(19): siRNA sense strand
caacagugaacgggacaau

SEQ ID NO: 597632 - RNA, 19 nt, Homo sapiens
  misc_RNA (1)...(19): siRNA sense strand
uagcugaguaugcugaaau

SEQ ID NO: 597633 - RNA, 19 nt, Homo sapiens
  misc_RNA (1)...(19): siRNA sense strand
acagugaacgggacaaugg

SEQ ID NO: 597634 - RNA, 19 nt, Homo sapiens
  misc_RNA (1)...(19): siRNA sense strand
ccuggaagccaacagugaa

SEQ ID NO: 597635 - RNA, 19 nt, Homo sapiens
  misc_RNA (1)...(19): siRNA sense strand
ucaccaucuucaaggagaa

SEQ ID NO: 597636 - RNA, 19 nt, Homo sapiens
  misc_RNA (1)...(19): siRNA sense strand
ccaacaccacccugcaguu

SEQ ID NO: 597637 - RNA, 19 nt, Homo sapiens
  misc_RNA (1)...(19): siRNA sense strand
agaggcgccugggaucuga

SEQ ID NO: 597638 - RNA, 19 nt, Homo sapiens
  misc_RNA (1)...(19): siRNA sense strand
uguccacggucaucuacga

SEQ ID NO: 597639 - RNA, 19 nt, Homo sapiens
  misc_RNA (1)...(19): siRNA sense strand
ccagcauggacgucaagua

SEQ ID NO: 597640 - RNA, 19 nt, Homo sapiens
  misc_RNA (1)...(19): siRNA sense strand
uguucuggauuaugauuuc

SEQ ID NO: 597641 - RNA, 19 nt, Homo sapiens
  misc_RNA (1)...(19): siRNA sense strand
gccaucgucugcuacauua

SEQ ID NO: 597642 - RNA, 19 nt, Homo sapiens
  misc_RNA (1)...(19): siRNA sense strand
gagcacagcguccuggaua

SEQ ID NO: 597643 - RNA, 19 nt, Homo sapiens
  misc_RNA (1)...(19): siRNA sense strand
ggacaaugguggccguaga

SEQ ID NO: 597644 - RNA, 19 nt, Homo sapiens
  misc_RNA (1)...(19): siRNA sense strand
ccucuguucuggauuauga

SEQ ID NO: 597645 - RNA, 19 nt, Homo sapiens
  misc_RNA (1)...(19): siRNA sense strand
gagcugccaucgcgcaaug

SEQ ID NO: 597646 - RNA, 19 nt, Homo sapiens
  misc_RNA (1)...(19): siRNA sense strand
caaccugucuguggaguuc

SEQ ID NO: 597647 - RNA, 19 nt, Homo sapiens
  misc_RNA (1)...(19): siRNA sense strand
cgacugaugugggccaaga

SEQ ID NO: 597648 - RNA, 19 nt, Homo sapiens
  misc_RNA (1)...(19): siRNA sense strand
gagcaacccggacccuauu

SEQ ID NO: 597649 - RNA, 19 nt, Homo sapiens
  misc_RNA (1)...(19): siRNA sense strand
ggugucugguacuucaaua

SEQ ID NO: 597650 - RNA, 19 nt, Homo sapiens
  misc_RNA (1)...(19): siRNA sense strand
gcuuugacuucccggauga

SEQ ID NO: 597651 - RNA, 19 nt, Homo sapiens
  misc_RNA (1)...(19): siRNA sense strand
cugccucuguucuggauua

SEQ ID NO: 597652 - RNA, 19 nt, Homo sapiens
  misc_RNA (1)...(19): siRNA sense strand
cauggugucugguacuuca

SEQ ID NO: 597653 - RNA, 19 nt, Homo sapiens
  misc_RNA (1)...(19): siRNA sense strand
gcaaugugaccgugaacga

SEQ ID NO: 597654 - RNA, 19 nt, Homo sapiens
  misc_RNA (1)...(19): siRNA sense strand
ugauugccaucgucugcua

SEQ ID NO: 597655 - RNA, 19 nt, Homo sapiens
  misc_RNA (1)...(19): siRNA sense strand
caacaccacccugcaguuc

SEQ ID NO: 597656 - RNA, 19 nt, Homo sapiens
  misc_RNA (1)...(19): siRNA sense strand
gcacagcguccuggauauc

SEQ ID NO: 597657 - RNA, 19 nt, Homo sapiens
  misc_RNA (1)...(19): siRNA sense strand
cgaggaugauggagaguac

SEQ ID NO: 597658 - RNA, 19 nt, Homo sapiens
  misc_RNA (1)...(19): siRNA sense strand
cagcauggacgucaaguac

SEQ ID NO: 597659 - RNA, 19 nt, Homo sapiens
  misc_RNA (1)...(19): siRNA sense strand
gaccugggccugcgaaacu

SEQ ID NO: 597660 - RNA, 19 nt, Homo sapiens
  misc_RNA (1)...(19): siRNA sense strand
gcuacaaccaguacaccuu

SEQ ID NO: 597661 - RNA, 19 nt, Homo sapiens
  misc_RNA (1)...(19): siRNA sense strand
caagucgcgcacccaagua

SEQ ID NO: 597662 - RNA, 19 nt, Homo sapiens
  misc_RNA (1)...(19): siRNA sense strand
ucaagucgcgcacccaagu

SEQ ID NO: 597663 - RNA, 19 nt, Homo sapiens
  misc_RNA (1)...(19): siRNA sense strand
gcauggugccggacaacug

SEQ ID NO: 597664 - RNA, 19 nt, Homo sapiens
  misc_RNA (1)...(19): siRNA sense strand
acaccacccugcaguucga

SEQ ID NO: 597665 - RNA, 19 nt, Homo sapiens
  misc_RNA (1)...(19): siRNA sense strand
caaccaguacaccuucuca

SEQ ID NO: 597666 - RNA, 19 nt, Homo sapiens
  misc_RNA (1)...(19): siRNA sense strand
caacagugaacgggacaau

SEQ ID NO: 597667 - RNA, 19 nt, Homo sapiens
  misc_RNA (1)...(19): siRNA sense strand
acagugaacgggacaaugg

SEQ ID NO: 597668 - RNA, 19 nt, Homo sapiens
  misc_RNA (1)...(19): siRNA sense strand
ccuggaagccaacagugaa

SEQ ID NO: 597669 - RNA, 19 nt, Homo sapiens
  misc_RNA (1)...(19): siRNA sense strand
ucaccaucuucaaggagaa

SEQ ID NO: 597670 - RNA, 19 nt, Homo sapiens
  misc_RNA (1)...(19): siRNA sense strand
ccaacaccacccugcaguu

SEQ ID NO: 597671 - RNA, 19 nt, Homo sapiens
  misc_RNA (1)...(19): siRNA sense strand
uguccacggucaucuacga

SEQ ID NO: 597672 - RNA, 19 nt, Homo sapiens
  misc_RNA (1)...(19): siRNA sense strand
ccagcauggacgucaagua

SEQ ID NO: 597673 - RNA, 19 nt, Homo sapiens
  misc_RNA (1)...(19): siRNA sense strand
uguucuggauuaugauuuc

SEQ ID NO: 597674 - RNA, 19 nt, Homo sapiens
  misc_RNA (1)...(19): siRNA sense strand
gcacagagcugaacaauac

SEQ ID NO: 597675 - RNA, 19 nt, Homo sapiens
  misc_RNA (1)...(19): siRNA sense strand
caacugccauuuccaagaa

SEQ ID NO: 597676 - RNA, 19 nt, Homo sapiens
  misc_RNA (1)...(19): siRNA sense strand
ggacuacuaugccuacaga

SEQ ID NO: 597677 - RNA, 19 nt, Homo sapiens
  misc_RNA (1)...(19): siRNA sense strand
gcaaagggacugugaugaa

SEQ ID NO: 597678 - RNA, 19 nt, Homo sapiens
  misc_RNA (1)...(19): siRNA sense strand
gaaauuugaagacgacauu

SEQ ID NO: 597679 - RNA, 19 nt, Homo sapiens
  misc_RNA (1)...(19): siRNA sense strand
ggaguuugcuguccacaca

SEQ ID NO: 597680 - RNA, 19 nt, Homo sapiens
  misc_RNA (1)...(19): siRNA sense strand
guccaagacuguauucuca

SEQ ID NO: 597681 - RNA, 19 nt, Homo sapiens
  misc_RNA (1)...(19): siRNA sense strand
gaacuaggugugggaaauu

SEQ ID NO: 597682 - RNA, 19 nt, Homo sapiens
  misc_RNA (1)...(19): siRNA sense strand
acaaugucauggcucguua

SEQ ID NO: 597683 - RNA, 19 nt, Homo sapiens
  misc_RNA (1)...(19): siRNA sense strand
gagcaaagggacugugaug

SEQ ID NO: 597684 - RNA, 19 nt, Homo sapiens
  misc_RNA (1)...(19): siRNA sense strand
ccaagacuguauucucaau

SEQ ID NO: 597685 - RNA, 19 nt, Homo sapiens
  misc_RNA (1)...(19): siRNA sense strand
caaagggacugugaugaac

SEQ ID NO: 597686 - RNA, 19 nt, Homo sapiens
  misc_RNA (1)...(19): siRNA sense strand
gggcacaucuugaauuccu

SEQ ID NO: 597687 - RNA, 19 nt, Homo sapiens
  misc_RNA (1)...(19): siRNA sense strand
agaacuaggugugggaaau

SEQ ID NO: 597688 - RNA, 19 nt, Homo sapiens
  misc_RNA (1)...(19): siRNA sense strand
ggcccuggaugacucaguu

SEQ ID NO: 597689 - RNA, 19 nt, Homo sapiens
  misc_RNA (1)...(19): siRNA sense strand
ugacaacugccauuuccaa

SEQ ID NO: 597690 - RNA, 19 nt, Homo sapiens
  misc_RNA (1)...(19): siRNA sense strand
gaaagcacagagcugaaca

SEQ ID NO: 597691 - RNA, 19 nt, Homo sapiens
  misc_RNA (1)...(19): siRNA sense strand
acaauacuuucaccugcuu

SEQ ID NO: 597692 - RNA, 19 nt, Homo sapiens
  misc_RNA (1)...(19): siRNA sense strand
gcucccagauccugcugau

SEQ ID NO: 597693 - RNA, 19 nt, Homo sapiens
  misc_RNA (1)...(19): siRNA sense strand
aagacgacauugacaacug

SEQ ID NO: 597694 - RNA, 19 nt, Homo sapiens
  misc_RNA (1)...(19): siRNA sense strand
gacauugacaacugccauu

SEQ ID NO: 597695 - RNA, 19 nt, Homo sapiens
  misc_RNA (1)...(19): siRNA sense strand
aagacuguauucucaaugg

SEQ ID NO: 597696 - RNA, 19 nt, Homo sapiens
  misc_RNA (1)...(19): siRNA sense strand
caacagagcaaggacuacu

SEQ ID NO: 597697 - RNA, 19 nt, Homo sapiens
  misc_RNA (1)...(19): siRNA sense strand
cagagcugaacaauacuuu

SEQ ID NO: 597698 - RNA, 19 nt, Homo sapiens
  misc_RNA (1)...(19): siRNA sense strand
aacuaggugugggaaauuu

SEQ ID NO: 597699 - RNA, 19 nt, Homo sapiens
  misc_RNA (1)...(19): siRNA sense strand
acagagcaaggacuacuau

SEQ ID NO: 597700 - RNA, 19 nt, Homo sapiens
  misc_RNA (1)...(19): siRNA sense strand
gaagacgacauugacaacu

SEQ ID NO: 597701 - RNA, 19 nt, Homo sapiens
  misc_RNA (1)...(19): siRNA sense strand
agacuguauucucaaugga

SEQ ID NO: 597702 - RNA, 19 nt, Homo sapiens
  misc_RNA (1)...(19): siRNA sense strand
ucucuuaggcucccagauc

SEQ ID NO: 597703 - RNA, 19 nt, Homo sapiens
  misc_RNA (1)...(19): siRNA sense strand
agaccugcuuggagggauu

SEQ ID NO: 597704 - RNA, 19 nt, Homo sapiens
  misc_RNA (1)...(19): siRNA sense strand
gagaacuaggugugggaaa

SEQ ID NO: 597705 - RNA, 19 nt, Homo sapiens
  misc_RNA (1)...(19): siRNA sense strand
gcugcugcugcuucucuua

SEQ ID NO: 597706 - RNA, 19 nt, Homo sapiens
  misc_RNA (1)...(19): siRNA sense strand
acaacugccauuuccaaga

SEQ ID NO: 597707 - RNA, 19 nt, Homo sapiens
  misc_RNA (1)...(19): siRNA sense strand
ggugugggaaauuugaaga

SEQ ID NO: 597708 - RNA, 19 nt, Homo sapiens
  misc_RNA (1)...(19): siRNA sense strand
cuaggugugggaaauuuga

SEQ ID NO: 597709 - RNA, 19 nt, Homo sapiens
  misc_RNA (1)...(19): siRNA sense strand
caagacuguauucucaaug

SEQ ID NO: 597710 - RNA, 19 nt, Homo sapiens
  misc_RNA (1)...(19): siRNA sense strand
gaaauaagaucacacacau

SEQ ID NO: 597711 - RNA, 19 nt, Homo sapiens
  misc_RNA (1)...(19): siRNA sense strand
caaagaauguaucaacuuc

SEQ ID NO: 597712 - RNA, 19 nt, Homo sapiens
  misc_RNA (1)...(19): siRNA sense strand
ucacacacaucaucucuau

SEQ ID NO: 597713 - RNA, 19 nt, Homo sapiens
  misc_RNA (1)...(19): siRNA sense strand
gaucagcugggccgaaaua

SEQ ID NO: 597714 - RNA, 19 nt, Homo sapiens
  misc_RNA (1)...(19): siRNA sense strand
ggcagcagcuugaagaguu

SEQ ID NO: 597715 - RNA, 19 nt, Homo sapiens
  misc_RNA (1)...(19): siRNA sense strand
gcagcagcuugaagaguuu

SEQ ID NO: 597716 - RNA, 19 nt, Homo sapiens
  misc_RNA (1)...(19): siRNA sense strand
cagcguaugugaugacugu

SEQ ID NO: 597717 - RNA, 19 nt, Homo sapiens
  misc_RNA (1)...(19): siRNA sense strand
aaacuucauugaugccaaa

SEQ ID NO: 597718 - RNA, 19 nt, Homo sapiens
  misc_RNA (1)...(19): siRNA sense strand
cagcugggccgaaauaaga

SEQ ID NO: 597719 - RNA, 19 nt, Homo sapiens
  misc_RNA (1)...(19): siRNA sense strand
cgaaauaagaucacacaca

SEQ ID NO: 597720 - RNA, 19 nt, Homo sapiens
  misc_RNA (1)...(19): siRNA sense strand
aauaagaucacacacauca

SEQ ID NO: 597721 - RNA, 19 nt, Homo sapiens
  misc_RNA (1)...(19): siRNA sense strand
uaagaucacacacaucauc

SEQ ID NO: 597722 - RNA, 19 nt, Homo sapiens
  misc_RNA (1)...(19): siRNA sense strand
gcacuucaaagaauguauc

SEQ ID NO: 597723 - RNA, 19 nt, Homo sapiens
  misc_RNA (1)...(19): siRNA sense strand
cucggaaacuucauugaug

SEQ ID NO: 597724 - RNA, 19 nt, Homo sapiens
  misc_RNA (1)...(19): siRNA sense strand
uggaucagcugggccgaaa

SEQ ID NO: 597725 - RNA, 19 nt, Homo sapiens
  misc_RNA (1)...(19): siRNA sense strand
gaucacacacaucaucucu

SEQ ID NO: 597726 - RNA, 19 nt, Homo sapiens
  misc_RNA (1)...(19): siRNA sense strand
gacucuaccucggaaacuu

SEQ ID NO: 597727 - RNA, 19 nt, Homo sapiens
  misc_RNA (1)...(19): siRNA sense strand
ccacugcugccgccuuaau

SEQ ID NO: 597728 - RNA, 19 nt, Homo sapiens
  misc_RNA (1)...(19): siRNA sense strand
gcuuuaggcagcagcuuga

SEQ ID NO: 597729 - RNA, 19 nt, Homo sapiens
  misc_RNA (1)...(19): siRNA sense strand
ucucgcagcaccacgauug

SEQ ID NO: 597730 - RNA, 19 nt, Homo sapiens
  misc_RNA (1)...(19): siRNA sense strand
ugugacagcguaugugaug

SEQ ID NO: 597731 - RNA, 19 nt, Homo sapiens
  misc_RNA (1)...(19): siRNA sense strand
gcaucccggucgcugauac

SEQ ID NO: 597732 - RNA, 19 nt, Homo sapiens
  misc_RNA (1)...(19): siRNA sense strand
uuaggcagcagcuugaaga

SEQ ID NO: 597733 - RNA, 19 nt, Homo sapiens
  misc_RNA (1)...(19): siRNA sense strand
gcguaugugaugacuguga

SEQ ID NO: 597734 - RNA, 19 nt, Homo sapiens
  misc_RNA (1)...(19): siRNA sense strand
auccacugcugccgccuua

SEQ ID NO: 597735 - RNA, 19 nt, Homo sapiens
  misc_RNA (1)...(19): siRNA sense strand
gggccgaaauaagaucaca

SEQ ID NO: 597736 - RNA, 19 nt, Homo sapiens
  misc_RNA (1)...(19): siRNA sense strand
aaaagcacuucaaagaaug

SEQ ID NO: 597737 - RNA, 19 nt, Homo sapiens
  misc_RNA (1)...(19): siRNA sense strand
ccucggaaacuucauugau

SEQ ID NO: 597738 - RNA, 19 nt, Homo sapiens
  misc_RNA (1)...(19): siRNA sense strand
gccgaaauaagaucacaca

SEQ ID NO: 597739 - RNA, 19 nt, Homo sapiens
  misc_RNA (1)...(19): siRNA sense strand
ggcagcagcuugaagaguu

SEQ ID NO: 597740 - RNA, 19 nt, Homo sapiens
  misc_RNA (1)...(19): siRNA sense strand
gcagcagcuugaagaguuu

SEQ ID NO: 597741 - RNA, 19 nt, Homo sapiens
  misc_RNA (1)...(19): siRNA sense strand
gcuuuaggcagcagcuuga

SEQ ID NO: 597742 - RNA, 19 nt, Homo sapiens
  misc_RNA (1)...(19): siRNA sense strand
uuaggcagcagcuugaaga

SEQ ID NO: 597743 - RNA, 19 nt, Homo sapiens
  misc_RNA (1)...(19): siRNA sense strand
gcugugugauggaugagaa

SEQ ID NO: 597744 - RNA, 19 nt, Homo sapiens
  misc_RNA (1)...(19): siRNA sense strand
ggacugugaggucugauuc

SEQ ID NO: 597745 - RNA, 19 nt, Homo sapiens
  misc_RNA (1)...(19): siRNA sense strand
ggaugagaauugucaagcu

SEQ ID NO: 597746 - RNA, 19 nt, Homo sapiens
  misc_RNA (1)...(19): siRNA sense strand
ugugauggaugagaauugu

SEQ ID NO: 597747 - RNA, 19 nt, Homo sapiens
  misc_RNA (1)...(19): siRNA sense strand
ccccaaaacugaccaugaa

SEQ ID NO: 597748 - RNA, 19 nt, Homo sapiens
  misc_RNA (1)...(19): siRNA sense strand
gugggccugugcauuguug

SEQ ID NO: 597749 - RNA, 19 nt, Homo sapiens
  misc_RNA (1)...(19): siRNA sense strand
gaauugucaagcuggagaa

SEQ ID NO: 597750 - RNA, 19 nt, Homo sapiens
  misc_RNA (1)...(19): siRNA sense strand
gggcggugauuguccaaaa

SEQ ID NO: 597751 - RNA, 19 nt, Homo sapiens
  misc_RNA (1)...(19): siRNA sense strand
ggacugugaggucugauuc

SEQ ID NO: 597752 - RNA, 19 nt, Homo sapiens
  misc_RNA (1)...(19): siRNA sense strand
ggaugagaauugucaagcu

SEQ ID NO: 597753 - RNA, 19 nt, Homo sapiens
  misc_RNA (1)...(19): siRNA sense strand
ccccaaaacugaccaugaa

SEQ ID NO: 597754 - RNA, 19 nt, Homo sapiens
  misc_RNA (1)...(19): siRNA sense strand
gaauugucaagcuggagaa

SEQ ID NO: 597755 - RNA, 19 nt, Homo sapiens
  misc_RNA (1)...(19): siRNA sense strand
ggacugugaggucugauuc

SEQ ID NO: 597756 - RNA, 19 nt, Homo sapiens
  misc_RNA (1)...(19): siRNA sense strand
ggaugagaauugucaagcu

SEQ ID NO: 597757 - RNA, 19 nt, Homo sapiens
  misc_RNA (1)...(19): siRNA sense strand
ccccaaaacugaccaugaa

SEQ ID NO: 597758 - RNA, 19 nt, Homo sapiens
  misc_RNA (1)...(19): siRNA sense strand
gaauugucaagcuggagaa

SEQ ID NO: 597759 - RNA, 19 nt, Homo sapiens
  misc_RNA (1)...(19): siRNA sense strand
ggacugugaggucugauuc

SEQ ID NO: 597760 - RNA, 19 nt, Homo sapiens
  misc_RNA (1)...(19): siRNA sense strand
ggaugagaauugucaagcu

SEQ ID NO: 597761 - RNA, 19 nt, Homo sapiens
  misc_RNA (1)...(19): siRNA sense strand
ccccaaaacugaccaugaa

SEQ ID NO: 597762 - RNA, 19 nt, Homo sapiens
  misc_RNA (1)...(19): siRNA sense strand
gaauugucaagcuggagaa

SEQ ID NO: 597763 - RNA, 19 nt, Homo sapiens
  misc_RNA (1)...(19): siRNA sense strand
ggagaaagguaauuugguu

SEQ ID NO: 597764 - RNA, 19 nt, Homo sapiens
  misc_RNA (1)...(19): siRNA sense strand
caacaagacgcgcaucauu

SEQ ID NO: 597765 - RNA, 19 nt, Homo sapiens
  misc_RNA (1)...(19): siRNA sense strand
gagccaaacuauccagguu

SEQ ID NO: 597766 - RNA, 19 nt, Homo sapiens
  misc_RNA (1)...(19): siRNA sense strand
acaagacgcgcaucauuua

SEQ ID NO: 597767 - RNA, 19 nt, Homo sapiens
  misc_RNA (1)...(19): siRNA sense strand
gccaaacuauccagguuaa

SEQ ID NO: 597768 - RNA, 19 nt, Homo sapiens
  misc_RNA (1)...(19): siRNA sense strand
gaaagguaauuugguugga

SEQ ID NO: 597769 - RNA, 19 nt, Homo sapiens
  misc_RNA (1)...(19): siRNA sense strand
ggaauuuacaguuucaguu

SEQ ID NO: 597770 - RNA, 19 nt, Homo sapiens
  misc_RNA (1)...(19): siRNA sense strand
cgaaugguguccugcucua

SEQ ID NO: 597771 - RNA, 19 nt, Homo sapiens
  misc_RNA (1)...(19): siRNA sense strand
guuggaggcuggcaguauu

SEQ ID NO: 597772 - RNA, 19 nt, Homo sapiens
  misc_RNA (1)...(19): siRNA sense strand
gauaaagaggauaagguuu

SEQ ID NO: 597773 - RNA, 19 nt, Homo sapiens
  misc_RNA (1)...(19): siRNA sense strand
ccaguaauaucugccuuug

SEQ ID NO: 597774 - RNA, 19 nt, Homo sapiens
  misc_RNA (1)...(19): siRNA sense strand
gcgcaucauuuacuucgau

SEQ ID NO: 597775 - RNA, 19 nt, Homo sapiens
  misc_RNA (1)...(19): siRNA sense strand
caaagauguuacucgugaa

SEQ ID NO: 597776 - RNA, 19 nt, Homo sapiens
  misc_RNA (1)...(19): siRNA sense strand
cuaccuagauaaagaggau

SEQ ID NO: 597777 - RNA, 19 nt, Homo sapiens
  misc_RNA (1)...(19): siRNA sense strand
aacaagacgcgcaucauuu

SEQ ID NO: 597778 - RNA, 19 nt, Homo sapiens
  misc_RNA (1)...(19): siRNA sense strand
agacgcgcaucauuuacuu

SEQ ID NO: 597779 - RNA, 19 nt, Homo sapiens
  misc_RNA (1)...(19): siRNA sense strand
uggugaauguggguaauuu

SEQ ID NO: 597780 - RNA, 19 nt, Homo sapiens
  misc_RNA (1)...(19): siRNA sense strand
agauaaagaggauaagguu

SEQ ID NO: 597781 - RNA, 19 nt, Homo sapiens
  misc_RNA (1)...(19): siRNA sense strand
cacauuggagucugucuuu

SEQ ID NO: 597782 - RNA, 19 nt, Homo sapiens
  misc_RNA (1)...(19): siRNA sense strand
auuggagucugucuuugua

SEQ ID NO: 597783 - RNA, 19 nt, Homo sapiens
  misc_RNA (1)...(19): siRNA sense strand
ucauuuacuucgaucagau

SEQ ID NO: 597784 - RNA, 19 nt, Homo sapiens
  misc_RNA (1)...(19): siRNA sense strand
aaacuauccagguuaacuu

SEQ ID NO: 597785 - RNA, 19 nt, Homo sapiens
  misc_RNA (1)...(19): siRNA sense strand
gauguuaaauggaaaacca

SEQ ID NO: 597786 - RNA, 19 nt, Homo sapiens
  misc_RNA (1)...(19): siRNA sense strand
ucacgugauuaaagucuac

SEQ ID NO: 597787 - RNA, 19 nt, Homo sapiens
  misc_RNA (1)...(19): siRNA sense strand
gcaacaagacgcgcaucau

SEQ ID NO: 597788 - RNA, 19 nt, Homo sapiens
  misc_RNA (1)...(19): siRNA sense strand
caaacuauccagguuaacu

SEQ ID NO: 597789 - RNA, 19 nt, Homo sapiens
  misc_RNA (1)...(19): siRNA sense strand
uauccagguuaacuugaug

SEQ ID NO: 597790 - RNA, 19 nt, Homo sapiens
  misc_RNA (1)...(19): siRNA sense strand
gcaccaagaaaaggaauuu

SEQ ID NO: 597791 - RNA, 19 nt, Homo sapiens
  misc_RNA (1)...(19): siRNA sense strand
gugaagcugccacgaaugg

SEQ ID NO: 597792 - RNA, 19 nt, Homo sapiens
  misc_RNA (1)...(19): siRNA sense strand
cuauccagguuaacuugau

SEQ ID NO: 597793 - RNA, 19 nt, Homo sapiens
  misc_RNA (1)...(19): siRNA sense strand
uagauaaagaggauaaggu

SEQ ID NO: 597794 - RNA, 19 nt, Homo sapiens
  misc_RNA (1)...(19): siRNA sense strand
aaacuggagaaagguaauu

SEQ ID NO: 597795 - RNA, 19 nt, Homo sapiens
  misc_RNA (1)...(19): siRNA sense strand
ugaaagaagugacgaaauu

SEQ ID NO: 597796 - RNA, 19 nt, Homo sapiens
  misc_RNA (1)...(19): siRNA sense strand
gagaaacccuuuaaauguu

SEQ ID NO: 597797 - RNA, 19 nt, Homo sapiens
  misc_RNA (1)...(19): siRNA sense strand
ggaaauaccacgaugcaaa

SEQ ID NO: 597798 - RNA, 19 nt, Homo sapiens
  misc_RNA (1)...(19): siRNA sense strand
ggaagaagaacaagaaaga

SEQ ID NO: 597799 - RNA, 19 nt, Homo sapiens
  misc_RNA (1)...(19): siRNA sense strand
gaaauuguucucacaguuu

SEQ ID NO: 597800 - RNA, 19 nt, Homo sapiens
  misc_RNA (1)...(19): siRNA sense strand
gaaacaaugucaggagaug

SEQ ID NO: 597801 - RNA, 19 nt, Homo sapiens
  misc_RNA (1)...(19): siRNA sense strand
gcgaaaauguccccaaaua

SEQ ID NO: 597802 - RNA, 19 nt, Homo sapiens
  misc_RNA (1)...(19): siRNA sense strand
cacaggcgcuauaaacaua

SEQ ID NO: 597803 - RNA, 19 nt, Homo sapiens
  misc_RNA (1)...(19): siRNA sense strand
ggauuaaccugcacagaca

SEQ ID NO: 597804 - RNA, 19 nt, Homo sapiens
  misc_RNA (1)...(19): siRNA sense strand
gaaccaggcccuacaagug

SEQ ID NO: 597805 - RNA, 19 nt, Homo sapiens
  misc_RNA (1)...(19): siRNA sense strand
gcuauaaacauacucauga

SEQ ID NO: 597806 - RNA, 19 nt, Homo sapiens
  misc_RNA (1)...(19): siRNA sense strand
ggaaagggaagaagaacaa

SEQ ID NO: 597807 - RNA, 19 nt, Homo sapiens
  misc_RNA (1)...(19): siRNA sense strand
ugagaaacccuuuaaaugu

SEQ ID NO: 597808 - RNA, 19 nt, Homo sapiens
  misc_RNA (1)...(19): siRNA sense strand
gaaauaccacgaugcaaau

SEQ ID NO: 597809 - RNA, 19 nt, Homo sapiens
  misc_RNA (1)...(19): siRNA sense strand
gcacagacauucggagaag

SEQ ID NO: 597810 - RNA, 19 nt, Homo sapiens
  misc_RNA (1)...(19): siRNA sense strand
guuauuggcugaaagaaca

SEQ ID NO: 597811 - RNA, 19 nt, Homo sapiens
  misc_RNA (1)...(19): siRNA sense strand
cgaaauuguucucacaguu

SEQ ID NO: 597812 - RNA, 19 nt, Homo sapiens
  misc_RNA (1)...(19): siRNA sense strand
gaaagaagugacgaaauug

SEQ ID NO: 597813 - RNA, 19 nt, Homo sapiens
  misc_RNA (1)...(19): siRNA sense strand
gaacaagaggaucaaccua

SEQ ID NO: 597814 - RNA, 19 nt, Homo sapiens
  misc_RNA (1)...(19): siRNA sense strand
ggagaagaaccaguuauug

SEQ ID NO: 597815 - RNA, 19 nt, Homo sapiens
  misc_RNA (1)...(19): siRNA sense strand
ccacaaagggucagaagga

SEQ ID NO: 597816 - RNA, 19 nt, Homo sapiens
  misc_RNA (1)...(19): siRNA sense strand
guucaccucuucuagaaug

SEQ ID NO: 597817 - RNA, 19 nt, Homo sapiens
  misc_RNA (1)...(19): siRNA sense strand
gagaagaaccaguuauugg

SEQ ID NO: 597818 - RNA, 19 nt, Homo sapiens
  misc_RNA (1)...(19): siRNA sense strand
gcuguggaguugcaggaua

SEQ ID NO: 597819 - RNA, 19 nt, Homo sapiens
  misc_RNA (1)...(19): siRNA sense strand
gugagaagccuuacgaaug

SEQ ID NO: 597820 - RNA, 19 nt, Homo sapiens
  misc_RNA (1)...(19): siRNA sense strand
cagcagagauaccuacaag

SEQ ID NO: 597821 - RNA, 19 nt, Homo sapiens
  misc_RNA (1)...(19): siRNA sense strand
ugaucaagcucgaggaaga

SEQ ID NO: 597822 - RNA, 19 nt, Homo sapiens
  misc_RNA (1)...(19): siRNA sense strand
ggaagcagaccauccugaa

SEQ ID NO: 597823 - RNA, 19 nt, Homo sapiens
  misc_RNA (1)...(19): siRNA sense strand
caaauuucaucccgacugu

SEQ ID NO: 597824 - RNA, 19 nt, Homo sapiens
  misc_RNA (1)...(19): siRNA sense strand
ccagaaaacucauaagaau

SEQ ID NO: 597825 - RNA, 19 nt, Homo sapiens
  misc_RNA (1)...(19): siRNA sense strand
gcaauucaccaagaucaaa

SEQ ID NO: 597826 - RNA, 19 nt, Homo sapiens
  misc_RNA (1)...(19): siRNA sense strand
ucaacacgauggauaagug

SEQ ID NO: 597827 - RNA, 19 nt, Homo sapiens
  misc_RNA (1)...(19): siRNA sense strand
gcaggagaagaaccaguua

SEQ ID NO: 597828 - RNA, 19 nt, Homo sapiens
  misc_RNA (1)...(19): siRNA sense strand
guucugcugucuuccauga

SEQ ID NO: 597829 - RNA, 19 nt, Homo sapiens
  misc_RNA (1)...(19): siRNA sense strand
ugagaagccuuacgaaugc

SEQ ID NO: 597830 - RNA, 19 nt, Homo sapiens
  misc_RNA (1)...(19): siRNA sense strand
ugagaucucuguccuuucu

SEQ ID NO: 597831 - RNA, 19 nt, Homo sapiens
  misc_RNA (1)...(19): siRNA sense strand
cuucuagaaugucaaguuu

SEQ ID NO: 597832 - RNA, 19 nt, Homo sapiens
  misc_RNA (1)...(19): siRNA sense strand
ucaaagaggaaguggauga

SEQ ID NO: 597833 - RNA, 19 nt, Homo sapiens
  misc_RNA (1)...(19): siRNA sense strand
gaagaacaagaaagaggaa

SEQ ID NO: 597834 - RNA, 19 nt, Homo sapiens
  misc_RNA (1)...(19): siRNA sense strand
cagugaagacaguaaguua

SEQ ID NO: 597835 - RNA, 19 nt, Homo sapiens
  misc_RNA (1)...(19): siRNA sense strand
caugagaaacccuuuaaau

SEQ ID NO: 597836 - RNA, 19 nt, Homo sapiens
  misc_RNA (1)...(19): siRNA sense strand
ugacgaaauuguucucaca

SEQ ID NO: 597837 - RNA, 19 nt, Homo sapiens
  misc_RNA (1)...(19): siRNA sense strand
caucccgacuguuuacaaa

SEQ ID NO: 597838 - RNA, 19 nt, Homo sapiens
  misc_RNA (1)...(19): siRNA sense strand
ucucacaguuucaaauuca

SEQ ID NO: 597839 - RNA, 19 nt, Homo sapiens
  misc_RNA (1)...(19): siRNA sense strand
ggaggcaaguaaauugaag

SEQ ID NO: 597840 - RNA, 19 nt, Homo sapiens
  misc_RNA (1)...(19): siRNA sense strand
caaauucaaauguggaaga

SEQ ID NO: 597841 - RNA, 19 nt, Homo sapiens
  misc_RNA (1)...(19): siRNA sense strand
ucaccaagaucaaagaacu

SEQ ID NO: 597842 - RNA, 19 nt, Homo sapiens
  misc_RNA (1)...(19): siRNA sense strand
ugaacgcuaugcccucauu

SEQ ID NO: 597843 - RNA, 19 nt, Homo sapiens
  misc_RNA (1)...(19): siRNA sense strand
gaugaaagaagugacgaaa

SEQ ID NO: 597844 - RNA, 19 nt, Homo sapiens
  misc_RNA (1)...(19): siRNA sense strand
gaaacuacuggacugauca

SEQ ID NO: 597845 - RNA, 19 nt, Homo sapiens
  misc_RNA (1)...(19): siRNA sense strand
cgcaagagauggagguguu

SEQ ID NO: 597846 - RNA, 19 nt, Homo sapiens
  misc_RNA (1)...(19): siRNA sense strand
gagcauacagcagcaagaa

SEQ ID NO: 597847 - RNA, 19 nt, Homo sapiens
  misc_RNA (1)...(19): siRNA sense strand
agauggagguguugcaguu

SEQ ID NO: 597848 - RNA, 19 nt, Homo sapiens
  misc_RNA (1)...(19): siRNA sense strand
ucaccugccuuucuugcaa

SEQ ID NO: 597849 - RNA, 19 nt, Homo sapiens
  misc_RNA (1)...(19): siRNA sense strand
cuacuguucugcugucuuc

SEQ ID NO: 597850 - RNA, 19 nt, Homo sapiens
  misc_RNA (1)...(19): siRNA sense strand
gucaggagaugaaagaagu

SEQ ID NO: 597851 - RNA, 19 nt, Homo sapiens
  misc_RNA (1)...(19): siRNA sense strand
gcagagauaccuacaagcu

SEQ ID NO: 597852 - RNA, 19 nt, Homo sapiens
  misc_RNA (1)...(19): siRNA sense strand
gaaagaggaagcagaccau

SEQ ID NO: 597853 - RNA, 19 nt, Homo sapiens
  misc_RNA (1)...(19): siRNA sense strand
ccauuaguauccagcaaga

SEQ ID NO: 597854 - RNA, 19 nt, Homo sapiens
  misc_RNA (1)...(19): siRNA sense strand
acugagaucucuguccuuu

SEQ ID NO: 597855 - RNA, 19 nt, Homo sapiens
  misc_RNA (1)...(19): siRNA sense strand
gagcugaaaugccgcuacu

SEQ ID NO: 597856 - RNA, 19 nt, Homo sapiens
  misc_RNA (1)...(19): siRNA sense strand
gcugaaacgccacaugaga

SEQ ID NO: 597857 - RNA, 19 nt, Homo sapiens
  misc_RNA (1)...(19): siRNA sense strand
gagcaauucaccaagauca

SEQ ID NO: 597858 - RNA, 19 nt, Homo sapiens
  misc_RNA (1)...(19): siRNA sense strand
aggaagagcaggagaagaa

SEQ ID NO: 597859 - RNA, 19 nt, Homo sapiens
  misc_RNA (1)...(19): siRNA sense strand
ugaaacuacuggacugauc

SEQ ID NO: 597860 - RNA, 19 nt, Homo sapiens
  misc_RNA (1)...(19): siRNA sense strand
cggaggagagcgagaagua

SEQ ID NO: 597861 - RNA, 19 nt, Homo sapiens
  misc_RNA (1)...(19): siRNA sense strand
ccauucaccugccuuucuu

SEQ ID NO: 597862 - RNA, 19 nt, Homo sapiens
  misc_RNA (1)...(19): siRNA sense strand
gaaaugccgcuacuguucu

SEQ ID NO: 597863 - RNA, 19 nt, Homo sapiens
  misc_RNA (1)...(19): siRNA sense strand
ugaaaugccgcuacuguuc

SEQ ID NO: 597864 - RNA, 19 nt, Homo sapiens
  misc_RNA (1)...(19): siRNA sense strand
caucggagcccuagugagu

SEQ ID NO: 597865 - RNA, 19 nt, Homo sapiens
  misc_RNA (1)...(19): siRNA sense strand
agaaacccuuuaaauguuc

SEQ ID NO: 597866 - RNA, 19 nt, Homo sapiens
  misc_RNA (1)...(19): siRNA sense strand
ggagaacucguccgacaca

SEQ ID NO: 597867 - RNA, 19 nt, Homo sapiens
  misc_RNA (1)...(19): siRNA sense strand
gaaagacaaagggagcaaa

SEQ ID NO: 597868 - RNA, 19 nt, Homo sapiens
  misc_RNA (1)...(19): siRNA sense strand
acaagaggaucaaccuaca

SEQ ID NO: 597869 - RNA, 19 nt, Homo sapiens
  misc_RNA (1)...(19): siRNA sense strand
cacaaagggucagaaggaa

SEQ ID NO: 597870 - RNA, 19 nt, Homo sapiens
  misc_RNA (1)...(19): siRNA sense strand
gaacaagaaagaggaagca

SEQ ID NO: 597871 - RNA, 19 nt, Homo sapiens
  misc_RNA (1)...(19): siRNA sense strand
uuacaaaugcuccaagugu

SEQ ID NO: 597872 - RNA, 19 nt, Homo sapiens
  misc_RNA (1)...(19): siRNA sense strand
cauaugaccgcucacauuc

SEQ ID NO: 597873 - RNA, 19 nt, Homo sapiens
  misc_RNA (1)...(19): siRNA sense strand
ucauaugaccgcucacauu

SEQ ID NO: 597874 - RNA, 19 nt, Homo sapiens
  misc_RNA (1)...(19): siRNA sense strand
agaagagguucaagugcaa

SEQ ID NO: 597875 - RNA, 19 nt, Homo sapiens
  misc_RNA (1)...(19): siRNA sense strand
cgacacaggcgcuauaaac

SEQ ID NO: 597876 - RNA, 19 nt, Homo sapiens
  misc_RNA (1)...(19): siRNA sense strand
aagcaggaacgucauauga

SEQ ID NO: 597877 - RNA, 19 nt, Homo sapiens
  misc_RNA (1)...(19): siRNA sense strand
aauaaauguuuccgacaga

SEQ ID NO: 597878 - RNA, 19 nt, Homo sapiens
  misc_RNA (1)...(19): siRNA sense strand
gacggagugugcagagaga

SEQ ID NO: 597879 - RNA, 19 nt, Homo sapiens
  misc_RNA (1)...(19): siRNA sense strand
gaaaccacagccagaguca

SEQ ID NO: 597880 - RNA, 19 nt, Homo sapiens
  misc_RNA (1)...(19): siRNA sense strand
gcugaaaugccgcuacugu

SEQ ID NO: 597881 - RNA, 19 nt, Homo sapiens
  misc_RNA (1)...(19): siRNA sense strand
cgaccuacgugugcauaug

SEQ ID NO: 597882 - RNA, 19 nt, Homo sapiens
  misc_RNA (1)...(19): siRNA sense strand
cuacuggacugaucaagcu

SEQ ID NO: 597883 - RNA, 19 nt, Homo sapiens
  misc_RNA (1)...(19): siRNA sense strand
caacacgauggauaaguga

SEQ ID NO: 597884 - RNA, 19 nt, Homo sapiens
  misc_RNA (1)...(19): siRNA sense strand
gaaggcgugaccugugaaa

SEQ ID NO: 597885 - RNA, 19 nt, Homo sapiens
  misc_RNA (1)...(19): siRNA sense strand
uacccacacuggagagaaa

SEQ ID NO: 597886 - RNA, 19 nt, Homo sapiens
  misc_RNA (1)...(19): siRNA sense strand
ugugaugucugcauguuca

SEQ ID NO: 597887 - RNA, 19 nt, Homo sapiens
  misc_RNA (1)...(19): siRNA sense strand
ggaaacaaugucaggagau

SEQ ID NO: 597888 - RNA, 19 nt, Homo sapiens
  misc_RNA (1)...(19): siRNA sense strand
auaccacgaugcaaauuuc

SEQ ID NO: 597889 - RNA, 19 nt, Homo sapiens
  misc_RNA (1)...(19): siRNA sense strand
gaggagagcgagaaguaca

SEQ ID NO: 597890 - RNA, 19 nt, Homo sapiens
  misc_RNA (1)...(19): siRNA sense strand
caccaucauugcacggaaa

SEQ ID NO: 597891 - RNA, 19 nt, Homo sapiens
  misc_RNA (1)...(19): siRNA sense strand
gaaaaggccaaaucuacaa

SEQ ID NO: 597892 - RNA, 19 nt, Homo sapiens
  misc_RNA (1)...(19): siRNA sense strand
guucucacaguuucaaauu

SEQ ID NO: 597893 - RNA, 19 nt, Homo sapiens
  misc_RNA (1)...(19): siRNA sense strand
ggaaccaggcccuacaagu

SEQ ID NO: 597894 - RNA, 19 nt, Homo sapiens
  misc_RNA (1)...(19): siRNA sense strand
ccacgaagggagaacaguu

SEQ ID NO: 597895 - RNA, 19 nt, Homo sapiens
  misc_RNA (1)...(19): siRNA sense strand
ggagauuccuucaaaguuu

SEQ ID NO: 597896 - RNA, 19 nt, Homo sapiens
  misc_RNA (1)...(19): siRNA sense strand
gggagaagauggagaaauu

SEQ ID NO: 597897 - RNA, 19 nt, Homo sapiens
  misc_RNA (1)...(19): siRNA sense strand
gaacaaggauuuuggauga

SEQ ID NO: 597898 - RNA, 19 nt, Homo sapiens
  misc_RNA (1)...(19): siRNA sense strand
gcaaauugguguugagguu

SEQ ID NO: 597899 - RNA, 19 nt, Homo sapiens
  misc_RNA (1)...(19): siRNA sense strand
gaacgugggucagcaggua

SEQ ID NO: 597900 - RNA, 19 nt, Homo sapiens
  misc_RNA (1)...(19): siRNA sense strand
gagauuccuucaaaguuua

SEQ ID NO: 597901 - RNA, 19 nt, Homo sapiens
  misc_RNA (1)...(19): siRNA sense strand
aaagggacauccugguuua

SEQ ID NO: 597902 - RNA, 19 nt, Homo sapiens
  misc_RNA (1)...(19): siRNA sense strand
gaaguugguuuagugaauu

SEQ ID NO: 597903 - RNA, 19 nt, Homo sapiens
  misc_RNA (1)...(19): siRNA sense strand
ucugguagauggagauuua

SEQ ID NO: 597904 - RNA, 19 nt, Homo sapiens
  misc_RNA (1)...(19): siRNA sense strand
ggaaguugguuuagugaau

SEQ ID NO: 597905 - RNA, 19 nt, Homo sapiens
  misc_RNA (1)...(19): siRNA sense strand
aaagggagaucgaggguuu

SEQ ID NO: 597906 - RNA, 19 nt, Homo sapiens
  misc_RNA (1)...(19): siRNA sense strand
gcaagcagaugcagaugau

SEQ ID NO: 597907 - RNA, 19 nt, Homo sapiens
  misc_RNA (1)...(19): siRNA sense strand
gaggauacacuauaugaaa

SEQ ID NO: 597908 - RNA, 19 nt, Homo sapiens
  misc_RNA (1)...(19): siRNA sense strand
uaugggaccuccuggcuua

SEQ ID NO: 597909 - RNA, 19 nt, Homo sapiens
  misc_RNA (1)...(19): siRNA sense strand
ucaauucccugaaacaaga

SEQ ID NO: 597910 - RNA, 19 nt, Homo sapiens
  misc_RNA (1)...(19): siRNA sense strand
guugggagaucaccuguuu

SEQ ID NO: 597911 - RNA, 19 nt, Homo sapiens
  misc_RNA (1)...(19): siRNA sense strand
gaauacaacuauggaacaa

SEQ ID NO: 597912 - RNA, 19 nt, Homo sapiens
  misc_RNA (1)...(19): siRNA sense strand
gcacaaacagaaagaauuc

SEQ ID NO: 597913 - RNA, 19 nt, Homo sapiens
  misc_RNA (1)...(19): siRNA sense strand
gaaguucggauuugaaguu

SEQ ID NO: 597914 - RNA, 19 nt, Homo sapiens
  misc_RNA (1)...(19): siRNA sense strand
ggaagcaggugcagaaggu

SEQ ID NO: 597915 - RNA, 19 nt, Homo sapiens
  misc_RNA (1)...(19): siRNA sense strand
caagggaucuaaaggugaa

SEQ ID NO: 597916 - RNA, 19 nt, Homo sapiens
  misc_RNA (1)...(19): siRNA sense strand
gaaauagacggcagggauu

SEQ ID NO: 597917 - RNA, 19 nt, Homo sapiens
  misc_RNA (1)...(19): siRNA sense strand
gaucaaguaccuauuguug

SEQ ID NO: 597918 - RNA, 19 nt, Homo sapiens
  misc_RNA (1)...(19): siRNA sense strand
gaagaaaacugugacaaug

SEQ ID NO: 597919 - RNA, 19 nt, Homo sapiens
  misc_RNA (1)...(19): siRNA sense strand
cauaugaaauuuccaaugg

SEQ ID NO: 597920 - RNA, 19 nt, Homo sapiens
  misc_RNA (1)...(19): siRNA sense strand
gggaguagcuggcaaacca

SEQ ID NO: 597921 - RNA, 19 nt, Homo sapiens
  misc_RNA (1)...(19): siRNA sense strand
auacuuagauguugaagga

SEQ ID NO: 597922 - RNA, 19 nt, Homo sapiens
  misc_RNA (1)...(19): siRNA sense strand
ugacaagggugaagaugga

SEQ ID NO: 597923 - RNA, 19 nt, Homo sapiens
  misc_RNA (1)...(19): siRNA sense strand
gaguaagaauuucaucaug

SEQ ID NO: 597924 - RNA, 19 nt, Homo sapiens
  misc_RNA (1)...(19): siRNA sense strand
uuacagaguuucaaagcaa

SEQ ID NO: 597925 - RNA, 19 nt, Homo sapiens
  misc_RNA (1)...(19): siRNA sense strand
ggacauccugguuuaauug

SEQ ID NO: 597926 - RNA, 19 nt, Homo sapiens
  misc_RNA (1)...(19): siRNA sense strand
uggcuuaccuggucucaaa

SEQ ID NO: 597927 - RNA, 19 nt, Homo sapiens
  misc_RNA (1)...(19): siRNA sense strand
caaauccaguugaagaaau

SEQ ID NO: 597928 - RNA, 19 nt, Homo sapiens
  misc_RNA (1)...(19): siRNA sense strand
cgaaaccacuugauagaag

SEQ ID NO: 597929 - RNA, 19 nt, Homo sapiens
  misc_RNA (1)...(19): siRNA sense strand
ccaggaaguugguuuagug

SEQ ID NO: 597930 - RNA, 19 nt, Homo sapiens
  misc_RNA (1)...(19): siRNA sense strand
gagcaauuguugauaccaa

SEQ ID NO: 597931 - RNA, 19 nt, Homo sapiens
  misc_RNA (1)...(19): siRNA sense strand
gggacauccugguuuaauu

SEQ ID NO: 597932 - RNA, 19 nt, Homo sapiens
  misc_RNA (1)...(19): siRNA sense strand
gggagcagauggugucaga

SEQ ID NO: 597933 - RNA, 19 nt, Homo sapiens
  misc_RNA (1)...(19): siRNA sense strand
gaaaggacagaaaggagaa

SEQ ID NO: 597934 - RNA, 19 nt, Homo sapiens
  misc_RNA (1)...(19): siRNA sense strand
caagguugcucaggagauu

SEQ ID NO: 597935 - RNA, 19 nt, Homo sapiens
  misc_RNA (1)...(19): siRNA sense strand
gauggugaauauuggauug

SEQ ID NO: 597936 - RNA, 19 nt, Homo sapiens
  misc_RNA (1)...(19): siRNA sense strand
gaggagaaguuggucaaau

SEQ ID NO: 597937 - RNA, 19 nt, Homo sapiens
  misc_RNA (1)...(19): siRNA sense strand
cuucagaacuguuaacauc

SEQ ID NO: 597938 - RNA, 19 nt, Homo sapiens
  misc_RNA (1)...(19): siRNA sense strand
ggauucugaucuucuggua

SEQ ID NO: 597939 - RNA, 19 nt, Homo sapiens
  misc_RNA (1)...(19): siRNA sense strand
gaagcuggcccacgagguu

SEQ ID NO: 597940 - RNA, 19 nt, Homo sapiens
  misc_RNA (1)...(19): siRNA sense strand
caagguaucucagggaaag

SEQ ID NO: 597941 - RNA, 19 nt, Homo sapiens
  misc_RNA (1)...(19): siRNA sense strand
aggagaaguuggucaaauu

SEQ ID NO: 597942 - RNA, 19 nt, Homo sapiens
  misc_RNA (1)...(19): siRNA sense strand
gaagugagagagcaauugu

SEQ ID NO: 597943 - RNA, 19 nt, Homo sapiens
  misc_RNA (1)...(19): siRNA sense strand
uaacaacccucgcauugac

SEQ ID NO: 597944 - RNA, 19 nt, Homo sapiens
  misc_RNA (1)...(19): siRNA sense strand
gauacugcuuacagaguuu

SEQ ID NO: 597945 - RNA, 19 nt, Homo sapiens
  misc_RNA (1)...(19): siRNA sense strand
ggagaaguuggucaaauug

SEQ ID NO: 597946 - RNA, 19 nt, Homo sapiens
  misc_RNA (1)...(19): siRNA sense strand
gcagauggaggaagaggaa

SEQ ID NO: 597947 - RNA, 19 nt, Homo sapiens
  misc_RNA (1)...(19): siRNA sense strand
ggagaucgaggguuugaug

SEQ ID NO: 597948 - RNA, 19 nt, Homo sapiens
  misc_RNA (1)...(19): siRNA sense strand
cacaagguccuauuggaua

SEQ ID NO: 597949 - RNA, 19 nt, Homo sapiens
  misc_RNA (1)...(19): siRNA sense strand
auacaacuauggaacaaug

SEQ ID NO: 597950 - RNA, 19 nt, Homo sapiens
  misc_RNA (1)...(19): siRNA sense strand
ggugagacuugcauuuauc

SEQ ID NO: 597951 - RNA, 19 nt, Homo sapiens
  misc_RNA (1)...(19): siRNA sense strand
ggaauggaagaaauauuug

SEQ ID NO: 597952 - RNA, 19 nt, Homo sapiens
  misc_RNA (1)...(19): siRNA sense strand
gcagaugcagaugauaaua

SEQ ID NO: 597953 - RNA, 19 nt, Homo sapiens
  misc_RNA (1)...(19): siRNA sense strand
gcaaucagcguggagaaga

SEQ ID NO: 597954 - RNA, 19 nt, Homo sapiens
  misc_RNA (1)...(19): siRNA sense strand
ugacuuuggugaucagaau

SEQ ID NO: 597955 - RNA, 19 nt, Homo sapiens
  misc_RNA (1)...(19): siRNA sense strand
cagcauaugacuacuguga

SEQ ID NO: 597956 - RNA, 19 nt, Homo sapiens
  misc_RNA (1)...(19): siRNA sense strand
gaaaagacugucauugaaa

SEQ ID NO: 597957 - RNA, 19 nt, Homo sapiens
  misc_RNA (1)...(19): siRNA sense strand
ugaaaagacugucauugaa

SEQ ID NO: 597958 - RNA, 19 nt, Homo sapiens
  misc_RNA (1)...(19): siRNA sense strand
gcagaagguccuccuggaa

SEQ ID NO: 597959 - RNA, 19 nt, Homo sapiens
  misc_RNA (1)...(19): siRNA sense strand
gggugcaccuggacugaaa

SEQ ID NO: 597960 - RNA, 19 nt, Homo sapiens
  misc_RNA (1)...(19): siRNA sense strand
gcacuagauuuucacaauu

SEQ ID NO: 597961 - RNA, 19 nt, Homo sapiens
  misc_RNA (1)...(19): siRNA sense strand
agaauuugguccaggugua

SEQ ID NO: 597962 - RNA, 19 nt, Homo sapiens
  misc_RNA (1)...(19): siRNA sense strand
auggaacaauggaaaguua

SEQ ID NO: 597963 - RNA, 19 nt, Homo sapiens
  misc_RNA (1)...(19): siRNA sense strand
ucaggaaccucagauagau

SEQ ID NO: 597964 - RNA, 19 nt, Homo sapiens
  misc_RNA (1)...(19): siRNA sense strand
uaacgggagaggauuauga

SEQ ID NO: 597965 - RNA, 19 nt, Homo sapiens
  misc_RNA (1)...(19): siRNA sense strand
caucauggccaaaggagaa

SEQ ID NO: 597966 - RNA, 19 nt, Homo sapiens
  misc_RNA (1)...(19): siRNA sense strand
guggugagacuugcauuua

SEQ ID NO: 597967 - RNA, 19 nt, Homo sapiens
  misc_RNA (1)...(19): siRNA sense strand
agacaagggugaaauuggu

SEQ ID NO: 597968 - RNA, 19 nt, Homo sapiens
  misc_RNA (1)...(19): siRNA sense strand
gauguuaccguuccguuau

SEQ ID NO: 597969 - RNA, 19 nt, Homo sapiens
  misc_RNA (1)...(19): siRNA sense strand
gaacuuucccagaagacuu

SEQ ID NO: 597970 - RNA, 19 nt, Homo sapiens
  misc_RNA (1)...(19): siRNA sense strand
ugaaguugguccuguuugu

SEQ ID NO: 597971 - RNA, 19 nt, Homo sapiens
  misc_RNA (1)...(19): siRNA sense strand
ggaguaagaauuucaucau

SEQ ID NO: 597972 - RNA, 19 nt, Homo sapiens
  misc_RNA (1)...(19): siRNA sense strand
guaacaacccucgcauuga

SEQ ID NO: 597973 - RNA, 19 nt, Homo sapiens
  misc_RNA (1)...(19): siRNA sense strand
cggugagacugguccaaua

SEQ ID NO: 597974 - RNA, 19 nt, Homo sapiens
  misc_RNA (1)...(19): siRNA sense strand
ccacgaaaccacuugauag

SEQ ID NO: 597975 - RNA, 19 nt, Homo sapiens
  misc_RNA (1)...(19): siRNA sense strand
gagcaugguauucagcaaa

SEQ ID NO: 597976 - RNA, 19 nt, Homo sapiens
  misc_RNA (1)...(19): siRNA sense strand
cggcagggauucugaucuu

SEQ ID NO: 597977 - RNA, 19 nt, Homo sapiens
  misc_RNA (1)...(19): siRNA sense strand
gagcauaugaaauuuccaa

SEQ ID NO: 597978 - RNA, 19 nt, Homo sapiens
  misc_RNA (1)...(19): siRNA sense strand
cagaagguccuccuggaaa

SEQ ID NO: 597979 - RNA, 19 nt, Homo sapiens
  misc_RNA (1)...(19): siRNA sense strand
ccagcaggauuacgugguu

SEQ ID NO: 597980 - RNA, 19 nt, Homo sapiens
  misc_RNA (1)...(19): siRNA sense strand
ggaagauggcccugaagga

SEQ ID NO: 597981 - RNA, 19 nt, Homo sapiens
  misc_RNA (1)...(19): siRNA sense strand
ggagagaaaggacagaaag

SEQ ID NO: 597982 - RNA, 19 nt, Homo sapiens
  misc_RNA (1)...(19): siRNA sense strand
gaaguggcaucggguagca

SEQ ID NO: 597983 - RNA, 19 nt, Homo sapiens
  misc_RNA (1)...(19): siRNA sense strand
ugacauuccugaaacuucu

SEQ ID NO: 597984 - RNA, 19 nt, Homo sapiens
  misc_RNA (1)...(19): siRNA sense strand
ggagacaagggugaaauug

SEQ ID NO: 597985 - RNA, 19 nt, Homo sapiens
  misc_RNA (1)...(19): siRNA sense strand
aaccaucucugcucaggaa

SEQ ID NO: 597986 - RNA, 19 nt, Homo sapiens
  misc_RNA (1)...(19): siRNA sense strand
ugacuacugugagcauuau

SEQ ID NO: 597987 - RNA, 19 nt, Homo sapiens
  misc_RNA (1)...(19): siRNA sense strand
caaucagcguggagaagaa

SEQ ID NO: 597988 - RNA, 19 nt, Homo sapiens
  misc_RNA (1)...(19): siRNA sense strand
gagauuuaggcgaauauga

SEQ ID NO: 597989 - RNA, 19 nt, Homo sapiens
  misc_RNA (1)...(19): siRNA sense strand
gcauaugaaauuuccaaug

SEQ ID NO: 597990 - RNA, 19 nt, Homo sapiens
  misc_RNA (1)...(19): siRNA sense strand
aagcagaugcagaugauaa

SEQ ID NO: 597991 - RNA, 19 nt, Homo sapiens
  misc_RNA (1)...(19): siRNA sense strand
gggugaaccuggagaagca

SEQ ID NO: 597992 - RNA, 19 nt, Homo sapiens
  misc_RNA (1)...(19): siRNA sense strand
agauggaccagcaggauua

SEQ ID NO: 597993 - RNA, 19 nt, Homo sapiens
  misc_RNA (1)...(19): siRNA sense strand
gaagaugguuuuccaggau

SEQ ID NO: 597994 - RNA, 19 nt, Homo sapiens
  misc_RNA (1)...(19): siRNA sense strand
gguacuauguugauguuac

SEQ ID NO: 597995 - RNA, 19 nt, Homo sapiens
  misc_RNA (1)...(19): siRNA sense strand
ggagauuccuucaaaguuu

SEQ ID NO: 597996 - RNA, 19 nt, Homo sapiens
  misc_RNA (1)...(19): siRNA sense strand
gggagaagauggagaaauu

SEQ ID NO: 597997 - RNA, 19 nt, Homo sapiens
  misc_RNA (1)...(19): siRNA sense strand
gaacaaggauuuuggauga

SEQ ID NO: 597998 - RNA, 19 nt, Homo sapiens
  misc_RNA (1)...(19): siRNA sense strand
gcaaauugguguugagguu

SEQ ID NO: 597999 - RNA, 19 nt, Homo sapiens
  misc_RNA (1)...(19): siRNA sense strand
gaacgugggucagcaggua

SEQ ID NO: 598000 - RNA, 19 nt, Homo sapiens
  misc_RNA (1)...(19): siRNA sense strand
gagauuccuucaaaguuua

SEQ ID NO: 598001 - RNA, 19 nt, Homo sapiens
  misc_RNA (1)...(19): siRNA sense strand
aaagggacauccugguuua

SEQ ID NO: 598002 - RNA, 19 nt, Homo sapiens
  misc_RNA (1)...(19): siRNA sense strand
gaaguugguuuagugaauu

SEQ ID NO: 598003 - RNA, 19 nt, Homo sapiens
  misc_RNA (1)...(19): siRNA sense strand
ucugguagauggagauuua

SEQ ID NO: 598004 - RNA, 19 nt, Homo sapiens
  misc_RNA (1)...(19): siRNA sense strand
ggaaguugguuuagugaau

SEQ ID NO: 598005 - RNA, 19 nt, Homo sapiens
  misc_RNA (1)...(19): siRNA sense strand
aaagggagaucgaggguuu

SEQ ID NO: 598006 - RNA, 19 nt, Homo sapiens
  misc_RNA (1)...(19): siRNA sense strand
gcaagcagaugcagaugau

SEQ ID NO: 598007 - RNA, 19 nt, Homo sapiens
  misc_RNA (1)...(19): siRNA sense strand
gaggauacacuauaugaaa

SEQ ID NO: 598008 - RNA, 19 nt, Homo sapiens
  misc_RNA (1)...(19): siRNA sense strand
uaugggaccuccuggcuua

SEQ ID NO: 598009 - RNA, 19 nt, Homo sapiens
  misc_RNA (1)...(19): siRNA sense strand
ucaauucccugaaacaaga

SEQ ID NO: 598010 - RNA, 19 nt, Homo sapiens
  misc_RNA (1)...(19): siRNA sense strand
guugggagaucaccuguuu

SEQ ID NO: 598011 - RNA, 19 nt, Homo sapiens
  misc_RNA (1)...(19): siRNA sense strand
gaauacaacuauggaacaa

SEQ ID NO: 598012 - RNA, 19 nt, Homo sapiens
  misc_RNA (1)...(19): siRNA sense strand
gcacaaacagaaagaauuc

SEQ ID NO: 598013 - RNA, 19 nt, Homo sapiens
  misc_RNA (1)...(19): siRNA sense strand
gaaguucggauuugaaguu

SEQ ID NO: 598014 - RNA, 19 nt, Homo sapiens
  misc_RNA (1)...(19): siRNA sense strand
ggaagcaggugcagaaggu

SEQ ID NO: 598015 - RNA, 19 nt, Homo sapiens
  misc_RNA (1)...(19): siRNA sense strand
caagggaucuaaaggugaa

SEQ ID NO: 598016 - RNA, 19 nt, Homo sapiens
  misc_RNA (1)...(19): siRNA sense strand
gaaauagacggcagggauu

SEQ ID NO: 598017 - RNA, 19 nt, Homo sapiens
  misc_RNA (1)...(19): siRNA sense strand
gaucaaguaccuauuguug

SEQ ID NO: 598018 - RNA, 19 nt, Homo sapiens
  misc_RNA (1)...(19): siRNA sense strand
gaagaaaacugugacaaug

SEQ ID NO: 598019 - RNA, 19 nt, Homo sapiens
  misc_RNA (1)...(19): siRNA sense strand
cauaugaaauuuccaaugg

SEQ ID NO: 598020 - RNA, 19 nt, Homo sapiens
  misc_RNA (1)...(19): siRNA sense strand
gggaguagcuggcaaacca

SEQ ID NO: 598021 - RNA, 19 nt, Homo sapiens
  misc_RNA (1)...(19): siRNA sense strand
auacuuagauguugaagga

SEQ ID NO: 598022 - RNA, 19 nt, Homo sapiens
  misc_RNA (1)...(19): siRNA sense strand
ugacaagggugaagaugga

SEQ ID NO: 598023 - RNA, 19 nt, Homo sapiens
  misc_RNA (1)...(19): siRNA sense strand
gaguaagaauuucaucaug

SEQ ID NO: 598024 - RNA, 19 nt, Homo sapiens
  misc_RNA (1)...(19): siRNA sense strand
uuacagaguuucaaagcaa

SEQ ID NO: 598025 - RNA, 19 nt, Homo sapiens
  misc_RNA (1)...(19): siRNA sense strand
ggacauccugguuuaauug

SEQ ID NO: 598026 - RNA, 19 nt, Homo sapiens
  misc_RNA (1)...(19): siRNA sense strand
uggcuuaccuggucucaaa

SEQ ID NO: 598027 - RNA, 19 nt, Homo sapiens
  misc_RNA (1)...(19): siRNA sense strand
caaauccaguugaagaaau

SEQ ID NO: 598028 - RNA, 19 nt, Homo sapiens
  misc_RNA (1)...(19): siRNA sense strand
cgaaaccacuugauagaag

SEQ ID NO: 598029 - RNA, 19 nt, Homo sapiens
  misc_RNA (1)...(19): siRNA sense strand
ccaggaaguugguuuagug

SEQ ID NO: 598030 - RNA, 19 nt, Homo sapiens
  misc_RNA (1)...(19): siRNA sense strand
gagcaauuguugauaccaa

SEQ ID NO: 598031 - RNA, 19 nt, Homo sapiens
  misc_RNA (1)...(19): siRNA sense strand
gggacauccugguuuaauu

SEQ ID NO: 598032 - RNA, 19 nt, Homo sapiens
  misc_RNA (1)...(19): siRNA sense strand
gggagcagauggugucaga

SEQ ID NO: 598033 - RNA, 19 nt, Homo sapiens
  misc_RNA (1)...(19): siRNA sense strand
gaaaggacagaaaggagaa

SEQ ID NO: 598034 - RNA, 19 nt, Homo sapiens
  misc_RNA (1)...(19): siRNA sense strand
caagguugcucaggagauu

SEQ ID NO: 598035 - RNA, 19 nt, Homo sapiens
  misc_RNA (1)...(19): siRNA sense strand
gauggugaauauuggauug

SEQ ID NO: 598036 - RNA, 19 nt, Homo sapiens
  misc_RNA (1)...(19): siRNA sense strand
gaggagaaguuggucaaau

SEQ ID NO: 598037 - RNA, 19 nt, Homo sapiens
  misc_RNA (1)...(19): siRNA sense strand
cuucagaacuguuaacauc

SEQ ID NO: 598038 - RNA, 19 nt, Homo sapiens
  misc_RNA (1)...(19): siRNA sense strand
ggauucugaucuucuggua

SEQ ID NO: 598039 - RNA, 19 nt, Homo sapiens
  misc_RNA (1)...(19): siRNA sense strand
gaagcuggcccacgagguu

SEQ ID NO: 598040 - RNA, 19 nt, Homo sapiens
  misc_RNA (1)...(19): siRNA sense strand
caagguaucucagggaaag

SEQ ID NO: 598041 - RNA, 19 nt, Homo sapiens
  misc_RNA (1)...(19): siRNA sense strand
aggagaaguuggucaaauu

SEQ ID NO: 598042 - RNA, 19 nt, Homo sapiens
  misc_RNA (1)...(19): siRNA sense strand
gaagugagagagcaauugu

SEQ ID NO: 598043 - RNA, 19 nt, Homo sapiens
  misc_RNA (1)...(19): siRNA sense strand
uaacaacccucgcauugac

SEQ ID NO: 598044 - RNA, 19 nt, Homo sapiens
  misc_RNA (1)...(19): siRNA sense strand
gauacugcuuacagaguuu

SEQ ID NO: 598045 - RNA, 19 nt, Homo sapiens
  misc_RNA (1)...(19): siRNA sense strand
ggagaaguuggucaaauug

SEQ ID NO: 598046 - RNA, 19 nt, Homo sapiens
  misc_RNA (1)...(19): siRNA sense strand
gcagauggaggaagaggaa

SEQ ID NO: 598047 - RNA, 19 nt, Homo sapiens
  misc_RNA (1)...(19): siRNA sense strand
ggagaucgaggguuugaug

SEQ ID NO: 598048 - RNA, 19 nt, Homo sapiens
  misc_RNA (1)...(19): siRNA sense strand
cacaagguccuauuggaua

SEQ ID NO: 598049 - RNA, 19 nt, Homo sapiens
  misc_RNA (1)...(19): siRNA sense strand
auacaacuauggaacaaug

SEQ ID NO: 598050 - RNA, 19 nt, Homo sapiens
  misc_RNA (1)...(19): siRNA sense strand
ggugagacuugcauuuauc

SEQ ID NO: 598051 - RNA, 19 nt, Homo sapiens
  misc_RNA (1)...(19): siRNA sense strand
ggaauggaagaaauauuug

SEQ ID NO: 598052 - RNA, 19 nt, Homo sapiens
  misc_RNA (1)...(19): siRNA sense strand
gcagaugcagaugauaaua

SEQ ID NO: 598053 - RNA, 19 nt, Homo sapiens
  misc_RNA (1)...(19): siRNA sense strand
gcaaucagcguggagaaga

SEQ ID NO: 598054 - RNA, 19 nt, Homo sapiens
  misc_RNA (1)...(19): siRNA sense strand
ugacuuuggugaucagaau

SEQ ID NO: 598055 - RNA, 19 nt, Homo sapiens
  misc_RNA (1)...(19): siRNA sense strand
cagcauaugacuacuguga

SEQ ID NO: 598056 - RNA, 19 nt, Homo sapiens
  misc_RNA (1)...(19): siRNA sense strand
gaaaagacugucauugaaa

SEQ ID NO: 598057 - RNA, 19 nt, Homo sapiens
  misc_RNA (1)...(19): siRNA sense strand
ugaaaagacugucauugaa

SEQ ID NO: 598058 - RNA, 19 nt, Homo sapiens
  misc_RNA (1)...(19): siRNA sense strand
gcagaagguccuccuggaa

SEQ ID NO: 598059 - RNA, 19 nt, Homo sapiens
  misc_RNA (1)...(19): siRNA sense strand
gggugcaccuggacugaaa

SEQ ID NO: 598060 - RNA, 19 nt, Homo sapiens
  misc_RNA (1)...(19): siRNA sense strand
gcacuagauuuucacaauu

SEQ ID NO: 598061 - RNA, 19 nt, Homo sapiens
  misc_RNA (1)...(19): siRNA sense strand
agaauuugguccaggugua

SEQ ID NO: 598062 - RNA, 19 nt, Homo sapiens
  misc_RNA (1)...(19): siRNA sense strand
auggaacaauggaaaguua

SEQ ID NO: 598063 - RNA, 19 nt, Homo sapiens
  misc_RNA (1)...(19): siRNA sense strand
ucaggaaccucagauagau

SEQ ID NO: 598064 - RNA, 19 nt, Homo sapiens
  misc_RNA (1)...(19): siRNA sense strand
uaacgggagaggauuauga

SEQ ID NO: 598065 - RNA, 19 nt, Homo sapiens
  misc_RNA (1)...(19): siRNA sense strand
caucauggccaaaggagaa

SEQ ID NO: 598066 - RNA, 19 nt, Homo sapiens
  misc_RNA (1)...(19): siRNA sense strand
guggugagacuugcauuua

SEQ ID NO: 598067 - RNA, 19 nt, Homo sapiens
  misc_RNA (1)...(19): siRNA sense strand
agacaagggugaaauuggu

SEQ ID NO: 598068 - RNA, 19 nt, Homo sapiens
  misc_RNA (1)...(19): siRNA sense strand
gauguuaccguuccguuau

SEQ ID NO: 598069 - RNA, 19 nt, Homo sapiens
  misc_RNA (1)...(19): siRNA sense strand
gaacuuucccagaagacuu

SEQ ID NO: 598070 - RNA, 19 nt, Homo sapiens
  misc_RNA (1)...(19): siRNA sense strand
ugaaguugguccuguuugu

SEQ ID NO: 598071 - RNA, 19 nt, Homo sapiens
  misc_RNA (1)...(19): siRNA sense strand
ggaguaagaauuucaucau

SEQ ID NO: 598072 - RNA, 19 nt, Homo sapiens
  misc_RNA (1)...(19): siRNA sense strand
guaacaacccucgcauuga

SEQ ID NO: 598073 - RNA, 19 nt, Homo sapiens
  misc_RNA (1)...(19): siRNA sense strand
cggugagacugguccaaua

SEQ ID NO: 598074 - RNA, 19 nt, Homo sapiens
  misc_RNA (1)...(19): siRNA sense strand
ccacgaaaccacuugauag

SEQ ID NO: 598075 - RNA, 19 nt, Homo sapiens
  misc_RNA (1)...(19): siRNA sense strand
gagcaugguauucagcaaa

SEQ ID NO: 598076 - RNA, 19 nt, Homo sapiens
  misc_RNA (1)...(19): siRNA sense strand
cggcagggauucugaucuu

SEQ ID NO: 598077 - RNA, 19 nt, Homo sapiens
  misc_RNA (1)...(19): siRNA sense strand
gagcauaugaaauuuccaa

SEQ ID NO: 598078 - RNA, 19 nt, Homo sapiens
  misc_RNA (1)...(19): siRNA sense strand
cagaagguccuccuggaaa

SEQ ID NO: 598079 - RNA, 19 nt, Homo sapiens
  misc_RNA (1)...(19): siRNA sense strand
ccagcaggauuacgugguu

SEQ ID NO: 598080 - RNA, 19 nt, Homo sapiens
  misc_RNA (1)...(19): siRNA sense strand
ggaagauggcccugaagga

SEQ ID NO: 598081 - RNA, 19 nt, Homo sapiens
  misc_RNA (1)...(19): siRNA sense strand
ggagagaaaggacagaaag

SEQ ID NO: 598082 - RNA, 19 nt, Homo sapiens
  misc_RNA (1)...(19): siRNA sense strand
gaaguggcaucggguagca

SEQ ID NO: 598083 - RNA, 19 nt, Homo sapiens
  misc_RNA (1)...(19): siRNA sense strand
ugacauuccugaaacuucu

SEQ ID NO: 598084 - RNA, 19 nt, Homo sapiens
  misc_RNA (1)...(19): siRNA sense strand
ggagacaagggugaaauug

SEQ ID NO: 598085 - RNA, 19 nt, Homo sapiens
  misc_RNA (1)...(19): siRNA sense strand
aaccaucucugcucaggaa

SEQ ID NO: 598086 - RNA, 19 nt, Homo sapiens
  misc_RNA (1)...(19): siRNA sense strand
ugacuacugugagcauuau

SEQ ID NO: 598087 - RNA, 19 nt, Homo sapiens
  misc_RNA (1)...(19): siRNA sense strand
caaucagcguggagaagaa

SEQ ID NO: 598088 - RNA, 19 nt, Homo sapiens
  misc_RNA (1)...(19): siRNA sense strand
gagauuuaggcgaauauga

SEQ ID NO: 598089 - RNA, 19 nt, Homo sapiens
  misc_RNA (1)...(19): siRNA sense strand
gcauaugaaauuuccaaug

SEQ ID NO: 598090 - RNA, 19 nt, Homo sapiens
  misc_RNA (1)...(19): siRNA sense strand
aagcagaugcagaugauaa

SEQ ID NO: 598091 - RNA, 19 nt, Homo sapiens
  misc_RNA (1)...(19): siRNA sense strand
gggugaaccuggagaagca

SEQ ID NO: 598092 - RNA, 19 nt, Homo sapiens
  misc_RNA (1)...(19): siRNA sense strand
agauggaccagcaggauua

SEQ ID NO: 598093 - RNA, 19 nt, Homo sapiens
  misc_RNA (1)...(19): siRNA sense strand
gaagaugguuuuccaggau

SEQ ID NO: 598094 - RNA, 19 nt, Homo sapiens
  misc_RNA (1)...(19): siRNA sense strand
gguacuauguugauguuac

SEQ ID NO: 598095 - RNA, 19 nt, Homo sapiens
  misc_RNA (1)...(19): siRNA sense strand
ggagauuccuucaaaguuu

SEQ ID NO: 598096 - RNA, 19 nt, Homo sapiens
  misc_RNA (1)...(19): siRNA sense strand
gggagaagauggagaaauu

SEQ ID NO: 598097 - RNA, 19 nt, Homo sapiens
  misc_RNA (1)...(19): siRNA sense strand
gaacaaggauuuuggauga

SEQ ID NO: 598098 - RNA, 19 nt, Homo sapiens
  misc_RNA (1)...(19): siRNA sense strand
gcaaauugguguugagguu

SEQ ID NO: 598099 - RNA, 19 nt, Homo sapiens
  misc_RNA (1)...(19): siRNA sense strand
gaacgugggucagcaggua

SEQ ID NO: 598100 - RNA, 19 nt, Homo sapiens
  misc_RNA (1)...(19): siRNA sense strand
gagauuccuucaaaguuua

SEQ ID NO: 598101 - RNA, 19 nt, Homo sapiens
  misc_RNA (1)...(19): siRNA sense strand
aaagggacauccugguuua

SEQ ID NO: 598102 - RNA, 19 nt, Homo sapiens
  misc_RNA (1)...(19): siRNA sense strand
gaaguugguuuagugaauu

SEQ ID NO: 598103 - RNA, 19 nt, Homo sapiens
  misc_RNA (1)...(19): siRNA sense strand
ucugguagauggagauuua

SEQ ID NO: 598104 - RNA, 19 nt, Homo sapiens
  misc_RNA (1)...(19): siRNA sense strand
ggaaguugguuuagugaau

SEQ ID NO: 598105 - RNA, 19 nt, Homo sapiens
  misc_RNA (1)...(19): siRNA sense strand
aaagggagaucgaggguuu

SEQ ID NO: 598106 - RNA, 19 nt, Homo sapiens
  misc_RNA (1)...(19): siRNA sense strand
gcaagcagaugcagaugau

SEQ ID NO: 598107 - RNA, 19 nt, Homo sapiens
  misc_RNA (1)...(19): siRNA sense strand
gaggauacacuauaugaaa

SEQ ID NO: 598108 - RNA, 19 nt, Homo sapiens
  misc_RNA (1)...(19): siRNA sense strand
uaugggaccuccuggcuua

SEQ ID NO: 598109 - RNA, 19 nt, Homo sapiens
  misc_RNA (1)...(19): siRNA sense strand
ucaauucccugaaacaaga

SEQ ID NO: 598110 - RNA, 19 nt, Homo sapiens
  misc_RNA (1)...(19): siRNA sense strand
guugggagaucaccuguuu

SEQ ID NO: 598111 - RNA, 19 nt, Homo sapiens
  misc_RNA (1)...(19): siRNA sense strand
gaauacaacuauggaacaa

SEQ ID NO: 598112 - RNA, 19 nt, Homo sapiens
  misc_RNA (1)...(19): siRNA sense strand
gcacaaacagaaagaauuc

SEQ ID NO: 598113 - RNA, 19 nt, Homo sapiens
  misc_RNA (1)...(19): siRNA sense strand
gaaguucggauuugaaguu

SEQ ID NO: 598114 - RNA, 19 nt, Homo sapiens
  misc_RNA (1)...(19): siRNA sense strand
ggaagcaggugcagaaggu

SEQ ID NO: 598115 - RNA, 19 nt, Homo sapiens
  misc_RNA (1)...(19): siRNA sense strand
caagggaucuaaaggugaa

SEQ ID NO: 598116 - RNA, 19 nt, Homo sapiens
  misc_RNA (1)...(19): siRNA sense strand
gaaauagacggcagggauu

SEQ ID NO: 598117 - RNA, 19 nt, Homo sapiens
  misc_RNA (1)...(19): siRNA sense strand
gaucaaguaccuauuguug

SEQ ID NO: 598118 - RNA, 19 nt, Homo sapiens
  misc_RNA (1)...(19): siRNA sense strand
gaagaaaacugugacaaug

SEQ ID NO: 598119 - RNA, 19 nt, Homo sapiens
  misc_RNA (1)...(19): siRNA sense strand
cauaugaaauuuccaaugg

SEQ ID NO: 598120 - RNA, 19 nt, Homo sapiens
  misc_RNA (1)...(19): siRNA sense strand
gggaguagcuggcaaacca

SEQ ID NO: 598121 - RNA, 19 nt, Homo sapiens
  misc_RNA (1)...(19): siRNA sense strand
auacuuagauguugaagga

SEQ ID NO: 598122 - RNA, 19 nt, Homo sapiens
  misc_RNA (1)...(19): siRNA sense strand
ugacaagggugaagaugga

SEQ ID NO: 598123 - RNA, 19 nt, Homo sapiens
  misc_RNA (1)...(19): siRNA sense strand
gaguaagaauuucaucaug

SEQ ID NO: 598124 - RNA, 19 nt, Homo sapiens
  misc_RNA (1)...(19): siRNA sense strand
uuacagaguuucaaagcaa

SEQ ID NO: 598125 - RNA, 19 nt, Homo sapiens
  misc_RNA (1)...(19): siRNA sense strand
ggacauccugguuuaauug

SEQ ID NO: 598126 - RNA, 19 nt, Homo sapiens
  misc_RNA (1)...(19): siRNA sense strand
uggcuuaccuggucucaaa

SEQ ID NO: 598127 - RNA, 19 nt, Homo sapiens
  misc_RNA (1)...(19): siRNA sense strand
caaauccaguugaagaaau

SEQ ID NO: 598128 - RNA, 19 nt, Homo sapiens
  misc_RNA (1)...(19): siRNA sense strand
cgaaaccacuugauagaag

SEQ ID NO: 598129 - RNA, 19 nt, Homo sapiens
  misc_RNA (1)...(19): siRNA sense strand
ccaggaaguugguuuagug

SEQ ID NO: 598130 - RNA, 19 nt, Homo sapiens
  misc_RNA (1)...(19): siRNA sense strand
gagcaauuguugauaccaa

SEQ ID NO: 598131 - RNA, 19 nt, Homo sapiens
  misc_RNA (1)...(19): siRNA sense strand
gggacauccugguuuaauu

SEQ ID NO: 598132 - RNA, 19 nt, Homo sapiens
  misc_RNA (1)...(19): siRNA sense strand
gggagcagauggugucaga

SEQ ID NO: 598133 - RNA, 19 nt, Homo sapiens
  misc_RNA (1)...(19): siRNA sense strand
gaaaggacagaaaggagaa

SEQ ID NO: 598134 - RNA, 19 nt, Homo sapiens
  misc_RNA (1)...(19): siRNA sense strand
caagguugcucaggagauu

SEQ ID NO: 598135 - RNA, 19 nt, Homo sapiens
  misc_RNA (1)...(19): siRNA sense strand
gauggugaauauuggauug

SEQ ID NO: 598136 - RNA, 19 nt, Homo sapiens
  misc_RNA (1)...(19): siRNA sense strand
gaggagaaguuggucaaau

SEQ ID NO: 598137 - RNA, 19 nt, Homo sapiens
  misc_RNA (1)...(19): siRNA sense strand
cuucagaacuguuaacauc

SEQ ID NO: 598138 - RNA, 19 nt, Homo sapiens
  misc_RNA (1)...(19): siRNA sense strand
ggauucugaucuucuggua

SEQ ID NO: 598139 - RNA, 19 nt, Homo sapiens
  misc_RNA (1)...(19): siRNA sense strand
gaagcuggcccacgagguu

SEQ ID NO: 598140 - RNA, 19 nt, Homo sapiens
  misc_RNA (1)...(19): siRNA sense strand
caagguaucucagggaaag

SEQ ID NO: 598141 - RNA, 19 nt, Homo sapiens
  misc_RNA (1)...(19): siRNA sense strand
aggagaaguuggucaaauu

SEQ ID NO: 598142 - RNA, 19 nt, Homo sapiens
  misc_RNA (1)...(19): siRNA sense strand
gaagugagagagcaauugu

SEQ ID NO: 598143 - RNA, 19 nt, Homo sapiens
  misc_RNA (1)...(19): siRNA sense strand
uaacaacccucgcauugac

SEQ ID NO: 598144 - RNA, 19 nt, Homo sapiens
  misc_RNA (1)...(19): siRNA sense strand
gauacugcuuacagaguuu

SEQ ID NO: 598145 - RNA, 19 nt, Homo sapiens
  misc_RNA (1)...(19): siRNA sense strand
ggagaaguuggucaaauug

SEQ ID NO: 598146 - RNA, 19 nt, Homo sapiens
  misc_RNA (1)...(19): siRNA sense strand
gcagauggaggaagaggaa

SEQ ID NO: 598147 - RNA, 19 nt, Homo sapiens
  misc_RNA (1)...(19): siRNA sense strand
ggagaucgaggguuugaug

SEQ ID NO: 598148 - RNA, 19 nt, Homo sapiens
  misc_RNA (1)...(19): siRNA sense strand
cacaagguccuauuggaua

SEQ ID NO: 598149 - RNA, 19 nt, Homo sapiens
  misc_RNA (1)...(19): siRNA sense strand
auacaacuauggaacaaug

SEQ ID NO: 598150 - RNA, 19 nt, Homo sapiens
  misc_RNA (1)...(19): siRNA sense strand
ggugagacuugcauuuauc

SEQ ID NO: 598151 - RNA, 19 nt, Homo sapiens
  misc_RNA (1)...(19): siRNA sense strand
ggaauggaagaaauauuug

SEQ ID NO: 598152 - RNA, 19 nt, Homo sapiens
  misc_RNA (1)...(19): siRNA sense strand
gcagaugcagaugauaaua

SEQ ID NO: 598153 - RNA, 19 nt, Homo sapiens
  misc_RNA (1)...(19): siRNA sense strand
gcaaucagcguggagaaga

SEQ ID NO: 598154 - RNA, 19 nt, Homo sapiens
  misc_RNA (1)...(19): siRNA sense strand
ugacuuuggugaucagaau

SEQ ID NO: 598155 - RNA, 19 nt, Homo sapiens
  misc_RNA (1)...(19): siRNA sense strand
cagcauaugacuacuguga

SEQ ID NO: 598156 - RNA, 19 nt, Homo sapiens
  misc_RNA (1)...(19): siRNA sense strand
gaaaagacugucauugaaa

SEQ ID NO: 598157 - RNA, 19 nt, Homo sapiens
  misc_RNA (1)...(19): siRNA sense strand
ugaaaagacugucauugaa

SEQ ID NO: 598158 - RNA, 19 nt, Homo sapiens
  misc_RNA (1)...(19): siRNA sense strand
gcagaagguccuccuggaa

SEQ ID NO: 598159 - RNA, 19 nt, Homo sapiens
  misc_RNA (1)...(19): siRNA sense strand
gggugcaccuggacugaaa

SEQ ID NO: 598160 - RNA, 19 nt, Homo sapiens
  misc_RNA (1)...(19): siRNA sense strand
gcacuagauuuucacaauu

SEQ ID NO: 598161 - RNA, 19 nt, Homo sapiens
  misc_RNA (1)...(19): siRNA sense strand
agaauuugguccaggugua

SEQ ID NO: 598162 - RNA, 19 nt, Homo sapiens
  misc_RNA (1)...(19): siRNA sense strand
auggaacaauggaaaguua

SEQ ID NO: 598163 - RNA, 19 nt, Homo sapiens
  misc_RNA (1)...(19): siRNA sense strand
ucaggaaccucagauagau

SEQ ID NO: 598164 - RNA, 19 nt, Homo sapiens
  misc_RNA (1)...(19): siRNA sense strand
uaacgggagaggauuauga

SEQ ID NO: 598165 - RNA, 19 nt, Homo sapiens
  misc_RNA (1)...(19): siRNA sense strand
caucauggccaaaggagaa

SEQ ID NO: 598166 - RNA, 19 nt, Homo sapiens
  misc_RNA (1)...(19): siRNA sense strand
guggugagacuugcauuua

SEQ ID NO: 598167 - RNA, 19 nt, Homo sapiens
  misc_RNA (1)...(19): siRNA sense strand
agacaagggugaaauuggu

SEQ ID NO: 598168 - RNA, 19 nt, Homo sapiens
  misc_RNA (1)...(19): siRNA sense strand
gauguuaccguuccguuau

SEQ ID NO: 598169 - RNA, 19 nt, Homo sapiens
  misc_RNA (1)...(19): siRNA sense strand
gaacuuucccagaagacuu

SEQ ID NO: 598170 - RNA, 19 nt, Homo sapiens
  misc_RNA (1)...(19): siRNA sense strand
ugaaguugguccuguuugu

SEQ ID NO: 598171 - RNA, 19 nt, Homo sapiens
  misc_RNA (1)...(19): siRNA sense strand
ggaguaagaauuucaucau

SEQ ID NO: 598172 - RNA, 19 nt, Homo sapiens
  misc_RNA (1)...(19): siRNA sense strand
guaacaacccucgcauuga

SEQ ID NO: 598173 - RNA, 19 nt, Homo sapiens
  misc_RNA (1)...(19): siRNA sense strand
cggugagacugguccaaua

SEQ ID NO: 598174 - RNA, 19 nt, Homo sapiens
  misc_RNA (1)...(19): siRNA sense strand
ccacgaaaccacuugauag

SEQ ID NO: 598175 - RNA, 19 nt, Homo sapiens
  misc_RNA (1)...(19): siRNA sense strand
gagcaugguauucagcaaa

SEQ ID NO: 598176 - RNA, 19 nt, Homo sapiens
  misc_RNA (1)...(19): siRNA sense strand
cggcagggauucugaucuu

SEQ ID NO: 598177 - RNA, 19 nt, Homo sapiens
  misc_RNA (1)...(19): siRNA sense strand
gagcauaugaaauuuccaa

SEQ ID NO: 598178 - RNA, 19 nt, Homo sapiens
  misc_RNA (1)...(19): siRNA sense strand
cagaagguccuccuggaaa

SEQ ID NO: 598179 - RNA, 19 nt, Homo sapiens
  misc_RNA (1)...(19): siRNA sense strand
ccagcaggauuacgugguu

SEQ ID NO: 598180 - RNA, 19 nt, Homo sapiens
  misc_RNA (1)...(19): siRNA sense strand
ggaagauggcccugaagga

SEQ ID NO: 598181 - RNA, 19 nt, Homo sapiens
  misc_RNA (1)...(19): siRNA sense strand
ggagagaaaggacagaaag

SEQ ID NO: 598182 - RNA, 19 nt, Homo sapiens
  misc_RNA (1)...(19): siRNA sense strand
gaaguggcaucggguagca

SEQ ID NO: 598183 - RNA, 19 nt, Homo sapiens
  misc_RNA (1)...(19): siRNA sense strand
ugacauuccugaaacuucu

SEQ ID NO: 598184 - RNA, 19 nt, Homo sapiens
  misc_RNA (1)...(19): siRNA sense strand
ggagacaagggugaaauug

SEQ ID NO: 598185 - RNA, 19 nt, Homo sapiens
  misc_RNA (1)...(19): siRNA sense strand
aaccaucucugcucaggaa

SEQ ID NO: 598186 - RNA, 19 nt, Homo sapiens
  misc_RNA (1)...(19): siRNA sense strand
ugacuacugugagcauuau

SEQ ID NO: 598187 - RNA, 19 nt, Homo sapiens
  misc_RNA (1)...(19): siRNA sense strand
caaucagcguggagaagaa

SEQ ID NO: 598188 - RNA, 19 nt, Homo sapiens
  misc_RNA (1)...(19): siRNA sense strand
gagauuuaggcgaauauga

SEQ ID NO: 598189 - RNA, 19 nt, Homo sapiens
  misc_RNA (1)...(19): siRNA sense strand
gcauaugaaauuuccaaug

SEQ ID NO: 598190 - RNA, 19 nt, Homo sapiens
  misc_RNA (1)...(19): siRNA sense strand
aagcagaugcagaugauaa

SEQ ID NO: 598191 - RNA, 19 nt, Homo sapiens
  misc_RNA (1)...(19): siRNA sense strand
gggugaaccuggagaagca

SEQ ID NO: 598192 - RNA, 19 nt, Homo sapiens
  misc_RNA (1)...(19): siRNA sense strand
agauggaccagcaggauua

SEQ ID NO: 598193 - RNA, 19 nt, Homo sapiens
  misc_RNA (1)...(19): siRNA sense strand
gaagaugguuuuccaggau

SEQ ID NO: 598194 - RNA, 19 nt, Homo sapiens
  misc_RNA (1)...(19): siRNA sense strand
gguacuauguugauguuac

SEQ ID NO: 598195 - RNA, 19 nt, Homo sapiens
  misc_RNA (1)...(19): siRNA sense strand
uaaagaagcuucguggaaa

SEQ ID NO: 598196 - RNA, 19 nt, Homo sapiens
  misc_RNA (1)...(19): siRNA sense strand
gaaggagacuuaugauugg

SEQ ID NO: 598197 - RNA, 19 nt, Homo sapiens
  misc_RNA (1)...(19): siRNA sense strand
ccaagaagaaggagacuua

SEQ ID NO: 598198 - RNA, 19 nt, Homo sapiens
  misc_RNA (1)...(19): siRNA sense strand
gaaaggagaaaccaaagaa

SEQ ID NO: 598199 - RNA, 19 nt, Homo sapiens
  misc_RNA (1)...(19): siRNA sense strand
gaagucaccaggccuacua

SEQ ID NO: 598200 - RNA, 19 nt, Homo sapiens
  misc_RNA (1)...(19): siRNA sense strand
agaaggagacuuaugauug

SEQ ID NO: 598201 - RNA, 19 nt, Homo sapiens
  misc_RNA (1)...(19): siRNA sense strand
agaagaaggagacuuauga

SEQ ID NO: 598202 - RNA, 19 nt, Homo sapiens
  misc_RNA (1)...(19): siRNA sense strand
ugaaaguggugaaacuguu

SEQ ID NO: 598203 - RNA, 19 nt, Homo sapiens
  misc_RNA (1)...(19): siRNA sense strand
ggagacuuaugauugguau

SEQ ID NO: 598204 - RNA, 19 nt, Homo sapiens
  misc_RNA (1)...(19): siRNA sense strand
ggaaaggagaaaccaaaga

SEQ ID NO: 598205 - RNA, 19 nt, Homo sapiens
  misc_RNA (1)...(19): siRNA sense strand
aaagaaaggagaagggaaa

SEQ ID NO: 598206 - RNA, 19 nt, Homo sapiens
  misc_RNA (1)...(19): siRNA sense strand
cuaaagaagcuucguggaa

SEQ ID NO: 598207 - RNA, 19 nt, Homo sapiens
  misc_RNA (1)...(19): siRNA sense strand
ucaccaggccuacuaauuc

SEQ ID NO: 598208 - RNA, 19 nt, Homo sapiens
  misc_RNA (1)...(19): siRNA sense strand
gaagaaggagacuuaugau

SEQ ID NO: 598209 - RNA, 19 nt, Homo sapiens
  misc_RNA (1)...(19): siRNA sense strand
ucaccacacuuacgcugaa

SEQ ID NO: 598210 - RNA, 19 nt, Homo sapiens
  misc_RNA (1)...(19): siRNA sense strand
ggagaaaccaaagaaagga

SEQ ID NO: 598211 - RNA, 19 nt, Homo sapiens
  misc_RNA (1)...(19): siRNA sense strand
ccgcaugucucgucucagu

SEQ ID NO: 598212 - RNA, 19 nt, Homo sapiens
  misc_RNA (1)...(19): siRNA sense strand
cuacuaauuccaagucuau

SEQ ID NO: 598213 - RNA, 19 nt, Homo sapiens
  misc_RNA (1)...(19): siRNA sense strand
gaaaccaaagaaaggagaa

SEQ ID NO: 598214 - RNA, 19 nt, Homo sapiens
  misc_RNA (1)...(19): siRNA sense strand
cacuuacgcugaacucaug

SEQ ID NO: 598215 - RNA, 19 nt, Homo sapiens
  misc_RNA (1)...(19): siRNA sense strand
guggaaaggagaaaccaaa

SEQ ID NO: 598216 - RNA, 19 nt, Homo sapiens
  misc_RNA (1)...(19): siRNA sense strand
gaaaggagaagggaaaaga

SEQ ID NO: 598217 - RNA, 19 nt, Homo sapiens
  misc_RNA (1)...(19): siRNA sense strand
auccaaaucaccacacuua

SEQ ID NO: 598218 - RNA, 19 nt, Homo sapiens
  misc_RNA (1)...(19): siRNA sense strand
aaagaagcuucguggaaag

SEQ ID NO: 598219 - RNA, 19 nt, Homo sapiens
  misc_RNA (1)...(19): siRNA sense strand
cagacgcuccgauuucuug

SEQ ID NO: 598220 - RNA, 19 nt, Homo sapiens
  misc_RNA (1)...(19): siRNA sense strand
ccuacuaauuccaagucua

SEQ ID NO: 598221 - RNA, 19 nt, Homo sapiens
  misc_RNA (1)...(19): siRNA sense strand
aaaggagaaaccaaagaaa

SEQ ID NO: 598222 - RNA, 19 nt, Homo sapiens
  misc_RNA (1)...(19): siRNA sense strand
cuaugaaaguggugaaacu

SEQ ID NO: 598223 - RNA, 19 nt, Homo sapiens
  misc_RNA (1)...(19): siRNA sense strand
aagaaggagacuuaugauu

SEQ ID NO: 598224 - RNA, 19 nt, Homo sapiens
  misc_RNA (1)...(19): siRNA sense strand
cuaauuccaagucuaugaa

SEQ ID NO: 598225 - RNA, 19 nt, Homo sapiens
  misc_RNA (1)...(19): siRNA sense strand
caagaagaaggagacuuau

SEQ ID NO: 598226 - RNA, 19 nt, Homo sapiens
  misc_RNA (1)...(19): siRNA sense strand
guccucccuuucagaauau

SEQ ID NO: 598227 - RNA, 19 nt, Homo sapiens
  misc_RNA (1)...(19): siRNA sense strand
gucaccaggccuacuaauu

SEQ ID NO: 598228 - RNA, 19 nt, Homo sapiens
  misc_RNA (1)...(19): siRNA sense strand
caugcagacgcuccgauuu

SEQ ID NO: 598229 - RNA, 19 nt, Homo sapiens
  misc_RNA (1)...(19): siRNA sense strand
gcagacgcuccgauuucuu

SEQ ID NO: 598230 - RNA, 19 nt, Homo sapiens
  misc_RNA (1)...(19): siRNA sense strand
ccaaaucaccacacuuacg

SEQ ID NO: 598231 - RNA, 19 nt, Homo sapiens
  misc_RNA (1)...(19): siRNA sense strand
aaggagaaaccaaagaaag

SEQ ID NO: 598232 - RNA, 19 nt, Homo sapiens
  misc_RNA (1)...(19): siRNA sense strand
uaaagaagcuucguggaaa

SEQ ID NO: 598233 - RNA, 19 nt, Homo sapiens
  misc_RNA (1)...(19): siRNA sense strand
gaaggagacuuaugauugg

SEQ ID NO: 598234 - RNA, 19 nt, Homo sapiens
  misc_RNA (1)...(19): siRNA sense strand
ccaagaagaaggagacuua

SEQ ID NO: 598235 - RNA, 19 nt, Homo sapiens
  misc_RNA (1)...(19): siRNA sense strand
gaaaggagaaaccaaagaa

SEQ ID NO: 598236 - RNA, 19 nt, Homo sapiens
  misc_RNA (1)...(19): siRNA sense strand
gaagucaccaggccuacua

SEQ ID NO: 598237 - RNA, 19 nt, Homo sapiens
  misc_RNA (1)...(19): siRNA sense strand
agaaggagacuuaugauug

SEQ ID NO: 598238 - RNA, 19 nt, Homo sapiens
  misc_RNA (1)...(19): siRNA sense strand
agaagaaggagacuuauga

SEQ ID NO: 598239 - RNA, 19 nt, Homo sapiens
  misc_RNA (1)...(19): siRNA sense strand
ugaaaguggugaaacuguu

SEQ ID NO: 598240 - RNA, 19 nt, Homo sapiens
  misc_RNA (1)...(19): siRNA sense strand
ggagacuuaugauugguau

SEQ ID NO: 598241 - RNA, 19 nt, Homo sapiens
  misc_RNA (1)...(19): siRNA sense strand
ggaaaggagaaaccaaaga

SEQ ID NO: 598242 - RNA, 19 nt, Homo sapiens
  misc_RNA (1)...(19): siRNA sense strand
aaagaaaggagaagggaaa

SEQ ID NO: 598243 - RNA, 19 nt, Homo sapiens
  misc_RNA (1)...(19): siRNA sense strand
cuaaagaagcuucguggaa

SEQ ID NO: 598244 - RNA, 19 nt, Homo sapiens
  misc_RNA (1)...(19): siRNA sense strand
ucaccaggccuacuaauuc

SEQ ID NO: 598245 - RNA, 19 nt, Homo sapiens
  misc_RNA (1)...(19): siRNA sense strand
gaagaaggagacuuaugau

SEQ ID NO: 598246 - RNA, 19 nt, Homo sapiens
  misc_RNA (1)...(19): siRNA sense strand
ucaccacacuuacgcugaa

SEQ ID NO: 598247 - RNA, 19 nt, Homo sapiens
  misc_RNA (1)...(19): siRNA sense strand
ggagaaaccaaagaaagga

SEQ ID NO: 598248 - RNA, 19 nt, Homo sapiens
  misc_RNA (1)...(19): siRNA sense strand
ccgcaugucucgucucagu

SEQ ID NO: 598249 - RNA, 19 nt, Homo sapiens
  misc_RNA (1)...(19): siRNA sense strand
cuacuaauuccaagucuau

SEQ ID NO: 598250 - RNA, 19 nt, Homo sapiens
  misc_RNA (1)...(19): siRNA sense strand
gaaaccaaagaaaggagaa

SEQ ID NO: 598251 - RNA, 19 nt, Homo sapiens
  misc_RNA (1)...(19): siRNA sense strand
cacuuacgcugaacucaug

SEQ ID NO: 598252 - RNA, 19 nt, Homo sapiens
  misc_RNA (1)...(19): siRNA sense strand
guggaaaggagaaaccaaa

SEQ ID NO: 598253 - RNA, 19 nt, Homo sapiens
  misc_RNA (1)...(19): siRNA sense strand
gaaaggagaagggaaaaga

SEQ ID NO: 598254 - RNA, 19 nt, Homo sapiens
  misc_RNA (1)...(19): siRNA sense strand
auccaaaucaccacacuua

SEQ ID NO: 598255 - RNA, 19 nt, Homo sapiens
  misc_RNA (1)...(19): siRNA sense strand
aaagaagcuucguggaaag

SEQ ID NO: 598256 - RNA, 19 nt, Homo sapiens
  misc_RNA (1)...(19): siRNA sense strand
cagacgcuccgauuucuug

SEQ ID NO: 598257 - RNA, 19 nt, Homo sapiens
  misc_RNA (1)...(19): siRNA sense strand
ccuacuaauuccaagucua

SEQ ID NO: 598258 - RNA, 19 nt, Homo sapiens
  misc_RNA (1)...(19): siRNA sense strand
aaaggagaaaccaaagaaa

SEQ ID NO: 598259 - RNA, 19 nt, Homo sapiens
  misc_RNA (1)...(19): siRNA sense strand
cuaugaaaguggugaaacu

SEQ ID NO: 598260 - RNA, 19 nt, Homo sapiens
  misc_RNA (1)...(19): siRNA sense strand
aagaaggagacuuaugauu

SEQ ID NO: 598261 - RNA, 19 nt, Homo sapiens
  misc_RNA (1)...(19): siRNA sense strand
cuaauuccaagucuaugaa

SEQ ID NO: 598262 - RNA, 19 nt, Homo sapiens
  misc_RNA (1)...(19): siRNA sense strand
caagaagaaggagacuuau

SEQ ID NO: 598263 - RNA, 19 nt, Homo sapiens
  misc_RNA (1)...(19): siRNA sense strand
guccucccuuucagaauau

SEQ ID NO: 598264 - RNA, 19 nt, Homo sapiens
  misc_RNA (1)...(19): siRNA sense strand
gucaccaggccuacuaauu

SEQ ID NO: 598265 - RNA, 19 nt, Homo sapiens
  misc_RNA (1)...(19): siRNA sense strand
caugcagacgcuccgauuu

SEQ ID NO: 598266 - RNA, 19 nt, Homo sapiens
  misc_RNA (1)...(19): siRNA sense strand
gcagacgcuccgauuucuu

SEQ ID NO: 598267 - RNA, 19 nt, Homo sapiens
  misc_RNA (1)...(19): siRNA sense strand
ccaaaucaccacacuuacg

SEQ ID NO: 598268 - RNA, 19 nt, Homo sapiens
  misc_RNA (1)...(19): siRNA sense strand
aaggagaaaccaaagaaag

SEQ ID NO: 598269 - RNA, 19 nt, Homo sapiens
  misc_RNA (1)...(19): siRNA sense strand
ggaauacuaucaccucuua

SEQ ID NO: 598270 - RNA, 19 nt, Homo sapiens
  misc_RNA (1)...(19): siRNA sense strand
gagaauggaucuuguguac

SEQ ID NO: 598271 - RNA, 19 nt, Homo sapiens
  misc_RNA (1)...(19): siRNA sense strand
ggaauuaaugccuggaaua

SEQ ID NO: 598272 - RNA, 19 nt, Homo sapiens
  misc_RNA (1)...(19): siRNA sense strand
ccagaaauguguccugaga

SEQ ID NO: 598273 - RNA, 19 nt, Homo sapiens
  misc_RNA (1)...(19): siRNA sense strand
ucauagaccugcaagcaaa

SEQ ID NO: 598274 - RNA, 19 nt, Homo sapiens
  misc_RNA (1)...(19): siRNA sense strand
gaauggaucuuguguaccu

SEQ ID NO: 598275 - RNA, 19 nt, Homo sapiens
  misc_RNA (1)...(19): siRNA sense strand
gcacauaccacugucauca

SEQ ID NO: 598276 - RNA, 19 nt, Homo sapiens
  misc_RNA (1)...(19): siRNA sense strand
acauaccacugucaucaua

SEQ ID NO: 598277 - RNA, 19 nt, Homo sapiens
  misc_RNA (1)...(19): siRNA sense strand
agaaauguguccugagaau

SEQ ID NO: 598278 - RNA, 19 nt, Homo sapiens
  misc_RNA (1)...(19): siRNA sense strand
auuaaugccuggaauacua

SEQ ID NO: 598279 - RNA, 19 nt, Homo sapiens
  misc_RNA (1)...(19): siRNA sense strand
uuacucagcuccagacucu

SEQ ID NO: 598280 - RNA, 19 nt, Homo sapiens
  misc_RNA (1)...(19): siRNA sense strand
gccacaacaugucaacugu

SEQ ID NO: 598281 - RNA, 19 nt, Homo sapiens
  misc_RNA (1)...(19): siRNA sense strand
uaucaccucuuauauagac

SEQ ID NO: 598282 - RNA, 19 nt, Homo sapiens
  misc_RNA (1)...(19): siRNA sense strand
gaauuaaugccuggaauac

SEQ ID NO: 598283 - RNA, 19 nt, Homo sapiens
  misc_RNA (1)...(19): siRNA sense strand
caacaccuuccguggcuuu

SEQ ID NO: 598284 - RNA, 19 nt, Homo sapiens
  misc_RNA (1)...(19): siRNA sense strand
gaaauguguccugagaaug

SEQ ID NO: 598285 - RNA, 19 nt, Homo sapiens
  misc_RNA (1)...(19): siRNA sense strand
gcccguugcugccugaauc

SEQ ID NO: 598286 - RNA, 19 nt, Homo sapiens
  misc_RNA (1)...(19): siRNA sense strand
ucucacugcuuauguucuu

SEQ ID NO: 598287 - RNA, 19 nt, Homo sapiens
  misc_RNA (1)...(19): siRNA sense strand
gcaguguguuugugcugau

SEQ ID NO: 598288 - RNA, 19 nt, Homo sapiens
  misc_RNA (1)...(19): siRNA sense strand
ucagaagggcaccaucuug

SEQ ID NO: 598289 - RNA, 19 nt, Homo sapiens
  misc_RNA (1)...(19): siRNA sense strand
caucauagaccugcaagca

SEQ ID NO: 598290 - RNA, 19 nt, Homo sapiens
  misc_RNA (1)...(19): siRNA sense strand
gaaaagccaagacuucaug

SEQ ID NO: 598291 - RNA, 19 nt, Homo sapiens
  misc_RNA (1)...(19): siRNA sense strand
aaaggugacuuggccaaca

SEQ ID NO: 598292 - RNA, 19 nt, Homo sapiens
  misc_RNA (1)...(19): siRNA sense strand
ccucuuauauagacaacca

SEQ ID NO: 598293 - RNA, 19 nt, Homo sapiens
  misc_RNA (1)...(19): siRNA sense strand
ggcucguucucacugcuua

SEQ ID NO: 598294 - RNA, 19 nt, Homo sapiens
  misc_RNA (1)...(19): siRNA sense strand
aagaaccuuugcaauaaca

SEQ ID NO: 598295 - RNA, 19 nt, Homo sapiens
  misc_RNA (1)...(19): siRNA sense strand
auaccacugucaucauaga

SEQ ID NO: 598296 - RNA, 19 nt, Homo sapiens
  misc_RNA (1)...(19): siRNA sense strand
ugagaauggaucuugugua

SEQ ID NO: 598297 - RNA, 19 nt, Homo sapiens
  misc_RNA (1)...(19): siRNA sense strand
uauagacaaccaaaucugu

SEQ ID NO: 598298 - RNA, 19 nt, Homo sapiens
  misc_RNA (1)...(19): siRNA sense strand
gaggaauuaaugccuggaa

SEQ ID NO: 598299 - RNA, 19 nt, Homo sapiens
  misc_RNA (1)...(19): siRNA sense strand
aaauguguccugagaaugg

SEQ ID NO: 598300 - RNA, 19 nt, Homo sapiens
  misc_RNA (1)...(19): siRNA sense strand
cguucucacugcuuauguu

SEQ ID NO: 598301 - RNA, 19 nt, Homo sapiens
  misc_RNA (1)...(19): siRNA sense strand
gauacugccacaacauguc

SEQ ID NO: 598302 - RNA, 19 nt, Homo sapiens
  misc_RNA (1)...(19): siRNA sense strand
ggaauacuaucaccucuua

SEQ ID NO: 598303 - RNA, 19 nt, Homo sapiens
  misc_RNA (1)...(19): siRNA sense strand
gagaauggaucuuguguac

SEQ ID NO: 598304 - RNA, 19 nt, Homo sapiens
  misc_RNA (1)...(19): siRNA sense strand
ggaauuaaugccuggaaua

SEQ ID NO: 598305 - RNA, 19 nt, Homo sapiens
  misc_RNA (1)...(19): siRNA sense strand
ccagaaauguguccugaga

SEQ ID NO: 598306 - RNA, 19 nt, Homo sapiens
  misc_RNA (1)...(19): siRNA sense strand
ucauagaccugcaagcaaa

SEQ ID NO: 598307 - RNA, 19 nt, Homo sapiens
  misc_RNA (1)...(19): siRNA sense strand
gaauggaucuuguguaccu

SEQ ID NO: 598308 - RNA, 19 nt, Homo sapiens
  misc_RNA (1)...(19): siRNA sense strand
gcacauaccacugucauca

SEQ ID NO: 598309 - RNA, 19 nt, Homo sapiens
  misc_RNA (1)...(19): siRNA sense strand
acauaccacugucaucaua

SEQ ID NO: 598310 - RNA, 19 nt, Homo sapiens
  misc_RNA (1)...(19): siRNA sense strand
agaaauguguccugagaau

SEQ ID NO: 598311 - RNA, 19 nt, Homo sapiens
  misc_RNA (1)...(19): siRNA sense strand
auuaaugccuggaauacua

SEQ ID NO: 598312 - RNA, 19 nt, Homo sapiens
  misc_RNA (1)...(19): siRNA sense strand
uuacucagcuccagacucu

SEQ ID NO: 598313 - RNA, 19 nt, Homo sapiens
  misc_RNA (1)...(19): siRNA sense strand
gccacaacaugucaacugu

SEQ ID NO: 598314 - RNA, 19 nt, Homo sapiens
  misc_RNA (1)...(19): siRNA sense strand
uaucaccucuuauauagac

SEQ ID NO: 598315 - RNA, 19 nt, Homo sapiens
  misc_RNA (1)...(19): siRNA sense strand
gaauuaaugccuggaauac

SEQ ID NO: 598316 - RNA, 19 nt, Homo sapiens
  misc_RNA (1)...(19): siRNA sense strand
caacaccuuccguggcuuu

SEQ ID NO: 598317 - RNA, 19 nt, Homo sapiens
  misc_RNA (1)...(19): siRNA sense strand
gaaauguguccugagaaug

SEQ ID NO: 598318 - RNA, 19 nt, Homo sapiens
  misc_RNA (1)...(19): siRNA sense strand
gcccguugcugccugaauc

SEQ ID NO: 598319 - RNA, 19 nt, Homo sapiens
  misc_RNA (1)...(19): siRNA sense strand
ucucacugcuuauguucuu

SEQ ID NO: 598320 - RNA, 19 nt, Homo sapiens
  misc_RNA (1)...(19): siRNA sense strand
gcaguguguuugugcugau

SEQ ID NO: 598321 - RNA, 19 nt, Homo sapiens
  misc_RNA (1)...(19): siRNA sense strand
ucagaagggcaccaucuug

SEQ ID NO: 598322 - RNA, 19 nt, Homo sapiens
  misc_RNA (1)...(19): siRNA sense strand
caucauagaccugcaagca

SEQ ID NO: 598323 - RNA, 19 nt, Homo sapiens
  misc_RNA (1)...(19): siRNA sense strand
gaaaagccaagacuucaug

SEQ ID NO: 598324 - RNA, 19 nt, Homo sapiens
  misc_RNA (1)...(19): siRNA sense strand
aaaggugacuuggccaaca

SEQ ID NO: 598325 - RNA, 19 nt, Homo sapiens
  misc_RNA (1)...(19): siRNA sense strand
ccucuuauauagacaacca

SEQ ID NO: 598326 - RNA, 19 nt, Homo sapiens
  misc_RNA (1)...(19): siRNA sense strand
ggcucguucucacugcuua

SEQ ID NO: 598327 - RNA, 19 nt, Homo sapiens
  misc_RNA (1)...(19): siRNA sense strand
aagaaccuuugcaauaaca

SEQ ID NO: 598328 - RNA, 19 nt, Homo sapiens
  misc_RNA (1)...(19): siRNA sense strand
auaccacugucaucauaga

SEQ ID NO: 598329 - RNA, 19 nt, Homo sapiens
  misc_RNA (1)...(19): siRNA sense strand
ugagaauggaucuugugua

SEQ ID NO: 598330 - RNA, 19 nt, Homo sapiens
  misc_RNA (1)...(19): siRNA sense strand
uauagacaaccaaaucugu

SEQ ID NO: 598331 - RNA, 19 nt, Homo sapiens
  misc_RNA (1)...(19): siRNA sense strand
gaggaauuaaugccuggaa

SEQ ID NO: 598332 - RNA, 19 nt, Homo sapiens
  misc_RNA (1)...(19): siRNA sense strand
aaauguguccugagaaugg

SEQ ID NO: 598333 - RNA, 19 nt, Homo sapiens
  misc_RNA (1)...(19): siRNA sense strand
cguucucacugcuuauguu

SEQ ID NO: 598334 - RNA, 19 nt, Homo sapiens
  misc_RNA (1)...(19): siRNA sense strand
gauacugccacaacauguc

SEQ ID NO: 598335 - RNA, 19 nt, Homo sapiens
  misc_RNA (1)...(19): siRNA sense strand
ccucgaggcugcucaguga

SEQ ID NO: 598336 - RNA, 19 nt, Homo sapiens
  misc_RNA (1)...(19): siRNA sense strand
agaccuaccuggaggaaga

SEQ ID NO: 598337 - RNA, 19 nt, Homo sapiens
  misc_RNA (1)...(19): siRNA sense strand
gaaucugcuuugucuucua

SEQ ID NO: 598338 - RNA, 19 nt, Homo sapiens
  misc_RNA (1)...(19): siRNA sense strand
ggcaggacguggcugaaga

SEQ ID NO: 598339 - RNA, 19 nt, Homo sapiens
  misc_RNA (1)...(19): siRNA sense strand
gcaaguaccaggacagcau

SEQ ID NO: 598340 - RNA, 19 nt, Homo sapiens
  misc_RNA (1)...(19): siRNA sense strand
cacgcuaccuccugagauu

SEQ ID NO: 598341 - RNA, 19 nt, Homo sapiens
  misc_RNA (1)...(19): siRNA sense strand
ccagaaaugcccagacugu

SEQ ID NO: 598342 - RNA, 19 nt, Homo sapiens
  misc_RNA (1)...(19): siRNA sense strand
ccucagauuuggacagcuu

SEQ ID NO: 598343 - RNA, 19 nt, Homo sapiens
  misc_RNA (1)...(19): siRNA sense strand
acucgcaccugaagaaugu

SEQ ID NO: 598344 - RNA, 19 nt, Homo sapiens
  misc_RNA (1)...(19): siRNA sense strand
gcaaccuccuggccucugu

SEQ ID NO: 598345 - RNA, 19 nt, Homo sapiens
  misc_RNA (1)...(19): siRNA sense strand
gccucgaucucucucagaa

SEQ ID NO: 598346 - RNA, 19 nt, Homo sapiens
  misc_RNA (1)...(19): siRNA sense strand
agaaaugcccagacuguuc

SEQ ID NO: 598347 - RNA, 19 nt, Homo sapiens
  misc_RNA (1)...(19): siRNA sense strand
ccaucaagcugccgagacu

SEQ ID NO: 598348 - RNA, 19 nt, Homo sapiens
  misc_RNA (1)...(19): siRNA sense strand
gcagccaccugggaugaca

SEQ ID NO: 598349 - RNA, 19 nt, Homo sapiens
  misc_RNA (1)...(19): siRNA sense strand
ggggugaccuggagaccua

SEQ ID NO: 598350 - RNA, 19 nt, Homo sapiens
  misc_RNA (1)...(19): siRNA sense strand
gcagcccucauuccagaaa

SEQ ID NO: 598351 - RNA, 19 nt, Homo sapiens
  misc_RNA (1)...(19): siRNA sense strand
gaaccagaggcugcaguga

SEQ ID NO: 598352 - RNA, 19 nt, Homo sapiens
  misc_RNA (1)...(19): siRNA sense strand
ggcacgaguuccgggauga

SEQ ID NO: 598353 - RNA, 19 nt, Homo sapiens
  misc_RNA (1)...(19): siRNA sense strand
guuccgggaugaucuggau

SEQ ID NO: 598354 - RNA, 19 nt, Homo sapiens
  misc_RNA (1)...(19): siRNA sense strand
ggagcucacccaccuguac

SEQ ID NO: 598355 - RNA, 19 nt, Homo sapiens
  misc_RNA (1)...(19): siRNA sense strand
gaagaggugcgcgcagucu

SEQ ID NO: 598356 - RNA, 19 nt, Homo sapiens
  misc_RNA (1)...(19): siRNA sense strand
ccacuucuccugguuccuu

SEQ ID NO: 598357 - RNA, 19 nt, Homo sapiens
  misc_RNA (1)...(19): siRNA sense strand
ggagaccuaccuggaggaa

SEQ ID NO: 598358 - RNA, 19 nt, Homo sapiens
  misc_RNA (1)...(19): siRNA sense strand
guacaccaccaagaacugu

SEQ ID NO: 598359 - RNA, 19 nt, Homo sapiens
  misc_RNA (1)...(19): siRNA sense strand
gccugcaccuguuguacug

SEQ ID NO: 598360 - RNA, 19 nt, Homo sapiens
  misc_RNA (1)...(19): siRNA sense strand
cagaaaugcccagacuguu

SEQ ID NO: 598361 - RNA, 19 nt, Homo sapiens
  misc_RNA (1)...(19): siRNA sense strand
gaugagcagauccgucaca

SEQ ID NO: 598362 - RNA, 19 nt, Homo sapiens
  misc_RNA (1)...(19): siRNA sense strand
cugacacgguggagauguu

SEQ ID NO: 598363 - RNA, 19 nt, Homo sapiens
  misc_RNA (1)...(19): siRNA sense strand
cucgaucucucucagaauc

SEQ ID NO: 598364 - RNA, 19 nt, Homo sapiens
  misc_RNA (1)...(19): siRNA sense strand
aaucugcuuugucuucuac

SEQ ID NO: 598365 - RNA, 19 nt, Homo sapiens
  misc_RNA (1)...(19): siRNA sense strand
ucuacucgcaccugaagaa

SEQ ID NO: 598366 - RNA, 19 nt, Homo sapiens
  misc_RNA (1)...(19): siRNA sense strand
ccucgaggcugcucaguga

SEQ ID NO: 598367 - RNA, 19 nt, Homo sapiens
  misc_RNA (1)...(19): siRNA sense strand
agaccuaccuggaggaaga

SEQ ID NO: 598368 - RNA, 19 nt, Homo sapiens
  misc_RNA (1)...(19): siRNA sense strand
gaaucugcuuugucuucua

SEQ ID NO: 598369 - RNA, 19 nt, Homo sapiens
  misc_RNA (1)...(19): siRNA sense strand
guggaauucuugcgucuga

SEQ ID NO: 598370 - RNA, 19 nt, Homo sapiens
  misc_RNA (1)...(19): siRNA sense strand
ggagaugcuucagaggauu

SEQ ID NO: 598371 - RNA, 19 nt, Homo sapiens
  misc_RNA (1)...(19): siRNA sense strand
ggcaggacguggcugaaga

SEQ ID NO: 598372 - RNA, 19 nt, Homo sapiens
  misc_RNA (1)...(19): siRNA sense strand
gcaaguaccaggacagcau

SEQ ID NO: 598373 - RNA, 19 nt, Homo sapiens
  misc_RNA (1)...(19): siRNA sense strand
gcaaccggcugagcuugga

SEQ ID NO: 598374 - RNA, 19 nt, Homo sapiens
  misc_RNA (1)...(19): siRNA sense strand
cacgcuaccuccugagauu

SEQ ID NO: 598375 - RNA, 19 nt, Homo sapiens
  misc_RNA (1)...(19): siRNA sense strand
ccagaaaugcccagacugu

SEQ ID NO: 598376 - RNA, 19 nt, Homo sapiens
  misc_RNA (1)...(19): siRNA sense strand
ccucagauuuggacagcuu

SEQ ID NO: 598377 - RNA, 19 nt, Homo sapiens
  misc_RNA (1)...(19): siRNA sense strand
acucgcaccugaagaaugu

SEQ ID NO: 598378 - RNA, 19 nt, Homo sapiens
  misc_RNA (1)...(19): siRNA sense strand
gcaaccuccuggccucugu

SEQ ID NO: 598379 - RNA, 19 nt, Homo sapiens
  misc_RNA (1)...(19): siRNA sense strand
gccucgaucucucucagaa

SEQ ID NO: 598380 - RNA, 19 nt, Homo sapiens
  misc_RNA (1)...(19): siRNA sense strand
agaaaugcccagacuguuc

SEQ ID NO: 598381 - RNA, 19 nt, Homo sapiens
  misc_RNA (1)...(19): siRNA sense strand
ccaucaagcugccgagacu

SEQ ID NO: 598382 - RNA, 19 nt, Homo sapiens
  misc_RNA (1)...(19): siRNA sense strand
gcagccaccugggaugaca

SEQ ID NO: 598383 - RNA, 19 nt, Homo sapiens
  misc_RNA (1)...(19): siRNA sense strand
ggggugaccuggagaccua

SEQ ID NO: 598384 - RNA, 19 nt, Homo sapiens
  misc_RNA (1)...(19): siRNA sense strand
gcagcccucauuccagaaa

SEQ ID NO: 598385 - RNA, 19 nt, Homo sapiens
  misc_RNA (1)...(19): siRNA sense strand
gaaccagaggcugcaguga

SEQ ID NO: 598386 - RNA, 19 nt, Homo sapiens
  misc_RNA (1)...(19): siRNA sense strand
ucaacagccuggagacacu

SEQ ID NO: 598387 - RNA, 19 nt, Homo sapiens
  misc_RNA (1)...(19): siRNA sense strand
guuccgggaugaucuggau

SEQ ID NO: 598388 - RNA, 19 nt, Homo sapiens
  misc_RNA (1)...(19): siRNA sense strand
ggcacgaguuccgggauga

SEQ ID NO: 598389 - RNA, 19 nt, Homo sapiens
  misc_RNA (1)...(19): siRNA sense strand
ggagcucacccaccuguac

SEQ ID NO: 598390 - RNA, 19 nt, Homo sapiens
  misc_RNA (1)...(19): siRNA sense strand
gaagaggugcgcgcagucu

SEQ ID NO: 598391 - RNA, 19 nt, Homo sapiens
  misc_RNA (1)...(19): siRNA sense strand
ccacuucuccugguuccuu

SEQ ID NO: 598392 - RNA, 19 nt, Homo sapiens
  misc_RNA (1)...(19): siRNA sense strand
aggagaugcuucagaggau

SEQ ID NO: 598393 - RNA, 19 nt, Homo sapiens
  misc_RNA (1)...(19): siRNA sense strand
gagaugcuucagaggauuc

SEQ ID NO: 598394 - RNA, 19 nt, Homo sapiens
  misc_RNA (1)...(19): siRNA sense strand
guacaccaccaagaacugu

SEQ ID NO: 598395 - RNA, 19 nt, Homo sapiens
  misc_RNA (1)...(19): siRNA sense strand
gccugcaccuguuguacug

SEQ ID NO: 598396 - RNA, 19 nt, Homo sapiens
  misc_RNA (1)...(19): siRNA sense strand
ggagaccuaccuggaggaa

SEQ ID NO: 598397 - RNA, 19 nt, Homo sapiens
  misc_RNA (1)...(19): siRNA sense strand
cagaaaugcccagacuguu

SEQ ID NO: 598398 - RNA, 19 nt, Homo sapiens
  misc_RNA (1)...(19): siRNA sense strand
gaugagcagauccgucaca

SEQ ID NO: 598399 - RNA, 19 nt, Homo sapiens
  misc_RNA (1)...(19): siRNA sense strand
cugacacgguggagauguu

SEQ ID NO: 598400 - RNA, 19 nt, Homo sapiens
  misc_RNA (1)...(19): siRNA sense strand
cucgaucucucucagaauc

SEQ ID NO: 598401 - RNA, 19 nt, Homo sapiens
  misc_RNA (1)...(19): siRNA sense strand
aaucugcuuugucuucuac

SEQ ID NO: 598402 - RNA, 19 nt, Homo sapiens
  misc_RNA (1)...(19): siRNA sense strand
ucuacucgcaccugaagaa

SEQ ID NO: 598403 - RNA, 19 nt, Homo sapiens
  misc_RNA (1)...(19): siRNA sense strand
ccucgaggcugcucaguga

SEQ ID NO: 598404 - RNA, 19 nt, Homo sapiens
  misc_RNA (1)...(19): siRNA sense strand
agaccuaccuggaggaaga

SEQ ID NO: 598405 - RNA, 19 nt, Homo sapiens
  misc_RNA (1)...(19): siRNA sense strand
gaaucugcuuugucuucua

SEQ ID NO: 598406 - RNA, 19 nt, Homo sapiens
  misc_RNA (1)...(19): siRNA sense strand
guggaauucuugcgucuga

SEQ ID NO: 598407 - RNA, 19 nt, Homo sapiens
  misc_RNA (1)...(19): siRNA sense strand
ggagaugcuucagaggauu

SEQ ID NO: 598408 - RNA, 19 nt, Homo sapiens
  misc_RNA (1)...(19): siRNA sense strand
ggcaggacguggcugaaga

SEQ ID NO: 598409 - RNA, 19 nt, Homo sapiens
  misc_RNA (1)...(19): siRNA sense strand
gcaaguaccaggacagcau

SEQ ID NO: 598410 - RNA, 19 nt, Homo sapiens
  misc_RNA (1)...(19): siRNA sense strand
gcaaccggcugagcuugga

SEQ ID NO: 598411 - RNA, 19 nt, Homo sapiens
  misc_RNA (1)...(19): siRNA sense strand
cacgcuaccuccugagauu

SEQ ID NO: 598412 - RNA, 19 nt, Homo sapiens
  misc_RNA (1)...(19): siRNA sense strand
ccagaaaugcccagacugu

SEQ ID NO: 598413 - RNA, 19 nt, Homo sapiens
  misc_RNA (1)...(19): siRNA sense strand
ccucagauuuggacagcuu

SEQ ID NO: 598414 - RNA, 19 nt, Homo sapiens
  misc_RNA (1)...(19): siRNA sense strand
acucgcaccugaagaaugu

SEQ ID NO: 598415 - RNA, 19 nt, Homo sapiens
  misc_RNA (1)...(19): siRNA sense strand
gcaaccuccuggccucugu

SEQ ID NO: 598416 - RNA, 19 nt, Homo sapiens
  misc_RNA (1)...(19): siRNA sense strand
gccucgaucucucucagaa

SEQ ID NO: 598417 - RNA, 19 nt, Homo sapiens
  misc_RNA (1)...(19): siRNA sense strand
agaaaugcccagacuguuc

SEQ ID NO: 598418 - RNA, 19 nt, Homo sapiens
  misc_RNA (1)...(19): siRNA sense strand
ccaucaagcugccgagacu

SEQ ID NO: 598419 - RNA, 19 nt, Homo sapiens
  misc_RNA (1)...(19): siRNA sense strand
gcagccaccugggaugaca

SEQ ID NO: 598420 - RNA, 19 nt, Homo sapiens
  misc_RNA (1)...(19): siRNA sense strand
ggggugaccuggagaccua

SEQ ID NO: 598421 - RNA, 19 nt, Homo sapiens
  misc_RNA (1)...(19): siRNA sense strand
gcagcccucauuccagaaa

SEQ ID NO: 598422 - RNA, 19 nt, Homo sapiens
  misc_RNA (1)...(19): siRNA sense strand
gaaccagaggcugcaguga

SEQ ID NO: 598423 - RNA, 19 nt, Homo sapiens
  misc_RNA (1)...(19): siRNA sense strand
ucaacagccuggagacacu

SEQ ID NO: 598424 - RNA, 19 nt, Homo sapiens
  misc_RNA (1)...(19): siRNA sense strand
guuccgggaugaucuggau

SEQ ID NO: 598425 - RNA, 19 nt, Homo sapiens
  misc_RNA (1)...(19): siRNA sense strand
ggcacgaguuccgggauga

SEQ ID NO: 598426 - RNA, 19 nt, Homo sapiens
  misc_RNA (1)...(19): siRNA sense strand
ggagcucacccaccuguac

SEQ ID NO: 598427 - RNA, 19 nt, Homo sapiens
  misc_RNA (1)...(19): siRNA sense strand
gaagaggugcgcgcagucu

SEQ ID NO: 598428 - RNA, 19 nt, Homo sapiens
  misc_RNA (1)...(19): siRNA sense strand
ccacuucuccugguuccuu

SEQ ID NO: 598429 - RNA, 19 nt, Homo sapiens
  misc_RNA (1)...(19): siRNA sense strand
aggagaugcuucagaggau

SEQ ID NO: 598430 - RNA, 19 nt, Homo sapiens
  misc_RNA (1)...(19): siRNA sense strand
gagaugcuucagaggauuc

SEQ ID NO: 598431 - RNA, 19 nt, Homo sapiens
  misc_RNA (1)...(19): siRNA sense strand
guacaccaccaagaacugu

SEQ ID NO: 598432 - RNA, 19 nt, Homo sapiens
  misc_RNA (1)...(19): siRNA sense strand
gccugcaccuguuguacug

SEQ ID NO: 598433 - RNA, 19 nt, Homo sapiens
  misc_RNA (1)...(19): siRNA sense strand
ggagaccuaccuggaggaa

SEQ ID NO: 598434 - RNA, 19 nt, Homo sapiens
  misc_RNA (1)...(19): siRNA sense strand
cagaaaugcccagacuguu

SEQ ID NO: 598435 - RNA, 19 nt, Homo sapiens
  misc_RNA (1)...(19): siRNA sense strand
gaugagcagauccgucaca

SEQ ID NO: 598436 - RNA, 19 nt, Homo sapiens
  misc_RNA (1)...(19): siRNA sense strand
cugacacgguggagauguu

SEQ ID NO: 598437 - RNA, 19 nt, Homo sapiens
  misc_RNA (1)...(19): siRNA sense strand
cucgaucucucucagaauc

SEQ ID NO: 598438 - RNA, 19 nt, Homo sapiens
  misc_RNA (1)...(19): siRNA sense strand
aaucugcuuugucuucuac

SEQ ID NO: 598439 - RNA, 19 nt, Homo sapiens
  misc_RNA (1)...(19): siRNA sense strand
ucuacucgcaccugaagaa

SEQ ID NO: 598440 - RNA, 19 nt, Homo sapiens
  misc_RNA (1)...(19): siRNA sense strand
gaaaugcccucaaauuaga

SEQ ID NO: 598441 - RNA, 19 nt, Homo sapiens
  misc_RNA (1)...(19): siRNA sense strand
agaagaagcuuaugaguuu

SEQ ID NO: 598442 - RNA, 19 nt, Homo sapiens
  misc_RNA (1)...(19): siRNA sense strand
guaaaggacuucguaauga

SEQ ID NO: 598443 - RNA, 19 nt, Homo sapiens
  misc_RNA (1)...(19): siRNA sense strand
aagagaggcuucaaauuua

SEQ ID NO: 598444 - RNA, 19 nt, Homo sapiens
  misc_RNA (1)...(19): siRNA sense strand
gggaaauacuguugaaauu

SEQ ID NO: 598445 - RNA, 19 nt, Homo sapiens
  misc_RNA (1)...(19): siRNA sense strand
gcugaaagauuaugauaug

SEQ ID NO: 598446 - RNA, 19 nt, Homo sapiens
  misc_RNA (1)...(19): siRNA sense strand
gcaaguuccuccaaacaaa

SEQ ID NO: 598447 - RNA, 19 nt, Homo sapiens
  misc_RNA (1)...(19): siRNA sense strand
gaaauacuguugaaauugg

SEQ ID NO: 598448 - RNA, 19 nt, Homo sapiens
  misc_RNA (1)...(19): siRNA sense strand
guaaugaugucaagaguca

SEQ ID NO: 598449 - RNA, 19 nt, Homo sapiens
  misc_RNA (1)...(19): siRNA sense strand
gauaccagcuucuucaguu

SEQ ID NO: 598450 - RNA, 19 nt, Homo sapiens
  misc_RNA (1)...(19): siRNA sense strand
gcauguauauggacucuug

SEQ ID NO: 598451 - RNA, 19 nt, Homo sapiens
  misc_RNA (1)...(19): siRNA sense strand
gcaagaugauucugucgaa

SEQ ID NO: 598452 - RNA, 19 nt, Homo sapiens
  misc_RNA (1)...(19): siRNA sense strand
ggagagacuuuggcuauga

SEQ ID NO: 598453 - RNA, 19 nt, Homo sapiens
  misc_RNA (1)...(19): siRNA sense strand
acacugaacuguuuaggaa

SEQ ID NO: 598454 - RNA, 19 nt, Homo sapiens
  misc_RNA (1)...(19): siRNA sense strand
aaacgcaucuugaaauguu

SEQ ID NO: 598455 - RNA, 19 nt, Homo sapiens
  misc_RNA (1)...(19): siRNA sense strand
ccgaaaugcccucaaauua

SEQ ID NO: 598456 - RNA, 19 nt, Homo sapiens
  misc_RNA (1)...(19): siRNA sense strand
caaauuagcacuuuagaag

SEQ ID NO: 598457 - RNA, 19 nt, Homo sapiens
  misc_RNA (1)...(19): siRNA sense strand
gcaggaaucuuuggaacau

SEQ ID NO: 598458 - RNA, 19 nt, Homo sapiens
  misc_RNA (1)...(19): siRNA sense strand
uccaggaacuuguuacuaa

SEQ ID NO: 598459 - RNA, 19 nt, Homo sapiens
  misc_RNA (1)...(19): siRNA sense strand
gcagaucuguugcaggaau

SEQ ID NO: 598460 - RNA, 19 nt, Homo sapiens
  misc_RNA (1)...(19): siRNA sense strand
gcaauuacacccagaagau

SEQ ID NO: 598461 - RNA, 19 nt, Homo sapiens
  misc_RNA (1)...(19): siRNA sense strand
ggaaauacuguugaaauug

SEQ ID NO: 598462 - RNA, 19 nt, Homo sapiens
  misc_RNA (1)...(19): siRNA sense strand
ggaagaauuuagacaaacu

SEQ ID NO: 598463 - RNA, 19 nt, Homo sapiens
  misc_RNA (1)...(19): siRNA sense strand
gagagaggcagaucuguug

SEQ ID NO: 598464 - RNA, 19 nt, Homo sapiens
  misc_RNA (1)...(19): siRNA sense strand
cccagaagauuaccuuuga

SEQ ID NO: 598465 - RNA, 19 nt, Homo sapiens
  misc_RNA (1)...(19): siRNA sense strand
uaaaggacuucguaaugau

SEQ ID NO: 598466 - RNA, 19 nt, Homo sapiens
  misc_RNA (1)...(19): siRNA sense strand
accauuugcugaaagauua

SEQ ID NO: 598467 - RNA, 19 nt, Homo sapiens
  misc_RNA (1)...(19): siRNA sense strand
gagagacuuuggcuaugaa

SEQ ID NO: 598468 - RNA, 19 nt, Homo sapiens
  misc_RNA (1)...(19): siRNA sense strand
cagcgugccuccuggauug

SEQ ID NO: 598469 - RNA, 19 nt, Homo sapiens
  misc_RNA (1)...(19): siRNA sense strand
cgaaaugcccucaaauuag

SEQ ID NO: 598470 - RNA, 19 nt, Homo sapiens
  misc_RNA (1)...(19): siRNA sense strand
cuuaugaguuuguucguaa

SEQ ID NO: 598471 - RNA, 19 nt, Homo sapiens
  misc_RNA (1)...(19): siRNA sense strand
gaagauuaccuuugacucu

SEQ ID NO: 598472 - RNA, 19 nt, Homo sapiens
  misc_RNA (1)...(19): siRNA sense strand
gaagaagcuuaugaguuug

SEQ ID NO: 598473 - RNA, 19 nt, Homo sapiens
  misc_RNA (1)...(19): siRNA sense strand
guuaugaacagaagcagua

SEQ ID NO: 598474 - RNA, 19 nt, Homo sapiens
  misc_RNA (1)...(19): siRNA sense strand
gaacagaagcaguacaaaa

SEQ ID NO: 598475 - RNA, 19 nt, Homo sapiens
  misc_RNA (1)...(19): siRNA sense strand
gaacauggagagacuuugg

SEQ ID NO: 598476 - RNA, 19 nt, Homo sapiens
  misc_RNA (1)...(19): siRNA sense strand
guugaaauugggaagauua

SEQ ID NO: 598477 - RNA, 19 nt, Homo sapiens
  misc_RNA (1)...(19): siRNA sense strand
augaaaggauuaacacuga

SEQ ID NO: 598478 - RNA, 19 nt, Homo sapiens
  misc_RNA (1)...(19): siRNA sense strand
uuaccgaaaugcccucaaa

SEQ ID NO: 598479 - RNA, 19 nt, Homo sapiens
  misc_RNA (1)...(19): siRNA sense strand
gcuuaugaguuuguucgua

SEQ ID NO: 598480 - RNA, 19 nt, Homo sapiens
  misc_RNA (1)...(19): siRNA sense strand
cguaaaggacuucguaaug

SEQ ID NO: 598481 - RNA, 19 nt, Homo sapiens
  misc_RNA (1)...(19): siRNA sense strand
agagaggcuucaaauuuau

SEQ ID NO: 598482 - RNA, 19 nt, Homo sapiens
  misc_RNA (1)...(19): siRNA sense strand
agauaaagauaaccugcaa

SEQ ID NO: 598483 - RNA, 19 nt, Homo sapiens
  misc_RNA (1)...(19): siRNA sense strand
gauuggauaugcuauugca

SEQ ID NO: 598484 - RNA, 19 nt, Homo sapiens
  misc_RNA (1)...(19): siRNA sense strand
ucaagagucaugucuguug

SEQ ID NO: 598485 - RNA, 19 nt, Homo sapiens
  misc_RNA (1)...(19): siRNA sense strand
ugaaaggauuaacacugaa

SEQ ID NO: 598486 - RNA, 19 nt, Homo sapiens
  misc_RNA (1)...(19): siRNA sense strand
aagaagaagcuuaugaguu

SEQ ID NO: 598487 - RNA, 19 nt, Homo sapiens
  misc_RNA (1)...(19): siRNA sense strand
cauaccauuugcugaaaga

SEQ ID NO: 598488 - RNA, 19 nt, Homo sapiens
  misc_RNA (1)...(19): siRNA sense strand
guucguaaaggacuucgua

SEQ ID NO: 598489 - RNA, 19 nt, Homo sapiens
  misc_RNA (1)...(19): siRNA sense strand
caaaugagagaccuugaag

SEQ ID NO: 598490 - RNA, 19 nt, Homo sapiens
  misc_RNA (1)...(19): siRNA sense strand
ccaaaugagagaccuugaa

SEQ ID NO: 598491 - RNA, 19 nt, Homo sapiens
  misc_RNA (1)...(19): siRNA sense strand
ugucaagagucaugucugu

SEQ ID NO: 598492 - RNA, 19 nt, Homo sapiens
  misc_RNA (1)...(19): siRNA sense strand
ggaaucuuuggaacauaua

SEQ ID NO: 598493 - RNA, 19 nt, Homo sapiens
  misc_RNA (1)...(19): siRNA sense strand
aauuacacccagaagauua

SEQ ID NO: 598494 - RNA, 19 nt, Homo sapiens
  misc_RNA (1)...(19): siRNA sense strand
ugaguuuguucguaaagga

SEQ ID NO: 598495 - RNA, 19 nt, Homo sapiens
  misc_RNA (1)...(19): siRNA sense strand
caauuacacccagaagauu

SEQ ID NO: 598496 - RNA, 19 nt, Homo sapiens
  misc_RNA (1)...(19): siRNA sense strand
aggaaucuuuggaacauau

SEQ ID NO: 598497 - RNA, 19 nt, Homo sapiens
  misc_RNA (1)...(19): siRNA sense strand
gaugagagaggcagaucug

SEQ ID NO: 598498 - RNA, 19 nt, Homo sapiens
  misc_RNA (1)...(19): siRNA sense strand
uggauuggauaugcuauug

SEQ ID NO: 598499 - RNA, 19 nt, Homo sapiens
  misc_RNA (1)...(19): siRNA sense strand
gcauaccauuugcugaaag

SEQ ID NO: 598500 - RNA, 19 nt, Homo sapiens
  misc_RNA (1)...(19): siRNA sense strand
caggaaucuuuggaacaua

SEQ ID NO: 598501 - RNA, 19 nt, Homo sapiens
  misc_RNA (1)...(19): siRNA sense strand
auuaugauauggcccuaaa

SEQ ID NO: 598502 - RNA, 19 nt, Homo sapiens
  misc_RNA (1)...(19): siRNA sense strand
aauuagcacuuuagaagag

SEQ ID NO: 598503 - RNA, 19 nt, Homo sapiens
  misc_RNA (1)...(19): siRNA sense strand
agaagccagugaaguguuc

SEQ ID NO: 598504 - RNA, 19 nt, Homo sapiens
  misc_RNA (1)...(19): siRNA sense strand
gauaaagauaaccugcaaa

SEQ ID NO: 598505 - RNA, 19 nt, Homo sapiens
  misc_RNA (1)...(19): siRNA sense strand
aaaauuugcugaacaugga

SEQ ID NO: 598506 - RNA, 19 nt, Homo sapiens
  misc_RNA (1)...(19): siRNA sense strand
ugagagaggcagaucuguu

SEQ ID NO: 598507 - RNA, 19 nt, Homo sapiens
  misc_RNA (1)...(19): siRNA sense strand
gcccucaaauuagauaaag

SEQ ID NO: 598508 - RNA, 19 nt, Homo sapiens
  misc_RNA (1)...(19): siRNA sense strand
cuacaaauuagcacuuuag

SEQ ID NO: 598509 - RNA, 19 nt, Homo sapiens
  misc_RNA (1)...(19): siRNA sense strand
gaaaggauuaacacugaac

SEQ ID NO: 598510 - RNA, 19 nt, Homo sapiens
  misc_RNA (1)...(19): siRNA sense strand
gaagguuaccgagagacaa

SEQ ID NO: 598511 - RNA, 19 nt, Homo sapiens
  misc_RNA (1)...(19): siRNA sense strand
gcuauugcauaccauuugc

SEQ ID NO: 598512 - RNA, 19 nt, Homo sapiens
  misc_RNA (1)...(19): siRNA sense strand
agauuaccuuugacucuug

SEQ ID NO: 598513 - RNA, 19 nt, Homo sapiens
  misc_RNA (1)...(19): siRNA sense strand
guuggaagaauuuagacaa

SEQ ID NO: 598514 - RNA, 19 nt, Homo sapiens
  misc_RNA (1)...(19): siRNA sense strand
uauaauccaggaacuuguu

SEQ ID NO: 598515 - RNA, 19 nt, Homo sapiens
  misc_RNA (1)...(19): siRNA sense strand
gauuaccuuugacucuugu

SEQ ID NO: 598516 - RNA, 19 nt, Homo sapiens
  misc_RNA (1)...(19): siRNA sense strand
gagaggcuucaaauuuaug

SEQ ID NO: 598517 - RNA, 19 nt, Homo sapiens
  misc_RNA (1)...(19): siRNA sense strand
gaagaauuuagacaaacuc

SEQ ID NO: 598518 - RNA, 19 nt, Homo sapiens
  misc_RNA (1)...(19): siRNA sense strand
aaaagaagccagugaagug

SEQ ID NO: 598519 - RNA, 19 nt, Homo sapiens
  misc_RNA (1)...(19): siRNA sense strand
ucagcaaguuccuccaaac

SEQ ID NO: 598520 - RNA, 19 nt, Homo sapiens
  misc_RNA (1)...(19): siRNA sense strand
gcucuacaaauuagcacuu

SEQ ID NO: 598521 - RNA, 19 nt, Homo sapiens
  misc_RNA (1)...(19): siRNA sense strand
cagcaaguuccuccaaaca

SEQ ID NO: 598522 - RNA, 19 nt, Homo sapiens
  misc_RNA (1)...(19): siRNA sense strand
ucuugcagcguucugauaa

SEQ ID NO: 598523 - RNA, 19 nt, Homo sapiens
  misc_RNA (1)...(19): siRNA sense strand
gaaauuaaaggggaaauac

SEQ ID NO: 598524 - RNA, 19 nt, Homo sapiens
  misc_RNA (1)...(19): siRNA sense strand
gauauggcccuaaaacugu

SEQ ID NO: 598525 - RNA, 19 nt, Homo sapiens
  misc_RNA (1)...(19): siRNA sense strand
aaagaagaagcuuaugagu

SEQ ID NO: 598526 - RNA, 19 nt, Homo sapiens
  misc_RNA (1)...(19): siRNA sense strand
auaccagcuucuucaguug

SEQ ID NO: 598527 - RNA, 19 nt, Homo sapiens
  misc_RNA (1)...(19): siRNA sense strand
ucuauaauccaggaacuug

SEQ ID NO: 598528 - RNA, 19 nt, Homo sapiens
  misc_RNA (1)...(19): siRNA sense strand
accgaaaugcccucaaauu

SEQ ID NO: 598529 - RNA, 19 nt, Homo sapiens
  misc_RNA (1)...(19): siRNA sense strand
caaacgcaucuugaaaugu

SEQ ID NO: 598530 - RNA, 19 nt, Homo sapiens
  misc_RNA (1)...(19): siRNA sense strand
ggacuucguaaugauguca

SEQ ID NO: 598531 - RNA, 19 nt, Homo sapiens
  misc_RNA (1)...(19): siRNA sense strand
uaccauuugcugaaagauu

SEQ ID NO: 598532 - RNA, 19 nt, Homo sapiens
  misc_RNA (1)...(19): siRNA sense strand
uugcauaccauuugcugaa

SEQ ID NO: 598533 - RNA, 19 nt, Homo sapiens
  misc_RNA (1)...(19): siRNA sense strand
uggagagacuuuggcuaug

SEQ ID NO: 598534 - RNA, 19 nt, Homo sapiens
  misc_RNA (1)...(19): siRNA sense strand
aaaggacuucguaaugaug

SEQ ID NO: 598535 - RNA, 19 nt, Homo sapiens
  misc_RNA (1)...(19): siRNA sense strand
ugcauaccauuugcugaaa

SEQ ID NO: 598536 - RNA, 19 nt, Homo sapiens
  misc_RNA (1)...(19): siRNA sense strand
aaagaagccagugaagugu

SEQ ID NO: 598537 - RNA, 19 nt, Homo sapiens
  misc_RNA (1)...(19): siRNA sense strand
gaaaugcccucaaauuaga

SEQ ID NO: 598538 - RNA, 19 nt, Homo sapiens
  misc_RNA (1)...(19): siRNA sense strand
agaagaagcuuaugaguuu

SEQ ID NO: 598539 - RNA, 19 nt, Homo sapiens
  misc_RNA (1)...(19): siRNA sense strand
guaaaggacuucguaauga

SEQ ID NO: 598540 - RNA, 19 nt, Homo sapiens
  misc_RNA (1)...(19): siRNA sense strand
aagagaggcuucaaauuua

SEQ ID NO: 598541 - RNA, 19 nt, Homo sapiens
  misc_RNA (1)...(19): siRNA sense strand
gggaaauacuguugaaauu

SEQ ID NO: 598542 - RNA, 19 nt, Homo sapiens
  misc_RNA (1)...(19): siRNA sense strand
gcugaaagauuaugauaug

SEQ ID NO: 598543 - RNA, 19 nt, Homo sapiens
  misc_RNA (1)...(19): siRNA sense strand
gcaaguuccuccaaacaaa

SEQ ID NO: 598544 - RNA, 19 nt, Homo sapiens
  misc_RNA (1)...(19): siRNA sense strand
gaaauacuguugaaauugg

SEQ ID NO: 598545 - RNA, 19 nt, Homo sapiens
  misc_RNA (1)...(19): siRNA sense strand
guaaugaugucaagaguca

SEQ ID NO: 598546 - RNA, 19 nt, Homo sapiens
  misc_RNA (1)...(19): siRNA sense strand
gauaccagcuucuucaguu

SEQ ID NO: 598547 - RNA, 19 nt, Homo sapiens
  misc_RNA (1)...(19): siRNA sense strand
gcauguauauggacucuug

SEQ ID NO: 598548 - RNA, 19 nt, Homo sapiens
  misc_RNA (1)...(19): siRNA sense strand
gcaagaugauucugucgaa

SEQ ID NO: 598549 - RNA, 19 nt, Homo sapiens
  misc_RNA (1)...(19): siRNA sense strand
ggagagacuuuggcuauga

SEQ ID NO: 598550 - RNA, 19 nt, Homo sapiens
  misc_RNA (1)...(19): siRNA sense strand
acacugaacuguuuaggaa

SEQ ID NO: 598551 - RNA, 19 nt, Homo sapiens
  misc_RNA (1)...(19): siRNA sense strand
aaacgcaucuugaaauguu

SEQ ID NO: 598552 - RNA, 19 nt, Homo sapiens
  misc_RNA (1)...(19): siRNA sense strand
ccgaaaugcccucaaauua

SEQ ID NO: 598553 - RNA, 19 nt, Homo sapiens
  misc_RNA (1)...(19): siRNA sense strand
gcacagcacuuugauaaac

SEQ ID NO: 598554 - RNA, 19 nt, Homo sapiens
  misc_RNA (1)...(19): siRNA sense strand
caaauuagcacuuuagaag

SEQ ID NO: 598555 - RNA, 19 nt, Homo sapiens
  misc_RNA (1)...(19): siRNA sense strand
gcaggaaucuuuggaacau

SEQ ID NO: 598556 - RNA, 19 nt, Homo sapiens
  misc_RNA (1)...(19): siRNA sense strand
uccaggaacuuguuacuaa

SEQ ID NO: 598557 - RNA, 19 nt, Homo sapiens
  misc_RNA (1)...(19): siRNA sense strand
gcagaucuguugcaggaau

SEQ ID NO: 598558 - RNA, 19 nt, Homo sapiens
  misc_RNA (1)...(19): siRNA sense strand
gcaauuacacccagaagau

SEQ ID NO: 598559 - RNA, 19 nt, Homo sapiens
  misc_RNA (1)...(19): siRNA sense strand
ggaaauacuguugaaauug

SEQ ID NO: 598560 - RNA, 19 nt, Homo sapiens
  misc_RNA (1)...(19): siRNA sense strand
ggaagaauuuagacaaacu

SEQ ID NO: 598561 - RNA, 19 nt, Homo sapiens
  misc_RNA (1)...(19): siRNA sense strand
gcacuuugauaaacuugga

SEQ ID NO: 598562 - RNA, 19 nt, Homo sapiens
  misc_RNA (1)...(19): siRNA sense strand
gagagaggcagaucuguug

SEQ ID NO: 598563 - RNA, 19 nt, Homo sapiens
  misc_RNA (1)...(19): siRNA sense strand
cccagaagauuaccuuuga

SEQ ID NO: 598564 - RNA, 19 nt, Homo sapiens
  misc_RNA (1)...(19): siRNA sense strand
uaaaggacuucguaaugau

SEQ ID NO: 598565 - RNA, 19 nt, Homo sapiens
  misc_RNA (1)...(19): siRNA sense strand
gcagaaaauugguguuauu

SEQ ID NO: 598566 - RNA, 19 nt, Homo sapiens
  misc_RNA (1)...(19): siRNA sense strand
accauuugcugaaagauua

SEQ ID NO: 598567 - RNA, 19 nt, Homo sapiens
  misc_RNA (1)...(19): siRNA sense strand
gagagacuuuggcuaugaa

SEQ ID NO: 598568 - RNA, 19 nt, Homo sapiens
  misc_RNA (1)...(19): siRNA sense strand
cagcgugccuccuggauug

SEQ ID NO: 598569 - RNA, 19 nt, Homo sapiens
  misc_RNA (1)...(19): siRNA sense strand
cgaaaugcccucaaauuag

SEQ ID NO: 598570 - RNA, 19 nt, Homo sapiens
  misc_RNA (1)...(19): siRNA sense strand
cuuaugaguuuguucguaa

SEQ ID NO: 598571 - RNA, 19 nt, Homo sapiens
  misc_RNA (1)...(19): siRNA sense strand
gaagauuaccuuugacucu

SEQ ID NO: 598572 - RNA, 19 nt, Homo sapiens
  misc_RNA (1)...(19): siRNA sense strand
gaagaagcuuaugaguuug

SEQ ID NO: 598573 - RNA, 19 nt, Homo sapiens
  misc_RNA (1)...(19): siRNA sense strand
gcuaguacuccaacucuaa

SEQ ID NO: 598574 - RNA, 19 nt, Homo sapiens
  misc_RNA (1)...(19): siRNA sense strand
ugauaaacuuggacaguau

SEQ ID NO: 598575 - RNA, 19 nt, Homo sapiens
  misc_RNA (1)...(19): siRNA sense strand
guuaugaacagaagcagua

SEQ ID NO: 598576 - RNA, 19 nt, Homo sapiens
  misc_RNA (1)...(19): siRNA sense strand
gaacagaagcaguacaaaa

SEQ ID NO: 598577 - RNA, 19 nt, Homo sapiens
  misc_RNA (1)...(19): siRNA sense strand
gaacauggagagacuuugg

SEQ ID NO: 598578 - RNA, 19 nt, Homo sapiens
  misc_RNA (1)...(19): siRNA sense strand
guugaaauugggaagauua

SEQ ID NO: 598579 - RNA, 19 nt, Homo sapiens
  misc_RNA (1)...(19): siRNA sense strand
augaaaggauuaacacuga

SEQ ID NO: 598580 - RNA, 19 nt, Homo sapiens
  misc_RNA (1)...(19): siRNA sense strand
uggcacagcacuuugauaa

SEQ ID NO: 598581 - RNA, 19 nt, Homo sapiens
  misc_RNA (1)...(19): siRNA sense strand
uuaccgaaaugcccucaaa

SEQ ID NO: 598582 - RNA, 19 nt, Homo sapiens
  misc_RNA (1)...(19): siRNA sense strand
uugauaaacuuggacagua

SEQ ID NO: 598583 - RNA, 19 nt, Homo sapiens
  misc_RNA (1)...(19): siRNA sense strand
gcuuaugaguuuguucgua

SEQ ID NO: 598584 - RNA, 19 nt, Homo sapiens
  misc_RNA (1)...(19): siRNA sense strand
gacaguauucuuuggcuuu

SEQ ID NO: 598585 - RNA, 19 nt, Homo sapiens
  misc_RNA (1)...(19): siRNA sense strand
uuaugaagccucucuuaaa

SEQ ID NO: 598586 - RNA, 19 nt, Homo sapiens
  misc_RNA (1)...(19): siRNA sense strand
cguaaaggacuucguaaug

SEQ ID NO: 598587 - RNA, 19 nt, Homo sapiens
  misc_RNA (1)...(19): siRNA sense strand
agagaggcuucaaauuuau

SEQ ID NO: 598588 - RNA, 19 nt, Homo sapiens
  misc_RNA (1)...(19): siRNA sense strand
agauaaagauaaccugcaa

SEQ ID NO: 598589 - RNA, 19 nt, Homo sapiens
  misc_RNA (1)...(19): siRNA sense strand
gauuggauaugcuauugca

SEQ ID NO: 598590 - RNA, 19 nt, Homo sapiens
  misc_RNA (1)...(19): siRNA sense strand
ccaggaacuuguuacuaau

SEQ ID NO: 598591 - RNA, 19 nt, Homo sapiens
  misc_RNA (1)...(19): siRNA sense strand
ucaagagucaugucuguug

SEQ ID NO: 598592 - RNA, 19 nt, Homo sapiens
  misc_RNA (1)...(19): siRNA sense strand
uaugaagccucucuuaaaa

SEQ ID NO: 598593 - RNA, 19 nt, Homo sapiens
  misc_RNA (1)...(19): siRNA sense strand
aagaagaagcuuaugaguu

SEQ ID NO: 598594 - RNA, 19 nt, Homo sapiens
  misc_RNA (1)...(19): siRNA sense strand
gauaaacuuggacaguauu

SEQ ID NO: 598595 - RNA, 19 nt, Homo sapiens
  misc_RNA (1)...(19): siRNA sense strand
ugaaaggauuaacacugaa

SEQ ID NO: 598596 - RNA, 19 nt, Homo sapiens
  misc_RNA (1)...(19): siRNA sense strand
cauaccauuugcugaaaga

SEQ ID NO: 598597 - RNA, 19 nt, Homo sapiens
  misc_RNA (1)...(19): siRNA sense strand
guucguaaaggacuucgua

SEQ ID NO: 598598 - RNA, 19 nt, Homo sapiens
  misc_RNA (1)...(19): siRNA sense strand
caacacuacucuggguuca

SEQ ID NO: 598599 - RNA, 19 nt, Homo sapiens
  misc_RNA (1)...(19): siRNA sense strand
caaaugagagaccuugaag

SEQ ID NO: 598600 - RNA, 19 nt, Homo sapiens
  misc_RNA (1)...(19): siRNA sense strand
ccaaaugagagaccuugaa

SEQ ID NO: 598601 - RNA, 19 nt, Homo sapiens
  misc_RNA (1)...(19): siRNA sense strand
ugucaagagucaugucugu

SEQ ID NO: 598602 - RNA, 19 nt, Homo sapiens
  misc_RNA (1)...(19): siRNA sense strand
ggaaucuuuggaacauaua

SEQ ID NO: 598603 - RNA, 19 nt, Homo sapiens
  misc_RNA (1)...(19): siRNA sense strand
aauuacacccagaagauua

SEQ ID NO: 598604 - RNA, 19 nt, Homo sapiens
  misc_RNA (1)...(19): siRNA sense strand
ugaguuuguucguaaagga

SEQ ID NO: 598605 - RNA, 19 nt, Homo sapiens
  misc_RNA (1)...(19): siRNA sense strand
caauuacacccagaagauu

SEQ ID NO: 598606 - RNA, 19 nt, Homo sapiens
  misc_RNA (1)...(19): siRNA sense strand
aggaaucuuuggaacauau

SEQ ID NO: 598607 - RNA, 19 nt, Homo sapiens
  misc_RNA (1)...(19): siRNA sense strand
gaugagagaggcagaucug

SEQ ID NO: 598608 - RNA, 19 nt, Homo sapiens
  misc_RNA (1)...(19): siRNA sense strand
uggauuggauaugcuauug

SEQ ID NO: 598609 - RNA, 19 nt, Homo sapiens
  misc_RNA (1)...(19): siRNA sense strand
gcauaccauuugcugaaag

SEQ ID NO: 598610 - RNA, 19 nt, Homo sapiens
  misc_RNA (1)...(19): siRNA sense strand
caggaaucuuuggaacaua

SEQ ID NO: 598611 - RNA, 19 nt, Homo sapiens
  misc_RNA (1)...(19): siRNA sense strand
auuaugauauggcccuaaa

SEQ ID NO: 598612 - RNA, 19 nt, Homo sapiens
  misc_RNA (1)...(19): siRNA sense strand
aauuagcacuuuagaagag

SEQ ID NO: 598613 - RNA, 19 nt, Homo sapiens
  misc_RNA (1)...(19): siRNA sense strand
agaagccagugaaguguuc

SEQ ID NO: 598614 - RNA, 19 nt, Homo sapiens
  misc_RNA (1)...(19): siRNA sense strand
gauaaagauaaccugcaaa

SEQ ID NO: 598615 - RNA, 19 nt, Homo sapiens
  misc_RNA (1)...(19): siRNA sense strand
aaaauuugcugaacaugga

SEQ ID NO: 598616 - RNA, 19 nt, Homo sapiens
  misc_RNA (1)...(19): siRNA sense strand
aaacuuggacaguauucuu

SEQ ID NO: 598617 - RNA, 19 nt, Homo sapiens
  misc_RNA (1)...(19): siRNA sense strand
ugagagaggcagaucuguu

SEQ ID NO: 598618 - RNA, 19 nt, Homo sapiens
  misc_RNA (1)...(19): siRNA sense strand
gaaaggauuaacacugaac

SEQ ID NO: 598619 - RNA, 19 nt, Homo sapiens
  misc_RNA (1)...(19): siRNA sense strand
gcaauugcuaguacuccaa

SEQ ID NO: 598620 - RNA, 19 nt, Homo sapiens
  misc_RNA (1)...(19): siRNA sense strand
caggaacuuguuacuaauu

SEQ ID NO: 598621 - RNA, 19 nt, Homo sapiens
  misc_RNA (1)...(19): siRNA sense strand
cuacaaauuagcacuuuag

SEQ ID NO: 598622 - RNA, 19 nt, Homo sapiens
  misc_RNA (1)...(19): siRNA sense strand
gaagguuaccgagagacaa

SEQ ID NO: 598623 - RNA, 19 nt, Homo sapiens
  misc_RNA (1)...(19): siRNA sense strand
gcccucaaauuagauaaag

SEQ ID NO: 598624 - RNA, 19 nt, Homo sapiens
  misc_RNA (1)...(19): siRNA sense strand
acacuacucuggguucagu

SEQ ID NO: 598625 - RNA, 19 nt, Homo sapiens
  misc_RNA (1)...(19): siRNA sense strand
gcuauugcauaccauuugc

SEQ ID NO: 598626 - RNA, 19 nt, Homo sapiens
  misc_RNA (1)...(19): siRNA sense strand
aauuaugaagccucucuua

SEQ ID NO: 598627 - RNA, 19 nt, Homo sapiens
  misc_RNA (1)...(19): siRNA sense strand
agauuaccuuugacucuug

SEQ ID NO: 598628 - RNA, 19 nt, Homo sapiens
  misc_RNA (1)...(19): siRNA sense strand
guuggaagaauuuagacaa

SEQ ID NO: 598629 - RNA, 19 nt, Homo sapiens
  misc_RNA (1)...(19): siRNA sense strand
uauaauccaggaacuuguu

SEQ ID NO: 598630 - RNA, 19 nt, Homo sapiens
  misc_RNA (1)...(19): siRNA sense strand
gauuaccuuugacucuugu

SEQ ID NO: 598631 - RNA, 19 nt, Homo sapiens
  misc_RNA (1)...(19): siRNA sense strand
gagaggcuucaaauuuaug

SEQ ID NO: 598632 - RNA, 19 nt, Homo sapiens
  misc_RNA (1)...(19): siRNA sense strand
acaguauucuuuggcuuug

SEQ ID NO: 598633 - RNA, 19 nt, Homo sapiens
  misc_RNA (1)...(19): siRNA sense strand
gaagaauuuagacaaacuc

SEQ ID NO: 598634 - RNA, 19 nt, Homo sapiens
  misc_RNA (1)...(19): siRNA sense strand
auucuuuggcuuuggauua

SEQ ID NO: 598635 - RNA, 19 nt, Homo sapiens
  misc_RNA (1)...(19): siRNA sense strand
aaaagaagccagugaagug

SEQ ID NO: 598636 - RNA, 19 nt, Homo sapiens
  misc_RNA (1)...(19): siRNA sense strand
acagcacuuugauaaacuu

SEQ ID NO: 598637 - RNA, 19 nt, Homo sapiens
  misc_RNA (1)...(19): siRNA sense strand
ggaccaggccgagaauuaa

SEQ ID NO: 598638 - RNA, 19 nt, Homo sapiens
  misc_RNA (1)...(19): siRNA sense strand
ggucacaguuggaaagaca

SEQ ID NO: 598639 - RNA, 19 nt, Homo sapiens
  misc_RNA (1)...(19): siRNA sense strand
cugagaacguggaguuuaa

SEQ ID NO: 598640 - RNA, 19 nt, Homo sapiens
  misc_RNA (1)...(19): siRNA sense strand
gaacguggaguuuaagucu

SEQ ID NO: 598641 - RNA, 19 nt, Homo sapiens
  misc_RNA (1)...(19): siRNA sense strand
gagaaacaacauggacuuu

SEQ ID NO: 598642 - RNA, 19 nt, Homo sapiens
  misc_RNA (1)...(19): siRNA sense strand
gccgagaauuaaucuacaa

SEQ ID NO: 598643 - RNA, 19 nt, Homo sapiens
  misc_RNA (1)...(19): siRNA sense strand
auacuacugugugaaguuu

SEQ ID NO: 598644 - RNA, 19 nt, Homo sapiens
  misc_RNA (1)...(19): siRNA sense strand
uggaccaggccgagaauua

SEQ ID NO: 598645 - RNA, 19 nt, Homo sapiens
  misc_RNA (1)...(19): siRNA sense strand
cugagaagcuccuguuggu

SEQ ID NO: 598646 - RNA, 19 nt, Homo sapiens
  misc_RNA (1)...(19): siRNA sense strand
ucacaaagagaaacaacau

SEQ ID NO: 598647 - RNA, 19 nt, Homo sapiens
  misc_RNA (1)...(19): siRNA sense strand
caaagagaaacaacaugga

SEQ ID NO: 598648 - RNA, 19 nt, Homo sapiens
  misc_RNA (1)...(19): siRNA sense strand
ccugagaacguggaguuua

SEQ ID NO: 598649 - RNA, 19 nt, Homo sapiens
  misc_RNA (1)...(19): siRNA sense strand
ggccgagaauuaaucuaca

SEQ ID NO: 598650 - RNA, 19 nt, Homo sapiens
  misc_RNA (1)...(19): siRNA sense strand
uuacugcgcugcuccucau

SEQ ID NO: 598651 - RNA, 19 nt, Homo sapiens
  misc_RNA (1)...(19): siRNA sense strand
gaccaggccgagaauuaau

SEQ ID NO: 598652 - RNA, 19 nt, Homo sapiens
  misc_RNA (1)...(19): siRNA sense strand
gcccugagaacguggaguu

SEQ ID NO: 598653 - RNA, 19 nt, Homo sapiens
  misc_RNA (1)...(19): siRNA sense strand
agagaaacaacauggacuu

SEQ ID NO: 598654 - RNA, 19 nt, Homo sapiens
  misc_RNA (1)...(19): siRNA sense strand
caggguaacaacaguuuca

SEQ ID NO: 598655 - RNA, 19 nt, Homo sapiens
  misc_RNA (1)...(19): siRNA sense strand
cauacuacugugugaaguu

SEQ ID NO: 598656 - RNA, 19 nt, Homo sapiens
  misc_RNA (1)...(19): siRNA sense strand
gagaacguggaguuuaagu

SEQ ID NO: 598657 - RNA, 19 nt, Homo sapiens
  misc_RNA (1)...(19): siRNA sense strand
ggaccaggccgagaauuaa

SEQ ID NO: 598658 - RNA, 19 nt, Homo sapiens
  misc_RNA (1)...(19): siRNA sense strand
ggucacaguuggaaagaca

SEQ ID NO: 598659 - RNA, 19 nt, Homo sapiens
  misc_RNA (1)...(19): siRNA sense strand
cugagaacguggaguuuaa

SEQ ID NO: 598660 - RNA, 19 nt, Homo sapiens
  misc_RNA (1)...(19): siRNA sense strand
gaacguggaguuuaagucu

SEQ ID NO: 598661 - RNA, 19 nt, Homo sapiens
  misc_RNA (1)...(19): siRNA sense strand
gagaaacaacauggacuuu

SEQ ID NO: 598662 - RNA, 19 nt, Homo sapiens
  misc_RNA (1)...(19): siRNA sense strand
gccgagaauuaaucuacaa

SEQ ID NO: 598663 - RNA, 19 nt, Homo sapiens
  misc_RNA (1)...(19): siRNA sense strand
auacuacugugugaaguuu

SEQ ID NO: 598664 - RNA, 19 nt, Homo sapiens
  misc_RNA (1)...(19): siRNA sense strand
uggaccaggccgagaauua

SEQ ID NO: 598665 - RNA, 19 nt, Homo sapiens
  misc_RNA (1)...(19): siRNA sense strand
cugagaagcuccuguuggu

SEQ ID NO: 598666 - RNA, 19 nt, Homo sapiens
  misc_RNA (1)...(19): siRNA sense strand
ucacaaagagaaacaacau

SEQ ID NO: 598667 - RNA, 19 nt, Homo sapiens
  misc_RNA (1)...(19): siRNA sense strand
caaagagaaacaacaugga

SEQ ID NO: 598668 - RNA, 19 nt, Homo sapiens
  misc_RNA (1)...(19): siRNA sense strand
ccugagaacguggaguuua

SEQ ID NO: 598669 - RNA, 19 nt, Homo sapiens
  misc_RNA (1)...(19): siRNA sense strand
ggccgagaauuaaucuaca

SEQ ID NO: 598670 - RNA, 19 nt, Homo sapiens
  misc_RNA (1)...(19): siRNA sense strand
uuacugcgcugcuccucau

SEQ ID NO: 598671 - RNA, 19 nt, Homo sapiens
  misc_RNA (1)...(19): siRNA sense strand
gaccaggccgagaauuaau

SEQ ID NO: 598672 - RNA, 19 nt, Homo sapiens
  misc_RNA (1)...(19): siRNA sense strand
gcccugagaacguggaguu

SEQ ID NO: 598673 - RNA, 19 nt, Homo sapiens
  misc_RNA (1)...(19): siRNA sense strand
agagaaacaacauggacuu

SEQ ID NO: 598674 - RNA, 19 nt, Homo sapiens
  misc_RNA (1)...(19): siRNA sense strand
caggguaacaacaguuuca

SEQ ID NO: 598675 - RNA, 19 nt, Homo sapiens
  misc_RNA (1)...(19): siRNA sense strand
cauacuacugugugaaguu

SEQ ID NO: 598676 - RNA, 19 nt, Homo sapiens
  misc_RNA (1)...(19): siRNA sense strand
gagaacguggaguuuaagu

SEQ ID NO: 598677 - RNA, 19 nt, Homo sapiens
  misc_RNA (1)...(19): siRNA sense strand
ggagagagauuuaacuuuu

SEQ ID NO: 598678 - RNA, 19 nt, Homo sapiens
  misc_RNA (1)...(19): siRNA sense strand
gcaguuacuucaaggauau

SEQ ID NO: 598679 - RNA, 19 nt, Homo sapiens
  misc_RNA (1)...(19): siRNA sense strand
gaagaugggagagagauuu

SEQ ID NO: 598680 - RNA, 19 nt, Homo sapiens
  misc_RNA (1)...(19): siRNA sense strand
ggaaugcacgucagucaaa

SEQ ID NO: 598681 - RNA, 19 nt, Homo sapiens
  misc_RNA (1)...(19): siRNA sense strand
uaaaucaaaugagccauca

SEQ ID NO: 598682 - RNA, 19 nt, Homo sapiens
  misc_RNA (1)...(19): siRNA sense strand
gaagauaucagaggaaugc

SEQ ID NO: 598683 - RNA, 19 nt, Homo sapiens
  misc_RNA (1)...(19): siRNA sense strand
ucaaaugagccaucaguga

SEQ ID NO: 598684 - RNA, 19 nt, Homo sapiens
  misc_RNA (1)...(19): siRNA sense strand
guuaaugaauccaaagaag

SEQ ID NO: 598685 - RNA, 19 nt, Homo sapiens
  misc_RNA (1)...(19): siRNA sense strand
gggagagagauuuaacuuu

SEQ ID NO: 598686 - RNA, 19 nt, Homo sapiens
  misc_RNA (1)...(19): siRNA sense strand
caagguggaagauaucaga

SEQ ID NO: 598687 - RNA, 19 nt, Homo sapiens
  misc_RNA (1)...(19): siRNA sense strand
ugaacuugcuuggcaguga

SEQ ID NO: 598688 - RNA, 19 nt, Homo sapiens
  misc_RNA (1)...(19): siRNA sense strand
gaggaaugcacgucaguca

SEQ ID NO: 598689 - RNA, 19 nt, Homo sapiens
  misc_RNA (1)...(19): siRNA sense strand
aagaugggagagagauuua

SEQ ID NO: 598690 - RNA, 19 nt, Homo sapiens
  misc_RNA (1)...(19): siRNA sense strand
guagcuggguuuagugaac

SEQ ID NO: 598691 - RNA, 19 nt, Homo sapiens
  misc_RNA (1)...(19): siRNA sense strand
ccaaagaagaugggagaga

SEQ ID NO: 598692 - RNA, 19 nt, Homo sapiens
  misc_RNA (1)...(19): siRNA sense strand
guauugauguccggcugaa

SEQ ID NO: 598693 - RNA, 19 nt, Homo sapiens
  misc_RNA (1)...(19): siRNA sense strand
agcaguuacuucaaggaua

SEQ ID NO: 598694 - RNA, 19 nt, Homo sapiens
  misc_RNA (1)...(19): siRNA sense strand
uggaagauaucagaggaau

SEQ ID NO: 598695 - RNA, 19 nt, Homo sapiens
  misc_RNA (1)...(19): siRNA sense strand
cuugcuaccucaucagaga

SEQ ID NO: 598696 - RNA, 19 nt, Homo sapiens
  misc_RNA (1)...(19): siRNA sense strand
gaaugcacgucagucaaaa

SEQ ID NO: 598697 - RNA, 19 nt, Homo sapiens
  misc_RNA (1)...(19): siRNA sense strand
gcugaagguucuuuuagau

SEQ ID NO: 598698 - RNA, 19 nt, Homo sapiens
  misc_RNA (1)...(19): siRNA sense strand
cguuguagcuggguuuagu

SEQ ID NO: 598699 - RNA, 19 nt, Homo sapiens
  misc_RNA (1)...(19): siRNA sense strand
ugaggcagcaguuacuuca

SEQ ID NO: 598700 - RNA, 19 nt, Homo sapiens
  misc_RNA (1)...(19): siRNA sense strand
ggaagauaucagaggaaug

SEQ ID NO: 598701 - RNA, 19 nt, Homo sapiens
  misc_RNA (1)...(19): siRNA sense strand
aggcagcaguuacuucaag

SEQ ID NO: 598702 - RNA, 19 nt, Homo sapiens
  misc_RNA (1)...(19): siRNA sense strand
caucagugaggcagcaguu

SEQ ID NO: 598703 - RNA, 19 nt, Homo sapiens
  misc_RNA (1)...(19): siRNA sense strand
gaugggagagagauuuaac

SEQ ID NO: 598704 - RNA, 19 nt, Homo sapiens
  misc_RNA (1)...(19): siRNA sense strand
gaacaaagacagauaccuu

SEQ ID NO: 598705 - RNA, 19 nt, Homo sapiens
  misc_RNA (1)...(19): siRNA sense strand
gauguggacuucaguuauu

SEQ ID NO: 598706 - RNA, 19 nt, Homo sapiens
  misc_RNA (1)...(19): siRNA sense strand
ggagagagauuuaacuuuu

SEQ ID NO: 598707 - RNA, 19 nt, Homo sapiens
  misc_RNA (1)...(19): siRNA sense strand
gcaguuacuucaaggauau

SEQ ID NO: 598708 - RNA, 19 nt, Homo sapiens
  misc_RNA (1)...(19): siRNA sense strand
caagcuucaugaugucuua

SEQ ID NO: 598709 - RNA, 19 nt, Homo sapiens
  misc_RNA (1)...(19): siRNA sense strand
ggaacuuucucaacgcauu

SEQ ID NO: 598710 - RNA, 19 nt, Homo sapiens
  misc_RNA (1)...(19): siRNA sense strand
gaagaugggagagagauuu

SEQ ID NO: 598711 - RNA, 19 nt, Homo sapiens
  misc_RNA (1)...(19): siRNA sense strand
ggaaugcacgucagucaaa

SEQ ID NO: 598712 - RNA, 19 nt, Homo sapiens
  misc_RNA (1)...(19): siRNA sense strand
ugacauugauccacagguu

SEQ ID NO: 598713 - RNA, 19 nt, Homo sapiens
  misc_RNA (1)...(19): siRNA sense strand
aaagacagauaccuucaga

SEQ ID NO: 598714 - RNA, 19 nt, Homo sapiens
  misc_RNA (1)...(19): siRNA sense strand
ccacagggauggcgagaag

SEQ ID NO: 598715 - RNA, 19 nt, Homo sapiens
  misc_RNA (1)...(19): siRNA sense strand
uaaaucaaaugagccauca

SEQ ID NO: 598716 - RNA, 19 nt, Homo sapiens
  misc_RNA (1)...(19): siRNA sense strand
gaagauaucagaggaaugc

SEQ ID NO: 598717 - RNA, 19 nt, Homo sapiens
  misc_RNA (1)...(19): siRNA sense strand
cauacaacaugacgaaaca

SEQ ID NO: 598718 - RNA, 19 nt, Homo sapiens
  misc_RNA (1)...(19): siRNA sense strand
gguguucacucaacuugga

SEQ ID NO: 598719 - RNA, 19 nt, Homo sapiens
  misc_RNA (1)...(19): siRNA sense strand
ucaaaugagccaucaguga

SEQ ID NO: 598720 - RNA, 19 nt, Homo sapiens
  misc_RNA (1)...(19): siRNA sense strand
guuaaugaauccaaagaag

SEQ ID NO: 598721 - RNA, 19 nt, Homo sapiens
  misc_RNA (1)...(19): siRNA sense strand
gauggaacaaagacagaua

SEQ ID NO: 598722 - RNA, 19 nt, Homo sapiens
  misc_RNA (1)...(19): siRNA sense strand
gaagaauggcacagggaaa

SEQ ID NO: 598723 - RNA, 19 nt, Homo sapiens
  misc_RNA (1)...(19): siRNA sense strand
ggcgagaaguauuuguuga

SEQ ID NO: 598724 - RNA, 19 nt, Homo sapiens
  misc_RNA (1)...(19): siRNA sense strand
cugcacugguugcugauua

SEQ ID NO: 598725 - RNA, 19 nt, Homo sapiens
  misc_RNA (1)...(19): siRNA sense strand
ucacucaacuuggaucugu

SEQ ID NO: 598726 - RNA, 19 nt, Homo sapiens
  misc_RNA (1)...(19): siRNA sense strand
gggauggcgagaaguauuu

SEQ ID NO: 598727 - RNA, 19 nt, Homo sapiens
  misc_RNA (1)...(19): siRNA sense strand
gggagagagauuuaacuuu

SEQ ID NO: 598728 - RNA, 19 nt, Homo sapiens
  misc_RNA (1)...(19): siRNA sense strand
gauccacagguuucugaua

SEQ ID NO: 598729 - RNA, 19 nt, Homo sapiens
  misc_RNA (1)...(19): siRNA sense strand
ggguacagcuuuuaucuug

SEQ ID NO: 598730 - RNA, 19 nt, Homo sapiens
  misc_RNA (1)...(19): siRNA sense strand
gcuucaugaugucuuaauu

SEQ ID NO: 598731 - RNA, 19 nt, Homo sapiens
  misc_RNA (1)...(19): siRNA sense strand
caagggaucauguugaagu

SEQ ID NO: 598732 - RNA, 19 nt, Homo sapiens
  misc_RNA (1)...(19): siRNA sense strand
guugaaguguguccugaug

SEQ ID NO: 598733 - RNA, 19 nt, Homo sapiens
  misc_RNA (1)...(19): siRNA sense strand
auccacagguuucugauaa

SEQ ID NO: 598734 - RNA, 19 nt, Homo sapiens
  misc_RNA (1)...(19): siRNA sense strand
ugaacuugcuuggcaguga

SEQ ID NO: 598735 - RNA, 19 nt, Homo sapiens
  misc_RNA (1)...(19): siRNA sense strand
caagguggaagauaucaga

SEQ ID NO: 598736 - RNA, 19 nt, Homo sapiens
  misc_RNA (1)...(19): siRNA sense strand
ccacaagcuucaugauguc

SEQ ID NO: 598737 - RNA, 19 nt, Homo sapiens
  misc_RNA (1)...(19): siRNA sense strand
cgagaaguauuuguugaca

SEQ ID NO: 598738 - RNA, 19 nt, Homo sapiens
  misc_RNA (1)...(19): siRNA sense strand
gcuuuuaucuugcacauga

SEQ ID NO: 598739 - RNA, 19 nt, Homo sapiens
  misc_RNA (1)...(19): siRNA sense strand
gaccacaagcuucaugaug

SEQ ID NO: 598740 - RNA, 19 nt, Homo sapiens
  misc_RNA (1)...(19): siRNA sense strand
gagaaguauuuguugacau

SEQ ID NO: 598741 - RNA, 19 nt, Homo sapiens
  misc_RNA (1)...(19): siRNA sense strand
gaacuuucucaacgcauug

SEQ ID NO: 598742 - RNA, 19 nt, Homo sapiens
  misc_RNA (1)...(19): siRNA sense strand
gaggaaugcacgucaguca

SEQ ID NO: 598743 - RNA, 19 nt, Homo sapiens
  misc_RNA (1)...(19): siRNA sense strand
ucucaacgcauugcauuaa

SEQ ID NO: 598744 - RNA, 19 nt, Homo sapiens
  misc_RNA (1)...(19): siRNA sense strand
ggucaugauggaacaaaga

SEQ ID NO: 598745 - RNA, 19 nt, Homo sapiens
  misc_RNA (1)...(19): siRNA sense strand
accacaagcuucaugaugu

SEQ ID NO: 598746 - RNA, 19 nt, Homo sapiens
  misc_RNA (1)...(19): siRNA sense strand
aagaugggagagagauuua

SEQ ID NO: 598747 - RNA, 19 nt, Homo sapiens
  misc_RNA (1)...(19): siRNA sense strand
guagcuggguuuagugaac

SEQ ID NO: 598748 - RNA, 19 nt, Homo sapiens
  misc_RNA (1)...(19): siRNA sense strand
gacauugauccacagguuu

SEQ ID NO: 598749 - RNA, 19 nt, Homo sapiens
  misc_RNA (1)...(19): siRNA sense strand
ccaaagaagaugggagaga

SEQ ID NO: 598750 - RNA, 19 nt, Homo sapiens
  misc_RNA (1)...(19): siRNA sense strand
ucaguuauuugcgaagaau

SEQ ID NO: 598751 - RNA, 19 nt, Homo sapiens
  misc_RNA (1)...(19): siRNA sense strand
uaacagcugauguggacuu

SEQ ID NO: 598752 - RNA, 19 nt, Homo sapiens
  misc_RNA (1)...(19): siRNA sense strand
acagggauggcgagaagua

SEQ ID NO: 598753 - RNA, 19 nt, Homo sapiens
  misc_RNA (1)...(19): siRNA sense strand
guauugauguccggcugaa

SEQ ID NO: 598754 - RNA, 19 nt, Homo sapiens
  misc_RNA (1)...(19): siRNA sense strand
ggaucauguugaagugugu

SEQ ID NO: 598755 - RNA, 19 nt, Homo sapiens
  misc_RNA (1)...(19): siRNA sense strand
uggaagauaucagaggaau

SEQ ID NO: 598756 - RNA, 19 nt, Homo sapiens
  misc_RNA (1)...(19): siRNA sense strand
cuugcuaccucaucagaga

SEQ ID NO: 598757 - RNA, 19 nt, Homo sapiens
  misc_RNA (1)...(19): siRNA sense strand
agcaguuacuucaaggaua

SEQ ID NO: 598758 - RNA, 19 nt, Homo sapiens
  misc_RNA (1)...(19): siRNA sense strand
ccaggaacagcagaucuaa

SEQ ID NO: 598759 - RNA, 19 nt, Homo sapiens
  misc_RNA (1)...(19): siRNA sense strand
gcagaucuaacagcugaug

SEQ ID NO: 598760 - RNA, 19 nt, Homo sapiens
  misc_RNA (1)...(19): siRNA sense strand
ugauuauggucaugaugga

SEQ ID NO: 598761 - RNA, 19 nt, Homo sapiens
  misc_RNA (1)...(19): siRNA sense strand
gaaugcacgucagucaaaa

SEQ ID NO: 598762 - RNA, 19 nt, Homo sapiens
  misc_RNA (1)...(19): siRNA sense strand
aggaacagcagaucuaaca

SEQ ID NO: 598763 - RNA, 19 nt, Homo sapiens
  misc_RNA (1)...(19): siRNA sense strand
gauguucuuccugugcaua

SEQ ID NO: 598764 - RNA, 19 nt, Homo sapiens
  misc_RNA (1)...(19): siRNA sense strand
cguuguagcuggguuuagu

SEQ ID NO: 598765 - RNA, 19 nt, Homo sapiens
  misc_RNA (1)...(19): siRNA sense strand
gaaguauuuguugacauug

SEQ ID NO: 598766 - RNA, 19 nt, Homo sapiens
  misc_RNA (1)...(19): siRNA sense strand
ugaggcagcaguuacuuca

SEQ ID NO: 598767 - RNA, 19 nt, Homo sapiens
  misc_RNA (1)...(19): siRNA sense strand
gcugaagguucuuuuagau

SEQ ID NO: 598768 - RNA, 19 nt, Homo sapiens
  misc_RNA (1)...(19): siRNA sense strand
caacgcauugcauuaacug

SEQ ID NO: 598769 - RNA, 19 nt, Homo sapiens
  misc_RNA (1)...(19): siRNA sense strand
acuuggaucugugcugaaa

SEQ ID NO: 598770 - RNA, 19 nt, Homo sapiens
  misc_RNA (1)...(19): siRNA sense strand
ggaagauaucagaggaaug

SEQ ID NO: 598771 - RNA, 19 nt, Homo sapiens
  misc_RNA (1)...(19): siRNA sense strand
ugaaguguguccugaugcu

SEQ ID NO: 598772 - RNA, 19 nt, Homo sapiens
  misc_RNA (1)...(19): siRNA sense strand
aggcagcaguuacuucaag

SEQ ID NO: 598773 - RNA, 19 nt, Homo sapiens
  misc_RNA (1)...(19): siRNA sense strand
ugauguggacuucaguuau

SEQ ID NO: 598774 - RNA, 19 nt, Homo sapiens
  misc_RNA (1)...(19): siRNA sense strand
uccacagguuucugauaaa

SEQ ID NO: 598775 - RNA, 19 nt, Homo sapiens
  misc_RNA (1)...(19): siRNA sense strand
ucaacgcauugcauuaacu

SEQ ID NO: 598776 - RNA, 19 nt, Homo sapiens
  misc_RNA (1)...(19): siRNA sense strand
uaucaucgaggaacuuucu

SEQ ID NO: 598777 - RNA, 19 nt, Homo sapiens
  misc_RNA (1)...(19): siRNA sense strand
acaaagacagauaccuuca

SEQ ID NO: 598778 - RNA, 19 nt, Homo sapiens
  misc_RNA (1)...(19): siRNA sense strand
guuaucaucgaggaacuuu

SEQ ID NO: 598779 - RNA, 19 nt, Homo sapiens
  misc_RNA (1)...(19): siRNA sense strand
caucagugaggcagcaguu

SEQ ID NO: 598780 - RNA, 19 nt, Homo sapiens
  misc_RNA (1)...(19): siRNA sense strand
cccaggaacagcagaucua

SEQ ID NO: 598781 - RNA, 19 nt, Homo sapiens
  misc_RNA (1)...(19): siRNA sense strand
cuucaugaugucuuaauug

SEQ ID NO: 598782 - RNA, 19 nt, Homo sapiens
  misc_RNA (1)...(19): siRNA sense strand
gcacugguugcugauuaug

SEQ ID NO: 598783 - RNA, 19 nt, Homo sapiens
  misc_RNA (1)...(19): siRNA sense strand
gaugggagagagauuuaac

SEQ ID NO: 598784 - RNA, 19 nt, Homo sapiens
  misc_RNA (1)...(19): siRNA sense strand
guacagcuuuuaucuugca

SEQ ID NO: 598785 - RNA, 19 nt, Homo sapiens
  misc_RNA (1)...(19): siRNA sense strand
gcgaccacaagcuucauga

SEQ ID NO: 598786 - RNA, 19 nt, Homo sapiens
  misc_RNA (1)...(19): siRNA sense strand
ugacauuucaguacaucug

SEQ ID NO: 598787 - RNA, 19 nt, Homo sapiens
  misc_RNA (1)...(19): siRNA sense strand
ggagauuccuucaaaguuu

SEQ ID NO: 598788 - RNA, 19 nt, Homo sapiens
  misc_RNA (1)...(19): siRNA sense strand
gggagaagauggagaaauu

SEQ ID NO: 598789 - RNA, 19 nt, Homo sapiens
  misc_RNA (1)...(19): siRNA sense strand
gaacaaggauuuuggauga

SEQ ID NO: 598790 - RNA, 19 nt, Homo sapiens
  misc_RNA (1)...(19): siRNA sense strand
gcaaauugguguugagguu

SEQ ID NO: 598791 - RNA, 19 nt, Homo sapiens
  misc_RNA (1)...(19): siRNA sense strand
gaacgugggucagcaggua

SEQ ID NO: 598792 - RNA, 19 nt, Homo sapiens
  misc_RNA (1)...(19): siRNA sense strand
gagauuccuucaaaguuua

SEQ ID NO: 598793 - RNA, 19 nt, Homo sapiens
  misc_RNA (1)...(19): siRNA sense strand
aaagggacauccugguuua

SEQ ID NO: 598794 - RNA, 19 nt, Homo sapiens
  misc_RNA (1)...(19): siRNA sense strand
gaaguugguuuagugaauu

SEQ ID NO: 598795 - RNA, 19 nt, Homo sapiens
  misc_RNA (1)...(19): siRNA sense strand
ucugguagauggagauuua

SEQ ID NO: 598796 - RNA, 19 nt, Homo sapiens
  misc_RNA (1)...(19): siRNA sense strand
ggaaguugguuuagugaau

SEQ ID NO: 598797 - RNA, 19 nt, Homo sapiens
  misc_RNA (1)...(19): siRNA sense strand
aaagggagaucgaggguuu

SEQ ID NO: 598798 - RNA, 19 nt, Homo sapiens
  misc_RNA (1)...(19): siRNA sense strand
gcaagcagaugcagaugau

SEQ ID NO: 598799 - RNA, 19 nt, Homo sapiens
  misc_RNA (1)...(19): siRNA sense strand
gaggauacacuauaugaaa

SEQ ID NO: 598800 - RNA, 19 nt, Homo sapiens
  misc_RNA (1)...(19): siRNA sense strand
uaugggaccuccuggcuua

SEQ ID NO: 598801 - RNA, 19 nt, Homo sapiens
  misc_RNA (1)...(19): siRNA sense strand
ucaauucccugaaacaaga

SEQ ID NO: 598802 - RNA, 19 nt, Homo sapiens
  misc_RNA (1)...(19): siRNA sense strand
guugggagaucaccuguuu

SEQ ID NO: 598803 - RNA, 19 nt, Homo sapiens
  misc_RNA (1)...(19): siRNA sense strand
gaauacaacuauggaacaa

SEQ ID NO: 598804 - RNA, 19 nt, Homo sapiens
  misc_RNA (1)...(19): siRNA sense strand
gcacaaacagaaagaauuc

SEQ ID NO: 598805 - RNA, 19 nt, Homo sapiens
  misc_RNA (1)...(19): siRNA sense strand
gaaguucggauuugaaguu

SEQ ID NO: 598806 - RNA, 19 nt, Homo sapiens
  misc_RNA (1)...(19): siRNA sense strand
ggaagcaggugcagaaggu

SEQ ID NO: 598807 - RNA, 19 nt, Homo sapiens
  misc_RNA (1)...(19): siRNA sense strand
caagggaucuaaaggugaa

SEQ ID NO: 598808 - RNA, 19 nt, Homo sapiens
  misc_RNA (1)...(19): siRNA sense strand
gaaauagacggcagggauu

SEQ ID NO: 598809 - RNA, 19 nt, Homo sapiens
  misc_RNA (1)...(19): siRNA sense strand
gaucaaguaccuauuguug

SEQ ID NO: 598810 - RNA, 19 nt, Homo sapiens
  misc_RNA (1)...(19): siRNA sense strand
gaagaaaacugugacaaug

SEQ ID NO: 598811 - RNA, 19 nt, Homo sapiens
  misc_RNA (1)...(19): siRNA sense strand
cauaugaaauuuccaaugg

SEQ ID NO: 598812 - RNA, 19 nt, Homo sapiens
  misc_RNA (1)...(19): siRNA sense strand
gggaguagcuggcaaacca

SEQ ID NO: 598813 - RNA, 19 nt, Homo sapiens
  misc_RNA (1)...(19): siRNA sense strand
auacuuagauguugaagga

SEQ ID NO: 598814 - RNA, 19 nt, Homo sapiens
  misc_RNA (1)...(19): siRNA sense strand
ugacaagggugaagaugga

SEQ ID NO: 598815 - RNA, 19 nt, Homo sapiens
  misc_RNA (1)...(19): siRNA sense strand
gaguaagaauuucaucaug

SEQ ID NO: 598816 - RNA, 19 nt, Homo sapiens
  misc_RNA (1)...(19): siRNA sense strand
uuacagaguuucaaagcaa

SEQ ID NO: 598817 - RNA, 19 nt, Homo sapiens
  misc_RNA (1)...(19): siRNA sense strand
ggacauccugguuuaauug

SEQ ID NO: 598818 - RNA, 19 nt, Homo sapiens
  misc_RNA (1)...(19): siRNA sense strand
uggcuuaccuggucucaaa

SEQ ID NO: 598819 - RNA, 19 nt, Homo sapiens
  misc_RNA (1)...(19): siRNA sense strand
caaauccaguugaagaaau

SEQ ID NO: 598820 - RNA, 19 nt, Homo sapiens
  misc_RNA (1)...(19): siRNA sense strand
cgaaaccacuugauagaag

SEQ ID NO: 598821 - RNA, 19 nt, Homo sapiens
  misc_RNA (1)...(19): siRNA sense strand
ccaggaaguugguuuagug

SEQ ID NO: 598822 - RNA, 19 nt, Homo sapiens
  misc_RNA (1)...(19): siRNA sense strand
gagcaauuguugauaccaa

SEQ ID NO: 598823 - RNA, 19 nt, Homo sapiens
  misc_RNA (1)...(19): siRNA sense strand
gggacauccugguuuaauu

SEQ ID NO: 598824 - RNA, 19 nt, Homo sapiens
  misc_RNA (1)...(19): siRNA sense strand
gggagcagauggugucaga

SEQ ID NO: 598825 - RNA, 19 nt, Homo sapiens
  misc_RNA (1)...(19): siRNA sense strand
gaaaggacagaaaggagaa

SEQ ID NO: 598826 - RNA, 19 nt, Homo sapiens
  misc_RNA (1)...(19): siRNA sense strand
caagguugcucaggagauu

SEQ ID NO: 598827 - RNA, 19 nt, Homo sapiens
  misc_RNA (1)...(19): siRNA sense strand
gauggugaauauuggauug

SEQ ID NO: 598828 - RNA, 19 nt, Homo sapiens
  misc_RNA (1)...(19): siRNA sense strand
gaggagaaguuggucaaau

SEQ ID NO: 598829 - RNA, 19 nt, Homo sapiens
  misc_RNA (1)...(19): siRNA sense strand
cuucagaacuguuaacauc

SEQ ID NO: 598830 - RNA, 19 nt, Homo sapiens
  misc_RNA (1)...(19): siRNA sense strand
ggauucugaucuucuggua

SEQ ID NO: 598831 - RNA, 19 nt, Homo sapiens
  misc_RNA (1)...(19): siRNA sense strand
gaagcuggcccacgagguu

SEQ ID NO: 598832 - RNA, 19 nt, Homo sapiens
  misc_RNA (1)...(19): siRNA sense strand
caagguaucucagggaaag

SEQ ID NO: 598833 - RNA, 19 nt, Homo sapiens
  misc_RNA (1)...(19): siRNA sense strand
aggagaaguuggucaaauu

SEQ ID NO: 598834 - RNA, 19 nt, Homo sapiens
  misc_RNA (1)...(19): siRNA sense strand
gaagugagagagcaauugu

SEQ ID NO: 598835 - RNA, 19 nt, Homo sapiens
  misc_RNA (1)...(19): siRNA sense strand
uaacaacccucgcauugac

SEQ ID NO: 598836 - RNA, 19 nt, Homo sapiens
  misc_RNA (1)...(19): siRNA sense strand
gauacugcuuacagaguuu

SEQ ID NO: 598837 - RNA, 19 nt, Homo sapiens
  misc_RNA (1)...(19): siRNA sense strand
ggagaaguuggucaaauug

SEQ ID NO: 598838 - RNA, 19 nt, Homo sapiens
  misc_RNA (1)...(19): siRNA sense strand
gcagauggaggaagaggaa

SEQ ID NO: 598839 - RNA, 19 nt, Homo sapiens
  misc_RNA (1)...(19): siRNA sense strand
ggagaucgaggguuugaug

SEQ ID NO: 598840 - RNA, 19 nt, Homo sapiens
  misc_RNA (1)...(19): siRNA sense strand
cacaagguccuauuggaua

SEQ ID NO: 598841 - RNA, 19 nt, Homo sapiens
  misc_RNA (1)...(19): siRNA sense strand
auacaacuauggaacaaug

SEQ ID NO: 598842 - RNA, 19 nt, Homo sapiens
  misc_RNA (1)...(19): siRNA sense strand
ggugagacuugcauuuauc

SEQ ID NO: 598843 - RNA, 19 nt, Homo sapiens
  misc_RNA (1)...(19): siRNA sense strand
ggaauggaagaaauauuug

SEQ ID NO: 598844 - RNA, 19 nt, Homo sapiens
  misc_RNA (1)...(19): siRNA sense strand
gcagaugcagaugauaaua

SEQ ID NO: 598845 - RNA, 19 nt, Homo sapiens
  misc_RNA (1)...(19): siRNA sense strand
gcaaucagcguggagaaga

SEQ ID NO: 598846 - RNA, 19 nt, Homo sapiens
  misc_RNA (1)...(19): siRNA sense strand
ugacuuuggugaucagaau

SEQ ID NO: 598847 - RNA, 19 nt, Homo sapiens
  misc_RNA (1)...(19): siRNA sense strand
cagcauaugacuacuguga

SEQ ID NO: 598848 - RNA, 19 nt, Homo sapiens
  misc_RNA (1)...(19): siRNA sense strand
gaaaagacugucauugaaa

SEQ ID NO: 598849 - RNA, 19 nt, Homo sapiens
  misc_RNA (1)...(19): siRNA sense strand
ugaaaagacugucauugaa

SEQ ID NO: 598850 - RNA, 19 nt, Homo sapiens
  misc_RNA (1)...(19): siRNA sense strand
gcagaagguccuccuggaa

SEQ ID NO: 598851 - RNA, 19 nt, Homo sapiens
  misc_RNA (1)...(19): siRNA sense strand
gggugcaccuggacugaaa

SEQ ID NO: 598852 - RNA, 19 nt, Homo sapiens
  misc_RNA (1)...(19): siRNA sense strand
gcacuagauuuucacaauu

SEQ ID NO: 598853 - RNA, 19 nt, Homo sapiens
  misc_RNA (1)...(19): siRNA sense strand
agaauuugguccaggugua

SEQ ID NO: 598854 - RNA, 19 nt, Homo sapiens
  misc_RNA (1)...(19): siRNA sense strand
auggaacaauggaaaguua

SEQ ID NO: 598855 - RNA, 19 nt, Homo sapiens
  misc_RNA (1)...(19): siRNA sense strand
ucaggaaccucagauagau

SEQ ID NO: 598856 - RNA, 19 nt, Homo sapiens
  misc_RNA (1)...(19): siRNA sense strand
uaacgggagaggauuauga

SEQ ID NO: 598857 - RNA, 19 nt, Homo sapiens
  misc_RNA (1)...(19): siRNA sense strand
caucauggccaaaggagaa

SEQ ID NO: 598858 - RNA, 19 nt, Homo sapiens
  misc_RNA (1)...(19): siRNA sense strand
guggugagacuugcauuua

SEQ ID NO: 598859 - RNA, 19 nt, Homo sapiens
  misc_RNA (1)...(19): siRNA sense strand
agacaagggugaaauuggu

SEQ ID NO: 598860 - RNA, 19 nt, Homo sapiens
  misc_RNA (1)...(19): siRNA sense strand
gauguuaccguuccguuau

SEQ ID NO: 598861 - RNA, 19 nt, Homo sapiens
  misc_RNA (1)...(19): siRNA sense strand
gaacuuucccagaagacuu

SEQ ID NO: 598862 - RNA, 19 nt, Homo sapiens
  misc_RNA (1)...(19): siRNA sense strand
ugaaguugguccuguuugu

SEQ ID NO: 598863 - RNA, 19 nt, Homo sapiens
  misc_RNA (1)...(19): siRNA sense strand
ggaguaagaauuucaucau

SEQ ID NO: 598864 - RNA, 19 nt, Homo sapiens
  misc_RNA (1)...(19): siRNA sense strand
guaacaacccucgcauuga

SEQ ID NO: 598865 - RNA, 19 nt, Homo sapiens
  misc_RNA (1)...(19): siRNA sense strand
cggugagacugguccaaua

SEQ ID NO: 598866 - RNA, 19 nt, Homo sapiens
  misc_RNA (1)...(19): siRNA sense strand
ccacgaaaccacuugauag

SEQ ID NO: 598867 - RNA, 19 nt, Homo sapiens
  misc_RNA (1)...(19): siRNA sense strand
gagcaugguauucagcaaa

SEQ ID NO: 598868 - RNA, 19 nt, Homo sapiens
  misc_RNA (1)...(19): siRNA sense strand
cggcagggauucugaucuu

SEQ ID NO: 598869 - RNA, 19 nt, Homo sapiens
  misc_RNA (1)...(19): siRNA sense strand
gagcauaugaaauuuccaa

SEQ ID NO: 598870 - RNA, 19 nt, Homo sapiens
  misc_RNA (1)...(19): siRNA sense strand
cagaagguccuccuggaaa

SEQ ID NO: 598871 - RNA, 19 nt, Homo sapiens
  misc_RNA (1)...(19): siRNA sense strand
ccagcaggauuacgugguu

SEQ ID NO: 598872 - RNA, 19 nt, Homo sapiens
  misc_RNA (1)...(19): siRNA sense strand
ggaagauggcccugaagga

SEQ ID NO: 598873 - RNA, 19 nt, Homo sapiens
  misc_RNA (1)...(19): siRNA sense strand
ggagagaaaggacagaaag

SEQ ID NO: 598874 - RNA, 19 nt, Homo sapiens
  misc_RNA (1)...(19): siRNA sense strand
gaaguggcaucggguagca

SEQ ID NO: 598875 - RNA, 19 nt, Homo sapiens
  misc_RNA (1)...(19): siRNA sense strand
ugacauuccugaaacuucu

SEQ ID NO: 598876 - RNA, 19 nt, Homo sapiens
  misc_RNA (1)...(19): siRNA sense strand
ggagacaagggugaaauug

SEQ ID NO: 598877 - RNA, 19 nt, Homo sapiens
  misc_RNA (1)...(19): siRNA sense strand
aaccaucucugcucaggaa

SEQ ID NO: 598878 - RNA, 19 nt, Homo sapiens
  misc_RNA (1)...(19): siRNA sense strand
ugacuacugugagcauuau

SEQ ID NO: 598879 - RNA, 19 nt, Homo sapiens
  misc_RNA (1)...(19): siRNA sense strand
caaucagcguggagaagaa

SEQ ID NO: 598880 - RNA, 19 nt, Homo sapiens
  misc_RNA (1)...(19): siRNA sense strand
gagauuuaggcgaauauga

SEQ ID NO: 598881 - RNA, 19 nt, Homo sapiens
  misc_RNA (1)...(19): siRNA sense strand
gcauaugaaauuuccaaug

SEQ ID NO: 598882 - RNA, 19 nt, Homo sapiens
  misc_RNA (1)...(19): siRNA sense strand
aagcagaugcagaugauaa

SEQ ID NO: 598883 - RNA, 19 nt, Homo sapiens
  misc_RNA (1)...(19): siRNA sense strand
gggugaaccuggagaagca

SEQ ID NO: 598884 - RNA, 19 nt, Homo sapiens
  misc_RNA (1)...(19): siRNA sense strand
agauggaccagcaggauua

SEQ ID NO: 598885 - RNA, 19 nt, Homo sapiens
  misc_RNA (1)...(19): siRNA sense strand
gaagaugguuuuccaggau

SEQ ID NO: 598886 - RNA, 19 nt, Homo sapiens
  misc_RNA (1)...(19): siRNA sense strand
gguacuauguugauguuac

SEQ ID NO: 598887 - RNA, 19 nt, Homo sapiens
  misc_RNA (1)...(19): siRNA sense strand
ggagauuccuucaaaguuu

SEQ ID NO: 598888 - RNA, 19 nt, Homo sapiens
  misc_RNA (1)...(19): siRNA sense strand
gggagaagauggagaaauu

SEQ ID NO: 598889 - RNA, 19 nt, Homo sapiens
  misc_RNA (1)...(19): siRNA sense strand
gaacaaggauuuuggauga

SEQ ID NO: 598890 - RNA, 19 nt, Homo sapiens
  misc_RNA (1)...(19): siRNA sense strand
gcaaauugguguugagguu

SEQ ID NO: 598891 - RNA, 19 nt, Homo sapiens
  misc_RNA (1)...(19): siRNA sense strand
gaacgugggucagcaggua

SEQ ID NO: 598892 - RNA, 19 nt, Homo sapiens
  misc_RNA (1)...(19): siRNA sense strand
gagauuccuucaaaguuua

SEQ ID NO: 598893 - RNA, 19 nt, Homo sapiens
  misc_RNA (1)...(19): siRNA sense strand
aaagggacauccugguuua

SEQ ID NO: 598894 - RNA, 19 nt, Homo sapiens
  misc_RNA (1)...(19): siRNA sense strand
gaaguugguuuagugaauu

SEQ ID NO: 598895 - RNA, 19 nt, Homo sapiens
  misc_RNA (1)...(19): siRNA sense strand
ucugguagauggagauuua

SEQ ID NO: 598896 - RNA, 19 nt, Homo sapiens
  misc_RNA (1)...(19): siRNA sense strand
ggaaguugguuuagugaau

SEQ ID NO: 598897 - RNA, 19 nt, Homo sapiens
  misc_RNA (1)...(19): siRNA sense strand
aaagggagaucgaggguuu

SEQ ID NO: 598898 - RNA, 19 nt, Homo sapiens
  misc_RNA (1)...(19): siRNA sense strand
gcaagcagaugcagaugau

SEQ ID NO: 598899 - RNA, 19 nt, Homo sapiens
  misc_RNA (1)...(19): siRNA sense strand
gaggauacacuauaugaaa

SEQ ID NO: 598900 - RNA, 19 nt, Homo sapiens
  misc_RNA (1)...(19): siRNA sense strand
uaugggaccuccuggcuua

SEQ ID NO: 598901 - RNA, 19 nt, Homo sapiens
  misc_RNA (1)...(19): siRNA sense strand
ucaauucccugaaacaaga

SEQ ID NO: 598902 - RNA, 19 nt, Homo sapiens
  misc_RNA (1)...(19): siRNA sense strand
guugggagaucaccuguuu

SEQ ID NO: 598903 - RNA, 19 nt, Homo sapiens
  misc_RNA (1)...(19): siRNA sense strand
gaauacaacuauggaacaa

SEQ ID NO: 598904 - RNA, 19 nt, Homo sapiens
  misc_RNA (1)...(19): siRNA sense strand
gcacaaacagaaagaauuc

SEQ ID NO: 598905 - RNA, 19 nt, Homo sapiens
  misc_RNA (1)...(19): siRNA sense strand
gaaguucggauuugaaguu

SEQ ID NO: 598906 - RNA, 19 nt, Homo sapiens
  misc_RNA (1)...(19): siRNA sense strand
ggaagcaggugcagaaggu

SEQ ID NO: 598907 - RNA, 19 nt, Homo sapiens
  misc_RNA (1)...(19): siRNA sense strand
caagggaucuaaaggugaa

SEQ ID NO: 598908 - RNA, 19 nt, Homo sapiens
  misc_RNA (1)...(19): siRNA sense strand
gaaauagacggcagggauu

SEQ ID NO: 598909 - RNA, 19 nt, Homo sapiens
  misc_RNA (1)...(19): siRNA sense strand
gaucaaguaccuauuguug

SEQ ID NO: 598910 - RNA, 19 nt, Homo sapiens
  misc_RNA (1)...(19): siRNA sense strand
gaagaaaacugugacaaug

SEQ ID NO: 598911 - RNA, 19 nt, Homo sapiens
  misc_RNA (1)...(19): siRNA sense strand
cauaugaaauuuccaaugg

SEQ ID NO: 598912 - RNA, 19 nt, Homo sapiens
  misc_RNA (1)...(19): siRNA sense strand
gggaguagcuggcaaacca

SEQ ID NO: 598913 - RNA, 19 nt, Homo sapiens
  misc_RNA (1)...(19): siRNA sense strand
auacuuagauguugaagga

SEQ ID NO: 598914 - RNA, 19 nt, Homo sapiens
  misc_RNA (1)...(19): siRNA sense strand
ugacaagggugaagaugga

SEQ ID NO: 598915 - RNA, 19 nt, Homo sapiens
  misc_RNA (1)...(19): siRNA sense strand
gaguaagaauuucaucaug

SEQ ID NO: 598916 - RNA, 19 nt, Homo sapiens
  misc_RNA (1)...(19): siRNA sense strand
uuacagaguuucaaagcaa

SEQ ID NO: 598917 - RNA, 19 nt, Homo sapiens
  misc_RNA (1)...(19): siRNA sense strand
ggacauccugguuuaauug

SEQ ID NO: 598918 - RNA, 19 nt, Homo sapiens
  misc_RNA (1)...(19): siRNA sense strand
uggcuuaccuggucucaaa

SEQ ID NO: 598919 - RNA, 19 nt, Homo sapiens
  misc_RNA (1)...(19): siRNA sense strand
caaauccaguugaagaaau

SEQ ID NO: 598920 - RNA, 19 nt, Homo sapiens
  misc_RNA (1)...(19): siRNA sense strand
cgaaaccacuugauagaag

SEQ ID NO: 598921 - RNA, 19 nt, Homo sapiens
  misc_RNA (1)...(19): siRNA sense strand
ccaggaaguugguuuagug

SEQ ID NO: 598922 - RNA, 19 nt, Homo sapiens
  misc_RNA (1)...(19): siRNA sense strand
gagcaauuguugauaccaa

SEQ ID NO: 598923 - RNA, 19 nt, Homo sapiens
  misc_RNA (1)...(19): siRNA sense strand
gggacauccugguuuaauu

SEQ ID NO: 598924 - RNA, 19 nt, Homo sapiens
  misc_RNA (1)...(19): siRNA sense strand
gggagcagauggugucaga

SEQ ID NO: 598925 - RNA, 19 nt, Homo sapiens
  misc_RNA (1)...(19): siRNA sense strand
gaaaggacagaaaggagaa

SEQ ID NO: 598926 - RNA, 19 nt, Homo sapiens
  misc_RNA (1)...(19): siRNA sense strand
caagguugcucaggagauu

SEQ ID NO: 598927 - RNA, 19 nt, Homo sapiens
  misc_RNA (1)...(19): siRNA sense strand
gauggugaauauuggauug

SEQ ID NO: 598928 - RNA, 19 nt, Homo sapiens
  misc_RNA (1)...(19): siRNA sense strand
gaggagaaguuggucaaau

SEQ ID NO: 598929 - RNA, 19 nt, Homo sapiens
  misc_RNA (1)...(19): siRNA sense strand
cuucagaacuguuaacauc

SEQ ID NO: 598930 - RNA, 19 nt, Homo sapiens
  misc_RNA (1)...(19): siRNA sense strand
ggauucugaucuucuggua

SEQ ID NO: 598931 - RNA, 19 nt, Homo sapiens
  misc_RNA (1)...(19): siRNA sense strand
gaagcuggcccacgagguu

SEQ ID NO: 598932 - RNA, 19 nt, Homo sapiens
  misc_RNA (1)...(19): siRNA sense strand
caagguaucucagggaaag

SEQ ID NO: 598933 - RNA, 19 nt, Homo sapiens
  misc_RNA (1)...(19): siRNA sense strand
aggagaaguuggucaaauu

SEQ ID NO: 598934 - RNA, 19 nt, Homo sapiens
  misc_RNA (1)...(19): siRNA sense strand
gaagugagagagcaauugu

SEQ ID NO: 598935 - RNA, 19 nt, Homo sapiens
  misc_RNA (1)...(19): siRNA sense strand
uaacaacccucgcauugac

SEQ ID NO: 598936 - RNA, 19 nt, Homo sapiens
  misc_RNA (1)...(19): siRNA sense strand
gauacugcuuacagaguuu

SEQ ID NO: 598937 - RNA, 19 nt, Homo sapiens
  misc_RNA (1)...(19): siRNA sense strand
ggagaaguuggucaaauug

SEQ ID NO: 598938 - RNA, 19 nt, Homo sapiens
  misc_RNA (1)...(19): siRNA sense strand
gcagauggaggaagaggaa

SEQ ID NO: 598939 - RNA, 19 nt, Homo sapiens
  misc_RNA (1)...(19): siRNA sense strand
ggagaucgaggguuugaug

SEQ ID NO: 598940 - RNA, 19 nt, Homo sapiens
  misc_RNA (1)...(19): siRNA sense strand
cacaagguccuauuggaua

SEQ ID NO: 598941 - RNA, 19 nt, Homo sapiens
  misc_RNA (1)...(19): siRNA sense strand
auacaacuauggaacaaug

SEQ ID NO: 598942 - RNA, 19 nt, Homo sapiens
  misc_RNA (1)...(19): siRNA sense strand
ggugagacuugcauuuauc

SEQ ID NO: 598943 - RNA, 19 nt, Homo sapiens
  misc_RNA (1)...(19): siRNA sense strand
ggaauggaagaaauauuug

SEQ ID NO: 598944 - RNA, 19 nt, Homo sapiens
  misc_RNA (1)...(19): siRNA sense strand
gcagaugcagaugauaaua

SEQ ID NO: 598945 - RNA, 19 nt, Homo sapiens
  misc_RNA (1)...(19): siRNA sense strand
gcaaucagcguggagaaga

SEQ ID NO: 598946 - RNA, 19 nt, Homo sapiens
  misc_RNA (1)...(19): siRNA sense strand
ugacuuuggugaucagaau

SEQ ID NO: 598947 - RNA, 19 nt, Homo sapiens
  misc_RNA (1)...(19): siRNA sense strand
cagcauaugacuacuguga

SEQ ID NO: 598948 - RNA, 19 nt, Homo sapiens
  misc_RNA (1)...(19): siRNA sense strand
gaaaagacugucauugaaa

SEQ ID NO: 598949 - RNA, 19 nt, Homo sapiens
  misc_RNA (1)...(19): siRNA sense strand
ugaaaagacugucauugaa

SEQ ID NO: 598950 - RNA, 19 nt, Homo sapiens
  misc_RNA (1)...(19): siRNA sense strand
gcagaagguccuccuggaa

SEQ ID NO: 598951 - RNA, 19 nt, Homo sapiens
  misc_RNA (1)...(19): siRNA sense strand
gggugcaccuggacugaaa

SEQ ID NO: 598952 - RNA, 19 nt, Homo sapiens
  misc_RNA (1)...(19): siRNA sense strand
gcacuagauuuucacaauu

SEQ ID NO: 598953 - RNA, 19 nt, Homo sapiens
  misc_RNA (1)...(19): siRNA sense strand
agaauuugguccaggugua

SEQ ID NO: 598954 - RNA, 19 nt, Homo sapiens
  misc_RNA (1)...(19): siRNA sense strand
auggaacaauggaaaguua

SEQ ID NO: 598955 - RNA, 19 nt, Homo sapiens
  misc_RNA (1)...(19): siRNA sense strand
ucaggaaccucagauagau

SEQ ID NO: 598956 - RNA, 19 nt, Homo sapiens
  misc_RNA (1)...(19): siRNA sense strand
uaacgggagaggauuauga

SEQ ID NO: 598957 - RNA, 19 nt, Homo sapiens
  misc_RNA (1)...(19): siRNA sense strand
caucauggccaaaggagaa

SEQ ID NO: 598958 - RNA, 19 nt, Homo sapiens
  misc_RNA (1)...(19): siRNA sense strand
guggugagacuugcauuua

SEQ ID NO: 598959 - RNA, 19 nt, Homo sapiens
  misc_RNA (1)...(19): siRNA sense strand
agacaagggugaaauuggu

SEQ ID NO: 598960 - RNA, 19 nt, Homo sapiens
  misc_RNA (1)...(19): siRNA sense strand
gauguuaccguuccguuau

SEQ ID NO: 598961 - RNA, 19 nt, Homo sapiens
  misc_RNA (1)...(19): siRNA sense strand
gaacuuucccagaagacuu

SEQ ID NO: 598962 - RNA, 19 nt, Homo sapiens
  misc_RNA (1)...(19): siRNA sense strand
ugaaguugguccuguuugu

SEQ ID NO: 598963 - RNA, 19 nt, Homo sapiens
  misc_RNA (1)...(19): siRNA sense strand
ggaguaagaauuucaucau

SEQ ID NO: 598964 - RNA, 19 nt, Homo sapiens
  misc_RNA (1)...(19): siRNA sense strand
guaacaacccucgcauuga

SEQ ID NO: 598965 - RNA, 19 nt, Homo sapiens
  misc_RNA (1)...(19): siRNA sense strand
cggugagacugguccaaua

SEQ ID NO: 598966 - RNA, 19 nt, Homo sapiens
  misc_RNA (1)...(19): siRNA sense strand
ccacgaaaccacuugauag

SEQ ID NO: 598967 - RNA, 19 nt, Homo sapiens
  misc_RNA (1)...(19): siRNA sense strand
gagcaugguauucagcaaa

SEQ ID NO: 598968 - RNA, 19 nt, Homo sapiens
  misc_RNA (1)...(19): siRNA sense strand
cggcagggauucugaucuu

SEQ ID NO: 598969 - RNA, 19 nt, Homo sapiens
  misc_RNA (1)...(19): siRNA sense strand
gagcauaugaaauuuccaa

SEQ ID NO: 598970 - RNA, 19 nt, Homo sapiens
  misc_RNA (1)...(19): siRNA sense strand
cagaagguccuccuggaaa

SEQ ID NO: 598971 - RNA, 19 nt, Homo sapiens
  misc_RNA (1)...(19): siRNA sense strand
ccagcaggauuacgugguu

SEQ ID NO: 598972 - RNA, 19 nt, Homo sapiens
  misc_RNA (1)...(19): siRNA sense strand
ggaagauggcccugaagga

SEQ ID NO: 598973 - RNA, 19 nt, Homo sapiens
  misc_RNA (1)...(19): siRNA sense strand
ggagagaaaggacagaaag

SEQ ID NO: 598974 - RNA, 19 nt, Homo sapiens
  misc_RNA (1)...(19): siRNA sense strand
gaaguggcaucggguagca

SEQ ID NO: 598975 - RNA, 19 nt, Homo sapiens
  misc_RNA (1)...(19): siRNA sense strand
ugacauuccugaaacuucu

SEQ ID NO: 598976 - RNA, 19 nt, Homo sapiens
  misc_RNA (1)...(19): siRNA sense strand
ggagacaagggugaaauug

SEQ ID NO: 598977 - RNA, 19 nt, Homo sapiens
  misc_RNA (1)...(19): siRNA sense strand
aaccaucucugcucaggaa

SEQ ID NO: 598978 - RNA, 19 nt, Homo sapiens
  misc_RNA (1)...(19): siRNA sense strand
ugacuacugugagcauuau

SEQ ID NO: 598979 - RNA, 19 nt, Homo sapiens
  misc_RNA (1)...(19): siRNA sense strand
caaucagcguggagaagaa

SEQ ID NO: 598980 - RNA, 19 nt, Homo sapiens
  misc_RNA (1)...(19): siRNA sense strand
gagauuuaggcgaauauga

SEQ ID NO: 598981 - RNA, 19 nt, Homo sapiens
  misc_RNA (1)...(19): siRNA sense strand
gcauaugaaauuuccaaug

SEQ ID NO: 598982 - RNA, 19 nt, Homo sapiens
  misc_RNA (1)...(19): siRNA sense strand
aagcagaugcagaugauaa

SEQ ID NO: 598983 - RNA, 19 nt, Homo sapiens
  misc_RNA (1)...(19): siRNA sense strand
gggugaaccuggagaagca

SEQ ID NO: 598984 - RNA, 19 nt, Homo sapiens
  misc_RNA (1)...(19): siRNA sense strand
agauggaccagcaggauua

SEQ ID NO: 598985 - RNA, 19 nt, Homo sapiens
  misc_RNA (1)...(19): siRNA sense strand
gaagaugguuuuccaggau

SEQ ID NO: 598986 - RNA, 19 nt, Homo sapiens
  misc_RNA (1)...(19): siRNA sense strand
gguacuauguugauguuac

SEQ ID NO: 598987 - RNA, 19 nt, Homo sapiens
  misc_RNA (1)...(19): siRNA sense strand
ggagauuccuucaaaguuu

SEQ ID NO: 598988 - RNA, 19 nt, Homo sapiens
  misc_RNA (1)...(19): siRNA sense strand
gggagaagauggagaaauu

SEQ ID NO: 598989 - RNA, 19 nt, Homo sapiens
  misc_RNA (1)...(19): siRNA sense strand
gaacaaggauuuuggauga

SEQ ID NO: 598990 - RNA, 19 nt, Homo sapiens
  misc_RNA (1)...(19): siRNA sense strand
gcaaauugguguugagguu

SEQ ID NO: 598991 - RNA, 19 nt, Homo sapiens
  misc_RNA (1)...(19): siRNA sense strand
gaacgugggucagcaggua

SEQ ID NO: 598992 - RNA, 19 nt, Homo sapiens
  misc_RNA (1)...(19): siRNA sense strand
gagauuccuucaaaguuua

SEQ ID NO: 598993 - RNA, 19 nt, Homo sapiens
  misc_RNA (1)...(19): siRNA sense strand
aaagggacauccugguuua

SEQ ID NO: 598994 - RNA, 19 nt, Homo sapiens
  misc_RNA (1)...(19): siRNA sense strand
gaaguugguuuagugaauu

SEQ ID NO: 598995 - RNA, 19 nt, Homo sapiens
  misc_RNA (1)...(19): siRNA sense strand
ucugguagauggagauuua

SEQ ID NO: 598996 - RNA, 19 nt, Homo sapiens
  misc_RNA (1)...(19): siRNA sense strand
ggaaguugguuuagugaau

SEQ ID NO: 598997 - RNA, 19 nt, Homo sapiens
  misc_RNA (1)...(19): siRNA sense strand
aaagggagaucgaggguuu

SEQ ID NO: 598998 - RNA, 19 nt, Homo sapiens
  misc_RNA (1)...(19): siRNA sense strand
gcaagcagaugcagaugau

SEQ ID NO: 598999 - RNA, 19 nt, Homo sapiens
  misc_RNA (1)...(19): siRNA sense strand
gaggauacacuauaugaaa

SEQ ID NO: 599000 - RNA, 19 nt, Homo sapiens
  misc_RNA (1)...(19): siRNA sense strand
uaugggaccuccuggcuua

SEQ ID NO: 599001 - RNA, 19 nt, Homo sapiens
  misc_RNA (1)...(19): siRNA sense strand
ucaauucccugaaacaaga

SEQ ID NO: 599002 - RNA, 19 nt, Homo sapiens
  misc_RNA (1)...(19): siRNA sense strand
guugggagaucaccuguuu

SEQ ID NO: 599003 - RNA, 19 nt, Homo sapiens
  misc_RNA (1)...(19): siRNA sense strand
gaauacaacuauggaacaa

SEQ ID NO: 599004 - RNA, 19 nt, Homo sapiens
  misc_RNA (1)...(19): siRNA sense strand
gcacaaacagaaagaauuc

SEQ ID NO: 599005 - RNA, 19 nt, Homo sapiens
  misc_RNA (1)...(19): siRNA sense strand
gaaguucggauuugaaguu

SEQ ID NO: 599006 - RNA, 19 nt, Homo sapiens
  misc_RNA (1)...(19): siRNA sense strand
ggaagcaggugcagaaggu

SEQ ID NO: 599007 - RNA, 19 nt, Homo sapiens
  misc_RNA (1)...(19): siRNA sense strand
caagggaucuaaaggugaa

SEQ ID NO: 599008 - RNA, 19 nt, Homo sapiens
  misc_RNA (1)...(19): siRNA sense strand
gaaauagacggcagggauu

SEQ ID NO: 599009 - RNA, 19 nt, Homo sapiens
  misc_RNA (1)...(19): siRNA sense strand
gaucaaguaccuauuguug

SEQ ID NO: 599010 - RNA, 19 nt, Homo sapiens
  misc_RNA (1)...(19): siRNA sense strand
gaagaaaacugugacaaug

SEQ ID NO: 599011 - RNA, 19 nt, Homo sapiens
  misc_RNA (1)...(19): siRNA sense strand
cauaugaaauuuccaaugg

SEQ ID NO: 599012 - RNA, 19 nt, Homo sapiens
  misc_RNA (1)...(19): siRNA sense strand
gggaguagcuggcaaacca

SEQ ID NO: 599013 - RNA, 19 nt, Homo sapiens
  misc_RNA (1)...(19): siRNA sense strand
auacuuagauguugaagga

SEQ ID NO: 599014 - RNA, 19 nt, Homo sapiens
  misc_RNA (1)...(19): siRNA sense strand
ugacaagggugaagaugga

SEQ ID NO: 599015 - RNA, 19 nt, Homo sapiens
  misc_RNA (1)...(19): siRNA sense strand
gaguaagaauuucaucaug

SEQ ID NO: 599016 - RNA, 19 nt, Homo sapiens
  misc_RNA (1)...(19): siRNA sense strand
uuacagaguuucaaagcaa

SEQ ID NO: 599017 - RNA, 19 nt, Homo sapiens
  misc_RNA (1)...(19): siRNA sense strand
ggacauccugguuuaauug

SEQ ID NO: 599018 - RNA, 19 nt, Homo sapiens
  misc_RNA (1)...(19): siRNA sense strand
uggcuuaccuggucucaaa

SEQ ID NO: 599019 - RNA, 19 nt, Homo sapiens
  misc_RNA (1)...(19): siRNA sense strand
caaauccaguugaagaaau

SEQ ID NO: 599020 - RNA, 19 nt, Homo sapiens
  misc_RNA (1)...(19): siRNA sense strand
cgaaaccacuugauagaag

SEQ ID NO: 599021 - RNA, 19 nt, Homo sapiens
  misc_RNA (1)...(19): siRNA sense strand
ccaggaaguugguuuagug

SEQ ID NO: 599022 - RNA, 19 nt, Homo sapiens
  misc_RNA (1)...(19): siRNA sense strand
gagcaauuguugauaccaa

SEQ ID NO: 599023 - RNA, 19 nt, Homo sapiens
  misc_RNA (1)...(19): siRNA sense strand
gggacauccugguuuaauu

SEQ ID NO: 599024 - RNA, 19 nt, Homo sapiens
  misc_RNA (1)...(19): siRNA sense strand
gggagcagauggugucaga

SEQ ID NO: 599025 - RNA, 19 nt, Homo sapiens
  misc_RNA (1)...(19): siRNA sense strand
gaaaggacagaaaggagaa

SEQ ID NO: 599026 - RNA, 19 nt, Homo sapiens
  misc_RNA (1)...(19): siRNA sense strand
caagguugcucaggagauu

SEQ ID NO: 599027 - RNA, 19 nt, Homo sapiens
  misc_RNA (1)...(19): siRNA sense strand
gauggugaauauuggauug

SEQ ID NO: 599028 - RNA, 19 nt, Homo sapiens
  misc_RNA (1)...(19): siRNA sense strand
gaggagaaguuggucaaau

SEQ ID NO: 599029 - RNA, 19 nt, Homo sapiens
  misc_RNA (1)...(19): siRNA sense strand
cuucagaacuguuaacauc

SEQ ID NO: 599030 - RNA, 19 nt, Homo sapiens
  misc_RNA (1)...(19): siRNA sense strand
ggauucugaucuucuggua

SEQ ID NO: 599031 - RNA, 19 nt, Homo sapiens
  misc_RNA (1)...(19): siRNA sense strand
gaagcuggcccacgagguu

SEQ ID NO: 599032 - RNA, 19 nt, Homo sapiens
  misc_RNA (1)...(19): siRNA sense strand
caagguaucucagggaaag

SEQ ID NO: 599033 - RNA, 19 nt, Homo sapiens
  misc_RNA (1)...(19): siRNA sense strand
aggagaaguuggucaaauu

SEQ ID NO: 599034 - RNA, 19 nt, Homo sapiens
  misc_RNA (1)...(19): siRNA sense strand
gaagugagagagcaauugu

SEQ ID NO: 599035 - RNA, 19 nt, Homo sapiens
  misc_RNA (1)...(19): siRNA sense strand
uaacaacccucgcauugac

SEQ ID NO: 599036 - RNA, 19 nt, Homo sapiens
  misc_RNA (1)...(19): siRNA sense strand
gauacugcuuacagaguuu

SEQ ID NO: 599037 - RNA, 19 nt, Homo sapiens
  misc_RNA (1)...(19): siRNA sense strand
ggagaaguuggucaaauug

SEQ ID NO: 599038 - RNA, 19 nt, Homo sapiens
  misc_RNA (1)...(19): siRNA sense strand
gcagauggaggaagaggaa

SEQ ID NO: 599039 - RNA, 19 nt, Homo sapiens
  misc_RNA (1)...(19): siRNA sense strand
ggagaucgaggguuugaug

SEQ ID NO: 599040 - RNA, 19 nt, Homo sapiens
  misc_RNA (1)...(19): siRNA sense strand
cacaagguccuauuggaua

SEQ ID NO: 599041 - RNA, 19 nt, Homo sapiens
  misc_RNA (1)...(19): siRNA sense strand
auacaacuauggaacaaug

SEQ ID NO: 599042 - RNA, 19 nt, Homo sapiens
  misc_RNA (1)...(19): siRNA sense strand
ggugagacuugcauuuauc

SEQ ID NO: 599043 - RNA, 19 nt, Homo sapiens
  misc_RNA (1)...(19): siRNA sense strand
ggaauggaagaaauauuug

SEQ ID NO: 599044 - RNA, 19 nt, Homo sapiens
  misc_RNA (1)...(19): siRNA sense strand
gcagaugcagaugauaaua

SEQ ID NO: 599045 - RNA, 19 nt, Homo sapiens
  misc_RNA (1)...(19): siRNA sense strand
gcaaucagcguggagaaga

SEQ ID NO: 599046 - RNA, 19 nt, Homo sapiens
  misc_RNA (1)...(19): siRNA sense strand
ugacuuuggugaucagaau

SEQ ID NO: 599047 - RNA, 19 nt, Homo sapiens
  misc_RNA (1)...(19): siRNA sense strand
cagcauaugacuacuguga

SEQ ID NO: 599048 - RNA, 19 nt, Homo sapiens
  misc_RNA (1)...(19): siRNA sense strand
gaaaagacugucauugaaa

SEQ ID NO: 599049 - RNA, 19 nt, Homo sapiens
  misc_RNA (1)...(19): siRNA sense strand
ugaaaagacugucauugaa

SEQ ID NO: 599050 - RNA, 19 nt, Homo sapiens
  misc_RNA (1)...(19): siRNA sense strand
gcagaagguccuccuggaa

SEQ ID NO: 599051 - RNA, 19 nt, Homo sapiens
  misc_RNA (1)...(19): siRNA sense strand
gggugcaccuggacugaaa

SEQ ID NO: 599052 - RNA, 19 nt, Homo sapiens
  misc_RNA (1)...(19): siRNA sense strand
gcacuagauuuucacaauu

SEQ ID NO: 599053 - RNA, 19 nt, Homo sapiens
  misc_RNA (1)...(19): siRNA sense strand
agaauuugguccaggugua

SEQ ID NO: 599054 - RNA, 19 nt, Homo sapiens
  misc_RNA (1)...(19): siRNA sense strand
auggaacaauggaaaguua

SEQ ID NO: 599055 - RNA, 19 nt, Homo sapiens
  misc_RNA (1)...(19): siRNA sense strand
ucaggaaccucagauagau

SEQ ID NO: 599056 - RNA, 19 nt, Homo sapiens
  misc_RNA (1)...(19): siRNA sense strand
uaacgggagaggauuauga

SEQ ID NO: 599057 - RNA, 19 nt, Homo sapiens
  misc_RNA (1)...(19): siRNA sense strand
caucauggccaaaggagaa

SEQ ID NO: 599058 - RNA, 19 nt, Homo sapiens
  misc_RNA (1)...(19): siRNA sense strand
guggugagacuugcauuua

SEQ ID NO: 599059 - RNA, 19 nt, Homo sapiens
  misc_RNA (1)...(19): siRNA sense strand
agacaagggugaaauuggu

SEQ ID NO: 599060 - RNA, 19 nt, Homo sapiens
  misc_RNA (1)...(19): siRNA sense strand
gauguuaccguuccguuau

SEQ ID NO: 599061 - RNA, 19 nt, Homo sapiens
  misc_RNA (1)...(19): siRNA sense strand
gaacuuucccagaagacuu

SEQ ID NO: 599062 - RNA, 19 nt, Homo sapiens
  misc_RNA (1)...(19): siRNA sense strand
ugaaguugguccuguuugu

SEQ ID NO: 599063 - RNA, 19 nt, Homo sapiens
  misc_RNA (1)...(19): siRNA sense strand
ggaguaagaauuucaucau

SEQ ID NO: 599064 - RNA, 19 nt, Homo sapiens
  misc_RNA (1)...(19): siRNA sense strand
guaacaacccucgcauuga

SEQ ID NO: 599065 - RNA, 19 nt, Homo sapiens
  misc_RNA (1)...(19): siRNA sense strand
cggugagacugguccaaua

SEQ ID NO: 599066 - RNA, 19 nt, Homo sapiens
  misc_RNA (1)...(19): siRNA sense strand
ccacgaaaccacuugauag

SEQ ID NO: 599067 - RNA, 19 nt, Homo sapiens
  misc_RNA (1)...(19): siRNA sense strand
gagcaugguauucagcaaa

SEQ ID NO: 599068 - RNA, 19 nt, Homo sapiens
  misc_RNA (1)...(19): siRNA sense strand
cggcagggauucugaucuu

SEQ ID NO: 599069 - RNA, 19 nt, Homo sapiens
  misc_RNA (1)...(19): siRNA sense strand
gagcauaugaaauuuccaa

SEQ ID NO: 599070 - RNA, 19 nt, Homo sapiens
  misc_RNA (1)...(19): siRNA sense strand
cagaagguccuccuggaaa

SEQ ID NO: 599071 - RNA, 19 nt, Homo sapiens
  misc_RNA (1)...(19): siRNA sense strand
ccagcaggauuacgugguu

SEQ ID NO: 599072 - RNA, 19 nt, Homo sapiens
  misc_RNA (1)...(19): siRNA sense strand
ggaagauggcccugaagga

SEQ ID NO: 599073 - RNA, 19 nt, Homo sapiens
  misc_RNA (1)...(19): siRNA sense strand
ggagagaaaggacagaaag

SEQ ID NO: 599074 - RNA, 19 nt, Homo sapiens
  misc_RNA (1)...(19): siRNA sense strand
gaaguggcaucggguagca

SEQ ID NO: 599075 - RNA, 19 nt, Homo sapiens
  misc_RNA (1)...(19): siRNA sense strand
ugacauuccugaaacuucu

SEQ ID NO: 599076 - RNA, 19 nt, Homo sapiens
  misc_RNA (1)...(19): siRNA sense strand
ggagacaagggugaaauug

SEQ ID NO: 599077 - RNA, 19 nt, Homo sapiens
  misc_RNA (1)...(19): siRNA sense strand
aaccaucucugcucaggaa

SEQ ID NO: 599078 - RNA, 19 nt, Homo sapiens
  misc_RNA (1)...(19): siRNA sense strand
ugacuacugugagcauuau

SEQ ID NO: 599079 - RNA, 19 nt, Homo sapiens
  misc_RNA (1)...(19): siRNA sense strand
caaucagcguggagaagaa

SEQ ID NO: 599080 - RNA, 19 nt, Homo sapiens
  misc_RNA (1)...(19): siRNA sense strand
gagauuuaggcgaauauga

SEQ ID NO: 599081 - RNA, 19 nt, Homo sapiens
  misc_RNA (1)...(19): siRNA sense strand
gcauaugaaauuuccaaug

SEQ ID NO: 599082 - RNA, 19 nt, Homo sapiens
  misc_RNA (1)...(19): siRNA sense strand
aagcagaugcagaugauaa

SEQ ID NO: 599083 - RNA, 19 nt, Homo sapiens
  misc_RNA (1)...(19): siRNA sense strand
gggugaaccuggagaagca

SEQ ID NO: 599084 - RNA, 19 nt, Homo sapiens
  misc_RNA (1)...(19): siRNA sense strand
agauggaccagcaggauua

SEQ ID NO: 599085 - RNA, 19 nt, Homo sapiens
  misc_RNA (1)...(19): siRNA sense strand
gaagaugguuuuccaggau

SEQ ID NO: 599086 - RNA, 19 nt, Homo sapiens
  misc_RNA (1)...(19): siRNA sense strand
gguacuauguugauguuac

SEQ ID NO: 599087 - RNA, 19 nt, Homo sapiens
  misc_RNA (1)...(19): siRNA sense strand
gcaaugcucuggaaauaua

SEQ ID NO: 599088 - RNA, 19 nt, Homo sapiens
  misc_RNA (1)...(19): siRNA sense strand
gaacaucacucagaaguuu

SEQ ID NO: 599089 - RNA, 19 nt, Homo sapiens
  misc_RNA (1)...(19): siRNA sense strand
ggaagaagcugcuacuguu

SEQ ID NO: 599090 - RNA, 19 nt, Homo sapiens
  misc_RNA (1)...(19): siRNA sense strand
gcaccgaacucaaaugaaa

SEQ ID NO: 599091 - RNA, 19 nt, Homo sapiens
  misc_RNA (1)...(19): siRNA sense strand
gaagaaauaugaagaagca

SEQ ID NO: 599092 - RNA, 19 nt, Homo sapiens
  misc_RNA (1)...(19): siRNA sense strand
gaaauagugucucaguuug

SEQ ID NO: 599093 - RNA, 19 nt, Homo sapiens
  misc_RNA (1)...(19): siRNA sense strand
gagaaugaauguagagauu

SEQ ID NO: 599094 - RNA, 19 nt, Homo sapiens
  misc_RNA (1)...(19): siRNA sense strand
gacauaagauucuggauau

SEQ ID NO: 599095 - RNA, 19 nt, Homo sapiens
  misc_RNA (1)...(19): siRNA sense strand
gacaaaccaccauuuauua

SEQ ID NO: 599096 - RNA, 19 nt, Homo sapiens
  misc_RNA (1)...(19): siRNA sense strand
gaaacugaauucuacauca

SEQ ID NO: 599097 - RNA, 19 nt, Homo sapiens
  misc_RNA (1)...(19): siRNA sense strand
gaagaaagauagucagaac

SEQ ID NO: 599098 - RNA, 19 nt, Homo sapiens
  misc_RNA (1)...(19): siRNA sense strand
cuggagaucuguauaauaa

SEQ ID NO: 599099 - RNA, 19 nt, Homo sapiens
  misc_RNA (1)...(19): siRNA sense strand
agagaaagcuguugacaug

SEQ ID NO: 599100 - RNA, 19 nt, Homo sapiens
  misc_RNA (1)...(19): siRNA sense strand
gaccagagcuacagcaugu

SEQ ID NO: 599101 - RNA, 19 nt, Homo sapiens
  misc_RNA (1)...(19): siRNA sense strand
gaauggagauccccaauuu

SEQ ID NO: 599102 - RNA, 19 nt, Homo sapiens
  misc_RNA (1)...(19): siRNA sense strand
gaagugcccugaagaugau

SEQ ID NO: 599103 - RNA, 19 nt, Homo sapiens
  misc_RNA (1)...(19): siRNA sense strand
gcagguauuuggacuguau

SEQ ID NO: 599104 - RNA, 19 nt, Homo sapiens
  misc_RNA (1)...(19): siRNA sense strand
gacaucaucucaaagcaaa

SEQ ID NO: 599105 - RNA, 19 nt, Homo sapiens
  misc_RNA (1)...(19): siRNA sense strand
gcacacauguugacccaau

SEQ ID NO: 599106 - RNA, 19 nt, Homo sapiens
  misc_RNA (1)...(19): siRNA sense strand
gacaguccaugacaaguuu

SEQ ID NO: 599107 - RNA, 19 nt, Homo sapiens
  misc_RNA (1)...(19): siRNA sense strand
gccaagaggugauccaguu

SEQ ID NO: 599108 - RNA, 19 nt, Homo sapiens
  misc_RNA (1)...(19): siRNA sense strand
gcacaguucugcaacaucu

SEQ ID NO: 599109 - RNA, 19 nt, Homo sapiens
  misc_RNA (1)...(19): siRNA sense strand
agaccaagaugaucacauu

SEQ ID NO: 599110 - RNA, 19 nt, Homo sapiens
  misc_RNA (1)...(19): siRNA sense strand
ugaaagguguucuuguuga

SEQ ID NO: 599111 - RNA, 19 nt, Homo sapiens
  misc_RNA (1)...(19): siRNA sense strand
ugacaaaccaccauuuauu

SEQ ID NO: 599112 - RNA, 19 nt, Homo sapiens
  misc_RNA (1)...(19): siRNA sense strand
gaaauaugaagaagcauug

SEQ ID NO: 599113 - RNA, 19 nt, Homo sapiens
  misc_RNA (1)...(19): siRNA sense strand
ggucuuggaugaacagaug

SEQ ID NO: 599114 - RNA, 19 nt, Homo sapiens
  misc_RNA (1)...(19): siRNA sense strand
gaaagguguucuuguugau

SEQ ID NO: 599115 - RNA, 19 nt, Homo sapiens
  misc_RNA (1)...(19): siRNA sense strand
ugaaauagugucucaguuu

SEQ ID NO: 599116 - RNA, 19 nt, Homo sapiens
  misc_RNA (1)...(19): siRNA sense strand
gacaaugugacacugauua

SEQ ID NO: 599117 - RNA, 19 nt, Homo sapiens
  misc_RNA (1)...(19): siRNA sense strand
ucucguagcugacucuuug

SEQ ID NO: 599118 - RNA, 19 nt, Homo sapiens
  misc_RNA (1)...(19): siRNA sense strand
cagcauguguauuugcaua

SEQ ID NO: 599119 - RNA, 19 nt, Homo sapiens
  misc_RNA (1)...(19): siRNA sense strand
aacccaagcugaaguauga

SEQ ID NO: 599120 - RNA, 19 nt, Homo sapiens
  misc_RNA (1)...(19): siRNA sense strand
aaugaaagguguucuuguu

SEQ ID NO: 599121 - RNA, 19 nt, Homo sapiens
  misc_RNA (1)...(19): siRNA sense strand
ggagagcugugggaagauu

SEQ ID NO: 599122 - RNA, 19 nt, Homo sapiens
  misc_RNA (1)...(19): siRNA sense strand
aaacagaucagucuuuaug

SEQ ID NO: 599123 - RNA, 19 nt, Homo sapiens
  misc_RNA (1)...(19): siRNA sense strand
uaaagaaauuggacagcuu

SEQ ID NO: 599124 - RNA, 19 nt, Homo sapiens
  misc_RNA (1)...(19): siRNA sense strand
ugacauagcagcacgcaaa

SEQ ID NO: 599125 - RNA, 19 nt, Homo sapiens
  misc_RNA (1)...(19): siRNA sense strand
gcacccacauuucgugaga

SEQ ID NO: 599126 - RNA, 19 nt, Homo sapiens
  misc_RNA (1)...(19): siRNA sense strand
uggcaaugcucuggaaaua

SEQ ID NO: 599127 - RNA, 19 nt, Homo sapiens
  misc_RNA (1)...(19): siRNA sense strand
cagaacaagacuuuacuua

SEQ ID NO: 599128 - RNA, 19 nt, Homo sapiens
  misc_RNA (1)...(19): siRNA sense strand
gaagaagcugcuacuguuu

SEQ ID NO: 599129 - RNA, 19 nt, Homo sapiens
  misc_RNA (1)...(19): siRNA sense strand
uaauaugggugugaagauu

SEQ ID NO: 599130 - RNA, 19 nt, Homo sapiens
  misc_RNA (1)...(19): siRNA sense strand
gggaucauuugaagaaaga

SEQ ID NO: 599131 - RNA, 19 nt, Homo sapiens
  misc_RNA (1)...(19): siRNA sense strand
caacagagaaacuuuguag

SEQ ID NO: 599132 - RNA, 19 nt, Homo sapiens
  misc_RNA (1)...(19): siRNA sense strand
cgugaaggcugcaagaaga

SEQ ID NO: 599133 - RNA, 19 nt, Homo sapiens
  misc_RNA (1)...(19): siRNA sense strand
gagaaacuuuguagaagag

SEQ ID NO: 599134 - RNA, 19 nt, Homo sapiens
  misc_RNA (1)...(19): siRNA sense strand
gggcagcguuaccaugaaa

SEQ ID NO: 599135 - RNA, 19 nt, Homo sapiens
  misc_RNA (1)...(19): siRNA sense strand
ccaagucgauauguugaaa

SEQ ID NO: 599136 - RNA, 19 nt, Homo sapiens
  misc_RNA (1)...(19): siRNA sense strand
agagaaacuuuguagaaga

SEQ ID NO: 599137 - RNA, 19 nt, Homo sapiens
  misc_RNA (1)...(19): siRNA sense strand
gaacauaaggagugugaag

SEQ ID NO: 599138 - RNA, 19 nt, Homo sapiens
  misc_RNA (1)...(19): siRNA sense strand
cuacugauucaccguauua

SEQ ID NO: 599139 - RNA, 19 nt, Homo sapiens
  misc_RNA (1)...(19): siRNA sense strand
gaagaugauuauggaggaa

SEQ ID NO: 599140 - RNA, 19 nt, Homo sapiens
  misc_RNA (1)...(19): siRNA sense strand
cgaagugcccugaagauga

SEQ ID NO: 599141 - RNA, 19 nt, Homo sapiens
  misc_RNA (1)...(19): siRNA sense strand
caagagagaccaccauaag

SEQ ID NO: 599142 - RNA, 19 nt, Homo sapiens
  misc_RNA (1)...(19): siRNA sense strand
agacauaagauucuggaua

SEQ ID NO: 599143 - RNA, 19 nt, Homo sapiens
  misc_RNA (1)...(19): siRNA sense strand
gaucucuucugaugcuuug

SEQ ID NO: 599144 - RNA, 19 nt, Homo sapiens
  misc_RNA (1)...(19): siRNA sense strand
gaagucugcuguucugcau

SEQ ID NO: 599145 - RNA, 19 nt, Homo sapiens
  misc_RNA (1)...(19): siRNA sense strand
gaaauuggacagcuuaagg

SEQ ID NO: 599146 - RNA, 19 nt, Homo sapiens
  misc_RNA (1)...(19): siRNA sense strand
aaagaaauuggacagcuua

SEQ ID NO: 599147 - RNA, 19 nt, Homo sapiens
  misc_RNA (1)...(19): siRNA sense strand
ccaauaauaugggugugaa

SEQ ID NO: 599148 - RNA, 19 nt, Homo sapiens
  misc_RNA (1)...(19): siRNA sense strand
ggacagcuuaaggcuauua

SEQ ID NO: 599149 - RNA, 19 nt, Homo sapiens
  misc_RNA (1)...(19): siRNA sense strand
gaacggucuuggaugaaca

SEQ ID NO: 599150 - RNA, 19 nt, Homo sapiens
  misc_RNA (1)...(19): siRNA sense strand
acagagaaacuuuguagaa

SEQ ID NO: 599151 - RNA, 19 nt, Homo sapiens
  misc_RNA (1)...(19): siRNA sense strand
ggaacgagaccaagaugau

SEQ ID NO: 599152 - RNA, 19 nt, Homo sapiens
  misc_RNA (1)...(19): siRNA sense strand
ggaacggcaugccagugaa

SEQ ID NO: 599153 - RNA, 19 nt, Homo sapiens
  misc_RNA (1)...(19): siRNA sense strand
cagagaaacuuuguagaag

SEQ ID NO: 599154 - RNA, 19 nt, Homo sapiens
  misc_RNA (1)...(19): siRNA sense strand
ggaagaauuggaagacaga

SEQ ID NO: 599155 - RNA, 19 nt, Homo sapiens
  misc_RNA (1)...(19): siRNA sense strand
gaaagauagucagaacaag

SEQ ID NO: 599156 - RNA, 19 nt, Homo sapiens
  misc_RNA (1)...(19): siRNA sense strand
agucauaguucaagcaguu

SEQ ID NO: 599157 - RNA, 19 nt, Homo sapiens
  misc_RNA (1)...(19): siRNA sense strand
gauggcagcugaaauuagc

SEQ ID NO: 599158 - RNA, 19 nt, Homo sapiens
  misc_RNA (1)...(19): siRNA sense strand
guuguacuuucguauguaa

SEQ ID NO: 599159 - RNA, 19 nt, Homo sapiens
  misc_RNA (1)...(19): siRNA sense strand
gcacgcaaaugccagaaaa

SEQ ID NO: 599160 - RNA, 19 nt, Homo sapiens
  misc_RNA (1)...(19): siRNA sense strand
gcaaagaaucaccaaugug

SEQ ID NO: 599161 - RNA, 19 nt, Homo sapiens
  misc_RNA (1)...(19): siRNA sense strand
ggaccaggaagugcaauuu

SEQ ID NO: 599162 - RNA, 19 nt, Homo sapiens
  misc_RNA (1)...(19): siRNA sense strand
uggcaagguuuauuuacuu

SEQ ID NO: 599163 - RNA, 19 nt, Homo sapiens
  misc_RNA (1)...(19): siRNA sense strand
uggcagaauuguacaccua

SEQ ID NO: 599164 - RNA, 19 nt, Homo sapiens
  misc_RNA (1)...(19): siRNA sense strand
gaacggcaugccagugaaa

SEQ ID NO: 599165 - RNA, 19 nt, Homo sapiens
  misc_RNA (1)...(19): siRNA sense strand
gggaagaagcugcuacugu

SEQ ID NO: 599166 - RNA, 19 nt, Homo sapiens
  misc_RNA (1)...(19): siRNA sense strand
caaaugaaagguguucuug

SEQ ID NO: 599167 - RNA, 19 nt, Homo sapiens
  misc_RNA (1)...(19): siRNA sense strand
gagacaguuuaucuucuga

SEQ ID NO: 599168 - RNA, 19 nt, Homo sapiens
  misc_RNA (1)...(19): siRNA sense strand
caaacuuacuucccuuucu

SEQ ID NO: 599169 - RNA, 19 nt, Homo sapiens
  misc_RNA (1)...(19): siRNA sense strand
gcagcacucugggaauaug

SEQ ID NO: 599170 - RNA, 19 nt, Homo sapiens
  misc_RNA (1)...(19): siRNA sense strand
gacaucauccagccacuuu

SEQ ID NO: 599171 - RNA, 19 nt, Homo sapiens
  misc_RNA (1)...(19): siRNA sense strand
guggagaggccaucugauu

SEQ ID NO: 599172 - RNA, 19 nt, Homo sapiens
  misc_RNA (1)...(19): siRNA sense strand
uuugagagauuccuugguu

SEQ ID NO: 599173 - RNA, 19 nt, Homo sapiens
  misc_RNA (1)...(19): siRNA sense strand
aaagguaguggaagaauug

SEQ ID NO: 599174 - RNA, 19 nt, Homo sapiens
  misc_RNA (1)...(19): siRNA sense strand
gcagaauuguacaccuaug

SEQ ID NO: 599175 - RNA, 19 nt, Homo sapiens
  misc_RNA (1)...(19): siRNA sense strand
gucaaggugugcucaguga

SEQ ID NO: 599176 - RNA, 19 nt, Homo sapiens
  misc_RNA (1)...(19): siRNA sense strand
cauaagauucuggauauug

SEQ ID NO: 599177 - RNA, 19 nt, Homo sapiens
  misc_RNA (1)...(19): siRNA sense strand
gaggagaacaucugugagu

SEQ ID NO: 599178 - RNA, 19 nt, Homo sapiens
  misc_RNA (1)...(19): siRNA sense strand
ugagagauuccuugguuaa

SEQ ID NO: 599179 - RNA, 19 nt, Homo sapiens
  misc_RNA (1)...(19): siRNA sense strand
ggaagacagaccagagcua

SEQ ID NO: 599180 - RNA, 19 nt, Homo sapiens
  misc_RNA (1)...(19): siRNA sense strand
gcauugggcacacauuaug

SEQ ID NO: 599181 - RNA, 19 nt, Homo sapiens
  misc_RNA (1)...(19): siRNA sense strand
gaacccaagcugaaguaug

SEQ ID NO: 599182 - RNA, 19 nt, Homo sapiens
  misc_RNA (1)...(19): siRNA sense strand
aaaccaccauuuauuacug

SEQ ID NO: 599183 - RNA, 19 nt, Homo sapiens
  misc_RNA (1)...(19): siRNA sense strand
ugaaaaggcucuugagauc

SEQ ID NO: 599184 - RNA, 19 nt, Homo sapiens
  misc_RNA (1)...(19): siRNA sense strand
agaaagauagucagaacaa

SEQ ID NO: 599185 - RNA, 19 nt, Homo sapiens
  misc_RNA (1)...(19): siRNA sense strand
gauaaagcaaucgaauuug

SEQ ID NO: 599186 - RNA, 19 nt, Homo sapiens
  misc_RNA (1)...(19): siRNA sense strand
ugacccaauucuacugauu

SEQ ID NO: 599187 - RNA, 19 nt, Homo sapiens
  misc_RNA (1)...(19): siRNA sense strand
gcaaugcucuggaaauaua

SEQ ID NO: 599188 - RNA, 19 nt, Homo sapiens
  misc_RNA (1)...(19): siRNA sense strand
gaacaucacucagaaguuu

SEQ ID NO: 599189 - RNA, 19 nt, Homo sapiens
  misc_RNA (1)...(19): siRNA sense strand
ggaagaagcugcuacuguu

SEQ ID NO: 599190 - RNA, 19 nt, Homo sapiens
  misc_RNA (1)...(19): siRNA sense strand
gcaccgaacucaaaugaaa

SEQ ID NO: 599191 - RNA, 19 nt, Homo sapiens
  misc_RNA (1)...(19): siRNA sense strand
gaagaaauaugaagaagca

SEQ ID NO: 599192 - RNA, 19 nt, Homo sapiens
  misc_RNA (1)...(19): siRNA sense strand
gaaauagugucucaguuug

SEQ ID NO: 599193 - RNA, 19 nt, Homo sapiens
  misc_RNA (1)...(19): siRNA sense strand
gagaaugaauguagagauu

SEQ ID NO: 599194 - RNA, 19 nt, Homo sapiens
  misc_RNA (1)...(19): siRNA sense strand
gacauaagauucuggauau

SEQ ID NO: 599195 - RNA, 19 nt, Homo sapiens
  misc_RNA (1)...(19): siRNA sense strand
gacaaaccaccauuuauua

SEQ ID NO: 599196 - RNA, 19 nt, Homo sapiens
  misc_RNA (1)...(19): siRNA sense strand
gaaacugaauucuacauca

SEQ ID NO: 599197 - RNA, 19 nt, Homo sapiens
  misc_RNA (1)...(19): siRNA sense strand
gaagaaagauagucagaac

SEQ ID NO: 599198 - RNA, 19 nt, Homo sapiens
  misc_RNA (1)...(19): siRNA sense strand
cuggagaucuguauaauaa

SEQ ID NO: 599199 - RNA, 19 nt, Homo sapiens
  misc_RNA (1)...(19): siRNA sense strand
agagaaagcuguugacaug

SEQ ID NO: 599200 - RNA, 19 nt, Homo sapiens
  misc_RNA (1)...(19): siRNA sense strand
gaccagagcuacagcaugu

SEQ ID NO: 599201 - RNA, 19 nt, Homo sapiens
  misc_RNA (1)...(19): siRNA sense strand
gaauggagauccccaauuu

SEQ ID NO: 599202 - RNA, 19 nt, Homo sapiens
  misc_RNA (1)...(19): siRNA sense strand
gaagugcccugaagaugau

SEQ ID NO: 599203 - RNA, 19 nt, Homo sapiens
  misc_RNA (1)...(19): siRNA sense strand
gcagguauuuggacuguau

SEQ ID NO: 599204 - RNA, 19 nt, Homo sapiens
  misc_RNA (1)...(19): siRNA sense strand
gacaucaucucaaagcaaa

SEQ ID NO: 599205 - RNA, 19 nt, Homo sapiens
  misc_RNA (1)...(19): siRNA sense strand
gcacacauguugacccaau

SEQ ID NO: 599206 - RNA, 19 nt, Homo sapiens
  misc_RNA (1)...(19): siRNA sense strand
gccaagaggugauccaguu

SEQ ID NO: 599207 - RNA, 19 nt, Homo sapiens
  misc_RNA (1)...(19): siRNA sense strand
gacaguccaugacaaguuu

SEQ ID NO: 599208 - RNA, 19 nt, Homo sapiens
  misc_RNA (1)...(19): siRNA sense strand
gcacaguucugcaacaucu

SEQ ID NO: 599209 - RNA, 19 nt, Homo sapiens
  misc_RNA (1)...(19): siRNA sense strand
agaccaagaugaucacauu

SEQ ID NO: 599210 - RNA, 19 nt, Homo sapiens
  misc_RNA (1)...(19): siRNA sense strand
ugaaagguguucuuguuga

SEQ ID NO: 599211 - RNA, 19 nt, Homo sapiens
  misc_RNA (1)...(19): siRNA sense strand
ugacaaaccaccauuuauu

SEQ ID NO: 599212 - RNA, 19 nt, Homo sapiens
  misc_RNA (1)...(19): siRNA sense strand
gaaauaugaagaagcauug

SEQ ID NO: 599213 - RNA, 19 nt, Homo sapiens
  misc_RNA (1)...(19): siRNA sense strand
ggucuuggaugaacagaug

SEQ ID NO: 599214 - RNA, 19 nt, Homo sapiens
  misc_RNA (1)...(19): siRNA sense strand
gaaagguguucuuguugau

SEQ ID NO: 599215 - RNA, 19 nt, Homo sapiens
  misc_RNA (1)...(19): siRNA sense strand
ugaaauagugucucaguuu

SEQ ID NO: 599216 - RNA, 19 nt, Homo sapiens
  misc_RNA (1)...(19): siRNA sense strand
gacaaugugacacugauua

SEQ ID NO: 599217 - RNA, 19 nt, Homo sapiens
  misc_RNA (1)...(19): siRNA sense strand
ucucguagcugacucuuug

SEQ ID NO: 599218 - RNA, 19 nt, Homo sapiens
  misc_RNA (1)...(19): siRNA sense strand
cagcauguguauuugcaua

SEQ ID NO: 599219 - RNA, 19 nt, Homo sapiens
  misc_RNA (1)...(19): siRNA sense strand
ugacauagcagcacgcaaa

SEQ ID NO: 599220 - RNA, 19 nt, Homo sapiens
  misc_RNA (1)...(19): siRNA sense strand
aaugaaagguguucuuguu

SEQ ID NO: 599221 - RNA, 19 nt, Homo sapiens
  misc_RNA (1)...(19): siRNA sense strand
ggagagcugugggaagauu

SEQ ID NO: 599222 - RNA, 19 nt, Homo sapiens
  misc_RNA (1)...(19): siRNA sense strand
aaacagaucagucuuuaug

SEQ ID NO: 599223 - RNA, 19 nt, Homo sapiens
  misc_RNA (1)...(19): siRNA sense strand
uaaagaaauuggacagcuu

SEQ ID NO: 599224 - RNA, 19 nt, Homo sapiens
  misc_RNA (1)...(19): siRNA sense strand
gcacccacauuucgugaga

SEQ ID NO: 599225 - RNA, 19 nt, Homo sapiens
  misc_RNA (1)...(19): siRNA sense strand
uggcaaugcucuggaaaua

SEQ ID NO: 599226 - RNA, 19 nt, Homo sapiens
  misc_RNA (1)...(19): siRNA sense strand
cagaacaagacuuuacuua

SEQ ID NO: 599227 - RNA, 19 nt, Homo sapiens
  misc_RNA (1)...(19): siRNA sense strand
gaagaagcugcuacuguuu

SEQ ID NO: 599228 - RNA, 19 nt, Homo sapiens
  misc_RNA (1)...(19): siRNA sense strand
uaauaugggugugaagauu

SEQ ID NO: 599229 - RNA, 19 nt, Homo sapiens
  misc_RNA (1)...(19): siRNA sense strand
gggaucauuugaagaaaga

SEQ ID NO: 599230 - RNA, 19 nt, Homo sapiens
  misc_RNA (1)...(19): siRNA sense strand
caacagagaaacuuuguag

SEQ ID NO: 599231 - RNA, 19 nt, Homo sapiens
  misc_RNA (1)...(19): siRNA sense strand
cgugaaggcugcaagaaga

SEQ ID NO: 599232 - RNA, 19 nt, Homo sapiens
  misc_RNA (1)...(19): siRNA sense strand
gagaaacuuuguagaagag

SEQ ID NO: 599233 - RNA, 19 nt, Homo sapiens
  misc_RNA (1)...(19): siRNA sense strand
gggcagcguuaccaugaaa

SEQ ID NO: 599234 - RNA, 19 nt, Homo sapiens
  misc_RNA (1)...(19): siRNA sense strand
ccaagucgauauguugaaa

SEQ ID NO: 599235 - RNA, 19 nt, Homo sapiens
  misc_RNA (1)...(19): siRNA sense strand
agagaaacuuuguagaaga

SEQ ID NO: 599236 - RNA, 19 nt, Homo sapiens
  misc_RNA (1)...(19): siRNA sense strand
gaacauaaggagugugaag

SEQ ID NO: 599237 - RNA, 19 nt, Homo sapiens
  misc_RNA (1)...(19): siRNA sense strand
cuacugauucaccguauua

SEQ ID NO: 599238 - RNA, 19 nt, Homo sapiens
  misc_RNA (1)...(19): siRNA sense strand
gaagaugauuauggaggaa

SEQ ID NO: 599239 - RNA, 19 nt, Homo sapiens
  misc_RNA (1)...(19): siRNA sense strand
cgaagugcccugaagauga

SEQ ID NO: 599240 - RNA, 19 nt, Homo sapiens
  misc_RNA (1)...(19): siRNA sense strand
caagagagaccaccauaag

SEQ ID NO: 599241 - RNA, 19 nt, Homo sapiens
  misc_RNA (1)...(19): siRNA sense strand
agacauaagauucuggaua

SEQ ID NO: 599242 - RNA, 19 nt, Homo sapiens
  misc_RNA (1)...(19): siRNA sense strand
gaucucuucugaugcuuug

SEQ ID NO: 599243 - RNA, 19 nt, Homo sapiens
  misc_RNA (1)...(19): siRNA sense strand
gaagucugcuguucugcau

SEQ ID NO: 599244 - RNA, 19 nt, Homo sapiens
  misc_RNA (1)...(19): siRNA sense strand
gaaauuggacagcuuaagg

SEQ ID NO: 599245 - RNA, 19 nt, Homo sapiens
  misc_RNA (1)...(19): siRNA sense strand
aaagaaauuggacagcuua

SEQ ID NO: 599246 - RNA, 19 nt, Homo sapiens
  misc_RNA (1)...(19): siRNA sense strand
ccaauaauaugggugugaa

SEQ ID NO: 599247 - RNA, 19 nt, Homo sapiens
  misc_RNA (1)...(19): siRNA sense strand
ggacagcuuaaggcuauua

SEQ ID NO: 599248 - RNA, 19 nt, Homo sapiens
  misc_RNA (1)...(19): siRNA sense strand
gaacggucuuggaugaaca

SEQ ID NO: 599249 - RNA, 19 nt, Homo sapiens
  misc_RNA (1)...(19): siRNA sense strand
acagagaaacuuuguagaa

SEQ ID NO: 599250 - RNA, 19 nt, Homo sapiens
  misc_RNA (1)...(19): siRNA sense strand
ggaacgagaccaagaugau

SEQ ID NO: 599251 - RNA, 19 nt, Homo sapiens
  misc_RNA (1)...(19): siRNA sense strand
ggaacggcaugccagugaa

SEQ ID NO: 599252 - RNA, 19 nt, Homo sapiens
  misc_RNA (1)...(19): siRNA sense strand
cagagaaacuuuguagaag

SEQ ID NO: 599253 - RNA, 19 nt, Homo sapiens
  misc_RNA (1)...(19): siRNA sense strand
ggaagaauuggaagacaga

SEQ ID NO: 599254 - RNA, 19 nt, Homo sapiens
  misc_RNA (1)...(19): siRNA sense strand
gaaagauagucagaacaag

SEQ ID NO: 599255 - RNA, 19 nt, Homo sapiens
  misc_RNA (1)...(19): siRNA sense strand
agucauaguucaagcaguu

SEQ ID NO: 599256 - RNA, 19 nt, Homo sapiens
  misc_RNA (1)...(19): siRNA sense strand
gauggcagcugaaauuagc

SEQ ID NO: 599257 - RNA, 19 nt, Homo sapiens
  misc_RNA (1)...(19): siRNA sense strand
guuguacuuucguauguaa

SEQ ID NO: 599258 - RNA, 19 nt, Homo sapiens
  misc_RNA (1)...(19): siRNA sense strand
gcacgcaaaugccagaaaa

SEQ ID NO: 599259 - RNA, 19 nt, Homo sapiens
  misc_RNA (1)...(19): siRNA sense strand
gcaaagaaucaccaaugug

SEQ ID NO: 599260 - RNA, 19 nt, Homo sapiens
  misc_RNA (1)...(19): siRNA sense strand
ggaccaggaagugcaauuu

SEQ ID NO: 599261 - RNA, 19 nt, Homo sapiens
  misc_RNA (1)...(19): siRNA sense strand
uggcaagguuuauuuacuu

SEQ ID NO: 599262 - RNA, 19 nt, Homo sapiens
  misc_RNA (1)...(19): siRNA sense strand
uggcagaauuguacaccua

SEQ ID NO: 599263 - RNA, 19 nt, Homo sapiens
  misc_RNA (1)...(19): siRNA sense strand
gaacggcaugccagugaaa

SEQ ID NO: 599264 - RNA, 19 nt, Homo sapiens
  misc_RNA (1)...(19): siRNA sense strand
gacaucauccagccacuuu

SEQ ID NO: 599265 - RNA, 19 nt, Homo sapiens
  misc_RNA (1)...(19): siRNA sense strand
caaaugaaagguguucuug

SEQ ID NO: 599266 - RNA, 19 nt, Homo sapiens
  misc_RNA (1)...(19): siRNA sense strand
gagacaguuuaucuucuga

SEQ ID NO: 599267 - RNA, 19 nt, Homo sapiens
  misc_RNA (1)...(19): siRNA sense strand
caaacuuacuucccuuucu

SEQ ID NO: 599268 - RNA, 19 nt, Homo sapiens
  misc_RNA (1)...(19): siRNA sense strand
gggaagaagcugcuacugu

SEQ ID NO: 599269 - RNA, 19 nt, Homo sapiens
  misc_RNA (1)...(19): siRNA sense strand
gcagcacucugggaauaug

SEQ ID NO: 599270 - RNA, 19 nt, Homo sapiens
  misc_RNA (1)...(19): siRNA sense strand
guggagaggccaucugauu

SEQ ID NO: 599271 - RNA, 19 nt, Homo sapiens
  misc_RNA (1)...(19): siRNA sense strand
uuugagagauuccuugguu

SEQ ID NO: 599272 - RNA, 19 nt, Homo sapiens
  misc_RNA (1)...(19): siRNA sense strand
aaagguaguggaagaauug

SEQ ID NO: 599273 - RNA, 19 nt, Homo sapiens
  misc_RNA (1)...(19): siRNA sense strand
gcagaauuguacaccuaug

SEQ ID NO: 599274 - RNA, 19 nt, Homo sapiens
  misc_RNA (1)...(19): siRNA sense strand
gucaaggugugcucaguga

SEQ ID NO: 599275 - RNA, 19 nt, Homo sapiens
  misc_RNA (1)...(19): siRNA sense strand
gcauugggcacacauuaug

SEQ ID NO: 599276 - RNA, 19 nt, Homo sapiens
  misc_RNA (1)...(19): siRNA sense strand
gaggagaacaucugugagu

SEQ ID NO: 599277 - RNA, 19 nt, Homo sapiens
  misc_RNA (1)...(19): siRNA sense strand
ugagagauuccuugguuaa

SEQ ID NO: 599278 - RNA, 19 nt, Homo sapiens
  misc_RNA (1)...(19): siRNA sense strand
ggaagacagaccagagcua

SEQ ID NO: 599279 - RNA, 19 nt, Homo sapiens
  misc_RNA (1)...(19): siRNA sense strand
cauaagauucuggauauug

SEQ ID NO: 599280 - RNA, 19 nt, Homo sapiens
  misc_RNA (1)...(19): siRNA sense strand
agaaagauagucagaacaa

SEQ ID NO: 599281 - RNA, 19 nt, Homo sapiens
  misc_RNA (1)...(19): siRNA sense strand
aaaccaccauuuauuacug

SEQ ID NO: 599282 - RNA, 19 nt, Homo sapiens
  misc_RNA (1)...(19): siRNA sense strand
ugaaaaggcucuugagauc

SEQ ID NO: 599283 - RNA, 19 nt, Homo sapiens
  misc_RNA (1)...(19): siRNA sense strand
aaagauagucagaacaaga

SEQ ID NO: 599284 - RNA, 19 nt, Homo sapiens
  misc_RNA (1)...(19): siRNA sense strand
ugacccaauucuacugauu

SEQ ID NO: 599285 - RNA, 19 nt, Homo sapiens
  misc_RNA (1)...(19): siRNA sense strand
gauaaagcaaucgaauuug

SEQ ID NO: 599286 - RNA, 19 nt, Homo sapiens
  misc_RNA (1)...(19): siRNA sense strand
cacauuauggcaagguuua

SEQ ID NO: 599287 - RNA, 19 nt, Homo sapiens
  misc_RNA (1)...(19): siRNA sense strand
gaagggagaccuacuaaau

SEQ ID NO: 599288 - RNA, 19 nt, Homo sapiens
  misc_RNA (1)...(19): siRNA sense strand
aaauagacauggacaauga

SEQ ID NO: 599289 - RNA, 19 nt, Homo sapiens
  misc_RNA (1)...(19): siRNA sense strand
ccaacacgaugaacuauag

SEQ ID NO: 599290 - RNA, 19 nt, Homo sapiens
  misc_RNA (1)...(19): siRNA sense strand
ggagagcaccgaagaagug

SEQ ID NO: 599291 - RNA, 19 nt, Homo sapiens
  misc_RNA (1)...(19): siRNA sense strand
cgagauaaaccucuacuug

SEQ ID NO: 599292 - RNA, 19 nt, Homo sapiens
  misc_RNA (1)...(19): siRNA sense strand
ccagaaaacugcucuaaga

SEQ ID NO: 599293 - RNA, 19 nt, Homo sapiens
  misc_RNA (1)...(19): siRNA sense strand
gaaaacugcucuaagacaa

SEQ ID NO: 599294 - RNA, 19 nt, Homo sapiens
  misc_RNA (1)...(19): siRNA sense strand
uaagaagaaugaccaugau

SEQ ID NO: 599295 - RNA, 19 nt, Homo sapiens
  misc_RNA (1)...(19): siRNA sense strand
caagaagggagaccuacua

SEQ ID NO: 599296 - RNA, 19 nt, Homo sapiens
  misc_RNA (1)...(19): siRNA sense strand
ggugauggcuucauuucuc

SEQ ID NO: 599297 - RNA, 19 nt, Homo sapiens
  misc_RNA (1)...(19): siRNA sense strand
cuaaagacggcucgaaauu

SEQ ID NO: 599298 - RNA, 19 nt, Homo sapiens
  misc_RNA (1)...(19): siRNA sense strand
aaagacggcucgaaauucu

SEQ ID NO: 599299 - RNA, 19 nt, Homo sapiens
  misc_RNA (1)...(19): siRNA sense strand
gcauugagacauuuaaaca

SEQ ID NO: 599300 - RNA, 19 nt, Homo sapiens
  misc_RNA (1)...(19): siRNA sense strand
gagcaccgaagaagugaaa

SEQ ID NO: 599301 - RNA, 19 nt, Homo sapiens
  misc_RNA (1)...(19): siRNA sense strand
gaaaagcgaaaaguaguua

SEQ ID NO: 599302 - RNA, 19 nt, Homo sapiens
  misc_RNA (1)...(19): siRNA sense strand
aaccaugcauuucuuauuc

SEQ ID NO: 599303 - RNA, 19 nt, Homo sapiens
  misc_RNA (1)...(19): siRNA sense strand
ucauuucucccaaggaaua

SEQ ID NO: 599304 - RNA, 19 nt, Homo sapiens
  misc_RNA (1)...(19): siRNA sense strand
uuaagaagaaugaccauga

SEQ ID NO: 599305 - RNA, 19 nt, Homo sapiens
  misc_RNA (1)...(19): siRNA sense strand
agauaaaccucuacuugca

SEQ ID NO: 599306 - RNA, 19 nt, Homo sapiens
  misc_RNA (1)...(19): siRNA sense strand
gagcauugagacauuuaaa

SEQ ID NO: 599307 - RNA, 19 nt, Homo sapiens
  misc_RNA (1)...(19): siRNA sense strand
gauaugugcccuggagaaa

SEQ ID NO: 599308 - RNA, 19 nt, Homo sapiens
  misc_RNA (1)...(19): siRNA sense strand
uaaagacggcucgaaauuc

SEQ ID NO: 599309 - RNA, 19 nt, Homo sapiens
  misc_RNA (1)...(19): siRNA sense strand
gcuaaagacggcucgaaau

SEQ ID NO: 599310 - RNA, 19 nt, Homo sapiens
  misc_RNA (1)...(19): siRNA sense strand
gaugagaagccacgugaca

SEQ ID NO: 599311 - RNA, 19 nt, Homo sapiens
  misc_RNA (1)...(19): siRNA sense strand
auaaaccucuacuugcaaa

SEQ ID NO: 599312 - RNA, 19 nt, Homo sapiens
  misc_RNA (1)...(19): siRNA sense strand
gauaaaccucuacuugcaa

SEQ ID NO: 599313 - RNA, 19 nt, Homo sapiens
  misc_RNA (1)...(19): siRNA sense strand
caaaggaccacggagcauu

SEQ ID NO: 599314 - RNA, 19 nt, Homo sapiens
  misc_RNA (1)...(19): siRNA sense strand
gcucuaagacaagcaagaa

SEQ ID NO: 599315 - RNA, 19 nt, Homo sapiens
  misc_RNA (1)...(19): siRNA sense strand
caaauagacauggacaaug

SEQ ID NO: 599316 - RNA, 19 nt, Homo sapiens
  misc_RNA (1)...(19): siRNA sense strand
cuucauuucucccaaggaa

SEQ ID NO: 599317 - RNA, 19 nt, Homo sapiens
  misc_RNA (1)...(19): siRNA sense strand
gacauugcuaugacagaua

SEQ ID NO: 599318 - RNA, 19 nt, Homo sapiens
  misc_RNA (1)...(19): siRNA sense strand
ugauggugauggcuucauu

SEQ ID NO: 599319 - RNA, 19 nt, Homo sapiens
  misc_RNA (1)...(19): siRNA sense strand
ggaccacggagcauugaga

SEQ ID NO: 599320 - RNA, 19 nt, Homo sapiens
  misc_RNA (1)...(19): siRNA sense strand
acauugcuaugacagauau

SEQ ID NO: 599321 - RNA, 19 nt, Homo sapiens
  misc_RNA (1)...(19): siRNA sense strand
cauaaaaggccuagacauu

SEQ ID NO: 599322 - RNA, 19 nt, Homo sapiens
  misc_RNA (1)...(19): siRNA sense strand
acaggcagcucucuaaagc

SEQ ID NO: 599323 - RNA, 19 nt, Homo sapiens
  misc_RNA (1)...(19): siRNA sense strand
cacggagcauugagacauu

SEQ ID NO: 599324 - RNA, 19 nt, Homo sapiens
  misc_RNA (1)...(19): siRNA sense strand
gaggagagcaccgaagaag

SEQ ID NO: 599325 - RNA, 19 nt, Homo sapiens
  misc_RNA (1)...(19): siRNA sense strand
caauguauaccaacacgau

SEQ ID NO: 599326 - RNA, 19 nt, Homo sapiens
  misc_RNA (1)...(19): siRNA sense strand
gauggugauggcuucauuu

SEQ ID NO: 599327 - RNA, 19 nt, Homo sapiens
  misc_RNA (1)...(19): siRNA sense strand
acggcuaccuggcuaaaga

SEQ ID NO: 599328 - RNA, 19 nt, Homo sapiens
  misc_RNA (1)...(19): siRNA sense strand
ccgaagaagugaaaauaga

SEQ ID NO: 599329 - RNA, 19 nt, Homo sapiens
  misc_RNA (1)...(19): siRNA sense strand
aagccgagauaaaccucua

SEQ ID NO: 599330 - RNA, 19 nt, Homo sapiens
  misc_RNA (1)...(19): siRNA sense strand
acaaauagacauggacaau

SEQ ID NO: 599331 - RNA, 19 nt, Homo sapiens
  misc_RNA (1)...(19): siRNA sense strand
ggagcauugagacauuuaa

SEQ ID NO: 599332 - RNA, 19 nt, Homo sapiens
  misc_RNA (1)...(19): siRNA sense strand
ggagaaaagcgaaaaguag

SEQ ID NO: 599333 - RNA, 19 nt, Homo sapiens
  misc_RNA (1)...(19): siRNA sense strand
ggcuaaagacggcucgaaa

SEQ ID NO: 599334 - RNA, 19 nt, Homo sapiens
  misc_RNA (1)...(19): siRNA sense strand
agacauugcuaugacagau

SEQ ID NO: 599335 - RNA, 19 nt, Homo sapiens
  misc_RNA (1)...(19): siRNA sense strand
aagaagggagaccuacuaa

SEQ ID NO: 599336 - RNA, 19 nt, Homo sapiens
  misc_RNA (1)...(19): siRNA sense strand
caagucauaucaggaugca

SEQ ID NO: 599337 - RNA, 19 nt, Homo sapiens
  misc_RNA (1)...(19): siRNA sense strand
ugacaggcagcucucuaaa

SEQ ID NO: 599338 - RNA, 19 nt, Homo sapiens
  misc_RNA (1)...(19): siRNA sense strand
auaccaacacgaugaacua

SEQ ID NO: 599339 - RNA, 19 nt, Homo sapiens
  misc_RNA (1)...(19): siRNA sense strand
aaaggaccacggagcauug

SEQ ID NO: 599340 - RNA, 19 nt, Homo sapiens
  misc_RNA (1)...(19): siRNA sense strand
agggagaccuacuaaaugc

SEQ ID NO: 599341 - RNA, 19 nt, Homo sapiens
  misc_RNA (1)...(19): siRNA sense strand
gagagcaccgaagaaguga

SEQ ID NO: 599342 - RNA, 19 nt, Homo sapiens
  misc_RNA (1)...(19): siRNA sense strand
ggccuagacauugcuauga

SEQ ID NO: 599343 - RNA, 19 nt, Homo sapiens
  misc_RNA (1)...(19): siRNA sense strand
aagggagaccuacuaaaug

SEQ ID NO: 599344 - RNA, 19 nt, Homo sapiens
  misc_RNA (1)...(19): siRNA sense strand
gguguugggcaagucauaa

SEQ ID NO: 599345 - RNA, 19 nt, Homo sapiens
  misc_RNA (1)...(19): siRNA sense strand
ggaugcaguuuuagaagau

SEQ ID NO: 599346 - RNA, 19 nt, Homo sapiens
  misc_RNA (1)...(19): siRNA sense strand
gcauuucuuauucagauuc

SEQ ID NO: 599347 - RNA, 19 nt, Homo sapiens
  misc_RNA (1)...(19): siRNA sense strand
gacaggcagcucucuaaag

SEQ ID NO: 599348 - RNA, 19 nt, Homo sapiens
  misc_RNA (1)...(19): siRNA sense strand
ccuagacauugcuaugaca

SEQ ID NO: 599349 - RNA, 19 nt, Homo sapiens
  misc_RNA (1)...(19): siRNA sense strand
gcaagaagggagaccuacu

SEQ ID NO: 599350 - RNA, 19 nt, Homo sapiens
  misc_RNA (1)...(19): siRNA sense strand
ccacggagcauugagacau

SEQ ID NO: 599351 - RNA, 19 nt, Homo sapiens
  misc_RNA (1)...(19): siRNA sense strand
aagaggagagcaccgaaga

SEQ ID NO: 599352 - RNA, 19 nt, Homo sapiens
  misc_RNA (1)...(19): siRNA sense strand
gagaagccacgugacaagu

SEQ ID NO: 599353 - RNA, 19 nt, Homo sapiens
  misc_RNA (1)...(19): siRNA sense strand
uaaaaggccuagacauugc

SEQ ID NO: 599354 - RNA, 19 nt, Homo sapiens
  misc_RNA (1)...(19): siRNA sense strand
gagaaaagcgaaaaguagu

SEQ ID NO: 599355 - RNA, 19 nt, Homo sapiens
  misc_RNA (1)...(19): siRNA sense strand
gaagggagaccuacuaaau

SEQ ID NO: 599356 - RNA, 19 nt, Homo sapiens
  misc_RNA (1)...(19): siRNA sense strand
aaauagacauggacaauga

SEQ ID NO: 599357 - RNA, 19 nt, Homo sapiens
  misc_RNA (1)...(19): siRNA sense strand
ccaacacgaugaacuauag

SEQ ID NO: 599358 - RNA, 19 nt, Homo sapiens
  misc_RNA (1)...(19): siRNA sense strand
ggagagcaccgaagaagug

SEQ ID NO: 599359 - RNA, 19 nt, Homo sapiens
  misc_RNA (1)...(19): siRNA sense strand
cgagauaaaccucuacuug

SEQ ID NO: 599360 - RNA, 19 nt, Homo sapiens
  misc_RNA (1)...(19): siRNA sense strand
ccagaaaacugcucuaaga

SEQ ID NO: 599361 - RNA, 19 nt, Homo sapiens
  misc_RNA (1)...(19): siRNA sense strand
gaaaacugcucuaagacaa

SEQ ID NO: 599362 - RNA, 19 nt, Homo sapiens
  misc_RNA (1)...(19): siRNA sense strand
uaagaagaaugaccaugau

SEQ ID NO: 599363 - RNA, 19 nt, Homo sapiens
  misc_RNA (1)...(19): siRNA sense strand
caagaagggagaccuacua

SEQ ID NO: 599364 - RNA, 19 nt, Homo sapiens
  misc_RNA (1)...(19): siRNA sense strand
ggugauggcuucauuucuc

SEQ ID NO: 599365 - RNA, 19 nt, Homo sapiens
  misc_RNA (1)...(19): siRNA sense strand
cuaaagacggcucgaaauu

SEQ ID NO: 599366 - RNA, 19 nt, Homo sapiens
  misc_RNA (1)...(19): siRNA sense strand
aaagacggcucgaaauucu

SEQ ID NO: 599367 - RNA, 19 nt, Homo sapiens
  misc_RNA (1)...(19): siRNA sense strand
gcauugagacauuuaaaca

SEQ ID NO: 599368 - RNA, 19 nt, Homo sapiens
  misc_RNA (1)...(19): siRNA sense strand
gagcaccgaagaagugaaa

SEQ ID NO: 599369 - RNA, 19 nt, Homo sapiens
  misc_RNA (1)...(19): siRNA sense strand
gaaaagcgaaaaguaguua

SEQ ID NO: 599370 - RNA, 19 nt, Homo sapiens
  misc_RNA (1)...(19): siRNA sense strand
aaccaugcauuucuuauuc

SEQ ID NO: 599371 - RNA, 19 nt, Homo sapiens
  misc_RNA (1)...(19): siRNA sense strand
ucauuucucccaaggaaua

SEQ ID NO: 599372 - RNA, 19 nt, Homo sapiens
  misc_RNA (1)...(19): siRNA sense strand
uuaagaagaaugaccauga

SEQ ID NO: 599373 - RNA, 19 nt, Homo sapiens
  misc_RNA (1)...(19): siRNA sense strand
agauaaaccucuacuugca

SEQ ID NO: 599374 - RNA, 19 nt, Homo sapiens
  misc_RNA (1)...(19): siRNA sense strand
gagcauugagacauuuaaa

SEQ ID NO: 599375 - RNA, 19 nt, Homo sapiens
  misc_RNA (1)...(19): siRNA sense strand
gauaugugcccuggagaaa

SEQ ID NO: 599376 - RNA, 19 nt, Homo sapiens
  misc_RNA (1)...(19): siRNA sense strand
uaaagacggcucgaaauuc

SEQ ID NO: 599377 - RNA, 19 nt, Homo sapiens
  misc_RNA (1)...(19): siRNA sense strand
gcuaaagacggcucgaaau

SEQ ID NO: 599378 - RNA, 19 nt, Homo sapiens
  misc_RNA (1)...(19): siRNA sense strand
gaugagaagccacgugaca

SEQ ID NO: 599379 - RNA, 19 nt, Homo sapiens
  misc_RNA (1)...(19): siRNA sense strand
auaaaccucuacuugcaaa

SEQ ID NO: 599380 - RNA, 19 nt, Homo sapiens
  misc_RNA (1)...(19): siRNA sense strand
gauaaaccucuacuugcaa

SEQ ID NO: 599381 - RNA, 19 nt, Homo sapiens
  misc_RNA (1)...(19): siRNA sense strand
caaaggaccacggagcauu

SEQ ID NO: 599382 - RNA, 19 nt, Homo sapiens
  misc_RNA (1)...(19): siRNA sense strand
gcucuaagacaagcaagaa

SEQ ID NO: 599383 - RNA, 19 nt, Homo sapiens
  misc_RNA (1)...(19): siRNA sense strand
caaauagacauggacaaug

SEQ ID NO: 599384 - RNA, 19 nt, Homo sapiens
  misc_RNA (1)...(19): siRNA sense strand
cuucauuucucccaaggaa

SEQ ID NO: 599385 - RNA, 19 nt, Homo sapiens
  misc_RNA (1)...(19): siRNA sense strand
gacauugcuaugacagaua

SEQ ID NO: 599386 - RNA, 19 nt, Homo sapiens
  misc_RNA (1)...(19): siRNA sense strand
ugauggugauggcuucauu

SEQ ID NO: 599387 - RNA, 19 nt, Homo sapiens
  misc_RNA (1)...(19): siRNA sense strand
ggaccacggagcauugaga

SEQ ID NO: 599388 - RNA, 19 nt, Homo sapiens
  misc_RNA (1)...(19): siRNA sense strand
acauugcuaugacagauau

SEQ ID NO: 599389 - RNA, 19 nt, Homo sapiens
  misc_RNA (1)...(19): siRNA sense strand
cauaaaaggccuagacauu

SEQ ID NO: 599390 - RNA, 19 nt, Homo sapiens
  misc_RNA (1)...(19): siRNA sense strand
acaggcagcucucuaaagc

SEQ ID NO: 599391 - RNA, 19 nt, Homo sapiens
  misc_RNA (1)...(19): siRNA sense strand
cacggagcauugagacauu

SEQ ID NO: 599392 - RNA, 19 nt, Homo sapiens
  misc_RNA (1)...(19): siRNA sense strand
gaggagagcaccgaagaag

SEQ ID NO: 599393 - RNA, 19 nt, Homo sapiens
  misc_RNA (1)...(19): siRNA sense strand
caauguauaccaacacgau

SEQ ID NO: 599394 - RNA, 19 nt, Homo sapiens
  misc_RNA (1)...(19): siRNA sense strand
gauggugauggcuucauuu

SEQ ID NO: 599395 - RNA, 19 nt, Homo sapiens
  misc_RNA (1)...(19): siRNA sense strand
acggcuaccuggcuaaaga

SEQ ID NO: 599396 - RNA, 19 nt, Homo sapiens
  misc_RNA (1)...(19): siRNA sense strand
ccgaagaagugaaaauaga

SEQ ID NO: 599397 - RNA, 19 nt, Homo sapiens
  misc_RNA (1)...(19): siRNA sense strand
aagccgagauaaaccucua

SEQ ID NO: 599398 - RNA, 19 nt, Homo sapiens
  misc_RNA (1)...(19): siRNA sense strand
acaaauagacauggacaau

SEQ ID NO: 599399 - RNA, 19 nt, Homo sapiens
  misc_RNA (1)...(19): siRNA sense strand
ggagcauugagacauuuaa

SEQ ID NO: 599400 - RNA, 19 nt, Homo sapiens
  misc_RNA (1)...(19): siRNA sense strand
ggagaaaagcgaaaaguag

SEQ ID NO: 599401 - RNA, 19 nt, Homo sapiens
  misc_RNA (1)...(19): siRNA sense strand
ggcuaaagacggcucgaaa

SEQ ID NO: 599402 - RNA, 19 nt, Homo sapiens
  misc_RNA (1)...(19): siRNA sense strand
agacauugcuaugacagau

SEQ ID NO: 599403 - RNA, 19 nt, Homo sapiens
  misc_RNA (1)...(19): siRNA sense strand
aagaagggagaccuacuaa

SEQ ID NO: 599404 - RNA, 19 nt, Homo sapiens
  misc_RNA (1)...(19): siRNA sense strand
caagucauaucaggaugca

SEQ ID NO: 599405 - RNA, 19 nt, Homo sapiens
  misc_RNA (1)...(19): siRNA sense strand
ugacaggcagcucucuaaa

SEQ ID NO: 599406 - RNA, 19 nt, Homo sapiens
  misc_RNA (1)...(19): siRNA sense strand
auaccaacacgaugaacua

SEQ ID NO: 599407 - RNA, 19 nt, Homo sapiens
  misc_RNA (1)...(19): siRNA sense strand
aaaggaccacggagcauug

SEQ ID NO: 599408 - RNA, 19 nt, Homo sapiens
  misc_RNA (1)...(19): siRNA sense strand
agggagaccuacuaaaugc

SEQ ID NO: 599409 - RNA, 19 nt, Homo sapiens
  misc_RNA (1)...(19): siRNA sense strand
gagagcaccgaagaaguga

SEQ ID NO: 599410 - RNA, 19 nt, Homo sapiens
  misc_RNA (1)...(19): siRNA sense strand
ggccuagacauugcuauga

SEQ ID NO: 599411 - RNA, 19 nt, Homo sapiens
  misc_RNA (1)...(19): siRNA sense strand
aagggagaccuacuaaaug

SEQ ID NO: 599412 - RNA, 19 nt, Homo sapiens
  misc_RNA (1)...(19): siRNA sense strand
gguguugggcaagucauaa

SEQ ID NO: 599413 - RNA, 19 nt, Homo sapiens
  misc_RNA (1)...(19): siRNA sense strand
ggaugcaguuuuagaagau

SEQ ID NO: 599414 - RNA, 19 nt, Homo sapiens
  misc_RNA (1)...(19): siRNA sense strand
gcauuucuuauucagauuc

SEQ ID NO: 599415 - RNA, 19 nt, Homo sapiens
  misc_RNA (1)...(19): siRNA sense strand
gacaggcagcucucuaaag

SEQ ID NO: 599416 - RNA, 19 nt, Homo sapiens
  misc_RNA (1)...(19): siRNA sense strand
ccuagacauugcuaugaca

SEQ ID NO: 599417 - RNA, 19 nt, Homo sapiens
  misc_RNA (1)...(19): siRNA sense strand
gcaagaagggagaccuacu

SEQ ID NO: 599418 - RNA, 19 nt, Homo sapiens
  misc_RNA (1)...(19): siRNA sense strand
ccacggagcauugagacau

SEQ ID NO: 599419 - RNA, 19 nt, Homo sapiens
  misc_RNA (1)...(19): siRNA sense strand
aagaggagagcaccgaaga

SEQ ID NO: 599420 - RNA, 19 nt, Homo sapiens
  misc_RNA (1)...(19): siRNA sense strand
gagaagccacgugacaagu

SEQ ID NO: 599421 - RNA, 19 nt, Homo sapiens
  misc_RNA (1)...(19): siRNA sense strand
uaaaaggccuagacauugc

SEQ ID NO: 599422 - RNA, 19 nt, Homo sapiens
  misc_RNA (1)...(19): siRNA sense strand
gagaaaagcgaaaaguagu

SEQ ID NO: 599423 - RNA, 19 nt, Homo sapiens
  misc_RNA (1)...(19): siRNA sense strand
gaauauacccuccacaguu

SEQ ID NO: 599424 - RNA, 19 nt, Homo sapiens
  misc_RNA (1)...(19): siRNA sense strand
acacacagcuuugcacuuu

SEQ ID NO: 599425 - RNA, 19 nt, Homo sapiens
  misc_RNA (1)...(19): siRNA sense strand
gcaaauagauguggacacu

SEQ ID NO: 599426 - RNA, 19 nt, Homo sapiens
  misc_RNA (1)...(19): siRNA sense strand
cuacaaagccgaagucaau

SEQ ID NO: 599427 - RNA, 19 nt, Homo sapiens
  misc_RNA (1)...(19): siRNA sense strand
ccaaguuaguuaagagaaa

SEQ ID NO: 599428 - RNA, 19 nt, Homo sapiens
  misc_RNA (1)...(19): siRNA sense strand
gcuaccagcuccuguugaa

SEQ ID NO: 599429 - RNA, 19 nt, Homo sapiens
  misc_RNA (1)...(19): siRNA sense strand
uaagagaaauuuccuugag

SEQ ID NO: 599430 - RNA, 19 nt, Homo sapiens
  misc_RNA (1)...(19): siRNA sense strand
gaagaugagaauaugguuu

SEQ ID NO: 599431 - RNA, 19 nt, Homo sapiens
  misc_RNA (1)...(19): siRNA sense strand
ccaucucucugucuuguuu

SEQ ID NO: 599432 - RNA, 19 nt, Homo sapiens
  misc_RNA (1)...(19): siRNA sense strand
aaauagauguggacacugu

SEQ ID NO: 599433 - RNA, 19 nt, Homo sapiens
  misc_RNA (1)...(19): siRNA sense strand
guguuaagauccucuguga

SEQ ID NO: 599434 - RNA, 19 nt, Homo sapiens
  misc_RNA (1)...(19): siRNA sense strand
ggaccacaaugcuacaauc

SEQ ID NO: 599435 - RNA, 19 nt, Homo sapiens
  misc_RNA (1)...(19): siRNA sense strand
aagccaaucucauggauau

SEQ ID NO: 599436 - RNA, 19 nt, Homo sapiens
  misc_RNA (1)...(19): siRNA sense strand
gcucaauugcuacuccuua

SEQ ID NO: 599437 - RNA, 19 nt, Homo sapiens
  misc_RNA (1)...(19): siRNA sense strand
gcaugcugcuugacuacaa

SEQ ID NO: 599438 - RNA, 19 nt, Homo sapiens
  misc_RNA (1)...(19): siRNA sense strand
ggagcugccaaguuaguua

SEQ ID NO: 599439 - RNA, 19 nt, Homo sapiens
  misc_RNA (1)...(19): siRNA sense strand
ccacaaugcuacaaucaac

SEQ ID NO: 599440 - RNA, 19 nt, Homo sapiens
  misc_RNA (1)...(19): siRNA sense strand
gagaugacgacuuuaaauc

SEQ ID NO: 599441 - RNA, 19 nt, Homo sapiens
  misc_RNA (1)...(19): siRNA sense strand
gaugacgacuuuaaaucuc

SEQ ID NO: 599442 - RNA, 19 nt, Homo sapiens
  misc_RNA (1)...(19): siRNA sense strand
aauauacccuccacaguuc

SEQ ID NO: 599443 - RNA, 19 nt, Homo sapiens
  misc_RNA (1)...(19): siRNA sense strand
gaagccaaucucauggaua

SEQ ID NO: 599444 - RNA, 19 nt, Homo sapiens
  misc_RNA (1)...(19): siRNA sense strand
uugccuagcuauaaauuga

SEQ ID NO: 599445 - RNA, 19 nt, Homo sapiens
  misc_RNA (1)...(19): siRNA sense strand
cuacugggcccuccgcuuu

SEQ ID NO: 599446 - RNA, 19 nt, Homo sapiens
  misc_RNA (1)...(19): siRNA sense strand
gagcugccaaguuaguuaa

SEQ ID NO: 599447 - RNA, 19 nt, Homo sapiens
  misc_RNA (1)...(19): siRNA sense strand
cgaagucaaugcccgagau

SEQ ID NO: 599448 - RNA, 19 nt, Homo sapiens
  misc_RNA (1)...(19): siRNA sense strand
uaaguggacacacagcuuu

SEQ ID NO: 599449 - RNA, 19 nt, Homo sapiens
  misc_RNA (1)...(19): siRNA sense strand
ugaaauggccaauguggau

SEQ ID NO: 599450 - RNA, 19 nt, Homo sapiens
  misc_RNA (1)...(19): siRNA sense strand
gaaauggccaauguggauu

SEQ ID NO: 599451 - RNA, 19 nt, Homo sapiens
  misc_RNA (1)...(19): siRNA sense strand
ggaaugucuucuggugcua

SEQ ID NO: 599452 - RNA, 19 nt, Homo sapiens
  misc_RNA (1)...(19): siRNA sense strand
ugcccgagaugacgacuuu

SEQ ID NO: 599453 - RNA, 19 nt, Homo sapiens
  misc_RNA (1)...(19): siRNA sense strand
cagcgugaaugcccacaug

SEQ ID NO: 599454 - RNA, 19 nt, Homo sapiens
  misc_RNA (1)...(19): siRNA sense strand
aucuggagcugccaaguua

SEQ ID NO: 599455 - RNA, 19 nt, Homo sapiens
  misc_RNA (1)...(19): siRNA sense strand
gaagaccaacaaccaagau

SEQ ID NO: 599456 - RNA, 19 nt, Homo sapiens
  misc_RNA (1)...(19): siRNA sense strand
cgagaugacgacuuuaaau

SEQ ID NO: 599457 - RNA, 19 nt, Homo sapiens
  misc_RNA (1)...(19): siRNA sense strand
gcuuuaaggagcaggagua

SEQ ID NO: 599458 - RNA, 19 nt, Homo sapiens
  misc_RNA (1)...(19): siRNA sense strand
gauccaaaggcaaauagau

SEQ ID NO: 599459 - RNA, 19 nt, Homo sapiens
  misc_RNA (1)...(19): siRNA sense strand
cgaagccaaucucauggau

SEQ ID NO: 599460 - RNA, 19 nt, Homo sapiens
  misc_RNA (1)...(19): siRNA sense strand
gaacaugaagaccaacaac

SEQ ID NO: 599461 - RNA, 19 nt, Homo sapiens
  misc_RNA (1)...(19): siRNA sense strand
cucaauugcuacuccuuaa

SEQ ID NO: 599462 - RNA, 19 nt, Homo sapiens
  misc_RNA (1)...(19): siRNA sense strand
guuacugguugccuagcua

SEQ ID NO: 599463 - RNA, 19 nt, Homo sapiens
  misc_RNA (1)...(19): siRNA sense strand
agucgaagaugagaauaug

SEQ ID NO: 599464 - RNA, 19 nt, Homo sapiens
  misc_RNA (1)...(19): siRNA sense strand
cuugugaaauggccaaugu

SEQ ID NO: 599465 - RNA, 19 nt, Homo sapiens
  misc_RNA (1)...(19): siRNA sense strand
gaagucgaagaugagaaua

SEQ ID NO: 599466 - RNA, 19 nt, Homo sapiens
  misc_RNA (1)...(19): siRNA sense strand
ccaaucucauggauaucaa

SEQ ID NO: 599467 - RNA, 19 nt, Homo sapiens
  misc_RNA (1)...(19): siRNA sense strand
ugaagucgaagaugagaau

SEQ ID NO: 599468 - RNA, 19 nt, Homo sapiens
  misc_RNA (1)...(19): siRNA sense strand
gaagucaaugcccgagaug

SEQ ID NO: 599469 - RNA, 19 nt, Homo sapiens
  misc_RNA (1)...(19): siRNA sense strand
cuacuggaccacaaugcua

SEQ ID NO: 599470 - RNA, 19 nt, Homo sapiens
  misc_RNA (1)...(19): siRNA sense strand
gcugugcugccauccagua

SEQ ID NO: 599471 - RNA, 19 nt, Homo sapiens
  misc_RNA (1)...(19): siRNA sense strand
ccaaugacuucggaaaauu

SEQ ID NO: 599472 - RNA, 19 nt, Homo sapiens
  misc_RNA (1)...(19): siRNA sense strand
gccgcaugcugcuugacua

SEQ ID NO: 599473 - RNA, 19 nt, Homo sapiens
  misc_RNA (1)...(19): siRNA sense strand
gcugccaaguuaguuaaga

SEQ ID NO: 599474 - RNA, 19 nt, Homo sapiens
  misc_RNA (1)...(19): siRNA sense strand
gaccacaaugcuacaauca

SEQ ID NO: 599475 - RNA, 19 nt, Homo sapiens
  misc_RNA (1)...(19): siRNA sense strand
cugguugccuagcuauaaa

SEQ ID NO: 599476 - RNA, 19 nt, Homo sapiens
  misc_RNA (1)...(19): siRNA sense strand
caugcugcuugacuacaaa

SEQ ID NO: 599477 - RNA, 19 nt, Homo sapiens
  misc_RNA (1)...(19): siRNA sense strand
caauugcuacuccuuaagu

SEQ ID NO: 599478 - RNA, 19 nt, Homo sapiens
  misc_RNA (1)...(19): siRNA sense strand
gccaaucucauggauauca

SEQ ID NO: 599479 - RNA, 19 nt, Homo sapiens
  misc_RNA (1)...(19): siRNA sense strand
aaucaacuguagacccaau

SEQ ID NO: 599480 - RNA, 19 nt, Homo sapiens
  misc_RNA (1)...(19): siRNA sense strand
ccacugccccugucacuaa

SEQ ID NO: 599481 - RNA, 19 nt, Homo sapiens
  misc_RNA (1)...(19): siRNA sense strand
cgaauauacccuccacagu

SEQ ID NO: 599482 - RNA, 19 nt, Homo sapiens
  misc_RNA (1)...(19): siRNA sense strand
agaccaacaaccaagauga

SEQ ID NO: 599483 - RNA, 19 nt, Homo sapiens
  misc_RNA (1)...(19): siRNA sense strand
caugaagaccaacaaccaa

SEQ ID NO: 599484 - RNA, 19 nt, Homo sapiens
  misc_RNA (1)...(19): siRNA sense strand
ccgagaugacgacuuuaaa

SEQ ID NO: 599485 - RNA, 19 nt, Homo sapiens
  misc_RNA (1)...(19): siRNA sense strand
ugaagaccaacaaccaaga

SEQ ID NO: 599486 - RNA, 19 nt, Homo sapiens
  misc_RNA (1)...(19): siRNA sense strand
uugaggcgcuaaaguccaa

SEQ ID NO: 599487 - RNA, 19 nt, Homo sapiens
  misc_RNA (1)...(19): siRNA sense strand
gaccaacaaccaagaugag

SEQ ID NO: 599488 - RNA, 19 nt, Homo sapiens
  misc_RNA (1)...(19): siRNA sense strand
cgccgaagccaaucucaug

SEQ ID NO: 599489 - RNA, 19 nt, Homo sapiens
  misc_RNA (1)...(19): siRNA sense strand
cccgagaugacgacuuuaa

SEQ ID NO: 599490 - RNA, 19 nt, Homo sapiens
  misc_RNA (1)...(19): siRNA sense strand
uuaaggagcaggaguacag

SEQ ID NO: 599491 - RNA, 19 nt, Homo sapiens
  misc_RNA (1)...(19): siRNA sense strand
auaaacaagguuacugguu

SEQ ID NO: 599492 - RNA, 19 nt, Homo sapiens
  misc_RNA (1)...(19): siRNA sense strand
cgaagaugagaauaugguu

SEQ ID NO: 599493 - RNA, 19 nt, Homo sapiens
  misc_RNA (1)...(19): siRNA sense strand
ccaaaggcaaauagaugug

SEQ ID NO: 599494 - RNA, 19 nt, Homo sapiens
  misc_RNA (1)...(19): siRNA sense strand
cauaguggacagcgugaau

SEQ ID NO: 599495 - RNA, 19 nt, Homo sapiens
  misc_RNA (1)...(19): siRNA sense strand
gcuuugcacuuuuguacaa

SEQ ID NO: 599496 - RNA, 19 nt, Homo sapiens
  misc_RNA (1)...(19): siRNA sense strand
acacagcuuugcacuuuug

SEQ ID NO: 599497 - RNA, 19 nt, Homo sapiens
  misc_RNA (1)...(19): siRNA sense strand
acugggcccuccgcuuuaa

SEQ ID NO: 599498 - RNA, 19 nt, Homo sapiens
  misc_RNA (1)...(19): siRNA sense strand
aaucuggagcugccaaguu

SEQ ID NO: 599499 - RNA, 19 nt, Homo sapiens
  misc_RNA (1)...(19): siRNA sense strand
gcugcccacuucggccuuu

SEQ ID NO: 599500 - RNA, 19 nt, Homo sapiens
  misc_RNA (1)...(19): siRNA sense strand
gaauauacccuccacaguu

SEQ ID NO: 599501 - RNA, 19 nt, Homo sapiens
  misc_RNA (1)...(19): siRNA sense strand
acacacagcuuugcacuuu

SEQ ID NO: 599502 - RNA, 19 nt, Homo sapiens
  misc_RNA (1)...(19): siRNA sense strand
gcaaauagauguggacacu

SEQ ID NO: 599503 - RNA, 19 nt, Homo sapiens
  misc_RNA (1)...(19): siRNA sense strand
cuacaaagccgaagucaau

SEQ ID NO: 599504 - RNA, 19 nt, Homo sapiens
  misc_RNA (1)...(19): siRNA sense strand
ccaaguuaguuaagagaaa

SEQ ID NO: 599505 - RNA, 19 nt, Homo sapiens
  misc_RNA (1)...(19): siRNA sense strand
gcuaccagcuccuguugaa

SEQ ID NO: 599506 - RNA, 19 nt, Homo sapiens
  misc_RNA (1)...(19): siRNA sense strand
uaagagaaauuuccuugag

SEQ ID NO: 599507 - RNA, 19 nt, Homo sapiens
  misc_RNA (1)...(19): siRNA sense strand
gaagaugagaauaugguuu

SEQ ID NO: 599508 - RNA, 19 nt, Homo sapiens
  misc_RNA (1)...(19): siRNA sense strand
ccaucucucugucuuguuu

SEQ ID NO: 599509 - RNA, 19 nt, Homo sapiens
  misc_RNA (1)...(19): siRNA sense strand
aaauagauguggacacugu

SEQ ID NO: 599510 - RNA, 19 nt, Homo sapiens
  misc_RNA (1)...(19): siRNA sense strand
guguuaagauccucuguga

SEQ ID NO: 599511 - RNA, 19 nt, Homo sapiens
  misc_RNA (1)...(19): siRNA sense strand
ggaccacaaugcuacaauc

SEQ ID NO: 599512 - RNA, 19 nt, Homo sapiens
  misc_RNA (1)...(19): siRNA sense strand
aagccaaucucauggauau

SEQ ID NO: 599513 - RNA, 19 nt, Homo sapiens
  misc_RNA (1)...(19): siRNA sense strand
gcucaauugcuacuccuua

SEQ ID NO: 599514 - RNA, 19 nt, Homo sapiens
  misc_RNA (1)...(19): siRNA sense strand
gcaugcugcuugacuacaa

SEQ ID NO: 599515 - RNA, 19 nt, Homo sapiens
  misc_RNA (1)...(19): siRNA sense strand
ggagcugccaaguuaguua

SEQ ID NO: 599516 - RNA, 19 nt, Homo sapiens
  misc_RNA (1)...(19): siRNA sense strand
ccacaaugcuacaaucaac

SEQ ID NO: 599517 - RNA, 19 nt, Homo sapiens
  misc_RNA (1)...(19): siRNA sense strand
gagaugacgacuuuaaauc

SEQ ID NO: 599518 - RNA, 19 nt, Homo sapiens
  misc_RNA (1)...(19): siRNA sense strand
gaugacgacuuuaaaucuc

SEQ ID NO: 599519 - RNA, 19 nt, Homo sapiens
  misc_RNA (1)...(19): siRNA sense strand
aauauacccuccacaguuc

SEQ ID NO: 599520 - RNA, 19 nt, Homo sapiens
  misc_RNA (1)...(19): siRNA sense strand
gaagccaaucucauggaua

SEQ ID NO: 599521 - RNA, 19 nt, Homo sapiens
  misc_RNA (1)...(19): siRNA sense strand
uugccuagcuauaaauuga

SEQ ID NO: 599522 - RNA, 19 nt, Homo sapiens
  misc_RNA (1)...(19): siRNA sense strand
cuacugggcccuccgcuuu

SEQ ID NO: 599523 - RNA, 19 nt, Homo sapiens
  misc_RNA (1)...(19): siRNA sense strand
gagcugccaaguuaguuaa

SEQ ID NO: 599524 - RNA, 19 nt, Homo sapiens
  misc_RNA (1)...(19): siRNA sense strand
cgaagucaaugcccgagau

SEQ ID NO: 599525 - RNA, 19 nt, Homo sapiens
  misc_RNA (1)...(19): siRNA sense strand
uaaguggacacacagcuuu

SEQ ID NO: 599526 - RNA, 19 nt, Homo sapiens
  misc_RNA (1)...(19): siRNA sense strand
ugaaauggccaauguggau

SEQ ID NO: 599527 - RNA, 19 nt, Homo sapiens
  misc_RNA (1)...(19): siRNA sense strand
gaaauggccaauguggauu

SEQ ID NO: 599528 - RNA, 19 nt, Homo sapiens
  misc_RNA (1)...(19): siRNA sense strand
ggaaugucuucuggugcua

SEQ ID NO: 599529 - RNA, 19 nt, Homo sapiens
  misc_RNA (1)...(19): siRNA sense strand
ugcccgagaugacgacuuu

SEQ ID NO: 599530 - RNA, 19 nt, Homo sapiens
  misc_RNA (1)...(19): siRNA sense strand
cagcgugaaugcccacaug

SEQ ID NO: 599531 - RNA, 19 nt, Homo sapiens
  misc_RNA (1)...(19): siRNA sense strand
aucuggagcugccaaguua

SEQ ID NO: 599532 - RNA, 19 nt, Homo sapiens
  misc_RNA (1)...(19): siRNA sense strand
gaagaccaacaaccaagau

SEQ ID NO: 599533 - RNA, 19 nt, Homo sapiens
  misc_RNA (1)...(19): siRNA sense strand
cgagaugacgacuuuaaau

SEQ ID NO: 599534 - RNA, 19 nt, Homo sapiens
  misc_RNA (1)...(19): siRNA sense strand
gcuuuaaggagcaggagua

SEQ ID NO: 599535 - RNA, 19 nt, Homo sapiens
  misc_RNA (1)...(19): siRNA sense strand
gauccaaaggcaaauagau

SEQ ID NO: 599536 - RNA, 19 nt, Homo sapiens
  misc_RNA (1)...(19): siRNA sense strand
cgaagccaaucucauggau

SEQ ID NO: 599537 - RNA, 19 nt, Homo sapiens
  misc_RNA (1)...(19): siRNA sense strand
gaacaugaagaccaacaac

SEQ ID NO: 599538 - RNA, 19 nt, Homo sapiens
  misc_RNA (1)...(19): siRNA sense strand
cucaauugcuacuccuuaa

SEQ ID NO: 599539 - RNA, 19 nt, Homo sapiens
  misc_RNA (1)...(19): siRNA sense strand
guuacugguugccuagcua

SEQ ID NO: 599540 - RNA, 19 nt, Homo sapiens
  misc_RNA (1)...(19): siRNA sense strand
agucgaagaugagaauaug

SEQ ID NO: 599541 - RNA, 19 nt, Homo sapiens
  misc_RNA (1)...(19): siRNA sense strand
cuugugaaauggccaaugu

SEQ ID NO: 599542 - RNA, 19 nt, Homo sapiens
  misc_RNA (1)...(19): siRNA sense strand
gaagucgaagaugagaaua

SEQ ID NO: 599543 - RNA, 19 nt, Homo sapiens
  misc_RNA (1)...(19): siRNA sense strand
ccaaucucauggauaucaa

SEQ ID NO: 599544 - RNA, 19 nt, Homo sapiens
  misc_RNA (1)...(19): siRNA sense strand
ugaagucgaagaugagaau

SEQ ID NO: 599545 - RNA, 19 nt, Homo sapiens
  misc_RNA (1)...(19): siRNA sense strand
gaagucaaugcccgagaug

SEQ ID NO: 599546 - RNA, 19 nt, Homo sapiens
  misc_RNA (1)...(19): siRNA sense strand
cuacuggaccacaaugcua

SEQ ID NO: 599547 - RNA, 19 nt, Homo sapiens
  misc_RNA (1)...(19): siRNA sense strand
gcugugcugccauccagua

SEQ ID NO: 599548 - RNA, 19 nt, Homo sapiens
  misc_RNA (1)...(19): siRNA sense strand
ccaaugacuucggaaaauu

SEQ ID NO: 599549 - RNA, 19 nt, Homo sapiens
  misc_RNA (1)...(19): siRNA sense strand
gccgcaugcugcuugacua

SEQ ID NO: 599550 - RNA, 19 nt, Homo sapiens
  misc_RNA (1)...(19): siRNA sense strand
gcugccaaguuaguuaaga

SEQ ID NO: 599551 - RNA, 19 nt, Homo sapiens
  misc_RNA (1)...(19): siRNA sense strand
gaccacaaugcuacaauca

SEQ ID NO: 599552 - RNA, 19 nt, Homo sapiens
  misc_RNA (1)...(19): siRNA sense strand
cugguugccuagcuauaaa

SEQ ID NO: 599553 - RNA, 19 nt, Homo sapiens
  misc_RNA (1)...(19): siRNA sense strand
caugcugcuugacuacaaa

SEQ ID NO: 599554 - RNA, 19 nt, Homo sapiens
  misc_RNA (1)...(19): siRNA sense strand
caauugcuacuccuuaagu

SEQ ID NO: 599555 - RNA, 19 nt, Homo sapiens
  misc_RNA (1)...(19): siRNA sense strand
gccaaucucauggauauca

SEQ ID NO: 599556 - RNA, 19 nt, Homo sapiens
  misc_RNA (1)...(19): siRNA sense strand
aaucaacuguagacccaau

SEQ ID NO: 599557 - RNA, 19 nt, Homo sapiens
  misc_RNA (1)...(19): siRNA sense strand
ccacugccccugucacuaa

SEQ ID NO: 599558 - RNA, 19 nt, Homo sapiens
  misc_RNA (1)...(19): siRNA sense strand
cgaauauacccuccacagu

SEQ ID NO: 599559 - RNA, 19 nt, Homo sapiens
  misc_RNA (1)...(19): siRNA sense strand
agaccaacaaccaagauga

SEQ ID NO: 599560 - RNA, 19 nt, Homo sapiens
  misc_RNA (1)...(19): siRNA sense strand
caugaagaccaacaaccaa

SEQ ID NO: 599561 - RNA, 19 nt, Homo sapiens
  misc_RNA (1)...(19): siRNA sense strand
ccgagaugacgacuuuaaa

SEQ ID NO: 599562 - RNA, 19 nt, Homo sapiens
  misc_RNA (1)...(19): siRNA sense strand
ugaagaccaacaaccaaga

SEQ ID NO: 599563 - RNA, 19 nt, Homo sapiens
  misc_RNA (1)...(19): siRNA sense strand
uugaggcgcuaaaguccaa

SEQ ID NO: 599564 - RNA, 19 nt, Homo sapiens
  misc_RNA (1)...(19): siRNA sense strand
gaccaacaaccaagaugag

SEQ ID NO: 599565 - RNA, 19 nt, Homo sapiens
  misc_RNA (1)...(19): siRNA sense strand
cgccgaagccaaucucaug

SEQ ID NO: 599566 - RNA, 19 nt, Homo sapiens
  misc_RNA (1)...(19): siRNA sense strand
cccgagaugacgacuuuaa

SEQ ID NO: 599567 - RNA, 19 nt, Homo sapiens
  misc_RNA (1)...(19): siRNA sense strand
uuaaggagcaggaguacag

SEQ ID NO: 599568 - RNA, 19 nt, Homo sapiens
  misc_RNA (1)...(19): siRNA sense strand
auaaacaagguuacugguu

SEQ ID NO: 599569 - RNA, 19 nt, Homo sapiens
  misc_RNA (1)...(19): siRNA sense strand
cgaagaugagaauaugguu

SEQ ID NO: 599570 - RNA, 19 nt, Homo sapiens
  misc_RNA (1)...(19): siRNA sense strand
ccaaaggcaaauagaugug

SEQ ID NO: 599571 - RNA, 19 nt, Homo sapiens
  misc_RNA (1)...(19): siRNA sense strand
cauaguggacagcgugaau

SEQ ID NO: 599572 - RNA, 19 nt, Homo sapiens
  misc_RNA (1)...(19): siRNA sense strand
gcuuugcacuuuuguacaa

SEQ ID NO: 599573 - RNA, 19 nt, Homo sapiens
  misc_RNA (1)...(19): siRNA sense strand
acacagcuuugcacuuuug

SEQ ID NO: 599574 - RNA, 19 nt, Homo sapiens
  misc_RNA (1)...(19): siRNA sense strand
acugggcccuccgcuuuaa

SEQ ID NO: 599575 - RNA, 19 nt, Homo sapiens
  misc_RNA (1)...(19): siRNA sense strand
aaucuggagcugccaaguu

SEQ ID NO: 599576 - RNA, 19 nt, Homo sapiens
  misc_RNA (1)...(19): siRNA sense strand
gcugcccacuucggccuuu

SEQ ID NO: 599577 - RNA, 19 nt, Homo sapiens
  misc_RNA (1)...(19): siRNA sense strand
gaacauuucugauagugaa

SEQ ID NO: 599578 - RNA, 19 nt, Homo sapiens
  misc_RNA (1)...(19): siRNA sense strand
gcacuuacaugcagauagu

SEQ ID NO: 599579 - RNA, 19 nt, Homo sapiens
  misc_RNA (1)...(19): siRNA sense strand
ccaaauacguggaagacaa

SEQ ID NO: 599580 - RNA, 19 nt, Homo sapiens
  misc_RNA (1)...(19): siRNA sense strand
gcacaucggugaccuucuc

SEQ ID NO: 599581 - RNA, 19 nt, Homo sapiens
  misc_RNA (1)...(19): siRNA sense strand
gcagaucggcuuucauguu

SEQ ID NO: 599582 - RNA, 19 nt, Homo sapiens
  misc_RNA (1)...(19): siRNA sense strand
ccaccaacauuugaggaua

SEQ ID NO: 599583 - RNA, 19 nt, Homo sapiens
  misc_RNA (1)...(19): siRNA sense strand
cagaucggcuuucauguuc

SEQ ID NO: 599584 - RNA, 19 nt, Homo sapiens
  misc_RNA (1)...(19): siRNA sense strand
gcuguuguaugcagauuug

SEQ ID NO: 599585 - RNA, 19 nt, Homo sapiens
  misc_RNA (1)...(19): siRNA sense strand
ugguggagcuggcaaauga

SEQ ID NO: 599586 - RNA, 19 nt, Homo sapiens
  misc_RNA (1)...(19): siRNA sense strand
gaugcugucucgaacaaug

SEQ ID NO: 599587 - RNA, 19 nt, Homo sapiens
  misc_RNA (1)...(19): siRNA sense strand
gagagaccuuugucgaguu

SEQ ID NO: 599588 - RNA, 19 nt, Homo sapiens
  misc_RNA (1)...(19): siRNA sense strand
guggaagacucgcacuauu

SEQ ID NO: 599589 - RNA, 19 nt, Homo sapiens
  misc_RNA (1)...(19): siRNA sense strand
cagcauaacuggccccuaa

SEQ ID NO: 599590 - RNA, 19 nt, Homo sapiens
  misc_RNA (1)...(19): siRNA sense strand
caaauacguggaagacaaa

SEQ ID NO: 599591 - RNA, 19 nt, Homo sapiens
  misc_RNA (1)...(19): siRNA sense strand
cauguucccuugcccgauu

SEQ ID NO: 599592 - RNA, 19 nt, Homo sapiens
  misc_RNA (1)...(19): siRNA sense strand
cagaacuggugaagaccua

SEQ ID NO: 599593 - RNA, 19 nt, Homo sapiens
  misc_RNA (1)...(19): siRNA sense strand
gaacuggugaagaccuauu

SEQ ID NO: 599594 - RNA, 19 nt, Homo sapiens
  misc_RNA (1)...(19): siRNA sense strand
guuccaagcuucaccuucu

SEQ ID NO: 599595 - RNA, 19 nt, Homo sapiens
  misc_RNA (1)...(19): siRNA sense strand
uggcagaacuggugaagac

SEQ ID NO: 599596 - RNA, 19 nt, Homo sapiens
  misc_RNA (1)...(19): siRNA sense strand
uccgagagguaacauauuc

SEQ ID NO: 599597 - RNA, 19 nt, Homo sapiens
  misc_RNA (1)...(19): siRNA sense strand
auaccgcgguugccuacua

SEQ ID NO: 599598 - RNA, 19 nt, Homo sapiens
  misc_RNA (1)...(19): siRNA sense strand
aagcggaucugcccuguac

SEQ ID NO: 599599 - RNA, 19 nt, Homo sapiens
  misc_RNA (1)...(19): siRNA sense strand
gaaguggagacccgagaga

SEQ ID NO: 599600 - RNA, 19 nt, Homo sapiens
  misc_RNA (1)...(19): siRNA sense strand
caaacggucuguggugaag

SEQ ID NO: 599601 - RNA, 19 nt, Homo sapiens
  misc_RNA (1)...(19): siRNA sense strand
cugagcagcuggccugguu

SEQ ID NO: 599602 - RNA, 19 nt, Homo sapiens
  misc_RNA (1)...(19): siRNA sense strand
ugcagcagcuucaaacugu

SEQ ID NO: 599603 - RNA, 19 nt, Homo sapiens
  misc_RNA (1)...(19): siRNA sense strand
gcagcagcuucaaacuguu

SEQ ID NO: 599604 - RNA, 19 nt, Homo sapiens
  misc_RNA (1)...(19): siRNA sense strand
aagaugcugucucgaacaa

SEQ ID NO: 599605 - RNA, 19 nt, Homo sapiens
  misc_RNA (1)...(19): siRNA sense strand
gaagaugcugucucgaaca

SEQ ID NO: 599606 - RNA, 19 nt, Homo sapiens
  misc_RNA (1)...(19): siRNA sense strand
ggggaaaacgaacaaguua

SEQ ID NO: 599607 - RNA, 19 nt, Homo sapiens
  misc_RNA (1)...(19): siRNA sense strand
gguugggugcugcgucuua

SEQ ID NO: 599608 - RNA, 19 nt, Homo sapiens
  misc_RNA (1)...(19): siRNA sense strand
guucugcaguugccaccaa

SEQ ID NO: 599609 - RNA, 19 nt, Homo sapiens
  misc_RNA (1)...(19): siRNA sense strand
guaugcagauuuggaugug

SEQ ID NO: 599610 - RNA, 19 nt, Homo sapiens
  misc_RNA (1)...(19): siRNA sense strand
ggaagacucgcacuauucg

SEQ ID NO: 599611 - RNA, 19 nt, Homo sapiens
  misc_RNA (1)...(19): siRNA sense strand
guugggugcugcgucuuaa

SEQ ID NO: 599612 - RNA, 19 nt, Homo sapiens
  misc_RNA (1)...(19): siRNA sense strand
cacuggagaugagaacauu

SEQ ID NO: 599613 - RNA, 19 nt, Homo sapiens
  misc_RNA (1)...(19): siRNA sense strand
ggaagacaaagagaagaug

SEQ ID NO: 599614 - RNA, 19 nt, Homo sapiens
  misc_RNA (1)...(19): siRNA sense strand
gguggaagacucgcacuau

SEQ ID NO: 599615 - RNA, 19 nt, Homo sapiens
  misc_RNA (1)...(19): siRNA sense strand
gaagcggaucugcccugua

SEQ ID NO: 599616 - RNA, 19 nt, Homo sapiens
  misc_RNA (1)...(19): siRNA sense strand
ggaugggacagcagaagug

SEQ ID NO: 599617 - RNA, 19 nt, Homo sapiens
  misc_RNA (1)...(19): siRNA sense strand
cuucugugccagccaaaua

SEQ ID NO: 599618 - RNA, 19 nt, Homo sapiens
  misc_RNA (1)...(19): siRNA sense strand
caccaacauuugaggauac

SEQ ID NO: 599619 - RNA, 19 nt, Homo sapiens
  misc_RNA (1)...(19): siRNA sense strand
caucacugcugcgacuuuc

SEQ ID NO: 599620 - RNA, 19 nt, Homo sapiens
  misc_RNA (1)...(19): siRNA sense strand
uggaagacucgcacuauuc

SEQ ID NO: 599621 - RNA, 19 nt, Homo sapiens
  misc_RNA (1)...(19): siRNA sense strand
cugcagaucggcuuucaug

SEQ ID NO: 599622 - RNA, 19 nt, Homo sapiens
  misc_RNA (1)...(19): siRNA sense strand
ggaaaacgaacaaguuagu

SEQ ID NO: 599623 - RNA, 19 nt, Homo sapiens
  misc_RNA (1)...(19): siRNA sense strand
gcagcuggccugguuacga

SEQ ID NO: 599624 - RNA, 19 nt, Homo sapiens
  misc_RNA (1)...(19): siRNA sense strand
ucaccugccgacagcauaa

SEQ ID NO: 599625 - RNA, 19 nt, Homo sapiens
  misc_RNA (1)...(19): siRNA sense strand
guuacgaguucugagacuu

SEQ ID NO: 599626 - RNA, 19 nt, Homo sapiens
  misc_RNA (1)...(19): siRNA sense strand
agagaccuuugucgaguuc

SEQ ID NO: 599627 - RNA, 19 nt, Homo sapiens
  misc_RNA (1)...(19): siRNA sense strand
guaacauauucccgaagca

SEQ ID NO: 599628 - RNA, 19 nt, Homo sapiens
  misc_RNA (1)...(19): siRNA sense strand
gaagcacaucggugaccuu

SEQ ID NO: 599629 - RNA, 19 nt, Homo sapiens
  misc_RNA (1)...(19): siRNA sense strand
ccuacuaccaacaggcaua

SEQ ID NO: 599630 - RNA, 19 nt, Homo sapiens
  misc_RNA (1)...(19): siRNA sense strand
augcagauuuggauguguu

SEQ ID NO: 599631 - RNA, 19 nt, Homo sapiens
  misc_RNA (1)...(19): siRNA sense strand
aaagaaggagguguugguu

SEQ ID NO: 599632 - RNA, 19 nt, Homo sapiens
  misc_RNA (1)...(19): siRNA sense strand
caaacuguuccaagcuuca

SEQ ID NO: 599633 - RNA, 19 nt, Homo sapiens
  misc_RNA (1)...(19): siRNA sense strand
ucugcacgcuguuguaugc

SEQ ID NO: 599634 - RNA, 19 nt, Homo sapiens
  misc_RNA (1)...(19): siRNA sense strand
gacaggcugccacgagugu

SEQ ID NO: 599635 - RNA, 19 nt, Homo sapiens
  misc_RNA (1)...(19): siRNA sense strand
aaggggaggugggaaauaa

SEQ ID NO: 599636 - RNA, 19 nt, Homo sapiens
  misc_RNA (1)...(19): siRNA sense strand
gaaggggaggugggaaaua

SEQ ID NO: 599637 - RNA, 19 nt, Homo sapiens
  misc_RNA (1)...(19): siRNA sense strand
uuacgaguucugagacuug

SEQ ID NO: 599638 - RNA, 19 nt, Homo sapiens
  misc_RNA (1)...(19): siRNA sense strand
agauauagcugauacagua

SEQ ID NO: 599639 - RNA, 19 nt, Homo sapiens
  misc_RNA (1)...(19): siRNA sense strand
ggagaaauccuucgaaaug

SEQ ID NO: 599640 - RNA, 19 nt, Homo sapiens
  misc_RNA (1)...(19): siRNA sense strand
caaaucaccuuuauuagca

SEQ ID NO: 599641 - RNA, 19 nt, Homo sapiens
  misc_RNA (1)...(19): siRNA sense strand
gaucagggucagaguauua

SEQ ID NO: 599642 - RNA, 19 nt, Homo sapiens
  misc_RNA (1)...(19): siRNA sense strand
gaaaauguccagaagauua

SEQ ID NO: 599643 - RNA, 19 nt, Homo sapiens
  misc_RNA (1)...(19): siRNA sense strand
uggcaaaucaccuuuauua

SEQ ID NO: 599644 - RNA, 19 nt, Homo sapiens
  misc_RNA (1)...(19): siRNA sense strand
agacagagauugcuuuaag

SEQ ID NO: 599645 - RNA, 19 nt, Homo sapiens
  misc_RNA (1)...(19): siRNA sense strand
gaagaucagggucagagua

SEQ ID NO: 599646 - RNA, 19 nt, Homo sapiens
  misc_RNA (1)...(19): siRNA sense strand
caaccacacucuaaaugga

SEQ ID NO: 599647 - RNA, 19 nt, Homo sapiens
  misc_RNA (1)...(19): siRNA sense strand
gcacagagagaauggaaga

SEQ ID NO: 599648 - RNA, 19 nt, Homo sapiens
  misc_RNA (1)...(19): siRNA sense strand
cagcacauauggacuauca

SEQ ID NO: 599649 - RNA, 19 nt, Homo sapiens
  misc_RNA (1)...(19): siRNA sense strand
gagaagugauuccuguaau

SEQ ID NO: 599650 - RNA, 19 nt, Homo sapiens
  misc_RNA (1)...(19): siRNA sense strand
ggagaagugauuccuguaa

SEQ ID NO: 599651 - RNA, 19 nt, Homo sapiens
  misc_RNA (1)...(19): siRNA sense strand
caagacagagauugcuuua

SEQ ID NO: 599652 - RNA, 19 nt, Homo sapiens
  misc_RNA (1)...(19): siRNA sense strand
uaauggaacugcuuucauc

SEQ ID NO: 599653 - RNA, 19 nt, Homo sapiens
  misc_RNA (1)...(19): siRNA sense strand
gaaaagggagugauuauug

SEQ ID NO: 599654 - RNA, 19 nt, Homo sapiens
  misc_RNA (1)...(19): siRNA sense strand
caguguuccugaagaaaua

SEQ ID NO: 599655 - RNA, 19 nt, Homo sapiens
  misc_RNA (1)...(19): siRNA sense strand
auacaguacucaaugauga

SEQ ID NO: 599656 - RNA, 19 nt, Homo sapiens
  misc_RNA (1)...(19): siRNA sense strand
cauagaguguguguugaua

SEQ ID NO: 599657 - RNA, 19 nt, Homo sapiens
  misc_RNA (1)...(19): siRNA sense strand
cauauaauccggaaaggaa

SEQ ID NO: 599658 - RNA, 19 nt, Homo sapiens
  misc_RNA (1)...(19): siRNA sense strand
gaguguguguugauagauu

SEQ ID NO: 599659 - RNA, 19 nt, Homo sapiens
  misc_RNA (1)...(19): siRNA sense strand
gaguggugcuauagaugua

SEQ ID NO: 599660 - RNA, 19 nt, Homo sapiens
  misc_RNA (1)...(19): siRNA sense strand
gcacauauggacuaucaau

SEQ ID NO: 599661 - RNA, 19 nt, Homo sapiens
  misc_RNA (1)...(19): siRNA sense strand
gcaaaucaccuuuauuagc

SEQ ID NO: 599662 - RNA, 19 nt, Homo sapiens
  misc_RNA (1)...(19): siRNA sense strand
ucaauuauacuuccacaga

SEQ ID NO: 599663 - RNA, 19 nt, Homo sapiens
  misc_RNA (1)...(19): siRNA sense strand
cagagagaauggaagauca

SEQ ID NO: 599664 - RNA, 19 nt, Homo sapiens
  misc_RNA (1)...(19): siRNA sense strand
ggaacugcuuucaucuaug

SEQ ID NO: 599665 - RNA, 19 nt, Homo sapiens
  misc_RNA (1)...(19): siRNA sense strand
gagaaauccuucgaaaugc

SEQ ID NO: 599666 - RNA, 19 nt, Homo sapiens
  misc_RNA (1)...(19): siRNA sense strand
agaagugauuccuguaaug

SEQ ID NO: 599667 - RNA, 19 nt, Homo sapiens
  misc_RNA (1)...(19): siRNA sense strand
uggaacugcuuucaucuau

SEQ ID NO: 599668 - RNA, 19 nt, Homo sapiens
  misc_RNA (1)...(19): siRNA sense strand
uagaguguguguugauaga

SEQ ID NO: 599669 - RNA, 19 nt, Homo sapiens
  misc_RNA (1)...(19): siRNA sense strand
gcauaaggaaagacaagaa

SEQ ID NO: 599670 - RNA, 19 nt, Homo sapiens
  misc_RNA (1)...(19): siRNA sense strand
gacagagauugcuuuaagu

SEQ ID NO: 599671 - RNA, 19 nt, Homo sapiens
  misc_RNA (1)...(19): siRNA sense strand
ggucagaguauuauuccaa

SEQ ID NO: 599672 - RNA, 19 nt, Homo sapiens
  misc_RNA (1)...(19): siRNA sense strand
cauaaggaaagacaagaaa

SEQ ID NO: 599673 - RNA, 19 nt, Homo sapiens
  misc_RNA (1)...(19): siRNA sense strand
cagcugucaugaaggcuuu

SEQ ID NO: 599674 - RNA, 19 nt, Homo sapiens
  misc_RNA (1)...(19): siRNA sense strand
gcagagaguggugcuauag

SEQ ID NO: 599675 - RNA, 19 nt, Homo sapiens
  misc_RNA (1)...(19): siRNA sense strand
ggacuaucaauuauacuuc

SEQ ID NO: 599676 - RNA, 19 nt, Homo sapiens
  misc_RNA (1)...(19): siRNA sense strand
agagaguggugcuauagau

SEQ ID NO: 599677 - RNA, 19 nt, Homo sapiens
  misc_RNA (1)...(19): siRNA sense strand
gcugauacaguacucaaug

SEQ ID NO: 599678 - RNA, 19 nt, Homo sapiens
  misc_RNA (1)...(19): siRNA sense strand
gaagugauuccuguaaugg

SEQ ID NO: 599679 - RNA, 19 nt, Homo sapiens
  misc_RNA (1)...(19): siRNA sense strand
gggagugauuauuguuuca

SEQ ID NO: 599680 - RNA, 19 nt, Homo sapiens
  misc_RNA (1)...(19): siRNA sense strand
gauacaguacucaaugaug

SEQ ID NO: 599681 - RNA, 19 nt, Homo sapiens
  misc_RNA (1)...(19): siRNA sense strand
ccaagacagagauugcuuu

SEQ ID NO: 599682 - RNA, 19 nt, Homo sapiens
  misc_RNA (1)...(19): siRNA sense strand
ggaaaggaagaauauggau

SEQ ID NO: 599683 - RNA, 19 nt, Homo sapiens
  misc_RNA (1)...(19): siRNA sense strand
aguguguguugauagauua

SEQ ID NO: 599684 - RNA, 19 nt, Homo sapiens
  misc_RNA (1)...(19): siRNA sense strand
cuucauagaguguguguug

SEQ ID NO: 599685 - RNA, 19 nt, Homo sapiens
  misc_RNA (1)...(19): siRNA sense strand
gacaauauucuugguccua

SEQ ID NO: 599686 - RNA, 19 nt, Homo sapiens
  misc_RNA (1)...(19): siRNA sense strand
cugauacaguacucaauga

SEQ ID NO: 599687 - RNA, 19 nt, Homo sapiens
  misc_RNA (1)...(19): siRNA sense strand
gagaguggugcuauagaug

SEQ ID NO: 599688 - RNA, 19 nt, Homo sapiens
  misc_RNA (1)...(19): siRNA sense strand
aacagguacuucucaguga

SEQ ID NO: 599689 - RNA, 19 nt, Homo sapiens
  misc_RNA (1)...(19): siRNA sense strand
caauauucuugguccuaga

SEQ ID NO: 599690 - RNA, 19 nt, Homo sapiens
  misc_RNA (1)...(19): siRNA sense strand
agaaauccuucgaaaugca

SEQ ID NO: 599691 - RNA, 19 nt, Homo sapiens
  misc_RNA (1)...(19): siRNA sense strand
gaguauuauuccaaugcuu

SEQ ID NO: 599692 - RNA, 19 nt, Homo sapiens
  misc_RNA (1)...(19): siRNA sense strand
auggagaaauccuucgaaa

SEQ ID NO: 599693 - RNA, 19 nt, Homo sapiens
  misc_RNA (1)...(19): siRNA sense strand
gucagaguauuauuccaau

SEQ ID NO: 599694 - RNA, 19 nt, Homo sapiens
  misc_RNA (1)...(19): siRNA sense strand
ugcagagaguggugcuaua

SEQ ID NO: 599695 - RNA, 19 nt, Homo sapiens
  misc_RNA (1)...(19): siRNA sense strand
gccaaccacacucuaaaug

SEQ ID NO: 599696 - RNA, 19 nt, Homo sapiens
  misc_RNA (1)...(19): siRNA sense strand
guggugcuauagauguaaa

SEQ ID NO: 599697 - RNA, 19 nt, Homo sapiens
  misc_RNA (1)...(19): siRNA sense strand
acacauauaauccggaaag

SEQ ID NO: 599698 - RNA, 19 nt, Homo sapiens
  misc_RNA (1)...(19): siRNA sense strand
guaauggaacugcuuucau

SEQ ID NO: 599699 - RNA, 19 nt, Homo sapiens
  misc_RNA (1)...(19): siRNA sense strand
gaaggcacagagagaaugg

SEQ ID NO: 599700 - RNA, 19 nt, Homo sapiens
  misc_RNA (1)...(19): siRNA sense strand
guuucuaccucccacuuca

SEQ ID NO: 599701 - RNA, 19 nt, Homo sapiens
  misc_RNA (1)...(19): siRNA sense strand
ucagaguauuauuccaaug

SEQ ID NO: 599702 - RNA, 19 nt, Homo sapiens
  misc_RNA (1)...(19): siRNA sense strand
gugauggagaaauaacuuu

SEQ ID NO: 599703 - RNA, 19 nt, Homo sapiens
  misc_RNA (1)...(19): siRNA sense strand
guacucaaugaugaugaua

SEQ ID NO: 599704 - RNA, 19 nt, Homo sapiens
  misc_RNA (1)...(19): siRNA sense strand
aagaaaauguccagaagau

SEQ ID NO: 599705 - RNA, 19 nt, Homo sapiens
  misc_RNA (1)...(19): siRNA sense strand
ucgcagcacauauggacua

SEQ ID NO: 599706 - RNA, 19 nt, Homo sapiens
  misc_RNA (1)...(19): siRNA sense strand
aaaagggagugauuauugu

SEQ ID NO: 599707 - RNA, 19 nt, Homo sapiens
  misc_RNA (1)...(19): siRNA sense strand
uccaaagacagaacaggua

SEQ ID NO: 599708 - RNA, 19 nt, Homo sapiens
  misc_RNA (1)...(19): siRNA sense strand
ccuagaguaaggcacauuu

SEQ ID NO: 599709 - RNA, 19 nt, Homo sapiens
  misc_RNA (1)...(19): siRNA sense strand
aguggcaaaucaccuuuau

SEQ ID NO: 599710 - RNA, 19 nt, Homo sapiens
  misc_RNA (1)...(19): siRNA sense strand
aauuauacuuccacagaca

SEQ ID NO: 599711 - RNA, 19 nt, Homo sapiens
  misc_RNA (1)...(19): siRNA sense strand
uauucuugguccuagagua

SEQ ID NO: 599712 - RNA, 19 nt, Homo sapiens
  misc_RNA (1)...(19): siRNA sense strand
ccaaccacacucuaaaugg

SEQ ID NO: 599713 - RNA, 19 nt, Homo sapiens
  misc_RNA (1)...(19): siRNA sense strand
cggaaaggaagaauaugga

SEQ ID NO: 599714 - RNA, 19 nt, Homo sapiens
  misc_RNA (1)...(19): siRNA sense strand
ugcuuuaaguggcaaauca

SEQ ID NO: 599715 - RNA, 19 nt, Homo sapiens
  misc_RNA (1)...(19): siRNA sense strand
uaaguggcaaaucaccuuu

SEQ ID NO: 599716 - RNA, 19 nt, Homo sapiens
  misc_RNA (1)...(19): siRNA sense strand
aaagggagugauuauuguu

SEQ ID NO: 599717 - RNA, 19 nt, Homo sapiens
  misc_RNA (1)...(19): siRNA sense strand
cacucuaaauggagaaauc

SEQ ID NO: 599718 - RNA, 19 nt, Homo sapiens
  misc_RNA (1)...(19): siRNA sense strand
acagagauugcuuuaagug

SEQ ID NO: 599719 - RNA, 19 nt, Homo sapiens
  misc_RNA (1)...(19): siRNA sense strand
aaagacagaacagguacuu

SEQ ID NO: 599720 - RNA, 19 nt, Homo sapiens
  misc_RNA (1)...(19): siRNA sense strand
ggcaaaucaccuuuauuag

SEQ ID NO: 599721 - RNA, 19 nt, Homo sapiens
  misc_RNA (1)...(19): siRNA sense strand
acagguacuucucagugau

SEQ ID NO: 599722 - RNA, 19 nt, Homo sapiens
  misc_RNA (1)...(19): siRNA sense strand
agggagugauuauuguuuc

SEQ ID NO: 599723 - RNA, 19 nt, Homo sapiens
  misc_RNA (1)...(19): siRNA sense strand
guuccugaagaaauagaua

SEQ ID NO: 599724 - RNA, 19 nt, Homo sapiens
  misc_RNA (1)...(19): siRNA sense strand
aagaucagggucagaguau

SEQ ID NO: 599725 - RNA, 19 nt, Homo sapiens
  misc_RNA (1)...(19): siRNA sense strand
cacauauggacuaucaauu

SEQ ID NO: 599726 - RNA, 19 nt, Homo sapiens
  misc_RNA (1)...(19): siRNA sense strand
cugaagaaauagauauagc

SEQ ID NO: 599727 - RNA, 19 nt, Homo sapiens
  misc_RNA (1)...(19): siRNA sense strand
uuagaaggcacagagagaa

SEQ ID NO: 599728 - RNA, 19 nt, Homo sapiens
  misc_RNA (1)...(19): siRNA sense strand
ggaugcauaaggaaagaca

SEQ ID NO: 599729 - RNA, 19 nt, Homo sapiens
  misc_RNA (1)...(19): siRNA sense strand
agauauagcugauacagua

SEQ ID NO: 599730 - RNA, 19 nt, Homo sapiens
  misc_RNA (1)...(19): siRNA sense strand
ggagaaauccuucgaaaug

SEQ ID NO: 599731 - RNA, 19 nt, Homo sapiens
  misc_RNA (1)...(19): siRNA sense strand
caaaucaccuuuauuagca

SEQ ID NO: 599732 - RNA, 19 nt, Homo sapiens
  misc_RNA (1)...(19): siRNA sense strand
gaucagggucagaguauua

SEQ ID NO: 599733 - RNA, 19 nt, Homo sapiens
  misc_RNA (1)...(19): siRNA sense strand
gaaaauguccagaagauua

SEQ ID NO: 599734 - RNA, 19 nt, Homo sapiens
  misc_RNA (1)...(19): siRNA sense strand
uggcaaaucaccuuuauua

SEQ ID NO: 599735 - RNA, 19 nt, Homo sapiens
  misc_RNA (1)...(19): siRNA sense strand
agacagagauugcuuuaag

SEQ ID NO: 599736 - RNA, 19 nt, Homo sapiens
  misc_RNA (1)...(19): siRNA sense strand
gaagaucagggucagagua

SEQ ID NO: 599737 - RNA, 19 nt, Homo sapiens
  misc_RNA (1)...(19): siRNA sense strand
caaccacacucuaaaugga

SEQ ID NO: 599738 - RNA, 19 nt, Homo sapiens
  misc_RNA (1)...(19): siRNA sense strand
gcacagagagaauggaaga

SEQ ID NO: 599739 - RNA, 19 nt, Homo sapiens
  misc_RNA (1)...(19): siRNA sense strand
cagcacauauggacuauca

SEQ ID NO: 599740 - RNA, 19 nt, Homo sapiens
  misc_RNA (1)...(19): siRNA sense strand
gagaagugauuccuguaau

SEQ ID NO: 599741 - RNA, 19 nt, Homo sapiens
  misc_RNA (1)...(19): siRNA sense strand
ggagaagugauuccuguaa

SEQ ID NO: 599742 - RNA, 19 nt, Homo sapiens
  misc_RNA (1)...(19): siRNA sense strand
caagacagagauugcuuua

SEQ ID NO: 599743 - RNA, 19 nt, Homo sapiens
  misc_RNA (1)...(19): siRNA sense strand
uaauggaacugcuuucauc

SEQ ID NO: 599744 - RNA, 19 nt, Homo sapiens
  misc_RNA (1)...(19): siRNA sense strand
gaaaagggagugauuauug

SEQ ID NO: 599745 - RNA, 19 nt, Homo sapiens
  misc_RNA (1)...(19): siRNA sense strand
caguguuccugaagaaaua

SEQ ID NO: 599746 - RNA, 19 nt, Homo sapiens
  misc_RNA (1)...(19): siRNA sense strand
auacaguacucaaugauga

SEQ ID NO: 599747 - RNA, 19 nt, Homo sapiens
  misc_RNA (1)...(19): siRNA sense strand
cauagaguguguguugaua

SEQ ID NO: 599748 - RNA, 19 nt, Homo sapiens
  misc_RNA (1)...(19): siRNA sense strand
cauauaauccggaaaggaa

SEQ ID NO: 599749 - RNA, 19 nt, Homo sapiens
  misc_RNA (1)...(19): siRNA sense strand
gaguguguguugauagauu

SEQ ID NO: 599750 - RNA, 19 nt, Homo sapiens
  misc_RNA (1)...(19): siRNA sense strand
gaguggugcuauagaugua

SEQ ID NO: 599751 - RNA, 19 nt, Homo sapiens
  misc_RNA (1)...(19): siRNA sense strand
gcacauauggacuaucaau

SEQ ID NO: 599752 - RNA, 19 nt, Homo sapiens
  misc_RNA (1)...(19): siRNA sense strand
gcaaaucaccuuuauuagc

SEQ ID NO: 599753 - RNA, 19 nt, Homo sapiens
  misc_RNA (1)...(19): siRNA sense strand
ucaauuauacuuccacaga

SEQ ID NO: 599754 - RNA, 19 nt, Homo sapiens
  misc_RNA (1)...(19): siRNA sense strand
cagagagaauggaagauca

SEQ ID NO: 599755 - RNA, 19 nt, Homo sapiens
  misc_RNA (1)...(19): siRNA sense strand
ggaacugcuuucaucuaug

SEQ ID NO: 599756 - RNA, 19 nt, Homo sapiens
  misc_RNA (1)...(19): siRNA sense strand
gagaaauccuucgaaaugc

SEQ ID NO: 599757 - RNA, 19 nt, Homo sapiens
  misc_RNA (1)...(19): siRNA sense strand
agaagugauuccuguaaug

SEQ ID NO: 599758 - RNA, 19 nt, Homo sapiens
  misc_RNA (1)...(19): siRNA sense strand
uggaacugcuuucaucuau

SEQ ID NO: 599759 - RNA, 19 nt, Homo sapiens
  misc_RNA (1)...(19): siRNA sense strand
uagaguguguguugauaga

SEQ ID NO: 599760 - RNA, 19 nt, Homo sapiens
  misc_RNA (1)...(19): siRNA sense strand
gcauaaggaaagacaagaa

SEQ ID NO: 599761 - RNA, 19 nt, Homo sapiens
  misc_RNA (1)...(19): siRNA sense strand
gacagagauugcuuuaagu

SEQ ID NO: 599762 - RNA, 19 nt, Homo sapiens
  misc_RNA (1)...(19): siRNA sense strand
ggucagaguauuauuccaa

SEQ ID NO: 599763 - RNA, 19 nt, Homo sapiens
  misc_RNA (1)...(19): siRNA sense strand
cauaaggaaagacaagaaa

SEQ ID NO: 599764 - RNA, 19 nt, Homo sapiens
  misc_RNA (1)...(19): siRNA sense strand
cagcugucaugaaggcuuu

SEQ ID NO: 599765 - RNA, 19 nt, Homo sapiens
  misc_RNA (1)...(19): siRNA sense strand
gcagagaguggugcuauag

SEQ ID NO: 599766 - RNA, 19 nt, Homo sapiens
  misc_RNA (1)...(19): siRNA sense strand
ggacuaucaauuauacuuc

SEQ ID NO: 599767 - RNA, 19 nt, Homo sapiens
  misc_RNA (1)...(19): siRNA sense strand
agagaguggugcuauagau

SEQ ID NO: 599768 - RNA, 19 nt, Homo sapiens
  misc_RNA (1)...(19): siRNA sense strand
gcugauacaguacucaaug

SEQ ID NO: 599769 - RNA, 19 nt, Homo sapiens
  misc_RNA (1)...(19): siRNA sense strand
gaagugauuccuguaaugg

SEQ ID NO: 599770 - RNA, 19 nt, Homo sapiens
  misc_RNA (1)...(19): siRNA sense strand
gggagugauuauuguuuca

SEQ ID NO: 599771 - RNA, 19 nt, Homo sapiens
  misc_RNA (1)...(19): siRNA sense strand
gauacaguacucaaugaug

SEQ ID NO: 599772 - RNA, 19 nt, Homo sapiens
  misc_RNA (1)...(19): siRNA sense strand
ccaagacagagauugcuuu

SEQ ID NO: 599773 - RNA, 19 nt, Homo sapiens
  misc_RNA (1)...(19): siRNA sense strand
ggaaaggaagaauauggau

SEQ ID NO: 599774 - RNA, 19 nt, Homo sapiens
  misc_RNA (1)...(19): siRNA sense strand
aguguguguugauagauua

SEQ ID NO: 599775 - RNA, 19 nt, Homo sapiens
  misc_RNA (1)...(19): siRNA sense strand
cuucauagaguguguguug

SEQ ID NO: 599776 - RNA, 19 nt, Homo sapiens
  misc_RNA (1)...(19): siRNA sense strand
gacaauauucuugguccua

SEQ ID NO: 599777 - RNA, 19 nt, Homo sapiens
  misc_RNA (1)...(19): siRNA sense strand
cugauacaguacucaauga

SEQ ID NO: 599778 - RNA, 19 nt, Homo sapiens
  misc_RNA (1)...(19): siRNA sense strand
gagaguggugcuauagaug

SEQ ID NO: 599779 - RNA, 19 nt, Homo sapiens
  misc_RNA (1)...(19): siRNA sense strand
aacagguacuucucaguga

SEQ ID NO: 599780 - RNA, 19 nt, Homo sapiens
  misc_RNA (1)...(19): siRNA sense strand
caauauucuugguccuaga

SEQ ID NO: 599781 - RNA, 19 nt, Homo sapiens
  misc_RNA (1)...(19): siRNA sense strand
agaaauccuucgaaaugca

SEQ ID NO: 599782 - RNA, 19 nt, Homo sapiens
  misc_RNA (1)...(19): siRNA sense strand
gaguauuauuccaaugcuu

SEQ ID NO: 599783 - RNA, 19 nt, Homo sapiens
  misc_RNA (1)...(19): siRNA sense strand
auggagaaauccuucgaaa

SEQ ID NO: 599784 - RNA, 19 nt, Homo sapiens
  misc_RNA (1)...(19): siRNA sense strand
gucagaguauuauuccaau

SEQ ID NO: 599785 - RNA, 19 nt, Homo sapiens
  misc_RNA (1)...(19): siRNA sense strand
ugcagagaguggugcuaua

SEQ ID NO: 599786 - RNA, 19 nt, Homo sapiens
  misc_RNA (1)...(19): siRNA sense strand
gccaaccacacucuaaaug

SEQ ID NO: 599787 - RNA, 19 nt, Homo sapiens
  misc_RNA (1)...(19): siRNA sense strand
guggugcuauagauguaaa

SEQ ID NO: 599788 - RNA, 19 nt, Homo sapiens
  misc_RNA (1)...(19): siRNA sense strand
acacauauaauccggaaag

SEQ ID NO: 599789 - RNA, 19 nt, Homo sapiens
  misc_RNA (1)...(19): siRNA sense strand
guaauggaacugcuuucau

SEQ ID NO: 599790 - RNA, 19 nt, Homo sapiens
  misc_RNA (1)...(19): siRNA sense strand
gaaggcacagagagaaugg

SEQ ID NO: 599791 - RNA, 19 nt, Homo sapiens
  misc_RNA (1)...(19): siRNA sense strand
guuucuaccucccacuuca

SEQ ID NO: 599792 - RNA, 19 nt, Homo sapiens
  misc_RNA (1)...(19): siRNA sense strand
ucagaguauuauuccaaug

SEQ ID NO: 599793 - RNA, 19 nt, Homo sapiens
  misc_RNA (1)...(19): siRNA sense strand
gugauggagaaauaacuuu

SEQ ID NO: 599794 - RNA, 19 nt, Homo sapiens
  misc_RNA (1)...(19): siRNA sense strand
guacucaaugaugaugaua

SEQ ID NO: 599795 - RNA, 19 nt, Homo sapiens
  misc_RNA (1)...(19): siRNA sense strand
aagaaaauguccagaagau

SEQ ID NO: 599796 - RNA, 19 nt, Homo sapiens
  misc_RNA (1)...(19): siRNA sense strand
ucgcagcacauauggacua

SEQ ID NO: 599797 - RNA, 19 nt, Homo sapiens
  misc_RNA (1)...(19): siRNA sense strand
aaaagggagugauuauugu

SEQ ID NO: 599798 - RNA, 19 nt, Homo sapiens
  misc_RNA (1)...(19): siRNA sense strand
uccaaagacagaacaggua

SEQ ID NO: 599799 - RNA, 19 nt, Homo sapiens
  misc_RNA (1)...(19): siRNA sense strand
ccuagaguaaggcacauuu

SEQ ID NO: 599800 - RNA, 19 nt, Homo sapiens
  misc_RNA (1)...(19): siRNA sense strand
aguggcaaaucaccuuuau

SEQ ID NO: 599801 - RNA, 19 nt, Homo sapiens
  misc_RNA (1)...(19): siRNA sense strand
aauuauacuuccacagaca

SEQ ID NO: 599802 - RNA, 19 nt, Homo sapiens
  misc_RNA (1)...(19): siRNA sense strand
uauucuugguccuagagua

SEQ ID NO: 599803 - RNA, 19 nt, Homo sapiens
  misc_RNA (1)...(19): siRNA sense strand
ccaaccacacucuaaaugg

SEQ ID NO: 599804 - RNA, 19 nt, Homo sapiens
  misc_RNA (1)...(19): siRNA sense strand
cggaaaggaagaauaugga

SEQ ID NO: 599805 - RNA, 19 nt, Homo sapiens
  misc_RNA (1)...(19): siRNA sense strand
ugcuuuaaguggcaaauca

SEQ ID NO: 599806 - RNA, 19 nt, Homo sapiens
  misc_RNA (1)...(19): siRNA sense strand
uaaguggcaaaucaccuuu

SEQ ID NO: 599807 - RNA, 19 nt, Homo sapiens
  misc_RNA (1)...(19): siRNA sense strand
aaagggagugauuauuguu

SEQ ID NO: 599808 - RNA, 19 nt, Homo sapiens
  misc_RNA (1)...(19): siRNA sense strand
cacucuaaauggagaaauc

SEQ ID NO: 599809 - RNA, 19 nt, Homo sapiens
  misc_RNA (1)...(19): siRNA sense strand
acagagauugcuuuaagug

SEQ ID NO: 599810 - RNA, 19 nt, Homo sapiens
  misc_RNA (1)...(19): siRNA sense strand
aaagacagaacagguacuu

SEQ ID NO: 599811 - RNA, 19 nt, Homo sapiens
  misc_RNA (1)...(19): siRNA sense strand
ggcaaaucaccuuuauuag

SEQ ID NO: 599812 - RNA, 19 nt, Homo sapiens
  misc_RNA (1)...(19): siRNA sense strand
acagguacuucucagugau

SEQ ID NO: 599813 - RNA, 19 nt, Homo sapiens
  misc_RNA (1)...(19): siRNA sense strand
agggagugauuauuguuuc

SEQ ID NO: 599814 - RNA, 19 nt, Homo sapiens
  misc_RNA (1)...(19): siRNA sense strand
guuccugaagaaauagaua

SEQ ID NO: 599815 - RNA, 19 nt, Homo sapiens
  misc_RNA (1)...(19): siRNA sense strand
aagaucagggucagaguau

SEQ ID NO: 599816 - RNA, 19 nt, Homo sapiens
  misc_RNA (1)...(19): siRNA sense strand
cacauauggacuaucaauu

SEQ ID NO: 599817 - RNA, 19 nt, Homo sapiens
  misc_RNA (1)...(19): siRNA sense strand
cugaagaaauagauauagc

SEQ ID NO: 599818 - RNA, 19 nt, Homo sapiens
  misc_RNA (1)...(19): siRNA sense strand
uuagaaggcacagagagaa

SEQ ID NO: 599819 - RNA, 19 nt, Homo sapiens
  misc_RNA (1)...(19): siRNA sense strand
ggaugcauaaggaaagaca

SEQ ID NO: 599820 - RNA, 19 nt, Homo sapiens
  misc_RNA (1)...(19): siRNA sense strand
gaagauaacuugucugcaa

SEQ ID NO: 599821 - RNA, 19 nt, Homo sapiens
  misc_RNA (1)...(19): siRNA sense strand
gaagguagaucagaagaua

SEQ ID NO: 599822 - RNA, 19 nt, Homo sapiens
  misc_RNA (1)...(19): siRNA sense strand
gcaaugaccucuucuugga

SEQ ID NO: 599823 - RNA, 19 nt, Homo sapiens
  misc_RNA (1)...(19): siRNA sense strand
ggaaaguccuggugguuga

SEQ ID NO: 599824 - RNA, 19 nt, Homo sapiens
  misc_RNA (1)...(19): siRNA sense strand
cccaagagcuguacaagaa

SEQ ID NO: 599825 - RNA, 19 nt, Homo sapiens
  misc_RNA (1)...(19): siRNA sense strand
gggcaaauauggaacuaug

SEQ ID NO: 599826 - RNA, 19 nt, Homo sapiens
  misc_RNA (1)...(19): siRNA sense strand
ccaccggcauugaggauua

SEQ ID NO: 599827 - RNA, 19 nt, Homo sapiens
  misc_RNA (1)...(19): siRNA sense strand
ccacagcaaugaccucuuc

SEQ ID NO: 599828 - RNA, 19 nt, Homo sapiens
  misc_RNA (1)...(19): siRNA sense strand
gagaguaacugggcauaca

SEQ ID NO: 599829 - RNA, 19 nt, Homo sapiens
  misc_RNA (1)...(19): siRNA sense strand
ggacaacugcagccugaaa

SEQ ID NO: 599830 - RNA, 19 nt, Homo sapiens
  misc_RNA (1)...(19): siRNA sense strand
gaacauggaacgggaggaa

SEQ ID NO: 599831 - RNA, 19 nt, Homo sapiens
  misc_RNA (1)...(19): siRNA sense strand
ugacacgcccuccaucuuu

SEQ ID NO: 599832 - RNA, 19 nt, Homo sapiens
  misc_RNA (1)...(19): siRNA sense strand
ggcccuggaugacuaugua

SEQ ID NO: 599833 - RNA, 19 nt, Homo sapiens
  misc_RNA (1)...(19): siRNA sense strand
caagagcuguacaagaaca

SEQ ID NO: 599834 - RNA, 19 nt, Homo sapiens
  misc_RNA (1)...(19): siRNA sense strand
gcagagcuccuggcuguga

SEQ ID NO: 599835 - RNA, 19 nt, Homo sapiens
  misc_RNA (1)...(19): siRNA sense strand
gacacgcccuccaucuuug

SEQ ID NO: 599836 - RNA, 19 nt, Homo sapiens
  misc_RNA (1)...(19): siRNA sense strand
ugagggagaacgagaguaa

SEQ ID NO: 599837 - RNA, 19 nt, Homo sapiens
  misc_RNA (1)...(19): siRNA sense strand
gaucagaagauaacuuguc

SEQ ID NO: 599838 - RNA, 19 nt, Homo sapiens
  misc_RNA (1)...(19): siRNA sense strand
ggaacuauggcugaaggua

SEQ ID NO: 599839 - RNA, 19 nt, Homo sapiens
  misc_RNA (1)...(19): siRNA sense strand
ggaugacuauguagcaaac

SEQ ID NO: 599840 - RNA, 19 nt, Homo sapiens
  misc_RNA (1)...(19): siRNA sense strand
guaccaggccaaaguggaa

SEQ ID NO: 599841 - RNA, 19 nt, Homo sapiens
  misc_RNA (1)...(19): siRNA sense strand
cagcaaugaccucuucuug

SEQ ID NO: 599842 - RNA, 19 nt, Homo sapiens
  misc_RNA (1)...(19): siRNA sense strand
agcaagagcugagggagaa

SEQ ID NO: 599843 - RNA, 19 nt, Homo sapiens
  misc_RNA (1)...(19): siRNA sense strand
uagaucagaagauaacuug

SEQ ID NO: 599844 - RNA, 19 nt, Homo sapiens
  misc_RNA (1)...(19): siRNA sense strand
gacauguggucauccucuu

SEQ ID NO: 599845 - RNA, 19 nt, Homo sapiens
  misc_RNA (1)...(19): siRNA sense strand
uggagaagcacaagcaaga

SEQ ID NO: 599846 - RNA, 19 nt, Homo sapiens
  misc_RNA (1)...(19): siRNA sense strand
gcccagcugcuccaaagaa

SEQ ID NO: 599847 - RNA, 19 nt, Homo sapiens
  misc_RNA (1)...(19): siRNA sense strand
guacugugccuucaacaac

SEQ ID NO: 599848 - RNA, 19 nt, Homo sapiens
  misc_RNA (1)...(19): siRNA sense strand
caacaccaccggcauugag

SEQ ID NO: 599849 - RNA, 19 nt, Homo sapiens
  misc_RNA (1)...(19): siRNA sense strand
uagcaaacacggacaacug

SEQ ID NO: 599850 - RNA, 19 nt, Homo sapiens
  misc_RNA (1)...(19): siRNA sense strand
aacuauggcugaagguaga

SEQ ID NO: 599851 - RNA, 19 nt, Homo sapiens
  misc_RNA (1)...(19): siRNA sense strand
gcaguaccaggccaaagug

SEQ ID NO: 599852 - RNA, 19 nt, Homo sapiens
  misc_RNA (1)...(19): siRNA sense strand
guagaucagaagauaacuu

SEQ ID NO: 599853 - RNA, 19 nt, Homo sapiens
  misc_RNA (1)...(19): siRNA sense strand
caaaacaggcugcgggaaa

SEQ ID NO: 599854 - RNA, 19 nt, Homo sapiens
  misc_RNA (1)...(19): siRNA sense strand
gcaacaccaccggcauuga

SEQ ID NO: 599855 - RNA, 19 nt, Homo sapiens
  misc_RNA (1)...(19): siRNA sense strand
uggaauggcagguggagaa

SEQ ID NO: 599856 - RNA, 19 nt, Homo sapiens
  misc_RNA (1)...(19): siRNA sense strand
acacaguggccaucaggaa

SEQ ID NO: 599857 - RNA, 19 nt, Homo sapiens
  misc_RNA (1)...(19): siRNA sense strand
gcuccuggcugugauugag

SEQ ID NO: 599858 - RNA, 19 nt, Homo sapiens
  misc_RNA (1)...(19): siRNA sense strand
ggcaguaccaggccaaagu

SEQ ID NO: 599859 - RNA, 19 nt, Homo sapiens
  misc_RNA (1)...(19): siRNA sense strand
aaaacaggcugcgggaaaa

SEQ ID NO: 599860 - RNA, 19 nt, Homo sapiens
  misc_RNA (1)...(19): siRNA sense strand
gguacugugccuucaacaa

SEQ ID NO: 599861 - RNA, 19 nt, Homo sapiens
  misc_RNA (1)...(19): siRNA sense strand
gugcgggagugugagagaa

SEQ ID NO: 599862 - RNA, 19 nt, Homo sapiens
  misc_RNA (1)...(19): siRNA sense strand
aauggcagguggagaagca

SEQ ID NO: 599863 - RNA, 19 nt, Homo sapiens
  misc_RNA (1)...(19): siRNA sense strand
ggacaggggccaugagaca

SEQ ID NO: 599864 - RNA, 19 nt, Homo sapiens
  misc_RNA (1)...(19): siRNA sense strand
ggacugcuaccugcucucu

SEQ ID NO: 599865 - RNA, 19 nt, Homo sapiens
  misc_RNA (1)...(19): siRNA sense strand
cuguucaucuuucauuaca

SEQ ID NO: 599866 - RNA, 19 nt, Homo sapiens
  misc_RNA (1)...(19): siRNA sense strand
gcuuuugcauuaugagauu

SEQ ID NO: 599867 - RNA, 19 nt, Homo sapiens
  misc_RNA (1)...(19): siRNA sense strand
gaagcagggugcacauauc

SEQ ID NO: 599868 - RNA, 19 nt, Homo sapiens
  misc_RNA (1)...(19): siRNA sense strand
gcggugauauuaccaaaca

SEQ ID NO: 599869 - RNA, 19 nt, Homo sapiens
  misc_RNA (1)...(19): siRNA sense strand
gacaagaagccaugcaaug

SEQ ID NO: 599870 - RNA, 19 nt, Homo sapiens
  misc_RNA (1)...(19): siRNA sense strand
gcagggugcacauaucauu

SEQ ID NO: 599871 - RNA, 19 nt, Homo sapiens
  misc_RNA (1)...(19): siRNA sense strand
gauggaaucuaugguugga

SEQ ID NO: 599872 - RNA, 19 nt, Homo sapiens
  misc_RNA (1)...(19): siRNA sense strand
caaggacaacucuaucuau

SEQ ID NO: 599873 - RNA, 19 nt, Homo sapiens
  misc_RNA (1)...(19): siRNA sense strand
gauauuaccaaacagaaca

SEQ ID NO: 599874 - RNA, 19 nt, Homo sapiens
  misc_RNA (1)...(19): siRNA sense strand
aagcuuugcuccugaugaa

SEQ ID NO: 599875 - RNA, 19 nt, Homo sapiens
  misc_RNA (1)...(19): siRNA sense strand
ccaaggacaacucuaucua

SEQ ID NO: 599876 - RNA, 19 nt, Homo sapiens
  misc_RNA (1)...(19): siRNA sense strand
aaggacaacucuaucuaug

SEQ ID NO: 599877 - RNA, 19 nt, Homo sapiens
  misc_RNA (1)...(19): siRNA sense strand
ggacaagaagccaugcaau

SEQ ID NO: 599878 - RNA, 19 nt, Homo sapiens
  misc_RNA (1)...(19): siRNA sense strand
caacacaccagugcaacaa

SEQ ID NO: 599879 - RNA, 19 nt, Homo sapiens
  misc_RNA (1)...(19): siRNA sense strand
gcacuggacacuuuuauug

SEQ ID NO: 599880 - RNA, 19 nt, Homo sapiens
  misc_RNA (1)...(19): siRNA sense strand
gaagcuuugcuccugauga

SEQ ID NO: 599881 - RNA, 19 nt, Homo sapiens
  misc_RNA (1)...(19): siRNA sense strand
cuaucuaugucguggcuaa

SEQ ID NO: 599882 - RNA, 19 nt, Homo sapiens
  misc_RNA (1)...(19): siRNA sense strand
cgaagcagggugcacauau

SEQ ID NO: 599883 - RNA, 19 nt, Homo sapiens
  misc_RNA (1)...(19): siRNA sense strand
uuaccaaacagaacagaaa

SEQ ID NO: 599884 - RNA, 19 nt, Homo sapiens
  misc_RNA (1)...(19): siRNA sense strand
uuggugcacuggacacuuu

SEQ ID NO: 599885 - RNA, 19 nt, Homo sapiens
  misc_RNA (1)...(19): siRNA sense strand
ucagcugccuggccaagga

SEQ ID NO: 599886 - RNA, 19 nt, Homo sapiens
  misc_RNA (1)...(19): siRNA sense strand
ucuaugucguggcuaauau

SEQ ID NO: 599887 - RNA, 19 nt, Homo sapiens
  misc_RNA (1)...(19): siRNA sense strand
ggugauauuaccaaacaga

SEQ ID NO: 599888 - RNA, 19 nt, Homo sapiens
  misc_RNA (1)...(19): siRNA sense strand
gcaacacaccagugcaaca

SEQ ID NO: 599889 - RNA, 19 nt, Homo sapiens
  misc_RNA (1)...(19): siRNA sense strand
ugagcaugcggugauauua

SEQ ID NO: 599890 - RNA, 19 nt, Homo sapiens
  misc_RNA (1)...(19): siRNA sense strand
acacaccagugcaacaaag

SEQ ID NO: 599891 - RNA, 19 nt, Homo sapiens
  misc_RNA (1)...(19): siRNA sense strand
gcgaagcagggugcacaua

SEQ ID NO: 599892 - RNA, 19 nt, Homo sapiens
  misc_RNA (1)...(19): siRNA sense strand
gagcaugcggugauauuac

SEQ ID NO: 599893 - RNA, 19 nt, Homo sapiens
  misc_RNA (1)...(19): siRNA sense strand
gaugaacaagaacauagau

SEQ ID NO: 599894 - RNA, 19 nt, Homo sapiens
  misc_RNA (1)...(19): siRNA sense strand
ggagagcauuuaccccuau

SEQ ID NO: 599895 - RNA, 19 nt, Homo sapiens
  misc_RNA (1)...(19): siRNA sense strand
ucaccagggagagcauuua

SEQ ID NO: 599896 - RNA, 19 nt, Homo sapiens
  misc_RNA (1)...(19): siRNA sense strand
cugauggccguuaccaaua

SEQ ID NO: 599897 - RNA, 19 nt, Homo sapiens
  misc_RNA (1)...(19): siRNA sense strand
uauaugagcaugcggugau

SEQ ID NO: 599898 - RNA, 19 nt, Homo sapiens
  misc_RNA (1)...(19): siRNA sense strand
cugaugugguguuugauuc

SEQ ID NO: 599899 - RNA, 19 nt, Homo sapiens
  misc_RNA (1)...(19): siRNA sense strand
ugauggccguuaccaauac

SEQ ID NO: 599900 - RNA, 19 nt, Homo sapiens
  misc_RNA (1)...(19): siRNA sense strand
ccugauggccguuaccaau

SEQ ID NO: 599901 - RNA, 19 nt, Homo sapiens
  misc_RNA (1)...(19): siRNA sense strand
gggacaagaagccaugcaa

SEQ ID NO: 599902 - RNA, 19 nt, Homo sapiens
  misc_RNA (1)...(19): siRNA sense strand
gauggccguuaccaauaca

SEQ ID NO: 599903 - RNA, 19 nt, Homo sapiens
  misc_RNA (1)...(19): siRNA sense strand
ccaauacaacacugaugug

SEQ ID NO: 599904 - RNA, 19 nt, Homo sapiens
  misc_RNA (1)...(19): siRNA sense strand
ugaugaacaagaacauaga

SEQ ID NO: 599905 - RNA, 19 nt, Homo sapiens
  misc_RNA (1)...(19): siRNA sense strand
gcauuuaccccuaucuaga

SEQ ID NO: 599906 - RNA, 19 nt, Homo sapiens
  misc_RNA (1)...(19): siRNA sense strand
aaucuaugguuggaucuuc

SEQ ID NO: 599907 - RNA, 19 nt, Homo sapiens
  misc_RNA (1)...(19): siRNA sense strand
gugauauuaccaaacagaa

SEQ ID NO: 599908 - RNA, 19 nt, Homo sapiens
  misc_RNA (1)...(19): siRNA sense strand
gaugugguguuugauucuc

SEQ ID NO: 599909 - RNA, 19 nt, Homo sapiens
  misc_RNA (1)...(19): siRNA sense strand
auaugagcaugcggugaua

SEQ ID NO: 599910 - RNA, 19 nt, Homo sapiens
  misc_RNA (1)...(19): siRNA sense strand
acaagaagccaugcaaugc

SEQ ID NO: 599911 - RNA, 19 nt, Homo sapiens
  misc_RNA (1)...(19): siRNA sense strand
gaagcagggugcacauauc

SEQ ID NO: 599912 - RNA, 19 nt, Homo sapiens
  misc_RNA (1)...(19): siRNA sense strand
gcggugauauuaccaaaca

SEQ ID NO: 599913 - RNA, 19 nt, Homo sapiens
  misc_RNA (1)...(19): siRNA sense strand
gcagggugcacauaucauu

SEQ ID NO: 599914 - RNA, 19 nt, Homo sapiens
  misc_RNA (1)...(19): siRNA sense strand
gauggaaucuaugguugga

SEQ ID NO: 599915 - RNA, 19 nt, Homo sapiens
  misc_RNA (1)...(19): siRNA sense strand
gauauuaccaaacagaaca

SEQ ID NO: 599916 - RNA, 19 nt, Homo sapiens
  misc_RNA (1)...(19): siRNA sense strand
aagcuuugcuccugaugaa

SEQ ID NO: 599917 - RNA, 19 nt, Homo sapiens
  misc_RNA (1)...(19): siRNA sense strand
gcacuggacacuuuuauug

SEQ ID NO: 599918 - RNA, 19 nt, Homo sapiens
  misc_RNA (1)...(19): siRNA sense strand
gaagcuuugcuccugauga

SEQ ID NO: 599919 - RNA, 19 nt, Homo sapiens
  misc_RNA (1)...(19): siRNA sense strand
cgaagcagggugcacauau

SEQ ID NO: 599920 - RNA, 19 nt, Homo sapiens
  misc_RNA (1)...(19): siRNA sense strand
uuaccaaacagaacagaaa

SEQ ID NO: 599921 - RNA, 19 nt, Homo sapiens
  misc_RNA (1)...(19): siRNA sense strand
uuggugcacuggacacuuu

SEQ ID NO: 599922 - RNA, 19 nt, Homo sapiens
  misc_RNA (1)...(19): siRNA sense strand
ggugauauuaccaaacaga

SEQ ID NO: 599923 - RNA, 19 nt, Homo sapiens
  misc_RNA (1)...(19): siRNA sense strand
ugagcaugcggugauauua

SEQ ID NO: 599924 - RNA, 19 nt, Homo sapiens
  misc_RNA (1)...(19): siRNA sense strand
gcgaagcagggugcacaua

SEQ ID NO: 599925 - RNA, 19 nt, Homo sapiens
  misc_RNA (1)...(19): siRNA sense strand
gagcaugcggugauauuac

SEQ ID NO: 599926 - RNA, 19 nt, Homo sapiens
  misc_RNA (1)...(19): siRNA sense strand
gaugaacaagaacauagau

SEQ ID NO: 599927 - RNA, 19 nt, Homo sapiens
  misc_RNA (1)...(19): siRNA sense strand
ggagagcauuuaccccuau

SEQ ID NO: 599928 - RNA, 19 nt, Homo sapiens
  misc_RNA (1)...(19): siRNA sense strand
ucaccagggagagcauuua

SEQ ID NO: 599929 - RNA, 19 nt, Homo sapiens
  misc_RNA (1)...(19): siRNA sense strand
uauaugagcaugcggugau

SEQ ID NO: 599930 - RNA, 19 nt, Homo sapiens
  misc_RNA (1)...(19): siRNA sense strand
ugaugaacaagaacauaga

SEQ ID NO: 599931 - RNA, 19 nt, Homo sapiens
  misc_RNA (1)...(19): siRNA sense strand
gcauuuaccccuaucuaga

SEQ ID NO: 599932 - RNA, 19 nt, Homo sapiens
  misc_RNA (1)...(19): siRNA sense strand
aaucuaugguuggaucuuc

SEQ ID NO: 599933 - RNA, 19 nt, Homo sapiens
  misc_RNA (1)...(19): siRNA sense strand
gugauauuaccaaacagaa

SEQ ID NO: 599934 - RNA, 19 nt, Homo sapiens
  misc_RNA (1)...(19): siRNA sense strand
auaugagcaugcggugaua

SEQ ID NO: 599935 - RNA, 19 nt, Homo sapiens
  misc_RNA (1)...(19): siRNA sense strand
gagcauacaucaacuuuaa

SEQ ID NO: 599936 - RNA, 19 nt, Homo sapiens
  misc_RNA (1)...(19): siRNA sense strand
caagagagaucgaauaaga

SEQ ID NO: 599937 - RNA, 19 nt, Homo sapiens
  misc_RNA (1)...(19): siRNA sense strand
ggagagaaauagaaagaaa

SEQ ID NO: 599938 - RNA, 19 nt, Homo sapiens
  misc_RNA (1)...(19): siRNA sense strand
caauaaaggucaggaauau

SEQ ID NO: 599939 - RNA, 19 nt, Homo sapiens
  misc_RNA (1)...(19): siRNA sense strand
gaaaggaggaggagagaaa

SEQ ID NO: 599940 - RNA, 19 nt, Homo sapiens
  misc_RNA (1)...(19): siRNA sense strand
gaagauuaccucccacuuu

SEQ ID NO: 599941 - RNA, 19 nt, Homo sapiens
  misc_RNA (1)...(19): siRNA sense strand
gaaagaaggcugaaaguac

SEQ ID NO: 599942 - RNA, 19 nt, Homo sapiens
  misc_RNA (1)...(19): siRNA sense strand
ggaauaucccgcuauagua

SEQ ID NO: 599943 - RNA, 19 nt, Homo sapiens
  misc_RNA (1)...(19): siRNA sense strand
gcgcauacuucgagaaaga

SEQ ID NO: 599944 - RNA, 19 nt, Homo sapiens
  misc_RNA (1)...(19): siRNA sense strand
ggaaagaaggcugaaagua

SEQ ID NO: 599945 - RNA, 19 nt, Homo sapiens
  misc_RNA (1)...(19): siRNA sense strand
gaaagugguauuagccaua

SEQ ID NO: 599946 - RNA, 19 nt, Homo sapiens
  misc_RNA (1)...(19): siRNA sense strand
caaagagaccugaagauga

SEQ ID NO: 599947 - RNA, 19 nt, Homo sapiens
  misc_RNA (1)...(19): siRNA sense strand
gaaaagagauaccaaaguc

SEQ ID NO: 599948 - RNA, 19 nt, Homo sapiens
  misc_RNA (1)...(19): siRNA sense strand
ucaggaauaucccgcuaua

SEQ ID NO: 599949 - RNA, 19 nt, Homo sapiens
  misc_RNA (1)...(19): siRNA sense strand
gaaaguacagaaucaauag

SEQ ID NO: 599950 - RNA, 19 nt, Homo sapiens
  misc_RNA (1)...(19): siRNA sense strand
gaaucucagugaugaaaga

SEQ ID NO: 599951 - RNA, 19 nt, Homo sapiens
  misc_RNA (1)...(19): siRNA sense strand
gaaauuggacaaagagaau

SEQ ID NO: 599952 - RNA, 19 nt, Homo sapiens
  misc_RNA (1)...(19): siRNA sense strand
gaagagaggaggaaaugga

SEQ ID NO: 599953 - RNA, 19 nt, Homo sapiens
  misc_RNA (1)...(19): siRNA sense strand
guccagcgaugcagcuuua

SEQ ID NO: 599954 - RNA, 19 nt, Homo sapiens
  misc_RNA (1)...(19): siRNA sense strand
gcaacaaggagaagaaaga

SEQ ID NO: 599955 - RNA, 19 nt, Homo sapiens
  misc_RNA (1)...(19): siRNA sense strand
aaagaaggcugaaaguaca

SEQ ID NO: 599956 - RNA, 19 nt, Homo sapiens
  misc_RNA (1)...(19): siRNA sense strand
ggaaaguuaugccacagau

SEQ ID NO: 599957 - RNA, 19 nt, Homo sapiens
  misc_RNA (1)...(19): siRNA sense strand
gaaggagcgcuaugagaaa

SEQ ID NO: 599958 - RNA, 19 nt, Homo sapiens
  misc_RNA (1)...(19): siRNA sense strand
aaagagaccugaagaugag

SEQ ID NO: 599959 - RNA, 19 nt, Homo sapiens
  misc_RNA (1)...(19): siRNA sense strand
aagauuaccucccacuuug

SEQ ID NO: 599960 - RNA, 19 nt, Homo sapiens
  misc_RNA (1)...(19): siRNA sense strand
ccagaaagggacaaauuaa

SEQ ID NO: 599961 - RNA, 19 nt, Homo sapiens
  misc_RNA (1)...(19): siRNA sense strand
ggaaauggaaagaagaaga

SEQ ID NO: 599962 - RNA, 19 nt, Homo sapiens
  misc_RNA (1)...(19): siRNA sense strand
gaaagaagaagagaaacga

SEQ ID NO: 599963 - RNA, 19 nt, Homo sapiens
  misc_RNA (1)...(19): siRNA sense strand
gaggagagaaauagaaaga

SEQ ID NO: 599964 - RNA, 19 nt, Homo sapiens
  misc_RNA (1)...(19): siRNA sense strand
gaaaguuaugccacagaua

SEQ ID NO: 599965 - RNA, 19 nt, Homo sapiens
  misc_RNA (1)...(19): siRNA sense strand
gaauaucccgcuauaguag

SEQ ID NO: 599966 - RNA, 19 nt, Homo sapiens
  misc_RNA (1)...(19): siRNA sense strand
gcagaaaggaagcaggaaa

SEQ ID NO: 599967 - RNA, 19 nt, Homo sapiens
  misc_RNA (1)...(19): siRNA sense strand
caccaagucuggagauuca

SEQ ID NO: 599968 - RNA, 19 nt, Homo sapiens
  misc_RNA (1)...(19): siRNA sense strand
ggucaagagagaucgaaua

SEQ ID NO: 599969 - RNA, 19 nt, Homo sapiens
  misc_RNA (1)...(19): siRNA sense strand
gaagauagacagaauucca

SEQ ID NO: 599970 - RNA, 19 nt, Homo sapiens
  misc_RNA (1)...(19): siRNA sense strand
gggaucgcuuugaugguua

SEQ ID NO: 599971 - RNA, 19 nt, Homo sapiens
  misc_RNA (1)...(19): siRNA sense strand
auagcgaacuuaaagauga

SEQ ID NO: 599972 - RNA, 19 nt, Homo sapiens
  misc_RNA (1)...(19): siRNA sense strand
acaauaaaggucaggaaua

SEQ ID NO: 599973 - RNA, 19 nt, Homo sapiens
  misc_RNA (1)...(19): siRNA sense strand
ucaauaggcagcucagaaa

SEQ ID NO: 599974 - RNA, 19 nt, Homo sapiens
  misc_RNA (1)...(19): siRNA sense strand
cgaugaugauccagaauau

SEQ ID NO: 599975 - RNA, 19 nt, Homo sapiens
  misc_RNA (1)...(19): siRNA sense strand
gcacaggccuaaggagaag

SEQ ID NO: 599976 - RNA, 19 nt, Homo sapiens
  misc_RNA (1)...(19): siRNA sense strand
ccaaagagaccugaagaug

SEQ ID NO: 599977 - RNA, 19 nt, Homo sapiens
  misc_RNA (1)...(19): siRNA sense strand
cagaaagggacaaauuaaa

SEQ ID NO: 599978 - RNA, 19 nt, Homo sapiens
  misc_RNA (1)...(19): siRNA sense strand
gaagaagagaggaggaaau

SEQ ID NO: 599979 - RNA, 19 nt, Homo sapiens
  misc_RNA (1)...(19): siRNA sense strand
uagaggaaauagaagcaaa

SEQ ID NO: 599980 - RNA, 19 nt, Homo sapiens
  misc_RNA (1)...(19): siRNA sense strand
gcaggaaagugguauuagc

SEQ ID NO: 599981 - RNA, 19 nt, Homo sapiens
  misc_RNA (1)...(19): siRNA sense strand
gaaagaagaaguggucaag

SEQ ID NO: 599982 - RNA, 19 nt, Homo sapiens
  misc_RNA (1)...(19): siRNA sense strand
gagcgcauacuucgagaaa

SEQ ID NO: 599983 - RNA, 19 nt, Homo sapiens
  misc_RNA (1)...(19): siRNA sense strand
ugccugagcaugauuauuu

SEQ ID NO: 599984 - RNA, 19 nt, Homo sapiens
  misc_RNA (1)...(19): siRNA sense strand
gucaagagagaucgaauaa

SEQ ID NO: 599985 - RNA, 19 nt, Homo sapiens
  misc_RNA (1)...(19): siRNA sense strand
gggacaaauuaaaggauga

SEQ ID NO: 599986 - RNA, 19 nt, Homo sapiens
  misc_RNA (1)...(19): siRNA sense strand
gaaagggacaaauuaaagg

SEQ ID NO: 599987 - RNA, 19 nt, Homo sapiens
  misc_RNA (1)...(19): siRNA sense strand
guucagggaucgcuuugau

SEQ ID NO: 599988 - RNA, 19 nt, Homo sapiens
  misc_RNA (1)...(19): siRNA sense strand
gaguuuguauccucauaug

SEQ ID NO: 599989 - RNA, 19 nt, Homo sapiens
  misc_RNA (1)...(19): siRNA sense strand
aggaacaucuucaaccuau

SEQ ID NO: 599990 - RNA, 19 nt, Homo sapiens
  misc_RNA (1)...(19): siRNA sense strand
agaaggagcgcuaugagaa

SEQ ID NO: 599991 - RNA, 19 nt, Homo sapiens
  misc_RNA (1)...(19): siRNA sense strand
gaucaggagcgcauacuuc

SEQ ID NO: 599992 - RNA, 19 nt, Homo sapiens
  misc_RNA (1)...(19): siRNA sense strand
aaggaugaaccaaagauua

SEQ ID NO: 599993 - RNA, 19 nt, Homo sapiens
  misc_RNA (1)...(19): siRNA sense strand
gaaauggaaagaagaagag

SEQ ID NO: 599994 - RNA, 19 nt, Homo sapiens
  misc_RNA (1)...(19): siRNA sense strand
gaggaaauggaaagaagaa

SEQ ID NO: 599995 - RNA, 19 nt, Homo sapiens
  misc_RNA (1)...(19): siRNA sense strand
aaaccaagaggacauuauu

SEQ ID NO: 599996 - RNA, 19 nt, Homo sapiens
  misc_RNA (1)...(19): siRNA sense strand
uaguagaauuugcaccuuu

SEQ ID NO: 599997 - RNA, 19 nt, Homo sapiens
  misc_RNA (1)...(19): siRNA sense strand
gaaaggaagcaggaaagug

SEQ ID NO: 599998 - RNA, 19 nt, Homo sapiens
  misc_RNA (1)...(19): siRNA sense strand
aaagacacacuucgggaua

SEQ ID NO: 599999 - RNA, 19 nt, Homo sapiens
  misc_RNA (1)...(19): siRNA sense strand
gaaagagccagugggcaaa

SEQ ID NO: 600000 - RNA, 19 nt, Homo sapiens
  misc_RNA (1)...(19): siRNA sense strand
gauccagaauauagaaagu

SEQ ID NO: 600001 - RNA, 19 nt, Homo sapiens
  misc_RNA (1)...(19): siRNA sense strand
guuuguauccucauaugua

SEQ ID NO: 600002 - RNA, 19 nt, Homo sapiens
  misc_RNA (1)...(19): siRNA sense strand
agacagaauuccagaaagg

SEQ ID NO: 600003 - RNA, 19 nt, Homo sapiens
  misc_RNA (1)...(19): siRNA sense strand
gcagagaaugagagaagaa

SEQ ID NO: 600004 - RNA, 19 nt, Homo sapiens
  misc_RNA (1)...(19): siRNA sense strand
ucgcuuugaugguuaugua

SEQ ID NO: 600005 - RNA, 19 nt, Homo sapiens
  misc_RNA (1)...(19): siRNA sense strand
aagaagaaguggucaagag

SEQ ID NO: 600006 - RNA, 19 nt, Homo sapiens
  misc_RNA (1)...(19): siRNA sense strand
gaugaugauccagaauaua

SEQ ID NO: 600007 - RNA, 19 nt, Homo sapiens
  misc_RNA (1)...(19): siRNA sense strand
uaucgaugaugauccagaa

SEQ ID NO: 600008 - RNA, 19 nt, Homo sapiens
  misc_RNA (1)...(19): siRNA sense strand
agagagaucgaauaagaaa

SEQ ID NO: 600009 - RNA, 19 nt, Homo sapiens
  misc_RNA (1)...(19): siRNA sense strand
caacaaggagaagaaagaa

SEQ ID NO: 600010 - RNA, 19 nt, Homo sapiens
  misc_RNA (1)...(19): siRNA sense strand
gaggaggagagaaauagaa

SEQ ID NO: 600011 - RNA, 19 nt, Homo sapiens
  misc_RNA (1)...(19): siRNA sense strand
aagaaguggucaagagaga

SEQ ID NO: 600012 - RNA, 19 nt, Homo sapiens
  misc_RNA (1)...(19): siRNA sense strand
gaacaucuucaaccuaugc

SEQ ID NO: 600013 - RNA, 19 nt, Homo sapiens
  misc_RNA (1)...(19): siRNA sense strand
gguuauguauuccuugaca

SEQ ID NO: 600014 - RNA, 19 nt, Homo sapiens
  misc_RNA (1)...(19): siRNA sense strand
caaauuaaaggaugaacca

SEQ ID NO: 600015 - RNA, 19 nt, Homo sapiens
  misc_RNA (1)...(19): siRNA sense strand
ggaggaaauggaaagaaga

SEQ ID NO: 600016 - RNA, 19 nt, Homo sapiens
  misc_RNA (1)...(19): siRNA sense strand
ugccacagauaaugagaaa

SEQ ID NO: 600017 - RNA, 19 nt, Homo sapiens
  misc_RNA (1)...(19): siRNA sense strand
cuaaugauacgaguuugua

SEQ ID NO: 600018 - RNA, 19 nt, Homo sapiens
  misc_RNA (1)...(19): siRNA sense strand
gaugauccagaauauagaa

SEQ ID NO: 600019 - RNA, 19 nt, Homo sapiens
  misc_RNA (1)...(19): siRNA sense strand
uccagaaagggacaaauua

SEQ ID NO: 600020 - RNA, 19 nt, Homo sapiens
  misc_RNA (1)...(19): siRNA sense strand
ggaaagauauagaaaagcu

SEQ ID NO: 600021 - RNA, 19 nt, Homo sapiens
  misc_RNA (1)...(19): siRNA sense strand
gaugagagcggcagagacu

SEQ ID NO: 600022 - RNA, 19 nt, Homo sapiens
  misc_RNA (1)...(19): siRNA sense strand
uagcgaacuuaaagaugaa

SEQ ID NO: 600023 - RNA, 19 nt, Homo sapiens
  misc_RNA (1)...(19): siRNA sense strand
aggaugaaccaaagauuaa

SEQ ID NO: 600024 - RNA, 19 nt, Homo sapiens
  misc_RNA (1)...(19): siRNA sense strand
gacaauaaaggucaggaau

SEQ ID NO: 600025 - RNA, 19 nt, Homo sapiens
  misc_RNA (1)...(19): siRNA sense strand
uaagcaggaucgcaacaag

SEQ ID NO: 600026 - RNA, 19 nt, Homo sapiens
  misc_RNA (1)...(19): siRNA sense strand
gauagcgaacuuaaagaug

SEQ ID NO: 600027 - RNA, 19 nt, Homo sapiens
  misc_RNA (1)...(19): siRNA sense strand
gagaagaagagaggaggaa

SEQ ID NO: 600028 - RNA, 19 nt, Homo sapiens
  misc_RNA (1)...(19): siRNA sense strand
agacacugcuagaggaaau

SEQ ID NO: 600029 - RNA, 19 nt, Homo sapiens
  misc_RNA (1)...(19): siRNA sense strand
ggacaaauuaaaggaugaa

SEQ ID NO: 600030 - RNA, 19 nt, Homo sapiens
  misc_RNA (1)...(19): siRNA sense strand
gaaguggucaagagagauc

SEQ ID NO: 600031 - RNA, 19 nt, Homo sapiens
  misc_RNA (1)...(19): siRNA sense strand
agacacacuucgggauaaa

SEQ ID NO: 600032 - RNA, 19 nt, Homo sapiens
  misc_RNA (1)...(19): siRNA sense strand
aagacacacuucgggauaa

SEQ ID NO: 600033 - RNA, 19 nt, Homo sapiens
  misc_RNA (1)...(19): siRNA sense strand
ggaacgggaauaugaacga

SEQ ID NO: 600034 - RNA, 19 nt, Homo sapiens
  misc_RNA (1)...(19): siRNA sense strand
gagaucgaauaagaaacaa

SEQ ID NO: 600035 - RNA, 19 nt, Homo sapiens
  misc_RNA (1)...(19): siRNA sense strand
gagcauacaucaacuuuaa

SEQ ID NO: 600036 - RNA, 19 nt, Homo sapiens
  misc_RNA (1)...(19): siRNA sense strand
caagagagaucgaauaaga

SEQ ID NO: 600037 - RNA, 19 nt, Homo sapiens
  misc_RNA (1)...(19): siRNA sense strand
ggagagaaauagaaagaaa

SEQ ID NO: 600038 - RNA, 19 nt, Homo sapiens
  misc_RNA (1)...(19): siRNA sense strand
caauaaaggucaggaauau

SEQ ID NO: 600039 - RNA, 19 nt, Homo sapiens
  misc_RNA (1)...(19): siRNA sense strand
gaaaggaggaggagagaaa

SEQ ID NO: 600040 - RNA, 19 nt, Homo sapiens
  misc_RNA (1)...(19): siRNA sense strand
gaagauuaccucccacuuu

SEQ ID NO: 600041 - RNA, 19 nt, Homo sapiens
  misc_RNA (1)...(19): siRNA sense strand
gaaagaaggcugaaaguac

SEQ ID NO: 600042 - RNA, 19 nt, Homo sapiens
  misc_RNA (1)...(19): siRNA sense strand
ggaauaucccgcuauagua

SEQ ID NO: 600043 - RNA, 19 nt, Homo sapiens
  misc_RNA (1)...(19): siRNA sense strand
gcgcauacuucgagaaaga

SEQ ID NO: 600044 - RNA, 19 nt, Homo sapiens
  misc_RNA (1)...(19): siRNA sense strand
ggaaagaaggcugaaagua

SEQ ID NO: 600045 - RNA, 19 nt, Homo sapiens
  misc_RNA (1)...(19): siRNA sense strand
gaaagugguauuagccaua

SEQ ID NO: 600046 - RNA, 19 nt, Homo sapiens
  misc_RNA (1)...(19): siRNA sense strand
caaagagaccugaagauga

SEQ ID NO: 600047 - RNA, 19 nt, Homo sapiens
  misc_RNA (1)...(19): siRNA sense strand
gaaaagagauaccaaaguc

SEQ ID NO: 600048 - RNA, 19 nt, Homo sapiens
  misc_RNA (1)...(19): siRNA sense strand
ucaggaauaucccgcuaua

SEQ ID NO: 600049 - RNA, 19 nt, Homo sapiens
  misc_RNA (1)...(19): siRNA sense strand
gaaaguacagaaucaauag

SEQ ID NO: 600050 - RNA, 19 nt, Homo sapiens
  misc_RNA (1)...(19): siRNA sense strand
gaaucucagugaugaaaga

SEQ ID NO: 600051 - RNA, 19 nt, Homo sapiens
  misc_RNA (1)...(19): siRNA sense strand
gaaauuggacaaagagaau

SEQ ID NO: 600052 - RNA, 19 nt, Homo sapiens
  misc_RNA (1)...(19): siRNA sense strand
gaagagaggaggaaaugga

SEQ ID NO: 600053 - RNA, 19 nt, Homo sapiens
  misc_RNA (1)...(19): siRNA sense strand
guccagcgaugcagcuuua

SEQ ID NO: 600054 - RNA, 19 nt, Homo sapiens
  misc_RNA (1)...(19): siRNA sense strand
gcaacaaggagaagaaaga

SEQ ID NO: 600055 - RNA, 19 nt, Homo sapiens
  misc_RNA (1)...(19): siRNA sense strand
aaagaaggcugaaaguaca

SEQ ID NO: 600056 - RNA, 19 nt, Homo sapiens
  misc_RNA (1)...(19): siRNA sense strand
ggaaaguuaugccacagau

SEQ ID NO: 600057 - RNA, 19 nt, Homo sapiens
  misc_RNA (1)...(19): siRNA sense strand
gaaggagcgcuaugagaaa

SEQ ID NO: 600058 - RNA, 19 nt, Homo sapiens
  misc_RNA (1)...(19): siRNA sense strand
aaagagaccugaagaugag

SEQ ID NO: 600059 - RNA, 19 nt, Homo sapiens
  misc_RNA (1)...(19): siRNA sense strand
aagauuaccucccacuuug

SEQ ID NO: 600060 - RNA, 19 nt, Homo sapiens
  misc_RNA (1)...(19): siRNA sense strand
ccagaaagggacaaauuaa

SEQ ID NO: 600061 - RNA, 19 nt, Homo sapiens
  misc_RNA (1)...(19): siRNA sense strand
ggaaauggaaagaagaaga

SEQ ID NO: 600062 - RNA, 19 nt, Homo sapiens
  misc_RNA (1)...(19): siRNA sense strand
gaaagaagaagagaaacga

SEQ ID NO: 600063 - RNA, 19 nt, Homo sapiens
  misc_RNA (1)...(19): siRNA sense strand
gaggagagaaauagaaaga

SEQ ID NO: 600064 - RNA, 19 nt, Homo sapiens
  misc_RNA (1)...(19): siRNA sense strand
gaaaguuaugccacagaua

SEQ ID NO: 600065 - RNA, 19 nt, Homo sapiens
  misc_RNA (1)...(19): siRNA sense strand
gaauaucccgcuauaguag

SEQ ID NO: 600066 - RNA, 19 nt, Homo sapiens
  misc_RNA (1)...(19): siRNA sense strand
gcagaaaggaagcaggaaa

SEQ ID NO: 600067 - RNA, 19 nt, Homo sapiens
  misc_RNA (1)...(19): siRNA sense strand
caccaagucuggagauuca

SEQ ID NO: 600068 - RNA, 19 nt, Homo sapiens
  misc_RNA (1)...(19): siRNA sense strand
ggucaagagagaucgaaua

SEQ ID NO: 600069 - RNA, 19 nt, Homo sapiens
  misc_RNA (1)...(19): siRNA sense strand
gaagauagacagaauucca

SEQ ID NO: 600070 - RNA, 19 nt, Homo sapiens
  misc_RNA (1)...(19): siRNA sense strand
gggaucgcuuugaugguua

SEQ ID NO: 600071 - RNA, 19 nt, Homo sapiens
  misc_RNA (1)...(19): siRNA sense strand
auagcgaacuuaaagauga

SEQ ID NO: 600072 - RNA, 19 nt, Homo sapiens
  misc_RNA (1)...(19): siRNA sense strand
acaauaaaggucaggaaua

SEQ ID NO: 600073 - RNA, 19 nt, Homo sapiens
  misc_RNA (1)...(19): siRNA sense strand
ucaauaggcagcucagaaa

SEQ ID NO: 600074 - RNA, 19 nt, Homo sapiens
  misc_RNA (1)...(19): siRNA sense strand
cgaugaugauccagaauau

SEQ ID NO: 600075 - RNA, 19 nt, Homo sapiens
  misc_RNA (1)...(19): siRNA sense strand
gcacaggccuaaggagaag

SEQ ID NO: 600076 - RNA, 19 nt, Homo sapiens
  misc_RNA (1)...(19): siRNA sense strand
ccaaagagaccugaagaug

SEQ ID NO: 600077 - RNA, 19 nt, Homo sapiens
  misc_RNA (1)...(19): siRNA sense strand
cagaaagggacaaauuaaa

SEQ ID NO: 600078 - RNA, 19 nt, Homo sapiens
  misc_RNA (1)...(19): siRNA sense strand
gaagaagagaggaggaaau

SEQ ID NO: 600079 - RNA, 19 nt, Homo sapiens
  misc_RNA (1)...(19): siRNA sense strand
uagaggaaauagaagcaaa

SEQ ID NO: 600080 - RNA, 19 nt, Homo sapiens
  misc_RNA (1)...(19): siRNA sense strand
gcaggaaagugguauuagc

SEQ ID NO: 600081 - RNA, 19 nt, Homo sapiens
  misc_RNA (1)...(19): siRNA sense strand
gaaagaagaaguggucaag

SEQ ID NO: 600082 - RNA, 19 nt, Homo sapiens
  misc_RNA (1)...(19): siRNA sense strand
gagcgcauacuucgagaaa

SEQ ID NO: 600083 - RNA, 19 nt, Homo sapiens
  misc_RNA (1)...(19): siRNA sense strand
ugccugagcaugauuauuu

SEQ ID NO: 600084 - RNA, 19 nt, Homo sapiens
  misc_RNA (1)...(19): siRNA sense strand
gucaagagagaucgaauaa

SEQ ID NO: 600085 - RNA, 19 nt, Homo sapiens
  misc_RNA (1)...(19): siRNA sense strand
gggacaaauuaaaggauga

SEQ ID NO: 600086 - RNA, 19 nt, Homo sapiens
  misc_RNA (1)...(19): siRNA sense strand
gaaagggacaaauuaaagg

SEQ ID NO: 600087 - RNA, 19 nt, Homo sapiens
  misc_RNA (1)...(19): siRNA sense strand
guucagggaucgcuuugau

SEQ ID NO: 600088 - RNA, 19 nt, Homo sapiens
  misc_RNA (1)...(19): siRNA sense strand
gaguuuguauccucauaug

SEQ ID NO: 600089 - RNA, 19 nt, Homo sapiens
  misc_RNA (1)...(19): siRNA sense strand
aggaacaucuucaaccuau

SEQ ID NO: 600090 - RNA, 19 nt, Homo sapiens
  misc_RNA (1)...(19): siRNA sense strand
agaaggagcgcuaugagaa

SEQ ID NO: 600091 - RNA, 19 nt, Homo sapiens
  misc_RNA (1)...(19): siRNA sense strand
gaucaggagcgcauacuuc

SEQ ID NO: 600092 - RNA, 19 nt, Homo sapiens
  misc_RNA (1)...(19): siRNA sense strand
aaggaugaaccaaagauua

SEQ ID NO: 600093 - RNA, 19 nt, Homo sapiens
  misc_RNA (1)...(19): siRNA sense strand
gaaauggaaagaagaagag

SEQ ID NO: 600094 - RNA, 19 nt, Homo sapiens
  misc_RNA (1)...(19): siRNA sense strand
gaggaaauggaaagaagaa

SEQ ID NO: 600095 - RNA, 19 nt, Homo sapiens
  misc_RNA (1)...(19): siRNA sense strand
aaaccaagaggacauuauu

SEQ ID NO: 600096 - RNA, 19 nt, Homo sapiens
  misc_RNA (1)...(19): siRNA sense strand
uaguagaauuugcaccuuu

SEQ ID NO: 600097 - RNA, 19 nt, Homo sapiens
  misc_RNA (1)...(19): siRNA sense strand
gaaaggaagcaggaaagug

SEQ ID NO: 600098 - RNA, 19 nt, Homo sapiens
  misc_RNA (1)...(19): siRNA sense strand
aaagacacacuucgggaua

SEQ ID NO: 600099 - RNA, 19 nt, Homo sapiens
  misc_RNA (1)...(19): siRNA sense strand
gaaagagccagugggcaaa

SEQ ID NO: 600100 - RNA, 19 nt, Homo sapiens
  misc_RNA (1)...(19): siRNA sense strand
gauccagaauauagaaagu

SEQ ID NO: 600101 - RNA, 19 nt, Homo sapiens
  misc_RNA (1)...(19): siRNA sense strand
guuuguauccucauaugua

SEQ ID NO: 600102 - RNA, 19 nt, Homo sapiens
  misc_RNA (1)...(19): siRNA sense strand
agacagaauuccagaaagg

SEQ ID NO: 600103 - RNA, 19 nt, Homo sapiens
  misc_RNA (1)...(19): siRNA sense strand
gcagagaaugagagaagaa

SEQ ID NO: 600104 - RNA, 19 nt, Homo sapiens
  misc_RNA (1)...(19): siRNA sense strand
ucgcuuugaugguuaugua

SEQ ID NO: 600105 - RNA, 19 nt, Homo sapiens
  misc_RNA (1)...(19): siRNA sense strand
aagaagaaguggucaagag

SEQ ID NO: 600106 - RNA, 19 nt, Homo sapiens
  misc_RNA (1)...(19): siRNA sense strand
gaugaugauccagaauaua

SEQ ID NO: 600107 - RNA, 19 nt, Homo sapiens
  misc_RNA (1)...(19): siRNA sense strand
uaucgaugaugauccagaa

SEQ ID NO: 600108 - RNA, 19 nt, Homo sapiens
  misc_RNA (1)...(19): siRNA sense strand
agagagaucgaauaagaaa

SEQ ID NO: 600109 - RNA, 19 nt, Homo sapiens
  misc_RNA (1)...(19): siRNA sense strand
caacaaggagaagaaagaa

SEQ ID NO: 600110 - RNA, 19 nt, Homo sapiens
  misc_RNA (1)...(19): siRNA sense strand
gaggaggagagaaauagaa

SEQ ID NO: 600111 - RNA, 19 nt, Homo sapiens
  misc_RNA (1)...(19): siRNA sense strand
aagaaguggucaagagaga

SEQ ID NO: 600112 - RNA, 19 nt, Homo sapiens
  misc_RNA (1)...(19): siRNA sense strand
gaacaucuucaaccuaugc

SEQ ID NO: 600113 - RNA, 19 nt, Homo sapiens
  misc_RNA (1)...(19): siRNA sense strand
gguuauguauuccuugaca

SEQ ID NO: 600114 - RNA, 19 nt, Homo sapiens
  misc_RNA (1)...(19): siRNA sense strand
caaauuaaaggaugaacca

SEQ ID NO: 600115 - RNA, 19 nt, Homo sapiens
  misc_RNA (1)...(19): siRNA sense strand
ggaggaaauggaaagaaga

SEQ ID NO: 600116 - RNA, 19 nt, Homo sapiens
  misc_RNA (1)...(19): siRNA sense strand
ugccacagauaaugagaaa

SEQ ID NO: 600117 - RNA, 19 nt, Homo sapiens
  misc_RNA (1)...(19): siRNA sense strand
cuaaugauacgaguuugua

SEQ ID NO: 600118 - RNA, 19 nt, Homo sapiens
  misc_RNA (1)...(19): siRNA sense strand
gaugauccagaauauagaa

SEQ ID NO: 600119 - RNA, 19 nt, Homo sapiens
  misc_RNA (1)...(19): siRNA sense strand
uccagaaagggacaaauua

SEQ ID NO: 600120 - RNA, 19 nt, Homo sapiens
  misc_RNA (1)...(19): siRNA sense strand
ggaaagauauagaaaagcu

SEQ ID NO: 600121 - RNA, 19 nt, Homo sapiens
  misc_RNA (1)...(19): siRNA sense strand
gaugagagcggcagagacu

SEQ ID NO: 600122 - RNA, 19 nt, Homo sapiens
  misc_RNA (1)...(19): siRNA sense strand
uagcgaacuuaaagaugaa

SEQ ID NO: 600123 - RNA, 19 nt, Homo sapiens
  misc_RNA (1)...(19): siRNA sense strand
aggaugaaccaaagauuaa

SEQ ID NO: 600124 - RNA, 19 nt, Homo sapiens
  misc_RNA (1)...(19): siRNA sense strand
gacaauaaaggucaggaau

SEQ ID NO: 600125 - RNA, 19 nt, Homo sapiens
  misc_RNA (1)...(19): siRNA sense strand
uaagcaggaucgcaacaag

SEQ ID NO: 600126 - RNA, 19 nt, Homo sapiens
  misc_RNA (1)...(19): siRNA sense strand
gauagcgaacuuaaagaug

SEQ ID NO: 600127 - RNA, 19 nt, Homo sapiens
  misc_RNA (1)...(19): siRNA sense strand
gagaagaagagaggaggaa

SEQ ID NO: 600128 - RNA, 19 nt, Homo sapiens
  misc_RNA (1)...(19): siRNA sense strand
agacacugcuagaggaaau

SEQ ID NO: 600129 - RNA, 19 nt, Homo sapiens
  misc_RNA (1)...(19): siRNA sense strand
ggacaaauuaaaggaugaa

SEQ ID NO: 600130 - RNA, 19 nt, Homo sapiens
  misc_RNA (1)...(19): siRNA sense strand
gaaguggucaagagagauc

SEQ ID NO: 600131 - RNA, 19 nt, Homo sapiens
  misc_RNA (1)...(19): siRNA sense strand
agacacacuucgggauaaa

SEQ ID NO: 600132 - RNA, 19 nt, Homo sapiens
  misc_RNA (1)...(19): siRNA sense strand
aagacacacuucgggauaa

SEQ ID NO: 600133 - RNA, 19 nt, Homo sapiens
  misc_RNA (1)...(19): siRNA sense strand
ggaacgggaauaugaacga

SEQ ID NO: 600134 - RNA, 19 nt, Homo sapiens
  misc_RNA (1)...(19): siRNA sense strand
gagaucgaauaagaaacaa

SEQ ID NO: 600135 - RNA, 19 nt, Homo sapiens
  misc_RNA (1)...(19): siRNA sense strand
gaagacauguuauauaguc

SEQ ID NO: 600136 - RNA, 19 nt, Homo sapiens
  misc_RNA (1)...(19): siRNA sense strand
ggacauggaucaagauaag

SEQ ID NO: 600137 - RNA, 19 nt, Homo sapiens
  misc_RNA (1)...(19): siRNA sense strand
caaaucagauggagaaagu

SEQ ID NO: 600138 - RNA, 19 nt, Homo sapiens
  misc_RNA (1)...(19): siRNA sense strand
gaagagggcucaacuuagc

SEQ ID NO: 600139 - RNA, 19 nt, Homo sapiens
  misc_RNA (1)...(19): siRNA sense strand
ggacggagaucuacaucau

SEQ ID NO: 600140 - RNA, 19 nt, Homo sapiens
  misc_RNA (1)...(19): siRNA sense strand
gcagauguauggccguaaa

SEQ ID NO: 600141 - RNA, 19 nt, Homo sapiens
  misc_RNA (1)...(19): siRNA sense strand
cagaagagggcucaacuua

SEQ ID NO: 600142 - RNA, 19 nt, Homo sapiens
  misc_RNA (1)...(19): siRNA sense strand
gaagagagaauuaaagaag

SEQ ID NO: 600143 - RNA, 19 nt, Homo sapiens
  misc_RNA (1)...(19): siRNA sense strand
ugagaaagcuagaaguaga

SEQ ID NO: 600144 - RNA, 19 nt, Homo sapiens
  misc_RNA (1)...(19): siRNA sense strand
gagaugaagacauguuaua

SEQ ID NO: 600145 - RNA, 19 nt, Homo sapiens
  misc_RNA (1)...(19): siRNA sense strand
ggaacugacuccucuucaa

SEQ ID NO: 600146 - RNA, 19 nt, Homo sapiens
  misc_RNA (1)...(19): siRNA sense strand
uggaugaaauggaguuuaa

SEQ ID NO: 600147 - RNA, 19 nt, Homo sapiens
  misc_RNA (1)...(19): siRNA sense strand
cgacaaaucagauggagaa

SEQ ID NO: 600148 - RNA, 19 nt, Homo sapiens
  misc_RNA (1)...(19): siRNA sense strand
ggacgaugaugaagaugau

SEQ ID NO: 600149 - RNA, 19 nt, Homo sapiens
  misc_RNA (1)...(19): siRNA sense strand
cgugaaaccuuugaacgua

SEQ ID NO: 600150 - RNA, 19 nt, Homo sapiens
  misc_RNA (1)...(19): siRNA sense strand
gacaugguguuccacguuu

SEQ ID NO: 600151 - RNA, 19 nt, Homo sapiens
  misc_RNA (1)...(19): siRNA sense strand
ggagaaauuggaugaaaug

SEQ ID NO: 600152 - RNA, 19 nt, Homo sapiens
  misc_RNA (1)...(19): siRNA sense strand
gcacauccacugcuucuuc

SEQ ID NO: 600153 - RNA, 19 nt, Homo sapiens
  misc_RNA (1)...(19): siRNA sense strand
gaaguagaauaugaacaga

SEQ ID NO: 600154 - RNA, 19 nt, Homo sapiens
  misc_RNA (1)...(19): siRNA sense strand
caacagccacaauuaaaug

SEQ ID NO: 600155 - RNA, 19 nt, Homo sapiens
  misc_RNA (1)...(19): siRNA sense strand
aggcagagauuacucgauu

SEQ ID NO: 600156 - RNA, 19 nt, Homo sapiens
  misc_RNA (1)...(19): siRNA sense strand
gaaagucagaggaugauuc

SEQ ID NO: 600157 - RNA, 19 nt, Homo sapiens
  misc_RNA (1)...(19): siRNA sense strand
agaaaguacugaaagacaa

SEQ ID NO: 600158 - RNA, 19 nt, Homo sapiens
  misc_RNA (1)...(19): siRNA sense strand
gcagagauuacucgauuug

SEQ ID NO: 600159 - RNA, 19 nt, Homo sapiens
  misc_RNA (1)...(19): siRNA sense strand
gcaacagccacaauuaaau

SEQ ID NO: 600160 - RNA, 19 nt, Homo sapiens
  misc_RNA (1)...(19): siRNA sense strand
gaauuugugcaccgugaua

SEQ ID NO: 600161 - RNA, 19 nt, Homo sapiens
  misc_RNA (1)...(19): siRNA sense strand
cagccacccucuauccuaa

SEQ ID NO: 600162 - RNA, 19 nt, Homo sapiens
  misc_RNA (1)...(19): siRNA sense strand
gaacugacuccucuucaag

SEQ ID NO: 600163 - RNA, 19 nt, Homo sapiens
  misc_RNA (1)...(19): siRNA sense strand
caacuuagccaauauuuug

SEQ ID NO: 600164 - RNA, 19 nt, Homo sapiens
  misc_RNA (1)...(19): siRNA sense strand
gauggaagggcuacuguga

SEQ ID NO: 600165 - RNA, 19 nt, Homo sapiens
  misc_RNA (1)...(19): siRNA sense strand
caaagcagcacccaaaucu

SEQ ID NO: 600166 - RNA, 19 nt, Homo sapiens
  misc_RNA (1)...(19): siRNA sense strand
gagaguacgucgggagaau

SEQ ID NO: 600167 - RNA, 19 nt, Homo sapiens
  misc_RNA (1)...(19): siRNA sense strand
ggacaugguguuccacguu

SEQ ID NO: 600168 - RNA, 19 nt, Homo sapiens
  misc_RNA (1)...(19): siRNA sense strand
gacgggaaguagaggaauu

SEQ ID NO: 600169 - RNA, 19 nt, Homo sapiens
  misc_RNA (1)...(19): siRNA sense strand
ggaagagagaauuaaagaa

SEQ ID NO: 600170 - RNA, 19 nt, Homo sapiens
  misc_RNA (1)...(19): siRNA sense strand
gcgagaugaagacauguua

SEQ ID NO: 600171 - RNA, 19 nt, Homo sapiens
  misc_RNA (1)...(19): siRNA sense strand
gguucgagcugcaguuuua

SEQ ID NO: 600172 - RNA, 19 nt, Homo sapiens
  misc_RNA (1)...(19): siRNA sense strand
aaacuaaggaugaugucua

SEQ ID NO: 600173 - RNA, 19 nt, Homo sapiens
  misc_RNA (1)...(19): siRNA sense strand
gagaaaguacugaaagaca

SEQ ID NO: 600174 - RNA, 19 nt, Homo sapiens
  misc_RNA (1)...(19): siRNA sense strand
gugcaacagccacaauuaa

SEQ ID NO: 600175 - RNA, 19 nt, Homo sapiens
  misc_RNA (1)...(19): siRNA sense strand
cuaaggaugaugucuauga

SEQ ID NO: 600176 - RNA, 19 nt, Homo sapiens
  misc_RNA (1)...(19): siRNA sense strand
caaaucugguccuucuguu

SEQ ID NO: 600177 - RNA, 19 nt, Homo sapiens
  misc_RNA (1)...(19): siRNA sense strand
cagugaagaugauggcuau

SEQ ID NO: 600178 - RNA, 19 nt, Homo sapiens
  misc_RNA (1)...(19): siRNA sense strand
uccgagacauggagaaauu

SEQ ID NO: 600179 - RNA, 19 nt, Homo sapiens
  misc_RNA (1)...(19): siRNA sense strand
aaagaaagucagaggauga

SEQ ID NO: 600180 - RNA, 19 nt, Homo sapiens
  misc_RNA (1)...(19): siRNA sense strand
gagaagaaagccacagcaa

SEQ ID NO: 600181 - RNA, 19 nt, Homo sapiens
  misc_RNA (1)...(19): siRNA sense strand
gaaaagcaaucacaaaagc

SEQ ID NO: 600182 - RNA, 19 nt, Homo sapiens
  misc_RNA (1)...(19): siRNA sense strand
ugaaaccuuugaacguauu

SEQ ID NO: 600183 - RNA, 19 nt, Homo sapiens
  misc_RNA (1)...(19): siRNA sense strand
gagaaagcuagaaguagaa

SEQ ID NO: 600184 - RNA, 19 nt, Homo sapiens
  misc_RNA (1)...(19): siRNA sense strand
gaguacgucgggagaauaa

SEQ ID NO: 600185 - RNA, 19 nt, Homo sapiens
  misc_RNA (1)...(19): siRNA sense strand
caaggcggaugauacaagu

SEQ ID NO: 600186 - RNA, 19 nt, Homo sapiens
  misc_RNA (1)...(19): siRNA sense strand
gagagacaacaaugaagaa

SEQ ID NO: 600187 - RNA, 19 nt, Homo sapiens
  misc_RNA (1)...(19): siRNA sense strand
ugagagagacaacaaugaa

SEQ ID NO: 600188 - RNA, 19 nt, Homo sapiens
  misc_RNA (1)...(19): siRNA sense strand
gaaagcuagaaguagaaua

SEQ ID NO: 600189 - RNA, 19 nt, Homo sapiens
  misc_RNA (1)...(19): siRNA sense strand
gugaaaccuuugaacguau

SEQ ID NO: 600190 - RNA, 19 nt, Homo sapiens
  misc_RNA (1)...(19): siRNA sense strand
gaacaugaaggaacugacu

SEQ ID NO: 600191 - RNA, 19 nt, Homo sapiens
  misc_RNA (1)...(19): siRNA sense strand
gaggacauggaucaagaua

SEQ ID NO: 600192 - RNA, 19 nt, Homo sapiens
  misc_RNA (1)...(19): siRNA sense strand
gcuagaaguagaauaugaa

SEQ ID NO: 600193 - RNA, 19 nt, Homo sapiens
  misc_RNA (1)...(19): siRNA sense strand
cagccacaauuaaaugaga

SEQ ID NO: 600194 - RNA, 19 nt, Homo sapiens
  misc_RNA (1)...(19): siRNA sense strand
ccaagccacagaucacuaa

SEQ ID NO: 600195 - RNA, 19 nt, Homo sapiens
  misc_RNA (1)...(19): siRNA sense strand
cagccaccauugagaagaa

SEQ ID NO: 600196 - RNA, 19 nt, Homo sapiens
  misc_RNA (1)...(19): siRNA sense strand
gaagaugauucugaugacu

SEQ ID NO: 600197 - RNA, 19 nt, Homo sapiens
  misc_RNA (1)...(19): siRNA sense strand
agaggacgaugaugaagau

SEQ ID NO: 600198 - RNA, 19 nt, Homo sapiens
  misc_RNA (1)...(19): siRNA sense strand
ccacagaccaagcccgaaa

SEQ ID NO: 600199 - RNA, 19 nt, Homo sapiens
  misc_RNA (1)...(19): siRNA sense strand
agaccaagcccgaaaggaa

SEQ ID NO: 600200 - RNA, 19 nt, Homo sapiens
  misc_RNA (1)...(19): siRNA sense strand
ugaugaagaugauucugau

SEQ ID NO: 600201 - RNA, 19 nt, Homo sapiens
  misc_RNA (1)...(19): siRNA sense strand
uauggcaggucaagaaauc

SEQ ID NO: 600202 - RNA, 19 nt, Homo sapiens
  misc_RNA (1)...(19): siRNA sense strand
uugcagauaugccuggaaa

SEQ ID NO: 600203 - RNA, 19 nt, Homo sapiens
  misc_RNA (1)...(19): siRNA sense strand
caaagaauugagaaagcua

SEQ ID NO: 600204 - RNA, 19 nt, Homo sapiens
  misc_RNA (1)...(19): siRNA sense strand
agagauuacucgauuugug

SEQ ID NO: 600205 - RNA, 19 nt, Homo sapiens
  misc_RNA (1)...(19): siRNA sense strand
caagugcagccaccauuga

SEQ ID NO: 600206 - RNA, 19 nt, Homo sapiens
  misc_RNA (1)...(19): siRNA sense strand
cauguuauauaguccugaa

SEQ ID NO: 600207 - RNA, 19 nt, Homo sapiens
  misc_RNA (1)...(19): siRNA sense strand
cggaagagagaauuaaaga

SEQ ID NO: 600208 - RNA, 19 nt, Homo sapiens
  misc_RNA (1)...(19): siRNA sense strand
uaggcgagaugaagacaug

SEQ ID NO: 600209 - RNA, 19 nt, Homo sapiens
  misc_RNA (1)...(19): siRNA sense strand
gaaaggaagcccggaagag

SEQ ID NO: 600210 - RNA, 19 nt, Homo sapiens
  misc_RNA (1)...(19): siRNA sense strand
ccaaagaaagucagaggau

SEQ ID NO: 600211 - RNA, 19 nt, Homo sapiens
  misc_RNA (1)...(19): siRNA sense strand
ggcagagauuacucgauuu

SEQ ID NO: 600212 - RNA, 19 nt, Homo sapiens
  misc_RNA (1)...(19): siRNA sense strand
agaagaacaugaaggaacu

SEQ ID NO: 600213 - RNA, 19 nt, Homo sapiens
  misc_RNA (1)...(19): siRNA sense strand
gaaaguacugaaagacaag

SEQ ID NO: 600214 - RNA, 19 nt, Homo sapiens
  misc_RNA (1)...(19): siRNA sense strand
guuccugucucaguacaaa

SEQ ID NO: 600215 - RNA, 19 nt, Homo sapiens
  misc_RNA (1)...(19): siRNA sense strand
caccaagaguggaaaauuu

SEQ ID NO: 600216 - RNA, 19 nt, Homo sapiens
  misc_RNA (1)...(19): siRNA sense strand
aaacagauaauccgagaca

SEQ ID NO: 600217 - RNA, 19 nt, Homo sapiens
  misc_RNA (1)...(19): siRNA sense strand
aguauuccuuugccagaua

SEQ ID NO: 600218 - RNA, 19 nt, Homo sapiens
  misc_RNA (1)...(19): siRNA sense strand
gaaguggagaguauuccuu

SEQ ID NO: 600219 - RNA, 19 nt, Homo sapiens
  misc_RNA (1)...(19): siRNA sense strand
gaauugagaaagcuagaag

SEQ ID NO: 600220 - RNA, 19 nt, Homo sapiens
  misc_RNA (1)...(19): siRNA sense strand
aaaggaagcccggaagaga

SEQ ID NO: 600221 - RNA, 19 nt, Homo sapiens
  misc_RNA (1)...(19): siRNA sense strand
cugaggacauggaucaaga

SEQ ID NO: 600222 - RNA, 19 nt, Homo sapiens
  misc_RNA (1)...(19): siRNA sense strand
guuauauaguccugaacuu

SEQ ID NO: 600223 - RNA, 19 nt, Homo sapiens
  misc_RNA (1)...(19): siRNA sense strand
uggagaaauuggaugaaau

SEQ ID NO: 600224 - RNA, 19 nt, Homo sapiens
  misc_RNA (1)...(19): siRNA sense strand
gcacccaaaucugguccuu

SEQ ID NO: 600225 - RNA, 19 nt, Homo sapiens
  misc_RNA (1)...(19): siRNA sense strand
ggaaguagaggaauuuuca

SEQ ID NO: 600226 - RNA, 19 nt, Homo sapiens
  misc_RNA (1)...(19): siRNA sense strand
uaaagaugaaggauccaaa

SEQ ID NO: 600227 - RNA, 19 nt, Homo sapiens
  misc_RNA (1)...(19): siRNA sense strand
cacccucuauccuaaagaa

SEQ ID NO: 600228 - RNA, 19 nt, Homo sapiens
  misc_RNA (1)...(19): siRNA sense strand
gaacagaagagggcucaac

SEQ ID NO: 600229 - RNA, 19 nt, Homo sapiens
  misc_RNA (1)...(19): siRNA sense strand
uaaggaugaugucuaugag

SEQ ID NO: 600230 - RNA, 19 nt, Homo sapiens
  misc_RNA (1)...(19): siRNA sense strand
gcccuuaccccgacuuuua

SEQ ID NO: 600231 - RNA, 19 nt, Homo sapiens
  misc_RNA (1)...(19): siRNA sense strand
gcagaaaagcaaucacaaa

SEQ ID NO: 600232 - RNA, 19 nt, Homo sapiens
  misc_RNA (1)...(19): siRNA sense strand
ggugagagagacaacaaug

SEQ ID NO: 600233 - RNA, 19 nt, Homo sapiens
  misc_RNA (1)...(19): siRNA sense strand
caugcuccuuccaacauuu

SEQ ID NO: 600234 - RNA, 19 nt, Homo sapiens
  misc_RNA (1)...(19): siRNA sense strand
gcucaacuuagccaauauu

SEQ ID NO: 600235 - RNA, 19 nt, Homo sapiens
  misc_RNA (1)...(19): siRNA sense strand
acaaugagcucuuggacua

SEQ ID NO: 600236 - RNA, 19 nt, Homo sapiens
  misc_RNA (1)...(19): siRNA sense strand
gggcuuggcuaucacauuu

SEQ ID NO: 600237 - RNA, 19 nt, Homo sapiens
  misc_RNA (1)...(19): siRNA sense strand
aagaagaacugcccgcaua

SEQ ID NO: 600238 - RNA, 19 nt, Homo sapiens
  misc_RNA (1)...(19): siRNA sense strand
ggaugaaugugauaagaug

SEQ ID NO: 600239 - RNA, 19 nt, Homo sapiens
  misc_RNA (1)...(19): siRNA sense strand
uuagugagcugccugauga

SEQ ID NO: 600240 - RNA, 19 nt, Homo sapiens
  misc_RNA (1)...(19): siRNA sense strand
uaugagcgcuucucuaaau

SEQ ID NO: 600241 - RNA, 19 nt, Homo sapiens
  misc_RNA (1)...(19): siRNA sense strand
cgucagaaguccagcauga

SEQ ID NO: 600242 - RNA, 19 nt, Homo sapiens
  misc_RNA (1)...(19): siRNA sense strand
gaagaggugcugaagaaga

SEQ ID NO: 600243 - RNA, 19 nt, Homo sapiens
  misc_RNA (1)...(19): siRNA sense strand
agaacgauguggacaauga

SEQ ID NO: 600244 - RNA, 19 nt, Homo sapiens
  misc_RNA (1)...(19): siRNA sense strand
gugauaagaugcuugaaca

SEQ ID NO: 600245 - RNA, 19 nt, Homo sapiens
  misc_RNA (1)...(19): siRNA sense strand
ugagcugccugaugagaua

SEQ ID NO: 600246 - RNA, 19 nt, Homo sapiens
  misc_RNA (1)...(19): siRNA sense strand
gguaucagcaguuuaaaga

SEQ ID NO: 600247 - RNA, 19 nt, Homo sapiens
  misc_RNA (1)...(19): siRNA sense strand
gggaaagacagcaguguuu

SEQ ID NO: 600248 - RNA, 19 nt, Homo sapiens
  misc_RNA (1)...(19): siRNA sense strand
gcgcuucucuaaauacaug

SEQ ID NO: 600249 - RNA, 19 nt, Homo sapiens
  misc_RNA (1)...(19): siRNA sense strand
aauaugagcgcuucucuaa

SEQ ID NO: 600250 - RNA, 19 nt, Homo sapiens
  misc_RNA (1)...(19): siRNA sense strand
ccaagauccucaaugaugu

SEQ ID NO: 600251 - RNA, 19 nt, Homo sapiens
  misc_RNA (1)...(19): siRNA sense strand
agaagcaggucaugauguu

SEQ ID NO: 600252 - RNA, 19 nt, Homo sapiens
  misc_RNA (1)...(19): siRNA sense strand
gccaagauccucaaugaug

SEQ ID NO: 600253 - RNA, 19 nt, Homo sapiens
  misc_RNA (1)...(19): siRNA sense strand
agacaucuccuccuacauu

SEQ ID NO: 600254 - RNA, 19 nt, Homo sapiens
  misc_RNA (1)...(19): siRNA sense strand
augaagaggugcugaagaa

SEQ ID NO: 600255 - RNA, 19 nt, Homo sapiens
  misc_RNA (1)...(19): siRNA sense strand
aagaggugcugaagaagaa

SEQ ID NO: 600256 - RNA, 19 nt, Homo sapiens
  misc_RNA (1)...(19): siRNA sense strand
gaauaugagcgcuucucua

SEQ ID NO: 600257 - RNA, 19 nt, Homo sapiens
  misc_RNA (1)...(19): siRNA sense strand
gaaagacagcaguguuugu

SEQ ID NO: 600258 - RNA, 19 nt, Homo sapiens
  misc_RNA (1)...(19): siRNA sense strand
gucaugauguucagugcua

SEQ ID NO: 600259 - RNA, 19 nt, Homo sapiens
  misc_RNA (1)...(19): siRNA sense strand
ggaaagacagcaguguuug

SEQ ID NO: 600260 - RNA, 19 nt, Homo sapiens
  misc_RNA (1)...(19): siRNA sense strand
gaaauaagagccucaaccu

SEQ ID NO: 600261 - RNA, 19 nt, Homo sapiens
  misc_RNA (1)...(19): siRNA sense strand
gacaucuccuccuacauug

SEQ ID NO: 600262 - RNA, 19 nt, Homo sapiens
  misc_RNA (1)...(19): siRNA sense strand
ggaguuggcuuuucagauc

SEQ ID NO: 600263 - RNA, 19 nt, Homo sapiens
  misc_RNA (1)...(19): siRNA sense strand
gguggucugucuaucaaga

SEQ ID NO: 600264 - RNA, 19 nt, Homo sapiens
  misc_RNA (1)...(19): siRNA sense strand
gucaagggcuccuaugucu

SEQ ID NO: 600265 - RNA, 19 nt, Homo sapiens
  misc_RNA (1)...(19): siRNA sense strand
ccacagcucuggcuuucgu

SEQ ID NO: 600266 - RNA, 19 nt, Homo sapiens
  misc_RNA (1)...(19): siRNA sense strand
gagcgcuucucuaaauaca

SEQ ID NO: 600267 - RNA, 19 nt, Homo sapiens
  misc_RNA (1)...(19): siRNA sense strand
ugagaaugaugccaagauc

SEQ ID NO: 600268 - RNA, 19 nt, Homo sapiens
  misc_RNA (1)...(19): siRNA sense strand
gugcaucccucaggccauu

SEQ ID NO: 600269 - RNA, 19 nt, Homo sapiens
  misc_RNA (1)...(19): siRNA sense strand
ugacaugccugaggauucu

SEQ ID NO: 600270 - RNA, 19 nt, Homo sapiens
  misc_RNA (1)...(19): siRNA sense strand
ugaaggacaacgagaagaa

SEQ ID NO: 600271 - RNA, 19 nt, Homo sapiens
  misc_RNA (1)...(19): siRNA sense strand
gcagcaguacuacgugaaa

SEQ ID NO: 600272 - RNA, 19 nt, Homo sapiens
  misc_RNA (1)...(19): siRNA sense strand
aaagagauccguccagucu

SEQ ID NO: 600273 - RNA, 19 nt, Homo sapiens
  misc_RNA (1)...(19): siRNA sense strand
caaccucaaacacauuaaa

SEQ ID NO: 600274 - RNA, 19 nt, Homo sapiens
  misc_RNA (1)...(19): siRNA sense strand
gcagaacuucccagccauu

SEQ ID NO: 600275 - RNA, 19 nt, Homo sapiens
  misc_RNA (1)...(19): siRNA sense strand
augccaagauccucaauga

SEQ ID NO: 600276 - RNA, 19 nt, Homo sapiens
  misc_RNA (1)...(19): siRNA sense strand
gagaagcaggucaugaugu

SEQ ID NO: 600277 - RNA, 19 nt, Homo sapiens
  misc_RNA (1)...(19): siRNA sense strand
gaugaugagacgaaguuga

SEQ ID NO: 600278 - RNA, 19 nt, Homo sapiens
  misc_RNA (1)...(19): siRNA sense strand
agagaacgauguggacaau

SEQ ID NO: 600279 - RNA, 19 nt, Homo sapiens
  misc_RNA (1)...(19): siRNA sense strand
gaauucuuguggcuaccaa

SEQ ID NO: 600280 - RNA, 19 nt, Homo sapiens
  misc_RNA (1)...(19): siRNA sense strand
gcuuugagcauccgucaga

SEQ ID NO: 600281 - RNA, 19 nt, Homo sapiens
  misc_RNA (1)...(19): siRNA sense strand
gaagaacugcccgcauauc

SEQ ID NO: 600282 - RNA, 19 nt, Homo sapiens
  misc_RNA (1)...(19): siRNA sense strand
gaugaagaggugcugaaga

SEQ ID NO: 600283 - RNA, 19 nt, Homo sapiens
  misc_RNA (1)...(19): siRNA sense strand
ucuuugaccuucuggaugu

SEQ ID NO: 600284 - RNA, 19 nt, Homo sapiens
  misc_RNA (1)...(19): siRNA sense strand
gcuuggcuaucacauuugu

SEQ ID NO: 600285 - RNA, 19 nt, Homo sapiens
  misc_RNA (1)...(19): siRNA sense strand
gggugaacauugcuuuuaa

SEQ ID NO: 600286 - RNA, 19 nt, Homo sapiens
  misc_RNA (1)...(19): siRNA sense strand
guggugaucuuugugaagu

SEQ ID NO: 600287 - RNA, 19 nt, Homo sapiens
  misc_RNA (1)...(19): siRNA sense strand
ccaagucgggcaugggaaa

SEQ ID NO: 600288 - RNA, 19 nt, Homo sapiens
  misc_RNA (1)...(19): siRNA sense strand
gccgcaaguucaugcaaga

SEQ ID NO: 600289 - RNA, 19 nt, Homo sapiens
  misc_RNA (1)...(19): siRNA sense strand
auaagagccucaaccucaa

SEQ ID NO: 600290 - RNA, 19 nt, Homo sapiens
  misc_RNA (1)...(19): siRNA sense strand
uuucaacgacgaauucuug

SEQ ID NO: 600291 - RNA, 19 nt, Homo sapiens
  misc_RNA (1)...(19): siRNA sense strand
caucuccuccuacauugaa

SEQ ID NO: 600292 - RNA, 19 nt, Homo sapiens
  misc_RNA (1)...(19): siRNA sense strand
auagacaucuccuccuaca

SEQ ID NO: 600293 - RNA, 19 nt, Homo sapiens
  misc_RNA (1)...(19): siRNA sense strand
ggaauaugagcgcuucucu

SEQ ID NO: 600294 - RNA, 19 nt, Homo sapiens
  misc_RNA (1)...(19): siRNA sense strand
uaagagccucaaccucaaa

SEQ ID NO: 600295 - RNA, 19 nt, Homo sapiens
  misc_RNA (1)...(19): siRNA sense strand
gaucagcaaggaauaugag

SEQ ID NO: 600296 - RNA, 19 nt, Homo sapiens
  misc_RNA (1)...(19): siRNA sense strand
gcuccuaugucuccaucca

SEQ ID NO: 600297 - RNA, 19 nt, Homo sapiens
  misc_RNA (1)...(19): siRNA sense strand
gucgggauguccaggaaau

SEQ ID NO: 600298 - RNA, 19 nt, Homo sapiens
  misc_RNA (1)...(19): siRNA sense strand
ucuuguggcuaccaaccua

SEQ ID NO: 600299 - RNA, 19 nt, Homo sapiens
  misc_RNA (1)...(19): siRNA sense strand
aaugagcucuuggacuaug

SEQ ID NO: 600300 - RNA, 19 nt, Homo sapiens
  misc_RNA (1)...(19): siRNA sense strand
ggacuaugaagaugaugag

SEQ ID NO: 600301 - RNA, 19 nt, Homo sapiens
  misc_RNA (1)...(19): siRNA sense strand
cgagaagcaggucaugaug

SEQ ID NO: 600302 - RNA, 19 nt, Homo sapiens
  misc_RNA (1)...(19): siRNA sense strand
gcgucgggauguccaggaa

SEQ ID NO: 600303 - RNA, 19 nt, Homo sapiens
  misc_RNA (1)...(19): siRNA sense strand
cgggauguccaggaaauuu

SEQ ID NO: 600304 - RNA, 19 nt, Homo sapiens
  misc_RNA (1)...(19): siRNA sense strand
cauugucgacuguggcuuu

SEQ ID NO: 600305 - RNA, 19 nt, Homo sapiens
  misc_RNA (1)...(19): siRNA sense strand
acgugaaacugaaggacaa

SEQ ID NO: 600306 - RNA, 19 nt, Homo sapiens
  misc_RNA (1)...(19): siRNA sense strand
aguacuacgugaaacugaa

SEQ ID NO: 600307 - RNA, 19 nt, Homo sapiens
  misc_RNA (1)...(19): siRNA sense strand
guucaugcaagauccaaug

SEQ ID NO: 600308 - RNA, 19 nt, Homo sapiens
  misc_RNA (1)...(19): siRNA sense strand
uuacugggcaggugucugu

SEQ ID NO: 600309 - RNA, 19 nt, Homo sapiens
  misc_RNA (1)...(19): siRNA sense strand
ugaaugugauaagaugcuu

SEQ ID NO: 600310 - RNA, 19 nt, Homo sapiens
  misc_RNA (1)...(19): siRNA sense strand
augagcgcuucucuaaaua

SEQ ID NO: 600311 - RNA, 19 nt, Homo sapiens
  misc_RNA (1)...(19): siRNA sense strand
gaacgauguggacaaugag

SEQ ID NO: 600312 - RNA, 19 nt, Homo sapiens
  misc_RNA (1)...(19): siRNA sense strand
uuggaugaaugugauaaga

SEQ ID NO: 600313 - RNA, 19 nt, Homo sapiens
  misc_RNA (1)...(19): siRNA sense strand
caagauccucaaugaugug

SEQ ID NO: 600314 - RNA, 19 nt, Homo sapiens
  misc_RNA (1)...(19): siRNA sense strand
uggaugaugagacgaaguu

SEQ ID NO: 600315 - RNA, 19 nt, Homo sapiens
  misc_RNA (1)...(19): siRNA sense strand
cagagaacgauguggacaa

SEQ ID NO: 600316 - RNA, 19 nt, Homo sapiens
  misc_RNA (1)...(19): siRNA sense strand
ucagaucagcaaggaauau

SEQ ID NO: 600317 - RNA, 19 nt, Homo sapiens
  misc_RNA (1)...(19): siRNA sense strand
ggacaucgagcgggugaac

SEQ ID NO: 600318 - RNA, 19 nt, Homo sapiens
  misc_RNA (1)...(19): siRNA sense strand
gccgaggcauggacaucga

SEQ ID NO: 600319 - RNA, 19 nt, Homo sapiens
  misc_RNA (1)...(19): siRNA sense strand
ucagaaguccagcaugagu

SEQ ID NO: 600320 - RNA, 19 nt, Homo sapiens
  misc_RNA (1)...(19): siRNA sense strand
ggugaucuuugugaagucu

SEQ ID NO: 600321 - RNA, 19 nt, Homo sapiens
  misc_RNA (1)...(19): siRNA sense strand
gcucuuugaccuucuggau

SEQ ID NO: 600322 - RNA, 19 nt, Homo sapiens
  misc_RNA (1)...(19): siRNA sense strand
gaaggacaacgagaagaac

SEQ ID NO: 600323 - RNA, 19 nt, Homo sapiens
  misc_RNA (1)...(19): siRNA sense strand
cauccacagcucuggcuuu

SEQ ID NO: 600324 - RNA, 19 nt, Homo sapiens
  misc_RNA (1)...(19): siRNA sense strand
ggaugucaagggcuccuau

SEQ ID NO: 600325 - RNA, 19 nt, Homo sapiens
  misc_RNA (1)...(19): siRNA sense strand
gcucuggcuuucgugacuu

SEQ ID NO: 600326 - RNA, 19 nt, Homo sapiens
  misc_RNA (1)...(19): siRNA sense strand
cguccagucugccgcaagu

SEQ ID NO: 600327 - RNA, 19 nt, Homo sapiens
  misc_RNA (1)...(19): siRNA sense strand
agaagaacugcccgcauau

SEQ ID NO: 600328 - RNA, 19 nt, Homo sapiens
  misc_RNA (1)...(19): siRNA sense strand
acaaugagcucuuggacua

SEQ ID NO: 600329 - RNA, 19 nt, Homo sapiens
  misc_RNA (1)...(19): siRNA sense strand
gggcuuggcuaucacauuu

SEQ ID NO: 600330 - RNA, 19 nt, Homo sapiens
  misc_RNA (1)...(19): siRNA sense strand
aagaagaacugcccgcaua

SEQ ID NO: 600331 - RNA, 19 nt, Homo sapiens
  misc_RNA (1)...(19): siRNA sense strand
ggaugaaugugauaagaug

SEQ ID NO: 600332 - RNA, 19 nt, Homo sapiens
  misc_RNA (1)...(19): siRNA sense strand
uuagugagcugccugauga

SEQ ID NO: 600333 - RNA, 19 nt, Homo sapiens
  misc_RNA (1)...(19): siRNA sense strand
uaugagcgcuucucuaaau

SEQ ID NO: 600334 - RNA, 19 nt, Homo sapiens
  misc_RNA (1)...(19): siRNA sense strand
cgucagaaguccagcauga

SEQ ID NO: 600335 - RNA, 19 nt, Homo sapiens
  misc_RNA (1)...(19): siRNA sense strand
gaagaggugcugaagaaga

SEQ ID NO: 600336 - RNA, 19 nt, Homo sapiens
  misc_RNA (1)...(19): siRNA sense strand
agaacgauguggacaauga

SEQ ID NO: 600337 - RNA, 19 nt, Homo sapiens
  misc_RNA (1)...(19): siRNA sense strand
gugauaagaugcuugaaca

SEQ ID NO: 600338 - RNA, 19 nt, Homo sapiens
  misc_RNA (1)...(19): siRNA sense strand
ugagcugccugaugagaua

SEQ ID NO: 600339 - RNA, 19 nt, Homo sapiens
  misc_RNA (1)...(19): siRNA sense strand
gguaucagcaguuuaaaga

SEQ ID NO: 600340 - RNA, 19 nt, Homo sapiens
  misc_RNA (1)...(19): siRNA sense strand
gggaaagacagcaguguuu

SEQ ID NO: 600341 - RNA, 19 nt, Homo sapiens
  misc_RNA (1)...(19): siRNA sense strand
gcgcuucucuaaauacaug

SEQ ID NO: 600342 - RNA, 19 nt, Homo sapiens
  misc_RNA (1)...(19): siRNA sense strand
aauaugagcgcuucucuaa

SEQ ID NO: 600343 - RNA, 19 nt, Homo sapiens
  misc_RNA (1)...(19): siRNA sense strand
ccaagauccucaaugaugu

SEQ ID NO: 600344 - RNA, 19 nt, Homo sapiens
  misc_RNA (1)...(19): siRNA sense strand
agaagcaggucaugauguu

SEQ ID NO: 600345 - RNA, 19 nt, Homo sapiens
  misc_RNA (1)...(19): siRNA sense strand
gccaagauccucaaugaug

SEQ ID NO: 600346 - RNA, 19 nt, Homo sapiens
  misc_RNA (1)...(19): siRNA sense strand
agacaucuccuccuacauu

SEQ ID NO: 600347 - RNA, 19 nt, Homo sapiens
  misc_RNA (1)...(19): siRNA sense strand
augaagaggugcugaagaa

SEQ ID NO: 600348 - RNA, 19 nt, Homo sapiens
  misc_RNA (1)...(19): siRNA sense strand
aagaggugcugaagaagaa

SEQ ID NO: 600349 - RNA, 19 nt, Homo sapiens
  misc_RNA (1)...(19): siRNA sense strand
gaauaugagcgcuucucua

SEQ ID NO: 600350 - RNA, 19 nt, Homo sapiens
  misc_RNA (1)...(19): siRNA sense strand
gaaagacagcaguguuugu

SEQ ID NO: 600351 - RNA, 19 nt, Homo sapiens
  misc_RNA (1)...(19): siRNA sense strand
gucaugauguucagugcua

SEQ ID NO: 600352 - RNA, 19 nt, Homo sapiens
  misc_RNA (1)...(19): siRNA sense strand
ggaaagacagcaguguuug

SEQ ID NO: 600353 - RNA, 19 nt, Homo sapiens
  misc_RNA (1)...(19): siRNA sense strand
gaaauaagagccucaaccu

SEQ ID NO: 600354 - RNA, 19 nt, Homo sapiens
  misc_RNA (1)...(19): siRNA sense strand
gacaucuccuccuacauug

SEQ ID NO: 600355 - RNA, 19 nt, Homo sapiens
  misc_RNA (1)...(19): siRNA sense strand
ggaguuggcuuuucagauc

SEQ ID NO: 600356 - RNA, 19 nt, Homo sapiens
  misc_RNA (1)...(19): siRNA sense strand
gguggucugucuaucaaga

SEQ ID NO: 600357 - RNA, 19 nt, Homo sapiens
  misc_RNA (1)...(19): siRNA sense strand
gucaagggcuccuaugucu

SEQ ID NO: 600358 - RNA, 19 nt, Homo sapiens
  misc_RNA (1)...(19): siRNA sense strand
ccacagcucuggcuuucgu

SEQ ID NO: 600359 - RNA, 19 nt, Homo sapiens
  misc_RNA (1)...(19): siRNA sense strand
gagcgcuucucuaaauaca

SEQ ID NO: 600360 - RNA, 19 nt, Homo sapiens
  misc_RNA (1)...(19): siRNA sense strand
ugagaaugaugccaagauc

SEQ ID NO: 600361 - RNA, 19 nt, Homo sapiens
  misc_RNA (1)...(19): siRNA sense strand
gugcaucccucaggccauu

SEQ ID NO: 600362 - RNA, 19 nt, Homo sapiens
  misc_RNA (1)...(19): siRNA sense strand
ugacaugccugaggauucu

SEQ ID NO: 600363 - RNA, 19 nt, Homo sapiens
  misc_RNA (1)...(19): siRNA sense strand
ugaaggacaacgagaagaa

SEQ ID NO: 600364 - RNA, 19 nt, Homo sapiens
  misc_RNA (1)...(19): siRNA sense strand
gcagcaguacuacgugaaa

SEQ ID NO: 600365 - RNA, 19 nt, Homo sapiens
  misc_RNA (1)...(19): siRNA sense strand
aaagagauccguccagucu

SEQ ID NO: 600366 - RNA, 19 nt, Homo sapiens
  misc_RNA (1)...(19): siRNA sense strand
caaccucaaacacauuaaa

SEQ ID NO: 600367 - RNA, 19 nt, Homo sapiens
  misc_RNA (1)...(19): siRNA sense strand
gcagaacuucccagccauu

SEQ ID NO: 600368 - RNA, 19 nt, Homo sapiens
  misc_RNA (1)...(19): siRNA sense strand
augccaagauccucaauga

SEQ ID NO: 600369 - RNA, 19 nt, Homo sapiens
  misc_RNA (1)...(19): siRNA sense strand
gagaagcaggucaugaugu

SEQ ID NO: 600370 - RNA, 19 nt, Homo sapiens
  misc_RNA (1)...(19): siRNA sense strand
gaugaugagacgaaguuga

SEQ ID NO: 600371 - RNA, 19 nt, Homo sapiens
  misc_RNA (1)...(19): siRNA sense strand
agagaacgauguggacaau

SEQ ID NO: 600372 - RNA, 19 nt, Homo sapiens
  misc_RNA (1)...(19): siRNA sense strand
gaauucuuguggcuaccaa

SEQ ID NO: 600373 - RNA, 19 nt, Homo sapiens
  misc_RNA (1)...(19): siRNA sense strand
gcuuugagcauccgucaga

SEQ ID NO: 600374 - RNA, 19 nt, Homo sapiens
  misc_RNA (1)...(19): siRNA sense strand
gaagaacugcccgcauauc

SEQ ID NO: 600375 - RNA, 19 nt, Homo sapiens
  misc_RNA (1)...(19): siRNA sense strand
gaugaagaggugcugaaga

SEQ ID NO: 600376 - RNA, 19 nt, Homo sapiens
  misc_RNA (1)...(19): siRNA sense strand
ucuuugaccuucuggaugu

SEQ ID NO: 600377 - RNA, 19 nt, Homo sapiens
  misc_RNA (1)...(19): siRNA sense strand
gcuuggcuaucacauuugu

SEQ ID NO: 600378 - RNA, 19 nt, Homo sapiens
  misc_RNA (1)...(19): siRNA sense strand
gggugaacauugcuuuuaa

SEQ ID NO: 600379 - RNA, 19 nt, Homo sapiens
  misc_RNA (1)...(19): siRNA sense strand
guggugaucuuugugaagu

SEQ ID NO: 600380 - RNA, 19 nt, Homo sapiens
  misc_RNA (1)...(19): siRNA sense strand
ccaagucgggcaugggaaa

SEQ ID NO: 600381 - RNA, 19 nt, Homo sapiens
  misc_RNA (1)...(19): siRNA sense strand
gccgcaaguucaugcaaga

SEQ ID NO: 600382 - RNA, 19 nt, Homo sapiens
  misc_RNA (1)...(19): siRNA sense strand
auaagagccucaaccucaa

SEQ ID NO: 600383 - RNA, 19 nt, Homo sapiens
  misc_RNA (1)...(19): siRNA sense strand
uuucaacgacgaauucuug

SEQ ID NO: 600384 - RNA, 19 nt, Homo sapiens
  misc_RNA (1)...(19): siRNA sense strand
caucuccuccuacauugaa

SEQ ID NO: 600385 - RNA, 19 nt, Homo sapiens
  misc_RNA (1)...(19): siRNA sense strand
auagacaucuccuccuaca

SEQ ID NO: 600386 - RNA, 19 nt, Homo sapiens
  misc_RNA (1)...(19): siRNA sense strand
ggaauaugagcgcuucucu

SEQ ID NO: 600387 - RNA, 19 nt, Homo sapiens
  misc_RNA (1)...(19): siRNA sense strand
uaagagccucaaccucaaa

SEQ ID NO: 600388 - RNA, 19 nt, Homo sapiens
  misc_RNA (1)...(19): siRNA sense strand
gaucagcaaggaauaugag

SEQ ID NO: 600389 - RNA, 19 nt, Homo sapiens
  misc_RNA (1)...(19): siRNA sense strand
gcuccuaugucuccaucca

SEQ ID NO: 600390 - RNA, 19 nt, Homo sapiens
  misc_RNA (1)...(19): siRNA sense strand
gucgggauguccaggaaau

SEQ ID NO: 600391 - RNA, 19 nt, Homo sapiens
  misc_RNA (1)...(19): siRNA sense strand
ucuuguggcuaccaaccua

SEQ ID NO: 600392 - RNA, 19 nt, Homo sapiens
  misc_RNA (1)...(19): siRNA sense strand
aaugagcucuuggacuaug

SEQ ID NO: 600393 - RNA, 19 nt, Homo sapiens
  misc_RNA (1)...(19): siRNA sense strand
ggacuaugaagaugaugag

SEQ ID NO: 600394 - RNA, 19 nt, Homo sapiens
  misc_RNA (1)...(19): siRNA sense strand
cgagaagcaggucaugaug

SEQ ID NO: 600395 - RNA, 19 nt, Homo sapiens
  misc_RNA (1)...(19): siRNA sense strand
gcgucgggauguccaggaa

SEQ ID NO: 600396 - RNA, 19 nt, Homo sapiens
  misc_RNA (1)...(19): siRNA sense strand
cgggauguccaggaaauuu

SEQ ID NO: 600397 - RNA, 19 nt, Homo sapiens
  misc_RNA (1)...(19): siRNA sense strand
cauugucgacuguggcuuu

SEQ ID NO: 600398 - RNA, 19 nt, Homo sapiens
  misc_RNA (1)...(19): siRNA sense strand
acgugaaacugaaggacaa

SEQ ID NO: 600399 - RNA, 19 nt, Homo sapiens
  misc_RNA (1)...(19): siRNA sense strand
aguacuacgugaaacugaa

SEQ ID NO: 600400 - RNA, 19 nt, Homo sapiens
  misc_RNA (1)...(19): siRNA sense strand
guucaugcaagauccaaug

SEQ ID NO: 600401 - RNA, 19 nt, Homo sapiens
  misc_RNA (1)...(19): siRNA sense strand
uuacugggcaggugucugu

SEQ ID NO: 600402 - RNA, 19 nt, Homo sapiens
  misc_RNA (1)...(19): siRNA sense strand
ugaaugugauaagaugcuu

SEQ ID NO: 600403 - RNA, 19 nt, Homo sapiens
  misc_RNA (1)...(19): siRNA sense strand
augagcgcuucucuaaaua

SEQ ID NO: 600404 - RNA, 19 nt, Homo sapiens
  misc_RNA (1)...(19): siRNA sense strand
gaacgauguggacaaugag

SEQ ID NO: 600405 - RNA, 19 nt, Homo sapiens
  misc_RNA (1)...(19): siRNA sense strand
uuggaugaaugugauaaga

SEQ ID NO: 600406 - RNA, 19 nt, Homo sapiens
  misc_RNA (1)...(19): siRNA sense strand
caagauccucaaugaugug

SEQ ID NO: 600407 - RNA, 19 nt, Homo sapiens
  misc_RNA (1)...(19): siRNA sense strand
uggaugaugagacgaaguu

SEQ ID NO: 600408 - RNA, 19 nt, Homo sapiens
  misc_RNA (1)...(19): siRNA sense strand
cagagaacgauguggacaa

SEQ ID NO: 600409 - RNA, 19 nt, Homo sapiens
  misc_RNA (1)...(19): siRNA sense strand
ucagaucagcaaggaauau

SEQ ID NO: 600410 - RNA, 19 nt, Homo sapiens
  misc_RNA (1)...(19): siRNA sense strand
ggacaucgagcgggugaac

SEQ ID NO: 600411 - RNA, 19 nt, Homo sapiens
  misc_RNA (1)...(19): siRNA sense strand
gccgaggcauggacaucga

SEQ ID NO: 600412 - RNA, 19 nt, Homo sapiens
  misc_RNA (1)...(19): siRNA sense strand
ucagaaguccagcaugagu

SEQ ID NO: 600413 - RNA, 19 nt, Homo sapiens
  misc_RNA (1)...(19): siRNA sense strand
ggugaucuuugugaagucu

SEQ ID NO: 600414 - RNA, 19 nt, Homo sapiens
  misc_RNA (1)...(19): siRNA sense strand
gcucuuugaccuucuggau

SEQ ID NO: 600415 - RNA, 19 nt, Homo sapiens
  misc_RNA (1)...(19): siRNA sense strand
gaaggacaacgagaagaac

SEQ ID NO: 600416 - RNA, 19 nt, Homo sapiens
  misc_RNA (1)...(19): siRNA sense strand
cauccacagcucuggcuuu

SEQ ID NO: 600417 - RNA, 19 nt, Homo sapiens
  misc_RNA (1)...(19): siRNA sense strand
ggaugucaagggcuccuau

SEQ ID NO: 600418 - RNA, 19 nt, Homo sapiens
  misc_RNA (1)...(19): siRNA sense strand
gcucuggcuuucgugacuu

SEQ ID NO: 600419 - RNA, 19 nt, Homo sapiens
  misc_RNA (1)...(19): siRNA sense strand
cguccagucugccgcaagu

SEQ ID NO: 600420 - RNA, 19 nt, Homo sapiens
  misc_RNA (1)...(19): siRNA sense strand
agaagaacugcccgcauau

SEQ ID NO: 600421 - RNA, 19 nt, Homo sapiens
  misc_RNA (1)...(19): siRNA sense strand
ggaauuaaguucagaucua

SEQ ID NO: 600422 - RNA, 19 nt, Homo sapiens
  misc_RNA (1)...(19): siRNA sense strand
cagcagaccucaacagaaa

SEQ ID NO: 600423 - RNA, 19 nt, Homo sapiens
  misc_RNA (1)...(19): siRNA sense strand
gaaggcaauuccucagaua

SEQ ID NO: 600424 - RNA, 19 nt, Homo sapiens
  misc_RNA (1)...(19): siRNA sense strand
gaagauugucuaccaaaua

SEQ ID NO: 600425 - RNA, 19 nt, Homo sapiens
  misc_RNA (1)...(19): siRNA sense strand
ggaaauaucaagaacauga

SEQ ID NO: 600426 - RNA, 19 nt, Homo sapiens
  misc_RNA (1)...(19): siRNA sense strand
gaacagauacaaggacaua

SEQ ID NO: 600427 - RNA, 19 nt, Homo sapiens
  misc_RNA (1)...(19): siRNA sense strand
gaagaguccugaccacaau

SEQ ID NO: 600428 - RNA, 19 nt, Homo sapiens
  misc_RNA (1)...(19): siRNA sense strand
aaacaaaggagcaauauga

SEQ ID NO: 600429 - RNA, 19 nt, Homo sapiens
  misc_RNA (1)...(19): siRNA sense strand
gaagauguuccuauuugua

SEQ ID NO: 600430 - RNA, 19 nt, Homo sapiens
  misc_RNA (1)...(19): siRNA sense strand
gaggaaauaucaagaacau

SEQ ID NO: 600431 - RNA, 19 nt, Homo sapiens
  misc_RNA (1)...(19): siRNA sense strand
caacagaagccacagauau

SEQ ID NO: 600432 - RNA, 19 nt, Homo sapiens
  misc_RNA (1)...(19): siRNA sense strand
caagagagaacaaauauca

SEQ ID NO: 600433 - RNA, 19 nt, Homo sapiens
  misc_RNA (1)...(19): siRNA sense strand
ugaaagaacuccugaaucg

SEQ ID NO: 600434 - RNA, 19 nt, Homo sapiens
  misc_RNA (1)...(19): siRNA sense strand
ccagaggaauuuaauguau

SEQ ID NO: 600435 - RNA, 19 nt, Homo sapiens
  misc_RNA (1)...(19): siRNA sense strand
gcauaugguuucaucagaa

SEQ ID NO: 600436 - RNA, 19 nt, Homo sapiens
  misc_RNA (1)...(19): siRNA sense strand
ggagcaauaugaacuuguu

SEQ ID NO: 600437 - RNA, 19 nt, Homo sapiens
  misc_RNA (1)...(19): siRNA sense strand
acaaaggcauucugcagua

SEQ ID NO: 600438 - RNA, 19 nt, Homo sapiens
  misc_RNA (1)...(19): siRNA sense strand
ccagaagaaucccagaauu

SEQ ID NO: 600439 - RNA, 19 nt, Homo sapiens
  misc_RNA (1)...(19): siRNA sense strand
guaauggccugccgagaau

SEQ ID NO: 600440 - RNA, 19 nt, Homo sapiens
  misc_RNA (1)...(19): siRNA sense strand
ugaaacaccugaucuugug

SEQ ID NO: 600441 - RNA, 19 nt, Homo sapiens
  misc_RNA (1)...(19): siRNA sense strand
gaugagaaaggacauguaa

SEQ ID NO: 600442 - RNA, 19 nt, Homo sapiens
  misc_RNA (1)...(19): siRNA sense strand
ccagaccgcuugccucuug

SEQ ID NO: 600443 - RNA, 19 nt, Homo sapiens
  misc_RNA (1)...(19): siRNA sense strand
ggugauacuucccagaauu

SEQ ID NO: 600444 - RNA, 19 nt, Homo sapiens
  misc_RNA (1)...(19): siRNA sense strand
caagaaaugagaacacaaa

SEQ ID NO: 600445 - RNA, 19 nt, Homo sapiens
  misc_RNA (1)...(19): siRNA sense strand
gaucacagccgaguuaaau

SEQ ID NO: 600446 - RNA, 19 nt, Homo sapiens
  misc_RNA (1)...(19): siRNA sense strand
ugacaagagagaacaaaua

SEQ ID NO: 600447 - RNA, 19 nt, Homo sapiens
  misc_RNA (1)...(19): siRNA sense strand
caaagccaguguugcauau

SEQ ID NO: 600448 - RNA, 19 nt, Homo sapiens
  misc_RNA (1)...(19): siRNA sense strand
gauuauacguggaauuuac

SEQ ID NO: 600449 - RNA, 19 nt, Homo sapiens
  misc_RNA (1)...(19): siRNA sense strand
gacaagagagaacaaauau

SEQ ID NO: 600450 - RNA, 19 nt, Homo sapiens
  misc_RNA (1)...(19): siRNA sense strand
gaagaacaggugccauuug

SEQ ID NO: 600451 - RNA, 19 nt, Homo sapiens
  misc_RNA (1)...(19): siRNA sense strand
cuaauccacuucacucuga

SEQ ID NO: 600452 - RNA, 19 nt, Homo sapiens
  misc_RNA (1)...(19): siRNA sense strand
caagagauccaccuucaga

SEQ ID NO: 600453 - RNA, 19 nt, Homo sapiens
  misc_RNA (1)...(19): siRNA sense strand
uaaagacuccuucacaaga

SEQ ID NO: 600454 - RNA, 19 nt, Homo sapiens
  misc_RNA (1)...(19): siRNA sense strand
gcaggacaaugauagauac

SEQ ID NO: 600455 - RNA, 19 nt, Homo sapiens
  misc_RNA (1)...(19): siRNA sense strand
gacaugauaagcuuaauga

SEQ ID NO: 600456 - RNA, 19 nt, Homo sapiens
  misc_RNA (1)...(19): siRNA sense strand
ucaggacacucuuacuuga

SEQ ID NO: 600457 - RNA, 19 nt, Homo sapiens
  misc_RNA (1)...(19): siRNA sense strand
cagacuauaucaaugcaaa

SEQ ID NO: 600458 - RNA, 19 nt, Homo sapiens
  misc_RNA (1)...(19): siRNA sense strand
ggacaaugauagauaccau

SEQ ID NO: 600459 - RNA, 19 nt, Homo sapiens
  misc_RNA (1)...(19): siRNA sense strand
cauaacguuugcaccauuu

SEQ ID NO: 600460 - RNA, 19 nt, Homo sapiens
  misc_RNA (1)...(19): siRNA sense strand
ucacaagauucagacuaua

SEQ ID NO: 600461 - RNA, 19 nt, Homo sapiens
  misc_RNA (1)...(19): siRNA sense strand
ggaagaacaggugccauuu

SEQ ID NO: 600462 - RNA, 19 nt, Homo sapiens
  misc_RNA (1)...(19): siRNA sense strand
cgggagguauucacuauga

SEQ ID NO: 600463 - RNA, 19 nt, Homo sapiens
  misc_RNA (1)...(19): siRNA sense strand
gauaugggaguauaauguu

SEQ ID NO: 600464 - RNA, 19 nt, Homo sapiens
  misc_RNA (1)...(19): siRNA sense strand
gauaacacuucaccacucu

SEQ ID NO: 600465 - RNA, 19 nt, Homo sapiens
  misc_RNA (1)...(19): siRNA sense strand
ugauuuaucugaaggcaau

SEQ ID NO: 600466 - RNA, 19 nt, Homo sapiens
  misc_RNA (1)...(19): siRNA sense strand
uuaagaagauugucuacca

SEQ ID NO: 600467 - RNA, 19 nt, Homo sapiens
  misc_RNA (1)...(19): siRNA sense strand
uaaaucugcuucaccuugu

SEQ ID NO: 600468 - RNA, 19 nt, Homo sapiens
  misc_RNA (1)...(19): siRNA sense strand
ggaacacacuuuugaauag

SEQ ID NO: 600469 - RNA, 19 nt, Homo sapiens
  misc_RNA (1)...(19): siRNA sense strand
uaagaagauugucuaccaa

SEQ ID NO: 600470 - RNA, 19 nt, Homo sapiens
  misc_RNA (1)...(19): siRNA sense strand
acuaaaagcugggaaaaua

SEQ ID NO: 600471 - RNA, 19 nt, Homo sapiens
  misc_RNA (1)...(19): siRNA sense strand
gcuauuggccuuuguaugg

SEQ ID NO: 600472 - RNA, 19 nt, Homo sapiens
  misc_RNA (1)...(19): siRNA sense strand
ggaguauaauguugugauc

SEQ ID NO: 600473 - RNA, 19 nt, Homo sapiens
  misc_RNA (1)...(19): siRNA sense strand
uaauauagcaggaacaaca

SEQ ID NO: 600474 - RNA, 19 nt, Homo sapiens
  misc_RNA (1)...(19): siRNA sense strand
guaacguggucauuucaug

SEQ ID NO: 600475 - RNA, 19 nt, Homo sapiens
  misc_RNA (1)...(19): siRNA sense strand
cauguaacguggucauuuc

SEQ ID NO: 600476 - RNA, 19 nt, Homo sapiens
  misc_RNA (1)...(19): siRNA sense strand
gaccucaacagaaacuaua

SEQ ID NO: 600477 - RNA, 19 nt, Homo sapiens
  misc_RNA (1)...(19): siRNA sense strand
ggacacucuuacuugaauu

SEQ ID NO: 600478 - RNA, 19 nt, Homo sapiens
  misc_RNA (1)...(19): siRNA sense strand
ccauaacguuugcaccauu

SEQ ID NO: 600479 - RNA, 19 nt, Homo sapiens
  misc_RNA (1)...(19): siRNA sense strand
aaagaacuccugaaucguu

SEQ ID NO: 600480 - RNA, 19 nt, Homo sapiens
  misc_RNA (1)...(19): siRNA sense strand
guaacacaaucaaacaaag

SEQ ID NO: 600481 - RNA, 19 nt, Homo sapiens
  misc_RNA (1)...(19): siRNA sense strand
ccauuugugccauagauua

SEQ ID NO: 600482 - RNA, 19 nt, Homo sapiens
  misc_RNA (1)...(19): siRNA sense strand
aagaacaggugccauuugu

SEQ ID NO: 600483 - RNA, 19 nt, Homo sapiens
  misc_RNA (1)...(19): siRNA sense strand
ggcuguaucaguuucauua

SEQ ID NO: 600484 - RNA, 19 nt, Homo sapiens
  misc_RNA (1)...(19): siRNA sense strand
uagaauguccaccuacuuu

SEQ ID NO: 600485 - RNA, 19 nt, Homo sapiens
  misc_RNA (1)...(19): siRNA sense strand
gaugaaagaaacucugaug

SEQ ID NO: 600486 - RNA, 19 nt, Homo sapiens
  misc_RNA (1)...(19): siRNA sense strand
uguguggacugcaguguaa

SEQ ID NO: 600487 - RNA, 19 nt, Homo sapiens
  misc_RNA (1)...(19): siRNA sense strand
ccaaagccaguguugcaua

SEQ ID NO: 600488 - RNA, 19 nt, Homo sapiens
  misc_RNA (1)...(19): siRNA sense strand
gaacuggccagaccaugau

SEQ ID NO: 600489 - RNA, 19 nt, Homo sapiens
  misc_RNA (1)...(19): siRNA sense strand
ggaggaugauaugggagua

SEQ ID NO: 600490 - RNA, 19 nt, Homo sapiens
  misc_RNA (1)...(19): siRNA sense strand
ccacccaucuugacaccuu

SEQ ID NO: 600491 - RNA, 19 nt, Homo sapiens
  misc_RNA (1)...(19): siRNA sense strand
augaagauguuccuauuug

SEQ ID NO: 600492 - RNA, 19 nt, Homo sapiens
  misc_RNA (1)...(19): siRNA sense strand
aagcauauguagcaacuca

SEQ ID NO: 600493 - RNA, 19 nt, Homo sapiens
  misc_RNA (1)...(19): siRNA sense strand
guuagcaagugaacauaau

SEQ ID NO: 600494 - RNA, 19 nt, Homo sapiens
  misc_RNA (1)...(19): siRNA sense strand
caccuuguauagcugauaa

SEQ ID NO: 600495 - RNA, 19 nt, Homo sapiens
  misc_RNA (1)...(19): siRNA sense strand
acaaggacauacugccauu

SEQ ID NO: 600496 - RNA, 19 nt, Homo sapiens
  misc_RNA (1)...(19): siRNA sense strand
gcugauggagugaaugaaa

SEQ ID NO: 600497 - RNA, 19 nt, Homo sapiens
  misc_RNA (1)...(19): siRNA sense strand
ggacauacugccauuugau

SEQ ID NO: 600498 - RNA, 19 nt, Homo sapiens
  misc_RNA (1)...(19): siRNA sense strand
ucacagccgaguuaaauug

SEQ ID NO: 600499 - RNA, 19 nt, Homo sapiens
  misc_RNA (1)...(19): siRNA sense strand
aaugauagauaccauccaa

SEQ ID NO: 600500 - RNA, 19 nt, Homo sapiens
  misc_RNA (1)...(19): siRNA sense strand
ggcaggacaaugauagaua

SEQ ID NO: 600501 - RNA, 19 nt, Homo sapiens
  misc_RNA (1)...(19): siRNA sense strand
ggacaugauaagcuuaaug

SEQ ID NO: 600502 - RNA, 19 nt, Homo sapiens
  misc_RNA (1)...(19): siRNA sense strand
ggcaauuccucagauauca

SEQ ID NO: 600503 - RNA, 19 nt, Homo sapiens
  misc_RNA (1)...(19): siRNA sense strand
acccauaccugauuuaucu

SEQ ID NO: 600504 - RNA, 19 nt, Homo sapiens
  misc_RNA (1)...(19): siRNA sense strand
gaucuaaaugucggugaua

SEQ ID NO: 600505 - RNA, 19 nt, Homo sapiens
  misc_RNA (1)...(19): siRNA sense strand
gaacaagcaagaacagacu

SEQ ID NO: 600506 - RNA, 19 nt, Homo sapiens
  misc_RNA (1)...(19): siRNA sense strand
gagauccaccuucagaaug

SEQ ID NO: 600507 - RNA, 19 nt, Homo sapiens
  misc_RNA (1)...(19): siRNA sense strand
gagagaacaaauaucagaa

SEQ ID NO: 600508 - RNA, 19 nt, Homo sapiens
  misc_RNA (1)...(19): siRNA sense strand
gaauguccaccuacuuuca

SEQ ID NO: 600509 - RNA, 19 nt, Homo sapiens
  misc_RNA (1)...(19): siRNA sense strand
ugagaaaugugaucaucca

SEQ ID NO: 600510 - RNA, 19 nt, Homo sapiens
  misc_RNA (1)...(19): siRNA sense strand
aagaacuccugaaucguuu

SEQ ID NO: 600511 - RNA, 19 nt, Homo sapiens
  misc_RNA (1)...(19): siRNA sense strand
gauucagacuauaucaaug

SEQ ID NO: 600512 - RNA, 19 nt, Homo sapiens
  misc_RNA (1)...(19): siRNA sense strand
ccacaggaauuaaguucag

SEQ ID NO: 600513 - RNA, 19 nt, Homo sapiens
  misc_RNA (1)...(19): siRNA sense strand
cagcuacaacuauaugaaa

SEQ ID NO: 600514 - RNA, 19 nt, Homo sapiens
  misc_RNA (1)...(19): siRNA sense strand
caaaggagcaauaugaacu

SEQ ID NO: 600515 - RNA, 19 nt, Homo sapiens
  misc_RNA (1)...(19): siRNA sense strand
ugaagauguuccuauuugu

SEQ ID NO: 600516 - RNA, 19 nt, Homo sapiens
  misc_RNA (1)...(19): siRNA sense strand
ugacucagacucagaugaa

SEQ ID NO: 600517 - RNA, 19 nt, Homo sapiens
  misc_RNA (1)...(19): siRNA sense strand
ugaaggcaauuccucagau

SEQ ID NO: 600518 - RNA, 19 nt, Homo sapiens
  misc_RNA (1)...(19): siRNA sense strand
ccauacccauaccugauuu

SEQ ID NO: 600519 - RNA, 19 nt, Homo sapiens
  misc_RNA (1)...(19): siRNA sense strand
aaagacuccuucacaagau

SEQ ID NO: 600520 - RNA, 19 nt, Homo sapiens
  misc_RNA (1)...(19): siRNA sense strand
agacucagaugaaagaaac

SEQ ID NO: 600521 - RNA, 19 nt, Homo sapiens
  misc_RNA (1)...(19): siRNA sense strand
ugaaacagaugcaggagaa

SEQ ID NO: 600522 - RNA, 19 nt, Homo sapiens
  misc_RNA (1)...(19): siRNA sense strand
gaugagaucaagaagauuu

SEQ ID NO: 600523 - RNA, 19 nt, Homo sapiens
  misc_RNA (1)...(19): siRNA sense strand
gcaaagucgucaccuaugg

SEQ ID NO: 600524 - RNA, 19 nt, Homo sapiens
  misc_RNA (1)...(19): siRNA sense strand
guccagaccuuccugauuc

SEQ ID NO: 600525 - RNA, 19 nt, Homo sapiens
  misc_RNA (1)...(19): siRNA sense strand
cugccuugcucgucaauua

SEQ ID NO: 600526 - RNA, 19 nt, Homo sapiens
  misc_RNA (1)...(19): siRNA sense strand
caacuucgcagaccucaug

SEQ ID NO: 600527 - RNA, 19 nt, Homo sapiens
  misc_RNA (1)...(19): siRNA sense strand
ucacacaucccaucgacua

SEQ ID NO: 600528 - RNA, 19 nt, Homo sapiens
  misc_RNA (1)...(19): siRNA sense strand
uggaugagaucaagaagau

SEQ ID NO: 600529 - RNA, 19 nt, Homo sapiens
  misc_RNA (1)...(19): siRNA sense strand
ggacaugguggaaucaguu

SEQ ID NO: 600530 - RNA, 19 nt, Homo sapiens
  misc_RNA (1)...(19): siRNA sense strand
cuaaaggaguggacauugu

SEQ ID NO: 600531 - RNA, 19 nt, Homo sapiens
  misc_RNA (1)...(19): siRNA sense strand
ucaagaagauuuccccuaa

SEQ ID NO: 600532 - RNA, 19 nt, Homo sapiens
  misc_RNA (1)...(19): siRNA sense strand
gcucgucaauuacauuaca

SEQ ID NO: 600533 - RNA, 19 nt, Homo sapiens
  misc_RNA (1)...(19): siRNA sense strand
gggcaaagucgucaccuau

SEQ ID NO: 600534 - RNA, 19 nt, Homo sapiens
  misc_RNA (1)...(19): siRNA sense strand
ggccaugaccuuugaggaa

SEQ ID NO: 600535 - RNA, 19 nt, Homo sapiens
  misc_RNA (1)...(19): siRNA sense strand
gggcuacaaccuccugaaa

SEQ ID NO: 600536 - RNA, 19 nt, Homo sapiens
  misc_RNA (1)...(19): siRNA sense strand
gagaccgggugaugguguu

SEQ ID NO: 600537 - RNA, 19 nt, Homo sapiens
  misc_RNA (1)...(19): siRNA sense strand
gcugaugccaugaaacaga

SEQ ID NO: 600538 - RNA, 19 nt, Homo sapiens
  misc_RNA (1)...(19): siRNA sense strand
gcccggacaugguggaauc

SEQ ID NO: 600539 - RNA, 19 nt, Homo sapiens
  misc_RNA (1)...(19): siRNA sense strand
uggagaaugugacaguguu

SEQ ID NO: 600540 - RNA, 19 nt, Homo sapiens
  misc_RNA (1)...(19): siRNA sense strand
gccguacaguggagaaugu

SEQ ID NO: 600541 - RNA, 19 nt, Homo sapiens
  misc_RNA (1)...(19): siRNA sense strand
gcuacaaccuccugaaacc

SEQ ID NO: 600542 - RNA, 19 nt, Homo sapiens
  misc_RNA (1)...(19): siRNA sense strand
acgaggcacugaaggagaa

SEQ ID NO: 600543 - RNA, 19 nt, Homo sapiens
  misc_RNA (1)...(19): siRNA sense strand
cgacugacuacguggauga

SEQ ID NO: 600544 - RNA, 19 nt, Homo sapiens
  misc_RNA (1)...(19): siRNA sense strand
gaagauuuccccuaaagga

SEQ ID NO: 600545 - RNA, 19 nt, Homo sapiens
  misc_RNA (1)...(19): siRNA sense strand
gggcaagguccuccugguu

SEQ ID NO: 600546 - RNA, 19 nt, Homo sapiens
  misc_RNA (1)...(19): siRNA sense strand
ccuacaugguccucuuuga

SEQ ID NO: 600547 - RNA, 19 nt, Homo sapiens
  misc_RNA (1)...(19): siRNA sense strand
cugaggccaugaccuuuga

SEQ ID NO: 600548 - RNA, 19 nt, Homo sapiens
  misc_RNA (1)...(19): siRNA sense strand
caagaagauuuccccuaaa

SEQ ID NO: 600549 - RNA, 19 nt, Homo sapiens
  misc_RNA (1)...(19): siRNA sense strand
cacaucccaucgacuauca

SEQ ID NO: 600550 - RNA, 19 nt, Homo sapiens
  misc_RNA (1)...(19): siRNA sense strand
gcaagcacgaggcacugaa

SEQ ID NO: 600551 - RNA, 19 nt, Homo sapiens
  misc_RNA (1)...(19): siRNA sense strand
cuacguggaugagaucaag

SEQ ID NO: 600552 - RNA, 19 nt, Homo sapiens
  misc_RNA (1)...(19): siRNA sense strand
aaacagaugcaggagaaga

SEQ ID NO: 600553 - RNA, 19 nt, Homo sapiens
  misc_RNA (1)...(19): siRNA sense strand
cagccuacaugguccucuu

SEQ ID NO: 600554 - RNA, 19 nt, Homo sapiens
  misc_RNA (1)...(19): siRNA sense strand
agaagaaugugggcaaggu

SEQ ID NO: 600555 - RNA, 19 nt, Homo sapiens
  misc_RNA (1)...(19): siRNA sense strand
caaagucgucaccuaugga

SEQ ID NO: 600556 - RNA, 19 nt, Homo sapiens
  misc_RNA (1)...(19): siRNA sense strand
ugaaacccaugggcaaagu

SEQ ID NO: 600557 - RNA, 19 nt, Homo sapiens
  misc_RNA (1)...(19): siRNA sense strand
guacaaccagggccacauc

SEQ ID NO: 600558 - RNA, 19 nt, Homo sapiens
  misc_RNA (1)...(19): siRNA sense strand
caaccagggccacaucaag

SEQ ID NO: 600559 - RNA, 19 nt, Homo sapiens
  misc_RNA (1)...(19): siRNA sense strand
ggcaaagucgucaccuaug

SEQ ID NO: 600560 - RNA, 19 nt, Homo sapiens
  misc_RNA (1)...(19): siRNA sense strand
ugggcaaagucgucaccua

SEQ ID NO: 600561 - RNA, 19 nt, Homo sapiens
  misc_RNA (1)...(19): siRNA sense strand
uuacauuacagccuacaug

SEQ ID NO: 600562 - RNA, 19 nt, Homo sapiens
  misc_RNA (1)...(19): siRNA sense strand
ggagaaugugacaguguuc

SEQ ID NO: 600563 - RNA, 19 nt, Homo sapiens
  misc_RNA (1)...(19): siRNA sense strand
ucgacuaucacacgacuga

SEQ ID NO: 600564 - RNA, 19 nt, Homo sapiens
  misc_RNA (1)...(19): siRNA sense strand
ccuaaaggaguggacauug

SEQ ID NO: 600565 - RNA, 19 nt, Homo sapiens
  misc_RNA (1)...(19): siRNA sense strand
acaugguccucuuugacuu

SEQ ID NO: 600566 - RNA, 19 nt, Homo sapiens
  misc_RNA (1)...(19): siRNA sense strand
cugaugccaugaaacagau

SEQ ID NO: 600567 - RNA, 19 nt, Homo sapiens
  misc_RNA (1)...(19): siRNA sense strand
aaagucgucaccuauggaa

SEQ ID NO: 600568 - RNA, 19 nt, Homo sapiens
  misc_RNA (1)...(19): siRNA sense strand
gagcugggcuucuacaagu

SEQ ID NO: 600569 - RNA, 19 nt, Homo sapiens
  misc_RNA (1)...(19): siRNA sense strand
acaaggagaugcagagcua

SEQ ID NO: 600570 - RNA, 19 nt, Homo sapiens
  misc_RNA (1)...(19): siRNA sense strand
gaagaugcacuaucagaau

SEQ ID NO: 600571 - RNA, 19 nt, Homo sapiens
  misc_RNA (1)...(19): siRNA sense strand
gagaagaugcacuaucaga

SEQ ID NO: 600572 - RNA, 19 nt, Homo sapiens
  misc_RNA (1)...(19): siRNA sense strand
aaccugaucuccaguguga

SEQ ID NO: 600573 - RNA, 19 nt, Homo sapiens
  misc_RNA (1)...(19): siRNA sense strand
aggagaagaugcacuauca

SEQ ID NO: 600574 - RNA, 19 nt, Homo sapiens
  misc_RNA (1)...(19): siRNA sense strand
gaaagccaguuccucaaaa

SEQ ID NO: 600575 - RNA, 19 nt, Homo sapiens
  misc_RNA (1)...(19): siRNA sense strand
ucucagaccugggcuaugu

SEQ ID NO: 600576 - RNA, 19 nt, Homo sapiens
  misc_RNA (1)...(19): siRNA sense strand
gagcgaggcguccaucaug

SEQ ID NO: 600577 - RNA, 19 nt, Homo sapiens
  misc_RNA (1)...(19): siRNA sense strand
ccugugagcugggcuucua

SEQ ID NO: 600578 - RNA, 19 nt, Homo sapiens
  misc_RNA (1)...(19): siRNA sense strand
gauugugacugaguacaug

SEQ ID NO: 600579 - RNA, 19 nt, Homo sapiens
  misc_RNA (1)...(19): siRNA sense strand
gaucaaguacuacgagaag

SEQ ID NO: 600580 - RNA, 19 nt, Homo sapiens
  misc_RNA (1)...(19): siRNA sense strand
gggacacacccaagaugua

SEQ ID NO: 600581 - RNA, 19 nt, Homo sapiens
  misc_RNA (1)...(19): siRNA sense strand
gcgcgucuaugcugagauc

SEQ ID NO: 600582 - RNA, 19 nt, Homo sapiens
  misc_RNA (1)...(19): siRNA sense strand
gaagauccugggcagcauu

SEQ ID NO: 600583 - RNA, 19 nt, Homo sapiens
  misc_RNA (1)...(19): siRNA sense strand
aagaugcacuaucagaaug

SEQ ID NO: 600584 - RNA, 19 nt, Homo sapiens
  misc_RNA (1)...(19): siRNA sense strand
gugaaugggacaucaguga

SEQ ID NO: 600585 - RNA, 19 nt, Homo sapiens
  misc_RNA (1)...(19): siRNA sense strand
cugcucaucugcaagaaga

SEQ ID NO: 600586 - RNA, 19 nt, Homo sapiens
  misc_RNA (1)...(19): siRNA sense strand
acagcaaccuggucugcaa

SEQ ID NO: 600587 - RNA, 19 nt, Homo sapiens
  misc_RNA (1)...(19): siRNA sense strand
gagcgggacacacccaaga

SEQ ID NO: 600588 - RNA, 19 nt, Homo sapiens
  misc_RNA (1)...(19): siRNA sense strand
gacgggcaguucaccauca

SEQ ID NO: 600589 - RNA, 19 nt, Homo sapiens
  misc_RNA (1)...(19): siRNA sense strand
uggaguaugagaucaagua

SEQ ID NO: 600590 - RNA, 19 nt, Homo sapiens
  misc_RNA (1)...(19): siRNA sense strand
ugacugaguacauggagaa

SEQ ID NO: 600591 - RNA, 19 nt, Homo sapiens
  misc_RNA (1)...(19): siRNA sense strand
agaaagccaguuccucaaa

SEQ ID NO: 600592 - RNA, 19 nt, Homo sapiens
  misc_RNA (1)...(19): siRNA sense strand
acugugaccucagcuacua

SEQ ID NO: 600593 - RNA, 19 nt, Homo sapiens
  misc_RNA (1)...(19): siRNA sense strand
ggacacacccaagauguac

SEQ ID NO: 600594 - RNA, 19 nt, Homo sapiens
  misc_RNA (1)...(19): siRNA sense strand
gauugucaguguccucgau

SEQ ID NO: 600595 - RNA, 19 nt, Homo sapiens
  misc_RNA (1)...(19): siRNA sense strand
cacaugaacuacuccuucu

SEQ ID NO: 600596 - RNA, 19 nt, Homo sapiens
  misc_RNA (1)...(19): siRNA sense strand
ccucuaggauccacaucga

SEQ ID NO: 600597 - RNA, 19 nt, Homo sapiens
  misc_RNA (1)...(19): siRNA sense strand
ggaucgaggccgucaaugg

SEQ ID NO: 600598 - RNA, 19 nt, Homo sapiens
  misc_RNA (1)...(19): siRNA sense strand
acacguaccagguuugcaa

SEQ ID NO: 600599 - RNA, 19 nt, Homo sapiens
  misc_RNA (1)...(19): siRNA sense strand
agaagaugcacuaucagaa

SEQ ID NO: 600600 - RNA, 19 nt, Homo sapiens
  misc_RNA (1)...(19): siRNA sense strand
uaugacaccaggaccauug

SEQ ID NO: 600601 - RNA, 19 nt, Homo sapiens
  misc_RNA (1)...(19): siRNA sense strand
gaggagaagaugcacuauc

SEQ ID NO: 600602 - RNA, 19 nt, Homo sapiens
  misc_RNA (1)...(19): siRNA sense strand
augcugagaucaaguuuac

SEQ ID NO: 600603 - RNA, 19 nt, Homo sapiens
  misc_RNA (1)...(19): siRNA sense strand
ccucgcuucucccagauug

SEQ ID NO: 600604 - RNA, 19 nt, Homo sapiens
  misc_RNA (1)...(19): siRNA sense strand
gagcuucggcguggucaug

SEQ ID NO: 600605 - RNA, 19 nt, Homo sapiens
  misc_RNA (1)...(19): siRNA sense strand
cuccgcaucuacuauaaga

SEQ ID NO: 600606 - RNA, 19 nt, Homo sapiens
  misc_RNA (1)...(19): siRNA sense strand
gcacacaagaaagccaguu

SEQ ID NO: 600607 - RNA, 19 nt, Homo sapiens
  misc_RNA (1)...(19): siRNA sense strand
ucucccagauugucagugu

SEQ ID NO: 600608 - RNA, 19 nt, Homo sapiens
  misc_RNA (1)...(19): siRNA sense strand
ggagguggagaccgggaaa

SEQ ID NO: 600609 - RNA, 19 nt, Homo sapiens
  misc_RNA (1)...(19): siRNA sense strand
gagcuacuccacccucaag

SEQ ID NO: 600610 - RNA, 19 nt, Homo sapiens
  misc_RNA (1)...(19): siRNA sense strand
ucucuccgcaucuacuaua

SEQ ID NO: 600611 - RNA, 19 nt, Homo sapiens
  misc_RNA (1)...(19): siRNA sense strand
gaugcacuaucagaaugga

SEQ ID NO: 600612 - RNA, 19 nt, Homo sapiens
  misc_RNA (1)...(19): siRNA sense strand
ucaaguacuacgagaagga

SEQ ID NO: 600613 - RNA, 19 nt, Homo sapiens
  misc_RNA (1)...(19): siRNA sense strand
gaaugggacaucagugacu

SEQ ID NO: 600614 - RNA, 19 nt, Homo sapiens
  misc_RNA (1)...(19): siRNA sense strand
ucugcaaggugucugacuu

SEQ ID NO: 600615 - RNA, 19 nt, Homo sapiens
  misc_RNA (1)...(19): siRNA sense strand
ggaucugccugacgcucau

SEQ ID NO: 600616 - RNA, 19 nt, Homo sapiens
  misc_RNA (1)...(19): siRNA sense strand
ugaaccugaucuccagugu

SEQ ID NO: 600617 - RNA, 19 nt, Homo sapiens
  misc_RNA (1)...(19): siRNA sense strand
gcucgacuguuggcacaag

SEQ ID NO: 600618 - RNA, 19 nt, Homo sapiens
  misc_RNA (1)...(19): siRNA sense strand
gcaucuacuauaagaagug

SEQ ID NO: 600619 - RNA, 19 nt, Homo sapiens
  misc_RNA (1)...(19): siRNA sense strand
cgucuaugcugagaucaag

SEQ ID NO: 600620 - RNA, 19 nt, Homo sapiens
  misc_RNA (1)...(19): siRNA sense strand
gaccuucaaccucuacuac

SEQ ID NO: 600621 - RNA, 19 nt, Homo sapiens
  misc_RNA (1)...(19): siRNA sense strand
ccgcaucuacuauaagaag

SEQ ID NO: 600622 - RNA, 19 nt, Homo sapiens
  misc_RNA (1)...(19): siRNA sense strand
uaggauccacaucgagaaa

SEQ ID NO: 600623 - RNA, 19 nt, Homo sapiens
  misc_RNA (1)...(19): siRNA sense strand
acgaggagaagaugcacua

SEQ ID NO: 600624 - RNA, 19 nt, Homo sapiens
  misc_RNA (1)...(19): siRNA sense strand
caaggaagcuggaaauaua

SEQ ID NO: 600625 - RNA, 19 nt, Homo sapiens
  misc_RNA (1)...(19): siRNA sense strand
caaagaaacucaaggauga

SEQ ID NO: 600626 - RNA, 19 nt, Homo sapiens
  misc_RNA (1)...(19): siRNA sense strand
gauauaagguggaauacua

SEQ ID NO: 600627 - RNA, 19 nt, Homo sapiens
  misc_RNA (1)...(19): siRNA sense strand
caagaaauguccaaguaua

SEQ ID NO: 600628 - RNA, 19 nt, Homo sapiens
  misc_RNA (1)...(19): siRNA sense strand
ggcaagaaauguccaagua

SEQ ID NO: 600629 - RNA, 19 nt, Homo sapiens
  misc_RNA (1)...(19): siRNA sense strand
gcaaggcccucacguuuau

SEQ ID NO: 600630 - RNA, 19 nt, Homo sapiens
  misc_RNA (1)...(19): siRNA sense strand
gaacagaguggcaguuaaa

SEQ ID NO: 600631 - RNA, 19 nt, Homo sapiens
  misc_RNA (1)...(19): siRNA sense strand
gaagucgaauuaaagauga

SEQ ID NO: 600632 - RNA, 19 nt, Homo sapiens
  misc_RNA (1)...(19): siRNA sense strand
gggcaaagcuauccagguu

SEQ ID NO: 600633 - RNA, 19 nt, Homo sapiens
  misc_RNA (1)...(19): siRNA sense strand
gcaguuaaaugcacacaga

SEQ ID NO: 600634 - RNA, 19 nt, Homo sapiens
  misc_RNA (1)...(19): siRNA sense strand
caaguuguccucucauuua

SEQ ID NO: 600635 - RNA, 19 nt, Homo sapiens
  misc_RNA (1)...(19): siRNA sense strand
gcgaugaggucaagucuga

SEQ ID NO: 600636 - RNA, 19 nt, Homo sapiens
  misc_RNA (1)...(19): siRNA sense strand
ggugcaaacuguuacauuu

SEQ ID NO: 600637 - RNA, 19 nt, Homo sapiens
  misc_RNA (1)...(19): siRNA sense strand
gaccagcacuucccucaaa

SEQ ID NO: 600638 - RNA, 19 nt, Homo sapiens
  misc_RNA (1)...(19): siRNA sense strand
gaaaucagccgcauuccaa

SEQ ID NO: 600639 - RNA, 19 nt, Homo sapiens
  misc_RNA (1)...(19): siRNA sense strand
uaaagaugauugcaacuga

SEQ ID NO: 600640 - RNA, 19 nt, Homo sapiens
  misc_RNA (1)...(19): siRNA sense strand
ggaagaaugucccuaaggu

SEQ ID NO: 600641 - RNA, 19 nt, Homo sapiens
  misc_RNA (1)...(19): siRNA sense strand
gaagucaccuugccuuuac

SEQ ID NO: 600642 - RNA, 19 nt, Homo sapiens
  misc_RNA (1)...(19): siRNA sense strand
uggaugaucucaccauuaa

SEQ ID NO: 600643 - RNA, 19 nt, Homo sapiens
  misc_RNA (1)...(19): siRNA sense strand
gaguggagcuguuugcuau

SEQ ID NO: 600644 - RNA, 19 nt, Homo sapiens
  misc_RNA (1)...(19): siRNA sense strand
ggaaauauaacaacugaug

SEQ ID NO: 600645 - RNA, 19 nt, Homo sapiens
  misc_RNA (1)...(19): siRNA sense strand
gguagaagaugaauauagu

SEQ ID NO: 600646 - RNA, 19 nt, Homo sapiens
  misc_RNA (1)...(19): siRNA sense strand
gaucaaggcacuacauuau

SEQ ID NO: 600647 - RNA, 19 nt, Homo sapiens
  misc_RNA (1)...(19): siRNA sense strand
gacagaggcuucacuggaa

SEQ ID NO: 600648 - RNA, 19 nt, Homo sapiens
  misc_RNA (1)...(19): siRNA sense strand
cagaagaaguaaagacauu

SEQ ID NO: 600649 - RNA, 19 nt, Homo sapiens
  misc_RNA (1)...(19): siRNA sense strand
gaauaccaauuaugccauu

SEQ ID NO: 600650 - RNA, 19 nt, Homo sapiens
  misc_RNA (1)...(19): siRNA sense strand
ucaaggcacuacauuauau

SEQ ID NO: 600651 - RNA, 19 nt, Homo sapiens
  misc_RNA (1)...(19): siRNA sense strand
ugagaggacuggcaagaaa

SEQ ID NO: 600652 - RNA, 19 nt, Homo sapiens
  misc_RNA (1)...(19): siRNA sense strand
gacccaagcuggcaugaga

SEQ ID NO: 600653 - RNA, 19 nt, Homo sapiens
  misc_RNA (1)...(19): siRNA sense strand
gaccaggagucucuguuaa

SEQ ID NO: 600654 - RNA, 19 nt, Homo sapiens
  misc_RNA (1)...(19): siRNA sense strand
ggaagucaccuugccuuua

SEQ ID NO: 600655 - RNA, 19 nt, Homo sapiens
  misc_RNA (1)...(19): siRNA sense strand
cauacaauguggcagauuu

SEQ ID NO: 600656 - RNA, 19 nt, Homo sapiens
  misc_RNA (1)...(19): siRNA sense strand
acaaugagcuugccaacau

SEQ ID NO: 600657 - RNA, 19 nt, Homo sapiens
  misc_RNA (1)...(19): siRNA sense strand
gaugaucucaccauuaauu

SEQ ID NO: 600658 - RNA, 19 nt, Homo sapiens
  misc_RNA (1)...(19): siRNA sense strand
ggaauacuauccaguuucu

SEQ ID NO: 600659 - RNA, 19 nt, Homo sapiens
  misc_RNA (1)...(19): siRNA sense strand
ggauucagguuucauuugu

SEQ ID NO: 600660 - RNA, 19 nt, Homo sapiens
  misc_RNA (1)...(19): siRNA sense strand
ggaccaggagucucuguua

SEQ ID NO: 600661 - RNA, 19 nt, Homo sapiens
  misc_RNA (1)...(19): siRNA sense strand
gaccaaaccucuaaacacu

SEQ ID NO: 600662 - RNA, 19 nt, Homo sapiens
  misc_RNA (1)...(19): siRNA sense strand
cacgaaaccuucaagugua

SEQ ID NO: 600663 - RNA, 19 nt, Homo sapiens
  misc_RNA (1)...(19): siRNA sense strand
caauguguauucuguggua

SEQ ID NO: 600664 - RNA, 19 nt, Homo sapiens
  misc_RNA (1)...(19): siRNA sense strand
gcagauccuucuagcaaga

SEQ ID NO: 600665 - RNA, 19 nt, Homo sapiens
  misc_RNA (1)...(19): siRNA sense strand
cagcagaccuacacccaaa

SEQ ID NO: 600666 - RNA, 19 nt, Homo sapiens
  misc_RNA (1)...(19): siRNA sense strand
gcauacaaccugacagaaa

SEQ ID NO: 600667 - RNA, 19 nt, Homo sapiens
  misc_RNA (1)...(19): siRNA sense strand
guuguccucucauuuauuu

SEQ ID NO: 600668 - RNA, 19 nt, Homo sapiens
  misc_RNA (1)...(19): siRNA sense strand
uaaggaaccugagagugua

SEQ ID NO: 600669 - RNA, 19 nt, Homo sapiens
  misc_RNA (1)...(19): siRNA sense strand
ucauauaccuuacacaauc

SEQ ID NO: 600670 - RNA, 19 nt, Homo sapiens
  misc_RNA (1)...(19): siRNA sense strand
acaagucugugaacaauug

SEQ ID NO: 600671 - RNA, 19 nt, Homo sapiens
  misc_RNA (1)...(19): siRNA sense strand
gaagaaugcguuugugaau

SEQ ID NO: 600672 - RNA, 19 nt, Homo sapiens
  misc_RNA (1)...(19): siRNA sense strand
aaauugcucuugcucagua

SEQ ID NO: 600673 - RNA, 19 nt, Homo sapiens
  misc_RNA (1)...(19): siRNA sense strand
ccuacgaugugaauguuua

SEQ ID NO: 600674 - RNA, 19 nt, Homo sapiens
  misc_RNA (1)...(19): siRNA sense strand
gcacaagacccucagaauc

SEQ ID NO: 600675 - RNA, 19 nt, Homo sapiens
  misc_RNA (1)...(19): siRNA sense strand
agggaaacgucaagaauuu

SEQ ID NO: 600676 - RNA, 19 nt, Homo sapiens
  misc_RNA (1)...(19): siRNA sense strand
agaaagugaugaccugauu

SEQ ID NO: 600677 - RNA, 19 nt, Homo sapiens
  misc_RNA (1)...(19): siRNA sense strand
gcagcugacugaccuuguu

SEQ ID NO: 600678 - RNA, 19 nt, Homo sapiens
  misc_RNA (1)...(19): siRNA sense strand
caacugauccugaugauac

SEQ ID NO: 600679 - RNA, 19 nt, Homo sapiens
  misc_RNA (1)...(19): siRNA sense strand
ccaaauucuugcacaugua

SEQ ID NO: 600680 - RNA, 19 nt, Homo sapiens
  misc_RNA (1)...(19): siRNA sense strand
acacaucucugacgaaugg

SEQ ID NO: 600681 - RNA, 19 nt, Homo sapiens
  misc_RNA (1)...(19): siRNA sense strand
guaaggaaccugagagugu

SEQ ID NO: 600682 - RNA, 19 nt, Homo sapiens
  misc_RNA (1)...(19): siRNA sense strand
ggacacagagccaacaaga

SEQ ID NO: 600683 - RNA, 19 nt, Homo sapiens
  misc_RNA (1)...(19): siRNA sense strand
gugauccaauugaugaaua

SEQ ID NO: 600684 - RNA, 19 nt, Homo sapiens
  misc_RNA (1)...(19): siRNA sense strand
cauacaggauucagaagaa

SEQ ID NO: 600685 - RNA, 19 nt, Homo sapiens
  misc_RNA (1)...(19): siRNA sense strand
caaggcagauauuguguuc

SEQ ID NO: 600686 - RNA, 19 nt, Homo sapiens
  misc_RNA (1)...(19): siRNA sense strand
ucacaggcauggcuuugaa

SEQ ID NO: 600687 - RNA, 19 nt, Homo sapiens
  misc_RNA (1)...(19): siRNA sense strand
ugacuguaguucccguuua

SEQ ID NO: 600688 - RNA, 19 nt, Homo sapiens
  misc_RNA (1)...(19): siRNA sense strand
cagaggaacugguaccaau

SEQ ID NO: 600689 - RNA, 19 nt, Homo sapiens
  misc_RNA (1)...(19): siRNA sense strand
cugaauauguugucaaugu

SEQ ID NO: 600690 - RNA, 19 nt, Homo sapiens
  misc_RNA (1)...(19): siRNA sense strand
gagggaaacgucaagaauu

SEQ ID NO: 600691 - RNA, 19 nt, Homo sapiens
  misc_RNA (1)...(19): siRNA sense strand
uacauugacugcuaugaaa

SEQ ID NO: 600692 - RNA, 19 nt, Homo sapiens
  misc_RNA (1)...(19): siRNA sense strand
caaccugacacuccauaua

SEQ ID NO: 600693 - RNA, 19 nt, Homo sapiens
  misc_RNA (1)...(19): siRNA sense strand
gaaauccucgucaguacaa

SEQ ID NO: 600694 - RNA, 19 nt, Homo sapiens
  misc_RNA (1)...(19): siRNA sense strand
ggaaaagugcguaaauaua

SEQ ID NO: 600695 - RNA, 19 nt, Homo sapiens
  misc_RNA (1)...(19): siRNA sense strand
gaaugucccuaagguguug

SEQ ID NO: 600696 - RNA, 19 nt, Homo sapiens
  misc_RNA (1)...(19): siRNA sense strand
gaaauuacagugcguggau

SEQ ID NO: 600697 - RNA, 19 nt, Homo sapiens
  misc_RNA (1)...(19): siRNA sense strand
ccaaaccucuaaacacugu

SEQ ID NO: 600698 - RNA, 19 nt, Homo sapiens
  misc_RNA (1)...(19): siRNA sense strand
gugcagaaauauaggauca

SEQ ID NO: 600699 - RNA, 19 nt, Homo sapiens
  misc_RNA (1)...(19): siRNA sense strand
ccacgaaaccuucaagugu

SEQ ID NO: 600700 - RNA, 19 nt, Homo sapiens
  misc_RNA (1)...(19): siRNA sense strand
cagaagaggaugucaaaga

SEQ ID NO: 600701 - RNA, 19 nt, Homo sapiens
  misc_RNA (1)...(19): siRNA sense strand
ucauggagcuucagaugug

SEQ ID NO: 600702 - RNA, 19 nt, Homo sapiens
  misc_RNA (1)...(19): siRNA sense strand
agaaugcguuugugaauca

SEQ ID NO: 600703 - RNA, 19 nt, Homo sapiens
  misc_RNA (1)...(19): siRNA sense strand
gaaggcggcuuuggucauc

SEQ ID NO: 600704 - RNA, 19 nt, Homo sapiens
  misc_RNA (1)...(19): siRNA sense strand
ggcaaggcccucacguuua

SEQ ID NO: 600705 - RNA, 19 nt, Homo sapiens
  misc_RNA (1)...(19): siRNA sense strand
gcaagaaauguccaaguau

SEQ ID NO: 600706 - RNA, 19 nt, Homo sapiens
  misc_RNA (1)...(19): siRNA sense strand
ggaguuucauuucucguau

SEQ ID NO: 600707 - RNA, 19 nt, Homo sapiens
  misc_RNA (1)...(19): siRNA sense strand
gagcaaacgaccacaauag

SEQ ID NO: 600708 - RNA, 19 nt, Homo sapiens
  misc_RNA (1)...(19): siRNA sense strand
gaaacugaauauguuguca

SEQ ID NO: 600709 - RNA, 19 nt, Homo sapiens
  misc_RNA (1)...(19): siRNA sense strand
gaggcgaggugcaaacugu

SEQ ID NO: 600710 - RNA, 19 nt, Homo sapiens
  misc_RNA (1)...(19): siRNA sense strand
ggaagccuuuguuggagaa

SEQ ID NO: 600711 - RNA, 19 nt, Homo sapiens
  misc_RNA (1)...(19): siRNA sense strand
gagagucuuuggugaaaca

SEQ ID NO: 600712 - RNA, 19 nt, Homo sapiens
  misc_RNA (1)...(19): siRNA sense strand
gaauauagugagccucuga

SEQ ID NO: 600713 - RNA, 19 nt, Homo sapiens
  misc_RNA (1)...(19): siRNA sense strand
cugaugaagucgaauuaaa

SEQ ID NO: 600714 - RNA, 19 nt, Homo sapiens
  misc_RNA (1)...(19): siRNA sense strand
guggucagaugaacagauu

SEQ ID NO: 600715 - RNA, 19 nt, Homo sapiens
  misc_RNA (1)...(19): siRNA sense strand
gcugugauauucccucuag

SEQ ID NO: 600716 - RNA, 19 nt, Homo sapiens
  misc_RNA (1)...(19): siRNA sense strand
caacugaugguuaugaaau

SEQ ID NO: 600717 - RNA, 19 nt, Homo sapiens
  misc_RNA (1)...(19): siRNA sense strand
gcagauauuguguucuuga

SEQ ID NO: 600718 - RNA, 19 nt, Homo sapiens
  misc_RNA (1)...(19): siRNA sense strand
gaacauaccacugugaaac

SEQ ID NO: 600719 - RNA, 19 nt, Homo sapiens
  misc_RNA (1)...(19): siRNA sense strand
gcaaacgaccacaauagga

SEQ ID NO: 600720 - RNA, 19 nt, Homo sapiens
  misc_RNA (1)...(19): siRNA sense strand
gaucagagaccagcacuuc

SEQ ID NO: 600721 - RNA, 19 nt, Homo sapiens
  misc_RNA (1)...(19): siRNA sense strand
gcacacagagacaagaaga

SEQ ID NO: 600722 - RNA, 19 nt, Homo sapiens
  misc_RNA (1)...(19): siRNA sense strand
ucugaaaccugaaacugaa

SEQ ID NO: 600723 - RNA, 19 nt, Homo sapiens
  misc_RNA (1)...(19): siRNA sense strand
gaacaugaugcgagcaguu

SEQ ID NO: 600724 - RNA, 19 nt, Homo sapiens
  misc_RNA (1)...(19): siRNA sense strand
caaggaagcuggaaauaua

SEQ ID NO: 600725 - RNA, 19 nt, Homo sapiens
  misc_RNA (1)...(19): siRNA sense strand
caaagaaacucaaggauga

SEQ ID NO: 600726 - RNA, 19 nt, Homo sapiens
  misc_RNA (1)...(19): siRNA sense strand
gauauaagguggaauacua

SEQ ID NO: 600727 - RNA, 19 nt, Homo sapiens
  misc_RNA (1)...(19): siRNA sense strand
caagaaauguccaaguaua

SEQ ID NO: 600728 - RNA, 19 nt, Homo sapiens
  misc_RNA (1)...(19): siRNA sense strand
ggcaagaaauguccaagua

SEQ ID NO: 600729 - RNA, 19 nt, Homo sapiens
  misc_RNA (1)...(19): siRNA sense strand
gcaaggcccucacguuuau

SEQ ID NO: 600730 - RNA, 19 nt, Homo sapiens
  misc_RNA (1)...(19): siRNA sense strand
gaacagaguggcaguuaaa

SEQ ID NO: 600731 - RNA, 19 nt, Homo sapiens
  misc_RNA (1)...(19): siRNA sense strand
gaagucgaauuaaagauga

SEQ ID NO: 600732 - RNA, 19 nt, Homo sapiens
  misc_RNA (1)...(19): siRNA sense strand
gggcaaagcuauccagguu

SEQ ID NO: 600733 - RNA, 19 nt, Homo sapiens
  misc_RNA (1)...(19): siRNA sense strand
gcaguuaaaugcacacaga

SEQ ID NO: 600734 - RNA, 19 nt, Homo sapiens
  misc_RNA (1)...(19): siRNA sense strand
caaguuguccucucauuua

SEQ ID NO: 600735 - RNA, 19 nt, Homo sapiens
  misc_RNA (1)...(19): siRNA sense strand
gcgaugaggucaagucuga

SEQ ID NO: 600736 - RNA, 19 nt, Homo sapiens
  misc_RNA (1)...(19): siRNA sense strand
ggugcaaacuguuacauuu

SEQ ID NO: 600737 - RNA, 19 nt, Homo sapiens
  misc_RNA (1)...(19): siRNA sense strand
gaccagcacuucccucaaa

SEQ ID NO: 600738 - RNA, 19 nt, Homo sapiens
  misc_RNA (1)...(19): siRNA sense strand
gaaaucagccgcauuccaa

SEQ ID NO: 600739 - RNA, 19 nt, Homo sapiens
  misc_RNA (1)...(19): siRNA sense strand
uaaagaugauugcaacuga

SEQ ID NO: 600740 - RNA, 19 nt, Homo sapiens
  misc_RNA (1)...(19): siRNA sense strand
ggaagaaugucccuaaggu

SEQ ID NO: 600741 - RNA, 19 nt, Homo sapiens
  misc_RNA (1)...(19): siRNA sense strand
gaagucaccuugccuuuac

SEQ ID NO: 600742 - RNA, 19 nt, Homo sapiens
  misc_RNA (1)...(19): siRNA sense strand
uggaugaucucaccauuaa

SEQ ID NO: 600743 - RNA, 19 nt, Homo sapiens
  misc_RNA (1)...(19): siRNA sense strand
gaguggagcuguuugcuau

SEQ ID NO: 600744 - RNA, 19 nt, Homo sapiens
  misc_RNA (1)...(19): siRNA sense strand
ggaaauauaacaacugaug

SEQ ID NO: 600745 - RNA, 19 nt, Homo sapiens
  misc_RNA (1)...(19): siRNA sense strand
gguagaagaugaauauagu

SEQ ID NO: 600746 - RNA, 19 nt, Homo sapiens
  misc_RNA (1)...(19): siRNA sense strand
gaucaaggcacuacauuau

SEQ ID NO: 600747 - RNA, 19 nt, Homo sapiens
  misc_RNA (1)...(19): siRNA sense strand
gacagaggcuucacuggaa

SEQ ID NO: 600748 - RNA, 19 nt, Homo sapiens
  misc_RNA (1)...(19): siRNA sense strand
cagaagaaguaaagacauu

SEQ ID NO: 600749 - RNA, 19 nt, Homo sapiens
  misc_RNA (1)...(19): siRNA sense strand
gaauaccaauuaugccauu

SEQ ID NO: 600750 - RNA, 19 nt, Homo sapiens
  misc_RNA (1)...(19): siRNA sense strand
ucaaggcacuacauuauau

SEQ ID NO: 600751 - RNA, 19 nt, Homo sapiens
  misc_RNA (1)...(19): siRNA sense strand
ugagaggacuggcaagaaa

SEQ ID NO: 600752 - RNA, 19 nt, Homo sapiens
  misc_RNA (1)...(19): siRNA sense strand
gacccaagcuggcaugaga

SEQ ID NO: 600753 - RNA, 19 nt, Homo sapiens
  misc_RNA (1)...(19): siRNA sense strand
gaccaggagucucuguuaa

SEQ ID NO: 600754 - RNA, 19 nt, Homo sapiens
  misc_RNA (1)...(19): siRNA sense strand
ggaagucaccuugccuuua

SEQ ID NO: 600755 - RNA, 19 nt, Homo sapiens
  misc_RNA (1)...(19): siRNA sense strand
cauacaauguggcagauuu

SEQ ID NO: 600756 - RNA, 19 nt, Homo sapiens
  misc_RNA (1)...(19): siRNA sense strand
acaaugagcuugccaacau

SEQ ID NO: 600757 - RNA, 19 nt, Homo sapiens
  misc_RNA (1)...(19): siRNA sense strand
gaugaucucaccauuaauu

SEQ ID NO: 600758 - RNA, 19 nt, Homo sapiens
  misc_RNA (1)...(19): siRNA sense strand
ggaauacuauccaguuucu

SEQ ID NO: 600759 - RNA, 19 nt, Homo sapiens
  misc_RNA (1)...(19): siRNA sense strand
ggauucagguuucauuugu

SEQ ID NO: 600760 - RNA, 19 nt, Homo sapiens
  misc_RNA (1)...(19): siRNA sense strand
ggaccaggagucucuguua

SEQ ID NO: 600761 - RNA, 19 nt, Homo sapiens
  misc_RNA (1)...(19): siRNA sense strand
gaccaaaccucuaaacacu

SEQ ID NO: 600762 - RNA, 19 nt, Homo sapiens
  misc_RNA (1)...(19): siRNA sense strand
cacgaaaccuucaagugua

SEQ ID NO: 600763 - RNA, 19 nt, Homo sapiens
  misc_RNA (1)...(19): siRNA sense strand
caauguguauucuguggua

SEQ ID NO: 600764 - RNA, 19 nt, Homo sapiens
  misc_RNA (1)...(19): siRNA sense strand
gcagauccuucuagcaaga

SEQ ID NO: 600765 - RNA, 19 nt, Homo sapiens
  misc_RNA (1)...(19): siRNA sense strand
cagcagaccuacacccaaa

SEQ ID NO: 600766 - RNA, 19 nt, Homo sapiens
  misc_RNA (1)...(19): siRNA sense strand
gcauacaaccugacagaaa

SEQ ID NO: 600767 - RNA, 19 nt, Homo sapiens
  misc_RNA (1)...(19): siRNA sense strand
guuguccucucauuuauuu

SEQ ID NO: 600768 - RNA, 19 nt, Homo sapiens
  misc_RNA (1)...(19): siRNA sense strand
uaaggaaccugagagugua

SEQ ID NO: 600769 - RNA, 19 nt, Homo sapiens
  misc_RNA (1)...(19): siRNA sense strand
ucauauaccuuacacaauc

SEQ ID NO: 600770 - RNA, 19 nt, Homo sapiens
  misc_RNA (1)...(19): siRNA sense strand
acaagucugugaacaauug

SEQ ID NO: 600771 - RNA, 19 nt, Homo sapiens
  misc_RNA (1)...(19): siRNA sense strand
gaagaaugcguuugugaau

SEQ ID NO: 600772 - RNA, 19 nt, Homo sapiens
  misc_RNA (1)...(19): siRNA sense strand
aaauugcucuugcucagua

SEQ ID NO: 600773 - RNA, 19 nt, Homo sapiens
  misc_RNA (1)...(19): siRNA sense strand
ccuacgaugugaauguuua

SEQ ID NO: 600774 - RNA, 19 nt, Homo sapiens
  misc_RNA (1)...(19): siRNA sense strand
gcacaagacccucagaauc

SEQ ID NO: 600775 - RNA, 19 nt, Homo sapiens
  misc_RNA (1)...(19): siRNA sense strand
agggaaacgucaagaauuu

SEQ ID NO: 600776 - RNA, 19 nt, Homo sapiens
  misc_RNA (1)...(19): siRNA sense strand
agaaagugaugaccugauu

SEQ ID NO: 600777 - RNA, 19 nt, Homo sapiens
  misc_RNA (1)...(19): siRNA sense strand
gcagcugacugaccuuguu

SEQ ID NO: 600778 - RNA, 19 nt, Homo sapiens
  misc_RNA (1)...(19): siRNA sense strand
caacugauccugaugauac

SEQ ID NO: 600779 - RNA, 19 nt, Homo sapiens
  misc_RNA (1)...(19): siRNA sense strand
ccaaauucuugcacaugua

SEQ ID NO: 600780 - RNA, 19 nt, Homo sapiens
  misc_RNA (1)...(19): siRNA sense strand
acacaucucugacgaaugg

SEQ ID NO: 600781 - RNA, 19 nt, Homo sapiens
  misc_RNA (1)...(19): siRNA sense strand
guaaggaaccugagagugu

SEQ ID NO: 600782 - RNA, 19 nt, Homo sapiens
  misc_RNA (1)...(19): siRNA sense strand
ggacacagagccaacaaga

SEQ ID NO: 600783 - RNA, 19 nt, Homo sapiens
  misc_RNA (1)...(19): siRNA sense strand
gugauccaauugaugaaua

SEQ ID NO: 600784 - RNA, 19 nt, Homo sapiens
  misc_RNA (1)...(19): siRNA sense strand
cauacaggauucagaagaa

SEQ ID NO: 600785 - RNA, 19 nt, Homo sapiens
  misc_RNA (1)...(19): siRNA sense strand
caaggcagauauuguguuc

SEQ ID NO: 600786 - RNA, 19 nt, Homo sapiens
  misc_RNA (1)...(19): siRNA sense strand
ucacaggcauggcuuugaa

SEQ ID NO: 600787 - RNA, 19 nt, Homo sapiens
  misc_RNA (1)...(19): siRNA sense strand
ugacuguaguucccguuua

SEQ ID NO: 600788 - RNA, 19 nt, Homo sapiens
  misc_RNA (1)...(19): siRNA sense strand
cagaggaacugguaccaau

SEQ ID NO: 600789 - RNA, 19 nt, Homo sapiens
  misc_RNA (1)...(19): siRNA sense strand
cugaauauguugucaaugu

SEQ ID NO: 600790 - RNA, 19 nt, Homo sapiens
  misc_RNA (1)...(19): siRNA sense strand
gagggaaacgucaagaauu

SEQ ID NO: 600791 - RNA, 19 nt, Homo sapiens
  misc_RNA (1)...(19): siRNA sense strand
uacauugacugcuaugaaa

SEQ ID NO: 600792 - RNA, 19 nt, Homo sapiens
  misc_RNA (1)...(19): siRNA sense strand
caaccugacacuccauaua

SEQ ID NO: 600793 - RNA, 19 nt, Homo sapiens
  misc_RNA (1)...(19): siRNA sense strand
gaaauccucgucaguacaa

SEQ ID NO: 600794 - RNA, 19 nt, Homo sapiens
  misc_RNA (1)...(19): siRNA sense strand
ggaaaagugcguaaauaua

SEQ ID NO: 600795 - RNA, 19 nt, Homo sapiens
  misc_RNA (1)...(19): siRNA sense strand
gaaugucccuaagguguug

SEQ ID NO: 600796 - RNA, 19 nt, Homo sapiens
  misc_RNA (1)...(19): siRNA sense strand
gaaauuacagugcguggau

SEQ ID NO: 600797 - RNA, 19 nt, Homo sapiens
  misc_RNA (1)...(19): siRNA sense strand
ccaaaccucuaaacacugu

SEQ ID NO: 600798 - RNA, 19 nt, Homo sapiens
  misc_RNA (1)...(19): siRNA sense strand
gugcagaaauauaggauca

SEQ ID NO: 600799 - RNA, 19 nt, Homo sapiens
  misc_RNA (1)...(19): siRNA sense strand
ccacgaaaccuucaagugu

SEQ ID NO: 600800 - RNA, 19 nt, Homo sapiens
  misc_RNA (1)...(19): siRNA sense strand
cagaagaggaugucaaaga

SEQ ID NO: 600801 - RNA, 19 nt, Homo sapiens
  misc_RNA (1)...(19): siRNA sense strand
ucauggagcuucagaugug

SEQ ID NO: 600802 - RNA, 19 nt, Homo sapiens
  misc_RNA (1)...(19): siRNA sense strand
agaaugcguuugugaauca

SEQ ID NO: 600803 - RNA, 19 nt, Homo sapiens
  misc_RNA (1)...(19): siRNA sense strand
gaaggcggcuuuggucauc

SEQ ID NO: 600804 - RNA, 19 nt, Homo sapiens
  misc_RNA (1)...(19): siRNA sense strand
ggcaaggcccucacguuua

SEQ ID NO: 600805 - RNA, 19 nt, Homo sapiens
  misc_RNA (1)...(19): siRNA sense strand
gcaagaaauguccaaguau

SEQ ID NO: 600806 - RNA, 19 nt, Homo sapiens
  misc_RNA (1)...(19): siRNA sense strand
ggaguuucauuucucguau

SEQ ID NO: 600807 - RNA, 19 nt, Homo sapiens
  misc_RNA (1)...(19): siRNA sense strand
gagcaaacgaccacaauag

SEQ ID NO: 600808 - RNA, 19 nt, Homo sapiens
  misc_RNA (1)...(19): siRNA sense strand
gaaacugaauauguuguca

SEQ ID NO: 600809 - RNA, 19 nt, Homo sapiens
  misc_RNA (1)...(19): siRNA sense strand
gaggcgaggugcaaacugu

SEQ ID NO: 600810 - RNA, 19 nt, Homo sapiens
  misc_RNA (1)...(19): siRNA sense strand
ggaagccuuuguuggagaa

SEQ ID NO: 600811 - RNA, 19 nt, Homo sapiens
  misc_RNA (1)...(19): siRNA sense strand
gagagucuuuggugaaaca

SEQ ID NO: 600812 - RNA, 19 nt, Homo sapiens
  misc_RNA (1)...(19): siRNA sense strand
gaauauagugagccucuga

SEQ ID NO: 600813 - RNA, 19 nt, Homo sapiens
  misc_RNA (1)...(19): siRNA sense strand
cugaugaagucgaauuaaa

SEQ ID NO: 600814 - RNA, 19 nt, Homo sapiens
  misc_RNA (1)...(19): siRNA sense strand
guggucagaugaacagauu

SEQ ID NO: 600815 - RNA, 19 nt, Homo sapiens
  misc_RNA (1)...(19): siRNA sense strand
gcugugauauucccucuag

SEQ ID NO: 600816 - RNA, 19 nt, Homo sapiens
  misc_RNA (1)...(19): siRNA sense strand
caacugaugguuaugaaau

SEQ ID NO: 600817 - RNA, 19 nt, Homo sapiens
  misc_RNA (1)...(19): siRNA sense strand
gcagauauuguguucuuga

SEQ ID NO: 600818 - RNA, 19 nt, Homo sapiens
  misc_RNA (1)...(19): siRNA sense strand
gaacauaccacugugaaac

SEQ ID NO: 600819 - RNA, 19 nt, Homo sapiens
  misc_RNA (1)...(19): siRNA sense strand
gcaaacgaccacaauagga

SEQ ID NO: 600820 - RNA, 19 nt, Homo sapiens
  misc_RNA (1)...(19): siRNA sense strand
gaucagagaccagcacuuc

SEQ ID NO: 600821 - RNA, 19 nt, Homo sapiens
  misc_RNA (1)...(19): siRNA sense strand
gcacacagagacaagaaga

SEQ ID NO: 600822 - RNA, 19 nt, Homo sapiens
  misc_RNA (1)...(19): siRNA sense strand
ucugaaaccugaaacugaa

SEQ ID NO: 600823 - RNA, 19 nt, Homo sapiens
  misc_RNA (1)...(19): siRNA sense strand
gaacaugaugcgagcaguu

SEQ ID NO: 600824 - RNA, 19 nt, Homo sapiens
  misc_RNA (1)...(19): siRNA sense strand
agagagagcugcaaagauu

SEQ ID NO: 600825 - RNA, 19 nt, Homo sapiens
  misc_RNA (1)...(19): siRNA sense strand
gaagcauccuaaauaauga

SEQ ID NO: 600826 - RNA, 19 nt, Homo sapiens
  misc_RNA (1)...(19): siRNA sense strand
agaagacgcuggauaaguu

SEQ ID NO: 600827 - RNA, 19 nt, Homo sapiens
  misc_RNA (1)...(19): siRNA sense strand
ucaagaggcugaagaagga

SEQ ID NO: 600828 - RNA, 19 nt, Homo sapiens
  misc_RNA (1)...(19): siRNA sense strand
gcaaagauuggaagaagaa

SEQ ID NO: 600829 - RNA, 19 nt, Homo sapiens
  misc_RNA (1)...(19): siRNA sense strand
gacaaaggauacaaacaga

SEQ ID NO: 600830 - RNA, 19 nt, Homo sapiens
  misc_RNA (1)...(19): siRNA sense strand
caaggaaugucaggagaaa

SEQ ID NO: 600831 - RNA, 19 nt, Homo sapiens
  misc_RNA (1)...(19): siRNA sense strand
gguaucaguuacucauuug

SEQ ID NO: 600832 - RNA, 19 nt, Homo sapiens
  misc_RNA (1)...(19): siRNA sense strand
gaaaagaagacgcuggaua

SEQ ID NO: 600833 - RNA, 19 nt, Homo sapiens
  misc_RNA (1)...(19): siRNA sense strand
ugaguggaaucaugaaaug

SEQ ID NO: 600834 - RNA, 19 nt, Homo sapiens
  misc_RNA (1)...(19): siRNA sense strand
acagaacccuugagucuag

SEQ ID NO: 600835 - RNA, 19 nt, Homo sapiens
  misc_RNA (1)...(19): siRNA sense strand
ggaaguaucagguacaaac

SEQ ID NO: 600836 - RNA, 19 nt, Homo sapiens
  misc_RNA (1)...(19): siRNA sense strand
agaagcauccuaaauaaug

SEQ ID NO: 600837 - RNA, 19 nt, Homo sapiens
  misc_RNA (1)...(19): siRNA sense strand
caaaggauacaaacagaau

SEQ ID NO: 600838 - RNA, 19 nt, Homo sapiens
  misc_RNA (1)...(19): siRNA sense strand
gaagacgcuggauaaguuu

SEQ ID NO: 600839 - RNA, 19 nt, Homo sapiens
  misc_RNA (1)...(19): siRNA sense strand
gaagaaggaagaggaggaa

SEQ ID NO: 600840 - RNA, 19 nt, Homo sapiens
  misc_RNA (1)...(19): siRNA sense strand
ugacagaacccuugagucu

SEQ ID NO: 600841 - RNA, 19 nt, Homo sapiens
  misc_RNA (1)...(19): siRNA sense strand
gguacaaacugagagacaa

SEQ ID NO: 600842 - RNA, 19 nt, Homo sapiens
  misc_RNA (1)...(19): siRNA sense strand
gaacaucuacaggcuaauc

SEQ ID NO: 600843 - RNA, 19 nt, Homo sapiens
  misc_RNA (1)...(19): siRNA sense strand
gagagacaaaggauacaaa

SEQ ID NO: 600844 - RNA, 19 nt, Homo sapiens
  misc_RNA (1)...(19): siRNA sense strand
guacaaacugagagacaaa

SEQ ID NO: 600845 - RNA, 19 nt, Homo sapiens
  misc_RNA (1)...(19): siRNA sense strand
agaagcaguuggugagaga

SEQ ID NO: 600846 - RNA, 19 nt, Homo sapiens
  misc_RNA (1)...(19): siRNA sense strand
ugguaucaguuacucauuu

SEQ ID NO: 600847 - RNA, 19 nt, Homo sapiens
  misc_RNA (1)...(19): siRNA sense strand
uugaacaucuacaggcuaa

SEQ ID NO: 600848 - RNA, 19 nt, Homo sapiens
  misc_RNA (1)...(19): siRNA sense strand
ugacaucagagaagagaaa

SEQ ID NO: 600849 - RNA, 19 nt, Homo sapiens
  misc_RNA (1)...(19): siRNA sense strand
aaaagaagacgcuggauaa

SEQ ID NO: 600850 - RNA, 19 nt, Homo sapiens
  misc_RNA (1)...(19): siRNA sense strand
gaauuugaucagcuuagaa

SEQ ID NO: 600851 - RNA, 19 nt, Homo sapiens
  misc_RNA (1)...(19): siRNA sense strand
aaaagcagcuguccugugu

SEQ ID NO: 600852 - RNA, 19 nt, Homo sapiens
  misc_RNA (1)...(19): siRNA sense strand
gacagaacccuugagucua

SEQ ID NO: 600853 - RNA, 19 nt, Homo sapiens
  misc_RNA (1)...(19): siRNA sense strand
aagcagcuguccugugugu

SEQ ID NO: 600854 - RNA, 19 nt, Homo sapiens
  misc_RNA (1)...(19): siRNA sense strand
cggagucaguggucaacaa

SEQ ID NO: 600855 - RNA, 19 nt, Homo sapiens
  misc_RNA (1)...(19): siRNA sense strand
agaauuugaucagcuuaga

SEQ ID NO: 600856 - RNA, 19 nt, Homo sapiens
  misc_RNA (1)...(19): siRNA sense strand
caaguugagcccagacaau

SEQ ID NO: 600857 - RNA, 19 nt, Homo sapiens
  misc_RNA (1)...(19): siRNA sense strand
uugcagaggcugaggauga

SEQ ID NO: 600858 - RNA, 19 nt, Homo sapiens
  misc_RNA (1)...(19): siRNA sense strand
cugcaaagauuggaagaag

SEQ ID NO: 600859 - RNA, 19 nt, Homo sapiens
  misc_RNA (1)...(19): siRNA sense strand
gaaacuccuacucuucugu

SEQ ID NO: 600860 - RNA, 19 nt, Homo sapiens
  misc_RNA (1)...(19): siRNA sense strand
ggagucaguggucaacaau

SEQ ID NO: 600861 - RNA, 19 nt, Homo sapiens
  misc_RNA (1)...(19): siRNA sense strand
gagagagcugcaaagauug

SEQ ID NO: 600862 - RNA, 19 nt, Homo sapiens
  misc_RNA (1)...(19): siRNA sense strand
aaacuccuacucuucugua

SEQ ID NO: 600863 - RNA, 19 nt, Homo sapiens
  misc_RNA (1)...(19): siRNA sense strand
gcaucuggccaacauagug

SEQ ID NO: 600864 - RNA, 19 nt, Homo sapiens
  misc_RNA (1)...(19): siRNA sense strand
agacaaaggauacaaacag

SEQ ID NO: 600865 - RNA, 19 nt, Homo sapiens
  misc_RNA (1)...(19): siRNA sense strand
caaacugagagacaaagga

SEQ ID NO: 600866 - RNA, 19 nt, Homo sapiens
  misc_RNA (1)...(19): siRNA sense strand
aagauuggaagaagaagaa

SEQ ID NO: 600867 - RNA, 19 nt, Homo sapiens
  misc_RNA (1)...(19): siRNA sense strand
aaacugagagacaaaggau

SEQ ID NO: 600868 - RNA, 19 nt, Homo sapiens
  misc_RNA (1)...(19): siRNA sense strand
acaaugggaagaagagaga

SEQ ID NO: 600869 - RNA, 19 nt, Homo sapiens
  misc_RNA (1)...(19): siRNA sense strand
gcagaagcaguuggugaga

SEQ ID NO: 600870 - RNA, 19 nt, Homo sapiens
  misc_RNA (1)...(19): siRNA sense strand
ggaagaagaagaaaagaag

SEQ ID NO: 600871 - RNA, 19 nt, Homo sapiens
  misc_RNA (1)...(19): siRNA sense strand
gagacaaaggauacaaaca

SEQ ID NO: 600872 - RNA, 19 nt, Homo sapiens
  misc_RNA (1)...(19): siRNA sense strand
ucaaggaaugucaggagaa

SEQ ID NO: 600873 - RNA, 19 nt, Homo sapiens
  misc_RNA (1)...(19): siRNA sense strand
agucaguggucaacaaugg

SEQ ID NO: 600874 - RNA, 19 nt, Homo sapiens
  misc_RNA (1)...(19): siRNA sense strand
ugcaaagauuggaagaaga

SEQ ID NO: 600875 - RNA, 19 nt, Homo sapiens
  misc_RNA (1)...(19): siRNA sense strand
auaaugaggagcagagaga

SEQ ID NO: 600876 - RNA, 19 nt, Homo sapiens
  misc_RNA (1)...(19): siRNA sense strand
gaaggaagaggaggaagcu

SEQ ID NO: 600877 - RNA, 19 nt, Homo sapiens
  misc_RNA (1)...(19): siRNA sense strand
gaagaggaggaagcugaga

SEQ ID NO: 600878 - RNA, 19 nt, Homo sapiens
  misc_RNA (1)...(19): siRNA sense strand
ccaucugccuggagcuguu

SEQ ID NO: 600879 - RNA, 19 nt, Homo sapiens
  misc_RNA (1)...(19): siRNA sense strand
aacagaauuugaucagcuu

SEQ ID NO: 600880 - RNA, 19 nt, Homo sapiens
  misc_RNA (1)...(19): siRNA sense strand
gaaguaucagguacaaacu

SEQ ID NO: 600881 - RNA, 19 nt, Homo sapiens
  misc_RNA (1)...(19): siRNA sense strand
aaaucuugcuuaacguaca

SEQ ID NO: 600882 - RNA, 19 nt, Homo sapiens
  misc_RNA (1)...(19): siRNA sense strand
acaaaggauacaaacagaa

SEQ ID NO: 600883 - RNA, 19 nt, Homo sapiens
  misc_RNA (1)...(19): siRNA sense strand
aaucuugcuuaacguacaa

SEQ ID NO: 600884 - RNA, 19 nt, Homo sapiens
  misc_RNA (1)...(19): siRNA sense strand
ugaccagcaugggaggaaa

SEQ ID NO: 600885 - RNA, 19 nt, Homo sapiens
  misc_RNA (1)...(19): siRNA sense strand
ggcugaggaugagcuaguu

SEQ ID NO: 600886 - RNA, 19 nt, Homo sapiens
  misc_RNA (1)...(19): siRNA sense strand
cagagagagcugcaaagau

SEQ ID NO: 600887 - RNA, 19 nt, Homo sapiens
  misc_RNA (1)...(19): siRNA sense strand
acucaaggaggucaaguug

SEQ ID NO: 600888 - RNA, 19 nt, Homo sapiens
  misc_RNA (1)...(19): siRNA sense strand
gaagaagaagaaaagaaga

SEQ ID NO: 600889 - RNA, 19 nt, Homo sapiens
  misc_RNA (1)...(19): siRNA sense strand
ccagacaaugggaagaaga

SEQ ID NO: 600890 - RNA, 19 nt, Homo sapiens
  misc_RNA (1)...(19): siRNA sense strand
cagcaucuggccaacauag

SEQ ID NO: 600891 - RNA, 19 nt, Homo sapiens
  misc_RNA (1)...(19): siRNA sense strand
gacucaaggaggucaaguu

SEQ ID NO: 600892 - RNA, 19 nt, Homo sapiens
  misc_RNA (1)...(19): siRNA sense strand
aaagauuggaagaagaaga

SEQ ID NO: 600893 - RNA, 19 nt, Homo sapiens
  misc_RNA (1)...(19): siRNA sense strand
guuacucauuugaacaucu

SEQ ID NO: 600894 - RNA, 19 nt, Homo sapiens
  misc_RNA (1)...(19): siRNA sense strand
ugaguggaaucaugaaaug

SEQ ID NO: 600895 - RNA, 19 nt, Homo sapiens
  misc_RNA (1)...(19): siRNA sense strand
agagagagcugcaaagauu

SEQ ID NO: 600896 - RNA, 19 nt, Homo sapiens
  misc_RNA (1)...(19): siRNA sense strand
gaagcauccuaaauaauga

SEQ ID NO: 600897 - RNA, 19 nt, Homo sapiens
  misc_RNA (1)...(19): siRNA sense strand
agaagacgcuggauaaguu

SEQ ID NO: 600898 - RNA, 19 nt, Homo sapiens
  misc_RNA (1)...(19): siRNA sense strand
ucaagaggcugaagaagga

SEQ ID NO: 600899 - RNA, 19 nt, Homo sapiens
  misc_RNA (1)...(19): siRNA sense strand
gcaaagauuggaagaagaa

SEQ ID NO: 600900 - RNA, 19 nt, Homo sapiens
  misc_RNA (1)...(19): siRNA sense strand
gacaaaggauacaaacaga

SEQ ID NO: 600901 - RNA, 19 nt, Homo sapiens
  misc_RNA (1)...(19): siRNA sense strand
caaggaaugucaggagaaa

SEQ ID NO: 600902 - RNA, 19 nt, Homo sapiens
  misc_RNA (1)...(19): siRNA sense strand
gguaucaguuacucauuug

SEQ ID NO: 600903 - RNA, 19 nt, Homo sapiens
  misc_RNA (1)...(19): siRNA sense strand
gaaaagaagacgcuggaua

SEQ ID NO: 600904 - RNA, 19 nt, Homo sapiens
  misc_RNA (1)...(19): siRNA sense strand
ugaguggaaucaugaaaug

SEQ ID NO: 600905 - RNA, 19 nt, Homo sapiens
  misc_RNA (1)...(19): siRNA sense strand
acagaacccuugagucuag

SEQ ID NO: 600906 - RNA, 19 nt, Homo sapiens
  misc_RNA (1)...(19): siRNA sense strand
ggaaguaucagguacaaac

SEQ ID NO: 600907 - RNA, 19 nt, Homo sapiens
  misc_RNA (1)...(19): siRNA sense strand
agaagcauccuaaauaaug

SEQ ID NO: 600908 - RNA, 19 nt, Homo sapiens
  misc_RNA (1)...(19): siRNA sense strand
caaaggauacaaacagaau

SEQ ID NO: 600909 - RNA, 19 nt, Homo sapiens
  misc_RNA (1)...(19): siRNA sense strand
gaagacgcuggauaaguuu

SEQ ID NO: 600910 - RNA, 19 nt, Homo sapiens
  misc_RNA (1)...(19): siRNA sense strand
gaagaaggaagaggaggaa

SEQ ID NO: 600911 - RNA, 19 nt, Homo sapiens
  misc_RNA (1)...(19): siRNA sense strand
ugacagaacccuugagucu

SEQ ID NO: 600912 - RNA, 19 nt, Homo sapiens
  misc_RNA (1)...(19): siRNA sense strand
gguacaaacugagagacaa

SEQ ID NO: 600913 - RNA, 19 nt, Homo sapiens
  misc_RNA (1)...(19): siRNA sense strand
gaacaucuacaggcuaauc

SEQ ID NO: 600914 - RNA, 19 nt, Homo sapiens
  misc_RNA (1)...(19): siRNA sense strand
gagagacaaaggauacaaa

SEQ ID NO: 600915 - RNA, 19 nt, Homo sapiens
  misc_RNA (1)...(19): siRNA sense strand
guacaaacugagagacaaa

SEQ ID NO: 600916 - RNA, 19 nt, Homo sapiens
  misc_RNA (1)...(19): siRNA sense strand
agaagcaguuggugagaga

SEQ ID NO: 600917 - RNA, 19 nt, Homo sapiens
  misc_RNA (1)...(19): siRNA sense strand
ugguaucaguuacucauuu

SEQ ID NO: 600918 - RNA, 19 nt, Homo sapiens
  misc_RNA (1)...(19): siRNA sense strand
uugaacaucuacaggcuaa

SEQ ID NO: 600919 - RNA, 19 nt, Homo sapiens
  misc_RNA (1)...(19): siRNA sense strand
ugacaucagagaagagaaa

SEQ ID NO: 600920 - RNA, 19 nt, Homo sapiens
  misc_RNA (1)...(19): siRNA sense strand
aaaagaagacgcuggauaa

SEQ ID NO: 600921 - RNA, 19 nt, Homo sapiens
  misc_RNA (1)...(19): siRNA sense strand
gaauuugaucagcuuagaa

SEQ ID NO: 600922 - RNA, 19 nt, Homo sapiens
  misc_RNA (1)...(19): siRNA sense strand
aaaagcagcuguccugugu

SEQ ID NO: 600923 - RNA, 19 nt, Homo sapiens
  misc_RNA (1)...(19): siRNA sense strand
gacagaacccuugagucua

SEQ ID NO: 600924 - RNA, 19 nt, Homo sapiens
  misc_RNA (1)...(19): siRNA sense strand
aagcagcuguccugugugu

SEQ ID NO: 600925 - RNA, 19 nt, Homo sapiens
  misc_RNA (1)...(19): siRNA sense strand
cggagucaguggucaacaa

SEQ ID NO: 600926 - RNA, 19 nt, Homo sapiens
  misc_RNA (1)...(19): siRNA sense strand
agaauuugaucagcuuaga

SEQ ID NO: 600927 - RNA, 19 nt, Homo sapiens
  misc_RNA (1)...(19): siRNA sense strand
caaguugagcccagacaau

SEQ ID NO: 600928 - RNA, 19 nt, Homo sapiens
  misc_RNA (1)...(19): siRNA sense strand
uugcagaggcugaggauga

SEQ ID NO: 600929 - RNA, 19 nt, Homo sapiens
  misc_RNA (1)...(19): siRNA sense strand
cugcaaagauuggaagaag

SEQ ID NO: 600930 - RNA, 19 nt, Homo sapiens
  misc_RNA (1)...(19): siRNA sense strand
gaaacuccuacucuucugu

SEQ ID NO: 600931 - RNA, 19 nt, Homo sapiens
  misc_RNA (1)...(19): siRNA sense strand
ggagucaguggucaacaau

SEQ ID NO: 600932 - RNA, 19 nt, Homo sapiens
  misc_RNA (1)...(19): siRNA sense strand
gagagagcugcaaagauug

SEQ ID NO: 600933 - RNA, 19 nt, Homo sapiens
  misc_RNA (1)...(19): siRNA sense strand
aaacuccuacucuucugua

SEQ ID NO: 600934 - RNA, 19 nt, Homo sapiens
  misc_RNA (1)...(19): siRNA sense strand
gcaucuggccaacauagug

SEQ ID NO: 600935 - RNA, 19 nt, Homo sapiens
  misc_RNA (1)...(19): siRNA sense strand
agacaaaggauacaaacag

SEQ ID NO: 600936 - RNA, 19 nt, Homo sapiens
  misc_RNA (1)...(19): siRNA sense strand
caaacugagagacaaagga

SEQ ID NO: 600937 - RNA, 19 nt, Homo sapiens
  misc_RNA (1)...(19): siRNA sense strand
aagauuggaagaagaagaa

SEQ ID NO: 600938 - RNA, 19 nt, Homo sapiens
  misc_RNA (1)...(19): siRNA sense strand
aaacugagagacaaaggau

SEQ ID NO: 600939 - RNA, 19 nt, Homo sapiens
  misc_RNA (1)...(19): siRNA sense strand
acaaugggaagaagagaga

SEQ ID NO: 600940 - RNA, 19 nt, Homo sapiens
  misc_RNA (1)...(19): siRNA sense strand
gcagaagcaguuggugaga

SEQ ID NO: 600941 - RNA, 19 nt, Homo sapiens
  misc_RNA (1)...(19): siRNA sense strand
ggaagaagaagaaaagaag

SEQ ID NO: 600942 - RNA, 19 nt, Homo sapiens
  misc_RNA (1)...(19): siRNA sense strand
gagacaaaggauacaaaca

SEQ ID NO: 600943 - RNA, 19 nt, Homo sapiens
  misc_RNA (1)...(19): siRNA sense strand
ucaaggaaugucaggagaa

SEQ ID NO: 600944 - RNA, 19 nt, Homo sapiens
  misc_RNA (1)...(19): siRNA sense strand
agucaguggucaacaaugg

SEQ ID NO: 600945 - RNA, 19 nt, Homo sapiens
  misc_RNA (1)...(19): siRNA sense strand
ugcaaagauuggaagaaga

SEQ ID NO: 600946 - RNA, 19 nt, Homo sapiens
  misc_RNA (1)...(19): siRNA sense strand
auaaugaggagcagagaga

SEQ ID NO: 600947 - RNA, 19 nt, Homo sapiens
  misc_RNA (1)...(19): siRNA sense strand
gaaggaagaggaggaagcu

SEQ ID NO: 600948 - RNA, 19 nt, Homo sapiens
  misc_RNA (1)...(19): siRNA sense strand
gaagaggaggaagcugaga

SEQ ID NO: 600949 - RNA, 19 nt, Homo sapiens
  misc_RNA (1)...(19): siRNA sense strand
ccaucugccuggagcuguu

SEQ ID NO: 600950 - RNA, 19 nt, Homo sapiens
  misc_RNA (1)...(19): siRNA sense strand
aacagaauuugaucagcuu

SEQ ID NO: 600951 - RNA, 19 nt, Homo sapiens
  misc_RNA (1)...(19): siRNA sense strand
gaaguaucagguacaaacu

SEQ ID NO: 600952 - RNA, 19 nt, Homo sapiens
  misc_RNA (1)...(19): siRNA sense strand
aaaucuugcuuaacguaca

SEQ ID NO: 600953 - RNA, 19 nt, Homo sapiens
  misc_RNA (1)...(19): siRNA sense strand
acaaaggauacaaacagaa

SEQ ID NO: 600954 - RNA, 19 nt, Homo sapiens
  misc_RNA (1)...(19): siRNA sense strand
aaucuugcuuaacguacaa

SEQ ID NO: 600955 - RNA, 19 nt, Homo sapiens
  misc_RNA (1)...(19): siRNA sense strand
ugaccagcaugggaggaaa

SEQ ID NO: 600956 - RNA, 19 nt, Homo sapiens
  misc_RNA (1)...(19): siRNA sense strand
ggcugaggaugagcuaguu

SEQ ID NO: 600957 - RNA, 19 nt, Homo sapiens
  misc_RNA (1)...(19): siRNA sense strand
cagagagagcugcaaagau

SEQ ID NO: 600958 - RNA, 19 nt, Homo sapiens
  misc_RNA (1)...(19): siRNA sense strand
acucaaggaggucaaguug

SEQ ID NO: 600959 - RNA, 19 nt, Homo sapiens
  misc_RNA (1)...(19): siRNA sense strand
gaagaagaagaaaagaaga

SEQ ID NO: 600960 - RNA, 19 nt, Homo sapiens
  misc_RNA (1)...(19): siRNA sense strand
ccagacaaugggaagaaga

SEQ ID NO: 600961 - RNA, 19 nt, Homo sapiens
  misc_RNA (1)...(19): siRNA sense strand
cagcaucuggccaacauag

SEQ ID NO: 600962 - RNA, 19 nt, Homo sapiens
  misc_RNA (1)...(19): siRNA sense strand
gacucaaggaggucaaguu

SEQ ID NO: 600963 - RNA, 19 nt, Homo sapiens
  misc_RNA (1)...(19): siRNA sense strand
aaagauuggaagaagaaga

SEQ ID NO: 600964 - RNA, 19 nt, Homo sapiens
  misc_RNA (1)...(19): siRNA sense strand
guuacucauuugaacaucu

SEQ ID NO: 600965 - RNA, 19 nt, Homo sapiens
  misc_RNA (1)...(19): siRNA sense strand
gaacagaaguuucacaaug

SEQ ID NO: 600966 - RNA, 19 nt, Homo sapiens
  misc_RNA (1)...(19): siRNA sense strand
gaagcaggcaucaagauua

SEQ ID NO: 600967 - RNA, 19 nt, Homo sapiens
  misc_RNA (1)...(19): siRNA sense strand
caacauaacgucucugauu

SEQ ID NO: 600968 - RNA, 19 nt, Homo sapiens
  misc_RNA (1)...(19): siRNA sense strand
gaaccugucucuccucgaa

SEQ ID NO: 600969 - RNA, 19 nt, Homo sapiens
  misc_RNA (1)...(19): siRNA sense strand
gacaauugcuuccugcuuu

SEQ ID NO: 600970 - RNA, 19 nt, Homo sapiens
  misc_RNA (1)...(19): siRNA sense strand
uaacgucucugauuucuca

SEQ ID NO: 600971 - RNA, 19 nt, Homo sapiens
  misc_RNA (1)...(19): siRNA sense strand
gccaauaccucccuuacuu

SEQ ID NO: 600972 - RNA, 19 nt, Homo sapiens
  misc_RNA (1)...(19): siRNA sense strand
gcacuuaaguauucaucga

SEQ ID NO: 600973 - RNA, 19 nt, Homo sapiens
  misc_RNA (1)...(19): siRNA sense strand
ggacccaaaucuucuuaga

SEQ ID NO: 600974 - RNA, 19 nt, Homo sapiens
  misc_RNA (1)...(19): siRNA sense strand
gaaagagaacagagacaaa

SEQ ID NO: 600975 - RNA, 19 nt, Homo sapiens
  misc_RNA (1)...(19): siRNA sense strand
caaacaagauggcagucaa

SEQ ID NO: 600976 - RNA, 19 nt, Homo sapiens
  misc_RNA (1)...(19): siRNA sense strand
ccacagugcucuucauagu

SEQ ID NO: 600977 - RNA, 19 nt, Homo sapiens
  misc_RNA (1)...(19): siRNA sense strand
gaucaguacuccuccuguu

SEQ ID NO: 600978 - RNA, 19 nt, Homo sapiens
  misc_RNA (1)...(19): siRNA sense strand
ucacugcagucuauaauuc

SEQ ID NO: 600979 - RNA, 19 nt, Homo sapiens
  misc_RNA (1)...(19): siRNA sense strand
gcucagcucucuacacaag

SEQ ID NO: 600980 - RNA, 19 nt, Homo sapiens
  misc_RNA (1)...(19): siRNA sense strand
cgaagaagcgcauaacaug

SEQ ID NO: 600981 - RNA, 19 nt, Homo sapiens
  misc_RNA (1)...(19): siRNA sense strand
uaacacagucccuaucaaa

SEQ ID NO: 600982 - RNA, 19 nt, Homo sapiens
  misc_RNA (1)...(19): siRNA sense strand
agaauaagcacaccucaaa

SEQ ID NO: 600983 - RNA, 19 nt, Homo sapiens
  misc_RNA (1)...(19): siRNA sense strand
aagaguggcuugaaagaga

SEQ ID NO: 600984 - RNA, 19 nt, Homo sapiens
  misc_RNA (1)...(19): siRNA sense strand
aacauaacgucucugauuu

SEQ ID NO: 600985 - RNA, 19 nt, Homo sapiens
  misc_RNA (1)...(19): siRNA sense strand
ugacuggucugagcauauu

SEQ ID NO: 600986 - RNA, 19 nt, Homo sapiens
  misc_RNA (1)...(19): siRNA sense strand
ggagauccuucaccaccaa

SEQ ID NO: 600987 - RNA, 19 nt, Homo sapiens
  misc_RNA (1)...(19): siRNA sense strand
gacaaacccguaucacauu

SEQ ID NO: 600988 - RNA, 19 nt, Homo sapiens
  misc_RNA (1)...(19): siRNA sense strand
uaagcacaccucaaacuaa

SEQ ID NO: 600989 - RNA, 19 nt, Homo sapiens
  misc_RNA (1)...(19): siRNA sense strand
gagcaaaggauacuauuuu

SEQ ID NO: 600990 - RNA, 19 nt, Homo sapiens
  misc_RNA (1)...(19): siRNA sense strand
ucacauguccgaaauuugu

SEQ ID NO: 600991 - RNA, 19 nt, Homo sapiens
  misc_RNA (1)...(19): siRNA sense strand
gcgcauaacaugggaacua

SEQ ID NO: 600992 - RNA, 19 nt, Homo sapiens
  misc_RNA (1)...(19): siRNA sense strand
caguuacucuccacaagaa

SEQ ID NO: 600993 - RNA, 19 nt, Homo sapiens
  misc_RNA (1)...(19): siRNA sense strand
gacaacaaauuaaggaacu

SEQ ID NO: 600994 - RNA, 19 nt, Homo sapiens
  misc_RNA (1)...(19): siRNA sense strand
ccaaucauacuucuaauag

SEQ ID NO: 600995 - RNA, 19 nt, Homo sapiens
  misc_RNA (1)...(19): siRNA sense strand
agauagggauuacagaaga

SEQ ID NO: 600996 - RNA, 19 nt, Homo sapiens
  misc_RNA (1)...(19): siRNA sense strand
acagugcucuucauaguuc

SEQ ID NO: 600997 - RNA, 19 nt, Homo sapiens
  misc_RNA (1)...(19): siRNA sense strand
gaaaacaaauacagugaca

SEQ ID NO: 600998 - RNA, 19 nt, Homo sapiens
  misc_RNA (1)...(19): siRNA sense strand
cuacaauugucgaacagaa

SEQ ID NO: 600999 - RNA, 19 nt, Homo sapiens
  misc_RNA (1)...(19): siRNA sense strand
aaacuucagaugcaccuua

SEQ ID NO: 601000 - RNA, 19 nt, Homo sapiens
  misc_RNA (1)...(19): siRNA sense strand
uauuagcucuucugggaaa

SEQ ID NO: 601001 - RNA, 19 nt, Homo sapiens
  misc_RNA (1)...(19): siRNA sense strand
gauccuucaccaccaaaua

SEQ ID NO: 601002 - RNA, 19 nt, Homo sapiens
  misc_RNA (1)...(19): siRNA sense strand
ggugaucacagacaugaaa

SEQ ID NO: 601003 - RNA, 19 nt, Homo sapiens
  misc_RNA (1)...(19): siRNA sense strand
ccacgcugcagcuuaauaa

SEQ ID NO: 601004 - RNA, 19 nt, Homo sapiens
  misc_RNA (1)...(19): siRNA sense strand
gaugacuggucugagcaua

SEQ ID NO: 601005 - RNA, 19 nt, Homo sapiens
  misc_RNA (1)...(19): siRNA sense strand
gagacaaacccguaucaca

SEQ ID NO: 601006 - RNA, 19 nt, Homo sapiens
  misc_RNA (1)...(19): siRNA sense strand
ccaaaagaguggcuugaaa

SEQ ID NO: 601007 - RNA, 19 nt, Homo sapiens
  misc_RNA (1)...(19): siRNA sense strand
cgauccacguguucauuaa

SEQ ID NO: 601008 - RNA, 19 nt, Homo sapiens
  misc_RNA (1)...(19): siRNA sense strand
cagcacaggucacaguaag

SEQ ID NO: 601009 - RNA, 19 nt, Homo sapiens
  misc_RNA (1)...(19): siRNA sense strand
ucaaguagccagagaaguc

SEQ ID NO: 601010 - RNA, 19 nt, Homo sapiens
  misc_RNA (1)...(19): siRNA sense strand
ucacagacaugaaaagaug

SEQ ID NO: 601011 - RNA, 19 nt, Homo sapiens
  misc_RNA (1)...(19): siRNA sense strand
aaagauagggauuacagaa

SEQ ID NO: 601012 - RNA, 19 nt, Homo sapiens
  misc_RNA (1)...(19): siRNA sense strand
caguagcggugaucacaga

SEQ ID NO: 601013 - RNA, 19 nt, Homo sapiens
  misc_RNA (1)...(19): siRNA sense strand
cuacuacaauugucgaaca

SEQ ID NO: 601014 - RNA, 19 nt, Homo sapiens
  misc_RNA (1)...(19): siRNA sense strand
ucagaugcaccuuaugauu

SEQ ID NO: 601015 - RNA, 19 nt, Homo sapiens
  misc_RNA (1)...(19): siRNA sense strand
acccaaaucuucuuagaca

SEQ ID NO: 601016 - RNA, 19 nt, Homo sapiens
  misc_RNA (1)...(19): siRNA sense strand
cagaugcaccuuaugauuc

SEQ ID NO: 601017 - RNA, 19 nt, Homo sapiens
  misc_RNA (1)...(19): siRNA sense strand
gcgaagaagcgcauaacau

SEQ ID NO: 601018 - RNA, 19 nt, Homo sapiens
  misc_RNA (1)...(19): siRNA sense strand
ccaaaucuucuuagacaau

SEQ ID NO: 601019 - RNA, 19 nt, Homo sapiens
  misc_RNA (1)...(19): siRNA sense strand
ucacauucuucuaauccaa

SEQ ID NO: 601020 - RNA, 19 nt, Homo sapiens
  misc_RNA (1)...(19): siRNA sense strand
gagagcaaaggauacuauu

SEQ ID NO: 601021 - RNA, 19 nt, Homo sapiens
  misc_RNA (1)...(19): siRNA sense strand
cauaacaugggaacuauuc

SEQ ID NO: 601022 - RNA, 19 nt, Homo sapiens
  misc_RNA (1)...(19): siRNA sense strand
ucuaaucagucuccgaugu

SEQ ID NO: 601023 - RNA, 19 nt, Homo sapiens
  misc_RNA (1)...(19): siRNA sense strand
ccaucugcuuucaacauaa

SEQ ID NO: 601024 - RNA, 19 nt, Homo sapiens
  misc_RNA (1)...(19): siRNA sense strand
cgcugcagcuuaauaauuc

SEQ ID NO: 601025 - RNA, 19 nt, Homo sapiens
  misc_RNA (1)...(19): siRNA sense strand
agacaaacccguaucacau

SEQ ID NO: 601026 - RNA, 19 nt, Homo sapiens
  misc_RNA (1)...(19): siRNA sense strand
cacaagcccagccaucuaa

SEQ ID NO: 601027 - RNA, 19 nt, Homo sapiens
  misc_RNA (1)...(19): siRNA sense strand
gagaagcaggcaucaagau

SEQ ID NO: 601028 - RNA, 19 nt, Homo sapiens
  misc_RNA (1)...(19): siRNA sense strand
gcgcucaaguagccagaga

SEQ ID NO: 601029 - RNA, 19 nt, Homo sapiens
  misc_RNA (1)...(19): siRNA sense strand
gcccagccaucuaaucagu

SEQ ID NO: 601030 - RNA, 19 nt, Homo sapiens
  misc_RNA (1)...(19): siRNA sense strand
gcucuucauaguucaaauu

SEQ ID NO: 601031 - RNA, 19 nt, Homo sapiens
  misc_RNA (1)...(19): siRNA sense strand
caacaaauuaaggaacuug

SEQ ID NO: 601032 - RNA, 19 nt, Homo sapiens
  misc_RNA (1)...(19): siRNA sense strand
ucaccuggucccaaucaua

SEQ ID NO: 601033 - RNA, 19 nt, Homo sapiens
  misc_RNA (1)...(19): siRNA sense strand
aagccucacugcagucuau

SEQ ID NO: 601034 - RNA, 19 nt, Homo sapiens
  misc_RNA (1)...(19): siRNA sense strand
acaauugcuuccugcuuug

SEQ ID NO: 601035 - RNA, 19 nt, Homo sapiens
  misc_RNA (1)...(19): siRNA sense strand
caaccacagugcucuucau

SEQ ID NO: 601036 - RNA, 19 nt, Homo sapiens
  misc_RNA (1)...(19): siRNA sense strand
auucacauguccgaaauuu

SEQ ID NO: 601037 - RNA, 19 nt, Homo sapiens
  misc_RNA (1)...(19): siRNA sense strand
ccgauccacguguucauua

SEQ ID NO: 601038 - RNA, 19 nt, Homo sapiens
  misc_RNA (1)...(19): siRNA sense strand
cugcucagcucucuacaca

SEQ ID NO: 601039 - RNA, 19 nt, Homo sapiens
  misc_RNA (1)...(19): siRNA sense strand
accaucugcuuucaacaua

SEQ ID NO: 601040 - RNA, 19 nt, Homo sapiens
  misc_RNA (1)...(19): siRNA sense strand
gcaaacaagauggcaguca

SEQ ID NO: 601041 - RNA, 19 nt, Homo sapiens
  misc_RNA (1)...(19): siRNA sense strand
aacagaaguuucacaaugg

SEQ ID NO: 601042 - RNA, 19 nt, Homo sapiens
  misc_RNA (1)...(19): siRNA sense strand
gauagggauuacagaagag

SEQ ID NO: 601043 - RNA, 19 nt, Homo sapiens
  misc_RNA (1)...(19): siRNA sense strand
cagagaagcaggcaucaag

SEQ ID NO: 601044 - RNA, 19 nt, Homo sapiens
  misc_RNA (1)...(19): siRNA sense strand
gucccaaucauacuucuaa

SEQ ID NO: 601045 - RNA, 19 nt, Homo sapiens
  misc_RNA (1)...(19): siRNA sense strand
caucacagccaaagguuag

SEQ ID NO: 601046 - RNA, 19 nt, Homo sapiens
  misc_RNA (1)...(19): siRNA sense strand
guacuccuccuguuucauc

SEQ ID NO: 601047 - RNA, 19 nt, Homo sapiens
  misc_RNA (1)...(19): siRNA sense strand
aaacuaacacagucccuau

SEQ ID NO: 601048 - RNA, 19 nt, Homo sapiens
  misc_RNA (1)...(19): siRNA sense strand
accaggcacuuaaguauuc

SEQ ID NO: 601049 - RNA, 19 nt, Homo sapiens
  misc_RNA (1)...(19): siRNA sense strand
gagaucugauaguccugaa

SEQ ID NO: 601050 - RNA, 19 nt, Homo sapiens
  misc_RNA (1)...(19): siRNA sense strand
cuucuaauccaagcaauaa

SEQ ID NO: 601051 - RNA, 19 nt, Homo sapiens
  misc_RNA (1)...(19): siRNA sense strand
cgagagcaaaggauacuau

SEQ ID NO: 601052 - RNA, 19 nt, Homo sapiens
  misc_RNA (1)...(19): siRNA sense strand
cauaacgucucugauuucu

SEQ ID NO: 601053 - RNA, 19 nt, Homo sapiens
  misc_RNA (1)...(19): siRNA sense strand
acaaacccguaucacauuc

SEQ ID NO: 601054 - RNA, 19 nt, Homo sapiens
  misc_RNA (1)...(19): siRNA sense strand
gcaagcaacagccacuagu

SEQ ID NO: 601055 - RNA, 19 nt, Homo sapiens
  misc_RNA (1)...(19): siRNA sense strand
ugaaagagaacagagacaa

SEQ ID NO: 601056 - RNA, 19 nt, Homo sapiens
  misc_RNA (1)...(19): siRNA sense strand
cuucagaugcaccuuauga

SEQ ID NO: 601057 - RNA, 19 nt, Homo sapiens
  misc_RNA (1)...(19): siRNA sense strand
uaaggaacuugaaaagcua

SEQ ID NO: 601058 - RNA, 19 nt, Homo sapiens
  misc_RNA (1)...(19): siRNA sense strand
gagacaacaaauuaaggaa

SEQ ID NO: 601059 - RNA, 19 nt, Homo sapiens
  misc_RNA (1)...(19): siRNA sense strand
guccgaaauuuguacugaa

SEQ ID NO: 601060 - RNA, 19 nt, Homo sapiens
  misc_RNA (1)...(19): siRNA sense strand
aagcaggcaucaagauuac

SEQ ID NO: 601061 - RNA, 19 nt, Homo sapiens
  misc_RNA (1)...(19): siRNA sense strand
gcacuagcagcacacuuca

SEQ ID NO: 601062 - RNA, 19 nt, Homo sapiens
  misc_RNA (1)...(19): siRNA sense strand
gccuguaacugcugacaag

SEQ ID NO: 601063 - RNA, 19 nt, Homo sapiens
  misc_RNA (1)...(19): siRNA sense strand
acacaagcccagccaucua

SEQ ID NO: 601064 - RNA, 19 nt, Homo sapiens
  misc_RNA (1)...(19): siRNA sense strand
aaaucagaauuccuucaug

SEQ ID NO: 601065 - RNA, 19 nt, Homo sapiens
  misc_RNA (1)...(19): siRNA sense strand
gaacagaaguuucacaaug

SEQ ID NO: 601066 - RNA, 19 nt, Homo sapiens
  misc_RNA (1)...(19): siRNA sense strand
gaagcaggcaucaagauua

SEQ ID NO: 601067 - RNA, 19 nt, Homo sapiens
  misc_RNA (1)...(19): siRNA sense strand
caacauaacgucucugauu

SEQ ID NO: 601068 - RNA, 19 nt, Homo sapiens
  misc_RNA (1)...(19): siRNA sense strand
gaaccugucucuccucgaa

SEQ ID NO: 601069 - RNA, 19 nt, Homo sapiens
  misc_RNA (1)...(19): siRNA sense strand
gacaauugcuuccugcuuu

SEQ ID NO: 601070 - RNA, 19 nt, Homo sapiens
  misc_RNA (1)...(19): siRNA sense strand
uaacgucucugauuucuca

SEQ ID NO: 601071 - RNA, 19 nt, Homo sapiens
  misc_RNA (1)...(19): siRNA sense strand
gccaauaccucccuuacuu

SEQ ID NO: 601072 - RNA, 19 nt, Homo sapiens
  misc_RNA (1)...(19): siRNA sense strand
ggacccaaaucuucuuaga

SEQ ID NO: 601073 - RNA, 19 nt, Homo sapiens
  misc_RNA (1)...(19): siRNA sense strand
gaaagagaacagagacaaa

SEQ ID NO: 601074 - RNA, 19 nt, Homo sapiens
  misc_RNA (1)...(19): siRNA sense strand
caaacaagauggcagucaa

SEQ ID NO: 601075 - RNA, 19 nt, Homo sapiens
  misc_RNA (1)...(19): siRNA sense strand
ccacagugcucuucauagu

SEQ ID NO: 601076 - RNA, 19 nt, Homo sapiens
  misc_RNA (1)...(19): siRNA sense strand
gaucaguacuccuccuguu

SEQ ID NO: 601077 - RNA, 19 nt, Homo sapiens
  misc_RNA (1)...(19): siRNA sense strand
ucacugcagucuauaauuc

SEQ ID NO: 601078 - RNA, 19 nt, Homo sapiens
  misc_RNA (1)...(19): siRNA sense strand
gcucagcucucuacacaag

SEQ ID NO: 601079 - RNA, 19 nt, Homo sapiens
  misc_RNA (1)...(19): siRNA sense strand
cgaagaagcgcauaacaug

SEQ ID NO: 601080 - RNA, 19 nt, Homo sapiens
  misc_RNA (1)...(19): siRNA sense strand
uaacacagucccuaucaaa

SEQ ID NO: 601081 - RNA, 19 nt, Homo sapiens
  misc_RNA (1)...(19): siRNA sense strand
agaauaagcacaccucaaa

SEQ ID NO: 601082 - RNA, 19 nt, Homo sapiens
  misc_RNA (1)...(19): siRNA sense strand
aagaguggcuugaaagaga

SEQ ID NO: 601083 - RNA, 19 nt, Homo sapiens
  misc_RNA (1)...(19): siRNA sense strand
aacauaacgucucugauuu

SEQ ID NO: 601084 - RNA, 19 nt, Homo sapiens
  misc_RNA (1)...(19): siRNA sense strand
ugacuggucugagcauauu

SEQ ID NO: 601085 - RNA, 19 nt, Homo sapiens
  misc_RNA (1)...(19): siRNA sense strand
ggagauccuucaccaccaa

SEQ ID NO: 601086 - RNA, 19 nt, Homo sapiens
  misc_RNA (1)...(19): siRNA sense strand
gacaaacccguaucacauu

SEQ ID NO: 601087 - RNA, 19 nt, Homo sapiens
  misc_RNA (1)...(19): siRNA sense strand
uaagcacaccucaaacuaa

SEQ ID NO: 601088 - RNA, 19 nt, Homo sapiens
  misc_RNA (1)...(19): siRNA sense strand
gagcaaaggauacuauuuu

SEQ ID NO: 601089 - RNA, 19 nt, Homo sapiens
  misc_RNA (1)...(19): siRNA sense strand
ucacauguccgaaauuugu

SEQ ID NO: 601090 - RNA, 19 nt, Homo sapiens
  misc_RNA (1)...(19): siRNA sense strand
gcgcauaacaugggaacua

SEQ ID NO: 601091 - RNA, 19 nt, Homo sapiens
  misc_RNA (1)...(19): siRNA sense strand
caguuacucuccacaagaa

SEQ ID NO: 601092 - RNA, 19 nt, Homo sapiens
  misc_RNA (1)...(19): siRNA sense strand
gacaacaaauuaaggaacu

SEQ ID NO: 601093 - RNA, 19 nt, Homo sapiens
  misc_RNA (1)...(19): siRNA sense strand
ccaaucauacuucuaauag

SEQ ID NO: 601094 - RNA, 19 nt, Homo sapiens
  misc_RNA (1)...(19): siRNA sense strand
agauagggauuacagaaga

SEQ ID NO: 601095 - RNA, 19 nt, Homo sapiens
  misc_RNA (1)...(19): siRNA sense strand
acagugcucuucauaguuc

SEQ ID NO: 601096 - RNA, 19 nt, Homo sapiens
  misc_RNA (1)...(19): siRNA sense strand
gaaaacaaauacagugaca

SEQ ID NO: 601097 - RNA, 19 nt, Homo sapiens
  misc_RNA (1)...(19): siRNA sense strand
cuacaauugucgaacagaa

SEQ ID NO: 601098 - RNA, 19 nt, Homo sapiens
  misc_RNA (1)...(19): siRNA sense strand
aaacuucagaugcaccuua

SEQ ID NO: 601099 - RNA, 19 nt, Homo sapiens
  misc_RNA (1)...(19): siRNA sense strand
uauuagcucuucugggaaa

SEQ ID NO: 601100 - RNA, 19 nt, Homo sapiens
  misc_RNA (1)...(19): siRNA sense strand
gauccuucaccaccaaaua

SEQ ID NO: 601101 - RNA, 19 nt, Homo sapiens
  misc_RNA (1)...(19): siRNA sense strand
ccacgcugcagcuuaauaa

SEQ ID NO: 601102 - RNA, 19 nt, Homo sapiens
  misc_RNA (1)...(19): siRNA sense strand
gaugacuggucugagcaua

SEQ ID NO: 601103 - RNA, 19 nt, Homo sapiens
  misc_RNA (1)...(19): siRNA sense strand
gagacaaacccguaucaca

SEQ ID NO: 601104 - RNA, 19 nt, Homo sapiens
  misc_RNA (1)...(19): siRNA sense strand
ccaaaagaguggcuugaaa

SEQ ID NO: 601105 - RNA, 19 nt, Homo sapiens
  misc_RNA (1)...(19): siRNA sense strand
cgauccacguguucauuaa

SEQ ID NO: 601106 - RNA, 19 nt, Homo sapiens
  misc_RNA (1)...(19): siRNA sense strand
cuacuacaauugucgaaca

SEQ ID NO: 601107 - RNA, 19 nt, Homo sapiens
  misc_RNA (1)...(19): siRNA sense strand
ucaaguagccagagaaguc

SEQ ID NO: 601108 - RNA, 19 nt, Homo sapiens
  misc_RNA (1)...(19): siRNA sense strand
cagcacaggucacaguaag

SEQ ID NO: 601109 - RNA, 19 nt, Homo sapiens
  misc_RNA (1)...(19): siRNA sense strand
aaagauagggauuacagaa

SEQ ID NO: 601110 - RNA, 19 nt, Homo sapiens
  misc_RNA (1)...(19): siRNA sense strand
ucagaugcaccuuaugauu

SEQ ID NO: 601111 - RNA, 19 nt, Homo sapiens
  misc_RNA (1)...(19): siRNA sense strand
acccaaaucuucuuagaca

SEQ ID NO: 601112 - RNA, 19 nt, Homo sapiens
  misc_RNA (1)...(19): siRNA sense strand
cagaugcaccuuaugauuc

SEQ ID NO: 601113 - RNA, 19 nt, Homo sapiens
  misc_RNA (1)...(19): siRNA sense strand
gcgaagaagcgcauaacau

SEQ ID NO: 601114 - RNA, 19 nt, Homo sapiens
  misc_RNA (1)...(19): siRNA sense strand
ccaaaucuucuuagacaau

SEQ ID NO: 601115 - RNA, 19 nt, Homo sapiens
  misc_RNA (1)...(19): siRNA sense strand
ucacauucuucuaauccaa

SEQ ID NO: 601116 - RNA, 19 nt, Homo sapiens
  misc_RNA (1)...(19): siRNA sense strand
gagagcaaaggauacuauu

SEQ ID NO: 601117 - RNA, 19 nt, Homo sapiens
  misc_RNA (1)...(19): siRNA sense strand
cauaacaugggaacuauuc

SEQ ID NO: 601118 - RNA, 19 nt, Homo sapiens
  misc_RNA (1)...(19): siRNA sense strand
ucuaaucagucuccgaugu

SEQ ID NO: 601119 - RNA, 19 nt, Homo sapiens
  misc_RNA (1)...(19): siRNA sense strand
ccaucugcuuucaacauaa

SEQ ID NO: 601120 - RNA, 19 nt, Homo sapiens
  misc_RNA (1)...(19): siRNA sense strand
cgcugcagcuuaauaauuc

SEQ ID NO: 601121 - RNA, 19 nt, Homo sapiens
  misc_RNA (1)...(19): siRNA sense strand
agacaaacccguaucacau

SEQ ID NO: 601122 - RNA, 19 nt, Homo sapiens
  misc_RNA (1)...(19): siRNA sense strand
cacaagcccagccaucuaa

SEQ ID NO: 601123 - RNA, 19 nt, Homo sapiens
  misc_RNA (1)...(19): siRNA sense strand
gagaagcaggcaucaagau

SEQ ID NO: 601124 - RNA, 19 nt, Homo sapiens
  misc_RNA (1)...(19): siRNA sense strand
gcgcucaaguagccagaga

SEQ ID NO: 601125 - RNA, 19 nt, Homo sapiens
  misc_RNA (1)...(19): siRNA sense strand
gcccagccaucuaaucagu

SEQ ID NO: 601126 - RNA, 19 nt, Homo sapiens
  misc_RNA (1)...(19): siRNA sense strand
gcucuucauaguucaaauu

SEQ ID NO: 601127 - RNA, 19 nt, Homo sapiens
  misc_RNA (1)...(19): siRNA sense strand
caacaaauuaaggaacuug

SEQ ID NO: 601128 - RNA, 19 nt, Homo sapiens
  misc_RNA (1)...(19): siRNA sense strand
ucaccuggucccaaucaua

SEQ ID NO: 601129 - RNA, 19 nt, Homo sapiens
  misc_RNA (1)...(19): siRNA sense strand
aagccucacugcagucuau

SEQ ID NO: 601130 - RNA, 19 nt, Homo sapiens
  misc_RNA (1)...(19): siRNA sense strand
acaauugcuuccugcuuug

SEQ ID NO: 601131 - RNA, 19 nt, Homo sapiens
  misc_RNA (1)...(19): siRNA sense strand
aacagaaguuucacaaugg

SEQ ID NO: 601132 - RNA, 19 nt, Homo sapiens
  misc_RNA (1)...(19): siRNA sense strand
auucacauguccgaaauuu

SEQ ID NO: 601133 - RNA, 19 nt, Homo sapiens
  misc_RNA (1)...(19): siRNA sense strand
caaccacagugcucuucau

SEQ ID NO: 601134 - RNA, 19 nt, Homo sapiens
  misc_RNA (1)...(19): siRNA sense strand
ccgauccacguguucauua

SEQ ID NO: 601135 - RNA, 19 nt, Homo sapiens
  misc_RNA (1)...(19): siRNA sense strand
cugcucagcucucuacaca

SEQ ID NO: 601136 - RNA, 19 nt, Homo sapiens
  misc_RNA (1)...(19): siRNA sense strand
accaucugcuuucaacaua

SEQ ID NO: 601137 - RNA, 19 nt, Homo sapiens
  misc_RNA (1)...(19): siRNA sense strand
gcaaacaagauggcaguca

SEQ ID NO: 601138 - RNA, 19 nt, Homo sapiens
  misc_RNA (1)...(19): siRNA sense strand
gauagggauuacagaagag

SEQ ID NO: 601139 - RNA, 19 nt, Homo sapiens
  misc_RNA (1)...(19): siRNA sense strand
gagaucugauaguccugaa

SEQ ID NO: 601140 - RNA, 19 nt, Homo sapiens
  misc_RNA (1)...(19): siRNA sense strand
cagagaagcaggcaucaag

SEQ ID NO: 601141 - RNA, 19 nt, Homo sapiens
  misc_RNA (1)...(19): siRNA sense strand
gucccaaucauacuucuaa

SEQ ID NO: 601142 - RNA, 19 nt, Homo sapiens
  misc_RNA (1)...(19): siRNA sense strand
caucacagccaaagguuag

SEQ ID NO: 601143 - RNA, 19 nt, Homo sapiens
  misc_RNA (1)...(19): siRNA sense strand
guacuccuccuguuucauc

SEQ ID NO: 601144 - RNA, 19 nt, Homo sapiens
  misc_RNA (1)...(19): siRNA sense strand
aaacuaacacagucccuau

SEQ ID NO: 601145 - RNA, 19 nt, Homo sapiens
  misc_RNA (1)...(19): siRNA sense strand
cuucuaauccaagcaauaa

SEQ ID NO: 601146 - RNA, 19 nt, Homo sapiens
  misc_RNA (1)...(19): siRNA sense strand
cgagagcaaaggauacuau

SEQ ID NO: 601147 - RNA, 19 nt, Homo sapiens
  misc_RNA (1)...(19): siRNA sense strand
cauaacgucucugauuucu

SEQ ID NO: 601148 - RNA, 19 nt, Homo sapiens
  misc_RNA (1)...(19): siRNA sense strand
acaaacccguaucacauuc

SEQ ID NO: 601149 - RNA, 19 nt, Homo sapiens
  misc_RNA (1)...(19): siRNA sense strand
gcaagcaacagccacuagu

SEQ ID NO: 601150 - RNA, 19 nt, Homo sapiens
  misc_RNA (1)...(19): siRNA sense strand
ugaaagagaacagagacaa

SEQ ID NO: 601151 - RNA, 19 nt, Homo sapiens
  misc_RNA (1)...(19): siRNA sense strand
cuucagaugcaccuuauga

SEQ ID NO: 601152 - RNA, 19 nt, Homo sapiens
  misc_RNA (1)...(19): siRNA sense strand
uaaggaacuugaaaagcua

SEQ ID NO: 601153 - RNA, 19 nt, Homo sapiens
  misc_RNA (1)...(19): siRNA sense strand
gagacaacaaauuaaggaa

SEQ ID NO: 601154 - RNA, 19 nt, Homo sapiens
  misc_RNA (1)...(19): siRNA sense strand
guccgaaauuuguacugaa

SEQ ID NO: 601155 - RNA, 19 nt, Homo sapiens
  misc_RNA (1)...(19): siRNA sense strand
aagcaggcaucaagauuac

SEQ ID NO: 601156 - RNA, 19 nt, Homo sapiens
  misc_RNA (1)...(19): siRNA sense strand
gcacuagcagcacacuuca

SEQ ID NO: 601157 - RNA, 19 nt, Homo sapiens
  misc_RNA (1)...(19): siRNA sense strand
gccuguaacugcugacaag

SEQ ID NO: 601158 - RNA, 19 nt, Homo sapiens
  misc_RNA (1)...(19): siRNA sense strand
acacaagcccagccaucua

SEQ ID NO: 601159 - RNA, 19 nt, Homo sapiens
  misc_RNA (1)...(19): siRNA sense strand
gaccaucugcuuucaacau

SEQ ID NO: 601160 - RNA, 19 nt, Homo sapiens
  misc_RNA (1)...(19): siRNA sense strand
aaaucagaauuccuucaug

SEQ ID NO: 601161 - RNA, 19 nt, Homo sapiens
  misc_RNA (1)...(19): siRNA sense strand
ugagacaacaaauuaagga

SEQ ID NO: 601162 - RNA, 19 nt, Homo sapiens
  misc_RNA (1)...(19): siRNA sense strand
agaagcaggcaucaagauu

SEQ ID NO: 601163 - RNA, 19 nt, Homo sapiens
  misc_RNA (1)...(19): siRNA sense strand
gacagcacaggucacagua

SEQ ID NO: 601164 - RNA, 19 nt, Homo sapiens
  misc_RNA (1)...(19): siRNA sense strand
gaucuuuaguccgaguaug

SEQ ID NO: 601165 - RNA, 19 nt, Homo sapiens
  misc_RNA (1)...(19): siRNA sense strand
gaacagaaguuucacaaug

SEQ ID NO: 601166 - RNA, 19 nt, Homo sapiens
  misc_RNA (1)...(19): siRNA sense strand
gaagcaggcaucaagauua

SEQ ID NO: 601167 - RNA, 19 nt, Homo sapiens
  misc_RNA (1)...(19): siRNA sense strand
caacauaacgucucugauu

SEQ ID NO: 601168 - RNA, 19 nt, Homo sapiens
  misc_RNA (1)...(19): siRNA sense strand
gaaccugucucuccucgaa

SEQ ID NO: 601169 - RNA, 19 nt, Homo sapiens
  misc_RNA (1)...(19): siRNA sense strand
gacaauugcuuccugcuuu

SEQ ID NO: 601170 - RNA, 19 nt, Homo sapiens
  misc_RNA (1)...(19): siRNA sense strand
uaacgucucugauuucuca

SEQ ID NO: 601171 - RNA, 19 nt, Homo sapiens
  misc_RNA (1)...(19): siRNA sense strand
gccaauaccucccuuacuu

SEQ ID NO: 601172 - RNA, 19 nt, Homo sapiens
  misc_RNA (1)...(19): siRNA sense strand
gcacuuaaguauucaucga

SEQ ID NO: 601173 - RNA, 19 nt, Homo sapiens
  misc_RNA (1)...(19): siRNA sense strand
ggacccaaaucuucuuaga

SEQ ID NO: 601174 - RNA, 19 nt, Homo sapiens
  misc_RNA (1)...(19): siRNA sense strand
gaaagagaacagagacaaa

SEQ ID NO: 601175 - RNA, 19 nt, Homo sapiens
  misc_RNA (1)...(19): siRNA sense strand
caaacaagauggcagucaa

SEQ ID NO: 601176 - RNA, 19 nt, Homo sapiens
  misc_RNA (1)...(19): siRNA sense strand
ccacagugcucuucauagu

SEQ ID NO: 601177 - RNA, 19 nt, Homo sapiens
  misc_RNA (1)...(19): siRNA sense strand
gaucaguacuccuccuguu

SEQ ID NO: 601178 - RNA, 19 nt, Homo sapiens
  misc_RNA (1)...(19): siRNA sense strand
ucacugcagucuauaauuc

SEQ ID NO: 601179 - RNA, 19 nt, Homo sapiens
  misc_RNA (1)...(19): siRNA sense strand
gcucagcucucuacacaag

SEQ ID NO: 601180 - RNA, 19 nt, Homo sapiens
  misc_RNA (1)...(19): siRNA sense strand
cgaagaagcgcauaacaug

SEQ ID NO: 601181 - RNA, 19 nt, Homo sapiens
  misc_RNA (1)...(19): siRNA sense strand
uaacacagucccuaucaaa

SEQ ID NO: 601182 - RNA, 19 nt, Homo sapiens
  misc_RNA (1)...(19): siRNA sense strand
agaauaagcacaccucaaa

SEQ ID NO: 601183 - RNA, 19 nt, Homo sapiens
  misc_RNA (1)...(19): siRNA sense strand
aagaguggcuugaaagaga

SEQ ID NO: 601184 - RNA, 19 nt, Homo sapiens
  misc_RNA (1)...(19): siRNA sense strand
aacauaacgucucugauuu

SEQ ID NO: 601185 - RNA, 19 nt, Homo sapiens
  misc_RNA (1)...(19): siRNA sense strand
ugacuggucugagcauauu

SEQ ID NO: 601186 - RNA, 19 nt, Homo sapiens
  misc_RNA (1)...(19): siRNA sense strand
ggagauccuucaccaccaa

SEQ ID NO: 601187 - RNA, 19 nt, Homo sapiens
  misc_RNA (1)...(19): siRNA sense strand
gacaaacccguaucacauu

SEQ ID NO: 601188 - RNA, 19 nt, Homo sapiens
  misc_RNA (1)...(19): siRNA sense strand
uaagcacaccucaaacuaa

SEQ ID NO: 601189 - RNA, 19 nt, Homo sapiens
  misc_RNA (1)...(19): siRNA sense strand
gagcaaaggauacuauuuu

SEQ ID NO: 601190 - RNA, 19 nt, Homo sapiens
  misc_RNA (1)...(19): siRNA sense strand
ucacauguccgaaauuugu

SEQ ID NO: 601191 - RNA, 19 nt, Homo sapiens
  misc_RNA (1)...(19): siRNA sense strand
gcgcauaacaugggaacua

SEQ ID NO: 601192 - RNA, 19 nt, Homo sapiens
  misc_RNA (1)...(19): siRNA sense strand
caguuacucuccacaagaa

SEQ ID NO: 601193 - RNA, 19 nt, Homo sapiens
  misc_RNA (1)...(19): siRNA sense strand
gacaacaaauuaaggaacu

SEQ ID NO: 601194 - RNA, 19 nt, Homo sapiens
  misc_RNA (1)...(19): siRNA sense strand
ccaaucauacuucuaauag

SEQ ID NO: 601195 - RNA, 19 nt, Homo sapiens
  misc_RNA (1)...(19): siRNA sense strand
agauagggauuacagaaga

SEQ ID NO: 601196 - RNA, 19 nt, Homo sapiens
  misc_RNA (1)...(19): siRNA sense strand
acagugcucuucauaguuc

SEQ ID NO: 601197 - RNA, 19 nt, Homo sapiens
  misc_RNA (1)...(19): siRNA sense strand
gaaaacaaauacagugaca

SEQ ID NO: 601198 - RNA, 19 nt, Homo sapiens
  misc_RNA (1)...(19): siRNA sense strand
cuacaauugucgaacagaa

SEQ ID NO: 601199 - RNA, 19 nt, Homo sapiens
  misc_RNA (1)...(19): siRNA sense strand
aaacuucagaugcaccuua

SEQ ID NO: 601200 - RNA, 19 nt, Homo sapiens
  misc_RNA (1)...(19): siRNA sense strand
uauuagcucuucugggaaa

SEQ ID NO: 601201 - RNA, 19 nt, Homo sapiens
  misc_RNA (1)...(19): siRNA sense strand
gauccuucaccaccaaaua

SEQ ID NO: 601202 - RNA, 19 nt, Homo sapiens
  misc_RNA (1)...(19): siRNA sense strand
ggugaucacagacaugaaa

SEQ ID NO: 601203 - RNA, 19 nt, Homo sapiens
  misc_RNA (1)...(19): siRNA sense strand
ccacgcugcagcuuaauaa

SEQ ID NO: 601204 - RNA, 19 nt, Homo sapiens
  misc_RNA (1)...(19): siRNA sense strand
gaugacuggucugagcaua

SEQ ID NO: 601205 - RNA, 19 nt, Homo sapiens
  misc_RNA (1)...(19): siRNA sense strand
gagacaaacccguaucaca

SEQ ID NO: 601206 - RNA, 19 nt, Homo sapiens
  misc_RNA (1)...(19): siRNA sense strand
ccaaaagaguggcuugaaa

SEQ ID NO: 601207 - RNA, 19 nt, Homo sapiens
  misc_RNA (1)...(19): siRNA sense strand
cgauccacguguucauuaa

SEQ ID NO: 601208 - RNA, 19 nt, Homo sapiens
  misc_RNA (1)...(19): siRNA sense strand
cagcacaggucacaguaag

SEQ ID NO: 601209 - RNA, 19 nt, Homo sapiens
  misc_RNA (1)...(19): siRNA sense strand
ucaaguagccagagaaguc

SEQ ID NO: 601210 - RNA, 19 nt, Homo sapiens
  misc_RNA (1)...(19): siRNA sense strand
ucacagacaugaaaagaug

SEQ ID NO: 601211 - RNA, 19 nt, Homo sapiens
  misc_RNA (1)...(19): siRNA sense strand
aaagauagggauuacagaa

SEQ ID NO: 601212 - RNA, 19 nt, Homo sapiens
  misc_RNA (1)...(19): siRNA sense strand
caguagcggugaucacaga

SEQ ID NO: 601213 - RNA, 19 nt, Homo sapiens
  misc_RNA (1)...(19): siRNA sense strand
cuacuacaauugucgaaca

SEQ ID NO: 601214 - RNA, 19 nt, Homo sapiens
  misc_RNA (1)...(19): siRNA sense strand
ucagaugcaccuuaugauu

SEQ ID NO: 601215 - RNA, 19 nt, Homo sapiens
  misc_RNA (1)...(19): siRNA sense strand
acccaaaucuucuuagaca

SEQ ID NO: 601216 - RNA, 19 nt, Homo sapiens
  misc_RNA (1)...(19): siRNA sense strand
cagaugcaccuuaugauuc

SEQ ID NO: 601217 - RNA, 19 nt, Homo sapiens
  misc_RNA (1)...(19): siRNA sense strand
gcgaagaagcgcauaacau

SEQ ID NO: 601218 - RNA, 19 nt, Homo sapiens
  misc_RNA (1)...(19): siRNA sense strand
ccaaaucuucuuagacaau

SEQ ID NO: 601219 - RNA, 19 nt, Homo sapiens
  misc_RNA (1)...(19): siRNA sense strand
ucacauucuucuaauccaa

SEQ ID NO: 601220 - RNA, 19 nt, Homo sapiens
  misc_RNA (1)...(19): siRNA sense strand
gagagcaaaggauacuauu

SEQ ID NO: 601221 - RNA, 19 nt, Homo sapiens
  misc_RNA (1)...(19): siRNA sense strand
cauaacaugggaacuauuc

SEQ ID NO: 601222 - RNA, 19 nt, Homo sapiens
  misc_RNA (1)...(19): siRNA sense strand
ucuaaucagucuccgaugu

SEQ ID NO: 601223 - RNA, 19 nt, Homo sapiens
  misc_RNA (1)...(19): siRNA sense strand
ccaucugcuuucaacauaa

SEQ ID NO: 601224 - RNA, 19 nt, Homo sapiens
  misc_RNA (1)...(19): siRNA sense strand
cgcugcagcuuaauaauuc

SEQ ID NO: 601225 - RNA, 19 nt, Homo sapiens
  misc_RNA (1)...(19): siRNA sense strand
agacaaacccguaucacau

SEQ ID NO: 601226 - RNA, 19 nt, Homo sapiens
  misc_RNA (1)...(19): siRNA sense strand
cacaagcccagccaucuaa

SEQ ID NO: 601227 - RNA, 19 nt, Homo sapiens
  misc_RNA (1)...(19): siRNA sense strand
gagaagcaggcaucaagau

SEQ ID NO: 601228 - RNA, 19 nt, Homo sapiens
  misc_RNA (1)...(19): siRNA sense strand
gcgcucaaguagccagaga

SEQ ID NO: 601229 - RNA, 19 nt, Homo sapiens
  misc_RNA (1)...(19): siRNA sense strand
gcccagccaucuaaucagu

SEQ ID NO: 601230 - RNA, 19 nt, Homo sapiens
  misc_RNA (1)...(19): siRNA sense strand
gcucuucauaguucaaauu

SEQ ID NO: 601231 - RNA, 19 nt, Homo sapiens
  misc_RNA (1)...(19): siRNA sense strand
caacaaauuaaggaacuug

SEQ ID NO: 601232 - RNA, 19 nt, Homo sapiens
  misc_RNA (1)...(19): siRNA sense strand
ucaccuggucccaaucaua

SEQ ID NO: 601233 - RNA, 19 nt, Homo sapiens
  misc_RNA (1)...(19): siRNA sense strand
aagccucacugcagucuau

SEQ ID NO: 601234 - RNA, 19 nt, Homo sapiens
  misc_RNA (1)...(19): siRNA sense strand
acaauugcuuccugcuuug

SEQ ID NO: 601235 - RNA, 19 nt, Homo sapiens
  misc_RNA (1)...(19): siRNA sense strand
caaccacagugcucuucau

SEQ ID NO: 601236 - RNA, 19 nt, Homo sapiens
  misc_RNA (1)...(19): siRNA sense strand
auucacauguccgaaauuu

SEQ ID NO: 601237 - RNA, 19 nt, Homo sapiens
  misc_RNA (1)...(19): siRNA sense strand
ccgauccacguguucauua

SEQ ID NO: 601238 - RNA, 19 nt, Homo sapiens
  misc_RNA (1)...(19): siRNA sense strand
cugcucagcucucuacaca

SEQ ID NO: 601239 - RNA, 19 nt, Homo sapiens
  misc_RNA (1)...(19): siRNA sense strand
accaucugcuuucaacaua

SEQ ID NO: 601240 - RNA, 19 nt, Homo sapiens
  misc_RNA (1)...(19): siRNA sense strand
gcaaacaagauggcaguca

SEQ ID NO: 601241 - RNA, 19 nt, Homo sapiens
  misc_RNA (1)...(19): siRNA sense strand
aacagaaguuucacaaugg

SEQ ID NO: 601242 - RNA, 19 nt, Homo sapiens
  misc_RNA (1)...(19): siRNA sense strand
gauagggauuacagaagag

SEQ ID NO: 601243 - RNA, 19 nt, Homo sapiens
  misc_RNA (1)...(19): siRNA sense strand
cagagaagcaggcaucaag

SEQ ID NO: 601244 - RNA, 19 nt, Homo sapiens
  misc_RNA (1)...(19): siRNA sense strand
gucccaaucauacuucuaa

SEQ ID NO: 601245 - RNA, 19 nt, Homo sapiens
  misc_RNA (1)...(19): siRNA sense strand
caucacagccaaagguuag

SEQ ID NO: 601246 - RNA, 19 nt, Homo sapiens
  misc_RNA (1)...(19): siRNA sense strand
guacuccuccuguuucauc

SEQ ID NO: 601247 - RNA, 19 nt, Homo sapiens
  misc_RNA (1)...(19): siRNA sense strand
aaacuaacacagucccuau

SEQ ID NO: 601248 - RNA, 19 nt, Homo sapiens
  misc_RNA (1)...(19): siRNA sense strand
accaggcacuuaaguauuc

SEQ ID NO: 601249 - RNA, 19 nt, Homo sapiens
  misc_RNA (1)...(19): siRNA sense strand
gagaucugauaguccugaa

SEQ ID NO: 601250 - RNA, 19 nt, Homo sapiens
  misc_RNA (1)...(19): siRNA sense strand
cuucuaauccaagcaauaa

SEQ ID NO: 601251 - RNA, 19 nt, Homo sapiens
  misc_RNA (1)...(19): siRNA sense strand
cgagagcaaaggauacuau

SEQ ID NO: 601252 - RNA, 19 nt, Homo sapiens
  misc_RNA (1)...(19): siRNA sense strand
cauaacgucucugauuucu

SEQ ID NO: 601253 - RNA, 19 nt, Homo sapiens
  misc_RNA (1)...(19): siRNA sense strand
acaaacccguaucacauuc

SEQ ID NO: 601254 - RNA, 19 nt, Homo sapiens
  misc_RNA (1)...(19): siRNA sense strand
gcaagcaacagccacuagu

SEQ ID NO: 601255 - RNA, 19 nt, Homo sapiens
  misc_RNA (1)...(19): siRNA sense strand
ugaaagagaacagagacaa

SEQ ID NO: 601256 - RNA, 19 nt, Homo sapiens
  misc_RNA (1)...(19): siRNA sense strand
cuucagaugcaccuuauga

SEQ ID NO: 601257 - RNA, 19 nt, Homo sapiens
  misc_RNA (1)...(19): siRNA sense strand
uaaggaacuugaaaagcua

SEQ ID NO: 601258 - RNA, 19 nt, Homo sapiens
  misc_RNA (1)...(19): siRNA sense strand
gagacaacaaauuaaggaa

SEQ ID NO: 601259 - RNA, 19 nt, Homo sapiens
  misc_RNA (1)...(19): siRNA sense strand
guccgaaauuuguacugaa

SEQ ID NO: 601260 - RNA, 19 nt, Homo sapiens
  misc_RNA (1)...(19): siRNA sense strand
aagcaggcaucaagauuac

SEQ ID NO: 601261 - RNA, 19 nt, Homo sapiens
  misc_RNA (1)...(19): siRNA sense strand
gcacuagcagcacacuuca

SEQ ID NO: 601262 - RNA, 19 nt, Homo sapiens
  misc_RNA (1)...(19): siRNA sense strand
gccuguaacugcugacaag

SEQ ID NO: 601263 - RNA, 19 nt, Homo sapiens
  misc_RNA (1)...(19): siRNA sense strand
acacaagcccagccaucua

SEQ ID NO: 601264 - RNA, 19 nt, Homo sapiens
  misc_RNA (1)...(19): siRNA sense strand
aaaucagaauuccuucaug

SEQ ID NO: 601265 - RNA, 19 nt, Homo sapiens
  misc_RNA (1)...(19): siRNA sense strand
ccuauuaccuuuacuguua

SEQ ID NO: 601266 - RNA, 19 nt, Homo sapiens
  misc_RNA (1)...(19): siRNA sense strand
gggaggcacugaacugaaa

SEQ ID NO: 601267 - RNA, 19 nt, Homo sapiens
  misc_RNA (1)...(19): siRNA sense strand
aagcaucacuuauaaggaa

SEQ ID NO: 601268 - RNA, 19 nt, Homo sapiens
  misc_RNA (1)...(19): siRNA sense strand
gacuuucacuuccgccuua

SEQ ID NO: 601269 - RNA, 19 nt, Homo sapiens
  misc_RNA (1)...(19): siRNA sense strand
agacaaauguggacucugu

SEQ ID NO: 601270 - RNA, 19 nt, Homo sapiens
  misc_RNA (1)...(19): siRNA sense strand
ugacggugcuggcuacuga

SEQ ID NO: 601271 - RNA, 19 nt, Homo sapiens
  misc_RNA (1)...(19): siRNA sense strand
gagaagaugcugccucguu

SEQ ID NO: 601272 - RNA, 19 nt, Homo sapiens
  misc_RNA (1)...(19): siRNA sense strand
cgucgacucuuccuggaua

SEQ ID NO: 601273 - RNA, 19 nt, Homo sapiens
  misc_RNA (1)...(19): siRNA sense strand
gaagacaaauguggacucu

SEQ ID NO: 601274 - RNA, 19 nt, Homo sapiens
  misc_RNA (1)...(19): siRNA sense strand
ccaggacccaguacaguua

SEQ ID NO: 601275 - RNA, 19 nt, Homo sapiens
  misc_RNA (1)...(19): siRNA sense strand
ucuacucccuuucuuauau

SEQ ID NO: 601276 - RNA, 19 nt, Homo sapiens
  misc_RNA (1)...(19): siRNA sense strand
gaugcugccucguuguuau

SEQ ID NO: 601277 - RNA, 19 nt, Homo sapiens
  misc_RNA (1)...(19): siRNA sense strand
gaucaaggcaaccgggaaa

SEQ ID NO: 601278 - RNA, 19 nt, Homo sapiens
  misc_RNA (1)...(19): siRNA sense strand
ccauacgccuauuaccuuu

SEQ ID NO: 601279 - RNA, 19 nt, Homo sapiens
  misc_RNA (1)...(19): siRNA sense strand
ggucaccauacgccuauua

SEQ ID NO: 601280 - RNA, 19 nt, Homo sapiens
  misc_RNA (1)...(19): siRNA sense strand
ggcacggccuucucuguga

SEQ ID NO: 601281 - RNA, 19 nt, Homo sapiens
  misc_RNA (1)...(19): siRNA sense strand
ggaagaggaggacuugaca

SEQ ID NO: 601282 - RNA, 19 nt, Homo sapiens
  misc_RNA (1)...(19): siRNA sense strand
aaauguggacucuguguuu

SEQ ID NO: 601283 - RNA, 19 nt, Homo sapiens
  misc_RNA (1)...(19): siRNA sense strand
uggaguacguggaagagaa

SEQ ID NO: 601284 - RNA, 19 nt, Homo sapiens
  misc_RNA (1)...(19): siRNA sense strand
cgggaaaguuugacugcaa

SEQ ID NO: 601285 - RNA, 19 nt, Homo sapiens
  misc_RNA (1)...(19): siRNA sense strand
guauucggcugggaacuug

SEQ ID NO: 601286 - RNA, 19 nt, Homo sapiens
  misc_RNA (1)...(19): siRNA sense strand
acaguuagacuuucacuuc

SEQ ID NO: 601287 - RNA, 19 nt, Homo sapiens
  misc_RNA (1)...(19): siRNA sense strand
gguaaccacgaccagcuua

SEQ ID NO: 601288 - RNA, 19 nt, Homo sapiens
  misc_RNA (1)...(19): siRNA sense strand
uggaagagaagacaaaugu

SEQ ID NO: 601289 - RNA, 19 nt, Homo sapiens
  misc_RNA (1)...(19): siRNA sense strand
uuugugaacuuccagaaug

SEQ ID NO: 601290 - RNA, 19 nt, Homo sapiens
  misc_RNA (1)...(19): siRNA sense strand
ugacugcaacccuggagua

SEQ ID NO: 601291 - RNA, 19 nt, Homo sapiens
  misc_RNA (1)...(19): siRNA sense strand
ccacccaccugugaacuuc

SEQ ID NO: 601292 - RNA, 19 nt, Homo sapiens
  misc_RNA (1)...(19): siRNA sense strand
caaggcaaccgggaaaguu

SEQ ID NO: 601293 - RNA, 19 nt, Homo sapiens
  misc_RNA (1)...(19): siRNA sense strand
ccacgaccagcuuaaagaa

SEQ ID NO: 601294 - RNA, 19 nt, Homo sapiens
  misc_RNA (1)...(19): siRNA sense strand
ccagugagccuccuugaac

SEQ ID NO: 601295 - RNA, 19 nt, Homo sapiens
  misc_RNA (1)...(19): siRNA sense strand
cauaucaggccuuggauca

SEQ ID NO: 601296 - RNA, 19 nt, Homo sapiens
  misc_RNA (1)...(19): siRNA sense strand
cuggaagccuugacacaug

SEQ ID NO: 601297 - RNA, 19 nt, Homo sapiens
  misc_RNA (1)...(19): siRNA sense strand
uaaggaagaggaggacuug

SEQ ID NO: 601298 - RNA, 19 nt, Homo sapiens
  misc_RNA (1)...(19): siRNA sense strand
ucagcuacaugggcuuuga

SEQ ID NO: 601299 - RNA, 19 nt, Homo sapiens
  misc_RNA (1)...(19): siRNA sense strand
gcuccugagucccuaguag

SEQ ID NO: 601300 - RNA, 19 nt, Homo sapiens
  misc_RNA (1)...(19): siRNA sense strand
uaaccacgaccagcuuaaa

SEQ ID NO: 601301 - RNA, 19 nt, Homo sapiens
  misc_RNA (1)...(19): siRNA sense strand
gaagaugcugccucguugu

SEQ ID NO: 601302 - RNA, 19 nt, Homo sapiens
  misc_RNA (1)...(19): siRNA sense strand
ggaagagaagacaaaugug

SEQ ID NO: 601303 - RNA, 19 nt, Homo sapiens
  misc_RNA (1)...(19): siRNA sense strand
caguacaguuagacuuuca

SEQ ID NO: 601304 - RNA, 19 nt, Homo sapiens
  misc_RNA (1)...(19): siRNA sense strand
ccaguacaguuagacuuuc

SEQ ID NO: 601305 - RNA, 19 nt, Homo sapiens
  misc_RNA (1)...(19): siRNA sense strand
guaaccacgaccagcuuaa

SEQ ID NO: 601306 - RNA, 19 nt, Homo sapiens
  misc_RNA (1)...(19): siRNA sense strand
caaauguggacucuguguu

SEQ ID NO: 601307 - RNA, 19 nt, Homo sapiens
  misc_RNA (1)...(19): siRNA sense strand
cagugagccuccuugaaca

SEQ ID NO: 601308 - RNA, 19 nt, Homo sapiens
  misc_RNA (1)...(19): siRNA sense strand
uaccuuuacuguuacaagu

SEQ ID NO: 601309 - RNA, 19 nt, Homo sapiens
  misc_RNA (1)...(19): siRNA sense strand
cccaguacaguuagacuuu

SEQ ID NO: 601310 - RNA, 19 nt, Homo sapiens
  misc_RNA (1)...(19): siRNA sense strand
cagcuuaaagaacuguauu

SEQ ID NO: 601311 - RNA, 19 nt, Homo sapiens
  misc_RNA (1)...(19): siRNA sense strand
acaaguaccggaucacucu

SEQ ID NO: 601312 - RNA, 19 nt, Homo sapiens
  misc_RNA (1)...(19): siRNA sense strand
aauguggacucuguguuug

SEQ ID NO: 601313 - RNA, 19 nt, Homo sapiens
  misc_RNA (1)...(19): siRNA sense strand
ugucuacucccuuucuuau

SEQ ID NO: 601314 - RNA, 19 nt, Homo sapiens
  misc_RNA (1)...(19): siRNA sense strand
gcaccgagcaggguaacca

SEQ ID NO: 601315 - RNA, 19 nt, Homo sapiens
  misc_RNA (1)...(19): siRNA sense strand
aaacacguaacuaccucua

SEQ ID NO: 601316 - RNA, 19 nt, Homo sapiens
  misc_RNA (1)...(19): siRNA sense strand
cuacucccuuucuuauauc

SEQ ID NO: 601317 - RNA, 19 nt, Homo sapiens
  misc_RNA (1)...(19): siRNA sense strand
cugcaacccuggaguacgu

SEQ ID NO: 601318 - RNA, 19 nt, Homo sapiens
  misc_RNA (1)...(19): siRNA sense strand
acaaugucaucuuuauggu

SEQ ID NO: 601319 - RNA, 19 nt, Homo sapiens
  misc_RNA (1)...(19): siRNA sense strand
uugugaacuuccagaauga

SEQ ID NO: 601320 - RNA, 19 nt, Homo sapiens
  misc_RNA (1)...(19): siRNA sense strand
ggaguacguggaagagaag

SEQ ID NO: 601321 - RNA, 19 nt, Homo sapiens
  misc_RNA (1)...(19): siRNA sense strand
gcugccucguuguuauaaa

SEQ ID NO: 601322 - RNA, 19 nt, Homo sapiens
  misc_RNA (1)...(19): siRNA sense strand
gcuggaagccuugacacau

SEQ ID NO: 601323 - RNA, 19 nt, Homo sapiens
  misc_RNA (1)...(19): siRNA sense strand
aaggcaaccgggaaaguuu

SEQ ID NO: 601324 - RNA, 19 nt, Homo sapiens
  misc_RNA (1)...(19): siRNA sense strand
cauacgccuauuaccuuua

SEQ ID NO: 601325 - RNA, 19 nt, Homo sapiens
  misc_RNA (1)...(19): siRNA sense strand
cgaccagcuuaaagaacug

SEQ ID NO: 601326 - RNA, 19 nt, Homo sapiens
  misc_RNA (1)...(19): siRNA sense strand
ccacagggaggcacugaac

SEQ ID NO: 601327 - RNA, 19 nt, Homo sapiens
  misc_RNA (1)...(19): siRNA sense strand
gaaaguagaacgaaucgaa

SEQ ID NO: 601328 - RNA, 19 nt, Homo sapiens
  misc_RNA (1)...(19): siRNA sense strand
caaagagaguuaugacuau

SEQ ID NO: 601329 - RNA, 19 nt, Homo sapiens
  misc_RNA (1)...(19): siRNA sense strand
gagaugaugugaaaguaga

SEQ ID NO: 601330 - RNA, 19 nt, Homo sapiens
  misc_RNA (1)...(19): siRNA sense strand
ccaaagagaguuaugacua

SEQ ID NO: 601331 - RNA, 19 nt, Homo sapiens
  misc_RNA (1)...(19): siRNA sense strand
gaggagacuucgaugagaa

SEQ ID NO: 601332 - RNA, 19 nt, Homo sapiens
  misc_RNA (1)...(19): siRNA sense strand
ucgaugagaaucugaauua

SEQ ID NO: 601333 - RNA, 19 nt, Homo sapiens
  misc_RNA (1)...(19): siRNA sense strand
ggacacacacacaaauuug

SEQ ID NO: 601334 - RNA, 19 nt, Homo sapiens
  misc_RNA (1)...(19): siRNA sense strand
ccacaccggugcaacaguu

SEQ ID NO: 601335 - RNA, 19 nt, Homo sapiens
  misc_RNA (1)...(19): siRNA sense strand
uauaaugccuuggaaacaa

SEQ ID NO: 601336 - RNA, 19 nt, Homo sapiens
  misc_RNA (1)...(19): siRNA sense strand
cuacaguggucaccuaugu

SEQ ID NO: 601337 - RNA, 19 nt, Homo sapiens
  misc_RNA (1)...(19): siRNA sense strand
ugaauuauccagaacagaa

SEQ ID NO: 601338 - RNA, 19 nt, Homo sapiens
  misc_RNA (1)...(19): siRNA sense strand
ucauuuguguugauggaua

SEQ ID NO: 601339 - RNA, 19 nt, Homo sapiens
  misc_RNA (1)...(19): siRNA sense strand
aauuggagaugaugugaaa

SEQ ID NO: 601340 - RNA, 19 nt, Homo sapiens
  misc_RNA (1)...(19): siRNA sense strand
gaacgaaucgaauacaaaa

SEQ ID NO: 601341 - RNA, 19 nt, Homo sapiens
  misc_RNA (1)...(19): siRNA sense strand
cacauucucugcacaggaa

SEQ ID NO: 601342 - RNA, 19 nt, Homo sapiens
  misc_RNA (1)...(19): siRNA sense strand
gggacacacacacaaauuu

SEQ ID NO: 601343 - RNA, 19 nt, Homo sapiens
  misc_RNA (1)...(19): siRNA sense strand
gaauuauccagaacagaaa

SEQ ID NO: 601344 - RNA, 19 nt, Homo sapiens
  misc_RNA (1)...(19): siRNA sense strand
caggaaaccuuugcaccaa

SEQ ID NO: 601345 - RNA, 19 nt, Homo sapiens
  misc_RNA (1)...(19): siRNA sense strand
gcaccaaagagaguuauga

SEQ ID NO: 601346 - RNA, 19 nt, Homo sapiens
  misc_RNA (1)...(19): siRNA sense strand
uagaacgaaucgaauacaa

SEQ ID NO: 601347 - RNA, 19 nt, Homo sapiens
  misc_RNA (1)...(19): siRNA sense strand
gaugagaaucugaauuauc

SEQ ID NO: 601348 - RNA, 19 nt, Homo sapiens
  misc_RNA (1)...(19): siRNA sense strand
gagaggagacuucgaugag

SEQ ID NO: 601349 - RNA, 19 nt, Homo sapiens
  misc_RNA (1)...(19): siRNA sense strand
gacucuggcuggugauguu

SEQ ID NO: 601350 - RNA, 19 nt, Homo sapiens
  misc_RNA (1)...(19): siRNA sense strand
auaaugccuuggaaacaaa

SEQ ID NO: 601351 - RNA, 19 nt, Homo sapiens
  misc_RNA (1)...(19): siRNA sense strand
gacacacacacaaauuuga

SEQ ID NO: 601352 - RNA, 19 nt, Homo sapiens
  misc_RNA (1)...(19): siRNA sense strand
uggagaugaugugaaagua

SEQ ID NO: 601353 - RNA, 19 nt, Homo sapiens
  misc_RNA (1)...(19): siRNA sense strand
gcagaggcaauuugaugug

SEQ ID NO: 601354 - RNA, 19 nt, Homo sapiens
  misc_RNA (1)...(19): siRNA sense strand
cacacaaauuugaagcauu

SEQ ID NO: 601355 - RNA, 19 nt, Homo sapiens
  misc_RNA (1)...(19): siRNA sense strand
cgaugagaaucugaauuau

SEQ ID NO: 601356 - RNA, 19 nt, Homo sapiens
  misc_RNA (1)...(19): siRNA sense strand
ggagaugaugugaaaguag

SEQ ID NO: 601357 - RNA, 19 nt, Homo sapiens
  misc_RNA (1)...(19): siRNA sense strand
cuauguguaucagcuaauu

SEQ ID NO: 601358 - RNA, 19 nt, Homo sapiens
  misc_RNA (1)...(19): siRNA sense strand
agaggagacuucgaugaga

SEQ ID NO: 601359 - RNA, 19 nt, Homo sapiens
  misc_RNA (1)...(19): siRNA sense strand
aaguagaacgaaucgaaua

SEQ ID NO: 601360 - RNA, 19 nt, Homo sapiens
  misc_RNA (1)...(19): siRNA sense strand
uugaagcauuugagcauga

SEQ ID NO: 601361 - RNA, 19 nt, Homo sapiens
  misc_RNA (1)...(19): siRNA sense strand
aaagagaguuaugacuauc

SEQ ID NO: 601362 - RNA, 19 nt, Homo sapiens
  misc_RNA (1)...(19): siRNA sense strand
ugaagcauuugagcaugaa

SEQ ID NO: 601363 - RNA, 19 nt, Homo sapiens
  misc_RNA (1)...(19): siRNA sense strand
acaguuugccagcuaaauu

SEQ ID NO: 601364 - RNA, 19 nt, Homo sapiens
  misc_RNA (1)...(19): siRNA sense strand
cuggugauguucauauugu

SEQ ID NO: 601365 - RNA, 19 nt, Homo sapiens
  misc_RNA (1)...(19): siRNA sense strand
agaacgaaucgaauacaaa

SEQ ID NO: 601366 - RNA, 19 nt, Homo sapiens
  misc_RNA (1)...(19): siRNA sense strand
cuucuacaguggucaccua

SEQ ID NO: 601367 - RNA, 19 nt, Homo sapiens
  misc_RNA (1)...(19): siRNA sense strand
acacacacacaaauuugaa

SEQ ID NO: 601368 - RNA, 19 nt, Homo sapiens
  misc_RNA (1)...(19): siRNA sense strand
ggcuggugauguucauauu

SEQ ID NO: 601369 - RNA, 19 nt, Homo sapiens
  misc_RNA (1)...(19): siRNA sense strand
ggugauguucauauuguga

SEQ ID NO: 601370 - RNA, 19 nt, Homo sapiens
  misc_RNA (1)...(19): siRNA sense strand
gaugugaaaguagaacgaa

SEQ ID NO: 601371 - RNA, 19 nt, Homo sapiens
  misc_RNA (1)...(19): siRNA sense strand
acacacaaauuugaagcau

SEQ ID NO: 601372 - RNA, 19 nt, Homo sapiens
  misc_RNA (1)...(19): siRNA sense strand
ugagaggagacuucgauga

SEQ ID NO: 601373 - RNA, 19 nt, Homo sapiens
  misc_RNA (1)...(19): siRNA sense strand
cagaaaguugugacuguug

SEQ ID NO: 601374 - RNA, 19 nt, Homo sapiens
  misc_RNA (1)...(19): siRNA sense strand
cauuuguguugauggauau

SEQ ID NO: 601375 - RNA, 19 nt, Homo sapiens
  misc_RNA (1)...(19): siRNA sense strand
cuacauuaauccagguucu

SEQ ID NO: 601376 - RNA, 19 nt, Homo sapiens
  misc_RNA (1)...(19): siRNA sense strand
agacuucgaugagaaucug

SEQ ID NO: 601377 - RNA, 19 nt, Homo sapiens
  misc_RNA (1)...(19): siRNA sense strand
caacaguuugccagcuaaa

SEQ ID NO: 601378 - RNA, 19 nt, Homo sapiens
  misc_RNA (1)...(19): siRNA sense strand
ucagcuaauuggagaugau

SEQ ID NO: 601379 - RNA, 19 nt, Homo sapiens
  misc_RNA (1)...(19): siRNA sense strand
gccuuggaaacaaacauua

SEQ ID NO: 601380 - RNA, 19 nt, Homo sapiens
  misc_RNA (1)...(19): siRNA sense strand
gaaaguugugacuguugga

SEQ ID NO: 601381 - RNA, 19 nt, Homo sapiens
  misc_RNA (1)...(19): siRNA sense strand
cauauaaugccuuggaaac

SEQ ID NO: 601382 - RNA, 19 nt, Homo sapiens
  misc_RNA (1)...(19): siRNA sense strand
aguuaugacuaucucaaga

SEQ ID NO: 601383 - RNA, 19 nt, Homo sapiens
  misc_RNA (1)...(19): siRNA sense strand
gcuaauuggagaugaugug

SEQ ID NO: 601384 - RNA, 19 nt, Homo sapiens
  misc_RNA (1)...(19): siRNA sense strand
augagaaucugaauuaucc

SEQ ID NO: 601385 - RNA, 19 nt, Homo sapiens
  misc_RNA (1)...(19): siRNA sense strand
gcuggugauguucauauug

SEQ ID NO: 601386 - RNA, 19 nt, Homo sapiens
  misc_RNA (1)...(19): siRNA sense strand
guagaacgaaucgaauaca

SEQ ID NO: 601387 - RNA, 19 nt, Homo sapiens
  misc_RNA (1)...(19): siRNA sense strand
aaaguagaacgaaucgaau

SEQ ID NO: 601388 - RNA, 19 nt, Homo sapiens
  misc_RNA (1)...(19): siRNA sense strand
cgggacacacacacaaauu

SEQ ID NO: 601389 - RNA, 19 nt, Homo sapiens
  misc_RNA (1)...(19): siRNA sense strand
caguuugccagcuaaauuc

SEQ ID NO: 601390 - RNA, 19 nt, Homo sapiens
  misc_RNA (1)...(19): siRNA sense strand
gaaaguagaacgaaucgaa

SEQ ID NO: 601391 - RNA, 19 nt, Homo sapiens
  misc_RNA (1)...(19): siRNA sense strand
caaagagaguuaugacuau

SEQ ID NO: 601392 - RNA, 19 nt, Homo sapiens
  misc_RNA (1)...(19): siRNA sense strand
gagaugaugugaaaguaga

SEQ ID NO: 601393 - RNA, 19 nt, Homo sapiens
  misc_RNA (1)...(19): siRNA sense strand
ccaaagagaguuaugacua

SEQ ID NO: 601394 - RNA, 19 nt, Homo sapiens
  misc_RNA (1)...(19): siRNA sense strand
gaggagacuucgaugagaa

SEQ ID NO: 601395 - RNA, 19 nt, Homo sapiens
  misc_RNA (1)...(19): siRNA sense strand
ucgaugagaaucugaauua

SEQ ID NO: 601396 - RNA, 19 nt, Homo sapiens
  misc_RNA (1)...(19): siRNA sense strand
ggacacacacacaaauuug

SEQ ID NO: 601397 - RNA, 19 nt, Homo sapiens
  misc_RNA (1)...(19): siRNA sense strand
ccacaccggugcaacaguu

SEQ ID NO: 601398 - RNA, 19 nt, Homo sapiens
  misc_RNA (1)...(19): siRNA sense strand
uauaaugccuuggaaacaa

SEQ ID NO: 601399 - RNA, 19 nt, Homo sapiens
  misc_RNA (1)...(19): siRNA sense strand
cuacaguggucaccuaugu

SEQ ID NO: 601400 - RNA, 19 nt, Homo sapiens
  misc_RNA (1)...(19): siRNA sense strand
ugaauuauccagaacagaa

SEQ ID NO: 601401 - RNA, 19 nt, Homo sapiens
  misc_RNA (1)...(19): siRNA sense strand
ucauuuguguugauggaua

SEQ ID NO: 601402 - RNA, 19 nt, Homo sapiens
  misc_RNA (1)...(19): siRNA sense strand
aauuggagaugaugugaaa

SEQ ID NO: 601403 - RNA, 19 nt, Homo sapiens
  misc_RNA (1)...(19): siRNA sense strand
gaacgaaucgaauacaaaa

SEQ ID NO: 601404 - RNA, 19 nt, Homo sapiens
  misc_RNA (1)...(19): siRNA sense strand
cacauucucugcacaggaa

SEQ ID NO: 601405 - RNA, 19 nt, Homo sapiens
  misc_RNA (1)...(19): siRNA sense strand
gggacacacacacaaauuu

SEQ ID NO: 601406 - RNA, 19 nt, Homo sapiens
  misc_RNA (1)...(19): siRNA sense strand
gaauuauccagaacagaaa

SEQ ID NO: 601407 - RNA, 19 nt, Homo sapiens
  misc_RNA (1)...(19): siRNA sense strand
caggaaaccuuugcaccaa

SEQ ID NO: 601408 - RNA, 19 nt, Homo sapiens
  misc_RNA (1)...(19): siRNA sense strand
gcaccaaagagaguuauga

SEQ ID NO: 601409 - RNA, 19 nt, Homo sapiens
  misc_RNA (1)...(19): siRNA sense strand
uagaacgaaucgaauacaa

SEQ ID NO: 601410 - RNA, 19 nt, Homo sapiens
  misc_RNA (1)...(19): siRNA sense strand
gaugagaaucugaauuauc

SEQ ID NO: 601411 - RNA, 19 nt, Homo sapiens
  misc_RNA (1)...(19): siRNA sense strand
gagaggagacuucgaugag

SEQ ID NO: 601412 - RNA, 19 nt, Homo sapiens
  misc_RNA (1)...(19): siRNA sense strand
gacucuggcuggugauguu

SEQ ID NO: 601413 - RNA, 19 nt, Homo sapiens
  misc_RNA (1)...(19): siRNA sense strand
auaaugccuuggaaacaaa

SEQ ID NO: 601414 - RNA, 19 nt, Homo sapiens
  misc_RNA (1)...(19): siRNA sense strand
gacacacacacaaauuuga

SEQ ID NO: 601415 - RNA, 19 nt, Homo sapiens
  misc_RNA (1)...(19): siRNA sense strand
uggagaugaugugaaagua

SEQ ID NO: 601416 - RNA, 19 nt, Homo sapiens
  misc_RNA (1)...(19): siRNA sense strand
gcagaggcaauuugaugug

SEQ ID NO: 601417 - RNA, 19 nt, Homo sapiens
  misc_RNA (1)...(19): siRNA sense strand
cacacaaauuugaagcauu

SEQ ID NO: 601418 - RNA, 19 nt, Homo sapiens
  misc_RNA (1)...(19): siRNA sense strand
cgaugagaaucugaauuau

SEQ ID NO: 601419 - RNA, 19 nt, Homo sapiens
  misc_RNA (1)...(19): siRNA sense strand
ggagaugaugugaaaguag

SEQ ID NO: 601420 - RNA, 19 nt, Homo sapiens
  misc_RNA (1)...(19): siRNA sense strand
cuauguguaucagcuaauu

SEQ ID NO: 601421 - RNA, 19 nt, Homo sapiens
  misc_RNA (1)...(19): siRNA sense strand
agaggagacuucgaugaga

SEQ ID NO: 601422 - RNA, 19 nt, Homo sapiens
  misc_RNA (1)...(19): siRNA sense strand
aaguagaacgaaucgaaua

SEQ ID NO: 601423 - RNA, 19 nt, Homo sapiens
  misc_RNA (1)...(19): siRNA sense strand
uugaagcauuugagcauga

SEQ ID NO: 601424 - RNA, 19 nt, Homo sapiens
  misc_RNA (1)...(19): siRNA sense strand
aaagagaguuaugacuauc

SEQ ID NO: 601425 - RNA, 19 nt, Homo sapiens
  misc_RNA (1)...(19): siRNA sense strand
ugaagcauuugagcaugaa

SEQ ID NO: 601426 - RNA, 19 nt, Homo sapiens
  misc_RNA (1)...(19): siRNA sense strand
acaguuugccagcuaaauu

SEQ ID NO: 601427 - RNA, 19 nt, Homo sapiens
  misc_RNA (1)...(19): siRNA sense strand
cuggugauguucauauugu

SEQ ID NO: 601428 - RNA, 19 nt, Homo sapiens
  misc_RNA (1)...(19): siRNA sense strand
agaacgaaucgaauacaaa

SEQ ID NO: 601429 - RNA, 19 nt, Homo sapiens
  misc_RNA (1)...(19): siRNA sense strand
cuucuacaguggucaccua

SEQ ID NO: 601430 - RNA, 19 nt, Homo sapiens
  misc_RNA (1)...(19): siRNA sense strand
acacacacacaaauuugaa

SEQ ID NO: 601431 - RNA, 19 nt, Homo sapiens
  misc_RNA (1)...(19): siRNA sense strand
ggcuggugauguucauauu

SEQ ID NO: 601432 - RNA, 19 nt, Homo sapiens
  misc_RNA (1)...(19): siRNA sense strand
ggugauguucauauuguga

SEQ ID NO: 601433 - RNA, 19 nt, Homo sapiens
  misc_RNA (1)...(19): siRNA sense strand
gaugugaaaguagaacgaa

SEQ ID NO: 601434 - RNA, 19 nt, Homo sapiens
  misc_RNA (1)...(19): siRNA sense strand
acacacaaauuugaagcau

SEQ ID NO: 601435 - RNA, 19 nt, Homo sapiens
  misc_RNA (1)...(19): siRNA sense strand
ugagaggagacuucgauga

SEQ ID NO: 601436 - RNA, 19 nt, Homo sapiens
  misc_RNA (1)...(19): siRNA sense strand
cagaaaguugugacuguug

SEQ ID NO: 601437 - RNA, 19 nt, Homo sapiens
  misc_RNA (1)...(19): siRNA sense strand
cauuuguguugauggauau

SEQ ID NO: 601438 - RNA, 19 nt, Homo sapiens
  misc_RNA (1)...(19): siRNA sense strand
cuacauuaauccagguucu

SEQ ID NO: 601439 - RNA, 19 nt, Homo sapiens
  misc_RNA (1)...(19): siRNA sense strand
agacuucgaugagaaucug

SEQ ID NO: 601440 - RNA, 19 nt, Homo sapiens
  misc_RNA (1)...(19): siRNA sense strand
caacaguuugccagcuaaa

SEQ ID NO: 601441 - RNA, 19 nt, Homo sapiens
  misc_RNA (1)...(19): siRNA sense strand
ucagcuaauuggagaugau

SEQ ID NO: 601442 - RNA, 19 nt, Homo sapiens
  misc_RNA (1)...(19): siRNA sense strand
gccuuggaaacaaacauua

SEQ ID NO: 601443 - RNA, 19 nt, Homo sapiens
  misc_RNA (1)...(19): siRNA sense strand
gaaaguugugacuguugga

SEQ ID NO: 601444 - RNA, 19 nt, Homo sapiens
  misc_RNA (1)...(19): siRNA sense strand
cauauaaugccuuggaaac

SEQ ID NO: 601445 - RNA, 19 nt, Homo sapiens
  misc_RNA (1)...(19): siRNA sense strand
aguuaugacuaucucaaga

SEQ ID NO: 601446 - RNA, 19 nt, Homo sapiens
  misc_RNA (1)...(19): siRNA sense strand
gcuaauuggagaugaugug

SEQ ID NO: 601447 - RNA, 19 nt, Homo sapiens
  misc_RNA (1)...(19): siRNA sense strand
augagaaucugaauuaucc

SEQ ID NO: 601448 - RNA, 19 nt, Homo sapiens
  misc_RNA (1)...(19): siRNA sense strand
gcuggugauguucauauug

SEQ ID NO: 601449 - RNA, 19 nt, Homo sapiens
  misc_RNA (1)...(19): siRNA sense strand
guagaacgaaucgaauaca

SEQ ID NO: 601450 - RNA, 19 nt, Homo sapiens
  misc_RNA (1)...(19): siRNA sense strand
aaaguagaacgaaucgaau

SEQ ID NO: 601451 - RNA, 19 nt, Homo sapiens
  misc_RNA (1)...(19): siRNA sense strand
cgggacacacacacaaauu

SEQ ID NO: 601452 - RNA, 19 nt, Homo sapiens
  misc_RNA (1)...(19): siRNA sense strand
caguuugccagcuaaauuc

SEQ ID NO: 601453 - RNA, 19 nt, Homo sapiens
  misc_RNA (1)...(19): siRNA sense strand
gaacuugguaucucuauua

SEQ ID NO: 601454 - RNA, 19 nt, Homo sapiens
  misc_RNA (1)...(19): siRNA sense strand
gaaacacuaucagaagaaa

SEQ ID NO: 601455 - RNA, 19 nt, Homo sapiens
  misc_RNA (1)...(19): siRNA sense strand
gaaaugagaacacuuuaca

SEQ ID NO: 601456 - RNA, 19 nt, Homo sapiens
  misc_RNA (1)...(19): siRNA sense strand
ugagaacacuuuacagaug

SEQ ID NO: 601457 - RNA, 19 nt, Homo sapiens
  misc_RNA (1)...(19): siRNA sense strand
gggaaacacuaucagaaga

SEQ ID NO: 601458 - RNA, 19 nt, Homo sapiens
  misc_RNA (1)...(19): siRNA sense strand
gcagaugucuacuuggaau

SEQ ID NO: 601459 - RNA, 19 nt, Homo sapiens
  misc_RNA (1)...(19): siRNA sense strand
ugaugaaccagacauauua

SEQ ID NO: 601460 - RNA, 19 nt, Homo sapiens
  misc_RNA (1)...(19): siRNA sense strand
gagaacacuuuacagaugu

SEQ ID NO: 601461 - RNA, 19 nt, Homo sapiens
  misc_RNA (1)...(19): siRNA sense strand
uccaaucagugcauauuua

SEQ ID NO: 601462 - RNA, 19 nt, Homo sapiens
  misc_RNA (1)...(19): siRNA sense strand
cagcagaugucuacuugga

SEQ ID NO: 601463 - RNA, 19 nt, Homo sapiens
  misc_RNA (1)...(19): siRNA sense strand
cagcgaaacuuaccugaag

SEQ ID NO: 601464 - RNA, 19 nt, Homo sapiens
  misc_RNA (1)...(19): siRNA sense strand
uauaagcgccucucgguuu

SEQ ID NO: 601465 - RNA, 19 nt, Homo sapiens
  misc_RNA (1)...(19): siRNA sense strand
ggaaacacuaucagaagaa

SEQ ID NO: 601466 - RNA, 19 nt, Homo sapiens
  misc_RNA (1)...(19): siRNA sense strand
uaaagaacuugguaucucu

SEQ ID NO: 601467 - RNA, 19 nt, Homo sapiens
  misc_RNA (1)...(19): siRNA sense strand
ccaaaccugugguaacaau

SEQ ID NO: 601468 - RNA, 19 nt, Homo sapiens
  misc_RNA (1)...(19): siRNA sense strand
gaugucuacuuggaauaua

SEQ ID NO: 601469 - RNA, 19 nt, Homo sapiens
  misc_RNA (1)...(19): siRNA sense strand
cacagcagaugucuacuug

SEQ ID NO: 601470 - RNA, 19 nt, Homo sapiens
  misc_RNA (1)...(19): siRNA sense strand
guacaugaaccuccaagga

SEQ ID NO: 601471 - RNA, 19 nt, Homo sapiens
  misc_RNA (1)...(19): siRNA sense strand
aagaagaaagcaagucaua

SEQ ID NO: 601472 - RNA, 19 nt, Homo sapiens
  misc_RNA (1)...(19): siRNA sense strand
gcacagcagaugucuacuu

SEQ ID NO: 601473 - RNA, 19 nt, Homo sapiens
  misc_RNA (1)...(19): siRNA sense strand
acaugaaccuccaaggaaa

SEQ ID NO: 601474 - RNA, 19 nt, Homo sapiens
  misc_RNA (1)...(19): siRNA sense strand
gcgauuuacucuucuccaa

SEQ ID NO: 601475 - RNA, 19 nt, Homo sapiens
  misc_RNA (1)...(19): siRNA sense strand
gaaguaacaaagacacaau

SEQ ID NO: 601476 - RNA, 19 nt, Homo sapiens
  misc_RNA (1)...(19): siRNA sense strand
gacacaauuagaacaguua

SEQ ID NO: 601477 - RNA, 19 nt, Homo sapiens
  misc_RNA (1)...(19): siRNA sense strand
guaacaaucucugaugaac

SEQ ID NO: 601478 - RNA, 19 nt, Homo sapiens
  misc_RNA (1)...(19): siRNA sense strand
cuaaagaacuugguaucuc

SEQ ID NO: 601479 - RNA, 19 nt, Homo sapiens
  misc_RNA (1)...(19): siRNA sense strand
cuugguaucucuauuaaag

SEQ ID NO: 601480 - RNA, 19 nt, Homo sapiens
  misc_RNA (1)...(19): siRNA sense strand
aaugguggcuugcuucuca

SEQ ID NO: 601481 - RNA, 19 nt, Homo sapiens
  misc_RNA (1)...(19): siRNA sense strand
cagugcauauuuacaagaa

SEQ ID NO: 601482 - RNA, 19 nt, Homo sapiens
  misc_RNA (1)...(19): siRNA sense strand
uaagggcaauacagccaaa

SEQ ID NO: 601483 - RNA, 19 nt, Homo sapiens
  misc_RNA (1)...(19): siRNA sense strand
agacacaauuagaacaguu

SEQ ID NO: 601484 - RNA, 19 nt, Homo sapiens
  misc_RNA (1)...(19): siRNA sense strand
gaacaucuaacuggaagca

SEQ ID NO: 601485 - RNA, 19 nt, Homo sapiens
  misc_RNA (1)...(19): siRNA sense strand
ggaaguaacaaagacacaa

SEQ ID NO: 601486 - RNA, 19 nt, Homo sapiens
  misc_RNA (1)...(19): siRNA sense strand
gguaacaaucucugaugaa

SEQ ID NO: 601487 - RNA, 19 nt, Homo sapiens
  misc_RNA (1)...(19): siRNA sense strand
gaagcacagaguucaguau

SEQ ID NO: 601488 - RNA, 19 nt, Homo sapiens
  misc_RNA (1)...(19): siRNA sense strand
caaagacacaauuagaaca

SEQ ID NO: 601489 - RNA, 19 nt, Homo sapiens
  misc_RNA (1)...(19): siRNA sense strand
aaaccuacacguugauguu

SEQ ID NO: 601490 - RNA, 19 nt, Homo sapiens
  misc_RNA (1)...(19): siRNA sense strand
gaacaguuaccagaacaca

SEQ ID NO: 601491 - RNA, 19 nt, Homo sapiens
  misc_RNA (1)...(19): siRNA sense strand
guaacaaagacacaauuag

SEQ ID NO: 601492 - RNA, 19 nt, Homo sapiens
  misc_RNA (1)...(19): siRNA sense strand
uugcugugcuugcugcuaa

SEQ ID NO: 601493 - RNA, 19 nt, Homo sapiens
  misc_RNA (1)...(19): siRNA sense strand
aaugagaacacuuuacaga

SEQ ID NO: 601494 - RNA, 19 nt, Homo sapiens
  misc_RNA (1)...(19): siRNA sense strand
ugguaacaaucucugauga

SEQ ID NO: 601495 - RNA, 19 nt, Homo sapiens
  misc_RNA (1)...(19): siRNA sense strand
uagaacaguuaccagaaca

SEQ ID NO: 601496 - RNA, 19 nt, Homo sapiens
  misc_RNA (1)...(19): siRNA sense strand
uacaugaaccuccaaggaa

SEQ ID NO: 601497 - RNA, 19 nt, Homo sapiens
  misc_RNA (1)...(19): siRNA sense strand
gaugaaccagacauauuau

SEQ ID NO: 601498 - RNA, 19 nt, Homo sapiens
  misc_RNA (1)...(19): siRNA sense strand
uaccagaacacaucaagga

SEQ ID NO: 601499 - RNA, 19 nt, Homo sapiens
  misc_RNA (1)...(19): siRNA sense strand
aacaaucucugaugaacca

SEQ ID NO: 601500 - RNA, 19 nt, Homo sapiens
  misc_RNA (1)...(19): siRNA sense strand
agaagaaagcaagucauaa

SEQ ID NO: 601501 - RNA, 19 nt, Homo sapiens
  misc_RNA (1)...(19): siRNA sense strand
acacguugauguuccaaag

SEQ ID NO: 601502 - RNA, 19 nt, Homo sapiens
  misc_RNA (1)...(19): siRNA sense strand
acagauguuuagaguuaga

SEQ ID NO: 601503 - RNA, 19 nt, Homo sapiens
  misc_RNA (1)...(19): siRNA sense strand
caaggaaaauagagcgauu

SEQ ID NO: 601504 - RNA, 19 nt, Homo sapiens
  misc_RNA (1)...(19): siRNA sense strand
uaugaaguggguacaguuu

SEQ ID NO: 601505 - RNA, 19 nt, Homo sapiens
  misc_RNA (1)...(19): siRNA sense strand
gagccaaucugggaaacac

SEQ ID NO: 601506 - RNA, 19 nt, Homo sapiens
  misc_RNA (1)...(19): siRNA sense strand
ugugcuugcugcuaaagaa

SEQ ID NO: 601507 - RNA, 19 nt, Homo sapiens
  misc_RNA (1)...(19): siRNA sense strand
cugaugaaccagacauauu

SEQ ID NO: 601508 - RNA, 19 nt, Homo sapiens
  misc_RNA (1)...(19): siRNA sense strand
guauuggacaguuaugaau

SEQ ID NO: 601509 - RNA, 19 nt, Homo sapiens
  misc_RNA (1)...(19): siRNA sense strand
guuuagaguuagaacaucu

SEQ ID NO: 601510 - RNA, 19 nt, Homo sapiens
  misc_RNA (1)...(19): siRNA sense strand
gaagcacagcagaugucua

SEQ ID NO: 601511 - RNA, 19 nt, Homo sapiens
  misc_RNA (1)...(19): siRNA sense strand
gcuaaagaacuugguaucu

SEQ ID NO: 601512 - RNA, 19 nt, Homo sapiens
  misc_RNA (1)...(19): siRNA sense strand
gccaaucugggaaacacua

SEQ ID NO: 601513 - RNA, 19 nt, Homo sapiens
  misc_RNA (1)...(19): siRNA sense strand
agaacuugguaucucuauu

SEQ ID NO: 601514 - RNA, 19 nt, Homo sapiens
  misc_RNA (1)...(19): siRNA sense strand
uuagaacaguuaccagaac

SEQ ID NO: 601515 - RNA, 19 nt, Homo sapiens
  misc_RNA (1)...(19): siRNA sense strand
ucacgauaaggcuguauug

SEQ ID NO: 601516 - RNA, 19 nt, Homo sapiens
  misc_RNA (1)...(19): siRNA sense strand
uugcuucucaguaccaaua

SEQ ID NO: 601517 - RNA, 19 nt, Homo sapiens
  misc_RNA (1)...(19): siRNA sense strand
gccauggaaguaacaaaga

SEQ ID NO: 601518 - RNA, 19 nt, Homo sapiens
  misc_RNA (1)...(19): siRNA sense strand
acaagaagcacagaguuca

SEQ ID NO: 601519 - RNA, 19 nt, Homo sapiens
  misc_RNA (1)...(19): siRNA sense strand
gcuugcugcuaaagaacuu

SEQ ID NO: 601520 - RNA, 19 nt, Homo sapiens
  misc_RNA (1)...(19): siRNA sense strand
aauaugaaguggguacagu

SEQ ID NO: 601521 - RNA, 19 nt, Homo sapiens
  misc_RNA (1)...(19): siRNA sense strand
cuuuacagauguuuagagu

SEQ ID NO: 601522 - RNA, 19 nt, Homo sapiens
  misc_RNA (1)...(19): siRNA sense strand
uuacaagaagcacagaguu

SEQ ID NO: 601523 - RNA, 19 nt, Homo sapiens
  misc_RNA (1)...(19): siRNA sense strand
ccaaucagugcauauuuac

SEQ ID NO: 601524 - RNA, 19 nt, Homo sapiens
  misc_RNA (1)...(19): siRNA sense strand
acaguuaccagaacacauc

SEQ ID NO: 601525 - RNA, 19 nt, Homo sapiens
  misc_RNA (1)...(19): siRNA sense strand
acaaagacacaauuagaac

SEQ ID NO: 601526 - RNA, 19 nt, Homo sapiens
  misc_RNA (1)...(19): siRNA sense strand
ccauggaaguaacaaagac

SEQ ID NO: 601527 - RNA, 19 nt, Homo sapiens
  misc_RNA (1)...(19): siRNA sense strand
uuacucuucuccaaucagu

SEQ ID NO: 601528 - RNA, 19 nt, Homo sapiens
  misc_RNA (1)...(19): siRNA sense strand
aagcacagcagaugucuac

SEQ ID NO: 601529 - RNA, 19 nt, Homo sapiens
  misc_RNA (1)...(19): siRNA sense strand
acgauaaggcuguauugga

SEQ ID NO: 601530 - RNA, 19 nt, Homo sapiens
  misc_RNA (1)...(19): siRNA sense strand
agcacagaguucaguauga

SEQ ID NO: 601531 - RNA, 19 nt, Homo sapiens
  misc_RNA (1)...(19): siRNA sense strand
gcugcuaaagaacuuggua

SEQ ID NO: 601532 - RNA, 19 nt, Homo sapiens
  misc_RNA (1)...(19): siRNA sense strand
aaagaacuugguaucucua

SEQ ID NO: 601533 - RNA, 19 nt, Homo sapiens
  misc_RNA (1)...(19): siRNA sense strand
acguugauguuccaaagga

SEQ ID NO: 601534 - RNA, 19 nt, Homo sapiens
  misc_RNA (1)...(19): siRNA sense strand
uacaagaagcacagaguuc

SEQ ID NO: 601535 - RNA, 19 nt, Homo sapiens
  misc_RNA (1)...(19): siRNA sense strand
guugauguuccaaaggauu

SEQ ID NO: 601536 - RNA, 19 nt, Homo sapiens
  misc_RNA (1)...(19): siRNA sense strand
ugaaguggguacaguuuuc

SEQ ID NO: 601537 - RNA, 19 nt, Homo sapiens
  misc_RNA (1)...(19): siRNA sense strand
cagaugucuacuuggaaua

SEQ ID NO: 601538 - RNA, 19 nt, Homo sapiens
  misc_RNA (1)...(19): siRNA sense strand
uguauuggacaguuaugaa

SEQ ID NO: 601539 - RNA, 19 nt, Homo sapiens
  misc_RNA (1)...(19): siRNA sense strand
aaacacuucuaagggcaau

SEQ ID NO: 601540 - RNA, 19 nt, Homo sapiens
  misc_RNA (1)...(19): siRNA sense strand
agaagcacagaguucagua

SEQ ID NO: 601541 - RNA, 19 nt, Homo sapiens
  misc_RNA (1)...(19): siRNA sense strand
gcaaagaccaacauuauua

SEQ ID NO: 601542 - RNA, 19 nt, Homo sapiens
  misc_RNA (1)...(19): siRNA sense strand
caacagagcccauucauaa

SEQ ID NO: 601543 - RNA, 19 nt, Homo sapiens
  misc_RNA (1)...(19): siRNA sense strand
gcaguuaauugaugcuuua

SEQ ID NO: 601544 - RNA, 19 nt, Homo sapiens
  misc_RNA (1)...(19): siRNA sense strand
gaaacaaaccucacugaaa

SEQ ID NO: 601545 - RNA, 19 nt, Homo sapiens
  misc_RNA (1)...(19): siRNA sense strand
gaacucacuuuauugauca

SEQ ID NO: 601546 - RNA, 19 nt, Homo sapiens
  misc_RNA (1)...(19): siRNA sense strand
caaacacacuuuaaagcua

SEQ ID NO: 601547 - RNA, 19 nt, Homo sapiens
  misc_RNA (1)...(19): siRNA sense strand
ggaguaacaucucagaaga

SEQ ID NO: 601548 - RNA, 19 nt, Homo sapiens
  misc_RNA (1)...(19): siRNA sense strand
caacacaccucaggagaaa

SEQ ID NO: 601549 - RNA, 19 nt, Homo sapiens
  misc_RNA (1)...(19): siRNA sense strand
aaacaaaccucacugaaag

SEQ ID NO: 601550 - RNA, 19 nt, Homo sapiens
  misc_RNA (1)...(19): siRNA sense strand
guacagacugcaauagaua

SEQ ID NO: 601551 - RNA, 19 nt, Homo sapiens
  misc_RNA (1)...(19): siRNA sense strand
gaacaccuuucuagauaca

SEQ ID NO: 601552 - RNA, 19 nt, Homo sapiens
  misc_RNA (1)...(19): siRNA sense strand
gaucugaugugauguaugc

SEQ ID NO: 601553 - RNA, 19 nt, Homo sapiens
  misc_RNA (1)...(19): siRNA sense strand
uaacaggccaguucaguuu

SEQ ID NO: 601554 - RNA, 19 nt, Homo sapiens
  misc_RNA (1)...(19): siRNA sense strand
aaagacagcuaugaugaaa

SEQ ID NO: 601555 - RNA, 19 nt, Homo sapiens
  misc_RNA (1)...(19): siRNA sense strand
acagagugauguuccaaua

SEQ ID NO: 601556 - RNA, 19 nt, Homo sapiens
  misc_RNA (1)...(19): siRNA sense strand
ggaaagagagaauuaucaa

SEQ ID NO: 601557 - RNA, 19 nt, Homo sapiens
  misc_RNA (1)...(19): siRNA sense strand
gaaaguaccuacagaaaag

SEQ ID NO: 601558 - RNA, 19 nt, Homo sapiens
  misc_RNA (1)...(19): siRNA sense strand
gcuaauuccugccucaaga

SEQ ID NO: 601559 - RNA, 19 nt, Homo sapiens
  misc_RNA (1)...(19): siRNA sense strand
ucaacagucuucucaauca

SEQ ID NO: 601560 - RNA, 19 nt, Homo sapiens
  misc_RNA (1)...(19): siRNA sense strand
uaacaucucagaagacuau

SEQ ID NO: 601561 - RNA, 19 nt, Homo sapiens
  misc_RNA (1)...(19): siRNA sense strand
cuacaaggcuggaacucaa

SEQ ID NO: 601562 - RNA, 19 nt, Homo sapiens
  misc_RNA (1)...(19): siRNA sense strand
ggacagagugcucagaguu

SEQ ID NO: 601563 - RNA, 19 nt, Homo sapiens
  misc_RNA (1)...(19): siRNA sense strand
cuaagaaagugcaguuaau

SEQ ID NO: 601564 - RNA, 19 nt, Homo sapiens
  misc_RNA (1)...(19): siRNA sense strand
uggaacauuugcaguauaa

SEQ ID NO: 601565 - RNA, 19 nt, Homo sapiens
  misc_RNA (1)...(19): siRNA sense strand
cagcaguguucaagacuuu

SEQ ID NO: 601566 - RNA, 19 nt, Homo sapiens
  misc_RNA (1)...(19): siRNA sense strand
aaaccucacugaaagcauu

SEQ ID NO: 601567 - RNA, 19 nt, Homo sapiens
  misc_RNA (1)...(19): siRNA sense strand
uauaagguauugcaggaaa

SEQ ID NO: 601568 - RNA, 19 nt, Homo sapiens
  misc_RNA (1)...(19): siRNA sense strand
gcuaagaaagugcaguuaa

SEQ ID NO: 601569 - RNA, 19 nt, Homo sapiens
  misc_RNA (1)...(19): siRNA sense strand
gaccaacauuauuaccuuu

SEQ ID NO: 601570 - RNA, 19 nt, Homo sapiens
  misc_RNA (1)...(19): siRNA sense strand
ucuacuaucuccauccuaa

SEQ ID NO: 601571 - RNA, 19 nt, Homo sapiens
  misc_RNA (1)...(19): siRNA sense strand
ccaauagauuuacuugaug

SEQ ID NO: 601572 - RNA, 19 nt, Homo sapiens
  misc_RNA (1)...(19): siRNA sense strand
agacagcuaugaugaaauc

SEQ ID NO: 601573 - RNA, 19 nt, Homo sapiens
  misc_RNA (1)...(19): siRNA sense strand
acagggaucugaugugaug

SEQ ID NO: 601574 - RNA, 19 nt, Homo sapiens
  misc_RNA (1)...(19): siRNA sense strand
auaaagaugaugccaguua

SEQ ID NO: 601575 - RNA, 19 nt, Homo sapiens
  misc_RNA (1)...(19): siRNA sense strand
gaaaagacagcuaugauga

SEQ ID NO: 601576 - RNA, 19 nt, Homo sapiens
  misc_RNA (1)...(19): siRNA sense strand
gaaaacaguuccucuccuu

SEQ ID NO: 601577 - RNA, 19 nt, Homo sapiens
  misc_RNA (1)...(19): siRNA sense strand
gacaacauuucuacuaucu

SEQ ID NO: 601578 - RNA, 19 nt, Homo sapiens
  misc_RNA (1)...(19): siRNA sense strand
gguacagacugcaauagau

SEQ ID NO: 601579 - RNA, 19 nt, Homo sapiens
  misc_RNA (1)...(19): siRNA sense strand
ggagguauuuuguguauug

SEQ ID NO: 601580 - RNA, 19 nt, Homo sapiens
  misc_RNA (1)...(19): siRNA sense strand
gagaagaccuuuuguuugg

SEQ ID NO: 601581 - RNA, 19 nt, Homo sapiens
  misc_RNA (1)...(19): siRNA sense strand
uuacagggaucugauguga

SEQ ID NO: 601582 - RNA, 19 nt, Homo sapiens
  misc_RNA (1)...(19): siRNA sense strand
aaagugcaguuaauugaug

SEQ ID NO: 601583 - RNA, 19 nt, Homo sapiens
  misc_RNA (1)...(19): siRNA sense strand
uaucaacagucuucucaau

SEQ ID NO: 601584 - RNA, 19 nt, Homo sapiens
  misc_RNA (1)...(19): siRNA sense strand
guacgcaagugggaaauuc

SEQ ID NO: 601585 - RNA, 19 nt, Homo sapiens
  misc_RNA (1)...(19): siRNA sense strand
gaugccaguuacagccuua

SEQ ID NO: 601586 - RNA, 19 nt, Homo sapiens
  misc_RNA (1)...(19): siRNA sense strand
agagugauguuccaauaga

SEQ ID NO: 601587 - RNA, 19 nt, Homo sapiens
  misc_RNA (1)...(19): siRNA sense strand
gagauuagaggcuucacaa

SEQ ID NO: 601588 - RNA, 19 nt, Homo sapiens
  misc_RNA (1)...(19): siRNA sense strand
gaaagugcaguuaauugau

SEQ ID NO: 601589 - RNA, 19 nt, Homo sapiens
  misc_RNA (1)...(19): siRNA sense strand
caacagucuucucaaucaa

SEQ ID NO: 601590 - RNA, 19 nt, Homo sapiens
  misc_RNA (1)...(19): siRNA sense strand
gcgcuuauacagauuacua

SEQ ID NO: 601591 - RNA, 19 nt, Homo sapiens
  misc_RNA (1)...(19): siRNA sense strand
gaugugauguaugcaguug

SEQ ID NO: 601592 - RNA, 19 nt, Homo sapiens
  misc_RNA (1)...(19): siRNA sense strand
aaagcaaccugcacaucuu

SEQ ID NO: 601593 - RNA, 19 nt, Homo sapiens
  misc_RNA (1)...(19): siRNA sense strand
aagauucgcucaauugaag

SEQ ID NO: 601594 - RNA, 19 nt, Homo sapiens
  misc_RNA (1)...(19): siRNA sense strand
guuacagccuuaucuuaga

SEQ ID NO: 601595 - RNA, 19 nt, Homo sapiens
  misc_RNA (1)...(19): siRNA sense strand
aucaggagaugcagaauaa

SEQ ID NO: 601596 - RNA, 19 nt, Homo sapiens
  misc_RNA (1)...(19): siRNA sense strand
cagaucaccuacaggaaga

SEQ ID NO: 601597 - RNA, 19 nt, Homo sapiens
  misc_RNA (1)...(19): siRNA sense strand
guuaugugcuuuggcauga

SEQ ID NO: 601598 - RNA, 19 nt, Homo sapiens
  misc_RNA (1)...(19): siRNA sense strand
agaaagugcaguuaauuga

SEQ ID NO: 601599 - RNA, 19 nt, Homo sapiens
  misc_RNA (1)...(19): siRNA sense strand
ugggagagaugacggaaug

SEQ ID NO: 601600 - RNA, 19 nt, Homo sapiens
  misc_RNA (1)...(19): siRNA sense strand
gcagcaguguucaagacuu

SEQ ID NO: 601601 - RNA, 19 nt, Homo sapiens
  misc_RNA (1)...(19): siRNA sense strand
ugagggaaauacgaacuuu

SEQ ID NO: 601602 - RNA, 19 nt, Homo sapiens
  misc_RNA (1)...(19): siRNA sense strand
agaacucacuuuauugauc

SEQ ID NO: 601603 - RNA, 19 nt, Homo sapiens
  misc_RNA (1)...(19): siRNA sense strand
ucagaagacuaugaagcua

SEQ ID NO: 601604 - RNA, 19 nt, Homo sapiens
  misc_RNA (1)...(19): siRNA sense strand
ggaaaguggaccaggagaa

SEQ ID NO: 601605 - RNA, 19 nt, Homo sapiens
  misc_RNA (1)...(19): siRNA sense strand
agaccaacauuauuaccuu

SEQ ID NO: 601606 - RNA, 19 nt, Homo sapiens
  misc_RNA (1)...(19): siRNA sense strand
agacugcaauagauaaugu

SEQ ID NO: 601607 - RNA, 19 nt, Homo sapiens
  misc_RNA (1)...(19): siRNA sense strand
gauguaugcaguugaaguu

SEQ ID NO: 601608 - RNA, 19 nt, Homo sapiens
  misc_RNA (1)...(19): siRNA sense strand
gacagagugcucagaguuu

SEQ ID NO: 601609 - RNA, 19 nt, Homo sapiens
  misc_RNA (1)...(19): siRNA sense strand
ugacagcuuugacauugug

SEQ ID NO: 601610 - RNA, 19 nt, Homo sapiens
  misc_RNA (1)...(19): siRNA sense strand
cauacgagauaaaugaagu

SEQ ID NO: 601611 - RNA, 19 nt, Homo sapiens
  misc_RNA (1)...(19): siRNA sense strand
aacgacaacuuccuucuug

SEQ ID NO: 601612 - RNA, 19 nt, Homo sapiens
  misc_RNA (1)...(19): siRNA sense strand
guucuacgauuugaucaga

SEQ ID NO: 601613 - RNA, 19 nt, Homo sapiens
  misc_RNA (1)...(19): siRNA sense strand
cugcaaagaccaacauuau

SEQ ID NO: 601614 - RNA, 19 nt, Homo sapiens
  misc_RNA (1)...(19): siRNA sense strand
aauacgaacuuucugauac

SEQ ID NO: 601615 - RNA, 19 nt, Homo sapiens
  misc_RNA (1)...(19): siRNA sense strand
ugacaacauuucuacuauc

SEQ ID NO: 601616 - RNA, 19 nt, Homo sapiens
  misc_RNA (1)...(19): siRNA sense strand
gcauaugugacuccaagaa

SEQ ID NO: 601617 - RNA, 19 nt, Homo sapiens
  misc_RNA (1)...(19): siRNA sense strand
uaaagaugaugccaguuac

SEQ ID NO: 601618 - RNA, 19 nt, Homo sapiens
  misc_RNA (1)...(19): siRNA sense strand
agacacagagcuacacaaa

SEQ ID NO: 601619 - RNA, 19 nt, Homo sapiens
  misc_RNA (1)...(19): siRNA sense strand
aaacaguuccucuccuuug

SEQ ID NO: 601620 - RNA, 19 nt, Homo sapiens
  misc_RNA (1)...(19): siRNA sense strand
uaaagcuaauccacccaaa

SEQ ID NO: 601621 - RNA, 19 nt, Homo sapiens
  misc_RNA (1)...(19): siRNA sense strand
cuagauacacaacuugaaa

SEQ ID NO: 601622 - RNA, 19 nt, Homo sapiens
  misc_RNA (1)...(19): siRNA sense strand
cagcugugauucugaguca

SEQ ID NO: 601623 - RNA, 19 nt, Homo sapiens
  misc_RNA (1)...(19): siRNA sense strand
gaacauuugcaguauaagg

SEQ ID NO: 601624 - RNA, 19 nt, Homo sapiens
  misc_RNA (1)...(19): siRNA sense strand
gaaaguggaccaggagaag

SEQ ID NO: 601625 - RNA, 19 nt, Homo sapiens
  misc_RNA (1)...(19): siRNA sense strand
uauccagggugguugugua

SEQ ID NO: 601626 - RNA, 19 nt, Homo sapiens
  misc_RNA (1)...(19): siRNA sense strand
ugguggaaguguauaguuu

SEQ ID NO: 601627 - RNA, 19 nt, Homo sapiens
  misc_RNA (1)...(19): siRNA sense strand
acagauuacuacauccaaa

SEQ ID NO: 601628 - RNA, 19 nt, Homo sapiens
  misc_RNA (1)...(19): siRNA sense strand
gugcaaguuacaucuauaa

SEQ ID NO: 601629 - RNA, 19 nt, Homo sapiens
  misc_RNA (1)...(19): siRNA sense strand
cugaaagcauuaaagcuau

SEQ ID NO: 601630 - RNA, 19 nt, Homo sapiens
  misc_RNA (1)...(19): siRNA sense strand
gaacucaagauucgcucaa

SEQ ID NO: 601631 - RNA, 19 nt, Homo sapiens
  misc_RNA (1)...(19): siRNA sense strand
cagaagacuaugaagcuaa

SEQ ID NO: 601632 - RNA, 19 nt, Homo sapiens
  misc_RNA (1)...(19): siRNA sense strand
cugaaagcgucacaucuau

SEQ ID NO: 601633 - RNA, 19 nt, Homo sapiens
  misc_RNA (1)...(19): siRNA sense strand
uaaugcaaaugaaccuguu

SEQ ID NO: 601634 - RNA, 19 nt, Homo sapiens
  misc_RNA (1)...(19): siRNA sense strand
agaagacuaugaagcuaau

SEQ ID NO: 601635 - RNA, 19 nt, Homo sapiens
  misc_RNA (1)...(19): siRNA sense strand
gugaugggguuaaagauuu

SEQ ID NO: 601636 - RNA, 19 nt, Homo sapiens
  misc_RNA (1)...(19): siRNA sense strand
acacagagcuacacaaaag

SEQ ID NO: 601637 - RNA, 19 nt, Homo sapiens
  misc_RNA (1)...(19): siRNA sense strand
uaaaccgaauggauuaucu

SEQ ID NO: 601638 - RNA, 19 nt, Homo sapiens
  misc_RNA (1)...(19): siRNA sense strand
auaugugacuccaagaauu

SEQ ID NO: 601639 - RNA, 19 nt, Homo sapiens
  misc_RNA (1)...(19): siRNA sense strand
ccagggugguuguguagga

SEQ ID NO: 601640 - RNA, 19 nt, Homo sapiens
  misc_RNA (1)...(19): siRNA sense strand
ucugaaagcgucacaucua

SEQ ID NO: 601641 - RNA, 19 nt, Homo sapiens
  misc_RNA (1)...(19): siRNA sense strand
gcaaagaccaacauuauua

SEQ ID NO: 601642 - RNA, 19 nt, Homo sapiens
  misc_RNA (1)...(19): siRNA sense strand
caacagagcccauucauaa

SEQ ID NO: 601643 - RNA, 19 nt, Homo sapiens
  misc_RNA (1)...(19): siRNA sense strand
gcaguuaauugaugcuuua

SEQ ID NO: 601644 - RNA, 19 nt, Homo sapiens
  misc_RNA (1)...(19): siRNA sense strand
gaaacaaaccucacugaaa

SEQ ID NO: 601645 - RNA, 19 nt, Homo sapiens
  misc_RNA (1)...(19): siRNA sense strand
gaacucacuuuauugauca

SEQ ID NO: 601646 - RNA, 19 nt, Homo sapiens
  misc_RNA (1)...(19): siRNA sense strand
caaacacacuuuaaagcua

SEQ ID NO: 601647 - RNA, 19 nt, Homo sapiens
  misc_RNA (1)...(19): siRNA sense strand
ggaguaacaucucagaaga

SEQ ID NO: 601648 - RNA, 19 nt, Homo sapiens
  misc_RNA (1)...(19): siRNA sense strand
caacacaccucaggagaaa

SEQ ID NO: 601649 - RNA, 19 nt, Homo sapiens
  misc_RNA (1)...(19): siRNA sense strand
aaacaaaccucacugaaag

SEQ ID NO: 601650 - RNA, 19 nt, Homo sapiens
  misc_RNA (1)...(19): siRNA sense strand
guacagacugcaauagaua

SEQ ID NO: 601651 - RNA, 19 nt, Homo sapiens
  misc_RNA (1)...(19): siRNA sense strand
gaacaccuuucuagauaca

SEQ ID NO: 601652 - RNA, 19 nt, Homo sapiens
  misc_RNA (1)...(19): siRNA sense strand
gaucugaugugauguaugc

SEQ ID NO: 601653 - RNA, 19 nt, Homo sapiens
  misc_RNA (1)...(19): siRNA sense strand
uaacaggccaguucaguuu

SEQ ID NO: 601654 - RNA, 19 nt, Homo sapiens
  misc_RNA (1)...(19): siRNA sense strand
aaagacagcuaugaugaaa

SEQ ID NO: 601655 - RNA, 19 nt, Homo sapiens
  misc_RNA (1)...(19): siRNA sense strand
acagagugauguuccaaua

SEQ ID NO: 601656 - RNA, 19 nt, Homo sapiens
  misc_RNA (1)...(19): siRNA sense strand
ggaaagagagaauuaucaa

SEQ ID NO: 601657 - RNA, 19 nt, Homo sapiens
  misc_RNA (1)...(19): siRNA sense strand
gaaaguaccuacagaaaag

SEQ ID NO: 601658 - RNA, 19 nt, Homo sapiens
  misc_RNA (1)...(19): siRNA sense strand
gcuaauuccugccucaaga

SEQ ID NO: 601659 - RNA, 19 nt, Homo sapiens
  misc_RNA (1)...(19): siRNA sense strand
ucaacagucuucucaauca

SEQ ID NO: 601660 - RNA, 19 nt, Homo sapiens
  misc_RNA (1)...(19): siRNA sense strand
uaacaucucagaagacuau

SEQ ID NO: 601661 - RNA, 19 nt, Homo sapiens
  misc_RNA (1)...(19): siRNA sense strand
cuacaaggcuggaacucaa

SEQ ID NO: 601662 - RNA, 19 nt, Homo sapiens
  misc_RNA (1)...(19): siRNA sense strand
ggacagagugcucagaguu

SEQ ID NO: 601663 - RNA, 19 nt, Homo sapiens
  misc_RNA (1)...(19): siRNA sense strand
cuaagaaagugcaguuaau

SEQ ID NO: 601664 - RNA, 19 nt, Homo sapiens
  misc_RNA (1)...(19): siRNA sense strand
uggaacauuugcaguauaa

SEQ ID NO: 601665 - RNA, 19 nt, Homo sapiens
  misc_RNA (1)...(19): siRNA sense strand
cagcaguguucaagacuuu

SEQ ID NO: 601666 - RNA, 19 nt, Homo sapiens
  misc_RNA (1)...(19): siRNA sense strand
aaaccucacugaaagcauu

SEQ ID NO: 601667 - RNA, 19 nt, Homo sapiens
  misc_RNA (1)...(19): siRNA sense strand
uauaagguauugcaggaaa

SEQ ID NO: 601668 - RNA, 19 nt, Homo sapiens
  misc_RNA (1)...(19): siRNA sense strand
gcuaagaaagugcaguuaa

SEQ ID NO: 601669 - RNA, 19 nt, Homo sapiens
  misc_RNA (1)...(19): siRNA sense strand
gaccaacauuauuaccuuu

SEQ ID NO: 601670 - RNA, 19 nt, Homo sapiens
  misc_RNA (1)...(19): siRNA sense strand
ucuacuaucuccauccuaa

SEQ ID NO: 601671 - RNA, 19 nt, Homo sapiens
  misc_RNA (1)...(19): siRNA sense strand
ccaauagauuuacuugaug

SEQ ID NO: 601672 - RNA, 19 nt, Homo sapiens
  misc_RNA (1)...(19): siRNA sense strand
agacagcuaugaugaaauc

SEQ ID NO: 601673 - RNA, 19 nt, Homo sapiens
  misc_RNA (1)...(19): siRNA sense strand
acagggaucugaugugaug

SEQ ID NO: 601674 - RNA, 19 nt, Homo sapiens
  misc_RNA (1)...(19): siRNA sense strand
auaaagaugaugccaguua

SEQ ID NO: 601675 - RNA, 19 nt, Homo sapiens
  misc_RNA (1)...(19): siRNA sense strand
gaaaagacagcuaugauga

SEQ ID NO: 601676 - RNA, 19 nt, Homo sapiens
  misc_RNA (1)...(19): siRNA sense strand
gaaaacaguuccucuccuu

SEQ ID NO: 601677 - RNA, 19 nt, Homo sapiens
  misc_RNA (1)...(19): siRNA sense strand
gacaacauuucuacuaucu

SEQ ID NO: 601678 - RNA, 19 nt, Homo sapiens
  misc_RNA (1)...(19): siRNA sense strand
gguacagacugcaauagau

SEQ ID NO: 601679 - RNA, 19 nt, Homo sapiens
  misc_RNA (1)...(19): siRNA sense strand
ggagguauuuuguguauug

SEQ ID NO: 601680 - RNA, 19 nt, Homo sapiens
  misc_RNA (1)...(19): siRNA sense strand
gagaagaccuuuuguuugg

SEQ ID NO: 601681 - RNA, 19 nt, Homo sapiens
  misc_RNA (1)...(19): siRNA sense strand
uuacagggaucugauguga

SEQ ID NO: 601682 - RNA, 19 nt, Homo sapiens
  misc_RNA (1)...(19): siRNA sense strand
aaagugcaguuaauugaug

SEQ ID NO: 601683 - RNA, 19 nt, Homo sapiens
  misc_RNA (1)...(19): siRNA sense strand
uaucaacagucuucucaau

SEQ ID NO: 601684 - RNA, 19 nt, Homo sapiens
  misc_RNA (1)...(19): siRNA sense strand
guacgcaagugggaaauuc

SEQ ID NO: 601685 - RNA, 19 nt, Homo sapiens
  misc_RNA (1)...(19): siRNA sense strand
gaugccaguuacagccuua

SEQ ID NO: 601686 - RNA, 19 nt, Homo sapiens
  misc_RNA (1)...(19): siRNA sense strand
agagugauguuccaauaga

SEQ ID NO: 601687 - RNA, 19 nt, Homo sapiens
  misc_RNA (1)...(19): siRNA sense strand
gagauuagaggcuucacaa

SEQ ID NO: 601688 - RNA, 19 nt, Homo sapiens
  misc_RNA (1)...(19): siRNA sense strand
gaaagugcaguuaauugau

SEQ ID NO: 601689 - RNA, 19 nt, Homo sapiens
  misc_RNA (1)...(19): siRNA sense strand
caacagucuucucaaucaa

SEQ ID NO: 601690 - RNA, 19 nt, Homo sapiens
  misc_RNA (1)...(19): siRNA sense strand
gcgcuuauacagauuacua

SEQ ID NO: 601691 - RNA, 19 nt, Homo sapiens
  misc_RNA (1)...(19): siRNA sense strand
gaugugauguaugcaguug

SEQ ID NO: 601692 - RNA, 19 nt, Homo sapiens
  misc_RNA (1)...(19): siRNA sense strand
aaagcaaccugcacaucuu

SEQ ID NO: 601693 - RNA, 19 nt, Homo sapiens
  misc_RNA (1)...(19): siRNA sense strand
aagauucgcucaauugaag

SEQ ID NO: 601694 - RNA, 19 nt, Homo sapiens
  misc_RNA (1)...(19): siRNA sense strand
guuacagccuuaucuuaga

SEQ ID NO: 601695 - RNA, 19 nt, Homo sapiens
  misc_RNA (1)...(19): siRNA sense strand
aucaggagaugcagaauaa

SEQ ID NO: 601696 - RNA, 19 nt, Homo sapiens
  misc_RNA (1)...(19): siRNA sense strand
cagaucaccuacaggaaga

SEQ ID NO: 601697 - RNA, 19 nt, Homo sapiens
  misc_RNA (1)...(19): siRNA sense strand
guuaugugcuuuggcauga

SEQ ID NO: 601698 - RNA, 19 nt, Homo sapiens
  misc_RNA (1)...(19): siRNA sense strand
agaaagugcaguuaauuga

SEQ ID NO: 601699 - RNA, 19 nt, Homo sapiens
  misc_RNA (1)...(19): siRNA sense strand
ugggagagaugacggaaug

SEQ ID NO: 601700 - RNA, 19 nt, Homo sapiens
  misc_RNA (1)...(19): siRNA sense strand
gcagcaguguucaagacuu

SEQ ID NO: 601701 - RNA, 19 nt, Homo sapiens
  misc_RNA (1)...(19): siRNA sense strand
ugagggaaauacgaacuuu

SEQ ID NO: 601702 - RNA, 19 nt, Homo sapiens
  misc_RNA (1)...(19): siRNA sense strand
agaacucacuuuauugauc

SEQ ID NO: 601703 - RNA, 19 nt, Homo sapiens
  misc_RNA (1)...(19): siRNA sense strand
ucagaagacuaugaagcua

SEQ ID NO: 601704 - RNA, 19 nt, Homo sapiens
  misc_RNA (1)...(19): siRNA sense strand
ggaaaguggaccaggagaa

SEQ ID NO: 601705 - RNA, 19 nt, Homo sapiens
  misc_RNA (1)...(19): siRNA sense strand
agaccaacauuauuaccuu

SEQ ID NO: 601706 - RNA, 19 nt, Homo sapiens
  misc_RNA (1)...(19): siRNA sense strand
agacugcaauagauaaugu

SEQ ID NO: 601707 - RNA, 19 nt, Homo sapiens
  misc_RNA (1)...(19): siRNA sense strand
gauguaugcaguugaaguu

SEQ ID NO: 601708 - RNA, 19 nt, Homo sapiens
  misc_RNA (1)...(19): siRNA sense strand
gacagagugcucagaguuu

SEQ ID NO: 601709 - RNA, 19 nt, Homo sapiens
  misc_RNA (1)...(19): siRNA sense strand
ugacagcuuugacauugug

SEQ ID NO: 601710 - RNA, 19 nt, Homo sapiens
  misc_RNA (1)...(19): siRNA sense strand
cauacgagauaaaugaagu

SEQ ID NO: 601711 - RNA, 19 nt, Homo sapiens
  misc_RNA (1)...(19): siRNA sense strand
aacgacaacuuccuucuug

SEQ ID NO: 601712 - RNA, 19 nt, Homo sapiens
  misc_RNA (1)...(19): siRNA sense strand
guucuacgauuugaucaga

SEQ ID NO: 601713 - RNA, 19 nt, Homo sapiens
  misc_RNA (1)...(19): siRNA sense strand
cugcaaagaccaacauuau

SEQ ID NO: 601714 - RNA, 19 nt, Homo sapiens
  misc_RNA (1)...(19): siRNA sense strand
aauacgaacuuucugauac

SEQ ID NO: 601715 - RNA, 19 nt, Homo sapiens
  misc_RNA (1)...(19): siRNA sense strand
ugacaacauuucuacuauc

SEQ ID NO: 601716 - RNA, 19 nt, Homo sapiens
  misc_RNA (1)...(19): siRNA sense strand
gcauaugugacuccaagaa

SEQ ID NO: 601717 - RNA, 19 nt, Homo sapiens
  misc_RNA (1)...(19): siRNA sense strand
uaaagaugaugccaguuac

SEQ ID NO: 601718 - RNA, 19 nt, Homo sapiens
  misc_RNA (1)...(19): siRNA sense strand
agacacagagcuacacaaa

SEQ ID NO: 601719 - RNA, 19 nt, Homo sapiens
  misc_RNA (1)...(19): siRNA sense strand
aaacaguuccucuccuuug

SEQ ID NO: 601720 - RNA, 19 nt, Homo sapiens
  misc_RNA (1)...(19): siRNA sense strand
uaaagcuaauccacccaaa

SEQ ID NO: 601721 - RNA, 19 nt, Homo sapiens
  misc_RNA (1)...(19): siRNA sense strand
cuagauacacaacuugaaa

SEQ ID NO: 601722 - RNA, 19 nt, Homo sapiens
  misc_RNA (1)...(19): siRNA sense strand
cagcugugauucugaguca

SEQ ID NO: 601723 - RNA, 19 nt, Homo sapiens
  misc_RNA (1)...(19): siRNA sense strand
gaacauuugcaguauaagg

SEQ ID NO: 601724 - RNA, 19 nt, Homo sapiens
  misc_RNA (1)...(19): siRNA sense strand
gaaaguggaccaggagaag

SEQ ID NO: 601725 - RNA, 19 nt, Homo sapiens
  misc_RNA (1)...(19): siRNA sense strand
uauccagggugguugugua

SEQ ID NO: 601726 - RNA, 19 nt, Homo sapiens
  misc_RNA (1)...(19): siRNA sense strand
ugguggaaguguauaguuu

SEQ ID NO: 601727 - RNA, 19 nt, Homo sapiens
  misc_RNA (1)...(19): siRNA sense strand
acagauuacuacauccaaa

SEQ ID NO: 601728 - RNA, 19 nt, Homo sapiens
  misc_RNA (1)...(19): siRNA sense strand
gugcaaguuacaucuauaa

SEQ ID NO: 601729 - RNA, 19 nt, Homo sapiens
  misc_RNA (1)...(19): siRNA sense strand
cugaaagcauuaaagcuau

SEQ ID NO: 601730 - RNA, 19 nt, Homo sapiens
  misc_RNA (1)...(19): siRNA sense strand
gaacucaagauucgcucaa

SEQ ID NO: 601731 - RNA, 19 nt, Homo sapiens
  misc_RNA (1)...(19): siRNA sense strand
cagaagacuaugaagcuaa

SEQ ID NO: 601732 - RNA, 19 nt, Homo sapiens
  misc_RNA (1)...(19): siRNA sense strand
cugaaagcgucacaucuau

SEQ ID NO: 601733 - RNA, 19 nt, Homo sapiens
  misc_RNA (1)...(19): siRNA sense strand
uaaugcaaaugaaccuguu

SEQ ID NO: 601734 - RNA, 19 nt, Homo sapiens
  misc_RNA (1)...(19): siRNA sense strand
agaagacuaugaagcuaau

SEQ ID NO: 601735 - RNA, 19 nt, Homo sapiens
  misc_RNA (1)...(19): siRNA sense strand
gugaugggguuaaagauuu

SEQ ID NO: 601736 - RNA, 19 nt, Homo sapiens
  misc_RNA (1)...(19): siRNA sense strand
acacagagcuacacaaaag

SEQ ID NO: 601737 - RNA, 19 nt, Homo sapiens
  misc_RNA (1)...(19): siRNA sense strand
uaaaccgaauggauuaucu

SEQ ID NO: 601738 - RNA, 19 nt, Homo sapiens
  misc_RNA (1)...(19): siRNA sense strand
auaugugacuccaagaauu

SEQ ID NO: 601739 - RNA, 19 nt, Homo sapiens
  misc_RNA (1)...(19): siRNA sense strand
ccagggugguuguguagga

SEQ ID NO: 601740 - RNA, 19 nt, Homo sapiens
  misc_RNA (1)...(19): siRNA sense strand
ucugaaagcgucacaucua

SEQ ID NO: 601741 - RNA, 19 nt, Homo sapiens
  misc_RNA (1)...(19): siRNA sense strand
uaaccaagcuggccuacua

SEQ ID NO: 601742 - RNA, 19 nt, Homo sapiens
  misc_RNA (1)...(19): siRNA sense strand
gugaugacgugccugauua

SEQ ID NO: 601743 - RNA, 19 nt, Homo sapiens
  misc_RNA (1)...(19): siRNA sense strand
gcgaguggcuucagagauu

SEQ ID NO: 601744 - RNA, 19 nt, Homo sapiens
  misc_RNA (1)...(19): siRNA sense strand
ucaaggaccucaucgaaga

SEQ ID NO: 601745 - RNA, 19 nt, Homo sapiens
  misc_RNA (1)...(19): siRNA sense strand
aagaggaaguuacaagaaa

SEQ ID NO: 601746 - RNA, 19 nt, Homo sapiens
  misc_RNA (1)...(19): siRNA sense strand
ggacaauccuaaccaguac

SEQ ID NO: 601747 - RNA, 19 nt, Homo sapiens
  misc_RNA (1)...(19): siRNA sense strand
acacagaacgugaacauga

SEQ ID NO: 601748 - RNA, 19 nt, Homo sapiens
  misc_RNA (1)...(19): siRNA sense strand
gcagauaacaguggaauag

SEQ ID NO: 601749 - RNA, 19 nt, Homo sapiens
  misc_RNA (1)...(19): siRNA sense strand
gcaacuucgugcucaagaa

SEQ ID NO: 601750 - RNA, 19 nt, Homo sapiens
  misc_RNA (1)...(19): siRNA sense strand
gcgcuucgccaucgacaua

SEQ ID NO: 601751 - RNA, 19 nt, Homo sapiens
  misc_RNA (1)...(19): siRNA sense strand
ccucauaaaugugccuuaa

SEQ ID NO: 601752 - RNA, 19 nt, Homo sapiens
  misc_RNA (1)...(19): siRNA sense strand
ccuaugagauuucaguuca

SEQ ID NO: 601753 - RNA, 19 nt, Homo sapiens
  misc_RNA (1)...(19): siRNA sense strand
gaccucagccgccuggaua

SEQ ID NO: 601754 - RNA, 19 nt, Homo sapiens
  misc_RNA (1)...(19): siRNA sense strand
caucggagcguuccugaaa

SEQ ID NO: 601755 - RNA, 19 nt, Homo sapiens
  misc_RNA (1)...(19): siRNA sense strand
gcaaagaggaaguuacaag

SEQ ID NO: 601756 - RNA, 19 nt, Homo sapiens
  misc_RNA (1)...(19): siRNA sense strand
caaagaggaaguuacaaga

SEQ ID NO: 601757 - RNA, 19 nt, Homo sapiens
  misc_RNA (1)...(19): siRNA sense strand
gacccuggcucguggauuc

SEQ ID NO: 601758 - RNA, 19 nt, Homo sapiens
  misc_RNA (1)...(19): siRNA sense strand
ggacacagaacgugaacau

SEQ ID NO: 601759 - RNA, 19 nt, Homo sapiens
  misc_RNA (1)...(19): siRNA sense strand
cgaguggcuucagagauua

SEQ ID NO: 601760 - RNA, 19 nt, Homo sapiens
  misc_RNA (1)...(19): siRNA sense strand
gaccaagaguucuccaaag

SEQ ID NO: 601761 - RNA, 19 nt, Homo sapiens
  misc_RNA (1)...(19): siRNA sense strand
gcucgacugcacuucauua

SEQ ID NO: 601762 - RNA, 19 nt, Homo sapiens
  misc_RNA (1)...(19): siRNA sense strand
gacauaggcgggucguuaa

SEQ ID NO: 601763 - RNA, 19 nt, Homo sapiens
  misc_RNA (1)...(19): siRNA sense strand
gaucccuacuccaaaguga

SEQ ID NO: 601764 - RNA, 19 nt, Homo sapiens
  misc_RNA (1)...(19): siRNA sense strand
caaagaccaucucgucaac

SEQ ID NO: 601765 - RNA, 19 nt, Homo sapiens
  misc_RNA (1)...(19): siRNA sense strand
caagcuggccuacuauuca

SEQ ID NO: 601766 - RNA, 19 nt, Homo sapiens
  misc_RNA (1)...(19): siRNA sense strand
guacuuuggaggcuucuuu

SEQ ID NO: 601767 - RNA, 19 nt, Homo sapiens
  misc_RNA (1)...(19): siRNA sense strand
ccuaucuucuugucaauau

SEQ ID NO: 601768 - RNA, 19 nt, Homo sapiens
  misc_RNA (1)...(19): siRNA sense strand
cgaagagccugcugcacau

SEQ ID NO: 601769 - RNA, 19 nt, Homo sapiens
  misc_RNA (1)...(19): siRNA sense strand
accaagaguucuccaaaga

SEQ ID NO: 601770 - RNA, 19 nt, Homo sapiens
  misc_RNA (1)...(19): siRNA sense strand
guucaaggaccucaucgaa

SEQ ID NO: 601771 - RNA, 19 nt, Homo sapiens
  misc_RNA (1)...(19): siRNA sense strand
gcgcggaucugguggucau

SEQ ID NO: 601772 - RNA, 19 nt, Homo sapiens
  misc_RNA (1)...(19): siRNA sense strand
gcaucaacuucuucuccaa

SEQ ID NO: 601773 - RNA, 19 nt, Homo sapiens
  misc_RNA (1)...(19): siRNA sense strand
aagaagacauggcgaagag

SEQ ID NO: 601774 - RNA, 19 nt, Homo sapiens
  misc_RNA (1)...(19): siRNA sense strand
ucaaagaccaucucgucaa

SEQ ID NO: 601775 - RNA, 19 nt, Homo sapiens
  misc_RNA (1)...(19): siRNA sense strand
acucugcgcuccaggaaga

SEQ ID NO: 601776 - RNA, 19 nt, Homo sapiens
  misc_RNA (1)...(19): siRNA sense strand
gauaacaguggaauagaca

SEQ ID NO: 601777 - RNA, 19 nt, Homo sapiens
  misc_RNA (1)...(19): siRNA sense strand
aaagaggaaguuacaagaa

SEQ ID NO: 601778 - RNA, 19 nt, Homo sapiens
  misc_RNA (1)...(19): siRNA sense strand
cgacaaggaggacgugaug

SEQ ID NO: 601779 - RNA, 19 nt, Homo sapiens
  misc_RNA (1)...(19): siRNA sense strand
aagagaagcugcggcugaa

SEQ ID NO: 601780 - RNA, 19 nt, Homo sapiens
  misc_RNA (1)...(19): siRNA sense strand
gauuucaguucaagaagag

SEQ ID NO: 601781 - RNA, 19 nt, Homo sapiens
  misc_RNA (1)...(19): siRNA sense strand
ucagcgucaucuucaagua

SEQ ID NO: 601782 - RNA, 19 nt, Homo sapiens
  misc_RNA (1)...(19): siRNA sense strand
cgaccaagaguucuccaaa

SEQ ID NO: 601783 - RNA, 19 nt, Homo sapiens
  misc_RNA (1)...(19): siRNA sense strand
gggacagucuggacaagag

SEQ ID NO: 601784 - RNA, 19 nt, Homo sapiens
  misc_RNA (1)...(19): siRNA sense strand
gagcugagcaggacaaucc

SEQ ID NO: 601785 - RNA, 19 nt, Homo sapiens
  misc_RNA (1)...(19): siRNA sense strand
ggaagugcaggcgcuguuu

SEQ ID NO: 601786 - RNA, 19 nt, Homo sapiens
  misc_RNA (1)...(19): siRNA sense strand
gaggaaguuacaagaaaga

SEQ ID NO: 601787 - RNA, 19 nt, Homo sapiens
  misc_RNA (1)...(19): siRNA sense strand
ugagauuucaguucaagaa

SEQ ID NO: 601788 - RNA, 19 nt, Homo sapiens
  misc_RNA (1)...(19): siRNA sense strand
gccgugcuguccacacaaa

SEQ ID NO: 601789 - RNA, 19 nt, Homo sapiens
  misc_RNA (1)...(19): siRNA sense strand
gagaaguuccggcagaagu

SEQ ID NO: 601790 - RNA, 19 nt, Homo sapiens
  misc_RNA (1)...(19): siRNA sense strand
aauacuggcucaccugcuu

SEQ ID NO: 601791 - RNA, 19 nt, Homo sapiens
  misc_RNA (1)...(19): siRNA sense strand
ccuauagcaucaacuucuu

SEQ ID NO: 601792 - RNA, 19 nt, Homo sapiens
  misc_RNA (1)...(19): siRNA sense strand
ugagaauaccuacaucgaa

SEQ ID NO: 601793 - RNA, 19 nt, Homo sapiens
  misc_RNA (1)...(19): siRNA sense strand
agauuucaguucaagaaga

SEQ ID NO: 601794 - RNA, 19 nt, Homo sapiens
  misc_RNA (1)...(19): siRNA sense strand
cagcagcccuucgccuaug

SEQ ID NO: 601795 - RNA, 19 nt, Homo sapiens
  misc_RNA (1)...(19): siRNA sense strand
cggcagaaguacuggaaca

SEQ ID NO: 601796 - RNA, 19 nt, Homo sapiens
  misc_RNA (1)...(19): siRNA sense strand
gagaagcugcggcugaaag

SEQ ID NO: 601797 - RNA, 19 nt, Homo sapiens
  misc_RNA (1)...(19): siRNA sense strand
gcacucugcgcuccaggaa

SEQ ID NO: 601798 - RNA, 19 nt, Homo sapiens
  misc_RNA (1)...(19): siRNA sense strand
gaagaagcaaagaggaagu

SEQ ID NO: 601799 - RNA, 19 nt, Homo sapiens
  misc_RNA (1)...(19): siRNA sense strand
gccuggacuucaucaaaga

SEQ ID NO: 601800 - RNA, 19 nt, Homo sapiens
  misc_RNA (1)...(19): siRNA sense strand
ugaagcagcgggagaaugg

SEQ ID NO: 601801 - RNA, 19 nt, Homo sapiens
  misc_RNA (1)...(19): siRNA sense strand
gcagcagcccuucgccuau

SEQ ID NO: 601802 - RNA, 19 nt, Homo sapiens
  misc_RNA (1)...(19): siRNA sense strand
gugcaggcgcuguuucuga

SEQ ID NO: 601803 - RNA, 19 nt, Homo sapiens
  misc_RNA (1)...(19): siRNA sense strand
ggcugaaagucgacaagga

SEQ ID NO: 601804 - RNA, 19 nt, Homo sapiens
  misc_RNA (1)...(19): siRNA sense strand
ucgccaaggugcggucuuu

SEQ ID NO: 601805 - RNA, 19 nt, Homo sapiens
  misc_RNA (1)...(19): siRNA sense strand
agaaguuccggcagaagua

SEQ ID NO: 601806 - RNA, 19 nt, Homo sapiens
  misc_RNA (1)...(19): siRNA sense strand
gaagugcaggcgcuguuuc

SEQ ID NO: 601807 - RNA, 19 nt, Homo sapiens
  misc_RNA (1)...(19): siRNA sense strand
gcucuucagcgucaucuuc

SEQ ID NO: 601808 - RNA, 19 nt, Homo sapiens
  misc_RNA (1)...(19): siRNA sense strand
caagcuggccgucaucaag

SEQ ID NO: 601809 - RNA, 19 nt, Homo sapiens
  misc_RNA (1)...(19): siRNA sense strand
caacgguacagcacaaagu

SEQ ID NO: 601810 - RNA, 19 nt, Homo sapiens
  misc_RNA (1)...(19): siRNA sense strand
agaggaaguuacaagaaag

SEQ ID NO: 601811 - RNA, 19 nt, Homo sapiens
  misc_RNA (1)...(19): siRNA sense strand
aagcuggccuacuauucaa

SEQ ID NO: 601812 - RNA, 19 nt, Homo sapiens
  misc_RNA (1)...(19): siRNA sense strand
ccacagcgagucccucauc

SEQ ID NO: 601813 - RNA, 19 nt, Homo sapiens
  misc_RNA (1)...(19): siRNA sense strand
aagcaaagaggaaguuaca

SEQ ID NO: 601814 - RNA, 19 nt, Homo sapiens
  misc_RNA (1)...(19): siRNA sense strand
gaaguacuggaacaagcuu

SEQ ID NO: 601815 - RNA, 19 nt, Homo sapiens
  misc_RNA (1)...(19): siRNA sense strand
gaagcaaagaggaaguuac

SEQ ID NO: 601816 - RNA, 19 nt, Homo sapiens
  misc_RNA (1)...(19): siRNA sense strand
cacagaacgugaacaugag

SEQ ID NO: 601817 - RNA, 19 nt, Homo sapiens
  misc_RNA (1)...(19): siRNA sense strand
gcagaaguacuggaacaag

SEQ ID NO: 601818 - RNA, 19 nt, Homo sapiens
  misc_RNA (1)...(19): siRNA sense strand
cuacuuuggguuugaagaa

SEQ ID NO: 601819 - RNA, 19 nt, Homo sapiens
  misc_RNA (1)...(19): siRNA sense strand
ggauuccgacccugaguuc

SEQ ID NO: 601820 - RNA, 19 nt, Homo sapiens
  misc_RNA (1)...(19): siRNA sense strand
ucaccuauagcaucaacuu

SEQ ID NO: 601821 - RNA, 19 nt, Homo sapiens
  misc_RNA (1)...(19): siRNA sense strand
ccaagcuggccuacuauuc

SEQ ID NO: 601822 - RNA, 19 nt, Homo sapiens
  misc_RNA (1)...(19): siRNA sense strand
cccaugaggccuucgugua

SEQ ID NO: 601823 - RNA, 19 nt, Homo sapiens
  misc_RNA (1)...(19): siRNA sense strand
cgagagggcggagaaguuc

SEQ ID NO: 601824 - RNA, 19 nt, Homo sapiens
  misc_RNA (1)...(19): siRNA sense strand
caugaucagcaacgacauu

SEQ ID NO: 601825 - RNA, 19 nt, Homo sapiens
  misc_RNA (1)...(19): siRNA sense strand
uaugagauuucaguucaag

SEQ ID NO: 601826 - RNA, 19 nt, Homo sapiens
  misc_RNA (1)...(19): siRNA sense strand
cgugucugcuguccuugaa

SEQ ID NO: 601827 - RNA, 19 nt, Homo sapiens
  misc_RNA (1)...(19): siRNA sense strand
ccgagagggcggagaaguu

SEQ ID NO: 601828 - RNA, 19 nt, Homo sapiens
  misc_RNA (1)...(19): siRNA sense strand
gggaagugcaggcgcuguu

SEQ ID NO: 601829 - RNA, 19 nt, Homo sapiens
  misc_RNA (1)...(19): siRNA sense strand
cgugaugacgugccugauu

SEQ ID NO: 601830 - RNA, 19 nt, Homo sapiens
  misc_RNA (1)...(19): siRNA sense strand
aaagaagacauggcgaaga

SEQ ID NO: 601831 - RNA, 19 nt, Homo sapiens
  misc_RNA (1)...(19): siRNA sense strand
ugucugcuguccuugaauc

SEQ ID NO: 601832 - RNA, 19 nt, Homo sapiens
  misc_RNA (1)...(19): siRNA sense strand
ccagggagcacugucugaa

SEQ ID NO: 601833 - RNA, 19 nt, Homo sapiens
  misc_RNA (1)...(19): siRNA sense strand
gggccuacaaguucaagga

SEQ ID NO: 601834 - RNA, 19 nt, Homo sapiens
  misc_RNA (1)...(19): siRNA sense strand
gugcuguccacacaaacua

SEQ ID NO: 601835 - RNA, 19 nt, Homo sapiens
  misc_RNA (1)...(19): siRNA sense strand
uaacaguggaauagacauc

SEQ ID NO: 601836 - RNA, 19 nt, Homo sapiens
  misc_RNA (1)...(19): siRNA sense strand
ccggaucccuacuccaaag

SEQ ID NO: 601837 - RNA, 19 nt, Homo sapiens
  misc_RNA (1)...(19): siRNA sense strand
aaaggacacagaacgugaa

SEQ ID NO: 601838 - RNA, 19 nt, Homo sapiens
  misc_RNA (1)...(19): siRNA sense strand
gaagagccugcugcacaug

SEQ ID NO: 601839 - RNA, 19 nt, Homo sapiens
  misc_RNA (1)...(19): siRNA sense strand
ccaugaggccuucguguac

SEQ ID NO: 601840 - RNA, 19 nt, Homo sapiens
  misc_RNA (1)...(19): siRNA sense strand
cauccuggcgugcaacuca

SEQ ID NO: 601841 - RNA, 19 nt, Homo sapiens
  misc_RNA (1)...(19): siRNA sense strand
ccagauguguccaggcuua

SEQ ID NO: 601842 - RNA, 19 nt, Homo sapiens
  misc_RNA (1)...(19): siRNA sense strand
caaacuugauuucccagua

SEQ ID NO: 601843 - RNA, 19 nt, Homo sapiens
  misc_RNA (1)...(19): siRNA sense strand
ucaaugcccucgccaacua

SEQ ID NO: 601844 - RNA, 19 nt, Homo sapiens
  misc_RNA (1)...(19): siRNA sense strand
ccugcaaccuuucuuuaua

SEQ ID NO: 601845 - RNA, 19 nt, Homo sapiens
  misc_RNA (1)...(19): siRNA sense strand
caucaucuguacagucuuu

SEQ ID NO: 601846 - RNA, 19 nt, Homo sapiens
  misc_RNA (1)...(19): siRNA sense strand
gaacgauguuggaaagaca

SEQ ID NO: 601847 - RNA, 19 nt, Homo sapiens
  misc_RNA (1)...(19): siRNA sense strand
gcucugcacuggcaaacuu

SEQ ID NO: 601848 - RNA, 19 nt, Homo sapiens
  misc_RNA (1)...(19): siRNA sense strand
gaacuggccaucauugugu

SEQ ID NO: 601849 - RNA, 19 nt, Homo sapiens
  misc_RNA (1)...(19): siRNA sense strand
uuagugagauucuauguca

SEQ ID NO: 601850 - RNA, 19 nt, Homo sapiens
  misc_RNA (1)...(19): siRNA sense strand
caaugucacuggugucuca

SEQ ID NO: 601851 - RNA, 19 nt, Homo sapiens
  misc_RNA (1)...(19): siRNA sense strand
gcagaugcgccaagaagaa

SEQ ID NO: 601852 - RNA, 19 nt, Homo sapiens
  misc_RNA (1)...(19): siRNA sense strand
gcgcuaaauuguccaggaa

SEQ ID NO: 601853 - RNA, 19 nt, Homo sapiens
  misc_RNA (1)...(19): siRNA sense strand
gcucaggugguuccaauuu

SEQ ID NO: 601854 - RNA, 19 nt, Homo sapiens
  misc_RNA (1)...(19): siRNA sense strand
ggucagggaucaucaucug

SEQ ID NO: 601855 - RNA, 19 nt, Homo sapiens
  misc_RNA (1)...(19): siRNA sense strand
caaucgcgguuaucaaugu

SEQ ID NO: 601856 - RNA, 19 nt, Homo sapiens
  misc_RNA (1)...(19): siRNA sense strand
ggauucggcuuaucuucug

SEQ ID NO: 601857 - RNA, 19 nt, Homo sapiens
  misc_RNA (1)...(19): siRNA sense strand
ucagaagguuggagccauu

SEQ ID NO: 601858 - RNA, 19 nt, Homo sapiens
  misc_RNA (1)...(19): siRNA sense strand
ucaggugguuccaauuuau

SEQ ID NO: 601859 - RNA, 19 nt, Homo sapiens
  misc_RNA (1)...(19): siRNA sense strand
cggaaguccucuaccguuu

SEQ ID NO: 601860 - RNA, 19 nt, Homo sapiens
  misc_RNA (1)...(19): siRNA sense strand
gcacuggcaaacuugauuu

SEQ ID NO: 601861 - RNA, 19 nt, Homo sapiens
  misc_RNA (1)...(19): siRNA sense strand
gcugggcgcucuuucucaa

SEQ ID NO: 601862 - RNA, 19 nt, Homo sapiens
  misc_RNA (1)...(19): siRNA sense strand
uaacgaacgauguuggaaa

SEQ ID NO: 601863 - RNA, 19 nt, Homo sapiens
  misc_RNA (1)...(19): siRNA sense strand
cugcaaccuuucuuuauau

SEQ ID NO: 601864 - RNA, 19 nt, Homo sapiens
  misc_RNA (1)...(19): siRNA sense strand
gguacacgccaauuugaaa

SEQ ID NO: 601865 - RNA, 19 nt, Homo sapiens
  misc_RNA (1)...(19): siRNA sense strand
cagccaaccuugucaaugc

SEQ ID NO: 601866 - RNA, 19 nt, Homo sapiens
  misc_RNA (1)...(19): siRNA sense strand
gcucaaccagggaauugua

SEQ ID NO: 601867 - RNA, 19 nt, Homo sapiens
  misc_RNA (1)...(19): siRNA sense strand
gaguggaaaucagaagguu

SEQ ID NO: 601868 - RNA, 19 nt, Homo sapiens
  misc_RNA (1)...(19): siRNA sense strand
acacgccaauuugaaagua

SEQ ID NO: 601869 - RNA, 19 nt, Homo sapiens
  misc_RNA (1)...(19): siRNA sense strand
gaucuucauuccagcucuu

SEQ ID NO: 601870 - RNA, 19 nt, Homo sapiens
  misc_RNA (1)...(19): siRNA sense strand
ucagggaucaucaucugua

SEQ ID NO: 601871 - RNA, 19 nt, Homo sapiens
  misc_RNA (1)...(19): siRNA sense strand
cucaggugguuccaauuua

SEQ ID NO: 601872 - RNA, 19 nt, Homo sapiens
  misc_RNA (1)...(19): siRNA sense strand
ggcaaucgcgguuaucaau

SEQ ID NO: 601873 - RNA, 19 nt, Homo sapiens
  misc_RNA (1)...(19): siRNA sense strand
ggaucgcgcugauguuugc

SEQ ID NO: 601874 - RNA, 19 nt, Homo sapiens
  misc_RNA (1)...(19): siRNA sense strand
agaccuaugucacgaucuu

SEQ ID NO: 601875 - RNA, 19 nt, Homo sapiens
  misc_RNA (1)...(19): siRNA sense strand
ucagguacacgccaauuug

SEQ ID NO: 601876 - RNA, 19 nt, Homo sapiens
  misc_RNA (1)...(19): siRNA sense strand
aaacuugauuucccaguac

SEQ ID NO: 601877 - RNA, 19 nt, Homo sapiens
  misc_RNA (1)...(19): siRNA sense strand
guccugcuguuaagcugua

SEQ ID NO: 601878 - RNA, 19 nt, Homo sapiens
  misc_RNA (1)...(19): siRNA sense strand
ucagucagaucagcagaug

SEQ ID NO: 601879 - RNA, 19 nt, Homo sapiens
  misc_RNA (1)...(19): siRNA sense strand
gaccgagacaucauuaauc

SEQ ID NO: 601880 - RNA, 19 nt, Homo sapiens
  misc_RNA (1)...(19): siRNA sense strand
acaggacggcgcuaaauug

SEQ ID NO: 601881 - RNA, 19 nt, Homo sapiens
  misc_RNA (1)...(19): siRNA sense strand
gcuaaauuguccaggaaac

SEQ ID NO: 601882 - RNA, 19 nt, Homo sapiens
  misc_RNA (1)...(19): siRNA sense strand
gcaaucgcgguuaucaaug

SEQ ID NO: 601883 - RNA, 19 nt, Homo sapiens
  misc_RNA (1)...(19): siRNA sense strand
cgaccgagacaucauuaau

SEQ ID NO: 601884 - RNA, 19 nt, Homo sapiens
  misc_RNA (1)...(19): siRNA sense strand
cuacuccucuuucucuaca

SEQ ID NO: 601885 - RNA, 19 nt, Homo sapiens
  misc_RNA (1)...(19): siRNA sense strand
gcucuacuccucuuucucu

SEQ ID NO: 601886 - RNA, 19 nt, Homo sapiens
  misc_RNA (1)...(19): siRNA sense strand
gaaguccucuaccguuucc

SEQ ID NO: 601887 - RNA, 19 nt, Homo sapiens
  misc_RNA (1)...(19): siRNA sense strand
ggaaguccucuaccguuuc

SEQ ID NO: 601888 - RNA, 19 nt, Homo sapiens
  misc_RNA (1)...(19): siRNA sense strand
gcgcucaguccaucgugua

SEQ ID NO: 601889 - RNA, 19 nt, Homo sapiens
  misc_RNA (1)...(19): siRNA sense strand
ucagugggauucggcuuau

SEQ ID NO: 601890 - RNA, 19 nt, Homo sapiens
  misc_RNA (1)...(19): siRNA sense strand
gguuggagccauugugaau

SEQ ID NO: 601891 - RNA, 19 nt, Homo sapiens
  misc_RNA (1)...(19): siRNA sense strand
cucaguccaucguguauga

SEQ ID NO: 601892 - RNA, 19 nt, Homo sapiens
  misc_RNA (1)...(19): siRNA sense strand
gcgccaagaagaaccuuug

SEQ ID NO: 601893 - RNA, 19 nt, Homo sapiens
  misc_RNA (1)...(19): siRNA sense strand
gcgcugauguuugcaacca

SEQ ID NO: 601894 - RNA, 19 nt, Homo sapiens
  misc_RNA (1)...(19): siRNA sense strand
guuccaauuuaugcuguuu

SEQ ID NO: 601895 - RNA, 19 nt, Homo sapiens
  misc_RNA (1)...(19): siRNA sense strand
ccuaugaggucgggagcuu

SEQ ID NO: 601896 - RNA, 19 nt, Homo sapiens
  misc_RNA (1)...(19): siRNA sense strand
ccacaggacggcgcuaaau

SEQ ID NO: 601897 - RNA, 19 nt, Homo sapiens
  misc_RNA (1)...(19): siRNA sense strand
gaagguuggagccauugug

SEQ ID NO: 601898 - RNA, 19 nt, Homo sapiens
  misc_RNA (1)...(19): siRNA sense strand
cauaagcuccguguucugu

SEQ ID NO: 601899 - RNA, 19 nt, Homo sapiens
  misc_RNA (1)...(19): siRNA sense strand
cagcagaugcgccaagaag

SEQ ID NO: 601900 - RNA, 19 nt, Homo sapiens
  misc_RNA (1)...(19): siRNA sense strand
cacgccaauuugaaaguaa

SEQ ID NO: 601901 - RNA, 19 nt, Homo sapiens
  misc_RNA (1)...(19): siRNA sense strand
cagguacacgccaauuuga

SEQ ID NO: 601902 - RNA, 19 nt, Homo sapiens
  misc_RNA (1)...(19): siRNA sense strand
ggucuguggucagggauca

SEQ ID NO: 601903 - RNA, 19 nt, Homo sapiens
  misc_RNA (1)...(19): siRNA sense strand
gcuguuaagcuguaaggau

SEQ ID NO: 601904 - RNA, 19 nt, Homo sapiens
  misc_RNA (1)...(19): siRNA sense strand
ucaguguccugcuguuaag

SEQ ID NO: 601905 - RNA, 19 nt, Homo sapiens
  misc_RNA (1)...(19): siRNA sense strand
gcuguccgccuuccgagaa

SEQ ID NO: 601906 - RNA, 19 nt, Homo sapiens
  misc_RNA (1)...(19): siRNA sense strand
cacaggacggcgcuaaauu

SEQ ID NO: 601907 - RNA, 19 nt, Homo sapiens
  misc_RNA (1)...(19): siRNA sense strand
ggccaucauuguguacaug

SEQ ID NO: 601908 - RNA, 19 nt, Homo sapiens
  misc_RNA (1)...(19): siRNA sense strand
guucuugguucagcugaug

SEQ ID NO: 601909 - RNA, 19 nt, Homo sapiens
  misc_RNA (1)...(19): siRNA sense strand
gcagccaaccuugucaaug

SEQ ID NO: 601910 - RNA, 19 nt, Homo sapiens
  misc_RNA (1)...(19): siRNA sense strand
uggcucaggugguuccaau

SEQ ID NO: 601911 - RNA, 19 nt, Homo sapiens
  misc_RNA (1)...(19): siRNA sense strand
ugguucagcugaugguguu

SEQ ID NO: 601912 - RNA, 19 nt, Homo sapiens
  misc_RNA (1)...(19): siRNA sense strand
cuucauaagcuccguguuc

SEQ ID NO: 601913 - RNA, 19 nt, Homo sapiens
  misc_RNA (1)...(19): siRNA sense strand
gcugauuacagugcucuuu

SEQ ID NO: 601914 - RNA, 19 nt, Homo sapiens
  misc_RNA (1)...(19): siRNA sense strand
ucugggugcuggagacaug

SEQ ID NO: 601915 - RNA, 19 nt, Homo sapiens
  misc_RNA (1)...(19): siRNA sense strand
cgaacgauguuggaaagac

SEQ ID NO: 601916 - RNA, 19 nt, Homo sapiens
  misc_RNA (1)...(19): siRNA sense strand
aacgaacgauguuggaaag

SEQ ID NO: 601917 - RNA, 19 nt, Homo sapiens
  misc_RNA (1)...(19): siRNA sense strand
acgccaauuugaaaguaaa

SEQ ID NO: 601918 - RNA, 19 nt, Homo sapiens
  misc_RNA (1)...(19): siRNA sense strand
gagccauugugaauaccau

SEQ ID NO: 601919 - RNA, 19 nt, Homo sapiens
  misc_RNA (1)...(19): siRNA sense strand
ggaguggaaaucagaaggu

SEQ ID NO: 601920 - RNA, 19 nt, Homo sapiens
  misc_RNA (1)...(19): siRNA sense strand
accgagacaucauuaaucu

SEQ ID NO: 601921 - RNA, 19 nt, Homo sapiens
  misc_RNA (1)...(19): siRNA sense strand
gggauucggcuuaucuucu

SEQ ID NO: 601922 - RNA, 19 nt, Homo sapiens
  misc_RNA (1)...(19): siRNA sense strand
guacacgccaauuugaaag

SEQ ID NO: 601923 - RNA, 19 nt, Homo sapiens
  misc_RNA (1)...(19): siRNA sense strand
cgggaucgcgcugauguuu

SEQ ID NO: 601924 - RNA, 19 nt, Homo sapiens
  misc_RNA (1)...(19): siRNA sense strand
gcaaccuuucuuuauaugu

SEQ ID NO: 601925 - RNA, 19 nt, Homo sapiens
  misc_RNA (1)...(19): siRNA sense strand
gcuuaucuucugccuguga

SEQ ID NO: 601926 - RNA, 19 nt, Homo sapiens
  misc_RNA (1)...(19): siRNA sense strand
guuggagccauugugaaua

SEQ ID NO: 601927 - RNA, 19 nt, Homo sapiens
  misc_RNA (1)...(19): siRNA sense strand
ccaccucuuugaagcucuu

SEQ ID NO: 601928 - RNA, 19 nt, Homo sapiens
  misc_RNA (1)...(19): siRNA sense strand
uuccugaucagcuucauaa

SEQ ID NO: 601929 - RNA, 19 nt, Homo sapiens
  misc_RNA (1)...(19): siRNA sense strand
ucugguggcucaggugguu

SEQ ID NO: 601930 - RNA, 19 nt, Homo sapiens
  misc_RNA (1)...(19): siRNA sense strand
gcacauccugcugcucuuc

SEQ ID NO: 601931 - RNA, 19 nt, Homo sapiens
  misc_RNA (1)...(19): siRNA sense strand
ugaacuggccaucauugug

SEQ ID NO: 601932 - RNA, 19 nt, Homo sapiens
  misc_RNA (1)...(19): siRNA sense strand
ccucgccaacuaucuguuu

SEQ ID NO: 601933 - RNA, 19 nt, Homo sapiens
  misc_RNA (1)...(19): siRNA sense strand
caggacggcgcuaaauugu

SEQ ID NO: 601934 - RNA, 19 nt, Homo sapiens
  misc_RNA (1)...(19): siRNA sense strand
gcucagguacacgccaauu

SEQ ID NO: 601935 - RNA, 19 nt, Homo sapiens
  misc_RNA (1)...(19): siRNA sense strand
gaauuguacugccccagau

SEQ ID NO: 601936 - RNA, 19 nt, Homo sapiens
  misc_RNA (1)...(19): siRNA sense strand
ggagccagaaccugaagca

SEQ ID NO: 601937 - RNA, 19 nt, Homo sapiens
  misc_RNA (1)...(19): siRNA sense strand
ggagcgcgaugacuucgau

SEQ ID NO: 601938 - RNA, 19 nt, Homo sapiens
  misc_RNA (1)...(19): siRNA sense strand
gaucaagcggcacgugcua

SEQ ID NO: 601939 - RNA, 19 nt, Homo sapiens
  misc_RNA (1)...(19): siRNA sense strand
uggaggacuuugucacuug

SEQ ID NO: 601940 - RNA, 19 nt, Homo sapiens
  misc_RNA (1)...(19): siRNA sense strand
ggacuacacgcgcuacaac

SEQ ID NO: 601941 - RNA, 19 nt, Homo sapiens
  misc_RNA (1)...(19): siRNA sense strand
gcauggcgcagcaccuuca

SEQ ID NO: 601942 - RNA, 19 nt, Homo sapiens
  misc_RNA (1)...(19): siRNA sense strand
ggcacgugcuagaguacaa

SEQ ID NO: 601943 - RNA, 19 nt, Homo sapiens
  misc_RNA (1)...(19): siRNA sense strand
ccaccgugcuccucaagcu

SEQ ID NO: 601944 - RNA, 19 nt, Homo sapiens
  misc_RNA (1)...(19): siRNA sense strand
acaaugaggagcgcgauga

SEQ ID NO: 601945 - RNA, 19 nt, Homo sapiens
  misc_RNA (1)...(19): siRNA sense strand
gaaaugauguucugugaua

SEQ ID NO: 601946 - RNA, 19 nt, Homo sapiens
  misc_RNA (1)...(19): siRNA sense strand
gaauuugucugaaggguaa

SEQ ID NO: 601947 - RNA, 19 nt, Homo sapiens
  misc_RNA (1)...(19): siRNA sense strand
caauggagcuuguuucuau

SEQ ID NO: 601948 - RNA, 19 nt, Homo sapiens
  misc_RNA (1)...(19): siRNA sense strand
gagcuuguuucuaugauua

SEQ ID NO: 601949 - RNA, 19 nt, Homo sapiens
  misc_RNA (1)...(19): siRNA sense strand
caagggaaguacaaaguuu

SEQ ID NO: 601950 - RNA, 19 nt, Homo sapiens
  misc_RNA (1)...(19): siRNA sense strand
gugaugaagugauugauuu

SEQ ID NO: 601951 - RNA, 19 nt, Homo sapiens
  misc_RNA (1)...(19): siRNA sense strand
uaaagaguauucccaaaug

SEQ ID NO: 601952 - RNA, 19 nt, Homo sapiens
  misc_RNA (1)...(19): siRNA sense strand
guaaagugccugaguauau

SEQ ID NO: 601953 - RNA, 19 nt, Homo sapiens
  misc_RNA (1)...(19): siRNA sense strand
ucagugcacucuaggcuua

SEQ ID NO: 601954 - RNA, 19 nt, Homo sapiens
  misc_RNA (1)...(19): siRNA sense strand
gaaaggaaaggcugaauca

SEQ ID NO: 601955 - RNA, 19 nt, Homo sapiens
  misc_RNA (1)...(19): siRNA sense strand
gaagaaagaagagcuuauu

SEQ ID NO: 601956 - RNA, 19 nt, Homo sapiens
  misc_RNA (1)...(19): siRNA sense strand
gaacaagucagugaauauu

SEQ ID NO: 601957 - RNA, 19 nt, Homo sapiens
  misc_RNA (1)...(19): siRNA sense strand
ccaguaaagugccugagua

SEQ ID NO: 601958 - RNA, 19 nt, Homo sapiens
  misc_RNA (1)...(19): siRNA sense strand
uaaagugccugaguauauu

SEQ ID NO: 601959 - RNA, 19 nt, Homo sapiens
  misc_RNA (1)...(19): siRNA sense strand
gaaacucagugcacucuag

SEQ ID NO: 601960 - RNA, 19 nt, Homo sapiens
  misc_RNA (1)...(19): siRNA sense strand
gcgcagugaugaagugauu

SEQ ID NO: 601961 - RNA, 19 nt, Homo sapiens
  misc_RNA (1)...(19): siRNA sense strand
gguaaggaguccaacaaga

SEQ ID NO: 601962 - RNA, 19 nt, Homo sapiens
  misc_RNA (1)...(19): siRNA sense strand
ugacagagguuaucauacu

SEQ ID NO: 601963 - RNA, 19 nt, Homo sapiens
  misc_RNA (1)...(19): siRNA sense strand
aaagaacgucaacgaauua

SEQ ID NO: 601964 - RNA, 19 nt, Homo sapiens
  misc_RNA (1)...(19): siRNA sense strand
guaaggaguccaacaagaa

SEQ ID NO: 601965 - RNA, 19 nt, Homo sapiens
  misc_RNA (1)...(19): siRNA sense strand
caaaugcaacaacagaaua

SEQ ID NO: 601966 - RNA, 19 nt, Homo sapiens
  misc_RNA (1)...(19): siRNA sense strand
ggaaaggcugaaucacuua

SEQ ID NO: 601967 - RNA, 19 nt, Homo sapiens
  misc_RNA (1)...(19): siRNA sense strand
ggcaguguauggaauguaa

SEQ ID NO: 601968 - RNA, 19 nt, Homo sapiens
  misc_RNA (1)...(19): siRNA sense strand
acaagucagugaauauuug

SEQ ID NO: 601969 - RNA, 19 nt, Homo sapiens
  misc_RNA (1)...(19): siRNA sense strand
cagcagaauuuaauagcaa

SEQ ID NO: 601970 - RNA, 19 nt, Homo sapiens
  misc_RNA (1)...(19): siRNA sense strand
gaaagaagagcuuauuuug

SEQ ID NO: 601971 - RNA, 19 nt, Homo sapiens
  misc_RNA (1)...(19): siRNA sense strand
gauguucugugauaugugu

SEQ ID NO: 601972 - RNA, 19 nt, Homo sapiens
  misc_RNA (1)...(19): siRNA sense strand
caacagagcgaacaaaggu

SEQ ID NO: 601973 - RNA, 19 nt, Homo sapiens
  misc_RNA (1)...(19): siRNA sense strand
ggacagcuccucuggcaau

SEQ ID NO: 601974 - RNA, 19 nt, Homo sapiens
  misc_RNA (1)...(19): siRNA sense strand
ccaaacaugcugaguauuc

SEQ ID NO: 601975 - RNA, 19 nt, Homo sapiens
  misc_RNA (1)...(19): siRNA sense strand
cagcuccucuggcaaugua

SEQ ID NO: 601976 - RNA, 19 nt, Homo sapiens
  misc_RNA (1)...(19): siRNA sense strand
gaaaguugaagccaguaaa

SEQ ID NO: 601977 - RNA, 19 nt, Homo sapiens
  misc_RNA (1)...(19): siRNA sense strand
cgaauuacagaccauuaua

SEQ ID NO: 601978 - RNA, 19 nt, Homo sapiens
  misc_RNA (1)...(19): siRNA sense strand
ggagaaacucuaccugaga

SEQ ID NO: 601979 - RNA, 19 nt, Homo sapiens
  misc_RNA (1)...(19): siRNA sense strand
aagaacaagucagugaaua

SEQ ID NO: 601980 - RNA, 19 nt, Homo sapiens
  misc_RNA (1)...(19): siRNA sense strand
ggagcuuguuucuaugauu

SEQ ID NO: 601981 - RNA, 19 nt, Homo sapiens
  misc_RNA (1)...(19): siRNA sense strand
ggugugaccuccuuuaaaa

SEQ ID NO: 601982 - RNA, 19 nt, Homo sapiens
  misc_RNA (1)...(19): siRNA sense strand
gcagcagaauuuaauagca

SEQ ID NO: 601983 - RNA, 19 nt, Homo sapiens
  misc_RNA (1)...(19): siRNA sense strand
ucaggucgcuggauuugug

SEQ ID NO: 601984 - RNA, 19 nt, Homo sapiens
  misc_RNA (1)...(19): siRNA sense strand
ugagagagcuaaaugucau

SEQ ID NO: 601985 - RNA, 19 nt, Homo sapiens
  misc_RNA (1)...(19): siRNA sense strand
uaacagcauugcgcaguga

SEQ ID NO: 601986 - RNA, 19 nt, Homo sapiens
  misc_RNA (1)...(19): siRNA sense strand
agacagugauggugauuca

SEQ ID NO: 601987 - RNA, 19 nt, Homo sapiens
  misc_RNA (1)...(19): siRNA sense strand
aggaaaggcugaaucacuu

SEQ ID NO: 601988 - RNA, 19 nt, Homo sapiens
  misc_RNA (1)...(19): siRNA sense strand
caugcugaguauucuguua

SEQ ID NO: 601989 - RNA, 19 nt, Homo sapiens
  misc_RNA (1)...(19): siRNA sense strand
aaaagaacgucaacgaauu

SEQ ID NO: 601990 - RNA, 19 nt, Homo sapiens
  misc_RNA (1)...(19): siRNA sense strand
gacagagguuaucauacuu

SEQ ID NO: 601991 - RNA, 19 nt, Homo sapiens
  misc_RNA (1)...(19): siRNA sense strand
agccaaaggucauuccaaa

SEQ ID NO: 601992 - RNA, 19 nt, Homo sapiens
  misc_RNA (1)...(19): siRNA sense strand
gaacgucaacgaauuacag

SEQ ID NO: 601993 - RNA, 19 nt, Homo sapiens
  misc_RNA (1)...(19): siRNA sense strand
gcagugaugaagugauuga

SEQ ID NO: 601994 - RNA, 19 nt, Homo sapiens
  misc_RNA (1)...(19): siRNA sense strand
gagaauaguggccauccuu

SEQ ID NO: 601995 - RNA, 19 nt, Homo sapiens
  misc_RNA (1)...(19): siRNA sense strand
ggaagaaagaagagcuuau

SEQ ID NO: 601996 - RNA, 19 nt, Homo sapiens
  misc_RNA (1)...(19): siRNA sense strand
gaauauccagccaaacaug

SEQ ID NO: 601997 - RNA, 19 nt, Homo sapiens
  misc_RNA (1)...(19): siRNA sense strand
uaaggaguccaacaagaaa

SEQ ID NO: 601998 - RNA, 19 nt, Homo sapiens
  misc_RNA (1)...(19): siRNA sense strand
acagaauacucagaaaguu

SEQ ID NO: 601999 - RNA, 19 nt, Homo sapiens
  misc_RNA (1)...(19): siRNA sense strand
gaaaggcugaaucacuuau

SEQ ID NO: 602000 - RNA, 19 nt, Homo sapiens
  misc_RNA (1)...(19): siRNA sense strand
gaagauggucgaggugaug

SEQ ID NO: 602001 - RNA, 19 nt, Homo sapiens
  misc_RNA (1)...(19): siRNA sense strand
ugcgguaucugccauuaaa

SEQ ID NO: 602002 - RNA, 19 nt, Homo sapiens
  misc_RNA (1)...(19): siRNA sense strand
gcugcgguaucugccauua

SEQ ID NO: 602003 - RNA, 19 nt, Homo sapiens
  misc_RNA (1)...(19): siRNA sense strand
caaacaugcugaguauucu

SEQ ID NO: 602004 - RNA, 19 nt, Homo sapiens
  misc_RNA (1)...(19): siRNA sense strand
aaaagaauauccagccaaa

SEQ ID NO: 602005 - RNA, 19 nt, Homo sapiens
  misc_RNA (1)...(19): siRNA sense strand
caacagaauacucagaaag

SEQ ID NO: 602006 - RNA, 19 nt, Homo sapiens
  misc_RNA (1)...(19): siRNA sense strand
caacaacagaauacucaga

SEQ ID NO: 602007 - RNA, 19 nt, Homo sapiens
  misc_RNA (1)...(19): siRNA sense strand
acaacagaauacucagaaa

SEQ ID NO: 602008 - RNA, 19 nt, Homo sapiens
  misc_RNA (1)...(19): siRNA sense strand
caagaacaagucagugaau

SEQ ID NO: 602009 - RNA, 19 nt, Homo sapiens
  misc_RNA (1)...(19): siRNA sense strand
agccaaacaugcugaguau

SEQ ID NO: 602010 - RNA, 19 nt, Homo sapiens
  misc_RNA (1)...(19): siRNA sense strand
caaaugcuauauguggaau

SEQ ID NO: 602011 - RNA, 19 nt, Homo sapiens
  misc_RNA (1)...(19): siRNA sense strand
cagaauacucagaaaguug

SEQ ID NO: 602012 - RNA, 19 nt, Homo sapiens
  misc_RNA (1)...(19): siRNA sense strand
ccaaaugcaacaacagaau

SEQ ID NO: 602013 - RNA, 19 nt, Homo sapiens
  misc_RNA (1)...(19): siRNA sense strand
gaacgcauggaagaaagaa

SEQ ID NO: 602014 - RNA, 19 nt, Homo sapiens
  misc_RNA (1)...(19): siRNA sense strand
gggaacgcauggaagaaag

SEQ ID NO: 602015 - RNA, 19 nt, Homo sapiens
  misc_RNA (1)...(19): siRNA sense strand
aagaauauccagccaaaca

SEQ ID NO: 602016 - RNA, 19 nt, Homo sapiens
  misc_RNA (1)...(19): siRNA sense strand
aaacagcaaagagggauaa

SEQ ID NO: 602017 - RNA, 19 nt, Homo sapiens
  misc_RNA (1)...(19): siRNA sense strand
aagaaaagauggucccaaa

SEQ ID NO: 602018 - RNA, 19 nt, Homo sapiens
  misc_RNA (1)...(19): siRNA sense strand
agaauacucagaaaguuga

SEQ ID NO: 602019 - RNA, 19 nt, Homo sapiens
  misc_RNA (1)...(19): siRNA sense strand
ugugacagagguuaucaua

SEQ ID NO: 602020 - RNA, 19 nt, Homo sapiens
  misc_RNA (1)...(19): siRNA sense strand
guacaagccaaaggucauu

SEQ ID NO: 602021 - RNA, 19 nt, Homo sapiens
  misc_RNA (1)...(19): siRNA sense strand
gaagacagaaaucaaaaga

SEQ ID NO: 602022 - RNA, 19 nt, Homo sapiens
  misc_RNA (1)...(19): siRNA sense strand
aaagugccugaguauauua

SEQ ID NO: 602023 - RNA, 19 nt, Homo sapiens
  misc_RNA (1)...(19): siRNA sense strand
gugccugaguauauuaaga

SEQ ID NO: 602024 - RNA, 19 nt, Homo sapiens
  misc_RNA (1)...(19): siRNA sense strand
ccaugaagaagaaaugaug

SEQ ID NO: 602025 - RNA, 19 nt, Homo sapiens
  misc_RNA (1)...(19): siRNA sense strand
aaagauggucccaaacguu

SEQ ID NO: 602026 - RNA, 19 nt, Homo sapiens
  misc_RNA (1)...(19): siRNA sense strand
ucaagggaaguacaaaguu

SEQ ID NO: 602027 - RNA, 19 nt, Homo sapiens
  misc_RNA (1)...(19): siRNA sense strand
ccaaaugcuauauguggaa

SEQ ID NO: 602028 - RNA, 19 nt, Homo sapiens
  misc_RNA (1)...(19): siRNA sense strand
guucuguacuguccaaguc

SEQ ID NO: 602029 - RNA, 19 nt, Homo sapiens
  misc_RNA (1)...(19): siRNA sense strand
gggugugaccuccuuuaaa

SEQ ID NO: 602030 - RNA, 19 nt, Homo sapiens
  misc_RNA (1)...(19): siRNA sense strand
cgaagauggucgaggugau

SEQ ID NO: 602031 - RNA, 19 nt, Homo sapiens
  misc_RNA (1)...(19): siRNA sense strand
gauggugauucagaugaug

SEQ ID NO: 602032 - RNA, 19 nt, Homo sapiens
  misc_RNA (1)...(19): siRNA sense strand
gacacauguuauccaggua

SEQ ID NO: 602033 - RNA, 19 nt, Homo sapiens
  misc_RNA (1)...(19): siRNA sense strand
ggaacgcauggaagaaaga

SEQ ID NO: 602034 - RNA, 19 nt, Homo sapiens
  misc_RNA (1)...(19): siRNA sense strand
ucccaaacguucuguacug

SEQ ID NO: 602035 - RNA, 19 nt, Homo sapiens
  misc_RNA (1)...(19): siRNA sense strand
agacagaaaucaaaagaca

SEQ ID NO: 602036 - RNA, 19 nt, Homo sapiens
  misc_RNA (1)...(19): siRNA sense strand
agaacaagucagugaauau

SEQ ID NO: 602037 - RNA, 19 nt, Homo sapiens
  misc_RNA (1)...(19): siRNA sense strand
aagagguacucaccagaug

SEQ ID NO: 602038 - RNA, 19 nt, Homo sapiens
  misc_RNA (1)...(19): siRNA sense strand
gacuugcagacacauguua

SEQ ID NO: 602039 - RNA, 19 nt, Homo sapiens
  misc_RNA (1)...(19): siRNA sense strand
gccugaguauauuaagaaa

SEQ ID NO: 602040 - RNA, 19 nt, Homo sapiens
  misc_RNA (1)...(19): siRNA sense strand
ucaagaacaagucagugaa

SEQ ID NO: 602041 - RNA, 19 nt, Homo sapiens
  misc_RNA (1)...(19): siRNA sense strand
auacacugcucccaaugug

SEQ ID NO: 602042 - RNA, 19 nt, Homo sapiens
  misc_RNA (1)...(19): siRNA sense strand
cuuauacacugcucccaau

SEQ ID NO: 602043 - RNA, 19 nt, Homo sapiens
  misc_RNA (1)...(19): siRNA sense strand
caaagcugccacuccaaga

SEQ ID NO: 602044 - RNA, 19 nt, Homo sapiens
  misc_RNA (1)...(19): siRNA sense strand
uaagagguacucaccagau

SEQ ID NO: 602045 - RNA, 19 nt, Homo sapiens
  misc_RNA (1)...(19): siRNA sense strand
gaaaugauguucugugaua

SEQ ID NO: 602046 - RNA, 19 nt, Homo sapiens
  misc_RNA (1)...(19): siRNA sense strand
gaauuugucugaaggguaa

SEQ ID NO: 602047 - RNA, 19 nt, Homo sapiens
  misc_RNA (1)...(19): siRNA sense strand
caauggagcuuguuucuau

SEQ ID NO: 602048 - RNA, 19 nt, Homo sapiens
  misc_RNA (1)...(19): siRNA sense strand
gagcuuguuucuaugauua

SEQ ID NO: 602049 - RNA, 19 nt, Homo sapiens
  misc_RNA (1)...(19): siRNA sense strand
caagggaaguacaaaguuu

SEQ ID NO: 602050 - RNA, 19 nt, Homo sapiens
  misc_RNA (1)...(19): siRNA sense strand
gugaugaagugauugauuu

SEQ ID NO: 602051 - RNA, 19 nt, Homo sapiens
  misc_RNA (1)...(19): siRNA sense strand
uaaagaguauucccaaaug

SEQ ID NO: 602052 - RNA, 19 nt, Homo sapiens
  misc_RNA (1)...(19): siRNA sense strand
guaaagugccugaguauau

SEQ ID NO: 602053 - RNA, 19 nt, Homo sapiens
  misc_RNA (1)...(19): siRNA sense strand
ucagugcacucuaggcuua

SEQ ID NO: 602054 - RNA, 19 nt, Homo sapiens
  misc_RNA (1)...(19): siRNA sense strand
gaaaggaaaggcugaauca

SEQ ID NO: 602055 - RNA, 19 nt, Homo sapiens
  misc_RNA (1)...(19): siRNA sense strand
gaagaaagaagagcuuauu

SEQ ID NO: 602056 - RNA, 19 nt, Homo sapiens
  misc_RNA (1)...(19): siRNA sense strand
gaacaagucagugaauauu

SEQ ID NO: 602057 - RNA, 19 nt, Homo sapiens
  misc_RNA (1)...(19): siRNA sense strand
ccaguaaagugccugagua

SEQ ID NO: 602058 - RNA, 19 nt, Homo sapiens
  misc_RNA (1)...(19): siRNA sense strand
uaaagugccugaguauauu

SEQ ID NO: 602059 - RNA, 19 nt, Homo sapiens
  misc_RNA (1)...(19): siRNA sense strand
gaaacucagugcacucuag

SEQ ID NO: 602060 - RNA, 19 nt, Homo sapiens
  misc_RNA (1)...(19): siRNA sense strand
gcgcagugaugaagugauu

SEQ ID NO: 602061 - RNA, 19 nt, Homo sapiens
  misc_RNA (1)...(19): siRNA sense strand
gguaaggaguccaacaaga

SEQ ID NO: 602062 - RNA, 19 nt, Homo sapiens
  misc_RNA (1)...(19): siRNA sense strand
ugacagagguuaucauacu

SEQ ID NO: 602063 - RNA, 19 nt, Homo sapiens
  misc_RNA (1)...(19): siRNA sense strand
aaagaacgucaacgaauua

SEQ ID NO: 602064 - RNA, 19 nt, Homo sapiens
  misc_RNA (1)...(19): siRNA sense strand
guaaggaguccaacaagaa

SEQ ID NO: 602065 - RNA, 19 nt, Homo sapiens
  misc_RNA (1)...(19): siRNA sense strand
caaaugcaacaacagaaua

SEQ ID NO: 602066 - RNA, 19 nt, Homo sapiens
  misc_RNA (1)...(19): siRNA sense strand
ggaaaggcugaaucacuua

SEQ ID NO: 602067 - RNA, 19 nt, Homo sapiens
  misc_RNA (1)...(19): siRNA sense strand
ggcaguguauggaauguaa

SEQ ID NO: 602068 - RNA, 19 nt, Homo sapiens
  misc_RNA (1)...(19): siRNA sense strand
acaagucagugaauauuug

SEQ ID NO: 602069 - RNA, 19 nt, Homo sapiens
  misc_RNA (1)...(19): siRNA sense strand
cagcagaauuuaauagcaa

SEQ ID NO: 602070 - RNA, 19 nt, Homo sapiens
  misc_RNA (1)...(19): siRNA sense strand
gaaagaagagcuuauuuug

SEQ ID NO: 602071 - RNA, 19 nt, Homo sapiens
  misc_RNA (1)...(19): siRNA sense strand
gauguucugugauaugugu

SEQ ID NO: 602072 - RNA, 19 nt, Homo sapiens
  misc_RNA (1)...(19): siRNA sense strand
caacagagcgaacaaaggu

SEQ ID NO: 602073 - RNA, 19 nt, Homo sapiens
  misc_RNA (1)...(19): siRNA sense strand
ggacagcuccucuggcaau

SEQ ID NO: 602074 - RNA, 19 nt, Homo sapiens
  misc_RNA (1)...(19): siRNA sense strand
ccaaacaugcugaguauuc

SEQ ID NO: 602075 - RNA, 19 nt, Homo sapiens
  misc_RNA (1)...(19): siRNA sense strand
cagcuccucuggcaaugua

SEQ ID NO: 602076 - RNA, 19 nt, Homo sapiens
  misc_RNA (1)...(19): siRNA sense strand
gaaaguugaagccaguaaa

SEQ ID NO: 602077 - RNA, 19 nt, Homo sapiens
  misc_RNA (1)...(19): siRNA sense strand
cgaauuacagaccauuaua

SEQ ID NO: 602078 - RNA, 19 nt, Homo sapiens
  misc_RNA (1)...(19): siRNA sense strand
ggagaaacucuaccugaga

SEQ ID NO: 602079 - RNA, 19 nt, Homo sapiens
  misc_RNA (1)...(19): siRNA sense strand
aagaacaagucagugaaua

SEQ ID NO: 602080 - RNA, 19 nt, Homo sapiens
  misc_RNA (1)...(19): siRNA sense strand
ggagcuuguuucuaugauu

SEQ ID NO: 602081 - RNA, 19 nt, Homo sapiens
  misc_RNA (1)...(19): siRNA sense strand
ggugugaccuccuuuaaaa

SEQ ID NO: 602082 - RNA, 19 nt, Homo sapiens
  misc_RNA (1)...(19): siRNA sense strand
gcagcagaauuuaauagca

SEQ ID NO: 602083 - RNA, 19 nt, Homo sapiens
  misc_RNA (1)...(19): siRNA sense strand
ucaggucgcuggauuugug

SEQ ID NO: 602084 - RNA, 19 nt, Homo sapiens
  misc_RNA (1)...(19): siRNA sense strand
ugagagagcuaaaugucau

SEQ ID NO: 602085 - RNA, 19 nt, Homo sapiens
  misc_RNA (1)...(19): siRNA sense strand
uaacagcauugcgcaguga

SEQ ID NO: 602086 - RNA, 19 nt, Homo sapiens
  misc_RNA (1)...(19): siRNA sense strand
agacagugauggugauuca

SEQ ID NO: 602087 - RNA, 19 nt, Homo sapiens
  misc_RNA (1)...(19): siRNA sense strand
aggaaaggcugaaucacuu

SEQ ID NO: 602088 - RNA, 19 nt, Homo sapiens
  misc_RNA (1)...(19): siRNA sense strand
caugcugaguauucuguua

SEQ ID NO: 602089 - RNA, 19 nt, Homo sapiens
  misc_RNA (1)...(19): siRNA sense strand
aaaagaacgucaacgaauu

SEQ ID NO: 602090 - RNA, 19 nt, Homo sapiens
  misc_RNA (1)...(19): siRNA sense strand
gacagagguuaucauacuu

SEQ ID NO: 602091 - RNA, 19 nt, Homo sapiens
  misc_RNA (1)...(19): siRNA sense strand
agccaaaggucauuccaaa

SEQ ID NO: 602092 - RNA, 19 nt, Homo sapiens
  misc_RNA (1)...(19): siRNA sense strand
gaacgucaacgaauuacag

SEQ ID NO: 602093 - RNA, 19 nt, Homo sapiens
  misc_RNA (1)...(19): siRNA sense strand
gcagugaugaagugauuga

SEQ ID NO: 602094 - RNA, 19 nt, Homo sapiens
  misc_RNA (1)...(19): siRNA sense strand
gagaauaguggccauccuu

SEQ ID NO: 602095 - RNA, 19 nt, Homo sapiens
  misc_RNA (1)...(19): siRNA sense strand
ggaagaaagaagagcuuau

SEQ ID NO: 602096 - RNA, 19 nt, Homo sapiens
  misc_RNA (1)...(19): siRNA sense strand
gaauauccagccaaacaug

SEQ ID NO: 602097 - RNA, 19 nt, Homo sapiens
  misc_RNA (1)...(19): siRNA sense strand
uaaggaguccaacaagaaa

SEQ ID NO: 602098 - RNA, 19 nt, Homo sapiens
  misc_RNA (1)...(19): siRNA sense strand
acagaauacucagaaaguu

SEQ ID NO: 602099 - RNA, 19 nt, Homo sapiens
  misc_RNA (1)...(19): siRNA sense strand
gaaaggcugaaucacuuau

SEQ ID NO: 602100 - RNA, 19 nt, Homo sapiens
  misc_RNA (1)...(19): siRNA sense strand
gaagauggucgaggugaug

SEQ ID NO: 602101 - RNA, 19 nt, Homo sapiens
  misc_RNA (1)...(19): siRNA sense strand
ugcgguaucugccauuaaa

SEQ ID NO: 602102 - RNA, 19 nt, Homo sapiens
  misc_RNA (1)...(19): siRNA sense strand
gcugcgguaucugccauua

SEQ ID NO: 602103 - RNA, 19 nt, Homo sapiens
  misc_RNA (1)...(19): siRNA sense strand
caaacaugcugaguauucu

SEQ ID NO: 602104 - RNA, 19 nt, Homo sapiens
  misc_RNA (1)...(19): siRNA sense strand
aaaagaauauccagccaaa

SEQ ID NO: 602105 - RNA, 19 nt, Homo sapiens
  misc_RNA (1)...(19): siRNA sense strand
caacagaauacucagaaag

SEQ ID NO: 602106 - RNA, 19 nt, Homo sapiens
  misc_RNA (1)...(19): siRNA sense strand
caacaacagaauacucaga

SEQ ID NO: 602107 - RNA, 19 nt, Homo sapiens
  misc_RNA (1)...(19): siRNA sense strand
acaacagaauacucagaaa

SEQ ID NO: 602108 - RNA, 19 nt, Homo sapiens
  misc_RNA (1)...(19): siRNA sense strand
caagaacaagucagugaau

SEQ ID NO: 602109 - RNA, 19 nt, Homo sapiens
  misc_RNA (1)...(19): siRNA sense strand
agccaaacaugcugaguau

SEQ ID NO: 602110 - RNA, 19 nt, Homo sapiens
  misc_RNA (1)...(19): siRNA sense strand
caaaugcuauauguggaau

SEQ ID NO: 602111 - RNA, 19 nt, Homo sapiens
  misc_RNA (1)...(19): siRNA sense strand
cagaauacucagaaaguug

SEQ ID NO: 602112 - RNA, 19 nt, Homo sapiens
  misc_RNA (1)...(19): siRNA sense strand
ccaaaugcaacaacagaau

SEQ ID NO: 602113 - RNA, 19 nt, Homo sapiens
  misc_RNA (1)...(19): siRNA sense strand
gaacgcauggaagaaagaa

SEQ ID NO: 602114 - RNA, 19 nt, Homo sapiens
  misc_RNA (1)...(19): siRNA sense strand
gggaacgcauggaagaaag

SEQ ID NO: 602115 - RNA, 19 nt, Homo sapiens
  misc_RNA (1)...(19): siRNA sense strand
aagaauauccagccaaaca

SEQ ID NO: 602116 - RNA, 19 nt, Homo sapiens
  misc_RNA (1)...(19): siRNA sense strand
aaacagcaaagagggauaa

SEQ ID NO: 602117 - RNA, 19 nt, Homo sapiens
  misc_RNA (1)...(19): siRNA sense strand
aagaaaagauggucccaaa

SEQ ID NO: 602118 - RNA, 19 nt, Homo sapiens
  misc_RNA (1)...(19): siRNA sense strand
agaauacucagaaaguuga

SEQ ID NO: 602119 - RNA, 19 nt, Homo sapiens
  misc_RNA (1)...(19): siRNA sense strand
ugugacagagguuaucaua

SEQ ID NO: 602120 - RNA, 19 nt, Homo sapiens
  misc_RNA (1)...(19): siRNA sense strand
guacaagccaaaggucauu

SEQ ID NO: 602121 - RNA, 19 nt, Homo sapiens
  misc_RNA (1)...(19): siRNA sense strand
gaagacagaaaucaaaaga

SEQ ID NO: 602122 - RNA, 19 nt, Homo sapiens
  misc_RNA (1)...(19): siRNA sense strand
aaagugccugaguauauua

SEQ ID NO: 602123 - RNA, 19 nt, Homo sapiens
  misc_RNA (1)...(19): siRNA sense strand
gugccugaguauauuaaga

SEQ ID NO: 602124 - RNA, 19 nt, Homo sapiens
  misc_RNA (1)...(19): siRNA sense strand
ccaugaagaagaaaugaug

SEQ ID NO: 602125 - RNA, 19 nt, Homo sapiens
  misc_RNA (1)...(19): siRNA sense strand
aaagauggucccaaacguu

SEQ ID NO: 602126 - RNA, 19 nt, Homo sapiens
  misc_RNA (1)...(19): siRNA sense strand
ucaagggaaguacaaaguu

SEQ ID NO: 602127 - RNA, 19 nt, Homo sapiens
  misc_RNA (1)...(19): siRNA sense strand
ccaaaugcuauauguggaa

SEQ ID NO: 602128 - RNA, 19 nt, Homo sapiens
  misc_RNA (1)...(19): siRNA sense strand
guucuguacuguccaaguc

SEQ ID NO: 602129 - RNA, 19 nt, Homo sapiens
  misc_RNA (1)...(19): siRNA sense strand
gggugugaccuccuuuaaa

SEQ ID NO: 602130 - RNA, 19 nt, Homo sapiens
  misc_RNA (1)...(19): siRNA sense strand
cgaagauggucgaggugau

SEQ ID NO: 602131 - RNA, 19 nt, Homo sapiens
  misc_RNA (1)...(19): siRNA sense strand
gauggugauucagaugaug

SEQ ID NO: 602132 - RNA, 19 nt, Homo sapiens
  misc_RNA (1)...(19): siRNA sense strand
gacacauguuauccaggua

SEQ ID NO: 602133 - RNA, 19 nt, Homo sapiens
  misc_RNA (1)...(19): siRNA sense strand
ggaacgcauggaagaaaga

SEQ ID NO: 602134 - RNA, 19 nt, Homo sapiens
  misc_RNA (1)...(19): siRNA sense strand
ucccaaacguucuguacug

SEQ ID NO: 602135 - RNA, 19 nt, Homo sapiens
  misc_RNA (1)...(19): siRNA sense strand
agacagaaaucaaaagaca

SEQ ID NO: 602136 - RNA, 19 nt, Homo sapiens
  misc_RNA (1)...(19): siRNA sense strand
agaacaagucagugaauau

SEQ ID NO: 602137 - RNA, 19 nt, Homo sapiens
  misc_RNA (1)...(19): siRNA sense strand
aagagguacucaccagaug

SEQ ID NO: 602138 - RNA, 19 nt, Homo sapiens
  misc_RNA (1)...(19): siRNA sense strand
gacuugcagacacauguua

SEQ ID NO: 602139 - RNA, 19 nt, Homo sapiens
  misc_RNA (1)...(19): siRNA sense strand
gccugaguauauuaagaaa

SEQ ID NO: 602140 - RNA, 19 nt, Homo sapiens
  misc_RNA (1)...(19): siRNA sense strand
ucaagaacaagucagugaa

SEQ ID NO: 602141 - RNA, 19 nt, Homo sapiens
  misc_RNA (1)...(19): siRNA sense strand
auacacugcucccaaugug

SEQ ID NO: 602142 - RNA, 19 nt, Homo sapiens
  misc_RNA (1)...(19): siRNA sense strand
cuuauacacugcucccaau

SEQ ID NO: 602143 - RNA, 19 nt, Homo sapiens
  misc_RNA (1)...(19): siRNA sense strand
caaagcugccacuccaaga

SEQ ID NO: 602144 - RNA, 19 nt, Homo sapiens
  misc_RNA (1)...(19): siRNA sense strand
uaagagguacucaccagau

SEQ ID NO: 602145 - RNA, 19 nt, Homo sapiens
  misc_RNA (1)...(19): siRNA sense strand
gaggagagcuuuccaaaua

SEQ ID NO: 602146 - RNA, 19 nt, Homo sapiens
  misc_RNA (1)...(19): siRNA sense strand
gaaagaaaguggccuuaaa

SEQ ID NO: 602147 - RNA, 19 nt, Homo sapiens
  misc_RNA (1)...(19): siRNA sense strand
gcaaagagcacuucagaaa

SEQ ID NO: 602148 - RNA, 19 nt, Homo sapiens
  misc_RNA (1)...(19): siRNA sense strand
gaagaacaaugaccuaaca

SEQ ID NO: 602149 - RNA, 19 nt, Homo sapiens
  misc_RNA (1)...(19): siRNA sense strand
caaccaguguuacaaauuu

SEQ ID NO: 602150 - RNA, 19 nt, Homo sapiens
  misc_RNA (1)...(19): siRNA sense strand
gauagggaauguagagaaa

SEQ ID NO: 602151 - RNA, 19 nt, Homo sapiens
  misc_RNA (1)...(19): siRNA sense strand
guacaaacguguucaaagg

SEQ ID NO: 602152 - RNA, 19 nt, Homo sapiens
  misc_RNA (1)...(19): siRNA sense strand
acaaugaccuaacaaguug

SEQ ID NO: 602153 - RNA, 19 nt, Homo sapiens
  misc_RNA (1)...(19): siRNA sense strand
ccacuucagucaugacauu

SEQ ID NO: 602154 - RNA, 19 nt, Homo sapiens
  misc_RNA (1)...(19): siRNA sense strand
gaacuacuuuacagugaau

SEQ ID NO: 602155 - RNA, 19 nt, Homo sapiens
  misc_RNA (1)...(19): siRNA sense strand
guaugaagcuuauggucaa

SEQ ID NO: 602156 - RNA, 19 nt, Homo sapiens
  misc_RNA (1)...(19): siRNA sense strand
gagcuuacggucauccuua

SEQ ID NO: 602157 - RNA, 19 nt, Homo sapiens
  misc_RNA (1)...(19): siRNA sense strand
gaacaggucaaagccauuu

SEQ ID NO: 602158 - RNA, 19 nt, Homo sapiens
  misc_RNA (1)...(19): siRNA sense strand
gaacaaugaccuaacaagu

SEQ ID NO: 602159 - RNA, 19 nt, Homo sapiens
  misc_RNA (1)...(19): siRNA sense strand
gaucuuaucccuauaugau

SEQ ID NO: 602160 - RNA, 19 nt, Homo sapiens
  misc_RNA (1)...(19): siRNA sense strand
gaagccaucguacauauug

SEQ ID NO: 602161 - RNA, 19 nt, Homo sapiens
  misc_RNA (1)...(19): siRNA sense strand
acaaacaggugucugauag

SEQ ID NO: 602162 - RNA, 19 nt, Homo sapiens
  misc_RNA (1)...(19): siRNA sense strand
uuaacaggaucuacgauaa

SEQ ID NO: 602163 - RNA, 19 nt, Homo sapiens
  misc_RNA (1)...(19): siRNA sense strand
gaguggaauugagaucuua

SEQ ID NO: 602164 - RNA, 19 nt, Homo sapiens
  misc_RNA (1)...(19): siRNA sense strand
cagaagccaucguacauau

SEQ ID NO: 602165 - RNA, 19 nt, Homo sapiens
  misc_RNA (1)...(19): siRNA sense strand
guuccugucucuugcauaa

SEQ ID NO: 602166 - RNA, 19 nt, Homo sapiens
  misc_RNA (1)...(19): siRNA sense strand
caaacguguucaaaggaua

SEQ ID NO: 602167 - RNA, 19 nt, Homo sapiens
  misc_RNA (1)...(19): siRNA sense strand
cggaaggguucguguaauu

SEQ ID NO: 602168 - RNA, 19 nt, Homo sapiens
  misc_RNA (1)...(19): siRNA sense strand
ggaaagaaaguggccuuaa

SEQ ID NO: 602169 - RNA, 19 nt, Homo sapiens
  misc_RNA (1)...(19): siRNA sense strand
gaugaugaccugaagcaaa

SEQ ID NO: 602170 - RNA, 19 nt, Homo sapiens
  misc_RNA (1)...(19): siRNA sense strand
gaaggacccugagaagaca

SEQ ID NO: 602171 - RNA, 19 nt, Homo sapiens
  misc_RNA (1)...(19): siRNA sense strand
gagaagaguggaauugaga

SEQ ID NO: 602172 - RNA, 19 nt, Homo sapiens
  misc_RNA (1)...(19): siRNA sense strand
ggagaagaguggaauugag

SEQ ID NO: 602173 - RNA, 19 nt, Homo sapiens
  misc_RNA (1)...(19): siRNA sense strand
cagauguacuucccucauu

SEQ ID NO: 602174 - RNA, 19 nt, Homo sapiens
  misc_RNA (1)...(19): siRNA sense strand
gaagaucaucgaccguaaa

SEQ ID NO: 602175 - RNA, 19 nt, Homo sapiens
  misc_RNA (1)...(19): siRNA sense strand
gggacaagcucaucuuugc

SEQ ID NO: 602176 - RNA, 19 nt, Homo sapiens
  misc_RNA (1)...(19): siRNA sense strand
caaaccagcccuacagaug

SEQ ID NO: 602177 - RNA, 19 nt, Homo sapiens
  misc_RNA (1)...(19): siRNA sense strand
gaucuacgauaagguacaa

SEQ ID NO: 602178 - RNA, 19 nt, Homo sapiens
  misc_RNA (1)...(19): siRNA sense strand
caacccgucuuaccucuuc

SEQ ID NO: 602179 - RNA, 19 nt, Homo sapiens
  misc_RNA (1)...(19): siRNA sense strand
gagcugccaucuucuugug

SEQ ID NO: 602180 - RNA, 19 nt, Homo sapiens
  misc_RNA (1)...(19): siRNA sense strand
gacaugaacuacuuuacag

SEQ ID NO: 602181 - RNA, 19 nt, Homo sapiens
  misc_RNA (1)...(19): siRNA sense strand
ucuccgaauuggcuuguua

SEQ ID NO: 602182 - RNA, 19 nt, Homo sapiens
  misc_RNA (1)...(19): siRNA sense strand
ugaagaucaucgaccguaa

SEQ ID NO: 602183 - RNA, 19 nt, Homo sapiens
  misc_RNA (1)...(19): siRNA sense strand
aggaagcccuggacaguga

SEQ ID NO: 602184 - RNA, 19 nt, Homo sapiens
  misc_RNA (1)...(19): siRNA sense strand
agauguacuucccucauuu

SEQ ID NO: 602185 - RNA, 19 nt, Homo sapiens
  misc_RNA (1)...(19): siRNA sense strand
ggagagcuuuccaaauacu

SEQ ID NO: 602186 - RNA, 19 nt, Homo sapiens
  misc_RNA (1)...(19): siRNA sense strand
gagaucuuaucccuauaug

SEQ ID NO: 602187 - RNA, 19 nt, Homo sapiens
  misc_RNA (1)...(19): siRNA sense strand
cugacgacaugaagacuuu

SEQ ID NO: 602188 - RNA, 19 nt, Homo sapiens
  misc_RNA (1)...(19): siRNA sense strand
gcgaggagagcuuuccaaa

SEQ ID NO: 602189 - RNA, 19 nt, Homo sapiens
  misc_RNA (1)...(19): siRNA sense strand
acaccaacauugaaagcaa

SEQ ID NO: 602190 - RNA, 19 nt, Homo sapiens
  misc_RNA (1)...(19): siRNA sense strand
gcucuugacaccaacauug

SEQ ID NO: 602191 - RNA, 19 nt, Homo sapiens
  misc_RNA (1)...(19): siRNA sense strand
ugaacuacuuuacagugaa

SEQ ID NO: 602192 - RNA, 19 nt, Homo sapiens
  misc_RNA (1)...(19): siRNA sense strand
uggcugacaugaacuacuu

SEQ ID NO: 602193 - RNA, 19 nt, Homo sapiens
  misc_RNA (1)...(19): siRNA sense strand
ucagguguaugaagcuuau

SEQ ID NO: 602194 - RNA, 19 nt, Homo sapiens
  misc_RNA (1)...(19): siRNA sense strand
ccagaagccaucguacaua

SEQ ID NO: 602195 - RNA, 19 nt, Homo sapiens
  misc_RNA (1)...(19): siRNA sense strand
caaucagucugugggaauu

SEQ ID NO: 602196 - RNA, 19 nt, Homo sapiens
  misc_RNA (1)...(19): siRNA sense strand
caccaacauugaaagcaaa

SEQ ID NO: 602197 - RNA, 19 nt, Homo sapiens
  misc_RNA (1)...(19): siRNA sense strand
caagcuggcccaaggagaa

SEQ ID NO: 602198 - RNA, 19 nt, Homo sapiens
  misc_RNA (1)...(19): siRNA sense strand
gaaggguucguguaauugu

SEQ ID NO: 602199 - RNA, 19 nt, Homo sapiens
  misc_RNA (1)...(19): siRNA sense strand
ggaaggguucguguaauug

SEQ ID NO: 602200 - RNA, 19 nt, Homo sapiens
  misc_RNA (1)...(19): siRNA sense strand
gcugcugccuuucucaaau

SEQ ID NO: 602201 - RNA, 19 nt, Homo sapiens
  misc_RNA (1)...(19): siRNA sense strand
auugagaucuuaucccuau

SEQ ID NO: 602202 - RNA, 19 nt, Homo sapiens
  misc_RNA (1)...(19): siRNA sense strand
gcagaaaauugggaaagaa

SEQ ID NO: 602203 - RNA, 19 nt, Homo sapiens
  misc_RNA (1)...(19): siRNA sense strand
agacacccuugaagaaguu

SEQ ID NO: 602204 - RNA, 19 nt, Homo sapiens
  misc_RNA (1)...(19): siRNA sense strand
caggaucuacgauaaggua

SEQ ID NO: 602205 - RNA, 19 nt, Homo sapiens
  misc_RNA (1)...(19): siRNA sense strand
guguggagcaugcuuauga

SEQ ID NO: 602206 - RNA, 19 nt, Homo sapiens
  misc_RNA (1)...(19): siRNA sense strand
gaaggagaggucugcauca

SEQ ID NO: 602207 - RNA, 19 nt, Homo sapiens
  misc_RNA (1)...(19): siRNA sense strand
gggcagcaaugggauguca

SEQ ID NO: 602208 - RNA, 19 nt, Homo sapiens
  misc_RNA (1)...(19): siRNA sense strand
gacaagcucaucuuugcaa

SEQ ID NO: 602209 - RNA, 19 nt, Homo sapiens
  misc_RNA (1)...(19): siRNA sense strand
aaacaggugucugauagag

SEQ ID NO: 602210 - RNA, 19 nt, Homo sapiens
  misc_RNA (1)...(19): siRNA sense strand
aacaaugaccuaacaaguu

SEQ ID NO: 602211 - RNA, 19 nt, Homo sapiens
  misc_RNA (1)...(19): siRNA sense strand
ugacaugaacuacuuuaca

SEQ ID NO: 602212 - RNA, 19 nt, Homo sapiens
  misc_RNA (1)...(19): siRNA sense strand
gcugacaugaacuacuuua

SEQ ID NO: 602213 - RNA, 19 nt, Homo sapiens
  misc_RNA (1)...(19): siRNA sense strand
guugcuggcugacgacaug

SEQ ID NO: 602214 - RNA, 19 nt, Homo sapiens
  misc_RNA (1)...(19): siRNA sense strand
gggagaagaguggaauuga

SEQ ID NO: 602215 - RNA, 19 nt, Homo sapiens
  misc_RNA (1)...(19): siRNA sense strand
gggcccugcuugggauaua

SEQ ID NO: 602216 - RNA, 19 nt, Homo sapiens
  misc_RNA (1)...(19): siRNA sense strand
cagaagaacaaugaccuaa

SEQ ID NO: 602217 - RNA, 19 nt, Homo sapiens
  misc_RNA (1)...(19): siRNA sense strand
gggaaagaaaguggccuua

SEQ ID NO: 602218 - RNA, 19 nt, Homo sapiens
  misc_RNA (1)...(19): siRNA sense strand
gaauacauugcaccagaga

SEQ ID NO: 602219 - RNA, 19 nt, Homo sapiens
  misc_RNA (1)...(19): siRNA sense strand
acaaacguguucaaaggau

SEQ ID NO: 602220 - RNA, 19 nt, Homo sapiens
  misc_RNA (1)...(19): siRNA sense strand
uagcuguaccucuguauga

SEQ ID NO: 602221 - RNA, 19 nt, Homo sapiens
  misc_RNA (1)...(19): siRNA sense strand
ucucagaugccaagacuau

SEQ ID NO: 602222 - RNA, 19 nt, Homo sapiens
  misc_RNA (1)...(19): siRNA sense strand
ggagucaaccaguguuaca

SEQ ID NO: 602223 - RNA, 19 nt, Homo sapiens
  misc_RNA (1)...(19): siRNA sense strand
uguugaagcuggcuguuuc

SEQ ID NO: 602224 - RNA, 19 nt, Homo sapiens
  misc_RNA (1)...(19): siRNA sense strand
uucaaaugcugcugccuuu

SEQ ID NO: 602225 - RNA, 19 nt, Homo sapiens
  misc_RNA (1)...(19): siRNA sense strand
caucguacauauugucaac

SEQ ID NO: 602226 - RNA, 19 nt, Homo sapiens
  misc_RNA (1)...(19): siRNA sense strand
uuagaagacuugcagaaaa

SEQ ID NO: 602227 - RNA, 19 nt, Homo sapiens
  misc_RNA (1)...(19): siRNA sense strand
gggaagccauuuuagaaga

SEQ ID NO: 602228 - RNA, 19 nt, Homo sapiens
  misc_RNA (1)...(19): siRNA sense strand
gaucugcauccugacauuu

SEQ ID NO: 602229 - RNA, 19 nt, Homo sapiens
  misc_RNA (1)...(19): siRNA sense strand
ccaaggagaauacauugca

SEQ ID NO: 602230 - RNA, 19 nt, Homo sapiens
  misc_RNA (1)...(19): siRNA sense strand
ggcggaaggguucguguaa

SEQ ID NO: 602231 - RNA, 19 nt, Homo sapiens
  misc_RNA (1)...(19): siRNA sense strand
cgucuuaccucuucuugac

SEQ ID NO: 602232 - RNA, 19 nt, Homo sapiens
  misc_RNA (1)...(19): siRNA sense strand
uuacacguacucuauggua

SEQ ID NO: 602233 - RNA, 19 nt, Homo sapiens
  misc_RNA (1)...(19): siRNA sense strand
ccagaagaacaaugaccua

SEQ ID NO: 602234 - RNA, 19 nt, Homo sapiens
  misc_RNA (1)...(19): siRNA sense strand
gauguacuucccucauuug

SEQ ID NO: 602235 - RNA, 19 nt, Homo sapiens
  misc_RNA (1)...(19): siRNA sense strand
acgugaagcuggaagaugu

SEQ ID NO: 602236 - RNA, 19 nt, Homo sapiens
  misc_RNA (1)...(19): siRNA sense strand
caaagaggacucgcugugu

SEQ ID NO: 602237 - RNA, 19 nt, Homo sapiens
  misc_RNA (1)...(19): siRNA sense strand
gcggaaggguucguguaau

SEQ ID NO: 602238 - RNA, 19 nt, Homo sapiens
  misc_RNA (1)...(19): siRNA sense strand
cagaagaccugagcgucau

SEQ ID NO: 602239 - RNA, 19 nt, Homo sapiens
  misc_RNA (1)...(19): siRNA sense strand
gaagaguggaauugagauc

SEQ ID NO: 602240 - RNA, 19 nt, Homo sapiens
  misc_RNA (1)...(19): siRNA sense strand
agccagaguuggauucuuc

SEQ ID NO: 602241 - RNA, 19 nt, Homo sapiens
  misc_RNA (1)...(19): siRNA sense strand
ccagagccauuuuccauug

SEQ ID NO: 602242 - RNA, 19 nt, Homo sapiens
  misc_RNA (1)...(19): siRNA sense strand
ucaaccaguguuacaaauu

SEQ ID NO: 602243 - RNA, 19 nt, Homo sapiens
  misc_RNA (1)...(19): siRNA sense strand
gcaccagagaagauagaaa

SEQ ID NO: 602244 - RNA, 19 nt, Homo sapiens
  misc_RNA (1)...(19): siRNA sense strand
cuuaacaggaucuacgaua

SEQ ID NO: 602245 - RNA, 19 nt, Homo sapiens
  misc_RNA (1)...(19): siRNA sense strand
gaacacgcccaacuacuuc

SEQ ID NO: 602246 - RNA, 19 nt, Homo sapiens
  misc_RNA (1)...(19): siRNA sense strand
caaugcagcucuccgaaca

SEQ ID NO: 602247 - RNA, 19 nt, Homo sapiens
  misc_RNA (1)...(19): siRNA sense strand
gggccuauauggagaacaa

SEQ ID NO: 602248 - RNA, 19 nt, Homo sapiens
  misc_RNA (1)...(19): siRNA sense strand
ucaaggagaaggagaagaa

SEQ ID NO: 602249 - RNA, 19 nt, Homo sapiens
  misc_RNA (1)...(19): siRNA sense strand
caacugcuccgccaaguca

SEQ ID NO: 602250 - RNA, 19 nt, Homo sapiens
  misc_RNA (1)...(19): siRNA sense strand
caucacagccuuccucucu

SEQ ID NO: 602251 - RNA, 19 nt, Homo sapiens
  misc_RNA (1)...(19): siRNA sense strand
ggaugaccauguaccucuu

SEQ ID NO: 602252 - RNA, 19 nt, Homo sapiens
  misc_RNA (1)...(19): siRNA sense strand
ggagaacacgcccaacuac

SEQ ID NO: 602253 - RNA, 19 nt, Homo sapiens
  misc_RNA (1)...(19): siRNA sense strand
gcccauggacuuugugaug

SEQ ID NO: 602254 - RNA, 19 nt, Homo sapiens
  misc_RNA (1)...(19): siRNA sense strand
ccucaucuacgacauggua

SEQ ID NO: 602255 - RNA, 19 nt, Homo sapiens
  misc_RNA (1)...(19): siRNA sense strand
uggccuggaugaccaugua

SEQ ID NO: 602256 - RNA, 19 nt, Homo sapiens
  misc_RNA (1)...(19): siRNA sense strand
agacccagcgcuccguuua

SEQ ID NO: 602257 - RNA, 19 nt, Homo sapiens
  misc_RNA (1)...(19): siRNA sense strand
gggcugacguuugccuuca

SEQ ID NO: 602258 - RNA, 19 nt, Homo sapiens
  misc_RNA (1)...(19): siRNA sense strand
agaacacgcccaacuacuu

SEQ ID NO: 602259 - RNA, 19 nt, Homo sapiens
  misc_RNA (1)...(19): siRNA sense strand
cuccauggaugaacacaau

SEQ ID NO: 602260 - RNA, 19 nt, Homo sapiens
  misc_RNA (1)...(19): siRNA sense strand
ugccagcccugcaggagaa

SEQ ID NO: 602261 - RNA, 19 nt, Homo sapiens
  misc_RNA (1)...(19): siRNA sense strand
guucguggcaucagagaga

SEQ ID NO: 602262 - RNA, 19 nt, Homo sapiens
  misc_RNA (1)...(19): siRNA sense strand
caacguguaucagccaacu

SEQ ID NO: 602263 - RNA, 19 nt, Homo sapiens
  misc_RNA (1)...(19): siRNA sense strand
ucuccgaacagcaggauuu

SEQ ID NO: 602264 - RNA, 19 nt, Homo sapiens
  misc_RNA (1)...(19): siRNA sense strand
ucacacugcuccugaugcu

SEQ ID NO: 602265 - RNA, 19 nt, Homo sapiens
  misc_RNA (1)...(19): siRNA sense strand
ccuacgagcccauggacuu

SEQ ID NO: 602266 - RNA, 19 nt, Homo sapiens
  misc_RNA (1)...(19): siRNA sense strand
gacguuugccuucaucauc

SEQ ID NO: 602267 - RNA, 19 nt, Homo sapiens
  misc_RNA (1)...(19): siRNA sense strand
acaaggccuucuccaugga

SEQ ID NO: 602268 - RNA, 19 nt, Homo sapiens
  misc_RNA (1)...(19): siRNA sense strand
gcugacguuugccuucauc

SEQ ID NO: 602269 - RNA, 19 nt, Homo sapiens
  misc_RNA (1)...(19): siRNA sense strand
cuacgagcccauggacuuu

SEQ ID NO: 602270 - RNA, 19 nt, Homo sapiens
  misc_RNA (1)...(19): siRNA sense strand
acccagcgcuccguuuaga

SEQ ID NO: 602271 - RNA, 19 nt, Homo sapiens
  misc_RNA (1)...(19): siRNA sense strand
aggagaacacgcccaacua

SEQ ID NO: 602272 - RNA, 19 nt, Homo sapiens
  misc_RNA (1)...(19): siRNA sense strand
guuuagaagcaacguguau

SEQ ID NO: 602273 - RNA, 19 nt, Homo sapiens
  misc_RNA (1)...(19): siRNA sense strand
ucaccuuccuccugcucuu

SEQ ID NO: 602274 - RNA, 19 nt, Homo sapiens
  misc_RNA (1)...(19): siRNA sense strand
ucacacaggaagacaccuu

SEQ ID NO: 602275 - RNA, 19 nt, Homo sapiens
  misc_RNA (1)...(19): siRNA sense strand
uuagaagcaacguguauca

SEQ ID NO: 602276 - RNA, 19 nt, Homo sapiens
  misc_RNA (1)...(19): siRNA sense strand
gagaacacgcccaacuacu

SEQ ID NO: 602277 - RNA, 19 nt, Homo sapiens
  misc_RNA (1)...(19): siRNA sense strand
gcgcuccguuuagaagcaa

SEQ ID NO: 602278 - RNA, 19 nt, Homo sapiens
  misc_RNA (1)...(19): siRNA sense strand
gcaaauaaaccaacacaua

SEQ ID NO: 602279 - RNA, 19 nt, Homo sapiens
  misc_RNA (1)...(19): siRNA sense strand
gaacgagacuucuuucuuc

SEQ ID NO: 602280 - RNA, 19 nt, Homo sapiens
  misc_RNA (1)...(19): siRNA sense strand
gcacagaaguagaaauugu

SEQ ID NO: 602281 - RNA, 19 nt, Homo sapiens
  misc_RNA (1)...(19): siRNA sense strand
gaauauuacuucaguguag

SEQ ID NO: 602282 - RNA, 19 nt, Homo sapiens
  misc_RNA (1)...(19): siRNA sense strand
agacuucucucaacugauu

SEQ ID NO: 602283 - RNA, 19 nt, Homo sapiens
  misc_RNA (1)...(19): siRNA sense strand
caacguaagagagcuaaua

SEQ ID NO: 602284 - RNA, 19 nt, Homo sapiens
  misc_RNA (1)...(19): siRNA sense strand
gaagugagggugguaauau

SEQ ID NO: 602285 - RNA, 19 nt, Homo sapiens
  misc_RNA (1)...(19): siRNA sense strand
gaaaugauacacgaaguug

SEQ ID NO: 602286 - RNA, 19 nt, Homo sapiens
  misc_RNA (1)...(19): siRNA sense strand
cuacaaaccuuaaucucau

SEQ ID NO: 602287 - RNA, 19 nt, Homo sapiens
  misc_RNA (1)...(19): siRNA sense strand
gaucaaccauuucaaacag

SEQ ID NO: 602288 - RNA, 19 nt, Homo sapiens
  misc_RNA (1)...(19): siRNA sense strand
gccaacaccaagugaauua

SEQ ID NO: 602289 - RNA, 19 nt, Homo sapiens
  misc_RNA (1)...(19): siRNA sense strand
caacagacuucucucaacu

SEQ ID NO: 602290 - RNA, 19 nt, Homo sapiens
  misc_RNA (1)...(19): siRNA sense strand
ugaaaggacugaucaacca

SEQ ID NO: 602291 - RNA, 19 nt, Homo sapiens
  misc_RNA (1)...(19): siRNA sense strand
aaagauggaugaacaaggu

SEQ ID NO: 602292 - RNA, 19 nt, Homo sapiens
  misc_RNA (1)...(19): siRNA sense strand
ggaacgagacuucuuucuu

SEQ ID NO: 602293 - RNA, 19 nt, Homo sapiens
  misc_RNA (1)...(19): siRNA sense strand
ggacugaucaaccauuuca

SEQ ID NO: 602294 - RNA, 19 nt, Homo sapiens
  misc_RNA (1)...(19): siRNA sense strand
gaucagagagucaagaaag

SEQ ID NO: 602295 - RNA, 19 nt, Homo sapiens
  misc_RNA (1)...(19): siRNA sense strand
ggauagcacagaaguagaa

SEQ ID NO: 602296 - RNA, 19 nt, Homo sapiens
  misc_RNA (1)...(19): siRNA sense strand
gagaaaugauacacgaagu

SEQ ID NO: 602297 - RNA, 19 nt, Homo sapiens
  misc_RNA (1)...(19): siRNA sense strand
ucaagaacauggugaaagg

SEQ ID NO: 602298 - RNA, 19 nt, Homo sapiens
  misc_RNA (1)...(19): siRNA sense strand
gaaguaacagugacagcaa

SEQ ID NO: 602299 - RNA, 19 nt, Homo sapiens
  misc_RNA (1)...(19): siRNA sense strand
uauccgagguuccuuuaga

SEQ ID NO: 602300 - RNA, 19 nt, Homo sapiens
  misc_RNA (1)...(19): siRNA sense strand
ccacuccacuuagauguug

SEQ ID NO: 602301 - RNA, 19 nt, Homo sapiens
  misc_RNA (1)...(19): siRNA sense strand
gauugauuguccagaguuu

SEQ ID NO: 602302 - RNA, 19 nt, Homo sapiens
  misc_RNA (1)...(19): siRNA sense strand
aaguagaaauuguggauga

SEQ ID NO: 602303 - RNA, 19 nt, Homo sapiens
  misc_RNA (1)...(19): siRNA sense strand
gaaggauagcacagaagua

SEQ ID NO: 602304 - RNA, 19 nt, Homo sapiens
  misc_RNA (1)...(19): siRNA sense strand
gaugacguuuccaguguga

SEQ ID NO: 602305 - RNA, 19 nt, Homo sapiens
  misc_RNA (1)...(19): siRNA sense strand
gaacagcucaagaugucaa

SEQ ID NO: 602306 - RNA, 19 nt, Homo sapiens
  misc_RNA (1)...(19): siRNA sense strand
cggaacagcucaagauguc

SEQ ID NO: 602307 - RNA, 19 nt, Homo sapiens
  misc_RNA (1)...(19): siRNA sense strand
uagcacagaaguagaaauu

SEQ ID NO: 602308 - RNA, 19 nt, Homo sapiens
  misc_RNA (1)...(19): siRNA sense strand
gaugucaaccugaagcaaa

SEQ ID NO: 602309 - RNA, 19 nt, Homo sapiens
  misc_RNA (1)...(19): siRNA sense strand
uagaggcacugaaggauag

SEQ ID NO: 602310 - RNA, 19 nt, Homo sapiens
  misc_RNA (1)...(19): siRNA sense strand
uaacagugacagcaaagaa

SEQ ID NO: 602311 - RNA, 19 nt, Homo sapiens
  misc_RNA (1)...(19): siRNA sense strand
gagcuaauaagcacaagug

SEQ ID NO: 602312 - RNA, 19 nt, Homo sapiens
  misc_RNA (1)...(19): siRNA sense strand
uagaaauuguggaugagaa

SEQ ID NO: 602313 - RNA, 19 nt, Homo sapiens
  misc_RNA (1)...(19): siRNA sense strand
acacauaacaauaggagaa

SEQ ID NO: 602314 - RNA, 19 nt, Homo sapiens
  misc_RNA (1)...(19): siRNA sense strand
aagaugacguuuccagugu

SEQ ID NO: 602315 - RNA, 19 nt, Homo sapiens
  misc_RNA (1)...(19): siRNA sense strand
acagacuucucucaacuga

SEQ ID NO: 602316 - RNA, 19 nt, Homo sapiens
  misc_RNA (1)...(19): siRNA sense strand
gaggcucagucaaguaauc

SEQ ID NO: 602317 - RNA, 19 nt, Homo sapiens
  misc_RNA (1)...(19): siRNA sense strand
ggacgaggcagaggaaauc

SEQ ID NO: 602318 - RNA, 19 nt, Homo sapiens
  misc_RNA (1)...(19): siRNA sense strand
ggguaccacuccacuuaga

SEQ ID NO: 602319 - RNA, 19 nt, Homo sapiens
  misc_RNA (1)...(19): siRNA sense strand
ugaagcaaauaaaccaaca

SEQ ID NO: 602320 - RNA, 19 nt, Homo sapiens
  misc_RNA (1)...(19): siRNA sense strand
ccaacagacuucucucaac

SEQ ID NO: 602321 - RNA, 19 nt, Homo sapiens
  misc_RNA (1)...(19): siRNA sense strand
ucaaccauuucaaacagaa

SEQ ID NO: 602322 - RNA, 19 nt, Homo sapiens
  misc_RNA (1)...(19): siRNA sense strand
ccaagugaauuagugaaca

SEQ ID NO: 602323 - RNA, 19 nt, Homo sapiens
  misc_RNA (1)...(19): siRNA sense strand
guaagagagcuaauaagca

SEQ ID NO: 602324 - RNA, 19 nt, Homo sapiens
  misc_RNA (1)...(19): siRNA sense strand
aaggacugaucaaccauuu

SEQ ID NO: 602325 - RNA, 19 nt, Homo sapiens
  misc_RNA (1)...(19): siRNA sense strand
aaagggaugaucaagauga

SEQ ID NO: 602326 - RNA, 19 nt, Homo sapiens
  misc_RNA (1)...(19): siRNA sense strand
ucaaguaaucaacguaaga

SEQ ID NO: 602327 - RNA, 19 nt, Homo sapiens
  misc_RNA (1)...(19): siRNA sense strand
gcagugugccaccaacaga

SEQ ID NO: 602328 - RNA, 19 nt, Homo sapiens
  misc_RNA (1)...(19): siRNA sense strand
gcucucacuacaaaccuua

SEQ ID NO: 602329 - RNA, 19 nt, Homo sapiens
  misc_RNA (1)...(19): siRNA sense strand
gguguauccuguggaagaa

SEQ ID NO: 602330 - RNA, 19 nt, Homo sapiens
  misc_RNA (1)...(19): siRNA sense strand
cuuuagaggucgaggaaga

SEQ ID NO: 602331 - RNA, 19 nt, Homo sapiens
  misc_RNA (1)...(19): siRNA sense strand
gaaguuggaagcgagauag

SEQ ID NO: 602332 - RNA, 19 nt, Homo sapiens
  misc_RNA (1)...(19): siRNA sense strand
guauuacuaugaugauggu

SEQ ID NO: 602333 - RNA, 19 nt, Homo sapiens
  misc_RNA (1)...(19): siRNA sense strand
ggggaaagauggaugaaca

SEQ ID NO: 602334 - RNA, 19 nt, Homo sapiens
  misc_RNA (1)...(19): siRNA sense strand
uuagaggcacugaaggaua

SEQ ID NO: 602335 - RNA, 19 nt, Homo sapiens
  misc_RNA (1)...(19): siRNA sense strand
guaccacuccacuuagaug

SEQ ID NO: 602336 - RNA, 19 nt, Homo sapiens
  misc_RNA (1)...(19): siRNA sense strand
uaauauccgagguuccuuu

SEQ ID NO: 602337 - RNA, 19 nt, Homo sapiens
  misc_RNA (1)...(19): siRNA sense strand
cgaaguuggaagcgagaua

SEQ ID NO: 602338 - RNA, 19 nt, Homo sapiens
  misc_RNA (1)...(19): siRNA sense strand
cauaacaauaggagaaaug

SEQ ID NO: 602339 - RNA, 19 nt, Homo sapiens
  misc_RNA (1)...(19): siRNA sense strand
cucaagaugucaaccugaa

SEQ ID NO: 602340 - RNA, 19 nt, Homo sapiens
  misc_RNA (1)...(19): siRNA sense strand
gauguuguaagaucagaga

SEQ ID NO: 602341 - RNA, 19 nt, Homo sapiens
  misc_RNA (1)...(19): siRNA sense strand
gaagagaagguugaaaaga

SEQ ID NO: 602342 - RNA, 19 nt, Homo sapiens
  misc_RNA (1)...(19): siRNA sense strand
uucaggcucucacuacaaa

SEQ ID NO: 602343 - RNA, 19 nt, Homo sapiens
  misc_RNA (1)...(19): siRNA sense strand
ggaaagauggaugaacaag

SEQ ID NO: 602344 - RNA, 19 nt, Homo sapiens
  misc_RNA (1)...(19): siRNA sense strand
aaguaacagugacagcaaa

SEQ ID NO: 602345 - RNA, 19 nt, Homo sapiens
  misc_RNA (1)...(19): siRNA sense strand
caacaccaagugaauuagu

SEQ ID NO: 602346 - RNA, 19 nt, Homo sapiens
  misc_RNA (1)...(19): siRNA sense strand
gaguauauuaagcgucaaa

SEQ ID NO: 602347 - RNA, 19 nt, Homo sapiens
  misc_RNA (1)...(19): siRNA sense strand
agaaaugauacacgaaguu

SEQ ID NO: 602348 - RNA, 19 nt, Homo sapiens
  misc_RNA (1)...(19): siRNA sense strand
caagugaauuagugaacac

SEQ ID NO: 602349 - RNA, 19 nt, Homo sapiens
  misc_RNA (1)...(19): siRNA sense strand
uuacuaugaugaugguaca

SEQ ID NO: 602350 - RNA, 19 nt, Homo sapiens
  misc_RNA (1)...(19): siRNA sense strand
caaacagaacuuaauacca

SEQ ID NO: 602351 - RNA, 19 nt, Homo sapiens
  misc_RNA (1)...(19): siRNA sense strand
ccauuucaaacagaacuua

SEQ ID NO: 602352 - RNA, 19 nt, Homo sapiens
  misc_RNA (1)...(19): siRNA sense strand
gaaaggacugaucaaccau

SEQ ID NO: 602353 - RNA, 19 nt, Homo sapiens
  misc_RNA (1)...(19): siRNA sense strand
agaccuggaucccggaaca

SEQ ID NO: 602354 - RNA, 19 nt, Homo sapiens
  misc_RNA (1)...(19): siRNA sense strand
agaaauuguggaugagaaa

SEQ ID NO: 602355 - RNA, 19 nt, Homo sapiens
  misc_RNA (1)...(19): siRNA sense strand
acugaaggauagcacagaa

SEQ ID NO: 602356 - RNA, 19 nt, Homo sapiens
  misc_RNA (1)...(19): siRNA sense strand
caucuuagaggcacugaag

SEQ ID NO: 602357 - RNA, 19 nt, Homo sapiens
  misc_RNA (1)...(19): siRNA sense strand
gggaaagauggaugaacaa

SEQ ID NO: 602358 - RNA, 19 nt, Homo sapiens
  misc_RNA (1)...(19): siRNA sense strand
aauauccgagguuccuuua

SEQ ID NO: 602359 - RNA, 19 nt, Homo sapiens
  misc_RNA (1)...(19): siRNA sense strand
agaagugagggugguaaua

SEQ ID NO: 602360 - RNA, 19 nt, Homo sapiens
  misc_RNA (1)...(19): siRNA sense strand
gagaagugagggugguaau

SEQ ID NO: 602361 - RNA, 19 nt, Homo sapiens
  misc_RNA (1)...(19): siRNA sense strand
guuggaagcgagauagaga

SEQ ID NO: 602362 - RNA, 19 nt, Homo sapiens
  misc_RNA (1)...(19): siRNA sense strand
gaaaaccgggaaacaaaau

SEQ ID NO: 602363 - RNA, 19 nt, Homo sapiens
  misc_RNA (1)...(19): siRNA sense strand
guagaaauuguggaugaga

SEQ ID NO: 602364 - RNA, 19 nt, Homo sapiens
  misc_RNA (1)...(19): siRNA sense strand
ccucagccaaggaaauaaa

SEQ ID NO: 602365 - RNA, 19 nt, Homo sapiens
  misc_RNA (1)...(19): siRNA sense strand
accuuaaucucaucuuaga

SEQ ID NO: 602366 - RNA, 19 nt, Homo sapiens
  misc_RNA (1)...(19): siRNA sense strand
aacguaagagagcuaauaa

SEQ ID NO: 602367 - RNA, 19 nt, Homo sapiens
  misc_RNA (1)...(19): siRNA sense strand
uuaaaugguccuggugaaa

SEQ ID NO: 602368 - RNA, 19 nt, Homo sapiens
  misc_RNA (1)...(19): siRNA sense strand
aaccaacacauaacaauag

SEQ ID NO: 602369 - RNA, 19 nt, Homo sapiens
  misc_RNA (1)...(19): siRNA sense strand
ggccaacaccaagugaauu

SEQ ID NO: 602370 - RNA, 19 nt, Homo sapiens
  misc_RNA (1)...(19): siRNA sense strand
ugaaggauagcacagaagu

SEQ ID NO: 602371 - RNA, 19 nt, Homo sapiens
  misc_RNA (1)...(19): siRNA sense strand
acuacaaaccuuaaucuca

SEQ ID NO: 602372 - RNA, 19 nt, Homo sapiens
  misc_RNA (1)...(19): siRNA sense strand
aaugauacacgaaguugga

SEQ ID NO: 602373 - RNA, 19 nt, Homo sapiens
  misc_RNA (1)...(19): siRNA sense strand
cguaagagagcuaauaagc

SEQ ID NO: 602374 - RNA, 19 nt, Homo sapiens
  misc_RNA (1)...(19): siRNA sense strand
ucacuacaaaccuuaaucu

SEQ ID NO: 602375 - RNA, 19 nt, Homo sapiens
  misc_RNA (1)...(19): siRNA sense strand
gaugaucaagaugacguuu

SEQ ID NO: 602376 - RNA, 19 nt, Homo sapiens
  misc_RNA (1)...(19): siRNA sense strand
agaaguagaaauuguggau

SEQ ID NO: 602377 - RNA, 19 nt, Homo sapiens
  misc_RNA (1)...(19): siRNA sense strand
gauagcacagaaguagaaa

SEQ ID NO: 602378 - RNA, 19 nt, Homo sapiens
  misc_RNA (1)...(19): siRNA sense strand
gcaaauaaaccaacacaua

SEQ ID NO: 602379 - RNA, 19 nt, Homo sapiens
  misc_RNA (1)...(19): siRNA sense strand
gaacgagacuucuuucuuc

SEQ ID NO: 602380 - RNA, 19 nt, Homo sapiens
  misc_RNA (1)...(19): siRNA sense strand
gcacagaaguagaaauugu

SEQ ID NO: 602381 - RNA, 19 nt, Homo sapiens
  misc_RNA (1)...(19): siRNA sense strand
gaauauuacuucaguguag

SEQ ID NO: 602382 - RNA, 19 nt, Homo sapiens
  misc_RNA (1)...(19): siRNA sense strand
agacuucucucaacugauu

SEQ ID NO: 602383 - RNA, 19 nt, Homo sapiens
  misc_RNA (1)...(19): siRNA sense strand
caacguaagagagcuaaua

SEQ ID NO: 602384 - RNA, 19 nt, Homo sapiens
  misc_RNA (1)...(19): siRNA sense strand
gaagugagggugguaauau

SEQ ID NO: 602385 - RNA, 19 nt, Homo sapiens
  misc_RNA (1)...(19): siRNA sense strand
gaaaugauacacgaaguug

SEQ ID NO: 602386 - RNA, 19 nt, Homo sapiens
  misc_RNA (1)...(19): siRNA sense strand
cuacaaaccuuaaucucau

SEQ ID NO: 602387 - RNA, 19 nt, Homo sapiens
  misc_RNA (1)...(19): siRNA sense strand
gaucaaccauuucaaacag

SEQ ID NO: 602388 - RNA, 19 nt, Homo sapiens
  misc_RNA (1)...(19): siRNA sense strand
gccaacaccaagugaauua

SEQ ID NO: 602389 - RNA, 19 nt, Homo sapiens
  misc_RNA (1)...(19): siRNA sense strand
caacagacuucucucaacu

SEQ ID NO: 602390 - RNA, 19 nt, Homo sapiens
  misc_RNA (1)...(19): siRNA sense strand
ugaaaggacugaucaacca

SEQ ID NO: 602391 - RNA, 19 nt, Homo sapiens
  misc_RNA (1)...(19): siRNA sense strand
aaagauggaugaacaaggu

SEQ ID NO: 602392 - RNA, 19 nt, Homo sapiens
  misc_RNA (1)...(19): siRNA sense strand
ggaacgagacuucuuucuu

SEQ ID NO: 602393 - RNA, 19 nt, Homo sapiens
  misc_RNA (1)...(19): siRNA sense strand
ggacugaucaaccauuuca

SEQ ID NO: 602394 - RNA, 19 nt, Homo sapiens
  misc_RNA (1)...(19): siRNA sense strand
gaucagagagucaagaaag

SEQ ID NO: 602395 - RNA, 19 nt, Homo sapiens
  misc_RNA (1)...(19): siRNA sense strand
ggauagcacagaaguagaa

SEQ ID NO: 602396 - RNA, 19 nt, Homo sapiens
  misc_RNA (1)...(19): siRNA sense strand
gagaaaugauacacgaagu

SEQ ID NO: 602397 - RNA, 19 nt, Homo sapiens
  misc_RNA (1)...(19): siRNA sense strand
ucaagaacauggugaaagg

SEQ ID NO: 602398 - RNA, 19 nt, Homo sapiens
  misc_RNA (1)...(19): siRNA sense strand
gaaguaacagugacagcaa

SEQ ID NO: 602399 - RNA, 19 nt, Homo sapiens
  misc_RNA (1)...(19): siRNA sense strand
uauccgagguuccuuuaga

SEQ ID NO: 602400 - RNA, 19 nt, Homo sapiens
  misc_RNA (1)...(19): siRNA sense strand
ccacuccacuuagauguug

SEQ ID NO: 602401 - RNA, 19 nt, Homo sapiens
  misc_RNA (1)...(19): siRNA sense strand
gauugauuguccagaguuu

SEQ ID NO: 602402 - RNA, 19 nt, Homo sapiens
  misc_RNA (1)...(19): siRNA sense strand
aaguagaaauuguggauga

SEQ ID NO: 602403 - RNA, 19 nt, Homo sapiens
  misc_RNA (1)...(19): siRNA sense strand
gaaggauagcacagaagua

SEQ ID NO: 602404 - RNA, 19 nt, Homo sapiens
  misc_RNA (1)...(19): siRNA sense strand
gaugacguuuccaguguga

SEQ ID NO: 602405 - RNA, 19 nt, Homo sapiens
  misc_RNA (1)...(19): siRNA sense strand
gaacagcucaagaugucaa

SEQ ID NO: 602406 - RNA, 19 nt, Homo sapiens
  misc_RNA (1)...(19): siRNA sense strand
cggaacagcucaagauguc

SEQ ID NO: 602407 - RNA, 19 nt, Homo sapiens
  misc_RNA (1)...(19): siRNA sense strand
uagcacagaaguagaaauu

SEQ ID NO: 602408 - RNA, 19 nt, Homo sapiens
  misc_RNA (1)...(19): siRNA sense strand
gaugucaaccugaagcaaa

SEQ ID NO: 602409 - RNA, 19 nt, Homo sapiens
  misc_RNA (1)...(19): siRNA sense strand
uagaggcacugaaggauag

SEQ ID NO: 602410 - RNA, 19 nt, Homo sapiens
  misc_RNA (1)...(19): siRNA sense strand
uaacagugacagcaaagaa

SEQ ID NO: 602411 - RNA, 19 nt, Homo sapiens
  misc_RNA (1)...(19): siRNA sense strand
gagcuaauaagcacaagug

SEQ ID NO: 602412 - RNA, 19 nt, Homo sapiens
  misc_RNA (1)...(19): siRNA sense strand
uagaaauuguggaugagaa

SEQ ID NO: 602413 - RNA, 19 nt, Homo sapiens
  misc_RNA (1)...(19): siRNA sense strand
acacauaacaauaggagaa

SEQ ID NO: 602414 - RNA, 19 nt, Homo sapiens
  misc_RNA (1)...(19): siRNA sense strand
aagaugacguuuccagugu

SEQ ID NO: 602415 - RNA, 19 nt, Homo sapiens
  misc_RNA (1)...(19): siRNA sense strand
acagacuucucucaacuga

SEQ ID NO: 602416 - RNA, 19 nt, Homo sapiens
  misc_RNA (1)...(19): siRNA sense strand
gaggcucagucaaguaauc

SEQ ID NO: 602417 - RNA, 19 nt, Homo sapiens
  misc_RNA (1)...(19): siRNA sense strand
ggacgaggcagaggaaauc

SEQ ID NO: 602418 - RNA, 19 nt, Homo sapiens
  misc_RNA (1)...(19): siRNA sense strand
ggguaccacuccacuuaga

SEQ ID NO: 602419 - RNA, 19 nt, Homo sapiens
  misc_RNA (1)...(19): siRNA sense strand
ugaagcaaauaaaccaaca

SEQ ID NO: 602420 - RNA, 19 nt, Homo sapiens
  misc_RNA (1)...(19): siRNA sense strand
ccaacagacuucucucaac

SEQ ID NO: 602421 - RNA, 19 nt, Homo sapiens
  misc_RNA (1)...(19): siRNA sense strand
ucaaccauuucaaacagaa

SEQ ID NO: 602422 - RNA, 19 nt, Homo sapiens
  misc_RNA (1)...(19): siRNA sense strand
ccaagugaauuagugaaca

SEQ ID NO: 602423 - RNA, 19 nt, Homo sapiens
  misc_RNA (1)...(19): siRNA sense strand
guaagagagcuaauaagca

SEQ ID NO: 602424 - RNA, 19 nt, Homo sapiens
  misc_RNA (1)...(19): siRNA sense strand
aaggacugaucaaccauuu

SEQ ID NO: 602425 - RNA, 19 nt, Homo sapiens
  misc_RNA (1)...(19): siRNA sense strand
aaagggaugaucaagauga

SEQ ID NO: 602426 - RNA, 19 nt, Homo sapiens
  misc_RNA (1)...(19): siRNA sense strand
ucaaguaaucaacguaaga

SEQ ID NO: 602427 - RNA, 19 nt, Homo sapiens
  misc_RNA (1)...(19): siRNA sense strand
gcagugugccaccaacaga

SEQ ID NO: 602428 - RNA, 19 nt, Homo sapiens
  misc_RNA (1)...(19): siRNA sense strand
gcucucacuacaaaccuua

SEQ ID NO: 602429 - RNA, 19 nt, Homo sapiens
  misc_RNA (1)...(19): siRNA sense strand
gguguauccuguggaagaa

SEQ ID NO: 602430 - RNA, 19 nt, Homo sapiens
  misc_RNA (1)...(19): siRNA sense strand
cuuuagaggucgaggaaga

SEQ ID NO: 602431 - RNA, 19 nt, Homo sapiens
  misc_RNA (1)...(19): siRNA sense strand
gaaguuggaagcgagauag

SEQ ID NO: 602432 - RNA, 19 nt, Homo sapiens
  misc_RNA (1)...(19): siRNA sense strand
guauuacuaugaugauggu

SEQ ID NO: 602433 - RNA, 19 nt, Homo sapiens
  misc_RNA (1)...(19): siRNA sense strand
ggggaaagauggaugaaca

SEQ ID NO: 602434 - RNA, 19 nt, Homo sapiens
  misc_RNA (1)...(19): siRNA sense strand
uuagaggcacugaaggaua

SEQ ID NO: 602435 - RNA, 19 nt, Homo sapiens
  misc_RNA (1)...(19): siRNA sense strand
guaccacuccacuuagaug

SEQ ID NO: 602436 - RNA, 19 nt, Homo sapiens
  misc_RNA (1)...(19): siRNA sense strand
uaauauccgagguuccuuu

SEQ ID NO: 602437 - RNA, 19 nt, Homo sapiens
  misc_RNA (1)...(19): siRNA sense strand
cgaaguuggaagcgagaua

SEQ ID NO: 602438 - RNA, 19 nt, Homo sapiens
  misc_RNA (1)...(19): siRNA sense strand
cauaacaauaggagaaaug

SEQ ID NO: 602439 - RNA, 19 nt, Homo sapiens
  misc_RNA (1)...(19): siRNA sense strand
cucaagaugucaaccugaa

SEQ ID NO: 602440 - RNA, 19 nt, Homo sapiens
  misc_RNA (1)...(19): siRNA sense strand
gauguuguaagaucagaga

SEQ ID NO: 602441 - RNA, 19 nt, Homo sapiens
  misc_RNA (1)...(19): siRNA sense strand
gaagagaagguugaaaaga

SEQ ID NO: 602442 - RNA, 19 nt, Homo sapiens
  misc_RNA (1)...(19): siRNA sense strand
uucaggcucucacuacaaa

SEQ ID NO: 602443 - RNA, 19 nt, Homo sapiens
  misc_RNA (1)...(19): siRNA sense strand
ggaaagauggaugaacaag

SEQ ID NO: 602444 - RNA, 19 nt, Homo sapiens
  misc_RNA (1)...(19): siRNA sense strand
aaguaacagugacagcaaa

SEQ ID NO: 602445 - RNA, 19 nt, Homo sapiens
  misc_RNA (1)...(19): siRNA sense strand
caacaccaagugaauuagu

SEQ ID NO: 602446 - RNA, 19 nt, Homo sapiens
  misc_RNA (1)...(19): siRNA sense strand
gaguauauuaagcgucaaa

SEQ ID NO: 602447 - RNA, 19 nt, Homo sapiens
  misc_RNA (1)...(19): siRNA sense strand
agaaaugauacacgaaguu

SEQ ID NO: 602448 - RNA, 19 nt, Homo sapiens
  misc_RNA (1)...(19): siRNA sense strand
caagugaauuagugaacac

SEQ ID NO: 602449 - RNA, 19 nt, Homo sapiens
  misc_RNA (1)...(19): siRNA sense strand
uuacuaugaugaugguaca

SEQ ID NO: 602450 - RNA, 19 nt, Homo sapiens
  misc_RNA (1)...(19): siRNA sense strand
caaacagaacuuaauacca

SEQ ID NO: 602451 - RNA, 19 nt, Homo sapiens
  misc_RNA (1)...(19): siRNA sense strand
ccauuucaaacagaacuua

SEQ ID NO: 602452 - RNA, 19 nt, Homo sapiens
  misc_RNA (1)...(19): siRNA sense strand
gaaaggacugaucaaccau

SEQ ID NO: 602453 - RNA, 19 nt, Homo sapiens
  misc_RNA (1)...(19): siRNA sense strand
agaccuggaucccggaaca

SEQ ID NO: 602454 - RNA, 19 nt, Homo sapiens
  misc_RNA (1)...(19): siRNA sense strand
agaaauuguggaugagaaa

SEQ ID NO: 602455 - RNA, 19 nt, Homo sapiens
  misc_RNA (1)...(19): siRNA sense strand
acugaaggauagcacagaa

SEQ ID NO: 602456 - RNA, 19 nt, Homo sapiens
  misc_RNA (1)...(19): siRNA sense strand
caucuuagaggcacugaag

SEQ ID NO: 602457 - RNA, 19 nt, Homo sapiens
  misc_RNA (1)...(19): siRNA sense strand
gggaaagauggaugaacaa

SEQ ID NO: 602458 - RNA, 19 nt, Homo sapiens
  misc_RNA (1)...(19): siRNA sense strand
aauauccgagguuccuuua

SEQ ID NO: 602459 - RNA, 19 nt, Homo sapiens
  misc_RNA (1)...(19): siRNA sense strand
agaagugagggugguaaua

SEQ ID NO: 602460 - RNA, 19 nt, Homo sapiens
  misc_RNA (1)...(19): siRNA sense strand
gagaagugagggugguaau

SEQ ID NO: 602461 - RNA, 19 nt, Homo sapiens
  misc_RNA (1)...(19): siRNA sense strand
guuggaagcgagauagaga

SEQ ID NO: 602462 - RNA, 19 nt, Homo sapiens
  misc_RNA (1)...(19): siRNA sense strand
gaaaaccgggaaacaaaau

SEQ ID NO: 602463 - RNA, 19 nt, Homo sapiens
  misc_RNA (1)...(19): siRNA sense strand
guagaaauuguggaugaga

SEQ ID NO: 602464 - RNA, 19 nt, Homo sapiens
  misc_RNA (1)...(19): siRNA sense strand
ccucagccaaggaaauaaa

SEQ ID NO: 602465 - RNA, 19 nt, Homo sapiens
  misc_RNA (1)...(19): siRNA sense strand
accuuaaucucaucuuaga

SEQ ID NO: 602466 - RNA, 19 nt, Homo sapiens
  misc_RNA (1)...(19): siRNA sense strand
aacguaagagagcuaauaa

SEQ ID NO: 602467 - RNA, 19 nt, Homo sapiens
  misc_RNA (1)...(19): siRNA sense strand
uuaaaugguccuggugaaa

SEQ ID NO: 602468 - RNA, 19 nt, Homo sapiens
  misc_RNA (1)...(19): siRNA sense strand
aaccaacacauaacaauag

SEQ ID NO: 602469 - RNA, 19 nt, Homo sapiens
  misc_RNA (1)...(19): siRNA sense strand
ggccaacaccaagugaauu

SEQ ID NO: 602470 - RNA, 19 nt, Homo sapiens
  misc_RNA (1)...(19): siRNA sense strand
ugaaggauagcacagaagu

SEQ ID NO: 602471 - RNA, 19 nt, Homo sapiens
  misc_RNA (1)...(19): siRNA sense strand
acuacaaaccuuaaucuca

SEQ ID NO: 602472 - RNA, 19 nt, Homo sapiens
  misc_RNA (1)...(19): siRNA sense strand
aaugauacacgaaguugga

SEQ ID NO: 602473 - RNA, 19 nt, Homo sapiens
  misc_RNA (1)...(19): siRNA sense strand
cguaagagagcuaauaagc

SEQ ID NO: 602474 - RNA, 19 nt, Homo sapiens
  misc_RNA (1)...(19): siRNA sense strand
ucacuacaaaccuuaaucu

SEQ ID NO: 602475 - RNA, 19 nt, Homo sapiens
  misc_RNA (1)...(19): siRNA sense strand
gaugaucaagaugacguuu

SEQ ID NO: 602476 - RNA, 19 nt, Homo sapiens
  misc_RNA (1)...(19): siRNA sense strand
agaaguagaaauuguggau

SEQ ID NO: 602477 - RNA, 19 nt, Homo sapiens
  misc_RNA (1)...(19): siRNA sense strand
gauagcacagaaguagaaa

SEQ ID NO: 602478 - RNA, 19 nt, Homo sapiens
  misc_RNA (1)...(19): siRNA sense strand
gcaaauaaaccaacacaua

SEQ ID NO: 602479 - RNA, 19 nt, Homo sapiens
  misc_RNA (1)...(19): siRNA sense strand
gaacgagacuucuuucuuc

SEQ ID NO: 602480 - RNA, 19 nt, Homo sapiens
  misc_RNA (1)...(19): siRNA sense strand
gcacagaaguagaaauugu

SEQ ID NO: 602481 - RNA, 19 nt, Homo sapiens
  misc_RNA (1)...(19): siRNA sense strand
gaauauuacuucaguguag

SEQ ID NO: 602482 - RNA, 19 nt, Homo sapiens
  misc_RNA (1)...(19): siRNA sense strand
agacuucucucaacugauu

SEQ ID NO: 602483 - RNA, 19 nt, Homo sapiens
  misc_RNA (1)...(19): siRNA sense strand
caacguaagagagcuaaua

SEQ ID NO: 602484 - RNA, 19 nt, Homo sapiens
  misc_RNA (1)...(19): siRNA sense strand
gaagugagggugguaauau

SEQ ID NO: 602485 - RNA, 19 nt, Homo sapiens
  misc_RNA (1)...(19): siRNA sense strand
gaaaugauacacgaaguug

SEQ ID NO: 602486 - RNA, 19 nt, Homo sapiens
  misc_RNA (1)...(19): siRNA sense strand
cuacaaaccuuaaucucau

SEQ ID NO: 602487 - RNA, 19 nt, Homo sapiens
  misc_RNA (1)...(19): siRNA sense strand
gaucaaccauuucaaacag

SEQ ID NO: 602488 - RNA, 19 nt, Homo sapiens
  misc_RNA (1)...(19): siRNA sense strand
gccaacaccaagugaauua

SEQ ID NO: 602489 - RNA, 19 nt, Homo sapiens
  misc_RNA (1)...(19): siRNA sense strand
caacagacuucucucaacu

SEQ ID NO: 602490 - RNA, 19 nt, Homo sapiens
  misc_RNA (1)...(19): siRNA sense strand
ugaaaggacugaucaacca

SEQ ID NO: 602491 - RNA, 19 nt, Homo sapiens
  misc_RNA (1)...(19): siRNA sense strand
aaagauggaugaacaaggu

SEQ ID NO: 602492 - RNA, 19 nt, Homo sapiens
  misc_RNA (1)...(19): siRNA sense strand
ggaacgagacuucuuucuu

SEQ ID NO: 602493 - RNA, 19 nt, Homo sapiens
  misc_RNA (1)...(19): siRNA sense strand
ggacugaucaaccauuuca

SEQ ID NO: 602494 - RNA, 19 nt, Homo sapiens
  misc_RNA (1)...(19): siRNA sense strand
gaucagagagucaagaaag

SEQ ID NO: 602495 - RNA, 19 nt, Homo sapiens
  misc_RNA (1)...(19): siRNA sense strand
ggauagcacagaaguagaa

SEQ ID NO: 602496 - RNA, 19 nt, Homo sapiens
  misc_RNA (1)...(19): siRNA sense strand
gagaaaugauacacgaagu

SEQ ID NO: 602497 - RNA, 19 nt, Homo sapiens
  misc_RNA (1)...(19): siRNA sense strand
ucaagaacauggugaaagg

SEQ ID NO: 602498 - RNA, 19 nt, Homo sapiens
  misc_RNA (1)...(19): siRNA sense strand
gaaguaacagugacagcaa

SEQ ID NO: 602499 - RNA, 19 nt, Homo sapiens
  misc_RNA (1)...(19): siRNA sense strand
uauccgagguuccuuuaga

SEQ ID NO: 602500 - RNA, 19 nt, Homo sapiens
  misc_RNA (1)...(19): siRNA sense strand
ccacuccacuuagauguug

SEQ ID NO: 602501 - RNA, 19 nt, Homo sapiens
  misc_RNA (1)...(19): siRNA sense strand
gauugauuguccagaguuu

SEQ ID NO: 602502 - RNA, 19 nt, Homo sapiens
  misc_RNA (1)...(19): siRNA sense strand
aaguagaaauuguggauga

SEQ ID NO: 602503 - RNA, 19 nt, Homo sapiens
  misc_RNA (1)...(19): siRNA sense strand
gaaggauagcacagaagua

SEQ ID NO: 602504 - RNA, 19 nt, Homo sapiens
  misc_RNA (1)...(19): siRNA sense strand
gaugacguuuccaguguga

SEQ ID NO: 602505 - RNA, 19 nt, Homo sapiens
  misc_RNA (1)...(19): siRNA sense strand
gaacagcucaagaugucaa

SEQ ID NO: 602506 - RNA, 19 nt, Homo sapiens
  misc_RNA (1)...(19): siRNA sense strand
cggaacagcucaagauguc

SEQ ID NO: 602507 - RNA, 19 nt, Homo sapiens
  misc_RNA (1)...(19): siRNA sense strand
uagcacagaaguagaaauu

SEQ ID NO: 602508 - RNA, 19 nt, Homo sapiens
  misc_RNA (1)...(19): siRNA sense strand
gaugucaaccugaagcaaa

SEQ ID NO: 602509 - RNA, 19 nt, Homo sapiens
  misc_RNA (1)...(19): siRNA sense strand
uagaggcacugaaggauag

SEQ ID NO: 602510 - RNA, 19 nt, Homo sapiens
  misc_RNA (1)...(19): siRNA sense strand
uaacagugacagcaaagaa

SEQ ID NO: 602511 - RNA, 19 nt, Homo sapiens
  misc_RNA (1)...(19): siRNA sense strand
gagcuaauaagcacaagug

SEQ ID NO: 602512 - RNA, 19 nt, Homo sapiens
  misc_RNA (1)...(19): siRNA sense strand
uagaaauuguggaugagaa

SEQ ID NO: 602513 - RNA, 19 nt, Homo sapiens
  misc_RNA (1)...(19): siRNA sense strand
acacauaacaauaggagaa

SEQ ID NO: 602514 - RNA, 19 nt, Homo sapiens
  misc_RNA (1)...(19): siRNA sense strand
aagaugacguuuccagugu

SEQ ID NO: 602515 - RNA, 19 nt, Homo sapiens
  misc_RNA (1)...(19): siRNA sense strand
acagacuucucucaacuga

SEQ ID NO: 602516 - RNA, 19 nt, Homo sapiens
  misc_RNA (1)...(19): siRNA sense strand
gaggcucagucaaguaauc

SEQ ID NO: 602517 - RNA, 19 nt, Homo sapiens
  misc_RNA (1)...(19): siRNA sense strand
ggacgaggcagaggaaauc

SEQ ID NO: 602518 - RNA, 19 nt, Homo sapiens
  misc_RNA (1)...(19): siRNA sense strand
ggguaccacuccacuuaga

SEQ ID NO: 602519 - RNA, 19 nt, Homo sapiens
  misc_RNA (1)...(19): siRNA sense strand
ugaagcaaauaaaccaaca

SEQ ID NO: 602520 - RNA, 19 nt, Homo sapiens
  misc_RNA (1)...(19): siRNA sense strand
ccaacagacuucucucaac

SEQ ID NO: 602521 - RNA, 19 nt, Homo sapiens
  misc_RNA (1)...(19): siRNA sense strand
ucaaccauuucaaacagaa

SEQ ID NO: 602522 - RNA, 19 nt, Homo sapiens
  misc_RNA (1)...(19): siRNA sense strand
ccaagugaauuagugaaca

SEQ ID NO: 602523 - RNA, 19 nt, Homo sapiens
  misc_RNA (1)...(19): siRNA sense strand
guaagagagcuaauaagca

SEQ ID NO: 602524 - RNA, 19 nt, Homo sapiens
  misc_RNA (1)...(19): siRNA sense strand
aaggacugaucaaccauuu

SEQ ID NO: 602525 - RNA, 19 nt, Homo sapiens
  misc_RNA (1)...(19): siRNA sense strand
aaagggaugaucaagauga

SEQ ID NO: 602526 - RNA, 19 nt, Homo sapiens
  misc_RNA (1)...(19): siRNA sense strand
ucaaguaaucaacguaaga

SEQ ID NO: 602527 - RNA, 19 nt, Homo sapiens
  misc_RNA (1)...(19): siRNA sense strand
gcagugugccaccaacaga

SEQ ID NO: 602528 - RNA, 19 nt, Homo sapiens
  misc_RNA (1)...(19): siRNA sense strand
gcucucacuacaaaccuua

SEQ ID NO: 602529 - RNA, 19 nt, Homo sapiens
  misc_RNA (1)...(19): siRNA sense strand
gguguauccuguggaagaa

SEQ ID NO: 602530 - RNA, 19 nt, Homo sapiens
  misc_RNA (1)...(19): siRNA sense strand
cuuuagaggucgaggaaga

SEQ ID NO: 602531 - RNA, 19 nt, Homo sapiens
  misc_RNA (1)...(19): siRNA sense strand
gaaguuggaagcgagauag

SEQ ID NO: 602532 - RNA, 19 nt, Homo sapiens
  misc_RNA (1)...(19): siRNA sense strand
guauuacuaugaugauggu

SEQ ID NO: 602533 - RNA, 19 nt, Homo sapiens
  misc_RNA (1)...(19): siRNA sense strand
ggggaaagauggaugaaca

SEQ ID NO: 602534 - RNA, 19 nt, Homo sapiens
  misc_RNA (1)...(19): siRNA sense strand
uuagaggcacugaaggaua

SEQ ID NO: 602535 - RNA, 19 nt, Homo sapiens
  misc_RNA (1)...(19): siRNA sense strand
guaccacuccacuuagaug

SEQ ID NO: 602536 - RNA, 19 nt, Homo sapiens
  misc_RNA (1)...(19): siRNA sense strand
uaauauccgagguuccuuu

SEQ ID NO: 602537 - RNA, 19 nt, Homo sapiens
  misc_RNA (1)...(19): siRNA sense strand
cgaaguuggaagcgagaua

SEQ ID NO: 602538 - RNA, 19 nt, Homo sapiens
  misc_RNA (1)...(19): siRNA sense strand
cauaacaauaggagaaaug

SEQ ID NO: 602539 - RNA, 19 nt, Homo sapiens
  misc_RNA (1)...(19): siRNA sense strand
cucaagaugucaaccugaa

SEQ ID NO: 602540 - RNA, 19 nt, Homo sapiens
  misc_RNA (1)...(19): siRNA sense strand
gauguuguaagaucagaga

SEQ ID NO: 602541 - RNA, 19 nt, Homo sapiens
  misc_RNA (1)...(19): siRNA sense strand
gaagagaagguugaaaaga

SEQ ID NO: 602542 - RNA, 19 nt, Homo sapiens
  misc_RNA (1)...(19): siRNA sense strand
uucaggcucucacuacaaa

SEQ ID NO: 602543 - RNA, 19 nt, Homo sapiens
  misc_RNA (1)...(19): siRNA sense strand
ggaaagauggaugaacaag

SEQ ID NO: 602544 - RNA, 19 nt, Homo sapiens
  misc_RNA (1)...(19): siRNA sense strand
aaguaacagugacagcaaa

SEQ ID NO: 602545 - RNA, 19 nt, Homo sapiens
  misc_RNA (1)...(19): siRNA sense strand
caacaccaagugaauuagu

SEQ ID NO: 602546 - RNA, 19 nt, Homo sapiens
  misc_RNA (1)...(19): siRNA sense strand
gaguauauuaagcgucaaa

SEQ ID NO: 602547 - RNA, 19 nt, Homo sapiens
  misc_RNA (1)...(19): siRNA sense strand
agaaaugauacacgaaguu

SEQ ID NO: 602548 - RNA, 19 nt, Homo sapiens
  misc_RNA (1)...(19): siRNA sense strand
caagugaauuagugaacac

SEQ ID NO: 602549 - RNA, 19 nt, Homo sapiens
  misc_RNA (1)...(19): siRNA sense strand
uuacuaugaugaugguaca

SEQ ID NO: 602550 - RNA, 19 nt, Homo sapiens
  misc_RNA (1)...(19): siRNA sense strand
caaacagaacuuaauacca

SEQ ID NO: 602551 - RNA, 19 nt, Homo sapiens
  misc_RNA (1)...(19): siRNA sense strand
ccauuucaaacagaacuua

SEQ ID NO: 602552 - RNA, 19 nt, Homo sapiens
  misc_RNA (1)...(19): siRNA sense strand
gaaaggacugaucaaccau

SEQ ID NO: 602553 - RNA, 19 nt, Homo sapiens
  misc_RNA (1)...(19): siRNA sense strand
agaccuggaucccggaaca

SEQ ID NO: 602554 - RNA, 19 nt, Homo sapiens
  misc_RNA (1)...(19): siRNA sense strand
agaaauuguggaugagaaa

SEQ ID NO: 602555 - RNA, 19 nt, Homo sapiens
  misc_RNA (1)...(19): siRNA sense strand
acugaaggauagcacagaa

SEQ ID NO: 602556 - RNA, 19 nt, Homo sapiens
  misc_RNA (1)...(19): siRNA sense strand
caucuuagaggcacugaag

SEQ ID NO: 602557 - RNA, 19 nt, Homo sapiens
  misc_RNA (1)...(19): siRNA sense strand
gggaaagauggaugaacaa

SEQ ID NO: 602558 - RNA, 19 nt, Homo sapiens
  misc_RNA (1)...(19): siRNA sense strand
aauauccgagguuccuuua

SEQ ID NO: 602559 - RNA, 19 nt, Homo sapiens
  misc_RNA (1)...(19): siRNA sense strand
agaagugagggugguaaua

SEQ ID NO: 602560 - RNA, 19 nt, Homo sapiens
  misc_RNA (1)...(19): siRNA sense strand
gagaagugagggugguaau

SEQ ID NO: 602561 - RNA, 19 nt, Homo sapiens
  misc_RNA (1)...(19): siRNA sense strand
guuggaagcgagauagaga

SEQ ID NO: 602562 - RNA, 19 nt, Homo sapiens
  misc_RNA (1)...(19): siRNA sense strand
gaaaaccgggaaacaaaau

SEQ ID NO: 602563 - RNA, 19 nt, Homo sapiens
  misc_RNA (1)...(19): siRNA sense strand
guagaaauuguggaugaga

SEQ ID NO: 602564 - RNA, 19 nt, Homo sapiens
  misc_RNA (1)...(19): siRNA sense strand
ccucagccaaggaaauaaa

SEQ ID NO: 602565 - RNA, 19 nt, Homo sapiens
  misc_RNA (1)...(19): siRNA sense strand
accuuaaucucaucuuaga

SEQ ID NO: 602566 - RNA, 19 nt, Homo sapiens
  misc_RNA (1)...(19): siRNA sense strand
aacguaagagagcuaauaa

SEQ ID NO: 602567 - RNA, 19 nt, Homo sapiens
  misc_RNA (1)...(19): siRNA sense strand
uuaaaugguccuggugaaa

SEQ ID NO: 602568 - RNA, 19 nt, Homo sapiens
  misc_RNA (1)...(19): siRNA sense strand
aaccaacacauaacaauag

SEQ ID NO: 602569 - RNA, 19 nt, Homo sapiens
  misc_RNA (1)...(19): siRNA sense strand
ggccaacaccaagugaauu

SEQ ID NO: 602570 - RNA, 19 nt, Homo sapiens
  misc_RNA (1)...(19): siRNA sense strand
ugaaggauagcacagaagu

SEQ ID NO: 602571 - RNA, 19 nt, Homo sapiens
  misc_RNA (1)...(19): siRNA sense strand
acuacaaaccuuaaucuca

SEQ ID NO: 602572 - RNA, 19 nt, Homo sapiens
  misc_RNA (1)...(19): siRNA sense strand
aaugauacacgaaguugga

SEQ ID NO: 602573 - RNA, 19 nt, Homo sapiens
  misc_RNA (1)...(19): siRNA sense strand
cguaagagagcuaauaagc

SEQ ID NO: 602574 - RNA, 19 nt, Homo sapiens
  misc_RNA (1)...(19): siRNA sense strand
ucacuacaaaccuuaaucu

SEQ ID NO: 602575 - RNA, 19 nt, Homo sapiens
  misc_RNA (1)...(19): siRNA sense strand
gaugaucaagaugacguuu

SEQ ID NO: 602576 - RNA, 19 nt, Homo sapiens
  misc_RNA (1)...(19): siRNA sense strand
agaaguagaaauuguggau

SEQ ID NO: 602577 - RNA, 19 nt, Homo sapiens
  misc_RNA (1)...(19): siRNA sense strand
gauagcacagaaguagaaa

SEQ ID NO: 602578 - RNA, 19 nt, Homo sapiens
  misc_RNA (1)...(19): siRNA sense strand
gaagggaagacaacuauaa

SEQ ID NO: 602579 - RNA, 19 nt, Homo sapiens
  misc_RNA (1)...(19): siRNA sense strand
ccaccgagcaggucuauua

SEQ ID NO: 602580 - RNA, 19 nt, Homo sapiens
  misc_RNA (1)...(19): siRNA sense strand
gagcaggucuauuaccaaa

SEQ ID NO: 602581 - RNA, 19 nt, Homo sapiens
  misc_RNA (1)...(19): siRNA sense strand
ggaagacaacuauaauuga

SEQ ID NO: 602582 - RNA, 19 nt, Homo sapiens
  misc_RNA (1)...(19): siRNA sense strand
gcaggucuauuaccaaauc

SEQ ID NO: 602583 - RNA, 19 nt, Homo sapiens
  misc_RNA (1)...(19): siRNA sense strand
gggaagacaacuauaauug

SEQ ID NO: 602584 - RNA, 19 nt, Homo sapiens
  misc_RNA (1)...(19): siRNA sense strand
guauaacuaugacgauguu

SEQ ID NO: 602585 - RNA, 19 nt, Homo sapiens
  misc_RNA (1)...(19): siRNA sense strand
ggaagaacaccgcaagauc

SEQ ID NO: 602586 - RNA, 19 nt, Homo sapiens
  misc_RNA (1)...(19): siRNA sense strand
gcacaaguauaacuaugac

SEQ ID NO: 602587 - RNA, 19 nt, Homo sapiens
  misc_RNA (1)...(19): siRNA sense strand
guuggaaccugaagcacaa

SEQ ID NO: 602588 - RNA, 19 nt, Homo sapiens
  misc_RNA (1)...(19): siRNA sense strand
caagaagggaagacaacua

SEQ ID NO: 602589 - RNA, 19 nt, Homo sapiens
  misc_RNA (1)...(19): siRNA sense strand
gaaccugaagcacaaguau

SEQ ID NO: 602590 - RNA, 19 nt, Homo sapiens
  misc_RNA (1)...(19): siRNA sense strand
gaagcacaaguauaacuau

SEQ ID NO: 602591 - RNA, 19 nt, Homo sapiens
  misc_RNA (1)...(19): siRNA sense strand
gaacaccuuggaagcugua

SEQ ID NO: 602592 - RNA, 19 nt, Homo sapiens
  misc_RNA (1)...(19): siRNA sense strand
ucacagcgacucccaagga

SEQ ID NO: 602593 - RNA, 19 nt, Homo sapiens
  misc_RNA (1)...(19): siRNA sense strand
gacgauguucugcugcuua

SEQ ID NO: 602594 - RNA, 19 nt, Homo sapiens
  misc_RNA (1)...(19): siRNA sense strand
ugaagcacaaguauaacua

SEQ ID NO: 602595 - RNA, 19 nt, Homo sapiens
  misc_RNA (1)...(19): siRNA sense strand
cgaaagaucacaggccuau

SEQ ID NO: 602596 - RNA, 19 nt, Homo sapiens
  misc_RNA (1)...(19): siRNA sense strand
ggaaccugaagcacaagua

SEQ ID NO: 602597 - RNA, 19 nt, Homo sapiens
  misc_RNA (1)...(19): siRNA sense strand
gaaggaguuguuccgaaga

SEQ ID NO: 602598 - RNA, 19 nt, Homo sapiens
  misc_RNA (1)...(19): siRNA sense strand
cgucaagcccaucuacaaa

SEQ ID NO: 602599 - RNA, 19 nt, Homo sapiens
  misc_RNA (1)...(19): siRNA sense strand
aagcacaaguauaacuaug

SEQ ID NO: 602600 - RNA, 19 nt, Homo sapiens
  misc_RNA (1)...(19): siRNA sense strand
aagaagggaagacaacuau

SEQ ID NO: 602601 - RNA, 19 nt, Homo sapiens
  misc_RNA (1)...(19): siRNA sense strand
caaugucugcuacucaaga

SEQ ID NO: 602602 - RNA, 19 nt, Homo sapiens
  misc_RNA (1)...(19): siRNA sense strand
cgaggagugugugaagaug

SEQ ID NO: 602603 - RNA, 19 nt, Homo sapiens
  misc_RNA (1)...(19): siRNA sense strand
gaucgaggagugugugaag

SEQ ID NO: 602604 - RNA, 19 nt, Homo sapiens
  misc_RNA (1)...(19): siRNA sense strand
ccgagcaggucuauuacca

SEQ ID NO: 602605 - RNA, 19 nt, Homo sapiens
  misc_RNA (1)...(19): siRNA sense strand
gagaguccaaauccuccua

SEQ ID NO: 602606 - RNA, 19 nt, Homo sapiens
  misc_RNA (1)...(19): siRNA sense strand
uaacuaugacgauguucug

SEQ ID NO: 602607 - RNA, 19 nt, Homo sapiens
  misc_RNA (1)...(19): siRNA sense strand
ccaaggagaguccaaaucc

SEQ ID NO: 602608 - RNA, 19 nt, Homo sapiens
  misc_RNA (1)...(19): siRNA sense strand
aaugucugcuacucaagaa

SEQ ID NO: 602609 - RNA, 19 nt, Homo sapiens
  misc_RNA (1)...(19): siRNA sense strand
accugaagcacaaguauaa

SEQ ID NO: 602610 - RNA, 19 nt, Homo sapiens
  misc_RNA (1)...(19): siRNA sense strand
gcaagaucgaggagugugu

SEQ ID NO: 602611 - RNA, 19 nt, Homo sapiens
  misc_RNA (1)...(19): siRNA sense strand
caaguauaacuaugacgau

SEQ ID NO: 602612 - RNA, 19 nt, Homo sapiens
  misc_RNA (1)...(19): siRNA sense strand
aaagaucacaggccuaugc

SEQ ID NO: 602613 - RNA, 19 nt, Homo sapiens
  misc_RNA (1)...(19): siRNA sense strand
agaagggaagacaacuaua

SEQ ID NO: 602614 - RNA, 19 nt, Homo sapiens
  misc_RNA (1)...(19): siRNA sense strand
caccuuggaagcuguauca

SEQ ID NO: 602615 - RNA, 19 nt, Homo sapiens
  misc_RNA (1)...(19): siRNA sense strand
gagcaaaccccaacucaac

SEQ ID NO: 602616 - RNA, 19 nt, Homo sapiens
  misc_RNA (1)...(19): siRNA sense strand
aaccugaagcacaaguaua

SEQ ID NO: 602617 - RNA, 19 nt, Homo sapiens
  misc_RNA (1)...(19): siRNA sense strand
ggucuauuaccaaaucaca

SEQ ID NO: 602618 - RNA, 19 nt, Homo sapiens
  misc_RNA (1)...(19): siRNA sense strand
gaaugcaacucucaccuua

SEQ ID NO: 602619 - RNA, 19 nt, Homo sapiens
  misc_RNA (1)...(19): siRNA sense strand
gaaaggaaguggaauuaau

SEQ ID NO: 602620 - RNA, 19 nt, Homo sapiens
  misc_RNA (1)...(19): siRNA sense strand
aaaguuggcucacaauuaa

SEQ ID NO: 602621 - RNA, 19 nt, Homo sapiens
  misc_RNA (1)...(19): siRNA sense strand
ggagauagacuuacugaaa

SEQ ID NO: 602622 - RNA, 19 nt, Homo sapiens
  misc_RNA (1)...(19): siRNA sense strand
gaaaagagguggaauuaau

SEQ ID NO: 602623 - RNA, 19 nt, Homo sapiens
  misc_RNA (1)...(19): siRNA sense strand
caaaguuggcucacaauua

SEQ ID NO: 602624 - RNA, 19 nt, Homo sapiens
  misc_RNA (1)...(19): siRNA sense strand
gaaggcaguucugugaaua

SEQ ID NO: 602625 - RNA, 19 nt, Homo sapiens
  misc_RNA (1)...(19): siRNA sense strand
gcaaacacuuuaugucaau

SEQ ID NO: 602626 - RNA, 19 nt, Homo sapiens
  misc_RNA (1)...(19): siRNA sense strand
ggaagucccuggaaaccaa

SEQ ID NO: 602627 - RNA, 19 nt, Homo sapiens
  misc_RNA (1)...(19): siRNA sense strand
gaaaagcucuuguuuguca

SEQ ID NO: 602628 - RNA, 19 nt, Homo sapiens
  misc_RNA (1)...(19): siRNA sense strand
caaugaauccuguuaguuu

SEQ ID NO: 602629 - RNA, 19 nt, Homo sapiens
  misc_RNA (1)...(19): siRNA sense strand
caucuacgcugacaaugaa

SEQ ID NO: 602630 - RNA, 19 nt, Homo sapiens
  misc_RNA (1)...(19): siRNA sense strand
aaacaaaguuggcucacaa

SEQ ID NO: 602631 - RNA, 19 nt, Homo sapiens
  misc_RNA (1)...(19): siRNA sense strand
gcaacucucaccuuaauuu

SEQ ID NO: 602632 - RNA, 19 nt, Homo sapiens
  misc_RNA (1)...(19): siRNA sense strand
gagauagacuuacugaaag

SEQ ID NO: 602633 - RNA, 19 nt, Homo sapiens
  misc_RNA (1)...(19): siRNA sense strand
caucaucucuuguacaugu

SEQ ID NO: 602634 - RNA, 19 nt, Homo sapiens
  misc_RNA (1)...(19): siRNA sense strand
aaaugcaacucucaccuua

SEQ ID NO: 602635 - RNA, 19 nt, Homo sapiens
  misc_RNA (1)...(19): siRNA sense strand
gagcuaaauuacacauuga

SEQ ID NO: 602636 - RNA, 19 nt, Homo sapiens
  misc_RNA (1)...(19): siRNA sense strand
ggaaggcaguucugugaau

SEQ ID NO: 602637 - RNA, 19 nt, Homo sapiens
  misc_RNA (1)...(19): siRNA sense strand
gggaguauaugaaugugaa

SEQ ID NO: 602638 - RNA, 19 nt, Homo sapiens
  misc_RNA (1)...(19): siRNA sense strand
aauaauaccugccauugga

SEQ ID NO: 602639 - RNA, 19 nt, Homo sapiens
  misc_RNA (1)...(19): siRNA sense strand
cgagcuaaauuacacauug

SEQ ID NO: 602640 - RNA, 19 nt, Homo sapiens
  misc_RNA (1)...(19): siRNA sense strand
gaaggaugcgggaguauau

SEQ ID NO: 602641 - RNA, 19 nt, Homo sapiens
  misc_RNA (1)...(19): siRNA sense strand
gaaguggaauuaauuaucc

SEQ ID NO: 602642 - RNA, 19 nt, Homo sapiens
  misc_RNA (1)...(19): siRNA sense strand
gcagaaaggaaguggaauu

SEQ ID NO: 602643 - RNA, 19 nt, Homo sapiens
  misc_RNA (1)...(19): siRNA sense strand
gcaacucucaccuuaauug

SEQ ID NO: 602644 - RNA, 19 nt, Homo sapiens
  misc_RNA (1)...(19): siRNA sense strand
gaaaggcccaguugaagga

SEQ ID NO: 602645 - RNA, 19 nt, Homo sapiens
  misc_RNA (1)...(19): siRNA sense strand
ggagacaggagacacagua

SEQ ID NO: 602646 - RNA, 19 nt, Homo sapiens
  misc_RNA (1)...(19): siRNA sense strand
gagauugaauuacuuaagg

SEQ ID NO: 602647 - RNA, 19 nt, Homo sapiens
  misc_RNA (1)...(19): siRNA sense strand
gagguggaauuaauuguuc

SEQ ID NO: 602648 - RNA, 19 nt, Homo sapiens
  misc_RNA (1)...(19): siRNA sense strand
gaggaaggcaguucuguga

SEQ ID NO: 602649 - RNA, 19 nt, Homo sapiens
  misc_RNA (1)...(19): siRNA sense strand
caugaagagucaggaauuu

SEQ ID NO: 602650 - RNA, 19 nt, Homo sapiens
  misc_RNA (1)...(19): siRNA sense strand
cagaaaggaaguggaauua

SEQ ID NO: 602651 - RNA, 19 nt, Homo sapiens
  misc_RNA (1)...(19): siRNA sense strand
caggcuaaguuacauauug

SEQ ID NO: 602652 - RNA, 19 nt, Homo sapiens
  misc_RNA (1)...(19): siRNA sense strand
gaaaugcaacucucaccuu

SEQ ID NO: 602653 - RNA, 19 nt, Homo sapiens
  misc_RNA (1)...(19): siRNA sense strand
ggaauucgaacccaaacaa

SEQ ID NO: 602654 - RNA, 19 nt, Homo sapiens
  misc_RNA (1)...(19): siRNA sense strand
gacaaugaauccuguuagu

SEQ ID NO: 602655 - RNA, 19 nt, Homo sapiens
  misc_RNA (1)...(19): siRNA sense strand
ggaagccgaucacagucaa

SEQ ID NO: 602656 - RNA, 19 nt, Homo sapiens
  misc_RNA (1)...(19): siRNA sense strand
ggaaguggaauuaauuauc

SEQ ID NO: 602657 - RNA, 19 nt, Homo sapiens
  misc_RNA (1)...(19): siRNA sense strand
gcugauguauacccauuug

SEQ ID NO: 602658 - RNA, 19 nt, Homo sapiens
  misc_RNA (1)...(19): siRNA sense strand
ggagaacccagauagauag

SEQ ID NO: 602659 - RNA, 19 nt, Homo sapiens
  misc_RNA (1)...(19): siRNA sense strand
gacaggagacacaguacua

SEQ ID NO: 602660 - RNA, 19 nt, Homo sapiens
  misc_RNA (1)...(19): siRNA sense strand
gauagauaguccacugaau

SEQ ID NO: 602661 - RNA, 19 nt, Homo sapiens
  misc_RNA (1)...(19): siRNA sense strand
ccuuggagccucaaauaua

SEQ ID NO: 602662 - RNA, 19 nt, Homo sapiens
  misc_RNA (1)...(19): siRNA sense strand
gcucacaauuaagaaguuu

SEQ ID NO: 602663 - RNA, 19 nt, Homo sapiens
  misc_RNA (1)...(19): siRNA sense strand
cuacauaucacccaagaau

SEQ ID NO: 602664 - RNA, 19 nt, Homo sapiens
  misc_RNA (1)...(19): siRNA sense strand
acucucaccuuaauuucua

SEQ ID NO: 602665 - RNA, 19 nt, Homo sapiens
  misc_RNA (1)...(19): siRNA sense strand
gugaaggaguuaauuugau

SEQ ID NO: 602666 - RNA, 19 nt, Homo sapiens
  misc_RNA (1)...(19): siRNA sense strand
ucuaccagcuccagagauu

SEQ ID NO: 602667 - RNA, 19 nt, Homo sapiens
  misc_RNA (1)...(19): siRNA sense strand
gaagagaaaacaacaaaga

SEQ ID NO: 602668 - RNA, 19 nt, Homo sapiens
  misc_RNA (1)...(19): siRNA sense strand
gauaauguuugcagcuucu

SEQ ID NO: 602669 - RNA, 19 nt, Homo sapiens
  misc_RNA (1)...(19): siRNA sense strand
gaauugcaagucuacauau

SEQ ID NO: 602670 - RNA, 19 nt, Homo sapiens
  misc_RNA (1)...(19): siRNA sense strand
acucucaccuuaauugcua

SEQ ID NO: 602671 - RNA, 19 nt, Homo sapiens
  misc_RNA (1)...(19): siRNA sense strand
cuacagcaccuuucuggaa

SEQ ID NO: 602672 - RNA, 19 nt, Homo sapiens
  misc_RNA (1)...(19): siRNA sense strand
acagucaaguguucaguug

SEQ ID NO: 602673 - RNA, 19 nt, Homo sapiens
  misc_RNA (1)...(19): siRNA sense strand
guugaaggaugcgggagua

SEQ ID NO: 602674 - RNA, 19 nt, Homo sapiens
  misc_RNA (1)...(19): siRNA sense strand
gaauucgaacccaaacaaa

SEQ ID NO: 602675 - RNA, 19 nt, Homo sapiens
  misc_RNA (1)...(19): siRNA sense strand
ggaggauacggauaugaaa

SEQ ID NO: 602676 - RNA, 19 nt, Homo sapiens
  misc_RNA (1)...(19): siRNA sense strand
ggucauauagucuuguaga

SEQ ID NO: 602677 - RNA, 19 nt, Homo sapiens
  misc_RNA (1)...(19): siRNA sense strand
gagauuuucuggaguaaga

SEQ ID NO: 602678 - RNA, 19 nt, Homo sapiens
  misc_RNA (1)...(19): siRNA sense strand
cagaguacgcaaacacuuu

SEQ ID NO: 602679 - RNA, 19 nt, Homo sapiens
  misc_RNA (1)...(19): siRNA sense strand
uggagaacccagauagaua

SEQ ID NO: 602680 - RNA, 19 nt, Homo sapiens
  misc_RNA (1)...(19): siRNA sense strand
ugggagcucugucacugua

SEQ ID NO: 602681 - RNA, 19 nt, Homo sapiens
  misc_RNA (1)...(19): siRNA sense strand
gaaucuaggaaauuggaaa

SEQ ID NO: 602682 - RNA, 19 nt, Homo sapiens
  misc_RNA (1)...(19): siRNA sense strand
gcaguucugugaauaugac

SEQ ID NO: 602683 - RNA, 19 nt, Homo sapiens
  misc_RNA (1)...(19): siRNA sense strand
caagaagguggcucuguga

SEQ ID NO: 602684 - RNA, 19 nt, Homo sapiens
  misc_RNA (1)...(19): siRNA sense strand
agguggagaucuacucuuu

SEQ ID NO: 602685 - RNA, 19 nt, Homo sapiens
  misc_RNA (1)...(19): siRNA sense strand
ccacaucuacgcugacaau

SEQ ID NO: 602686 - RNA, 19 nt, Homo sapiens
  misc_RNA (1)...(19): siRNA sense strand
acacugucaucaucucuug

SEQ ID NO: 602687 - RNA, 19 nt, Homo sapiens
  misc_RNA (1)...(19): siRNA sense strand
aggcuaaguuacauauuga

SEQ ID NO: 602688 - RNA, 19 nt, Homo sapiens
  misc_RNA (1)...(19): siRNA sense strand
uggaaaagcucuuguuugu

SEQ ID NO: 602689 - RNA, 19 nt, Homo sapiens
  misc_RNA (1)...(19): siRNA sense strand
gcuggagauugaauuacuu

SEQ ID NO: 602690 - RNA, 19 nt, Homo sapiens
  misc_RNA (1)...(19): siRNA sense strand
agaauugcaagucuacaua

SEQ ID NO: 602691 - RNA, 19 nt, Homo sapiens
  misc_RNA (1)...(19): siRNA sense strand
gaaggaguuaauuugauug

SEQ ID NO: 602692 - RNA, 19 nt, Homo sapiens
  misc_RNA (1)...(19): siRNA sense strand
cgcaaacacuuuaugucaa

SEQ ID NO: 602693 - RNA, 19 nt, Homo sapiens
  misc_RNA (1)...(19): siRNA sense strand
guacgcaaacacuuuaugu

SEQ ID NO: 602694 - RNA, 19 nt, Homo sapiens
  misc_RNA (1)...(19): siRNA sense strand
agaguacgcaaacacuuua

SEQ ID NO: 602695 - RNA, 19 nt, Homo sapiens
  misc_RNA (1)...(19): siRNA sense strand
acauauugaugacauggaa

SEQ ID NO: 602696 - RNA, 19 nt, Homo sapiens
  misc_RNA (1)...(19): siRNA sense strand
gaagauggucgugauccuu

SEQ ID NO: 602697 - RNA, 19 nt, Homo sapiens
  misc_RNA (1)...(19): siRNA sense strand
gauguucaaggaagagaaa

SEQ ID NO: 602698 - RNA, 19 nt, Homo sapiens
  misc_RNA (1)...(19): siRNA sense strand
gugaauaugacaugcuuga

SEQ ID NO: 602699 - RNA, 19 nt, Homo sapiens
  misc_RNA (1)...(19): siRNA sense strand
auacggauaugaaaucucu

SEQ ID NO: 602700 - RNA, 19 nt, Homo sapiens
  misc_RNA (1)...(19): siRNA sense strand
cuaugaggauggaagauuc

SEQ ID NO: 602701 - RNA, 19 nt, Homo sapiens
  misc_RNA (1)...(19): siRNA sense strand
augggaaggugacgaauga

SEQ ID NO: 602702 - RNA, 19 nt, Homo sapiens
  misc_RNA (1)...(19): siRNA sense strand
gcuaugaggauggaagauu

SEQ ID NO: 602703 - RNA, 19 nt, Homo sapiens
  misc_RNA (1)...(19): siRNA sense strand
gggaaucuacagcaccuuu

SEQ ID NO: 602704 - RNA, 19 nt, Homo sapiens
  misc_RNA (1)...(19): siRNA sense strand
cuaaggauccagagauuca

SEQ ID NO: 602705 - RNA, 19 nt, Homo sapiens
  misc_RNA (1)...(19): siRNA sense strand
gucaucaucucuuguacau

SEQ ID NO: 602706 - RNA, 19 nt, Homo sapiens
  misc_RNA (1)...(19): siRNA sense strand
ggagauugaauuacuuaag

SEQ ID NO: 602707 - RNA, 19 nt, Homo sapiens
  misc_RNA (1)...(19): siRNA sense strand
gcaagguuccuagcgugua

SEQ ID NO: 602708 - RNA, 19 nt, Homo sapiens
  misc_RNA (1)...(19): siRNA sense strand
cagaaaagagguggaauua

SEQ ID NO: 602709 - RNA, 19 nt, Homo sapiens
  misc_RNA (1)...(19): siRNA sense strand
gaguuuggaaguaaccuuu

SEQ ID NO: 602710 - RNA, 19 nt, Homo sapiens
  misc_RNA (1)...(19): siRNA sense strand
caaaggcagaguacgcaaa

SEQ ID NO: 602711 - RNA, 19 nt, Homo sapiens
  misc_RNA (1)...(19): siRNA sense strand
guucuuguuugccgagcua

SEQ ID NO: 602712 - RNA, 19 nt, Homo sapiens
  misc_RNA (1)...(19): siRNA sense strand
cccagaaucuagauaucuu

SEQ ID NO: 602713 - RNA, 19 nt, Homo sapiens
  misc_RNA (1)...(19): siRNA sense strand
gaggauacggauaugaaau

SEQ ID NO: 602714 - RNA, 19 nt, Homo sapiens
  misc_RNA (1)...(19): siRNA sense strand
gucauauagucuuguagaa

SEQ ID NO: 602715 - RNA, 19 nt, Homo sapiens
  misc_RNA (1)...(19): siRNA sense strand
ugaaggaugcgggaguaua

SEQ ID NO: 602716 - RNA, 19 nt, Homo sapiens
  misc_RNA (1)...(19): siRNA sense strand
gcagaguacgcaaacacuu

SEQ ID NO: 602717 - RNA, 19 nt, Homo sapiens
  misc_RNA (1)...(19): siRNA sense strand
ggauacggauaugaaaucu

SEQ ID NO: 602718 - RNA, 19 nt, Homo sapiens
  misc_RNA (1)...(19): siRNA sense strand
gaaugcaacucucaccuua

SEQ ID NO: 602719 - RNA, 19 nt, Homo sapiens
  misc_RNA (1)...(19): siRNA sense strand
gaaaggaaguggaauuaau

SEQ ID NO: 602720 - RNA, 19 nt, Homo sapiens
  misc_RNA (1)...(19): siRNA sense strand
aaaguuggcucacaauuaa

SEQ ID NO: 602721 - RNA, 19 nt, Homo sapiens
  misc_RNA (1)...(19): siRNA sense strand
ggagauagacuuacugaaa

SEQ ID NO: 602722 - RNA, 19 nt, Homo sapiens
  misc_RNA (1)...(19): siRNA sense strand
gaaaagagguggaauuaau

SEQ ID NO: 602723 - RNA, 19 nt, Homo sapiens
  misc_RNA (1)...(19): siRNA sense strand
caaaguuggcucacaauua

SEQ ID NO: 602724 - RNA, 19 nt, Homo sapiens
  misc_RNA (1)...(19): siRNA sense strand
gaaggcaguucugugaaua

SEQ ID NO: 602725 - RNA, 19 nt, Homo sapiens
  misc_RNA (1)...(19): siRNA sense strand
gcaaacacuuuaugucaau

SEQ ID NO: 602726 - RNA, 19 nt, Homo sapiens
  misc_RNA (1)...(19): siRNA sense strand
ggaagucccuggaaaccaa

SEQ ID NO: 602727 - RNA, 19 nt, Homo sapiens
  misc_RNA (1)...(19): siRNA sense strand
gaaaagcucuuguuuguca

SEQ ID NO: 602728 - RNA, 19 nt, Homo sapiens
  misc_RNA (1)...(19): siRNA sense strand
caaugaauccuguuaguuu

SEQ ID NO: 602729 - RNA, 19 nt, Homo sapiens
  misc_RNA (1)...(19): siRNA sense strand
caucuacgcugacaaugaa

SEQ ID NO: 602730 - RNA, 19 nt, Homo sapiens
  misc_RNA (1)...(19): siRNA sense strand
aaacaaaguuggcucacaa

SEQ ID NO: 602731 - RNA, 19 nt, Homo sapiens
  misc_RNA (1)...(19): siRNA sense strand
gcaacucucaccuuaauuu

SEQ ID NO: 602732 - RNA, 19 nt, Homo sapiens
  misc_RNA (1)...(19): siRNA sense strand
gagauagacuuacugaaag

SEQ ID NO: 602733 - RNA, 19 nt, Homo sapiens
  misc_RNA (1)...(19): siRNA sense strand
caucaucucuuguacaugu

SEQ ID NO: 602734 - RNA, 19 nt, Homo sapiens
  misc_RNA (1)...(19): siRNA sense strand
aaaugcaacucucaccuua

SEQ ID NO: 602735 - RNA, 19 nt, Homo sapiens
  misc_RNA (1)...(19): siRNA sense strand
gagcuaaauuacacauuga

SEQ ID NO: 602736 - RNA, 19 nt, Homo sapiens
  misc_RNA (1)...(19): siRNA sense strand
ggaaggcaguucugugaau

SEQ ID NO: 602737 - RNA, 19 nt, Homo sapiens
  misc_RNA (1)...(19): siRNA sense strand
gggaguauaugaaugugaa

SEQ ID NO: 602738 - RNA, 19 nt, Homo sapiens
  misc_RNA (1)...(19): siRNA sense strand
aauaauaccugccauugga

SEQ ID NO: 602739 - RNA, 19 nt, Homo sapiens
  misc_RNA (1)...(19): siRNA sense strand
cgagcuaaauuacacauug

SEQ ID NO: 602740 - RNA, 19 nt, Homo sapiens
  misc_RNA (1)...(19): siRNA sense strand
gaaggaugcgggaguauau

SEQ ID NO: 602741 - RNA, 19 nt, Homo sapiens
  misc_RNA (1)...(19): siRNA sense strand
gaaguggaauuaauuaucc

SEQ ID NO: 602742 - RNA, 19 nt, Homo sapiens
  misc_RNA (1)...(19): siRNA sense strand
gcagaaaggaaguggaauu

SEQ ID NO: 602743 - RNA, 19 nt, Homo sapiens
  misc_RNA (1)...(19): siRNA sense strand
gcaacucucaccuuaauug

SEQ ID NO: 602744 - RNA, 19 nt, Homo sapiens
  misc_RNA (1)...(19): siRNA sense strand
gaaaggcccaguugaagga

SEQ ID NO: 602745 - RNA, 19 nt, Homo sapiens
  misc_RNA (1)...(19): siRNA sense strand
ggagacaggagacacagua

SEQ ID NO: 602746 - RNA, 19 nt, Homo sapiens
  misc_RNA (1)...(19): siRNA sense strand
gagauugaauuacuuaagg

SEQ ID NO: 602747 - RNA, 19 nt, Homo sapiens
  misc_RNA (1)...(19): siRNA sense strand
gagguggaauuaauuguuc

SEQ ID NO: 602748 - RNA, 19 nt, Homo sapiens
  misc_RNA (1)...(19): siRNA sense strand
gaggaaggcaguucuguga

SEQ ID NO: 602749 - RNA, 19 nt, Homo sapiens
  misc_RNA (1)...(19): siRNA sense strand
caugaagagucaggaauuu

SEQ ID NO: 602750 - RNA, 19 nt, Homo sapiens
  misc_RNA (1)...(19): siRNA sense strand
cagaaaggaaguggaauua

SEQ ID NO: 602751 - RNA, 19 nt, Homo sapiens
  misc_RNA (1)...(19): siRNA sense strand
caggcuaaguuacauauug

SEQ ID NO: 602752 - RNA, 19 nt, Homo sapiens
  misc_RNA (1)...(19): siRNA sense strand
gaaaugcaacucucaccuu

SEQ ID NO: 602753 - RNA, 19 nt, Homo sapiens
  misc_RNA (1)...(19): siRNA sense strand
ggaauucgaacccaaacaa

SEQ ID NO: 602754 - RNA, 19 nt, Homo sapiens
  misc_RNA (1)...(19): siRNA sense strand
gacaaugaauccuguuagu

SEQ ID NO: 602755 - RNA, 19 nt, Homo sapiens
  misc_RNA (1)...(19): siRNA sense strand
ggaagccgaucacagucaa

SEQ ID NO: 602756 - RNA, 19 nt, Homo sapiens
  misc_RNA (1)...(19): siRNA sense strand
ggaaguggaauuaauuauc

SEQ ID NO: 602757 - RNA, 19 nt, Homo sapiens
  misc_RNA (1)...(19): siRNA sense strand
gcugauguauacccauuug

SEQ ID NO: 602758 - RNA, 19 nt, Homo sapiens
  misc_RNA (1)...(19): siRNA sense strand
ggagaacccagauagauag

SEQ ID NO: 602759 - RNA, 19 nt, Homo sapiens
  misc_RNA (1)...(19): siRNA sense strand
gacaggagacacaguacua

SEQ ID NO: 602760 - RNA, 19 nt, Homo sapiens
  misc_RNA (1)...(19): siRNA sense strand
gauagauaguccacugaau

SEQ ID NO: 602761 - RNA, 19 nt, Homo sapiens
  misc_RNA (1)...(19): siRNA sense strand
ccuuggagccucaaauaua

SEQ ID NO: 602762 - RNA, 19 nt, Homo sapiens
  misc_RNA (1)...(19): siRNA sense strand
gcucacaauuaagaaguuu

SEQ ID NO: 602763 - RNA, 19 nt, Homo sapiens
  misc_RNA (1)...(19): siRNA sense strand
cuacauaucacccaagaau

SEQ ID NO: 602764 - RNA, 19 nt, Homo sapiens
  misc_RNA (1)...(19): siRNA sense strand
acucucaccuuaauuucua

SEQ ID NO: 602765 - RNA, 19 nt, Homo sapiens
  misc_RNA (1)...(19): siRNA sense strand
gugaaggaguuaauuugau

SEQ ID NO: 602766 - RNA, 19 nt, Homo sapiens
  misc_RNA (1)...(19): siRNA sense strand
ucuaccagcuccagagauu

SEQ ID NO: 602767 - RNA, 19 nt, Homo sapiens
  misc_RNA (1)...(19): siRNA sense strand
gaagagaaaacaacaaaga

SEQ ID NO: 602768 - RNA, 19 nt, Homo sapiens
  misc_RNA (1)...(19): siRNA sense strand
gauaauguuugcagcuucu

SEQ ID NO: 602769 - RNA, 19 nt, Homo sapiens
  misc_RNA (1)...(19): siRNA sense strand
gaauugcaagucuacauau

SEQ ID NO: 602770 - RNA, 19 nt, Homo sapiens
  misc_RNA (1)...(19): siRNA sense strand
acucucaccuuaauugcua

SEQ ID NO: 602771 - RNA, 19 nt, Homo sapiens
  misc_RNA (1)...(19): siRNA sense strand
cuacagcaccuuucuggaa

SEQ ID NO: 602772 - RNA, 19 nt, Homo sapiens
  misc_RNA (1)...(19): siRNA sense strand
acagucaaguguucaguug

SEQ ID NO: 602773 - RNA, 19 nt, Homo sapiens
  misc_RNA (1)...(19): siRNA sense strand
guugaaggaugcgggagua

SEQ ID NO: 602774 - RNA, 19 nt, Homo sapiens
  misc_RNA (1)...(19): siRNA sense strand
gaauucgaacccaaacaaa

SEQ ID NO: 602775 - RNA, 19 nt, Homo sapiens
  misc_RNA (1)...(19): siRNA sense strand
ggaggauacggauaugaaa

SEQ ID NO: 602776 - RNA, 19 nt, Homo sapiens
  misc_RNA (1)...(19): siRNA sense strand
ggucauauagucuuguaga

SEQ ID NO: 602777 - RNA, 19 nt, Homo sapiens
  misc_RNA (1)...(19): siRNA sense strand
gagauuuucuggaguaaga

SEQ ID NO: 602778 - RNA, 19 nt, Homo sapiens
  misc_RNA (1)...(19): siRNA sense strand
cagaguacgcaaacacuuu

SEQ ID NO: 602779 - RNA, 19 nt, Homo sapiens
  misc_RNA (1)...(19): siRNA sense strand
uggagaacccagauagaua

SEQ ID NO: 602780 - RNA, 19 nt, Homo sapiens
  misc_RNA (1)...(19): siRNA sense strand
ugggagcucugucacugua

SEQ ID NO: 602781 - RNA, 19 nt, Homo sapiens
  misc_RNA (1)...(19): siRNA sense strand
gaaucuaggaaauuggaaa

SEQ ID NO: 602782 - RNA, 19 nt, Homo sapiens
  misc_RNA (1)...(19): siRNA sense strand
gcaguucugugaauaugac

SEQ ID NO: 602783 - RNA, 19 nt, Homo sapiens
  misc_RNA (1)...(19): siRNA sense strand
caagaagguggcucuguga

SEQ ID NO: 602784 - RNA, 19 nt, Homo sapiens
  misc_RNA (1)...(19): siRNA sense strand
agguggagaucuacucuuu

SEQ ID NO: 602785 - RNA, 19 nt, Homo sapiens
  misc_RNA (1)...(19): siRNA sense strand
ccacaucuacgcugacaau

SEQ ID NO: 602786 - RNA, 19 nt, Homo sapiens
  misc_RNA (1)...(19): siRNA sense strand
acacugucaucaucucuug

SEQ ID NO: 602787 - RNA, 19 nt, Homo sapiens
  misc_RNA (1)...(19): siRNA sense strand
aggcuaaguuacauauuga

SEQ ID NO: 602788 - RNA, 19 nt, Homo sapiens
  misc_RNA (1)...(19): siRNA sense strand
uggaaaagcucuuguuugu

SEQ ID NO: 602789 - RNA, 19 nt, Homo sapiens
  misc_RNA (1)...(19): siRNA sense strand
gcuggagauugaauuacuu

SEQ ID NO: 602790 - RNA, 19 nt, Homo sapiens
  misc_RNA (1)...(19): siRNA sense strand
agaauugcaagucuacaua

SEQ ID NO: 602791 - RNA, 19 nt, Homo sapiens
  misc_RNA (1)...(19): siRNA sense strand
gaaggaguuaauuugauug

SEQ ID NO: 602792 - RNA, 19 nt, Homo sapiens
  misc_RNA (1)...(19): siRNA sense strand
cgcaaacacuuuaugucaa

SEQ ID NO: 602793 - RNA, 19 nt, Homo sapiens
  misc_RNA (1)...(19): siRNA sense strand
guacgcaaacacuuuaugu

SEQ ID NO: 602794 - RNA, 19 nt, Homo sapiens
  misc_RNA (1)...(19): siRNA sense strand
agaguacgcaaacacuuua

SEQ ID NO: 602795 - RNA, 19 nt, Homo sapiens
  misc_RNA (1)...(19): siRNA sense strand
acauauugaugacauggaa

SEQ ID NO: 602796 - RNA, 19 nt, Homo sapiens
  misc_RNA (1)...(19): siRNA sense strand
gaagauggucgugauccuu

SEQ ID NO: 602797 - RNA, 19 nt, Homo sapiens
  misc_RNA (1)...(19): siRNA sense strand
gauguucaaggaagagaaa

SEQ ID NO: 602798 - RNA, 19 nt, Homo sapiens
  misc_RNA (1)...(19): siRNA sense strand
gugaauaugacaugcuuga

SEQ ID NO: 602799 - RNA, 19 nt, Homo sapiens
  misc_RNA (1)...(19): siRNA sense strand
auacggauaugaaaucucu

SEQ ID NO: 602800 - RNA, 19 nt, Homo sapiens
  misc_RNA (1)...(19): siRNA sense strand
cuaugaggauggaagauuc

SEQ ID NO: 602801 - RNA, 19 nt, Homo sapiens
  misc_RNA (1)...(19): siRNA sense strand
augggaaggugacgaauga

SEQ ID NO: 602802 - RNA, 19 nt, Homo sapiens
  misc_RNA (1)...(19): siRNA sense strand
gcuaugaggauggaagauu

SEQ ID NO: 602803 - RNA, 19 nt, Homo sapiens
  misc_RNA (1)...(19): siRNA sense strand
gggaaucuacagcaccuuu

SEQ ID NO: 602804 - RNA, 19 nt, Homo sapiens
  misc_RNA (1)...(19): siRNA sense strand
cuaaggauccagagauuca

SEQ ID NO: 602805 - RNA, 19 nt, Homo sapiens
  misc_RNA (1)...(19): siRNA sense strand
gucaucaucucuuguacau

SEQ ID NO: 602806 - RNA, 19 nt, Homo sapiens
  misc_RNA (1)...(19): siRNA sense strand
ggagauugaauuacuuaag

SEQ ID NO: 602807 - RNA, 19 nt, Homo sapiens
  misc_RNA (1)...(19): siRNA sense strand
gcaagguuccuagcgugua

SEQ ID NO: 602808 - RNA, 19 nt, Homo sapiens
  misc_RNA (1)...(19): siRNA sense strand
cagaaaagagguggaauua

SEQ ID NO: 602809 - RNA, 19 nt, Homo sapiens
  misc_RNA (1)...(19): siRNA sense strand
gaguuuggaaguaaccuuu

SEQ ID NO: 602810 - RNA, 19 nt, Homo sapiens
  misc_RNA (1)...(19): siRNA sense strand
caaaggcagaguacgcaaa

SEQ ID NO: 602811 - RNA, 19 nt, Homo sapiens
  misc_RNA (1)...(19): siRNA sense strand
guucuuguuugccgagcua

SEQ ID NO: 602812 - RNA, 19 nt, Homo sapiens
  misc_RNA (1)...(19): siRNA sense strand
cccagaaucuagauaucuu

SEQ ID NO: 602813 - RNA, 19 nt, Homo sapiens
  misc_RNA (1)...(19): siRNA sense strand
gaggauacggauaugaaau

SEQ ID NO: 602814 - RNA, 19 nt, Homo sapiens
  misc_RNA (1)...(19): siRNA sense strand
gucauauagucuuguagaa

SEQ ID NO: 602815 - RNA, 19 nt, Homo sapiens
  misc_RNA (1)...(19): siRNA sense strand
ugaaggaugcgggaguaua

SEQ ID NO: 602816 - RNA, 19 nt, Homo sapiens
  misc_RNA (1)...(19): siRNA sense strand
gcagaguacgcaaacacuu

SEQ ID NO: 602817 - RNA, 19 nt, Homo sapiens
  misc_RNA (1)...(19): siRNA sense strand
ggauacggauaugaaaucu

SEQ ID NO: 602818 - RNA, 19 nt, Homo sapiens
  misc_RNA (1)...(19): siRNA sense strand
gcaaagauagcgagaaaua

SEQ ID NO: 602819 - RNA, 19 nt, Homo sapiens
  misc_RNA (1)...(19): siRNA sense strand
ugaauuccaugcacagaua

SEQ ID NO: 602820 - RNA, 19 nt, Homo sapiens
  misc_RNA (1)...(19): siRNA sense strand
cgacaacggccacauuauu

SEQ ID NO: 602821 - RNA, 19 nt, Homo sapiens
  misc_RNA (1)...(19): siRNA sense strand
gacgacaacggccacauua

SEQ ID NO: 602822 - RNA, 19 nt, Homo sapiens
  misc_RNA (1)...(19): siRNA sense strand
ggacgacaacggccacauu

SEQ ID NO: 602823 - RNA, 19 nt, Homo sapiens
  misc_RNA (1)...(19): siRNA sense strand
aaagauagcgagaaauaug

SEQ ID NO: 602824 - RNA, 19 nt, Homo sapiens
  misc_RNA (1)...(19): siRNA sense strand
acgcaaagauagcgagaaa

SEQ ID NO: 602825 - RNA, 19 nt, Homo sapiens
  misc_RNA (1)...(19): siRNA sense strand
ucacgcagcucaagauugc

SEQ ID NO: 602826 - RNA, 19 nt, Homo sapiens
  misc_RNA (1)...(19): siRNA sense strand
gacaacggccacauuauuc

SEQ ID NO: 602827 - RNA, 19 nt, Homo sapiens
  misc_RNA (1)...(19): siRNA sense strand
agaaauaugccgaggagaa

SEQ ID NO: 602828 - RNA, 19 nt, Homo sapiens
  misc_RNA (1)...(19): siRNA sense strand
ugaagcaaaucguguccuu

SEQ ID NO: 602829 - RNA, 19 nt, Homo sapiens
  misc_RNA (1)...(19): siRNA sense strand
gcgugcagcuagagaugaa

SEQ ID NO: 602830 - RNA, 19 nt, Homo sapiens
  misc_RNA (1)...(19): siRNA sense strand
gaucacgcagcucaagauu

SEQ ID NO: 602831 - RNA, 19 nt, Homo sapiens
  misc_RNA (1)...(19): siRNA sense strand
caaagauagcgagaaauau

SEQ ID NO: 602832 - RNA, 19 nt, Homo sapiens
  misc_RNA (1)...(19): siRNA sense strand
gaaauaugccgaggagaac

SEQ ID NO: 602833 - RNA, 19 nt, Homo sapiens
  misc_RNA (1)...(19): siRNA sense strand
cgcaguggaugaagcaaau

SEQ ID NO: 602834 - RNA, 19 nt, Homo sapiens
  misc_RNA (1)...(19): siRNA sense strand
caagcugaccaacaaccua

SEQ ID NO: 602835 - RNA, 19 nt, Homo sapiens
  misc_RNA (1)...(19): siRNA sense strand
cagcaaucccuucgcgaaa

SEQ ID NO: 602836 - RNA, 19 nt, Homo sapiens
  misc_RNA (1)...(19): siRNA sense strand
acuauaugcugcucaugga

SEQ ID NO: 602837 - RNA, 19 nt, Homo sapiens
  misc_RNA (1)...(19): siRNA sense strand
ugaagaagaacgcgaaggu

SEQ ID NO: 602838 - RNA, 19 nt, Homo sapiens
  misc_RNA (1)...(19): siRNA sense strand
uuucccaccuuccaaguga

SEQ ID NO: 602839 - RNA, 19 nt, Homo sapiens
  misc_RNA (1)...(19): siRNA sense strand
gaggagaacuucaaaaccu

SEQ ID NO: 602840 - RNA, 19 nt, Homo sapiens
  misc_RNA (1)...(19): siRNA sense strand
gcgcaguggaugaagcaaa

SEQ ID NO: 602841 - RNA, 19 nt, Homo sapiens
  misc_RNA (1)...(19): siRNA sense strand
gaaaggcuuccgggacugu

SEQ ID NO: 602842 - RNA, 19 nt, Homo sapiens
  misc_RNA (1)...(19): siRNA sense strand
ggaucacgcagcucaagau

SEQ ID NO: 602843 - RNA, 19 nt, Homo sapiens
  misc_RNA (1)...(19): siRNA sense strand
uaccagaaccaucggauca

SEQ ID NO: 602844 - RNA, 19 nt, Homo sapiens
  misc_RNA (1)...(19): siRNA sense strand
gagcgugcagcuagagaug

SEQ ID NO: 602845 - RNA, 19 nt, Homo sapiens
  misc_RNA (1)...(19): siRNA sense strand
ucccauggccgacuauaug

SEQ ID NO: 602846 - RNA, 19 nt, Homo sapiens
  misc_RNA (1)...(19): siRNA sense strand
ccgagaugaucgucaccaa

SEQ ID NO: 602847 - RNA, 19 nt, Homo sapiens
  misc_RNA (1)...(19): siRNA sense strand
gcuuccacguggucuaugu

SEQ ID NO: 602848 - RNA, 19 nt, Homo sapiens
  misc_RNA (1)...(19): siRNA sense strand
cagcugggcaccgagauga

SEQ ID NO: 602849 - RNA, 19 nt, Homo sapiens
  misc_RNA (1)...(19): siRNA sense strand
caacggccacauuauucug

SEQ ID NO: 602850 - RNA, 19 nt, Homo sapiens
  misc_RNA (1)...(19): siRNA sense strand
gcaaagauagcgagaaaua

SEQ ID NO: 602851 - RNA, 19 nt, Homo sapiens
  misc_RNA (1)...(19): siRNA sense strand
ugaauuccaugcacagaua

SEQ ID NO: 602852 - RNA, 19 nt, Homo sapiens
  misc_RNA (1)...(19): siRNA sense strand
cgacaacggccacauuauu

SEQ ID NO: 602853 - RNA, 19 nt, Homo sapiens
  misc_RNA (1)...(19): siRNA sense strand
gacgacaacggccacauua

SEQ ID NO: 602854 - RNA, 19 nt, Homo sapiens
  misc_RNA (1)...(19): siRNA sense strand
ggacgacaacggccacauu

SEQ ID NO: 602855 - RNA, 19 nt, Homo sapiens
  misc_RNA (1)...(19): siRNA sense strand
aaagauagcgagaaauaug

SEQ ID NO: 602856 - RNA, 19 nt, Homo sapiens
  misc_RNA (1)...(19): siRNA sense strand
acgcaaagauagcgagaaa

SEQ ID NO: 602857 - RNA, 19 nt, Homo sapiens
  misc_RNA (1)...(19): siRNA sense strand
ucacgcagcucaagauugc

SEQ ID NO: 602858 - RNA, 19 nt, Homo sapiens
  misc_RNA (1)...(19): siRNA sense strand
gacaacggccacauuauuc

SEQ ID NO: 602859 - RNA, 19 nt, Homo sapiens
  misc_RNA (1)...(19): siRNA sense strand
agaaauaugccgaggagaa

SEQ ID NO: 602860 - RNA, 19 nt, Homo sapiens
  misc_RNA (1)...(19): siRNA sense strand
ugaagcaaaucguguccuu

SEQ ID NO: 602861 - RNA, 19 nt, Homo sapiens
  misc_RNA (1)...(19): siRNA sense strand
gcgugcagcuagagaugaa

SEQ ID NO: 602862 - RNA, 19 nt, Homo sapiens
  misc_RNA (1)...(19): siRNA sense strand
gaucacgcagcucaagauu

SEQ ID NO: 602863 - RNA, 19 nt, Homo sapiens
  misc_RNA (1)...(19): siRNA sense strand
caaagauagcgagaaauau

SEQ ID NO: 602864 - RNA, 19 nt, Homo sapiens
  misc_RNA (1)...(19): siRNA sense strand
gaaauaugccgaggagaac

SEQ ID NO: 602865 - RNA, 19 nt, Homo sapiens
  misc_RNA (1)...(19): siRNA sense strand
cgcaguggaugaagcaaau

SEQ ID NO: 602866 - RNA, 19 nt, Homo sapiens
  misc_RNA (1)...(19): siRNA sense strand
caagcugaccaacaaccua

SEQ ID NO: 602867 - RNA, 19 nt, Homo sapiens
  misc_RNA (1)...(19): siRNA sense strand
cagcaaucccuucgcgaaa

SEQ ID NO: 602868 - RNA, 19 nt, Homo sapiens
  misc_RNA (1)...(19): siRNA sense strand
acuauaugcugcucaugga

SEQ ID NO: 602869 - RNA, 19 nt, Homo sapiens
  misc_RNA (1)...(19): siRNA sense strand
ugaagaagaacgcgaaggu

SEQ ID NO: 602870 - RNA, 19 nt, Homo sapiens
  misc_RNA (1)...(19): siRNA sense strand
uuucccaccuuccaaguga

SEQ ID NO: 602871 - RNA, 19 nt, Homo sapiens
  misc_RNA (1)...(19): siRNA sense strand
gaggagaacuucaaaaccu

SEQ ID NO: 602872 - RNA, 19 nt, Homo sapiens
  misc_RNA (1)...(19): siRNA sense strand
gcgcaguggaugaagcaaa

SEQ ID NO: 602873 - RNA, 19 nt, Homo sapiens
  misc_RNA (1)...(19): siRNA sense strand
gaaaggcuuccgggacugu

SEQ ID NO: 602874 - RNA, 19 nt, Homo sapiens
  misc_RNA (1)...(19): siRNA sense strand
ggaucacgcagcucaagau

SEQ ID NO: 602875 - RNA, 19 nt, Homo sapiens
  misc_RNA (1)...(19): siRNA sense strand
uaccagaaccaucggauca

SEQ ID NO: 602876 - RNA, 19 nt, Homo sapiens
  misc_RNA (1)...(19): siRNA sense strand
gagcgugcagcuagagaug

SEQ ID NO: 602877 - RNA, 19 nt, Homo sapiens
  misc_RNA (1)...(19): siRNA sense strand
ucccauggccgacuauaug

SEQ ID NO: 602878 - RNA, 19 nt, Homo sapiens
  misc_RNA (1)...(19): siRNA sense strand
ccgagaugaucgucaccaa

SEQ ID NO: 602879 - RNA, 19 nt, Homo sapiens
  misc_RNA (1)...(19): siRNA sense strand
gcuuccacguggucuaugu

SEQ ID NO: 602880 - RNA, 19 nt, Homo sapiens
  misc_RNA (1)...(19): siRNA sense strand
cagcugggcaccgagauga

SEQ ID NO: 602881 - RNA, 19 nt, Homo sapiens
  misc_RNA (1)...(19): siRNA sense strand
caacggccacauuauucug

SEQ ID NO: 602882 - RNA, 19 nt, Homo sapiens
  misc_RNA (1)...(19): siRNA sense strand
gcaaagauagcgagaaaua

SEQ ID NO: 602883 - RNA, 19 nt, Homo sapiens
  misc_RNA (1)...(19): siRNA sense strand
ugaauuccaugcacagaua

SEQ ID NO: 602884 - RNA, 19 nt, Homo sapiens
  misc_RNA (1)...(19): siRNA sense strand
cgacaacggccacauuauu

SEQ ID NO: 602885 - RNA, 19 nt, Homo sapiens
  misc_RNA (1)...(19): siRNA sense strand
gacgacaacggccacauua

SEQ ID NO: 602886 - RNA, 19 nt, Homo sapiens
  misc_RNA (1)...(19): siRNA sense strand
ggacgacaacggccacauu

SEQ ID NO: 602887 - RNA, 19 nt, Homo sapiens
  misc_RNA (1)...(19): siRNA sense strand
aaagauagcgagaaauaug

SEQ ID NO: 602888 - RNA, 19 nt, Homo sapiens
  misc_RNA (1)...(19): siRNA sense strand
acgcaaagauagcgagaaa

SEQ ID NO: 602889 - RNA, 19 nt, Homo sapiens
  misc_RNA (1)...(19): siRNA sense strand
ucacgcagcucaagauugc

SEQ ID NO: 602890 - RNA, 19 nt, Homo sapiens
  misc_RNA (1)...(19): siRNA sense strand
gacaacggccacauuauuc

SEQ ID NO: 602891 - RNA, 19 nt, Homo sapiens
  misc_RNA (1)...(19): siRNA sense strand
agaaauaugccgaggagaa

SEQ ID NO: 602892 - RNA, 19 nt, Homo sapiens
  misc_RNA (1)...(19): siRNA sense strand
ugaagcaaaucguguccuu

SEQ ID NO: 602893 - RNA, 19 nt, Homo sapiens
  misc_RNA (1)...(19): siRNA sense strand
gcgugcagcuagagaugaa

SEQ ID NO: 602894 - RNA, 19 nt, Homo sapiens
  misc_RNA (1)...(19): siRNA sense strand
gaucacgcagcucaagauu

SEQ ID NO: 602895 - RNA, 19 nt, Homo sapiens
  misc_RNA (1)...(19): siRNA sense strand
caaagauagcgagaaauau

SEQ ID NO: 602896 - RNA, 19 nt, Homo sapiens
  misc_RNA (1)...(19): siRNA sense strand
gaaauaugccgaggagaac

SEQ ID NO: 602897 - RNA, 19 nt, Homo sapiens
  misc_RNA (1)...(19): siRNA sense strand
cgcaguggaugaagcaaau

SEQ ID NO: 602898 - RNA, 19 nt, Homo sapiens
  misc_RNA (1)...(19): siRNA sense strand
caagcugaccaacaaccua

SEQ ID NO: 602899 - RNA, 19 nt, Homo sapiens
  misc_RNA (1)...(19): siRNA sense strand
cagcaaucccuucgcgaaa

SEQ ID NO: 602900 - RNA, 19 nt, Homo sapiens
  misc_RNA (1)...(19): siRNA sense strand
acuauaugcugcucaugga

SEQ ID NO: 602901 - RNA, 19 nt, Homo sapiens
  misc_RNA (1)...(19): siRNA sense strand
ugaagaagaacgcgaaggu

SEQ ID NO: 602902 - RNA, 19 nt, Homo sapiens
  misc_RNA (1)...(19): siRNA sense strand
uuucccaccuuccaaguga

SEQ ID NO: 602903 - RNA, 19 nt, Homo sapiens
  misc_RNA (1)...(19): siRNA sense strand
gaggagaacuucaaaaccu

SEQ ID NO: 602904 - RNA, 19 nt, Homo sapiens
  misc_RNA (1)...(19): siRNA sense strand
gcgcaguggaugaagcaaa

SEQ ID NO: 602905 - RNA, 19 nt, Homo sapiens
  misc_RNA (1)...(19): siRNA sense strand
gaaaggcuuccgggacugu

SEQ ID NO: 602906 - RNA, 19 nt, Homo sapiens
  misc_RNA (1)...(19): siRNA sense strand
ggaucacgcagcucaagau

SEQ ID NO: 602907 - RNA, 19 nt, Homo sapiens
  misc_RNA (1)...(19): siRNA sense strand
uaccagaaccaucggauca

SEQ ID NO: 602908 - RNA, 19 nt, Homo sapiens
  misc_RNA (1)...(19): siRNA sense strand
gagcgugcagcuagagaug

SEQ ID NO: 602909 - RNA, 19 nt, Homo sapiens
  misc_RNA (1)...(19): siRNA sense strand
ucccauggccgacuauaug

SEQ ID NO: 602910 - RNA, 19 nt, Homo sapiens
  misc_RNA (1)...(19): siRNA sense strand
ccgagaugaucgucaccaa

SEQ ID NO: 602911 - RNA, 19 nt, Homo sapiens
  misc_RNA (1)...(19): siRNA sense strand
gcuuccacguggucuaugu

SEQ ID NO: 602912 - RNA, 19 nt, Homo sapiens
  misc_RNA (1)...(19): siRNA sense strand
cagcugggcaccgagauga

SEQ ID NO: 602913 - RNA, 19 nt, Homo sapiens
  misc_RNA (1)...(19): siRNA sense strand
caacggccacauuauucug

SEQ ID NO: 602914 - RNA, 19 nt, Homo sapiens
  misc_RNA (1)...(19): siRNA sense strand
gcaaagauagcgagaaaua

SEQ ID NO: 602915 - RNA, 19 nt, Homo sapiens
  misc_RNA (1)...(19): siRNA sense strand
ugaauuccaugcacagaua

SEQ ID NO: 602916 - RNA, 19 nt, Homo sapiens
  misc_RNA (1)...(19): siRNA sense strand
cgacaacggccacauuauu

SEQ ID NO: 602917 - RNA, 19 nt, Homo sapiens
  misc_RNA (1)...(19): siRNA sense strand
gacgacaacggccacauua

SEQ ID NO: 602918 - RNA, 19 nt, Homo sapiens
  misc_RNA (1)...(19): siRNA sense strand
ggacgacaacggccacauu

SEQ ID NO: 602919 - RNA, 19 nt, Homo sapiens
  misc_RNA (1)...(19): siRNA sense strand
aaagauagcgagaaauaug

SEQ ID NO: 602920 - RNA, 19 nt, Homo sapiens
  misc_RNA (1)...(19): siRNA sense strand
acgcaaagauagcgagaaa

SEQ ID NO: 602921 - RNA, 19 nt, Homo sapiens
  misc_RNA (1)...(19): siRNA sense strand
ucacgcagcucaagauugc

SEQ ID NO: 602922 - RNA, 19 nt, Homo sapiens
  misc_RNA (1)...(19): siRNA sense strand
gacaacggccacauuauuc

SEQ ID NO: 602923 - RNA, 19 nt, Homo sapiens
  misc_RNA (1)...(19): siRNA sense strand
agaaauaugccgaggagaa

SEQ ID NO: 602924 - RNA, 19 nt, Homo sapiens
  misc_RNA (1)...(19): siRNA sense strand
ugaagcaaaucguguccuu

SEQ ID NO: 602925 - RNA, 19 nt, Homo sapiens
  misc_RNA (1)...(19): siRNA sense strand
gcgugcagcuagagaugaa

SEQ ID NO: 602926 - RNA, 19 nt, Homo sapiens
  misc_RNA (1)...(19): siRNA sense strand
gaucacgcagcucaagauu

SEQ ID NO: 602927 - RNA, 19 nt, Homo sapiens
  misc_RNA (1)...(19): siRNA sense strand
caaagauagcgagaaauau

SEQ ID NO: 602928 - RNA, 19 nt, Homo sapiens
  misc_RNA (1)...(19): siRNA sense strand
gaaauaugccgaggagaac

SEQ ID NO: 602929 - RNA, 19 nt, Homo sapiens
  misc_RNA (1)...(19): siRNA sense strand
cgcaguggaugaagcaaau

SEQ ID NO: 602930 - RNA, 19 nt, Homo sapiens
  misc_RNA (1)...(19): siRNA sense strand
caagcugaccaacaaccua

SEQ ID NO: 602931 - RNA, 19 nt, Homo sapiens
  misc_RNA (1)...(19): siRNA sense strand
cagcaaucccuucgcgaaa

SEQ ID NO: 602932 - RNA, 19 nt, Homo sapiens
  misc_RNA (1)...(19): siRNA sense strand
acuauaugcugcucaugga

SEQ ID NO: 602933 - RNA, 19 nt, Homo sapiens
  misc_RNA (1)...(19): siRNA sense strand
ugaagaagaacgcgaaggu

SEQ ID NO: 602934 - RNA, 19 nt, Homo sapiens
  misc_RNA (1)...(19): siRNA sense strand
uuucccaccuuccaaguga

SEQ ID NO: 602935 - RNA, 19 nt, Homo sapiens
  misc_RNA (1)...(19): siRNA sense strand
gaggagaacuucaaaaccu

SEQ ID NO: 602936 - RNA, 19 nt, Homo sapiens
  misc_RNA (1)...(19): siRNA sense strand
gcgcaguggaugaagcaaa

SEQ ID NO: 602937 - RNA, 19 nt, Homo sapiens
  misc_RNA (1)...(19): siRNA sense strand
gaaaggcuuccgggacugu

SEQ ID NO: 602938 - RNA, 19 nt, Homo sapiens
  misc_RNA (1)...(19): siRNA sense strand
ggaucacgcagcucaagau

SEQ ID NO: 602939 - RNA, 19 nt, Homo sapiens
  misc_RNA (1)...(19): siRNA sense strand
uaccagaaccaucggauca

SEQ ID NO: 602940 - RNA, 19 nt, Homo sapiens
  misc_RNA (1)...(19): siRNA sense strand
gagcgugcagcuagagaug

SEQ ID NO: 602941 - RNA, 19 nt, Homo sapiens
  misc_RNA (1)...(19): siRNA sense strand
ucccauggccgacuauaug

SEQ ID NO: 602942 - RNA, 19 nt, Homo sapiens
  misc_RNA (1)...(19): siRNA sense strand
ccgagaugaucgucaccaa

SEQ ID NO: 602943 - RNA, 19 nt, Homo sapiens
  misc_RNA (1)...(19): siRNA sense strand
gcuuccacguggucuaugu

SEQ ID NO: 602944 - RNA, 19 nt, Homo sapiens
  misc_RNA (1)...(19): siRNA sense strand
cagcugggcaccgagauga

SEQ ID NO: 602945 - RNA, 19 nt, Homo sapiens
  misc_RNA (1)...(19): siRNA sense strand
caacggccacauuauucug

SEQ ID NO: 602946 - RNA, 19 nt, Homo sapiens
  misc_RNA (1)...(19): siRNA sense strand
gcaaagauagcgagaaaua

SEQ ID NO: 602947 - RNA, 19 nt, Homo sapiens
  misc_RNA (1)...(19): siRNA sense strand
ugaauuccaugcacagaua

SEQ ID NO: 602948 - RNA, 19 nt, Homo sapiens
  misc_RNA (1)...(19): siRNA sense strand
cgacaacggccacauuauu

SEQ ID NO: 602949 - RNA, 19 nt, Homo sapiens
  misc_RNA (1)...(19): siRNA sense strand
gacgacaacggccacauua

SEQ ID NO: 602950 - RNA, 19 nt, Homo sapiens
  misc_RNA (1)...(19): siRNA sense strand
ggacgacaacggccacauu

SEQ ID NO: 602951 - RNA, 19 nt, Homo sapiens
  misc_RNA (1)...(19): siRNA sense strand
aaagauagcgagaaauaug

SEQ ID NO: 602952 - RNA, 19 nt, Homo sapiens
  misc_RNA (1)...(19): siRNA sense strand
acgcaaagauagcgagaaa

SEQ ID NO: 602953 - RNA, 19 nt, Homo sapiens
  misc_RNA (1)...(19): siRNA sense strand
ucacgcagcucaagauugc

SEQ ID NO: 602954 - RNA, 19 nt, Homo sapiens
  misc_RNA (1)...(19): siRNA sense strand
gacaacggccacauuauuc

SEQ ID NO: 602955 - RNA, 19 nt, Homo sapiens
  misc_RNA (1)...(19): siRNA sense strand
agaaauaugccgaggagaa

SEQ ID NO: 602956 - RNA, 19 nt, Homo sapiens
  misc_RNA (1)...(19): siRNA sense strand
ugaagcaaaucguguccuu

SEQ ID NO: 602957 - RNA, 19 nt, Homo sapiens
  misc_RNA (1)...(19): siRNA sense strand
gcgugcagcuagagaugaa

SEQ ID NO: 602958 - RNA, 19 nt, Homo sapiens
  misc_RNA (1)...(19): siRNA sense strand
gaucacgcagcucaagauu

SEQ ID NO: 602959 - RNA, 19 nt, Homo sapiens
  misc_RNA (1)...(19): siRNA sense strand
caaagauagcgagaaauau

SEQ ID NO: 602960 - RNA, 19 nt, Homo sapiens
  misc_RNA (1)...(19): siRNA sense strand
gaaauaugccgaggagaac

SEQ ID NO: 602961 - RNA, 19 nt, Homo sapiens
  misc_RNA (1)...(19): siRNA sense strand
cgcaguggaugaagcaaau

SEQ ID NO: 602962 - RNA, 19 nt, Homo sapiens
  misc_RNA (1)...(19): siRNA sense strand
caagcugaccaacaaccua

SEQ ID NO: 602963 - RNA, 19 nt, Homo sapiens
  misc_RNA (1)...(19): siRNA sense strand
cagcaaucccuucgcgaaa

SEQ ID NO: 602964 - RNA, 19 nt, Homo sapiens
  misc_RNA (1)...(19): siRNA sense strand
acuauaugcugcucaugga

SEQ ID NO: 602965 - RNA, 19 nt, Homo sapiens
  misc_RNA (1)...(19): siRNA sense strand
ugaagaagaacgcgaaggu

SEQ ID NO: 602966 - RNA, 19 nt, Homo sapiens
  misc_RNA (1)...(19): siRNA sense strand
uuucccaccuuccaaguga

SEQ ID NO: 602967 - RNA, 19 nt, Homo sapiens
  misc_RNA (1)...(19): siRNA sense strand
gaggagaacuucaaaaccu

SEQ ID NO: 602968 - RNA, 19 nt, Homo sapiens
  misc_RNA (1)...(19): siRNA sense strand
gcgcaguggaugaagcaaa

SEQ ID NO: 602969 - RNA, 19 nt, Homo sapiens
  misc_RNA (1)...(19): siRNA sense strand
gaaaggcuuccgggacugu

SEQ ID NO: 602970 - RNA, 19 nt, Homo sapiens
  misc_RNA (1)...(19): siRNA sense strand
ggaucacgcagcucaagau

SEQ ID NO: 602971 - RNA, 19 nt, Homo sapiens
  misc_RNA (1)...(19): siRNA sense strand
uaccagaaccaucggauca

SEQ ID NO: 602972 - RNA, 19 nt, Homo sapiens
  misc_RNA (1)...(19): siRNA sense strand
gagcgugcagcuagagaug

SEQ ID NO: 602973 - RNA, 19 nt, Homo sapiens
  misc_RNA (1)...(19): siRNA sense strand
ucccauggccgacuauaug

SEQ ID NO: 602974 - RNA, 19 nt, Homo sapiens
  misc_RNA (1)...(19): siRNA sense strand
ccgagaugaucgucaccaa

SEQ ID NO: 602975 - RNA, 19 nt, Homo sapiens
  misc_RNA (1)...(19): siRNA sense strand
gcuuccacguggucuaugu

SEQ ID NO: 602976 - RNA, 19 nt, Homo sapiens
  misc_RNA (1)...(19): siRNA sense strand
cagcugggcaccgagauga

SEQ ID NO: 602977 - RNA, 19 nt, Homo sapiens
  misc_RNA (1)...(19): siRNA sense strand
caacggccacauuauucug

SEQ ID NO: 602978 - RNA, 19 nt, Homo sapiens
  misc_RNA (1)...(19): siRNA sense strand
gcaaagauagcgagaaaua

SEQ ID NO: 602979 - RNA, 19 nt, Homo sapiens
  misc_RNA (1)...(19): siRNA sense strand
ugaauuccaugcacagaua

SEQ ID NO: 602980 - RNA, 19 nt, Homo sapiens
  misc_RNA (1)...(19): siRNA sense strand
cgacaacggccacauuauu

SEQ ID NO: 602981 - RNA, 19 nt, Homo sapiens
  misc_RNA (1)...(19): siRNA sense strand
gacgacaacggccacauua

SEQ ID NO: 602982 - RNA, 19 nt, Homo sapiens
  misc_RNA (1)...(19): siRNA sense strand
ggacgacaacggccacauu

SEQ ID NO: 602983 - RNA, 19 nt, Homo sapiens
  misc_RNA (1)...(19): siRNA sense strand
aaagauagcgagaaauaug

SEQ ID NO: 602984 - RNA, 19 nt, Homo sapiens
  misc_RNA (1)...(19): siRNA sense strand
acgcaaagauagcgagaaa

SEQ ID NO: 602985 - RNA, 19 nt, Homo sapiens
  misc_RNA (1)...(19): siRNA sense strand
ucacgcagcucaagauugc

SEQ ID NO: 602986 - RNA, 19 nt, Homo sapiens
  misc_RNA (1)...(19): siRNA sense strand
gacaacggccacauuauuc

SEQ ID NO: 602987 - RNA, 19 nt, Homo sapiens
  misc_RNA (1)...(19): siRNA sense strand
agaaauaugccgaggagaa

SEQ ID NO: 602988 - RNA, 19 nt, Homo sapiens
  misc_RNA (1)...(19): siRNA sense strand
ugaagcaaaucguguccuu

SEQ ID NO: 602989 - RNA, 19 nt, Homo sapiens
  misc_RNA (1)...(19): siRNA sense strand
gcgugcagcuagagaugaa

SEQ ID NO: 602990 - RNA, 19 nt, Homo sapiens
  misc_RNA (1)...(19): siRNA sense strand
gaucacgcagcucaagauu

SEQ ID NO: 602991 - RNA, 19 nt, Homo sapiens
  misc_RNA (1)...(19): siRNA sense strand
caaagauagcgagaaauau

SEQ ID NO: 602992 - RNA, 19 nt, Homo sapiens
  misc_RNA (1)...(19): siRNA sense strand
gaaauaugccgaggagaac

SEQ ID NO: 602993 - RNA, 19 nt, Homo sapiens
  misc_RNA (1)...(19): siRNA sense strand
cgcaguggaugaagcaaau

SEQ ID NO: 602994 - RNA, 19 nt, Homo sapiens
  misc_RNA (1)...(19): siRNA sense strand
caagcugaccaacaaccua

SEQ ID NO: 602995 - RNA, 19 nt, Homo sapiens
  misc_RNA (1)...(19): siRNA sense strand
cagcaaucccuucgcgaaa

SEQ ID NO: 602996 - RNA, 19 nt, Homo sapiens
  misc_RNA (1)...(19): siRNA sense strand
acuauaugcugcucaugga

SEQ ID NO: 602997 - RNA, 19 nt, Homo sapiens
  misc_RNA (1)...(19): siRNA sense strand
ugaagaagaacgcgaaggu

SEQ ID NO: 602998 - RNA, 19 nt, Homo sapiens
  misc_RNA (1)...(19): siRNA sense strand
uuucccaccuuccaaguga

SEQ ID NO: 602999 - RNA, 19 nt, Homo sapiens
  misc_RNA (1)...(19): siRNA sense strand
gaggagaacuucaaaaccu

SEQ ID NO: 603000 - RNA, 19 nt, Homo sapiens
  misc_RNA (1)...(19): siRNA sense strand
gcgcaguggaugaagcaaa

SEQ ID NO: 603001 - RNA, 19 nt, Homo sapiens
  misc_RNA (1)...(19): siRNA sense strand
gaaaggcuuccgggacugu

SEQ ID NO: 603002 - RNA, 19 nt, Homo sapiens
  misc_RNA (1)...(19): siRNA sense strand
ggaucacgcagcucaagau

SEQ ID NO: 603003 - RNA, 19 nt, Homo sapiens
  misc_RNA (1)...(19): siRNA sense strand
uaccagaaccaucggauca

SEQ ID NO: 603004 - RNA, 19 nt, Homo sapiens
  misc_RNA (1)...(19): siRNA sense strand
gagcgugcagcuagagaug

SEQ ID NO: 603005 - RNA, 19 nt, Homo sapiens
  misc_RNA (1)...(19): siRNA sense strand
ucccauggccgacuauaug

SEQ ID NO: 603006 - RNA, 19 nt, Homo sapiens
  misc_RNA (1)...(19): siRNA sense strand
ccgagaugaucgucaccaa

SEQ ID NO: 603007 - RNA, 19 nt, Homo sapiens
  misc_RNA (1)...(19): siRNA sense strand
gcuuccacguggucuaugu

SEQ ID NO: 603008 - RNA, 19 nt, Homo sapiens
  misc_RNA (1)...(19): siRNA sense strand
cagcugggcaccgagauga

SEQ ID NO: 603009 - RNA, 19 nt, Homo sapiens
  misc_RNA (1)...(19): siRNA sense strand
caacggccacauuauucug

SEQ ID NO: 603010 - RNA, 19 nt, Homo sapiens
  misc_RNA (1)...(19): siRNA sense strand
caaaguuucuuacggcaua

SEQ ID NO: 603011 - RNA, 19 nt, Homo sapiens
  misc_RNA (1)...(19): siRNA sense strand
gagccuggauuaagaagaa

SEQ ID NO: 603012 - RNA, 19 nt, Homo sapiens
  misc_RNA (1)...(19): siRNA sense strand
ggaagaagccccagauaua

SEQ ID NO: 603013 - RNA, 19 nt, Homo sapiens
  misc_RNA (1)...(19): siRNA sense strand
gaagaaaggauuagauugg

SEQ ID NO: 603014 - RNA, 19 nt, Homo sapiens
  misc_RNA (1)...(19): siRNA sense strand
gggaugagcucaggacaga

SEQ ID NO: 603015 - RNA, 19 nt, Homo sapiens
  misc_RNA (1)...(19): siRNA sense strand
gcgcugggaugaagccuuu

SEQ ID NO: 603016 - RNA, 19 nt, Homo sapiens
  misc_RNA (1)...(19): siRNA sense strand
gaugaagccuuucgcaagu

SEQ ID NO: 603017 - RNA, 19 nt, Homo sapiens
  misc_RNA (1)...(19): siRNA sense strand
gaacaaacuaccagcugaa

SEQ ID NO: 603018 - RNA, 19 nt, Homo sapiens
  misc_RNA (1)...(19): siRNA sense strand
gagaccaaauguucagaga

SEQ ID NO: 603019 - RNA, 19 nt, Homo sapiens
  misc_RNA (1)...(19): siRNA sense strand
gauauacugugccuucaag

SEQ ID NO: 603020 - RNA, 19 nt, Homo sapiens
  misc_RNA (1)...(19): siRNA sense strand
ggauuaagaagaaaggauu

SEQ ID NO: 603021 - RNA, 19 nt, Homo sapiens
  misc_RNA (1)...(19): siRNA sense strand
gaucugcucuuggaaugug

SEQ ID NO: 603022 - RNA, 19 nt, Homo sapiens
  misc_RNA (1)...(19): siRNA sense strand
caaacuaccagcugaacuu

SEQ ID NO: 603023 - RNA, 19 nt, Homo sapiens
  misc_RNA (1)...(19): siRNA sense strand
cuucgagccuggauuaaga

SEQ ID NO: 603024 - RNA, 19 nt, Homo sapiens
  misc_RNA (1)...(19): siRNA sense strand
uaacagcauauguaccuaa

SEQ ID NO: 603025 - RNA, 19 nt, Homo sapiens
  misc_RNA (1)...(19): siRNA sense strand
uagauuggguaaaggaaga

SEQ ID NO: 603026 - RNA, 19 nt, Homo sapiens
  misc_RNA (1)...(19): siRNA sense strand
ucuguuaccugcauugugu

SEQ ID NO: 603027 - RNA, 19 nt, Homo sapiens
  misc_RNA (1)...(19): siRNA sense strand
ggagcugccuggacucucu

SEQ ID NO: 603028 - RNA, 19 nt, Homo sapiens
  misc_RNA (1)...(19): siRNA sense strand
gauuguggcugaauuugac

SEQ ID NO: 603029 - RNA, 19 nt, Homo sapiens
  misc_RNA (1)...(19): siRNA sense strand
ggucagcuccuucggacaa

SEQ ID NO: 603030 - RNA, 19 nt, Homo sapiens
  misc_RNA (1)...(19): siRNA sense strand
gaauguggaugggcuucga

SEQ ID NO: 603031 - RNA, 19 nt, Homo sapiens
  misc_RNA (1)...(19): siRNA sense strand
ccagaggccaagaagagua

SEQ ID NO: 603032 - RNA, 19 nt, Homo sapiens
  misc_RNA (1)...(19): siRNA sense strand
ccuggacucucucaucaau

SEQ ID NO: 603033 - RNA, 19 nt, Homo sapiens
  misc_RNA (1)...(19): siRNA sense strand
ggugauuguggcugaauuu

SEQ ID NO: 603034 - RNA, 19 nt, Homo sapiens
  misc_RNA (1)...(19): siRNA sense strand
guaacagcauauguaccua

SEQ ID NO: 603035 - RNA, 19 nt, Homo sapiens
  misc_RNA (1)...(19): siRNA sense strand
ggcugaauuugacucguuu

SEQ ID NO: 603036 - RNA, 19 nt, Homo sapiens
  misc_RNA (1)...(19): siRNA sense strand
uggcugaauuugacucguu

SEQ ID NO: 603037 - RNA, 19 nt, Homo sapiens
  misc_RNA (1)...(19): siRNA sense strand
gcaaaccugccacacucaa

SEQ ID NO: 603038 - RNA, 19 nt, Homo sapiens
  misc_RNA (1)...(19): siRNA sense strand
guuggcgccuugauuacuu

SEQ ID NO: 603039 - RNA, 19 nt, Homo sapiens
  misc_RNA (1)...(19): siRNA sense strand
ggacaaggaaggguacagu

SEQ ID NO: 603040 - RNA, 19 nt, Homo sapiens
  misc_RNA (1)...(19): siRNA sense strand
ugaaugcucgauccaagaa

SEQ ID NO: 603041 - RNA, 19 nt, Homo sapiens
  misc_RNA (1)...(19): siRNA sense strand
agaagaaaggauuagauug

SEQ ID NO: 603042 - RNA, 19 nt, Homo sapiens
  misc_RNA (1)...(19): siRNA sense strand
cagaggccaagaagaguaa

SEQ ID NO: 603043 - RNA, 19 nt, Homo sapiens
  misc_RNA (1)...(19): siRNA sense strand
gauuagauuggguaaagga

SEQ ID NO: 603044 - RNA, 19 nt, Homo sapiens
  misc_RNA (1)...(19): siRNA sense strand
aggauuagauuggguaaag

SEQ ID NO: 603045 - RNA, 19 nt, Homo sapiens
  misc_RNA (1)...(19): siRNA sense strand
uggacucucucaucaauac

SEQ ID NO: 603046 - RNA, 19 nt, Homo sapiens
  misc_RNA (1)...(19): siRNA sense strand
ugaagccuuucgcaaguuc

SEQ ID NO: 603047 - RNA, 19 nt, Homo sapiens
  misc_RNA (1)...(19): siRNA sense strand
ucaagagaccaaauguuca

SEQ ID NO: 603048 - RNA, 19 nt, Homo sapiens
  misc_RNA (1)...(19): siRNA sense strand
guugucccacucucuguua

SEQ ID NO: 603049 - RNA, 19 nt, Homo sapiens
  misc_RNA (1)...(19): siRNA sense strand
uugguuggcgccuugauua

SEQ ID NO: 603050 - RNA, 19 nt, Homo sapiens
  misc_RNA (1)...(19): siRNA sense strand
gggugauuguggcugaauu

SEQ ID NO: 603051 - RNA, 19 nt, Homo sapiens
  misc_RNA (1)...(19): siRNA sense strand
ugccuggacucucucauca

SEQ ID NO: 603052 - RNA, 19 nt, Homo sapiens
  misc_RNA (1)...(19): siRNA sense strand
ugacucguuugugcuggua

SEQ ID NO: 603053 - RNA, 19 nt, Homo sapiens
  misc_RNA (1)...(19): siRNA sense strand
aaugcucgauccaagaaug

SEQ ID NO: 603054 - RNA, 19 nt, Homo sapiens
  misc_RNA (1)...(19): siRNA sense strand
cagauauacugugccuuca

SEQ ID NO: 603055 - RNA, 19 nt, Homo sapiens
  misc_RNA (1)...(19): siRNA sense strand
caagagaccaaauguucag

SEQ ID NO: 603056 - RNA, 19 nt, Homo sapiens
  misc_RNA (1)...(19): siRNA sense strand
auacugugccuucaagaga

SEQ ID NO: 603057 - RNA, 19 nt, Homo sapiens
  misc_RNA (1)...(19): siRNA sense strand
aaaccugccacacucaaga

SEQ ID NO: 603058 - RNA, 19 nt, Homo sapiens
  misc_RNA (1)...(19): siRNA sense strand
uucaagagaccaaauguuc

SEQ ID NO: 603059 - RNA, 19 nt, Homo sapiens
  misc_RNA (1)...(19): siRNA sense strand
acagcaagauccguuccaa

SEQ ID NO: 603060 - RNA, 19 nt, Homo sapiens
  misc_RNA (1)...(19): siRNA sense strand
gaagaagccccagauauac

SEQ ID NO: 603061 - RNA, 19 nt, Homo sapiens
  misc_RNA (1)...(19): siRNA sense strand
uuaccugcauugugugaca

SEQ ID NO: 603062 - RNA, 19 nt, Homo sapiens
  misc_RNA (1)...(19): siRNA sense strand
ggauuagauuggguaaagg

SEQ ID NO: 603063 - RNA, 19 nt, Homo sapiens
  misc_RNA (1)...(19): siRNA sense strand
ugauuguggcugaauuuga

SEQ ID NO: 603064 - RNA, 19 nt, Homo sapiens
  misc_RNA (1)...(19): siRNA sense strand
aacagcauauguaccuaau

SEQ ID NO: 603065 - RNA, 19 nt, Homo sapiens
  misc_RNA (1)...(19): siRNA sense strand
gcucgauccaagaauguug

SEQ ID NO: 603066 - RNA, 19 nt, Homo sapiens
  misc_RNA (1)...(19): siRNA sense strand
caauacuggucagcuccuu

SEQ ID NO: 603067 - RNA, 19 nt, Homo sapiens
  misc_RNA (1)...(19): siRNA sense strand
caaaguuucuuacggcaua

SEQ ID NO: 603068 - RNA, 19 nt, Homo sapiens
  misc_RNA (1)...(19): siRNA sense strand
gagccuggauuaagaagaa

SEQ ID NO: 603069 - RNA, 19 nt, Homo sapiens
  misc_RNA (1)...(19): siRNA sense strand
ggaagaagccccagauaua

SEQ ID NO: 603070 - RNA, 19 nt, Homo sapiens
  misc_RNA (1)...(19): siRNA sense strand
gaagaaaggauuagauugg

SEQ ID NO: 603071 - RNA, 19 nt, Homo sapiens
  misc_RNA (1)...(19): siRNA sense strand
gggaugagcucaggacaga

SEQ ID NO: 603072 - RNA, 19 nt, Homo sapiens
  misc_RNA (1)...(19): siRNA sense strand
gcgcugggaugaagccuuu

SEQ ID NO: 603073 - RNA, 19 nt, Homo sapiens
  misc_RNA (1)...(19): siRNA sense strand
gaugaagccuuucgcaagu

SEQ ID NO: 603074 - RNA, 19 nt, Homo sapiens
  misc_RNA (1)...(19): siRNA sense strand
gaacaaacuaccagcugaa

SEQ ID NO: 603075 - RNA, 19 nt, Homo sapiens
  misc_RNA (1)...(19): siRNA sense strand
gagaccaaauguucagaga

SEQ ID NO: 603076 - RNA, 19 nt, Homo sapiens
  misc_RNA (1)...(19): siRNA sense strand
gauauacugugccuucaag

SEQ ID NO: 603077 - RNA, 19 nt, Homo sapiens
  misc_RNA (1)...(19): siRNA sense strand
ggauuaagaagaaaggauu

SEQ ID NO: 603078 - RNA, 19 nt, Homo sapiens
  misc_RNA (1)...(19): siRNA sense strand
gaucugcucuuggaaugug

SEQ ID NO: 603079 - RNA, 19 nt, Homo sapiens
  misc_RNA (1)...(19): siRNA sense strand
caaacuaccagcugaacuu

SEQ ID NO: 603080 - RNA, 19 nt, Homo sapiens
  misc_RNA (1)...(19): siRNA sense strand
cuucgagccuggauuaaga

SEQ ID NO: 603081 - RNA, 19 nt, Homo sapiens
  misc_RNA (1)...(19): siRNA sense strand
uaacagcauauguaccuaa

SEQ ID NO: 603082 - RNA, 19 nt, Homo sapiens
  misc_RNA (1)...(19): siRNA sense strand
uagauuggguaaaggaaga

SEQ ID NO: 603083 - RNA, 19 nt, Homo sapiens
  misc_RNA (1)...(19): siRNA sense strand
ucuguuaccugcauugugu

SEQ ID NO: 603084 - RNA, 19 nt, Homo sapiens
  misc_RNA (1)...(19): siRNA sense strand
ggagcugccuggacucucu

SEQ ID NO: 603085 - RNA, 19 nt, Homo sapiens
  misc_RNA (1)...(19): siRNA sense strand
gauuguggcugaauuugac

SEQ ID NO: 603086 - RNA, 19 nt, Homo sapiens
  misc_RNA (1)...(19): siRNA sense strand
ggucagcuccuucggacaa

SEQ ID NO: 603087 - RNA, 19 nt, Homo sapiens
  misc_RNA (1)...(19): siRNA sense strand
gaauguggaugggcuucga

SEQ ID NO: 603088 - RNA, 19 nt, Homo sapiens
  misc_RNA (1)...(19): siRNA sense strand
ccagaggccaagaagagua

SEQ ID NO: 603089 - RNA, 19 nt, Homo sapiens
  misc_RNA (1)...(19): siRNA sense strand
ccuggacucucucaucaau

SEQ ID NO: 603090 - RNA, 19 nt, Homo sapiens
  misc_RNA (1)...(19): siRNA sense strand
ggugauuguggcugaauuu

SEQ ID NO: 603091 - RNA, 19 nt, Homo sapiens
  misc_RNA (1)...(19): siRNA sense strand
guaacagcauauguaccua

SEQ ID NO: 603092 - RNA, 19 nt, Homo sapiens
  misc_RNA (1)...(19): siRNA sense strand
ggcugaauuugacucguuu

SEQ ID NO: 603093 - RNA, 19 nt, Homo sapiens
  misc_RNA (1)...(19): siRNA sense strand
uggcugaauuugacucguu

SEQ ID NO: 603094 - RNA, 19 nt, Homo sapiens
  misc_RNA (1)...(19): siRNA sense strand
gcaaaccugccacacucaa

SEQ ID NO: 603095 - RNA, 19 nt, Homo sapiens
  misc_RNA (1)...(19): siRNA sense strand
guuggcgccuugauuacuu

SEQ ID NO: 603096 - RNA, 19 nt, Homo sapiens
  misc_RNA (1)...(19): siRNA sense strand
ggacaaggaaggguacagu

SEQ ID NO: 603097 - RNA, 19 nt, Homo sapiens
  misc_RNA (1)...(19): siRNA sense strand
ugaaugcucgauccaagaa

SEQ ID NO: 603098 - RNA, 19 nt, Homo sapiens
  misc_RNA (1)...(19): siRNA sense strand
agaagaaaggauuagauug

SEQ ID NO: 603099 - RNA, 19 nt, Homo sapiens
  misc_RNA (1)...(19): siRNA sense strand
cagaggccaagaagaguaa

SEQ ID NO: 603100 - RNA, 19 nt, Homo sapiens
  misc_RNA (1)...(19): siRNA sense strand
gauuagauuggguaaagga

SEQ ID NO: 603101 - RNA, 19 nt, Homo sapiens
  misc_RNA (1)...(19): siRNA sense strand
aggauuagauuggguaaag

SEQ ID NO: 603102 - RNA, 19 nt, Homo sapiens
  misc_RNA (1)...(19): siRNA sense strand
uggacucucucaucaauac

SEQ ID NO: 603103 - RNA, 19 nt, Homo sapiens
  misc_RNA (1)...(19): siRNA sense strand
ugaagccuuucgcaaguuc

SEQ ID NO: 603104 - RNA, 19 nt, Homo sapiens
  misc_RNA (1)...(19): siRNA sense strand
ucaagagaccaaauguuca

SEQ ID NO: 603105 - RNA, 19 nt, Homo sapiens
  misc_RNA (1)...(19): siRNA sense strand
guugucccacucucuguua

SEQ ID NO: 603106 - RNA, 19 nt, Homo sapiens
  misc_RNA (1)...(19): siRNA sense strand
uugguuggcgccuugauua

SEQ ID NO: 603107 - RNA, 19 nt, Homo sapiens
  misc_RNA (1)...(19): siRNA sense strand
gggugauuguggcugaauu

SEQ ID NO: 603108 - RNA, 19 nt, Homo sapiens
  misc_RNA (1)...(19): siRNA sense strand
ugccuggacucucucauca

SEQ ID NO: 603109 - RNA, 19 nt, Homo sapiens
  misc_RNA (1)...(19): siRNA sense strand
ugacucguuugugcuggua

SEQ ID NO: 603110 - RNA, 19 nt, Homo sapiens
  misc_RNA (1)...(19): siRNA sense strand
aaugcucgauccaagaaug

SEQ ID NO: 603111 - RNA, 19 nt, Homo sapiens
  misc_RNA (1)...(19): siRNA sense strand
cagauauacugugccuuca

SEQ ID NO: 603112 - RNA, 19 nt, Homo sapiens
  misc_RNA (1)...(19): siRNA sense strand
caagagaccaaauguucag

SEQ ID NO: 603113 - RNA, 19 nt, Homo sapiens
  misc_RNA (1)...(19): siRNA sense strand
auacugugccuucaagaga

SEQ ID NO: 603114 - RNA, 19 nt, Homo sapiens
  misc_RNA (1)...(19): siRNA sense strand
aaaccugccacacucaaga

SEQ ID NO: 603115 - RNA, 19 nt, Homo sapiens
  misc_RNA (1)...(19): siRNA sense strand
uucaagagaccaaauguuc

SEQ ID NO: 603116 - RNA, 19 nt, Homo sapiens
  misc_RNA (1)...(19): siRNA sense strand
acagcaagauccguuccaa

SEQ ID NO: 603117 - RNA, 19 nt, Homo sapiens
  misc_RNA (1)...(19): siRNA sense strand
gaagaagccccagauauac

SEQ ID NO: 603118 - RNA, 19 nt, Homo sapiens
  misc_RNA (1)...(19): siRNA sense strand
uuaccugcauugugugaca

SEQ ID NO: 603119 - RNA, 19 nt, Homo sapiens
  misc_RNA (1)...(19): siRNA sense strand
ggauuagauuggguaaagg

SEQ ID NO: 603120 - RNA, 19 nt, Homo sapiens
  misc_RNA (1)...(19): siRNA sense strand
ugauuguggcugaauuuga

SEQ ID NO: 603121 - RNA, 19 nt, Homo sapiens
  misc_RNA (1)...(19): siRNA sense strand
aacagcauauguaccuaau

SEQ ID NO: 603122 - RNA, 19 nt, Homo sapiens
  misc_RNA (1)...(19): siRNA sense strand
gcucgauccaagaauguug

SEQ ID NO: 603123 - RNA, 19 nt, Homo sapiens
  misc_RNA (1)...(19): siRNA sense strand
caauacuggucagcuccuu

SEQ ID NO: 603124 - RNA, 19 nt, Homo sapiens
  misc_RNA (1)...(19): siRNA sense strand
caaaguuucuuacggcaua

SEQ ID NO: 603125 - RNA, 19 nt, Homo sapiens
  misc_RNA (1)...(19): siRNA sense strand
gagccuggauuaagaagaa

SEQ ID NO: 603126 - RNA, 19 nt, Homo sapiens
  misc_RNA (1)...(19): siRNA sense strand
ggaagaagccccagauaua

SEQ ID NO: 603127 - RNA, 19 nt, Homo sapiens
  misc_RNA (1)...(19): siRNA sense strand
gaagaaaggauuagauugg

SEQ ID NO: 603128 - RNA, 19 nt, Homo sapiens
  misc_RNA (1)...(19): siRNA sense strand
gggaugagcucaggacaga

SEQ ID NO: 603129 - RNA, 19 nt, Homo sapiens
  misc_RNA (1)...(19): siRNA sense strand
gcgcugggaugaagccuuu

SEQ ID NO: 603130 - RNA, 19 nt, Homo sapiens
  misc_RNA (1)...(19): siRNA sense strand
gaugaagccuuucgcaagu

SEQ ID NO: 603131 - RNA, 19 nt, Homo sapiens
  misc_RNA (1)...(19): siRNA sense strand
gaacaaacuaccagcugaa

SEQ ID NO: 603132 - RNA, 19 nt, Homo sapiens
  misc_RNA (1)...(19): siRNA sense strand
gagaccaaauguucagaga

SEQ ID NO: 603133 - RNA, 19 nt, Homo sapiens
  misc_RNA (1)...(19): siRNA sense strand
gauauacugugccuucaag

SEQ ID NO: 603134 - RNA, 19 nt, Homo sapiens
  misc_RNA (1)...(19): siRNA sense strand
ggauuaagaagaaaggauu

SEQ ID NO: 603135 - RNA, 19 nt, Homo sapiens
  misc_RNA (1)...(19): siRNA sense strand
gaucugcucuuggaaugug

SEQ ID NO: 603136 - RNA, 19 nt, Homo sapiens
  misc_RNA (1)...(19): siRNA sense strand
caaacuaccagcugaacuu

SEQ ID NO: 603137 - RNA, 19 nt, Homo sapiens
  misc_RNA (1)...(19): siRNA sense strand
cuucgagccuggauuaaga

SEQ ID NO: 603138 - RNA, 19 nt, Homo sapiens
  misc_RNA (1)...(19): siRNA sense strand
uaacagcauauguaccuaa

SEQ ID NO: 603139 - RNA, 19 nt, Homo sapiens
  misc_RNA (1)...(19): siRNA sense strand
uagauuggguaaaggaaga

SEQ ID NO: 603140 - RNA, 19 nt, Homo sapiens
  misc_RNA (1)...(19): siRNA sense strand
ucuguuaccugcauugugu

SEQ ID NO: 603141 - RNA, 19 nt, Homo sapiens
  misc_RNA (1)...(19): siRNA sense strand
ggagcugccuggacucucu

SEQ ID NO: 603142 - RNA, 19 nt, Homo sapiens
  misc_RNA (1)...(19): siRNA sense strand
gauuguggcugaauuugac

SEQ ID NO: 603143 - RNA, 19 nt, Homo sapiens
  misc_RNA (1)...(19): siRNA sense strand
ggucagcuccuucggacaa

SEQ ID NO: 603144 - RNA, 19 nt, Homo sapiens
  misc_RNA (1)...(19): siRNA sense strand
gaauguggaugggcuucga

SEQ ID NO: 603145 - RNA, 19 nt, Homo sapiens
  misc_RNA (1)...(19): siRNA sense strand
ccagaggccaagaagagua

SEQ ID NO: 603146 - RNA, 19 nt, Homo sapiens
  misc_RNA (1)...(19): siRNA sense strand
ccuggacucucucaucaau

SEQ ID NO: 603147 - RNA, 19 nt, Homo sapiens
  misc_RNA (1)...(19): siRNA sense strand
ggugauuguggcugaauuu

SEQ ID NO: 603148 - RNA, 19 nt, Homo sapiens
  misc_RNA (1)...(19): siRNA sense strand
guaacagcauauguaccua

SEQ ID NO: 603149 - RNA, 19 nt, Homo sapiens
  misc_RNA (1)...(19): siRNA sense strand
ggcugaauuugacucguuu

SEQ ID NO: 603150 - RNA, 19 nt, Homo sapiens
  misc_RNA (1)...(19): siRNA sense strand
uggcugaauuugacucguu

SEQ ID NO: 603151 - RNA, 19 nt, Homo sapiens
  misc_RNA (1)...(19): siRNA sense strand
gcaaaccugccacacucaa

SEQ ID NO: 603152 - RNA, 19 nt, Homo sapiens
  misc_RNA (1)...(19): siRNA sense strand
guuggcgccuugauuacuu

SEQ ID NO: 603153 - RNA, 19 nt, Homo sapiens
  misc_RNA (1)...(19): siRNA sense strand
ggacaaggaaggguacagu

SEQ ID NO: 603154 - RNA, 19 nt, Homo sapiens
  misc_RNA (1)...(19): siRNA sense strand
ugaaugcucgauccaagaa

SEQ ID NO: 603155 - RNA, 19 nt, Homo sapiens
  misc_RNA (1)...(19): siRNA sense strand
agaagaaaggauuagauug

SEQ ID NO: 603156 - RNA, 19 nt, Homo sapiens
  misc_RNA (1)...(19): siRNA sense strand
cagaggccaagaagaguaa

SEQ ID NO: 603157 - RNA, 19 nt, Homo sapiens
  misc_RNA (1)...(19): siRNA sense strand
gauuagauuggguaaagga

SEQ ID NO: 603158 - RNA, 19 nt, Homo sapiens
  misc_RNA (1)...(19): siRNA sense strand
aggauuagauuggguaaag

SEQ ID NO: 603159 - RNA, 19 nt, Homo sapiens
  misc_RNA (1)...(19): siRNA sense strand
uggacucucucaucaauac

SEQ ID NO: 603160 - RNA, 19 nt, Homo sapiens
  misc_RNA (1)...(19): siRNA sense strand
ugaagccuuucgcaaguuc

SEQ ID NO: 603161 - RNA, 19 nt, Homo sapiens
  misc_RNA (1)...(19): siRNA sense strand
ucaagagaccaaauguuca

SEQ ID NO: 603162 - RNA, 19 nt, Homo sapiens
  misc_RNA (1)...(19): siRNA sense strand
guugucccacucucuguua

SEQ ID NO: 603163 - RNA, 19 nt, Homo sapiens
  misc_RNA (1)...(19): siRNA sense strand
uugguuggcgccuugauua

SEQ ID NO: 603164 - RNA, 19 nt, Homo sapiens
  misc_RNA (1)...(19): siRNA sense strand
gggugauuguggcugaauu

SEQ ID NO: 603165 - RNA, 19 nt, Homo sapiens
  misc_RNA (1)...(19): siRNA sense strand
ugccuggacucucucauca

SEQ ID NO: 603166 - RNA, 19 nt, Homo sapiens
  misc_RNA (1)...(19): siRNA sense strand
ugacucguuugugcuggua

SEQ ID NO: 603167 - RNA, 19 nt, Homo sapiens
  misc_RNA (1)...(19): siRNA sense strand
aaugcucgauccaagaaug

SEQ ID NO: 603168 - RNA, 19 nt, Homo sapiens
  misc_RNA (1)...(19): siRNA sense strand
cagauauacugugccuuca

SEQ ID NO: 603169 - RNA, 19 nt, Homo sapiens
  misc_RNA (1)...(19): siRNA sense strand
caagagaccaaauguucag

SEQ ID NO: 603170 - RNA, 19 nt, Homo sapiens
  misc_RNA (1)...(19): siRNA sense strand
auacugugccuucaagaga

SEQ ID NO: 603171 - RNA, 19 nt, Homo sapiens
  misc_RNA (1)...(19): siRNA sense strand
aaaccugccacacucaaga

SEQ ID NO: 603172 - RNA, 19 nt, Homo sapiens
  misc_RNA (1)...(19): siRNA sense strand
uucaagagaccaaauguuc

SEQ ID NO: 603173 - RNA, 19 nt, Homo sapiens
  misc_RNA (1)...(19): siRNA sense strand
acagcaagauccguuccaa

SEQ ID NO: 603174 - RNA, 19 nt, Homo sapiens
  misc_RNA (1)...(19): siRNA sense strand
gaagaagccccagauauac

SEQ ID NO: 603175 - RNA, 19 nt, Homo sapiens
  misc_RNA (1)...(19): siRNA sense strand
uuaccugcauugugugaca

SEQ ID NO: 603176 - RNA, 19 nt, Homo sapiens
  misc_RNA (1)...(19): siRNA sense strand
ggauuagauuggguaaagg

SEQ ID NO: 603177 - RNA, 19 nt, Homo sapiens
  misc_RNA (1)...(19): siRNA sense strand
ugauuguggcugaauuuga

SEQ ID NO: 603178 - RNA, 19 nt, Homo sapiens
  misc_RNA (1)...(19): siRNA sense strand
aacagcauauguaccuaau

SEQ ID NO: 603179 - RNA, 19 nt, Homo sapiens
  misc_RNA (1)...(19): siRNA sense strand
gcucgauccaagaauguug

SEQ ID NO: 603180 - RNA, 19 nt, Homo sapiens
  misc_RNA (1)...(19): siRNA sense strand
caauacuggucagcuccuu

SEQ ID NO: 603181 - RNA, 19 nt, Homo sapiens
  misc_RNA (1)...(19): siRNA sense strand
caaaguuucuuacggcaua

SEQ ID NO: 603182 - RNA, 19 nt, Homo sapiens
  misc_RNA (1)...(19): siRNA sense strand
gagccuggauuaagaagaa

SEQ ID NO: 603183 - RNA, 19 nt, Homo sapiens
  misc_RNA (1)...(19): siRNA sense strand
ggaagaagccccagauaua

SEQ ID NO: 603184 - RNA, 19 nt, Homo sapiens
  misc_RNA (1)...(19): siRNA sense strand
gaagaaaggauuagauugg

SEQ ID NO: 603185 - RNA, 19 nt, Homo sapiens
  misc_RNA (1)...(19): siRNA sense strand
gggaugagcucaggacaga

SEQ ID NO: 603186 - RNA, 19 nt, Homo sapiens
  misc_RNA (1)...(19): siRNA sense strand
gcgcugggaugaagccuuu

SEQ ID NO: 603187 - RNA, 19 nt, Homo sapiens
  misc_RNA (1)...(19): siRNA sense strand
gaugaagccuuucgcaagu

SEQ ID NO: 603188 - RNA, 19 nt, Homo sapiens
  misc_RNA (1)...(19): siRNA sense strand
gaacaaacuaccagcugaa

SEQ ID NO: 603189 - RNA, 19 nt, Homo sapiens
  misc_RNA (1)...(19): siRNA sense strand
gagaccaaauguucagaga

SEQ ID NO: 603190 - RNA, 19 nt, Homo sapiens
  misc_RNA (1)...(19): siRNA sense strand
gauauacugugccuucaag

SEQ ID NO: 603191 - RNA, 19 nt, Homo sapiens
  misc_RNA (1)...(19): siRNA sense strand
ggauuaagaagaaaggauu

SEQ ID NO: 603192 - RNA, 19 nt, Homo sapiens
  misc_RNA (1)...(19): siRNA sense strand
gaucugcucuuggaaugug

SEQ ID NO: 603193 - RNA, 19 nt, Homo sapiens
  misc_RNA (1)...(19): siRNA sense strand
caaacuaccagcugaacuu

SEQ ID NO: 603194 - RNA, 19 nt, Homo sapiens
  misc_RNA (1)...(19): siRNA sense strand
cuucgagccuggauuaaga

SEQ ID NO: 603195 - RNA, 19 nt, Homo sapiens
  misc_RNA (1)...(19): siRNA sense strand
uaacagcauauguaccuaa

SEQ ID NO: 603196 - RNA, 19 nt, Homo sapiens
  misc_RNA (1)...(19): siRNA sense strand
uagauuggguaaaggaaga

SEQ ID NO: 603197 - RNA, 19 nt, Homo sapiens
  misc_RNA (1)...(19): siRNA sense strand
ucuguuaccugcauugugu

SEQ ID NO: 603198 - RNA, 19 nt, Homo sapiens
  misc_RNA (1)...(19): siRNA sense strand
ggagcugccuggacucucu

SEQ ID NO: 603199 - RNA, 19 nt, Homo sapiens
  misc_RNA (1)...(19): siRNA sense strand
gauuguggcugaauuugac

SEQ ID NO: 603200 - RNA, 19 nt, Homo sapiens
  misc_RNA (1)...(19): siRNA sense strand
ggucagcuccuucggacaa

SEQ ID NO: 603201 - RNA, 19 nt, Homo sapiens
  misc_RNA (1)...(19): siRNA sense strand
gaauguggaugggcuucga

SEQ ID NO: 603202 - RNA, 19 nt, Homo sapiens
  misc_RNA (1)...(19): siRNA sense strand
ccagaggccaagaagagua

SEQ ID NO: 603203 - RNA, 19 nt, Homo sapiens
  misc_RNA (1)...(19): siRNA sense strand
ccuggacucucucaucaau

SEQ ID NO: 603204 - RNA, 19 nt, Homo sapiens
  misc_RNA (1)...(19): siRNA sense strand
ggugauuguggcugaauuu

SEQ ID NO: 603205 - RNA, 19 nt, Homo sapiens
  misc_RNA (1)...(19): siRNA sense strand
guaacagcauauguaccua

SEQ ID NO: 603206 - RNA, 19 nt, Homo sapiens
  misc_RNA (1)...(19): siRNA sense strand
ggcugaauuugacucguuu

SEQ ID NO: 603207 - RNA, 19 nt, Homo sapiens
  misc_RNA (1)...(19): siRNA sense strand
uggcugaauuugacucguu

SEQ ID NO: 603208 - RNA, 19 nt, Homo sapiens
  misc_RNA (1)...(19): siRNA sense strand
gcaaaccugccacacucaa

SEQ ID NO: 603209 - RNA, 19 nt, Homo sapiens
  misc_RNA (1)...(19): siRNA sense strand
guuggcgccuugauuacuu

SEQ ID NO: 603210 - RNA, 19 nt, Homo sapiens
  misc_RNA (1)...(19): siRNA sense strand
ggacaaggaaggguacagu

SEQ ID NO: 603211 - RNA, 19 nt, Homo sapiens
  misc_RNA (1)...(19): siRNA sense strand
ugaaugcucgauccaagaa

SEQ ID NO: 603212 - RNA, 19 nt, Homo sapiens
  misc_RNA (1)...(19): siRNA sense strand
agaagaaaggauuagauug

SEQ ID NO: 603213 - RNA, 19 nt, Homo sapiens
  misc_RNA (1)...(19): siRNA sense strand
cagaggccaagaagaguaa

SEQ ID NO: 603214 - RNA, 19 nt, Homo sapiens
  misc_RNA (1)...(19): siRNA sense strand
gauuagauuggguaaagga

SEQ ID NO: 603215 - RNA, 19 nt, Homo sapiens
  misc_RNA (1)...(19): siRNA sense strand
aggauuagauuggguaaag

SEQ ID NO: 603216 - RNA, 19 nt, Homo sapiens
  misc_RNA (1)...(19): siRNA sense strand
uggacucucucaucaauac

SEQ ID NO: 603217 - RNA, 19 nt, Homo sapiens
  misc_RNA (1)...(19): siRNA sense strand
ugaagccuuucgcaaguuc

SEQ ID NO: 603218 - RNA, 19 nt, Homo sapiens
  misc_RNA (1)...(19): siRNA sense strand
ucaagagaccaaauguuca

SEQ ID NO: 603219 - RNA, 19 nt, Homo sapiens
  misc_RNA (1)...(19): siRNA sense strand
guugucccacucucuguua

SEQ ID NO: 603220 - RNA, 19 nt, Homo sapiens
  misc_RNA (1)...(19): siRNA sense strand
uugguuggcgccuugauua

SEQ ID NO: 603221 - RNA, 19 nt, Homo sapiens
  misc_RNA (1)...(19): siRNA sense strand
gggugauuguggcugaauu

SEQ ID NO: 603222 - RNA, 19 nt, Homo sapiens
  misc_RNA (1)...(19): siRNA sense strand
ugccuggacucucucauca

SEQ ID NO: 603223 - RNA, 19 nt, Homo sapiens
  misc_RNA (1)...(19): siRNA sense strand
ugacucguuugugcuggua

SEQ ID NO: 603224 - RNA, 19 nt, Homo sapiens
  misc_RNA (1)...(19): siRNA sense strand
aaugcucgauccaagaaug

SEQ ID NO: 603225 - RNA, 19 nt, Homo sapiens
  misc_RNA (1)...(19): siRNA sense strand
cagauauacugugccuuca

SEQ ID NO: 603226 - RNA, 19 nt, Homo sapiens
  misc_RNA (1)...(19): siRNA sense strand
caagagaccaaauguucag

SEQ ID NO: 603227 - RNA, 19 nt, Homo sapiens
  misc_RNA (1)...(19): siRNA sense strand
auacugugccuucaagaga

SEQ ID NO: 603228 - RNA, 19 nt, Homo sapiens
  misc_RNA (1)...(19): siRNA sense strand
aaaccugccacacucaaga

SEQ ID NO: 603229 - RNA, 19 nt, Homo sapiens
  misc_RNA (1)...(19): siRNA sense strand
uucaagagaccaaauguuc

SEQ ID NO: 603230 - RNA, 19 nt, Homo sapiens
  misc_RNA (1)...(19): siRNA sense strand
acagcaagauccguuccaa

SEQ ID NO: 603231 - RNA, 19 nt, Homo sapiens
  misc_RNA (1)...(19): siRNA sense strand
gaagaagccccagauauac

SEQ ID NO: 603232 - RNA, 19 nt, Homo sapiens
  misc_RNA (1)...(19): siRNA sense strand
uuaccugcauugugugaca

SEQ ID NO: 603233 - RNA, 19 nt, Homo sapiens
  misc_RNA (1)...(19): siRNA sense strand
ggauuagauuggguaaagg

SEQ ID NO: 603234 - RNA, 19 nt, Homo sapiens
  misc_RNA (1)...(19): siRNA sense strand
ugauuguggcugaauuuga

SEQ ID NO: 603235 - RNA, 19 nt, Homo sapiens
  misc_RNA (1)...(19): siRNA sense strand
aacagcauauguaccuaau

SEQ ID NO: 603236 - RNA, 19 nt, Homo sapiens
  misc_RNA (1)...(19): siRNA sense strand
gcucgauccaagaauguug

SEQ ID NO: 603237 - RNA, 19 nt, Homo sapiens
  misc_RNA (1)...(19): siRNA sense strand
caauacuggucagcuccuu

SEQ ID NO: 603238 - RNA, 19 nt, Homo sapiens
  misc_RNA (1)...(19): siRNA sense strand
caaaguuucuuacggcaua

SEQ ID NO: 603239 - RNA, 19 nt, Homo sapiens
  misc_RNA (1)...(19): siRNA sense strand
gagccuggauuaagaagaa

SEQ ID NO: 603240 - RNA, 19 nt, Homo sapiens
  misc_RNA (1)...(19): siRNA sense strand
ggaagaagccccagauaua

SEQ ID NO: 603241 - RNA, 19 nt, Homo sapiens
  misc_RNA (1)...(19): siRNA sense strand
gaagaaaggauuagauugg

SEQ ID NO: 603242 - RNA, 19 nt, Homo sapiens
  misc_RNA (1)...(19): siRNA sense strand
gggaugagcucaggacaga

SEQ ID NO: 603243 - RNA, 19 nt, Homo sapiens
  misc_RNA (1)...(19): siRNA sense strand
gcgcugggaugaagccuuu

SEQ ID NO: 603244 - RNA, 19 nt, Homo sapiens
  misc_RNA (1)...(19): siRNA sense strand
gaugaagccuuucgcaagu

SEQ ID NO: 603245 - RNA, 19 nt, Homo sapiens
  misc_RNA (1)...(19): siRNA sense strand
gaacaaacuaccagcugaa

SEQ ID NO: 603246 - RNA, 19 nt, Homo sapiens
  misc_RNA (1)...(19): siRNA sense strand
gagaccaaauguucagaga

SEQ ID NO: 603247 - RNA, 19 nt, Homo sapiens
  misc_RNA (1)...(19): siRNA sense strand
gauauacugugccuucaag

SEQ ID NO: 603248 - RNA, 19 nt, Homo sapiens
  misc_RNA (1)...(19): siRNA sense strand
ggauuaagaagaaaggauu

SEQ ID NO: 603249 - RNA, 19 nt, Homo sapiens
  misc_RNA (1)...(19): siRNA sense strand
gaucugcucuuggaaugug

SEQ ID NO: 603250 - RNA, 19 nt, Homo sapiens
  misc_RNA (1)...(19): siRNA sense strand
caaacuaccagcugaacuu

SEQ ID NO: 603251 - RNA, 19 nt, Homo sapiens
  misc_RNA (1)...(19): siRNA sense strand
cuucgagccuggauuaaga

SEQ ID NO: 603252 - RNA, 19 nt, Homo sapiens
  misc_RNA (1)...(19): siRNA sense strand
uaacagcauauguaccuaa

SEQ ID NO: 603253 - RNA, 19 nt, Homo sapiens
  misc_RNA (1)...(19): siRNA sense strand
uagauuggguaaaggaaga

SEQ ID NO: 603254 - RNA, 19 nt, Homo sapiens
  misc_RNA (1)...(19): siRNA sense strand
ucuguuaccugcauugugu

SEQ ID NO: 603255 - RNA, 19 nt, Homo sapiens
  misc_RNA (1)...(19): siRNA sense strand
ggagcugccuggacucucu

SEQ ID NO: 603256 - RNA, 19 nt, Homo sapiens
  misc_RNA (1)...(19): siRNA sense strand
gauuguggcugaauuugac

SEQ ID NO: 603257 - RNA, 19 nt, Homo sapiens
  misc_RNA (1)...(19): siRNA sense strand
ggucagcuccuucggacaa

SEQ ID NO: 603258 - RNA, 19 nt, Homo sapiens
  misc_RNA (1)...(19): siRNA sense strand
gaauguggaugggcuucga

SEQ ID NO: 603259 - RNA, 19 nt, Homo sapiens
  misc_RNA (1)...(19): siRNA sense strand
ccagaggccaagaagagua

SEQ ID NO: 603260 - RNA, 19 nt, Homo sapiens
  misc_RNA (1)...(19): siRNA sense strand
ccuggacucucucaucaau

SEQ ID NO: 603261 - RNA, 19 nt, Homo sapiens
  misc_RNA (1)...(19): siRNA sense strand
ggugauuguggcugaauuu

SEQ ID NO: 603262 - RNA, 19 nt, Homo sapiens
  misc_RNA (1)...(19): siRNA sense strand
guaacagcauauguaccua

SEQ ID NO: 603263 - RNA, 19 nt, Homo sapiens
  misc_RNA (1)...(19): siRNA sense strand
ggcugaauuugacucguuu

SEQ ID NO: 603264 - RNA, 19 nt, Homo sapiens
  misc_RNA (1)...(19): siRNA sense strand
uggcugaauuugacucguu

SEQ ID NO: 603265 - RNA, 19 nt, Homo sapiens
  misc_RNA (1)...(19): siRNA sense strand
gcaaaccugccacacucaa

SEQ ID NO: 603266 - RNA, 19 nt, Homo sapiens
  misc_RNA (1)...(19): siRNA sense strand
guuggcgccuugauuacuu

SEQ ID NO: 603267 - RNA, 19 nt, Homo sapiens
  misc_RNA (1)...(19): siRNA sense strand
ggacaaggaaggguacagu

SEQ ID NO: 603268 - RNA, 19 nt, Homo sapiens
  misc_RNA (1)...(19): siRNA sense strand
ugaaugcucgauccaagaa

SEQ ID NO: 603269 - RNA, 19 nt, Homo sapiens
  misc_RNA (1)...(19): siRNA sense strand
agaagaaaggauuagauug

SEQ ID NO: 603270 - RNA, 19 nt, Homo sapiens
  misc_RNA (1)...(19): siRNA sense strand
cagaggccaagaagaguaa

SEQ ID NO: 603271 - RNA, 19 nt, Homo sapiens
  misc_RNA (1)...(19): siRNA sense strand
gauuagauuggguaaagga

SEQ ID NO: 603272 - RNA, 19 nt, Homo sapiens
  misc_RNA (1)...(19): siRNA sense strand
aggauuagauuggguaaag

SEQ ID NO: 603273 - RNA, 19 nt, Homo sapiens
  misc_RNA (1)...(19): siRNA sense strand
uggacucucucaucaauac

SEQ ID NO: 603274 - RNA, 19 nt, Homo sapiens
  misc_RNA (1)...(19): siRNA sense strand
ugaagccuuucgcaaguuc

SEQ ID NO: 603275 - RNA, 19 nt, Homo sapiens
  misc_RNA (1)...(19): siRNA sense strand
ucaagagaccaaauguuca

SEQ ID NO: 603276 - RNA, 19 nt, Homo sapiens
  misc_RNA (1)...(19): siRNA sense strand
guugucccacucucuguua

SEQ ID NO: 603277 - RNA, 19 nt, Homo sapiens
  misc_RNA (1)...(19): siRNA sense strand
uugguuggcgccuugauua

SEQ ID NO: 603278 - RNA, 19 nt, Homo sapiens
  misc_RNA (1)...(19): siRNA sense strand
gggugauuguggcugaauu

SEQ ID NO: 603279 - RNA, 19 nt, Homo sapiens
  misc_RNA (1)...(19): siRNA sense strand
ugccuggacucucucauca

SEQ ID NO: 603280 - RNA, 19 nt, Homo sapiens
  misc_RNA (1)...(19): siRNA sense strand
ugacucguuugugcuggua

SEQ ID NO: 603281 - RNA, 19 nt, Homo sapiens
  misc_RNA (1)...(19): siRNA sense strand
aaugcucgauccaagaaug

SEQ ID NO: 603282 - RNA, 19 nt, Homo sapiens
  misc_RNA (1)...(19): siRNA sense strand
cagauauacugugccuuca

SEQ ID NO: 603283 - RNA, 19 nt, Homo sapiens
  misc_RNA (1)...(19): siRNA sense strand
caagagaccaaauguucag

SEQ ID NO: 603284 - RNA, 19 nt, Homo sapiens
  misc_RNA (1)...(19): siRNA sense strand
auacugugccuucaagaga

SEQ ID NO: 603285 - RNA, 19 nt, Homo sapiens
  misc_RNA (1)...(19): siRNA sense strand
aaaccugccacacucaaga

SEQ ID NO: 603286 - RNA, 19 nt, Homo sapiens
  misc_RNA (1)...(19): siRNA sense strand
uucaagagaccaaauguuc

SEQ ID NO: 603287 - RNA, 19 nt, Homo sapiens
  misc_RNA (1)...(19): siRNA sense strand
acagcaagauccguuccaa

SEQ ID NO: 603288 - RNA, 19 nt, Homo sapiens
  misc_RNA (1)...(19): siRNA sense strand
gaagaagccccagauauac

SEQ ID NO: 603289 - RNA, 19 nt, Homo sapiens
  misc_RNA (1)...(19): siRNA sense strand
uuaccugcauugugugaca

SEQ ID NO: 603290 - RNA, 19 nt, Homo sapiens
  misc_RNA (1)...(19): siRNA sense strand
ggauuagauuggguaaagg

SEQ ID NO: 603291 - RNA, 19 nt, Homo sapiens
  misc_RNA (1)...(19): siRNA sense strand
ugauuguggcugaauuuga

SEQ ID NO: 603292 - RNA, 19 nt, Homo sapiens
  misc_RNA (1)...(19): siRNA sense strand
aacagcauauguaccuaau

SEQ ID NO: 603293 - RNA, 19 nt, Homo sapiens
  misc_RNA (1)...(19): siRNA sense strand
gcucgauccaagaauguug

SEQ ID NO: 603294 - RNA, 19 nt, Homo sapiens
  misc_RNA (1)...(19): siRNA sense strand
caauacuggucagcuccuu

SEQ ID NO: 603295 - RNA, 19 nt, Homo sapiens
  misc_RNA (1)...(19): siRNA sense strand
caaaguuucuuacggcaua

SEQ ID NO: 603296 - RNA, 19 nt, Homo sapiens
  misc_RNA (1)...(19): siRNA sense strand
gagccuggauuaagaagaa

SEQ ID NO: 603297 - RNA, 19 nt, Homo sapiens
  misc_RNA (1)...(19): siRNA sense strand
ggaagaagccccagauaua

SEQ ID NO: 603298 - RNA, 19 nt, Homo sapiens
  misc_RNA (1)...(19): siRNA sense strand
gaagaaaggauuagauugg

SEQ ID NO: 603299 - RNA, 19 nt, Homo sapiens
  misc_RNA (1)...(19): siRNA sense strand
gggaugagcucaggacaga

SEQ ID NO: 603300 - RNA, 19 nt, Homo sapiens
  misc_RNA (1)...(19): siRNA sense strand
gcgcugggaugaagccuuu

SEQ ID NO: 603301 - RNA, 19 nt, Homo sapiens
  misc_RNA (1)...(19): siRNA sense strand
gaugaagccuuucgcaagu

SEQ ID NO: 603302 - RNA, 19 nt, Homo sapiens
  misc_RNA (1)...(19): siRNA sense strand
gaacaaacuaccagcugaa

SEQ ID NO: 603303 - RNA, 19 nt, Homo sapiens
  misc_RNA (1)...(19): siRNA sense strand
gagaccaaauguucagaga

SEQ ID NO: 603304 - RNA, 19 nt, Homo sapiens
  misc_RNA (1)...(19): siRNA sense strand
gauauacugugccuucaag

SEQ ID NO: 603305 - RNA, 19 nt, Homo sapiens
  misc_RNA (1)...(19): siRNA sense strand
ggauuaagaagaaaggauu

SEQ ID NO: 603306 - RNA, 19 nt, Homo sapiens
  misc_RNA (1)...(19): siRNA sense strand
gaucugcucuuggaaugug

SEQ ID NO: 603307 - RNA, 19 nt, Homo sapiens
  misc_RNA (1)...(19): siRNA sense strand
caaacuaccagcugaacuu

SEQ ID NO: 603308 - RNA, 19 nt, Homo sapiens
  misc_RNA (1)...(19): siRNA sense strand
cuucgagccuggauuaaga

SEQ ID NO: 603309 - RNA, 19 nt, Homo sapiens
  misc_RNA (1)...(19): siRNA sense strand
uaacagcauauguaccuaa

SEQ ID NO: 603310 - RNA, 19 nt, Homo sapiens
  misc_RNA (1)...(19): siRNA sense strand
uagauuggguaaaggaaga

SEQ ID NO: 603311 - RNA, 19 nt, Homo sapiens
  misc_RNA (1)...(19): siRNA sense strand
ucuguuaccugcauugugu

SEQ ID NO: 603312 - RNA, 19 nt, Homo sapiens
  misc_RNA (1)...(19): siRNA sense strand
ggagcugccuggacucucu

SEQ ID NO: 603313 - RNA, 19 nt, Homo sapiens
  misc_RNA (1)...(19): siRNA sense strand
gauuguggcugaauuugac

SEQ ID NO: 603314 - RNA, 19 nt, Homo sapiens
  misc_RNA (1)...(19): siRNA sense strand
ggucagcuccuucggacaa

SEQ ID NO: 603315 - RNA, 19 nt, Homo sapiens
  misc_RNA (1)...(19): siRNA sense strand
gaauguggaugggcuucga

SEQ ID NO: 603316 - RNA, 19 nt, Homo sapiens
  misc_RNA (1)...(19): siRNA sense strand
ccagaggccaagaagagua

SEQ ID NO: 603317 - RNA, 19 nt, Homo sapiens
  misc_RNA (1)...(19): siRNA sense strand
ccuggacucucucaucaau

SEQ ID NO: 603318 - RNA, 19 nt, Homo sapiens
  misc_RNA (1)...(19): siRNA sense strand
ggugauuguggcugaauuu

SEQ ID NO: 603319 - RNA, 19 nt, Homo sapiens
  misc_RNA (1)...(19): siRNA sense strand
guaacagcauauguaccua

SEQ ID NO: 603320 - RNA, 19 nt, Homo sapiens
  misc_RNA (1)...(19): siRNA sense strand
ggcugaauuugacucguuu

SEQ ID NO: 603321 - RNA, 19 nt, Homo sapiens
  misc_RNA (1)...(19): siRNA sense strand
uggcugaauuugacucguu

SEQ ID NO: 603322 - RNA, 19 nt, Homo sapiens
  misc_RNA (1)...(19): siRNA sense strand
gcaaaccugccacacucaa

SEQ ID NO: 603323 - RNA, 19 nt, Homo sapiens
  misc_RNA (1)...(19): siRNA sense strand
guuggcgccuugauuacuu

SEQ ID NO: 603324 - RNA, 19 nt, Homo sapiens
  misc_RNA (1)...(19): siRNA sense strand
ggacaaggaaggguacagu

SEQ ID NO: 603325 - RNA, 19 nt, Homo sapiens
  misc_RNA (1)...(19): siRNA sense strand
ugaaugcucgauccaagaa

SEQ ID NO: 603326 - RNA, 19 nt, Homo sapiens
  misc_RNA (1)...(19): siRNA sense strand
agaagaaaggauuagauug

SEQ ID NO: 603327 - RNA, 19 nt, Homo sapiens
  misc_RNA (1)...(19): siRNA sense strand
cagaggccaagaagaguaa

SEQ ID NO: 603328 - RNA, 19 nt, Homo sapiens
  misc_RNA (1)...(19): siRNA sense strand
gauuagauuggguaaagga

SEQ ID NO: 603329 - RNA, 19 nt, Homo sapiens
  misc_RNA (1)...(19): siRNA sense strand
aggauuagauuggguaaag

SEQ ID NO: 603330 - RNA, 19 nt, Homo sapiens
  misc_RNA (1)...(19): siRNA sense strand
uggacucucucaucaauac

SEQ ID NO: 603331 - RNA, 19 nt, Homo sapiens
  misc_RNA (1)...(19): siRNA sense strand
ugaagccuuucgcaaguuc

SEQ ID NO: 603332 - RNA, 19 nt, Homo sapiens
  misc_RNA (1)...(19): siRNA sense strand
ucaagagaccaaauguuca

SEQ ID NO: 603333 - RNA, 19 nt, Homo sapiens
  misc_RNA (1)...(19): siRNA sense strand
guugucccacucucuguua

SEQ ID NO: 603334 - RNA, 19 nt, Homo sapiens
  misc_RNA (1)...(19): siRNA sense strand
uugguuggcgccuugauua

SEQ ID NO: 603335 - RNA, 19 nt, Homo sapiens
  misc_RNA (1)...(19): siRNA sense strand
gggugauuguggcugaauu

SEQ ID NO: 603336 - RNA, 19 nt, Homo sapiens
  misc_RNA (1)...(19): siRNA sense strand
ugccuggacucucucauca

SEQ ID NO: 603337 - RNA, 19 nt, Homo sapiens
  misc_RNA (1)...(19): siRNA sense strand
ugacucguuugugcuggua

SEQ ID NO: 603338 - RNA, 19 nt, Homo sapiens
  misc_RNA (1)...(19): siRNA sense strand
aaugcucgauccaagaaug

SEQ ID NO: 603339 - RNA, 19 nt, Homo sapiens
  misc_RNA (1)...(19): siRNA sense strand
cagauauacugugccuuca

SEQ ID NO: 603340 - RNA, 19 nt, Homo sapiens
  misc_RNA (1)...(19): siRNA sense strand
caagagaccaaauguucag

SEQ ID NO: 603341 - RNA, 19 nt, Homo sapiens
  misc_RNA (1)...(19): siRNA sense strand
auacugugccuucaagaga

SEQ ID NO: 603342 - RNA, 19 nt, Homo sapiens
  misc_RNA (1)...(19): siRNA sense strand
aaaccugccacacucaaga

SEQ ID NO: 603343 - RNA, 19 nt, Homo sapiens
  misc_RNA (1)...(19): siRNA sense strand
uucaagagaccaaauguuc

SEQ ID NO: 603344 - RNA, 19 nt, Homo sapiens
  misc_RNA (1)...(19): siRNA sense strand
acagcaagauccguuccaa

SEQ ID NO: 603345 - RNA, 19 nt, Homo sapiens
  misc_RNA (1)...(19): siRNA sense strand
gaagaagccccagauauac

SEQ ID NO: 603346 - RNA, 19 nt, Homo sapiens
  misc_RNA (1)...(19): siRNA sense strand
uuaccugcauugugugaca

SEQ ID NO: 603347 - RNA, 19 nt, Homo sapiens
  misc_RNA (1)...(19): siRNA sense strand
ggauuagauuggguaaagg

SEQ ID NO: 603348 - RNA, 19 nt, Homo sapiens
  misc_RNA (1)...(19): siRNA sense strand
ugauuguggcugaauuuga

SEQ ID NO: 603349 - RNA, 19 nt, Homo sapiens
  misc_RNA (1)...(19): siRNA sense strand
aacagcauauguaccuaau

SEQ ID NO: 603350 - RNA, 19 nt, Homo sapiens
  misc_RNA (1)...(19): siRNA sense strand
gcucgauccaagaauguug

SEQ ID NO: 603351 - RNA, 19 nt, Homo sapiens
  misc_RNA (1)...(19): siRNA sense strand
caauacuggucagcuccuu

SEQ ID NO: 603352 - RNA, 19 nt, Homo sapiens
  misc_RNA (1)...(19): siRNA sense strand
gagaacauccaucagaauu

SEQ ID NO: 603353 - RNA, 19 nt, Homo sapiens
  misc_RNA (1)...(19): siRNA sense strand
caacgaguacuucuacauu

SEQ ID NO: 603354 - RNA, 19 nt, Homo sapiens
  misc_RNA (1)...(19): siRNA sense strand
ccaagaggcgggagaagaa

SEQ ID NO: 603355 - RNA, 19 nt, Homo sapiens
  misc_RNA (1)...(19): siRNA sense strand
gaacauccaucagaauucc

SEQ ID NO: 603356 - RNA, 19 nt, Homo sapiens
  misc_RNA (1)...(19): siRNA sense strand
cggagaacauccaucagaa

SEQ ID NO: 603357 - RNA, 19 nt, Homo sapiens
  misc_RNA (1)...(19): siRNA sense strand
ggacgugcaccucaccauu

SEQ ID NO: 603358 - RNA, 19 nt, Homo sapiens
  misc_RNA (1)...(19): siRNA sense strand
gcaauggcaacgaguacuu

SEQ ID NO: 603359 - RNA, 19 nt, Homo sapiens
  misc_RNA (1)...(19): siRNA sense strand
ggagaacauccaucagaau

SEQ ID NO: 603360 - RNA, 19 nt, Homo sapiens
  misc_RNA (1)...(19): siRNA sense strand
gaaggguccucggagaaca

SEQ ID NO: 603361 - RNA, 19 nt, Homo sapiens
  misc_RNA (1)...(19): siRNA sense strand
guacuucuacauucugguu

SEQ ID NO: 603362 - RNA, 19 nt, Homo sapiens
  misc_RNA (1)...(19): siRNA sense strand
gcaacgaguacuucuacau

SEQ ID NO: 603363 - RNA, 19 nt, Homo sapiens
  misc_RNA (1)...(19): siRNA sense strand
gaaucaugcugggcuacau

SEQ ID NO: 603364 - RNA, 19 nt, Homo sapiens
  misc_RNA (1)...(19): siRNA sense strand
gcgaaggguccucggagaa

SEQ ID NO: 603365 - RNA, 19 nt, Homo sapiens
  misc_RNA (1)...(19): siRNA sense strand
gacgugcaccucaccauuc

SEQ ID NO: 603366 - RNA, 19 nt, Homo sapiens
  misc_RNA (1)...(19): siRNA sense strand
aacgaguacuucuacauuc

SEQ ID NO: 603367 - RNA, 19 nt, Homo sapiens
  misc_RNA (1)...(19): siRNA sense strand
aaauggagccucugaacag

SEQ ID NO: 603368 - RNA, 19 nt, Homo sapiens
  misc_RNA (1)...(19): siRNA sense strand
ccucggagaacauccauca

SEQ ID NO: 603369 - RNA, 19 nt, Homo sapiens
  misc_RNA (1)...(19): siRNA sense strand
ucggagaacauccaucaga

SEQ ID NO: 603370 - RNA, 19 nt, Homo sapiens
  misc_RNA (1)...(19): siRNA sense strand
augcugggcuacaugaaau

SEQ ID NO: 603371 - RNA, 19 nt, Homo sapiens
  misc_RNA (1)...(19): siRNA sense strand
gcggcaauggcaacgagua

SEQ ID NO: 603372 - RNA, 19 nt, Homo sapiens
  misc_RNA (1)...(19): siRNA sense strand
gaaaauggagccucugaac

SEQ ID NO: 603373 - RNA, 19 nt, Homo sapiens
  misc_RNA (1)...(19): siRNA sense strand
ggaaucaugcugggcuaca

SEQ ID NO: 603374 - RNA, 19 nt, Homo sapiens
  misc_RNA (1)...(19): siRNA sense strand
ugggcuacaugaaauccaa

SEQ ID NO: 603375 - RNA, 19 nt, Homo sapiens
  misc_RNA (1)...(19): siRNA sense strand
gcaggaagaugaggccaua

SEQ ID NO: 603376 - RNA, 19 nt, Homo sapiens
  misc_RNA (1)...(19): siRNA sense strand
gaggauuucccaaagauuu

SEQ ID NO: 603377 - RNA, 19 nt, Homo sapiens
  misc_RNA (1)...(19): siRNA sense strand
ccgaagugcucguccagua

SEQ ID NO: 603378 - RNA, 19 nt, Homo sapiens
  misc_RNA (1)...(19): siRNA sense strand
gggaugacgucacgcaguu

SEQ ID NO: 603379 - RNA, 19 nt, Homo sapiens
  misc_RNA (1)...(19): siRNA sense strand
ggacacccauggagugauc

SEQ ID NO: 603380 - RNA, 19 nt, Homo sapiens
  misc_RNA (1)...(19): siRNA sense strand
gggaggagaucgagcagau

SEQ ID NO: 603381 - RNA, 19 nt, Homo sapiens
  misc_RNA (1)...(19): siRNA sense strand
gggagauccuggcgcuaua

SEQ ID NO: 603382 - RNA, 19 nt, Homo sapiens
  misc_RNA (1)...(19): siRNA sense strand
ggaacaagaggauucaaug

SEQ ID NO: 603383 - RNA, 19 nt, Homo sapiens
  misc_RNA (1)...(19): siRNA sense strand
caaaggugaugaaggaaca

SEQ ID NO: 603384 - RNA, 19 nt, Homo sapiens
  misc_RNA (1)...(19): siRNA sense strand
gaagugcucguccaguauu

SEQ ID NO: 603385 - RNA, 19 nt, Homo sapiens
  misc_RNA (1)...(19): siRNA sense strand
ccauucagaugcccaagaa

SEQ ID NO: 603386 - RNA, 19 nt, Homo sapiens
  misc_RNA (1)...(19): siRNA sense strand
cagcaaccaucaagacuuc

SEQ ID NO: 603387 - RNA, 19 nt, Homo sapiens
  misc_RNA (1)...(19): siRNA sense strand
gagcugagcccggagacua

SEQ ID NO: 603388 - RNA, 19 nt, Homo sapiens
  misc_RNA (1)...(19): siRNA sense strand
gggaacaucugguggugau

SEQ ID NO: 603389 - RNA, 19 nt, Homo sapiens
  misc_RNA (1)...(19): siRNA sense strand
gaacagaaggagcuggaau

SEQ ID NO: 603390 - RNA, 19 nt, Homo sapiens
  misc_RNA (1)...(19): siRNA sense strand
gaggagaucgagcagauga

SEQ ID NO: 603391 - RNA, 19 nt, Homo sapiens
  misc_RNA (1)...(19): siRNA sense strand
gaacaagaggauucaaugg

SEQ ID NO: 603392 - RNA, 19 nt, Homo sapiens
  misc_RNA (1)...(19): siRNA sense strand
gaaguuggagucccugguu

SEQ ID NO: 603393 - RNA, 19 nt, Homo sapiens
  misc_RNA (1)...(19): siRNA sense strand
ucagggaccucuaggauac

SEQ ID NO: 603394 - RNA, 19 nt, Homo sapiens
  misc_RNA (1)...(19): siRNA sense strand
cagaagggccugcgggauu

SEQ ID NO: 603395 - RNA, 19 nt, Homo sapiens
  misc_RNA (1)...(19): siRNA sense strand
gucaaagaauucagagaug

SEQ ID NO: 603396 - RNA, 19 nt, Homo sapiens
  misc_RNA (1)...(19): siRNA sense strand
ggacagaagggcaccaaag

SEQ ID NO: 603397 - RNA, 19 nt, Homo sapiens
  misc_RNA (1)...(19): siRNA sense strand
ugaaucaugugaacagaag

SEQ ID NO: 603398 - RNA, 19 nt, Homo sapiens
  misc_RNA (1)...(19): siRNA sense strand
gaagggugaggauggcuuu

SEQ ID NO: 603399 - RNA, 19 nt, Homo sapiens
  misc_RNA (1)...(19): siRNA sense strand
ggaaagaccccaaaaccaa

SEQ ID NO: 603400 - RNA, 19 nt, Homo sapiens
  misc_RNA (1)...(19): siRNA sense strand
caggaggauuucccaaaga

SEQ ID NO: 603401 - RNA, 19 nt, Homo sapiens
  misc_RNA (1)...(19): siRNA sense strand
gaacccaggcccaguugga

SEQ ID NO: 603402 - RNA, 19 nt, Homo sapiens
  misc_RNA (1)...(19): siRNA sense strand
ccaggaggauuucccaaag

SEQ ID NO: 603403 - RNA, 19 nt, Homo sapiens
  misc_RNA (1)...(19): siRNA sense strand
caaaggcccaccugguauu

SEQ ID NO: 603404 - RNA, 19 nt, Homo sapiens
  misc_RNA (1)...(19): siRNA sense strand
ccacccaggucucauugga

SEQ ID NO: 603405 - RNA, 19 nt, Homo sapiens
  misc_RNA (1)...(19): siRNA sense strand
ccauuggccuacaggguuu

SEQ ID NO: 603406 - RNA, 19 nt, Homo sapiens
  misc_RNA (1)...(19): siRNA sense strand
agccaaaggugaugaagga

SEQ ID NO: 603407 - RNA, 19 nt, Homo sapiens
  misc_RNA (1)...(19): siRNA sense strand
caucuuuggugcccguauu

SEQ ID NO: 603408 - RNA, 19 nt, Homo sapiens
  misc_RNA (1)...(19): siRNA sense strand
ucucuuacguggacucaga

SEQ ID NO: 603409 - RNA, 19 nt, Homo sapiens
  misc_RNA (1)...(19): siRNA sense strand
gaagggagccaagggagau

SEQ ID NO: 603410 - RNA, 19 nt, Homo sapiens
  misc_RNA (1)...(19): siRNA sense strand
gaagggagaaacaggagau

SEQ ID NO: 603411 - RNA, 19 nt, Homo sapiens
  misc_RNA (1)...(19): siRNA sense strand
ugggagcccuggccugaaa

SEQ ID NO: 603412 - RNA, 19 nt, Homo sapiens
  misc_RNA (1)...(19): siRNA sense strand
gaaggaacaagaggauuca

SEQ ID NO: 603413 - RNA, 19 nt, Homo sapiens
  misc_RNA (1)...(19): siRNA sense strand
ucacagagcccagagaucu

SEQ ID NO: 603414 - RNA, 19 nt, Homo sapiens
  misc_RNA (1)...(19): siRNA sense strand
cccaaaggcccaccuggua

SEQ ID NO: 603415 - RNA, 19 nt, Homo sapiens
  misc_RNA (1)...(19): siRNA sense strand
gcagcaaccaucaagacuu

SEQ ID NO: 603416 - RNA, 19 nt, Homo sapiens
  misc_RNA (1)...(19): siRNA sense strand
agaagggccugcgggauug

SEQ ID NO: 603417 - RNA, 19 nt, Homo sapiens
  misc_RNA (1)...(19): siRNA sense strand
ggauggaagccgucugaug

SEQ ID NO: 603418 - RNA, 19 nt, Homo sapiens
  misc_RNA (1)...(19): siRNA sense strand
ucagggagcagcaggagaa

SEQ ID NO: 603419 - RNA, 19 nt, Homo sapiens
  misc_RNA (1)...(19): siRNA sense strand
ggagagaaggguccucaag

SEQ ID NO: 603420 - RNA, 19 nt, Homo sapiens
  misc_RNA (1)...(19): siRNA sense strand
aggagagccugcaguguug

SEQ ID NO: 603421 - RNA, 19 nt, Homo sapiens
  misc_RNA (1)...(19): siRNA sense strand
ccaaaggcccaccugguau

SEQ ID NO: 603422 - RNA, 19 nt, Homo sapiens
  misc_RNA (1)...(19): siRNA sense strand
ucaaggguguggacggaau

SEQ ID NO: 603423 - RNA, 19 nt, Homo sapiens
  misc_RNA (1)...(19): siRNA sense strand
gggagaaacaggagaugug

SEQ ID NO: 603424 - RNA, 19 nt, Homo sapiens
  misc_RNA (1)...(19): siRNA sense strand
gaugaaggaacaagaggau

SEQ ID NO: 603425 - RNA, 19 nt, Homo sapiens
  misc_RNA (1)...(19): siRNA sense strand
ggagauguggguccuaugg

SEQ ID NO: 603426 - RNA, 19 nt, Homo sapiens
  misc_RNA (1)...(19): siRNA sense strand
ugaaggaacaagaggauuc

SEQ ID NO: 603427 - RNA, 19 nt, Homo sapiens
  misc_RNA (1)...(19): siRNA sense strand
gugaagggccagucuguca

SEQ ID NO: 603428 - RNA, 19 nt, Homo sapiens
  misc_RNA (1)...(19): siRNA sense strand
aaggagagccugcaguguu

SEQ ID NO: 603429 - RNA, 19 nt, Homo sapiens
  misc_RNA (1)...(19): siRNA sense strand
agacuucacaggccacaaa

SEQ ID NO: 603430 - RNA, 19 nt, Homo sapiens
  misc_RNA (1)...(19): siRNA sense strand
gaagggagaucggggacuu

SEQ ID NO: 603431 - RNA, 19 nt, Homo sapiens
  misc_RNA (1)...(19): siRNA sense strand
gaacccugguccuguuggu

SEQ ID NO: 603432 - RNA, 19 nt, Homo sapiens
  misc_RNA (1)...(19): siRNA sense strand
ugacauaggcgugaaaggu

SEQ ID NO: 603433 - RNA, 19 nt, Homo sapiens
  misc_RNA (1)...(19): siRNA sense strand
ggaggauuucccaaagauu

SEQ ID NO: 603434 - RNA, 19 nt, Homo sapiens
  misc_RNA (1)...(19): siRNA sense strand
ucacgcaguucucuuacgu

SEQ ID NO: 603435 - RNA, 19 nt, Homo sapiens
  misc_RNA (1)...(19): siRNA sense strand
gaggagaaguggguuucca

SEQ ID NO: 603436 - RNA, 19 nt, Homo sapiens
  misc_RNA (1)...(19): siRNA sense strand
gcacccacucgccagcuuu

SEQ ID NO: 603437 - RNA, 19 nt, Homo sapiens
  misc_RNA (1)...(19): siRNA sense strand
ugucaaagaauucagagau

SEQ ID NO: 603438 - RNA, 19 nt, Homo sapiens
  misc_RNA (1)...(19): siRNA sense strand
cgaagugcucguccaguau

SEQ ID NO: 603439 - RNA, 19 nt, Homo sapiens
  misc_RNA (1)...(19): siRNA sense strand
gagacuagccccuauguca

SEQ ID NO: 603440 - RNA, 19 nt, Homo sapiens
  misc_RNA (1)...(19): siRNA sense strand
gaaccaggagagucaggau

SEQ ID NO: 603441 - RNA, 19 nt, Homo sapiens
  misc_RNA (1)...(19): siRNA sense strand
ugggacagcuggaaaagaa

SEQ ID NO: 603442 - RNA, 19 nt, Homo sapiens
  misc_RNA (1)...(19): siRNA sense strand
ccauggagugaucaucuuu

SEQ ID NO: 603443 - RNA, 19 nt, Homo sapiens
  misc_RNA (1)...(19): siRNA sense strand
gcuggaugccuccuucuca

SEQ ID NO: 603444 - RNA, 19 nt, Homo sapiens
  misc_RNA (1)...(19): siRNA sense strand
ccuguccgcuuccuguaug

SEQ ID NO: 603445 - RNA, 19 nt, Homo sapiens
  misc_RNA (1)...(19): siRNA sense strand
gacagaagggcaccaaagg

SEQ ID NO: 603446 - RNA, 19 nt, Homo sapiens
  misc_RNA (1)...(19): siRNA sense strand
uggagaggauggagacaag

SEQ ID NO: 603447 - RNA, 19 nt, Homo sapiens
  misc_RNA (1)...(19): siRNA sense strand
uggagcagcaggagagaaa

SEQ ID NO: 603448 - RNA, 19 nt, Homo sapiens
  misc_RNA (1)...(19): siRNA sense strand
gugcccguauucuggauga

SEQ ID NO: 603449 - RNA, 19 nt, Homo sapiens
  misc_RNA (1)...(19): siRNA sense strand
ccuccugacucucuacagu

SEQ ID NO: 603450 - RNA, 19 nt, Homo sapiens
  misc_RNA (1)...(19): siRNA sense strand
gggccaggauggugcuaag

SEQ ID NO: 603451 - RNA, 19 nt, Homo sapiens
  misc_RNA (1)...(19): siRNA sense strand
aaaccaacagccucacaga

SEQ ID NO: 603452 - RNA, 19 nt, Homo sapiens
  misc_RNA (1)...(19): siRNA sense strand
guggauggaagccgucuga

SEQ ID NO: 603453 - RNA, 19 nt, Homo sapiens
  misc_RNA (1)...(19): siRNA sense strand
ggccucaaccucccucuca

SEQ ID NO: 603454 - RNA, 19 nt, Homo sapiens
  misc_RNA (1)...(19): siRNA sense strand
aggaggauuucccaaagau

SEQ ID NO: 603455 - RNA, 19 nt, Homo sapiens
  misc_RNA (1)...(19): siRNA sense strand
ccacagcagcaaccaucaa

SEQ ID NO: 603456 - RNA, 19 nt, Homo sapiens
  misc_RNA (1)...(19): siRNA sense strand
caucucucaugcucccauu

SEQ ID NO: 603457 - RNA, 19 nt, Homo sapiens
  misc_RNA (1)...(19): siRNA sense strand
ggucucauuggacugauug

SEQ ID NO: 603458 - RNA, 19 nt, Homo sapiens
  misc_RNA (1)...(19): siRNA sense strand
gggacacccaggccaaaga

SEQ ID NO: 603459 - RNA, 19 nt, Homo sapiens
  misc_RNA (1)...(19): siRNA sense strand
ggucugaagggucauaagg

SEQ ID NO: 603460 - RNA, 19 nt, Homo sapiens
  misc_RNA (1)...(19): siRNA sense strand
gggccacccaggucucauu

SEQ ID NO: 603461 - RNA, 19 nt, Homo sapiens
  misc_RNA (1)...(19): siRNA sense strand
aaagaggagaaguggguuu

SEQ ID NO: 603462 - RNA, 19 nt, Homo sapiens
  misc_RNA (1)...(19): siRNA sense strand
ggacacccaggccaaagag

SEQ ID NO: 603463 - RNA, 19 nt, Homo sapiens
  misc_RNA (1)...(19): siRNA sense strand
uggcuuuccuggguucaaa

SEQ ID NO: 603464 - RNA, 19 nt, Homo sapiens
  misc_RNA (1)...(19): siRNA sense strand
gcaguguuggaaccuggua

SEQ ID NO: 603465 - RNA, 19 nt, Homo sapiens
  misc_RNA (1)...(19): siRNA sense strand
gccccuaugucaaagaauu

SEQ ID NO: 603466 - RNA, 19 nt, Homo sapiens
  misc_RNA (1)...(19): siRNA sense strand
ccaggucucauuggacuga

SEQ ID NO: 603467 - RNA, 19 nt, Homo sapiens
  misc_RNA (1)...(19): siRNA sense strand
ucugucacccucauuguug

SEQ ID NO: 603468 - RNA, 19 nt, Homo sapiens
  misc_RNA (1)...(19): siRNA sense strand
gaacgaggugcagcaggau

SEQ ID NO: 603469 - RNA, 19 nt, Homo sapiens
  misc_RNA (1)...(19): siRNA sense strand
gcugguggaccugguuuga

SEQ ID NO: 603470 - RNA, 19 nt, Homo sapiens
  misc_RNA (1)...(19): siRNA sense strand
ugggaagucuggagcuaag

SEQ ID NO: 603471 - RNA, 19 nt, Homo sapiens
  misc_RNA (1)...(19): siRNA sense strand
ggaccucagggaccucuag

SEQ ID NO: 603472 - RNA, 19 nt, Homo sapiens
  misc_RNA (1)...(19): siRNA sense strand
ugaccgagguuuugaugga

SEQ ID NO: 603473 - RNA, 19 nt, Homo sapiens
  misc_RNA (1)...(19): siRNA sense strand
gaagggugaccgagguuuu

SEQ ID NO: 603474 - RNA, 19 nt, Homo sapiens
  misc_RNA (1)...(19): siRNA sense strand
gaccuguccgcuuccugua

SEQ ID NO: 603475 - RNA, 19 nt, Homo sapiens
  misc_RNA (1)...(19): siRNA sense strand
gcaggaagaugaggccaua

SEQ ID NO: 603476 - RNA, 19 nt, Homo sapiens
  misc_RNA (1)...(19): siRNA sense strand
gaggauuucccaaagauuu

SEQ ID NO: 603477 - RNA, 19 nt, Homo sapiens
  misc_RNA (1)...(19): siRNA sense strand
ccgaagugcucguccagua

SEQ ID NO: 603478 - RNA, 19 nt, Homo sapiens
  misc_RNA (1)...(19): siRNA sense strand
gggaugacgucacgcaguu

SEQ ID NO: 603479 - RNA, 19 nt, Homo sapiens
  misc_RNA (1)...(19): siRNA sense strand
ggacacccauggagugauc

SEQ ID NO: 603480 - RNA, 19 nt, Homo sapiens
  misc_RNA (1)...(19): siRNA sense strand
gggaggagaucgagcagau

SEQ ID NO: 603481 - RNA, 19 nt, Homo sapiens
  misc_RNA (1)...(19): siRNA sense strand
gggagauccuggcgcuaua

SEQ ID NO: 603482 - RNA, 19 nt, Homo sapiens
  misc_RNA (1)...(19): siRNA sense strand
ggaacaagaggauucaaug

SEQ ID NO: 603483 - RNA, 19 nt, Homo sapiens
  misc_RNA (1)...(19): siRNA sense strand
caaaggugaugaaggaaca

SEQ ID NO: 603484 - RNA, 19 nt, Homo sapiens
  misc_RNA (1)...(19): siRNA sense strand
gaagugcucguccaguauu

SEQ ID NO: 603485 - RNA, 19 nt, Homo sapiens
  misc_RNA (1)...(19): siRNA sense strand
ccauucagaugcccaagaa

SEQ ID NO: 603486 - RNA, 19 nt, Homo sapiens
  misc_RNA (1)...(19): siRNA sense strand
cagcaaccaucaagacuuc

SEQ ID NO: 603487 - RNA, 19 nt, Homo sapiens
  misc_RNA (1)...(19): siRNA sense strand
gagcugagcccggagacua

SEQ ID NO: 603488 - RNA, 19 nt, Homo sapiens
  misc_RNA (1)...(19): siRNA sense strand
gggaacaucugguggugau

SEQ ID NO: 603489 - RNA, 19 nt, Homo sapiens
  misc_RNA (1)...(19): siRNA sense strand
gaacagaaggagcuggaau

SEQ ID NO: 603490 - RNA, 19 nt, Homo sapiens
  misc_RNA (1)...(19): siRNA sense strand
gaggagaucgagcagauga

SEQ ID NO: 603491 - RNA, 19 nt, Homo sapiens
  misc_RNA (1)...(19): siRNA sense strand
gaacaagaggauucaaugg

SEQ ID NO: 603492 - RNA, 19 nt, Homo sapiens
  misc_RNA (1)...(19): siRNA sense strand
gaaguuggagucccugguu

SEQ ID NO: 603493 - RNA, 19 nt, Homo sapiens
  misc_RNA (1)...(19): siRNA sense strand
ucagggaccucuaggauac

SEQ ID NO: 603494 - RNA, 19 nt, Homo sapiens
  misc_RNA (1)...(19): siRNA sense strand
cagaagggccugcgggauu

SEQ ID NO: 603495 - RNA, 19 nt, Homo sapiens
  misc_RNA (1)...(19): siRNA sense strand
gucaaagaauucagagaug

SEQ ID NO: 603496 - RNA, 19 nt, Homo sapiens
  misc_RNA (1)...(19): siRNA sense strand
ggacagaagggcaccaaag

SEQ ID NO: 603497 - RNA, 19 nt, Homo sapiens
  misc_RNA (1)...(19): siRNA sense strand
ugaaucaugugaacagaag

SEQ ID NO: 603498 - RNA, 19 nt, Homo sapiens
  misc_RNA (1)...(19): siRNA sense strand
gaagggugaggauggcuuu

SEQ ID NO: 603499 - RNA, 19 nt, Homo sapiens
  misc_RNA (1)...(19): siRNA sense strand
ggaaagaccccaaaaccaa

SEQ ID NO: 603500 - RNA, 19 nt, Homo sapiens
  misc_RNA (1)...(19): siRNA sense strand
caggaggauuucccaaaga

SEQ ID NO: 603501 - RNA, 19 nt, Homo sapiens
  misc_RNA (1)...(19): siRNA sense strand
gaacccaggcccaguugga

SEQ ID NO: 603502 - RNA, 19 nt, Homo sapiens
  misc_RNA (1)...(19): siRNA sense strand
ccaggaggauuucccaaag

SEQ ID NO: 603503 - RNA, 19 nt, Homo sapiens
  misc_RNA (1)...(19): siRNA sense strand
caaaggcccaccugguauu

SEQ ID NO: 603504 - RNA, 19 nt, Homo sapiens
  misc_RNA (1)...(19): siRNA sense strand
ccacccaggucucauugga

SEQ ID NO: 603505 - RNA, 19 nt, Homo sapiens
  misc_RNA (1)...(19): siRNA sense strand
ccauuggccuacaggguuu

SEQ ID NO: 603506 - RNA, 19 nt, Homo sapiens
  misc_RNA (1)...(19): siRNA sense strand
agccaaaggugaugaagga

SEQ ID NO: 603507 - RNA, 19 nt, Homo sapiens
  misc_RNA (1)...(19): siRNA sense strand
caucuuuggugcccguauu

SEQ ID NO: 603508 - RNA, 19 nt, Homo sapiens
  misc_RNA (1)...(19): siRNA sense strand
ucucuuacguggacucaga

SEQ ID NO: 603509 - RNA, 19 nt, Homo sapiens
  misc_RNA (1)...(19): siRNA sense strand
gaagggagccaagggagau

SEQ ID NO: 603510 - RNA, 19 nt, Homo sapiens
  misc_RNA (1)...(19): siRNA sense strand
gaagggagaaacaggagau

SEQ ID NO: 603511 - RNA, 19 nt, Homo sapiens
  misc_RNA (1)...(19): siRNA sense strand
ugggagcccuggccugaaa

SEQ ID NO: 603512 - RNA, 19 nt, Homo sapiens
  misc_RNA (1)...(19): siRNA sense strand
gaaggaacaagaggauuca

SEQ ID NO: 603513 - RNA, 19 nt, Homo sapiens
  misc_RNA (1)...(19): siRNA sense strand
ucacagagcccagagaucu

SEQ ID NO: 603514 - RNA, 19 nt, Homo sapiens
  misc_RNA (1)...(19): siRNA sense strand
cccaaaggcccaccuggua

SEQ ID NO: 603515 - RNA, 19 nt, Homo sapiens
  misc_RNA (1)...(19): siRNA sense strand
gcagcaaccaucaagacuu

SEQ ID NO: 603516 - RNA, 19 nt, Homo sapiens
  misc_RNA (1)...(19): siRNA sense strand
agaagggccugcgggauug

SEQ ID NO: 603517 - RNA, 19 nt, Homo sapiens
  misc_RNA (1)...(19): siRNA sense strand
ggauggaagccgucugaug

SEQ ID NO: 603518 - RNA, 19 nt, Homo sapiens
  misc_RNA (1)...(19): siRNA sense strand
ucagggagcagcaggagaa

SEQ ID NO: 603519 - RNA, 19 nt, Homo sapiens
  misc_RNA (1)...(19): siRNA sense strand
ggagagaaggguccucaag

SEQ ID NO: 603520 - RNA, 19 nt, Homo sapiens
  misc_RNA (1)...(19): siRNA sense strand
aggagagccugcaguguug

SEQ ID NO: 603521 - RNA, 19 nt, Homo sapiens
  misc_RNA (1)...(19): siRNA sense strand
ccaaaggcccaccugguau

SEQ ID NO: 603522 - RNA, 19 nt, Homo sapiens
  misc_RNA (1)...(19): siRNA sense strand
ucaaggguguggacggaau

SEQ ID NO: 603523 - RNA, 19 nt, Homo sapiens
  misc_RNA (1)...(19): siRNA sense strand
gggagaaacaggagaugug

SEQ ID NO: 603524 - RNA, 19 nt, Homo sapiens
  misc_RNA (1)...(19): siRNA sense strand
gaugaaggaacaagaggau

SEQ ID NO: 603525 - RNA, 19 nt, Homo sapiens
  misc_RNA (1)...(19): siRNA sense strand
ggagauguggguccuaugg

SEQ ID NO: 603526 - RNA, 19 nt, Homo sapiens
  misc_RNA (1)...(19): siRNA sense strand
ugaaggaacaagaggauuc

SEQ ID NO: 603527 - RNA, 19 nt, Homo sapiens
  misc_RNA (1)...(19): siRNA sense strand
gugaagggccagucuguca

SEQ ID NO: 603528 - RNA, 19 nt, Homo sapiens
  misc_RNA (1)...(19): siRNA sense strand
aaggagagccugcaguguu

SEQ ID NO: 603529 - RNA, 19 nt, Homo sapiens
  misc_RNA (1)...(19): siRNA sense strand
agacuucacaggccacaaa

SEQ ID NO: 603530 - RNA, 19 nt, Homo sapiens
  misc_RNA (1)...(19): siRNA sense strand
gaagggagaucggggacuu

SEQ ID NO: 603531 - RNA, 19 nt, Homo sapiens
  misc_RNA (1)...(19): siRNA sense strand
gaacccugguccuguuggu

SEQ ID NO: 603532 - RNA, 19 nt, Homo sapiens
  misc_RNA (1)...(19): siRNA sense strand
ugacauaggcgugaaaggu

SEQ ID NO: 603533 - RNA, 19 nt, Homo sapiens
  misc_RNA (1)...(19): siRNA sense strand
ggaggauuucccaaagauu

SEQ ID NO: 603534 - RNA, 19 nt, Homo sapiens
  misc_RNA (1)...(19): siRNA sense strand
ucacgcaguucucuuacgu

SEQ ID NO: 603535 - RNA, 19 nt, Homo sapiens
  misc_RNA (1)...(19): siRNA sense strand
gaggagaaguggguuucca

SEQ ID NO: 603536 - RNA, 19 nt, Homo sapiens
  misc_RNA (1)...(19): siRNA sense strand
gcacccacucgccagcuuu

SEQ ID NO: 603537 - RNA, 19 nt, Homo sapiens
  misc_RNA (1)...(19): siRNA sense strand
ugucaaagaauucagagau

SEQ ID NO: 603538 - RNA, 19 nt, Homo sapiens
  misc_RNA (1)...(19): siRNA sense strand
cgaagugcucguccaguau

SEQ ID NO: 603539 - RNA, 19 nt, Homo sapiens
  misc_RNA (1)...(19): siRNA sense strand
gagacuagccccuauguca

SEQ ID NO: 603540 - RNA, 19 nt, Homo sapiens
  misc_RNA (1)...(19): siRNA sense strand
gaaccaggagagucaggau

SEQ ID NO: 603541 - RNA, 19 nt, Homo sapiens
  misc_RNA (1)...(19): siRNA sense strand
ugggacagcuggaaaagaa

SEQ ID NO: 603542 - RNA, 19 nt, Homo sapiens
  misc_RNA (1)...(19): siRNA sense strand
ccauggagugaucaucuuu

SEQ ID NO: 603543 - RNA, 19 nt, Homo sapiens
  misc_RNA (1)...(19): siRNA sense strand
gcuggaugccuccuucuca

SEQ ID NO: 603544 - RNA, 19 nt, Homo sapiens
  misc_RNA (1)...(19): siRNA sense strand
ccuguccgcuuccuguaug

SEQ ID NO: 603545 - RNA, 19 nt, Homo sapiens
  misc_RNA (1)...(19): siRNA sense strand
gacagaagggcaccaaagg

SEQ ID NO: 603546 - RNA, 19 nt, Homo sapiens
  misc_RNA (1)...(19): siRNA sense strand
uggagaggauggagacaag

SEQ ID NO: 603547 - RNA, 19 nt, Homo sapiens
  misc_RNA (1)...(19): siRNA sense strand
uggagcagcaggagagaaa

SEQ ID NO: 603548 - RNA, 19 nt, Homo sapiens
  misc_RNA (1)...(19): siRNA sense strand
gugcccguauucuggauga

SEQ ID NO: 603549 - RNA, 19 nt, Homo sapiens
  misc_RNA (1)...(19): siRNA sense strand
ccuccugacucucuacagu

SEQ ID NO: 603550 - RNA, 19 nt, Homo sapiens
  misc_RNA (1)...(19): siRNA sense strand
gggccaggauggugcuaag

SEQ ID NO: 603551 - RNA, 19 nt, Homo sapiens
  misc_RNA (1)...(19): siRNA sense strand
aaaccaacagccucacaga

SEQ ID NO: 603552 - RNA, 19 nt, Homo sapiens
  misc_RNA (1)...(19): siRNA sense strand
guggauggaagccgucuga

SEQ ID NO: 603553 - RNA, 19 nt, Homo sapiens
  misc_RNA (1)...(19): siRNA sense strand
ggccucaaccucccucuca

SEQ ID NO: 603554 - RNA, 19 nt, Homo sapiens
  misc_RNA (1)...(19): siRNA sense strand
aggaggauuucccaaagau

SEQ ID NO: 603555 - RNA, 19 nt, Homo sapiens
  misc_RNA (1)...(19): siRNA sense strand
ccacagcagcaaccaucaa

SEQ ID NO: 603556 - RNA, 19 nt, Homo sapiens
  misc_RNA (1)...(19): siRNA sense strand
caucucucaugcucccauu

SEQ ID NO: 603557 - RNA, 19 nt, Homo sapiens
  misc_RNA (1)...(19): siRNA sense strand
ggucucauuggacugauug

SEQ ID NO: 603558 - RNA, 19 nt, Homo sapiens
  misc_RNA (1)...(19): siRNA sense strand
gggacacccaggccaaaga

SEQ ID NO: 603559 - RNA, 19 nt, Homo sapiens
  misc_RNA (1)...(19): siRNA sense strand
ggucugaagggucauaagg

SEQ ID NO: 603560 - RNA, 19 nt, Homo sapiens
  misc_RNA (1)...(19): siRNA sense strand
gggccacccaggucucauu

SEQ ID NO: 603561 - RNA, 19 nt, Homo sapiens
  misc_RNA (1)...(19): siRNA sense strand
aaagaggagaaguggguuu

SEQ ID NO: 603562 - RNA, 19 nt, Homo sapiens
  misc_RNA (1)...(19): siRNA sense strand
ggacacccaggccaaagag

SEQ ID NO: 603563 - RNA, 19 nt, Homo sapiens
  misc_RNA (1)...(19): siRNA sense strand
uggcuuuccuggguucaaa

SEQ ID NO: 603564 - RNA, 19 nt, Homo sapiens
  misc_RNA (1)...(19): siRNA sense strand
gcaguguuggaaccuggua

SEQ ID NO: 603565 - RNA, 19 nt, Homo sapiens
  misc_RNA (1)...(19): siRNA sense strand
gccccuaugucaaagaauu

SEQ ID NO: 603566 - RNA, 19 nt, Homo sapiens
  misc_RNA (1)...(19): siRNA sense strand
ccaggucucauuggacuga

SEQ ID NO: 603567 - RNA, 19 nt, Homo sapiens
  misc_RNA (1)...(19): siRNA sense strand
ucugucacccucauuguug

SEQ ID NO: 603568 - RNA, 19 nt, Homo sapiens
  misc_RNA (1)...(19): siRNA sense strand
gaacgaggugcagcaggau

SEQ ID NO: 603569 - RNA, 19 nt, Homo sapiens
  misc_RNA (1)...(19): siRNA sense strand
gcugguggaccugguuuga

SEQ ID NO: 603570 - RNA, 19 nt, Homo sapiens
  misc_RNA (1)...(19): siRNA sense strand
ugggaagucuggagcuaag

SEQ ID NO: 603571 - RNA, 19 nt, Homo sapiens
  misc_RNA (1)...(19): siRNA sense strand
ggaccucagggaccucuag

SEQ ID NO: 603572 - RNA, 19 nt, Homo sapiens
  misc_RNA (1)...(19): siRNA sense strand
ugaccgagguuuugaugga

SEQ ID NO: 603573 - RNA, 19 nt, Homo sapiens
  misc_RNA (1)...(19): siRNA sense strand
gaagggugaccgagguuuu

SEQ ID NO: 603574 - RNA, 19 nt, Homo sapiens
  misc_RNA (1)...(19): siRNA sense strand
gaccuguccgcuuccugua

SEQ ID NO: 603575 - RNA, 19 nt, Homo sapiens
  misc_RNA (1)...(19): siRNA sense strand
gcaggaagaugaggccaua

SEQ ID NO: 603576 - RNA, 19 nt, Homo sapiens
  misc_RNA (1)...(19): siRNA sense strand
gaggauuucccaaagauuu

SEQ ID NO: 603577 - RNA, 19 nt, Homo sapiens
  misc_RNA (1)...(19): siRNA sense strand
ccgaagugcucguccagua

SEQ ID NO: 603578 - RNA, 19 nt, Homo sapiens
  misc_RNA (1)...(19): siRNA sense strand
gggaugacgucacgcaguu

SEQ ID NO: 603579 - RNA, 19 nt, Homo sapiens
  misc_RNA (1)...(19): siRNA sense strand
ggacacccauggagugauc

SEQ ID NO: 603580 - RNA, 19 nt, Homo sapiens
  misc_RNA (1)...(19): siRNA sense strand
gggaggagaucgagcagau

SEQ ID NO: 603581 - RNA, 19 nt, Homo sapiens
  misc_RNA (1)...(19): siRNA sense strand
gggagauccuggcgcuaua

SEQ ID NO: 603582 - RNA, 19 nt, Homo sapiens
  misc_RNA (1)...(19): siRNA sense strand
ggaacaagaggauucaaug

SEQ ID NO: 603583 - RNA, 19 nt, Homo sapiens
  misc_RNA (1)...(19): siRNA sense strand
caaaggugaugaaggaaca

SEQ ID NO: 603584 - RNA, 19 nt, Homo sapiens
  misc_RNA (1)...(19): siRNA sense strand
gaagugcucguccaguauu

SEQ ID NO: 603585 - RNA, 19 nt, Homo sapiens
  misc_RNA (1)...(19): siRNA sense strand
ccauucagaugcccaagaa

SEQ ID NO: 603586 - RNA, 19 nt, Homo sapiens
  misc_RNA (1)...(19): siRNA sense strand
cagcaaccaucaagacuuc

SEQ ID NO: 603587 - RNA, 19 nt, Homo sapiens
  misc_RNA (1)...(19): siRNA sense strand
gagcugagcccggagacua

SEQ ID NO: 603588 - RNA, 19 nt, Homo sapiens
  misc_RNA (1)...(19): siRNA sense strand
gggaacaucugguggugau

SEQ ID NO: 603589 - RNA, 19 nt, Homo sapiens
  misc_RNA (1)...(19): siRNA sense strand
gaacagaaggagcuggaau

SEQ ID NO: 603590 - RNA, 19 nt, Homo sapiens
  misc_RNA (1)...(19): siRNA sense strand
gaggagaucgagcagauga

SEQ ID NO: 603591 - RNA, 19 nt, Homo sapiens
  misc_RNA (1)...(19): siRNA sense strand
gaacaagaggauucaaugg

SEQ ID NO: 603592 - RNA, 19 nt, Homo sapiens
  misc_RNA (1)...(19): siRNA sense strand
gaaguuggagucccugguu

SEQ ID NO: 603593 - RNA, 19 nt, Homo sapiens
  misc_RNA (1)...(19): siRNA sense strand
ucagggaccucuaggauac

SEQ ID NO: 603594 - RNA, 19 nt, Homo sapiens
  misc_RNA (1)...(19): siRNA sense strand
cagaagggccugcgggauu

SEQ ID NO: 603595 - RNA, 19 nt, Homo sapiens
  misc_RNA (1)...(19): siRNA sense strand
gucaaagaauucagagaug

SEQ ID NO: 603596 - RNA, 19 nt, Homo sapiens
  misc_RNA (1)...(19): siRNA sense strand
ggacagaagggcaccaaag

SEQ ID NO: 603597 - RNA, 19 nt, Homo sapiens
  misc_RNA (1)...(19): siRNA sense strand
ugaaucaugugaacagaag

SEQ ID NO: 603598 - RNA, 19 nt, Homo sapiens
  misc_RNA (1)...(19): siRNA sense strand
gaagggugaggauggcuuu

SEQ ID NO: 603599 - RNA, 19 nt, Homo sapiens
  misc_RNA (1)...(19): siRNA sense strand
ggaaagaccccaaaaccaa

SEQ ID NO: 603600 - RNA, 19 nt, Homo sapiens
  misc_RNA (1)...(19): siRNA sense strand
caggaggauuucccaaaga

SEQ ID NO: 603601 - RNA, 19 nt, Homo sapiens
  misc_RNA (1)...(19): siRNA sense strand
gaacccaggcccaguugga

SEQ ID NO: 603602 - RNA, 19 nt, Homo sapiens
  misc_RNA (1)...(19): siRNA sense strand
ccaggaggauuucccaaag

SEQ ID NO: 603603 - RNA, 19 nt, Homo sapiens
  misc_RNA (1)...(19): siRNA sense strand
caaaggcccaccugguauu

SEQ ID NO: 603604 - RNA, 19 nt, Homo sapiens
  misc_RNA (1)...(19): siRNA sense strand
ccacccaggucucauugga

SEQ ID NO: 603605 - RNA, 19 nt, Homo sapiens
  misc_RNA (1)...(19): siRNA sense strand
ccauuggccuacaggguuu

SEQ ID NO: 603606 - RNA, 19 nt, Homo sapiens
  misc_RNA (1)...(19): siRNA sense strand
agccaaaggugaugaagga

SEQ ID NO: 603607 - RNA, 19 nt, Homo sapiens
  misc_RNA (1)...(19): siRNA sense strand
caucuuuggugcccguauu

SEQ ID NO: 603608 - RNA, 19 nt, Homo sapiens
  misc_RNA (1)...(19): siRNA sense strand
ucucuuacguggacucaga

SEQ ID NO: 603609 - RNA, 19 nt, Homo sapiens
  misc_RNA (1)...(19): siRNA sense strand
gaagggagccaagggagau

SEQ ID NO: 603610 - RNA, 19 nt, Homo sapiens
  misc_RNA (1)...(19): siRNA sense strand
gaagggagaaacaggagau

SEQ ID NO: 603611 - RNA, 19 nt, Homo sapiens
  misc_RNA (1)...(19): siRNA sense strand
ugggagcccuggccugaaa

SEQ ID NO: 603612 - RNA, 19 nt, Homo sapiens
  misc_RNA (1)...(19): siRNA sense strand
gaaggaacaagaggauuca

SEQ ID NO: 603613 - RNA, 19 nt, Homo sapiens
  misc_RNA (1)...(19): siRNA sense strand
ucacagagcccagagaucu

SEQ ID NO: 603614 - RNA, 19 nt, Homo sapiens
  misc_RNA (1)...(19): siRNA sense strand
cccaaaggcccaccuggua

SEQ ID NO: 603615 - RNA, 19 nt, Homo sapiens
  misc_RNA (1)...(19): siRNA sense strand
gcagcaaccaucaagacuu

SEQ ID NO: 603616 - RNA, 19 nt, Homo sapiens
  misc_RNA (1)...(19): siRNA sense strand
agaagggccugcgggauug

SEQ ID NO: 603617 - RNA, 19 nt, Homo sapiens
  misc_RNA (1)...(19): siRNA sense strand
ggauggaagccgucugaug

SEQ ID NO: 603618 - RNA, 19 nt, Homo sapiens
  misc_RNA (1)...(19): siRNA sense strand
ucagggagcagcaggagaa

SEQ ID NO: 603619 - RNA, 19 nt, Homo sapiens
  misc_RNA (1)...(19): siRNA sense strand
ggagagaaggguccucaag

SEQ ID NO: 603620 - RNA, 19 nt, Homo sapiens
  misc_RNA (1)...(19): siRNA sense strand
aggagagccugcaguguug

SEQ ID NO: 603621 - RNA, 19 nt, Homo sapiens
  misc_RNA (1)...(19): siRNA sense strand
ccaaaggcccaccugguau

SEQ ID NO: 603622 - RNA, 19 nt, Homo sapiens
  misc_RNA (1)...(19): siRNA sense strand
ucaaggguguggacggaau

SEQ ID NO: 603623 - RNA, 19 nt, Homo sapiens
  misc_RNA (1)...(19): siRNA sense strand
gggagaaacaggagaugug

SEQ ID NO: 603624 - RNA, 19 nt, Homo sapiens
  misc_RNA (1)...(19): siRNA sense strand
gaugaaggaacaagaggau

SEQ ID NO: 603625 - RNA, 19 nt, Homo sapiens
  misc_RNA (1)...(19): siRNA sense strand
ggagauguggguccuaugg

SEQ ID NO: 603626 - RNA, 19 nt, Homo sapiens
  misc_RNA (1)...(19): siRNA sense strand
ugaaggaacaagaggauuc

SEQ ID NO: 603627 - RNA, 19 nt, Homo sapiens
  misc_RNA (1)...(19): siRNA sense strand
gugaagggccagucuguca

SEQ ID NO: 603628 - RNA, 19 nt, Homo sapiens
  misc_RNA (1)...(19): siRNA sense strand
aaggagagccugcaguguu

SEQ ID NO: 603629 - RNA, 19 nt, Homo sapiens
  misc_RNA (1)...(19): siRNA sense strand
agacuucacaggccacaaa

SEQ ID NO: 603630 - RNA, 19 nt, Homo sapiens
  misc_RNA (1)...(19): siRNA sense strand
gaagggagaucggggacuu

SEQ ID NO: 603631 - RNA, 19 nt, Homo sapiens
  misc_RNA (1)...(19): siRNA sense strand
gaacccugguccuguuggu

SEQ ID NO: 603632 - RNA, 19 nt, Homo sapiens
  misc_RNA (1)...(19): siRNA sense strand
ugacauaggcgugaaaggu

SEQ ID NO: 603633 - RNA, 19 nt, Homo sapiens
  misc_RNA (1)...(19): siRNA sense strand
ggaggauuucccaaagauu

SEQ ID NO: 603634 - RNA, 19 nt, Homo sapiens
  misc_RNA (1)...(19): siRNA sense strand
ucacgcaguucucuuacgu

SEQ ID NO: 603635 - RNA, 19 nt, Homo sapiens
  misc_RNA (1)...(19): siRNA sense strand
gaggagaaguggguuucca

SEQ ID NO: 603636 - RNA, 19 nt, Homo sapiens
  misc_RNA (1)...(19): siRNA sense strand
gcacccacucgccagcuuu

SEQ ID NO: 603637 - RNA, 19 nt, Homo sapiens
  misc_RNA (1)...(19): siRNA sense strand
ugucaaagaauucagagau

SEQ ID NO: 603638 - RNA, 19 nt, Homo sapiens
  misc_RNA (1)...(19): siRNA sense strand
cgaagugcucguccaguau

SEQ ID NO: 603639 - RNA, 19 nt, Homo sapiens
  misc_RNA (1)...(19): siRNA sense strand
gagacuagccccuauguca

SEQ ID NO: 603640 - RNA, 19 nt, Homo sapiens
  misc_RNA (1)...(19): siRNA sense strand
gaaccaggagagucaggau

SEQ ID NO: 603641 - RNA, 19 nt, Homo sapiens
  misc_RNA (1)...(19): siRNA sense strand
ugggacagcuggaaaagaa

SEQ ID NO: 603642 - RNA, 19 nt, Homo sapiens
  misc_RNA (1)...(19): siRNA sense strand
ccauggagugaucaucuuu

SEQ ID NO: 603643 - RNA, 19 nt, Homo sapiens
  misc_RNA (1)...(19): siRNA sense strand
gcuggaugccuccuucuca

SEQ ID NO: 603644 - RNA, 19 nt, Homo sapiens
  misc_RNA (1)...(19): siRNA sense strand
ccuguccgcuuccuguaug

SEQ ID NO: 603645 - RNA, 19 nt, Homo sapiens
  misc_RNA (1)...(19): siRNA sense strand
gacagaagggcaccaaagg

SEQ ID NO: 603646 - RNA, 19 nt, Homo sapiens
  misc_RNA (1)...(19): siRNA sense strand
uggagaggauggagacaag

SEQ ID NO: 603647 - RNA, 19 nt, Homo sapiens
  misc_RNA (1)...(19): siRNA sense strand
uggagcagcaggagagaaa

SEQ ID NO: 603648 - RNA, 19 nt, Homo sapiens
  misc_RNA (1)...(19): siRNA sense strand
gugcccguauucuggauga

SEQ ID NO: 603649 - RNA, 19 nt, Homo sapiens
  misc_RNA (1)...(19): siRNA sense strand
ccuccugacucucuacagu

SEQ ID NO: 603650 - RNA, 19 nt, Homo sapiens
  misc_RNA (1)...(19): siRNA sense strand
gggccaggauggugcuaag

SEQ ID NO: 603651 - RNA, 19 nt, Homo sapiens
  misc_RNA (1)...(19): siRNA sense strand
aaaccaacagccucacaga

SEQ ID NO: 603652 - RNA, 19 nt, Homo sapiens
  misc_RNA (1)...(19): siRNA sense strand
guggauggaagccgucuga

SEQ ID NO: 603653 - RNA, 19 nt, Homo sapiens
  misc_RNA (1)...(19): siRNA sense strand
ggccucaaccucccucuca

SEQ ID NO: 603654 - RNA, 19 nt, Homo sapiens
  misc_RNA (1)...(19): siRNA sense strand
aggaggauuucccaaagau

SEQ ID NO: 603655 - RNA, 19 nt, Homo sapiens
  misc_RNA (1)...(19): siRNA sense strand
ccacagcagcaaccaucaa

SEQ ID NO: 603656 - RNA, 19 nt, Homo sapiens
  misc_RNA (1)...(19): siRNA sense strand
caucucucaugcucccauu

SEQ ID NO: 603657 - RNA, 19 nt, Homo sapiens
  misc_RNA (1)...(19): siRNA sense strand
ggucucauuggacugauug

SEQ ID NO: 603658 - RNA, 19 nt, Homo sapiens
  misc_RNA (1)...(19): siRNA sense strand
gggacacccaggccaaaga

SEQ ID NO: 603659 - RNA, 19 nt, Homo sapiens
  misc_RNA (1)...(19): siRNA sense strand
ggucugaagggucauaagg

SEQ ID NO: 603660 - RNA, 19 nt, Homo sapiens
  misc_RNA (1)...(19): siRNA sense strand
gggccacccaggucucauu

SEQ ID NO: 603661 - RNA, 19 nt, Homo sapiens
  misc_RNA (1)...(19): siRNA sense strand
aaagaggagaaguggguuu

SEQ ID NO: 603662 - RNA, 19 nt, Homo sapiens
  misc_RNA (1)...(19): siRNA sense strand
ggacacccaggccaaagag

SEQ ID NO: 603663 - RNA, 19 nt, Homo sapiens
  misc_RNA (1)...(19): siRNA sense strand
uggcuuuccuggguucaaa

SEQ ID NO: 603664 - RNA, 19 nt, Homo sapiens
  misc_RNA (1)...(19): siRNA sense strand
gcaguguuggaaccuggua

SEQ ID NO: 603665 - RNA, 19 nt, Homo sapiens
  misc_RNA (1)...(19): siRNA sense strand
gccccuaugucaaagaauu

SEQ ID NO: 603666 - RNA, 19 nt, Homo sapiens
  misc_RNA (1)...(19): siRNA sense strand
ccaggucucauuggacuga

SEQ ID NO: 603667 - RNA, 19 nt, Homo sapiens
  misc_RNA (1)...(19): siRNA sense strand
ucugucacccucauuguug

SEQ ID NO: 603668 - RNA, 19 nt, Homo sapiens
  misc_RNA (1)...(19): siRNA sense strand
gaacgaggugcagcaggau

SEQ ID NO: 603669 - RNA, 19 nt, Homo sapiens
  misc_RNA (1)...(19): siRNA sense strand
gcugguggaccugguuuga

SEQ ID NO: 603670 - RNA, 19 nt, Homo sapiens
  misc_RNA (1)...(19): siRNA sense strand
ugggaagucuggagcuaag

SEQ ID NO: 603671 - RNA, 19 nt, Homo sapiens
  misc_RNA (1)...(19): siRNA sense strand
ggaccucagggaccucuag

SEQ ID NO: 603672 - RNA, 19 nt, Homo sapiens
  misc_RNA (1)...(19): siRNA sense strand
ugaccgagguuuugaugga

SEQ ID NO: 603673 - RNA, 19 nt, Homo sapiens
  misc_RNA (1)...(19): siRNA sense strand
gaagggugaccgagguuuu

SEQ ID NO: 603674 - RNA, 19 nt, Homo sapiens
  misc_RNA (1)...(19): siRNA sense strand
gaccuguccgcuuccugua

SEQ ID NO: 603675 - RNA, 19 nt, Homo sapiens
  misc_RNA (1)...(19): siRNA sense strand
gcaggaagaugaggccaua

SEQ ID NO: 603676 - RNA, 19 nt, Homo sapiens
  misc_RNA (1)...(19): siRNA sense strand
gaggauuucccaaagauuu

SEQ ID NO: 603677 - RNA, 19 nt, Homo sapiens
  misc_RNA (1)...(19): siRNA sense strand
ccgaagugcucguccagua

SEQ ID NO: 603678 - RNA, 19 nt, Homo sapiens
  misc_RNA (1)...(19): siRNA sense strand
gggaugacgucacgcaguu

SEQ ID NO: 603679 - RNA, 19 nt, Homo sapiens
  misc_RNA (1)...(19): siRNA sense strand
ggacacccauggagugauc

SEQ ID NO: 603680 - RNA, 19 nt, Homo sapiens
  misc_RNA (1)...(19): siRNA sense strand
gggaggagaucgagcagau

SEQ ID NO: 603681 - RNA, 19 nt, Homo sapiens
  misc_RNA (1)...(19): siRNA sense strand
gggagauccuggcgcuaua

SEQ ID NO: 603682 - RNA, 19 nt, Homo sapiens
  misc_RNA (1)...(19): siRNA sense strand
ggaacaagaggauucaaug

SEQ ID NO: 603683 - RNA, 19 nt, Homo sapiens
  misc_RNA (1)...(19): siRNA sense strand
caaaggugaugaaggaaca

SEQ ID NO: 603684 - RNA, 19 nt, Homo sapiens
  misc_RNA (1)...(19): siRNA sense strand
gaagugcucguccaguauu

SEQ ID NO: 603685 - RNA, 19 nt, Homo sapiens
  misc_RNA (1)...(19): siRNA sense strand
ccauucagaugcccaagaa

SEQ ID NO: 603686 - RNA, 19 nt, Homo sapiens
  misc_RNA (1)...(19): siRNA sense strand
cagcaaccaucaagacuuc

SEQ ID NO: 603687 - RNA, 19 nt, Homo sapiens
  misc_RNA (1)...(19): siRNA sense strand
gagcugagcccggagacua

SEQ ID NO: 603688 - RNA, 19 nt, Homo sapiens
  misc_RNA (1)...(19): siRNA sense strand
gggaacaucugguggugau

SEQ ID NO: 603689 - RNA, 19 nt, Homo sapiens
  misc_RNA (1)...(19): siRNA sense strand
gaacagaaggagcuggaau

SEQ ID NO: 603690 - RNA, 19 nt, Homo sapiens
  misc_RNA (1)...(19): siRNA sense strand
gaggagaucgagcagauga

SEQ ID NO: 603691 - RNA, 19 nt, Homo sapiens
  misc_RNA (1)...(19): siRNA sense strand
gaacaagaggauucaaugg

SEQ ID NO: 603692 - RNA, 19 nt, Homo sapiens
  misc_RNA (1)...(19): siRNA sense strand
gaaguuggagucccugguu

SEQ ID NO: 603693 - RNA, 19 nt, Homo sapiens
  misc_RNA (1)...(19): siRNA sense strand
ucagggaccucuaggauac

SEQ ID NO: 603694 - RNA, 19 nt, Homo sapiens
  misc_RNA (1)...(19): siRNA sense strand
cagaagggccugcgggauu

SEQ ID NO: 603695 - RNA, 19 nt, Homo sapiens
  misc_RNA (1)...(19): siRNA sense strand
gucaaagaauucagagaug

SEQ ID NO: 603696 - RNA, 19 nt, Homo sapiens
  misc_RNA (1)...(19): siRNA sense strand
ggacagaagggcaccaaag

SEQ ID NO: 603697 - RNA, 19 nt, Homo sapiens
  misc_RNA (1)...(19): siRNA sense strand
ugaaucaugugaacagaag

SEQ ID NO: 603698 - RNA, 19 nt, Homo sapiens
  misc_RNA (1)...(19): siRNA sense strand
gaagggugaggauggcuuu

SEQ ID NO: 603699 - RNA, 19 nt, Homo sapiens
  misc_RNA (1)...(19): siRNA sense strand
ggaaagaccccaaaaccaa

SEQ ID NO: 603700 - RNA, 19 nt, Homo sapiens
  misc_RNA (1)...(19): siRNA sense strand
caggaggauuucccaaaga

SEQ ID NO: 603701 - RNA, 19 nt, Homo sapiens
  misc_RNA (1)...(19): siRNA sense strand
gaacccaggcccaguugga

SEQ ID NO: 603702 - RNA, 19 nt, Homo sapiens
  misc_RNA (1)...(19): siRNA sense strand
ccaggaggauuucccaaag

SEQ ID NO: 603703 - RNA, 19 nt, Homo sapiens
  misc_RNA (1)...(19): siRNA sense strand
caaaggcccaccugguauu

SEQ ID NO: 603704 - RNA, 19 nt, Homo sapiens
  misc_RNA (1)...(19): siRNA sense strand
ccacccaggucucauugga

SEQ ID NO: 603705 - RNA, 19 nt, Homo sapiens
  misc_RNA (1)...(19): siRNA sense strand
ccauuggccuacaggguuu

SEQ ID NO: 603706 - RNA, 19 nt, Homo sapiens
  misc_RNA (1)...(19): siRNA sense strand
agccaaaggugaugaagga

SEQ ID NO: 603707 - RNA, 19 nt, Homo sapiens
  misc_RNA (1)...(19): siRNA sense strand
caucuuuggugcccguauu

SEQ ID NO: 603708 - RNA, 19 nt, Homo sapiens
  misc_RNA (1)...(19): siRNA sense strand
ucucuuacguggacucaga

SEQ ID NO: 603709 - RNA, 19 nt, Homo sapiens
  misc_RNA (1)...(19): siRNA sense strand
gaagggagccaagggagau

SEQ ID NO: 603710 - RNA, 19 nt, Homo sapiens
  misc_RNA (1)...(19): siRNA sense strand
gaagggagaaacaggagau

SEQ ID NO: 603711 - RNA, 19 nt, Homo sapiens
  misc_RNA (1)...(19): siRNA sense strand
ugggagcccuggccugaaa

SEQ ID NO: 603712 - RNA, 19 nt, Homo sapiens
  misc_RNA (1)...(19): siRNA sense strand
gaaggaacaagaggauuca

SEQ ID NO: 603713 - RNA, 19 nt, Homo sapiens
  misc_RNA (1)...(19): siRNA sense strand
ucacagagcccagagaucu

SEQ ID NO: 603714 - RNA, 19 nt, Homo sapiens
  misc_RNA (1)...(19): siRNA sense strand
cccaaaggcccaccuggua

SEQ ID NO: 603715 - RNA, 19 nt, Homo sapiens
  misc_RNA (1)...(19): siRNA sense strand
gcagcaaccaucaagacuu

SEQ ID NO: 603716 - RNA, 19 nt, Homo sapiens
  misc_RNA (1)...(19): siRNA sense strand
agaagggccugcgggauug

SEQ ID NO: 603717 - RNA, 19 nt, Homo sapiens
  misc_RNA (1)...(19): siRNA sense strand
ggauggaagccgucugaug

SEQ ID NO: 603718 - RNA, 19 nt, Homo sapiens
  misc_RNA (1)...(19): siRNA sense strand
ucagggagcagcaggagaa

SEQ ID NO: 603719 - RNA, 19 nt, Homo sapiens
  misc_RNA (1)...(19): siRNA sense strand
ggagagaaggguccucaag

SEQ ID NO: 603720 - RNA, 19 nt, Homo sapiens
  misc_RNA (1)...(19): siRNA sense strand
aggagagccugcaguguug

SEQ ID NO: 603721 - RNA, 19 nt, Homo sapiens
  misc_RNA (1)...(19): siRNA sense strand
ccaaaggcccaccugguau

SEQ ID NO: 603722 - RNA, 19 nt, Homo sapiens
  misc_RNA (1)...(19): siRNA sense strand
ucaaggguguggacggaau

SEQ ID NO: 603723 - RNA, 19 nt, Homo sapiens
  misc_RNA (1)...(19): siRNA sense strand
gggagaaacaggagaugug

SEQ ID NO: 603724 - RNA, 19 nt, Homo sapiens
  misc_RNA (1)...(19): siRNA sense strand
gaugaaggaacaagaggau

SEQ ID NO: 603725 - RNA, 19 nt, Homo sapiens
  misc_RNA (1)...(19): siRNA sense strand
ggagauguggguccuaugg

SEQ ID NO: 603726 - RNA, 19 nt, Homo sapiens
  misc_RNA (1)...(19): siRNA sense strand
ugaaggaacaagaggauuc

SEQ ID NO: 603727 - RNA, 19 nt, Homo sapiens
  misc_RNA (1)...(19): siRNA sense strand
gugaagggccagucuguca

SEQ ID NO: 603728 - RNA, 19 nt, Homo sapiens
  misc_RNA (1)...(19): siRNA sense strand
aaggagagccugcaguguu

SEQ ID NO: 603729 - RNA, 19 nt, Homo sapiens
  misc_RNA (1)...(19): siRNA sense strand
agacuucacaggccacaaa

SEQ ID NO: 603730 - RNA, 19 nt, Homo sapiens
  misc_RNA (1)...(19): siRNA sense strand
gaagggagaucggggacuu

SEQ ID NO: 603731 - RNA, 19 nt, Homo sapiens
  misc_RNA (1)...(19): siRNA sense strand
gaacccugguccuguuggu

SEQ ID NO: 603732 - RNA, 19 nt, Homo sapiens
  misc_RNA (1)...(19): siRNA sense strand
ugacauaggcgugaaaggu

SEQ ID NO: 603733 - RNA, 19 nt, Homo sapiens
  misc_RNA (1)...(19): siRNA sense strand
ggaggauuucccaaagauu

SEQ ID NO: 603734 - RNA, 19 nt, Homo sapiens
  misc_RNA (1)...(19): siRNA sense strand
ucacgcaguucucuuacgu

SEQ ID NO: 603735 - RNA, 19 nt, Homo sapiens
  misc_RNA (1)...(19): siRNA sense strand
gaggagaaguggguuucca

SEQ ID NO: 603736 - RNA, 19 nt, Homo sapiens
  misc_RNA (1)...(19): siRNA sense strand
gcacccacucgccagcuuu

SEQ ID NO: 603737 - RNA, 19 nt, Homo sapiens
  misc_RNA (1)...(19): siRNA sense strand
ugucaaagaauucagagau

SEQ ID NO: 603738 - RNA, 19 nt, Homo sapiens
  misc_RNA (1)...(19): siRNA sense strand
cgaagugcucguccaguau

SEQ ID NO: 603739 - RNA, 19 nt, Homo sapiens
  misc_RNA (1)...(19): siRNA sense strand
gagacuagccccuauguca

SEQ ID NO: 603740 - RNA, 19 nt, Homo sapiens
  misc_RNA (1)...(19): siRNA sense strand
gaaccaggagagucaggau

SEQ ID NO: 603741 - RNA, 19 nt, Homo sapiens
  misc_RNA (1)...(19): siRNA sense strand
ugggacagcuggaaaagaa

SEQ ID NO: 603742 - RNA, 19 nt, Homo sapiens
  misc_RNA (1)...(19): siRNA sense strand
ccauggagugaucaucuuu

SEQ ID NO: 603743 - RNA, 19 nt, Homo sapiens
  misc_RNA (1)...(19): siRNA sense strand
gcuggaugccuccuucuca

SEQ ID NO: 603744 - RNA, 19 nt, Homo sapiens
  misc_RNA (1)...(19): siRNA sense strand
ccuguccgcuuccuguaug

SEQ ID NO: 603745 - RNA, 19 nt, Homo sapiens
  misc_RNA (1)...(19): siRNA sense strand
gacagaagggcaccaaagg

SEQ ID NO: 603746 - RNA, 19 nt, Homo sapiens
  misc_RNA (1)...(19): siRNA sense strand
uggagaggauggagacaag

SEQ ID NO: 603747 - RNA, 19 nt, Homo sapiens
  misc_RNA (1)...(19): siRNA sense strand
uggagcagcaggagagaaa

SEQ ID NO: 603748 - RNA, 19 nt, Homo sapiens
  misc_RNA (1)...(19): siRNA sense strand
gugcccguauucuggauga

SEQ ID NO: 603749 - RNA, 19 nt, Homo sapiens
  misc_RNA (1)...(19): siRNA sense strand
ccuccugacucucuacagu

SEQ ID NO: 603750 - RNA, 19 nt, Homo sapiens
  misc_RNA (1)...(19): siRNA sense strand
gggccaggauggugcuaag

SEQ ID NO: 603751 - RNA, 19 nt, Homo sapiens
  misc_RNA (1)...(19): siRNA sense strand
aaaccaacagccucacaga

SEQ ID NO: 603752 - RNA, 19 nt, Homo sapiens
  misc_RNA (1)...(19): siRNA sense strand
guggauggaagccgucuga

SEQ ID NO: 603753 - RNA, 19 nt, Homo sapiens
  misc_RNA (1)...(19): siRNA sense strand
ggccucaaccucccucuca

SEQ ID NO: 603754 - RNA, 19 nt, Homo sapiens
  misc_RNA (1)...(19): siRNA sense strand
aggaggauuucccaaagau

SEQ ID NO: 603755 - RNA, 19 nt, Homo sapiens
  misc_RNA (1)...(19): siRNA sense strand
ccacagcagcaaccaucaa

SEQ ID NO: 603756 - RNA, 19 nt, Homo sapiens
  misc_RNA (1)...(19): siRNA sense strand
caucucucaugcucccauu

SEQ ID NO: 603757 - RNA, 19 nt, Homo sapiens
  misc_RNA (1)...(19): siRNA sense strand
ggucucauuggacugauug

SEQ ID NO: 603758 - RNA, 19 nt, Homo sapiens
  misc_RNA (1)...(19): siRNA sense strand
gggacacccaggccaaaga

SEQ ID NO: 603759 - RNA, 19 nt, Homo sapiens
  misc_RNA (1)...(19): siRNA sense strand
ggucugaagggucauaagg

SEQ ID NO: 603760 - RNA, 19 nt, Homo sapiens
  misc_RNA (1)...(19): siRNA sense strand
gggccacccaggucucauu

SEQ ID NO: 603761 - RNA, 19 nt, Homo sapiens
  misc_RNA (1)...(19): siRNA sense strand
aaagaggagaaguggguuu

SEQ ID NO: 603762 - RNA, 19 nt, Homo sapiens
  misc_RNA (1)...(19): siRNA sense strand
ggacacccaggccaaagag

SEQ ID NO: 603763 - RNA, 19 nt, Homo sapiens
  misc_RNA (1)...(19): siRNA sense strand
uggcuuuccuggguucaaa

SEQ ID NO: 603764 - RNA, 19 nt, Homo sapiens
  misc_RNA (1)...(19): siRNA sense strand
gcaguguuggaaccuggua

SEQ ID NO: 603765 - RNA, 19 nt, Homo sapiens
  misc_RNA (1)...(19): siRNA sense strand
gccccuaugucaaagaauu

SEQ ID NO: 603766 - RNA, 19 nt, Homo sapiens
  misc_RNA (1)...(19): siRNA sense strand
ccaggucucauuggacuga

SEQ ID NO: 603767 - RNA, 19 nt, Homo sapiens
  misc_RNA (1)...(19): siRNA sense strand
ucugucacccucauuguug

SEQ ID NO: 603768 - RNA, 19 nt, Homo sapiens
  misc_RNA (1)...(19): siRNA sense strand
gaacgaggugcagcaggau

SEQ ID NO: 603769 - RNA, 19 nt, Homo sapiens
  misc_RNA (1)...(19): siRNA sense strand
gcugguggaccugguuuga

SEQ ID NO: 603770 - RNA, 19 nt, Homo sapiens
  misc_RNA (1)...(19): siRNA sense strand
ugggaagucuggagcuaag

SEQ ID NO: 603771 - RNA, 19 nt, Homo sapiens
  misc_RNA (1)...(19): siRNA sense strand
ggaccucagggaccucuag

SEQ ID NO: 603772 - RNA, 19 nt, Homo sapiens
  misc_RNA (1)...(19): siRNA sense strand
ugaccgagguuuugaugga

SEQ ID NO: 603773 - RNA, 19 nt, Homo sapiens
  misc_RNA (1)...(19): siRNA sense strand
gaagggugaccgagguuuu

SEQ ID NO: 603774 - RNA, 19 nt, Homo sapiens
  misc_RNA (1)...(19): siRNA sense strand
gaccuguccgcuuccugua

SEQ ID NO: 603775 - RNA, 19 nt, Homo sapiens
  misc_RNA (1)...(19): siRNA sense strand
gcaggaagaugaggccaua

SEQ ID NO: 603776 - RNA, 19 nt, Homo sapiens
  misc_RNA (1)...(19): siRNA sense strand
gaggauuucccaaagauuu

SEQ ID NO: 603777 - RNA, 19 nt, Homo sapiens
  misc_RNA (1)...(19): siRNA sense strand
ccgaagugcucguccagua

SEQ ID NO: 603778 - RNA, 19 nt, Homo sapiens
  misc_RNA (1)...(19): siRNA sense strand
gggaugacgucacgcaguu

SEQ ID NO: 603779 - RNA, 19 nt, Homo sapiens
  misc_RNA (1)...(19): siRNA sense strand
ggacacccauggagugauc

SEQ ID NO: 603780 - RNA, 19 nt, Homo sapiens
  misc_RNA (1)...(19): siRNA sense strand
gggaggagaucgagcagau

SEQ ID NO: 603781 - RNA, 19 nt, Homo sapiens
  misc_RNA (1)...(19): siRNA sense strand
gggagauccuggcgcuaua

SEQ ID NO: 603782 - RNA, 19 nt, Homo sapiens
  misc_RNA (1)...(19): siRNA sense strand
ggaacaagaggauucaaug

SEQ ID NO: 603783 - RNA, 19 nt, Homo sapiens
  misc_RNA (1)...(19): siRNA sense strand
caaaggugaugaaggaaca

SEQ ID NO: 603784 - RNA, 19 nt, Homo sapiens
  misc_RNA (1)...(19): siRNA sense strand
gaagugcucguccaguauu

SEQ ID NO: 603785 - RNA, 19 nt, Homo sapiens
  misc_RNA (1)...(19): siRNA sense strand
ccauucagaugcccaagaa

SEQ ID NO: 603786 - RNA, 19 nt, Homo sapiens
  misc_RNA (1)...(19): siRNA sense strand
cagcaaccaucaagacuuc

SEQ ID NO: 603787 - RNA, 19 nt, Homo sapiens
  misc_RNA (1)...(19): siRNA sense strand
gagcugagcccggagacua

SEQ ID NO: 603788 - RNA, 19 nt, Homo sapiens
  misc_RNA (1)...(19): siRNA sense strand
gggaacaucugguggugau

SEQ ID NO: 603789 - RNA, 19 nt, Homo sapiens
  misc_RNA (1)...(19): siRNA sense strand
gaacagaaggagcuggaau

SEQ ID NO: 603790 - RNA, 19 nt, Homo sapiens
  misc_RNA (1)...(19): siRNA sense strand
gaggagaucgagcagauga

SEQ ID NO: 603791 - RNA, 19 nt, Homo sapiens
  misc_RNA (1)...(19): siRNA sense strand
gaacaagaggauucaaugg

SEQ ID NO: 603792 - RNA, 19 nt, Homo sapiens
  misc_RNA (1)...(19): siRNA sense strand
gaaguuggagucccugguu

SEQ ID NO: 603793 - RNA, 19 nt, Homo sapiens
  misc_RNA (1)...(19): siRNA sense strand
ucagggaccucuaggauac

SEQ ID NO: 603794 - RNA, 19 nt, Homo sapiens
  misc_RNA (1)...(19): siRNA sense strand
cagaagggccugcgggauu

SEQ ID NO: 603795 - RNA, 19 nt, Homo sapiens
  misc_RNA (1)...(19): siRNA sense strand
gucaaagaauucagagaug

SEQ ID NO: 603796 - RNA, 19 nt, Homo sapiens
  misc_RNA (1)...(19): siRNA sense strand
ggacagaagggcaccaaag

SEQ ID NO: 603797 - RNA, 19 nt, Homo sapiens
  misc_RNA (1)...(19): siRNA sense strand
ugaaucaugugaacagaag

SEQ ID NO: 603798 - RNA, 19 nt, Homo sapiens
  misc_RNA (1)...(19): siRNA sense strand
gaagggugaggauggcuuu

SEQ ID NO: 603799 - RNA, 19 nt, Homo sapiens
  misc_RNA (1)...(19): siRNA sense strand
ggaaagaccccaaaaccaa

SEQ ID NO: 603800 - RNA, 19 nt, Homo sapiens
  misc_RNA (1)...(19): siRNA sense strand
caggaggauuucccaaaga

SEQ ID NO: 603801 - RNA, 19 nt, Homo sapiens
  misc_RNA (1)...(19): siRNA sense strand
gaacccaggcccaguugga

SEQ ID NO: 603802 - RNA, 19 nt, Homo sapiens
  misc_RNA (1)...(19): siRNA sense strand
ccaggaggauuucccaaag

SEQ ID NO: 603803 - RNA, 19 nt, Homo sapiens
  misc_RNA (1)...(19): siRNA sense strand
caaaggcccaccugguauu

SEQ ID NO: 603804 - RNA, 19 nt, Homo sapiens
  misc_RNA (1)...(19): siRNA sense strand
ccacccaggucucauugga

SEQ ID NO: 603805 - RNA, 19 nt, Homo sapiens
  misc_RNA (1)...(19): siRNA sense strand
ccauuggccuacaggguuu

SEQ ID NO: 603806 - RNA, 19 nt, Homo sapiens
  misc_RNA (1)...(19): siRNA sense strand
agccaaaggugaugaagga

SEQ ID NO: 603807 - RNA, 19 nt, Homo sapiens
  misc_RNA (1)...(19): siRNA sense strand
caucuuuggugcccguauu

SEQ ID NO: 603808 - RNA, 19 nt, Homo sapiens
  misc_RNA (1)...(19): siRNA sense strand
ucucuuacguggacucaga

SEQ ID NO: 603809 - RNA, 19 nt, Homo sapiens
  misc_RNA (1)...(19): siRNA sense strand
gaagggagccaagggagau

SEQ ID NO: 603810 - RNA, 19 nt, Homo sapiens
  misc_RNA (1)...(19): siRNA sense strand
gaagggagaaacaggagau

SEQ ID NO: 603811 - RNA, 19 nt, Homo sapiens
  misc_RNA (1)...(19): siRNA sense strand
ugggagcccuggccugaaa

SEQ ID NO: 603812 - RNA, 19 nt, Homo sapiens
  misc_RNA (1)...(19): siRNA sense strand
gaaggaacaagaggauuca

SEQ ID NO: 603813 - RNA, 19 nt, Homo sapiens
  misc_RNA (1)...(19): siRNA sense strand
ucacagagcccagagaucu

SEQ ID NO: 603814 - RNA, 19 nt, Homo sapiens
  misc_RNA (1)...(19): siRNA sense strand
cccaaaggcccaccuggua

SEQ ID NO: 603815 - RNA, 19 nt, Homo sapiens
  misc_RNA (1)...(19): siRNA sense strand
gcagcaaccaucaagacuu

SEQ ID NO: 603816 - RNA, 19 nt, Homo sapiens
  misc_RNA (1)...(19): siRNA sense strand
agaagggccugcgggauug

SEQ ID NO: 603817 - RNA, 19 nt, Homo sapiens
  misc_RNA (1)...(19): siRNA sense strand
ggauggaagccgucugaug

SEQ ID NO: 603818 - RNA, 19 nt, Homo sapiens
  misc_RNA (1)...(19): siRNA sense strand
ucagggagcagcaggagaa

SEQ ID NO: 603819 - RNA, 19 nt, Homo sapiens
  misc_RNA (1)...(19): siRNA sense strand
ggagagaaggguccucaag

SEQ ID NO: 603820 - RNA, 19 nt, Homo sapiens
  misc_RNA (1)...(19): siRNA sense strand
aggagagccugcaguguug

SEQ ID NO: 603821 - RNA, 19 nt, Homo sapiens
  misc_RNA (1)...(19): siRNA sense strand
ccaaaggcccaccugguau

SEQ ID NO: 603822 - RNA, 19 nt, Homo sapiens
  misc_RNA (1)...(19): siRNA sense strand
ucaaggguguggacggaau

SEQ ID NO: 603823 - RNA, 19 nt, Homo sapiens
  misc_RNA (1)...(19): siRNA sense strand
gggagaaacaggagaugug

SEQ ID NO: 603824 - RNA, 19 nt, Homo sapiens
  misc_RNA (1)...(19): siRNA sense strand
gaugaaggaacaagaggau

SEQ ID NO: 603825 - RNA, 19 nt, Homo sapiens
  misc_RNA (1)...(19): siRNA sense strand
ggagauguggguccuaugg

SEQ ID NO: 603826 - RNA, 19 nt, Homo sapiens
  misc_RNA (1)...(19): siRNA sense strand
ugaaggaacaagaggauuc

SEQ ID NO: 603827 - RNA, 19 nt, Homo sapiens
  misc_RNA (1)...(19): siRNA sense strand
gugaagggccagucuguca

SEQ ID NO: 603828 - RNA, 19 nt, Homo sapiens
  misc_RNA (1)...(19): siRNA sense strand
aaggagagccugcaguguu

SEQ ID NO: 603829 - RNA, 19 nt, Homo sapiens
  misc_RNA (1)...(19): siRNA sense strand
agacuucacaggccacaaa

SEQ ID NO: 603830 - RNA, 19 nt, Homo sapiens
  misc_RNA (1)...(19): siRNA sense strand
gaagggagaucggggacuu

SEQ ID NO: 603831 - RNA, 19 nt, Homo sapiens
  misc_RNA (1)...(19): siRNA sense strand
gaacccugguccuguuggu

SEQ ID NO: 603832 - RNA, 19 nt, Homo sapiens
  misc_RNA (1)...(19): siRNA sense strand
ugacauaggcgugaaaggu

SEQ ID NO: 603833 - RNA, 19 nt, Homo sapiens
  misc_RNA (1)...(19): siRNA sense strand
ggaggauuucccaaagauu

SEQ ID NO: 603834 - RNA, 19 nt, Homo sapiens
  misc_RNA (1)...(19): siRNA sense strand
ucacgcaguucucuuacgu

SEQ ID NO: 603835 - RNA, 19 nt, Homo sapiens
  misc_RNA (1)...(19): siRNA sense strand
gaggagaaguggguuucca

SEQ ID NO: 603836 - RNA, 19 nt, Homo sapiens
  misc_RNA (1)...(19): siRNA sense strand
gcacccacucgccagcuuu

SEQ ID NO: 603837 - RNA, 19 nt, Homo sapiens
  misc_RNA (1)...(19): siRNA sense strand
ugucaaagaauucagagau

SEQ ID NO: 603838 - RNA, 19 nt, Homo sapiens
  misc_RNA (1)...(19): siRNA sense strand
cgaagugcucguccaguau

SEQ ID NO: 603839 - RNA, 19 nt, Homo sapiens
  misc_RNA (1)...(19): siRNA sense strand
gagacuagccccuauguca

SEQ ID NO: 603840 - RNA, 19 nt, Homo sapiens
  misc_RNA (1)...(19): siRNA sense strand
gaaccaggagagucaggau

SEQ ID NO: 603841 - RNA, 19 nt, Homo sapiens
  misc_RNA (1)...(19): siRNA sense strand
ugggacagcuggaaaagaa

SEQ ID NO: 603842 - RNA, 19 nt, Homo sapiens
  misc_RNA (1)...(19): siRNA sense strand
ccauggagugaucaucuuu

SEQ ID NO: 603843 - RNA, 19 nt, Homo sapiens
  misc_RNA (1)...(19): siRNA sense strand
gcuggaugccuccuucuca

SEQ ID NO: 603844 - RNA, 19 nt, Homo sapiens
  misc_RNA (1)...(19): siRNA sense strand
ccuguccgcuuccuguaug

SEQ ID NO: 603845 - RNA, 19 nt, Homo sapiens
  misc_RNA (1)...(19): siRNA sense strand
gacagaagggcaccaaagg

SEQ ID NO: 603846 - RNA, 19 nt, Homo sapiens
  misc_RNA (1)...(19): siRNA sense strand
uggagaggauggagacaag

SEQ ID NO: 603847 - RNA, 19 nt, Homo sapiens
  misc_RNA (1)...(19): siRNA sense strand
uggagcagcaggagagaaa

SEQ ID NO: 603848 - RNA, 19 nt, Homo sapiens
  misc_RNA (1)...(19): siRNA sense strand
gugcccguauucuggauga

SEQ ID NO: 603849 - RNA, 19 nt, Homo sapiens
  misc_RNA (1)...(19): siRNA sense strand
ccuccugacucucuacagu

SEQ ID NO: 603850 - RNA, 19 nt, Homo sapiens
  misc_RNA (1)...(19): siRNA sense strand
gggccaggauggugcuaag

SEQ ID NO: 603851 - RNA, 19 nt, Homo sapiens
  misc_RNA (1)...(19): siRNA sense strand
aaaccaacagccucacaga

SEQ ID NO: 603852 - RNA, 19 nt, Homo sapiens
  misc_RNA (1)...(19): siRNA sense strand
guggauggaagccgucuga

SEQ ID NO: 603853 - RNA, 19 nt, Homo sapiens
  misc_RNA (1)...(19): siRNA sense strand
ggccucaaccucccucuca

SEQ ID NO: 603854 - RNA, 19 nt, Homo sapiens
  misc_RNA (1)...(19): siRNA sense strand
aggaggauuucccaaagau

SEQ ID NO: 603855 - RNA, 19 nt, Homo sapiens
  misc_RNA (1)...(19): siRNA sense strand
ccacagcagcaaccaucaa

SEQ ID NO: 603856 - RNA, 19 nt, Homo sapiens
  misc_RNA (1)...(19): siRNA sense strand
caucucucaugcucccauu

SEQ ID NO: 603857 - RNA, 19 nt, Homo sapiens
  misc_RNA (1)...(19): siRNA sense strand
ggucucauuggacugauug

SEQ ID NO: 603858 - RNA, 19 nt, Homo sapiens
  misc_RNA (1)...(19): siRNA sense strand
gggacacccaggccaaaga

SEQ ID NO: 603859 - RNA, 19 nt, Homo sapiens
  misc_RNA (1)...(19): siRNA sense strand
ggucugaagggucauaagg

SEQ ID NO: 603860 - RNA, 19 nt, Homo sapiens
  misc_RNA (1)...(19): siRNA sense strand
gggccacccaggucucauu

SEQ ID NO: 603861 - RNA, 19 nt, Homo sapiens
  misc_RNA (1)...(19): siRNA sense strand
aaagaggagaaguggguuu

SEQ ID NO: 603862 - RNA, 19 nt, Homo sapiens
  misc_RNA (1)...(19): siRNA sense strand
ggacacccaggccaaagag

SEQ ID NO: 603863 - RNA, 19 nt, Homo sapiens
  misc_RNA (1)...(19): siRNA sense strand
uggcuuuccuggguucaaa

SEQ ID NO: 603864 - RNA, 19 nt, Homo sapiens
  misc_RNA (1)...(19): siRNA sense strand
gcaguguuggaaccuggua

SEQ ID NO: 603865 - RNA, 19 nt, Homo sapiens
  misc_RNA (1)...(19): siRNA sense strand
gccccuaugucaaagaauu

SEQ ID NO: 603866 - RNA, 19 nt, Homo sapiens
  misc_RNA (1)...(19): siRNA sense strand
ccaggucucauuggacuga

SEQ ID NO: 603867 - RNA, 19 nt, Homo sapiens
  misc_RNA (1)...(19): siRNA sense strand
ucugucacccucauuguug

SEQ ID NO: 603868 - RNA, 19 nt, Homo sapiens
  misc_RNA (1)...(19): siRNA sense strand
gaacgaggugcagcaggau

SEQ ID NO: 603869 - RNA, 19 nt, Homo sapiens
  misc_RNA (1)...(19): siRNA sense strand
gcugguggaccugguuuga

SEQ ID NO: 603870 - RNA, 19 nt, Homo sapiens
  misc_RNA (1)...(19): siRNA sense strand
ugggaagucuggagcuaag

SEQ ID NO: 603871 - RNA, 19 nt, Homo sapiens
  misc_RNA (1)...(19): siRNA sense strand
ggaccucagggaccucuag

SEQ ID NO: 603872 - RNA, 19 nt, Homo sapiens
  misc_RNA (1)...(19): siRNA sense strand
ugaccgagguuuugaugga

SEQ ID NO: 603873 - RNA, 19 nt, Homo sapiens
  misc_RNA (1)...(19): siRNA sense strand
gaagggugaccgagguuuu

SEQ ID NO: 603874 - RNA, 19 nt, Homo sapiens
  misc_RNA (1)...(19): siRNA sense strand
gaccuguccgcuuccugua

SEQ ID NO: 603875 - RNA, 19 nt, Homo sapiens
  misc_RNA (1)...(19): siRNA sense strand
gcaggaagaugaggccaua

SEQ ID NO: 603876 - RNA, 19 nt, Homo sapiens
  misc_RNA (1)...(19): siRNA sense strand
gaggauuucccaaagauuu

SEQ ID NO: 603877 - RNA, 19 nt, Homo sapiens
  misc_RNA (1)...(19): siRNA sense strand
ccgaagugcucguccagua

SEQ ID NO: 603878 - RNA, 19 nt, Homo sapiens
  misc_RNA (1)...(19): siRNA sense strand
gggaugacgucacgcaguu

SEQ ID NO: 603879 - RNA, 19 nt, Homo sapiens
  misc_RNA (1)...(19): siRNA sense strand
ggacacccauggagugauc

SEQ ID NO: 603880 - RNA, 19 nt, Homo sapiens
  misc_RNA (1)...(19): siRNA sense strand
gggaggagaucgagcagau

SEQ ID NO: 603881 - RNA, 19 nt, Homo sapiens
  misc_RNA (1)...(19): siRNA sense strand
gggagauccuggcgcuaua

SEQ ID NO: 603882 - RNA, 19 nt, Homo sapiens
  misc_RNA (1)...(19): siRNA sense strand
ggaacaagaggauucaaug

SEQ ID NO: 603883 - RNA, 19 nt, Homo sapiens
  misc_RNA (1)...(19): siRNA sense strand
caaaggugaugaaggaaca

SEQ ID NO: 603884 - RNA, 19 nt, Homo sapiens
  misc_RNA (1)...(19): siRNA sense strand
gaagugcucguccaguauu

SEQ ID NO: 603885 - RNA, 19 nt, Homo sapiens
  misc_RNA (1)...(19): siRNA sense strand
ccauucagaugcccaagaa

SEQ ID NO: 603886 - RNA, 19 nt, Homo sapiens
  misc_RNA (1)...(19): siRNA sense strand
cagcaaccaucaagacuuc

SEQ ID NO: 603887 - RNA, 19 nt, Homo sapiens
  misc_RNA (1)...(19): siRNA sense strand
gagcugagcccggagacua

SEQ ID NO: 603888 - RNA, 19 nt, Homo sapiens
  misc_RNA (1)...(19): siRNA sense strand
gggaacaucugguggugau

SEQ ID NO: 603889 - RNA, 19 nt, Homo sapiens
  misc_RNA (1)...(19): siRNA sense strand
gaacagaaggagcuggaau

SEQ ID NO: 603890 - RNA, 19 nt, Homo sapiens
  misc_RNA (1)...(19): siRNA sense strand
gaggagaucgagcagauga

SEQ ID NO: 603891 - RNA, 19 nt, Homo sapiens
  misc_RNA (1)...(19): siRNA sense strand
gaacaagaggauucaaugg

SEQ ID NO: 603892 - RNA, 19 nt, Homo sapiens
  misc_RNA (1)...(19): siRNA sense strand
gaaguuggagucccugguu

SEQ ID NO: 603893 - RNA, 19 nt, Homo sapiens
  misc_RNA (1)...(19): siRNA sense strand
ucagggaccucuaggauac

SEQ ID NO: 603894 - RNA, 19 nt, Homo sapiens
  misc_RNA (1)...(19): siRNA sense strand
cagaagggccugcgggauu

SEQ ID NO: 603895 - RNA, 19 nt, Homo sapiens
  misc_RNA (1)...(19): siRNA sense strand
gucaaagaauucagagaug

SEQ ID NO: 603896 - RNA, 19 nt, Homo sapiens
  misc_RNA (1)...(19): siRNA sense strand
ggacagaagggcaccaaag

SEQ ID NO: 603897 - RNA, 19 nt, Homo sapiens
  misc_RNA (1)...(19): siRNA sense strand
ugaaucaugugaacagaag

SEQ ID NO: 603898 - RNA, 19 nt, Homo sapiens
  misc_RNA (1)...(19): siRNA sense strand
gaagggugaggauggcuuu

SEQ ID NO: 603899 - RNA, 19 nt, Homo sapiens
  misc_RNA (1)...(19): siRNA sense strand
ggaaagaccccaaaaccaa

SEQ ID NO: 603900 - RNA, 19 nt, Homo sapiens
  misc_RNA (1)...(19): siRNA sense strand
caggaggauuucccaaaga

SEQ ID NO: 603901 - RNA, 19 nt, Homo sapiens
  misc_RNA (1)...(19): siRNA sense strand
gaacccaggcccaguugga

SEQ ID NO: 603902 - RNA, 19 nt, Homo sapiens
  misc_RNA (1)...(19): siRNA sense strand
ccaggaggauuucccaaag

SEQ ID NO: 603903 - RNA, 19 nt, Homo sapiens
  misc_RNA (1)...(19): siRNA sense strand
caaaggcccaccugguauu

SEQ ID NO: 603904 - RNA, 19 nt, Homo sapiens
  misc_RNA (1)...(19): siRNA sense strand
ccacccaggucucauugga

SEQ ID NO: 603905 - RNA, 19 nt, Homo sapiens
  misc_RNA (1)...(19): siRNA sense strand
ccauuggccuacaggguuu

SEQ ID NO: 603906 - RNA, 19 nt, Homo sapiens
  misc_RNA (1)...(19): siRNA sense strand
agccaaaggugaugaagga

SEQ ID NO: 603907 - RNA, 19 nt, Homo sapiens
  misc_RNA (1)...(19): siRNA sense strand
caucuuuggugcccguauu

SEQ ID NO: 603908 - RNA, 19 nt, Homo sapiens
  misc_RNA (1)...(19): siRNA sense strand
ucucuuacguggacucaga

SEQ ID NO: 603909 - RNA, 19 nt, Homo sapiens
  misc_RNA (1)...(19): siRNA sense strand
gaagggagccaagggagau

SEQ ID NO: 603910 - RNA, 19 nt, Homo sapiens
  misc_RNA (1)...(19): siRNA sense strand
gaagggagaaacaggagau

SEQ ID NO: 603911 - RNA, 19 nt, Homo sapiens
  misc_RNA (1)...(19): siRNA sense strand
ugggagcccuggccugaaa

SEQ ID NO: 603912 - RNA, 19 nt, Homo sapiens
  misc_RNA (1)...(19): siRNA sense strand
gaaggaacaagaggauuca

SEQ ID NO: 603913 - RNA, 19 nt, Homo sapiens
  misc_RNA (1)...(19): siRNA sense strand
ucacagagcccagagaucu

SEQ ID NO: 603914 - RNA, 19 nt, Homo sapiens
  misc_RNA (1)...(19): siRNA sense strand
cccaaaggcccaccuggua

SEQ ID NO: 603915 - RNA, 19 nt, Homo sapiens
  misc_RNA (1)...(19): siRNA sense strand
gcagcaaccaucaagacuu

SEQ ID NO: 603916 - RNA, 19 nt, Homo sapiens
  misc_RNA (1)...(19): siRNA sense strand
agaagggccugcgggauug

SEQ ID NO: 603917 - RNA, 19 nt, Homo sapiens
  misc_RNA (1)...(19): siRNA sense strand
ggauggaagccgucugaug

SEQ ID NO: 603918 - RNA, 19 nt, Homo sapiens
  misc_RNA (1)...(19): siRNA sense strand
ucagggagcagcaggagaa

SEQ ID NO: 603919 - RNA, 19 nt, Homo sapiens
  misc_RNA (1)...(19): siRNA sense strand
ggagagaaggguccucaag

SEQ ID NO: 603920 - RNA, 19 nt, Homo sapiens
  misc_RNA (1)...(19): siRNA sense strand
aggagagccugcaguguug

SEQ ID NO: 603921 - RNA, 19 nt, Homo sapiens
  misc_RNA (1)...(19): siRNA sense strand
ccaaaggcccaccugguau

SEQ ID NO: 603922 - RNA, 19 nt, Homo sapiens
  misc_RNA (1)...(19): siRNA sense strand
ucaaggguguggacggaau

SEQ ID NO: 603923 - RNA, 19 nt, Homo sapiens
  misc_RNA (1)...(19): siRNA sense strand
gggagaaacaggagaugug

SEQ ID NO: 603924 - RNA, 19 nt, Homo sapiens
  misc_RNA (1)...(19): siRNA sense strand
gaugaaggaacaagaggau

SEQ ID NO: 603925 - RNA, 19 nt, Homo sapiens
  misc_RNA (1)...(19): siRNA sense strand
ggagauguggguccuaugg

SEQ ID NO: 603926 - RNA, 19 nt, Homo sapiens
  misc_RNA (1)...(19): siRNA sense strand
ugaaggaacaagaggauuc

SEQ ID NO: 603927 - RNA, 19 nt, Homo sapiens
  misc_RNA (1)...(19): siRNA sense strand
gugaagggccagucuguca

SEQ ID NO: 603928 - RNA, 19 nt, Homo sapiens
  misc_RNA (1)...(19): siRNA sense strand
aaggagagccugcaguguu

SEQ ID NO: 603929 - RNA, 19 nt, Homo sapiens
  misc_RNA (1)...(19): siRNA sense strand
agacuucacaggccacaaa

SEQ ID NO: 603930 - RNA, 19 nt, Homo sapiens
  misc_RNA (1)...(19): siRNA sense strand
gaagggagaucggggacuu

SEQ ID NO: 603931 - RNA, 19 nt, Homo sapiens
  misc_RNA (1)...(19): siRNA sense strand
gaacccugguccuguuggu

SEQ ID NO: 603932 - RNA, 19 nt, Homo sapiens
  misc_RNA (1)...(19): siRNA sense strand
ugacauaggcgugaaaggu

SEQ ID NO: 603933 - RNA, 19 nt, Homo sapiens
  misc_RNA (1)...(19): siRNA sense strand
ggaggauuucccaaagauu

SEQ ID NO: 603934 - RNA, 19 nt, Homo sapiens
  misc_RNA (1)...(19): siRNA sense strand
ucacgcaguucucuuacgu

SEQ ID NO: 603935 - RNA, 19 nt, Homo sapiens
  misc_RNA (1)...(19): siRNA sense strand
gaggagaaguggguuucca

SEQ ID NO: 603936 - RNA, 19 nt, Homo sapiens
  misc_RNA (1)...(19): siRNA sense strand
gcacccacucgccagcuuu

SEQ ID NO: 603937 - RNA, 19 nt, Homo sapiens
  misc_RNA (1)...(19): siRNA sense strand
ugucaaagaauucagagau

SEQ ID NO: 603938 - RNA, 19 nt, Homo sapiens
  misc_RNA (1)...(19): siRNA sense strand
cgaagugcucguccaguau

SEQ ID NO: 603939 - RNA, 19 nt, Homo sapiens
  misc_RNA (1)...(19): siRNA sense strand
gagacuagccccuauguca

SEQ ID NO: 603940 - RNA, 19 nt, Homo sapiens
  misc_RNA (1)...(19): siRNA sense strand
gaaccaggagagucaggau

SEQ ID NO: 603941 - RNA, 19 nt, Homo sapiens
  misc_RNA (1)...(19): siRNA sense strand
ugggacagcuggaaaagaa

SEQ ID NO: 603942 - RNA, 19 nt, Homo sapiens
  misc_RNA (1)...(19): siRNA sense strand
ccauggagugaucaucuuu

SEQ ID NO: 603943 - RNA, 19 nt, Homo sapiens
  misc_RNA (1)...(19): siRNA sense strand
gcuggaugccuccuucuca

SEQ ID NO: 603944 - RNA, 19 nt, Homo sapiens
  misc_RNA (1)...(19): siRNA sense strand
ccuguccgcuuccuguaug

SEQ ID NO: 603945 - RNA, 19 nt, Homo sapiens
  misc_RNA (1)...(19): siRNA sense strand
gacagaagggcaccaaagg

SEQ ID NO: 603946 - RNA, 19 nt, Homo sapiens
  misc_RNA (1)...(19): siRNA sense strand
uggagaggauggagacaag

SEQ ID NO: 603947 - RNA, 19 nt, Homo sapiens
  misc_RNA (1)...(19): siRNA sense strand
uggagcagcaggagagaaa

SEQ ID NO: 603948 - RNA, 19 nt, Homo sapiens
  misc_RNA (1)...(19): siRNA sense strand
gugcccguauucuggauga

SEQ ID NO: 603949 - RNA, 19 nt, Homo sapiens
  misc_RNA (1)...(19): siRNA sense strand
ccuccugacucucuacagu

SEQ ID NO: 603950 - RNA, 19 nt, Homo sapiens
  misc_RNA (1)...(19): siRNA sense strand
gggccaggauggugcuaag

SEQ ID NO: 603951 - RNA, 19 nt, Homo sapiens
  misc_RNA (1)...(19): siRNA sense strand
aaaccaacagccucacaga

SEQ ID NO: 603952 - RNA, 19 nt, Homo sapiens
  misc_RNA (1)...(19): siRNA sense strand
guggauggaagccgucuga

SEQ ID NO: 603953 - RNA, 19 nt, Homo sapiens
  misc_RNA (1)...(19): siRNA sense strand
ggccucaaccucccucuca

SEQ ID NO: 603954 - RNA, 19 nt, Homo sapiens
  misc_RNA (1)...(19): siRNA sense strand
aggaggauuucccaaagau

SEQ ID NO: 603955 - RNA, 19 nt, Homo sapiens
  misc_RNA (1)...(19): siRNA sense strand
ccacagcagcaaccaucaa

SEQ ID NO: 603956 - RNA, 19 nt, Homo sapiens
  misc_RNA (1)...(19): siRNA sense strand
caucucucaugcucccauu

SEQ ID NO: 603957 - RNA, 19 nt, Homo sapiens
  misc_RNA (1)...(19): siRNA sense strand
ggucucauuggacugauug

SEQ ID NO: 603958 - RNA, 19 nt, Homo sapiens
  misc_RNA (1)...(19): siRNA sense strand
gggacacccaggccaaaga

SEQ ID NO: 603959 - RNA, 19 nt, Homo sapiens
  misc_RNA (1)...(19): siRNA sense strand
ggucugaagggucauaagg

SEQ ID NO: 603960 - RNA, 19 nt, Homo sapiens
  misc_RNA (1)...(19): siRNA sense strand
gggccacccaggucucauu

SEQ ID NO: 603961 - RNA, 19 nt, Homo sapiens
  misc_RNA (1)...(19): siRNA sense strand
aaagaggagaaguggguuu

SEQ ID NO: 603962 - RNA, 19 nt, Homo sapiens
  misc_RNA (1)...(19): siRNA sense strand
ggacacccaggccaaagag

SEQ ID NO: 603963 - RNA, 19 nt, Homo sapiens
  misc_RNA (1)...(19): siRNA sense strand
uggcuuuccuggguucaaa

SEQ ID NO: 603964 - RNA, 19 nt, Homo sapiens
  misc_RNA (1)...(19): siRNA sense strand
gcaguguuggaaccuggua

SEQ ID NO: 603965 - RNA, 19 nt, Homo sapiens
  misc_RNA (1)...(19): siRNA sense strand
gccccuaugucaaagaauu

SEQ ID NO: 603966 - RNA, 19 nt, Homo sapiens
  misc_RNA (1)...(19): siRNA sense strand
ccaggucucauuggacuga

SEQ ID NO: 603967 - RNA, 19 nt, Homo sapiens
  misc_RNA (1)...(19): siRNA sense strand
ucugucacccucauuguug

SEQ ID NO: 603968 - RNA, 19 nt, Homo sapiens
  misc_RNA (1)...(19): siRNA sense strand
gaacgaggugcagcaggau

SEQ ID NO: 603969 - RNA, 19 nt, Homo sapiens
  misc_RNA (1)...(19): siRNA sense strand
gcugguggaccugguuuga

SEQ ID NO: 603970 - RNA, 19 nt, Homo sapiens
  misc_RNA (1)...(19): siRNA sense strand
ugggaagucuggagcuaag

SEQ ID NO: 603971 - RNA, 19 nt, Homo sapiens
  misc_RNA (1)...(19): siRNA sense strand
ggaccucagggaccucuag

SEQ ID NO: 603972 - RNA, 19 nt, Homo sapiens
  misc_RNA (1)...(19): siRNA sense strand
ugaccgagguuuugaugga

SEQ ID NO: 603973 - RNA, 19 nt, Homo sapiens
  misc_RNA (1)...(19): siRNA sense strand
gaagggugaccgagguuuu

SEQ ID NO: 603974 - RNA, 19 nt, Homo sapiens
  misc_RNA (1)...(19): siRNA sense strand
gaccuguccgcuuccugua

SEQ ID NO: 603975 - RNA, 19 nt, Homo sapiens
  misc_RNA (1)...(19): siRNA sense strand
uagagucgcuguugaagaa

SEQ ID NO: 603976 - RNA, 19 nt, Homo sapiens
  misc_RNA (1)...(19): siRNA sense strand
gcaagaagaagaaguacaa

SEQ ID NO: 603977 - RNA, 19 nt, Homo sapiens
  misc_RNA (1)...(19): siRNA sense strand
gcagacggacgaagagauu

SEQ ID NO: 603978 - RNA, 19 nt, Homo sapiens
  misc_RNA (1)...(19): siRNA sense strand
ggaugaaucugaggacaca

SEQ ID NO: 603979 - RNA, 19 nt, Homo sapiens
  misc_RNA (1)...(19): siRNA sense strand
gcagcaguuugacuucuug

SEQ ID NO: 603980 - RNA, 19 nt, Homo sapiens
  misc_RNA (1)...(19): siRNA sense strand
cgagcaagaagaagaagua

SEQ ID NO: 603981 - RNA, 19 nt, Homo sapiens
  misc_RNA (1)...(19): siRNA sense strand
gaagaggacgaagaagauu

SEQ ID NO: 603982 - RNA, 19 nt, Homo sapiens
  misc_RNA (1)...(19): siRNA sense strand
cgaagaccaugaccacauc

SEQ ID NO: 603983 - RNA, 19 nt, Homo sapiens
  misc_RNA (1)...(19): siRNA sense strand
ggaagacaaccacauggau

SEQ ID NO: 603984 - RNA, 19 nt, Homo sapiens
  misc_RNA (1)...(19): siRNA sense strand
gggaagaggagacaucaca

SEQ ID NO: 603985 - RNA, 19 nt, Homo sapiens
  misc_RNA (1)...(19): siRNA sense strand
ugaagaggacgaagaagau

SEQ ID NO: 603986 - RNA, 19 nt, Homo sapiens
  misc_RNA (1)...(19): siRNA sense strand
ggaagaggagacaucacaa

SEQ ID NO: 603987 - RNA, 19 nt, Homo sapiens
  misc_RNA (1)...(19): siRNA sense strand
gagcagcaguuugacuucu

SEQ ID NO: 603988 - RNA, 19 nt, Homo sapiens
  misc_RNA (1)...(19): siRNA sense strand
gaccacaucccaccugaag

SEQ ID NO: 603989 - RNA, 19 nt, Homo sapiens
  misc_RNA (1)...(19): siRNA sense strand
aagaggacgaagaagauua

SEQ ID NO: 603990 - RNA, 19 nt, Homo sapiens
  misc_RNA (1)...(19): siRNA sense strand
gcgaagaccaugaccacau

SEQ ID NO: 603991 - RNA, 19 nt, Homo sapiens
  misc_RNA (1)...(19): siRNA sense strand
gaagaggagacaucacaac

SEQ ID NO: 603992 - RNA, 19 nt, Homo sapiens
  misc_RNA (1)...(19): siRNA sense strand
gggaagacaaccacaugga

SEQ ID NO: 603993 - RNA, 19 nt, Homo sapiens
  misc_RNA (1)...(19): siRNA sense strand
ccacaucccaccugaagca

SEQ ID NO: 603994 - RNA, 19 nt, Homo sapiens
  misc_RNA (1)...(19): siRNA sense strand
ugaugaagaggacgaagaa

SEQ ID NO: 603995 - RNA, 19 nt, Homo sapiens
  misc_RNA (1)...(19): siRNA sense strand
ggcggugccugucaucauc

SEQ ID NO: 603996 - RNA, 19 nt, Homo sapiens
  misc_RNA (1)...(19): siRNA sense strand
gaacgaaaagcaaggacaa

SEQ ID NO: 603997 - RNA, 19 nt, Homo sapiens
  misc_RNA (1)...(19): siRNA sense strand
acucggagcaggaggauga

SEQ ID NO: 603998 - RNA, 19 nt, Homo sapiens
  misc_RNA (1)...(19): siRNA sense strand
acgaagagauugggaaggu

SEQ ID NO: 603999 - RNA, 19 nt, Homo sapiens
  misc_RNA (1)...(19): siRNA sense strand
ggagcaggaggaugaaucu

SEQ ID NO: 604000 - RNA, 19 nt, Homo sapiens
  misc_RNA (1)...(19): siRNA sense strand
gaggacacagauacugaug

SEQ ID NO: 604001 - RNA, 19 nt, Homo sapiens
  misc_RNA (1)...(19): siRNA sense strand
aagaagauuacgacuccua

SEQ ID NO: 604002 - RNA, 19 nt, Homo sapiens
  misc_RNA (1)...(19): siRNA sense strand
ggagcagcaguuugacuuc

SEQ ID NO: 604003 - RNA, 19 nt, Homo sapiens
  misc_RNA (1)...(19): siRNA sense strand
gaaaagcaaggacaagaag

SEQ ID NO: 604004 - RNA, 19 nt, Homo sapiens
  misc_RNA (1)...(19): siRNA sense strand
ggaccugguggcaucuguu

SEQ ID NO: 604005 - RNA, 19 nt, Homo sapiens
  misc_RNA (1)...(19): siRNA sense strand
gaacagaaguuucacaaug

SEQ ID NO: 604006 - RNA, 19 nt, Homo sapiens
  misc_RNA (1)...(19): siRNA sense strand
gaagcaggcaucaagauua

SEQ ID NO: 604007 - RNA, 19 nt, Homo sapiens
  misc_RNA (1)...(19): siRNA sense strand
caacauaacgucucugauu

SEQ ID NO: 604008 - RNA, 19 nt, Homo sapiens
  misc_RNA (1)...(19): siRNA sense strand
gaaccugucucuccucgaa

SEQ ID NO: 604009 - RNA, 19 nt, Homo sapiens
  misc_RNA (1)...(19): siRNA sense strand
gacaauugcuuccugcuuu

SEQ ID NO: 604010 - RNA, 19 nt, Homo sapiens
  misc_RNA (1)...(19): siRNA sense strand
uaacgucucugauuucuca

SEQ ID NO: 604011 - RNA, 19 nt, Homo sapiens
  misc_RNA (1)...(19): siRNA sense strand
gccaauaccucccuuacuu

SEQ ID NO: 604012 - RNA, 19 nt, Homo sapiens
  misc_RNA (1)...(19): siRNA sense strand
gcacuuaaguauucaucga

SEQ ID NO: 604013 - RNA, 19 nt, Homo sapiens
  misc_RNA (1)...(19): siRNA sense strand
ggacccaaaucuucuuaga

SEQ ID NO: 604014 - RNA, 19 nt, Homo sapiens
  misc_RNA (1)...(19): siRNA sense strand
gaaagagaacagagacaaa

SEQ ID NO: 604015 - RNA, 19 nt, Homo sapiens
  misc_RNA (1)...(19): siRNA sense strand
caaacaagauggcagucaa

SEQ ID NO: 604016 - RNA, 19 nt, Homo sapiens
  misc_RNA (1)...(19): siRNA sense strand
ccacagugcucuucauagu

SEQ ID NO: 604017 - RNA, 19 nt, Homo sapiens
  misc_RNA (1)...(19): siRNA sense strand
gaucaguacuccuccuguu

SEQ ID NO: 604018 - RNA, 19 nt, Homo sapiens
  misc_RNA (1)...(19): siRNA sense strand
ucacugcagucuauaauuc

SEQ ID NO: 604019 - RNA, 19 nt, Homo sapiens
  misc_RNA (1)...(19): siRNA sense strand
gcucagcucucuacacaag

SEQ ID NO: 604020 - RNA, 19 nt, Homo sapiens
  misc_RNA (1)...(19): siRNA sense strand
cgaagaagcgcauaacaug

SEQ ID NO: 604021 - RNA, 19 nt, Homo sapiens
  misc_RNA (1)...(19): siRNA sense strand
uaacacagucccuaucaaa

SEQ ID NO: 604022 - RNA, 19 nt, Homo sapiens
  misc_RNA (1)...(19): siRNA sense strand
agaauaagcacaccucaaa

SEQ ID NO: 604023 - RNA, 19 nt, Homo sapiens
  misc_RNA (1)...(19): siRNA sense strand
aagaguggcuugaaagaga

SEQ ID NO: 604024 - RNA, 19 nt, Homo sapiens
  misc_RNA (1)...(19): siRNA sense strand
aacauaacgucucugauuu

SEQ ID NO: 604025 - RNA, 19 nt, Homo sapiens
  misc_RNA (1)...(19): siRNA sense strand
ugacuggucugagcauauu

SEQ ID NO: 604026 - RNA, 19 nt, Homo sapiens
  misc_RNA (1)...(19): siRNA sense strand
ggagauccuucaccaccaa

SEQ ID NO: 604027 - RNA, 19 nt, Homo sapiens
  misc_RNA (1)...(19): siRNA sense strand
gacaaacccguaucacauu

SEQ ID NO: 604028 - RNA, 19 nt, Homo sapiens
  misc_RNA (1)...(19): siRNA sense strand
uaagcacaccucaaacuaa

SEQ ID NO: 604029 - RNA, 19 nt, Homo sapiens
  misc_RNA (1)...(19): siRNA sense strand
gagcaaaggauacuauuuu

SEQ ID NO: 604030 - RNA, 19 nt, Homo sapiens
  misc_RNA (1)...(19): siRNA sense strand
ucacauguccgaaauuugu

SEQ ID NO: 604031 - RNA, 19 nt, Homo sapiens
  misc_RNA (1)...(19): siRNA sense strand
gcgcauaacaugggaacua

SEQ ID NO: 604032 - RNA, 19 nt, Homo sapiens
  misc_RNA (1)...(19): siRNA sense strand
caguuacucuccacaagaa

SEQ ID NO: 604033 - RNA, 19 nt, Homo sapiens
  misc_RNA (1)...(19): siRNA sense strand
gacaacaaauuaaggaacu

SEQ ID NO: 604034 - RNA, 19 nt, Homo sapiens
  misc_RNA (1)...(19): siRNA sense strand
ccaaucauacuucuaauag

SEQ ID NO: 604035 - RNA, 19 nt, Homo sapiens
  misc_RNA (1)...(19): siRNA sense strand
agauagggauuacagaaga

SEQ ID NO: 604036 - RNA, 19 nt, Homo sapiens
  misc_RNA (1)...(19): siRNA sense strand
acagugcucuucauaguuc

SEQ ID NO: 604037 - RNA, 19 nt, Homo sapiens
  misc_RNA (1)...(19): siRNA sense strand
gaaaacaaauacagugaca

SEQ ID NO: 604038 - RNA, 19 nt, Homo sapiens
  misc_RNA (1)...(19): siRNA sense strand
cuacaauugucgaacagaa

SEQ ID NO: 604039 - RNA, 19 nt, Homo sapiens
  misc_RNA (1)...(19): siRNA sense strand
aaacuucagaugcaccuua

SEQ ID NO: 604040 - RNA, 19 nt, Homo sapiens
  misc_RNA (1)...(19): siRNA sense strand
uauuagcucuucugggaaa

SEQ ID NO: 604041 - RNA, 19 nt, Homo sapiens
  misc_RNA (1)...(19): siRNA sense strand
gauccuucaccaccaaaua

SEQ ID NO: 604042 - RNA, 19 nt, Homo sapiens
  misc_RNA (1)...(19): siRNA sense strand
ggugaucacagacaugaaa

SEQ ID NO: 604043 - RNA, 19 nt, Homo sapiens
  misc_RNA (1)...(19): siRNA sense strand
ccacgcugcagcuuaauaa

SEQ ID NO: 604044 - RNA, 19 nt, Homo sapiens
  misc_RNA (1)...(19): siRNA sense strand
gaugacuggucugagcaua

SEQ ID NO: 604045 - RNA, 19 nt, Homo sapiens
  misc_RNA (1)...(19): siRNA sense strand
gagacaaacccguaucaca

SEQ ID NO: 604046 - RNA, 19 nt, Homo sapiens
  misc_RNA (1)...(19): siRNA sense strand
ccaaaagaguggcuugaaa

SEQ ID NO: 604047 - RNA, 19 nt, Homo sapiens
  misc_RNA (1)...(19): siRNA sense strand
cgauccacguguucauuaa

SEQ ID NO: 604048 - RNA, 19 nt, Homo sapiens
  misc_RNA (1)...(19): siRNA sense strand
cagcacaggucacaguaag

SEQ ID NO: 604049 - RNA, 19 nt, Homo sapiens
  misc_RNA (1)...(19): siRNA sense strand
ucaaguagccagagaaguc

SEQ ID NO: 604050 - RNA, 19 nt, Homo sapiens
  misc_RNA (1)...(19): siRNA sense strand
ucacagacaugaaaagaug

SEQ ID NO: 604051 - RNA, 19 nt, Homo sapiens
  misc_RNA (1)...(19): siRNA sense strand
aaagauagggauuacagaa

SEQ ID NO: 604052 - RNA, 19 nt, Homo sapiens
  misc_RNA (1)...(19): siRNA sense strand
caguagcggugaucacaga

SEQ ID NO: 604053 - RNA, 19 nt, Homo sapiens
  misc_RNA (1)...(19): siRNA sense strand
cuacuacaauugucgaaca

SEQ ID NO: 604054 - RNA, 19 nt, Homo sapiens
  misc_RNA (1)...(19): siRNA sense strand
ucagaugcaccuuaugauu

SEQ ID NO: 604055 - RNA, 19 nt, Homo sapiens
  misc_RNA (1)...(19): siRNA sense strand
acccaaaucuucuuagaca

SEQ ID NO: 604056 - RNA, 19 nt, Homo sapiens
  misc_RNA (1)...(19): siRNA sense strand
cagaugcaccuuaugauuc

SEQ ID NO: 604057 - RNA, 19 nt, Homo sapiens
  misc_RNA (1)...(19): siRNA sense strand
gcgaagaagcgcauaacau

SEQ ID NO: 604058 - RNA, 19 nt, Homo sapiens
  misc_RNA (1)...(19): siRNA sense strand
ccaaaucuucuuagacaau

SEQ ID NO: 604059 - RNA, 19 nt, Homo sapiens
  misc_RNA (1)...(19): siRNA sense strand
ucacauucuucuaauccaa

SEQ ID NO: 604060 - RNA, 19 nt, Homo sapiens
  misc_RNA (1)...(19): siRNA sense strand
gagagcaaaggauacuauu

SEQ ID NO: 604061 - RNA, 19 nt, Homo sapiens
  misc_RNA (1)...(19): siRNA sense strand
cauaacaugggaacuauuc

SEQ ID NO: 604062 - RNA, 19 nt, Homo sapiens
  misc_RNA (1)...(19): siRNA sense strand
ucuaaucagucuccgaugu

SEQ ID NO: 604063 - RNA, 19 nt, Homo sapiens
  misc_RNA (1)...(19): siRNA sense strand
ccaucugcuuucaacauaa

SEQ ID NO: 604064 - RNA, 19 nt, Homo sapiens
  misc_RNA (1)...(19): siRNA sense strand
cgcugcagcuuaauaauuc

SEQ ID NO: 604065 - RNA, 19 nt, Homo sapiens
  misc_RNA (1)...(19): siRNA sense strand
agacaaacccguaucacau

SEQ ID NO: 604066 - RNA, 19 nt, Homo sapiens
  misc_RNA (1)...(19): siRNA sense strand
cacaagcccagccaucuaa

SEQ ID NO: 604067 - RNA, 19 nt, Homo sapiens
  misc_RNA (1)...(19): siRNA sense strand
gagaagcaggcaucaagau

SEQ ID NO: 604068 - RNA, 19 nt, Homo sapiens
  misc_RNA (1)...(19): siRNA sense strand
gcgcucaaguagccagaga

SEQ ID NO: 604069 - RNA, 19 nt, Homo sapiens
  misc_RNA (1)...(19): siRNA sense strand
gcccagccaucuaaucagu

SEQ ID NO: 604070 - RNA, 19 nt, Homo sapiens
  misc_RNA (1)...(19): siRNA sense strand
gcucuucauaguucaaauu

SEQ ID NO: 604071 - RNA, 19 nt, Homo sapiens
  misc_RNA (1)...(19): siRNA sense strand
caacaaauuaaggaacuug

SEQ ID NO: 604072 - RNA, 19 nt, Homo sapiens
  misc_RNA (1)...(19): siRNA sense strand
ucaccuggucccaaucaua

SEQ ID NO: 604073 - RNA, 19 nt, Homo sapiens
  misc_RNA (1)...(19): siRNA sense strand
aagccucacugcagucuau

SEQ ID NO: 604074 - RNA, 19 nt, Homo sapiens
  misc_RNA (1)...(19): siRNA sense strand
acaauugcuuccugcuuug

SEQ ID NO: 604075 - RNA, 19 nt, Homo sapiens
  misc_RNA (1)...(19): siRNA sense strand
caaccacagugcucuucau

SEQ ID NO: 604076 - RNA, 19 nt, Homo sapiens
  misc_RNA (1)...(19): siRNA sense strand
auucacauguccgaaauuu

SEQ ID NO: 604077 - RNA, 19 nt, Homo sapiens
  misc_RNA (1)...(19): siRNA sense strand
ccgauccacguguucauua

SEQ ID NO: 604078 - RNA, 19 nt, Homo sapiens
  misc_RNA (1)...(19): siRNA sense strand
cugcucagcucucuacaca

SEQ ID NO: 604079 - RNA, 19 nt, Homo sapiens
  misc_RNA (1)...(19): siRNA sense strand
accaucugcuuucaacaua

SEQ ID NO: 604080 - RNA, 19 nt, Homo sapiens
  misc_RNA (1)...(19): siRNA sense strand
gcaaacaagauggcaguca

SEQ ID NO: 604081 - RNA, 19 nt, Homo sapiens
  misc_RNA (1)...(19): siRNA sense strand
aacagaaguuucacaaugg

SEQ ID NO: 604082 - RNA, 19 nt, Homo sapiens
  misc_RNA (1)...(19): siRNA sense strand
gauagggauuacagaagag

SEQ ID NO: 604083 - RNA, 19 nt, Homo sapiens
  misc_RNA (1)...(19): siRNA sense strand
cagagaagcaggcaucaag

SEQ ID NO: 604084 - RNA, 19 nt, Homo sapiens
  misc_RNA (1)...(19): siRNA sense strand
gucccaaucauacuucuaa

SEQ ID NO: 604085 - RNA, 19 nt, Homo sapiens
  misc_RNA (1)...(19): siRNA sense strand
caucacagccaaagguuag

SEQ ID NO: 604086 - RNA, 19 nt, Homo sapiens
  misc_RNA (1)...(19): siRNA sense strand
guacuccuccuguuucauc

SEQ ID NO: 604087 - RNA, 19 nt, Homo sapiens
  misc_RNA (1)...(19): siRNA sense strand
aaacuaacacagucccuau

SEQ ID NO: 604088 - RNA, 19 nt, Homo sapiens
  misc_RNA (1)...(19): siRNA sense strand
accaggcacuuaaguauuc

SEQ ID NO: 604089 - RNA, 19 nt, Homo sapiens
  misc_RNA (1)...(19): siRNA sense strand
gagaucugauaguccugaa

SEQ ID NO: 604090 - RNA, 19 nt, Homo sapiens
  misc_RNA (1)...(19): siRNA sense strand
cuucuaauccaagcaauaa

SEQ ID NO: 604091 - RNA, 19 nt, Homo sapiens
  misc_RNA (1)...(19): siRNA sense strand
cgagagcaaaggauacuau

SEQ ID NO: 604092 - RNA, 19 nt, Homo sapiens
  misc_RNA (1)...(19): siRNA sense strand
cauaacgucucugauuucu

SEQ ID NO: 604093 - RNA, 19 nt, Homo sapiens
  misc_RNA (1)...(19): siRNA sense strand
acaaacccguaucacauuc

SEQ ID NO: 604094 - RNA, 19 nt, Homo sapiens
  misc_RNA (1)...(19): siRNA sense strand
gcaagcaacagccacuagu

SEQ ID NO: 604095 - RNA, 19 nt, Homo sapiens
  misc_RNA (1)...(19): siRNA sense strand
ugaaagagaacagagacaa

SEQ ID NO: 604096 - RNA, 19 nt, Homo sapiens
  misc_RNA (1)...(19): siRNA sense strand
cuucagaugcaccuuauga

SEQ ID NO: 604097 - RNA, 19 nt, Homo sapiens
  misc_RNA (1)...(19): siRNA sense strand
uaaggaacuugaaaagcua

SEQ ID NO: 604098 - RNA, 19 nt, Homo sapiens
  misc_RNA (1)...(19): siRNA sense strand
gagacaacaaauuaaggaa

SEQ ID NO: 604099 - RNA, 19 nt, Homo sapiens
  misc_RNA (1)...(19): siRNA sense strand
guccgaaauuuguacugaa

SEQ ID NO: 604100 - RNA, 19 nt, Homo sapiens
  misc_RNA (1)...(19): siRNA sense strand
aagcaggcaucaagauuac

SEQ ID NO: 604101 - RNA, 19 nt, Homo sapiens
  misc_RNA (1)...(19): siRNA sense strand
gcacuagcagcacacuuca

SEQ ID NO: 604102 - RNA, 19 nt, Homo sapiens
  misc_RNA (1)...(19): siRNA sense strand
gccuguaacugcugacaag

SEQ ID NO: 604103 - RNA, 19 nt, Homo sapiens
  misc_RNA (1)...(19): siRNA sense strand
acacaagcccagccaucua

SEQ ID NO: 604104 - RNA, 19 nt, Homo sapiens
  misc_RNA (1)...(19): siRNA sense strand
aaaucagaauuccuucaug

SEQ ID NO: 604105 - RNA, 19 nt, Homo sapiens
  misc_RNA (1)...(19): siRNA sense strand
gaacagaaguuucacaaug

SEQ ID NO: 604106 - RNA, 19 nt, Homo sapiens
  misc_RNA (1)...(19): siRNA sense strand
gaagcaggcaucaagauua

SEQ ID NO: 604107 - RNA, 19 nt, Homo sapiens
  misc_RNA (1)...(19): siRNA sense strand
caacauaacgucucugauu

SEQ ID NO: 604108 - RNA, 19 nt, Homo sapiens
  misc_RNA (1)...(19): siRNA sense strand
gaaccugucucuccucgaa

SEQ ID NO: 604109 - RNA, 19 nt, Homo sapiens
  misc_RNA (1)...(19): siRNA sense strand
gacaauugcuuccugcuuu

SEQ ID NO: 604110 - RNA, 19 nt, Homo sapiens
  misc_RNA (1)...(19): siRNA sense strand
uaacgucucugauuucuca

SEQ ID NO: 604111 - RNA, 19 nt, Homo sapiens
  misc_RNA (1)...(19): siRNA sense strand
gccaauaccucccuuacuu

SEQ ID NO: 604112 - RNA, 19 nt, Homo sapiens
  misc_RNA (1)...(19): siRNA sense strand
ggacccaaaucuucuuaga

SEQ ID NO: 604113 - RNA, 19 nt, Homo sapiens
  misc_RNA (1)...(19): siRNA sense strand
gaaagagaacagagacaaa

SEQ ID NO: 604114 - RNA, 19 nt, Homo sapiens
  misc_RNA (1)...(19): siRNA sense strand
caaacaagauggcagucaa

SEQ ID NO: 604115 - RNA, 19 nt, Homo sapiens
  misc_RNA (1)...(19): siRNA sense strand
ccacagugcucuucauagu

SEQ ID NO: 604116 - RNA, 19 nt, Homo sapiens
  misc_RNA (1)...(19): siRNA sense strand
gaucaguacuccuccuguu

SEQ ID NO: 604117 - RNA, 19 nt, Homo sapiens
  misc_RNA (1)...(19): siRNA sense strand
ucacugcagucuauaauuc

SEQ ID NO: 604118 - RNA, 19 nt, Homo sapiens
  misc_RNA (1)...(19): siRNA sense strand
gcucagcucucuacacaag

SEQ ID NO: 604119 - RNA, 19 nt, Homo sapiens
  misc_RNA (1)...(19): siRNA sense strand
cgaagaagcgcauaacaug

SEQ ID NO: 604120 - RNA, 19 nt, Homo sapiens
  misc_RNA (1)...(19): siRNA sense strand
uaacacagucccuaucaaa

SEQ ID NO: 604121 - RNA, 19 nt, Homo sapiens
  misc_RNA (1)...(19): siRNA sense strand
agaauaagcacaccucaaa

SEQ ID NO: 604122 - RNA, 19 nt, Homo sapiens
  misc_RNA (1)...(19): siRNA sense strand
aagaguggcuugaaagaga

SEQ ID NO: 604123 - RNA, 19 nt, Homo sapiens
  misc_RNA (1)...(19): siRNA sense strand
aacauaacgucucugauuu

SEQ ID NO: 604124 - RNA, 19 nt, Homo sapiens
  misc_RNA (1)...(19): siRNA sense strand
ugacuggucugagcauauu

SEQ ID NO: 604125 - RNA, 19 nt, Homo sapiens
  misc_RNA (1)...(19): siRNA sense strand
ggagauccuucaccaccaa

SEQ ID NO: 604126 - RNA, 19 nt, Homo sapiens
  misc_RNA (1)...(19): siRNA sense strand
gacaaacccguaucacauu

SEQ ID NO: 604127 - RNA, 19 nt, Homo sapiens
  misc_RNA (1)...(19): siRNA sense strand
uaagcacaccucaaacuaa

SEQ ID NO: 604128 - RNA, 19 nt, Homo sapiens
  misc_RNA (1)...(19): siRNA sense strand
gagcaaaggauacuauuuu

SEQ ID NO: 604129 - RNA, 19 nt, Homo sapiens
  misc_RNA (1)...(19): siRNA sense strand
ucacauguccgaaauuugu

SEQ ID NO: 604130 - RNA, 19 nt, Homo sapiens
  misc_RNA (1)...(19): siRNA sense strand
gcgcauaacaugggaacua

SEQ ID NO: 604131 - RNA, 19 nt, Homo sapiens
  misc_RNA (1)...(19): siRNA sense strand
caguuacucuccacaagaa

SEQ ID NO: 604132 - RNA, 19 nt, Homo sapiens
  misc_RNA (1)...(19): siRNA sense strand
gacaacaaauuaaggaacu

SEQ ID NO: 604133 - RNA, 19 nt, Homo sapiens
  misc_RNA (1)...(19): siRNA sense strand
ccaaucauacuucuaauag

SEQ ID NO: 604134 - RNA, 19 nt, Homo sapiens
  misc_RNA (1)...(19): siRNA sense strand
agauagggauuacagaaga

SEQ ID NO: 604135 - RNA, 19 nt, Homo sapiens
  misc_RNA (1)...(19): siRNA sense strand
acagugcucuucauaguuc

SEQ ID NO: 604136 - RNA, 19 nt, Homo sapiens
  misc_RNA (1)...(19): siRNA sense strand
gaaaacaaauacagugaca

SEQ ID NO: 604137 - RNA, 19 nt, Homo sapiens
  misc_RNA (1)...(19): siRNA sense strand
cuacaauugucgaacagaa

SEQ ID NO: 604138 - RNA, 19 nt, Homo sapiens
  misc_RNA (1)...(19): siRNA sense strand
aaacuucagaugcaccuua

SEQ ID NO: 604139 - RNA, 19 nt, Homo sapiens
  misc_RNA (1)...(19): siRNA sense strand
uauuagcucuucugggaaa

SEQ ID NO: 604140 - RNA, 19 nt, Homo sapiens
  misc_RNA (1)...(19): siRNA sense strand
gauccuucaccaccaaaua

SEQ ID NO: 604141 - RNA, 19 nt, Homo sapiens
  misc_RNA (1)...(19): siRNA sense strand
ccacgcugcagcuuaauaa

SEQ ID NO: 604142 - RNA, 19 nt, Homo sapiens
  misc_RNA (1)...(19): siRNA sense strand
gaugacuggucugagcaua

SEQ ID NO: 604143 - RNA, 19 nt, Homo sapiens
  misc_RNA (1)...(19): siRNA sense strand
gagacaaacccguaucaca

SEQ ID NO: 604144 - RNA, 19 nt, Homo sapiens
  misc_RNA (1)...(19): siRNA sense strand
ccaaaagaguggcuugaaa

SEQ ID NO: 604145 - RNA, 19 nt, Homo sapiens
  misc_RNA (1)...(19): siRNA sense strand
cgauccacguguucauuaa

SEQ ID NO: 604146 - RNA, 19 nt, Homo sapiens
  misc_RNA (1)...(19): siRNA sense strand
cuacuacaauugucgaaca

SEQ ID NO: 604147 - RNA, 19 nt, Homo sapiens
  misc_RNA (1)...(19): siRNA sense strand
ucaaguagccagagaaguc

SEQ ID NO: 604148 - RNA, 19 nt, Homo sapiens
  misc_RNA (1)...(19): siRNA sense strand
cagcacaggucacaguaag

SEQ ID NO: 604149 - RNA, 19 nt, Homo sapiens
  misc_RNA (1)...(19): siRNA sense strand
aaagauagggauuacagaa

SEQ ID NO: 604150 - RNA, 19 nt, Homo sapiens
  misc_RNA (1)...(19): siRNA sense strand
ucagaugcaccuuaugauu

SEQ ID NO: 604151 - RNA, 19 nt, Homo sapiens
  misc_RNA (1)...(19): siRNA sense strand
acccaaaucuucuuagaca

SEQ ID NO: 604152 - RNA, 19 nt, Homo sapiens
  misc_RNA (1)...(19): siRNA sense strand
cagaugcaccuuaugauuc

SEQ ID NO: 604153 - RNA, 19 nt, Homo sapiens
  misc_RNA (1)...(19): siRNA sense strand
gcgaagaagcgcauaacau

SEQ ID NO: 604154 - RNA, 19 nt, Homo sapiens
  misc_RNA (1)...(19): siRNA sense strand
ccaaaucuucuuagacaau

SEQ ID NO: 604155 - RNA, 19 nt, Homo sapiens
  misc_RNA (1)...(19): siRNA sense strand
ucacauucuucuaauccaa

SEQ ID NO: 604156 - RNA, 19 nt, Homo sapiens
  misc_RNA (1)...(19): siRNA sense strand
gagagcaaaggauacuauu

SEQ ID NO: 604157 - RNA, 19 nt, Homo sapiens
  misc_RNA (1)...(19): siRNA sense strand
cauaacaugggaacuauuc

SEQ ID NO: 604158 - RNA, 19 nt, Homo sapiens
  misc_RNA (1)...(19): siRNA sense strand
ucuaaucagucuccgaugu

SEQ ID NO: 604159 - RNA, 19 nt, Homo sapiens
  misc_RNA (1)...(19): siRNA sense strand
ccaucugcuuucaacauaa

SEQ ID NO: 604160 - RNA, 19 nt, Homo sapiens
  misc_RNA (1)...(19): siRNA sense strand
cgcugcagcuuaauaauuc

SEQ ID NO: 604161 - RNA, 19 nt, Homo sapiens
  misc_RNA (1)...(19): siRNA sense strand
agacaaacccguaucacau

SEQ ID NO: 604162 - RNA, 19 nt, Homo sapiens
  misc_RNA (1)...(19): siRNA sense strand
cacaagcccagccaucuaa

SEQ ID NO: 604163 - RNA, 19 nt, Homo sapiens
  misc_RNA (1)...(19): siRNA sense strand
gagaagcaggcaucaagau

SEQ ID NO: 604164 - RNA, 19 nt, Homo sapiens
  misc_RNA (1)...(19): siRNA sense strand
gcgcucaaguagccagaga

SEQ ID NO: 604165 - RNA, 19 nt, Homo sapiens
  misc_RNA (1)...(19): siRNA sense strand
gcccagccaucuaaucagu

SEQ ID NO: 604166 - RNA, 19 nt, Homo sapiens
  misc_RNA (1)...(19): siRNA sense strand
gcucuucauaguucaaauu

SEQ ID NO: 604167 - RNA, 19 nt, Homo sapiens
  misc_RNA (1)...(19): siRNA sense strand
caacaaauuaaggaacuug

SEQ ID NO: 604168 - RNA, 19 nt, Homo sapiens
  misc_RNA (1)...(19): siRNA sense strand
ucaccuggucccaaucaua

SEQ ID NO: 604169 - RNA, 19 nt, Homo sapiens
  misc_RNA (1)...(19): siRNA sense strand
aagccucacugcagucuau

SEQ ID NO: 604170 - RNA, 19 nt, Homo sapiens
  misc_RNA (1)...(19): siRNA sense strand
acaauugcuuccugcuuug

SEQ ID NO: 604171 - RNA, 19 nt, Homo sapiens
  misc_RNA (1)...(19): siRNA sense strand
aacagaaguuucacaaugg

SEQ ID NO: 604172 - RNA, 19 nt, Homo sapiens
  misc_RNA (1)...(19): siRNA sense strand
auucacauguccgaaauuu

SEQ ID NO: 604173 - RNA, 19 nt, Homo sapiens
  misc_RNA (1)...(19): siRNA sense strand
caaccacagugcucuucau

SEQ ID NO: 604174 - RNA, 19 nt, Homo sapiens
  misc_RNA (1)...(19): siRNA sense strand
ccgauccacguguucauua

SEQ ID NO: 604175 - RNA, 19 nt, Homo sapiens
  misc_RNA (1)...(19): siRNA sense strand
cugcucagcucucuacaca

SEQ ID NO: 604176 - RNA, 19 nt, Homo sapiens
  misc_RNA (1)...(19): siRNA sense strand
accaucugcuuucaacaua

SEQ ID NO: 604177 - RNA, 19 nt, Homo sapiens
  misc_RNA (1)...(19): siRNA sense strand
gcaaacaagauggcaguca

SEQ ID NO: 604178 - RNA, 19 nt, Homo sapiens
  misc_RNA (1)...(19): siRNA sense strand
gauagggauuacagaagag

SEQ ID NO: 604179 - RNA, 19 nt, Homo sapiens
  misc_RNA (1)...(19): siRNA sense strand
gagaucugauaguccugaa

SEQ ID NO: 604180 - RNA, 19 nt, Homo sapiens
  misc_RNA (1)...(19): siRNA sense strand
cagagaagcaggcaucaag

SEQ ID NO: 604181 - RNA, 19 nt, Homo sapiens
  misc_RNA (1)...(19): siRNA sense strand
gucccaaucauacuucuaa

SEQ ID NO: 604182 - RNA, 19 nt, Homo sapiens
  misc_RNA (1)...(19): siRNA sense strand
caucacagccaaagguuag

SEQ ID NO: 604183 - RNA, 19 nt, Homo sapiens
  misc_RNA (1)...(19): siRNA sense strand
guacuccuccuguuucauc

SEQ ID NO: 604184 - RNA, 19 nt, Homo sapiens
  misc_RNA (1)...(19): siRNA sense strand
aaacuaacacagucccuau

SEQ ID NO: 604185 - RNA, 19 nt, Homo sapiens
  misc_RNA (1)...(19): siRNA sense strand
cuucuaauccaagcaauaa

SEQ ID NO: 604186 - RNA, 19 nt, Homo sapiens
  misc_RNA (1)...(19): siRNA sense strand
cgagagcaaaggauacuau

SEQ ID NO: 604187 - RNA, 19 nt, Homo sapiens
  misc_RNA (1)...(19): siRNA sense strand
cauaacgucucugauuucu

SEQ ID NO: 604188 - RNA, 19 nt, Homo sapiens
  misc_RNA (1)...(19): siRNA sense strand
acaaacccguaucacauuc

SEQ ID NO: 604189 - RNA, 19 nt, Homo sapiens
  misc_RNA (1)...(19): siRNA sense strand
gcaagcaacagccacuagu

SEQ ID NO: 604190 - RNA, 19 nt, Homo sapiens
  misc_RNA (1)...(19): siRNA sense strand
ugaaagagaacagagacaa

SEQ ID NO: 604191 - RNA, 19 nt, Homo sapiens
  misc_RNA (1)...(19): siRNA sense strand
cuucagaugcaccuuauga

SEQ ID NO: 604192 - RNA, 19 nt, Homo sapiens
  misc_RNA (1)...(19): siRNA sense strand
uaaggaacuugaaaagcua

SEQ ID NO: 604193 - RNA, 19 nt, Homo sapiens
  misc_RNA (1)...(19): siRNA sense strand
gagacaacaaauuaaggaa

SEQ ID NO: 604194 - RNA, 19 nt, Homo sapiens
  misc_RNA (1)...(19): siRNA sense strand
guccgaaauuuguacugaa

SEQ ID NO: 604195 - RNA, 19 nt, Homo sapiens
  misc_RNA (1)...(19): siRNA sense strand
aagcaggcaucaagauuac

SEQ ID NO: 604196 - RNA, 19 nt, Homo sapiens
  misc_RNA (1)...(19): siRNA sense strand
gcacuagcagcacacuuca

SEQ ID NO: 604197 - RNA, 19 nt, Homo sapiens
  misc_RNA (1)...(19): siRNA sense strand
gccuguaacugcugacaag

SEQ ID NO: 604198 - RNA, 19 nt, Homo sapiens
  misc_RNA (1)...(19): siRNA sense strand
acacaagcccagccaucua

SEQ ID NO: 604199 - RNA, 19 nt, Homo sapiens
  misc_RNA (1)...(19): siRNA sense strand
gaccaucugcuuucaacau

SEQ ID NO: 604200 - RNA, 19 nt, Homo sapiens
  misc_RNA (1)...(19): siRNA sense strand
aaaucagaauuccuucaug

SEQ ID NO: 604201 - RNA, 19 nt, Homo sapiens
  misc_RNA (1)...(19): siRNA sense strand
ugagacaacaaauuaagga

SEQ ID NO: 604202 - RNA, 19 nt, Homo sapiens
  misc_RNA (1)...(19): siRNA sense strand
agaagcaggcaucaagauu

SEQ ID NO: 604203 - RNA, 19 nt, Homo sapiens
  misc_RNA (1)...(19): siRNA sense strand
gacagcacaggucacagua

SEQ ID NO: 604204 - RNA, 19 nt, Homo sapiens
  misc_RNA (1)...(19): siRNA sense strand
gaucuuuaguccgaguaug

SEQ ID NO: 604205 - RNA, 19 nt, Homo sapiens
  misc_RNA (1)...(19): siRNA sense strand
gaacagaaguuucacaaug

SEQ ID NO: 604206 - RNA, 19 nt, Homo sapiens
  misc_RNA (1)...(19): siRNA sense strand
gaagcaggcaucaagauua

SEQ ID NO: 604207 - RNA, 19 nt, Homo sapiens
  misc_RNA (1)...(19): siRNA sense strand
caacauaacgucucugauu

SEQ ID NO: 604208 - RNA, 19 nt, Homo sapiens
  misc_RNA (1)...(19): siRNA sense strand
gaaccugucucuccucgaa

SEQ ID NO: 604209 - RNA, 19 nt, Homo sapiens
  misc_RNA (1)...(19): siRNA sense strand
gacaauugcuuccugcuuu

SEQ ID NO: 604210 - RNA, 19 nt, Homo sapiens
  misc_RNA (1)...(19): siRNA sense strand
uaacgucucugauuucuca

SEQ ID NO: 604211 - RNA, 19 nt, Homo sapiens
  misc_RNA (1)...(19): siRNA sense strand
gccaauaccucccuuacuu

SEQ ID NO: 604212 - RNA, 19 nt, Homo sapiens
  misc_RNA (1)...(19): siRNA sense strand
gcacuuaaguauucaucga

SEQ ID NO: 604213 - RNA, 19 nt, Homo sapiens
  misc_RNA (1)...(19): siRNA sense strand
ggacccaaaucuucuuaga

SEQ ID NO: 604214 - RNA, 19 nt, Homo sapiens
  misc_RNA (1)...(19): siRNA sense strand
gaaagagaacagagacaaa

SEQ ID NO: 604215 - RNA, 19 nt, Homo sapiens
  misc_RNA (1)...(19): siRNA sense strand
caaacaagauggcagucaa

SEQ ID NO: 604216 - RNA, 19 nt, Homo sapiens
  misc_RNA (1)...(19): siRNA sense strand
ccacagugcucuucauagu

SEQ ID NO: 604217 - RNA, 19 nt, Homo sapiens
  misc_RNA (1)...(19): siRNA sense strand
gaucaguacuccuccuguu

SEQ ID NO: 604218 - RNA, 19 nt, Homo sapiens
  misc_RNA (1)...(19): siRNA sense strand
ucacugcagucuauaauuc

SEQ ID NO: 604219 - RNA, 19 nt, Homo sapiens
  misc_RNA (1)...(19): siRNA sense strand
gcucagcucucuacacaag

SEQ ID NO: 604220 - RNA, 19 nt, Homo sapiens
  misc_RNA (1)...(19): siRNA sense strand
cgaagaagcgcauaacaug

SEQ ID NO: 604221 - RNA, 19 nt, Homo sapiens
  misc_RNA (1)...(19): siRNA sense strand
uaacacagucccuaucaaa

SEQ ID NO: 604222 - RNA, 19 nt, Homo sapiens
  misc_RNA (1)...(19): siRNA sense strand
agaauaagcacaccucaaa

SEQ ID NO: 604223 - RNA, 19 nt, Homo sapiens
  misc_RNA (1)...(19): siRNA sense strand
aagaguggcuugaaagaga

SEQ ID NO: 604224 - RNA, 19 nt, Homo sapiens
  misc_RNA (1)...(19): siRNA sense strand
aacauaacgucucugauuu

SEQ ID NO: 604225 - RNA, 19 nt, Homo sapiens
  misc_RNA (1)...(19): siRNA sense strand
ugacuggucugagcauauu

SEQ ID NO: 604226 - RNA, 19 nt, Homo sapiens
  misc_RNA (1)...(19): siRNA sense strand
ggagauccuucaccaccaa

SEQ ID NO: 604227 - RNA, 19 nt, Homo sapiens
  misc_RNA (1)...(19): siRNA sense strand
gacaaacccguaucacauu

SEQ ID NO: 604228 - RNA, 19 nt, Homo sapiens
  misc_RNA (1)...(19): siRNA sense strand
uaagcacaccucaaacuaa

SEQ ID NO: 604229 - RNA, 19 nt, Homo sapiens
  misc_RNA (1)...(19): siRNA sense strand
gagcaaaggauacuauuuu

SEQ ID NO: 604230 - RNA, 19 nt, Homo sapiens
  misc_RNA (1)...(19): siRNA sense strand
ucacauguccgaaauuugu

SEQ ID NO: 604231 - RNA, 19 nt, Homo sapiens
  misc_RNA (1)...(19): siRNA sense strand
gcgcauaacaugggaacua

SEQ ID NO: 604232 - RNA, 19 nt, Homo sapiens
  misc_RNA (1)...(19): siRNA sense strand
caguuacucuccacaagaa

SEQ ID NO: 604233 - RNA, 19 nt, Homo sapiens
  misc_RNA (1)...(19): siRNA sense strand
gacaacaaauuaaggaacu

SEQ ID NO: 604234 - RNA, 19 nt, Homo sapiens
  misc_RNA (1)...(19): siRNA sense strand
ccaaucauacuucuaauag

SEQ ID NO: 604235 - RNA, 19 nt, Homo sapiens
  misc_RNA (1)...(19): siRNA sense strand
agauagggauuacagaaga

SEQ ID NO: 604236 - RNA, 19 nt, Homo sapiens
  misc_RNA (1)...(19): siRNA sense strand
acagugcucuucauaguuc

SEQ ID NO: 604237 - RNA, 19 nt, Homo sapiens
  misc_RNA (1)...(19): siRNA sense strand
gaaaacaaauacagugaca

SEQ ID NO: 604238 - RNA, 19 nt, Homo sapiens
  misc_RNA (1)...(19): siRNA sense strand
cuacaauugucgaacagaa

SEQ ID NO: 604239 - RNA, 19 nt, Homo sapiens
  misc_RNA (1)...(19): siRNA sense strand
aaacuucagaugcaccuua

SEQ ID NO: 604240 - RNA, 19 nt, Homo sapiens
  misc_RNA (1)...(19): siRNA sense strand
uauuagcucuucugggaaa

SEQ ID NO: 604241 - RNA, 19 nt, Homo sapiens
  misc_RNA (1)...(19): siRNA sense strand
gauccuucaccaccaaaua

SEQ ID NO: 604242 - RNA, 19 nt, Homo sapiens
  misc_RNA (1)...(19): siRNA sense strand
ggugaucacagacaugaaa

SEQ ID NO: 604243 - RNA, 19 nt, Homo sapiens
  misc_RNA (1)...(19): siRNA sense strand
ccacgcugcagcuuaauaa

SEQ ID NO: 604244 - RNA, 19 nt, Homo sapiens
  misc_RNA (1)...(19): siRNA sense strand
gaugacuggucugagcaua

SEQ ID NO: 604245 - RNA, 19 nt, Homo sapiens
  misc_RNA (1)...(19): siRNA sense strand
gagacaaacccguaucaca

SEQ ID NO: 604246 - RNA, 19 nt, Homo sapiens
  misc_RNA (1)...(19): siRNA sense strand
ccaaaagaguggcuugaaa

SEQ ID NO: 604247 - RNA, 19 nt, Homo sapiens
  misc_RNA (1)...(19): siRNA sense strand
cgauccacguguucauuaa

SEQ ID NO: 604248 - RNA, 19 nt, Homo sapiens
  misc_RNA (1)...(19): siRNA sense strand
cagcacaggucacaguaag

SEQ ID NO: 604249 - RNA, 19 nt, Homo sapiens
  misc_RNA (1)...(19): siRNA sense strand
ucaaguagccagagaaguc

SEQ ID NO: 604250 - RNA, 19 nt, Homo sapiens
  misc_RNA (1)...(19): siRNA sense strand
ucacagacaugaaaagaug

SEQ ID NO: 604251 - RNA, 19 nt, Homo sapiens
  misc_RNA (1)...(19): siRNA sense strand
aaagauagggauuacagaa

SEQ ID NO: 604252 - RNA, 19 nt, Homo sapiens
  misc_RNA (1)...(19): siRNA sense strand
caguagcggugaucacaga

SEQ ID NO: 604253 - RNA, 19 nt, Homo sapiens
  misc_RNA (1)...(19): siRNA sense strand
cuacuacaauugucgaaca

SEQ ID NO: 604254 - RNA, 19 nt, Homo sapiens
  misc_RNA (1)...(19): siRNA sense strand
ucagaugcaccuuaugauu

SEQ ID NO: 604255 - RNA, 19 nt, Homo sapiens
  misc_RNA (1)...(19): siRNA sense strand
acccaaaucuucuuagaca

SEQ ID NO: 604256 - RNA, 19 nt, Homo sapiens
  misc_RNA (1)...(19): siRNA sense strand
cagaugcaccuuaugauuc

SEQ ID NO: 604257 - RNA, 19 nt, Homo sapiens
  misc_RNA (1)...(19): siRNA sense strand
gcgaagaagcgcauaacau

SEQ ID NO: 604258 - RNA, 19 nt, Homo sapiens
  misc_RNA (1)...(19): siRNA sense strand
ccaaaucuucuuagacaau

SEQ ID NO: 604259 - RNA, 19 nt, Homo sapiens
  misc_RNA (1)...(19): siRNA sense strand
ucacauucuucuaauccaa

SEQ ID NO: 604260 - RNA, 19 nt, Homo sapiens
  misc_RNA (1)...(19): siRNA sense strand
gagagcaaaggauacuauu

SEQ ID NO: 604261 - RNA, 19 nt, Homo sapiens
  misc_RNA (1)...(19): siRNA sense strand
cauaacaugggaacuauuc

SEQ ID NO: 604262 - RNA, 19 nt, Homo sapiens
  misc_RNA (1)...(19): siRNA sense strand
ucuaaucagucuccgaugu

SEQ ID NO: 604263 - RNA, 19 nt, Homo sapiens
  misc_RNA (1)...(19): siRNA sense strand
ccaucugcuuucaacauaa

SEQ ID NO: 604264 - RNA, 19 nt, Homo sapiens
  misc_RNA (1)...(19): siRNA sense strand
cgcugcagcuuaauaauuc

SEQ ID NO: 604265 - RNA, 19 nt, Homo sapiens
  misc_RNA (1)...(19): siRNA sense strand
agacaaacccguaucacau

SEQ ID NO: 604266 - RNA, 19 nt, Homo sapiens
  misc_RNA (1)...(19): siRNA sense strand
cacaagcccagccaucuaa

SEQ ID NO: 604267 - RNA, 19 nt, Homo sapiens
  misc_RNA (1)...(19): siRNA sense strand
gagaagcaggcaucaagau

SEQ ID NO: 604268 - RNA, 19 nt, Homo sapiens
  misc_RNA (1)...(19): siRNA sense strand
gcgcucaaguagccagaga

SEQ ID NO: 604269 - RNA, 19 nt, Homo sapiens
  misc_RNA (1)...(19): siRNA sense strand
gcccagccaucuaaucagu

SEQ ID NO: 604270 - RNA, 19 nt, Homo sapiens
  misc_RNA (1)...(19): siRNA sense strand
gcucuucauaguucaaauu

SEQ ID NO: 604271 - RNA, 19 nt, Homo sapiens
  misc_RNA (1)...(19): siRNA sense strand
caacaaauuaaggaacuug

SEQ ID NO: 604272 - RNA, 19 nt, Homo sapiens
  misc_RNA (1)...(19): siRNA sense strand
ucaccuggucccaaucaua

SEQ ID NO: 604273 - RNA, 19 nt, Homo sapiens
  misc_RNA (1)...(19): siRNA sense strand
aagccucacugcagucuau

SEQ ID NO: 604274 - RNA, 19 nt, Homo sapiens
  misc_RNA (1)...(19): siRNA sense strand
acaauugcuuccugcuuug

SEQ ID NO: 604275 - RNA, 19 nt, Homo sapiens
  misc_RNA (1)...(19): siRNA sense strand
caaccacagugcucuucau

SEQ ID NO: 604276 - RNA, 19 nt, Homo sapiens
  misc_RNA (1)...(19): siRNA sense strand
auucacauguccgaaauuu

SEQ ID NO: 604277 - RNA, 19 nt, Homo sapiens
  misc_RNA (1)...(19): siRNA sense strand
ccgauccacguguucauua

SEQ ID NO: 604278 - RNA, 19 nt, Homo sapiens
  misc_RNA (1)...(19): siRNA sense strand
cugcucagcucucuacaca

SEQ ID NO: 604279 - RNA, 19 nt, Homo sapiens
  misc_RNA (1)...(19): siRNA sense strand
accaucugcuuucaacaua

SEQ ID NO: 604280 - RNA, 19 nt, Homo sapiens
  misc_RNA (1)...(19): siRNA sense strand
gcaaacaagauggcaguca

SEQ ID NO: 604281 - RNA, 19 nt, Homo sapiens
  misc_RNA (1)...(19): siRNA sense strand
aacagaaguuucacaaugg

SEQ ID NO: 604282 - RNA, 19 nt, Homo sapiens
  misc_RNA (1)...(19): siRNA sense strand
gauagggauuacagaagag

SEQ ID NO: 604283 - RNA, 19 nt, Homo sapiens
  misc_RNA (1)...(19): siRNA sense strand
cagagaagcaggcaucaag

SEQ ID NO: 604284 - RNA, 19 nt, Homo sapiens
  misc_RNA (1)...(19): siRNA sense strand
gucccaaucauacuucuaa

SEQ ID NO: 604285 - RNA, 19 nt, Homo sapiens
  misc_RNA (1)...(19): siRNA sense strand
caucacagccaaagguuag

SEQ ID NO: 604286 - RNA, 19 nt, Homo sapiens
  misc_RNA (1)...(19): siRNA sense strand
guacuccuccuguuucauc

SEQ ID NO: 604287 - RNA, 19 nt, Homo sapiens
  misc_RNA (1)...(19): siRNA sense strand
aaacuaacacagucccuau

SEQ ID NO: 604288 - RNA, 19 nt, Homo sapiens
  misc_RNA (1)...(19): siRNA sense strand
accaggcacuuaaguauuc

SEQ ID NO: 604289 - RNA, 19 nt, Homo sapiens
  misc_RNA (1)...(19): siRNA sense strand
gagaucugauaguccugaa

SEQ ID NO: 604290 - RNA, 19 nt, Homo sapiens
  misc_RNA (1)...(19): siRNA sense strand
cuucuaauccaagcaauaa

SEQ ID NO: 604291 - RNA, 19 nt, Homo sapiens
  misc_RNA (1)...(19): siRNA sense strand
cgagagcaaaggauacuau

SEQ ID NO: 604292 - RNA, 19 nt, Homo sapiens
  misc_RNA (1)...(19): siRNA sense strand
cauaacgucucugauuucu

SEQ ID NO: 604293 - RNA, 19 nt, Homo sapiens
  misc_RNA (1)...(19): siRNA sense strand
acaaacccguaucacauuc

SEQ ID NO: 604294 - RNA, 19 nt, Homo sapiens
  misc_RNA (1)...(19): siRNA sense strand
gcaagcaacagccacuagu

SEQ ID NO: 604295 - RNA, 19 nt, Homo sapiens
  misc_RNA (1)...(19): siRNA sense strand
ugaaagagaacagagacaa

SEQ ID NO: 604296 - RNA, 19 nt, Homo sapiens
  misc_RNA (1)...(19): siRNA sense strand
cuucagaugcaccuuauga

SEQ ID NO: 604297 - RNA, 19 nt, Homo sapiens
  misc_RNA (1)...(19): siRNA sense strand
uaaggaacuugaaaagcua

SEQ ID NO: 604298 - RNA, 19 nt, Homo sapiens
  misc_RNA (1)...(19): siRNA sense strand
gagacaacaaauuaaggaa

SEQ ID NO: 604299 - RNA, 19 nt, Homo sapiens
  misc_RNA (1)...(19): siRNA sense strand
guccgaaauuuguacugaa

SEQ ID NO: 604300 - RNA, 19 nt, Homo sapiens
  misc_RNA (1)...(19): siRNA sense strand
aagcaggcaucaagauuac

SEQ ID NO: 604301 - RNA, 19 nt, Homo sapiens
  misc_RNA (1)...(19): siRNA sense strand
gcacuagcagcacacuuca

SEQ ID NO: 604302 - RNA, 19 nt, Homo sapiens
  misc_RNA (1)...(19): siRNA sense strand
gccuguaacugcugacaag

SEQ ID NO: 604303 - RNA, 19 nt, Homo sapiens
  misc_RNA (1)...(19): siRNA sense strand
acacaagcccagccaucua

SEQ ID NO: 604304 - RNA, 19 nt, Homo sapiens
  misc_RNA (1)...(19): siRNA sense strand
aaaucagaauuccuucaug

SEQ ID NO: 604305 - RNA, 19 nt, Homo sapiens
  misc_RNA (1)...(19): siRNA sense strand
uaacaaagaucccgucaua

SEQ ID NO: 604306 - RNA, 19 nt, Homo sapiens
  misc_RNA (1)...(19): siRNA sense strand
gcacaaacauggaaaguca

SEQ ID NO: 604307 - RNA, 19 nt, Homo sapiens
  misc_RNA (1)...(19): siRNA sense strand
ggaagauagugguuuauuu

SEQ ID NO: 604308 - RNA, 19 nt, Homo sapiens
  misc_RNA (1)...(19): siRNA sense strand
gaaggaaucugcuaaggau

SEQ ID NO: 604309 - RNA, 19 nt, Homo sapiens
  misc_RNA (1)...(19): siRNA sense strand
gaagagaaguuggauauag

SEQ ID NO: 604310 - RNA, 19 nt, Homo sapiens
  misc_RNA (1)...(19): siRNA sense strand
gaugugaccuuuacaacaa

SEQ ID NO: 604311 - RNA, 19 nt, Homo sapiens
  misc_RNA (1)...(19): siRNA sense strand
ggaugagcaugccaauuua

SEQ ID NO: 604312 - RNA, 19 nt, Homo sapiens
  misc_RNA (1)...(19): siRNA sense strand
aaggaaagcuugccuguuu

SEQ ID NO: 604313 - RNA, 19 nt, Homo sapiens
  misc_RNA (1)...(19): siRNA sense strand
gaugaaagaugauauagag

SEQ ID NO: 604314 - RNA, 19 nt, Homo sapiens
  misc_RNA (1)...(19): siRNA sense strand
gacagaugcugcucauaua

SEQ ID NO: 604315 - RNA, 19 nt, Homo sapiens
  misc_RNA (1)...(19): siRNA sense strand
gcacuuaccuguguagaug

SEQ ID NO: 604316 - RNA, 19 nt, Homo sapiens
  misc_RNA (1)...(19): siRNA sense strand
gagugaagcuuuaucaaau

SEQ ID NO: 604317 - RNA, 19 nt, Homo sapiens
  misc_RNA (1)...(19): siRNA sense strand
caaaugauccugcaauuau

SEQ ID NO: 604318 - RNA, 19 nt, Homo sapiens
  misc_RNA (1)...(19): siRNA sense strand
gaacaaacuuuagagacuu

SEQ ID NO: 604319 - RNA, 19 nt, Homo sapiens
  misc_RNA (1)...(19): siRNA sense strand
ggagauaggauucaugaaa

SEQ ID NO: 604320 - RNA, 19 nt, Homo sapiens
  misc_RNA (1)...(19): siRNA sense strand
ggagaagaaucacaguuga

SEQ ID NO: 604321 - RNA, 19 nt, Homo sapiens
  misc_RNA (1)...(19): siRNA sense strand
gauaagagcaaaucaguga

SEQ ID NO: 604322 - RNA, 19 nt, Homo sapiens
  misc_RNA (1)...(19): siRNA sense strand
ggauuuagcugcaguuucu

SEQ ID NO: 604323 - RNA, 19 nt, Homo sapiens
  misc_RNA (1)...(19): siRNA sense strand
ggaagaagguucaguuugc

SEQ ID NO: 604324 - RNA, 19 nt, Homo sapiens
  misc_RNA (1)...(19): siRNA sense strand
ccacuuagccaucaaauug

SEQ ID NO: 604325 - RNA, 19 nt, Homo sapiens
  misc_RNA (1)...(19): siRNA sense strand
acaaggaacuguuaauguu

SEQ ID NO: 604326 - RNA, 19 nt, Homo sapiens
  misc_RNA (1)...(19): siRNA sense strand
caaaggaguuucuauaggu

SEQ ID NO: 604327 - RNA, 19 nt, Homo sapiens
  misc_RNA (1)...(19): siRNA sense strand
ucacauacuuucucaucua

SEQ ID NO: 604328 - RNA, 19 nt, Homo sapiens
  misc_RNA (1)...(19): siRNA sense strand
aaaggagucucuucaugua

SEQ ID NO: 604329 - RNA, 19 nt, Homo sapiens
  misc_RNA (1)...(19): siRNA sense strand
gaaaggagucucuucaugu

SEQ ID NO: 604330 - RNA, 19 nt, Homo sapiens
  misc_RNA (1)...(19): siRNA sense strand
uaacugaggucacauuucu

SEQ ID NO: 604331 - RNA, 19 nt, Homo sapiens
  misc_RNA (1)...(19): siRNA sense strand
gaagauaaacagaaaguca

SEQ ID NO: 604332 - RNA, 19 nt, Homo sapiens
  misc_RNA (1)...(19): siRNA sense strand
cagcagaagucauuacaga

SEQ ID NO: 604333 - RNA, 19 nt, Homo sapiens
  misc_RNA (1)...(19): siRNA sense strand
guuagugucucuacggaua

SEQ ID NO: 604334 - RNA, 19 nt, Homo sapiens
  misc_RNA (1)...(19): siRNA sense strand
cuaccgaucuguuaaauca

SEQ ID NO: 604335 - RNA, 19 nt, Homo sapiens
  misc_RNA (1)...(19): siRNA sense strand
acaaucacaugaagacuaa

SEQ ID NO: 604336 - RNA, 19 nt, Homo sapiens
  misc_RNA (1)...(19): siRNA sense strand
agaauuagccaaagaguuu

SEQ ID NO: 604337 - RNA, 19 nt, Homo sapiens
  misc_RNA (1)...(19): siRNA sense strand
guacuaggcucaguucuuc

SEQ ID NO: 604338 - RNA, 19 nt, Homo sapiens
  misc_RNA (1)...(19): siRNA sense strand
guaaauaugcuacugguau

SEQ ID NO: 604339 - RNA, 19 nt, Homo sapiens
  misc_RNA (1)...(19): siRNA sense strand
gaaagaugauauagaggau

SEQ ID NO: 604340 - RNA, 19 nt, Homo sapiens
  misc_RNA (1)...(19): siRNA sense strand
gaacauuacugugcuaagg

SEQ ID NO: 604341 - RNA, 19 nt, Homo sapiens
  misc_RNA (1)...(19): siRNA sense strand
ggccaaggcucaucuguca

SEQ ID NO: 604342 - RNA, 19 nt, Homo sapiens
  misc_RNA (1)...(19): siRNA sense strand
cauguuugcugaccgguua

SEQ ID NO: 604343 - RNA, 19 nt, Homo sapiens
  misc_RNA (1)...(19): siRNA sense strand
ggauucagacucagaagua

SEQ ID NO: 604344 - RNA, 19 nt, Homo sapiens
  misc_RNA (1)...(19): siRNA sense strand
gauagugguuuauuuaguc

SEQ ID NO: 604345 - RNA, 19 nt, Homo sapiens
  misc_RNA (1)...(19): siRNA sense strand
uuagagacuugccuguuua

SEQ ID NO: 604346 - RNA, 19 nt, Homo sapiens
  misc_RNA (1)...(19): siRNA sense strand
caacuaaugacgauauuga

SEQ ID NO: 604347 - RNA, 19 nt, Homo sapiens
  misc_RNA (1)...(19): siRNA sense strand
guagugaaguuguaugcaa

SEQ ID NO: 604348 - RNA, 19 nt, Homo sapiens
  misc_RNA (1)...(19): siRNA sense strand
aaagaagaguucauguuga

SEQ ID NO: 604349 - RNA, 19 nt, Homo sapiens
  misc_RNA (1)...(19): siRNA sense strand
gugaaagugugacagauga

SEQ ID NO: 604350 - RNA, 19 nt, Homo sapiens
  misc_RNA (1)...(19): siRNA sense strand
guggauccguuuauucuuu

SEQ ID NO: 604351 - RNA, 19 nt, Homo sapiens
  misc_RNA (1)...(19): siRNA sense strand
agaaaagucucccaaauuu

SEQ ID NO: 604352 - RNA, 19 nt, Homo sapiens
  misc_RNA (1)...(19): siRNA sense strand
ggaaugcuuugugucauga

SEQ ID NO: 604353 - RNA, 19 nt, Homo sapiens
  misc_RNA (1)...(19): siRNA sense strand
gguuacuggucaucauuua

SEQ ID NO: 604354 - RNA, 19 nt, Homo sapiens
  misc_RNA (1)...(19): siRNA sense strand
gaaagccaacuccucguaa

SEQ ID NO: 604355 - RNA, 19 nt, Homo sapiens
  misc_RNA (1)...(19): siRNA sense strand
gcuuaaaugugcaaaguca

SEQ ID NO: 604356 - RNA, 19 nt, Homo sapiens
  misc_RNA (1)...(19): siRNA sense strand
uuaacucacugcucacuuu

SEQ ID NO: 604357 - RNA, 19 nt, Homo sapiens
  misc_RNA (1)...(19): siRNA sense strand
ccaaaugauccugcaauua

SEQ ID NO: 604358 - RNA, 19 nt, Homo sapiens
  misc_RNA (1)...(19): siRNA sense strand
cagcuugucucagaaauau

SEQ ID NO: 604359 - RNA, 19 nt, Homo sapiens
  misc_RNA (1)...(19): siRNA sense strand
aagcagauauucacaaaca

SEQ ID NO: 604360 - RNA, 19 nt, Homo sapiens
  misc_RNA (1)...(19): siRNA sense strand
agaagcagauauucacaaa

SEQ ID NO: 604361 - RNA, 19 nt, Homo sapiens
  misc_RNA (1)...(19): siRNA sense strand
aagggaagauagugguuua

SEQ ID NO: 604362 - RNA, 19 nt, Homo sapiens
  misc_RNA (1)...(19): siRNA sense strand
gguaauagugaguugauaa

SEQ ID NO: 604363 - RNA, 19 nt, Homo sapiens
  misc_RNA (1)...(19): siRNA sense strand
gcaaaaguccgaaauugua

SEQ ID NO: 604364 - RNA, 19 nt, Homo sapiens
  misc_RNA (1)...(19): siRNA sense strand
uagagacacugccaucuug

SEQ ID NO: 604365 - RNA, 19 nt, Homo sapiens
  misc_RNA (1)...(19): siRNA sense strand
gcugaccgguuaucuaaau

SEQ ID NO: 604366 - RNA, 19 nt, Homo sapiens
  misc_RNA (1)...(19): siRNA sense strand
gcagaguuccucaaaauua

SEQ ID NO: 604367 - RNA, 19 nt, Homo sapiens
  misc_RNA (1)...(19): siRNA sense strand
caaacacaguugcuagguu

SEQ ID NO: 604368 - RNA, 19 nt, Homo sapiens
  misc_RNA (1)...(19): siRNA sense strand
cuucaaagccauacaauga

SEQ ID NO: 604369 - RNA, 19 nt, Homo sapiens
  misc_RNA (1)...(19): siRNA sense strand
gaaguugagaguagugaaa

SEQ ID NO: 604370 - RNA, 19 nt, Homo sapiens
  misc_RNA (1)...(19): siRNA sense strand
gaaauguaauaccugauac

SEQ ID NO: 604371 - RNA, 19 nt, Homo sapiens
  misc_RNA (1)...(19): siRNA sense strand
guaaagaagcagauauuca

SEQ ID NO: 604372 - RNA, 19 nt, Homo sapiens
  misc_RNA (1)...(19): siRNA sense strand
gagauaggauucaugaaaa

SEQ ID NO: 604373 - RNA, 19 nt, Homo sapiens
  misc_RNA (1)...(19): siRNA sense strand
gaacuagaacaaacuuuag

SEQ ID NO: 604374 - RNA, 19 nt, Homo sapiens
  misc_RNA (1)...(19): siRNA sense strand
cagcagaucuuguggaaaa

SEQ ID NO: 604375 - RNA, 19 nt, Homo sapiens
  misc_RNA (1)...(19): siRNA sense strand
agaaaggagucucuucaug

SEQ ID NO: 604376 - RNA, 19 nt, Homo sapiens
  misc_RNA (1)...(19): siRNA sense strand
acaaagagcaccaccaaga

SEQ ID NO: 604377 - RNA, 19 nt, Homo sapiens
  misc_RNA (1)...(19): siRNA sense strand
guuccagaauguaaaguuu

SEQ ID NO: 604378 - RNA, 19 nt, Homo sapiens
  misc_RNA (1)...(19): siRNA sense strand
gcaaugcagugaagcuagu

SEQ ID NO: 604379 - RNA, 19 nt, Homo sapiens
  misc_RNA (1)...(19): siRNA sense strand
ucaaagccauacaaugaug

SEQ ID NO: 604380 - RNA, 19 nt, Homo sapiens
  misc_RNA (1)...(19): siRNA sense strand
ggauauagaggcuguagug

SEQ ID NO: 604381 - RNA, 19 nt, Homo sapiens
  misc_RNA (1)...(19): siRNA sense strand
acacacauccuuucucuug

SEQ ID NO: 604382 - RNA, 19 nt, Homo sapiens
  misc_RNA (1)...(19): siRNA sense strand
gaagaagguucaguuugca

SEQ ID NO: 604383 - RNA, 19 nt, Homo sapiens
  misc_RNA (1)...(19): siRNA sense strand
gaaagucagagacagaaau

SEQ ID NO: 604384 - RNA, 19 nt, Homo sapiens
  misc_RNA (1)...(19): siRNA sense strand
gcagugcauuuaaagacuu

SEQ ID NO: 604385 - RNA, 19 nt, Homo sapiens
  misc_RNA (1)...(19): siRNA sense strand
aaggaacuaugcaguguaa

SEQ ID NO: 604386 - RNA, 19 nt, Homo sapiens
  misc_RNA (1)...(19): siRNA sense strand
uauagaggauucagacuca

SEQ ID NO: 604387 - RNA, 19 nt, Homo sapiens
  misc_RNA (1)...(19): siRNA sense strand
gagaaggcagcgugcauuu

SEQ ID NO: 604388 - RNA, 19 nt, Homo sapiens
  misc_RNA (1)...(19): siRNA sense strand
caaagagcaccaccaagaa

SEQ ID NO: 604389 - RNA, 19 nt, Homo sapiens
  misc_RNA (1)...(19): siRNA sense strand
caaggaacuguuaauguuu

SEQ ID NO: 604390 - RNA, 19 nt, Homo sapiens
  misc_RNA (1)...(19): siRNA sense strand
gaaguggauccguuuauuc

SEQ ID NO: 604391 - RNA, 19 nt, Homo sapiens
  misc_RNA (1)...(19): siRNA sense strand
aagagaaguuggauauaga

SEQ ID NO: 604392 - RNA, 19 nt, Homo sapiens
  misc_RNA (1)...(19): siRNA sense strand
uccaucaacuccucuagua

SEQ ID NO: 604393 - RNA, 19 nt, Homo sapiens
  misc_RNA (1)...(19): siRNA sense strand
ucagugaucccaaauauag

SEQ ID NO: 604394 - RNA, 19 nt, Homo sapiens
  misc_RNA (1)...(19): siRNA sense strand
gcccuucucccauaucaua

SEQ ID NO: 604395 - RNA, 19 nt, Homo sapiens
  misc_RNA (1)...(19): siRNA sense strand
caaaaccagugcaggaaua

SEQ ID NO: 604396 - RNA, 19 nt, Homo sapiens
  misc_RNA (1)...(19): siRNA sense strand
caacaaaggcagcaguuag

SEQ ID NO: 604397 - RNA, 19 nt, Homo sapiens
  misc_RNA (1)...(19): siRNA sense strand
caccaagacuuaggauuga

SEQ ID NO: 604398 - RNA, 19 nt, Homo sapiens
  misc_RNA (1)...(19): siRNA sense strand
gaaacaaucacaugaagac

SEQ ID NO: 604399 - RNA, 19 nt, Homo sapiens
  misc_RNA (1)...(19): siRNA sense strand
caauuuaacugaggucaca

SEQ ID NO: 604400 - RNA, 19 nt, Homo sapiens
  misc_RNA (1)...(19): siRNA sense strand
ucaguuugcagaagcauua

SEQ ID NO: 604401 - RNA, 19 nt, Homo sapiens
  misc_RNA (1)...(19): siRNA sense strand
aaacucaugcgaucucuuu

SEQ ID NO: 604402 - RNA, 19 nt, Homo sapiens
  misc_RNA (1)...(19): siRNA sense strand
caagggagaauuagccaaa

SEQ ID NO: 604403 - RNA, 19 nt, Homo sapiens
  misc_RNA (1)...(19): siRNA sense strand
gaaggaacuaugcagugua

SEQ ID NO: 604404 - RNA, 19 nt, Homo sapiens
  misc_RNA (1)...(19): siRNA sense strand
ggacauaaagaacuaccuu

SEQ ID NO: 604405 - RNA, 19 nt, Homo sapiens
  misc_RNA (1)...(19): siRNA sense strand
uaacaaagaucccgucaua

SEQ ID NO: 604406 - RNA, 19 nt, Homo sapiens
  misc_RNA (1)...(19): siRNA sense strand
gcacaaacauggaaaguca

SEQ ID NO: 604407 - RNA, 19 nt, Homo sapiens
  misc_RNA (1)...(19): siRNA sense strand
ggaagauagugguuuauuu

SEQ ID NO: 604408 - RNA, 19 nt, Homo sapiens
  misc_RNA (1)...(19): siRNA sense strand
gaaggaaucugcuaaggau

SEQ ID NO: 604409 - RNA, 19 nt, Homo sapiens
  misc_RNA (1)...(19): siRNA sense strand
gaagagaaguuggauauag

SEQ ID NO: 604410 - RNA, 19 nt, Homo sapiens
  misc_RNA (1)...(19): siRNA sense strand
gaugugaccuuuacaacaa

SEQ ID NO: 604411 - RNA, 19 nt, Homo sapiens
  misc_RNA (1)...(19): siRNA sense strand
ggaugagcaugccaauuua

SEQ ID NO: 604412 - RNA, 19 nt, Homo sapiens
  misc_RNA (1)...(19): siRNA sense strand
aaggaaagcuugccuguuu

SEQ ID NO: 604413 - RNA, 19 nt, Homo sapiens
  misc_RNA (1)...(19): siRNA sense strand
gaugaaagaugauauagag

SEQ ID NO: 604414 - RNA, 19 nt, Homo sapiens
  misc_RNA (1)...(19): siRNA sense strand
gacagaugcugcucauaua

SEQ ID NO: 604415 - RNA, 19 nt, Homo sapiens
  misc_RNA (1)...(19): siRNA sense strand
gcacuuaccuguguagaug

SEQ ID NO: 604416 - RNA, 19 nt, Homo sapiens
  misc_RNA (1)...(19): siRNA sense strand
gagugaagcuuuaucaaau

SEQ ID NO: 604417 - RNA, 19 nt, Homo sapiens
  misc_RNA (1)...(19): siRNA sense strand
caaaugauccugcaauuau

SEQ ID NO: 604418 - RNA, 19 nt, Homo sapiens
  misc_RNA (1)...(19): siRNA sense strand
gaacaaacuuuagagacuu

SEQ ID NO: 604419 - RNA, 19 nt, Homo sapiens
  misc_RNA (1)...(19): siRNA sense strand
ggagauaggauucaugaaa

SEQ ID NO: 604420 - RNA, 19 nt, Homo sapiens
  misc_RNA (1)...(19): siRNA sense strand
ggagaagaaucacaguuga

SEQ ID NO: 604421 - RNA, 19 nt, Homo sapiens
  misc_RNA (1)...(19): siRNA sense strand
gauaagagcaaaucaguga

SEQ ID NO: 604422 - RNA, 19 nt, Homo sapiens
  misc_RNA (1)...(19): siRNA sense strand
ggauuuagcugcaguuucu

SEQ ID NO: 604423 - RNA, 19 nt, Homo sapiens
  misc_RNA (1)...(19): siRNA sense strand
ggaagaagguucaguuugc

SEQ ID NO: 604424 - RNA, 19 nt, Homo sapiens
  misc_RNA (1)...(19): siRNA sense strand
ccacuuagccaucaaauug

SEQ ID NO: 604425 - RNA, 19 nt, Homo sapiens
  misc_RNA (1)...(19): siRNA sense strand
acaaggaacuguuaauguu

SEQ ID NO: 604426 - RNA, 19 nt, Homo sapiens
  misc_RNA (1)...(19): siRNA sense strand
caaaggaguuucuauaggu

SEQ ID NO: 604427 - RNA, 19 nt, Homo sapiens
  misc_RNA (1)...(19): siRNA sense strand
ucacauacuuucucaucua

SEQ ID NO: 604428 - RNA, 19 nt, Homo sapiens
  misc_RNA (1)...(19): siRNA sense strand
aaaggagucucuucaugua

SEQ ID NO: 604429 - RNA, 19 nt, Homo sapiens
  misc_RNA (1)...(19): siRNA sense strand
gaaaggagucucuucaugu

SEQ ID NO: 604430 - RNA, 19 nt, Homo sapiens
  misc_RNA (1)...(19): siRNA sense strand
uaacugaggucacauuucu

SEQ ID NO: 604431 - RNA, 19 nt, Homo sapiens
  misc_RNA (1)...(19): siRNA sense strand
gaagauaaacagaaaguca

SEQ ID NO: 604432 - RNA, 19 nt, Homo sapiens
  misc_RNA (1)...(19): siRNA sense strand
cagcagaagucauuacaga

SEQ ID NO: 604433 - RNA, 19 nt, Homo sapiens
  misc_RNA (1)...(19): siRNA sense strand
guuagugucucuacggaua

SEQ ID NO: 604434 - RNA, 19 nt, Homo sapiens
  misc_RNA (1)...(19): siRNA sense strand
cuaccgaucuguuaaauca

SEQ ID NO: 604435 - RNA, 19 nt, Homo sapiens
  misc_RNA (1)...(19): siRNA sense strand
acaaucacaugaagacuaa

SEQ ID NO: 604436 - RNA, 19 nt, Homo sapiens
  misc_RNA (1)...(19): siRNA sense strand
agaauuagccaaagaguuu

SEQ ID NO: 604437 - RNA, 19 nt, Homo sapiens
  misc_RNA (1)...(19): siRNA sense strand
guacuaggcucaguucuuc

SEQ ID NO: 604438 - RNA, 19 nt, Homo sapiens
  misc_RNA (1)...(19): siRNA sense strand
guaaauaugcuacugguau

SEQ ID NO: 604439 - RNA, 19 nt, Homo sapiens
  misc_RNA (1)...(19): siRNA sense strand
gaaagaugauauagaggau

SEQ ID NO: 604440 - RNA, 19 nt, Homo sapiens
  misc_RNA (1)...(19): siRNA sense strand
gaacauuacugugcuaagg

SEQ ID NO: 604441 - RNA, 19 nt, Homo sapiens
  misc_RNA (1)...(19): siRNA sense strand
ggccaaggcucaucuguca

SEQ ID NO: 604442 - RNA, 19 nt, Homo sapiens
  misc_RNA (1)...(19): siRNA sense strand
cauguuugcugaccgguua

SEQ ID NO: 604443 - RNA, 19 nt, Homo sapiens
  misc_RNA (1)...(19): siRNA sense strand
ggauucagacucagaagua

SEQ ID NO: 604444 - RNA, 19 nt, Homo sapiens
  misc_RNA (1)...(19): siRNA sense strand
gauagugguuuauuuaguc

SEQ ID NO: 604445 - RNA, 19 nt, Homo sapiens
  misc_RNA (1)...(19): siRNA sense strand
uuagagacuugccuguuua

SEQ ID NO: 604446 - RNA, 19 nt, Homo sapiens
  misc_RNA (1)...(19): siRNA sense strand
caacuaaugacgauauuga

SEQ ID NO: 604447 - RNA, 19 nt, Homo sapiens
  misc_RNA (1)...(19): siRNA sense strand
guagugaaguuguaugcaa

SEQ ID NO: 604448 - RNA, 19 nt, Homo sapiens
  misc_RNA (1)...(19): siRNA sense strand
aaagaagaguucauguuga

SEQ ID NO: 604449 - RNA, 19 nt, Homo sapiens
  misc_RNA (1)...(19): siRNA sense strand
gugaaagugugacagauga

SEQ ID NO: 604450 - RNA, 19 nt, Homo sapiens
  misc_RNA (1)...(19): siRNA sense strand
guggauccguuuauucuuu

SEQ ID NO: 604451 - RNA, 19 nt, Homo sapiens
  misc_RNA (1)...(19): siRNA sense strand
agaaaagucucccaaauuu

SEQ ID NO: 604452 - RNA, 19 nt, Homo sapiens
  misc_RNA (1)...(19): siRNA sense strand
ggaaugcuuugugucauga

SEQ ID NO: 604453 - RNA, 19 nt, Homo sapiens
  misc_RNA (1)...(19): siRNA sense strand
gguuacuggucaucauuua

SEQ ID NO: 604454 - RNA, 19 nt, Homo sapiens
  misc_RNA (1)...(19): siRNA sense strand
gaaagccaacuccucguaa

SEQ ID NO: 604455 - RNA, 19 nt, Homo sapiens
  misc_RNA (1)...(19): siRNA sense strand
gcuuaaaugugcaaaguca

SEQ ID NO: 604456 - RNA, 19 nt, Homo sapiens
  misc_RNA (1)...(19): siRNA sense strand
uuaacucacugcucacuuu

SEQ ID NO: 604457 - RNA, 19 nt, Homo sapiens
  misc_RNA (1)...(19): siRNA sense strand
ccaaaugauccugcaauua

SEQ ID NO: 604458 - RNA, 19 nt, Homo sapiens
  misc_RNA (1)...(19): siRNA sense strand
cagcuugucucagaaauau

SEQ ID NO: 604459 - RNA, 19 nt, Homo sapiens
  misc_RNA (1)...(19): siRNA sense strand
aagcagauauucacaaaca

SEQ ID NO: 604460 - RNA, 19 nt, Homo sapiens
  misc_RNA (1)...(19): siRNA sense strand
agaagcagauauucacaaa

SEQ ID NO: 604461 - RNA, 19 nt, Homo sapiens
  misc_RNA (1)...(19): siRNA sense strand
aagggaagauagugguuua

SEQ ID NO: 604462 - RNA, 19 nt, Homo sapiens
  misc_RNA (1)...(19): siRNA sense strand
gguaauagugaguugauaa

SEQ ID NO: 604463 - RNA, 19 nt, Homo sapiens
  misc_RNA (1)...(19): siRNA sense strand
gcaaaaguccgaaauugua

SEQ ID NO: 604464 - RNA, 19 nt, Homo sapiens
  misc_RNA (1)...(19): siRNA sense strand
uagagacacugccaucuug

SEQ ID NO: 604465 - RNA, 19 nt, Homo sapiens
  misc_RNA (1)...(19): siRNA sense strand
gcugaccgguuaucuaaau

SEQ ID NO: 604466 - RNA, 19 nt, Homo sapiens
  misc_RNA (1)...(19): siRNA sense strand
gcagaguuccucaaaauua

SEQ ID NO: 604467 - RNA, 19 nt, Homo sapiens
  misc_RNA (1)...(19): siRNA sense strand
caaacacaguugcuagguu

SEQ ID NO: 604468 - RNA, 19 nt, Homo sapiens
  misc_RNA (1)...(19): siRNA sense strand
cuucaaagccauacaauga

SEQ ID NO: 604469 - RNA, 19 nt, Homo sapiens
  misc_RNA (1)...(19): siRNA sense strand
gaaguugagaguagugaaa

SEQ ID NO: 604470 - RNA, 19 nt, Homo sapiens
  misc_RNA (1)...(19): siRNA sense strand
gaaauguaauaccugauac

SEQ ID NO: 604471 - RNA, 19 nt, Homo sapiens
  misc_RNA (1)...(19): siRNA sense strand
guaaagaagcagauauuca

SEQ ID NO: 604472 - RNA, 19 nt, Homo sapiens
  misc_RNA (1)...(19): siRNA sense strand
gagauaggauucaugaaaa

SEQ ID NO: 604473 - RNA, 19 nt, Homo sapiens
  misc_RNA (1)...(19): siRNA sense strand
gaacuagaacaaacuuuag

SEQ ID NO: 604474 - RNA, 19 nt, Homo sapiens
  misc_RNA (1)...(19): siRNA sense strand
cagcagaucuuguggaaaa

SEQ ID NO: 604475 - RNA, 19 nt, Homo sapiens
  misc_RNA (1)...(19): siRNA sense strand
agaaaggagucucuucaug

SEQ ID NO: 604476 - RNA, 19 nt, Homo sapiens
  misc_RNA (1)...(19): siRNA sense strand
acaaagagcaccaccaaga

SEQ ID NO: 604477 - RNA, 19 nt, Homo sapiens
  misc_RNA (1)...(19): siRNA sense strand
guuccagaauguaaaguuu

SEQ ID NO: 604478 - RNA, 19 nt, Homo sapiens
  misc_RNA (1)...(19): siRNA sense strand
gcaaugcagugaagcuagu

SEQ ID NO: 604479 - RNA, 19 nt, Homo sapiens
  misc_RNA (1)...(19): siRNA sense strand
ucaaagccauacaaugaug

SEQ ID NO: 604480 - RNA, 19 nt, Homo sapiens
  misc_RNA (1)...(19): siRNA sense strand
ggauauagaggcuguagug

SEQ ID NO: 604481 - RNA, 19 nt, Homo sapiens
  misc_RNA (1)...(19): siRNA sense strand
acacacauccuuucucuug

SEQ ID NO: 604482 - RNA, 19 nt, Homo sapiens
  misc_RNA (1)...(19): siRNA sense strand
gaagaagguucaguuugca

SEQ ID NO: 604483 - RNA, 19 nt, Homo sapiens
  misc_RNA (1)...(19): siRNA sense strand
gaaagucagagacagaaau

SEQ ID NO: 604484 - RNA, 19 nt, Homo sapiens
  misc_RNA (1)...(19): siRNA sense strand
gcagugcauuuaaagacuu

SEQ ID NO: 604485 - RNA, 19 nt, Homo sapiens
  misc_RNA (1)...(19): siRNA sense strand
aaggaacuaugcaguguaa

SEQ ID NO: 604486 - RNA, 19 nt, Homo sapiens
  misc_RNA (1)...(19): siRNA sense strand
uauagaggauucagacuca

SEQ ID NO: 604487 - RNA, 19 nt, Homo sapiens
  misc_RNA (1)...(19): siRNA sense strand
gagaaggcagcgugcauuu

SEQ ID NO: 604488 - RNA, 19 nt, Homo sapiens
  misc_RNA (1)...(19): siRNA sense strand
caaagagcaccaccaagaa

SEQ ID NO: 604489 - RNA, 19 nt, Homo sapiens
  misc_RNA (1)...(19): siRNA sense strand
caaggaacuguuaauguuu

SEQ ID NO: 604490 - RNA, 19 nt, Homo sapiens
  misc_RNA (1)...(19): siRNA sense strand
gaaguggauccguuuauuc

SEQ ID NO: 604491 - RNA, 19 nt, Homo sapiens
  misc_RNA (1)...(19): siRNA sense strand
aagagaaguuggauauaga

SEQ ID NO: 604492 - RNA, 19 nt, Homo sapiens
  misc_RNA (1)...(19): siRNA sense strand
uccaucaacuccucuagua

SEQ ID NO: 604493 - RNA, 19 nt, Homo sapiens
  misc_RNA (1)...(19): siRNA sense strand
ucagugaucccaaauauag

SEQ ID NO: 604494 - RNA, 19 nt, Homo sapiens
  misc_RNA (1)...(19): siRNA sense strand
gcccuucucccauaucaua

SEQ ID NO: 604495 - RNA, 19 nt, Homo sapiens
  misc_RNA (1)...(19): siRNA sense strand
caaaaccagugcaggaaua

SEQ ID NO: 604496 - RNA, 19 nt, Homo sapiens
  misc_RNA (1)...(19): siRNA sense strand
caacaaaggcagcaguuag

SEQ ID NO: 604497 - RNA, 19 nt, Homo sapiens
  misc_RNA (1)...(19): siRNA sense strand
caccaagacuuaggauuga

SEQ ID NO: 604498 - RNA, 19 nt, Homo sapiens
  misc_RNA (1)...(19): siRNA sense strand
gaaacaaucacaugaagac

SEQ ID NO: 604499 - RNA, 19 nt, Homo sapiens
  misc_RNA (1)...(19): siRNA sense strand
caauuuaacugaggucaca

SEQ ID NO: 604500 - RNA, 19 nt, Homo sapiens
  misc_RNA (1)...(19): siRNA sense strand
ucaguuugcagaagcauua

SEQ ID NO: 604501 - RNA, 19 nt, Homo sapiens
  misc_RNA (1)...(19): siRNA sense strand
aaacucaugcgaucucuuu

SEQ ID NO: 604502 - RNA, 19 nt, Homo sapiens
  misc_RNA (1)...(19): siRNA sense strand
caagggagaauuagccaaa

SEQ ID NO: 604503 - RNA, 19 nt, Homo sapiens
  misc_RNA (1)...(19): siRNA sense strand
gaaggaacuaugcagugua

SEQ ID NO: 604504 - RNA, 19 nt, Homo sapiens
  misc_RNA (1)...(19): siRNA sense strand
ggacauaaagaacuaccuu

SEQ ID NO: 604505 - RNA, 19 nt, Homo sapiens
  misc_RNA (1)...(19): siRNA sense strand
ccaguggacuugucaauaa

SEQ ID NO: 604506 - RNA, 19 nt, Homo sapiens
  misc_RNA (1)...(19): siRNA sense strand
gaacaagggucuccaaacg

SEQ ID NO: 604507 - RNA, 19 nt, Homo sapiens
  misc_RNA (1)...(19): siRNA sense strand
gaccuuagauagcguuaau

SEQ ID NO: 604508 - RNA, 19 nt, Homo sapiens
  misc_RNA (1)...(19): siRNA sense strand
gaaaugugaacaacacuau

SEQ ID NO: 604509 - RNA, 19 nt, Homo sapiens
  misc_RNA (1)...(19): siRNA sense strand
gaugaugaccugccaaaug

SEQ ID NO: 604510 - RNA, 19 nt, Homo sapiens
  misc_RNA (1)...(19): siRNA sense strand
ccaaaugugaccuuagaua

SEQ ID NO: 604511 - RNA, 19 nt, Homo sapiens
  misc_RNA (1)...(19): siRNA sense strand
aaacagagcuuuuggaauc

SEQ ID NO: 604512 - RNA, 19 nt, Homo sapiens
  misc_RNA (1)...(19): siRNA sense strand
ccaugaauuuacagucuaa

SEQ ID NO: 604513 - RNA, 19 nt, Homo sapiens
  misc_RNA (1)...(19): siRNA sense strand
ggaggacucguuaucugua

SEQ ID NO: 604514 - RNA, 19 nt, Homo sapiens
  misc_RNA (1)...(19): siRNA sense strand
ggaaaugugaacaacacua

SEQ ID NO: 604515 - RNA, 19 nt, Homo sapiens
  misc_RNA (1)...(19): siRNA sense strand
guagaucacuuccaaacac

SEQ ID NO: 604516 - RNA, 19 nt, Homo sapiens
  misc_RNA (1)...(19): siRNA sense strand
gagaggccauggcaaagca

SEQ ID NO: 604517 - RNA, 19 nt, Homo sapiens
  misc_RNA (1)...(19): siRNA sense strand
cuccaaacguccacaacua

SEQ ID NO: 604518 - RNA, 19 nt, Homo sapiens
  misc_RNA (1)...(19): siRNA sense strand
caaaugugaccuuagauag

SEQ ID NO: 604519 - RNA, 19 nt, Homo sapiens
  misc_RNA (1)...(19): siRNA sense strand
cuaacaaacugagucaugu

SEQ ID NO: 604520 - RNA, 19 nt, Homo sapiens
  misc_RNA (1)...(19): siRNA sense strand
caacaccuuugagaacaga

SEQ ID NO: 604521 - RNA, 19 nt, Homo sapiens
  misc_RNA (1)...(19): siRNA sense strand
caagucccaugaauuuaca

SEQ ID NO: 604522 - RNA, 19 nt, Homo sapiens
  misc_RNA (1)...(19): siRNA sense strand
gaucacuuccaaacacaaa

SEQ ID NO: 604523 - RNA, 19 nt, Homo sapiens
  misc_RNA (1)...(19): siRNA sense strand
ugccaaaugugaccuuaga

SEQ ID NO: 604524 - RNA, 19 nt, Homo sapiens
  misc_RNA (1)...(19): siRNA sense strand
caguggacuugucaauaaa

SEQ ID NO: 604525 - RNA, 19 nt, Homo sapiens
  misc_RNA (1)...(19): siRNA sense strand
augaugaccugccaaaugu

SEQ ID NO: 604526 - RNA, 19 nt, Homo sapiens
  misc_RNA (1)...(19): siRNA sense strand
gcaucugccuccucaccuu

SEQ ID NO: 604527 - RNA, 19 nt, Homo sapiens
  misc_RNA (1)...(19): siRNA sense strand
aaagugacagugaugauga

SEQ ID NO: 604528 - RNA, 19 nt, Homo sapiens
  misc_RNA (1)...(19): siRNA sense strand
gaugaccugccaaauguga

SEQ ID NO: 604529 - RNA, 19 nt, Homo sapiens
  misc_RNA (1)...(19): siRNA sense strand
gaggacucguuaucuguag

SEQ ID NO: 604530 - RNA, 19 nt, Homo sapiens
  misc_RNA (1)...(19): siRNA sense strand
gccaguggacuugucaaua

SEQ ID NO: 604531 - RNA, 19 nt, Homo sapiens
  misc_RNA (1)...(19): siRNA sense strand
aagaauaucaacaccuuug

SEQ ID NO: 604532 - RNA, 19 nt, Homo sapiens
  misc_RNA (1)...(19): siRNA sense strand
ugacagugaugaugaugac

SEQ ID NO: 604533 - RNA, 19 nt, Homo sapiens
  misc_RNA (1)...(19): siRNA sense strand
cccaugaauuuacagucua

SEQ ID NO: 604534 - RNA, 19 nt, Homo sapiens
  misc_RNA (1)...(19): siRNA sense strand
uaucacaucaguaucuuca

SEQ ID NO: 604535 - RNA, 19 nt, Homo sapiens
  misc_RNA (1)...(19): siRNA sense strand
gaucuacggcccuuuccau

SEQ ID NO: 604536 - RNA, 19 nt, Homo sapiens
  misc_RNA (1)...(19): siRNA sense strand
uagauagcguuaaugaaac

SEQ ID NO: 604537 - RNA, 19 nt, Homo sapiens
  misc_RNA (1)...(19): siRNA sense strand
ccuuagauagcguuaauga

SEQ ID NO: 604538 - RNA, 19 nt, Homo sapiens
  misc_RNA (1)...(19): siRNA sense strand
acagaauguuaaugcuuga

SEQ ID NO: 604539 - RNA, 19 nt, Homo sapiens
  misc_RNA (1)...(19): siRNA sense strand
aaugugaacaacacuauug

SEQ ID NO: 604540 - RNA, 19 nt, Homo sapiens
  misc_RNA (1)...(19): siRNA sense strand
uuccauagccagagcagua

SEQ ID NO: 604541 - RNA, 19 nt, Homo sapiens
  misc_RNA (1)...(19): siRNA sense strand
ccggaggacucguuaucug

SEQ ID NO: 604542 - RNA, 19 nt, Homo sapiens
  misc_RNA (1)...(19): siRNA sense strand
guuaucacaucaguaucuu

SEQ ID NO: 604543 - RNA, 19 nt, Homo sapiens
  misc_RNA (1)...(19): siRNA sense strand
uagaucacuuccaaacaca

SEQ ID NO: 604544 - RNA, 19 nt, Homo sapiens
  misc_RNA (1)...(19): siRNA sense strand
ucaagucccaugaauuuac

SEQ ID NO: 604545 - RNA, 19 nt, Homo sapiens
  misc_RNA (1)...(19): siRNA sense strand
aggccuaucucccagacaa

SEQ ID NO: 604546 - RNA, 19 nt, Homo sapiens
  misc_RNA (1)...(19): siRNA sense strand
ucuaacaaacugagucaug

SEQ ID NO: 604547 - RNA, 19 nt, Homo sapiens
  misc_RNA (1)...(19): siRNA sense strand
cuacggcccuuuccauagc

SEQ ID NO: 604548 - RNA, 19 nt, Homo sapiens
  misc_RNA (1)...(19): siRNA sense strand
ugggagaggccauggcaaa

SEQ ID NO: 604549 - RNA, 19 nt, Homo sapiens
  misc_RNA (1)...(19): siRNA sense strand
caaacugagucauguucac

SEQ ID NO: 604550 - RNA, 19 nt, Homo sapiens
  misc_RNA (1)...(19): siRNA sense strand
guggacuugucaauaaaca

SEQ ID NO: 604551 - RNA, 19 nt, Homo sapiens
  misc_RNA (1)...(19): siRNA sense strand
ccugccaaaugugaccuua

SEQ ID NO: 604552 - RNA, 19 nt, Homo sapiens
  misc_RNA (1)...(19): siRNA sense strand
uaucuucagcgucaucuuc

SEQ ID NO: 604553 - RNA, 19 nt, Homo sapiens
  misc_RNA (1)...(19): siRNA sense strand
ggccauggcaaagcacaaa

SEQ ID NO: 604554 - RNA, 19 nt, Homo sapiens
  misc_RNA (1)...(19): siRNA sense strand
ucccaugaauuuacagucu

SEQ ID NO: 604555 - RNA, 19 nt, Homo sapiens
  misc_RNA (1)...(19): siRNA sense strand
caucuucgucaacaguauu

SEQ ID NO: 604556 - RNA, 19 nt, Homo sapiens
  misc_RNA (1)...(19): siRNA sense strand
ccaaacguccacaacuauc

SEQ ID NO: 604557 - RNA, 19 nt, Homo sapiens
  misc_RNA (1)...(19): siRNA sense strand
gaugggaugccggcaguca

SEQ ID NO: 604558 - RNA, 19 nt, Homo sapiens
  misc_RNA (1)...(19): siRNA sense strand
guuaaugaaacuggaucua

SEQ ID NO: 604559 - RNA, 19 nt, Homo sapiens
  misc_RNA (1)...(19): siRNA sense strand
cuaucucccagacaaagua

SEQ ID NO: 604560 - RNA, 19 nt, Homo sapiens
  misc_RNA (1)...(19): siRNA sense strand
ccaguggacuugucaauaa

SEQ ID NO: 604561 - RNA, 19 nt, Homo sapiens
  misc_RNA (1)...(19): siRNA sense strand
gaacaagggucuccaaacg

SEQ ID NO: 604562 - RNA, 19 nt, Homo sapiens
  misc_RNA (1)...(19): siRNA sense strand
gaccuuagauagcguuaau

SEQ ID NO: 604563 - RNA, 19 nt, Homo sapiens
  misc_RNA (1)...(19): siRNA sense strand
gaaaugugaacaacacuau

SEQ ID NO: 604564 - RNA, 19 nt, Homo sapiens
  misc_RNA (1)...(19): siRNA sense strand
gaugaugaccugccaaaug

SEQ ID NO: 604565 - RNA, 19 nt, Homo sapiens
  misc_RNA (1)...(19): siRNA sense strand
ccaaaugugaccuuagaua

SEQ ID NO: 604566 - RNA, 19 nt, Homo sapiens
  misc_RNA (1)...(19): siRNA sense strand
aaacagagcuuuuggaauc

SEQ ID NO: 604567 - RNA, 19 nt, Homo sapiens
  misc_RNA (1)...(19): siRNA sense strand
ccaugaauuuacagucuaa

SEQ ID NO: 604568 - RNA, 19 nt, Homo sapiens
  misc_RNA (1)...(19): siRNA sense strand
ggaggacucguuaucugua

SEQ ID NO: 604569 - RNA, 19 nt, Homo sapiens
  misc_RNA (1)...(19): siRNA sense strand
ggaaaugugaacaacacua

SEQ ID NO: 604570 - RNA, 19 nt, Homo sapiens
  misc_RNA (1)...(19): siRNA sense strand
guagaucacuuccaaacac

SEQ ID NO: 604571 - RNA, 19 nt, Homo sapiens
  misc_RNA (1)...(19): siRNA sense strand
gagaggccauggcaaagca

SEQ ID NO: 604572 - RNA, 19 nt, Homo sapiens
  misc_RNA (1)...(19): siRNA sense strand
cuccaaacguccacaacua

SEQ ID NO: 604573 - RNA, 19 nt, Homo sapiens
  misc_RNA (1)...(19): siRNA sense strand
caaaugugaccuuagauag

SEQ ID NO: 604574 - RNA, 19 nt, Homo sapiens
  misc_RNA (1)...(19): siRNA sense strand
cuaacaaacugagucaugu

SEQ ID NO: 604575 - RNA, 19 nt, Homo sapiens
  misc_RNA (1)...(19): siRNA sense strand
caacaccuuugagaacaga

SEQ ID NO: 604576 - RNA, 19 nt, Homo sapiens
  misc_RNA (1)...(19): siRNA sense strand
caagucccaugaauuuaca

SEQ ID NO: 604577 - RNA, 19 nt, Homo sapiens
  misc_RNA (1)...(19): siRNA sense strand
gaucacuuccaaacacaaa

SEQ ID NO: 604578 - RNA, 19 nt, Homo sapiens
  misc_RNA (1)...(19): siRNA sense strand
ugccaaaugugaccuuaga

SEQ ID NO: 604579 - RNA, 19 nt, Homo sapiens
  misc_RNA (1)...(19): siRNA sense strand
caguggacuugucaauaaa

SEQ ID NO: 604580 - RNA, 19 nt, Homo sapiens
  misc_RNA (1)...(19): siRNA sense strand
augaugaccugccaaaugu

SEQ ID NO: 604581 - RNA, 19 nt, Homo sapiens
  misc_RNA (1)...(19): siRNA sense strand
gcaucugccuccucaccuu

SEQ ID NO: 604582 - RNA, 19 nt, Homo sapiens
  misc_RNA (1)...(19): siRNA sense strand
aaagugacagugaugauga

SEQ ID NO: 604583 - RNA, 19 nt, Homo sapiens
  misc_RNA (1)...(19): siRNA sense strand
gaugaccugccaaauguga

SEQ ID NO: 604584 - RNA, 19 nt, Homo sapiens
  misc_RNA (1)...(19): siRNA sense strand
gaggacucguuaucuguag

SEQ ID NO: 604585 - RNA, 19 nt, Homo sapiens
  misc_RNA (1)...(19): siRNA sense strand
gccaguggacuugucaaua

SEQ ID NO: 604586 - RNA, 19 nt, Homo sapiens
  misc_RNA (1)...(19): siRNA sense strand
aagaauaucaacaccuuug

SEQ ID NO: 604587 - RNA, 19 nt, Homo sapiens
  misc_RNA (1)...(19): siRNA sense strand
ugacagugaugaugaugac

SEQ ID NO: 604588 - RNA, 19 nt, Homo sapiens
  misc_RNA (1)...(19): siRNA sense strand
cccaugaauuuacagucua

SEQ ID NO: 604589 - RNA, 19 nt, Homo sapiens
  misc_RNA (1)...(19): siRNA sense strand
uaucacaucaguaucuuca

SEQ ID NO: 604590 - RNA, 19 nt, Homo sapiens
  misc_RNA (1)...(19): siRNA sense strand
gaucuacggcccuuuccau

SEQ ID NO: 604591 - RNA, 19 nt, Homo sapiens
  misc_RNA (1)...(19): siRNA sense strand
uagauagcguuaaugaaac

SEQ ID NO: 604592 - RNA, 19 nt, Homo sapiens
  misc_RNA (1)...(19): siRNA sense strand
ccuuagauagcguuaauga

SEQ ID NO: 604593 - RNA, 19 nt, Homo sapiens
  misc_RNA (1)...(19): siRNA sense strand
acagaauguuaaugcuuga

SEQ ID NO: 604594 - RNA, 19 nt, Homo sapiens
  misc_RNA (1)...(19): siRNA sense strand
aaugugaacaacacuauug

SEQ ID NO: 604595 - RNA, 19 nt, Homo sapiens
  misc_RNA (1)...(19): siRNA sense strand
uuccauagccagagcagua

SEQ ID NO: 604596 - RNA, 19 nt, Homo sapiens
  misc_RNA (1)...(19): siRNA sense strand
ccggaggacucguuaucug

SEQ ID NO: 604597 - RNA, 19 nt, Homo sapiens
  misc_RNA (1)...(19): siRNA sense strand
guuaucacaucaguaucuu

SEQ ID NO: 604598 - RNA, 19 nt, Homo sapiens
  misc_RNA (1)...(19): siRNA sense strand
uagaucacuuccaaacaca

SEQ ID NO: 604599 - RNA, 19 nt, Homo sapiens
  misc_RNA (1)...(19): siRNA sense strand
ucaagucccaugaauuuac

SEQ ID NO: 604600 - RNA, 19 nt, Homo sapiens
  misc_RNA (1)...(19): siRNA sense strand
aggccuaucucccagacaa

SEQ ID NO: 604601 - RNA, 19 nt, Homo sapiens
  misc_RNA (1)...(19): siRNA sense strand
ucuaacaaacugagucaug

SEQ ID NO: 604602 - RNA, 19 nt, Homo sapiens
  misc_RNA (1)...(19): siRNA sense strand
cuacggcccuuuccauagc

SEQ ID NO: 604603 - RNA, 19 nt, Homo sapiens
  misc_RNA (1)...(19): siRNA sense strand
ugggagaggccauggcaaa

SEQ ID NO: 604604 - RNA, 19 nt, Homo sapiens
  misc_RNA (1)...(19): siRNA sense strand
caaacugagucauguucac

SEQ ID NO: 604605 - RNA, 19 nt, Homo sapiens
  misc_RNA (1)...(19): siRNA sense strand
guggacuugucaauaaaca

SEQ ID NO: 604606 - RNA, 19 nt, Homo sapiens
  misc_RNA (1)...(19): siRNA sense strand
ccugccaaaugugaccuua

SEQ ID NO: 604607 - RNA, 19 nt, Homo sapiens
  misc_RNA (1)...(19): siRNA sense strand
uaucuucagcgucaucuuc

SEQ ID NO: 604608 - RNA, 19 nt, Homo sapiens
  misc_RNA (1)...(19): siRNA sense strand
ggccauggcaaagcacaaa

SEQ ID NO: 604609 - RNA, 19 nt, Homo sapiens
  misc_RNA (1)...(19): siRNA sense strand
ucccaugaauuuacagucu

SEQ ID NO: 604610 - RNA, 19 nt, Homo sapiens
  misc_RNA (1)...(19): siRNA sense strand
caucuucgucaacaguauu

SEQ ID NO: 604611 - RNA, 19 nt, Homo sapiens
  misc_RNA (1)...(19): siRNA sense strand
ccaaacguccacaacuauc

SEQ ID NO: 604612 - RNA, 19 nt, Homo sapiens
  misc_RNA (1)...(19): siRNA sense strand
gaugggaugccggcaguca

SEQ ID NO: 604613 - RNA, 19 nt, Homo sapiens
  misc_RNA (1)...(19): siRNA sense strand
guuaaugaaacuggaucua

SEQ ID NO: 604614 - RNA, 19 nt, Homo sapiens
  misc_RNA (1)...(19): siRNA sense strand
cuaucucccagacaaagua

SEQ ID NO: 604615 - RNA, 19 nt, Homo sapiens
  misc_RNA (1)...(19): siRNA sense strand
ccacaacccuggcggaaua

SEQ ID NO: 604616 - RNA, 19 nt, Homo sapiens
  misc_RNA (1)...(19): siRNA sense strand
ggaggaagaugccgacugu

SEQ ID NO: 604617 - RNA, 19 nt, Homo sapiens
  misc_RNA (1)...(19): siRNA sense strand
ggaaauggagagacaguaa

SEQ ID NO: 604618 - RNA, 19 nt, Homo sapiens
  misc_RNA (1)...(19): siRNA sense strand
caaggcgcauauuaaauuu

SEQ ID NO: 604619 - RNA, 19 nt, Homo sapiens
  misc_RNA (1)...(19): siRNA sense strand
ggacuauccuauuaagugu

SEQ ID NO: 604620 - RNA, 19 nt, Homo sapiens
  misc_RNA (1)...(19): siRNA sense strand
cgacauugaugaugaagau

SEQ ID NO: 604621 - RNA, 19 nt, Homo sapiens
  misc_RNA (1)...(19): siRNA sense strand
uaaucucacugcuuaauga

SEQ ID NO: 604622 - RNA, 19 nt, Homo sapiens
  misc_RNA (1)...(19): siRNA sense strand
ucaaggcgcauauuaaauu

SEQ ID NO: 604623 - RNA, 19 nt, Homo sapiens
  misc_RNA (1)...(19): siRNA sense strand
ggagauguaugcauuucga

SEQ ID NO: 604624 - RNA, 19 nt, Homo sapiens
  misc_RNA (1)...(19): siRNA sense strand
aaacuaaagugccuuccaa

SEQ ID NO: 604625 - RNA, 19 nt, Homo sapiens
  misc_RNA (1)...(19): siRNA sense strand
cuaaagugccuuccaauga

SEQ ID NO: 604626 - RNA, 19 nt, Homo sapiens
  misc_RNA (1)...(19): siRNA sense strand
gcucagauuugcuuuacga

SEQ ID NO: 604627 - RNA, 19 nt, Homo sapiens
  misc_RNA (1)...(19): siRNA sense strand
caaugucgaugcuucaguu

SEQ ID NO: 604628 - RNA, 19 nt, Homo sapiens
  misc_RNA (1)...(19): siRNA sense strand
ggagagacaguaaaggaaa

SEQ ID NO: 604629 - RNA, 19 nt, Homo sapiens
  misc_RNA (1)...(19): siRNA sense strand
ucugaaagguggaauccua

SEQ ID NO: 604630 - RNA, 19 nt, Homo sapiens
  misc_RNA (1)...(19): siRNA sense strand
gaaauggagagacaguaaa

SEQ ID NO: 604631 - RNA, 19 nt, Homo sapiens
  misc_RNA (1)...(19): siRNA sense strand
ucaguuauguucaggaaau

SEQ ID NO: 604632 - RNA, 19 nt, Homo sapiens
  misc_RNA (1)...(19): siRNA sense strand
ggaagaugccgacuguuau

SEQ ID NO: 604633 - RNA, 19 nt, Homo sapiens
  misc_RNA (1)...(19): siRNA sense strand
ccaccuaccuucagauucu

SEQ ID NO: 604634 - RNA, 19 nt, Homo sapiens
  misc_RNA (1)...(19): siRNA sense strand
guggagggcuuccggauca

SEQ ID NO: 604635 - RNA, 19 nt, Homo sapiens
  misc_RNA (1)...(19): siRNA sense strand
gaagaugccgacuguuaug

SEQ ID NO: 604636 - RNA, 19 nt, Homo sapiens
  misc_RNA (1)...(19): siRNA sense strand
gacaaagaauaugcugaaa

SEQ ID NO: 604637 - RNA, 19 nt, Homo sapiens
  misc_RNA (1)...(19): siRNA sense strand
caacagcucagauuugcuu

SEQ ID NO: 604638 - RNA, 19 nt, Homo sapiens
  misc_RNA (1)...(19): siRNA sense strand
gguggaauccuacucagaa

SEQ ID NO: 604639 - RNA, 19 nt, Homo sapiens
  misc_RNA (1)...(19): siRNA sense strand
aggaagaugccgacuguua

SEQ ID NO: 604640 - RNA, 19 nt, Homo sapiens
  misc_RNA (1)...(19): siRNA sense strand
gacaacagcucagauuugc

SEQ ID NO: 604641 - RNA, 19 nt, Homo sapiens
  misc_RNA (1)...(19): siRNA sense strand
ggaauccuacucagaaugu

SEQ ID NO: 604642 - RNA, 19 nt, Homo sapiens
  misc_RNA (1)...(19): siRNA sense strand
uaaagugccuuccaaugac

SEQ ID NO: 604643 - RNA, 19 nt, Homo sapiens
  misc_RNA (1)...(19): siRNA sense strand
ugacaacagcucagauuug

SEQ ID NO: 604644 - RNA, 19 nt, Homo sapiens
  misc_RNA (1)...(19): siRNA sense strand
ugacgacauugaugaugaa

SEQ ID NO: 604645 - RNA, 19 nt, Homo sapiens
  misc_RNA (1)...(19): siRNA sense strand
uuaaugagcccaacaccuu

SEQ ID NO: 604646 - RNA, 19 nt, Homo sapiens
  misc_RNA (1)...(19): siRNA sense strand
agacaaagaauaugcugaa

SEQ ID NO: 604647 - RNA, 19 nt, Homo sapiens
  misc_RNA (1)...(19): siRNA sense strand
gaugccgacuguuaugaug

SEQ ID NO: 604648 - RNA, 19 nt, Homo sapiens
  misc_RNA (1)...(19): siRNA sense strand
ugucgaugcuucaguuaug

SEQ ID NO: 604649 - RNA, 19 nt, Homo sapiens
  misc_RNA (1)...(19): siRNA sense strand
cuucaaggcgcauauuaaa

SEQ ID NO: 604650 - RNA, 19 nt, Homo sapiens
  misc_RNA (1)...(19): siRNA sense strand
uuaugagaauggagaugua

SEQ ID NO: 604651 - RNA, 19 nt, Homo sapiens
  misc_RNA (1)...(19): siRNA sense strand
cgacuguuaugaugaugau

SEQ ID NO: 604652 - RNA, 19 nt, Homo sapiens
  misc_RNA (1)...(19): siRNA sense strand
guaugcauuucgauucuuc

SEQ ID NO: 604653 - RNA, 19 nt, Homo sapiens
  misc_RNA (1)...(19): siRNA sense strand
gauguaugcauuucgauuc

SEQ ID NO: 604654 - RNA, 19 nt, Homo sapiens
  misc_RNA (1)...(19): siRNA sense strand
gcgcauauuaaauuuccua

SEQ ID NO: 604655 - RNA, 19 nt, Homo sapiens
  misc_RNA (1)...(19): siRNA sense strand
gagagacaguaaaggaaaa

SEQ ID NO: 604656 - RNA, 19 nt, Homo sapiens
  misc_RNA (1)...(19): siRNA sense strand
ggcggaauacugcaucaaa

SEQ ID NO: 604657 - RNA, 19 nt, Homo sapiens
  misc_RNA (1)...(19): siRNA sense strand
guuaugaugaugaugauuc

SEQ ID NO: 604658 - RNA, 19 nt, Homo sapiens
  misc_RNA (1)...(19): siRNA sense strand
uacgacgacuuguaugaug

SEQ ID NO: 604659 - RNA, 19 nt, Homo sapiens
  misc_RNA (1)...(19): siRNA sense strand
cagcucagauuugcuuuac

SEQ ID NO: 604660 - RNA, 19 nt, Homo sapiens
  misc_RNA (1)...(19): siRNA sense strand
gcggaauacugcaucaaaa

SEQ ID NO: 604661 - RNA, 19 nt, Homo sapiens
  misc_RNA (1)...(19): siRNA sense strand
guaaucucacugcuuaaug

SEQ ID NO: 604662 - RNA, 19 nt, Homo sapiens
  misc_RNA (1)...(19): siRNA sense strand
gcuuuacgacgacuuguau

SEQ ID NO: 604663 - RNA, 19 nt, Homo sapiens
  misc_RNA (1)...(19): siRNA sense strand
guggaauccuacucagaau

SEQ ID NO: 604664 - RNA, 19 nt, Homo sapiens
  misc_RNA (1)...(19): siRNA sense strand
cuucaguuauguucaggaa

SEQ ID NO: 604665 - RNA, 19 nt, Homo sapiens
  misc_RNA (1)...(19): siRNA sense strand
aaagugccuuccaaugaca

SEQ ID NO: 604666 - RNA, 19 nt, Homo sapiens
  misc_RNA (1)...(19): siRNA sense strand
gaaaagacaaagaauaugc

SEQ ID NO: 604667 - RNA, 19 nt, Homo sapiens
  misc_RNA (1)...(19): siRNA sense strand
augacgacauugaugauga

SEQ ID NO: 604668 - RNA, 19 nt, Homo sapiens
  misc_RNA (1)...(19): siRNA sense strand
cuuguaugaugacgacauu

SEQ ID NO: 604669 - RNA, 19 nt, Homo sapiens
  misc_RNA (1)...(19): siRNA sense strand
aaugacaacagcucagauu

SEQ ID NO: 604670 - RNA, 19 nt, Homo sapiens
  misc_RNA (1)...(19): siRNA sense strand
gaauacugcaucaaaacua

SEQ ID NO: 604671 - RNA, 19 nt, Homo sapiens
  misc_RNA (1)...(19): siRNA sense strand
acgacgacuuguaugauga

SEQ ID NO: 604672 - RNA, 19 nt, Homo sapiens
  misc_RNA (1)...(19): siRNA sense strand
aaagguggaauccuacuca

SEQ ID NO: 604673 - RNA, 19 nt, Homo sapiens
  misc_RNA (1)...(19): siRNA sense strand
uguaugaugacgacauuga

SEQ ID NO: 604674 - RNA, 19 nt, Homo sapiens
  misc_RNA (1)...(19): siRNA sense strand
aguccgaccucuacaacug

SEQ ID NO: 604675 - RNA, 19 nt, Homo sapiens
  misc_RNA (1)...(19): siRNA sense strand
cacuaaggccgaagcagaa

SEQ ID NO: 604676 - RNA, 19 nt, Homo sapiens
  misc_RNA (1)...(19): siRNA sense strand
aagaugaggaggaggaaga

SEQ ID NO: 604677 - RNA, 19 nt, Homo sapiens
  misc_RNA (1)...(19): siRNA sense strand
ccaaugacaacagcucaga

SEQ ID NO: 604678 - RNA, 19 nt, Homo sapiens
  misc_RNA (1)...(19): siRNA sense strand
gaaagguggaauccuacuc

SEQ ID NO: 604679 - RNA, 19 nt, Homo sapiens
  misc_RNA (1)...(19): siRNA sense strand
acauugaugaugaagauga

SEQ ID NO: 604680 - RNA, 19 nt, Homo sapiens
  misc_RNA (1)...(19): siRNA sense strand
agaaaaggauggagugaag

SEQ ID NO: 604681 - RNA, 19 nt, Homo sapiens
  misc_RNA (1)...(19): siRNA sense strand
gaugacgacauugaugaug

SEQ ID NO: 604682 - RNA, 19 nt, Homo sapiens
  misc_RNA (1)...(19): siRNA sense strand
gaauccuacucagaaugug

SEQ ID NO: 604683 - RNA, 19 nt, Homo sapiens
  misc_RNA (1)...(19): siRNA sense strand
acugggagguggccaucuu

SEQ ID NO: 604684 - RNA, 19 nt, Homo sapiens
  misc_RNA (1)...(19): siRNA sense strand
caccaccuaccuucagauu

SEQ ID NO: 604685 - RNA, 19 nt, Homo sapiens
  misc_RNA (1)...(19): siRNA sense strand
uacuucaaggcgcauauua

SEQ ID NO: 604686 - RNA, 19 nt, Homo sapiens
  misc_RNA (1)...(19): siRNA sense strand
acagcucagauuugcuuua

SEQ ID NO: 604687 - RNA, 19 nt, Homo sapiens
  misc_RNA (1)...(19): siRNA sense strand
ggagagagaugaaagaaga

SEQ ID NO: 604688 - RNA, 19 nt, Homo sapiens
  misc_RNA (1)...(19): siRNA sense strand
gaggaagccuggagguuua

SEQ ID NO: 604689 - RNA, 19 nt, Homo sapiens
  misc_RNA (1)...(19): siRNA sense strand
gcugaaagauccaagguuu

SEQ ID NO: 604690 - RNA, 19 nt, Homo sapiens
  misc_RNA (1)...(19): siRNA sense strand
guguuuagcugcuuugaua

SEQ ID NO: 604691 - RNA, 19 nt, Homo sapiens
  misc_RNA (1)...(19): siRNA sense strand
ugaauguucuggugaauuu

SEQ ID NO: 604692 - RNA, 19 nt, Homo sapiens
  misc_RNA (1)...(19): siRNA sense strand
aagaagagcuggaggaaga

SEQ ID NO: 604693 - RNA, 19 nt, Homo sapiens
  misc_RNA (1)...(19): siRNA sense strand
gggauuugcucucuauaga

SEQ ID NO: 604694 - RNA, 19 nt, Homo sapiens
  misc_RNA (1)...(19): siRNA sense strand
ggaggaagccuggagguuu

SEQ ID NO: 604695 - RNA, 19 nt, Homo sapiens
  misc_RNA (1)...(19): siRNA sense strand
gagagucccuuuaucuaca

SEQ ID NO: 604696 - RNA, 19 nt, Homo sapiens
  misc_RNA (1)...(19): siRNA sense strand
gaaagaagagcuggaggaa

SEQ ID NO: 604697 - RNA, 19 nt, Homo sapiens
  misc_RNA (1)...(19): siRNA sense strand
gagcuggcaguguuuauuu

SEQ ID NO: 604698 - RNA, 19 nt, Homo sapiens
  misc_RNA (1)...(19): siRNA sense strand
gcagguggauuugcuggaa

SEQ ID NO: 604699 - RNA, 19 nt, Homo sapiens
  misc_RNA (1)...(19): siRNA sense strand
ggaggagucuaugcucuga

SEQ ID NO: 604700 - RNA, 19 nt, Homo sapiens
  misc_RNA (1)...(19): siRNA sense strand
agaaaugauuccugccuuu

SEQ ID NO: 604701 - RNA, 19 nt, Homo sapiens
  misc_RNA (1)...(19): siRNA sense strand
ugucuuauuugcuguguuu

SEQ ID NO: 604702 - RNA, 19 nt, Homo sapiens
  misc_RNA (1)...(19): siRNA sense strand
ucacauugcagguggauuu

SEQ ID NO: 604703 - RNA, 19 nt, Homo sapiens
  misc_RNA (1)...(19): siRNA sense strand
gcugguacaugcuggaguu

SEQ ID NO: 604704 - RNA, 19 nt, Homo sapiens
  misc_RNA (1)...(19): siRNA sense strand
ccuggagguuuaucucaua

SEQ ID NO: 604705 - RNA, 19 nt, Homo sapiens
  misc_RNA (1)...(19): siRNA sense strand
gauuugcucucuauagaag

SEQ ID NO: 604706 - RNA, 19 nt, Homo sapiens
  misc_RNA (1)...(19): siRNA sense strand
gaaaugauuccugccuuug

SEQ ID NO: 604707 - RNA, 19 nt, Homo sapiens
  misc_RNA (1)...(19): siRNA sense strand
guaaagaucgggccaagag

SEQ ID NO: 604708 - RNA, 19 nt, Homo sapiens
  misc_RNA (1)...(19): siRNA sense strand
uggcaguguuuauuuacua

SEQ ID NO: 604709 - RNA, 19 nt, Homo sapiens
  misc_RNA (1)...(19): siRNA sense strand
ggagguuuaucucauacau

SEQ ID NO: 604710 - RNA, 19 nt, Homo sapiens
  misc_RNA (1)...(19): siRNA sense strand
caugggauuugcucucuau

SEQ ID NO: 604711 - RNA, 19 nt, Homo sapiens
  misc_RNA (1)...(19): siRNA sense strand
aaagaucgggccaagagua

SEQ ID NO: 604712 - RNA, 19 nt, Homo sapiens
  misc_RNA (1)...(19): siRNA sense strand
ggagagucccuuuaucuac

SEQ ID NO: 604713 - RNA, 19 nt, Homo sapiens
  misc_RNA (1)...(19): siRNA sense strand
ggauuugcucucuauagaa

SEQ ID NO: 604714 - RNA, 19 nt, Homo sapiens
  misc_RNA (1)...(19): siRNA sense strand
ucucauacaugcugguaca

SEQ ID NO: 604715 - RNA, 19 nt, Homo sapiens
  misc_RNA (1)...(19): siRNA sense strand
gcaauugcugcauauuuag

SEQ ID NO: 604716 - RNA, 19 nt, Homo sapiens
  misc_RNA (1)...(19): siRNA sense strand
ggcaguguuuauuuacuau

SEQ ID NO: 604717 - RNA, 19 nt, Homo sapiens
  misc_RNA (1)...(19): siRNA sense strand
ccacaggauugucucaaaa

SEQ ID NO: 604718 - RNA, 19 nt, Homo sapiens
  misc_RNA (1)...(19): siRNA sense strand
uggccgagcuggcaguguu

SEQ ID NO: 604719 - RNA, 19 nt, Homo sapiens
  misc_RNA (1)...(19): siRNA sense strand
gacaugggauuugcucucu

SEQ ID NO: 604720 - RNA, 19 nt, Homo sapiens
  misc_RNA (1)...(19): siRNA sense strand
uuaugaauguucuggugaa

SEQ ID NO: 604721 - RNA, 19 nt, Homo sapiens
  misc_RNA (1)...(19): siRNA sense strand
uguggaagccucagaaaca

SEQ ID NO: 604722 - RNA, 19 nt, Homo sapiens
  misc_RNA (1)...(19): siRNA sense strand
uaucuacaguccugagaag

SEQ ID NO: 604723 - RNA, 19 nt, Homo sapiens
  misc_RNA (1)...(19): siRNA sense strand
gacccacucagauaucuug

SEQ ID NO: 604724 - RNA, 19 nt, Homo sapiens
  misc_RNA (1)...(19): siRNA sense strand
uccacaggauugucucaaa

SEQ ID NO: 604725 - RNA, 19 nt, Homo sapiens
  misc_RNA (1)...(19): siRNA sense strand
uggagagucccuuuaucua

SEQ ID NO: 604726 - RNA, 19 nt, Homo sapiens
  misc_RNA (1)...(19): siRNA sense strand
cugcauauuuagcuugugu

SEQ ID NO: 604727 - RNA, 19 nt, Homo sapiens
  misc_RNA (1)...(19): siRNA sense strand
aaugauuccugccuuugga

SEQ ID NO: 604728 - RNA, 19 nt, Homo sapiens
  misc_RNA (1)...(19): siRNA sense strand
uagcuugugucuuauuugc

SEQ ID NO: 604729 - RNA, 19 nt, Homo sapiens
  misc_RNA (1)...(19): siRNA sense strand
aagaucgggccaagaguaa

SEQ ID NO: 604730 - RNA, 19 nt, Homo sapiens
  misc_RNA (1)...(19): siRNA sense strand
agaaacaguggaucacguu

SEQ ID NO: 604731 - RNA, 19 nt, Homo sapiens
  misc_RNA (1)...(19): siRNA sense strand
agcuggcaguguuuauuua

SEQ ID NO: 604732 - RNA, 19 nt, Homo sapiens
  misc_RNA (1)...(19): siRNA sense strand
gaggcuauuuuaugaaugu

SEQ ID NO: 604733 - RNA, 19 nt, Homo sapiens
  misc_RNA (1)...(19): siRNA sense strand
cuugccagcuccaucuuug

SEQ ID NO: 604734 - RNA, 19 nt, Homo sapiens
  misc_RNA (1)...(19): siRNA sense strand
aacaguggaucacguugga

SEQ ID NO: 604735 - RNA, 19 nt, Homo sapiens
  misc_RNA (1)...(19): siRNA sense strand
ccucagaaacaguggauca

SEQ ID NO: 604736 - RNA, 19 nt, Homo sapiens
  misc_RNA (1)...(19): siRNA sense strand
aaauggaugcugcccgaaa

SEQ ID NO: 604737 - RNA, 19 nt, Homo sapiens
  misc_RNA (1)...(19): siRNA sense strand
gggaggcuauuuuaugaau

SEQ ID NO: 604738 - RNA, 19 nt, Homo sapiens
  misc_RNA (1)...(19): siRNA sense strand
gaugggaggcuauuuuaug

SEQ ID NO: 604739 - RNA, 19 nt, Homo sapiens
  misc_RNA (1)...(19): siRNA sense strand
aggagucuaugcucugaug

SEQ ID NO: 604740 - RNA, 19 nt, Homo sapiens
  misc_RNA (1)...(19): siRNA sense strand
ucuuugacccacucagaua

SEQ ID NO: 604741 - RNA, 19 nt, Homo sapiens
  misc_RNA (1)...(19): siRNA sense strand
caucuuugacccacucaga

SEQ ID NO: 604742 - RNA, 19 nt, Homo sapiens
  misc_RNA (1)...(19): siRNA sense strand
caucuuggagagucccuuu

SEQ ID NO: 604743 - RNA, 19 nt, Homo sapiens
  misc_RNA (1)...(19): siRNA sense strand
gguacaugcuggaguucag

SEQ ID NO: 604744 - RNA, 19 nt, Homo sapiens
  misc_RNA (1)...(19): siRNA sense strand
gauaauuguguuggacaug

SEQ ID NO: 604745 - RNA, 19 nt, Homo sapiens
  misc_RNA (1)...(19): siRNA sense strand
cgagcuggcaguguuuauu

SEQ ID NO: 604746 - RNA, 19 nt, Homo sapiens
  misc_RNA (1)...(19): siRNA sense strand
gggaggaagccuggagguu

SEQ ID NO: 604747 - RNA, 19 nt, Homo sapiens
  misc_RNA (1)...(19): siRNA sense strand
guuggacacaggcaucuug

SEQ ID NO: 604748 - RNA, 19 nt, Homo sapiens
  misc_RNA (1)...(19): siRNA sense strand
gccuggagguuuaucucau

SEQ ID NO: 604749 - RNA, 19 nt, Homo sapiens
  misc_RNA (1)...(19): siRNA sense strand
gaacauguuugccauaugg

SEQ ID NO: 604750 - RNA, 19 nt, Homo sapiens
  misc_RNA (1)...(19): siRNA sense strand
ggaaaguacugagcccaua

SEQ ID NO: 604751 - RNA, 19 nt, Homo sapiens
  misc_RNA (1)...(19): siRNA sense strand
gaaaugaugcgccugacaa

SEQ ID NO: 604752 - RNA, 19 nt, Homo sapiens
  misc_RNA (1)...(19): siRNA sense strand
ggaaagagaacguaacaac

SEQ ID NO: 604753 - RNA, 19 nt, Homo sapiens
  misc_RNA (1)...(19): siRNA sense strand
aaacccaagcuuagauuua

SEQ ID NO: 604754 - RNA, 19 nt, Homo sapiens
  misc_RNA (1)...(19): siRNA sense strand
gcgaaaagaucaagaggaa

SEQ ID NO: 604755 - RNA, 19 nt, Homo sapiens
  misc_RNA (1)...(19): siRNA sense strand
guacugagcccauaugacu

SEQ ID NO: 604756 - RNA, 19 nt, Homo sapiens
  misc_RNA (1)...(19): siRNA sense strand
gggugggcguugugaauuu

SEQ ID NO: 604757 - RNA, 19 nt, Homo sapiens
  misc_RNA (1)...(19): siRNA sense strand
uugaagaagugcaagguuu

SEQ ID NO: 604758 - RNA, 19 nt, Homo sapiens
  misc_RNA (1)...(19): siRNA sense strand
ggugguggcuaccugcauu

SEQ ID NO: 604759 - RNA, 19 nt, Homo sapiens
  misc_RNA (1)...(19): siRNA sense strand
gaaaguacugagcccauau

SEQ ID NO: 604760 - RNA, 19 nt, Homo sapiens
  misc_RNA (1)...(19): siRNA sense strand
caagaacauguuugccaua

SEQ ID NO: 604761 - RNA, 19 nt, Homo sapiens
  misc_RNA (1)...(19): siRNA sense strand
ccacugaagcuacggaguu

SEQ ID NO: 604762 - RNA, 19 nt, Homo sapiens
  misc_RNA (1)...(19): siRNA sense strand
cauaugacuugacccacaa

SEQ ID NO: 604763 - RNA, 19 nt, Homo sapiens
  misc_RNA (1)...(19): siRNA sense strand
gaggaaagagaacguaaca

SEQ ID NO: 604764 - RNA, 19 nt, Homo sapiens
  misc_RNA (1)...(19): siRNA sense strand
aacccaagcuuagauuuau

SEQ ID NO: 604765 - RNA, 19 nt, Homo sapiens
  misc_RNA (1)...(19): siRNA sense strand
ugaaagggcaccacuugug

SEQ ID NO: 604766 - RNA, 19 nt, Homo sapiens
  misc_RNA (1)...(19): siRNA sense strand
gaauagccacugccaacau

SEQ ID NO: 604767 - RNA, 19 nt, Homo sapiens
  misc_RNA (1)...(19): siRNA sense strand
gcgggacucuagagaagau

SEQ ID NO: 604768 - RNA, 19 nt, Homo sapiens
  misc_RNA (1)...(19): siRNA sense strand
aagaacauguuugccauau

SEQ ID NO: 604769 - RNA, 19 nt, Homo sapiens
  misc_RNA (1)...(19): siRNA sense strand
ccagguugcccacaaguug

SEQ ID NO: 604770 - RNA, 19 nt, Homo sapiens
  misc_RNA (1)...(19): siRNA sense strand
cacugaagcuacggaguuu

SEQ ID NO: 604771 - RNA, 19 nt, Homo sapiens
  misc_RNA (1)...(19): siRNA sense strand
gaaaagaucaagaggaaag

SEQ ID NO: 604772 - RNA, 19 nt, Homo sapiens
  misc_RNA (1)...(19): siRNA sense strand
aaagagaacguaacaacca

SEQ ID NO: 604773 - RNA, 19 nt, Homo sapiens
  misc_RNA (1)...(19): siRNA sense strand
caagaggaaagagaacgua

SEQ ID NO: 604774 - RNA, 19 nt, Homo sapiens
  misc_RNA (1)...(19): siRNA sense strand
gagaacguaacaaccagaa

SEQ ID NO: 604775 - RNA, 19 nt, Homo sapiens
  misc_RNA (1)...(19): siRNA sense strand
guaagaagagaaccuaaaa

SEQ ID NO: 604776 - RNA, 19 nt, Homo sapiens
  misc_RNA (1)...(19): siRNA sense strand
aauagccacugccaacaug

SEQ ID NO: 604777 - RNA, 19 nt, Homo sapiens
  misc_RNA (1)...(19): siRNA sense strand
guugugaauuugaagaagu

SEQ ID NO: 604778 - RNA, 19 nt, Homo sapiens
  misc_RNA (1)...(19): siRNA sense strand
ggugggcguugugaauuug

SEQ ID NO: 604779 - RNA, 19 nt, Homo sapiens
  misc_RNA (1)...(19): siRNA sense strand
gggccacuuugaaaugaug

SEQ ID NO: 604780 - RNA, 19 nt, Homo sapiens
  misc_RNA (1)...(19): siRNA sense strand
aaaguaagaagagaaccua

SEQ ID NO: 604781 - RNA, 19 nt, Homo sapiens
  misc_RNA (1)...(19): siRNA sense strand
gaggcaaaggugcuauuga

SEQ ID NO: 604782 - RNA, 19 nt, Homo sapiens
  misc_RNA (1)...(19): siRNA sense strand
gacaaucaaccgcucuaug

SEQ ID NO: 604783 - RNA, 19 nt, Homo sapiens
  misc_RNA (1)...(19): siRNA sense strand
gcuuagauuuauugaaagg

SEQ ID NO: 604784 - RNA, 19 nt, Homo sapiens
  misc_RNA (1)...(19): siRNA sense strand
gcuacggaguuuacagaag

SEQ ID NO: 604785 - RNA, 19 nt, Homo sapiens
  misc_RNA (1)...(19): siRNA sense strand
acaaucaaccgcucuaugg

SEQ ID NO: 604786 - RNA, 19 nt, Homo sapiens
  misc_RNA (1)...(19): siRNA sense strand
aaggugcuauugaccacua

SEQ ID NO: 604787 - RNA, 19 nt, Homo sapiens
  misc_RNA (1)...(19): siRNA sense strand
ggaggcaaaggugcuauug

SEQ ID NO: 604788 - RNA, 19 nt, Homo sapiens
  misc_RNA (1)...(19): siRNA sense strand
aggcaaaggugcuauugac

SEQ ID NO: 604789 - RNA, 19 nt, Homo sapiens
  misc_RNA (1)...(19): siRNA sense strand
cagaaccccuggacauuug

SEQ ID NO: 604790 - RNA, 19 nt, Homo sapiens
  misc_RNA (1)...(19): siRNA sense strand
ugaagaagugcaagguuuc

SEQ ID NO: 604791 - RNA, 19 nt, Homo sapiens
  misc_RNA (1)...(19): siRNA sense strand
ggaguuuacagaaggcaau

SEQ ID NO: 604792 - RNA, 19 nt, Homo sapiens
  misc_RNA (1)...(19): siRNA sense strand
uagagaagaugcgaaaaga

SEQ ID NO: 604793 - RNA, 19 nt, Homo sapiens
  misc_RNA (1)...(19): siRNA sense strand
agaacauguuugccauaug

SEQ ID NO: 604794 - RNA, 19 nt, Homo sapiens
  misc_RNA (1)...(19): siRNA sense strand
gagaagaugcgaaaagauc

SEQ ID NO: 604795 - RNA, 19 nt, Homo sapiens
  misc_RNA (1)...(19): siRNA sense strand
gcccaucacucgcaaaagu

SEQ ID NO: 604796 - RNA, 19 nt, Homo sapiens
  misc_RNA (1)...(19): siRNA sense strand
caaucaaccgcucuaugga

SEQ ID NO: 604797 - RNA, 19 nt, Homo sapiens
  misc_RNA (1)...(19): siRNA sense strand
gggcauacggaaaguacug

SEQ ID NO: 604798 - RNA, 19 nt, Homo sapiens
  misc_RNA (1)...(19): siRNA sense strand
cuggacauuugagcgaaua

SEQ ID NO: 604799 - RNA, 19 nt, Homo sapiens
  misc_RNA (1)...(19): siRNA sense strand
aguaagaagagaaccuaaa

SEQ ID NO: 604800 - RNA, 19 nt, Homo sapiens
  misc_RNA (1)...(19): siRNA sense strand
ugaccagguugcccacaag

SEQ ID NO: 604801 - RNA, 19 nt, Homo sapiens
  misc_RNA (1)...(19): siRNA sense strand
guaccaaguuuugaagaug

SEQ ID NO: 604802 - RNA, 19 nt, Homo sapiens
  misc_RNA (1)...(19): siRNA sense strand
gaaauacuggggcaaguuc

SEQ ID NO: 604803 - RNA, 19 nt, Homo sapiens
  misc_RNA (1)...(19): siRNA sense strand
agagaugggugggcguugu

SEQ ID NO: 604804 - RNA, 19 nt, Homo sapiens
  misc_RNA (1)...(19): siRNA sense strand
gggaggcaaaggugcuauu

SEQ ID NO: 604805 - RNA, 19 nt, Homo sapiens
  misc_RNA (1)...(19): siRNA sense strand
ugaauuugaagaagugcaa

SEQ ID NO: 604806 - RNA, 19 nt, Homo sapiens
  misc_RNA (1)...(19): siRNA sense strand
aagaggaaagagaacguaa

SEQ ID NO: 604807 - RNA, 19 nt, Homo sapiens
  misc_RNA (1)...(19): siRNA sense strand
gaacauucgucucuuacug

SEQ ID NO: 604808 - RNA, 19 nt, Homo sapiens
  misc_RNA (1)...(19): siRNA sense strand
ggaggaucaucuucgagua

SEQ ID NO: 604809 - RNA, 19 nt, Homo sapiens
  misc_RNA (1)...(19): siRNA sense strand
gcaacgcccugcucaagau

SEQ ID NO: 604810 - RNA, 19 nt, Homo sapiens
  misc_RNA (1)...(19): siRNA sense strand
ccacaauacugagaacauu

SEQ ID NO: 604811 - RNA, 19 nt, Homo sapiens
  misc_RNA (1)...(19): siRNA sense strand
ccgacaggcugaaguggua

SEQ ID NO: 604812 - RNA, 19 nt, Homo sapiens
  misc_RNA (1)...(19): siRNA sense strand
gcacaguggcuccguggaa

SEQ ID NO: 604813 - RNA, 19 nt, Homo sapiens
  misc_RNA (1)...(19): siRNA sense strand
gcuuucacaucaucuuuga

SEQ ID NO: 604814 - RNA, 19 nt, Homo sapiens
  misc_RNA (1)...(19): siRNA sense strand
gauccaggcccuccacuuc

SEQ ID NO: 604815 - RNA, 19 nt, Homo sapiens
  misc_RNA (1)...(19): siRNA sense strand
gaccaacucucagaaacuc

SEQ ID NO: 604816 - RNA, 19 nt, Homo sapiens
  misc_RNA (1)...(19): siRNA sense strand
gaauccuuguucucacuga

SEQ ID NO: 604817 - RNA, 19 nt, Homo sapiens
  misc_RNA (1)...(19): siRNA sense strand
cugaagugguaccuccuua

SEQ ID NO: 604818 - RNA, 19 nt, Homo sapiens
  misc_RNA (1)...(19): siRNA sense strand
caaagaggaggcccagaug

SEQ ID NO: 604819 - RNA, 19 nt, Homo sapiens
  misc_RNA (1)...(19): siRNA sense strand
gcccuccacuucuccuuga

SEQ ID NO: 604820 - RNA, 19 nt, Homo sapiens
  misc_RNA (1)...(19): siRNA sense strand
gggugcagauccacaauac

SEQ ID NO: 604821 - RNA, 19 nt, Homo sapiens
  misc_RNA (1)...(19): siRNA sense strand
gaggaggcccagaugauca

SEQ ID NO: 604822 - RNA, 19 nt, Homo sapiens
  misc_RNA (1)...(19): siRNA sense strand
gugcagauccacaauacug

SEQ ID NO: 604823 - RNA, 19 nt, Homo sapiens
  misc_RNA (1)...(19): siRNA sense strand
ucaaggccaccaccaaaga

SEQ ID NO: 604824 - RNA, 19 nt, Homo sapiens
  misc_RNA (1)...(19): siRNA sense strand
cgucaaggccaccaccaaa

SEQ ID NO: 604825 - RNA, 19 nt, Homo sapiens
  misc_RNA (1)...(19): siRNA sense strand
acccacaucugccugaaga

SEQ ID NO: 604826 - RNA, 19 nt, Homo sapiens
  misc_RNA (1)...(19): siRNA sense strand
ggugaccaacucucagaaa

SEQ ID NO: 604827 - RNA, 19 nt, Homo sapiens
  misc_RNA (1)...(19): siRNA sense strand
ggagagccgaauccuuguu

SEQ ID NO: 604828 - RNA, 19 nt, Homo sapiens
  misc_RNA (1)...(19): siRNA sense strand
gagagccgaauccuuguuc

SEQ ID NO: 604829 - RNA, 19 nt, Homo sapiens
  misc_RNA (1)...(19): siRNA sense strand
aaagaggaggcccagauga

SEQ ID NO: 604830 - RNA, 19 nt, Homo sapiens
  misc_RNA (1)...(19): siRNA sense strand
acaaagaggaggcccagau

SEQ ID NO: 604831 - RNA, 19 nt, Homo sapiens
  misc_RNA (1)...(19): siRNA sense strand
gauccacaauacugagaac

SEQ ID NO: 604832 - RNA, 19 nt, Homo sapiens
  misc_RNA (1)...(19): siRNA sense strand
ggucuggcuuucacaucau

SEQ ID NO: 604833 - RNA, 19 nt, Homo sapiens
  misc_RNA (1)...(19): siRNA sense strand
guggcuccguggaagauga

SEQ ID NO: 604834 - RNA, 19 nt, Homo sapiens
  misc_RNA (1)...(19): siRNA sense strand
gugaccaacucucagaaac

SEQ ID NO: 604835 - RNA, 19 nt, Homo sapiens
  misc_RNA (1)...(19): siRNA sense strand
gaagugguaccuccuuagc

SEQ ID NO: 604836 - RNA, 19 nt, Homo sapiens
  misc_RNA (1)...(19): siRNA sense strand
uugaagacccagucaccua

SEQ ID NO: 604837 - RNA, 19 nt, Homo sapiens
  misc_RNA (1)...(19): siRNA sense strand
ccauccggcucuaccuuca

SEQ ID NO: 604838 - RNA, 19 nt, Homo sapiens
  misc_RNA (1)...(19): siRNA sense strand
aagacccagucaccuacua

SEQ ID NO: 604839 - RNA, 19 nt, Homo sapiens
  misc_RNA (1)...(19): siRNA sense strand
gaggaucaucuucgaguac

SEQ ID NO: 604840 - RNA, 19 nt, Homo sapiens
  misc_RNA (1)...(19): siRNA sense strand
guguucaccugcaucaucu

SEQ ID NO: 604841 - RNA, 19 nt, Homo sapiens
  misc_RNA (1)...(19): siRNA sense strand
uggagcugcuggugcauca

SEQ ID NO: 604842 - RNA, 19 nt, Homo sapiens
  misc_RNA (1)...(19): siRNA sense strand
uggucuggcuuucacauca

SEQ ID NO: 604843 - RNA, 19 nt, Homo sapiens
  misc_RNA (1)...(19): siRNA sense strand
caaggccaccaccaaagau

SEQ ID NO: 604844 - RNA, 19 nt, Homo sapiens
  misc_RNA (1)...(19): siRNA sense strand
uuucacaucaucuuugaga

SEQ ID NO: 604845 - RNA, 19 nt, Homo sapiens
  misc_RNA (1)...(19): siRNA sense strand
gcugguggaugcgauucug

SEQ ID NO: 604846 - RNA, 19 nt, Homo sapiens
  misc_RNA (1)...(19): siRNA sense strand
cugagcugcuggagaggaa

SEQ ID NO: 604847 - RNA, 19 nt, Homo sapiens
  misc_RNA (1)...(19): siRNA sense strand
aaacuccagcugcccgaaa

SEQ ID NO: 604848 - RNA, 19 nt, Homo sapiens
  misc_RNA (1)...(19): siRNA sense strand
gaacauucgucucuuacug

SEQ ID NO: 604849 - RNA, 19 nt, Homo sapiens
  misc_RNA (1)...(19): siRNA sense strand
ggaggaucaucuucgagua

SEQ ID NO: 604850 - RNA, 19 nt, Homo sapiens
  misc_RNA (1)...(19): siRNA sense strand
gcaacgcccugcucaagau

SEQ ID NO: 604851 - RNA, 19 nt, Homo sapiens
  misc_RNA (1)...(19): siRNA sense strand
ccacaauacugagaacauu

SEQ ID NO: 604852 - RNA, 19 nt, Homo sapiens
  misc_RNA (1)...(19): siRNA sense strand
gaauccuuguucucacuga

SEQ ID NO: 604853 - RNA, 19 nt, Homo sapiens
  misc_RNA (1)...(19): siRNA sense strand
caaagaggaggcccagaug

SEQ ID NO: 604854 - RNA, 19 nt, Homo sapiens
  misc_RNA (1)...(19): siRNA sense strand
gggugcagauccacaauac

SEQ ID NO: 604855 - RNA, 19 nt, Homo sapiens
  misc_RNA (1)...(19): siRNA sense strand
gugcagauccacaauacug

SEQ ID NO: 604856 - RNA, 19 nt, Homo sapiens
  misc_RNA (1)...(19): siRNA sense strand
ucaaggccaccaccaaaga

SEQ ID NO: 604857 - RNA, 19 nt, Homo sapiens
  misc_RNA (1)...(19): siRNA sense strand
cgucaaggccaccaccaaa

SEQ ID NO: 604858 - RNA, 19 nt, Homo sapiens
  misc_RNA (1)...(19): siRNA sense strand
ggagagccgaauccuuguu

SEQ ID NO: 604859 - RNA, 19 nt, Homo sapiens
  misc_RNA (1)...(19): siRNA sense strand
aaagaggaggcccagauga

SEQ ID NO: 604860 - RNA, 19 nt, Homo sapiens
  misc_RNA (1)...(19): siRNA sense strand
acaaagaggaggcccagau

SEQ ID NO: 604861 - RNA, 19 nt, Homo sapiens
  misc_RNA (1)...(19): siRNA sense strand
gagagccgaauccuuguuc

SEQ ID NO: 604862 - RNA, 19 nt, Homo sapiens
  misc_RNA (1)...(19): siRNA sense strand
gauccacaauacugagaac

SEQ ID NO: 604863 - RNA, 19 nt, Homo sapiens
  misc_RNA (1)...(19): siRNA sense strand
uugaagacccagucaccua

SEQ ID NO: 604864 - RNA, 19 nt, Homo sapiens
  misc_RNA (1)...(19): siRNA sense strand
aagacccagucaccuacua

SEQ ID NO: 604865 - RNA, 19 nt, Homo sapiens
  misc_RNA (1)...(19): siRNA sense strand
guguucaccugcaucaucu

SEQ ID NO: 604866 - RNA, 19 nt, Homo sapiens
  misc_RNA (1)...(19): siRNA sense strand
gaggaucaucuucgaguac

SEQ ID NO: 604867 - RNA, 19 nt, Homo sapiens
  misc_RNA (1)...(19): siRNA sense strand
uggagcugcuggugcauca

SEQ ID NO: 604868 - RNA, 19 nt, Homo sapiens
  misc_RNA (1)...(19): siRNA sense strand
caaggccaccaccaaagau

SEQ ID NO: 604869 - RNA, 19 nt, Homo sapiens
  misc_RNA (1)...(19): siRNA sense strand
cugagcugcuggagaggaa

SEQ ID NO: 604870 - RNA, 19 nt, Homo sapiens
  misc_RNA (1)...(19): siRNA sense strand
gcugguggaugcgauucug

SEQ ID NO: 604871 - RNA, 19 nt, Homo sapiens
  misc_RNA (1)...(19): siRNA sense strand
gaagagaacuacuccuuuu

SEQ ID NO: 604872 - RNA, 19 nt, Homo sapiens
  misc_RNA (1)...(19): siRNA sense strand
ggaagagaacuacuccuuu

SEQ ID NO: 604873 - RNA, 19 nt, Homo sapiens
  misc_RNA (1)...(19): siRNA sense strand
ucaaaugcauggacaagga

SEQ ID NO: 604874 - RNA, 19 nt, Homo sapiens
  misc_RNA (1)...(19): siRNA sense strand
gagcaagucaggaccaaga

SEQ ID NO: 604875 - RNA, 19 nt, Homo sapiens
  misc_RNA (1)...(19): siRNA sense strand
ggaccugaacgcccucaaa

SEQ ID NO: 604876 - RNA, 19 nt, Homo sapiens
  misc_RNA (1)...(19): siRNA sense strand
guucacaacaucaucaaau

SEQ ID NO: 604877 - RNA, 19 nt, Homo sapiens
  misc_RNA (1)...(19): siRNA sense strand
caagucaggaccaagaaug

SEQ ID NO: 604878 - RNA, 19 nt, Homo sapiens
  misc_RNA (1)...(19): siRNA sense strand
cgagggaggaagagaacua

SEQ ID NO: 604879 - RNA, 19 nt, Homo sapiens
  misc_RNA (1)...(19): siRNA sense strand
aaagcaaguuccaggagau

SEQ ID NO: 604880 - RNA, 19 nt, Homo sapiens
  misc_RNA (1)...(19): siRNA sense strand
gcaagucaggaccaagaau

SEQ ID NO: 604881 - RNA, 19 nt, Homo sapiens
  misc_RNA (1)...(19): siRNA sense strand
gacaggcggaggauguauu

SEQ ID NO: 604882 - RNA, 19 nt, Homo sapiens
  misc_RNA (1)...(19): siRNA sense strand
gggagcaagucaggaccaa

SEQ ID NO: 604883 - RNA, 19 nt, Homo sapiens
  misc_RNA (1)...(19): siRNA sense strand
gcgcgagggaggaagagaa

SEQ ID NO: 604884 - RNA, 19 nt, Homo sapiens
  misc_RNA (1)...(19): siRNA sense strand
uucacaacaucaucaaaug

SEQ ID NO: 604885 - RNA, 19 nt, Homo sapiens
  misc_RNA (1)...(19): siRNA sense strand
gcgacaggcggaggaugua

SEQ ID NO: 604886 - RNA, 19 nt, Homo sapiens
  misc_RNA (1)...(19): siRNA sense strand
uaccuuugguucacaacau

SEQ ID NO: 604887 - RNA, 19 nt, Homo sapiens
  misc_RNA (1)...(19): siRNA sense strand
gaugauaauugaucgcuua

SEQ ID NO: 604888 - RNA, 19 nt, Homo sapiens
  misc_RNA (1)...(19): siRNA sense strand
ggaagaccacuguuaauua

SEQ ID NO: 604889 - RNA, 19 nt, Homo sapiens
  misc_RNA (1)...(19): siRNA sense strand
gaagcgauauugaaagaaa

SEQ ID NO: 604890 - RNA, 19 nt, Homo sapiens
  misc_RNA (1)...(19): siRNA sense strand
gaagucaaauguaagauug

SEQ ID NO: 604891 - RNA, 19 nt, Homo sapiens
  misc_RNA (1)...(19): siRNA sense strand
gaauauaccucagauuaug

SEQ ID NO: 604892 - RNA, 19 nt, Homo sapiens
  misc_RNA (1)...(19): siRNA sense strand
gaaccuccuuguuggaaua

SEQ ID NO: 604893 - RNA, 19 nt, Homo sapiens
  misc_RNA (1)...(19): siRNA sense strand
ucaaacagcuacagugauu

SEQ ID NO: 604894 - RNA, 19 nt, Homo sapiens
  misc_RNA (1)...(19): siRNA sense strand
gaacuggaauccucgaaau

SEQ ID NO: 604895 - RNA, 19 nt, Homo sapiens
  misc_RNA (1)...(19): siRNA sense strand
gaagaaggauauagaacug

SEQ ID NO: 604896 - RNA, 19 nt, Homo sapiens
  misc_RNA (1)...(19): siRNA sense strand
ucaagaaccuaaauaguga

SEQ ID NO: 604897 - RNA, 19 nt, Homo sapiens
  misc_RNA (1)...(19): siRNA sense strand
ggaagcaagugcagauuug

SEQ ID NO: 604898 - RNA, 19 nt, Homo sapiens
  misc_RNA (1)...(19): siRNA sense strand
gaaggaagcccaagcaugu

SEQ ID NO: 604899 - RNA, 19 nt, Homo sapiens
  misc_RNA (1)...(19): siRNA sense strand
gaagaccacuguuaauuac

SEQ ID NO: 604900 - RNA, 19 nt, Homo sapiens
  misc_RNA (1)...(19): siRNA sense strand
gcagaaaggaucauugaaa

SEQ ID NO: 604901 - RNA, 19 nt, Homo sapiens
  misc_RNA (1)...(19): siRNA sense strand
uggaagugcugauaaauuu

SEQ ID NO: 604902 - RNA, 19 nt, Homo sapiens
  misc_RNA (1)...(19): siRNA sense strand
gaaccuaaauagugagaau

SEQ ID NO: 604903 - RNA, 19 nt, Homo sapiens
  misc_RNA (1)...(19): siRNA sense strand
guaagagucauacgaauaa

SEQ ID NO: 604904 - RNA, 19 nt, Homo sapiens
  misc_RNA (1)...(19): siRNA sense strand
gauaauugaucgcuuagau

SEQ ID NO: 604905 - RNA, 19 nt, Homo sapiens
  misc_RNA (1)...(19): siRNA sense strand
gcaaagagaauguuaccaa

SEQ ID NO: 604906 - RNA, 19 nt, Homo sapiens
  misc_RNA (1)...(19): siRNA sense strand
aaacaacagucaaaucaga

SEQ ID NO: 604907 - RNA, 19 nt, Homo sapiens
  misc_RNA (1)...(19): siRNA sense strand
ugaaaccgaugaagucaaa

SEQ ID NO: 604908 - RNA, 19 nt, Homo sapiens
  misc_RNA (1)...(19): siRNA sense strand
gaagagugcugaaaagauu

SEQ ID NO: 604909 - RNA, 19 nt, Homo sapiens
  misc_RNA (1)...(19): siRNA sense strand
ggacagccuuugcuauuuc

SEQ ID NO: 604910 - RNA, 19 nt, Homo sapiens
  misc_RNA (1)...(19): siRNA sense strand
ccgaugaagucaaauguaa

SEQ ID NO: 604911 - RNA, 19 nt, Homo sapiens
  misc_RNA (1)...(19): siRNA sense strand
ugaaggaaaucagucauaa

SEQ ID NO: 604912 - RNA, 19 nt, Homo sapiens
  misc_RNA (1)...(19): siRNA sense strand
caaacugguugcucuacua

SEQ ID NO: 604913 - RNA, 19 nt, Homo sapiens
  misc_RNA (1)...(19): siRNA sense strand
ggacguuaauuaugagaga

SEQ ID NO: 604914 - RNA, 19 nt, Homo sapiens
  misc_RNA (1)...(19): siRNA sense strand
caaaucagacagaauauug

SEQ ID NO: 604915 - RNA, 19 nt, Homo sapiens
  misc_RNA (1)...(19): siRNA sense strand
aaugagggauuucagcuua

SEQ ID NO: 604916 - RNA, 19 nt, Homo sapiens
  misc_RNA (1)...(19): siRNA sense strand
aaaggucacuggagaagaa

SEQ ID NO: 604917 - RNA, 19 nt, Homo sapiens
  misc_RNA (1)...(19): siRNA sense strand
cuacagagaaggcaagaua

SEQ ID NO: 604918 - RNA, 19 nt, Homo sapiens
  misc_RNA (1)...(19): siRNA sense strand
gcaugagaauggugcagua

SEQ ID NO: 604919 - RNA, 19 nt, Homo sapiens
  misc_RNA (1)...(19): siRNA sense strand
ucauggaguuguuccuuua

SEQ ID NO: 604920 - RNA, 19 nt, Homo sapiens
  misc_RNA (1)...(19): siRNA sense strand
ggaaucaaaugaccaagag

SEQ ID NO: 604921 - RNA, 19 nt, Homo sapiens
  misc_RNA (1)...(19): siRNA sense strand
ccucaaaucagacagaaua

SEQ ID NO: 604922 - RNA, 19 nt, Homo sapiens
  misc_RNA (1)...(19): siRNA sense strand
uaucacagaucauggaguu

SEQ ID NO: 604923 - RNA, 19 nt, Homo sapiens
  misc_RNA (1)...(19): siRNA sense strand
uaaagaagccauccgcaaa

SEQ ID NO: 604924 - RNA, 19 nt, Homo sapiens
  misc_RNA (1)...(19): siRNA sense strand
gcgguuagcugcugucaca

SEQ ID NO: 604925 - RNA, 19 nt, Homo sapiens
  misc_RNA (1)...(19): siRNA sense strand
caaacagucuuggaaucua

SEQ ID NO: 604926 - RNA, 19 nt, Homo sapiens
  misc_RNA (1)...(19): siRNA sense strand
gagaugggaaccaagcuua

SEQ ID NO: 604927 - RNA, 19 nt, Homo sapiens
  misc_RNA (1)...(19): siRNA sense strand
cagguuauguugucaguga

SEQ ID NO: 604928 - RNA, 19 nt, Homo sapiens
  misc_RNA (1)...(19): siRNA sense strand
ggagaaugcugccaagaac

SEQ ID NO: 604929 - RNA, 19 nt, Homo sapiens
  misc_RNA (1)...(19): siRNA sense strand
cuaccgggcugcaaucaaa

SEQ ID NO: 604930 - RNA, 19 nt, Homo sapiens
  misc_RNA (1)...(19): siRNA sense strand
gcaguaagagucauacgaa

SEQ ID NO: 604931 - RNA, 19 nt, Homo sapiens
  misc_RNA (1)...(19): siRNA sense strand
ggugagacucugugcauua

SEQ ID NO: 604932 - RNA, 19 nt, Homo sapiens
  misc_RNA (1)...(19): siRNA sense strand
gaagauugcuaugcugcuu

SEQ ID NO: 604933 - RNA, 19 nt, Homo sapiens
  misc_RNA (1)...(19): siRNA sense strand
uagaacugcucaaacguuu

SEQ ID NO: 604934 - RNA, 19 nt, Homo sapiens
  misc_RNA (1)...(19): siRNA sense strand
gaauacaaagccauugaaa

SEQ ID NO: 604935 - RNA, 19 nt, Homo sapiens
  misc_RNA (1)...(19): siRNA sense strand
aagagaauguuaccaaguu

SEQ ID NO: 604936 - RNA, 19 nt, Homo sapiens
  misc_RNA (1)...(19): siRNA sense strand
gcugauaaauuugcuugaa

SEQ ID NO: 604937 - RNA, 19 nt, Homo sapiens
  misc_RNA (1)...(19): siRNA sense strand
ucaagaaaccugccaguug

SEQ ID NO: 604938 - RNA, 19 nt, Homo sapiens
  misc_RNA (1)...(19): siRNA sense strand
agaagcuggugaaauauuu

SEQ ID NO: 604939 - RNA, 19 nt, Homo sapiens
  misc_RNA (1)...(19): siRNA sense strand
acacggaagagcacaauua

SEQ ID NO: 604940 - RNA, 19 nt, Homo sapiens
  misc_RNA (1)...(19): siRNA sense strand
gcagcugucacgcuuguua

SEQ ID NO: 604941 - RNA, 19 nt, Homo sapiens
  misc_RNA (1)...(19): siRNA sense strand
guaaagcuucuacuggaua

SEQ ID NO: 604942 - RNA, 19 nt, Homo sapiens
  misc_RNA (1)...(19): siRNA sense strand
ggagaagaaccaaauuaau

SEQ ID NO: 604943 - RNA, 19 nt, Homo sapiens
  misc_RNA (1)...(19): siRNA sense strand
gaaauguuccaucagcaaa

SEQ ID NO: 604944 - RNA, 19 nt, Homo sapiens
  misc_RNA (1)...(19): siRNA sense strand
gaagcuggugaaauauuua

SEQ ID NO: 604945 - RNA, 19 nt, Homo sapiens
  misc_RNA (1)...(19): siRNA sense strand
aagcauguguugaagcuaa

SEQ ID NO: 604946 - RNA, 19 nt, Homo sapiens
  misc_RNA (1)...(19): siRNA sense strand
gaaccugaaaguaugauga

SEQ ID NO: 604947 - RNA, 19 nt, Homo sapiens
  misc_RNA (1)...(19): siRNA sense strand
uaacagagaccccauagua

SEQ ID NO: 604948 - RNA, 19 nt, Homo sapiens
  misc_RNA (1)...(19): siRNA sense strand
ugaaacaacagucaaauca

SEQ ID NO: 604949 - RNA, 19 nt, Homo sapiens
  misc_RNA (1)...(19): siRNA sense strand
gaaaugguucguuccuuug

SEQ ID NO: 604950 - RNA, 19 nt, Homo sapiens
  misc_RNA (1)...(19): siRNA sense strand
gagacucugugcauuacuu

SEQ ID NO: 604951 - RNA, 19 nt, Homo sapiens
  misc_RNA (1)...(19): siRNA sense strand
ccacuugaauggaacacaa

SEQ ID NO: 604952 - RNA, 19 nt, Homo sapiens
  misc_RNA (1)...(19): siRNA sense strand
caaagacauuucugguuca

SEQ ID NO: 604953 - RNA, 19 nt, Homo sapiens
  misc_RNA (1)...(19): siRNA sense strand
agcgauagcuccucagaaa

SEQ ID NO: 604954 - RNA, 19 nt, Homo sapiens
  misc_RNA (1)...(19): siRNA sense strand
ggaauaaaccaagcucuuc

SEQ ID NO: 604955 - RNA, 19 nt, Homo sapiens
  misc_RNA (1)...(19): siRNA sense strand
aagaaguacuugugaaugu

SEQ ID NO: 604956 - RNA, 19 nt, Homo sapiens
  misc_RNA (1)...(19): siRNA sense strand
gaagaaguacuugugaaug

SEQ ID NO: 604957 - RNA, 19 nt, Homo sapiens
  misc_RNA (1)...(19): siRNA sense strand
gagacuaucgcgaauguug

SEQ ID NO: 604958 - RNA, 19 nt, Homo sapiens
  misc_RNA (1)...(19): siRNA sense strand
ggaaaucagucauaauccu

SEQ ID NO: 604959 - RNA, 19 nt, Homo sapiens
  misc_RNA (1)...(19): siRNA sense strand
gugcagauuugccaucaga

SEQ ID NO: 604960 - RNA, 19 nt, Homo sapiens
  misc_RNA (1)...(19): siRNA sense strand
ggauauagaacugcucaaa

SEQ ID NO: 604961 - RNA, 19 nt, Homo sapiens
  misc_RNA (1)...(19): siRNA sense strand
cgacagcucaggccuugua

SEQ ID NO: 604962 - RNA, 19 nt, Homo sapiens
  misc_RNA (1)...(19): siRNA sense strand
aaacagucuuggaaucuau

SEQ ID NO: 604963 - RNA, 19 nt, Homo sapiens
  misc_RNA (1)...(19): siRNA sense strand
ugaaucagguuauguuguc

SEQ ID NO: 604964 - RNA, 19 nt, Homo sapiens
  misc_RNA (1)...(19): siRNA sense strand
ugcguuaucugaaaucaaa

SEQ ID NO: 604965 - RNA, 19 nt, Homo sapiens
  misc_RNA (1)...(19): siRNA sense strand
gaaguucuggcaaguguau

SEQ ID NO: 604966 - RNA, 19 nt, Homo sapiens
  misc_RNA (1)...(19): siRNA sense strand
gcaguagaaccugaaagua

SEQ ID NO: 604967 - RNA, 19 nt, Homo sapiens
  misc_RNA (1)...(19): siRNA sense strand
acaaagccauugaaaccuu

SEQ ID NO: 604968 - RNA, 19 nt, Homo sapiens
  misc_RNA (1)...(19): siRNA sense strand
gaugaagucaaauguaaga

SEQ ID NO: 604969 - RNA, 19 nt, Homo sapiens
  misc_RNA (1)...(19): siRNA sense strand
gaaaucaccccucuaaaug

SEQ ID NO: 604970 - RNA, 19 nt, Homo sapiens
  misc_RNA (1)...(19): siRNA sense strand
cggaagagcacaauuacuu

SEQ ID NO: 604971 - RNA, 19 nt, Homo sapiens
  misc_RNA (1)...(19): siRNA sense strand
gaggaaacuguuagcgaua

SEQ ID NO: 604972 - RNA, 19 nt, Homo sapiens
  misc_RNA (1)...(19): siRNA sense strand
ggaauacaaagccauugaa

SEQ ID NO: 604973 - RNA, 19 nt, Homo sapiens
  misc_RNA (1)...(19): siRNA sense strand
cagaaaggaucauugaaaa

SEQ ID NO: 604974 - RNA, 19 nt, Homo sapiens
  misc_RNA (1)...(19): siRNA sense strand
gauccugaaagugaaauua

SEQ ID NO: 604975 - RNA, 19 nt, Homo sapiens
  misc_RNA (1)...(19): siRNA sense strand
uaaagcuucuacuggauau

SEQ ID NO: 604976 - RNA, 19 nt, Homo sapiens
  misc_RNA (1)...(19): siRNA sense strand
gggagaaugcugccaagaa

SEQ ID NO: 604977 - RNA, 19 nt, Homo sapiens
  misc_RNA (1)...(19): siRNA sense strand
gucaagaaccuaaauagug

SEQ ID NO: 604978 - RNA, 19 nt, Homo sapiens
  misc_RNA (1)...(19): siRNA sense strand
ucauaauccucaaaucaga

SEQ ID NO: 604979 - RNA, 19 nt, Homo sapiens
  misc_RNA (1)...(19): siRNA sense strand
cagauuugccaucagaaua

SEQ ID NO: 604980 - RNA, 19 nt, Homo sapiens
  misc_RNA (1)...(19): siRNA sense strand
ugaggaagaugaagaacca

SEQ ID NO: 604981 - RNA, 19 nt, Homo sapiens
  misc_RNA (1)...(19): siRNA sense strand
ucgcgaauguugccaaguu

SEQ ID NO: 604982 - RNA, 19 nt, Homo sapiens
  misc_RNA (1)...(19): siRNA sense strand
guuggugguuuggaacuua

SEQ ID NO: 604983 - RNA, 19 nt, Homo sapiens
  misc_RNA (1)...(19): siRNA sense strand
gaauggaacacaaguuugg

SEQ ID NO: 604984 - RNA, 19 nt, Homo sapiens
  misc_RNA (1)...(19): siRNA sense strand
caguagaaccugaaaguau

SEQ ID NO: 604985 - RNA, 19 nt, Homo sapiens
  misc_RNA (1)...(19): siRNA sense strand
gcucuucuugugaauguua

SEQ ID NO: 604986 - RNA, 19 nt, Homo sapiens
  misc_RNA (1)...(19): siRNA sense strand
uuaccaaguuucgggaaua

SEQ ID NO: 604987 - RNA, 19 nt, Homo sapiens
  misc_RNA (1)...(19): siRNA sense strand
gcaggaagaugaggccaua

SEQ ID NO: 604988 - RNA, 19 nt, Homo sapiens
  misc_RNA (1)...(19): siRNA sense strand
gaggauuucccaaagauuu

SEQ ID NO: 604989 - RNA, 19 nt, Homo sapiens
  misc_RNA (1)...(19): siRNA sense strand
ccgaagugcucguccagua

SEQ ID NO: 604990 - RNA, 19 nt, Homo sapiens
  misc_RNA (1)...(19): siRNA sense strand
gggaugacgucacgcaguu

SEQ ID NO: 604991 - RNA, 19 nt, Homo sapiens
  misc_RNA (1)...(19): siRNA sense strand
ggacacccauggagugauc

SEQ ID NO: 604992 - RNA, 19 nt, Homo sapiens
  misc_RNA (1)...(19): siRNA sense strand
gggaggagaucgagcagau

SEQ ID NO: 604993 - RNA, 19 nt, Homo sapiens
  misc_RNA (1)...(19): siRNA sense strand
gggagauccuggcgcuaua

SEQ ID NO: 604994 - RNA, 19 nt, Homo sapiens
  misc_RNA (1)...(19): siRNA sense strand
ggaacaagaggauucaaug

SEQ ID NO: 604995 - RNA, 19 nt, Homo sapiens
  misc_RNA (1)...(19): siRNA sense strand
caaaggugaugaaggaaca

SEQ ID NO: 604996 - RNA, 19 nt, Homo sapiens
  misc_RNA (1)...(19): siRNA sense strand
gaagugcucguccaguauu

SEQ ID NO: 604997 - RNA, 19 nt, Homo sapiens
  misc_RNA (1)...(19): siRNA sense strand
ccauucagaugcccaagaa

SEQ ID NO: 604998 - RNA, 19 nt, Homo sapiens
  misc_RNA (1)...(19): siRNA sense strand
cagcaaccaucaagacuuc

SEQ ID NO: 604999 - RNA, 19 nt, Homo sapiens
  misc_RNA (1)...(19): siRNA sense strand
gagcugagcccggagacua

SEQ ID NO: 605000 - RNA, 19 nt, Homo sapiens
  misc_RNA (1)...(19): siRNA sense strand
gggaacaucugguggugau

SEQ ID NO: 605001 - RNA, 19 nt, Homo sapiens
  misc_RNA (1)...(19): siRNA sense strand
gaacagaaggagcuggaau

SEQ ID NO: 605002 - RNA, 19 nt, Homo sapiens
  misc_RNA (1)...(19): siRNA sense strand
gaggagaucgagcagauga

SEQ ID NO: 605003 - RNA, 19 nt, Homo sapiens
  misc_RNA (1)...(19): siRNA sense strand
gaacaagaggauucaaugg

SEQ ID NO: 605004 - RNA, 19 nt, Homo sapiens
  misc_RNA (1)...(19): siRNA sense strand
gaaguuggagucccugguu

SEQ ID NO: 605005 - RNA, 19 nt, Homo sapiens
  misc_RNA (1)...(19): siRNA sense strand
ucagggaccucuaggauac

SEQ ID NO: 605006 - RNA, 19 nt, Homo sapiens
  misc_RNA (1)...(19): siRNA sense strand
cagaagggccugcgggauu

SEQ ID NO: 605007 - RNA, 19 nt, Homo sapiens
  misc_RNA (1)...(19): siRNA sense strand
gucaaagaauucagagaug

SEQ ID NO: 605008 - RNA, 19 nt, Homo sapiens
  misc_RNA (1)...(19): siRNA sense strand
ggacagaagggcaccaaag

SEQ ID NO: 605009 - RNA, 19 nt, Homo sapiens
  misc_RNA (1)...(19): siRNA sense strand
ugaaucaugugaacagaag

SEQ ID NO: 605010 - RNA, 19 nt, Homo sapiens
  misc_RNA (1)...(19): siRNA sense strand
gaagggugaggauggcuuu

SEQ ID NO: 605011 - RNA, 19 nt, Homo sapiens
  misc_RNA (1)...(19): siRNA sense strand
ggaaagaccccaaaaccaa

SEQ ID NO: 605012 - RNA, 19 nt, Homo sapiens
  misc_RNA (1)...(19): siRNA sense strand
caggaggauuucccaaaga

SEQ ID NO: 605013 - RNA, 19 nt, Homo sapiens
  misc_RNA (1)...(19): siRNA sense strand
gaacccaggcccaguugga

SEQ ID NO: 605014 - RNA, 19 nt, Homo sapiens
  misc_RNA (1)...(19): siRNA sense strand
ccaggaggauuucccaaag

SEQ ID NO: 605015 - RNA, 19 nt, Homo sapiens
  misc_RNA (1)...(19): siRNA sense strand
caaaggcccaccugguauu

SEQ ID NO: 605016 - RNA, 19 nt, Homo sapiens
  misc_RNA (1)...(19): siRNA sense strand
ccacccaggucucauugga

SEQ ID NO: 605017 - RNA, 19 nt, Homo sapiens
  misc_RNA (1)...(19): siRNA sense strand
ccauuggccuacaggguuu

SEQ ID NO: 605018 - RNA, 19 nt, Homo sapiens
  misc_RNA (1)...(19): siRNA sense strand
agccaaaggugaugaagga

SEQ ID NO: 605019 - RNA, 19 nt, Homo sapiens
  misc_RNA (1)...(19): siRNA sense strand
caucuuuggugcccguauu

SEQ ID NO: 605020 - RNA, 19 nt, Homo sapiens
  misc_RNA (1)...(19): siRNA sense strand
ucucuuacguggacucaga

SEQ ID NO: 605021 - RNA, 19 nt, Homo sapiens
  misc_RNA (1)...(19): siRNA sense strand
gaagggagccaagggagau

SEQ ID NO: 605022 - RNA, 19 nt, Homo sapiens
  misc_RNA (1)...(19): siRNA sense strand
gaagggagaaacaggagau

SEQ ID NO: 605023 - RNA, 19 nt, Homo sapiens
  misc_RNA (1)...(19): siRNA sense strand
ugggagcccuggccugaaa

SEQ ID NO: 605024 - RNA, 19 nt, Homo sapiens
  misc_RNA (1)...(19): siRNA sense strand
gaaggaacaagaggauuca

SEQ ID NO: 605025 - RNA, 19 nt, Homo sapiens
  misc_RNA (1)...(19): siRNA sense strand
ucacagagcccagagaucu

SEQ ID NO: 605026 - RNA, 19 nt, Homo sapiens
  misc_RNA (1)...(19): siRNA sense strand
cccaaaggcccaccuggua

SEQ ID NO: 605027 - RNA, 19 nt, Homo sapiens
  misc_RNA (1)...(19): siRNA sense strand
gcagcaaccaucaagacuu

SEQ ID NO: 605028 - RNA, 19 nt, Homo sapiens
  misc_RNA (1)...(19): siRNA sense strand
agaagggccugcgggauug

SEQ ID NO: 605029 - RNA, 19 nt, Homo sapiens
  misc_RNA (1)...(19): siRNA sense strand
ggauggaagccgucugaug

SEQ ID NO: 605030 - RNA, 19 nt, Homo sapiens
  misc_RNA (1)...(19): siRNA sense strand
ucagggagcagcaggagaa

SEQ ID NO: 605031 - RNA, 19 nt, Homo sapiens
  misc_RNA (1)...(19): siRNA sense strand
ggagagaaggguccucaag

SEQ ID NO: 605032 - RNA, 19 nt, Homo sapiens
  misc_RNA (1)...(19): siRNA sense strand
aggagagccugcaguguug

SEQ ID NO: 605033 - RNA, 19 nt, Homo sapiens
  misc_RNA (1)...(19): siRNA sense strand
ccaaaggcccaccugguau

SEQ ID NO: 605034 - RNA, 19 nt, Homo sapiens
  misc_RNA (1)...(19): siRNA sense strand
ucaaggguguggacggaau

SEQ ID NO: 605035 - RNA, 19 nt, Homo sapiens
  misc_RNA (1)...(19): siRNA sense strand
gggagaaacaggagaugug

SEQ ID NO: 605036 - RNA, 19 nt, Homo sapiens
  misc_RNA (1)...(19): siRNA sense strand
gaugaaggaacaagaggau

SEQ ID NO: 605037 - RNA, 19 nt, Homo sapiens
  misc_RNA (1)...(19): siRNA sense strand
ggagauguggguccuaugg

SEQ ID NO: 605038 - RNA, 19 nt, Homo sapiens
  misc_RNA (1)...(19): siRNA sense strand
ugaaggaacaagaggauuc

SEQ ID NO: 605039 - RNA, 19 nt, Homo sapiens
  misc_RNA (1)...(19): siRNA sense strand
gugaagggccagucuguca

SEQ ID NO: 605040 - RNA, 19 nt, Homo sapiens
  misc_RNA (1)...(19): siRNA sense strand
aaggagagccugcaguguu

SEQ ID NO: 605041 - RNA, 19 nt, Homo sapiens
  misc_RNA (1)...(19): siRNA sense strand
agacuucacaggccacaaa

SEQ ID NO: 605042 - RNA, 19 nt, Homo sapiens
  misc_RNA (1)...(19): siRNA sense strand
gaagggagaucggggacuu

SEQ ID NO: 605043 - RNA, 19 nt, Homo sapiens
  misc_RNA (1)...(19): siRNA sense strand
gaacccugguccuguuggu

SEQ ID NO: 605044 - RNA, 19 nt, Homo sapiens
  misc_RNA (1)...(19): siRNA sense strand
ugacauaggcgugaaaggu

SEQ ID NO: 605045 - RNA, 19 nt, Homo sapiens
  misc_RNA (1)...(19): siRNA sense strand
ggaggauuucccaaagauu

SEQ ID NO: 605046 - RNA, 19 nt, Homo sapiens
  misc_RNA (1)...(19): siRNA sense strand
ucacgcaguucucuuacgu

SEQ ID NO: 605047 - RNA, 19 nt, Homo sapiens
  misc_RNA (1)...(19): siRNA sense strand
gaggagaaguggguuucca

SEQ ID NO: 605048 - RNA, 19 nt, Homo sapiens
  misc_RNA (1)...(19): siRNA sense strand
gcacccacucgccagcuuu

SEQ ID NO: 605049 - RNA, 19 nt, Homo sapiens
  misc_RNA (1)...(19): siRNA sense strand
ugucaaagaauucagagau

SEQ ID NO: 605050 - RNA, 19 nt, Homo sapiens
  misc_RNA (1)...(19): siRNA sense strand
cgaagugcucguccaguau

SEQ ID NO: 605051 - RNA, 19 nt, Homo sapiens
  misc_RNA (1)...(19): siRNA sense strand
gagacuagccccuauguca

SEQ ID NO: 605052 - RNA, 19 nt, Homo sapiens
  misc_RNA (1)...(19): siRNA sense strand
gaaccaggagagucaggau

SEQ ID NO: 605053 - RNA, 19 nt, Homo sapiens
  misc_RNA (1)...(19): siRNA sense strand
ugggacagcuggaaaagaa

SEQ ID NO: 605054 - RNA, 19 nt, Homo sapiens
  misc_RNA (1)...(19): siRNA sense strand
ccauggagugaucaucuuu

SEQ ID NO: 605055 - RNA, 19 nt, Homo sapiens
  misc_RNA (1)...(19): siRNA sense strand
gcuggaugccuccuucuca

SEQ ID NO: 605056 - RNA, 19 nt, Homo sapiens
  misc_RNA (1)...(19): siRNA sense strand
ccuguccgcuuccuguaug

SEQ ID NO: 605057 - RNA, 19 nt, Homo sapiens
  misc_RNA (1)...(19): siRNA sense strand
gacagaagggcaccaaagg

SEQ ID NO: 605058 - RNA, 19 nt, Homo sapiens
  misc_RNA (1)...(19): siRNA sense strand
uggagaggauggagacaag

SEQ ID NO: 605059 - RNA, 19 nt, Homo sapiens
  misc_RNA (1)...(19): siRNA sense strand
uggagcagcaggagagaaa

SEQ ID NO: 605060 - RNA, 19 nt, Homo sapiens
  misc_RNA (1)...(19): siRNA sense strand
gugcccguauucuggauga

SEQ ID NO: 605061 - RNA, 19 nt, Homo sapiens
  misc_RNA (1)...(19): siRNA sense strand
ccuccugacucucuacagu

SEQ ID NO: 605062 - RNA, 19 nt, Homo sapiens
  misc_RNA (1)...(19): siRNA sense strand
gggccaggauggugcuaag

SEQ ID NO: 605063 - RNA, 19 nt, Homo sapiens
  misc_RNA (1)...(19): siRNA sense strand
aaaccaacagccucacaga

SEQ ID NO: 605064 - RNA, 19 nt, Homo sapiens
  misc_RNA (1)...(19): siRNA sense strand
guggauggaagccgucuga

SEQ ID NO: 605065 - RNA, 19 nt, Homo sapiens
  misc_RNA (1)...(19): siRNA sense strand
ggccucaaccucccucuca

SEQ ID NO: 605066 - RNA, 19 nt, Homo sapiens
  misc_RNA (1)...(19): siRNA sense strand
aggaggauuucccaaagau

SEQ ID NO: 605067 - RNA, 19 nt, Homo sapiens
  misc_RNA (1)...(19): siRNA sense strand
ccacagcagcaaccaucaa

SEQ ID NO: 605068 - RNA, 19 nt, Homo sapiens
  misc_RNA (1)...(19): siRNA sense strand
caucucucaugcucccauu

SEQ ID NO: 605069 - RNA, 19 nt, Homo sapiens
  misc_RNA (1)...(19): siRNA sense strand
ggucucauuggacugauug

SEQ ID NO: 605070 - RNA, 19 nt, Homo sapiens
  misc_RNA (1)...(19): siRNA sense strand
gggacacccaggccaaaga

SEQ ID NO: 605071 - RNA, 19 nt, Homo sapiens
  misc_RNA (1)...(19): siRNA sense strand
ggucugaagggucauaagg

SEQ ID NO: 605072 - RNA, 19 nt, Homo sapiens
  misc_RNA (1)...(19): siRNA sense strand
gggccacccaggucucauu

SEQ ID NO: 605073 - RNA, 19 nt, Homo sapiens
  misc_RNA (1)...(19): siRNA sense strand
aaagaggagaaguggguuu

SEQ ID NO: 605074 - RNA, 19 nt, Homo sapiens
  misc_RNA (1)...(19): siRNA sense strand
ggacacccaggccaaagag

SEQ ID NO: 605075 - RNA, 19 nt, Homo sapiens
  misc_RNA (1)...(19): siRNA sense strand
uggcuuuccuggguucaaa

SEQ ID NO: 605076 - RNA, 19 nt, Homo sapiens
  misc_RNA (1)...(19): siRNA sense strand
gcaguguuggaaccuggua

SEQ ID NO: 605077 - RNA, 19 nt, Homo sapiens
  misc_RNA (1)...(19): siRNA sense strand
gccccuaugucaaagaauu

SEQ ID NO: 605078 - RNA, 19 nt, Homo sapiens
  misc_RNA (1)...(19): siRNA sense strand
ccaggucucauuggacuga

SEQ ID NO: 605079 - RNA, 19 nt, Homo sapiens
  misc_RNA (1)...(19): siRNA sense strand
ucugucacccucauuguug

SEQ ID NO: 605080 - RNA, 19 nt, Homo sapiens
  misc_RNA (1)...(19): siRNA sense strand
gaacgaggugcagcaggau

SEQ ID NO: 605081 - RNA, 19 nt, Homo sapiens
  misc_RNA (1)...(19): siRNA sense strand
gcugguggaccugguuuga

SEQ ID NO: 605082 - RNA, 19 nt, Homo sapiens
  misc_RNA (1)...(19): siRNA sense strand
ugggaagucuggagcuaag

SEQ ID NO: 605083 - RNA, 19 nt, Homo sapiens
  misc_RNA (1)...(19): siRNA sense strand
ggaccucagggaccucuag

SEQ ID NO: 605084 - RNA, 19 nt, Homo sapiens
  misc_RNA (1)...(19): siRNA sense strand
ugaccgagguuuugaugga

SEQ ID NO: 605085 - RNA, 19 nt, Homo sapiens
  misc_RNA (1)...(19): siRNA sense strand
gaagggugaccgagguuuu

SEQ ID NO: 605086 - RNA, 19 nt, Homo sapiens
  misc_RNA (1)...(19): siRNA sense strand
gaccuguccgcuuccugua

SEQ ID NO: 605087 - RNA, 19 nt, Homo sapiens
  misc_RNA (1)...(19): siRNA sense strand
gcaggaagaugaggccaua

SEQ ID NO: 605088 - RNA, 19 nt, Homo sapiens
  misc_RNA (1)...(19): siRNA sense strand
gaggauuucccaaagauuu

SEQ ID NO: 605089 - RNA, 19 nt, Homo sapiens
  misc_RNA (1)...(19): siRNA sense strand
ccgaagugcucguccagua

SEQ ID NO: 605090 - RNA, 19 nt, Homo sapiens
  misc_RNA (1)...(19): siRNA sense strand
gggaugacgucacgcaguu

SEQ ID NO: 605091 - RNA, 19 nt, Homo sapiens
  misc_RNA (1)...(19): siRNA sense strand
ggacacccauggagugauc

SEQ ID NO: 605092 - RNA, 19 nt, Homo sapiens
  misc_RNA (1)...(19): siRNA sense strand
gggaggagaucgagcagau

SEQ ID NO: 605093 - RNA, 19 nt, Homo sapiens
  misc_RNA (1)...(19): siRNA sense strand
gggagauccuggcgcuaua

SEQ ID NO: 605094 - RNA, 19 nt, Homo sapiens
  misc_RNA (1)...(19): siRNA sense strand
ggaacaagaggauucaaug

SEQ ID NO: 605095 - RNA, 19 nt, Homo sapiens
  misc_RNA (1)...(19): siRNA sense strand
caaaggugaugaaggaaca

SEQ ID NO: 605096 - RNA, 19 nt, Homo sapiens
  misc_RNA (1)...(19): siRNA sense strand
gaagugcucguccaguauu

SEQ ID NO: 605097 - RNA, 19 nt, Homo sapiens
  misc_RNA (1)...(19): siRNA sense strand
ccauucagaugcccaagaa

SEQ ID NO: 605098 - RNA, 19 nt, Homo sapiens
  misc_RNA (1)...(19): siRNA sense strand
cagcaaccaucaagacuuc

SEQ ID NO: 605099 - RNA, 19 nt, Homo sapiens
  misc_RNA (1)...(19): siRNA sense strand
gagcugagcccggagacua

SEQ ID NO: 605100 - RNA, 19 nt, Homo sapiens
  misc_RNA (1)...(19): siRNA sense strand
gggaacaucugguggugau

SEQ ID NO: 605101 - RNA, 19 nt, Homo sapiens
  misc_RNA (1)...(19): siRNA sense strand
gaacagaaggagcuggaau

SEQ ID NO: 605102 - RNA, 19 nt, Homo sapiens
  misc_RNA (1)...(19): siRNA sense strand
gaggagaucgagcagauga

SEQ ID NO: 605103 - RNA, 19 nt, Homo sapiens
  misc_RNA (1)...(19): siRNA sense strand
gaacaagaggauucaaugg

SEQ ID NO: 605104 - RNA, 19 nt, Homo sapiens
  misc_RNA (1)...(19): siRNA sense strand
gaaguuggagucccugguu

SEQ ID NO: 605105 - RNA, 19 nt, Homo sapiens
  misc_RNA (1)...(19): siRNA sense strand
ucagggaccucuaggauac

SEQ ID NO: 605106 - RNA, 19 nt, Homo sapiens
  misc_RNA (1)...(19): siRNA sense strand
cagaagggccugcgggauu

SEQ ID NO: 605107 - RNA, 19 nt, Homo sapiens
  misc_RNA (1)...(19): siRNA sense strand
gucaaagaauucagagaug

SEQ ID NO: 605108 - RNA, 19 nt, Homo sapiens
  misc_RNA (1)...(19): siRNA sense strand
ggacagaagggcaccaaag

SEQ ID NO: 605109 - RNA, 19 nt, Homo sapiens
  misc_RNA (1)...(19): siRNA sense strand
ugaaucaugugaacagaag

SEQ ID NO: 605110 - RNA, 19 nt, Homo sapiens
  misc_RNA (1)...(19): siRNA sense strand
gaagggugaggauggcuuu

SEQ ID NO: 605111 - RNA, 19 nt, Homo sapiens
  misc_RNA (1)...(19): siRNA sense strand
ggaaagaccccaaaaccaa

SEQ ID NO: 605112 - RNA, 19 nt, Homo sapiens
  misc_RNA (1)...(19): siRNA sense strand
caggaggauuucccaaaga

SEQ ID NO: 605113 - RNA, 19 nt, Homo sapiens
  misc_RNA (1)...(19): siRNA sense strand
gaacccaggcccaguugga

SEQ ID NO: 605114 - RNA, 19 nt, Homo sapiens
  misc_RNA (1)...(19): siRNA sense strand
ccaggaggauuucccaaag

SEQ ID NO: 605115 - RNA, 19 nt, Homo sapiens
  misc_RNA (1)...(19): siRNA sense strand
caaaggcccaccugguauu

SEQ ID NO: 605116 - RNA, 19 nt, Homo sapiens
  misc_RNA (1)...(19): siRNA sense strand
ccacccaggucucauugga

SEQ ID NO: 605117 - RNA, 19 nt, Homo sapiens
  misc_RNA (1)...(19): siRNA sense strand
ccauuggccuacaggguuu

SEQ ID NO: 605118 - RNA, 19 nt, Homo sapiens
  misc_RNA (1)...(19): siRNA sense strand
agccaaaggugaugaagga

SEQ ID NO: 605119 - RNA, 19 nt, Homo sapiens
  misc_RNA (1)...(19): siRNA sense strand
caucuuuggugcccguauu

SEQ ID NO: 605120 - RNA, 19 nt, Homo sapiens
  misc_RNA (1)...(19): siRNA sense strand
ucucuuacguggacucaga

SEQ ID NO: 605121 - RNA, 19 nt, Homo sapiens
  misc_RNA (1)...(19): siRNA sense strand
gaagggagccaagggagau

SEQ ID NO: 605122 - RNA, 19 nt, Homo sapiens
  misc_RNA (1)...(19): siRNA sense strand
gaagggagaaacaggagau

SEQ ID NO: 605123 - RNA, 19 nt, Homo sapiens
  misc_RNA (1)...(19): siRNA sense strand
ugggagcccuggccugaaa

SEQ ID NO: 605124 - RNA, 19 nt, Homo sapiens
  misc_RNA (1)...(19): siRNA sense strand
gaaggaacaagaggauuca

SEQ ID NO: 605125 - RNA, 19 nt, Homo sapiens
  misc_RNA (1)...(19): siRNA sense strand
ucacagagcccagagaucu

SEQ ID NO: 605126 - RNA, 19 nt, Homo sapiens
  misc_RNA (1)...(19): siRNA sense strand
cccaaaggcccaccuggua

SEQ ID NO: 605127 - RNA, 19 nt, Homo sapiens
  misc_RNA (1)...(19): siRNA sense strand
gcagcaaccaucaagacuu

SEQ ID NO: 605128 - RNA, 19 nt, Homo sapiens
  misc_RNA (1)...(19): siRNA sense strand
agaagggccugcgggauug

SEQ ID NO: 605129 - RNA, 19 nt, Homo sapiens
  misc_RNA (1)...(19): siRNA sense strand
ggauggaagccgucugaug

SEQ ID NO: 605130 - RNA, 19 nt, Homo sapiens
  misc_RNA (1)...(19): siRNA sense strand
ucagggagcagcaggagaa

SEQ ID NO: 605131 - RNA, 19 nt, Homo sapiens
  misc_RNA (1)...(19): siRNA sense strand
ggagagaaggguccucaag

SEQ ID NO: 605132 - RNA, 19 nt, Homo sapiens
  misc_RNA (1)...(19): siRNA sense strand
aggagagccugcaguguug

SEQ ID NO: 605133 - RNA, 19 nt, Homo sapiens
  misc_RNA (1)...(19): siRNA sense strand
ccaaaggcccaccugguau

SEQ ID NO: 605134 - RNA, 19 nt, Homo sapiens
  misc_RNA (1)...(19): siRNA sense strand
ucaaggguguggacggaau

SEQ ID NO: 605135 - RNA, 19 nt, Homo sapiens
  misc_RNA (1)...(19): siRNA sense strand
gggagaaacaggagaugug

SEQ ID NO: 605136 - RNA, 19 nt, Homo sapiens
  misc_RNA (1)...(19): siRNA sense strand
gaugaaggaacaagaggau

SEQ ID NO: 605137 - RNA, 19 nt, Homo sapiens
  misc_RNA (1)...(19): siRNA sense strand
ggagauguggguccuaugg

SEQ ID NO: 605138 - RNA, 19 nt, Homo sapiens
  misc_RNA (1)...(19): siRNA sense strand
ugaaggaacaagaggauuc

SEQ ID NO: 605139 - RNA, 19 nt, Homo sapiens
  misc_RNA (1)...(19): siRNA sense strand
gugaagggccagucuguca

SEQ ID NO: 605140 - RNA, 19 nt, Homo sapiens
  misc_RNA (1)...(19): siRNA sense strand
aaggagagccugcaguguu

SEQ ID NO: 605141 - RNA, 19 nt, Homo sapiens
  misc_RNA (1)...(19): siRNA sense strand
agacuucacaggccacaaa

SEQ ID NO: 605142 - RNA, 19 nt, Homo sapiens
  misc_RNA (1)...(19): siRNA sense strand
gaagggagaucggggacuu

SEQ ID NO: 605143 - RNA, 19 nt, Homo sapiens
  misc_RNA (1)...(19): siRNA sense strand
gaacccugguccuguuggu

SEQ ID NO: 605144 - RNA, 19 nt, Homo sapiens
  misc_RNA (1)...(19): siRNA sense strand
ugacauaggcgugaaaggu

SEQ ID NO: 605145 - RNA, 19 nt, Homo sapiens
  misc_RNA (1)...(19): siRNA sense strand
ggaggauuucccaaagauu

SEQ ID NO: 605146 - RNA, 19 nt, Homo sapiens
  misc_RNA (1)...(19): siRNA sense strand
ucacgcaguucucuuacgu

SEQ ID NO: 605147 - RNA, 19 nt, Homo sapiens
  misc_RNA (1)...(19): siRNA sense strand
gaggagaaguggguuucca

SEQ ID NO: 605148 - RNA, 19 nt, Homo sapiens
  misc_RNA (1)...(19): siRNA sense strand
gcacccacucgccagcuuu

SEQ ID NO: 605149 - RNA, 19 nt, Homo sapiens
  misc_RNA (1)...(19): siRNA sense strand
ugucaaagaauucagagau

SEQ ID NO: 605150 - RNA, 19 nt, Homo sapiens
  misc_RNA (1)...(19): siRNA sense strand
cgaagugcucguccaguau

SEQ ID NO: 605151 - RNA, 19 nt, Homo sapiens
  misc_RNA (1)...(19): siRNA sense strand
gagacuagccccuauguca

SEQ ID NO: 605152 - RNA, 19 nt, Homo sapiens
  misc_RNA (1)...(19): siRNA sense strand
gaaccaggagagucaggau

SEQ ID NO: 605153 - RNA, 19 nt, Homo sapiens
  misc_RNA (1)...(19): siRNA sense strand
ugggacagcuggaaaagaa

SEQ ID NO: 605154 - RNA, 19 nt, Homo sapiens
  misc_RNA (1)...(19): siRNA sense strand
ccauggagugaucaucuuu

SEQ ID NO: 605155 - RNA, 19 nt, Homo sapiens
  misc_RNA (1)...(19): siRNA sense strand
gcuggaugccuccuucuca

SEQ ID NO: 605156 - RNA, 19 nt, Homo sapiens
  misc_RNA (1)...(19): siRNA sense strand
ccuguccgcuuccuguaug

SEQ ID NO: 605157 - RNA, 19 nt, Homo sapiens
  misc_RNA (1)...(19): siRNA sense strand
gacagaagggcaccaaagg

SEQ ID NO: 605158 - RNA, 19 nt, Homo sapiens
  misc_RNA (1)...(19): siRNA sense strand
uggagaggauggagacaag

SEQ ID NO: 605159 - RNA, 19 nt, Homo sapiens
  misc_RNA (1)...(19): siRNA sense strand
uggagcagcaggagagaaa

SEQ ID NO: 605160 - RNA, 19 nt, Homo sapiens
  misc_RNA (1)...(19): siRNA sense strand
gugcccguauucuggauga

SEQ ID NO: 605161 - RNA, 19 nt, Homo sapiens
  misc_RNA (1)...(19): siRNA sense strand
ccuccugacucucuacagu

SEQ ID NO: 605162 - RNA, 19 nt, Homo sapiens
  misc_RNA (1)...(19): siRNA sense strand
gggccaggauggugcuaag

SEQ ID NO: 605163 - RNA, 19 nt, Homo sapiens
  misc_RNA (1)...(19): siRNA sense strand
aaaccaacagccucacaga

SEQ ID NO: 605164 - RNA, 19 nt, Homo sapiens
  misc_RNA (1)...(19): siRNA sense strand
guggauggaagccgucuga

SEQ ID NO: 605165 - RNA, 19 nt, Homo sapiens
  misc_RNA (1)...(19): siRNA sense strand
ggccucaaccucccucuca

SEQ ID NO: 605166 - RNA, 19 nt, Homo sapiens
  misc_RNA (1)...(19): siRNA sense strand
aggaggauuucccaaagau

SEQ ID NO: 605167 - RNA, 19 nt, Homo sapiens
  misc_RNA (1)...(19): siRNA sense strand
ccacagcagcaaccaucaa

SEQ ID NO: 605168 - RNA, 19 nt, Homo sapiens
  misc_RNA (1)...(19): siRNA sense strand
caucucucaugcucccauu

SEQ ID NO: 605169 - RNA, 19 nt, Homo sapiens
  misc_RNA (1)...(19): siRNA sense strand
ggucucauuggacugauug

SEQ ID NO: 605170 - RNA, 19 nt, Homo sapiens
  misc_RNA (1)...(19): siRNA sense strand
gggacacccaggccaaaga

SEQ ID NO: 605171 - RNA, 19 nt, Homo sapiens
  misc_RNA (1)...(19): siRNA sense strand
ggucugaagggucauaagg

SEQ ID NO: 605172 - RNA, 19 nt, Homo sapiens
  misc_RNA (1)...(19): siRNA sense strand
gggccacccaggucucauu

SEQ ID NO: 605173 - RNA, 19 nt, Homo sapiens
  misc_RNA (1)...(19): siRNA sense strand
aaagaggagaaguggguuu

SEQ ID NO: 605174 - RNA, 19 nt, Homo sapiens
  misc_RNA (1)...(19): siRNA sense strand
ggacacccaggccaaagag

SEQ ID NO: 605175 - RNA, 19 nt, Homo sapiens
  misc_RNA (1)...(19): siRNA sense strand
uggcuuuccuggguucaaa

SEQ ID NO: 605176 - RNA, 19 nt, Homo sapiens
  misc_RNA (1)...(19): siRNA sense strand
gcaguguuggaaccuggua

SEQ ID NO: 605177 - RNA, 19 nt, Homo sapiens
  misc_RNA (1)...(19): siRNA sense strand
gccccuaugucaaagaauu

SEQ ID NO: 605178 - RNA, 19 nt, Homo sapiens
  misc_RNA (1)...(19): siRNA sense strand
ccaggucucauuggacuga

SEQ ID NO: 605179 - RNA, 19 nt, Homo sapiens
  misc_RNA (1)...(19): siRNA sense strand
ucugucacccucauuguug

SEQ ID NO: 605180 - RNA, 19 nt, Homo sapiens
  misc_RNA (1)...(19): siRNA sense strand
gaacgaggugcagcaggau

SEQ ID NO: 605181 - RNA, 19 nt, Homo sapiens
  misc_RNA (1)...(19): siRNA sense strand
gcugguggaccugguuuga

SEQ ID NO: 605182 - RNA, 19 nt, Homo sapiens
  misc_RNA (1)...(19): siRNA sense strand
ugggaagucuggagcuaag

SEQ ID NO: 605183 - RNA, 19 nt, Homo sapiens
  misc_RNA (1)...(19): siRNA sense strand
ggaccucagggaccucuag

SEQ ID NO: 605184 - RNA, 19 nt, Homo sapiens
  misc_RNA (1)...(19): siRNA sense strand
ugaccgagguuuugaugga

SEQ ID NO: 605185 - RNA, 19 nt, Homo sapiens
  misc_RNA (1)...(19): siRNA sense strand
gaagggugaccgagguuuu

SEQ ID NO: 605186 - RNA, 19 nt, Homo sapiens
  misc_RNA (1)...(19): siRNA sense strand
gaccuguccgcuuccugua

SEQ ID NO: 605187 - RNA, 19 nt, Homo sapiens
  misc_RNA (1)...(19): siRNA sense strand
gcaggaagaugaggccaua

SEQ ID NO: 605188 - RNA, 19 nt, Homo sapiens
  misc_RNA (1)...(19): siRNA sense strand
gaggauuucccaaagauuu

SEQ ID NO: 605189 - RNA, 19 nt, Homo sapiens
  misc_RNA (1)...(19): siRNA sense strand
ccgaagugcucguccagua

SEQ ID NO: 605190 - RNA, 19 nt, Homo sapiens
  misc_RNA (1)...(19): siRNA sense strand
gggaugacgucacgcaguu

SEQ ID NO: 605191 - RNA, 19 nt, Homo sapiens
  misc_RNA (1)...(19): siRNA sense strand
ggacacccauggagugauc

SEQ ID NO: 605192 - RNA, 19 nt, Homo sapiens
  misc_RNA (1)...(19): siRNA sense strand
gggaggagaucgagcagau

SEQ ID NO: 605193 - RNA, 19 nt, Homo sapiens
  misc_RNA (1)...(19): siRNA sense strand
gggagauccuggcgcuaua

SEQ ID NO: 605194 - RNA, 19 nt, Homo sapiens
  misc_RNA (1)...(19): siRNA sense strand
ggaacaagaggauucaaug

SEQ ID NO: 605195 - RNA, 19 nt, Homo sapiens
  misc_RNA (1)...(19): siRNA sense strand
caaaggugaugaaggaaca

SEQ ID NO: 605196 - RNA, 19 nt, Homo sapiens
  misc_RNA (1)...(19): siRNA sense strand
gaagugcucguccaguauu

SEQ ID NO: 605197 - RNA, 19 nt, Homo sapiens
  misc_RNA (1)...(19): siRNA sense strand
ccauucagaugcccaagaa

SEQ ID NO: 605198 - RNA, 19 nt, Homo sapiens
  misc_RNA (1)...(19): siRNA sense strand
cagcaaccaucaagacuuc

SEQ ID NO: 605199 - RNA, 19 nt, Homo sapiens
  misc_RNA (1)...(19): siRNA sense strand
gagcugagcccggagacua

SEQ ID NO: 605200 - RNA, 19 nt, Homo sapiens
  misc_RNA (1)...(19): siRNA sense strand
gggaacaucugguggugau

SEQ ID NO: 605201 - RNA, 19 nt, Homo sapiens
  misc_RNA (1)...(19): siRNA sense strand
gaacagaaggagcuggaau

SEQ ID NO: 605202 - RNA, 19 nt, Homo sapiens
  misc_RNA (1)...(19): siRNA sense strand
gaggagaucgagcagauga

SEQ ID NO: 605203 - RNA, 19 nt, Homo sapiens
  misc_RNA (1)...(19): siRNA sense strand
gaacaagaggauucaaugg

SEQ ID NO: 605204 - RNA, 19 nt, Homo sapiens
  misc_RNA (1)...(19): siRNA sense strand
gaaguuggagucccugguu

SEQ ID NO: 605205 - RNA, 19 nt, Homo sapiens
  misc_RNA (1)...(19): siRNA sense strand
ucagggaccucuaggauac

SEQ ID NO: 605206 - RNA, 19 nt, Homo sapiens
  misc_RNA (1)...(19): siRNA sense strand
cagaagggccugcgggauu

SEQ ID NO: 605207 - RNA, 19 nt, Homo sapiens
  misc_RNA (1)...(19): siRNA sense strand
gucaaagaauucagagaug

SEQ ID NO: 605208 - RNA, 19 nt, Homo sapiens
  misc_RNA (1)...(19): siRNA sense strand
ggacagaagggcaccaaag

SEQ ID NO: 605209 - RNA, 19 nt, Homo sapiens
  misc_RNA (1)...(19): siRNA sense strand
ugaaucaugugaacagaag

SEQ ID NO: 605210 - RNA, 19 nt, Homo sapiens
  misc_RNA (1)...(19): siRNA sense strand
gaagggugaggauggcuuu

SEQ ID NO: 605211 - RNA, 19 nt, Homo sapiens
  misc_RNA (1)...(19): siRNA sense strand
ggaaagaccccaaaaccaa

SEQ ID NO: 605212 - RNA, 19 nt, Homo sapiens
  misc_RNA (1)...(19): siRNA sense strand
caggaggauuucccaaaga

SEQ ID NO: 605213 - RNA, 19 nt, Homo sapiens
  misc_RNA (1)...(19): siRNA sense strand
gaacccaggcccaguugga

SEQ ID NO: 605214 - RNA, 19 nt, Homo sapiens
  misc_RNA (1)...(19): siRNA sense strand
ccaggaggauuucccaaag

SEQ ID NO: 605215 - RNA, 19 nt, Homo sapiens
  misc_RNA (1)...(19): siRNA sense strand
caaaggcccaccugguauu

SEQ ID NO: 605216 - RNA, 19 nt, Homo sapiens
  misc_RNA (1)...(19): siRNA sense strand
ccacccaggucucauugga

SEQ ID NO: 605217 - RNA, 19 nt, Homo sapiens
  misc_RNA (1)...(19): siRNA sense strand
ccauuggccuacaggguuu

SEQ ID NO: 605218 - RNA, 19 nt, Homo sapiens
  misc_RNA (1)...(19): siRNA sense strand
agccaaaggugaugaagga

SEQ ID NO: 605219 - RNA, 19 nt, Homo sapiens
  misc_RNA (1)...(19): siRNA sense strand
caucuuuggugcccguauu

SEQ ID NO: 605220 - RNA, 19 nt, Homo sapiens
  misc_RNA (1)...(19): siRNA sense strand
ucucuuacguggacucaga

SEQ ID NO: 605221 - RNA, 19 nt, Homo sapiens
  misc_RNA (1)...(19): siRNA sense strand
gaagggagccaagggagau

SEQ ID NO: 605222 - RNA, 19 nt, Homo sapiens
  misc_RNA (1)...(19): siRNA sense strand
gaagggagaaacaggagau

SEQ ID NO: 605223 - RNA, 19 nt, Homo sapiens
  misc_RNA (1)...(19): siRNA sense strand
ugggagcccuggccugaaa

SEQ ID NO: 605224 - RNA, 19 nt, Homo sapiens
  misc_RNA (1)...(19): siRNA sense strand
gaaggaacaagaggauuca

SEQ ID NO: 605225 - RNA, 19 nt, Homo sapiens
  misc_RNA (1)...(19): siRNA sense strand
ucacagagcccagagaucu

SEQ ID NO: 605226 - RNA, 19 nt, Homo sapiens
  misc_RNA (1)...(19): siRNA sense strand
cccaaaggcccaccuggua

SEQ ID NO: 605227 - RNA, 19 nt, Homo sapiens
  misc_RNA (1)...(19): siRNA sense strand
gcagcaaccaucaagacuu

SEQ ID NO: 605228 - RNA, 19 nt, Homo sapiens
  misc_RNA (1)...(19): siRNA sense strand
agaagggccugcgggauug

SEQ ID NO: 605229 - RNA, 19 nt, Homo sapiens
  misc_RNA (1)...(19): siRNA sense strand
ggauggaagccgucugaug

SEQ ID NO: 605230 - RNA, 19 nt, Homo sapiens
  misc_RNA (1)...(19): siRNA sense strand
ucagggagcagcaggagaa

SEQ ID NO: 605231 - RNA, 19 nt, Homo sapiens
  misc_RNA (1)...(19): siRNA sense strand
ggagagaaggguccucaag

SEQ ID NO: 605232 - RNA, 19 nt, Homo sapiens
  misc_RNA (1)...(19): siRNA sense strand
aggagagccugcaguguug

SEQ ID NO: 605233 - RNA, 19 nt, Homo sapiens
  misc_RNA (1)...(19): siRNA sense strand
ccaaaggcccaccugguau

SEQ ID NO: 605234 - RNA, 19 nt, Homo sapiens
  misc_RNA (1)...(19): siRNA sense strand
ucaaggguguggacggaau

SEQ ID NO: 605235 - RNA, 19 nt, Homo sapiens
  misc_RNA (1)...(19): siRNA sense strand
gggagaaacaggagaugug

SEQ ID NO: 605236 - RNA, 19 nt, Homo sapiens
  misc_RNA (1)...(19): siRNA sense strand
gaugaaggaacaagaggau

SEQ ID NO: 605237 - RNA, 19 nt, Homo sapiens
  misc_RNA (1)...(19): siRNA sense strand
ggagauguggguccuaugg

SEQ ID NO: 605238 - RNA, 19 nt, Homo sapiens
  misc_RNA (1)...(19): siRNA sense strand
ugaaggaacaagaggauuc

SEQ ID NO: 605239 - RNA, 19 nt, Homo sapiens
  misc_RNA (1)...(19): siRNA sense strand
gugaagggccagucuguca

SEQ ID NO: 605240 - RNA, 19 nt, Homo sapiens
  misc_RNA (1)...(19): siRNA sense strand
aaggagagccugcaguguu

SEQ ID NO: 605241 - RNA, 19 nt, Homo sapiens
  misc_RNA (1)...(19): siRNA sense strand
agacuucacaggccacaaa

SEQ ID NO: 605242 - RNA, 19 nt, Homo sapiens
  misc_RNA (1)...(19): siRNA sense strand
gaagggagaucggggacuu

SEQ ID NO: 605243 - RNA, 19 nt, Homo sapiens
  misc_RNA (1)...(19): siRNA sense strand
gaacccugguccuguuggu

SEQ ID NO: 605244 - RNA, 19 nt, Homo sapiens
  misc_RNA (1)...(19): siRNA sense strand
ugacauaggcgugaaaggu

SEQ ID NO: 605245 - RNA, 19 nt, Homo sapiens
  misc_RNA (1)...(19): siRNA sense strand
ggaggauuucccaaagauu

SEQ ID NO: 605246 - RNA, 19 nt, Homo sapiens
  misc_RNA (1)...(19): siRNA sense strand
ucacgcaguucucuuacgu

SEQ ID NO: 605247 - RNA, 19 nt, Homo sapiens
  misc_RNA (1)...(19): siRNA sense strand
gaggagaaguggguuucca

SEQ ID NO: 605248 - RNA, 19 nt, Homo sapiens
  misc_RNA (1)...(19): siRNA sense strand
gcacccacucgccagcuuu

SEQ ID NO: 605249 - RNA, 19 nt, Homo sapiens
  misc_RNA (1)...(19): siRNA sense strand
ugucaaagaauucagagau

SEQ ID NO: 605250 - RNA, 19 nt, Homo sapiens
  misc_RNA (1)...(19): siRNA sense strand
cgaagugcucguccaguau

SEQ ID NO: 605251 - RNA, 19 nt, Homo sapiens
  misc_RNA (1)...(19): siRNA sense strand
gagacuagccccuauguca

SEQ ID NO: 605252 - RNA, 19 nt, Homo sapiens
  misc_RNA (1)...(19): siRNA sense strand
gaaccaggagagucaggau

SEQ ID NO: 605253 - RNA, 19 nt, Homo sapiens
  misc_RNA (1)...(19): siRNA sense strand
ugggacagcuggaaaagaa

SEQ ID NO: 605254 - RNA, 19 nt, Homo sapiens
  misc_RNA (1)...(19): siRNA sense strand
ccauggagugaucaucuuu

SEQ ID NO: 605255 - RNA, 19 nt, Homo sapiens
  misc_RNA (1)...(19): siRNA sense strand
gcuggaugccuccuucuca

SEQ ID NO: 605256 - RNA, 19 nt, Homo sapiens
  misc_RNA (1)...(19): siRNA sense strand
ccuguccgcuuccuguaug

SEQ ID NO: 605257 - RNA, 19 nt, Homo sapiens
  misc_RNA (1)...(19): siRNA sense strand
gacagaagggcaccaaagg

SEQ ID NO: 605258 - RNA, 19 nt, Homo sapiens
  misc_RNA (1)...(19): siRNA sense strand
uggagaggauggagacaag

SEQ ID NO: 605259 - RNA, 19 nt, Homo sapiens
  misc_RNA (1)...(19): siRNA sense strand
uggagcagcaggagagaaa

SEQ ID NO: 605260 - RNA, 19 nt, Homo sapiens
  misc_RNA (1)...(19): siRNA sense strand
gugcccguauucuggauga

SEQ ID NO: 605261 - RNA, 19 nt, Homo sapiens
  misc_RNA (1)...(19): siRNA sense strand
ccuccugacucucuacagu

SEQ ID NO: 605262 - RNA, 19 nt, Homo sapiens
  misc_RNA (1)...(19): siRNA sense strand
gggccaggauggugcuaag

SEQ ID NO: 605263 - RNA, 19 nt, Homo sapiens
  misc_RNA (1)...(19): siRNA sense strand
aaaccaacagccucacaga

SEQ ID NO: 605264 - RNA, 19 nt, Homo sapiens
  misc_RNA (1)...(19): siRNA sense strand
guggauggaagccgucuga

SEQ ID NO: 605265 - RNA, 19 nt, Homo sapiens
  misc_RNA (1)...(19): siRNA sense strand
ggccucaaccucccucuca

SEQ ID NO: 605266 - RNA, 19 nt, Homo sapiens
  misc_RNA (1)...(19): siRNA sense strand
aggaggauuucccaaagau

SEQ ID NO: 605267 - RNA, 19 nt, Homo sapiens
  misc_RNA (1)...(19): siRNA sense strand
ccacagcagcaaccaucaa

SEQ ID NO: 605268 - RNA, 19 nt, Homo sapiens
  misc_RNA (1)...(19): siRNA sense strand
caucucucaugcucccauu

SEQ ID NO: 605269 - RNA, 19 nt, Homo sapiens
  misc_RNA (1)...(19): siRNA sense strand
ggucucauuggacugauug

SEQ ID NO: 605270 - RNA, 19 nt, Homo sapiens
  misc_RNA (1)...(19): siRNA sense strand
gggacacccaggccaaaga

SEQ ID NO: 605271 - RNA, 19 nt, Homo sapiens
  misc_RNA (1)...(19): siRNA sense strand
ggucugaagggucauaagg

SEQ ID NO: 605272 - RNA, 19 nt, Homo sapiens
  misc_RNA (1)...(19): siRNA sense strand
gggccacccaggucucauu

SEQ ID NO: 605273 - RNA, 19 nt, Homo sapiens
  misc_RNA (1)...(19): siRNA sense strand
aaagaggagaaguggguuu

SEQ ID NO: 605274 - RNA, 19 nt, Homo sapiens
  misc_RNA (1)...(19): siRNA sense strand
ggacacccaggccaaagag

SEQ ID NO: 605275 - RNA, 19 nt, Homo sapiens
  misc_RNA (1)...(19): siRNA sense strand
uggcuuuccuggguucaaa

SEQ ID NO: 605276 - RNA, 19 nt, Homo sapiens
  misc_RNA (1)...(19): siRNA sense strand
gcaguguuggaaccuggua

SEQ ID NO: 605277 - RNA, 19 nt, Homo sapiens
  misc_RNA (1)...(19): siRNA sense strand
gccccuaugucaaagaauu

SEQ ID NO: 605278 - RNA, 19 nt, Homo sapiens
  misc_RNA (1)...(19): siRNA sense strand
ccaggucucauuggacuga

SEQ ID NO: 605279 - RNA, 19 nt, Homo sapiens
  misc_RNA (1)...(19): siRNA sense strand
ucugucacccucauuguug

SEQ ID NO: 605280 - RNA, 19 nt, Homo sapiens
  misc_RNA (1)...(19): siRNA sense strand
gaacgaggugcagcaggau

SEQ ID NO: 605281 - RNA, 19 nt, Homo sapiens
  misc_RNA (1)...(19): siRNA sense strand
gcugguggaccugguuuga

SEQ ID NO: 605282 - RNA, 19 nt, Homo sapiens
  misc_RNA (1)...(19): siRNA sense strand
ugggaagucuggagcuaag

SEQ ID NO: 605283 - RNA, 19 nt, Homo sapiens
  misc_RNA (1)...(19): siRNA sense strand
ggaccucagggaccucuag

SEQ ID NO: 605284 - RNA, 19 nt, Homo sapiens
  misc_RNA (1)...(19): siRNA sense strand
ugaccgagguuuugaugga

SEQ ID NO: 605285 - RNA, 19 nt, Homo sapiens
  misc_RNA (1)...(19): siRNA sense strand
gaagggugaccgagguuuu

SEQ ID NO: 605286 - RNA, 19 nt, Homo sapiens
  misc_RNA (1)...(19): siRNA sense strand
gaccuguccgcuuccugua

SEQ ID NO: 605287 - RNA, 19 nt, Homo sapiens
  misc_RNA (1)...(19): siRNA sense strand
gaaugcaacucucaccuua

SEQ ID NO: 605288 - RNA, 19 nt, Homo sapiens
  misc_RNA (1)...(19): siRNA sense strand
gaaaggaaguggaauuaau

SEQ ID NO: 605289 - RNA, 19 nt, Homo sapiens
  misc_RNA (1)...(19): siRNA sense strand
aaaguuggcucacaauuaa

SEQ ID NO: 605290 - RNA, 19 nt, Homo sapiens
  misc_RNA (1)...(19): siRNA sense strand
ggagauagacuuacugaaa

SEQ ID NO: 605291 - RNA, 19 nt, Homo sapiens
  misc_RNA (1)...(19): siRNA sense strand
gaaaagagguggaauuaau

SEQ ID NO: 605292 - RNA, 19 nt, Homo sapiens
  misc_RNA (1)...(19): siRNA sense strand
caaaguuggcucacaauua

SEQ ID NO: 605293 - RNA, 19 nt, Homo sapiens
  misc_RNA (1)...(19): siRNA sense strand
gaaggcaguucugugaaua

SEQ ID NO: 605294 - RNA, 19 nt, Homo sapiens
  misc_RNA (1)...(19): siRNA sense strand
gcaaacacuuuaugucaau

SEQ ID NO: 605295 - RNA, 19 nt, Homo sapiens
  misc_RNA (1)...(19): siRNA sense strand
ggaagucccuggaaaccaa

SEQ ID NO: 605296 - RNA, 19 nt, Homo sapiens
  misc_RNA (1)...(19): siRNA sense strand
gaaaagcucuuguuuguca

SEQ ID NO: 605297 - RNA, 19 nt, Homo sapiens
  misc_RNA (1)...(19): siRNA sense strand
caaugaauccuguuaguuu

SEQ ID NO: 605298 - RNA, 19 nt, Homo sapiens
  misc_RNA (1)...(19): siRNA sense strand
caucuacgcugacaaugaa

SEQ ID NO: 605299 - RNA, 19 nt, Homo sapiens
  misc_RNA (1)...(19): siRNA sense strand
aaacaaaguuggcucacaa

SEQ ID NO: 605300 - RNA, 19 nt, Homo sapiens
  misc_RNA (1)...(19): siRNA sense strand
gcaacucucaccuuaauuu

SEQ ID NO: 605301 - RNA, 19 nt, Homo sapiens
  misc_RNA (1)...(19): siRNA sense strand
gagauagacuuacugaaag

SEQ ID NO: 605302 - RNA, 19 nt, Homo sapiens
  misc_RNA (1)...(19): siRNA sense strand
caucaucucuuguacaugu

SEQ ID NO: 605303 - RNA, 19 nt, Homo sapiens
  misc_RNA (1)...(19): siRNA sense strand
aaaugcaacucucaccuua

SEQ ID NO: 605304 - RNA, 19 nt, Homo sapiens
  misc_RNA (1)...(19): siRNA sense strand
gagcuaaauuacacauuga

SEQ ID NO: 605305 - RNA, 19 nt, Homo sapiens
  misc_RNA (1)...(19): siRNA sense strand
ggaaggcaguucugugaau

SEQ ID NO: 605306 - RNA, 19 nt, Homo sapiens
  misc_RNA (1)...(19): siRNA sense strand
gggaguauaugaaugugaa

SEQ ID NO: 605307 - RNA, 19 nt, Homo sapiens
  misc_RNA (1)...(19): siRNA sense strand
aauaauaccugccauugga

SEQ ID NO: 605308 - RNA, 19 nt, Homo sapiens
  misc_RNA (1)...(19): siRNA sense strand
cgagcuaaauuacacauug

SEQ ID NO: 605309 - RNA, 19 nt, Homo sapiens
  misc_RNA (1)...(19): siRNA sense strand
gaaggaugcgggaguauau

SEQ ID NO: 605310 - RNA, 19 nt, Homo sapiens
  misc_RNA (1)...(19): siRNA sense strand
gaaguggaauuaauuaucc

SEQ ID NO: 605311 - RNA, 19 nt, Homo sapiens
  misc_RNA (1)...(19): siRNA sense strand
gcagaaaggaaguggaauu

SEQ ID NO: 605312 - RNA, 19 nt, Homo sapiens
  misc_RNA (1)...(19): siRNA sense strand
gcaacucucaccuuaauug

SEQ ID NO: 605313 - RNA, 19 nt, Homo sapiens
  misc_RNA (1)...(19): siRNA sense strand
gaaaggcccaguugaagga

SEQ ID NO: 605314 - RNA, 19 nt, Homo sapiens
  misc_RNA (1)...(19): siRNA sense strand
ggagacaggagacacagua

SEQ ID NO: 605315 - RNA, 19 nt, Homo sapiens
  misc_RNA (1)...(19): siRNA sense strand
gagauugaauuacuuaagg

SEQ ID NO: 605316 - RNA, 19 nt, Homo sapiens
  misc_RNA (1)...(19): siRNA sense strand
gagguggaauuaauuguuc

SEQ ID NO: 605317 - RNA, 19 nt, Homo sapiens
  misc_RNA (1)...(19): siRNA sense strand
gaggaaggcaguucuguga

SEQ ID NO: 605318 - RNA, 19 nt, Homo sapiens
  misc_RNA (1)...(19): siRNA sense strand
caugaagagucaggaauuu

SEQ ID NO: 605319 - RNA, 19 nt, Homo sapiens
  misc_RNA (1)...(19): siRNA sense strand
cagaaaggaaguggaauua

SEQ ID NO: 605320 - RNA, 19 nt, Homo sapiens
  misc_RNA (1)...(19): siRNA sense strand
caggcuaaguuacauauug

SEQ ID NO: 605321 - RNA, 19 nt, Homo sapiens
  misc_RNA (1)...(19): siRNA sense strand
gaaaugcaacucucaccuu

SEQ ID NO: 605322 - RNA, 19 nt, Homo sapiens
  misc_RNA (1)...(19): siRNA sense strand
ggaauucgaacccaaacaa

SEQ ID NO: 605323 - RNA, 19 nt, Homo sapiens
  misc_RNA (1)...(19): siRNA sense strand
gacaaugaauccuguuagu

SEQ ID NO: 605324 - RNA, 19 nt, Homo sapiens
  misc_RNA (1)...(19): siRNA sense strand
ggaagccgaucacagucaa

SEQ ID NO: 605325 - RNA, 19 nt, Homo sapiens
  misc_RNA (1)...(19): siRNA sense strand
ggaaguggaauuaauuauc

SEQ ID NO: 605326 - RNA, 19 nt, Homo sapiens
  misc_RNA (1)...(19): siRNA sense strand
gcugauguauacccauuug

SEQ ID NO: 605327 - RNA, 19 nt, Homo sapiens
  misc_RNA (1)...(19): siRNA sense strand
ggagaacccagauagauag

SEQ ID NO: 605328 - RNA, 19 nt, Homo sapiens
  misc_RNA (1)...(19): siRNA sense strand
gacaggagacacaguacua

SEQ ID NO: 605329 - RNA, 19 nt, Homo sapiens
  misc_RNA (1)...(19): siRNA sense strand
gauagauaguccacugaau

SEQ ID NO: 605330 - RNA, 19 nt, Homo sapiens
  misc_RNA (1)...(19): siRNA sense strand
ccuuggagccucaaauaua

SEQ ID NO: 605331 - RNA, 19 nt, Homo sapiens
  misc_RNA (1)...(19): siRNA sense strand
gcucacaauuaagaaguuu

SEQ ID NO: 605332 - RNA, 19 nt, Homo sapiens
  misc_RNA (1)...(19): siRNA sense strand
cuacauaucacccaagaau

SEQ ID NO: 605333 - RNA, 19 nt, Homo sapiens
  misc_RNA (1)...(19): siRNA sense strand
acucucaccuuaauuucua

SEQ ID NO: 605334 - RNA, 19 nt, Homo sapiens
  misc_RNA (1)...(19): siRNA sense strand
gugaaggaguuaauuugau

SEQ ID NO: 605335 - RNA, 19 nt, Homo sapiens
  misc_RNA (1)...(19): siRNA sense strand
ucuaccagcuccagagauu

SEQ ID NO: 605336 - RNA, 19 nt, Homo sapiens
  misc_RNA (1)...(19): siRNA sense strand
gaagagaaaacaacaaaga

SEQ ID NO: 605337 - RNA, 19 nt, Homo sapiens
  misc_RNA (1)...(19): siRNA sense strand
gauaauguuugcagcuucu

SEQ ID NO: 605338 - RNA, 19 nt, Homo sapiens
  misc_RNA (1)...(19): siRNA sense strand
gaauugcaagucuacauau

SEQ ID NO: 605339 - RNA, 19 nt, Homo sapiens
  misc_RNA (1)...(19): siRNA sense strand
acucucaccuuaauugcua

SEQ ID NO: 605340 - RNA, 19 nt, Homo sapiens
  misc_RNA (1)...(19): siRNA sense strand
cuacagcaccuuucuggaa

SEQ ID NO: 605341 - RNA, 19 nt, Homo sapiens
  misc_RNA (1)...(19): siRNA sense strand
acagucaaguguucaguug

SEQ ID NO: 605342 - RNA, 19 nt, Homo sapiens
  misc_RNA (1)...(19): siRNA sense strand
guugaaggaugcgggagua

SEQ ID NO: 605343 - RNA, 19 nt, Homo sapiens
  misc_RNA (1)...(19): siRNA sense strand
gaauucgaacccaaacaaa

SEQ ID NO: 605344 - RNA, 19 nt, Homo sapiens
  misc_RNA (1)...(19): siRNA sense strand
ggaggauacggauaugaaa

SEQ ID NO: 605345 - RNA, 19 nt, Homo sapiens
  misc_RNA (1)...(19): siRNA sense strand
ggucauauagucuuguaga

SEQ ID NO: 605346 - RNA, 19 nt, Homo sapiens
  misc_RNA (1)...(19): siRNA sense strand
gagauuuucuggaguaaga

SEQ ID NO: 605347 - RNA, 19 nt, Homo sapiens
  misc_RNA (1)...(19): siRNA sense strand
cagaguacgcaaacacuuu

SEQ ID NO: 605348 - RNA, 19 nt, Homo sapiens
  misc_RNA (1)...(19): siRNA sense strand
uggagaacccagauagaua

SEQ ID NO: 605349 - RNA, 19 nt, Homo sapiens
  misc_RNA (1)...(19): siRNA sense strand
ugggagcucugucacugua

SEQ ID NO: 605350 - RNA, 19 nt, Homo sapiens
  misc_RNA (1)...(19): siRNA sense strand
gaaucuaggaaauuggaaa

SEQ ID NO: 605351 - RNA, 19 nt, Homo sapiens
  misc_RNA (1)...(19): siRNA sense strand
gcaguucugugaauaugac

SEQ ID NO: 605352 - RNA, 19 nt, Homo sapiens
  misc_RNA (1)...(19): siRNA sense strand
caagaagguggcucuguga

SEQ ID NO: 605353 - RNA, 19 nt, Homo sapiens
  misc_RNA (1)...(19): siRNA sense strand
agguggagaucuacucuuu

SEQ ID NO: 605354 - RNA, 19 nt, Homo sapiens
  misc_RNA (1)...(19): siRNA sense strand
ccacaucuacgcugacaau

SEQ ID NO: 605355 - RNA, 19 nt, Homo sapiens
  misc_RNA (1)...(19): siRNA sense strand
acacugucaucaucucuug

SEQ ID NO: 605356 - RNA, 19 nt, Homo sapiens
  misc_RNA (1)...(19): siRNA sense strand
aggcuaaguuacauauuga

SEQ ID NO: 605357 - RNA, 19 nt, Homo sapiens
  misc_RNA (1)...(19): siRNA sense strand
uggaaaagcucuuguuugu

SEQ ID NO: 605358 - RNA, 19 nt, Homo sapiens
  misc_RNA (1)...(19): siRNA sense strand
gcuggagauugaauuacuu

SEQ ID NO: 605359 - RNA, 19 nt, Homo sapiens
  misc_RNA (1)...(19): siRNA sense strand
agaauugcaagucuacaua

SEQ ID NO: 605360 - RNA, 19 nt, Homo sapiens
  misc_RNA (1)...(19): siRNA sense strand
gaaggaguuaauuugauug

SEQ ID NO: 605361 - RNA, 19 nt, Homo sapiens
  misc_RNA (1)...(19): siRNA sense strand
cgcaaacacuuuaugucaa

SEQ ID NO: 605362 - RNA, 19 nt, Homo sapiens
  misc_RNA (1)...(19): siRNA sense strand
guacgcaaacacuuuaugu

SEQ ID NO: 605363 - RNA, 19 nt, Homo sapiens
  misc_RNA (1)...(19): siRNA sense strand
agaguacgcaaacacuuua

SEQ ID NO: 605364 - RNA, 19 nt, Homo sapiens
  misc_RNA (1)...(19): siRNA sense strand
acauauugaugacauggaa

SEQ ID NO: 605365 - RNA, 19 nt, Homo sapiens
  misc_RNA (1)...(19): siRNA sense strand
gaagauggucgugauccuu

SEQ ID NO: 605366 - RNA, 19 nt, Homo sapiens
  misc_RNA (1)...(19): siRNA sense strand
gauguucaaggaagagaaa

SEQ ID NO: 605367 - RNA, 19 nt, Homo sapiens
  misc_RNA (1)...(19): siRNA sense strand
gugaauaugacaugcuuga

SEQ ID NO: 605368 - RNA, 19 nt, Homo sapiens
  misc_RNA (1)...(19): siRNA sense strand
auacggauaugaaaucucu

SEQ ID NO: 605369 - RNA, 19 nt, Homo sapiens
  misc_RNA (1)...(19): siRNA sense strand
cuaugaggauggaagauuc

SEQ ID NO: 605370 - RNA, 19 nt, Homo sapiens
  misc_RNA (1)...(19): siRNA sense strand
augggaaggugacgaauga

SEQ ID NO: 605371 - RNA, 19 nt, Homo sapiens
  misc_RNA (1)...(19): siRNA sense strand
gcuaugaggauggaagauu

SEQ ID NO: 605372 - RNA, 19 nt, Homo sapiens
  misc_RNA (1)...(19): siRNA sense strand
gggaaucuacagcaccuuu

SEQ ID NO: 605373 - RNA, 19 nt, Homo sapiens
  misc_RNA (1)...(19): siRNA sense strand
cuaaggauccagagauuca

SEQ ID NO: 605374 - RNA, 19 nt, Homo sapiens
  misc_RNA (1)...(19): siRNA sense strand
gucaucaucucuuguacau

SEQ ID NO: 605375 - RNA, 19 nt, Homo sapiens
  misc_RNA (1)...(19): siRNA sense strand
ggagauugaauuacuuaag

SEQ ID NO: 605376 - RNA, 19 nt, Homo sapiens
  misc_RNA (1)...(19): siRNA sense strand
gcaagguuccuagcgugua

SEQ ID NO: 605377 - RNA, 19 nt, Homo sapiens
  misc_RNA (1)...(19): siRNA sense strand
cagaaaagagguggaauua

SEQ ID NO: 605378 - RNA, 19 nt, Homo sapiens
  misc_RNA (1)...(19): siRNA sense strand
gaguuuggaaguaaccuuu

SEQ ID NO: 605379 - RNA, 19 nt, Homo sapiens
  misc_RNA (1)...(19): siRNA sense strand
caaaggcagaguacgcaaa

SEQ ID NO: 605380 - RNA, 19 nt, Homo sapiens
  misc_RNA (1)...(19): siRNA sense strand
guucuuguuugccgagcua

SEQ ID NO: 605381 - RNA, 19 nt, Homo sapiens
  misc_RNA (1)...(19): siRNA sense strand
cccagaaucuagauaucuu

SEQ ID NO: 605382 - RNA, 19 nt, Homo sapiens
  misc_RNA (1)...(19): siRNA sense strand
gaggauacggauaugaaau

SEQ ID NO: 605383 - RNA, 19 nt, Homo sapiens
  misc_RNA (1)...(19): siRNA sense strand
gucauauagucuuguagaa

SEQ ID NO: 605384 - RNA, 19 nt, Homo sapiens
  misc_RNA (1)...(19): siRNA sense strand
ugaaggaugcgggaguaua

SEQ ID NO: 605385 - RNA, 19 nt, Homo sapiens
  misc_RNA (1)...(19): siRNA sense strand
gcagaguacgcaaacacuu

SEQ ID NO: 605386 - RNA, 19 nt, Homo sapiens
  misc_RNA (1)...(19): siRNA sense strand
ggauacggauaugaaaucu

SEQ ID NO: 605387 - RNA, 19 nt, Homo sapiens
  misc_RNA (1)...(19): siRNA sense strand
gaaugcaacucucaccuua

SEQ ID NO: 605388 - RNA, 19 nt, Homo sapiens
  misc_RNA (1)...(19): siRNA sense strand
gaaaggaaguggaauuaau

SEQ ID NO: 605389 - RNA, 19 nt, Homo sapiens
  misc_RNA (1)...(19): siRNA sense strand
aaaguuggcucacaauuaa

SEQ ID NO: 605390 - RNA, 19 nt, Homo sapiens
  misc_RNA (1)...(19): siRNA sense strand
ggagauagacuuacugaaa

SEQ ID NO: 605391 - RNA, 19 nt, Homo sapiens
  misc_RNA (1)...(19): siRNA sense strand
gaaaagagguggaauuaau

SEQ ID NO: 605392 - RNA, 19 nt, Homo sapiens
  misc_RNA (1)...(19): siRNA sense strand
caaaguuggcucacaauua

SEQ ID NO: 605393 - RNA, 19 nt, Homo sapiens
  misc_RNA (1)...(19): siRNA sense strand
gaaggcaguucugugaaua

SEQ ID NO: 605394 - RNA, 19 nt, Homo sapiens
  misc_RNA (1)...(19): siRNA sense strand
gcaaacacuuuaugucaau

SEQ ID NO: 605395 - RNA, 19 nt, Homo sapiens
  misc_RNA (1)...(19): siRNA sense strand
ggaagucccuggaaaccaa

SEQ ID NO: 605396 - RNA, 19 nt, Homo sapiens
  misc_RNA (1)...(19): siRNA sense strand
gaaaagcucuuguuuguca

SEQ ID NO: 605397 - RNA, 19 nt, Homo sapiens
  misc_RNA (1)...(19): siRNA sense strand
caaugaauccuguuaguuu

SEQ ID NO: 605398 - RNA, 19 nt, Homo sapiens
  misc_RNA (1)...(19): siRNA sense strand
caucuacgcugacaaugaa

SEQ ID NO: 605399 - RNA, 19 nt, Homo sapiens
  misc_RNA (1)...(19): siRNA sense strand
aaacaaaguuggcucacaa

SEQ ID NO: 605400 - RNA, 19 nt, Homo sapiens
  misc_RNA (1)...(19): siRNA sense strand
gcaacucucaccuuaauuu

SEQ ID NO: 605401 - RNA, 19 nt, Homo sapiens
  misc_RNA (1)...(19): siRNA sense strand
gagauagacuuacugaaag

SEQ ID NO: 605402 - RNA, 19 nt, Homo sapiens
  misc_RNA (1)...(19): siRNA sense strand
caucaucucuuguacaugu

SEQ ID NO: 605403 - RNA, 19 nt, Homo sapiens
  misc_RNA (1)...(19): siRNA sense strand
aaaugcaacucucaccuua

SEQ ID NO: 605404 - RNA, 19 nt, Homo sapiens
  misc_RNA (1)...(19): siRNA sense strand
gagcuaaauuacacauuga

SEQ ID NO: 605405 - RNA, 19 nt, Homo sapiens
  misc_RNA (1)...(19): siRNA sense strand
ggaaggcaguucugugaau

SEQ ID NO: 605406 - RNA, 19 nt, Homo sapiens
  misc_RNA (1)...(19): siRNA sense strand
gggaguauaugaaugugaa

SEQ ID NO: 605407 - RNA, 19 nt, Homo sapiens
  misc_RNA (1)...(19): siRNA sense strand
aauaauaccugccauugga

SEQ ID NO: 605408 - RNA, 19 nt, Homo sapiens
  misc_RNA (1)...(19): siRNA sense strand
cgagcuaaauuacacauug

SEQ ID NO: 605409 - RNA, 19 nt, Homo sapiens
  misc_RNA (1)...(19): siRNA sense strand
gaaggaugcgggaguauau

SEQ ID NO: 605410 - RNA, 19 nt, Homo sapiens
  misc_RNA (1)...(19): siRNA sense strand
gaaguggaauuaauuaucc

SEQ ID NO: 605411 - RNA, 19 nt, Homo sapiens
  misc_RNA (1)...(19): siRNA sense strand
gcagaaaggaaguggaauu

SEQ ID NO: 605412 - RNA, 19 nt, Homo sapiens
  misc_RNA (1)...(19): siRNA sense strand
gcaacucucaccuuaauug

SEQ ID NO: 605413 - RNA, 19 nt, Homo sapiens
  misc_RNA (1)...(19): siRNA sense strand
gaaaggcccaguugaagga

SEQ ID NO: 605414 - RNA, 19 nt, Homo sapiens
  misc_RNA (1)...(19): siRNA sense strand
ggagacaggagacacagua

SEQ ID NO: 605415 - RNA, 19 nt, Homo sapiens
  misc_RNA (1)...(19): siRNA sense strand
gagauugaauuacuuaagg

SEQ ID NO: 605416 - RNA, 19 nt, Homo sapiens
  misc_RNA (1)...(19): siRNA sense strand
gagguggaauuaauuguuc

SEQ ID NO: 605417 - RNA, 19 nt, Homo sapiens
  misc_RNA (1)...(19): siRNA sense strand
gaggaaggcaguucuguga

SEQ ID NO: 605418 - RNA, 19 nt, Homo sapiens
  misc_RNA (1)...(19): siRNA sense strand
caugaagagucaggaauuu

SEQ ID NO: 605419 - RNA, 19 nt, Homo sapiens
  misc_RNA (1)...(19): siRNA sense strand
cagaaaggaaguggaauua

SEQ ID NO: 605420 - RNA, 19 nt, Homo sapiens
  misc_RNA (1)...(19): siRNA sense strand
caggcuaaguuacauauug

SEQ ID NO: 605421 - RNA, 19 nt, Homo sapiens
  misc_RNA (1)...(19): siRNA sense strand
gaaaugcaacucucaccuu

SEQ ID NO: 605422 - RNA, 19 nt, Homo sapiens
  misc_RNA (1)...(19): siRNA sense strand
ggaauucgaacccaaacaa

SEQ ID NO: 605423 - RNA, 19 nt, Homo sapiens
  misc_RNA (1)...(19): siRNA sense strand
gacaaugaauccuguuagu

SEQ ID NO: 605424 - RNA, 19 nt, Homo sapiens
  misc_RNA (1)...(19): siRNA sense strand
ggaagccgaucacagucaa

SEQ ID NO: 605425 - RNA, 19 nt, Homo sapiens
  misc_RNA (1)...(19): siRNA sense strand
ggaaguggaauuaauuauc

SEQ ID NO: 605426 - RNA, 19 nt, Homo sapiens
  misc_RNA (1)...(19): siRNA sense strand
gcugauguauacccauuug

SEQ ID NO: 605427 - RNA, 19 nt, Homo sapiens
  misc_RNA (1)...(19): siRNA sense strand
ggagaacccagauagauag

SEQ ID NO: 605428 - RNA, 19 nt, Homo sapiens
  misc_RNA (1)...(19): siRNA sense strand
gacaggagacacaguacua

SEQ ID NO: 605429 - RNA, 19 nt, Homo sapiens
  misc_RNA (1)...(19): siRNA sense strand
gauagauaguccacugaau

SEQ ID NO: 605430 - RNA, 19 nt, Homo sapiens
  misc_RNA (1)...(19): siRNA sense strand
ccuuggagccucaaauaua

SEQ ID NO: 605431 - RNA, 19 nt, Homo sapiens
  misc_RNA (1)...(19): siRNA sense strand
gcucacaauuaagaaguuu

SEQ ID NO: 605432 - RNA, 19 nt, Homo sapiens
  misc_RNA (1)...(19): siRNA sense strand
cuacauaucacccaagaau

SEQ ID NO: 605433 - RNA, 19 nt, Homo sapiens
  misc_RNA (1)...(19): siRNA sense strand
acucucaccuuaauuucua

SEQ ID NO: 605434 - RNA, 19 nt, Homo sapiens
  misc_RNA (1)...(19): siRNA sense strand
gugaaggaguuaauuugau

SEQ ID NO: 605435 - RNA, 19 nt, Homo sapiens
  misc_RNA (1)...(19): siRNA sense strand
ucuaccagcuccagagauu

SEQ ID NO: 605436 - RNA, 19 nt, Homo sapiens
  misc_RNA (1)...(19): siRNA sense strand
gaagagaaaacaacaaaga

SEQ ID NO: 605437 - RNA, 19 nt, Homo sapiens
  misc_RNA (1)...(19): siRNA sense strand
gauaauguuugcagcuucu

SEQ ID NO: 605438 - RNA, 19 nt, Homo sapiens
  misc_RNA (1)...(19): siRNA sense strand
gaauugcaagucuacauau

SEQ ID NO: 605439 - RNA, 19 nt, Homo sapiens
  misc_RNA (1)...(19): siRNA sense strand
acucucaccuuaauugcua

SEQ ID NO: 605440 - RNA, 19 nt, Homo sapiens
  misc_RNA (1)...(19): siRNA sense strand
cuacagcaccuuucuggaa

SEQ ID NO: 605441 - RNA, 19 nt, Homo sapiens
  misc_RNA (1)...(19): siRNA sense strand
acagucaaguguucaguug

SEQ ID NO: 605442 - RNA, 19 nt, Homo sapiens
  misc_RNA (1)...(19): siRNA sense strand
guugaaggaugcgggagua

SEQ ID NO: 605443 - RNA, 19 nt, Homo sapiens
  misc_RNA (1)...(19): siRNA sense strand
gaauucgaacccaaacaaa

SEQ ID NO: 605444 - RNA, 19 nt, Homo sapiens
  misc_RNA (1)...(19): siRNA sense strand
ggaggauacggauaugaaa

SEQ ID NO: 605445 - RNA, 19 nt, Homo sapiens
  misc_RNA (1)...(19): siRNA sense strand
ggucauauagucuuguaga

SEQ ID NO: 605446 - RNA, 19 nt, Homo sapiens
  misc_RNA (1)...(19): siRNA sense strand
gagauuuucuggaguaaga

SEQ ID NO: 605447 - RNA, 19 nt, Homo sapiens
  misc_RNA (1)...(19): siRNA sense strand
cagaguacgcaaacacuuu

SEQ ID NO: 605448 - RNA, 19 nt, Homo sapiens
  misc_RNA (1)...(19): siRNA sense strand
uggagaacccagauagaua

SEQ ID NO: 605449 - RNA, 19 nt, Homo sapiens
  misc_RNA (1)...(19): siRNA sense strand
ugggagcucugucacugua

SEQ ID NO: 605450 - RNA, 19 nt, Homo sapiens
  misc_RNA (1)...(19): siRNA sense strand
gaaucuaggaaauuggaaa

SEQ ID NO: 605451 - RNA, 19 nt, Homo sapiens
  misc_RNA (1)...(19): siRNA sense strand
gcaguucugugaauaugac

SEQ ID NO: 605452 - RNA, 19 nt, Homo sapiens
  misc_RNA (1)...(19): siRNA sense strand
caagaagguggcucuguga

SEQ ID NO: 605453 - RNA, 19 nt, Homo sapiens
  misc_RNA (1)...(19): siRNA sense strand
agguggagaucuacucuuu

SEQ ID NO: 605454 - RNA, 19 nt, Homo sapiens
  misc_RNA (1)...(19): siRNA sense strand
ccacaucuacgcugacaau

SEQ ID NO: 605455 - RNA, 19 nt, Homo sapiens
  misc_RNA (1)...(19): siRNA sense strand
acacugucaucaucucuug

SEQ ID NO: 605456 - RNA, 19 nt, Homo sapiens
  misc_RNA (1)...(19): siRNA sense strand
aggcuaaguuacauauuga

SEQ ID NO: 605457 - RNA, 19 nt, Homo sapiens
  misc_RNA (1)...(19): siRNA sense strand
uggaaaagcucuuguuugu

SEQ ID NO: 605458 - RNA, 19 nt, Homo sapiens
  misc_RNA (1)...(19): siRNA sense strand
gcuggagauugaauuacuu

SEQ ID NO: 605459 - RNA, 19 nt, Homo sapiens
  misc_RNA (1)...(19): siRNA sense strand
agaauugcaagucuacaua

SEQ ID NO: 605460 - RNA, 19 nt, Homo sapiens
  misc_RNA (1)...(19): siRNA sense strand
gaaggaguuaauuugauug

SEQ ID NO: 605461 - RNA, 19 nt, Homo sapiens
  misc_RNA (1)...(19): siRNA sense strand
cgcaaacacuuuaugucaa

SEQ ID NO: 605462 - RNA, 19 nt, Homo sapiens
  misc_RNA (1)...(19): siRNA sense strand
guacgcaaacacuuuaugu

SEQ ID NO: 605463 - RNA, 19 nt, Homo sapiens
  misc_RNA (1)...(19): siRNA sense strand
agaguacgcaaacacuuua

SEQ ID NO: 605464 - RNA, 19 nt, Homo sapiens
  misc_RNA (1)...(19): siRNA sense strand
acauauugaugacauggaa

SEQ ID NO: 605465 - RNA, 19 nt, Homo sapiens
  misc_RNA (1)...(19): siRNA sense strand
gaagauggucgugauccuu

SEQ ID NO: 605466 - RNA, 19 nt, Homo sapiens
  misc_RNA (1)...(19): siRNA sense strand
gauguucaaggaagagaaa

SEQ ID NO: 605467 - RNA, 19 nt, Homo sapiens
  misc_RNA (1)...(19): siRNA sense strand
gugaauaugacaugcuuga

SEQ ID NO: 605468 - RNA, 19 nt, Homo sapiens
  misc_RNA (1)...(19): siRNA sense strand
auacggauaugaaaucucu

SEQ ID NO: 605469 - RNA, 19 nt, Homo sapiens
  misc_RNA (1)...(19): siRNA sense strand
cuaugaggauggaagauuc

SEQ ID NO: 605470 - RNA, 19 nt, Homo sapiens
  misc_RNA (1)...(19): siRNA sense strand
augggaaggugacgaauga

SEQ ID NO: 605471 - RNA, 19 nt, Homo sapiens
  misc_RNA (1)...(19): siRNA sense strand
gcuaugaggauggaagauu

SEQ ID NO: 605472 - RNA, 19 nt, Homo sapiens
  misc_RNA (1)...(19): siRNA sense strand
gggaaucuacagcaccuuu

SEQ ID NO: 605473 - RNA, 19 nt, Homo sapiens
  misc_RNA (1)...(19): siRNA sense strand
cuaaggauccagagauuca

SEQ ID NO: 605474 - RNA, 19 nt, Homo sapiens
  misc_RNA (1)...(19): siRNA sense strand
gucaucaucucuuguacau

SEQ ID NO: 605475 - RNA, 19 nt, Homo sapiens
  misc_RNA (1)...(19): siRNA sense strand
ggagauugaauuacuuaag

SEQ ID NO: 605476 - RNA, 19 nt, Homo sapiens
  misc_RNA (1)...(19): siRNA sense strand
gcaagguuccuagcgugua

SEQ ID NO: 605477 - RNA, 19 nt, Homo sapiens
  misc_RNA (1)...(19): siRNA sense strand
cagaaaagagguggaauua

SEQ ID NO: 605478 - RNA, 19 nt, Homo sapiens
  misc_RNA (1)...(19): siRNA sense strand
gaguuuggaaguaaccuuu

SEQ ID NO: 605479 - RNA, 19 nt, Homo sapiens
  misc_RNA (1)...(19): siRNA sense strand
caaaggcagaguacgcaaa

SEQ ID NO: 605480 - RNA, 19 nt, Homo sapiens
  misc_RNA (1)...(19): siRNA sense strand
guucuuguuugccgagcua

SEQ ID NO: 605481 - RNA, 19 nt, Homo sapiens
  misc_RNA (1)...(19): siRNA sense strand
cccagaaucuagauaucuu

SEQ ID NO: 605482 - RNA, 19 nt, Homo sapiens
  misc_RNA (1)...(19): siRNA sense strand
gaggauacggauaugaaau

SEQ ID NO: 605483 - RNA, 19 nt, Homo sapiens
  misc_RNA (1)...(19): siRNA sense strand
gucauauagucuuguagaa

SEQ ID NO: 605484 - RNA, 19 nt, Homo sapiens
  misc_RNA (1)...(19): siRNA sense strand
ugaaggaugcgggaguaua

SEQ ID NO: 605485 - RNA, 19 nt, Homo sapiens
  misc_RNA (1)...(19): siRNA sense strand
gcagaguacgcaaacacuu

SEQ ID NO: 605486 - RNA, 19 nt, Homo sapiens
  misc_RNA (1)...(19): siRNA sense strand
ggauacggauaugaaaucu

SEQ ID NO: 605487 - RNA, 19 nt, Homo sapiens
  misc_RNA (1)...(19): siRNA sense strand
ggacaccgcuggagggauu

SEQ ID NO: 605488 - RNA, 19 nt, Homo sapiens
  misc_RNA (1)...(19): siRNA sense strand
caacaucacccgcaaggua

SEQ ID NO: 605489 - RNA, 19 nt, Homo sapiens
  misc_RNA (1)...(19): siRNA sense strand
ugaaagaaguggaugaugu

SEQ ID NO: 605490 - RNA, 19 nt, Homo sapiens
  misc_RNA (1)...(19): siRNA sense strand
gaaagaaguggaugaugug

SEQ ID NO: 605491 - RNA, 19 nt, Homo sapiens
  misc_RNA (1)...(19): siRNA sense strand
gcgaacauccucgugcuua

SEQ ID NO: 605492 - RNA, 19 nt, Homo sapiens
  misc_RNA (1)...(19): siRNA sense strand
gggagaauguugacucuac

SEQ ID NO: 605493 - RNA, 19 nt, Homo sapiens
  misc_RNA (1)...(19): siRNA sense strand
gcagagucgugucccaaau

SEQ ID NO: 605494 - RNA, 19 nt, Homo sapiens
  misc_RNA (1)...(19): siRNA sense strand
agaaguggaugaugugcuu

SEQ ID NO: 605495 - RNA, 19 nt, Homo sapiens
  misc_RNA (1)...(19): siRNA sense strand
gcagcugccugggagaaug

SEQ ID NO: 605496 - RNA, 19 nt, Homo sapiens
  misc_RNA (1)...(19): siRNA sense strand
gguaacaaaucggaaguac

SEQ ID NO: 605497 - RNA, 19 nt, Homo sapiens
  misc_RNA (1)...(19): siRNA sense strand
caaaucggaaguacccaaa

SEQ ID NO: 605498 - RNA, 19 nt, Homo sapiens
  misc_RNA (1)...(19): siRNA sense strand
ggagaauguugacucuacu

SEQ ID NO: 605499 - RNA, 19 nt, Homo sapiens
  misc_RNA (1)...(19): siRNA sense strand
gugcugcaaugcucagugu

SEQ ID NO: 605500 - RNA, 19 nt, Homo sapiens
  misc_RNA (1)...(19): siRNA sense strand
gaugaccaccuucuacaag

SEQ ID NO: 605501 - RNA, 19 nt, Homo sapiens
  misc_RNA (1)...(19): siRNA sense strand
ggaaguacccaaaacugaa

SEQ ID NO: 605502 - RNA, 19 nt, Homo sapiens
  misc_RNA (1)...(19): siRNA sense strand
ugaccaccuucuacaagug

SEQ ID NO: 605503 - RNA, 19 nt, Homo sapiens
  misc_RNA (1)...(19): siRNA sense strand
gagcagcugccugggagaa

SEQ ID NO: 605504 - RNA, 19 nt, Homo sapiens
  misc_RNA (1)...(19): siRNA sense strand
gaaguacccaaaacugaaa

SEQ ID NO: 605505 - RNA, 19 nt, Homo sapiens
  misc_RNA (1)...(19): siRNA sense strand
gacccgcucugcagaugag

SEQ ID NO: 605506 - RNA, 19 nt, Homo sapiens
  misc_RNA (1)...(19): siRNA sense strand
cgaacauccucgugcuuac

SEQ ID NO: 605507 - RNA, 19 nt, Homo sapiens
  misc_RNA (1)...(19): siRNA sense strand
gaacauccucgugcuuacu

SEQ ID NO: 605508 - RNA, 19 nt, Homo sapiens
  misc_RNA (1)...(19): siRNA sense strand
aacaucacccgcaagguaa

SEQ ID NO: 605509 - RNA, 19 nt, Homo sapiens
  misc_RNA (1)...(19): siRNA sense strand
cagagucgugucccaaaug

SEQ ID NO: 605510 - RNA, 19 nt, Homo sapiens
  misc_RNA (1)...(19): siRNA sense strand
ggacaaagcgaaagaagaa

SEQ ID NO: 605511 - RNA, 19 nt, Homo sapiens
  misc_RNA (1)...(19): siRNA sense strand
agaaacagccuaccucaua

SEQ ID NO: 605512 - RNA, 19 nt, Homo sapiens
  misc_RNA (1)...(19): siRNA sense strand
gaaacauaauucacgugua

SEQ ID NO: 605513 - RNA, 19 nt, Homo sapiens
  misc_RNA (1)...(19): siRNA sense strand
ggagagagaccauuugaau

SEQ ID NO: 605514 - RNA, 19 nt, Homo sapiens
  misc_RNA (1)...(19): siRNA sense strand
acccagagcucacaccuua

SEQ ID NO: 605515 - RNA, 19 nt, Homo sapiens
  misc_RNA (1)...(19): siRNA sense strand
gaaacagccuaccucauag

SEQ ID NO: 605516 - RNA, 19 nt, Homo sapiens
  misc_RNA (1)...(19): siRNA sense strand
gggaggaccuucaaugauc

SEQ ID NO: 605517 - RNA, 19 nt, Homo sapiens
  misc_RNA (1)...(19): siRNA sense strand
gauggagucugcucaggaa

SEQ ID NO: 605518 - RNA, 19 nt, Homo sapiens
  misc_RNA (1)...(19): siRNA sense strand
ggagagaggcccuaugugu

SEQ ID NO: 605519 - RNA, 19 nt, Homo sapiens
  misc_RNA (1)...(19): siRNA sense strand
guacuaaacagauuacguu

SEQ ID NO: 605520 - RNA, 19 nt, Homo sapiens
  misc_RNA (1)...(19): siRNA sense strand
gggaaaggauuuguucaga

SEQ ID NO: 605521 - RNA, 19 nt, Homo sapiens
  misc_RNA (1)...(19): siRNA sense strand
agaguuagcuccaaauucu

SEQ ID NO: 605522 - RNA, 19 nt, Homo sapiens
  misc_RNA (1)...(19): siRNA sense strand
gcgcuaagcccuacaagug

SEQ ID NO: 605523 - RNA, 19 nt, Homo sapiens
  misc_RNA (1)...(19): siRNA sense strand
caaaauuccuccuagaaaa

SEQ ID NO: 605524 - RNA, 19 nt, Homo sapiens
  misc_RNA (1)...(19): siRNA sense strand
ggauguggcuguggacuuc

SEQ ID NO: 605525 - RNA, 19 nt, Homo sapiens
  misc_RNA (1)...(19): siRNA sense strand
agacuacacuggaaaauaa

SEQ ID NO: 605526 - RNA, 19 nt, Homo sapiens
  misc_RNA (1)...(19): siRNA sense strand
guggugcucuugacacaaa

SEQ ID NO: 605527 - RNA, 19 nt, Homo sapiens
  misc_RNA (1)...(19): siRNA sense strand
caccagagaacccacaaua

SEQ ID NO: 605528 - RNA, 19 nt, Homo sapiens
  misc_RNA (1)...(19): siRNA sense strand
cgacacagaggaccgagua

SEQ ID NO: 605529 - RNA, 19 nt, Homo sapiens
  misc_RNA (1)...(19): siRNA sense strand
gauugugccuuguccucua

SEQ ID NO: 605530 - RNA, 19 nt, Homo sapiens
  misc_RNA (1)...(19): siRNA sense strand
auaaagaguuagcuccaaa

SEQ ID NO: 605531 - RNA, 19 nt, Homo sapiens
  misc_RNA (1)...(19): siRNA sense strand
ucagagcucuucccucaca

SEQ ID NO: 605532 - RNA, 19 nt, Homo sapiens
  misc_RNA (1)...(19): siRNA sense strand
ccauaugcaugcaacaaau

SEQ ID NO: 605533 - RNA, 19 nt, Homo sapiens
  misc_RNA (1)...(19): siRNA sense strand
gaagaagcacuuugacaac

SEQ ID NO: 605534 - RNA, 19 nt, Homo sapiens
  misc_RNA (1)...(19): siRNA sense strand
caucagaagagcugugaaa

SEQ ID NO: 605535 - RNA, 19 nt, Homo sapiens
  misc_RNA (1)...(19): siRNA sense strand
agaagaagcacuuugacaa

SEQ ID NO: 605536 - RNA, 19 nt, Homo sapiens
  misc_RNA (1)...(19): siRNA sense strand
ccagagcucacaccuuauu

SEQ ID NO: 605537 - RNA, 19 nt, Homo sapiens
  misc_RNA (1)...(19): siRNA sense strand
ccuauaugcugaagaugga

SEQ ID NO: 605538 - RNA, 19 nt, Homo sapiens
  misc_RNA (1)...(19): siRNA sense strand
gcaaacaguggugcucuug

SEQ ID NO: 605539 - RNA, 19 nt, Homo sapiens
  misc_RNA (1)...(19): siRNA sense strand
ugccuuguccucuacauua

SEQ ID NO: 605540 - RNA, 19 nt, Homo sapiens
  misc_RNA (1)...(19): siRNA sense strand
gcucccaccucaucagaca

SEQ ID NO: 605541 - RNA, 19 nt, Homo sapiens
  misc_RNA (1)...(19): siRNA sense strand
ggacucacacuggcgcuaa

SEQ ID NO: 605542 - RNA, 19 nt, Homo sapiens
  misc_RNA (1)...(19): siRNA sense strand
cagugaaugugguaaaaua

SEQ ID NO: 605543 - RNA, 19 nt, Homo sapiens
  misc_RNA (1)...(19): siRNA sense strand
gcaaacaguggcgcucuug

SEQ ID NO: 605544 - RNA, 19 nt, Homo sapiens
  misc_RNA (1)...(19): siRNA sense strand
cagagaacccacaauagga

SEQ ID NO: 605545 - RNA, 19 nt, Homo sapiens
  misc_RNA (1)...(19): siRNA sense strand
ucacacagcaucagagagu

SEQ ID NO: 605546 - RNA, 19 nt, Homo sapiens
  misc_RNA (1)...(19): siRNA sense strand
ggcccuauaugcugaagau

SEQ ID NO: 605547 - RNA, 19 nt, Homo sapiens
  misc_RNA (1)...(19): siRNA sense strand
guggcgcucuugacacaaa

SEQ ID NO: 605548 - RNA, 19 nt, Homo sapiens
  misc_RNA (1)...(19): siRNA sense strand
ccagagaacccacaauagg

SEQ ID NO: 605549 - RNA, 19 nt, Homo sapiens
  misc_RNA (1)...(19): siRNA sense strand
gaacccacaauaggacaaa

SEQ ID NO: 605550 - RNA, 19 nt, Homo sapiens
  misc_RNA (1)...(19): siRNA sense strand
caaggaaggcaaugguugu

SEQ ID NO: 605551 - RNA, 19 nt, Homo sapiens
  misc_RNA (1)...(19): siRNA sense strand
cuacaagugucaggacugu

SEQ ID NO: 605552 - RNA, 19 nt, Homo sapiens
  misc_RNA (1)...(19): siRNA sense strand
ucaagacugugggaaagga

SEQ ID NO: 605553 - RNA, 19 nt, Homo sapiens
  misc_RNA (1)...(19): siRNA sense strand
gaaggcaaugguuguagga

SEQ ID NO: 605554 - RNA, 19 nt, Homo sapiens
  misc_RNA (1)...(19): siRNA sense strand
gugggaggaccuucaauga

SEQ ID NO: 605555 - RNA, 19 nt, Homo sapiens
  misc_RNA (1)...(19): siRNA sense strand
ccagauccaggcccuauau

SEQ ID NO: 605556 - RNA, 19 nt, Homo sapiens
  misc_RNA (1)...(19): siRNA sense strand
ggcaaacaguggugcucuu

SEQ ID NO: 605557 - RNA, 19 nt, Homo sapiens
  misc_RNA (1)...(19): siRNA sense strand
aggcaaugguuguaggaaa

SEQ ID NO: 605558 - RNA, 19 nt, Homo sapiens
  misc_RNA (1)...(19): siRNA sense strand
caguggcgcucuugacaca

SEQ ID NO: 605559 - RNA, 19 nt, Homo sapiens
  misc_RNA (1)...(19): siRNA sense strand
gugggagacuacacuggaa

SEQ ID NO: 605560 - RNA, 19 nt, Homo sapiens
  misc_RNA (1)...(19): siRNA sense strand
uaggugcacugccugugaa

SEQ ID NO: 605561 - RNA, 19 nt, Homo sapiens
  misc_RNA (1)...(19): siRNA sense strand
gcuccaaauucugacauuc

SEQ ID NO: 605562 - RNA, 19 nt, Homo sapiens
  misc_RNA (1)...(19): siRNA sense strand
aaagaguuagcuccaaauu

SEQ ID NO: 605563 - RNA, 19 nt, Homo sapiens
  misc_RNA (1)...(19): siRNA sense strand
aaacaguggugcucuugac

SEQ ID NO: 605564 - RNA, 19 nt, Homo sapiens
  misc_RNA (1)...(19): siRNA sense strand
ccagagcucccaccucauc

SEQ ID NO: 605565 - RNA, 19 nt, Homo sapiens
  misc_RNA (1)...(19): siRNA sense strand
ucggaguacuaaacagauu

SEQ ID NO: 605566 - RNA, 19 nt, Homo sapiens
  misc_RNA (1)...(19): siRNA sense strand
ccacaaaauuccuccuaga

SEQ ID NO: 605567 - RNA, 19 nt, Homo sapiens
  misc_RNA (1)...(19): siRNA sense strand
ggcaaacaguggcgcucuu

SEQ ID NO: 605568 - RNA, 19 nt, Homo sapiens
  misc_RNA (1)...(19): siRNA sense strand
cggaguacuaaacagauua

SEQ ID NO: 605569 - RNA, 19 nt, Homo sapiens
  misc_RNA (1)...(19): siRNA sense strand
ggcaaugguuguaggaaaa

SEQ ID NO: 605570 - RNA, 19 nt, Homo sapiens
  misc_RNA (1)...(19): siRNA sense strand
aauaaagaguuagcuccaa

SEQ ID NO: 605571 - RNA, 19 nt, Homo sapiens
  misc_RNA (1)...(19): siRNA sense strand
caaagcgaaagaagaaaca

SEQ ID NO: 605572 - RNA, 19 nt, Homo sapiens
  misc_RNA (1)...(19): siRNA sense strand
acaauaggacaaagcgaaa

SEQ ID NO: 605573 - RNA, 19 nt, Homo sapiens
  misc_RNA (1)...(19): siRNA sense strand
gcaugcaacaaauguggaa

SEQ ID NO: 605574 - RNA, 19 nt, Homo sapiens
  misc_RNA (1)...(19): siRNA sense strand
cagaagaagcacuuugaca

SEQ ID NO: 605575 - RNA, 19 nt, Homo sapiens
  misc_RNA (1)...(19): siRNA sense strand
agagaggcccuaugugugu

SEQ ID NO: 605576 - RNA, 19 nt, Homo sapiens
  misc_RNA (1)...(19): siRNA sense strand
ccaggaaguccaagacaca

SEQ ID NO: 605577 - RNA, 19 nt, Homo sapiens
  misc_RNA (1)...(19): siRNA sense strand
caaacaguggugcucuuga

SEQ ID NO: 605578 - RNA, 19 nt, Homo sapiens
  misc_RNA (1)...(19): siRNA sense strand
gagacuacacuggaaaaua

SEQ ID NO: 605579 - RNA, 19 nt, Homo sapiens
  misc_RNA (1)...(19): siRNA sense strand
gagcucccaccucaucaga

SEQ ID NO: 605580 - RNA, 19 nt, Homo sapiens
  misc_RNA (1)...(19): siRNA sense strand
aaugaucgcucagccaucu

SEQ ID NO: 605581 - RNA, 19 nt, Homo sapiens
  misc_RNA (1)...(19): siRNA sense strand
cuaugugugucaagacugu

SEQ ID NO: 605582 - RNA, 19 nt, Homo sapiens
  misc_RNA (1)...(19): siRNA sense strand
ggcccuaugugugucaaga

SEQ ID NO: 605583 - RNA, 19 nt, Homo sapiens
  misc_RNA (1)...(19): siRNA sense strand
uuccggcaguuccguuaua

SEQ ID NO: 605584 - RNA, 19 nt, Homo sapiens
  misc_RNA (1)...(19): siRNA sense strand
uagagggugugaccuggau

SEQ ID NO: 605585 - RNA, 19 nt, Homo sapiens
  misc_RNA (1)...(19): siRNA sense strand
ugucaagacugugggaaag

SEQ ID NO: 605586 - RNA, 19 nt, Homo sapiens
  misc_RNA (1)...(19): siRNA sense strand
uaaagaguuagcuccaaau

SEQ ID NO: 605587 - RNA, 19 nt, Homo sapiens
  misc_RNA (1)...(19): siRNA sense strand
caaacaguggcgcucuuga

SEQ ID NO: 605588 - RNA, 19 nt, Homo sapiens
  misc_RNA (1)...(19): siRNA sense strand
caguggugcucuugacaca

SEQ ID NO: 605589 - RNA, 19 nt, Homo sapiens
  misc_RNA (1)...(19): siRNA sense strand
ccggaacccaagauacuuu

SEQ ID NO: 605590 - RNA, 19 nt, Homo sapiens
  misc_RNA (1)...(19): siRNA sense strand
cuaaggcacgcuccaagga

SEQ ID NO: 605591 - RNA, 19 nt, Homo sapiens
  misc_RNA (1)...(19): siRNA sense strand
ccggagagaggcccuaugu

SEQ ID NO: 605592 - RNA, 19 nt, Homo sapiens
  misc_RNA (1)...(19): siRNA sense strand
cgaguaccgcgaugugaug

SEQ ID NO: 605593 - RNA, 19 nt, Homo sapiens
  misc_RNA (1)...(19): siRNA sense strand
gauccaggcccuauaugcu

SEQ ID NO: 605594 - RNA, 19 nt, Homo sapiens
  misc_RNA (1)...(19): siRNA sense strand
aaucgcagcacccagagaa

SEQ ID NO: 605595 - RNA, 19 nt, Homo sapiens
  misc_RNA (1)...(19): siRNA sense strand
cuggaugucugaggaggaa

SEQ ID NO: 605596 - RNA, 19 nt, Homo sapiens
  misc_RNA (1)...(19): siRNA sense strand
cauaugcaugcaacaaaug

SEQ ID NO: 605597 - RNA, 19 nt, Homo sapiens
  misc_RNA (1)...(19): siRNA sense strand
gccugaaaguacaagaauc

SEQ ID NO: 605598 - RNA, 19 nt, Homo sapiens
  misc_RNA (1)...(19): siRNA sense strand
cagcaucagagaguucauu

SEQ ID NO: 605599 - RNA, 19 nt, Homo sapiens
  misc_RNA (1)...(19): siRNA sense strand
gccaaggaaggcaaugguu

SEQ ID NO: 605600 - RNA, 19 nt, Homo sapiens
  misc_RNA (1)...(19): siRNA sense strand
gccuuguccucuacauuag

SEQ ID NO: 605601 - RNA, 19 nt, Homo sapiens
  misc_RNA (1)...(19): siRNA sense strand
gacaaagcgaaagaagaaa

SEQ ID NO: 605602 - RNA, 19 nt, Homo sapiens
  misc_RNA (1)...(19): siRNA sense strand
caccucaucagacaucaga

SEQ ID NO: 605603 - RNA, 19 nt, Homo sapiens
  misc_RNA (1)...(19): siRNA sense strand
cuaggugcacugccuguga

SEQ ID NO: 605604 - RNA, 19 nt, Homo sapiens
  misc_RNA (1)...(19): siRNA sense strand
ggaguacuaaacagauuac

SEQ ID NO: 605605 - RNA, 19 nt, Homo sapiens
  misc_RNA (1)...(19): siRNA sense strand
ucagaagagcugugaaagg

SEQ ID NO: 605606 - RNA, 19 nt, Homo sapiens
  misc_RNA (1)...(19): siRNA sense strand
gccagagguuccggcaguu

SEQ ID NO: 605607 - RNA, 19 nt, Homo sapiens
  misc_RNA (1)...(19): siRNA sense strand
ggacaaagcgaaagaagaa

SEQ ID NO: 605608 - RNA, 19 nt, Homo sapiens
  misc_RNA (1)...(19): siRNA sense strand
agaaacagccuaccucaua

SEQ ID NO: 605609 - RNA, 19 nt, Homo sapiens
  misc_RNA (1)...(19): siRNA sense strand
gaaacauaauucacgugua

SEQ ID NO: 605610 - RNA, 19 nt, Homo sapiens
  misc_RNA (1)...(19): siRNA sense strand
ggagagagaccauuugaau

SEQ ID NO: 605611 - RNA, 19 nt, Homo sapiens
  misc_RNA (1)...(19): siRNA sense strand
acccagagcucacaccuua

SEQ ID NO: 605612 - RNA, 19 nt, Homo sapiens
  misc_RNA (1)...(19): siRNA sense strand
gaaacagccuaccucauag

SEQ ID NO: 605613 - RNA, 19 nt, Homo sapiens
  misc_RNA (1)...(19): siRNA sense strand
gggaggaccuucaaugauc

SEQ ID NO: 605614 - RNA, 19 nt, Homo sapiens
  misc_RNA (1)...(19): siRNA sense strand
gauggagucugcucaggaa

SEQ ID NO: 605615 - RNA, 19 nt, Homo sapiens
  misc_RNA (1)...(19): siRNA sense strand
ggagagaggcccuaugugu

SEQ ID NO: 605616 - RNA, 19 nt, Homo sapiens
  misc_RNA (1)...(19): siRNA sense strand
guacuaaacagauuacguu

SEQ ID NO: 605617 - RNA, 19 nt, Homo sapiens
  misc_RNA (1)...(19): siRNA sense strand
gggaaaggauuuguucaga

SEQ ID NO: 605618 - RNA, 19 nt, Homo sapiens
  misc_RNA (1)...(19): siRNA sense strand
agaguuagcuccaaauucu

SEQ ID NO: 605619 - RNA, 19 nt, Homo sapiens
  misc_RNA (1)...(19): siRNA sense strand
gcgcuaagcccuacaagug

SEQ ID NO: 605620 - RNA, 19 nt, Homo sapiens
  misc_RNA (1)...(19): siRNA sense strand
caaaauuccuccuagaaaa

SEQ ID NO: 605621 - RNA, 19 nt, Homo sapiens
  misc_RNA (1)...(19): siRNA sense strand
ggauguggcuguggacuuc

SEQ ID NO: 605622 - RNA, 19 nt, Homo sapiens
  misc_RNA (1)...(19): siRNA sense strand
agacuacacuggaaaauaa

SEQ ID NO: 605623 - RNA, 19 nt, Homo sapiens
  misc_RNA (1)...(19): siRNA sense strand
guggugcucuugacacaaa

SEQ ID NO: 605624 - RNA, 19 nt, Homo sapiens
  misc_RNA (1)...(19): siRNA sense strand
caccagagaacccacaaua

SEQ ID NO: 605625 - RNA, 19 nt, Homo sapiens
  misc_RNA (1)...(19): siRNA sense strand
cgacacagaggaccgagua

SEQ ID NO: 605626 - RNA, 19 nt, Homo sapiens
  misc_RNA (1)...(19): siRNA sense strand
gauugugccuuguccucua

SEQ ID NO: 605627 - RNA, 19 nt, Homo sapiens
  misc_RNA (1)...(19): siRNA sense strand
auaaagaguuagcuccaaa

SEQ ID NO: 605628 - RNA, 19 nt, Homo sapiens
  misc_RNA (1)...(19): siRNA sense strand
ucagagcucuucccucaca

SEQ ID NO: 605629 - RNA, 19 nt, Homo sapiens
  misc_RNA (1)...(19): siRNA sense strand
ccauaugcaugcaacaaau

SEQ ID NO: 605630 - RNA, 19 nt, Homo sapiens
  misc_RNA (1)...(19): siRNA sense strand
gaagaagcacuuugacaac

SEQ ID NO: 605631 - RNA, 19 nt, Homo sapiens
  misc_RNA (1)...(19): siRNA sense strand
caucagaagagcugugaaa

SEQ ID NO: 605632 - RNA, 19 nt, Homo sapiens
  misc_RNA (1)...(19): siRNA sense strand
agaagaagcacuuugacaa

SEQ ID NO: 605633 - RNA, 19 nt, Homo sapiens
  misc_RNA (1)...(19): siRNA sense strand
ccagagcucacaccuuauu

SEQ ID NO: 605634 - RNA, 19 nt, Homo sapiens
  misc_RNA (1)...(19): siRNA sense strand
ccuauaugcugaagaugga

SEQ ID NO: 605635 - RNA, 19 nt, Homo sapiens
  misc_RNA (1)...(19): siRNA sense strand
gcaaacaguggugcucuug

SEQ ID NO: 605636 - RNA, 19 nt, Homo sapiens
  misc_RNA (1)...(19): siRNA sense strand
ugccuuguccucuacauua

SEQ ID NO: 605637 - RNA, 19 nt, Homo sapiens
  misc_RNA (1)...(19): siRNA sense strand
gcucccaccucaucagaca

SEQ ID NO: 605638 - RNA, 19 nt, Homo sapiens
  misc_RNA (1)...(19): siRNA sense strand
ggacucacacuggcgcuaa

SEQ ID NO: 605639 - RNA, 19 nt, Homo sapiens
  misc_RNA (1)...(19): siRNA sense strand
cagugaaugugguaaaaua

SEQ ID NO: 605640 - RNA, 19 nt, Homo sapiens
  misc_RNA (1)...(19): siRNA sense strand
gcaaacaguggcgcucuug

SEQ ID NO: 605641 - RNA, 19 nt, Homo sapiens
  misc_RNA (1)...(19): siRNA sense strand
cagagaacccacaauagga

SEQ ID NO: 605642 - RNA, 19 nt, Homo sapiens
  misc_RNA (1)...(19): siRNA sense strand
ggcccuauaugcugaagau

SEQ ID NO: 605643 - RNA, 19 nt, Homo sapiens
  misc_RNA (1)...(19): siRNA sense strand
ucacacagcaucagagagu

SEQ ID NO: 605644 - RNA, 19 nt, Homo sapiens
  misc_RNA (1)...(19): siRNA sense strand
uaaauuggauccucuuccu

SEQ ID NO: 605645 - RNA, 19 nt, Homo sapiens
  misc_RNA (1)...(19): siRNA sense strand
guggcgcucuugacacaaa

SEQ ID NO: 605646 - RNA, 19 nt, Homo sapiens
  misc_RNA (1)...(19): siRNA sense strand
ccagagaacccacaauagg

SEQ ID NO: 605647 - RNA, 19 nt, Homo sapiens
  misc_RNA (1)...(19): siRNA sense strand
ccagcuggacccuaaauug

SEQ ID NO: 605648 - RNA, 19 nt, Homo sapiens
  misc_RNA (1)...(19): siRNA sense strand
gaacccacaauaggacaaa

SEQ ID NO: 605649 - RNA, 19 nt, Homo sapiens
  misc_RNA (1)...(19): siRNA sense strand
gcuggacccuaaauuggau

SEQ ID NO: 605650 - RNA, 19 nt, Homo sapiens
  misc_RNA (1)...(19): siRNA sense strand
cuacaagugucaggacugu

SEQ ID NO: 605651 - RNA, 19 nt, Homo sapiens
  misc_RNA (1)...(19): siRNA sense strand
ucaagacugugggaaagga

SEQ ID NO: 605652 - RNA, 19 nt, Homo sapiens
  misc_RNA (1)...(19): siRNA sense strand
gaaggcaaugguuguagga

SEQ ID NO: 605653 - RNA, 19 nt, Homo sapiens
  misc_RNA (1)...(19): siRNA sense strand
caaggaaggcaaugguugu

SEQ ID NO: 605654 - RNA, 19 nt, Homo sapiens
  misc_RNA (1)...(19): siRNA sense strand
ccagauccaggcccuauau

SEQ ID NO: 605655 - RNA, 19 nt, Homo sapiens
  misc_RNA (1)...(19): siRNA sense strand
gugggaggaccuucaauga

SEQ ID NO: 605656 - RNA, 19 nt, Homo sapiens
  misc_RNA (1)...(19): siRNA sense strand
ggcaaacaguggugcucuu

SEQ ID NO: 605657 - RNA, 19 nt, Homo sapiens
  misc_RNA (1)...(19): siRNA sense strand
aggcaaugguuguaggaaa

SEQ ID NO: 605658 - RNA, 19 nt, Homo sapiens
  misc_RNA (1)...(19): siRNA sense strand
caguggcgcucuugacaca

SEQ ID NO: 605659 - RNA, 19 nt, Homo sapiens
  misc_RNA (1)...(19): siRNA sense strand
uaggugcacugccugugaa

SEQ ID NO: 605660 - RNA, 19 nt, Homo sapiens
  misc_RNA (1)...(19): siRNA sense strand
gcuccaaauucugacauuc

SEQ ID NO: 605661 - RNA, 19 nt, Homo sapiens
  misc_RNA (1)...(19): siRNA sense strand
aaagaguuagcuccaaauu

SEQ ID NO: 605662 - RNA, 19 nt, Homo sapiens
  misc_RNA (1)...(19): siRNA sense strand
gugggagacuacacuggaa

SEQ ID NO: 605663 - RNA, 19 nt, Homo sapiens
  misc_RNA (1)...(19): siRNA sense strand
aaacaguggugcucuugac

SEQ ID NO: 605664 - RNA, 19 nt, Homo sapiens
  misc_RNA (1)...(19): siRNA sense strand
ccagagcucccaccucauc

SEQ ID NO: 605665 - RNA, 19 nt, Homo sapiens
  misc_RNA (1)...(19): siRNA sense strand
ucggaguacuaaacagauu

SEQ ID NO: 605666 - RNA, 19 nt, Homo sapiens
  misc_RNA (1)...(19): siRNA sense strand
ccacaaaauuccuccuaga

SEQ ID NO: 605667 - RNA, 19 nt, Homo sapiens
  misc_RNA (1)...(19): siRNA sense strand
ggcaaacaguggcgcucuu

SEQ ID NO: 605668 - RNA, 19 nt, Homo sapiens
  misc_RNA (1)...(19): siRNA sense strand
cggaguacuaaacagauua

SEQ ID NO: 605669 - RNA, 19 nt, Homo sapiens
  misc_RNA (1)...(19): siRNA sense strand
ggcaaugguuguaggaaaa

SEQ ID NO: 605670 - RNA, 19 nt, Homo sapiens
  misc_RNA (1)...(19): siRNA sense strand
aauaaagaguuagcuccaa

SEQ ID NO: 605671 - RNA, 19 nt, Homo sapiens
  misc_RNA (1)...(19): siRNA sense strand
caaagcgaaagaagaaaca

SEQ ID NO: 605672 - RNA, 19 nt, Homo sapiens
  misc_RNA (1)...(19): siRNA sense strand
acaauaggacaaagcgaaa

SEQ ID NO: 605673 - RNA, 19 nt, Homo sapiens
  misc_RNA (1)...(19): siRNA sense strand
gcaugcaacaaauguggaa

SEQ ID NO: 605674 - RNA, 19 nt, Homo sapiens
  misc_RNA (1)...(19): siRNA sense strand
cagaagaagcacuuugaca

SEQ ID NO: 605675 - RNA, 19 nt, Homo sapiens
  misc_RNA (1)...(19): siRNA sense strand
agagaggcccuaugugugu

SEQ ID NO: 605676 - RNA, 19 nt, Homo sapiens
  misc_RNA (1)...(19): siRNA sense strand
ccaggaaguccaagacaca

SEQ ID NO: 605677 - RNA, 19 nt, Homo sapiens
  misc_RNA (1)...(19): siRNA sense strand
caaacaguggugcucuuga

SEQ ID NO: 605678 - RNA, 19 nt, Homo sapiens
  misc_RNA (1)...(19): siRNA sense strand
gagacuacacuggaaaaua

SEQ ID NO: 605679 - RNA, 19 nt, Homo sapiens
  misc_RNA (1)...(19): siRNA sense strand
gagcucccaccucaucaga

SEQ ID NO: 605680 - RNA, 19 nt, Homo sapiens
  misc_RNA (1)...(19): siRNA sense strand
aaugaucgcucagccaucu

SEQ ID NO: 605681 - RNA, 19 nt, Homo sapiens
  misc_RNA (1)...(19): siRNA sense strand
cuaugugugucaagacugu

SEQ ID NO: 605682 - RNA, 19 nt, Homo sapiens
  misc_RNA (1)...(19): siRNA sense strand
ggcccuaugugugucaaga

SEQ ID NO: 605683 - RNA, 19 nt, Homo sapiens
  misc_RNA (1)...(19): siRNA sense strand
uagagggugugaccuggau

SEQ ID NO: 605684 - RNA, 19 nt, Homo sapiens
  misc_RNA (1)...(19): siRNA sense strand
ugucaagacugugggaaag

SEQ ID NO: 605685 - RNA, 19 nt, Homo sapiens
  misc_RNA (1)...(19): siRNA sense strand
uuccggcaguuccguuaua

SEQ ID NO: 605686 - RNA, 19 nt, Homo sapiens
  misc_RNA (1)...(19): siRNA sense strand
uaaagaguuagcuccaaau

SEQ ID NO: 605687 - RNA, 19 nt, Homo sapiens
  misc_RNA (1)...(19): siRNA sense strand
cagcuggacccuaaauugg

SEQ ID NO: 605688 - RNA, 19 nt, Homo sapiens
  misc_RNA (1)...(19): siRNA sense strand
caaacaguggcgcucuuga

SEQ ID NO: 605689 - RNA, 19 nt, Homo sapiens
  misc_RNA (1)...(19): siRNA sense strand
caguggugcucuugacaca

SEQ ID NO: 605690 - RNA, 19 nt, Homo sapiens
  misc_RNA (1)...(19): siRNA sense strand
gcugagaguccccuaauga

SEQ ID NO: 605691 - RNA, 19 nt, Homo sapiens
  misc_RNA (1)...(19): siRNA sense strand
ccggaacccaagauacuuu

SEQ ID NO: 605692 - RNA, 19 nt, Homo sapiens
  misc_RNA (1)...(19): siRNA sense strand
cuaaggcacgcuccaagga

SEQ ID NO: 605693 - RNA, 19 nt, Homo sapiens
  misc_RNA (1)...(19): siRNA sense strand
ccggagagaggcccuaugu

SEQ ID NO: 605694 - RNA, 19 nt, Homo sapiens
  misc_RNA (1)...(19): siRNA sense strand
cgaguaccgcgaugugaug

SEQ ID NO: 605695 - RNA, 19 nt, Homo sapiens
  misc_RNA (1)...(19): siRNA sense strand
gauccaggcccuauaugcu

SEQ ID NO: 605696 - RNA, 19 nt, Homo sapiens
  misc_RNA (1)...(19): siRNA sense strand
aaucgcagcacccagagaa

SEQ ID NO: 605697 - RNA, 19 nt, Homo sapiens
  misc_RNA (1)...(19): siRNA sense strand
cuggaugucugaggaggaa

SEQ ID NO: 605698 - RNA, 19 nt, Homo sapiens
  misc_RNA (1)...(19): siRNA sense strand
cauaugcaugcaacaaaug

SEQ ID NO: 605699 - RNA, 19 nt, Homo sapiens
  misc_RNA (1)...(19): siRNA sense strand
gccugaaaguacaagaauc

SEQ ID NO: 605700 - RNA, 19 nt, Homo sapiens
  misc_RNA (1)...(19): siRNA sense strand
cagcaucagagaguucauu

SEQ ID NO: 605701 - RNA, 19 nt, Homo sapiens
  misc_RNA (1)...(19): siRNA sense strand
gccaaggaaggcaaugguu

SEQ ID NO: 605702 - RNA, 19 nt, Homo sapiens
  misc_RNA (1)...(19): siRNA sense strand
ucagaagagcugugaaagg

SEQ ID NO: 605703 - RNA, 19 nt, Homo sapiens
  misc_RNA (1)...(19): siRNA sense strand
gacaaagcgaaagaagaaa

SEQ ID NO: 605704 - RNA, 19 nt, Homo sapiens
  misc_RNA (1)...(19): siRNA sense strand
gccagagguuccggcaguu

SEQ ID NO: 605705 - RNA, 19 nt, Homo sapiens
  misc_RNA (1)...(19): siRNA sense strand
caccucaucagacaucaga

SEQ ID NO: 605706 - RNA, 19 nt, Homo sapiens
  misc_RNA (1)...(19): siRNA sense strand
ggaguacuaaacagauuac

SEQ ID NO: 605707 - RNA, 19 nt, Homo sapiens
  misc_RNA (1)...(19): siRNA sense strand
ggacaaagcgaaagaagaa

SEQ ID NO: 605708 - RNA, 19 nt, Homo sapiens
  misc_RNA (1)...(19): siRNA sense strand
agaaacagccuaccucaua

SEQ ID NO: 605709 - RNA, 19 nt, Homo sapiens
  misc_RNA (1)...(19): siRNA sense strand
gaaacauaauucacgugua

SEQ ID NO: 605710 - RNA, 19 nt, Homo sapiens
  misc_RNA (1)...(19): siRNA sense strand
ggagagagaccauuugaau

SEQ ID NO: 605711 - RNA, 19 nt, Homo sapiens
  misc_RNA (1)...(19): siRNA sense strand
acccagagcucacaccuua

SEQ ID NO: 605712 - RNA, 19 nt, Homo sapiens
  misc_RNA (1)...(19): siRNA sense strand
gaaacagccuaccucauag

SEQ ID NO: 605713 - RNA, 19 nt, Homo sapiens
  misc_RNA (1)...(19): siRNA sense strand
gggaggaccuucaaugauc

SEQ ID NO: 605714 - RNA, 19 nt, Homo sapiens
  misc_RNA (1)...(19): siRNA sense strand
gauggagucugcucaggaa

SEQ ID NO: 605715 - RNA, 19 nt, Homo sapiens
  misc_RNA (1)...(19): siRNA sense strand
ggagagaggcccuaugugu

SEQ ID NO: 605716 - RNA, 19 nt, Homo sapiens
  misc_RNA (1)...(19): siRNA sense strand
guacuaaacagauuacguu

SEQ ID NO: 605717 - RNA, 19 nt, Homo sapiens
  misc_RNA (1)...(19): siRNA sense strand
gggaaaggauuuguucaga

SEQ ID NO: 605718 - RNA, 19 nt, Homo sapiens
  misc_RNA (1)...(19): siRNA sense strand
agaguuagcuccaaauucu

SEQ ID NO: 605719 - RNA, 19 nt, Homo sapiens
  misc_RNA (1)...(19): siRNA sense strand
gcgcuaagcccuacaagug

SEQ ID NO: 605720 - RNA, 19 nt, Homo sapiens
  misc_RNA (1)...(19): siRNA sense strand
caaaauuccuccuagaaaa

SEQ ID NO: 605721 - RNA, 19 nt, Homo sapiens
  misc_RNA (1)...(19): siRNA sense strand
ggauguggcuguggacuuc

SEQ ID NO: 605722 - RNA, 19 nt, Homo sapiens
  misc_RNA (1)...(19): siRNA sense strand
agacuacacuggaaaauaa

SEQ ID NO: 605723 - RNA, 19 nt, Homo sapiens
  misc_RNA (1)...(19): siRNA sense strand
guggugcucuugacacaaa

SEQ ID NO: 605724 - RNA, 19 nt, Homo sapiens
  misc_RNA (1)...(19): siRNA sense strand
caccagagaacccacaaua

SEQ ID NO: 605725 - RNA, 19 nt, Homo sapiens
  misc_RNA (1)...(19): siRNA sense strand
cgacacagaggaccgagua

SEQ ID NO: 605726 - RNA, 19 nt, Homo sapiens
  misc_RNA (1)...(19): siRNA sense strand
gauugugccuuguccucua

SEQ ID NO: 605727 - RNA, 19 nt, Homo sapiens
  misc_RNA (1)...(19): siRNA sense strand
auaaagaguuagcuccaaa

SEQ ID NO: 605728 - RNA, 19 nt, Homo sapiens
  misc_RNA (1)...(19): siRNA sense strand
ucagagcucuucccucaca

SEQ ID NO: 605729 - RNA, 19 nt, Homo sapiens
  misc_RNA (1)...(19): siRNA sense strand
ccauaugcaugcaacaaau

SEQ ID NO: 605730 - RNA, 19 nt, Homo sapiens
  misc_RNA (1)...(19): siRNA sense strand
gaagaagcacuuugacaac

SEQ ID NO: 605731 - RNA, 19 nt, Homo sapiens
  misc_RNA (1)...(19): siRNA sense strand
caucagaagagcugugaaa

SEQ ID NO: 605732 - RNA, 19 nt, Homo sapiens
  misc_RNA (1)...(19): siRNA sense strand
agaagaagcacuuugacaa

SEQ ID NO: 605733 - RNA, 19 nt, Homo sapiens
  misc_RNA (1)...(19): siRNA sense strand
ccagagcucacaccuuauu

SEQ ID NO: 605734 - RNA, 19 nt, Homo sapiens
  misc_RNA (1)...(19): siRNA sense strand
ccuauaugcugaagaugga

SEQ ID NO: 605735 - RNA, 19 nt, Homo sapiens
  misc_RNA (1)...(19): siRNA sense strand
gcaaacaguggugcucuug

SEQ ID NO: 605736 - RNA, 19 nt, Homo sapiens
  misc_RNA (1)...(19): siRNA sense strand
ugccuuguccucuacauua

SEQ ID NO: 605737 - RNA, 19 nt, Homo sapiens
  misc_RNA (1)...(19): siRNA sense strand
gcucccaccucaucagaca

SEQ ID NO: 605738 - RNA, 19 nt, Homo sapiens
  misc_RNA (1)...(19): siRNA sense strand
ggacucacacuggcgcuaa

SEQ ID NO: 605739 - RNA, 19 nt, Homo sapiens
  misc_RNA (1)...(19): siRNA sense strand
cagugaaugugguaaaaua

SEQ ID NO: 605740 - RNA, 19 nt, Homo sapiens
  misc_RNA (1)...(19): siRNA sense strand
gcaaacaguggcgcucuug

SEQ ID NO: 605741 - RNA, 19 nt, Homo sapiens
  misc_RNA (1)...(19): siRNA sense strand
cagagaacccacaauagga

SEQ ID NO: 605742 - RNA, 19 nt, Homo sapiens
  misc_RNA (1)...(19): siRNA sense strand
ggcccuauaugcugaagau

SEQ ID NO: 605743 - RNA, 19 nt, Homo sapiens
  misc_RNA (1)...(19): siRNA sense strand
ucacacagcaucagagagu

SEQ ID NO: 605744 - RNA, 19 nt, Homo sapiens
  misc_RNA (1)...(19): siRNA sense strand
uaaauuggauccucuuccu

SEQ ID NO: 605745 - RNA, 19 nt, Homo sapiens
  misc_RNA (1)...(19): siRNA sense strand
guggcgcucuugacacaaa

SEQ ID NO: 605746 - RNA, 19 nt, Homo sapiens
  misc_RNA (1)...(19): siRNA sense strand
ccagagaacccacaauagg

SEQ ID NO: 605747 - RNA, 19 nt, Homo sapiens
  misc_RNA (1)...(19): siRNA sense strand
ccagcuggacccuaaauug

SEQ ID NO: 605748 - RNA, 19 nt, Homo sapiens
  misc_RNA (1)...(19): siRNA sense strand
gaacccacaauaggacaaa

SEQ ID NO: 605749 - RNA, 19 nt, Homo sapiens
  misc_RNA (1)...(19): siRNA sense strand
gcuggacccuaaauuggau

SEQ ID NO: 605750 - RNA, 19 nt, Homo sapiens
  misc_RNA (1)...(19): siRNA sense strand
cuacaagugucaggacugu

SEQ ID NO: 605751 - RNA, 19 nt, Homo sapiens
  misc_RNA (1)...(19): siRNA sense strand
ucaagacugugggaaagga

SEQ ID NO: 605752 - RNA, 19 nt, Homo sapiens
  misc_RNA (1)...(19): siRNA sense strand
gaaggcaaugguuguagga

SEQ ID NO: 605753 - RNA, 19 nt, Homo sapiens
  misc_RNA (1)...(19): siRNA sense strand
caaggaaggcaaugguugu

SEQ ID NO: 605754 - RNA, 19 nt, Homo sapiens
  misc_RNA (1)...(19): siRNA sense strand
ccagauccaggcccuauau

SEQ ID NO: 605755 - RNA, 19 nt, Homo sapiens
  misc_RNA (1)...(19): siRNA sense strand
gugggaggaccuucaauga

SEQ ID NO: 605756 - RNA, 19 nt, Homo sapiens
  misc_RNA (1)...(19): siRNA sense strand
ggcaaacaguggugcucuu

SEQ ID NO: 605757 - RNA, 19 nt, Homo sapiens
  misc_RNA (1)...(19): siRNA sense strand
aggcaaugguuguaggaaa

SEQ ID NO: 605758 - RNA, 19 nt, Homo sapiens
  misc_RNA (1)...(19): siRNA sense strand
caguggcgcucuugacaca

SEQ ID NO: 605759 - RNA, 19 nt, Homo sapiens
  misc_RNA (1)...(19): siRNA sense strand
uaggugcacugccugugaa

SEQ ID NO: 605760 - RNA, 19 nt, Homo sapiens
  misc_RNA (1)...(19): siRNA sense strand
gcuccaaauucugacauuc

SEQ ID NO: 605761 - RNA, 19 nt, Homo sapiens
  misc_RNA (1)...(19): siRNA sense strand
aaagaguuagcuccaaauu

SEQ ID NO: 605762 - RNA, 19 nt, Homo sapiens
  misc_RNA (1)...(19): siRNA sense strand
gugggagacuacacuggaa

SEQ ID NO: 605763 - RNA, 19 nt, Homo sapiens
  misc_RNA (1)...(19): siRNA sense strand
aaacaguggugcucuugac

SEQ ID NO: 605764 - RNA, 19 nt, Homo sapiens
  misc_RNA (1)...(19): siRNA sense strand
ccagagcucccaccucauc

SEQ ID NO: 605765 - RNA, 19 nt, Homo sapiens
  misc_RNA (1)...(19): siRNA sense strand
ucggaguacuaaacagauu

SEQ ID NO: 605766 - RNA, 19 nt, Homo sapiens
  misc_RNA (1)...(19): siRNA sense strand
ccacaaaauuccuccuaga

SEQ ID NO: 605767 - RNA, 19 nt, Homo sapiens
  misc_RNA (1)...(19): siRNA sense strand
ggcaaacaguggcgcucuu

SEQ ID NO: 605768 - RNA, 19 nt, Homo sapiens
  misc_RNA (1)...(19): siRNA sense strand
cggaguacuaaacagauua

SEQ ID NO: 605769 - RNA, 19 nt, Homo sapiens
  misc_RNA (1)...(19): siRNA sense strand
ggcaaugguuguaggaaaa

SEQ ID NO: 605770 - RNA, 19 nt, Homo sapiens
  misc_RNA (1)...(19): siRNA sense strand
aauaaagaguuagcuccaa

SEQ ID NO: 605771 - RNA, 19 nt, Homo sapiens
  misc_RNA (1)...(19): siRNA sense strand
caaagcgaaagaagaaaca

SEQ ID NO: 605772 - RNA, 19 nt, Homo sapiens
  misc_RNA (1)...(19): siRNA sense strand
acaauaggacaaagcgaaa

SEQ ID NO: 605773 - RNA, 19 nt, Homo sapiens
  misc_RNA (1)...(19): siRNA sense strand
gcaugcaacaaauguggaa

SEQ ID NO: 605774 - RNA, 19 nt, Homo sapiens
  misc_RNA (1)...(19): siRNA sense strand
cagaagaagcacuuugaca

SEQ ID NO: 605775 - RNA, 19 nt, Homo sapiens
  misc_RNA (1)...(19): siRNA sense strand
agagaggcccuaugugugu

SEQ ID NO: 605776 - RNA, 19 nt, Homo sapiens
  misc_RNA (1)...(19): siRNA sense strand
ccaggaaguccaagacaca

SEQ ID NO: 605777 - RNA, 19 nt, Homo sapiens
  misc_RNA (1)...(19): siRNA sense strand
caaacaguggugcucuuga

SEQ ID NO: 605778 - RNA, 19 nt, Homo sapiens
  misc_RNA (1)...(19): siRNA sense strand
gagacuacacuggaaaaua

SEQ ID NO: 605779 - RNA, 19 nt, Homo sapiens
  misc_RNA (1)...(19): siRNA sense strand
gagcucccaccucaucaga

SEQ ID NO: 605780 - RNA, 19 nt, Homo sapiens
  misc_RNA (1)...(19): siRNA sense strand
aaugaucgcucagccaucu

SEQ ID NO: 605781 - RNA, 19 nt, Homo sapiens
  misc_RNA (1)...(19): siRNA sense strand
cuaugugugucaagacugu

SEQ ID NO: 605782 - RNA, 19 nt, Homo sapiens
  misc_RNA (1)...(19): siRNA sense strand
ggcccuaugugugucaaga

SEQ ID NO: 605783 - RNA, 19 nt, Homo sapiens
  misc_RNA (1)...(19): siRNA sense strand
uagagggugugaccuggau

SEQ ID NO: 605784 - RNA, 19 nt, Homo sapiens
  misc_RNA (1)...(19): siRNA sense strand
ugucaagacugugggaaag

SEQ ID NO: 605785 - RNA, 19 nt, Homo sapiens
  misc_RNA (1)...(19): siRNA sense strand
uuccggcaguuccguuaua

SEQ ID NO: 605786 - RNA, 19 nt, Homo sapiens
  misc_RNA (1)...(19): siRNA sense strand
uaaagaguuagcuccaaau

SEQ ID NO: 605787 - RNA, 19 nt, Homo sapiens
  misc_RNA (1)...(19): siRNA sense strand
cagcuggacccuaaauugg

SEQ ID NO: 605788 - RNA, 19 nt, Homo sapiens
  misc_RNA (1)...(19): siRNA sense strand
caaacaguggcgcucuuga

SEQ ID NO: 605789 - RNA, 19 nt, Homo sapiens
  misc_RNA (1)...(19): siRNA sense strand
caguggugcucuugacaca

SEQ ID NO: 605790 - RNA, 19 nt, Homo sapiens
  misc_RNA (1)...(19): siRNA sense strand
gcugagaguccccuaauga

SEQ ID NO: 605791 - RNA, 19 nt, Homo sapiens
  misc_RNA (1)...(19): siRNA sense strand
ccggaacccaagauacuuu

SEQ ID NO: 605792 - RNA, 19 nt, Homo sapiens
  misc_RNA (1)...(19): siRNA sense strand
cuaaggcacgcuccaagga

SEQ ID NO: 605793 - RNA, 19 nt, Homo sapiens
  misc_RNA (1)...(19): siRNA sense strand
ccggagagaggcccuaugu

SEQ ID NO: 605794 - RNA, 19 nt, Homo sapiens
  misc_RNA (1)...(19): siRNA sense strand
cgaguaccgcgaugugaug

SEQ ID NO: 605795 - RNA, 19 nt, Homo sapiens
  misc_RNA (1)...(19): siRNA sense strand
gauccaggcccuauaugcu

SEQ ID NO: 605796 - RNA, 19 nt, Homo sapiens
  misc_RNA (1)...(19): siRNA sense strand
aaucgcagcacccagagaa

SEQ ID NO: 605797 - RNA, 19 nt, Homo sapiens
  misc_RNA (1)...(19): siRNA sense strand
cuggaugucugaggaggaa

SEQ ID NO: 605798 - RNA, 19 nt, Homo sapiens
  misc_RNA (1)...(19): siRNA sense strand
cauaugcaugcaacaaaug

SEQ ID NO: 605799 - RNA, 19 nt, Homo sapiens
  misc_RNA (1)...(19): siRNA sense strand
gccugaaaguacaagaauc

SEQ ID NO: 605800 - RNA, 19 nt, Homo sapiens
  misc_RNA (1)...(19): siRNA sense strand
cagcaucagagaguucauu

SEQ ID NO: 605801 - RNA, 19 nt, Homo sapiens
  misc_RNA (1)...(19): siRNA sense strand
gccaaggaaggcaaugguu

SEQ ID NO: 605802 - RNA, 19 nt, Homo sapiens
  misc_RNA (1)...(19): siRNA sense strand
ucagaagagcugugaaagg

SEQ ID NO: 605803 - RNA, 19 nt, Homo sapiens
  misc_RNA (1)...(19): siRNA sense strand
gacaaagcgaaagaagaaa

SEQ ID NO: 605804 - RNA, 19 nt, Homo sapiens
  misc_RNA (1)...(19): siRNA sense strand
gccagagguuccggcaguu

SEQ ID NO: 605805 - RNA, 19 nt, Homo sapiens
  misc_RNA (1)...(19): siRNA sense strand
caccucaucagacaucaga

SEQ ID NO: 605806 - RNA, 19 nt, Homo sapiens
  misc_RNA (1)...(19): siRNA sense strand
ggaguacuaaacagauuac

SEQ ID NO: 605807 - RNA, 19 nt, Homo sapiens
  misc_RNA (1)...(19): siRNA sense strand
ggugauagcugcaaacauu

SEQ ID NO: 605808 - RNA, 19 nt, Homo sapiens
  misc_RNA (1)...(19): siRNA sense strand
ggaaauaacuuggcaaaca

SEQ ID NO: 605809 - RNA, 19 nt, Homo sapiens
  misc_RNA (1)...(19): siRNA sense strand
ggacaaaguugaagacaca

SEQ ID NO: 605810 - RNA, 19 nt, Homo sapiens
  misc_RNA (1)...(19): siRNA sense strand
ucagaaagaugaacacuug

SEQ ID NO: 605811 - RNA, 19 nt, Homo sapiens
  misc_RNA (1)...(19): siRNA sense strand
ugacagagcuggaggaugu

SEQ ID NO: 605812 - RNA, 19 nt, Homo sapiens
  misc_RNA (1)...(19): siRNA sense strand
gaauauggcuuugccgaaa

SEQ ID NO: 605813 - RNA, 19 nt, Homo sapiens
  misc_RNA (1)...(19): siRNA sense strand
gcacuagccucguagauuc

SEQ ID NO: 605814 - RNA, 19 nt, Homo sapiens
  misc_RNA (1)...(19): siRNA sense strand
gaagucagcccaucaaaga

SEQ ID NO: 605815 - RNA, 19 nt, Homo sapiens
  misc_RNA (1)...(19): siRNA sense strand
gauggugucucauuggaua

SEQ ID NO: 605816 - RNA, 19 nt, Homo sapiens
  misc_RNA (1)...(19): siRNA sense strand
ggagcccucuugugaauaa

SEQ ID NO: 605817 - RNA, 19 nt, Homo sapiens
  misc_RNA (1)...(19): siRNA sense strand
gaacauugagggagaauug

SEQ ID NO: 605818 - RNA, 19 nt, Homo sapiens
  misc_RNA (1)...(19): siRNA sense strand
ucaaggcuaugaugaagua

SEQ ID NO: 605819 - RNA, 19 nt, Homo sapiens
  misc_RNA (1)...(19): siRNA sense strand
ggucaaagacugaacauga

SEQ ID NO: 605820 - RNA, 19 nt, Homo sapiens
  misc_RNA (1)...(19): siRNA sense strand
ucaaaugucucagauaaug

SEQ ID NO: 605821 - RNA, 19 nt, Homo sapiens
  misc_RNA (1)...(19): siRNA sense strand
gagaaggucuuggaggaaa

SEQ ID NO: 605822 - RNA, 19 nt, Homo sapiens
  misc_RNA (1)...(19): siRNA sense strand
guucaaagcuaucuacaag

SEQ ID NO: 605823 - RNA, 19 nt, Homo sapiens
  misc_RNA (1)...(19): siRNA sense strand
ggacaaaccaucagcugaa

SEQ ID NO: 605824 - RNA, 19 nt, Homo sapiens
  misc_RNA (1)...(19): siRNA sense strand
caggaucucuuucaaaugu

SEQ ID NO: 605825 - RNA, 19 nt, Homo sapiens
  misc_RNA (1)...(19): siRNA sense strand
ggagaauugucaagugcua

SEQ ID NO: 605826 - RNA, 19 nt, Homo sapiens
  misc_RNA (1)...(19): siRNA sense strand
ggaggaaaguagcauugaa

SEQ ID NO: 605827 - RNA, 19 nt, Homo sapiens
  misc_RNA (1)...(19): siRNA sense strand
gaaguccuguccagucuga

SEQ ID NO: 605828 - RNA, 19 nt, Homo sapiens
  misc_RNA (1)...(19): siRNA sense strand
cagcuuaccuuccgcaaga

SEQ ID NO: 605829 - RNA, 19 nt, Homo sapiens
  misc_RNA (1)...(19): siRNA sense strand
ggagagguuuuaacauuua

SEQ ID NO: 605830 - RNA, 19 nt, Homo sapiens
  misc_RNA (1)...(19): siRNA sense strand
gaugaaguaugcagaguca

SEQ ID NO: 605831 - RNA, 19 nt, Homo sapiens
  misc_RNA (1)...(19): siRNA sense strand
gacgguaucucaacaguca

SEQ ID NO: 605832 - RNA, 19 nt, Homo sapiens
  misc_RNA (1)...(19): siRNA sense strand
ucagacagcuugcauugga

SEQ ID NO: 605833 - RNA, 19 nt, Homo sapiens
  misc_RNA (1)...(19): siRNA sense strand
ggucugacauuuacuaugg

SEQ ID NO: 605834 - RNA, 19 nt, Homo sapiens
  misc_RNA (1)...(19): siRNA sense strand
caagauggcguuugacuau

SEQ ID NO: 605835 - RNA, 19 nt, Homo sapiens
  misc_RNA (1)...(19): siRNA sense strand
gaggagagguuuuaacauu

SEQ ID NO: 605836 - RNA, 19 nt, Homo sapiens
  misc_RNA (1)...(19): siRNA sense strand
gaagaggagugaugauggu

SEQ ID NO: 605837 - RNA, 19 nt, Homo sapiens
  misc_RNA (1)...(19): siRNA sense strand
gaagcugugucccugacua

SEQ ID NO: 605838 - RNA, 19 nt, Homo sapiens
  misc_RNA (1)...(19): siRNA sense strand
gaagggccaugaggcagua

SEQ ID NO: 605839 - RNA, 19 nt, Homo sapiens
  misc_RNA (1)...(19): siRNA sense strand
gccaguacuuugagaaauu

SEQ ID NO: 605840 - RNA, 19 nt, Homo sapiens
  misc_RNA (1)...(19): siRNA sense strand
gaaauaacuuggcaaacac

SEQ ID NO: 605841 - RNA, 19 nt, Homo sapiens
  misc_RNA (1)...(19): siRNA sense strand
gaaauuugaugugaaagag

SEQ ID NO: 605842 - RNA, 19 nt, Homo sapiens
  misc_RNA (1)...(19): siRNA sense strand
ggauuucaguggacaguga

SEQ ID NO: 605843 - RNA, 19 nt, Homo sapiens
  misc_RNA (1)...(19): siRNA sense strand
ccucguagauucagagcua

SEQ ID NO: 605844 - RNA, 19 nt, Homo sapiens
  misc_RNA (1)...(19): siRNA sense strand
uuacagaagucauggaaau

SEQ ID NO: 605845 - RNA, 19 nt, Homo sapiens
  misc_RNA (1)...(19): siRNA sense strand
agauggcguuugacuauua

SEQ ID NO: 605846 - RNA, 19 nt, Homo sapiens
  misc_RNA (1)...(19): siRNA sense strand
gaagaacauugagggagaa

SEQ ID NO: 605847 - RNA, 19 nt, Homo sapiens
  misc_RNA (1)...(19): siRNA sense strand
ggagcuggaugaagagguu

SEQ ID NO: 605848 - RNA, 19 nt, Homo sapiens
  misc_RNA (1)...(19): siRNA sense strand
guccuaaucucuacauuca

SEQ ID NO: 605849 - RNA, 19 nt, Homo sapiens
  misc_RNA (1)...(19): siRNA sense strand
caaaccaucagcugaagua

SEQ ID NO: 605850 - RNA, 19 nt, Homo sapiens
  misc_RNA (1)...(19): siRNA sense strand
gcccucuugugaauaauua

SEQ ID NO: 605851 - RNA, 19 nt, Homo sapiens
  misc_RNA (1)...(19): siRNA sense strand
aaagaaggcaguaguggua

SEQ ID NO: 605852 - RNA, 19 nt, Homo sapiens
  misc_RNA (1)...(19): siRNA sense strand
ucauggaaauucugaaaga

SEQ ID NO: 605853 - RNA, 19 nt, Homo sapiens
  misc_RNA (1)...(19): siRNA sense strand
gacugaacaugacuugaaa

SEQ ID NO: 605854 - RNA, 19 nt, Homo sapiens
  misc_RNA (1)...(19): siRNA sense strand
ggacagugauggcagugau

SEQ ID NO: 605855 - RNA, 19 nt, Homo sapiens
  misc_RNA (1)...(19): siRNA sense strand
gaggaaaguagcauugaaa

SEQ ID NO: 605856 - RNA, 19 nt, Homo sapiens
  misc_RNA (1)...(19): siRNA sense strand
ggcaaacacuccgaauuga

SEQ ID NO: 605857 - RNA, 19 nt, Homo sapiens
  misc_RNA (1)...(19): siRNA sense strand
gaacauguugugcugaaga

SEQ ID NO: 605858 - RNA, 19 nt, Homo sapiens
  misc_RNA (1)...(19): siRNA sense strand
guacaugcuuucaggaauc

SEQ ID NO: 605859 - RNA, 19 nt, Homo sapiens
  misc_RNA (1)...(19): siRNA sense strand
guagugguauggacaacaa

SEQ ID NO: 605860 - RNA, 19 nt, Homo sapiens
  misc_RNA (1)...(19): siRNA sense strand
gaacaugacuugaaaagcu

SEQ ID NO: 605861 - RNA, 19 nt, Homo sapiens
  misc_RNA (1)...(19): siRNA sense strand
ucucuggucuguccacuuu

SEQ ID NO: 605862 - RNA, 19 nt, Homo sapiens
  misc_RNA (1)...(19): siRNA sense strand
gcaaugugauauccuccaa

SEQ ID NO: 605863 - RNA, 19 nt, Homo sapiens
  misc_RNA (1)...(19): siRNA sense strand
ccaaauagcccucaaaaga

SEQ ID NO: 605864 - RNA, 19 nt, Homo sapiens
  misc_RNA (1)...(19): siRNA sense strand
cauugaggcuuauuacgaa

SEQ ID NO: 605865 - RNA, 19 nt, Homo sapiens
  misc_RNA (1)...(19): siRNA sense strand
gaaagaguccuccuaccau

SEQ ID NO: 605866 - RNA, 19 nt, Homo sapiens
  misc_RNA (1)...(19): siRNA sense strand
ccauggaccucaccaagga

SEQ ID NO: 605867 - RNA, 19 nt, Homo sapiens
  misc_RNA (1)...(19): siRNA sense strand
ugaaguggcucugcuuaug

SEQ ID NO: 605868 - RNA, 19 nt, Homo sapiens
  misc_RNA (1)...(19): siRNA sense strand
ucuacaagcuggaagauuc

SEQ ID NO: 605869 - RNA, 19 nt, Homo sapiens
  misc_RNA (1)...(19): siRNA sense strand
cagagugaccuucgccuua

SEQ ID NO: 605870 - RNA, 19 nt, Homo sapiens
  misc_RNA (1)...(19): siRNA sense strand
gagggagaauugucaagug

SEQ ID NO: 605871 - RNA, 19 nt, Homo sapiens
  misc_RNA (1)...(19): siRNA sense strand
gcgugaggcuugaccacua

SEQ ID NO: 605872 - RNA, 19 nt, Homo sapiens
  misc_RNA (1)...(19): siRNA sense strand
caacaaagggccucugaca

SEQ ID NO: 605873 - RNA, 19 nt, Homo sapiens
  misc_RNA (1)...(19): siRNA sense strand
gcaagauggcguuugacua

SEQ ID NO: 605874 - RNA, 19 nt, Homo sapiens
  misc_RNA (1)...(19): siRNA sense strand
ccaguacuuugagaaauuu

SEQ ID NO: 605875 - RNA, 19 nt, Homo sapiens
  misc_RNA (1)...(19): siRNA sense strand
agaagcagauccugaaaca

SEQ ID NO: 605876 - RNA, 19 nt, Homo sapiens
  misc_RNA (1)...(19): siRNA sense strand
gagcagcugacuaaggaua

SEQ ID NO: 605877 - RNA, 19 nt, Homo sapiens
  misc_RNA (1)...(19): siRNA sense strand
ucaauucuaucaccaucaa

SEQ ID NO: 605878 - RNA, 19 nt, Homo sapiens
  misc_RNA (1)...(19): siRNA sense strand
ggccauaccuugaauuuug

SEQ ID NO: 605879 - RNA, 19 nt, Homo sapiens
  misc_RNA (1)...(19): siRNA sense strand
acucacagcucaaggcuau

SEQ ID NO: 605880 - RNA, 19 nt, Homo sapiens
  misc_RNA (1)...(19): siRNA sense strand
cuacauuuauugcuucaug

SEQ ID NO: 605881 - RNA, 19 nt, Homo sapiens
  misc_RNA (1)...(19): siRNA sense strand
gaagaggacgguaucucaa

SEQ ID NO: 605882 - RNA, 19 nt, Homo sapiens
  misc_RNA (1)...(19): siRNA sense strand
aaccaaagauugcaaugug

SEQ ID NO: 605883 - RNA, 19 nt, Homo sapiens
  misc_RNA (1)...(19): siRNA sense strand
gcagccaacaguucaguuu

SEQ ID NO: 605884 - RNA, 19 nt, Homo sapiens
  misc_RNA (1)...(19): siRNA sense strand
ggauagcaguggcccugaa

SEQ ID NO: 605885 - RNA, 19 nt, Homo sapiens
  misc_RNA (1)...(19): siRNA sense strand
cuagaugcauucugguuga

SEQ ID NO: 605886 - RNA, 19 nt, Homo sapiens
  misc_RNA (1)...(19): siRNA sense strand
caaagauugcaaugugaua

SEQ ID NO: 605887 - RNA, 19 nt, Homo sapiens
  misc_RNA (1)...(19): siRNA sense strand
aaagaagaaccaaagauug

SEQ ID NO: 605888 - RNA, 19 nt, Homo sapiens
  misc_RNA (1)...(19): siRNA sense strand
ccaccaggaucucuuucaa

SEQ ID NO: 605889 - RNA, 19 nt, Homo sapiens
  misc_RNA (1)...(19): siRNA sense strand
gaagucauggaaauucuga

SEQ ID NO: 605890 - RNA, 19 nt, Homo sapiens
  misc_RNA (1)...(19): siRNA sense strand
gcucaaggcuaugaugaag

SEQ ID NO: 605891 - RNA, 19 nt, Homo sapiens
  misc_RNA (1)...(19): siRNA sense strand
cuucugaacuccagcauca

SEQ ID NO: 605892 - RNA, 19 nt, Homo sapiens
  misc_RNA (1)...(19): siRNA sense strand
ccagaucuccuuggacuuu

SEQ ID NO: 605893 - RNA, 19 nt, Homo sapiens
  misc_RNA (1)...(19): siRNA sense strand
gauggaauuucagagcaaa

SEQ ID NO: 605894 - RNA, 19 nt, Homo sapiens
  misc_RNA (1)...(19): siRNA sense strand
gaaccaaagauugcaaugu

SEQ ID NO: 605895 - RNA, 19 nt, Homo sapiens
  misc_RNA (1)...(19): siRNA sense strand
ggagacugcugugaaugga

SEQ ID NO: 605896 - RNA, 19 nt, Homo sapiens
  misc_RNA (1)...(19): siRNA sense strand
ccaagaaacugagcagaac

SEQ ID NO: 605897 - RNA, 19 nt, Homo sapiens
  misc_RNA (1)...(19): siRNA sense strand
uaugaucacuuuccuaagg

SEQ ID NO: 605898 - RNA, 19 nt, Homo sapiens
  misc_RNA (1)...(19): siRNA sense strand
gccuggaccugcacauuug

SEQ ID NO: 605899 - RNA, 19 nt, Homo sapiens
  misc_RNA (1)...(19): siRNA sense strand
cuauggauccugucaguuu

SEQ ID NO: 605900 - RNA, 19 nt, Homo sapiens
  misc_RNA (1)...(19): siRNA sense strand
gaaggugaaugaggugucu

SEQ ID NO: 605901 - RNA, 19 nt, Homo sapiens
  misc_RNA (1)...(19): siRNA sense strand
gaaaguagcauugaaaauc

SEQ ID NO: 605902 - RNA, 19 nt, Homo sapiens
  misc_RNA (1)...(19): siRNA sense strand
agauagcacuagccucgua

SEQ ID NO: 605903 - RNA, 19 nt, Homo sapiens
  misc_RNA (1)...(19): siRNA sense strand
uguagcagauguucauaug

SEQ ID NO: 605904 - RNA, 19 nt, Homo sapiens
  misc_RNA (1)...(19): siRNA sense strand
ggaagauucaagucagaaa

SEQ ID NO: 605905 - RNA, 19 nt, Homo sapiens
  misc_RNA (1)...(19): siRNA sense strand
gguacaugcuuucaggaau

SEQ ID NO: 605906 - RNA, 19 nt, Homo sapiens
  misc_RNA (1)...(19): siRNA sense strand
agauugagcuucugaacuc

SEQ ID NO: 605907 - RNA, 19 nt, Homo sapiens
  misc_RNA (1)...(19): siRNA sense strand
ggaauuagcagaagacauu

SEQ ID NO: 605908 - RNA, 19 nt, Homo sapiens
  misc_RNA (1)...(19): siRNA sense strand
gcacaaaggauguaugaaa

SEQ ID NO: 605909 - RNA, 19 nt, Homo sapiens
  misc_RNA (1)...(19): siRNA sense strand
ggaggacaaugcaauaauu

SEQ ID NO: 605910 - RNA, 19 nt, Homo sapiens
  misc_RNA (1)...(19): siRNA sense strand
acaagaaggccaucacuua

SEQ ID NO: 605911 - RNA, 19 nt, Homo sapiens
  misc_RNA (1)...(19): siRNA sense strand
uggcugagcugucaaagaa

SEQ ID NO: 605912 - RNA, 19 nt, Homo sapiens
  misc_RNA (1)...(19): siRNA sense strand
agaagaggcugaguuaauu

SEQ ID NO: 605913 - RNA, 19 nt, Homo sapiens
  misc_RNA (1)...(19): siRNA sense strand
caaauucugucaagcucua

SEQ ID NO: 605914 - RNA, 19 nt, Homo sapiens
  misc_RNA (1)...(19): siRNA sense strand
gauaaaucauccugagcua

SEQ ID NO: 605915 - RNA, 19 nt, Homo sapiens
  misc_RNA (1)...(19): siRNA sense strand
caucagaucuggcaagaca

SEQ ID NO: 605916 - RNA, 19 nt, Homo sapiens
  misc_RNA (1)...(19): siRNA sense strand
gcacagagaacgauauaca

SEQ ID NO: 605917 - RNA, 19 nt, Homo sapiens
  misc_RNA (1)...(19): siRNA sense strand
cgagccaaguugagcauua

SEQ ID NO: 605918 - RNA, 19 nt, Homo sapiens
  misc_RNA (1)...(19): siRNA sense strand
gaagaaauacaaggagaaa

SEQ ID NO: 605919 - RNA, 19 nt, Homo sapiens
  misc_RNA (1)...(19): siRNA sense strand
ggccaucacuuacacuuau

SEQ ID NO: 605920 - RNA, 19 nt, Homo sapiens
  misc_RNA (1)...(19): siRNA sense strand
gcaggaggacaaugcaaua

SEQ ID NO: 605921 - RNA, 19 nt, Homo sapiens
  misc_RNA (1)...(19): siRNA sense strand
ggagaaagacacccacaga

SEQ ID NO: 605922 - RNA, 19 nt, Homo sapiens
  misc_RNA (1)...(19): siRNA sense strand
gaagaggcugaguuaauuu

SEQ ID NO: 605923 - RNA, 19 nt, Homo sapiens
  misc_RNA (1)...(19): siRNA sense strand
gccagaagaggcugaguua

SEQ ID NO: 605924 - RNA, 19 nt, Homo sapiens
  misc_RNA (1)...(19): siRNA sense strand
ccauugugcugaugaguga

SEQ ID NO: 605925 - RNA, 19 nt, Homo sapiens
  misc_RNA (1)...(19): siRNA sense strand
gcaaagggcaucagaucug

SEQ ID NO: 605926 - RNA, 19 nt, Homo sapiens
  misc_RNA (1)...(19): siRNA sense strand
gagccaaguugagcauuau

SEQ ID NO: 605927 - RNA, 19 nt, Homo sapiens
  misc_RNA (1)...(19): siRNA sense strand
uugaugaggccuauauuua

SEQ ID NO: 605928 - RNA, 19 nt, Homo sapiens
  misc_RNA (1)...(19): siRNA sense strand
ggcuaugaauucugcauuu

SEQ ID NO: 605929 - RNA, 19 nt, Homo sapiens
  misc_RNA (1)...(19): siRNA sense strand
cagaagaggcugaguuaau

SEQ ID NO: 605930 - RNA, 19 nt, Homo sapiens
  misc_RNA (1)...(19): siRNA sense strand
uaugaaagaugagccagaa

SEQ ID NO: 605931 - RNA, 19 nt, Homo sapiens
  misc_RNA (1)...(19): siRNA sense strand
gcagaacagacaggaauuu

SEQ ID NO: 605932 - RNA, 19 nt, Homo sapiens
  misc_RNA (1)...(19): siRNA sense strand
agaaauacaaggagaaaga

SEQ ID NO: 605933 - RNA, 19 nt, Homo sapiens
  misc_RNA (1)...(19): siRNA sense strand
gaagcaagcaaagcugaaa

SEQ ID NO: 605934 - RNA, 19 nt, Homo sapiens
  misc_RNA (1)...(19): siRNA sense strand
ugagugaccuggcuacuac

SEQ ID NO: 605935 - RNA, 19 nt, Homo sapiens
  misc_RNA (1)...(19): siRNA sense strand
cccuaaagcuggccaguau

SEQ ID NO: 605936 - RNA, 19 nt, Homo sapiens
  misc_RNA (1)...(19): siRNA sense strand
gaacagacaggaauuugcu

SEQ ID NO: 605937 - RNA, 19 nt, Homo sapiens
  misc_RNA (1)...(19): siRNA sense strand
gcaugaagcaggaggacaa

SEQ ID NO: 605938 - RNA, 19 nt, Homo sapiens
  misc_RNA (1)...(19): siRNA sense strand
cauuucaacucuagaggaa

SEQ ID NO: 605939 - RNA, 19 nt, Homo sapiens
  misc_RNA (1)...(19): siRNA sense strand
gcuaugaauucugcauuuc

SEQ ID NO: 605940 - RNA, 19 nt, Homo sapiens
  misc_RNA (1)...(19): siRNA sense strand
cacuuacacuuaugauuug

SEQ ID NO: 605941 - RNA, 19 nt, Homo sapiens
  misc_RNA (1)...(19): siRNA sense strand
ugaaaaugcugaacaacuu

SEQ ID NO: 605942 - RNA, 19 nt, Homo sapiens
  misc_RNA (1)...(19): siRNA sense strand
ugaugaggccuauauuuau

SEQ ID NO: 605943 - RNA, 19 nt, Homo sapiens
  misc_RNA (1)...(19): siRNA sense strand
gaauuagcagaagacauua

SEQ ID NO: 605944 - RNA, 19 nt, Homo sapiens
  misc_RNA (1)...(19): siRNA sense strand
caaguugagcauuaugaaa

SEQ ID NO: 605945 - RNA, 19 nt, Homo sapiens
  misc_RNA (1)...(19): siRNA sense strand
ugaaagaugagccagaaga

SEQ ID NO: 605946 - RNA, 19 nt, Homo sapiens
  misc_RNA (1)...(19): siRNA sense strand
gcaagacagauaaaucauc

SEQ ID NO: 605947 - RNA, 19 nt, Homo sapiens
  misc_RNA (1)...(19): siRNA sense strand
gcgcagaacagacaggaau

SEQ ID NO: 605948 - RNA, 19 nt, Homo sapiens
  misc_RNA (1)...(19): siRNA sense strand
ugaaauuucuguacaacac

SEQ ID NO: 605949 - RNA, 19 nt, Homo sapiens
  misc_RNA (1)...(19): siRNA sense strand
uaaucuagcugcaguuuug

SEQ ID NO: 605950 - RNA, 19 nt, Homo sapiens
  misc_RNA (1)...(19): siRNA sense strand
gauggccaacuuagcauuu

SEQ ID NO: 605951 - RNA, 19 nt, Homo sapiens
  misc_RNA (1)...(19): siRNA sense strand
gaugaaauuucuguacaac

SEQ ID NO: 605952 - RNA, 19 nt, Homo sapiens
  misc_RNA (1)...(19): siRNA sense strand
uaaaucauccugagcuaca

SEQ ID NO: 605953 - RNA, 19 nt, Homo sapiens
  misc_RNA (1)...(19): siRNA sense strand
gaaagaugagccagaagag

SEQ ID NO: 605954 - RNA, 19 nt, Homo sapiens
  misc_RNA (1)...(19): siRNA sense strand
cacaaaggauguaugaaaa

SEQ ID NO: 605955 - RNA, 19 nt, Homo sapiens
  misc_RNA (1)...(19): siRNA sense strand
gaaaaggaauuagcagaag

SEQ ID NO: 605956 - RNA, 19 nt, Homo sapiens
  misc_RNA (1)...(19): siRNA sense strand
caagaaggccaucacuuac

SEQ ID NO: 605957 - RNA, 19 nt, Homo sapiens
  misc_RNA (1)...(19): siRNA sense strand
agagaacgauauacacaag

SEQ ID NO: 605958 - RNA, 19 nt, Homo sapiens
  misc_RNA (1)...(19): siRNA sense strand
agaguuggcugagcuguca

SEQ ID NO: 605959 - RNA, 19 nt, Homo sapiens
  misc_RNA (1)...(19): siRNA sense strand
ggccaacuuagcauuuaua

SEQ ID NO: 605960 - RNA, 19 nt, Homo sapiens
  misc_RNA (1)...(19): siRNA sense strand
ugagcauuaugaaagauga

SEQ ID NO: 605961 - RNA, 19 nt, Homo sapiens
  misc_RNA (1)...(19): siRNA sense strand
ggcaucagaucuggcaaga

SEQ ID NO: 605962 - RNA, 19 nt, Homo sapiens
  misc_RNA (1)...(19): siRNA sense strand
gaaaaugcugaacaacuuu

SEQ ID NO: 605963 - RNA, 19 nt, Homo sapiens
  misc_RNA (1)...(19): siRNA sense strand
gcugagcugucaaagaaaa

SEQ ID NO: 605964 - RNA, 19 nt, Homo sapiens
  misc_RNA (1)...(19): siRNA sense strand
uggcaagacagauaaauca

SEQ ID NO: 605965 - RNA, 19 nt, Homo sapiens
  misc_RNA (1)...(19): siRNA sense strand
ugaagaaauacaaggagaa

SEQ ID NO: 605966 - RNA, 19 nt, Homo sapiens
  misc_RNA (1)...(19): siRNA sense strand
gaaauuucuguacaacaca

SEQ ID NO: 605967 - RNA, 19 nt, Homo sapiens
  misc_RNA (1)...(19): siRNA sense strand
ccaaguugagcauuaugaa

SEQ ID NO: 605968 - RNA, 19 nt, Homo sapiens
  misc_RNA (1)...(19): siRNA sense strand
gcgccuaccuguggaggau

SEQ ID NO: 605969 - RNA, 19 nt, Homo sapiens
  misc_RNA (1)...(19): siRNA sense strand
acacaucagggaagaguug

SEQ ID NO: 605970 - RNA, 19 nt, Homo sapiens
  misc_RNA (1)...(19): siRNA sense strand
caacacaucagggaagagu

SEQ ID NO: 605971 - RNA, 19 nt, Homo sapiens
  misc_RNA (1)...(19): siRNA sense strand
agaacgauauacacaagca

SEQ ID NO: 605972 - RNA, 19 nt, Homo sapiens
  misc_RNA (1)...(19): siRNA sense strand
aacaaugaguuaccuccuu

SEQ ID NO: 605973 - RNA, 19 nt, Homo sapiens
  misc_RNA (1)...(19): siRNA sense strand
gaacgauauacacaagcaa

SEQ ID NO: 605974 - RNA, 19 nt, Homo sapiens
  misc_RNA (1)...(19): siRNA sense strand
aaagcuggccaguaucuau

SEQ ID NO: 605975 - RNA, 19 nt, Homo sapiens
  misc_RNA (1)...(19): siRNA sense strand
cagaacagacaggaauuug

SEQ ID NO: 605976 - RNA, 19 nt, Homo sapiens
  misc_RNA (1)...(19): siRNA sense strand
gagcuacacaugguacuca

SEQ ID NO: 605977 - RNA, 19 nt, Homo sapiens
  misc_RNA (1)...(19): siRNA sense strand
gcuuugaugaggccuauau

SEQ ID NO: 605978 - RNA, 19 nt, Homo sapiens
  misc_RNA (1)...(19): siRNA sense strand
caauacccaccuccucuug

SEQ ID NO: 605979 - RNA, 19 nt, Homo sapiens
  misc_RNA (1)...(19): siRNA sense strand
caggaggacaaugcaauaa

SEQ ID NO: 605980 - RNA, 19 nt, Homo sapiens
  misc_RNA (1)...(19): siRNA sense strand
cagagaacgauauacacaa

SEQ ID NO: 605981 - RNA, 19 nt, Homo sapiens
  misc_RNA (1)...(19): siRNA sense strand
gccaaguugagcauuauga

SEQ ID NO: 605982 - RNA, 19 nt, Homo sapiens
  misc_RNA (1)...(19): siRNA sense strand
uuaugucaguggaagagaa

SEQ ID NO: 605983 - RNA, 19 nt, Homo sapiens
  misc_RNA (1)...(19): siRNA sense strand
uacaacacaucagggaaga

SEQ ID NO: 605984 - RNA, 19 nt, Homo sapiens
  misc_RNA (1)...(19): siRNA sense strand
ccaggaagcacugaagcaa

SEQ ID NO: 605985 - RNA, 19 nt, Homo sapiens
  misc_RNA (1)...(19): siRNA sense strand
gaaauacaaggagaaagac

SEQ ID NO: 605986 - RNA, 19 nt, Homo sapiens
  misc_RNA (1)...(19): siRNA sense strand
gcuaccuucuguucuccaa

SEQ ID NO: 605987 - RNA, 19 nt, Homo sapiens
  misc_RNA (1)...(19): siRNA sense strand
gccaucacuuacacuuaug

SEQ ID NO: 605988 - RNA, 19 nt, Homo sapiens
  misc_RNA (1)...(19): siRNA sense strand
gcugaagcgagccaaguug

SEQ ID NO: 605989 - RNA, 19 nt, Homo sapiens
  misc_RNA (1)...(19): siRNA sense strand
gaagcaggaggacaaugca

SEQ ID NO: 605990 - RNA, 19 nt, Homo sapiens
  misc_RNA (1)...(19): siRNA sense strand
acagagaacgauauacaca

SEQ ID NO: 605991 - RNA, 19 nt, Homo sapiens
  misc_RNA (1)...(19): siRNA sense strand
ugauuugauggccaacuua

SEQ ID NO: 605992 - RNA, 19 nt, Homo sapiens
  misc_RNA (1)...(19): siRNA sense strand
ucacaggcacaaaggaugu

SEQ ID NO: 605993 - RNA, 19 nt, Homo sapiens
  misc_RNA (1)...(19): siRNA sense strand
guaucuaugcugcgcagaa

SEQ ID NO: 605994 - RNA, 19 nt, Homo sapiens
  misc_RNA (1)...(19): siRNA sense strand
aguugagcauuaugaaaga

SEQ ID NO: 605995 - RNA, 19 nt, Homo sapiens
  misc_RNA (1)...(19): siRNA sense strand
aggcacaaaggauguauga

SEQ ID NO: 605996 - RNA, 19 nt, Homo sapiens
  misc_RNA (1)...(19): siRNA sense strand
gaauucugcauuucaacuc

SEQ ID NO: 605997 - RNA, 19 nt, Homo sapiens
  misc_RNA (1)...(19): siRNA sense strand
ccagaagaggcugaguuaa

SEQ ID NO: 605998 - RNA, 19 nt, Homo sapiens
  misc_RNA (1)...(19): siRNA sense strand
auggccaacuuagcauuua

SEQ ID NO: 605999 - RNA, 19 nt, Homo sapiens
  misc_RNA (1)...(19): siRNA sense strand
uaacaagaaggccaucacu

SEQ ID NO: 606000 - RNA, 19 nt, Homo sapiens
  misc_RNA (1)...(19): siRNA sense strand
ggggucagcuugaaaaugc

SEQ ID NO: 606001 - RNA, 19 nt, Homo sapiens
  misc_RNA (1)...(19): siRNA sense strand
ccaauacccaccuccucuu

SEQ ID NO: 606002 - RNA, 19 nt, Homo sapiens
  misc_RNA (1)...(19): siRNA sense strand
aaaaggaauuagcagaaga

SEQ ID NO: 606003 - RNA, 19 nt, Homo sapiens
  misc_RNA (1)...(19): siRNA sense strand
uuugaugaggccuauauuu

SEQ ID NO: 606004 - RNA, 19 nt, Homo sapiens
  misc_RNA (1)...(19): siRNA sense strand
gcuugaaaaugcugaacaa

SEQ ID NO: 606005 - RNA, 19 nt, Homo sapiens
  misc_RNA (1)...(19): siRNA sense strand
gaugcacagagaacgauau

SEQ ID NO: 606006 - RNA, 19 nt, Homo sapiens
  misc_RNA (1)...(19): siRNA sense strand
uggccaacuuagcauuuau

SEQ ID NO: 606007 - RNA, 19 nt, Homo sapiens
  misc_RNA (1)...(19): siRNA sense strand
gauguuaucuugaaaguga

SEQ ID NO: 606008 - RNA, 19 nt, Homo sapiens
  misc_RNA (1)...(19): siRNA sense strand
gaaggcaacuuaauuaauc

SEQ ID NO: 606009 - RNA, 19 nt, Homo sapiens
  misc_RNA (1)...(19): siRNA sense strand
gaaagaagaaccaaagaaa

SEQ ID NO: 606010 - RNA, 19 nt, Homo sapiens
  misc_RNA (1)...(19): siRNA sense strand
gaacaaaccaugaagauuc

SEQ ID NO: 606011 - RNA, 19 nt, Homo sapiens
  misc_RNA (1)...(19): siRNA sense strand
gaagaaauaugggcuguau

SEQ ID NO: 606012 - RNA, 19 nt, Homo sapiens
  misc_RNA (1)...(19): siRNA sense strand
ggaaagaagaguucguuua

SEQ ID NO: 606013 - RNA, 19 nt, Homo sapiens
  misc_RNA (1)...(19): siRNA sense strand
gaagguggcuauaucaaug

SEQ ID NO: 606014 - RNA, 19 nt, Homo sapiens
  misc_RNA (1)...(19): siRNA sense strand
cagaucagcuuuccuguaa

SEQ ID NO: 606015 - RNA, 19 nt, Homo sapiens
  misc_RNA (1)...(19): siRNA sense strand
gcauugaugugcuuucuaa

SEQ ID NO: 606016 - RNA, 19 nt, Homo sapiens
  misc_RNA (1)...(19): siRNA sense strand
gccaaagacugacagaaua

SEQ ID NO: 606017 - RNA, 19 nt, Homo sapiens
  misc_RNA (1)...(19): siRNA sense strand
gaaguagaacuccucauua

SEQ ID NO: 606018 - RNA, 19 nt, Homo sapiens
  misc_RNA (1)...(19): siRNA sense strand
gaauggagccucuuugaaa

SEQ ID NO: 606019 - RNA, 19 nt, Homo sapiens
  misc_RNA (1)...(19): siRNA sense strand
gaagaugugacacuuguua

SEQ ID NO: 606020 - RNA, 19 nt, Homo sapiens
  misc_RNA (1)...(19): siRNA sense strand
ccaagaagcugaaguuauc

SEQ ID NO: 606021 - RNA, 19 nt, Homo sapiens
  misc_RNA (1)...(19): siRNA sense strand
caacucaggucaaagacua

SEQ ID NO: 606022 - RNA, 19 nt, Homo sapiens
  misc_RNA (1)...(19): siRNA sense strand
caugaugacucaagaagua

SEQ ID NO: 606023 - RNA, 19 nt, Homo sapiens
  misc_RNA (1)...(19): siRNA sense strand
caucagaccuuucuuaaca

SEQ ID NO: 606024 - RNA, 19 nt, Homo sapiens
  misc_RNA (1)...(19): siRNA sense strand
gcaaugacccuugaagaua

SEQ ID NO: 606025 - RNA, 19 nt, Homo sapiens
  misc_RNA (1)...(19): siRNA sense strand
gaagagagaacagaagaua

SEQ ID NO: 606026 - RNA, 19 nt, Homo sapiens
  misc_RNA (1)...(19): siRNA sense strand
gaugaaaccuuaagucaag

SEQ ID NO: 606027 - RNA, 19 nt, Homo sapiens
  misc_RNA (1)...(19): siRNA sense strand
ucaaagaggucugcuguuu

SEQ ID NO: 606028 - RNA, 19 nt, Homo sapiens
  misc_RNA (1)...(19): siRNA sense strand
ccucagagccaaccuauua

SEQ ID NO: 606029 - RNA, 19 nt, Homo sapiens
  misc_RNA (1)...(19): siRNA sense strand
gaaggaagaacagauauaa

SEQ ID NO: 606030 - RNA, 19 nt, Homo sapiens
  misc_RNA (1)...(19): siRNA sense strand
gcccuuggcuucaucauuu

SEQ ID NO: 606031 - RNA, 19 nt, Homo sapiens
  misc_RNA (1)...(19): siRNA sense strand
gcuaucaagucauccuuua

SEQ ID NO: 606032 - RNA, 19 nt, Homo sapiens
  misc_RNA (1)...(19): siRNA sense strand
gaauggcugugaagaauau

SEQ ID NO: 606033 - RNA, 19 nt, Homo sapiens
  misc_RNA (1)...(19): siRNA sense strand
gcaaacauaucaaauucga

SEQ ID NO: 606034 - RNA, 19 nt, Homo sapiens
  misc_RNA (1)...(19): siRNA sense strand
cauaguaucuucaccagaa

SEQ ID NO: 606035 - RNA, 19 nt, Homo sapiens
  misc_RNA (1)...(19): siRNA sense strand
gacagaggaucaauauauu

SEQ ID NO: 606036 - RNA, 19 nt, Homo sapiens
  misc_RNA (1)...(19): siRNA sense strand
gagaauugguuguuauguu

SEQ ID NO: 606037 - RNA, 19 nt, Homo sapiens
  misc_RNA (1)...(19): siRNA sense strand
gggaacugcuccagaagua

SEQ ID NO: 606038 - RNA, 19 nt, Homo sapiens
  misc_RNA (1)...(19): siRNA sense strand
uaacagagcauuagacaug

SEQ ID NO: 606039 - RNA, 19 nt, Homo sapiens
  misc_RNA (1)...(19): siRNA sense strand
gaagagacaguuacaguga

SEQ ID NO: 606040 - RNA, 19 nt, Homo sapiens
  misc_RNA (1)...(19): siRNA sense strand
ccagguacauuaaagauga

SEQ ID NO: 606041 - RNA, 19 nt, Homo sapiens
  misc_RNA (1)...(19): siRNA sense strand
ccaugaagauucugauaaa

SEQ ID NO: 606042 - RNA, 19 nt, Homo sapiens
  misc_RNA (1)...(19): siRNA sense strand
gaagacugaugaugaugaa

SEQ ID NO: 606043 - RNA, 19 nt, Homo sapiens
  misc_RNA (1)...(19): siRNA sense strand
uaacuucucucucagaugu

SEQ ID NO: 606044 - RNA, 19 nt, Homo sapiens
  misc_RNA (1)...(19): siRNA sense strand
gaaguuaucagaagagaga

SEQ ID NO: 606045 - RNA, 19 nt, Homo sapiens
  misc_RNA (1)...(19): siRNA sense strand
gaagaugacauuuaugaug

SEQ ID NO: 606046 - RNA, 19 nt, Homo sapiens
  misc_RNA (1)...(19): siRNA sense strand
ggaaguagaacuccucauu

SEQ ID NO: 606047 - RNA, 19 nt, Homo sapiens
  misc_RNA (1)...(19): siRNA sense strand
gaacugaccugugauacca

SEQ ID NO: 606048 - RNA, 19 nt, Homo sapiens
  misc_RNA (1)...(19): siRNA sense strand
uagcuacccucaaagauaa

SEQ ID NO: 606049 - RNA, 19 nt, Homo sapiens
  misc_RNA (1)...(19): siRNA sense strand
aaagaugaaugggaaguua

SEQ ID NO: 606050 - RNA, 19 nt, Homo sapiens
  misc_RNA (1)...(19): siRNA sense strand
gcaagacagugcuauagau

SEQ ID NO: 606051 - RNA, 19 nt, Homo sapiens
  misc_RNA (1)...(19): siRNA sense strand
ccaaagccacuguuaauuu

SEQ ID NO: 606052 - RNA, 19 nt, Homo sapiens
  misc_RNA (1)...(19): siRNA sense strand
caaccaagaugcccaagau

SEQ ID NO: 606053 - RNA, 19 nt, Homo sapiens
  misc_RNA (1)...(19): siRNA sense strand
cuaaggagcuggagaaucu

SEQ ID NO: 606054 - RNA, 19 nt, Homo sapiens
  misc_RNA (1)...(19): siRNA sense strand
cuaguucgauggauaagua

SEQ ID NO: 606055 - RNA, 19 nt, Homo sapiens
  misc_RNA (1)...(19): siRNA sense strand
cagcaaacauaucaaauuc

SEQ ID NO: 606056 - RNA, 19 nt, Homo sapiens
  misc_RNA (1)...(19): siRNA sense strand
caucaaagauacacaagau

SEQ ID NO: 606057 - RNA, 19 nt, Homo sapiens
  misc_RNA (1)...(19): siRNA sense strand
gaucauuccuuucugacaa

SEQ ID NO: 606058 - RNA, 19 nt, Homo sapiens
  misc_RNA (1)...(19): siRNA sense strand
ggaaguauagccuuggaua

SEQ ID NO: 606059 - RNA, 19 nt, Homo sapiens
  misc_RNA (1)...(19): siRNA sense strand
uaagagaaauugcccuaga

SEQ ID NO: 606060 - RNA, 19 nt, Homo sapiens
  misc_RNA (1)...(19): siRNA sense strand
uggacgaguucuagaauua

SEQ ID NO: 606061 - RNA, 19 nt, Homo sapiens
  misc_RNA (1)...(19): siRNA sense strand
gaaaacaacucaggucaaa

SEQ ID NO: 606062 - RNA, 19 nt, Homo sapiens
  misc_RNA (1)...(19): siRNA sense strand
gugaauacauccaacaaga

SEQ ID NO: 606063 - RNA, 19 nt, Homo sapiens
  misc_RNA (1)...(19): siRNA sense strand
uaacaaagggcuuaguaaa

SEQ ID NO: 606064 - RNA, 19 nt, Homo sapiens
  misc_RNA (1)...(19): siRNA sense strand
caaugacccuugaagauau

SEQ ID NO: 606065 - RNA, 19 nt, Homo sapiens
  misc_RNA (1)...(19): siRNA sense strand
gaaagaagaguucguuuac

SEQ ID NO: 606066 - RNA, 19 nt, Homo sapiens
  misc_RNA (1)...(19): siRNA sense strand
gagaagaagucacaaacag

SEQ ID NO: 606067 - RNA, 19 nt, Homo sapiens
  misc_RNA (1)...(19): siRNA sense strand
ggaaagaagaaccaaagaa

SEQ ID NO: 606068 - RNA, 19 nt, Homo sapiens
  misc_RNA (1)...(19): siRNA sense strand
gaagaguucguuuacauug

SEQ ID NO: 606069 - RNA, 19 nt, Homo sapiens
  misc_RNA (1)...(19): siRNA sense strand
ccaggucaaugguuucuuu

SEQ ID NO: 606070 - RNA, 19 nt, Homo sapiens
  misc_RNA (1)...(19): siRNA sense strand
cgagaucgauugcgaggaa

SEQ ID NO: 606071 - RNA, 19 nt, Homo sapiens
  misc_RNA (1)...(19): siRNA sense strand
auacacgggugccaacuua

SEQ ID NO: 606072 - RNA, 19 nt, Homo sapiens
  misc_RNA (1)...(19): siRNA sense strand
aaagaggucugcuguuuca

SEQ ID NO: 606073 - RNA, 19 nt, Homo sapiens
  misc_RNA (1)...(19): siRNA sense strand
gaacuccucauuacccuaa

SEQ ID NO: 606074 - RNA, 19 nt, Homo sapiens
  misc_RNA (1)...(19): siRNA sense strand
gaagauaccauuuguacca

SEQ ID NO: 606075 - RNA, 19 nt, Homo sapiens
  misc_RNA (1)...(19): siRNA sense strand
ucaagaagauaccauuugu

SEQ ID NO: 606076 - RNA, 19 nt, Homo sapiens
  misc_RNA (1)...(19): siRNA sense strand
gaacugcuccagaaguauu

SEQ ID NO: 606077 - RNA, 19 nt, Homo sapiens
  misc_RNA (1)...(19): siRNA sense strand
caaagaagaguuacccaaa

SEQ ID NO: 606078 - RNA, 19 nt, Homo sapiens
  misc_RNA (1)...(19): siRNA sense strand
acaaagggcuuaguaaauc

SEQ ID NO: 606079 - RNA, 19 nt, Homo sapiens
  misc_RNA (1)...(19): siRNA sense strand
gacugaugaugaugaaaua

SEQ ID NO: 606080 - RNA, 19 nt, Homo sapiens
  misc_RNA (1)...(19): siRNA sense strand
caaaggcaaucagagaauu

SEQ ID NO: 606081 - RNA, 19 nt, Homo sapiens
  misc_RNA (1)...(19): siRNA sense strand
guggaaacacugagaaaua

SEQ ID NO: 606082 - RNA, 19 nt, Homo sapiens
  misc_RNA (1)...(19): siRNA sense strand
caaaggugaucgcguccua

SEQ ID NO: 606083 - RNA, 19 nt, Homo sapiens
  misc_RNA (1)...(19): siRNA sense strand
gauaacagcuuggggauaa

SEQ ID NO: 606084 - RNA, 19 nt, Homo sapiens
  misc_RNA (1)...(19): siRNA sense strand
aagaagaguuacccaaauu

SEQ ID NO: 606085 - RNA, 19 nt, Homo sapiens
  misc_RNA (1)...(19): siRNA sense strand
cgaaggaaaguaaacauaa

SEQ ID NO: 606086 - RNA, 19 nt, Homo sapiens
  misc_RNA (1)...(19): siRNA sense strand
gaaacagccaugacucaaa

SEQ ID NO: 606087 - RNA, 19 nt, Homo sapiens
  misc_RNA (1)...(19): siRNA sense strand
gaucagcuuuccuguaaca

SEQ ID NO: 606088 - RNA, 19 nt, Homo sapiens
  misc_RNA (1)...(19): siRNA sense strand
gaguggagaagaugacuua

SEQ ID NO: 606089 - RNA, 19 nt, Homo sapiens
  misc_RNA (1)...(19): siRNA sense strand
gcacaaguacuuccaaaca

SEQ ID NO: 606090 - RNA, 19 nt, Homo sapiens
  misc_RNA (1)...(19): siRNA sense strand
gacaaucuccaacaucuaa

SEQ ID NO: 606091 - RNA, 19 nt, Homo sapiens
  misc_RNA (1)...(19): siRNA sense strand
gaaucuuccucuucaguga

SEQ ID NO: 606092 - RNA, 19 nt, Homo sapiens
  misc_RNA (1)...(19): siRNA sense strand
cauggugugucuuacuuua

SEQ ID NO: 606093 - RNA, 19 nt, Homo sapiens
  misc_RNA (1)...(19): siRNA sense strand
ugaugagacuuccuuauug

SEQ ID NO: 606094 - RNA, 19 nt, Homo sapiens
  misc_RNA (1)...(19): siRNA sense strand
caggagagacugccacaua

SEQ ID NO: 606095 - RNA, 19 nt, Homo sapiens
  misc_RNA (1)...(19): siRNA sense strand
agacagaggaucaauauau

SEQ ID NO: 606096 - RNA, 19 nt, Homo sapiens
  misc_RNA (1)...(19): siRNA sense strand
aaagaagacugaugaugau

SEQ ID NO: 606097 - RNA, 19 nt, Homo sapiens
  misc_RNA (1)...(19): siRNA sense strand
ggaaguuaacagagcauua

SEQ ID NO: 606098 - RNA, 19 nt, Homo sapiens
  misc_RNA (1)...(19): siRNA sense strand
gaaaggaugcacugugaug

SEQ ID NO: 606099 - RNA, 19 nt, Homo sapiens
  misc_RNA (1)...(19): siRNA sense strand
gauaaccgaaggaaaguaa

SEQ ID NO: 606100 - RNA, 19 nt, Homo sapiens
  misc_RNA (1)...(19): siRNA sense strand
gcaagauacucagauggaa

SEQ ID NO: 606101 - RNA, 19 nt, Homo sapiens
  misc_RNA (1)...(19): siRNA sense strand
gacuggaacugaccuguga

SEQ ID NO: 606102 - RNA, 19 nt, Homo sapiens
  misc_RNA (1)...(19): siRNA sense strand
aaacaacaauggucagcaa

SEQ ID NO: 606103 - RNA, 19 nt, Homo sapiens
  misc_RNA (1)...(19): siRNA sense strand
gaagucauaucugcucuca

SEQ ID NO: 606104 - RNA, 19 nt, Homo sapiens
  misc_RNA (1)...(19): siRNA sense strand
caauggaguuagucuagaa

SEQ ID NO: 606105 - RNA, 19 nt, Homo sapiens
  misc_RNA (1)...(19): siRNA sense strand
ggagaaacuugauuuaucc

SEQ ID NO: 606106 - RNA, 19 nt, Homo sapiens
  misc_RNA (1)...(19): siRNA sense strand
gaaagucuccaagaauuau

SEQ ID NO: 606107 - RNA, 19 nt, Homo sapiens
  misc_RNA (1)...(19): siRNA sense strand
gauguuaucuugaaaguga

SEQ ID NO: 606108 - RNA, 19 nt, Homo sapiens
  misc_RNA (1)...(19): siRNA sense strand
gaaggcaacuuaauuaauc

SEQ ID NO: 606109 - RNA, 19 nt, Homo sapiens
  misc_RNA (1)...(19): siRNA sense strand
gaaagaagaaccaaagaaa

SEQ ID NO: 606110 - RNA, 19 nt, Homo sapiens
  misc_RNA (1)...(19): siRNA sense strand
gaacaaaccaugaagauuc

SEQ ID NO: 606111 - RNA, 19 nt, Homo sapiens
  misc_RNA (1)...(19): siRNA sense strand
gaagaaauaugggcuguau

SEQ ID NO: 606112 - RNA, 19 nt, Homo sapiens
  misc_RNA (1)...(19): siRNA sense strand
ggaaagaagaguucguuua

SEQ ID NO: 606113 - RNA, 19 nt, Homo sapiens
  misc_RNA (1)...(19): siRNA sense strand
gaagguggcuauaucaaug

SEQ ID NO: 606114 - RNA, 19 nt, Homo sapiens
  misc_RNA (1)...(19): siRNA sense strand
cagaucagcuuuccuguaa

SEQ ID NO: 606115 - RNA, 19 nt, Homo sapiens
  misc_RNA (1)...(19): siRNA sense strand
gcauugaugugcuuucuaa

SEQ ID NO: 606116 - RNA, 19 nt, Homo sapiens
  misc_RNA (1)...(19): siRNA sense strand
gccaaagacugacagaaua

SEQ ID NO: 606117 - RNA, 19 nt, Homo sapiens
  misc_RNA (1)...(19): siRNA sense strand
gaaguagaacuccucauua

SEQ ID NO: 606118 - RNA, 19 nt, Homo sapiens
  misc_RNA (1)...(19): siRNA sense strand
gaauggagccucuuugaaa

SEQ ID NO: 606119 - RNA, 19 nt, Homo sapiens
  misc_RNA (1)...(19): siRNA sense strand
gaagaugugacacuuguua

SEQ ID NO: 606120 - RNA, 19 nt, Homo sapiens
  misc_RNA (1)...(19): siRNA sense strand
ccaagaagcugaaguuauc

SEQ ID NO: 606121 - RNA, 19 nt, Homo sapiens
  misc_RNA (1)...(19): siRNA sense strand
caacucaggucaaagacua

SEQ ID NO: 606122 - RNA, 19 nt, Homo sapiens
  misc_RNA (1)...(19): siRNA sense strand
caugaugacucaagaagua

SEQ ID NO: 606123 - RNA, 19 nt, Homo sapiens
  misc_RNA (1)...(19): siRNA sense strand
caucagaccuuucuuaaca

SEQ ID NO: 606124 - RNA, 19 nt, Homo sapiens
  misc_RNA (1)...(19): siRNA sense strand
gcaaugacccuugaagaua

SEQ ID NO: 606125 - RNA, 19 nt, Homo sapiens
  misc_RNA (1)...(19): siRNA sense strand
gaagagagaacagaagaua

SEQ ID NO: 606126 - RNA, 19 nt, Homo sapiens
  misc_RNA (1)...(19): siRNA sense strand
gaugaaaccuuaagucaag

SEQ ID NO: 606127 - RNA, 19 nt, Homo sapiens
  misc_RNA (1)...(19): siRNA sense strand
ucaaagaggucugcuguuu

SEQ ID NO: 606128 - RNA, 19 nt, Homo sapiens
  misc_RNA (1)...(19): siRNA sense strand
ccucagagccaaccuauua

SEQ ID NO: 606129 - RNA, 19 nt, Homo sapiens
  misc_RNA (1)...(19): siRNA sense strand
gaaggaagaacagauauaa

SEQ ID NO: 606130 - RNA, 19 nt, Homo sapiens
  misc_RNA (1)...(19): siRNA sense strand
gcccuuggcuucaucauuu

SEQ ID NO: 606131 - RNA, 19 nt, Homo sapiens
  misc_RNA (1)...(19): siRNA sense strand
gcuaucaagucauccuuua

SEQ ID NO: 606132 - RNA, 19 nt, Homo sapiens
  misc_RNA (1)...(19): siRNA sense strand
gaauggcugugaagaauau

SEQ ID NO: 606133 - RNA, 19 nt, Homo sapiens
  misc_RNA (1)...(19): siRNA sense strand
gcaaacauaucaaauucga

SEQ ID NO: 606134 - RNA, 19 nt, Homo sapiens
  misc_RNA (1)...(19): siRNA sense strand
cauaguaucuucaccagaa

SEQ ID NO: 606135 - RNA, 19 nt, Homo sapiens
  misc_RNA (1)...(19): siRNA sense strand
gacagaggaucaauauauu

SEQ ID NO: 606136 - RNA, 19 nt, Homo sapiens
  misc_RNA (1)...(19): siRNA sense strand
gagaauugguuguuauguu

SEQ ID NO: 606137 - RNA, 19 nt, Homo sapiens
  misc_RNA (1)...(19): siRNA sense strand
gggaacugcuccagaagua

SEQ ID NO: 606138 - RNA, 19 nt, Homo sapiens
  misc_RNA (1)...(19): siRNA sense strand
uaacagagcauuagacaug

SEQ ID NO: 606139 - RNA, 19 nt, Homo sapiens
  misc_RNA (1)...(19): siRNA sense strand
gaagagacaguuacaguga

SEQ ID NO: 606140 - RNA, 19 nt, Homo sapiens
  misc_RNA (1)...(19): siRNA sense strand
ccagguacauuaaagauga

SEQ ID NO: 606141 - RNA, 19 nt, Homo sapiens
  misc_RNA (1)...(19): siRNA sense strand
ccaugaagauucugauaaa

SEQ ID NO: 606142 - RNA, 19 nt, Homo sapiens
  misc_RNA (1)...(19): siRNA sense strand
gaagacugaugaugaugaa

SEQ ID NO: 606143 - RNA, 19 nt, Homo sapiens
  misc_RNA (1)...(19): siRNA sense strand
uaacuucucucucagaugu

SEQ ID NO: 606144 - RNA, 19 nt, Homo sapiens
  misc_RNA (1)...(19): siRNA sense strand
gaaguuaucagaagagaga

SEQ ID NO: 606145 - RNA, 19 nt, Homo sapiens
  misc_RNA (1)...(19): siRNA sense strand
gaagaugacauuuaugaug

SEQ ID NO: 606146 - RNA, 19 nt, Homo sapiens
  misc_RNA (1)...(19): siRNA sense strand
ggaaguagaacuccucauu

SEQ ID NO: 606147 - RNA, 19 nt, Homo sapiens
  misc_RNA (1)...(19): siRNA sense strand
gaacugaccugugauacca

SEQ ID NO: 606148 - RNA, 19 nt, Homo sapiens
  misc_RNA (1)...(19): siRNA sense strand
uagcuacccucaaagauaa

SEQ ID NO: 606149 - RNA, 19 nt, Homo sapiens
  misc_RNA (1)...(19): siRNA sense strand
aaagaugaaugggaaguua

SEQ ID NO: 606150 - RNA, 19 nt, Homo sapiens
  misc_RNA (1)...(19): siRNA sense strand
gcaagacagugcuauagau

SEQ ID NO: 606151 - RNA, 19 nt, Homo sapiens
  misc_RNA (1)...(19): siRNA sense strand
ccaaagccacuguuaauuu

SEQ ID NO: 606152 - RNA, 19 nt, Homo sapiens
  misc_RNA (1)...(19): siRNA sense strand
caaccaagaugcccaagau

SEQ ID NO: 606153 - RNA, 19 nt, Homo sapiens
  misc_RNA (1)...(19): siRNA sense strand
cuaaggagcuggagaaucu

SEQ ID NO: 606154 - RNA, 19 nt, Homo sapiens
  misc_RNA (1)...(19): siRNA sense strand
cuaguucgauggauaagua

SEQ ID NO: 606155 - RNA, 19 nt, Homo sapiens
  misc_RNA (1)...(19): siRNA sense strand
cagcaaacauaucaaauuc

SEQ ID NO: 606156 - RNA, 19 nt, Homo sapiens
  misc_RNA (1)...(19): siRNA sense strand
caucaaagauacacaagau

SEQ ID NO: 606157 - RNA, 19 nt, Homo sapiens
  misc_RNA (1)...(19): siRNA sense strand
gaucauuccuuucugacaa

SEQ ID NO: 606158 - RNA, 19 nt, Homo sapiens
  misc_RNA (1)...(19): siRNA sense strand
ggaaguauagccuuggaua

SEQ ID NO: 606159 - RNA, 19 nt, Homo sapiens
  misc_RNA (1)...(19): siRNA sense strand
uaagagaaauugcccuaga

SEQ ID NO: 606160 - RNA, 19 nt, Homo sapiens
  misc_RNA (1)...(19): siRNA sense strand
uggacgaguucuagaauua

SEQ ID NO: 606161 - RNA, 19 nt, Homo sapiens
  misc_RNA (1)...(19): siRNA sense strand
gaaaacaacucaggucaaa

SEQ ID NO: 606162 - RNA, 19 nt, Homo sapiens
  misc_RNA (1)...(19): siRNA sense strand
gugaauacauccaacaaga

SEQ ID NO: 606163 - RNA, 19 nt, Homo sapiens
  misc_RNA (1)...(19): siRNA sense strand
uaacaaagggcuuaguaaa

SEQ ID NO: 606164 - RNA, 19 nt, Homo sapiens
  misc_RNA (1)...(19): siRNA sense strand
caaugacccuugaagauau

SEQ ID NO: 606165 - RNA, 19 nt, Homo sapiens
  misc_RNA (1)...(19): siRNA sense strand
gaaagaagaguucguuuac

SEQ ID NO: 606166 - RNA, 19 nt, Homo sapiens
  misc_RNA (1)...(19): siRNA sense strand
gagaagaagucacaaacag

SEQ ID NO: 606167 - RNA, 19 nt, Homo sapiens
  misc_RNA (1)...(19): siRNA sense strand
ggaaagaagaaccaaagaa

SEQ ID NO: 606168 - RNA, 19 nt, Homo sapiens
  misc_RNA (1)...(19): siRNA sense strand
gaagaguucguuuacauug

SEQ ID NO: 606169 - RNA, 19 nt, Homo sapiens
  misc_RNA (1)...(19): siRNA sense strand
ccaggucaaugguuucuuu

SEQ ID NO: 606170 - RNA, 19 nt, Homo sapiens
  misc_RNA (1)...(19): siRNA sense strand
cgagaucgauugcgaggaa

SEQ ID NO: 606171 - RNA, 19 nt, Homo sapiens
  misc_RNA (1)...(19): siRNA sense strand
auacacgggugccaacuua

SEQ ID NO: 606172 - RNA, 19 nt, Homo sapiens
  misc_RNA (1)...(19): siRNA sense strand
aaagaggucugcuguuuca

SEQ ID NO: 606173 - RNA, 19 nt, Homo sapiens
  misc_RNA (1)...(19): siRNA sense strand
gaacuccucauuacccuaa

SEQ ID NO: 606174 - RNA, 19 nt, Homo sapiens
  misc_RNA (1)...(19): siRNA sense strand
gaagauaccauuuguacca

SEQ ID NO: 606175 - RNA, 19 nt, Homo sapiens
  misc_RNA (1)...(19): siRNA sense strand
ucaagaagauaccauuugu

SEQ ID NO: 606176 - RNA, 19 nt, Homo sapiens
  misc_RNA (1)...(19): siRNA sense strand
gaacugcuccagaaguauu

SEQ ID NO: 606177 - RNA, 19 nt, Homo sapiens
  misc_RNA (1)...(19): siRNA sense strand
caaagaagaguuacccaaa

SEQ ID NO: 606178 - RNA, 19 nt, Homo sapiens
  misc_RNA (1)...(19): siRNA sense strand
acaaagggcuuaguaaauc

SEQ ID NO: 606179 - RNA, 19 nt, Homo sapiens
  misc_RNA (1)...(19): siRNA sense strand
gacugaugaugaugaaaua

SEQ ID NO: 606180 - RNA, 19 nt, Homo sapiens
  misc_RNA (1)...(19): siRNA sense strand
caaaggcaaucagagaauu

SEQ ID NO: 606181 - RNA, 19 nt, Homo sapiens
  misc_RNA (1)...(19): siRNA sense strand
guggaaacacugagaaaua

SEQ ID NO: 606182 - RNA, 19 nt, Homo sapiens
  misc_RNA (1)...(19): siRNA sense strand
caaaggugaucgcguccua

SEQ ID NO: 606183 - RNA, 19 nt, Homo sapiens
  misc_RNA (1)...(19): siRNA sense strand
gauaacagcuuggggauaa

SEQ ID NO: 606184 - RNA, 19 nt, Homo sapiens
  misc_RNA (1)...(19): siRNA sense strand
aagaagaguuacccaaauu

SEQ ID NO: 606185 - RNA, 19 nt, Homo sapiens
  misc_RNA (1)...(19): siRNA sense strand
cgaaggaaaguaaacauaa

SEQ ID NO: 606186 - RNA, 19 nt, Homo sapiens
  misc_RNA (1)...(19): siRNA sense strand
gaaacagccaugacucaaa

SEQ ID NO: 606187 - RNA, 19 nt, Homo sapiens
  misc_RNA (1)...(19): siRNA sense strand
gaucagcuuuccuguaaca

SEQ ID NO: 606188 - RNA, 19 nt, Homo sapiens
  misc_RNA (1)...(19): siRNA sense strand
gaguggagaagaugacuua

SEQ ID NO: 606189 - RNA, 19 nt, Homo sapiens
  misc_RNA (1)...(19): siRNA sense strand
gcacaaguacuuccaaaca

SEQ ID NO: 606190 - RNA, 19 nt, Homo sapiens
  misc_RNA (1)...(19): siRNA sense strand
gacaaucuccaacaucuaa

SEQ ID NO: 606191 - RNA, 19 nt, Homo sapiens
  misc_RNA (1)...(19): siRNA sense strand
gaaucuuccucuucaguga

SEQ ID NO: 606192 - RNA, 19 nt, Homo sapiens
  misc_RNA (1)...(19): siRNA sense strand
cauggugugucuuacuuua

SEQ ID NO: 606193 - RNA, 19 nt, Homo sapiens
  misc_RNA (1)...(19): siRNA sense strand
ugaugagacuuccuuauug

SEQ ID NO: 606194 - RNA, 19 nt, Homo sapiens
  misc_RNA (1)...(19): siRNA sense strand
caggagagacugccacaua

SEQ ID NO: 606195 - RNA, 19 nt, Homo sapiens
  misc_RNA (1)...(19): siRNA sense strand
agacagaggaucaauauau

SEQ ID NO: 606196 - RNA, 19 nt, Homo sapiens
  misc_RNA (1)...(19): siRNA sense strand
aaagaagacugaugaugau

SEQ ID NO: 606197 - RNA, 19 nt, Homo sapiens
  misc_RNA (1)...(19): siRNA sense strand
ggaaguuaacagagcauua

SEQ ID NO: 606198 - RNA, 19 nt, Homo sapiens
  misc_RNA (1)...(19): siRNA sense strand
gaaaggaugcacugugaug

SEQ ID NO: 606199 - RNA, 19 nt, Homo sapiens
  misc_RNA (1)...(19): siRNA sense strand
gauaaccgaaggaaaguaa

SEQ ID NO: 606200 - RNA, 19 nt, Homo sapiens
  misc_RNA (1)...(19): siRNA sense strand
gcaagauacucagauggaa

SEQ ID NO: 606201 - RNA, 19 nt, Homo sapiens
  misc_RNA (1)...(19): siRNA sense strand
gacuggaacugaccuguga

SEQ ID NO: 606202 - RNA, 19 nt, Homo sapiens
  misc_RNA (1)...(19): siRNA sense strand
aaacaacaauggucagcaa

SEQ ID NO: 606203 - RNA, 19 nt, Homo sapiens
  misc_RNA (1)...(19): siRNA sense strand
gaagucauaucugcucuca

SEQ ID NO: 606204 - RNA, 19 nt, Homo sapiens
  misc_RNA (1)...(19): siRNA sense strand
caauggaguuagucuagaa

SEQ ID NO: 606205 - RNA, 19 nt, Homo sapiens
  misc_RNA (1)...(19): siRNA sense strand
ggagaaacuugauuuaucc

SEQ ID NO: 606206 - RNA, 19 nt, Homo sapiens
  misc_RNA (1)...(19): siRNA sense strand
gaaagucuccaagaauuau

SEQ ID NO: 606207 - RNA, 19 nt, Homo sapiens
  misc_RNA (1)...(19): siRNA sense strand
gauguuaucuugaaaguga

SEQ ID NO: 606208 - RNA, 19 nt, Homo sapiens
  misc_RNA (1)...(19): siRNA sense strand
gaaggcaacuuaauuaauc

SEQ ID NO: 606209 - RNA, 19 nt, Homo sapiens
  misc_RNA (1)...(19): siRNA sense strand
gaaagaagaaccaaagaaa

SEQ ID NO: 606210 - RNA, 19 nt, Homo sapiens
  misc_RNA (1)...(19): siRNA sense strand
gaacaaaccaugaagauuc

SEQ ID NO: 606211 - RNA, 19 nt, Homo sapiens
  misc_RNA (1)...(19): siRNA sense strand
gaagaaauaugggcuguau

SEQ ID NO: 606212 - RNA, 19 nt, Homo sapiens
  misc_RNA (1)...(19): siRNA sense strand
ggaaagaagaguucguuua

SEQ ID NO: 606213 - RNA, 19 nt, Homo sapiens
  misc_RNA (1)...(19): siRNA sense strand
gaagguggcuauaucaaug

SEQ ID NO: 606214 - RNA, 19 nt, Homo sapiens
  misc_RNA (1)...(19): siRNA sense strand
cagaucagcuuuccuguaa

SEQ ID NO: 606215 - RNA, 19 nt, Homo sapiens
  misc_RNA (1)...(19): siRNA sense strand
gcauugaugugcuuucuaa

SEQ ID NO: 606216 - RNA, 19 nt, Homo sapiens
  misc_RNA (1)...(19): siRNA sense strand
gccaaagacugacagaaua

SEQ ID NO: 606217 - RNA, 19 nt, Homo sapiens
  misc_RNA (1)...(19): siRNA sense strand
gaaguagaacuccucauua

SEQ ID NO: 606218 - RNA, 19 nt, Homo sapiens
  misc_RNA (1)...(19): siRNA sense strand
gaauggagccucuuugaaa

SEQ ID NO: 606219 - RNA, 19 nt, Homo sapiens
  misc_RNA (1)...(19): siRNA sense strand
gaagaugugacacuuguua

SEQ ID NO: 606220 - RNA, 19 nt, Homo sapiens
  misc_RNA (1)...(19): siRNA sense strand
ccaagaagcugaaguuauc

SEQ ID NO: 606221 - RNA, 19 nt, Homo sapiens
  misc_RNA (1)...(19): siRNA sense strand
caacucaggucaaagacua

SEQ ID NO: 606222 - RNA, 19 nt, Homo sapiens
  misc_RNA (1)...(19): siRNA sense strand
caugaugacucaagaagua

SEQ ID NO: 606223 - RNA, 19 nt, Homo sapiens
  misc_RNA (1)...(19): siRNA sense strand
caucagaccuuucuuaaca

SEQ ID NO: 606224 - RNA, 19 nt, Homo sapiens
  misc_RNA (1)...(19): siRNA sense strand
gcaaugacccuugaagaua

SEQ ID NO: 606225 - RNA, 19 nt, Homo sapiens
  misc_RNA (1)...(19): siRNA sense strand
gaagagagaacagaagaua

SEQ ID NO: 606226 - RNA, 19 nt, Homo sapiens
  misc_RNA (1)...(19): siRNA sense strand
gaugaaaccuuaagucaag

SEQ ID NO: 606227 - RNA, 19 nt, Homo sapiens
  misc_RNA (1)...(19): siRNA sense strand
ucaaagaggucugcuguuu

SEQ ID NO: 606228 - RNA, 19 nt, Homo sapiens
  misc_RNA (1)...(19): siRNA sense strand
ccucagagccaaccuauua

SEQ ID NO: 606229 - RNA, 19 nt, Homo sapiens
  misc_RNA (1)...(19): siRNA sense strand
gaaggaagaacagauauaa

SEQ ID NO: 606230 - RNA, 19 nt, Homo sapiens
  misc_RNA (1)...(19): siRNA sense strand
gcccuuggcuucaucauuu

SEQ ID NO: 606231 - RNA, 19 nt, Homo sapiens
  misc_RNA (1)...(19): siRNA sense strand
gcuaucaagucauccuuua

SEQ ID NO: 606232 - RNA, 19 nt, Homo sapiens
  misc_RNA (1)...(19): siRNA sense strand
gaauggcugugaagaauau

SEQ ID NO: 606233 - RNA, 19 nt, Homo sapiens
  misc_RNA (1)...(19): siRNA sense strand
gcaaacauaucaaauucga

SEQ ID NO: 606234 - RNA, 19 nt, Homo sapiens
  misc_RNA (1)...(19): siRNA sense strand
cauaguaucuucaccagaa

SEQ ID NO: 606235 - RNA, 19 nt, Homo sapiens
  misc_RNA (1)...(19): siRNA sense strand
gacagaggaucaauauauu

SEQ ID NO: 606236 - RNA, 19 nt, Homo sapiens
  misc_RNA (1)...(19): siRNA sense strand
gagaauugguuguuauguu

SEQ ID NO: 606237 - RNA, 19 nt, Homo sapiens
  misc_RNA (1)...(19): siRNA sense strand
gggaacugcuccagaagua

SEQ ID NO: 606238 - RNA, 19 nt, Homo sapiens
  misc_RNA (1)...(19): siRNA sense strand
uaacagagcauuagacaug

SEQ ID NO: 606239 - RNA, 19 nt, Homo sapiens
  misc_RNA (1)...(19): siRNA sense strand
gaagagacaguuacaguga

SEQ ID NO: 606240 - RNA, 19 nt, Homo sapiens
  misc_RNA (1)...(19): siRNA sense strand
ccagguacauuaaagauga

SEQ ID NO: 606241 - RNA, 19 nt, Homo sapiens
  misc_RNA (1)...(19): siRNA sense strand
ccaugaagauucugauaaa

SEQ ID NO: 606242 - RNA, 19 nt, Homo sapiens
  misc_RNA (1)...(19): siRNA sense strand
gaagacugaugaugaugaa

SEQ ID NO: 606243 - RNA, 19 nt, Homo sapiens
  misc_RNA (1)...(19): siRNA sense strand
uaacuucucucucagaugu

SEQ ID NO: 606244 - RNA, 19 nt, Homo sapiens
  misc_RNA (1)...(19): siRNA sense strand
gaaguuaucagaagagaga

SEQ ID NO: 606245 - RNA, 19 nt, Homo sapiens
  misc_RNA (1)...(19): siRNA sense strand
gaagaugacauuuaugaug

SEQ ID NO: 606246 - RNA, 19 nt, Homo sapiens
  misc_RNA (1)...(19): siRNA sense strand
ggaaguagaacuccucauu

SEQ ID NO: 606247 - RNA, 19 nt, Homo sapiens
  misc_RNA (1)...(19): siRNA sense strand
gaacugaccugugauacca

SEQ ID NO: 606248 - RNA, 19 nt, Homo sapiens
  misc_RNA (1)...(19): siRNA sense strand
uagcuacccucaaagauaa

SEQ ID NO: 606249 - RNA, 19 nt, Homo sapiens
  misc_RNA (1)...(19): siRNA sense strand
aaagaugaaugggaaguua

SEQ ID NO: 606250 - RNA, 19 nt, Homo sapiens
  misc_RNA (1)...(19): siRNA sense strand
gcaagacagugcuauagau

SEQ ID NO: 606251 - RNA, 19 nt, Homo sapiens
  misc_RNA (1)...(19): siRNA sense strand
ccaaagccacuguuaauuu

SEQ ID NO: 606252 - RNA, 19 nt, Homo sapiens
  misc_RNA (1)...(19): siRNA sense strand
caaccaagaugcccaagau

SEQ ID NO: 606253 - RNA, 19 nt, Homo sapiens
  misc_RNA (1)...(19): siRNA sense strand
cuaaggagcuggagaaucu

SEQ ID NO: 606254 - RNA, 19 nt, Homo sapiens
  misc_RNA (1)...(19): siRNA sense strand
cuaguucgauggauaagua

SEQ ID NO: 606255 - RNA, 19 nt, Homo sapiens
  misc_RNA (1)...(19): siRNA sense strand
cagcaaacauaucaaauuc

SEQ ID NO: 606256 - RNA, 19 nt, Homo sapiens
  misc_RNA (1)...(19): siRNA sense strand
caucaaagauacacaagau

SEQ ID NO: 606257 - RNA, 19 nt, Homo sapiens
  misc_RNA (1)...(19): siRNA sense strand
gaucauuccuuucugacaa

SEQ ID NO: 606258 - RNA, 19 nt, Homo sapiens
  misc_RNA (1)...(19): siRNA sense strand
ggaaguauagccuuggaua

SEQ ID NO: 606259 - RNA, 19 nt, Homo sapiens
  misc_RNA (1)...(19): siRNA sense strand
uaagagaaauugcccuaga

SEQ ID NO: 606260 - RNA, 19 nt, Homo sapiens
  misc_RNA (1)...(19): siRNA sense strand
uggacgaguucuagaauua

SEQ ID NO: 606261 - RNA, 19 nt, Homo sapiens
  misc_RNA (1)...(19): siRNA sense strand
gaaaacaacucaggucaaa

SEQ ID NO: 606262 - RNA, 19 nt, Homo sapiens
  misc_RNA (1)...(19): siRNA sense strand
gugaauacauccaacaaga

SEQ ID NO: 606263 - RNA, 19 nt, Homo sapiens
  misc_RNA (1)...(19): siRNA sense strand
uaacaaagggcuuaguaaa

SEQ ID NO: 606264 - RNA, 19 nt, Homo sapiens
  misc_RNA (1)...(19): siRNA sense strand
caaugacccuugaagauau

SEQ ID NO: 606265 - RNA, 19 nt, Homo sapiens
  misc_RNA (1)...(19): siRNA sense strand
gaaagaagaguucguuuac

SEQ ID NO: 606266 - RNA, 19 nt, Homo sapiens
  misc_RNA (1)...(19): siRNA sense strand
gagaagaagucacaaacag

SEQ ID NO: 606267 - RNA, 19 nt, Homo sapiens
  misc_RNA (1)...(19): siRNA sense strand
ggaaagaagaaccaaagaa

SEQ ID NO: 606268 - RNA, 19 nt, Homo sapiens
  misc_RNA (1)...(19): siRNA sense strand
gaagaguucguuuacauug

SEQ ID NO: 606269 - RNA, 19 nt, Homo sapiens
  misc_RNA (1)...(19): siRNA sense strand
ccaggucaaugguuucuuu

SEQ ID NO: 606270 - RNA, 19 nt, Homo sapiens
  misc_RNA (1)...(19): siRNA sense strand
cgagaucgauugcgaggaa

SEQ ID NO: 606271 - RNA, 19 nt, Homo sapiens
  misc_RNA (1)...(19): siRNA sense strand
auacacgggugccaacuua

SEQ ID NO: 606272 - RNA, 19 nt, Homo sapiens
  misc_RNA (1)...(19): siRNA sense strand
aaagaggucugcuguuuca

SEQ ID NO: 606273 - RNA, 19 nt, Homo sapiens
  misc_RNA (1)...(19): siRNA sense strand
gaacuccucauuacccuaa

SEQ ID NO: 606274 - RNA, 19 nt, Homo sapiens
  misc_RNA (1)...(19): siRNA sense strand
gaagauaccauuuguacca

SEQ ID NO: 606275 - RNA, 19 nt, Homo sapiens
  misc_RNA (1)...(19): siRNA sense strand
ucaagaagauaccauuugu

SEQ ID NO: 606276 - RNA, 19 nt, Homo sapiens
  misc_RNA (1)...(19): siRNA sense strand
gaacugcuccagaaguauu

SEQ ID NO: 606277 - RNA, 19 nt, Homo sapiens
  misc_RNA (1)...(19): siRNA sense strand
caaagaagaguuacccaaa

SEQ ID NO: 606278 - RNA, 19 nt, Homo sapiens
  misc_RNA (1)...(19): siRNA sense strand
acaaagggcuuaguaaauc

SEQ ID NO: 606279 - RNA, 19 nt, Homo sapiens
  misc_RNA (1)...(19): siRNA sense strand
gacugaugaugaugaaaua

SEQ ID NO: 606280 - RNA, 19 nt, Homo sapiens
  misc_RNA (1)...(19): siRNA sense strand
caaaggcaaucagagaauu

SEQ ID NO: 606281 - RNA, 19 nt, Homo sapiens
  misc_RNA (1)...(19): siRNA sense strand
guggaaacacugagaaaua

SEQ ID NO: 606282 - RNA, 19 nt, Homo sapiens
  misc_RNA (1)...(19): siRNA sense strand
caaaggugaucgcguccua

SEQ ID NO: 606283 - RNA, 19 nt, Homo sapiens
  misc_RNA (1)...(19): siRNA sense strand
gauaacagcuuggggauaa

SEQ ID NO: 606284 - RNA, 19 nt, Homo sapiens
  misc_RNA (1)...(19): siRNA sense strand
aagaagaguuacccaaauu

SEQ ID NO: 606285 - RNA, 19 nt, Homo sapiens
  misc_RNA (1)...(19): siRNA sense strand
cgaaggaaaguaaacauaa

SEQ ID NO: 606286 - RNA, 19 nt, Homo sapiens
  misc_RNA (1)...(19): siRNA sense strand
gaaacagccaugacucaaa

SEQ ID NO: 606287 - RNA, 19 nt, Homo sapiens
  misc_RNA (1)...(19): siRNA sense strand
gaucagcuuuccuguaaca

SEQ ID NO: 606288 - RNA, 19 nt, Homo sapiens
  misc_RNA (1)...(19): siRNA sense strand
gaguggagaagaugacuua

SEQ ID NO: 606289 - RNA, 19 nt, Homo sapiens
  misc_RNA (1)...(19): siRNA sense strand
gcacaaguacuuccaaaca

SEQ ID NO: 606290 - RNA, 19 nt, Homo sapiens
  misc_RNA (1)...(19): siRNA sense strand
gacaaucuccaacaucuaa

SEQ ID NO: 606291 - RNA, 19 nt, Homo sapiens
  misc_RNA (1)...(19): siRNA sense strand
gaaucuuccucuucaguga

SEQ ID NO: 606292 - RNA, 19 nt, Homo sapiens
  misc_RNA (1)...(19): siRNA sense strand
cauggugugucuuacuuua

SEQ ID NO: 606293 - RNA, 19 nt, Homo sapiens
  misc_RNA (1)...(19): siRNA sense strand
ugaugagacuuccuuauug

SEQ ID NO: 606294 - RNA, 19 nt, Homo sapiens
  misc_RNA (1)...(19): siRNA sense strand
caggagagacugccacaua

SEQ ID NO: 606295 - RNA, 19 nt, Homo sapiens
  misc_RNA (1)...(19): siRNA sense strand
agacagaggaucaauauau

SEQ ID NO: 606296 - RNA, 19 nt, Homo sapiens
  misc_RNA (1)...(19): siRNA sense strand
aaagaagacugaugaugau

SEQ ID NO: 606297 - RNA, 19 nt, Homo sapiens
  misc_RNA (1)...(19): siRNA sense strand
ggaaguuaacagagcauua

SEQ ID NO: 606298 - RNA, 19 nt, Homo sapiens
  misc_RNA (1)...(19): siRNA sense strand
gaaaggaugcacugugaug

SEQ ID NO: 606299 - RNA, 19 nt, Homo sapiens
  misc_RNA (1)...(19): siRNA sense strand
gauaaccgaaggaaaguaa

SEQ ID NO: 606300 - RNA, 19 nt, Homo sapiens
  misc_RNA (1)...(19): siRNA sense strand
gcaagauacucagauggaa

SEQ ID NO: 606301 - RNA, 19 nt, Homo sapiens
  misc_RNA (1)...(19): siRNA sense strand
gacuggaacugaccuguga

SEQ ID NO: 606302 - RNA, 19 nt, Homo sapiens
  misc_RNA (1)...(19): siRNA sense strand
aaacaacaauggucagcaa

SEQ ID NO: 606303 - RNA, 19 nt, Homo sapiens
  misc_RNA (1)...(19): siRNA sense strand
gaagucauaucugcucuca

SEQ ID NO: 606304 - RNA, 19 nt, Homo sapiens
  misc_RNA (1)...(19): siRNA sense strand
caauggaguuagucuagaa

SEQ ID NO: 606305 - RNA, 19 nt, Homo sapiens
  misc_RNA (1)...(19): siRNA sense strand
ggagaaacuugauuuaucc

SEQ ID NO: 606306 - RNA, 19 nt, Homo sapiens
  misc_RNA (1)...(19): siRNA sense strand
gaaagucuccaagaauuau

SEQ ID NO: 606307 - RNA, 19 nt, Homo sapiens
  misc_RNA (1)...(19): siRNA sense strand
gauguuaucuugaaaguga

SEQ ID NO: 606308 - RNA, 19 nt, Homo sapiens
  misc_RNA (1)...(19): siRNA sense strand
gaaggcaacuuaauuaauc

SEQ ID NO: 606309 - RNA, 19 nt, Homo sapiens
  misc_RNA (1)...(19): siRNA sense strand
gaaagaagaaccaaagaaa

SEQ ID NO: 606310 - RNA, 19 nt, Homo sapiens
  misc_RNA (1)...(19): siRNA sense strand
gaacaaaccaugaagauuc

SEQ ID NO: 606311 - RNA, 19 nt, Homo sapiens
  misc_RNA (1)...(19): siRNA sense strand
gaagaaauaugggcuguau

SEQ ID NO: 606312 - RNA, 19 nt, Homo sapiens
  misc_RNA (1)...(19): siRNA sense strand
ggaaagaagaguucguuua

SEQ ID NO: 606313 - RNA, 19 nt, Homo sapiens
  misc_RNA (1)...(19): siRNA sense strand
gaagguggcuauaucaaug

SEQ ID NO: 606314 - RNA, 19 nt, Homo sapiens
  misc_RNA (1)...(19): siRNA sense strand
cagaucagcuuuccuguaa

SEQ ID NO: 606315 - RNA, 19 nt, Homo sapiens
  misc_RNA (1)...(19): siRNA sense strand
gcauugaugugcuuucuaa

SEQ ID NO: 606316 - RNA, 19 nt, Homo sapiens
  misc_RNA (1)...(19): siRNA sense strand
gccaaagacugacagaaua

SEQ ID NO: 606317 - RNA, 19 nt, Homo sapiens
  misc_RNA (1)...(19): siRNA sense strand
gaaguagaacuccucauua

SEQ ID NO: 606318 - RNA, 19 nt, Homo sapiens
  misc_RNA (1)...(19): siRNA sense strand
gaauggagccucuuugaaa

SEQ ID NO: 606319 - RNA, 19 nt, Homo sapiens
  misc_RNA (1)...(19): siRNA sense strand
gaagaugugacacuuguua

SEQ ID NO: 606320 - RNA, 19 nt, Homo sapiens
  misc_RNA (1)...(19): siRNA sense strand
ccaagaagcugaaguuauc

SEQ ID NO: 606321 - RNA, 19 nt, Homo sapiens
  misc_RNA (1)...(19): siRNA sense strand
caacucaggucaaagacua

SEQ ID NO: 606322 - RNA, 19 nt, Homo sapiens
  misc_RNA (1)...(19): siRNA sense strand
caugaugacucaagaagua

SEQ ID NO: 606323 - RNA, 19 nt, Homo sapiens
  misc_RNA (1)...(19): siRNA sense strand
caucagaccuuucuuaaca

SEQ ID NO: 606324 - RNA, 19 nt, Homo sapiens
  misc_RNA (1)...(19): siRNA sense strand
gcaaugacccuugaagaua

SEQ ID NO: 606325 - RNA, 19 nt, Homo sapiens
  misc_RNA (1)...(19): siRNA sense strand
gaagagagaacagaagaua

SEQ ID NO: 606326 - RNA, 19 nt, Homo sapiens
  misc_RNA (1)...(19): siRNA sense strand
gaugaaaccuuaagucaag

SEQ ID NO: 606327 - RNA, 19 nt, Homo sapiens
  misc_RNA (1)...(19): siRNA sense strand
ucaaagaggucugcuguuu

SEQ ID NO: 606328 - RNA, 19 nt, Homo sapiens
  misc_RNA (1)...(19): siRNA sense strand
ccucagagccaaccuauua

SEQ ID NO: 606329 - RNA, 19 nt, Homo sapiens
  misc_RNA (1)...(19): siRNA sense strand
gaaggaagaacagauauaa

SEQ ID NO: 606330 - RNA, 19 nt, Homo sapiens
  misc_RNA (1)...(19): siRNA sense strand
gcccuuggcuucaucauuu

SEQ ID NO: 606331 - RNA, 19 nt, Homo sapiens
  misc_RNA (1)...(19): siRNA sense strand
gcuaucaagucauccuuua

SEQ ID NO: 606332 - RNA, 19 nt, Homo sapiens
  misc_RNA (1)...(19): siRNA sense strand
gaauggcugugaagaauau

SEQ ID NO: 606333 - RNA, 19 nt, Homo sapiens
  misc_RNA (1)...(19): siRNA sense strand
gcaaacauaucaaauucga

SEQ ID NO: 606334 - RNA, 19 nt, Homo sapiens
  misc_RNA (1)...(19): siRNA sense strand
cauaguaucuucaccagaa

SEQ ID NO: 606335 - RNA, 19 nt, Homo sapiens
  misc_RNA (1)...(19): siRNA sense strand
gacagaggaucaauauauu

SEQ ID NO: 606336 - RNA, 19 nt, Homo sapiens
  misc_RNA (1)...(19): siRNA sense strand
gagaauugguuguuauguu

SEQ ID NO: 606337 - RNA, 19 nt, Homo sapiens
  misc_RNA (1)...(19): siRNA sense strand
gggaacugcuccagaagua

SEQ ID NO: 606338 - RNA, 19 nt, Homo sapiens
  misc_RNA (1)...(19): siRNA sense strand
uaacagagcauuagacaug

SEQ ID NO: 606339 - RNA, 19 nt, Homo sapiens
  misc_RNA (1)...(19): siRNA sense strand
gaagagacaguuacaguga

SEQ ID NO: 606340 - RNA, 19 nt, Homo sapiens
  misc_RNA (1)...(19): siRNA sense strand
ccagguacauuaaagauga

SEQ ID NO: 606341 - RNA, 19 nt, Homo sapiens
  misc_RNA (1)...(19): siRNA sense strand
ccaugaagauucugauaaa

SEQ ID NO: 606342 - RNA, 19 nt, Homo sapiens
  misc_RNA (1)...(19): siRNA sense strand
gaagacugaugaugaugaa

SEQ ID NO: 606343 - RNA, 19 nt, Homo sapiens
  misc_RNA (1)...(19): siRNA sense strand
uaacuucucucucagaugu

SEQ ID NO: 606344 - RNA, 19 nt, Homo sapiens
  misc_RNA (1)...(19): siRNA sense strand
gaaguuaucagaagagaga

SEQ ID NO: 606345 - RNA, 19 nt, Homo sapiens
  misc_RNA (1)...(19): siRNA sense strand
gaagaugacauuuaugaug

SEQ ID NO: 606346 - RNA, 19 nt, Homo sapiens
  misc_RNA (1)...(19): siRNA sense strand
ggaaguagaacuccucauu

SEQ ID NO: 606347 - RNA, 19 nt, Homo sapiens
  misc_RNA (1)...(19): siRNA sense strand
gaacugaccugugauacca

SEQ ID NO: 606348 - RNA, 19 nt, Homo sapiens
  misc_RNA (1)...(19): siRNA sense strand
uagcuacccucaaagauaa

SEQ ID NO: 606349 - RNA, 19 nt, Homo sapiens
  misc_RNA (1)...(19): siRNA sense strand
aaagaugaaugggaaguua

SEQ ID NO: 606350 - RNA, 19 nt, Homo sapiens
  misc_RNA (1)...(19): siRNA sense strand
gcaagacagugcuauagau

SEQ ID NO: 606351 - RNA, 19 nt, Homo sapiens
  misc_RNA (1)...(19): siRNA sense strand
ccaaagccacuguuaauuu

SEQ ID NO: 606352 - RNA, 19 nt, Homo sapiens
  misc_RNA (1)...(19): siRNA sense strand
caaccaagaugcccaagau

SEQ ID NO: 606353 - RNA, 19 nt, Homo sapiens
  misc_RNA (1)...(19): siRNA sense strand
cuaaggagcuggagaaucu

SEQ ID NO: 606354 - RNA, 19 nt, Homo sapiens
  misc_RNA (1)...(19): siRNA sense strand
cuaguucgauggauaagua

SEQ ID NO: 606355 - RNA, 19 nt, Homo sapiens
  misc_RNA (1)...(19): siRNA sense strand
cagcaaacauaucaaauuc

SEQ ID NO: 606356 - RNA, 19 nt, Homo sapiens
  misc_RNA (1)...(19): siRNA sense strand
caucaaagauacacaagau

SEQ ID NO: 606357 - RNA, 19 nt, Homo sapiens
  misc_RNA (1)...(19): siRNA sense strand
gaucauuccuuucugacaa

SEQ ID NO: 606358 - RNA, 19 nt, Homo sapiens
  misc_RNA (1)...(19): siRNA sense strand
ggaaguauagccuuggaua

SEQ ID NO: 606359 - RNA, 19 nt, Homo sapiens
  misc_RNA (1)...(19): siRNA sense strand
uaagagaaauugcccuaga

SEQ ID NO: 606360 - RNA, 19 nt, Homo sapiens
  misc_RNA (1)...(19): siRNA sense strand
uggacgaguucuagaauua

SEQ ID NO: 606361 - RNA, 19 nt, Homo sapiens
  misc_RNA (1)...(19): siRNA sense strand
gaaaacaacucaggucaaa

SEQ ID NO: 606362 - RNA, 19 nt, Homo sapiens
  misc_RNA (1)...(19): siRNA sense strand
gugaauacauccaacaaga

SEQ ID NO: 606363 - RNA, 19 nt, Homo sapiens
  misc_RNA (1)...(19): siRNA sense strand
uaacaaagggcuuaguaaa

SEQ ID NO: 606364 - RNA, 19 nt, Homo sapiens
  misc_RNA (1)...(19): siRNA sense strand
caaugacccuugaagauau

SEQ ID NO: 606365 - RNA, 19 nt, Homo sapiens
  misc_RNA (1)...(19): siRNA sense strand
gaaagaagaguucguuuac

SEQ ID NO: 606366 - RNA, 19 nt, Homo sapiens
  misc_RNA (1)...(19): siRNA sense strand
gagaagaagucacaaacag

SEQ ID NO: 606367 - RNA, 19 nt, Homo sapiens
  misc_RNA (1)...(19): siRNA sense strand
ggaaagaagaaccaaagaa

SEQ ID NO: 606368 - RNA, 19 nt, Homo sapiens
  misc_RNA (1)...(19): siRNA sense strand
gaagaguucguuuacauug

SEQ ID NO: 606369 - RNA, 19 nt, Homo sapiens
  misc_RNA (1)...(19): siRNA sense strand
ccaggucaaugguuucuuu

SEQ ID NO: 606370 - RNA, 19 nt, Homo sapiens
  misc_RNA (1)...(19): siRNA sense strand
cgagaucgauugcgaggaa

SEQ ID NO: 606371 - RNA, 19 nt, Homo sapiens
  misc_RNA (1)...(19): siRNA sense strand
auacacgggugccaacuua

SEQ ID NO: 606372 - RNA, 19 nt, Homo sapiens
  misc_RNA (1)...(19): siRNA sense strand
aaagaggucugcuguuuca

SEQ ID NO: 606373 - RNA, 19 nt, Homo sapiens
  misc_RNA (1)...(19): siRNA sense strand
gaacuccucauuacccuaa

SEQ ID NO: 606374 - RNA, 19 nt, Homo sapiens
  misc_RNA (1)...(19): siRNA sense strand
gaagauaccauuuguacca

SEQ ID NO: 606375 - RNA, 19 nt, Homo sapiens
  misc_RNA (1)...(19): siRNA sense strand
ucaagaagauaccauuugu

SEQ ID NO: 606376 - RNA, 19 nt, Homo sapiens
  misc_RNA (1)...(19): siRNA sense strand
gaacugcuccagaaguauu

SEQ ID NO: 606377 - RNA, 19 nt, Homo sapiens
  misc_RNA (1)...(19): siRNA sense strand
caaagaagaguuacccaaa

SEQ ID NO: 606378 - RNA, 19 nt, Homo sapiens
  misc_RNA (1)...(19): siRNA sense strand
acaaagggcuuaguaaauc

SEQ ID NO: 606379 - RNA, 19 nt, Homo sapiens
  misc_RNA (1)...(19): siRNA sense strand
gacugaugaugaugaaaua

SEQ ID NO: 606380 - RNA, 19 nt, Homo sapiens
  misc_RNA (1)...(19): siRNA sense strand
caaaggcaaucagagaauu

SEQ ID NO: 606381 - RNA, 19 nt, Homo sapiens
  misc_RNA (1)...(19): siRNA sense strand
guggaaacacugagaaaua

SEQ ID NO: 606382 - RNA, 19 nt, Homo sapiens
  misc_RNA (1)...(19): siRNA sense strand
caaaggugaucgcguccua

SEQ ID NO: 606383 - RNA, 19 nt, Homo sapiens
  misc_RNA (1)...(19): siRNA sense strand
gauaacagcuuggggauaa

SEQ ID NO: 606384 - RNA, 19 nt, Homo sapiens
  misc_RNA (1)...(19): siRNA sense strand
aagaagaguuacccaaauu

SEQ ID NO: 606385 - RNA, 19 nt, Homo sapiens
  misc_RNA (1)...(19): siRNA sense strand
cgaaggaaaguaaacauaa

SEQ ID NO: 606386 - RNA, 19 nt, Homo sapiens
  misc_RNA (1)...(19): siRNA sense strand
gaaacagccaugacucaaa

SEQ ID NO: 606387 - RNA, 19 nt, Homo sapiens
  misc_RNA (1)...(19): siRNA sense strand
gaucagcuuuccuguaaca

SEQ ID NO: 606388 - RNA, 19 nt, Homo sapiens
  misc_RNA (1)...(19): siRNA sense strand
gaguggagaagaugacuua

SEQ ID NO: 606389 - RNA, 19 nt, Homo sapiens
  misc_RNA (1)...(19): siRNA sense strand
gcacaaguacuuccaaaca

SEQ ID NO: 606390 - RNA, 19 nt, Homo sapiens
  misc_RNA (1)...(19): siRNA sense strand
gacaaucuccaacaucuaa

SEQ ID NO: 606391 - RNA, 19 nt, Homo sapiens
  misc_RNA (1)...(19): siRNA sense strand
gaaucuuccucuucaguga

SEQ ID NO: 606392 - RNA, 19 nt, Homo sapiens
  misc_RNA (1)...(19): siRNA sense strand
cauggugugucuuacuuua

SEQ ID NO: 606393 - RNA, 19 nt, Homo sapiens
  misc_RNA (1)...(19): siRNA sense strand
ugaugagacuuccuuauug

SEQ ID NO: 606394 - RNA, 19 nt, Homo sapiens
  misc_RNA (1)...(19): siRNA sense strand
caggagagacugccacaua

SEQ ID NO: 606395 - RNA, 19 nt, Homo sapiens
  misc_RNA (1)...(19): siRNA sense strand
agacagaggaucaauauau

SEQ ID NO: 606396 - RNA, 19 nt, Homo sapiens
  misc_RNA (1)...(19): siRNA sense strand
aaagaagacugaugaugau

SEQ ID NO: 606397 - RNA, 19 nt, Homo sapiens
  misc_RNA (1)...(19): siRNA sense strand
ggaaguuaacagagcauua

SEQ ID NO: 606398 - RNA, 19 nt, Homo sapiens
  misc_RNA (1)...(19): siRNA sense strand
gaaaggaugcacugugaug

SEQ ID NO: 606399 - RNA, 19 nt, Homo sapiens
  misc_RNA (1)...(19): siRNA sense strand
gauaaccgaaggaaaguaa

SEQ ID NO: 606400 - RNA, 19 nt, Homo sapiens
  misc_RNA (1)...(19): siRNA sense strand
gcaagauacucagauggaa

SEQ ID NO: 606401 - RNA, 19 nt, Homo sapiens
  misc_RNA (1)...(19): siRNA sense strand
gacuggaacugaccuguga

SEQ ID NO: 606402 - RNA, 19 nt, Homo sapiens
  misc_RNA (1)...(19): siRNA sense strand
aaacaacaauggucagcaa

SEQ ID NO: 606403 - RNA, 19 nt, Homo sapiens
  misc_RNA (1)...(19): siRNA sense strand
gaagucauaucugcucuca

SEQ ID NO: 606404 - RNA, 19 nt, Homo sapiens
  misc_RNA (1)...(19): siRNA sense strand
caauggaguuagucuagaa

SEQ ID NO: 606405 - RNA, 19 nt, Homo sapiens
  misc_RNA (1)...(19): siRNA sense strand
ggagaaacuugauuuaucc

SEQ ID NO: 606406 - RNA, 19 nt, Homo sapiens
  misc_RNA (1)...(19): siRNA sense strand
gaaagucuccaagaauuau

SEQ ID NO: 606407 - RNA, 19 nt, Homo sapiens
  misc_RNA (1)...(19): siRNA sense strand
gauguuaucuugaaaguga

SEQ ID NO: 606408 - RNA, 19 nt, Homo sapiens
  misc_RNA (1)...(19): siRNA sense strand
gaaggcaacuuaauuaauc

SEQ ID NO: 606409 - RNA, 19 nt, Homo sapiens
  misc_RNA (1)...(19): siRNA sense strand
gaaagaagaaccaaagaaa

SEQ ID NO: 606410 - RNA, 19 nt, Homo sapiens
  misc_RNA (1)...(19): siRNA sense strand
gaacaaaccaugaagauuc

SEQ ID NO: 606411 - RNA, 19 nt, Homo sapiens
  misc_RNA (1)...(19): siRNA sense strand
gaagaaauaugggcuguau

SEQ ID NO: 606412 - RNA, 19 nt, Homo sapiens
  misc_RNA (1)...(19): siRNA sense strand
ggaaagaagaguucguuua

SEQ ID NO: 606413 - RNA, 19 nt, Homo sapiens
  misc_RNA (1)...(19): siRNA sense strand
gaagguggcuauaucaaug

SEQ ID NO: 606414 - RNA, 19 nt, Homo sapiens
  misc_RNA (1)...(19): siRNA sense strand
cagaucagcuuuccuguaa

SEQ ID NO: 606415 - RNA, 19 nt, Homo sapiens
  misc_RNA (1)...(19): siRNA sense strand
gcauugaugugcuuucuaa

SEQ ID NO: 606416 - RNA, 19 nt, Homo sapiens
  misc_RNA (1)...(19): siRNA sense strand
gccaaagacugacagaaua

SEQ ID NO: 606417 - RNA, 19 nt, Homo sapiens
  misc_RNA (1)...(19): siRNA sense strand
gaaguagaacuccucauua

SEQ ID NO: 606418 - RNA, 19 nt, Homo sapiens
  misc_RNA (1)...(19): siRNA sense strand
gaauggagccucuuugaaa

SEQ ID NO: 606419 - RNA, 19 nt, Homo sapiens
  misc_RNA (1)...(19): siRNA sense strand
gaagaugugacacuuguua

SEQ ID NO: 606420 - RNA, 19 nt, Homo sapiens
  misc_RNA (1)...(19): siRNA sense strand
ccaagaagcugaaguuauc

SEQ ID NO: 606421 - RNA, 19 nt, Homo sapiens
  misc_RNA (1)...(19): siRNA sense strand
caacucaggucaaagacua

SEQ ID NO: 606422 - RNA, 19 nt, Homo sapiens
  misc_RNA (1)...(19): siRNA sense strand
caugaugacucaagaagua

SEQ ID NO: 606423 - RNA, 19 nt, Homo sapiens
  misc_RNA (1)...(19): siRNA sense strand
caucagaccuuucuuaaca

SEQ ID NO: 606424 - RNA, 19 nt, Homo sapiens
  misc_RNA (1)...(19): siRNA sense strand
gcaaugacccuugaagaua

SEQ ID NO: 606425 - RNA, 19 nt, Homo sapiens
  misc_RNA (1)...(19): siRNA sense strand
gaagagagaacagaagaua

SEQ ID NO: 606426 - RNA, 19 nt, Homo sapiens
  misc_RNA (1)...(19): siRNA sense strand
gaugaaaccuuaagucaag

SEQ ID NO: 606427 - RNA, 19 nt, Homo sapiens
  misc_RNA (1)...(19): siRNA sense strand
ucaaagaggucugcuguuu

SEQ ID NO: 606428 - RNA, 19 nt, Homo sapiens
  misc_RNA (1)...(19): siRNA sense strand
ccucagagccaaccuauua

SEQ ID NO: 606429 - RNA, 19 nt, Homo sapiens
  misc_RNA (1)...(19): siRNA sense strand
gaaggaagaacagauauaa

SEQ ID NO: 606430 - RNA, 19 nt, Homo sapiens
  misc_RNA (1)...(19): siRNA sense strand
gcccuuggcuucaucauuu

SEQ ID NO: 606431 - RNA, 19 nt, Homo sapiens
  misc_RNA (1)...(19): siRNA sense strand
gcuaucaagucauccuuua

SEQ ID NO: 606432 - RNA, 19 nt, Homo sapiens
  misc_RNA (1)...(19): siRNA sense strand
gaauggcugugaagaauau

SEQ ID NO: 606433 - RNA, 19 nt, Homo sapiens
  misc_RNA (1)...(19): siRNA sense strand
gcaaacauaucaaauucga

SEQ ID NO: 606434 - RNA, 19 nt, Homo sapiens
  misc_RNA (1)...(19): siRNA sense strand
cauaguaucuucaccagaa

SEQ ID NO: 606435 - RNA, 19 nt, Homo sapiens
  misc_RNA (1)...(19): siRNA sense strand
gacagaggaucaauauauu

SEQ ID NO: 606436 - RNA, 19 nt, Homo sapiens
  misc_RNA (1)...(19): siRNA sense strand
gagaauugguuguuauguu

SEQ ID NO: 606437 - RNA, 19 nt, Homo sapiens
  misc_RNA (1)...(19): siRNA sense strand
gggaacugcuccagaagua

SEQ ID NO: 606438 - RNA, 19 nt, Homo sapiens
  misc_RNA (1)...(19): siRNA sense strand
uaacagagcauuagacaug

SEQ ID NO: 606439 - RNA, 19 nt, Homo sapiens
  misc_RNA (1)...(19): siRNA sense strand
gaagagacaguuacaguga

SEQ ID NO: 606440 - RNA, 19 nt, Homo sapiens
  misc_RNA (1)...(19): siRNA sense strand
ccagguacauuaaagauga

SEQ ID NO: 606441 - RNA, 19 nt, Homo sapiens
  misc_RNA (1)...(19): siRNA sense strand
ccaugaagauucugauaaa

SEQ ID NO: 606442 - RNA, 19 nt, Homo sapiens
  misc_RNA (1)...(19): siRNA sense strand
gaagacugaugaugaugaa

SEQ ID NO: 606443 - RNA, 19 nt, Homo sapiens
  misc_RNA (1)...(19): siRNA sense strand
uaacuucucucucagaugu

SEQ ID NO: 606444 - RNA, 19 nt, Homo sapiens
  misc_RNA (1)...(19): siRNA sense strand
gaaguuaucagaagagaga

SEQ ID NO: 606445 - RNA, 19 nt, Homo sapiens
  misc_RNA (1)...(19): siRNA sense strand
gaagaugacauuuaugaug

SEQ ID NO: 606446 - RNA, 19 nt, Homo sapiens
  misc_RNA (1)...(19): siRNA sense strand
ggaaguagaacuccucauu

SEQ ID NO: 606447 - RNA, 19 nt, Homo sapiens
  misc_RNA (1)...(19): siRNA sense strand
gaacugaccugugauacca

SEQ ID NO: 606448 - RNA, 19 nt, Homo sapiens
  misc_RNA (1)...(19): siRNA sense strand
uagcuacccucaaagauaa

SEQ ID NO: 606449 - RNA, 19 nt, Homo sapiens
  misc_RNA (1)...(19): siRNA sense strand
aaagaugaaugggaaguua

SEQ ID NO: 606450 - RNA, 19 nt, Homo sapiens
  misc_RNA (1)...(19): siRNA sense strand
gcaagacagugcuauagau

SEQ ID NO: 606451 - RNA, 19 nt, Homo sapiens
  misc_RNA (1)...(19): siRNA sense strand
ccaaagccacuguuaauuu

SEQ ID NO: 606452 - RNA, 19 nt, Homo sapiens
  misc_RNA (1)...(19): siRNA sense strand
caaccaagaugcccaagau

SEQ ID NO: 606453 - RNA, 19 nt, Homo sapiens
  misc_RNA (1)...(19): siRNA sense strand
cuaaggagcuggagaaucu

SEQ ID NO: 606454 - RNA, 19 nt, Homo sapiens
  misc_RNA (1)...(19): siRNA sense strand
cuaguucgauggauaagua

SEQ ID NO: 606455 - RNA, 19 nt, Homo sapiens
  misc_RNA (1)...(19): siRNA sense strand
cagcaaacauaucaaauuc

SEQ ID NO: 606456 - RNA, 19 nt, Homo sapiens
  misc_RNA (1)...(19): siRNA sense strand
caucaaagauacacaagau

SEQ ID NO: 606457 - RNA, 19 nt, Homo sapiens
  misc_RNA (1)...(19): siRNA sense strand
gaucauuccuuucugacaa

SEQ ID NO: 606458 - RNA, 19 nt, Homo sapiens
  misc_RNA (1)...(19): siRNA sense strand
ggaaguauagccuuggaua

SEQ ID NO: 606459 - RNA, 19 nt, Homo sapiens
  misc_RNA (1)...(19): siRNA sense strand
uaagagaaauugcccuaga

SEQ ID NO: 606460 - RNA, 19 nt, Homo sapiens
  misc_RNA (1)...(19): siRNA sense strand
uggacgaguucuagaauua

SEQ ID NO: 606461 - RNA, 19 nt, Homo sapiens
  misc_RNA (1)...(19): siRNA sense strand
gaaaacaacucaggucaaa

SEQ ID NO: 606462 - RNA, 19 nt, Homo sapiens
  misc_RNA (1)...(19): siRNA sense strand
gugaauacauccaacaaga

SEQ ID NO: 606463 - RNA, 19 nt, Homo sapiens
  misc_RNA (1)...(19): siRNA sense strand
uaacaaagggcuuaguaaa

SEQ ID NO: 606464 - RNA, 19 nt, Homo sapiens
  misc_RNA (1)...(19): siRNA sense strand
caaugacccuugaagauau

SEQ ID NO: 606465 - RNA, 19 nt, Homo sapiens
  misc_RNA (1)...(19): siRNA sense strand
gaaagaagaguucguuuac

SEQ ID NO: 606466 - RNA, 19 nt, Homo sapiens
  misc_RNA (1)...(19): siRNA sense strand
gagaagaagucacaaacag

SEQ ID NO: 606467 - RNA, 19 nt, Homo sapiens
  misc_RNA (1)...(19): siRNA sense strand
ggaaagaagaaccaaagaa

SEQ ID NO: 606468 - RNA, 19 nt, Homo sapiens
  misc_RNA (1)...(19): siRNA sense strand
gaagaguucguuuacauug

SEQ ID NO: 606469 - RNA, 19 nt, Homo sapiens
  misc_RNA (1)...(19): siRNA sense strand
ccaggucaaugguuucuuu

SEQ ID NO: 606470 - RNA, 19 nt, Homo sapiens
  misc_RNA (1)...(19): siRNA sense strand
cgagaucgauugcgaggaa

SEQ ID NO: 606471 - RNA, 19 nt, Homo sapiens
  misc_RNA (1)...(19): siRNA sense strand
auacacgggugccaacuua

SEQ ID NO: 606472 - RNA, 19 nt, Homo sapiens
  misc_RNA (1)...(19): siRNA sense strand
aaagaggucugcuguuuca

SEQ ID NO: 606473 - RNA, 19 nt, Homo sapiens
  misc_RNA (1)...(19): siRNA sense strand
gaacuccucauuacccuaa

SEQ ID NO: 606474 - RNA, 19 nt, Homo sapiens
  misc_RNA (1)...(19): siRNA sense strand
gaagauaccauuuguacca

SEQ ID NO: 606475 - RNA, 19 nt, Homo sapiens
  misc_RNA (1)...(19): siRNA sense strand
ucaagaagauaccauuugu

SEQ ID NO: 606476 - RNA, 19 nt, Homo sapiens
  misc_RNA (1)...(19): siRNA sense strand
gaacugcuccagaaguauu

SEQ ID NO: 606477 - RNA, 19 nt, Homo sapiens
  misc_RNA (1)...(19): siRNA sense strand
caaagaagaguuacccaaa

SEQ ID NO: 606478 - RNA, 19 nt, Homo sapiens
  misc_RNA (1)...(19): siRNA sense strand
acaaagggcuuaguaaauc

SEQ ID NO: 606479 - RNA, 19 nt, Homo sapiens
  misc_RNA (1)...(19): siRNA sense strand
gacugaugaugaugaaaua

SEQ ID NO: 606480 - RNA, 19 nt, Homo sapiens
  misc_RNA (1)...(19): siRNA sense strand
caaaggcaaucagagaauu

SEQ ID NO: 606481 - RNA, 19 nt, Homo sapiens
  misc_RNA (1)...(19): siRNA sense strand
guggaaacacugagaaaua

SEQ ID NO: 606482 - RNA, 19 nt, Homo sapiens
  misc_RNA (1)...(19): siRNA sense strand
caaaggugaucgcguccua

SEQ ID NO: 606483 - RNA, 19 nt, Homo sapiens
  misc_RNA (1)...(19): siRNA sense strand
gauaacagcuuggggauaa

SEQ ID NO: 606484 - RNA, 19 nt, Homo sapiens
  misc_RNA (1)...(19): siRNA sense strand
aagaagaguuacccaaauu

SEQ ID NO: 606485 - RNA, 19 nt, Homo sapiens
  misc_RNA (1)...(19): siRNA sense strand
cgaaggaaaguaaacauaa

SEQ ID NO: 606486 - RNA, 19 nt, Homo sapiens
  misc_RNA (1)...(19): siRNA sense strand
gaaacagccaugacucaaa

SEQ ID NO: 606487 - RNA, 19 nt, Homo sapiens
  misc_RNA (1)...(19): siRNA sense strand
gaucagcuuuccuguaaca

SEQ ID NO: 606488 - RNA, 19 nt, Homo sapiens
  misc_RNA (1)...(19): siRNA sense strand
gaguggagaagaugacuua

SEQ ID NO: 606489 - RNA, 19 nt, Homo sapiens
  misc_RNA (1)...(19): siRNA sense strand
gcacaaguacuuccaaaca

SEQ ID NO: 606490 - RNA, 19 nt, Homo sapiens
  misc_RNA (1)...(19): siRNA sense strand
gacaaucuccaacaucuaa

SEQ ID NO: 606491 - RNA, 19 nt, Homo sapiens
  misc_RNA (1)...(19): siRNA sense strand
gaaucuuccucuucaguga

SEQ ID NO: 606492 - RNA, 19 nt, Homo sapiens
  misc_RNA (1)...(19): siRNA sense strand
cauggugugucuuacuuua

SEQ ID NO: 606493 - RNA, 19 nt, Homo sapiens
  misc_RNA (1)...(19): siRNA sense strand
ugaugagacuuccuuauug

SEQ ID NO: 606494 - RNA, 19 nt, Homo sapiens
  misc_RNA (1)...(19): siRNA sense strand
caggagagacugccacaua

SEQ ID NO: 606495 - RNA, 19 nt, Homo sapiens
  misc_RNA (1)...(19): siRNA sense strand
agacagaggaucaauauau

SEQ ID NO: 606496 - RNA, 19 nt, Homo sapiens
  misc_RNA (1)...(19): siRNA sense strand
aaagaagacugaugaugau

SEQ ID NO: 606497 - RNA, 19 nt, Homo sapiens
  misc_RNA (1)...(19): siRNA sense strand
ggaaguuaacagagcauua

SEQ ID NO: 606498 - RNA, 19 nt, Homo sapiens
  misc_RNA (1)...(19): siRNA sense strand
gaaaggaugcacugugaug

SEQ ID NO: 606499 - RNA, 19 nt, Homo sapiens
  misc_RNA (1)...(19): siRNA sense strand
gauaaccgaaggaaaguaa

SEQ ID NO: 606500 - RNA, 19 nt, Homo sapiens
  misc_RNA (1)...(19): siRNA sense strand
gcaagauacucagauggaa

SEQ ID NO: 606501 - RNA, 19 nt, Homo sapiens
  misc_RNA (1)...(19): siRNA sense strand
gacuggaacugaccuguga

SEQ ID NO: 606502 - RNA, 19 nt, Homo sapiens
  misc_RNA (1)...(19): siRNA sense strand
aaacaacaauggucagcaa

SEQ ID NO: 606503 - RNA, 19 nt, Homo sapiens
  misc_RNA (1)...(19): siRNA sense strand
gaagucauaucugcucuca

SEQ ID NO: 606504 - RNA, 19 nt, Homo sapiens
  misc_RNA (1)...(19): siRNA sense strand
caauggaguuagucuagaa

SEQ ID NO: 606505 - RNA, 19 nt, Homo sapiens
  misc_RNA (1)...(19): siRNA sense strand
ggagaaacuugauuuaucc

SEQ ID NO: 606506 - RNA, 19 nt, Homo sapiens
  misc_RNA (1)...(19): siRNA sense strand
gaaagucuccaagaauuau

SEQ ID NO: 606507 - RNA, 19 nt, Homo sapiens
  misc_RNA (1)...(19): siRNA sense strand
gauguuaucuugaaaguga

SEQ ID NO: 606508 - RNA, 19 nt, Homo sapiens
  misc_RNA (1)...(19): siRNA sense strand
gaaggcaacuuaauuaauc

SEQ ID NO: 606509 - RNA, 19 nt, Homo sapiens
  misc_RNA (1)...(19): siRNA sense strand
gaaagaagaaccaaagaaa

SEQ ID NO: 606510 - RNA, 19 nt, Homo sapiens
  misc_RNA (1)...(19): siRNA sense strand
gaacaaaccaugaagauuc

SEQ ID NO: 606511 - RNA, 19 nt, Homo sapiens
  misc_RNA (1)...(19): siRNA sense strand
gaagaaauaugggcuguau

SEQ ID NO: 606512 - RNA, 19 nt, Homo sapiens
  misc_RNA (1)...(19): siRNA sense strand
ggaaagaagaguucguuua

SEQ ID NO: 606513 - RNA, 19 nt, Homo sapiens
  misc_RNA (1)...(19): siRNA sense strand
gaagguggcuauaucaaug

SEQ ID NO: 606514 - RNA, 19 nt, Homo sapiens
  misc_RNA (1)...(19): siRNA sense strand
cagaucagcuuuccuguaa

SEQ ID NO: 606515 - RNA, 19 nt, Homo sapiens
  misc_RNA (1)...(19): siRNA sense strand
gcauugaugugcuuucuaa

SEQ ID NO: 606516 - RNA, 19 nt, Homo sapiens
  misc_RNA (1)...(19): siRNA sense strand
gccaaagacugacagaaua

SEQ ID NO: 606517 - RNA, 19 nt, Homo sapiens
  misc_RNA (1)...(19): siRNA sense strand
gaaguagaacuccucauua

SEQ ID NO: 606518 - RNA, 19 nt, Homo sapiens
  misc_RNA (1)...(19): siRNA sense strand
gaauggagccucuuugaaa

SEQ ID NO: 606519 - RNA, 19 nt, Homo sapiens
  misc_RNA (1)...(19): siRNA sense strand
gaagaugugacacuuguua

SEQ ID NO: 606520 - RNA, 19 nt, Homo sapiens
  misc_RNA (1)...(19): siRNA sense strand
ccaagaagcugaaguuauc

SEQ ID NO: 606521 - RNA, 19 nt, Homo sapiens
  misc_RNA (1)...(19): siRNA sense strand
caacucaggucaaagacua

SEQ ID NO: 606522 - RNA, 19 nt, Homo sapiens
  misc_RNA (1)...(19): siRNA sense strand
caugaugacucaagaagua

SEQ ID NO: 606523 - RNA, 19 nt, Homo sapiens
  misc_RNA (1)...(19): siRNA sense strand
caucagaccuuucuuaaca

SEQ ID NO: 606524 - RNA, 19 nt, Homo sapiens
  misc_RNA (1)...(19): siRNA sense strand
gcaaugacccuugaagaua

SEQ ID NO: 606525 - RNA, 19 nt, Homo sapiens
  misc_RNA (1)...(19): siRNA sense strand
gaagagagaacagaagaua

SEQ ID NO: 606526 - RNA, 19 nt, Homo sapiens
  misc_RNA (1)...(19): siRNA sense strand
gaugaaaccuuaagucaag

SEQ ID NO: 606527 - RNA, 19 nt, Homo sapiens
  misc_RNA (1)...(19): siRNA sense strand
ucaaagaggucugcuguuu

SEQ ID NO: 606528 - RNA, 19 nt, Homo sapiens
  misc_RNA (1)...(19): siRNA sense strand
ccucagagccaaccuauua

SEQ ID NO: 606529 - RNA, 19 nt, Homo sapiens
  misc_RNA (1)...(19): siRNA sense strand
gaaggaagaacagauauaa

SEQ ID NO: 606530 - RNA, 19 nt, Homo sapiens
  misc_RNA (1)...(19): siRNA sense strand
gcccuuggcuucaucauuu

SEQ ID NO: 606531 - RNA, 19 nt, Homo sapiens
  misc_RNA (1)...(19): siRNA sense strand
gcuaucaagucauccuuua

SEQ ID NO: 606532 - RNA, 19 nt, Homo sapiens
  misc_RNA (1)...(19): siRNA sense strand
gaauggcugugaagaauau

SEQ ID NO: 606533 - RNA, 19 nt, Homo sapiens
  misc_RNA (1)...(19): siRNA sense strand
gcaaacauaucaaauucga

SEQ ID NO: 606534 - RNA, 19 nt, Homo sapiens
  misc_RNA (1)...(19): siRNA sense strand
cauaguaucuucaccagaa

SEQ ID NO: 606535 - RNA, 19 nt, Homo sapiens
  misc_RNA (1)...(19): siRNA sense strand
gacagaggaucaauauauu

SEQ ID NO: 606536 - RNA, 19 nt, Homo sapiens
  misc_RNA (1)...(19): siRNA sense strand
gagaauugguuguuauguu

SEQ ID NO: 606537 - RNA, 19 nt, Homo sapiens
  misc_RNA (1)...(19): siRNA sense strand
gggaacugcuccagaagua

SEQ ID NO: 606538 - RNA, 19 nt, Homo sapiens
  misc_RNA (1)...(19): siRNA sense strand
uaacagagcauuagacaug

SEQ ID NO: 606539 - RNA, 19 nt, Homo sapiens
  misc_RNA (1)...(19): siRNA sense strand
gaagagacaguuacaguga

SEQ ID NO: 606540 - RNA, 19 nt, Homo sapiens
  misc_RNA (1)...(19): siRNA sense strand
ccagguacauuaaagauga

SEQ ID NO: 606541 - RNA, 19 nt, Homo sapiens
  misc_RNA (1)...(19): siRNA sense strand
ccaugaagauucugauaaa

SEQ ID NO: 606542 - RNA, 19 nt, Homo sapiens
  misc_RNA (1)...(19): siRNA sense strand
gaagacugaugaugaugaa

SEQ ID NO: 606543 - RNA, 19 nt, Homo sapiens
  misc_RNA (1)...(19): siRNA sense strand
uaacuucucucucagaugu

SEQ ID NO: 606544 - RNA, 19 nt, Homo sapiens
  misc_RNA (1)...(19): siRNA sense strand
gaaguuaucagaagagaga

SEQ ID NO: 606545 - RNA, 19 nt, Homo sapiens
  misc_RNA (1)...(19): siRNA sense strand
gaagaugacauuuaugaug

SEQ ID NO: 606546 - RNA, 19 nt, Homo sapiens
  misc_RNA (1)...(19): siRNA sense strand
ggaaguagaacuccucauu

SEQ ID NO: 606547 - RNA, 19 nt, Homo sapiens
  misc_RNA (1)...(19): siRNA sense strand
gaacugaccugugauacca

SEQ ID NO: 606548 - RNA, 19 nt, Homo sapiens
  misc_RNA (1)...(19): siRNA sense strand
uagcuacccucaaagauaa

SEQ ID NO: 606549 - RNA, 19 nt, Homo sapiens
  misc_RNA (1)...(19): siRNA sense strand
aaagaugaaugggaaguua

SEQ ID NO: 606550 - RNA, 19 nt, Homo sapiens
  misc_RNA (1)...(19): siRNA sense strand
gcaagacagugcuauagau

SEQ ID NO: 606551 - RNA, 19 nt, Homo sapiens
  misc_RNA (1)...(19): siRNA sense strand
ccaaagccacuguuaauuu

SEQ ID NO: 606552 - RNA, 19 nt, Homo sapiens
  misc_RNA (1)...(19): siRNA sense strand
caaccaagaugcccaagau

SEQ ID NO: 606553 - RNA, 19 nt, Homo sapiens
  misc_RNA (1)...(19): siRNA sense strand
cuaaggagcuggagaaucu

SEQ ID NO: 606554 - RNA, 19 nt, Homo sapiens
  misc_RNA (1)...(19): siRNA sense strand
cuaguucgauggauaagua

SEQ ID NO: 606555 - RNA, 19 nt, Homo sapiens
  misc_RNA (1)...(19): siRNA sense strand
cagcaaacauaucaaauuc

SEQ ID NO: 606556 - RNA, 19 nt, Homo sapiens
  misc_RNA (1)...(19): siRNA sense strand
caucaaagauacacaagau

SEQ ID NO: 606557 - RNA, 19 nt, Homo sapiens
  misc_RNA (1)...(19): siRNA sense strand
gaucauuccuuucugacaa

SEQ ID NO: 606558 - RNA, 19 nt, Homo sapiens
  misc_RNA (1)...(19): siRNA sense strand
ggaaguauagccuuggaua

SEQ ID NO: 606559 - RNA, 19 nt, Homo sapiens
  misc_RNA (1)...(19): siRNA sense strand
uaagagaaauugcccuaga

SEQ ID NO: 606560 - RNA, 19 nt, Homo sapiens
  misc_RNA (1)...(19): siRNA sense strand
uggacgaguucuagaauua

SEQ ID NO: 606561 - RNA, 19 nt, Homo sapiens
  misc_RNA (1)...(19): siRNA sense strand
gaaaacaacucaggucaaa

SEQ ID NO: 606562 - RNA, 19 nt, Homo sapiens
  misc_RNA (1)...(19): siRNA sense strand
gugaauacauccaacaaga

SEQ ID NO: 606563 - RNA, 19 nt, Homo sapiens
  misc_RNA (1)...(19): siRNA sense strand
uaacaaagggcuuaguaaa

SEQ ID NO: 606564 - RNA, 19 nt, Homo sapiens
  misc_RNA (1)...(19): siRNA sense strand
caaugacccuugaagauau

SEQ ID NO: 606565 - RNA, 19 nt, Homo sapiens
  misc_RNA (1)...(19): siRNA sense strand
gaaagaagaguucguuuac

SEQ ID NO: 606566 - RNA, 19 nt, Homo sapiens
  misc_RNA (1)...(19): siRNA sense strand
gagaagaagucacaaacag

SEQ ID NO: 606567 - RNA, 19 nt, Homo sapiens
  misc_RNA (1)...(19): siRNA sense strand
ggaaagaagaaccaaagaa

SEQ ID NO: 606568 - RNA, 19 nt, Homo sapiens
  misc_RNA (1)...(19): siRNA sense strand
gaagaguucguuuacauug

SEQ ID NO: 606569 - RNA, 19 nt, Homo sapiens
  misc_RNA (1)...(19): siRNA sense strand
ccaggucaaugguuucuuu

SEQ ID NO: 606570 - RNA, 19 nt, Homo sapiens
  misc_RNA (1)...(19): siRNA sense strand
cgagaucgauugcgaggaa

SEQ ID NO: 606571 - RNA, 19 nt, Homo sapiens
  misc_RNA (1)...(19): siRNA sense strand
auacacgggugccaacuua

SEQ ID NO: 606572 - RNA, 19 nt, Homo sapiens
  misc_RNA (1)...(19): siRNA sense strand
aaagaggucugcuguuuca

SEQ ID NO: 606573 - RNA, 19 nt, Homo sapiens
  misc_RNA (1)...(19): siRNA sense strand
gaacuccucauuacccuaa

SEQ ID NO: 606574 - RNA, 19 nt, Homo sapiens
  misc_RNA (1)...(19): siRNA sense strand
gaagauaccauuuguacca

SEQ ID NO: 606575 - RNA, 19 nt, Homo sapiens
  misc_RNA (1)...(19): siRNA sense strand
ucaagaagauaccauuugu

SEQ ID NO: 606576 - RNA, 19 nt, Homo sapiens
  misc_RNA (1)...(19): siRNA sense strand
gaacugcuccagaaguauu

SEQ ID NO: 606577 - RNA, 19 nt, Homo sapiens
  misc_RNA (1)...(19): siRNA sense strand
caaagaagaguuacccaaa

SEQ ID NO: 606578 - RNA, 19 nt, Homo sapiens
  misc_RNA (1)...(19): siRNA sense strand
acaaagggcuuaguaaauc

SEQ ID NO: 606579 - RNA, 19 nt, Homo sapiens
  misc_RNA (1)...(19): siRNA sense strand
gacugaugaugaugaaaua

SEQ ID NO: 606580 - RNA, 19 nt, Homo sapiens
  misc_RNA (1)...(19): siRNA sense strand
caaaggcaaucagagaauu

SEQ ID NO: 606581 - RNA, 19 nt, Homo sapiens
  misc_RNA (1)...(19): siRNA sense strand
guggaaacacugagaaaua

SEQ ID NO: 606582 - RNA, 19 nt, Homo sapiens
  misc_RNA (1)...(19): siRNA sense strand
caaaggugaucgcguccua

SEQ ID NO: 606583 - RNA, 19 nt, Homo sapiens
  misc_RNA (1)...(19): siRNA sense strand
gauaacagcuuggggauaa

SEQ ID NO: 606584 - RNA, 19 nt, Homo sapiens
  misc_RNA (1)...(19): siRNA sense strand
aagaagaguuacccaaauu

SEQ ID NO: 606585 - RNA, 19 nt, Homo sapiens
  misc_RNA (1)...(19): siRNA sense strand
cgaaggaaaguaaacauaa

SEQ ID NO: 606586 - RNA, 19 nt, Homo sapiens
  misc_RNA (1)...(19): siRNA sense strand
gaaacagccaugacucaaa

SEQ ID NO: 606587 - RNA, 19 nt, Homo sapiens
  misc_RNA (1)...(19): siRNA sense strand
gaucagcuuuccuguaaca

SEQ ID NO: 606588 - RNA, 19 nt, Homo sapiens
  misc_RNA (1)...(19): siRNA sense strand
gaguggagaagaugacuua

SEQ ID NO: 606589 - RNA, 19 nt, Homo sapiens
  misc_RNA (1)...(19): siRNA sense strand
gcacaaguacuuccaaaca

SEQ ID NO: 606590 - RNA, 19 nt, Homo sapiens
  misc_RNA (1)...(19): siRNA sense strand
gacaaucuccaacaucuaa

SEQ ID NO: 606591 - RNA, 19 nt, Homo sapiens
  misc_RNA (1)...(19): siRNA sense strand
gaaucuuccucuucaguga

SEQ ID NO: 606592 - RNA, 19 nt, Homo sapiens
  misc_RNA (1)...(19): siRNA sense strand
cauggugugucuuacuuua

SEQ ID NO: 606593 - RNA, 19 nt, Homo sapiens
  misc_RNA (1)...(19): siRNA sense strand
ugaugagacuuccuuauug

SEQ ID NO: 606594 - RNA, 19 nt, Homo sapiens
  misc_RNA (1)...(19): siRNA sense strand
caggagagacugccacaua

SEQ ID NO: 606595 - RNA, 19 nt, Homo sapiens
  misc_RNA (1)...(19): siRNA sense strand
agacagaggaucaauauau

SEQ ID NO: 606596 - RNA, 19 nt, Homo sapiens
  misc_RNA (1)...(19): siRNA sense strand
aaagaagacugaugaugau

SEQ ID NO: 606597 - RNA, 19 nt, Homo sapiens
  misc_RNA (1)...(19): siRNA sense strand
ggaaguuaacagagcauua

SEQ ID NO: 606598 - RNA, 19 nt, Homo sapiens
  misc_RNA (1)...(19): siRNA sense strand
gaaaggaugcacugugaug

SEQ ID NO: 606599 - RNA, 19 nt, Homo sapiens
  misc_RNA (1)...(19): siRNA sense strand
gauaaccgaaggaaaguaa

SEQ ID NO: 606600 - RNA, 19 nt, Homo sapiens
  misc_RNA (1)...(19): siRNA sense strand
gcaagauacucagauggaa

SEQ ID NO: 606601 - RNA, 19 nt, Homo sapiens
  misc_RNA (1)...(19): siRNA sense strand
gacuggaacugaccuguga

SEQ ID NO: 606602 - RNA, 19 nt, Homo sapiens
  misc_RNA (1)...(19): siRNA sense strand
aaacaacaauggucagcaa

SEQ ID NO: 606603 - RNA, 19 nt, Homo sapiens
  misc_RNA (1)...(19): siRNA sense strand
gaagucauaucugcucuca

SEQ ID NO: 606604 - RNA, 19 nt, Homo sapiens
  misc_RNA (1)...(19): siRNA sense strand
caauggaguuagucuagaa

SEQ ID NO: 606605 - RNA, 19 nt, Homo sapiens
  misc_RNA (1)...(19): siRNA sense strand
ggagaaacuugauuuaucc

SEQ ID NO: 606606 - RNA, 19 nt, Homo sapiens
  misc_RNA (1)...(19): siRNA sense strand
gaaagucuccaagaauuau

SEQ ID NO: 606607 - RNA, 19 nt, Homo sapiens
  misc_RNA (1)...(19): siRNA sense strand
gauguuaucuugaaaguga

SEQ ID NO: 606608 - RNA, 19 nt, Homo sapiens
  misc_RNA (1)...(19): siRNA sense strand
gaaggcaacuuaauuaauc

SEQ ID NO: 606609 - RNA, 19 nt, Homo sapiens
  misc_RNA (1)...(19): siRNA sense strand
gaaagaagaaccaaagaaa

SEQ ID NO: 606610 - RNA, 19 nt, Homo sapiens
  misc_RNA (1)...(19): siRNA sense strand
gaacaaaccaugaagauuc

SEQ ID NO: 606611 - RNA, 19 nt, Homo sapiens
  misc_RNA (1)...(19): siRNA sense strand
gaagaaauaugggcuguau

SEQ ID NO: 606612 - RNA, 19 nt, Homo sapiens
  misc_RNA (1)...(19): siRNA sense strand
ggaaagaagaguucguuua

SEQ ID NO: 606613 - RNA, 19 nt, Homo sapiens
  misc_RNA (1)...(19): siRNA sense strand
gaagguggcuauaucaaug

SEQ ID NO: 606614 - RNA, 19 nt, Homo sapiens
  misc_RNA (1)...(19): siRNA sense strand
cagaucagcuuuccuguaa

SEQ ID NO: 606615 - RNA, 19 nt, Homo sapiens
  misc_RNA (1)...(19): siRNA sense strand
gcauugaugugcuuucuaa

SEQ ID NO: 606616 - RNA, 19 nt, Homo sapiens
  misc_RNA (1)...(19): siRNA sense strand
gccaaagacugacagaaua

SEQ ID NO: 606617 - RNA, 19 nt, Homo sapiens
  misc_RNA (1)...(19): siRNA sense strand
gaaguagaacuccucauua

SEQ ID NO: 606618 - RNA, 19 nt, Homo sapiens
  misc_RNA (1)...(19): siRNA sense strand
gaauggagccucuuugaaa

SEQ ID NO: 606619 - RNA, 19 nt, Homo sapiens
  misc_RNA (1)...(19): siRNA sense strand
gaagaugugacacuuguua

SEQ ID NO: 606620 - RNA, 19 nt, Homo sapiens
  misc_RNA (1)...(19): siRNA sense strand
ccaagaagcugaaguuauc

SEQ ID NO: 606621 - RNA, 19 nt, Homo sapiens
  misc_RNA (1)...(19): siRNA sense strand
caacucaggucaaagacua

SEQ ID NO: 606622 - RNA, 19 nt, Homo sapiens
  misc_RNA (1)...(19): siRNA sense strand
caugaugacucaagaagua

SEQ ID NO: 606623 - RNA, 19 nt, Homo sapiens
  misc_RNA (1)...(19): siRNA sense strand
caucagaccuuucuuaaca

SEQ ID NO: 606624 - RNA, 19 nt, Homo sapiens
  misc_RNA (1)...(19): siRNA sense strand
gcaaugacccuugaagaua

SEQ ID NO: 606625 - RNA, 19 nt, Homo sapiens
  misc_RNA (1)...(19): siRNA sense strand
gaagagagaacagaagaua

SEQ ID NO: 606626 - RNA, 19 nt, Homo sapiens
  misc_RNA (1)...(19): siRNA sense strand
gaugaaaccuuaagucaag

SEQ ID NO: 606627 - RNA, 19 nt, Homo sapiens
  misc_RNA (1)...(19): siRNA sense strand
ucaaagaggucugcuguuu

SEQ ID NO: 606628 - RNA, 19 nt, Homo sapiens
  misc_RNA (1)...(19): siRNA sense strand
ccucagagccaaccuauua

SEQ ID NO: 606629 - RNA, 19 nt, Homo sapiens
  misc_RNA (1)...(19): siRNA sense strand
gaaggaagaacagauauaa

SEQ ID NO: 606630 - RNA, 19 nt, Homo sapiens
  misc_RNA (1)...(19): siRNA sense strand
gcccuuggcuucaucauuu

SEQ ID NO: 606631 - RNA, 19 nt, Homo sapiens
  misc_RNA (1)...(19): siRNA sense strand
gcuaucaagucauccuuua

SEQ ID NO: 606632 - RNA, 19 nt, Homo sapiens
  misc_RNA (1)...(19): siRNA sense strand
gaauggcugugaagaauau

SEQ ID NO: 606633 - RNA, 19 nt, Homo sapiens
  misc_RNA (1)...(19): siRNA sense strand
gcaaacauaucaaauucga

SEQ ID NO: 606634 - RNA, 19 nt, Homo sapiens
  misc_RNA (1)...(19): siRNA sense strand
cauaguaucuucaccagaa

SEQ ID NO: 606635 - RNA, 19 nt, Homo sapiens
  misc_RNA (1)...(19): siRNA sense strand
gacagaggaucaauauauu

SEQ ID NO: 606636 - RNA, 19 nt, Homo sapiens
  misc_RNA (1)...(19): siRNA sense strand
gagaauugguuguuauguu

SEQ ID NO: 606637 - RNA, 19 nt, Homo sapiens
  misc_RNA (1)...(19): siRNA sense strand
gggaacugcuccagaagua

SEQ ID NO: 606638 - RNA, 19 nt, Homo sapiens
  misc_RNA (1)...(19): siRNA sense strand
uaacagagcauuagacaug

SEQ ID NO: 606639 - RNA, 19 nt, Homo sapiens
  misc_RNA (1)...(19): siRNA sense strand
gaagagacaguuacaguga

SEQ ID NO: 606640 - RNA, 19 nt, Homo sapiens
  misc_RNA (1)...(19): siRNA sense strand
ccagguacauuaaagauga

SEQ ID NO: 606641 - RNA, 19 nt, Homo sapiens
  misc_RNA (1)...(19): siRNA sense strand
ccaugaagauucugauaaa

SEQ ID NO: 606642 - RNA, 19 nt, Homo sapiens
  misc_RNA (1)...(19): siRNA sense strand
gaagacugaugaugaugaa

SEQ ID NO: 606643 - RNA, 19 nt, Homo sapiens
  misc_RNA (1)...(19): siRNA sense strand
uaacuucucucucagaugu

SEQ ID NO: 606644 - RNA, 19 nt, Homo sapiens
  misc_RNA (1)...(19): siRNA sense strand
gaaguuaucagaagagaga

SEQ ID NO: 606645 - RNA, 19 nt, Homo sapiens
  misc_RNA (1)...(19): siRNA sense strand
gaagaugacauuuaugaug

SEQ ID NO: 606646 - RNA, 19 nt, Homo sapiens
  misc_RNA (1)...(19): siRNA sense strand
ggaaguagaacuccucauu

SEQ ID NO: 606647 - RNA, 19 nt, Homo sapiens
  misc_RNA (1)...(19): siRNA sense strand
gaacugaccugugauacca

SEQ ID NO: 606648 - RNA, 19 nt, Homo sapiens
  misc_RNA (1)...(19): siRNA sense strand
uagcuacccucaaagauaa

SEQ ID NO: 606649 - RNA, 19 nt, Homo sapiens
  misc_RNA (1)...(19): siRNA sense strand
aaagaugaaugggaaguua

SEQ ID NO: 606650 - RNA, 19 nt, Homo sapiens
  misc_RNA (1)...(19): siRNA sense strand
gcaagacagugcuauagau

SEQ ID NO: 606651 - RNA, 19 nt, Homo sapiens
  misc_RNA (1)...(19): siRNA sense strand
ccaaagccacuguuaauuu

SEQ ID NO: 606652 - RNA, 19 nt, Homo sapiens
  misc_RNA (1)...(19): siRNA sense strand
caaccaagaugcccaagau

SEQ ID NO: 606653 - RNA, 19 nt, Homo sapiens
  misc_RNA (1)...(19): siRNA sense strand
cuaaggagcuggagaaucu

SEQ ID NO: 606654 - RNA, 19 nt, Homo sapiens
  misc_RNA (1)...(19): siRNA sense strand
cuaguucgauggauaagua

SEQ ID NO: 606655 - RNA, 19 nt, Homo sapiens
  misc_RNA (1)...(19): siRNA sense strand
cagcaaacauaucaaauuc

SEQ ID NO: 606656 - RNA, 19 nt, Homo sapiens
  misc_RNA (1)...(19): siRNA sense strand
caucaaagauacacaagau

SEQ ID NO: 606657 - RNA, 19 nt, Homo sapiens
  misc_RNA (1)...(19): siRNA sense strand
gaucauuccuuucugacaa

SEQ ID NO: 606658 - RNA, 19 nt, Homo sapiens
  misc_RNA (1)...(19): siRNA sense strand
ggaaguauagccuuggaua

SEQ ID NO: 606659 - RNA, 19 nt, Homo sapiens
  misc_RNA (1)...(19): siRNA sense strand
uaagagaaauugcccuaga

SEQ ID NO: 606660 - RNA, 19 nt, Homo sapiens
  misc_RNA (1)...(19): siRNA sense strand
uggacgaguucuagaauua

SEQ ID NO: 606661 - RNA, 19 nt, Homo sapiens
  misc_RNA (1)...(19): siRNA sense strand
gaaaacaacucaggucaaa

SEQ ID NO: 606662 - RNA, 19 nt, Homo sapiens
  misc_RNA (1)...(19): siRNA sense strand
gugaauacauccaacaaga

SEQ ID NO: 606663 - RNA, 19 nt, Homo sapiens
  misc_RNA (1)...(19): siRNA sense strand
uaacaaagggcuuaguaaa

SEQ ID NO: 606664 - RNA, 19 nt, Homo sapiens
  misc_RNA (1)...(19): siRNA sense strand
caaugacccuugaagauau

SEQ ID NO: 606665 - RNA, 19 nt, Homo sapiens
  misc_RNA (1)...(19): siRNA sense strand
gaaagaagaguucguuuac

SEQ ID NO: 606666 - RNA, 19 nt, Homo sapiens
  misc_RNA (1)...(19): siRNA sense strand
gagaagaagucacaaacag

SEQ ID NO: 606667 - RNA, 19 nt, Homo sapiens
  misc_RNA (1)...(19): siRNA sense strand
ggaaagaagaaccaaagaa

SEQ ID NO: 606668 - RNA, 19 nt, Homo sapiens
  misc_RNA (1)...(19): siRNA sense strand
gaagaguucguuuacauug

SEQ ID NO: 606669 - RNA, 19 nt, Homo sapiens
  misc_RNA (1)...(19): siRNA sense strand
ccaggucaaugguuucuuu

SEQ ID NO: 606670 - RNA, 19 nt, Homo sapiens
  misc_RNA (1)...(19): siRNA sense strand
cgagaucgauugcgaggaa

SEQ ID NO: 606671 - RNA, 19 nt, Homo sapiens
  misc_RNA (1)...(19): siRNA sense strand
auacacgggugccaacuua

SEQ ID NO: 606672 - RNA, 19 nt, Homo sapiens
  misc_RNA (1)...(19): siRNA sense strand
aaagaggucugcuguuuca

SEQ ID NO: 606673 - RNA, 19 nt, Homo sapiens
  misc_RNA (1)...(19): siRNA sense strand
gaacuccucauuacccuaa

SEQ ID NO: 606674 - RNA, 19 nt, Homo sapiens
  misc_RNA (1)...(19): siRNA sense strand
gaagauaccauuuguacca

SEQ ID NO: 606675 - RNA, 19 nt, Homo sapiens
  misc_RNA (1)...(19): siRNA sense strand
ucaagaagauaccauuugu

SEQ ID NO: 606676 - RNA, 19 nt, Homo sapiens
  misc_RNA (1)...(19): siRNA sense strand
gaacugcuccagaaguauu

SEQ ID NO: 606677 - RNA, 19 nt, Homo sapiens
  misc_RNA (1)...(19): siRNA sense strand
caaagaagaguuacccaaa

SEQ ID NO: 606678 - RNA, 19 nt, Homo sapiens
  misc_RNA (1)...(19): siRNA sense strand
acaaagggcuuaguaaauc

SEQ ID NO: 606679 - RNA, 19 nt, Homo sapiens
  misc_RNA (1)...(19): siRNA sense strand
gacugaugaugaugaaaua

SEQ ID NO: 606680 - RNA, 19 nt, Homo sapiens
  misc_RNA (1)...(19): siRNA sense strand
caaaggcaaucagagaauu

SEQ ID NO: 606681 - RNA, 19 nt, Homo sapiens
  misc_RNA (1)...(19): siRNA sense strand
guggaaacacugagaaaua

SEQ ID NO: 606682 - RNA, 19 nt, Homo sapiens
  misc_RNA (1)...(19): siRNA sense strand
caaaggugaucgcguccua

SEQ ID NO: 606683 - RNA, 19 nt, Homo sapiens
  misc_RNA (1)...(19): siRNA sense strand
gauaacagcuuggggauaa

SEQ ID NO: 606684 - RNA, 19 nt, Homo sapiens
  misc_RNA (1)...(19): siRNA sense strand
aagaagaguuacccaaauu

SEQ ID NO: 606685 - RNA, 19 nt, Homo sapiens
  misc_RNA (1)...(19): siRNA sense strand
cgaaggaaaguaaacauaa

SEQ ID NO: 606686 - RNA, 19 nt, Homo sapiens
  misc_RNA (1)...(19): siRNA sense strand
gaaacagccaugacucaaa

SEQ ID NO: 606687 - RNA, 19 nt, Homo sapiens
  misc_RNA (1)...(19): siRNA sense strand
gaucagcuuuccuguaaca

SEQ ID NO: 606688 - RNA, 19 nt, Homo sapiens
  misc_RNA (1)...(19): siRNA sense strand
gaguggagaagaugacuua

SEQ ID NO: 606689 - RNA, 19 nt, Homo sapiens
  misc_RNA (1)...(19): siRNA sense strand
gcacaaguacuuccaaaca

SEQ ID NO: 606690 - RNA, 19 nt, Homo sapiens
  misc_RNA (1)...(19): siRNA sense strand
gacaaucuccaacaucuaa

SEQ ID NO: 606691 - RNA, 19 nt, Homo sapiens
  misc_RNA (1)...(19): siRNA sense strand
gaaucuuccucuucaguga

SEQ ID NO: 606692 - RNA, 19 nt, Homo sapiens
  misc_RNA (1)...(19): siRNA sense strand
cauggugugucuuacuuua

SEQ ID NO: 606693 - RNA, 19 nt, Homo sapiens
  misc_RNA (1)...(19): siRNA sense strand
ugaugagacuuccuuauug

SEQ ID NO: 606694 - RNA, 19 nt, Homo sapiens
  misc_RNA (1)...(19): siRNA sense strand
caggagagacugccacaua

SEQ ID NO: 606695 - RNA, 19 nt, Homo sapiens
  misc_RNA (1)...(19): siRNA sense strand
agacagaggaucaauauau

SEQ ID NO: 606696 - RNA, 19 nt, Homo sapiens
  misc_RNA (1)...(19): siRNA sense strand
aaagaagacugaugaugau

SEQ ID NO: 606697 - RNA, 19 nt, Homo sapiens
  misc_RNA (1)...(19): siRNA sense strand
ggaaguuaacagagcauua

SEQ ID NO: 606698 - RNA, 19 nt, Homo sapiens
  misc_RNA (1)...(19): siRNA sense strand
gaaaggaugcacugugaug

SEQ ID NO: 606699 - RNA, 19 nt, Homo sapiens
  misc_RNA (1)...(19): siRNA sense strand
gauaaccgaaggaaaguaa

SEQ ID NO: 606700 - RNA, 19 nt, Homo sapiens
  misc_RNA (1)...(19): siRNA sense strand
gcaagauacucagauggaa

SEQ ID NO: 606701 - RNA, 19 nt, Homo sapiens
  misc_RNA (1)...(19): siRNA sense strand
gacuggaacugaccuguga

SEQ ID NO: 606702 - RNA, 19 nt, Homo sapiens
  misc_RNA (1)...(19): siRNA sense strand
aaacaacaauggucagcaa

SEQ ID NO: 606703 - RNA, 19 nt, Homo sapiens
  misc_RNA (1)...(19): siRNA sense strand
gaagucauaucugcucuca

SEQ ID NO: 606704 - RNA, 19 nt, Homo sapiens
  misc_RNA (1)...(19): siRNA sense strand
caauggaguuagucuagaa

SEQ ID NO: 606705 - RNA, 19 nt, Homo sapiens
  misc_RNA (1)...(19): siRNA sense strand
ggagaaacuugauuuaucc

SEQ ID NO: 606706 - RNA, 19 nt, Homo sapiens
  misc_RNA (1)...(19): siRNA sense strand
gaaagucuccaagaauuau

SEQ ID NO: 606707 - RNA, 19 nt, Homo sapiens
  misc_RNA (1)...(19): siRNA sense strand
gauguuaucuugaaaguga

SEQ ID NO: 606708 - RNA, 19 nt, Homo sapiens
  misc_RNA (1)...(19): siRNA sense strand
gaaggcaacuuaauuaauc

SEQ ID NO: 606709 - RNA, 19 nt, Homo sapiens
  misc_RNA (1)...(19): siRNA sense strand
gaaagaagaaccaaagaaa

SEQ ID NO: 606710 - RNA, 19 nt, Homo sapiens
  misc_RNA (1)...(19): siRNA sense strand
gaacaaaccaugaagauuc

SEQ ID NO: 606711 - RNA, 19 nt, Homo sapiens
  misc_RNA (1)...(19): siRNA sense strand
gaagaaauaugggcuguau

SEQ ID NO: 606712 - RNA, 19 nt, Homo sapiens
  misc_RNA (1)...(19): siRNA sense strand
ggaaagaagaguucguuua

SEQ ID NO: 606713 - RNA, 19 nt, Homo sapiens
  misc_RNA (1)...(19): siRNA sense strand
gaagguggcuauaucaaug

SEQ ID NO: 606714 - RNA, 19 nt, Homo sapiens
  misc_RNA (1)...(19): siRNA sense strand
cagaucagcuuuccuguaa

SEQ ID NO: 606715 - RNA, 19 nt, Homo sapiens
  misc_RNA (1)...(19): siRNA sense strand
gcauugaugugcuuucuaa

SEQ ID NO: 606716 - RNA, 19 nt, Homo sapiens
  misc_RNA (1)...(19): siRNA sense strand
gccaaagacugacagaaua

SEQ ID NO: 606717 - RNA, 19 nt, Homo sapiens
  misc_RNA (1)...(19): siRNA sense strand
gaaguagaacuccucauua

SEQ ID NO: 606718 - RNA, 19 nt, Homo sapiens
  misc_RNA (1)...(19): siRNA sense strand
gaauggagccucuuugaaa

SEQ ID NO: 606719 - RNA, 19 nt, Homo sapiens
  misc_RNA (1)...(19): siRNA sense strand
gaagaugugacacuuguua

SEQ ID NO: 606720 - RNA, 19 nt, Homo sapiens
  misc_RNA (1)...(19): siRNA sense strand
ccaagaagcugaaguuauc

SEQ ID NO: 606721 - RNA, 19 nt, Homo sapiens
  misc_RNA (1)...(19): siRNA sense strand
caacucaggucaaagacua

SEQ ID NO: 606722 - RNA, 19 nt, Homo sapiens
  misc_RNA (1)...(19): siRNA sense strand
caugaugacucaagaagua

SEQ ID NO: 606723 - RNA, 19 nt, Homo sapiens
  misc_RNA (1)...(19): siRNA sense strand
caucagaccuuucuuaaca

SEQ ID NO: 606724 - RNA, 19 nt, Homo sapiens
  misc_RNA (1)...(19): siRNA sense strand
gcaaugacccuugaagaua

SEQ ID NO: 606725 - RNA, 19 nt, Homo sapiens
  misc_RNA (1)...(19): siRNA sense strand
gaagagagaacagaagaua

SEQ ID NO: 606726 - RNA, 19 nt, Homo sapiens
  misc_RNA (1)...(19): siRNA sense strand
gaugaaaccuuaagucaag

SEQ ID NO: 606727 - RNA, 19 nt, Homo sapiens
  misc_RNA (1)...(19): siRNA sense strand
ucaaagaggucugcuguuu

SEQ ID NO: 606728 - RNA, 19 nt, Homo sapiens
  misc_RNA (1)...(19): siRNA sense strand
ccucagagccaaccuauua

SEQ ID NO: 606729 - RNA, 19 nt, Homo sapiens
  misc_RNA (1)...(19): siRNA sense strand
gaaggaagaacagauauaa

SEQ ID NO: 606730 - RNA, 19 nt, Homo sapiens
  misc_RNA (1)...(19): siRNA sense strand
gcccuuggcuucaucauuu

SEQ ID NO: 606731 - RNA, 19 nt, Homo sapiens
  misc_RNA (1)...(19): siRNA sense strand
gcuaucaagucauccuuua

SEQ ID NO: 606732 - RNA, 19 nt, Homo sapiens
  misc_RNA (1)...(19): siRNA sense strand
gaauggcugugaagaauau

SEQ ID NO: 606733 - RNA, 19 nt, Homo sapiens
  misc_RNA (1)...(19): siRNA sense strand
gcaaacauaucaaauucga

SEQ ID NO: 606734 - RNA, 19 nt, Homo sapiens
  misc_RNA (1)...(19): siRNA sense strand
cauaguaucuucaccagaa

SEQ ID NO: 606735 - RNA, 19 nt, Homo sapiens
  misc_RNA (1)...(19): siRNA sense strand
gacagaggaucaauauauu

SEQ ID NO: 606736 - RNA, 19 nt, Homo sapiens
  misc_RNA (1)...(19): siRNA sense strand
gagaauugguuguuauguu

SEQ ID NO: 606737 - RNA, 19 nt, Homo sapiens
  misc_RNA (1)...(19): siRNA sense strand
gggaacugcuccagaagua

SEQ ID NO: 606738 - RNA, 19 nt, Homo sapiens
  misc_RNA (1)...(19): siRNA sense strand
uaacagagcauuagacaug

SEQ ID NO: 606739 - RNA, 19 nt, Homo sapiens
  misc_RNA (1)...(19): siRNA sense strand
gaagagacaguuacaguga

SEQ ID NO: 606740 - RNA, 19 nt, Homo sapiens
  misc_RNA (1)...(19): siRNA sense strand
ccagguacauuaaagauga

SEQ ID NO: 606741 - RNA, 19 nt, Homo sapiens
  misc_RNA (1)...(19): siRNA sense strand
ccaugaagauucugauaaa

SEQ ID NO: 606742 - RNA, 19 nt, Homo sapiens
  misc_RNA (1)...(19): siRNA sense strand
gaagacugaugaugaugaa

SEQ ID NO: 606743 - RNA, 19 nt, Homo sapiens
  misc_RNA (1)...(19): siRNA sense strand
uaacuucucucucagaugu

SEQ ID NO: 606744 - RNA, 19 nt, Homo sapiens
  misc_RNA (1)...(19): siRNA sense strand
gaaguuaucagaagagaga

SEQ ID NO: 606745 - RNA, 19 nt, Homo sapiens
  misc_RNA (1)...(19): siRNA sense strand
gaagaugacauuuaugaug

SEQ ID NO: 606746 - RNA, 19 nt, Homo sapiens
  misc_RNA (1)...(19): siRNA sense strand
ggaaguagaacuccucauu

SEQ ID NO: 606747 - RNA, 19 nt, Homo sapiens
  misc_RNA (1)...(19): siRNA sense strand
gaacugaccugugauacca

SEQ ID NO: 606748 - RNA, 19 nt, Homo sapiens
  misc_RNA (1)...(19): siRNA sense strand
uagcuacccucaaagauaa

SEQ ID NO: 606749 - RNA, 19 nt, Homo sapiens
  misc_RNA (1)...(19): siRNA sense strand
aaagaugaaugggaaguua

SEQ ID NO: 606750 - RNA, 19 nt, Homo sapiens
  misc_RNA (1)...(19): siRNA sense strand
gcaagacagugcuauagau

SEQ ID NO: 606751 - RNA, 19 nt, Homo sapiens
  misc_RNA (1)...(19): siRNA sense strand
ccaaagccacuguuaauuu

SEQ ID NO: 606752 - RNA, 19 nt, Homo sapiens
  misc_RNA (1)...(19): siRNA sense strand
caaccaagaugcccaagau

SEQ ID NO: 606753 - RNA, 19 nt, Homo sapiens
  misc_RNA (1)...(19): siRNA sense strand
cuaaggagcuggagaaucu

SEQ ID NO: 606754 - RNA, 19 nt, Homo sapiens
  misc_RNA (1)...(19): siRNA sense strand
cuaguucgauggauaagua

SEQ ID NO: 606755 - RNA, 19 nt, Homo sapiens
  misc_RNA (1)...(19): siRNA sense strand
cagcaaacauaucaaauuc

SEQ ID NO: 606756 - RNA, 19 nt, Homo sapiens
  misc_RNA (1)...(19): siRNA sense strand
caucaaagauacacaagau

SEQ ID NO: 606757 - RNA, 19 nt, Homo sapiens
  misc_RNA (1)...(19): siRNA sense strand
gaucauuccuuucugacaa

SEQ ID NO: 606758 - RNA, 19 nt, Homo sapiens
  misc_RNA (1)...(19): siRNA sense strand
ggaaguauagccuuggaua

SEQ ID NO: 606759 - RNA, 19 nt, Homo sapiens
  misc_RNA (1)...(19): siRNA sense strand
uaagagaaauugcccuaga

SEQ ID NO: 606760 - RNA, 19 nt, Homo sapiens
  misc_RNA (1)...(19): siRNA sense strand
uggacgaguucuagaauua

SEQ ID NO: 606761 - RNA, 19 nt, Homo sapiens
  misc_RNA (1)...(19): siRNA sense strand
gaaaacaacucaggucaaa

SEQ ID NO: 606762 - RNA, 19 nt, Homo sapiens
  misc_RNA (1)...(19): siRNA sense strand
gugaauacauccaacaaga

SEQ ID NO: 606763 - RNA, 19 nt, Homo sapiens
  misc_RNA (1)...(19): siRNA sense strand
uaacaaagggcuuaguaaa

SEQ ID NO: 606764 - RNA, 19 nt, Homo sapiens
  misc_RNA (1)...(19): siRNA sense strand
caaugacccuugaagauau

SEQ ID NO: 606765 - RNA, 19 nt, Homo sapiens
  misc_RNA (1)...(19): siRNA sense strand
gaaagaagaguucguuuac

SEQ ID NO: 606766 - RNA, 19 nt, Homo sapiens
  misc_RNA (1)...(19): siRNA sense strand
gagaagaagucacaaacag

SEQ ID NO: 606767 - RNA, 19 nt, Homo sapiens
  misc_RNA (1)...(19): siRNA sense strand
ggaaagaagaaccaaagaa

SEQ ID NO: 606768 - RNA, 19 nt, Homo sapiens
  misc_RNA (1)...(19): siRNA sense strand
gaagaguucguuuacauug

SEQ ID NO: 606769 - RNA, 19 nt, Homo sapiens
  misc_RNA (1)...(19): siRNA sense strand
ccaggucaaugguuucuuu

SEQ ID NO: 606770 - RNA, 19 nt, Homo sapiens
  misc_RNA (1)...(19): siRNA sense strand
cgagaucgauugcgaggaa

SEQ ID NO: 606771 - RNA, 19 nt, Homo sapiens
  misc_RNA (1)...(19): siRNA sense strand
auacacgggugccaacuua

SEQ ID NO: 606772 - RNA, 19 nt, Homo sapiens
  misc_RNA (1)...(19): siRNA sense strand
aaagaggucugcuguuuca

SEQ ID NO: 606773 - RNA, 19 nt, Homo sapiens
  misc_RNA (1)...(19): siRNA sense strand
gaacuccucauuacccuaa

SEQ ID NO: 606774 - RNA, 19 nt, Homo sapiens
  misc_RNA (1)...(19): siRNA sense strand
gaagauaccauuuguacca

SEQ ID NO: 606775 - RNA, 19 nt, Homo sapiens
  misc_RNA (1)...(19): siRNA sense strand
ucaagaagauaccauuugu

SEQ ID NO: 606776 - RNA, 19 nt, Homo sapiens
  misc_RNA (1)...(19): siRNA sense strand
gaacugcuccagaaguauu

SEQ ID NO: 606777 - RNA, 19 nt, Homo sapiens
  misc_RNA (1)...(19): siRNA sense strand
caaagaagaguuacccaaa

SEQ ID NO: 606778 - RNA, 19 nt, Homo sapiens
  misc_RNA (1)...(19): siRNA sense strand
acaaagggcuuaguaaauc

SEQ ID NO: 606779 - RNA, 19 nt, Homo sapiens
  misc_RNA (1)...(19): siRNA sense strand
gacugaugaugaugaaaua

SEQ ID NO: 606780 - RNA, 19 nt, Homo sapiens
  misc_RNA (1)...(19): siRNA sense strand
caaaggcaaucagagaauu

SEQ ID NO: 606781 - RNA, 19 nt, Homo sapiens
  misc_RNA (1)...(19): siRNA sense strand
guggaaacacugagaaaua

SEQ ID NO: 606782 - RNA, 19 nt, Homo sapiens
  misc_RNA (1)...(19): siRNA sense strand
caaaggugaucgcguccua

SEQ ID NO: 606783 - RNA, 19 nt, Homo sapiens
  misc_RNA (1)...(19): siRNA sense strand
gauaacagcuuggggauaa

SEQ ID NO: 606784 - RNA, 19 nt, Homo sapiens
  misc_RNA (1)...(19): siRNA sense strand
aagaagaguuacccaaauu

SEQ ID NO: 606785 - RNA, 19 nt, Homo sapiens
  misc_RNA (1)...(19): siRNA sense strand
cgaaggaaaguaaacauaa

SEQ ID NO: 606786 - RNA, 19 nt, Homo sapiens
  misc_RNA (1)...(19): siRNA sense strand
gaaacagccaugacucaaa

SEQ ID NO: 606787 - RNA, 19 nt, Homo sapiens
  misc_RNA (1)...(19): siRNA sense strand
gaucagcuuuccuguaaca

SEQ ID NO: 606788 - RNA, 19 nt, Homo sapiens
  misc_RNA (1)...(19): siRNA sense strand
gaguggagaagaugacuua

SEQ ID NO: 606789 - RNA, 19 nt, Homo sapiens
  misc_RNA (1)...(19): siRNA sense strand
gcacaaguacuuccaaaca

SEQ ID NO: 606790 - RNA, 19 nt, Homo sapiens
  misc_RNA (1)...(19): siRNA sense strand
gacaaucuccaacaucuaa

SEQ ID NO: 606791 - RNA, 19 nt, Homo sapiens
  misc_RNA (1)...(19): siRNA sense strand
gaaucuuccucuucaguga

SEQ ID NO: 606792 - RNA, 19 nt, Homo sapiens
  misc_RNA (1)...(19): siRNA sense strand
cauggugugucuuacuuua

SEQ ID NO: 606793 - RNA, 19 nt, Homo sapiens
  misc_RNA (1)...(19): siRNA sense strand
ugaugagacuuccuuauug

SEQ ID NO: 606794 - RNA, 19 nt, Homo sapiens
  misc_RNA (1)...(19): siRNA sense strand
caggagagacugccacaua

SEQ ID NO: 606795 - RNA, 19 nt, Homo sapiens
  misc_RNA (1)...(19): siRNA sense strand
agacagaggaucaauauau

SEQ ID NO: 606796 - RNA, 19 nt, Homo sapiens
  misc_RNA (1)...(19): siRNA sense strand
aaagaagacugaugaugau

SEQ ID NO: 606797 - RNA, 19 nt, Homo sapiens
  misc_RNA (1)...(19): siRNA sense strand
ggaaguuaacagagcauua

SEQ ID NO: 606798 - RNA, 19 nt, Homo sapiens
  misc_RNA (1)...(19): siRNA sense strand
gaaaggaugcacugugaug

SEQ ID NO: 606799 - RNA, 19 nt, Homo sapiens
  misc_RNA (1)...(19): siRNA sense strand
gauaaccgaaggaaaguaa

SEQ ID NO: 606800 - RNA, 19 nt, Homo sapiens
  misc_RNA (1)...(19): siRNA sense strand
gcaagauacucagauggaa

SEQ ID NO: 606801 - RNA, 19 nt, Homo sapiens
  misc_RNA (1)...(19): siRNA sense strand
gacuggaacugaccuguga

SEQ ID NO: 606802 - RNA, 19 nt, Homo sapiens
  misc_RNA (1)...(19): siRNA sense strand
aaacaacaauggucagcaa

SEQ ID NO: 606803 - RNA, 19 nt, Homo sapiens
  misc_RNA (1)...(19): siRNA sense strand
gaagucauaucugcucuca

SEQ ID NO: 606804 - RNA, 19 nt, Homo sapiens
  misc_RNA (1)...(19): siRNA sense strand
caauggaguuagucuagaa

SEQ ID NO: 606805 - RNA, 19 nt, Homo sapiens
  misc_RNA (1)...(19): siRNA sense strand
ggagaaacuugauuuaucc

SEQ ID NO: 606806 - RNA, 19 nt, Homo sapiens
  misc_RNA (1)...(19): siRNA sense strand
gaaagucuccaagaauuau

SEQ ID NO: 606807 - RNA, 19 nt, Homo sapiens
  misc_RNA (1)...(19): siRNA sense strand
gcauuuggcuuugccuuuc

SEQ ID NO: 606808 - RNA, 19 nt, Homo sapiens
  misc_RNA (1)...(19): siRNA sense strand
ggcuuaaacucuuggcauu

SEQ ID NO: 606809 - RNA, 19 nt, Homo sapiens
  misc_RNA (1)...(19): siRNA sense strand
cuuaaacucuuggcauuug

SEQ ID NO: 606810 - RNA, 19 nt, Homo sapiens
  misc_RNA (1)...(19): siRNA sense strand
gcuuaaacucuuggcauuu

SEQ ID NO: 606811 - RNA, 19 nt, Homo sapiens
  misc_RNA (1)...(19): siRNA sense strand
acucuuggcauuuggcuuu

SEQ ID NO: 606812 - RNA, 19 nt, Homo sapiens
  misc_RNA (1)...(19): siRNA sense strand
gcauuuggcuuugccuuuc

SEQ ID NO: 606813 - RNA, 19 nt, Homo sapiens
  misc_RNA (1)...(19): siRNA sense strand
ggcuuaaacucuuggcauu

SEQ ID NO: 606814 - RNA, 19 nt, Homo sapiens
  misc_RNA (1)...(19): siRNA sense strand
cuuaaacucuuggcauuug

SEQ ID NO: 606815 - RNA, 19 nt, Homo sapiens
  misc_RNA (1)...(19): siRNA sense strand
gcuuaaacucuuggcauuu

SEQ ID NO: 606816 - RNA, 19 nt, Homo sapiens
  misc_RNA (1)...(19): siRNA sense strand
acucuuggcauuuggcuuu

SEQ ID NO: 606817 - RNA, 19 nt, Homo sapiens
  misc_RNA (1)...(19): siRNA sense strand
gcauuuggcuuugccuuuc

SEQ ID NO: 606818 - RNA, 19 nt, Homo sapiens
  misc_RNA (1)...(19): siRNA sense strand
ggcuuaaacucuuggcauu

SEQ ID NO: 606819 - RNA, 19 nt, Homo sapiens
  misc_RNA (1)...(19): siRNA sense strand
cuuaaacucuuggcauuug

SEQ ID NO: 606820 - RNA, 19 nt, Homo sapiens
  misc_RNA (1)...(19): siRNA sense strand
gcuuaaacucuuggcauuu

SEQ ID NO: 606821 - RNA, 19 nt, Homo sapiens
  misc_RNA (1)...(19): siRNA sense strand
acucuuggcauuuggcuuu

SEQ ID NO: 606822 - RNA, 19 nt, Homo sapiens
  misc_RNA (1)...(19): siRNA sense strand
gcauuuggcuuugccuuuc

SEQ ID NO: 606823 - RNA, 19 nt, Homo sapiens
  misc_RNA (1)...(19): siRNA sense strand
ggcuuaaacucuuggcauu

SEQ ID NO: 606824 - RNA, 19 nt, Homo sapiens
  misc_RNA (1)...(19): siRNA sense strand
cuuaaacucuuggcauuug

SEQ ID NO: 606825 - RNA, 19 nt, Homo sapiens
  misc_RNA (1)...(19): siRNA sense strand
gcuuaaacucuuggcauuu

SEQ ID NO: 606826 - RNA, 19 nt, Homo sapiens
  misc_RNA (1)...(19): siRNA sense strand
acucuuggcauuuggcuuu

SEQ ID NO: 606827 - RNA, 19 nt, Homo sapiens
  misc_RNA (1)...(19): siRNA sense strand
gcauuuggcuuugccuuuc

SEQ ID NO: 606828 - RNA, 19 nt, Homo sapiens
  misc_RNA (1)...(19): siRNA sense strand
ggcuuaaacucuuggcauu

SEQ ID NO: 606829 - RNA, 19 nt, Homo sapiens
  misc_RNA (1)...(19): siRNA sense strand
cuuaaacucuuggcauuug

SEQ ID NO: 606830 - RNA, 19 nt, Homo sapiens
  misc_RNA (1)...(19): siRNA sense strand
gcuuaaacucuuggcauuu

SEQ ID NO: 606831 - RNA, 19 nt, Homo sapiens
  misc_RNA (1)...(19): siRNA sense strand
acucuuggcauuuggcuuu

SEQ ID NO: 606832 - RNA, 19 nt, Homo sapiens
  misc_RNA (1)...(19): siRNA sense strand
gcauuuggcuuugccuuuc

SEQ ID NO: 606833 - RNA, 19 nt, Homo sapiens
  misc_RNA (1)...(19): siRNA sense strand
ggcuuaaacucuuggcauu

SEQ ID NO: 606834 - RNA, 19 nt, Homo sapiens
  misc_RNA (1)...(19): siRNA sense strand
cuuaaacucuuggcauuug

SEQ ID NO: 606835 - RNA, 19 nt, Homo sapiens
  misc_RNA (1)...(19): siRNA sense strand
gcuuaaacucuuggcauuu

SEQ ID NO: 606836 - RNA, 19 nt, Homo sapiens
  misc_RNA (1)...(19): siRNA sense strand
acucuuggcauuuggcuuu

SEQ ID NO: 606837 - RNA, 19 nt, Homo sapiens
  misc_RNA (1)...(19): siRNA sense strand
gcauuuggcuuugccuuuc

SEQ ID NO: 606838 - RNA, 19 nt, Homo sapiens
  misc_RNA (1)...(19): siRNA sense strand
ggcuuaaacucuuggcauu

SEQ ID NO: 606839 - RNA, 19 nt, Homo sapiens
  misc_RNA (1)...(19): siRNA sense strand
cuuaaacucuuggcauuug

SEQ ID NO: 606840 - RNA, 19 nt, Homo sapiens
  misc_RNA (1)...(19): siRNA sense strand
gcuuaaacucuuggcauuu

SEQ ID NO: 606841 - RNA, 19 nt, Homo sapiens
  misc_RNA (1)...(19): siRNA sense strand
acucuuggcauuuggcuuu

SEQ ID NO: 606842 - RNA, 19 nt, Homo sapiens
  misc_RNA (1)...(19): siRNA sense strand
gcauuuggcuuugccuuuc

SEQ ID NO: 606843 - RNA, 19 nt, Homo sapiens
  misc_RNA (1)...(19): siRNA sense strand
ggcuuaaacucuuggcauu

SEQ ID NO: 606844 - RNA, 19 nt, Homo sapiens
  misc_RNA (1)...(19): siRNA sense strand
cuuaaacucuuggcauuug

SEQ ID NO: 606845 - RNA, 19 nt, Homo sapiens
  misc_RNA (1)...(19): siRNA sense strand
gcuuaaacucuuggcauuu

SEQ ID NO: 606846 - RNA, 19 nt, Homo sapiens
  misc_RNA (1)...(19): siRNA sense strand
acucuuggcauuuggcuuu

SEQ ID NO: 606847 - RNA, 19 nt, Homo sapiens
  misc_RNA (1)...(19): siRNA sense strand
gaaccucuaugccgacauc

SEQ ID NO: 606848 - RNA, 19 nt, Homo sapiens
  misc_RNA (1)...(19): siRNA sense strand
gaugagcagcuucuacauu

SEQ ID NO: 606849 - RNA, 19 nt, Homo sapiens
  misc_RNA (1)...(19): siRNA sense strand
gcaacaucuucuacgacua

SEQ ID NO: 606850 - RNA, 19 nt, Homo sapiens
  misc_RNA (1)...(19): siRNA sense strand
augagcagcuucuacauug

SEQ ID NO: 606851 - RNA, 19 nt, Homo sapiens
  misc_RNA (1)...(19): siRNA sense strand
agugagcucugcugccuuu

SEQ ID NO: 606852 - RNA, 19 nt, Homo sapiens
  misc_RNA (1)...(19): siRNA sense strand
caacaucuucuacgacuac

SEQ ID NO: 606853 - RNA, 19 nt, Homo sapiens
  misc_RNA (1)...(19): siRNA sense strand
cagaugagcagcuucuaca

SEQ ID NO: 606854 - RNA, 19 nt, Homo sapiens
  misc_RNA (1)...(19): siRNA sense strand
gcucccgccuccauugcaa

SEQ ID NO: 606855 - RNA, 19 nt, Homo sapiens
  misc_RNA (1)...(19): siRNA sense strand
ccagguacacggucuucuu

SEQ ID NO: 606856 - RNA, 19 nt, Homo sapiens
  misc_RNA (1)...(19): siRNA sense strand
gguacacggucuucuucuc

SEQ ID NO: 606857 - RNA, 19 nt, Homo sapiens
  misc_RNA (1)...(19): siRNA sense strand
ccgcgucuccugcauguau

SEQ ID NO: 606858 - RNA, 19 nt, Homo sapiens
  misc_RNA (1)...(19): siRNA sense strand
gagcucugcugccuuugcu

SEQ ID NO: 606859 - RNA, 19 nt, Homo sapiens
  misc_RNA (1)...(19): siRNA sense strand
gcaaccgcgucuccugcau

SEQ ID NO: 606860 - RNA, 19 nt, Homo sapiens
  misc_RNA (1)...(19): siRNA sense strand
ggacaccaucgaggucuuc

SEQ ID NO: 606861 - RNA, 19 nt, Homo sapiens
  misc_RNA (1)...(19): siRNA sense strand
gacaaaggcuucuaaagua

SEQ ID NO: 606862 - RNA, 19 nt, Homo sapiens
  misc_RNA (1)...(19): siRNA sense strand
aaacaucgcugguauaaga

SEQ ID NO: 606863 - RNA, 19 nt, Homo sapiens
  misc_RNA (1)...(19): siRNA sense strand
gaagaaacaucgcugguau

SEQ ID NO: 606864 - RNA, 19 nt, Homo sapiens
  misc_RNA (1)...(19): siRNA sense strand
ucggauagcugccacauaa

SEQ ID NO: 606865 - RNA, 19 nt, Homo sapiens
  misc_RNA (1)...(19): siRNA sense strand
acagggaacugguuucuug

SEQ ID NO: 606866 - RNA, 19 nt, Homo sapiens
  misc_RNA (1)...(19): siRNA sense strand
gaacugguuucuuggcaau

SEQ ID NO: 606867 - RNA, 19 nt, Homo sapiens
  misc_RNA (1)...(19): siRNA sense strand
gucccgagauccaaucaua

SEQ ID NO: 606868 - RNA, 19 nt, Homo sapiens
  misc_RNA (1)...(19): siRNA sense strand
caaaggcuucuaaaguaua

SEQ ID NO: 606869 - RNA, 19 nt, Homo sapiens
  misc_RNA (1)...(19): siRNA sense strand
acaaaggcuucuaaaguau

SEQ ID NO: 606870 - RNA, 19 nt, Homo sapiens
  misc_RNA (1)...(19): siRNA sense strand
agacaaaggcuucuaaagu

SEQ ID NO: 606871 - RNA, 19 nt, Homo sapiens
  misc_RNA (1)...(19): siRNA sense strand
agaaacaucgcugguauaa

SEQ ID NO: 606872 - RNA, 19 nt, Homo sapiens
  misc_RNA (1)...(19): siRNA sense strand
ggaggagguuucagaccau

SEQ ID NO: 606873 - RNA, 19 nt, Homo sapiens
  misc_RNA (1)...(19): siRNA sense strand
ugaagaaacaucgcuggua

SEQ ID NO: 606874 - RNA, 19 nt, Homo sapiens
  misc_RNA (1)...(19): siRNA sense strand
uaucgaagaccacaaugga

SEQ ID NO: 606875 - RNA, 19 nt, Homo sapiens
  misc_RNA (1)...(19): siRNA sense strand
gaccacaauggaagacaaa

SEQ ID NO: 606876 - RNA, 19 nt, Homo sapiens
  misc_RNA (1)...(19): siRNA sense strand
ccaaucauauuuucuguag

SEQ ID NO: 606877 - RNA, 19 nt, Homo sapiens
  misc_RNA (1)...(19): siRNA sense strand
agaccacaauggaagacaa

SEQ ID NO: 606878 - RNA, 19 nt, Homo sapiens
  misc_RNA (1)...(19): siRNA sense strand
gagauccaaucauauuuuc

SEQ ID NO: 606879 - RNA, 19 nt, Homo sapiens
  misc_RNA (1)...(19): siRNA sense strand
aagaaacaucgcugguaua

SEQ ID NO: 606880 - RNA, 19 nt, Homo sapiens
  misc_RNA (1)...(19): siRNA sense strand
cccgagauccaaucauauu

SEQ ID NO: 606881 - RNA, 19 nt, Homo sapiens
  misc_RNA (1)...(19): siRNA sense strand
cgaagaccacaauggaaga

SEQ ID NO: 606882 - RNA, 19 nt, Homo sapiens
  misc_RNA (1)...(19): siRNA sense strand
aaaggcuucuaaaguauac

SEQ ID NO: 606883 - RNA, 19 nt, Homo sapiens
  misc_RNA (1)...(19): siRNA sense strand
ccgagauccaaucauauuu

SEQ ID NO: 606884 - RNA, 19 nt, Homo sapiens
  misc_RNA (1)...(19): siRNA sense strand
gcaucgcggagcagccuuu

SEQ ID NO: 606885 - RNA, 19 nt, Homo sapiens
  misc_RNA (1)...(19): siRNA sense strand
ggguggaggagguuucaga

SEQ ID NO: 606886 - RNA, 19 nt, Homo sapiens
  misc_RNA (1)...(19): siRNA sense strand
gucugucaguggcauaaug

SEQ ID NO: 606887 - RNA, 19 nt, Homo sapiens
  misc_RNA (1)...(19): siRNA sense strand
ggacaaagcgaaagaagaa

SEQ ID NO: 606888 - RNA, 19 nt, Homo sapiens
  misc_RNA (1)...(19): siRNA sense strand
agaaacagccuaccucaua

SEQ ID NO: 606889 - RNA, 19 nt, Homo sapiens
  misc_RNA (1)...(19): siRNA sense strand
gaaacauaauucacgugua

SEQ ID NO: 606890 - RNA, 19 nt, Homo sapiens
  misc_RNA (1)...(19): siRNA sense strand
ggagagagaccauuugaau

SEQ ID NO: 606891 - RNA, 19 nt, Homo sapiens
  misc_RNA (1)...(19): siRNA sense strand
acccagagcucacaccuua

SEQ ID NO: 606892 - RNA, 19 nt, Homo sapiens
  misc_RNA (1)...(19): siRNA sense strand
gaaacagccuaccucauag

SEQ ID NO: 606893 - RNA, 19 nt, Homo sapiens
  misc_RNA (1)...(19): siRNA sense strand
gggaggaccuucaaugauc

SEQ ID NO: 606894 - RNA, 19 nt, Homo sapiens
  misc_RNA (1)...(19): siRNA sense strand
gauggagucugcucaggaa

SEQ ID NO: 606895 - RNA, 19 nt, Homo sapiens
  misc_RNA (1)...(19): siRNA sense strand
ggagagaggcccuaugugu

SEQ ID NO: 606896 - RNA, 19 nt, Homo sapiens
  misc_RNA (1)...(19): siRNA sense strand
guacuaaacagauuacguu

SEQ ID NO: 606897 - RNA, 19 nt, Homo sapiens
  misc_RNA (1)...(19): siRNA sense strand
gggaaaggauuuguucaga

SEQ ID NO: 606898 - RNA, 19 nt, Homo sapiens
  misc_RNA (1)...(19): siRNA sense strand
agaguuagcuccaaauucu

SEQ ID NO: 606899 - RNA, 19 nt, Homo sapiens
  misc_RNA (1)...(19): siRNA sense strand
gcgcuaagcccuacaagug

SEQ ID NO: 606900 - RNA, 19 nt, Homo sapiens
  misc_RNA (1)...(19): siRNA sense strand
caaaauuccuccuagaaaa

SEQ ID NO: 606901 - RNA, 19 nt, Homo sapiens
  misc_RNA (1)...(19): siRNA sense strand
ggauguggcuguggacuuc

SEQ ID NO: 606902 - RNA, 19 nt, Homo sapiens
  misc_RNA (1)...(19): siRNA sense strand
agacuacacuggaaaauaa

SEQ ID NO: 606903 - RNA, 19 nt, Homo sapiens
  misc_RNA (1)...(19): siRNA sense strand
guggugcucuugacacaaa

SEQ ID NO: 606904 - RNA, 19 nt, Homo sapiens
  misc_RNA (1)...(19): siRNA sense strand
caccagagaacccacaaua

SEQ ID NO: 606905 - RNA, 19 nt, Homo sapiens
  misc_RNA (1)...(19): siRNA sense strand
cgacacagaggaccgagua

SEQ ID NO: 606906 - RNA, 19 nt, Homo sapiens
  misc_RNA (1)...(19): siRNA sense strand
gauugugccuuguccucua

SEQ ID NO: 606907 - RNA, 19 nt, Homo sapiens
  misc_RNA (1)...(19): siRNA sense strand
auaaagaguuagcuccaaa

SEQ ID NO: 606908 - RNA, 19 nt, Homo sapiens
  misc_RNA (1)...(19): siRNA sense strand
ucagagcucuucccucaca

SEQ ID NO: 606909 - RNA, 19 nt, Homo sapiens
  misc_RNA (1)...(19): siRNA sense strand
ccauaugcaugcaacaaau

SEQ ID NO: 606910 - RNA, 19 nt, Homo sapiens
  misc_RNA (1)...(19): siRNA sense strand
gaagaagcacuuugacaac

SEQ ID NO: 606911 - RNA, 19 nt, Homo sapiens
  misc_RNA (1)...(19): siRNA sense strand
caucagaagagcugugaaa

SEQ ID NO: 606912 - RNA, 19 nt, Homo sapiens
  misc_RNA (1)...(19): siRNA sense strand
agaagaagcacuuugacaa

SEQ ID NO: 606913 - RNA, 19 nt, Homo sapiens
  misc_RNA (1)...(19): siRNA sense strand
ccagagcucacaccuuauu

SEQ ID NO: 606914 - RNA, 19 nt, Homo sapiens
  misc_RNA (1)...(19): siRNA sense strand
ccuauaugcugaagaugga

SEQ ID NO: 606915 - RNA, 19 nt, Homo sapiens
  misc_RNA (1)...(19): siRNA sense strand
gcaaacaguggugcucuug

SEQ ID NO: 606916 - RNA, 19 nt, Homo sapiens
  misc_RNA (1)...(19): siRNA sense strand
ugccuuguccucuacauua

SEQ ID NO: 606917 - RNA, 19 nt, Homo sapiens
  misc_RNA (1)...(19): siRNA sense strand
gcucccaccucaucagaca

SEQ ID NO: 606918 - RNA, 19 nt, Homo sapiens
  misc_RNA (1)...(19): siRNA sense strand
ggacucacacuggcgcuaa

SEQ ID NO: 606919 - RNA, 19 nt, Homo sapiens
  misc_RNA (1)...(19): siRNA sense strand
cagugaaugugguaaaaua

SEQ ID NO: 606920 - RNA, 19 nt, Homo sapiens
  misc_RNA (1)...(19): siRNA sense strand
gcaaacaguggcgcucuug

SEQ ID NO: 606921 - RNA, 19 nt, Homo sapiens
  misc_RNA (1)...(19): siRNA sense strand
cagagaacccacaauagga

SEQ ID NO: 606922 - RNA, 19 nt, Homo sapiens
  misc_RNA (1)...(19): siRNA sense strand
ucacacagcaucagagagu

SEQ ID NO: 606923 - RNA, 19 nt, Homo sapiens
  misc_RNA (1)...(19): siRNA sense strand
ggcccuauaugcugaagau

SEQ ID NO: 606924 - RNA, 19 nt, Homo sapiens
  misc_RNA (1)...(19): siRNA sense strand
guggcgcucuugacacaaa

SEQ ID NO: 606925 - RNA, 19 nt, Homo sapiens
  misc_RNA (1)...(19): siRNA sense strand
ccagagaacccacaauagg

SEQ ID NO: 606926 - RNA, 19 nt, Homo sapiens
  misc_RNA (1)...(19): siRNA sense strand
gaacccacaauaggacaaa

SEQ ID NO: 606927 - RNA, 19 nt, Homo sapiens
  misc_RNA (1)...(19): siRNA sense strand
caaggaaggcaaugguugu

SEQ ID NO: 606928 - RNA, 19 nt, Homo sapiens
  misc_RNA (1)...(19): siRNA sense strand
cuacaagugucaggacugu

SEQ ID NO: 606929 - RNA, 19 nt, Homo sapiens
  misc_RNA (1)...(19): siRNA sense strand
ucaagacugugggaaagga

SEQ ID NO: 606930 - RNA, 19 nt, Homo sapiens
  misc_RNA (1)...(19): siRNA sense strand
gaaggcaaugguuguagga

SEQ ID NO: 606931 - RNA, 19 nt, Homo sapiens
  misc_RNA (1)...(19): siRNA sense strand
gugggaggaccuucaauga

SEQ ID NO: 606932 - RNA, 19 nt, Homo sapiens
  misc_RNA (1)...(19): siRNA sense strand
ccagauccaggcccuauau

SEQ ID NO: 606933 - RNA, 19 nt, Homo sapiens
  misc_RNA (1)...(19): siRNA sense strand
ggcaaacaguggugcucuu

SEQ ID NO: 606934 - RNA, 19 nt, Homo sapiens
  misc_RNA (1)...(19): siRNA sense strand
aggcaaugguuguaggaaa

SEQ ID NO: 606935 - RNA, 19 nt, Homo sapiens
  misc_RNA (1)...(19): siRNA sense strand
caguggcgcucuugacaca

SEQ ID NO: 606936 - RNA, 19 nt, Homo sapiens
  misc_RNA (1)...(19): siRNA sense strand
gugggagacuacacuggaa

SEQ ID NO: 606937 - RNA, 19 nt, Homo sapiens
  misc_RNA (1)...(19): siRNA sense strand
uaggugcacugccugugaa

SEQ ID NO: 606938 - RNA, 19 nt, Homo sapiens
  misc_RNA (1)...(19): siRNA sense strand
gcuccaaauucugacauuc

SEQ ID NO: 606939 - RNA, 19 nt, Homo sapiens
  misc_RNA (1)...(19): siRNA sense strand
aaagaguuagcuccaaauu

SEQ ID NO: 606940 - RNA, 19 nt, Homo sapiens
  misc_RNA (1)...(19): siRNA sense strand
aaacaguggugcucuugac

SEQ ID NO: 606941 - RNA, 19 nt, Homo sapiens
  misc_RNA (1)...(19): siRNA sense strand
ccagagcucccaccucauc

SEQ ID NO: 606942 - RNA, 19 nt, Homo sapiens
  misc_RNA (1)...(19): siRNA sense strand
ucggaguacuaaacagauu

SEQ ID NO: 606943 - RNA, 19 nt, Homo sapiens
  misc_RNA (1)...(19): siRNA sense strand
ccacaaaauuccuccuaga

SEQ ID NO: 606944 - RNA, 19 nt, Homo sapiens
  misc_RNA (1)...(19): siRNA sense strand
ggcaaacaguggcgcucuu

SEQ ID NO: 606945 - RNA, 19 nt, Homo sapiens
  misc_RNA (1)...(19): siRNA sense strand
cggaguacuaaacagauua

SEQ ID NO: 606946 - RNA, 19 nt, Homo sapiens
  misc_RNA (1)...(19): siRNA sense strand
ggcaaugguuguaggaaaa

SEQ ID NO: 606947 - RNA, 19 nt, Homo sapiens
  misc_RNA (1)...(19): siRNA sense strand
aauaaagaguuagcuccaa

SEQ ID NO: 606948 - RNA, 19 nt, Homo sapiens
  misc_RNA (1)...(19): siRNA sense strand
caaagcgaaagaagaaaca

SEQ ID NO: 606949 - RNA, 19 nt, Homo sapiens
  misc_RNA (1)...(19): siRNA sense strand
acaauaggacaaagcgaaa

SEQ ID NO: 606950 - RNA, 19 nt, Homo sapiens
  misc_RNA (1)...(19): siRNA sense strand
gcaugcaacaaauguggaa

SEQ ID NO: 606951 - RNA, 19 nt, Homo sapiens
  misc_RNA (1)...(19): siRNA sense strand
cagaagaagcacuuugaca

SEQ ID NO: 606952 - RNA, 19 nt, Homo sapiens
  misc_RNA (1)...(19): siRNA sense strand
agagaggcccuaugugugu

SEQ ID NO: 606953 - RNA, 19 nt, Homo sapiens
  misc_RNA (1)...(19): siRNA sense strand
ccaggaaguccaagacaca

SEQ ID NO: 606954 - RNA, 19 nt, Homo sapiens
  misc_RNA (1)...(19): siRNA sense strand
caaacaguggugcucuuga

SEQ ID NO: 606955 - RNA, 19 nt, Homo sapiens
  misc_RNA (1)...(19): siRNA sense strand
gagacuacacuggaaaaua

SEQ ID NO: 606956 - RNA, 19 nt, Homo sapiens
  misc_RNA (1)...(19): siRNA sense strand
gagcucccaccucaucaga

SEQ ID NO: 606957 - RNA, 19 nt, Homo sapiens
  misc_RNA (1)...(19): siRNA sense strand
aaugaucgcucagccaucu

SEQ ID NO: 606958 - RNA, 19 nt, Homo sapiens
  misc_RNA (1)...(19): siRNA sense strand
cuaugugugucaagacugu

SEQ ID NO: 606959 - RNA, 19 nt, Homo sapiens
  misc_RNA (1)...(19): siRNA sense strand
ggcccuaugugugucaaga

SEQ ID NO: 606960 - RNA, 19 nt, Homo sapiens
  misc_RNA (1)...(19): siRNA sense strand
uuccggcaguuccguuaua

SEQ ID NO: 606961 - RNA, 19 nt, Homo sapiens
  misc_RNA (1)...(19): siRNA sense strand
uagagggugugaccuggau

SEQ ID NO: 606962 - RNA, 19 nt, Homo sapiens
  misc_RNA (1)...(19): siRNA sense strand
ugucaagacugugggaaag

SEQ ID NO: 606963 - RNA, 19 nt, Homo sapiens
  misc_RNA (1)...(19): siRNA sense strand
uaaagaguuagcuccaaau

SEQ ID NO: 606964 - RNA, 19 nt, Homo sapiens
  misc_RNA (1)...(19): siRNA sense strand
caaacaguggcgcucuuga

SEQ ID NO: 606965 - RNA, 19 nt, Homo sapiens
  misc_RNA (1)...(19): siRNA sense strand
caguggugcucuugacaca

SEQ ID NO: 606966 - RNA, 19 nt, Homo sapiens
  misc_RNA (1)...(19): siRNA sense strand
ccggaacccaagauacuuu

SEQ ID NO: 606967 - RNA, 19 nt, Homo sapiens
  misc_RNA (1)...(19): siRNA sense strand
cuaaggcacgcuccaagga

SEQ ID NO: 606968 - RNA, 19 nt, Homo sapiens
  misc_RNA (1)...(19): siRNA sense strand
ccggagagaggcccuaugu

SEQ ID NO: 606969 - RNA, 19 nt, Homo sapiens
  misc_RNA (1)...(19): siRNA sense strand
cgaguaccgcgaugugaug

SEQ ID NO: 606970 - RNA, 19 nt, Homo sapiens
  misc_RNA (1)...(19): siRNA sense strand
gauccaggcccuauaugcu

SEQ ID NO: 606971 - RNA, 19 nt, Homo sapiens
  misc_RNA (1)...(19): siRNA sense strand
aaucgcagcacccagagaa

SEQ ID NO: 606972 - RNA, 19 nt, Homo sapiens
  misc_RNA (1)...(19): siRNA sense strand
cuggaugucugaggaggaa

SEQ ID NO: 606973 - RNA, 19 nt, Homo sapiens
  misc_RNA (1)...(19): siRNA sense strand
cauaugcaugcaacaaaug

SEQ ID NO: 606974 - RNA, 19 nt, Homo sapiens
  misc_RNA (1)...(19): siRNA sense strand
gccugaaaguacaagaauc

SEQ ID NO: 606975 - RNA, 19 nt, Homo sapiens
  misc_RNA (1)...(19): siRNA sense strand
cagcaucagagaguucauu

SEQ ID NO: 606976 - RNA, 19 nt, Homo sapiens
  misc_RNA (1)...(19): siRNA sense strand
gccaaggaaggcaaugguu

SEQ ID NO: 606977 - RNA, 19 nt, Homo sapiens
  misc_RNA (1)...(19): siRNA sense strand
gccuuguccucuacauuag

SEQ ID NO: 606978 - RNA, 19 nt, Homo sapiens
  misc_RNA (1)...(19): siRNA sense strand
gacaaagcgaaagaagaaa

SEQ ID NO: 606979 - RNA, 19 nt, Homo sapiens
  misc_RNA (1)...(19): siRNA sense strand
caccucaucagacaucaga

SEQ ID NO: 606980 - RNA, 19 nt, Homo sapiens
  misc_RNA (1)...(19): siRNA sense strand
cuaggugcacugccuguga

SEQ ID NO: 606981 - RNA, 19 nt, Homo sapiens
  misc_RNA (1)...(19): siRNA sense strand
ggaguacuaaacagauuac

SEQ ID NO: 606982 - RNA, 19 nt, Homo sapiens
  misc_RNA (1)...(19): siRNA sense strand
ucagaagagcugugaaagg

SEQ ID NO: 606983 - RNA, 19 nt, Homo sapiens
  misc_RNA (1)...(19): siRNA sense strand
gccagagguuccggcaguu

SEQ ID NO: 606984 - RNA, 19 nt, Homo sapiens
  misc_RNA (1)...(19): siRNA sense strand
ggacaaagcgaaagaagaa

SEQ ID NO: 606985 - RNA, 19 nt, Homo sapiens
  misc_RNA (1)...(19): siRNA sense strand
agaaacagccuaccucaua

SEQ ID NO: 606986 - RNA, 19 nt, Homo sapiens
  misc_RNA (1)...(19): siRNA sense strand
gaaacauaauucacgugua

SEQ ID NO: 606987 - RNA, 19 nt, Homo sapiens
  misc_RNA (1)...(19): siRNA sense strand
ggagagagaccauuugaau

SEQ ID NO: 606988 - RNA, 19 nt, Homo sapiens
  misc_RNA (1)...(19): siRNA sense strand
acccagagcucacaccuua

SEQ ID NO: 606989 - RNA, 19 nt, Homo sapiens
  misc_RNA (1)...(19): siRNA sense strand
gaaacagccuaccucauag

SEQ ID NO: 606990 - RNA, 19 nt, Homo sapiens
  misc_RNA (1)...(19): siRNA sense strand
gggaggaccuucaaugauc

SEQ ID NO: 606991 - RNA, 19 nt, Homo sapiens
  misc_RNA (1)...(19): siRNA sense strand
gauggagucugcucaggaa

SEQ ID NO: 606992 - RNA, 19 nt, Homo sapiens
  misc_RNA (1)...(19): siRNA sense strand
ggagagaggcccuaugugu

SEQ ID NO: 606993 - RNA, 19 nt, Homo sapiens
  misc_RNA (1)...(19): siRNA sense strand
guacuaaacagauuacguu

SEQ ID NO: 606994 - RNA, 19 nt, Homo sapiens
  misc_RNA (1)...(19): siRNA sense strand
gggaaaggauuuguucaga

SEQ ID NO: 606995 - RNA, 19 nt, Homo sapiens
  misc_RNA (1)...(19): siRNA sense strand
agaguuagcuccaaauucu

SEQ ID NO: 606996 - RNA, 19 nt, Homo sapiens
  misc_RNA (1)...(19): siRNA sense strand
gcgcuaagcccuacaagug

SEQ ID NO: 606997 - RNA, 19 nt, Homo sapiens
  misc_RNA (1)...(19): siRNA sense strand
caaaauuccuccuagaaaa

SEQ ID NO: 606998 - RNA, 19 nt, Homo sapiens
  misc_RNA (1)...(19): siRNA sense strand
ggauguggcuguggacuuc

SEQ ID NO: 606999 - RNA, 19 nt, Homo sapiens
  misc_RNA (1)...(19): siRNA sense strand
agacuacacuggaaaauaa

SEQ ID NO: 607000 - RNA, 19 nt, Homo sapiens
  misc_RNA (1)...(19): siRNA sense strand
guggugcucuugacacaaa

SEQ ID NO: 607001 - RNA, 19 nt, Homo sapiens
  misc_RNA (1)...(19): siRNA sense strand
caccagagaacccacaaua

SEQ ID NO: 607002 - RNA, 19 nt, Homo sapiens
  misc_RNA (1)...(19): siRNA sense strand
cgacacagaggaccgagua

SEQ ID NO: 607003 - RNA, 19 nt, Homo sapiens
  misc_RNA (1)...(19): siRNA sense strand
gauugugccuuguccucua

SEQ ID NO: 607004 - RNA, 19 nt, Homo sapiens
  misc_RNA (1)...(19): siRNA sense strand
auaaagaguuagcuccaaa

SEQ ID NO: 607005 - RNA, 19 nt, Homo sapiens
  misc_RNA (1)...(19): siRNA sense strand
ucagagcucuucccucaca

SEQ ID NO: 607006 - RNA, 19 nt, Homo sapiens
  misc_RNA (1)...(19): siRNA sense strand
ccauaugcaugcaacaaau

SEQ ID NO: 607007 - RNA, 19 nt, Homo sapiens
  misc_RNA (1)...(19): siRNA sense strand
gaagaagcacuuugacaac

SEQ ID NO: 607008 - RNA, 19 nt, Homo sapiens
  misc_RNA (1)...(19): siRNA sense strand
caucagaagagcugugaaa

SEQ ID NO: 607009 - RNA, 19 nt, Homo sapiens
  misc_RNA (1)...(19): siRNA sense strand
agaagaagcacuuugacaa

SEQ ID NO: 607010 - RNA, 19 nt, Homo sapiens
  misc_RNA (1)...(19): siRNA sense strand
ccagagcucacaccuuauu

SEQ ID NO: 607011 - RNA, 19 nt, Homo sapiens
  misc_RNA (1)...(19): siRNA sense strand
ccuauaugcugaagaugga

SEQ ID NO: 607012 - RNA, 19 nt, Homo sapiens
  misc_RNA (1)...(19): siRNA sense strand
gcaaacaguggugcucuug

SEQ ID NO: 607013 - RNA, 19 nt, Homo sapiens
  misc_RNA (1)...(19): siRNA sense strand
ugccuuguccucuacauua

SEQ ID NO: 607014 - RNA, 19 nt, Homo sapiens
  misc_RNA (1)...(19): siRNA sense strand
gcucccaccucaucagaca

SEQ ID NO: 607015 - RNA, 19 nt, Homo sapiens
  misc_RNA (1)...(19): siRNA sense strand
ggacucacacuggcgcuaa

SEQ ID NO: 607016 - RNA, 19 nt, Homo sapiens
  misc_RNA (1)...(19): siRNA sense strand
cagugaaugugguaaaaua

SEQ ID NO: 607017 - RNA, 19 nt, Homo sapiens
  misc_RNA (1)...(19): siRNA sense strand
gcaaacaguggcgcucuug

SEQ ID NO: 607018 - RNA, 19 nt, Homo sapiens
  misc_RNA (1)...(19): siRNA sense strand
cagagaacccacaauagga

SEQ ID NO: 607019 - RNA, 19 nt, Homo sapiens
  misc_RNA (1)...(19): siRNA sense strand
ggcccuauaugcugaagau

SEQ ID NO: 607020 - RNA, 19 nt, Homo sapiens
  misc_RNA (1)...(19): siRNA sense strand
ucacacagcaucagagagu

SEQ ID NO: 607021 - RNA, 19 nt, Homo sapiens
  misc_RNA (1)...(19): siRNA sense strand
uaaauuggauccucuuccu

SEQ ID NO: 607022 - RNA, 19 nt, Homo sapiens
  misc_RNA (1)...(19): siRNA sense strand
guggcgcucuugacacaaa

SEQ ID NO: 607023 - RNA, 19 nt, Homo sapiens
  misc_RNA (1)...(19): siRNA sense strand
ccagagaacccacaauagg

SEQ ID NO: 607024 - RNA, 19 nt, Homo sapiens
  misc_RNA (1)...(19): siRNA sense strand
ccagcuggacccuaaauug

SEQ ID NO: 607025 - RNA, 19 nt, Homo sapiens
  misc_RNA (1)...(19): siRNA sense strand
gaacccacaauaggacaaa

SEQ ID NO: 607026 - RNA, 19 nt, Homo sapiens
  misc_RNA (1)...(19): siRNA sense strand
gcuggacccuaaauuggau

SEQ ID NO: 607027 - RNA, 19 nt, Homo sapiens
  misc_RNA (1)...(19): siRNA sense strand
cuacaagugucaggacugu

SEQ ID NO: 607028 - RNA, 19 nt, Homo sapiens
  misc_RNA (1)...(19): siRNA sense strand
ucaagacugugggaaagga

SEQ ID NO: 607029 - RNA, 19 nt, Homo sapiens
  misc_RNA (1)...(19): siRNA sense strand
gaaggcaaugguuguagga

SEQ ID NO: 607030 - RNA, 19 nt, Homo sapiens
  misc_RNA (1)...(19): siRNA sense strand
caaggaaggcaaugguugu

SEQ ID NO: 607031 - RNA, 19 nt, Homo sapiens
  misc_RNA (1)...(19): siRNA sense strand
ccagauccaggcccuauau

SEQ ID NO: 607032 - RNA, 19 nt, Homo sapiens
  misc_RNA (1)...(19): siRNA sense strand
gugggaggaccuucaauga

SEQ ID NO: 607033 - RNA, 19 nt, Homo sapiens
  misc_RNA (1)...(19): siRNA sense strand
ggcaaacaguggugcucuu

SEQ ID NO: 607034 - RNA, 19 nt, Homo sapiens
  misc_RNA (1)...(19): siRNA sense strand
aggcaaugguuguaggaaa

SEQ ID NO: 607035 - RNA, 19 nt, Homo sapiens
  misc_RNA (1)...(19): siRNA sense strand
caguggcgcucuugacaca

SEQ ID NO: 607036 - RNA, 19 nt, Homo sapiens
  misc_RNA (1)...(19): siRNA sense strand
uaggugcacugccugugaa

SEQ ID NO: 607037 - RNA, 19 nt, Homo sapiens
  misc_RNA (1)...(19): siRNA sense strand
gcuccaaauucugacauuc

SEQ ID NO: 607038 - RNA, 19 nt, Homo sapiens
  misc_RNA (1)...(19): siRNA sense strand
aaagaguuagcuccaaauu

SEQ ID NO: 607039 - RNA, 19 nt, Homo sapiens
  misc_RNA (1)...(19): siRNA sense strand
gugggagacuacacuggaa

SEQ ID NO: 607040 - RNA, 19 nt, Homo sapiens
  misc_RNA (1)...(19): siRNA sense strand
aaacaguggugcucuugac

SEQ ID NO: 607041 - RNA, 19 nt, Homo sapiens
  misc_RNA (1)...(19): siRNA sense strand
ccagagcucccaccucauc

SEQ ID NO: 607042 - RNA, 19 nt, Homo sapiens
  misc_RNA (1)...(19): siRNA sense strand
ucggaguacuaaacagauu

SEQ ID NO: 607043 - RNA, 19 nt, Homo sapiens
  misc_RNA (1)...(19): siRNA sense strand
ccacaaaauuccuccuaga

SEQ ID NO: 607044 - RNA, 19 nt, Homo sapiens
  misc_RNA (1)...(19): siRNA sense strand
ggcaaacaguggcgcucuu

SEQ ID NO: 607045 - RNA, 19 nt, Homo sapiens
  misc_RNA (1)...(19): siRNA sense strand
cggaguacuaaacagauua

SEQ ID NO: 607046 - RNA, 19 nt, Homo sapiens
  misc_RNA (1)...(19): siRNA sense strand
ggcaaugguuguaggaaaa

SEQ ID NO: 607047 - RNA, 19 nt, Homo sapiens
  misc_RNA (1)...(19): siRNA sense strand
aauaaagaguuagcuccaa

SEQ ID NO: 607048 - RNA, 19 nt, Homo sapiens
  misc_RNA (1)...(19): siRNA sense strand
caaagcgaaagaagaaaca

SEQ ID NO: 607049 - RNA, 19 nt, Homo sapiens
  misc_RNA (1)...(19): siRNA sense strand
acaauaggacaaagcgaaa

SEQ ID NO: 607050 - RNA, 19 nt, Homo sapiens
  misc_RNA (1)...(19): siRNA sense strand
gcaugcaacaaauguggaa

SEQ ID NO: 607051 - RNA, 19 nt, Homo sapiens
  misc_RNA (1)...(19): siRNA sense strand
cagaagaagcacuuugaca

SEQ ID NO: 607052 - RNA, 19 nt, Homo sapiens
  misc_RNA (1)...(19): siRNA sense strand
agagaggcccuaugugugu

SEQ ID NO: 607053 - RNA, 19 nt, Homo sapiens
  misc_RNA (1)...(19): siRNA sense strand
ccaggaaguccaagacaca

SEQ ID NO: 607054 - RNA, 19 nt, Homo sapiens
  misc_RNA (1)...(19): siRNA sense strand
caaacaguggugcucuuga

SEQ ID NO: 607055 - RNA, 19 nt, Homo sapiens
  misc_RNA (1)...(19): siRNA sense strand
gagacuacacuggaaaaua

SEQ ID NO: 607056 - RNA, 19 nt, Homo sapiens
  misc_RNA (1)...(19): siRNA sense strand
gagcucccaccucaucaga

SEQ ID NO: 607057 - RNA, 19 nt, Homo sapiens
  misc_RNA (1)...(19): siRNA sense strand
aaugaucgcucagccaucu

SEQ ID NO: 607058 - RNA, 19 nt, Homo sapiens
  misc_RNA (1)...(19): siRNA sense strand
cuaugugugucaagacugu

SEQ ID NO: 607059 - RNA, 19 nt, Homo sapiens
  misc_RNA (1)...(19): siRNA sense strand
ggcccuaugugugucaaga

SEQ ID NO: 607060 - RNA, 19 nt, Homo sapiens
  misc_RNA (1)...(19): siRNA sense strand
uagagggugugaccuggau

SEQ ID NO: 607061 - RNA, 19 nt, Homo sapiens
  misc_RNA (1)...(19): siRNA sense strand
ugucaagacugugggaaag

SEQ ID NO: 607062 - RNA, 19 nt, Homo sapiens
  misc_RNA (1)...(19): siRNA sense strand
uuccggcaguuccguuaua

SEQ ID NO: 607063 - RNA, 19 nt, Homo sapiens
  misc_RNA (1)...(19): siRNA sense strand
uaaagaguuagcuccaaau

SEQ ID NO: 607064 - RNA, 19 nt, Homo sapiens
  misc_RNA (1)...(19): siRNA sense strand
cagcuggacccuaaauugg

SEQ ID NO: 607065 - RNA, 19 nt, Homo sapiens
  misc_RNA (1)...(19): siRNA sense strand
caaacaguggcgcucuuga

SEQ ID NO: 607066 - RNA, 19 nt, Homo sapiens
  misc_RNA (1)...(19): siRNA sense strand
caguggugcucuugacaca

SEQ ID NO: 607067 - RNA, 19 nt, Homo sapiens
  misc_RNA (1)...(19): siRNA sense strand
gcugagaguccccuaauga

SEQ ID NO: 607068 - RNA, 19 nt, Homo sapiens
  misc_RNA (1)...(19): siRNA sense strand
ccggaacccaagauacuuu

SEQ ID NO: 607069 - RNA, 19 nt, Homo sapiens
  misc_RNA (1)...(19): siRNA sense strand
cuaaggcacgcuccaagga

SEQ ID NO: 607070 - RNA, 19 nt, Homo sapiens
  misc_RNA (1)...(19): siRNA sense strand
ccggagagaggcccuaugu

SEQ ID NO: 607071 - RNA, 19 nt, Homo sapiens
  misc_RNA (1)...(19): siRNA sense strand
cgaguaccgcgaugugaug

SEQ ID NO: 607072 - RNA, 19 nt, Homo sapiens
  misc_RNA (1)...(19): siRNA sense strand
gauccaggcccuauaugcu

SEQ ID NO: 607073 - RNA, 19 nt, Homo sapiens
  misc_RNA (1)...(19): siRNA sense strand
aaucgcagcacccagagaa

SEQ ID NO: 607074 - RNA, 19 nt, Homo sapiens
  misc_RNA (1)...(19): siRNA sense strand
cuggaugucugaggaggaa

SEQ ID NO: 607075 - RNA, 19 nt, Homo sapiens
  misc_RNA (1)...(19): siRNA sense strand
cauaugcaugcaacaaaug

SEQ ID NO: 607076 - RNA, 19 nt, Homo sapiens
  misc_RNA (1)...(19): siRNA sense strand
gccugaaaguacaagaauc

SEQ ID NO: 607077 - RNA, 19 nt, Homo sapiens
  misc_RNA (1)...(19): siRNA sense strand
cagcaucagagaguucauu

SEQ ID NO: 607078 - RNA, 19 nt, Homo sapiens
  misc_RNA (1)...(19): siRNA sense strand
gccaaggaaggcaaugguu

SEQ ID NO: 607079 - RNA, 19 nt, Homo sapiens
  misc_RNA (1)...(19): siRNA sense strand
ucagaagagcugugaaagg

SEQ ID NO: 607080 - RNA, 19 nt, Homo sapiens
  misc_RNA (1)...(19): siRNA sense strand
gacaaagcgaaagaagaaa

SEQ ID NO: 607081 - RNA, 19 nt, Homo sapiens
  misc_RNA (1)...(19): siRNA sense strand
gccagagguuccggcaguu

SEQ ID NO: 607082 - RNA, 19 nt, Homo sapiens
  misc_RNA (1)...(19): siRNA sense strand
caccucaucagacaucaga

SEQ ID NO: 607083 - RNA, 19 nt, Homo sapiens
  misc_RNA (1)...(19): siRNA sense strand
ggaguacuaaacagauuac

SEQ ID NO: 607084 - RNA, 19 nt, Homo sapiens
  misc_RNA (1)...(19): siRNA sense strand
ggacaaagcgaaagaagaa

SEQ ID NO: 607085 - RNA, 19 nt, Homo sapiens
  misc_RNA (1)...(19): siRNA sense strand
agaaacagccuaccucaua

SEQ ID NO: 607086 - RNA, 19 nt, Homo sapiens
  misc_RNA (1)...(19): siRNA sense strand
gaaacauaauucacgugua

SEQ ID NO: 607087 - RNA, 19 nt, Homo sapiens
  misc_RNA (1)...(19): siRNA sense strand
ggagagagaccauuugaau

SEQ ID NO: 607088 - RNA, 19 nt, Homo sapiens
  misc_RNA (1)...(19): siRNA sense strand
acccagagcucacaccuua

SEQ ID NO: 607089 - RNA, 19 nt, Homo sapiens
  misc_RNA (1)...(19): siRNA sense strand
gaaacagccuaccucauag

SEQ ID NO: 607090 - RNA, 19 nt, Homo sapiens
  misc_RNA (1)...(19): siRNA sense strand
gggaggaccuucaaugauc

SEQ ID NO: 607091 - RNA, 19 nt, Homo sapiens
  misc_RNA (1)...(19): siRNA sense strand
gauggagucugcucaggaa

SEQ ID NO: 607092 - RNA, 19 nt, Homo sapiens
  misc_RNA (1)...(19): siRNA sense strand
ggagagaggcccuaugugu

SEQ ID NO: 607093 - RNA, 19 nt, Homo sapiens
  misc_RNA (1)...(19): siRNA sense strand
guacuaaacagauuacguu

SEQ ID NO: 607094 - RNA, 19 nt, Homo sapiens
  misc_RNA (1)...(19): siRNA sense strand
gggaaaggauuuguucaga

SEQ ID NO: 607095 - RNA, 19 nt, Homo sapiens
  misc_RNA (1)...(19): siRNA sense strand
agaguuagcuccaaauucu

SEQ ID NO: 607096 - RNA, 19 nt, Homo sapiens
  misc_RNA (1)...(19): siRNA sense strand
gcgcuaagcccuacaagug

SEQ ID NO: 607097 - RNA, 19 nt, Homo sapiens
  misc_RNA (1)...(19): siRNA sense strand
caaaauuccuccuagaaaa

SEQ ID NO: 607098 - RNA, 19 nt, Homo sapiens
  misc_RNA (1)...(19): siRNA sense strand
ggauguggcuguggacuuc

SEQ ID NO: 607099 - RNA, 19 nt, Homo sapiens
  misc_RNA (1)...(19): siRNA sense strand
agacuacacuggaaaauaa

SEQ ID NO: 607100 - RNA, 19 nt, Homo sapiens
  misc_RNA (1)...(19): siRNA sense strand
guggugcucuugacacaaa

SEQ ID NO: 607101 - RNA, 19 nt, Homo sapiens
  misc_RNA (1)...(19): siRNA sense strand
caccagagaacccacaaua

SEQ ID NO: 607102 - RNA, 19 nt, Homo sapiens
  misc_RNA (1)...(19): siRNA sense strand
cgacacagaggaccgagua

SEQ ID NO: 607103 - RNA, 19 nt, Homo sapiens
  misc_RNA (1)...(19): siRNA sense strand
gauugugccuuguccucua

SEQ ID NO: 607104 - RNA, 19 nt, Homo sapiens
  misc_RNA (1)...(19): siRNA sense strand
auaaagaguuagcuccaaa

SEQ ID NO: 607105 - RNA, 19 nt, Homo sapiens
  misc_RNA (1)...(19): siRNA sense strand
ucagagcucuucccucaca

SEQ ID NO: 607106 - RNA, 19 nt, Homo sapiens
  misc_RNA (1)...(19): siRNA sense strand
ccauaugcaugcaacaaau

SEQ ID NO: 607107 - RNA, 19 nt, Homo sapiens
  misc_RNA (1)...(19): siRNA sense strand
gaagaagcacuuugacaac

SEQ ID NO: 607108 - RNA, 19 nt, Homo sapiens
  misc_RNA (1)...(19): siRNA sense strand
caucagaagagcugugaaa

SEQ ID NO: 607109 - RNA, 19 nt, Homo sapiens
  misc_RNA (1)...(19): siRNA sense strand
agaagaagcacuuugacaa

SEQ ID NO: 607110 - RNA, 19 nt, Homo sapiens
  misc_RNA (1)...(19): siRNA sense strand
ccagagcucacaccuuauu

SEQ ID NO: 607111 - RNA, 19 nt, Homo sapiens
  misc_RNA (1)...(19): siRNA sense strand
ccuauaugcugaagaugga

SEQ ID NO: 607112 - RNA, 19 nt, Homo sapiens
  misc_RNA (1)...(19): siRNA sense strand
gcaaacaguggugcucuug

SEQ ID NO: 607113 - RNA, 19 nt, Homo sapiens
  misc_RNA (1)...(19): siRNA sense strand
ugccuuguccucuacauua

SEQ ID NO: 607114 - RNA, 19 nt, Homo sapiens
  misc_RNA (1)...(19): siRNA sense strand
gcucccaccucaucagaca

SEQ ID NO: 607115 - RNA, 19 nt, Homo sapiens
  misc_RNA (1)...(19): siRNA sense strand
ggacucacacuggcgcuaa

SEQ ID NO: 607116 - RNA, 19 nt, Homo sapiens
  misc_RNA (1)...(19): siRNA sense strand
cagugaaugugguaaaaua

SEQ ID NO: 607117 - RNA, 19 nt, Homo sapiens
  misc_RNA (1)...(19): siRNA sense strand
gcaaacaguggcgcucuug

SEQ ID NO: 607118 - RNA, 19 nt, Homo sapiens
  misc_RNA (1)...(19): siRNA sense strand
cagagaacccacaauagga

SEQ ID NO: 607119 - RNA, 19 nt, Homo sapiens
  misc_RNA (1)...(19): siRNA sense strand
ggcccuauaugcugaagau

SEQ ID NO: 607120 - RNA, 19 nt, Homo sapiens
  misc_RNA (1)...(19): siRNA sense strand
ucacacagcaucagagagu

SEQ ID NO: 607121 - RNA, 19 nt, Homo sapiens
  misc_RNA (1)...(19): siRNA sense strand
uaaauuggauccucuuccu

SEQ ID NO: 607122 - RNA, 19 nt, Homo sapiens
  misc_RNA (1)...(19): siRNA sense strand
guggcgcucuugacacaaa

SEQ ID NO: 607123 - RNA, 19 nt, Homo sapiens
  misc_RNA (1)...(19): siRNA sense strand
ccagagaacccacaauagg

SEQ ID NO: 607124 - RNA, 19 nt, Homo sapiens
  misc_RNA (1)...(19): siRNA sense strand
ccagcuggacccuaaauug

SEQ ID NO: 607125 - RNA, 19 nt, Homo sapiens
  misc_RNA (1)...(19): siRNA sense strand
gaacccacaauaggacaaa

SEQ ID NO: 607126 - RNA, 19 nt, Homo sapiens
  misc_RNA (1)...(19): siRNA sense strand
gcuggacccuaaauuggau

SEQ ID NO: 607127 - RNA, 19 nt, Homo sapiens
  misc_RNA (1)...(19): siRNA sense strand
cuacaagugucaggacugu

SEQ ID NO: 607128 - RNA, 19 nt, Homo sapiens
  misc_RNA (1)...(19): siRNA sense strand
ucaagacugugggaaagga

SEQ ID NO: 607129 - RNA, 19 nt, Homo sapiens
  misc_RNA (1)...(19): siRNA sense strand
gaaggcaaugguuguagga

SEQ ID NO: 607130 - RNA, 19 nt, Homo sapiens
  misc_RNA (1)...(19): siRNA sense strand
caaggaaggcaaugguugu

SEQ ID NO: 607131 - RNA, 19 nt, Homo sapiens
  misc_RNA (1)...(19): siRNA sense strand
ccagauccaggcccuauau

SEQ ID NO: 607132 - RNA, 19 nt, Homo sapiens
  misc_RNA (1)...(19): siRNA sense strand
gugggaggaccuucaauga

SEQ ID NO: 607133 - RNA, 19 nt, Homo sapiens
  misc_RNA (1)...(19): siRNA sense strand
ggcaaacaguggugcucuu

SEQ ID NO: 607134 - RNA, 19 nt, Homo sapiens
  misc_RNA (1)...(19): siRNA sense strand
aggcaaugguuguaggaaa

SEQ ID NO: 607135 - RNA, 19 nt, Homo sapiens
  misc_RNA (1)...(19): siRNA sense strand
caguggcgcucuugacaca

SEQ ID NO: 607136 - RNA, 19 nt, Homo sapiens
  misc_RNA (1)...(19): siRNA sense strand
uaggugcacugccugugaa

SEQ ID NO: 607137 - RNA, 19 nt, Homo sapiens
  misc_RNA (1)...(19): siRNA sense strand
gcuccaaauucugacauuc

SEQ ID NO: 607138 - RNA, 19 nt, Homo sapiens
  misc_RNA (1)...(19): siRNA sense strand
aaagaguuagcuccaaauu

SEQ ID NO: 607139 - RNA, 19 nt, Homo sapiens
  misc_RNA (1)...(19): siRNA sense strand
gugggagacuacacuggaa

SEQ ID NO: 607140 - RNA, 19 nt, Homo sapiens
  misc_RNA (1)...(19): siRNA sense strand
aaacaguggugcucuugac

SEQ ID NO: 607141 - RNA, 19 nt, Homo sapiens
  misc_RNA (1)...(19): siRNA sense strand
ccagagcucccaccucauc

SEQ ID NO: 607142 - RNA, 19 nt, Homo sapiens
  misc_RNA (1)...(19): siRNA sense strand
ucggaguacuaaacagauu

SEQ ID NO: 607143 - RNA, 19 nt, Homo sapiens
  misc_RNA (1)...(19): siRNA sense strand
ccacaaaauuccuccuaga

SEQ ID NO: 607144 - RNA, 19 nt, Homo sapiens
  misc_RNA (1)...(19): siRNA sense strand
ggcaaacaguggcgcucuu

SEQ ID NO: 607145 - RNA, 19 nt, Homo sapiens
  misc_RNA (1)...(19): siRNA sense strand
cggaguacuaaacagauua

SEQ ID NO: 607146 - RNA, 19 nt, Homo sapiens
  misc_RNA (1)...(19): siRNA sense strand
ggcaaugguuguaggaaaa

SEQ ID NO: 607147 - RNA, 19 nt, Homo sapiens
  misc_RNA (1)...(19): siRNA sense strand
aauaaagaguuagcuccaa

SEQ ID NO: 607148 - RNA, 19 nt, Homo sapiens
  misc_RNA (1)...(19): siRNA sense strand
caaagcgaaagaagaaaca

SEQ ID NO: 607149 - RNA, 19 nt, Homo sapiens
  misc_RNA (1)...(19): siRNA sense strand
acaauaggacaaagcgaaa

SEQ ID NO: 607150 - RNA, 19 nt, Homo sapiens
  misc_RNA (1)...(19): siRNA sense strand
gcaugcaacaaauguggaa

SEQ ID NO: 607151 - RNA, 19 nt, Homo sapiens
  misc_RNA (1)...(19): siRNA sense strand
cagaagaagcacuuugaca

SEQ ID NO: 607152 - RNA, 19 nt, Homo sapiens
  misc_RNA (1)...(19): siRNA sense strand
agagaggcccuaugugugu

SEQ ID NO: 607153 - RNA, 19 nt, Homo sapiens
  misc_RNA (1)...(19): siRNA sense strand
ccaggaaguccaagacaca

SEQ ID NO: 607154 - RNA, 19 nt, Homo sapiens
  misc_RNA (1)...(19): siRNA sense strand
caaacaguggugcucuuga

SEQ ID NO: 607155 - RNA, 19 nt, Homo sapiens
  misc_RNA (1)...(19): siRNA sense strand
gagacuacacuggaaaaua

SEQ ID NO: 607156 - RNA, 19 nt, Homo sapiens
  misc_RNA (1)...(19): siRNA sense strand
gagcucccaccucaucaga

SEQ ID NO: 607157 - RNA, 19 nt, Homo sapiens
  misc_RNA (1)...(19): siRNA sense strand
aaugaucgcucagccaucu

SEQ ID NO: 607158 - RNA, 19 nt, Homo sapiens
  misc_RNA (1)...(19): siRNA sense strand
cuaugugugucaagacugu

SEQ ID NO: 607159 - RNA, 19 nt, Homo sapiens
  misc_RNA (1)...(19): siRNA sense strand
ggcccuaugugugucaaga

SEQ ID NO: 607160 - RNA, 19 nt, Homo sapiens
  misc_RNA (1)...(19): siRNA sense strand
uagagggugugaccuggau

SEQ ID NO: 607161 - RNA, 19 nt, Homo sapiens
  misc_RNA (1)...(19): siRNA sense strand
ugucaagacugugggaaag

SEQ ID NO: 607162 - RNA, 19 nt, Homo sapiens
  misc_RNA (1)...(19): siRNA sense strand
uuccggcaguuccguuaua

SEQ ID NO: 607163 - RNA, 19 nt, Homo sapiens
  misc_RNA (1)...(19): siRNA sense strand
uaaagaguuagcuccaaau

SEQ ID NO: 607164 - RNA, 19 nt, Homo sapiens
  misc_RNA (1)...(19): siRNA sense strand
cagcuggacccuaaauugg

SEQ ID NO: 607165 - RNA, 19 nt, Homo sapiens
  misc_RNA (1)...(19): siRNA sense strand
caaacaguggcgcucuuga

SEQ ID NO: 607166 - RNA, 19 nt, Homo sapiens
  misc_RNA (1)...(19): siRNA sense strand
caguggugcucuugacaca

SEQ ID NO: 607167 - RNA, 19 nt, Homo sapiens
  misc_RNA (1)...(19): siRNA sense strand
gcugagaguccccuaauga

SEQ ID NO: 607168 - RNA, 19 nt, Homo sapiens
  misc_RNA (1)...(19): siRNA sense strand
ccggaacccaagauacuuu

SEQ ID NO: 607169 - RNA, 19 nt, Homo sapiens
  misc_RNA (1)...(19): siRNA sense strand
cuaaggcacgcuccaagga

SEQ ID NO: 607170 - RNA, 19 nt, Homo sapiens
  misc_RNA (1)...(19): siRNA sense strand
ccggagagaggcccuaugu

SEQ ID NO: 607171 - RNA, 19 nt, Homo sapiens
  misc_RNA (1)...(19): siRNA sense strand
cgaguaccgcgaugugaug

SEQ ID NO: 607172 - RNA, 19 nt, Homo sapiens
  misc_RNA (1)...(19): siRNA sense strand
gauccaggcccuauaugcu

SEQ ID NO: 607173 - RNA, 19 nt, Homo sapiens
  misc_RNA (1)...(19): siRNA sense strand
aaucgcagcacccagagaa

SEQ ID NO: 607174 - RNA, 19 nt, Homo sapiens
  misc_RNA (1)...(19): siRNA sense strand
cuggaugucugaggaggaa

SEQ ID NO: 607175 - RNA, 19 nt, Homo sapiens
  misc_RNA (1)...(19): siRNA sense strand
cauaugcaugcaacaaaug

SEQ ID NO: 607176 - RNA, 19 nt, Homo sapiens
  misc_RNA (1)...(19): siRNA sense strand
gccugaaaguacaagaauc

SEQ ID NO: 607177 - RNA, 19 nt, Homo sapiens
  misc_RNA (1)...(19): siRNA sense strand
cagcaucagagaguucauu

SEQ ID NO: 607178 - RNA, 19 nt, Homo sapiens
  misc_RNA (1)...(19): siRNA sense strand
gccaaggaaggcaaugguu

SEQ ID NO: 607179 - RNA, 19 nt, Homo sapiens
  misc_RNA (1)...(19): siRNA sense strand
ucagaagagcugugaaagg

SEQ ID NO: 607180 - RNA, 19 nt, Homo sapiens
  misc_RNA (1)...(19): siRNA sense strand
gacaaagcgaaagaagaaa

SEQ ID NO: 607181 - RNA, 19 nt, Homo sapiens
  misc_RNA (1)...(19): siRNA sense strand
gccagagguuccggcaguu

SEQ ID NO: 607182 - RNA, 19 nt, Homo sapiens
  misc_RNA (1)...(19): siRNA sense strand
caccucaucagacaucaga

SEQ ID NO: 607183 - RNA, 19 nt, Homo sapiens
  misc_RNA (1)...(19): siRNA sense strand
ggaguacuaaacagauuac

SEQ ID NO: 607184 - RNA, 19 nt, Homo sapiens
  misc_RNA (1)...(19): siRNA sense strand
gaagcacuauggcaucuau

SEQ ID NO: 607185 - RNA, 19 nt, Homo sapiens
  misc_RNA (1)...(19): siRNA sense strand
ccaagaaccugccuguguu

SEQ ID NO: 607186 - RNA, 19 nt, Homo sapiens
  misc_RNA (1)...(19): siRNA sense strand
gaaggauccugagcacgua

SEQ ID NO: 607187 - RNA, 19 nt, Homo sapiens
  misc_RNA (1)...(19): siRNA sense strand
gaagaggcguggagugaac

SEQ ID NO: 607188 - RNA, 19 nt, Homo sapiens
  misc_RNA (1)...(19): siRNA sense strand
gccaagaaccugccugugu

SEQ ID NO: 607189 - RNA, 19 nt, Homo sapiens
  misc_RNA (1)...(19): siRNA sense strand
ccacggaguuugccugcau

SEQ ID NO: 607190 - RNA, 19 nt, Homo sapiens
  misc_RNA (1)...(19): siRNA sense strand
cuucauggccagccuuaua

SEQ ID NO: 607191 - RNA, 19 nt, Homo sapiens
  misc_RNA (1)...(19): siRNA sense strand
agaggaugcugaugagaau

SEQ ID NO: 607192 - RNA, 19 nt, Homo sapiens
  misc_RNA (1)...(19): siRNA sense strand
gcugaaaccugugcuaagc

SEQ ID NO: 607193 - RNA, 19 nt, Homo sapiens
  misc_RNA (1)...(19): siRNA sense strand
ggaguuugccugcaugaag

SEQ ID NO: 607194 - RNA, 19 nt, Homo sapiens
  misc_RNA (1)...(19): siRNA sense strand
cagaggaugcugaugagaa

SEQ ID NO: 607195 - RNA, 19 nt, Homo sapiens
  misc_RNA (1)...(19): siRNA sense strand
ggaagaggcguggagugaa

SEQ ID NO: 607196 - RNA, 19 nt, Homo sapiens
  misc_RNA (1)...(19): siRNA sense strand
ggaugcugaugagaauauu

SEQ ID NO: 607197 - RNA, 19 nt, Homo sapiens
  misc_RNA (1)...(19): siRNA sense strand
gggaagcacuauggcaucu

SEQ ID NO: 607198 - RNA, 19 nt, Homo sapiens
  misc_RNA (1)...(19): siRNA sense strand
cagcugaaaccugugcuaa

SEQ ID NO: 607199 - RNA, 19 nt, Homo sapiens
  misc_RNA (1)...(19): siRNA sense strand
ggcggaggcucaucuacag

SEQ ID NO: 607200 - RNA, 19 nt, Homo sapiens
  misc_RNA (1)...(19): siRNA sense strand
cagcaaugacccugaguuc

SEQ ID NO: 607201 - RNA, 19 nt, Homo sapiens
  misc_RNA (1)...(19): siRNA sense strand
gccagaggaugcugaugag

SEQ ID NO: 607202 - RNA, 19 nt, Homo sapiens
  misc_RNA (1)...(19): siRNA sense strand
gaugagaauauugauguca

SEQ ID NO: 607203 - RNA, 19 nt, Homo sapiens
  misc_RNA (1)...(19): siRNA sense strand
uggaagaggcguggaguga

SEQ ID NO: 607204 - RNA, 19 nt, Homo sapiens
  misc_RNA (1)...(19): siRNA sense strand
cugaugagaauauugaugu

SEQ ID NO: 607205 - RNA, 19 nt, Homo sapiens
  misc_RNA (1)...(19): siRNA sense strand
agaccaacagcucugauga

SEQ ID NO: 607206 - RNA, 19 nt, Homo sapiens
  misc_RNA (1)...(19): siRNA sense strand
auauugaugucaccagcaa

SEQ ID NO: 607207 - RNA, 19 nt, Homo sapiens
  misc_RNA (1)...(19): siRNA sense strand
ggaagcacuauggcaucua

SEQ ID NO: 607208 - RNA, 19 nt, Homo sapiens
  misc_RNA (1)...(19): siRNA sense strand
ugaaggccuugguccucuu

SEQ ID NO: 607209 - RNA, 19 nt, Homo sapiens
  misc_RNA (1)...(19): siRNA sense strand
gcagcgggaagcacuaugg

SEQ ID NO: 607210 - RNA, 19 nt, Homo sapiens
  misc_RNA (1)...(19): siRNA sense strand
gaggaugcugaugagaaua

SEQ ID NO: 607211 - RNA, 19 nt, Homo sapiens
  misc_RNA (1)...(19): siRNA sense strand
gcagcagcgggaagcacua

SEQ ID NO: 607212 - RNA, 19 nt, Homo sapiens
  misc_RNA (1)...(19): siRNA sense strand
gcugaugagaauauugaug

SEQ ID NO: 607213 - RNA, 19 nt, Homo sapiens
  misc_RNA (1)...(19): siRNA sense strand
ccugccggcugaagaagug

SEQ ID NO: 607214 - RNA, 19 nt, Homo sapiens
  misc_RNA (1)...(19): siRNA sense strand
guacggcggaggcucaucu

SEQ ID NO: 607215 - RNA, 19 nt, Homo sapiens
  misc_RNA (1)...(19): siRNA sense strand
gaccaacagcucugaugag

SEQ ID NO: 607216 - RNA, 19 nt, Homo sapiens
  misc_RNA (1)...(19): siRNA sense strand
gaagcacuauggcaucuau

SEQ ID NO: 607217 - RNA, 19 nt, Homo sapiens
  misc_RNA (1)...(19): siRNA sense strand
ccaagaaccugccuguguu

SEQ ID NO: 607218 - RNA, 19 nt, Homo sapiens
  misc_RNA (1)...(19): siRNA sense strand
gaaggauccugagcacgua

SEQ ID NO: 607219 - RNA, 19 nt, Homo sapiens
  misc_RNA (1)...(19): siRNA sense strand
gaagaggcguggagugaac

SEQ ID NO: 607220 - RNA, 19 nt, Homo sapiens
  misc_RNA (1)...(19): siRNA sense strand
gccaagaaccugccugugu

SEQ ID NO: 607221 - RNA, 19 nt, Homo sapiens
  misc_RNA (1)...(19): siRNA sense strand
ccacggaguuugccugcau

SEQ ID NO: 607222 - RNA, 19 nt, Homo sapiens
  misc_RNA (1)...(19): siRNA sense strand
cuucauggccagccuuaua

SEQ ID NO: 607223 - RNA, 19 nt, Homo sapiens
  misc_RNA (1)...(19): siRNA sense strand
agaggaugcugaugagaau

SEQ ID NO: 607224 - RNA, 19 nt, Homo sapiens
  misc_RNA (1)...(19): siRNA sense strand
gcugaaaccugugcuaagc

SEQ ID NO: 607225 - RNA, 19 nt, Homo sapiens
  misc_RNA (1)...(19): siRNA sense strand
ggaguuugccugcaugaag

SEQ ID NO: 607226 - RNA, 19 nt, Homo sapiens
  misc_RNA (1)...(19): siRNA sense strand
cagaggaugcugaugagaa

SEQ ID NO: 607227 - RNA, 19 nt, Homo sapiens
  misc_RNA (1)...(19): siRNA sense strand
ggaagaggcguggagugaa

SEQ ID NO: 607228 - RNA, 19 nt, Homo sapiens
  misc_RNA (1)...(19): siRNA sense strand
ggaugcugaugagaauauu

SEQ ID NO: 607229 - RNA, 19 nt, Homo sapiens
  misc_RNA (1)...(19): siRNA sense strand
gggaagcacuauggcaucu

SEQ ID NO: 607230 - RNA, 19 nt, Homo sapiens
  misc_RNA (1)...(19): siRNA sense strand
cagcugaaaccugugcuaa

SEQ ID NO: 607231 - RNA, 19 nt, Homo sapiens
  misc_RNA (1)...(19): siRNA sense strand
ggcggaggcucaucuacag

SEQ ID NO: 607232 - RNA, 19 nt, Homo sapiens
  misc_RNA (1)...(19): siRNA sense strand
cagcaaugacccugaguuc

SEQ ID NO: 607233 - RNA, 19 nt, Homo sapiens
  misc_RNA (1)...(19): siRNA sense strand
gccagaggaugcugaugag

SEQ ID NO: 607234 - RNA, 19 nt, Homo sapiens
  misc_RNA (1)...(19): siRNA sense strand
gaugagaauauugauguca

SEQ ID NO: 607235 - RNA, 19 nt, Homo sapiens
  misc_RNA (1)...(19): siRNA sense strand
uggaagaggcguggaguga

SEQ ID NO: 607236 - RNA, 19 nt, Homo sapiens
  misc_RNA (1)...(19): siRNA sense strand
cugaugagaauauugaugu

SEQ ID NO: 607237 - RNA, 19 nt, Homo sapiens
  misc_RNA (1)...(19): siRNA sense strand
agaccaacagcucugauga

SEQ ID NO: 607238 - RNA, 19 nt, Homo sapiens
  misc_RNA (1)...(19): siRNA sense strand
auauugaugucaccagcaa

SEQ ID NO: 607239 - RNA, 19 nt, Homo sapiens
  misc_RNA (1)...(19): siRNA sense strand
ggaagcacuauggcaucua

SEQ ID NO: 607240 - RNA, 19 nt, Homo sapiens
  misc_RNA (1)...(19): siRNA sense strand
ugaaggccuugguccucuu

SEQ ID NO: 607241 - RNA, 19 nt, Homo sapiens
  misc_RNA (1)...(19): siRNA sense strand
gcagcgggaagcacuaugg

SEQ ID NO: 607242 - RNA, 19 nt, Homo sapiens
  misc_RNA (1)...(19): siRNA sense strand
gaggaugcugaugagaaua

SEQ ID NO: 607243 - RNA, 19 nt, Homo sapiens
  misc_RNA (1)...(19): siRNA sense strand
gcagcagcgggaagcacua

SEQ ID NO: 607244 - RNA, 19 nt, Homo sapiens
  misc_RNA (1)...(19): siRNA sense strand
gcugaugagaauauugaug

SEQ ID NO: 607245 - RNA, 19 nt, Homo sapiens
  misc_RNA (1)...(19): siRNA sense strand
ccugccggcugaagaagug

SEQ ID NO: 607246 - RNA, 19 nt, Homo sapiens
  misc_RNA (1)...(19): siRNA sense strand
guacggcggaggcucaucu

SEQ ID NO: 607247 - RNA, 19 nt, Homo sapiens
  misc_RNA (1)...(19): siRNA sense strand
gaccaacagcucugaugag

SEQ ID NO: 607248 - RNA, 19 nt, Homo sapiens
  misc_RNA (1)...(19): siRNA sense strand
aaucagaacugggacguua

SEQ ID NO: 607249 - RNA, 19 nt, Homo sapiens
  misc_RNA (1)...(19): siRNA sense strand
gcaucaccuguaucuauua

SEQ ID NO: 607250 - RNA, 19 nt, Homo sapiens
  misc_RNA (1)...(19): siRNA sense strand
ugcaucaccuguaucuauu

SEQ ID NO: 607251 - RNA, 19 nt, Homo sapiens
  misc_RNA (1)...(19): siRNA sense strand
cugcaucaccuguaucuau

SEQ ID NO: 607252 - RNA, 19 nt, Homo sapiens
  misc_RNA (1)...(19): siRNA sense strand
uaaggcacguugacaaucc

SEQ ID NO: 607253 - RNA, 19 nt, Homo sapiens
  misc_RNA (1)...(19): siRNA sense strand
caucaccuguaucuauuac

SEQ ID NO: 607254 - RNA, 19 nt, Homo sapiens
  misc_RNA (1)...(19): siRNA sense strand
caacgggcucggguacgua

SEQ ID NO: 607255 - RNA, 19 nt, Homo sapiens
  misc_RNA (1)...(19): siRNA sense strand
cguaaggcacguugacaau

SEQ ID NO: 607256 - RNA, 19 nt, Homo sapiens
  misc_RNA (1)...(19): siRNA sense strand
guaaggcacguugacaauc

SEQ ID NO: 607257 - RNA, 19 nt, Homo sapiens
  misc_RNA (1)...(19): siRNA sense strand
ggcgcugcaucaccuguau

SEQ ID NO: 607258 - RNA, 19 nt, Homo sapiens
  misc_RNA (1)...(19): siRNA sense strand
cuguaucuauuaccugaau

SEQ ID NO: 607259 - RNA, 19 nt, Homo sapiens
  misc_RNA (1)...(19): siRNA sense strand
acagaaagguguccaagua

SEQ ID NO: 607260 - RNA, 19 nt, Homo sapiens
  misc_RNA (1)...(19): siRNA sense strand
aaucagaacugggacguua

SEQ ID NO: 607261 - RNA, 19 nt, Homo sapiens
  misc_RNA (1)...(19): siRNA sense strand
caacaucgagccacucuuu

SEQ ID NO: 607262 - RNA, 19 nt, Homo sapiens
  misc_RNA (1)...(19): siRNA sense strand
caaagacaaguaucagcua

SEQ ID NO: 607263 - RNA, 19 nt, Homo sapiens
  misc_RNA (1)...(19): siRNA sense strand
gcaucaccuguaucuauua

SEQ ID NO: 607264 - RNA, 19 nt, Homo sapiens
  misc_RNA (1)...(19): siRNA sense strand
gcuagcaucaggacagaaa

SEQ ID NO: 607265 - RNA, 19 nt, Homo sapiens
  misc_RNA (1)...(19): siRNA sense strand
cgccaucacugucugguau

SEQ ID NO: 607266 - RNA, 19 nt, Homo sapiens
  misc_RNA (1)...(19): siRNA sense strand
ugcaucaccuguaucuauu

SEQ ID NO: 607267 - RNA, 19 nt, Homo sapiens
  misc_RNA (1)...(19): siRNA sense strand
ccaucacugucugguauuu

SEQ ID NO: 607268 - RNA, 19 nt, Homo sapiens
  misc_RNA (1)...(19): siRNA sense strand
uuugaccgguugcucauuu

SEQ ID NO: 607269 - RNA, 19 nt, Homo sapiens
  misc_RNA (1)...(19): siRNA sense strand
cugcaucaccuguaucuau

SEQ ID NO: 607270 - RNA, 19 nt, Homo sapiens
  misc_RNA (1)...(19): siRNA sense strand
cagcagccaaagacaagua

SEQ ID NO: 607271 - RNA, 19 nt, Homo sapiens
  misc_RNA (1)...(19): siRNA sense strand
cagccuaugccaccaggua

SEQ ID NO: 607272 - RNA, 19 nt, Homo sapiens
  misc_RNA (1)...(19): siRNA sense strand
agacaaguaucagcuagca

SEQ ID NO: 607273 - RNA, 19 nt, Homo sapiens
  misc_RNA (1)...(19): siRNA sense strand
uaaggcacguugacaaucc

SEQ ID NO: 607274 - RNA, 19 nt, Homo sapiens
  misc_RNA (1)...(19): siRNA sense strand
cagcuagcaucaggacaga

SEQ ID NO: 607275 - RNA, 19 nt, Homo sapiens
  misc_RNA (1)...(19): siRNA sense strand
gggcagcagccaaagacaa

SEQ ID NO: 607276 - RNA, 19 nt, Homo sapiens
  misc_RNA (1)...(19): siRNA sense strand
ccagguacgccaucacugu

SEQ ID NO: 607277 - RNA, 19 nt, Homo sapiens
  misc_RNA (1)...(19): siRNA sense strand
caucaccuguaucuauuac

SEQ ID NO: 607278 - RNA, 19 nt, Homo sapiens
  misc_RNA (1)...(19): siRNA sense strand
cagccaaagacaaguauca

SEQ ID NO: 607279 - RNA, 19 nt, Homo sapiens
  misc_RNA (1)...(19): siRNA sense strand
caacgggcucggguacgua

SEQ ID NO: 607280 - RNA, 19 nt, Homo sapiens
  misc_RNA (1)...(19): siRNA sense strand
acaucgagccacucuuuga

SEQ ID NO: 607281 - RNA, 19 nt, Homo sapiens
  misc_RNA (1)...(19): siRNA sense strand
guaaggcacguugacaauc

SEQ ID NO: 607282 - RNA, 19 nt, Homo sapiens
  misc_RNA (1)...(19): siRNA sense strand
cguaaggcacguugacaau

SEQ ID NO: 607283 - RNA, 19 nt, Homo sapiens
  misc_RNA (1)...(19): siRNA sense strand
ggcgcugcaucaccuguau

SEQ ID NO: 607284 - RNA, 19 nt, Homo sapiens
  misc_RNA (1)...(19): siRNA sense strand
cuguaucuauuaccugaau

SEQ ID NO: 607285 - RNA, 19 nt, Homo sapiens
  misc_RNA (1)...(19): siRNA sense strand
acagaaagguguccaagua

SEQ ID NO: 607286 - RNA, 19 nt, Homo sapiens
  misc_RNA (1)...(19): siRNA sense strand
aaucagaacugggacguua

SEQ ID NO: 607287 - RNA, 19 nt, Homo sapiens
  misc_RNA (1)...(19): siRNA sense strand
caacaucgagccacucuuu

SEQ ID NO: 607288 - RNA, 19 nt, Homo sapiens
  misc_RNA (1)...(19): siRNA sense strand
caaagacaaguaucagcua

SEQ ID NO: 607289 - RNA, 19 nt, Homo sapiens
  misc_RNA (1)...(19): siRNA sense strand
gcaucaccuguaucuauua

SEQ ID NO: 607290 - RNA, 19 nt, Homo sapiens
  misc_RNA (1)...(19): siRNA sense strand
gcuagcaucaggacagaaa

SEQ ID NO: 607291 - RNA, 19 nt, Homo sapiens
  misc_RNA (1)...(19): siRNA sense strand
cgccaucacugucugguau

SEQ ID NO: 607292 - RNA, 19 nt, Homo sapiens
  misc_RNA (1)...(19): siRNA sense strand
ugcaucaccuguaucuauu

SEQ ID NO: 607293 - RNA, 19 nt, Homo sapiens
  misc_RNA (1)...(19): siRNA sense strand
ccaucacugucugguauuu

SEQ ID NO: 607294 - RNA, 19 nt, Homo sapiens
  misc_RNA (1)...(19): siRNA sense strand
uuugaccgguugcucauuu

SEQ ID NO: 607295 - RNA, 19 nt, Homo sapiens
  misc_RNA (1)...(19): siRNA sense strand
cugcaucaccuguaucuau

SEQ ID NO: 607296 - RNA, 19 nt, Homo sapiens
  misc_RNA (1)...(19): siRNA sense strand
cagcagccaaagacaagua

SEQ ID NO: 607297 - RNA, 19 nt, Homo sapiens
  misc_RNA (1)...(19): siRNA sense strand
cagccuaugccaccaggua

SEQ ID NO: 607298 - RNA, 19 nt, Homo sapiens
  misc_RNA (1)...(19): siRNA sense strand
agacaaguaucagcuagca

SEQ ID NO: 607299 - RNA, 19 nt, Homo sapiens
  misc_RNA (1)...(19): siRNA sense strand
uaaggcacguugacaaucc

SEQ ID NO: 607300 - RNA, 19 nt, Homo sapiens
  misc_RNA (1)...(19): siRNA sense strand
cagcuagcaucaggacaga

SEQ ID NO: 607301 - RNA, 19 nt, Homo sapiens
  misc_RNA (1)...(19): siRNA sense strand
gggcagcagccaaagacaa

SEQ ID NO: 607302 - RNA, 19 nt, Homo sapiens
  misc_RNA (1)...(19): siRNA sense strand
ccagguacgccaucacugu

SEQ ID NO: 607303 - RNA, 19 nt, Homo sapiens
  misc_RNA (1)...(19): siRNA sense strand
caucaccuguaucuauuac

SEQ ID NO: 607304 - RNA, 19 nt, Homo sapiens
  misc_RNA (1)...(19): siRNA sense strand
cagccaaagacaaguauca

SEQ ID NO: 607305 - RNA, 19 nt, Homo sapiens
  misc_RNA (1)...(19): siRNA sense strand
caacgggcucggguacgua

SEQ ID NO: 607306 - RNA, 19 nt, Homo sapiens
  misc_RNA (1)...(19): siRNA sense strand
acaucgagccacucuuuga

SEQ ID NO: 607307 - RNA, 19 nt, Homo sapiens
  misc_RNA (1)...(19): siRNA sense strand
guaaggcacguugacaauc

SEQ ID NO: 607308 - RNA, 19 nt, Homo sapiens
  misc_RNA (1)...(19): siRNA sense strand
cguaaggcacguugacaau

SEQ ID NO: 607309 - RNA, 19 nt, Homo sapiens
  misc_RNA (1)...(19): siRNA sense strand
ggcgcugcaucaccuguau

SEQ ID NO: 607310 - RNA, 19 nt, Homo sapiens
  misc_RNA (1)...(19): siRNA sense strand
cuguaucuauuaccugaau

SEQ ID NO: 607311 - RNA, 19 nt, Homo sapiens
  misc_RNA (1)...(19): siRNA sense strand
caaggaaccucgugucauu

SEQ ID NO: 607312 - RNA, 19 nt, Homo sapiens
  misc_RNA (1)...(19): siRNA sense strand
ggaacuauaucaacaaauc

SEQ ID NO: 607313 - RNA, 19 nt, Homo sapiens
  misc_RNA (1)...(19): siRNA sense strand
gggcauguguggaaaguaa

SEQ ID NO: 607314 - RNA, 19 nt, Homo sapiens
  misc_RNA (1)...(19): siRNA sense strand
gaaguaugcuguagguaug

SEQ ID NO: 607315 - RNA, 19 nt, Homo sapiens
  misc_RNA (1)...(19): siRNA sense strand
cgaaggagaugaccauaug

SEQ ID NO: 607316 - RNA, 19 nt, Homo sapiens
  misc_RNA (1)...(19): siRNA sense strand
gaaauugcaacaacaguuu

SEQ ID NO: 607317 - RNA, 19 nt, Homo sapiens
  misc_RNA (1)...(19): siRNA sense strand
aaacagcccuuucaaucuu

SEQ ID NO: 607318 - RNA, 19 nt, Homo sapiens
  misc_RNA (1)...(19): siRNA sense strand
gcagaagcauccuaagugu

SEQ ID NO: 607319 - RNA, 19 nt, Homo sapiens
  misc_RNA (1)...(19): siRNA sense strand
gaagaguauuuaucagguu

SEQ ID NO: 607320 - RNA, 19 nt, Homo sapiens
  misc_RNA (1)...(19): siRNA sense strand
gaaagggcauguguggaaa

SEQ ID NO: 607321 - RNA, 19 nt, Homo sapiens
  misc_RNA (1)...(19): siRNA sense strand
guagaucccuuugaaguau

SEQ ID NO: 607322 - RNA, 19 nt, Homo sapiens
  misc_RNA (1)...(19): siRNA sense strand
agaagcauccuaaguguua

SEQ ID NO: 607323 - RNA, 19 nt, Homo sapiens
  misc_RNA (1)...(19): siRNA sense strand
guaaacagcaaauagaaga

SEQ ID NO: 607324 - RNA, 19 nt, Homo sapiens
  misc_RNA (1)...(19): siRNA sense strand
gagaugaaauugcaacaac

SEQ ID NO: 607325 - RNA, 19 nt, Homo sapiens
  misc_RNA (1)...(19): siRNA sense strand
ggaggaaugggaacuauau

SEQ ID NO: 607326 - RNA, 19 nt, Homo sapiens
  misc_RNA (1)...(19): siRNA sense strand
gcaauccgaagaguauuua

SEQ ID NO: 607327 - RNA, 19 nt, Homo sapiens
  misc_RNA (1)...(19): siRNA sense strand
ugaugacgaucuuguuuga

SEQ ID NO: 607328 - RNA, 19 nt, Homo sapiens
  misc_RNA (1)...(19): siRNA sense strand
gguagaucccuuugaagua

SEQ ID NO: 607329 - RNA, 19 nt, Homo sapiens
  misc_RNA (1)...(19): siRNA sense strand
ggauaaacaacaaucagaa

SEQ ID NO: 607330 - RNA, 19 nt, Homo sapiens
  misc_RNA (1)...(19): siRNA sense strand
ggaaugggaacuauaucaa

SEQ ID NO: 607331 - RNA, 19 nt, Homo sapiens
  misc_RNA (1)...(19): siRNA sense strand
aaagaucccauucuagaaa

SEQ ID NO: 607332 - RNA, 19 nt, Homo sapiens
  misc_RNA (1)...(19): siRNA sense strand
cauuuacaguugcuucuuu

SEQ ID NO: 607333 - RNA, 19 nt, Homo sapiens
  misc_RNA (1)...(19): siRNA sense strand
gcaucaggauaaacaacaa

SEQ ID NO: 607334 - RNA, 19 nt, Homo sapiens
  misc_RNA (1)...(19): siRNA sense strand
cagaaaagcugaugacgau

SEQ ID NO: 607335 - RNA, 19 nt, Homo sapiens
  misc_RNA (1)...(19): siRNA sense strand
gaaccucgugucauuccua

SEQ ID NO: 607336 - RNA, 19 nt, Homo sapiens
  misc_RNA (1)...(19): siRNA sense strand
auagaagacuuugcagaaa

SEQ ID NO: 607337 - RNA, 19 nt, Homo sapiens
  misc_RNA (1)...(19): siRNA sense strand
auaaagaucccauucuaga

SEQ ID NO: 607338 - RNA, 19 nt, Homo sapiens
  misc_RNA (1)...(19): siRNA sense strand
agaaagggcauguguggaa

SEQ ID NO: 607339 - RNA, 19 nt, Homo sapiens
  misc_RNA (1)...(19): siRNA sense strand
aaccauccauuuacaguug

SEQ ID NO: 607340 - RNA, 19 nt, Homo sapiens
  misc_RNA (1)...(19): siRNA sense strand
gcugaugacgaucuuguuu

SEQ ID NO: 607341 - RNA, 19 nt, Homo sapiens
  misc_RNA (1)...(19): siRNA sense strand
ugaaguaugcuguagguau

SEQ ID NO: 607342 - RNA, 19 nt, Homo sapiens
  misc_RNA (1)...(19): siRNA sense strand
aauagaagacuuugcagaa

SEQ ID NO: 607343 - RNA, 19 nt, Homo sapiens
  misc_RNA (1)...(19): siRNA sense strand
uaaagaucccauucuagaa

SEQ ID NO: 607344 - RNA, 19 nt, Homo sapiens
  misc_RNA (1)...(19): siRNA sense strand
augacgaucuuguuugaaa

SEQ ID NO: 607345 - RNA, 19 nt, Homo sapiens
  misc_RNA (1)...(19): siRNA sense strand
gaagucacuggcacucuga

SEQ ID NO: 607346 - RNA, 19 nt, Homo sapiens
  misc_RNA (1)...(19): siRNA sense strand
ucagcaauccgaagaguau

SEQ ID NO: 607347 - RNA, 19 nt, Homo sapiens
  misc_RNA (1)...(19): siRNA sense strand
gcucgcagaagcauccuaa

SEQ ID NO: 607348 - RNA, 19 nt, Homo sapiens
  misc_RNA (1)...(19): siRNA sense strand
cuaaguaaacagcaaauag

SEQ ID NO: 607349 - RNA, 19 nt, Homo sapiens
  misc_RNA (1)...(19): siRNA sense strand
gggaggaaugggaacuaua

SEQ ID NO: 607350 - RNA, 19 nt, Homo sapiens
  misc_RNA (1)...(19): siRNA sense strand
ugggaacuauaucaacaaa

SEQ ID NO: 607351 - RNA, 19 nt, Homo sapiens
  misc_RNA (1)...(19): siRNA sense strand
aaugggaacuauaucaaca

SEQ ID NO: 607352 - RNA, 19 nt, Homo sapiens
  misc_RNA (1)...(19): siRNA sense strand
gcacucugauugcccuucu

SEQ ID NO: 607353 - RNA, 19 nt, Homo sapiens
  misc_RNA (1)...(19): siRNA sense strand
ugaaauugcaacaacaguu

SEQ ID NO: 607354 - RNA, 19 nt, Homo sapiens
  misc_RNA (1)...(19): siRNA sense strand
agaaaguuguagcaaggaa

SEQ ID NO: 607355 - RNA, 19 nt, Homo sapiens
  misc_RNA (1)...(19): siRNA sense strand
ucaggugcaucaggauaaa

SEQ ID NO: 607356 - RNA, 19 nt, Homo sapiens
  misc_RNA (1)...(19): siRNA sense strand
ggguagaucccuuugaagu

SEQ ID NO: 607357 - RNA, 19 nt, Homo sapiens
  misc_RNA (1)...(19): siRNA sense strand
uagaagacuuugcagaaaa

SEQ ID NO: 607358 - RNA, 19 nt, Homo sapiens
  misc_RNA (1)...(19): siRNA sense strand
gaguauuuaucagguugaa

SEQ ID NO: 607359 - RNA, 19 nt, Homo sapiens
  misc_RNA (1)...(19): siRNA sense strand
gcaaggaaccucgugucau

SEQ ID NO: 607360 - RNA, 19 nt, Homo sapiens
  misc_RNA (1)...(19): siRNA sense strand
gaaugggaacuauaucaac

SEQ ID NO: 607361 - RNA, 19 nt, Homo sapiens
  misc_RNA (1)...(19): siRNA sense strand
gaugaagaaaguuguagca

SEQ ID NO: 607362 - RNA, 19 nt, Homo sapiens
  misc_RNA (1)...(19): siRNA sense strand
guguuggccuccugggaaa

SEQ ID NO: 607363 - RNA, 19 nt, Homo sapiens
  misc_RNA (1)...(19): siRNA sense strand
aaagucagcaauccgaaga

SEQ ID NO: 607364 - RNA, 19 nt, Homo sapiens
  misc_RNA (1)...(19): siRNA sense strand
uguggaaaguaauguagau

SEQ ID NO: 607365 - RNA, 19 nt, Homo sapiens
  misc_RNA (1)...(19): siRNA sense strand
aaaggcagaugggaggaau

SEQ ID NO: 607366 - RNA, 19 nt, Homo sapiens
  misc_RNA (1)...(19): siRNA sense strand
auggguagaucccuuugaa

SEQ ID NO: 607367 - RNA, 19 nt, Homo sapiens
  misc_RNA (1)...(19): siRNA sense strand
cauauggguagaucccuuu

SEQ ID NO: 607368 - RNA, 19 nt, Homo sapiens
  misc_RNA (1)...(19): siRNA sense strand
agaugaaauugcaacaaca

SEQ ID NO: 607369 - RNA, 19 nt, Homo sapiens
  misc_RNA (1)...(19): siRNA sense strand
cgcagaagcauccuaagug

SEQ ID NO: 607370 - RNA, 19 nt, Homo sapiens
  misc_RNA (1)...(19): siRNA sense strand
gaaacauacagaagucacu

SEQ ID NO: 607371 - RNA, 19 nt, Homo sapiens
  misc_RNA (1)...(19): siRNA sense strand
cuguagguauggugagaaa

SEQ ID NO: 607372 - RNA, 19 nt, Homo sapiens
  misc_RNA (1)...(19): siRNA sense strand
gcauguguggaaaguaaug

SEQ ID NO: 607373 - RNA, 19 nt, Homo sapiens
  misc_RNA (1)...(19): siRNA sense strand
gcaccggcuggacagaauu

SEQ ID NO: 607374 - RNA, 19 nt, Homo sapiens
  misc_RNA (1)...(19): siRNA sense strand
gaugaaauugcaacaacag

SEQ ID NO: 607375 - RNA, 19 nt, Homo sapiens
  misc_RNA (1)...(19): siRNA sense strand
gcccuuucaaucuugguua

SEQ ID NO: 607376 - RNA, 19 nt, Homo sapiens
  misc_RNA (1)...(19): siRNA sense strand
aaccucgugucauuccuaa

SEQ ID NO: 607377 - RNA, 19 nt, Homo sapiens
  misc_RNA (1)...(19): siRNA sense strand
gaaggagaugaccauaugg

SEQ ID NO: 607378 - RNA, 19 nt, Homo sapiens
  misc_RNA (1)...(19): siRNA sense strand
gaagcauccuaaguguuac

SEQ ID NO: 607379 - RNA, 19 nt, Homo sapiens
  misc_RNA (1)...(19): siRNA sense strand
cagaagcauccuaaguguu

SEQ ID NO: 607380 - RNA, 19 nt, Homo sapiens
  misc_RNA (1)...(19): siRNA sense strand
aaacuugaaacagcccuuu

SEQ ID NO: 607381 - RNA, 19 nt, Homo sapiens
  misc_RNA (1)...(19): siRNA sense strand
uuugaaacauacagaaguc

SEQ ID NO: 607382 - RNA, 19 nt, Homo sapiens
  misc_RNA (1)...(19): siRNA sense strand
ccgaaggagaugaccauau

SEQ ID NO: 607383 - RNA, 19 nt, Homo sapiens
  misc_RNA (1)...(19): siRNA sense strand
aaaccauccauuuacaguu

SEQ ID NO: 607384 - RNA, 19 nt, Homo sapiens
  misc_RNA (1)...(19): siRNA sense strand
gcaacaacaguuuucuuug

SEQ ID NO: 607385 - RNA, 19 nt, Homo sapiens
  misc_RNA (1)...(19): siRNA sense strand
caaucuugguuacaaaucc

SEQ ID NO: 607386 - RNA, 19 nt, Homo sapiens
  misc_RNA (1)...(19): siRNA sense strand
ugggaggaaugggaacuau

SEQ ID NO: 607387 - RNA, 19 nt, Homo sapiens
  misc_RNA (1)...(19): siRNA sense strand
acagcaaauagaagacuuu

SEQ ID NO: 607388 - RNA, 19 nt, Homo sapiens
  misc_RNA (1)...(19): siRNA sense strand
gaaaagcugaugacgaucu

SEQ ID NO: 607389 - RNA, 19 nt, Homo sapiens
  misc_RNA (1)...(19): siRNA sense strand
gaucaaagcuacagcaaga

SEQ ID NO: 607390 - RNA, 19 nt, Homo sapiens
  misc_RNA (1)...(19): siRNA sense strand
ggacagcgauguaucaaga

SEQ ID NO: 607391 - RNA, 19 nt, Homo sapiens
  misc_RNA (1)...(19): siRNA sense strand
ccacucggaucaucuauua

SEQ ID NO: 607392 - RNA, 19 nt, Homo sapiens
  misc_RNA (1)...(19): siRNA sense strand
gaacagaccaaaccucuaa

SEQ ID NO: 607393 - RNA, 19 nt, Homo sapiens
  misc_RNA (1)...(19): siRNA sense strand
ucaagaagcucacagacaa

SEQ ID NO: 607394 - RNA, 19 nt, Homo sapiens
  misc_RNA (1)...(19): siRNA sense strand
ggauaaagaucaugacagu

SEQ ID NO: 607395 - RNA, 19 nt, Homo sapiens
  misc_RNA (1)...(19): siRNA sense strand
gaccaaacauuuaaagugu

SEQ ID NO: 607396 - RNA, 19 nt, Homo sapiens
  misc_RNA (1)...(19): siRNA sense strand
gcacauccacuaccaauug

SEQ ID NO: 607397 - RNA, 19 nt, Homo sapiens
  misc_RNA (1)...(19): siRNA sense strand
aaucagaggucucaaaguu

SEQ ID NO: 607398 - RNA, 19 nt, Homo sapiens
  misc_RNA (1)...(19): siRNA sense strand
gaacuaauagcaauucgaa

SEQ ID NO: 607399 - RNA, 19 nt, Homo sapiens
  misc_RNA (1)...(19): siRNA sense strand
ugaaugaagucccagauga

SEQ ID NO: 607400 - RNA, 19 nt, Homo sapiens
  misc_RNA (1)...(19): siRNA sense strand
ggaaggcagucauguguca

SEQ ID NO: 607401 - RNA, 19 nt, Homo sapiens
  misc_RNA (1)...(19): siRNA sense strand
guacaguagcucaauauuu

SEQ ID NO: 607402 - RNA, 19 nt, Homo sapiens
  misc_RNA (1)...(19): siRNA sense strand
guacacagcacauccacua

SEQ ID NO: 607403 - RNA, 19 nt, Homo sapiens
  misc_RNA (1)...(19): siRNA sense strand
gaaaauaccgaguuuguaa

SEQ ID NO: 607404 - RNA, 19 nt, Homo sapiens
  misc_RNA (1)...(19): siRNA sense strand
ggaauaugaugcucaacau

SEQ ID NO: 607405 - RNA, 19 nt, Homo sapiens
  misc_RNA (1)...(19): siRNA sense strand
ggguaaagaccaaacauuu

SEQ ID NO: 607406 - RNA, 19 nt, Homo sapiens
  misc_RNA (1)...(19): siRNA sense strand
gugcaaauccaccaugaua

SEQ ID NO: 607407 - RNA, 19 nt, Homo sapiens
  misc_RNA (1)...(19): siRNA sense strand
ggaccugacuaacaugguu

SEQ ID NO: 607408 - RNA, 19 nt, Homo sapiens
  misc_RNA (1)...(19): siRNA sense strand
aaucagacuuccacaauga

SEQ ID NO: 607409 - RNA, 19 nt, Homo sapiens
  misc_RNA (1)...(19): siRNA sense strand
ggaaagacaccaguauaug

SEQ ID NO: 607410 - RNA, 19 nt, Homo sapiens
  misc_RNA (1)...(19): siRNA sense strand
caucugaguuugacuuuua

SEQ ID NO: 607411 - RNA, 19 nt, Homo sapiens
  misc_RNA (1)...(19): siRNA sense strand
gaaacaauguagggaagau

SEQ ID NO: 607412 - RNA, 19 nt, Homo sapiens
  misc_RNA (1)...(19): siRNA sense strand
gaagauuaccggccaggaa

SEQ ID NO: 607413 - RNA, 19 nt, Homo sapiens
  misc_RNA (1)...(19): siRNA sense strand
gggauaggguugauaugga

SEQ ID NO: 607414 - RNA, 19 nt, Homo sapiens
  misc_RNA (1)...(19): siRNA sense strand
caagacaccuucccuccau

SEQ ID NO: 607415 - RNA, 19 nt, Homo sapiens
  misc_RNA (1)...(19): siRNA sense strand
ggccagaacuaauagcaau

SEQ ID NO: 607416 - RNA, 19 nt, Homo sapiens
  misc_RNA (1)...(19): siRNA sense strand
guggacagaugaaacgaaa

SEQ ID NO: 607417 - RNA, 19 nt, Homo sapiens
  misc_RNA (1)...(19): siRNA sense strand
ucauugaguucauguguga

SEQ ID NO: 607418 - RNA, 19 nt, Homo sapiens
  misc_RNA (1)...(19): siRNA sense strand
gaaaucagaggucucaaag

SEQ ID NO: 607419 - RNA, 19 nt, Homo sapiens
  misc_RNA (1)...(19): siRNA sense strand
caaacccuuuccaaucuuu

SEQ ID NO: 607420 - RNA, 19 nt, Homo sapiens
  misc_RNA (1)...(19): siRNA sense strand
gaaagacaccaguauaugc

SEQ ID NO: 607421 - RNA, 19 nt, Homo sapiens
  misc_RNA (1)...(19): siRNA sense strand
gcuauggaauguacaguag

SEQ ID NO: 607422 - RNA, 19 nt, Homo sapiens
  misc_RNA (1)...(19): siRNA sense strand
ggugaaacguguuggagau

SEQ ID NO: 607423 - RNA, 19 nt, Homo sapiens
  misc_RNA (1)...(19): siRNA sense strand
caauauggaggccggaaua

SEQ ID NO: 607424 - RNA, 19 nt, Homo sapiens
  misc_RNA (1)...(19): siRNA sense strand
gaccugauccauaccuuaa

SEQ ID NO: 607425 - RNA, 19 nt, Homo sapiens
  misc_RNA (1)...(19): siRNA sense strand
ggaccugauccauaccuua

SEQ ID NO: 607426 - RNA, 19 nt, Homo sapiens
  misc_RNA (1)...(19): siRNA sense strand
gaugaacuccagcuacuga

SEQ ID NO: 607427 - RNA, 19 nt, Homo sapiens
  misc_RNA (1)...(19): siRNA sense strand
guguggagccuauguuuaa

SEQ ID NO: 607428 - RNA, 19 nt, Homo sapiens
  misc_RNA (1)...(19): siRNA sense strand
gcaccaaugcugcaauaug

SEQ ID NO: 607429 - RNA, 19 nt, Homo sapiens
  misc_RNA (1)...(19): siRNA sense strand
caacagggagguaguagau

SEQ ID NO: 607430 - RNA, 19 nt, Homo sapiens
  misc_RNA (1)...(19): siRNA sense strand
gauaguaccaucacacauc

SEQ ID NO: 607431 - RNA, 19 nt, Homo sapiens
  misc_RNA (1)...(19): siRNA sense strand
caaucagacuuccacaaug

SEQ ID NO: 607432 - RNA, 19 nt, Homo sapiens
  misc_RNA (1)...(19): siRNA sense strand
gcacuucaagaugcaaaua

SEQ ID NO: 607433 - RNA, 19 nt, Homo sapiens
  misc_RNA (1)...(19): siRNA sense strand
acagguagcuuggccagaa

SEQ ID NO: 607434 - RNA, 19 nt, Homo sapiens
  misc_RNA (1)...(19): siRNA sense strand
caccaaugcugcaauaugg

SEQ ID NO: 607435 - RNA, 19 nt, Homo sapiens
  misc_RNA (1)...(19): siRNA sense strand
gcagggaggucugguuugg

SEQ ID NO: 607436 - RNA, 19 nt, Homo sapiens
  misc_RNA (1)...(19): siRNA sense strand
ggagguaguagauacaaug

SEQ ID NO: 607437 - RNA, 19 nt, Homo sapiens
  misc_RNA (1)...(19): siRNA sense strand
cgaaaggcauguauuagcu

SEQ ID NO: 607438 - RNA, 19 nt, Homo sapiens
  misc_RNA (1)...(19): siRNA sense strand
gaauaugaugcucaacauu

SEQ ID NO: 607439 - RNA, 19 nt, Homo sapiens
  misc_RNA (1)...(19): siRNA sense strand
ucacugaccagcugcguaa

SEQ ID NO: 607440 - RNA, 19 nt, Homo sapiens
  misc_RNA (1)...(19): siRNA sense strand
caaauccacacgcuucaaa

SEQ ID NO: 607441 - RNA, 19 nt, Homo sapiens
  misc_RNA (1)...(19): siRNA sense strand
ucacuaugauguggauauu

SEQ ID NO: 607442 - RNA, 19 nt, Homo sapiens
  misc_RNA (1)...(19): siRNA sense strand
gcaggacagcgauguauca

SEQ ID NO: 607443 - RNA, 19 nt, Homo sapiens
  misc_RNA (1)...(19): siRNA sense strand
gaccugccauguggaauau

SEQ ID NO: 607444 - RNA, 19 nt, Homo sapiens
  misc_RNA (1)...(19): siRNA sense strand
gcugggcacuugaaugaag

SEQ ID NO: 607445 - RNA, 19 nt, Homo sapiens
  misc_RNA (1)...(19): siRNA sense strand
gaacuccagcuacugacuu

SEQ ID NO: 607446 - RNA, 19 nt, Homo sapiens
  misc_RNA (1)...(19): siRNA sense strand
uguauuagcuuggaagaag

SEQ ID NO: 607447 - RNA, 19 nt, Homo sapiens
  misc_RNA (1)...(19): siRNA sense strand
ccagcagccugucaucuuc

SEQ ID NO: 607448 - RNA, 19 nt, Homo sapiens
  misc_RNA (1)...(19): siRNA sense strand
ccagaugacucaguacaag

SEQ ID NO: 607449 - RNA, 19 nt, Homo sapiens
  misc_RNA (1)...(19): siRNA sense strand
ccaaacauuuaaagugucu

SEQ ID NO: 607450 - RNA, 19 nt, Homo sapiens
  misc_RNA (1)...(19): siRNA sense strand
ucacacauccaucugaguu

SEQ ID NO: 607451 - RNA, 19 nt, Homo sapiens
  misc_RNA (1)...(19): siRNA sense strand
gaaaggcauguauuagcuu

SEQ ID NO: 607452 - RNA, 19 nt, Homo sapiens
  misc_RNA (1)...(19): siRNA sense strand
ucacagacaaucagacuuc

SEQ ID NO: 607453 - RNA, 19 nt, Homo sapiens
  misc_RNA (1)...(19): siRNA sense strand
ccacucgaggucuguaaua

SEQ ID NO: 607454 - RNA, 19 nt, Homo sapiens
  misc_RNA (1)...(19): siRNA sense strand
gggcagggaggucugguuu

SEQ ID NO: 607455 - RNA, 19 nt, Homo sapiens
  misc_RNA (1)...(19): siRNA sense strand
cagaugaacuccagcuacu

SEQ ID NO: 607456 - RNA, 19 nt, Homo sapiens
  misc_RNA (1)...(19): siRNA sense strand
gcaauucgaaaggcaugua

SEQ ID NO: 607457 - RNA, 19 nt, Homo sapiens
  misc_RNA (1)...(19): siRNA sense strand
gccugaagauaaaugcaaa

SEQ ID NO: 607458 - RNA, 19 nt, Homo sapiens
  misc_RNA (1)...(19): siRNA sense strand
ccucaaacccuuuccaauc

SEQ ID NO: 607459 - RNA, 19 nt, Homo sapiens
  misc_RNA (1)...(19): siRNA sense strand
guagacuggugaagagcaa

SEQ ID NO: 607460 - RNA, 19 nt, Homo sapiens
  misc_RNA (1)...(19): siRNA sense strand
cgaggucuguaauauagug

SEQ ID NO: 607461 - RNA, 19 nt, Homo sapiens
  misc_RNA (1)...(19): siRNA sense strand
aauguacaguagcucaaua

SEQ ID NO: 607462 - RNA, 19 nt, Homo sapiens
  misc_RNA (1)...(19): siRNA sense strand
aauaugaugcucaacauug

SEQ ID NO: 607463 - RNA, 19 nt, Homo sapiens
  misc_RNA (1)...(19): siRNA sense strand
acacauccaucugaguuug

SEQ ID NO: 607464 - RNA, 19 nt, Homo sapiens
  misc_RNA (1)...(19): siRNA sense strand
guauuagcuuggaagaaga

SEQ ID NO: 607465 - RNA, 19 nt, Homo sapiens
  misc_RNA (1)...(19): siRNA sense strand
aaacuuggaggaauuaaca

SEQ ID NO: 607466 - RNA, 19 nt, Homo sapiens
  misc_RNA (1)...(19): siRNA sense strand
uaugugggccuacagcuaa

SEQ ID NO: 607467 - RNA, 19 nt, Homo sapiens
  misc_RNA (1)...(19): siRNA sense strand
cauuuaaagugucuguuca

SEQ ID NO: 607468 - RNA, 19 nt, Homo sapiens
  misc_RNA (1)...(19): siRNA sense strand
gagcuccucuacagucaag

SEQ ID NO: 607469 - RNA, 19 nt, Homo sapiens
  misc_RNA (1)...(19): siRNA sense strand
gugaagagcaacaguaugg

SEQ ID NO: 607470 - RNA, 19 nt, Homo sapiens
  misc_RNA (1)...(19): siRNA sense strand
gcaaaaguauagucugcaa

SEQ ID NO: 607471 - RNA, 19 nt, Homo sapiens
  misc_RNA (1)...(19): siRNA sense strand
agaccaaaccucuaacaga

SEQ ID NO: 607472 - RNA, 19 nt, Homo sapiens
  misc_RNA (1)...(19): siRNA sense strand
gaguucaugugugagguuu

SEQ ID NO: 607473 - RNA, 19 nt, Homo sapiens
  misc_RNA (1)...(19): siRNA sense strand
uucgagagcugcugauuca

SEQ ID NO: 607474 - RNA, 19 nt, Homo sapiens
  misc_RNA (1)...(19): siRNA sense strand
ccagccgucccucacauua

SEQ ID NO: 607475 - RNA, 19 nt, Homo sapiens
  misc_RNA (1)...(19): siRNA sense strand
ccaagugggacaagaacaa

SEQ ID NO: 607476 - RNA, 19 nt, Homo sapiens
  misc_RNA (1)...(19): siRNA sense strand
gauuaccggccaggaauaa

SEQ ID NO: 607477 - RNA, 19 nt, Homo sapiens
  misc_RNA (1)...(19): siRNA sense strand
uggaaagacaccaguauau

SEQ ID NO: 607478 - RNA, 19 nt, Homo sapiens
  misc_RNA (1)...(19): siRNA sense strand
ggacaagaacaaaagcaua

SEQ ID NO: 607479 - RNA, 19 nt, Homo sapiens
  misc_RNA (1)...(19): siRNA sense strand
agaaaucagaggucucaaa

SEQ ID NO: 607480 - RNA, 19 nt, Homo sapiens
  misc_RNA (1)...(19): siRNA sense strand
gcggaaggcagucaugugu

SEQ ID NO: 607481 - RNA, 19 nt, Homo sapiens
  misc_RNA (1)...(19): siRNA sense strand
gaaccagccgucccucaca

SEQ ID NO: 607482 - RNA, 19 nt, Homo sapiens
  misc_RNA (1)...(19): siRNA sense strand
auucgaaaggcauguauua

SEQ ID NO: 607483 - RNA, 19 nt, Homo sapiens
  misc_RNA (1)...(19): siRNA sense strand
ucaaacccuuuccaaucuu

SEQ ID NO: 607484 - RNA, 19 nt, Homo sapiens
  misc_RNA (1)...(19): siRNA sense strand
acaauguagggaagauuua

SEQ ID NO: 607485 - RNA, 19 nt, Homo sapiens
  misc_RNA (1)...(19): siRNA sense strand
gcaccucagaaacaaugua

SEQ ID NO: 607486 - RNA, 19 nt, Homo sapiens
  misc_RNA (1)...(19): siRNA sense strand
gauccauaccuuaaagaau

SEQ ID NO: 607487 - RNA, 19 nt, Homo sapiens
  misc_RNA (1)...(19): siRNA sense strand
aguauagucugcaacugaa

SEQ ID NO: 607488 - RNA, 19 nt, Homo sapiens
  misc_RNA (1)...(19): siRNA sense strand
ggcuaaggcugugcaaauc

SEQ ID NO: 607489 - RNA, 19 nt, Homo sapiens
  misc_RNA (1)...(19): siRNA sense strand
uaagaaagaugaacacuug

SEQ ID NO: 607490 - RNA, 19 nt, Homo sapiens
  misc_RNA (1)...(19): siRNA sense strand
ggagaaagccuucaaaugu

SEQ ID NO: 607491 - RNA, 19 nt, Homo sapiens
  misc_RNA (1)...(19): siRNA sense strand
caacaacccugugagauuu

SEQ ID NO: 607492 - RNA, 19 nt, Homo sapiens
  misc_RNA (1)...(19): siRNA sense strand
gagaaagccuucaaauguu

SEQ ID NO: 607493 - RNA, 19 nt, Homo sapiens
  misc_RNA (1)...(19): siRNA sense strand
gaggagaacaugcuacuua

SEQ ID NO: 607494 - RNA, 19 nt, Homo sapiens
  misc_RNA (1)...(19): siRNA sense strand
gaggcaaguugucuaauga

SEQ ID NO: 607495 - RNA, 19 nt, Homo sapiens
  misc_RNA (1)...(19): siRNA sense strand
ggaggcaaguugucuaaug

SEQ ID NO: 607496 - RNA, 19 nt, Homo sapiens
  misc_RNA (1)...(19): siRNA sense strand
gaacagauguaaugguaac

SEQ ID NO: 607497 - RNA, 19 nt, Homo sapiens
  misc_RNA (1)...(19): siRNA sense strand
gagaggaggucgaacagau

SEQ ID NO: 607498 - RNA, 19 nt, Homo sapiens
  misc_RNA (1)...(19): siRNA sense strand
ucgaacagauguaauggua

SEQ ID NO: 607499 - RNA, 19 nt, Homo sapiens
  misc_RNA (1)...(19): siRNA sense strand
gcagauaccacucaggaaa

SEQ ID NO: 607500 - RNA, 19 nt, Homo sapiens
  misc_RNA (1)...(19): siRNA sense strand
agaaagccuucaaauguuu

SEQ ID NO: 607501 - RNA, 19 nt, Homo sapiens
  misc_RNA (1)...(19): siRNA sense strand
uagcaaauauggacucaga

SEQ ID NO: 607502 - RNA, 19 nt, Homo sapiens
  misc_RNA (1)...(19): siRNA sense strand
ggacucagagaaacagaua

SEQ ID NO: 607503 - RNA, 19 nt, Homo sapiens
  misc_RNA (1)...(19): siRNA sense strand
gaacuaaaggaaguaauug

SEQ ID NO: 607504 - RNA, 19 nt, Homo sapiens
  misc_RNA (1)...(19): siRNA sense strand
gaaaacgacuucaguguca

SEQ ID NO: 607505 - RNA, 19 nt, Homo sapiens
  misc_RNA (1)...(19): siRNA sense strand
cauugaaccuggagaagaa

SEQ ID NO: 607506 - RNA, 19 nt, Homo sapiens
  misc_RNA (1)...(19): siRNA sense strand
ucgaggagcucaaggcauu

SEQ ID NO: 607507 - RNA, 19 nt, Homo sapiens
  misc_RNA (1)...(19): siRNA sense strand
gcaggaagaacuaaaggaa

SEQ ID NO: 607508 - RNA, 19 nt, Homo sapiens
  misc_RNA (1)...(19): siRNA sense strand
ggacagagucgcuauguac

SEQ ID NO: 607509 - RNA, 19 nt, Homo sapiens
  misc_RNA (1)...(19): siRNA sense strand
ggaaguaauugaacguuuu

SEQ ID NO: 607510 - RNA, 19 nt, Homo sapiens
  misc_RNA (1)...(19): siRNA sense strand
gcaaauauggacucagaga

SEQ ID NO: 607511 - RNA, 19 nt, Homo sapiens
  misc_RNA (1)...(19): siRNA sense strand
caggagaaauuauucaaag

SEQ ID NO: 607512 - RNA, 19 nt, Homo sapiens
  misc_RNA (1)...(19): siRNA sense strand
gaaccuggagaagaaauuu

SEQ ID NO: 607513 - RNA, 19 nt, Homo sapiens
  misc_RNA (1)...(19): siRNA sense strand
gguucuugaucccuauuua

SEQ ID NO: 607514 - RNA, 19 nt, Homo sapiens
  misc_RNA (1)...(19): siRNA sense strand
gcaggagaaauuauucaaa

SEQ ID NO: 607515 - RNA, 19 nt, Homo sapiens
  misc_RNA (1)...(19): siRNA sense strand
gaugaacacuuggagaaag

SEQ ID NO: 607516 - RNA, 19 nt, Homo sapiens
  misc_RNA (1)...(19): siRNA sense strand
gaagaacuaaaggaaguaa

SEQ ID NO: 607517 - RNA, 19 nt, Homo sapiens
  misc_RNA (1)...(19): siRNA sense strand
gauugcagaccuaauugua

SEQ ID NO: 607518 - RNA, 19 nt, Homo sapiens
  misc_RNA (1)...(19): siRNA sense strand
gugaauggcaggagaaaug

SEQ ID NO: 607519 - RNA, 19 nt, Homo sapiens
  misc_RNA (1)...(19): siRNA sense strand
cgagauacagcauguguga

SEQ ID NO: 607520 - RNA, 19 nt, Homo sapiens
  misc_RNA (1)...(19): siRNA sense strand
aaauauggacucagagaaa

SEQ ID NO: 607521 - RNA, 19 nt, Homo sapiens
  misc_RNA (1)...(19): siRNA sense strand
caaguugucuaaugaccau

SEQ ID NO: 607522 - RNA, 19 nt, Homo sapiens
  misc_RNA (1)...(19): siRNA sense strand
cgacuucagugucauguac

SEQ ID NO: 607523 - RNA, 19 nt, Homo sapiens
  misc_RNA (1)...(19): siRNA sense strand
gagaaauggaggcaaguug

SEQ ID NO: 607524 - RNA, 19 nt, Homo sapiens
  misc_RNA (1)...(19): siRNA sense strand
gaaggcaggaagaacuaaa

SEQ ID NO: 607525 - RNA, 19 nt, Homo sapiens
  misc_RNA (1)...(19): siRNA sense strand
ggaggucgaacagauguaa

SEQ ID NO: 607526 - RNA, 19 nt, Homo sapiens
  misc_RNA (1)...(19): siRNA sense strand
uuauggagauggguucuuu

SEQ ID NO: 607527 - RNA, 19 nt, Homo sapiens
  misc_RNA (1)...(19): siRNA sense strand
caugauugcagaccuaauu

SEQ ID NO: 607528 - RNA, 19 nt, Homo sapiens
  misc_RNA (1)...(19): siRNA sense strand
acaacaacccugugagauu

SEQ ID NO: 607529 - RNA, 19 nt, Homo sapiens
  misc_RNA (1)...(19): siRNA sense strand
ccaaggaacucugugaaaa

SEQ ID NO: 607530 - RNA, 19 nt, Homo sapiens
  misc_RNA (1)...(19): siRNA sense strand
gucaaucugucagcucuaa

SEQ ID NO: 607531 - RNA, 19 nt, Homo sapiens
  misc_RNA (1)...(19): siRNA sense strand
agaccuaauuguaaguuug

SEQ ID NO: 607532 - RNA, 19 nt, Homo sapiens
  misc_RNA (1)...(19): siRNA sense strand
ggaagaacuaaaggaagua

SEQ ID NO: 607533 - RNA, 19 nt, Homo sapiens
  misc_RNA (1)...(19): siRNA sense strand
gcuggguccugcugcguuu

SEQ ID NO: 607534 - RNA, 19 nt, Homo sapiens
  misc_RNA (1)...(19): siRNA sense strand
cuaaugaccaucagcagaa

SEQ ID NO: 607535 - RNA, 19 nt, Homo sapiens
  misc_RNA (1)...(19): siRNA sense strand
aaugguaacucgggauuug

SEQ ID NO: 607536 - RNA, 19 nt, Homo sapiens
  misc_RNA (1)...(19): siRNA sense strand
gcacggcacuauuuucuca

SEQ ID NO: 607537 - RNA, 19 nt, Homo sapiens
  misc_RNA (1)...(19): siRNA sense strand
aggaagaacuaaaggaagu

SEQ ID NO: 607538 - RNA, 19 nt, Homo sapiens
  misc_RNA (1)...(19): siRNA sense strand
caaauauggacucagagaa

SEQ ID NO: 607539 - RNA, 19 nt, Homo sapiens
  misc_RNA (1)...(19): siRNA sense strand
gccaaggaacucugugaaa

SEQ ID NO: 607540 - RNA, 19 nt, Homo sapiens
  misc_RNA (1)...(19): siRNA sense strand
gaacaugcuacuuagacau

SEQ ID NO: 607541 - RNA, 19 nt, Homo sapiens
  misc_RNA (1)...(19): siRNA sense strand
guaccauccucuggaaugu

SEQ ID NO: 607542 - RNA, 19 nt, Homo sapiens
  misc_RNA (1)...(19): siRNA sense strand
gaaauggaggcaaguuguc

SEQ ID NO: 607543 - RNA, 19 nt, Homo sapiens
  misc_RNA (1)...(19): siRNA sense strand
ggagaacaugcuacuuaga

SEQ ID NO: 607544 - RNA, 19 nt, Homo sapiens
  misc_RNA (1)...(19): siRNA sense strand
ccaaaauaguugcaacaaa

SEQ ID NO: 607545 - RNA, 19 nt, Homo sapiens
  misc_RNA (1)...(19): siRNA sense strand
gaaugggcacggcacuauu

SEQ ID NO: 607546 - RNA, 19 nt, Homo sapiens
  misc_RNA (1)...(19): siRNA sense strand
aggaaguaauugaacguuu

SEQ ID NO: 607547 - RNA, 19 nt, Homo sapiens
  misc_RNA (1)...(19): siRNA sense strand
uaaaggaaggcaggaagaa

SEQ ID NO: 607548 - RNA, 19 nt, Homo sapiens
  misc_RNA (1)...(19): siRNA sense strand
cagaccuaauuguaaguuu

SEQ ID NO: 607549 - RNA, 19 nt, Homo sapiens
  misc_RNA (1)...(19): siRNA sense strand
gagaacaugcuacuuagac

SEQ ID NO: 607550 - RNA, 19 nt, Homo sapiens
  misc_RNA (1)...(19): siRNA sense strand
ggagaaauggaggcaaguu

SEQ ID NO: 607551 - RNA, 19 nt, Homo sapiens
  misc_RNA (1)...(19): siRNA sense strand
uauguaccauccucuggaa

SEQ ID NO: 607552 - RNA, 19 nt, Homo sapiens
  misc_RNA (1)...(19): siRNA sense strand
guaaugguaacucgggauu

SEQ ID NO: 607553 - RNA, 19 nt, Homo sapiens
  misc_RNA (1)...(19): siRNA sense strand
aaugaauacuagcgccuuu

SEQ ID NO: 607554 - RNA, 19 nt, Homo sapiens
  misc_RNA (1)...(19): siRNA sense strand
ggaaggcaggaagaacuaa

SEQ ID NO: 607555 - RNA, 19 nt, Homo sapiens
  misc_RNA (1)...(19): siRNA sense strand
cuacuuagacauggagaaa

SEQ ID NO: 607556 - RNA, 19 nt, Homo sapiens
  misc_RNA (1)...(19): siRNA sense strand
gaaggacagagucgcuaug

SEQ ID NO: 607557 - RNA, 19 nt, Homo sapiens
  misc_RNA (1)...(19): siRNA sense strand
gaauuacugguggguugua

SEQ ID NO: 607558 - RNA, 19 nt, Homo sapiens
  misc_RNA (1)...(19): siRNA sense strand
caaaauggagccaaaauag

SEQ ID NO: 607559 - RNA, 19 nt, Homo sapiens
  misc_RNA (1)...(19): siRNA sense strand
guaauagauacucaucaga

SEQ ID NO: 607560 - RNA, 19 nt, Homo sapiens
  misc_RNA (1)...(19): siRNA sense strand
uguaauagauacucaucag

SEQ ID NO: 607561 - RNA, 19 nt, Homo sapiens
  misc_RNA (1)...(19): siRNA sense strand
agaauaaaaugcaggagaa

SEQ ID NO: 607562 - RNA, 19 nt, Homo sapiens
  misc_RNA (1)...(19): siRNA sense strand
aagaugaacacuuggagaa

SEQ ID NO: 607563 - RNA, 19 nt, Homo sapiens
  misc_RNA (1)...(19): siRNA sense strand
ugagauuuaggccuauuaa

SEQ ID NO: 607564 - RNA, 19 nt, Homo sapiens
  misc_RNA (1)...(19): siRNA sense strand
gucauguacuccacaagga

SEQ ID NO: 607565 - RNA, 19 nt, Homo sapiens
  misc_RNA (1)...(19): siRNA sense strand
uaacucgggauuugaagga

SEQ ID NO: 607566 - RNA, 19 nt, Homo sapiens
  misc_RNA (1)...(19): siRNA sense strand
caaaagaguggaaacgaaa

SEQ ID NO: 607567 - RNA, 19 nt, Homo sapiens
  misc_RNA (1)...(19): siRNA sense strand
ugaccuagcaaccaguuug

SEQ ID NO: 607568 - RNA, 19 nt, Homo sapiens
  misc_RNA (1)...(19): siRNA sense strand
gcagaccuaauuguaaguu

SEQ ID NO: 607569 - RNA, 19 nt, Homo sapiens
  misc_RNA (1)...(19): siRNA sense strand
uagauacucaucagaacaa

SEQ ID NO: 607570 - RNA, 19 nt, Homo sapiens
  misc_RNA (1)...(19): siRNA sense strand
cgaaugggcacggcacuau

SEQ ID NO: 607571 - RNA, 19 nt, Homo sapiens
  misc_RNA (1)...(19): siRNA sense strand
uggagaaagccuucaaaug

SEQ ID NO: 607572 - RNA, 19 nt, Homo sapiens
  misc_RNA (1)...(19): siRNA sense strand
gaacaaaauggagccaaaa

SEQ ID NO: 607573 - RNA, 19 nt, Homo sapiens
  misc_RNA (1)...(19): siRNA sense strand
gaccuaauuguaaguuugu

SEQ ID NO: 607574 - RNA, 19 nt, Homo sapiens
  misc_RNA (1)...(19): siRNA sense strand
gaccaucagcagaaucaau

SEQ ID NO: 607575 - RNA, 19 nt, Homo sapiens
  misc_RNA (1)...(19): siRNA sense strand
acucagagaaacagauaaa

SEQ ID NO: 607576 - RNA, 19 nt, Homo sapiens
  misc_RNA (1)...(19): siRNA sense strand
gaggaggucgaacagaugu

SEQ ID NO: 607577 - RNA, 19 nt, Homo sapiens
  misc_RNA (1)...(19): siRNA sense strand
aaccaugauugcagaccua

SEQ ID NO: 607578 - RNA, 19 nt, Homo sapiens
  misc_RNA (1)...(19): siRNA sense strand
agaacaugcuacuuagaca

SEQ ID NO: 607579 - RNA, 19 nt, Homo sapiens
  misc_RNA (1)...(19): siRNA sense strand
gaguggaaacgaaaugaca

SEQ ID NO: 607580 - RNA, 19 nt, Homo sapiens
  misc_RNA (1)...(19): siRNA sense strand
uggaauguccgccaaggaa

SEQ ID NO: 607581 - RNA, 19 nt, Homo sapiens
  misc_RNA (1)...(19): siRNA sense strand
gugagauuuaggccuauua

SEQ ID NO: 607582 - RNA, 19 nt, Homo sapiens
  misc_RNA (1)...(19): siRNA sense strand
aaugggcacggcacuauuu

SEQ ID NO: 607583 - RNA, 19 nt, Homo sapiens
  misc_RNA (1)...(19): siRNA sense strand
cagagaaacagauaaacgu

SEQ ID NO: 607584 - RNA, 19 nt, Homo sapiens
  misc_RNA (1)...(19): siRNA sense strand
uugcagaccuaauuguaag

SEQ ID NO: 607585 - RNA, 19 nt, Homo sapiens
  misc_RNA (1)...(19): siRNA sense strand
aggagaacaugcuacuuag

SEQ ID NO: 607586 - RNA, 19 nt, Homo sapiens
  misc_RNA (1)...(19): siRNA sense strand
acaaaagaguggaaacgaa

SEQ ID NO: 607587 - RNA, 19 nt, Homo sapiens
  misc_RNA (1)...(19): siRNA sense strand
uuacugguggguuguauug

SEQ ID NO: 607588 - RNA, 19 nt, Homo sapiens
  misc_RNA (1)...(19): siRNA sense strand
gguccugcugcguuuauaa

SEQ ID NO: 607589 - RNA, 19 nt, Homo sapiens
  misc_RNA (1)...(19): siRNA sense strand
uaagaaagaugaacacuug

SEQ ID NO: 607590 - RNA, 19 nt, Homo sapiens
  misc_RNA (1)...(19): siRNA sense strand
ggagaaagccuucaaaugu

SEQ ID NO: 607591 - RNA, 19 nt, Homo sapiens
  misc_RNA (1)...(19): siRNA sense strand
caacaacccugugagauuu

SEQ ID NO: 607592 - RNA, 19 nt, Homo sapiens
  misc_RNA (1)...(19): siRNA sense strand
gagaaagccuucaaauguu

SEQ ID NO: 607593 - RNA, 19 nt, Homo sapiens
  misc_RNA (1)...(19): siRNA sense strand
gaggagaacaugcuacuua

SEQ ID NO: 607594 - RNA, 19 nt, Homo sapiens
  misc_RNA (1)...(19): siRNA sense strand
gaggcaaguugucuaauga

SEQ ID NO: 607595 - RNA, 19 nt, Homo sapiens
  misc_RNA (1)...(19): siRNA sense strand
ggaggcaaguugucuaaug

SEQ ID NO: 607596 - RNA, 19 nt, Homo sapiens
  misc_RNA (1)...(19): siRNA sense strand
gaacagauguaaugguaac

SEQ ID NO: 607597 - RNA, 19 nt, Homo sapiens
  misc_RNA (1)...(19): siRNA sense strand
gagaggaggucgaacagau

SEQ ID NO: 607598 - RNA, 19 nt, Homo sapiens
  misc_RNA (1)...(19): siRNA sense strand
ucgaacagauguaauggua

SEQ ID NO: 607599 - RNA, 19 nt, Homo sapiens
  misc_RNA (1)...(19): siRNA sense strand
gcagauaccacucaggaaa

SEQ ID NO: 607600 - RNA, 19 nt, Homo sapiens
  misc_RNA (1)...(19): siRNA sense strand
agaaagccuucaaauguuu

SEQ ID NO: 607601 - RNA, 19 nt, Homo sapiens
  misc_RNA (1)...(19): siRNA sense strand
uagcaaauauggacucaga

SEQ ID NO: 607602 - RNA, 19 nt, Homo sapiens
  misc_RNA (1)...(19): siRNA sense strand
ggacucagagaaacagaua

SEQ ID NO: 607603 - RNA, 19 nt, Homo sapiens
  misc_RNA (1)...(19): siRNA sense strand
gaacuaaaggaaguaauug

SEQ ID NO: 607604 - RNA, 19 nt, Homo sapiens
  misc_RNA (1)...(19): siRNA sense strand
gaaaacgacuucaguguca

SEQ ID NO: 607605 - RNA, 19 nt, Homo sapiens
  misc_RNA (1)...(19): siRNA sense strand
cauugaaccuggagaagaa

SEQ ID NO: 607606 - RNA, 19 nt, Homo sapiens
  misc_RNA (1)...(19): siRNA sense strand
ucgaggagcucaaggcauu

SEQ ID NO: 607607 - RNA, 19 nt, Homo sapiens
  misc_RNA (1)...(19): siRNA sense strand
gcaggaagaacuaaaggaa

SEQ ID NO: 607608 - RNA, 19 nt, Homo sapiens
  misc_RNA (1)...(19): siRNA sense strand
ggacagagucgcuauguac

SEQ ID NO: 607609 - RNA, 19 nt, Homo sapiens
  misc_RNA (1)...(19): siRNA sense strand
ggaaguaauugaacguuuu

SEQ ID NO: 607610 - RNA, 19 nt, Homo sapiens
  misc_RNA (1)...(19): siRNA sense strand
gcaaauauggacucagaga

SEQ ID NO: 607611 - RNA, 19 nt, Homo sapiens
  misc_RNA (1)...(19): siRNA sense strand
caggagaaauuauucaaag

SEQ ID NO: 607612 - RNA, 19 nt, Homo sapiens
  misc_RNA (1)...(19): siRNA sense strand
gaaccuggagaagaaauuu

SEQ ID NO: 607613 - RNA, 19 nt, Homo sapiens
  misc_RNA (1)...(19): siRNA sense strand
gguucuugaucccuauuua

SEQ ID NO: 607614 - RNA, 19 nt, Homo sapiens
  misc_RNA (1)...(19): siRNA sense strand
gcaggagaaauuauucaaa

SEQ ID NO: 607615 - RNA, 19 nt, Homo sapiens
  misc_RNA (1)...(19): siRNA sense strand
gaugaacacuuggagaaag

SEQ ID NO: 607616 - RNA, 19 nt, Homo sapiens
  misc_RNA (1)...(19): siRNA sense strand
gaagaacuaaaggaaguaa

SEQ ID NO: 607617 - RNA, 19 nt, Homo sapiens
  misc_RNA (1)...(19): siRNA sense strand
gauugcagaccuaauugua

SEQ ID NO: 607618 - RNA, 19 nt, Homo sapiens
  misc_RNA (1)...(19): siRNA sense strand
gugaauggcaggagaaaug

SEQ ID NO: 607619 - RNA, 19 nt, Homo sapiens
  misc_RNA (1)...(19): siRNA sense strand
cgagauacagcauguguga

SEQ ID NO: 607620 - RNA, 19 nt, Homo sapiens
  misc_RNA (1)...(19): siRNA sense strand
aaauauggacucagagaaa

SEQ ID NO: 607621 - RNA, 19 nt, Homo sapiens
  misc_RNA (1)...(19): siRNA sense strand
caaguugucuaaugaccau

SEQ ID NO: 607622 - RNA, 19 nt, Homo sapiens
  misc_RNA (1)...(19): siRNA sense strand
cgacuucagugucauguac

SEQ ID NO: 607623 - RNA, 19 nt, Homo sapiens
  misc_RNA (1)...(19): siRNA sense strand
gagaaauggaggcaaguug

SEQ ID NO: 607624 - RNA, 19 nt, Homo sapiens
  misc_RNA (1)...(19): siRNA sense strand
gaaggcaggaagaacuaaa

SEQ ID NO: 607625 - RNA, 19 nt, Homo sapiens
  misc_RNA (1)...(19): siRNA sense strand
ggaggucgaacagauguaa

SEQ ID NO: 607626 - RNA, 19 nt, Homo sapiens
  misc_RNA (1)...(19): siRNA sense strand
uuauggagauggguucuuu

SEQ ID NO: 607627 - RNA, 19 nt, Homo sapiens
  misc_RNA (1)...(19): siRNA sense strand
caugauugcagaccuaauu

SEQ ID NO: 607628 - RNA, 19 nt, Homo sapiens
  misc_RNA (1)...(19): siRNA sense strand
acaacaacccugugagauu

SEQ ID NO: 607629 - RNA, 19 nt, Homo sapiens
  misc_RNA (1)...(19): siRNA sense strand
ccaaggaacucugugaaaa

SEQ ID NO: 607630 - RNA, 19 nt, Homo sapiens
  misc_RNA (1)...(19): siRNA sense strand
gucaaucugucagcucuaa

SEQ ID NO: 607631 - RNA, 19 nt, Homo sapiens
  misc_RNA (1)...(19): siRNA sense strand
agaccuaauuguaaguuug

SEQ ID NO: 607632 - RNA, 19 nt, Homo sapiens
  misc_RNA (1)...(19): siRNA sense strand
ggaagaacuaaaggaagua

SEQ ID NO: 607633 - RNA, 19 nt, Homo sapiens
  misc_RNA (1)...(19): siRNA sense strand
gcuggguccugcugcguuu

SEQ ID NO: 607634 - RNA, 19 nt, Homo sapiens
  misc_RNA (1)...(19): siRNA sense strand
cuaaugaccaucagcagaa

SEQ ID NO: 607635 - RNA, 19 nt, Homo sapiens
  misc_RNA (1)...(19): siRNA sense strand
aaugguaacucgggauuug

SEQ ID NO: 607636 - RNA, 19 nt, Homo sapiens
  misc_RNA (1)...(19): siRNA sense strand
gcacggcacuauuuucuca

SEQ ID NO: 607637 - RNA, 19 nt, Homo sapiens
  misc_RNA (1)...(19): siRNA sense strand
aggaagaacuaaaggaagu

SEQ ID NO: 607638 - RNA, 19 nt, Homo sapiens
  misc_RNA (1)...(19): siRNA sense strand
caaauauggacucagagaa

SEQ ID NO: 607639 - RNA, 19 nt, Homo sapiens
  misc_RNA (1)...(19): siRNA sense strand
gccaaggaacucugugaaa

SEQ ID NO: 607640 - RNA, 19 nt, Homo sapiens
  misc_RNA (1)...(19): siRNA sense strand
gaacaugcuacuuagacau

SEQ ID NO: 607641 - RNA, 19 nt, Homo sapiens
  misc_RNA (1)...(19): siRNA sense strand
guaccauccucuggaaugu

SEQ ID NO: 607642 - RNA, 19 nt, Homo sapiens
  misc_RNA (1)...(19): siRNA sense strand
gaaauggaggcaaguuguc

SEQ ID NO: 607643 - RNA, 19 nt, Homo sapiens
  misc_RNA (1)...(19): siRNA sense strand
ggagaacaugcuacuuaga

SEQ ID NO: 607644 - RNA, 19 nt, Homo sapiens
  misc_RNA (1)...(19): siRNA sense strand
ccaaaauaguugcaacaaa

SEQ ID NO: 607645 - RNA, 19 nt, Homo sapiens
  misc_RNA (1)...(19): siRNA sense strand
gaaugggcacggcacuauu

SEQ ID NO: 607646 - RNA, 19 nt, Homo sapiens
  misc_RNA (1)...(19): siRNA sense strand
aggaaguaauugaacguuu

SEQ ID NO: 607647 - RNA, 19 nt, Homo sapiens
  misc_RNA (1)...(19): siRNA sense strand
uaaaggaaggcaggaagaa

SEQ ID NO: 607648 - RNA, 19 nt, Homo sapiens
  misc_RNA (1)...(19): siRNA sense strand
cagaccuaauuguaaguuu

SEQ ID NO: 607649 - RNA, 19 nt, Homo sapiens
  misc_RNA (1)...(19): siRNA sense strand
gagaacaugcuacuuagac

SEQ ID NO: 607650 - RNA, 19 nt, Homo sapiens
  misc_RNA (1)...(19): siRNA sense strand
ggagaaauggaggcaaguu

SEQ ID NO: 607651 - RNA, 19 nt, Homo sapiens
  misc_RNA (1)...(19): siRNA sense strand
uauguaccauccucuggaa

SEQ ID NO: 607652 - RNA, 19 nt, Homo sapiens
  misc_RNA (1)...(19): siRNA sense strand
guaaugguaacucgggauu

SEQ ID NO: 607653 - RNA, 19 nt, Homo sapiens
  misc_RNA (1)...(19): siRNA sense strand
aaugaauacuagcgccuuu

SEQ ID NO: 607654 - RNA, 19 nt, Homo sapiens
  misc_RNA (1)...(19): siRNA sense strand
ggaaggcaggaagaacuaa

SEQ ID NO: 607655 - RNA, 19 nt, Homo sapiens
  misc_RNA (1)...(19): siRNA sense strand
cuacuuagacauggagaaa

SEQ ID NO: 607656 - RNA, 19 nt, Homo sapiens
  misc_RNA (1)...(19): siRNA sense strand
gaaggacagagucgcuaug

SEQ ID NO: 607657 - RNA, 19 nt, Homo sapiens
  misc_RNA (1)...(19): siRNA sense strand
gaauuacugguggguugua

SEQ ID NO: 607658 - RNA, 19 nt, Homo sapiens
  misc_RNA (1)...(19): siRNA sense strand
caaaauggagccaaaauag

SEQ ID NO: 607659 - RNA, 19 nt, Homo sapiens
  misc_RNA (1)...(19): siRNA sense strand
guaauagauacucaucaga

SEQ ID NO: 607660 - RNA, 19 nt, Homo sapiens
  misc_RNA (1)...(19): siRNA sense strand
uguaauagauacucaucag

SEQ ID NO: 607661 - RNA, 19 nt, Homo sapiens
  misc_RNA (1)...(19): siRNA sense strand
agaauaaaaugcaggagaa

SEQ ID NO: 607662 - RNA, 19 nt, Homo sapiens
  misc_RNA (1)...(19): siRNA sense strand
aagaugaacacuuggagaa

SEQ ID NO: 607663 - RNA, 19 nt, Homo sapiens
  misc_RNA (1)...(19): siRNA sense strand
ugagauuuaggccuauuaa

SEQ ID NO: 607664 - RNA, 19 nt, Homo sapiens
  misc_RNA (1)...(19): siRNA sense strand
gucauguacuccacaagga

SEQ ID NO: 607665 - RNA, 19 nt, Homo sapiens
  misc_RNA (1)...(19): siRNA sense strand
uaacucgggauuugaagga

SEQ ID NO: 607666 - RNA, 19 nt, Homo sapiens
  misc_RNA (1)...(19): siRNA sense strand
caaaagaguggaaacgaaa

SEQ ID NO: 607667 - RNA, 19 nt, Homo sapiens
  misc_RNA (1)...(19): siRNA sense strand
ugaccuagcaaccaguuug

SEQ ID NO: 607668 - RNA, 19 nt, Homo sapiens
  misc_RNA (1)...(19): siRNA sense strand
gcagaccuaauuguaaguu

SEQ ID NO: 607669 - RNA, 19 nt, Homo sapiens
  misc_RNA (1)...(19): siRNA sense strand
uagauacucaucagaacaa

SEQ ID NO: 607670 - RNA, 19 nt, Homo sapiens
  misc_RNA (1)...(19): siRNA sense strand
cgaaugggcacggcacuau

SEQ ID NO: 607671 - RNA, 19 nt, Homo sapiens
  misc_RNA (1)...(19): siRNA sense strand
uggagaaagccuucaaaug

SEQ ID NO: 607672 - RNA, 19 nt, Homo sapiens
  misc_RNA (1)...(19): siRNA sense strand
gaacaaaauggagccaaaa

SEQ ID NO: 607673 - RNA, 19 nt, Homo sapiens
  misc_RNA (1)...(19): siRNA sense strand
gaccuaauuguaaguuugu

SEQ ID NO: 607674 - RNA, 19 nt, Homo sapiens
  misc_RNA (1)...(19): siRNA sense strand
gaccaucagcagaaucaau

SEQ ID NO: 607675 - RNA, 19 nt, Homo sapiens
  misc_RNA (1)...(19): siRNA sense strand
acucagagaaacagauaaa

SEQ ID NO: 607676 - RNA, 19 nt, Homo sapiens
  misc_RNA (1)...(19): siRNA sense strand
gaggaggucgaacagaugu

SEQ ID NO: 607677 - RNA, 19 nt, Homo sapiens
  misc_RNA (1)...(19): siRNA sense strand
aaccaugauugcagaccua

SEQ ID NO: 607678 - RNA, 19 nt, Homo sapiens
  misc_RNA (1)...(19): siRNA sense strand
agaacaugcuacuuagaca

SEQ ID NO: 607679 - RNA, 19 nt, Homo sapiens
  misc_RNA (1)...(19): siRNA sense strand
gaguggaaacgaaaugaca

SEQ ID NO: 607680 - RNA, 19 nt, Homo sapiens
  misc_RNA (1)...(19): siRNA sense strand
uggaauguccgccaaggaa

SEQ ID NO: 607681 - RNA, 19 nt, Homo sapiens
  misc_RNA (1)...(19): siRNA sense strand
gugagauuuaggccuauua

SEQ ID NO: 607682 - RNA, 19 nt, Homo sapiens
  misc_RNA (1)...(19): siRNA sense strand
aaugggcacggcacuauuu

SEQ ID NO: 607683 - RNA, 19 nt, Homo sapiens
  misc_RNA (1)...(19): siRNA sense strand
cagagaaacagauaaacgu

SEQ ID NO: 607684 - RNA, 19 nt, Homo sapiens
  misc_RNA (1)...(19): siRNA sense strand
uugcagaccuaauuguaag

SEQ ID NO: 607685 - RNA, 19 nt, Homo sapiens
  misc_RNA (1)...(19): siRNA sense strand
aggagaacaugcuacuuag

SEQ ID NO: 607686 - RNA, 19 nt, Homo sapiens
  misc_RNA (1)...(19): siRNA sense strand
acaaaagaguggaaacgaa

SEQ ID NO: 607687 - RNA, 19 nt, Homo sapiens
  misc_RNA (1)...(19): siRNA sense strand
uuacugguggguuguauug

SEQ ID NO: 607688 - RNA, 19 nt, Homo sapiens
  misc_RNA (1)...(19): siRNA sense strand
gguccugcugcguuuauaa

SEQ ID NO: 607689 - RNA, 19 nt, Homo sapiens
  misc_RNA (1)...(19): siRNA sense strand
agaaggagguggagcauua

SEQ ID NO: 607690 - RNA, 19 nt, Homo sapiens
  misc_RNA (1)...(19): siRNA sense strand
agagagaccucauagauaa

SEQ ID NO: 607691 - RNA, 19 nt, Homo sapiens
  misc_RNA (1)...(19): siRNA sense strand
gagcucaggucgcuacuaa

SEQ ID NO: 607692 - RNA, 19 nt, Homo sapiens
  misc_RNA (1)...(19): siRNA sense strand
ccaagaagcugaaagaaca

SEQ ID NO: 607693 - RNA, 19 nt, Homo sapiens
  misc_RNA (1)...(19): siRNA sense strand
gaacaaaacuucggcgaua

SEQ ID NO: 607694 - RNA, 19 nt, Homo sapiens
  misc_RNA (1)...(19): siRNA sense strand
ccacaaagcagcccucuaa

SEQ ID NO: 607695 - RNA, 19 nt, Homo sapiens
  misc_RNA (1)...(19): siRNA sense strand
acacaucucuggauaguga

SEQ ID NO: 607696 - RNA, 19 nt, Homo sapiens
  misc_RNA (1)...(19): siRNA sense strand
cuacuaaacuggagaacaa

SEQ ID NO: 607697 - RNA, 19 nt, Homo sapiens
  misc_RNA (1)...(19): siRNA sense strand
gcagagaucuuuguagucu

SEQ ID NO: 607698 - RNA, 19 nt, Homo sapiens
  misc_RNA (1)...(19): siRNA sense strand
gccaagggaugauaucuau

SEQ ID NO: 607699 - RNA, 19 nt, Homo sapiens
  misc_RNA (1)...(19): siRNA sense strand
ggacgacggugaugacaca

SEQ ID NO: 607700 - RNA, 19 nt, Homo sapiens
  misc_RNA (1)...(19): siRNA sense strand
gccaaaggcugaaggcuau

SEQ ID NO: 607701 - RNA, 19 nt, Homo sapiens
  misc_RNA (1)...(19): siRNA sense strand
ugacaagguugacaguaaa

SEQ ID NO: 607702 - RNA, 19 nt, Homo sapiens
  misc_RNA (1)...(19): siRNA sense strand
caagagagaccucauagau

SEQ ID NO: 607703 - RNA, 19 nt, Homo sapiens
  misc_RNA (1)...(19): siRNA sense strand
caaagcagcccucuaagga

SEQ ID NO: 607704 - RNA, 19 nt, Homo sapiens
  misc_RNA (1)...(19): siRNA sense strand
uuacugaagugcaagauga

SEQ ID NO: 607705 - RNA, 19 nt, Homo sapiens
  misc_RNA (1)...(19): siRNA sense strand
gguagaugaugaagaguug

SEQ ID NO: 607706 - RNA, 19 nt, Homo sapiens
  misc_RNA (1)...(19): siRNA sense strand
gaacacaguggacaucuca

SEQ ID NO: 607707 - RNA, 19 nt, Homo sapiens
  misc_RNA (1)...(19): siRNA sense strand
cggaaacgcuggcgggaaa

SEQ ID NO: 607708 - RNA, 19 nt, Homo sapiens
  misc_RNA (1)...(19): siRNA sense strand
cuaagaccguuacugaauu

SEQ ID NO: 607709 - RNA, 19 nt, Homo sapiens
  misc_RNA (1)...(19): siRNA sense strand
ggcgauauguggccaagaa

SEQ ID NO: 607710 - RNA, 19 nt, Homo sapiens
  misc_RNA (1)...(19): siRNA sense strand
gguggcagcuucaucacaa

SEQ ID NO: 607711 - RNA, 19 nt, Homo sapiens
  misc_RNA (1)...(19): siRNA sense strand
uaagaccguuacugaauug

SEQ ID NO: 607712 - RNA, 19 nt, Homo sapiens
  misc_RNA (1)...(19): siRNA sense strand
gcuaagaccguuacugaau

SEQ ID NO: 607713 - RNA, 19 nt, Homo sapiens
  misc_RNA (1)...(19): siRNA sense strand
gaagguggcugaggcuaag

SEQ ID NO: 607714 - RNA, 19 nt, Homo sapiens
  misc_RNA (1)...(19): siRNA sense strand
cugacaagguugacaguaa

SEQ ID NO: 607715 - RNA, 19 nt, Homo sapiens
  misc_RNA (1)...(19): siRNA sense strand
ggcuaaggcuagaaagaaa

SEQ ID NO: 607716 - RNA, 19 nt, Homo sapiens
  misc_RNA (1)...(19): siRNA sense strand
gaccguuacugaauugguu

SEQ ID NO: 607717 - RNA, 19 nt, Homo sapiens
  misc_RNA (1)...(19): siRNA sense strand
gcccagcuguuauuugaga

SEQ ID NO: 607718 - RNA, 19 nt, Homo sapiens
  misc_RNA (1)...(19): siRNA sense strand
ccaagccucucgccaugaa

SEQ ID NO: 607719 - RNA, 19 nt, Homo sapiens
  misc_RNA (1)...(19): siRNA sense strand
caugguagaugaugaagag

SEQ ID NO: 607720 - RNA, 19 nt, Homo sapiens
  misc_RNA (1)...(19): siRNA sense strand
gugguggacucaaggauga

SEQ ID NO: 607721 - RNA, 19 nt, Homo sapiens
  misc_RNA (1)...(19): siRNA sense strand
ggaccugguuccaaucaag

SEQ ID NO: 607722 - RNA, 19 nt, Homo sapiens
  misc_RNA (1)...(19): siRNA sense strand
aagagagaccucauagaua

SEQ ID NO: 607723 - RNA, 19 nt, Homo sapiens
  misc_RNA (1)...(19): siRNA sense strand
gagugcagcagacacauuu

SEQ ID NO: 607724 - RNA, 19 nt, Homo sapiens
  misc_RNA (1)...(19): siRNA sense strand
caaaggcacuggacaucag

SEQ ID NO: 607725 - RNA, 19 nt, Homo sapiens
  misc_RNA (1)...(19): siRNA sense strand
cugaauugguuacuaagaa

SEQ ID NO: 607726 - RNA, 19 nt, Homo sapiens
  misc_RNA (1)...(19): siRNA sense strand
gguugacaguaaauucuuu

SEQ ID NO: 607727 - RNA, 19 nt, Homo sapiens
  misc_RNA (1)...(19): siRNA sense strand
caagggaugauaucuaugu

SEQ ID NO: 607728 - RNA, 19 nt, Homo sapiens
  misc_RNA (1)...(19): siRNA sense strand
ugacacaucucuggauagu

SEQ ID NO: 607729 - RNA, 19 nt, Homo sapiens
  misc_RNA (1)...(19): siRNA sense strand
caaagagcacagcaacgua

SEQ ID NO: 607730 - RNA, 19 nt, Homo sapiens
  misc_RNA (1)...(19): siRNA sense strand
acucaaggaugaagaagga

SEQ ID NO: 607731 - RNA, 19 nt, Homo sapiens
  misc_RNA (1)...(19): siRNA sense strand
gaugaugacggguuugaga

SEQ ID NO: 607732 - RNA, 19 nt, Homo sapiens
  misc_RNA (1)...(19): siRNA sense strand
acugauggcucuacguuug

SEQ ID NO: 607733 - RNA, 19 nt, Homo sapiens
  misc_RNA (1)...(19): siRNA sense strand
aaagagcacagcaacguaa

SEQ ID NO: 607734 - RNA, 19 nt, Homo sapiens
  misc_RNA (1)...(19): siRNA sense strand
agucagaggucauuucaag

SEQ ID NO: 607735 - RNA, 19 nt, Homo sapiens
  misc_RNA (1)...(19): siRNA sense strand
guguggagcugaagaugga

SEQ ID NO: 607736 - RNA, 19 nt, Homo sapiens
  misc_RNA (1)...(19): siRNA sense strand
aaccagaccuuggcagaaa

SEQ ID NO: 607737 - RNA, 19 nt, Homo sapiens
  misc_RNA (1)...(19): siRNA sense strand
gaaccagaccuuggcagaa

SEQ ID NO: 607738 - RNA, 19 nt, Homo sapiens
  misc_RNA (1)...(19): siRNA sense strand
ggcaagagccgacgagaca

SEQ ID NO: 607739 - RNA, 19 nt, Homo sapiens
  misc_RNA (1)...(19): siRNA sense strand
ucaggucgcuacuaaacug

SEQ ID NO: 607740 - RNA, 19 nt, Homo sapiens
  misc_RNA (1)...(19): siRNA sense strand
gaugaagaaggaccaaaga

SEQ ID NO: 607741 - RNA, 19 nt, Homo sapiens
  misc_RNA (1)...(19): siRNA sense strand
cccaggagguggcggaauu

SEQ ID NO: 607742 - RNA, 19 nt, Homo sapiens
  misc_RNA (1)...(19): siRNA sense strand
ccaugaugcuuacucacaa

SEQ ID NO: 607743 - RNA, 19 nt, Homo sapiens
  misc_RNA (1)...(19): siRNA sense strand
ggagucagaggucauuuca

SEQ ID NO: 607744 - RNA, 19 nt, Homo sapiens
  misc_RNA (1)...(19): siRNA sense strand
gguggagcauuaccggaaa

SEQ ID NO: 607745 - RNA, 19 nt, Homo sapiens
  misc_RNA (1)...(19): siRNA sense strand
gaugacggguuugagauag

SEQ ID NO: 607746 - RNA, 19 nt, Homo sapiens
  misc_RNA (1)...(19): siRNA sense strand
gagccgacgagacaaguuu

SEQ ID NO: 607747 - RNA, 19 nt, Homo sapiens
  misc_RNA (1)...(19): siRNA sense strand
acguuuggcuugugacuuu

SEQ ID NO: 607748 - RNA, 19 nt, Homo sapiens
  misc_RNA (1)...(19): siRNA sense strand
ccagcgaaaucaugguaga

SEQ ID NO: 607749 - RNA, 19 nt, Homo sapiens
  misc_RNA (1)...(19): siRNA sense strand
ugcgaagucucuacaagaa

SEQ ID NO: 607750 - RNA, 19 nt, Homo sapiens
  misc_RNA (1)...(19): siRNA sense strand
gcacagcugcgaagucucu

SEQ ID NO: 607751 - RNA, 19 nt, Homo sapiens
  misc_RNA (1)...(19): siRNA sense strand
aaaggaggaugcugaagag

SEQ ID NO: 607752 - RNA, 19 nt, Homo sapiens
  misc_RNA (1)...(19): siRNA sense strand
aggcccagcuguuauuuga

SEQ ID NO: 607753 - RNA, 19 nt, Homo sapiens
  misc_RNA (1)...(19): siRNA sense strand
caacagcuggaaccacaaa

SEQ ID NO: 607754 - RNA, 19 nt, Homo sapiens
  misc_RNA (1)...(19): siRNA sense strand
gcaaaggcacuggacauca

SEQ ID NO: 607755 - RNA, 19 nt, Homo sapiens
  misc_RNA (1)...(19): siRNA sense strand
acacauuucuguccgaucu

SEQ ID NO: 607756 - RNA, 19 nt, Homo sapiens
  misc_RNA (1)...(19): siRNA sense strand
caaaagcguaugcgacuua

SEQ ID NO: 607757 - RNA, 19 nt, Homo sapiens
  misc_RNA (1)...(19): siRNA sense strand
cugcagagaucuuuguagu

SEQ ID NO: 607758 - RNA, 19 nt, Homo sapiens
  misc_RNA (1)...(19): siRNA sense strand
ccaugucaccuacguugua

SEQ ID NO: 607759 - RNA, 19 nt, Homo sapiens
  misc_RNA (1)...(19): siRNA sense strand
gauaaugucuccccuguac

SEQ ID NO: 607760 - RNA, 19 nt, Homo sapiens
  misc_RNA (1)...(19): siRNA sense strand
ggagguggcggaauugaag

SEQ ID NO: 607761 - RNA, 19 nt, Homo sapiens
  misc_RNA (1)...(19): siRNA sense strand
agaggaagaugaaggugau

SEQ ID NO: 607762 - RNA, 19 nt, Homo sapiens
  misc_RNA (1)...(19): siRNA sense strand
ccuggaagguugauguugu

SEQ ID NO: 607763 - RNA, 19 nt, Homo sapiens
  misc_RNA (1)...(19): siRNA sense strand
uuacuaagaagaagccaaa

SEQ ID NO: 607764 - RNA, 19 nt, Homo sapiens
  misc_RNA (1)...(19): siRNA sense strand
ccagcucaaucgccgcuuu

SEQ ID NO: 607765 - RNA, 19 nt, Homo sapiens
  misc_RNA (1)...(19): siRNA sense strand
gguccaugaugcuuacuca

SEQ ID NO: 607766 - RNA, 19 nt, Homo sapiens
  misc_RNA (1)...(19): siRNA sense strand
ugaauugguuacuaagaag

SEQ ID NO: 607767 - RNA, 19 nt, Homo sapiens
  misc_RNA (1)...(19): siRNA sense strand
ggcaagaagggcaaaguug

SEQ ID NO: 607768 - RNA, 19 nt, Homo sapiens
  misc_RNA (1)...(19): siRNA sense strand
guuacugaauugguuacua

SEQ ID NO: 607769 - RNA, 19 nt, Homo sapiens
  misc_RNA (1)...(19): siRNA sense strand
gggcaagaagggcaaaguu

SEQ ID NO: 607770 - RNA, 19 nt, Homo sapiens
  misc_RNA (1)...(19): siRNA sense strand
ggccaagagagaccucaua

SEQ ID NO: 607771 - RNA, 19 nt, Homo sapiens
  misc_RNA (1)...(19): siRNA sense strand
gcugaaagaacaagcaaag

SEQ ID NO: 607772 - RNA, 19 nt, Homo sapiens
  misc_RNA (1)...(19): siRNA sense strand
gauguugugcucaaugaug

SEQ ID NO: 607773 - RNA, 19 nt, Homo sapiens
  misc_RNA (1)...(19): siRNA sense strand
caagguugacaguaaauuc

SEQ ID NO: 607774 - RNA, 19 nt, Homo sapiens
  misc_RNA (1)...(19): siRNA sense strand
aggaggacaucacaacaga

SEQ ID NO: 607775 - RNA, 19 nt, Homo sapiens
  misc_RNA (1)...(19): siRNA sense strand
cggagugguuugugcaaga

SEQ ID NO: 607776 - RNA, 19 nt, Homo sapiens
  misc_RNA (1)...(19): siRNA sense strand
uucaaccgguacacauuua

SEQ ID NO: 607777 - RNA, 19 nt, Homo sapiens
  misc_RNA (1)...(19): siRNA sense strand
guuauugccucuuccaaaa

SEQ ID NO: 607778 - RNA, 19 nt, Homo sapiens
  misc_RNA (1)...(19): siRNA sense strand
gggccuaagucagaugaug

SEQ ID NO: 607779 - RNA, 19 nt, Homo sapiens
  misc_RNA (1)...(19): siRNA sense strand
ggagaauccacugcuggua

SEQ ID NO: 607780 - RNA, 19 nt, Homo sapiens
  misc_RNA (1)...(19): siRNA sense strand
ugaagugcaagaugauaaa

SEQ ID NO: 607781 - RNA, 19 nt, Homo sapiens
  misc_RNA (1)...(19): siRNA sense strand
gcuuucaguuccugcagaa

SEQ ID NO: 607782 - RNA, 19 nt, Homo sapiens
  misc_RNA (1)...(19): siRNA sense strand
gaucugccaagggaugaua

SEQ ID NO: 607783 - RNA, 19 nt, Homo sapiens
  misc_RNA (1)...(19): siRNA sense strand
agacuggcauguucuccuu

SEQ ID NO: 607784 - RNA, 19 nt, Homo sapiens
  misc_RNA (1)...(19): siRNA sense strand
caagcccauuugacacuga

SEQ ID NO: 607785 - RNA, 19 nt, Homo sapiens
  misc_RNA (1)...(19): siRNA sense strand
gagcacagcaacguaagga

SEQ ID NO: 607786 - RNA, 19 nt, Homo sapiens
  misc_RNA (1)...(19): siRNA sense strand
ggacaucacaacagaacgu

SEQ ID NO: 607787 - RNA, 19 nt, Homo sapiens
  misc_RNA (1)...(19): siRNA sense strand
ggaugaagaaggaccaaag

SEQ ID NO: 607788 - RNA, 19 nt, Homo sapiens
  misc_RNA (1)...(19): siRNA sense strand
ggaccaaagagcacagcaa

SEQ ID NO: 607789 - RNA, 19 nt, Homo sapiens
  misc_RNA (1)...(19): siRNA sense strand
acaagaggcugguagagua

SEQ ID NO: 607790 - RNA, 19 nt, Homo sapiens
  misc_RNA (1)...(19): siRNA sense strand
ggaauucuuucaauacaga

SEQ ID NO: 607791 - RNA, 19 nt, Homo sapiens
  misc_RNA (1)...(19): siRNA sense strand
aaaugcagguuuacaaaga

SEQ ID NO: 607792 - RNA, 19 nt, Homo sapiens
  misc_RNA (1)...(19): siRNA sense strand
ugaaagaacaucucaggaa

SEQ ID NO: 607793 - RNA, 19 nt, Homo sapiens
  misc_RNA (1)...(19): siRNA sense strand
cagaauacuuccuagaauc

SEQ ID NO: 607794 - RNA, 19 nt, Homo sapiens
  misc_RNA (1)...(19): siRNA sense strand
ccaaaggcccguuaccauu

SEQ ID NO: 607795 - RNA, 19 nt, Homo sapiens
  misc_RNA (1)...(19): siRNA sense strand
uagaguaacuguccgagau

SEQ ID NO: 607796 - RNA, 19 nt, Homo sapiens
  misc_RNA (1)...(19): siRNA sense strand
caaaggcccguuaccauug

SEQ ID NO: 607797 - RNA, 19 nt, Homo sapiens
  misc_RNA (1)...(19): siRNA sense strand
gaacaccuugaacuccuua

SEQ ID NO: 607798 - RNA, 19 nt, Homo sapiens
  misc_RNA (1)...(19): siRNA sense strand
aaacuccgcuuccgauugg

SEQ ID NO: 607799 - RNA, 19 nt, Homo sapiens
  misc_RNA (1)...(19): siRNA sense strand
caauacagaauacuuccua

SEQ ID NO: 607800 - RNA, 19 nt, Homo sapiens
  misc_RNA (1)...(19): siRNA sense strand
gggaaaaggugauuguaga

SEQ ID NO: 607801 - RNA, 19 nt, Homo sapiens
  misc_RNA (1)...(19): siRNA sense strand
acagaauacuuccuagaau

SEQ ID NO: 607802 - RNA, 19 nt, Homo sapiens
  misc_RNA (1)...(19): siRNA sense strand
ggaccuccauuuccagucu

SEQ ID NO: 607803 - RNA, 19 nt, Homo sapiens
  misc_RNA (1)...(19): siRNA sense strand
ggaacaccuugaacuccuu

SEQ ID NO: 607804 - RNA, 19 nt, Homo sapiens
  misc_RNA (1)...(19): siRNA sense strand
ugaucgagaugguacaaga

SEQ ID NO: 607805 - RNA, 19 nt, Homo sapiens
  misc_RNA (1)...(19): siRNA sense strand
caagaggcugguagaguaa

SEQ ID NO: 607806 - RNA, 19 nt, Homo sapiens
  misc_RNA (1)...(19): siRNA sense strand
ggugauaaaggauaaauac

SEQ ID NO: 607807 - RNA, 19 nt, Homo sapiens
  misc_RNA (1)...(19): siRNA sense strand
uuaagcauaugcacacugu

SEQ ID NO: 607808 - RNA, 19 nt, Homo sapiens
  misc_RNA (1)...(19): siRNA sense strand
caaacuccgcuuccgauug

SEQ ID NO: 607809 - RNA, 19 nt, Homo sapiens
  misc_RNA (1)...(19): siRNA sense strand
gagcaggugguggugauaa

SEQ ID NO: 607810 - RNA, 19 nt, Homo sapiens
  misc_RNA (1)...(19): siRNA sense strand
gcaaacuccgcuuccgauu

SEQ ID NO: 607811 - RNA, 19 nt, Homo sapiens
  misc_RNA (1)...(19): siRNA sense strand
uaugagccauguacaucuu

SEQ ID NO: 607812 - RNA, 19 nt, Homo sapiens
  misc_RNA (1)...(19): siRNA sense strand
cuugaacuccuuaagcaua

SEQ ID NO: 607813 - RNA, 19 nt, Homo sapiens
  misc_RNA (1)...(19): siRNA sense strand
uacagaauacuuccuagaa

SEQ ID NO: 607814 - RNA, 19 nt, Homo sapiens
  misc_RNA (1)...(19): siRNA sense strand
aagaacaucucaggaagca

SEQ ID NO: 607815 - RNA, 19 nt, Homo sapiens
  misc_RNA (1)...(19): siRNA sense strand
ugauucuccuugccuuaaa

SEQ ID NO: 607816 - RNA, 19 nt, Homo sapiens
  misc_RNA (1)...(19): siRNA sense strand
caaaaugcagguuuacaaa

SEQ ID NO: 607817 - RNA, 19 nt, Homo sapiens
  misc_RNA (1)...(19): siRNA sense strand
caugugaucagccaggauu

SEQ ID NO: 607818 - RNA, 19 nt, Homo sapiens
  misc_RNA (1)...(19): siRNA sense strand
gaaaaggugauuguagauu

SEQ ID NO: 607819 - RNA, 19 nt, Homo sapiens
  misc_RNA (1)...(19): siRNA sense strand
aaggauaaauacccaaagg

SEQ ID NO: 607820 - RNA, 19 nt, Homo sapiens
  misc_RNA (1)...(19): siRNA sense strand
ugggaugccugagcucuug

SEQ ID NO: 607821 - RNA, 19 nt, Homo sapiens
  misc_RNA (1)...(19): siRNA sense strand
agaauacuuccuagaauca

SEQ ID NO: 607822 - RNA, 19 nt, Homo sapiens
  misc_RNA (1)...(19): siRNA sense strand
uugaacuccuuaagcauau

SEQ ID NO: 607823 - RNA, 19 nt, Homo sapiens
  misc_RNA (1)...(19): siRNA sense strand
ggccagggaacaccuugaa

SEQ ID NO: 607824 - RNA, 19 nt, Homo sapiens
  misc_RNA (1)...(19): siRNA sense strand
gguacaagaggcugguaga

SEQ ID NO: 607825 - RNA, 19 nt, Homo sapiens
  misc_RNA (1)...(19): siRNA sense strand
uuccucagcugaaagaaca

SEQ ID NO: 607826 - RNA, 19 nt, Homo sapiens
  misc_RNA (1)...(19): siRNA sense strand
gaguaugagccauguacau

SEQ ID NO: 607827 - RNA, 19 nt, Homo sapiens
  misc_RNA (1)...(19): siRNA sense strand
cagcugaaagaacaucuca

SEQ ID NO: 607828 - RNA, 19 nt, Homo sapiens
  misc_RNA (1)...(19): siRNA sense strand
gugguggugauaaaggaua

SEQ ID NO: 607829 - RNA, 19 nt, Homo sapiens
  misc_RNA (1)...(19): siRNA sense strand
aaaggcccguuaccauugg

SEQ ID NO: 607830 - RNA, 19 nt, Homo sapiens
  misc_RNA (1)...(19): siRNA sense strand
ccaaaaugcagguuuacaa

SEQ ID NO: 607831 - RNA, 19 nt, Homo sapiens
  misc_RNA (1)...(19): siRNA sense strand
aaugcagguuuacaaagau

SEQ ID NO: 607832 - RNA, 19 nt, Homo sapiens
  misc_RNA (1)...(19): siRNA sense strand
ugguggugauaaaggauaa

SEQ ID NO: 607833 - RNA, 19 nt, Homo sapiens
  misc_RNA (1)...(19): siRNA sense strand
gaaucagacuuccacauuu

SEQ ID NO: 607834 - RNA, 19 nt, Homo sapiens
  misc_RNA (1)...(19): siRNA sense strand
caagggauaugucaaggua

SEQ ID NO: 607835 - RNA, 19 nt, Homo sapiens
  misc_RNA (1)...(19): siRNA sense strand
gaaauguucucgacagcaa

SEQ ID NO: 607836 - RNA, 19 nt, Homo sapiens
  misc_RNA (1)...(19): siRNA sense strand
ggaauucuuucaauacaga

SEQ ID NO: 607837 - RNA, 19 nt, Homo sapiens
  misc_RNA (1)...(19): siRNA sense strand
gagcaacucuggccaaugc

SEQ ID NO: 607838 - RNA, 19 nt, Homo sapiens
  misc_RNA (1)...(19): siRNA sense strand
aaagaacccuggccuggaa

SEQ ID NO: 607839 - RNA, 19 nt, Homo sapiens
  misc_RNA (1)...(19): siRNA sense strand
aaaugcagguuuacaaaga

SEQ ID NO: 607840 - RNA, 19 nt, Homo sapiens
  misc_RNA (1)...(19): siRNA sense strand
gaaacacacaggaagagaa

SEQ ID NO: 607841 - RNA, 19 nt, Homo sapiens
  misc_RNA (1)...(19): siRNA sense strand
cgaaucagacuuccacauu

SEQ ID NO: 607842 - RNA, 19 nt, Homo sapiens
  misc_RNA (1)...(19): siRNA sense strand
aaucagacuuccacauuug

SEQ ID NO: 607843 - RNA, 19 nt, Homo sapiens
  misc_RNA (1)...(19): siRNA sense strand
cagaauacuuccuagaauc

SEQ ID NO: 607844 - RNA, 19 nt, Homo sapiens
  misc_RNA (1)...(19): siRNA sense strand
gaaagcagaguguaacaag

SEQ ID NO: 607845 - RNA, 19 nt, Homo sapiens
  misc_RNA (1)...(19): siRNA sense strand
ccaaaggcccguuaccauu

SEQ ID NO: 607846 - RNA, 19 nt, Homo sapiens
  misc_RNA (1)...(19): siRNA sense strand
caaaggcccguuaccauug

SEQ ID NO: 607847 - RNA, 19 nt, Homo sapiens
  misc_RNA (1)...(19): siRNA sense strand
gaacaccuugaacuccuua

SEQ ID NO: 607848 - RNA, 19 nt, Homo sapiens
  misc_RNA (1)...(19): siRNA sense strand
agaaagagaucaggcaaca

SEQ ID NO: 607849 - RNA, 19 nt, Homo sapiens
  misc_RNA (1)...(19): siRNA sense strand
aggcaacagugauucuaua

SEQ ID NO: 607850 - RNA, 19 nt, Homo sapiens
  misc_RNA (1)...(19): siRNA sense strand
aaacuccgcuuccgauugg

SEQ ID NO: 607851 - RNA, 19 nt, Homo sapiens
  misc_RNA (1)...(19): siRNA sense strand
caauacagaauacuuccua

SEQ ID NO: 607852 - RNA, 19 nt, Homo sapiens
  misc_RNA (1)...(19): siRNA sense strand
gggaaaaggugauuguaga

SEQ ID NO: 607853 - RNA, 19 nt, Homo sapiens
  misc_RNA (1)...(19): siRNA sense strand
acagaauacuuccuagaau

SEQ ID NO: 607854 - RNA, 19 nt, Homo sapiens
  misc_RNA (1)...(19): siRNA sense strand
ggaccuccauuuccagucu

SEQ ID NO: 607855 - RNA, 19 nt, Homo sapiens
  misc_RNA (1)...(19): siRNA sense strand
aaacacacaggaagagaaa

SEQ ID NO: 607856 - RNA, 19 nt, Homo sapiens
  misc_RNA (1)...(19): siRNA sense strand
ggaacaccuugaacuccuu

SEQ ID NO: 607857 - RNA, 19 nt, Homo sapiens
  misc_RNA (1)...(19): siRNA sense strand
gcuugaagauuucuaugca

SEQ ID NO: 607858 - RNA, 19 nt, Homo sapiens
  misc_RNA (1)...(19): siRNA sense strand
uaacaagggauaugucaag

SEQ ID NO: 607859 - RNA, 19 nt, Homo sapiens
  misc_RNA (1)...(19): siRNA sense strand
agggauaugucaagguaaa

SEQ ID NO: 607860 - RNA, 19 nt, Homo sapiens
  misc_RNA (1)...(19): siRNA sense strand
uuaagcauaugcacacugu

SEQ ID NO: 607861 - RNA, 19 nt, Homo sapiens
  misc_RNA (1)...(19): siRNA sense strand
ggugauaaaggauaaauac

SEQ ID NO: 607862 - RNA, 19 nt, Homo sapiens
  misc_RNA (1)...(19): siRNA sense strand
ucacugauaagaaauguuc

SEQ ID NO: 607863 - RNA, 19 nt, Homo sapiens
  misc_RNA (1)...(19): siRNA sense strand
gcaacagugauucuauaga

SEQ ID NO: 607864 - RNA, 19 nt, Homo sapiens
  misc_RNA (1)...(19): siRNA sense strand
caaacuccgcuuccgauug

SEQ ID NO: 607865 - RNA, 19 nt, Homo sapiens
  misc_RNA (1)...(19): siRNA sense strand
gagcaggugguggugauaa

SEQ ID NO: 607866 - RNA, 19 nt, Homo sapiens
  misc_RNA (1)...(19): siRNA sense strand
gcaaacuccgcuuccgauu

SEQ ID NO: 607867 - RNA, 19 nt, Homo sapiens
  misc_RNA (1)...(19): siRNA sense strand
ggaaacacacaggaagaga

SEQ ID NO: 607868 - RNA, 19 nt, Homo sapiens
  misc_RNA (1)...(19): siRNA sense strand
uaugagccauguacaucuu

SEQ ID NO: 607869 - RNA, 19 nt, Homo sapiens
  misc_RNA (1)...(19): siRNA sense strand
gaaaagaugcaccuaucaa

SEQ ID NO: 607870 - RNA, 19 nt, Homo sapiens
  misc_RNA (1)...(19): siRNA sense strand
aaagagaucaggcaacagu

SEQ ID NO: 607871 - RNA, 19 nt, Homo sapiens
  misc_RNA (1)...(19): siRNA sense strand
gggaaaagaugcaccuauc

SEQ ID NO: 607872 - RNA, 19 nt, Homo sapiens
  misc_RNA (1)...(19): siRNA sense strand
uacagaauacuuccuagaa

SEQ ID NO: 607873 - RNA, 19 nt, Homo sapiens
  misc_RNA (1)...(19): siRNA sense strand
cuugaacuccuuaagcaua

SEQ ID NO: 607874 - RNA, 19 nt, Homo sapiens
  misc_RNA (1)...(19): siRNA sense strand
gggagcaacucuggccaau

SEQ ID NO: 607875 - RNA, 19 nt, Homo sapiens
  misc_RNA (1)...(19): siRNA sense strand
acacacaggaagagaaaga

SEQ ID NO: 607876 - RNA, 19 nt, Homo sapiens
  misc_RNA (1)...(19): siRNA sense strand
ugauucuccuugccuuaaa

SEQ ID NO: 607877 - RNA, 19 nt, Homo sapiens
  misc_RNA (1)...(19): siRNA sense strand
cagaguguaacaagggaua

SEQ ID NO: 607878 - RNA, 19 nt, Homo sapiens
  misc_RNA (1)...(19): siRNA sense strand
aagggaugcugcucaggaa

SEQ ID NO: 607879 - RNA, 19 nt, Homo sapiens
  misc_RNA (1)...(19): siRNA sense strand
caugugaucagccaggauu

SEQ ID NO: 607880 - RNA, 19 nt, Homo sapiens
  misc_RNA (1)...(19): siRNA sense strand
caaaaugcagguuuacaaa

SEQ ID NO: 607881 - RNA, 19 nt, Homo sapiens
  misc_RNA (1)...(19): siRNA sense strand
gaaaaggugauuguagauu

SEQ ID NO: 607882 - RNA, 19 nt, Homo sapiens
  misc_RNA (1)...(19): siRNA sense strand
uggaagcaguugugauugg

SEQ ID NO: 607883 - RNA, 19 nt, Homo sapiens
  misc_RNA (1)...(19): siRNA sense strand
agaauacuuccuagaauca

SEQ ID NO: 607884 - RNA, 19 nt, Homo sapiens
  misc_RNA (1)...(19): siRNA sense strand
uugaacuccuuaagcauau

SEQ ID NO: 607885 - RNA, 19 nt, Homo sapiens
  misc_RNA (1)...(19): siRNA sense strand
aaggauaaauacccaaagg

SEQ ID NO: 607886 - RNA, 19 nt, Homo sapiens
  misc_RNA (1)...(19): siRNA sense strand
uuuggaagcaguugugauu

SEQ ID NO: 607887 - RNA, 19 nt, Homo sapiens
  misc_RNA (1)...(19): siRNA sense strand
cagagaccaagaucacuga

SEQ ID NO: 607888 - RNA, 19 nt, Homo sapiens
  misc_RNA (1)...(19): siRNA sense strand
ggccagggaacaccuugaa

SEQ ID NO: 607889 - RNA, 19 nt, Homo sapiens
  misc_RNA (1)...(19): siRNA sense strand
guaacaagggauaugucaa

SEQ ID NO: 607890 - RNA, 19 nt, Homo sapiens
  misc_RNA (1)...(19): siRNA sense strand
agagaucaggcaacaguga

SEQ ID NO: 607891 - RNA, 19 nt, Homo sapiens
  misc_RNA (1)...(19): siRNA sense strand
gaguaugagccauguacau

SEQ ID NO: 607892 - RNA, 19 nt, Homo sapiens
  misc_RNA (1)...(19): siRNA sense strand
caccagcgaaucagacuuc

SEQ ID NO: 607893 - RNA, 19 nt, Homo sapiens
  misc_RNA (1)...(19): siRNA sense strand
ugaaagcagaguguaacaa

SEQ ID NO: 607894 - RNA, 19 nt, Homo sapiens
  misc_RNA (1)...(19): siRNA sense strand
ggaaaagaugcaccuauca

SEQ ID NO: 607895 - RNA, 19 nt, Homo sapiens
  misc_RNA (1)...(19): siRNA sense strand
ggcaacagugauucuauag

SEQ ID NO: 607896 - RNA, 19 nt, Homo sapiens
  misc_RNA (1)...(19): siRNA sense strand
aaaggcccguuaccauugg

SEQ ID NO: 607897 - RNA, 19 nt, Homo sapiens
  misc_RNA (1)...(19): siRNA sense strand
ugguggugauaaaggauaa

SEQ ID NO: 607898 - RNA, 19 nt, Homo sapiens
  misc_RNA (1)...(19): siRNA sense strand
gugguggugauaaaggaua

SEQ ID NO: 607899 - RNA, 19 nt, Homo sapiens
  misc_RNA (1)...(19): siRNA sense strand
aaugcagguuuacaaagau

SEQ ID NO: 607900 - RNA, 19 nt, Homo sapiens
  misc_RNA (1)...(19): siRNA sense strand
ccaaaaugcagguuuacaa

SEQ ID NO: 607901 - RNA, 19 nt, Homo sapiens
  misc_RNA (1)...(19): siRNA sense strand
acaagaggcugguagagua

SEQ ID NO: 607902 - RNA, 19 nt, Homo sapiens
  misc_RNA (1)...(19): siRNA sense strand
ggaauucuuucaauacaga

SEQ ID NO: 607903 - RNA, 19 nt, Homo sapiens
  misc_RNA (1)...(19): siRNA sense strand
aaaugcagguuuacaaaga

SEQ ID NO: 607904 - RNA, 19 nt, Homo sapiens
  misc_RNA (1)...(19): siRNA sense strand
ugaaagaacaucucaggaa

SEQ ID NO: 607905 - RNA, 19 nt, Homo sapiens
  misc_RNA (1)...(19): siRNA sense strand
cagaauacuuccuagaauc

SEQ ID NO: 607906 - RNA, 19 nt, Homo sapiens
  misc_RNA (1)...(19): siRNA sense strand
ccaaaggcccguuaccauu

SEQ ID NO: 607907 - RNA, 19 nt, Homo sapiens
  misc_RNA (1)...(19): siRNA sense strand
uagaguaacuguccgagau

SEQ ID NO: 607908 - RNA, 19 nt, Homo sapiens
  misc_RNA (1)...(19): siRNA sense strand
caaaggcccguuaccauug

SEQ ID NO: 607909 - RNA, 19 nt, Homo sapiens
  misc_RNA (1)...(19): siRNA sense strand
gaacaccuugaacuccuua

SEQ ID NO: 607910 - RNA, 19 nt, Homo sapiens
  misc_RNA (1)...(19): siRNA sense strand
aaacuccgcuuccgauugg

SEQ ID NO: 607911 - RNA, 19 nt, Homo sapiens
  misc_RNA (1)...(19): siRNA sense strand
caauacagaauacuuccua

SEQ ID NO: 607912 - RNA, 19 nt, Homo sapiens
  misc_RNA (1)...(19): siRNA sense strand
gggaaaaggugauuguaga

SEQ ID NO: 607913 - RNA, 19 nt, Homo sapiens
  misc_RNA (1)...(19): siRNA sense strand
acagaauacuuccuagaau

SEQ ID NO: 607914 - RNA, 19 nt, Homo sapiens
  misc_RNA (1)...(19): siRNA sense strand
ggaccuccauuuccagucu

SEQ ID NO: 607915 - RNA, 19 nt, Homo sapiens
  misc_RNA (1)...(19): siRNA sense strand
ggaacaccuugaacuccuu

SEQ ID NO: 607916 - RNA, 19 nt, Homo sapiens
  misc_RNA (1)...(19): siRNA sense strand
ugaucgagaugguacaaga

SEQ ID NO: 607917 - RNA, 19 nt, Homo sapiens
  misc_RNA (1)...(19): siRNA sense strand
caagaggcugguagaguaa

SEQ ID NO: 607918 - RNA, 19 nt, Homo sapiens
  misc_RNA (1)...(19): siRNA sense strand
ggugauaaaggauaaauac

SEQ ID NO: 607919 - RNA, 19 nt, Homo sapiens
  misc_RNA (1)...(19): siRNA sense strand
uuaagcauaugcacacugu

SEQ ID NO: 607920 - RNA, 19 nt, Homo sapiens
  misc_RNA (1)...(19): siRNA sense strand
caaacuccgcuuccgauug

SEQ ID NO: 607921 - RNA, 19 nt, Homo sapiens
  misc_RNA (1)...(19): siRNA sense strand
gagcaggugguggugauaa

SEQ ID NO: 607922 - RNA, 19 nt, Homo sapiens
  misc_RNA (1)...(19): siRNA sense strand
gcaaacuccgcuuccgauu

SEQ ID NO: 607923 - RNA, 19 nt, Homo sapiens
  misc_RNA (1)...(19): siRNA sense strand
uaugagccauguacaucuu

SEQ ID NO: 607924 - RNA, 19 nt, Homo sapiens
  misc_RNA (1)...(19): siRNA sense strand
cuugaacuccuuaagcaua

SEQ ID NO: 607925 - RNA, 19 nt, Homo sapiens
  misc_RNA (1)...(19): siRNA sense strand
uacagaauacuuccuagaa

SEQ ID NO: 607926 - RNA, 19 nt, Homo sapiens
  misc_RNA (1)...(19): siRNA sense strand
aagaacaucucaggaagca

SEQ ID NO: 607927 - RNA, 19 nt, Homo sapiens
  misc_RNA (1)...(19): siRNA sense strand
ugauucuccuugccuuaaa

SEQ ID NO: 607928 - RNA, 19 nt, Homo sapiens
  misc_RNA (1)...(19): siRNA sense strand
caaaaugcagguuuacaaa

SEQ ID NO: 607929 - RNA, 19 nt, Homo sapiens
  misc_RNA (1)...(19): siRNA sense strand
caugugaucagccaggauu

SEQ ID NO: 607930 - RNA, 19 nt, Homo sapiens
  misc_RNA (1)...(19): siRNA sense strand
gaaaaggugauuguagauu

SEQ ID NO: 607931 - RNA, 19 nt, Homo sapiens
  misc_RNA (1)...(19): siRNA sense strand
aaggauaaauacccaaagg

SEQ ID NO: 607932 - RNA, 19 nt, Homo sapiens
  misc_RNA (1)...(19): siRNA sense strand
ugggaugccugagcucuug

SEQ ID NO: 607933 - RNA, 19 nt, Homo sapiens
  misc_RNA (1)...(19): siRNA sense strand
agaauacuuccuagaauca

SEQ ID NO: 607934 - RNA, 19 nt, Homo sapiens
  misc_RNA (1)...(19): siRNA sense strand
uugaacuccuuaagcauau

SEQ ID NO: 607935 - RNA, 19 nt, Homo sapiens
  misc_RNA (1)...(19): siRNA sense strand
ggccagggaacaccuugaa

SEQ ID NO: 607936 - RNA, 19 nt, Homo sapiens
  misc_RNA (1)...(19): siRNA sense strand
gguacaagaggcugguaga

SEQ ID NO: 607937 - RNA, 19 nt, Homo sapiens
  misc_RNA (1)...(19): siRNA sense strand
uuccucagcugaaagaaca

SEQ ID NO: 607938 - RNA, 19 nt, Homo sapiens
  misc_RNA (1)...(19): siRNA sense strand
gaguaugagccauguacau

SEQ ID NO: 607939 - RNA, 19 nt, Homo sapiens
  misc_RNA (1)...(19): siRNA sense strand
cagcugaaagaacaucuca

SEQ ID NO: 607940 - RNA, 19 nt, Homo sapiens
  misc_RNA (1)...(19): siRNA sense strand
gugguggugauaaaggaua

SEQ ID NO: 607941 - RNA, 19 nt, Homo sapiens
  misc_RNA (1)...(19): siRNA sense strand
aaaggcccguuaccauugg

SEQ ID NO: 607942 - RNA, 19 nt, Homo sapiens
  misc_RNA (1)...(19): siRNA sense strand
ccaaaaugcagguuuacaa

SEQ ID NO: 607943 - RNA, 19 nt, Homo sapiens
  misc_RNA (1)...(19): siRNA sense strand
aaugcagguuuacaaagau

SEQ ID NO: 607944 - RNA, 19 nt, Homo sapiens
  misc_RNA (1)...(19): siRNA sense strand
ugguggugauaaaggauaa

SEQ ID NO: 607945 - RNA, 19 nt, Homo sapiens
  misc_RNA (1)...(19): siRNA sense strand
acaagaggcugguagagua

SEQ ID NO: 607946 - RNA, 19 nt, Homo sapiens
  misc_RNA (1)...(19): siRNA sense strand
ggaauucuuucaauacaga

SEQ ID NO: 607947 - RNA, 19 nt, Homo sapiens
  misc_RNA (1)...(19): siRNA sense strand
gagcaacucuggccaaugc

SEQ ID NO: 607948 - RNA, 19 nt, Homo sapiens
  misc_RNA (1)...(19): siRNA sense strand
aaagaacccuggccuggaa

SEQ ID NO: 607949 - RNA, 19 nt, Homo sapiens
  misc_RNA (1)...(19): siRNA sense strand
aaaugcagguuuacaaaga

SEQ ID NO: 607950 - RNA, 19 nt, Homo sapiens
  misc_RNA (1)...(19): siRNA sense strand
ugaaagaacaucucaggaa

SEQ ID NO: 607951 - RNA, 19 nt, Homo sapiens
  misc_RNA (1)...(19): siRNA sense strand
gaaacacacaggaagagaa

SEQ ID NO: 607952 - RNA, 19 nt, Homo sapiens
  misc_RNA (1)...(19): siRNA sense strand
cagaauacuuccuagaauc

SEQ ID NO: 607953 - RNA, 19 nt, Homo sapiens
  misc_RNA (1)...(19): siRNA sense strand
ccaaaggcccguuaccauu

SEQ ID NO: 607954 - RNA, 19 nt, Homo sapiens
  misc_RNA (1)...(19): siRNA sense strand
uagaguaacuguccgagau

SEQ ID NO: 607955 - RNA, 19 nt, Homo sapiens
  misc_RNA (1)...(19): siRNA sense strand
caaaggcccguuaccauug

SEQ ID NO: 607956 - RNA, 19 nt, Homo sapiens
  misc_RNA (1)...(19): siRNA sense strand
gaacaccuugaacuccuua

SEQ ID NO: 607957 - RNA, 19 nt, Homo sapiens
  misc_RNA (1)...(19): siRNA sense strand
agaaagagaucaggcaaca

SEQ ID NO: 607958 - RNA, 19 nt, Homo sapiens
  misc_RNA (1)...(19): siRNA sense strand
aggcaacagugauucuaua

SEQ ID NO: 607959 - RNA, 19 nt, Homo sapiens
  misc_RNA (1)...(19): siRNA sense strand
aaacuccgcuuccgauugg

SEQ ID NO: 607960 - RNA, 19 nt, Homo sapiens
  misc_RNA (1)...(19): siRNA sense strand
caauacagaauacuuccua

SEQ ID NO: 607961 - RNA, 19 nt, Homo sapiens
  misc_RNA (1)...(19): siRNA sense strand
gggaaaaggugauuguaga

SEQ ID NO: 607962 - RNA, 19 nt, Homo sapiens
  misc_RNA (1)...(19): siRNA sense strand
acagaauacuuccuagaau

SEQ ID NO: 607963 - RNA, 19 nt, Homo sapiens
  misc_RNA (1)...(19): siRNA sense strand
ggaccuccauuuccagucu

SEQ ID NO: 607964 - RNA, 19 nt, Homo sapiens
  misc_RNA (1)...(19): siRNA sense strand
aaacacacaggaagagaaa

SEQ ID NO: 607965 - RNA, 19 nt, Homo sapiens
  misc_RNA (1)...(19): siRNA sense strand
ggaacaccuugaacuccuu

SEQ ID NO: 607966 - RNA, 19 nt, Homo sapiens
  misc_RNA (1)...(19): siRNA sense strand
gcuugaagauuucuaugca

SEQ ID NO: 607967 - RNA, 19 nt, Homo sapiens
  misc_RNA (1)...(19): siRNA sense strand
ugaucgagaugguacaaga

SEQ ID NO: 607968 - RNA, 19 nt, Homo sapiens
  misc_RNA (1)...(19): siRNA sense strand
caagaggcugguagaguaa

SEQ ID NO: 607969 - RNA, 19 nt, Homo sapiens
  misc_RNA (1)...(19): siRNA sense strand
ggugauaaaggauaaauac

SEQ ID NO: 607970 - RNA, 19 nt, Homo sapiens
  misc_RNA (1)...(19): siRNA sense strand
uuaagcauaugcacacugu

SEQ ID NO: 607971 - RNA, 19 nt, Homo sapiens
  misc_RNA (1)...(19): siRNA sense strand
gcaacagugauucuauaga

SEQ ID NO: 607972 - RNA, 19 nt, Homo sapiens
  misc_RNA (1)...(19): siRNA sense strand
caaacuccgcuuccgauug

SEQ ID NO: 607973 - RNA, 19 nt, Homo sapiens
  misc_RNA (1)...(19): siRNA sense strand
gagcaggugguggugauaa

SEQ ID NO: 607974 - RNA, 19 nt, Homo sapiens
  misc_RNA (1)...(19): siRNA sense strand
gcaaacuccgcuuccgauu

SEQ ID NO: 607975 - RNA, 19 nt, Homo sapiens
  misc_RNA (1)...(19): siRNA sense strand
gaaaagaugcaccuaucaa

SEQ ID NO: 607976 - RNA, 19 nt, Homo sapiens
  misc_RNA (1)...(19): siRNA sense strand
uaugagccauguacaucuu

SEQ ID NO: 607977 - RNA, 19 nt, Homo sapiens
  misc_RNA (1)...(19): siRNA sense strand
aaagagaucaggcaacagu

SEQ ID NO: 607978 - RNA, 19 nt, Homo sapiens
  misc_RNA (1)...(19): siRNA sense strand
ggaaacacacaggaagaga

SEQ ID NO: 607979 - RNA, 19 nt, Homo sapiens
  misc_RNA (1)...(19): siRNA sense strand
gggaaaagaugcaccuauc

SEQ ID NO: 607980 - RNA, 19 nt, Homo sapiens
  misc_RNA (1)...(19): siRNA sense strand
uacagaauacuuccuagaa

SEQ ID NO: 607981 - RNA, 19 nt, Homo sapiens
  misc_RNA (1)...(19): siRNA sense strand
cuugaacuccuuaagcaua

SEQ ID NO: 607982 - RNA, 19 nt, Homo sapiens
  misc_RNA (1)...(19): siRNA sense strand
gggagcaacucuggccaau

SEQ ID NO: 607983 - RNA, 19 nt, Homo sapiens
  misc_RNA (1)...(19): siRNA sense strand
aagaacaucucaggaagca

SEQ ID NO: 607984 - RNA, 19 nt, Homo sapiens
  misc_RNA (1)...(19): siRNA sense strand
acacacaggaagagaaaga

SEQ ID NO: 607985 - RNA, 19 nt, Homo sapiens
  misc_RNA (1)...(19): siRNA sense strand
ugauucuccuugccuuaaa

SEQ ID NO: 607986 - RNA, 19 nt, Homo sapiens
  misc_RNA (1)...(19): siRNA sense strand
caaaaugcagguuuacaaa

SEQ ID NO: 607987 - RNA, 19 nt, Homo sapiens
  misc_RNA (1)...(19): siRNA sense strand
caugugaucagccaggauu

SEQ ID NO: 607988 - RNA, 19 nt, Homo sapiens
  misc_RNA (1)...(19): siRNA sense strand
aagggaugcugcucaggaa

SEQ ID NO: 607989 - RNA, 19 nt, Homo sapiens
  misc_RNA (1)...(19): siRNA sense strand
gaaaaggugauuguagauu

SEQ ID NO: 607990 - RNA, 19 nt, Homo sapiens
  misc_RNA (1)...(19): siRNA sense strand
aaggauaaauacccaaagg

SEQ ID NO: 607991 - RNA, 19 nt, Homo sapiens
  misc_RNA (1)...(19): siRNA sense strand
ugggaugccugagcucuug

SEQ ID NO: 607992 - RNA, 19 nt, Homo sapiens
  misc_RNA (1)...(19): siRNA sense strand
agaauacuuccuagaauca

SEQ ID NO: 607993 - RNA, 19 nt, Homo sapiens
  misc_RNA (1)...(19): siRNA sense strand
uugaacuccuuaagcauau

SEQ ID NO: 607994 - RNA, 19 nt, Homo sapiens
  misc_RNA (1)...(19): siRNA sense strand
ggccagggaacaccuugaa

SEQ ID NO: 607995 - RNA, 19 nt, Homo sapiens
  misc_RNA (1)...(19): siRNA sense strand
gguacaagaggcugguaga

SEQ ID NO: 607996 - RNA, 19 nt, Homo sapiens
  misc_RNA (1)...(19): siRNA sense strand
uuccucagcugaaagaaca

SEQ ID NO: 607997 - RNA, 19 nt, Homo sapiens
  misc_RNA (1)...(19): siRNA sense strand
agagaucaggcaacaguga

SEQ ID NO: 607998 - RNA, 19 nt, Homo sapiens
  misc_RNA (1)...(19): siRNA sense strand
gaguaugagccauguacau

SEQ ID NO: 607999 - RNA, 19 nt, Homo sapiens
  misc_RNA (1)...(19): siRNA sense strand
ggaaaagaugcaccuauca

SEQ ID NO: 608000 - RNA, 19 nt, Homo sapiens
  misc_RNA (1)...(19): siRNA sense strand
cagcugaaagaacaucuca

SEQ ID NO: 608001 - RNA, 19 nt, Homo sapiens
  misc_RNA (1)...(19): siRNA sense strand
ccaaaaugcagguuuacaa

SEQ ID NO: 608002 - RNA, 19 nt, Homo sapiens
  misc_RNA (1)...(19): siRNA sense strand
ggcaacagugauucuauag

SEQ ID NO: 608003 - RNA, 19 nt, Homo sapiens
  misc_RNA (1)...(19): siRNA sense strand
aaaggcccguuaccauugg

SEQ ID NO: 608004 - RNA, 19 nt, Homo sapiens
  misc_RNA (1)...(19): siRNA sense strand
ugguggugauaaaggauaa

SEQ ID NO: 608005 - RNA, 19 nt, Homo sapiens
  misc_RNA (1)...(19): siRNA sense strand
gugguggugauaaaggaua

SEQ ID NO: 608006 - RNA, 19 nt, Homo sapiens
  misc_RNA (1)...(19): siRNA sense strand
aaugcagguuuacaaagau

SEQ ID NO: 608007 - RNA, 19 nt, Homo sapiens
  misc_RNA (1)...(19): siRNA sense strand
gaaucagacuuccacauuu

SEQ ID NO: 608008 - RNA, 19 nt, Homo sapiens
  misc_RNA (1)...(19): siRNA sense strand
caagggauaugucaaggua

SEQ ID NO: 608009 - RNA, 19 nt, Homo sapiens
  misc_RNA (1)...(19): siRNA sense strand
gaaauguucucgacagcaa

SEQ ID NO: 608010 - RNA, 19 nt, Homo sapiens
  misc_RNA (1)...(19): siRNA sense strand
acaagaggcugguagagua

SEQ ID NO: 608011 - RNA, 19 nt, Homo sapiens
  misc_RNA (1)...(19): siRNA sense strand
ggaauucuuucaauacaga

SEQ ID NO: 608012 - RNA, 19 nt, Homo sapiens
  misc_RNA (1)...(19): siRNA sense strand
gagcaacucuggccaaugc

SEQ ID NO: 608013 - RNA, 19 nt, Homo sapiens
  misc_RNA (1)...(19): siRNA sense strand
aaagaacccuggccuggaa

SEQ ID NO: 608014 - RNA, 19 nt, Homo sapiens
  misc_RNA (1)...(19): siRNA sense strand
aaaugcagguuuacaaaga

SEQ ID NO: 608015 - RNA, 19 nt, Homo sapiens
  misc_RNA (1)...(19): siRNA sense strand
ugaaagaacaucucaggaa

SEQ ID NO: 608016 - RNA, 19 nt, Homo sapiens
  misc_RNA (1)...(19): siRNA sense strand
gaaacacacaggaagagaa

SEQ ID NO: 608017 - RNA, 19 nt, Homo sapiens
  misc_RNA (1)...(19): siRNA sense strand
cgaaucagacuuccacauu

SEQ ID NO: 608018 - RNA, 19 nt, Homo sapiens
  misc_RNA (1)...(19): siRNA sense strand
aaucagacuuccacauuug

SEQ ID NO: 608019 - RNA, 19 nt, Homo sapiens
  misc_RNA (1)...(19): siRNA sense strand
cagaauacuuccuagaauc

SEQ ID NO: 608020 - RNA, 19 nt, Homo sapiens
  misc_RNA (1)...(19): siRNA sense strand
gaaagcagaguguaacaag

SEQ ID NO: 608021 - RNA, 19 nt, Homo sapiens
  misc_RNA (1)...(19): siRNA sense strand
ccaaaggcccguuaccauu

SEQ ID NO: 608022 - RNA, 19 nt, Homo sapiens
  misc_RNA (1)...(19): siRNA sense strand
uagaguaacuguccgagau

SEQ ID NO: 608023 - RNA, 19 nt, Homo sapiens
  misc_RNA (1)...(19): siRNA sense strand
caaaggcccguuaccauug

SEQ ID NO: 608024 - RNA, 19 nt, Homo sapiens
  misc_RNA (1)...(19): siRNA sense strand
gaacaccuugaacuccuua

SEQ ID NO: 608025 - RNA, 19 nt, Homo sapiens
  misc_RNA (1)...(19): siRNA sense strand
agaaagagaucaggcaaca

SEQ ID NO: 608026 - RNA, 19 nt, Homo sapiens
  misc_RNA (1)...(19): siRNA sense strand
aggcaacagugauucuaua

SEQ ID NO: 608027 - RNA, 19 nt, Homo sapiens
  misc_RNA (1)...(19): siRNA sense strand
aaacuccgcuuccgauugg

SEQ ID NO: 608028 - RNA, 19 nt, Homo sapiens
  misc_RNA (1)...(19): siRNA sense strand
caauacagaauacuuccua

SEQ ID NO: 608029 - RNA, 19 nt, Homo sapiens
  misc_RNA (1)...(19): siRNA sense strand
gggaaaaggugauuguaga

SEQ ID NO: 608030 - RNA, 19 nt, Homo sapiens
  misc_RNA (1)...(19): siRNA sense strand
acagaauacuuccuagaau

SEQ ID NO: 608031 - RNA, 19 nt, Homo sapiens
  misc_RNA (1)...(19): siRNA sense strand
ggaccuccauuuccagucu

SEQ ID NO: 608032 - RNA, 19 nt, Homo sapiens
  misc_RNA (1)...(19): siRNA sense strand
aaacacacaggaagagaaa

SEQ ID NO: 608033 - RNA, 19 nt, Homo sapiens
  misc_RNA (1)...(19): siRNA sense strand
ggaacaccuugaacuccuu

SEQ ID NO: 608034 - RNA, 19 nt, Homo sapiens
  misc_RNA (1)...(19): siRNA sense strand
gcuugaagauuucuaugca

SEQ ID NO: 608035 - RNA, 19 nt, Homo sapiens
  misc_RNA (1)...(19): siRNA sense strand
ugaucgagaugguacaaga

SEQ ID NO: 608036 - RNA, 19 nt, Homo sapiens
  misc_RNA (1)...(19): siRNA sense strand
uaacaagggauaugucaag

SEQ ID NO: 608037 - RNA, 19 nt, Homo sapiens
  misc_RNA (1)...(19): siRNA sense strand
caagaggcugguagaguaa

SEQ ID NO: 608038 - RNA, 19 nt, Homo sapiens
  misc_RNA (1)...(19): siRNA sense strand
agggauaugucaagguaaa

SEQ ID NO: 608039 - RNA, 19 nt, Homo sapiens
  misc_RNA (1)...(19): siRNA sense strand
uuaagcauaugcacacugu

SEQ ID NO: 608040 - RNA, 19 nt, Homo sapiens
  misc_RNA (1)...(19): siRNA sense strand
ggugauaaaggauaaauac

SEQ ID NO: 608041 - RNA, 19 nt, Homo sapiens
  misc_RNA (1)...(19): siRNA sense strand
ucacugauaagaaauguuc

SEQ ID NO: 608042 - RNA, 19 nt, Homo sapiens
  misc_RNA (1)...(19): siRNA sense strand
gcaacagugauucuauaga

SEQ ID NO: 608043 - RNA, 19 nt, Homo sapiens
  misc_RNA (1)...(19): siRNA sense strand
caaacuccgcuuccgauug

SEQ ID NO: 608044 - RNA, 19 nt, Homo sapiens
  misc_RNA (1)...(19): siRNA sense strand
gagcaggugguggugauaa

SEQ ID NO: 608045 - RNA, 19 nt, Homo sapiens
  misc_RNA (1)...(19): siRNA sense strand
gcaaacuccgcuuccgauu

SEQ ID NO: 608046 - RNA, 19 nt, Homo sapiens
  misc_RNA (1)...(19): siRNA sense strand
ggaaacacacaggaagaga

SEQ ID NO: 608047 - RNA, 19 nt, Homo sapiens
  misc_RNA (1)...(19): siRNA sense strand
uaugagccauguacaucuu

SEQ ID NO: 608048 - RNA, 19 nt, Homo sapiens
  misc_RNA (1)...(19): siRNA sense strand
gaaaagaugcaccuaucaa

SEQ ID NO: 608049 - RNA, 19 nt, Homo sapiens
  misc_RNA (1)...(19): siRNA sense strand
aaagagaucaggcaacagu

SEQ ID NO: 608050 - RNA, 19 nt, Homo sapiens
  misc_RNA (1)...(19): siRNA sense strand
gggaaaagaugcaccuauc

SEQ ID NO: 608051 - RNA, 19 nt, Homo sapiens
  misc_RNA (1)...(19): siRNA sense strand
uacagaauacuuccuagaa

SEQ ID NO: 608052 - RNA, 19 nt, Homo sapiens
  misc_RNA (1)...(19): siRNA sense strand
cuugaacuccuuaagcaua

SEQ ID NO: 608053 - RNA, 19 nt, Homo sapiens
  misc_RNA (1)...(19): siRNA sense strand
gggagcaacucuggccaau

SEQ ID NO: 608054 - RNA, 19 nt, Homo sapiens
  misc_RNA (1)...(19): siRNA sense strand
aagaacaucucaggaagca

SEQ ID NO: 608055 - RNA, 19 nt, Homo sapiens
  misc_RNA (1)...(19): siRNA sense strand
acacacaggaagagaaaga

SEQ ID NO: 608056 - RNA, 19 nt, Homo sapiens
  misc_RNA (1)...(19): siRNA sense strand
ugauucuccuugccuuaaa

SEQ ID NO: 608057 - RNA, 19 nt, Homo sapiens
  misc_RNA (1)...(19): siRNA sense strand
cagaguguaacaagggaua

SEQ ID NO: 608058 - RNA, 19 nt, Homo sapiens
  misc_RNA (1)...(19): siRNA sense strand
aagggaugcugcucaggaa

SEQ ID NO: 608059 - RNA, 19 nt, Homo sapiens
  misc_RNA (1)...(19): siRNA sense strand
caugugaucagccaggauu

SEQ ID NO: 608060 - RNA, 19 nt, Homo sapiens
  misc_RNA (1)...(19): siRNA sense strand
caaaaugcagguuuacaaa

SEQ ID NO: 608061 - RNA, 19 nt, Homo sapiens
  misc_RNA (1)...(19): siRNA sense strand
gaaaaggugauuguagauu

SEQ ID NO: 608062 - RNA, 19 nt, Homo sapiens
  misc_RNA (1)...(19): siRNA sense strand
aaggauaaauacccaaagg

SEQ ID NO: 608063 - RNA, 19 nt, Homo sapiens
  misc_RNA (1)...(19): siRNA sense strand
ugggaugccugagcucuug

SEQ ID NO: 608064 - RNA, 19 nt, Homo sapiens
  misc_RNA (1)...(19): siRNA sense strand
agaauacuuccuagaauca

SEQ ID NO: 608065 - RNA, 19 nt, Homo sapiens
  misc_RNA (1)...(19): siRNA sense strand
uggaagcaguugugauugg

SEQ ID NO: 608066 - RNA, 19 nt, Homo sapiens
  misc_RNA (1)...(19): siRNA sense strand
uugaacuccuuaagcauau

SEQ ID NO: 608067 - RNA, 19 nt, Homo sapiens
  misc_RNA (1)...(19): siRNA sense strand
ggccagggaacaccuugaa

SEQ ID NO: 608068 - RNA, 19 nt, Homo sapiens
  misc_RNA (1)...(19): siRNA sense strand
cagagaccaagaucacuga

SEQ ID NO: 608069 - RNA, 19 nt, Homo sapiens
  misc_RNA (1)...(19): siRNA sense strand
gguacaagaggcugguaga

SEQ ID NO: 608070 - RNA, 19 nt, Homo sapiens
  misc_RNA (1)...(19): siRNA sense strand
uuuggaagcaguugugauu

SEQ ID NO: 608071 - RNA, 19 nt, Homo sapiens
  misc_RNA (1)...(19): siRNA sense strand
guaacaagggauaugucaa

SEQ ID NO: 608072 - RNA, 19 nt, Homo sapiens
  misc_RNA (1)...(19): siRNA sense strand
uuccucagcugaaagaaca

SEQ ID NO: 608073 - RNA, 19 nt, Homo sapiens
  misc_RNA (1)...(19): siRNA sense strand
agagaucaggcaacaguga

SEQ ID NO: 608074 - RNA, 19 nt, Homo sapiens
  misc_RNA (1)...(19): siRNA sense strand
gaguaugagccauguacau

SEQ ID NO: 608075 - RNA, 19 nt, Homo sapiens
  misc_RNA (1)...(19): siRNA sense strand
caccagcgaaucagacuuc

SEQ ID NO: 608076 - RNA, 19 nt, Homo sapiens
  misc_RNA (1)...(19): siRNA sense strand
ggaaaagaugcaccuauca

SEQ ID NO: 608077 - RNA, 19 nt, Homo sapiens
  misc_RNA (1)...(19): siRNA sense strand
cagcugaaagaacaucuca

SEQ ID NO: 608078 - RNA, 19 nt, Homo sapiens
  misc_RNA (1)...(19): siRNA sense strand
ugaaagcagaguguaacaa

SEQ ID NO: 608079 - RNA, 19 nt, Homo sapiens
  misc_RNA (1)...(19): siRNA sense strand
ggcaacagugauucuauag

SEQ ID NO: 608080 - RNA, 19 nt, Homo sapiens
  misc_RNA (1)...(19): siRNA sense strand
aaaggcccguuaccauugg

SEQ ID NO: 608081 - RNA, 19 nt, Homo sapiens
  misc_RNA (1)...(19): siRNA sense strand
ugguggugauaaaggauaa

SEQ ID NO: 608082 - RNA, 19 nt, Homo sapiens
  misc_RNA (1)...(19): siRNA sense strand
gugguggugauaaaggaua

SEQ ID NO: 608083 - RNA, 19 nt, Homo sapiens
  misc_RNA (1)...(19): siRNA sense strand
aaugcagguuuacaaagau

SEQ ID NO: 608084 - RNA, 19 nt, Homo sapiens
  misc_RNA (1)...(19): siRNA sense strand
ccaaaaugcagguuuacaa

SEQ ID NO: 608085 - RNA, 19 nt, Homo sapiens
  misc_RNA (1)...(19): siRNA sense strand
gaacagcaguaaugaacuu

SEQ ID NO: 608086 - RNA, 19 nt, Homo sapiens
  misc_RNA (1)...(19): siRNA sense strand
gcaaacaccacaaccaaua

SEQ ID NO: 608087 - RNA, 19 nt, Homo sapiens
  misc_RNA (1)...(19): siRNA sense strand
caauaugucuguccugguu

SEQ ID NO: 608088 - RNA, 19 nt, Homo sapiens
  misc_RNA (1)...(19): siRNA sense strand
cagcaguaaugaacuuuaa

SEQ ID NO: 608089 - RNA, 19 nt, Homo sapiens
  misc_RNA (1)...(19): siRNA sense strand
gcacauugguuuuggaauu

SEQ ID NO: 608090 - RNA, 19 nt, Homo sapiens
  misc_RNA (1)...(19): siRNA sense strand
guggauaugugcaucaaug

SEQ ID NO: 608091 - RNA, 19 nt, Homo sapiens
  misc_RNA (1)...(19): siRNA sense strand
cuuuauggcuccuggauuu

SEQ ID NO: 608092 - RNA, 19 nt, Homo sapiens
  misc_RNA (1)...(19): siRNA sense strand
aacaagccaugcugaagua

SEQ ID NO: 608093 - RNA, 19 nt, Homo sapiens
  misc_RNA (1)...(19): siRNA sense strand
ccaaauauguaugaaagca

SEQ ID NO: 608094 - RNA, 19 nt, Homo sapiens
  misc_RNA (1)...(19): siRNA sense strand
ggucaaggaaauauacaaa

SEQ ID NO: 608095 - RNA, 19 nt, Homo sapiens
  misc_RNA (1)...(19): siRNA sense strand
caacaacuacucagcuaau

SEQ ID NO: 608096 - RNA, 19 nt, Homo sapiens
  misc_RNA (1)...(19): siRNA sense strand
caaaugauaaauccaagug

SEQ ID NO: 608097 - RNA, 19 nt, Homo sapiens
  misc_RNA (1)...(19): siRNA sense strand
gcaacaacuacucagcuaa

SEQ ID NO: 608098 - RNA, 19 nt, Homo sapiens
  misc_RNA (1)...(19): siRNA sense strand
caacaagccaugcugaagu

SEQ ID NO: 608099 - RNA, 19 nt, Homo sapiens
  misc_RNA (1)...(19): siRNA sense strand
aaaccauacccaacccuua

SEQ ID NO: 608100 - RNA, 19 nt, Homo sapiens
  misc_RNA (1)...(19): siRNA sense strand
uaugaaagcaacccuguga

SEQ ID NO: 608101 - RNA, 19 nt, Homo sapiens
  misc_RNA (1)...(19): siRNA sense strand
caucacaucuccgggaauc

SEQ ID NO: 608102 - RNA, 19 nt, Homo sapiens
  misc_RNA (1)...(19): siRNA sense strand
gcaguaaugaacuuuaaag

SEQ ID NO: 608103 - RNA, 19 nt, Homo sapiens
  misc_RNA (1)...(19): siRNA sense strand
caaacaccacaaccaauau

SEQ ID NO: 608104 - RNA, 19 nt, Homo sapiens
  misc_RNA (1)...(19): siRNA sense strand
gaugaucuucucccucuug

SEQ ID NO: 608105 - RNA, 19 nt, Homo sapiens
  misc_RNA (1)...(19): siRNA sense strand
ggccuucauuggagugauu

SEQ ID NO: 608106 - RNA, 19 nt, Homo sapiens
  misc_RNA (1)...(19): siRNA sense strand
gaacuuuaaagaagaagca

SEQ ID NO: 608107 - RNA, 19 nt, Homo sapiens
  misc_RNA (1)...(19): siRNA sense strand
aagccaugcugaaguaaau

SEQ ID NO: 608108 - RNA, 19 nt, Homo sapiens
  misc_RNA (1)...(19): siRNA sense strand
gcucagcccuacggcauca

SEQ ID NO: 608109 - RNA, 19 nt, Homo sapiens
  misc_RNA (1)...(19): siRNA sense strand
ggauugaugcacauugguu

SEQ ID NO: 608110 - RNA, 19 nt, Homo sapiens
  misc_RNA (1)...(19): siRNA sense strand
ugcaacaacuacucagcua

SEQ ID NO: 608111 - RNA, 19 nt, Homo sapiens
  misc_RNA (1)...(19): siRNA sense strand
uaucuuggccuucauugga

SEQ ID NO: 608112 - RNA, 19 nt, Homo sapiens
  misc_RNA (1)...(19): siRNA sense strand
gggaacagcaguaaugaac

SEQ ID NO: 608113 - RNA, 19 nt, Homo sapiens
  misc_RNA (1)...(19): siRNA sense strand
ccacaaccaauaugucugu

SEQ ID NO: 608114 - RNA, 19 nt, Homo sapiens
  misc_RNA (1)...(19): siRNA sense strand
gauugaugcacauugguuu

SEQ ID NO: 608115 - RNA, 19 nt, Homo sapiens
  misc_RNA (1)...(19): siRNA sense strand
ucaaccgggucaaggaaau

SEQ ID NO: 608116 - RNA, 19 nt, Homo sapiens
  misc_RNA (1)...(19): siRNA sense strand
gaaguaaaugaaaccauac

SEQ ID NO: 608117 - RNA, 19 nt, Homo sapiens
  misc_RNA (1)...(19): siRNA sense strand
caaggagcuuucccguugu

SEQ ID NO: 608118 - RNA, 19 nt, Homo sapiens
  misc_RNA (1)...(19): siRNA sense strand
caaccgggucaaggaaaua

SEQ ID NO: 608119 - RNA, 19 nt, Homo sapiens
  misc_RNA (1)...(19): siRNA sense strand
cagcuaaugccccuaaaua

SEQ ID NO: 608120 - RNA, 19 nt, Homo sapiens
  misc_RNA (1)...(19): siRNA sense strand
gguggccuuucuuuuauua

SEQ ID NO: 608121 - RNA, 19 nt, Homo sapiens
  misc_RNA (1)...(19): siRNA sense strand
cauuguuaguucuaucuug

SEQ ID NO: 608122 - RNA, 19 nt, Homo sapiens
  misc_RNA (1)...(19): siRNA sense strand
ccucuuggaguucuucgua

SEQ ID NO: 608123 - RNA, 19 nt, Homo sapiens
  misc_RNA (1)...(19): siRNA sense strand
caagccaugcugaaguaaa

SEQ ID NO: 608124 - RNA, 19 nt, Homo sapiens
  misc_RNA (1)...(19): siRNA sense strand
ugaaagcaacccugugaca

SEQ ID NO: 608125 - RNA, 19 nt, Homo sapiens
  misc_RNA (1)...(19): siRNA sense strand
uggguucaaucaacuuaga

SEQ ID NO: 608126 - RNA, 19 nt, Homo sapiens
  misc_RNA (1)...(19): siRNA sense strand
aagcaaacaccacaaccaa

SEQ ID NO: 608127 - RNA, 19 nt, Homo sapiens
  misc_RNA (1)...(19): siRNA sense strand
ccaccaggcagcuuuaugg

SEQ ID NO: 608128 - RNA, 19 nt, Homo sapiens
  misc_RNA (1)...(19): siRNA sense strand
agaagaagcaaaggcacua

SEQ ID NO: 608129 - RNA, 19 nt, Homo sapiens
  misc_RNA (1)...(19): siRNA sense strand
gggguggccuuucuuuuau

SEQ ID NO: 608130 - RNA, 19 nt, Homo sapiens
  misc_RNA (1)...(19): siRNA sense strand
ucacaucuccgggaaucuu

SEQ ID NO: 608131 - RNA, 19 nt, Homo sapiens
  misc_RNA (1)...(19): siRNA sense strand
aaacaccacaaccaauaug

SEQ ID NO: 608132 - RNA, 19 nt, Homo sapiens
  misc_RNA (1)...(19): siRNA sense strand
ccagaucaugguuggauug

SEQ ID NO: 608133 - RNA, 19 nt, Homo sapiens
  misc_RNA (1)...(19): siRNA sense strand
ccgggaaucuuugcuagca

SEQ ID NO: 608134 - RNA, 19 nt, Homo sapiens
  misc_RNA (1)...(19): siRNA sense strand
ggaguucuucguagcuugu

SEQ ID NO: 608135 - RNA, 19 nt, Homo sapiens
  misc_RNA (1)...(19): siRNA sense strand
ugacaccagcgucuucuuc

SEQ ID NO: 608136 - RNA, 19 nt, Homo sapiens
  misc_RNA (1)...(19): siRNA sense strand
ucaacagccucuggguuca

SEQ ID NO: 608137 - RNA, 19 nt, Homo sapiens
  misc_RNA (1)...(19): siRNA sense strand
aaucuuugcuagcagucaa

SEQ ID NO: 608138 - RNA, 19 nt, Homo sapiens
  misc_RNA (1)...(19): siRNA sense strand
caagcaaacaccacaacca

SEQ ID NO: 608139 - RNA, 19 nt, Homo sapiens
  misc_RNA (1)...(19): siRNA sense strand
gguucaaucaacuuagaaa

SEQ ID NO: 608140 - RNA, 19 nt, Homo sapiens
  misc_RNA (1)...(19): siRNA sense strand
gaagaagcaaaggcacuag

SEQ ID NO: 608141 - RNA, 19 nt, Homo sapiens
  misc_RNA (1)...(19): siRNA sense strand
acagcaguaaugaacuuua

SEQ ID NO: 608142 - RNA, 19 nt, Homo sapiens
  misc_RNA (1)...(19): siRNA sense strand
gacaccagcgucuucuuca

SEQ ID NO: 608143 - RNA, 19 nt, Homo sapiens
  misc_RNA (1)...(19): siRNA sense strand
gccaacaagccaugcugaa

SEQ ID NO: 608144 - RNA, 19 nt, Homo sapiens
  misc_RNA (1)...(19): siRNA sense strand
ugugggaacagcaguaaug

SEQ ID NO: 608145 - RNA, 19 nt, Homo sapiens
  misc_RNA (1)...(19): siRNA sense strand
gccaugcugaaguaaauga

SEQ ID NO: 608146 - RNA, 19 nt, Homo sapiens
  misc_RNA (1)...(19): siRNA sense strand
cuucagcuccucccagaug

SEQ ID NO: 608147 - RNA, 19 nt, Homo sapiens
  misc_RNA (1)...(19): siRNA sense strand
ccaacaagccaugcugaag

SEQ ID NO: 608148 - RNA, 19 nt, Homo sapiens
  misc_RNA (1)...(19): siRNA sense strand
caacagccucuggguucaa

SEQ ID NO: 608149 - RNA, 19 nt, Homo sapiens
  misc_RNA (1)...(19): siRNA sense strand
ggaaugagcucuucaacaa

SEQ ID NO: 608150 - RNA, 19 nt, Homo sapiens
  misc_RNA (1)...(19): siRNA sense strand
ggaaaggucucagaugaaa

SEQ ID NO: 608151 - RNA, 19 nt, Homo sapiens
  misc_RNA (1)...(19): siRNA sense strand
ggaagaagcuacagcaucu

SEQ ID NO: 608152 - RNA, 19 nt, Homo sapiens
  misc_RNA (1)...(19): siRNA sense strand
caaagauucugacugauga

SEQ ID NO: 608153 - RNA, 19 nt, Homo sapiens
  misc_RNA (1)...(19): siRNA sense strand
gagagaagccaaacaaaga

SEQ ID NO: 608154 - RNA, 19 nt, Homo sapiens
  misc_RNA (1)...(19): siRNA sense strand
gcagagagcaaaccaauca

SEQ ID NO: 608155 - RNA, 19 nt, Homo sapiens
  misc_RNA (1)...(19): siRNA sense strand
ggaggacgcugcaggaaca

SEQ ID NO: 608156 - RNA, 19 nt, Homo sapiens
  misc_RNA (1)...(19): siRNA sense strand
gaaagagaggguacaacua

SEQ ID NO: 608157 - RNA, 19 nt, Homo sapiens
  misc_RNA (1)...(19): siRNA sense strand
aaggaaaggucucagauga

SEQ ID NO: 608158 - RNA, 19 nt, Homo sapiens
  misc_RNA (1)...(19): siRNA sense strand
gaaagaagaggcagcaaca

SEQ ID NO: 608159 - RNA, 19 nt, Homo sapiens
  misc_RNA (1)...(19): siRNA sense strand
aaagagaggguacaacuaa

SEQ ID NO: 608160 - RNA, 19 nt, Homo sapiens
  misc_RNA (1)...(19): siRNA sense strand
gaagauagaggugaggaaa

SEQ ID NO: 608161 - RNA, 19 nt, Homo sapiens
  misc_RNA (1)...(19): siRNA sense strand
cuaaggagaccacccguua

SEQ ID NO: 608162 - RNA, 19 nt, Homo sapiens
  misc_RNA (1)...(19): siRNA sense strand
ccaacuugcuguaucagaa

SEQ ID NO: 608163 - RNA, 19 nt, Homo sapiens
  misc_RNA (1)...(19): siRNA sense strand
gcagaaagaggaggaagaa

SEQ ID NO: 608164 - RNA, 19 nt, Homo sapiens
  misc_RNA (1)...(19): siRNA sense strand
ggaaugaugcagaugagaa

SEQ ID NO: 608165 - RNA, 19 nt, Homo sapiens
  misc_RNA (1)...(19): siRNA sense strand
gaaggagaaugguaucacu

SEQ ID NO: 608166 - RNA, 19 nt, Homo sapiens
  misc_RNA (1)...(19): siRNA sense strand
gaagcuacagcaucugaaa

SEQ ID NO: 608167 - RNA, 19 nt, Homo sapiens
  misc_RNA (1)...(19): siRNA sense strand
caacuaaagggaaugagaa

SEQ ID NO: 608168 - RNA, 19 nt, Homo sapiens
  misc_RNA (1)...(19): siRNA sense strand
gaaggaaaggucucagaug

SEQ ID NO: 608169 - RNA, 19 nt, Homo sapiens
  misc_RNA (1)...(19): siRNA sense strand
ugaaaggaaugaugcagau

SEQ ID NO: 608170 - RNA, 19 nt, Homo sapiens
  misc_RNA (1)...(19): siRNA sense strand
ggagagaagccaaacaaag

SEQ ID NO: 608171 - RNA, 19 nt, Homo sapiens
  misc_RNA (1)...(19): siRNA sense strand
ccaaggaguucacaaacca

SEQ ID NO: 608172 - RNA, 19 nt, Homo sapiens
  misc_RNA (1)...(19): siRNA sense strand
ggacuugaaccuagaagau

SEQ ID NO: 608173 - RNA, 19 nt, Homo sapiens
  misc_RNA (1)...(19): siRNA sense strand
acacaaggcugcccgucuu

SEQ ID NO: 608174 - RNA, 19 nt, Homo sapiens
  misc_RNA (1)...(19): siRNA sense strand
gcaggauggaguacagaua

SEQ ID NO: 608175 - RNA, 19 nt, Homo sapiens
  misc_RNA (1)...(19): siRNA sense strand
ccaaagauucugacugaug

SEQ ID NO: 608176 - RNA, 19 nt, Homo sapiens
  misc_RNA (1)...(19): siRNA sense strand
gacaugacccugccaagga

SEQ ID NO: 608177 - RNA, 19 nt, Homo sapiens
  misc_RNA (1)...(19): siRNA sense strand
ggagaccacccguuauaau

SEQ ID NO: 608178 - RNA, 19 nt, Homo sapiens
  misc_RNA (1)...(19): siRNA sense strand
gauucugacugaugagaug

SEQ ID NO: 608179 - RNA, 19 nt, Homo sapiens
  misc_RNA (1)...(19): siRNA sense strand
caggauggaguacagauaa

SEQ ID NO: 608180 - RNA, 19 nt, Homo sapiens
  misc_RNA (1)...(19): siRNA sense strand
gggugacacugaagcaaga

SEQ ID NO: 608181 - RNA, 19 nt, Homo sapiens
  misc_RNA (1)...(19): siRNA sense strand
gacuugaaccuagaagaua

SEQ ID NO: 608182 - RNA, 19 nt, Homo sapiens
  misc_RNA (1)...(19): siRNA sense strand
guagagagcagggcauaug

SEQ ID NO: 608183 - RNA, 19 nt, Homo sapiens
  misc_RNA (1)...(19): siRNA sense strand
gagaagcacccagaacaug

SEQ ID NO: 608184 - RNA, 19 nt, Homo sapiens
  misc_RNA (1)...(19): siRNA sense strand
uggauggacucaaggcaaa

SEQ ID NO: 608185 - RNA, 19 nt, Homo sapiens
  misc_RNA (1)...(19): siRNA sense strand
ccaugcagccgaagaaaga

SEQ ID NO: 608186 - RNA, 19 nt, Homo sapiens
  misc_RNA (1)...(19): siRNA sense strand
aaggagaccacccguuaua

SEQ ID NO: 608187 - RNA, 19 nt, Homo sapiens
  misc_RNA (1)...(19): siRNA sense strand
gaaagaggaggaagaagcu

SEQ ID NO: 608188 - RNA, 19 nt, Homo sapiens
  misc_RNA (1)...(19): siRNA sense strand
gaagccaaacaaagacuug

SEQ ID NO: 608189 - RNA, 19 nt, Homo sapiens
  misc_RNA (1)...(19): siRNA sense strand
gagaccacccguuauaauc

SEQ ID NO: 608190 - RNA, 19 nt, Homo sapiens
  misc_RNA (1)...(19): siRNA sense strand
cuuccuggcucgucucaaa

SEQ ID NO: 608191 - RNA, 19 nt, Homo sapiens
  misc_RNA (1)...(19): siRNA sense strand
aagcauggauggacucaag

SEQ ID NO: 608192 - RNA, 19 nt, Homo sapiens
  misc_RNA (1)...(19): siRNA sense strand
ggaggaggacuugaaccua

SEQ ID NO: 608193 - RNA, 19 nt, Homo sapiens
  misc_RNA (1)...(19): siRNA sense strand
aaaggaaugaugcagauga

SEQ ID NO: 608194 - RNA, 19 nt, Homo sapiens
  misc_RNA (1)...(19): siRNA sense strand
aaaggucucagaugaaaga

SEQ ID NO: 608195 - RNA, 19 nt, Homo sapiens
  misc_RNA (1)...(19): siRNA sense strand
gaaaaggcgacaucaagaa

SEQ ID NO: 608196 - RNA, 19 nt, Homo sapiens
  misc_RNA (1)...(19): siRNA sense strand
caagcuugcucgccuagag

SEQ ID NO: 608197 - RNA, 19 nt, Homo sapiens
  misc_RNA (1)...(19): siRNA sense strand
gcagagagcagagcaugca

SEQ ID NO: 608198 - RNA, 19 nt, Homo sapiens
  misc_RNA (1)...(19): siRNA sense strand
cuaaagggaaugagaagga

SEQ ID NO: 608199 - RNA, 19 nt, Homo sapiens
  misc_RNA (1)...(19): siRNA sense strand
aagagaggguacaacuaaa

SEQ ID NO: 608200 - RNA, 19 nt, Homo sapiens
  misc_RNA (1)...(19): siRNA sense strand
ggguacaacuaaagggaau

SEQ ID NO: 608201 - RNA, 19 nt, Homo sapiens
  misc_RNA (1)...(19): siRNA sense strand
ggagcggacccagcaauga

SEQ ID NO: 608202 - RNA, 19 nt, Homo sapiens
  misc_RNA (1)...(19): siRNA sense strand
guacaacuaaagggaauga

SEQ ID NO: 608203 - RNA, 19 nt, Homo sapiens
  misc_RNA (1)...(19): siRNA sense strand
uacagcaucugaaaggaau

SEQ ID NO: 608204 - RNA, 19 nt, Homo sapiens
  misc_RNA (1)...(19): siRNA sense strand
ccaaucagucccucaggaa

SEQ ID NO: 608205 - RNA, 19 nt, Homo sapiens
  misc_RNA (1)...(19): siRNA sense strand
gaccacccguuauaaucau

SEQ ID NO: 608206 - RNA, 19 nt, Homo sapiens
  misc_RNA (1)...(19): siRNA sense strand
gaaugaugcagaugagaag

SEQ ID NO: 608207 - RNA, 19 nt, Homo sapiens
  misc_RNA (1)...(19): siRNA sense strand
guggagagaagccaaacaa

SEQ ID NO: 608208 - RNA, 19 nt, Homo sapiens
  misc_RNA (1)...(19): siRNA sense strand
ugaaagagaggguacaacu

SEQ ID NO: 608209 - RNA, 19 nt, Homo sapiens
  misc_RNA (1)...(19): siRNA sense strand
cgucuugggaucacaauga

SEQ ID NO: 608210 - RNA, 19 nt, Homo sapiens
  misc_RNA (1)...(19): siRNA sense strand
ccccaaagauucugacuga

SEQ ID NO: 608211 - RNA, 19 nt, Homo sapiens
  misc_RNA (1)...(19): siRNA sense strand
gaaaggaaugaugcagaug

SEQ ID NO: 608212 - RNA, 19 nt, Homo sapiens
  misc_RNA (1)...(19): siRNA sense strand
uagcagagagcaaaccaau

SEQ ID NO: 608213 - RNA, 19 nt, Homo sapiens
  misc_RNA (1)...(19): siRNA sense strand
gaugaaagagaggguacaa

SEQ ID NO: 608214 - RNA, 19 nt, Homo sapiens
  misc_RNA (1)...(19): siRNA sense strand
gcuacagcaucugaaagga

SEQ ID NO: 608215 - RNA, 19 nt, Homo sapiens
  misc_RNA (1)...(19): siRNA sense strand
cuacagcaucugaaaggaa

SEQ ID NO: 608216 - RNA, 19 nt, Homo sapiens
  misc_RNA (1)...(19): siRNA sense strand
caaucagucccucaggaaa

SEQ ID NO: 608217 - RNA, 19 nt, Homo sapiens
  misc_RNA (1)...(19): siRNA sense strand
gauggaguacagauaagga

SEQ ID NO: 608218 - RNA, 19 nt, Homo sapiens
  misc_RNA (1)...(19): siRNA sense strand
agauagaggugaggaaacu

SEQ ID NO: 608219 - RNA, 19 nt, Homo sapiens
  misc_RNA (1)...(19): siRNA sense strand
gaagaaaaggcgacaucaa

SEQ ID NO: 608220 - RNA, 19 nt, Homo sapiens
  misc_RNA (1)...(19): siRNA sense strand
uaaggagaccacccguuau

SEQ ID NO: 608221 - RNA, 19 nt, Homo sapiens
  misc_RNA (1)...(19): siRNA sense strand
gucuugggaucacaaugaa

SEQ ID NO: 608222 - RNA, 19 nt, Homo sapiens
  misc_RNA (1)...(19): siRNA sense strand
gaaugagcucuucaacaag

SEQ ID NO: 608223 - RNA, 19 nt, Homo sapiens
  misc_RNA (1)...(19): siRNA sense strand
aaggcgacaucaagaagga

SEQ ID NO: 608224 - RNA, 19 nt, Homo sapiens
  misc_RNA (1)...(19): siRNA sense strand
agaccacccguuauaauca

SEQ ID NO: 608225 - RNA, 19 nt, Homo sapiens
  misc_RNA (1)...(19): siRNA sense strand
ggacgcugcaggaacaagu

SEQ ID NO: 608226 - RNA, 19 nt, Homo sapiens
  misc_RNA (1)...(19): siRNA sense strand
caagagucgugggaugaag

SEQ ID NO: 608227 - RNA, 19 nt, Homo sapiens
  misc_RNA (1)...(19): siRNA sense strand
ggaggacuugaaccuagaa

SEQ ID NO: 608228 - RNA, 19 nt, Homo sapiens
  misc_RNA (1)...(19): siRNA sense strand
ggcagaaagaggaggaaga

SEQ ID NO: 608229 - RNA, 19 nt, Homo sapiens
  misc_RNA (1)...(19): siRNA sense strand
auagaggugaggaaacuuu

SEQ ID NO: 608230 - RNA, 19 nt, Homo sapiens
  misc_RNA (1)...(19): siRNA sense strand
uugaauagcagagagcaaa

SEQ ID NO: 608231 - RNA, 19 nt, Homo sapiens
  misc_RNA (1)...(19): siRNA sense strand
acaacuaaagggaaugaga

SEQ ID NO: 608232 - RNA, 19 nt, Homo sapiens
  misc_RNA (1)...(19): siRNA sense strand
aagaagcuacagcaucuga

SEQ ID NO: 608233 - RNA, 19 nt, Homo sapiens
  misc_RNA (1)...(19): siRNA sense strand
gucaagagucgugggauga

SEQ ID NO: 608234 - RNA, 19 nt, Homo sapiens
  misc_RNA (1)...(19): siRNA sense strand
ggaggaggaggacuugaac

SEQ ID NO: 608235 - RNA, 19 nt, Homo sapiens
  misc_RNA (1)...(19): siRNA sense strand
gacccaugcagccgaagaa

SEQ ID NO: 608236 - RNA, 19 nt, Homo sapiens
  misc_RNA (1)...(19): siRNA sense strand
gagaggguacaacuaaagg

SEQ ID NO: 608237 - RNA, 19 nt, Homo sapiens
  misc_RNA (1)...(19): siRNA sense strand
gaaaggucucagaugaaag

SEQ ID NO: 608238 - RNA, 19 nt, Homo sapiens
  misc_RNA (1)...(19): siRNA sense strand
gaugagaagcacccagaac

SEQ ID NO: 608239 - RNA, 19 nt, Homo sapiens
  misc_RNA (1)...(19): siRNA sense strand
gccaaggaguucacaaacc

SEQ ID NO: 608240 - RNA, 19 nt, Homo sapiens
  misc_RNA (1)...(19): siRNA sense strand
caacuugcuguaucagaag

SEQ ID NO: 608241 - RNA, 19 nt, Homo sapiens
  misc_RNA (1)...(19): siRNA sense strand
acuugaaccuagaagauag

SEQ ID NO: 608242 - RNA, 19 nt, Homo sapiens
  misc_RNA (1)...(19): siRNA sense strand
ggccggaaggagaauggua

SEQ ID NO: 608243 - RNA, 19 nt, Homo sapiens
  misc_RNA (1)...(19): siRNA sense strand
gagcggacccagcaaugac

SEQ ID NO: 608244 - RNA, 19 nt, Homo sapiens
  misc_RNA (1)...(19): siRNA sense strand
aggaggacuugaaccuaga

SEQ ID NO: 608245 - RNA, 19 nt, Homo sapiens
  misc_RNA (1)...(19): siRNA sense strand
aagcccaacuugcuguauc

SEQ ID NO: 608246 - RNA, 19 nt, Homo sapiens
  misc_RNA (1)...(19): siRNA sense strand
acaagacugcggccaacuu

SEQ ID NO: 608247 - RNA, 19 nt, Homo sapiens
  misc_RNA (1)...(19): siRNA sense strand
gggaauugaauagcagaga

SEQ ID NO: 608248 - RNA, 19 nt, Homo sapiens
  misc_RNA (1)...(19): siRNA sense strand
gguggaaugagcucuucaa

SEQ ID NO: 608249 - RNA, 19 nt, Homo sapiens
  misc_RNA (1)...(19): siRNA sense strand
ggaaugagcucuucaacaa

SEQ ID NO: 608250 - RNA, 19 nt, Homo sapiens
  misc_RNA (1)...(19): siRNA sense strand
cuaaggagaccacccguua

SEQ ID NO: 608251 - RNA, 19 nt, Homo sapiens
  misc_RNA (1)...(19): siRNA sense strand
ccaacuugcuguaucagaa

SEQ ID NO: 608252 - RNA, 19 nt, Homo sapiens
  misc_RNA (1)...(19): siRNA sense strand
gaaggagaaugguaucacu

SEQ ID NO: 608253 - RNA, 19 nt, Homo sapiens
  misc_RNA (1)...(19): siRNA sense strand
ccaaggaguucacaaacca

SEQ ID NO: 608254 - RNA, 19 nt, Homo sapiens
  misc_RNA (1)...(19): siRNA sense strand
gcaggauggaguacagaua

SEQ ID NO: 608255 - RNA, 19 nt, Homo sapiens
  misc_RNA (1)...(19): siRNA sense strand
gacaugacccugccaagga

SEQ ID NO: 608256 - RNA, 19 nt, Homo sapiens
  misc_RNA (1)...(19): siRNA sense strand
ggagaccacccguuauaau

SEQ ID NO: 608257 - RNA, 19 nt, Homo sapiens
  misc_RNA (1)...(19): siRNA sense strand
caggauggaguacagauaa

SEQ ID NO: 608258 - RNA, 19 nt, Homo sapiens
  misc_RNA (1)...(19): siRNA sense strand
gggugacacugaagcaaga

SEQ ID NO: 608259 - RNA, 19 nt, Homo sapiens
  misc_RNA (1)...(19): siRNA sense strand
uggauggacucaaggcaaa

SEQ ID NO: 608260 - RNA, 19 nt, Homo sapiens
  misc_RNA (1)...(19): siRNA sense strand
aaggagaccacccguuaua

SEQ ID NO: 608261 - RNA, 19 nt, Homo sapiens
  misc_RNA (1)...(19): siRNA sense strand
gagaccacccguuauaauc

SEQ ID NO: 608262 - RNA, 19 nt, Homo sapiens
  misc_RNA (1)...(19): siRNA sense strand
aagcauggauggacucaag

SEQ ID NO: 608263 - RNA, 19 nt, Homo sapiens
  misc_RNA (1)...(19): siRNA sense strand
gaccacccguuauaaucau

SEQ ID NO: 608264 - RNA, 19 nt, Homo sapiens
  misc_RNA (1)...(19): siRNA sense strand
gauggaguacagauaagga

SEQ ID NO: 608265 - RNA, 19 nt, Homo sapiens
  misc_RNA (1)...(19): siRNA sense strand
uaaggagaccacccguuau

SEQ ID NO: 608266 - RNA, 19 nt, Homo sapiens
  misc_RNA (1)...(19): siRNA sense strand
gaaugagcucuucaacaag

SEQ ID NO: 608267 - RNA, 19 nt, Homo sapiens
  misc_RNA (1)...(19): siRNA sense strand
agaccacccguuauaauca

SEQ ID NO: 608268 - RNA, 19 nt, Homo sapiens
  misc_RNA (1)...(19): siRNA sense strand
caagagucgugggaugaag

SEQ ID NO: 608269 - RNA, 19 nt, Homo sapiens
  misc_RNA (1)...(19): siRNA sense strand
gccaaggaguucacaaacc

SEQ ID NO: 608270 - RNA, 19 nt, Homo sapiens
  misc_RNA (1)...(19): siRNA sense strand
gucaagagucgugggauga

SEQ ID NO: 608271 - RNA, 19 nt, Homo sapiens
  misc_RNA (1)...(19): siRNA sense strand
ggccggaaggagaauggua

SEQ ID NO: 608272 - RNA, 19 nt, Homo sapiens
  misc_RNA (1)...(19): siRNA sense strand
caacuugcuguaucagaag

SEQ ID NO: 608273 - RNA, 19 nt, Homo sapiens
  misc_RNA (1)...(19): siRNA sense strand
gguggaaugagcucuucaa

SEQ ID NO: 608274 - RNA, 19 nt, Homo sapiens
  misc_RNA (1)...(19): siRNA sense strand
aagcccaacuugcuguauc

SEQ ID NO: 608275 - RNA, 19 nt, Homo sapiens
  misc_RNA (1)...(19): siRNA sense strand
gccggaaggagaaugguau

SEQ ID NO: 608276 - RNA, 19 nt, Homo sapiens
  misc_RNA (1)...(19): siRNA sense strand
acaagacugcggccaacuu

SEQ ID NO: 608277 - RNA, 19 nt, Homo sapiens
  misc_RNA (1)...(19): siRNA sense strand
ggaaugagcucuucaacaa

SEQ ID NO: 608278 - RNA, 19 nt, Homo sapiens
  misc_RNA (1)...(19): siRNA sense strand
ggaaaggucucagaugaaa

SEQ ID NO: 608279 - RNA, 19 nt, Homo sapiens
  misc_RNA (1)...(19): siRNA sense strand
ggaagaagcuacagcaucu

SEQ ID NO: 608280 - RNA, 19 nt, Homo sapiens
  misc_RNA (1)...(19): siRNA sense strand
caaagauucugacugauga

SEQ ID NO: 608281 - RNA, 19 nt, Homo sapiens
  misc_RNA (1)...(19): siRNA sense strand
gagagaagccaaacaaaga

SEQ ID NO: 608282 - RNA, 19 nt, Homo sapiens
  misc_RNA (1)...(19): siRNA sense strand
gcagagagcaaaccaauca

SEQ ID NO: 608283 - RNA, 19 nt, Homo sapiens
  misc_RNA (1)...(19): siRNA sense strand
ggaggacgcugcaggaaca

SEQ ID NO: 608284 - RNA, 19 nt, Homo sapiens
  misc_RNA (1)...(19): siRNA sense strand
gaaagagaggguacaacua

SEQ ID NO: 608285 - RNA, 19 nt, Homo sapiens
  misc_RNA (1)...(19): siRNA sense strand
aaggaaaggucucagauga

SEQ ID NO: 608286 - RNA, 19 nt, Homo sapiens
  misc_RNA (1)...(19): siRNA sense strand
gaaagaagaggcagcaaca

SEQ ID NO: 608287 - RNA, 19 nt, Homo sapiens
  misc_RNA (1)...(19): siRNA sense strand
aaagagaggguacaacuaa

SEQ ID NO: 608288 - RNA, 19 nt, Homo sapiens
  misc_RNA (1)...(19): siRNA sense strand
gaagauagaggugaggaaa

SEQ ID NO: 608289 - RNA, 19 nt, Homo sapiens
  misc_RNA (1)...(19): siRNA sense strand
cuaaggagaccacccguua

SEQ ID NO: 608290 - RNA, 19 nt, Homo sapiens
  misc_RNA (1)...(19): siRNA sense strand
ccaacuugcuguaucagaa

SEQ ID NO: 608291 - RNA, 19 nt, Homo sapiens
  misc_RNA (1)...(19): siRNA sense strand
gcagaaagaggaggaagaa

SEQ ID NO: 608292 - RNA, 19 nt, Homo sapiens
  misc_RNA (1)...(19): siRNA sense strand
ggaaugaugcagaugagaa

SEQ ID NO: 608293 - RNA, 19 nt, Homo sapiens
  misc_RNA (1)...(19): siRNA sense strand
gaaggagaaugguaucacu

SEQ ID NO: 608294 - RNA, 19 nt, Homo sapiens
  misc_RNA (1)...(19): siRNA sense strand
gaagcuacagcaucugaaa

SEQ ID NO: 608295 - RNA, 19 nt, Homo sapiens
  misc_RNA (1)...(19): siRNA sense strand
caacuaaagggaaugagaa

SEQ ID NO: 608296 - RNA, 19 nt, Homo sapiens
  misc_RNA (1)...(19): siRNA sense strand
gaaggaaaggucucagaug

SEQ ID NO: 608297 - RNA, 19 nt, Homo sapiens
  misc_RNA (1)...(19): siRNA sense strand
ugaaaggaaugaugcagau

SEQ ID NO: 608298 - RNA, 19 nt, Homo sapiens
  misc_RNA (1)...(19): siRNA sense strand
ggagagaagccaaacaaag

SEQ ID NO: 608299 - RNA, 19 nt, Homo sapiens
  misc_RNA (1)...(19): siRNA sense strand
ccaaggaguucacaaacca

SEQ ID NO: 608300 - RNA, 19 nt, Homo sapiens
  misc_RNA (1)...(19): siRNA sense strand
ggacuugaaccuagaagau

SEQ ID NO: 608301 - RNA, 19 nt, Homo sapiens
  misc_RNA (1)...(19): siRNA sense strand
acacaaggcugcccgucuu

SEQ ID NO: 608302 - RNA, 19 nt, Homo sapiens
  misc_RNA (1)...(19): siRNA sense strand
gcaggauggaguacagaua

SEQ ID NO: 608303 - RNA, 19 nt, Homo sapiens
  misc_RNA (1)...(19): siRNA sense strand
ccaaagauucugacugaug

SEQ ID NO: 608304 - RNA, 19 nt, Homo sapiens
  misc_RNA (1)...(19): siRNA sense strand
gacaugacccugccaagga

SEQ ID NO: 608305 - RNA, 19 nt, Homo sapiens
  misc_RNA (1)...(19): siRNA sense strand
ggagaccacccguuauaau

SEQ ID NO: 608306 - RNA, 19 nt, Homo sapiens
  misc_RNA (1)...(19): siRNA sense strand
gauucugacugaugagaug

SEQ ID NO: 608307 - RNA, 19 nt, Homo sapiens
  misc_RNA (1)...(19): siRNA sense strand
caggauggaguacagauaa

SEQ ID NO: 608308 - RNA, 19 nt, Homo sapiens
  misc_RNA (1)...(19): siRNA sense strand
gggugacacugaagcaaga

SEQ ID NO: 608309 - RNA, 19 nt, Homo sapiens
  misc_RNA (1)...(19): siRNA sense strand
gacuugaaccuagaagaua

SEQ ID NO: 608310 - RNA, 19 nt, Homo sapiens
  misc_RNA (1)...(19): siRNA sense strand
guagagagcagggcauaug

SEQ ID NO: 608311 - RNA, 19 nt, Homo sapiens
  misc_RNA (1)...(19): siRNA sense strand
gagaagcacccagaacaug

SEQ ID NO: 608312 - RNA, 19 nt, Homo sapiens
  misc_RNA (1)...(19): siRNA sense strand
uggauggacucaaggcaaa

SEQ ID NO: 608313 - RNA, 19 nt, Homo sapiens
  misc_RNA (1)...(19): siRNA sense strand
ccaugcagccgaagaaaga

SEQ ID NO: 608314 - RNA, 19 nt, Homo sapiens
  misc_RNA (1)...(19): siRNA sense strand
aaggagaccacccguuaua

SEQ ID NO: 608315 - RNA, 19 nt, Homo sapiens
  misc_RNA (1)...(19): siRNA sense strand
gaaagaggaggaagaagcu

SEQ ID NO: 608316 - RNA, 19 nt, Homo sapiens
  misc_RNA (1)...(19): siRNA sense strand
gaagccaaacaaagacuug

SEQ ID NO: 608317 - RNA, 19 nt, Homo sapiens
  misc_RNA (1)...(19): siRNA sense strand
gagaccacccguuauaauc

SEQ ID NO: 608318 - RNA, 19 nt, Homo sapiens
  misc_RNA (1)...(19): siRNA sense strand
cuuccuggcucgucucaaa

SEQ ID NO: 608319 - RNA, 19 nt, Homo sapiens
  misc_RNA (1)...(19): siRNA sense strand
ggaggaggacuugaaccua

SEQ ID NO: 608320 - RNA, 19 nt, Homo sapiens
  misc_RNA (1)...(19): siRNA sense strand
aagcauggauggacucaag

SEQ ID NO: 608321 - RNA, 19 nt, Homo sapiens
  misc_RNA (1)...(19): siRNA sense strand
aaaggaaugaugcagauga

SEQ ID NO: 608322 - RNA, 19 nt, Homo sapiens
  misc_RNA (1)...(19): siRNA sense strand
aaaggucucagaugaaaga

SEQ ID NO: 608323 - RNA, 19 nt, Homo sapiens
  misc_RNA (1)...(19): siRNA sense strand
gaaaaggcgacaucaagaa

SEQ ID NO: 608324 - RNA, 19 nt, Homo sapiens
  misc_RNA (1)...(19): siRNA sense strand
caagcuugcucgccuagag

SEQ ID NO: 608325 - RNA, 19 nt, Homo sapiens
  misc_RNA (1)...(19): siRNA sense strand
gcagagagcagagcaugca

SEQ ID NO: 608326 - RNA, 19 nt, Homo sapiens
  misc_RNA (1)...(19): siRNA sense strand
cuaaagggaaugagaagga

SEQ ID NO: 608327 - RNA, 19 nt, Homo sapiens
  misc_RNA (1)...(19): siRNA sense strand
aagagaggguacaacuaaa

SEQ ID NO: 608328 - RNA, 19 nt, Homo sapiens
  misc_RNA (1)...(19): siRNA sense strand
ggguacaacuaaagggaau

SEQ ID NO: 608329 - RNA, 19 nt, Homo sapiens
  misc_RNA (1)...(19): siRNA sense strand
uacagcaucugaaaggaau

SEQ ID NO: 608330 - RNA, 19 nt, Homo sapiens
  misc_RNA (1)...(19): siRNA sense strand
guacaacuaaagggaauga

SEQ ID NO: 608331 - RNA, 19 nt, Homo sapiens
  misc_RNA (1)...(19): siRNA sense strand
ccaaucagucccucaggaa

SEQ ID NO: 608332 - RNA, 19 nt, Homo sapiens
  misc_RNA (1)...(19): siRNA sense strand
gaccacccguuauaaucau

SEQ ID NO: 608333 - RNA, 19 nt, Homo sapiens
  misc_RNA (1)...(19): siRNA sense strand
gaaugaugcagaugagaag

SEQ ID NO: 608334 - RNA, 19 nt, Homo sapiens
  misc_RNA (1)...(19): siRNA sense strand
guggagagaagccaaacaa

SEQ ID NO: 608335 - RNA, 19 nt, Homo sapiens
  misc_RNA (1)...(19): siRNA sense strand
ugaaagagaggguacaacu

SEQ ID NO: 608336 - RNA, 19 nt, Homo sapiens
  misc_RNA (1)...(19): siRNA sense strand
cgucuugggaucacaauga

SEQ ID NO: 608337 - RNA, 19 nt, Homo sapiens
  misc_RNA (1)...(19): siRNA sense strand
ccccaaagauucugacuga

SEQ ID NO: 608338 - RNA, 19 nt, Homo sapiens
  misc_RNA (1)...(19): siRNA sense strand
gaaaggaaugaugcagaug

SEQ ID NO: 608339 - RNA, 19 nt, Homo sapiens
  misc_RNA (1)...(19): siRNA sense strand
uagcagagagcaaaccaau

SEQ ID NO: 608340 - RNA, 19 nt, Homo sapiens
  misc_RNA (1)...(19): siRNA sense strand
gaugaaagagaggguacaa

SEQ ID NO: 608341 - RNA, 19 nt, Homo sapiens
  misc_RNA (1)...(19): siRNA sense strand
gcuacagcaucugaaagga

SEQ ID NO: 608342 - RNA, 19 nt, Homo sapiens
  misc_RNA (1)...(19): siRNA sense strand
cuacagcaucugaaaggaa

SEQ ID NO: 608343 - RNA, 19 nt, Homo sapiens
  misc_RNA (1)...(19): siRNA sense strand
caaucagucccucaggaaa

SEQ ID NO: 608344 - RNA, 19 nt, Homo sapiens
  misc_RNA (1)...(19): siRNA sense strand
gauggaguacagauaagga

SEQ ID NO: 608345 - RNA, 19 nt, Homo sapiens
  misc_RNA (1)...(19): siRNA sense strand
agauagaggugaggaaacu

SEQ ID NO: 608346 - RNA, 19 nt, Homo sapiens
  misc_RNA (1)...(19): siRNA sense strand
gaagaaaaggcgacaucaa

SEQ ID NO: 608347 - RNA, 19 nt, Homo sapiens
  misc_RNA (1)...(19): siRNA sense strand
uaaggagaccacccguuau

SEQ ID NO: 608348 - RNA, 19 nt, Homo sapiens
  misc_RNA (1)...(19): siRNA sense strand
gucuugggaucacaaugaa

SEQ ID NO: 608349 - RNA, 19 nt, Homo sapiens
  misc_RNA (1)...(19): siRNA sense strand
aaggcgacaucaagaagga

SEQ ID NO: 608350 - RNA, 19 nt, Homo sapiens
  misc_RNA (1)...(19): siRNA sense strand
gaaugagcucuucaacaag

SEQ ID NO: 608351 - RNA, 19 nt, Homo sapiens
  misc_RNA (1)...(19): siRNA sense strand
agaccacccguuauaauca

SEQ ID NO: 608352 - RNA, 19 nt, Homo sapiens
  misc_RNA (1)...(19): siRNA sense strand
ggacgcugcaggaacaagu

SEQ ID NO: 608353 - RNA, 19 nt, Homo sapiens
  misc_RNA (1)...(19): siRNA sense strand
caagagucgugggaugaag

SEQ ID NO: 608354 - RNA, 19 nt, Homo sapiens
  misc_RNA (1)...(19): siRNA sense strand
ggaggacuugaaccuagaa

SEQ ID NO: 608355 - RNA, 19 nt, Homo sapiens
  misc_RNA (1)...(19): siRNA sense strand
ggcagaaagaggaggaaga

SEQ ID NO: 608356 - RNA, 19 nt, Homo sapiens
  misc_RNA (1)...(19): siRNA sense strand
auagaggugaggaaacuuu

SEQ ID NO: 608357 - RNA, 19 nt, Homo sapiens
  misc_RNA (1)...(19): siRNA sense strand
uugaauagcagagagcaaa

SEQ ID NO: 608358 - RNA, 19 nt, Homo sapiens
  misc_RNA (1)...(19): siRNA sense strand
acaacuaaagggaaugaga

SEQ ID NO: 608359 - RNA, 19 nt, Homo sapiens
  misc_RNA (1)...(19): siRNA sense strand
aagaagcuacagcaucuga

SEQ ID NO: 608360 - RNA, 19 nt, Homo sapiens
  misc_RNA (1)...(19): siRNA sense strand
gaugagaagcacccagaac

SEQ ID NO: 608361 - RNA, 19 nt, Homo sapiens
  misc_RNA (1)...(19): siRNA sense strand
ggaggaggaggacuugaac

SEQ ID NO: 608362 - RNA, 19 nt, Homo sapiens
  misc_RNA (1)...(19): siRNA sense strand
gacccaugcagccgaagaa

SEQ ID NO: 608363 - RNA, 19 nt, Homo sapiens
  misc_RNA (1)...(19): siRNA sense strand
gucaagagucgugggauga

SEQ ID NO: 608364 - RNA, 19 nt, Homo sapiens
  misc_RNA (1)...(19): siRNA sense strand
gagaggguacaacuaaagg

SEQ ID NO: 608365 - RNA, 19 nt, Homo sapiens
  misc_RNA (1)...(19): siRNA sense strand
gccaaggaguucacaaacc

SEQ ID NO: 608366 - RNA, 19 nt, Homo sapiens
  misc_RNA (1)...(19): siRNA sense strand
gaaaggucucagaugaaag

SEQ ID NO: 608367 - RNA, 19 nt, Homo sapiens
  misc_RNA (1)...(19): siRNA sense strand
ggccggaaggagaauggua

SEQ ID NO: 608368 - RNA, 19 nt, Homo sapiens
  misc_RNA (1)...(19): siRNA sense strand
acuugaaccuagaagauag

SEQ ID NO: 608369 - RNA, 19 nt, Homo sapiens
  misc_RNA (1)...(19): siRNA sense strand
caacuugcuguaucagaag

SEQ ID NO: 608370 - RNA, 19 nt, Homo sapiens
  misc_RNA (1)...(19): siRNA sense strand
aagcccaacuugcuguauc

SEQ ID NO: 608371 - RNA, 19 nt, Homo sapiens
  misc_RNA (1)...(19): siRNA sense strand
aggaggacuugaaccuaga

SEQ ID NO: 608372 - RNA, 19 nt, Homo sapiens
  misc_RNA (1)...(19): siRNA sense strand
gggaauugaauagcagaga

SEQ ID NO: 608373 - RNA, 19 nt, Homo sapiens
  misc_RNA (1)...(19): siRNA sense strand
gguggaaugagcucuucaa

SEQ ID NO: 608374 - RNA, 19 nt, Homo sapiens
  misc_RNA (1)...(19): siRNA sense strand
acaagacugcggccaacuu

SEQ ID NO: 608375 - RNA, 19 nt, Homo sapiens
  misc_RNA (1)...(19): siRNA sense strand
gccggaaggagaaugguau

SEQ ID NO: 608376 - RNA, 19 nt, Homo sapiens
  misc_RNA (1)...(19): siRNA sense strand
ggaaugagcucuucaacaa

SEQ ID NO: 608377 - RNA, 19 nt, Homo sapiens
  misc_RNA (1)...(19): siRNA sense strand
ggaaaggucucagaugaaa

SEQ ID NO: 608378 - RNA, 19 nt, Homo sapiens
  misc_RNA (1)...(19): siRNA sense strand
ggaagaagcuacagcaucu

SEQ ID NO: 608379 - RNA, 19 nt, Homo sapiens
  misc_RNA (1)...(19): siRNA sense strand
caaagauucugacugauga

SEQ ID NO: 608380 - RNA, 19 nt, Homo sapiens
  misc_RNA (1)...(19): siRNA sense strand
gagagaagccaaacaaaga

SEQ ID NO: 608381 - RNA, 19 nt, Homo sapiens
  misc_RNA (1)...(19): siRNA sense strand
gcagagagcaaaccaauca

SEQ ID NO: 608382 - RNA, 19 nt, Homo sapiens
  misc_RNA (1)...(19): siRNA sense strand
ggaggacgcugcaggaaca

SEQ ID NO: 608383 - RNA, 19 nt, Homo sapiens
  misc_RNA (1)...(19): siRNA sense strand
gaaagagaggguacaacua

SEQ ID NO: 608384 - RNA, 19 nt, Homo sapiens
  misc_RNA (1)...(19): siRNA sense strand
aaggaaaggucucagauga

SEQ ID NO: 608385 - RNA, 19 nt, Homo sapiens
  misc_RNA (1)...(19): siRNA sense strand
gaaagaagaggcagcaaca

SEQ ID NO: 608386 - RNA, 19 nt, Homo sapiens
  misc_RNA (1)...(19): siRNA sense strand
aaagagaggguacaacuaa

SEQ ID NO: 608387 - RNA, 19 nt, Homo sapiens
  misc_RNA (1)...(19): siRNA sense strand
gaagauagaggugaggaaa

SEQ ID NO: 608388 - RNA, 19 nt, Homo sapiens
  misc_RNA (1)...(19): siRNA sense strand
cuaaggagaccacccguua

SEQ ID NO: 608389 - RNA, 19 nt, Homo sapiens
  misc_RNA (1)...(19): siRNA sense strand
ccaacuugcuguaucagaa

SEQ ID NO: 608390 - RNA, 19 nt, Homo sapiens
  misc_RNA (1)...(19): siRNA sense strand
gcagaaagaggaggaagaa

SEQ ID NO: 608391 - RNA, 19 nt, Homo sapiens
  misc_RNA (1)...(19): siRNA sense strand
ggaaugaugcagaugagaa

SEQ ID NO: 608392 - RNA, 19 nt, Homo sapiens
  misc_RNA (1)...(19): siRNA sense strand
gaaggagaaugguaucacu

SEQ ID NO: 608393 - RNA, 19 nt, Homo sapiens
  misc_RNA (1)...(19): siRNA sense strand
gaagcuacagcaucugaaa

SEQ ID NO: 608394 - RNA, 19 nt, Homo sapiens
  misc_RNA (1)...(19): siRNA sense strand
caacuaaagggaaugagaa

SEQ ID NO: 608395 - RNA, 19 nt, Homo sapiens
  misc_RNA (1)...(19): siRNA sense strand
gaaggaaaggucucagaug

SEQ ID NO: 608396 - RNA, 19 nt, Homo sapiens
  misc_RNA (1)...(19): siRNA sense strand
ugaaaggaaugaugcagau

SEQ ID NO: 608397 - RNA, 19 nt, Homo sapiens
  misc_RNA (1)...(19): siRNA sense strand
ggagagaagccaaacaaag

SEQ ID NO: 608398 - RNA, 19 nt, Homo sapiens
  misc_RNA (1)...(19): siRNA sense strand
ccaaggaguucacaaacca

SEQ ID NO: 608399 - RNA, 19 nt, Homo sapiens
  misc_RNA (1)...(19): siRNA sense strand
ggacuugaaccuagaagau

SEQ ID NO: 608400 - RNA, 19 nt, Homo sapiens
  misc_RNA (1)...(19): siRNA sense strand
acacaaggcugcccgucuu

SEQ ID NO: 608401 - RNA, 19 nt, Homo sapiens
  misc_RNA (1)...(19): siRNA sense strand
gcaggauggaguacagaua

SEQ ID NO: 608402 - RNA, 19 nt, Homo sapiens
  misc_RNA (1)...(19): siRNA sense strand
ccaaagauucugacugaug

SEQ ID NO: 608403 - RNA, 19 nt, Homo sapiens
  misc_RNA (1)...(19): siRNA sense strand
gacaugacccugccaagga

SEQ ID NO: 608404 - RNA, 19 nt, Homo sapiens
  misc_RNA (1)...(19): siRNA sense strand
ggagaccacccguuauaau

SEQ ID NO: 608405 - RNA, 19 nt, Homo sapiens
  misc_RNA (1)...(19): siRNA sense strand
gauucugacugaugagaug

SEQ ID NO: 608406 - RNA, 19 nt, Homo sapiens
  misc_RNA (1)...(19): siRNA sense strand
caggauggaguacagauaa

SEQ ID NO: 608407 - RNA, 19 nt, Homo sapiens
  misc_RNA (1)...(19): siRNA sense strand
gggugacacugaagcaaga

SEQ ID NO: 608408 - RNA, 19 nt, Homo sapiens
  misc_RNA (1)...(19): siRNA sense strand
gacuugaaccuagaagaua

SEQ ID NO: 608409 - RNA, 19 nt, Homo sapiens
  misc_RNA (1)...(19): siRNA sense strand
guagagagcagggcauaug

SEQ ID NO: 608410 - RNA, 19 nt, Homo sapiens
  misc_RNA (1)...(19): siRNA sense strand
gagaagcacccagaacaug

SEQ ID NO: 608411 - RNA, 19 nt, Homo sapiens
  misc_RNA (1)...(19): siRNA sense strand
uggauggacucaaggcaaa

SEQ ID NO: 608412 - RNA, 19 nt, Homo sapiens
  misc_RNA (1)...(19): siRNA sense strand
ccaugcagccgaagaaaga

SEQ ID NO: 608413 - RNA, 19 nt, Homo sapiens
  misc_RNA (1)...(19): siRNA sense strand
aaggagaccacccguuaua

SEQ ID NO: 608414 - RNA, 19 nt, Homo sapiens
  misc_RNA (1)...(19): siRNA sense strand
gaaagaggaggaagaagcu

SEQ ID NO: 608415 - RNA, 19 nt, Homo sapiens
  misc_RNA (1)...(19): siRNA sense strand
gaagccaaacaaagacuug

SEQ ID NO: 608416 - RNA, 19 nt, Homo sapiens
  misc_RNA (1)...(19): siRNA sense strand
gagaccacccguuauaauc

SEQ ID NO: 608417 - RNA, 19 nt, Homo sapiens
  misc_RNA (1)...(19): siRNA sense strand
cuuccuggcucgucucaaa

SEQ ID NO: 608418 - RNA, 19 nt, Homo sapiens
  misc_RNA (1)...(19): siRNA sense strand
aagcauggauggacucaag

SEQ ID NO: 608419 - RNA, 19 nt, Homo sapiens
  misc_RNA (1)...(19): siRNA sense strand
ggaggaggacuugaaccua

SEQ ID NO: 608420 - RNA, 19 nt, Homo sapiens
  misc_RNA (1)...(19): siRNA sense strand
aaaggaaugaugcagauga

SEQ ID NO: 608421 - RNA, 19 nt, Homo sapiens
  misc_RNA (1)...(19): siRNA sense strand
aaaggucucagaugaaaga

SEQ ID NO: 608422 - RNA, 19 nt, Homo sapiens
  misc_RNA (1)...(19): siRNA sense strand
gaaaaggcgacaucaagaa

SEQ ID NO: 608423 - RNA, 19 nt, Homo sapiens
  misc_RNA (1)...(19): siRNA sense strand
caagcuugcucgccuagag

SEQ ID NO: 608424 - RNA, 19 nt, Homo sapiens
  misc_RNA (1)...(19): siRNA sense strand
gcagagagcagagcaugca

SEQ ID NO: 608425 - RNA, 19 nt, Homo sapiens
  misc_RNA (1)...(19): siRNA sense strand
cuaaagggaaugagaagga

SEQ ID NO: 608426 - RNA, 19 nt, Homo sapiens
  misc_RNA (1)...(19): siRNA sense strand
aagagaggguacaacuaaa

SEQ ID NO: 608427 - RNA, 19 nt, Homo sapiens
  misc_RNA (1)...(19): siRNA sense strand
ggguacaacuaaagggaau

SEQ ID NO: 608428 - RNA, 19 nt, Homo sapiens
  misc_RNA (1)...(19): siRNA sense strand
uacagcaucugaaaggaau

SEQ ID NO: 608429 - RNA, 19 nt, Homo sapiens
  misc_RNA (1)...(19): siRNA sense strand
guacaacuaaagggaauga

SEQ ID NO: 608430 - RNA, 19 nt, Homo sapiens
  misc_RNA (1)...(19): siRNA sense strand
ggagcggacccagcaauga

SEQ ID NO: 608431 - RNA, 19 nt, Homo sapiens
  misc_RNA (1)...(19): siRNA sense strand
ccaaucagucccucaggaa

SEQ ID NO: 608432 - RNA, 19 nt, Homo sapiens
  misc_RNA (1)...(19): siRNA sense strand
gaccacccguuauaaucau

SEQ ID NO: 608433 - RNA, 19 nt, Homo sapiens
  misc_RNA (1)...(19): siRNA sense strand
gaaugaugcagaugagaag

SEQ ID NO: 608434 - RNA, 19 nt, Homo sapiens
  misc_RNA (1)...(19): siRNA sense strand
guggagagaagccaaacaa

SEQ ID NO: 608435 - RNA, 19 nt, Homo sapiens
  misc_RNA (1)...(19): siRNA sense strand
ugaaagagaggguacaacu

SEQ ID NO: 608436 - RNA, 19 nt, Homo sapiens
  misc_RNA (1)...(19): siRNA sense strand
cgucuugggaucacaauga

SEQ ID NO: 608437 - RNA, 19 nt, Homo sapiens
  misc_RNA (1)...(19): siRNA sense strand
ccccaaagauucugacuga

SEQ ID NO: 608438 - RNA, 19 nt, Homo sapiens
  misc_RNA (1)...(19): siRNA sense strand
gaaaggaaugaugcagaug

SEQ ID NO: 608439 - RNA, 19 nt, Homo sapiens
  misc_RNA (1)...(19): siRNA sense strand
uagcagagagcaaaccaau

SEQ ID NO: 608440 - RNA, 19 nt, Homo sapiens
  misc_RNA (1)...(19): siRNA sense strand
gaugaaagagaggguacaa

SEQ ID NO: 608441 - RNA, 19 nt, Homo sapiens
  misc_RNA (1)...(19): siRNA sense strand
gcuacagcaucugaaagga

SEQ ID NO: 608442 - RNA, 19 nt, Homo sapiens
  misc_RNA (1)...(19): siRNA sense strand
cuacagcaucugaaaggaa

SEQ ID NO: 608443 - RNA, 19 nt, Homo sapiens
  misc_RNA (1)...(19): siRNA sense strand
caaucagucccucaggaaa

SEQ ID NO: 608444 - RNA, 19 nt, Homo sapiens
  misc_RNA (1)...(19): siRNA sense strand
gauggaguacagauaagga

SEQ ID NO: 608445 - RNA, 19 nt, Homo sapiens
  misc_RNA (1)...(19): siRNA sense strand
agauagaggugaggaaacu

SEQ ID NO: 608446 - RNA, 19 nt, Homo sapiens
  misc_RNA (1)...(19): siRNA sense strand
gaagaaaaggcgacaucaa

SEQ ID NO: 608447 - RNA, 19 nt, Homo sapiens
  misc_RNA (1)...(19): siRNA sense strand
caagucagguccggcacau

SEQ ID NO: 608448 - RNA, 19 nt, Homo sapiens
  misc_RNA (1)...(19): siRNA sense strand
uaaggagaccacccguuau

SEQ ID NO: 608449 - RNA, 19 nt, Homo sapiens
  misc_RNA (1)...(19): siRNA sense strand
gucuugggaucacaaugaa

SEQ ID NO: 608450 - RNA, 19 nt, Homo sapiens
  misc_RNA (1)...(19): siRNA sense strand
gaaugagcucuucaacaag

SEQ ID NO: 608451 - RNA, 19 nt, Homo sapiens
  misc_RNA (1)...(19): siRNA sense strand
aaggcgacaucaagaagga

SEQ ID NO: 608452 - RNA, 19 nt, Homo sapiens
  misc_RNA (1)...(19): siRNA sense strand
agaccacccguuauaauca

SEQ ID NO: 608453 - RNA, 19 nt, Homo sapiens
  misc_RNA (1)...(19): siRNA sense strand
caagagucgugggaugaag

SEQ ID NO: 608454 - RNA, 19 nt, Homo sapiens
  misc_RNA (1)...(19): siRNA sense strand
ggacgcugcaggaacaagu

SEQ ID NO: 608455 - RNA, 19 nt, Homo sapiens
  misc_RNA (1)...(19): siRNA sense strand
ucagguccggcacauguuu

SEQ ID NO: 608456 - RNA, 19 nt, Homo sapiens
  misc_RNA (1)...(19): siRNA sense strand
ggaggacuugaaccuagaa

SEQ ID NO: 608457 - RNA, 19 nt, Homo sapiens
  misc_RNA (1)...(19): siRNA sense strand
ggcagaaagaggaggaaga

SEQ ID NO: 608458 - RNA, 19 nt, Homo sapiens
  misc_RNA (1)...(19): siRNA sense strand
auagaggugaggaaacuuu

SEQ ID NO: 608459 - RNA, 19 nt, Homo sapiens
  misc_RNA (1)...(19): siRNA sense strand
uugaauagcagagagcaaa

SEQ ID NO: 608460 - RNA, 19 nt, Homo sapiens
  misc_RNA (1)...(19): siRNA sense strand
acaacuaaagggaaugaga

SEQ ID NO: 608461 - RNA, 19 nt, Homo sapiens
  misc_RNA (1)...(19): siRNA sense strand
aagaagcuacagcaucuga

SEQ ID NO: 608462 - RNA, 19 nt, Homo sapiens
  misc_RNA (1)...(19): siRNA sense strand
gaugagaagcacccagaac

SEQ ID NO: 608463 - RNA, 19 nt, Homo sapiens
  misc_RNA (1)...(19): siRNA sense strand
ggaggaggaggacuugaac

SEQ ID NO: 608464 - RNA, 19 nt, Homo sapiens
  misc_RNA (1)...(19): siRNA sense strand
gacccaugcagccgaagaa

SEQ ID NO: 608465 - RNA, 19 nt, Homo sapiens
  misc_RNA (1)...(19): siRNA sense strand
gagaggguacaacuaaagg

SEQ ID NO: 608466 - RNA, 19 nt, Homo sapiens
  misc_RNA (1)...(19): siRNA sense strand
gucaagagucgugggauga

SEQ ID NO: 608467 - RNA, 19 nt, Homo sapiens
  misc_RNA (1)...(19): siRNA sense strand
gccaaggaguucacaaacc

SEQ ID NO: 608468 - RNA, 19 nt, Homo sapiens
  misc_RNA (1)...(19): siRNA sense strand
gaaaggucucagaugaaag

SEQ ID NO: 608469 - RNA, 19 nt, Homo sapiens
  misc_RNA (1)...(19): siRNA sense strand
caacuugcuguaucagaag

SEQ ID NO: 608470 - RNA, 19 nt, Homo sapiens
  misc_RNA (1)...(19): siRNA sense strand
acuugaaccuagaagauag

SEQ ID NO: 608471 - RNA, 19 nt, Homo sapiens
  misc_RNA (1)...(19): siRNA sense strand
ggccggaaggagaauggua

SEQ ID NO: 608472 - RNA, 19 nt, Homo sapiens
  misc_RNA (1)...(19): siRNA sense strand
gguggaaugagcucuucaa

SEQ ID NO: 608473 - RNA, 19 nt, Homo sapiens
  misc_RNA (1)...(19): siRNA sense strand
aggaggacuugaaccuaga

SEQ ID NO: 608474 - RNA, 19 nt, Homo sapiens
  misc_RNA (1)...(19): siRNA sense strand
gagcggacccagcaaugac

SEQ ID NO: 608475 - RNA, 19 nt, Homo sapiens
  misc_RNA (1)...(19): siRNA sense strand
gggaauugaauagcagaga

SEQ ID NO: 608476 - RNA, 19 nt, Homo sapiens
  misc_RNA (1)...(19): siRNA sense strand
gaaaauggguccuguguaa

SEQ ID NO: 608477 - RNA, 19 nt, Homo sapiens
  misc_RNA (1)...(19): siRNA sense strand
gcagugagcugucggucaa

SEQ ID NO: 608478 - RNA, 19 nt, Homo sapiens
  misc_RNA (1)...(19): siRNA sense strand
guagagagcuuuguaucga

SEQ ID NO: 608479 - RNA, 19 nt, Homo sapiens
  misc_RNA (1)...(19): siRNA sense strand
ggaggacccaguugagaaa

SEQ ID NO: 608480 - RNA, 19 nt, Homo sapiens
  misc_RNA (1)...(19): siRNA sense strand
uaucgaggcugcagaaguc

SEQ ID NO: 608481 - RNA, 19 nt, Homo sapiens
  misc_RNA (1)...(19): siRNA sense strand
cgacguagagagcuuugua

SEQ ID NO: 608482 - RNA, 19 nt, Homo sapiens
  misc_RNA (1)...(19): siRNA sense strand
aauggguccuguguaauua

SEQ ID NO: 608483 - RNA, 19 nt, Homo sapiens
  misc_RNA (1)...(19): siRNA sense strand
ccaggucgcugucaauggu

SEQ ID NO: 608484 - RNA, 19 nt, Homo sapiens
  misc_RNA (1)...(19): siRNA sense strand
aaauggguccuguguaauu

SEQ ID NO: 608485 - RNA, 19 nt, Homo sapiens
  misc_RNA (1)...(19): siRNA sense strand
gggaggacccaguugagaa

SEQ ID NO: 608486 - RNA, 19 nt, Homo sapiens
  misc_RNA (1)...(19): siRNA sense strand
acaaagagaaagugucaga

SEQ ID NO: 608487 - RNA, 19 nt, Homo sapiens
  misc_RNA (1)...(19): siRNA sense strand
ggaaggcgagguggaaaug

SEQ ID NO: 608488 - RNA, 19 nt, Homo sapiens
  misc_RNA (1)...(19): siRNA sense strand
acaccgacgugcugcagaa

SEQ ID NO: 608489 - RNA, 19 nt, Homo sapiens
  misc_RNA (1)...(19): siRNA sense strand
gcagugauggagaagcaaa

SEQ ID NO: 608490 - RNA, 19 nt, Homo sapiens
  misc_RNA (1)...(19): siRNA sense strand
cuccggagcuguugcacuu

SEQ ID NO: 608491 - RNA, 19 nt, Homo sapiens
  misc_RNA (1)...(19): siRNA sense strand
ggaaguggacauccugaac

SEQ ID NO: 608492 - RNA, 19 nt, Homo sapiens
  misc_RNA (1)...(19): siRNA sense strand
agccucagcuggagucaga

SEQ ID NO: 608493 - RNA, 19 nt, Homo sapiens
  misc_RNA (1)...(19): siRNA sense strand
uggaggcagugauggagaa

SEQ ID NO: 608494 - RNA, 19 nt, Homo sapiens
  misc_RNA (1)...(19): siRNA sense strand
auacagacccgaguucuuc

SEQ ID NO: 608495 - RNA, 19 nt, Homo sapiens
  misc_RNA (1)...(19): siRNA sense strand
gagcuguugcacuuccuuu

SEQ ID NO: 608496 - RNA, 19 nt, Homo sapiens
  misc_RNA (1)...(19): siRNA sense strand
ggacccaguugagaaacag

SEQ ID NO: 608497 - RNA, 19 nt, Homo sapiens
  misc_RNA (1)...(19): siRNA sense strand
ccgacgugcugcagaagau

SEQ ID NO: 608498 - RNA, 19 nt, Homo sapiens
  misc_RNA (1)...(19): siRNA sense strand
guccugaccuggcgguucu

SEQ ID NO: 608499 - RNA, 19 nt, Homo sapiens
  misc_RNA (1)...(19): siRNA sense strand
aaggcgagguggaaaugga

SEQ ID NO: 608500 - RNA, 19 nt, Homo sapiens
  misc_RNA (1)...(19): siRNA sense strand
agucagagacagcaggaaa

SEQ ID NO: 608501 - RNA, 19 nt, Homo sapiens
  misc_RNA (1)...(19): siRNA sense strand
gaggacaaagagaaagugu

SEQ ID NO: 608502 - RNA, 19 nt, Homo sapiens
  misc_RNA (1)...(19): siRNA sense strand
ccuguguaauuaugacuuc

SEQ ID NO: 608503 - RNA, 19 nt, Homo sapiens
  misc_RNA (1)...(19): siRNA sense strand
ggaaaauggguccugugua

SEQ ID NO: 608504 - RNA, 19 nt, Homo sapiens
  misc_RNA (1)...(19): siRNA sense strand
gguggaaggcgagguggaa

SEQ ID NO: 608505 - RNA, 19 nt, Homo sapiens
  misc_RNA (1)...(19): siRNA sense strand
ggucaagcagcgggacgua

SEQ ID NO: 608506 - RNA, 19 nt, Homo sapiens
  misc_RNA (1)...(19): siRNA sense strand
gggaaguggacauccugaa

SEQ ID NO: 608507 - RNA, 19 nt, Homo sapiens
  misc_RNA (1)...(19): siRNA sense strand
ggaggacaaagagaaagug

SEQ ID NO: 608508 - RNA, 19 nt, Homo sapiens
  misc_RNA (1)...(19): siRNA sense strand
gacguagagagcuuuguau

SEQ ID NO: 608509 - RNA, 19 nt, Homo sapiens
  misc_RNA (1)...(19): siRNA sense strand
cauacagacccgaguucuu

SEQ ID NO: 608510 - RNA, 19 nt, Homo sapiens
  misc_RNA (1)...(19): siRNA sense strand
gaaaauggguccuguguaa

SEQ ID NO: 608511 - RNA, 19 nt, Homo sapiens
  misc_RNA (1)...(19): siRNA sense strand
gcagugagcugucggucaa

SEQ ID NO: 608512 - RNA, 19 nt, Homo sapiens
  misc_RNA (1)...(19): siRNA sense strand
guagagagcuuuguaucga

SEQ ID NO: 608513 - RNA, 19 nt, Homo sapiens
  misc_RNA (1)...(19): siRNA sense strand
ggaggacccaguugagaaa

SEQ ID NO: 608514 - RNA, 19 nt, Homo sapiens
  misc_RNA (1)...(19): siRNA sense strand
uaucgaggcugcagaaguc

SEQ ID NO: 608515 - RNA, 19 nt, Homo sapiens
  misc_RNA (1)...(19): siRNA sense strand
cgacguagagagcuuugua

SEQ ID NO: 608516 - RNA, 19 nt, Homo sapiens
  misc_RNA (1)...(19): siRNA sense strand
aauggguccuguguaauua

SEQ ID NO: 608517 - RNA, 19 nt, Homo sapiens
  misc_RNA (1)...(19): siRNA sense strand
ccaggucgcugucaauggu

SEQ ID NO: 608518 - RNA, 19 nt, Homo sapiens
  misc_RNA (1)...(19): siRNA sense strand
aaauggguccuguguaauu

SEQ ID NO: 608519 - RNA, 19 nt, Homo sapiens
  misc_RNA (1)...(19): siRNA sense strand
gggaggacccaguugagaa

SEQ ID NO: 608520 - RNA, 19 nt, Homo sapiens
  misc_RNA (1)...(19): siRNA sense strand
acaaagagaaagugucaga

SEQ ID NO: 608521 - RNA, 19 nt, Homo sapiens
  misc_RNA (1)...(19): siRNA sense strand
ggaaggcgagguggaaaug

SEQ ID NO: 608522 - RNA, 19 nt, Homo sapiens
  misc_RNA (1)...(19): siRNA sense strand
acaccgacgugcugcagaa

SEQ ID NO: 608523 - RNA, 19 nt, Homo sapiens
  misc_RNA (1)...(19): siRNA sense strand
gcagugauggagaagcaaa

SEQ ID NO: 608524 - RNA, 19 nt, Homo sapiens
  misc_RNA (1)...(19): siRNA sense strand
cuccggagcuguugcacuu

SEQ ID NO: 608525 - RNA, 19 nt, Homo sapiens
  misc_RNA (1)...(19): siRNA sense strand
ggaaguggacauccugaac

SEQ ID NO: 608526 - RNA, 19 nt, Homo sapiens
  misc_RNA (1)...(19): siRNA sense strand
agccucagcuggagucaga

SEQ ID NO: 608527 - RNA, 19 nt, Homo sapiens
  misc_RNA (1)...(19): siRNA sense strand
uggaggcagugauggagaa

SEQ ID NO: 608528 - RNA, 19 nt, Homo sapiens
  misc_RNA (1)...(19): siRNA sense strand
auacagacccgaguucuuc

SEQ ID NO: 608529 - RNA, 19 nt, Homo sapiens
  misc_RNA (1)...(19): siRNA sense strand
gagcuguugcacuuccuuu

SEQ ID NO: 608530 - RNA, 19 nt, Homo sapiens
  misc_RNA (1)...(19): siRNA sense strand
ggacccaguugagaaacag

SEQ ID NO: 608531 - RNA, 19 nt, Homo sapiens
  misc_RNA (1)...(19): siRNA sense strand
ccgacgugcugcagaagau

SEQ ID NO: 608532 - RNA, 19 nt, Homo sapiens
  misc_RNA (1)...(19): siRNA sense strand
guccugaccuggcgguucu

SEQ ID NO: 608533 - RNA, 19 nt, Homo sapiens
  misc_RNA (1)...(19): siRNA sense strand
aaggcgagguggaaaugga

SEQ ID NO: 608534 - RNA, 19 nt, Homo sapiens
  misc_RNA (1)...(19): siRNA sense strand
agucagagacagcaggaaa

SEQ ID NO: 608535 - RNA, 19 nt, Homo sapiens
  misc_RNA (1)...(19): siRNA sense strand
gaggacaaagagaaagugu

SEQ ID NO: 608536 - RNA, 19 nt, Homo sapiens
  misc_RNA (1)...(19): siRNA sense strand
ccuguguaauuaugacuuc

SEQ ID NO: 608537 - RNA, 19 nt, Homo sapiens
  misc_RNA (1)...(19): siRNA sense strand
ggaaaauggguccugugua

SEQ ID NO: 608538 - RNA, 19 nt, Homo sapiens
  misc_RNA (1)...(19): siRNA sense strand
gguggaaggcgagguggaa

SEQ ID NO: 608539 - RNA, 19 nt, Homo sapiens
  misc_RNA (1)...(19): siRNA sense strand
ggucaagcagcgggacgua

SEQ ID NO: 608540 - RNA, 19 nt, Homo sapiens
  misc_RNA (1)...(19): siRNA sense strand
gggaaguggacauccugaa

SEQ ID NO: 608541 - RNA, 19 nt, Homo sapiens
  misc_RNA (1)...(19): siRNA sense strand
ggaggacaaagagaaagug

SEQ ID NO: 608542 - RNA, 19 nt, Homo sapiens
  misc_RNA (1)...(19): siRNA sense strand
gacguagagagcuuuguau

SEQ ID NO: 608543 - RNA, 19 nt, Homo sapiens
  misc_RNA (1)...(19): siRNA sense strand
cauacagacccgaguucuu

SEQ ID NO: 608544 - RNA, 19 nt, Homo sapiens
  misc_RNA (1)...(19): siRNA sense strand
gaaaauggguccuguguaa

SEQ ID NO: 608545 - RNA, 19 nt, Homo sapiens
  misc_RNA (1)...(19): siRNA sense strand
gcagugagcugucggucaa

SEQ ID NO: 608546 - RNA, 19 nt, Homo sapiens
  misc_RNA (1)...(19): siRNA sense strand
guagagagcuuuguaucga

SEQ ID NO: 608547 - RNA, 19 nt, Homo sapiens
  misc_RNA (1)...(19): siRNA sense strand
ggaggacccaguugagaaa

SEQ ID NO: 608548 - RNA, 19 nt, Homo sapiens
  misc_RNA (1)...(19): siRNA sense strand
uaucgaggcugcagaaguc

SEQ ID NO: 608549 - RNA, 19 nt, Homo sapiens
  misc_RNA (1)...(19): siRNA sense strand
cgacguagagagcuuugua

SEQ ID NO: 608550 - RNA, 19 nt, Homo sapiens
  misc_RNA (1)...(19): siRNA sense strand
aauggguccuguguaauua

SEQ ID NO: 608551 - RNA, 19 nt, Homo sapiens
  misc_RNA (1)...(19): siRNA sense strand
ccaggucgcugucaauggu

SEQ ID NO: 608552 - RNA, 19 nt, Homo sapiens
  misc_RNA (1)...(19): siRNA sense strand
aaauggguccuguguaauu

SEQ ID NO: 608553 - RNA, 19 nt, Homo sapiens
  misc_RNA (1)...(19): siRNA sense strand
gggaggacccaguugagaa

SEQ ID NO: 608554 - RNA, 19 nt, Homo sapiens
  misc_RNA (1)...(19): siRNA sense strand
acaaagagaaagugucaga

SEQ ID NO: 608555 - RNA, 19 nt, Homo sapiens
  misc_RNA (1)...(19): siRNA sense strand
ggaaggcgagguggaaaug

SEQ ID NO: 608556 - RNA, 19 nt, Homo sapiens
  misc_RNA (1)...(19): siRNA sense strand
acaccgacgugcugcagaa

SEQ ID NO: 608557 - RNA, 19 nt, Homo sapiens
  misc_RNA (1)...(19): siRNA sense strand
gcagugauggagaagcaaa

SEQ ID NO: 608558 - RNA, 19 nt, Homo sapiens
  misc_RNA (1)...(19): siRNA sense strand
cuccggagcuguugcacuu

SEQ ID NO: 608559 - RNA, 19 nt, Homo sapiens
  misc_RNA (1)...(19): siRNA sense strand
ggaaguggacauccugaac

SEQ ID NO: 608560 - RNA, 19 nt, Homo sapiens
  misc_RNA (1)...(19): siRNA sense strand
agccucagcuggagucaga

SEQ ID NO: 608561 - RNA, 19 nt, Homo sapiens
  misc_RNA (1)...(19): siRNA sense strand
uggaggcagugauggagaa

SEQ ID NO: 608562 - RNA, 19 nt, Homo sapiens
  misc_RNA (1)...(19): siRNA sense strand
auacagacccgaguucuuc

SEQ ID NO: 608563 - RNA, 19 nt, Homo sapiens
  misc_RNA (1)...(19): siRNA sense strand
gagcuguugcacuuccuuu

SEQ ID NO: 608564 - RNA, 19 nt, Homo sapiens
  misc_RNA (1)...(19): siRNA sense strand
ggacccaguugagaaacag

SEQ ID NO: 608565 - RNA, 19 nt, Homo sapiens
  misc_RNA (1)...(19): siRNA sense strand
ccgacgugcugcagaagau

SEQ ID NO: 608566 - RNA, 19 nt, Homo sapiens
  misc_RNA (1)...(19): siRNA sense strand
guccugaccuggcgguucu

SEQ ID NO: 608567 - RNA, 19 nt, Homo sapiens
  misc_RNA (1)...(19): siRNA sense strand
aaggcgagguggaaaugga

SEQ ID NO: 608568 - RNA, 19 nt, Homo sapiens
  misc_RNA (1)...(19): siRNA sense strand
agucagagacagcaggaaa

SEQ ID NO: 608569 - RNA, 19 nt, Homo sapiens
  misc_RNA (1)...(19): siRNA sense strand
gaggacaaagagaaagugu

SEQ ID NO: 608570 - RNA, 19 nt, Homo sapiens
  misc_RNA (1)...(19): siRNA sense strand
ccuguguaauuaugacuuc

SEQ ID NO: 608571 - RNA, 19 nt, Homo sapiens
  misc_RNA (1)...(19): siRNA sense strand
ggaaaauggguccugugua

SEQ ID NO: 608572 - RNA, 19 nt, Homo sapiens
  misc_RNA (1)...(19): siRNA sense strand
gguggaaggcgagguggaa

SEQ ID NO: 608573 - RNA, 19 nt, Homo sapiens
  misc_RNA (1)...(19): siRNA sense strand
ggucaagcagcgggacgua

SEQ ID NO: 608574 - RNA, 19 nt, Homo sapiens
  misc_RNA (1)...(19): siRNA sense strand
gggaaguggacauccugaa

SEQ ID NO: 608575 - RNA, 19 nt, Homo sapiens
  misc_RNA (1)...(19): siRNA sense strand
ggaggacaaagagaaagug

SEQ ID NO: 608576 - RNA, 19 nt, Homo sapiens
  misc_RNA (1)...(19): siRNA sense strand
gacguagagagcuuuguau

SEQ ID NO: 608577 - RNA, 19 nt, Homo sapiens
  misc_RNA (1)...(19): siRNA sense strand
cauacagacccgaguucuu

SEQ ID NO: 608578 - RNA, 19 nt, Homo sapiens
  misc_RNA (1)...(19): siRNA sense strand
gauguuaucuugaaaguga

SEQ ID NO: 608579 - RNA, 19 nt, Homo sapiens
  misc_RNA (1)...(19): siRNA sense strand
gaaggcaacuuaauuaauc

SEQ ID NO: 608580 - RNA, 19 nt, Homo sapiens
  misc_RNA (1)...(19): siRNA sense strand
gaaagaagaaccaaagaaa

SEQ ID NO: 608581 - RNA, 19 nt, Homo sapiens
  misc_RNA (1)...(19): siRNA sense strand
gaacaaaccaugaagauuc

SEQ ID NO: 608582 - RNA, 19 nt, Homo sapiens
  misc_RNA (1)...(19): siRNA sense strand
gaagaaauaugggcuguau

SEQ ID NO: 608583 - RNA, 19 nt, Homo sapiens
  misc_RNA (1)...(19): siRNA sense strand
ggaaagaagaguucguuua

SEQ ID NO: 608584 - RNA, 19 nt, Homo sapiens
  misc_RNA (1)...(19): siRNA sense strand
gaagguggcuauaucaaug

SEQ ID NO: 608585 - RNA, 19 nt, Homo sapiens
  misc_RNA (1)...(19): siRNA sense strand
cagaucagcuuuccuguaa

SEQ ID NO: 608586 - RNA, 19 nt, Homo sapiens
  misc_RNA (1)...(19): siRNA sense strand
gcauugaugugcuuucuaa

SEQ ID NO: 608587 - RNA, 19 nt, Homo sapiens
  misc_RNA (1)...(19): siRNA sense strand
gccaaagacugacagaaua

SEQ ID NO: 608588 - RNA, 19 nt, Homo sapiens
  misc_RNA (1)...(19): siRNA sense strand
gaaguagaacuccucauua

SEQ ID NO: 608589 - RNA, 19 nt, Homo sapiens
  misc_RNA (1)...(19): siRNA sense strand
gaauggagccucuuugaaa

SEQ ID NO: 608590 - RNA, 19 nt, Homo sapiens
  misc_RNA (1)...(19): siRNA sense strand
gaagaugugacacuuguua

SEQ ID NO: 608591 - RNA, 19 nt, Homo sapiens
  misc_RNA (1)...(19): siRNA sense strand
ccaagaagcugaaguuauc

SEQ ID NO: 608592 - RNA, 19 nt, Homo sapiens
  misc_RNA (1)...(19): siRNA sense strand
caacucaggucaaagacua

SEQ ID NO: 608593 - RNA, 19 nt, Homo sapiens
  misc_RNA (1)...(19): siRNA sense strand
caugaugacucaagaagua

SEQ ID NO: 608594 - RNA, 19 nt, Homo sapiens
  misc_RNA (1)...(19): siRNA sense strand
caucagaccuuucuuaaca

SEQ ID NO: 608595 - RNA, 19 nt, Homo sapiens
  misc_RNA (1)...(19): siRNA sense strand
gcaaugacccuugaagaua

SEQ ID NO: 608596 - RNA, 19 nt, Homo sapiens
  misc_RNA (1)...(19): siRNA sense strand
gaagagagaacagaagaua

SEQ ID NO: 608597 - RNA, 19 nt, Homo sapiens
  misc_RNA (1)...(19): siRNA sense strand
gaugaaaccuuaagucaag

SEQ ID NO: 608598 - RNA, 19 nt, Homo sapiens
  misc_RNA (1)...(19): siRNA sense strand
ucaaagaggucugcuguuu

SEQ ID NO: 608599 - RNA, 19 nt, Homo sapiens
  misc_RNA (1)...(19): siRNA sense strand
ccucagagccaaccuauua

SEQ ID NO: 608600 - RNA, 19 nt, Homo sapiens
  misc_RNA (1)...(19): siRNA sense strand
gaaggaagaacagauauaa

SEQ ID NO: 608601 - RNA, 19 nt, Homo sapiens
  misc_RNA (1)...(19): siRNA sense strand
gcccuuggcuucaucauuu

SEQ ID NO: 608602 - RNA, 19 nt, Homo sapiens
  misc_RNA (1)...(19): siRNA sense strand
gcuaucaagucauccuuua

SEQ ID NO: 608603 - RNA, 19 nt, Homo sapiens
  misc_RNA (1)...(19): siRNA sense strand
gaauggcugugaagaauau

SEQ ID NO: 608604 - RNA, 19 nt, Homo sapiens
  misc_RNA (1)...(19): siRNA sense strand
gcaaacauaucaaauucga

SEQ ID NO: 608605 - RNA, 19 nt, Homo sapiens
  misc_RNA (1)...(19): siRNA sense strand
cauaguaucuucaccagaa

SEQ ID NO: 608606 - RNA, 19 nt, Homo sapiens
  misc_RNA (1)...(19): siRNA sense strand
gacagaggaucaauauauu

SEQ ID NO: 608607 - RNA, 19 nt, Homo sapiens
  misc_RNA (1)...(19): siRNA sense strand
gagaauugguuguuauguu

SEQ ID NO: 608608 - RNA, 19 nt, Homo sapiens
  misc_RNA (1)...(19): siRNA sense strand
gggaacugcuccagaagua

SEQ ID NO: 608609 - RNA, 19 nt, Homo sapiens
  misc_RNA (1)...(19): siRNA sense strand
uaacagagcauuagacaug

SEQ ID NO: 608610 - RNA, 19 nt, Homo sapiens
  misc_RNA (1)...(19): siRNA sense strand
gaagagacaguuacaguga

SEQ ID NO: 608611 - RNA, 19 nt, Homo sapiens
  misc_RNA (1)...(19): siRNA sense strand
ccagguacauuaaagauga

SEQ ID NO: 608612 - RNA, 19 nt, Homo sapiens
  misc_RNA (1)...(19): siRNA sense strand
ccaugaagauucugauaaa

SEQ ID NO: 608613 - RNA, 19 nt, Homo sapiens
  misc_RNA (1)...(19): siRNA sense strand
gaagacugaugaugaugaa

SEQ ID NO: 608614 - RNA, 19 nt, Homo sapiens
  misc_RNA (1)...(19): siRNA sense strand
uaacuucucucucagaugu

SEQ ID NO: 608615 - RNA, 19 nt, Homo sapiens
  misc_RNA (1)...(19): siRNA sense strand
gaaguuaucagaagagaga

SEQ ID NO: 608616 - RNA, 19 nt, Homo sapiens
  misc_RNA (1)...(19): siRNA sense strand
gaagaugacauuuaugaug

SEQ ID NO: 608617 - RNA, 19 nt, Homo sapiens
  misc_RNA (1)...(19): siRNA sense strand
ggaaguagaacuccucauu

SEQ ID NO: 608618 - RNA, 19 nt, Homo sapiens
  misc_RNA (1)...(19): siRNA sense strand
gaacugaccugugauacca

SEQ ID NO: 608619 - RNA, 19 nt, Homo sapiens
  misc_RNA (1)...(19): siRNA sense strand
uagcuacccucaaagauaa

SEQ ID NO: 608620 - RNA, 19 nt, Homo sapiens
  misc_RNA (1)...(19): siRNA sense strand
aaagaugaaugggaaguua

SEQ ID NO: 608621 - RNA, 19 nt, Homo sapiens
  misc_RNA (1)...(19): siRNA sense strand
gcaagacagugcuauagau

SEQ ID NO: 608622 - RNA, 19 nt, Homo sapiens
  misc_RNA (1)...(19): siRNA sense strand
ccaaagccacuguuaauuu

SEQ ID NO: 608623 - RNA, 19 nt, Homo sapiens
  misc_RNA (1)...(19): siRNA sense strand
caaccaagaugcccaagau

SEQ ID NO: 608624 - RNA, 19 nt, Homo sapiens
  misc_RNA (1)...(19): siRNA sense strand
cuaaggagcuggagaaucu

SEQ ID NO: 608625 - RNA, 19 nt, Homo sapiens
  misc_RNA (1)...(19): siRNA sense strand
cuaguucgauggauaagua

SEQ ID NO: 608626 - RNA, 19 nt, Homo sapiens
  misc_RNA (1)...(19): siRNA sense strand
cagcaaacauaucaaauuc

SEQ ID NO: 608627 - RNA, 19 nt, Homo sapiens
  misc_RNA (1)...(19): siRNA sense strand
caucaaagauacacaagau

SEQ ID NO: 608628 - RNA, 19 nt, Homo sapiens
  misc_RNA (1)...(19): siRNA sense strand
gaucauuccuuucugacaa

SEQ ID NO: 608629 - RNA, 19 nt, Homo sapiens
  misc_RNA (1)...(19): siRNA sense strand
ggaaguauagccuuggaua

SEQ ID NO: 608630 - RNA, 19 nt, Homo sapiens
  misc_RNA (1)...(19): siRNA sense strand
uaagagaaauugcccuaga

SEQ ID NO: 608631 - RNA, 19 nt, Homo sapiens
  misc_RNA (1)...(19): siRNA sense strand
uggacgaguucuagaauua

SEQ ID NO: 608632 - RNA, 19 nt, Homo sapiens
  misc_RNA (1)...(19): siRNA sense strand
gaaaacaacucaggucaaa

SEQ ID NO: 608633 - RNA, 19 nt, Homo sapiens
  misc_RNA (1)...(19): siRNA sense strand
gugaauacauccaacaaga

SEQ ID NO: 608634 - RNA, 19 nt, Homo sapiens
  misc_RNA (1)...(19): siRNA sense strand
uaacaaagggcuuaguaaa

SEQ ID NO: 608635 - RNA, 19 nt, Homo sapiens
  misc_RNA (1)...(19): siRNA sense strand
caaugacccuugaagauau

SEQ ID NO: 608636 - RNA, 19 nt, Homo sapiens
  misc_RNA (1)...(19): siRNA sense strand
gaaagaagaguucguuuac

SEQ ID NO: 608637 - RNA, 19 nt, Homo sapiens
  misc_RNA (1)...(19): siRNA sense strand
gagaagaagucacaaacag

SEQ ID NO: 608638 - RNA, 19 nt, Homo sapiens
  misc_RNA (1)...(19): siRNA sense strand
ggaaagaagaaccaaagaa

SEQ ID NO: 608639 - RNA, 19 nt, Homo sapiens
  misc_RNA (1)...(19): siRNA sense strand
gaagaguucguuuacauug

SEQ ID NO: 608640 - RNA, 19 nt, Homo sapiens
  misc_RNA (1)...(19): siRNA sense strand
ccaggucaaugguuucuuu

SEQ ID NO: 608641 - RNA, 19 nt, Homo sapiens
  misc_RNA (1)...(19): siRNA sense strand
cgagaucgauugcgaggaa

SEQ ID NO: 608642 - RNA, 19 nt, Homo sapiens
  misc_RNA (1)...(19): siRNA sense strand
auacacgggugccaacuua

SEQ ID NO: 608643 - RNA, 19 nt, Homo sapiens
  misc_RNA (1)...(19): siRNA sense strand
aaagaggucugcuguuuca

SEQ ID NO: 608644 - RNA, 19 nt, Homo sapiens
  misc_RNA (1)...(19): siRNA sense strand
gaacuccucauuacccuaa

SEQ ID NO: 608645 - RNA, 19 nt, Homo sapiens
  misc_RNA (1)...(19): siRNA sense strand
gaagauaccauuuguacca

SEQ ID NO: 608646 - RNA, 19 nt, Homo sapiens
  misc_RNA (1)...(19): siRNA sense strand
ucaagaagauaccauuugu

SEQ ID NO: 608647 - RNA, 19 nt, Homo sapiens
  misc_RNA (1)...(19): siRNA sense strand
gaacugcuccagaaguauu

SEQ ID NO: 608648 - RNA, 19 nt, Homo sapiens
  misc_RNA (1)...(19): siRNA sense strand
caaagaagaguuacccaaa

SEQ ID NO: 608649 - RNA, 19 nt, Homo sapiens
  misc_RNA (1)...(19): siRNA sense strand
acaaagggcuuaguaaauc

SEQ ID NO: 608650 - RNA, 19 nt, Homo sapiens
  misc_RNA (1)...(19): siRNA sense strand
gacugaugaugaugaaaua

SEQ ID NO: 608651 - RNA, 19 nt, Homo sapiens
  misc_RNA (1)...(19): siRNA sense strand
caaaggcaaucagagaauu

SEQ ID NO: 608652 - RNA, 19 nt, Homo sapiens
  misc_RNA (1)...(19): siRNA sense strand
guggaaacacugagaaaua

SEQ ID NO: 608653 - RNA, 19 nt, Homo sapiens
  misc_RNA (1)...(19): siRNA sense strand
caaaggugaucgcguccua

SEQ ID NO: 608654 - RNA, 19 nt, Homo sapiens
  misc_RNA (1)...(19): siRNA sense strand
gauaacagcuuggggauaa

SEQ ID NO: 608655 - RNA, 19 nt, Homo sapiens
  misc_RNA (1)...(19): siRNA sense strand
aagaagaguuacccaaauu

SEQ ID NO: 608656 - RNA, 19 nt, Homo sapiens
  misc_RNA (1)...(19): siRNA sense strand
cgaaggaaaguaaacauaa

SEQ ID NO: 608657 - RNA, 19 nt, Homo sapiens
  misc_RNA (1)...(19): siRNA sense strand
gaaacagccaugacucaaa

SEQ ID NO: 608658 - RNA, 19 nt, Homo sapiens
  misc_RNA (1)...(19): siRNA sense strand
gaucagcuuuccuguaaca

SEQ ID NO: 608659 - RNA, 19 nt, Homo sapiens
  misc_RNA (1)...(19): siRNA sense strand
gaguggagaagaugacuua

SEQ ID NO: 608660 - RNA, 19 nt, Homo sapiens
  misc_RNA (1)...(19): siRNA sense strand
gcacaaguacuuccaaaca

SEQ ID NO: 608661 - RNA, 19 nt, Homo sapiens
  misc_RNA (1)...(19): siRNA sense strand
gacaaucuccaacaucuaa

SEQ ID NO: 608662 - RNA, 19 nt, Homo sapiens
  misc_RNA (1)...(19): siRNA sense strand
gaaucuuccucuucaguga

SEQ ID NO: 608663 - RNA, 19 nt, Homo sapiens
  misc_RNA (1)...(19): siRNA sense strand
cauggugugucuuacuuua

SEQ ID NO: 608664 - RNA, 19 nt, Homo sapiens
  misc_RNA (1)...(19): siRNA sense strand
ugaugagacuuccuuauug

SEQ ID NO: 608665 - RNA, 19 nt, Homo sapiens
  misc_RNA (1)...(19): siRNA sense strand
caggagagacugccacaua

SEQ ID NO: 608666 - RNA, 19 nt, Homo sapiens
  misc_RNA (1)...(19): siRNA sense strand
agacagaggaucaauauau

SEQ ID NO: 608667 - RNA, 19 nt, Homo sapiens
  misc_RNA (1)...(19): siRNA sense strand
aaagaagacugaugaugau

SEQ ID NO: 608668 - RNA, 19 nt, Homo sapiens
  misc_RNA (1)...(19): siRNA sense strand
ggaaguuaacagagcauua

SEQ ID NO: 608669 - RNA, 19 nt, Homo sapiens
  misc_RNA (1)...(19): siRNA sense strand
gaaaggaugcacugugaug

SEQ ID NO: 608670 - RNA, 19 nt, Homo sapiens
  misc_RNA (1)...(19): siRNA sense strand
gauaaccgaaggaaaguaa

SEQ ID NO: 608671 - RNA, 19 nt, Homo sapiens
  misc_RNA (1)...(19): siRNA sense strand
gcaagauacucagauggaa

SEQ ID NO: 608672 - RNA, 19 nt, Homo sapiens
  misc_RNA (1)...(19): siRNA sense strand
gacuggaacugaccuguga

SEQ ID NO: 608673 - RNA, 19 nt, Homo sapiens
  misc_RNA (1)...(19): siRNA sense strand
aaacaacaauggucagcaa

SEQ ID NO: 608674 - RNA, 19 nt, Homo sapiens
  misc_RNA (1)...(19): siRNA sense strand
gaagucauaucugcucuca

SEQ ID NO: 608675 - RNA, 19 nt, Homo sapiens
  misc_RNA (1)...(19): siRNA sense strand
caauggaguuagucuagaa

SEQ ID NO: 608676 - RNA, 19 nt, Homo sapiens
  misc_RNA (1)...(19): siRNA sense strand
ggagaaacuugauuuaucc

SEQ ID NO: 608677 - RNA, 19 nt, Homo sapiens
  misc_RNA (1)...(19): siRNA sense strand
gaaagucuccaagaauuau

SEQ ID NO: 608678 - RNA, 19 nt, Homo sapiens
  misc_RNA (1)...(19): siRNA sense strand
gauguuaucuugaaaguga

SEQ ID NO: 608679 - RNA, 19 nt, Homo sapiens
  misc_RNA (1)...(19): siRNA sense strand
gaaggcaacuuaauuaauc

SEQ ID NO: 608680 - RNA, 19 nt, Homo sapiens
  misc_RNA (1)...(19): siRNA sense strand
gaaagaagaaccaaagaaa

SEQ ID NO: 608681 - RNA, 19 nt, Homo sapiens
  misc_RNA (1)...(19): siRNA sense strand
gaacaaaccaugaagauuc

SEQ ID NO: 608682 - RNA, 19 nt, Homo sapiens
  misc_RNA (1)...(19): siRNA sense strand
gaagaaauaugggcuguau

SEQ ID NO: 608683 - RNA, 19 nt, Homo sapiens
  misc_RNA (1)...(19): siRNA sense strand
ggaaagaagaguucguuua

SEQ ID NO: 608684 - RNA, 19 nt, Homo sapiens
  misc_RNA (1)...(19): siRNA sense strand
gaagguggcuauaucaaug

SEQ ID NO: 608685 - RNA, 19 nt, Homo sapiens
  misc_RNA (1)...(19): siRNA sense strand
cagaucagcuuuccuguaa

SEQ ID NO: 608686 - RNA, 19 nt, Homo sapiens
  misc_RNA (1)...(19): siRNA sense strand
gcauugaugugcuuucuaa

SEQ ID NO: 608687 - RNA, 19 nt, Homo sapiens
  misc_RNA (1)...(19): siRNA sense strand
gccaaagacugacagaaua

SEQ ID NO: 608688 - RNA, 19 nt, Homo sapiens
  misc_RNA (1)...(19): siRNA sense strand
gaaguagaacuccucauua

SEQ ID NO: 608689 - RNA, 19 nt, Homo sapiens
  misc_RNA (1)...(19): siRNA sense strand
gaauggagccucuuugaaa

SEQ ID NO: 608690 - RNA, 19 nt, Homo sapiens
  misc_RNA (1)...(19): siRNA sense strand
gaagaugugacacuuguua

SEQ ID NO: 608691 - RNA, 19 nt, Homo sapiens
  misc_RNA (1)...(19): siRNA sense strand
ccaagaagcugaaguuauc

SEQ ID NO: 608692 - RNA, 19 nt, Homo sapiens
  misc_RNA (1)...(19): siRNA sense strand
caacucaggucaaagacua

SEQ ID NO: 608693 - RNA, 19 nt, Homo sapiens
  misc_RNA (1)...(19): siRNA sense strand
caugaugacucaagaagua

SEQ ID NO: 608694 - RNA, 19 nt, Homo sapiens
  misc_RNA (1)...(19): siRNA sense strand
caucagaccuuucuuaaca

SEQ ID NO: 608695 - RNA, 19 nt, Homo sapiens
  misc_RNA (1)...(19): siRNA sense strand
gcaaugacccuugaagaua

SEQ ID NO: 608696 - RNA, 19 nt, Homo sapiens
  misc_RNA (1)...(19): siRNA sense strand
gaagagagaacagaagaua

SEQ ID NO: 608697 - RNA, 19 nt, Homo sapiens
  misc_RNA (1)...(19): siRNA sense strand
gaugaaaccuuaagucaag

SEQ ID NO: 608698 - RNA, 19 nt, Homo sapiens
  misc_RNA (1)...(19): siRNA sense strand
ucaaagaggucugcuguuu

SEQ ID NO: 608699 - RNA, 19 nt, Homo sapiens
  misc_RNA (1)...(19): siRNA sense strand
ccucagagccaaccuauua

SEQ ID NO: 608700 - RNA, 19 nt, Homo sapiens
  misc_RNA (1)...(19): siRNA sense strand
gaaggaagaacagauauaa

SEQ ID NO: 608701 - RNA, 19 nt, Homo sapiens
  misc_RNA (1)...(19): siRNA sense strand
gcccuuggcuucaucauuu

SEQ ID NO: 608702 - RNA, 19 nt, Homo sapiens
  misc_RNA (1)...(19): siRNA sense strand
gcuaucaagucauccuuua

SEQ ID NO: 608703 - RNA, 19 nt, Homo sapiens
  misc_RNA (1)...(19): siRNA sense strand
gaauggcugugaagaauau

SEQ ID NO: 608704 - RNA, 19 nt, Homo sapiens
  misc_RNA (1)...(19): siRNA sense strand
gcaaacauaucaaauucga

SEQ ID NO: 608705 - RNA, 19 nt, Homo sapiens
  misc_RNA (1)...(19): siRNA sense strand
cauaguaucuucaccagaa

SEQ ID NO: 608706 - RNA, 19 nt, Homo sapiens
  misc_RNA (1)...(19): siRNA sense strand
gacagaggaucaauauauu

SEQ ID NO: 608707 - RNA, 19 nt, Homo sapiens
  misc_RNA (1)...(19): siRNA sense strand
gagaauugguuguuauguu

SEQ ID NO: 608708 - RNA, 19 nt, Homo sapiens
  misc_RNA (1)...(19): siRNA sense strand
gggaacugcuccagaagua

SEQ ID NO: 608709 - RNA, 19 nt, Homo sapiens
  misc_RNA (1)...(19): siRNA sense strand
uaacagagcauuagacaug

SEQ ID NO: 608710 - RNA, 19 nt, Homo sapiens
  misc_RNA (1)...(19): siRNA sense strand
gaagagacaguuacaguga

SEQ ID NO: 608711 - RNA, 19 nt, Homo sapiens
  misc_RNA (1)...(19): siRNA sense strand
ccagguacauuaaagauga

SEQ ID NO: 608712 - RNA, 19 nt, Homo sapiens
  misc_RNA (1)...(19): siRNA sense strand
ccaugaagauucugauaaa

SEQ ID NO: 608713 - RNA, 19 nt, Homo sapiens
  misc_RNA (1)...(19): siRNA sense strand
gaagacugaugaugaugaa

SEQ ID NO: 608714 - RNA, 19 nt, Homo sapiens
  misc_RNA (1)...(19): siRNA sense strand
uaacuucucucucagaugu

SEQ ID NO: 608715 - RNA, 19 nt, Homo sapiens
  misc_RNA (1)...(19): siRNA sense strand
gaaguuaucagaagagaga

SEQ ID NO: 608716 - RNA, 19 nt, Homo sapiens
  misc_RNA (1)...(19): siRNA sense strand
gaagaugacauuuaugaug

SEQ ID NO: 608717 - RNA, 19 nt, Homo sapiens
  misc_RNA (1)...(19): siRNA sense strand
ggaaguagaacuccucauu

SEQ ID NO: 608718 - RNA, 19 nt, Homo sapiens
  misc_RNA (1)...(19): siRNA sense strand
gaacugaccugugauacca

SEQ ID NO: 608719 - RNA, 19 nt, Homo sapiens
  misc_RNA (1)...(19): siRNA sense strand
uagcuacccucaaagauaa

SEQ ID NO: 608720 - RNA, 19 nt, Homo sapiens
  misc_RNA (1)...(19): siRNA sense strand
aaagaugaaugggaaguua

SEQ ID NO: 608721 - RNA, 19 nt, Homo sapiens
  misc_RNA (1)...(19): siRNA sense strand
gcaagacagugcuauagau

SEQ ID NO: 608722 - RNA, 19 nt, Homo sapiens
  misc_RNA (1)...(19): siRNA sense strand
ccaaagccacuguuaauuu

SEQ ID NO: 608723 - RNA, 19 nt, Homo sapiens
  misc_RNA (1)...(19): siRNA sense strand
caaccaagaugcccaagau

SEQ ID NO: 608724 - RNA, 19 nt, Homo sapiens
  misc_RNA (1)...(19): siRNA sense strand
cuaaggagcuggagaaucu

SEQ ID NO: 608725 - RNA, 19 nt, Homo sapiens
  misc_RNA (1)...(19): siRNA sense strand
cuaguucgauggauaagua

SEQ ID NO: 608726 - RNA, 19 nt, Homo sapiens
  misc_RNA (1)...(19): siRNA sense strand
cagcaaacauaucaaauuc

SEQ ID NO: 608727 - RNA, 19 nt, Homo sapiens
  misc_RNA (1)...(19): siRNA sense strand
caucaaagauacacaagau

SEQ ID NO: 608728 - RNA, 19 nt, Homo sapiens
  misc_RNA (1)...(19): siRNA sense strand
gaucauuccuuucugacaa

SEQ ID NO: 608729 - RNA, 19 nt, Homo sapiens
  misc_RNA (1)...(19): siRNA sense strand
ggaaguauagccuuggaua

SEQ ID NO: 608730 - RNA, 19 nt, Homo sapiens
  misc_RNA (1)...(19): siRNA sense strand
uaagagaaauugcccuaga

SEQ ID NO: 608731 - RNA, 19 nt, Homo sapiens
  misc_RNA (1)...(19): siRNA sense strand
uggacgaguucuagaauua

SEQ ID NO: 608732 - RNA, 19 nt, Homo sapiens
  misc_RNA (1)...(19): siRNA sense strand
gaaaacaacucaggucaaa

SEQ ID NO: 608733 - RNA, 19 nt, Homo sapiens
  misc_RNA (1)...(19): siRNA sense strand
gugaauacauccaacaaga

SEQ ID NO: 608734 - RNA, 19 nt, Homo sapiens
  misc_RNA (1)...(19): siRNA sense strand
uaacaaagggcuuaguaaa

SEQ ID NO: 608735 - RNA, 19 nt, Homo sapiens
  misc_RNA (1)...(19): siRNA sense strand
caaugacccuugaagauau

SEQ ID NO: 608736 - RNA, 19 nt, Homo sapiens
  misc_RNA (1)...(19): siRNA sense strand
gaaagaagaguucguuuac

SEQ ID NO: 608737 - RNA, 19 nt, Homo sapiens
  misc_RNA (1)...(19): siRNA sense strand
gagaagaagucacaaacag

SEQ ID NO: 608738 - RNA, 19 nt, Homo sapiens
  misc_RNA (1)...(19): siRNA sense strand
ggaaagaagaaccaaagaa

SEQ ID NO: 608739 - RNA, 19 nt, Homo sapiens
  misc_RNA (1)...(19): siRNA sense strand
gaagaguucguuuacauug

SEQ ID NO: 608740 - RNA, 19 nt, Homo sapiens
  misc_RNA (1)...(19): siRNA sense strand
ccaggucaaugguuucuuu

SEQ ID NO: 608741 - RNA, 19 nt, Homo sapiens
  misc_RNA (1)...(19): siRNA sense strand
cgagaucgauugcgaggaa

SEQ ID NO: 608742 - RNA, 19 nt, Homo sapiens
  misc_RNA (1)...(19): siRNA sense strand
auacacgggugccaacuua

SEQ ID NO: 608743 - RNA, 19 nt, Homo sapiens
  misc_RNA (1)...(19): siRNA sense strand
aaagaggucugcuguuuca

SEQ ID NO: 608744 - RNA, 19 nt, Homo sapiens
  misc_RNA (1)...(19): siRNA sense strand
gaacuccucauuacccuaa

SEQ ID NO: 608745 - RNA, 19 nt, Homo sapiens
  misc_RNA (1)...(19): siRNA sense strand
gaagauaccauuuguacca

SEQ ID NO: 608746 - RNA, 19 nt, Homo sapiens
  misc_RNA (1)...(19): siRNA sense strand
ucaagaagauaccauuugu

SEQ ID NO: 608747 - RNA, 19 nt, Homo sapiens
  misc_RNA (1)...(19): siRNA sense strand
gaacugcuccagaaguauu

SEQ ID NO: 608748 - RNA, 19 nt, Homo sapiens
  misc_RNA (1)...(19): siRNA sense strand
caaagaagaguuacccaaa

SEQ ID NO: 608749 - RNA, 19 nt, Homo sapiens
  misc_RNA (1)...(19): siRNA sense strand
acaaagggcuuaguaaauc

SEQ ID NO: 608750 - RNA, 19 nt, Homo sapiens
  misc_RNA (1)...(19): siRNA sense strand
gacugaugaugaugaaaua

SEQ ID NO: 608751 - RNA, 19 nt, Homo sapiens
  misc_RNA (1)...(19): siRNA sense strand
caaaggcaaucagagaauu

SEQ ID NO: 608752 - RNA, 19 nt, Homo sapiens
  misc_RNA (1)...(19): siRNA sense strand
guggaaacacugagaaaua

SEQ ID NO: 608753 - RNA, 19 nt, Homo sapiens
  misc_RNA (1)...(19): siRNA sense strand
caaaggugaucgcguccua

SEQ ID NO: 608754 - RNA, 19 nt, Homo sapiens
  misc_RNA (1)...(19): siRNA sense strand
gauaacagcuuggggauaa

SEQ ID NO: 608755 - RNA, 19 nt, Homo sapiens
  misc_RNA (1)...(19): siRNA sense strand
aagaagaguuacccaaauu

SEQ ID NO: 608756 - RNA, 19 nt, Homo sapiens
  misc_RNA (1)...(19): siRNA sense strand
cgaaggaaaguaaacauaa

SEQ ID NO: 608757 - RNA, 19 nt, Homo sapiens
  misc_RNA (1)...(19): siRNA sense strand
gaaacagccaugacucaaa

SEQ ID NO: 608758 - RNA, 19 nt, Homo sapiens
  misc_RNA (1)...(19): siRNA sense strand
gaucagcuuuccuguaaca

SEQ ID NO: 608759 - RNA, 19 nt, Homo sapiens
  misc_RNA (1)...(19): siRNA sense strand
gaguggagaagaugacuua

SEQ ID NO: 608760 - RNA, 19 nt, Homo sapiens
  misc_RNA (1)...(19): siRNA sense strand
gcacaaguacuuccaaaca

SEQ ID NO: 608761 - RNA, 19 nt, Homo sapiens
  misc_RNA (1)...(19): siRNA sense strand
gacaaucuccaacaucuaa

SEQ ID NO: 608762 - RNA, 19 nt, Homo sapiens
  misc_RNA (1)...(19): siRNA sense strand
gaaucuuccucuucaguga

SEQ ID NO: 608763 - RNA, 19 nt, Homo sapiens
  misc_RNA (1)...(19): siRNA sense strand
cauggugugucuuacuuua

SEQ ID NO: 608764 - RNA, 19 nt, Homo sapiens
  misc_RNA (1)...(19): siRNA sense strand
ugaugagacuuccuuauug

SEQ ID NO: 608765 - RNA, 19 nt, Homo sapiens
  misc_RNA (1)...(19): siRNA sense strand
caggagagacugccacaua

SEQ ID NO: 608766 - RNA, 19 nt, Homo sapiens
  misc_RNA (1)...(19): siRNA sense strand
agacagaggaucaauauau

SEQ ID NO: 608767 - RNA, 19 nt, Homo sapiens
  misc_RNA (1)...(19): siRNA sense strand
aaagaagacugaugaugau

SEQ ID NO: 608768 - RNA, 19 nt, Homo sapiens
  misc_RNA (1)...(19): siRNA sense strand
ggaaguuaacagagcauua

SEQ ID NO: 608769 - RNA, 19 nt, Homo sapiens
  misc_RNA (1)...(19): siRNA sense strand
gaaaggaugcacugugaug

SEQ ID NO: 608770 - RNA, 19 nt, Homo sapiens
  misc_RNA (1)...(19): siRNA sense strand
gauaaccgaaggaaaguaa

SEQ ID NO: 608771 - RNA, 19 nt, Homo sapiens
  misc_RNA (1)...(19): siRNA sense strand
gcaagauacucagauggaa

SEQ ID NO: 608772 - RNA, 19 nt, Homo sapiens
  misc_RNA (1)...(19): siRNA sense strand
gacuggaacugaccuguga

SEQ ID NO: 608773 - RNA, 19 nt, Homo sapiens
  misc_RNA (1)...(19): siRNA sense strand
aaacaacaauggucagcaa

SEQ ID NO: 608774 - RNA, 19 nt, Homo sapiens
  misc_RNA (1)...(19): siRNA sense strand
gaagucauaucugcucuca

SEQ ID NO: 608775 - RNA, 19 nt, Homo sapiens
  misc_RNA (1)...(19): siRNA sense strand
caauggaguuagucuagaa

SEQ ID NO: 608776 - RNA, 19 nt, Homo sapiens
  misc_RNA (1)...(19): siRNA sense strand
ggagaaacuugauuuaucc

SEQ ID NO: 608777 - RNA, 19 nt, Homo sapiens
  misc_RNA (1)...(19): siRNA sense strand
gaaagucuccaagaauuau

SEQ ID NO: 608778 - RNA, 19 nt, Homo sapiens
  misc_RNA (1)...(19): siRNA sense strand
gauguuaucuugaaaguga

SEQ ID NO: 608779 - RNA, 19 nt, Homo sapiens
  misc_RNA (1)...(19): siRNA sense strand
gaaggcaacuuaauuaauc

SEQ ID NO: 608780 - RNA, 19 nt, Homo sapiens
  misc_RNA (1)...(19): siRNA sense strand
gaaagaagaaccaaagaaa

SEQ ID NO: 608781 - RNA, 19 nt, Homo sapiens
  misc_RNA (1)...(19): siRNA sense strand
gaacaaaccaugaagauuc

SEQ ID NO: 608782 - RNA, 19 nt, Homo sapiens
  misc_RNA (1)...(19): siRNA sense strand
gaagaaauaugggcuguau

SEQ ID NO: 608783 - RNA, 19 nt, Homo sapiens
  misc_RNA (1)...(19): siRNA sense strand
ggaaagaagaguucguuua

SEQ ID NO: 608784 - RNA, 19 nt, Homo sapiens
  misc_RNA (1)...(19): siRNA sense strand
gaagguggcuauaucaaug

SEQ ID NO: 608785 - RNA, 19 nt, Homo sapiens
  misc_RNA (1)...(19): siRNA sense strand
cagaucagcuuuccuguaa

SEQ ID NO: 608786 - RNA, 19 nt, Homo sapiens
  misc_RNA (1)...(19): siRNA sense strand
gcauugaugugcuuucuaa

SEQ ID NO: 608787 - RNA, 19 nt, Homo sapiens
  misc_RNA (1)...(19): siRNA sense strand
gccaaagacugacagaaua

SEQ ID NO: 608788 - RNA, 19 nt, Homo sapiens
  misc_RNA (1)...(19): siRNA sense strand
gaaguagaacuccucauua

SEQ ID NO: 608789 - RNA, 19 nt, Homo sapiens
  misc_RNA (1)...(19): siRNA sense strand
gaauggagccucuuugaaa

SEQ ID NO: 608790 - RNA, 19 nt, Homo sapiens
  misc_RNA (1)...(19): siRNA sense strand
gaagaugugacacuuguua

SEQ ID NO: 608791 - RNA, 19 nt, Homo sapiens
  misc_RNA (1)...(19): siRNA sense strand
ccaagaagcugaaguuauc

SEQ ID NO: 608792 - RNA, 19 nt, Homo sapiens
  misc_RNA (1)...(19): siRNA sense strand
caacucaggucaaagacua

SEQ ID NO: 608793 - RNA, 19 nt, Homo sapiens
  misc_RNA (1)...(19): siRNA sense strand
caugaugacucaagaagua

SEQ ID NO: 608794 - RNA, 19 nt, Homo sapiens
  misc_RNA (1)...(19): siRNA sense strand
caucagaccuuucuuaaca

SEQ ID NO: 608795 - RNA, 19 nt, Homo sapiens
  misc_RNA (1)...(19): siRNA sense strand
gcaaugacccuugaagaua

SEQ ID NO: 608796 - RNA, 19 nt, Homo sapiens
  misc_RNA (1)...(19): siRNA sense strand
gaagagagaacagaagaua

SEQ ID NO: 608797 - RNA, 19 nt, Homo sapiens
  misc_RNA (1)...(19): siRNA sense strand
gaugaaaccuuaagucaag

SEQ ID NO: 608798 - RNA, 19 nt, Homo sapiens
  misc_RNA (1)...(19): siRNA sense strand
ucaaagaggucugcuguuu

SEQ ID NO: 608799 - RNA, 19 nt, Homo sapiens
  misc_RNA (1)...(19): siRNA sense strand
ccucagagccaaccuauua

SEQ ID NO: 608800 - RNA, 19 nt, Homo sapiens
  misc_RNA (1)...(19): siRNA sense strand
gaaggaagaacagauauaa

SEQ ID NO: 608801 - RNA, 19 nt, Homo sapiens
  misc_RNA (1)...(19): siRNA sense strand
gcccuuggcuucaucauuu

SEQ ID NO: 608802 - RNA, 19 nt, Homo sapiens
  misc_RNA (1)...(19): siRNA sense strand
gcuaucaagucauccuuua

SEQ ID NO: 608803 - RNA, 19 nt, Homo sapiens
  misc_RNA (1)...(19): siRNA sense strand
gaauggcugugaagaauau

SEQ ID NO: 608804 - RNA, 19 nt, Homo sapiens
  misc_RNA (1)...(19): siRNA sense strand
gcaaacauaucaaauucga

SEQ ID NO: 608805 - RNA, 19 nt, Homo sapiens
  misc_RNA (1)...(19): siRNA sense strand
cauaguaucuucaccagaa

SEQ ID NO: 608806 - RNA, 19 nt, Homo sapiens
  misc_RNA (1)...(19): siRNA sense strand
gacagaggaucaauauauu

SEQ ID NO: 608807 - RNA, 19 nt, Homo sapiens
  misc_RNA (1)...(19): siRNA sense strand
gagaauugguuguuauguu

SEQ ID NO: 608808 - RNA, 19 nt, Homo sapiens
  misc_RNA (1)...(19): siRNA sense strand
gggaacugcuccagaagua

SEQ ID NO: 608809 - RNA, 19 nt, Homo sapiens
  misc_RNA (1)...(19): siRNA sense strand
uaacagagcauuagacaug

SEQ ID NO: 608810 - RNA, 19 nt, Homo sapiens
  misc_RNA (1)...(19): siRNA sense strand
gaagagacaguuacaguga

SEQ ID NO: 608811 - RNA, 19 nt, Homo sapiens
  misc_RNA (1)...(19): siRNA sense strand
ccagguacauuaaagauga

SEQ ID NO: 608812 - RNA, 19 nt, Homo sapiens
  misc_RNA (1)...(19): siRNA sense strand
ccaugaagauucugauaaa

SEQ ID NO: 608813 - RNA, 19 nt, Homo sapiens
  misc_RNA (1)...(19): siRNA sense strand
gaagacugaugaugaugaa

SEQ ID NO: 608814 - RNA, 19 nt, Homo sapiens
  misc_RNA (1)...(19): siRNA sense strand
uaacuucucucucagaugu

SEQ ID NO: 608815 - RNA, 19 nt, Homo sapiens
  misc_RNA (1)...(19): siRNA sense strand
gaaguuaucagaagagaga

SEQ ID NO: 608816 - RNA, 19 nt, Homo sapiens
  misc_RNA (1)...(19): siRNA sense strand
gaagaugacauuuaugaug

SEQ ID NO: 608817 - RNA, 19 nt, Homo sapiens
  misc_RNA (1)...(19): siRNA sense strand
ggaaguagaacuccucauu

SEQ ID NO: 608818 - RNA, 19 nt, Homo sapiens
  misc_RNA (1)...(19): siRNA sense strand
gaacugaccugugauacca

SEQ ID NO: 608819 - RNA, 19 nt, Homo sapiens
  misc_RNA (1)...(19): siRNA sense strand
uagcuacccucaaagauaa

SEQ ID NO: 608820 - RNA, 19 nt, Homo sapiens
  misc_RNA (1)...(19): siRNA sense strand
aaagaugaaugggaaguua

SEQ ID NO: 608821 - RNA, 19 nt, Homo sapiens
  misc_RNA (1)...(19): siRNA sense strand
gcaagacagugcuauagau

SEQ ID NO: 608822 - RNA, 19 nt, Homo sapiens
  misc_RNA (1)...(19): siRNA sense strand
ccaaagccacuguuaauuu

SEQ ID NO: 608823 - RNA, 19 nt, Homo sapiens
  misc_RNA (1)...(19): siRNA sense strand
caaccaagaugcccaagau

SEQ ID NO: 608824 - RNA, 19 nt, Homo sapiens
  misc_RNA (1)...(19): siRNA sense strand
cuaaggagcuggagaaucu

SEQ ID NO: 608825 - RNA, 19 nt, Homo sapiens
  misc_RNA (1)...(19): siRNA sense strand
cuaguucgauggauaagua

SEQ ID NO: 608826 - RNA, 19 nt, Homo sapiens
  misc_RNA (1)...(19): siRNA sense strand
cagcaaacauaucaaauuc

SEQ ID NO: 608827 - RNA, 19 nt, Homo sapiens
  misc_RNA (1)...(19): siRNA sense strand
caucaaagauacacaagau

SEQ ID NO: 608828 - RNA, 19 nt, Homo sapiens
  misc_RNA (1)...(19): siRNA sense strand
gaucauuccuuucugacaa

SEQ ID NO: 608829 - RNA, 19 nt, Homo sapiens
  misc_RNA (1)...(19): siRNA sense strand
ggaaguauagccuuggaua

SEQ ID NO: 608830 - RNA, 19 nt, Homo sapiens
  misc_RNA (1)...(19): siRNA sense strand
uaagagaaauugcccuaga

SEQ ID NO: 608831 - RNA, 19 nt, Homo sapiens
  misc_RNA (1)...(19): siRNA sense strand
uggacgaguucuagaauua

SEQ ID NO: 608832 - RNA, 19 nt, Homo sapiens
  misc_RNA (1)...(19): siRNA sense strand
gaaaacaacucaggucaaa

SEQ ID NO: 608833 - RNA, 19 nt, Homo sapiens
  misc_RNA (1)...(19): siRNA sense strand
gugaauacauccaacaaga

SEQ ID NO: 608834 - RNA, 19 nt, Homo sapiens
  misc_RNA (1)...(19): siRNA sense strand
uaacaaagggcuuaguaaa

SEQ ID NO: 608835 - RNA, 19 nt, Homo sapiens
  misc_RNA (1)...(19): siRNA sense strand
caaugacccuugaagauau

SEQ ID NO: 608836 - RNA, 19 nt, Homo sapiens
  misc_RNA (1)...(19): siRNA sense strand
gaaagaagaguucguuuac

SEQ ID NO: 608837 - RNA, 19 nt, Homo sapiens
  misc_RNA (1)...(19): siRNA sense strand
gagaagaagucacaaacag

SEQ ID NO: 608838 - RNA, 19 nt, Homo sapiens
  misc_RNA (1)...(19): siRNA sense strand
ggaaagaagaaccaaagaa

SEQ ID NO: 608839 - RNA, 19 nt, Homo sapiens
  misc_RNA (1)...(19): siRNA sense strand
gaagaguucguuuacauug

SEQ ID NO: 608840 - RNA, 19 nt, Homo sapiens
  misc_RNA (1)...(19): siRNA sense strand
ccaggucaaugguuucuuu

SEQ ID NO: 608841 - RNA, 19 nt, Homo sapiens
  misc_RNA (1)...(19): siRNA sense strand
cgagaucgauugcgaggaa

SEQ ID NO: 608842 - RNA, 19 nt, Homo sapiens
  misc_RNA (1)...(19): siRNA sense strand
auacacgggugccaacuua

SEQ ID NO: 608843 - RNA, 19 nt, Homo sapiens
  misc_RNA (1)...(19): siRNA sense strand
aaagaggucugcuguuuca

SEQ ID NO: 608844 - RNA, 19 nt, Homo sapiens
  misc_RNA (1)...(19): siRNA sense strand
gaacuccucauuacccuaa

SEQ ID NO: 608845 - RNA, 19 nt, Homo sapiens
  misc_RNA (1)...(19): siRNA sense strand
gaagauaccauuuguacca

SEQ ID NO: 608846 - RNA, 19 nt, Homo sapiens
  misc_RNA (1)...(19): siRNA sense strand
ucaagaagauaccauuugu

SEQ ID NO: 608847 - RNA, 19 nt, Homo sapiens
  misc_RNA (1)...(19): siRNA sense strand
gaacugcuccagaaguauu

SEQ ID NO: 608848 - RNA, 19 nt, Homo sapiens
  misc_RNA (1)...(19): siRNA sense strand
caaagaagaguuacccaaa

SEQ ID NO: 608849 - RNA, 19 nt, Homo sapiens
  misc_RNA (1)...(19): siRNA sense strand
acaaagggcuuaguaaauc

SEQ ID NO: 608850 - RNA, 19 nt, Homo sapiens
  misc_RNA (1)...(19): siRNA sense strand
gacugaugaugaugaaaua

SEQ ID NO: 608851 - RNA, 19 nt, Homo sapiens
  misc_RNA (1)...(19): siRNA sense strand
caaaggcaaucagagaauu

SEQ ID NO: 608852 - RNA, 19 nt, Homo sapiens
  misc_RNA (1)...(19): siRNA sense strand
guggaaacacugagaaaua

SEQ ID NO: 608853 - RNA, 19 nt, Homo sapiens
  misc_RNA (1)...(19): siRNA sense strand
caaaggugaucgcguccua

SEQ ID NO: 608854 - RNA, 19 nt, Homo sapiens
  misc_RNA (1)...(19): siRNA sense strand
gauaacagcuuggggauaa

SEQ ID NO: 608855 - RNA, 19 nt, Homo sapiens
  misc_RNA (1)...(19): siRNA sense strand
aagaagaguuacccaaauu

SEQ ID NO: 608856 - RNA, 19 nt, Homo sapiens
  misc_RNA (1)...(19): siRNA sense strand
cgaaggaaaguaaacauaa

SEQ ID NO: 608857 - RNA, 19 nt, Homo sapiens
  misc_RNA (1)...(19): siRNA sense strand
gaaacagccaugacucaaa

SEQ ID NO: 608858 - RNA, 19 nt, Homo sapiens
  misc_RNA (1)...(19): siRNA sense strand
gaucagcuuuccuguaaca

SEQ ID NO: 608859 - RNA, 19 nt, Homo sapiens
  misc_RNA (1)...(19): siRNA sense strand
gaguggagaagaugacuua

SEQ ID NO: 608860 - RNA, 19 nt, Homo sapiens
  misc_RNA (1)...(19): siRNA sense strand
gcacaaguacuuccaaaca

SEQ ID NO: 608861 - RNA, 19 nt, Homo sapiens
  misc_RNA (1)...(19): siRNA sense strand
gacaaucuccaacaucuaa

SEQ ID NO: 608862 - RNA, 19 nt, Homo sapiens
  misc_RNA (1)...(19): siRNA sense strand
gaaucuuccucuucaguga

SEQ ID NO: 608863 - RNA, 19 nt, Homo sapiens
  misc_RNA (1)...(19): siRNA sense strand
cauggugugucuuacuuua

SEQ ID NO: 608864 - RNA, 19 nt, Homo sapiens
  misc_RNA (1)...(19): siRNA sense strand
ugaugagacuuccuuauug

SEQ ID NO: 608865 - RNA, 19 nt, Homo sapiens
  misc_RNA (1)...(19): siRNA sense strand
caggagagacugccacaua

SEQ ID NO: 608866 - RNA, 19 nt, Homo sapiens
  misc_RNA (1)...(19): siRNA sense strand
agacagaggaucaauauau

SEQ ID NO: 608867 - RNA, 19 nt, Homo sapiens
  misc_RNA (1)...(19): siRNA sense strand
aaagaagacugaugaugau

SEQ ID NO: 608868 - RNA, 19 nt, Homo sapiens
  misc_RNA (1)...(19): siRNA sense strand
ggaaguuaacagagcauua

SEQ ID NO: 608869 - RNA, 19 nt, Homo sapiens
  misc_RNA (1)...(19): siRNA sense strand
gaaaggaugcacugugaug

SEQ ID NO: 608870 - RNA, 19 nt, Homo sapiens
  misc_RNA (1)...(19): siRNA sense strand
gauaaccgaaggaaaguaa

SEQ ID NO: 608871 - RNA, 19 nt, Homo sapiens
  misc_RNA (1)...(19): siRNA sense strand
gcaagauacucagauggaa

SEQ ID NO: 608872 - RNA, 19 nt, Homo sapiens
  misc_RNA (1)...(19): siRNA sense strand
gacuggaacugaccuguga

SEQ ID NO: 608873 - RNA, 19 nt, Homo sapiens
  misc_RNA (1)...(19): siRNA sense strand
aaacaacaauggucagcaa

SEQ ID NO: 608874 - RNA, 19 nt, Homo sapiens
  misc_RNA (1)...(19): siRNA sense strand
gaagucauaucugcucuca

SEQ ID NO: 608875 - RNA, 19 nt, Homo sapiens
  misc_RNA (1)...(19): siRNA sense strand
caauggaguuagucuagaa

SEQ ID NO: 608876 - RNA, 19 nt, Homo sapiens
  misc_RNA (1)...(19): siRNA sense strand
ggagaaacuugauuuaucc

SEQ ID NO: 608877 - RNA, 19 nt, Homo sapiens
  misc_RNA (1)...(19): siRNA sense strand
gaaagucuccaagaauuau

SEQ ID NO: 608878 - RNA, 19 nt, Homo sapiens
  misc_RNA (1)...(19): siRNA sense strand
gauguuaucuugaaaguga

SEQ ID NO: 608879 - RNA, 19 nt, Homo sapiens
  misc_RNA (1)...(19): siRNA sense strand
gaaggcaacuuaauuaauc

SEQ ID NO: 608880 - RNA, 19 nt, Homo sapiens
  misc_RNA (1)...(19): siRNA sense strand
gaaagaagaaccaaagaaa

SEQ ID NO: 608881 - RNA, 19 nt, Homo sapiens
  misc_RNA (1)...(19): siRNA sense strand
gaacaaaccaugaagauuc

SEQ ID NO: 608882 - RNA, 19 nt, Homo sapiens
  misc_RNA (1)...(19): siRNA sense strand
gaagaaauaugggcuguau

SEQ ID NO: 608883 - RNA, 19 nt, Homo sapiens
  misc_RNA (1)...(19): siRNA sense strand
ggaaagaagaguucguuua

SEQ ID NO: 608884 - RNA, 19 nt, Homo sapiens
  misc_RNA (1)...(19): siRNA sense strand
gaagguggcuauaucaaug

SEQ ID NO: 608885 - RNA, 19 nt, Homo sapiens
  misc_RNA (1)...(19): siRNA sense strand
cagaucagcuuuccuguaa

SEQ ID NO: 608886 - RNA, 19 nt, Homo sapiens
  misc_RNA (1)...(19): siRNA sense strand
gcauugaugugcuuucuaa

SEQ ID NO: 608887 - RNA, 19 nt, Homo sapiens
  misc_RNA (1)...(19): siRNA sense strand
gccaaagacugacagaaua

SEQ ID NO: 608888 - RNA, 19 nt, Homo sapiens
  misc_RNA (1)...(19): siRNA sense strand
gaaguagaacuccucauua

SEQ ID NO: 608889 - RNA, 19 nt, Homo sapiens
  misc_RNA (1)...(19): siRNA sense strand
gaauggagccucuuugaaa

SEQ ID NO: 608890 - RNA, 19 nt, Homo sapiens
  misc_RNA (1)...(19): siRNA sense strand
gaagaugugacacuuguua

SEQ ID NO: 608891 - RNA, 19 nt, Homo sapiens
  misc_RNA (1)...(19): siRNA sense strand
ccaagaagcugaaguuauc

SEQ ID NO: 608892 - RNA, 19 nt, Homo sapiens
  misc_RNA (1)...(19): siRNA sense strand
caacucaggucaaagacua

SEQ ID NO: 608893 - RNA, 19 nt, Homo sapiens
  misc_RNA (1)...(19): siRNA sense strand
caugaugacucaagaagua

SEQ ID NO: 608894 - RNA, 19 nt, Homo sapiens
  misc_RNA (1)...(19): siRNA sense strand
caucagaccuuucuuaaca

SEQ ID NO: 608895 - RNA, 19 nt, Homo sapiens
  misc_RNA (1)...(19): siRNA sense strand
gcaaugacccuugaagaua

SEQ ID NO: 608896 - RNA, 19 nt, Homo sapiens
  misc_RNA (1)...(19): siRNA sense strand
gaagagagaacagaagaua

SEQ ID NO: 608897 - RNA, 19 nt, Homo sapiens
  misc_RNA (1)...(19): siRNA sense strand
gaugaaaccuuaagucaag

SEQ ID NO: 608898 - RNA, 19 nt, Homo sapiens
  misc_RNA (1)...(19): siRNA sense strand
ucaaagaggucugcuguuu

SEQ ID NO: 608899 - RNA, 19 nt, Homo sapiens
  misc_RNA (1)...(19): siRNA sense strand
ccucagagccaaccuauua

SEQ ID NO: 608900 - RNA, 19 nt, Homo sapiens
  misc_RNA (1)...(19): siRNA sense strand
gaaggaagaacagauauaa

SEQ ID NO: 608901 - RNA, 19 nt, Homo sapiens
  misc_RNA (1)...(19): siRNA sense strand
gcccuuggcuucaucauuu

SEQ ID NO: 608902 - RNA, 19 nt, Homo sapiens
  misc_RNA (1)...(19): siRNA sense strand
gcuaucaagucauccuuua

SEQ ID NO: 608903 - RNA, 19 nt, Homo sapiens
  misc_RNA (1)...(19): siRNA sense strand
gaauggcugugaagaauau

SEQ ID NO: 608904 - RNA, 19 nt, Homo sapiens
  misc_RNA (1)...(19): siRNA sense strand
gcaaacauaucaaauucga

SEQ ID NO: 608905 - RNA, 19 nt, Homo sapiens
  misc_RNA (1)...(19): siRNA sense strand
cauaguaucuucaccagaa

SEQ ID NO: 608906 - RNA, 19 nt, Homo sapiens
  misc_RNA (1)...(19): siRNA sense strand
gacagaggaucaauauauu

SEQ ID NO: 608907 - RNA, 19 nt, Homo sapiens
  misc_RNA (1)...(19): siRNA sense strand
gagaauugguuguuauguu

SEQ ID NO: 608908 - RNA, 19 nt, Homo sapiens
  misc_RNA (1)...(19): siRNA sense strand
gggaacugcuccagaagua

SEQ ID NO: 608909 - RNA, 19 nt, Homo sapiens
  misc_RNA (1)...(19): siRNA sense strand
uaacagagcauuagacaug

SEQ ID NO: 608910 - RNA, 19 nt, Homo sapiens
  misc_RNA (1)...(19): siRNA sense strand
gaagagacaguuacaguga

SEQ ID NO: 608911 - RNA, 19 nt, Homo sapiens
  misc_RNA (1)...(19): siRNA sense strand
ccagguacauuaaagauga

SEQ ID NO: 608912 - RNA, 19 nt, Homo sapiens
  misc_RNA (1)...(19): siRNA sense strand
ccaugaagauucugauaaa

SEQ ID NO: 608913 - RNA, 19 nt, Homo sapiens
  misc_RNA (1)...(19): siRNA sense strand
gaagacugaugaugaugaa

SEQ ID NO: 608914 - RNA, 19 nt, Homo sapiens
  misc_RNA (1)...(19): siRNA sense strand
uaacuucucucucagaugu

SEQ ID NO: 608915 - RNA, 19 nt, Homo sapiens
  misc_RNA (1)...(19): siRNA sense strand
gaaguuaucagaagagaga

SEQ ID NO: 608916 - RNA, 19 nt, Homo sapiens
  misc_RNA (1)...(19): siRNA sense strand
gaagaugacauuuaugaug

SEQ ID NO: 608917 - RNA, 19 nt, Homo sapiens
  misc_RNA (1)...(19): siRNA sense strand
ggaaguagaacuccucauu

SEQ ID NO: 608918 - RNA, 19 nt, Homo sapiens
  misc_RNA (1)...(19): siRNA sense strand
gaacugaccugugauacca

SEQ ID NO: 608919 - RNA, 19 nt, Homo sapiens
  misc_RNA (1)...(19): siRNA sense strand
uagcuacccucaaagauaa

SEQ ID NO: 608920 - RNA, 19 nt, Homo sapiens
  misc_RNA (1)...(19): siRNA sense strand
aaagaugaaugggaaguua

SEQ ID NO: 608921 - RNA, 19 nt, Homo sapiens
  misc_RNA (1)...(19): siRNA sense strand
gcaagacagugcuauagau

SEQ ID NO: 608922 - RNA, 19 nt, Homo sapiens
  misc_RNA (1)...(19): siRNA sense strand
ccaaagccacuguuaauuu

SEQ ID NO: 608923 - RNA, 19 nt, Homo sapiens
  misc_RNA (1)...(19): siRNA sense strand
caaccaagaugcccaagau

SEQ ID NO: 608924 - RNA, 19 nt, Homo sapiens
  misc_RNA (1)...(19): siRNA sense strand
cuaaggagcuggagaaucu

SEQ ID NO: 608925 - RNA, 19 nt, Homo sapiens
  misc_RNA (1)...(19): siRNA sense strand
cuaguucgauggauaagua

SEQ ID NO: 608926 - RNA, 19 nt, Homo sapiens
  misc_RNA (1)...(19): siRNA sense strand
cagcaaacauaucaaauuc

SEQ ID NO: 608927 - RNA, 19 nt, Homo sapiens
  misc_RNA (1)...(19): siRNA sense strand
caucaaagauacacaagau

SEQ ID NO: 608928 - RNA, 19 nt, Homo sapiens
  misc_RNA (1)...(19): siRNA sense strand
gaucauuccuuucugacaa

SEQ ID NO: 608929 - RNA, 19 nt, Homo sapiens
  misc_RNA (1)...(19): siRNA sense strand
ggaaguauagccuuggaua

SEQ ID NO: 608930 - RNA, 19 nt, Homo sapiens
  misc_RNA (1)...(19): siRNA sense strand
uaagagaaauugcccuaga

SEQ ID NO: 608931 - RNA, 19 nt, Homo sapiens
  misc_RNA (1)...(19): siRNA sense strand
uggacgaguucuagaauua

SEQ ID NO: 608932 - RNA, 19 nt, Homo sapiens
  misc_RNA (1)...(19): siRNA sense strand
gaaaacaacucaggucaaa

SEQ ID NO: 608933 - RNA, 19 nt, Homo sapiens
  misc_RNA (1)...(19): siRNA sense strand
gugaauacauccaacaaga

SEQ ID NO: 608934 - RNA, 19 nt, Homo sapiens
  misc_RNA (1)...(19): siRNA sense strand
uaacaaagggcuuaguaaa

SEQ ID NO: 608935 - RNA, 19 nt, Homo sapiens
  misc_RNA (1)...(19): siRNA sense strand
caaugacccuugaagauau

SEQ ID NO: 608936 - RNA, 19 nt, Homo sapiens
  misc_RNA (1)...(19): siRNA sense strand
gaaagaagaguucguuuac

SEQ ID NO: 608937 - RNA, 19 nt, Homo sapiens
  misc_RNA (1)...(19): siRNA sense strand
gagaagaagucacaaacag

SEQ ID NO: 608938 - RNA, 19 nt, Homo sapiens
  misc_RNA (1)...(19): siRNA sense strand
ggaaagaagaaccaaagaa

SEQ ID NO: 608939 - RNA, 19 nt, Homo sapiens
  misc_RNA (1)...(19): siRNA sense strand
gaagaguucguuuacauug

SEQ ID NO: 608940 - RNA, 19 nt, Homo sapiens
  misc_RNA (1)...(19): siRNA sense strand
ccaggucaaugguuucuuu

SEQ ID NO: 608941 - RNA, 19 nt, Homo sapiens
  misc_RNA (1)...(19): siRNA sense strand
cgagaucgauugcgaggaa

SEQ ID NO: 608942 - RNA, 19 nt, Homo sapiens
  misc_RNA (1)...(19): siRNA sense strand
auacacgggugccaacuua

SEQ ID NO: 608943 - RNA, 19 nt, Homo sapiens
  misc_RNA (1)...(19): siRNA sense strand
aaagaggucugcuguuuca

SEQ ID NO: 608944 - RNA, 19 nt, Homo sapiens
  misc_RNA (1)...(19): siRNA sense strand
gaacuccucauuacccuaa

SEQ ID NO: 608945 - RNA, 19 nt, Homo sapiens
  misc_RNA (1)...(19): siRNA sense strand
gaagauaccauuuguacca

SEQ ID NO: 608946 - RNA, 19 nt, Homo sapiens
  misc_RNA (1)...(19): siRNA sense strand
ucaagaagauaccauuugu

SEQ ID NO: 608947 - RNA, 19 nt, Homo sapiens
  misc_RNA (1)...(19): siRNA sense strand
gaacugcuccagaaguauu

SEQ ID NO: 608948 - RNA, 19 nt, Homo sapiens
  misc_RNA (1)...(19): siRNA sense strand
caaagaagaguuacccaaa

SEQ ID NO: 608949 - RNA, 19 nt, Homo sapiens
  misc_RNA (1)...(19): siRNA sense strand
acaaagggcuuaguaaauc

SEQ ID NO: 608950 - RNA, 19 nt, Homo sapiens
  misc_RNA (1)...(19): siRNA sense strand
gacugaugaugaugaaaua

SEQ ID NO: 608951 - RNA, 19 nt, Homo sapiens
  misc_RNA (1)...(19): siRNA sense strand
caaaggcaaucagagaauu

SEQ ID NO: 608952 - RNA, 19 nt, Homo sapiens
  misc_RNA (1)...(19): siRNA sense strand
guggaaacacugagaaaua

SEQ ID NO: 608953 - RNA, 19 nt, Homo sapiens
  misc_RNA (1)...(19): siRNA sense strand
caaaggugaucgcguccua

SEQ ID NO: 608954 - RNA, 19 nt, Homo sapiens
  misc_RNA (1)...(19): siRNA sense strand
gauaacagcuuggggauaa

SEQ ID NO: 608955 - RNA, 19 nt, Homo sapiens
  misc_RNA (1)...(19): siRNA sense strand
aagaagaguuacccaaauu

SEQ ID NO: 608956 - RNA, 19 nt, Homo sapiens
  misc_RNA (1)...(19): siRNA sense strand
cgaaggaaaguaaacauaa

SEQ ID NO: 608957 - RNA, 19 nt, Homo sapiens
  misc_RNA (1)...(19): siRNA sense strand
gaaacagccaugacucaaa

SEQ ID NO: 608958 - RNA, 19 nt, Homo sapiens
  misc_RNA (1)...(19): siRNA sense strand
gaucagcuuuccuguaaca

SEQ ID NO: 608959 - RNA, 19 nt, Homo sapiens
  misc_RNA (1)...(19): siRNA sense strand
gaguggagaagaugacuua

SEQ ID NO: 608960 - RNA, 19 nt, Homo sapiens
  misc_RNA (1)...(19): siRNA sense strand
gcacaaguacuuccaaaca

SEQ ID NO: 608961 - RNA, 19 nt, Homo sapiens
  misc_RNA (1)...(19): siRNA sense strand
gacaaucuccaacaucuaa

SEQ ID NO: 608962 - RNA, 19 nt, Homo sapiens
  misc_RNA (1)...(19): siRNA sense strand
gaaucuuccucuucaguga

SEQ ID NO: 608963 - RNA, 19 nt, Homo sapiens
  misc_RNA (1)...(19): siRNA sense strand
cauggugugucuuacuuua

SEQ ID NO: 608964 - RNA, 19 nt, Homo sapiens
  misc_RNA (1)...(19): siRNA sense strand
ugaugagacuuccuuauug

SEQ ID NO: 608965 - RNA, 19 nt, Homo sapiens
  misc_RNA (1)...(19): siRNA sense strand
caggagagacugccacaua

SEQ ID NO: 608966 - RNA, 19 nt, Homo sapiens
  misc_RNA (1)...(19): siRNA sense strand
agacagaggaucaauauau

SEQ ID NO: 608967 - RNA, 19 nt, Homo sapiens
  misc_RNA (1)...(19): siRNA sense strand
aaagaagacugaugaugau

SEQ ID NO: 608968 - RNA, 19 nt, Homo sapiens
  misc_RNA (1)...(19): siRNA sense strand
ggaaguuaacagagcauua

SEQ ID NO: 608969 - RNA, 19 nt, Homo sapiens
  misc_RNA (1)...(19): siRNA sense strand
gaaaggaugcacugugaug

SEQ ID NO: 608970 - RNA, 19 nt, Homo sapiens
  misc_RNA (1)...(19): siRNA sense strand
gauaaccgaaggaaaguaa

SEQ ID NO: 608971 - RNA, 19 nt, Homo sapiens
  misc_RNA (1)...(19): siRNA sense strand
gcaagauacucagauggaa

SEQ ID NO: 608972 - RNA, 19 nt, Homo sapiens
  misc_RNA (1)...(19): siRNA sense strand
gacuggaacugaccuguga

SEQ ID NO: 608973 - RNA, 19 nt, Homo sapiens
  misc_RNA (1)...(19): siRNA sense strand
aaacaacaauggucagcaa

SEQ ID NO: 608974 - RNA, 19 nt, Homo sapiens
  misc_RNA (1)...(19): siRNA sense strand
gaagucauaucugcucuca

SEQ ID NO: 608975 - RNA, 19 nt, Homo sapiens
  misc_RNA (1)...(19): siRNA sense strand
caauggaguuagucuagaa

SEQ ID NO: 608976 - RNA, 19 nt, Homo sapiens
  misc_RNA (1)...(19): siRNA sense strand
ggagaaacuugauuuaucc

SEQ ID NO: 608977 - RNA, 19 nt, Homo sapiens
  misc_RNA (1)...(19): siRNA sense strand
gaaagucuccaagaauuau

SEQ ID NO: 608978 - RNA, 19 nt, Homo sapiens
  misc_RNA (1)...(19): siRNA sense strand
ggacaaggcugccaaggaa

SEQ ID NO: 608979 - RNA, 19 nt, Homo sapiens
  misc_RNA (1)...(19): siRNA sense strand
caaagaggauaaucucaaa

SEQ ID NO: 608980 - RNA, 19 nt, Homo sapiens
  misc_RNA (1)...(19): siRNA sense strand
gagcgagacuccuccagua

SEQ ID NO: 608981 - RNA, 19 nt, Homo sapiens
  misc_RNA (1)...(19): siRNA sense strand
gaaaggauggaaagaagua

SEQ ID NO: 608982 - RNA, 19 nt, Homo sapiens
  misc_RNA (1)...(19): siRNA sense strand
aaacggagcuucucaaguc

SEQ ID NO: 608983 - RNA, 19 nt, Homo sapiens
  misc_RNA (1)...(19): siRNA sense strand
uaaagccguuccaggauua

SEQ ID NO: 608984 - RNA, 19 nt, Homo sapiens
  misc_RNA (1)...(19): siRNA sense strand
ugacaaggacucagacuua

SEQ ID NO: 608985 - RNA, 19 nt, Homo sapiens
  misc_RNA (1)...(19): siRNA sense strand
ggaugaugauuccuccuua

SEQ ID NO: 608986 - RNA, 19 nt, Homo sapiens
  misc_RNA (1)...(19): siRNA sense strand
gagcgaggguucagaguau

SEQ ID NO: 608987 - RNA, 19 nt, Homo sapiens
  misc_RNA (1)...(19): siRNA sense strand
ucaugcaccugcuauguua

SEQ ID NO: 608988 - RNA, 19 nt, Homo sapiens
  misc_RNA (1)...(19): siRNA sense strand
gaaagcagucgucaucuga

SEQ ID NO: 608989 - RNA, 19 nt, Homo sapiens
  misc_RNA (1)...(19): siRNA sense strand
cacccuaucuggccaguua

SEQ ID NO: 608990 - RNA, 19 nt, Homo sapiens
  misc_RNA (1)...(19): siRNA sense strand
cgagaacacuccuuugguu

SEQ ID NO: 608991 - RNA, 19 nt, Homo sapiens
  misc_RNA (1)...(19): siRNA sense strand
acagaacgaucacagcaua

SEQ ID NO: 608992 - RNA, 19 nt, Homo sapiens
  misc_RNA (1)...(19): siRNA sense strand
gagguugacuacacugaaa

SEQ ID NO: 608993 - RNA, 19 nt, Homo sapiens
  misc_RNA (1)...(19): siRNA sense strand
ccaaauaucagaagucguu

SEQ ID NO: 608994 - RNA, 19 nt, Homo sapiens
  misc_RNA (1)...(19): siRNA sense strand
ggucgucccucuauucuca

SEQ ID NO: 608995 - RNA, 19 nt, Homo sapiens
  misc_RNA (1)...(19): siRNA sense strand
ugaaugcuguuccuuguga

SEQ ID NO: 608996 - RNA, 19 nt, Homo sapiens
  misc_RNA (1)...(19): siRNA sense strand
ucauagcucuggauucuug

SEQ ID NO: 608997 - RNA, 19 nt, Homo sapiens
  misc_RNA (1)...(19): siRNA sense strand
gggaaaggauggaaagaag

SEQ ID NO: 608998 - RNA, 19 nt, Homo sapiens
  misc_RNA (1)...(19): siRNA sense strand
gaacucagaccaagccaau

SEQ ID NO: 608999 - RNA, 19 nt, Homo sapiens
  misc_RNA (1)...(19): siRNA sense strand
gagccaaggauuugaguaa

SEQ ID NO: 609000 - RNA, 19 nt, Homo sapiens
  misc_RNA (1)...(19): siRNA sense strand
gggcugggccuauaaagaa

SEQ ID NO: 609001 - RNA, 19 nt, Homo sapiens
  misc_RNA (1)...(19): siRNA sense strand
gcccugcgcuggauaccua

SEQ ID NO: 609002 - RNA, 19 nt, Homo sapiens
  misc_RNA (1)...(19): siRNA sense strand
ggaaugaugccgccuuuca

SEQ ID NO: 609003 - RNA, 19 nt, Homo sapiens
  misc_RNA (1)...(19): siRNA sense strand
gaugauuccuccuuaugug

SEQ ID NO: 609004 - RNA, 19 nt, Homo sapiens
  misc_RNA (1)...(19): siRNA sense strand
ggacuauucguaugaaaga

SEQ ID NO: 609005 - RNA, 19 nt, Homo sapiens
  misc_RNA (1)...(19): siRNA sense strand
aggauaaucucaaagaguu

SEQ ID NO: 609006 - RNA, 19 nt, Homo sapiens
  misc_RNA (1)...(19): siRNA sense strand
gaugaugauuccuccuuau

SEQ ID NO: 609007 - RNA, 19 nt, Homo sapiens
  misc_RNA (1)...(19): siRNA sense strand
ccacuagccgaaagaguua

SEQ ID NO: 609008 - RNA, 19 nt, Homo sapiens
  misc_RNA (1)...(19): siRNA sense strand
gaaguggccaagauacaaa

SEQ ID NO: 609009 - RNA, 19 nt, Homo sapiens
  misc_RNA (1)...(19): siRNA sense strand
gaaccgcccacuccuaaga

SEQ ID NO: 609010 - RNA, 19 nt, Homo sapiens
  misc_RNA (1)...(19): siRNA sense strand
cuaaagccguuccaggauu

SEQ ID NO: 609011 - RNA, 19 nt, Homo sapiens
  misc_RNA (1)...(19): siRNA sense strand
gggcucagcagcaggauaa

SEQ ID NO: 609012 - RNA, 19 nt, Homo sapiens
  misc_RNA (1)...(19): siRNA sense strand
gcgaaccgcccacuccuaa

SEQ ID NO: 609013 - RNA, 19 nt, Homo sapiens
  misc_RNA (1)...(19): siRNA sense strand
ggagggacuauucguauga

SEQ ID NO: 609014 - RNA, 19 nt, Homo sapiens
  misc_RNA (1)...(19): siRNA sense strand
gguaggagacagcuugaaa

SEQ ID NO: 609015 - RNA, 19 nt, Homo sapiens
  misc_RNA (1)...(19): siRNA sense strand
ggagcgaggguucagagua

SEQ ID NO: 609016 - RNA, 19 nt, Homo sapiens
  misc_RNA (1)...(19): siRNA sense strand
aaccacaacugcccucaaa

SEQ ID NO: 609017 - RNA, 19 nt, Homo sapiens
  misc_RNA (1)...(19): siRNA sense strand
cacccucacugcacccuua

SEQ ID NO: 609018 - RNA, 19 nt, Homo sapiens
  misc_RNA (1)...(19): siRNA sense strand
ccucauagcucuggauucu

SEQ ID NO: 609019 - RNA, 19 nt, Homo sapiens
  misc_RNA (1)...(19): siRNA sense strand
gugaugaaguggccaagau

SEQ ID NO: 609020 - RNA, 19 nt, Homo sapiens
  misc_RNA (1)...(19): siRNA sense strand
caauggagguagcaaugug

SEQ ID NO: 609021 - RNA, 19 nt, Homo sapiens
  misc_RNA (1)...(19): siRNA sense strand
caaccuguuugauacguau

SEQ ID NO: 609022 - RNA, 19 nt, Homo sapiens
  misc_RNA (1)...(19): siRNA sense strand
gaugccgccuuucauguau

SEQ ID NO: 609023 - RNA, 19 nt, Homo sapiens
  misc_RNA (1)...(19): siRNA sense strand
cgaaagcagucgucaucug

SEQ ID NO: 609024 - RNA, 19 nt, Homo sapiens
  misc_RNA (1)...(19): siRNA sense strand
ccagagagccaaggauuug

SEQ ID NO: 609025 - RNA, 19 nt, Homo sapiens
  misc_RNA (1)...(19): siRNA sense strand
agacuuacgccuaguggua

SEQ ID NO: 609026 - RNA, 19 nt, Homo sapiens
  misc_RNA (1)...(19): siRNA sense strand
ucaaagaggauaaucucaa

SEQ ID NO: 609027 - RNA, 19 nt, Homo sapiens
  misc_RNA (1)...(19): siRNA sense strand
caagucuccugaucuguca

SEQ ID NO: 609028 - RNA, 19 nt, Homo sapiens
  misc_RNA (1)...(19): siRNA sense strand
gagcagucgucguggaauc

SEQ ID NO: 609029 - RNA, 19 nt, Homo sapiens
  misc_RNA (1)...(19): siRNA sense strand
gcagagagagucgcacaga

SEQ ID NO: 609030 - RNA, 19 nt, Homo sapiens
  misc_RNA (1)...(19): siRNA sense strand
gcaucccucuggccuaguu

SEQ ID NO: 609031 - RNA, 19 nt, Homo sapiens
  misc_RNA (1)...(19): siRNA sense strand
ggccaguuauccaggcuuu

SEQ ID NO: 609032 - RNA, 19 nt, Homo sapiens
  misc_RNA (1)...(19): siRNA sense strand
gggcaaguccuuagagauc

SEQ ID NO: 609033 - RNA, 19 nt, Homo sapiens
  misc_RNA (1)...(19): siRNA sense strand
gagcuaacagcaucaguca

SEQ ID NO: 609034 - RNA, 19 nt, Homo sapiens
  misc_RNA (1)...(19): siRNA sense strand
ggaacaggaugggcaagca

SEQ ID NO: 609035 - RNA, 19 nt, Homo sapiens
  misc_RNA (1)...(19): siRNA sense strand
cuacagagcuggggaaguu

SEQ ID NO: 609036 - RNA, 19 nt, Homo sapiens
  misc_RNA (1)...(19): siRNA sense strand
caggcagaguccagagaua

SEQ ID NO: 609037 - RNA, 19 nt, Homo sapiens
  misc_RNA (1)...(19): siRNA sense strand
gagggacuauucguaugaa

SEQ ID NO: 609038 - RNA, 19 nt, Homo sapiens
  misc_RNA (1)...(19): siRNA sense strand
gaacaggaugggcaagcaa

SEQ ID NO: 609039 - RNA, 19 nt, Homo sapiens
  misc_RNA (1)...(19): siRNA sense strand
ccugaaagccgagaacaaa

SEQ ID NO: 609040 - RNA, 19 nt, Homo sapiens
  misc_RNA (1)...(19): siRNA sense strand
guucagcgaugaggaagau

SEQ ID NO: 609041 - RNA, 19 nt, Homo sapiens
  misc_RNA (1)...(19): siRNA sense strand
gaaagcagagaaggagcua

SEQ ID NO: 609042 - RNA, 19 nt, Homo sapiens
  misc_RNA (1)...(19): siRNA sense strand
gccacuagccgaaagaguu

SEQ ID NO: 609043 - RNA, 19 nt, Homo sapiens
  misc_RNA (1)...(19): siRNA sense strand
ccagacccacucaagauaa

SEQ ID NO: 609044 - RNA, 19 nt, Homo sapiens
  misc_RNA (1)...(19): siRNA sense strand
guaaaguccugggcacaag

SEQ ID NO: 609045 - RNA, 19 nt, Homo sapiens
  misc_RNA (1)...(19): siRNA sense strand
ucacaucuggaaccguuua

SEQ ID NO: 609046 - RNA, 19 nt, Homo sapiens
  misc_RNA (1)...(19): siRNA sense strand
caacccugcuggcauccaa

SEQ ID NO: 609047 - RNA, 19 nt, Homo sapiens
  misc_RNA (1)...(19): siRNA sense strand
gccgggaauuccgcaguua

SEQ ID NO: 609048 - RNA, 19 nt, Homo sapiens
  misc_RNA (1)...(19): siRNA sense strand
gccagacccacucaagaua

SEQ ID NO: 609049 - RNA, 19 nt, Homo sapiens
  misc_RNA (1)...(19): siRNA sense strand
caccugcagucccuaaaga

SEQ ID NO: 609050 - RNA, 19 nt, Homo sapiens
  misc_RNA (1)...(19): siRNA sense strand
gaggauaaucucaaagagu

SEQ ID NO: 609051 - RNA, 19 nt, Homo sapiens
  misc_RNA (1)...(19): siRNA sense strand
gacaaggacucagacuuac

SEQ ID NO: 609052 - RNA, 19 nt, Homo sapiens
  misc_RNA (1)...(19): siRNA sense strand
ggaaugggagacugcauca

SEQ ID NO: 609053 - RNA, 19 nt, Homo sapiens
  misc_RNA (1)...(19): siRNA sense strand
gcaaugugggcauggaaga

SEQ ID NO: 609054 - RNA, 19 nt, Homo sapiens
  misc_RNA (1)...(19): siRNA sense strand
caaguucagcgaugaggaa

SEQ ID NO: 609055 - RNA, 19 nt, Homo sapiens
  misc_RNA (1)...(19): siRNA sense strand
gcgagacccaugagaguga

SEQ ID NO: 609056 - RNA, 19 nt, Homo sapiens
  misc_RNA (1)...(19): siRNA sense strand
gcgacucgaugaaaaguuu

SEQ ID NO: 609057 - RNA, 19 nt, Homo sapiens
  misc_RNA (1)...(19): siRNA sense strand
caacagcggccucaguucu

SEQ ID NO: 609058 - RNA, 19 nt, Homo sapiens
  misc_RNA (1)...(19): siRNA sense strand
gcgccuguauccugagguu

SEQ ID NO: 609059 - RNA, 19 nt, Homo sapiens
  misc_RNA (1)...(19): siRNA sense strand
ggaaaggauggaaagaagu

SEQ ID NO: 609060 - RNA, 19 nt, Homo sapiens
  misc_RNA (1)...(19): siRNA sense strand
guccuucucuggccucaau

SEQ ID NO: 609061 - RNA, 19 nt, Homo sapiens
  misc_RNA (1)...(19): siRNA sense strand
ccugaaugcuguuccuugu

SEQ ID NO: 609062 - RNA, 19 nt, Homo sapiens
  misc_RNA (1)...(19): siRNA sense strand
ugucaaaccagaacucaga

SEQ ID NO: 609063 - RNA, 19 nt, Homo sapiens
  misc_RNA (1)...(19): siRNA sense strand
ggaggcagcaauggaggua

SEQ ID NO: 609064 - RNA, 19 nt, Homo sapiens
  misc_RNA (1)...(19): siRNA sense strand
gaguggguccuaccucuug

SEQ ID NO: 609065 - RNA, 19 nt, Homo sapiens
  misc_RNA (1)...(19): siRNA sense strand
gcacauggagaugguggaa

SEQ ID NO: 609066 - RNA, 19 nt, Homo sapiens
  misc_RNA (1)...(19): siRNA sense strand
ccacaaugcaagcuacaga

SEQ ID NO: 609067 - RNA, 19 nt, Homo sapiens
  misc_RNA (1)...(19): siRNA sense strand
agaccaagccaaugaggaa

SEQ ID NO: 609068 - RNA, 19 nt, Homo sapiens
  misc_RNA (1)...(19): siRNA sense strand
gcugagggccacagggauu

SEQ ID NO: 609069 - RNA, 19 nt, Homo sapiens
  misc_RNA (1)...(19): siRNA sense strand
ucaguuggaucaggagaau

SEQ ID NO: 609070 - RNA, 19 nt, Homo sapiens
  misc_RNA (1)...(19): siRNA sense strand
caagccuacugucacgauu

SEQ ID NO: 609071 - RNA, 19 nt, Homo sapiens
  misc_RNA (1)...(19): siRNA sense strand
gaaccacaacugcccucaa

SEQ ID NO: 609072 - RNA, 19 nt, Homo sapiens
  misc_RNA (1)...(19): siRNA sense strand
gcuaacagcaucagucacu

SEQ ID NO: 609073 - RNA, 19 nt, Homo sapiens
  misc_RNA (1)...(19): siRNA sense strand
gccaaggauuugaguaaac

SEQ ID NO: 609074 - RNA, 19 nt, Homo sapiens
  misc_RNA (1)...(19): siRNA sense strand
gccagagagccaaggauuu

SEQ ID NO: 609075 - RNA, 19 nt, Homo sapiens
  misc_RNA (1)...(19): siRNA sense strand
caggauaaaccgccucguu

SEQ ID NO: 609076 - RNA, 19 nt, Homo sapiens
  misc_RNA (1)...(19): siRNA sense strand
guucagaguaugaggaaau

SEQ ID NO: 609077 - RNA, 19 nt, Homo sapiens
  misc_RNA (1)...(19): siRNA sense strand
ugaugaaguggccaagaua

SEQ ID NO: 609078 - RNA, 19 nt, Homo sapiens
  misc_RNA (1)...(19): siRNA sense strand
ggacaaggcugccaaggaa

SEQ ID NO: 609079 - RNA, 19 nt, Homo sapiens
  misc_RNA (1)...(19): siRNA sense strand
caaagaggauaaucucaaa

SEQ ID NO: 609080 - RNA, 19 nt, Homo sapiens
  misc_RNA (1)...(19): siRNA sense strand
gagcgagacuccuccagua

SEQ ID NO: 609081 - RNA, 19 nt, Homo sapiens
  misc_RNA (1)...(19): siRNA sense strand
gaaaggauggaaagaagua

SEQ ID NO: 609082 - RNA, 19 nt, Homo sapiens
  misc_RNA (1)...(19): siRNA sense strand
aaacggagcuucucaaguc

SEQ ID NO: 609083 - RNA, 19 nt, Homo sapiens
  misc_RNA (1)...(19): siRNA sense strand
uaaagccguuccaggauua

SEQ ID NO: 609084 - RNA, 19 nt, Homo sapiens
  misc_RNA (1)...(19): siRNA sense strand
ugacaaggacucagacuua

SEQ ID NO: 609085 - RNA, 19 nt, Homo sapiens
  misc_RNA (1)...(19): siRNA sense strand
ggaugaugauuccuccuua

SEQ ID NO: 609086 - RNA, 19 nt, Homo sapiens
  misc_RNA (1)...(19): siRNA sense strand
gagcgaggguucagaguau

SEQ ID NO: 609087 - RNA, 19 nt, Homo sapiens
  misc_RNA (1)...(19): siRNA sense strand
ucaugcaccugcuauguua

SEQ ID NO: 609088 - RNA, 19 nt, Homo sapiens
  misc_RNA (1)...(19): siRNA sense strand
gaaagcagucgucaucuga

SEQ ID NO: 609089 - RNA, 19 nt, Homo sapiens
  misc_RNA (1)...(19): siRNA sense strand
cacccuaucuggccaguua

SEQ ID NO: 609090 - RNA, 19 nt, Homo sapiens
  misc_RNA (1)...(19): siRNA sense strand
cgagaacacuccuuugguu

SEQ ID NO: 609091 - RNA, 19 nt, Homo sapiens
  misc_RNA (1)...(19): siRNA sense strand
acagaacgaucacagcaua

SEQ ID NO: 609092 - RNA, 19 nt, Homo sapiens
  misc_RNA (1)...(19): siRNA sense strand
gagguugacuacacugaaa

SEQ ID NO: 609093 - RNA, 19 nt, Homo sapiens
  misc_RNA (1)...(19): siRNA sense strand
ccaaauaucagaagucguu

SEQ ID NO: 609094 - RNA, 19 nt, Homo sapiens
  misc_RNA (1)...(19): siRNA sense strand
ggucgucccucuauucuca

SEQ ID NO: 609095 - RNA, 19 nt, Homo sapiens
  misc_RNA (1)...(19): siRNA sense strand
ugaaugcuguuccuuguga

SEQ ID NO: 609096 - RNA, 19 nt, Homo sapiens
  misc_RNA (1)...(19): siRNA sense strand
ucauagcucuggauucuug

SEQ ID NO: 609097 - RNA, 19 nt, Homo sapiens
  misc_RNA (1)...(19): siRNA sense strand
gggaaaggauggaaagaag

SEQ ID NO: 609098 - RNA, 19 nt, Homo sapiens
  misc_RNA (1)...(19): siRNA sense strand
gaacucagaccaagccaau

SEQ ID NO: 609099 - RNA, 19 nt, Homo sapiens
  misc_RNA (1)...(19): siRNA sense strand
gagccaaggauuugaguaa

SEQ ID NO: 609100 - RNA, 19 nt, Homo sapiens
  misc_RNA (1)...(19): siRNA sense strand
gggcugggccuauaaagaa

SEQ ID NO: 609101 - RNA, 19 nt, Homo sapiens
  misc_RNA (1)...(19): siRNA sense strand
gcccugcgcuggauaccua

SEQ ID NO: 609102 - RNA, 19 nt, Homo sapiens
  misc_RNA (1)...(19): siRNA sense strand
ggaaugaugccgccuuuca

SEQ ID NO: 609103 - RNA, 19 nt, Homo sapiens
  misc_RNA (1)...(19): siRNA sense strand
gaugauuccuccuuaugug

SEQ ID NO: 609104 - RNA, 19 nt, Homo sapiens
  misc_RNA (1)...(19): siRNA sense strand
ggacuauucguaugaaaga

SEQ ID NO: 609105 - RNA, 19 nt, Homo sapiens
  misc_RNA (1)...(19): siRNA sense strand
aggauaaucucaaagaguu

SEQ ID NO: 609106 - RNA, 19 nt, Homo sapiens
  misc_RNA (1)...(19): siRNA sense strand
gaugaugauuccuccuuau

SEQ ID NO: 609107 - RNA, 19 nt, Homo sapiens
  misc_RNA (1)...(19): siRNA sense strand
ccacuagccgaaagaguua

SEQ ID NO: 609108 - RNA, 19 nt, Homo sapiens
  misc_RNA (1)...(19): siRNA sense strand
gaaguggccaagauacaaa

SEQ ID NO: 609109 - RNA, 19 nt, Homo sapiens
  misc_RNA (1)...(19): siRNA sense strand
gaaccgcccacuccuaaga

SEQ ID NO: 609110 - RNA, 19 nt, Homo sapiens
  misc_RNA (1)...(19): siRNA sense strand
cuaaagccguuccaggauu

SEQ ID NO: 609111 - RNA, 19 nt, Homo sapiens
  misc_RNA (1)...(19): siRNA sense strand
gggcucagcagcaggauaa

SEQ ID NO: 609112 - RNA, 19 nt, Homo sapiens
  misc_RNA (1)...(19): siRNA sense strand
gcgaaccgcccacuccuaa

SEQ ID NO: 609113 - RNA, 19 nt, Homo sapiens
  misc_RNA (1)...(19): siRNA sense strand
ggagggacuauucguauga

SEQ ID NO: 609114 - RNA, 19 nt, Homo sapiens
  misc_RNA (1)...(19): siRNA sense strand
gguaggagacagcuugaaa

SEQ ID NO: 609115 - RNA, 19 nt, Homo sapiens
  misc_RNA (1)...(19): siRNA sense strand
ggagcgaggguucagagua

SEQ ID NO: 609116 - RNA, 19 nt, Homo sapiens
  misc_RNA (1)...(19): siRNA sense strand
aaccacaacugcccucaaa

SEQ ID NO: 609117 - RNA, 19 nt, Homo sapiens
  misc_RNA (1)...(19): siRNA sense strand
cacccucacugcacccuua

SEQ ID NO: 609118 - RNA, 19 nt, Homo sapiens
  misc_RNA (1)...(19): siRNA sense strand
ccucauagcucuggauucu

SEQ ID NO: 609119 - RNA, 19 nt, Homo sapiens
  misc_RNA (1)...(19): siRNA sense strand
gugaugaaguggccaagau

SEQ ID NO: 609120 - RNA, 19 nt, Homo sapiens
  misc_RNA (1)...(19): siRNA sense strand
caauggagguagcaaugug

SEQ ID NO: 609121 - RNA, 19 nt, Homo sapiens
  misc_RNA (1)...(19): siRNA sense strand
caaccuguuugauacguau

SEQ ID NO: 609122 - RNA, 19 nt, Homo sapiens
  misc_RNA (1)...(19): siRNA sense strand
gaugccgccuuucauguau

SEQ ID NO: 609123 - RNA, 19 nt, Homo sapiens
  misc_RNA (1)...(19): siRNA sense strand
cgaaagcagucgucaucug

SEQ ID NO: 609124 - RNA, 19 nt, Homo sapiens
  misc_RNA (1)...(19): siRNA sense strand
ccagagagccaaggauuug

SEQ ID NO: 609125 - RNA, 19 nt, Homo sapiens
  misc_RNA (1)...(19): siRNA sense strand
agacuuacgccuaguggua

SEQ ID NO: 609126 - RNA, 19 nt, Homo sapiens
  misc_RNA (1)...(19): siRNA sense strand
ucaaagaggauaaucucaa

SEQ ID NO: 609127 - RNA, 19 nt, Homo sapiens
  misc_RNA (1)...(19): siRNA sense strand
caagucuccugaucuguca

SEQ ID NO: 609128 - RNA, 19 nt, Homo sapiens
  misc_RNA (1)...(19): siRNA sense strand
gagcagucgucguggaauc

SEQ ID NO: 609129 - RNA, 19 nt, Homo sapiens
  misc_RNA (1)...(19): siRNA sense strand
gcagagagagucgcacaga

SEQ ID NO: 609130 - RNA, 19 nt, Homo sapiens
  misc_RNA (1)...(19): siRNA sense strand
gcaucccucuggccuaguu

SEQ ID NO: 609131 - RNA, 19 nt, Homo sapiens
  misc_RNA (1)...(19): siRNA sense strand
ggccaguuauccaggcuuu

SEQ ID NO: 609132 - RNA, 19 nt, Homo sapiens
  misc_RNA (1)...(19): siRNA sense strand
gggcaaguccuuagagauc

SEQ ID NO: 609133 - RNA, 19 nt, Homo sapiens
  misc_RNA (1)...(19): siRNA sense strand
gagcuaacagcaucaguca

SEQ ID NO: 609134 - RNA, 19 nt, Homo sapiens
  misc_RNA (1)...(19): siRNA sense strand
ggaacaggaugggcaagca

SEQ ID NO: 609135 - RNA, 19 nt, Homo sapiens
  misc_RNA (1)...(19): siRNA sense strand
cuacagagcuggggaaguu

SEQ ID NO: 609136 - RNA, 19 nt, Homo sapiens
  misc_RNA (1)...(19): siRNA sense strand
caggcagaguccagagaua

SEQ ID NO: 609137 - RNA, 19 nt, Homo sapiens
  misc_RNA (1)...(19): siRNA sense strand
gagggacuauucguaugaa

SEQ ID NO: 609138 - RNA, 19 nt, Homo sapiens
  misc_RNA (1)...(19): siRNA sense strand
gaacaggaugggcaagcaa

SEQ ID NO: 609139 - RNA, 19 nt, Homo sapiens
  misc_RNA (1)...(19): siRNA sense strand
ccugaaagccgagaacaaa

SEQ ID NO: 609140 - RNA, 19 nt, Homo sapiens
  misc_RNA (1)...(19): siRNA sense strand
guucagcgaugaggaagau

SEQ ID NO: 609141 - RNA, 19 nt, Homo sapiens
  misc_RNA (1)...(19): siRNA sense strand
gaaagcagagaaggagcua

SEQ ID NO: 609142 - RNA, 19 nt, Homo sapiens
  misc_RNA (1)...(19): siRNA sense strand
gccacuagccgaaagaguu

SEQ ID NO: 609143 - RNA, 19 nt, Homo sapiens
  misc_RNA (1)...(19): siRNA sense strand
ccagacccacucaagauaa

SEQ ID NO: 609144 - RNA, 19 nt, Homo sapiens
  misc_RNA (1)...(19): siRNA sense strand
guaaaguccugggcacaag

SEQ ID NO: 609145 - RNA, 19 nt, Homo sapiens
  misc_RNA (1)...(19): siRNA sense strand
ucacaucuggaaccguuua

SEQ ID NO: 609146 - RNA, 19 nt, Homo sapiens
  misc_RNA (1)...(19): siRNA sense strand
caacccugcuggcauccaa

SEQ ID NO: 609147 - RNA, 19 nt, Homo sapiens
  misc_RNA (1)...(19): siRNA sense strand
gccgggaauuccgcaguua

SEQ ID NO: 609148 - RNA, 19 nt, Homo sapiens
  misc_RNA (1)...(19): siRNA sense strand
gccagacccacucaagaua

SEQ ID NO: 609149 - RNA, 19 nt, Homo sapiens
  misc_RNA (1)...(19): siRNA sense strand
caccugcagucccuaaaga

SEQ ID NO: 609150 - RNA, 19 nt, Homo sapiens
  misc_RNA (1)...(19): siRNA sense strand
gaggauaaucucaaagagu

SEQ ID NO: 609151 - RNA, 19 nt, Homo sapiens
  misc_RNA (1)...(19): siRNA sense strand
gacaaggacucagacuuac

SEQ ID NO: 609152 - RNA, 19 nt, Homo sapiens
  misc_RNA (1)...(19): siRNA sense strand
ggaaugggagacugcauca

SEQ ID NO: 609153 - RNA, 19 nt, Homo sapiens
  misc_RNA (1)...(19): siRNA sense strand
gcaaugugggcauggaaga

SEQ ID NO: 609154 - RNA, 19 nt, Homo sapiens
  misc_RNA (1)...(19): siRNA sense strand
caaguucagcgaugaggaa

SEQ ID NO: 609155 - RNA, 19 nt, Homo sapiens
  misc_RNA (1)...(19): siRNA sense strand
gcgagacccaugagaguga

SEQ ID NO: 609156 - RNA, 19 nt, Homo sapiens
  misc_RNA (1)...(19): siRNA sense strand
gcgacucgaugaaaaguuu

SEQ ID NO: 609157 - RNA, 19 nt, Homo sapiens
  misc_RNA (1)...(19): siRNA sense strand
caacagcggccucaguucu

SEQ ID NO: 609158 - RNA, 19 nt, Homo sapiens
  misc_RNA (1)...(19): siRNA sense strand
gcgccuguauccugagguu

SEQ ID NO: 609159 - RNA, 19 nt, Homo sapiens
  misc_RNA (1)...(19): siRNA sense strand
ggaaaggauggaaagaagu

SEQ ID NO: 609160 - RNA, 19 nt, Homo sapiens
  misc_RNA (1)...(19): siRNA sense strand
guccuucucuggccucaau

SEQ ID NO: 609161 - RNA, 19 nt, Homo sapiens
  misc_RNA (1)...(19): siRNA sense strand
ccugaaugcuguuccuugu

SEQ ID NO: 609162 - RNA, 19 nt, Homo sapiens
  misc_RNA (1)...(19): siRNA sense strand
ugucaaaccagaacucaga

SEQ ID NO: 609163 - RNA, 19 nt, Homo sapiens
  misc_RNA (1)...(19): siRNA sense strand
ggaggcagcaauggaggua

SEQ ID NO: 609164 - RNA, 19 nt, Homo sapiens
  misc_RNA (1)...(19): siRNA sense strand
gaguggguccuaccucuug

SEQ ID NO: 609165 - RNA, 19 nt, Homo sapiens
  misc_RNA (1)...(19): siRNA sense strand
gcacauggagaugguggaa

SEQ ID NO: 609166 - RNA, 19 nt, Homo sapiens
  misc_RNA (1)...(19): siRNA sense strand
ccacaaugcaagcuacaga

SEQ ID NO: 609167 - RNA, 19 nt, Homo sapiens
  misc_RNA (1)...(19): siRNA sense strand
agaccaagccaaugaggaa

SEQ ID NO: 609168 - RNA, 19 nt, Homo sapiens
  misc_RNA (1)...(19): siRNA sense strand
gcugagggccacagggauu

SEQ ID NO: 609169 - RNA, 19 nt, Homo sapiens
  misc_RNA (1)...(19): siRNA sense strand
ucaguuggaucaggagaau

SEQ ID NO: 609170 - RNA, 19 nt, Homo sapiens
  misc_RNA (1)...(19): siRNA sense strand
caagccuacugucacgauu

SEQ ID NO: 609171 - RNA, 19 nt, Homo sapiens
  misc_RNA (1)...(19): siRNA sense strand
gaaccacaacugcccucaa

SEQ ID NO: 609172 - RNA, 19 nt, Homo sapiens
  misc_RNA (1)...(19): siRNA sense strand
gcuaacagcaucagucacu

SEQ ID NO: 609173 - RNA, 19 nt, Homo sapiens
  misc_RNA (1)...(19): siRNA sense strand
gccaaggauuugaguaaac

SEQ ID NO: 609174 - RNA, 19 nt, Homo sapiens
  misc_RNA (1)...(19): siRNA sense strand
gccagagagccaaggauuu

SEQ ID NO: 609175 - RNA, 19 nt, Homo sapiens
  misc_RNA (1)...(19): siRNA sense strand
caggauaaaccgccucguu

SEQ ID NO: 609176 - RNA, 19 nt, Homo sapiens
  misc_RNA (1)...(19): siRNA sense strand
guucagaguaugaggaaau

SEQ ID NO: 609177 - RNA, 19 nt, Homo sapiens
  misc_RNA (1)...(19): siRNA sense strand
ugaugaaguggccaagaua

SEQ ID NO: 609178 - RNA, 19 nt, Homo sapiens
  misc_RNA (1)...(19): siRNA sense strand
ggauauaucuuccuugaca

SEQ ID NO: 609179 - RNA, 19 nt, Homo sapiens
  misc_RNA (1)...(19): siRNA sense strand
gaaaggaccuggccaagac

SEQ ID NO: 609180 - RNA, 19 nt, Homo sapiens
  misc_RNA (1)...(19): siRNA sense strand
gagaaagaaguaaggauua

SEQ ID NO: 609181 - RNA, 19 nt, Homo sapiens
  misc_RNA (1)...(19): siRNA sense strand
gaagaaaauugcagagaaa

SEQ ID NO: 609182 - RNA, 19 nt, Homo sapiens
  misc_RNA (1)...(19): siRNA sense strand
gcagagaauucgagaagag

SEQ ID NO: 609183 - RNA, 19 nt, Homo sapiens
  misc_RNA (1)...(19): siRNA sense strand
gaagagcgcagagguguga

SEQ ID NO: 609184 - RNA, 19 nt, Homo sapiens
  misc_RNA (1)...(19): siRNA sense strand
aaagauaccauguggauga

SEQ ID NO: 609185 - RNA, 19 nt, Homo sapiens
  misc_RNA (1)...(19): siRNA sense strand
gaagagaagaagaaagaug

SEQ ID NO: 609186 - RNA, 19 nt, Homo sapiens
  misc_RNA (1)...(19): siRNA sense strand
ccacaccucuuuuggaaua

SEQ ID NO: 609187 - RNA, 19 nt, Homo sapiens
  misc_RNA (1)...(19): siRNA sense strand
gcagaggugugacgacagu

SEQ ID NO: 609188 - RNA, 19 nt, Homo sapiens
  misc_RNA (1)...(19): siRNA sense strand
gaacggaggaggagagagu

SEQ ID NO: 609189 - RNA, 19 nt, Homo sapiens
  misc_RNA (1)...(19): siRNA sense strand
ggagagaguuagaaaagaa

SEQ ID NO: 609190 - RNA, 19 nt, Homo sapiens
  misc_RNA (1)...(19): siRNA sense strand
ggaaaggaccuggccaaga

SEQ ID NO: 609191 - RNA, 19 nt, Homo sapiens
  misc_RNA (1)...(19): siRNA sense strand
gagaggaaccaaccacaga

SEQ ID NO: 609192 - RNA, 19 nt, Homo sapiens
  misc_RNA (1)...(19): siRNA sense strand
gaaaagagcgacuggcaaa

SEQ ID NO: 609193 - RNA, 19 nt, Homo sapiens
  misc_RNA (1)...(19): siRNA sense strand
ggaaccaaccacagagaaa

SEQ ID NO: 609194 - RNA, 19 nt, Homo sapiens
  misc_RNA (1)...(19): siRNA sense strand
gaagaagaagagaagaaga

SEQ ID NO: 609195 - RNA, 19 nt, Homo sapiens
  misc_RNA (1)...(19): siRNA sense strand
aagaagagaagaagaaaga

SEQ ID NO: 609196 - RNA, 19 nt, Homo sapiens
  misc_RNA (1)...(19): siRNA sense strand
gagaagagaagcgagaaga

SEQ ID NO: 609197 - RNA, 19 nt, Homo sapiens
  misc_RNA (1)...(19): siRNA sense strand
gagggaagaggcagaguga

SEQ ID NO: 609198 - RNA, 19 nt, Homo sapiens
  misc_RNA (1)...(19): siRNA sense strand
gaagacaagagagcucauu

SEQ ID NO: 609199 - RNA, 19 nt, Homo sapiens
  misc_RNA (1)...(19): siRNA sense strand
gaagcugucggcccuagaa

SEQ ID NO: 609200 - RNA, 19 nt, Homo sapiens
  misc_RNA (1)...(19): siRNA sense strand
ccgccgaccugagucuuua

SEQ ID NO: 609201 - RNA, 19 nt, Homo sapiens
  misc_RNA (1)...(19): siRNA sense strand
gaaacaggaggaucugcaa

SEQ ID NO: 609202 - RNA, 19 nt, Homo sapiens
  misc_RNA (1)...(19): siRNA sense strand
agagaaagaaguaaggauu

SEQ ID NO: 609203 - RNA, 19 nt, Homo sapiens
  misc_RNA (1)...(19): siRNA sense strand
gaggagaggagauugauac

SEQ ID NO: 609204 - RNA, 19 nt, Homo sapiens
  misc_RNA (1)...(19): siRNA sense strand
gauccagaauauaagaagu

SEQ ID NO: 609205 - RNA, 19 nt, Homo sapiens
  misc_RNA (1)...(19): siRNA sense strand
gaagagaagcgagaagaac

SEQ ID NO: 609206 - RNA, 19 nt, Homo sapiens
  misc_RNA (1)...(19): siRNA sense strand
gaaaauugcagagaaagaa

SEQ ID NO: 609207 - RNA, 19 nt, Homo sapiens
  misc_RNA (1)...(19): siRNA sense strand
agacagauaaacagaagaa

SEQ ID NO: 609208 - RNA, 19 nt, Homo sapiens
  misc_RNA (1)...(19): siRNA sense strand
aagaagaagagaagaagaa

SEQ ID NO: 609209 - RNA, 19 nt, Homo sapiens
  misc_RNA (1)...(19): siRNA sense strand
agagacagauaaacagaag

SEQ ID NO: 609210 - RNA, 19 nt, Homo sapiens
  misc_RNA (1)...(19): siRNA sense strand
acaaagauaccauguggau

SEQ ID NO: 609211 - RNA, 19 nt, Homo sapiens
  misc_RNA (1)...(19): siRNA sense strand
uaucuuccuugacagcaaa

SEQ ID NO: 609212 - RNA, 19 nt, Homo sapiens
  misc_RNA (1)...(19): siRNA sense strand
acacagcggcagugauaaa

SEQ ID NO: 609213 - RNA, 19 nt, Homo sapiens
  misc_RNA (1)...(19): siRNA sense strand
gaagaagaaagaugcaaaa

SEQ ID NO: 609214 - RNA, 19 nt, Homo sapiens
  misc_RNA (1)...(19): siRNA sense strand
gaagaagagaagaagaaag

SEQ ID NO: 609215 - RNA, 19 nt, Homo sapiens
  misc_RNA (1)...(19): siRNA sense strand
gagugaggaugagcagaga

SEQ ID NO: 609216 - RNA, 19 nt, Homo sapiens
  misc_RNA (1)...(19): siRNA sense strand
gagcucauugcuagaagaa

SEQ ID NO: 609217 - RNA, 19 nt, Homo sapiens
  misc_RNA (1)...(19): siRNA sense strand
acagggauguggagagauc

SEQ ID NO: 609218 - RNA, 19 nt, Homo sapiens
  misc_RNA (1)...(19): siRNA sense strand
gaaagaaguaaggauuaag

SEQ ID NO: 609219 - RNA, 19 nt, Homo sapiens
  misc_RNA (1)...(19): siRNA sense strand
auggauauaucuuccuuga

SEQ ID NO: 609220 - RNA, 19 nt, Homo sapiens
  misc_RNA (1)...(19): siRNA sense strand
aagagcgacuggcaaacaa

SEQ ID NO: 609221 - RNA, 19 nt, Homo sapiens
  misc_RNA (1)...(19): siRNA sense strand
ucaagaacaagaaucugaa

SEQ ID NO: 609222 - RNA, 19 nt, Homo sapiens
  misc_RNA (1)...(19): siRNA sense strand
gcagagaaagaaguaagga

SEQ ID NO: 609223 - RNA, 19 nt, Homo sapiens
  misc_RNA (1)...(19): siRNA sense strand
aaagagacagauaaacaga

SEQ ID NO: 609224 - RNA, 19 nt, Homo sapiens
  misc_RNA (1)...(19): siRNA sense strand
agaagaagaaagaugcaaa

SEQ ID NO: 609225 - RNA, 19 nt, Homo sapiens
  misc_RNA (1)...(19): siRNA sense strand
ugauggauauaucuuccuu

SEQ ID NO: 609226 - RNA, 19 nt, Homo sapiens
  misc_RNA (1)...(19): siRNA sense strand
cagcggcagugauaaagag

SEQ ID NO: 609227 - RNA, 19 nt, Homo sapiens
  misc_RNA (1)...(19): siRNA sense strand
aaagaggagaggagauuga

SEQ ID NO: 609228 - RNA, 19 nt, Homo sapiens
  misc_RNA (1)...(19): siRNA sense strand
agaagaaaauugcagagaa

SEQ ID NO: 609229 - RNA, 19 nt, Homo sapiens
  misc_RNA (1)...(19): siRNA sense strand
ggaggaggagagaguuaga

SEQ ID NO: 609230 - RNA, 19 nt, Homo sapiens
  misc_RNA (1)...(19): siRNA sense strand
acaagagagcucauugcua

SEQ ID NO: 609231 - RNA, 19 nt, Homo sapiens
  misc_RNA (1)...(19): siRNA sense strand
gaaccaaccacagagaaac

SEQ ID NO: 609232 - RNA, 19 nt, Homo sapiens
  misc_RNA (1)...(19): siRNA sense strand
gaggaaccaaccacagaga

SEQ ID NO: 609233 - RNA, 19 nt, Homo sapiens
  misc_RNA (1)...(19): siRNA sense strand
cucaagagcauacauuaau

SEQ ID NO: 609234 - RNA, 19 nt, Homo sapiens
  misc_RNA (1)...(19): siRNA sense strand
caaccacagagaaaccaaa

SEQ ID NO: 609235 - RNA, 19 nt, Homo sapiens
  misc_RNA (1)...(19): siRNA sense strand
gagagcucauugcuagaag

SEQ ID NO: 609236 - RNA, 19 nt, Homo sapiens
  misc_RNA (1)...(19): siRNA sense strand
ggagguggcaagcaggaau

SEQ ID NO: 609237 - RNA, 19 nt, Homo sapiens
  misc_RNA (1)...(19): siRNA sense strand
cuacucaagagcauacauu

SEQ ID NO: 609238 - RNA, 19 nt, Homo sapiens
  misc_RNA (1)...(19): siRNA sense strand
gagaucguuuugauggaua

SEQ ID NO: 609239 - RNA, 19 nt, Homo sapiens
  misc_RNA (1)...(19): siRNA sense strand
aagaagaagaagagaagaa

SEQ ID NO: 609240 - RNA, 19 nt, Homo sapiens
  misc_RNA (1)...(19): siRNA sense strand
auaaagagcacagggaugu

SEQ ID NO: 609241 - RNA, 19 nt, Homo sapiens
  misc_RNA (1)...(19): siRNA sense strand
gcugucggcccuagaagug

SEQ ID NO: 609242 - RNA, 19 nt, Homo sapiens
  misc_RNA (1)...(19): siRNA sense strand
gagaagaagaaagaugcaa

SEQ ID NO: 609243 - RNA, 19 nt, Homo sapiens
  misc_RNA (1)...(19): siRNA sense strand
agaagaagagaagaagaaa

SEQ ID NO: 609244 - RNA, 19 nt, Homo sapiens
  misc_RNA (1)...(19): siRNA sense strand
agaagagaagcgagaagaa

SEQ ID NO: 609245 - RNA, 19 nt, Homo sapiens
  misc_RNA (1)...(19): siRNA sense strand
uacucaagagcauacauua

SEQ ID NO: 609246 - RNA, 19 nt, Homo sapiens
  misc_RNA (1)...(19): siRNA sense strand
acucaagagcauacauuaa

SEQ ID NO: 609247 - RNA, 19 nt, Homo sapiens
  misc_RNA (1)...(19): siRNA sense strand
ccuacuguguggaggaaga

SEQ ID NO: 609248 - RNA, 19 nt, Homo sapiens
  misc_RNA (1)...(19): siRNA sense strand
gaggaggagagaguuagaa

SEQ ID NO: 609249 - RNA, 19 nt, Homo sapiens
  misc_RNA (1)...(19): siRNA sense strand
gacaagagagcucauugcu

SEQ ID NO: 609250 - RNA, 19 nt, Homo sapiens
  misc_RNA (1)...(19): siRNA sense strand
aaagagcgacuggcaaaca

SEQ ID NO: 609251 - RNA, 19 nt, Homo sapiens
  misc_RNA (1)...(19): siRNA sense strand
ggagauggaggcgaagaca

SEQ ID NO: 609252 - RNA, 19 nt, Homo sapiens
  misc_RNA (1)...(19): siRNA sense strand
gagauggaggcgaagacaa

SEQ ID NO: 609253 - RNA, 19 nt, Homo sapiens
  misc_RNA (1)...(19): siRNA sense strand
gggaggccauggagagacu

SEQ ID NO: 609254 - RNA, 19 nt, Homo sapiens
  misc_RNA (1)...(19): siRNA sense strand
aagcagagaauucgagaag

SEQ ID NO: 609255 - RNA, 19 nt, Homo sapiens
  misc_RNA (1)...(19): siRNA sense strand
gaaccacaccucuuuugga

SEQ ID NO: 609256 - RNA, 19 nt, Homo sapiens
  misc_RNA (1)...(19): siRNA sense strand
acacgacuacuucgaguuc

SEQ ID NO: 609257 - RNA, 19 nt, Homo sapiens
  misc_RNA (1)...(19): siRNA sense strand
gagaucucaagaacaagaa

SEQ ID NO: 609258 - RNA, 19 nt, Homo sapiens
  misc_RNA (1)...(19): siRNA sense strand
agagaucucaagaacaaga

SEQ ID NO: 609259 - RNA, 19 nt, Homo sapiens
  misc_RNA (1)...(19): siRNA sense strand
gagaauucgagaagagaag

SEQ ID NO: 609260 - RNA, 19 nt, Homo sapiens
  misc_RNA (1)...(19): siRNA sense strand
cucaagaacaagaaucuga

SEQ ID NO: 609261 - RNA, 19 nt, Homo sapiens
  misc_RNA (1)...(19): siRNA sense strand
gaucucaagaacaagaauc

SEQ ID NO: 609262 - RNA, 19 nt, Homo sapiens
  misc_RNA (1)...(19): siRNA sense strand
ggagaggagauugauacug

SEQ ID NO: 609263 - RNA, 19 nt, Homo sapiens
  misc_RNA (1)...(19): siRNA sense strand
aaguaaggauuaagcuucu

SEQ ID NO: 609264 - RNA, 19 nt, Homo sapiens
  misc_RNA (1)...(19): siRNA sense strand
agagagcucauugcuagaa

SEQ ID NO: 609265 - RNA, 19 nt, Homo sapiens
  misc_RNA (1)...(19): siRNA sense strand
gaggagagaguuagaaaag

SEQ ID NO: 609266 - RNA, 19 nt, Homo sapiens
  misc_RNA (1)...(19): siRNA sense strand
gugaggaugagcagagaug

SEQ ID NO: 609267 - RNA, 19 nt, Homo sapiens
  misc_RNA (1)...(19): siRNA sense strand
agagcucauugcuagaaga

SEQ ID NO: 609268 - RNA, 19 nt, Homo sapiens
  misc_RNA (1)...(19): siRNA sense strand
gauggaggcgaagacaaga

SEQ ID NO: 609269 - RNA, 19 nt, Homo sapiens
  misc_RNA (1)...(19): siRNA sense strand
ggauauaucuuccuugaca

SEQ ID NO: 609270 - RNA, 19 nt, Homo sapiens
  misc_RNA (1)...(19): siRNA sense strand
gaaaggaccuggccaagac

SEQ ID NO: 609271 - RNA, 19 nt, Homo sapiens
  misc_RNA (1)...(19): siRNA sense strand
gagaaagaaguaaggauua

SEQ ID NO: 609272 - RNA, 19 nt, Homo sapiens
  misc_RNA (1)...(19): siRNA sense strand
gaagaaaauugcagagaaa

SEQ ID NO: 609273 - RNA, 19 nt, Homo sapiens
  misc_RNA (1)...(19): siRNA sense strand
gcagagaauucgagaagag

SEQ ID NO: 609274 - RNA, 19 nt, Homo sapiens
  misc_RNA (1)...(19): siRNA sense strand
gaagagcgcagagguguga

SEQ ID NO: 609275 - RNA, 19 nt, Homo sapiens
  misc_RNA (1)...(19): siRNA sense strand
aaagauaccauguggauga

SEQ ID NO: 609276 - RNA, 19 nt, Homo sapiens
  misc_RNA (1)...(19): siRNA sense strand
gaagagaagaagaaagaug

SEQ ID NO: 609277 - RNA, 19 nt, Homo sapiens
  misc_RNA (1)...(19): siRNA sense strand
ccacaccucuuuuggaaua

SEQ ID NO: 609278 - RNA, 19 nt, Homo sapiens
  misc_RNA (1)...(19): siRNA sense strand
gcagaggugugacgacagu

SEQ ID NO: 609279 - RNA, 19 nt, Homo sapiens
  misc_RNA (1)...(19): siRNA sense strand
gaacggaggaggagagagu

SEQ ID NO: 609280 - RNA, 19 nt, Homo sapiens
  misc_RNA (1)...(19): siRNA sense strand
ggagagaguuagaaaagaa

SEQ ID NO: 609281 - RNA, 19 nt, Homo sapiens
  misc_RNA (1)...(19): siRNA sense strand
ggaaaggaccuggccaaga

SEQ ID NO: 609282 - RNA, 19 nt, Homo sapiens
  misc_RNA (1)...(19): siRNA sense strand
gagaggaaccaaccacaga

SEQ ID NO: 609283 - RNA, 19 nt, Homo sapiens
  misc_RNA (1)...(19): siRNA sense strand
gaaaagagcgacuggcaaa

SEQ ID NO: 609284 - RNA, 19 nt, Homo sapiens
  misc_RNA (1)...(19): siRNA sense strand
ggaaccaaccacagagaaa

SEQ ID NO: 609285 - RNA, 19 nt, Homo sapiens
  misc_RNA (1)...(19): siRNA sense strand
gagaagagaagcgagaaga

SEQ ID NO: 609286 - RNA, 19 nt, Homo sapiens
  misc_RNA (1)...(19): siRNA sense strand
gagggaagaggcagaguga

SEQ ID NO: 609287 - RNA, 19 nt, Homo sapiens
  misc_RNA (1)...(19): siRNA sense strand
ccgccgaccugagucuuua

SEQ ID NO: 609288 - RNA, 19 nt, Homo sapiens
  misc_RNA (1)...(19): siRNA sense strand
gaagcugucggcccuagaa

SEQ ID NO: 609289 - RNA, 19 nt, Homo sapiens
  misc_RNA (1)...(19): siRNA sense strand
gaagacaagagagcucauu

SEQ ID NO: 609290 - RNA, 19 nt, Homo sapiens
  misc_RNA (1)...(19): siRNA sense strand
gaaacaggaggaucugcaa

SEQ ID NO: 609291 - RNA, 19 nt, Homo sapiens
  misc_RNA (1)...(19): siRNA sense strand
agagaaagaaguaaggauu

SEQ ID NO: 609292 - RNA, 19 nt, Homo sapiens
  misc_RNA (1)...(19): siRNA sense strand
gaggagaggagauugauac

SEQ ID NO: 609293 - RNA, 19 nt, Homo sapiens
  misc_RNA (1)...(19): siRNA sense strand
gauccagaauauaagaagu

SEQ ID NO: 609294 - RNA, 19 nt, Homo sapiens
  misc_RNA (1)...(19): siRNA sense strand
gaagagaagcgagaagaac

SEQ ID NO: 609295 - RNA, 19 nt, Homo sapiens
  misc_RNA (1)...(19): siRNA sense strand
gaaaauugcagagaaagaa

SEQ ID NO: 609296 - RNA, 19 nt, Homo sapiens
  misc_RNA (1)...(19): siRNA sense strand
agacagauaaacagaagaa

SEQ ID NO: 609297 - RNA, 19 nt, Homo sapiens
  misc_RNA (1)...(19): siRNA sense strand
agagacagauaaacagaag

SEQ ID NO: 609298 - RNA, 19 nt, Homo sapiens
  misc_RNA (1)...(19): siRNA sense strand
acaaagauaccauguggau

SEQ ID NO: 609299 - RNA, 19 nt, Homo sapiens
  misc_RNA (1)...(19): siRNA sense strand
uaucuuccuugacagcaaa

SEQ ID NO: 609300 - RNA, 19 nt, Homo sapiens
  misc_RNA (1)...(19): siRNA sense strand
acacagcggcagugauaaa

SEQ ID NO: 609301 - RNA, 19 nt, Homo sapiens
  misc_RNA (1)...(19): siRNA sense strand
gaagaagaaagaugcaaaa

SEQ ID NO: 609302 - RNA, 19 nt, Homo sapiens
  misc_RNA (1)...(19): siRNA sense strand
gagugaggaugagcagaga

SEQ ID NO: 609303 - RNA, 19 nt, Homo sapiens
  misc_RNA (1)...(19): siRNA sense strand
gagcucauugcuagaagaa

SEQ ID NO: 609304 - RNA, 19 nt, Homo sapiens
  misc_RNA (1)...(19): siRNA sense strand
acagggauguggagagauc

SEQ ID NO: 609305 - RNA, 19 nt, Homo sapiens
  misc_RNA (1)...(19): siRNA sense strand
gaaagaaguaaggauuaag

SEQ ID NO: 609306 - RNA, 19 nt, Homo sapiens
  misc_RNA (1)...(19): siRNA sense strand
auggauauaucuuccuuga

SEQ ID NO: 609307 - RNA, 19 nt, Homo sapiens
  misc_RNA (1)...(19): siRNA sense strand
aagagcgacuggcaaacaa

SEQ ID NO: 609308 - RNA, 19 nt, Homo sapiens
  misc_RNA (1)...(19): siRNA sense strand
ucaagaacaagaaucugaa

SEQ ID NO: 609309 - RNA, 19 nt, Homo sapiens
  misc_RNA (1)...(19): siRNA sense strand
gcagagaaagaaguaagga

SEQ ID NO: 609310 - RNA, 19 nt, Homo sapiens
  misc_RNA (1)...(19): siRNA sense strand
aaagagacagauaaacaga

SEQ ID NO: 609311 - RNA, 19 nt, Homo sapiens
  misc_RNA (1)...(19): siRNA sense strand
agaagaagaaagaugcaaa

SEQ ID NO: 609312 - RNA, 19 nt, Homo sapiens
  misc_RNA (1)...(19): siRNA sense strand
ugauggauauaucuuccuu

SEQ ID NO: 609313 - RNA, 19 nt, Homo sapiens
  misc_RNA (1)...(19): siRNA sense strand
cagcggcagugauaaagag

SEQ ID NO: 609314 - RNA, 19 nt, Homo sapiens
  misc_RNA (1)...(19): siRNA sense strand
aaagaggagaggagauuga

SEQ ID NO: 609315 - RNA, 19 nt, Homo sapiens
  misc_RNA (1)...(19): siRNA sense strand
agaagaaaauugcagagaa

SEQ ID NO: 609316 - RNA, 19 nt, Homo sapiens
  misc_RNA (1)...(19): siRNA sense strand
ggaggaggagagaguuaga

SEQ ID NO: 609317 - RNA, 19 nt, Homo sapiens
  misc_RNA (1)...(19): siRNA sense strand
acaagagagcucauugcua

SEQ ID NO: 609318 - RNA, 19 nt, Homo sapiens
  misc_RNA (1)...(19): siRNA sense strand
gaaccaaccacagagaaac

SEQ ID NO: 609319 - RNA, 19 nt, Homo sapiens
  misc_RNA (1)...(19): siRNA sense strand
gaggaaccaaccacagaga

SEQ ID NO: 609320 - RNA, 19 nt, Homo sapiens
  misc_RNA (1)...(19): siRNA sense strand
cucaagagcauacauuaau

SEQ ID NO: 609321 - RNA, 19 nt, Homo sapiens
  misc_RNA (1)...(19): siRNA sense strand
caaccacagagaaaccaaa

SEQ ID NO: 609322 - RNA, 19 nt, Homo sapiens
  misc_RNA (1)...(19): siRNA sense strand
gagagcucauugcuagaag

SEQ ID NO: 609323 - RNA, 19 nt, Homo sapiens
  misc_RNA (1)...(19): siRNA sense strand
gagaucguuuugauggaua

SEQ ID NO: 609324 - RNA, 19 nt, Homo sapiens
  misc_RNA (1)...(19): siRNA sense strand
ggagguggcaagcaggaau

SEQ ID NO: 609325 - RNA, 19 nt, Homo sapiens
  misc_RNA (1)...(19): siRNA sense strand
cuacucaagagcauacauu

SEQ ID NO: 609326 - RNA, 19 nt, Homo sapiens
  misc_RNA (1)...(19): siRNA sense strand
auaaagagcacagggaugu

SEQ ID NO: 609327 - RNA, 19 nt, Homo sapiens
  misc_RNA (1)...(19): siRNA sense strand
gcugucggcccuagaagug

SEQ ID NO: 609328 - RNA, 19 nt, Homo sapiens
  misc_RNA (1)...(19): siRNA sense strand
gagaagaagaaagaugcaa

SEQ ID NO: 609329 - RNA, 19 nt, Homo sapiens
  misc_RNA (1)...(19): siRNA sense strand
ccuacuguguggaggaaga

SEQ ID NO: 609330 - RNA, 19 nt, Homo sapiens
  misc_RNA (1)...(19): siRNA sense strand
uacucaagagcauacauua

SEQ ID NO: 609331 - RNA, 19 nt, Homo sapiens
  misc_RNA (1)...(19): siRNA sense strand
acucaagagcauacauuaa

SEQ ID NO: 609332 - RNA, 19 nt, Homo sapiens
  misc_RNA (1)...(19): siRNA sense strand
gaggaggagagaguuagaa

SEQ ID NO: 609333 - RNA, 19 nt, Homo sapiens
  misc_RNA (1)...(19): siRNA sense strand
agaagagaagcgagaagaa

SEQ ID NO: 609334 - RNA, 19 nt, Homo sapiens
  misc_RNA (1)...(19): siRNA sense strand
ggagauggaggcgaagaca

SEQ ID NO: 609335 - RNA, 19 nt, Homo sapiens
  misc_RNA (1)...(19): siRNA sense strand
aaagagcgacuggcaaaca

SEQ ID NO: 609336 - RNA, 19 nt, Homo sapiens
  misc_RNA (1)...(19): siRNA sense strand
gggaggccauggagagacu

SEQ ID NO: 609337 - RNA, 19 nt, Homo sapiens
  misc_RNA (1)...(19): siRNA sense strand
aagcagagaauucgagaag

SEQ ID NO: 609338 - RNA, 19 nt, Homo sapiens
  misc_RNA (1)...(19): siRNA sense strand
gaaccacaccucuuuugga

SEQ ID NO: 609339 - RNA, 19 nt, Homo sapiens
  misc_RNA (1)...(19): siRNA sense strand
gacaagagagcucauugcu

SEQ ID NO: 609340 - RNA, 19 nt, Homo sapiens
  misc_RNA (1)...(19): siRNA sense strand
gagauggaggcgaagacaa

SEQ ID NO: 609341 - RNA, 19 nt, Homo sapiens
  misc_RNA (1)...(19): siRNA sense strand
gagaucucaagaacaagaa

SEQ ID NO: 609342 - RNA, 19 nt, Homo sapiens
  misc_RNA (1)...(19): siRNA sense strand
acacgacuacuucgaguuc

SEQ ID NO: 609343 - RNA, 19 nt, Homo sapiens
  misc_RNA (1)...(19): siRNA sense strand
agagaucucaagaacaaga

SEQ ID NO: 609344 - RNA, 19 nt, Homo sapiens
  misc_RNA (1)...(19): siRNA sense strand
agagagcucauugcuagaa

SEQ ID NO: 609345 - RNA, 19 nt, Homo sapiens
  misc_RNA (1)...(19): siRNA sense strand
cucaagaacaagaaucuga

SEQ ID NO: 609346 - RNA, 19 nt, Homo sapiens
  misc_RNA (1)...(19): siRNA sense strand
gaucucaagaacaagaauc

SEQ ID NO: 609347 - RNA, 19 nt, Homo sapiens
  misc_RNA (1)...(19): siRNA sense strand
ggagaggagauugauacug

SEQ ID NO: 609348 - RNA, 19 nt, Homo sapiens
  misc_RNA (1)...(19): siRNA sense strand
aaguaaggauuaagcuucu

SEQ ID NO: 609349 - RNA, 19 nt, Homo sapiens
  misc_RNA (1)...(19): siRNA sense strand
gaggagagaguuagaaaag

SEQ ID NO: 609350 - RNA, 19 nt, Homo sapiens
  misc_RNA (1)...(19): siRNA sense strand
gagaauucgagaagagaag

SEQ ID NO: 609351 - RNA, 19 nt, Homo sapiens
  misc_RNA (1)...(19): siRNA sense strand
gugaggaugagcagagaug

SEQ ID NO: 609352 - RNA, 19 nt, Homo sapiens
  misc_RNA (1)...(19): siRNA sense strand
agagcucauugcuagaaga

SEQ ID NO: 609353 - RNA, 19 nt, Homo sapiens
  misc_RNA (1)...(19): siRNA sense strand
gauggaggcgaagacaaga

SEQ ID NO: 609354 - RNA, 19 nt, Homo sapiens
  misc_RNA (1)...(19): siRNA sense strand
ccaaggacggcuggguuua

SEQ ID NO: 609355 - RNA, 19 nt, Homo sapiens
  misc_RNA (1)...(19): siRNA sense strand
ggacggcuggguuuacuac

SEQ ID NO: 609356 - RNA, 19 nt, Homo sapiens
  misc_RNA (1)...(19): siRNA sense strand
gggaggagagaaccaccaa

SEQ ID NO: 609357 - RNA, 19 nt, Homo sapiens
  misc_RNA (1)...(19): siRNA sense strand
ccaaggacggcuggguuua

SEQ ID NO: 609358 - RNA, 19 nt, Homo sapiens
  misc_RNA (1)...(19): siRNA sense strand
ggacggcuggguuuacuac

SEQ ID NO: 609359 - RNA, 19 nt, Homo sapiens
  misc_RNA (1)...(19): siRNA sense strand
gggaggagagaaccaccaa

SEQ ID NO: 609360 - RNA, 19 nt, Homo sapiens
  misc_RNA (1)...(19): siRNA sense strand
ccaaggacggcuggguuua

SEQ ID NO: 609361 - RNA, 19 nt, Homo sapiens
  misc_RNA (1)...(19): siRNA sense strand
ggacggcuggguuuacuac

SEQ ID NO: 609362 - RNA, 19 nt, Homo sapiens
  misc_RNA (1)...(19): siRNA sense strand
gggaggagagaaccaccaa

SEQ ID NO: 609363 - RNA, 19 nt, Homo sapiens
  misc_RNA (1)...(19): siRNA sense strand
ccaaggacggcuggguuua

SEQ ID NO: 609364 - RNA, 19 nt, Homo sapiens
  misc_RNA (1)...(19): siRNA sense strand
ggacggcuggguuuacuac

SEQ ID NO: 609365 - RNA, 19 nt, Homo sapiens
  misc_RNA (1)...(19): siRNA sense strand
gggaggagagaaccaccaa

SEQ ID NO: 609366 - RNA, 19 nt, Homo sapiens
  misc_RNA (1)...(19): siRNA sense strand
ccaaggacggcuggguuua

SEQ ID NO: 609367 - RNA, 19 nt, Homo sapiens
  misc_RNA (1)...(19): siRNA sense strand
ggacggcuggguuuacuac

SEQ ID NO: 609368 - RNA, 19 nt, Homo sapiens
  misc_RNA (1)...(19): siRNA sense strand
gggaggagagaaccaccaa

SEQ ID NO: 609369 - RNA, 19 nt, Homo sapiens
  misc_RNA (1)...(19): siRNA sense strand
ccaaggacggcuggguuua

SEQ ID NO: 609370 - RNA, 19 nt, Homo sapiens
  misc_RNA (1)...(19): siRNA sense strand
ggacggcuggguuuacuac

SEQ ID NO: 609371 - RNA, 19 nt, Homo sapiens
  misc_RNA (1)...(19): siRNA sense strand
gggaggagagaaccaccaa

SEQ ID NO: 609372 - RNA, 19 nt, Homo sapiens
  misc_RNA (1)...(19): siRNA sense strand
ccaaggacggcuggguuua

SEQ ID NO: 609373 - RNA, 19 nt, Homo sapiens
  misc_RNA (1)...(19): siRNA sense strand
ggacggcuggguuuacuac

SEQ ID NO: 609374 - RNA, 19 nt, Homo sapiens
  misc_RNA (1)...(19): siRNA sense strand
gggaggagagaaccaccaa

SEQ ID NO: 609375 - RNA, 19 nt, Homo sapiens
  misc_RNA (1)...(19): siRNA sense strand
guaagaggcugguggagaa

SEQ ID NO: 609376 - RNA, 19 nt, Homo sapiens
  misc_RNA (1)...(19): siRNA sense strand
cgaugacgcugaacuagua

SEQ ID NO: 609377 - RNA, 19 nt, Homo sapiens
  misc_RNA (1)...(19): siRNA sense strand
cgaagcagcugaucagaau

SEQ ID NO: 609378 - RNA, 19 nt, Homo sapiens
  misc_RNA (1)...(19): siRNA sense strand
gaacuaguaaggcucagua

SEQ ID NO: 609379 - RNA, 19 nt, Homo sapiens
  misc_RNA (1)...(19): siRNA sense strand
gcaaugacaaugagaacaa

SEQ ID NO: 609380 - RNA, 19 nt, Homo sapiens
  misc_RNA (1)...(19): siRNA sense strand
ggaggaaacacagaauaaa

SEQ ID NO: 609381 - RNA, 19 nt, Homo sapiens
  misc_RNA (1)...(19): siRNA sense strand
cuaguaaggcucaguaaga

SEQ ID NO: 609382 - RNA, 19 nt, Homo sapiens
  misc_RNA (1)...(19): siRNA sense strand
gaauggcaaugacaaugag

SEQ ID NO: 609383 - RNA, 19 nt, Homo sapiens
  misc_RNA (1)...(19): siRNA sense strand
gaggggagcucugugaaaa

SEQ ID NO: 609384 - RNA, 19 nt, Homo sapiens
  misc_RNA (1)...(19): siRNA sense strand
acaaugagaacaacaggaa

SEQ ID NO: 609385 - RNA, 19 nt, Homo sapiens
  misc_RNA (1)...(19): siRNA sense strand
uggaggaaacacagaauaa

SEQ ID NO: 609386 - RNA, 19 nt, Homo sapiens
  misc_RNA (1)...(19): siRNA sense strand
gaucagaauggcaaugaca

SEQ ID NO: 609387 - RNA, 19 nt, Homo sapiens
  misc_RNA (1)...(19): siRNA sense strand
ggagcccgaugacgcugaa

SEQ ID NO: 609388 - RNA, 19 nt, Homo sapiens
  misc_RNA (1)...(19): siRNA sense strand
agaauggcaaugacaauga

SEQ ID NO: 609389 - RNA, 19 nt, Homo sapiens
  misc_RNA (1)...(19): siRNA sense strand
gaggaaacacagaauaaaa

SEQ ID NO: 609390 - RNA, 19 nt, Homo sapiens
  misc_RNA (1)...(19): siRNA sense strand
ggagaacgcggugcucaag

SEQ ID NO: 609391 - RNA, 19 nt, Homo sapiens
  misc_RNA (1)...(19): siRNA sense strand
uaguaaggcucaguaagag

SEQ ID NO: 609392 - RNA, 19 nt, Homo sapiens
  misc_RNA (1)...(19): siRNA sense strand
ugagaacaacaggaaauga

SEQ ID NO: 609393 - RNA, 19 nt, Homo sapiens
  misc_RNA (1)...(19): siRNA sense strand
gcccgaugacgcugaacua

SEQ ID NO: 609394 - RNA, 19 nt, Homo sapiens
  misc_RNA (1)...(19): siRNA sense strand
cagaauggcaaugacaaug

SEQ ID NO: 609395 - RNA, 19 nt, Homo sapiens
  misc_RNA (1)...(19): siRNA sense strand
ccgaagcagcugaucagaa

SEQ ID NO: 609396 - RNA, 19 nt, Homo sapiens
  misc_RNA (1)...(19): siRNA sense strand
caaugagaacaacaggaaa

SEQ ID NO: 609397 - RNA, 19 nt, Homo sapiens
  misc_RNA (1)...(19): siRNA sense strand
gaugacgcugaacuaguaa

SEQ ID NO: 609398 - RNA, 19 nt, Homo sapiens
  misc_RNA (1)...(19): siRNA sense strand
aaaccgaagcagcugauca

SEQ ID NO: 609399 - RNA, 19 nt, Homo sapiens
  misc_RNA (1)...(19): siRNA sense strand
aaugagaacaacaggaaau

SEQ ID NO: 609400 - RNA, 19 nt, Homo sapiens
  misc_RNA (1)...(19): siRNA sense strand
caaugacaaugagaacaac

SEQ ID NO: 609401 - RNA, 19 nt, Homo sapiens
  misc_RNA (1)...(19): siRNA sense strand
guaagaggcugguggagaa

SEQ ID NO: 609402 - RNA, 19 nt, Homo sapiens
  misc_RNA (1)...(19): siRNA sense strand
cgaugacgcugaacuagua

SEQ ID NO: 609403 - RNA, 19 nt, Homo sapiens
  misc_RNA (1)...(19): siRNA sense strand
cgaagcagcugaucagaau

SEQ ID NO: 609404 - RNA, 19 nt, Homo sapiens
  misc_RNA (1)...(19): siRNA sense strand
gaacuaguaaggcucagua

SEQ ID NO: 609405 - RNA, 19 nt, Homo sapiens
  misc_RNA (1)...(19): siRNA sense strand
gcaaugacaaugagaacaa

SEQ ID NO: 609406 - RNA, 19 nt, Homo sapiens
  misc_RNA (1)...(19): siRNA sense strand
ggaggaaacacagaauaaa

SEQ ID NO: 609407 - RNA, 19 nt, Homo sapiens
  misc_RNA (1)...(19): siRNA sense strand
cuaguaaggcucaguaaga

SEQ ID NO: 609408 - RNA, 19 nt, Homo sapiens
  misc_RNA (1)...(19): siRNA sense strand
gaauggcaaugacaaugag

SEQ ID NO: 609409 - RNA, 19 nt, Homo sapiens
  misc_RNA (1)...(19): siRNA sense strand
gaggggagcucugugaaaa

SEQ ID NO: 609410 - RNA, 19 nt, Homo sapiens
  misc_RNA (1)...(19): siRNA sense strand
acaaugagaacaacaggaa

SEQ ID NO: 609411 - RNA, 19 nt, Homo sapiens
  misc_RNA (1)...(19): siRNA sense strand
uggaggaaacacagaauaa

SEQ ID NO: 609412 - RNA, 19 nt, Homo sapiens
  misc_RNA (1)...(19): siRNA sense strand
gaucagaauggcaaugaca

SEQ ID NO: 609413 - RNA, 19 nt, Homo sapiens
  misc_RNA (1)...(19): siRNA sense strand
ggagcccgaugacgcugaa

SEQ ID NO: 609414 - RNA, 19 nt, Homo sapiens
  misc_RNA (1)...(19): siRNA sense strand
agaauggcaaugacaauga

SEQ ID NO: 609415 - RNA, 19 nt, Homo sapiens
  misc_RNA (1)...(19): siRNA sense strand
gaggaaacacagaauaaaa

SEQ ID NO: 609416 - RNA, 19 nt, Homo sapiens
  misc_RNA (1)...(19): siRNA sense strand
ggagaacgcggugcucaag

SEQ ID NO: 609417 - RNA, 19 nt, Homo sapiens
  misc_RNA (1)...(19): siRNA sense strand
uaguaaggcucaguaagag

SEQ ID NO: 609418 - RNA, 19 nt, Homo sapiens
  misc_RNA (1)...(19): siRNA sense strand
ugagaacaacaggaaauga

SEQ ID NO: 609419 - RNA, 19 nt, Homo sapiens
  misc_RNA (1)...(19): siRNA sense strand
gcccgaugacgcugaacua

SEQ ID NO: 609420 - RNA, 19 nt, Homo sapiens
  misc_RNA (1)...(19): siRNA sense strand
cagaauggcaaugacaaug

SEQ ID NO: 609421 - RNA, 19 nt, Homo sapiens
  misc_RNA (1)...(19): siRNA sense strand
ccgaagcagcugaucagaa

SEQ ID NO: 609422 - RNA, 19 nt, Homo sapiens
  misc_RNA (1)...(19): siRNA sense strand
caaugagaacaacaggaaa

SEQ ID NO: 609423 - RNA, 19 nt, Homo sapiens
  misc_RNA (1)...(19): siRNA sense strand
gaugacgcugaacuaguaa

SEQ ID NO: 609424 - RNA, 19 nt, Homo sapiens
  misc_RNA (1)...(19): siRNA sense strand
aaaccgaagcagcugauca

SEQ ID NO: 609425 - RNA, 19 nt, Homo sapiens
  misc_RNA (1)...(19): siRNA sense strand
aaugagaacaacaggaaau

SEQ ID NO: 609426 - RNA, 19 nt, Homo sapiens
  misc_RNA (1)...(19): siRNA sense strand
caaugacaaugagaacaac

SEQ ID NO: 609427 - RNA, 19 nt, Homo sapiens
  misc_RNA (1)...(19): siRNA sense strand
guaagaggcugguggagaa

SEQ ID NO: 609428 - RNA, 19 nt, Homo sapiens
  misc_RNA (1)...(19): siRNA sense strand
cgaugacgcugaacuagua

SEQ ID NO: 609429 - RNA, 19 nt, Homo sapiens
  misc_RNA (1)...(19): siRNA sense strand
cgaagcagcugaucagaau

SEQ ID NO: 609430 - RNA, 19 nt, Homo sapiens
  misc_RNA (1)...(19): siRNA sense strand
gaacuaguaaggcucagua

SEQ ID NO: 609431 - RNA, 19 nt, Homo sapiens
  misc_RNA (1)...(19): siRNA sense strand
gcaaugacaaugagaacaa

SEQ ID NO: 609432 - RNA, 19 nt, Homo sapiens
  misc_RNA (1)...(19): siRNA sense strand
ggaggaaacacagaauaaa

SEQ ID NO: 609433 - RNA, 19 nt, Homo sapiens
  misc_RNA (1)...(19): siRNA sense strand
cuaguaaggcucaguaaga

SEQ ID NO: 609434 - RNA, 19 nt, Homo sapiens
  misc_RNA (1)...(19): siRNA sense strand
gaauggcaaugacaaugag

SEQ ID NO: 609435 - RNA, 19 nt, Homo sapiens
  misc_RNA (1)...(19): siRNA sense strand
gaggggagcucugugaaaa

SEQ ID NO: 609436 - RNA, 19 nt, Homo sapiens
  misc_RNA (1)...(19): siRNA sense strand
acaaugagaacaacaggaa

SEQ ID NO: 609437 - RNA, 19 nt, Homo sapiens
  misc_RNA (1)...(19): siRNA sense strand
uggaggaaacacagaauaa

SEQ ID NO: 609438 - RNA, 19 nt, Homo sapiens
  misc_RNA (1)...(19): siRNA sense strand
gaucagaauggcaaugaca

SEQ ID NO: 609439 - RNA, 19 nt, Homo sapiens
  misc_RNA (1)...(19): siRNA sense strand
ggagcccgaugacgcugaa

SEQ ID NO: 609440 - RNA, 19 nt, Homo sapiens
  misc_RNA (1)...(19): siRNA sense strand
agaauggcaaugacaauga

SEQ ID NO: 609441 - RNA, 19 nt, Homo sapiens
  misc_RNA (1)...(19): siRNA sense strand
gaggaaacacagaauaaaa

SEQ ID NO: 609442 - RNA, 19 nt, Homo sapiens
  misc_RNA (1)...(19): siRNA sense strand
ggagaacgcggugcucaag

SEQ ID NO: 609443 - RNA, 19 nt, Homo sapiens
  misc_RNA (1)...(19): siRNA sense strand
uaguaaggcucaguaagag

SEQ ID NO: 609444 - RNA, 19 nt, Homo sapiens
  misc_RNA (1)...(19): siRNA sense strand
ugagaacaacaggaaauga

SEQ ID NO: 609445 - RNA, 19 nt, Homo sapiens
  misc_RNA (1)...(19): siRNA sense strand
gcccgaugacgcugaacua

SEQ ID NO: 609446 - RNA, 19 nt, Homo sapiens
  misc_RNA (1)...(19): siRNA sense strand
cagaauggcaaugacaaug

SEQ ID NO: 609447 - RNA, 19 nt, Homo sapiens
  misc_RNA (1)...(19): siRNA sense strand
ccgaagcagcugaucagaa

SEQ ID NO: 609448 - RNA, 19 nt, Homo sapiens
  misc_RNA (1)...(19): siRNA sense strand
caaugagaacaacaggaaa

SEQ ID NO: 609449 - RNA, 19 nt, Homo sapiens
  misc_RNA (1)...(19): siRNA sense strand
gaugacgcugaacuaguaa

SEQ ID NO: 609450 - RNA, 19 nt, Homo sapiens
  misc_RNA (1)...(19): siRNA sense strand
aaaccgaagcagcugauca

SEQ ID NO: 609451 - RNA, 19 nt, Homo sapiens
  misc_RNA (1)...(19): siRNA sense strand
aaugagaacaacaggaaau

SEQ ID NO: 609452 - RNA, 19 nt, Homo sapiens
  misc_RNA (1)...(19): siRNA sense strand
caaugacaaugagaacaac

SEQ ID NO: 609453 - RNA, 19 nt, Homo sapiens
  misc_RNA (1)...(19): siRNA sense strand
gagcagcaaucuuauauaa

SEQ ID NO: 609454 - RNA, 19 nt, Homo sapiens
  misc_RNA (1)...(19): siRNA sense strand
ggacaaauuuagcuugaaa

SEQ ID NO: 609455 - RNA, 19 nt, Homo sapiens
  misc_RNA (1)...(19): siRNA sense strand
gaguauaguuugacuguaa

SEQ ID NO: 609456 - RNA, 19 nt, Homo sapiens
  misc_RNA (1)...(19): siRNA sense strand
gcauauaucaccacuguua

SEQ ID NO: 609457 - RNA, 19 nt, Homo sapiens
  misc_RNA (1)...(19): siRNA sense strand
gaaagacacuagauccuau

SEQ ID NO: 609458 - RNA, 19 nt, Homo sapiens
  misc_RNA (1)...(19): siRNA sense strand
gaaaagagaucugaguaua

SEQ ID NO: 609459 - RNA, 19 nt, Homo sapiens
  misc_RNA (1)...(19): siRNA sense strand
caucagaucucaucacaga

SEQ ID NO: 609460 - RNA, 19 nt, Homo sapiens
  misc_RNA (1)...(19): siRNA sense strand
caagaucucucauaccuau

SEQ ID NO: 609461 - RNA, 19 nt, Homo sapiens
  misc_RNA (1)...(19): siRNA sense strand
gaacucagcugcgccauag

SEQ ID NO: 609462 - RNA, 19 nt, Homo sapiens
  misc_RNA (1)...(19): siRNA sense strand
gcacuuugcucuuagaucu

SEQ ID NO: 609463 - RNA, 19 nt, Homo sapiens
  misc_RNA (1)...(19): siRNA sense strand
ggauguggcugauguuuua

SEQ ID NO: 609464 - RNA, 19 nt, Homo sapiens
  misc_RNA (1)...(19): siRNA sense strand
ucaagcaaguggauuauga

SEQ ID NO: 609465 - RNA, 19 nt, Homo sapiens
  misc_RNA (1)...(19): siRNA sense strand
gggcauauaucaccacugu

SEQ ID NO: 609466 - RNA, 19 nt, Homo sapiens
  misc_RNA (1)...(19): siRNA sense strand
caaaggcaauccucagcua

SEQ ID NO: 609467 - RNA, 19 nt, Homo sapiens
  misc_RNA (1)...(19): siRNA sense strand
caacguuccugugguuaua

SEQ ID NO: 609468 - RNA, 19 nt, Homo sapiens
  misc_RNA (1)...(19): siRNA sense strand
gaaauucuccucuacuugu

SEQ ID NO: 609469 - RNA, 19 nt, Homo sapiens
  misc_RNA (1)...(19): siRNA sense strand
gaacaacugugccagaaaa

SEQ ID NO: 609470 - RNA, 19 nt, Homo sapiens
  misc_RNA (1)...(19): siRNA sense strand
gagaagccgauaugaauuu

SEQ ID NO: 609471 - RNA, 19 nt, Homo sapiens
  misc_RNA (1)...(19): siRNA sense strand
gaaugggagcugucaguua

SEQ ID NO: 609472 - RNA, 19 nt, Homo sapiens
  misc_RNA (1)...(19): siRNA sense strand
uaauuaagguuguggaugu

SEQ ID NO: 609473 - RNA, 19 nt, Homo sapiens
  misc_RNA (1)...(19): siRNA sense strand
gggccugcauugcguaaua

SEQ ID NO: 609474 - RNA, 19 nt, Homo sapiens
  misc_RNA (1)...(19): siRNA sense strand
agacagugauuaugauuug

SEQ ID NO: 609475 - RNA, 19 nt, Homo sapiens
  misc_RNA (1)...(19): siRNA sense strand
gggaaauucuccucuacuu

SEQ ID NO: 609476 - RNA, 19 nt, Homo sapiens
  misc_RNA (1)...(19): siRNA sense strand
gaacugguggcagagauua

SEQ ID NO: 609477 - RNA, 19 nt, Homo sapiens
  misc_RNA (1)...(19): siRNA sense strand
ugaagugcaugaucuuuga

SEQ ID NO: 609478 - RNA, 19 nt, Homo sapiens
  misc_RNA (1)...(19): siRNA sense strand
cgaagcaacugguaagcaa

SEQ ID NO: 609479 - RNA, 19 nt, Homo sapiens
  misc_RNA (1)...(19): siRNA sense strand
guacagcaaugacuucagu

SEQ ID NO: 609480 - RNA, 19 nt, Homo sapiens
  misc_RNA (1)...(19): siRNA sense strand
ucucacagauggaagaauu

SEQ ID NO: 609481 - RNA, 19 nt, Homo sapiens
  misc_RNA (1)...(19): siRNA sense strand
ggagaucccugaaaauuau

SEQ ID NO: 609482 - RNA, 19 nt, Homo sapiens
  misc_RNA (1)...(19): siRNA sense strand
cuacagauaugcccuucaa

SEQ ID NO: 609483 - RNA, 19 nt, Homo sapiens
  misc_RNA (1)...(19): siRNA sense strand
uuaacaaacugcuucaaga

SEQ ID NO: 609484 - RNA, 19 nt, Homo sapiens
  misc_RNA (1)...(19): siRNA sense strand
caagacauggacaaauuua

SEQ ID NO: 609485 - RNA, 19 nt, Homo sapiens
  misc_RNA (1)...(19): siRNA sense strand
gaaguugaagugcuggaua

SEQ ID NO: 609486 - RNA, 19 nt, Homo sapiens
  misc_RNA (1)...(19): siRNA sense strand
gauaugcccuucaagacau

SEQ ID NO: 609487 - RNA, 19 nt, Homo sapiens
  misc_RNA (1)...(19): siRNA sense strand
ggacugauggagccaagua

SEQ ID NO: 609488 - RNA, 19 nt, Homo sapiens
  misc_RNA (1)...(19): siRNA sense strand
uugaagugcuggauauuaa

SEQ ID NO: 609489 - RNA, 19 nt, Homo sapiens
  misc_RNA (1)...(19): siRNA sense strand
ugacaacguuccugugguu

SEQ ID NO: 609490 - RNA, 19 nt, Homo sapiens
  misc_RNA (1)...(19): siRNA sense strand
gaggagaauaucuucauaa

SEQ ID NO: 609491 - RNA, 19 nt, Homo sapiens
  misc_RNA (1)...(19): siRNA sense strand
ugaggagaauaucuucaua

SEQ ID NO: 609492 - RNA, 19 nt, Homo sapiens
  misc_RNA (1)...(19): siRNA sense strand
gguuggcacuuugcucuua

SEQ ID NO: 609493 - RNA, 19 nt, Homo sapiens
  misc_RNA (1)...(19): siRNA sense strand
ucacaacagucaccaguca

SEQ ID NO: 609494 - RNA, 19 nt, Homo sapiens
  misc_RNA (1)...(19): siRNA sense strand
guaauaauacggcagaaau

SEQ ID NO: 609495 - RNA, 19 nt, Homo sapiens
  misc_RNA (1)...(19): siRNA sense strand
cagagaagccgauaugaau

SEQ ID NO: 609496 - RNA, 19 nt, Homo sapiens
  misc_RNA (1)...(19): siRNA sense strand
aaagagaucugaguauagu

SEQ ID NO: 609497 - RNA, 19 nt, Homo sapiens
  misc_RNA (1)...(19): siRNA sense strand
aaaauucccuccacacaua

SEQ ID NO: 609498 - RNA, 19 nt, Homo sapiens
  misc_RNA (1)...(19): siRNA sense strand
gaaaucaccauucccaaag

SEQ ID NO: 609499 - RNA, 19 nt, Homo sapiens
  misc_RNA (1)...(19): siRNA sense strand
cauggucacuuuaaacuuc

SEQ ID NO: 609500 - RNA, 19 nt, Homo sapiens
  misc_RNA (1)...(19): siRNA sense strand
gggauccuauugauacauu

SEQ ID NO: 609501 - RNA, 19 nt, Homo sapiens
  misc_RNA (1)...(19): siRNA sense strand
ccuaugagauugauguuca

SEQ ID NO: 609502 - RNA, 19 nt, Homo sapiens
  misc_RNA (1)...(19): siRNA sense strand
cagaaucuuugaucaugaa

SEQ ID NO: 609503 - RNA, 19 nt, Homo sapiens
  misc_RNA (1)...(19): siRNA sense strand
aaugggagcugucaguuau

SEQ ID NO: 609504 - RNA, 19 nt, Homo sapiens
  misc_RNA (1)...(19): siRNA sense strand
acagaggguuggaucagua

SEQ ID NO: 609505 - RNA, 19 nt, Homo sapiens
  misc_RNA (1)...(19): siRNA sense strand
ucucuacagugaaacauuu

SEQ ID NO: 609506 - RNA, 19 nt, Homo sapiens
  misc_RNA (1)...(19): siRNA sense strand
ucucucagcuucuuucaau

SEQ ID NO: 609507 - RNA, 19 nt, Homo sapiens
  misc_RNA (1)...(19): siRNA sense strand
gacacuagauccuauaacu

SEQ ID NO: 609508 - RNA, 19 nt, Homo sapiens
  misc_RNA (1)...(19): siRNA sense strand
uaagggcaauugacagaga

SEQ ID NO: 609509 - RNA, 19 nt, Homo sapiens
  misc_RNA (1)...(19): siRNA sense strand
gaagaagugagucagauca

SEQ ID NO: 609510 - RNA, 19 nt, Homo sapiens
  misc_RNA (1)...(19): siRNA sense strand
aagccgauaugaauuugua

SEQ ID NO: 609511 - RNA, 19 nt, Homo sapiens
  misc_RNA (1)...(19): siRNA sense strand
acaaacugcuucaagaugu

SEQ ID NO: 609512 - RNA, 19 nt, Homo sapiens
  misc_RNA (1)...(19): siRNA sense strand
caaaccacgugccagagaa

SEQ ID NO: 609513 - RNA, 19 nt, Homo sapiens
  misc_RNA (1)...(19): siRNA sense strand
guacugggcaagaauuuga

SEQ ID NO: 609514 - RNA, 19 nt, Homo sapiens
  misc_RNA (1)...(19): siRNA sense strand
guaaugaggagaauaucuu

SEQ ID NO: 609515 - RNA, 19 nt, Homo sapiens
  misc_RNA (1)...(19): siRNA sense strand
gaaaucaccaaauccuaug

SEQ ID NO: 609516 - RNA, 19 nt, Homo sapiens
  misc_RNA (1)...(19): siRNA sense strand
uggcagagauuaacaaacu

SEQ ID NO: 609517 - RNA, 19 nt, Homo sapiens
  misc_RNA (1)...(19): siRNA sense strand
gcuguugggugaaggauuc

SEQ ID NO: 609518 - RNA, 19 nt, Homo sapiens
  misc_RNA (1)...(19): siRNA sense strand
gcaguguugcugguuauua

SEQ ID NO: 609519 - RNA, 19 nt, Homo sapiens
  misc_RNA (1)...(19): siRNA sense strand
ugacauccauaccaacguu

SEQ ID NO: 609520 - RNA, 19 nt, Homo sapiens
  misc_RNA (1)...(19): siRNA sense strand
cagaggauguggcugaugu

SEQ ID NO: 609521 - RNA, 19 nt, Homo sapiens
  misc_RNA (1)...(19): siRNA sense strand
ggaaaugagcaguguguuc

SEQ ID NO: 609522 - RNA, 19 nt, Homo sapiens
  misc_RNA (1)...(19): siRNA sense strand
ggaguaacauguucauucc

SEQ ID NO: 609523 - RNA, 19 nt, Homo sapiens
  misc_RNA (1)...(19): siRNA sense strand
ggaugucuccaugauaaua

SEQ ID NO: 609524 - RNA, 19 nt, Homo sapiens
  misc_RNA (1)...(19): siRNA sense strand
ggaaauucuccucuacuug

SEQ ID NO: 609525 - RNA, 19 nt, Homo sapiens
  misc_RNA (1)...(19): siRNA sense strand
gaagaauuccagcagcuau

SEQ ID NO: 609526 - RNA, 19 nt, Homo sapiens
  misc_RNA (1)...(19): siRNA sense strand
uucaagacauggacaaauu

SEQ ID NO: 609527 - RNA, 19 nt, Homo sapiens
  misc_RNA (1)...(19): siRNA sense strand
gcaggucucucagcuucuu

SEQ ID NO: 609528 - RNA, 19 nt, Homo sapiens
  misc_RNA (1)...(19): siRNA sense strand
ccaaaugaaugcuaaaaug

SEQ ID NO: 609529 - RNA, 19 nt, Homo sapiens
  misc_RNA (1)...(19): siRNA sense strand
ugagggcgcuaaugggaaa

SEQ ID NO: 609530 - RNA, 19 nt, Homo sapiens
  misc_RNA (1)...(19): siRNA sense strand
gugaacaacugugccagaa

SEQ ID NO: 609531 - RNA, 19 nt, Homo sapiens
  misc_RNA (1)...(19): siRNA sense strand
gauuauaggaguaacaugu

SEQ ID NO: 609532 - RNA, 19 nt, Homo sapiens
  misc_RNA (1)...(19): siRNA sense strand
gaauggagaaauaguuugu

SEQ ID NO: 609533 - RNA, 19 nt, Homo sapiens
  misc_RNA (1)...(19): siRNA sense strand
ccaccucaaugaugggaaa

SEQ ID NO: 609534 - RNA, 19 nt, Homo sapiens
  misc_RNA (1)...(19): siRNA sense strand
ucagaucacuuuuguggua

SEQ ID NO: 609535 - RNA, 19 nt, Homo sapiens
  misc_RNA (1)...(19): siRNA sense strand
caagugacauacaccaucu

SEQ ID NO: 609536 - RNA, 19 nt, Homo sapiens
  misc_RNA (1)...(19): siRNA sense strand
ccagagaagccgauaugaa

SEQ ID NO: 609537 - RNA, 19 nt, Homo sapiens
  misc_RNA (1)...(19): siRNA sense strand
gaagugcuggauauuaaug

SEQ ID NO: 609538 - RNA, 19 nt, Homo sapiens
  misc_RNA (1)...(19): siRNA sense strand
ggagacagugauuaugauu

SEQ ID NO: 609539 - RNA, 19 nt, Homo sapiens
  misc_RNA (1)...(19): siRNA sense strand
caggagacagugauuauga

SEQ ID NO: 609540 - RNA, 19 nt, Homo sapiens
  misc_RNA (1)...(19): siRNA sense strand
caucacagaucgucuccau

SEQ ID NO: 609541 - RNA, 19 nt, Homo sapiens
  misc_RNA (1)...(19): siRNA sense strand
gcagagucggugacaagua

SEQ ID NO: 609542 - RNA, 19 nt, Homo sapiens
  misc_RNA (1)...(19): siRNA sense strand
ccauagaguuugaugugau

SEQ ID NO: 609543 - RNA, 19 nt, Homo sapiens
  misc_RNA (1)...(19): siRNA sense strand
gagacagugauuaugauuu

SEQ ID NO: 609544 - RNA, 19 nt, Homo sapiens
  misc_RNA (1)...(19): siRNA sense strand
ggagcugucaguuaucauu

SEQ ID NO: 609545 - RNA, 19 nt, Homo sapiens
  misc_RNA (1)...(19): siRNA sense strand
ucagaaucuuugaucauga

SEQ ID NO: 609546 - RNA, 19 nt, Homo sapiens
  misc_RNA (1)...(19): siRNA sense strand
ugacauacaccaucuugga

SEQ ID NO: 609547 - RNA, 19 nt, Homo sapiens
  misc_RNA (1)...(19): siRNA sense strand
ugaaaucaccaaauccuau

SEQ ID NO: 609548 - RNA, 19 nt, Homo sapiens
  misc_RNA (1)...(19): siRNA sense strand
guugaagugcuggauauua

SEQ ID NO: 609549 - RNA, 19 nt, Homo sapiens
  misc_RNA (1)...(19): siRNA sense strand
caguguugcugguuauuau

SEQ ID NO: 609550 - RNA, 19 nt, Homo sapiens
  misc_RNA (1)...(19): siRNA sense strand
uaacaaacugcuucaagau

SEQ ID NO: 609551 - RNA, 19 nt, Homo sapiens
  misc_RNA (1)...(19): siRNA sense strand
ccacugcccucaccgucuu

SEQ ID NO: 609552 - RNA, 19 nt, Homo sapiens
  misc_RNA (1)...(19): siRNA sense strand
gagaagaaagacacuagau

SEQ ID NO: 609553 - RNA, 19 nt, Homo sapiens
  misc_RNA (1)...(19): siRNA sense strand
gcauaaacuucgacaaaua

SEQ ID NO: 609554 - RNA, 19 nt, Homo sapiens
  misc_RNA (1)...(19): siRNA sense strand
uguaagagcuguuguuaua

SEQ ID NO: 609555 - RNA, 19 nt, Homo sapiens
  misc_RNA (1)...(19): siRNA sense strand
gaacagcgccaaacccuua

SEQ ID NO: 609556 - RNA, 19 nt, Homo sapiens
  misc_RNA (1)...(19): siRNA sense strand
gaaccagaguguauuauug

SEQ ID NO: 609557 - RNA, 19 nt, Homo sapiens
  misc_RNA (1)...(19): siRNA sense strand
gaaauugccuuuaguacau

SEQ ID NO: 609558 - RNA, 19 nt, Homo sapiens
  misc_RNA (1)...(19): siRNA sense strand
gaacuauggucuuuguuga

SEQ ID NO: 609559 - RNA, 19 nt, Homo sapiens
  misc_RNA (1)...(19): siRNA sense strand
gauaauacauccacaaugg

SEQ ID NO: 609560 - RNA, 19 nt, Homo sapiens
  misc_RNA (1)...(19): siRNA sense strand
gaaaucaacccucauaugu

SEQ ID NO: 609561 - RNA, 19 nt, Homo sapiens
  misc_RNA (1)...(19): siRNA sense strand
gaagaaauugccuuuagua

SEQ ID NO: 609562 - RNA, 19 nt, Homo sapiens
  misc_RNA (1)...(19): siRNA sense strand
gcagaaaucaacccucaua

SEQ ID NO: 609563 - RNA, 19 nt, Homo sapiens
  misc_RNA (1)...(19): siRNA sense strand
ugaagaagcuaaucucugu

SEQ ID NO: 609564 - RNA, 19 nt, Homo sapiens
  misc_RNA (1)...(19): siRNA sense strand
gagaaaagcucguugaaau

SEQ ID NO: 609565 - RNA, 19 nt, Homo sapiens
  misc_RNA (1)...(19): siRNA sense strand
ugaaucggauaaccauuua

SEQ ID NO: 609566 - RNA, 19 nt, Homo sapiens
  misc_RNA (1)...(19): siRNA sense strand
uaacaggacuccagcuuca

SEQ ID NO: 609567 - RNA, 19 nt, Homo sapiens
  misc_RNA (1)...(19): siRNA sense strand
ugaacgaggugguuacaaa

SEQ ID NO: 609568 - RNA, 19 nt, Homo sapiens
  misc_RNA (1)...(19): siRNA sense strand
ggaaauaauucagaagcuu

SEQ ID NO: 609569 - RNA, 19 nt, Homo sapiens
  misc_RNA (1)...(19): siRNA sense strand
ggaagaaauugccuuuagu

SEQ ID NO: 609570 - RNA, 19 nt, Homo sapiens
  misc_RNA (1)...(19): siRNA sense strand
ggagagagucuaguaauga

SEQ ID NO: 609571 - RNA, 19 nt, Homo sapiens
  misc_RNA (1)...(19): siRNA sense strand
uaugaugcaugauggaaua

SEQ ID NO: 609572 - RNA, 19 nt, Homo sapiens
  misc_RNA (1)...(19): siRNA sense strand
ucgaagagaucauuucaug

SEQ ID NO: 609573 - RNA, 19 nt, Homo sapiens
  misc_RNA (1)...(19): siRNA sense strand
gcagaccguucuccaaguu

SEQ ID NO: 609574 - RNA, 19 nt, Homo sapiens
  misc_RNA (1)...(19): siRNA sense strand
gaaauucugcgaaacauag

SEQ ID NO: 609575 - RNA, 19 nt, Homo sapiens
  misc_RNA (1)...(19): siRNA sense strand
guccagaaaugaagaaguu

SEQ ID NO: 609576 - RNA, 19 nt, Homo sapiens
  misc_RNA (1)...(19): siRNA sense strand
gaucuuccuucuaccauug

SEQ ID NO: 609577 - RNA, 19 nt, Homo sapiens
  misc_RNA (1)...(19): siRNA sense strand
cagaggaaauucaaagguu

SEQ ID NO: 609578 - RNA, 19 nt, Homo sapiens
  misc_RNA (1)...(19): siRNA sense strand
ggucuaggaaguccaaaua

SEQ ID NO: 609579 - RNA, 19 nt, Homo sapiens
  misc_RNA (1)...(19): siRNA sense strand
caccagcaauucugacuuu

SEQ ID NO: 609580 - RNA, 19 nt, Homo sapiens
  misc_RNA (1)...(19): siRNA sense strand
gaagugaacgaggugguua

SEQ ID NO: 609581 - RNA, 19 nt, Homo sapiens
  misc_RNA (1)...(19): siRNA sense strand
guaauaagcgagauaauac

SEQ ID NO: 609582 - RNA, 19 nt, Homo sapiens
  misc_RNA (1)...(19): siRNA sense strand
ggaaagugcccaguucuug

SEQ ID NO: 609583 - RNA, 19 nt, Homo sapiens
  misc_RNA (1)...(19): siRNA sense strand
aagguuggcugcagaguuu

SEQ ID NO: 609584 - RNA, 19 nt, Homo sapiens
  misc_RNA (1)...(19): siRNA sense strand
ggugauagcucugguuucu

SEQ ID NO: 609585 - RNA, 19 nt, Homo sapiens
  misc_RNA (1)...(19): siRNA sense strand
caagagcacuuugaacaca

SEQ ID NO: 609586 - RNA, 19 nt, Homo sapiens
  misc_RNA (1)...(19): siRNA sense strand
gcugaucgcauguuggaua

SEQ ID NO: 609587 - RNA, 19 nt, Homo sapiens
  misc_RNA (1)...(19): siRNA sense strand
gcagaaggaggagaaagua

SEQ ID NO: 609588 - RNA, 19 nt, Homo sapiens
  misc_RNA (1)...(19): siRNA sense strand
ggaggagaaaguagugaua

SEQ ID NO: 609589 - RNA, 19 nt, Homo sapiens
  misc_RNA (1)...(19): siRNA sense strand
gcccaggaaugccaucaaa

SEQ ID NO: 609590 - RNA, 19 nt, Homo sapiens
  misc_RNA (1)...(19): siRNA sense strand
caaccagauuuauuuggaa

SEQ ID NO: 609591 - RNA, 19 nt, Homo sapiens
  misc_RNA (1)...(19): siRNA sense strand
guaaugacugcgaagauaa

SEQ ID NO: 609592 - RNA, 19 nt, Homo sapiens
  misc_RNA (1)...(19): siRNA sense strand
ggaaccagaguguauuauu

SEQ ID NO: 609593 - RNA, 19 nt, Homo sapiens
  misc_RNA (1)...(19): siRNA sense strand
aguaaugacugcgaagaua

SEQ ID NO: 609594 - RNA, 19 nt, Homo sapiens
  misc_RNA (1)...(19): siRNA sense strand
gaauauguucaucgaauug

SEQ ID NO: 609595 - RNA, 19 nt, Homo sapiens
  misc_RNA (1)...(19): siRNA sense strand
cuucuaccauugaugaaua

SEQ ID NO: 609596 - RNA, 19 nt, Homo sapiens
  misc_RNA (1)...(19): siRNA sense strand
gaagucagaagcagaagga

SEQ ID NO: 609597 - RNA, 19 nt, Homo sapiens
  misc_RNA (1)...(19): siRNA sense strand
gaugauggaccuucucgaa

SEQ ID NO: 609598 - RNA, 19 nt, Homo sapiens
  misc_RNA (1)...(19): siRNA sense strand
ggacauucaauucgacaaa

SEQ ID NO: 609599 - RNA, 19 nt, Homo sapiens
  misc_RNA (1)...(19): siRNA sense strand
gagcuguuguuauauaugg

SEQ ID NO: 609600 - RNA, 19 nt, Homo sapiens
  misc_RNA (1)...(19): siRNA sense strand
ggcauaaacuucgacaaau

SEQ ID NO: 609601 - RNA, 19 nt, Homo sapiens
  misc_RNA (1)...(19): siRNA sense strand
ucaaccagauuuauuugga

SEQ ID NO: 609602 - RNA, 19 nt, Homo sapiens
  misc_RNA (1)...(19): siRNA sense strand
uggaagaaauugccuuuag

SEQ ID NO: 609603 - RNA, 19 nt, Homo sapiens
  misc_RNA (1)...(19): siRNA sense strand
uagcacagccucuaguaaa

SEQ ID NO: 609604 - RNA, 19 nt, Homo sapiens
  misc_RNA (1)...(19): siRNA sense strand
gaaagugcccaguucuugu

SEQ ID NO: 609605 - RNA, 19 nt, Homo sapiens
  misc_RNA (1)...(19): siRNA sense strand
ugacuuagacccagacgaa

SEQ ID NO: 609606 - RNA, 19 nt, Homo sapiens
  misc_RNA (1)...(19): siRNA sense strand
gaacacagcuggguuuucu

SEQ ID NO: 609607 - RNA, 19 nt, Homo sapiens
  misc_RNA (1)...(19): siRNA sense strand
gauaucauaggcaaagaaa

SEQ ID NO: 609608 - RNA, 19 nt, Homo sapiens
  misc_RNA (1)...(19): siRNA sense strand
ggugauacuucucaaagca

SEQ ID NO: 609609 - RNA, 19 nt, Homo sapiens
  misc_RNA (1)...(19): siRNA sense strand
gacagaugcucaacaggau

SEQ ID NO: 609610 - RNA, 19 nt, Homo sapiens
  misc_RNA (1)...(19): siRNA sense strand
cuaaagcugguuauacuaa

SEQ ID NO: 609611 - RNA, 19 nt, Homo sapiens
  misc_RNA (1)...(19): siRNA sense strand
cagagaugcuggugagugu

SEQ ID NO: 609612 - RNA, 19 nt, Homo sapiens
  misc_RNA (1)...(19): siRNA sense strand
gagaugcuggugaguguaa

SEQ ID NO: 609613 - RNA, 19 nt, Homo sapiens
  misc_RNA (1)...(19): siRNA sense strand
gagauaauacauccacaau

SEQ ID NO: 609614 - RNA, 19 nt, Homo sapiens
  misc_RNA (1)...(19): siRNA sense strand
ccaauccaguagaugauga

SEQ ID NO: 609615 - RNA, 19 nt, Homo sapiens
  misc_RNA (1)...(19): siRNA sense strand
guaaaaguauugacagaug

SEQ ID NO: 609616 - RNA, 19 nt, Homo sapiens
  misc_RNA (1)...(19): siRNA sense strand
caaacagggucugggaaga

SEQ ID NO: 609617 - RNA, 19 nt, Homo sapiens
  misc_RNA (1)...(19): siRNA sense strand
guaauaacaggcucuggaa

SEQ ID NO: 609618 - RNA, 19 nt, Homo sapiens
  misc_RNA (1)...(19): siRNA sense strand
gacacugaauaacaacauu

SEQ ID NO: 609619 - RNA, 19 nt, Homo sapiens
  misc_RNA (1)...(19): siRNA sense strand
aaucaacccucauaugucu

SEQ ID NO: 609620 - RNA, 19 nt, Homo sapiens
  misc_RNA (1)...(19): siRNA sense strand
acaaguggguggagcaugu

SEQ ID NO: 609621 - RNA, 19 nt, Homo sapiens
  misc_RNA (1)...(19): siRNA sense strand
uaacaacauugcuaaagcu

SEQ ID NO: 609622 - RNA, 19 nt, Homo sapiens
  misc_RNA (1)...(19): siRNA sense strand
caagagaggcggcuaucga

SEQ ID NO: 609623 - RNA, 19 nt, Homo sapiens
  misc_RNA (1)...(19): siRNA sense strand
ggcaagagcacuuugaaca

SEQ ID NO: 609624 - RNA, 19 nt, Homo sapiens
  misc_RNA (1)...(19): siRNA sense strand
uagaagaccaguauuaagu

SEQ ID NO: 609625 - RNA, 19 nt, Homo sapiens
  misc_RNA (1)...(19): siRNA sense strand
ucuaggaaguccaaauaau

SEQ ID NO: 609626 - RNA, 19 nt, Homo sapiens
  misc_RNA (1)...(19): siRNA sense strand
agagguaguuuccgagguu

SEQ ID NO: 609627 - RNA, 19 nt, Homo sapiens
  misc_RNA (1)...(19): siRNA sense strand
uaggaaguccaaauaauga

SEQ ID NO: 609628 - RNA, 19 nt, Homo sapiens
  misc_RNA (1)...(19): siRNA sense strand
ccagaaaugaagaaguuaa

SEQ ID NO: 609629 - RNA, 19 nt, Homo sapiens
  misc_RNA (1)...(19): siRNA sense strand
gaucgcauguuggauaugg

SEQ ID NO: 609630 - RNA, 19 nt, Homo sapiens
  misc_RNA (1)...(19): siRNA sense strand
cuggaagacugauggauau

SEQ ID NO: 609631 - RNA, 19 nt, Homo sapiens
  misc_RNA (1)...(19): siRNA sense strand
gagauggaaauaauucaga

SEQ ID NO: 609632 - RNA, 19 nt, Homo sapiens
  misc_RNA (1)...(19): siRNA sense strand
ugaagcugaucgcauguug

SEQ ID NO: 609633 - RNA, 19 nt, Homo sapiens
  misc_RNA (1)...(19): siRNA sense strand
gaaggaggagaaaguagug

SEQ ID NO: 609634 - RNA, 19 nt, Homo sapiens
  misc_RNA (1)...(19): siRNA sense strand
gaacgaggugguuacaaag

SEQ ID NO: 609635 - RNA, 19 nt, Homo sapiens
  misc_RNA (1)...(19): siRNA sense strand
uccaguagaugaugaguca

SEQ ID NO: 609636 - RNA, 19 nt, Homo sapiens
  misc_RNA (1)...(19): siRNA sense strand
gguggagcauguagagaug

SEQ ID NO: 609637 - RNA, 19 nt, Homo sapiens
  misc_RNA (1)...(19): siRNA sense strand
gcgccaaacccuuauguuc

SEQ ID NO: 609638 - RNA, 19 nt, Homo sapiens
  misc_RNA (1)...(19): siRNA sense strand
gacauucaauucgacaaau

SEQ ID NO: 609639 - RNA, 19 nt, Homo sapiens
  misc_RNA (1)...(19): siRNA sense strand
gcugggacauucaauucga

SEQ ID NO: 609640 - RNA, 19 nt, Homo sapiens
  misc_RNA (1)...(19): siRNA sense strand
caggaaccagaguguauua

SEQ ID NO: 609641 - RNA, 19 nt, Homo sapiens
  misc_RNA (1)...(19): siRNA sense strand
gacuccagcuucaucauca

SEQ ID NO: 609642 - RNA, 19 nt, Homo sapiens
  misc_RNA (1)...(19): siRNA sense strand
gagagagucuaguaaugac

SEQ ID NO: 609643 - RNA, 19 nt, Homo sapiens
  misc_RNA (1)...(19): siRNA sense strand
uggcagagcaauuuccuuu

SEQ ID NO: 609644 - RNA, 19 nt, Homo sapiens
  misc_RNA (1)...(19): siRNA sense strand
ccuggaagacugauggaua

SEQ ID NO: 609645 - RNA, 19 nt, Homo sapiens
  misc_RNA (1)...(19): siRNA sense strand
gcaggaaccagaguguauu

SEQ ID NO: 609646 - RNA, 19 nt, Homo sapiens
  misc_RNA (1)...(19): siRNA sense strand
gcuaaagcugguuauacua

SEQ ID NO: 609647 - RNA, 19 nt, Homo sapiens
  misc_RNA (1)...(19): siRNA sense strand
uggagagagucuaguaaug

SEQ ID NO: 609648 - RNA, 19 nt, Homo sapiens
  misc_RNA (1)...(19): siRNA sense strand
cuaggaaguccaaauaaug

SEQ ID NO: 609649 - RNA, 19 nt, Homo sapiens
  misc_RNA (1)...(19): siRNA sense strand
cuaucgagauggaaauaau

SEQ ID NO: 609650 - RNA, 19 nt, Homo sapiens
  misc_RNA (1)...(19): siRNA sense strand
guauuaaguggcacaggua

SEQ ID NO: 609651 - RNA, 19 nt, Homo sapiens
  misc_RNA (1)...(19): siRNA sense strand
gaaaagcucguugaaauuc

SEQ ID NO: 609652 - RNA, 19 nt, Homo sapiens
  misc_RNA (1)...(19): siRNA sense strand
gcaccaccagcaauucuga

SEQ ID NO: 609653 - RNA, 19 nt, Homo sapiens
  misc_RNA (1)...(19): siRNA sense strand
gcauaaacuucgacaaaua

SEQ ID NO: 609654 - RNA, 19 nt, Homo sapiens
  misc_RNA (1)...(19): siRNA sense strand
uguaagagcuguuguuaua

SEQ ID NO: 609655 - RNA, 19 nt, Homo sapiens
  misc_RNA (1)...(19): siRNA sense strand
gaacagcgccaaacccuua

SEQ ID NO: 609656 - RNA, 19 nt, Homo sapiens
  misc_RNA (1)...(19): siRNA sense strand
gaaccagaguguauuauug

SEQ ID NO: 609657 - RNA, 19 nt, Homo sapiens
  misc_RNA (1)...(19): siRNA sense strand
gaaauugccuuuaguacau

SEQ ID NO: 609658 - RNA, 19 nt, Homo sapiens
  misc_RNA (1)...(19): siRNA sense strand
gaacuauggucuuuguuga

SEQ ID NO: 609659 - RNA, 19 nt, Homo sapiens
  misc_RNA (1)...(19): siRNA sense strand
gauaauacauccacaaugg

SEQ ID NO: 609660 - RNA, 19 nt, Homo sapiens
  misc_RNA (1)...(19): siRNA sense strand
gaaaucaacccucauaugu

SEQ ID NO: 609661 - RNA, 19 nt, Homo sapiens
  misc_RNA (1)...(19): siRNA sense strand
gaagaaauugccuuuagua

SEQ ID NO: 609662 - RNA, 19 nt, Homo sapiens
  misc_RNA (1)...(19): siRNA sense strand
gcagaaaucaacccucaua

SEQ ID NO: 609663 - RNA, 19 nt, Homo sapiens
  misc_RNA (1)...(19): siRNA sense strand
ugaagaagcuaaucucugu

SEQ ID NO: 609664 - RNA, 19 nt, Homo sapiens
  misc_RNA (1)...(19): siRNA sense strand
gagaaaagcucguugaaau

SEQ ID NO: 609665 - RNA, 19 nt, Homo sapiens
  misc_RNA (1)...(19): siRNA sense strand
ugaaucggauaaccauuua

SEQ ID NO: 609666 - RNA, 19 nt, Homo sapiens
  misc_RNA (1)...(19): siRNA sense strand
uaacaggacuccagcuuca

SEQ ID NO: 609667 - RNA, 19 nt, Homo sapiens
  misc_RNA (1)...(19): siRNA sense strand
ugaacgaggugguuacaaa

SEQ ID NO: 609668 - RNA, 19 nt, Homo sapiens
  misc_RNA (1)...(19): siRNA sense strand
ggaaauaauucagaagcuu

SEQ ID NO: 609669 - RNA, 19 nt, Homo sapiens
  misc_RNA (1)...(19): siRNA sense strand
ggaagaaauugccuuuagu

SEQ ID NO: 609670 - RNA, 19 nt, Homo sapiens
  misc_RNA (1)...(19): siRNA sense strand
ggagagagucuaguaauga

SEQ ID NO: 609671 - RNA, 19 nt, Homo sapiens
  misc_RNA (1)...(19): siRNA sense strand
uaugaugcaugauggaaua

SEQ ID NO: 609672 - RNA, 19 nt, Homo sapiens
  misc_RNA (1)...(19): siRNA sense strand
ucgaagagaucauuucaug

SEQ ID NO: 609673 - RNA, 19 nt, Homo sapiens
  misc_RNA (1)...(19): siRNA sense strand
gcagaccguucuccaaguu

SEQ ID NO: 609674 - RNA, 19 nt, Homo sapiens
  misc_RNA (1)...(19): siRNA sense strand
gaaauucugcgaaacauag

SEQ ID NO: 609675 - RNA, 19 nt, Homo sapiens
  misc_RNA (1)...(19): siRNA sense strand
guccagaaaugaagaaguu

SEQ ID NO: 609676 - RNA, 19 nt, Homo sapiens
  misc_RNA (1)...(19): siRNA sense strand
gaucuuccuucuaccauug

SEQ ID NO: 609677 - RNA, 19 nt, Homo sapiens
  misc_RNA (1)...(19): siRNA sense strand
cagaggaaauucaaagguu

SEQ ID NO: 609678 - RNA, 19 nt, Homo sapiens
  misc_RNA (1)...(19): siRNA sense strand
ggucuaggaaguccaaaua

SEQ ID NO: 609679 - RNA, 19 nt, Homo sapiens
  misc_RNA (1)...(19): siRNA sense strand
caccagcaauucugacuuu

SEQ ID NO: 609680 - RNA, 19 nt, Homo sapiens
  misc_RNA (1)...(19): siRNA sense strand
gaagugaacgaggugguua

SEQ ID NO: 609681 - RNA, 19 nt, Homo sapiens
  misc_RNA (1)...(19): siRNA sense strand
guaauaagcgagauaauac

SEQ ID NO: 609682 - RNA, 19 nt, Homo sapiens
  misc_RNA (1)...(19): siRNA sense strand
ggaaagugcccaguucuug

SEQ ID NO: 609683 - RNA, 19 nt, Homo sapiens
  misc_RNA (1)...(19): siRNA sense strand
aagguuggcugcagaguuu

SEQ ID NO: 609684 - RNA, 19 nt, Homo sapiens
  misc_RNA (1)...(19): siRNA sense strand
ggugauagcucugguuucu

SEQ ID NO: 609685 - RNA, 19 nt, Homo sapiens
  misc_RNA (1)...(19): siRNA sense strand
caagagcacuuugaacaca

SEQ ID NO: 609686 - RNA, 19 nt, Homo sapiens
  misc_RNA (1)...(19): siRNA sense strand
gcugaucgcauguuggaua

SEQ ID NO: 609687 - RNA, 19 nt, Homo sapiens
  misc_RNA (1)...(19): siRNA sense strand
gcagaaggaggagaaagua

SEQ ID NO: 609688 - RNA, 19 nt, Homo sapiens
  misc_RNA (1)...(19): siRNA sense strand
ggaggagaaaguagugaua

SEQ ID NO: 609689 - RNA, 19 nt, Homo sapiens
  misc_RNA (1)...(19): siRNA sense strand
gcccaggaaugccaucaaa

SEQ ID NO: 609690 - RNA, 19 nt, Homo sapiens
  misc_RNA (1)...(19): siRNA sense strand
caaccagauuuauuuggaa

SEQ ID NO: 609691 - RNA, 19 nt, Homo sapiens
  misc_RNA (1)...(19): siRNA sense strand
guaaugacugcgaagauaa

SEQ ID NO: 609692 - RNA, 19 nt, Homo sapiens
  misc_RNA (1)...(19): siRNA sense strand
ggaaccagaguguauuauu

SEQ ID NO: 609693 - RNA, 19 nt, Homo sapiens
  misc_RNA (1)...(19): siRNA sense strand
aguaaugacugcgaagaua

SEQ ID NO: 609694 - RNA, 19 nt, Homo sapiens
  misc_RNA (1)...(19): siRNA sense strand
gaauauguucaucgaauug

SEQ ID NO: 609695 - RNA, 19 nt, Homo sapiens
  misc_RNA (1)...(19): siRNA sense strand
cuucuaccauugaugaaua

SEQ ID NO: 609696 - RNA, 19 nt, Homo sapiens
  misc_RNA (1)...(19): siRNA sense strand
gaagucagaagcagaagga

SEQ ID NO: 609697 - RNA, 19 nt, Homo sapiens
  misc_RNA (1)...(19): siRNA sense strand
gaugauggaccuucucgaa

SEQ ID NO: 609698 - RNA, 19 nt, Homo sapiens
  misc_RNA (1)...(19): siRNA sense strand
ggacauucaauucgacaaa

SEQ ID NO: 609699 - RNA, 19 nt, Homo sapiens
  misc_RNA (1)...(19): siRNA sense strand
gagcuguuguuauauaugg

SEQ ID NO: 609700 - RNA, 19 nt, Homo sapiens
  misc_RNA (1)...(19): siRNA sense strand
ggcauaaacuucgacaaau

SEQ ID NO: 609701 - RNA, 19 nt, Homo sapiens
  misc_RNA (1)...(19): siRNA sense strand
ucaaccagauuuauuugga

SEQ ID NO: 609702 - RNA, 19 nt, Homo sapiens
  misc_RNA (1)...(19): siRNA sense strand
uggaagaaauugccuuuag

SEQ ID NO: 609703 - RNA, 19 nt, Homo sapiens
  misc_RNA (1)...(19): siRNA sense strand
uagcacagccucuaguaaa

SEQ ID NO: 609704 - RNA, 19 nt, Homo sapiens
  misc_RNA (1)...(19): siRNA sense strand
gaaagugcccaguucuugu

SEQ ID NO: 609705 - RNA, 19 nt, Homo sapiens
  misc_RNA (1)...(19): siRNA sense strand
ugacuuagacccagacgaa

SEQ ID NO: 609706 - RNA, 19 nt, Homo sapiens
  misc_RNA (1)...(19): siRNA sense strand
gaacacagcuggguuuucu

SEQ ID NO: 609707 - RNA, 19 nt, Homo sapiens
  misc_RNA (1)...(19): siRNA sense strand
gauaucauaggcaaagaaa

SEQ ID NO: 609708 - RNA, 19 nt, Homo sapiens
  misc_RNA (1)...(19): siRNA sense strand
ggugauacuucucaaagca

SEQ ID NO: 609709 - RNA, 19 nt, Homo sapiens
  misc_RNA (1)...(19): siRNA sense strand
gacagaugcucaacaggau

SEQ ID NO: 609710 - RNA, 19 nt, Homo sapiens
  misc_RNA (1)...(19): siRNA sense strand
cuaaagcugguuauacuaa

SEQ ID NO: 609711 - RNA, 19 nt, Homo sapiens
  misc_RNA (1)...(19): siRNA sense strand
cagagaugcuggugagugu

SEQ ID NO: 609712 - RNA, 19 nt, Homo sapiens
  misc_RNA (1)...(19): siRNA sense strand
gagaugcuggugaguguaa

SEQ ID NO: 609713 - RNA, 19 nt, Homo sapiens
  misc_RNA (1)...(19): siRNA sense strand
gagauaauacauccacaau

SEQ ID NO: 609714 - RNA, 19 nt, Homo sapiens
  misc_RNA (1)...(19): siRNA sense strand
ccaauccaguagaugauga

SEQ ID NO: 609715 - RNA, 19 nt, Homo sapiens
  misc_RNA (1)...(19): siRNA sense strand
guaaaaguauugacagaug

SEQ ID NO: 609716 - RNA, 19 nt, Homo sapiens
  misc_RNA (1)...(19): siRNA sense strand
caaacagggucugggaaga

SEQ ID NO: 609717 - RNA, 19 nt, Homo sapiens
  misc_RNA (1)...(19): siRNA sense strand
guaauaacaggcucuggaa

SEQ ID NO: 609718 - RNA, 19 nt, Homo sapiens
  misc_RNA (1)...(19): siRNA sense strand
gacacugaauaacaacauu

SEQ ID NO: 609719 - RNA, 19 nt, Homo sapiens
  misc_RNA (1)...(19): siRNA sense strand
aaucaacccucauaugucu

SEQ ID NO: 609720 - RNA, 19 nt, Homo sapiens
  misc_RNA (1)...(19): siRNA sense strand
acaaguggguggagcaugu

SEQ ID NO: 609721 - RNA, 19 nt, Homo sapiens
  misc_RNA (1)...(19): siRNA sense strand
uaacaacauugcuaaagcu

SEQ ID NO: 609722 - RNA, 19 nt, Homo sapiens
  misc_RNA (1)...(19): siRNA sense strand
caagagaggcggcuaucga

SEQ ID NO: 609723 - RNA, 19 nt, Homo sapiens
  misc_RNA (1)...(19): siRNA sense strand
ggcaagagcacuuugaaca

SEQ ID NO: 609724 - RNA, 19 nt, Homo sapiens
  misc_RNA (1)...(19): siRNA sense strand
uagaagaccaguauuaagu

SEQ ID NO: 609725 - RNA, 19 nt, Homo sapiens
  misc_RNA (1)...(19): siRNA sense strand
ucuaggaaguccaaauaau

SEQ ID NO: 609726 - RNA, 19 nt, Homo sapiens
  misc_RNA (1)...(19): siRNA sense strand
agagguaguuuccgagguu

SEQ ID NO: 609727 - RNA, 19 nt, Homo sapiens
  misc_RNA (1)...(19): siRNA sense strand
uaggaaguccaaauaauga

SEQ ID NO: 609728 - RNA, 19 nt, Homo sapiens
  misc_RNA (1)...(19): siRNA sense strand
ccagaaaugaagaaguuaa

SEQ ID NO: 609729 - RNA, 19 nt, Homo sapiens
  misc_RNA (1)...(19): siRNA sense strand
gaucgcauguuggauaugg

SEQ ID NO: 609730 - RNA, 19 nt, Homo sapiens
  misc_RNA (1)...(19): siRNA sense strand
cuggaagacugauggauau

SEQ ID NO: 609731 - RNA, 19 nt, Homo sapiens
  misc_RNA (1)...(19): siRNA sense strand
gagauggaaauaauucaga

SEQ ID NO: 609732 - RNA, 19 nt, Homo sapiens
  misc_RNA (1)...(19): siRNA sense strand
ugaagcugaucgcauguug

SEQ ID NO: 609733 - RNA, 19 nt, Homo sapiens
  misc_RNA (1)...(19): siRNA sense strand
gaaggaggagaaaguagug

SEQ ID NO: 609734 - RNA, 19 nt, Homo sapiens
  misc_RNA (1)...(19): siRNA sense strand
gaacgaggugguuacaaag

SEQ ID NO: 609735 - RNA, 19 nt, Homo sapiens
  misc_RNA (1)...(19): siRNA sense strand
uccaguagaugaugaguca

SEQ ID NO: 609736 - RNA, 19 nt, Homo sapiens
  misc_RNA (1)...(19): siRNA sense strand
gguggagcauguagagaug

SEQ ID NO: 609737 - RNA, 19 nt, Homo sapiens
  misc_RNA (1)...(19): siRNA sense strand
gcgccaaacccuuauguuc

SEQ ID NO: 609738 - RNA, 19 nt, Homo sapiens
  misc_RNA (1)...(19): siRNA sense strand
gacauucaauucgacaaau

SEQ ID NO: 609739 - RNA, 19 nt, Homo sapiens
  misc_RNA (1)...(19): siRNA sense strand
gcugggacauucaauucga

SEQ ID NO: 609740 - RNA, 19 nt, Homo sapiens
  misc_RNA (1)...(19): siRNA sense strand
caggaaccagaguguauua

SEQ ID NO: 609741 - RNA, 19 nt, Homo sapiens
  misc_RNA (1)...(19): siRNA sense strand
gacuccagcuucaucauca

SEQ ID NO: 609742 - RNA, 19 nt, Homo sapiens
  misc_RNA (1)...(19): siRNA sense strand
gagagagucuaguaaugac

SEQ ID NO: 609743 - RNA, 19 nt, Homo sapiens
  misc_RNA (1)...(19): siRNA sense strand
uggcagagcaauuuccuuu

SEQ ID NO: 609744 - RNA, 19 nt, Homo sapiens
  misc_RNA (1)...(19): siRNA sense strand
ccuggaagacugauggaua

SEQ ID NO: 609745 - RNA, 19 nt, Homo sapiens
  misc_RNA (1)...(19): siRNA sense strand
gcaggaaccagaguguauu

SEQ ID NO: 609746 - RNA, 19 nt, Homo sapiens
  misc_RNA (1)...(19): siRNA sense strand
gcuaaagcugguuauacua

SEQ ID NO: 609747 - RNA, 19 nt, Homo sapiens
  misc_RNA (1)...(19): siRNA sense strand
uggagagagucuaguaaug

SEQ ID NO: 609748 - RNA, 19 nt, Homo sapiens
  misc_RNA (1)...(19): siRNA sense strand
cuaggaaguccaaauaaug

SEQ ID NO: 609749 - RNA, 19 nt, Homo sapiens
  misc_RNA (1)...(19): siRNA sense strand
cuaucgagauggaaauaau

SEQ ID NO: 609750 - RNA, 19 nt, Homo sapiens
  misc_RNA (1)...(19): siRNA sense strand
guauuaaguggcacaggua

SEQ ID NO: 609751 - RNA, 19 nt, Homo sapiens
  misc_RNA (1)...(19): siRNA sense strand
gaaaagcucguugaaauuc

SEQ ID NO: 609752 - RNA, 19 nt, Homo sapiens
  misc_RNA (1)...(19): siRNA sense strand
gcaccaccagcaauucuga

SEQ ID NO: 609753 - RNA, 19 nt, Homo sapiens
  misc_RNA (1)...(19): siRNA sense strand
guucaucucuuccuaguaa

SEQ ID NO: 609754 - RNA, 19 nt, Homo sapiens
  misc_RNA (1)...(19): siRNA sense strand
gaagauagucgucuaaagu

SEQ ID NO: 609755 - RNA, 19 nt, Homo sapiens
  misc_RNA (1)...(19): siRNA sense strand
caccagaugugcaggguua

SEQ ID NO: 609756 - RNA, 19 nt, Homo sapiens
  misc_RNA (1)...(19): siRNA sense strand
gaagaucuccagagucguu

SEQ ID NO: 609757 - RNA, 19 nt, Homo sapiens
  misc_RNA (1)...(19): siRNA sense strand
ggaagauagucgucuaaag

SEQ ID NO: 609758 - RNA, 19 nt, Homo sapiens
  misc_RNA (1)...(19): siRNA sense strand
ucaaucuucuggcucauuu

SEQ ID NO: 609759 - RNA, 19 nt, Homo sapiens
  misc_RNA (1)...(19): siRNA sense strand
gacaccauguagagaauuu

SEQ ID NO: 609760 - RNA, 19 nt, Homo sapiens
  misc_RNA (1)...(19): siRNA sense strand
ccuaguguguccaccuuua

SEQ ID NO: 609761 - RNA, 19 nt, Homo sapiens
  misc_RNA (1)...(19): siRNA sense strand
cgucuaaaguucaaucuuc

SEQ ID NO: 609762 - RNA, 19 nt, Homo sapiens
  misc_RNA (1)...(19): siRNA sense strand
ucuauaaugucccuauuca

SEQ ID NO: 609763 - RNA, 19 nt, Homo sapiens
  misc_RNA (1)...(19): siRNA sense strand
gaaagagccagugguuguu

SEQ ID NO: 609764 - RNA, 19 nt, Homo sapiens
  misc_RNA (1)...(19): siRNA sense strand
agagucguuuggaaucuua

SEQ ID NO: 609765 - RNA, 19 nt, Homo sapiens
  misc_RNA (1)...(19): siRNA sense strand
uaaugucccuauucaagau

SEQ ID NO: 609766 - RNA, 19 nt, Homo sapiens
  misc_RNA (1)...(19): siRNA sense strand
cguuuggaaucuuacguua

SEQ ID NO: 609767 - RNA, 19 nt, Homo sapiens
  misc_RNA (1)...(19): siRNA sense strand
gaaaaucacuuggaguuac

SEQ ID NO: 609768 - RNA, 19 nt, Homo sapiens
  misc_RNA (1)...(19): siRNA sense strand
agaaagagccagugguugu

SEQ ID NO: 609769 - RNA, 19 nt, Homo sapiens
  misc_RNA (1)...(19): siRNA sense strand
gcaagacaucucccuggaa

SEQ ID NO: 609770 - RNA, 19 nt, Homo sapiens
  misc_RNA (1)...(19): siRNA sense strand
gauagucgucuaaaguuca

SEQ ID NO: 609771 - RNA, 19 nt, Homo sapiens
  misc_RNA (1)...(19): siRNA sense strand
gggacaccauguagagaau

SEQ ID NO: 609772 - RNA, 19 nt, Homo sapiens
  misc_RNA (1)...(19): siRNA sense strand
gugcaggguuagagauguu

SEQ ID NO: 609773 - RNA, 19 nt, Homo sapiens
  misc_RNA (1)...(19): siRNA sense strand
uauaaugucccuauucaag

SEQ ID NO: 609774 - RNA, 19 nt, Homo sapiens
  misc_RNA (1)...(19): siRNA sense strand
ccuggaagauagucgucua

SEQ ID NO: 609775 - RNA, 19 nt, Homo sapiens
  misc_RNA (1)...(19): siRNA sense strand
agagaaagagccagugguu

SEQ ID NO: 609776 - RNA, 19 nt, Homo sapiens
  misc_RNA (1)...(19): siRNA sense strand
cgaucugugucgggcauua

SEQ ID NO: 609777 - RNA, 19 nt, Homo sapiens
  misc_RNA (1)...(19): siRNA sense strand
ugagacaguagaagagaaa

SEQ ID NO: 609778 - RNA, 19 nt, Homo sapiens
  misc_RNA (1)...(19): siRNA sense strand
ccuaguaauuggcaagaca

SEQ ID NO: 609779 - RNA, 19 nt, Homo sapiens
  misc_RNA (1)...(19): siRNA sense strand
gccagugguuguugagaca

SEQ ID NO: 609780 - RNA, 19 nt, Homo sapiens
  misc_RNA (1)...(19): siRNA sense strand
aagauagucgucuaaaguu

SEQ ID NO: 609781 - RNA, 19 nt, Homo sapiens
  misc_RNA (1)...(19): siRNA sense strand
gcauacacaccaccugaag

SEQ ID NO: 609782 - RNA, 19 nt, Homo sapiens
  misc_RNA (1)...(19): siRNA sense strand
ggacaccauguagagaauu

SEQ ID NO: 609783 - RNA, 19 nt, Homo sapiens
  misc_RNA (1)...(19): siRNA sense strand
cagagucguuuggaaucuu

SEQ ID NO: 609784 - RNA, 19 nt, Homo sapiens
  misc_RNA (1)...(19): siRNA sense strand
agauagucgucuaaaguuc

SEQ ID NO: 609785 - RNA, 19 nt, Homo sapiens
  misc_RNA (1)...(19): siRNA sense strand
uuacgaagccgagcauaca

SEQ ID NO: 609786 - RNA, 19 nt, Homo sapiens
  misc_RNA (1)...(19): siRNA sense strand
ggcauuaccagaagagucu

SEQ ID NO: 609787 - RNA, 19 nt, Homo sapiens
  misc_RNA (1)...(19): siRNA sense strand
guaauuggcaagacaucuc

SEQ ID NO: 609788 - RNA, 19 nt, Homo sapiens
  misc_RNA (1)...(19): siRNA sense strand
ccagagucguuuggaaucu

SEQ ID NO: 609789 - RNA, 19 nt, Homo sapiens
  misc_RNA (1)...(19): siRNA sense strand
aagagccagugguuguuga

SEQ ID NO: 609790 - RNA, 19 nt, Homo sapiens
  misc_RNA (1)...(19): siRNA sense strand
auacacaccaccugaagau

SEQ ID NO: 609791 - RNA, 19 nt, Homo sapiens
  misc_RNA (1)...(19): siRNA sense strand
auaaugucccuauucaaga

SEQ ID NO: 609792 - RNA, 19 nt, Homo sapiens
  misc_RNA (1)...(19): siRNA sense strand
gucuaaaguucaaucuucu

SEQ ID NO: 609793 - RNA, 19 nt, Homo sapiens
  misc_RNA (1)...(19): siRNA sense strand
guuuggaaucuuacguuaa

SEQ ID NO: 609794 - RNA, 19 nt, Homo sapiens
  misc_RNA (1)...(19): siRNA sense strand
acacaccaccugaagaucu

SEQ ID NO: 609795 - RNA, 19 nt, Homo sapiens
  misc_RNA (1)...(19): siRNA sense strand
ggucauguagucccuaacu

SEQ ID NO: 609796 - RNA, 19 nt, Homo sapiens
  misc_RNA (1)...(19): siRNA sense strand
ugggucauguagucccuaa

SEQ ID NO: 609797 - RNA, 19 nt, Homo sapiens
  misc_RNA (1)...(19): siRNA sense strand
caucucuuccuaguaauug

SEQ ID NO: 609798 - RNA, 19 nt, Homo sapiens
  misc_RNA (1)...(19): siRNA sense strand
guauaaagaugagugcuua

SEQ ID NO: 609799 - RNA, 19 nt, Homo sapiens
  misc_RNA (1)...(19): siRNA sense strand
aaagaugagugcuuagaua

SEQ ID NO: 609800 - RNA, 19 nt, Homo sapiens
  misc_RNA (1)...(19): siRNA sense strand
ggaauuugguggcauccua

SEQ ID NO: 609801 - RNA, 19 nt, Homo sapiens
  misc_RNA (1)...(19): siRNA sense strand
gaugagugcuuagauauca

SEQ ID NO: 609802 - RNA, 19 nt, Homo sapiens
  misc_RNA (1)...(19): siRNA sense strand
gcucaucaccgaaguguuu

SEQ ID NO: 609803 - RNA, 19 nt, Homo sapiens
  misc_RNA (1)...(19): siRNA sense strand
caaagucacugccauaugc

SEQ ID NO: 609804 - RNA, 19 nt, Homo sapiens
  misc_RNA (1)...(19): siRNA sense strand
gcucggagauggugaaagu

SEQ ID NO: 609805 - RNA, 19 nt, Homo sapiens
  misc_RNA (1)...(19): siRNA sense strand
ucaagugucuucccagcua

SEQ ID NO: 609806 - RNA, 19 nt, Homo sapiens
  misc_RNA (1)...(19): siRNA sense strand
caaaugcguuggugcaguu

SEQ ID NO: 609807 - RNA, 19 nt, Homo sapiens
  misc_RNA (1)...(19): siRNA sense strand
acacugagcccgcagagua

SEQ ID NO: 609808 - RNA, 19 nt, Homo sapiens
  misc_RNA (1)...(19): siRNA sense strand
ccacagagcuggccauucc

SEQ ID NO: 609809 - RNA, 19 nt, Homo sapiens
  misc_RNA (1)...(19): siRNA sense strand
uggccaagcuccauaagaa

SEQ ID NO: 609810 - RNA, 19 nt, Homo sapiens
  misc_RNA (1)...(19): siRNA sense strand
gaagaagaagcaucuggaa

SEQ ID NO: 609811 - RNA, 19 nt, Homo sapiens
  misc_RNA (1)...(19): siRNA sense strand
ccgcagggcuccucuaaag

SEQ ID NO: 609812 - RNA, 19 nt, Homo sapiens
  misc_RNA (1)...(19): siRNA sense strand
caauaugaaugccucaaag

SEQ ID NO: 609813 - RNA, 19 nt, Homo sapiens
  misc_RNA (1)...(19): siRNA sense strand
caucaaccgugccaacaau

SEQ ID NO: 609814 - RNA, 19 nt, Homo sapiens
  misc_RNA (1)...(19): siRNA sense strand
agacacagaugaggaugaa

SEQ ID NO: 609815 - RNA, 19 nt, Homo sapiens
  misc_RNA (1)...(19): siRNA sense strand
ggagugugccuuugguuau

SEQ ID NO: 609816 - RNA, 19 nt, Homo sapiens
  misc_RNA (1)...(19): siRNA sense strand
ccagcuaccucccaguuuc

SEQ ID NO: 609817 - RNA, 19 nt, Homo sapiens
  misc_RNA (1)...(19): siRNA sense strand
gccauuccauuaccuugaa

SEQ ID NO: 609818 - RNA, 19 nt, Homo sapiens
  misc_RNA (1)...(19): siRNA sense strand
ugucugaggucgcaagugu

SEQ ID NO: 609819 - RNA, 19 nt, Homo sapiens
  misc_RNA (1)...(19): siRNA sense strand
ggaagacacagaugaggau

SEQ ID NO: 609820 - RNA, 19 nt, Homo sapiens
  misc_RNA (1)...(19): siRNA sense strand
caacugccaccacucaaga

SEQ ID NO: 609821 - RNA, 19 nt, Homo sapiens
  misc_RNA (1)...(19): siRNA sense strand
cagccugccucucugaaug

SEQ ID NO: 609822 - RNA, 19 nt, Homo sapiens
  misc_RNA (1)...(19): siRNA sense strand
aacggucucuuuggaaaua

SEQ ID NO: 609823 - RNA, 19 nt, Homo sapiens
  misc_RNA (1)...(19): siRNA sense strand
gugcuuagauaucaucaac

SEQ ID NO: 609824 - RNA, 19 nt, Homo sapiens
  misc_RNA (1)...(19): siRNA sense strand
agagcuggccauuccauua

SEQ ID NO: 609825 - RNA, 19 nt, Homo sapiens
  misc_RNA (1)...(19): siRNA sense strand
aaaccacgccuauauuauc

SEQ ID NO: 609826 - RNA, 19 nt, Homo sapiens
  misc_RNA (1)...(19): siRNA sense strand
ccaauaugaaugccucaaa

SEQ ID NO: 609827 - RNA, 19 nt, Homo sapiens
  misc_RNA (1)...(19): siRNA sense strand
gaccgcagggcuccucuaa

SEQ ID NO: 609828 - RNA, 19 nt, Homo sapiens
  misc_RNA (1)...(19): siRNA sense strand
ggagcucucugcccguagu

SEQ ID NO: 609829 - RNA, 19 nt, Homo sapiens
  misc_RNA (1)...(19): siRNA sense strand
ccacagcccaauaugaaug

SEQ ID NO: 609830 - RNA, 19 nt, Homo sapiens
  misc_RNA (1)...(19): siRNA sense strand
ucaacaagcugggcuacca

SEQ ID NO: 609831 - RNA, 19 nt, Homo sapiens
  misc_RNA (1)...(19): siRNA sense strand
ccagugccacccaggauaa

SEQ ID NO: 609832 - RNA, 19 nt, Homo sapiens
  misc_RNA (1)...(19): siRNA sense strand
ccaaggcccugggagaauc

SEQ ID NO: 609833 - RNA, 19 nt, Homo sapiens
  misc_RNA (1)...(19): siRNA sense strand
gcaaggccacccggaagaa

SEQ ID NO: 609834 - RNA, 19 nt, Homo sapiens
  misc_RNA (1)...(19): siRNA sense strand
ggcagaaguaccuagagua

SEQ ID NO: 609835 - RNA, 19 nt, Homo sapiens
  misc_RNA (1)...(19): siRNA sense strand
gaaauacuaagaagcucau

SEQ ID NO: 609836 - RNA, 19 nt, Homo sapiens
  misc_RNA (1)...(19): siRNA sense strand
gccacacgcuagccuuuca

SEQ ID NO: 609837 - RNA, 19 nt, Homo sapiens
  misc_RNA (1)...(19): siRNA sense strand
gaauuugguggcauccuau

SEQ ID NO: 609838 - RNA, 19 nt, Homo sapiens
  misc_RNA (1)...(19): siRNA sense strand
cauaagaaagauccacaga

SEQ ID NO: 609839 - RNA, 19 nt, Homo sapiens
  misc_RNA (1)...(19): siRNA sense strand
caaguuuggccuucugaug

SEQ ID NO: 609840 - RNA, 19 nt, Homo sapiens
  misc_RNA (1)...(19): siRNA sense strand
ucaaccgugccaacaauaa

SEQ ID NO: 609841 - RNA, 19 nt, Homo sapiens
  misc_RNA (1)...(19): siRNA sense strand
uuugguggcauccuauuua

SEQ ID NO: 609842 - RNA, 19 nt, Homo sapiens
  misc_RNA (1)...(19): siRNA sense strand
aaccacgccuauauuauca

SEQ ID NO: 609843 - RNA, 19 nt, Homo sapiens
  misc_RNA (1)...(19): siRNA sense strand
ccaaagucacugccauaug

SEQ ID NO: 609844 - RNA, 19 nt, Homo sapiens
  misc_RNA (1)...(19): siRNA sense strand
ccacgccuauauuaucauc

SEQ ID NO: 609845 - RNA, 19 nt, Homo sapiens
  misc_RNA (1)...(19): siRNA sense strand
gagugugccuuugguuauc

SEQ ID NO: 609846 - RNA, 19 nt, Homo sapiens
  misc_RNA (1)...(19): siRNA sense strand
uaaagaugagugcuuagau

SEQ ID NO: 609847 - RNA, 19 nt, Homo sapiens
  misc_RNA (1)...(19): siRNA sense strand
gcagggccucuucuauaga

SEQ ID NO: 609848 - RNA, 19 nt, Homo sapiens
  misc_RNA (1)...(19): siRNA sense strand
guuggugcaguuccucuua

SEQ ID NO: 609849 - RNA, 19 nt, Homo sapiens
  misc_RNA (1)...(19): siRNA sense strand
ucccacagcccaauaugaa

SEQ ID NO: 609850 - RNA, 19 nt, Homo sapiens
  misc_RNA (1)...(19): siRNA sense strand
gagcuggccauuccauuac

SEQ ID NO: 609851 - RNA, 19 nt, Homo sapiens
  misc_RNA (1)...(19): siRNA sense strand
ggccaagcuccauaagaaa

SEQ ID NO: 609852 - RNA, 19 nt, Homo sapiens
  misc_RNA (1)...(19): siRNA sense strand
gggcuaccauacagggaau

SEQ ID NO: 609853 - RNA, 19 nt, Homo sapiens
  misc_RNA (1)...(19): siRNA sense strand
uggagugugccuuugguua

SEQ ID NO: 609854 - RNA, 19 nt, Homo sapiens
  misc_RNA (1)...(19): siRNA sense strand
gugcaguuccucuuaguca

SEQ ID NO: 609855 - RNA, 19 nt, Homo sapiens
  misc_RNA (1)...(19): siRNA sense strand
gcaacugccaccacucaag

SEQ ID NO: 609856 - RNA, 19 nt, Homo sapiens
  misc_RNA (1)...(19): siRNA sense strand
ggcgaaucccuuacacuga

SEQ ID NO: 609857 - RNA, 19 nt, Homo sapiens
  misc_RNA (1)...(19): siRNA sense strand
uuagacaggcccaaguuug

SEQ ID NO: 609858 - RNA, 19 nt, Homo sapiens
  misc_RNA (1)...(19): siRNA sense strand
uaagcuggagugugccuuu

SEQ ID NO: 609859 - RNA, 19 nt, Homo sapiens
  misc_RNA (1)...(19): siRNA sense strand
aagaugagugcuuagauau

SEQ ID NO: 609860 - RNA, 19 nt, Homo sapiens
  misc_RNA (1)...(19): siRNA sense strand
ugggagaaucuaaaucuga

SEQ ID NO: 609861 - RNA, 19 nt, Homo sapiens
  misc_RNA (1)...(19): siRNA sense strand
ccaagcuccauaagaaaga

SEQ ID NO: 609862 - RNA, 19 nt, Homo sapiens
  misc_RNA (1)...(19): siRNA sense strand
acgccuauauuaucaucaa

SEQ ID NO: 609863 - RNA, 19 nt, Homo sapiens
  misc_RNA (1)...(19): siRNA sense strand
ggcccugggucucucugaa

SEQ ID NO: 609864 - RNA, 19 nt, Homo sapiens
  misc_RNA (1)...(19): siRNA sense strand
gcccugggucucucugaaa

SEQ ID NO: 609865 - RNA, 19 nt, Homo sapiens
  misc_RNA (1)...(19): siRNA sense strand
ggaucccuuugccugugua

SEQ ID NO: 609866 - RNA, 19 nt, Homo sapiens
  misc_RNA (1)...(19): siRNA sense strand
gcaguuccucuuagucaag

SEQ ID NO: 609867 - RNA, 19 nt, Homo sapiens
  misc_RNA (1)...(19): siRNA sense strand
caagcugggcuaccauaca

SEQ ID NO: 609868 - RNA, 19 nt, Homo sapiens
  misc_RNA (1)...(19): siRNA sense strand
gaaccugacaccggugaca

SEQ ID NO: 609869 - RNA, 19 nt, Homo sapiens
  misc_RNA (1)...(19): siRNA sense strand
caagcuccauaagaaagau

SEQ ID NO: 609870 - RNA, 19 nt, Homo sapiens
  misc_RNA (1)...(19): siRNA sense strand
gccauaugcucugcaggau

SEQ ID NO: 609871 - RNA, 19 nt, Homo sapiens
  misc_RNA (1)...(19): siRNA sense strand
aagcugggcuaccauacag

SEQ ID NO: 609872 - RNA, 19 nt, Homo sapiens
  misc_RNA (1)...(19): siRNA sense strand
ggccauuccauuaccuuga

SEQ ID NO: 609873 - RNA, 19 nt, Homo sapiens
  misc_RNA (1)...(19): siRNA sense strand
gccaagcuccauaagaaag

SEQ ID NO: 609874 - RNA, 19 nt, Homo sapiens
  misc_RNA (1)...(19): siRNA sense strand
aggcagaaguaccuagagu

SEQ ID NO: 609875 - RNA, 19 nt, Homo sapiens
  misc_RNA (1)...(19): siRNA sense strand
caaccgugccaacaauaag

SEQ ID NO: 609876 - RNA, 19 nt, Homo sapiens
  misc_RNA (1)...(19): siRNA sense strand
gcuaccauacagggaauuu

SEQ ID NO: 609877 - RNA, 19 nt, Homo sapiens
  misc_RNA (1)...(19): siRNA sense strand
gcuggagugugccuuuggu

SEQ ID NO: 609878 - RNA, 19 nt, Homo sapiens
  misc_RNA (1)...(19): siRNA sense strand
ccacccaggauaauuccaa

SEQ ID NO: 609879 - RNA, 19 nt, Homo sapiens
  misc_RNA (1)...(19): siRNA sense strand
gguggcauccuauuuagac

SEQ ID NO: 609880 - RNA, 19 nt, Homo sapiens
  misc_RNA (1)...(19): siRNA sense strand
gaagcucaucaccgaagug

SEQ ID NO: 609881 - RNA, 19 nt, Homo sapiens
  misc_RNA (1)...(19): siRNA sense strand
caaguuaggguuggauguc

SEQ ID NO: 609882 - RNA, 19 nt, Homo sapiens
  misc_RNA (1)...(19): siRNA sense strand
ggacaacacucuuaaacua

SEQ ID NO: 609883 - RNA, 19 nt, Homo sapiens
  misc_RNA (1)...(19): siRNA sense strand
gcacaguaauuaugucuuu

SEQ ID NO: 609884 - RNA, 19 nt, Homo sapiens
  misc_RNA (1)...(19): siRNA sense strand
gaagcagugucaucaguua

SEQ ID NO: 609885 - RNA, 19 nt, Homo sapiens
  misc_RNA (1)...(19): siRNA sense strand
gagaauggcuagcaaguuc

SEQ ID NO: 609886 - RNA, 19 nt, Homo sapiens
  misc_RNA (1)...(19): siRNA sense strand
cuaaagagauugugcagaa

SEQ ID NO: 609887 - RNA, 19 nt, Homo sapiens
  misc_RNA (1)...(19): siRNA sense strand
aaacuaugcucucaaaugu

SEQ ID NO: 609888 - RNA, 19 nt, Homo sapiens
  misc_RNA (1)...(19): siRNA sense strand
ucaguuaaguuuaguccua

SEQ ID NO: 609889 - RNA, 19 nt, Homo sapiens
  misc_RNA (1)...(19): siRNA sense strand
gcucucaaauguacucuug

SEQ ID NO: 609890 - RNA, 19 nt, Homo sapiens
  misc_RNA (1)...(19): siRNA sense strand
aaacauacacuggucauaa

SEQ ID NO: 609891 - RNA, 19 nt, Homo sapiens
  misc_RNA (1)...(19): siRNA sense strand
gcaaggaagugccugaaaa

SEQ ID NO: 609892 - RNA, 19 nt, Homo sapiens
  misc_RNA (1)...(19): siRNA sense strand
gaaauuacaaggccauaca

SEQ ID NO: 609893 - RNA, 19 nt, Homo sapiens
  misc_RNA (1)...(19): siRNA sense strand
caaacuaugcucucaaaug

SEQ ID NO: 609894 - RNA, 19 nt, Homo sapiens
  misc_RNA (1)...(19): siRNA sense strand
gcaaguucuucugcugaua

SEQ ID NO: 609895 - RNA, 19 nt, Homo sapiens
  misc_RNA (1)...(19): siRNA sense strand
uuuggaaccuucagacuaa

SEQ ID NO: 609896 - RNA, 19 nt, Homo sapiens
  misc_RNA (1)...(19): siRNA sense strand
caucgcaucagcagcauua

SEQ ID NO: 609897 - RNA, 19 nt, Homo sapiens
  misc_RNA (1)...(19): siRNA sense strand
gguggaaaguggauugugu

SEQ ID NO: 609898 - RNA, 19 nt, Homo sapiens
  misc_RNA (1)...(19): siRNA sense strand
ccauacagauguugugauc

SEQ ID NO: 609899 - RNA, 19 nt, Homo sapiens
  misc_RNA (1)...(19): siRNA sense strand
acaauuaaacuguggauga

SEQ ID NO: 609900 - RNA, 19 nt, Homo sapiens
  misc_RNA (1)...(19): siRNA sense strand
uaugauggccucuguagaa

SEQ ID NO: 609901 - RNA, 19 nt, Homo sapiens
  misc_RNA (1)...(19): siRNA sense strand
uaaagagauugugcagaaa

SEQ ID NO: 609902 - RNA, 19 nt, Homo sapiens
  misc_RNA (1)...(19): siRNA sense strand
acaggaaagugucucaaga

SEQ ID NO: 609903 - RNA, 19 nt, Homo sapiens
  misc_RNA (1)...(19): siRNA sense strand
gauggccucuguagaaucu

SEQ ID NO: 609904 - RNA, 19 nt, Homo sapiens
  misc_RNA (1)...(19): siRNA sense strand
cccaaacuaugcucucaaa

SEQ ID NO: 609905 - RNA, 19 nt, Homo sapiens
  misc_RNA (1)...(19): siRNA sense strand
acaacacucuuaaacuaug

SEQ ID NO: 609906 - RNA, 19 nt, Homo sapiens
  misc_RNA (1)...(19): siRNA sense strand
caaccaaggagucaagaga

SEQ ID NO: 609907 - RNA, 19 nt, Homo sapiens
  misc_RNA (1)...(19): siRNA sense strand
ggaagcagugucaucaguu

SEQ ID NO: 609908 - RNA, 19 nt, Homo sapiens
  misc_RNA (1)...(19): siRNA sense strand
ugucaucaguuaaguuuag

SEQ ID NO: 609909 - RNA, 19 nt, Homo sapiens
  misc_RNA (1)...(19): siRNA sense strand
gacaacacucuuaaacuau

SEQ ID NO: 609910 - RNA, 19 nt, Homo sapiens
  misc_RNA (1)...(19): siRNA sense strand
cauccaaccuuauaaucuc

SEQ ID NO: 609911 - RNA, 19 nt, Homo sapiens
  misc_RNA (1)...(19): siRNA sense strand
auuaaacuguggaugagua

SEQ ID NO: 609912 - RNA, 19 nt, Homo sapiens
  misc_RNA (1)...(19): siRNA sense strand
caauuaaacuguggaugag

SEQ ID NO: 609913 - RNA, 19 nt, Homo sapiens
  misc_RNA (1)...(19): siRNA sense strand
aagagauugugcagaaauu

SEQ ID NO: 609914 - RNA, 19 nt, Homo sapiens
  misc_RNA (1)...(19): siRNA sense strand
cgauaacccuccugucucu

SEQ ID NO: 609915 - RNA, 19 nt, Homo sapiens
  misc_RNA (1)...(19): siRNA sense strand
ggagaauggcuagcaaguu

SEQ ID NO: 609916 - RNA, 19 nt, Homo sapiens
  misc_RNA (1)...(19): siRNA sense strand
aauccgccauccaaccuua

SEQ ID NO: 609917 - RNA, 19 nt, Homo sapiens
  misc_RNA (1)...(19): siRNA sense strand
uuacaaggccauacagaug

SEQ ID NO: 609918 - RNA, 19 nt, Homo sapiens
  misc_RNA (1)...(19): siRNA sense strand
gagcauaugauggaaaaua

SEQ ID NO: 609919 - RNA, 19 nt, Homo sapiens
  misc_RNA (1)...(19): siRNA sense strand
ucucaaauguacucuugug

SEQ ID NO: 609920 - RNA, 19 nt, Homo sapiens
  misc_RNA (1)...(19): siRNA sense strand
gacgauaacccuccugucu

SEQ ID NO: 609921 - RNA, 19 nt, Homo sapiens
  misc_RNA (1)...(19): siRNA sense strand
gcagugucaucaguuaagu

SEQ ID NO: 609922 - RNA, 19 nt, Homo sapiens
  misc_RNA (1)...(19): siRNA sense strand
ugcaucaggucaguguuua

SEQ ID NO: 609923 - RNA, 19 nt, Homo sapiens
  misc_RNA (1)...(19): siRNA sense strand
gaugugagaucuggaaaau

SEQ ID NO: 609924 - RNA, 19 nt, Homo sapiens
  misc_RNA (1)...(19): siRNA sense strand
caucaggucaguguuuaaa

SEQ ID NO: 609925 - RNA, 19 nt, Homo sapiens
  misc_RNA (1)...(19): siRNA sense strand
acaaggccauacagauguu

SEQ ID NO: 609926 - RNA, 19 nt, Homo sapiens
  misc_RNA (1)...(19): siRNA sense strand
gacuuugucugcucauucu

SEQ ID NO: 609927 - RNA, 19 nt, Homo sapiens
  misc_RNA (1)...(19): siRNA sense strand
guugugaucucagcagcuu

SEQ ID NO: 609928 - RNA, 19 nt, Homo sapiens
  misc_RNA (1)...(19): siRNA sense strand
caacacucuuaaacuaugg

SEQ ID NO: 609929 - RNA, 19 nt, Homo sapiens
  misc_RNA (1)...(19): siRNA sense strand
cggaagcagugucaucagu

SEQ ID NO: 609930 - RNA, 19 nt, Homo sapiens
  misc_RNA (1)...(19): siRNA sense strand
ggagucaagagacgccaaa

SEQ ID NO: 609931 - RNA, 19 nt, Homo sapiens
  misc_RNA (1)...(19): siRNA sense strand
uagcuaugauggccucugu

SEQ ID NO: 609932 - RNA, 19 nt, Homo sapiens
  misc_RNA (1)...(19): siRNA sense strand
gggagcauaugauggaaaa

SEQ ID NO: 609933 - RNA, 19 nt, Homo sapiens
  misc_RNA (1)...(19): siRNA sense strand
cuuauaaucucgggaucuu

SEQ ID NO: 609934 - RNA, 19 nt, Homo sapiens
  misc_RNA (1)...(19): siRNA sense strand
acuaugcucucaaauguac

SEQ ID NO: 609935 - RNA, 19 nt, Homo sapiens
  misc_RNA (1)...(19): siRNA sense strand
ggaaccuucagacuaaaga

SEQ ID NO: 609936 - RNA, 19 nt, Homo sapiens
  misc_RNA (1)...(19): siRNA sense strand
auacacuggucauaagaau

SEQ ID NO: 609937 - RNA, 19 nt, Homo sapiens
  misc_RNA (1)...(19): siRNA sense strand
cauucucacugcaacuuug

SEQ ID NO: 609938 - RNA, 19 nt, Homo sapiens
  misc_RNA (1)...(19): siRNA sense strand
ugacccaguuucugcuguu

SEQ ID NO: 609939 - RNA, 19 nt, Homo sapiens
  misc_RNA (1)...(19): siRNA sense strand
ugugagaucuggaaaaugu

SEQ ID NO: 609940 - RNA, 19 nt, Homo sapiens
  misc_RNA (1)...(19): siRNA sense strand
gauuccagucgucuuguuu

SEQ ID NO: 609941 - RNA, 19 nt, Homo sapiens
  misc_RNA (1)...(19): siRNA sense strand
cagcuugucauccuacaga

SEQ ID NO: 609942 - RNA, 19 nt, Homo sapiens
  misc_RNA (1)...(19): siRNA sense strand
aaagagauugugcagaaau

SEQ ID NO: 609943 - RNA, 19 nt, Homo sapiens
  misc_RNA (1)...(19): siRNA sense strand
gcaucaggucaguguuuaa

SEQ ID NO: 609944 - RNA, 19 nt, Homo sapiens
  misc_RNA (1)...(19): siRNA sense strand
gcuaugauggccucuguag

SEQ ID NO: 609945 - RNA, 19 nt, Homo sapiens
  misc_RNA (1)...(19): siRNA sense strand
ugaaggggcacaguaauua

SEQ ID NO: 609946 - RNA, 19 nt, Homo sapiens
  misc_RNA (1)...(19): siRNA sense strand
gaauggcuagcaaguucuu

SEQ ID NO: 609947 - RNA, 19 nt, Homo sapiens
  misc_RNA (1)...(19): siRNA sense strand
gaucucagcagcuugucau

SEQ ID NO: 609948 - RNA, 19 nt, Homo sapiens
  misc_RNA (1)...(19): siRNA sense strand
gucaagagacgccaaagca

SEQ ID NO: 609949 - RNA, 19 nt, Homo sapiens
  misc_RNA (1)...(19): siRNA sense strand
agagauugugcagaaauua

SEQ ID NO: 609950 - RNA, 19 nt, Homo sapiens
  misc_RNA (1)...(19): siRNA sense strand
aacauacacuggucauaag

SEQ ID NO: 609951 - RNA, 19 nt, Homo sapiens
  misc_RNA (1)...(19): siRNA sense strand
cucuuaaacuaugggauua

SEQ ID NO: 609952 - RNA, 19 nt, Homo sapiens
  misc_RNA (1)...(19): siRNA sense strand
uuggaaauaucggauguug

SEQ ID NO: 609953 - RNA, 19 nt, Homo sapiens
  misc_RNA (1)...(19): siRNA sense strand
caaguucuucugcugauag

SEQ ID NO: 609954 - RNA, 19 nt, Homo sapiens
  misc_RNA (1)...(19): siRNA sense strand
caguuucugcuguucauuu

SEQ ID NO: 609955 - RNA, 19 nt, Homo sapiens
  misc_RNA (1)...(19): siRNA sense strand
ccaaucagagcaaggaagu

SEQ ID NO: 609956 - RNA, 19 nt, Homo sapiens
  misc_RNA (1)...(19): siRNA sense strand
ucagauuccagucgucuug

SEQ ID NO: 609957 - RNA, 19 nt, Homo sapiens
  misc_RNA (1)...(19): siRNA sense strand
cgcaucagcagcauuagaa

SEQ ID NO: 609958 - RNA, 19 nt, Homo sapiens
  misc_RNA (1)...(19): siRNA sense strand
gagauugugcagaaauuac

SEQ ID NO: 609959 - RNA, 19 nt, Homo sapiens
  misc_RNA (1)...(19): siRNA sense strand
gagcaaggaagugccugaa

SEQ ID NO: 609960 - RNA, 19 nt, Homo sapiens
  misc_RNA (1)...(19): siRNA sense strand
ucacugcaacuuuggacaa

SEQ ID NO: 609961 - RNA, 19 nt, Homo sapiens
  misc_RNA (1)...(19): siRNA sense strand
ccuccugucucuuuuguaa

SEQ ID NO: 609962 - RNA, 19 nt, Homo sapiens
  misc_RNA (1)...(19): siRNA sense strand
gcaucagcagcauuagaaa

SEQ ID NO: 609963 - RNA, 19 nt, Homo sapiens
  misc_RNA (1)...(19): siRNA sense strand
ucagcagcuugucauccua

SEQ ID NO: 609964 - RNA, 19 nt, Homo sapiens
  misc_RNA (1)...(19): siRNA sense strand
acucuuaaacuaugggauu

SEQ ID NO: 609965 - RNA, 19 nt, Homo sapiens
  misc_RNA (1)...(19): siRNA sense strand
caacuuuggacaacacucu

SEQ ID NO: 609966 - RNA, 19 nt, Homo sapiens
  misc_RNA (1)...(19): siRNA sense strand
ccuucagacuaaagagauu

SEQ ID NO: 609967 - RNA, 19 nt, Homo sapiens
  misc_RNA (1)...(19): siRNA sense strand
aauggagaauggcuagcaa

SEQ ID NO: 609968 - RNA, 19 nt, Homo sapiens
  misc_RNA (1)...(19): siRNA sense strand
agugucaucaguuaaguuu

SEQ ID NO: 609969 - RNA, 19 nt, Homo sapiens
  misc_RNA (1)...(19): siRNA sense strand
cauacacuggucauaagaa

SEQ ID NO: 609970 - RNA, 19 nt, Homo sapiens
  misc_RNA (1)...(19): siRNA sense strand
cugcaucaggucaguguuu

SEQ ID NO: 609971 - RNA, 19 nt, Homo sapiens
  misc_RNA (1)...(19): siRNA sense strand
ccauccaaccuuauaaucu

SEQ ID NO: 609972 - RNA, 19 nt, Homo sapiens
  misc_RNA (1)...(19): siRNA sense strand
uuaaacuguggaugaguaa

SEQ ID NO: 609973 - RNA, 19 nt, Homo sapiens
  misc_RNA (1)...(19): siRNA sense strand
uacaaggccauacagaugu

SEQ ID NO: 609974 - RNA, 19 nt, Homo sapiens
  misc_RNA (1)...(19): siRNA sense strand
auaacccuccugucucuuu

SEQ ID NO: 609975 - RNA, 19 nt, Homo sapiens
  misc_RNA (1)...(19): siRNA sense strand
acaaagugcuggagauguu

SEQ ID NO: 609976 - RNA, 19 nt, Homo sapiens
  misc_RNA (1)...(19): siRNA sense strand
ggacaggauugacgaacug

SEQ ID NO: 609977 - RNA, 19 nt, Homo sapiens
  misc_RNA (1)...(19): siRNA sense strand
aaacgcaagucguggauga

SEQ ID NO: 609978 - RNA, 19 nt, Homo sapiens
  misc_RNA (1)...(19): siRNA sense strand
gcaagucguggaugaguaa

SEQ ID NO: 609979 - RNA, 19 nt, Homo sapiens
  misc_RNA (1)...(19): siRNA sense strand
gagcacuaccucagaauga

SEQ ID NO: 609980 - RNA, 19 nt, Homo sapiens
  misc_RNA (1)...(19): siRNA sense strand
ggaggaaggccuugugcaa

SEQ ID NO: 609981 - RNA, 19 nt, Homo sapiens
  misc_RNA (1)...(19): siRNA sense strand
gagaucugcuccaucaaca

SEQ ID NO: 609982 - RNA, 19 nt, Homo sapiens
  misc_RNA (1)...(19): siRNA sense strand
ggacaucuacaacgucaug

SEQ ID NO: 609983 - RNA, 19 nt, Homo sapiens
  misc_RNA (1)...(19): siRNA sense strand
gaggaugacuuugagaucu

SEQ ID NO: 609984 - RNA, 19 nt, Homo sapiens
  misc_RNA (1)...(19): siRNA sense strand
gaggaaggccuugugcaaa

SEQ ID NO: 609985 - RNA, 19 nt, Homo sapiens
  misc_RNA (1)...(19): siRNA sense strand
gcugggugaugguuccuuu

SEQ ID NO: 609986 - RNA, 19 nt, Homo sapiens
  misc_RNA (1)...(19): siRNA sense strand
agucagauccugcauaaga

SEQ ID NO: 609987 - RNA, 19 nt, Homo sapiens
  misc_RNA (1)...(19): siRNA sense strand
ggaugaggaugacuuugag

SEQ ID NO: 609988 - RNA, 19 nt, Homo sapiens
  misc_RNA (1)...(19): siRNA sense strand
gaggacagacccacguuug

SEQ ID NO: 609989 - RNA, 19 nt, Homo sapiens
  misc_RNA (1)...(19): siRNA sense strand
cagaagccauggacgacuu

SEQ ID NO: 609990 - RNA, 19 nt, Homo sapiens
  misc_RNA (1)...(19): siRNA sense strand
ggacagacccacguuugug

SEQ ID NO: 609991 - RNA, 19 nt, Homo sapiens
  misc_RNA (1)...(19): siRNA sense strand
ugcauaagaucgacaagga

SEQ ID NO: 609992 - RNA, 19 nt, Homo sapiens
  misc_RNA (1)...(19): siRNA sense strand
gagccucaccugccucauu

SEQ ID NO: 609993 - RNA, 19 nt, Homo sapiens
  misc_RNA (1)...(19): siRNA sense strand
uuugagaucugcuccauca

SEQ ID NO: 609994 - RNA, 19 nt, Homo sapiens
  misc_RNA (1)...(19): siRNA sense strand
ucagcagcacccacuauua

SEQ ID NO: 609995 - RNA, 19 nt, Homo sapiens
  misc_RNA (1)...(19): siRNA sense strand
gaacagcuucauccacaca

SEQ ID NO: 609996 - RNA, 19 nt, Homo sapiens
  misc_RNA (1)...(19): siRNA sense strand
gcacagaccgcagagaucu

SEQ ID NO: 609997 - RNA, 19 nt, Homo sapiens
  misc_RNA (1)...(19): siRNA sense strand
ugaccuggcugcccgcaau

SEQ ID NO: 609998 - RNA, 19 nt, Homo sapiens
  misc_RNA (1)...(19): siRNA sense strand
ugugggaaauguucaccua

SEQ ID NO: 609999 - RNA, 19 nt, Homo sapiens
  misc_RNA (1)...(19): siRNA sense strand
gcuccgagaugaccucaac

SEQ ID NO: 610000 - RNA, 19 nt, Homo sapiens
  misc_RNA (1)...(19): siRNA sense strand
guaagguguucaguggaaa

SEQ ID NO: 610001 - RNA, 19 nt, Homo sapiens
  misc_RNA (1)...(19): siRNA sense strand
aguaagguguucaguggaa

SEQ ID NO: 610002 - RNA, 19 nt, Homo sapiens
  misc_RNA (1)...(19): siRNA sense strand
agaaugaggaccuggagaa

SEQ ID NO: 610003 - RNA, 19 nt, Homo sapiens
  misc_RNA (1)...(19): siRNA sense strand
gcagcacccacuauuacuu

SEQ ID NO: 610004 - RNA, 19 nt, Homo sapiens
  misc_RNA (1)...(19): siRNA sense strand
cgcaagucguggaugagua

SEQ ID NO: 610005 - RNA, 19 nt, Homo sapiens
  misc_RNA (1)...(19): siRNA sense strand
cagcacccacuauuacuug

SEQ ID NO: 610006 - RNA, 19 nt, Homo sapiens
  misc_RNA (1)...(19): siRNA sense strand
cagcagcacccacuauuac

SEQ ID NO: 610007 - RNA, 19 nt, Homo sapiens
  misc_RNA (1)...(19): siRNA sense strand
ggaguccaagcgcuuuauu

SEQ ID NO: 610008 - RNA, 19 nt, Homo sapiens
  misc_RNA (1)...(19): siRNA sense strand
ccagaccaacuacgccuuu

SEQ ID NO: 610009 - RNA, 19 nt, Homo sapiens
  misc_RNA (1)...(19): siRNA sense strand
ccaggaugaggaugacuuu

SEQ ID NO: 610010 - RNA, 19 nt, Homo sapiens
  misc_RNA (1)...(19): siRNA sense strand
augaggaccuggagaagau

SEQ ID NO: 610011 - RNA, 19 nt, Homo sapiens
  misc_RNA (1)...(19): siRNA sense strand
gucagauccugcauaagau

SEQ ID NO: 610012 - RNA, 19 nt, Homo sapiens
  misc_RNA (1)...(19): siRNA sense strand
ccacaaagugcuggagaug

SEQ ID NO: 610013 - RNA, 19 nt, Homo sapiens
  misc_RNA (1)...(19): siRNA sense strand
gccacaaagugcuggagau

SEQ ID NO: 610014 - RNA, 19 nt, Homo sapiens
  misc_RNA (1)...(19): siRNA sense strand
gaccaacuacgccuuugug

SEQ ID NO: 610015 - RNA, 19 nt, Homo sapiens
  misc_RNA (1)...(19): siRNA sense strand
caggauugacgaacuguau

SEQ ID NO: 610016 - RNA, 19 nt, Homo sapiens
  misc_RNA (1)...(19): siRNA sense strand
gaagggccgagaacuacug

SEQ ID NO: 610017 - RNA, 19 nt, Homo sapiens
  misc_RNA (1)...(19): siRNA sense strand
cggacaagcugcacaucca

SEQ ID NO: 610018 - RNA, 19 nt, Homo sapiens
  misc_RNA (1)...(19): siRNA sense strand
cagggaagacggugagugu

SEQ ID NO: 610019 - RNA, 19 nt, Homo sapiens
  misc_RNA (1)...(19): siRNA sense strand
caacuucuccaccaacaac

SEQ ID NO: 610020 - RNA, 19 nt, Homo sapiens
  misc_RNA (1)...(19): siRNA sense strand
gccaacuucuccaccaaca

SEQ ID NO: 610021 - RNA, 19 nt, Homo sapiens
  misc_RNA (1)...(19): siRNA sense strand
ggucagcagcacccacuau

SEQ ID NO: 610022 - RNA, 19 nt, Homo sapiens
  misc_RNA (1)...(19): siRNA sense strand
gggaagggccgagaacuac

SEQ ID NO: 610023 - RNA, 19 nt, Homo sapiens
  misc_RNA (1)...(19): siRNA sense strand
guucccaccucaucacucu

SEQ ID NO: 610024 - RNA, 19 nt, Homo sapiens
  misc_RNA (1)...(19): siRNA sense strand
gggcuucccggacaggauu

SEQ ID NO: 610025 - RNA, 19 nt, Homo sapiens
  misc_RNA (1)...(19): siRNA sense strand
gcaaacgcaagucguggau

SEQ ID NO: 610026 - RNA, 19 nt, Homo sapiens
  misc_RNA (1)...(19): siRNA sense strand
agccucaccugccucauug

SEQ ID NO: 610027 - RNA, 19 nt, Homo sapiens
  misc_RNA (1)...(19): siRNA sense strand
gccagggccagaccaacua

SEQ ID NO: 610028 - RNA, 19 nt, Homo sapiens
  misc_RNA (1)...(19): siRNA sense strand
gaaaccucauccgccucua

SEQ ID NO: 610029 - RNA, 19 nt, Homo sapiens
  misc_RNA (1)...(19): siRNA sense strand
aggaugaggaugacuuuga

SEQ ID NO: 610030 - RNA, 19 nt, Homo sapiens
  misc_RNA (1)...(19): siRNA sense strand
cagcagacaagauccagau

SEQ ID NO: 610031 - RNA, 19 nt, Homo sapiens
  misc_RNA (1)...(19): siRNA sense strand
gagaagcugggugaugguu

SEQ ID NO: 610032 - RNA, 19 nt, Homo sapiens
  misc_RNA (1)...(19): siRNA sense strand
gggugacacugugggaaau

SEQ ID NO: 610033 - RNA, 19 nt, Homo sapiens
  misc_RNA (1)...(19): siRNA sense strand
ucacaagccagaggacaga

SEQ ID NO: 610034 - RNA, 19 nt, Homo sapiens
  misc_RNA (1)...(19): siRNA sense strand
gaaugaggaccuggagaag

SEQ ID NO: 610035 - RNA, 19 nt, Homo sapiens
  misc_RNA (1)...(19): siRNA sense strand
aggaaggccuugugcaaac

SEQ ID NO: 610036 - RNA, 19 nt, Homo sapiens
  misc_RNA (1)...(19): siRNA sense strand
ucacccgccugucccacuu

SEQ ID NO: 610037 - RNA, 19 nt, Homo sapiens
  misc_RNA (1)...(19): siRNA sense strand
ggaaggccuugugcaaacg

SEQ ID NO: 610038 - RNA, 19 nt, Homo sapiens
  misc_RNA (1)...(19): siRNA sense strand
ggauugacgaacuguaucu

SEQ ID NO: 610039 - RNA, 19 nt, Homo sapiens
  misc_RNA (1)...(19): siRNA sense strand
gugacacugugggaaaugu

SEQ ID NO: 610040 - RNA, 19 nt, Homo sapiens
  misc_RNA (1)...(19): siRNA sense strand
cuacagcaggagugcauga

SEQ ID NO: 610041 - RNA, 19 nt, Homo sapiens
  misc_RNA (1)...(19): siRNA sense strand
uggcaccucugggaucguu

SEQ ID NO: 610042 - RNA, 19 nt, Homo sapiens
  misc_RNA (1)...(19): siRNA sense strand
uggagauguucgacuggaa

SEQ ID NO: 610043 - RNA, 19 nt, Homo sapiens
  misc_RNA (1)...(19): siRNA sense strand
gucagcagcacccacuauu

SEQ ID NO: 610044 - RNA, 19 nt, Homo sapiens
  misc_RNA (1)...(19): siRNA sense strand
cagaccaacuacgccuuug

SEQ ID NO: 610045 - RNA, 19 nt, Homo sapiens
  misc_RNA (1)...(19): siRNA sense strand
ugcgagcacuaccucagaa

SEQ ID NO: 610046 - RNA, 19 nt, Homo sapiens
  misc_RNA (1)...(19): siRNA sense strand
gaguccaagcgcuuuauuc

SEQ ID NO: 610047 - RNA, 19 nt, Homo sapiens
  misc_RNA (1)...(19): siRNA sense strand
ggaaacaccuuaucagaaa

SEQ ID NO: 610048 - RNA, 19 nt, Homo sapiens
  misc_RNA (1)...(19): siRNA sense strand
ggcagcagcuaucauauua

SEQ ID NO: 610049 - RNA, 19 nt, Homo sapiens
  misc_RNA (1)...(19): siRNA sense strand
caucuuaaguugcaucaua

SEQ ID NO: 610050 - RNA, 19 nt, Homo sapiens
  misc_RNA (1)...(19): siRNA sense strand
ggaugacgauggcauuuaa

SEQ ID NO: 610051 - RNA, 19 nt, Homo sapiens
  misc_RNA (1)...(19): siRNA sense strand
gcaaagcaguagccaaaga

SEQ ID NO: 610052 - RNA, 19 nt, Homo sapiens
  misc_RNA (1)...(19): siRNA sense strand
ggccauagguuuaaugaug

SEQ ID NO: 610053 - RNA, 19 nt, Homo sapiens
  misc_RNA (1)...(19): siRNA sense strand
gaacaucucaccaaucuag

SEQ ID NO: 610054 - RNA, 19 nt, Homo sapiens
  misc_RNA (1)...(19): siRNA sense strand
gaggaaguauuacaaagug

SEQ ID NO: 610055 - RNA, 19 nt, Homo sapiens
  misc_RNA (1)...(19): siRNA sense strand
gaagagaagagcaagaaga

SEQ ID NO: 610056 - RNA, 19 nt, Homo sapiens
  misc_RNA (1)...(19): siRNA sense strand
agacgaaggucauuuagug

SEQ ID NO: 610057 - RNA, 19 nt, Homo sapiens
  misc_RNA (1)...(19): siRNA sense strand
ugaaggaaguguggaagua

SEQ ID NO: 610058 - RNA, 19 nt, Homo sapiens
  misc_RNA (1)...(19): siRNA sense strand
aaagagagcccaaaccauu

SEQ ID NO: 610059 - RNA, 19 nt, Homo sapiens
  misc_RNA (1)...(19): siRNA sense strand
ucuagaagcuccuauguuc

SEQ ID NO: 610060 - RNA, 19 nt, Homo sapiens
  misc_RNA (1)...(19): siRNA sense strand
gacgauuacuucacaaaga

SEQ ID NO: 610061 - RNA, 19 nt, Homo sapiens
  misc_RNA (1)...(19): siRNA sense strand
aaugaugucuuggaaguua

SEQ ID NO: 610062 - RNA, 19 nt, Homo sapiens
  misc_RNA (1)...(19): siRNA sense strand
gauggcagcuguaaugucu

SEQ ID NO: 610063 - RNA, 19 nt, Homo sapiens
  misc_RNA (1)...(19): siRNA sense strand
gaaguuaagaggaaguauu

SEQ ID NO: 610064 - RNA, 19 nt, Homo sapiens
  misc_RNA (1)...(19): siRNA sense strand
cauuauagcugagaagaga

SEQ ID NO: 610065 - RNA, 19 nt, Homo sapiens
  misc_RNA (1)...(19): siRNA sense strand
cagcuacuuugcacuuaua

SEQ ID NO: 610066 - RNA, 19 nt, Homo sapiens
  misc_RNA (1)...(19): siRNA sense strand
caacguccauucuuucaca

SEQ ID NO: 610067 - RNA, 19 nt, Homo sapiens
  misc_RNA (1)...(19): siRNA sense strand
gauauuuggcucugucuuu

SEQ ID NO: 610068 - RNA, 19 nt, Homo sapiens
  misc_RNA (1)...(19): siRNA sense strand
uauauucucucgugguuga

SEQ ID NO: 610069 - RNA, 19 nt, Homo sapiens
  misc_RNA (1)...(19): siRNA sense strand
gggaaacaccuuaucagaa

SEQ ID NO: 610070 - RNA, 19 nt, Homo sapiens
  misc_RNA (1)...(19): siRNA sense strand
gcgagacgaaggucauuua

SEQ ID NO: 610071 - RNA, 19 nt, Homo sapiens
  misc_RNA (1)...(19): siRNA sense strand
gaaauucucuggggccaua

SEQ ID NO: 610072 - RNA, 19 nt, Homo sapiens
  misc_RNA (1)...(19): siRNA sense strand
gcucauagccuuucaucau

SEQ ID NO: 610073 - RNA, 19 nt, Homo sapiens
  misc_RNA (1)...(19): siRNA sense strand
gagaagagaagagcaagaa

SEQ ID NO: 610074 - RNA, 19 nt, Homo sapiens
  misc_RNA (1)...(19): siRNA sense strand
caucauggcgaucuauuaa

SEQ ID NO: 610075 - RNA, 19 nt, Homo sapiens
  misc_RNA (1)...(19): siRNA sense strand
gcuguaaugucuacuucaa

SEQ ID NO: 610076 - RNA, 19 nt, Homo sapiens
  misc_RNA (1)...(19): siRNA sense strand
aaagauggcagcuguaaug

SEQ ID NO: 610077 - RNA, 19 nt, Homo sapiens
  misc_RNA (1)...(19): siRNA sense strand
gcuaucauauuaucaaugc

SEQ ID NO: 610078 - RNA, 19 nt, Homo sapiens
  misc_RNA (1)...(19): siRNA sense strand
cagcagcuaucauauuauc

SEQ ID NO: 610079 - RNA, 19 nt, Homo sapiens
  misc_RNA (1)...(19): siRNA sense strand
ucauggcgaucuauuaaau

SEQ ID NO: 610080 - RNA, 19 nt, Homo sapiens
  misc_RNA (1)...(19): siRNA sense strand
acacaugaauauagggaaa

SEQ ID NO: 610081 - RNA, 19 nt, Homo sapiens
  misc_RNA (1)...(19): siRNA sense strand
caaguggcgccauauguuu

SEQ ID NO: 610082 - RNA, 19 nt, Homo sapiens
  misc_RNA (1)...(19): siRNA sense strand
gaauauagggaaacaccuu

SEQ ID NO: 610083 - RNA, 19 nt, Homo sapiens
  misc_RNA (1)...(19): siRNA sense strand
aaggaaguguggaaguaua

SEQ ID NO: 610084 - RNA, 19 nt, Homo sapiens
  misc_RNA (1)...(19): siRNA sense strand
gauccuccaguccaucuua

SEQ ID NO: 610085 - RNA, 19 nt, Homo sapiens
  misc_RNA (1)...(19): siRNA sense strand
gcagcuaucauauuaucaa

SEQ ID NO: 610086 - RNA, 19 nt, Homo sapiens
  misc_RNA (1)...(19): siRNA sense strand
ggcaacugcucgaaagaga

SEQ ID NO: 610087 - RNA, 19 nt, Homo sapiens
  misc_RNA (1)...(19): siRNA sense strand
ggaaguauuacaaagugaa

SEQ ID NO: 610088 - RNA, 19 nt, Homo sapiens
  misc_RNA (1)...(19): siRNA sense strand
uuaaugaugucuuggaagu

SEQ ID NO: 610089 - RNA, 19 nt, Homo sapiens
  misc_RNA (1)...(19): siRNA sense strand
uggaacaucucaccaaucu

SEQ ID NO: 610090 - RNA, 19 nt, Homo sapiens
  misc_RNA (1)...(19): siRNA sense strand
gacaccaaguggcgccaua

SEQ ID NO: 610091 - RNA, 19 nt, Homo sapiens
  misc_RNA (1)...(19): siRNA sense strand
gaaacaccuuaucagaaag

SEQ ID NO: 610092 - RNA, 19 nt, Homo sapiens
  misc_RNA (1)...(19): siRNA sense strand
gaaggaaguguggaaguau

SEQ ID NO: 610093 - RNA, 19 nt, Homo sapiens
  misc_RNA (1)...(19): siRNA sense strand
uuacaaagugaacugcuua

SEQ ID NO: 610094 - RNA, 19 nt, Homo sapiens
  misc_RNA (1)...(19): siRNA sense strand
gccauagguuuaaugaugu

SEQ ID NO: 610095 - RNA, 19 nt, Homo sapiens
  misc_RNA (1)...(19): siRNA sense strand
ccgcaaagcaguagccaaa

SEQ ID NO: 610096 - RNA, 19 nt, Homo sapiens
  misc_RNA (1)...(19): siRNA sense strand
gggaagcuuugccucaugu

SEQ ID NO: 610097 - RNA, 19 nt, Homo sapiens
  misc_RNA (1)...(19): siRNA sense strand
ccaaguggcgccauauguu

SEQ ID NO: 610098 - RNA, 19 nt, Homo sapiens
  misc_RNA (1)...(19): siRNA sense strand
caaauuagucaacgaccaa

SEQ ID NO: 610099 - RNA, 19 nt, Homo sapiens
  misc_RNA (1)...(19): siRNA sense strand
gaaagagagcccaaaccau

SEQ ID NO: 610100 - RNA, 19 nt, Homo sapiens
  misc_RNA (1)...(19): siRNA sense strand
cagcagcuccacauagaaa

SEQ ID NO: 610101 - RNA, 19 nt, Homo sapiens
  misc_RNA (1)...(19): siRNA sense strand
ccaaaccaccauaggauau

SEQ ID NO: 610102 - RNA, 19 nt, Homo sapiens
  misc_RNA (1)...(19): siRNA sense strand
gguuaucgcuguguuacug

SEQ ID NO: 610103 - RNA, 19 nt, Homo sapiens
  misc_RNA (1)...(19): siRNA sense strand
uaugagagaugggaagcuu

SEQ ID NO: 610104 - RNA, 19 nt, Homo sapiens
  misc_RNA (1)...(19): siRNA sense strand
guaacuauuguccaugaaa

SEQ ID NO: 610105 - RNA, 19 nt, Homo sapiens
  misc_RNA (1)...(19): siRNA sense strand
uugacaacguccauucuuu

SEQ ID NO: 610106 - RNA, 19 nt, Homo sapiens
  misc_RNA (1)...(19): siRNA sense strand
ucuccugacuuuaaacaga

SEQ ID NO: 610107 - RNA, 19 nt, Homo sapiens
  misc_RNA (1)...(19): siRNA sense strand
ccacuuccgccacacauga

SEQ ID NO: 610108 - RNA, 19 nt, Homo sapiens
  misc_RNA (1)...(19): siRNA sense strand
guuuaaugaugucuuggaa

SEQ ID NO: 610109 - RNA, 19 nt, Homo sapiens
  misc_RNA (1)...(19): siRNA sense strand
cgguaacuauuguccauga

SEQ ID NO: 610110 - RNA, 19 nt, Homo sapiens
  misc_RNA (1)...(19): siRNA sense strand
caacuucuccgcuauacag

SEQ ID NO: 610111 - RNA, 19 nt, Homo sapiens
  misc_RNA (1)...(19): siRNA sense strand
cgaaagagagcccaaacca

SEQ ID NO: 610112 - RNA, 19 nt, Homo sapiens
  misc_RNA (1)...(19): siRNA sense strand
ggaggaugacgauggcauu

SEQ ID NO: 610113 - RNA, 19 nt, Homo sapiens
  misc_RNA (1)...(19): siRNA sense strand
gguagaaggaacaguuaga

SEQ ID NO: 610114 - RNA, 19 nt, Homo sapiens
  misc_RNA (1)...(19): siRNA sense strand
cagcuguaaugucuacuuc

SEQ ID NO: 610115 - RNA, 19 nt, Homo sapiens
  misc_RNA (1)...(19): siRNA sense strand
acaaagauggcagcuguaa

SEQ ID NO: 610116 - RNA, 19 nt, Homo sapiens
  misc_RNA (1)...(19): siRNA sense strand
gguaacuauuguccaugaa

SEQ ID NO: 610117 - RNA, 19 nt, Homo sapiens
  misc_RNA (1)...(19): siRNA sense strand
uguagaaucccaaauguag

SEQ ID NO: 610118 - RNA, 19 nt, Homo sapiens
  misc_RNA (1)...(19): siRNA sense strand
ucaucauggcgaucuauua

SEQ ID NO: 610119 - RNA, 19 nt, Homo sapiens
  misc_RNA (1)...(19): siRNA sense strand
uagguuuaaugaugucuug

SEQ ID NO: 610120 - RNA, 19 nt, Homo sapiens
  misc_RNA (1)...(19): siRNA sense strand
caaagcaguagccaaagau

SEQ ID NO: 610121 - RNA, 19 nt, Homo sapiens
  misc_RNA (1)...(19): siRNA sense strand
ugacaacguccauucuuuc

SEQ ID NO: 610122 - RNA, 19 nt, Homo sapiens
  misc_RNA (1)...(19): siRNA sense strand
aagcucuccugacuuuaaa

SEQ ID NO: 610123 - RNA, 19 nt, Homo sapiens
  misc_RNA (1)...(19): siRNA sense strand
gaggaugacgauggcauuu

SEQ ID NO: 610124 - RNA, 19 nt, Homo sapiens
  misc_RNA (1)...(19): siRNA sense strand
gugguagaaggaacaguua

SEQ ID NO: 610125 - RNA, 19 nt, Homo sapiens
  misc_RNA (1)...(19): siRNA sense strand
ucagcuacuuugcacuuau

SEQ ID NO: 610126 - RNA, 19 nt, Homo sapiens
  misc_RNA (1)...(19): siRNA sense strand
cuuauauucucucgugguu

SEQ ID NO: 610127 - RNA, 19 nt, Homo sapiens
  misc_RNA (1)...(19): siRNA sense strand
ucuguagaaucccaaaugu

SEQ ID NO: 610128 - RNA, 19 nt, Homo sapiens
  misc_RNA (1)...(19): siRNA sense strand
accagcagcuccacauaga

SEQ ID NO: 610129 - RNA, 19 nt, Homo sapiens
  misc_RNA (1)...(19): siRNA sense strand
cggcagcagcuaucauauu

SEQ ID NO: 610130 - RNA, 19 nt, Homo sapiens
  misc_RNA (1)...(19): siRNA sense strand
aagaggaaguauuacaaag

SEQ ID NO: 610131 - RNA, 19 nt, Homo sapiens
  misc_RNA (1)...(19): siRNA sense strand
ugagagaugggaagcuuug

SEQ ID NO: 610132 - RNA, 19 nt, Homo sapiens
  misc_RNA (1)...(19): siRNA sense strand
gacaacguccauucuuuca

SEQ ID NO: 610133 - RNA, 19 nt, Homo sapiens
  misc_RNA (1)...(19): siRNA sense strand
cucauagccuuucaucaug

SEQ ID NO: 610134 - RNA, 19 nt, Homo sapiens
  misc_RNA (1)...(19): siRNA sense strand
aauauagggaaacaccuua

SEQ ID NO: 610135 - RNA, 19 nt, Homo sapiens
  misc_RNA (1)...(19): siRNA sense strand
gaccagcagcuccacauag

SEQ ID NO: 610136 - RNA, 19 nt, Homo sapiens
  misc_RNA (1)...(19): siRNA sense strand
caaagugaacugcuuacag

SEQ ID NO: 610137 - RNA, 19 nt, Homo sapiens
  misc_RNA (1)...(19): siRNA sense strand
gaagagcaagaagacgauu

SEQ ID NO: 610138 - RNA, 19 nt, Homo sapiens
  misc_RNA (1)...(19): siRNA sense strand
guuaagaggaaguauuaca

SEQ ID NO: 610139 - RNA, 19 nt, Homo sapiens
  misc_RNA (1)...(19): siRNA sense strand
acgauuacuucacaaagau

SEQ ID NO: 610140 - RNA, 19 nt, Homo sapiens
  misc_RNA (1)...(19): siRNA sense strand
uccaguccaucuuaaguug

SEQ ID NO: 610141 - RNA, 19 nt, Homo sapiens
  misc_RNA (1)...(19): siRNA sense strand
gacccaaaccaccauagga

SEQ ID NO: 610142 - RNA, 19 nt, Homo sapiens
  misc_RNA (1)...(19): siRNA sense strand
gcccaacuucuccgcuaua

SEQ ID NO: 610143 - RNA, 19 nt, Homo sapiens
  misc_RNA (1)...(19): siRNA sense strand
gcaauuggacuggaaagac

SEQ ID NO: 610144 - RNA, 19 nt, Homo sapiens
  misc_RNA (1)...(19): siRNA sense strand
uacggcagcagcuaucaua

SEQ ID NO: 610145 - RNA, 19 nt, Homo sapiens
  misc_RNA (1)...(19): siRNA sense strand
aagcaguagccaaagauaa

SEQ ID NO: 610146 - RNA, 19 nt, Homo sapiens
  misc_RNA (1)...(19): siRNA sense strand
ugacgauggcauuuaaaga

SEQ ID NO: 610147 - RNA, 19 nt, Homo sapiens
  misc_RNA (1)...(19): siRNA sense strand
ggaaacaccuuaucagaaa

SEQ ID NO: 610148 - RNA, 19 nt, Homo sapiens
  misc_RNA (1)...(19): siRNA sense strand
ggcagcagcuaucauauua

SEQ ID NO: 610149 - RNA, 19 nt, Homo sapiens
  misc_RNA (1)...(19): siRNA sense strand
caucuuaaguugcaucaua

SEQ ID NO: 610150 - RNA, 19 nt, Homo sapiens
  misc_RNA (1)...(19): siRNA sense strand
ggaugacgauggcauuuaa

SEQ ID NO: 610151 - RNA, 19 nt, Homo sapiens
  misc_RNA (1)...(19): siRNA sense strand
gcaaagcaguagccaaaga

SEQ ID NO: 610152 - RNA, 19 nt, Homo sapiens
  misc_RNA (1)...(19): siRNA sense strand
ggccauagguuuaaugaug

SEQ ID NO: 610153 - RNA, 19 nt, Homo sapiens
  misc_RNA (1)...(19): siRNA sense strand
gaacaucucaccaaucuag

SEQ ID NO: 610154 - RNA, 19 nt, Homo sapiens
  misc_RNA (1)...(19): siRNA sense strand
gaggaaguauuacaaagug

SEQ ID NO: 610155 - RNA, 19 nt, Homo sapiens
  misc_RNA (1)...(19): siRNA sense strand
gaagagaagagcaagaaga

SEQ ID NO: 610156 - RNA, 19 nt, Homo sapiens
  misc_RNA (1)...(19): siRNA sense strand
agacgaaggucauuuagug

SEQ ID NO: 610157 - RNA, 19 nt, Homo sapiens
  misc_RNA (1)...(19): siRNA sense strand
ugaaggaaguguggaagua

SEQ ID NO: 610158 - RNA, 19 nt, Homo sapiens
  misc_RNA (1)...(19): siRNA sense strand
aaagagagcccaaaccauu

SEQ ID NO: 610159 - RNA, 19 nt, Homo sapiens
  misc_RNA (1)...(19): siRNA sense strand
ucuagaagcuccuauguuc

SEQ ID NO: 610160 - RNA, 19 nt, Homo sapiens
  misc_RNA (1)...(19): siRNA sense strand
gacgauuacuucacaaaga

SEQ ID NO: 610161 - RNA, 19 nt, Homo sapiens
  misc_RNA (1)...(19): siRNA sense strand
aaugaugucuuggaaguua

SEQ ID NO: 610162 - RNA, 19 nt, Homo sapiens
  misc_RNA (1)...(19): siRNA sense strand
gauggcagcuguaaugucu

SEQ ID NO: 610163 - RNA, 19 nt, Homo sapiens
  misc_RNA (1)...(19): siRNA sense strand
gaaguuaagaggaaguauu

SEQ ID NO: 610164 - RNA, 19 nt, Homo sapiens
  misc_RNA (1)...(19): siRNA sense strand
cauuauagcugagaagaga

SEQ ID NO: 610165 - RNA, 19 nt, Homo sapiens
  misc_RNA (1)...(19): siRNA sense strand
cagcuacuuugcacuuaua

SEQ ID NO: 610166 - RNA, 19 nt, Homo sapiens
  misc_RNA (1)...(19): siRNA sense strand
caacguccauucuuucaca

SEQ ID NO: 610167 - RNA, 19 nt, Homo sapiens
  misc_RNA (1)...(19): siRNA sense strand
gauauuuggcucugucuuu

SEQ ID NO: 610168 - RNA, 19 nt, Homo sapiens
  misc_RNA (1)...(19): siRNA sense strand
uauauucucucgugguuga

SEQ ID NO: 610169 - RNA, 19 nt, Homo sapiens
  misc_RNA (1)...(19): siRNA sense strand
gggaaacaccuuaucagaa

SEQ ID NO: 610170 - RNA, 19 nt, Homo sapiens
  misc_RNA (1)...(19): siRNA sense strand
gcgagacgaaggucauuua

SEQ ID NO: 610171 - RNA, 19 nt, Homo sapiens
  misc_RNA (1)...(19): siRNA sense strand
gaaauucucuggggccaua

SEQ ID NO: 610172 - RNA, 19 nt, Homo sapiens
  misc_RNA (1)...(19): siRNA sense strand
gcucauagccuuucaucau

SEQ ID NO: 610173 - RNA, 19 nt, Homo sapiens
  misc_RNA (1)...(19): siRNA sense strand
gagaagagaagagcaagaa

SEQ ID NO: 610174 - RNA, 19 nt, Homo sapiens
  misc_RNA (1)...(19): siRNA sense strand
caucauggcgaucuauuaa

SEQ ID NO: 610175 - RNA, 19 nt, Homo sapiens
  misc_RNA (1)...(19): siRNA sense strand
gcuguaaugucuacuucaa

SEQ ID NO: 610176 - RNA, 19 nt, Homo sapiens
  misc_RNA (1)...(19): siRNA sense strand
aaagauggcagcuguaaug

SEQ ID NO: 610177 - RNA, 19 nt, Homo sapiens
  misc_RNA (1)...(19): siRNA sense strand
gcuaucauauuaucaaugc

SEQ ID NO: 610178 - RNA, 19 nt, Homo sapiens
  misc_RNA (1)...(19): siRNA sense strand
cagcagcuaucauauuauc

SEQ ID NO: 610179 - RNA, 19 nt, Homo sapiens
  misc_RNA (1)...(19): siRNA sense strand
ucauggcgaucuauuaaau

SEQ ID NO: 610180 - RNA, 19 nt, Homo sapiens
  misc_RNA (1)...(19): siRNA sense strand
acacaugaauauagggaaa

SEQ ID NO: 610181 - RNA, 19 nt, Homo sapiens
  misc_RNA (1)...(19): siRNA sense strand
caaguggcgccauauguuu

SEQ ID NO: 610182 - RNA, 19 nt, Homo sapiens
  misc_RNA (1)...(19): siRNA sense strand
gaauauagggaaacaccuu

SEQ ID NO: 610183 - RNA, 19 nt, Homo sapiens
  misc_RNA (1)...(19): siRNA sense strand
aaggaaguguggaaguaua

SEQ ID NO: 610184 - RNA, 19 nt, Homo sapiens
  misc_RNA (1)...(19): siRNA sense strand
gauccuccaguccaucuua

SEQ ID NO: 610185 - RNA, 19 nt, Homo sapiens
  misc_RNA (1)...(19): siRNA sense strand
gcagcuaucauauuaucaa

SEQ ID NO: 610186 - RNA, 19 nt, Homo sapiens
  misc_RNA (1)...(19): siRNA sense strand
ggcaacugcucgaaagaga

SEQ ID NO: 610187 - RNA, 19 nt, Homo sapiens
  misc_RNA (1)...(19): siRNA sense strand
ggaaguauuacaaagugaa

SEQ ID NO: 610188 - RNA, 19 nt, Homo sapiens
  misc_RNA (1)...(19): siRNA sense strand
uuaaugaugucuuggaagu

SEQ ID NO: 610189 - RNA, 19 nt, Homo sapiens
  misc_RNA (1)...(19): siRNA sense strand
uggaacaucucaccaaucu

SEQ ID NO: 610190 - RNA, 19 nt, Homo sapiens
  misc_RNA (1)...(19): siRNA sense strand
gacaccaaguggcgccaua

SEQ ID NO: 610191 - RNA, 19 nt, Homo sapiens
  misc_RNA (1)...(19): siRNA sense strand
gaaacaccuuaucagaaag

SEQ ID NO: 610192 - RNA, 19 nt, Homo sapiens
  misc_RNA (1)...(19): siRNA sense strand
gaaggaaguguggaaguau

SEQ ID NO: 610193 - RNA, 19 nt, Homo sapiens
  misc_RNA (1)...(19): siRNA sense strand
uuacaaagugaacugcuua

SEQ ID NO: 610194 - RNA, 19 nt, Homo sapiens
  misc_RNA (1)...(19): siRNA sense strand
gccauagguuuaaugaugu

SEQ ID NO: 610195 - RNA, 19 nt, Homo sapiens
  misc_RNA (1)...(19): siRNA sense strand
ccgcaaagcaguagccaaa

SEQ ID NO: 610196 - RNA, 19 nt, Homo sapiens
  misc_RNA (1)...(19): siRNA sense strand
gggaagcuuugccucaugu

SEQ ID NO: 610197 - RNA, 19 nt, Homo sapiens
  misc_RNA (1)...(19): siRNA sense strand
ccaaguggcgccauauguu

SEQ ID NO: 610198 - RNA, 19 nt, Homo sapiens
  misc_RNA (1)...(19): siRNA sense strand
caaauuagucaacgaccaa

SEQ ID NO: 610199 - RNA, 19 nt, Homo sapiens
  misc_RNA (1)...(19): siRNA sense strand
gaaagagagcccaaaccau

SEQ ID NO: 610200 - RNA, 19 nt, Homo sapiens
  misc_RNA (1)...(19): siRNA sense strand
cagcagcuccacauagaaa

SEQ ID NO: 610201 - RNA, 19 nt, Homo sapiens
  misc_RNA (1)...(19): siRNA sense strand
ccaaaccaccauaggauau

SEQ ID NO: 610202 - RNA, 19 nt, Homo sapiens
  misc_RNA (1)...(19): siRNA sense strand
gguuaucgcuguguuacug

SEQ ID NO: 610203 - RNA, 19 nt, Homo sapiens
  misc_RNA (1)...(19): siRNA sense strand
uaugagagaugggaagcuu

SEQ ID NO: 610204 - RNA, 19 nt, Homo sapiens
  misc_RNA (1)...(19): siRNA sense strand
guaacuauuguccaugaaa

SEQ ID NO: 610205 - RNA, 19 nt, Homo sapiens
  misc_RNA (1)...(19): siRNA sense strand
uugacaacguccauucuuu

SEQ ID NO: 610206 - RNA, 19 nt, Homo sapiens
  misc_RNA (1)...(19): siRNA sense strand
ucuccugacuuuaaacaga

SEQ ID NO: 610207 - RNA, 19 nt, Homo sapiens
  misc_RNA (1)...(19): siRNA sense strand
ccacuuccgccacacauga

SEQ ID NO: 610208 - RNA, 19 nt, Homo sapiens
  misc_RNA (1)...(19): siRNA sense strand
guuuaaugaugucuuggaa

SEQ ID NO: 610209 - RNA, 19 nt, Homo sapiens
  misc_RNA (1)...(19): siRNA sense strand
cgguaacuauuguccauga

SEQ ID NO: 610210 - RNA, 19 nt, Homo sapiens
  misc_RNA (1)...(19): siRNA sense strand
caacuucuccgcuauacag

SEQ ID NO: 610211 - RNA, 19 nt, Homo sapiens
  misc_RNA (1)...(19): siRNA sense strand
cgaaagagagcccaaacca

SEQ ID NO: 610212 - RNA, 19 nt, Homo sapiens
  misc_RNA (1)...(19): siRNA sense strand
ggaggaugacgauggcauu

SEQ ID NO: 610213 - RNA, 19 nt, Homo sapiens
  misc_RNA (1)...(19): siRNA sense strand
gguagaaggaacaguuaga

SEQ ID NO: 610214 - RNA, 19 nt, Homo sapiens
  misc_RNA (1)...(19): siRNA sense strand
cagcuguaaugucuacuuc

SEQ ID NO: 610215 - RNA, 19 nt, Homo sapiens
  misc_RNA (1)...(19): siRNA sense strand
acaaagauggcagcuguaa

SEQ ID NO: 610216 - RNA, 19 nt, Homo sapiens
  misc_RNA (1)...(19): siRNA sense strand
gguaacuauuguccaugaa

SEQ ID NO: 610217 - RNA, 19 nt, Homo sapiens
  misc_RNA (1)...(19): siRNA sense strand
uguagaaucccaaauguag

SEQ ID NO: 610218 - RNA, 19 nt, Homo sapiens
  misc_RNA (1)...(19): siRNA sense strand
ucaucauggcgaucuauua

SEQ ID NO: 610219 - RNA, 19 nt, Homo sapiens
  misc_RNA (1)...(19): siRNA sense strand
uagguuuaaugaugucuug

SEQ ID NO: 610220 - RNA, 19 nt, Homo sapiens
  misc_RNA (1)...(19): siRNA sense strand
caaagcaguagccaaagau

SEQ ID NO: 610221 - RNA, 19 nt, Homo sapiens
  misc_RNA (1)...(19): siRNA sense strand
ugacaacguccauucuuuc

SEQ ID NO: 610222 - RNA, 19 nt, Homo sapiens
  misc_RNA (1)...(19): siRNA sense strand
aagcucuccugacuuuaaa

SEQ ID NO: 610223 - RNA, 19 nt, Homo sapiens
  misc_RNA (1)...(19): siRNA sense strand
gaggaugacgauggcauuu

SEQ ID NO: 610224 - RNA, 19 nt, Homo sapiens
  misc_RNA (1)...(19): siRNA sense strand
gugguagaaggaacaguua

SEQ ID NO: 610225 - RNA, 19 nt, Homo sapiens
  misc_RNA (1)...(19): siRNA sense strand
ucagcuacuuugcacuuau

SEQ ID NO: 610226 - RNA, 19 nt, Homo sapiens
  misc_RNA (1)...(19): siRNA sense strand
cuuauauucucucgugguu

SEQ ID NO: 610227 - RNA, 19 nt, Homo sapiens
  misc_RNA (1)...(19): siRNA sense strand
ucuguagaaucccaaaugu

SEQ ID NO: 610228 - RNA, 19 nt, Homo sapiens
  misc_RNA (1)...(19): siRNA sense strand
accagcagcuccacauaga

SEQ ID NO: 610229 - RNA, 19 nt, Homo sapiens
  misc_RNA (1)...(19): siRNA sense strand
cggcagcagcuaucauauu

SEQ ID NO: 610230 - RNA, 19 nt, Homo sapiens
  misc_RNA (1)...(19): siRNA sense strand
aagaggaaguauuacaaag

SEQ ID NO: 610231 - RNA, 19 nt, Homo sapiens
  misc_RNA (1)...(19): siRNA sense strand
ugagagaugggaagcuuug

SEQ ID NO: 610232 - RNA, 19 nt, Homo sapiens
  misc_RNA (1)...(19): siRNA sense strand
gacaacguccauucuuuca

SEQ ID NO: 610233 - RNA, 19 nt, Homo sapiens
  misc_RNA (1)...(19): siRNA sense strand
cucauagccuuucaucaug

SEQ ID NO: 610234 - RNA, 19 nt, Homo sapiens
  misc_RNA (1)...(19): siRNA sense strand
aauauagggaaacaccuua

SEQ ID NO: 610235 - RNA, 19 nt, Homo sapiens
  misc_RNA (1)...(19): siRNA sense strand
gaccagcagcuccacauag

SEQ ID NO: 610236 - RNA, 19 nt, Homo sapiens
  misc_RNA (1)...(19): siRNA sense strand
caaagugaacugcuuacag

SEQ ID NO: 610237 - RNA, 19 nt, Homo sapiens
  misc_RNA (1)...(19): siRNA sense strand
gaagagcaagaagacgauu

SEQ ID NO: 610238 - RNA, 19 nt, Homo sapiens
  misc_RNA (1)...(19): siRNA sense strand
guuaagaggaaguauuaca

SEQ ID NO: 610239 - RNA, 19 nt, Homo sapiens
  misc_RNA (1)...(19): siRNA sense strand
acgauuacuucacaaagau

SEQ ID NO: 610240 - RNA, 19 nt, Homo sapiens
  misc_RNA (1)...(19): siRNA sense strand
uccaguccaucuuaaguug

SEQ ID NO: 610241 - RNA, 19 nt, Homo sapiens
  misc_RNA (1)...(19): siRNA sense strand
gacccaaaccaccauagga

SEQ ID NO: 610242 - RNA, 19 nt, Homo sapiens
  misc_RNA (1)...(19): siRNA sense strand
gcccaacuucuccgcuaua

SEQ ID NO: 610243 - RNA, 19 nt, Homo sapiens
  misc_RNA (1)...(19): siRNA sense strand
gcaauuggacuggaaagac

SEQ ID NO: 610244 - RNA, 19 nt, Homo sapiens
  misc_RNA (1)...(19): siRNA sense strand
uacggcagcagcuaucaua

SEQ ID NO: 610245 - RNA, 19 nt, Homo sapiens
  misc_RNA (1)...(19): siRNA sense strand
aagcaguagccaaagauaa

SEQ ID NO: 610246 - RNA, 19 nt, Homo sapiens
  misc_RNA (1)...(19): siRNA sense strand
ugacgauggcauuuaaaga

SEQ ID NO: 610247 - RNA, 19 nt, Homo sapiens
  misc_RNA (1)...(19): siRNA sense strand
ggaaacaccuuaucagaaa

SEQ ID NO: 610248 - RNA, 19 nt, Homo sapiens
  misc_RNA (1)...(19): siRNA sense strand
ggcagcagcuaucauauua

SEQ ID NO: 610249 - RNA, 19 nt, Homo sapiens
  misc_RNA (1)...(19): siRNA sense strand
caucuuaaguugcaucaua

SEQ ID NO: 610250 - RNA, 19 nt, Homo sapiens
  misc_RNA (1)...(19): siRNA sense strand
ggaugacgauggcauuuaa

SEQ ID NO: 610251 - RNA, 19 nt, Homo sapiens
  misc_RNA (1)...(19): siRNA sense strand
gcaaagcaguagccaaaga

SEQ ID NO: 610252 - RNA, 19 nt, Homo sapiens
  misc_RNA (1)...(19): siRNA sense strand
ggccauagguuuaaugaug

SEQ ID NO: 610253 - RNA, 19 nt, Homo sapiens
  misc_RNA (1)...(19): siRNA sense strand
gaacaucucaccaaucuag

SEQ ID NO: 610254 - RNA, 19 nt, Homo sapiens
  misc_RNA (1)...(19): siRNA sense strand
gaggaaguauuacaaagug

SEQ ID NO: 610255 - RNA, 19 nt, Homo sapiens
  misc_RNA (1)...(19): siRNA sense strand
gaagagaagagcaagaaga

SEQ ID NO: 610256 - RNA, 19 nt, Homo sapiens
  misc_RNA (1)...(19): siRNA sense strand
agacgaaggucauuuagug

SEQ ID NO: 610257 - RNA, 19 nt, Homo sapiens
  misc_RNA (1)...(19): siRNA sense strand
ugaaggaaguguggaagua

SEQ ID NO: 610258 - RNA, 19 nt, Homo sapiens
  misc_RNA (1)...(19): siRNA sense strand
aaagagagcccaaaccauu

SEQ ID NO: 610259 - RNA, 19 nt, Homo sapiens
  misc_RNA (1)...(19): siRNA sense strand
ucuagaagcuccuauguuc

SEQ ID NO: 610260 - RNA, 19 nt, Homo sapiens
  misc_RNA (1)...(19): siRNA sense strand
gacgauuacuucacaaaga

SEQ ID NO: 610261 - RNA, 19 nt, Homo sapiens
  misc_RNA (1)...(19): siRNA sense strand
aaugaugucuuggaaguua

SEQ ID NO: 610262 - RNA, 19 nt, Homo sapiens
  misc_RNA (1)...(19): siRNA sense strand
gauggcagcuguaaugucu

SEQ ID NO: 610263 - RNA, 19 nt, Homo sapiens
  misc_RNA (1)...(19): siRNA sense strand
gaaguuaagaggaaguauu

SEQ ID NO: 610264 - RNA, 19 nt, Homo sapiens
  misc_RNA (1)...(19): siRNA sense strand
cauuauagcugagaagaga

SEQ ID NO: 610265 - RNA, 19 nt, Homo sapiens
  misc_RNA (1)...(19): siRNA sense strand
cagcuacuuugcacuuaua

SEQ ID NO: 610266 - RNA, 19 nt, Homo sapiens
  misc_RNA (1)...(19): siRNA sense strand
caacguccauucuuucaca

SEQ ID NO: 610267 - RNA, 19 nt, Homo sapiens
  misc_RNA (1)...(19): siRNA sense strand
gauauuuggcucugucuuu

SEQ ID NO: 610268 - RNA, 19 nt, Homo sapiens
  misc_RNA (1)...(19): siRNA sense strand
uauauucucucgugguuga

SEQ ID NO: 610269 - RNA, 19 nt, Homo sapiens
  misc_RNA (1)...(19): siRNA sense strand
gggaaacaccuuaucagaa

SEQ ID NO: 610270 - RNA, 19 nt, Homo sapiens
  misc_RNA (1)...(19): siRNA sense strand
gcgagacgaaggucauuua

SEQ ID NO: 610271 - RNA, 19 nt, Homo sapiens
  misc_RNA (1)...(19): siRNA sense strand
gaaauucucuggggccaua

SEQ ID NO: 610272 - RNA, 19 nt, Homo sapiens
  misc_RNA (1)...(19): siRNA sense strand
gcucauagccuuucaucau

SEQ ID NO: 610273 - RNA, 19 nt, Homo sapiens
  misc_RNA (1)...(19): siRNA sense strand
gagaagagaagagcaagaa

SEQ ID NO: 610274 - RNA, 19 nt, Homo sapiens
  misc_RNA (1)...(19): siRNA sense strand
caucauggcgaucuauuaa

SEQ ID NO: 610275 - RNA, 19 nt, Homo sapiens
  misc_RNA (1)...(19): siRNA sense strand
gcuguaaugucuacuucaa

SEQ ID NO: 610276 - RNA, 19 nt, Homo sapiens
  misc_RNA (1)...(19): siRNA sense strand
aaagauggcagcuguaaug

SEQ ID NO: 610277 - RNA, 19 nt, Homo sapiens
  misc_RNA (1)...(19): siRNA sense strand
gcuaucauauuaucaaugc

SEQ ID NO: 610278 - RNA, 19 nt, Homo sapiens
  misc_RNA (1)...(19): siRNA sense strand
cagcagcuaucauauuauc

SEQ ID NO: 610279 - RNA, 19 nt, Homo sapiens
  misc_RNA (1)...(19): siRNA sense strand
ucauggcgaucuauuaaau

SEQ ID NO: 610280 - RNA, 19 nt, Homo sapiens
  misc_RNA (1)...(19): siRNA sense strand
acacaugaauauagggaaa

SEQ ID NO: 610281 - RNA, 19 nt, Homo sapiens
  misc_RNA (1)...(19): siRNA sense strand
caaguggcgccauauguuu

SEQ ID NO: 610282 - RNA, 19 nt, Homo sapiens
  misc_RNA (1)...(19): siRNA sense strand
gaauauagggaaacaccuu

SEQ ID NO: 610283 - RNA, 19 nt, Homo sapiens
  misc_RNA (1)...(19): siRNA sense strand
aaggaaguguggaaguaua

SEQ ID NO: 610284 - RNA, 19 nt, Homo sapiens
  misc_RNA (1)...(19): siRNA sense strand
gauccuccaguccaucuua

SEQ ID NO: 610285 - RNA, 19 nt, Homo sapiens
  misc_RNA (1)...(19): siRNA sense strand
gcagcuaucauauuaucaa

SEQ ID NO: 610286 - RNA, 19 nt, Homo sapiens
  misc_RNA (1)...(19): siRNA sense strand
ggcaacugcucgaaagaga

SEQ ID NO: 610287 - RNA, 19 nt, Homo sapiens
  misc_RNA (1)...(19): siRNA sense strand
ggaaguauuacaaagugaa

SEQ ID NO: 610288 - RNA, 19 nt, Homo sapiens
  misc_RNA (1)...(19): siRNA sense strand
uuaaugaugucuuggaagu

SEQ ID NO: 610289 - RNA, 19 nt, Homo sapiens
  misc_RNA (1)...(19): siRNA sense strand
uggaacaucucaccaaucu

SEQ ID NO: 610290 - RNA, 19 nt, Homo sapiens
  misc_RNA (1)...(19): siRNA sense strand
gacaccaaguggcgccaua

SEQ ID NO: 610291 - RNA, 19 nt, Homo sapiens
  misc_RNA (1)...(19): siRNA sense strand
gaaacaccuuaucagaaag

SEQ ID NO: 610292 - RNA, 19 nt, Homo sapiens
  misc_RNA (1)...(19): siRNA sense strand
gaaggaaguguggaaguau

SEQ ID NO: 610293 - RNA, 19 nt, Homo sapiens
  misc_RNA (1)...(19): siRNA sense strand
uuacaaagugaacugcuua

SEQ ID NO: 610294 - RNA, 19 nt, Homo sapiens
  misc_RNA (1)...(19): siRNA sense strand
gccauagguuuaaugaugu

SEQ ID NO: 610295 - RNA, 19 nt, Homo sapiens
  misc_RNA (1)...(19): siRNA sense strand
ccgcaaagcaguagccaaa

SEQ ID NO: 610296 - RNA, 19 nt, Homo sapiens
  misc_RNA (1)...(19): siRNA sense strand
gggaagcuuugccucaugu

SEQ ID NO: 610297 - RNA, 19 nt, Homo sapiens
  misc_RNA (1)...(19): siRNA sense strand
ccaaguggcgccauauguu

SEQ ID NO: 610298 - RNA, 19 nt, Homo sapiens
  misc_RNA (1)...(19): siRNA sense strand
caaauuagucaacgaccaa

SEQ ID NO: 610299 - RNA, 19 nt, Homo sapiens
  misc_RNA (1)...(19): siRNA sense strand
gaaagagagcccaaaccau

SEQ ID NO: 610300 - RNA, 19 nt, Homo sapiens
  misc_RNA (1)...(19): siRNA sense strand
cagcagcuccacauagaaa

SEQ ID NO: 610301 - RNA, 19 nt, Homo sapiens
  misc_RNA (1)...(19): siRNA sense strand
ccaaaccaccauaggauau

SEQ ID NO: 610302 - RNA, 19 nt, Homo sapiens
  misc_RNA (1)...(19): siRNA sense strand
gguuaucgcuguguuacug

SEQ ID NO: 610303 - RNA, 19 nt, Homo sapiens
  misc_RNA (1)...(19): siRNA sense strand
uaugagagaugggaagcuu

SEQ ID NO: 610304 - RNA, 19 nt, Homo sapiens
  misc_RNA (1)...(19): siRNA sense strand
guaacuauuguccaugaaa

SEQ ID NO: 610305 - RNA, 19 nt, Homo sapiens
  misc_RNA (1)...(19): siRNA sense strand
uugacaacguccauucuuu

SEQ ID NO: 610306 - RNA, 19 nt, Homo sapiens
  misc_RNA (1)...(19): siRNA sense strand
ucuccugacuuuaaacaga

SEQ ID NO: 610307 - RNA, 19 nt, Homo sapiens
  misc_RNA (1)...(19): siRNA sense strand
ccacuuccgccacacauga

SEQ ID NO: 610308 - RNA, 19 nt, Homo sapiens
  misc_RNA (1)...(19): siRNA sense strand
guuuaaugaugucuuggaa

SEQ ID NO: 610309 - RNA, 19 nt, Homo sapiens
  misc_RNA (1)...(19): siRNA sense strand
cgguaacuauuguccauga

SEQ ID NO: 610310 - RNA, 19 nt, Homo sapiens
  misc_RNA (1)...(19): siRNA sense strand
caacuucuccgcuauacag

SEQ ID NO: 610311 - RNA, 19 nt, Homo sapiens
  misc_RNA (1)...(19): siRNA sense strand
cgaaagagagcccaaacca

SEQ ID NO: 610312 - RNA, 19 nt, Homo sapiens
  misc_RNA (1)...(19): siRNA sense strand
ggaggaugacgauggcauu

SEQ ID NO: 610313 - RNA, 19 nt, Homo sapiens
  misc_RNA (1)...(19): siRNA sense strand
gguagaaggaacaguuaga

SEQ ID NO: 610314 - RNA, 19 nt, Homo sapiens
  misc_RNA (1)...(19): siRNA sense strand
cagcuguaaugucuacuuc

SEQ ID NO: 610315 - RNA, 19 nt, Homo sapiens
  misc_RNA (1)...(19): siRNA sense strand
acaaagauggcagcuguaa

SEQ ID NO: 610316 - RNA, 19 nt, Homo sapiens
  misc_RNA (1)...(19): siRNA sense strand
gguaacuauuguccaugaa

SEQ ID NO: 610317 - RNA, 19 nt, Homo sapiens
  misc_RNA (1)...(19): siRNA sense strand
uguagaaucccaaauguag

SEQ ID NO: 610318 - RNA, 19 nt, Homo sapiens
  misc_RNA (1)...(19): siRNA sense strand
ucaucauggcgaucuauua

SEQ ID NO: 610319 - RNA, 19 nt, Homo sapiens
  misc_RNA (1)...(19): siRNA sense strand
uagguuuaaugaugucuug

SEQ ID NO: 610320 - RNA, 19 nt, Homo sapiens
  misc_RNA (1)...(19): siRNA sense strand
caaagcaguagccaaagau

SEQ ID NO: 610321 - RNA, 19 nt, Homo sapiens
  misc_RNA (1)...(19): siRNA sense strand
ugacaacguccauucuuuc

SEQ ID NO: 610322 - RNA, 19 nt, Homo sapiens
  misc_RNA (1)...(19): siRNA sense strand
aagcucuccugacuuuaaa

SEQ ID NO: 610323 - RNA, 19 nt, Homo sapiens
  misc_RNA (1)...(19): siRNA sense strand
gaggaugacgauggcauuu

SEQ ID NO: 610324 - RNA, 19 nt, Homo sapiens
  misc_RNA (1)...(19): siRNA sense strand
gugguagaaggaacaguua

SEQ ID NO: 610325 - RNA, 19 nt, Homo sapiens
  misc_RNA (1)...(19): siRNA sense strand
ucagcuacuuugcacuuau

SEQ ID NO: 610326 - RNA, 19 nt, Homo sapiens
  misc_RNA (1)...(19): siRNA sense strand
cuuauauucucucgugguu

SEQ ID NO: 610327 - RNA, 19 nt, Homo sapiens
  misc_RNA (1)...(19): siRNA sense strand
ucuguagaaucccaaaugu

SEQ ID NO: 610328 - RNA, 19 nt, Homo sapiens
  misc_RNA (1)...(19): siRNA sense strand
accagcagcuccacauaga

SEQ ID NO: 610329 - RNA, 19 nt, Homo sapiens
  misc_RNA (1)...(19): siRNA sense strand
cggcagcagcuaucauauu

SEQ ID NO: 610330 - RNA, 19 nt, Homo sapiens
  misc_RNA (1)...(19): siRNA sense strand
aagaggaaguauuacaaag

SEQ ID NO: 610331 - RNA, 19 nt, Homo sapiens
  misc_RNA (1)...(19): siRNA sense strand
ugagagaugggaagcuuug

SEQ ID NO: 610332 - RNA, 19 nt, Homo sapiens
  misc_RNA (1)...(19): siRNA sense strand
gacaacguccauucuuuca

SEQ ID NO: 610333 - RNA, 19 nt, Homo sapiens
  misc_RNA (1)...(19): siRNA sense strand
cucauagccuuucaucaug

SEQ ID NO: 610334 - RNA, 19 nt, Homo sapiens
  misc_RNA (1)...(19): siRNA sense strand
aauauagggaaacaccuua

SEQ ID NO: 610335 - RNA, 19 nt, Homo sapiens
  misc_RNA (1)...(19): siRNA sense strand
gaccagcagcuccacauag

SEQ ID NO: 610336 - RNA, 19 nt, Homo sapiens
  misc_RNA (1)...(19): siRNA sense strand
caaagugaacugcuuacag

SEQ ID NO: 610337 - RNA, 19 nt, Homo sapiens
  misc_RNA (1)...(19): siRNA sense strand
gaagagcaagaagacgauu

SEQ ID NO: 610338 - RNA, 19 nt, Homo sapiens
  misc_RNA (1)...(19): siRNA sense strand
guuaagaggaaguauuaca

SEQ ID NO: 610339 - RNA, 19 nt, Homo sapiens
  misc_RNA (1)...(19): siRNA sense strand
acgauuacuucacaaagau

SEQ ID NO: 610340 - RNA, 19 nt, Homo sapiens
  misc_RNA (1)...(19): siRNA sense strand
uccaguccaucuuaaguug

SEQ ID NO: 610341 - RNA, 19 nt, Homo sapiens
  misc_RNA (1)...(19): siRNA sense strand
gacccaaaccaccauagga

SEQ ID NO: 610342 - RNA, 19 nt, Homo sapiens
  misc_RNA (1)...(19): siRNA sense strand
gcccaacuucuccgcuaua

SEQ ID NO: 610343 - RNA, 19 nt, Homo sapiens
  misc_RNA (1)...(19): siRNA sense strand
gcaauuggacuggaaagac

SEQ ID NO: 610344 - RNA, 19 nt, Homo sapiens
  misc_RNA (1)...(19): siRNA sense strand
uacggcagcagcuaucaua

SEQ ID NO: 610345 - RNA, 19 nt, Homo sapiens
  misc_RNA (1)...(19): siRNA sense strand
aagcaguagccaaagauaa

SEQ ID NO: 610346 - RNA, 19 nt, Homo sapiens
  misc_RNA (1)...(19): siRNA sense strand
ugacgauggcauuuaaaga

SEQ ID NO: 610347 - RNA, 19 nt, Homo sapiens
  misc_RNA (1)...(19): siRNA sense strand
gaacuggacugacggauga

SEQ ID NO: 610348 - RNA, 19 nt, Homo sapiens
  misc_RNA (1)...(19): siRNA sense strand
caaguucugugacaacaaa

SEQ ID NO: 610349 - RNA, 19 nt, Homo sapiens
  misc_RNA (1)...(19): siRNA sense strand
agaaggagcucuggaagaa

SEQ ID NO: 610350 - RNA, 19 nt, Homo sapiens
  misc_RNA (1)...(19): siRNA sense strand
ucaacucuaugcacaagua

SEQ ID NO: 610351 - RNA, 19 nt, Homo sapiens
  misc_RNA (1)...(19): siRNA sense strand
ccgcugagcuguaacaugu

SEQ ID NO: 610352 - RNA, 19 nt, Homo sapiens
  misc_RNA (1)...(19): siRNA sense strand
ccagagaccuccuucaucu

SEQ ID NO: 610353 - RNA, 19 nt, Homo sapiens
  misc_RNA (1)...(19): siRNA sense strand
gagaaucuuccuuacagua

SEQ ID NO: 610354 - RNA, 19 nt, Homo sapiens
  misc_RNA (1)...(19): siRNA sense strand
gcauguauguacucagguu

SEQ ID NO: 610355 - RNA, 19 nt, Homo sapiens
  misc_RNA (1)...(19): siRNA sense strand
ggacucaagccucuucuau

SEQ ID NO: 610356 - RNA, 19 nt, Homo sapiens
  misc_RNA (1)...(19): siRNA sense strand
ucucaaaccuucuccuugu

SEQ ID NO: 610357 - RNA, 19 nt, Homo sapiens
  misc_RNA (1)...(19): siRNA sense strand
ccaaguauauccugcugau

SEQ ID NO: 610358 - RNA, 19 nt, Homo sapiens
  misc_RNA (1)...(19): siRNA sense strand
acucaagccucuucuauca

SEQ ID NO: 610359 - RNA, 19 nt, Homo sapiens
  misc_RNA (1)...(19): siRNA sense strand
gaccaucgcuacaaguucu

SEQ ID NO: 610360 - RNA, 19 nt, Homo sapiens
  misc_RNA (1)...(19): siRNA sense strand
caagaucacccagcugaaa

SEQ ID NO: 610361 - RNA, 19 nt, Homo sapiens
  misc_RNA (1)...(19): siRNA sense strand
caagcgauccuaucuggaa

SEQ ID NO: 610362 - RNA, 19 nt, Homo sapiens
  misc_RNA (1)...(19): siRNA sense strand
gagaaggagcucuggaaga

SEQ ID NO: 610363 - RNA, 19 nt, Homo sapiens
  misc_RNA (1)...(19): siRNA sense strand
uaaaugcugccaaugaguu

SEQ ID NO: 610364 - RNA, 19 nt, Homo sapiens
  misc_RNA (1)...(19): siRNA sense strand
ccgagaaucuuccuuacag

SEQ ID NO: 610365 - RNA, 19 nt, Homo sapiens
  misc_RNA (1)...(19): siRNA sense strand
cauaucauccucaacucua

SEQ ID NO: 610366 - RNA, 19 nt, Homo sapiens
  misc_RNA (1)...(19): siRNA sense strand
gcuguaacauguggacuuc

SEQ ID NO: 610367 - RNA, 19 nt, Homo sapiens
  misc_RNA (1)...(19): siRNA sense strand
cagagaagcauguauguac

SEQ ID NO: 610368 - RNA, 19 nt, Homo sapiens
  misc_RNA (1)...(19): siRNA sense strand
aaauugagaacaacccuuu

SEQ ID NO: 610369 - RNA, 19 nt, Homo sapiens
  misc_RNA (1)...(19): siRNA sense strand
gcuauagcgugcagacgau

SEQ ID NO: 610370 - RNA, 19 nt, Homo sapiens
  misc_RNA (1)...(19): siRNA sense strand
caccuccgcugagcuguaa

SEQ ID NO: 610371 - RNA, 19 nt, Homo sapiens
  misc_RNA (1)...(19): siRNA sense strand
ucacccagcugaaaauuga

SEQ ID NO: 610372 - RNA, 19 nt, Homo sapiens
  misc_RNA (1)...(19): siRNA sense strand
ccaggaaaugcccacuuua

SEQ ID NO: 610373 - RNA, 19 nt, Homo sapiens
  misc_RNA (1)...(19): siRNA sense strand
aaguauauccugcugauug

SEQ ID NO: 610374 - RNA, 19 nt, Homo sapiens
  misc_RNA (1)...(19): siRNA sense strand
accaggaaaugcccacuuu

SEQ ID NO: 610375 - RNA, 19 nt, Homo sapiens
  misc_RNA (1)...(19): siRNA sense strand
aguauauccugcugauuga

SEQ ID NO: 610376 - RNA, 19 nt, Homo sapiens
  misc_RNA (1)...(19): siRNA sense strand
gagcagaccaucgagaaca

SEQ ID NO: 610377 - RNA, 19 nt, Homo sapiens
  misc_RNA (1)...(19): siRNA sense strand
gcuacaaguucugugacaa

SEQ ID NO: 610378 - RNA, 19 nt, Homo sapiens
  misc_RNA (1)...(19): siRNA sense strand
ccagagaagcauguaugua

SEQ ID NO: 610379 - RNA, 19 nt, Homo sapiens
  misc_RNA (1)...(19): siRNA sense strand
gacugcagagcaaagaaua

SEQ ID NO: 610380 - RNA, 19 nt, Homo sapiens
  misc_RNA (1)...(19): siRNA sense strand
aaggagcucuggaagaagu

SEQ ID NO: 610381 - RNA, 19 nt, Homo sapiens
  misc_RNA (1)...(19): siRNA sense strand
ucaagccucuucuaucacu

SEQ ID NO: 610382 - RNA, 19 nt, Homo sapiens
  misc_RNA (1)...(19): siRNA sense strand
caaagaauaccccgugauu

SEQ ID NO: 610383 - RNA, 19 nt, Homo sapiens
  misc_RNA (1)...(19): siRNA sense strand
caggaaaugcccacuuuag

SEQ ID NO: 610384 - RNA, 19 nt, Homo sapiens
  misc_RNA (1)...(19): siRNA sense strand
ucuaaaugcugccaaugag

SEQ ID NO: 610385 - RNA, 19 nt, Homo sapiens
  misc_RNA (1)...(19): siRNA sense strand
cguuaaggcugaugagaac

SEQ ID NO: 610386 - RNA, 19 nt, Homo sapiens
  misc_RNA (1)...(19): siRNA sense strand
gucccgagaaucuuccuua

SEQ ID NO: 610387 - RNA, 19 nt, Homo sapiens
  misc_RNA (1)...(19): siRNA sense strand
cuaccagaaucacaagauc

SEQ ID NO: 610388 - RNA, 19 nt, Homo sapiens
  misc_RNA (1)...(19): siRNA sense strand
cugaugagaacaaugcuuu

SEQ ID NO: 610389 - RNA, 19 nt, Homo sapiens
  misc_RNA (1)...(19): siRNA sense strand
caccuggacuuaccuugca

SEQ ID NO: 610390 - RNA, 19 nt, Homo sapiens
  misc_RNA (1)...(19): siRNA sense strand
gcgccucauucccaagaga

SEQ ID NO: 610391 - RNA, 19 nt, Homo sapiens
  misc_RNA (1)...(19): siRNA sense strand
gccaaugaguuucucuacu

SEQ ID NO: 610392 - RNA, 19 nt, Homo sapiens
  misc_RNA (1)...(19): siRNA sense strand
cgagaaucuuccuuacagu

SEQ ID NO: 610393 - RNA, 19 nt, Homo sapiens
  misc_RNA (1)...(19): siRNA sense strand
gagccagccaugccaggaa

SEQ ID NO: 610394 - RNA, 19 nt, Homo sapiens
  misc_RNA (1)...(19): siRNA sense strand
gcucccagccaccaggaaa

SEQ ID NO: 610395 - RNA, 19 nt, Homo sapiens
  misc_RNA (1)...(19): siRNA sense strand
ccacaggagcccacuggau

SEQ ID NO: 610396 - RNA, 19 nt, Homo sapiens
  misc_RNA (1)...(19): siRNA sense strand
ggccauaucauccucaacu

SEQ ID NO: 610397 - RNA, 19 nt, Homo sapiens
  misc_RNA (1)...(19): siRNA sense strand
ucaucucugugaccuccua

SEQ ID NO: 610398 - RNA, 19 nt, Homo sapiens
  misc_RNA (1)...(19): siRNA sense strand
uaaggcugaugagaacaau

SEQ ID NO: 610399 - RNA, 19 nt, Homo sapiens
  misc_RNA (1)...(19): siRNA sense strand
ugcagacgauggagacugu

SEQ ID NO: 610400 - RNA, 19 nt, Homo sapiens
  misc_RNA (1)...(19): siRNA sense strand
agaagcauguauguacuca

SEQ ID NO: 610401 - RNA, 19 nt, Homo sapiens
  misc_RNA (1)...(19): siRNA sense strand
accaggcacuccagcacua

SEQ ID NO: 610402 - RNA, 19 nt, Homo sapiens
  misc_RNA (1)...(19): siRNA sense strand
cgacugcagagcaaagaau

SEQ ID NO: 610403 - RNA, 19 nt, Homo sapiens
  misc_RNA (1)...(19): siRNA sense strand
ccucaacucuaugcacaag

SEQ ID NO: 610404 - RNA, 19 nt, Homo sapiens
  misc_RNA (1)...(19): siRNA sense strand
cggagcagaccaucgagaa

SEQ ID NO: 610405 - RNA, 19 nt, Homo sapiens
  misc_RNA (1)...(19): siRNA sense strand
uuacaguaccauucaggaa

SEQ ID NO: 610406 - RNA, 19 nt, Homo sapiens
  misc_RNA (1)...(19): siRNA sense strand
agagaagcauguauguacu

SEQ ID NO: 610407 - RNA, 19 nt, Homo sapiens
  misc_RNA (1)...(19): siRNA sense strand
ccacaucguuaaggcugau

SEQ ID NO: 610408 - RNA, 19 nt, Homo sapiens
  misc_RNA (1)...(19): siRNA sense strand
gagaagcauguauguacuc

SEQ ID NO: 610409 - RNA, 19 nt, Homo sapiens
  misc_RNA (1)...(19): siRNA sense strand
ccaccuccgcugagcugua

SEQ ID NO: 610410 - RNA, 19 nt, Homo sapiens
  misc_RNA (1)...(19): siRNA sense strand
agaccuccuucaucucugu

SEQ ID NO: 610411 - RNA, 19 nt, Homo sapiens
  misc_RNA (1)...(19): siRNA sense strand
aaaugcugccaaugaguuu

SEQ ID NO: 610412 - RNA, 19 nt, Homo sapiens
  misc_RNA (1)...(19): siRNA sense strand
acaucuaaaugcugccaau

SEQ ID NO: 610413 - RNA, 19 nt, Homo sapiens
  misc_RNA (1)...(19): siRNA sense strand
acuuuagugucuacaauca

SEQ ID NO: 610414 - RNA, 19 nt, Homo sapiens
  misc_RNA (1)...(19): siRNA sense strand
gaccaucgagaacaucaag

SEQ ID NO: 610415 - RNA, 19 nt, Homo sapiens
  misc_RNA (1)...(19): siRNA sense strand
gcacuaccagcacgagaac

SEQ ID NO: 610416 - RNA, 19 nt, Homo sapiens
  misc_RNA (1)...(19): siRNA sense strand
uacaaguucugugacaaca

SEQ ID NO: 610417 - RNA, 19 nt, Homo sapiens
  misc_RNA (1)...(19): siRNA sense strand
gacucaagccucuucuauc

SEQ ID NO: 610418 - RNA, 19 nt, Homo sapiens
  misc_RNA (1)...(19): siRNA sense strand
ccacaaaccuucaggaaau

SEQ ID NO: 610419 - RNA, 19 nt, Homo sapiens
  misc_RNA (1)...(19): siRNA sense strand
gaagaaauacagccagauu

SEQ ID NO: 610420 - RNA, 19 nt, Homo sapiens
  misc_RNA (1)...(19): siRNA sense strand
aggaagcaaugaagaaaua

SEQ ID NO: 610421 - RNA, 19 nt, Homo sapiens
  misc_RNA (1)...(19): siRNA sense strand
ggacugaagacacucaauu

SEQ ID NO: 610422 - RNA, 19 nt, Homo sapiens
  misc_RNA (1)...(19): siRNA sense strand
ggauggaggagacagaaua

SEQ ID NO: 610423 - RNA, 19 nt, Homo sapiens
  misc_RNA (1)...(19): siRNA sense strand
agccaaagauggaaacauu

SEQ ID NO: 610424 - RNA, 19 nt, Homo sapiens
  misc_RNA (1)...(19): siRNA sense strand
ggaggaagcaaugaagaaa

SEQ ID NO: 610425 - RNA, 19 nt, Homo sapiens
  misc_RNA (1)...(19): siRNA sense strand
cacaaaccuucaggaaaua

SEQ ID NO: 610426 - RNA, 19 nt, Homo sapiens
  misc_RNA (1)...(19): siRNA sense strand
ccaaagauggaaacauuga

SEQ ID NO: 610427 - RNA, 19 nt, Homo sapiens
  misc_RNA (1)...(19): siRNA sense strand
cagcaguugugaaggcuuu

SEQ ID NO: 610428 - RNA, 19 nt, Homo sapiens
  misc_RNA (1)...(19): siRNA sense strand
gacugaagacacucaauuu

SEQ ID NO: 610429 - RNA, 19 nt, Homo sapiens
  misc_RNA (1)...(19): siRNA sense strand
acacaaagccugcgaaucg

SEQ ID NO: 610430 - RNA, 19 nt, Homo sapiens
  misc_RNA (1)...(19): siRNA sense strand
ccacuggacugaagacacu

SEQ ID NO: 610431 - RNA, 19 nt, Homo sapiens
  misc_RNA (1)...(19): siRNA sense strand
ucagcagccucgccaauuc

SEQ ID NO: 610432 - RNA, 19 nt, Homo sapiens
  misc_RNA (1)...(19): siRNA sense strand
gggaggaagcaaugaagaa

SEQ ID NO: 610433 - RNA, 19 nt, Homo sapiens
  misc_RNA (1)...(19): siRNA sense strand
ggaaacauugacaucagaa

SEQ ID NO: 610434 - RNA, 19 nt, Homo sapiens
  misc_RNA (1)...(19): siRNA sense strand
ggaacuagacauucuucug

SEQ ID NO: 610435 - RNA, 19 nt, Homo sapiens
  misc_RNA (1)...(19): siRNA sense strand
gacaucagaaucuuaagga

SEQ ID NO: 610436 - RNA, 19 nt, Homo sapiens
  misc_RNA (1)...(19): siRNA sense strand
gauucugagucacuuugaa

SEQ ID NO: 610437 - RNA, 19 nt, Homo sapiens
  misc_RNA (1)...(19): siRNA sense strand
gccaauuccuuucuuacca

SEQ ID NO: 610438 - RNA, 19 nt, Homo sapiens
  misc_RNA (1)...(19): siRNA sense strand
gcagugugcaagccaaaga

SEQ ID NO: 610439 - RNA, 19 nt, Homo sapiens
  misc_RNA (1)...(19): siRNA sense strand
uaucuggacaggguauuua

SEQ ID NO: 610440 - RNA, 19 nt, Homo sapiens
  misc_RNA (1)...(19): siRNA sense strand
uggaaacauugacaucaga

SEQ ID NO: 610441 - RNA, 19 nt, Homo sapiens
  misc_RNA (1)...(19): siRNA sense strand
gccacaaaccuucaggaaa

SEQ ID NO: 610442 - RNA, 19 nt, Homo sapiens
  misc_RNA (1)...(19): siRNA sense strand
ccaauuccuuucuuaccau

SEQ ID NO: 610443 - RNA, 19 nt, Homo sapiens
  misc_RNA (1)...(19): siRNA sense strand
gaggaagcaaugaagaaau

SEQ ID NO: 610444 - RNA, 19 nt, Homo sapiens
  misc_RNA (1)...(19): siRNA sense strand
gaaacauugacaucagaau

SEQ ID NO: 610445 - RNA, 19 nt, Homo sapiens
  misc_RNA (1)...(19): siRNA sense strand
gaucagcagccucgccaau

SEQ ID NO: 610446 - RNA, 19 nt, Homo sapiens
  misc_RNA (1)...(19): siRNA sense strand
caggaaauacgaaauggau

SEQ ID NO: 610447 - RNA, 19 nt, Homo sapiens
  misc_RNA (1)...(19): siRNA sense strand
gaagcaaugaagaaauaca

SEQ ID NO: 610448 - RNA, 19 nt, Homo sapiens
  misc_RNA (1)...(19): siRNA sense strand
cagccucgccaauuccuuu

SEQ ID NO: 610449 - RNA, 19 nt, Homo sapiens
  misc_RNA (1)...(19): siRNA sense strand
aaacauugacaucagaauc

SEQ ID NO: 610450 - RNA, 19 nt, Homo sapiens
  misc_RNA (1)...(19): siRNA sense strand
gaaccucaggcagcaguug

SEQ ID NO: 610451 - RNA, 19 nt, Homo sapiens
  misc_RNA (1)...(19): siRNA sense strand
gauggaggagacagaauag

SEQ ID NO: 610452 - RNA, 19 nt, Homo sapiens
  misc_RNA (1)...(19): siRNA sense strand
gccauuugcuaagacucua

SEQ ID NO: 610453 - RNA, 19 nt, Homo sapiens
  misc_RNA (1)...(19): siRNA sense strand
ccagaccccugaccauuau

SEQ ID NO: 610454 - RNA, 19 nt, Homo sapiens
  misc_RNA (1)...(19): siRNA sense strand
gccaaagauggaaacauug

SEQ ID NO: 610455 - RNA, 19 nt, Homo sapiens
  misc_RNA (1)...(19): siRNA sense strand
ccuucucucugcugcguuu

SEQ ID NO: 610456 - RNA, 19 nt, Homo sapiens
  misc_RNA (1)...(19): siRNA sense strand
cacaaagccugcgaaucga

SEQ ID NO: 610457 - RNA, 19 nt, Homo sapiens
  misc_RNA (1)...(19): siRNA sense strand
uaucuccuauggacuccuu

SEQ ID NO: 610458 - RNA, 19 nt, Homo sapiens
  misc_RNA (1)...(19): siRNA sense strand
aaagauggaaacauugaca

SEQ ID NO: 610459 - RNA, 19 nt, Homo sapiens
  misc_RNA (1)...(19): siRNA sense strand
uauacucuccggaagauca

SEQ ID NO: 610460 - RNA, 19 nt, Homo sapiens
  misc_RNA (1)...(19): siRNA sense strand
cauugacaucagaaucuua

SEQ ID NO: 610461 - RNA, 19 nt, Homo sapiens
  misc_RNA (1)...(19): siRNA sense strand
acauugacaucagaaucuu

SEQ ID NO: 610462 - RNA, 19 nt, Homo sapiens
  misc_RNA (1)...(19): siRNA sense strand
ccucuagucuugccuucag

SEQ ID NO: 610463 - RNA, 19 nt, Homo sapiens
  misc_RNA (1)...(19): siRNA sense strand
gaccuccggcucugucaug

SEQ ID NO: 610464 - RNA, 19 nt, Homo sapiens
  misc_RNA (1)...(19): siRNA sense strand
cauuauacucuccggaaga

SEQ ID NO: 610465 - RNA, 19 nt, Homo sapiens
  misc_RNA (1)...(19): siRNA sense strand
ccucgccaauuccuuucuu

SEQ ID NO: 610466 - RNA, 19 nt, Homo sapiens
  misc_RNA (1)...(19): siRNA sense strand
ucaggcagcaguugugaag

SEQ ID NO: 610467 - RNA, 19 nt, Homo sapiens
  misc_RNA (1)...(19): siRNA sense strand
acugaagacacucaauuug

SEQ ID NO: 610468 - RNA, 19 nt, Homo sapiens
  misc_RNA (1)...(19): siRNA sense strand
ggaaauggaugguggauga

SEQ ID NO: 610469 - RNA, 19 nt, Homo sapiens
  misc_RNA (1)...(19): siRNA sense strand
gagaccaucugcucccaua

SEQ ID NO: 610470 - RNA, 19 nt, Homo sapiens
  misc_RNA (1)...(19): siRNA sense strand
cgacagggaucacuucauc

SEQ ID NO: 610471 - RNA, 19 nt, Homo sapiens
  misc_RNA (1)...(19): siRNA sense strand
gaagaggcaaugagcacua

SEQ ID NO: 610472 - RNA, 19 nt, Homo sapiens
  misc_RNA (1)...(19): siRNA sense strand
gaagagugucggcucauca

SEQ ID NO: 610473 - RNA, 19 nt, Homo sapiens
  misc_RNA (1)...(19): siRNA sense strand
gccagauccugccuacuga

SEQ ID NO: 610474 - RNA, 19 nt, Homo sapiens
  misc_RNA (1)...(19): siRNA sense strand
ucaagccgcugcucuucga

SEQ ID NO: 610475 - RNA, 19 nt, Homo sapiens
  misc_RNA (1)...(19): siRNA sense strand
gugcggaacagccaccaua

SEQ ID NO: 610476 - RNA, 19 nt, Homo sapiens
  misc_RNA (1)...(19): siRNA sense strand
gauccugccuacugaagag

SEQ ID NO: 610477 - RNA, 19 nt, Homo sapiens
  misc_RNA (1)...(19): siRNA sense strand
gaaccgugaugggcaccuu

SEQ ID NO: 610478 - RNA, 19 nt, Homo sapiens
  misc_RNA (1)...(19): siRNA sense strand
gcugcagguuguucgauau

SEQ ID NO: 610479 - RNA, 19 nt, Homo sapiens
  misc_RNA (1)...(19): siRNA sense strand
cagagagcauucaggagau

SEQ ID NO: 610480 - RNA, 19 nt, Homo sapiens
  misc_RNA (1)...(19): siRNA sense strand
gcagguuguucgauauggu

SEQ ID NO: 610481 - RNA, 19 nt, Homo sapiens
  misc_RNA (1)...(19): siRNA sense strand
cuacagcaacggcgacgaa

SEQ ID NO: 610482 - RNA, 19 nt, Homo sapiens
  misc_RNA (1)...(19): siRNA sense strand
gcugguagccaacgagucu

SEQ ID NO: 610483 - RNA, 19 nt, Homo sapiens
  misc_RNA (1)...(19): siRNA sense strand
cgcugcagguuguucgaua

SEQ ID NO: 610484 - RNA, 19 nt, Homo sapiens
  misc_RNA (1)...(19): siRNA sense strand
ugaagagugucggcucauc

SEQ ID NO: 610485 - RNA, 19 nt, Homo sapiens
  misc_RNA (1)...(19): siRNA sense strand
gggccuguguacccagaga

SEQ ID NO: 610486 - RNA, 19 nt, Homo sapiens
  misc_RNA (1)...(19): siRNA sense strand
aagaggcaaugagcacuau

SEQ ID NO: 610487 - RNA, 19 nt, Homo sapiens
  misc_RNA (1)...(19): siRNA sense strand
cagacucgccugggaaaug

SEQ ID NO: 610488 - RNA, 19 nt, Homo sapiens
  misc_RNA (1)...(19): siRNA sense strand
ccugacugaugaagagugu

SEQ ID NO: 610489 - RNA, 19 nt, Homo sapiens
  misc_RNA (1)...(19): siRNA sense strand
acauggaccuucgggacuu

SEQ ID NO: 610490 - RNA, 19 nt, Homo sapiens
  misc_RNA (1)...(19): siRNA sense strand
ccggcuuccugacugauga

SEQ ID NO: 610491 - RNA, 19 nt, Homo sapiens
  misc_RNA (1)...(19): siRNA sense strand
ccaagcugguagccaacga

SEQ ID NO: 610492 - RNA, 19 nt, Homo sapiens
  misc_RNA (1)...(19): siRNA sense strand
agacucgccugggaaaugg

SEQ ID NO: 610493 - RNA, 19 nt, Homo sapiens
  misc_RNA (1)...(19): siRNA sense strand
agagagcauucaggagaug

SEQ ID NO: 610494 - RNA, 19 nt, Homo sapiens
  misc_RNA (1)...(19): siRNA sense strand
acaaggcagaguccaguga

SEQ ID NO: 610495 - RNA, 19 nt, Homo sapiens
  misc_RNA (1)...(19): siRNA sense strand
ggaaauggaugguggauga

SEQ ID NO: 610496 - RNA, 19 nt, Homo sapiens
  misc_RNA (1)...(19): siRNA sense strand
gcacagcagucuucuggua

SEQ ID NO: 610497 - RNA, 19 nt, Homo sapiens
  misc_RNA (1)...(19): siRNA sense strand
uaacagaaccuacgaugaa

SEQ ID NO: 610498 - RNA, 19 nt, Homo sapiens
  misc_RNA (1)...(19): siRNA sense strand
gccaacaacuggauuaaug

SEQ ID NO: 610499 - RNA, 19 nt, Homo sapiens
  misc_RNA (1)...(19): siRNA sense strand
gagaccaucugcucccaua

SEQ ID NO: 610500 - RNA, 19 nt, Homo sapiens
  misc_RNA (1)...(19): siRNA sense strand
ccaaguggauugccaacaa

SEQ ID NO: 610501 - RNA, 19 nt, Homo sapiens
  misc_RNA (1)...(19): siRNA sense strand
cgacagggaucacuucauc

SEQ ID NO: 610502 - RNA, 19 nt, Homo sapiens
  misc_RNA (1)...(19): siRNA sense strand
gaagaggcaaugagcacua

SEQ ID NO: 610503 - RNA, 19 nt, Homo sapiens
  misc_RNA (1)...(19): siRNA sense strand
gaugaaaugagucugauuc

SEQ ID NO: 610504 - RNA, 19 nt, Homo sapiens
  misc_RNA (1)...(19): siRNA sense strand
gaagagugucggcucauca

SEQ ID NO: 610505 - RNA, 19 nt, Homo sapiens
  misc_RNA (1)...(19): siRNA sense strand
gccagauccugccuacuga

SEQ ID NO: 610506 - RNA, 19 nt, Homo sapiens
  misc_RNA (1)...(19): siRNA sense strand
ucaagccgcugcucuucga

SEQ ID NO: 610507 - RNA, 19 nt, Homo sapiens
  misc_RNA (1)...(19): siRNA sense strand
gugcggaacagccaccaua

SEQ ID NO: 610508 - RNA, 19 nt, Homo sapiens
  misc_RNA (1)...(19): siRNA sense strand
gauccugccuacugaagag

SEQ ID NO: 610509 - RNA, 19 nt, Homo sapiens
  misc_RNA (1)...(19): siRNA sense strand
gaaccgugaugggcaccuu

SEQ ID NO: 610510 - RNA, 19 nt, Homo sapiens
  misc_RNA (1)...(19): siRNA sense strand
gcugcagguuguucgauau

SEQ ID NO: 610511 - RNA, 19 nt, Homo sapiens
  misc_RNA (1)...(19): siRNA sense strand
gaaccuacgaugaaaugag

SEQ ID NO: 610512 - RNA, 19 nt, Homo sapiens
  misc_RNA (1)...(19): siRNA sense strand
cagagagcauucaggagau

SEQ ID NO: 610513 - RNA, 19 nt, Homo sapiens
  misc_RNA (1)...(19): siRNA sense strand
gcagguuguucgauauggu

SEQ ID NO: 610514 - RNA, 19 nt, Homo sapiens
  misc_RNA (1)...(19): siRNA sense strand
caacaacuggauuaaugug

SEQ ID NO: 610515 - RNA, 19 nt, Homo sapiens
  misc_RNA (1)...(19): siRNA sense strand
cagaaccuacgaugaaaug

SEQ ID NO: 610516 - RNA, 19 nt, Homo sapiens
  misc_RNA (1)...(19): siRNA sense strand
aacagaaccuacgaugaaa

SEQ ID NO: 610517 - RNA, 19 nt, Homo sapiens
  misc_RNA (1)...(19): siRNA sense strand
gcagucuucugguacaacu

SEQ ID NO: 610518 - RNA, 19 nt, Homo sapiens
  misc_RNA (1)...(19): siRNA sense strand
caacagggcacagcagucu

SEQ ID NO: 610519 - RNA, 19 nt, Homo sapiens
  misc_RNA (1)...(19): siRNA sense strand
caaguggauugccaacaac

SEQ ID NO: 610520 - RNA, 19 nt, Homo sapiens
  misc_RNA (1)...(19): siRNA sense strand
cuacagcaacggcgacgaa

SEQ ID NO: 610521 - RNA, 19 nt, Homo sapiens
  misc_RNA (1)...(19): siRNA sense strand
ccaacaacuggauuaaugu

SEQ ID NO: 610522 - RNA, 19 nt, Homo sapiens
  misc_RNA (1)...(19): siRNA sense strand
gcugguagccaacgagucu

SEQ ID NO: 610523 - RNA, 19 nt, Homo sapiens
  misc_RNA (1)...(19): siRNA sense strand
aaccuacgaugaaaugagu

SEQ ID NO: 610524 - RNA, 19 nt, Homo sapiens
  misc_RNA (1)...(19): siRNA sense strand
cgcugcagguuguucgaua

SEQ ID NO: 610525 - RNA, 19 nt, Homo sapiens
  misc_RNA (1)...(19): siRNA sense strand
ugaagagugucggcucauc

SEQ ID NO: 610526 - RNA, 19 nt, Homo sapiens
  misc_RNA (1)...(19): siRNA sense strand
uagcagauaacagaaccua

SEQ ID NO: 610527 - RNA, 19 nt, Homo sapiens
  misc_RNA (1)...(19): siRNA sense strand
gggccuguguacccagaga

SEQ ID NO: 610528 - RNA, 19 nt, Homo sapiens
  misc_RNA (1)...(19): siRNA sense strand
aagaggcaaugagcacuau

SEQ ID NO: 610529 - RNA, 19 nt, Homo sapiens
  misc_RNA (1)...(19): siRNA sense strand
ugggugacguagacgacua

SEQ ID NO: 610530 - RNA, 19 nt, Homo sapiens
  misc_RNA (1)...(19): siRNA sense strand
cagacucgccugggaaaug

SEQ ID NO: 610531 - RNA, 19 nt, Homo sapiens
  misc_RNA (1)...(19): siRNA sense strand
aagggaaaccugcguguca

SEQ ID NO: 610532 - RNA, 19 nt, Homo sapiens
  misc_RNA (1)...(19): siRNA sense strand
ccugacugaugaagagugu

SEQ ID NO: 610533 - RNA, 19 nt, Homo sapiens
  misc_RNA (1)...(19): siRNA sense strand
acauggaccuucgggacuu

SEQ ID NO: 610534 - RNA, 19 nt, Homo sapiens
  misc_RNA (1)...(19): siRNA sense strand
agacucgccugggaaaugg

SEQ ID NO: 610535 - RNA, 19 nt, Homo sapiens
  misc_RNA (1)...(19): siRNA sense strand
acagcagucuucugguaca

SEQ ID NO: 610536 - RNA, 19 nt, Homo sapiens
  misc_RNA (1)...(19): siRNA sense strand
ccggcuuccugacugauga

SEQ ID NO: 610537 - RNA, 19 nt, Homo sapiens
  misc_RNA (1)...(19): siRNA sense strand
ccaagcugguagccaacga

SEQ ID NO: 610538 - RNA, 19 nt, Homo sapiens
  misc_RNA (1)...(19): siRNA sense strand
agagagcauucaggagaug

SEQ ID NO: 610539 - RNA, 19 nt, Homo sapiens
  misc_RNA (1)...(19): siRNA sense strand
acaaggcagaguccaguga

SEQ ID NO: 610540 - RNA, 19 nt, Homo sapiens
  misc_RNA (1)...(19): siRNA sense strand
ggaaauggaugguggauga

SEQ ID NO: 610541 - RNA, 19 nt, Homo sapiens
  misc_RNA (1)...(19): siRNA sense strand
gcacagcagucuucuggua

SEQ ID NO: 610542 - RNA, 19 nt, Homo sapiens
  misc_RNA (1)...(19): siRNA sense strand
uaacagaaccuacgaugaa

SEQ ID NO: 610543 - RNA, 19 nt, Homo sapiens
  misc_RNA (1)...(19): siRNA sense strand
gccaacaacuggauuaaug

SEQ ID NO: 610544 - RNA, 19 nt, Homo sapiens
  misc_RNA (1)...(19): siRNA sense strand
gagaccaucugcucccaua

SEQ ID NO: 610545 - RNA, 19 nt, Homo sapiens
  misc_RNA (1)...(19): siRNA sense strand
ccaaguggauugccaacaa

SEQ ID NO: 610546 - RNA, 19 nt, Homo sapiens
  misc_RNA (1)...(19): siRNA sense strand
cgacagggaucacuucauc

SEQ ID NO: 610547 - RNA, 19 nt, Homo sapiens
  misc_RNA (1)...(19): siRNA sense strand
gaagaggcaaugagcacua

SEQ ID NO: 610548 - RNA, 19 nt, Homo sapiens
  misc_RNA (1)...(19): siRNA sense strand
gaugaaaugagucugauuc

SEQ ID NO: 610549 - RNA, 19 nt, Homo sapiens
  misc_RNA (1)...(19): siRNA sense strand
gaagagugucggcucauca

SEQ ID NO: 610550 - RNA, 19 nt, Homo sapiens
  misc_RNA (1)...(19): siRNA sense strand
gccagauccugccuacuga

SEQ ID NO: 610551 - RNA, 19 nt, Homo sapiens
  misc_RNA (1)...(19): siRNA sense strand
ucaagccgcugcucuucga

SEQ ID NO: 610552 - RNA, 19 nt, Homo sapiens
  misc_RNA (1)...(19): siRNA sense strand
gugcggaacagccaccaua

SEQ ID NO: 610553 - RNA, 19 nt, Homo sapiens
  misc_RNA (1)...(19): siRNA sense strand
gauccugccuacugaagag

SEQ ID NO: 610554 - RNA, 19 nt, Homo sapiens
  misc_RNA (1)...(19): siRNA sense strand
gaaccgugaugggcaccuu

SEQ ID NO: 610555 - RNA, 19 nt, Homo sapiens
  misc_RNA (1)...(19): siRNA sense strand
gcugcagguuguucgauau

SEQ ID NO: 610556 - RNA, 19 nt, Homo sapiens
  misc_RNA (1)...(19): siRNA sense strand
gaaccuacgaugaaaugag

SEQ ID NO: 610557 - RNA, 19 nt, Homo sapiens
  misc_RNA (1)...(19): siRNA sense strand
cagagagcauucaggagau

SEQ ID NO: 610558 - RNA, 19 nt, Homo sapiens
  misc_RNA (1)...(19): siRNA sense strand
gcagguuguucgauauggu

SEQ ID NO: 610559 - RNA, 19 nt, Homo sapiens
  misc_RNA (1)...(19): siRNA sense strand
caacaacuggauuaaugug

SEQ ID NO: 610560 - RNA, 19 nt, Homo sapiens
  misc_RNA (1)...(19): siRNA sense strand
cagaaccuacgaugaaaug

SEQ ID NO: 610561 - RNA, 19 nt, Homo sapiens
  misc_RNA (1)...(19): siRNA sense strand
aacagaaccuacgaugaaa

SEQ ID NO: 610562 - RNA, 19 nt, Homo sapiens
  misc_RNA (1)...(19): siRNA sense strand
gcagucuucugguacaacu

SEQ ID NO: 610563 - RNA, 19 nt, Homo sapiens
  misc_RNA (1)...(19): siRNA sense strand
caacagggcacagcagucu

SEQ ID NO: 610564 - RNA, 19 nt, Homo sapiens
  misc_RNA (1)...(19): siRNA sense strand
caaguggauugccaacaac

SEQ ID NO: 610565 - RNA, 19 nt, Homo sapiens
  misc_RNA (1)...(19): siRNA sense strand
cuacagcaacggcgacgaa

SEQ ID NO: 610566 - RNA, 19 nt, Homo sapiens
  misc_RNA (1)...(19): siRNA sense strand
ccaacaacuggauuaaugu

SEQ ID NO: 610567 - RNA, 19 nt, Homo sapiens
  misc_RNA (1)...(19): siRNA sense strand
gcugguagccaacgagucu

SEQ ID NO: 610568 - RNA, 19 nt, Homo sapiens
  misc_RNA (1)...(19): siRNA sense strand
aaccuacgaugaaaugagu

SEQ ID NO: 610569 - RNA, 19 nt, Homo sapiens
  misc_RNA (1)...(19): siRNA sense strand
cgcugcagguuguucgaua

SEQ ID NO: 610570 - RNA, 19 nt, Homo sapiens
  misc_RNA (1)...(19): siRNA sense strand
ugaagagugucggcucauc

SEQ ID NO: 610571 - RNA, 19 nt, Homo sapiens
  misc_RNA (1)...(19): siRNA sense strand
uagcagauaacagaaccua

SEQ ID NO: 610572 - RNA, 19 nt, Homo sapiens
  misc_RNA (1)...(19): siRNA sense strand
gggccuguguacccagaga

SEQ ID NO: 610573 - RNA, 19 nt, Homo sapiens
  misc_RNA (1)...(19): siRNA sense strand
aagaggcaaugagcacuau

SEQ ID NO: 610574 - RNA, 19 nt, Homo sapiens
  misc_RNA (1)...(19): siRNA sense strand
ugggugacguagacgacua

SEQ ID NO: 610575 - RNA, 19 nt, Homo sapiens
  misc_RNA (1)...(19): siRNA sense strand
cagacucgccugggaaaug

SEQ ID NO: 610576 - RNA, 19 nt, Homo sapiens
  misc_RNA (1)...(19): siRNA sense strand
aagggaaaccugcguguca

SEQ ID NO: 610577 - RNA, 19 nt, Homo sapiens
  misc_RNA (1)...(19): siRNA sense strand
ccugacugaugaagagugu

SEQ ID NO: 610578 - RNA, 19 nt, Homo sapiens
  misc_RNA (1)...(19): siRNA sense strand
acauggaccuucgggacuu

SEQ ID NO: 610579 - RNA, 19 nt, Homo sapiens
  misc_RNA (1)...(19): siRNA sense strand
ccggcuuccugacugauga

SEQ ID NO: 610580 - RNA, 19 nt, Homo sapiens
  misc_RNA (1)...(19): siRNA sense strand
acagcagucuucugguaca

SEQ ID NO: 610581 - RNA, 19 nt, Homo sapiens
  misc_RNA (1)...(19): siRNA sense strand
ccaagcugguagccaacga

SEQ ID NO: 610582 - RNA, 19 nt, Homo sapiens
  misc_RNA (1)...(19): siRNA sense strand
agacucgccugggaaaugg

SEQ ID NO: 610583 - RNA, 19 nt, Homo sapiens
  misc_RNA (1)...(19): siRNA sense strand
agagagcauucaggagaug

SEQ ID NO: 610584 - RNA, 19 nt, Homo sapiens
  misc_RNA (1)...(19): siRNA sense strand
acaaggcagaguccaguga

SEQ ID NO: 610585 - RNA, 19 nt, Homo sapiens
  misc_RNA (1)...(19): siRNA sense strand
acaaauggcuggaaauuga

SEQ ID NO: 610586 - RNA, 19 nt, Homo sapiens
  misc_RNA (1)...(19): siRNA sense strand
gaaauugaauccaguugug

SEQ ID NO: 610587 - RNA, 19 nt, Homo sapiens
  misc_RNA (1)...(19): siRNA sense strand
gcacguguaaugacaaaua

SEQ ID NO: 610588 - RNA, 19 nt, Homo sapiens
  misc_RNA (1)...(19): siRNA sense strand
ggagggaucuuccauguac

SEQ ID NO: 610589 - RNA, 19 nt, Homo sapiens
  misc_RNA (1)...(19): siRNA sense strand
aaagggauuugguuucgua

SEQ ID NO: 610590 - RNA, 19 nt, Homo sapiens
  misc_RNA (1)...(19): siRNA sense strand
ccaguucacuuguauauac

SEQ ID NO: 610591 - RNA, 19 nt, Homo sapiens
  misc_RNA (1)...(19): siRNA sense strand
cgucaacccuuauacaaau

SEQ ID NO: 610592 - RNA, 19 nt, Homo sapiens
  misc_RNA (1)...(19): siRNA sense strand
gauuugguuucguaacuuu

SEQ ID NO: 610593 - RNA, 19 nt, Homo sapiens
  misc_RNA (1)...(19): siRNA sense strand
ggaccucagacaaauguuu

SEQ ID NO: 610594 - RNA, 19 nt, Homo sapiens
  misc_RNA (1)...(19): siRNA sense strand
caggagggaucuuccaugu

SEQ ID NO: 610595 - RNA, 19 nt, Homo sapiens
  misc_RNA (1)...(19): siRNA sense strand
gauccggaccucagacaaa

SEQ ID NO: 610596 - RNA, 19 nt, Homo sapiens
  misc_RNA (1)...(19): siRNA sense strand
ggacagggcgagggagaaa

SEQ ID NO: 610597 - RNA, 19 nt, Homo sapiens
  misc_RNA (1)...(19): siRNA sense strand
cacguguaaugacaaauaa

SEQ ID NO: 610598 - RNA, 19 nt, Homo sapiens
  misc_RNA (1)...(19): siRNA sense strand
ggauuugguuucguaacuu

SEQ ID NO: 610599 - RNA, 19 nt, Homo sapiens
  misc_RNA (1)...(19): siRNA sense strand
ggaaauugaauccaguugu

SEQ ID NO: 610600 - RNA, 19 nt, Homo sapiens
  misc_RNA (1)...(19): siRNA sense strand
cagcacguguaaugacaaa

SEQ ID NO: 610601 - RNA, 19 nt, Homo sapiens
  misc_RNA (1)...(19): siRNA sense strand
aaaagaccgucaacccuua

SEQ ID NO: 610602 - RNA, 19 nt, Homo sapiens
  misc_RNA (1)...(19): siRNA sense strand
gggauuugguuucguaacu

SEQ ID NO: 610603 - RNA, 19 nt, Homo sapiens
  misc_RNA (1)...(19): siRNA sense strand
cuacagucccgaauucuau

SEQ ID NO: 610604 - RNA, 19 nt, Homo sapiens
  misc_RNA (1)...(19): siRNA sense strand
uguauauacuucugcaaug

SEQ ID NO: 610605 - RNA, 19 nt, Homo sapiens
  misc_RNA (1)...(19): siRNA sense strand
uuauacaaauggcuggaaa

SEQ ID NO: 610606 - RNA, 19 nt, Homo sapiens
  misc_RNA (1)...(19): siRNA sense strand
ggcugcaugucuccaauau

SEQ ID NO: 610607 - RNA, 19 nt, Homo sapiens
  misc_RNA (1)...(19): siRNA sense strand
ucacuuguauauacuucug

SEQ ID NO: 610608 - RNA, 19 nt, Homo sapiens
  misc_RNA (1)...(19): siRNA sense strand
caaauggcuggaaauugaa

SEQ ID NO: 610609 - RNA, 19 nt, Homo sapiens
  misc_RNA (1)...(19): siRNA sense strand
guauauacuucugcaaugc

SEQ ID NO: 610610 - RNA, 19 nt, Homo sapiens
  misc_RNA (1)...(19): siRNA sense strand
aaaucgagguaaauaaugc

SEQ ID NO: 610611 - RNA, 19 nt, Homo sapiens
  misc_RNA (1)...(19): siRNA sense strand
agucuacagucccgaauuc

SEQ ID NO: 610612 - RNA, 19 nt, Homo sapiens
  misc_RNA (1)...(19): siRNA sense strand
auacaaauggcuggaaauu

SEQ ID NO: 610613 - RNA, 19 nt, Homo sapiens
  misc_RNA (1)...(19): siRNA sense strand
cacagcacguguaaugaca

SEQ ID NO: 610614 - RNA, 19 nt, Homo sapiens
  misc_RNA (1)...(19): siRNA sense strand
cugcaugucuccaauaucc

SEQ ID NO: 610615 - RNA, 19 nt, Homo sapiens
  misc_RNA (1)...(19): siRNA sense strand
guucacuuguauauacuuc

SEQ ID NO: 610616 - RNA, 19 nt, Homo sapiens
  misc_RNA (1)...(19): siRNA sense strand
acagggcgagggagaaauu

SEQ ID NO: 610617 - RNA, 19 nt, Homo sapiens
  misc_RNA (1)...(19): siRNA sense strand
agacacaaccuucugaaaa

SEQ ID NO: 610618 - RNA, 19 nt, Homo sapiens
  misc_RNA (1)...(19): siRNA sense strand
gcacacauuaaaccuguac

SEQ ID NO: 610619 - RNA, 19 nt, Homo sapiens
  misc_RNA (1)...(19): siRNA sense strand
ugccacagcacguguaaug

SEQ ID NO: 610620 - RNA, 19 nt, Homo sapiens
  misc_RNA (1)...(19): siRNA sense strand
gacacaaccuucugaaaac

SEQ ID NO: 610621 - RNA, 19 nt, Homo sapiens
  misc_RNA (1)...(19): siRNA sense strand
gcaccgccacacagacaga

SEQ ID NO: 610622 - RNA, 19 nt, Homo sapiens
  misc_RNA (1)...(19): siRNA sense strand
gaccgucaacccuuauaca

SEQ ID NO: 610623 - RNA, 19 nt, Homo sapiens
  misc_RNA (1)...(19): siRNA sense strand
ggucgcaccguguacaaca

SEQ ID NO: 610624 - RNA, 19 nt, Homo sapiens
  misc_RNA (1)...(19): siRNA sense strand
gucaacccuuauacaaaug

SEQ ID NO: 610625 - RNA, 19 nt, Homo sapiens
  misc_RNA (1)...(19): siRNA sense strand
gcgaggcucaaagggauuu

SEQ ID NO: 610626 - RNA, 19 nt, Homo sapiens
  misc_RNA (1)...(19): siRNA sense strand
ccgucaacccuuauacaaa

SEQ ID NO: 610627 - RNA, 19 nt, Homo sapiens
  misc_RNA (1)...(19): siRNA sense strand
gggcgagggagaaauuaca

SEQ ID NO: 610628 - RNA, 19 nt, Homo sapiens
  misc_RNA (1)...(19): siRNA sense strand
ccacagcacguguaaugac

SEQ ID NO: 610629 - RNA, 19 nt, Homo sapiens
  misc_RNA (1)...(19): siRNA sense strand
uacaaauggcuggaaauug

SEQ ID NO: 610630 - RNA, 19 nt, Homo sapiens
  misc_RNA (1)...(19): siRNA sense strand
acaaauggcuggaaauuga

SEQ ID NO: 610631 - RNA, 19 nt, Homo sapiens
  misc_RNA (1)...(19): siRNA sense strand
gaaauugaauccaguugug

SEQ ID NO: 610632 - RNA, 19 nt, Homo sapiens
  misc_RNA (1)...(19): siRNA sense strand
gcacguguaaugacaaaua

SEQ ID NO: 610633 - RNA, 19 nt, Homo sapiens
  misc_RNA (1)...(19): siRNA sense strand
ggagggaucuuccauguac

SEQ ID NO: 610634 - RNA, 19 nt, Homo sapiens
  misc_RNA (1)...(19): siRNA sense strand
aaagggauuugguuucgua

SEQ ID NO: 610635 - RNA, 19 nt, Homo sapiens
  misc_RNA (1)...(19): siRNA sense strand
ccaguucacuuguauauac

SEQ ID NO: 610636 - RNA, 19 nt, Homo sapiens
  misc_RNA (1)...(19): siRNA sense strand
cgucaacccuuauacaaau

SEQ ID NO: 610637 - RNA, 19 nt, Homo sapiens
  misc_RNA (1)...(19): siRNA sense strand
gauuugguuucguaacuuu

SEQ ID NO: 610638 - RNA, 19 nt, Homo sapiens
  misc_RNA (1)...(19): siRNA sense strand
ggaccucagacaaauguuu

SEQ ID NO: 610639 - RNA, 19 nt, Homo sapiens
  misc_RNA (1)...(19): siRNA sense strand
caggagggaucuuccaugu

SEQ ID NO: 610640 - RNA, 19 nt, Homo sapiens
  misc_RNA (1)...(19): siRNA sense strand
gauccggaccucagacaaa

SEQ ID NO: 610641 - RNA, 19 nt, Homo sapiens
  misc_RNA (1)...(19): siRNA sense strand
ggacagggcgagggagaaa

SEQ ID NO: 610642 - RNA, 19 nt, Homo sapiens
  misc_RNA (1)...(19): siRNA sense strand
cacguguaaugacaaauaa

SEQ ID NO: 610643 - RNA, 19 nt, Homo sapiens
  misc_RNA (1)...(19): siRNA sense strand
ggauuugguuucguaacuu

SEQ ID NO: 610644 - RNA, 19 nt, Homo sapiens
  misc_RNA (1)...(19): siRNA sense strand
ggaaauugaauccaguugu

SEQ ID NO: 610645 - RNA, 19 nt, Homo sapiens
  misc_RNA (1)...(19): siRNA sense strand
cagcacguguaaugacaaa

SEQ ID NO: 610646 - RNA, 19 nt, Homo sapiens
  misc_RNA (1)...(19): siRNA sense strand
aaaagaccgucaacccuua

SEQ ID NO: 610647 - RNA, 19 nt, Homo sapiens
  misc_RNA (1)...(19): siRNA sense strand
gggauuugguuucguaacu

SEQ ID NO: 610648 - RNA, 19 nt, Homo sapiens
  misc_RNA (1)...(19): siRNA sense strand
cuacagucccgaauucuau

SEQ ID NO: 610649 - RNA, 19 nt, Homo sapiens
  misc_RNA (1)...(19): siRNA sense strand
uguauauacuucugcaaug

SEQ ID NO: 610650 - RNA, 19 nt, Homo sapiens
  misc_RNA (1)...(19): siRNA sense strand
uuauacaaauggcuggaaa

SEQ ID NO: 610651 - RNA, 19 nt, Homo sapiens
  misc_RNA (1)...(19): siRNA sense strand
ggcugcaugucuccaauau

SEQ ID NO: 610652 - RNA, 19 nt, Homo sapiens
  misc_RNA (1)...(19): siRNA sense strand
ucacuuguauauacuucug

SEQ ID NO: 610653 - RNA, 19 nt, Homo sapiens
  misc_RNA (1)...(19): siRNA sense strand
caaauggcuggaaauugaa

SEQ ID NO: 610654 - RNA, 19 nt, Homo sapiens
  misc_RNA (1)...(19): siRNA sense strand
guauauacuucugcaaugc

SEQ ID NO: 610655 - RNA, 19 nt, Homo sapiens
  misc_RNA (1)...(19): siRNA sense strand
aaaucgagguaaauaaugc

SEQ ID NO: 610656 - RNA, 19 nt, Homo sapiens
  misc_RNA (1)...(19): siRNA sense strand
agucuacagucccgaauuc

SEQ ID NO: 610657 - RNA, 19 nt, Homo sapiens
  misc_RNA (1)...(19): siRNA sense strand
auacaaauggcuggaaauu

SEQ ID NO: 610658 - RNA, 19 nt, Homo sapiens
  misc_RNA (1)...(19): siRNA sense strand
cacagcacguguaaugaca

SEQ ID NO: 610659 - RNA, 19 nt, Homo sapiens
  misc_RNA (1)...(19): siRNA sense strand
cugcaugucuccaauaucc

SEQ ID NO: 610660 - RNA, 19 nt, Homo sapiens
  misc_RNA (1)...(19): siRNA sense strand
guucacuuguauauacuuc

SEQ ID NO: 610661 - RNA, 19 nt, Homo sapiens
  misc_RNA (1)...(19): siRNA sense strand
acagggcgagggagaaauu

SEQ ID NO: 610662 - RNA, 19 nt, Homo sapiens
  misc_RNA (1)...(19): siRNA sense strand
agacacaaccuucugaaaa

SEQ ID NO: 610663 - RNA, 19 nt, Homo sapiens
  misc_RNA (1)...(19): siRNA sense strand
gcacacauuaaaccuguac

SEQ ID NO: 610664 - RNA, 19 nt, Homo sapiens
  misc_RNA (1)...(19): siRNA sense strand
ugccacagcacguguaaug

SEQ ID NO: 610665 - RNA, 19 nt, Homo sapiens
  misc_RNA (1)...(19): siRNA sense strand
gacacaaccuucugaaaac

SEQ ID NO: 610666 - RNA, 19 nt, Homo sapiens
  misc_RNA (1)...(19): siRNA sense strand
gcaccgccacacagacaga

SEQ ID NO: 610667 - RNA, 19 nt, Homo sapiens
  misc_RNA (1)...(19): siRNA sense strand
gaccgucaacccuuauaca

SEQ ID NO: 610668 - RNA, 19 nt, Homo sapiens
  misc_RNA (1)...(19): siRNA sense strand
ggucgcaccguguacaaca

SEQ ID NO: 610669 - RNA, 19 nt, Homo sapiens
  misc_RNA (1)...(19): siRNA sense strand
gucaacccuuauacaaaug

SEQ ID NO: 610670 - RNA, 19 nt, Homo sapiens
  misc_RNA (1)...(19): siRNA sense strand
gcgaggcucaaagggauuu

SEQ ID NO: 610671 - RNA, 19 nt, Homo sapiens
  misc_RNA (1)...(19): siRNA sense strand
ccgucaacccuuauacaaa

SEQ ID NO: 610672 - RNA, 19 nt, Homo sapiens
  misc_RNA (1)...(19): siRNA sense strand
gggcgagggagaaauuaca

SEQ ID NO: 610673 - RNA, 19 nt, Homo sapiens
  misc_RNA (1)...(19): siRNA sense strand
ccacagcacguguaaugac

SEQ ID NO: 610674 - RNA, 19 nt, Homo sapiens
  misc_RNA (1)...(19): siRNA sense strand
uacaaauggcuggaaauug

SEQ ID NO: 610675 - RNA, 19 nt, Homo sapiens
  misc_RNA (1)...(19): siRNA sense strand
acaaauggcuggaaauuga

SEQ ID NO: 610676 - RNA, 19 nt, Homo sapiens
  misc_RNA (1)...(19): siRNA sense strand
gaaauugaauccaguugug

SEQ ID NO: 610677 - RNA, 19 nt, Homo sapiens
  misc_RNA (1)...(19): siRNA sense strand
gcacguguaaugacaaaua

SEQ ID NO: 610678 - RNA, 19 nt, Homo sapiens
  misc_RNA (1)...(19): siRNA sense strand
ggagggaucuuccauguac

SEQ ID NO: 610679 - RNA, 19 nt, Homo sapiens
  misc_RNA (1)...(19): siRNA sense strand
aaagggauuugguuucgua

SEQ ID NO: 610680 - RNA, 19 nt, Homo sapiens
  misc_RNA (1)...(19): siRNA sense strand
ccaguucacuuguauauac

SEQ ID NO: 610681 - RNA, 19 nt, Homo sapiens
  misc_RNA (1)...(19): siRNA sense strand
cgucaacccuuauacaaau

SEQ ID NO: 610682 - RNA, 19 nt, Homo sapiens
  misc_RNA (1)...(19): siRNA sense strand
gauuugguuucguaacuuu

SEQ ID NO: 610683 - RNA, 19 nt, Homo sapiens
  misc_RNA (1)...(19): siRNA sense strand
ggaccucagacaaauguuu

SEQ ID NO: 610684 - RNA, 19 nt, Homo sapiens
  misc_RNA (1)...(19): siRNA sense strand
caggagggaucuuccaugu

SEQ ID NO: 610685 - RNA, 19 nt, Homo sapiens
  misc_RNA (1)...(19): siRNA sense strand
gauccggaccucagacaaa

SEQ ID NO: 610686 - RNA, 19 nt, Homo sapiens
  misc_RNA (1)...(19): siRNA sense strand
ggacagggcgagggagaaa

SEQ ID NO: 610687 - RNA, 19 nt, Homo sapiens
  misc_RNA (1)...(19): siRNA sense strand
cacguguaaugacaaauaa

SEQ ID NO: 610688 - RNA, 19 nt, Homo sapiens
  misc_RNA (1)...(19): siRNA sense strand
ggauuugguuucguaacuu

SEQ ID NO: 610689 - RNA, 19 nt, Homo sapiens
  misc_RNA (1)...(19): siRNA sense strand
ggaaauugaauccaguugu

SEQ ID NO: 610690 - RNA, 19 nt, Homo sapiens
  misc_RNA (1)...(19): siRNA sense strand
cagcacguguaaugacaaa

SEQ ID NO: 610691 - RNA, 19 nt, Homo sapiens
  misc_RNA (1)...(19): siRNA sense strand
aaaagaccgucaacccuua

SEQ ID NO: 610692 - RNA, 19 nt, Homo sapiens
  misc_RNA (1)...(19): siRNA sense strand
gggauuugguuucguaacu

SEQ ID NO: 610693 - RNA, 19 nt, Homo sapiens
  misc_RNA (1)...(19): siRNA sense strand
cuacagucccgaauucuau

SEQ ID NO: 610694 - RNA, 19 nt, Homo sapiens
  misc_RNA (1)...(19): siRNA sense strand
uguauauacuucugcaaug

SEQ ID NO: 610695 - RNA, 19 nt, Homo sapiens
  misc_RNA (1)...(19): siRNA sense strand
uuauacaaauggcuggaaa

SEQ ID NO: 610696 - RNA, 19 nt, Homo sapiens
  misc_RNA (1)...(19): siRNA sense strand
ggcugcaugucuccaauau

SEQ ID NO: 610697 - RNA, 19 nt, Homo sapiens
  misc_RNA (1)...(19): siRNA sense strand
ucacuuguauauacuucug

SEQ ID NO: 610698 - RNA, 19 nt, Homo sapiens
  misc_RNA (1)...(19): siRNA sense strand
caaauggcuggaaauugaa

SEQ ID NO: 610699 - RNA, 19 nt, Homo sapiens
  misc_RNA (1)...(19): siRNA sense strand
guauauacuucugcaaugc

SEQ ID NO: 610700 - RNA, 19 nt, Homo sapiens
  misc_RNA (1)...(19): siRNA sense strand
aaaucgagguaaauaaugc

SEQ ID NO: 610701 - RNA, 19 nt, Homo sapiens
  misc_RNA (1)...(19): siRNA sense strand
agucuacagucccgaauuc

SEQ ID NO: 610702 - RNA, 19 nt, Homo sapiens
  misc_RNA (1)...(19): siRNA sense strand
auacaaauggcuggaaauu

SEQ ID NO: 610703 - RNA, 19 nt, Homo sapiens
  misc_RNA (1)...(19): siRNA sense strand
cacagcacguguaaugaca

SEQ ID NO: 610704 - RNA, 19 nt, Homo sapiens
  misc_RNA (1)...(19): siRNA sense strand
cugcaugucuccaauaucc

SEQ ID NO: 610705 - RNA, 19 nt, Homo sapiens
  misc_RNA (1)...(19): siRNA sense strand
guucacuuguauauacuuc

SEQ ID NO: 610706 - RNA, 19 nt, Homo sapiens
  misc_RNA (1)...(19): siRNA sense strand
acagggcgagggagaaauu

SEQ ID NO: 610707 - RNA, 19 nt, Homo sapiens
  misc_RNA (1)...(19): siRNA sense strand
agacacaaccuucugaaaa

SEQ ID NO: 610708 - RNA, 19 nt, Homo sapiens
  misc_RNA (1)...(19): siRNA sense strand
gcacacauuaaaccuguac

SEQ ID NO: 610709 - RNA, 19 nt, Homo sapiens
  misc_RNA (1)...(19): siRNA sense strand
ugccacagcacguguaaug

SEQ ID NO: 610710 - RNA, 19 nt, Homo sapiens
  misc_RNA (1)...(19): siRNA sense strand
gacacaaccuucugaaaac

SEQ ID NO: 610711 - RNA, 19 nt, Homo sapiens
  misc_RNA (1)...(19): siRNA sense strand
gcaccgccacacagacaga

SEQ ID NO: 610712 - RNA, 19 nt, Homo sapiens
  misc_RNA (1)...(19): siRNA sense strand
gaccgucaacccuuauaca

SEQ ID NO: 610713 - RNA, 19 nt, Homo sapiens
  misc_RNA (1)...(19): siRNA sense strand
ggucgcaccguguacaaca

SEQ ID NO: 610714 - RNA, 19 nt, Homo sapiens
  misc_RNA (1)...(19): siRNA sense strand
gucaacccuuauacaaaug

SEQ ID NO: 610715 - RNA, 19 nt, Homo sapiens
  misc_RNA (1)...(19): siRNA sense strand
gcgaggcucaaagggauuu

SEQ ID NO: 610716 - RNA, 19 nt, Homo sapiens
  misc_RNA (1)...(19): siRNA sense strand
ccgucaacccuuauacaaa

SEQ ID NO: 610717 - RNA, 19 nt, Homo sapiens
  misc_RNA (1)...(19): siRNA sense strand
gggcgagggagaaauuaca

SEQ ID NO: 610718 - RNA, 19 nt, Homo sapiens
  misc_RNA (1)...(19): siRNA sense strand
ccacagcacguguaaugac

SEQ ID NO: 610719 - RNA, 19 nt, Homo sapiens
  misc_RNA (1)...(19): siRNA sense strand
uacaaauggcuggaaauug

SEQ ID NO: 610720 - RNA, 19 nt, Homo sapiens
  misc_RNA (1)...(19): siRNA sense strand
acaaauggcuggaaauuga

SEQ ID NO: 610721 - RNA, 19 nt, Homo sapiens
  misc_RNA (1)...(19): siRNA sense strand
gaaauugaauccaguugug

SEQ ID NO: 610722 - RNA, 19 nt, Homo sapiens
  misc_RNA (1)...(19): siRNA sense strand
gcacguguaaugacaaaua

SEQ ID NO: 610723 - RNA, 19 nt, Homo sapiens
  misc_RNA (1)...(19): siRNA sense strand
ggagggaucuuccauguac

SEQ ID NO: 610724 - RNA, 19 nt, Homo sapiens
  misc_RNA (1)...(19): siRNA sense strand
aaagggauuugguuucgua

SEQ ID NO: 610725 - RNA, 19 nt, Homo sapiens
  misc_RNA (1)...(19): siRNA sense strand
ccaguucacuuguauauac

SEQ ID NO: 610726 - RNA, 19 nt, Homo sapiens
  misc_RNA (1)...(19): siRNA sense strand
cgucaacccuuauacaaau

SEQ ID NO: 610727 - RNA, 19 nt, Homo sapiens
  misc_RNA (1)...(19): siRNA sense strand
gauuugguuucguaacuuu

SEQ ID NO: 610728 - RNA, 19 nt, Homo sapiens
  misc_RNA (1)...(19): siRNA sense strand
ggaccucagacaaauguuu

SEQ ID NO: 610729 - RNA, 19 nt, Homo sapiens
  misc_RNA (1)...(19): siRNA sense strand
caggagggaucuuccaugu

SEQ ID NO: 610730 - RNA, 19 nt, Homo sapiens
  misc_RNA (1)...(19): siRNA sense strand
gauccggaccucagacaaa

SEQ ID NO: 610731 - RNA, 19 nt, Homo sapiens
  misc_RNA (1)...(19): siRNA sense strand
ggacagggcgagggagaaa

SEQ ID NO: 610732 - RNA, 19 nt, Homo sapiens
  misc_RNA (1)...(19): siRNA sense strand
cacguguaaugacaaauaa

SEQ ID NO: 610733 - RNA, 19 nt, Homo sapiens
  misc_RNA (1)...(19): siRNA sense strand
ggauuugguuucguaacuu

SEQ ID NO: 610734 - RNA, 19 nt, Homo sapiens
  misc_RNA (1)...(19): siRNA sense strand
ggaaauugaauccaguugu

SEQ ID NO: 610735 - RNA, 19 nt, Homo sapiens
  misc_RNA (1)...(19): siRNA sense strand
cagcacguguaaugacaaa

SEQ ID NO: 610736 - RNA, 19 nt, Homo sapiens
  misc_RNA (1)...(19): siRNA sense strand
aaaagaccgucaacccuua

SEQ ID NO: 610737 - RNA, 19 nt, Homo sapiens
  misc_RNA (1)...(19): siRNA sense strand
gggauuugguuucguaacu

SEQ ID NO: 610738 - RNA, 19 nt, Homo sapiens
  misc_RNA (1)...(19): siRNA sense strand
cuacagucccgaauucuau

SEQ ID NO: 610739 - RNA, 19 nt, Homo sapiens
  misc_RNA (1)...(19): siRNA sense strand
uguauauacuucugcaaug

SEQ ID NO: 610740 - RNA, 19 nt, Homo sapiens
  misc_RNA (1)...(19): siRNA sense strand
uuauacaaauggcuggaaa

SEQ ID NO: 610741 - RNA, 19 nt, Homo sapiens
  misc_RNA (1)...(19): siRNA sense strand
ggcugcaugucuccaauau

SEQ ID NO: 610742 - RNA, 19 nt, Homo sapiens
  misc_RNA (1)...(19): siRNA sense strand
ucacuuguauauacuucug

SEQ ID NO: 610743 - RNA, 19 nt, Homo sapiens
  misc_RNA (1)...(19): siRNA sense strand
caaauggcuggaaauugaa

SEQ ID NO: 610744 - RNA, 19 nt, Homo sapiens
  misc_RNA (1)...(19): siRNA sense strand
guauauacuucugcaaugc

SEQ ID NO: 610745 - RNA, 19 nt, Homo sapiens
  misc_RNA (1)...(19): siRNA sense strand
aaaucgagguaaauaaugc

SEQ ID NO: 610746 - RNA, 19 nt, Homo sapiens
  misc_RNA (1)...(19): siRNA sense strand
agucuacagucccgaauuc

SEQ ID NO: 610747 - RNA, 19 nt, Homo sapiens
  misc_RNA (1)...(19): siRNA sense strand
auacaaauggcuggaaauu

SEQ ID NO: 610748 - RNA, 19 nt, Homo sapiens
  misc_RNA (1)...(19): siRNA sense strand
cacagcacguguaaugaca

SEQ ID NO: 610749 - RNA, 19 nt, Homo sapiens
  misc_RNA (1)...(19): siRNA sense strand
cugcaugucuccaauaucc

SEQ ID NO: 610750 - RNA, 19 nt, Homo sapiens
  misc_RNA (1)...(19): siRNA sense strand
guucacuuguauauacuuc

SEQ ID NO: 610751 - RNA, 19 nt, Homo sapiens
  misc_RNA (1)...(19): siRNA sense strand
acagggcgagggagaaauu

SEQ ID NO: 610752 - RNA, 19 nt, Homo sapiens
  misc_RNA (1)...(19): siRNA sense strand
agacacaaccuucugaaaa

SEQ ID NO: 610753 - RNA, 19 nt, Homo sapiens
  misc_RNA (1)...(19): siRNA sense strand
gcacacauuaaaccuguac

SEQ ID NO: 610754 - RNA, 19 nt, Homo sapiens
  misc_RNA (1)...(19): siRNA sense strand
ugccacagcacguguaaug

SEQ ID NO: 610755 - RNA, 19 nt, Homo sapiens
  misc_RNA (1)...(19): siRNA sense strand
gacacaaccuucugaaaac

SEQ ID NO: 610756 - RNA, 19 nt, Homo sapiens
  misc_RNA (1)...(19): siRNA sense strand
gcaccgccacacagacaga

SEQ ID NO: 610757 - RNA, 19 nt, Homo sapiens
  misc_RNA (1)...(19): siRNA sense strand
gaccgucaacccuuauaca

SEQ ID NO: 610758 - RNA, 19 nt, Homo sapiens
  misc_RNA (1)...(19): siRNA sense strand
ggucgcaccguguacaaca

SEQ ID NO: 610759 - RNA, 19 nt, Homo sapiens
  misc_RNA (1)...(19): siRNA sense strand
gucaacccuuauacaaaug

SEQ ID NO: 610760 - RNA, 19 nt, Homo sapiens
  misc_RNA (1)...(19): siRNA sense strand
gcgaggcucaaagggauuu

SEQ ID NO: 610761 - RNA, 19 nt, Homo sapiens
  misc_RNA (1)...(19): siRNA sense strand
ccgucaacccuuauacaaa

SEQ ID NO: 610762 - RNA, 19 nt, Homo sapiens
  misc_RNA (1)...(19): siRNA sense strand
gggcgagggagaaauuaca

SEQ ID NO: 610763 - RNA, 19 nt, Homo sapiens
  misc_RNA (1)...(19): siRNA sense strand
ccacagcacguguaaugac

SEQ ID NO: 610764 - RNA, 19 nt, Homo sapiens
  misc_RNA (1)...(19): siRNA sense strand
uacaaauggcuggaaauug

SEQ ID NO: 610765 - RNA, 19 nt, Homo sapiens
  misc_RNA (1)...(19): siRNA sense strand
ggaaguagcugaugaagau

SEQ ID NO: 610766 - RNA, 19 nt, Homo sapiens
  misc_RNA (1)...(19): siRNA sense strand
gaacagagagaaauuugaa

SEQ ID NO: 610767 - RNA, 19 nt, Homo sapiens
  misc_RNA (1)...(19): siRNA sense strand
aaagaaagcucugcuaugu

SEQ ID NO: 610768 - RNA, 19 nt, Homo sapiens
  misc_RNA (1)...(19): siRNA sense strand
ggaugacaguugcaaguaa

SEQ ID NO: 610769 - RNA, 19 nt, Homo sapiens
  misc_RNA (1)...(19): siRNA sense strand
agaaagcucugcuaugugu

SEQ ID NO: 610770 - RNA, 19 nt, Homo sapiens
  misc_RNA (1)...(19): siRNA sense strand
agagaaauuugaagcguuu

SEQ ID NO: 610771 - RNA, 19 nt, Homo sapiens
  misc_RNA (1)...(19): siRNA sense strand
gucagucucuccuuuauga

SEQ ID NO: 610772 - RNA, 19 nt, Homo sapiens
  misc_RNA (1)...(19): siRNA sense strand
gaaaagguguuacuguguu

SEQ ID NO: 610773 - RNA, 19 nt, Homo sapiens
  misc_RNA (1)...(19): siRNA sense strand
gagaacagagagaaauuug

SEQ ID NO: 610774 - RNA, 19 nt, Homo sapiens
  misc_RNA (1)...(19): siRNA sense strand
gagagaacagagagaaauu

SEQ ID NO: 610775 - RNA, 19 nt, Homo sapiens
  misc_RNA (1)...(19): siRNA sense strand
agaaggaucauuugaagaa

SEQ ID NO: 610776 - RNA, 19 nt, Homo sapiens
  misc_RNA (1)...(19): siRNA sense strand
gaaggaucauuugaagaau

SEQ ID NO: 610777 - RNA, 19 nt, Homo sapiens
  misc_RNA (1)...(19): siRNA sense strand
gguaggacaaguggaaaua

SEQ ID NO: 610778 - RNA, 19 nt, Homo sapiens
  misc_RNA (1)...(19): siRNA sense strand
uaaagaaagcucugcuaug

SEQ ID NO: 610779 - RNA, 19 nt, Homo sapiens
  misc_RNA (1)...(19): siRNA sense strand
ggacaaguggaaauaagug

SEQ ID NO: 610780 - RNA, 19 nt, Homo sapiens
  misc_RNA (1)...(19): siRNA sense strand
ugauggaacuagacacguu

SEQ ID NO: 610781 - RNA, 19 nt, Homo sapiens
  misc_RNA (1)...(19): siRNA sense strand
acagugaaauaucagauuc

SEQ ID NO: 610782 - RNA, 19 nt, Homo sapiens
  misc_RNA (1)...(19): siRNA sense strand
uaauuuaucgggaaccaaa

SEQ ID NO: 610783 - RNA, 19 nt, Homo sapiens
  misc_RNA (1)...(19): siRNA sense strand
ugaugaagauaacagugaa

SEQ ID NO: 610784 - RNA, 19 nt, Homo sapiens
  misc_RNA (1)...(19): siRNA sense strand
gaaccaaauguuucuccuu

SEQ ID NO: 610785 - RNA, 19 nt, Homo sapiens
  misc_RNA (1)...(19): siRNA sense strand
gagaagguauuuaaaacug

SEQ ID NO: 610786 - RNA, 19 nt, Homo sapiens
  misc_RNA (1)...(19): siRNA sense strand
aauaucagauucagaggau

SEQ ID NO: 610787 - RNA, 19 nt, Homo sapiens
  misc_RNA (1)...(19): siRNA sense strand
auagaaggaucauuugaag

SEQ ID NO: 610788 - RNA, 19 nt, Homo sapiens
  misc_RNA (1)...(19): siRNA sense strand
augaauugcuguaugagaa

SEQ ID NO: 610789 - RNA, 19 nt, Homo sapiens
  misc_RNA (1)...(19): siRNA sense strand
ggaauggguaggacaagug

SEQ ID NO: 610790 - RNA, 19 nt, Homo sapiens
  misc_RNA (1)...(19): siRNA sense strand
uaucgggaaccaaauguuu

SEQ ID NO: 610791 - RNA, 19 nt, Homo sapiens
  misc_RNA (1)...(19): siRNA sense strand
ggaacuagacacguuggaa

SEQ ID NO: 610792 - RNA, 19 nt, Homo sapiens
  misc_RNA (1)...(19): siRNA sense strand
guaggacaaguggaaauaa

SEQ ID NO: 610793 - RNA, 19 nt, Homo sapiens
  misc_RNA (1)...(19): siRNA sense strand
aaauguuucuccuucacaa

SEQ ID NO: 610794 - RNA, 19 nt, Homo sapiens
  misc_RNA (1)...(19): siRNA sense strand
cgagagaacagagagaaau

SEQ ID NO: 610795 - RNA, 19 nt, Homo sapiens
  misc_RNA (1)...(19): siRNA sense strand
gaggaugacaguugcaagu

SEQ ID NO: 610796 - RNA, 19 nt, Homo sapiens
  misc_RNA (1)...(19): siRNA sense strand
gaaguagcugaugaagaua

SEQ ID NO: 610797 - RNA, 19 nt, Homo sapiens
  misc_RNA (1)...(19): siRNA sense strand
guguaucccauaaaguaua

SEQ ID NO: 610798 - RNA, 19 nt, Homo sapiens
  misc_RNA (1)...(19): siRNA sense strand
uaggacaaguggaaauaag

SEQ ID NO: 610799 - RNA, 19 nt, Homo sapiens
  misc_RNA (1)...(19): siRNA sense strand
aaauugugauggaacuaga

SEQ ID NO: 610800 - RNA, 19 nt, Homo sapiens
  misc_RNA (1)...(19): siRNA sense strand
uaucagauucagaggauga

SEQ ID NO: 610801 - RNA, 19 nt, Homo sapiens
  misc_RNA (1)...(19): siRNA sense strand
uauaaagaaagcucugcua

SEQ ID NO: 610802 - RNA, 19 nt, Homo sapiens
  misc_RNA (1)...(19): siRNA sense strand
uuguguaucccauaaagua

SEQ ID NO: 610803 - RNA, 19 nt, Homo sapiens
  misc_RNA (1)...(19): siRNA sense strand
gaugaagauaacagugaaa

SEQ ID NO: 610804 - RNA, 19 nt, Homo sapiens
  misc_RNA (1)...(19): siRNA sense strand
gugucagucucuccuuuau

SEQ ID NO: 610805 - RNA, 19 nt, Homo sapiens
  misc_RNA (1)...(19): siRNA sense strand
agagaacagagagaaauuu

SEQ ID NO: 610806 - RNA, 19 nt, Homo sapiens
  misc_RNA (1)...(19): siRNA sense strand
agucucuccuuuaugaauu

SEQ ID NO: 610807 - RNA, 19 nt, Homo sapiens
  misc_RNA (1)...(19): siRNA sense strand
auaaagaaagcucugcuau

SEQ ID NO: 610808 - RNA, 19 nt, Homo sapiens
  misc_RNA (1)...(19): siRNA sense strand
cuagacacguuggaaguag

SEQ ID NO: 610809 - RNA, 19 nt, Homo sapiens
  misc_RNA (1)...(19): siRNA sense strand
cguuggaaguagcugauga

SEQ ID NO: 610810 - RNA, 19 nt, Homo sapiens
  misc_RNA (1)...(19): siRNA sense strand
ucucuuauguacaggaaag

SEQ ID NO: 610811 - RNA, 19 nt, Homo sapiens
  misc_RNA (1)...(19): siRNA sense strand
ugaagcguuuauagaagga

SEQ ID NO: 610812 - RNA, 19 nt, Homo sapiens
  misc_RNA (1)...(19): siRNA sense strand
ccaaauguuucuccuucac

SEQ ID NO: 610813 - RNA, 19 nt, Homo sapiens
  misc_RNA (1)...(19): siRNA sense strand
uauuguguaucccauaaag

SEQ ID NO: 610814 - RNA, 19 nt, Homo sapiens
  misc_RNA (1)...(19): siRNA sense strand
uguuucuccuucacaagua

SEQ ID NO: 610815 - RNA, 19 nt, Homo sapiens
  misc_RNA (1)...(19): siRNA sense strand
guuucuccuucacaaguaa

SEQ ID NO: 610816 - RNA, 19 nt, Homo sapiens
  misc_RNA (1)...(19): siRNA sense strand
ugugucagucucuccuuua

SEQ ID NO: 610817 - RNA, 19 nt, Homo sapiens
  misc_RNA (1)...(19): siRNA sense strand
gagaaauuugaagcguuua

SEQ ID NO: 610818 - RNA, 19 nt, Homo sapiens
  misc_RNA (1)...(19): siRNA sense strand
auucagaggaugacaguug

SEQ ID NO: 610819 - RNA, 19 nt, Homo sapiens
  misc_RNA (1)...(19): siRNA sense strand
cugaugaagauaacaguga

SEQ ID NO: 610820 - RNA, 19 nt, Homo sapiens
  misc_RNA (1)...(19): siRNA sense strand
caaauguuucuccuucaca

SEQ ID NO: 610821 - RNA, 19 nt, Homo sapiens
  misc_RNA (1)...(19): siRNA sense strand
aauaagugcccuuucucuu

SEQ ID NO: 610822 - RNA, 19 nt, Homo sapiens
  misc_RNA (1)...(19): siRNA sense strand
aaaagguguuacuguguuu

SEQ ID NO: 610823 - RNA, 19 nt, Homo sapiens
  misc_RNA (1)...(19): siRNA sense strand
agaacagagagaaauuuga

SEQ ID NO: 610824 - RNA, 19 nt, Homo sapiens
  misc_RNA (1)...(19): siRNA sense strand
guggaaauaagugcccuuu

SEQ ID NO: 610825 - RNA, 19 nt, Homo sapiens
  misc_RNA (1)...(19): siRNA sense strand
caggaaaccuuuaccauaa

SEQ ID NO: 610826 - RNA, 19 nt, Homo sapiens
  misc_RNA (1)...(19): siRNA sense strand
ggagugauguuucagauug

SEQ ID NO: 610827 - RNA, 19 nt, Homo sapiens
  misc_RNA (1)...(19): siRNA sense strand
gaagaccaguacuccauug

SEQ ID NO: 610828 - RNA, 19 nt, Homo sapiens
  misc_RNA (1)...(19): siRNA sense strand
ccaggaaaccuuuaccaua

SEQ ID NO: 610829 - RNA, 19 nt, Homo sapiens
  misc_RNA (1)...(19): siRNA sense strand
ucagcuagauccuaugaaa

SEQ ID NO: 610830 - RNA, 19 nt, Homo sapiens
  misc_RNA (1)...(19): siRNA sense strand
guauaaggauggagugaug

SEQ ID NO: 610831 - RNA, 19 nt, Homo sapiens
  misc_RNA (1)...(19): siRNA sense strand
aaacuacagugugauauug

SEQ ID NO: 610832 - RNA, 19 nt, Homo sapiens
  misc_RNA (1)...(19): siRNA sense strand
gauauugucuacgcgguuu

SEQ ID NO: 610833 - RNA, 19 nt, Homo sapiens
  misc_RNA (1)...(19): siRNA sense strand
ggacagaaagucagcuaga

SEQ ID NO: 610834 - RNA, 19 nt, Homo sapiens
  misc_RNA (1)...(19): siRNA sense strand
aaagucagcuagauccuau

SEQ ID NO: 610835 - RNA, 19 nt, Homo sapiens
  misc_RNA (1)...(19): siRNA sense strand
gaaagucagcuagauccua

SEQ ID NO: 610836 - RNA, 19 nt, Homo sapiens
  misc_RNA (1)...(19): siRNA sense strand
cauaaacuacagugugaua

SEQ ID NO: 610837 - RNA, 19 nt, Homo sapiens
  misc_RNA (1)...(19): siRNA sense strand
gacagaaagucagcuagau

SEQ ID NO: 610838 - RNA, 19 nt, Homo sapiens
  misc_RNA (1)...(19): siRNA sense strand
ggauuggcaucuauacagu

SEQ ID NO: 610839 - RNA, 19 nt, Homo sapiens
  misc_RNA (1)...(19): siRNA sense strand
gaagggacaggaagcacuu

SEQ ID NO: 610840 - RNA, 19 nt, Homo sapiens
  misc_RNA (1)...(19): siRNA sense strand
ucuauacagucaaggauug

SEQ ID NO: 610841 - RNA, 19 nt, Homo sapiens
  misc_RNA (1)...(19): siRNA sense strand
gagugauguuucagauuga

SEQ ID NO: 610842 - RNA, 19 nt, Homo sapiens
  misc_RNA (1)...(19): siRNA sense strand
cagguuauguaccagcaaa

SEQ ID NO: 610843 - RNA, 19 nt, Homo sapiens
  misc_RNA (1)...(19): siRNA sense strand
aaaccuggauuggcaucua

SEQ ID NO: 610844 - RNA, 19 nt, Homo sapiens
  misc_RNA (1)...(19): siRNA sense strand
accauaaacuacaguguga

SEQ ID NO: 610845 - RNA, 19 nt, Homo sapiens
  misc_RNA (1)...(19): siRNA sense strand
gacauccagcuggguauua

SEQ ID NO: 610846 - RNA, 19 nt, Homo sapiens
  misc_RNA (1)...(19): siRNA sense strand
gccacugcauuuccuguug

SEQ ID NO: 610847 - RNA, 19 nt, Homo sapiens
  misc_RNA (1)...(19): siRNA sense strand
uggagaagaugagcgaaga

SEQ ID NO: 610848 - RNA, 19 nt, Homo sapiens
  misc_RNA (1)...(19): siRNA sense strand
acauccagcuggguauuaa

SEQ ID NO: 610849 - RNA, 19 nt, Homo sapiens
  misc_RNA (1)...(19): siRNA sense strand
gcaccacugccacugcauu

SEQ ID NO: 610850 - RNA, 19 nt, Homo sapiens
  misc_RNA (1)...(19): siRNA sense strand
guuauguaccagcaaagua

SEQ ID NO: 610851 - RNA, 19 nt, Homo sapiens
  misc_RNA (1)...(19): siRNA sense strand
caaagaugacccugacaca

SEQ ID NO: 610852 - RNA, 19 nt, Homo sapiens
  misc_RNA (1)...(19): siRNA sense strand
ggacaggaagcacuuuggu

SEQ ID NO: 610853 - RNA, 19 nt, Homo sapiens
  misc_RNA (1)...(19): siRNA sense strand
ggaguggucggacagaaag

SEQ ID NO: 610854 - RNA, 19 nt, Homo sapiens
  misc_RNA (1)...(19): siRNA sense strand
gauggagugauguuucaga

SEQ ID NO: 610855 - RNA, 19 nt, Homo sapiens
  misc_RNA (1)...(19): siRNA sense strand
gcagcagugagcagugaaa

SEQ ID NO: 610856 - RNA, 19 nt, Homo sapiens
  misc_RNA (1)...(19): siRNA sense strand
gcaguggcccaggcagaaa

SEQ ID NO: 610857 - RNA, 19 nt, Homo sapiens
  misc_RNA (1)...(19): siRNA sense strand
gcaucuauacagucaagga

SEQ ID NO: 610858 - RNA, 19 nt, Homo sapiens
  misc_RNA (1)...(19): siRNA sense strand
uggcagcagugagcaguga

SEQ ID NO: 610859 - RNA, 19 nt, Homo sapiens
  misc_RNA (1)...(19): siRNA sense strand
aggauggagugauguuuca

SEQ ID NO: 610860 - RNA, 19 nt, Homo sapiens
  misc_RNA (1)...(19): siRNA sense strand
gggauccucuugacauucc

SEQ ID NO: 610861 - RNA, 19 nt, Homo sapiens
  misc_RNA (1)...(19): siRNA sense strand
uggcccaacuggagaagau

SEQ ID NO: 610862 - RNA, 19 nt, Homo sapiens
  misc_RNA (1)...(19): siRNA sense strand
aaagaccccucgguguuua

SEQ ID NO: 610863 - RNA, 19 nt, Homo sapiens
  misc_RNA (1)...(19): siRNA sense strand
ugaagaccaguacuccauu

SEQ ID NO: 610864 - RNA, 19 nt, Homo sapiens
  misc_RNA (1)...(19): siRNA sense strand
cugggauccucuugacauu

SEQ ID NO: 610865 - RNA, 19 nt, Homo sapiens
  misc_RNA (1)...(19): siRNA sense strand
caggaguggucggacagaa

SEQ ID NO: 610866 - RNA, 19 nt, Homo sapiens
  misc_RNA (1)...(19): siRNA sense strand
uaaggauggagugauguuu

SEQ ID NO: 610867 - RNA, 19 nt, Homo sapiens
  misc_RNA (1)...(19): siRNA sense strand
caccacugccacugcauuu

SEQ ID NO: 610868 - RNA, 19 nt, Homo sapiens
  misc_RNA (1)...(19): siRNA sense strand
uggcaucuauacagucaag

SEQ ID NO: 610869 - RNA, 19 nt, Homo sapiens
  misc_RNA (1)...(19): siRNA sense strand
acagaaagucagcuagauc

SEQ ID NO: 610870 - RNA, 19 nt, Homo sapiens
  misc_RNA (1)...(19): siRNA sense strand
ccagcuggguauuaaagac

SEQ ID NO: 610871 - RNA, 19 nt, Homo sapiens
  misc_RNA (1)...(19): siRNA sense strand
aaccuggauuggcaucuau

SEQ ID NO: 610872 - RNA, 19 nt, Homo sapiens
  misc_RNA (1)...(19): siRNA sense strand
gaacagaccugaauaggaa

SEQ ID NO: 610873 - RNA, 19 nt, Homo sapiens
  misc_RNA (1)...(19): siRNA sense strand
gguaacagcugaccuuauu

SEQ ID NO: 610874 - RNA, 19 nt, Homo sapiens
  misc_RNA (1)...(19): siRNA sense strand
gaagaaauaucaaccagau

SEQ ID NO: 610875 - RNA, 19 nt, Homo sapiens
  misc_RNA (1)...(19): siRNA sense strand
gaauggaucucuccugcuu

SEQ ID NO: 610876 - RNA, 19 nt, Homo sapiens
  misc_RNA (1)...(19): siRNA sense strand
ucaaccagauuaaagcaua

SEQ ID NO: 610877 - RNA, 19 nt, Homo sapiens
  misc_RNA (1)...(19): siRNA sense strand
cagcugaccuuauugugaa

SEQ ID NO: 610878 - RNA, 19 nt, Homo sapiens
  misc_RNA (1)...(19): siRNA sense strand
ugaaggcaguggcuaguuu

SEQ ID NO: 610879 - RNA, 19 nt, Homo sapiens
  misc_RNA (1)...(19): siRNA sense strand
uggaagaucuuauucaaca

SEQ ID NO: 610880 - RNA, 19 nt, Homo sapiens
  misc_RNA (1)...(19): siRNA sense strand
gaaaccuacuguggacuuu

SEQ ID NO: 610881 - RNA, 19 nt, Homo sapiens
  misc_RNA (1)...(19): siRNA sense strand
ggaauuccaugcagugucu

SEQ ID NO: 610882 - RNA, 19 nt, Homo sapiens
  misc_RNA (1)...(19): siRNA sense strand
ggcaucaaauauucguuua

SEQ ID NO: 610883 - RNA, 19 nt, Homo sapiens
  misc_RNA (1)...(19): siRNA sense strand
caguaucacucacuaaaug

SEQ ID NO: 610884 - RNA, 19 nt, Homo sapiens
  misc_RNA (1)...(19): siRNA sense strand
gaggaacugucucuaguag

SEQ ID NO: 610885 - RNA, 19 nt, Homo sapiens
  misc_RNA (1)...(19): siRNA sense strand
gaacaguaucacucacuaa

SEQ ID NO: 610886 - RNA, 19 nt, Homo sapiens
  misc_RNA (1)...(19): siRNA sense strand
ggcaguggcuaguuucuug

SEQ ID NO: 610887 - RNA, 19 nt, Homo sapiens
  misc_RNA (1)...(19): siRNA sense strand
gaaguacccacucuauguu

SEQ ID NO: 610888 - RNA, 19 nt, Homo sapiens
  misc_RNA (1)...(19): siRNA sense strand
acgauuggaucuaugauuu

SEQ ID NO: 610889 - RNA, 19 nt, Homo sapiens
  misc_RNA (1)...(19): siRNA sense strand
aaucgaauguggagaaaga

SEQ ID NO: 610890 - RNA, 19 nt, Homo sapiens
  misc_RNA (1)...(19): siRNA sense strand
cacauuggauccucauuug

SEQ ID NO: 610891 - RNA, 19 nt, Homo sapiens
  misc_RNA (1)...(19): siRNA sense strand
ggaacagaccugaauagga

SEQ ID NO: 610892 - RNA, 19 nt, Homo sapiens
  misc_RNA (1)...(19): siRNA sense strand
ugugaaagcccauuuaaau

SEQ ID NO: 610893 - RNA, 19 nt, Homo sapiens
  misc_RNA (1)...(19): siRNA sense strand
gcaaagaccaugaggaacu

SEQ ID NO: 610894 - RNA, 19 nt, Homo sapiens
  misc_RNA (1)...(19): siRNA sense strand
ugaacaguaucacucacua

SEQ ID NO: 610895 - RNA, 19 nt, Homo sapiens
  misc_RNA (1)...(19): siRNA sense strand
ccacauuggauccucauuu

SEQ ID NO: 610896 - RNA, 19 nt, Homo sapiens
  misc_RNA (1)...(19): siRNA sense strand
ugagaggcauccugauaug

SEQ ID NO: 610897 - RNA, 19 nt, Homo sapiens
  misc_RNA (1)...(19): siRNA sense strand
ccauuguucucuucuguga

SEQ ID NO: 610898 - RNA, 19 nt, Homo sapiens
  misc_RNA (1)...(19): siRNA sense strand
gggcaucaaauauucguuu

SEQ ID NO: 610899 - RNA, 19 nt, Homo sapiens
  misc_RNA (1)...(19): siRNA sense strand
aagcaaagaccaugaggaa

SEQ ID NO: 610900 - RNA, 19 nt, Homo sapiens
  misc_RNA (1)...(19): siRNA sense strand
cuacagaaucuuacuacaa

SEQ ID NO: 610901 - RNA, 19 nt, Homo sapiens
  misc_RNA (1)...(19): siRNA sense strand
ggaaaccuacuguggacuu

SEQ ID NO: 610902 - RNA, 19 nt, Homo sapiens
  misc_RNA (1)...(19): siRNA sense strand
uaaaauagcuuggcauguc

SEQ ID NO: 610903 - RNA, 19 nt, Homo sapiens
  misc_RNA (1)...(19): siRNA sense strand
caaagaccaugaggaacug

SEQ ID NO: 610904 - RNA, 19 nt, Homo sapiens
  misc_RNA (1)...(19): siRNA sense strand
uacagaaucuuacuacaac

SEQ ID NO: 610905 - RNA, 19 nt, Homo sapiens
  misc_RNA (1)...(19): siRNA sense strand
aaacccaccuguagagaag

SEQ ID NO: 610906 - RNA, 19 nt, Homo sapiens
  misc_RNA (1)...(19): siRNA sense strand
ccauauuccuauacacgaa

SEQ ID NO: 610907 - RNA, 19 nt, Homo sapiens
  misc_RNA (1)...(19): siRNA sense strand
gagaaguacccacucuaug

SEQ ID NO: 610908 - RNA, 19 nt, Homo sapiens
  misc_RNA (1)...(19): siRNA sense strand
agaaguacccacucuaugu

SEQ ID NO: 610909 - RNA, 19 nt, Homo sapiens
  misc_RNA (1)...(19): siRNA sense strand
cagcaugucuucgcguuuc

SEQ ID NO: 610910 - RNA, 19 nt, Homo sapiens
  misc_RNA (1)...(19): siRNA sense strand
uaggcaaguucaaguucua

SEQ ID NO: 610911 - RNA, 19 nt, Homo sapiens
  misc_RNA (1)...(19): siRNA sense strand
caucaaacccaccuguaga

SEQ ID NO: 610912 - RNA, 19 nt, Homo sapiens
  misc_RNA (1)...(19): siRNA sense strand
uaacagcugaccuuauugu

SEQ ID NO: 610913 - RNA, 19 nt, Homo sapiens
  misc_RNA (1)...(19): siRNA sense strand
ccauggcucagaaaccuua

SEQ ID NO: 610914 - RNA, 19 nt, Homo sapiens
  misc_RNA (1)...(19): siRNA sense strand
acaucagcaugcauucaua

SEQ ID NO: 610915 - RNA, 19 nt, Homo sapiens
  misc_RNA (1)...(19): siRNA sense strand
cagauuaaagcauacauca

SEQ ID NO: 610916 - RNA, 19 nt, Homo sapiens
  misc_RNA (1)...(19): siRNA sense strand
caaacccaccuguagagaa

SEQ ID NO: 610917 - RNA, 19 nt, Homo sapiens
  misc_RNA (1)...(19): siRNA sense strand
gcaguucgugcuauugaga

SEQ ID NO: 610918 - RNA, 19 nt, Homo sapiens
  misc_RNA (1)...(19): siRNA sense strand
caaguucaaguucuacaga

SEQ ID NO: 610919 - RNA, 19 nt, Homo sapiens
  misc_RNA (1)...(19): siRNA sense strand
gauuggaucuaugauuugg

SEQ ID NO: 610920 - RNA, 19 nt, Homo sapiens
  misc_RNA (1)...(19): siRNA sense strand
ugagaaguacccacucuau

SEQ ID NO: 610921 - RNA, 19 nt, Homo sapiens
  misc_RNA (1)...(19): siRNA sense strand
caucggaacagaccugaau

SEQ ID NO: 610922 - RNA, 19 nt, Homo sapiens
  misc_RNA (1)...(19): siRNA sense strand
ugaggaacugucucuagua

SEQ ID NO: 610923 - RNA, 19 nt, Homo sapiens
  misc_RNA (1)...(19): siRNA sense strand
gaaggugcauccaguuccu

SEQ ID NO: 610924 - RNA, 19 nt, Homo sapiens
  misc_RNA (1)...(19): siRNA sense strand
gaaggcaguggcuaguuuc

SEQ ID NO: 610925 - RNA, 19 nt, Homo sapiens
  misc_RNA (1)...(19): siRNA sense strand
gcagauuuccaacgacaca

SEQ ID NO: 610926 - RNA, 19 nt, Homo sapiens
  misc_RNA (1)...(19): siRNA sense strand
uagcugcucuuccuagaac

SEQ ID NO: 610927 - RNA, 19 nt, Homo sapiens
  misc_RNA (1)...(19): siRNA sense strand
guguuuccauauuccuaua

SEQ ID NO: 610928 - RNA, 19 nt, Homo sapiens
  misc_RNA (1)...(19): siRNA sense strand
acugagaggcauccugaua

SEQ ID NO: 610929 - RNA, 19 nt, Homo sapiens
  misc_RNA (1)...(19): siRNA sense strand
gacgauuggaucuaugauu

SEQ ID NO: 610930 - RNA, 19 nt, Homo sapiens
  misc_RNA (1)...(19): siRNA sense strand
gaggaaggugcauccaguu

SEQ ID NO: 610931 - RNA, 19 nt, Homo sapiens
  misc_RNA (1)...(19): siRNA sense strand
gggacgauuggaucuauga

SEQ ID NO: 610932 - RNA, 19 nt, Homo sapiens
  misc_RNA (1)...(19): siRNA sense strand
cauucauacucccagcaua

SEQ ID NO: 610933 - RNA, 19 nt, Homo sapiens
  misc_RNA (1)...(19): siRNA sense strand
caaccagauuaaagcauac

SEQ ID NO: 610934 - RNA, 19 nt, Homo sapiens
  misc_RNA (1)...(19): siRNA sense strand
aaccuacuguggacuuuau

SEQ ID NO: 610935 - RNA, 19 nt, Homo sapiens
  misc_RNA (1)...(19): siRNA sense strand
auccugauaugcuuacaaa

SEQ ID NO: 610936 - RNA, 19 nt, Homo sapiens
  misc_RNA (1)...(19): siRNA sense strand
uagcuuggcaugucauuag

SEQ ID NO: 610937 - RNA, 19 nt, Homo sapiens
  misc_RNA (1)...(19): siRNA sense strand
ucagaguggccaaguucua

SEQ ID NO: 610938 - RNA, 19 nt, Homo sapiens
  misc_RNA (1)...(19): siRNA sense strand
ggaagaucuuauucaacag

SEQ ID NO: 610939 - RNA, 19 nt, Homo sapiens
  misc_RNA (1)...(19): siRNA sense strand
cucagaaaccuuauaccua

SEQ ID NO: 610940 - RNA, 19 nt, Homo sapiens
  misc_RNA (1)...(19): siRNA sense strand
gcucagaaaccuuauaccu

SEQ ID NO: 610941 - RNA, 19 nt, Homo sapiens
  misc_RNA (1)...(19): siRNA sense strand
aacagcagauuuccaacga

SEQ ID NO: 610942 - RNA, 19 nt, Homo sapiens
  misc_RNA (1)...(19): siRNA sense strand
acagcugaccuuauuguga

SEQ ID NO: 610943 - RNA, 19 nt, Homo sapiens
  misc_RNA (1)...(19): siRNA sense strand
agaccugaauaggaacuuu

SEQ ID NO: 610944 - RNA, 19 nt, Homo sapiens
  misc_RNA (1)...(19): siRNA sense strand
gaccugaauaggaacuuug

SEQ ID NO: 610945 - RNA, 19 nt, Homo sapiens
  misc_RNA (1)...(19): siRNA sense strand
gcaguggcuaguuucuuga

SEQ ID NO: 610946 - RNA, 19 nt, Homo sapiens
  misc_RNA (1)...(19): siRNA sense strand
gagccuccgcaucguacua

SEQ ID NO: 610947 - RNA, 19 nt, Homo sapiens
  misc_RNA (1)...(19): siRNA sense strand
cagcauauaguguuuccau

SEQ ID NO: 610948 - RNA, 19 nt, Homo sapiens
  misc_RNA (1)...(19): siRNA sense strand
gcagcaugucuucgcguuu

SEQ ID NO: 610949 - RNA, 19 nt, Homo sapiens
  misc_RNA (1)...(19): siRNA sense strand
aacaguaucacucacuaaa

SEQ ID NO: 610950 - RNA, 19 nt, Homo sapiens
  misc_RNA (1)...(19): siRNA sense strand
ggccauggcucagaaaccu

SEQ ID NO: 610951 - RNA, 19 nt, Homo sapiens
  misc_RNA (1)...(19): siRNA sense strand
gcuuucugcuugugguuca

SEQ ID NO: 610952 - RNA, 19 nt, Homo sapiens
  misc_RNA (1)...(19): siRNA sense strand
guaucacucacuaaaugaa

SEQ ID NO: 610953 - RNA, 19 nt, Homo sapiens
  misc_RNA (1)...(19): siRNA sense strand
ucuaguagccagugaagca

SEQ ID NO: 610954 - RNA, 19 nt, Homo sapiens
  misc_RNA (1)...(19): siRNA sense strand
caugaggaacugucucuag

SEQ ID NO: 610955 - RNA, 19 nt, Homo sapiens
  misc_RNA (1)...(19): siRNA sense strand
aaaccuacuguggacuuua

SEQ ID NO: 610956 - RNA, 19 nt, Homo sapiens
  misc_RNA (1)...(19): siRNA sense strand
ugaugucgacaaugugaaa

SEQ ID NO: 610957 - RNA, 19 nt, Homo sapiens
  misc_RNA (1)...(19): siRNA sense strand
cagccuugcaguccuugua

SEQ ID NO: 610958 - RNA, 19 nt, Homo sapiens
  misc_RNA (1)...(19): siRNA sense strand
cuuggcaugucauuaggaa

SEQ ID NO: 610959 - RNA, 19 nt, Homo sapiens
  misc_RNA (1)...(19): siRNA sense strand
agcauauaguguuuccaua

SEQ ID NO: 610960 - RNA, 19 nt, Homo sapiens
  misc_RNA (1)...(19): siRNA sense strand
cugagaggcauccugauau

SEQ ID NO: 610961 - RNA, 19 nt, Homo sapiens
  misc_RNA (1)...(19): siRNA sense strand
cgauuggaucuaugauuug

SEQ ID NO: 610962 - RNA, 19 nt, Homo sapiens
  misc_RNA (1)...(19): siRNA sense strand
agucagaaccagaagugaa

SEQ ID NO: 610963 - RNA, 19 nt, Homo sapiens
  misc_RNA (1)...(19): siRNA sense strand
ugagucagaaccagaagug

SEQ ID NO: 610964 - RNA, 19 nt, Homo sapiens
  misc_RNA (1)...(19): siRNA sense strand
cuaggcaaguucaaguucu

SEQ ID NO: 610965 - RNA, 19 nt, Homo sapiens
  misc_RNA (1)...(19): siRNA sense strand
augaggaacugucucuagu

SEQ ID NO: 610966 - RNA, 19 nt, Homo sapiens
  misc_RNA (1)...(19): siRNA sense strand
gcaguccuuguacccauug

SEQ ID NO: 610967 - RNA, 19 nt, Homo sapiens
  misc_RNA (1)...(19): siRNA sense strand
ggaauccaugccagagaau

SEQ ID NO: 610968 - RNA, 19 nt, Homo sapiens
  misc_RNA (1)...(19): siRNA sense strand
guacccacucuauguuuua

SEQ ID NO: 610969 - RNA, 19 nt, Homo sapiens
  misc_RNA (1)...(19): siRNA sense strand
gugcauccaguuccucaug

SEQ ID NO: 610970 - RNA, 19 nt, Homo sapiens
  misc_RNA (1)...(19): siRNA sense strand
ugaccuuauugugaagaaa

SEQ ID NO: 610971 - RNA, 19 nt, Homo sapiens
  misc_RNA (1)...(19): siRNA sense strand
guuucagaguggccaaguu

SEQ ID NO: 610972 - RNA, 19 nt, Homo sapiens
  misc_RNA (1)...(19): siRNA sense strand
gaacagaccugaauaggaa

SEQ ID NO: 610973 - RNA, 19 nt, Homo sapiens
  misc_RNA (1)...(19): siRNA sense strand
gguaacagcugaccuuauu

SEQ ID NO: 610974 - RNA, 19 nt, Homo sapiens
  misc_RNA (1)...(19): siRNA sense strand
gaagaaauaucaaccagau

SEQ ID NO: 610975 - RNA, 19 nt, Homo sapiens
  misc_RNA (1)...(19): siRNA sense strand
gaauggaucucuccugcuu

SEQ ID NO: 610976 - RNA, 19 nt, Homo sapiens
  misc_RNA (1)...(19): siRNA sense strand
ucaaccagauuaaagcaua

SEQ ID NO: 610977 - RNA, 19 nt, Homo sapiens
  misc_RNA (1)...(19): siRNA sense strand
cagcugaccuuauugugaa

SEQ ID NO: 610978 - RNA, 19 nt, Homo sapiens
  misc_RNA (1)...(19): siRNA sense strand
ugaaggcaguggcuaguuu

SEQ ID NO: 610979 - RNA, 19 nt, Homo sapiens
  misc_RNA (1)...(19): siRNA sense strand
uggaagaucuuauucaaca

SEQ ID NO: 610980 - RNA, 19 nt, Homo sapiens
  misc_RNA (1)...(19): siRNA sense strand
gaaaccuacuguggacuuu

SEQ ID NO: 610981 - RNA, 19 nt, Homo sapiens
  misc_RNA (1)...(19): siRNA sense strand
ggaauuccaugcagugucu

SEQ ID NO: 610982 - RNA, 19 nt, Homo sapiens
  misc_RNA (1)...(19): siRNA sense strand
ggcaucaaauauucguuua

SEQ ID NO: 610983 - RNA, 19 nt, Homo sapiens
  misc_RNA (1)...(19): siRNA sense strand
caguaucacucacuaaaug

SEQ ID NO: 610984 - RNA, 19 nt, Homo sapiens
  misc_RNA (1)...(19): siRNA sense strand
gaggaacugucucuaguag

SEQ ID NO: 610985 - RNA, 19 nt, Homo sapiens
  misc_RNA (1)...(19): siRNA sense strand
gaacaguaucacucacuaa

SEQ ID NO: 610986 - RNA, 19 nt, Homo sapiens
  misc_RNA (1)...(19): siRNA sense strand
ggcaguggcuaguuucuug

SEQ ID NO: 610987 - RNA, 19 nt, Homo sapiens
  misc_RNA (1)...(19): siRNA sense strand
gaaguacccacucuauguu

SEQ ID NO: 610988 - RNA, 19 nt, Homo sapiens
  misc_RNA (1)...(19): siRNA sense strand
acgauuggaucuaugauuu

SEQ ID NO: 610989 - RNA, 19 nt, Homo sapiens
  misc_RNA (1)...(19): siRNA sense strand
aaucgaauguggagaaaga

SEQ ID NO: 610990 - RNA, 19 nt, Homo sapiens
  misc_RNA (1)...(19): siRNA sense strand
cacauuggauccucauuug

SEQ ID NO: 610991 - RNA, 19 nt, Homo sapiens
  misc_RNA (1)...(19): siRNA sense strand
ggaacagaccugaauagga

SEQ ID NO: 610992 - RNA, 19 nt, Homo sapiens
  misc_RNA (1)...(19): siRNA sense strand
ugugaaagcccauuuaaau

SEQ ID NO: 610993 - RNA, 19 nt, Homo sapiens
  misc_RNA (1)...(19): siRNA sense strand
gcaaagaccaugaggaacu

SEQ ID NO: 610994 - RNA, 19 nt, Homo sapiens
  misc_RNA (1)...(19): siRNA sense strand
ugaacaguaucacucacua

SEQ ID NO: 610995 - RNA, 19 nt, Homo sapiens
  misc_RNA (1)...(19): siRNA sense strand
ccacauuggauccucauuu

SEQ ID NO: 610996 - RNA, 19 nt, Homo sapiens
  misc_RNA (1)...(19): siRNA sense strand
ugagaggcauccugauaug

SEQ ID NO: 610997 - RNA, 19 nt, Homo sapiens
  misc_RNA (1)...(19): siRNA sense strand
ccauuguucucuucuguga

SEQ ID NO: 610998 - RNA, 19 nt, Homo sapiens
  misc_RNA (1)...(19): siRNA sense strand
gggcaucaaauauucguuu

SEQ ID NO: 610999 - RNA, 19 nt, Homo sapiens
  misc_RNA (1)...(19): siRNA sense strand
aagcaaagaccaugaggaa

SEQ ID NO: 611000 - RNA, 19 nt, Homo sapiens
  misc_RNA (1)...(19): siRNA sense strand
cuacagaaucuuacuacaa

SEQ ID NO: 611001 - RNA, 19 nt, Homo sapiens
  misc_RNA (1)...(19): siRNA sense strand
ggaaaccuacuguggacuu

SEQ ID NO: 611002 - RNA, 19 nt, Homo sapiens
  misc_RNA (1)...(19): siRNA sense strand
caaagaccaugaggaacug

SEQ ID NO: 611003 - RNA, 19 nt, Homo sapiens
  misc_RNA (1)...(19): siRNA sense strand
uacagaaucuuacuacaac

SEQ ID NO: 611004 - RNA, 19 nt, Homo sapiens
  misc_RNA (1)...(19): siRNA sense strand
aaacccaccuguagagaag

SEQ ID NO: 611005 - RNA, 19 nt, Homo sapiens
  misc_RNA (1)...(19): siRNA sense strand
ccauauuccuauacacgaa

SEQ ID NO: 611006 - RNA, 19 nt, Homo sapiens
  misc_RNA (1)...(19): siRNA sense strand
gagaaguacccacucuaug

SEQ ID NO: 611007 - RNA, 19 nt, Homo sapiens
  misc_RNA (1)...(19): siRNA sense strand
agaaguacccacucuaugu

SEQ ID NO: 611008 - RNA, 19 nt, Homo sapiens
  misc_RNA (1)...(19): siRNA sense strand
cagcaugucuucgcguuuc

SEQ ID NO: 611009 - RNA, 19 nt, Homo sapiens
  misc_RNA (1)...(19): siRNA sense strand
uaggcaaguucaaguucua

SEQ ID NO: 611010 - RNA, 19 nt, Homo sapiens
  misc_RNA (1)...(19): siRNA sense strand
caucaaacccaccuguaga

SEQ ID NO: 611011 - RNA, 19 nt, Homo sapiens
  misc_RNA (1)...(19): siRNA sense strand
uaacagcugaccuuauugu

SEQ ID NO: 611012 - RNA, 19 nt, Homo sapiens
  misc_RNA (1)...(19): siRNA sense strand
ccauggcucagaaaccuua

SEQ ID NO: 611013 - RNA, 19 nt, Homo sapiens
  misc_RNA (1)...(19): siRNA sense strand
acaucagcaugcauucaua

SEQ ID NO: 611014 - RNA, 19 nt, Homo sapiens
  misc_RNA (1)...(19): siRNA sense strand
cagauuaaagcauacauca

SEQ ID NO: 611015 - RNA, 19 nt, Homo sapiens
  misc_RNA (1)...(19): siRNA sense strand
caaacccaccuguagagaa

SEQ ID NO: 611016 - RNA, 19 nt, Homo sapiens
  misc_RNA (1)...(19): siRNA sense strand
gcaguucgugcuauugaga

SEQ ID NO: 611017 - RNA, 19 nt, Homo sapiens
  misc_RNA (1)...(19): siRNA sense strand
caaguucaaguucuacaga

SEQ ID NO: 611018 - RNA, 19 nt, Homo sapiens
  misc_RNA (1)...(19): siRNA sense strand
gauuggaucuaugauuugg

SEQ ID NO: 611019 - RNA, 19 nt, Homo sapiens
  misc_RNA (1)...(19): siRNA sense strand
ugagaaguacccacucuau

SEQ ID NO: 611020 - RNA, 19 nt, Homo sapiens
  misc_RNA (1)...(19): siRNA sense strand
caucggaacagaccugaau

SEQ ID NO: 611021 - RNA, 19 nt, Homo sapiens
  misc_RNA (1)...(19): siRNA sense strand
ugaggaacugucucuagua

SEQ ID NO: 611022 - RNA, 19 nt, Homo sapiens
  misc_RNA (1)...(19): siRNA sense strand
gaaggugcauccaguuccu

SEQ ID NO: 611023 - RNA, 19 nt, Homo sapiens
  misc_RNA (1)...(19): siRNA sense strand
gaaggcaguggcuaguuuc

SEQ ID NO: 611024 - RNA, 19 nt, Homo sapiens
  misc_RNA (1)...(19): siRNA sense strand
uagcugcucuuccuagaac

SEQ ID NO: 611025 - RNA, 19 nt, Homo sapiens
  misc_RNA (1)...(19): siRNA sense strand
guguuuccauauuccuaua

SEQ ID NO: 611026 - RNA, 19 nt, Homo sapiens
  misc_RNA (1)...(19): siRNA sense strand
gcagauuuccaacgacaca

SEQ ID NO: 611027 - RNA, 19 nt, Homo sapiens
  misc_RNA (1)...(19): siRNA sense strand
acugagaggcauccugaua

SEQ ID NO: 611028 - RNA, 19 nt, Homo sapiens
  misc_RNA (1)...(19): siRNA sense strand
gacgauuggaucuaugauu

SEQ ID NO: 611029 - RNA, 19 nt, Homo sapiens
  misc_RNA (1)...(19): siRNA sense strand
gaggaaggugcauccaguu

SEQ ID NO: 611030 - RNA, 19 nt, Homo sapiens
  misc_RNA (1)...(19): siRNA sense strand
gggacgauuggaucuauga

SEQ ID NO: 611031 - RNA, 19 nt, Homo sapiens
  misc_RNA (1)...(19): siRNA sense strand
cauucauacucccagcaua

SEQ ID NO: 611032 - RNA, 19 nt, Homo sapiens
  misc_RNA (1)...(19): siRNA sense strand
caaccagauuaaagcauac

SEQ ID NO: 611033 - RNA, 19 nt, Homo sapiens
  misc_RNA (1)...(19): siRNA sense strand
aaccuacuguggacuuuau

SEQ ID NO: 611034 - RNA, 19 nt, Homo sapiens
  misc_RNA (1)...(19): siRNA sense strand
auccugauaugcuuacaaa

SEQ ID NO: 611035 - RNA, 19 nt, Homo sapiens
  misc_RNA (1)...(19): siRNA sense strand
ucagaguggccaaguucua

SEQ ID NO: 611036 - RNA, 19 nt, Homo sapiens
  misc_RNA (1)...(19): siRNA sense strand
ggaagaucuuauucaacag

SEQ ID NO: 611037 - RNA, 19 nt, Homo sapiens
  misc_RNA (1)...(19): siRNA sense strand
cucagaaaccuuauaccua

SEQ ID NO: 611038 - RNA, 19 nt, Homo sapiens
  misc_RNA (1)...(19): siRNA sense strand
gcucagaaaccuuauaccu

SEQ ID NO: 611039 - RNA, 19 nt, Homo sapiens
  misc_RNA (1)...(19): siRNA sense strand
aacagcagauuuccaacga

SEQ ID NO: 611040 - RNA, 19 nt, Homo sapiens
  misc_RNA (1)...(19): siRNA sense strand
acagcugaccuuauuguga

SEQ ID NO: 611041 - RNA, 19 nt, Homo sapiens
  misc_RNA (1)...(19): siRNA sense strand
agaccugaauaggaacuuu

SEQ ID NO: 611042 - RNA, 19 nt, Homo sapiens
  misc_RNA (1)...(19): siRNA sense strand
gaccugaauaggaacuuug

SEQ ID NO: 611043 - RNA, 19 nt, Homo sapiens
  misc_RNA (1)...(19): siRNA sense strand
gcaguggcuaguuucuuga

SEQ ID NO: 611044 - RNA, 19 nt, Homo sapiens
  misc_RNA (1)...(19): siRNA sense strand
gagccuccgcaucguacua

SEQ ID NO: 611045 - RNA, 19 nt, Homo sapiens
  misc_RNA (1)...(19): siRNA sense strand
cagcauauaguguuuccau

SEQ ID NO: 611046 - RNA, 19 nt, Homo sapiens
  misc_RNA (1)...(19): siRNA sense strand
gcagcaugucuucgcguuu

SEQ ID NO: 611047 - RNA, 19 nt, Homo sapiens
  misc_RNA (1)...(19): siRNA sense strand
aacaguaucacucacuaaa

SEQ ID NO: 611048 - RNA, 19 nt, Homo sapiens
  misc_RNA (1)...(19): siRNA sense strand
ggccauggcucagaaaccu

SEQ ID NO: 611049 - RNA, 19 nt, Homo sapiens
  misc_RNA (1)...(19): siRNA sense strand
gcuuucugcuugugguuca

SEQ ID NO: 611050 - RNA, 19 nt, Homo sapiens
  misc_RNA (1)...(19): siRNA sense strand
ugaugucgacaaugugaaa

SEQ ID NO: 611051 - RNA, 19 nt, Homo sapiens
  misc_RNA (1)...(19): siRNA sense strand
ucuaguagccagugaagca

SEQ ID NO: 611052 - RNA, 19 nt, Homo sapiens
  misc_RNA (1)...(19): siRNA sense strand
caugaggaacugucucuag

SEQ ID NO: 611053 - RNA, 19 nt, Homo sapiens
  misc_RNA (1)...(19): siRNA sense strand
aaaccuacuguggacuuua

SEQ ID NO: 611054 - RNA, 19 nt, Homo sapiens
  misc_RNA (1)...(19): siRNA sense strand
guaucacucacuaaaugaa

SEQ ID NO: 611055 - RNA, 19 nt, Homo sapiens
  misc_RNA (1)...(19): siRNA sense strand
cagccuugcaguccuugua

SEQ ID NO: 611056 - RNA, 19 nt, Homo sapiens
  misc_RNA (1)...(19): siRNA sense strand
agcauauaguguuuccaua

SEQ ID NO: 611057 - RNA, 19 nt, Homo sapiens
  misc_RNA (1)...(19): siRNA sense strand
cugagaggcauccugauau

SEQ ID NO: 611058 - RNA, 19 nt, Homo sapiens
  misc_RNA (1)...(19): siRNA sense strand
cgauuggaucuaugauuug

SEQ ID NO: 611059 - RNA, 19 nt, Homo sapiens
  misc_RNA (1)...(19): siRNA sense strand
agucagaaccagaagugaa

SEQ ID NO: 611060 - RNA, 19 nt, Homo sapiens
  misc_RNA (1)...(19): siRNA sense strand
ugagucagaaccagaagug

SEQ ID NO: 611061 - RNA, 19 nt, Homo sapiens
  misc_RNA (1)...(19): siRNA sense strand
guacccacucuauguuuua

SEQ ID NO: 611062 - RNA, 19 nt, Homo sapiens
  misc_RNA (1)...(19): siRNA sense strand
augaggaacugucucuagu

SEQ ID NO: 611063 - RNA, 19 nt, Homo sapiens
  misc_RNA (1)...(19): siRNA sense strand
cuaggcaaguucaaguucu

SEQ ID NO: 611064 - RNA, 19 nt, Homo sapiens
  misc_RNA (1)...(19): siRNA sense strand
gcaguccuuguacccauug

SEQ ID NO: 611065 - RNA, 19 nt, Homo sapiens
  misc_RNA (1)...(19): siRNA sense strand
ggaauccaugccagagaau

SEQ ID NO: 611066 - RNA, 19 nt, Homo sapiens
  misc_RNA (1)...(19): siRNA sense strand
cuuauucaacagcagauuu

SEQ ID NO: 611067 - RNA, 19 nt, Homo sapiens
  misc_RNA (1)...(19): siRNA sense strand
guaacagcugaccuuauug

SEQ ID NO: 611068 - RNA, 19 nt, Homo sapiens
  misc_RNA (1)...(19): siRNA sense strand
guuucagaguggccaaguu

SEQ ID NO: 611069 - RNA, 19 nt, Homo sapiens
  misc_RNA (1)...(19): siRNA sense strand
gugcauccaguuccucaug

SEQ ID NO: 611070 - RNA, 19 nt, Homo sapiens
  misc_RNA (1)...(19): siRNA sense strand
ugaccuuauugugaagaaa

SEQ ID NO: 611071 - RNA, 19 nt, Homo sapiens
  misc_RNA (1)...(19): siRNA sense strand
gaugaucgaugacaaugaa

SEQ ID NO: 611072 - RNA, 19 nt, Homo sapiens
  misc_RNA (1)...(19): siRNA sense strand
ccaagaaguuccucaaugu

SEQ ID NO: 611073 - RNA, 19 nt, Homo sapiens
  misc_RNA (1)...(19): siRNA sense strand
ggacagcccugaccucacu

SEQ ID NO: 611074 - RNA, 19 nt, Homo sapiens
  misc_RNA (1)...(19): siRNA sense strand
gcgccuuccuggaguacua

SEQ ID NO: 611075 - RNA, 19 nt, Homo sapiens
  misc_RNA (1)...(19): siRNA sense strand
gaccucacuuucuccaaga

SEQ ID NO: 611076 - RNA, 19 nt, Homo sapiens
  misc_RNA (1)...(19): siRNA sense strand
uccaagaaguuccucaaug

SEQ ID NO: 611077 - RNA, 19 nt, Homo sapiens
  misc_RNA (1)...(19): siRNA sense strand
cgaagaggacgacgaggaa

SEQ ID NO: 611078 - RNA, 19 nt, Homo sapiens
  misc_RNA (1)...(19): siRNA sense strand
aguuugagaugaucgauga

SEQ ID NO: 611079 - RNA, 19 nt, Homo sapiens
  misc_RNA (1)...(19): siRNA sense strand
gauugccacugcccggaaa

SEQ ID NO: 611080 - RNA, 19 nt, Homo sapiens
  misc_RNA (1)...(19): siRNA sense strand
gcccugaccucacuuucuc

SEQ ID NO: 611081 - RNA, 19 nt, Homo sapiens
  misc_RNA (1)...(19): siRNA sense strand
gagaugaucgaugacaaug

SEQ ID NO: 611082 - RNA, 19 nt, Homo sapiens
  misc_RNA (1)...(19): siRNA sense strand
cgcaacagcugcuauuucg

SEQ ID NO: 611083 - RNA, 19 nt, Homo sapiens
  misc_RNA (1)...(19): siRNA sense strand
gcagccauuucuuccagau

SEQ ID NO: 611084 - RNA, 19 nt, Homo sapiens
  misc_RNA (1)...(19): siRNA sense strand
agaaguuccucaaugucuu

SEQ ID NO: 611085 - RNA, 19 nt, Homo sapiens
  misc_RNA (1)...(19): siRNA sense strand
agccauuucuuccagauga

SEQ ID NO: 611086 - RNA, 19 nt, Homo sapiens
  misc_RNA (1)...(19): siRNA sense strand
acacgcuggugguggauga

SEQ ID NO: 611087 - RNA, 19 nt, Homo sapiens
  misc_RNA (1)...(19): siRNA sense strand
uuccagcgcugcagccauu

SEQ ID NO: 611088 - RNA, 19 nt, Homo sapiens
  misc_RNA (1)...(19): siRNA sense strand
acgcgucgcugguguacga

SEQ ID NO: 611089 - RNA, 19 nt, Homo sapiens
  misc_RNA (1)...(19): siRNA sense strand
gggcaacggcauccugugu

SEQ ID NO: 611090 - RNA, 19 nt, Homo sapiens
  misc_RNA (1)...(19): siRNA sense strand
gcagccaugcagaagauug

SEQ ID NO: 611091 - RNA, 19 nt, Homo sapiens
  misc_RNA (1)...(19): siRNA sense strand
gcgcugcagccauuucuuc

SEQ ID NO: 611092 - RNA, 19 nt, Homo sapiens
  misc_RNA (1)...(19): siRNA sense strand
uguacgacgcggucaagua

SEQ ID NO: 611093 - RNA, 19 nt, Homo sapiens
  misc_RNA (1)...(19): siRNA sense strand
aggaugacuuccaggaguu

SEQ ID NO: 611094 - RNA, 19 nt, Homo sapiens
  misc_RNA (1)...(19): siRNA sense strand
caagaaguuccucaauguc

SEQ ID NO: 611095 - RNA, 19 nt, Homo sapiens
  misc_RNA (1)...(19): siRNA sense strand
gccauuucuuccagaugaa

SEQ ID NO: 611096 - RNA, 19 nt, Homo sapiens
  misc_RNA (1)...(19): siRNA sense strand
ggaugacuuccaggaguuu

SEQ ID NO: 611097 - RNA, 19 nt, Homo sapiens
  misc_RNA (1)...(19): siRNA sense strand
ccugugaccucgagaucuc

SEQ ID NO: 611098 - RNA, 19 nt, Homo sapiens
  misc_RNA (1)...(19): siRNA sense strand
gccacugcccggaaacuga

SEQ ID NO: 611099 - RNA, 19 nt, Homo sapiens
  misc_RNA (1)...(19): siRNA sense strand
uccaggaguuugagaugau

SEQ ID NO: 611100 - RNA, 19 nt, Homo sapiens
  misc_RNA (1)...(19): siRNA sense strand
ccgcaacagcugcuauuuc

SEQ ID NO: 611101 - RNA, 19 nt, Homo sapiens
  misc_RNA (1)...(19): siRNA sense strand
ugagaugaucgaugacaau

SEQ ID NO: 611102 - RNA, 19 nt, Homo sapiens
  misc_RNA (1)...(19): siRNA sense strand
gaucgaugacaaugaagag

SEQ ID NO: 611103 - RNA, 19 nt, Homo sapiens
  misc_RNA (1)...(19): siRNA sense strand
gaugaucgaugacaaugaa

SEQ ID NO: 611104 - RNA, 19 nt, Homo sapiens
  misc_RNA (1)...(19): siRNA sense strand
ccaagaaguuccucaaugu

SEQ ID NO: 611105 - RNA, 19 nt, Homo sapiens
  misc_RNA (1)...(19): siRNA sense strand
ggacagcccugaccucacu

SEQ ID NO: 611106 - RNA, 19 nt, Homo sapiens
  misc_RNA (1)...(19): siRNA sense strand
gcgccuuccuggaguacua

SEQ ID NO: 611107 - RNA, 19 nt, Homo sapiens
  misc_RNA (1)...(19): siRNA sense strand
gaccucacuuucuccaaga

SEQ ID NO: 611108 - RNA, 19 nt, Homo sapiens
  misc_RNA (1)...(19): siRNA sense strand
uccaagaaguuccucaaug

SEQ ID NO: 611109 - RNA, 19 nt, Homo sapiens
  misc_RNA (1)...(19): siRNA sense strand
cgaagaggacgacgaggaa

SEQ ID NO: 611110 - RNA, 19 nt, Homo sapiens
  misc_RNA (1)...(19): siRNA sense strand
aguuugagaugaucgauga

SEQ ID NO: 611111 - RNA, 19 nt, Homo sapiens
  misc_RNA (1)...(19): siRNA sense strand
gauugccacugcccggaaa

SEQ ID NO: 611112 - RNA, 19 nt, Homo sapiens
  misc_RNA (1)...(19): siRNA sense strand
gcccugaccucacuuucuc

SEQ ID NO: 611113 - RNA, 19 nt, Homo sapiens
  misc_RNA (1)...(19): siRNA sense strand
gagaugaucgaugacaaug

SEQ ID NO: 611114 - RNA, 19 nt, Homo sapiens
  misc_RNA (1)...(19): siRNA sense strand
cgcaacagcugcuauuucg

SEQ ID NO: 611115 - RNA, 19 nt, Homo sapiens
  misc_RNA (1)...(19): siRNA sense strand
gcagccauuucuuccagau

SEQ ID NO: 611116 - RNA, 19 nt, Homo sapiens
  misc_RNA (1)...(19): siRNA sense strand
agaaguuccucaaugucuu

SEQ ID NO: 611117 - RNA, 19 nt, Homo sapiens
  misc_RNA (1)...(19): siRNA sense strand
agccauuucuuccagauga

SEQ ID NO: 611118 - RNA, 19 nt, Homo sapiens
  misc_RNA (1)...(19): siRNA sense strand
acacgcuggugguggauga

SEQ ID NO: 611119 - RNA, 19 nt, Homo sapiens
  misc_RNA (1)...(19): siRNA sense strand
uuccagcgcugcagccauu

SEQ ID NO: 611120 - RNA, 19 nt, Homo sapiens
  misc_RNA (1)...(19): siRNA sense strand
acgcgucgcugguguacga

SEQ ID NO: 611121 - RNA, 19 nt, Homo sapiens
  misc_RNA (1)...(19): siRNA sense strand
gggcaacggcauccugugu

SEQ ID NO: 611122 - RNA, 19 nt, Homo sapiens
  misc_RNA (1)...(19): siRNA sense strand
gcagccaugcagaagauug

SEQ ID NO: 611123 - RNA, 19 nt, Homo sapiens
  misc_RNA (1)...(19): siRNA sense strand
gcgcugcagccauuucuuc

SEQ ID NO: 611124 - RNA, 19 nt, Homo sapiens
  misc_RNA (1)...(19): siRNA sense strand
uguacgacgcggucaagua

SEQ ID NO: 611125 - RNA, 19 nt, Homo sapiens
  misc_RNA (1)...(19): siRNA sense strand
aggaugacuuccaggaguu

SEQ ID NO: 611126 - RNA, 19 nt, Homo sapiens
  misc_RNA (1)...(19): siRNA sense strand
caagaaguuccucaauguc

SEQ ID NO: 611127 - RNA, 19 nt, Homo sapiens
  misc_RNA (1)...(19): siRNA sense strand
gccauuucuuccagaugaa

SEQ ID NO: 611128 - RNA, 19 nt, Homo sapiens
  misc_RNA (1)...(19): siRNA sense strand
ggaugacuuccaggaguuu

SEQ ID NO: 611129 - RNA, 19 nt, Homo sapiens
  misc_RNA (1)...(19): siRNA sense strand
ccugugaccucgagaucuc

SEQ ID NO: 611130 - RNA, 19 nt, Homo sapiens
  misc_RNA (1)...(19): siRNA sense strand
gccacugcccggaaacuga

SEQ ID NO: 611131 - RNA, 19 nt, Homo sapiens
  misc_RNA (1)...(19): siRNA sense strand
uccaggaguuugagaugau

SEQ ID NO: 611132 - RNA, 19 nt, Homo sapiens
  misc_RNA (1)...(19): siRNA sense strand
ccgcaacagcugcuauuuc

SEQ ID NO: 611133 - RNA, 19 nt, Homo sapiens
  misc_RNA (1)...(19): siRNA sense strand
ugagaugaucgaugacaau

SEQ ID NO: 611134 - RNA, 19 nt, Homo sapiens
  misc_RNA (1)...(19): siRNA sense strand
gaucgaugacaaugaagag

SEQ ID NO: 611135 - RNA, 19 nt, Homo sapiens
  misc_RNA (1)...(19): siRNA sense strand
gaugaucgaugacaaugaa

SEQ ID NO: 611136 - RNA, 19 nt, Homo sapiens
  misc_RNA (1)...(19): siRNA sense strand
ccaagaaguuccucaaugu

SEQ ID NO: 611137 - RNA, 19 nt, Homo sapiens
  misc_RNA (1)...(19): siRNA sense strand
ggacagcccugaccucacu

SEQ ID NO: 611138 - RNA, 19 nt, Homo sapiens
  misc_RNA (1)...(19): siRNA sense strand
gcgccuuccuggaguacua

SEQ ID NO: 611139 - RNA, 19 nt, Homo sapiens
  misc_RNA (1)...(19): siRNA sense strand
gaccucacuuucuccaaga

SEQ ID NO: 611140 - RNA, 19 nt, Homo sapiens
  misc_RNA (1)...(19): siRNA sense strand
uccaagaaguuccucaaug

SEQ ID NO: 611141 - RNA, 19 nt, Homo sapiens
  misc_RNA (1)...(19): siRNA sense strand
cgaagaggacgacgaggaa

SEQ ID NO: 611142 - RNA, 19 nt, Homo sapiens
  misc_RNA (1)...(19): siRNA sense strand
aguuugagaugaucgauga

SEQ ID NO: 611143 - RNA, 19 nt, Homo sapiens
  misc_RNA (1)...(19): siRNA sense strand
gauugccacugcccggaaa

SEQ ID NO: 611144 - RNA, 19 nt, Homo sapiens
  misc_RNA (1)...(19): siRNA sense strand
gcccugaccucacuuucuc

SEQ ID NO: 611145 - RNA, 19 nt, Homo sapiens
  misc_RNA (1)...(19): siRNA sense strand
gagaugaucgaugacaaug

SEQ ID NO: 611146 - RNA, 19 nt, Homo sapiens
  misc_RNA (1)...(19): siRNA sense strand
cgcaacagcugcuauuucg

SEQ ID NO: 611147 - RNA, 19 nt, Homo sapiens
  misc_RNA (1)...(19): siRNA sense strand
gcagccauuucuuccagau

SEQ ID NO: 611148 - RNA, 19 nt, Homo sapiens
  misc_RNA (1)...(19): siRNA sense strand
agaaguuccucaaugucuu

SEQ ID NO: 611149 - RNA, 19 nt, Homo sapiens
  misc_RNA (1)...(19): siRNA sense strand
agccauuucuuccagauga

SEQ ID NO: 611150 - RNA, 19 nt, Homo sapiens
  misc_RNA (1)...(19): siRNA sense strand
acacgcuggugguggauga

SEQ ID NO: 611151 - RNA, 19 nt, Homo sapiens
  misc_RNA (1)...(19): siRNA sense strand
uuccagcgcugcagccauu

SEQ ID NO: 611152 - RNA, 19 nt, Homo sapiens
  misc_RNA (1)...(19): siRNA sense strand
acgcgucgcugguguacga

SEQ ID NO: 611153 - RNA, 19 nt, Homo sapiens
  misc_RNA (1)...(19): siRNA sense strand
gggcaacggcauccugugu

SEQ ID NO: 611154 - RNA, 19 nt, Homo sapiens
  misc_RNA (1)...(19): siRNA sense strand
gcagccaugcagaagauug

SEQ ID NO: 611155 - RNA, 19 nt, Homo sapiens
  misc_RNA (1)...(19): siRNA sense strand
gcgcugcagccauuucuuc

SEQ ID NO: 611156 - RNA, 19 nt, Homo sapiens
  misc_RNA (1)...(19): siRNA sense strand
uguacgacgcggucaagua

SEQ ID NO: 611157 - RNA, 19 nt, Homo sapiens
  misc_RNA (1)...(19): siRNA sense strand
aggaugacuuccaggaguu

SEQ ID NO: 611158 - RNA, 19 nt, Homo sapiens
  misc_RNA (1)...(19): siRNA sense strand
caagaaguuccucaauguc

SEQ ID NO: 611159 - RNA, 19 nt, Homo sapiens
  misc_RNA (1)...(19): siRNA sense strand
gccauuucuuccagaugaa

SEQ ID NO: 611160 - RNA, 19 nt, Homo sapiens
  misc_RNA (1)...(19): siRNA sense strand
ggaugacuuccaggaguuu

SEQ ID NO: 611161 - RNA, 19 nt, Homo sapiens
  misc_RNA (1)...(19): siRNA sense strand
ccugugaccucgagaucuc

SEQ ID NO: 611162 - RNA, 19 nt, Homo sapiens
  misc_RNA (1)...(19): siRNA sense strand
gccacugcccggaaacuga

SEQ ID NO: 611163 - RNA, 19 nt, Homo sapiens
  misc_RNA (1)...(19): siRNA sense strand
uccaggaguuugagaugau

SEQ ID NO: 611164 - RNA, 19 nt, Homo sapiens
  misc_RNA (1)...(19): siRNA sense strand
ccgcaacagcugcuauuuc

SEQ ID NO: 611165 - RNA, 19 nt, Homo sapiens
  misc_RNA (1)...(19): siRNA sense strand
ugagaugaucgaugacaau

SEQ ID NO: 611166 - RNA, 19 nt, Homo sapiens
  misc_RNA (1)...(19): siRNA sense strand
gaucgaugacaaugaagag

SEQ ID NO: 611167 - RNA, 19 nt, Homo sapiens
  misc_RNA (1)...(19): siRNA sense strand
ggacgugguugaggaauuc

SEQ ID NO: 611168 - RNA, 19 nt, Homo sapiens
  misc_RNA (1)...(19): siRNA sense strand
ggcguggccugcuaccuua

SEQ ID NO: 611169 - RNA, 19 nt, Homo sapiens
  misc_RNA (1)...(19): siRNA sense strand
ggaauucagcgauuuauac

SEQ ID NO: 611170 - RNA, 19 nt, Homo sapiens
  misc_RNA (1)...(19): siRNA sense strand
ccaacggccuccuggaaga

SEQ ID NO: 611171 - RNA, 19 nt, Homo sapiens
  misc_RNA (1)...(19): siRNA sense strand
gcaucagccucuauuccaa

SEQ ID NO: 611172 - RNA, 19 nt, Homo sapiens
  misc_RNA (1)...(19): siRNA sense strand
guugaggaauucagcgauu

SEQ ID NO: 611173 - RNA, 19 nt, Homo sapiens
  misc_RNA (1)...(19): siRNA sense strand
gaauucagcgauuuauaca

SEQ ID NO: 611174 - RNA, 19 nt, Homo sapiens
  misc_RNA (1)...(19): siRNA sense strand
ggaacccuaucuaucaucu

SEQ ID NO: 611175 - RNA, 19 nt, Homo sapiens
  misc_RNA (1)...(19): siRNA sense strand
ugaggaauucagcgauuua

SEQ ID NO: 611176 - RNA, 19 nt, Homo sapiens
  misc_RNA (1)...(19): siRNA sense strand
agaauggcguggccugcua

SEQ ID NO: 611177 - RNA, 19 nt, Homo sapiens
  misc_RNA (1)...(19): siRNA sense strand
gugcagagugugaaacuug

SEQ ID NO: 611178 - RNA, 19 nt, Homo sapiens
  misc_RNA (1)...(19): siRNA sense strand
uaucuaucaucuagcagaa

SEQ ID NO: 611179 - RNA, 19 nt, Homo sapiens
  misc_RNA (1)...(19): siRNA sense strand
ccacccaccgcaaguacua

SEQ ID NO: 611180 - RNA, 19 nt, Homo sapiens
  misc_RNA (1)...(19): siRNA sense strand
ggaugucacugugcuugag

SEQ ID NO: 611181 - RNA, 19 nt, Homo sapiens
  misc_RNA (1)...(19): siRNA sense strand
gcagccaaagcacuucuug

SEQ ID NO: 611182 - RNA, 19 nt, Homo sapiens
  misc_RNA (1)...(19): siRNA sense strand
ugaauccaguggugacagu

SEQ ID NO: 611183 - RNA, 19 nt, Homo sapiens
  misc_RNA (1)...(19): siRNA sense strand
gaacccuaucuaucaucua

SEQ ID NO: 611184 - RNA, 19 nt, Homo sapiens
  misc_RNA (1)...(19): siRNA sense strand
aacccuaucuaucaucuag

SEQ ID NO: 611185 - RNA, 19 nt, Homo sapiens
  misc_RNA (1)...(19): siRNA sense strand
caaggacgugguugaggaa

SEQ ID NO: 611186 - RNA, 19 nt, Homo sapiens
  misc_RNA (1)...(19): siRNA sense strand
caugggaacccuaucuauc

SEQ ID NO: 611187 - RNA, 19 nt, Homo sapiens
  misc_RNA (1)...(19): siRNA sense strand
gaggaauucagcgauuuau

SEQ ID NO: 611188 - RNA, 19 nt, Homo sapiens
  misc_RNA (1)...(19): siRNA sense strand
uugaggaauucagcgauuu

SEQ ID NO: 611189 - RNA, 19 nt, Homo sapiens
  misc_RNA (1)...(19): siRNA sense strand
ccugcuaccuuaccaacca

SEQ ID NO: 611190 - RNA, 19 nt, Homo sapiens
  misc_RNA (1)...(19): siRNA sense strand
auucagcgauuuauacaac

SEQ ID NO: 611191 - RNA, 19 nt, Homo sapiens
  misc_RNA (1)...(19): siRNA sense strand
ccaugggaacccuaucuau

SEQ ID NO: 611192 - RNA, 19 nt, Homo sapiens
  misc_RNA (1)...(19): siRNA sense strand
gauguaccgagaccucuuc

SEQ ID NO: 611193 - RNA, 19 nt, Homo sapiens
  misc_RNA (1)...(19): siRNA sense strand
ucagcgauuuauacaacga

SEQ ID NO: 611194 - RNA, 19 nt, Homo sapiens
  misc_RNA (1)...(19): siRNA sense strand
gaggccgugugcagagugu

SEQ ID NO: 611195 - RNA, 19 nt, Homo sapiens
  misc_RNA (1)...(19): siRNA sense strand
ggacgugguugaggaauuc

SEQ ID NO: 611196 - RNA, 19 nt, Homo sapiens
  misc_RNA (1)...(19): siRNA sense strand
ggcguggccugcuaccuua

SEQ ID NO: 611197 - RNA, 19 nt, Homo sapiens
  misc_RNA (1)...(19): siRNA sense strand
ggaauucagcgauuuauac

SEQ ID NO: 611198 - RNA, 19 nt, Homo sapiens
  misc_RNA (1)...(19): siRNA sense strand
ccaacggccuccuggaaga

SEQ ID NO: 611199 - RNA, 19 nt, Homo sapiens
  misc_RNA (1)...(19): siRNA sense strand
gcaucagccucuauuccaa

SEQ ID NO: 611200 - RNA, 19 nt, Homo sapiens
  misc_RNA (1)...(19): siRNA sense strand
guugaggaauucagcgauu

SEQ ID NO: 611201 - RNA, 19 nt, Homo sapiens
  misc_RNA (1)...(19): siRNA sense strand
gaauucagcgauuuauaca

SEQ ID NO: 611202 - RNA, 19 nt, Homo sapiens
  misc_RNA (1)...(19): siRNA sense strand
ggaacccuaucuaucaucu

SEQ ID NO: 611203 - RNA, 19 nt, Homo sapiens
  misc_RNA (1)...(19): siRNA sense strand
ugaggaauucagcgauuua

SEQ ID NO: 611204 - RNA, 19 nt, Homo sapiens
  misc_RNA (1)...(19): siRNA sense strand
agaauggcguggccugcua

SEQ ID NO: 611205 - RNA, 19 nt, Homo sapiens
  misc_RNA (1)...(19): siRNA sense strand
gugcagagugugaaacuug

SEQ ID NO: 611206 - RNA, 19 nt, Homo sapiens
  misc_RNA (1)...(19): siRNA sense strand
uaucuaucaucuagcagaa

SEQ ID NO: 611207 - RNA, 19 nt, Homo sapiens
  misc_RNA (1)...(19): siRNA sense strand
ccacccaccgcaaguacua

SEQ ID NO: 611208 - RNA, 19 nt, Homo sapiens
  misc_RNA (1)...(19): siRNA sense strand
ggaugucacugugcuugag

SEQ ID NO: 611209 - RNA, 19 nt, Homo sapiens
  misc_RNA (1)...(19): siRNA sense strand
gcagccaaagcacuucuug

SEQ ID NO: 611210 - RNA, 19 nt, Homo sapiens
  misc_RNA (1)...(19): siRNA sense strand
ugaauccaguggugacagu

SEQ ID NO: 611211 - RNA, 19 nt, Homo sapiens
  misc_RNA (1)...(19): siRNA sense strand
gaacccuaucuaucaucua

SEQ ID NO: 611212 - RNA, 19 nt, Homo sapiens
  misc_RNA (1)...(19): siRNA sense strand
aacccuaucuaucaucuag

SEQ ID NO: 611213 - RNA, 19 nt, Homo sapiens
  misc_RNA (1)...(19): siRNA sense strand
caaggacgugguugaggaa

SEQ ID NO: 611214 - RNA, 19 nt, Homo sapiens
  misc_RNA (1)...(19): siRNA sense strand
caugggaacccuaucuauc

SEQ ID NO: 611215 - RNA, 19 nt, Homo sapiens
  misc_RNA (1)...(19): siRNA sense strand
gaggaauucagcgauuuau

SEQ ID NO: 611216 - RNA, 19 nt, Homo sapiens
  misc_RNA (1)...(19): siRNA sense strand
uugaggaauucagcgauuu

SEQ ID NO: 611217 - RNA, 19 nt, Homo sapiens
  misc_RNA (1)...(19): siRNA sense strand
ccugcuaccuuaccaacca

SEQ ID NO: 611218 - RNA, 19 nt, Homo sapiens
  misc_RNA (1)...(19): siRNA sense strand
auucagcgauuuauacaac

SEQ ID NO: 611219 - RNA, 19 nt, Homo sapiens
  misc_RNA (1)...(19): siRNA sense strand
ccaugggaacccuaucuau

SEQ ID NO: 611220 - RNA, 19 nt, Homo sapiens
  misc_RNA (1)...(19): siRNA sense strand
gauguaccgagaccucuuc

SEQ ID NO: 611221 - RNA, 19 nt, Homo sapiens
  misc_RNA (1)...(19): siRNA sense strand
ucagcgauuuauacaacga

SEQ ID NO: 611222 - RNA, 19 nt, Homo sapiens
  misc_RNA (1)...(19): siRNA sense strand
gaggccgugugcagagugu

SEQ ID NO: 611223 - RNA, 19 nt, Homo sapiens
  misc_RNA (1)...(19): siRNA sense strand
ggacgugguugaggaauuc

SEQ ID NO: 611224 - RNA, 19 nt, Homo sapiens
  misc_RNA (1)...(19): siRNA sense strand
ggcguggccugcuaccuua

SEQ ID NO: 611225 - RNA, 19 nt, Homo sapiens
  misc_RNA (1)...(19): siRNA sense strand
ggaauucagcgauuuauac

SEQ ID NO: 611226 - RNA, 19 nt, Homo sapiens
  misc_RNA (1)...(19): siRNA sense strand
ccaacggccuccuggaaga

SEQ ID NO: 611227 - RNA, 19 nt, Homo sapiens
  misc_RNA (1)...(19): siRNA sense strand
gcaucagccucuauuccaa

SEQ ID NO: 611228 - RNA, 19 nt, Homo sapiens
  misc_RNA (1)...(19): siRNA sense strand
guugaggaauucagcgauu

SEQ ID NO: 611229 - RNA, 19 nt, Homo sapiens
  misc_RNA (1)...(19): siRNA sense strand
gaauucagcgauuuauaca

SEQ ID NO: 611230 - RNA, 19 nt, Homo sapiens
  misc_RNA (1)...(19): siRNA sense strand
ggaacccuaucuaucaucu

SEQ ID NO: 611231 - RNA, 19 nt, Homo sapiens
  misc_RNA (1)...(19): siRNA sense strand
ugaggaauucagcgauuua

SEQ ID NO: 611232 - RNA, 19 nt, Homo sapiens
  misc_RNA (1)...(19): siRNA sense strand
agaauggcguggccugcua

SEQ ID NO: 611233 - RNA, 19 nt, Homo sapiens
  misc_RNA (1)...(19): siRNA sense strand
gugcagagugugaaacuug

SEQ ID NO: 611234 - RNA, 19 nt, Homo sapiens
  misc_RNA (1)...(19): siRNA sense strand
uaucuaucaucuagcagaa

SEQ ID NO: 611235 - RNA, 19 nt, Homo sapiens
  misc_RNA (1)...(19): siRNA sense strand
ccacccaccgcaaguacua

SEQ ID NO: 611236 - RNA, 19 nt, Homo sapiens
  misc_RNA (1)...(19): siRNA sense strand
ggaugucacugugcuugag

SEQ ID NO: 611237 - RNA, 19 nt, Homo sapiens
  misc_RNA (1)...(19): siRNA sense strand
gcagccaaagcacuucuug

SEQ ID NO: 611238 - RNA, 19 nt, Homo sapiens
  misc_RNA (1)...(19): siRNA sense strand
ugaauccaguggugacagu

SEQ ID NO: 611239 - RNA, 19 nt, Homo sapiens
  misc_RNA (1)...(19): siRNA sense strand
gaacccuaucuaucaucua

SEQ ID NO: 611240 - RNA, 19 nt, Homo sapiens
  misc_RNA (1)...(19): siRNA sense strand
aacccuaucuaucaucuag

SEQ ID NO: 611241 - RNA, 19 nt, Homo sapiens
  misc_RNA (1)...(19): siRNA sense strand
caaggacgugguugaggaa

SEQ ID NO: 611242 - RNA, 19 nt, Homo sapiens
  misc_RNA (1)...(19): siRNA sense strand
caugggaacccuaucuauc

SEQ ID NO: 611243 - RNA, 19 nt, Homo sapiens
  misc_RNA (1)...(19): siRNA sense strand
gaggaauucagcgauuuau

SEQ ID NO: 611244 - RNA, 19 nt, Homo sapiens
  misc_RNA (1)...(19): siRNA sense strand
uugaggaauucagcgauuu

SEQ ID NO: 611245 - RNA, 19 nt, Homo sapiens
  misc_RNA (1)...(19): siRNA sense strand
ccugcuaccuuaccaacca

SEQ ID NO: 611246 - RNA, 19 nt, Homo sapiens
  misc_RNA (1)...(19): siRNA sense strand
auucagcgauuuauacaac

SEQ ID NO: 611247 - RNA, 19 nt, Homo sapiens
  misc_RNA (1)...(19): siRNA sense strand
ccaugggaacccuaucuau

SEQ ID NO: 611248 - RNA, 19 nt, Homo sapiens
  misc_RNA (1)...(19): siRNA sense strand
gauguaccgagaccucuuc

SEQ ID NO: 611249 - RNA, 19 nt, Homo sapiens
  misc_RNA (1)...(19): siRNA sense strand
ucagcgauuuauacaacga

SEQ ID NO: 611250 - RNA, 19 nt, Homo sapiens
  misc_RNA (1)...(19): siRNA sense strand
gaggccgugugcagagugu

SEQ ID NO: 611251 - RNA, 19 nt, Homo sapiens
  misc_RNA (1)...(19): siRNA sense strand
ggacgugguugaggaauuc

SEQ ID NO: 611252 - RNA, 19 nt, Homo sapiens
  misc_RNA (1)...(19): siRNA sense strand
ggcguggccugcuaccuua

SEQ ID NO: 611253 - RNA, 19 nt, Homo sapiens
  misc_RNA (1)...(19): siRNA sense strand
ggaauucagcgauuuauac

SEQ ID NO: 611254 - RNA, 19 nt, Homo sapiens
  misc_RNA (1)...(19): siRNA sense strand
ccaacggccuccuggaaga

SEQ ID NO: 611255 - RNA, 19 nt, Homo sapiens
  misc_RNA (1)...(19): siRNA sense strand
gcaucagccucuauuccaa

SEQ ID NO: 611256 - RNA, 19 nt, Homo sapiens
  misc_RNA (1)...(19): siRNA sense strand
guugaggaauucagcgauu

SEQ ID NO: 611257 - RNA, 19 nt, Homo sapiens
  misc_RNA (1)...(19): siRNA sense strand
gaauucagcgauuuauaca

SEQ ID NO: 611258 - RNA, 19 nt, Homo sapiens
  misc_RNA (1)...(19): siRNA sense strand
ggaacccuaucuaucaucu

SEQ ID NO: 611259 - RNA, 19 nt, Homo sapiens
  misc_RNA (1)...(19): siRNA sense strand
ugaggaauucagcgauuua

SEQ ID NO: 611260 - RNA, 19 nt, Homo sapiens
  misc_RNA (1)...(19): siRNA sense strand
agaauggcguggccugcua

SEQ ID NO: 611261 - RNA, 19 nt, Homo sapiens
  misc_RNA (1)...(19): siRNA sense strand
gugcagagugugaaacuug

SEQ ID NO: 611262 - RNA, 19 nt, Homo sapiens
  misc_RNA (1)...(19): siRNA sense strand
uaucuaucaucuagcagaa

SEQ ID NO: 611263 - RNA, 19 nt, Homo sapiens
  misc_RNA (1)...(19): siRNA sense strand
ccacccaccgcaaguacua

SEQ ID NO: 611264 - RNA, 19 nt, Homo sapiens
  misc_RNA (1)...(19): siRNA sense strand
ggaugucacugugcuugag

SEQ ID NO: 611265 - RNA, 19 nt, Homo sapiens
  misc_RNA (1)...(19): siRNA sense strand
gcagccaaagcacuucuug

SEQ ID NO: 611266 - RNA, 19 nt, Homo sapiens
  misc_RNA (1)...(19): siRNA sense strand
ugaauccaguggugacagu

SEQ ID NO: 611267 - RNA, 19 nt, Homo sapiens
  misc_RNA (1)...(19): siRNA sense strand
gaacccuaucuaucaucua

SEQ ID NO: 611268 - RNA, 19 nt, Homo sapiens
  misc_RNA (1)...(19): siRNA sense strand
aacccuaucuaucaucuag

SEQ ID NO: 611269 - RNA, 19 nt, Homo sapiens
  misc_RNA (1)...(19): siRNA sense strand
caaggacgugguugaggaa

SEQ ID NO: 611270 - RNA, 19 nt, Homo sapiens
  misc_RNA (1)...(19): siRNA sense strand
caugggaacccuaucuauc

SEQ ID NO: 611271 - RNA, 19 nt, Homo sapiens
  misc_RNA (1)...(19): siRNA sense strand
gaggaauucagcgauuuau

SEQ ID NO: 611272 - RNA, 19 nt, Homo sapiens
  misc_RNA (1)...(19): siRNA sense strand
uugaggaauucagcgauuu

SEQ ID NO: 611273 - RNA, 19 nt, Homo sapiens
  misc_RNA (1)...(19): siRNA sense strand
ccugcuaccuuaccaacca

SEQ ID NO: 611274 - RNA, 19 nt, Homo sapiens
  misc_RNA (1)...(19): siRNA sense strand
auucagcgauuuauacaac

SEQ ID NO: 611275 - RNA, 19 nt, Homo sapiens
  misc_RNA (1)...(19): siRNA sense strand
ccaugggaacccuaucuau

SEQ ID NO: 611276 - RNA, 19 nt, Homo sapiens
  misc_RNA (1)...(19): siRNA sense strand
gauguaccgagaccucuuc

SEQ ID NO: 611277 - RNA, 19 nt, Homo sapiens
  misc_RNA (1)...(19): siRNA sense strand
ucagcgauuuauacaacga

SEQ ID NO: 611278 - RNA, 19 nt, Homo sapiens
  misc_RNA (1)...(19): siRNA sense strand
gaggccgugugcagagugu

SEQ ID NO: 611279 - RNA, 19 nt, Homo sapiens
  misc_RNA (1)...(19): siRNA sense strand
ggacgugguugaggaauuc

SEQ ID NO: 611280 - RNA, 19 nt, Homo sapiens
  misc_RNA (1)...(19): siRNA sense strand
ggcguggccugcuaccuua

SEQ ID NO: 611281 - RNA, 19 nt, Homo sapiens
  misc_RNA (1)...(19): siRNA sense strand
ggaauucagcgauuuauac

SEQ ID NO: 611282 - RNA, 19 nt, Homo sapiens
  misc_RNA (1)...(19): siRNA sense strand
ccaacggccuccuggaaga

SEQ ID NO: 611283 - RNA, 19 nt, Homo sapiens
  misc_RNA (1)...(19): siRNA sense strand
gcaucagccucuauuccaa

SEQ ID NO: 611284 - RNA, 19 nt, Homo sapiens
  misc_RNA (1)...(19): siRNA sense strand
guugaggaauucagcgauu

SEQ ID NO: 611285 - RNA, 19 nt, Homo sapiens
  misc_RNA (1)...(19): siRNA sense strand
gaauucagcgauuuauaca

SEQ ID NO: 611286 - RNA, 19 nt, Homo sapiens
  misc_RNA (1)...(19): siRNA sense strand
ggaacccuaucuaucaucu

SEQ ID NO: 611287 - RNA, 19 nt, Homo sapiens
  misc_RNA (1)...(19): siRNA sense strand
ugaggaauucagcgauuua

SEQ ID NO: 611288 - RNA, 19 nt, Homo sapiens
  misc_RNA (1)...(19): siRNA sense strand
agaauggcguggccugcua

SEQ ID NO: 611289 - RNA, 19 nt, Homo sapiens
  misc_RNA (1)...(19): siRNA sense strand
gugcagagugugaaacuug

SEQ ID NO: 611290 - RNA, 19 nt, Homo sapiens
  misc_RNA (1)...(19): siRNA sense strand
uaucuaucaucuagcagaa

SEQ ID NO: 611291 - RNA, 19 nt, Homo sapiens
  misc_RNA (1)...(19): siRNA sense strand
ccacccaccgcaaguacua

SEQ ID NO: 611292 - RNA, 19 nt, Homo sapiens
  misc_RNA (1)...(19): siRNA sense strand
ggaugucacugugcuugag

SEQ ID NO: 611293 - RNA, 19 nt, Homo sapiens
  misc_RNA (1)...(19): siRNA sense strand
gcagccaaagcacuucuug

SEQ ID NO: 611294 - RNA, 19 nt, Homo sapiens
  misc_RNA (1)...(19): siRNA sense strand
ugaauccaguggugacagu

SEQ ID NO: 611295 - RNA, 19 nt, Homo sapiens
  misc_RNA (1)...(19): siRNA sense strand
gaacccuaucuaucaucua

SEQ ID NO: 611296 - RNA, 19 nt, Homo sapiens
  misc_RNA (1)...(19): siRNA sense strand
aacccuaucuaucaucuag

SEQ ID NO: 611297 - RNA, 19 nt, Homo sapiens
  misc_RNA (1)...(19): siRNA sense strand
caaggacgugguugaggaa

SEQ ID NO: 611298 - RNA, 19 nt, Homo sapiens
  misc_RNA (1)...(19): siRNA sense strand
caugggaacccuaucuauc

SEQ ID NO: 611299 - RNA, 19 nt, Homo sapiens
  misc_RNA (1)...(19): siRNA sense strand
gaggaauucagcgauuuau

SEQ ID NO: 611300 - RNA, 19 nt, Homo sapiens
  misc_RNA (1)...(19): siRNA sense strand
uugaggaauucagcgauuu

SEQ ID NO: 611301 - RNA, 19 nt, Homo sapiens
  misc_RNA (1)...(19): siRNA sense strand
ccugcuaccuuaccaacca

SEQ ID NO: 611302 - RNA, 19 nt, Homo sapiens
  misc_RNA (1)...(19): siRNA sense strand
auucagcgauuuauacaac

SEQ ID NO: 611303 - RNA, 19 nt, Homo sapiens
  misc_RNA (1)...(19): siRNA sense strand
ccaugggaacccuaucuau

SEQ ID NO: 611304 - RNA, 19 nt, Homo sapiens
  misc_RNA (1)...(19): siRNA sense strand
gauguaccgagaccucuuc

SEQ ID NO: 611305 - RNA, 19 nt, Homo sapiens
  misc_RNA (1)...(19): siRNA sense strand
ucagcgauuuauacaacga

SEQ ID NO: 611306 - RNA, 19 nt, Homo sapiens
  misc_RNA (1)...(19): siRNA sense strand
gaggccgugugcagagugu

SEQ ID NO: 611307 - RNA, 19 nt, Homo sapiens
  misc_RNA (1)...(19): siRNA sense strand
ggacagccauuauuucuca

SEQ ID NO: 611308 - RNA, 19 nt, Homo sapiens
  misc_RNA (1)...(19): siRNA sense strand
gaacggaauugcuauugga

SEQ ID NO: 611309 - RNA, 19 nt, Homo sapiens
  misc_RNA (1)...(19): siRNA sense strand
gcagugccaugaaugcaua

SEQ ID NO: 611310 - RNA, 19 nt, Homo sapiens
  misc_RNA (1)...(19): siRNA sense strand
gacugaacaugaagaguua

SEQ ID NO: 611311 - RNA, 19 nt, Homo sapiens
  misc_RNA (1)...(19): siRNA sense strand
uaacaagugauccuucuua

SEQ ID NO: 611312 - RNA, 19 nt, Homo sapiens
  misc_RNA (1)...(19): siRNA sense strand
ggaaaggaucccaggaaua

SEQ ID NO: 611313 - RNA, 19 nt, Homo sapiens
  misc_RNA (1)...(19): siRNA sense strand
ggacugaacaugaagaguu

SEQ ID NO: 611314 - RNA, 19 nt, Homo sapiens
  misc_RNA (1)...(19): siRNA sense strand
ggagauggauauucugauc

SEQ ID NO: 611315 - RNA, 19 nt, Homo sapiens
  misc_RNA (1)...(19): siRNA sense strand
gcacggaaccugaggauca

SEQ ID NO: 611316 - RNA, 19 nt, Homo sapiens
  misc_RNA (1)...(19): siRNA sense strand
ggaagagaauugaguuugg

SEQ ID NO: 611317 - RNA, 19 nt, Homo sapiens
  misc_RNA (1)...(19): siRNA sense strand
gaucagcuuuacuauguga

SEQ ID NO: 611318 - RNA, 19 nt, Homo sapiens
  misc_RNA (1)...(19): siRNA sense strand
ugagagaggugaagaucaa

SEQ ID NO: 611319 - RNA, 19 nt, Homo sapiens
  misc_RNA (1)...(19): siRNA sense strand
gaacugguuugaggccuuu

SEQ ID NO: 611320 - RNA, 19 nt, Homo sapiens
  misc_RNA (1)...(19): siRNA sense strand
acagugaaguggcugguua

SEQ ID NO: 611321 - RNA, 19 nt, Homo sapiens
  misc_RNA (1)...(19): siRNA sense strand
gaaaggaucccaggaauac

SEQ ID NO: 611322 - RNA, 19 nt, Homo sapiens
  misc_RNA (1)...(19): siRNA sense strand
ccacggauaugcagucaau

SEQ ID NO: 611323 - RNA, 19 nt, Homo sapiens
  misc_RNA (1)...(19): siRNA sense strand
ugaaguggcugguuacauc

SEQ ID NO: 611324 - RNA, 19 nt, Homo sapiens
  misc_RNA (1)...(19): siRNA sense strand
acuacuagauggcgacuua

SEQ ID NO: 611325 - RNA, 19 nt, Homo sapiens
  misc_RNA (1)...(19): siRNA sense strand
gcauagaacacaucaggaa

SEQ ID NO: 611326 - RNA, 19 nt, Homo sapiens
  misc_RNA (1)...(19): siRNA sense strand
gaagagaauugaguuuggu

SEQ ID NO: 611327 - RNA, 19 nt, Homo sapiens
  misc_RNA (1)...(19): siRNA sense strand
cagaauuccuguaccaaau

SEQ ID NO: 611328 - RNA, 19 nt, Homo sapiens
  misc_RNA (1)...(19): siRNA sense strand
gcagaauuccuguaccaaa

SEQ ID NO: 611329 - RNA, 19 nt, Homo sapiens
  misc_RNA (1)...(19): siRNA sense strand
guuugaggccuuugaaaua

SEQ ID NO: 611330 - RNA, 19 nt, Homo sapiens
  misc_RNA (1)...(19): siRNA sense strand
gaucuacaauggccaacug

SEQ ID NO: 611331 - RNA, 19 nt, Homo sapiens
  misc_RNA (1)...(19): siRNA sense strand
ggaaucagacuuuuaauga

SEQ ID NO: 611332 - RNA, 19 nt, Homo sapiens
  misc_RNA (1)...(19): siRNA sense strand
aggaucagcuuuacuaugu

SEQ ID NO: 611333 - RNA, 19 nt, Homo sapiens
  misc_RNA (1)...(19): siRNA sense strand
caacagcaaccucuucuuc

SEQ ID NO: 611334 - RNA, 19 nt, Homo sapiens
  misc_RNA (1)...(19): siRNA sense strand
ugacuuccaucagguaauu

SEQ ID NO: 611335 - RNA, 19 nt, Homo sapiens
  misc_RNA (1)...(19): siRNA sense strand
ccacaacgcucuccaugcu

SEQ ID NO: 611336 - RNA, 19 nt, Homo sapiens
  misc_RNA (1)...(19): siRNA sense strand
gauacaguacagucaguua

SEQ ID NO: 611337 - RNA, 19 nt, Homo sapiens
  misc_RNA (1)...(19): siRNA sense strand
ggagguucauccauguuug

SEQ ID NO: 611338 - RNA, 19 nt, Homo sapiens
  misc_RNA (1)...(19): siRNA sense strand
acaacgcucuccaugcuuu

SEQ ID NO: 611339 - RNA, 19 nt, Homo sapiens
  misc_RNA (1)...(19): siRNA sense strand
gaucccgaaucaauuauag

SEQ ID NO: 611340 - RNA, 19 nt, Homo sapiens
  misc_RNA (1)...(19): siRNA sense strand
cagaagcagugccaugaau

SEQ ID NO: 611341 - RNA, 19 nt, Homo sapiens
  misc_RNA (1)...(19): siRNA sense strand
cgauguagcacgggauuua

SEQ ID NO: 611342 - RNA, 19 nt, Homo sapiens
  misc_RNA (1)...(19): siRNA sense strand
cgagguggaggacauauuu

SEQ ID NO: 611343 - RNA, 19 nt, Homo sapiens
  misc_RNA (1)...(19): siRNA sense strand
gaaaaguacuugcgagaag

SEQ ID NO: 611344 - RNA, 19 nt, Homo sapiens
  misc_RNA (1)...(19): siRNA sense strand
ugacaugauuaaucgauuc

SEQ ID NO: 611345 - RNA, 19 nt, Homo sapiens
  misc_RNA (1)...(19): siRNA sense strand
ggcacaggcuucaguuuua

SEQ ID NO: 611346 - RNA, 19 nt, Homo sapiens
  misc_RNA (1)...(19): siRNA sense strand
ggaagcagaacugguuuga

SEQ ID NO: 611347 - RNA, 19 nt, Homo sapiens
  misc_RNA (1)...(19): siRNA sense strand
gcgagaagauacaguacag

SEQ ID NO: 611348 - RNA, 19 nt, Homo sapiens
  misc_RNA (1)...(19): siRNA sense strand
ggauuuauacagugcacua

SEQ ID NO: 611349 - RNA, 19 nt, Homo sapiens
  misc_RNA (1)...(19): siRNA sense strand
gaaauaugugccagccauu

SEQ ID NO: 611350 - RNA, 19 nt, Homo sapiens
  misc_RNA (1)...(19): siRNA sense strand
ccuuugaaauacuggauaa

SEQ ID NO: 611351 - RNA, 19 nt, Homo sapiens
  misc_RNA (1)...(19): siRNA sense strand
ucaggaagcagaacugguu

SEQ ID NO: 611352 - RNA, 19 nt, Homo sapiens
  misc_RNA (1)...(19): siRNA sense strand
guucuucccagcucagaua

SEQ ID NO: 611353 - RNA, 19 nt, Homo sapiens
  misc_RNA (1)...(19): siRNA sense strand
ggagucuuaugcagggaaa

SEQ ID NO: 611354 - RNA, 19 nt, Homo sapiens
  misc_RNA (1)...(19): siRNA sense strand
acagugcacuaauucaguu

SEQ ID NO: 611355 - RNA, 19 nt, Homo sapiens
  misc_RNA (1)...(19): siRNA sense strand
ucuccaugcuuuacauuga

SEQ ID NO: 611356 - RNA, 19 nt, Homo sapiens
  misc_RNA (1)...(19): siRNA sense strand
gaaauacuggauaaacuac

SEQ ID NO: 611357 - RNA, 19 nt, Homo sapiens
  misc_RNA (1)...(19): siRNA sense strand
cuuuaaaucugacagugaa

SEQ ID NO: 611358 - RNA, 19 nt, Homo sapiens
  misc_RNA (1)...(19): siRNA sense strand
ggcauggacuggaaaggau

SEQ ID NO: 611359 - RNA, 19 nt, Homo sapiens
  misc_RNA (1)...(19): siRNA sense strand
ucccaggacugaacaugaa

SEQ ID NO: 611360 - RNA, 19 nt, Homo sapiens
  misc_RNA (1)...(19): siRNA sense strand
auaagguucugaucuacaa

SEQ ID NO: 611361 - RNA, 19 nt, Homo sapiens
  misc_RNA (1)...(19): siRNA sense strand
uugcacaccucauccauuc

SEQ ID NO: 611362 - RNA, 19 nt, Homo sapiens
  misc_RNA (1)...(19): siRNA sense strand
gaugauacccacggauaug

SEQ ID NO: 611363 - RNA, 19 nt, Homo sapiens
  misc_RNA (1)...(19): siRNA sense strand
uggaaaggaucccaggaau

SEQ ID NO: 611364 - RNA, 19 nt, Homo sapiens
  misc_RNA (1)...(19): siRNA sense strand
gaggaucagcuuuacuaug

SEQ ID NO: 611365 - RNA, 19 nt, Homo sapiens
  misc_RNA (1)...(19): siRNA sense strand
uguggaaggugauuguuuc

SEQ ID NO: 611366 - RNA, 19 nt, Homo sapiens
  misc_RNA (1)...(19): siRNA sense strand
aaauuggcuuguuggauga

SEQ ID NO: 611367 - RNA, 19 nt, Homo sapiens
  misc_RNA (1)...(19): siRNA sense strand
cauugaagcugggaagauc

SEQ ID NO: 611368 - RNA, 19 nt, Homo sapiens
  misc_RNA (1)...(19): siRNA sense strand
cggaauugcuauuggagau

SEQ ID NO: 611369 - RNA, 19 nt, Homo sapiens
  misc_RNA (1)...(19): siRNA sense strand
gggagguucauccauguuu

SEQ ID NO: 611370 - RNA, 19 nt, Homo sapiens
  misc_RNA (1)...(19): siRNA sense strand
gccagaagaugccccagua

SEQ ID NO: 611371 - RNA, 19 nt, Homo sapiens
  misc_RNA (1)...(19): siRNA sense strand
aacaugaccuugcgugaca

SEQ ID NO: 611372 - RNA, 19 nt, Homo sapiens
  misc_RNA (1)...(19): siRNA sense strand
augguuaacugaaaucaug

SEQ ID NO: 611373 - RNA, 19 nt, Homo sapiens
  misc_RNA (1)...(19): siRNA sense strand
uauuggagauggauauucu

SEQ ID NO: 611374 - RNA, 19 nt, Homo sapiens
  misc_RNA (1)...(19): siRNA sense strand
aaaggaagagaauugaguu

SEQ ID NO: 611375 - RNA, 19 nt, Homo sapiens
  misc_RNA (1)...(19): siRNA sense strand
ucugagagcuuuugacaug

SEQ ID NO: 611376 - RNA, 19 nt, Homo sapiens
  misc_RNA (1)...(19): siRNA sense strand
ccagaauguuacaggaugu

SEQ ID NO: 611377 - RNA, 19 nt, Homo sapiens
  misc_RNA (1)...(19): siRNA sense strand
gguuugaggccuuugaaau

SEQ ID NO: 611378 - RNA, 19 nt, Homo sapiens
  misc_RNA (1)...(19): siRNA sense strand
agacucaggacagccauua

SEQ ID NO: 611379 - RNA, 19 nt, Homo sapiens
  misc_RNA (1)...(19): siRNA sense strand
uuccagauauuuccugaau

SEQ ID NO: 611380 - RNA, 19 nt, Homo sapiens
  misc_RNA (1)...(19): siRNA sense strand
gaagcugggaagauccaaa

SEQ ID NO: 611381 - RNA, 19 nt, Homo sapiens
  misc_RNA (1)...(19): siRNA sense strand
aagccaugguuaacugaaa

SEQ ID NO: 611382 - RNA, 19 nt, Homo sapiens
  misc_RNA (1)...(19): siRNA sense strand
acagcaaccucuucuucug

SEQ ID NO: 611383 - RNA, 19 nt, Homo sapiens
  misc_RNA (1)...(19): siRNA sense strand
gaucccaggaauacaagaa

SEQ ID NO: 611384 - RNA, 19 nt, Homo sapiens
  misc_RNA (1)...(19): siRNA sense strand
gggcauggacuggaaagga

SEQ ID NO: 611385 - RNA, 19 nt, Homo sapiens
  misc_RNA (1)...(19): siRNA sense strand
ugaacggaauugcuauugg

SEQ ID NO: 611386 - RNA, 19 nt, Homo sapiens
  misc_RNA (1)...(19): siRNA sense strand
gaucaaccugaacggaauu

SEQ ID NO: 611387 - RNA, 19 nt, Homo sapiens
  misc_RNA (1)...(19): siRNA sense strand
guguuuccaugccaccuaa

SEQ ID NO: 611388 - RNA, 19 nt, Homo sapiens
  misc_RNA (1)...(19): siRNA sense strand
ucagauacagccagaagau

SEQ ID NO: 611389 - RNA, 19 nt, Homo sapiens
  misc_RNA (1)...(19): siRNA sense strand
cuagauggcgacuuaacaa

SEQ ID NO: 611390 - RNA, 19 nt, Homo sapiens
  misc_RNA (1)...(19): siRNA sense strand
caacgcucuccaugcuuua

SEQ ID NO: 611391 - RNA, 19 nt, Homo sapiens
  misc_RNA (1)...(19): siRNA sense strand
ggaucagcuuuacuaugug

SEQ ID NO: 611392 - RNA, 19 nt, Homo sapiens
  misc_RNA (1)...(19): siRNA sense strand
gaauacaagaaggcagaaa

SEQ ID NO: 611393 - RNA, 19 nt, Homo sapiens
  misc_RNA (1)...(19): siRNA sense strand
gcucagauacagccagaag

SEQ ID NO: 611394 - RNA, 19 nt, Homo sapiens
  misc_RNA (1)...(19): siRNA sense strand
ugaugggcauggacuggaa

SEQ ID NO: 611395 - RNA, 19 nt, Homo sapiens
  misc_RNA (1)...(19): siRNA sense strand
cauuauuucucaccccuua

SEQ ID NO: 611396 - RNA, 19 nt, Homo sapiens
  misc_RNA (1)...(19): siRNA sense strand
gaaugcauagaacacauca

SEQ ID NO: 611397 - RNA, 19 nt, Homo sapiens
  misc_RNA (1)...(19): siRNA sense strand
gaagcagugccaugaaugc

SEQ ID NO: 611398 - RNA, 19 nt, Homo sapiens
  misc_RNA (1)...(19): siRNA sense strand
agaucaaccugaacggaau

SEQ ID NO: 611399 - RNA, 19 nt, Homo sapiens
  misc_RNA (1)...(19): siRNA sense strand
cugaugauacccacggaua

SEQ ID NO: 611400 - RNA, 19 nt, Homo sapiens
  misc_RNA (1)...(19): siRNA sense strand
ucacaaguaacaugaccuu

SEQ ID NO: 611401 - RNA, 19 nt, Homo sapiens
  misc_RNA (1)...(19): siRNA sense strand
ugaguuuggucggcccuuu

SEQ ID NO: 611402 - RNA, 19 nt, Homo sapiens
  misc_RNA (1)...(19): siRNA sense strand
uagaacacaucaggaagca

SEQ ID NO: 611403 - RNA, 19 nt, Homo sapiens
  misc_RNA (1)...(19): siRNA sense strand
caaugaggacgauguagca

SEQ ID NO: 611404 - RNA, 19 nt, Homo sapiens
  misc_RNA (1)...(19): siRNA sense strand
auacaguacagucaguuaa

SEQ ID NO: 611405 - RNA, 19 nt, Homo sapiens
  misc_RNA (1)...(19): siRNA sense strand
caggacagccauuauuucu

SEQ ID NO: 611406 - RNA, 19 nt, Homo sapiens
  misc_RNA (1)...(19): siRNA sense strand
guacuugcgagaagauaca

SEQ ID NO: 611407 - RNA, 19 nt, Homo sapiens
  misc_RNA (1)...(19): siRNA sense strand
ggacagccauuauuucuca

SEQ ID NO: 611408 - RNA, 19 nt, Homo sapiens
  misc_RNA (1)...(19): siRNA sense strand
gaacggaauugcuauugga

SEQ ID NO: 611409 - RNA, 19 nt, Homo sapiens
  misc_RNA (1)...(19): siRNA sense strand
gcagugccaugaaugcaua

SEQ ID NO: 611410 - RNA, 19 nt, Homo sapiens
  misc_RNA (1)...(19): siRNA sense strand
gacugaacaugaagaguua

SEQ ID NO: 611411 - RNA, 19 nt, Homo sapiens
  misc_RNA (1)...(19): siRNA sense strand
uaacaagugauccuucuua

SEQ ID NO: 611412 - RNA, 19 nt, Homo sapiens
  misc_RNA (1)...(19): siRNA sense strand
ggaaaggaucccaggaaua

SEQ ID NO: 611413 - RNA, 19 nt, Homo sapiens
  misc_RNA (1)...(19): siRNA sense strand
ggacugaacaugaagaguu

SEQ ID NO: 611414 - RNA, 19 nt, Homo sapiens
  misc_RNA (1)...(19): siRNA sense strand
ggagauggauauucugauc

SEQ ID NO: 611415 - RNA, 19 nt, Homo sapiens
  misc_RNA (1)...(19): siRNA sense strand
gcacggaaccugaggauca

SEQ ID NO: 611416 - RNA, 19 nt, Homo sapiens
  misc_RNA (1)...(19): siRNA sense strand
ggaagagaauugaguuugg

SEQ ID NO: 611417 - RNA, 19 nt, Homo sapiens
  misc_RNA (1)...(19): siRNA sense strand
gaucagcuuuacuauguga

SEQ ID NO: 611418 - RNA, 19 nt, Homo sapiens
  misc_RNA (1)...(19): siRNA sense strand
ugagagaggugaagaucaa

SEQ ID NO: 611419 - RNA, 19 nt, Homo sapiens
  misc_RNA (1)...(19): siRNA sense strand
gaacugguuugaggccuuu

SEQ ID NO: 611420 - RNA, 19 nt, Homo sapiens
  misc_RNA (1)...(19): siRNA sense strand
acagugaaguggcugguua

SEQ ID NO: 611421 - RNA, 19 nt, Homo sapiens
  misc_RNA (1)...(19): siRNA sense strand
gaaaggaucccaggaauac

SEQ ID NO: 611422 - RNA, 19 nt, Homo sapiens
  misc_RNA (1)...(19): siRNA sense strand
ccacggauaugcagucaau

SEQ ID NO: 611423 - RNA, 19 nt, Homo sapiens
  misc_RNA (1)...(19): siRNA sense strand
ugaaguggcugguuacauc

SEQ ID NO: 611424 - RNA, 19 nt, Homo sapiens
  misc_RNA (1)...(19): siRNA sense strand
acuacuagauggcgacuua

SEQ ID NO: 611425 - RNA, 19 nt, Homo sapiens
  misc_RNA (1)...(19): siRNA sense strand
gcauagaacacaucaggaa

SEQ ID NO: 611426 - RNA, 19 nt, Homo sapiens
  misc_RNA (1)...(19): siRNA sense strand
gaagagaauugaguuuggu

SEQ ID NO: 611427 - RNA, 19 nt, Homo sapiens
  misc_RNA (1)...(19): siRNA sense strand
cagaauuccuguaccaaau

SEQ ID NO: 611428 - RNA, 19 nt, Homo sapiens
  misc_RNA (1)...(19): siRNA sense strand
gcagaauuccuguaccaaa

SEQ ID NO: 611429 - RNA, 19 nt, Homo sapiens
  misc_RNA (1)...(19): siRNA sense strand
guuugaggccuuugaaaua

SEQ ID NO: 611430 - RNA, 19 nt, Homo sapiens
  misc_RNA (1)...(19): siRNA sense strand
gaucuacaauggccaacug

SEQ ID NO: 611431 - RNA, 19 nt, Homo sapiens
  misc_RNA (1)...(19): siRNA sense strand
ggaaucagacuuuuaauga

SEQ ID NO: 611432 - RNA, 19 nt, Homo sapiens
  misc_RNA (1)...(19): siRNA sense strand
aggaucagcuuuacuaugu

SEQ ID NO: 611433 - RNA, 19 nt, Homo sapiens
  misc_RNA (1)...(19): siRNA sense strand
caacagcaaccucuucuuc

SEQ ID NO: 611434 - RNA, 19 nt, Homo sapiens
  misc_RNA (1)...(19): siRNA sense strand
ugacuuccaucagguaauu

SEQ ID NO: 611435 - RNA, 19 nt, Homo sapiens
  misc_RNA (1)...(19): siRNA sense strand
ccacaacgcucuccaugcu

SEQ ID NO: 611436 - RNA, 19 nt, Homo sapiens
  misc_RNA (1)...(19): siRNA sense strand
gauacaguacagucaguua

SEQ ID NO: 611437 - RNA, 19 nt, Homo sapiens
  misc_RNA (1)...(19): siRNA sense strand
ggagguucauccauguuug

SEQ ID NO: 611438 - RNA, 19 nt, Homo sapiens
  misc_RNA (1)...(19): siRNA sense strand
acaacgcucuccaugcuuu

SEQ ID NO: 611439 - RNA, 19 nt, Homo sapiens
  misc_RNA (1)...(19): siRNA sense strand
gaucccgaaucaauuauag

SEQ ID NO: 611440 - RNA, 19 nt, Homo sapiens
  misc_RNA (1)...(19): siRNA sense strand
cagaagcagugccaugaau

SEQ ID NO: 611441 - RNA, 19 nt, Homo sapiens
  misc_RNA (1)...(19): siRNA sense strand
cgauguagcacgggauuua

SEQ ID NO: 611442 - RNA, 19 nt, Homo sapiens
  misc_RNA (1)...(19): siRNA sense strand
cgagguggaggacauauuu

SEQ ID NO: 611443 - RNA, 19 nt, Homo sapiens
  misc_RNA (1)...(19): siRNA sense strand
gaaaaguacuugcgagaag

SEQ ID NO: 611444 - RNA, 19 nt, Homo sapiens
  misc_RNA (1)...(19): siRNA sense strand
ugacaugauuaaucgauuc

SEQ ID NO: 611445 - RNA, 19 nt, Homo sapiens
  misc_RNA (1)...(19): siRNA sense strand
ggcacaggcuucaguuuua

SEQ ID NO: 611446 - RNA, 19 nt, Homo sapiens
  misc_RNA (1)...(19): siRNA sense strand
ggaagcagaacugguuuga

SEQ ID NO: 611447 - RNA, 19 nt, Homo sapiens
  misc_RNA (1)...(19): siRNA sense strand
gcgagaagauacaguacag

SEQ ID NO: 611448 - RNA, 19 nt, Homo sapiens
  misc_RNA (1)...(19): siRNA sense strand
ggauuuauacagugcacua

SEQ ID NO: 611449 - RNA, 19 nt, Homo sapiens
  misc_RNA (1)...(19): siRNA sense strand
gaaauaugugccagccauu

SEQ ID NO: 611450 - RNA, 19 nt, Homo sapiens
  misc_RNA (1)...(19): siRNA sense strand
ccuuugaaauacuggauaa

SEQ ID NO: 611451 - RNA, 19 nt, Homo sapiens
  misc_RNA (1)...(19): siRNA sense strand
ucaggaagcagaacugguu

SEQ ID NO: 611452 - RNA, 19 nt, Homo sapiens
  misc_RNA (1)...(19): siRNA sense strand
guucuucccagcucagaua

SEQ ID NO: 611453 - RNA, 19 nt, Homo sapiens
  misc_RNA (1)...(19): siRNA sense strand
ggagucuuaugcagggaaa

SEQ ID NO: 611454 - RNA, 19 nt, Homo sapiens
  misc_RNA (1)...(19): siRNA sense strand
acagugcacuaauucaguu

SEQ ID NO: 611455 - RNA, 19 nt, Homo sapiens
  misc_RNA (1)...(19): siRNA sense strand
ucuccaugcuuuacauuga

SEQ ID NO: 611456 - RNA, 19 nt, Homo sapiens
  misc_RNA (1)...(19): siRNA sense strand
gaaauacuggauaaacuac

SEQ ID NO: 611457 - RNA, 19 nt, Homo sapiens
  misc_RNA (1)...(19): siRNA sense strand
cuuuaaaucugacagugaa

SEQ ID NO: 611458 - RNA, 19 nt, Homo sapiens
  misc_RNA (1)...(19): siRNA sense strand
ggcauggacuggaaaggau

SEQ ID NO: 611459 - RNA, 19 nt, Homo sapiens
  misc_RNA (1)...(19): siRNA sense strand
ucccaggacugaacaugaa

SEQ ID NO: 611460 - RNA, 19 nt, Homo sapiens
  misc_RNA (1)...(19): siRNA sense strand
auaagguucugaucuacaa

SEQ ID NO: 611461 - RNA, 19 nt, Homo sapiens
  misc_RNA (1)...(19): siRNA sense strand
uugcacaccucauccauuc

SEQ ID NO: 611462 - RNA, 19 nt, Homo sapiens
  misc_RNA (1)...(19): siRNA sense strand
gaugauacccacggauaug

SEQ ID NO: 611463 - RNA, 19 nt, Homo sapiens
  misc_RNA (1)...(19): siRNA sense strand
uggaaaggaucccaggaau

SEQ ID NO: 611464 - RNA, 19 nt, Homo sapiens
  misc_RNA (1)...(19): siRNA sense strand
gaggaucagcuuuacuaug

SEQ ID NO: 611465 - RNA, 19 nt, Homo sapiens
  misc_RNA (1)...(19): siRNA sense strand
uguggaaggugauuguuuc

SEQ ID NO: 611466 - RNA, 19 nt, Homo sapiens
  misc_RNA (1)...(19): siRNA sense strand
aaauuggcuuguuggauga

SEQ ID NO: 611467 - RNA, 19 nt, Homo sapiens
  misc_RNA (1)...(19): siRNA sense strand
cauugaagcugggaagauc

SEQ ID NO: 611468 - RNA, 19 nt, Homo sapiens
  misc_RNA (1)...(19): siRNA sense strand
cggaauugcuauuggagau

SEQ ID NO: 611469 - RNA, 19 nt, Homo sapiens
  misc_RNA (1)...(19): siRNA sense strand
gggagguucauccauguuu

SEQ ID NO: 611470 - RNA, 19 nt, Homo sapiens
  misc_RNA (1)...(19): siRNA sense strand
gccagaagaugccccagua

SEQ ID NO: 611471 - RNA, 19 nt, Homo sapiens
  misc_RNA (1)...(19): siRNA sense strand
aacaugaccuugcgugaca

SEQ ID NO: 611472 - RNA, 19 nt, Homo sapiens
  misc_RNA (1)...(19): siRNA sense strand
augguuaacugaaaucaug

SEQ ID NO: 611473 - RNA, 19 nt, Homo sapiens
  misc_RNA (1)...(19): siRNA sense strand
uauuggagauggauauucu

SEQ ID NO: 611474 - RNA, 19 nt, Homo sapiens
  misc_RNA (1)...(19): siRNA sense strand
aaaggaagagaauugaguu

SEQ ID NO: 611475 - RNA, 19 nt, Homo sapiens
  misc_RNA (1)...(19): siRNA sense strand
ucugagagcuuuugacaug

SEQ ID NO: 611476 - RNA, 19 nt, Homo sapiens
  misc_RNA (1)...(19): siRNA sense strand
ccagaauguuacaggaugu

SEQ ID NO: 611477 - RNA, 19 nt, Homo sapiens
  misc_RNA (1)...(19): siRNA sense strand
gguuugaggccuuugaaau

SEQ ID NO: 611478 - RNA, 19 nt, Homo sapiens
  misc_RNA (1)...(19): siRNA sense strand
agacucaggacagccauua

SEQ ID NO: 611479 - RNA, 19 nt, Homo sapiens
  misc_RNA (1)...(19): siRNA sense strand
uuccagauauuuccugaau

SEQ ID NO: 611480 - RNA, 19 nt, Homo sapiens
  misc_RNA (1)...(19): siRNA sense strand
gaagcugggaagauccaaa

SEQ ID NO: 611481 - RNA, 19 nt, Homo sapiens
  misc_RNA (1)...(19): siRNA sense strand
aagccaugguuaacugaaa

SEQ ID NO: 611482 - RNA, 19 nt, Homo sapiens
  misc_RNA (1)...(19): siRNA sense strand
acagcaaccucuucuucug

SEQ ID NO: 611483 - RNA, 19 nt, Homo sapiens
  misc_RNA (1)...(19): siRNA sense strand
gaucccaggaauacaagaa

SEQ ID NO: 611484 - RNA, 19 nt, Homo sapiens
  misc_RNA (1)...(19): siRNA sense strand
gggcauggacuggaaagga

SEQ ID NO: 611485 - RNA, 19 nt, Homo sapiens
  misc_RNA (1)...(19): siRNA sense strand
ugaacggaauugcuauugg

SEQ ID NO: 611486 - RNA, 19 nt, Homo sapiens
  misc_RNA (1)...(19): siRNA sense strand
gaucaaccugaacggaauu

SEQ ID NO: 611487 - RNA, 19 nt, Homo sapiens
  misc_RNA (1)...(19): siRNA sense strand
guguuuccaugccaccuaa

SEQ ID NO: 611488 - RNA, 19 nt, Homo sapiens
  misc_RNA (1)...(19): siRNA sense strand
ucagauacagccagaagau

SEQ ID NO: 611489 - RNA, 19 nt, Homo sapiens
  misc_RNA (1)...(19): siRNA sense strand
cuagauggcgacuuaacaa

SEQ ID NO: 611490 - RNA, 19 nt, Homo sapiens
  misc_RNA (1)...(19): siRNA sense strand
caacgcucuccaugcuuua

SEQ ID NO: 611491 - RNA, 19 nt, Homo sapiens
  misc_RNA (1)...(19): siRNA sense strand
ggaucagcuuuacuaugug

SEQ ID NO: 611492 - RNA, 19 nt, Homo sapiens
  misc_RNA (1)...(19): siRNA sense strand
gaauacaagaaggcagaaa

SEQ ID NO: 611493 - RNA, 19 nt, Homo sapiens
  misc_RNA (1)...(19): siRNA sense strand
gcucagauacagccagaag

SEQ ID NO: 611494 - RNA, 19 nt, Homo sapiens
  misc_RNA (1)...(19): siRNA sense strand
ugaugggcauggacuggaa

SEQ ID NO: 611495 - RNA, 19 nt, Homo sapiens
  misc_RNA (1)...(19): siRNA sense strand
cauuauuucucaccccuua

SEQ ID NO: 611496 - RNA, 19 nt, Homo sapiens
  misc_RNA (1)...(19): siRNA sense strand
gaaugcauagaacacauca

SEQ ID NO: 611497 - RNA, 19 nt, Homo sapiens
  misc_RNA (1)...(19): siRNA sense strand
gaagcagugccaugaaugc

SEQ ID NO: 611498 - RNA, 19 nt, Homo sapiens
  misc_RNA (1)...(19): siRNA sense strand
agaucaaccugaacggaau

SEQ ID NO: 611499 - RNA, 19 nt, Homo sapiens
  misc_RNA (1)...(19): siRNA sense strand
cugaugauacccacggaua

SEQ ID NO: 611500 - RNA, 19 nt, Homo sapiens
  misc_RNA (1)...(19): siRNA sense strand
ucacaaguaacaugaccuu

SEQ ID NO: 611501 - RNA, 19 nt, Homo sapiens
  misc_RNA (1)...(19): siRNA sense strand
ugaguuuggucggcccuuu

SEQ ID NO: 611502 - RNA, 19 nt, Homo sapiens
  misc_RNA (1)...(19): siRNA sense strand
uagaacacaucaggaagca

SEQ ID NO: 611503 - RNA, 19 nt, Homo sapiens
  misc_RNA (1)...(19): siRNA sense strand
caaugaggacgauguagca

SEQ ID NO: 611504 - RNA, 19 nt, Homo sapiens
  misc_RNA (1)...(19): siRNA sense strand
auacaguacagucaguuaa

SEQ ID NO: 611505 - RNA, 19 nt, Homo sapiens
  misc_RNA (1)...(19): siRNA sense strand
caggacagccauuauuucu

SEQ ID NO: 611506 - RNA, 19 nt, Homo sapiens
  misc_RNA (1)...(19): siRNA sense strand
guacuugcgagaagauaca

SEQ ID NO: 611507 - RNA, 19 nt, Homo sapiens
  misc_RNA (1)...(19): siRNA sense strand
gcaagucgcuccugucauu

SEQ ID NO: 611508 - RNA, 19 nt, Homo sapiens
  misc_RNA (1)...(19): siRNA sense strand
gcagcaagccgacaucaua

SEQ ID NO: 611509 - RNA, 19 nt, Homo sapiens
  misc_RNA (1)...(19): siRNA sense strand
ggacagucgugaucuuuga

SEQ ID NO: 611510 - RNA, 19 nt, Homo sapiens
  misc_RNA (1)...(19): siRNA sense strand
gaagaugugugaagaaucg

SEQ ID NO: 611511 - RNA, 19 nt, Homo sapiens
  misc_RNA (1)...(19): siRNA sense strand
gagggaaggugcugagcua

SEQ ID NO: 611512 - RNA, 19 nt, Homo sapiens
  misc_RNA (1)...(19): siRNA sense strand
gagaagaugugugaagaau

SEQ ID NO: 611513 - RNA, 19 nt, Homo sapiens
  misc_RNA (1)...(19): siRNA sense strand
ccagggagcuacaucuuug

SEQ ID NO: 611514 - RNA, 19 nt, Homo sapiens
  misc_RNA (1)...(19): siRNA sense strand
gaccaucagugcuuacuau

SEQ ID NO: 611515 - RNA, 19 nt, Homo sapiens
  misc_RNA (1)...(19): siRNA sense strand
gaauggccguggugugauu

SEQ ID NO: 611516 - RNA, 19 nt, Homo sapiens
  misc_RNA (1)...(19): siRNA sense strand
gcagagcacacaacauuga

SEQ ID NO: 611517 - RNA, 19 nt, Homo sapiens
  misc_RNA (1)...(19): siRNA sense strand
ucacacaggucaucaacga

SEQ ID NO: 611518 - RNA, 19 nt, Homo sapiens
  misc_RNA (1)...(19): siRNA sense strand
gagaguaaccaucuacaga

SEQ ID NO: 611519 - RNA, 19 nt, Homo sapiens
  misc_RNA (1)...(19): siRNA sense strand
ugaagaaacaagagaguaa

SEQ ID NO: 611520 - RNA, 19 nt, Homo sapiens
  misc_RNA (1)...(19): siRNA sense strand
caggguguaugacaacuuu

SEQ ID NO: 611521 - RNA, 19 nt, Homo sapiens
  misc_RNA (1)...(19): siRNA sense strand
gcacagguucagcauguuu

SEQ ID NO: 611522 - RNA, 19 nt, Homo sapiens
  misc_RNA (1)...(19): siRNA sense strand
ggacgaggcuguggcuauc

SEQ ID NO: 611523 - RNA, 19 nt, Homo sapiens
  misc_RNA (1)...(19): siRNA sense strand
ugaagaaucggcauccuuu

SEQ ID NO: 611524 - RNA, 19 nt, Homo sapiens
  misc_RNA (1)...(19): siRNA sense strand
uugcaaagcugaagaugau

SEQ ID NO: 611525 - RNA, 19 nt, Homo sapiens
  misc_RNA (1)...(19): siRNA sense strand
ggaaggugcugagcuacug

SEQ ID NO: 611526 - RNA, 19 nt, Homo sapiens
  misc_RNA (1)...(19): siRNA sense strand
ccgcagagcacacaacauu

SEQ ID NO: 611527 - RNA, 19 nt, Homo sapiens
  misc_RNA (1)...(19): siRNA sense strand
gcccaguucuuccguguug

SEQ ID NO: 611528 - RNA, 19 nt, Homo sapiens
  misc_RNA (1)...(19): siRNA sense strand
ggaaggcucugggcaacau

SEQ ID NO: 611529 - RNA, 19 nt, Homo sapiens
  misc_RNA (1)...(19): siRNA sense strand
caucagugcuuacuaugca

SEQ ID NO: 611530 - RNA, 19 nt, Homo sapiens
  misc_RNA (1)...(19): siRNA sense strand
gggccaagcucuucauggu

SEQ ID NO: 611531 - RNA, 19 nt, Homo sapiens
  misc_RNA (1)...(19): siRNA sense strand
gggcuggacuucucagaca

SEQ ID NO: 611532 - RNA, 19 nt, Homo sapiens
  misc_RNA (1)...(19): siRNA sense strand
acacggacaucccaaagau

SEQ ID NO: 611533 - RNA, 19 nt, Homo sapiens
  misc_RNA (1)...(19): siRNA sense strand
cuacaucuuugagcuguuu

SEQ ID NO: 611534 - RNA, 19 nt, Homo sapiens
  misc_RNA (1)...(19): siRNA sense strand
ggacaucccaaagauuauu

SEQ ID NO: 611535 - RNA, 19 nt, Homo sapiens
  misc_RNA (1)...(19): siRNA sense strand
gaccacagguucgccuuug

SEQ ID NO: 611536 - RNA, 19 nt, Homo sapiens
  misc_RNA (1)...(19): siRNA sense strand
gggaagacccagagcaaga

SEQ ID NO: 611537 - RNA, 19 nt, Homo sapiens
  misc_RNA (1)...(19): siRNA sense strand
gcaagccgacaucauauuc

SEQ ID NO: 611538 - RNA, 19 nt, Homo sapiens
  misc_RNA (1)...(19): siRNA sense strand
ggacagggccaagcucuuc

SEQ ID NO: 611539 - RNA, 19 nt, Homo sapiens
  misc_RNA (1)...(19): siRNA sense strand
ccuaugggcuccugaucuu

SEQ ID NO: 611540 - RNA, 19 nt, Homo sapiens
  misc_RNA (1)...(19): siRNA sense strand
gacauuauccagauugugu

SEQ ID NO: 611541 - RNA, 19 nt, Homo sapiens
  misc_RNA (1)...(19): siRNA sense strand
ggacuacggagcugucuuc

SEQ ID NO: 611542 - RNA, 19 nt, Homo sapiens
  misc_RNA (1)...(19): siRNA sense strand
ggagaagaugugugaagaa

SEQ ID NO: 611543 - RNA, 19 nt, Homo sapiens
  misc_RNA (1)...(19): siRNA sense strand
gagcugucuuccucuguga

SEQ ID NO: 611544 - RNA, 19 nt, Homo sapiens
  misc_RNA (1)...(19): siRNA sense strand
acggacaucccaaagauua

SEQ ID NO: 611545 - RNA, 19 nt, Homo sapiens
  misc_RNA (1)...(19): siRNA sense strand
ggacuucucagacacgaau

SEQ ID NO: 611546 - RNA, 19 nt, Homo sapiens
  misc_RNA (1)...(19): siRNA sense strand
ggagaacccacacaucauc

SEQ ID NO: 611547 - RNA, 19 nt, Homo sapiens
  misc_RNA (1)...(19): siRNA sense strand
ugaauggugugaccguaga

SEQ ID NO: 611548 - RNA, 19 nt, Homo sapiens
  misc_RNA (1)...(19): siRNA sense strand
gaucucguccuuccuuaga

SEQ ID NO: 611549 - RNA, 19 nt, Homo sapiens
  misc_RNA (1)...(19): siRNA sense strand
gaagcuggcggacauuauc

SEQ ID NO: 611550 - RNA, 19 nt, Homo sapiens
  misc_RNA (1)...(19): siRNA sense strand
acaagagaguaaccaucua

SEQ ID NO: 611551 - RNA, 19 nt, Homo sapiens
  misc_RNA (1)...(19): siRNA sense strand
gcccagaucacguuucaga

SEQ ID NO: 611552 - RNA, 19 nt, Homo sapiens
  misc_RNA (1)...(19): siRNA sense strand
gaccguagacuucccuuuc

SEQ ID NO: 611553 - RNA, 19 nt, Homo sapiens
  misc_RNA (1)...(19): siRNA sense strand
caagaucucguccuuccuu

SEQ ID NO: 611554 - RNA, 19 nt, Homo sapiens
  misc_RNA (1)...(19): siRNA sense strand
acaaggugcuggcuguguu

SEQ ID NO: 611555 - RNA, 19 nt, Homo sapiens
  misc_RNA (1)...(19): siRNA sense strand
ccaaggcuucuaccaguuu

SEQ ID NO: 611556 - RNA, 19 nt, Homo sapiens
  misc_RNA (1)...(19): siRNA sense strand
ccaagauaguccugaaugg

SEQ ID NO: 611557 - RNA, 19 nt, Homo sapiens
  misc_RNA (1)...(19): siRNA sense strand
gaaacaagagaguaaccau

SEQ ID NO: 611558 - RNA, 19 nt, Homo sapiens
  misc_RNA (1)...(19): siRNA sense strand
gaagaaucggcauccuuug

SEQ ID NO: 611559 - RNA, 19 nt, Homo sapiens
  misc_RNA (1)...(19): siRNA sense strand
uggagaagaugugugaaga

SEQ ID NO: 611560 - RNA, 19 nt, Homo sapiens
  misc_RNA (1)...(19): siRNA sense strand
ccaagguccuggaaugucu

SEQ ID NO: 611561 - RNA, 19 nt, Homo sapiens
  misc_RNA (1)...(19): siRNA sense strand
uauucaugccguacaauua

SEQ ID NO: 611562 - RNA, 19 nt, Homo sapiens
  misc_RNA (1)...(19): siRNA sense strand
ccgagaccaucagugcuua

SEQ ID NO: 611563 - RNA, 19 nt, Homo sapiens
  misc_RNA (1)...(19): siRNA sense strand
gagcuccgcguuugacaga

SEQ ID NO: 611564 - RNA, 19 nt, Homo sapiens
  misc_RNA (1)...(19): siRNA sense strand
acauggagcuggaagacau

SEQ ID NO: 611565 - RNA, 19 nt, Homo sapiens
  misc_RNA (1)...(19): siRNA sense strand
cugcacagguucagcaugu

SEQ ID NO: 611566 - RNA, 19 nt, Homo sapiens
  misc_RNA (1)...(19): siRNA sense strand
acaaaugccaacaggagua

SEQ ID NO: 611567 - RNA, 19 nt, Homo sapiens
  misc_RNA (1)...(19): siRNA sense strand
caguugagcuccgcguuug

SEQ ID NO: 611568 - RNA, 19 nt, Homo sapiens
  misc_RNA (1)...(19): siRNA sense strand
ggccaucgaugcuguugag

SEQ ID NO: 611569 - RNA, 19 nt, Homo sapiens
  misc_RNA (1)...(19): siRNA sense strand
agagcaagaucucguccuu

SEQ ID NO: 611570 - RNA, 19 nt, Homo sapiens
  misc_RNA (1)...(19): siRNA sense strand
gccuguguguggaguauga

SEQ ID NO: 611571 - RNA, 19 nt, Homo sapiens
  misc_RNA (1)...(19): siRNA sense strand
gaggagggaggaagaagau

SEQ ID NO: 611572 - RNA, 19 nt, Homo sapiens
  misc_RNA (1)...(19): siRNA sense strand
acacaacauugaccugaag

SEQ ID NO: 611573 - RNA, 19 nt, Homo sapiens
  misc_RNA (1)...(19): siRNA sense strand
caaggcuucuaccaguuug

SEQ ID NO: 611574 - RNA, 19 nt, Homo sapiens
  misc_RNA (1)...(19): siRNA sense strand
cuacaaggguuccgaugac

SEQ ID NO: 611575 - RNA, 19 nt, Homo sapiens
  misc_RNA (1)...(19): siRNA sense strand
caacuuuggccaugucauc

SEQ ID NO: 611576 - RNA, 19 nt, Homo sapiens
  misc_RNA (1)...(19): siRNA sense strand
gcgcugaagccgcuguuug

SEQ ID NO: 611577 - RNA, 19 nt, Homo sapiens
  misc_RNA (1)...(19): siRNA sense strand
ccuauaaggugcacaucca

SEQ ID NO: 611578 - RNA, 19 nt, Homo sapiens
  misc_RNA (1)...(19): siRNA sense strand
gaacauggagcuggaagac

SEQ ID NO: 611579 - RNA, 19 nt, Homo sapiens
  misc_RNA (1)...(19): siRNA sense strand
gugaagaaacaagagagua

SEQ ID NO: 611580 - RNA, 19 nt, Homo sapiens
  misc_RNA (1)...(19): siRNA sense strand
ggagagcccuacggguaca

SEQ ID NO: 611581 - RNA, 19 nt, Homo sapiens
  misc_RNA (1)...(19): siRNA sense strand
gggccuuacaguccuauaa

SEQ ID NO: 611582 - RNA, 19 nt, Homo sapiens
  misc_RNA (1)...(19): siRNA sense strand
cagaagcuggcggacauua

SEQ ID NO: 611583 - RNA, 19 nt, Homo sapiens
  misc_RNA (1)...(19): siRNA sense strand
gccagggagcuacaucuuu

SEQ ID NO: 611584 - RNA, 19 nt, Homo sapiens
  misc_RNA (1)...(19): siRNA sense strand
ucauauucaugccguacaa

SEQ ID NO: 611585 - RNA, 19 nt, Homo sapiens
  misc_RNA (1)...(19): siRNA sense strand
ggaagacccagagcaagau

SEQ ID NO: 611586 - RNA, 19 nt, Homo sapiens
  misc_RNA (1)...(19): siRNA sense strand
gaucgggccuugucauccu

SEQ ID NO: 611587 - RNA, 19 nt, Homo sapiens
  misc_RNA (1)...(19): siRNA sense strand
caaggguuccgaugacuuc

SEQ ID NO: 611588 - RNA, 19 nt, Homo sapiens
  misc_RNA (1)...(19): siRNA sense strand
agaugcaguuccuggauga

SEQ ID NO: 611589 - RNA, 19 nt, Homo sapiens
  misc_RNA (1)...(19): siRNA sense strand
gaucuucuucccuuccuau

SEQ ID NO: 611590 - RNA, 19 nt, Homo sapiens
  misc_RNA (1)...(19): siRNA sense strand
gcaccacugcagccagaaa

SEQ ID NO: 611591 - RNA, 19 nt, Homo sapiens
  misc_RNA (1)...(19): siRNA sense strand
gugcuggaguguucaccaa

SEQ ID NO: 611592 - RNA, 19 nt, Homo sapiens
  misc_RNA (1)...(19): siRNA sense strand
uggaagacauugcaaagcu

SEQ ID NO: 611593 - RNA, 19 nt, Homo sapiens
  misc_RNA (1)...(19): siRNA sense strand
cacacaacauugaccugaa

SEQ ID NO: 611594 - RNA, 19 nt, Homo sapiens
  misc_RNA (1)...(19): siRNA sense strand
ggagaagagccuggaguuc

SEQ ID NO: 611595 - RNA, 19 nt, Homo sapiens
  misc_RNA (1)...(19): siRNA sense strand
aagaucucguccuuccuua

SEQ ID NO: 611596 - RNA, 19 nt, Homo sapiens
  misc_RNA (1)...(19): siRNA sense strand
cagcaagccgacaucauau

SEQ ID NO: 611597 - RNA, 19 nt, Homo sapiens
  misc_RNA (1)...(19): siRNA sense strand
gacaucccaaagauuauuu

SEQ ID NO: 611598 - RNA, 19 nt, Homo sapiens
  misc_RNA (1)...(19): siRNA sense strand
gaagauggaggcgcugaag

SEQ ID NO: 611599 - RNA, 19 nt, Homo sapiens
  misc_RNA (1)...(19): siRNA sense strand
uggcggacauuauccagau

SEQ ID NO: 611600 - RNA, 19 nt, Homo sapiens
  misc_RNA (1)...(19): siRNA sense strand
aagaaucggcauccuuuga

SEQ ID NO: 611601 - RNA, 19 nt, Homo sapiens
  misc_RNA (1)...(19): siRNA sense strand
aagcccagaucacguuuca

SEQ ID NO: 611602 - RNA, 19 nt, Homo sapiens
  misc_RNA (1)...(19): siRNA sense strand
ccaguugagcuccgcguuu

SEQ ID NO: 611603 - RNA, 19 nt, Homo sapiens
  misc_RNA (1)...(19): siRNA sense strand
caagagaguaaccaucuac

SEQ ID NO: 611604 - RNA, 19 nt, Homo sapiens
  misc_RNA (1)...(19): siRNA sense strand
ccuauccugucauggagaa

SEQ ID NO: 611605 - RNA, 19 nt, Homo sapiens
  misc_RNA (1)...(19): siRNA sense strand
gcucacaacguggagaaga

SEQ ID NO: 611606 - RNA, 19 nt, Homo sapiens
  misc_RNA (1)...(19): siRNA sense strand
gcuccugucauuucuacaa

SEQ ID NO: 611607 - RNA, 19 nt, Homo sapiens
  misc_RNA (1)...(19): siRNA sense strand
gcaagucgcuccugucauu

SEQ ID NO: 611608 - RNA, 19 nt, Homo sapiens
  misc_RNA (1)...(19): siRNA sense strand
gcagcaagccgacaucaua

SEQ ID NO: 611609 - RNA, 19 nt, Homo sapiens
  misc_RNA (1)...(19): siRNA sense strand
ggacagucgugaucuuuga

SEQ ID NO: 611610 - RNA, 19 nt, Homo sapiens
  misc_RNA (1)...(19): siRNA sense strand
gaagaugugugaagaaucg

SEQ ID NO: 611611 - RNA, 19 nt, Homo sapiens
  misc_RNA (1)...(19): siRNA sense strand
gagggaaggugcugagcua

SEQ ID NO: 611612 - RNA, 19 nt, Homo sapiens
  misc_RNA (1)...(19): siRNA sense strand
gagaagaugugugaagaau

SEQ ID NO: 611613 - RNA, 19 nt, Homo sapiens
  misc_RNA (1)...(19): siRNA sense strand
ccagggagcuacaucuuug

SEQ ID NO: 611614 - RNA, 19 nt, Homo sapiens
  misc_RNA (1)...(19): siRNA sense strand
gaccaucagugcuuacuau

SEQ ID NO: 611615 - RNA, 19 nt, Homo sapiens
  misc_RNA (1)...(19): siRNA sense strand
gaauggccguggugugauu

SEQ ID NO: 611616 - RNA, 19 nt, Homo sapiens
  misc_RNA (1)...(19): siRNA sense strand
gcagagcacacaacauuga

SEQ ID NO: 611617 - RNA, 19 nt, Homo sapiens
  misc_RNA (1)...(19): siRNA sense strand
ucacacaggucaucaacga

SEQ ID NO: 611618 - RNA, 19 nt, Homo sapiens
  misc_RNA (1)...(19): siRNA sense strand
gagaguaaccaucuacaga

SEQ ID NO: 611619 - RNA, 19 nt, Homo sapiens
  misc_RNA (1)...(19): siRNA sense strand
ugaagaaacaagagaguaa

SEQ ID NO: 611620 - RNA, 19 nt, Homo sapiens
  misc_RNA (1)...(19): siRNA sense strand
caggguguaugacaacuuu

SEQ ID NO: 611621 - RNA, 19 nt, Homo sapiens
  misc_RNA (1)...(19): siRNA sense strand
gcacagguucagcauguuu

SEQ ID NO: 611622 - RNA, 19 nt, Homo sapiens
  misc_RNA (1)...(19): siRNA sense strand
ggacgaggcuguggcuauc

SEQ ID NO: 611623 - RNA, 19 nt, Homo sapiens
  misc_RNA (1)...(19): siRNA sense strand
ugaagaaucggcauccuuu

SEQ ID NO: 611624 - RNA, 19 nt, Homo sapiens
  misc_RNA (1)...(19): siRNA sense strand
uugcaaagcugaagaugau

SEQ ID NO: 611625 - RNA, 19 nt, Homo sapiens
  misc_RNA (1)...(19): siRNA sense strand
ggaaggugcugagcuacug

SEQ ID NO: 611626 - RNA, 19 nt, Homo sapiens
  misc_RNA (1)...(19): siRNA sense strand
ccgcagagcacacaacauu

SEQ ID NO: 611627 - RNA, 19 nt, Homo sapiens
  misc_RNA (1)...(19): siRNA sense strand
gcccaguucuuccguguug

SEQ ID NO: 611628 - RNA, 19 nt, Homo sapiens
  misc_RNA (1)...(19): siRNA sense strand
ggaaggcucugggcaacau

SEQ ID NO: 611629 - RNA, 19 nt, Homo sapiens
  misc_RNA (1)...(19): siRNA sense strand
caucagugcuuacuaugca

SEQ ID NO: 611630 - RNA, 19 nt, Homo sapiens
  misc_RNA (1)...(19): siRNA sense strand
gggccaagcucuucauggu

SEQ ID NO: 611631 - RNA, 19 nt, Homo sapiens
  misc_RNA (1)...(19): siRNA sense strand
gggcuggacuucucagaca

SEQ ID NO: 611632 - RNA, 19 nt, Homo sapiens
  misc_RNA (1)...(19): siRNA sense strand
acacggacaucccaaagau

SEQ ID NO: 611633 - RNA, 19 nt, Homo sapiens
  misc_RNA (1)...(19): siRNA sense strand
cuacaucuuugagcuguuu

SEQ ID NO: 611634 - RNA, 19 nt, Homo sapiens
  misc_RNA (1)...(19): siRNA sense strand
ggacaucccaaagauuauu

SEQ ID NO: 611635 - RNA, 19 nt, Homo sapiens
  misc_RNA (1)...(19): siRNA sense strand
gaccacagguucgccuuug

SEQ ID NO: 611636 - RNA, 19 nt, Homo sapiens
  misc_RNA (1)...(19): siRNA sense strand
gggaagacccagagcaaga

SEQ ID NO: 611637 - RNA, 19 nt, Homo sapiens
  misc_RNA (1)...(19): siRNA sense strand
gcaagccgacaucauauuc

SEQ ID NO: 611638 - RNA, 19 nt, Homo sapiens
  misc_RNA (1)...(19): siRNA sense strand
ggacagggccaagcucuuc

SEQ ID NO: 611639 - RNA, 19 nt, Homo sapiens
  misc_RNA (1)...(19): siRNA sense strand
ccuaugggcuccugaucuu

SEQ ID NO: 611640 - RNA, 19 nt, Homo sapiens
  misc_RNA (1)...(19): siRNA sense strand
gacauuauccagauugugu

SEQ ID NO: 611641 - RNA, 19 nt, Homo sapiens
  misc_RNA (1)...(19): siRNA sense strand
ggacuacggagcugucuuc

SEQ ID NO: 611642 - RNA, 19 nt, Homo sapiens
  misc_RNA (1)...(19): siRNA sense strand
ggagaagaugugugaagaa

SEQ ID NO: 611643 - RNA, 19 nt, Homo sapiens
  misc_RNA (1)...(19): siRNA sense strand
gagcugucuuccucuguga

SEQ ID NO: 611644 - RNA, 19 nt, Homo sapiens
  misc_RNA (1)...(19): siRNA sense strand
acggacaucccaaagauua

SEQ ID NO: 611645 - RNA, 19 nt, Homo sapiens
  misc_RNA (1)...(19): siRNA sense strand
ggacuucucagacacgaau

SEQ ID NO: 611646 - RNA, 19 nt, Homo sapiens
  misc_RNA (1)...(19): siRNA sense strand
ggagaacccacacaucauc

SEQ ID NO: 611647 - RNA, 19 nt, Homo sapiens
  misc_RNA (1)...(19): siRNA sense strand
ugaauggugugaccguaga

SEQ ID NO: 611648 - RNA, 19 nt, Homo sapiens
  misc_RNA (1)...(19): siRNA sense strand
gaucucguccuuccuuaga

SEQ ID NO: 611649 - RNA, 19 nt, Homo sapiens
  misc_RNA (1)...(19): siRNA sense strand
gaagcuggcggacauuauc

SEQ ID NO: 611650 - RNA, 19 nt, Homo sapiens
  misc_RNA (1)...(19): siRNA sense strand
acaagagaguaaccaucua

SEQ ID NO: 611651 - RNA, 19 nt, Homo sapiens
  misc_RNA (1)...(19): siRNA sense strand
gcccagaucacguuucaga

SEQ ID NO: 611652 - RNA, 19 nt, Homo sapiens
  misc_RNA (1)...(19): siRNA sense strand
gaccguagacuucccuuuc

SEQ ID NO: 611653 - RNA, 19 nt, Homo sapiens
  misc_RNA (1)...(19): siRNA sense strand
caagaucucguccuuccuu

SEQ ID NO: 611654 - RNA, 19 nt, Homo sapiens
  misc_RNA (1)...(19): siRNA sense strand
acaaggugcuggcuguguu

SEQ ID NO: 611655 - RNA, 19 nt, Homo sapiens
  misc_RNA (1)...(19): siRNA sense strand
ccaaggcuucuaccaguuu

SEQ ID NO: 611656 - RNA, 19 nt, Homo sapiens
  misc_RNA (1)...(19): siRNA sense strand
ccaagauaguccugaaugg

SEQ ID NO: 611657 - RNA, 19 nt, Homo sapiens
  misc_RNA (1)...(19): siRNA sense strand
gaaacaagagaguaaccau

SEQ ID NO: 611658 - RNA, 19 nt, Homo sapiens
  misc_RNA (1)...(19): siRNA sense strand
gaagaaucggcauccuuug

SEQ ID NO: 611659 - RNA, 19 nt, Homo sapiens
  misc_RNA (1)...(19): siRNA sense strand
uggagaagaugugugaaga

SEQ ID NO: 611660 - RNA, 19 nt, Homo sapiens
  misc_RNA (1)...(19): siRNA sense strand
ccaagguccuggaaugucu

SEQ ID NO: 611661 - RNA, 19 nt, Homo sapiens
  misc_RNA (1)...(19): siRNA sense strand
uauucaugccguacaauua

SEQ ID NO: 611662 - RNA, 19 nt, Homo sapiens
  misc_RNA (1)...(19): siRNA sense strand
ccgagaccaucagugcuua

SEQ ID NO: 611663 - RNA, 19 nt, Homo sapiens
  misc_RNA (1)...(19): siRNA sense strand
gagcuccgcguuugacaga

SEQ ID NO: 611664 - RNA, 19 nt, Homo sapiens
  misc_RNA (1)...(19): siRNA sense strand
acauggagcuggaagacau

SEQ ID NO: 611665 - RNA, 19 nt, Homo sapiens
  misc_RNA (1)...(19): siRNA sense strand
cugcacagguucagcaugu

SEQ ID NO: 611666 - RNA, 19 nt, Homo sapiens
  misc_RNA (1)...(19): siRNA sense strand
acaaaugccaacaggagua

SEQ ID NO: 611667 - RNA, 19 nt, Homo sapiens
  misc_RNA (1)...(19): siRNA sense strand
caguugagcuccgcguuug

SEQ ID NO: 611668 - RNA, 19 nt, Homo sapiens
  misc_RNA (1)...(19): siRNA sense strand
ggccaucgaugcuguugag

SEQ ID NO: 611669 - RNA, 19 nt, Homo sapiens
  misc_RNA (1)...(19): siRNA sense strand
agagcaagaucucguccuu

SEQ ID NO: 611670 - RNA, 19 nt, Homo sapiens
  misc_RNA (1)...(19): siRNA sense strand
gccuguguguggaguauga

SEQ ID NO: 611671 - RNA, 19 nt, Homo sapiens
  misc_RNA (1)...(19): siRNA sense strand
gaggagggaggaagaagau

SEQ ID NO: 611672 - RNA, 19 nt, Homo sapiens
  misc_RNA (1)...(19): siRNA sense strand
acacaacauugaccugaag

SEQ ID NO: 611673 - RNA, 19 nt, Homo sapiens
  misc_RNA (1)...(19): siRNA sense strand
caaggcuucuaccaguuug

SEQ ID NO: 611674 - RNA, 19 nt, Homo sapiens
  misc_RNA (1)...(19): siRNA sense strand
cuacaaggguuccgaugac

SEQ ID NO: 611675 - RNA, 19 nt, Homo sapiens
  misc_RNA (1)...(19): siRNA sense strand
caacuuuggccaugucauc

SEQ ID NO: 611676 - RNA, 19 nt, Homo sapiens
  misc_RNA (1)...(19): siRNA sense strand
gcgcugaagccgcuguuug

SEQ ID NO: 611677 - RNA, 19 nt, Homo sapiens
  misc_RNA (1)...(19): siRNA sense strand
ccuauaaggugcacaucca

SEQ ID NO: 611678 - RNA, 19 nt, Homo sapiens
  misc_RNA (1)...(19): siRNA sense strand
gaacauggagcuggaagac

SEQ ID NO: 611679 - RNA, 19 nt, Homo sapiens
  misc_RNA (1)...(19): siRNA sense strand
gugaagaaacaagagagua

SEQ ID NO: 611680 - RNA, 19 nt, Homo sapiens
  misc_RNA (1)...(19): siRNA sense strand
ggagagcccuacggguaca

SEQ ID NO: 611681 - RNA, 19 nt, Homo sapiens
  misc_RNA (1)...(19): siRNA sense strand
gggccuuacaguccuauaa

SEQ ID NO: 611682 - RNA, 19 nt, Homo sapiens
  misc_RNA (1)...(19): siRNA sense strand
cagaagcuggcggacauua

SEQ ID NO: 611683 - RNA, 19 nt, Homo sapiens
  misc_RNA (1)...(19): siRNA sense strand
gccagggagcuacaucuuu

SEQ ID NO: 611684 - RNA, 19 nt, Homo sapiens
  misc_RNA (1)...(19): siRNA sense strand
ucauauucaugccguacaa

SEQ ID NO: 611685 - RNA, 19 nt, Homo sapiens
  misc_RNA (1)...(19): siRNA sense strand
ggaagacccagagcaagau

SEQ ID NO: 611686 - RNA, 19 nt, Homo sapiens
  misc_RNA (1)...(19): siRNA sense strand
gaucgggccuugucauccu

SEQ ID NO: 611687 - RNA, 19 nt, Homo sapiens
  misc_RNA (1)...(19): siRNA sense strand
caaggguuccgaugacuuc

SEQ ID NO: 611688 - RNA, 19 nt, Homo sapiens
  misc_RNA (1)...(19): siRNA sense strand
agaugcaguuccuggauga

SEQ ID NO: 611689 - RNA, 19 nt, Homo sapiens
  misc_RNA (1)...(19): siRNA sense strand
gaucuucuucccuuccuau

SEQ ID NO: 611690 - RNA, 19 nt, Homo sapiens
  misc_RNA (1)...(19): siRNA sense strand
gcaccacugcagccagaaa

SEQ ID NO: 611691 - RNA, 19 nt, Homo sapiens
  misc_RNA (1)...(19): siRNA sense strand
gugcuggaguguucaccaa

SEQ ID NO: 611692 - RNA, 19 nt, Homo sapiens
  misc_RNA (1)...(19): siRNA sense strand
uggaagacauugcaaagcu

SEQ ID NO: 611693 - RNA, 19 nt, Homo sapiens
  misc_RNA (1)...(19): siRNA sense strand
cacacaacauugaccugaa

SEQ ID NO: 611694 - RNA, 19 nt, Homo sapiens
  misc_RNA (1)...(19): siRNA sense strand
ggagaagagccuggaguuc

SEQ ID NO: 611695 - RNA, 19 nt, Homo sapiens
  misc_RNA (1)...(19): siRNA sense strand
ggaagcagagcgucaugca

SEQ ID NO: 611696 - RNA, 19 nt, Homo sapiens
  misc_RNA (1)...(19): siRNA sense strand
aagaucucguccuuccuua

SEQ ID NO: 611697 - RNA, 19 nt, Homo sapiens
  misc_RNA (1)...(19): siRNA sense strand
cagcaagccgacaucauau

SEQ ID NO: 611698 - RNA, 19 nt, Homo sapiens
  misc_RNA (1)...(19): siRNA sense strand
gacaucccaaagauuauuu

SEQ ID NO: 611699 - RNA, 19 nt, Homo sapiens
  misc_RNA (1)...(19): siRNA sense strand
gaagauggaggcgcugaag

SEQ ID NO: 611700 - RNA, 19 nt, Homo sapiens
  misc_RNA (1)...(19): siRNA sense strand
uggcggacauuauccagau

SEQ ID NO: 611701 - RNA, 19 nt, Homo sapiens
  misc_RNA (1)...(19): siRNA sense strand
aagaaucggcauccuuuga

SEQ ID NO: 611702 - RNA, 19 nt, Homo sapiens
  misc_RNA (1)...(19): siRNA sense strand
aagcccagaucacguuuca

SEQ ID NO: 611703 - RNA, 19 nt, Homo sapiens
  misc_RNA (1)...(19): siRNA sense strand
ccaguugagcuccgcguuu

SEQ ID NO: 611704 - RNA, 19 nt, Homo sapiens
  misc_RNA (1)...(19): siRNA sense strand
gcuccugucauuucuacaa

SEQ ID NO: 611705 - RNA, 19 nt, Homo sapiens
  misc_RNA (1)...(19): siRNA sense strand
ccuauccugucauggagaa

SEQ ID NO: 611706 - RNA, 19 nt, Homo sapiens
  misc_RNA (1)...(19): siRNA sense strand
gcucacaacguggagaaga

SEQ ID NO: 611707 - RNA, 19 nt, Homo sapiens
  misc_RNA (1)...(19): siRNA sense strand
guacugcuguuucguauga

SEQ ID NO: 611708 - RNA, 19 nt, Homo sapiens
  misc_RNA (1)...(19): siRNA sense strand
gaaguacugcuguuucgua

SEQ ID NO: 611709 - RNA, 19 nt, Homo sapiens
  misc_RNA (1)...(19): siRNA sense strand
gaacgucagugagaaaugg

SEQ ID NO: 611710 - RNA, 19 nt, Homo sapiens
  misc_RNA (1)...(19): siRNA sense strand
cagagaagaugucaaaguc

SEQ ID NO: 611711 - RNA, 19 nt, Homo sapiens
  misc_RNA (1)...(19): siRNA sense strand
aagcaggacuccagauaaa

SEQ ID NO: 611712 - RNA, 19 nt, Homo sapiens
  misc_RNA (1)...(19): siRNA sense strand
caucgucgcuggcauucaa

SEQ ID NO: 611713 - RNA, 19 nt, Homo sapiens
  misc_RNA (1)...(19): siRNA sense strand
gaagaaguacugcuguuuc

SEQ ID NO: 611714 - RNA, 19 nt, Homo sapiens
  misc_RNA (1)...(19): siRNA sense strand
ggaagaaguacugcuguuu

SEQ ID NO: 611715 - RNA, 19 nt, Homo sapiens
  misc_RNA (1)...(19): siRNA sense strand
agaaaugggugccggagau

SEQ ID NO: 611716 - RNA, 19 nt, Homo sapiens
  misc_RNA (1)...(19): siRNA sense strand
caaagccgccuccuacauc

SEQ ID NO: 611717 - RNA, 19 nt, Homo sapiens
  misc_RNA (1)...(19): siRNA sense strand
ccaaagaagucuaaaagca

SEQ ID NO: 611718 - RNA, 19 nt, Homo sapiens
  misc_RNA (1)...(19): siRNA sense strand
gaaaugggugccggagauu

SEQ ID NO: 611719 - RNA, 19 nt, Homo sapiens
  misc_RNA (1)...(19): siRNA sense strand
ggaacgcagucggaucuca

SEQ ID NO: 611720 - RNA, 19 nt, Homo sapiens
  misc_RNA (1)...(19): siRNA sense strand
aaagcaggacuccagauaa

SEQ ID NO: 611721 - RNA, 19 nt, Homo sapiens
  misc_RNA (1)...(19): siRNA sense strand
gaugucaaaguccucauug

SEQ ID NO: 611722 - RNA, 19 nt, Homo sapiens
  misc_RNA (1)...(19): siRNA sense strand
uuggacaaaugcaaagaaa

SEQ ID NO: 611723 - RNA, 19 nt, Homo sapiens
  misc_RNA (1)...(19): siRNA sense strand
cuacugccuucgacaacuu

SEQ ID NO: 611724 - RNA, 19 nt, Homo sapiens
  misc_RNA (1)...(19): siRNA sense strand
uggaagaaguacugcuguu

SEQ ID NO: 611725 - RNA, 19 nt, Homo sapiens
  misc_RNA (1)...(19): siRNA sense strand
ccuccuacaucgaguguuc

SEQ ID NO: 611726 - RNA, 19 nt, Homo sapiens
  misc_RNA (1)...(19): siRNA sense strand
ccagaacgucagugagaaa

SEQ ID NO: 611727 - RNA, 19 nt, Homo sapiens
  misc_RNA (1)...(19): siRNA sense strand
caacagccaaagaagucua

SEQ ID NO: 611728 - RNA, 19 nt, Homo sapiens
  misc_RNA (1)...(19): siRNA sense strand
ucagagaagaugucaaagu

SEQ ID NO: 611729 - RNA, 19 nt, Homo sapiens
  misc_RNA (1)...(19): siRNA sense strand
ggacaaaugcaaagaaaag

SEQ ID NO: 611730 - RNA, 19 nt, Homo sapiens
  misc_RNA (1)...(19): siRNA sense strand
ggacaggaugaauuugaca

SEQ ID NO: 611731 - RNA, 19 nt, Homo sapiens
  misc_RNA (1)...(19): siRNA sense strand
ugaguuggacaaaugcaaa

SEQ ID NO: 611732 - RNA, 19 nt, Homo sapiens
  misc_RNA (1)...(19): siRNA sense strand
caccaacacagacaucuuc

SEQ ID NO: 611733 - RNA, 19 nt, Homo sapiens
  misc_RNA (1)...(19): siRNA sense strand
ccggacaggaugaauuuga

SEQ ID NO: 611734 - RNA, 19 nt, Homo sapiens
  misc_RNA (1)...(19): siRNA sense strand
acacucagcaacagccaaa

SEQ ID NO: 611735 - RNA, 19 nt, Homo sapiens
  misc_RNA (1)...(19): siRNA sense strand
ggagauucgaugccacugu

SEQ ID NO: 611736 - RNA, 19 nt, Homo sapiens
  misc_RNA (1)...(19): siRNA sense strand
cagcaacagccaaagaagu

SEQ ID NO: 611737 - RNA, 19 nt, Homo sapiens
  misc_RNA (1)...(19): siRNA sense strand
ucaaagccgccuccuacau

SEQ ID NO: 611738 - RNA, 19 nt, Homo sapiens
  misc_RNA (1)...(19): siRNA sense strand
aaguacugcuguuucguau

SEQ ID NO: 611739 - RNA, 19 nt, Homo sapiens
  misc_RNA (1)...(19): siRNA sense strand
aagaaguacugcuguuucg

SEQ ID NO: 611740 - RNA, 19 nt, Homo sapiens
  misc_RNA (1)...(19): siRNA sense strand
gacaggaugaauuugacaa

SEQ ID NO: 611741 - RNA, 19 nt, Homo sapiens
  misc_RNA (1)...(19): siRNA sense strand
ugccggacaggaugaauuu

SEQ ID NO: 611742 - RNA, 19 nt, Homo sapiens
  misc_RNA (1)...(19): siRNA sense strand
cgaugccacugucccaaag

SEQ ID NO: 611743 - RNA, 19 nt, Homo sapiens
  misc_RNA (1)...(19): siRNA sense strand
gcugugcgccgaggaaauc

SEQ ID NO: 611744 - RNA, 19 nt, Homo sapiens
  misc_RNA (1)...(19): siRNA sense strand
aaaagcaggacuccagaua

SEQ ID NO: 611745 - RNA, 19 nt, Homo sapiens
  misc_RNA (1)...(19): siRNA sense strand
ugacacugccggacaggau

SEQ ID NO: 611746 - RNA, 19 nt, Homo sapiens
  misc_RNA (1)...(19): siRNA sense strand
cgagccugguggugagcua

SEQ ID NO: 611747 - RNA, 19 nt, Homo sapiens
  misc_RNA (1)...(19): siRNA sense strand
gcaggacuccagauaaaau

SEQ ID NO: 611748 - RNA, 19 nt, Homo sapiens
  misc_RNA (1)...(19): siRNA sense strand
ggagaccauugaccagaua

SEQ ID NO: 611749 - RNA, 19 nt, Homo sapiens
  misc_RNA (1)...(19): siRNA sense strand
gagaaggugauuaaagaua

SEQ ID NO: 611750 - RNA, 19 nt, Homo sapiens
  misc_RNA (1)...(19): siRNA sense strand
gaggagacccugcugcuuu

SEQ ID NO: 611751 - RNA, 19 nt, Homo sapiens
  misc_RNA (1)...(19): siRNA sense strand
gcacagcccucagcaucaa

SEQ ID NO: 611752 - RNA, 19 nt, Homo sapiens
  misc_RNA (1)...(19): siRNA sense strand
uggagaaggugauuaaaga

SEQ ID NO: 611753 - RNA, 19 nt, Homo sapiens
  misc_RNA (1)...(19): siRNA sense strand
ucaaccagcugagggagua

SEQ ID NO: 611754 - RNA, 19 nt, Homo sapiens
  misc_RNA (1)...(19): siRNA sense strand
gaccgaaagucuccugcuu

SEQ ID NO: 611755 - RNA, 19 nt, Homo sapiens
  misc_RNA (1)...(19): siRNA sense strand
ggacuccgaucgcgauguc

SEQ ID NO: 611756 - RNA, 19 nt, Homo sapiens
  misc_RNA (1)...(19): siRNA sense strand
ucugacagcuccaugagau

SEQ ID NO: 611757 - RNA, 19 nt, Homo sapiens
  misc_RNA (1)...(19): siRNA sense strand
gauacggagucccuguuca

SEQ ID NO: 611758 - RNA, 19 nt, Homo sapiens
  misc_RNA (1)...(19): siRNA sense strand
gaggauuucucaggcuaug

SEQ ID NO: 611759 - RNA, 19 nt, Homo sapiens
  misc_RNA (1)...(19): siRNA sense strand
agaaggugauuaaagauac

SEQ ID NO: 611760 - RNA, 19 nt, Homo sapiens
  misc_RNA (1)...(19): siRNA sense strand
ggagaaggugauuaaagau

SEQ ID NO: 611761 - RNA, 19 nt, Homo sapiens
  misc_RNA (1)...(19): siRNA sense strand
ugacuugggaggagacuga

SEQ ID NO: 611762 - RNA, 19 nt, Homo sapiens
  misc_RNA (1)...(19): siRNA sense strand
aagauagccuggagaaggu

SEQ ID NO: 611763 - RNA, 19 nt, Homo sapiens
  misc_RNA (1)...(19): siRNA sense strand
cagcugagggaguaugauu

SEQ ID NO: 611764 - RNA, 19 nt, Homo sapiens
  misc_RNA (1)...(19): siRNA sense strand
gaaggugauuaaagauacg

SEQ ID NO: 611765 - RNA, 19 nt, Homo sapiens
  misc_RNA (1)...(19): siRNA sense strand
auggagaugugcagcauga

SEQ ID NO: 611766 - RNA, 19 nt, Homo sapiens
  misc_RNA (1)...(19): siRNA sense strand
aggagacccugcugcuuug

SEQ ID NO: 611767 - RNA, 19 nt, Homo sapiens
  misc_RNA (1)...(19): siRNA sense strand
gccuggagaaggugauuaa

SEQ ID NO: 611768 - RNA, 19 nt, Homo sapiens
  misc_RNA (1)...(19): siRNA sense strand
ggagaugugcagcaugaag

SEQ ID NO: 611769 - RNA, 19 nt, Homo sapiens
  misc_RNA (1)...(19): siRNA sense strand
gcacgaguacauggagaug

SEQ ID NO: 611770 - RNA, 19 nt, Homo sapiens
  misc_RNA (1)...(19): siRNA sense strand
gcaccugcacgaguacaug

SEQ ID NO: 611771 - RNA, 19 nt, Homo sapiens
  misc_RNA (1)...(19): siRNA sense strand
ugacagcuccaugagauag

SEQ ID NO: 611772 - RNA, 19 nt, Homo sapiens
  misc_RNA (1)...(19): siRNA sense strand
gaguaucaggagaccauug

SEQ ID NO: 611773 - RNA, 19 nt, Homo sapiens
  misc_RNA (1)...(19): siRNA sense strand
ggaggauuucucaggcuau

SEQ ID NO: 611774 - RNA, 19 nt, Homo sapiens
  misc_RNA (1)...(19): siRNA sense strand
gccuggacgugcagaugga

SEQ ID NO: 611775 - RNA, 19 nt, Homo sapiens
  misc_RNA (1)...(19): siRNA sense strand
accggcaccugcacgagua

SEQ ID NO: 611776 - RNA, 19 nt, Homo sapiens
  misc_RNA (1)...(19): siRNA sense strand
aaacccgggagaaggagua

SEQ ID NO: 611777 - RNA, 19 nt, Homo sapiens
  misc_RNA (1)...(19): siRNA sense strand
gcugagggaguaugauuuu

SEQ ID NO: 611778 - RNA, 19 nt, Homo sapiens
  misc_RNA (1)...(19): siRNA sense strand
ggagaccauugaccagaua

SEQ ID NO: 611779 - RNA, 19 nt, Homo sapiens
  misc_RNA (1)...(19): siRNA sense strand
gagaaggugauuaaagaua

SEQ ID NO: 611780 - RNA, 19 nt, Homo sapiens
  misc_RNA (1)...(19): siRNA sense strand
gaggagacccugcugcuuu

SEQ ID NO: 611781 - RNA, 19 nt, Homo sapiens
  misc_RNA (1)...(19): siRNA sense strand
gcacagcccucagcaucaa

SEQ ID NO: 611782 - RNA, 19 nt, Homo sapiens
  misc_RNA (1)...(19): siRNA sense strand
uggagaaggugauuaaaga

SEQ ID NO: 611783 - RNA, 19 nt, Homo sapiens
  misc_RNA (1)...(19): siRNA sense strand
ucaaccagcugagggagua

SEQ ID NO: 611784 - RNA, 19 nt, Homo sapiens
  misc_RNA (1)...(19): siRNA sense strand
gaccgaaagucuccugcuu

SEQ ID NO: 611785 - RNA, 19 nt, Homo sapiens
  misc_RNA (1)...(19): siRNA sense strand
ggacuccgaucgcgauguc

SEQ ID NO: 611786 - RNA, 19 nt, Homo sapiens
  misc_RNA (1)...(19): siRNA sense strand
ucugacagcuccaugagau

SEQ ID NO: 611787 - RNA, 19 nt, Homo sapiens
  misc_RNA (1)...(19): siRNA sense strand
gauacggagucccuguuca

SEQ ID NO: 611788 - RNA, 19 nt, Homo sapiens
  misc_RNA (1)...(19): siRNA sense strand
gaggauuucucaggcuaug

SEQ ID NO: 611789 - RNA, 19 nt, Homo sapiens
  misc_RNA (1)...(19): siRNA sense strand
agaaggugauuaaagauac

SEQ ID NO: 611790 - RNA, 19 nt, Homo sapiens
  misc_RNA (1)...(19): siRNA sense strand
ggagaaggugauuaaagau

SEQ ID NO: 611791 - RNA, 19 nt, Homo sapiens
  misc_RNA (1)...(19): siRNA sense strand
ugacuugggaggagacuga

SEQ ID NO: 611792 - RNA, 19 nt, Homo sapiens
  misc_RNA (1)...(19): siRNA sense strand
aagauagccuggagaaggu

SEQ ID NO: 611793 - RNA, 19 nt, Homo sapiens
  misc_RNA (1)...(19): siRNA sense strand
cagcugagggaguaugauu

SEQ ID NO: 611794 - RNA, 19 nt, Homo sapiens
  misc_RNA (1)...(19): siRNA sense strand
gaaggugauuaaagauacg

SEQ ID NO: 611795 - RNA, 19 nt, Homo sapiens
  misc_RNA (1)...(19): siRNA sense strand
auggagaugugcagcauga

SEQ ID NO: 611796 - RNA, 19 nt, Homo sapiens
  misc_RNA (1)...(19): siRNA sense strand
aggagacccugcugcuuug

SEQ ID NO: 611797 - RNA, 19 nt, Homo sapiens
  misc_RNA (1)...(19): siRNA sense strand
gccuggagaaggugauuaa

SEQ ID NO: 611798 - RNA, 19 nt, Homo sapiens
  misc_RNA (1)...(19): siRNA sense strand
ggagaugugcagcaugaag

SEQ ID NO: 611799 - RNA, 19 nt, Homo sapiens
  misc_RNA (1)...(19): siRNA sense strand
gcacgaguacauggagaug

SEQ ID NO: 611800 - RNA, 19 nt, Homo sapiens
  misc_RNA (1)...(19): siRNA sense strand
gcaccugcacgaguacaug

SEQ ID NO: 611801 - RNA, 19 nt, Homo sapiens
  misc_RNA (1)...(19): siRNA sense strand
ugacagcuccaugagauag

SEQ ID NO: 611802 - RNA, 19 nt, Homo sapiens
  misc_RNA (1)...(19): siRNA sense strand
gaguaucaggagaccauug

SEQ ID NO: 611803 - RNA, 19 nt, Homo sapiens
  misc_RNA (1)...(19): siRNA sense strand
ggaggauuucucaggcuau

SEQ ID NO: 611804 - RNA, 19 nt, Homo sapiens
  misc_RNA (1)...(19): siRNA sense strand
gccuggacgugcagaugga

SEQ ID NO: 611805 - RNA, 19 nt, Homo sapiens
  misc_RNA (1)...(19): siRNA sense strand
accggcaccugcacgagua

SEQ ID NO: 611806 - RNA, 19 nt, Homo sapiens
  misc_RNA (1)...(19): siRNA sense strand
aaacccgggagaaggagua

SEQ ID NO: 611807 - RNA, 19 nt, Homo sapiens
  misc_RNA (1)...(19): siRNA sense strand
gcugagggaguaugauuuu

SEQ ID NO: 611808 - RNA, 19 nt, Homo sapiens
  misc_RNA (1)...(19): siRNA sense strand
ggagaccauugaccagaua

SEQ ID NO: 611809 - RNA, 19 nt, Homo sapiens
  misc_RNA (1)...(19): siRNA sense strand
gagaaggugauuaaagaua

SEQ ID NO: 611810 - RNA, 19 nt, Homo sapiens
  misc_RNA (1)...(19): siRNA sense strand
gaggagacccugcugcuuu

SEQ ID NO: 611811 - RNA, 19 nt, Homo sapiens
  misc_RNA (1)...(19): siRNA sense strand
gcacagcccucagcaucaa

SEQ ID NO: 611812 - RNA, 19 nt, Homo sapiens
  misc_RNA (1)...(19): siRNA sense strand
uggagaaggugauuaaaga

SEQ ID NO: 611813 - RNA, 19 nt, Homo sapiens
  misc_RNA (1)...(19): siRNA sense strand
ucaaccagcugagggagua

SEQ ID NO: 611814 - RNA, 19 nt, Homo sapiens
  misc_RNA (1)...(19): siRNA sense strand
gaccgaaagucuccugcuu

SEQ ID NO: 611815 - RNA, 19 nt, Homo sapiens
  misc_RNA (1)...(19): siRNA sense strand
ggacuccgaucgcgauguc

SEQ ID NO: 611816 - RNA, 19 nt, Homo sapiens
  misc_RNA (1)...(19): siRNA sense strand
ucugacagcuccaugagau

SEQ ID NO: 611817 - RNA, 19 nt, Homo sapiens
  misc_RNA (1)...(19): siRNA sense strand
gauacggagucccuguuca

SEQ ID NO: 611818 - RNA, 19 nt, Homo sapiens
  misc_RNA (1)...(19): siRNA sense strand
gaggauuucucaggcuaug

SEQ ID NO: 611819 - RNA, 19 nt, Homo sapiens
  misc_RNA (1)...(19): siRNA sense strand
agaaggugauuaaagauac

SEQ ID NO: 611820 - RNA, 19 nt, Homo sapiens
  misc_RNA (1)...(19): siRNA sense strand
ggagaaggugauuaaagau

SEQ ID NO: 611821 - RNA, 19 nt, Homo sapiens
  misc_RNA (1)...(19): siRNA sense strand
ugacuugggaggagacuga

SEQ ID NO: 611822 - RNA, 19 nt, Homo sapiens
  misc_RNA (1)...(19): siRNA sense strand
aagauagccuggagaaggu

SEQ ID NO: 611823 - RNA, 19 nt, Homo sapiens
  misc_RNA (1)...(19): siRNA sense strand
cagcugagggaguaugauu

SEQ ID NO: 611824 - RNA, 19 nt, Homo sapiens
  misc_RNA (1)...(19): siRNA sense strand
gaaggugauuaaagauacg

SEQ ID NO: 611825 - RNA, 19 nt, Homo sapiens
  misc_RNA (1)...(19): siRNA sense strand
auggagaugugcagcauga

SEQ ID NO: 611826 - RNA, 19 nt, Homo sapiens
  misc_RNA (1)...(19): siRNA sense strand
aggagacccugcugcuuug

SEQ ID NO: 611827 - RNA, 19 nt, Homo sapiens
  misc_RNA (1)...(19): siRNA sense strand
gccuggagaaggugauuaa

SEQ ID NO: 611828 - RNA, 19 nt, Homo sapiens
  misc_RNA (1)...(19): siRNA sense strand
ggagaugugcagcaugaag

SEQ ID NO: 611829 - RNA, 19 nt, Homo sapiens
  misc_RNA (1)...(19): siRNA sense strand
gcacgaguacauggagaug

SEQ ID NO: 611830 - RNA, 19 nt, Homo sapiens
  misc_RNA (1)...(19): siRNA sense strand
gcaccugcacgaguacaug

SEQ ID NO: 611831 - RNA, 19 nt, Homo sapiens
  misc_RNA (1)...(19): siRNA sense strand
ugacagcuccaugagauag

SEQ ID NO: 611832 - RNA, 19 nt, Homo sapiens
  misc_RNA (1)...(19): siRNA sense strand
gaguaucaggagaccauug

SEQ ID NO: 611833 - RNA, 19 nt, Homo sapiens
  misc_RNA (1)...(19): siRNA sense strand
ggaggauuucucaggcuau

SEQ ID NO: 611834 - RNA, 19 nt, Homo sapiens
  misc_RNA (1)...(19): siRNA sense strand
gccuggacgugcagaugga

SEQ ID NO: 611835 - RNA, 19 nt, Homo sapiens
  misc_RNA (1)...(19): siRNA sense strand
accggcaccugcacgagua

SEQ ID NO: 611836 - RNA, 19 nt, Homo sapiens
  misc_RNA (1)...(19): siRNA sense strand
aaacccgggagaaggagua

SEQ ID NO: 611837 - RNA, 19 nt, Homo sapiens
  misc_RNA (1)...(19): siRNA sense strand
gcugagggaguaugauuuu

SEQ ID NO: 611838 - RNA, 19 nt, Homo sapiens
  misc_RNA (1)...(19): siRNA sense strand
ggagaccauugaccagaua

SEQ ID NO: 611839 - RNA, 19 nt, Homo sapiens
  misc_RNA (1)...(19): siRNA sense strand
gagaaggugauuaaagaua

SEQ ID NO: 611840 - RNA, 19 nt, Homo sapiens
  misc_RNA (1)...(19): siRNA sense strand
gaggagacccugcugcuuu

SEQ ID NO: 611841 - RNA, 19 nt, Homo sapiens
  misc_RNA (1)...(19): siRNA sense strand
gcacagcccucagcaucaa

SEQ ID NO: 611842 - RNA, 19 nt, Homo sapiens
  misc_RNA (1)...(19): siRNA sense strand
uggagaaggugauuaaaga

SEQ ID NO: 611843 - RNA, 19 nt, Homo sapiens
  misc_RNA (1)...(19): siRNA sense strand
ucaaccagcugagggagua

SEQ ID NO: 611844 - RNA, 19 nt, Homo sapiens
  misc_RNA (1)...(19): siRNA sense strand
gaccgaaagucuccugcuu

SEQ ID NO: 611845 - RNA, 19 nt, Homo sapiens
  misc_RNA (1)...(19): siRNA sense strand
ggacuccgaucgcgauguc

SEQ ID NO: 611846 - RNA, 19 nt, Homo sapiens
  misc_RNA (1)...(19): siRNA sense strand
ucugacagcuccaugagau

SEQ ID NO: 611847 - RNA, 19 nt, Homo sapiens
  misc_RNA (1)...(19): siRNA sense strand
gauacggagucccuguuca

SEQ ID NO: 611848 - RNA, 19 nt, Homo sapiens
  misc_RNA (1)...(19): siRNA sense strand
gaggauuucucaggcuaug

SEQ ID NO: 611849 - RNA, 19 nt, Homo sapiens
  misc_RNA (1)...(19): siRNA sense strand
agaaggugauuaaagauac

SEQ ID NO: 611850 - RNA, 19 nt, Homo sapiens
  misc_RNA (1)...(19): siRNA sense strand
ggagaaggugauuaaagau

SEQ ID NO: 611851 - RNA, 19 nt, Homo sapiens
  misc_RNA (1)...(19): siRNA sense strand
ugacuugggaggagacuga

SEQ ID NO: 611852 - RNA, 19 nt, Homo sapiens
  misc_RNA (1)...(19): siRNA sense strand
aagauagccuggagaaggu

SEQ ID NO: 611853 - RNA, 19 nt, Homo sapiens
  misc_RNA (1)...(19): siRNA sense strand
cagcugagggaguaugauu

SEQ ID NO: 611854 - RNA, 19 nt, Homo sapiens
  misc_RNA (1)...(19): siRNA sense strand
gaaggugauuaaagauacg

SEQ ID NO: 611855 - RNA, 19 nt, Homo sapiens
  misc_RNA (1)...(19): siRNA sense strand
auggagaugugcagcauga

SEQ ID NO: 611856 - RNA, 19 nt, Homo sapiens
  misc_RNA (1)...(19): siRNA sense strand
aggagacccugcugcuuug

SEQ ID NO: 611857 - RNA, 19 nt, Homo sapiens
  misc_RNA (1)...(19): siRNA sense strand
gccuggagaaggugauuaa

SEQ ID NO: 611858 - RNA, 19 nt, Homo sapiens
  misc_RNA (1)...(19): siRNA sense strand
ggagaugugcagcaugaag

SEQ ID NO: 611859 - RNA, 19 nt, Homo sapiens
  misc_RNA (1)...(19): siRNA sense strand
gcacgaguacauggagaug

SEQ ID NO: 611860 - RNA, 19 nt, Homo sapiens
  misc_RNA (1)...(19): siRNA sense strand
gcaccugcacgaguacaug

SEQ ID NO: 611861 - RNA, 19 nt, Homo sapiens
  misc_RNA (1)...(19): siRNA sense strand
ugacagcuccaugagauag

SEQ ID NO: 611862 - RNA, 19 nt, Homo sapiens
  misc_RNA (1)...(19): siRNA sense strand
gaguaucaggagaccauug

SEQ ID NO: 611863 - RNA, 19 nt, Homo sapiens
  misc_RNA (1)...(19): siRNA sense strand
ggaggauuucucaggcuau

SEQ ID NO: 611864 - RNA, 19 nt, Homo sapiens
  misc_RNA (1)...(19): siRNA sense strand
gccuggacgugcagaugga

SEQ ID NO: 611865 - RNA, 19 nt, Homo sapiens
  misc_RNA (1)...(19): siRNA sense strand
accggcaccugcacgagua

SEQ ID NO: 611866 - RNA, 19 nt, Homo sapiens
  misc_RNA (1)...(19): siRNA sense strand
aaacccgggagaaggagua

SEQ ID NO: 611867 - RNA, 19 nt, Homo sapiens
  misc_RNA (1)...(19): siRNA sense strand
gcugagggaguaugauuuu

SEQ ID NO: 611868 - RNA, 19 nt, Homo sapiens
  misc_RNA (1)...(19): siRNA sense strand
aaucagaacugggacguua

SEQ ID NO: 611869 - RNA, 19 nt, Homo sapiens
  misc_RNA (1)...(19): siRNA sense strand
gcaucaccuguaucuauua

SEQ ID NO: 611870 - RNA, 19 nt, Homo sapiens
  misc_RNA (1)...(19): siRNA sense strand
ugcaucaccuguaucuauu

SEQ ID NO: 611871 - RNA, 19 nt, Homo sapiens
  misc_RNA (1)...(19): siRNA sense strand
cugcaucaccuguaucuau

SEQ ID NO: 611872 - RNA, 19 nt, Homo sapiens
  misc_RNA (1)...(19): siRNA sense strand
uaaggcacguugacaaucc

SEQ ID NO: 611873 - RNA, 19 nt, Homo sapiens
  misc_RNA (1)...(19): siRNA sense strand
caucaccuguaucuauuac

SEQ ID NO: 611874 - RNA, 19 nt, Homo sapiens
  misc_RNA (1)...(19): siRNA sense strand
caacgggcucggguacgua

SEQ ID NO: 611875 - RNA, 19 nt, Homo sapiens
  misc_RNA (1)...(19): siRNA sense strand
cguaaggcacguugacaau

SEQ ID NO: 611876 - RNA, 19 nt, Homo sapiens
  misc_RNA (1)...(19): siRNA sense strand
guaaggcacguugacaauc

SEQ ID NO: 611877 - RNA, 19 nt, Homo sapiens
  misc_RNA (1)...(19): siRNA sense strand
ggcgcugcaucaccuguau

SEQ ID NO: 611878 - RNA, 19 nt, Homo sapiens
  misc_RNA (1)...(19): siRNA sense strand
cuguaucuauuaccugaau

SEQ ID NO: 611879 - RNA, 19 nt, Homo sapiens
  misc_RNA (1)...(19): siRNA sense strand
acagaaagguguccaagua

SEQ ID NO: 611880 - RNA, 19 nt, Homo sapiens
  misc_RNA (1)...(19): siRNA sense strand
aaucagaacugggacguua

SEQ ID NO: 611881 - RNA, 19 nt, Homo sapiens
  misc_RNA (1)...(19): siRNA sense strand
caacaucgagccacucuuu

SEQ ID NO: 611882 - RNA, 19 nt, Homo sapiens
  misc_RNA (1)...(19): siRNA sense strand
caaagacaaguaucagcua

SEQ ID NO: 611883 - RNA, 19 nt, Homo sapiens
  misc_RNA (1)...(19): siRNA sense strand
gcaucaccuguaucuauua

SEQ ID NO: 611884 - RNA, 19 nt, Homo sapiens
  misc_RNA (1)...(19): siRNA sense strand
gcuagcaucaggacagaaa

SEQ ID NO: 611885 - RNA, 19 nt, Homo sapiens
  misc_RNA (1)...(19): siRNA sense strand
cgccaucacugucugguau

SEQ ID NO: 611886 - RNA, 19 nt, Homo sapiens
  misc_RNA (1)...(19): siRNA sense strand
ugcaucaccuguaucuauu

SEQ ID NO: 611887 - RNA, 19 nt, Homo sapiens
  misc_RNA (1)...(19): siRNA sense strand
ccaucacugucugguauuu

SEQ ID NO: 611888 - RNA, 19 nt, Homo sapiens
  misc_RNA (1)...(19): siRNA sense strand
uuugaccgguugcucauuu

SEQ ID NO: 611889 - RNA, 19 nt, Homo sapiens
  misc_RNA (1)...(19): siRNA sense strand
cugcaucaccuguaucuau

SEQ ID NO: 611890 - RNA, 19 nt, Homo sapiens
  misc_RNA (1)...(19): siRNA sense strand
cagcagccaaagacaagua

SEQ ID NO: 611891 - RNA, 19 nt, Homo sapiens
  misc_RNA (1)...(19): siRNA sense strand
cagccuaugccaccaggua

SEQ ID NO: 611892 - RNA, 19 nt, Homo sapiens
  misc_RNA (1)...(19): siRNA sense strand
agacaaguaucagcuagca

SEQ ID NO: 611893 - RNA, 19 nt, Homo sapiens
  misc_RNA (1)...(19): siRNA sense strand
uaaggcacguugacaaucc

SEQ ID NO: 611894 - RNA, 19 nt, Homo sapiens
  misc_RNA (1)...(19): siRNA sense strand
cagcuagcaucaggacaga

SEQ ID NO: 611895 - RNA, 19 nt, Homo sapiens
  misc_RNA (1)...(19): siRNA sense strand
gggcagcagccaaagacaa

SEQ ID NO: 611896 - RNA, 19 nt, Homo sapiens
  misc_RNA (1)...(19): siRNA sense strand
ccagguacgccaucacugu

SEQ ID NO: 611897 - RNA, 19 nt, Homo sapiens
  misc_RNA (1)...(19): siRNA sense strand
caucaccuguaucuauuac

SEQ ID NO: 611898 - RNA, 19 nt, Homo sapiens
  misc_RNA (1)...(19): siRNA sense strand
cagccaaagacaaguauca

SEQ ID NO: 611899 - RNA, 19 nt, Homo sapiens
  misc_RNA (1)...(19): siRNA sense strand
caacgggcucggguacgua

SEQ ID NO: 611900 - RNA, 19 nt, Homo sapiens
  misc_RNA (1)...(19): siRNA sense strand
acaucgagccacucuuuga

SEQ ID NO: 611901 - RNA, 19 nt, Homo sapiens
  misc_RNA (1)...(19): siRNA sense strand
guaaggcacguugacaauc

SEQ ID NO: 611902 - RNA, 19 nt, Homo sapiens
  misc_RNA (1)...(19): siRNA sense strand
cguaaggcacguugacaau

SEQ ID NO: 611903 - RNA, 19 nt, Homo sapiens
  misc_RNA (1)...(19): siRNA sense strand
ggcgcugcaucaccuguau

SEQ ID NO: 611904 - RNA, 19 nt, Homo sapiens
  misc_RNA (1)...(19): siRNA sense strand
cuguaucuauuaccugaau

SEQ ID NO: 611905 - RNA, 19 nt, Homo sapiens
  misc_RNA (1)...(19): siRNA sense strand
acagaaagguguccaagua

SEQ ID NO: 611906 - RNA, 19 nt, Homo sapiens
  misc_RNA (1)...(19): siRNA sense strand
aaucagaacugggacguua

SEQ ID NO: 611907 - RNA, 19 nt, Homo sapiens
  misc_RNA (1)...(19): siRNA sense strand
caacaucgagccacucuuu

SEQ ID NO: 611908 - RNA, 19 nt, Homo sapiens
  misc_RNA (1)...(19): siRNA sense strand
caaagacaaguaucagcua

SEQ ID NO: 611909 - RNA, 19 nt, Homo sapiens
  misc_RNA (1)...(19): siRNA sense strand
gcaucaccuguaucuauua

SEQ ID NO: 611910 - RNA, 19 nt, Homo sapiens
  misc_RNA (1)...(19): siRNA sense strand
gcuagcaucaggacagaaa

SEQ ID NO: 611911 - RNA, 19 nt, Homo sapiens
  misc_RNA (1)...(19): siRNA sense strand
cgccaucacugucugguau

SEQ ID NO: 611912 - RNA, 19 nt, Homo sapiens
  misc_RNA (1)...(19): siRNA sense strand
ugcaucaccuguaucuauu

SEQ ID NO: 611913 - RNA, 19 nt, Homo sapiens
  misc_RNA (1)...(19): siRNA sense strand
ccaucacugucugguauuu

SEQ ID NO: 611914 - RNA, 19 nt, Homo sapiens
  misc_RNA (1)...(19): siRNA sense strand
uuugaccgguugcucauuu

SEQ ID NO: 611915 - RNA, 19 nt, Homo sapiens
  misc_RNA (1)...(19): siRNA sense strand
cugcaucaccuguaucuau

SEQ ID NO: 611916 - RNA, 19 nt, Homo sapiens
  misc_RNA (1)...(19): siRNA sense strand
cagcagccaaagacaagua

SEQ ID NO: 611917 - RNA, 19 nt, Homo sapiens
  misc_RNA (1)...(19): siRNA sense strand
cagccuaugccaccaggua

SEQ ID NO: 611918 - RNA, 19 nt, Homo sapiens
  misc_RNA (1)...(19): siRNA sense strand
agacaaguaucagcuagca

SEQ ID NO: 611919 - RNA, 19 nt, Homo sapiens
  misc_RNA (1)...(19): siRNA sense strand
uaaggcacguugacaaucc

SEQ ID NO: 611920 - RNA, 19 nt, Homo sapiens
  misc_RNA (1)...(19): siRNA sense strand
cagcuagcaucaggacaga

SEQ ID NO: 611921 - RNA, 19 nt, Homo sapiens
  misc_RNA (1)...(19): siRNA sense strand
gggcagcagccaaagacaa

SEQ ID NO: 611922 - RNA, 19 nt, Homo sapiens
  misc_RNA (1)...(19): siRNA sense strand
ccagguacgccaucacugu

SEQ ID NO: 611923 - RNA, 19 nt, Homo sapiens
  misc_RNA (1)...(19): siRNA sense strand
caucaccuguaucuauuac

SEQ ID NO: 611924 - RNA, 19 nt, Homo sapiens
  misc_RNA (1)...(19): siRNA sense strand
cagccaaagacaaguauca

SEQ ID NO: 611925 - RNA, 19 nt, Homo sapiens
  misc_RNA (1)...(19): siRNA sense strand
caacgggcucggguacgua

SEQ ID NO: 611926 - RNA, 19 nt, Homo sapiens
  misc_RNA (1)...(19): siRNA sense strand
acaucgagccacucuuuga

SEQ ID NO: 611927 - RNA, 19 nt, Homo sapiens
  misc_RNA (1)...(19): siRNA sense strand
guaaggcacguugacaauc

SEQ ID NO: 611928 - RNA, 19 nt, Homo sapiens
  misc_RNA (1)...(19): siRNA sense strand
cguaaggcacguugacaau

SEQ ID NO: 611929 - RNA, 19 nt, Homo sapiens
  misc_RNA (1)...(19): siRNA sense strand
ggcgcugcaucaccuguau

SEQ ID NO: 611930 - RNA, 19 nt, Homo sapiens
  misc_RNA (1)...(19): siRNA sense strand
cuguaucuauuaccugaau

SEQ ID NO: 611931 - RNA, 19 nt, Homo sapiens
  misc_RNA (1)...(19): siRNA sense strand
aaagaaagcugcguuaaug

SEQ ID NO: 611932 - RNA, 19 nt, Homo sapiens
  misc_RNA (1)...(19): siRNA sense strand
aaagaaaccuagcaacaaa

SEQ ID NO: 611933 - RNA, 19 nt, Homo sapiens
  misc_RNA (1)...(19): siRNA sense strand
gaagacagcaaugaugaua

SEQ ID NO: 611934 - RNA, 19 nt, Homo sapiens
  misc_RNA (1)...(19): siRNA sense strand
gaaagcugcguuaauguuu

SEQ ID NO: 611935 - RNA, 19 nt, Homo sapiens
  misc_RNA (1)...(19): siRNA sense strand
gaacuaacagaucucuuaa

SEQ ID NO: 611936 - RNA, 19 nt, Homo sapiens
  misc_RNA (1)...(19): siRNA sense strand
gcaaugaugauauggauga

SEQ ID NO: 611937 - RNA, 19 nt, Homo sapiens
  misc_RNA (1)...(19): siRNA sense strand
guucuacgcuucugugaga

SEQ ID NO: 611938 - RNA, 19 nt, Homo sapiens
  misc_RNA (1)...(19): siRNA sense strand
agaacuaacagaucucuua

SEQ ID NO: 611939 - RNA, 19 nt, Homo sapiens
  misc_RNA (1)...(19): siRNA sense strand
gagaagaacugugaaaaga

SEQ ID NO: 611940 - RNA, 19 nt, Homo sapiens
  misc_RNA (1)...(19): siRNA sense strand
gaacacugcagaacuaaca

SEQ ID NO: 611941 - RNA, 19 nt, Homo sapiens
  misc_RNA (1)...(19): siRNA sense strand
uugaacagcuggacaaguu

SEQ ID NO: 611942 - RNA, 19 nt, Homo sapiens
  misc_RNA (1)...(19): siRNA sense strand
agacagcaaugaugauaug

SEQ ID NO: 611943 - RNA, 19 nt, Homo sapiens
  misc_RNA (1)...(19): siRNA sense strand
ugugaacacugcagaacua

SEQ ID NO: 611944 - RNA, 19 nt, Homo sapiens
  misc_RNA (1)...(19): siRNA sense strand
gaaaggguacccagugugu

SEQ ID NO: 611945 - RNA, 19 nt, Homo sapiens
  misc_RNA (1)...(19): siRNA sense strand
ugaagacgaugaugacagu

SEQ ID NO: 611946 - RNA, 19 nt, Homo sapiens
  misc_RNA (1)...(19): siRNA sense strand
gauuaugacggaauuaaga

SEQ ID NO: 611947 - RNA, 19 nt, Homo sapiens
  misc_RNA (1)...(19): siRNA sense strand
acgaggaagugaauauuga

SEQ ID NO: 611948 - RNA, 19 nt, Homo sapiens
  misc_RNA (1)...(19): siRNA sense strand
caaaugcagaggaagaauu

SEQ ID NO: 611949 - RNA, 19 nt, Homo sapiens
  misc_RNA (1)...(19): siRNA sense strand
cagaagacagcaaugauga

SEQ ID NO: 611950 - RNA, 19 nt, Homo sapiens
  misc_RNA (1)...(19): siRNA sense strand
cagcaaugaugauauggau

SEQ ID NO: 611951 - RNA, 19 nt, Homo sapiens
  misc_RNA (1)...(19): siRNA sense strand
acagaucucuuaauucaac

SEQ ID NO: 611952 - RNA, 19 nt, Homo sapiens
  misc_RNA (1)...(19): siRNA sense strand
ggagugugauuaagcaaac

SEQ ID NO: 611953 - RNA, 19 nt, Homo sapiens
  misc_RNA (1)...(19): siRNA sense strand
gggcacacagaaccaauaa

SEQ ID NO: 611954 - RNA, 19 nt, Homo sapiens
  misc_RNA (1)...(19): siRNA sense strand
gaagaggacgaggucauug

SEQ ID NO: 611955 - RNA, 19 nt, Homo sapiens
  misc_RNA (1)...(19): siRNA sense strand
gcguuaauguuugcaaaug

SEQ ID NO: 611956 - RNA, 19 nt, Homo sapiens
  misc_RNA (1)...(19): siRNA sense strand
gcacacagaaccaauaagc

SEQ ID NO: 611957 - RNA, 19 nt, Homo sapiens
  misc_RNA (1)...(19): siRNA sense strand
uaaugucccuccacagauc

SEQ ID NO: 611958 - RNA, 19 nt, Homo sapiens
  misc_RNA (1)...(19): siRNA sense strand
cauauugggagugugauua

SEQ ID NO: 611959 - RNA, 19 nt, Homo sapiens
  misc_RNA (1)...(19): siRNA sense strand
ucuaaaggcuccugugaac

SEQ ID NO: 611960 - RNA, 19 nt, Homo sapiens
  misc_RNA (1)...(19): siRNA sense strand
accagcagcuucagaaaga

SEQ ID NO: 611961 - RNA, 19 nt, Homo sapiens
  misc_RNA (1)...(19): siRNA sense strand
ggccuucuccuaagugaaa

SEQ ID NO: 611962 - RNA, 19 nt, Homo sapiens
  misc_RNA (1)...(19): siRNA sense strand
gacgaggaagugaauauug

SEQ ID NO: 611963 - RNA, 19 nt, Homo sapiens
  misc_RNA (1)...(19): siRNA sense strand
aaagcugcguuaauguuug

SEQ ID NO: 611964 - RNA, 19 nt, Homo sapiens
  misc_RNA (1)...(19): siRNA sense strand
ugaagcuuauucccuauca

SEQ ID NO: 611965 - RNA, 19 nt, Homo sapiens
  misc_RNA (1)...(19): siRNA sense strand
aaaugaggaugaagacgau

SEQ ID NO: 611966 - RNA, 19 nt, Homo sapiens
  misc_RNA (1)...(19): siRNA sense strand
cugcagaacuaacagaucu

SEQ ID NO: 611967 - RNA, 19 nt, Homo sapiens
  misc_RNA (1)...(19): siRNA sense strand
agaaagcugcguuaauguu

SEQ ID NO: 611968 - RNA, 19 nt, Homo sapiens
  misc_RNA (1)...(19): siRNA sense strand
ucuccuaagugaaagauuc

SEQ ID NO: 611969 - RNA, 19 nt, Homo sapiens
  misc_RNA (1)...(19): siRNA sense strand
aagaaaggguacccagugu

SEQ ID NO: 611970 - RNA, 19 nt, Homo sapiens
  misc_RNA (1)...(19): siRNA sense strand
ugauauggaugaagaugag

SEQ ID NO: 611971 - RNA, 19 nt, Homo sapiens
  misc_RNA (1)...(19): siRNA sense strand
ucagaagacagcaaugaug

SEQ ID NO: 611972 - RNA, 19 nt, Homo sapiens
  misc_RNA (1)...(19): siRNA sense strand
ugaugacagugacaaggaa

SEQ ID NO: 611973 - RNA, 19 nt, Homo sapiens
  misc_RNA (1)...(19): siRNA sense strand
augaugauauggaugaaga

SEQ ID NO: 611974 - RNA, 19 nt, Homo sapiens
  misc_RNA (1)...(19): siRNA sense strand
ccugugggccuucuccuaa

SEQ ID NO: 611975 - RNA, 19 nt, Homo sapiens
  misc_RNA (1)...(19): siRNA sense strand
agaucgcucugcccaugua

SEQ ID NO: 611976 - RNA, 19 nt, Homo sapiens
  misc_RNA (1)...(19): siRNA sense strand
uaagacauuuguggaagca

SEQ ID NO: 611977 - RNA, 19 nt, Homo sapiens
  misc_RNA (1)...(19): siRNA sense strand
ugaagaggacgaggucauu

SEQ ID NO: 611978 - RNA, 19 nt, Homo sapiens
  misc_RNA (1)...(19): siRNA sense strand
gaaaagagcaugguugaac

SEQ ID NO: 611979 - RNA, 19 nt, Homo sapiens
  misc_RNA (1)...(19): siRNA sense strand
guaccagcagcuucagaaa

SEQ ID NO: 611980 - RNA, 19 nt, Homo sapiens
  misc_RNA (1)...(19): siRNA sense strand
gggagugugauuaagcaaa

SEQ ID NO: 611981 - RNA, 19 nt, Homo sapiens
  misc_RNA (1)...(19): siRNA sense strand
gaacagcuggacaaguuuu

SEQ ID NO: 611982 - RNA, 19 nt, Homo sapiens
  misc_RNA (1)...(19): siRNA sense strand
ggaugaagacgaugaugac

SEQ ID NO: 611983 - RNA, 19 nt, Homo sapiens
  misc_RNA (1)...(19): siRNA sense strand
gaugacagugacaaggaaa

SEQ ID NO: 611984 - RNA, 19 nt, Homo sapiens
  misc_RNA (1)...(19): siRNA sense strand
gaggaagugaauauugaau

SEQ ID NO: 611985 - RNA, 19 nt, Homo sapiens
  misc_RNA (1)...(19): siRNA sense strand
caaugaugauauggaugaa

SEQ ID NO: 611986 - RNA, 19 nt, Homo sapiens
  misc_RNA (1)...(19): siRNA sense strand
gcgcgacgaggaagaggaa

SEQ ID NO: 611987 - RNA, 19 nt, Homo sapiens
  misc_RNA (1)...(19): siRNA sense strand
gcaaaugcagaggaagaau

SEQ ID NO: 611988 - RNA, 19 nt, Homo sapiens
  misc_RNA (1)...(19): siRNA sense strand
ugacgaggaagugaauauu

SEQ ID NO: 611989 - RNA, 19 nt, Homo sapiens
  misc_RNA (1)...(19): siRNA sense strand
cgaggaagugaauauugaa

SEQ ID NO: 611990 - RNA, 19 nt, Homo sapiens
  misc_RNA (1)...(19): siRNA sense strand
ugauuaagcaaacggaugu

SEQ ID NO: 611991 - RNA, 19 nt, Homo sapiens
  misc_RNA (1)...(19): siRNA sense strand
gaugauauggaugaagaug

SEQ ID NO: 611992 - RNA, 19 nt, Homo sapiens
  misc_RNA (1)...(19): siRNA sense strand
uaaaggcuccugugaacac

SEQ ID NO: 611993 - RNA, 19 nt, Homo sapiens
  misc_RNA (1)...(19): siRNA sense strand
ucugugagaagaacuguga

SEQ ID NO: 611994 - RNA, 19 nt, Homo sapiens
  misc_RNA (1)...(19): siRNA sense strand
ucucuuaauucaacagaac

SEQ ID NO: 611995 - RNA, 19 nt, Homo sapiens
  misc_RNA (1)...(19): siRNA sense strand
aagaggacgaggucauuga

SEQ ID NO: 611996 - RNA, 19 nt, Homo sapiens
  misc_RNA (1)...(19): siRNA sense strand
cugcguuaauguuugcaaa

SEQ ID NO: 611997 - RNA, 19 nt, Homo sapiens
  misc_RNA (1)...(19): siRNA sense strand
uaguaagacauuuguggaa

SEQ ID NO: 611998 - RNA, 19 nt, Homo sapiens
  misc_RNA (1)...(19): siRNA sense strand
ccagcagcuucagaaagaa

SEQ ID NO: 611999 - RNA, 19 nt, Homo sapiens
  misc_RNA (1)...(19): siRNA sense strand
aagcuuauucccuaucaga

SEQ ID NO: 612000 - RNA, 19 nt, Homo sapiens
  misc_RNA (1)...(19): siRNA sense strand
cuaacagaucucuuaauuc

SEQ ID NO: 612001 - RNA, 19 nt, Homo sapiens
  misc_RNA (1)...(19): siRNA sense strand
gaucucuuaauucaacaga

SEQ ID NO: 612002 - RNA, 19 nt, Homo sapiens
  misc_RNA (1)...(19): siRNA sense strand
aaggguacccaguguguug

SEQ ID NO: 612003 - RNA, 19 nt, Homo sapiens
  misc_RNA (1)...(19): siRNA sense strand
gcagaacuaacagaucucu

SEQ ID NO: 612004 - RNA, 19 nt, Homo sapiens
  misc_RNA (1)...(19): siRNA sense strand
aauaagccaugugggaagu

SEQ ID NO: 612005 - RNA, 19 nt, Homo sapiens
  misc_RNA (1)...(19): siRNA sense strand
cagaaccaauaagccaugu

SEQ ID NO: 612006 - RNA, 19 nt, Homo sapiens
  misc_RNA (1)...(19): siRNA sense strand
ccauguaccagcagcuuca

SEQ ID NO: 612007 - RNA, 19 nt, Homo sapiens
  misc_RNA (1)...(19): siRNA sense strand
aaagaaagcugcguuaaug

SEQ ID NO: 612008 - RNA, 19 nt, Homo sapiens
  misc_RNA (1)...(19): siRNA sense strand
aaagaaaccuagcaacaaa

SEQ ID NO: 612009 - RNA, 19 nt, Homo sapiens
  misc_RNA (1)...(19): siRNA sense strand
gaagacagcaaugaugaua

SEQ ID NO: 612010 - RNA, 19 nt, Homo sapiens
  misc_RNA (1)...(19): siRNA sense strand
gaaagcugcguuaauguuu

SEQ ID NO: 612011 - RNA, 19 nt, Homo sapiens
  misc_RNA (1)...(19): siRNA sense strand
gaacuaacagaucucuuaa

SEQ ID NO: 612012 - RNA, 19 nt, Homo sapiens
  misc_RNA (1)...(19): siRNA sense strand
gcaaugaugauauggauga

SEQ ID NO: 612013 - RNA, 19 nt, Homo sapiens
  misc_RNA (1)...(19): siRNA sense strand
guucuacgcuucugugaga

SEQ ID NO: 612014 - RNA, 19 nt, Homo sapiens
  misc_RNA (1)...(19): siRNA sense strand
agaacuaacagaucucuua

SEQ ID NO: 612015 - RNA, 19 nt, Homo sapiens
  misc_RNA (1)...(19): siRNA sense strand
gagaagaacugugaaaaga

SEQ ID NO: 612016 - RNA, 19 nt, Homo sapiens
  misc_RNA (1)...(19): siRNA sense strand
gaacacugcagaacuaaca

SEQ ID NO: 612017 - RNA, 19 nt, Homo sapiens
  misc_RNA (1)...(19): siRNA sense strand
uugaacagcuggacaaguu

SEQ ID NO: 612018 - RNA, 19 nt, Homo sapiens
  misc_RNA (1)...(19): siRNA sense strand
agacagcaaugaugauaug

SEQ ID NO: 612019 - RNA, 19 nt, Homo sapiens
  misc_RNA (1)...(19): siRNA sense strand
ugugaacacugcagaacua

SEQ ID NO: 612020 - RNA, 19 nt, Homo sapiens
  misc_RNA (1)...(19): siRNA sense strand
gaaaggguacccagugugu

SEQ ID NO: 612021 - RNA, 19 nt, Homo sapiens
  misc_RNA (1)...(19): siRNA sense strand
ugaagacgaugaugacagu

SEQ ID NO: 612022 - RNA, 19 nt, Homo sapiens
  misc_RNA (1)...(19): siRNA sense strand
gauuaugacggaauuaaga

SEQ ID NO: 612023 - RNA, 19 nt, Homo sapiens
  misc_RNA (1)...(19): siRNA sense strand
acgaggaagugaauauuga

SEQ ID NO: 612024 - RNA, 19 nt, Homo sapiens
  misc_RNA (1)...(19): siRNA sense strand
caaaugcagaggaagaauu

SEQ ID NO: 612025 - RNA, 19 nt, Homo sapiens
  misc_RNA (1)...(19): siRNA sense strand
cagaagacagcaaugauga

SEQ ID NO: 612026 - RNA, 19 nt, Homo sapiens
  misc_RNA (1)...(19): siRNA sense strand
cagcaaugaugauauggau

SEQ ID NO: 612027 - RNA, 19 nt, Homo sapiens
  misc_RNA (1)...(19): siRNA sense strand
acagaucucuuaauucaac

SEQ ID NO: 612028 - RNA, 19 nt, Homo sapiens
  misc_RNA (1)...(19): siRNA sense strand
ggagugugauuaagcaaac

SEQ ID NO: 612029 - RNA, 19 nt, Homo sapiens
  misc_RNA (1)...(19): siRNA sense strand
gggcacacagaaccaauaa

SEQ ID NO: 612030 - RNA, 19 nt, Homo sapiens
  misc_RNA (1)...(19): siRNA sense strand
gaagaggacgaggucauug

SEQ ID NO: 612031 - RNA, 19 nt, Homo sapiens
  misc_RNA (1)...(19): siRNA sense strand
gcguuaauguuugcaaaug

SEQ ID NO: 612032 - RNA, 19 nt, Homo sapiens
  misc_RNA (1)...(19): siRNA sense strand
gcacacagaaccaauaagc

SEQ ID NO: 612033 - RNA, 19 nt, Homo sapiens
  misc_RNA (1)...(19): siRNA sense strand
uaaugucccuccacagauc

SEQ ID NO: 612034 - RNA, 19 nt, Homo sapiens
  misc_RNA (1)...(19): siRNA sense strand
cauauugggagugugauua

SEQ ID NO: 612035 - RNA, 19 nt, Homo sapiens
  misc_RNA (1)...(19): siRNA sense strand
ucuaaaggcuccugugaac

SEQ ID NO: 612036 - RNA, 19 nt, Homo sapiens
  misc_RNA (1)...(19): siRNA sense strand
accagcagcuucagaaaga

SEQ ID NO: 612037 - RNA, 19 nt, Homo sapiens
  misc_RNA (1)...(19): siRNA sense strand
ggccuucuccuaagugaaa

SEQ ID NO: 612038 - RNA, 19 nt, Homo sapiens
  misc_RNA (1)...(19): siRNA sense strand
gacgaggaagugaauauug

SEQ ID NO: 612039 - RNA, 19 nt, Homo sapiens
  misc_RNA (1)...(19): siRNA sense strand
aaagcugcguuaauguuug

SEQ ID NO: 612040 - RNA, 19 nt, Homo sapiens
  misc_RNA (1)...(19): siRNA sense strand
ugaagcuuauucccuauca

SEQ ID NO: 612041 - RNA, 19 nt, Homo sapiens
  misc_RNA (1)...(19): siRNA sense strand
aaaugaggaugaagacgau

SEQ ID NO: 612042 - RNA, 19 nt, Homo sapiens
  misc_RNA (1)...(19): siRNA sense strand
cugcagaacuaacagaucu

SEQ ID NO: 612043 - RNA, 19 nt, Homo sapiens
  misc_RNA (1)...(19): siRNA sense strand
agaaagcugcguuaauguu

SEQ ID NO: 612044 - RNA, 19 nt, Homo sapiens
  misc_RNA (1)...(19): siRNA sense strand
ucuccuaagugaaagauuc

SEQ ID NO: 612045 - RNA, 19 nt, Homo sapiens
  misc_RNA (1)...(19): siRNA sense strand
aagaaaggguacccagugu

SEQ ID NO: 612046 - RNA, 19 nt, Homo sapiens
  misc_RNA (1)...(19): siRNA sense strand
ugauauggaugaagaugag

SEQ ID NO: 612047 - RNA, 19 nt, Homo sapiens
  misc_RNA (1)...(19): siRNA sense strand
ucagaagacagcaaugaug

SEQ ID NO: 612048 - RNA, 19 nt, Homo sapiens
  misc_RNA (1)...(19): siRNA sense strand
ugaugacagugacaaggaa

SEQ ID NO: 612049 - RNA, 19 nt, Homo sapiens
  misc_RNA (1)...(19): siRNA sense strand
augaugauauggaugaaga

SEQ ID NO: 612050 - RNA, 19 nt, Homo sapiens
  misc_RNA (1)...(19): siRNA sense strand
ccugugggccuucuccuaa

SEQ ID NO: 612051 - RNA, 19 nt, Homo sapiens
  misc_RNA (1)...(19): siRNA sense strand
agaucgcucugcccaugua

SEQ ID NO: 612052 - RNA, 19 nt, Homo sapiens
  misc_RNA (1)...(19): siRNA sense strand
uaagacauuuguggaagca

SEQ ID NO: 612053 - RNA, 19 nt, Homo sapiens
  misc_RNA (1)...(19): siRNA sense strand
ugaagaggacgaggucauu

SEQ ID NO: 612054 - RNA, 19 nt, Homo sapiens
  misc_RNA (1)...(19): siRNA sense strand
gaaaagagcaugguugaac

SEQ ID NO: 612055 - RNA, 19 nt, Homo sapiens
  misc_RNA (1)...(19): siRNA sense strand
guaccagcagcuucagaaa

SEQ ID NO: 612056 - RNA, 19 nt, Homo sapiens
  misc_RNA (1)...(19): siRNA sense strand
gggagugugauuaagcaaa

SEQ ID NO: 612057 - RNA, 19 nt, Homo sapiens
  misc_RNA (1)...(19): siRNA sense strand
gaacagcuggacaaguuuu

SEQ ID NO: 612058 - RNA, 19 nt, Homo sapiens
  misc_RNA (1)...(19): siRNA sense strand
ggaugaagacgaugaugac

SEQ ID NO: 612059 - RNA, 19 nt, Homo sapiens
  misc_RNA (1)...(19): siRNA sense strand
gaugacagugacaaggaaa

SEQ ID NO: 612060 - RNA, 19 nt, Homo sapiens
  misc_RNA (1)...(19): siRNA sense strand
gaggaagugaauauugaau

SEQ ID NO: 612061 - RNA, 19 nt, Homo sapiens
  misc_RNA (1)...(19): siRNA sense strand
caaugaugauauggaugaa

SEQ ID NO: 612062 - RNA, 19 nt, Homo sapiens
  misc_RNA (1)...(19): siRNA sense strand
gcgcgacgaggaagaggaa

SEQ ID NO: 612063 - RNA, 19 nt, Homo sapiens
  misc_RNA (1)...(19): siRNA sense strand
gcaaaugcagaggaagaau

SEQ ID NO: 612064 - RNA, 19 nt, Homo sapiens
  misc_RNA (1)...(19): siRNA sense strand
ugacgaggaagugaauauu

SEQ ID NO: 612065 - RNA, 19 nt, Homo sapiens
  misc_RNA (1)...(19): siRNA sense strand
cgaggaagugaauauugaa

SEQ ID NO: 612066 - RNA, 19 nt, Homo sapiens
  misc_RNA (1)...(19): siRNA sense strand
ugauuaagcaaacggaugu

SEQ ID NO: 612067 - RNA, 19 nt, Homo sapiens
  misc_RNA (1)...(19): siRNA sense strand
gaugauauggaugaagaug

SEQ ID NO: 612068 - RNA, 19 nt, Homo sapiens
  misc_RNA (1)...(19): siRNA sense strand
uaaaggcuccugugaacac

SEQ ID NO: 612069 - RNA, 19 nt, Homo sapiens
  misc_RNA (1)...(19): siRNA sense strand
ucugugagaagaacuguga

SEQ ID NO: 612070 - RNA, 19 nt, Homo sapiens
  misc_RNA (1)...(19): siRNA sense strand
ucucuuaauucaacagaac

SEQ ID NO: 612071 - RNA, 19 nt, Homo sapiens
  misc_RNA (1)...(19): siRNA sense strand
aagaggacgaggucauuga

SEQ ID NO: 612072 - RNA, 19 nt, Homo sapiens
  misc_RNA (1)...(19): siRNA sense strand
cugcguuaauguuugcaaa

SEQ ID NO: 612073 - RNA, 19 nt, Homo sapiens
  misc_RNA (1)...(19): siRNA sense strand
uaguaagacauuuguggaa

SEQ ID NO: 612074 - RNA, 19 nt, Homo sapiens
  misc_RNA (1)...(19): siRNA sense strand
ccagcagcuucagaaagaa

SEQ ID NO: 612075 - RNA, 19 nt, Homo sapiens
  misc_RNA (1)...(19): siRNA sense strand
aagcuuauucccuaucaga

SEQ ID NO: 612076 - RNA, 19 nt, Homo sapiens
  misc_RNA (1)...(19): siRNA sense strand
cuaacagaucucuuaauuc

SEQ ID NO: 612077 - RNA, 19 nt, Homo sapiens
  misc_RNA (1)...(19): siRNA sense strand
gaucucuuaauucaacaga

SEQ ID NO: 612078 - RNA, 19 nt, Homo sapiens
  misc_RNA (1)...(19): siRNA sense strand
aaggguacccaguguguug

SEQ ID NO: 612079 - RNA, 19 nt, Homo sapiens
  misc_RNA (1)...(19): siRNA sense strand
gcagaacuaacagaucucu

SEQ ID NO: 612080 - RNA, 19 nt, Homo sapiens
  misc_RNA (1)...(19): siRNA sense strand
aauaagccaugugggaagu

SEQ ID NO: 612081 - RNA, 19 nt, Homo sapiens
  misc_RNA (1)...(19): siRNA sense strand
cagaaccaauaagccaugu

SEQ ID NO: 612082 - RNA, 19 nt, Homo sapiens
  misc_RNA (1)...(19): siRNA sense strand
ccauguaccagcagcuuca

SEQ ID NO: 612083 - RNA, 19 nt, Homo sapiens
  misc_RNA (1)...(19): siRNA sense strand
aaagaaagcugcguuaaug

SEQ ID NO: 612084 - RNA, 19 nt, Homo sapiens
  misc_RNA (1)...(19): siRNA sense strand
aaagaaaccuagcaacaaa

SEQ ID NO: 612085 - RNA, 19 nt, Homo sapiens
  misc_RNA (1)...(19): siRNA sense strand
gaagacagcaaugaugaua

SEQ ID NO: 612086 - RNA, 19 nt, Homo sapiens
  misc_RNA (1)...(19): siRNA sense strand
gaaagcugcguuaauguuu

SEQ ID NO: 612087 - RNA, 19 nt, Homo sapiens
  misc_RNA (1)...(19): siRNA sense strand
gaacuaacagaucucuuaa

SEQ ID NO: 612088 - RNA, 19 nt, Homo sapiens
  misc_RNA (1)...(19): siRNA sense strand
gcaaugaugauauggauga

SEQ ID NO: 612089 - RNA, 19 nt, Homo sapiens
  misc_RNA (1)...(19): siRNA sense strand
guucuacgcuucugugaga

SEQ ID NO: 612090 - RNA, 19 nt, Homo sapiens
  misc_RNA (1)...(19): siRNA sense strand
agaacuaacagaucucuua

SEQ ID NO: 612091 - RNA, 19 nt, Homo sapiens
  misc_RNA (1)...(19): siRNA sense strand
gagaagaacugugaaaaga

SEQ ID NO: 612092 - RNA, 19 nt, Homo sapiens
  misc_RNA (1)...(19): siRNA sense strand
gaacacugcagaacuaaca

SEQ ID NO: 612093 - RNA, 19 nt, Homo sapiens
  misc_RNA (1)...(19): siRNA sense strand
uugaacagcuggacaaguu

SEQ ID NO: 612094 - RNA, 19 nt, Homo sapiens
  misc_RNA (1)...(19): siRNA sense strand
agacagcaaugaugauaug

SEQ ID NO: 612095 - RNA, 19 nt, Homo sapiens
  misc_RNA (1)...(19): siRNA sense strand
ugugaacacugcagaacua

SEQ ID NO: 612096 - RNA, 19 nt, Homo sapiens
  misc_RNA (1)...(19): siRNA sense strand
gaaaggguacccagugugu

SEQ ID NO: 612097 - RNA, 19 nt, Homo sapiens
  misc_RNA (1)...(19): siRNA sense strand
ugaagacgaugaugacagu

SEQ ID NO: 612098 - RNA, 19 nt, Homo sapiens
  misc_RNA (1)...(19): siRNA sense strand
gauuaugacggaauuaaga

SEQ ID NO: 612099 - RNA, 19 nt, Homo sapiens
  misc_RNA (1)...(19): siRNA sense strand
acgaggaagugaauauuga

SEQ ID NO: 612100 - RNA, 19 nt, Homo sapiens
  misc_RNA (1)...(19): siRNA sense strand
caaaugcagaggaagaauu

SEQ ID NO: 612101 - RNA, 19 nt, Homo sapiens
  misc_RNA (1)...(19): siRNA sense strand
cagaagacagcaaugauga

SEQ ID NO: 612102 - RNA, 19 nt, Homo sapiens
  misc_RNA (1)...(19): siRNA sense strand
cagcaaugaugauauggau

SEQ ID NO: 612103 - RNA, 19 nt, Homo sapiens
  misc_RNA (1)...(19): siRNA sense strand
acagaucucuuaauucaac

SEQ ID NO: 612104 - RNA, 19 nt, Homo sapiens
  misc_RNA (1)...(19): siRNA sense strand
ggagugugauuaagcaaac

SEQ ID NO: 612105 - RNA, 19 nt, Homo sapiens
  misc_RNA (1)...(19): siRNA sense strand
gggcacacagaaccaauaa

SEQ ID NO: 612106 - RNA, 19 nt, Homo sapiens
  misc_RNA (1)...(19): siRNA sense strand
gaagaggacgaggucauug

SEQ ID NO: 612107 - RNA, 19 nt, Homo sapiens
  misc_RNA (1)...(19): siRNA sense strand
gcguuaauguuugcaaaug

SEQ ID NO: 612108 - RNA, 19 nt, Homo sapiens
  misc_RNA (1)...(19): siRNA sense strand
gcacacagaaccaauaagc

SEQ ID NO: 612109 - RNA, 19 nt, Homo sapiens
  misc_RNA (1)...(19): siRNA sense strand
uaaugucccuccacagauc

SEQ ID NO: 612110 - RNA, 19 nt, Homo sapiens
  misc_RNA (1)...(19): siRNA sense strand
cauauugggagugugauua

SEQ ID NO: 612111 - RNA, 19 nt, Homo sapiens
  misc_RNA (1)...(19): siRNA sense strand
ucuaaaggcuccugugaac

SEQ ID NO: 612112 - RNA, 19 nt, Homo sapiens
  misc_RNA (1)...(19): siRNA sense strand
accagcagcuucagaaaga

SEQ ID NO: 612113 - RNA, 19 nt, Homo sapiens
  misc_RNA (1)...(19): siRNA sense strand
ggccuucuccuaagugaaa

SEQ ID NO: 612114 - RNA, 19 nt, Homo sapiens
  misc_RNA (1)...(19): siRNA sense strand
gacgaggaagugaauauug

SEQ ID NO: 612115 - RNA, 19 nt, Homo sapiens
  misc_RNA (1)...(19): siRNA sense strand
aaagcugcguuaauguuug

SEQ ID NO: 612116 - RNA, 19 nt, Homo sapiens
  misc_RNA (1)...(19): siRNA sense strand
ugaagcuuauucccuauca

SEQ ID NO: 612117 - RNA, 19 nt, Homo sapiens
  misc_RNA (1)...(19): siRNA sense strand
aaaugaggaugaagacgau

SEQ ID NO: 612118 - RNA, 19 nt, Homo sapiens
  misc_RNA (1)...(19): siRNA sense strand
cugcagaacuaacagaucu

SEQ ID NO: 612119 - RNA, 19 nt, Homo sapiens
  misc_RNA (1)...(19): siRNA sense strand
agaaagcugcguuaauguu

SEQ ID NO: 612120 - RNA, 19 nt, Homo sapiens
  misc_RNA (1)...(19): siRNA sense strand
ucuccuaagugaaagauuc

SEQ ID NO: 612121 - RNA, 19 nt, Homo sapiens
  misc_RNA (1)...(19): siRNA sense strand
aagaaaggguacccagugu

SEQ ID NO: 612122 - RNA, 19 nt, Homo sapiens
  misc_RNA (1)...(19): siRNA sense strand
ugauauggaugaagaugag

SEQ ID NO: 612123 - RNA, 19 nt, Homo sapiens
  misc_RNA (1)...(19): siRNA sense strand
ucagaagacagcaaugaug

SEQ ID NO: 612124 - RNA, 19 nt, Homo sapiens
  misc_RNA (1)...(19): siRNA sense strand
ugaugacagugacaaggaa

SEQ ID NO: 612125 - RNA, 19 nt, Homo sapiens
  misc_RNA (1)...(19): siRNA sense strand
augaugauauggaugaaga

SEQ ID NO: 612126 - RNA, 19 nt, Homo sapiens
  misc_RNA (1)...(19): siRNA sense strand
ccugugggccuucuccuaa

SEQ ID NO: 612127 - RNA, 19 nt, Homo sapiens
  misc_RNA (1)...(19): siRNA sense strand
agaucgcucugcccaugua

SEQ ID NO: 612128 - RNA, 19 nt, Homo sapiens
  misc_RNA (1)...(19): siRNA sense strand
uaagacauuuguggaagca

SEQ ID NO: 612129 - RNA, 19 nt, Homo sapiens
  misc_RNA (1)...(19): siRNA sense strand
ugaagaggacgaggucauu

SEQ ID NO: 612130 - RNA, 19 nt, Homo sapiens
  misc_RNA (1)...(19): siRNA sense strand
gaaaagagcaugguugaac

SEQ ID NO: 612131 - RNA, 19 nt, Homo sapiens
  misc_RNA (1)...(19): siRNA sense strand
guaccagcagcuucagaaa

SEQ ID NO: 612132 - RNA, 19 nt, Homo sapiens
  misc_RNA (1)...(19): siRNA sense strand
gggagugugauuaagcaaa

SEQ ID NO: 612133 - RNA, 19 nt, Homo sapiens
  misc_RNA (1)...(19): siRNA sense strand
gaacagcuggacaaguuuu

SEQ ID NO: 612134 - RNA, 19 nt, Homo sapiens
  misc_RNA (1)...(19): siRNA sense strand
ggaugaagacgaugaugac

SEQ ID NO: 612135 - RNA, 19 nt, Homo sapiens
  misc_RNA (1)...(19): siRNA sense strand
gaugacagugacaaggaaa

SEQ ID NO: 612136 - RNA, 19 nt, Homo sapiens
  misc_RNA (1)...(19): siRNA sense strand
gaggaagugaauauugaau

SEQ ID NO: 612137 - RNA, 19 nt, Homo sapiens
  misc_RNA (1)...(19): siRNA sense strand
caaugaugauauggaugaa

SEQ ID NO: 612138 - RNA, 19 nt, Homo sapiens
  misc_RNA (1)...(19): siRNA sense strand
gcgcgacgaggaagaggaa

SEQ ID NO: 612139 - RNA, 19 nt, Homo sapiens
  misc_RNA (1)...(19): siRNA sense strand
gcaaaugcagaggaagaau

SEQ ID NO: 612140 - RNA, 19 nt, Homo sapiens
  misc_RNA (1)...(19): siRNA sense strand
ugacgaggaagugaauauu

SEQ ID NO: 612141 - RNA, 19 nt, Homo sapiens
  misc_RNA (1)...(19): siRNA sense strand
cgaggaagugaauauugaa

SEQ ID NO: 612142 - RNA, 19 nt, Homo sapiens
  misc_RNA (1)...(19): siRNA sense strand
ugauuaagcaaacggaugu

SEQ ID NO: 612143 - RNA, 19 nt, Homo sapiens
  misc_RNA (1)...(19): siRNA sense strand
gaugauauggaugaagaug

SEQ ID NO: 612144 - RNA, 19 nt, Homo sapiens
  misc_RNA (1)...(19): siRNA sense strand
uaaaggcuccugugaacac

SEQ ID NO: 612145 - RNA, 19 nt, Homo sapiens
  misc_RNA (1)...(19): siRNA sense strand
ucugugagaagaacuguga

SEQ ID NO: 612146 - RNA, 19 nt, Homo sapiens
  misc_RNA (1)...(19): siRNA sense strand
ucucuuaauucaacagaac

SEQ ID NO: 612147 - RNA, 19 nt, Homo sapiens
  misc_RNA (1)...(19): siRNA sense strand
aagaggacgaggucauuga

SEQ ID NO: 612148 - RNA, 19 nt, Homo sapiens
  misc_RNA (1)...(19): siRNA sense strand
cugcguuaauguuugcaaa

SEQ ID NO: 612149 - RNA, 19 nt, Homo sapiens
  misc_RNA (1)...(19): siRNA sense strand
uaguaagacauuuguggaa

SEQ ID NO: 612150 - RNA, 19 nt, Homo sapiens
  misc_RNA (1)...(19): siRNA sense strand
ccagcagcuucagaaagaa

SEQ ID NO: 612151 - RNA, 19 nt, Homo sapiens
  misc_RNA (1)...(19): siRNA sense strand
aagcuuauucccuaucaga

SEQ ID NO: 612152 - RNA, 19 nt, Homo sapiens
  misc_RNA (1)...(19): siRNA sense strand
cuaacagaucucuuaauuc

SEQ ID NO: 612153 - RNA, 19 nt, Homo sapiens
  misc_RNA (1)...(19): siRNA sense strand
gaucucuuaauucaacaga

SEQ ID NO: 612154 - RNA, 19 nt, Homo sapiens
  misc_RNA (1)...(19): siRNA sense strand
aaggguacccaguguguug

SEQ ID NO: 612155 - RNA, 19 nt, Homo sapiens
  misc_RNA (1)...(19): siRNA sense strand
gcagaacuaacagaucucu

SEQ ID NO: 612156 - RNA, 19 nt, Homo sapiens
  misc_RNA (1)...(19): siRNA sense strand
aauaagccaugugggaagu

SEQ ID NO: 612157 - RNA, 19 nt, Homo sapiens
  misc_RNA (1)...(19): siRNA sense strand
cagaaccaauaagccaugu

SEQ ID NO: 612158 - RNA, 19 nt, Homo sapiens
  misc_RNA (1)...(19): siRNA sense strand
ccauguaccagcagcuuca

SEQ ID NO: 612159 - RNA, 19 nt, Homo sapiens
  misc_RNA (1)...(19): siRNA sense strand
ugucagaacucaauuacga

SEQ ID NO: 612160 - RNA, 19 nt, Homo sapiens
  misc_RNA (1)...(19): siRNA sense strand
gcugggcuauaaucuauga

SEQ ID NO: 612161 - RNA, 19 nt, Homo sapiens
  misc_RNA (1)...(19): siRNA sense strand
gcuauaaucuaugaaacug

SEQ ID NO: 612162 - RNA, 19 nt, Homo sapiens
  misc_RNA (1)...(19): siRNA sense strand
acgcugggcuauaaucuau

SEQ ID NO: 612163 - RNA, 19 nt, Homo sapiens
  misc_RNA (1)...(19): siRNA sense strand
agagccagccaaucacuua

SEQ ID NO: 612164 - RNA, 19 nt, Homo sapiens
  misc_RNA (1)...(19): siRNA sense strand
ucaauuacgacuacauaug

SEQ ID NO: 612165 - RNA, 19 nt, Homo sapiens
  misc_RNA (1)...(19): siRNA sense strand
gaacucaauuacgacuaca

SEQ ID NO: 612166 - RNA, 19 nt, Homo sapiens
  misc_RNA (1)...(19): siRNA sense strand
gacuacauaugcauuaagg

SEQ ID NO: 612167 - RNA, 19 nt, Homo sapiens
  misc_RNA (1)...(19): siRNA sense strand
caaugucagcuauuuagga

SEQ ID NO: 612168 - RNA, 19 nt, Homo sapiens
  misc_RNA (1)...(19): siRNA sense strand
caauuacgacuacauaugc

SEQ ID NO: 612169 - RNA, 19 nt, Homo sapiens
  misc_RNA (1)...(19): siRNA sense strand
cucguacgcugggcuauaa

SEQ ID NO: 612170 - RNA, 19 nt, Homo sapiens
  misc_RNA (1)...(19): siRNA sense strand
cauccaaggccgugucaga

SEQ ID NO: 612171 - RNA, 19 nt, Homo sapiens
  misc_RNA (1)...(19): siRNA sense strand
ccaaggccgugucagaacu

SEQ ID NO: 612172 - RNA, 19 nt, Homo sapiens
  misc_RNA (1)...(19): siRNA sense strand
gggcuauaaucuaugaaac

SEQ ID NO: 612173 - RNA, 19 nt, Homo sapiens
  misc_RNA (1)...(19): siRNA sense strand
agaacucaauuacgacuac

SEQ ID NO: 612174 - RNA, 19 nt, Homo sapiens
  misc_RNA (1)...(19): siRNA sense strand
caggguacgccaacuauag

SEQ ID NO: 612175 - RNA, 19 nt, Homo sapiens
  misc_RNA (1)...(19): siRNA sense strand
acucaauuacgacuacaua

SEQ ID NO: 612176 - RNA, 19 nt, Homo sapiens
  misc_RNA (1)...(19): siRNA sense strand
cuauaggacucgugcuucu

SEQ ID NO: 612177 - RNA, 19 nt, Homo sapiens
  misc_RNA (1)...(19): siRNA sense strand
cuccagagccagccaauca

SEQ ID NO: 612178 - RNA, 19 nt, Homo sapiens
  misc_RNA (1)...(19): siRNA sense strand
uacgacuacauaugcauua

SEQ ID NO: 612179 - RNA, 19 nt, Homo sapiens
  misc_RNA (1)...(19): siRNA sense strand
ucaggguacgccaacuaua

SEQ ID NO: 612180 - RNA, 19 nt, Homo sapiens
  misc_RNA (1)...(19): siRNA sense strand
acgacuacauaugcauuaa

SEQ ID NO: 612181 - RNA, 19 nt, Homo sapiens
  misc_RNA (1)...(19): siRNA sense strand
ccucaggguacgccaacua

SEQ ID NO: 612182 - RNA, 19 nt, Homo sapiens
  misc_RNA (1)...(19): siRNA sense strand
gaagaaagauuccaaaaug

SEQ ID NO: 612183 - RNA, 19 nt, Homo sapiens
  misc_RNA (1)...(19): siRNA sense strand
gcauagagaucgccaacaa

SEQ ID NO: 612184 - RNA, 19 nt, Homo sapiens
  misc_RNA (1)...(19): siRNA sense strand
ggauuggacuuaagcauca

SEQ ID NO: 612185 - RNA, 19 nt, Homo sapiens
  misc_RNA (1)...(19): siRNA sense strand
ccuauaacaugcaaacuug

SEQ ID NO: 612186 - RNA, 19 nt, Homo sapiens
  misc_RNA (1)...(19): siRNA sense strand
ccaauaucccugccuauaa

SEQ ID NO: 612187 - RNA, 19 nt, Homo sapiens
  misc_RNA (1)...(19): siRNA sense strand
guagccaauucauucuaua

SEQ ID NO: 612188 - RNA, 19 nt, Homo sapiens
  misc_RNA (1)...(19): siRNA sense strand
caauaucccugccuauaac

SEQ ID NO: 612189 - RNA, 19 nt, Homo sapiens
  misc_RNA (1)...(19): siRNA sense strand
cuacguagccaauucauuc

SEQ ID NO: 612190 - RNA, 19 nt, Homo sapiens
  misc_RNA (1)...(19): siRNA sense strand
gcaaacuugugggaacuau

SEQ ID NO: 612191 - RNA, 19 nt, Homo sapiens
  misc_RNA (1)...(19): siRNA sense strand
ccaauucauucuauaagca

SEQ ID NO: 612192 - RNA, 19 nt, Homo sapiens
  misc_RNA (1)...(19): siRNA sense strand
ggacuuaagcaucacuuuc

SEQ ID NO: 612193 - RNA, 19 nt, Homo sapiens
  misc_RNA (1)...(19): siRNA sense strand
gcuccuacguagccaauuc

SEQ ID NO: 612194 - RNA, 19 nt, Homo sapiens
  misc_RNA (1)...(19): siRNA sense strand
ggaugaaguggaagaaaga

SEQ ID NO: 612195 - RNA, 19 nt, Homo sapiens
  misc_RNA (1)...(19): siRNA sense strand
ugaccaaacugcacaugag

SEQ ID NO: 612196 - RNA, 19 nt, Homo sapiens
  misc_RNA (1)...(19): siRNA sense strand
guacugcuacggcggauug

SEQ ID NO: 612197 - RNA, 19 nt, Homo sapiens
  misc_RNA (1)...(19): siRNA sense strand
ggaacucgagaaagaauuc

SEQ ID NO: 612198 - RNA, 19 nt, Homo sapiens
  misc_RNA (1)...(19): siRNA sense strand
agagaucgccaacaacuug

SEQ ID NO: 612199 - RNA, 19 nt, Homo sapiens
  misc_RNA (1)...(19): siRNA sense strand
cgaagcggcuccucugaac

SEQ ID NO: 612200 - RNA, 19 nt, Homo sapiens
  misc_RNA (1)...(19): siRNA sense strand
cguagccaauucauucuau

SEQ ID NO: 612201 - RNA, 19 nt, Homo sapiens
  misc_RNA (1)...(19): siRNA sense strand
ugaaguggaagaaagauuc

SEQ ID NO: 612202 - RNA, 19 nt, Homo sapiens
  misc_RNA (1)...(19): siRNA sense strand
cccaauaucccugccuaua

SEQ ID NO: 612203 - RNA, 19 nt, Homo sapiens
  misc_RNA (1)...(19): siRNA sense strand
cagauuuacccguggauga

SEQ ID NO: 612204 - RNA, 19 nt, Homo sapiens
  misc_RNA (1)...(19): siRNA sense strand
cuacggcggauuggacuua

SEQ ID NO: 612205 - RNA, 19 nt, Homo sapiens
  misc_RNA (1)...(19): siRNA sense strand
gccuauaacaugcaaacuu

SEQ ID NO: 612206 - RNA, 19 nt, Homo sapiens
  misc_RNA (1)...(19): siRNA sense strand
ucaaugagagacagaucaa

SEQ ID NO: 612207 - RNA, 19 nt, Homo sapiens
  misc_RNA (1)...(19): siRNA sense strand
aaugagagacagaucaaga

SEQ ID NO: 612208 - RNA, 19 nt, Homo sapiens
  misc_RNA (1)...(19): siRNA sense strand
gccaauucauucuauaagc

SEQ ID NO: 612209 - RNA, 19 nt, Homo sapiens
  misc_RNA (1)...(19): siRNA sense strand
aggaugaaguggaagaaag

SEQ ID NO: 612210 - RNA, 19 nt, Homo sapiens
  misc_RNA (1)...(19): siRNA sense strand
cucuggaacucgagaaaga

SEQ ID NO: 612211 - RNA, 19 nt, Homo sapiens
  misc_RNA (1)...(19): siRNA sense strand
uuccagaaccgcaggauga

SEQ ID NO: 612212 - RNA, 19 nt, Homo sapiens
  misc_RNA (1)...(19): siRNA sense strand
gcaggaugaaguggaagaa

SEQ ID NO: 612213 - RNA, 19 nt, Homo sapiens
  misc_RNA (1)...(19): siRNA sense strand
aaacuugugggaacuaugg

SEQ ID NO: 612214 - RNA, 19 nt, Homo sapiens
  misc_RNA (1)...(19): siRNA sense strand
gacgaagcggcuccucuga

SEQ ID NO: 612215 - RNA, 19 nt, Homo sapiens
  misc_RNA (1)...(19): siRNA sense strand
cagaaccgcaggaugaagu

SEQ ID NO: 612216 - RNA, 19 nt, Homo sapiens
  misc_RNA (1)...(19): siRNA sense strand
uauaacaugcaaacuugug

SEQ ID NO: 612217 - RNA, 19 nt, Homo sapiens
  misc_RNA (1)...(19): siRNA sense strand
cagcagaggcucaucuuug

SEQ ID NO: 612218 - RNA, 19 nt, Homo sapiens
  misc_RNA (1)...(19): siRNA sense strand
cagcagaggcucaucuuug

SEQ ID NO: 612219 - RNA, 19 nt, Homo sapiens
  misc_RNA (1)...(19): siRNA sense strand
cagcagaggcucaucuuug

SEQ ID NO: 612220 - RNA, 19 nt, Homo sapiens
  misc_RNA (1)...(19): siRNA sense strand
guaugcagaucuucgugaa

SEQ ID NO: 612221 - RNA, 19 nt, Homo sapiens
  misc_RNA (1)...(19): siRNA sense strand
guaugcagaucuucgugaa

SEQ ID NO: 612222 - RNA, 19 nt, Homo sapiens
  misc_RNA (1)...(19): siRNA sense strand
gaggugguaugcagaucuu

SEQ ID NO: 612223 - RNA, 19 nt, Homo sapiens
  misc_RNA (1)...(19): siRNA sense strand
gaggugguaugcagaucuu

SEQ ID NO: 612224 - RNA, 19 nt, Homo sapiens
  misc_RNA (1)...(19): siRNA sense strand
acuacaacauccagaagga

SEQ ID NO: 612225 - RNA, 19 nt, Homo sapiens
  misc_RNA (1)...(19): siRNA sense strand
caccugguccugcgucuga

SEQ ID NO: 612226 - RNA, 19 nt, Homo sapiens
  misc_RNA (1)...(19): siRNA sense strand
caccugguccugcgucuga

SEQ ID NO: 612227 - RNA, 19 nt, Homo sapiens
  misc_RNA (1)...(19): siRNA sense strand
caggcaagcagcuggaaga

SEQ ID NO: 612228 - RNA, 19 nt, Homo sapiens
  misc_RNA (1)...(19): siRNA sense strand
caggcaagcagcuggaaga

SEQ ID NO: 612229 - RNA, 19 nt, Homo sapiens
  misc_RNA (1)...(19): siRNA sense strand
caggcaagcagcuggaaga

SEQ ID NO: 612230 - RNA, 19 nt, Homo sapiens
  misc_RNA (1)...(19): siRNA sense strand
gagaggugguaugcagauc

SEQ ID NO: 612231 - RNA, 19 nt, Homo sapiens
  misc_RNA (1)...(19): siRNA sense strand
gagaggugguaugcagauc

SEQ ID NO: 612232 - RNA, 19 nt, Homo sapiens
  misc_RNA (1)...(19): siRNA sense strand
ccagcagaggcucaucuuu

SEQ ID NO: 612233 - RNA, 19 nt, Homo sapiens
  misc_RNA (1)...(19): siRNA sense strand
ccagcagaggcucaucuuu

SEQ ID NO: 612234 - RNA, 19 nt, Homo sapiens
  misc_RNA (1)...(19): siRNA sense strand
ccagcagaggcucaucuuu

SEQ ID NO: 612235 - RNA, 19 nt, Homo sapiens
  misc_RNA (1)...(19): siRNA sense strand
ggaagugccugaagacgua

SEQ ID NO: 612236 - RNA, 19 nt, Homo sapiens
  misc_RNA (1)...(19): siRNA sense strand
cgaaagagauuguacagaa

SEQ ID NO: 612237 - RNA, 19 nt, Homo sapiens
  misc_RNA (1)...(19): siRNA sense strand
gaaagagauuguacagaaa

SEQ ID NO: 612238 - RNA, 19 nt, Homo sapiens
  misc_RNA (1)...(19): siRNA sense strand
gagaguggcuggcaaguuc

SEQ ID NO: 612239 - RNA, 19 nt, Homo sapiens
  misc_RNA (1)...(19): siRNA sense strand
gauggauccuugauaguuu

SEQ ID NO: 612240 - RNA, 19 nt, Homo sapiens
  misc_RNA (1)...(19): siRNA sense strand
gcaaguucaucugcugaua

SEQ ID NO: 612241 - RNA, 19 nt, Homo sapiens
  misc_RNA (1)...(19): siRNA sense strand
ccacacagaugucgugauc

SEQ ID NO: 612242 - RNA, 19 nt, Homo sapiens
  misc_RNA (1)...(19): siRNA sense strand
gacaaaaccuugaagauau

SEQ ID NO: 612243 - RNA, 19 nt, Homo sapiens
  misc_RNA (1)...(19): siRNA sense strand
gaagggacacaguaauuau

SEQ ID NO: 612244 - RNA, 19 nt, Homo sapiens
  misc_RNA (1)...(19): siRNA sense strand
gauucuaaccuucuuguuu

SEQ ID NO: 612245 - RNA, 19 nt, Homo sapiens
  misc_RNA (1)...(19): siRNA sense strand
gacgaaagcgugaggauau

SEQ ID NO: 612246 - RNA, 19 nt, Homo sapiens
  misc_RNA (1)...(19): siRNA sense strand
ugaagggacacaguaauua

SEQ ID NO: 612247 - RNA, 19 nt, Homo sapiens
  misc_RNA (1)...(19): siRNA sense strand
gaggauaugggaugugaaa

SEQ ID NO: 612248 - RNA, 19 nt, Homo sapiens
  misc_RNA (1)...(19): siRNA sense strand
gccacaagaaugagaaaua

SEQ ID NO: 612249 - RNA, 19 nt, Homo sapiens
  misc_RNA (1)...(19): siRNA sense strand
gaaugagaaauacugcaua

SEQ ID NO: 612250 - RNA, 19 nt, Homo sapiens
  misc_RNA (1)...(19): siRNA sense strand
ccacaagaaugagaaauac

SEQ ID NO: 612251 - RNA, 19 nt, Homo sapiens
  misc_RNA (1)...(19): siRNA sense strand
cagaggauaaccuuguuua

SEQ ID NO: 612252 - RNA, 19 nt, Homo sapiens
  misc_RNA (1)...(19): siRNA sense strand
ggauaaccuuguuuacauc

SEQ ID NO: 612253 - RNA, 19 nt, Homo sapiens
  misc_RNA (1)...(19): siRNA sense strand
gccaaacuaugcucuaaag

SEQ ID NO: 612254 - RNA, 19 nt, Homo sapiens
  misc_RNA (1)...(19): siRNA sense strand
guggaagagugacugcuaa

SEQ ID NO: 612255 - RNA, 19 nt, Homo sapiens
  misc_RNA (1)...(19): siRNA sense strand
ggugggaaguggauugugu

SEQ ID NO: 612256 - RNA, 19 nt, Homo sapiens
  misc_RNA (1)...(19): siRNA sense strand
caauuaaacuguggaagag

SEQ ID NO: 612257 - RNA, 19 nt, Homo sapiens
  misc_RNA (1)...(19): siRNA sense strand
caaguucaucugcugauaa

SEQ ID NO: 612258 - RNA, 19 nt, Homo sapiens
  misc_RNA (1)...(19): siRNA sense strand
gugaggauaugggauguga

SEQ ID NO: 612259 - RNA, 19 nt, Homo sapiens
  misc_RNA (1)...(19): siRNA sense strand
gaggauaaccuuguuuaca

SEQ ID NO: 612260 - RNA, 19 nt, Homo sapiens
  misc_RNA (1)...(19): siRNA sense strand
cuacaccugugaagccaaa

SEQ ID NO: 612261 - RNA, 19 nt, Homo sapiens
  misc_RNA (1)...(19): siRNA sense strand
acaauuaaacuguggaaga

SEQ ID NO: 612262 - RNA, 19 nt, Homo sapiens
  misc_RNA (1)...(19): siRNA sense strand
aggauaaccuuguuuacau

SEQ ID NO: 612263 - RNA, 19 nt, Homo sapiens
  misc_RNA (1)...(19): siRNA sense strand
cgugauggauccuugauag

SEQ ID NO: 612264 - RNA, 19 nt, Homo sapiens
  misc_RNA (1)...(19): siRNA sense strand
acagggaagugccucaaga

SEQ ID NO: 612265 - RNA, 19 nt, Homo sapiens
  misc_RNA (1)...(19): siRNA sense strand
gaaacuacaaggccacaca

SEQ ID NO: 612266 - RNA, 19 nt, Homo sapiens
  misc_RNA (1)...(19): siRNA sense strand
gcucagaggauaaccuugu

SEQ ID NO: 612267 - RNA, 19 nt, Homo sapiens
  misc_RNA (1)...(19): siRNA sense strand
gaagccaaacuaugcucua

SEQ ID NO: 612268 - RNA, 19 nt, Homo sapiens
  misc_RNA (1)...(19): siRNA sense strand
aaguucaucugcugauaaa

SEQ ID NO: 612269 - RNA, 19 nt, Homo sapiens
  misc_RNA (1)...(19): siRNA sense strand
cuacaaggccacacagaug

SEQ ID NO: 612270 - RNA, 19 nt, Homo sapiens
  misc_RNA (1)...(19): siRNA sense strand
gcaguguccuccgugaaau

SEQ ID NO: 612271 - RNA, 19 nt, Homo sapiens
  misc_RNA (1)...(19): siRNA sense strand
cugcauauuugccaauuuc

SEQ ID NO: 612272 - RNA, 19 nt, Homo sapiens
  misc_RNA (1)...(19): siRNA sense strand
ugacaaaaccuugaagaua

SEQ ID NO: 612273 - RNA, 19 nt, Homo sapiens
  misc_RNA (1)...(19): siRNA sense strand
acacuggccacaagaauga

SEQ ID NO: 612274 - RNA, 19 nt, Homo sapiens
  misc_RNA (1)...(19): siRNA sense strand
gcuagaaaaugacaaaaca

SEQ ID NO: 612275 - RNA, 19 nt, Homo sapiens
  misc_RNA (1)...(19): siRNA sense strand
aagccaaacuaugcucuaa

SEQ ID NO: 612276 - RNA, 19 nt, Homo sapiens
  misc_RNA (1)...(19): siRNA sense strand
gacguacacuggccacaag

SEQ ID NO: 612277 - RNA, 19 nt, Homo sapiens
  misc_RNA (1)...(19): siRNA sense strand
gucgugaucucaacagcuu

SEQ ID NO: 612278 - RNA, 19 nt, Homo sapiens
  misc_RNA (1)...(19): siRNA sense strand
ggucacaagcugggaauau

SEQ ID NO: 612279 - RNA, 19 nt, Homo sapiens
  misc_RNA (1)...(19): siRNA sense strand
ugacgaaagcgugaggaua

SEQ ID NO: 612280 - RNA, 19 nt, Homo sapiens
  misc_RNA (1)...(19): siRNA sense strand
auucuaaccuucuuguuuc

SEQ ID NO: 612281 - RNA, 19 nt, Homo sapiens
  misc_RNA (1)...(19): siRNA sense strand
uagcuaugauggucucugu

SEQ ID NO: 612282 - RNA, 19 nt, Homo sapiens
  misc_RNA (1)...(19): siRNA sense strand
gaugggaaauuugagaaaa

SEQ ID NO: 612283 - RNA, 19 nt, Homo sapiens
  misc_RNA (1)...(19): siRNA sense strand
ggagaguggcuggcaaguu

SEQ ID NO: 612284 - RNA, 19 nt, Homo sapiens
  misc_RNA (1)...(19): siRNA sense strand
cguaugaugggaaauuuga

SEQ ID NO: 612285 - RNA, 19 nt, Homo sapiens
  misc_RNA (1)...(19): siRNA sense strand
gcuugucacccaacagaaa

SEQ ID NO: 612286 - RNA, 19 nt, Homo sapiens
  misc_RNA (1)...(19): siRNA sense strand
gcgcguaugaugggaaauu

SEQ ID NO: 612287 - RNA, 19 nt, Homo sapiens
  misc_RNA (1)...(19): siRNA sense strand
guagccuggucgucagauu

SEQ ID NO: 612288 - RNA, 19 nt, Homo sapiens
  misc_RNA (1)...(19): siRNA sense strand
gccaauuucucuguuacug

SEQ ID NO: 612289 - RNA, 19 nt, Homo sapiens
  misc_RNA (1)...(19): siRNA sense strand
guacacuggccacaagaau

SEQ ID NO: 612290 - RNA, 19 nt, Homo sapiens
  misc_RNA (1)...(19): siRNA sense strand
ugauggauccuugauaguu

SEQ ID NO: 612291 - RNA, 19 nt, Homo sapiens
  misc_RNA (1)...(19): siRNA sense strand
gucacaagcugggaauauc

SEQ ID NO: 612292 - RNA, 19 nt, Homo sapiens
  misc_RNA (1)...(19): siRNA sense strand
gauaugggaugugaaaaca

SEQ ID NO: 612293 - RNA, 19 nt, Homo sapiens
  misc_RNA (1)...(19): siRNA sense strand
ucaggauccuuugacgaaa

SEQ ID NO: 612294 - RNA, 19 nt, Homo sapiens
  misc_RNA (1)...(19): siRNA sense strand
cugaagggacacaguaauu

SEQ ID NO: 612295 - RNA, 19 nt, Homo sapiens
  misc_RNA (1)...(19): siRNA sense strand
gucgucagauucuaaccuu

SEQ ID NO: 612296 - RNA, 19 nt, Homo sapiens
  misc_RNA (1)...(19): siRNA sense strand
ggaaccuucagacgaaaga

SEQ ID NO: 612297 - RNA, 19 nt, Homo sapiens
  misc_RNA (1)...(19): siRNA sense strand
gcugggaauauccgaugua

SEQ ID NO: 612298 - RNA, 19 nt, Homo sapiens
  misc_RNA (1)...(19): siRNA sense strand
gagauuguacagaaacuac

SEQ ID NO: 612299 - RNA, 19 nt, Homo sapiens
  misc_RNA (1)...(19): siRNA sense strand
acaagaaugagaaauacug

SEQ ID NO: 612300 - RNA, 19 nt, Homo sapiens
  misc_RNA (1)...(19): siRNA sense strand
cagcuugucacccaacaga

SEQ ID NO: 612301 - RNA, 19 nt, Homo sapiens
  misc_RNA (1)...(19): siRNA sense strand
uuugccaauuucucuguua

SEQ ID NO: 612302 - RNA, 19 nt, Homo sapiens
  misc_RNA (1)...(19): siRNA sense strand
cgcguaugaugggaaauuu

SEQ ID NO: 612303 - RNA, 19 nt, Homo sapiens
  misc_RNA (1)...(19): siRNA sense strand
guucaucugcugauaaacu

SEQ ID NO: 612304 - RNA, 19 nt, Homo sapiens
  misc_RNA (1)...(19): siRNA sense strand
gcaagccuacaccugugaa

SEQ ID NO: 612305 - RNA, 19 nt, Homo sapiens
  misc_RNA (1)...(19): siRNA sense strand
guccaaccuuauugucuca

SEQ ID NO: 612306 - RNA, 19 nt, Homo sapiens
  misc_RNA (1)...(19): siRNA sense strand
cauauuugccaauuucucu

SEQ ID NO: 612307 - RNA, 19 nt, Homo sapiens
  misc_RNA (1)...(19): siRNA sense strand
ucagaggauaaccuuguuu

SEQ ID NO: 612308 - RNA, 19 nt, Homo sapiens
  misc_RNA (1)...(19): siRNA sense strand
cugcugcgcuagaaaauga

SEQ ID NO: 612309 - RNA, 19 nt, Homo sapiens
  misc_RNA (1)...(19): siRNA sense strand
acaaaaccuugaagauaug

SEQ ID NO: 612310 - RNA, 19 nt, Homo sapiens
  misc_RNA (1)...(19): siRNA sense strand
uaugaugggaaauuugaga

SEQ ID NO: 612311 - RNA, 19 nt, Homo sapiens
  misc_RNA (1)...(19): siRNA sense strand
gauaaccuuguuuacaucu

SEQ ID NO: 612312 - RNA, 19 nt, Homo sapiens
  misc_RNA (1)...(19): siRNA sense strand
cucaggauccuuugacgaa

SEQ ID NO: 612313 - RNA, 19 nt, Homo sapiens
  misc_RNA (1)...(19): siRNA sense strand
ggaagugccugaagacgua

SEQ ID NO: 612314 - RNA, 19 nt, Homo sapiens
  misc_RNA (1)...(19): siRNA sense strand
cgaaagagauuguacagaa

SEQ ID NO: 612315 - RNA, 19 nt, Homo sapiens
  misc_RNA (1)...(19): siRNA sense strand
gaaagagauuguacagaaa

SEQ ID NO: 612316 - RNA, 19 nt, Homo sapiens
  misc_RNA (1)...(19): siRNA sense strand
gagaguggcuggcaaguuc

SEQ ID NO: 612317 - RNA, 19 nt, Homo sapiens
  misc_RNA (1)...(19): siRNA sense strand
gauggauccuugauaguuu

SEQ ID NO: 612318 - RNA, 19 nt, Homo sapiens
  misc_RNA (1)...(19): siRNA sense strand
gcaaguucaucugcugaua

SEQ ID NO: 612319 - RNA, 19 nt, Homo sapiens
  misc_RNA (1)...(19): siRNA sense strand
ccacacagaugucgugauc

SEQ ID NO: 612320 - RNA, 19 nt, Homo sapiens
  misc_RNA (1)...(19): siRNA sense strand
gacaaaaccuugaagauau

SEQ ID NO: 612321 - RNA, 19 nt, Homo sapiens
  misc_RNA (1)...(19): siRNA sense strand
gaagggacacaguaauuau

SEQ ID NO: 612322 - RNA, 19 nt, Homo sapiens
  misc_RNA (1)...(19): siRNA sense strand
gauucuaaccuucuuguuu

SEQ ID NO: 612323 - RNA, 19 nt, Homo sapiens
  misc_RNA (1)...(19): siRNA sense strand
gacgaaagcgugaggauau

SEQ ID NO: 612324 - RNA, 19 nt, Homo sapiens
  misc_RNA (1)...(19): siRNA sense strand
ugaagggacacaguaauua

SEQ ID NO: 612325 - RNA, 19 nt, Homo sapiens
  misc_RNA (1)...(19): siRNA sense strand
gaggauaugggaugugaaa

SEQ ID NO: 612326 - RNA, 19 nt, Homo sapiens
  misc_RNA (1)...(19): siRNA sense strand
gccacaagaaugagaaaua

SEQ ID NO: 612327 - RNA, 19 nt, Homo sapiens
  misc_RNA (1)...(19): siRNA sense strand
gaaugagaaauacugcaua

SEQ ID NO: 612328 - RNA, 19 nt, Homo sapiens
  misc_RNA (1)...(19): siRNA sense strand
ccacaagaaugagaaauac

SEQ ID NO: 612329 - RNA, 19 nt, Homo sapiens
  misc_RNA (1)...(19): siRNA sense strand
cagaggauaaccuuguuua

SEQ ID NO: 612330 - RNA, 19 nt, Homo sapiens
  misc_RNA (1)...(19): siRNA sense strand
ggauaaccuuguuuacauc

SEQ ID NO: 612331 - RNA, 19 nt, Homo sapiens
  misc_RNA (1)...(19): siRNA sense strand
gccaaacuaugcucuaaag

SEQ ID NO: 612332 - RNA, 19 nt, Homo sapiens
  misc_RNA (1)...(19): siRNA sense strand
guggaagagugacugcuaa

SEQ ID NO: 612333 - RNA, 19 nt, Homo sapiens
  misc_RNA (1)...(19): siRNA sense strand
ggugggaaguggauugugu

SEQ ID NO: 612334 - RNA, 19 nt, Homo sapiens
  misc_RNA (1)...(19): siRNA sense strand
caauuaaacuguggaagag

SEQ ID NO: 612335 - RNA, 19 nt, Homo sapiens
  misc_RNA (1)...(19): siRNA sense strand
caaguucaucugcugauaa

SEQ ID NO: 612336 - RNA, 19 nt, Homo sapiens
  misc_RNA (1)...(19): siRNA sense strand
gugaggauaugggauguga

SEQ ID NO: 612337 - RNA, 19 nt, Homo sapiens
  misc_RNA (1)...(19): siRNA sense strand
gaggauaaccuuguuuaca

SEQ ID NO: 612338 - RNA, 19 nt, Homo sapiens
  misc_RNA (1)...(19): siRNA sense strand
cuacaccugugaagccaaa

SEQ ID NO: 612339 - RNA, 19 nt, Homo sapiens
  misc_RNA (1)...(19): siRNA sense strand
acaauuaaacuguggaaga

SEQ ID NO: 612340 - RNA, 19 nt, Homo sapiens
  misc_RNA (1)...(19): siRNA sense strand
aggauaaccuuguuuacau

SEQ ID NO: 612341 - RNA, 19 nt, Homo sapiens
  misc_RNA (1)...(19): siRNA sense strand
cgugauggauccuugauag

SEQ ID NO: 612342 - RNA, 19 nt, Homo sapiens
  misc_RNA (1)...(19): siRNA sense strand
acagggaagugccucaaga

SEQ ID NO: 612343 - RNA, 19 nt, Homo sapiens
  misc_RNA (1)...(19): siRNA sense strand
gaaacuacaaggccacaca

SEQ ID NO: 612344 - RNA, 19 nt, Homo sapiens
  misc_RNA (1)...(19): siRNA sense strand
gcucagaggauaaccuugu

SEQ ID NO: 612345 - RNA, 19 nt, Homo sapiens
  misc_RNA (1)...(19): siRNA sense strand
gaagccaaacuaugcucua

SEQ ID NO: 612346 - RNA, 19 nt, Homo sapiens
  misc_RNA (1)...(19): siRNA sense strand
aaguucaucugcugauaaa

SEQ ID NO: 612347 - RNA, 19 nt, Homo sapiens
  misc_RNA (1)...(19): siRNA sense strand
cuacaaggccacacagaug

SEQ ID NO: 612348 - RNA, 19 nt, Homo sapiens
  misc_RNA (1)...(19): siRNA sense strand
gcaguguccuccgugaaau

SEQ ID NO: 612349 - RNA, 19 nt, Homo sapiens
  misc_RNA (1)...(19): siRNA sense strand
cugcauauuugccaauuuc

SEQ ID NO: 612350 - RNA, 19 nt, Homo sapiens
  misc_RNA (1)...(19): siRNA sense strand
ugacaaaaccuugaagaua

SEQ ID NO: 612351 - RNA, 19 nt, Homo sapiens
  misc_RNA (1)...(19): siRNA sense strand
acacuggccacaagaauga

SEQ ID NO: 612352 - RNA, 19 nt, Homo sapiens
  misc_RNA (1)...(19): siRNA sense strand
gcuagaaaaugacaaaaca

SEQ ID NO: 612353 - RNA, 19 nt, Homo sapiens
  misc_RNA (1)...(19): siRNA sense strand
aagccaaacuaugcucuaa

SEQ ID NO: 612354 - RNA, 19 nt, Homo sapiens
  misc_RNA (1)...(19): siRNA sense strand
gacguacacuggccacaag

SEQ ID NO: 612355 - RNA, 19 nt, Homo sapiens
  misc_RNA (1)...(19): siRNA sense strand
gucgugaucucaacagcuu

SEQ ID NO: 612356 - RNA, 19 nt, Homo sapiens
  misc_RNA (1)...(19): siRNA sense strand
ggucacaagcugggaauau

SEQ ID NO: 612357 - RNA, 19 nt, Homo sapiens
  misc_RNA (1)...(19): siRNA sense strand
ugacgaaagcgugaggaua

SEQ ID NO: 612358 - RNA, 19 nt, Homo sapiens
  misc_RNA (1)...(19): siRNA sense strand
auucuaaccuucuuguuuc

SEQ ID NO: 612359 - RNA, 19 nt, Homo sapiens
  misc_RNA (1)...(19): siRNA sense strand
uagcuaugauggucucugu

SEQ ID NO: 612360 - RNA, 19 nt, Homo sapiens
  misc_RNA (1)...(19): siRNA sense strand
gaugggaaauuugagaaaa

SEQ ID NO: 612361 - RNA, 19 nt, Homo sapiens
  misc_RNA (1)...(19): siRNA sense strand
ggagaguggcuggcaaguu

SEQ ID NO: 612362 - RNA, 19 nt, Homo sapiens
  misc_RNA (1)...(19): siRNA sense strand
cguaugaugggaaauuuga

SEQ ID NO: 612363 - RNA, 19 nt, Homo sapiens
  misc_RNA (1)...(19): siRNA sense strand
gcuugucacccaacagaaa

SEQ ID NO: 612364 - RNA, 19 nt, Homo sapiens
  misc_RNA (1)...(19): siRNA sense strand
gcgcguaugaugggaaauu

SEQ ID NO: 612365 - RNA, 19 nt, Homo sapiens
  misc_RNA (1)...(19): siRNA sense strand
guagccuggucgucagauu

SEQ ID NO: 612366 - RNA, 19 nt, Homo sapiens
  misc_RNA (1)...(19): siRNA sense strand
gccaauuucucuguuacug

SEQ ID NO: 612367 - RNA, 19 nt, Homo sapiens
  misc_RNA (1)...(19): siRNA sense strand
guacacuggccacaagaau

SEQ ID NO: 612368 - RNA, 19 nt, Homo sapiens
  misc_RNA (1)...(19): siRNA sense strand
ugauggauccuugauaguu

SEQ ID NO: 612369 - RNA, 19 nt, Homo sapiens
  misc_RNA (1)...(19): siRNA sense strand
gucacaagcugggaauauc

SEQ ID NO: 612370 - RNA, 19 nt, Homo sapiens
  misc_RNA (1)...(19): siRNA sense strand
gauaugggaugugaaaaca

SEQ ID NO: 612371 - RNA, 19 nt, Homo sapiens
  misc_RNA (1)...(19): siRNA sense strand
ucaggauccuuugacgaaa

SEQ ID NO: 612372 - RNA, 19 nt, Homo sapiens
  misc_RNA (1)...(19): siRNA sense strand
cugaagggacacaguaauu

SEQ ID NO: 612373 - RNA, 19 nt, Homo sapiens
  misc_RNA (1)...(19): siRNA sense strand
gucgucagauucuaaccuu

SEQ ID NO: 612374 - RNA, 19 nt, Homo sapiens
  misc_RNA (1)...(19): siRNA sense strand
ggaaccuucagacgaaaga

SEQ ID NO: 612375 - RNA, 19 nt, Homo sapiens
  misc_RNA (1)...(19): siRNA sense strand
gcugggaauauccgaugua

SEQ ID NO: 612376 - RNA, 19 nt, Homo sapiens
  misc_RNA (1)...(19): siRNA sense strand
gagauuguacagaaacuac

SEQ ID NO: 612377 - RNA, 19 nt, Homo sapiens
  misc_RNA (1)...(19): siRNA sense strand
acaagaaugagaaauacug

SEQ ID NO: 612378 - RNA, 19 nt, Homo sapiens
  misc_RNA (1)...(19): siRNA sense strand
cagcuugucacccaacaga

SEQ ID NO: 612379 - RNA, 19 nt, Homo sapiens
  misc_RNA (1)...(19): siRNA sense strand
uuugccaauuucucuguua

SEQ ID NO: 612380 - RNA, 19 nt, Homo sapiens
  misc_RNA (1)...(19): siRNA sense strand
cgcguaugaugggaaauuu

SEQ ID NO: 612381 - RNA, 19 nt, Homo sapiens
  misc_RNA (1)...(19): siRNA sense strand
guucaucugcugauaaacu

SEQ ID NO: 612382 - RNA, 19 nt, Homo sapiens
  misc_RNA (1)...(19): siRNA sense strand
gcaagccuacaccugugaa

SEQ ID NO: 612383 - RNA, 19 nt, Homo sapiens
  misc_RNA (1)...(19): siRNA sense strand
guccaaccuuauugucuca

SEQ ID NO: 612384 - RNA, 19 nt, Homo sapiens
  misc_RNA (1)...(19): siRNA sense strand
cauauuugccaauuucucu

SEQ ID NO: 612385 - RNA, 19 nt, Homo sapiens
  misc_RNA (1)...(19): siRNA sense strand
ucagaggauaaccuuguuu

SEQ ID NO: 612386 - RNA, 19 nt, Homo sapiens
  misc_RNA (1)...(19): siRNA sense strand
cugcugcgcuagaaaauga

SEQ ID NO: 612387 - RNA, 19 nt, Homo sapiens
  misc_RNA (1)...(19): siRNA sense strand
acaaaaccuugaagauaug

SEQ ID NO: 612388 - RNA, 19 nt, Homo sapiens
  misc_RNA (1)...(19): siRNA sense strand
uaugaugggaaauuugaga

SEQ ID NO: 612389 - RNA, 19 nt, Homo sapiens
  misc_RNA (1)...(19): siRNA sense strand
gauaaccuuguuuacaucu

SEQ ID NO: 612390 - RNA, 19 nt, Homo sapiens
  misc_RNA (1)...(19): siRNA sense strand
cucaggauccuuugacgaa

SEQ ID NO: 612391 - RNA, 19 nt, Homo sapiens
  misc_RNA (1)...(19): siRNA sense strand
agacagagcucagggaaua

SEQ ID NO: 612392 - RNA, 19 nt, Homo sapiens
  misc_RNA (1)...(19): siRNA sense strand
ggaccaggcugucaacaug

SEQ ID NO: 612393 - RNA, 19 nt, Homo sapiens
  misc_RNA (1)...(19): siRNA sense strand
caaccagucucgaggcuuu

SEQ ID NO: 612394 - RNA, 19 nt, Homo sapiens
  misc_RNA (1)...(19): siRNA sense strand
gaaggaaggauggcagaaa

SEQ ID NO: 612395 - RNA, 19 nt, Homo sapiens
  misc_RNA (1)...(19): siRNA sense strand
gaagucguagauuguguua

SEQ ID NO: 612396 - RNA, 19 nt, Homo sapiens
  misc_RNA (1)...(19): siRNA sense strand
ccacguggcagcaaggaua

SEQ ID NO: 612397 - RNA, 19 nt, Homo sapiens
  misc_RNA (1)...(19): siRNA sense strand
gcgauaacaguaaaucaaa

SEQ ID NO: 612398 - RNA, 19 nt, Homo sapiens
  misc_RNA (1)...(19): siRNA sense strand
gggcagcaccucuggcuuu

SEQ ID NO: 612399 - RNA, 19 nt, Homo sapiens
  misc_RNA (1)...(19): siRNA sense strand
caggagcgauaacaguaaa

SEQ ID NO: 612400 - RNA, 19 nt, Homo sapiens
  misc_RNA (1)...(19): siRNA sense strand
gagaagucguagauugugu

SEQ ID NO: 612401 - RNA, 19 nt, Homo sapiens
  misc_RNA (1)...(19): siRNA sense strand
ucacggagguagucaugau

SEQ ID NO: 612402 - RNA, 19 nt, Homo sapiens
  misc_RNA (1)...(19): siRNA sense strand
gcagcuacuuuucccaaua

SEQ ID NO: 612403 - RNA, 19 nt, Homo sapiens
  misc_RNA (1)...(19): siRNA sense strand
agucguagauuguguuauc

SEQ ID NO: 612404 - RNA, 19 nt, Homo sapiens
  misc_RNA (1)...(19): siRNA sense strand
gauauuugucgguggaauu

SEQ ID NO: 612405 - RNA, 19 nt, Homo sapiens
  misc_RNA (1)...(19): siRNA sense strand
uuaaagacccaaacugugu

SEQ ID NO: 612406 - RNA, 19 nt, Homo sapiens
  misc_RNA (1)...(19): siRNA sense strand
ccaauauggagaagucgua

SEQ ID NO: 612407 - RNA, 19 nt, Homo sapiens
  misc_RNA (1)...(19): siRNA sense strand
gccagcagccuccuuccua

SEQ ID NO: 612408 - RNA, 19 nt, Homo sapiens
  misc_RNA (1)...(19): siRNA sense strand
guagauuguguuaucauga

SEQ ID NO: 612409 - RNA, 19 nt, Homo sapiens
  misc_RNA (1)...(19): siRNA sense strand
ggaaggauggcagaaagga

SEQ ID NO: 612410 - RNA, 19 nt, Homo sapiens
  misc_RNA (1)...(19): siRNA sense strand
gcagaccgcacacgcuaga

SEQ ID NO: 612411 - RNA, 19 nt, Homo sapiens
  misc_RNA (1)...(19): siRNA sense strand
ggagguagucaugaucuau

SEQ ID NO: 612412 - RNA, 19 nt, Homo sapiens
  misc_RNA (1)...(19): siRNA sense strand
auggagaagucguagauug

SEQ ID NO: 612413 - RNA, 19 nt, Homo sapiens
  misc_RNA (1)...(19): siRNA sense strand
cgacagcucagccagacuu

SEQ ID NO: 612414 - RNA, 19 nt, Homo sapiens
  misc_RNA (1)...(19): siRNA sense strand
ccaggagcgauaacaguaa

SEQ ID NO: 612415 - RNA, 19 nt, Homo sapiens
  misc_RNA (1)...(19): siRNA sense strand
aaaggacccaggagcgaua

SEQ ID NO: 612416 - RNA, 19 nt, Homo sapiens
  misc_RNA (1)...(19): siRNA sense strand
ucucgaggcuuuggguuug

SEQ ID NO: 612417 - RNA, 19 nt, Homo sapiens
  misc_RNA (1)...(19): siRNA sense strand
ggagaagucguagauugug

SEQ ID NO: 612418 - RNA, 19 nt, Homo sapiens
  misc_RNA (1)...(19): siRNA sense strand
gcagaaccacaacgugcaa

SEQ ID NO: 612419 - RNA, 19 nt, Homo sapiens
  misc_RNA (1)...(19): siRNA sense strand
cguagauuguguuaucaug

SEQ ID NO: 612420 - RNA, 19 nt, Homo sapiens
  misc_RNA (1)...(19): siRNA sense strand
gccccgagguuuuggauuu

SEQ ID NO: 612421 - RNA, 19 nt, Homo sapiens
  misc_RNA (1)...(19): siRNA sense strand
gagguagucaugaucuaug

SEQ ID NO: 612422 - RNA, 19 nt, Homo sapiens
  misc_RNA (1)...(19): siRNA sense strand
gcucagggaauacuucaag

SEQ ID NO: 612423 - RNA, 19 nt, Homo sapiens
  misc_RNA (1)...(19): siRNA sense strand
aaggaaggauggcagaaag

SEQ ID NO: 612424 - RNA, 19 nt, Homo sapiens
  misc_RNA (1)...(19): siRNA sense strand
gagcgauaacaguaaauca

SEQ ID NO: 612425 - RNA, 19 nt, Homo sapiens
  misc_RNA (1)...(19): siRNA sense strand
gacgagggcagaaccacaa

SEQ ID NO: 612426 - RNA, 19 nt, Homo sapiens
  misc_RNA (1)...(19): siRNA sense strand
cccaggagcgauaacagua

SEQ ID NO: 612427 - RNA, 19 nt, Homo sapiens
  misc_RNA (1)...(19): siRNA sense strand
cggagguagucaugaucua

SEQ ID NO: 612428 - RNA, 19 nt, Homo sapiens
  misc_RNA (1)...(19): siRNA sense strand
ggaugcagccggagagaac

SEQ ID NO: 612429 - RNA, 19 nt, Homo sapiens
  misc_RNA (1)...(19): siRNA sense strand
ggcgauugguggcuaugga

SEQ ID NO: 612430 - RNA, 19 nt, Homo sapiens
  misc_RNA (1)...(19): siRNA sense strand
ucagggaauacuucaagaa

SEQ ID NO: 612431 - RNA, 19 nt, Homo sapiens
  misc_RNA (1)...(19): siRNA sense strand
ggucacggagguagucaug

SEQ ID NO: 612432 - RNA, 19 nt, Homo sapiens
  misc_RNA (1)...(19): siRNA sense strand
gagcacgacccaagagacu

SEQ ID NO: 612433 - RNA, 19 nt, Homo sapiens
  misc_RNA (1)...(19): siRNA sense strand
gaucuaugacgccgagaag

SEQ ID NO: 612434 - RNA, 19 nt, Homo sapiens
  misc_RNA (1)...(19): siRNA sense strand
gagcucagggaauacuuca

SEQ ID NO: 612435 - RNA, 19 nt, Homo sapiens
  misc_RNA (1)...(19): siRNA sense strand
ggcagcaccucuggcuuuc

SEQ ID NO: 612436 - RNA, 19 nt, Homo sapiens
  misc_RNA (1)...(19): siRNA sense strand
gagaacacggccgaaggaa

SEQ ID NO: 612437 - RNA, 19 nt, Homo sapiens
  misc_RNA (1)...(19): siRNA sense strand
ggagcgauaacaguaaauc

SEQ ID NO: 612438 - RNA, 19 nt, Homo sapiens
  misc_RNA (1)...(19): siRNA sense strand
cagcuacuuuucccaauau

SEQ ID NO: 612439 - RNA, 19 nt, Homo sapiens
  misc_RNA (1)...(19): siRNA sense strand
agagaacacggccgaagga

SEQ ID NO: 612440 - RNA, 19 nt, Homo sapiens
  misc_RNA (1)...(19): siRNA sense strand
uggagaagucguagauugu

SEQ ID NO: 612441 - RNA, 19 nt, Homo sapiens
  misc_RNA (1)...(19): siRNA sense strand
ggacccaggagcgauaaca

SEQ ID NO: 612442 - RNA, 19 nt, Homo sapiens
  misc_RNA (1)...(19): siRNA sense strand
acaauuguggugagacaga

SEQ ID NO: 612443 - RNA, 19 nt, Homo sapiens
  misc_RNA (1)...(19): siRNA sense strand
agacagagcucagggaaua

SEQ ID NO: 612444 - RNA, 19 nt, Homo sapiens
  misc_RNA (1)...(19): siRNA sense strand
ggaccaggcugucaacaug

SEQ ID NO: 612445 - RNA, 19 nt, Homo sapiens
  misc_RNA (1)...(19): siRNA sense strand
caaccagucucgaggcuuu

SEQ ID NO: 612446 - RNA, 19 nt, Homo sapiens
  misc_RNA (1)...(19): siRNA sense strand
gaaggaaggauggcagaaa

SEQ ID NO: 612447 - RNA, 19 nt, Homo sapiens
  misc_RNA (1)...(19): siRNA sense strand
gaagucguagauuguguua

SEQ ID NO: 612448 - RNA, 19 nt, Homo sapiens
  misc_RNA (1)...(19): siRNA sense strand
ccacguggcagcaaggaua

SEQ ID NO: 612449 - RNA, 19 nt, Homo sapiens
  misc_RNA (1)...(19): siRNA sense strand
gcgauaacaguaaaucaaa

SEQ ID NO: 612450 - RNA, 19 nt, Homo sapiens
  misc_RNA (1)...(19): siRNA sense strand
gggcagcaccucuggcuuu

SEQ ID NO: 612451 - RNA, 19 nt, Homo sapiens
  misc_RNA (1)...(19): siRNA sense strand
caggagcgauaacaguaaa

SEQ ID NO: 612452 - RNA, 19 nt, Homo sapiens
  misc_RNA (1)...(19): siRNA sense strand
gagaagucguagauugugu

SEQ ID NO: 612453 - RNA, 19 nt, Homo sapiens
  misc_RNA (1)...(19): siRNA sense strand
ucacggagguagucaugau

SEQ ID NO: 612454 - RNA, 19 nt, Homo sapiens
  misc_RNA (1)...(19): siRNA sense strand
gcagcuacuuuucccaaua

SEQ ID NO: 612455 - RNA, 19 nt, Homo sapiens
  misc_RNA (1)...(19): siRNA sense strand
agucguagauuguguuauc

SEQ ID NO: 612456 - RNA, 19 nt, Homo sapiens
  misc_RNA (1)...(19): siRNA sense strand
gauauuugucgguggaauu

SEQ ID NO: 612457 - RNA, 19 nt, Homo sapiens
  misc_RNA (1)...(19): siRNA sense strand
uuaaagacccaaacugugu

SEQ ID NO: 612458 - RNA, 19 nt, Homo sapiens
  misc_RNA (1)...(19): siRNA sense strand
ccaauauggagaagucgua

SEQ ID NO: 612459 - RNA, 19 nt, Homo sapiens
  misc_RNA (1)...(19): siRNA sense strand
guagauuguguuaucauga

SEQ ID NO: 612460 - RNA, 19 nt, Homo sapiens
  misc_RNA (1)...(19): siRNA sense strand
ggaaggauggcagaaagga

SEQ ID NO: 612461 - RNA, 19 nt, Homo sapiens
  misc_RNA (1)...(19): siRNA sense strand
gcagaccgcacacgcuaga

SEQ ID NO: 612462 - RNA, 19 nt, Homo sapiens
  misc_RNA (1)...(19): siRNA sense strand
ggagguagucaugaucuau

SEQ ID NO: 612463 - RNA, 19 nt, Homo sapiens
  misc_RNA (1)...(19): siRNA sense strand
auggagaagucguagauug

SEQ ID NO: 612464 - RNA, 19 nt, Homo sapiens
  misc_RNA (1)...(19): siRNA sense strand
cgacagcucagccagacuu

SEQ ID NO: 612465 - RNA, 19 nt, Homo sapiens
  misc_RNA (1)...(19): siRNA sense strand
ccaggagcgauaacaguaa

SEQ ID NO: 612466 - RNA, 19 nt, Homo sapiens
  misc_RNA (1)...(19): siRNA sense strand
aaaggacccaggagcgaua

SEQ ID NO: 612467 - RNA, 19 nt, Homo sapiens
  misc_RNA (1)...(19): siRNA sense strand
ucucgaggcuuuggguuug

SEQ ID NO: 612468 - RNA, 19 nt, Homo sapiens
  misc_RNA (1)...(19): siRNA sense strand
ggagaagucguagauugug

SEQ ID NO: 612469 - RNA, 19 nt, Homo sapiens
  misc_RNA (1)...(19): siRNA sense strand
cguagauuguguuaucaug

SEQ ID NO: 612470 - RNA, 19 nt, Homo sapiens
  misc_RNA (1)...(19): siRNA sense strand
gccccgagguuuuggauuu

SEQ ID NO: 612471 - RNA, 19 nt, Homo sapiens
  misc_RNA (1)...(19): siRNA sense strand
gagguagucaugaucuaug

SEQ ID NO: 612472 - RNA, 19 nt, Homo sapiens
  misc_RNA (1)...(19): siRNA sense strand
gcucagggaauacuucaag

SEQ ID NO: 612473 - RNA, 19 nt, Homo sapiens
  misc_RNA (1)...(19): siRNA sense strand
aaggaaggauggcagaaag

SEQ ID NO: 612474 - RNA, 19 nt, Homo sapiens
  misc_RNA (1)...(19): siRNA sense strand
gagcgauaacaguaaauca

SEQ ID NO: 612475 - RNA, 19 nt, Homo sapiens
  misc_RNA (1)...(19): siRNA sense strand
cccaggagcgauaacagua

SEQ ID NO: 612476 - RNA, 19 nt, Homo sapiens
  misc_RNA (1)...(19): siRNA sense strand
cggagguagucaugaucua

SEQ ID NO: 612477 - RNA, 19 nt, Homo sapiens
  misc_RNA (1)...(19): siRNA sense strand
ggaugcagccggagagaac

SEQ ID NO: 612478 - RNA, 19 nt, Homo sapiens
  misc_RNA (1)...(19): siRNA sense strand
ggcgauugguggcuaugga

SEQ ID NO: 612479 - RNA, 19 nt, Homo sapiens
  misc_RNA (1)...(19): siRNA sense strand
ucagggaauacuucaagaa

SEQ ID NO: 612480 - RNA, 19 nt, Homo sapiens
  misc_RNA (1)...(19): siRNA sense strand
ggucacggagguagucaug

SEQ ID NO: 612481 - RNA, 19 nt, Homo sapiens
  misc_RNA (1)...(19): siRNA sense strand
gagcacgacccaagagacu

SEQ ID NO: 612482 - RNA, 19 nt, Homo sapiens
  misc_RNA (1)...(19): siRNA sense strand
gaucuaugacgccgagaag

SEQ ID NO: 612483 - RNA, 19 nt, Homo sapiens
  misc_RNA (1)...(19): siRNA sense strand
gagcucagggaauacuuca

SEQ ID NO: 612484 - RNA, 19 nt, Homo sapiens
  misc_RNA (1)...(19): siRNA sense strand
ggcagcaccucuggcuuuc

SEQ ID NO: 612485 - RNA, 19 nt, Homo sapiens
  misc_RNA (1)...(19): siRNA sense strand
gagaacacggccgaaggaa

SEQ ID NO: 612486 - RNA, 19 nt, Homo sapiens
  misc_RNA (1)...(19): siRNA sense strand
ggagcgauaacaguaaauc

SEQ ID NO: 612487 - RNA, 19 nt, Homo sapiens
  misc_RNA (1)...(19): siRNA sense strand
agagaacacggccgaagga

SEQ ID NO: 612488 - RNA, 19 nt, Homo sapiens
  misc_RNA (1)...(19): siRNA sense strand
cagcuacuuuucccaauau

SEQ ID NO: 612489 - RNA, 19 nt, Homo sapiens
  misc_RNA (1)...(19): siRNA sense strand
uggagaagucguagauugu

SEQ ID NO: 612490 - RNA, 19 nt, Homo sapiens
  misc_RNA (1)...(19): siRNA sense strand
ggacccaggagcgauaaca

SEQ ID NO: 612491 - RNA, 19 nt, Homo sapiens
  misc_RNA (1)...(19): siRNA sense strand
acaauuguggugagacaga

SEQ ID NO: 612492 - RNA, 19 nt, Homo sapiens
  misc_RNA (1)...(19): siRNA sense strand
caauagacauggcuggauu

SEQ ID NO: 612493 - RNA, 19 nt, Homo sapiens
  misc_RNA (1)...(19): siRNA sense strand
gaagggaggcuaccaggaa

SEQ ID NO: 612494 - RNA, 19 nt, Homo sapiens
  misc_RNA (1)...(19): siRNA sense strand
gaagagacgggacauccua

SEQ ID NO: 612495 - RNA, 19 nt, Homo sapiens
  misc_RNA (1)...(19): siRNA sense strand
ggacucugcucaucacugu

SEQ ID NO: 612496 - RNA, 19 nt, Homo sapiens
  misc_RNA (1)...(19): siRNA sense strand
gcuggaagacgguguuuga

SEQ ID NO: 612497 - RNA, 19 nt, Homo sapiens
  misc_RNA (1)...(19): siRNA sense strand
ccaccggccauuugcaaua

SEQ ID NO: 612498 - RNA, 19 nt, Homo sapiens
  misc_RNA (1)...(19): siRNA sense strand
ggaaagcagccuccuucga

SEQ ID NO: 612499 - RNA, 19 nt, Homo sapiens
  misc_RNA (1)...(19): siRNA sense strand
gagaacuugucacccucaa

SEQ ID NO: 612500 - RNA, 19 nt, Homo sapiens
  misc_RNA (1)...(19): siRNA sense strand
aagggaggcuaccaggaaa

SEQ ID NO: 612501 - RNA, 19 nt, Homo sapiens
  misc_RNA (1)...(19): siRNA sense strand
gcaauagacauggcuggau

SEQ ID NO: 612502 - RNA, 19 nt, Homo sapiens
  misc_RNA (1)...(19): siRNA sense strand
gggaguacugcacgucuga

SEQ ID NO: 612503 - RNA, 19 nt, Homo sapiens
  misc_RNA (1)...(19): siRNA sense strand
gcacacacggacagagaag

SEQ ID NO: 612504 - RNA, 19 nt, Homo sapiens
  misc_RNA (1)...(19): siRNA sense strand
cgacaccggccucaacuac

SEQ ID NO: 612505 - RNA, 19 nt, Homo sapiens
  misc_RNA (1)...(19): siRNA sense strand
gcccuggacucugcucauc

SEQ ID NO: 612506 - RNA, 19 nt, Homo sapiens
  misc_RNA (1)...(19): siRNA sense strand
cagccuccuucgagaacuu

SEQ ID NO: 612507 - RNA, 19 nt, Homo sapiens
  misc_RNA (1)...(19): siRNA sense strand
caccggccauuugcaauag

SEQ ID NO: 612508 - RNA, 19 nt, Homo sapiens
  misc_RNA (1)...(19): siRNA sense strand
caauagacauggcuggauu

SEQ ID NO: 612509 - RNA, 19 nt, Homo sapiens
  misc_RNA (1)...(19): siRNA sense strand
gaagggaggcuaccaggaa

SEQ ID NO: 612510 - RNA, 19 nt, Homo sapiens
  misc_RNA (1)...(19): siRNA sense strand
gaagagacgggacauccua

SEQ ID NO: 612511 - RNA, 19 nt, Homo sapiens
  misc_RNA (1)...(19): siRNA sense strand
ggacucugcucaucacugu

SEQ ID NO: 612512 - RNA, 19 nt, Homo sapiens
  misc_RNA (1)...(19): siRNA sense strand
gcuggaagacgguguuuga

SEQ ID NO: 612513 - RNA, 19 nt, Homo sapiens
  misc_RNA (1)...(19): siRNA sense strand
ccaccggccauuugcaaua

SEQ ID NO: 612514 - RNA, 19 nt, Homo sapiens
  misc_RNA (1)...(19): siRNA sense strand
ggaaagcagccuccuucga

SEQ ID NO: 612515 - RNA, 19 nt, Homo sapiens
  misc_RNA (1)...(19): siRNA sense strand
gagaacuugucacccucaa

SEQ ID NO: 612516 - RNA, 19 nt, Homo sapiens
  misc_RNA (1)...(19): siRNA sense strand
aagggaggcuaccaggaaa

SEQ ID NO: 612517 - RNA, 19 nt, Homo sapiens
  misc_RNA (1)...(19): siRNA sense strand
gcaauagacauggcuggau

SEQ ID NO: 612518 - RNA, 19 nt, Homo sapiens
  misc_RNA (1)...(19): siRNA sense strand
gggaguacugcacgucuga

SEQ ID NO: 612519 - RNA, 19 nt, Homo sapiens
  misc_RNA (1)...(19): siRNA sense strand
gcacacacggacagagaag

SEQ ID NO: 612520 - RNA, 19 nt, Homo sapiens
  misc_RNA (1)...(19): siRNA sense strand
cgacaccggccucaacuac

SEQ ID NO: 612521 - RNA, 19 nt, Homo sapiens
  misc_RNA (1)...(19): siRNA sense strand
gcccuggacucugcucauc

SEQ ID NO: 612522 - RNA, 19 nt, Homo sapiens
  misc_RNA (1)...(19): siRNA sense strand
cagccuccuucgagaacuu

SEQ ID NO: 612523 - RNA, 19 nt, Homo sapiens
  misc_RNA (1)...(19): siRNA sense strand
caccggccauuugcaauag

SEQ ID NO: 612524 - RNA, 19 nt, Homo sapiens
  misc_RNA (1)...(19): siRNA sense strand
gaagaaacuuuggcugaua

SEQ ID NO: 612525 - RNA, 19 nt, Homo sapiens
  misc_RNA (1)...(19): siRNA sense strand
ggagaaagguguucaagau

SEQ ID NO: 612526 - RNA, 19 nt, Homo sapiens
  misc_RNA (1)...(19): siRNA sense strand
gaaaggcacugauguucug

SEQ ID NO: 612527 - RNA, 19 nt, Homo sapiens
  misc_RNA (1)...(19): siRNA sense strand
ugagaagacugacaucauu

SEQ ID NO: 612528 - RNA, 19 nt, Homo sapiens
  misc_RNA (1)...(19): siRNA sense strand
gauaucaaauggcugagaa

SEQ ID NO: 612529 - RNA, 19 nt, Homo sapiens
  misc_RNA (1)...(19): siRNA sense strand
gcacugauguucugaaagc

SEQ ID NO: 612530 - RNA, 19 nt, Homo sapiens
  misc_RNA (1)...(19): siRNA sense strand
ugaacaacaugcuaaauca

SEQ ID NO: 612531 - RNA, 19 nt, Homo sapiens
  misc_RNA (1)...(19): siRNA sense strand
gaacgggcaugauguugag

SEQ ID NO: 612532 - RNA, 19 nt, Homo sapiens
  misc_RNA (1)...(19): siRNA sense strand
acaguggacuugcugcaua

SEQ ID NO: 612533 - RNA, 19 nt, Homo sapiens
  misc_RNA (1)...(19): siRNA sense strand
gcaaccgucuggaugaugu

SEQ ID NO: 612534 - RNA, 19 nt, Homo sapiens
  misc_RNA (1)...(19): siRNA sense strand
gaaagguguucaagauguc

SEQ ID NO: 612535 - RNA, 19 nt, Homo sapiens
  misc_RNA (1)...(19): siRNA sense strand
aagaaacuuuggcugauaa

SEQ ID NO: 612536 - RNA, 19 nt, Homo sapiens
  misc_RNA (1)...(19): siRNA sense strand
agaaagguguucaagaugu

SEQ ID NO: 612537 - RNA, 19 nt, Homo sapiens
  misc_RNA (1)...(19): siRNA sense strand
cuaaaucaguacuuccaaa

SEQ ID NO: 612538 - RNA, 19 nt, Homo sapiens
  misc_RNA (1)...(19): siRNA sense strand
ggaacgggcaugauguuga

SEQ ID NO: 612539 - RNA, 19 nt, Homo sapiens
  misc_RNA (1)...(19): siRNA sense strand
ugaaaccaguacuuuauca

SEQ ID NO: 612540 - RNA, 19 nt, Homo sapiens
  misc_RNA (1)...(19): siRNA sense strand
acaacaugcuaaaucagua

SEQ ID NO: 612541 - RNA, 19 nt, Homo sapiens
  misc_RNA (1)...(19): siRNA sense strand
cagagaagaugggcuacaa

SEQ ID NO: 612542 - RNA, 19 nt, Homo sapiens
  misc_RNA (1)...(19): siRNA sense strand
caaggaugcuccggaaugu

SEQ ID NO: 612543 - RNA, 19 nt, Homo sapiens
  misc_RNA (1)...(19): siRNA sense strand
auauguggcuaaagcaaua

SEQ ID NO: 612544 - RNA, 19 nt, Homo sapiens
  misc_RNA (1)...(19): siRNA sense strand
gauacuaaaggaagaauuc

SEQ ID NO: 612545 - RNA, 19 nt, Homo sapiens
  misc_RNA (1)...(19): siRNA sense strand
gaaacuuuggcugauaaua

SEQ ID NO: 612546 - RNA, 19 nt, Homo sapiens
  misc_RNA (1)...(19): siRNA sense strand
ucaaauggcugagaagacu

SEQ ID NO: 612547 - RNA, 19 nt, Homo sapiens
  misc_RNA (1)...(19): siRNA sense strand
cugauaauauugcagcauu

SEQ ID NO: 612548 - RNA, 19 nt, Homo sapiens
  misc_RNA (1)...(19): siRNA sense strand
gaaagucaucgacaagaca

SEQ ID NO: 612549 - RNA, 19 nt, Homo sapiens
  misc_RNA (1)...(19): siRNA sense strand
ugaagaaacuuuggcugau

SEQ ID NO: 612550 - RNA, 19 nt, Homo sapiens
  misc_RNA (1)...(19): siRNA sense strand
gagaaagguguucaagaug

SEQ ID NO: 612551 - RNA, 19 nt, Homo sapiens
  misc_RNA (1)...(19): siRNA sense strand
cggcuaauuuguaucaaug

SEQ ID NO: 612552 - RNA, 19 nt, Homo sapiens
  misc_RNA (1)...(19): siRNA sense strand
ggaucuuggugucgaauca

SEQ ID NO: 612553 - RNA, 19 nt, Homo sapiens
  misc_RNA (1)...(19): siRNA sense strand
gggcuacaaggccauauuu

SEQ ID NO: 612554 - RNA, 19 nt, Homo sapiens
  misc_RNA (1)...(19): siRNA sense strand
ugacaguggacacaccuua

SEQ ID NO: 612555 - RNA, 19 nt, Homo sapiens
  misc_RNA (1)...(19): siRNA sense strand
gagaagacugacaucauug

SEQ ID NO: 612556 - RNA, 19 nt, Homo sapiens
  misc_RNA (1)...(19): siRNA sense strand
ggcugcaacuguauaucua

SEQ ID NO: 612557 - RNA, 19 nt, Homo sapiens
  misc_RNA (1)...(19): siRNA sense strand
ggcaaaugaugaagaaacu

SEQ ID NO: 612558 - RNA, 19 nt, Homo sapiens
  misc_RNA (1)...(19): siRNA sense strand
ggaaaggcacugauguucu

SEQ ID NO: 612559 - RNA, 19 nt, Homo sapiens
  misc_RNA (1)...(19): siRNA sense strand
ccaaggaugcuccggaaug

SEQ ID NO: 612560 - RNA, 19 nt, Homo sapiens
  misc_RNA (1)...(19): siRNA sense strand
gcggaaaggcacugauguu

SEQ ID NO: 612561 - RNA, 19 nt, Homo sapiens
  misc_RNA (1)...(19): siRNA sense strand
ucaagauguccucgagaua

SEQ ID NO: 612562 - RNA, 19 nt, Homo sapiens
  misc_RNA (1)...(19): siRNA sense strand
acaagacauuggugaggaa

SEQ ID NO: 612563 - RNA, 19 nt, Homo sapiens
  misc_RNA (1)...(19): siRNA sense strand
gaucugucgacuucuguuu

SEQ ID NO: 612564 - RNA, 19 nt, Homo sapiens
  misc_RNA (1)...(19): siRNA sense strand
gggagaaagguguucaaga

SEQ ID NO: 612565 - RNA, 19 nt, Homo sapiens
  misc_RNA (1)...(19): siRNA sense strand
cagcugggaagauaucaaa

SEQ ID NO: 612566 - RNA, 19 nt, Homo sapiens
  misc_RNA (1)...(19): siRNA sense strand
gcugggaagauaucaaaug

SEQ ID NO: 612567 - RNA, 19 nt, Homo sapiens
  misc_RNA (1)...(19): siRNA sense strand
cuuccaaagucuauauaug

SEQ ID NO: 612568 - RNA, 19 nt, Homo sapiens
  misc_RNA (1)...(19): siRNA sense strand
gauuaugaacaacaugcua

SEQ ID NO: 612569 - RNA, 19 nt, Homo sapiens
  misc_RNA (1)...(19): siRNA sense strand
gaugaugugcguaacagau

SEQ ID NO: 612570 - RNA, 19 nt, Homo sapiens
  misc_RNA (1)...(19): siRNA sense strand
gcuccggaauguugcugaa

SEQ ID NO: 612571 - RNA, 19 nt, Homo sapiens
  misc_RNA (1)...(19): siRNA sense strand
gauguccucgagauacuaa

SEQ ID NO: 612572 - RNA, 19 nt, Homo sapiens
  misc_RNA (1)...(19): siRNA sense strand
cuacaaggaccgagaaguc

SEQ ID NO: 612573 - RNA, 19 nt, Homo sapiens
  misc_RNA (1)...(19): siRNA sense strand
gcgccaaggcuguguuugu

SEQ ID NO: 612574 - RNA, 19 nt, Homo sapiens
  misc_RNA (1)...(19): siRNA sense strand
ucugaaagcucuggcucuu

SEQ ID NO: 612575 - RNA, 19 nt, Homo sapiens
  misc_RNA (1)...(19): siRNA sense strand
gccagccacuauugauguu

SEQ ID NO: 612576 - RNA, 19 nt, Homo sapiens
  misc_RNA (1)...(19): siRNA sense strand
gaacaacaugcuaaaucag

SEQ ID NO: 612577 - RNA, 19 nt, Homo sapiens
  misc_RNA (1)...(19): siRNA sense strand
accgagaagucaccaagaa

SEQ ID NO: 612578 - RNA, 19 nt, Homo sapiens
  misc_RNA (1)...(19): siRNA sense strand
gccagaaugugaaagucau

SEQ ID NO: 612579 - RNA, 19 nt, Homo sapiens
  misc_RNA (1)...(19): siRNA sense strand
caagauguccucgagauac

SEQ ID NO: 612580 - RNA, 19 nt, Homo sapiens
  misc_RNA (1)...(19): siRNA sense strand
caguggacuugcugcauau

SEQ ID NO: 612581 - RNA, 19 nt, Homo sapiens
  misc_RNA (1)...(19): siRNA sense strand
gaaaccaguacuuuaucau

SEQ ID NO: 612582 - RNA, 19 nt, Homo sapiens
  misc_RNA (1)...(19): siRNA sense strand
ugggccaccuccucaauug

SEQ ID NO: 612583 - RNA, 19 nt, Homo sapiens
  misc_RNA (1)...(19): siRNA sense strand
ugaaagucaucgacaagac

SEQ ID NO: 612584 - RNA, 19 nt, Homo sapiens
  misc_RNA (1)...(19): siRNA sense strand
gcauauguggcuaaagcaa

SEQ ID NO: 612585 - RNA, 19 nt, Homo sapiens
  misc_RNA (1)...(19): siRNA sense strand
ggagacgacaguggacuug

SEQ ID NO: 612586 - RNA, 19 nt, Homo sapiens
  misc_RNA (1)...(19): siRNA sense strand
ggccaccuccucaauugaa

SEQ ID NO: 612587 - RNA, 19 nt, Homo sapiens
  misc_RNA (1)...(19): siRNA sense strand
cugagugggugccagaaug

SEQ ID NO: 612588 - RNA, 19 nt, Homo sapiens
  misc_RNA (1)...(19): siRNA sense strand
aggcacugauguucugaaa

SEQ ID NO: 612589 - RNA, 19 nt, Homo sapiens
  misc_RNA (1)...(19): siRNA sense strand
aagggaagguggaagucuu

SEQ ID NO: 612590 - RNA, 19 nt, Homo sapiens
  misc_RNA (1)...(19): siRNA sense strand
caugcuaaaucaguacuuc

SEQ ID NO: 612591 - RNA, 19 nt, Homo sapiens
  misc_RNA (1)...(19): siRNA sense strand
cgccacaacucaggaugaa

SEQ ID NO: 612592 - RNA, 19 nt, Homo sapiens
  misc_RNA (1)...(19): siRNA sense strand
gggcaaccgucuggaugau

SEQ ID NO: 612593 - RNA, 19 nt, Homo sapiens
  misc_RNA (1)...(19): siRNA sense strand
gggcaaaugaugaagaaac

SEQ ID NO: 612594 - RNA, 19 nt, Homo sapiens
  misc_RNA (1)...(19): siRNA sense strand
cgccaaggcuguguuugug

SEQ ID NO: 612595 - RNA, 19 nt, Homo sapiens
  misc_RNA (1)...(19): siRNA sense strand
aaacugccgccacaacuca

SEQ ID NO: 612596 - RNA, 19 nt, Homo sapiens
  misc_RNA (1)...(19): siRNA sense strand
cugggaagauaucaaaugg

SEQ ID NO: 612597 - RNA, 19 nt, Homo sapiens
  misc_RNA (1)...(19): siRNA sense strand
uaaaucaguacuuccaaag

SEQ ID NO: 612598 - RNA, 19 nt, Homo sapiens
  misc_RNA (1)...(19): siRNA sense strand
ggucagcaugccaauaugu

SEQ ID NO: 612599 - RNA, 19 nt, Homo sapiens
  misc_RNA (1)...(19): siRNA sense strand
cugcauauguggcuaaagc

SEQ ID NO: 612600 - RNA, 19 nt, Homo sapiens
  misc_RNA (1)...(19): siRNA sense strand
gcaaaugaugaagaaacuu

SEQ ID NO: 612601 - RNA, 19 nt, Homo sapiens
  misc_RNA (1)...(19): siRNA sense strand
ucgagauacuaaaggaaga

SEQ ID NO: 612602 - RNA, 19 nt, Homo sapiens
  misc_RNA (1)...(19): siRNA sense strand
ccacaacucaggaugaaaa

SEQ ID NO: 612603 - RNA, 19 nt, Homo sapiens
  misc_RNA (1)...(19): siRNA sense strand
gaagggaagguggaagucu

SEQ ID NO: 612604 - RNA, 19 nt, Homo sapiens
  misc_RNA (1)...(19): siRNA sense strand
acggcgagcuugccacugu

SEQ ID NO: 612605 - RNA, 19 nt, Homo sapiens
  misc_RNA (1)...(19): siRNA sense strand
ugaugugcguaacagauuc

SEQ ID NO: 612606 - RNA, 19 nt, Homo sapiens
  misc_RNA (1)...(19): siRNA sense strand
gagggucagcaugccaaua

SEQ ID NO: 612607 - RNA, 19 nt, Homo sapiens
  misc_RNA (1)...(19): siRNA sense strand
uggcuugaaugggaucuug

SEQ ID NO: 612608 - RNA, 19 nt, Homo sapiens
  misc_RNA (1)...(19): siRNA sense strand
uaucaaauggcugagaaga

SEQ ID NO: 612609 - RNA, 19 nt, Homo sapiens
  misc_RNA (1)...(19): siRNA sense strand
gugaaagucaucgacaaga

SEQ ID NO: 612610 - RNA, 19 nt, Homo sapiens
  misc_RNA (1)...(19): siRNA sense strand
ccggcuaauuuguaucaau

SEQ ID NO: 612611 - RNA, 19 nt, Homo sapiens
  misc_RNA (1)...(19): siRNA sense strand
ucugucgacuucuguuuua

SEQ ID NO: 612612 - RNA, 19 nt, Homo sapiens
  misc_RNA (1)...(19): siRNA sense strand
gaccgagaagucaccaaga

SEQ ID NO: 612613 - RNA, 19 nt, Homo sapiens
  misc_RNA (1)...(19): siRNA sense strand
uuaaacauggcuugaaugg

SEQ ID NO: 612614 - RNA, 19 nt, Homo sapiens
  misc_RNA (1)...(19): siRNA sense strand
uggacuugcugcauaugug

SEQ ID NO: 612615 - RNA, 19 nt, Homo sapiens
  misc_RNA (1)...(19): siRNA sense strand
gcuaaaucaguacuuccaa

SEQ ID NO: 612616 - RNA, 19 nt, Homo sapiens
  misc_RNA (1)...(19): siRNA sense strand
ccuccucaauugaagaagu

SEQ ID NO: 612617 - RNA, 19 nt, Homo sapiens
  misc_RNA (1)...(19): siRNA sense strand
uucaagauguccucgagau

SEQ ID NO: 612618 - RNA, 19 nt, Homo sapiens
  misc_RNA (1)...(19): siRNA sense strand
caacaugcuaaaucaguac

SEQ ID NO: 612619 - RNA, 19 nt, Homo sapiens
  misc_RNA (1)...(19): siRNA sense strand
cggaaaggcacugauguuc

SEQ ID NO: 612620 - RNA, 19 nt, Homo sapiens
  misc_RNA (1)...(19): siRNA sense strand
gggucagcaugccaauaug

SEQ ID NO: 612621 - RNA, 19 nt, Homo sapiens
  misc_RNA (1)...(19): siRNA sense strand
aggaugcuccggaauguug

SEQ ID NO: 612622 - RNA, 19 nt, Homo sapiens
  misc_RNA (1)...(19): siRNA sense strand
gugcguaacagauucaaac

SEQ ID NO: 612623 - RNA, 19 nt, Homo sapiens
  misc_RNA (1)...(19): siRNA sense strand
gcagagaagaugggcuaca

SEQ ID NO: 612624 - RNA, 19 nt, Homo sapiens
  misc_RNA (1)...(19): siRNA sense strand
gcaagaagaucacgaccuu

SEQ ID NO: 612625 - RNA, 19 nt, Homo sapiens
  misc_RNA (1)...(19): siRNA sense strand
caaauuggcuuaacauucu

SEQ ID NO: 612626 - RNA, 19 nt, Homo sapiens
  misc_RNA (1)...(19): siRNA sense strand
gaaguuauuugccuuuagu

SEQ ID NO: 612627 - RNA, 19 nt, Homo sapiens
  misc_RNA (1)...(19): siRNA sense strand
ggcaguaccuguaugcauu

SEQ ID NO: 612628 - RNA, 19 nt, Homo sapiens
  misc_RNA (1)...(19): siRNA sense strand
cuucugggcuacuuuauaa

SEQ ID NO: 612629 - RNA, 19 nt, Homo sapiens
  misc_RNA (1)...(19): siRNA sense strand
gaagcagacuugucagaag

SEQ ID NO: 612630 - RNA, 19 nt, Homo sapiens
  misc_RNA (1)...(19): siRNA sense strand
uggcuucgcuaucuuagua

SEQ ID NO: 612631 - RNA, 19 nt, Homo sapiens
  misc_RNA (1)...(19): siRNA sense strand
ucacugcgcugaaguccuu

SEQ ID NO: 612632 - RNA, 19 nt, Homo sapiens
  misc_RNA (1)...(19): siRNA sense strand
cugauugucucuuuguaua

SEQ ID NO: 612633 - RNA, 19 nt, Homo sapiens
  misc_RNA (1)...(19): siRNA sense strand
cagaagauccuguggaaga

SEQ ID NO: 612634 - RNA, 19 nt, Homo sapiens
  misc_RNA (1)...(19): siRNA sense strand
ggaugcugauugucucuuu

SEQ ID NO: 612635 - RNA, 19 nt, Homo sapiens
  misc_RNA (1)...(19): siRNA sense strand
gagaauggaucagaaaauu

SEQ ID NO: 612636 - RNA, 19 nt, Homo sapiens
  misc_RNA (1)...(19): siRNA sense strand
ggaaguuauuugccuuuag

SEQ ID NO: 612637 - RNA, 19 nt, Homo sapiens
  misc_RNA (1)...(19): siRNA sense strand
gucagaagauccuguggaa

SEQ ID NO: 612638 - RNA, 19 nt, Homo sapiens
  misc_RNA (1)...(19): siRNA sense strand
uuagugguguuucuuguuu

SEQ ID NO: 612639 - RNA, 19 nt, Homo sapiens
  misc_RNA (1)...(19): siRNA sense strand
ugaagcagagggccuauaa

SEQ ID NO: 612640 - RNA, 19 nt, Homo sapiens
  misc_RNA (1)...(19): siRNA sense strand
caaggaaacagcagcauuc

SEQ ID NO: 612641 - RNA, 19 nt, Homo sapiens
  misc_RNA (1)...(19): siRNA sense strand
ucaacugguccucauauaa

SEQ ID NO: 612642 - RNA, 19 nt, Homo sapiens
  misc_RNA (1)...(19): siRNA sense strand
aagcagacuugucagaaga

SEQ ID NO: 612643 - RNA, 19 nt, Homo sapiens
  misc_RNA (1)...(19): siRNA sense strand
ggccaaggcucacaucacu

SEQ ID NO: 612644 - RNA, 19 nt, Homo sapiens
  misc_RNA (1)...(19): siRNA sense strand
caggccagcuuaugguuug

SEQ ID NO: 612645 - RNA, 19 nt, Homo sapiens
  misc_RNA (1)...(19): siRNA sense strand
ucaccugguuuauaucaug

SEQ ID NO: 612646 - RNA, 19 nt, Homo sapiens
  misc_RNA (1)...(19): siRNA sense strand
uuacuuacaguccaaauug

SEQ ID NO: 612647 - RNA, 19 nt, Homo sapiens
  misc_RNA (1)...(19): siRNA sense strand
gcaguaccuguaugcauuu

SEQ ID NO: 612648 - RNA, 19 nt, Homo sapiens
  misc_RNA (1)...(19): siRNA sense strand
caacugguccucauauaac

SEQ ID NO: 612649 - RNA, 19 nt, Homo sapiens
  misc_RNA (1)...(19): siRNA sense strand
uuacuucaccugguuuaua

SEQ ID NO: 612650 - RNA, 19 nt, Homo sapiens
  misc_RNA (1)...(19): siRNA sense strand
ucacaucacugcgcugaag

SEQ ID NO: 612651 - RNA, 19 nt, Homo sapiens
  misc_RNA (1)...(19): siRNA sense strand
ccucugggaugcugauugu

SEQ ID NO: 612652 - RNA, 19 nt, Homo sapiens
  misc_RNA (1)...(19): siRNA sense strand
uacuucaccugguuuauau

SEQ ID NO: 612653 - RNA, 19 nt, Homo sapiens
  misc_RNA (1)...(19): siRNA sense strand
gauugucucuuuguauaca

SEQ ID NO: 612654 - RNA, 19 nt, Homo sapiens
  misc_RNA (1)...(19): siRNA sense strand
gggcuacuuuauaaucaau

SEQ ID NO: 612655 - RNA, 19 nt, Homo sapiens
  misc_RNA (1)...(19): siRNA sense strand
ccucuuacuucaccugguu

SEQ ID NO: 612656 - RNA, 19 nt, Homo sapiens
  misc_RNA (1)...(19): siRNA sense strand
uuaagcuuguuuccacuuu

SEQ ID NO: 612657 - RNA, 19 nt, Homo sapiens
  misc_RNA (1)...(19): siRNA sense strand
ccaaggaaacagcagcauu

SEQ ID NO: 612658 - RNA, 19 nt, Homo sapiens
  misc_RNA (1)...(19): siRNA sense strand
gguggcagugguugaauuu

SEQ ID NO: 612659 - RNA, 19 nt, Homo sapiens
  misc_RNA (1)...(19): siRNA sense strand
gaugcugauugucucuuug

SEQ ID NO: 612660 - RNA, 19 nt, Homo sapiens
  misc_RNA (1)...(19): siRNA sense strand
gcuuaugguuugccaccuu

SEQ ID NO: 612661 - RNA, 19 nt, Homo sapiens
  misc_RNA (1)...(19): siRNA sense strand
agacuuauccuccugaucu

SEQ ID NO: 612662 - RNA, 19 nt, Homo sapiens
  misc_RNA (1)...(19): siRNA sense strand
guccucauauaaccucauu

SEQ ID NO: 612663 - RNA, 19 nt, Homo sapiens
  misc_RNA (1)...(19): siRNA sense strand
ucucuucauucucucauau

SEQ ID NO: 612664 - RNA, 19 nt, Homo sapiens
  misc_RNA (1)...(19): siRNA sense strand
gcucaauucaggaaguuau

SEQ ID NO: 612665 - RNA, 19 nt, Homo sapiens
  misc_RNA (1)...(19): siRNA sense strand
ggcuuaacauucuaucauc

SEQ ID NO: 612666 - RNA, 19 nt, Homo sapiens
  misc_RNA (1)...(19): siRNA sense strand
aggaaguuauuugccuuua

SEQ ID NO: 612667 - RNA, 19 nt, Homo sapiens
  misc_RNA (1)...(19): siRNA sense strand
gggugaagcagacuuguca

SEQ ID NO: 612668 - RNA, 19 nt, Homo sapiens
  misc_RNA (1)...(19): siRNA sense strand
gccuauccuucucuucauu

SEQ ID NO: 612669 - RNA, 19 nt, Homo sapiens
  misc_RNA (1)...(19): siRNA sense strand
cagcucaauucaggaaguu

SEQ ID NO: 612670 - RNA, 19 nt, Homo sapiens
  misc_RNA (1)...(19): siRNA sense strand
cuccugaucucaccagugu

SEQ ID NO: 612671 - RNA, 19 nt, Homo sapiens
  misc_RNA (1)...(19): siRNA sense strand
caauucaggaaguuauuug

SEQ ID NO: 612672 - RNA, 19 nt, Homo sapiens
  misc_RNA (1)...(19): siRNA sense strand
gcugauugucucuuuguau

SEQ ID NO: 612673 - RNA, 19 nt, Homo sapiens
  misc_RNA (1)...(19): siRNA sense strand
gcugaucauuuuggacuua

SEQ ID NO: 612674 - RNA, 19 nt, Homo sapiens
  misc_RNA (1)...(19): siRNA sense strand
cagccuauccuucucuuca

SEQ ID NO: 612675 - RNA, 19 nt, Homo sapiens
  misc_RNA (1)...(19): siRNA sense strand
uuuagagaauggaucagaa

SEQ ID NO: 612676 - RNA, 19 nt, Homo sapiens
  misc_RNA (1)...(19): siRNA sense strand
aaacagcagcauucgguau

SEQ ID NO: 612677 - RNA, 19 nt, Homo sapiens
  misc_RNA (1)...(19): siRNA sense strand
ggacuuaagcuuguuucca

SEQ ID NO: 612678 - RNA, 19 nt, Homo sapiens
  misc_RNA (1)...(19): siRNA sense strand
ugaagcagacuugucagaa

SEQ ID NO: 612679 - RNA, 19 nt, Homo sapiens
  misc_RNA (1)...(19): siRNA sense strand
guaccuguaugcauuucag

SEQ ID NO: 612680 - RNA, 19 nt, Homo sapiens
  misc_RNA (1)...(19): siRNA sense strand
aaagcuggcaguaccugua

SEQ ID NO: 612681 - RNA, 19 nt, Homo sapiens
  misc_RNA (1)...(19): siRNA sense strand
gccguuggcuucgcuaucu

SEQ ID NO: 612682 - RNA, 19 nt, Homo sapiens
  misc_RNA (1)...(19): siRNA sense strand
uuagagaauggaucagaaa

SEQ ID NO: 612683 - RNA, 19 nt, Homo sapiens
  misc_RNA (1)...(19): siRNA sense strand
gcagacuugucagaagauc

SEQ ID NO: 612684 - RNA, 19 nt, Homo sapiens
  misc_RNA (1)...(19): siRNA sense strand
caagacuuauccuccugau

SEQ ID NO: 612685 - RNA, 19 nt, Homo sapiens
  misc_RNA (1)...(19): siRNA sense strand
ggucuggaguuuuagagaa

SEQ ID NO: 612686 - RNA, 19 nt, Homo sapiens
  misc_RNA (1)...(19): siRNA sense strand
uguauacacaccacaagaa

SEQ ID NO: 612687 - RNA, 19 nt, Homo sapiens
  misc_RNA (1)...(19): siRNA sense strand
uucaacugguccucauaua

SEQ ID NO: 612688 - RNA, 19 nt, Homo sapiens
  misc_RNA (1)...(19): siRNA sense strand
uggcagugguugaauuucu

SEQ ID NO: 612689 - RNA, 19 nt, Homo sapiens
  misc_RNA (1)...(19): siRNA sense strand
cugcaguggcugaucauuu

SEQ ID NO: 612690 - RNA, 19 nt, Homo sapiens
  misc_RNA (1)...(19): siRNA sense strand
aaauucaacugguccucau

SEQ ID NO: 612691 - RNA, 19 nt, Homo sapiens
  misc_RNA (1)...(19): siRNA sense strand
ugcaguggcugaucauuuu

SEQ ID NO: 612692 - RNA, 19 nt, Homo sapiens
  misc_RNA (1)...(19): siRNA sense strand
gcugcuuccucuuacuuca

SEQ ID NO: 612693 - RNA, 19 nt, Homo sapiens
  misc_RNA (1)...(19): siRNA sense strand
auacacaccacaagaagau

SEQ ID NO: 612694 - RNA, 19 nt, Homo sapiens
  misc_RNA (1)...(19): siRNA sense strand
ucaccagugucuucaucug

SEQ ID NO: 612695 - RNA, 19 nt, Homo sapiens
  misc_RNA (1)...(19): siRNA sense strand
uccaucaccuccaagacuu

SEQ ID NO: 612696 - RNA, 19 nt, Homo sapiens
  misc_RNA (1)...(19): siRNA sense strand
acacaccacaagaagauga

SEQ ID NO: 612697 - RNA, 19 nt, Homo sapiens
  misc_RNA (1)...(19): siRNA sense strand
guuacuuacaguccaaauu

SEQ ID NO: 612698 - RNA, 19 nt, Homo sapiens
  misc_RNA (1)...(19): siRNA sense strand
ucuucauucucucauauug

SEQ ID NO: 612699 - RNA, 19 nt, Homo sapiens
  misc_RNA (1)...(19): siRNA sense strand
ccaucaccuccaagacuua

SEQ ID NO: 612700 - RNA, 19 nt, Homo sapiens
  misc_RNA (1)...(19): siRNA sense strand
guauacacaccacaagaag

SEQ ID NO: 612701 - RNA, 19 nt, Homo sapiens
  misc_RNA (1)...(19): siRNA sense strand
ucagcucaauucaggaagu

SEQ ID NO: 612702 - RNA, 19 nt, Homo sapiens
  misc_RNA (1)...(19): siRNA sense strand
uaucuucuggguccuggua

SEQ ID NO: 612703 - RNA, 19 nt, Homo sapiens
  misc_RNA (1)...(19): siRNA sense strand
gugaagcagacuugucaga

SEQ ID NO: 612704 - RNA, 19 nt, Homo sapiens
  misc_RNA (1)...(19): siRNA sense strand
cugguggucuggaguuuua

SEQ ID NO: 612705 - RNA, 19 nt, Homo sapiens
  misc_RNA (1)...(19): siRNA sense strand
gccuauaaccugagucucu

SEQ ID NO: 612706 - RNA, 19 nt, Homo sapiens
  misc_RNA (1)...(19): siRNA sense strand
cuuccucagugucuucuau

SEQ ID NO: 612707 - RNA, 19 nt, Homo sapiens
  misc_RNA (1)...(19): siRNA sense strand
ccaggccagcuuaugguuu

SEQ ID NO: 612708 - RNA, 19 nt, Homo sapiens
  misc_RNA (1)...(19): siRNA sense strand
cagcauucgguaucccuuu

SEQ ID NO: 612709 - RNA, 19 nt, Homo sapiens
  misc_RNA (1)...(19): siRNA sense strand
ucucaccagugucuucauc

SEQ ID NO: 612710 - RNA, 19 nt, Homo sapiens
  misc_RNA (1)...(19): siRNA sense strand
gaucucaccagugucuuca

SEQ ID NO: 612711 - RNA, 19 nt, Homo sapiens
  misc_RNA (1)...(19): siRNA sense strand
ggcagugguugaauuucuc

SEQ ID NO: 612712 - RNA, 19 nt, Homo sapiens
  misc_RNA (1)...(19): siRNA sense strand
caggaaguuauuugccuuu

SEQ ID NO: 612713 - RNA, 19 nt, Homo sapiens
  misc_RNA (1)...(19): siRNA sense strand
gcauucgguaucccuuuga

SEQ ID NO: 612714 - RNA, 19 nt, Homo sapiens
  misc_RNA (1)...(19): siRNA sense strand
cauucgguaucccuuugaa

SEQ ID NO: 612715 - RNA, 19 nt, Homo sapiens
  misc_RNA (1)...(19): siRNA sense strand
gaagauccuguggaagaca

SEQ ID NO: 612716 - RNA, 19 nt, Homo sapiens
  misc_RNA (1)...(19): siRNA sense strand
gggcugcuuccucuuacuu

SEQ ID NO: 612717 - RNA, 19 nt, Homo sapiens
  misc_RNA (1)...(19): siRNA sense strand
cuugggcugcuuccucuua

SEQ ID NO: 612718 - RNA, 19 nt, Homo sapiens
  misc_RNA (1)...(19): siRNA sense strand
guaugcauuucagcucaau

SEQ ID NO: 612719 - RNA, 19 nt, Homo sapiens
  misc_RNA (1)...(19): siRNA sense strand
ucagugucuucuauugcaa

SEQ ID NO: 612720 - RNA, 19 nt, Homo sapiens
  misc_RNA (1)...(19): siRNA sense strand
gagggccuauaaccugagu

SEQ ID NO: 612721 - RNA, 19 nt, Homo sapiens
  misc_RNA (1)...(19): siRNA sense strand
gaagaugacauaguuugua

SEQ ID NO: 612722 - RNA, 19 nt, Homo sapiens
  misc_RNA (1)...(19): siRNA sense strand
ucaguuaaguugucagaaa

SEQ ID NO: 612723 - RNA, 19 nt, Homo sapiens
  misc_RNA (1)...(19): siRNA sense strand
caaugcuccuguuuacuua

SEQ ID NO: 612724 - RNA, 19 nt, Homo sapiens
  misc_RNA (1)...(19): siRNA sense strand
guaaauguaccacagauga

SEQ ID NO: 612725 - RNA, 19 nt, Homo sapiens
  misc_RNA (1)...(19): siRNA sense strand
uaacaaaggccaagaccaa

SEQ ID NO: 612726 - RNA, 19 nt, Homo sapiens
  misc_RNA (1)...(19): siRNA sense strand
uccagaacguguagucuua

SEQ ID NO: 612727 - RNA, 19 nt, Homo sapiens
  misc_RNA (1)...(19): siRNA sense strand
ccaaggaccuccagaacgu

SEQ ID NO: 612728 - RNA, 19 nt, Homo sapiens
  misc_RNA (1)...(19): siRNA sense strand
gaacguguagucuuauuag

SEQ ID NO: 612729 - RNA, 19 nt, Homo sapiens
  misc_RNA (1)...(19): siRNA sense strand
ugaaauauuuggacaacuc

SEQ ID NO: 612730 - RNA, 19 nt, Homo sapiens
  misc_RNA (1)...(19): siRNA sense strand
gaugaaauauuuggacaac

SEQ ID NO: 612731 - RNA, 19 nt, Homo sapiens
  misc_RNA (1)...(19): siRNA sense strand
ucaaugcuccuguuuacuu

SEQ ID NO: 612732 - RNA, 19 nt, Homo sapiens
  misc_RNA (1)...(19): siRNA sense strand
gagaaaggaccuccaagag

SEQ ID NO: 612733 - RNA, 19 nt, Homo sapiens
  misc_RNA (1)...(19): siRNA sense strand
cagaacguguagucuuauu

SEQ ID NO: 612734 - RNA, 19 nt, Homo sapiens
  misc_RNA (1)...(19): siRNA sense strand
ccgcggaggcuuuaacaaa

SEQ ID NO: 612735 - RNA, 19 nt, Homo sapiens
  misc_RNA (1)...(19): siRNA sense strand
aggaagagguggugguuuc

SEQ ID NO: 612736 - RNA, 19 nt, Homo sapiens
  misc_RNA (1)...(19): siRNA sense strand
ugagaaaggaccuccaaga

SEQ ID NO: 612737 - RNA, 19 nt, Homo sapiens
  misc_RNA (1)...(19): siRNA sense strand
cugugaagaugacauaguu

SEQ ID NO: 612738 - RNA, 19 nt, Homo sapiens
  misc_RNA (1)...(19): siRNA sense strand
gaaauauuuggacaacuca

SEQ ID NO: 612739 - RNA, 19 nt, Homo sapiens
  misc_RNA (1)...(19): siRNA sense strand
gugaagaugacauaguuug

SEQ ID NO: 612740 - RNA, 19 nt, Homo sapiens
  misc_RNA (1)...(19): siRNA sense strand
gcuccuguuuacuuagaaa

SEQ ID NO: 612741 - RNA, 19 nt, Homo sapiens
  misc_RNA (1)...(19): siRNA sense strand
uaaauguaccacagaugaa

SEQ ID NO: 612742 - RNA, 19 nt, Homo sapiens
  misc_RNA (1)...(19): siRNA sense strand
uuggacaacucagagauuu

SEQ ID NO: 612743 - RNA, 19 nt, Homo sapiens
  misc_RNA (1)...(19): siRNA sense strand
ggaggaagagguggugguu

SEQ ID NO: 612744 - RNA, 19 nt, Homo sapiens
  misc_RNA (1)...(19): siRNA sense strand
caaaggccaagaccaagga

SEQ ID NO: 612745 - RNA, 19 nt, Homo sapiens
  misc_RNA (1)...(19): siRNA sense strand
ggaggucguggaggcuuua

SEQ ID NO: 612746 - RNA, 19 nt, Homo sapiens
  misc_RNA (1)...(19): siRNA sense strand
agaacguguagucuuauua

SEQ ID NO: 612747 - RNA, 19 nt, Homo sapiens
  misc_RNA (1)...(19): siRNA sense strand
uuucaaugcuccuguuuac

SEQ ID NO: 612748 - RNA, 19 nt, Homo sapiens
  misc_RNA (1)...(19): siRNA sense strand
cagagggagaggacauuaa

SEQ ID NO: 612749 - RNA, 19 nt, Homo sapiens
  misc_RNA (1)...(19): siRNA sense strand
ucagagggagaggacauua

SEQ ID NO: 612750 - RNA, 19 nt, Homo sapiens
  misc_RNA (1)...(19): siRNA sense strand
aagagguggugguuucaga

SEQ ID NO: 612751 - RNA, 19 nt, Homo sapiens
  misc_RNA (1)...(19): siRNA sense strand
ggucguggaggcuuuaauc

SEQ ID NO: 612752 - RNA, 19 nt, Homo sapiens
  misc_RNA (1)...(19): siRNA sense strand
ggaugaaauauuuggacaa

SEQ ID NO: 612753 - RNA, 19 nt, Homo sapiens
  misc_RNA (1)...(19): siRNA sense strand
aaauguaccacagaugaaa

SEQ ID NO: 612754 - RNA, 19 nt, Homo sapiens
  misc_RNA (1)...(19): siRNA sense strand
ggugagaaaggaccuccaa

SEQ ID NO: 612755 - RNA, 19 nt, Homo sapiens
  misc_RNA (1)...(19): siRNA sense strand
gaccaaggaccuccagaac

SEQ ID NO: 612756 - RNA, 19 nt, Homo sapiens
  misc_RNA (1)...(19): siRNA sense strand
ggaagagguggugguuuca

SEQ ID NO: 612757 - RNA, 19 nt, Homo sapiens
  misc_RNA (1)...(19): siRNA sense strand
uggaaaaguggaugaaaua

SEQ ID NO: 612758 - RNA, 19 nt, Homo sapiens
  misc_RNA (1)...(19): siRNA sense strand
gaggaagagguggugguuu

SEQ ID NO: 612759 - RNA, 19 nt, Homo sapiens
  misc_RNA (1)...(19): siRNA sense strand
caguuaaguugucagaaaa

SEQ ID NO: 612760 - RNA, 19 nt, Homo sapiens
  misc_RNA (1)...(19): siRNA sense strand
cggaggucguggaggcuuu

SEQ ID NO: 612761 - RNA, 19 nt, Homo sapiens
  misc_RNA (1)...(19): siRNA sense strand
guuccugcaucccugugaa

SEQ ID NO: 612762 - RNA, 19 nt, Homo sapiens
  misc_RNA (1)...(19): siRNA sense strand
ugaagaugacauaguuugu

SEQ ID NO: 612763 - RNA, 19 nt, Homo sapiens
  misc_RNA (1)...(19): siRNA sense strand
agaccaaggaccuccagaa

SEQ ID NO: 612764 - RNA, 19 nt, Homo sapiens
  misc_RNA (1)...(19): siRNA sense strand
cagaggcggugguuuuaga

SEQ ID NO: 612765 - RNA, 19 nt, Homo sapiens
  misc_RNA (1)...(19): siRNA sense strand
uuauuucaaugcuccuguu

SEQ ID NO: 612766 - RNA, 19 nt, Homo sapiens
  misc_RNA (1)...(19): siRNA sense strand
guaccacagaugaaaauaa

SEQ ID NO: 612767 - RNA, 19 nt, Homo sapiens
  misc_RNA (1)...(19): siRNA sense strand
gaagaugacauaguuugua

SEQ ID NO: 612768 - RNA, 19 nt, Homo sapiens
  misc_RNA (1)...(19): siRNA sense strand
ucaguuaaguugucagaaa

SEQ ID NO: 612769 - RNA, 19 nt, Homo sapiens
  misc_RNA (1)...(19): siRNA sense strand
caaugcuccuguuuacuua

SEQ ID NO: 612770 - RNA, 19 nt, Homo sapiens
  misc_RNA (1)...(19): siRNA sense strand
guaaauguaccacagauga

SEQ ID NO: 612771 - RNA, 19 nt, Homo sapiens
  misc_RNA (1)...(19): siRNA sense strand
uaacaaaggccaagaccaa

SEQ ID NO: 612772 - RNA, 19 nt, Homo sapiens
  misc_RNA (1)...(19): siRNA sense strand
uccagaacguguagucuua

SEQ ID NO: 612773 - RNA, 19 nt, Homo sapiens
  misc_RNA (1)...(19): siRNA sense strand
ccaaggaccuccagaacgu

SEQ ID NO: 612774 - RNA, 19 nt, Homo sapiens
  misc_RNA (1)...(19): siRNA sense strand
gaacguguagucuuauuag

SEQ ID NO: 612775 - RNA, 19 nt, Homo sapiens
  misc_RNA (1)...(19): siRNA sense strand
ugaaauauuuggacaacuc

SEQ ID NO: 612776 - RNA, 19 nt, Homo sapiens
  misc_RNA (1)...(19): siRNA sense strand
gaugaaauauuuggacaac

SEQ ID NO: 612777 - RNA, 19 nt, Homo sapiens
  misc_RNA (1)...(19): siRNA sense strand
ucaaugcuccuguuuacuu

SEQ ID NO: 612778 - RNA, 19 nt, Homo sapiens
  misc_RNA (1)...(19): siRNA sense strand
gagaaaggaccuccaagag

SEQ ID NO: 612779 - RNA, 19 nt, Homo sapiens
  misc_RNA (1)...(19): siRNA sense strand
cagaacguguagucuuauu

SEQ ID NO: 612780 - RNA, 19 nt, Homo sapiens
  misc_RNA (1)...(19): siRNA sense strand
ccgcggaggcuuuaacaaa

SEQ ID NO: 612781 - RNA, 19 nt, Homo sapiens
  misc_RNA (1)...(19): siRNA sense strand
aggaagagguggugguuuc

SEQ ID NO: 612782 - RNA, 19 nt, Homo sapiens
  misc_RNA (1)...(19): siRNA sense strand
ugagaaaggaccuccaaga

SEQ ID NO: 612783 - RNA, 19 nt, Homo sapiens
  misc_RNA (1)...(19): siRNA sense strand
cugugaagaugacauaguu

SEQ ID NO: 612784 - RNA, 19 nt, Homo sapiens
  misc_RNA (1)...(19): siRNA sense strand
gaaauauuuggacaacuca

SEQ ID NO: 612785 - RNA, 19 nt, Homo sapiens
  misc_RNA (1)...(19): siRNA sense strand
gugaagaugacauaguuug

SEQ ID NO: 612786 - RNA, 19 nt, Homo sapiens
  misc_RNA (1)...(19): siRNA sense strand
gcuccuguuuacuuagaaa

SEQ ID NO: 612787 - RNA, 19 nt, Homo sapiens
  misc_RNA (1)...(19): siRNA sense strand
uaaauguaccacagaugaa

SEQ ID NO: 612788 - RNA, 19 nt, Homo sapiens
  misc_RNA (1)...(19): siRNA sense strand
uuggacaacucagagauuu

SEQ ID NO: 612789 - RNA, 19 nt, Homo sapiens
  misc_RNA (1)...(19): siRNA sense strand
ggaggaagagguggugguu

SEQ ID NO: 612790 - RNA, 19 nt, Homo sapiens
  misc_RNA (1)...(19): siRNA sense strand
caaaggccaagaccaagga

SEQ ID NO: 612791 - RNA, 19 nt, Homo sapiens
  misc_RNA (1)...(19): siRNA sense strand
ggaggucguggaggcuuua

SEQ ID NO: 612792 - RNA, 19 nt, Homo sapiens
  misc_RNA (1)...(19): siRNA sense strand
agaacguguagucuuauua

SEQ ID NO: 612793 - RNA, 19 nt, Homo sapiens
  misc_RNA (1)...(19): siRNA sense strand
uuucaaugcuccuguuuac

SEQ ID NO: 612794 - RNA, 19 nt, Homo sapiens
  misc_RNA (1)...(19): siRNA sense strand
cagagggagaggacauuaa

SEQ ID NO: 612795 - RNA, 19 nt, Homo sapiens
  misc_RNA (1)...(19): siRNA sense strand
ucagagggagaggacauua

SEQ ID NO: 612796 - RNA, 19 nt, Homo sapiens
  misc_RNA (1)...(19): siRNA sense strand
aagagguggugguuucaga

SEQ ID NO: 612797 - RNA, 19 nt, Homo sapiens
  misc_RNA (1)...(19): siRNA sense strand
ggucguggaggcuuuaauc

SEQ ID NO: 612798 - RNA, 19 nt, Homo sapiens
  misc_RNA (1)...(19): siRNA sense strand
ggaugaaauauuuggacaa

SEQ ID NO: 612799 - RNA, 19 nt, Homo sapiens
  misc_RNA (1)...(19): siRNA sense strand
aaauguaccacagaugaaa

SEQ ID NO: 612800 - RNA, 19 nt, Homo sapiens
  misc_RNA (1)...(19): siRNA sense strand
ggugagaaaggaccuccaa

SEQ ID NO: 612801 - RNA, 19 nt, Homo sapiens
  misc_RNA (1)...(19): siRNA sense strand
gaccaaggaccuccagaac

SEQ ID NO: 612802 - RNA, 19 nt, Homo sapiens
  misc_RNA (1)...(19): siRNA sense strand
ggaagagguggugguuuca

SEQ ID NO: 612803 - RNA, 19 nt, Homo sapiens
  misc_RNA (1)...(19): siRNA sense strand
uggaaaaguggaugaaaua

SEQ ID NO: 612804 - RNA, 19 nt, Homo sapiens
  misc_RNA (1)...(19): siRNA sense strand
gaggaagagguggugguuu

SEQ ID NO: 612805 - RNA, 19 nt, Homo sapiens
  misc_RNA (1)...(19): siRNA sense strand
caguuaaguugucagaaaa

SEQ ID NO: 612806 - RNA, 19 nt, Homo sapiens
  misc_RNA (1)...(19): siRNA sense strand
cggaggucguggaggcuuu

SEQ ID NO: 612807 - RNA, 19 nt, Homo sapiens
  misc_RNA (1)...(19): siRNA sense strand
guuccugcaucccugugaa

SEQ ID NO: 612808 - RNA, 19 nt, Homo sapiens
  misc_RNA (1)...(19): siRNA sense strand
ugaagaugacauaguuugu

SEQ ID NO: 612809 - RNA, 19 nt, Homo sapiens
  misc_RNA (1)...(19): siRNA sense strand
cagaggcggugguuuuaga

SEQ ID NO: 612810 - RNA, 19 nt, Homo sapiens
  misc_RNA (1)...(19): siRNA sense strand
agaccaaggaccuccagaa

SEQ ID NO: 612811 - RNA, 19 nt, Homo sapiens
  misc_RNA (1)...(19): siRNA sense strand
uuauuucaaugcuccuguu

SEQ ID NO: 612812 - RNA, 19 nt, Homo sapiens
  misc_RNA (1)...(19): siRNA sense strand
guaccacagaugaaaauaa

SEQ ID NO: 612813 - RNA, 19 nt, Homo sapiens
  misc_RNA (1)...(19): siRNA sense strand
ggaaagacccuccuuguga

SEQ ID NO: 612814 - RNA, 19 nt, Homo sapiens
  misc_RNA (1)...(19): siRNA sense strand
gaaguugccuuaugccauu

SEQ ID NO: 612815 - RNA, 19 nt, Homo sapiens
  misc_RNA (1)...(19): siRNA sense strand
gaaggaggcuauuacuuga

SEQ ID NO: 612816 - RNA, 19 nt, Homo sapiens
  misc_RNA (1)...(19): siRNA sense strand
ggaagcaacucaaggagaa

SEQ ID NO: 612817 - RNA, 19 nt, Homo sapiens
  misc_RNA (1)...(19): siRNA sense strand
uaacaaacaugggaacgua

SEQ ID NO: 612818 - RNA, 19 nt, Homo sapiens
  misc_RNA (1)...(19): siRNA sense strand
cgucagcucugccuuauaa

SEQ ID NO: 612819 - RNA, 19 nt, Homo sapiens
  misc_RNA (1)...(19): siRNA sense strand
cagaaacagucaaccauaa

SEQ ID NO: 612820 - RNA, 19 nt, Homo sapiens
  misc_RNA (1)...(19): siRNA sense strand
gcagggauguucuaccauu

SEQ ID NO: 612821 - RNA, 19 nt, Homo sapiens
  misc_RNA (1)...(19): siRNA sense strand
guucauaaaucuaccaaga

SEQ ID NO: 612822 - RNA, 19 nt, Homo sapiens
  misc_RNA (1)...(19): siRNA sense strand
gaccuuacaucaccacuga

SEQ ID NO: 612823 - RNA, 19 nt, Homo sapiens
  misc_RNA (1)...(19): siRNA sense strand
ucaaggaauuugccauaaa

SEQ ID NO: 612824 - RNA, 19 nt, Homo sapiens
  misc_RNA (1)...(19): siRNA sense strand
cuaccaagaugcagaagaa

SEQ ID NO: 612825 - RNA, 19 nt, Homo sapiens
  misc_RNA (1)...(19): siRNA sense strand
gaucugcgcugagaaguuc

SEQ ID NO: 612826 - RNA, 19 nt, Homo sapiens
  misc_RNA (1)...(19): siRNA sense strand
ggagcacuuucucugauaa

SEQ ID NO: 612827 - RNA, 19 nt, Homo sapiens
  misc_RNA (1)...(19): siRNA sense strand
ggacaaaugcaccuacuuc

SEQ ID NO: 612828 - RNA, 19 nt, Homo sapiens
  misc_RNA (1)...(19): siRNA sense strand
ggagaucggagaacugaaa

SEQ ID NO: 612829 - RNA, 19 nt, Homo sapiens
  misc_RNA (1)...(19): siRNA sense strand
guauggcgcugaugacuuc

SEQ ID NO: 612830 - RNA, 19 nt, Homo sapiens
  misc_RNA (1)...(19): siRNA sense strand
caaggaauuugccauaaag

SEQ ID NO: 612831 - RNA, 19 nt, Homo sapiens
  misc_RNA (1)...(19): siRNA sense strand
ggaucuuccugguucauaa

SEQ ID NO: 612832 - RNA, 19 nt, Homo sapiens
  misc_RNA (1)...(19): siRNA sense strand
gacaugagcauuucuacuu

SEQ ID NO: 612833 - RNA, 19 nt, Homo sapiens
  misc_RNA (1)...(19): siRNA sense strand
acacaaggaugguggcuau

SEQ ID NO: 612834 - RNA, 19 nt, Homo sapiens
  misc_RNA (1)...(19): siRNA sense strand
ggaauuugccauaaaggaa

SEQ ID NO: 612835 - RNA, 19 nt, Homo sapiens
  misc_RNA (1)...(19): siRNA sense strand
gcuguuacauggagaagga

SEQ ID NO: 612836 - RNA, 19 nt, Homo sapiens
  misc_RNA (1)...(19): siRNA sense strand
gcgaggaaguuucuuuaag

SEQ ID NO: 612837 - RNA, 19 nt, Homo sapiens
  misc_RNA (1)...(19): siRNA sense strand
gcaucaagaacgauccuua

SEQ ID NO: 612838 - RNA, 19 nt, Homo sapiens
  misc_RNA (1)...(19): siRNA sense strand
gcugaucccugaagaccaa

SEQ ID NO: 612839 - RNA, 19 nt, Homo sapiens
  misc_RNA (1)...(19): siRNA sense strand
gaauuugccauaaaggaaa

SEQ ID NO: 612840 - RNA, 19 nt, Homo sapiens
  misc_RNA (1)...(19): siRNA sense strand
gcccugugcuuuauuaauc

SEQ ID NO: 612841 - RNA, 19 nt, Homo sapiens
  misc_RNA (1)...(19): siRNA sense strand
agaaggaggcuauuacuug

SEQ ID NO: 612842 - RNA, 19 nt, Homo sapiens
  misc_RNA (1)...(19): siRNA sense strand
ccagaaacagucaaccaua

SEQ ID NO: 612843 - RNA, 19 nt, Homo sapiens
  misc_RNA (1)...(19): siRNA sense strand
guguucagcuccuucauga

SEQ ID NO: 612844 - RNA, 19 nt, Homo sapiens
  misc_RNA (1)...(19): siRNA sense strand
gaaacccacagcaugguaa

SEQ ID NO: 612845 - RNA, 19 nt, Homo sapiens
  misc_RNA (1)...(19): siRNA sense strand
guucuaccauuuaccuuga

SEQ ID NO: 612846 - RNA, 19 nt, Homo sapiens
  misc_RNA (1)...(19): siRNA sense strand
gaggaugugugucagaucu

SEQ ID NO: 612847 - RNA, 19 nt, Homo sapiens
  misc_RNA (1)...(19): siRNA sense strand
gcagagggcggugcaaaga

SEQ ID NO: 612848 - RNA, 19 nt, Homo sapiens
  misc_RNA (1)...(19): siRNA sense strand
acacugaaaucgaguacau

SEQ ID NO: 612849 - RNA, 19 nt, Homo sapiens
  misc_RNA (1)...(19): siRNA sense strand
gaaacagucaaccauaaca

SEQ ID NO: 612850 - RNA, 19 nt, Homo sapiens
  misc_RNA (1)...(19): siRNA sense strand
cagcagggauguucuacca

SEQ ID NO: 612851 - RNA, 19 nt, Homo sapiens
  misc_RNA (1)...(19): siRNA sense strand
ugaaaucgaguacaugaug

SEQ ID NO: 612852 - RNA, 19 nt, Homo sapiens
  misc_RNA (1)...(19): siRNA sense strand
uuaauagucuccacacaag

SEQ ID NO: 612853 - RNA, 19 nt, Homo sapiens
  misc_RNA (1)...(19): siRNA sense strand
uggagugcauucuaucaaa

SEQ ID NO: 612854 - RNA, 19 nt, Homo sapiens
  misc_RNA (1)...(19): siRNA sense strand
cgaggaaguuucuuuaagc

SEQ ID NO: 612855 - RNA, 19 nt, Homo sapiens
  misc_RNA (1)...(19): siRNA sense strand
gagaaggaggcuauuacuu

SEQ ID NO: 612856 - RNA, 19 nt, Homo sapiens
  misc_RNA (1)...(19): siRNA sense strand
caagcgaggaaguuucuuu

SEQ ID NO: 612857 - RNA, 19 nt, Homo sapiens
  misc_RNA (1)...(19): siRNA sense strand
ccacugaggauguguguca

SEQ ID NO: 612858 - RNA, 19 nt, Homo sapiens
  misc_RNA (1)...(19): siRNA sense strand
cgacugcucagcucagaaa

SEQ ID NO: 612859 - RNA, 19 nt, Homo sapiens
  misc_RNA (1)...(19): siRNA sense strand
cagggauguucuaccauuu

SEQ ID NO: 612860 - RNA, 19 nt, Homo sapiens
  misc_RNA (1)...(19): siRNA sense strand
gaauuuccaagaagaacaa

SEQ ID NO: 612861 - RNA, 19 nt, Homo sapiens
  misc_RNA (1)...(19): siRNA sense strand
uggagcacuuucucugaua

SEQ ID NO: 612862 - RNA, 19 nt, Homo sapiens
  misc_RNA (1)...(19): siRNA sense strand
cagacgagcaugccagaaa

SEQ ID NO: 612863 - RNA, 19 nt, Homo sapiens
  misc_RNA (1)...(19): siRNA sense strand
ccaacaggcucagcaucuu

SEQ ID NO: 612864 - RNA, 19 nt, Homo sapiens
  misc_RNA (1)...(19): siRNA sense strand
cagaauuaccuccgaguug

SEQ ID NO: 612865 - RNA, 19 nt, Homo sapiens
  misc_RNA (1)...(19): siRNA sense strand
ggauguauggcgcugauga

SEQ ID NO: 612866 - RNA, 19 nt, Homo sapiens
  misc_RNA (1)...(19): siRNA sense strand
gaggauguauggcgcugau

SEQ ID NO: 612867 - RNA, 19 nt, Homo sapiens
  misc_RNA (1)...(19): siRNA sense strand
gaccggagcaugccucugu

SEQ ID NO: 612868 - RNA, 19 nt, Homo sapiens
  misc_RNA (1)...(19): siRNA sense strand
ggacaagcgaggaaguuuc

SEQ ID NO: 612869 - RNA, 19 nt, Homo sapiens
  misc_RNA (1)...(19): siRNA sense strand
ggaaggcucaggaaucagu

SEQ ID NO: 612870 - RNA, 19 nt, Homo sapiens
  misc_RNA (1)...(19): siRNA sense strand
gaguacagccucuuucucu

SEQ ID NO: 612871 - RNA, 19 nt, Homo sapiens
  misc_RNA (1)...(19): siRNA sense strand
guacagccucuuucucuuc

SEQ ID NO: 612872 - RNA, 19 nt, Homo sapiens
  misc_RNA (1)...(19): siRNA sense strand
gaggaaguuucuuuaagcu

SEQ ID NO: 612873 - RNA, 19 nt, Homo sapiens
  misc_RNA (1)...(19): siRNA sense strand
agugugacaugcuugaauu

SEQ ID NO: 612874 - RNA, 19 nt, Homo sapiens
  misc_RNA (1)...(19): siRNA sense strand
ccagaugggacuaaauuuc

SEQ ID NO: 612875 - RNA, 19 nt, Homo sapiens
  misc_RNA (1)...(19): siRNA sense strand
caacaggcucagcaucuug

SEQ ID NO: 612876 - RNA, 19 nt, Homo sapiens
  misc_RNA (1)...(19): siRNA sense strand
acaaacgcaucaagaacga

SEQ ID NO: 612877 - RNA, 19 nt, Homo sapiens
  misc_RNA (1)...(19): siRNA sense strand
gaaaaucaaagucaaguuc

SEQ ID NO: 612878 - RNA, 19 nt, Homo sapiens
  misc_RNA (1)...(19): siRNA sense strand
gaucuuccugguucauaaa

SEQ ID NO: 612879 - RNA, 19 nt, Homo sapiens
  misc_RNA (1)...(19): siRNA sense strand
caucaagaacgauccuuau

SEQ ID NO: 612880 - RNA, 19 nt, Homo sapiens
  misc_RNA (1)...(19): siRNA sense strand
gugacaugcuugaauugga

SEQ ID NO: 612881 - RNA, 19 nt, Homo sapiens
  misc_RNA (1)...(19): siRNA sense strand
ggagugcauucuaucaaaa

SEQ ID NO: 612882 - RNA, 19 nt, Homo sapiens
  misc_RNA (1)...(19): siRNA sense strand
aagcgaggaaguuucuuua

SEQ ID NO: 612883 - RNA, 19 nt, Homo sapiens
  misc_RNA (1)...(19): siRNA sense strand
ccauaaaggaaagcacaua

SEQ ID NO: 612884 - RNA, 19 nt, Homo sapiens
  misc_RNA (1)...(19): siRNA sense strand
gagauggugcggacagaug

SEQ ID NO: 612885 - RNA, 19 nt, Homo sapiens
  misc_RNA (1)...(19): siRNA sense strand
gaucccugaagaccaaaua

SEQ ID NO: 612886 - RNA, 19 nt, Homo sapiens
  misc_RNA (1)...(19): siRNA sense strand
ggucaagaacuauuugucu

SEQ ID NO: 612887 - RNA, 19 nt, Homo sapiens
  misc_RNA (1)...(19): siRNA sense strand
ccaagaugcagaagaaagu

SEQ ID NO: 612888 - RNA, 19 nt, Homo sapiens
  misc_RNA (1)...(19): siRNA sense strand
gaaguuucuuuaagcucau

SEQ ID NO: 612889 - RNA, 19 nt, Homo sapiens
  misc_RNA (1)...(19): siRNA sense strand
cuggaaggcucaggaauca

SEQ ID NO: 612890 - RNA, 19 nt, Homo sapiens
  misc_RNA (1)...(19): siRNA sense strand
gggauguucuaccauuuac

SEQ ID NO: 612891 - RNA, 19 nt, Homo sapiens
  misc_RNA (1)...(19): siRNA sense strand
ugaauuggacacugaaauc

SEQ ID NO: 612892 - RNA, 19 nt, Homo sapiens
  misc_RNA (1)...(19): siRNA sense strand
acagcagccuggaggacua

SEQ ID NO: 612893 - RNA, 19 nt, Homo sapiens
  misc_RNA (1)...(19): siRNA sense strand
cagcucugccuuauaaaug

SEQ ID NO: 612894 - RNA, 19 nt, Homo sapiens
  misc_RNA (1)...(19): siRNA sense strand
ccgccugcccugugaauuu

SEQ ID NO: 612895 - RNA, 19 nt, Homo sapiens
  misc_RNA (1)...(19): siRNA sense strand
ggagaaggaggcuauuacu

SEQ ID NO: 612896 - RNA, 19 nt, Homo sapiens
  misc_RNA (1)...(19): siRNA sense strand
aggagaaccugcagcuugu

SEQ ID NO: 612897 - RNA, 19 nt, Homo sapiens
  misc_RNA (1)...(19): siRNA sense strand
gcacagccaggaccucagu

SEQ ID NO: 612898 - RNA, 19 nt, Homo sapiens
  misc_RNA (1)...(19): siRNA sense strand
gauuuauuccggcucauug

SEQ ID NO: 612899 - RNA, 19 nt, Homo sapiens
  misc_RNA (1)...(19): siRNA sense strand
caguuucgcagauuuauuc

SEQ ID NO: 612900 - RNA, 19 nt, Homo sapiens
  misc_RNA (1)...(19): siRNA sense strand
uaugacagccucuccaaca

SEQ ID NO: 612901 - RNA, 19 nt, Homo sapiens
  misc_RNA (1)...(19): siRNA sense strand
ggucauggagaacaacuca

SEQ ID NO: 612902 - RNA, 19 nt, Homo sapiens
  misc_RNA (1)...(19): siRNA sense strand
ugaccaugcagaagaugua

SEQ ID NO: 612903 - RNA, 19 nt, Homo sapiens
  misc_RNA (1)...(19): siRNA sense strand
ccgccacccgcuauuaaua

SEQ ID NO: 612904 - RNA, 19 nt, Homo sapiens
  misc_RNA (1)...(19): siRNA sense strand
cucaaggaauuugccauaa

SEQ ID NO: 612905 - RNA, 19 nt, Homo sapiens
  misc_RNA (1)...(19): siRNA sense strand
ucaagaacgauccuuaugg

SEQ ID NO: 612906 - RNA, 19 nt, Homo sapiens
  misc_RNA (1)...(19): siRNA sense strand
gcgcugagaaguucaaggu

SEQ ID NO: 612907 - RNA, 19 nt, Homo sapiens
  misc_RNA (1)...(19): siRNA sense strand
gagcacuuucucugauaaa

SEQ ID NO: 612908 - RNA, 19 nt, Homo sapiens
  misc_RNA (1)...(19): siRNA sense strand
acacggucauggagaacaa

SEQ ID NO: 612909 - RNA, 19 nt, Homo sapiens
  misc_RNA (1)...(19): siRNA sense strand
cauggaagcaacucaagga

SEQ ID NO: 612910 - RNA, 19 nt, Homo sapiens
  misc_RNA (1)...(19): siRNA sense strand
acaugagcauuucuacuuc

SEQ ID NO: 612911 - RNA, 19 nt, Homo sapiens
  misc_RNA (1)...(19): siRNA sense strand
gcucugccuuauaaaugga

SEQ ID NO: 612912 - RNA, 19 nt, Homo sapiens
  misc_RNA (1)...(19): siRNA sense strand
uauuccggcucauugcuuu

SEQ ID NO: 612913 - RNA, 19 nt, Homo sapiens
  misc_RNA (1)...(19): siRNA sense strand
gaacaaaggugauauugaa

SEQ ID NO: 612914 - RNA, 19 nt, Homo sapiens
  misc_RNA (1)...(19): siRNA sense strand
gcacuucacucacguguuu

SEQ ID NO: 612915 - RNA, 19 nt, Homo sapiens
  misc_RNA (1)...(19): siRNA sense strand
gaacaagccuauaacuuug

SEQ ID NO: 612916 - RNA, 19 nt, Homo sapiens
  misc_RNA (1)...(19): siRNA sense strand
gaagauagauuugaagaug

SEQ ID NO: 612917 - RNA, 19 nt, Homo sapiens
  misc_RNA (1)...(19): siRNA sense strand
ggaaagacagugacaauaa

SEQ ID NO: 612918 - RNA, 19 nt, Homo sapiens
  misc_RNA (1)...(19): siRNA sense strand
gaaagacagugacaauaau

SEQ ID NO: 612919 - RNA, 19 nt, Homo sapiens
  misc_RNA (1)...(19): siRNA sense strand
ugacugagauucaugaaga

SEQ ID NO: 612920 - RNA, 19 nt, Homo sapiens
  misc_RNA (1)...(19): siRNA sense strand
aaauggaacugaaagagua

SEQ ID NO: 612921 - RNA, 19 nt, Homo sapiens
  misc_RNA (1)...(19): siRNA sense strand
gaaaauguguggaacaaaa

SEQ ID NO: 612922 - RNA, 19 nt, Homo sapiens
  misc_RNA (1)...(19): siRNA sense strand
ugaacaagccuauaacuuu

SEQ ID NO: 612923 - RNA, 19 nt, Homo sapiens
  misc_RNA (1)...(19): siRNA sense strand
uuacacaggugacgcauuu

SEQ ID NO: 612924 - RNA, 19 nt, Homo sapiens
  misc_RNA (1)...(19): siRNA sense strand
aaucagaaguuagcaguua

SEQ ID NO: 612925 - RNA, 19 nt, Homo sapiens
  misc_RNA (1)...(19): siRNA sense strand
gggagaaguugccuaagaa

SEQ ID NO: 612926 - RNA, 19 nt, Homo sapiens
  misc_RNA (1)...(19): siRNA sense strand
gggaucaucuuaagaagga

SEQ ID NO: 612927 - RNA, 19 nt, Homo sapiens
  misc_RNA (1)...(19): siRNA sense strand
uagaagcugucucugauaa

SEQ ID NO: 612928 - RNA, 19 nt, Homo sapiens
  misc_RNA (1)...(19): siRNA sense strand
uauaaagguuggaucagua

SEQ ID NO: 612929 - RNA, 19 nt, Homo sapiens
  misc_RNA (1)...(19): siRNA sense strand
ggcgauaccuugaaguaaa

SEQ ID NO: 612930 - RNA, 19 nt, Homo sapiens
  misc_RNA (1)...(19): siRNA sense strand
gaaggagaauucaucagau

SEQ ID NO: 612931 - RNA, 19 nt, Homo sapiens
  misc_RNA (1)...(19): siRNA sense strand
gacaaggucugcaucucua

SEQ ID NO: 612932 - RNA, 19 nt, Homo sapiens
  misc_RNA (1)...(19): siRNA sense strand
gguagaagcugucucugau

SEQ ID NO: 612933 - RNA, 19 nt, Homo sapiens
  misc_RNA (1)...(19): siRNA sense strand
caaaggugauauugaaguu

SEQ ID NO: 612934 - RNA, 19 nt, Homo sapiens
  misc_RNA (1)...(19): siRNA sense strand
gaagaacaaaggugauauu

SEQ ID NO: 612935 - RNA, 19 nt, Homo sapiens
  misc_RNA (1)...(19): siRNA sense strand
ggaccaagcugagcaugga

SEQ ID NO: 612936 - RNA, 19 nt, Homo sapiens
  misc_RNA (1)...(19): siRNA sense strand
aaauugacauccugacuuu

SEQ ID NO: 612937 - RNA, 19 nt, Homo sapiens
  misc_RNA (1)...(19): siRNA sense strand
caaagcuggugaagaacua

SEQ ID NO: 612938 - RNA, 19 nt, Homo sapiens
  misc_RNA (1)...(19): siRNA sense strand
caaauuacaaggagaaguu

SEQ ID NO: 612939 - RNA, 19 nt, Homo sapiens
  misc_RNA (1)...(19): siRNA sense strand
ccaauggacugaaagcaau

SEQ ID NO: 612940 - RNA, 19 nt, Homo sapiens
  misc_RNA (1)...(19): siRNA sense strand
aagaaaggcuucccucuca

SEQ ID NO: 612941 - RNA, 19 nt, Homo sapiens
  misc_RNA (1)...(19): siRNA sense strand
caaggaagcagaugacaga

SEQ ID NO: 612942 - RNA, 19 nt, Homo sapiens
  misc_RNA (1)...(19): siRNA sense strand
gaacugaaagaguauaaca

SEQ ID NO: 612943 - RNA, 19 nt, Homo sapiens
  misc_RNA (1)...(19): siRNA sense strand
gaacaugucaaauuacaag

SEQ ID NO: 612944 - RNA, 19 nt, Homo sapiens
  misc_RNA (1)...(19): siRNA sense strand
gaagcugucucugauaagu

SEQ ID NO: 612945 - RNA, 19 nt, Homo sapiens
  misc_RNA (1)...(19): siRNA sense strand
gaaauggaacugaaagagu

SEQ ID NO: 612946 - RNA, 19 nt, Homo sapiens
  misc_RNA (1)...(19): siRNA sense strand
uuacaugggaugcgauuua

SEQ ID NO: 612947 - RNA, 19 nt, Homo sapiens
  misc_RNA (1)...(19): siRNA sense strand
caaauaggagugagaguug

SEQ ID NO: 612948 - RNA, 19 nt, Homo sapiens
  misc_RNA (1)...(19): siRNA sense strand
ggaagugauugcaguugug

SEQ ID NO: 612949 - RNA, 19 nt, Homo sapiens
  misc_RNA (1)...(19): siRNA sense strand
agacauuccucaaaacuua

SEQ ID NO: 612950 - RNA, 19 nt, Homo sapiens
  misc_RNA (1)...(19): siRNA sense strand
ucgaggagauaguuauuga

SEQ ID NO: 612951 - RNA, 19 nt, Homo sapiens
  misc_RNA (1)...(19): siRNA sense strand
gaacucaagacgacaacuu

SEQ ID NO: 612952 - RNA, 19 nt, Homo sapiens
  misc_RNA (1)...(19): siRNA sense strand
gcgauaccuugaaguaaau

SEQ ID NO: 612953 - RNA, 19 nt, Homo sapiens
  misc_RNA (1)...(19): siRNA sense strand
ggaagcagguggagaaaau

SEQ ID NO: 612954 - RNA, 19 nt, Homo sapiens
  misc_RNA (1)...(19): siRNA sense strand
gaugagcgauuggguagau

SEQ ID NO: 612955 - RNA, 19 nt, Homo sapiens
  misc_RNA (1)...(19): siRNA sense strand
caauucagauuccaaaugc

SEQ ID NO: 612956 - RNA, 19 nt, Homo sapiens
  misc_RNA (1)...(19): siRNA sense strand
gcgauuggguagaugaaau

SEQ ID NO: 612957 - RNA, 19 nt, Homo sapiens
  misc_RNA (1)...(19): siRNA sense strand
gaggagauuuaugcagaaa

SEQ ID NO: 612958 - RNA, 19 nt, Homo sapiens
  misc_RNA (1)...(19): siRNA sense strand
gccuauaacuuugaaccua

SEQ ID NO: 612959 - RNA, 19 nt, Homo sapiens
  misc_RNA (1)...(19): siRNA sense strand
gaacacgucauccacuuag

SEQ ID NO: 612960 - RNA, 19 nt, Homo sapiens
  misc_RNA (1)...(19): siRNA sense strand
gaaaauaaaguguccaaug

SEQ ID NO: 612961 - RNA, 19 nt, Homo sapiens
  misc_RNA (1)...(19): siRNA sense strand
ggauauaaagguuggauca

SEQ ID NO: 612962 - RNA, 19 nt, Homo sapiens
  misc_RNA (1)...(19): siRNA sense strand
gauuauggcaugauugaug

SEQ ID NO: 612963 - RNA, 19 nt, Homo sapiens
  misc_RNA (1)...(19): siRNA sense strand
ugaucuggauagagaauaa

SEQ ID NO: 612964 - RNA, 19 nt, Homo sapiens
  misc_RNA (1)...(19): siRNA sense strand
cuaaaggaaggaagaagua

SEQ ID NO: 612965 - RNA, 19 nt, Homo sapiens
  misc_RNA (1)...(19): siRNA sense strand
caaguuuucuuccccaaua

SEQ ID NO: 612966 - RNA, 19 nt, Homo sapiens
  misc_RNA (1)...(19): siRNA sense strand
ggucaaaugaagauagauu

SEQ ID NO: 612967 - RNA, 19 nt, Homo sapiens
  misc_RNA (1)...(19): siRNA sense strand
ugggagaaguugccuaaga

SEQ ID NO: 612968 - RNA, 19 nt, Homo sapiens
  misc_RNA (1)...(19): siRNA sense strand
gagaagacaucuggaaagc

SEQ ID NO: 612969 - RNA, 19 nt, Homo sapiens
  misc_RNA (1)...(19): siRNA sense strand
cgacuuugcuguggcuuga

SEQ ID NO: 612970 - RNA, 19 nt, Homo sapiens
  misc_RNA (1)...(19): siRNA sense strand
cuacgcaggugauaaacug

SEQ ID NO: 612971 - RNA, 19 nt, Homo sapiens
  misc_RNA (1)...(19): siRNA sense strand
gcgauuauggcaugauuga

SEQ ID NO: 612972 - RNA, 19 nt, Homo sapiens
  misc_RNA (1)...(19): siRNA sense strand
ucaacccagugcuaaauga

SEQ ID NO: 612973 - RNA, 19 nt, Homo sapiens
  misc_RNA (1)...(19): siRNA sense strand
acacuaagcugaaaacugu

SEQ ID NO: 612974 - RNA, 19 nt, Homo sapiens
  misc_RNA (1)...(19): siRNA sense strand
gauacaagcgcguggacaa

SEQ ID NO: 612975 - RNA, 19 nt, Homo sapiens
  misc_RNA (1)...(19): siRNA sense strand
gauuugaagaugaucgaua

SEQ ID NO: 612976 - RNA, 19 nt, Homo sapiens
  misc_RNA (1)...(19): siRNA sense strand
ggagaaguugccuaagaaa

SEQ ID NO: 612977 - RNA, 19 nt, Homo sapiens
  misc_RNA (1)...(19): siRNA sense strand
ccuauaacuuugaaccuau

SEQ ID NO: 612978 - RNA, 19 nt, Homo sapiens
  misc_RNA (1)...(19): siRNA sense strand
caugauugaugauaugauc

SEQ ID NO: 612979 - RNA, 19 nt, Homo sapiens
  misc_RNA (1)...(19): siRNA sense strand
ggacaaggucugcaucucu

SEQ ID NO: 612980 - RNA, 19 nt, Homo sapiens
  misc_RNA (1)...(19): siRNA sense strand
guagaagcugucucugaua

SEQ ID NO: 612981 - RNA, 19 nt, Homo sapiens
  misc_RNA (1)...(19): siRNA sense strand
uaucuggucaucaucauuu

SEQ ID NO: 612982 - RNA, 19 nt, Homo sapiens
  misc_RNA (1)...(19): siRNA sense strand
ccaaauaggagugagaguu

SEQ ID NO: 612983 - RNA, 19 nt, Homo sapiens
  misc_RNA (1)...(19): siRNA sense strand
ggagaagacaucuggaaag

SEQ ID NO: 612984 - RNA, 19 nt, Homo sapiens
  misc_RNA (1)...(19): siRNA sense strand
cugcagagaugagcgauug

SEQ ID NO: 612985 - RNA, 19 nt, Homo sapiens
  misc_RNA (1)...(19): siRNA sense strand
gcaguuuggugaacaacag

SEQ ID NO: 612986 - RNA, 19 nt, Homo sapiens
  misc_RNA (1)...(19): siRNA sense strand
gccucacgcuuccggauaa

SEQ ID NO: 612987 - RNA, 19 nt, Homo sapiens
  misc_RNA (1)...(19): siRNA sense strand
gacaugccaucgaauacau

SEQ ID NO: 612988 - RNA, 19 nt, Homo sapiens
  misc_RNA (1)...(19): siRNA sense strand
cagcgauuauggcaugauu

SEQ ID NO: 612989 - RNA, 19 nt, Homo sapiens
  misc_RNA (1)...(19): siRNA sense strand
acaagguacugcagcgauu

SEQ ID NO: 612990 - RNA, 19 nt, Homo sapiens
  misc_RNA (1)...(19): siRNA sense strand
aagaguaucuggucaucau

SEQ ID NO: 612991 - RNA, 19 nt, Homo sapiens
  misc_RNA (1)...(19): siRNA sense strand
ugagauucaugaagaagau

SEQ ID NO: 612992 - RNA, 19 nt, Homo sapiens
  misc_RNA (1)...(19): siRNA sense strand
cugaaagaguauaacauga

SEQ ID NO: 612993 - RNA, 19 nt, Homo sapiens
  misc_RNA (1)...(19): siRNA sense strand
gaacgauuuugcugaagaa

SEQ ID NO: 612994 - RNA, 19 nt, Homo sapiens
  misc_RNA (1)...(19): siRNA sense strand
gcaaucaccagacccaaag

SEQ ID NO: 612995 - RNA, 19 nt, Homo sapiens
  misc_RNA (1)...(19): siRNA sense strand
gaaaggcuucccucucauc

SEQ ID NO: 612996 - RNA, 19 nt, Homo sapiens
  misc_RNA (1)...(19): siRNA sense strand
gcugggagaaguugccuaa

SEQ ID NO: 612997 - RNA, 19 nt, Homo sapiens
  misc_RNA (1)...(19): siRNA sense strand
cuucugaacaugucaaauu

SEQ ID NO: 612998 - RNA, 19 nt, Homo sapiens
  misc_RNA (1)...(19): siRNA sense strand
agaaggagaauucaucaga

SEQ ID NO: 612999 - RNA, 19 nt, Homo sapiens
  misc_RNA (1)...(19): siRNA sense strand
aaacuuagucagcuguaaa

SEQ ID NO: 613000 - RNA, 19 nt, Homo sapiens
  misc_RNA (1)...(19): siRNA sense strand
ucauuucuauggaacgauu

SEQ ID NO: 613001 - RNA, 19 nt, Homo sapiens
  misc_RNA (1)...(19): siRNA sense strand
ugaaagcaaucaggguaga

SEQ ID NO: 613002 - RNA, 19 nt, Homo sapiens
  misc_RNA (1)...(19): siRNA sense strand
caagguacugcagcgauua

SEQ ID NO: 613003 - RNA, 19 nt, Homo sapiens
  misc_RNA (1)...(19): siRNA sense strand
ugaagccacugagauacaa

SEQ ID NO: 613004 - RNA, 19 nt, Homo sapiens
  misc_RNA (1)...(19): siRNA sense strand
ucugauggauauaaagguu

SEQ ID NO: 613005 - RNA, 19 nt, Homo sapiens
  misc_RNA (1)...(19): siRNA sense strand
gaaguuagcaguuaaaagg

SEQ ID NO: 613006 - RNA, 19 nt, Homo sapiens
  misc_RNA (1)...(19): siRNA sense strand
ggguagaagcugucucuga

SEQ ID NO: 613007 - RNA, 19 nt, Homo sapiens
  misc_RNA (1)...(19): siRNA sense strand
ggacaugccaucgaauaca

SEQ ID NO: 613008 - RNA, 19 nt, Homo sapiens
  misc_RNA (1)...(19): siRNA sense strand
gauugcaguuguggaagaa

SEQ ID NO: 613009 - RNA, 19 nt, Homo sapiens
  misc_RNA (1)...(19): siRNA sense strand
ugaggagauuuaugcagaa

SEQ ID NO: 613010 - RNA, 19 nt, Homo sapiens
  misc_RNA (1)...(19): siRNA sense strand
ucauuguggucaucuguga

SEQ ID NO: 613011 - RNA, 19 nt, Homo sapiens
  misc_RNA (1)...(19): siRNA sense strand
gagagcaguuuggugaaca

SEQ ID NO: 613012 - RNA, 19 nt, Homo sapiens
  misc_RNA (1)...(19): siRNA sense strand
uaaaggaaggaagaaguaa

SEQ ID NO: 613013 - RNA, 19 nt, Homo sapiens
  misc_RNA (1)...(19): siRNA sense strand
uaaacagaauccucacuau

SEQ ID NO: 613014 - RNA, 19 nt, Homo sapiens
  misc_RNA (1)...(19): siRNA sense strand
caucggcgguauuaugaga

SEQ ID NO: 613015 - RNA, 19 nt, Homo sapiens
  misc_RNA (1)...(19): siRNA sense strand
cuaaacagaauccucacua

SEQ ID NO: 613016 - RNA, 19 nt, Homo sapiens
  misc_RNA (1)...(19): siRNA sense strand
gcgcauacaggacccuaaa

SEQ ID NO: 613017 - RNA, 19 nt, Homo sapiens
  misc_RNA (1)...(19): siRNA sense strand
uuaagcaucggcgguauua

SEQ ID NO: 613018 - RNA, 19 nt, Homo sapiens
  misc_RNA (1)...(19): siRNA sense strand
gcauacaggacccuaaaca

SEQ ID NO: 613019 - RNA, 19 nt, Homo sapiens
  misc_RNA (1)...(19): siRNA sense strand
aaacagaauccucacuaug

SEQ ID NO: 613020 - RNA, 19 nt, Homo sapiens
  misc_RNA (1)...(19): siRNA sense strand
acagaauccucacuaugga

SEQ ID NO: 613021 - RNA, 19 nt, Homo sapiens
  misc_RNA (1)...(19): siRNA sense strand
cgccaggacugugauggua

SEQ ID NO: 613022 - RNA, 19 nt, Homo sapiens
  misc_RNA (1)...(19): siRNA sense strand
gaacguggaaagcgcauac

SEQ ID NO: 613023 - RNA, 19 nt, Homo sapiens
  misc_RNA (1)...(19): siRNA sense strand
auacaggacccuaaacaga

SEQ ID NO: 613024 - RNA, 19 nt, Homo sapiens
  misc_RNA (1)...(19): siRNA sense strand
cgacagagggaaagcuaug

SEQ ID NO: 613025 - RNA, 19 nt, Homo sapiens
  misc_RNA (1)...(19): siRNA sense strand
uacaggacccuaaacagaa

SEQ ID NO: 613026 - RNA, 19 nt, Homo sapiens
  misc_RNA (1)...(19): siRNA sense strand
acaggacccuaaacagaau

SEQ ID NO: 613027 - RNA, 19 nt, Homo sapiens
  misc_RNA (1)...(19): siRNA sense strand
gagggaaagcuaugaaagg

SEQ ID NO: 613028 - RNA, 19 nt, Homo sapiens
  misc_RNA (1)...(19): siRNA sense strand
gcgaaagaaucgggcagau

SEQ ID NO: 613029 - RNA, 19 nt, Homo sapiens
  misc_RNA (1)...(19): siRNA sense strand
ccaggacugugaugguaca

SEQ ID NO: 613030 - RNA, 19 nt, Homo sapiens
  misc_RNA (1)...(19): siRNA sense strand
aagcaucggcgguauuaug

SEQ ID NO: 613031 - RNA, 19 nt, Homo sapiens
  misc_RNA (1)...(19): siRNA sense strand
cagagggaaagcuaugaaa

SEQ ID NO: 613032 - RNA, 19 nt, Homo sapiens
  misc_RNA (1)...(19): siRNA sense strand
cacuauggaugggcucauu

SEQ ID NO: 613033 - RNA, 19 nt, Homo sapiens
  misc_RNA (1)...(19): siRNA sense strand
aacagaauccucacuaugg

SEQ ID NO: 613034 - RNA, 19 nt, Homo sapiens
  misc_RNA (1)...(19): siRNA sense strand
agggaaagcuaugaaaggu

SEQ ID NO: 613035 - RNA, 19 nt, Homo sapiens
  misc_RNA (1)...(19): siRNA sense strand
gacagagggaaagcuauga

SEQ ID NO: 613036 - RNA, 19 nt, Homo sapiens
  misc_RNA (1)...(19): siRNA sense strand
cgaaagaaucgggcagauc

SEQ ID NO: 613037 - RNA, 19 nt, Homo sapiens
  misc_RNA (1)...(19): siRNA sense strand
ggcaaaacaucugaaguuc

SEQ ID NO: 613038 - RNA, 19 nt, Homo sapiens
  misc_RNA (1)...(19): siRNA sense strand
ucauugaggacauuaagca

SEQ ID NO: 613039 - RNA, 19 nt, Homo sapiens
  misc_RNA (1)...(19): siRNA sense strand
uaaacagaauccucacuau

SEQ ID NO: 613040 - RNA, 19 nt, Homo sapiens
  misc_RNA (1)...(19): siRNA sense strand
caucggcgguauuaugaga

SEQ ID NO: 613041 - RNA, 19 nt, Homo sapiens
  misc_RNA (1)...(19): siRNA sense strand
cuaaacagaauccucacua

SEQ ID NO: 613042 - RNA, 19 nt, Homo sapiens
  misc_RNA (1)...(19): siRNA sense strand
gcgcauacaggacccuaaa

SEQ ID NO: 613043 - RNA, 19 nt, Homo sapiens
  misc_RNA (1)...(19): siRNA sense strand
uuaagcaucggcgguauua

SEQ ID NO: 613044 - RNA, 19 nt, Homo sapiens
  misc_RNA (1)...(19): siRNA sense strand
gcauacaggacccuaaaca

SEQ ID NO: 613045 - RNA, 19 nt, Homo sapiens
  misc_RNA (1)...(19): siRNA sense strand
aaacagaauccucacuaug

SEQ ID NO: 613046 - RNA, 19 nt, Homo sapiens
  misc_RNA (1)...(19): siRNA sense strand
acagaauccucacuaugga

SEQ ID NO: 613047 - RNA, 19 nt, Homo sapiens
  misc_RNA (1)...(19): siRNA sense strand
cgccaggacugugauggua

SEQ ID NO: 613048 - RNA, 19 nt, Homo sapiens
  misc_RNA (1)...(19): siRNA sense strand
gaacguggaaagcgcauac

SEQ ID NO: 613049 - RNA, 19 nt, Homo sapiens
  misc_RNA (1)...(19): siRNA sense strand
auacaggacccuaaacaga

SEQ ID NO: 613050 - RNA, 19 nt, Homo sapiens
  misc_RNA (1)...(19): siRNA sense strand
cgacagagggaaagcuaug

SEQ ID NO: 613051 - RNA, 19 nt, Homo sapiens
  misc_RNA (1)...(19): siRNA sense strand
uacaggacccuaaacagaa

SEQ ID NO: 613052 - RNA, 19 nt, Homo sapiens
  misc_RNA (1)...(19): siRNA sense strand
acaggacccuaaacagaau

SEQ ID NO: 613053 - RNA, 19 nt, Homo sapiens
  misc_RNA (1)...(19): siRNA sense strand
gagggaaagcuaugaaagg

SEQ ID NO: 613054 - RNA, 19 nt, Homo sapiens
  misc_RNA (1)...(19): siRNA sense strand
gcgaaagaaucgggcagau

SEQ ID NO: 613055 - RNA, 19 nt, Homo sapiens
  misc_RNA (1)...(19): siRNA sense strand
ccaggacugugaugguaca

SEQ ID NO: 613056 - RNA, 19 nt, Homo sapiens
  misc_RNA (1)...(19): siRNA sense strand
aagcaucggcgguauuaug

SEQ ID NO: 613057 - RNA, 19 nt, Homo sapiens
  misc_RNA (1)...(19): siRNA sense strand
cagagggaaagcuaugaaa

SEQ ID NO: 613058 - RNA, 19 nt, Homo sapiens
  misc_RNA (1)...(19): siRNA sense strand
cacuauggaugggcucauu

SEQ ID NO: 613059 - RNA, 19 nt, Homo sapiens
  misc_RNA (1)...(19): siRNA sense strand
aacagaauccucacuaugg

SEQ ID NO: 613060 - RNA, 19 nt, Homo sapiens
  misc_RNA (1)...(19): siRNA sense strand
agggaaagcuaugaaaggu

SEQ ID NO: 613061 - RNA, 19 nt, Homo sapiens
  misc_RNA (1)...(19): siRNA sense strand
gacagagggaaagcuauga

SEQ ID NO: 613062 - RNA, 19 nt, Homo sapiens
  misc_RNA (1)...(19): siRNA sense strand
cgaaagaaucgggcagauc

SEQ ID NO: 613063 - RNA, 19 nt, Homo sapiens
  misc_RNA (1)...(19): siRNA sense strand
ggcaaaacaucugaaguuc

SEQ ID NO: 613064 - RNA, 19 nt, Homo sapiens
  misc_RNA (1)...(19): siRNA sense strand
ucauugaggacauuaagca

SEQ ID NO: 613065 - RNA, 19 nt, Homo sapiens
  misc_RNA (1)...(19): siRNA sense strand
ggacugcacugugaagauc

SEQ ID NO: 613066 - RNA, 19 nt, Homo sapiens
  misc_RNA (1)...(19): siRNA sense strand
gcaacgaccugaccaucuc

SEQ ID NO: 613067 - RNA, 19 nt, Homo sapiens
  misc_RNA (1)...(19): siRNA sense strand
caccucagcuucucccauu

SEQ ID NO: 613068 - RNA, 19 nt, Homo sapiens
  misc_RNA (1)...(19): siRNA sense strand
caagcccuaugacguguuu

SEQ ID NO: 613069 - RNA, 19 nt, Homo sapiens
  misc_RNA (1)...(19): siRNA sense strand
ggaccacgucauagacaua

SEQ ID NO: 613070 - RNA, 19 nt, Homo sapiens
  misc_RNA (1)...(19): siRNA sense strand
cagcggccauguccuggua

SEQ ID NO: 613071 - RNA, 19 nt, Homo sapiens
  misc_RNA (1)...(19): siRNA sense strand
cgacgacgccaccaucaaa

SEQ ID NO: 613072 - RNA, 19 nt, Homo sapiens
  misc_RNA (1)...(19): siRNA sense strand
gacgagugcuucuucaucu

SEQ ID NO: 613073 - RNA, 19 nt, Homo sapiens
  misc_RNA (1)...(19): siRNA sense strand
uccaaggacugcacuguga

SEQ ID NO: 613074 - RNA, 19 nt, Homo sapiens
  misc_RNA (1)...(19): siRNA sense strand
gggcuccgaugccuucuuc

SEQ ID NO: 613075 - RNA, 19 nt, Homo sapiens
  misc_RNA (1)...(19): siRNA sense strand
gcacgaggauguggucaac

SEQ ID NO: 613076 - RNA, 19 nt, Homo sapiens
  misc_RNA (1)...(19): siRNA sense strand
caacgacgagugcuucuuc

SEQ ID NO: 613077 - RNA, 19 nt, Homo sapiens
  misc_RNA (1)...(19): siRNA sense strand
agauugaccugcugguguu

SEQ ID NO: 613078 - RNA, 19 nt, Homo sapiens
  misc_RNA (1)...(19): siRNA sense strand
agacauacacggacacauc

SEQ ID NO: 613079 - RNA, 19 nt, Homo sapiens
  misc_RNA (1)...(19): siRNA sense strand
gacauacacggacacauca

SEQ ID NO: 613080 - RNA, 19 nt, Homo sapiens
  misc_RNA (1)...(19): siRNA sense strand
gcaguucuaccgcuacuac

SEQ ID NO: 613081 - RNA, 19 nt, Homo sapiens
  misc_RNA (1)...(19): siRNA sense strand
acacccaguucucccaguu

SEQ ID NO: 613082 - RNA, 19 nt, Homo sapiens
  misc_RNA (1)...(19): siRNA sense strand
gagcaguucuaccgcuacu

SEQ ID NO: 613083 - RNA, 19 nt, Homo sapiens
  misc_RNA (1)...(19): siRNA sense strand
ggaccgccacuacaacauc

SEQ ID NO: 613084 - RNA, 19 nt, Homo sapiens
  misc_RNA (1)...(19): siRNA sense strand
gauccugccacaccagaug

SEQ ID NO: 613085 - RNA, 19 nt, Homo sapiens
  misc_RNA (1)...(19): siRNA sense strand
cgacgagugcuucuucauc

SEQ ID NO: 613086 - RNA, 19 nt, Homo sapiens
  misc_RNA (1)...(19): siRNA sense strand
caacucaguggucuucagu

SEQ ID NO: 613087 - RNA, 19 nt, Homo sapiens
  misc_RNA (1)...(19): siRNA sense strand
ggucaacucaguggucuuc

SEQ ID NO: 613088 - RNA, 19 nt, Homo sapiens
  misc_RNA (1)...(19): siRNA sense strand
gaccgccacuacaacaucu

SEQ ID NO: 613089 - RNA, 19 nt, Homo sapiens
  misc_RNA (1)...(19): siRNA sense strand
caagauccagaaccucaau

SEQ ID NO: 613090 - RNA, 19 nt, Homo sapiens
  misc_RNA (1)...(19): siRNA sense strand
gcucggugcuguggcucaa

SEQ ID NO: 613091 - RNA, 19 nt, Homo sapiens
  misc_RNA (1)...(19): siRNA sense strand
ucucccaguucaacaagga

SEQ ID NO: 613092 - RNA, 19 nt, Homo sapiens
  misc_RNA (1)...(19): siRNA sense strand
ugucggagcgcaugcuaga

SEQ ID NO: 613093 - RNA, 19 nt, Homo sapiens
  misc_RNA (1)...(19): siRNA sense strand
ccaaggacugcacugugaa

SEQ ID NO: 613094 - RNA, 19 nt, Homo sapiens
  misc_RNA (1)...(19): siRNA sense strand
ccaugcagccgccaccaau

SEQ ID NO: 613095 - RNA, 19 nt, Homo sapiens
  misc_RNA (1)...(19): siRNA sense strand
cgagugcuucuucaucuuc

SEQ ID NO: 613096 - RNA, 19 nt, Homo sapiens
  misc_RNA (1)...(19): siRNA sense strand
ggacugcacugugaagauc

SEQ ID NO: 613097 - RNA, 19 nt, Homo sapiens
  misc_RNA (1)...(19): siRNA sense strand
gcaacgaccugaccaucuc

SEQ ID NO: 613098 - RNA, 19 nt, Homo sapiens
  misc_RNA (1)...(19): siRNA sense strand
caccucagcuucucccauu

SEQ ID NO: 613099 - RNA, 19 nt, Homo sapiens
  misc_RNA (1)...(19): siRNA sense strand
caagcccuaugacguguuu

SEQ ID NO: 613100 - RNA, 19 nt, Homo sapiens
  misc_RNA (1)...(19): siRNA sense strand
cagcggccauguccuggua

SEQ ID NO: 613101 - RNA, 19 nt, Homo sapiens
  misc_RNA (1)...(19): siRNA sense strand
uccaaggacugcacuguga

SEQ ID NO: 613102 - RNA, 19 nt, Homo sapiens
  misc_RNA (1)...(19): siRNA sense strand
gcaguucuaccgcuacuac

SEQ ID NO: 613103 - RNA, 19 nt, Homo sapiens
  misc_RNA (1)...(19): siRNA sense strand
acacccaguucucccaguu

SEQ ID NO: 613104 - RNA, 19 nt, Homo sapiens
  misc_RNA (1)...(19): siRNA sense strand
gagcaguucuaccgcuacu

SEQ ID NO: 613105 - RNA, 19 nt, Homo sapiens
  misc_RNA (1)...(19): siRNA sense strand
gcucggugcuguggcucaa

SEQ ID NO: 613106 - RNA, 19 nt, Homo sapiens
  misc_RNA (1)...(19): siRNA sense strand
ucucccaguucaacaagga

SEQ ID NO: 613107 - RNA, 19 nt, Homo sapiens
  misc_RNA (1)...(19): siRNA sense strand
ccaaggacugcacugugaa

SEQ ID NO: 613108 - RNA, 19 nt, Homo sapiens
  misc_RNA (1)...(19): siRNA sense strand
ggacugcacugugaagauc

SEQ ID NO: 613109 - RNA, 19 nt, Homo sapiens
  misc_RNA (1)...(19): siRNA sense strand
gcaacgaccugaccaucuc

SEQ ID NO: 613110 - RNA, 19 nt, Homo sapiens
  misc_RNA (1)...(19): siRNA sense strand
caccucagcuucucccauu

SEQ ID NO: 613111 - RNA, 19 nt, Homo sapiens
  misc_RNA (1)...(19): siRNA sense strand
cagcggccauguccuggua

SEQ ID NO: 613112 - RNA, 19 nt, Homo sapiens
  misc_RNA (1)...(19): siRNA sense strand
uccaaggacugcacuguga

SEQ ID NO: 613113 - RNA, 19 nt, Homo sapiens
  misc_RNA (1)...(19): siRNA sense strand
gcaguucuaccgcuacuac

SEQ ID NO: 613114 - RNA, 19 nt, Homo sapiens
  misc_RNA (1)...(19): siRNA sense strand
acacccaguucucccaguu

SEQ ID NO: 613115 - RNA, 19 nt, Homo sapiens
  misc_RNA (1)...(19): siRNA sense strand
gagcaguucuaccgcuacu

SEQ ID NO: 613116 - RNA, 19 nt, Homo sapiens
  misc_RNA (1)...(19): siRNA sense strand
ucucccaguucaacaagga

SEQ ID NO: 613117 - RNA, 19 nt, Homo sapiens
  misc_RNA (1)...(19): siRNA sense strand
ccaaggacugcacugugaa

SEQ ID NO: 613118 - RNA, 19 nt, Homo sapiens
  misc_RNA (1)...(19): siRNA sense strand
ugaauaaggucuuugauga

SEQ ID NO: 613119 - RNA, 19 nt, Homo sapiens
  misc_RNA (1)...(19): siRNA sense strand
gaaccuaaaugaccgucua

SEQ ID NO: 613120 - RNA, 19 nt, Homo sapiens
  misc_RNA (1)...(19): siRNA sense strand
gaagagagagauauaaaga

SEQ ID NO: 613121 - RNA, 19 nt, Homo sapiens
  misc_RNA (1)...(19): siRNA sense strand
cauaaagacucgacuugaa

SEQ ID NO: 613122 - RNA, 19 nt, Homo sapiens
  misc_RNA (1)...(19): siRNA sense strand
agaccuagcucuccucaaa

SEQ ID NO: 613123 - RNA, 19 nt, Homo sapiens
  misc_RNA (1)...(19): siRNA sense strand
aaacagauuuggagauuca

SEQ ID NO: 613124 - RNA, 19 nt, Homo sapiens
  misc_RNA (1)...(19): siRNA sense strand
gagcugcgaagucagauua

SEQ ID NO: 613125 - RNA, 19 nt, Homo sapiens
  misc_RNA (1)...(19): siRNA sense strand
aacaggaaauugcuacuua

SEQ ID NO: 613126 - RNA, 19 nt, Homo sapiens
  misc_RNA (1)...(19): siRNA sense strand
gaacaacgaauaccauauc

SEQ ID NO: 613127 - RNA, 19 nt, Homo sapiens
  misc_RNA (1)...(19): siRNA sense strand
gaaaugaggcagaaguaug

SEQ ID NO: 613128 - RNA, 19 nt, Homo sapiens
  misc_RNA (1)...(19): siRNA sense strand
gaacuccagucccaucuca

SEQ ID NO: 613129 - RNA, 19 nt, Homo sapiens
  misc_RNA (1)...(19): siRNA sense strand
gcaaggucgugucaucuga

SEQ ID NO: 613130 - RNA, 19 nt, Homo sapiens
  misc_RNA (1)...(19): siRNA sense strand
gggcaacacugucaaugug

SEQ ID NO: 613131 - RNA, 19 nt, Homo sapiens
  misc_RNA (1)...(19): siRNA sense strand
ggacgacacccagcguuua

SEQ ID NO: 613132 - RNA, 19 nt, Homo sapiens
  misc_RNA (1)...(19): siRNA sense strand
ccaggaagauuaagacagu

SEQ ID NO: 613133 - RNA, 19 nt, Homo sapiens
  misc_RNA (1)...(19): siRNA sense strand
ccauauccuucuugacaua

SEQ ID NO: 613134 - RNA, 19 nt, Homo sapiens
  misc_RNA (1)...(19): siRNA sense strand
gcgacuacagugcauauua

SEQ ID NO: 613135 - RNA, 19 nt, Homo sapiens
  misc_RNA (1)...(19): siRNA sense strand
ucaaagagguggaagaaaa

SEQ ID NO: 613136 - RNA, 19 nt, Homo sapiens
  misc_RNA (1)...(19): siRNA sense strand
gagagaggaauacgucuaa

SEQ ID NO: 613137 - RNA, 19 nt, Homo sapiens
  misc_RNA (1)...(19): siRNA sense strand
gaagagcugcgaagucaga

SEQ ID NO: 613138 - RNA, 19 nt, Homo sapiens
  misc_RNA (1)...(19): siRNA sense strand
gauuaaggaugcucaacug

SEQ ID NO: 613139 - RNA, 19 nt, Homo sapiens
  misc_RNA (1)...(19): siRNA sense strand
cgcagaagcuuccacagaa

SEQ ID NO: 613140 - RNA, 19 nt, Homo sapiens
  misc_RNA (1)...(19): siRNA sense strand
gcauauuacagacaaauug

SEQ ID NO: 613141 - RNA, 19 nt, Homo sapiens
  misc_RNA (1)...(19): siRNA sense strand
caacgaauaccauauccuu

SEQ ID NO: 613142 - RNA, 19 nt, Homo sapiens
  misc_RNA (1)...(19): siRNA sense strand
uaaggaugcucaacugcaa

SEQ ID NO: 613143 - RNA, 19 nt, Homo sapiens
  misc_RNA (1)...(19): siRNA sense strand
ugaccuaacccuacauaaa

SEQ ID NO: 613144 - RNA, 19 nt, Homo sapiens
  misc_RNA (1)...(19): siRNA sense strand
ugaaugaaaugaggcagaa

SEQ ID NO: 613145 - RNA, 19 nt, Homo sapiens
  misc_RNA (1)...(19): siRNA sense strand
gguguguccugcaaauuga

SEQ ID NO: 613146 - RNA, 19 nt, Homo sapiens
  misc_RNA (1)...(19): siRNA sense strand
cgugucaucugaagucaaa

SEQ ID NO: 613147 - RNA, 19 nt, Homo sapiens
  misc_RNA (1)...(19): siRNA sense strand
ggaagucgauggccuacac

SEQ ID NO: 613148 - RNA, 19 nt, Homo sapiens
  misc_RNA (1)...(19): siRNA sense strand
gaacaggaaauugcuacuu

SEQ ID NO: 613149 - RNA, 19 nt, Homo sapiens
  misc_RNA (1)...(19): siRNA sense strand
cgacuacagugcauauuac

SEQ ID NO: 613150 - RNA, 19 nt, Homo sapiens
  misc_RNA (1)...(19): siRNA sense strand
ggaaggagaagacguaaaa

SEQ ID NO: 613151 - RNA, 19 nt, Homo sapiens
  misc_RNA (1)...(19): siRNA sense strand
aaaugaggcagaaguauga

SEQ ID NO: 613152 - RNA, 19 nt, Homo sapiens
  misc_RNA (1)...(19): siRNA sense strand
ggaagagagagauauaaag

SEQ ID NO: 613153 - RNA, 19 nt, Homo sapiens
  misc_RNA (1)...(19): siRNA sense strand
cagaacaacgaauaccaua

SEQ ID NO: 613154 - RNA, 19 nt, Homo sapiens
  misc_RNA (1)...(19): siRNA sense strand
gacacacggugaacuaugg

SEQ ID NO: 613155 - RNA, 19 nt, Homo sapiens
  misc_RNA (1)...(19): siRNA sense strand
cgaauaccauauccuucuu

SEQ ID NO: 613156 - RNA, 19 nt, Homo sapiens
  misc_RNA (1)...(19): siRNA sense strand
ccagacacacggugaacua

SEQ ID NO: 613157 - RNA, 19 nt, Homo sapiens
  misc_RNA (1)...(19): siRNA sense strand
gaaccuuggcgucaucaug

SEQ ID NO: 613158 - RNA, 19 nt, Homo sapiens
  misc_RNA (1)...(19): siRNA sense strand
uugaagagcugcgaaguca

SEQ ID NO: 613159 - RNA, 19 nt, Homo sapiens
  misc_RNA (1)...(19): siRNA sense strand
gacauaaagacucgacuug

SEQ ID NO: 613160 - RNA, 19 nt, Homo sapiens
  misc_RNA (1)...(19): siRNA sense strand
ugaugcagauucggaguaa

SEQ ID NO: 613161 - RNA, 19 nt, Homo sapiens
  misc_RNA (1)...(19): siRNA sense strand
gaugaccuaacccuacaua

SEQ ID NO: 613162 - RNA, 19 nt, Homo sapiens
  misc_RNA (1)...(19): siRNA sense strand
gaccuaacccuacauaaaa

SEQ ID NO: 613163 - RNA, 19 nt, Homo sapiens
  misc_RNA (1)...(19): siRNA sense strand
uuaagacagucgugcaaga

SEQ ID NO: 613164 - RNA, 19 nt, Homo sapiens
  misc_RNA (1)...(19): siRNA sense strand
gaagucauggcccagaaga

SEQ ID NO: 613165 - RNA, 19 nt, Homo sapiens
  misc_RNA (1)...(19): siRNA sense strand
ggaccuguuuguuggcaau

SEQ ID NO: 613166 - RNA, 19 nt, Homo sapiens
  misc_RNA (1)...(19): siRNA sense strand
gaucuccaaggccugaaua

SEQ ID NO: 613167 - RNA, 19 nt, Homo sapiens
  misc_RNA (1)...(19): siRNA sense strand
gacagucgugcaagaagua

SEQ ID NO: 613168 - RNA, 19 nt, Homo sapiens
  misc_RNA (1)...(19): siRNA sense strand
cuacagugcauauuacaga

SEQ ID NO: 613169 - RNA, 19 nt, Homo sapiens
  misc_RNA (1)...(19): siRNA sense strand
ccagagccuugagauagaa

SEQ ID NO: 613170 - RNA, 19 nt, Homo sapiens
  misc_RNA (1)...(19): siRNA sense strand
aagaacaguuugagagaca

SEQ ID NO: 613171 - RNA, 19 nt, Homo sapiens
  misc_RNA (1)...(19): siRNA sense strand
uaccauauccuucuugaca

SEQ ID NO: 613172 - RNA, 19 nt, Homo sapiens
  misc_RNA (1)...(19): siRNA sense strand
aagaaaaccaggaagauua

SEQ ID NO: 613173 - RNA, 19 nt, Homo sapiens
  misc_RNA (1)...(19): siRNA sense strand
caguccaacuccaaacuug

SEQ ID NO: 613174 - RNA, 19 nt, Homo sapiens
  misc_RNA (1)...(19): siRNA sense strand
uggaagagagagauauaaa

SEQ ID NO: 613175 - RNA, 19 nt, Homo sapiens
  misc_RNA (1)...(19): siRNA sense strand
ccaugcagaaccuaaauga

SEQ ID NO: 613176 - RNA, 19 nt, Homo sapiens
  misc_RNA (1)...(19): siRNA sense strand
cccagagccuugagauaga

SEQ ID NO: 613177 - RNA, 19 nt, Homo sapiens
  misc_RNA (1)...(19): siRNA sense strand
agaacugaauaaagaccua

SEQ ID NO: 613178 - RNA, 19 nt, Homo sapiens
  misc_RNA (1)...(19): siRNA sense strand
gaaguaugagacugagaga

SEQ ID NO: 613179 - RNA, 19 nt, Homo sapiens
  misc_RNA (1)...(19): siRNA sense strand
gaauaccauauccuucuug

SEQ ID NO: 613180 - RNA, 19 nt, Homo sapiens
  misc_RNA (1)...(19): siRNA sense strand
gagaggaauacgucuaaca

SEQ ID NO: 613181 - RNA, 19 nt, Homo sapiens
  misc_RNA (1)...(19): siRNA sense strand
uaagacagucgugcaagaa

SEQ ID NO: 613182 - RNA, 19 nt, Homo sapiens
  misc_RNA (1)...(19): siRNA sense strand
gcaguccaacuccaaacuu

SEQ ID NO: 613183 - RNA, 19 nt, Homo sapiens
  misc_RNA (1)...(19): siRNA sense strand
aauaccauauccuucuuga

SEQ ID NO: 613184 - RNA, 19 nt, Homo sapiens
  misc_RNA (1)...(19): siRNA sense strand
gaacaguuugagagacaga

SEQ ID NO: 613185 - RNA, 19 nt, Homo sapiens
  misc_RNA (1)...(19): siRNA sense strand
gaauaaggucuuugaugac

SEQ ID NO: 613186 - RNA, 19 nt, Homo sapiens
  misc_RNA (1)...(19): siRNA sense strand
gacgacacccagcguuuau

SEQ ID NO: 613187 - RNA, 19 nt, Homo sapiens
  misc_RNA (1)...(19): siRNA sense strand
gggacgacacccagcguuu

SEQ ID NO: 613188 - RNA, 19 nt, Homo sapiens
  misc_RNA (1)...(19): siRNA sense strand
caucucagcaugaaagagu

SEQ ID NO: 613189 - RNA, 19 nt, Homo sapiens
  misc_RNA (1)...(19): siRNA sense strand
gauuaagacagucgugcaa

SEQ ID NO: 613190 - RNA, 19 nt, Homo sapiens
  misc_RNA (1)...(19): siRNA sense strand
ccuggaagagagagauaua

SEQ ID NO: 613191 - RNA, 19 nt, Homo sapiens
  misc_RNA (1)...(19): siRNA sense strand
ugagagaggaauacgucua

SEQ ID NO: 613192 - RNA, 19 nt, Homo sapiens
  misc_RNA (1)...(19): siRNA sense strand
aaaggagcaucaggaggaa

SEQ ID NO: 613193 - RNA, 19 nt, Homo sapiens
  misc_RNA (1)...(19): siRNA sense strand
uccaaggccugaauaaggu

SEQ ID NO: 613194 - RNA, 19 nt, Homo sapiens
  misc_RNA (1)...(19): siRNA sense strand
uaacauggaacgccagaac

SEQ ID NO: 613195 - RNA, 19 nt, Homo sapiens
  misc_RNA (1)...(19): siRNA sense strand
agacagucgugcaagaagu

SEQ ID NO: 613196 - RNA, 19 nt, Homo sapiens
  misc_RNA (1)...(19): siRNA sense strand
cgacuugaacaggaaauug

SEQ ID NO: 613197 - RNA, 19 nt, Homo sapiens
  misc_RNA (1)...(19): siRNA sense strand
uaaagacucgacuugaaca

SEQ ID NO: 613198 - RNA, 19 nt, Homo sapiens
  misc_RNA (1)...(19): siRNA sense strand
ugacauaaagacucgacuu

SEQ ID NO: 613199 - RNA, 19 nt, Homo sapiens
  misc_RNA (1)...(19): siRNA sense strand
cagugcauauuacagacaa

SEQ ID NO: 613200 - RNA, 19 nt, Homo sapiens
  misc_RNA (1)...(19): siRNA sense strand
ucgcagaagcuuccacaga

SEQ ID NO: 613201 - RNA, 19 nt, Homo sapiens
  misc_RNA (1)...(19): siRNA sense strand
gauucggaguaacauggaa

SEQ ID NO: 613202 - RNA, 19 nt, Homo sapiens
  misc_RNA (1)...(19): siRNA sense strand
gacugaaguaugagacuga

SEQ ID NO: 613203 - RNA, 19 nt, Homo sapiens
  misc_RNA (1)...(19): siRNA sense strand
ggucgugucaucugaaguc

SEQ ID NO: 613204 - RNA, 19 nt, Homo sapiens
  misc_RNA (1)...(19): siRNA sense strand
acauaaagacucgacuuga

SEQ ID NO: 613205 - RNA, 19 nt, Homo sapiens
  misc_RNA (1)...(19): siRNA sense strand
gaggaauacgucuaacagu

SEQ ID NO: 613206 - RNA, 19 nt, Homo sapiens
  misc_RNA (1)...(19): siRNA sense strand
guccaacuccaaacuugaa

SEQ ID NO: 613207 - RNA, 19 nt, Homo sapiens
  misc_RNA (1)...(19): siRNA sense strand
ucuggaaggagaagacgua

SEQ ID NO: 613208 - RNA, 19 nt, Homo sapiens
  misc_RNA (1)...(19): siRNA sense strand
acaggaaauugcuacuuac

SEQ ID NO: 613209 - RNA, 19 nt, Homo sapiens
  misc_RNA (1)...(19): siRNA sense strand
gacucgacuugaacaggaa

SEQ ID NO: 613210 - RNA, 19 nt, Homo sapiens
  misc_RNA (1)...(19): siRNA sense strand
ugaaaugaggcagaaguau

SEQ ID NO: 613211 - RNA, 19 nt, Homo sapiens
  misc_RNA (1)...(19): siRNA sense strand
cugaauaaggucuuugaug

SEQ ID NO: 613212 - RNA, 19 nt, Homo sapiens
  misc_RNA (1)...(19): siRNA sense strand
cuacagaauaucaguuaag

SEQ ID NO: 613213 - RNA, 19 nt, Homo sapiens
  misc_RNA (1)...(19): siRNA sense strand
caucugggcaacacuguca

SEQ ID NO: 613214 - RNA, 19 nt, Homo sapiens
  misc_RNA (1)...(19): siRNA sense strand
ucaagaggccaaagaacag

SEQ ID NO: 613215 - RNA, 19 nt, Homo sapiens
  misc_RNA (1)...(19): siRNA sense strand
caaggucgugucaucugaa

SEQ ID NO: 613216 - RNA, 19 nt, Homo sapiens
  misc_RNA (1)...(19): siRNA sense strand
ucaguuaagcacccuggaa

SEQ ID NO: 613217 - RNA, 19 nt, Homo sapiens
  misc_RNA (1)...(19): siRNA sense strand
ccagaacaacgaauaccau

SEQ ID NO: 613218 - RNA, 19 nt, Homo sapiens
  misc_RNA (1)...(19): siRNA sense strand
gaacagaucuucaugaaug

SEQ ID NO: 613219 - RNA, 19 nt, Homo sapiens
  misc_RNA (1)...(19): siRNA sense strand
gaaguuagaugacgaugga

SEQ ID NO: 613220 - RNA, 19 nt, Homo sapiens
  misc_RNA (1)...(19): siRNA sense strand
ggacaauccugauaguuug

SEQ ID NO: 613221 - RNA, 19 nt, Homo sapiens
  misc_RNA (1)...(19): siRNA sense strand
ucauaggagugguuuauua

SEQ ID NO: 613222 - RNA, 19 nt, Homo sapiens
  misc_RNA (1)...(19): siRNA sense strand
uaucagcgcuuacgccaua

SEQ ID NO: 613223 - RNA, 19 nt, Homo sapiens
  misc_RNA (1)...(19): siRNA sense strand
gacgauggauugccguuua

SEQ ID NO: 613224 - RNA, 19 nt, Homo sapiens
  misc_RNA (1)...(19): siRNA sense strand
ggucagcucuuccuuaugu

SEQ ID NO: 613225 - RNA, 19 nt, Homo sapiens
  misc_RNA (1)...(19): siRNA sense strand
gaagaugccaugauuguga

SEQ ID NO: 613226 - RNA, 19 nt, Homo sapiens
  misc_RNA (1)...(19): siRNA sense strand
cuacaagucugaguucaua

SEQ ID NO: 613227 - RNA, 19 nt, Homo sapiens
  misc_RNA (1)...(19): siRNA sense strand
gaacuuagcauugggcaaa

SEQ ID NO: 613228 - RNA, 19 nt, Homo sapiens
  misc_RNA (1)...(19): siRNA sense strand
caugaacacugacaauuug

SEQ ID NO: 613229 - RNA, 19 nt, Homo sapiens
  misc_RNA (1)...(19): siRNA sense strand
gacccuccauguaugauua

SEQ ID NO: 613230 - RNA, 19 nt, Homo sapiens
  misc_RNA (1)...(19): siRNA sense strand
ccaccuaacugccguaugu

SEQ ID NO: 613231 - RNA, 19 nt, Homo sapiens
  misc_RNA (1)...(19): siRNA sense strand
gaacucggccuuagaauac

SEQ ID NO: 613232 - RNA, 19 nt, Homo sapiens
  misc_RNA (1)...(19): siRNA sense strand
gaacauuccgcugucaaua

SEQ ID NO: 613233 - RNA, 19 nt, Homo sapiens
  misc_RNA (1)...(19): siRNA sense strand
gcuuuccacuucucacuua

SEQ ID NO: 613234 - RNA, 19 nt, Homo sapiens
  misc_RNA (1)...(19): siRNA sense strand
ucucagauguuaaggauug

SEQ ID NO: 613235 - RNA, 19 nt, Homo sapiens
  misc_RNA (1)...(19): siRNA sense strand
cagauucucuucgucauuu

SEQ ID NO: 613236 - RNA, 19 nt, Homo sapiens
  misc_RNA (1)...(19): siRNA sense strand
gaacccaacuaucggagau

SEQ ID NO: 613237 - RNA, 19 nt, Homo sapiens
  misc_RNA (1)...(19): siRNA sense strand
gcuaugaacaucaaaguga

SEQ ID NO: 613238 - RNA, 19 nt, Homo sapiens
  misc_RNA (1)...(19): siRNA sense strand
ccauugggauguuaauuga

SEQ ID NO: 613239 - RNA, 19 nt, Homo sapiens
  misc_RNA (1)...(19): siRNA sense strand
gaucauacagugagugcua

SEQ ID NO: 613240 - RNA, 19 nt, Homo sapiens
  misc_RNA (1)...(19): siRNA sense strand
ggagaacucggccuuagaa

SEQ ID NO: 613241 - RNA, 19 nt, Homo sapiens
  misc_RNA (1)...(19): siRNA sense strand
ggauggaagugguccuuau

SEQ ID NO: 613242 - RNA, 19 nt, Homo sapiens
  misc_RNA (1)...(19): siRNA sense strand
gauaguagccugguguuug

SEQ ID NO: 613243 - RNA, 19 nt, Homo sapiens
  misc_RNA (1)...(19): siRNA sense strand
gaaugucgcuaucuuugag

SEQ ID NO: 613244 - RNA, 19 nt, Homo sapiens
  misc_RNA (1)...(19): siRNA sense strand
gauaagaaggcucagaaga

SEQ ID NO: 613245 - RNA, 19 nt, Homo sapiens
  misc_RNA (1)...(19): siRNA sense strand
gcaccgagagguuauauag

SEQ ID NO: 613246 - RNA, 19 nt, Homo sapiens
  misc_RNA (1)...(19): siRNA sense strand
caaagaagagcuaauugga

SEQ ID NO: 613247 - RNA, 19 nt, Homo sapiens
  misc_RNA (1)...(19): siRNA sense strand
gcucagaagaccaguguuu

SEQ ID NO: 613248 - RNA, 19 nt, Homo sapiens
  misc_RNA (1)...(19): siRNA sense strand
gaagaacauuccgcuguca

SEQ ID NO: 613249 - RNA, 19 nt, Homo sapiens
  misc_RNA (1)...(19): siRNA sense strand
ggugagacccuccauguau

SEQ ID NO: 613250 - RNA, 19 nt, Homo sapiens
  misc_RNA (1)...(19): siRNA sense strand
gauggaagugguccuuaua

SEQ ID NO: 613251 - RNA, 19 nt, Homo sapiens
  misc_RNA (1)...(19): siRNA sense strand
gaagguugguuagugucua

SEQ ID NO: 613252 - RNA, 19 nt, Homo sapiens
  misc_RNA (1)...(19): siRNA sense strand
uggaacagaucuucaugaa

SEQ ID NO: 613253 - RNA, 19 nt, Homo sapiens
  misc_RNA (1)...(19): siRNA sense strand
gcaaagaagagcuaauugg

SEQ ID NO: 613254 - RNA, 19 nt, Homo sapiens
  misc_RNA (1)...(19): siRNA sense strand
ccaugaacacugacaauuu

SEQ ID NO: 613255 - RNA, 19 nt, Homo sapiens
  misc_RNA (1)...(19): siRNA sense strand
gcacuuaaggcacuuguca

SEQ ID NO: 613256 - RNA, 19 nt, Homo sapiens
  misc_RNA (1)...(19): siRNA sense strand
ggauguuaauugagaguau

SEQ ID NO: 613257 - RNA, 19 nt, Homo sapiens
  misc_RNA (1)...(19): siRNA sense strand
gaucggauaacaaacugua

SEQ ID NO: 613258 - RNA, 19 nt, Homo sapiens
  misc_RNA (1)...(19): siRNA sense strand
gaagagcuaauuggaacua

SEQ ID NO: 613259 - RNA, 19 nt, Homo sapiens
  misc_RNA (1)...(19): siRNA sense strand
gggcaaagaagagcuaauu

SEQ ID NO: 613260 - RNA, 19 nt, Homo sapiens
  misc_RNA (1)...(19): siRNA sense strand
cggcaucuauuccagcuuu

SEQ ID NO: 613261 - RNA, 19 nt, Homo sapiens
  misc_RNA (1)...(19): siRNA sense strand
gagagugcauggaggacaa

SEQ ID NO: 613262 - RNA, 19 nt, Homo sapiens
  misc_RNA (1)...(19): siRNA sense strand
gaggagaacucggccuuag

SEQ ID NO: 613263 - RNA, 19 nt, Homo sapiens
  misc_RNA (1)...(19): siRNA sense strand
guuaaggauuguaauggaa

SEQ ID NO: 613264 - RNA, 19 nt, Homo sapiens
  misc_RNA (1)...(19): siRNA sense strand
ugugaaguguggcaguuua

SEQ ID NO: 613265 - RNA, 19 nt, Homo sapiens
  misc_RNA (1)...(19): siRNA sense strand
agacaaauuucaaguaagg

SEQ ID NO: 613266 - RNA, 19 nt, Homo sapiens
  misc_RNA (1)...(19): siRNA sense strand
gaugaggaccaccacagua

SEQ ID NO: 613267 - RNA, 19 nt, Homo sapiens
  misc_RNA (1)...(19): siRNA sense strand
gaacacugacaauuugaug

SEQ ID NO: 613268 - RNA, 19 nt, Homo sapiens
  misc_RNA (1)...(19): siRNA sense strand
uaaggcacuugucagcuuu

SEQ ID NO: 613269 - RNA, 19 nt, Homo sapiens
  misc_RNA (1)...(19): siRNA sense strand
uaggagugguuuauuauca

SEQ ID NO: 613270 - RNA, 19 nt, Homo sapiens
  misc_RNA (1)...(19): siRNA sense strand
gcacagaggggcugauuuu

SEQ ID NO: 613271 - RNA, 19 nt, Homo sapiens
  misc_RNA (1)...(19): siRNA sense strand
cugcggaguuccuguuuaa

SEQ ID NO: 613272 - RNA, 19 nt, Homo sapiens
  misc_RNA (1)...(19): siRNA sense strand
gcugcggaguuccuguuua

SEQ ID NO: 613273 - RNA, 19 nt, Homo sapiens
  misc_RNA (1)...(19): siRNA sense strand
cuacaagauucuggacuuu

SEQ ID NO: 613274 - RNA, 19 nt, Homo sapiens
  misc_RNA (1)...(19): siRNA sense strand
gcuggacggugucaugguu

SEQ ID NO: 613275 - RNA, 19 nt, Homo sapiens
  misc_RNA (1)...(19): siRNA sense strand
auacuuuggugagauguua

SEQ ID NO: 613276 - RNA, 19 nt, Homo sapiens
  misc_RNA (1)...(19): siRNA sense strand
gauuaugccucggagaaau

SEQ ID NO: 613277 - RNA, 19 nt, Homo sapiens
  misc_RNA (1)...(19): siRNA sense strand
caagaccgaucggauaaca

SEQ ID NO: 613278 - RNA, 19 nt, Homo sapiens
  misc_RNA (1)...(19): siRNA sense strand
gugcagaacuuagcauugg

SEQ ID NO: 613279 - RNA, 19 nt, Homo sapiens
  misc_RNA (1)...(19): siRNA sense strand
uauaugcuuugucucauga

SEQ ID NO: 613280 - RNA, 19 nt, Homo sapiens
  misc_RNA (1)...(19): siRNA sense strand
gugcaucuguauccacuug

SEQ ID NO: 613281 - RNA, 19 nt, Homo sapiens
  misc_RNA (1)...(19): siRNA sense strand
gcaucuguauccacuugaa

SEQ ID NO: 613282 - RNA, 19 nt, Homo sapiens
  misc_RNA (1)...(19): siRNA sense strand
ggaacgggaugcgcuuuua

SEQ ID NO: 613283 - RNA, 19 nt, Homo sapiens
  misc_RNA (1)...(19): siRNA sense strand
uuaaggcacuugucagcuu

SEQ ID NO: 613284 - RNA, 19 nt, Homo sapiens
  misc_RNA (1)...(19): siRNA sense strand
acuaugggcuuuccacuuc

SEQ ID NO: 613285 - RNA, 19 nt, Homo sapiens
  misc_RNA (1)...(19): siRNA sense strand
uacgcuaccucucccauuu

SEQ ID NO: 613286 - RNA, 19 nt, Homo sapiens
  misc_RNA (1)...(19): siRNA sense strand
aauccaagcuuugcaacuu

SEQ ID NO: 613287 - RNA, 19 nt, Homo sapiens
  misc_RNA (1)...(19): siRNA sense strand
gaacaucaaagugaaacug

SEQ ID NO: 613288 - RNA, 19 nt, Homo sapiens
  misc_RNA (1)...(19): siRNA sense strand
gaacuggcagcuaugaaca

SEQ ID NO: 613289 - RNA, 19 nt, Homo sapiens
  misc_RNA (1)...(19): siRNA sense strand
gacacuaucgauacuguuu

SEQ ID NO: 613290 - RNA, 19 nt, Homo sapiens
  misc_RNA (1)...(19): siRNA sense strand
gcaguuucuuggcuauguu

SEQ ID NO: 613291 - RNA, 19 nt, Homo sapiens
  misc_RNA (1)...(19): siRNA sense strand
guugguuagugucuauuaa

SEQ ID NO: 613292 - RNA, 19 nt, Homo sapiens
  misc_RNA (1)...(19): siRNA sense strand
gaguuucaaugcacugugu

SEQ ID NO: 613293 - RNA, 19 nt, Homo sapiens
  misc_RNA (1)...(19): siRNA sense strand
agaacucggccuuagaaua

SEQ ID NO: 613294 - RNA, 19 nt, Homo sapiens
  misc_RNA (1)...(19): siRNA sense strand
cgggaagucugcagcuuug

SEQ ID NO: 613295 - RNA, 19 nt, Homo sapiens
  misc_RNA (1)...(19): siRNA sense strand
gccuaaagcacuugacuga

SEQ ID NO: 613296 - RNA, 19 nt, Homo sapiens
  misc_RNA (1)...(19): siRNA sense strand
ucauagaccucucugaaaa

SEQ ID NO: 613297 - RNA, 19 nt, Homo sapiens
  misc_RNA (1)...(19): siRNA sense strand
ucguugcugugauuucuua

SEQ ID NO: 613298 - RNA, 19 nt, Homo sapiens
  misc_RNA (1)...(19): siRNA sense strand
gugagacccuccauguaug

SEQ ID NO: 613299 - RNA, 19 nt, Homo sapiens
  misc_RNA (1)...(19): siRNA sense strand
caaaaggaaucauuaagca

SEQ ID NO: 613300 - RNA, 19 nt, Homo sapiens
  misc_RNA (1)...(19): siRNA sense strand
ccuacaagauucuggacuu

SEQ ID NO: 613301 - RNA, 19 nt, Homo sapiens
  misc_RNA (1)...(19): siRNA sense strand
cgggucagcucuuccuuau

SEQ ID NO: 613302 - RNA, 19 nt, Homo sapiens
  misc_RNA (1)...(19): siRNA sense strand
ucaauguuccugacuggua

SEQ ID NO: 613303 - RNA, 19 nt, Homo sapiens
  misc_RNA (1)...(19): siRNA sense strand
ccuuugggauuugcacuua

SEQ ID NO: 613304 - RNA, 19 nt, Homo sapiens
  misc_RNA (1)...(19): siRNA sense strand
gauguuaauugagaguaug

SEQ ID NO: 613305 - RNA, 19 nt, Homo sapiens
  misc_RNA (1)...(19): siRNA sense strand
ggcagugaauggaaucuca

SEQ ID NO: 613306 - RNA, 19 nt, Homo sapiens
  misc_RNA (1)...(19): siRNA sense strand
aaagucauccgaauguuga

SEQ ID NO: 613307 - RNA, 19 nt, Homo sapiens
  misc_RNA (1)...(19): siRNA sense strand
aaagaagagcuaauuggaa

SEQ ID NO: 613308 - RNA, 19 nt, Homo sapiens
  misc_RNA (1)...(19): siRNA sense strand
acaaugggcauagaccuua

SEQ ID NO: 613309 - RNA, 19 nt, Homo sapiens
  misc_RNA (1)...(19): siRNA sense strand
gauguuaaggauuguaaug

SEQ ID NO: 613310 - RNA, 19 nt, Homo sapiens
  misc_RNA (1)...(19): siRNA sense strand
gggcauagaccuuacaaaa

SEQ ID NO: 613311 - RNA, 19 nt, Homo sapiens
  misc_RNA (1)...(19): siRNA sense strand
gacaauuugaugaggauuu

SEQ ID NO: 613312 - RNA, 19 nt, Homo sapiens
  misc_RNA (1)...(19): siRNA sense strand
ugagcaagcugcggaguuc

SEQ ID NO: 613313 - RNA, 19 nt, Homo sapiens
  misc_RNA (1)...(19): siRNA sense strand
ugagugugauugccaacuu

SEQ ID NO: 613314 - RNA, 19 nt, Homo sapiens
  misc_RNA (1)...(19): siRNA sense strand
cuaugaacaucaaagugaa

SEQ ID NO: 613315 - RNA, 19 nt, Homo sapiens
  misc_RNA (1)...(19): siRNA sense strand
cauaggagugguuuauuau

SEQ ID NO: 613316 - RNA, 19 nt, Homo sapiens
  misc_RNA (1)...(19): siRNA sense strand
agaauacuuuggugagaug

SEQ ID NO: 613317 - RNA, 19 nt, Homo sapiens
  misc_RNA (1)...(19): siRNA sense strand
caugaccauugggauguua

SEQ ID NO: 613318 - RNA, 19 nt, Homo sapiens
  misc_RNA (1)...(19): siRNA sense strand
gaacagaucuucaugaaug

SEQ ID NO: 613319 - RNA, 19 nt, Homo sapiens
  misc_RNA (1)...(19): siRNA sense strand
gaaguuagaugacgaugga

SEQ ID NO: 613320 - RNA, 19 nt, Homo sapiens
  misc_RNA (1)...(19): siRNA sense strand
ggacaauccugauaguuug

SEQ ID NO: 613321 - RNA, 19 nt, Homo sapiens
  misc_RNA (1)...(19): siRNA sense strand
ucauaggagugguuuauua

SEQ ID NO: 613322 - RNA, 19 nt, Homo sapiens
  misc_RNA (1)...(19): siRNA sense strand
uaucagcgcuuacgccaua

SEQ ID NO: 613323 - RNA, 19 nt, Homo sapiens
  misc_RNA (1)...(19): siRNA sense strand
gacgauggauugccguuua

SEQ ID NO: 613324 - RNA, 19 nt, Homo sapiens
  misc_RNA (1)...(19): siRNA sense strand
ggucagcucuuccuuaugu

SEQ ID NO: 613325 - RNA, 19 nt, Homo sapiens
  misc_RNA (1)...(19): siRNA sense strand
gaagaugccaugauuguga

SEQ ID NO: 613326 - RNA, 19 nt, Homo sapiens
  misc_RNA (1)...(19): siRNA sense strand
cuacaagucugaguucaua

SEQ ID NO: 613327 - RNA, 19 nt, Homo sapiens
  misc_RNA (1)...(19): siRNA sense strand
gaacuuagcauugggcaaa

SEQ ID NO: 613328 - RNA, 19 nt, Homo sapiens
  misc_RNA (1)...(19): siRNA sense strand
caugaacacugacaauuug

SEQ ID NO: 613329 - RNA, 19 nt, Homo sapiens
  misc_RNA (1)...(19): siRNA sense strand
gacccuccauguaugauua

SEQ ID NO: 613330 - RNA, 19 nt, Homo sapiens
  misc_RNA (1)...(19): siRNA sense strand
ccaccuaacugccguaugu

SEQ ID NO: 613331 - RNA, 19 nt, Homo sapiens
  misc_RNA (1)...(19): siRNA sense strand
gaacucggccuuagaauac

SEQ ID NO: 613332 - RNA, 19 nt, Homo sapiens
  misc_RNA (1)...(19): siRNA sense strand
gaacauuccgcugucaaua

SEQ ID NO: 613333 - RNA, 19 nt, Homo sapiens
  misc_RNA (1)...(19): siRNA sense strand
gcuuuccacuucucacuua

SEQ ID NO: 613334 - RNA, 19 nt, Homo sapiens
  misc_RNA (1)...(19): siRNA sense strand
ucucagauguuaaggauug

SEQ ID NO: 613335 - RNA, 19 nt, Homo sapiens
  misc_RNA (1)...(19): siRNA sense strand
cagauucucuucgucauuu

SEQ ID NO: 613336 - RNA, 19 nt, Homo sapiens
  misc_RNA (1)...(19): siRNA sense strand
gaacccaacuaucggagau

SEQ ID NO: 613337 - RNA, 19 nt, Homo sapiens
  misc_RNA (1)...(19): siRNA sense strand
gcuaugaacaucaaaguga

SEQ ID NO: 613338 - RNA, 19 nt, Homo sapiens
  misc_RNA (1)...(19): siRNA sense strand
ccauugggauguuaauuga

SEQ ID NO: 613339 - RNA, 19 nt, Homo sapiens
  misc_RNA (1)...(19): siRNA sense strand
gaucauacagugagugcua

SEQ ID NO: 613340 - RNA, 19 nt, Homo sapiens
  misc_RNA (1)...(19): siRNA sense strand
ggagaacucggccuuagaa

SEQ ID NO: 613341 - RNA, 19 nt, Homo sapiens
  misc_RNA (1)...(19): siRNA sense strand
ggauggaagugguccuuau

SEQ ID NO: 613342 - RNA, 19 nt, Homo sapiens
  misc_RNA (1)...(19): siRNA sense strand
gauaguagccugguguuug

SEQ ID NO: 613343 - RNA, 19 nt, Homo sapiens
  misc_RNA (1)...(19): siRNA sense strand
gaaugucgcuaucuuugag

SEQ ID NO: 613344 - RNA, 19 nt, Homo sapiens
  misc_RNA (1)...(19): siRNA sense strand
gauaagaaggcucagaaga

SEQ ID NO: 613345 - RNA, 19 nt, Homo sapiens
  misc_RNA (1)...(19): siRNA sense strand
gcaccgagagguuauauag

SEQ ID NO: 613346 - RNA, 19 nt, Homo sapiens
  misc_RNA (1)...(19): siRNA sense strand
caaagaagagcuaauugga

SEQ ID NO: 613347 - RNA, 19 nt, Homo sapiens
  misc_RNA (1)...(19): siRNA sense strand
gcucagaagaccaguguuu

SEQ ID NO: 613348 - RNA, 19 nt, Homo sapiens
  misc_RNA (1)...(19): siRNA sense strand
gaagaacauuccgcuguca

SEQ ID NO: 613349 - RNA, 19 nt, Homo sapiens
  misc_RNA (1)...(19): siRNA sense strand
ggugagacccuccauguau

SEQ ID NO: 613350 - RNA, 19 nt, Homo sapiens
  misc_RNA (1)...(19): siRNA sense strand
gauggaagugguccuuaua

SEQ ID NO: 613351 - RNA, 19 nt, Homo sapiens
  misc_RNA (1)...(19): siRNA sense strand
gaagguugguuagugucua

SEQ ID NO: 613352 - RNA, 19 nt, Homo sapiens
  misc_RNA (1)...(19): siRNA sense strand
uggaacagaucuucaugaa

SEQ ID NO: 613353 - RNA, 19 nt, Homo sapiens
  misc_RNA (1)...(19): siRNA sense strand
gcaaagaagagcuaauugg

SEQ ID NO: 613354 - RNA, 19 nt, Homo sapiens
  misc_RNA (1)...(19): siRNA sense strand
ccaugaacacugacaauuu

SEQ ID NO: 613355 - RNA, 19 nt, Homo sapiens
  misc_RNA (1)...(19): siRNA sense strand
gcacuuaaggcacuuguca

SEQ ID NO: 613356 - RNA, 19 nt, Homo sapiens
  misc_RNA (1)...(19): siRNA sense strand
ggauguuaauugagaguau

SEQ ID NO: 613357 - RNA, 19 nt, Homo sapiens
  misc_RNA (1)...(19): siRNA sense strand
gaucggauaacaaacugua

SEQ ID NO: 613358 - RNA, 19 nt, Homo sapiens
  misc_RNA (1)...(19): siRNA sense strand
gaagagcuaauuggaacua

SEQ ID NO: 613359 - RNA, 19 nt, Homo sapiens
  misc_RNA (1)...(19): siRNA sense strand
gggcaaagaagagcuaauu

SEQ ID NO: 613360 - RNA, 19 nt, Homo sapiens
  misc_RNA (1)...(19): siRNA sense strand
cggcaucuauuccagcuuu

SEQ ID NO: 613361 - RNA, 19 nt, Homo sapiens
  misc_RNA (1)...(19): siRNA sense strand
gagagugcauggaggacaa

SEQ ID NO: 613362 - RNA, 19 nt, Homo sapiens
  misc_RNA (1)...(19): siRNA sense strand
gaggagaacucggccuuag

SEQ ID NO: 613363 - RNA, 19 nt, Homo sapiens
  misc_RNA (1)...(19): siRNA sense strand
guuaaggauuguaauggaa

SEQ ID NO: 613364 - RNA, 19 nt, Homo sapiens
  misc_RNA (1)...(19): siRNA sense strand
ugugaaguguggcaguuua

SEQ ID NO: 613365 - RNA, 19 nt, Homo sapiens
  misc_RNA (1)...(19): siRNA sense strand
agacaaauuucaaguaagg

SEQ ID NO: 613366 - RNA, 19 nt, Homo sapiens
  misc_RNA (1)...(19): siRNA sense strand
gaugaggaccaccacagua

SEQ ID NO: 613367 - RNA, 19 nt, Homo sapiens
  misc_RNA (1)...(19): siRNA sense strand
gaacacugacaauuugaug

SEQ ID NO: 613368 - RNA, 19 nt, Homo sapiens
  misc_RNA (1)...(19): siRNA sense strand
uaaggcacuugucagcuuu

SEQ ID NO: 613369 - RNA, 19 nt, Homo sapiens
  misc_RNA (1)...(19): siRNA sense strand
uaggagugguuuauuauca

SEQ ID NO: 613370 - RNA, 19 nt, Homo sapiens
  misc_RNA (1)...(19): siRNA sense strand
gcacagaggggcugauuuu

SEQ ID NO: 613371 - RNA, 19 nt, Homo sapiens
  misc_RNA (1)...(19): siRNA sense strand
cugcggaguuccuguuuaa

SEQ ID NO: 613372 - RNA, 19 nt, Homo sapiens
  misc_RNA (1)...(19): siRNA sense strand
gcugcggaguuccuguuua

SEQ ID NO: 613373 - RNA, 19 nt, Homo sapiens
  misc_RNA (1)...(19): siRNA sense strand
cuacaagauucuggacuuu

SEQ ID NO: 613374 - RNA, 19 nt, Homo sapiens
  misc_RNA (1)...(19): siRNA sense strand
gcuggacggugucaugguu

SEQ ID NO: 613375 - RNA, 19 nt, Homo sapiens
  misc_RNA (1)...(19): siRNA sense strand
auacuuuggugagauguua

SEQ ID NO: 613376 - RNA, 19 nt, Homo sapiens
  misc_RNA (1)...(19): siRNA sense strand
gauuaugccucggagaaau

SEQ ID NO: 613377 - RNA, 19 nt, Homo sapiens
  misc_RNA (1)...(19): siRNA sense strand
caagaccgaucggauaaca

SEQ ID NO: 613378 - RNA, 19 nt, Homo sapiens
  misc_RNA (1)...(19): siRNA sense strand
gugcagaacuuagcauugg

SEQ ID NO: 613379 - RNA, 19 nt, Homo sapiens
  misc_RNA (1)...(19): siRNA sense strand
uauaugcuuugucucauga

SEQ ID NO: 613380 - RNA, 19 nt, Homo sapiens
  misc_RNA (1)...(19): siRNA sense strand
gugcaucuguauccacuug

SEQ ID NO: 613381 - RNA, 19 nt, Homo sapiens
  misc_RNA (1)...(19): siRNA sense strand
gcaucuguauccacuugaa

SEQ ID NO: 613382 - RNA, 19 nt, Homo sapiens
  misc_RNA (1)...(19): siRNA sense strand
ggaacgggaugcgcuuuua

SEQ ID NO: 613383 - RNA, 19 nt, Homo sapiens
  misc_RNA (1)...(19): siRNA sense strand
uuaaggcacuugucagcuu

SEQ ID NO: 613384 - RNA, 19 nt, Homo sapiens
  misc_RNA (1)...(19): siRNA sense strand
acuaugggcuuuccacuuc

SEQ ID NO: 613385 - RNA, 19 nt, Homo sapiens
  misc_RNA (1)...(19): siRNA sense strand
uacgcuaccucucccauuu

SEQ ID NO: 613386 - RNA, 19 nt, Homo sapiens
  misc_RNA (1)...(19): siRNA sense strand
aauccaagcuuugcaacuu

SEQ ID NO: 613387 - RNA, 19 nt, Homo sapiens
  misc_RNA (1)...(19): siRNA sense strand
gaacaucaaagugaaacug

SEQ ID NO: 613388 - RNA, 19 nt, Homo sapiens
  misc_RNA (1)...(19): siRNA sense strand
gaacuggcagcuaugaaca

SEQ ID NO: 613389 - RNA, 19 nt, Homo sapiens
  misc_RNA (1)...(19): siRNA sense strand
gacacuaucgauacuguuu

SEQ ID NO: 613390 - RNA, 19 nt, Homo sapiens
  misc_RNA (1)...(19): siRNA sense strand
gcaguuucuuggcuauguu

SEQ ID NO: 613391 - RNA, 19 nt, Homo sapiens
  misc_RNA (1)...(19): siRNA sense strand
guugguuagugucuauuaa

SEQ ID NO: 613392 - RNA, 19 nt, Homo sapiens
  misc_RNA (1)...(19): siRNA sense strand
gaguuucaaugcacugugu

SEQ ID NO: 613393 - RNA, 19 nt, Homo sapiens
  misc_RNA (1)...(19): siRNA sense strand
agaacucggccuuagaaua

SEQ ID NO: 613394 - RNA, 19 nt, Homo sapiens
  misc_RNA (1)...(19): siRNA sense strand
cgggaagucugcagcuuug

SEQ ID NO: 613395 - RNA, 19 nt, Homo sapiens
  misc_RNA (1)...(19): siRNA sense strand
gccuaaagcacuugacuga

SEQ ID NO: 613396 - RNA, 19 nt, Homo sapiens
  misc_RNA (1)...(19): siRNA sense strand
ucauagaccucucugaaaa

SEQ ID NO: 613397 - RNA, 19 nt, Homo sapiens
  misc_RNA (1)...(19): siRNA sense strand
ucguugcugugauuucuua

SEQ ID NO: 613398 - RNA, 19 nt, Homo sapiens
  misc_RNA (1)...(19): siRNA sense strand
gugagacccuccauguaug

SEQ ID NO: 613399 - RNA, 19 nt, Homo sapiens
  misc_RNA (1)...(19): siRNA sense strand
caaaaggaaucauuaagca

SEQ ID NO: 613400 - RNA, 19 nt, Homo sapiens
  misc_RNA (1)...(19): siRNA sense strand
ccuacaagauucuggacuu

SEQ ID NO: 613401 - RNA, 19 nt, Homo sapiens
  misc_RNA (1)...(19): siRNA sense strand
cgggucagcucuuccuuau

SEQ ID NO: 613402 - RNA, 19 nt, Homo sapiens
  misc_RNA (1)...(19): siRNA sense strand
ucaauguuccugacuggua

SEQ ID NO: 613403 - RNA, 19 nt, Homo sapiens
  misc_RNA (1)...(19): siRNA sense strand
ccuuugggauuugcacuua

SEQ ID NO: 613404 - RNA, 19 nt, Homo sapiens
  misc_RNA (1)...(19): siRNA sense strand
gauguuaauugagaguaug

SEQ ID NO: 613405 - RNA, 19 nt, Homo sapiens
  misc_RNA (1)...(19): siRNA sense strand
ggcagugaauggaaucuca

SEQ ID NO: 613406 - RNA, 19 nt, Homo sapiens
  misc_RNA (1)...(19): siRNA sense strand
aaagucauccgaauguuga

SEQ ID NO: 613407 - RNA, 19 nt, Homo sapiens
  misc_RNA (1)...(19): siRNA sense strand
aaagaagagcuaauuggaa

SEQ ID NO: 613408 - RNA, 19 nt, Homo sapiens
  misc_RNA (1)...(19): siRNA sense strand
acaaugggcauagaccuua

SEQ ID NO: 613409 - RNA, 19 nt, Homo sapiens
  misc_RNA (1)...(19): siRNA sense strand
gauguuaaggauuguaaug

SEQ ID NO: 613410 - RNA, 19 nt, Homo sapiens
  misc_RNA (1)...(19): siRNA sense strand
gggcauagaccuuacaaaa

SEQ ID NO: 613411 - RNA, 19 nt, Homo sapiens
  misc_RNA (1)...(19): siRNA sense strand
gacaauuugaugaggauuu

SEQ ID NO: 613412 - RNA, 19 nt, Homo sapiens
  misc_RNA (1)...(19): siRNA sense strand
ugagcaagcugcggaguuc

SEQ ID NO: 613413 - RNA, 19 nt, Homo sapiens
  misc_RNA (1)...(19): siRNA sense strand
ugagugugauugccaacuu

SEQ ID NO: 613414 - RNA, 19 nt, Homo sapiens
  misc_RNA (1)...(19): siRNA sense strand
cuaugaacaucaaagugaa

SEQ ID NO: 613415 - RNA, 19 nt, Homo sapiens
  misc_RNA (1)...(19): siRNA sense strand
cauaggagugguuuauuau

SEQ ID NO: 613416 - RNA, 19 nt, Homo sapiens
  misc_RNA (1)...(19): siRNA sense strand
agaauacuuuggugagaug

SEQ ID NO: 613417 - RNA, 19 nt, Homo sapiens
  misc_RNA (1)...(19): siRNA sense strand
caugaccauugggauguua

SEQ ID NO: 613418 - RNA, 19 nt, Homo sapiens
  misc_RNA (1)...(19): siRNA sense strand
ggacuacuuuccagaauuu

SEQ ID NO: 613419 - RNA, 19 nt, Homo sapiens
  misc_RNA (1)...(19): siRNA sense strand
gaaaguccuugcugggaaa

SEQ ID NO: 613420 - RNA, 19 nt, Homo sapiens
  misc_RNA (1)...(19): siRNA sense strand
gcaaguggauccagugcuu

SEQ ID NO: 613421 - RNA, 19 nt, Homo sapiens
  misc_RNA (1)...(19): siRNA sense strand
gaagauugaggacuacuuu

SEQ ID NO: 613422 - RNA, 19 nt, Homo sapiens
  misc_RNA (1)...(19): siRNA sense strand
gagaugaguuucugaggau

SEQ ID NO: 613423 - RNA, 19 nt, Homo sapiens
  misc_RNA (1)...(19): siRNA sense strand
gaacgugccugacuuugac

SEQ ID NO: 613424 - RNA, 19 nt, Homo sapiens
  misc_RNA (1)...(19): siRNA sense strand
ugacuucccucccgaauuc

SEQ ID NO: 613425 - RNA, 19 nt, Homo sapiens
  misc_RNA (1)...(19): siRNA sense strand
gcaugcaccuucgucagua

SEQ ID NO: 613426 - RNA, 19 nt, Homo sapiens
  misc_RNA (1)...(19): siRNA sense strand
ugaggauccugcauguuaa

SEQ ID NO: 613427 - RNA, 19 nt, Homo sapiens
  misc_RNA (1)...(19): siRNA sense strand
gaggacuacuuuccagaau

SEQ ID NO: 613428 - RNA, 19 nt, Homo sapiens
  misc_RNA (1)...(19): siRNA sense strand
caaccaaagugcaggacau

SEQ ID NO: 613429 - RNA, 19 nt, Homo sapiens
  misc_RNA (1)...(19): siRNA sense strand
gaugaacgugccugacuuu

SEQ ID NO: 613430 - RNA, 19 nt, Homo sapiens
  misc_RNA (1)...(19): siRNA sense strand
caaagugcaggacaucaaa

SEQ ID NO: 613431 - RNA, 19 nt, Homo sapiens
  misc_RNA (1)...(19): siRNA sense strand
gguaaaagcaccauuguga

SEQ ID NO: 613432 - RNA, 19 nt, Homo sapiens
  misc_RNA (1)...(19): siRNA sense strand
augaggauccugcauguua

SEQ ID NO: 613433 - RNA, 19 nt, Homo sapiens
  misc_RNA (1)...(19): siRNA sense strand
ccugacuucuggaaucuuu

SEQ ID NO: 613434 - RNA, 19 nt, Homo sapiens
  misc_RNA (1)...(19): siRNA sense strand
ugaaagaggcgauugaaac

SEQ ID NO: 613435 - RNA, 19 nt, Homo sapiens
  misc_RNA (1)...(19): siRNA sense strand
gagaugggcgucacuacug

SEQ ID NO: 613436 - RNA, 19 nt, Homo sapiens
  misc_RNA (1)...(19): siRNA sense strand
gaauuugcucgcuacacua

SEQ ID NO: 613437 - RNA, 19 nt, Homo sapiens
  misc_RNA (1)...(19): siRNA sense strand
gcaccauugugaagcagau

SEQ ID NO: 613438 - RNA, 19 nt, Homo sapiens
  misc_RNA (1)...(19): siRNA sense strand
ccaaagugcaggacaucaa

SEQ ID NO: 613439 - RNA, 19 nt, Homo sapiens
  misc_RNA (1)...(19): siRNA sense strand
caacgaguaccagcugauu

SEQ ID NO: 613440 - RNA, 19 nt, Homo sapiens
  misc_RNA (1)...(19): siRNA sense strand
gaaagaggcgauugaaacc

SEQ ID NO: 613441 - RNA, 19 nt, Homo sapiens
  misc_RNA (1)...(19): siRNA sense strand
ugaacgugccugacuuuga

SEQ ID NO: 613442 - RNA, 19 nt, Homo sapiens
  misc_RNA (1)...(19): siRNA sense strand
agaauuugcucgcuacacu

SEQ ID NO: 613443 - RNA, 19 nt, Homo sapiens
  misc_RNA (1)...(19): siRNA sense strand
ugaugaacgugccugacuu

SEQ ID NO: 613444 - RNA, 19 nt, Homo sapiens
  misc_RNA (1)...(19): siRNA sense strand
cagcagcagcuacaacaug

SEQ ID NO: 613445 - RNA, 19 nt, Homo sapiens
  misc_RNA (1)...(19): siRNA sense strand
ugagaaggcaaccaaagug

SEQ ID NO: 613446 - RNA, 19 nt, Homo sapiens
  misc_RNA (1)...(19): siRNA sense strand
agaugaggauccugcaugu

SEQ ID NO: 613447 - RNA, 19 nt, Homo sapiens
  misc_RNA (1)...(19): siRNA sense strand
ggagaugggcgucacuacu

SEQ ID NO: 613448 - RNA, 19 nt, Homo sapiens
  misc_RNA (1)...(19): siRNA sense strand
aagaggcgauugaaaccau

SEQ ID NO: 613449 - RNA, 19 nt, Homo sapiens
  misc_RNA (1)...(19): siRNA sense strand
aggacuacuuuccagaauu

SEQ ID NO: 613450 - RNA, 19 nt, Homo sapiens
  misc_RNA (1)...(19): siRNA sense strand
aaagcaccauugugaagca

SEQ ID NO: 613451 - RNA, 19 nt, Homo sapiens
  misc_RNA (1)...(19): siRNA sense strand
ugaggacuacuuuccagaa

SEQ ID NO: 613452 - RNA, 19 nt, Homo sapiens
  misc_RNA (1)...(19): siRNA sense strand
gcuacgaacgcuccaacga

SEQ ID NO: 613453 - RNA, 19 nt, Homo sapiens
  misc_RNA (1)...(19): siRNA sense strand
cuacugcuacccucauuuc

SEQ ID NO: 613454 - RNA, 19 nt, Homo sapiens
  misc_RNA (1)...(19): siRNA sense strand
ugacugccaucaucuucgu

SEQ ID NO: 613455 - RNA, 19 nt, Homo sapiens
  misc_RNA (1)...(19): siRNA sense strand
ugacuucuggaaucuuuga

SEQ ID NO: 613456 - RNA, 19 nt, Homo sapiens
  misc_RNA (1)...(19): siRNA sense strand
uguccugacuucuggaauc

SEQ ID NO: 613457 - RNA, 19 nt, Homo sapiens
  misc_RNA (1)...(19): siRNA sense strand
acgaguaccagcugauuga

SEQ ID NO: 613458 - RNA, 19 nt, Homo sapiens
  misc_RNA (1)...(19): siRNA sense strand
agucaacuuccacauguuu

SEQ ID NO: 613459 - RNA, 19 nt, Homo sapiens
  misc_RNA (1)...(19): siRNA sense strand
gcgaugaacgccgcaagug

SEQ ID NO: 613460 - RNA, 19 nt, Homo sapiens
  misc_RNA (1)...(19): siRNA sense strand
uggacaagaucgacgugau

SEQ ID NO: 613461 - RNA, 19 nt, Homo sapiens
  misc_RNA (1)...(19): siRNA sense strand
gaugaguuucugaggauca

SEQ ID NO: 613462 - RNA, 19 nt, Homo sapiens
  misc_RNA (1)...(19): siRNA sense strand
gaggauccugcauguuaau

SEQ ID NO: 613463 - RNA, 19 nt, Homo sapiens
  misc_RNA (1)...(19): siRNA sense strand
gggaggacaaccagaccaa

SEQ ID NO: 613464 - RNA, 19 nt, Homo sapiens
  misc_RNA (1)...(19): siRNA sense strand
gaaucuuugagaccaaguu

SEQ ID NO: 613465 - RNA, 19 nt, Homo sapiens
  misc_RNA (1)...(19): siRNA sense strand
gauccagugcuucaacgau

SEQ ID NO: 613466 - RNA, 19 nt, Homo sapiens
  misc_RNA (1)...(19): siRNA sense strand
gccagcagcagcuacaaca

SEQ ID NO: 613467 - RNA, 19 nt, Homo sapiens
  misc_RNA (1)...(19): siRNA sense strand
ccaucucugugauccuguu

SEQ ID NO: 613468 - RNA, 19 nt, Homo sapiens
  misc_RNA (1)...(19): siRNA sense strand
cacuacugcuacccucauu

SEQ ID NO: 613469 - RNA, 19 nt, Homo sapiens
  misc_RNA (1)...(19): siRNA sense strand
ggacuacuuuccagaauuu

SEQ ID NO: 613470 - RNA, 19 nt, Homo sapiens
  misc_RNA (1)...(19): siRNA sense strand
gaaaguccuugcugggaaa

SEQ ID NO: 613471 - RNA, 19 nt, Homo sapiens
  misc_RNA (1)...(19): siRNA sense strand
gcaaguggauccagugcuu

SEQ ID NO: 613472 - RNA, 19 nt, Homo sapiens
  misc_RNA (1)...(19): siRNA sense strand
gaagauugaggacuacuuu

SEQ ID NO: 613473 - RNA, 19 nt, Homo sapiens
  misc_RNA (1)...(19): siRNA sense strand
gagaugaguuucugaggau

SEQ ID NO: 613474 - RNA, 19 nt, Homo sapiens
  misc_RNA (1)...(19): siRNA sense strand
gaacgugccugacuuugac

SEQ ID NO: 613475 - RNA, 19 nt, Homo sapiens
  misc_RNA (1)...(19): siRNA sense strand
ugacuucccucccgaauuc

SEQ ID NO: 613476 - RNA, 19 nt, Homo sapiens
  misc_RNA (1)...(19): siRNA sense strand
gcaugcaccuucgucagua

SEQ ID NO: 613477 - RNA, 19 nt, Homo sapiens
  misc_RNA (1)...(19): siRNA sense strand
ugaggauccugcauguuaa

SEQ ID NO: 613478 - RNA, 19 nt, Homo sapiens
  misc_RNA (1)...(19): siRNA sense strand
gaggacuacuuuccagaau

SEQ ID NO: 613479 - RNA, 19 nt, Homo sapiens
  misc_RNA (1)...(19): siRNA sense strand
caaccaaagugcaggacau

SEQ ID NO: 613480 - RNA, 19 nt, Homo sapiens
  misc_RNA (1)...(19): siRNA sense strand
gaugaacgugccugacuuu

SEQ ID NO: 613481 - RNA, 19 nt, Homo sapiens
  misc_RNA (1)...(19): siRNA sense strand
caaagugcaggacaucaaa

SEQ ID NO: 613482 - RNA, 19 nt, Homo sapiens
  misc_RNA (1)...(19): siRNA sense strand
gguaaaagcaccauuguga

SEQ ID NO: 613483 - RNA, 19 nt, Homo sapiens
  misc_RNA (1)...(19): siRNA sense strand
augaggauccugcauguua

SEQ ID NO: 613484 - RNA, 19 nt, Homo sapiens
  misc_RNA (1)...(19): siRNA sense strand
ccugacuucuggaaucuuu

SEQ ID NO: 613485 - RNA, 19 nt, Homo sapiens
  misc_RNA (1)...(19): siRNA sense strand
ugaaagaggcgauugaaac

SEQ ID NO: 613486 - RNA, 19 nt, Homo sapiens
  misc_RNA (1)...(19): siRNA sense strand
gacuacauccugaguguga

SEQ ID NO: 613487 - RNA, 19 nt, Homo sapiens
  misc_RNA (1)...(19): siRNA sense strand
gagaugggcgucacuacug

SEQ ID NO: 613488 - RNA, 19 nt, Homo sapiens
  misc_RNA (1)...(19): siRNA sense strand
gaauuugcucgcuacacua

SEQ ID NO: 613489 - RNA, 19 nt, Homo sapiens
  misc_RNA (1)...(19): siRNA sense strand
gcaccauugugaagcagau

SEQ ID NO: 613490 - RNA, 19 nt, Homo sapiens
  misc_RNA (1)...(19): siRNA sense strand
ccaaagugcaggacaucaa

SEQ ID NO: 613491 - RNA, 19 nt, Homo sapiens
  misc_RNA (1)...(19): siRNA sense strand
caacgaguaccagcugauu

SEQ ID NO: 613492 - RNA, 19 nt, Homo sapiens
  misc_RNA (1)...(19): siRNA sense strand
gaaagaggcgauugaaacc

SEQ ID NO: 613493 - RNA, 19 nt, Homo sapiens
  misc_RNA (1)...(19): siRNA sense strand
ugaacgugccugacuuuga

SEQ ID NO: 613494 - RNA, 19 nt, Homo sapiens
  misc_RNA (1)...(19): siRNA sense strand
agaauuugcucgcuacacu

SEQ ID NO: 613495 - RNA, 19 nt, Homo sapiens
  misc_RNA (1)...(19): siRNA sense strand
ugaugaacgugccugacuu

SEQ ID NO: 613496 - RNA, 19 nt, Homo sapiens
  misc_RNA (1)...(19): siRNA sense strand
cagcagcagcuacaacaug

SEQ ID NO: 613497 - RNA, 19 nt, Homo sapiens
  misc_RNA (1)...(19): siRNA sense strand
ugagaaggcaaccaaagug

SEQ ID NO: 613498 - RNA, 19 nt, Homo sapiens
  misc_RNA (1)...(19): siRNA sense strand
agaugaggauccugcaugu

SEQ ID NO: 613499 - RNA, 19 nt, Homo sapiens
  misc_RNA (1)...(19): siRNA sense strand
ggagaugggcgucacuacu

SEQ ID NO: 613500 - RNA, 19 nt, Homo sapiens
  misc_RNA (1)...(19): siRNA sense strand
aagaggcgauugaaaccau

SEQ ID NO: 613501 - RNA, 19 nt, Homo sapiens
  misc_RNA (1)...(19): siRNA sense strand
aggacuacuuuccagaauu

SEQ ID NO: 613502 - RNA, 19 nt, Homo sapiens
  misc_RNA (1)...(19): siRNA sense strand
aaagcaccauugugaagca

SEQ ID NO: 613503 - RNA, 19 nt, Homo sapiens
  misc_RNA (1)...(19): siRNA sense strand
uggacuacauccugagugu

SEQ ID NO: 613504 - RNA, 19 nt, Homo sapiens
  misc_RNA (1)...(19): siRNA sense strand
guucagaguggacuacauc

SEQ ID NO: 613505 - RNA, 19 nt, Homo sapiens
  misc_RNA (1)...(19): siRNA sense strand
ugaggacuacuuuccagaa

SEQ ID NO: 613506 - RNA, 19 nt, Homo sapiens
  misc_RNA (1)...(19): siRNA sense strand
gcuacgaacgcuccaacga

SEQ ID NO: 613507 - RNA, 19 nt, Homo sapiens
  misc_RNA (1)...(19): siRNA sense strand
cuacugcuacccucauuuc

SEQ ID NO: 613508 - RNA, 19 nt, Homo sapiens
  misc_RNA (1)...(19): siRNA sense strand
ugacugccaucaucuucgu

SEQ ID NO: 613509 - RNA, 19 nt, Homo sapiens
  misc_RNA (1)...(19): siRNA sense strand
ugacuucuggaaucuuuga

SEQ ID NO: 613510 - RNA, 19 nt, Homo sapiens
  misc_RNA (1)...(19): siRNA sense strand
uguccugacuucuggaauc

SEQ ID NO: 613511 - RNA, 19 nt, Homo sapiens
  misc_RNA (1)...(19): siRNA sense strand
acgaguaccagcugauuga

SEQ ID NO: 613512 - RNA, 19 nt, Homo sapiens
  misc_RNA (1)...(19): siRNA sense strand
agucaacuuccacauguuu

SEQ ID NO: 613513 - RNA, 19 nt, Homo sapiens
  misc_RNA (1)...(19): siRNA sense strand
gcgaugaacgccgcaagug

SEQ ID NO: 613514 - RNA, 19 nt, Homo sapiens
  misc_RNA (1)...(19): siRNA sense strand
gaggauccugcauguuaau

SEQ ID NO: 613515 - RNA, 19 nt, Homo sapiens
  misc_RNA (1)...(19): siRNA sense strand
gaugaguuucugaggauca

SEQ ID NO: 613516 - RNA, 19 nt, Homo sapiens
  misc_RNA (1)...(19): siRNA sense strand
gggaggacaaccagaccaa

SEQ ID NO: 613517 - RNA, 19 nt, Homo sapiens
  misc_RNA (1)...(19): siRNA sense strand
gaaucuuugagaccaaguu

SEQ ID NO: 613518 - RNA, 19 nt, Homo sapiens
  misc_RNA (1)...(19): siRNA sense strand
uggacaagaucgacgugau

SEQ ID NO: 613519 - RNA, 19 nt, Homo sapiens
  misc_RNA (1)...(19): siRNA sense strand
gauccagugcuucaacgau

SEQ ID NO: 613520 - RNA, 19 nt, Homo sapiens
  misc_RNA (1)...(19): siRNA sense strand
gccagcagcagcuacaaca

SEQ ID NO: 613521 - RNA, 19 nt, Homo sapiens
  misc_RNA (1)...(19): siRNA sense strand
ccaucucugugauccuguu

SEQ ID NO: 613522 - RNA, 19 nt, Homo sapiens
  misc_RNA (1)...(19): siRNA sense strand
cacuacugcuacccucauu

SEQ ID NO: 613523 - RNA, 19 nt, Homo sapiens
  misc_RNA (1)...(19): siRNA sense strand
ggacuacuuuccagaauuu

SEQ ID NO: 613524 - RNA, 19 nt, Homo sapiens
  misc_RNA (1)...(19): siRNA sense strand
gaaaguccuugcugggaaa

SEQ ID NO: 613525 - RNA, 19 nt, Homo sapiens
  misc_RNA (1)...(19): siRNA sense strand
gcaaguggauccagugcuu

SEQ ID NO: 613526 - RNA, 19 nt, Homo sapiens
  misc_RNA (1)...(19): siRNA sense strand
gaagauugaggacuacuuu

SEQ ID NO: 613527 - RNA, 19 nt, Homo sapiens
  misc_RNA (1)...(19): siRNA sense strand
gagaugaguuucugaggau

SEQ ID NO: 613528 - RNA, 19 nt, Homo sapiens
  misc_RNA (1)...(19): siRNA sense strand
gaacgugccugacuuugac

SEQ ID NO: 613529 - RNA, 19 nt, Homo sapiens
  misc_RNA (1)...(19): siRNA sense strand
ugacuucccucccgaauuc

SEQ ID NO: 613530 - RNA, 19 nt, Homo sapiens
  misc_RNA (1)...(19): siRNA sense strand
gcaugcaccuucgucagua

SEQ ID NO: 613531 - RNA, 19 nt, Homo sapiens
  misc_RNA (1)...(19): siRNA sense strand
ugaggauccugcauguuaa

SEQ ID NO: 613532 - RNA, 19 nt, Homo sapiens
  misc_RNA (1)...(19): siRNA sense strand
gaggacuacuuuccagaau

SEQ ID NO: 613533 - RNA, 19 nt, Homo sapiens
  misc_RNA (1)...(19): siRNA sense strand
caaccaaagugcaggacau

SEQ ID NO: 613534 - RNA, 19 nt, Homo sapiens
  misc_RNA (1)...(19): siRNA sense strand
gaugaacgugccugacuuu

SEQ ID NO: 613535 - RNA, 19 nt, Homo sapiens
  misc_RNA (1)...(19): siRNA sense strand
caaagugcaggacaucaaa

SEQ ID NO: 613536 - RNA, 19 nt, Homo sapiens
  misc_RNA (1)...(19): siRNA sense strand
gguaaaagcaccauuguga

SEQ ID NO: 613537 - RNA, 19 nt, Homo sapiens
  misc_RNA (1)...(19): siRNA sense strand
augaggauccugcauguua

SEQ ID NO: 613538 - RNA, 19 nt, Homo sapiens
  misc_RNA (1)...(19): siRNA sense strand
ccugacuucuggaaucuuu

SEQ ID NO: 613539 - RNA, 19 nt, Homo sapiens
  misc_RNA (1)...(19): siRNA sense strand
ugaaagaggcgauugaaac

SEQ ID NO: 613540 - RNA, 19 nt, Homo sapiens
  misc_RNA (1)...(19): siRNA sense strand
gagaugggcgucacuacug

SEQ ID NO: 613541 - RNA, 19 nt, Homo sapiens
  misc_RNA (1)...(19): siRNA sense strand
gaauuugcucgcuacacua

SEQ ID NO: 613542 - RNA, 19 nt, Homo sapiens
  misc_RNA (1)...(19): siRNA sense strand
gcaccauugugaagcagau

SEQ ID NO: 613543 - RNA, 19 nt, Homo sapiens
  misc_RNA (1)...(19): siRNA sense strand
ccaaagugcaggacaucaa

SEQ ID NO: 613544 - RNA, 19 nt, Homo sapiens
  misc_RNA (1)...(19): siRNA sense strand
caacgaguaccagcugauu

SEQ ID NO: 613545 - RNA, 19 nt, Homo sapiens
  misc_RNA (1)...(19): siRNA sense strand
gaaagaggcgauugaaacc

SEQ ID NO: 613546 - RNA, 19 nt, Homo sapiens
  misc_RNA (1)...(19): siRNA sense strand
ugaacgugccugacuuuga

SEQ ID NO: 613547 - RNA, 19 nt, Homo sapiens
  misc_RNA (1)...(19): siRNA sense strand
agaauuugcucgcuacacu

SEQ ID NO: 613548 - RNA, 19 nt, Homo sapiens
  misc_RNA (1)...(19): siRNA sense strand
ugaugaacgugccugacuu

SEQ ID NO: 613549 - RNA, 19 nt, Homo sapiens
  misc_RNA (1)...(19): siRNA sense strand
cagcagcagcuacaacaug

SEQ ID NO: 613550 - RNA, 19 nt, Homo sapiens
  misc_RNA (1)...(19): siRNA sense strand
ugagaaggcaaccaaagug

SEQ ID NO: 613551 - RNA, 19 nt, Homo sapiens
  misc_RNA (1)...(19): siRNA sense strand
agaugaggauccugcaugu

SEQ ID NO: 613552 - RNA, 19 nt, Homo sapiens
  misc_RNA (1)...(19): siRNA sense strand
ggagaugggcgucacuacu

SEQ ID NO: 613553 - RNA, 19 nt, Homo sapiens
  misc_RNA (1)...(19): siRNA sense strand
aagaggcgauugaaaccau

SEQ ID NO: 613554 - RNA, 19 nt, Homo sapiens
  misc_RNA (1)...(19): siRNA sense strand
aggacuacuuuccagaauu

SEQ ID NO: 613555 - RNA, 19 nt, Homo sapiens
  misc_RNA (1)...(19): siRNA sense strand
gugagaaggcaaccaaagu

SEQ ID NO: 613556 - RNA, 19 nt, Homo sapiens
  misc_RNA (1)...(19): siRNA sense strand
aaagcaccauugugaagca

SEQ ID NO: 613557 - RNA, 19 nt, Homo sapiens
  misc_RNA (1)...(19): siRNA sense strand
ugaggacuacuuuccagaa

SEQ ID NO: 613558 - RNA, 19 nt, Homo sapiens
  misc_RNA (1)...(19): siRNA sense strand
gcuacgaacgcuccaacga

SEQ ID NO: 613559 - RNA, 19 nt, Homo sapiens
  misc_RNA (1)...(19): siRNA sense strand
cuacugcuacccucauuuc

SEQ ID NO: 613560 - RNA, 19 nt, Homo sapiens
  misc_RNA (1)...(19): siRNA sense strand
ugacugccaucaucuucgu

SEQ ID NO: 613561 - RNA, 19 nt, Homo sapiens
  misc_RNA (1)...(19): siRNA sense strand
ugacuucuggaaucuuuga

SEQ ID NO: 613562 - RNA, 19 nt, Homo sapiens
  misc_RNA (1)...(19): siRNA sense strand
uguccugacuucuggaauc

SEQ ID NO: 613563 - RNA, 19 nt, Homo sapiens
  misc_RNA (1)...(19): siRNA sense strand
acgaguaccagcugauuga

SEQ ID NO: 613564 - RNA, 19 nt, Homo sapiens
  misc_RNA (1)...(19): siRNA sense strand
agucaacuuccacauguuu

SEQ ID NO: 613565 - RNA, 19 nt, Homo sapiens
  misc_RNA (1)...(19): siRNA sense strand
gcgaugaacgccgcaagug

SEQ ID NO: 613566 - RNA, 19 nt, Homo sapiens
  misc_RNA (1)...(19): siRNA sense strand
uggacaagaucgacgugau

SEQ ID NO: 613567 - RNA, 19 nt, Homo sapiens
  misc_RNA (1)...(19): siRNA sense strand
gaugaguuucugaggauca

SEQ ID NO: 613568 - RNA, 19 nt, Homo sapiens
  misc_RNA (1)...(19): siRNA sense strand
gggaggacaaccagaccaa

SEQ ID NO: 613569 - RNA, 19 nt, Homo sapiens
  misc_RNA (1)...(19): siRNA sense strand
gaggauccugcauguuaau

SEQ ID NO: 613570 - RNA, 19 nt, Homo sapiens
  misc_RNA (1)...(19): siRNA sense strand
gaaucuuugagaccaaguu

SEQ ID NO: 613571 - RNA, 19 nt, Homo sapiens
  misc_RNA (1)...(19): siRNA sense strand
gauccagugcuucaacgau

SEQ ID NO: 613572 - RNA, 19 nt, Homo sapiens
  misc_RNA (1)...(19): siRNA sense strand
gccagcagcagcuacaaca

SEQ ID NO: 613573 - RNA, 19 nt, Homo sapiens
  misc_RNA (1)...(19): siRNA sense strand
ccaucucugugauccuguu

SEQ ID NO: 613574 - RNA, 19 nt, Homo sapiens
  misc_RNA (1)...(19): siRNA sense strand
cacuacugcuacccucauu

SEQ ID NO: 613575 - RNA, 19 nt, Homo sapiens
  misc_RNA (1)...(19): siRNA sense strand
gcagagauauuacagauug

SEQ ID NO: 613576 - RNA, 19 nt, Homo sapiens
  misc_RNA (1)...(19): siRNA sense strand
gguggaaucugcagaaaua

SEQ ID NO: 613577 - RNA, 19 nt, Homo sapiens
  misc_RNA (1)...(19): siRNA sense strand
caacagacauugcugaaga

SEQ ID NO: 613578 - RNA, 19 nt, Homo sapiens
  misc_RNA (1)...(19): siRNA sense strand
gagacaauguaucgaaaua

SEQ ID NO: 613579 - RNA, 19 nt, Homo sapiens
  misc_RNA (1)...(19): siRNA sense strand
caaaggacauguuaaagau

SEQ ID NO: 613580 - RNA, 19 nt, Homo sapiens
  misc_RNA (1)...(19): siRNA sense strand
gcaaauggagcucccuuua

SEQ ID NO: 613581 - RNA, 19 nt, Homo sapiens
  misc_RNA (1)...(19): siRNA sense strand
caaauauggugcugaugua

SEQ ID NO: 613582 - RNA, 19 nt, Homo sapiens
  misc_RNA (1)...(19): siRNA sense strand
gcaaaggacauguuaaaga

SEQ ID NO: 613583 - RNA, 19 nt, Homo sapiens
  misc_RNA (1)...(19): siRNA sense strand
caagucaucacaauaguua

SEQ ID NO: 613584 - RNA, 19 nt, Homo sapiens
  misc_RNA (1)...(19): siRNA sense strand
caacaaguauuaacaguac

SEQ ID NO: 613585 - RNA, 19 nt, Homo sapiens
  misc_RNA (1)...(19): siRNA sense strand
gaugacagcucuccauugg

SEQ ID NO: 613586 - RNA, 19 nt, Homo sapiens
  misc_RNA (1)...(19): siRNA sense strand
gacaauacaugcugcaaca

SEQ ID NO: 613587 - RNA, 19 nt, Homo sapiens
  misc_RNA (1)...(19): siRNA sense strand
gaugaugaaguucguauuu

SEQ ID NO: 613588 - RNA, 19 nt, Homo sapiens
  misc_RNA (1)...(19): siRNA sense strand
gaagaaacuguuauaagug

SEQ ID NO: 613589 - RNA, 19 nt, Homo sapiens
  misc_RNA (1)...(19): siRNA sense strand
gaccgaacaccauuacaua

SEQ ID NO: 613590 - RNA, 19 nt, Homo sapiens
  misc_RNA (1)...(19): siRNA sense strand
ccacagaacacaaucauca

SEQ ID NO: 613591 - RNA, 19 nt, Homo sapiens
  misc_RNA (1)...(19): siRNA sense strand
gcauggugcugaugucaau

SEQ ID NO: 613592 - RNA, 19 nt, Homo sapiens
  misc_RNA (1)...(19): siRNA sense strand
gcugggaacuucuccacuu

SEQ ID NO: 613593 - RNA, 19 nt, Homo sapiens
  misc_RNA (1)...(19): siRNA sense strand
gauguacacacgcaaagua

SEQ ID NO: 613594 - RNA, 19 nt, Homo sapiens
  misc_RNA (1)...(19): siRNA sense strand
gugcugaugucaaugcaaa

SEQ ID NO: 613595 - RNA, 19 nt, Homo sapiens
  misc_RNA (1)...(19): siRNA sense strand
uagcagagauauuacagau

SEQ ID NO: 613596 - RNA, 19 nt, Homo sapiens
  misc_RNA (1)...(19): siRNA sense strand
uggaaacucuucuacauca

SEQ ID NO: 613597 - RNA, 19 nt, Homo sapiens
  misc_RNA (1)...(19): siRNA sense strand
ggaaucugcagaaauagaa

SEQ ID NO: 613598 - RNA, 19 nt, Homo sapiens
  misc_RNA (1)...(19): siRNA sense strand
gaagaaccaccagcuaaga

SEQ ID NO: 613599 - RNA, 19 nt, Homo sapiens
  misc_RNA (1)...(19): siRNA sense strand
gaacuucuccacuucaucu

SEQ ID NO: 613600 - RNA, 19 nt, Homo sapiens
  misc_RNA (1)...(19): siRNA sense strand
agacauugcugaagaaacu

SEQ ID NO: 613601 - RNA, 19 nt, Homo sapiens
  misc_RNA (1)...(19): siRNA sense strand
aaggacauguuaaagauga

SEQ ID NO: 613602 - RNA, 19 nt, Homo sapiens
  misc_RNA (1)...(19): siRNA sense strand
gugaagaaccaccagcuaa

SEQ ID NO: 613603 - RNA, 19 nt, Homo sapiens
  misc_RNA (1)...(19): siRNA sense strand
gagcaggucaagaugauga

SEQ ID NO: 613604 - RNA, 19 nt, Homo sapiens
  misc_RNA (1)...(19): siRNA sense strand
ggaaauuugcacucuauuc

SEQ ID NO: 613605 - RNA, 19 nt, Homo sapiens
  misc_RNA (1)...(19): siRNA sense strand
aaacucuucuacaucagua

SEQ ID NO: 613606 - RNA, 19 nt, Homo sapiens
  misc_RNA (1)...(19): siRNA sense strand
caaugcaaaggacauguua

SEQ ID NO: 613607 - RNA, 19 nt, Homo sapiens
  misc_RNA (1)...(19): siRNA sense strand
uaagagacaauguaucgaa

SEQ ID NO: 613608 - RNA, 19 nt, Homo sapiens
  misc_RNA (1)...(19): siRNA sense strand
ggucagcccaucauuguga

SEQ ID NO: 613609 - RNA, 19 nt, Homo sapiens
  misc_RNA (1)...(19): siRNA sense strand
agaaccaaaucaacacaaa

SEQ ID NO: 613610 - RNA, 19 nt, Homo sapiens
  misc_RNA (1)...(19): siRNA sense strand
uguaucugcuguucaguuu

SEQ ID NO: 613611 - RNA, 19 nt, Homo sapiens
  misc_RNA (1)...(19): siRNA sense strand
gacaacaaguauuaacagu

SEQ ID NO: 613612 - RNA, 19 nt, Homo sapiens
  misc_RNA (1)...(19): siRNA sense strand
guacacacgcaaaguaaau

SEQ ID NO: 613613 - RNA, 19 nt, Homo sapiens
  misc_RNA (1)...(19): siRNA sense strand
aaauggagcucccuuuacu

SEQ ID NO: 613614 - RNA, 19 nt, Homo sapiens
  misc_RNA (1)...(19): siRNA sense strand
agauggacaacaaguauua

SEQ ID NO: 613615 - RNA, 19 nt, Homo sapiens
  misc_RNA (1)...(19): siRNA sense strand
acaccacaguuuaucauug

SEQ ID NO: 613616 - RNA, 19 nt, Homo sapiens
  misc_RNA (1)...(19): siRNA sense strand
caauagacaauggaaauga

SEQ ID NO: 613617 - RNA, 19 nt, Homo sapiens
  misc_RNA (1)...(19): siRNA sense strand
gcaagucaucacaauaguu

SEQ ID NO: 613618 - RNA, 19 nt, Homo sapiens
  misc_RNA (1)...(19): siRNA sense strand
ggagcucccuuuacuacag

SEQ ID NO: 613619 - RNA, 19 nt, Homo sapiens
  misc_RNA (1)...(19): siRNA sense strand
cacaauaguuacagaugga

SEQ ID NO: 613620 - RNA, 19 nt, Homo sapiens
  misc_RNA (1)...(19): siRNA sense strand
ggaccgaacaccauuacau

SEQ ID NO: 613621 - RNA, 19 nt, Homo sapiens
  misc_RNA (1)...(19): siRNA sense strand
aagagacaauguaucgaaa

SEQ ID NO: 613622 - RNA, 19 nt, Homo sapiens
  misc_RNA (1)...(19): siRNA sense strand
gagcucccuuuacuacaga

SEQ ID NO: 613623 - RNA, 19 nt, Homo sapiens
  misc_RNA (1)...(19): siRNA sense strand
cagcaagucaucacaauag

SEQ ID NO: 613624 - RNA, 19 nt, Homo sapiens
  misc_RNA (1)...(19): siRNA sense strand
gcugcaacaccacaguuua

SEQ ID NO: 613625 - RNA, 19 nt, Homo sapiens
  misc_RNA (1)...(19): siRNA sense strand
caacacaaacccagagagu

SEQ ID NO: 613626 - RNA, 19 nt, Homo sapiens
  misc_RNA (1)...(19): siRNA sense strand
ucaaauauggugcugaugu

SEQ ID NO: 613627 - RNA, 19 nt, Homo sapiens
  misc_RNA (1)...(19): siRNA sense strand
gcacaguauggucauuauu

SEQ ID NO: 613628 - RNA, 19 nt, Homo sapiens
  misc_RNA (1)...(19): siRNA sense strand
gcuaagagacaauguaucg

SEQ ID NO: 613629 - RNA, 19 nt, Homo sapiens
  misc_RNA (1)...(19): siRNA sense strand
ccagauggacaacaaguau

SEQ ID NO: 613630 - RNA, 19 nt, Homo sapiens
  misc_RNA (1)...(19): siRNA sense strand
gagcuggugugagcagaga

SEQ ID NO: 613631 - RNA, 19 nt, Homo sapiens
  misc_RNA (1)...(19): siRNA sense strand
ggacaacaaguauuaacag

SEQ ID NO: 613632 - RNA, 19 nt, Homo sapiens
  misc_RNA (1)...(19): siRNA sense strand
gcaacaccacaguuuauca

SEQ ID NO: 613633 - RNA, 19 nt, Homo sapiens
  misc_RNA (1)...(19): siRNA sense strand
gcugaagaaacuguuauaa

SEQ ID NO: 613634 - RNA, 19 nt, Homo sapiens
  misc_RNA (1)...(19): siRNA sense strand
gcagagaugccagaaccaa

SEQ ID NO: 613635 - RNA, 19 nt, Homo sapiens
  misc_RNA (1)...(19): siRNA sense strand
uaacaguaccagcaacaga

SEQ ID NO: 613636 - RNA, 19 nt, Homo sapiens
  misc_RNA (1)...(19): siRNA sense strand
cagcacaguauggucauua

SEQ ID NO: 613637 - RNA, 19 nt, Homo sapiens
  misc_RNA (1)...(19): siRNA sense strand
gaaauuugcacucuauucc

SEQ ID NO: 613638 - RNA, 19 nt, Homo sapiens
  misc_RNA (1)...(19): siRNA sense strand
ugccuuagcugaagcaucu

SEQ ID NO: 613639 - RNA, 19 nt, Homo sapiens
  misc_RNA (1)...(19): siRNA sense strand
gcacgagcaggucaagaug

SEQ ID NO: 613640 - RNA, 19 nt, Homo sapiens
  misc_RNA (1)...(19): siRNA sense strand
ggaauuggucagcccauca

SEQ ID NO: 613641 - RNA, 19 nt, Homo sapiens
  misc_RNA (1)...(19): siRNA sense strand
ggccacagaagaaguaguu

SEQ ID NO: 613642 - RNA, 19 nt, Homo sapiens
  misc_RNA (1)...(19): siRNA sense strand
caucaguauuagcuacauu

SEQ ID NO: 613643 - RNA, 19 nt, Homo sapiens
  misc_RNA (1)...(19): siRNA sense strand
gaagauuuagcagagauau

SEQ ID NO: 613644 - RNA, 19 nt, Homo sapiens
  misc_RNA (1)...(19): siRNA sense strand
caccacaguuuaucauugg

SEQ ID NO: 613645 - RNA, 19 nt, Homo sapiens
  misc_RNA (1)...(19): siRNA sense strand
cagcuaagagacaauguau

SEQ ID NO: 613646 - RNA, 19 nt, Homo sapiens
  misc_RNA (1)...(19): siRNA sense strand
caugccagauggacaacaa

SEQ ID NO: 613647 - RNA, 19 nt, Homo sapiens
  misc_RNA (1)...(19): siRNA sense strand
gaaacucuucuacaucagu

SEQ ID NO: 613648 - RNA, 19 nt, Homo sapiens
  misc_RNA (1)...(19): siRNA sense strand
caagaggugguggaacuuu

SEQ ID NO: 613649 - RNA, 19 nt, Homo sapiens
  misc_RNA (1)...(19): siRNA sense strand
cagacuggcugggaacuuc

SEQ ID NO: 613650 - RNA, 19 nt, Homo sapiens
  misc_RNA (1)...(19): siRNA sense strand
gauauuacagauugcuaug

SEQ ID NO: 613651 - RNA, 19 nt, Homo sapiens
  misc_RNA (1)...(19): siRNA sense strand
gcagcacaguauggucauu

SEQ ID NO: 613652 - RNA, 19 nt, Homo sapiens
  misc_RNA (1)...(19): siRNA sense strand
ucagcaagucaucacaaua

SEQ ID NO: 613653 - RNA, 19 nt, Homo sapiens
  misc_RNA (1)...(19): siRNA sense strand
caaauggagcucccuuuac

SEQ ID NO: 613654 - RNA, 19 nt, Homo sapiens
  misc_RNA (1)...(19): siRNA sense strand
uucagaaacuccaguagug

SEQ ID NO: 613655 - RNA, 19 nt, Homo sapiens
  misc_RNA (1)...(19): siRNA sense strand
cagaacacaaucaucaaga

SEQ ID NO: 613656 - RNA, 19 nt, Homo sapiens
  misc_RNA (1)...(19): siRNA sense strand
ccagcuaagagacaaugua

SEQ ID NO: 613657 - RNA, 19 nt, Homo sapiens
  misc_RNA (1)...(19): siRNA sense strand
uuggaaauuugcacucuau

SEQ ID NO: 613658 - RNA, 19 nt, Homo sapiens
  misc_RNA (1)...(19): siRNA sense strand
caacaccacaguuuaucau

SEQ ID NO: 613659 - RNA, 19 nt, Homo sapiens
  misc_RNA (1)...(19): siRNA sense strand
gagauauuacagauugcua

SEQ ID NO: 613660 - RNA, 19 nt, Homo sapiens
  misc_RNA (1)...(19): siRNA sense strand
gguggaacuuuuaaucaaa

SEQ ID NO: 613661 - RNA, 19 nt, Homo sapiens
  misc_RNA (1)...(19): siRNA sense strand
gggaacuucuccacuucau

SEQ ID NO: 613662 - RNA, 19 nt, Homo sapiens
  misc_RNA (1)...(19): siRNA sense strand
gauggacaacaaguauuaa

SEQ ID NO: 613663 - RNA, 19 nt, Homo sapiens
  misc_RNA (1)...(19): siRNA sense strand
uaucugcuguucaguuugg

SEQ ID NO: 613664 - RNA, 19 nt, Homo sapiens
  misc_RNA (1)...(19): siRNA sense strand
cagagaguccugacacugu

SEQ ID NO: 613665 - RNA, 19 nt, Homo sapiens
  misc_RNA (1)...(19): siRNA sense strand
uauuacagauugcuaugca

SEQ ID NO: 613666 - RNA, 19 nt, Homo sapiens
  misc_RNA (1)...(19): siRNA sense strand
acacacgcaaaguaaauuu

SEQ ID NO: 613667 - RNA, 19 nt, Homo sapiens
  misc_RNA (1)...(19): siRNA sense strand
gaaacuguuauaagugaag

SEQ ID NO: 613668 - RNA, 19 nt, Homo sapiens
  misc_RNA (1)...(19): siRNA sense strand
ccgaacaccauuacauaug

SEQ ID NO: 613669 - RNA, 19 nt, Homo sapiens
  misc_RNA (1)...(19): siRNA sense strand
gucagcaagucaucacaau

SEQ ID NO: 613670 - RNA, 19 nt, Homo sapiens
  misc_RNA (1)...(19): siRNA sense strand
cacaguauggucauuauuc

SEQ ID NO: 613671 - RNA, 19 nt, Homo sapiens
  misc_RNA (1)...(19): siRNA sense strand
uuuggaaacucuucuacau

SEQ ID NO: 613672 - RNA, 19 nt, Homo sapiens
  misc_RNA (1)...(19): siRNA sense strand
gacaauggaaaugaagauu

SEQ ID NO: 613673 - RNA, 19 nt, Homo sapiens
  misc_RNA (1)...(19): siRNA sense strand
gaaccaaaucaacacaaac

SEQ ID NO: 613674 - RNA, 19 nt, Homo sapiens
  misc_RNA (1)...(19): siRNA sense strand
ucaucuagcagcacaguau

SEQ ID NO: 613675 - RNA, 19 nt, Homo sapiens
  misc_RNA (1)...(19): siRNA sense strand
gcagagauauuacagauug

SEQ ID NO: 613676 - RNA, 19 nt, Homo sapiens
  misc_RNA (1)...(19): siRNA sense strand
gguggaaucugcagaaaua

SEQ ID NO: 613677 - RNA, 19 nt, Homo sapiens
  misc_RNA (1)...(19): siRNA sense strand
caacagacauugcugaaga

SEQ ID NO: 613678 - RNA, 19 nt, Homo sapiens
  misc_RNA (1)...(19): siRNA sense strand
gagacaauguaucgaaaua

SEQ ID NO: 613679 - RNA, 19 nt, Homo sapiens
  misc_RNA (1)...(19): siRNA sense strand
caaaggacauguuaaagau

SEQ ID NO: 613680 - RNA, 19 nt, Homo sapiens
  misc_RNA (1)...(19): siRNA sense strand
gcaaauggagcucccuuua

SEQ ID NO: 613681 - RNA, 19 nt, Homo sapiens
  misc_RNA (1)...(19): siRNA sense strand
caaauauggugcugaugua

SEQ ID NO: 613682 - RNA, 19 nt, Homo sapiens
  misc_RNA (1)...(19): siRNA sense strand
gcaaaggacauguuaaaga

SEQ ID NO: 613683 - RNA, 19 nt, Homo sapiens
  misc_RNA (1)...(19): siRNA sense strand
caagucaucacaauaguua

SEQ ID NO: 613684 - RNA, 19 nt, Homo sapiens
  misc_RNA (1)...(19): siRNA sense strand
caacaaguauuaacaguac

SEQ ID NO: 613685 - RNA, 19 nt, Homo sapiens
  misc_RNA (1)...(19): siRNA sense strand
gaugacagcucuccauugg

SEQ ID NO: 613686 - RNA, 19 nt, Homo sapiens
  misc_RNA (1)...(19): siRNA sense strand
gacaauacaugcugcaaca

SEQ ID NO: 613687 - RNA, 19 nt, Homo sapiens
  misc_RNA (1)...(19): siRNA sense strand
gaugaugaaguucguauuu

SEQ ID NO: 613688 - RNA, 19 nt, Homo sapiens
  misc_RNA (1)...(19): siRNA sense strand
gaagaaacuguuauaagug

SEQ ID NO: 613689 - RNA, 19 nt, Homo sapiens
  misc_RNA (1)...(19): siRNA sense strand
gaccgaacaccauuacaua

SEQ ID NO: 613690 - RNA, 19 nt, Homo sapiens
  misc_RNA (1)...(19): siRNA sense strand
ccacagaacacaaucauca

SEQ ID NO: 613691 - RNA, 19 nt, Homo sapiens
  misc_RNA (1)...(19): siRNA sense strand
gcauggugcugaugucaau

SEQ ID NO: 613692 - RNA, 19 nt, Homo sapiens
  misc_RNA (1)...(19): siRNA sense strand
gcugggaacuucuccacuu

SEQ ID NO: 613693 - RNA, 19 nt, Homo sapiens
  misc_RNA (1)...(19): siRNA sense strand
gauguacacacgcaaagua

SEQ ID NO: 613694 - RNA, 19 nt, Homo sapiens
  misc_RNA (1)...(19): siRNA sense strand
gugcugaugucaaugcaaa

SEQ ID NO: 613695 - RNA, 19 nt, Homo sapiens
  misc_RNA (1)...(19): siRNA sense strand
uagcagagauauuacagau

SEQ ID NO: 613696 - RNA, 19 nt, Homo sapiens
  misc_RNA (1)...(19): siRNA sense strand
uggaaacucuucuacauca

SEQ ID NO: 613697 - RNA, 19 nt, Homo sapiens
  misc_RNA (1)...(19): siRNA sense strand
ggaaucugcagaaauagaa

SEQ ID NO: 613698 - RNA, 19 nt, Homo sapiens
  misc_RNA (1)...(19): siRNA sense strand
gaagaaccaccagcuaaga

SEQ ID NO: 613699 - RNA, 19 nt, Homo sapiens
  misc_RNA (1)...(19): siRNA sense strand
gaacuucuccacuucaucu

SEQ ID NO: 613700 - RNA, 19 nt, Homo sapiens
  misc_RNA (1)...(19): siRNA sense strand
agacauugcugaagaaacu

SEQ ID NO: 613701 - RNA, 19 nt, Homo sapiens
  misc_RNA (1)...(19): siRNA sense strand
aaggacauguuaaagauga

SEQ ID NO: 613702 - RNA, 19 nt, Homo sapiens
  misc_RNA (1)...(19): siRNA sense strand
gugaagaaccaccagcuaa

SEQ ID NO: 613703 - RNA, 19 nt, Homo sapiens
  misc_RNA (1)...(19): siRNA sense strand
gagcaggucaagaugauga

SEQ ID NO: 613704 - RNA, 19 nt, Homo sapiens
  misc_RNA (1)...(19): siRNA sense strand
ggaaauuugcacucuauuc

SEQ ID NO: 613705 - RNA, 19 nt, Homo sapiens
  misc_RNA (1)...(19): siRNA sense strand
aaacucuucuacaucagua

SEQ ID NO: 613706 - RNA, 19 nt, Homo sapiens
  misc_RNA (1)...(19): siRNA sense strand
caaugcaaaggacauguua

SEQ ID NO: 613707 - RNA, 19 nt, Homo sapiens
  misc_RNA (1)...(19): siRNA sense strand
uaagagacaauguaucgaa

SEQ ID NO: 613708 - RNA, 19 nt, Homo sapiens
  misc_RNA (1)...(19): siRNA sense strand
ggucagcccaucauuguga

SEQ ID NO: 613709 - RNA, 19 nt, Homo sapiens
  misc_RNA (1)...(19): siRNA sense strand
agaaccaaaucaacacaaa

SEQ ID NO: 613710 - RNA, 19 nt, Homo sapiens
  misc_RNA (1)...(19): siRNA sense strand
uguaucugcuguucaguuu

SEQ ID NO: 613711 - RNA, 19 nt, Homo sapiens
  misc_RNA (1)...(19): siRNA sense strand
gacaacaaguauuaacagu

SEQ ID NO: 613712 - RNA, 19 nt, Homo sapiens
  misc_RNA (1)...(19): siRNA sense strand
guacacacgcaaaguaaau

SEQ ID NO: 613713 - RNA, 19 nt, Homo sapiens
  misc_RNA (1)...(19): siRNA sense strand
aaauggagcucccuuuacu

SEQ ID NO: 613714 - RNA, 19 nt, Homo sapiens
  misc_RNA (1)...(19): siRNA sense strand
agauggacaacaaguauua

SEQ ID NO: 613715 - RNA, 19 nt, Homo sapiens
  misc_RNA (1)...(19): siRNA sense strand
acaccacaguuuaucauug

SEQ ID NO: 613716 - RNA, 19 nt, Homo sapiens
  misc_RNA (1)...(19): siRNA sense strand
caauagacaauggaaauga

SEQ ID NO: 613717 - RNA, 19 nt, Homo sapiens
  misc_RNA (1)...(19): siRNA sense strand
gcaagucaucacaauaguu

SEQ ID NO: 613718 - RNA, 19 nt, Homo sapiens
  misc_RNA (1)...(19): siRNA sense strand
ggagcucccuuuacuacag

SEQ ID NO: 613719 - RNA, 19 nt, Homo sapiens
  misc_RNA (1)...(19): siRNA sense strand
cacaauaguuacagaugga

SEQ ID NO: 613720 - RNA, 19 nt, Homo sapiens
  misc_RNA (1)...(19): siRNA sense strand
ggaccgaacaccauuacau

SEQ ID NO: 613721 - RNA, 19 nt, Homo sapiens
  misc_RNA (1)...(19): siRNA sense strand
aagagacaauguaucgaaa

SEQ ID NO: 613722 - RNA, 19 nt, Homo sapiens
  misc_RNA (1)...(19): siRNA sense strand
gagcucccuuuacuacaga

SEQ ID NO: 613723 - RNA, 19 nt, Homo sapiens
  misc_RNA (1)...(19): siRNA sense strand
cagcaagucaucacaauag

SEQ ID NO: 613724 - RNA, 19 nt, Homo sapiens
  misc_RNA (1)...(19): siRNA sense strand
gcugcaacaccacaguuua

SEQ ID NO: 613725 - RNA, 19 nt, Homo sapiens
  misc_RNA (1)...(19): siRNA sense strand
caacacaaacccagagagu

SEQ ID NO: 613726 - RNA, 19 nt, Homo sapiens
  misc_RNA (1)...(19): siRNA sense strand
ucaaauauggugcugaugu

SEQ ID NO: 613727 - RNA, 19 nt, Homo sapiens
  misc_RNA (1)...(19): siRNA sense strand
gcacaguauggucauuauu

SEQ ID NO: 613728 - RNA, 19 nt, Homo sapiens
  misc_RNA (1)...(19): siRNA sense strand
gcuaagagacaauguaucg

SEQ ID NO: 613729 - RNA, 19 nt, Homo sapiens
  misc_RNA (1)...(19): siRNA sense strand
ccagauggacaacaaguau

SEQ ID NO: 613730 - RNA, 19 nt, Homo sapiens
  misc_RNA (1)...(19): siRNA sense strand
gagcuggugugagcagaga

SEQ ID NO: 613731 - RNA, 19 nt, Homo sapiens
  misc_RNA (1)...(19): siRNA sense strand
ggacaacaaguauuaacag

SEQ ID NO: 613732 - RNA, 19 nt, Homo sapiens
  misc_RNA (1)...(19): siRNA sense strand
gcaacaccacaguuuauca

SEQ ID NO: 613733 - RNA, 19 nt, Homo sapiens
  misc_RNA (1)...(19): siRNA sense strand
gcugaagaaacuguuauaa

SEQ ID NO: 613734 - RNA, 19 nt, Homo sapiens
  misc_RNA (1)...(19): siRNA sense strand
gcagagaugccagaaccaa

SEQ ID NO: 613735 - RNA, 19 nt, Homo sapiens
  misc_RNA (1)...(19): siRNA sense strand
uaacaguaccagcaacaga

SEQ ID NO: 613736 - RNA, 19 nt, Homo sapiens
  misc_RNA (1)...(19): siRNA sense strand
cagcacaguauggucauua

SEQ ID NO: 613737 - RNA, 19 nt, Homo sapiens
  misc_RNA (1)...(19): siRNA sense strand
gaaauuugcacucuauucc

SEQ ID NO: 613738 - RNA, 19 nt, Homo sapiens
  misc_RNA (1)...(19): siRNA sense strand
ugccuuagcugaagcaucu

SEQ ID NO: 613739 - RNA, 19 nt, Homo sapiens
  misc_RNA (1)...(19): siRNA sense strand
gcacgagcaggucaagaug

SEQ ID NO: 613740 - RNA, 19 nt, Homo sapiens
  misc_RNA (1)...(19): siRNA sense strand
ggaauuggucagcccauca

SEQ ID NO: 613741 - RNA, 19 nt, Homo sapiens
  misc_RNA (1)...(19): siRNA sense strand
ggccacagaagaaguaguu

SEQ ID NO: 613742 - RNA, 19 nt, Homo sapiens
  misc_RNA (1)...(19): siRNA sense strand
caucaguauuagcuacauu

SEQ ID NO: 613743 - RNA, 19 nt, Homo sapiens
  misc_RNA (1)...(19): siRNA sense strand
gaagauuuagcagagauau

SEQ ID NO: 613744 - RNA, 19 nt, Homo sapiens
  misc_RNA (1)...(19): siRNA sense strand
caccacaguuuaucauugg

SEQ ID NO: 613745 - RNA, 19 nt, Homo sapiens
  misc_RNA (1)...(19): siRNA sense strand
cagcuaagagacaauguau

SEQ ID NO: 613746 - RNA, 19 nt, Homo sapiens
  misc_RNA (1)...(19): siRNA sense strand
caugccagauggacaacaa

SEQ ID NO: 613747 - RNA, 19 nt, Homo sapiens
  misc_RNA (1)...(19): siRNA sense strand
gaaacucuucuacaucagu

SEQ ID NO: 613748 - RNA, 19 nt, Homo sapiens
  misc_RNA (1)...(19): siRNA sense strand
caagaggugguggaacuuu

SEQ ID NO: 613749 - RNA, 19 nt, Homo sapiens
  misc_RNA (1)...(19): siRNA sense strand
cagacuggcugggaacuuc

SEQ ID NO: 613750 - RNA, 19 nt, Homo sapiens
  misc_RNA (1)...(19): siRNA sense strand
gauauuacagauugcuaug

SEQ ID NO: 613751 - RNA, 19 nt, Homo sapiens
  misc_RNA (1)...(19): siRNA sense strand
gcagcacaguauggucauu

SEQ ID NO: 613752 - RNA, 19 nt, Homo sapiens
  misc_RNA (1)...(19): siRNA sense strand
ucagcaagucaucacaaua

SEQ ID NO: 613753 - RNA, 19 nt, Homo sapiens
  misc_RNA (1)...(19): siRNA sense strand
caaauggagcucccuuuac

SEQ ID NO: 613754 - RNA, 19 nt, Homo sapiens
  misc_RNA (1)...(19): siRNA sense strand
uucagaaacuccaguagug

SEQ ID NO: 613755 - RNA, 19 nt, Homo sapiens
  misc_RNA (1)...(19): siRNA sense strand
cagaacacaaucaucaaga

SEQ ID NO: 613756 - RNA, 19 nt, Homo sapiens
  misc_RNA (1)...(19): siRNA sense strand
ccagcuaagagacaaugua

SEQ ID NO: 613757 - RNA, 19 nt, Homo sapiens
  misc_RNA (1)...(19): siRNA sense strand
uuggaaauuugcacucuau

SEQ ID NO: 613758 - RNA, 19 nt, Homo sapiens
  misc_RNA (1)...(19): siRNA sense strand
caacaccacaguuuaucau

SEQ ID NO: 613759 - RNA, 19 nt, Homo sapiens
  misc_RNA (1)...(19): siRNA sense strand
gagauauuacagauugcua

SEQ ID NO: 613760 - RNA, 19 nt, Homo sapiens
  misc_RNA (1)...(19): siRNA sense strand
gguggaacuuuuaaucaaa

SEQ ID NO: 613761 - RNA, 19 nt, Homo sapiens
  misc_RNA (1)...(19): siRNA sense strand
gggaacuucuccacuucau

SEQ ID NO: 613762 - RNA, 19 nt, Homo sapiens
  misc_RNA (1)...(19): siRNA sense strand
gauggacaacaaguauuaa

SEQ ID NO: 613763 - RNA, 19 nt, Homo sapiens
  misc_RNA (1)...(19): siRNA sense strand
uaucugcuguucaguuugg

SEQ ID NO: 613764 - RNA, 19 nt, Homo sapiens
  misc_RNA (1)...(19): siRNA sense strand
cagagaguccugacacugu

SEQ ID NO: 613765 - RNA, 19 nt, Homo sapiens
  misc_RNA (1)...(19): siRNA sense strand
uauuacagauugcuaugca

SEQ ID NO: 613766 - RNA, 19 nt, Homo sapiens
  misc_RNA (1)...(19): siRNA sense strand
acacacgcaaaguaaauuu

SEQ ID NO: 613767 - RNA, 19 nt, Homo sapiens
  misc_RNA (1)...(19): siRNA sense strand
gaaacuguuauaagugaag

SEQ ID NO: 613768 - RNA, 19 nt, Homo sapiens
  misc_RNA (1)...(19): siRNA sense strand
ccgaacaccauuacauaug

SEQ ID NO: 613769 - RNA, 19 nt, Homo sapiens
  misc_RNA (1)...(19): siRNA sense strand
gucagcaagucaucacaau

SEQ ID NO: 613770 - RNA, 19 nt, Homo sapiens
  misc_RNA (1)...(19): siRNA sense strand
cacaguauggucauuauuc

SEQ ID NO: 613771 - RNA, 19 nt, Homo sapiens
  misc_RNA (1)...(19): siRNA sense strand
uuuggaaacucuucuacau

SEQ ID NO: 613772 - RNA, 19 nt, Homo sapiens
  misc_RNA (1)...(19): siRNA sense strand
gacaauggaaaugaagauu

SEQ ID NO: 613773 - RNA, 19 nt, Homo sapiens
  misc_RNA (1)...(19): siRNA sense strand
gaaccaaaucaacacaaac

SEQ ID NO: 613774 - RNA, 19 nt, Homo sapiens
  misc_RNA (1)...(19): siRNA sense strand
ucaucuagcagcacaguau

SEQ ID NO: 613775 - RNA, 19 nt, Homo sapiens
  misc_RNA (1)...(19): siRNA sense strand
gcagagauauuacagauug

SEQ ID NO: 613776 - RNA, 19 nt, Homo sapiens
  misc_RNA (1)...(19): siRNA sense strand
gguggaaucugcagaaaua

SEQ ID NO: 613777 - RNA, 19 nt, Homo sapiens
  misc_RNA (1)...(19): siRNA sense strand
caacagacauugcugaaga

SEQ ID NO: 613778 - RNA, 19 nt, Homo sapiens
  misc_RNA (1)...(19): siRNA sense strand
gagacaauguaucgaaaua

SEQ ID NO: 613779 - RNA, 19 nt, Homo sapiens
  misc_RNA (1)...(19): siRNA sense strand
caaaggacauguuaaagau

SEQ ID NO: 613780 - RNA, 19 nt, Homo sapiens
  misc_RNA (1)...(19): siRNA sense strand
gcaaauggagcucccuuua

SEQ ID NO: 613781 - RNA, 19 nt, Homo sapiens
  misc_RNA (1)...(19): siRNA sense strand
caaauauggugcugaugua

SEQ ID NO: 613782 - RNA, 19 nt, Homo sapiens
  misc_RNA (1)...(19): siRNA sense strand
gcaaaggacauguuaaaga

SEQ ID NO: 613783 - RNA, 19 nt, Homo sapiens
  misc_RNA (1)...(19): siRNA sense strand
caagucaucacaauaguua

SEQ ID NO: 613784 - RNA, 19 nt, Homo sapiens
  misc_RNA (1)...(19): siRNA sense strand
caacaaguauuaacaguac

SEQ ID NO: 613785 - RNA, 19 nt, Homo sapiens
  misc_RNA (1)...(19): siRNA sense strand
gaugacagcucuccauugg

SEQ ID NO: 613786 - RNA, 19 nt, Homo sapiens
  misc_RNA (1)...(19): siRNA sense strand
gacaauacaugcugcaaca

SEQ ID NO: 613787 - RNA, 19 nt, Homo sapiens
  misc_RNA (1)...(19): siRNA sense strand
gaugaugaaguucguauuu

SEQ ID NO: 613788 - RNA, 19 nt, Homo sapiens
  misc_RNA (1)...(19): siRNA sense strand
gaagaaacuguuauaagug

SEQ ID NO: 613789 - RNA, 19 nt, Homo sapiens
  misc_RNA (1)...(19): siRNA sense strand
gaccgaacaccauuacaua

SEQ ID NO: 613790 - RNA, 19 nt, Homo sapiens
  misc_RNA (1)...(19): siRNA sense strand
ccacagaacacaaucauca

SEQ ID NO: 613791 - RNA, 19 nt, Homo sapiens
  misc_RNA (1)...(19): siRNA sense strand
gcauggugcugaugucaau

SEQ ID NO: 613792 - RNA, 19 nt, Homo sapiens
  misc_RNA (1)...(19): siRNA sense strand
gcugggaacuucuccacuu

SEQ ID NO: 613793 - RNA, 19 nt, Homo sapiens
  misc_RNA (1)...(19): siRNA sense strand
gauguacacacgcaaagua

SEQ ID NO: 613794 - RNA, 19 nt, Homo sapiens
  misc_RNA (1)...(19): siRNA sense strand
gugcugaugucaaugcaaa

SEQ ID NO: 613795 - RNA, 19 nt, Homo sapiens
  misc_RNA (1)...(19): siRNA sense strand
uagcagagauauuacagau

SEQ ID NO: 613796 - RNA, 19 nt, Homo sapiens
  misc_RNA (1)...(19): siRNA sense strand
uggaaacucuucuacauca

SEQ ID NO: 613797 - RNA, 19 nt, Homo sapiens
  misc_RNA (1)...(19): siRNA sense strand
ggaaucugcagaaauagaa

SEQ ID NO: 613798 - RNA, 19 nt, Homo sapiens
  misc_RNA (1)...(19): siRNA sense strand
gaagaaccaccagcuaaga

SEQ ID NO: 613799 - RNA, 19 nt, Homo sapiens
  misc_RNA (1)...(19): siRNA sense strand
gaacuucuccacuucaucu

SEQ ID NO: 613800 - RNA, 19 nt, Homo sapiens
  misc_RNA (1)...(19): siRNA sense strand
agacauugcugaagaaacu

SEQ ID NO: 613801 - RNA, 19 nt, Homo sapiens
  misc_RNA (1)...(19): siRNA sense strand
aaggacauguuaaagauga

SEQ ID NO: 613802 - RNA, 19 nt, Homo sapiens
  misc_RNA (1)...(19): siRNA sense strand
gugaagaaccaccagcuaa

SEQ ID NO: 613803 - RNA, 19 nt, Homo sapiens
  misc_RNA (1)...(19): siRNA sense strand
gagcaggucaagaugauga

SEQ ID NO: 613804 - RNA, 19 nt, Homo sapiens
  misc_RNA (1)...(19): siRNA sense strand
ggaaauuugcacucuauuc

SEQ ID NO: 613805 - RNA, 19 nt, Homo sapiens
  misc_RNA (1)...(19): siRNA sense strand
aaacucuucuacaucagua

SEQ ID NO: 613806 - RNA, 19 nt, Homo sapiens
  misc_RNA (1)...(19): siRNA sense strand
caaugcaaaggacauguua

SEQ ID NO: 613807 - RNA, 19 nt, Homo sapiens
  misc_RNA (1)...(19): siRNA sense strand
uaagagacaauguaucgaa

SEQ ID NO: 613808 - RNA, 19 nt, Homo sapiens
  misc_RNA (1)...(19): siRNA sense strand
ggucagcccaucauuguga

SEQ ID NO: 613809 - RNA, 19 nt, Homo sapiens
  misc_RNA (1)...(19): siRNA sense strand
agaaccaaaucaacacaaa

SEQ ID NO: 613810 - RNA, 19 nt, Homo sapiens
  misc_RNA (1)...(19): siRNA sense strand
uguaucugcuguucaguuu

SEQ ID NO: 613811 - RNA, 19 nt, Homo sapiens
  misc_RNA (1)...(19): siRNA sense strand
gacaacaaguauuaacagu

SEQ ID NO: 613812 - RNA, 19 nt, Homo sapiens
  misc_RNA (1)...(19): siRNA sense strand
guacacacgcaaaguaaau

SEQ ID NO: 613813 - RNA, 19 nt, Homo sapiens
  misc_RNA (1)...(19): siRNA sense strand
aaauggagcucccuuuacu

SEQ ID NO: 613814 - RNA, 19 nt, Homo sapiens
  misc_RNA (1)...(19): siRNA sense strand
agauggacaacaaguauua

SEQ ID NO: 613815 - RNA, 19 nt, Homo sapiens
  misc_RNA (1)...(19): siRNA sense strand
acaccacaguuuaucauug

SEQ ID NO: 613816 - RNA, 19 nt, Homo sapiens
  misc_RNA (1)...(19): siRNA sense strand
caauagacaauggaaauga

SEQ ID NO: 613817 - RNA, 19 nt, Homo sapiens
  misc_RNA (1)...(19): siRNA sense strand
gcaagucaucacaauaguu

SEQ ID NO: 613818 - RNA, 19 nt, Homo sapiens
  misc_RNA (1)...(19): siRNA sense strand
ggagcucccuuuacuacag

SEQ ID NO: 613819 - RNA, 19 nt, Homo sapiens
  misc_RNA (1)...(19): siRNA sense strand
cacaauaguuacagaugga

SEQ ID NO: 613820 - RNA, 19 nt, Homo sapiens
  misc_RNA (1)...(19): siRNA sense strand
ggaccgaacaccauuacau

SEQ ID NO: 613821 - RNA, 19 nt, Homo sapiens
  misc_RNA (1)...(19): siRNA sense strand
aagagacaauguaucgaaa

SEQ ID NO: 613822 - RNA, 19 nt, Homo sapiens
  misc_RNA (1)...(19): siRNA sense strand
gagcucccuuuacuacaga

SEQ ID NO: 613823 - RNA, 19 nt, Homo sapiens
  misc_RNA (1)...(19): siRNA sense strand
cagcaagucaucacaauag

SEQ ID NO: 613824 - RNA, 19 nt, Homo sapiens
  misc_RNA (1)...(19): siRNA sense strand
gcugcaacaccacaguuua

SEQ ID NO: 613825 - RNA, 19 nt, Homo sapiens
  misc_RNA (1)...(19): siRNA sense strand
caacacaaacccagagagu

SEQ ID NO: 613826 - RNA, 19 nt, Homo sapiens
  misc_RNA (1)...(19): siRNA sense strand
ucaaauauggugcugaugu

SEQ ID NO: 613827 - RNA, 19 nt, Homo sapiens
  misc_RNA (1)...(19): siRNA sense strand
gcacaguauggucauuauu

SEQ ID NO: 613828 - RNA, 19 nt, Homo sapiens
  misc_RNA (1)...(19): siRNA sense strand
gcuaagagacaauguaucg

SEQ ID NO: 613829 - RNA, 19 nt, Homo sapiens
  misc_RNA (1)...(19): siRNA sense strand
ccagauggacaacaaguau

SEQ ID NO: 613830 - RNA, 19 nt, Homo sapiens
  misc_RNA (1)...(19): siRNA sense strand
gagcuggugugagcagaga

SEQ ID NO: 613831 - RNA, 19 nt, Homo sapiens
  misc_RNA (1)...(19): siRNA sense strand
ggacaacaaguauuaacag

SEQ ID NO: 613832 - RNA, 19 nt, Homo sapiens
  misc_RNA (1)...(19): siRNA sense strand
gcaacaccacaguuuauca

SEQ ID NO: 613833 - RNA, 19 nt, Homo sapiens
  misc_RNA (1)...(19): siRNA sense strand
gcugaagaaacuguuauaa

SEQ ID NO: 613834 - RNA, 19 nt, Homo sapiens
  misc_RNA (1)...(19): siRNA sense strand
gcagagaugccagaaccaa

SEQ ID NO: 613835 - RNA, 19 nt, Homo sapiens
  misc_RNA (1)...(19): siRNA sense strand
uaacaguaccagcaacaga

SEQ ID NO: 613836 - RNA, 19 nt, Homo sapiens
  misc_RNA (1)...(19): siRNA sense strand
cagcacaguauggucauua

SEQ ID NO: 613837 - RNA, 19 nt, Homo sapiens
  misc_RNA (1)...(19): siRNA sense strand
gaaauuugcacucuauucc

SEQ ID NO: 613838 - RNA, 19 nt, Homo sapiens
  misc_RNA (1)...(19): siRNA sense strand
ugccuuagcugaagcaucu

SEQ ID NO: 613839 - RNA, 19 nt, Homo sapiens
  misc_RNA (1)...(19): siRNA sense strand
gcacgagcaggucaagaug

SEQ ID NO: 613840 - RNA, 19 nt, Homo sapiens
  misc_RNA (1)...(19): siRNA sense strand
ggaauuggucagcccauca

SEQ ID NO: 613841 - RNA, 19 nt, Homo sapiens
  misc_RNA (1)...(19): siRNA sense strand
ggccacagaagaaguaguu

SEQ ID NO: 613842 - RNA, 19 nt, Homo sapiens
  misc_RNA (1)...(19): siRNA sense strand
caucaguauuagcuacauu

SEQ ID NO: 613843 - RNA, 19 nt, Homo sapiens
  misc_RNA (1)...(19): siRNA sense strand
gaagauuuagcagagauau

SEQ ID NO: 613844 - RNA, 19 nt, Homo sapiens
  misc_RNA (1)...(19): siRNA sense strand
caccacaguuuaucauugg

SEQ ID NO: 613845 - RNA, 19 nt, Homo sapiens
  misc_RNA (1)...(19): siRNA sense strand
cagcuaagagacaauguau

SEQ ID NO: 613846 - RNA, 19 nt, Homo sapiens
  misc_RNA (1)...(19): siRNA sense strand
caugccagauggacaacaa

SEQ ID NO: 613847 - RNA, 19 nt, Homo sapiens
  misc_RNA (1)...(19): siRNA sense strand
gaaacucuucuacaucagu

SEQ ID NO: 613848 - RNA, 19 nt, Homo sapiens
  misc_RNA (1)...(19): siRNA sense strand
caagaggugguggaacuuu

SEQ ID NO: 613849 - RNA, 19 nt, Homo sapiens
  misc_RNA (1)...(19): siRNA sense strand
cagacuggcugggaacuuc

SEQ ID NO: 613850 - RNA, 19 nt, Homo sapiens
  misc_RNA (1)...(19): siRNA sense strand
gauauuacagauugcuaug

SEQ ID NO: 613851 - RNA, 19 nt, Homo sapiens
  misc_RNA (1)...(19): siRNA sense strand
gcagcacaguauggucauu

SEQ ID NO: 613852 - RNA, 19 nt, Homo sapiens
  misc_RNA (1)...(19): siRNA sense strand
ucagcaagucaucacaaua

SEQ ID NO: 613853 - RNA, 19 nt, Homo sapiens
  misc_RNA (1)...(19): siRNA sense strand
caaauggagcucccuuuac

SEQ ID NO: 613854 - RNA, 19 nt, Homo sapiens
  misc_RNA (1)...(19): siRNA sense strand
uucagaaacuccaguagug

SEQ ID NO: 613855 - RNA, 19 nt, Homo sapiens
  misc_RNA (1)...(19): siRNA sense strand
cagaacacaaucaucaaga

SEQ ID NO: 613856 - RNA, 19 nt, Homo sapiens
  misc_RNA (1)...(19): siRNA sense strand
ccagcuaagagacaaugua

SEQ ID NO: 613857 - RNA, 19 nt, Homo sapiens
  misc_RNA (1)...(19): siRNA sense strand
uuggaaauuugcacucuau

SEQ ID NO: 613858 - RNA, 19 nt, Homo sapiens
  misc_RNA (1)...(19): siRNA sense strand
caacaccacaguuuaucau

SEQ ID NO: 613859 - RNA, 19 nt, Homo sapiens
  misc_RNA (1)...(19): siRNA sense strand
gagauauuacagauugcua

SEQ ID NO: 613860 - RNA, 19 nt, Homo sapiens
  misc_RNA (1)...(19): siRNA sense strand
gguggaacuuuuaaucaaa

SEQ ID NO: 613861 - RNA, 19 nt, Homo sapiens
  misc_RNA (1)...(19): siRNA sense strand
gggaacuucuccacuucau

SEQ ID NO: 613862 - RNA, 19 nt, Homo sapiens
  misc_RNA (1)...(19): siRNA sense strand
gauggacaacaaguauuaa

SEQ ID NO: 613863 - RNA, 19 nt, Homo sapiens
  misc_RNA (1)...(19): siRNA sense strand
uaucugcuguucaguuugg

SEQ ID NO: 613864 - RNA, 19 nt, Homo sapiens
  misc_RNA (1)...(19): siRNA sense strand
cagagaguccugacacugu

SEQ ID NO: 613865 - RNA, 19 nt, Homo sapiens
  misc_RNA (1)...(19): siRNA sense strand
uauuacagauugcuaugca

SEQ ID NO: 613866 - RNA, 19 nt, Homo sapiens
  misc_RNA (1)...(19): siRNA sense strand
acacacgcaaaguaaauuu

SEQ ID NO: 613867 - RNA, 19 nt, Homo sapiens
  misc_RNA (1)...(19): siRNA sense strand
gaaacuguuauaagugaag

SEQ ID NO: 613868 - RNA, 19 nt, Homo sapiens
  misc_RNA (1)...(19): siRNA sense strand
ccgaacaccauuacauaug

SEQ ID NO: 613869 - RNA, 19 nt, Homo sapiens
  misc_RNA (1)...(19): siRNA sense strand
gucagcaagucaucacaau

SEQ ID NO: 613870 - RNA, 19 nt, Homo sapiens
  misc_RNA (1)...(19): siRNA sense strand
cacaguauggucauuauuc

SEQ ID NO: 613871 - RNA, 19 nt, Homo sapiens
  misc_RNA (1)...(19): siRNA sense strand
uuuggaaacucuucuacau

SEQ ID NO: 613872 - RNA, 19 nt, Homo sapiens
  misc_RNA (1)...(19): siRNA sense strand
gacaauggaaaugaagauu

SEQ ID NO: 613873 - RNA, 19 nt, Homo sapiens
  misc_RNA (1)...(19): siRNA sense strand
gaaccaaaucaacacaaac

SEQ ID NO: 613874 - RNA, 19 nt, Homo sapiens
  misc_RNA (1)...(19): siRNA sense strand
ucaucuagcagcacaguau

SEQ ID NO: 613875 - RNA, 19 nt, Homo sapiens
  misc_RNA (1)...(19): siRNA sense strand
gcagagauauuacagauug

SEQ ID NO: 613876 - RNA, 19 nt, Homo sapiens
  misc_RNA (1)...(19): siRNA sense strand
gguggaaucugcagaaaua

SEQ ID NO: 613877 - RNA, 19 nt, Homo sapiens
  misc_RNA (1)...(19): siRNA sense strand
caacagacauugcugaaga

SEQ ID NO: 613878 - RNA, 19 nt, Homo sapiens
  misc_RNA (1)...(19): siRNA sense strand
gagacaauguaucgaaaua

SEQ ID NO: 613879 - RNA, 19 nt, Homo sapiens
  misc_RNA (1)...(19): siRNA sense strand
caaaggacauguuaaagau

SEQ ID NO: 613880 - RNA, 19 nt, Homo sapiens
  misc_RNA (1)...(19): siRNA sense strand
gcaaauggagcucccuuua

SEQ ID NO: 613881 - RNA, 19 nt, Homo sapiens
  misc_RNA (1)...(19): siRNA sense strand
caaauauggugcugaugua

SEQ ID NO: 613882 - RNA, 19 nt, Homo sapiens
  misc_RNA (1)...(19): siRNA sense strand
gcaaaggacauguuaaaga

SEQ ID NO: 613883 - RNA, 19 nt, Homo sapiens
  misc_RNA (1)...(19): siRNA sense strand
caagucaucacaauaguua

SEQ ID NO: 613884 - RNA, 19 nt, Homo sapiens
  misc_RNA (1)...(19): siRNA sense strand
caacaaguauuaacaguac

SEQ ID NO: 613885 - RNA, 19 nt, Homo sapiens
  misc_RNA (1)...(19): siRNA sense strand
gaugacagcucuccauugg

SEQ ID NO: 613886 - RNA, 19 nt, Homo sapiens
  misc_RNA (1)...(19): siRNA sense strand
gacaauacaugcugcaaca

SEQ ID NO: 613887 - RNA, 19 nt, Homo sapiens
  misc_RNA (1)...(19): siRNA sense strand
gaugaugaaguucguauuu

SEQ ID NO: 613888 - RNA, 19 nt, Homo sapiens
  misc_RNA (1)...(19): siRNA sense strand
gaagaaacuguuauaagug

SEQ ID NO: 613889 - RNA, 19 nt, Homo sapiens
  misc_RNA (1)...(19): siRNA sense strand
gaccgaacaccauuacaua

SEQ ID NO: 613890 - RNA, 19 nt, Homo sapiens
  misc_RNA (1)...(19): siRNA sense strand
ccacagaacacaaucauca

SEQ ID NO: 613891 - RNA, 19 nt, Homo sapiens
  misc_RNA (1)...(19): siRNA sense strand
gcauggugcugaugucaau

SEQ ID NO: 613892 - RNA, 19 nt, Homo sapiens
  misc_RNA (1)...(19): siRNA sense strand
gcugggaacuucuccacuu

SEQ ID NO: 613893 - RNA, 19 nt, Homo sapiens
  misc_RNA (1)...(19): siRNA sense strand
gauguacacacgcaaagua

SEQ ID NO: 613894 - RNA, 19 nt, Homo sapiens
  misc_RNA (1)...(19): siRNA sense strand
gugcugaugucaaugcaaa

SEQ ID NO: 613895 - RNA, 19 nt, Homo sapiens
  misc_RNA (1)...(19): siRNA sense strand
uagcagagauauuacagau

SEQ ID NO: 613896 - RNA, 19 nt, Homo sapiens
  misc_RNA (1)...(19): siRNA sense strand
uggaaacucuucuacauca

SEQ ID NO: 613897 - RNA, 19 nt, Homo sapiens
  misc_RNA (1)...(19): siRNA sense strand
ggaaucugcagaaauagaa

SEQ ID NO: 613898 - RNA, 19 nt, Homo sapiens
  misc_RNA (1)...(19): siRNA sense strand
gaagaaccaccagcuaaga

SEQ ID NO: 613899 - RNA, 19 nt, Homo sapiens
  misc_RNA (1)...(19): siRNA sense strand
gaacuucuccacuucaucu

SEQ ID NO: 613900 - RNA, 19 nt, Homo sapiens
  misc_RNA (1)...(19): siRNA sense strand
agacauugcugaagaaacu

SEQ ID NO: 613901 - RNA, 19 nt, Homo sapiens
  misc_RNA (1)...(19): siRNA sense strand
aaggacauguuaaagauga

SEQ ID NO: 613902 - RNA, 19 nt, Homo sapiens
  misc_RNA (1)...(19): siRNA sense strand
gugaagaaccaccagcuaa

SEQ ID NO: 613903 - RNA, 19 nt, Homo sapiens
  misc_RNA (1)...(19): siRNA sense strand
gagcaggucaagaugauga

SEQ ID NO: 613904 - RNA, 19 nt, Homo sapiens
  misc_RNA (1)...(19): siRNA sense strand
ggaaauuugcacucuauuc

SEQ ID NO: 613905 - RNA, 19 nt, Homo sapiens
  misc_RNA (1)...(19): siRNA sense strand
aaacucuucuacaucagua

SEQ ID NO: 613906 - RNA, 19 nt, Homo sapiens
  misc_RNA (1)...(19): siRNA sense strand
caaugcaaaggacauguua

SEQ ID NO: 613907 - RNA, 19 nt, Homo sapiens
  misc_RNA (1)...(19): siRNA sense strand
uaagagacaauguaucgaa

SEQ ID NO: 613908 - RNA, 19 nt, Homo sapiens
  misc_RNA (1)...(19): siRNA sense strand
ggucagcccaucauuguga

SEQ ID NO: 613909 - RNA, 19 nt, Homo sapiens
  misc_RNA (1)...(19): siRNA sense strand
agaaccaaaucaacacaaa

SEQ ID NO: 613910 - RNA, 19 nt, Homo sapiens
  misc_RNA (1)...(19): siRNA sense strand
uguaucugcuguucaguuu

SEQ ID NO: 613911 - RNA, 19 nt, Homo sapiens
  misc_RNA (1)...(19): siRNA sense strand
gacaacaaguauuaacagu

SEQ ID NO: 613912 - RNA, 19 nt, Homo sapiens
  misc_RNA (1)...(19): siRNA sense strand
guacacacgcaaaguaaau

SEQ ID NO: 613913 - RNA, 19 nt, Homo sapiens
  misc_RNA (1)...(19): siRNA sense strand
aaauggagcucccuuuacu

SEQ ID NO: 613914 - RNA, 19 nt, Homo sapiens
  misc_RNA (1)...(19): siRNA sense strand
agauggacaacaaguauua

SEQ ID NO: 613915 - RNA, 19 nt, Homo sapiens
  misc_RNA (1)...(19): siRNA sense strand
acaccacaguuuaucauug

SEQ ID NO: 613916 - RNA, 19 nt, Homo sapiens
  misc_RNA (1)...(19): siRNA sense strand
caauagacaauggaaauga

SEQ ID NO: 613917 - RNA, 19 nt, Homo sapiens
  misc_RNA (1)...(19): siRNA sense strand
gcaagucaucacaauaguu

SEQ ID NO: 613918 - RNA, 19 nt, Homo sapiens
  misc_RNA (1)...(19): siRNA sense strand
ggagcucccuuuacuacag

SEQ ID NO: 613919 - RNA, 19 nt, Homo sapiens
  misc_RNA (1)...(19): siRNA sense strand
cacaauaguuacagaugga

SEQ ID NO: 613920 - RNA, 19 nt, Homo sapiens
  misc_RNA (1)...(19): siRNA sense strand
ggaccgaacaccauuacau

SEQ ID NO: 613921 - RNA, 19 nt, Homo sapiens
  misc_RNA (1)...(19): siRNA sense strand
aagagacaauguaucgaaa

SEQ ID NO: 613922 - RNA, 19 nt, Homo sapiens
  misc_RNA (1)...(19): siRNA sense strand
gagcucccuuuacuacaga

SEQ ID NO: 613923 - RNA, 19 nt, Homo sapiens
  misc_RNA (1)...(19): siRNA sense strand
cagcaagucaucacaauag

SEQ ID NO: 613924 - RNA, 19 nt, Homo sapiens
  misc_RNA (1)...(19): siRNA sense strand
gcugcaacaccacaguuua

SEQ ID NO: 613925 - RNA, 19 nt, Homo sapiens
  misc_RNA (1)...(19): siRNA sense strand
caacacaaacccagagagu

SEQ ID NO: 613926 - RNA, 19 nt, Homo sapiens
  misc_RNA (1)...(19): siRNA sense strand
ucaaauauggugcugaugu

SEQ ID NO: 613927 - RNA, 19 nt, Homo sapiens
  misc_RNA (1)...(19): siRNA sense strand
gcacaguauggucauuauu

SEQ ID NO: 613928 - RNA, 19 nt, Homo sapiens
  misc_RNA (1)...(19): siRNA sense strand
gcuaagagacaauguaucg

SEQ ID NO: 613929 - RNA, 19 nt, Homo sapiens
  misc_RNA (1)...(19): siRNA sense strand
ccagauggacaacaaguau

SEQ ID NO: 613930 - RNA, 19 nt, Homo sapiens
  misc_RNA (1)...(19): siRNA sense strand
gagcuggugugagcagaga

SEQ ID NO: 613931 - RNA, 19 nt, Homo sapiens
  misc_RNA (1)...(19): siRNA sense strand
ggacaacaaguauuaacag

SEQ ID NO: 613932 - RNA, 19 nt, Homo sapiens
  misc_RNA (1)...(19): siRNA sense strand
gcaacaccacaguuuauca

SEQ ID NO: 613933 - RNA, 19 nt, Homo sapiens
  misc_RNA (1)...(19): siRNA sense strand
gcugaagaaacuguuauaa

SEQ ID NO: 613934 - RNA, 19 nt, Homo sapiens
  misc_RNA (1)...(19): siRNA sense strand
gcagagaugccagaaccaa

SEQ ID NO: 613935 - RNA, 19 nt, Homo sapiens
  misc_RNA (1)...(19): siRNA sense strand
uaacaguaccagcaacaga

SEQ ID NO: 613936 - RNA, 19 nt, Homo sapiens
  misc_RNA (1)...(19): siRNA sense strand
cagcacaguauggucauua

SEQ ID NO: 613937 - RNA, 19 nt, Homo sapiens
  misc_RNA (1)...(19): siRNA sense strand
gaaauuugcacucuauucc

SEQ ID NO: 613938 - RNA, 19 nt, Homo sapiens
  misc_RNA (1)...(19): siRNA sense strand
ugccuuagcugaagcaucu

SEQ ID NO: 613939 - RNA, 19 nt, Homo sapiens
  misc_RNA (1)...(19): siRNA sense strand
gcacgagcaggucaagaug

SEQ ID NO: 613940 - RNA, 19 nt, Homo sapiens
  misc_RNA (1)...(19): siRNA sense strand
ggaauuggucagcccauca

SEQ ID NO: 613941 - RNA, 19 nt, Homo sapiens
  misc_RNA (1)...(19): siRNA sense strand
ggccacagaagaaguaguu

SEQ ID NO: 613942 - RNA, 19 nt, Homo sapiens
  misc_RNA (1)...(19): siRNA sense strand
caucaguauuagcuacauu

SEQ ID NO: 613943 - RNA, 19 nt, Homo sapiens
  misc_RNA (1)...(19): siRNA sense strand
gaagauuuagcagagauau

SEQ ID NO: 613944 - RNA, 19 nt, Homo sapiens
  misc_RNA (1)...(19): siRNA sense strand
caccacaguuuaucauugg

SEQ ID NO: 613945 - RNA, 19 nt, Homo sapiens
  misc_RNA (1)...(19): siRNA sense strand
cagcuaagagacaauguau

SEQ ID NO: 613946 - RNA, 19 nt, Homo sapiens
  misc_RNA (1)...(19): siRNA sense strand
caugccagauggacaacaa

SEQ ID NO: 613947 - RNA, 19 nt, Homo sapiens
  misc_RNA (1)...(19): siRNA sense strand
gaaacucuucuacaucagu

SEQ ID NO: 613948 - RNA, 19 nt, Homo sapiens
  misc_RNA (1)...(19): siRNA sense strand
caagaggugguggaacuuu

SEQ ID NO: 613949 - RNA, 19 nt, Homo sapiens
  misc_RNA (1)...(19): siRNA sense strand
cagacuggcugggaacuuc

SEQ ID NO: 613950 - RNA, 19 nt, Homo sapiens
  misc_RNA (1)...(19): siRNA sense strand
gauauuacagauugcuaug

SEQ ID NO: 613951 - RNA, 19 nt, Homo sapiens
  misc_RNA (1)...(19): siRNA sense strand
gcagcacaguauggucauu

SEQ ID NO: 613952 - RNA, 19 nt, Homo sapiens
  misc_RNA (1)...(19): siRNA sense strand
ucagcaagucaucacaaua

SEQ ID NO: 613953 - RNA, 19 nt, Homo sapiens
  misc_RNA (1)...(19): siRNA sense strand
caaauggagcucccuuuac

SEQ ID NO: 613954 - RNA, 19 nt, Homo sapiens
  misc_RNA (1)...(19): siRNA sense strand
uucagaaacuccaguagug

SEQ ID NO: 613955 - RNA, 19 nt, Homo sapiens
  misc_RNA (1)...(19): siRNA sense strand
cagaacacaaucaucaaga

SEQ ID NO: 613956 - RNA, 19 nt, Homo sapiens
  misc_RNA (1)...(19): siRNA sense strand
ccagcuaagagacaaugua

SEQ ID NO: 613957 - RNA, 19 nt, Homo sapiens
  misc_RNA (1)...(19): siRNA sense strand
uuggaaauuugcacucuau

SEQ ID NO: 613958 - RNA, 19 nt, Homo sapiens
  misc_RNA (1)...(19): siRNA sense strand
caacaccacaguuuaucau

SEQ ID NO: 613959 - RNA, 19 nt, Homo sapiens
  misc_RNA (1)...(19): siRNA sense strand
gagauauuacagauugcua

SEQ ID NO: 613960 - RNA, 19 nt, Homo sapiens
  misc_RNA (1)...(19): siRNA sense strand
gguggaacuuuuaaucaaa

SEQ ID NO: 613961 - RNA, 19 nt, Homo sapiens
  misc_RNA (1)...(19): siRNA sense strand
gggaacuucuccacuucau

SEQ ID NO: 613962 - RNA, 19 nt, Homo sapiens
  misc_RNA (1)...(19): siRNA sense strand
gauggacaacaaguauuaa

SEQ ID NO: 613963 - RNA, 19 nt, Homo sapiens
  misc_RNA (1)...(19): siRNA sense strand
uaucugcuguucaguuugg

SEQ ID NO: 613964 - RNA, 19 nt, Homo sapiens
  misc_RNA (1)...(19): siRNA sense strand
cagagaguccugacacugu

SEQ ID NO: 613965 - RNA, 19 nt, Homo sapiens
  misc_RNA (1)...(19): siRNA sense strand
uauuacagauugcuaugca

SEQ ID NO: 613966 - RNA, 19 nt, Homo sapiens
  misc_RNA (1)...(19): siRNA sense strand
acacacgcaaaguaaauuu

SEQ ID NO: 613967 - RNA, 19 nt, Homo sapiens
  misc_RNA (1)...(19): siRNA sense strand
gaaacuguuauaagugaag

SEQ ID NO: 613968 - RNA, 19 nt, Homo sapiens
  misc_RNA (1)...(19): siRNA sense strand
ccgaacaccauuacauaug

SEQ ID NO: 613969 - RNA, 19 nt, Homo sapiens
  misc_RNA (1)...(19): siRNA sense strand
gucagcaagucaucacaau

SEQ ID NO: 613970 - RNA, 19 nt, Homo sapiens
  misc_RNA (1)...(19): siRNA sense strand
cacaguauggucauuauuc

SEQ ID NO: 613971 - RNA, 19 nt, Homo sapiens
  misc_RNA (1)...(19): siRNA sense strand
uuuggaaacucuucuacau

SEQ ID NO: 613972 - RNA, 19 nt, Homo sapiens
  misc_RNA (1)...(19): siRNA sense strand
gacaauggaaaugaagauu

SEQ ID NO: 613973 - RNA, 19 nt, Homo sapiens
  misc_RNA (1)...(19): siRNA sense strand
gaaccaaaucaacacaaac

SEQ ID NO: 613974 - RNA, 19 nt, Homo sapiens
  misc_RNA (1)...(19): siRNA sense strand
ucaucuagcagcacaguau

SEQ ID NO: 613975 - RNA, 19 nt, Homo sapiens
  misc_RNA (1)...(19): siRNA sense strand
gcagagauauuacagauug

SEQ ID NO: 613976 - RNA, 19 nt, Homo sapiens
  misc_RNA (1)...(19): siRNA sense strand
gguggaaucugcagaaaua

SEQ ID NO: 613977 - RNA, 19 nt, Homo sapiens
  misc_RNA (1)...(19): siRNA sense strand
caacagacauugcugaaga

SEQ ID NO: 613978 - RNA, 19 nt, Homo sapiens
  misc_RNA (1)...(19): siRNA sense strand
gagacaauguaucgaaaua

SEQ ID NO: 613979 - RNA, 19 nt, Homo sapiens
  misc_RNA (1)...(19): siRNA sense strand
caaaggacauguuaaagau

SEQ ID NO: 613980 - RNA, 19 nt, Homo sapiens
  misc_RNA (1)...(19): siRNA sense strand
gcaaauggagcucccuuua

SEQ ID NO: 613981 - RNA, 19 nt, Homo sapiens
  misc_RNA (1)...(19): siRNA sense strand
caaauauggugcugaugua

SEQ ID NO: 613982 - RNA, 19 nt, Homo sapiens
  misc_RNA (1)...(19): siRNA sense strand
gcaaaggacauguuaaaga

SEQ ID NO: 613983 - RNA, 19 nt, Homo sapiens
  misc_RNA (1)...(19): siRNA sense strand
caagucaucacaauaguua

SEQ ID NO: 613984 - RNA, 19 nt, Homo sapiens
  misc_RNA (1)...(19): siRNA sense strand
caacaaguauuaacaguac

SEQ ID NO: 613985 - RNA, 19 nt, Homo sapiens
  misc_RNA (1)...(19): siRNA sense strand
gaugacagcucuccauugg

SEQ ID NO: 613986 - RNA, 19 nt, Homo sapiens
  misc_RNA (1)...(19): siRNA sense strand
gacaauacaugcugcaaca

SEQ ID NO: 613987 - RNA, 19 nt, Homo sapiens
  misc_RNA (1)...(19): siRNA sense strand
gaugaugaaguucguauuu

SEQ ID NO: 613988 - RNA, 19 nt, Homo sapiens
  misc_RNA (1)...(19): siRNA sense strand
gaagaaacuguuauaagug

SEQ ID NO: 613989 - RNA, 19 nt, Homo sapiens
  misc_RNA (1)...(19): siRNA sense strand
gaccgaacaccauuacaua

SEQ ID NO: 613990 - RNA, 19 nt, Homo sapiens
  misc_RNA (1)...(19): siRNA sense strand
ccacagaacacaaucauca

SEQ ID NO: 613991 - RNA, 19 nt, Homo sapiens
  misc_RNA (1)...(19): siRNA sense strand
gcauggugcugaugucaau

SEQ ID NO: 613992 - RNA, 19 nt, Homo sapiens
  misc_RNA (1)...(19): siRNA sense strand
gcugggaacuucuccacuu

SEQ ID NO: 613993 - RNA, 19 nt, Homo sapiens
  misc_RNA (1)...(19): siRNA sense strand
gauguacacacgcaaagua

SEQ ID NO: 613994 - RNA, 19 nt, Homo sapiens
  misc_RNA (1)...(19): siRNA sense strand
gugcugaugucaaugcaaa

SEQ ID NO: 613995 - RNA, 19 nt, Homo sapiens
  misc_RNA (1)...(19): siRNA sense strand
uagcagagauauuacagau

SEQ ID NO: 613996 - RNA, 19 nt, Homo sapiens
  misc_RNA (1)...(19): siRNA sense strand
uggaaacucuucuacauca

SEQ ID NO: 613997 - RNA, 19 nt, Homo sapiens
  misc_RNA (1)...(19): siRNA sense strand
ggaaucugcagaaauagaa

SEQ ID NO: 613998 - RNA, 19 nt, Homo sapiens
  misc_RNA (1)...(19): siRNA sense strand
gaagaaccaccagcuaaga

SEQ ID NO: 613999 - RNA, 19 nt, Homo sapiens
  misc_RNA (1)...(19): siRNA sense strand
gaacuucuccacuucaucu

SEQ ID NO: 614000 - RNA, 19 nt, Homo sapiens
  misc_RNA (1)...(19): siRNA sense strand
agacauugcugaagaaacu

SEQ ID NO: 614001 - RNA, 19 nt, Homo sapiens
  misc_RNA (1)...(19): siRNA sense strand
aaggacauguuaaagauga

SEQ ID NO: 614002 - RNA, 19 nt, Homo sapiens
  misc_RNA (1)...(19): siRNA sense strand
gugaagaaccaccagcuaa

SEQ ID NO: 614003 - RNA, 19 nt, Homo sapiens
  misc_RNA (1)...(19): siRNA sense strand
gagcaggucaagaugauga

SEQ ID NO: 614004 - RNA, 19 nt, Homo sapiens
  misc_RNA (1)...(19): siRNA sense strand
ggaaauuugcacucuauuc

SEQ ID NO: 614005 - RNA, 19 nt, Homo sapiens
  misc_RNA (1)...(19): siRNA sense strand
aaacucuucuacaucagua

SEQ ID NO: 614006 - RNA, 19 nt, Homo sapiens
  misc_RNA (1)...(19): siRNA sense strand
caaugcaaaggacauguua

SEQ ID NO: 614007 - RNA, 19 nt, Homo sapiens
  misc_RNA (1)...(19): siRNA sense strand
uaagagacaauguaucgaa

SEQ ID NO: 614008 - RNA, 19 nt, Homo sapiens
  misc_RNA (1)...(19): siRNA sense strand
ggucagcccaucauuguga

SEQ ID NO: 614009 - RNA, 19 nt, Homo sapiens
  misc_RNA (1)...(19): siRNA sense strand
agaaccaaaucaacacaaa

SEQ ID NO: 614010 - RNA, 19 nt, Homo sapiens
  misc_RNA (1)...(19): siRNA sense strand
uguaucugcuguucaguuu

SEQ ID NO: 614011 - RNA, 19 nt, Homo sapiens
  misc_RNA (1)...(19): siRNA sense strand
gacaacaaguauuaacagu

SEQ ID NO: 614012 - RNA, 19 nt, Homo sapiens
  misc_RNA (1)...(19): siRNA sense strand
guacacacgcaaaguaaau

SEQ ID NO: 614013 - RNA, 19 nt, Homo sapiens
  misc_RNA (1)...(19): siRNA sense strand
aaauggagcucccuuuacu

SEQ ID NO: 614014 - RNA, 19 nt, Homo sapiens
  misc_RNA (1)...(19): siRNA sense strand
agauggacaacaaguauua

SEQ ID NO: 614015 - RNA, 19 nt, Homo sapiens
  misc_RNA (1)...(19): siRNA sense strand
acaccacaguuuaucauug

SEQ ID NO: 614016 - RNA, 19 nt, Homo sapiens
  misc_RNA (1)...(19): siRNA sense strand
caauagacaauggaaauga

SEQ ID NO: 614017 - RNA, 19 nt, Homo sapiens
  misc_RNA (1)...(19): siRNA sense strand
gcaagucaucacaauaguu

SEQ ID NO: 614018 - RNA, 19 nt, Homo sapiens
  misc_RNA (1)...(19): siRNA sense strand
ggagcucccuuuacuacag

SEQ ID NO: 614019 - RNA, 19 nt, Homo sapiens
  misc_RNA (1)...(19): siRNA sense strand
cacaauaguuacagaugga

SEQ ID NO: 614020 - RNA, 19 nt, Homo sapiens
  misc_RNA (1)...(19): siRNA sense strand
ggaccgaacaccauuacau

SEQ ID NO: 614021 - RNA, 19 nt, Homo sapiens
  misc_RNA (1)...(19): siRNA sense strand
aagagacaauguaucgaaa

SEQ ID NO: 614022 - RNA, 19 nt, Homo sapiens
  misc_RNA (1)...(19): siRNA sense strand
gagcucccuuuacuacaga

SEQ ID NO: 614023 - RNA, 19 nt, Homo sapiens
  misc_RNA (1)...(19): siRNA sense strand
cagcaagucaucacaauag

SEQ ID NO: 614024 - RNA, 19 nt, Homo sapiens
  misc_RNA (1)...(19): siRNA sense strand
gcugcaacaccacaguuua

SEQ ID NO: 614025 - RNA, 19 nt, Homo sapiens
  misc_RNA (1)...(19): siRNA sense strand
caacacaaacccagagagu

SEQ ID NO: 614026 - RNA, 19 nt, Homo sapiens
  misc_RNA (1)...(19): siRNA sense strand
ucaaauauggugcugaugu

SEQ ID NO: 614027 - RNA, 19 nt, Homo sapiens
  misc_RNA (1)...(19): siRNA sense strand
gcacaguauggucauuauu

SEQ ID NO: 614028 - RNA, 19 nt, Homo sapiens
  misc_RNA (1)...(19): siRNA sense strand
gcuaagagacaauguaucg

SEQ ID NO: 614029 - RNA, 19 nt, Homo sapiens
  misc_RNA (1)...(19): siRNA sense strand
ccagauggacaacaaguau

SEQ ID NO: 614030 - RNA, 19 nt, Homo sapiens
  misc_RNA (1)...(19): siRNA sense strand
gagcuggugugagcagaga

SEQ ID NO: 614031 - RNA, 19 nt, Homo sapiens
  misc_RNA (1)...(19): siRNA sense strand
ggacaacaaguauuaacag

SEQ ID NO: 614032 - RNA, 19 nt, Homo sapiens
  misc_RNA (1)...(19): siRNA sense strand
gcaacaccacaguuuauca

SEQ ID NO: 614033 - RNA, 19 nt, Homo sapiens
  misc_RNA (1)...(19): siRNA sense strand
gcugaagaaacuguuauaa

SEQ ID NO: 614034 - RNA, 19 nt, Homo sapiens
  misc_RNA (1)...(19): siRNA sense strand
gcagagaugccagaaccaa

SEQ ID NO: 614035 - RNA, 19 nt, Homo sapiens
  misc_RNA (1)...(19): siRNA sense strand
uaacaguaccagcaacaga

SEQ ID NO: 614036 - RNA, 19 nt, Homo sapiens
  misc_RNA (1)...(19): siRNA sense strand
cagcacaguauggucauua

SEQ ID NO: 614037 - RNA, 19 nt, Homo sapiens
  misc_RNA (1)...(19): siRNA sense strand
gaaauuugcacucuauucc

SEQ ID NO: 614038 - RNA, 19 nt, Homo sapiens
  misc_RNA (1)...(19): siRNA sense strand
ugccuuagcugaagcaucu

SEQ ID NO: 614039 - RNA, 19 nt, Homo sapiens
  misc_RNA (1)...(19): siRNA sense strand
gcacgagcaggucaagaug

SEQ ID NO: 614040 - RNA, 19 nt, Homo sapiens
  misc_RNA (1)...(19): siRNA sense strand
ggaauuggucagcccauca

SEQ ID NO: 614041 - RNA, 19 nt, Homo sapiens
  misc_RNA (1)...(19): siRNA sense strand
ggccacagaagaaguaguu

SEQ ID NO: 614042 - RNA, 19 nt, Homo sapiens
  misc_RNA (1)...(19): siRNA sense strand
caucaguauuagcuacauu

SEQ ID NO: 614043 - RNA, 19 nt, Homo sapiens
  misc_RNA (1)...(19): siRNA sense strand
gaagauuuagcagagauau

SEQ ID NO: 614044 - RNA, 19 nt, Homo sapiens
  misc_RNA (1)...(19): siRNA sense strand
caccacaguuuaucauugg

SEQ ID NO: 614045 - RNA, 19 nt, Homo sapiens
  misc_RNA (1)...(19): siRNA sense strand
cagcuaagagacaauguau

SEQ ID NO: 614046 - RNA, 19 nt, Homo sapiens
  misc_RNA (1)...(19): siRNA sense strand
caugccagauggacaacaa

SEQ ID NO: 614047 - RNA, 19 nt, Homo sapiens
  misc_RNA (1)...(19): siRNA sense strand
gaaacucuucuacaucagu

SEQ ID NO: 614048 - RNA, 19 nt, Homo sapiens
  misc_RNA (1)...(19): siRNA sense strand
caagaggugguggaacuuu

SEQ ID NO: 614049 - RNA, 19 nt, Homo sapiens
  misc_RNA (1)...(19): siRNA sense strand
cagacuggcugggaacuuc

SEQ ID NO: 614050 - RNA, 19 nt, Homo sapiens
  misc_RNA (1)...(19): siRNA sense strand
gauauuacagauugcuaug

SEQ ID NO: 614051 - RNA, 19 nt, Homo sapiens
  misc_RNA (1)...(19): siRNA sense strand
gcagcacaguauggucauu

SEQ ID NO: 614052 - RNA, 19 nt, Homo sapiens
  misc_RNA (1)...(19): siRNA sense strand
ucagcaagucaucacaaua

SEQ ID NO: 614053 - RNA, 19 nt, Homo sapiens
  misc_RNA (1)...(19): siRNA sense strand
caaauggagcucccuuuac

SEQ ID NO: 614054 - RNA, 19 nt, Homo sapiens
  misc_RNA (1)...(19): siRNA sense strand
uucagaaacuccaguagug

SEQ ID NO: 614055 - RNA, 19 nt, Homo sapiens
  misc_RNA (1)...(19): siRNA sense strand
cagaacacaaucaucaaga

SEQ ID NO: 614056 - RNA, 19 nt, Homo sapiens
  misc_RNA (1)...(19): siRNA sense strand
ccagcuaagagacaaugua

SEQ ID NO: 614057 - RNA, 19 nt, Homo sapiens
  misc_RNA (1)...(19): siRNA sense strand
uuggaaauuugcacucuau

SEQ ID NO: 614058 - RNA, 19 nt, Homo sapiens
  misc_RNA (1)...(19): siRNA sense strand
caacaccacaguuuaucau

SEQ ID NO: 614059 - RNA, 19 nt, Homo sapiens
  misc_RNA (1)...(19): siRNA sense strand
gagauauuacagauugcua

SEQ ID NO: 614060 - RNA, 19 nt, Homo sapiens
  misc_RNA (1)...(19): siRNA sense strand
gguggaacuuuuaaucaaa

SEQ ID NO: 614061 - RNA, 19 nt, Homo sapiens
  misc_RNA (1)...(19): siRNA sense strand
gggaacuucuccacuucau

SEQ ID NO: 614062 - RNA, 19 nt, Homo sapiens
  misc_RNA (1)...(19): siRNA sense strand
gauggacaacaaguauuaa

SEQ ID NO: 614063 - RNA, 19 nt, Homo sapiens
  misc_RNA (1)...(19): siRNA sense strand
uaucugcuguucaguuugg

SEQ ID NO: 614064 - RNA, 19 nt, Homo sapiens
  misc_RNA (1)...(19): siRNA sense strand
cagagaguccugacacugu

SEQ ID NO: 614065 - RNA, 19 nt, Homo sapiens
  misc_RNA (1)...(19): siRNA sense strand
uauuacagauugcuaugca

SEQ ID NO: 614066 - RNA, 19 nt, Homo sapiens
  misc_RNA (1)...(19): siRNA sense strand
acacacgcaaaguaaauuu

SEQ ID NO: 614067 - RNA, 19 nt, Homo sapiens
  misc_RNA (1)...(19): siRNA sense strand
gaaacuguuauaagugaag

SEQ ID NO: 614068 - RNA, 19 nt, Homo sapiens
  misc_RNA (1)...(19): siRNA sense strand
ccgaacaccauuacauaug

SEQ ID NO: 614069 - RNA, 19 nt, Homo sapiens
  misc_RNA (1)...(19): siRNA sense strand
gucagcaagucaucacaau

SEQ ID NO: 614070 - RNA, 19 nt, Homo sapiens
  misc_RNA (1)...(19): siRNA sense strand
cacaguauggucauuauuc

SEQ ID NO: 614071 - RNA, 19 nt, Homo sapiens
  misc_RNA (1)...(19): siRNA sense strand
uuuggaaacucuucuacau

SEQ ID NO: 614072 - RNA, 19 nt, Homo sapiens
  misc_RNA (1)...(19): siRNA sense strand
gacaauggaaaugaagauu

SEQ ID NO: 614073 - RNA, 19 nt, Homo sapiens
  misc_RNA (1)...(19): siRNA sense strand
gaaccaaaucaacacaaac

SEQ ID NO: 614074 - RNA, 19 nt, Homo sapiens
  misc_RNA (1)...(19): siRNA sense strand
ucaucuagcagcacaguau

SEQ ID NO: 614075 - RNA, 19 nt, Homo sapiens
  misc_RNA (1)...(19): siRNA sense strand
gaacaagauucgagaacaa

SEQ ID NO: 614076 - RNA, 19 nt, Homo sapiens
  misc_RNA (1)...(19): siRNA sense strand
gaacaaaaccgacaagaug

SEQ ID NO: 614077 - RNA, 19 nt, Homo sapiens
  misc_RNA (1)...(19): siRNA sense strand
ggaacaagauucgagaaca

SEQ ID NO: 614078 - RNA, 19 nt, Homo sapiens
  misc_RNA (1)...(19): siRNA sense strand
gagaugaggaacaagauuc

SEQ ID NO: 614079 - RNA, 19 nt, Homo sapiens
  misc_RNA (1)...(19): siRNA sense strand
ggagaugaggaacaagauu

SEQ ID NO: 614080 - RNA, 19 nt, Homo sapiens
  misc_RNA (1)...(19): siRNA sense strand
aagaagcgcgucaccauga

SEQ ID NO: 614081 - RNA, 19 nt, Homo sapiens
  misc_RNA (1)...(19): siRNA sense strand
gagcgucauugccgagaag

SEQ ID NO: 614082 - RNA, 19 nt, Homo sapiens
  misc_RNA (1)...(19): siRNA sense strand
ccgacaagaugugaaguca

SEQ ID NO: 614083 - RNA, 19 nt, Homo sapiens
  misc_RNA (1)...(19): siRNA sense strand
gaggaacaagauucgagaa

SEQ ID NO: 614084 - RNA, 19 nt, Homo sapiens
  misc_RNA (1)...(19): siRNA sense strand
ucaaccugauggagcagaa

SEQ ID NO: 614085 - RNA, 19 nt, Homo sapiens
  misc_RNA (1)...(19): siRNA sense strand
agaagaagcgcgucaccau

SEQ ID NO: 614086 - RNA, 19 nt, Homo sapiens
  misc_RNA (1)...(19): siRNA sense strand
guacuggagaugaggaaca

SEQ ID NO: 614087 - RNA, 19 nt, Homo sapiens
  misc_RNA (1)...(19): siRNA sense strand
cgagcgucauugccgagaa

SEQ ID NO: 614088 - RNA, 19 nt, Homo sapiens
  misc_RNA (1)...(19): siRNA sense strand
gaacaagauucgagaacaa

SEQ ID NO: 614089 - RNA, 19 nt, Homo sapiens
  misc_RNA (1)...(19): siRNA sense strand
gaacaaaaccgacaagaug

SEQ ID NO: 614090 - RNA, 19 nt, Homo sapiens
  misc_RNA (1)...(19): siRNA sense strand
ggaacaagauucgagaaca

SEQ ID NO: 614091 - RNA, 19 nt, Homo sapiens
  misc_RNA (1)...(19): siRNA sense strand
gagaugaggaacaagauuc

SEQ ID NO: 614092 - RNA, 19 nt, Homo sapiens
  misc_RNA (1)...(19): siRNA sense strand
ggagaugaggaacaagauu

SEQ ID NO: 614093 - RNA, 19 nt, Homo sapiens
  misc_RNA (1)...(19): siRNA sense strand
aagaagcgcgucaccauga

SEQ ID NO: 614094 - RNA, 19 nt, Homo sapiens
  misc_RNA (1)...(19): siRNA sense strand
gagcgucauugccgagaag

SEQ ID NO: 614095 - RNA, 19 nt, Homo sapiens
  misc_RNA (1)...(19): siRNA sense strand
ccgacaagaugugaaguca

SEQ ID NO: 614096 - RNA, 19 nt, Homo sapiens
  misc_RNA (1)...(19): siRNA sense strand
gaggaacaagauucgagaa

SEQ ID NO: 614097 - RNA, 19 nt, Homo sapiens
  misc_RNA (1)...(19): siRNA sense strand
ucaaccugauggagcagaa

SEQ ID NO: 614098 - RNA, 19 nt, Homo sapiens
  misc_RNA (1)...(19): siRNA sense strand
agaagaagcgcgucaccau

SEQ ID NO: 614099 - RNA, 19 nt, Homo sapiens
  misc_RNA (1)...(19): siRNA sense strand
guacuggagaugaggaaca

SEQ ID NO: 614100 - RNA, 19 nt, Homo sapiens
  misc_RNA (1)...(19): siRNA sense strand
cgagcgucauugccgagaa

SEQ ID NO: 614101 - RNA, 19 nt, Homo sapiens
  misc_RNA (1)...(19): siRNA sense strand
gaacaagauucgagaacaa

SEQ ID NO: 614102 - RNA, 19 nt, Homo sapiens
  misc_RNA (1)...(19): siRNA sense strand
gaacaaaaccgacaagaug

SEQ ID NO: 614103 - RNA, 19 nt, Homo sapiens
  misc_RNA (1)...(19): siRNA sense strand
ggaacaagauucgagaaca

SEQ ID NO: 614104 - RNA, 19 nt, Homo sapiens
  misc_RNA (1)...(19): siRNA sense strand
gagaugaggaacaagauuc

SEQ ID NO: 614105 - RNA, 19 nt, Homo sapiens
  misc_RNA (1)...(19): siRNA sense strand
ggagaugaggaacaagauu

SEQ ID NO: 614106 - RNA, 19 nt, Homo sapiens
  misc_RNA (1)...(19): siRNA sense strand
aagaagcgcgucaccauga

SEQ ID NO: 614107 - RNA, 19 nt, Homo sapiens
  misc_RNA (1)...(19): siRNA sense strand
gagcgucauugccgagaag

SEQ ID NO: 614108 - RNA, 19 nt, Homo sapiens
  misc_RNA (1)...(19): siRNA sense strand
ccgacaagaugugaaguca

SEQ ID NO: 614109 - RNA, 19 nt, Homo sapiens
  misc_RNA (1)...(19): siRNA sense strand
gaggaacaagauucgagaa

SEQ ID NO: 614110 - RNA, 19 nt, Homo sapiens
  misc_RNA (1)...(19): siRNA sense strand
ucaaccugauggagcagaa

SEQ ID NO: 614111 - RNA, 19 nt, Homo sapiens
  misc_RNA (1)...(19): siRNA sense strand
agaagaagcgcgucaccau

SEQ ID NO: 614112 - RNA, 19 nt, Homo sapiens
  misc_RNA (1)...(19): siRNA sense strand
guacuggagaugaggaaca

SEQ ID NO: 614113 - RNA, 19 nt, Homo sapiens
  misc_RNA (1)...(19): siRNA sense strand
cgagcgucauugccgagaa

SEQ ID NO: 614114 - RNA, 19 nt, Homo sapiens
  misc_RNA (1)...(19): siRNA sense strand
gaacaagauucgagaacaa

SEQ ID NO: 614115 - RNA, 19 nt, Homo sapiens
  misc_RNA (1)...(19): siRNA sense strand
gaacaaaaccgacaagaug

SEQ ID NO: 614116 - RNA, 19 nt, Homo sapiens
  misc_RNA (1)...(19): siRNA sense strand
ggaacaagauucgagaaca

SEQ ID NO: 614117 - RNA, 19 nt, Homo sapiens
  misc_RNA (1)...(19): siRNA sense strand
gagaugaggaacaagauuc

SEQ ID NO: 614118 - RNA, 19 nt, Homo sapiens
  misc_RNA (1)...(19): siRNA sense strand
ggagaugaggaacaagauu

SEQ ID NO: 614119 - RNA, 19 nt, Homo sapiens
  misc_RNA (1)...(19): siRNA sense strand
aagaagcgcgucaccauga

SEQ ID NO: 614120 - RNA, 19 nt, Homo sapiens
  misc_RNA (1)...(19): siRNA sense strand
gagcgucauugccgagaag

SEQ ID NO: 614121 - RNA, 19 nt, Homo sapiens
  misc_RNA (1)...(19): siRNA sense strand
ccgacaagaugugaaguca

SEQ ID NO: 614122 - RNA, 19 nt, Homo sapiens
  misc_RNA (1)...(19): siRNA sense strand
gaggaacaagauucgagaa

SEQ ID NO: 614123 - RNA, 19 nt, Homo sapiens
  misc_RNA (1)...(19): siRNA sense strand
ucaaccugauggagcagaa

SEQ ID NO: 614124 - RNA, 19 nt, Homo sapiens
  misc_RNA (1)...(19): siRNA sense strand
agaagaagcgcgucaccau

SEQ ID NO: 614125 - RNA, 19 nt, Homo sapiens
  misc_RNA (1)...(19): siRNA sense strand
guacuggagaugaggaaca

SEQ ID NO: 614126 - RNA, 19 nt, Homo sapiens
  misc_RNA (1)...(19): siRNA sense strand
cgagcgucauugccgagaa

SEQ ID NO: 614127 - RNA, 19 nt, Homo sapiens
  misc_RNA (1)...(19): siRNA sense strand
gaacaagauucgagaacaa

SEQ ID NO: 614128 - RNA, 19 nt, Homo sapiens
  misc_RNA (1)...(19): siRNA sense strand
gaacaaaaccgacaagaug

SEQ ID NO: 614129 - RNA, 19 nt, Homo sapiens
  misc_RNA (1)...(19): siRNA sense strand
ggaacaagauucgagaaca

SEQ ID NO: 614130 - RNA, 19 nt, Homo sapiens
  misc_RNA (1)...(19): siRNA sense strand
gagaugaggaacaagauuc

SEQ ID NO: 614131 - RNA, 19 nt, Homo sapiens
  misc_RNA (1)...(19): siRNA sense strand
ggagaugaggaacaagauu

SEQ ID NO: 614132 - RNA, 19 nt, Homo sapiens
  misc_RNA (1)...(19): siRNA sense strand
aagaagcgcgucaccauga

SEQ ID NO: 614133 - RNA, 19 nt, Homo sapiens
  misc_RNA (1)...(19): siRNA sense strand
gagcgucauugccgagaag

SEQ ID NO: 614134 - RNA, 19 nt, Homo sapiens
  misc_RNA (1)...(19): siRNA sense strand
ccgacaagaugugaaguca

SEQ ID NO: 614135 - RNA, 19 nt, Homo sapiens
  misc_RNA (1)...(19): siRNA sense strand
gaggaacaagauucgagaa

SEQ ID NO: 614136 - RNA, 19 nt, Homo sapiens
  misc_RNA (1)...(19): siRNA sense strand
ucaaccugauggagcagaa

SEQ ID NO: 614137 - RNA, 19 nt, Homo sapiens
  misc_RNA (1)...(19): siRNA sense strand
agaagaagcgcgucaccau

SEQ ID NO: 614138 - RNA, 19 nt, Homo sapiens
  misc_RNA (1)...(19): siRNA sense strand
guacuggagaugaggaaca

SEQ ID NO: 614139 - RNA, 19 nt, Homo sapiens
  misc_RNA (1)...(19): siRNA sense strand
cgagcgucauugccgagaa

SEQ ID NO: 614140 - RNA, 19 nt, Homo sapiens
  misc_RNA (1)...(19): siRNA sense strand
gaacaagauucgagaacaa

SEQ ID NO: 614141 - RNA, 19 nt, Homo sapiens
  misc_RNA (1)...(19): siRNA sense strand
gaacaaaaccgacaagaug

SEQ ID NO: 614142 - RNA, 19 nt, Homo sapiens
  misc_RNA (1)...(19): siRNA sense strand
ggaacaagauucgagaaca

SEQ ID NO: 614143 - RNA, 19 nt, Homo sapiens
  misc_RNA (1)...(19): siRNA sense strand
gagaugaggaacaagauuc

SEQ ID NO: 614144 - RNA, 19 nt, Homo sapiens
  misc_RNA (1)...(19): siRNA sense strand
ggagaugaggaacaagauu

SEQ ID NO: 614145 - RNA, 19 nt, Homo sapiens
  misc_RNA (1)...(19): siRNA sense strand
aagaagcgcgucaccauga

SEQ ID NO: 614146 - RNA, 19 nt, Homo sapiens
  misc_RNA (1)...(19): siRNA sense strand
gagcgucauugccgagaag

SEQ ID NO: 614147 - RNA, 19 nt, Homo sapiens
  misc_RNA (1)...(19): siRNA sense strand
ccgacaagaugugaaguca

SEQ ID NO: 614148 - RNA, 19 nt, Homo sapiens
  misc_RNA (1)...(19): siRNA sense strand
gaggaacaagauucgagaa

SEQ ID NO: 614149 - RNA, 19 nt, Homo sapiens
  misc_RNA (1)...(19): siRNA sense strand
ucaaccugauggagcagaa

SEQ ID NO: 614150 - RNA, 19 nt, Homo sapiens
  misc_RNA (1)...(19): siRNA sense strand
agaagaagcgcgucaccau

SEQ ID NO: 614151 - RNA, 19 nt, Homo sapiens
  misc_RNA (1)...(19): siRNA sense strand
guacuggagaugaggaaca

SEQ ID NO: 614152 - RNA, 19 nt, Homo sapiens
  misc_RNA (1)...(19): siRNA sense strand
cgagcgucauugccgagaa

SEQ ID NO: 614153 - RNA, 19 nt, Homo sapiens
  misc_RNA (1)...(19): siRNA sense strand
gaacaagauucgagaacaa

SEQ ID NO: 614154 - RNA, 19 nt, Homo sapiens
  misc_RNA (1)...(19): siRNA sense strand
gaacaaaaccgacaagaug

SEQ ID NO: 614155 - RNA, 19 nt, Homo sapiens
  misc_RNA (1)...(19): siRNA sense strand
ggaacaagauucgagaaca

SEQ ID NO: 614156 - RNA, 19 nt, Homo sapiens
  misc_RNA (1)...(19): siRNA sense strand
gagaugaggaacaagauuc

SEQ ID NO: 614157 - RNA, 19 nt, Homo sapiens
  misc_RNA (1)...(19): siRNA sense strand
ggagaugaggaacaagauu

SEQ ID NO: 614158 - RNA, 19 nt, Homo sapiens
  misc_RNA (1)...(19): siRNA sense strand
aagaagcgcgucaccauga

SEQ ID NO: 614159 - RNA, 19 nt, Homo sapiens
  misc_RNA (1)...(19): siRNA sense strand
gagcgucauugccgagaag

SEQ ID NO: 614160 - RNA, 19 nt, Homo sapiens
  misc_RNA (1)...(19): siRNA sense strand
ccgacaagaugugaaguca

SEQ ID NO: 614161 - RNA, 19 nt, Homo sapiens
  misc_RNA (1)...(19): siRNA sense strand
gaggaacaagauucgagaa

SEQ ID NO: 614162 - RNA, 19 nt, Homo sapiens
  misc_RNA (1)...(19): siRNA sense strand
ucaaccugauggagcagaa

SEQ ID NO: 614163 - RNA, 19 nt, Homo sapiens
  misc_RNA (1)...(19): siRNA sense strand
agaagaagcgcgucaccau

SEQ ID NO: 614164 - RNA, 19 nt, Homo sapiens
  misc_RNA (1)...(19): siRNA sense strand
guacuggagaugaggaaca

SEQ ID NO: 614165 - RNA, 19 nt, Homo sapiens
  misc_RNA (1)...(19): siRNA sense strand
cgagcgucauugccgagaa

SEQ ID NO: 614166 - RNA, 19 nt, Homo sapiens
  misc_RNA (1)...(19): siRNA sense strand
gaacaagauucgagaacaa

SEQ ID NO: 614167 - RNA, 19 nt, Homo sapiens
  misc_RNA (1)...(19): siRNA sense strand
gaacaaaaccgacaagaug

SEQ ID NO: 614168 - RNA, 19 nt, Homo sapiens
  misc_RNA (1)...(19): siRNA sense strand
ggaacaagauucgagaaca

SEQ ID NO: 614169 - RNA, 19 nt, Homo sapiens
  misc_RNA (1)...(19): siRNA sense strand
gagaugaggaacaagauuc

SEQ ID NO: 614170 - RNA, 19 nt, Homo sapiens
  misc_RNA (1)...(19): siRNA sense strand
ggagaugaggaacaagauu

SEQ ID NO: 614171 - RNA, 19 nt, Homo sapiens
  misc_RNA (1)...(19): siRNA sense strand
aagaagcgcgucaccauga

SEQ ID NO: 614172 - RNA, 19 nt, Homo sapiens
  misc_RNA (1)...(19): siRNA sense strand
gagcgucauugccgagaag

SEQ ID NO: 614173 - RNA, 19 nt, Homo sapiens
  misc_RNA (1)...(19): siRNA sense strand
ccgacaagaugugaaguca

SEQ ID NO: 614174 - RNA, 19 nt, Homo sapiens
  misc_RNA (1)...(19): siRNA sense strand
gaggaacaagauucgagaa

SEQ ID NO: 614175 - RNA, 19 nt, Homo sapiens
  misc_RNA (1)...(19): siRNA sense strand
ucaaccugauggagcagaa

SEQ ID NO: 614176 - RNA, 19 nt, Homo sapiens
  misc_RNA (1)...(19): siRNA sense strand
agaagaagcgcgucaccau

SEQ ID NO: 614177 - RNA, 19 nt, Homo sapiens
  misc_RNA (1)...(19): siRNA sense strand
guacuggagaugaggaaca

SEQ ID NO: 614178 - RNA, 19 nt, Homo sapiens
  misc_RNA (1)...(19): siRNA sense strand
cgagcgucauugccgagaa

SEQ ID NO: 614179 - RNA, 19 nt, Homo sapiens
  misc_RNA (1)...(19): siRNA sense strand
gaacaagauucgagaacaa

SEQ ID NO: 614180 - RNA, 19 nt, Homo sapiens
  misc_RNA (1)...(19): siRNA sense strand
gaacaaaaccgacaagaug

SEQ ID NO: 614181 - RNA, 19 nt, Homo sapiens
  misc_RNA (1)...(19): siRNA sense strand
ggaacaagauucgagaaca

SEQ ID NO: 614182 - RNA, 19 nt, Homo sapiens
  misc_RNA (1)...(19): siRNA sense strand
gagaugaggaacaagauuc

SEQ ID NO: 614183 - RNA, 19 nt, Homo sapiens
  misc_RNA (1)...(19): siRNA sense strand
ggagaugaggaacaagauu

SEQ ID NO: 614184 - RNA, 19 nt, Homo sapiens
  misc_RNA (1)...(19): siRNA sense strand
aagaagcgcgucaccauga

SEQ ID NO: 614185 - RNA, 19 nt, Homo sapiens
  misc_RNA (1)...(19): siRNA sense strand
gagcgucauugccgagaag

SEQ ID NO: 614186 - RNA, 19 nt, Homo sapiens
  misc_RNA (1)...(19): siRNA sense strand
ccgacaagaugugaaguca

SEQ ID NO: 614187 - RNA, 19 nt, Homo sapiens
  misc_RNA (1)...(19): siRNA sense strand
gaggaacaagauucgagaa

SEQ ID NO: 614188 - RNA, 19 nt, Homo sapiens
  misc_RNA (1)...(19): siRNA sense strand
ucaaccugauggagcagaa

SEQ ID NO: 614189 - RNA, 19 nt, Homo sapiens
  misc_RNA (1)...(19): siRNA sense strand
agaagaagcgcgucaccau

SEQ ID NO: 614190 - RNA, 19 nt, Homo sapiens
  misc_RNA (1)...(19): siRNA sense strand
guacuggagaugaggaaca

SEQ ID NO: 614191 - RNA, 19 nt, Homo sapiens
  misc_RNA (1)...(19): siRNA sense strand
cgagcgucauugccgagaa

SEQ ID NO: 614192 - RNA, 19 nt, Homo sapiens
  misc_RNA (1)...(19): siRNA sense strand
gaacaagauucgagaacaa

SEQ ID NO: 614193 - RNA, 19 nt, Homo sapiens
  misc_RNA (1)...(19): siRNA sense strand
gaacaaaaccgacaagaug

SEQ ID NO: 614194 - RNA, 19 nt, Homo sapiens
  misc_RNA (1)...(19): siRNA sense strand
ggaacaagauucgagaaca

SEQ ID NO: 614195 - RNA, 19 nt, Homo sapiens
  misc_RNA (1)...(19): siRNA sense strand
gagaugaggaacaagauuc

SEQ ID NO: 614196 - RNA, 19 nt, Homo sapiens
  misc_RNA (1)...(19): siRNA sense strand
ggagaugaggaacaagauu

SEQ ID NO: 614197 - RNA, 19 nt, Homo sapiens
  misc_RNA (1)...(19): siRNA sense strand
aagaagcgcgucaccauga

SEQ ID NO: 614198 - RNA, 19 nt, Homo sapiens
  misc_RNA (1)...(19): siRNA sense strand
gagcgucauugccgagaag

SEQ ID NO: 614199 - RNA, 19 nt, Homo sapiens
  misc_RNA (1)...(19): siRNA sense strand
ccgacaagaugugaaguca

SEQ ID NO: 614200 - RNA, 19 nt, Homo sapiens
  misc_RNA (1)...(19): siRNA sense strand
gaggaacaagauucgagaa

SEQ ID NO: 614201 - RNA, 19 nt, Homo sapiens
  misc_RNA (1)...(19): siRNA sense strand
ucaaccugauggagcagaa

SEQ ID NO: 614202 - RNA, 19 nt, Homo sapiens
  misc_RNA (1)...(19): siRNA sense strand
agaagaagcgcgucaccau

SEQ ID NO: 614203 - RNA, 19 nt, Homo sapiens
  misc_RNA (1)...(19): siRNA sense strand
guacuggagaugaggaaca

SEQ ID NO: 614204 - RNA, 19 nt, Homo sapiens
  misc_RNA (1)...(19): siRNA sense strand
cgagcgucauugccgagaa

SEQ ID NO: 614205 - RNA, 19 nt, Homo sapiens
  misc_RNA (1)...(19): siRNA sense strand
gaacaagauucgagaacaa

SEQ ID NO: 614206 - RNA, 19 nt, Homo sapiens
  misc_RNA (1)...(19): siRNA sense strand
gaacaaaaccgacaagaug

SEQ ID NO: 614207 - RNA, 19 nt, Homo sapiens
  misc_RNA (1)...(19): siRNA sense strand
ggaacaagauucgagaaca

SEQ ID NO: 614208 - RNA, 19 nt, Homo sapiens
  misc_RNA (1)...(19): siRNA sense strand
gagaugaggaacaagauuc

SEQ ID NO: 614209 - RNA, 19 nt, Homo sapiens
  misc_RNA (1)...(19): siRNA sense strand
ggagaugaggaacaagauu

SEQ ID NO: 614210 - RNA, 19 nt, Homo sapiens
  misc_RNA (1)...(19): siRNA sense strand
aagaagcgcgucaccauga

SEQ ID NO: 614211 - RNA, 19 nt, Homo sapiens
  misc_RNA (1)...(19): siRNA sense strand
gagcgucauugccgagaag

SEQ ID NO: 614212 - RNA, 19 nt, Homo sapiens
  misc_RNA (1)...(19): siRNA sense strand
ccgacaagaugugaaguca

SEQ ID NO: 614213 - RNA, 19 nt, Homo sapiens
  misc_RNA (1)...(19): siRNA sense strand
gaggaacaagauucgagaa

SEQ ID NO: 614214 - RNA, 19 nt, Homo sapiens
  misc_RNA (1)...(19): siRNA sense strand
ucaaccugauggagcagaa

SEQ ID NO: 614215 - RNA, 19 nt, Homo sapiens
  misc_RNA (1)...(19): siRNA sense strand
agaagaagcgcgucaccau

SEQ ID NO: 614216 - RNA, 19 nt, Homo sapiens
  misc_RNA (1)...(19): siRNA sense strand
guacuggagaugaggaaca

SEQ ID NO: 614217 - RNA, 19 nt, Homo sapiens
  misc_RNA (1)...(19): siRNA sense strand
cgagcgucauugccgagaa

SEQ ID NO: 614218 - RNA, 19 nt, Homo sapiens
  misc_RNA (1)...(19): siRNA sense strand
gaacaagauucgagaacaa

SEQ ID NO: 614219 - RNA, 19 nt, Homo sapiens
  misc_RNA (1)...(19): siRNA sense strand
gaacaaaaccgacaagaug

SEQ ID NO: 614220 - RNA, 19 nt, Homo sapiens
  misc_RNA (1)...(19): siRNA sense strand
ggaacaagauucgagaaca

SEQ ID NO: 614221 - RNA, 19 nt, Homo sapiens
  misc_RNA (1)...(19): siRNA sense strand
gagaugaggaacaagauuc

SEQ ID NO: 614222 - RNA, 19 nt, Homo sapiens
  misc_RNA (1)...(19): siRNA sense strand
ggagaugaggaacaagauu

SEQ ID NO: 614223 - RNA, 19 nt, Homo sapiens
  misc_RNA (1)...(19): siRNA sense strand
aagaagcgcgucaccauga

SEQ ID NO: 614224 - RNA, 19 nt, Homo sapiens
  misc_RNA (1)...(19): siRNA sense strand
gagcgucauugccgagaag

SEQ ID NO: 614225 - RNA, 19 nt, Homo sapiens
  misc_RNA (1)...(19): siRNA sense strand
ccgacaagaugugaaguca

SEQ ID NO: 614226 - RNA, 19 nt, Homo sapiens
  misc_RNA (1)...(19): siRNA sense strand
gaggaacaagauucgagaa

SEQ ID NO: 614227 - RNA, 19 nt, Homo sapiens
  misc_RNA (1)...(19): siRNA sense strand
ucaaccugauggagcagaa

SEQ ID NO: 614228 - RNA, 19 nt, Homo sapiens
  misc_RNA (1)...(19): siRNA sense strand
agaagaagcgcgucaccau

SEQ ID NO: 614229 - RNA, 19 nt, Homo sapiens
  misc_RNA (1)...(19): siRNA sense strand
guacuggagaugaggaaca

SEQ ID NO: 614230 - RNA, 19 nt, Homo sapiens
  misc_RNA (1)...(19): siRNA sense strand
cgagcgucauugccgagaa

SEQ ID NO: 614231 - RNA, 19 nt, Homo sapiens
  misc_RNA (1)...(19): siRNA sense strand
gaacaagauucgagaacaa

SEQ ID NO: 614232 - RNA, 19 nt, Homo sapiens
  misc_RNA (1)...(19): siRNA sense strand
gaacaaaaccgacaagaug

SEQ ID NO: 614233 - RNA, 19 nt, Homo sapiens
  misc_RNA (1)...(19): siRNA sense strand
ggaacaagauucgagaaca

SEQ ID NO: 614234 - RNA, 19 nt, Homo sapiens
  misc_RNA (1)...(19): siRNA sense strand
gagaugaggaacaagauuc

SEQ ID NO: 614235 - RNA, 19 nt, Homo sapiens
  misc_RNA (1)...(19): siRNA sense strand
ggagaugaggaacaagauu

SEQ ID NO: 614236 - RNA, 19 nt, Homo sapiens
  misc_RNA (1)...(19): siRNA sense strand
aagaagcgcgucaccauga

SEQ ID NO: 614237 - RNA, 19 nt, Homo sapiens
  misc_RNA (1)...(19): siRNA sense strand
gagcgucauugccgagaag

SEQ ID NO: 614238 - RNA, 19 nt, Homo sapiens
  misc_RNA (1)...(19): siRNA sense strand
ccgacaagaugugaaguca

SEQ ID NO: 614239 - RNA, 19 nt, Homo sapiens
  misc_RNA (1)...(19): siRNA sense strand
gaggaacaagauucgagaa

SEQ ID NO: 614240 - RNA, 19 nt, Homo sapiens
  misc_RNA (1)...(19): siRNA sense strand
ucaaccugauggagcagaa

SEQ ID NO: 614241 - RNA, 19 nt, Homo sapiens
  misc_RNA (1)...(19): siRNA sense strand
agaagaagcgcgucaccau

SEQ ID NO: 614242 - RNA, 19 nt, Homo sapiens
  misc_RNA (1)...(19): siRNA sense strand
guacuggagaugaggaaca

SEQ ID NO: 614243 - RNA, 19 nt, Homo sapiens
  misc_RNA (1)...(19): siRNA sense strand
cgagcgucauugccgagaa

SEQ ID NO: 614244 - RNA, 19 nt, Homo sapiens
  misc_RNA (1)...(19): siRNA sense strand
gaacaagauucgagaacaa

SEQ ID NO: 614245 - RNA, 19 nt, Homo sapiens
  misc_RNA (1)...(19): siRNA sense strand
gaacaaaaccgacaagaug

SEQ ID NO: 614246 - RNA, 19 nt, Homo sapiens
  misc_RNA (1)...(19): siRNA sense strand
ggaacaagauucgagaaca

SEQ ID NO: 614247 - RNA, 19 nt, Homo sapiens
  misc_RNA (1)...(19): siRNA sense strand
gagaugaggaacaagauuc

SEQ ID NO: 614248 - RNA, 19 nt, Homo sapiens
  misc_RNA (1)...(19): siRNA sense strand
ggagaugaggaacaagauu

SEQ ID NO: 614249 - RNA, 19 nt, Homo sapiens
  misc_RNA (1)...(19): siRNA sense strand
aagaagcgcgucaccauga

SEQ ID NO: 614250 - RNA, 19 nt, Homo sapiens
  misc_RNA (1)...(19): siRNA sense strand
gagcgucauugccgagaag

SEQ ID NO: 614251 - RNA, 19 nt, Homo sapiens
  misc_RNA (1)...(19): siRNA sense strand
ccgacaagaugugaaguca

SEQ ID NO: 614252 - RNA, 19 nt, Homo sapiens
  misc_RNA (1)...(19): siRNA sense strand
gaggaacaagauucgagaa

SEQ ID NO: 614253 - RNA, 19 nt, Homo sapiens
  misc_RNA (1)...(19): siRNA sense strand
ucaaccugauggagcagaa

SEQ ID NO: 614254 - RNA, 19 nt, Homo sapiens
  misc_RNA (1)...(19): siRNA sense strand
agaagaagcgcgucaccau

SEQ ID NO: 614255 - RNA, 19 nt, Homo sapiens
  misc_RNA (1)...(19): siRNA sense strand
guacuggagaugaggaaca

SEQ ID NO: 614256 - RNA, 19 nt, Homo sapiens
  misc_RNA (1)...(19): siRNA sense strand
cgagcgucauugccgagaa

SEQ ID NO: 614257 - RNA, 19 nt, Homo sapiens
  misc_RNA (1)...(19): siRNA sense strand
gaacaagauucgagaacaa

SEQ ID NO: 614258 - RNA, 19 nt, Homo sapiens
  misc_RNA (1)...(19): siRNA sense strand
gaacaaaaccgacaagaug

SEQ ID NO: 614259 - RNA, 19 nt, Homo sapiens
  misc_RNA (1)...(19): siRNA sense strand
ggaacaagauucgagaaca

SEQ ID NO: 614260 - RNA, 19 nt, Homo sapiens
  misc_RNA (1)...(19): siRNA sense strand
gagaugaggaacaagauuc

SEQ ID NO: 614261 - RNA, 19 nt, Homo sapiens
  misc_RNA (1)...(19): siRNA sense strand
ggagaugaggaacaagauu

SEQ ID NO: 614262 - RNA, 19 nt, Homo sapiens
  misc_RNA (1)...(19): siRNA sense strand
aagaagcgcgucaccauga

SEQ ID NO: 614263 - RNA, 19 nt, Homo sapiens
  misc_RNA (1)...(19): siRNA sense strand
gagcgucauugccgagaag

SEQ ID NO: 614264 - RNA, 19 nt, Homo sapiens
  misc_RNA (1)...(19): siRNA sense strand
ccgacaagaugugaaguca

SEQ ID NO: 614265 - RNA, 19 nt, Homo sapiens
  misc_RNA (1)...(19): siRNA sense strand
gaggaacaagauucgagaa

SEQ ID NO: 614266 - RNA, 19 nt, Homo sapiens
  misc_RNA (1)...(19): siRNA sense strand
ucaaccugauggagcagaa

SEQ ID NO: 614267 - RNA, 19 nt, Homo sapiens
  misc_RNA (1)...(19): siRNA sense strand
agaagaagcgcgucaccau

SEQ ID NO: 614268 - RNA, 19 nt, Homo sapiens
  misc_RNA (1)...(19): siRNA sense strand
guacuggagaugaggaaca

SEQ ID NO: 614269 - RNA, 19 nt, Homo sapiens
  misc_RNA (1)...(19): siRNA sense strand
cgagcgucauugccgagaa

SEQ ID NO: 614270 - RNA, 19 nt, Homo sapiens
  misc_RNA (1)...(19): siRNA sense strand
gaacaagauucgagaacaa

SEQ ID NO: 614271 - RNA, 19 nt, Homo sapiens
  misc_RNA (1)...(19): siRNA sense strand
gaacaaaaccgacaagaug

SEQ ID NO: 614272 - RNA, 19 nt, Homo sapiens
  misc_RNA (1)...(19): siRNA sense strand
ggaacaagauucgagaaca

SEQ ID NO: 614273 - RNA, 19 nt, Homo sapiens
  misc_RNA (1)...(19): siRNA sense strand
gagaugaggaacaagauuc

SEQ ID NO: 614274 - RNA, 19 nt, Homo sapiens
  misc_RNA (1)...(19): siRNA sense strand
ggagaugaggaacaagauu

SEQ ID NO: 614275 - RNA, 19 nt, Homo sapiens
  misc_RNA (1)...(19): siRNA sense strand
aagaagcgcgucaccauga

SEQ ID NO: 614276 - RNA, 19 nt, Homo sapiens
  misc_RNA (1)...(19): siRNA sense strand
gagcgucauugccgagaag

SEQ ID NO: 614277 - RNA, 19 nt, Homo sapiens
  misc_RNA (1)...(19): siRNA sense strand
ccgacaagaugugaaguca

SEQ ID NO: 614278 - RNA, 19 nt, Homo sapiens
  misc_RNA (1)...(19): siRNA sense strand
gaggaacaagauucgagaa

SEQ ID NO: 614279 - RNA, 19 nt, Homo sapiens
  misc_RNA (1)...(19): siRNA sense strand
ucaaccugauggagcagaa

SEQ ID NO: 614280 - RNA, 19 nt, Homo sapiens
  misc_RNA (1)...(19): siRNA sense strand
agaagaagcgcgucaccau

SEQ ID NO: 614281 - RNA, 19 nt, Homo sapiens
  misc_RNA (1)...(19): siRNA sense strand
guacuggagaugaggaaca

SEQ ID NO: 614282 - RNA, 19 nt, Homo sapiens
  misc_RNA (1)...(19): siRNA sense strand
cgagcgucauugccgagaa

SEQ ID NO: 614283 - RNA, 19 nt, Homo sapiens
  misc_RNA (1)...(19): siRNA sense strand
gaaagcagaauaccuguuu

SEQ ID NO: 614284 - RNA, 19 nt, Homo sapiens
  misc_RNA (1)...(19): siRNA sense strand
ugaauuaugugcuaaguga

SEQ ID NO: 614285 - RNA, 19 nt, Homo sapiens
  misc_RNA (1)...(19): siRNA sense strand
guaaugauguugaaaugga

SEQ ID NO: 614286 - RNA, 19 nt, Homo sapiens
  misc_RNA (1)...(19): siRNA sense strand
caagauaaaccuaguggua

SEQ ID NO: 614287 - RNA, 19 nt, Homo sapiens
  misc_RNA (1)...(19): siRNA sense strand
cagaauaccuguuucaaag

SEQ ID NO: 614288 - RNA, 19 nt, Homo sapiens
  misc_RNA (1)...(19): siRNA sense strand
gaucuggcgugaggaaaua

SEQ ID NO: 614289 - RNA, 19 nt, Homo sapiens
  misc_RNA (1)...(19): siRNA sense strand
gggaagaagacaagaauuu

SEQ ID NO: 614290 - RNA, 19 nt, Homo sapiens
  misc_RNA (1)...(19): siRNA sense strand
gaagaagacaagaauuuga

SEQ ID NO: 614291 - RNA, 19 nt, Homo sapiens
  misc_RNA (1)...(19): siRNA sense strand
ucuaacagcuugccaguug

SEQ ID NO: 614292 - RNA, 19 nt, Homo sapiens
  misc_RNA (1)...(19): siRNA sense strand
gaacaauaacuucucaaga

SEQ ID NO: 614293 - RNA, 19 nt, Homo sapiens
  misc_RNA (1)...(19): siRNA sense strand
gcagaauaccuguuucaaa

SEQ ID NO: 614294 - RNA, 19 nt, Homo sapiens
  misc_RNA (1)...(19): siRNA sense strand
caaauucucauaugccuuu

SEQ ID NO: 614295 - RNA, 19 nt, Homo sapiens
  misc_RNA (1)...(19): siRNA sense strand
aaaggaacaugacaaacuu

SEQ ID NO: 614296 - RNA, 19 nt, Homo sapiens
  misc_RNA (1)...(19): siRNA sense strand
gagggaaacuggucuaaaa

SEQ ID NO: 614297 - RNA, 19 nt, Homo sapiens
  misc_RNA (1)...(19): siRNA sense strand
gcgcagaggcuauuauuca

SEQ ID NO: 614298 - RNA, 19 nt, Homo sapiens
  misc_RNA (1)...(19): siRNA sense strand
ggaagaagacaagaauuug

SEQ ID NO: 614299 - RNA, 19 nt, Homo sapiens
  misc_RNA (1)...(19): siRNA sense strand
ggcuauagcuguuuguaug

SEQ ID NO: 614300 - RNA, 19 nt, Homo sapiens
  misc_RNA (1)...(19): siRNA sense strand
uaaagaagcagaagaaguc

SEQ ID NO: 614301 - RNA, 19 nt, Homo sapiens
  misc_RNA (1)...(19): siRNA sense strand
gaaagaaagaagaguagga

SEQ ID NO: 614302 - RNA, 19 nt, Homo sapiens
  misc_RNA (1)...(19): siRNA sense strand
gaagcuaauuuggauacaa

SEQ ID NO: 614303 - RNA, 19 nt, Homo sapiens
  misc_RNA (1)...(19): siRNA sense strand
ggacaagaacaauaacuuc

SEQ ID NO: 614304 - RNA, 19 nt, Homo sapiens
  misc_RNA (1)...(19): siRNA sense strand
ggaaauauggagagggaaa

SEQ ID NO: 614305 - RNA, 19 nt, Homo sapiens
  misc_RNA (1)...(19): siRNA sense strand
gaauaccuguuucaaagag

SEQ ID NO: 614306 - RNA, 19 nt, Homo sapiens
  misc_RNA (1)...(19): siRNA sense strand
caucaaccuuucuaaugaa

SEQ ID NO: 614307 - RNA, 19 nt, Homo sapiens
  misc_RNA (1)...(19): siRNA sense strand
guugagaacgauauacaua

SEQ ID NO: 614308 - RNA, 19 nt, Homo sapiens
  misc_RNA (1)...(19): siRNA sense strand
gacaagaauuugagaucug

SEQ ID NO: 614309 - RNA, 19 nt, Homo sapiens
  misc_RNA (1)...(19): siRNA sense strand
ggaaacugaagcuaauuug

SEQ ID NO: 614310 - RNA, 19 nt, Homo sapiens
  misc_RNA (1)...(19): siRNA sense strand
ggaggaccaugaagaaacu

SEQ ID NO: 614311 - RNA, 19 nt, Homo sapiens
  misc_RNA (1)...(19): siRNA sense strand
gaauuacacccuuggaauc

SEQ ID NO: 614312 - RNA, 19 nt, Homo sapiens
  misc_RNA (1)...(19): siRNA sense strand
gaaacgacgaggagcaguu

SEQ ID NO: 614313 - RNA, 19 nt, Homo sapiens
  misc_RNA (1)...(19): siRNA sense strand
gauccaaauucucauaugc

SEQ ID NO: 614314 - RNA, 19 nt, Homo sapiens
  misc_RNA (1)...(19): siRNA sense strand
gaaauggaaacugaagcua

SEQ ID NO: 614315 - RNA, 19 nt, Homo sapiens
  misc_RNA (1)...(19): siRNA sense strand
caacagcgcagaggcuauu

SEQ ID NO: 614316 - RNA, 19 nt, Homo sapiens
  misc_RNA (1)...(19): siRNA sense strand
ucaaagagucagccgguaa

SEQ ID NO: 614317 - RNA, 19 nt, Homo sapiens
  misc_RNA (1)...(19): siRNA sense strand
cagcaacaagaccuuaaua

SEQ ID NO: 614318 - RNA, 19 nt, Homo sapiens
  misc_RNA (1)...(19): siRNA sense strand
aaacugaagcuaauuugga

SEQ ID NO: 614319 - RNA, 19 nt, Homo sapiens
  misc_RNA (1)...(19): siRNA sense strand
gaaaauggcaacuuuaaag

SEQ ID NO: 614320 - RNA, 19 nt, Homo sapiens
  misc_RNA (1)...(19): siRNA sense strand
aauggaaacugaagcuaau

SEQ ID NO: 614321 - RNA, 19 nt, Homo sapiens
  misc_RNA (1)...(19): siRNA sense strand
gcaguucgaaugccaggaa

SEQ ID NO: 614322 - RNA, 19 nt, Homo sapiens
  misc_RNA (1)...(19): siRNA sense strand
agauaaaccuagugguaau

SEQ ID NO: 614323 - RNA, 19 nt, Homo sapiens
  misc_RNA (1)...(19): siRNA sense strand
caaaaggacaagaacaaua

SEQ ID NO: 614324 - RNA, 19 nt, Homo sapiens
  misc_RNA (1)...(19): siRNA sense strand
gaacuccucaaaguacaaa

SEQ ID NO: 614325 - RNA, 19 nt, Homo sapiens
  misc_RNA (1)...(19): siRNA sense strand
aaauggaaacugaagcuaa

SEQ ID NO: 614326 - RNA, 19 nt, Homo sapiens
  misc_RNA (1)...(19): siRNA sense strand
cgaauuacacccuuggaau

SEQ ID NO: 614327 - RNA, 19 nt, Homo sapiens
  misc_RNA (1)...(19): siRNA sense strand
gaagacaagaauuugagau

SEQ ID NO: 614328 - RNA, 19 nt, Homo sapiens
  misc_RNA (1)...(19): siRNA sense strand
gcagaagagccacugaaag

SEQ ID NO: 614329 - RNA, 19 nt, Homo sapiens
  misc_RNA (1)...(19): siRNA sense strand
ggugauccaaauucucaua

SEQ ID NO: 614330 - RNA, 19 nt, Homo sapiens
  misc_RNA (1)...(19): siRNA sense strand
ggaaacuggucuaaaauac

SEQ ID NO: 614331 - RNA, 19 nt, Homo sapiens
  misc_RNA (1)...(19): siRNA sense strand
aaagaaagaagaguaggaa

SEQ ID NO: 614332 - RNA, 19 nt, Homo sapiens
  misc_RNA (1)...(19): siRNA sense strand
gaaacugaagcuaauuugg

SEQ ID NO: 614333 - RNA, 19 nt, Homo sapiens
  misc_RNA (1)...(19): siRNA sense strand
aagauaaaccuagugguaa

SEQ ID NO: 614334 - RNA, 19 nt, Homo sapiens
  misc_RNA (1)...(19): siRNA sense strand
acaaccacaugauggagaa

SEQ ID NO: 614335 - RNA, 19 nt, Homo sapiens
  misc_RNA (1)...(19): siRNA sense strand
aggcauggcuuugggaaga

SEQ ID NO: 614336 - RNA, 19 nt, Homo sapiens
  misc_RNA (1)...(19): siRNA sense strand
gcagaggcuauuauucaug

SEQ ID NO: 614337 - RNA, 19 nt, Homo sapiens
  misc_RNA (1)...(19): siRNA sense strand
ggagagggaaacuggucua

SEQ ID NO: 614338 - RNA, 19 nt, Homo sapiens
  misc_RNA (1)...(19): siRNA sense strand
ggaccaugaagaaacuaaa

SEQ ID NO: 614339 - RNA, 19 nt, Homo sapiens
  misc_RNA (1)...(19): siRNA sense strand
ccggcuggaugcucgauuu

SEQ ID NO: 614340 - RNA, 19 nt, Homo sapiens
  misc_RNA (1)...(19): siRNA sense strand
aauggcaacuuuaaagaag

SEQ ID NO: 614341 - RNA, 19 nt, Homo sapiens
  misc_RNA (1)...(19): siRNA sense strand
cagaagagccacugaaagc

SEQ ID NO: 614342 - RNA, 19 nt, Homo sapiens
  misc_RNA (1)...(19): siRNA sense strand
caacuuuaaagaagcagaa

SEQ ID NO: 614343 - RNA, 19 nt, Homo sapiens
  misc_RNA (1)...(19): siRNA sense strand
agacaagaauuugagaucu

SEQ ID NO: 614344 - RNA, 19 nt, Homo sapiens
  misc_RNA (1)...(19): siRNA sense strand
gaaagcaaaaggacaagaa

SEQ ID NO: 614345 - RNA, 19 nt, Homo sapiens
  misc_RNA (1)...(19): siRNA sense strand
augauaaucucucagaaag

SEQ ID NO: 614346 - RNA, 19 nt, Homo sapiens
  misc_RNA (1)...(19): siRNA sense strand
uauggaaaauggcaacuuu

SEQ ID NO: 614347 - RNA, 19 nt, Homo sapiens
  misc_RNA (1)...(19): siRNA sense strand
gggaaacuggucuaaaaua

SEQ ID NO: 614348 - RNA, 19 nt, Homo sapiens
  misc_RNA (1)...(19): siRNA sense strand
gagagggaaacuggucuaa

SEQ ID NO: 614349 - RNA, 19 nt, Homo sapiens
  misc_RNA (1)...(19): siRNA sense strand
cagcgcagaggcuauuauu

SEQ ID NO: 614350 - RNA, 19 nt, Homo sapiens
  misc_RNA (1)...(19): siRNA sense strand
aagcuaauuuggauacaag

SEQ ID NO: 614351 - RNA, 19 nt, Homo sapiens
  misc_RNA (1)...(19): siRNA sense strand
ugguaaugauguugaaaug

SEQ ID NO: 614352 - RNA, 19 nt, Homo sapiens
  misc_RNA (1)...(19): siRNA sense strand
ggaaaauggcaacuuuaaa

SEQ ID NO: 614353 - RNA, 19 nt, Homo sapiens
  misc_RNA (1)...(19): siRNA sense strand
uggcagaaacagagagaaa

SEQ ID NO: 614354 - RNA, 19 nt, Homo sapiens
  misc_RNA (1)...(19): siRNA sense strand
caagugucauguuaaaaga

SEQ ID NO: 614355 - RNA, 19 nt, Homo sapiens
  misc_RNA (1)...(19): siRNA sense strand
ucaacaaccggacaagugu

SEQ ID NO: 614356 - RNA, 19 nt, Homo sapiens
  misc_RNA (1)...(19): siRNA sense strand
aaaccuagugguaaugaug

SEQ ID NO: 614357 - RNA, 19 nt, Homo sapiens
  misc_RNA (1)...(19): siRNA sense strand
gauaaaccuagugguaaug

SEQ ID NO: 614358 - RNA, 19 nt, Homo sapiens
  misc_RNA (1)...(19): siRNA sense strand
gcuacaaccacaugaugga

SEQ ID NO: 614359 - RNA, 19 nt, Homo sapiens
  misc_RNA (1)...(19): siRNA sense strand
uuucaacacuucagcuaca

SEQ ID NO: 614360 - RNA, 19 nt, Homo sapiens
  misc_RNA (1)...(19): siRNA sense strand
aagaauauuuggugaucca

SEQ ID NO: 614361 - RNA, 19 nt, Homo sapiens
  misc_RNA (1)...(19): siRNA sense strand
uuaucuaaguugcaacaug

SEQ ID NO: 614362 - RNA, 19 nt, Homo sapiens
  misc_RNA (1)...(19): siRNA sense strand
uggaaacugaagcuaauuu

SEQ ID NO: 614363 - RNA, 19 nt, Homo sapiens
  misc_RNA (1)...(19): siRNA sense strand
ugauccaaauucucauaug

SEQ ID NO: 614364 - RNA, 19 nt, Homo sapiens
  misc_RNA (1)...(19): siRNA sense strand
gcuaauuuggauacaagaa

SEQ ID NO: 614365 - RNA, 19 nt, Homo sapiens
  misc_RNA (1)...(19): siRNA sense strand
uauagcuguuuguauggaa

SEQ ID NO: 614366 - RNA, 19 nt, Homo sapiens
  misc_RNA (1)...(19): siRNA sense strand
caagaauugcagcaggaaa

SEQ ID NO: 614367 - RNA, 19 nt, Homo sapiens
  misc_RNA (1)...(19): siRNA sense strand
cagcuacaaccacaugaug

SEQ ID NO: 614368 - RNA, 19 nt, Homo sapiens
  misc_RNA (1)...(19): siRNA sense strand
cuaacagcuugccaguuga

SEQ ID NO: 614369 - RNA, 19 nt, Homo sapiens
  misc_RNA (1)...(19): siRNA sense strand
uuaaagaagcagaagaagu

SEQ ID NO: 614370 - RNA, 19 nt, Homo sapiens
  misc_RNA (1)...(19): siRNA sense strand
ggaacuccucaaaguacaa

SEQ ID NO: 614371 - RNA, 19 nt, Homo sapiens
  misc_RNA (1)...(19): siRNA sense strand
aacccuugaugcacaguuu

SEQ ID NO: 614372 - RNA, 19 nt, Homo sapiens
  misc_RNA (1)...(19): siRNA sense strand
gaauuaugugcuaagugaa

SEQ ID NO: 614373 - RNA, 19 nt, Homo sapiens
  misc_RNA (1)...(19): siRNA sense strand
gcagaaacagagagaaacg

SEQ ID NO: 614374 - RNA, 19 nt, Homo sapiens
  misc_RNA (1)...(19): siRNA sense strand
gauggcagaaacagagaga

SEQ ID NO: 614375 - RNA, 19 nt, Homo sapiens
  misc_RNA (1)...(19): siRNA sense strand
ugaaaaggaacaugacaaa

SEQ ID NO: 614376 - RNA, 19 nt, Homo sapiens
  misc_RNA (1)...(19): siRNA sense strand
aaacuggucuaaaauacug

SEQ ID NO: 614377 - RNA, 19 nt, Homo sapiens
  misc_RNA (1)...(19): siRNA sense strand
ggcauggcuuugggaagaa

SEQ ID NO: 614378 - RNA, 19 nt, Homo sapiens
  misc_RNA (1)...(19): siRNA sense strand
gggaugccgacccuacuga

SEQ ID NO: 614379 - RNA, 19 nt, Homo sapiens
  misc_RNA (1)...(19): siRNA sense strand
agcaacaagaccuuaauaa

SEQ ID NO: 614380 - RNA, 19 nt, Homo sapiens
  misc_RNA (1)...(19): siRNA sense strand
aacugaagcuaauuuggau

SEQ ID NO: 614381 - RNA, 19 nt, Homo sapiens
  misc_RNA (1)...(19): siRNA sense strand
acgaggagcaguucgaaug

SEQ ID NO: 614382 - RNA, 19 nt, Homo sapiens
  misc_RNA (1)...(19): siRNA sense strand
cuuuaaagaagcagaagaa

SEQ ID NO: 614383 - RNA, 19 nt, Homo sapiens
  misc_RNA (1)...(19): siRNA sense strand
gaaagcagaauaccuguuu

SEQ ID NO: 614384 - RNA, 19 nt, Homo sapiens
  misc_RNA (1)...(19): siRNA sense strand
ugaauuaugugcuaaguga

SEQ ID NO: 614385 - RNA, 19 nt, Homo sapiens
  misc_RNA (1)...(19): siRNA sense strand
guaaugauguugaaaugga

SEQ ID NO: 614386 - RNA, 19 nt, Homo sapiens
  misc_RNA (1)...(19): siRNA sense strand
caagauaaaccuaguggua

SEQ ID NO: 614387 - RNA, 19 nt, Homo sapiens
  misc_RNA (1)...(19): siRNA sense strand
cagaauaccuguuucaaag

SEQ ID NO: 614388 - RNA, 19 nt, Homo sapiens
  misc_RNA (1)...(19): siRNA sense strand
gaucuggcgugaggaaaua

SEQ ID NO: 614389 - RNA, 19 nt, Homo sapiens
  misc_RNA (1)...(19): siRNA sense strand
gggaagaagacaagaauuu

SEQ ID NO: 614390 - RNA, 19 nt, Homo sapiens
  misc_RNA (1)...(19): siRNA sense strand
gaagaagacaagaauuuga

SEQ ID NO: 614391 - RNA, 19 nt, Homo sapiens
  misc_RNA (1)...(19): siRNA sense strand
ucuaacagcuugccaguug

SEQ ID NO: 614392 - RNA, 19 nt, Homo sapiens
  misc_RNA (1)...(19): siRNA sense strand
gaacaauaacuucucaaga

SEQ ID NO: 614393 - RNA, 19 nt, Homo sapiens
  misc_RNA (1)...(19): siRNA sense strand
gcagaauaccuguuucaaa

SEQ ID NO: 614394 - RNA, 19 nt, Homo sapiens
  misc_RNA (1)...(19): siRNA sense strand
caaauucucauaugccuuu

SEQ ID NO: 614395 - RNA, 19 nt, Homo sapiens
  misc_RNA (1)...(19): siRNA sense strand
aaaggaacaugacaaacuu

SEQ ID NO: 614396 - RNA, 19 nt, Homo sapiens
  misc_RNA (1)...(19): siRNA sense strand
gagggaaacuggucuaaaa

SEQ ID NO: 614397 - RNA, 19 nt, Homo sapiens
  misc_RNA (1)...(19): siRNA sense strand
gcgcagaggcuauuauuca

SEQ ID NO: 614398 - RNA, 19 nt, Homo sapiens
  misc_RNA (1)...(19): siRNA sense strand
ggaagaagacaagaauuug

SEQ ID NO: 614399 - RNA, 19 nt, Homo sapiens
  misc_RNA (1)...(19): siRNA sense strand
ggcuauagcuguuuguaug

SEQ ID NO: 614400 - RNA, 19 nt, Homo sapiens
  misc_RNA (1)...(19): siRNA sense strand
uaaagaagcagaagaaguc

SEQ ID NO: 614401 - RNA, 19 nt, Homo sapiens
  misc_RNA (1)...(19): siRNA sense strand
gaaagaaagaagaguagga

SEQ ID NO: 614402 - RNA, 19 nt, Homo sapiens
  misc_RNA (1)...(19): siRNA sense strand
gaagcuaauuuggauacaa

SEQ ID NO: 614403 - RNA, 19 nt, Homo sapiens
  misc_RNA (1)...(19): siRNA sense strand
ggacaagaacaauaacuuc

SEQ ID NO: 614404 - RNA, 19 nt, Homo sapiens
  misc_RNA (1)...(19): siRNA sense strand
ggaaauauggagagggaaa

SEQ ID NO: 614405 - RNA, 19 nt, Homo sapiens
  misc_RNA (1)...(19): siRNA sense strand
gaauaccuguuucaaagag

SEQ ID NO: 614406 - RNA, 19 nt, Homo sapiens
  misc_RNA (1)...(19): siRNA sense strand
caucaaccuuucuaaugaa

SEQ ID NO: 614407 - RNA, 19 nt, Homo sapiens
  misc_RNA (1)...(19): siRNA sense strand
guugagaacgauauacaua

SEQ ID NO: 614408 - RNA, 19 nt, Homo sapiens
  misc_RNA (1)...(19): siRNA sense strand
gacaagaauuugagaucug

SEQ ID NO: 614409 - RNA, 19 nt, Homo sapiens
  misc_RNA (1)...(19): siRNA sense strand
ggaaacugaagcuaauuug

SEQ ID NO: 614410 - RNA, 19 nt, Homo sapiens
  misc_RNA (1)...(19): siRNA sense strand
ggaggaccaugaagaaacu

SEQ ID NO: 614411 - RNA, 19 nt, Homo sapiens
  misc_RNA (1)...(19): siRNA sense strand
gaauuacacccuuggaauc

SEQ ID NO: 614412 - RNA, 19 nt, Homo sapiens
  misc_RNA (1)...(19): siRNA sense strand
gaaacgacgaggagcaguu

SEQ ID NO: 614413 - RNA, 19 nt, Homo sapiens
  misc_RNA (1)...(19): siRNA sense strand
gauccaaauucucauaugc

SEQ ID NO: 614414 - RNA, 19 nt, Homo sapiens
  misc_RNA (1)...(19): siRNA sense strand
gaaauggaaacugaagcua

SEQ ID NO: 614415 - RNA, 19 nt, Homo sapiens
  misc_RNA (1)...(19): siRNA sense strand
caacagcgcagaggcuauu

SEQ ID NO: 614416 - RNA, 19 nt, Homo sapiens
  misc_RNA (1)...(19): siRNA sense strand
ucaaagagucagccgguaa

SEQ ID NO: 614417 - RNA, 19 nt, Homo sapiens
  misc_RNA (1)...(19): siRNA sense strand
cagcaacaagaccuuaaua

SEQ ID NO: 614418 - RNA, 19 nt, Homo sapiens
  misc_RNA (1)...(19): siRNA sense strand
aaacugaagcuaauuugga

SEQ ID NO: 614419 - RNA, 19 nt, Homo sapiens
  misc_RNA (1)...(19): siRNA sense strand
gaaaauggcaacuuuaaag

SEQ ID NO: 614420 - RNA, 19 nt, Homo sapiens
  misc_RNA (1)...(19): siRNA sense strand
aauggaaacugaagcuaau

SEQ ID NO: 614421 - RNA, 19 nt, Homo sapiens
  misc_RNA (1)...(19): siRNA sense strand
gcaguucgaaugccaggaa

SEQ ID NO: 614422 - RNA, 19 nt, Homo sapiens
  misc_RNA (1)...(19): siRNA sense strand
agauaaaccuagugguaau

SEQ ID NO: 614423 - RNA, 19 nt, Homo sapiens
  misc_RNA (1)...(19): siRNA sense strand
caaaaggacaagaacaaua

SEQ ID NO: 614424 - RNA, 19 nt, Homo sapiens
  misc_RNA (1)...(19): siRNA sense strand
gaacuccucaaaguacaaa

SEQ ID NO: 614425 - RNA, 19 nt, Homo sapiens
  misc_RNA (1)...(19): siRNA sense strand
aaauggaaacugaagcuaa

SEQ ID NO: 614426 - RNA, 19 nt, Homo sapiens
  misc_RNA (1)...(19): siRNA sense strand
cgaauuacacccuuggaau

SEQ ID NO: 614427 - RNA, 19 nt, Homo sapiens
  misc_RNA (1)...(19): siRNA sense strand
gaagacaagaauuugagau

SEQ ID NO: 614428 - RNA, 19 nt, Homo sapiens
  misc_RNA (1)...(19): siRNA sense strand
gcagaagagccacugaaag

SEQ ID NO: 614429 - RNA, 19 nt, Homo sapiens
  misc_RNA (1)...(19): siRNA sense strand
ggugauccaaauucucaua

SEQ ID NO: 614430 - RNA, 19 nt, Homo sapiens
  misc_RNA (1)...(19): siRNA sense strand
ggaaacuggucuaaaauac

SEQ ID NO: 614431 - RNA, 19 nt, Homo sapiens
  misc_RNA (1)...(19): siRNA sense strand
aaagaaagaagaguaggaa

SEQ ID NO: 614432 - RNA, 19 nt, Homo sapiens
  misc_RNA (1)...(19): siRNA sense strand
gaaacugaagcuaauuugg

SEQ ID NO: 614433 - RNA, 19 nt, Homo sapiens
  misc_RNA (1)...(19): siRNA sense strand
aagauaaaccuagugguaa

SEQ ID NO: 614434 - RNA, 19 nt, Homo sapiens
  misc_RNA (1)...(19): siRNA sense strand
acaaccacaugauggagaa

SEQ ID NO: 614435 - RNA, 19 nt, Homo sapiens
  misc_RNA (1)...(19): siRNA sense strand
aggcauggcuuugggaaga

SEQ ID NO: 614436 - RNA, 19 nt, Homo sapiens
  misc_RNA (1)...(19): siRNA sense strand
gcagaggcuauuauucaug

SEQ ID NO: 614437 - RNA, 19 nt, Homo sapiens
  misc_RNA (1)...(19): siRNA sense strand
ggagagggaaacuggucua

SEQ ID NO: 614438 - RNA, 19 nt, Homo sapiens
  misc_RNA (1)...(19): siRNA sense strand
ggaccaugaagaaacuaaa

SEQ ID NO: 614439 - RNA, 19 nt, Homo sapiens
  misc_RNA (1)...(19): siRNA sense strand
ccggcuggaugcucgauuu

SEQ ID NO: 614440 - RNA, 19 nt, Homo sapiens
  misc_RNA (1)...(19): siRNA sense strand
aauggcaacuuuaaagaag

SEQ ID NO: 614441 - RNA, 19 nt, Homo sapiens
  misc_RNA (1)...(19): siRNA sense strand
cagaagagccacugaaagc

SEQ ID NO: 614442 - RNA, 19 nt, Homo sapiens
  misc_RNA (1)...(19): siRNA sense strand
caacuuuaaagaagcagaa

SEQ ID NO: 614443 - RNA, 19 nt, Homo sapiens
  misc_RNA (1)...(19): siRNA sense strand
agacaagaauuugagaucu

SEQ ID NO: 614444 - RNA, 19 nt, Homo sapiens
  misc_RNA (1)...(19): siRNA sense strand
gaaagcaaaaggacaagaa

SEQ ID NO: 614445 - RNA, 19 nt, Homo sapiens
  misc_RNA (1)...(19): siRNA sense strand
augauaaucucucagaaag

SEQ ID NO: 614446 - RNA, 19 nt, Homo sapiens
  misc_RNA (1)...(19): siRNA sense strand
uauggaaaauggcaacuuu

SEQ ID NO: 614447 - RNA, 19 nt, Homo sapiens
  misc_RNA (1)...(19): siRNA sense strand
gggaaacuggucuaaaaua

SEQ ID NO: 614448 - RNA, 19 nt, Homo sapiens
  misc_RNA (1)...(19): siRNA sense strand
gagagggaaacuggucuaa

SEQ ID NO: 614449 - RNA, 19 nt, Homo sapiens
  misc_RNA (1)...(19): siRNA sense strand
cagcgcagaggcuauuauu

SEQ ID NO: 614450 - RNA, 19 nt, Homo sapiens
  misc_RNA (1)...(19): siRNA sense strand
aagcuaauuuggauacaag

SEQ ID NO: 614451 - RNA, 19 nt, Homo sapiens
  misc_RNA (1)...(19): siRNA sense strand
ugguaaugauguugaaaug

SEQ ID NO: 614452 - RNA, 19 nt, Homo sapiens
  misc_RNA (1)...(19): siRNA sense strand
ggaaaauggcaacuuuaaa

SEQ ID NO: 614453 - RNA, 19 nt, Homo sapiens
  misc_RNA (1)...(19): siRNA sense strand
uggcagaaacagagagaaa

SEQ ID NO: 614454 - RNA, 19 nt, Homo sapiens
  misc_RNA (1)...(19): siRNA sense strand
caagugucauguuaaaaga

SEQ ID NO: 614455 - RNA, 19 nt, Homo sapiens
  misc_RNA (1)...(19): siRNA sense strand
ucaacaaccggacaagugu

SEQ ID NO: 614456 - RNA, 19 nt, Homo sapiens
  misc_RNA (1)...(19): siRNA sense strand
aaaccuagugguaaugaug

SEQ ID NO: 614457 - RNA, 19 nt, Homo sapiens
  misc_RNA (1)...(19): siRNA sense strand
gauaaaccuagugguaaug

SEQ ID NO: 614458 - RNA, 19 nt, Homo sapiens
  misc_RNA (1)...(19): siRNA sense strand
gcuacaaccacaugaugga

SEQ ID NO: 614459 - RNA, 19 nt, Homo sapiens
  misc_RNA (1)...(19): siRNA sense strand
uuucaacacuucagcuaca

SEQ ID NO: 614460 - RNA, 19 nt, Homo sapiens
  misc_RNA (1)...(19): siRNA sense strand
aagaauauuuggugaucca

SEQ ID NO: 614461 - RNA, 19 nt, Homo sapiens
  misc_RNA (1)...(19): siRNA sense strand
uuaucuaaguugcaacaug

SEQ ID NO: 614462 - RNA, 19 nt, Homo sapiens
  misc_RNA (1)...(19): siRNA sense strand
uggaaacugaagcuaauuu

SEQ ID NO: 614463 - RNA, 19 nt, Homo sapiens
  misc_RNA (1)...(19): siRNA sense strand
ugauccaaauucucauaug

SEQ ID NO: 614464 - RNA, 19 nt, Homo sapiens
  misc_RNA (1)...(19): siRNA sense strand
gcuaauuuggauacaagaa

SEQ ID NO: 614465 - RNA, 19 nt, Homo sapiens
  misc_RNA (1)...(19): siRNA sense strand
uauagcuguuuguauggaa

SEQ ID NO: 614466 - RNA, 19 nt, Homo sapiens
  misc_RNA (1)...(19): siRNA sense strand
caagaauugcagcaggaaa

SEQ ID NO: 614467 - RNA, 19 nt, Homo sapiens
  misc_RNA (1)...(19): siRNA sense strand
cagcuacaaccacaugaug

SEQ ID NO: 614468 - RNA, 19 nt, Homo sapiens
  misc_RNA (1)...(19): siRNA sense strand
cuaacagcuugccaguuga

SEQ ID NO: 614469 - RNA, 19 nt, Homo sapiens
  misc_RNA (1)...(19): siRNA sense strand
uuaaagaagcagaagaagu

SEQ ID NO: 614470 - RNA, 19 nt, Homo sapiens
  misc_RNA (1)...(19): siRNA sense strand
ggaacuccucaaaguacaa

SEQ ID NO: 614471 - RNA, 19 nt, Homo sapiens
  misc_RNA (1)...(19): siRNA sense strand
aacccuugaugcacaguuu

SEQ ID NO: 614472 - RNA, 19 nt, Homo sapiens
  misc_RNA (1)...(19): siRNA sense strand
gaauuaugugcuaagugaa

SEQ ID NO: 614473 - RNA, 19 nt, Homo sapiens
  misc_RNA (1)...(19): siRNA sense strand
gcagaaacagagagaaacg

SEQ ID NO: 614474 - RNA, 19 nt, Homo sapiens
  misc_RNA (1)...(19): siRNA sense strand
gauggcagaaacagagaga

SEQ ID NO: 614475 - RNA, 19 nt, Homo sapiens
  misc_RNA (1)...(19): siRNA sense strand
ugaaaaggaacaugacaaa

SEQ ID NO: 614476 - RNA, 19 nt, Homo sapiens
  misc_RNA (1)...(19): siRNA sense strand
aaacuggucuaaaauacug

SEQ ID NO: 614477 - RNA, 19 nt, Homo sapiens
  misc_RNA (1)...(19): siRNA sense strand
ggcauggcuuugggaagaa

SEQ ID NO: 614478 - RNA, 19 nt, Homo sapiens
  misc_RNA (1)...(19): siRNA sense strand
gggaugccgacccuacuga

SEQ ID NO: 614479 - RNA, 19 nt, Homo sapiens
  misc_RNA (1)...(19): siRNA sense strand
agcaacaagaccuuaauaa

SEQ ID NO: 614480 - RNA, 19 nt, Homo sapiens
  misc_RNA (1)...(19): siRNA sense strand
aacugaagcuaauuuggau

SEQ ID NO: 614481 - RNA, 19 nt, Homo sapiens
  misc_RNA (1)...(19): siRNA sense strand
acgaggagcaguucgaaug

SEQ ID NO: 614482 - RNA, 19 nt, Homo sapiens
  misc_RNA (1)...(19): siRNA sense strand
cuuuaaagaagcagaagaa

SEQ ID NO: 614483 - RNA, 19 nt, Homo sapiens
  misc_RNA (1)...(19): siRNA sense strand
gaagacaccuguacaagug

SEQ ID NO: 614484 - RNA, 19 nt, Homo sapiens
  misc_RNA (1)...(19): siRNA sense strand
ggacaacaacaguaaauuu

SEQ ID NO: 614485 - RNA, 19 nt, Homo sapiens
  misc_RNA (1)...(19): siRNA sense strand
gaaagcaucucuccagucu

SEQ ID NO: 614486 - RNA, 19 nt, Homo sapiens
  misc_RNA (1)...(19): siRNA sense strand
ucacagcaaugaugacuuu

SEQ ID NO: 614487 - RNA, 19 nt, Homo sapiens
  misc_RNA (1)...(19): siRNA sense strand
gcaaugaugacuuugauaa

SEQ ID NO: 614488 - RNA, 19 nt, Homo sapiens
  misc_RNA (1)...(19): siRNA sense strand
ccaggcaucucauaacaaa

SEQ ID NO: 614489 - RNA, 19 nt, Homo sapiens
  misc_RNA (1)...(19): siRNA sense strand
ggagauacauuggauuuua

SEQ ID NO: 614490 - RNA, 19 nt, Homo sapiens
  misc_RNA (1)...(19): siRNA sense strand
gcaaagauggccucuacuu

SEQ ID NO: 614491 - RNA, 19 nt, Homo sapiens
  misc_RNA (1)...(19): siRNA sense strand
ccagaugccuauacaaaca

SEQ ID NO: 614492 - RNA, 19 nt, Homo sapiens
  misc_RNA (1)...(19): siRNA sense strand
ugacuuggauggcauguuc

SEQ ID NO: 614493 - RNA, 19 nt, Homo sapiens
  misc_RNA (1)...(19): siRNA sense strand
ggagguaugagucaguaua

SEQ ID NO: 614494 - RNA, 19 nt, Homo sapiens
  misc_RNA (1)...(19): siRNA sense strand
gacaacaacaguaaauuug

SEQ ID NO: 614495 - RNA, 19 nt, Homo sapiens
  misc_RNA (1)...(19): siRNA sense strand
gagauaagcaaucccgaaa

SEQ ID NO: 614496 - RNA, 19 nt, Homo sapiens
  misc_RNA (1)...(19): siRNA sense strand
ggauggagauacauuggau

SEQ ID NO: 614497 - RNA, 19 nt, Homo sapiens
  misc_RNA (1)...(19): siRNA sense strand
aaccaaagcuucccacaca

SEQ ID NO: 614498 - RNA, 19 nt, Homo sapiens
  misc_RNA (1)...(19): siRNA sense strand
gaucacaguuuuccaaaug

SEQ ID NO: 614499 - RNA, 19 nt, Homo sapiens
  misc_RNA (1)...(19): siRNA sense strand
gcgcuuagacugugacaug

SEQ ID NO: 614500 - RNA, 19 nt, Homo sapiens
  misc_RNA (1)...(19): siRNA sense strand
cauaaucugucccuacaca

SEQ ID NO: 614501 - RNA, 19 nt, Homo sapiens
  misc_RNA (1)...(19): siRNA sense strand
gagguaugagucaguauaa

SEQ ID NO: 614502 - RNA, 19 nt, Homo sapiens
  misc_RNA (1)...(19): siRNA sense strand
aaacacuucaggacaauaa

SEQ ID NO: 614503 - RNA, 19 nt, Homo sapiens
  misc_RNA (1)...(19): siRNA sense strand
ccgcaaagauggccucuac

SEQ ID NO: 614504 - RNA, 19 nt, Homo sapiens
  misc_RNA (1)...(19): siRNA sense strand
ucaccaacaucauuaacug

SEQ ID NO: 614505 - RNA, 19 nt, Homo sapiens
  misc_RNA (1)...(19): siRNA sense strand
uacaaacacuucaggacaa

SEQ ID NO: 614506 - RNA, 19 nt, Homo sapiens
  misc_RNA (1)...(19): siRNA sense strand
gcucaaaugcuaguacuau

SEQ ID NO: 614507 - RNA, 19 nt, Homo sapiens
  misc_RNA (1)...(19): siRNA sense strand
cagcaaugaugacuuugau

SEQ ID NO: 614508 - RNA, 19 nt, Homo sapiens
  misc_RNA (1)...(19): siRNA sense strand
ccucauggauggagauaca

SEQ ID NO: 614509 - RNA, 19 nt, Homo sapiens
  misc_RNA (1)...(19): siRNA sense strand
caauggcuauggcagaaug

SEQ ID NO: 614510 - RNA, 19 nt, Homo sapiens
  misc_RNA (1)...(19): siRNA sense strand
ucaagagcgugcccuacuu

SEQ ID NO: 614511 - RNA, 19 nt, Homo sapiens
  misc_RNA (1)...(19): siRNA sense strand
caacaacaguaaauuugcu

SEQ ID NO: 614512 - RNA, 19 nt, Homo sapiens
  misc_RNA (1)...(19): siRNA sense strand
gcagccaggcaucucauaa

SEQ ID NO: 614513 - RNA, 19 nt, Homo sapiens
  misc_RNA (1)...(19): siRNA sense strand
gacauuaugacaccaguug

SEQ ID NO: 614514 - RNA, 19 nt, Homo sapiens
  misc_RNA (1)...(19): siRNA sense strand
caaaugcuaguacuauuag

SEQ ID NO: 614515 - RNA, 19 nt, Homo sapiens
  misc_RNA (1)...(19): siRNA sense strand
gucaagacaacgacacaua

SEQ ID NO: 614516 - RNA, 19 nt, Homo sapiens
  misc_RNA (1)...(19): siRNA sense strand
gucauaaucugucccuaca

SEQ ID NO: 614517 - RNA, 19 nt, Homo sapiens
  misc_RNA (1)...(19): siRNA sense strand
uaacuuugacaauguguug

SEQ ID NO: 614518 - RNA, 19 nt, Homo sapiens
  misc_RNA (1)...(19): siRNA sense strand
uggauggcauguucauuga

SEQ ID NO: 614519 - RNA, 19 nt, Homo sapiens
  misc_RNA (1)...(19): siRNA sense strand
aggaguugcugacuucuga

SEQ ID NO: 614520 - RNA, 19 nt, Homo sapiens
  misc_RNA (1)...(19): siRNA sense strand
gaagagcugcauccaugga

SEQ ID NO: 614521 - RNA, 19 nt, Homo sapiens
  misc_RNA (1)...(19): siRNA sense strand
cuaauucggucaugucaac

SEQ ID NO: 614522 - RNA, 19 nt, Homo sapiens
  misc_RNA (1)...(19): siRNA sense strand
uuugauaacuggaguacau

SEQ ID NO: 614523 - RNA, 19 nt, Homo sapiens
  misc_RNA (1)...(19): siRNA sense strand
gagaagcucccaagugacu

SEQ ID NO: 614524 - RNA, 19 nt, Homo sapiens
  misc_RNA (1)...(19): siRNA sense strand
uggauaaucucaaccuucu

SEQ ID NO: 614525 - RNA, 19 nt, Homo sapiens
  misc_RNA (1)...(19): siRNA sense strand
cuacacagcaaguucauuc

SEQ ID NO: 614526 - RNA, 19 nt, Homo sapiens
  misc_RNA (1)...(19): siRNA sense strand
ggagaucgacccggacuuc

SEQ ID NO: 614527 - RNA, 19 nt, Homo sapiens
  misc_RNA (1)...(19): siRNA sense strand
ccauggacaacaacaguaa

SEQ ID NO: 614528 - RNA, 19 nt, Homo sapiens
  misc_RNA (1)...(19): siRNA sense strand
gagcgugcccuacuucaag

SEQ ID NO: 614529 - RNA, 19 nt, Homo sapiens
  misc_RNA (1)...(19): siRNA sense strand
aagccgagcugccaagaag

SEQ ID NO: 614530 - RNA, 19 nt, Homo sapiens
  misc_RNA (1)...(19): siRNA sense strand
aagauggccucuacuuuac

SEQ ID NO: 614531 - RNA, 19 nt, Homo sapiens
  misc_RNA (1)...(19): siRNA sense strand
cauguucauugagcgcuua

SEQ ID NO: 614532 - RNA, 19 nt, Homo sapiens
  misc_RNA (1)...(19): siRNA sense strand
gauaaucucaaccuucucu

SEQ ID NO: 614533 - RNA, 19 nt, Homo sapiens
  misc_RNA (1)...(19): siRNA sense strand
cugcauccauggacaacaa

SEQ ID NO: 614534 - RNA, 19 nt, Homo sapiens
  misc_RNA (1)...(19): siRNA sense strand
acaguaaauuugcuaagag

SEQ ID NO: 614535 - RNA, 19 nt, Homo sapiens
  misc_RNA (1)...(19): siRNA sense strand
gcucucacagcaaugauga

SEQ ID NO: 614536 - RNA, 19 nt, Homo sapiens
  misc_RNA (1)...(19): siRNA sense strand
gagcagcugcaauggcuau

SEQ ID NO: 614537 - RNA, 19 nt, Homo sapiens
  misc_RNA (1)...(19): siRNA sense strand
ugaagacaccuguacaagu

SEQ ID NO: 614538 - RNA, 19 nt, Homo sapiens
  misc_RNA (1)...(19): siRNA sense strand
cgccuggacucuugaagga

SEQ ID NO: 614539 - RNA, 19 nt, Homo sapiens
  misc_RNA (1)...(19): siRNA sense strand
ugucagcgccgacuucaug

SEQ ID NO: 614540 - RNA, 19 nt, Homo sapiens
  misc_RNA (1)...(19): siRNA sense strand
gaagccgagcugccaagaa

SEQ ID NO: 614541 - RNA, 19 nt, Homo sapiens
  misc_RNA (1)...(19): siRNA sense strand
ucucaucaccaacaucauu

SEQ ID NO: 614542 - RNA, 19 nt, Homo sapiens
  misc_RNA (1)...(19): siRNA sense strand
gauaacuggaguacauuuc

SEQ ID NO: 614543 - RNA, 19 nt, Homo sapiens
  misc_RNA (1)...(19): siRNA sense strand
ggagaagagcugcauccau

SEQ ID NO: 614544 - RNA, 19 nt, Homo sapiens
  misc_RNA (1)...(19): siRNA sense strand
ucucaaccuucucucauca

SEQ ID NO: 614545 - RNA, 19 nt, Homo sapiens
  misc_RNA (1)...(19): siRNA sense strand
gugcccuacuucaaggaua

SEQ ID NO: 614546 - RNA, 19 nt, Homo sapiens
  misc_RNA (1)...(19): siRNA sense strand
gcgccgacuucaugagcaa

SEQ ID NO: 614547 - RNA, 19 nt, Homo sapiens
  misc_RNA (1)...(19): siRNA sense strand
cagaaugaaggaacuggaa

SEQ ID NO: 614548 - RNA, 19 nt, Homo sapiens
  misc_RNA (1)...(19): siRNA sense strand
cuuagacugugacauggaa

SEQ ID NO: 614549 - RNA, 19 nt, Homo sapiens
  misc_RNA (1)...(19): siRNA sense strand
caagagcgugcccuacuuc

SEQ ID NO: 614550 - RNA, 19 nt, Homo sapiens
  misc_RNA (1)...(19): siRNA sense strand
aaccuucucucaucaccaa

SEQ ID NO: 614551 - RNA, 19 nt, Homo sapiens
  misc_RNA (1)...(19): siRNA sense strand
gauaagcaaucccgaaaac

SEQ ID NO: 614552 - RNA, 19 nt, Homo sapiens
  misc_RNA (1)...(19): siRNA sense strand
cucaaaugcuaguacuauu

SEQ ID NO: 614553 - RNA, 19 nt, Homo sapiens
  misc_RNA (1)...(19): siRNA sense strand
acaaacacuucaggacaau

SEQ ID NO: 614554 - RNA, 19 nt, Homo sapiens
  misc_RNA (1)...(19): siRNA sense strand
ucaagacaacgacacauag

SEQ ID NO: 614555 - RNA, 19 nt, Homo sapiens
  misc_RNA (1)...(19): siRNA sense strand
ugcccuacuucaaggauaa

SEQ ID NO: 614556 - RNA, 19 nt, Homo sapiens
  misc_RNA (1)...(19): siRNA sense strand
uauggccaauccagcauga

SEQ ID NO: 614557 - RNA, 19 nt, Homo sapiens
  misc_RNA (1)...(19): siRNA sense strand
ccaagaagaaagcaucucu

SEQ ID NO: 614558 - RNA, 19 nt, Homo sapiens
  misc_RNA (1)...(19): siRNA sense strand
caagugaagacaccuguac

SEQ ID NO: 614559 - RNA, 19 nt, Homo sapiens
  misc_RNA (1)...(19): siRNA sense strand
ugaauucacccagcccaaa

SEQ ID NO: 614560 - RNA, 19 nt, Homo sapiens
  misc_RNA (1)...(19): siRNA sense strand
cccagucugucugagauaa

SEQ ID NO: 614561 - RNA, 19 nt, Homo sapiens
  misc_RNA (1)...(19): siRNA sense strand
ggcaagagcgggaaaucuc

SEQ ID NO: 614562 - RNA, 19 nt, Homo sapiens
  misc_RNA (1)...(19): siRNA sense strand
gucaugaugggcccuaauu

SEQ ID NO: 614563 - RNA, 19 nt, Homo sapiens
  misc_RNA (1)...(19): siRNA sense strand
gguaugagucaguauaacu

SEQ ID NO: 614564 - RNA, 19 nt, Homo sapiens
  misc_RNA (1)...(19): siRNA sense strand
aggacaauaagucgaguua

SEQ ID NO: 614565 - RNA, 19 nt, Homo sapiens
  misc_RNA (1)...(19): siRNA sense strand
ccgaaaacauggaaaaucu

SEQ ID NO: 614566 - RNA, 19 nt, Homo sapiens
  misc_RNA (1)...(19): siRNA sense strand
ugcaauggcuauggcagaa

SEQ ID NO: 614567 - RNA, 19 nt, Homo sapiens
  misc_RNA (1)...(19): siRNA sense strand
ucaauucgucauaaucugu

SEQ ID NO: 614568 - RNA, 19 nt, Homo sapiens
  misc_RNA (1)...(19): siRNA sense strand
gccgagcugccaagaagaa

SEQ ID NO: 614569 - RNA, 19 nt, Homo sapiens
  misc_RNA (1)...(19): siRNA sense strand
gaaugaaggaacuggaaaa

SEQ ID NO: 614570 - RNA, 19 nt, Homo sapiens
  misc_RNA (1)...(19): siRNA sense strand
caaacacuucaggacaaua

SEQ ID NO: 614571 - RNA, 19 nt, Homo sapiens
  misc_RNA (1)...(19): siRNA sense strand
caacaguaaauuugcuaag

SEQ ID NO: 614572 - RNA, 19 nt, Homo sapiens
  misc_RNA (1)...(19): siRNA sense strand
ugaaccgccugacccaagu

SEQ ID NO: 614573 - RNA, 19 nt, Homo sapiens
  misc_RNA (1)...(19): siRNA sense strand
uugaaggaguugcugacuu

SEQ ID NO: 614574 - RNA, 19 nt, Homo sapiens
  misc_RNA (1)...(19): siRNA sense strand
acgccgaccucaucaccaa

SEQ ID NO: 614575 - RNA, 19 nt, Homo sapiens
  misc_RNA (1)...(19): siRNA sense strand
ugauaacuggaguacauuu

SEQ ID NO: 614576 - RNA, 19 nt, Homo sapiens
  misc_RNA (1)...(19): siRNA sense strand
gauaagggugacagcaaca

SEQ ID NO: 614577 - RNA, 19 nt, Homo sapiens
  misc_RNA (1)...(19): siRNA sense strand
gagcugcauccauggacaa

SEQ ID NO: 614578 - RNA, 19 nt, Homo sapiens
  misc_RNA (1)...(19): siRNA sense strand
agaaugaaggaacuggaaa

SEQ ID NO: 614579 - RNA, 19 nt, Homo sapiens
  misc_RNA (1)...(19): siRNA sense strand
ccaaagcuucccacacagu

SEQ ID NO: 614580 - RNA, 19 nt, Homo sapiens
  misc_RNA (1)...(19): siRNA sense strand
ccaagugaagacaccugua

SEQ ID NO: 614581 - RNA, 19 nt, Homo sapiens
  misc_RNA (1)...(19): siRNA sense strand
guugcugacuucugacucu

SEQ ID NO: 614582 - RNA, 19 nt, Homo sapiens
  misc_RNA (1)...(19): siRNA sense strand
gaauucacccagcccaaac

SEQ ID NO: 614583 - RNA, 19 nt, Homo sapiens
  misc_RNA (1)...(19): siRNA sense strand
ggacuacuuuccagaauuu

SEQ ID NO: 614584 - RNA, 19 nt, Homo sapiens
  misc_RNA (1)...(19): siRNA sense strand
gaaaguccuugcugggaaa

SEQ ID NO: 614585 - RNA, 19 nt, Homo sapiens
  misc_RNA (1)...(19): siRNA sense strand
gcaaguggauccagugcuu

SEQ ID NO: 614586 - RNA, 19 nt, Homo sapiens
  misc_RNA (1)...(19): siRNA sense strand
gaagauugaggacuacuuu

SEQ ID NO: 614587 - RNA, 19 nt, Homo sapiens
  misc_RNA (1)...(19): siRNA sense strand
gagaugaguuucugaggau

SEQ ID NO: 614588 - RNA, 19 nt, Homo sapiens
  misc_RNA (1)...(19): siRNA sense strand
gaacgugccugacuuugac

SEQ ID NO: 614589 - RNA, 19 nt, Homo sapiens
  misc_RNA (1)...(19): siRNA sense strand
ugacuucccucccgaauuc

SEQ ID NO: 614590 - RNA, 19 nt, Homo sapiens
  misc_RNA (1)...(19): siRNA sense strand
gcaugcaccuucgucagua

SEQ ID NO: 614591 - RNA, 19 nt, Homo sapiens
  misc_RNA (1)...(19): siRNA sense strand
ugaggauccugcauguuaa

SEQ ID NO: 614592 - RNA, 19 nt, Homo sapiens
  misc_RNA (1)...(19): siRNA sense strand
gaggacuacuuuccagaau

SEQ ID NO: 614593 - RNA, 19 nt, Homo sapiens
  misc_RNA (1)...(19): siRNA sense strand
caaccaaagugcaggacau

SEQ ID NO: 614594 - RNA, 19 nt, Homo sapiens
  misc_RNA (1)...(19): siRNA sense strand
gaugaacgugccugacuuu

SEQ ID NO: 614595 - RNA, 19 nt, Homo sapiens
  misc_RNA (1)...(19): siRNA sense strand
caaagugcaggacaucaaa

SEQ ID NO: 614596 - RNA, 19 nt, Homo sapiens
  misc_RNA (1)...(19): siRNA sense strand
gguaaaagcaccauuguga

SEQ ID NO: 614597 - RNA, 19 nt, Homo sapiens
  misc_RNA (1)...(19): siRNA sense strand
augaggauccugcauguua

SEQ ID NO: 614598 - RNA, 19 nt, Homo sapiens
  misc_RNA (1)...(19): siRNA sense strand
ccugacuucuggaaucuuu

SEQ ID NO: 614599 - RNA, 19 nt, Homo sapiens
  misc_RNA (1)...(19): siRNA sense strand
ugaaagaggcgauugaaac

SEQ ID NO: 614600 - RNA, 19 nt, Homo sapiens
  misc_RNA (1)...(19): siRNA sense strand
gagaugggcgucacuacug

SEQ ID NO: 614601 - RNA, 19 nt, Homo sapiens
  misc_RNA (1)...(19): siRNA sense strand
gaauuugcucgcuacacua

SEQ ID NO: 614602 - RNA, 19 nt, Homo sapiens
  misc_RNA (1)...(19): siRNA sense strand
gcaccauugugaagcagau

SEQ ID NO: 614603 - RNA, 19 nt, Homo sapiens
  misc_RNA (1)...(19): siRNA sense strand
ccaaagugcaggacaucaa

SEQ ID NO: 614604 - RNA, 19 nt, Homo sapiens
  misc_RNA (1)...(19): siRNA sense strand
caacgaguaccagcugauu

SEQ ID NO: 614605 - RNA, 19 nt, Homo sapiens
  misc_RNA (1)...(19): siRNA sense strand
gaaagaggcgauugaaacc

SEQ ID NO: 614606 - RNA, 19 nt, Homo sapiens
  misc_RNA (1)...(19): siRNA sense strand
ugaacgugccugacuuuga

SEQ ID NO: 614607 - RNA, 19 nt, Homo sapiens
  misc_RNA (1)...(19): siRNA sense strand
agaauuugcucgcuacacu

SEQ ID NO: 614608 - RNA, 19 nt, Homo sapiens
  misc_RNA (1)...(19): siRNA sense strand
ugaugaacgugccugacuu

SEQ ID NO: 614609 - RNA, 19 nt, Homo sapiens
  misc_RNA (1)...(19): siRNA sense strand
cagcagcagcuacaacaug

SEQ ID NO: 614610 - RNA, 19 nt, Homo sapiens
  misc_RNA (1)...(19): siRNA sense strand
ugagaaggcaaccaaagug

SEQ ID NO: 614611 - RNA, 19 nt, Homo sapiens
  misc_RNA (1)...(19): siRNA sense strand
agaugaggauccugcaugu

SEQ ID NO: 614612 - RNA, 19 nt, Homo sapiens
  misc_RNA (1)...(19): siRNA sense strand
ggagaugggcgucacuacu

SEQ ID NO: 614613 - RNA, 19 nt, Homo sapiens
  misc_RNA (1)...(19): siRNA sense strand
aagaggcgauugaaaccau

SEQ ID NO: 614614 - RNA, 19 nt, Homo sapiens
  misc_RNA (1)...(19): siRNA sense strand
aggacuacuuuccagaauu

SEQ ID NO: 614615 - RNA, 19 nt, Homo sapiens
  misc_RNA (1)...(19): siRNA sense strand
aaagcaccauugugaagca

SEQ ID NO: 614616 - RNA, 19 nt, Homo sapiens
  misc_RNA (1)...(19): siRNA sense strand
ugaggacuacuuuccagaa

SEQ ID NO: 614617 - RNA, 19 nt, Homo sapiens
  misc_RNA (1)...(19): siRNA sense strand
gcuacgaacgcuccaacga

SEQ ID NO: 614618 - RNA, 19 nt, Homo sapiens
  misc_RNA (1)...(19): siRNA sense strand
cuacugcuacccucauuuc

SEQ ID NO: 614619 - RNA, 19 nt, Homo sapiens
  misc_RNA (1)...(19): siRNA sense strand
ugacugccaucaucuucgu

SEQ ID NO: 614620 - RNA, 19 nt, Homo sapiens
  misc_RNA (1)...(19): siRNA sense strand
ugacuucuggaaucuuuga

SEQ ID NO: 614621 - RNA, 19 nt, Homo sapiens
  misc_RNA (1)...(19): siRNA sense strand
uguccugacuucuggaauc

SEQ ID NO: 614622 - RNA, 19 nt, Homo sapiens
  misc_RNA (1)...(19): siRNA sense strand
acgaguaccagcugauuga

SEQ ID NO: 614623 - RNA, 19 nt, Homo sapiens
  misc_RNA (1)...(19): siRNA sense strand
agucaacuuccacauguuu

SEQ ID NO: 614624 - RNA, 19 nt, Homo sapiens
  misc_RNA (1)...(19): siRNA sense strand
gcgaugaacgccgcaagug

SEQ ID NO: 614625 - RNA, 19 nt, Homo sapiens
  misc_RNA (1)...(19): siRNA sense strand
uggacaagaucgacgugau

SEQ ID NO: 614626 - RNA, 19 nt, Homo sapiens
  misc_RNA (1)...(19): siRNA sense strand
gaugaguuucugaggauca

SEQ ID NO: 614627 - RNA, 19 nt, Homo sapiens
  misc_RNA (1)...(19): siRNA sense strand
gaggauccugcauguuaau

SEQ ID NO: 614628 - RNA, 19 nt, Homo sapiens
  misc_RNA (1)...(19): siRNA sense strand
gggaggacaaccagaccaa

SEQ ID NO: 614629 - RNA, 19 nt, Homo sapiens
  misc_RNA (1)...(19): siRNA sense strand
gaaucuuugagaccaaguu

SEQ ID NO: 614630 - RNA, 19 nt, Homo sapiens
  misc_RNA (1)...(19): siRNA sense strand
gauccagugcuucaacgau

SEQ ID NO: 614631 - RNA, 19 nt, Homo sapiens
  misc_RNA (1)...(19): siRNA sense strand
gccagcagcagcuacaaca

SEQ ID NO: 614632 - RNA, 19 nt, Homo sapiens
  misc_RNA (1)...(19): siRNA sense strand
ccaucucugugauccuguu

SEQ ID NO: 614633 - RNA, 19 nt, Homo sapiens
  misc_RNA (1)...(19): siRNA sense strand
cacuacugcuacccucauu

SEQ ID NO: 614634 - RNA, 19 nt, Homo sapiens
  misc_RNA (1)...(19): siRNA sense strand
ggacuacuuuccagaauuu

SEQ ID NO: 614635 - RNA, 19 nt, Homo sapiens
  misc_RNA (1)...(19): siRNA sense strand
gaaaguccuugcugggaaa

SEQ ID NO: 614636 - RNA, 19 nt, Homo sapiens
  misc_RNA (1)...(19): siRNA sense strand
gcaaguggauccagugcuu

SEQ ID NO: 614637 - RNA, 19 nt, Homo sapiens
  misc_RNA (1)...(19): siRNA sense strand
gaagauugaggacuacuuu

SEQ ID NO: 614638 - RNA, 19 nt, Homo sapiens
  misc_RNA (1)...(19): siRNA sense strand
gagaugaguuucugaggau

SEQ ID NO: 614639 - RNA, 19 nt, Homo sapiens
  misc_RNA (1)...(19): siRNA sense strand
gaacgugccugacuuugac

SEQ ID NO: 614640 - RNA, 19 nt, Homo sapiens
  misc_RNA (1)...(19): siRNA sense strand
ugacuucccucccgaauuc

SEQ ID NO: 614641 - RNA, 19 nt, Homo sapiens
  misc_RNA (1)...(19): siRNA sense strand
gcaugcaccuucgucagua

SEQ ID NO: 614642 - RNA, 19 nt, Homo sapiens
  misc_RNA (1)...(19): siRNA sense strand
ugaggauccugcauguuaa

SEQ ID NO: 614643 - RNA, 19 nt, Homo sapiens
  misc_RNA (1)...(19): siRNA sense strand
gaggacuacuuuccagaau

SEQ ID NO: 614644 - RNA, 19 nt, Homo sapiens
  misc_RNA (1)...(19): siRNA sense strand
caaccaaagugcaggacau

SEQ ID NO: 614645 - RNA, 19 nt, Homo sapiens
  misc_RNA (1)...(19): siRNA sense strand
gaugaacgugccugacuuu

SEQ ID NO: 614646 - RNA, 19 nt, Homo sapiens
  misc_RNA (1)...(19): siRNA sense strand
caaagugcaggacaucaaa

SEQ ID NO: 614647 - RNA, 19 nt, Homo sapiens
  misc_RNA (1)...(19): siRNA sense strand
gguaaaagcaccauuguga

SEQ ID NO: 614648 - RNA, 19 nt, Homo sapiens
  misc_RNA (1)...(19): siRNA sense strand
augaggauccugcauguua

SEQ ID NO: 614649 - RNA, 19 nt, Homo sapiens
  misc_RNA (1)...(19): siRNA sense strand
ccugacuucuggaaucuuu

SEQ ID NO: 614650 - RNA, 19 nt, Homo sapiens
  misc_RNA (1)...(19): siRNA sense strand
ugaaagaggcgauugaaac

SEQ ID NO: 614651 - RNA, 19 nt, Homo sapiens
  misc_RNA (1)...(19): siRNA sense strand
gacuacauccugaguguga

SEQ ID NO: 614652 - RNA, 19 nt, Homo sapiens
  misc_RNA (1)...(19): siRNA sense strand
gagaugggcgucacuacug

SEQ ID NO: 614653 - RNA, 19 nt, Homo sapiens
  misc_RNA (1)...(19): siRNA sense strand
gaauuugcucgcuacacua

SEQ ID NO: 614654 - RNA, 19 nt, Homo sapiens
  misc_RNA (1)...(19): siRNA sense strand
gcaccauugugaagcagau

SEQ ID NO: 614655 - RNA, 19 nt, Homo sapiens
  misc_RNA (1)...(19): siRNA sense strand
ccaaagugcaggacaucaa

SEQ ID NO: 614656 - RNA, 19 nt, Homo sapiens
  misc_RNA (1)...(19): siRNA sense strand
caacgaguaccagcugauu

SEQ ID NO: 614657 - RNA, 19 nt, Homo sapiens
  misc_RNA (1)...(19): siRNA sense strand
gaaagaggcgauugaaacc

SEQ ID NO: 614658 - RNA, 19 nt, Homo sapiens
  misc_RNA (1)...(19): siRNA sense strand
ugaacgugccugacuuuga

SEQ ID NO: 614659 - RNA, 19 nt, Homo sapiens
  misc_RNA (1)...(19): siRNA sense strand
agaauuugcucgcuacacu

SEQ ID NO: 614660 - RNA, 19 nt, Homo sapiens
  misc_RNA (1)...(19): siRNA sense strand
ugaugaacgugccugacuu

SEQ ID NO: 614661 - RNA, 19 nt, Homo sapiens
  misc_RNA (1)...(19): siRNA sense strand
cagcagcagcuacaacaug

SEQ ID NO: 614662 - RNA, 19 nt, Homo sapiens
  misc_RNA (1)...(19): siRNA sense strand
ugagaaggcaaccaaagug

SEQ ID NO: 614663 - RNA, 19 nt, Homo sapiens
  misc_RNA (1)...(19): siRNA sense strand
agaugaggauccugcaugu

SEQ ID NO: 614664 - RNA, 19 nt, Homo sapiens
  misc_RNA (1)...(19): siRNA sense strand
ggagaugggcgucacuacu

SEQ ID NO: 614665 - RNA, 19 nt, Homo sapiens
  misc_RNA (1)...(19): siRNA sense strand
aagaggcgauugaaaccau

SEQ ID NO: 614666 - RNA, 19 nt, Homo sapiens
  misc_RNA (1)...(19): siRNA sense strand
aggacuacuuuccagaauu

SEQ ID NO: 614667 - RNA, 19 nt, Homo sapiens
  misc_RNA (1)...(19): siRNA sense strand
aaagcaccauugugaagca

SEQ ID NO: 614668 - RNA, 19 nt, Homo sapiens
  misc_RNA (1)...(19): siRNA sense strand
uggacuacauccugagugu

SEQ ID NO: 614669 - RNA, 19 nt, Homo sapiens
  misc_RNA (1)...(19): siRNA sense strand
guucagaguggacuacauc

SEQ ID NO: 614670 - RNA, 19 nt, Homo sapiens
  misc_RNA (1)...(19): siRNA sense strand
ugaggacuacuuuccagaa

SEQ ID NO: 614671 - RNA, 19 nt, Homo sapiens
  misc_RNA (1)...(19): siRNA sense strand
gcuacgaacgcuccaacga

SEQ ID NO: 614672 - RNA, 19 nt, Homo sapiens
  misc_RNA (1)...(19): siRNA sense strand
cuacugcuacccucauuuc

SEQ ID NO: 614673 - RNA, 19 nt, Homo sapiens
  misc_RNA (1)...(19): siRNA sense strand
ugacugccaucaucuucgu

SEQ ID NO: 614674 - RNA, 19 nt, Homo sapiens
  misc_RNA (1)...(19): siRNA sense strand
ugacuucuggaaucuuuga

SEQ ID NO: 614675 - RNA, 19 nt, Homo sapiens
  misc_RNA (1)...(19): siRNA sense strand
uguccugacuucuggaauc

SEQ ID NO: 614676 - RNA, 19 nt, Homo sapiens
  misc_RNA (1)...(19): siRNA sense strand
acgaguaccagcugauuga

SEQ ID NO: 614677 - RNA, 19 nt, Homo sapiens
  misc_RNA (1)...(19): siRNA sense strand
agucaacuuccacauguuu

SEQ ID NO: 614678 - RNA, 19 nt, Homo sapiens
  misc_RNA (1)...(19): siRNA sense strand
gcgaugaacgccgcaagug

SEQ ID NO: 614679 - RNA, 19 nt, Homo sapiens
  misc_RNA (1)...(19): siRNA sense strand
gaggauccugcauguuaau

SEQ ID NO: 614680 - RNA, 19 nt, Homo sapiens
  misc_RNA (1)...(19): siRNA sense strand
gaugaguuucugaggauca

SEQ ID NO: 614681 - RNA, 19 nt, Homo sapiens
  misc_RNA (1)...(19): siRNA sense strand
gggaggacaaccagaccaa

SEQ ID NO: 614682 - RNA, 19 nt, Homo sapiens
  misc_RNA (1)...(19): siRNA sense strand
gaaucuuugagaccaaguu

SEQ ID NO: 614683 - RNA, 19 nt, Homo sapiens
  misc_RNA (1)...(19): siRNA sense strand
uggacaagaucgacgugau

SEQ ID NO: 614684 - RNA, 19 nt, Homo sapiens
  misc_RNA (1)...(19): siRNA sense strand
gauccagugcuucaacgau

SEQ ID NO: 614685 - RNA, 19 nt, Homo sapiens
  misc_RNA (1)...(19): siRNA sense strand
gccagcagcagcuacaaca

SEQ ID NO: 614686 - RNA, 19 nt, Homo sapiens
  misc_RNA (1)...(19): siRNA sense strand
ccaucucugugauccuguu

SEQ ID NO: 614687 - RNA, 19 nt, Homo sapiens
  misc_RNA (1)...(19): siRNA sense strand
cacuacugcuacccucauu

SEQ ID NO: 614688 - RNA, 19 nt, Homo sapiens
  misc_RNA (1)...(19): siRNA sense strand
ggacuacuuuccagaauuu

SEQ ID NO: 614689 - RNA, 19 nt, Homo sapiens
  misc_RNA (1)...(19): siRNA sense strand
gaaaguccuugcugggaaa

SEQ ID NO: 614690 - RNA, 19 nt, Homo sapiens
  misc_RNA (1)...(19): siRNA sense strand
gcaaguggauccagugcuu

SEQ ID NO: 614691 - RNA, 19 nt, Homo sapiens
  misc_RNA (1)...(19): siRNA sense strand
gaagauugaggacuacuuu

SEQ ID NO: 614692 - RNA, 19 nt, Homo sapiens
  misc_RNA (1)...(19): siRNA sense strand
gagaugaguuucugaggau

SEQ ID NO: 614693 - RNA, 19 nt, Homo sapiens
  misc_RNA (1)...(19): siRNA sense strand
gaacgugccugacuuugac

SEQ ID NO: 614694 - RNA, 19 nt, Homo sapiens
  misc_RNA (1)...(19): siRNA sense strand
ugacuucccucccgaauuc

SEQ ID NO: 614695 - RNA, 19 nt, Homo sapiens
  misc_RNA (1)...(19): siRNA sense strand
gcaugcaccuucgucagua

SEQ ID NO: 614696 - RNA, 19 nt, Homo sapiens
  misc_RNA (1)...(19): siRNA sense strand
ugaggauccugcauguuaa

SEQ ID NO: 614697 - RNA, 19 nt, Homo sapiens
  misc_RNA (1)...(19): siRNA sense strand
gaggacuacuuuccagaau

SEQ ID NO: 614698 - RNA, 19 nt, Homo sapiens
  misc_RNA (1)...(19): siRNA sense strand
caaccaaagugcaggacau

SEQ ID NO: 614699 - RNA, 19 nt, Homo sapiens
  misc_RNA (1)...(19): siRNA sense strand
gaugaacgugccugacuuu

SEQ ID NO: 614700 - RNA, 19 nt, Homo sapiens
  misc_RNA (1)...(19): siRNA sense strand
caaagugcaggacaucaaa

SEQ ID NO: 614701 - RNA, 19 nt, Homo sapiens
  misc_RNA (1)...(19): siRNA sense strand
gguaaaagcaccauuguga

SEQ ID NO: 614702 - RNA, 19 nt, Homo sapiens
  misc_RNA (1)...(19): siRNA sense strand
augaggauccugcauguua

SEQ ID NO: 614703 - RNA, 19 nt, Homo sapiens
  misc_RNA (1)...(19): siRNA sense strand
ccugacuucuggaaucuuu

SEQ ID NO: 614704 - RNA, 19 nt, Homo sapiens
  misc_RNA (1)...(19): siRNA sense strand
ugaaagaggcgauugaaac

SEQ ID NO: 614705 - RNA, 19 nt, Homo sapiens
  misc_RNA (1)...(19): siRNA sense strand
gagaugggcgucacuacug

SEQ ID NO: 614706 - RNA, 19 nt, Homo sapiens
  misc_RNA (1)...(19): siRNA sense strand
gaauuugcucgcuacacua

SEQ ID NO: 614707 - RNA, 19 nt, Homo sapiens
  misc_RNA (1)...(19): siRNA sense strand
gcaccauugugaagcagau

SEQ ID NO: 614708 - RNA, 19 nt, Homo sapiens
  misc_RNA (1)...(19): siRNA sense strand
ccaaagugcaggacaucaa

SEQ ID NO: 614709 - RNA, 19 nt, Homo sapiens
  misc_RNA (1)...(19): siRNA sense strand
caacgaguaccagcugauu

SEQ ID NO: 614710 - RNA, 19 nt, Homo sapiens
  misc_RNA (1)...(19): siRNA sense strand
gaaagaggcgauugaaacc

SEQ ID NO: 614711 - RNA, 19 nt, Homo sapiens
  misc_RNA (1)...(19): siRNA sense strand
ugaacgugccugacuuuga

SEQ ID NO: 614712 - RNA, 19 nt, Homo sapiens
  misc_RNA (1)...(19): siRNA sense strand
agaauuugcucgcuacacu

SEQ ID NO: 614713 - RNA, 19 nt, Homo sapiens
  misc_RNA (1)...(19): siRNA sense strand
ugaugaacgugccugacuu

SEQ ID NO: 614714 - RNA, 19 nt, Homo sapiens
  misc_RNA (1)...(19): siRNA sense strand
cagcagcagcuacaacaug

SEQ ID NO: 614715 - RNA, 19 nt, Homo sapiens
  misc_RNA (1)...(19): siRNA sense strand
ugagaaggcaaccaaagug

SEQ ID NO: 614716 - RNA, 19 nt, Homo sapiens
  misc_RNA (1)...(19): siRNA sense strand
agaugaggauccugcaugu

SEQ ID NO: 614717 - RNA, 19 nt, Homo sapiens
  misc_RNA (1)...(19): siRNA sense strand
ggagaugggcgucacuacu

SEQ ID NO: 614718 - RNA, 19 nt, Homo sapiens
  misc_RNA (1)...(19): siRNA sense strand
aagaggcgauugaaaccau

SEQ ID NO: 614719 - RNA, 19 nt, Homo sapiens
  misc_RNA (1)...(19): siRNA sense strand
aggacuacuuuccagaauu

SEQ ID NO: 614720 - RNA, 19 nt, Homo sapiens
  misc_RNA (1)...(19): siRNA sense strand
gugagaaggcaaccaaagu

SEQ ID NO: 614721 - RNA, 19 nt, Homo sapiens
  misc_RNA (1)...(19): siRNA sense strand
aaagcaccauugugaagca

SEQ ID NO: 614722 - RNA, 19 nt, Homo sapiens
  misc_RNA (1)...(19): siRNA sense strand
ugaggacuacuuuccagaa

SEQ ID NO: 614723 - RNA, 19 nt, Homo sapiens
  misc_RNA (1)...(19): siRNA sense strand
gcuacgaacgcuccaacga

SEQ ID NO: 614724 - RNA, 19 nt, Homo sapiens
  misc_RNA (1)...(19): siRNA sense strand
cuacugcuacccucauuuc

SEQ ID NO: 614725 - RNA, 19 nt, Homo sapiens
  misc_RNA (1)...(19): siRNA sense strand
ugacugccaucaucuucgu

SEQ ID NO: 614726 - RNA, 19 nt, Homo sapiens
  misc_RNA (1)...(19): siRNA sense strand
ugacuucuggaaucuuuga

SEQ ID NO: 614727 - RNA, 19 nt, Homo sapiens
  misc_RNA (1)...(19): siRNA sense strand
uguccugacuucuggaauc

SEQ ID NO: 614728 - RNA, 19 nt, Homo sapiens
  misc_RNA (1)...(19): siRNA sense strand
acgaguaccagcugauuga

SEQ ID NO: 614729 - RNA, 19 nt, Homo sapiens
  misc_RNA (1)...(19): siRNA sense strand
agucaacuuccacauguuu

SEQ ID NO: 614730 - RNA, 19 nt, Homo sapiens
  misc_RNA (1)...(19): siRNA sense strand
gcgaugaacgccgcaagug

SEQ ID NO: 614731 - RNA, 19 nt, Homo sapiens
  misc_RNA (1)...(19): siRNA sense strand
uggacaagaucgacgugau

SEQ ID NO: 614732 - RNA, 19 nt, Homo sapiens
  misc_RNA (1)...(19): siRNA sense strand
gaugaguuucugaggauca

SEQ ID NO: 614733 - RNA, 19 nt, Homo sapiens
  misc_RNA (1)...(19): siRNA sense strand
gggaggacaaccagaccaa

SEQ ID NO: 614734 - RNA, 19 nt, Homo sapiens
  misc_RNA (1)...(19): siRNA sense strand
gaggauccugcauguuaau

SEQ ID NO: 614735 - RNA, 19 nt, Homo sapiens
  misc_RNA (1)...(19): siRNA sense strand
gaaucuuugagaccaaguu

SEQ ID NO: 614736 - RNA, 19 nt, Homo sapiens
  misc_RNA (1)...(19): siRNA sense strand
gauccagugcuucaacgau

SEQ ID NO: 614737 - RNA, 19 nt, Homo sapiens
  misc_RNA (1)...(19): siRNA sense strand
gccagcagcagcuacaaca

SEQ ID NO: 614738 - RNA, 19 nt, Homo sapiens
  misc_RNA (1)...(19): siRNA sense strand
ccaucucugugauccuguu

SEQ ID NO: 614739 - RNA, 19 nt, Homo sapiens
  misc_RNA (1)...(19): siRNA sense strand
cacuacugcuacccucauu

SEQ ID NO: 614740 - RNA, 19 nt, Homo sapiens
  misc_RNA (1)...(19): siRNA sense strand
gcggagagguauuugauua

SEQ ID NO: 614741 - RNA, 19 nt, Homo sapiens
  misc_RNA (1)...(19): siRNA sense strand
gaaugaaccugaaagcaaa

SEQ ID NO: 614742 - RNA, 19 nt, Homo sapiens
  misc_RNA (1)...(19): siRNA sense strand
ucacgaagaugaugaacua

SEQ ID NO: 614743 - RNA, 19 nt, Homo sapiens
  misc_RNA (1)...(19): siRNA sense strand
ggaaagagguagcugugaa

SEQ ID NO: 614744 - RNA, 19 nt, Homo sapiens
  misc_RNA (1)...(19): siRNA sense strand
ggaacaagcuggacaccuu

SEQ ID NO: 614745 - RNA, 19 nt, Homo sapiens
  misc_RNA (1)...(19): siRNA sense strand
gaaacuauuccgcgaagua

SEQ ID NO: 614746 - RNA, 19 nt, Homo sapiens
  misc_RNA (1)...(19): siRNA sense strand
gauaugaacaucaagauug

SEQ ID NO: 614747 - RNA, 19 nt, Homo sapiens
  misc_RNA (1)...(19): siRNA sense strand
gagaggcacuuuagagcaa

SEQ ID NO: 614748 - RNA, 19 nt, Homo sapiens
  misc_RNA (1)...(19): siRNA sense strand
gaaccugaaugaaccugaa

SEQ ID NO: 614749 - RNA, 19 nt, Homo sapiens
  misc_RNA (1)...(19): siRNA sense strand
gaaugugggucacgaagau

SEQ ID NO: 614750 - RNA, 19 nt, Homo sapiens
  misc_RNA (1)...(19): siRNA sense strand
aaagaucgauggaugaaug

SEQ ID NO: 614751 - RNA, 19 nt, Homo sapiens
  misc_RNA (1)...(19): siRNA sense strand
gcaaugaauucaccuuugg

SEQ ID NO: 614752 - RNA, 19 nt, Homo sapiens
  misc_RNA (1)...(19): siRNA sense strand
caucaagauugcagacuuu

SEQ ID NO: 614753 - RNA, 19 nt, Homo sapiens
  misc_RNA (1)...(19): siRNA sense strand
caaguucaccuccaaguuu

SEQ ID NO: 614754 - RNA, 19 nt, Homo sapiens
  misc_RNA (1)...(19): siRNA sense strand
gcucuuggaugcugauaug

SEQ ID NO: 614755 - RNA, 19 nt, Homo sapiens
  misc_RNA (1)...(19): siRNA sense strand
gagcaaaucaugaaagauc

SEQ ID NO: 614756 - RNA, 19 nt, Homo sapiens
  misc_RNA (1)...(19): siRNA sense strand
gaaguuggcccgacacauc

SEQ ID NO: 614757 - RNA, 19 nt, Homo sapiens
  misc_RNA (1)...(19): siRNA sense strand
gaaguuuauuguccauaga

SEQ ID NO: 614758 - RNA, 19 nt, Homo sapiens
  misc_RNA (1)...(19): siRNA sense strand
gaagaucauugacaagacu

SEQ ID NO: 614759 - RNA, 19 nt, Homo sapiens
  misc_RNA (1)...(19): siRNA sense strand
uagagcaaaucaugaaaga

SEQ ID NO: 614760 - RNA, 19 nt, Homo sapiens
  misc_RNA (1)...(19): siRNA sense strand
cgaagaugaugaacuaaag

SEQ ID NO: 614761 - RNA, 19 nt, Homo sapiens
  misc_RNA (1)...(19): siRNA sense strand
ugacaagacucaacugaac

SEQ ID NO: 614762 - RNA, 19 nt, Homo sapiens
  misc_RNA (1)...(19): siRNA sense strand
gugaaaaccugcuuaagaa

SEQ ID NO: 614763 - RNA, 19 nt, Homo sapiens
  misc_RNA (1)...(19): siRNA sense strand
gacuuuggcuucagcaaug

SEQ ID NO: 614764 - RNA, 19 nt, Homo sapiens
  misc_RNA (1)...(19): siRNA sense strand
gaauucaccuuugggaaca

SEQ ID NO: 614765 - RNA, 19 nt, Homo sapiens
  misc_RNA (1)...(19): siRNA sense strand
augaugaacuaaagccuua

SEQ ID NO: 614766 - RNA, 19 nt, Homo sapiens
  misc_RNA (1)...(19): siRNA sense strand
gggagcaucuucagcaagu

SEQ ID NO: 614767 - RNA, 19 nt, Homo sapiens
  misc_RNA (1)...(19): siRNA sense strand
ugaaugaaccugaaagcaa

SEQ ID NO: 614768 - RNA, 19 nt, Homo sapiens
  misc_RNA (1)...(19): siRNA sense strand
gcaguacugucaccagaag

SEQ ID NO: 614769 - RNA, 19 nt, Homo sapiens
  misc_RNA (1)...(19): siRNA sense strand
aaacauugccuccaaaaua

SEQ ID NO: 614770 - RNA, 19 nt, Homo sapiens
  misc_RNA (1)...(19): siRNA sense strand
gcacaaaucgaagcaggaa

SEQ ID NO: 614771 - RNA, 19 nt, Homo sapiens
  misc_RNA (1)...(19): siRNA sense strand
gcaccuccauggccuucaa

SEQ ID NO: 614772 - RNA, 19 nt, Homo sapiens
  misc_RNA (1)...(19): siRNA sense strand
aaucaucccaacauaguua

SEQ ID NO: 614773 - RNA, 19 nt, Homo sapiens
  misc_RNA (1)...(19): siRNA sense strand
gaaacuaccggcuccucaa

SEQ ID NO: 614774 - RNA, 19 nt, Homo sapiens
  misc_RNA (1)...(19): siRNA sense strand
gcaaguucaccuccaaguu

SEQ ID NO: 614775 - RNA, 19 nt, Homo sapiens
  misc_RNA (1)...(19): siRNA sense strand
agagguagcugugaagauc

SEQ ID NO: 614776 - RNA, 19 nt, Homo sapiens
  misc_RNA (1)...(19): siRNA sense strand
acaaaucgaagcaggaauu

SEQ ID NO: 614777 - RNA, 19 nt, Homo sapiens
  misc_RNA (1)...(19): siRNA sense strand
caagagaggcacuuuagag

SEQ ID NO: 614778 - RNA, 19 nt, Homo sapiens
  misc_RNA (1)...(19): siRNA sense strand
gcaagagaggcacuuuaga

SEQ ID NO: 614779 - RNA, 19 nt, Homo sapiens
  misc_RNA (1)...(19): siRNA sense strand
ggaguuauccucuauacac

SEQ ID NO: 614780 - RNA, 19 nt, Homo sapiens
  misc_RNA (1)...(19): siRNA sense strand
uauuguccauagagacuua

SEQ ID NO: 614781 - RNA, 19 nt, Homo sapiens
  misc_RNA (1)...(19): siRNA sense strand
cagcaagagaggcacuuua

SEQ ID NO: 614782 - RNA, 19 nt, Homo sapiens
  misc_RNA (1)...(19): siRNA sense strand
ccucuaauucuuacucuaa

SEQ ID NO: 614783 - RNA, 19 nt, Homo sapiens
  misc_RNA (1)...(19): siRNA sense strand
guguggagccuaggaguua

SEQ ID NO: 614784 - RNA, 19 nt, Homo sapiens
  misc_RNA (1)...(19): siRNA sense strand
gaaagagguagcugugaag

SEQ ID NO: 614785 - RNA, 19 nt, Homo sapiens
  misc_RNA (1)...(19): siRNA sense strand
cguauuccauucuacaugu

SEQ ID NO: 614786 - RNA, 19 nt, Homo sapiens
  misc_RNA (1)...(19): siRNA sense strand
uugaagugauugagacuga

SEQ ID NO: 614787 - RNA, 19 nt, Homo sapiens
  misc_RNA (1)...(19): siRNA sense strand
cagaaaaccugcucuugga

SEQ ID NO: 614788 - RNA, 19 nt, Homo sapiens
  misc_RNA (1)...(19): siRNA sense strand
gaagugauugagacugaga

SEQ ID NO: 614789 - RNA, 19 nt, Homo sapiens
  misc_RNA (1)...(19): siRNA sense strand
aaacuauuccgcgaaguaa

SEQ ID NO: 614790 - RNA, 19 nt, Homo sapiens
  misc_RNA (1)...(19): siRNA sense strand
ggagauggaggugugcaaa

SEQ ID NO: 614791 - RNA, 19 nt, Homo sapiens
  misc_RNA (1)...(19): siRNA sense strand
agaaguuuauuguccauag

SEQ ID NO: 614792 - RNA, 19 nt, Homo sapiens
  misc_RNA (1)...(19): siRNA sense strand
gugaagaucauugacaaga

SEQ ID NO: 614793 - RNA, 19 nt, Homo sapiens
  misc_RNA (1)...(19): siRNA sense strand
cagcaaugaauucaccuuu

SEQ ID NO: 614794 - RNA, 19 nt, Homo sapiens
  misc_RNA (1)...(19): siRNA sense strand
ugaaucaucccaacauagu

SEQ ID NO: 614795 - RNA, 19 nt, Homo sapiens
  misc_RNA (1)...(19): siRNA sense strand
gcggaucccugccuuuuga

SEQ ID NO: 614796 - RNA, 19 nt, Homo sapiens
  misc_RNA (1)...(19): siRNA sense strand
ucagcaaguucaccuccaa

SEQ ID NO: 614797 - RNA, 19 nt, Homo sapiens
  misc_RNA (1)...(19): siRNA sense strand
uuugaaucaucccaacaua

SEQ ID NO: 614798 - RNA, 19 nt, Homo sapiens
  misc_RNA (1)...(19): siRNA sense strand
agaaaacgcucuaccuugu

SEQ ID NO: 614799 - RNA, 19 nt, Homo sapiens
  misc_RNA (1)...(19): siRNA sense strand
gaaucaucccaacauaguu

SEQ ID NO: 614800 - RNA, 19 nt, Homo sapiens
  misc_RNA (1)...(19): siRNA sense strand
ccauggagcccaacgagau

SEQ ID NO: 614801 - RNA, 19 nt, Homo sapiens
  misc_RNA (1)...(19): siRNA sense strand
ugaaagaucgauggaugaa

SEQ ID NO: 614802 - RNA, 19 nt, Homo sapiens
  misc_RNA (1)...(19): siRNA sense strand
gaaaaccugcuuaagaaau

SEQ ID NO: 614803 - RNA, 19 nt, Homo sapiens
  misc_RNA (1)...(19): siRNA sense strand
acaucaagauugcagacuu

SEQ ID NO: 614804 - RNA, 19 nt, Homo sapiens
  misc_RNA (1)...(19): siRNA sense strand
caaauuccgccagauagug

SEQ ID NO: 614805 - RNA, 19 nt, Homo sapiens
  misc_RNA (1)...(19): siRNA sense strand
gagcaucuucagcaaguuc

SEQ ID NO: 614806 - RNA, 19 nt, Homo sapiens
  misc_RNA (1)...(19): siRNA sense strand
gcgacaccaucacccugaa

SEQ ID NO: 614807 - RNA, 19 nt, Homo sapiens
  misc_RNA (1)...(19): siRNA sense strand
guacugucaccagaaguuu

SEQ ID NO: 614808 - RNA, 19 nt, Homo sapiens
  misc_RNA (1)...(19): siRNA sense strand
guaacaacgcagaaaauaa

SEQ ID NO: 614809 - RNA, 19 nt, Homo sapiens
  misc_RNA (1)...(19): siRNA sense strand
cauggcaggaugaaagaaa

SEQ ID NO: 614810 - RNA, 19 nt, Homo sapiens
  misc_RNA (1)...(19): siRNA sense strand
aaguucaccuccaaguuug

SEQ ID NO: 614811 - RNA, 19 nt, Homo sapiens
  misc_RNA (1)...(19): siRNA sense strand
gaguuauccucuauacacu

SEQ ID NO: 614812 - RNA, 19 nt, Homo sapiens
  misc_RNA (1)...(19): siRNA sense strand
agcaaugaauucaccuuug

SEQ ID NO: 614813 - RNA, 19 nt, Homo sapiens
  misc_RNA (1)...(19): siRNA sense strand
cugugaagaucauugacaa

SEQ ID NO: 614814 - RNA, 19 nt, Homo sapiens
  misc_RNA (1)...(19): siRNA sense strand
gagauacaacgaggugaug

SEQ ID NO: 614815 - RNA, 19 nt, Homo sapiens
  misc_RNA (1)...(19): siRNA sense strand
gccacucccugacuacaag

SEQ ID NO: 614816 - RNA, 19 nt, Homo sapiens
  misc_RNA (1)...(19): siRNA sense strand
cgaaguaagaauaaugaag

SEQ ID NO: 614817 - RNA, 19 nt, Homo sapiens
  misc_RNA (1)...(19): siRNA sense strand
gaaagaucgauggaugaau

SEQ ID NO: 614818 - RNA, 19 nt, Homo sapiens
  misc_RNA (1)...(19): siRNA sense strand
ccagaaguuuauuguccau

SEQ ID NO: 614819 - RNA, 19 nt, Homo sapiens
  misc_RNA (1)...(19): siRNA sense strand
ugaagaucauugacaagac

SEQ ID NO: 614820 - RNA, 19 nt, Homo sapiens
  misc_RNA (1)...(19): siRNA sense strand
gcaaaucaugaaagaucga

SEQ ID NO: 614821 - RNA, 19 nt, Homo sapiens
  misc_RNA (1)...(19): siRNA sense strand
gagccaaauuccgccagau

SEQ ID NO: 614822 - RNA, 19 nt, Homo sapiens
  misc_RNA (1)...(19): siRNA sense strand
uaacaacgcagaaaauaag

SEQ ID NO: 614823 - RNA, 19 nt, Homo sapiens
  misc_RNA (1)...(19): siRNA sense strand
cagaguaacaacgcagaaa

SEQ ID NO: 614824 - RNA, 19 nt, Homo sapiens
  misc_RNA (1)...(19): siRNA sense strand
gggaaagagguagcuguga

SEQ ID NO: 614825 - RNA, 19 nt, Homo sapiens
  misc_RNA (1)...(19): siRNA sense strand
ccaaauuccgccagauagu

SEQ ID NO: 614826 - RNA, 19 nt, Homo sapiens
  misc_RNA (1)...(19): siRNA sense strand
gccaaauuccgccagauag

SEQ ID NO: 614827 - RNA, 19 nt, Homo sapiens
  misc_RNA (1)...(19): siRNA sense strand
acgaagaugaugaacuaaa

SEQ ID NO: 614828 - RNA, 19 nt, Homo sapiens
  misc_RNA (1)...(19): siRNA sense strand
ggagcaucuucagcaaguu

SEQ ID NO: 614829 - RNA, 19 nt, Homo sapiens
  misc_RNA (1)...(19): siRNA sense strand
gugcgggaccagcagaauu

SEQ ID NO: 614830 - RNA, 19 nt, Homo sapiens
  misc_RNA (1)...(19): siRNA sense strand
gcuaguggcggagagguau

SEQ ID NO: 614831 - RNA, 19 nt, Homo sapiens
  misc_RNA (1)...(19): siRNA sense strand
caacgggguucgauuuaag

SEQ ID NO: 614832 - RNA, 19 nt, Homo sapiens
  misc_RNA (1)...(19): siRNA sense strand
ggucuggagaggaagaaga

SEQ ID NO: 614833 - RNA, 19 nt, Homo sapiens
  misc_RNA (1)...(19): siRNA sense strand
gaugaaugugggucacgaa

SEQ ID NO: 614834 - RNA, 19 nt, Homo sapiens
  misc_RNA (1)...(19): siRNA sense strand
gaggcacuuuagagcaaau

SEQ ID NO: 614835 - RNA, 19 nt, Homo sapiens
  misc_RNA (1)...(19): siRNA sense strand
agccaaauuccgccagaua

SEQ ID NO: 614836 - RNA, 19 nt, Homo sapiens
  misc_RNA (1)...(19): siRNA sense strand
gcugugaagaucauugaca

SEQ ID NO: 614837 - RNA, 19 nt, Homo sapiens
  misc_RNA (1)...(19): siRNA sense strand
ugcgggaccagcagaauuu

SEQ ID NO: 614838 - RNA, 19 nt, Homo sapiens
  misc_RNA (1)...(19): siRNA sense strand
caaaucgaagcaggaauuc

SEQ ID NO: 614839 - RNA, 19 nt, Homo sapiens
  misc_RNA (1)...(19): siRNA sense strand
gaagaugaugaacuaaagc

SEQ ID NO: 614840 - RNA, 19 nt, Homo sapiens
  misc_RNA (1)...(19): siRNA sense strand
gcggagagguauuugauua

SEQ ID NO: 614841 - RNA, 19 nt, Homo sapiens
  misc_RNA (1)...(19): siRNA sense strand
gaaugaaccugaaagcaaa

SEQ ID NO: 614842 - RNA, 19 nt, Homo sapiens
  misc_RNA (1)...(19): siRNA sense strand
ucacgaagaugaugaacua

SEQ ID NO: 614843 - RNA, 19 nt, Homo sapiens
  misc_RNA (1)...(19): siRNA sense strand
ggaaagagguagcugugaa

SEQ ID NO: 614844 - RNA, 19 nt, Homo sapiens
  misc_RNA (1)...(19): siRNA sense strand
ggaacaagcuggacaccuu

SEQ ID NO: 614845 - RNA, 19 nt, Homo sapiens
  misc_RNA (1)...(19): siRNA sense strand
gaaacuauuccgcgaagua

SEQ ID NO: 614846 - RNA, 19 nt, Homo sapiens
  misc_RNA (1)...(19): siRNA sense strand
gauaugaacaucaagauug

SEQ ID NO: 614847 - RNA, 19 nt, Homo sapiens
  misc_RNA (1)...(19): siRNA sense strand
gagaggcacuuuagagcaa

SEQ ID NO: 614848 - RNA, 19 nt, Homo sapiens
  misc_RNA (1)...(19): siRNA sense strand
gaaccugaaugaaccugaa

SEQ ID NO: 614849 - RNA, 19 nt, Homo sapiens
  misc_RNA (1)...(19): siRNA sense strand
gaaugugggucacgaagau

SEQ ID NO: 614850 - RNA, 19 nt, Homo sapiens
  misc_RNA (1)...(19): siRNA sense strand
aaagaucgauggaugaaug

SEQ ID NO: 614851 - RNA, 19 nt, Homo sapiens
  misc_RNA (1)...(19): siRNA sense strand
gcaaugaauucaccuuugg

SEQ ID NO: 614852 - RNA, 19 nt, Homo sapiens
  misc_RNA (1)...(19): siRNA sense strand
caucaagauugcagacuuu

SEQ ID NO: 614853 - RNA, 19 nt, Homo sapiens
  misc_RNA (1)...(19): siRNA sense strand
caaguucaccuccaaguuu

SEQ ID NO: 614854 - RNA, 19 nt, Homo sapiens
  misc_RNA (1)...(19): siRNA sense strand
gcucuuggaugcugauaug

SEQ ID NO: 614855 - RNA, 19 nt, Homo sapiens
  misc_RNA (1)...(19): siRNA sense strand
gagcaaaucaugaaagauc

SEQ ID NO: 614856 - RNA, 19 nt, Homo sapiens
  misc_RNA (1)...(19): siRNA sense strand
gaaguuggcccgacacauc

SEQ ID NO: 614857 - RNA, 19 nt, Homo sapiens
  misc_RNA (1)...(19): siRNA sense strand
gaaguuuauuguccauaga

SEQ ID NO: 614858 - RNA, 19 nt, Homo sapiens
  misc_RNA (1)...(19): siRNA sense strand
gaagaucauugacaagacu

SEQ ID NO: 614859 - RNA, 19 nt, Homo sapiens
  misc_RNA (1)...(19): siRNA sense strand
uagagcaaaucaugaaaga

SEQ ID NO: 614860 - RNA, 19 nt, Homo sapiens
  misc_RNA (1)...(19): siRNA sense strand
cgaagaugaugaacuaaag

SEQ ID NO: 614861 - RNA, 19 nt, Homo sapiens
  misc_RNA (1)...(19): siRNA sense strand
ugacaagacucaacugaac

SEQ ID NO: 614862 - RNA, 19 nt, Homo sapiens
  misc_RNA (1)...(19): siRNA sense strand
gugaaaaccugcuuaagaa

SEQ ID NO: 614863 - RNA, 19 nt, Homo sapiens
  misc_RNA (1)...(19): siRNA sense strand
gacuuuggcuucagcaaug

SEQ ID NO: 614864 - RNA, 19 nt, Homo sapiens
  misc_RNA (1)...(19): siRNA sense strand
gaauucaccuuugggaaca

SEQ ID NO: 614865 - RNA, 19 nt, Homo sapiens
  misc_RNA (1)...(19): siRNA sense strand
augaugaacuaaagccuua

SEQ ID NO: 614866 - RNA, 19 nt, Homo sapiens
  misc_RNA (1)...(19): siRNA sense strand
gggagcaucuucagcaagu

SEQ ID NO: 614867 - RNA, 19 nt, Homo sapiens
  misc_RNA (1)...(19): siRNA sense strand
ugaaugaaccugaaagcaa

SEQ ID NO: 614868 - RNA, 19 nt, Homo sapiens
  misc_RNA (1)...(19): siRNA sense strand
gcaguacugucaccagaag

SEQ ID NO: 614869 - RNA, 19 nt, Homo sapiens
  misc_RNA (1)...(19): siRNA sense strand
aaacauugccuccaaaaua

SEQ ID NO: 614870 - RNA, 19 nt, Homo sapiens
  misc_RNA (1)...(19): siRNA sense strand
gcacaaaucgaagcaggaa

SEQ ID NO: 614871 - RNA, 19 nt, Homo sapiens
  misc_RNA (1)...(19): siRNA sense strand
gcaccuccauggccuucaa

SEQ ID NO: 614872 - RNA, 19 nt, Homo sapiens
  misc_RNA (1)...(19): siRNA sense strand
aaucaucccaacauaguua

SEQ ID NO: 614873 - RNA, 19 nt, Homo sapiens
  misc_RNA (1)...(19): siRNA sense strand
gaaacuaccggcuccucaa

SEQ ID NO: 614874 - RNA, 19 nt, Homo sapiens
  misc_RNA (1)...(19): siRNA sense strand
gcaaguucaccuccaaguu

SEQ ID NO: 614875 - RNA, 19 nt, Homo sapiens
  misc_RNA (1)...(19): siRNA sense strand
agagguagcugugaagauc

SEQ ID NO: 614876 - RNA, 19 nt, Homo sapiens
  misc_RNA (1)...(19): siRNA sense strand
acaaaucgaagcaggaauu

SEQ ID NO: 614877 - RNA, 19 nt, Homo sapiens
  misc_RNA (1)...(19): siRNA sense strand
caagagaggcacuuuagag

SEQ ID NO: 614878 - RNA, 19 nt, Homo sapiens
  misc_RNA (1)...(19): siRNA sense strand
gcaagagaggcacuuuaga

SEQ ID NO: 614879 - RNA, 19 nt, Homo sapiens
  misc_RNA (1)...(19): siRNA sense strand
ggaguuauccucuauacac

SEQ ID NO: 614880 - RNA, 19 nt, Homo sapiens
  misc_RNA (1)...(19): siRNA sense strand
uauuguccauagagacuua

SEQ ID NO: 614881 - RNA, 19 nt, Homo sapiens
  misc_RNA (1)...(19): siRNA sense strand
cagcaagagaggcacuuua

SEQ ID NO: 614882 - RNA, 19 nt, Homo sapiens
  misc_RNA (1)...(19): siRNA sense strand
ccucuaauucuuacucuaa

SEQ ID NO: 614883 - RNA, 19 nt, Homo sapiens
  misc_RNA (1)...(19): siRNA sense strand
guguggagccuaggaguua

SEQ ID NO: 614884 - RNA, 19 nt, Homo sapiens
  misc_RNA (1)...(19): siRNA sense strand
gaaagagguagcugugaag

SEQ ID NO: 614885 - RNA, 19 nt, Homo sapiens
  misc_RNA (1)...(19): siRNA sense strand
cguauuccauucuacaugu

SEQ ID NO: 614886 - RNA, 19 nt, Homo sapiens
  misc_RNA (1)...(19): siRNA sense strand
uugaagugauugagacuga

SEQ ID NO: 614887 - RNA, 19 nt, Homo sapiens
  misc_RNA (1)...(19): siRNA sense strand
cagaaaaccugcucuugga

SEQ ID NO: 614888 - RNA, 19 nt, Homo sapiens
  misc_RNA (1)...(19): siRNA sense strand
gaagugauugagacugaga

SEQ ID NO: 614889 - RNA, 19 nt, Homo sapiens
  misc_RNA (1)...(19): siRNA sense strand
aaacuauuccgcgaaguaa

SEQ ID NO: 614890 - RNA, 19 nt, Homo sapiens
  misc_RNA (1)...(19): siRNA sense strand
ggagauggaggugugcaaa

SEQ ID NO: 614891 - RNA, 19 nt, Homo sapiens
  misc_RNA (1)...(19): siRNA sense strand
agaaguuuauuguccauag

SEQ ID NO: 614892 - RNA, 19 nt, Homo sapiens
  misc_RNA (1)...(19): siRNA sense strand
gugaagaucauugacaaga

SEQ ID NO: 614893 - RNA, 19 nt, Homo sapiens
  misc_RNA (1)...(19): siRNA sense strand
cagcaaugaauucaccuuu

SEQ ID NO: 614894 - RNA, 19 nt, Homo sapiens
  misc_RNA (1)...(19): siRNA sense strand
ugaaucaucccaacauagu

SEQ ID NO: 614895 - RNA, 19 nt, Homo sapiens
  misc_RNA (1)...(19): siRNA sense strand
gcggaucccugccuuuuga

SEQ ID NO: 614896 - RNA, 19 nt, Homo sapiens
  misc_RNA (1)...(19): siRNA sense strand
ucagcaaguucaccuccaa

SEQ ID NO: 614897 - RNA, 19 nt, Homo sapiens
  misc_RNA (1)...(19): siRNA sense strand
uuugaaucaucccaacaua

SEQ ID NO: 614898 - RNA, 19 nt, Homo sapiens
  misc_RNA (1)...(19): siRNA sense strand
agaaaacgcucuaccuugu

SEQ ID NO: 614899 - RNA, 19 nt, Homo sapiens
  misc_RNA (1)...(19): siRNA sense strand
gaaucaucccaacauaguu

SEQ ID NO: 614900 - RNA, 19 nt, Homo sapiens
  misc_RNA (1)...(19): siRNA sense strand
ccauggagcccaacgagau

SEQ ID NO: 614901 - RNA, 19 nt, Homo sapiens
  misc_RNA (1)...(19): siRNA sense strand
ugaaagaucgauggaugaa

SEQ ID NO: 614902 - RNA, 19 nt, Homo sapiens
  misc_RNA (1)...(19): siRNA sense strand
gaaaaccugcuuaagaaau

SEQ ID NO: 614903 - RNA, 19 nt, Homo sapiens
  misc_RNA (1)...(19): siRNA sense strand
acaucaagauugcagacuu

SEQ ID NO: 614904 - RNA, 19 nt, Homo sapiens
  misc_RNA (1)...(19): siRNA sense strand
caaauuccgccagauagug

SEQ ID NO: 614905 - RNA, 19 nt, Homo sapiens
  misc_RNA (1)...(19): siRNA sense strand
gagcaucuucagcaaguuc

SEQ ID NO: 614906 - RNA, 19 nt, Homo sapiens
  misc_RNA (1)...(19): siRNA sense strand
gcgacaccaucacccugaa

SEQ ID NO: 614907 - RNA, 19 nt, Homo sapiens
  misc_RNA (1)...(19): siRNA sense strand
guacugucaccagaaguuu

SEQ ID NO: 614908 - RNA, 19 nt, Homo sapiens
  misc_RNA (1)...(19): siRNA sense strand
guaacaacgcagaaaauaa

SEQ ID NO: 614909 - RNA, 19 nt, Homo sapiens
  misc_RNA (1)...(19): siRNA sense strand
cauggcaggaugaaagaaa

SEQ ID NO: 614910 - RNA, 19 nt, Homo sapiens
  misc_RNA (1)...(19): siRNA sense strand
aaguucaccuccaaguuug

SEQ ID NO: 614911 - RNA, 19 nt, Homo sapiens
  misc_RNA (1)...(19): siRNA sense strand
gaguuauccucuauacacu

SEQ ID NO: 614912 - RNA, 19 nt, Homo sapiens
  misc_RNA (1)...(19): siRNA sense strand
agcaaugaauucaccuuug

SEQ ID NO: 614913 - RNA, 19 nt, Homo sapiens
  misc_RNA (1)...(19): siRNA sense strand
cugugaagaucauugacaa

SEQ ID NO: 614914 - RNA, 19 nt, Homo sapiens
  misc_RNA (1)...(19): siRNA sense strand
gagauacaacgaggugaug

SEQ ID NO: 614915 - RNA, 19 nt, Homo sapiens
  misc_RNA (1)...(19): siRNA sense strand
gccacucccugacuacaag

SEQ ID NO: 614916 - RNA, 19 nt, Homo sapiens
  misc_RNA (1)...(19): siRNA sense strand
cgaaguaagaauaaugaag

SEQ ID NO: 614917 - RNA, 19 nt, Homo sapiens
  misc_RNA (1)...(19): siRNA sense strand
gaaagaucgauggaugaau

SEQ ID NO: 614918 - RNA, 19 nt, Homo sapiens
  misc_RNA (1)...(19): siRNA sense strand
ccagaaguuuauuguccau

SEQ ID NO: 614919 - RNA, 19 nt, Homo sapiens
  misc_RNA (1)...(19): siRNA sense strand
ugaagaucauugacaagac

SEQ ID NO: 614920 - RNA, 19 nt, Homo sapiens
  misc_RNA (1)...(19): siRNA sense strand
gcaaaucaugaaagaucga

SEQ ID NO: 614921 - RNA, 19 nt, Homo sapiens
  misc_RNA (1)...(19): siRNA sense strand
gagccaaauuccgccagau

SEQ ID NO: 614922 - RNA, 19 nt, Homo sapiens
  misc_RNA (1)...(19): siRNA sense strand
uaacaacgcagaaaauaag

SEQ ID NO: 614923 - RNA, 19 nt, Homo sapiens
  misc_RNA (1)...(19): siRNA sense strand
cagaguaacaacgcagaaa

SEQ ID NO: 614924 - RNA, 19 nt, Homo sapiens
  misc_RNA (1)...(19): siRNA sense strand
gggaaagagguagcuguga

SEQ ID NO: 614925 - RNA, 19 nt, Homo sapiens
  misc_RNA (1)...(19): siRNA sense strand
ccaaauuccgccagauagu

SEQ ID NO: 614926 - RNA, 19 nt, Homo sapiens
  misc_RNA (1)...(19): siRNA sense strand
gccaaauuccgccagauag

SEQ ID NO: 614927 - RNA, 19 nt, Homo sapiens
  misc_RNA (1)...(19): siRNA sense strand
acgaagaugaugaacuaaa

SEQ ID NO: 614928 - RNA, 19 nt, Homo sapiens
  misc_RNA (1)...(19): siRNA sense strand
ggagcaucuucagcaaguu

SEQ ID NO: 614929 - RNA, 19 nt, Homo sapiens
  misc_RNA (1)...(19): siRNA sense strand
gugcgggaccagcagaauu

SEQ ID NO: 614930 - RNA, 19 nt, Homo sapiens
  misc_RNA (1)...(19): siRNA sense strand
gcuaguggcggagagguau

SEQ ID NO: 614931 - RNA, 19 nt, Homo sapiens
  misc_RNA (1)...(19): siRNA sense strand
caacgggguucgauuuaag

SEQ ID NO: 614932 - RNA, 19 nt, Homo sapiens
  misc_RNA (1)...(19): siRNA sense strand
ggucuggagaggaagaaga

SEQ ID NO: 614933 - RNA, 19 nt, Homo sapiens
  misc_RNA (1)...(19): siRNA sense strand
gaugaaugugggucacgaa

SEQ ID NO: 614934 - RNA, 19 nt, Homo sapiens
  misc_RNA (1)...(19): siRNA sense strand
gaggcacuuuagagcaaau

SEQ ID NO: 614935 - RNA, 19 nt, Homo sapiens
  misc_RNA (1)...(19): siRNA sense strand
agccaaauuccgccagaua

SEQ ID NO: 614936 - RNA, 19 nt, Homo sapiens
  misc_RNA (1)...(19): siRNA sense strand
gcugugaagaucauugaca

SEQ ID NO: 614937 - RNA, 19 nt, Homo sapiens
  misc_RNA (1)...(19): siRNA sense strand
ugcgggaccagcagaauuu

SEQ ID NO: 614938 - RNA, 19 nt, Homo sapiens
  misc_RNA (1)...(19): siRNA sense strand
caaaucgaagcaggaauuc

SEQ ID NO: 614939 - RNA, 19 nt, Homo sapiens
  misc_RNA (1)...(19): siRNA sense strand
gaagaugaugaacuaaagc

SEQ ID NO: 614940 - RNA, 19 nt, Homo sapiens
  misc_RNA (1)...(19): siRNA sense strand
gcaccacgcugaaggauga

SEQ ID NO: 614941 - RNA, 19 nt, Homo sapiens
  misc_RNA (1)...(19): siRNA sense strand
ggacaaaacuuccaagauu

SEQ ID NO: 614942 - RNA, 19 nt, Homo sapiens
  misc_RNA (1)...(19): siRNA sense strand
ggaaagugcgucauccuaa

SEQ ID NO: 614943 - RNA, 19 nt, Homo sapiens
  misc_RNA (1)...(19): siRNA sense strand
guaaaucgauccagugucu

SEQ ID NO: 614944 - RNA, 19 nt, Homo sapiens
  misc_RNA (1)...(19): siRNA sense strand
caucaagggucacaguaaa

SEQ ID NO: 614945 - RNA, 19 nt, Homo sapiens
  misc_RNA (1)...(19): siRNA sense strand
gaaagugcgucauccuaag

SEQ ID NO: 614946 - RNA, 19 nt, Homo sapiens
  misc_RNA (1)...(19): siRNA sense strand
gcaagguggucacaguguu

SEQ ID NO: 614947 - RNA, 19 nt, Homo sapiens
  misc_RNA (1)...(19): siRNA sense strand
ggugggauuuacgcaauua

SEQ ID NO: 614948 - RNA, 19 nt, Homo sapiens
  misc_RNA (1)...(19): siRNA sense strand
gcagaaggagcaccuguug

SEQ ID NO: 614949 - RNA, 19 nt, Homo sapiens
  misc_RNA (1)...(19): siRNA sense strand
aggagcaccuguugaagua

SEQ ID NO: 614950 - RNA, 19 nt, Homo sapiens
  misc_RNA (1)...(19): siRNA sense strand
gaccacagccgcuuuguca

SEQ ID NO: 614951 - RNA, 19 nt, Homo sapiens
  misc_RNA (1)...(19): siRNA sense strand
gaaggaagggagaaguuug

SEQ ID NO: 614952 - RNA, 19 nt, Homo sapiens
  misc_RNA (1)...(19): siRNA sense strand
ggaaggaagggagaaguuu

SEQ ID NO: 614953 - RNA, 19 nt, Homo sapiens
  misc_RNA (1)...(19): siRNA sense strand
gagcaccuguugaaguaug

SEQ ID NO: 614954 - RNA, 19 nt, Homo sapiens
  misc_RNA (1)...(19): siRNA sense strand
gacaaaacuuccaagauuu

SEQ ID NO: 614955 - RNA, 19 nt, Homo sapiens
  misc_RNA (1)...(19): siRNA sense strand
gcggcaaguccuacauuua

SEQ ID NO: 614956 - RNA, 19 nt, Homo sapiens
  misc_RNA (1)...(19): siRNA sense strand
ggauuuacgcaauuaguug

SEQ ID NO: 614957 - RNA, 19 nt, Homo sapiens
  misc_RNA (1)...(19): siRNA sense strand
ggacuacagcggacaagga

SEQ ID NO: 614958 - RNA, 19 nt, Homo sapiens
  misc_RNA (1)...(19): siRNA sense strand
acacagagcacgcccauca

SEQ ID NO: 614959 - RNA, 19 nt, Homo sapiens
  misc_RNA (1)...(19): siRNA sense strand
agaaggagcaccuguugaa

SEQ ID NO: 614960 - RNA, 19 nt, Homo sapiens
  misc_RNA (1)...(19): siRNA sense strand
ggcggcaaguccuacauuu

SEQ ID NO: 614961 - RNA, 19 nt, Homo sapiens
  misc_RNA (1)...(19): siRNA sense strand
gauuacaggacacaacaaa

SEQ ID NO: 614962 - RNA, 19 nt, Homo sapiens
  misc_RNA (1)...(19): siRNA sense strand
agacauugcuuggacugaa

SEQ ID NO: 614963 - RNA, 19 nt, Homo sapiens
  misc_RNA (1)...(19): siRNA sense strand
gcagucuuccucugggaua

SEQ ID NO: 614964 - RNA, 19 nt, Homo sapiens
  misc_RNA (1)...(19): siRNA sense strand
ccagcaagguggucacagu

SEQ ID NO: 614965 - RNA, 19 nt, Homo sapiens
  misc_RNA (1)...(19): siRNA sense strand
ggaaaggccacacgaacca

SEQ ID NO: 614966 - RNA, 19 nt, Homo sapiens
  misc_RNA (1)...(19): siRNA sense strand
gagccacgacggacacauu

SEQ ID NO: 614967 - RNA, 19 nt, Homo sapiens
  misc_RNA (1)...(19): siRNA sense strand
gggaagaucaaagacauug

SEQ ID NO: 614968 - RNA, 19 nt, Homo sapiens
  misc_RNA (1)...(19): siRNA sense strand
ccacgggaagcgaugauaa

SEQ ID NO: 614969 - RNA, 19 nt, Homo sapiens
  misc_RNA (1)...(19): siRNA sense strand
ggacacaacaaagucauca

SEQ ID NO: 614970 - RNA, 19 nt, Homo sapiens
  misc_RNA (1)...(19): siRNA sense strand
gagauuacaggacacaaca

SEQ ID NO: 614971 - RNA, 19 nt, Homo sapiens
  misc_RNA (1)...(19): siRNA sense strand
cgaaccagguguccaggau

SEQ ID NO: 614972 - RNA, 19 nt, Homo sapiens
  misc_RNA (1)...(19): siRNA sense strand
gugcgauucucuccugaug

SEQ ID NO: 614973 - RNA, 19 nt, Homo sapiens
  misc_RNA (1)...(19): siRNA sense strand
gcuacgagcccgaaguugu

SEQ ID NO: 614974 - RNA, 19 nt, Homo sapiens
  misc_RNA (1)...(19): siRNA sense strand
gugcugacggccagauaua

SEQ ID NO: 614975 - RNA, 19 nt, Homo sapiens
  misc_RNA (1)...(19): siRNA sense strand
gggaaggaagggagaaguu

SEQ ID NO: 614976 - RNA, 19 nt, Homo sapiens
  misc_RNA (1)...(19): siRNA sense strand
cguacgagaucaagaaggu

SEQ ID NO: 614977 - RNA, 19 nt, Homo sapiens
  misc_RNA (1)...(19): siRNA sense strand
gggauuuacgcaauuaguu

SEQ ID NO: 614978 - RNA, 19 nt, Homo sapiens
  misc_RNA (1)...(19): siRNA sense strand
ccauucaaguucaaguuca

SEQ ID NO: 614979 - RNA, 19 nt, Homo sapiens
  misc_RNA (1)...(19): siRNA sense strand
aaccagguguccaggauga

SEQ ID NO: 614980 - RNA, 19 nt, Homo sapiens
  misc_RNA (1)...(19): siRNA sense strand
cacauuaauuacugggauu

SEQ ID NO: 614981 - RNA, 19 nt, Homo sapiens
  misc_RNA (1)...(19): siRNA sense strand
gcccagcggauucuacauu

SEQ ID NO: 614982 - RNA, 19 nt, Homo sapiens
  misc_RNA (1)...(19): siRNA sense strand
aagcugaggaucugggaua

SEQ ID NO: 614983 - RNA, 19 nt, Homo sapiens
  misc_RNA (1)...(19): siRNA sense strand
uugcugacaucuacacaga

SEQ ID NO: 614984 - RNA, 19 nt, Homo sapiens
  misc_RNA (1)...(19): siRNA sense strand
acgacggacacauuaauua

SEQ ID NO: 614985 - RNA, 19 nt, Homo sapiens
  misc_RNA (1)...(19): siRNA sense strand
ccggguacaucaacuaucu

SEQ ID NO: 614986 - RNA, 19 nt, Homo sapiens
  misc_RNA (1)...(19): siRNA sense strand
gggacacgguggcaauugg

SEQ ID NO: 614987 - RNA, 19 nt, Homo sapiens
  misc_RNA (1)...(19): siRNA sense strand
gcaacguccgccuguauuc

SEQ ID NO: 614988 - RNA, 19 nt, Homo sapiens
  misc_RNA (1)...(19): siRNA sense strand
gacauugcuuggacugaag

SEQ ID NO: 614989 - RNA, 19 nt, Homo sapiens
  misc_RNA (1)...(19): siRNA sense strand
ccacgacggacacauuaau

SEQ ID NO: 614990 - RNA, 19 nt, Homo sapiens
  misc_RNA (1)...(19): siRNA sense strand
caacagcguggacaucaag

SEQ ID NO: 614991 - RNA, 19 nt, Homo sapiens
  misc_RNA (1)...(19): siRNA sense strand
ucaacagcguggacaucaa

SEQ ID NO: 614992 - RNA, 19 nt, Homo sapiens
  misc_RNA (1)...(19): siRNA sense strand
acaacaaagucaucaacag

SEQ ID NO: 614993 - RNA, 19 nt, Homo sapiens
  misc_RNA (1)...(19): siRNA sense strand
cccagcggauucuacauug

SEQ ID NO: 614994 - RNA, 19 nt, Homo sapiens
  misc_RNA (1)...(19): siRNA sense strand
cuacagcggacaaggaguu

SEQ ID NO: 614995 - RNA, 19 nt, Homo sapiens
  misc_RNA (1)...(19): siRNA sense strand
uuacaggacacaacaaagu

SEQ ID NO: 614996 - RNA, 19 nt, Homo sapiens
  misc_RNA (1)...(19): siRNA sense strand
gaagaucaaagacauugcu

SEQ ID NO: 614997 - RNA, 19 nt, Homo sapiens
  misc_RNA (1)...(19): siRNA sense strand
ucaucaagggucacaguaa

SEQ ID NO: 614998 - RNA, 19 nt, Homo sapiens
  misc_RNA (1)...(19): siRNA sense strand
gggauaccacgcagaagga

SEQ ID NO: 614999 - RNA, 19 nt, Homo sapiens
  misc_RNA (1)...(19): siRNA sense strand
cgacggacacauuaauuac

SEQ ID NO: 615000 - RNA, 19 nt, Homo sapiens
  misc_RNA (1)...(19): siRNA sense strand
cuacauugccuccggagau

SEQ ID NO: 615001 - RNA, 19 nt, Homo sapiens
  misc_RNA (1)...(19): siRNA sense strand
ccaggaugaccguggauga

SEQ ID NO: 615002 - RNA, 19 nt, Homo sapiens
  misc_RNA (1)...(19): siRNA sense strand
ugaaggaucagaggaagug

SEQ ID NO: 615003 - RNA, 19 nt, Homo sapiens
  misc_RNA (1)...(19): siRNA sense strand
cggcaaguccuacauuuac

SEQ ID NO: 615004 - RNA, 19 nt, Homo sapiens
  misc_RNA (1)...(19): siRNA sense strand
gcuacucggagaacaaugu

SEQ ID NO: 615005 - RNA, 19 nt, Homo sapiens
  misc_RNA (1)...(19): siRNA sense strand
cgugugcauuggacagauu

SEQ ID NO: 615006 - RNA, 19 nt, Homo sapiens
  misc_RNA (1)...(19): siRNA sense strand
aaaucgauccagugucuga

SEQ ID NO: 615007 - RNA, 19 nt, Homo sapiens
  misc_RNA (1)...(19): siRNA sense strand
ugaccgacguggccuacuc

SEQ ID NO: 615008 - RNA, 19 nt, Homo sapiens
  misc_RNA (1)...(19): siRNA sense strand
ggcaacguccgccuguauu

SEQ ID NO: 615009 - RNA, 19 nt, Homo sapiens
  misc_RNA (1)...(19): siRNA sense strand
gaaggagcaccuguugaag

SEQ ID NO: 615010 - RNA, 19 nt, Homo sapiens
  misc_RNA (1)...(19): siRNA sense strand
ugucaacugugugcgauuc

SEQ ID NO: 615011 - RNA, 19 nt, Homo sapiens
  misc_RNA (1)...(19): siRNA sense strand
gggcaacaauuuucuguac

SEQ ID NO: 615012 - RNA, 19 nt, Homo sapiens
  misc_RNA (1)...(19): siRNA sense strand
caagguggucacaguguuc

SEQ ID NO: 615013 - RNA, 19 nt, Homo sapiens
  misc_RNA (1)...(19): siRNA sense strand
cuacgagcccgaaguugug

SEQ ID NO: 615014 - RNA, 19 nt, Homo sapiens
  misc_RNA (1)...(19): siRNA sense strand
uggaaagugcgucauccua

SEQ ID NO: 615015 - RNA, 19 nt, Homo sapiens
  misc_RNA (1)...(19): siRNA sense strand
acggacacauuaauuacug

SEQ ID NO: 615016 - RNA, 19 nt, Homo sapiens
  misc_RNA (1)...(19): siRNA sense strand
cugggaagaucaaagacau

SEQ ID NO: 615017 - RNA, 19 nt, Homo sapiens
  misc_RNA (1)...(19): siRNA sense strand
cagaaggagcaccuguuga

SEQ ID NO: 615018 - RNA, 19 nt, Homo sapiens
  misc_RNA (1)...(19): siRNA sense strand
uacauugccuccggagaug

SEQ ID NO: 615019 - RNA, 19 nt, Homo sapiens
  misc_RNA (1)...(19): siRNA sense strand
gcaaguccuacauuuacuc

SEQ ID NO: 615020 - RNA, 19 nt, Homo sapiens
  misc_RNA (1)...(19): siRNA sense strand
ggcaaguccuacauuuacu

SEQ ID NO: 615021 - RNA, 19 nt, Homo sapiens
  misc_RNA (1)...(19): siRNA sense strand
gcucuucugugggcgagau

SEQ ID NO: 615022 - RNA, 19 nt, Homo sapiens
  misc_RNA (1)...(19): siRNA sense strand
caauggaaagugcgucauc

SEQ ID NO: 615023 - RNA, 19 nt, Homo sapiens
  misc_RNA (1)...(19): siRNA sense strand
uuaauuacugggauucaga

SEQ ID NO: 615024 - RNA, 19 nt, Homo sapiens
  misc_RNA (1)...(19): siRNA sense strand
gaaggaccaccugcucagu

SEQ ID NO: 615025 - RNA, 19 nt, Homo sapiens
  misc_RNA (1)...(19): siRNA sense strand
gcugacggccagauauaca

SEQ ID NO: 615026 - RNA, 19 nt, Homo sapiens
  misc_RNA (1)...(19): siRNA sense strand
ccacagccgcuuugucaac

SEQ ID NO: 615027 - RNA, 19 nt, Homo sapiens
  misc_RNA (1)...(19): siRNA sense strand
cagccgcuuugucaacugu

SEQ ID NO: 615028 - RNA, 19 nt, Homo sapiens
  misc_RNA (1)...(19): siRNA sense strand
cggcaacguccgccuguau

SEQ ID NO: 615029 - RNA, 19 nt, Homo sapiens
  misc_RNA (1)...(19): siRNA sense strand
cacgacggacacauuaauu

SEQ ID NO: 615030 - RNA, 19 nt, Homo sapiens
  misc_RNA (1)...(19): siRNA sense strand
gggauaguggcucuucugu

SEQ ID NO: 615031 - RNA, 19 nt, Homo sapiens
  misc_RNA (1)...(19): siRNA sense strand
caguaaaucgauccagugu

SEQ ID NO: 615032 - RNA, 19 nt, Homo sapiens
  misc_RNA (1)...(19): siRNA sense strand
ucaagggucacaguaaauc

SEQ ID NO: 615033 - RNA, 19 nt, Homo sapiens
  misc_RNA (1)...(19): siRNA sense strand
gcaccacgcugaaggauga

SEQ ID NO: 615034 - RNA, 19 nt, Homo sapiens
  misc_RNA (1)...(19): siRNA sense strand
ggacaaaacuuccaagauu

SEQ ID NO: 615035 - RNA, 19 nt, Homo sapiens
  misc_RNA (1)...(19): siRNA sense strand
ggaaagugcgucauccuaa

SEQ ID NO: 615036 - RNA, 19 nt, Homo sapiens
  misc_RNA (1)...(19): siRNA sense strand
guaaaucgauccagugucu

SEQ ID NO: 615037 - RNA, 19 nt, Homo sapiens
  misc_RNA (1)...(19): siRNA sense strand
caucaagggucacaguaaa

SEQ ID NO: 615038 - RNA, 19 nt, Homo sapiens
  misc_RNA (1)...(19): siRNA sense strand
gaaagugcgucauccuaag

SEQ ID NO: 615039 - RNA, 19 nt, Homo sapiens
  misc_RNA (1)...(19): siRNA sense strand
gcaagguggucacaguguu

SEQ ID NO: 615040 - RNA, 19 nt, Homo sapiens
  misc_RNA (1)...(19): siRNA sense strand
ggugggauuuacgcaauua

SEQ ID NO: 615041 - RNA, 19 nt, Homo sapiens
  misc_RNA (1)...(19): siRNA sense strand
gcagaaggagcaccuguug

SEQ ID NO: 615042 - RNA, 19 nt, Homo sapiens
  misc_RNA (1)...(19): siRNA sense strand
aggagcaccuguugaagua

SEQ ID NO: 615043 - RNA, 19 nt, Homo sapiens
  misc_RNA (1)...(19): siRNA sense strand
gaccacagccgcuuuguca

SEQ ID NO: 615044 - RNA, 19 nt, Homo sapiens
  misc_RNA (1)...(19): siRNA sense strand
gaaggaagggagaaguuug

SEQ ID NO: 615045 - RNA, 19 nt, Homo sapiens
  misc_RNA (1)...(19): siRNA sense strand
ggaaggaagggagaaguuu

SEQ ID NO: 615046 - RNA, 19 nt, Homo sapiens
  misc_RNA (1)...(19): siRNA sense strand
gagcaccuguugaaguaug

SEQ ID NO: 615047 - RNA, 19 nt, Homo sapiens
  misc_RNA (1)...(19): siRNA sense strand
gacaaaacuuccaagauuu

SEQ ID NO: 615048 - RNA, 19 nt, Homo sapiens
  misc_RNA (1)...(19): siRNA sense strand
gcggcaaguccuacauuua

SEQ ID NO: 615049 - RNA, 19 nt, Homo sapiens
  misc_RNA (1)...(19): siRNA sense strand
ggauuuacgcaauuaguug

SEQ ID NO: 615050 - RNA, 19 nt, Homo sapiens
  misc_RNA (1)...(19): siRNA sense strand
ggacuacagcggacaagga

SEQ ID NO: 615051 - RNA, 19 nt, Homo sapiens
  misc_RNA (1)...(19): siRNA sense strand
acacagagcacgcccauca

SEQ ID NO: 615052 - RNA, 19 nt, Homo sapiens
  misc_RNA (1)...(19): siRNA sense strand
agaaggagcaccuguugaa

SEQ ID NO: 615053 - RNA, 19 nt, Homo sapiens
  misc_RNA (1)...(19): siRNA sense strand
ggcggcaaguccuacauuu

SEQ ID NO: 615054 - RNA, 19 nt, Homo sapiens
  misc_RNA (1)...(19): siRNA sense strand
gauuacaggacacaacaaa

SEQ ID NO: 615055 - RNA, 19 nt, Homo sapiens
  misc_RNA (1)...(19): siRNA sense strand
agacauugcuuggacugaa

SEQ ID NO: 615056 - RNA, 19 nt, Homo sapiens
  misc_RNA (1)...(19): siRNA sense strand
gcagucuuccucugggaua

SEQ ID NO: 615057 - RNA, 19 nt, Homo sapiens
  misc_RNA (1)...(19): siRNA sense strand
ccagcaagguggucacagu

SEQ ID NO: 615058 - RNA, 19 nt, Homo sapiens
  misc_RNA (1)...(19): siRNA sense strand
ggaaaggccacacgaacca

SEQ ID NO: 615059 - RNA, 19 nt, Homo sapiens
  misc_RNA (1)...(19): siRNA sense strand
gagccacgacggacacauu

SEQ ID NO: 615060 - RNA, 19 nt, Homo sapiens
  misc_RNA (1)...(19): siRNA sense strand
gggaagaucaaagacauug

SEQ ID NO: 615061 - RNA, 19 nt, Homo sapiens
  misc_RNA (1)...(19): siRNA sense strand
ccacgggaagcgaugauaa

SEQ ID NO: 615062 - RNA, 19 nt, Homo sapiens
  misc_RNA (1)...(19): siRNA sense strand
ggacacaacaaagucauca

SEQ ID NO: 615063 - RNA, 19 nt, Homo sapiens
  misc_RNA (1)...(19): siRNA sense strand
gagauuacaggacacaaca

SEQ ID NO: 615064 - RNA, 19 nt, Homo sapiens
  misc_RNA (1)...(19): siRNA sense strand
cgaaccagguguccaggau

SEQ ID NO: 615065 - RNA, 19 nt, Homo sapiens
  misc_RNA (1)...(19): siRNA sense strand
gugcgauucucuccugaug

SEQ ID NO: 615066 - RNA, 19 nt, Homo sapiens
  misc_RNA (1)...(19): siRNA sense strand
gcuacgagcccgaaguugu

SEQ ID NO: 615067 - RNA, 19 nt, Homo sapiens
  misc_RNA (1)...(19): siRNA sense strand
gugcugacggccagauaua

SEQ ID NO: 615068 - RNA, 19 nt, Homo sapiens
  misc_RNA (1)...(19): siRNA sense strand
gggaaggaagggagaaguu

SEQ ID NO: 615069 - RNA, 19 nt, Homo sapiens
  misc_RNA (1)...(19): siRNA sense strand
cguacgagaucaagaaggu

SEQ ID NO: 615070 - RNA, 19 nt, Homo sapiens
  misc_RNA (1)...(19): siRNA sense strand
gggauuuacgcaauuaguu

SEQ ID NO: 615071 - RNA, 19 nt, Homo sapiens
  misc_RNA (1)...(19): siRNA sense strand
ccauucaaguucaaguuca

SEQ ID NO: 615072 - RNA, 19 nt, Homo sapiens
  misc_RNA (1)...(19): siRNA sense strand
aaccagguguccaggauga

SEQ ID NO: 615073 - RNA, 19 nt, Homo sapiens
  misc_RNA (1)...(19): siRNA sense strand
cacauuaauuacugggauu

SEQ ID NO: 615074 - RNA, 19 nt, Homo sapiens
  misc_RNA (1)...(19): siRNA sense strand
gcccagcggauucuacauu

SEQ ID NO: 615075 - RNA, 19 nt, Homo sapiens
  misc_RNA (1)...(19): siRNA sense strand
aagcugaggaucugggaua

SEQ ID NO: 615076 - RNA, 19 nt, Homo sapiens
  misc_RNA (1)...(19): siRNA sense strand
uugcugacaucuacacaga

SEQ ID NO: 615077 - RNA, 19 nt, Homo sapiens
  misc_RNA (1)...(19): siRNA sense strand
acgacggacacauuaauua

SEQ ID NO: 615078 - RNA, 19 nt, Homo sapiens
  misc_RNA (1)...(19): siRNA sense strand
ccggguacaucaacuaucu

SEQ ID NO: 615079 - RNA, 19 nt, Homo sapiens
  misc_RNA (1)...(19): siRNA sense strand
gggacacgguggcaauugg

SEQ ID NO: 615080 - RNA, 19 nt, Homo sapiens
  misc_RNA (1)...(19): siRNA sense strand
gcaacguccgccuguauuc

SEQ ID NO: 615081 - RNA, 19 nt, Homo sapiens
  misc_RNA (1)...(19): siRNA sense strand
gacauugcuuggacugaag

SEQ ID NO: 615082 - RNA, 19 nt, Homo sapiens
  misc_RNA (1)...(19): siRNA sense strand
ccacgacggacacauuaau

SEQ ID NO: 615083 - RNA, 19 nt, Homo sapiens
  misc_RNA (1)...(19): siRNA sense strand
caacagcguggacaucaag

SEQ ID NO: 615084 - RNA, 19 nt, Homo sapiens
  misc_RNA (1)...(19): siRNA sense strand
ucaacagcguggacaucaa

SEQ ID NO: 615085 - RNA, 19 nt, Homo sapiens
  misc_RNA (1)...(19): siRNA sense strand
acaacaaagucaucaacag

SEQ ID NO: 615086 - RNA, 19 nt, Homo sapiens
  misc_RNA (1)...(19): siRNA sense strand
cccagcggauucuacauug

SEQ ID NO: 615087 - RNA, 19 nt, Homo sapiens
  misc_RNA (1)...(19): siRNA sense strand
cuacagcggacaaggaguu

SEQ ID NO: 615088 - RNA, 19 nt, Homo sapiens
  misc_RNA (1)...(19): siRNA sense strand
uuacaggacacaacaaagu

SEQ ID NO: 615089 - RNA, 19 nt, Homo sapiens
  misc_RNA (1)...(19): siRNA sense strand
gaagaucaaagacauugcu

SEQ ID NO: 615090 - RNA, 19 nt, Homo sapiens
  misc_RNA (1)...(19): siRNA sense strand
ucaucaagggucacaguaa

SEQ ID NO: 615091 - RNA, 19 nt, Homo sapiens
  misc_RNA (1)...(19): siRNA sense strand
gggauaccacgcagaagga

SEQ ID NO: 615092 - RNA, 19 nt, Homo sapiens
  misc_RNA (1)...(19): siRNA sense strand
cgacggacacauuaauuac

SEQ ID NO: 615093 - RNA, 19 nt, Homo sapiens
  misc_RNA (1)...(19): siRNA sense strand
cuacauugccuccggagau

SEQ ID NO: 615094 - RNA, 19 nt, Homo sapiens
  misc_RNA (1)...(19): siRNA sense strand
ccaggaugaccguggauga

SEQ ID NO: 615095 - RNA, 19 nt, Homo sapiens
  misc_RNA (1)...(19): siRNA sense strand
ugaaggaucagaggaagug

SEQ ID NO: 615096 - RNA, 19 nt, Homo sapiens
  misc_RNA (1)...(19): siRNA sense strand
cggcaaguccuacauuuac

SEQ ID NO: 615097 - RNA, 19 nt, Homo sapiens
  misc_RNA (1)...(19): siRNA sense strand
gcuacucggagaacaaugu

SEQ ID NO: 615098 - RNA, 19 nt, Homo sapiens
  misc_RNA (1)...(19): siRNA sense strand
cgugugcauuggacagauu

SEQ ID NO: 615099 - RNA, 19 nt, Homo sapiens
  misc_RNA (1)...(19): siRNA sense strand
aaaucgauccagugucuga

SEQ ID NO: 615100 - RNA, 19 nt, Homo sapiens
  misc_RNA (1)...(19): siRNA sense strand
ugaccgacguggccuacuc

SEQ ID NO: 615101 - RNA, 19 nt, Homo sapiens
  misc_RNA (1)...(19): siRNA sense strand
ggcaacguccgccuguauu

SEQ ID NO: 615102 - RNA, 19 nt, Homo sapiens
  misc_RNA (1)...(19): siRNA sense strand
gaaggagcaccuguugaag

SEQ ID NO: 615103 - RNA, 19 nt, Homo sapiens
  misc_RNA (1)...(19): siRNA sense strand
ugucaacugugugcgauuc

SEQ ID NO: 615104 - RNA, 19 nt, Homo sapiens
  misc_RNA (1)...(19): siRNA sense strand
gggcaacaauuuucuguac

SEQ ID NO: 615105 - RNA, 19 nt, Homo sapiens
  misc_RNA (1)...(19): siRNA sense strand
caagguggucacaguguuc

SEQ ID NO: 615106 - RNA, 19 nt, Homo sapiens
  misc_RNA (1)...(19): siRNA sense strand
cuacgagcccgaaguugug

SEQ ID NO: 615107 - RNA, 19 nt, Homo sapiens
  misc_RNA (1)...(19): siRNA sense strand
uggaaagugcgucauccua

SEQ ID NO: 615108 - RNA, 19 nt, Homo sapiens
  misc_RNA (1)...(19): siRNA sense strand
acggacacauuaauuacug

SEQ ID NO: 615109 - RNA, 19 nt, Homo sapiens
  misc_RNA (1)...(19): siRNA sense strand
cugggaagaucaaagacau

SEQ ID NO: 615110 - RNA, 19 nt, Homo sapiens
  misc_RNA (1)...(19): siRNA sense strand
cagaaggagcaccuguuga

SEQ ID NO: 615111 - RNA, 19 nt, Homo sapiens
  misc_RNA (1)...(19): siRNA sense strand
uacauugccuccggagaug

SEQ ID NO: 615112 - RNA, 19 nt, Homo sapiens
  misc_RNA (1)...(19): siRNA sense strand
gcaaguccuacauuuacuc

SEQ ID NO: 615113 - RNA, 19 nt, Homo sapiens
  misc_RNA (1)...(19): siRNA sense strand
ggcaaguccuacauuuacu

SEQ ID NO: 615114 - RNA, 19 nt, Homo sapiens
  misc_RNA (1)...(19): siRNA sense strand
gcucuucugugggcgagau

SEQ ID NO: 615115 - RNA, 19 nt, Homo sapiens
  misc_RNA (1)...(19): siRNA sense strand
caauggaaagugcgucauc

SEQ ID NO: 615116 - RNA, 19 nt, Homo sapiens
  misc_RNA (1)...(19): siRNA sense strand
uuaauuacugggauucaga

SEQ ID NO: 615117 - RNA, 19 nt, Homo sapiens
  misc_RNA (1)...(19): siRNA sense strand
gaaggaccaccugcucagu

SEQ ID NO: 615118 - RNA, 19 nt, Homo sapiens
  misc_RNA (1)...(19): siRNA sense strand
gcugacggccagauauaca

SEQ ID NO: 615119 - RNA, 19 nt, Homo sapiens
  misc_RNA (1)...(19): siRNA sense strand
ccacagccgcuuugucaac

SEQ ID NO: 615120 - RNA, 19 nt, Homo sapiens
  misc_RNA (1)...(19): siRNA sense strand
cagccgcuuugucaacugu

SEQ ID NO: 615121 - RNA, 19 nt, Homo sapiens
  misc_RNA (1)...(19): siRNA sense strand
cggcaacguccgccuguau

SEQ ID NO: 615122 - RNA, 19 nt, Homo sapiens
  misc_RNA (1)...(19): siRNA sense strand
cacgacggacacauuaauu

SEQ ID NO: 615123 - RNA, 19 nt, Homo sapiens
  misc_RNA (1)...(19): siRNA sense strand
gggauaguggcucuucugu

SEQ ID NO: 615124 - RNA, 19 nt, Homo sapiens
  misc_RNA (1)...(19): siRNA sense strand
caguaaaucgauccagugu

SEQ ID NO: 615125 - RNA, 19 nt, Homo sapiens
  misc_RNA (1)...(19): siRNA sense strand
ucaagggucacaguaaauc

SEQ ID NO: 615126 - RNA, 19 nt, Homo sapiens
  misc_RNA (1)...(19): siRNA sense strand
guacauagcacaguucuuu

SEQ ID NO: 615127 - RNA, 19 nt, Homo sapiens
  misc_RNA (1)...(19): siRNA sense strand
guaaagaucagaccucaaa

SEQ ID NO: 615128 - RNA, 19 nt, Homo sapiens
  misc_RNA (1)...(19): siRNA sense strand
ccacaaaguuuccagaugu

SEQ ID NO: 615129 - RNA, 19 nt, Homo sapiens
  misc_RNA (1)...(19): siRNA sense strand
ggacucaccuaccaaacaa

SEQ ID NO: 615130 - RNA, 19 nt, Homo sapiens
  misc_RNA (1)...(19): siRNA sense strand
ucaaauggcuauagcaugu

SEQ ID NO: 615131 - RNA, 19 nt, Homo sapiens
  misc_RNA (1)...(19): siRNA sense strand
gcacaguucuuuaaaauuc

SEQ ID NO: 615132 - RNA, 19 nt, Homo sapiens
  misc_RNA (1)...(19): siRNA sense strand
ugacaaaguacgugugaua

SEQ ID NO: 615133 - RNA, 19 nt, Homo sapiens
  misc_RNA (1)...(19): siRNA sense strand
caaacaacuuucugucguu

SEQ ID NO: 615134 - RNA, 19 nt, Homo sapiens
  misc_RNA (1)...(19): siRNA sense strand
ugauaacccuggugaagaa

SEQ ID NO: 615135 - RNA, 19 nt, Homo sapiens
  misc_RNA (1)...(19): siRNA sense strand
acaaauggguaaagaccua

SEQ ID NO: 615136 - RNA, 19 nt, Homo sapiens
  misc_RNA (1)...(19): siRNA sense strand
gagauccugcguucacuua

SEQ ID NO: 615137 - RNA, 19 nt, Homo sapiens
  misc_RNA (1)...(19): siRNA sense strand
ggcauuugauguagaacua

SEQ ID NO: 615138 - RNA, 19 nt, Homo sapiens
  misc_RNA (1)...(19): siRNA sense strand
gaaauauggaagugacaaa

SEQ ID NO: 615139 - RNA, 19 nt, Homo sapiens
  misc_RNA (1)...(19): siRNA sense strand
caacuggacagaaauugaa

SEQ ID NO: 615140 - RNA, 19 nt, Homo sapiens
  misc_RNA (1)...(19): siRNA sense strand
gauccugcguucacuuaug

SEQ ID NO: 615141 - RNA, 19 nt, Homo sapiens
  misc_RNA (1)...(19): siRNA sense strand
auauggaagugacaaagua

SEQ ID NO: 615142 - RNA, 19 nt, Homo sapiens
  misc_RNA (1)...(19): siRNA sense strand
gccaaaggccagaaagaaa

SEQ ID NO: 615143 - RNA, 19 nt, Homo sapiens
  misc_RNA (1)...(19): siRNA sense strand
gaacgaugggcauuugaug

SEQ ID NO: 615144 - RNA, 19 nt, Homo sapiens
  misc_RNA (1)...(19): siRNA sense strand
guacucuucucauguaugg

SEQ ID NO: 615145 - RNA, 19 nt, Homo sapiens
  misc_RNA (1)...(19): siRNA sense strand
uuccagauguugagaaauu

SEQ ID NO: 615146 - RNA, 19 nt, Homo sapiens
  misc_RNA (1)...(19): siRNA sense strand
gaugauggcaguaaagauc

SEQ ID NO: 615147 - RNA, 19 nt, Homo sapiens
  misc_RNA (1)...(19): siRNA sense strand
ugauggagccacaaaguuu

SEQ ID NO: 615148 - RNA, 19 nt, Homo sapiens
  misc_RNA (1)...(19): siRNA sense strand
gaaacuuuacccagcauau

SEQ ID NO: 615149 - RNA, 19 nt, Homo sapiens
  misc_RNA (1)...(19): siRNA sense strand
gaagugauaguaguugaug

SEQ ID NO: 615150 - RNA, 19 nt, Homo sapiens
  misc_RNA (1)...(19): siRNA sense strand
gacaaaguacgugugauaa

SEQ ID NO: 615151 - RNA, 19 nt, Homo sapiens
  misc_RNA (1)...(19): siRNA sense strand
gaagagacagaaacgagau

SEQ ID NO: 615152 - RNA, 19 nt, Homo sapiens
  misc_RNA (1)...(19): siRNA sense strand
uauacgacuucgauauuug

SEQ ID NO: 615153 - RNA, 19 nt, Homo sapiens
  misc_RNA (1)...(19): siRNA sense strand
caguguggguucaaauuau

SEQ ID NO: 615154 - RNA, 19 nt, Homo sapiens
  misc_RNA (1)...(19): siRNA sense strand
gcgauuagaauggguauau

SEQ ID NO: 615155 - RNA, 19 nt, Homo sapiens
  misc_RNA (1)...(19): siRNA sense strand
gacaugaagaagagaaauu

SEQ ID NO: 615156 - RNA, 19 nt, Homo sapiens
  misc_RNA (1)...(19): siRNA sense strand
gccacaaaguuuccagaug

SEQ ID NO: 615157 - RNA, 19 nt, Homo sapiens
  misc_RNA (1)...(19): siRNA sense strand
guugaacgaugggcauuug

SEQ ID NO: 615158 - RNA, 19 nt, Homo sapiens
  misc_RNA (1)...(19): siRNA sense strand
gaaaaggggcuaaaugauc

SEQ ID NO: 615159 - RNA, 19 nt, Homo sapiens
  misc_RNA (1)...(19): siRNA sense strand
caauugcucagcguucuua

SEQ ID NO: 615160 - RNA, 19 nt, Homo sapiens
  misc_RNA (1)...(19): siRNA sense strand
ucaccuaccaaacaacuuu

SEQ ID NO: 615161 - RNA, 19 nt, Homo sapiens
  misc_RNA (1)...(19): siRNA sense strand
gaugggcauuugauguaga

SEQ ID NO: 615162 - RNA, 19 nt, Homo sapiens
  misc_RNA (1)...(19): siRNA sense strand
acaguguggguucaaauua

SEQ ID NO: 615163 - RNA, 19 nt, Homo sapiens
  misc_RNA (1)...(19): siRNA sense strand
caaaguuuccagauguuga

SEQ ID NO: 615164 - RNA, 19 nt, Homo sapiens
  misc_RNA (1)...(19): siRNA sense strand
cacaaaguuuccagauguu

SEQ ID NO: 615165 - RNA, 19 nt, Homo sapiens
  misc_RNA (1)...(19): siRNA sense strand
cuacagccuuggccuaauc

SEQ ID NO: 615166 - RNA, 19 nt, Homo sapiens
  misc_RNA (1)...(19): siRNA sense strand
cgauuagaauggguauauu

SEQ ID NO: 615167 - RNA, 19 nt, Homo sapiens
  misc_RNA (1)...(19): siRNA sense strand
gagcaaacucggaaaauga

SEQ ID NO: 615168 - RNA, 19 nt, Homo sapiens
  misc_RNA (1)...(19): siRNA sense strand
acauagcacaguucuuuaa

SEQ ID NO: 615169 - RNA, 19 nt, Homo sapiens
  misc_RNA (1)...(19): siRNA sense strand
ugauuuccaucguugcauu

SEQ ID NO: 615170 - RNA, 19 nt, Homo sapiens
  misc_RNA (1)...(19): siRNA sense strand
uccguacucuucucaugua

SEQ ID NO: 615171 - RNA, 19 nt, Homo sapiens
  misc_RNA (1)...(19): siRNA sense strand
caaaguacgugugauaacc

SEQ ID NO: 615172 - RNA, 19 nt, Homo sapiens
  misc_RNA (1)...(19): siRNA sense strand
gcagcccucguacugauuu

SEQ ID NO: 615173 - RNA, 19 nt, Homo sapiens
  misc_RNA (1)...(19): siRNA sense strand
uuucaucucuacacguuga

SEQ ID NO: 615174 - RNA, 19 nt, Homo sapiens
  misc_RNA (1)...(19): siRNA sense strand
ugagcuaucuagagaagag

SEQ ID NO: 615175 - RNA, 19 nt, Homo sapiens
  misc_RNA (1)...(19): siRNA sense strand
gaucucgagcucauuuaga

SEQ ID NO: 615176 - RNA, 19 nt, Homo sapiens
  misc_RNA (1)...(19): siRNA sense strand
aaagguggagcgauuagaa

SEQ ID NO: 615177 - RNA, 19 nt, Homo sapiens
  misc_RNA (1)...(19): siRNA sense strand
uauggcagaugcugaugga

SEQ ID NO: 615178 - RNA, 19 nt, Homo sapiens
  misc_RNA (1)...(19): siRNA sense strand
cauagcacaguucuuuaaa

SEQ ID NO: 615179 - RNA, 19 nt, Homo sapiens
  misc_RNA (1)...(19): siRNA sense strand
uccagauguugagaaauua

SEQ ID NO: 615180 - RNA, 19 nt, Homo sapiens
  misc_RNA (1)...(19): siRNA sense strand
ggugaagaaucguggaaaa

SEQ ID NO: 615181 - RNA, 19 nt, Homo sapiens
  misc_RNA (1)...(19): siRNA sense strand
ggaaaagguggagcgauua

SEQ ID NO: 615182 - RNA, 19 nt, Homo sapiens
  misc_RNA (1)...(19): siRNA sense strand
gccuuggccuaaucaaaug

SEQ ID NO: 615183 - RNA, 19 nt, Homo sapiens
  misc_RNA (1)...(19): siRNA sense strand
gugauaacccuggugaaga

SEQ ID NO: 615184 - RNA, 19 nt, Homo sapiens
  misc_RNA (1)...(19): siRNA sense strand
ccgcagcccucguacugau

SEQ ID NO: 615185 - RNA, 19 nt, Homo sapiens
  misc_RNA (1)...(19): siRNA sense strand
aguguggguucaaauuauu

SEQ ID NO: 615186 - RNA, 19 nt, Homo sapiens
  misc_RNA (1)...(19): siRNA sense strand
ccaaaggccagaaagaaac

SEQ ID NO: 615187 - RNA, 19 nt, Homo sapiens
  misc_RNA (1)...(19): siRNA sense strand
acgaugggcauuugaugua

SEQ ID NO: 615188 - RNA, 19 nt, Homo sapiens
  misc_RNA (1)...(19): siRNA sense strand
gggacucaccuaccaaaca

SEQ ID NO: 615189 - RNA, 19 nt, Homo sapiens
  misc_RNA (1)...(19): siRNA sense strand
ggaaucagggacacacagu

SEQ ID NO: 615190 - RNA, 19 nt, Homo sapiens
  misc_RNA (1)...(19): siRNA sense strand
uuucuggugugguuccuuu

SEQ ID NO: 615191 - RNA, 19 nt, Homo sapiens
  misc_RNA (1)...(19): siRNA sense strand
gaagaaucguggaaaaggu

SEQ ID NO: 615192 - RNA, 19 nt, Homo sapiens
  misc_RNA (1)...(19): siRNA sense strand
cuuaugaagugauaguagu

SEQ ID NO: 615193 - RNA, 19 nt, Homo sapiens
  misc_RNA (1)...(19): siRNA sense strand
ggcuacaaauggguaaaga

SEQ ID NO: 615194 - RNA, 19 nt, Homo sapiens
  misc_RNA (1)...(19): siRNA sense strand
uucuggagcuggcuacaaa

SEQ ID NO: 615195 - RNA, 19 nt, Homo sapiens
  misc_RNA (1)...(19): siRNA sense strand
guggaucucgagcucauuu

SEQ ID NO: 615196 - RNA, 19 nt, Homo sapiens
  misc_RNA (1)...(19): siRNA sense strand
uagaaaaggggcuaaauga

SEQ ID NO: 615197 - RNA, 19 nt, Homo sapiens
  misc_RNA (1)...(19): siRNA sense strand
gauggagccacaaaguuuc

SEQ ID NO: 615198 - RNA, 19 nt, Homo sapiens
  misc_RNA (1)...(19): siRNA sense strand
uggaaaagguggagcgauu

SEQ ID NO: 615199 - RNA, 19 nt, Homo sapiens
  misc_RNA (1)...(19): siRNA sense strand
ccaucgacaugaagaagag

SEQ ID NO: 615200 - RNA, 19 nt, Homo sapiens
  misc_RNA (1)...(19): siRNA sense strand
gcugauggagccacaaagu

SEQ ID NO: 615201 - RNA, 19 nt, Homo sapiens
  misc_RNA (1)...(19): siRNA sense strand
gcauuuacaacugcuacaa

SEQ ID NO: 615202 - RNA, 19 nt, Homo sapiens
  misc_RNA (1)...(19): siRNA sense strand
ccuggaggcuugagcaaac

SEQ ID NO: 615203 - RNA, 19 nt, Homo sapiens
  misc_RNA (1)...(19): siRNA sense strand
cuaaucaaauggcuauagc

SEQ ID NO: 615204 - RNA, 19 nt, Homo sapiens
  misc_RNA (1)...(19): siRNA sense strand
ugccugugaugauggauga

SEQ ID NO: 615205 - RNA, 19 nt, Homo sapiens
  misc_RNA (1)...(19): siRNA sense strand
uacauagcacaguucuuua

SEQ ID NO: 615206 - RNA, 19 nt, Homo sapiens
  misc_RNA (1)...(19): siRNA sense strand
ggccuaaucaaauggcuau

SEQ ID NO: 615207 - RNA, 19 nt, Homo sapiens
  misc_RNA (1)...(19): siRNA sense strand
cauuuacaacugcuacaaa

SEQ ID NO: 615208 - RNA, 19 nt, Homo sapiens
  misc_RNA (1)...(19): siRNA sense strand
aaaaggggcuaaaugaucu

SEQ ID NO: 615209 - RNA, 19 nt, Homo sapiens
  misc_RNA (1)...(19): siRNA sense strand
ucugagcuaucuagagaag

SEQ ID NO: 615210 - RNA, 19 nt, Homo sapiens
  misc_RNA (1)...(19): siRNA sense strand
cauguauggguuccacuuu

SEQ ID NO: 615211 - RNA, 19 nt, Homo sapiens
  misc_RNA (1)...(19): siRNA sense strand
gauuuccaucguugcauuu

SEQ ID NO: 615212 - RNA, 19 nt, Homo sapiens
  misc_RNA (1)...(19): siRNA sense strand
ggagaaaagauccuuaugg

SEQ ID NO: 615213 - RNA, 19 nt, Homo sapiens
  misc_RNA (1)...(19): siRNA sense strand
ggcuauagcauguggaucu

SEQ ID NO: 615214 - RNA, 19 nt, Homo sapiens
  misc_RNA (1)...(19): siRNA sense strand
uaacccuggugaagaaucg

SEQ ID NO: 615215 - RNA, 19 nt, Homo sapiens
  misc_RNA (1)...(19): siRNA sense strand
cguacugauuuccaucguu

SEQ ID NO: 615216 - RNA, 19 nt, Homo sapiens
  misc_RNA (1)...(19): siRNA sense strand
aaacuuuacccagcauaug

SEQ ID NO: 615217 - RNA, 19 nt, Homo sapiens
  misc_RNA (1)...(19): siRNA sense strand
ugccaaaggccagaaagaa

SEQ ID NO: 615218 - RNA, 19 nt, Homo sapiens
  misc_RNA (1)...(19): siRNA sense strand
auccugcguucacuuauga

SEQ ID NO: 615219 - RNA, 19 nt, Homo sapiens
  misc_RNA (1)...(19): siRNA sense strand
cuaccaaacaacuuucugu

SEQ ID NO: 615220 - RNA, 19 nt, Homo sapiens
  misc_RNA (1)...(19): siRNA sense strand
cgaugggcauuugauguag

SEQ ID NO: 615221 - RNA, 19 nt, Homo sapiens
  misc_RNA (1)...(19): siRNA sense strand
uguauggguuccacuuucu

SEQ ID NO: 615222 - RNA, 19 nt, Homo sapiens
  misc_RNA (1)...(19): siRNA sense strand
ggaucucgagcucauuuag

SEQ ID NO: 615223 - RNA, 19 nt, Homo sapiens
  misc_RNA (1)...(19): siRNA sense strand
cagccuuggccuaaucaaa

SEQ ID NO: 615224 - RNA, 19 nt, Homo sapiens
  misc_RNA (1)...(19): siRNA sense strand
gcacuccaucgacaugaag

SEQ ID NO: 615225 - RNA, 19 nt, Homo sapiens
  misc_RNA (1)...(19): siRNA sense strand
auacgacuucgauauuuga

SEQ ID NO: 615226 - RNA, 19 nt, Homo sapiens
  misc_RNA (1)...(19): siRNA sense strand
gggagaaacugcaguacua

SEQ ID NO: 615227 - RNA, 19 nt, Homo sapiens
  misc_RNA (1)...(19): siRNA sense strand
gugaagagcucaguuauug

SEQ ID NO: 615228 - RNA, 19 nt, Homo sapiens
  misc_RNA (1)...(19): siRNA sense strand
ccaagaugaugaagaguuu

SEQ ID NO: 615229 - RNA, 19 nt, Homo sapiens
  misc_RNA (1)...(19): siRNA sense strand
gaaggaguuugccauaaug

SEQ ID NO: 615230 - RNA, 19 nt, Homo sapiens
  misc_RNA (1)...(19): siRNA sense strand
ggaccaagaugaugaagag

SEQ ID NO: 615231 - RNA, 19 nt, Homo sapiens
  misc_RNA (1)...(19): siRNA sense strand
gaaggcaucucaguuaaca

SEQ ID NO: 615232 - RNA, 19 nt, Homo sapiens
  misc_RNA (1)...(19): siRNA sense strand
uggaaaggcugaucaagaa

SEQ ID NO: 615233 - RNA, 19 nt, Homo sapiens
  misc_RNA (1)...(19): siRNA sense strand
gcgaaggcaucucaguuaa

SEQ ID NO: 615234 - RNA, 19 nt, Homo sapiens
  misc_RNA (1)...(19): siRNA sense strand
guacccagcugucaaguuc

SEQ ID NO: 615235 - RNA, 19 nt, Homo sapiens
  misc_RNA (1)...(19): siRNA sense strand
gaagaucagugggaagaug

SEQ ID NO: 615236 - RNA, 19 nt, Homo sapiens
  misc_RNA (1)...(19): siRNA sense strand
caaaaggugugaucaauga

SEQ ID NO: 615237 - RNA, 19 nt, Homo sapiens
  misc_RNA (1)...(19): siRNA sense strand
ugaaggaguuugccauaau

SEQ ID NO: 615238 - RNA, 19 nt, Homo sapiens
  misc_RNA (1)...(19): siRNA sense strand
ggauagcgaccuggaaaua

SEQ ID NO: 615239 - RNA, 19 nt, Homo sapiens
  misc_RNA (1)...(19): siRNA sense strand
ggcgaaggcaucucaguua

SEQ ID NO: 615240 - RNA, 19 nt, Homo sapiens
  misc_RNA (1)...(19): siRNA sense strand
gaaaagcauugucaucaug

SEQ ID NO: 615241 - RNA, 19 nt, Homo sapiens
  misc_RNA (1)...(19): siRNA sense strand
ggaagcagcgaauggaaga

SEQ ID NO: 615242 - RNA, 19 nt, Homo sapiens
  misc_RNA (1)...(19): siRNA sense strand
gaggauagcgaccuggaaa

SEQ ID NO: 615243 - RNA, 19 nt, Homo sapiens
  misc_RNA (1)...(19): siRNA sense strand
ugaaugaggaccaagauga

SEQ ID NO: 615244 - RNA, 19 nt, Homo sapiens
  misc_RNA (1)...(19): siRNA sense strand
ucaagcaguuggagacaga

SEQ ID NO: 615245 - RNA, 19 nt, Homo sapiens
  misc_RNA (1)...(19): siRNA sense strand
ggaagaugacucugaagga

SEQ ID NO: 615246 - RNA, 19 nt, Homo sapiens
  misc_RNA (1)...(19): siRNA sense strand
gagaagaucagugggaaga

SEQ ID NO: 615247 - RNA, 19 nt, Homo sapiens
  misc_RNA (1)...(19): siRNA sense strand
gcagccaguucaccaggaa

SEQ ID NO: 615248 - RNA, 19 nt, Homo sapiens
  misc_RNA (1)...(19): siRNA sense strand
gugggaagaugacucugaa

SEQ ID NO: 615249 - RNA, 19 nt, Homo sapiens
  misc_RNA (1)...(19): siRNA sense strand
ggaguuugccauaaugaau

SEQ ID NO: 615250 - RNA, 19 nt, Homo sapiens
  misc_RNA (1)...(19): siRNA sense strand
gaacagaaaagcauuguca

SEQ ID NO: 615251 - RNA, 19 nt, Homo sapiens
  misc_RNA (1)...(19): siRNA sense strand
gaaugaggaccaagaugau

SEQ ID NO: 615252 - RNA, 19 nt, Homo sapiens
  misc_RNA (1)...(19): siRNA sense strand
ggugaagagcucaguuauu

SEQ ID NO: 615253 - RNA, 19 nt, Homo sapiens
  misc_RNA (1)...(19): siRNA sense strand
gaagaggaggagcaacaga

SEQ ID NO: 615254 - RNA, 19 nt, Homo sapiens
  misc_RNA (1)...(19): siRNA sense strand
cauaaugaaugaggaccaa

SEQ ID NO: 615255 - RNA, 19 nt, Homo sapiens
  misc_RNA (1)...(19): siRNA sense strand
cugaaggaguuugccauaa

SEQ ID NO: 615256 - RNA, 19 nt, Homo sapiens
  misc_RNA (1)...(19): siRNA sense strand
auagcgaccuggaaauaga

SEQ ID NO: 615257 - RNA, 19 nt, Homo sapiens
  misc_RNA (1)...(19): siRNA sense strand
ccaggaauuuggauuacuc

SEQ ID NO: 615258 - RNA, 19 nt, Homo sapiens
  misc_RNA (1)...(19): siRNA sense strand
cuguggaccuugaagcuuu

SEQ ID NO: 615259 - RNA, 19 nt, Homo sapiens
  misc_RNA (1)...(19): siRNA sense strand
ggagcaacagaaacagaaa

SEQ ID NO: 615260 - RNA, 19 nt, Homo sapiens
  misc_RNA (1)...(19): siRNA sense strand
gcauugucaucaugguuca

SEQ ID NO: 615261 - RNA, 19 nt, Homo sapiens
  misc_RNA (1)...(19): siRNA sense strand
cugcccugcugaucuauaa

SEQ ID NO: 615262 - RNA, 19 nt, Homo sapiens
  misc_RNA (1)...(19): siRNA sense strand
aaggugaagagcucaguua

SEQ ID NO: 615263 - RNA, 19 nt, Homo sapiens
  misc_RNA (1)...(19): siRNA sense strand
gaggagcaacagaaacaga

SEQ ID NO: 615264 - RNA, 19 nt, Homo sapiens
  misc_RNA (1)...(19): siRNA sense strand
gucaucaugguucauauuu

SEQ ID NO: 615265 - RNA, 19 nt, Homo sapiens
  misc_RNA (1)...(19): siRNA sense strand
cacccuugaugauaaguug

SEQ ID NO: 615266 - RNA, 19 nt, Homo sapiens
  misc_RNA (1)...(19): siRNA sense strand
gagauggaaaggcugauca

SEQ ID NO: 615267 - RNA, 19 nt, Homo sapiens
  misc_RNA (1)...(19): siRNA sense strand
gauagcgaccuggaaauag

SEQ ID NO: 615268 - RNA, 19 nt, Homo sapiens
  misc_RNA (1)...(19): siRNA sense strand
gaguuugccauaaugaaug

SEQ ID NO: 615269 - RNA, 19 nt, Homo sapiens
  misc_RNA (1)...(19): siRNA sense strand
gaucaagaagcugucaaug

SEQ ID NO: 615270 - RNA, 19 nt, Homo sapiens
  misc_RNA (1)...(19): siRNA sense strand
gcagaguacccagcuguca

SEQ ID NO: 615271 - RNA, 19 nt, Homo sapiens
  misc_RNA (1)...(19): siRNA sense strand
gaccacccuugaugauaag

SEQ ID NO: 615272 - RNA, 19 nt, Homo sapiens
  misc_RNA (1)...(19): siRNA sense strand
gugaggaugaggacaguga

SEQ ID NO: 615273 - RNA, 19 nt, Homo sapiens
  misc_RNA (1)...(19): siRNA sense strand
ugacaucugugcguaacuc

SEQ ID NO: 615274 - RNA, 19 nt, Homo sapiens
  misc_RNA (1)...(19): siRNA sense strand
uaaugaaugaggaccaaga

SEQ ID NO: 615275 - RNA, 19 nt, Homo sapiens
  misc_RNA (1)...(19): siRNA sense strand
ucugaaggaguuugccaua

SEQ ID NO: 615276 - RNA, 19 nt, Homo sapiens
  misc_RNA (1)...(19): siRNA sense strand
cgaccuggaaauagauuga

SEQ ID NO: 615277 - RNA, 19 nt, Homo sapiens
  misc_RNA (1)...(19): siRNA sense strand
guaacucugccacguguca

SEQ ID NO: 615278 - RNA, 19 nt, Homo sapiens
  misc_RNA (1)...(19): siRNA sense strand
aagaggaggagcaacagaa

SEQ ID NO: 615279 - RNA, 19 nt, Homo sapiens
  misc_RNA (1)...(19): siRNA sense strand
caugauugauaaagaacag

SEQ ID NO: 615280 - RNA, 19 nt, Homo sapiens
  misc_RNA (1)...(19): siRNA sense strand
agaggaggagcaacagaaa

SEQ ID NO: 615281 - RNA, 19 nt, Homo sapiens
  misc_RNA (1)...(19): siRNA sense strand
gcagcgaauggaagagaug

SEQ ID NO: 615282 - RNA, 19 nt, Homo sapiens
  misc_RNA (1)...(19): siRNA sense strand
gagcaacagaaacagaaag

SEQ ID NO: 615283 - RNA, 19 nt, Homo sapiens
  misc_RNA (1)...(19): siRNA sense strand
ggaaaggcugaucaagaag

SEQ ID NO: 615284 - RNA, 19 nt, Homo sapiens
  misc_RNA (1)...(19): siRNA sense strand
gcugacaucugugcguaac

SEQ ID NO: 615285 - RNA, 19 nt, Homo sapiens
  misc_RNA (1)...(19): siRNA sense strand
aucaagaagcugucaauga

SEQ ID NO: 615286 - RNA, 19 nt, Homo sapiens
  misc_RNA (1)...(19): siRNA sense strand
ggaugaagaggaggagcaa

SEQ ID NO: 615287 - RNA, 19 nt, Homo sapiens
  misc_RNA (1)...(19): siRNA sense strand
cagaguacccagcugucaa

SEQ ID NO: 615288 - RNA, 19 nt, Homo sapiens
  misc_RNA (1)...(19): siRNA sense strand
gacaaggaccgaggcagau

SEQ ID NO: 615289 - RNA, 19 nt, Homo sapiens
  misc_RNA (1)...(19): siRNA sense strand
ggagaaacugcaguacuac

SEQ ID NO: 615290 - RNA, 19 nt, Homo sapiens
  misc_RNA (1)...(19): siRNA sense strand
uuccugcccugcugaucua

SEQ ID NO: 615291 - RNA, 19 nt, Homo sapiens
  misc_RNA (1)...(19): siRNA sense strand
aguuugccauaaugaauga

SEQ ID NO: 615292 - RNA, 19 nt, Homo sapiens
  misc_RNA (1)...(19): siRNA sense strand
gccaugaacucgaaaguga

SEQ ID NO: 615293 - RNA, 19 nt, Homo sapiens
  misc_RNA (1)...(19): siRNA sense strand
gaaggcgucuacaacaauu

SEQ ID NO: 615294 - RNA, 19 nt, Homo sapiens
  misc_RNA (1)...(19): siRNA sense strand
ccaguuggcucgagagauu

SEQ ID NO: 615295 - RNA, 19 nt, Homo sapiens
  misc_RNA (1)...(19): siRNA sense strand
gaggagaacuacgguguga

SEQ ID NO: 615296 - RNA, 19 nt, Homo sapiens
  misc_RNA (1)...(19): siRNA sense strand
gggcuccacuugugaugua

SEQ ID NO: 615297 - RNA, 19 nt, Homo sapiens
  misc_RNA (1)...(19): siRNA sense strand
auagcagucuuucuucuua

SEQ ID NO: 615298 - RNA, 19 nt, Homo sapiens
  misc_RNA (1)...(19): siRNA sense strand
aaagacaaguucaccgauu

SEQ ID NO: 615299 - RNA, 19 nt, Homo sapiens
  misc_RNA (1)...(19): siRNA sense strand
ucaagacgcuaagcucaaa

SEQ ID NO: 615300 - RNA, 19 nt, Homo sapiens
  misc_RNA (1)...(19): siRNA sense strand
gaacuacggugugaagacu

SEQ ID NO: 615301 - RNA, 19 nt, Homo sapiens
  misc_RNA (1)...(19): siRNA sense strand
acuaugaccucgagucuga

SEQ ID NO: 615302 - RNA, 19 nt, Homo sapiens
  misc_RNA (1)...(19): siRNA sense strand
ggacagagcacaggaaagg

SEQ ID NO: 615303 - RNA, 19 nt, Homo sapiens
  misc_RNA (1)...(19): siRNA sense strand
caacuaugcuacuaaagac

SEQ ID NO: 615304 - RNA, 19 nt, Homo sapiens
  misc_RNA (1)...(19): siRNA sense strand
guucaccgauucagccauu

SEQ ID NO: 615305 - RNA, 19 nt, Homo sapiens
  misc_RNA (1)...(19): siRNA sense strand
gaaauguucaaguucaaug

SEQ ID NO: 615306 - RNA, 19 nt, Homo sapiens
  misc_RNA (1)...(19): siRNA sense strand
ucaacuaugcuacuaaaga

SEQ ID NO: 615307 - RNA, 19 nt, Homo sapiens
  misc_RNA (1)...(19): siRNA sense strand
gugaagacuaccuaugaua

SEQ ID NO: 615308 - RNA, 19 nt, Homo sapiens
  misc_RNA (1)...(19): siRNA sense strand
cuucaacuaugcuacuaaa

SEQ ID NO: 615309 - RNA, 19 nt, Homo sapiens
  misc_RNA (1)...(19): siRNA sense strand
gcaacagcgacgacuauga

SEQ ID NO: 615310 - RNA, 19 nt, Homo sapiens
  misc_RNA (1)...(19): siRNA sense strand
uaagccaagugaugucaug

SEQ ID NO: 615311 - RNA, 19 nt, Homo sapiens
  misc_RNA (1)...(19): siRNA sense strand
gcacugaagaggagaagca

SEQ ID NO: 615312 - RNA, 19 nt, Homo sapiens
  misc_RNA (1)...(19): siRNA sense strand
uaugauagcagucuuucuu

SEQ ID NO: 615313 - RNA, 19 nt, Homo sapiens
  misc_RNA (1)...(19): siRNA sense strand
gccaagugaugucaugcuu

SEQ ID NO: 615314 - RNA, 19 nt, Homo sapiens
  misc_RNA (1)...(19): siRNA sense strand
gugugaagacuaccuauga

SEQ ID NO: 615315 - RNA, 19 nt, Homo sapiens
  misc_RNA (1)...(19): siRNA sense strand
gacgcuaagcucaaaguuu

SEQ ID NO: 615316 - RNA, 19 nt, Homo sapiens
  misc_RNA (1)...(19): siRNA sense strand
gauagcagucuuucuucuu

SEQ ID NO: 615317 - RNA, 19 nt, Homo sapiens
  misc_RNA (1)...(19): siRNA sense strand
cuuguucacuuccgaaaug

SEQ ID NO: 615318 - RNA, 19 nt, Homo sapiens
  misc_RNA (1)...(19): siRNA sense strand
ggagaacuacggugugaag

SEQ ID NO: 615319 - RNA, 19 nt, Homo sapiens
  misc_RNA (1)...(19): siRNA sense strand
ccauugccaugaacucgaa

SEQ ID NO: 615320 - RNA, 19 nt, Homo sapiens
  misc_RNA (1)...(19): siRNA sense strand
gacuucaacuaugcuacua

SEQ ID NO: 615321 - RNA, 19 nt, Homo sapiens
  misc_RNA (1)...(19): siRNA sense strand
cuuauacggugcccuuaga

SEQ ID NO: 615322 - RNA, 19 nt, Homo sapiens
  misc_RNA (1)...(19): siRNA sense strand
aagacaaguucaccgauuc

SEQ ID NO: 615323 - RNA, 19 nt, Homo sapiens
  misc_RNA (1)...(19): siRNA sense strand
cagcaacagcgacgacuau

SEQ ID NO: 615324 - RNA, 19 nt, Homo sapiens
  misc_RNA (1)...(19): siRNA sense strand
caacagcgacgacuaugac

SEQ ID NO: 615325 - RNA, 19 nt, Homo sapiens
  misc_RNA (1)...(19): siRNA sense strand
ugucaugcuuguucacuuc

SEQ ID NO: 615326 - RNA, 19 nt, Homo sapiens
  misc_RNA (1)...(19): siRNA sense strand
agucugacauguccaaugg

SEQ ID NO: 615327 - RNA, 19 nt, Homo sapiens
  misc_RNA (1)...(19): siRNA sense strand
uagcagucuuucuucuuau

SEQ ID NO: 615328 - RNA, 19 nt, Homo sapiens
  misc_RNA (1)...(19): siRNA sense strand
uugaaggcgucuacaacaa

SEQ ID NO: 615329 - RNA, 19 nt, Homo sapiens
  misc_RNA (1)...(19): siRNA sense strand
ggaucgccauggagaacga

SEQ ID NO: 615330 - RNA, 19 nt, Homo sapiens
  misc_RNA (1)...(19): siRNA sense strand
agcagucuuucuucuuaua

SEQ ID NO: 615331 - RNA, 19 nt, Homo sapiens
  misc_RNA (1)...(19): siRNA sense strand
guucacuuccgaaauguug

SEQ ID NO: 615332 - RNA, 19 nt, Homo sapiens
  misc_RNA (1)...(19): siRNA sense strand
gcauuuccuuacagcuguu

SEQ ID NO: 615333 - RNA, 19 nt, Homo sapiens
  misc_RNA (1)...(19): siRNA sense strand
cuuccgaaauguugacuuc

SEQ ID NO: 615334 - RNA, 19 nt, Homo sapiens
  misc_RNA (1)...(19): siRNA sense strand
ugaaggcgucuacaacaau

SEQ ID NO: 615335 - RNA, 19 nt, Homo sapiens
  misc_RNA (1)...(19): siRNA sense strand
ugugaagacuaccuaugau

SEQ ID NO: 615336 - RNA, 19 nt, Homo sapiens
  misc_RNA (1)...(19): siRNA sense strand
ugauagcagucuuucuucu

SEQ ID NO: 615337 - RNA, 19 nt, Homo sapiens
  misc_RNA (1)...(19): siRNA sense strand
gugaugucaugcuuguuca

SEQ ID NO: 615338 - RNA, 19 nt, Homo sapiens
  misc_RNA (1)...(19): siRNA sense strand
aaaaugguaccacuuauga

SEQ ID NO: 615339 - RNA, 19 nt, Homo sapiens
  misc_RNA (1)...(19): siRNA sense strand
gaaaaggacaacucagaag

SEQ ID NO: 615340 - RNA, 19 nt, Homo sapiens
  misc_RNA (1)...(19): siRNA sense strand
gggagccgaaggcaucuug

SEQ ID NO: 615341 - RNA, 19 nt, Homo sapiens
  misc_RNA (1)...(19): siRNA sense strand
gacgaugggcgcacugaag

SEQ ID NO: 615342 - RNA, 19 nt, Homo sapiens
  misc_RNA (1)...(19): siRNA sense strand
caugaacucgaaagugaau

SEQ ID NO: 615343 - RNA, 19 nt, Homo sapiens
  misc_RNA (1)...(19): siRNA sense strand
gaccucgagucugacaugu

SEQ ID NO: 615344 - RNA, 19 nt, Homo sapiens
  misc_RNA (1)...(19): siRNA sense strand
ccacuugugauguaaaggu

SEQ ID NO: 615345 - RNA, 19 nt, Homo sapiens
  misc_RNA (1)...(19): siRNA sense strand
ggaccccaaugaaauguuc

SEQ ID NO: 615346 - RNA, 19 nt, Homo sapiens
  misc_RNA (1)...(19): siRNA sense strand
ggugugaagacuaccuaug

SEQ ID NO: 615347 - RNA, 19 nt, Homo sapiens
  misc_RNA (1)...(19): siRNA sense strand
uauacggugcccuuagaaa

SEQ ID NO: 615348 - RNA, 19 nt, Homo sapiens
  misc_RNA (1)...(19): siRNA sense strand
gccaugaacucgaaaguga

SEQ ID NO: 615349 - RNA, 19 nt, Homo sapiens
  misc_RNA (1)...(19): siRNA sense strand
gaaggcgucuacaacaauu

SEQ ID NO: 615350 - RNA, 19 nt, Homo sapiens
  misc_RNA (1)...(19): siRNA sense strand
ccaguuggcucgagagauu

SEQ ID NO: 615351 - RNA, 19 nt, Homo sapiens
  misc_RNA (1)...(19): siRNA sense strand
gaggagaacuacgguguga

SEQ ID NO: 615352 - RNA, 19 nt, Homo sapiens
  misc_RNA (1)...(19): siRNA sense strand
gggcuccacuugugaugua

SEQ ID NO: 615353 - RNA, 19 nt, Homo sapiens
  misc_RNA (1)...(19): siRNA sense strand
gacggaagaucuuuuauuu

SEQ ID NO: 615354 - RNA, 19 nt, Homo sapiens
  misc_RNA (1)...(19): siRNA sense strand
auagcagucuuucuucuua

SEQ ID NO: 615355 - RNA, 19 nt, Homo sapiens
  misc_RNA (1)...(19): siRNA sense strand
aaagacaaguucaccgauu

SEQ ID NO: 615356 - RNA, 19 nt, Homo sapiens
  misc_RNA (1)...(19): siRNA sense strand
ucaagacgcuaagcucaaa

SEQ ID NO: 615357 - RNA, 19 nt, Homo sapiens
  misc_RNA (1)...(19): siRNA sense strand
gaacuacggugugaagacu

SEQ ID NO: 615358 - RNA, 19 nt, Homo sapiens
  misc_RNA (1)...(19): siRNA sense strand
acuaugaccucgagucuga

SEQ ID NO: 615359 - RNA, 19 nt, Homo sapiens
  misc_RNA (1)...(19): siRNA sense strand
caacuaugcuacuaaagac

SEQ ID NO: 615360 - RNA, 19 nt, Homo sapiens
  misc_RNA (1)...(19): siRNA sense strand
ggacagagcacaggaaagg

SEQ ID NO: 615361 - RNA, 19 nt, Homo sapiens
  misc_RNA (1)...(19): siRNA sense strand
guucaccgauucagccauu

SEQ ID NO: 615362 - RNA, 19 nt, Homo sapiens
  misc_RNA (1)...(19): siRNA sense strand
gaaauguucaaguucaaug

SEQ ID NO: 615363 - RNA, 19 nt, Homo sapiens
  misc_RNA (1)...(19): siRNA sense strand
ucaacuaugcuacuaaaga

SEQ ID NO: 615364 - RNA, 19 nt, Homo sapiens
  misc_RNA (1)...(19): siRNA sense strand
gugaagacuaccuaugaua

SEQ ID NO: 615365 - RNA, 19 nt, Homo sapiens
  misc_RNA (1)...(19): siRNA sense strand
cggaagaucuuuuauuuuc

SEQ ID NO: 615366 - RNA, 19 nt, Homo sapiens
  misc_RNA (1)...(19): siRNA sense strand
cuucaacuaugcuacuaaa

SEQ ID NO: 615367 - RNA, 19 nt, Homo sapiens
  misc_RNA (1)...(19): siRNA sense strand
gcaacagcgacgacuauga

SEQ ID NO: 615368 - RNA, 19 nt, Homo sapiens
  misc_RNA (1)...(19): siRNA sense strand
uaagccaagugaugucaug

SEQ ID NO: 615369 - RNA, 19 nt, Homo sapiens
  misc_RNA (1)...(19): siRNA sense strand
gcacugaagaggagaagca

SEQ ID NO: 615370 - RNA, 19 nt, Homo sapiens
  misc_RNA (1)...(19): siRNA sense strand
uaugauagcagucuuucuu

SEQ ID NO: 615371 - RNA, 19 nt, Homo sapiens
  misc_RNA (1)...(19): siRNA sense strand
gccaagugaugucaugcuu

SEQ ID NO: 615372 - RNA, 19 nt, Homo sapiens
  misc_RNA (1)...(19): siRNA sense strand
gugugaagacuaccuauga

SEQ ID NO: 615373 - RNA, 19 nt, Homo sapiens
  misc_RNA (1)...(19): siRNA sense strand
gacgcuaagcucaaaguuu

SEQ ID NO: 615374 - RNA, 19 nt, Homo sapiens
  misc_RNA (1)...(19): siRNA sense strand
gauagcagucuuucuucuu

SEQ ID NO: 615375 - RNA, 19 nt, Homo sapiens
  misc_RNA (1)...(19): siRNA sense strand
cuuguucacuuccgaaaug

SEQ ID NO: 615376 - RNA, 19 nt, Homo sapiens
  misc_RNA (1)...(19): siRNA sense strand
ggagaacuacggugugaag

SEQ ID NO: 615377 - RNA, 19 nt, Homo sapiens
  misc_RNA (1)...(19): siRNA sense strand
ccauugccaugaacucgaa

SEQ ID NO: 615378 - RNA, 19 nt, Homo sapiens
  misc_RNA (1)...(19): siRNA sense strand
ggagacggaagaucuuuua

SEQ ID NO: 615379 - RNA, 19 nt, Homo sapiens
  misc_RNA (1)...(19): siRNA sense strand
gacuucaacuaugcuacua

SEQ ID NO: 615380 - RNA, 19 nt, Homo sapiens
  misc_RNA (1)...(19): siRNA sense strand
cuuauacggugcccuuaga

SEQ ID NO: 615381 - RNA, 19 nt, Homo sapiens
  misc_RNA (1)...(19): siRNA sense strand
aagacaaguucaccgauuc

SEQ ID NO: 615382 - RNA, 19 nt, Homo sapiens
  misc_RNA (1)...(19): siRNA sense strand
cagcaacagcgacgacuau

SEQ ID NO: 615383 - RNA, 19 nt, Homo sapiens
  misc_RNA (1)...(19): siRNA sense strand
cccauccucucaucuauuc

SEQ ID NO: 615384 - RNA, 19 nt, Homo sapiens
  misc_RNA (1)...(19): siRNA sense strand
caacagcgacgacuaugac

SEQ ID NO: 615385 - RNA, 19 nt, Homo sapiens
  misc_RNA (1)...(19): siRNA sense strand
ugucaugcuuguucacuuc

SEQ ID NO: 615386 - RNA, 19 nt, Homo sapiens
  misc_RNA (1)...(19): siRNA sense strand
agucugacauguccaaugg

SEQ ID NO: 615387 - RNA, 19 nt, Homo sapiens
  misc_RNA (1)...(19): siRNA sense strand
uugaaggcgucuacaacaa

SEQ ID NO: 615388 - RNA, 19 nt, Homo sapiens
  misc_RNA (1)...(19): siRNA sense strand
ggaucgccauggagaacga

SEQ ID NO: 615389 - RNA, 19 nt, Homo sapiens
  misc_RNA (1)...(19): siRNA sense strand
agcagucuuucuucuuaua

SEQ ID NO: 615390 - RNA, 19 nt, Homo sapiens
  misc_RNA (1)...(19): siRNA sense strand
uagcagucuuucuucuuau

SEQ ID NO: 615391 - RNA, 19 nt, Homo sapiens
  misc_RNA (1)...(19): siRNA sense strand
guucacuuccgaaauguug

SEQ ID NO: 615392 - RNA, 19 nt, Homo sapiens
  misc_RNA (1)...(19): siRNA sense strand
gcauuuccuuacagcuguu

SEQ ID NO: 615393 - RNA, 19 nt, Homo sapiens
  misc_RNA (1)...(19): siRNA sense strand
cuuccgaaauguugacuuc

SEQ ID NO: 615394 - RNA, 19 nt, Homo sapiens
  misc_RNA (1)...(19): siRNA sense strand
ugaaggcgucuacaacaau

SEQ ID NO: 615395 - RNA, 19 nt, Homo sapiens
  misc_RNA (1)...(19): siRNA sense strand
ugugaagacuaccuaugau

SEQ ID NO: 615396 - RNA, 19 nt, Homo sapiens
  misc_RNA (1)...(19): siRNA sense strand
ugauagcagucuuucuucu

SEQ ID NO: 615397 - RNA, 19 nt, Homo sapiens
  misc_RNA (1)...(19): siRNA sense strand
gugaugucaugcuuguuca

SEQ ID NO: 615398 - RNA, 19 nt, Homo sapiens
  misc_RNA (1)...(19): siRNA sense strand
aaaaugguaccacuuauga

SEQ ID NO: 615399 - RNA, 19 nt, Homo sapiens
  misc_RNA (1)...(19): siRNA sense strand
gaaaaggacaacucagaag

SEQ ID NO: 615400 - RNA, 19 nt, Homo sapiens
  misc_RNA (1)...(19): siRNA sense strand
caugaacucgaaagugaau

SEQ ID NO: 615401 - RNA, 19 nt, Homo sapiens
  misc_RNA (1)...(19): siRNA sense strand
gacgaugggcgcacugaag

SEQ ID NO: 615402 - RNA, 19 nt, Homo sapiens
  misc_RNA (1)...(19): siRNA sense strand
gggagccgaaggcaucuug

SEQ ID NO: 615403 - RNA, 19 nt, Homo sapiens
  misc_RNA (1)...(19): siRNA sense strand
ccacuugugauguaaaggu

SEQ ID NO: 615404 - RNA, 19 nt, Homo sapiens
  misc_RNA (1)...(19): siRNA sense strand
ggaccccaaugaaauguuc

SEQ ID NO: 615405 - RNA, 19 nt, Homo sapiens
  misc_RNA (1)...(19): siRNA sense strand
gaccucgagucugacaugu

SEQ ID NO: 615406 - RNA, 19 nt, Homo sapiens
  misc_RNA (1)...(19): siRNA sense strand
ggugugaagacuaccuaug

SEQ ID NO: 615407 - RNA, 19 nt, Homo sapiens
  misc_RNA (1)...(19): siRNA sense strand
ccucccauccucucaucua

SEQ ID NO: 615408 - RNA, 19 nt, Homo sapiens
  misc_RNA (1)...(19): siRNA sense strand
uauacggugcccuuagaaa

SEQ ID NO: 615409 - RNA, 19 nt, Homo sapiens
  misc_RNA (1)...(19): siRNA sense strand
gccaugaacucgaaaguga

SEQ ID NO: 615410 - RNA, 19 nt, Homo sapiens
  misc_RNA (1)...(19): siRNA sense strand
gaaggcgucuacaacaauu

SEQ ID NO: 615411 - RNA, 19 nt, Homo sapiens
  misc_RNA (1)...(19): siRNA sense strand
ccaguuggcucgagagauu

SEQ ID NO: 615412 - RNA, 19 nt, Homo sapiens
  misc_RNA (1)...(19): siRNA sense strand
gaggagaacuacgguguga

SEQ ID NO: 615413 - RNA, 19 nt, Homo sapiens
  misc_RNA (1)...(19): siRNA sense strand
gggcuccacuugugaugua

SEQ ID NO: 615414 - RNA, 19 nt, Homo sapiens
  misc_RNA (1)...(19): siRNA sense strand
auagcagucuuucuucuua

SEQ ID NO: 615415 - RNA, 19 nt, Homo sapiens
  misc_RNA (1)...(19): siRNA sense strand
aaagacaaguucaccgauu

SEQ ID NO: 615416 - RNA, 19 nt, Homo sapiens
  misc_RNA (1)...(19): siRNA sense strand
ucaagacgcuaagcucaaa

SEQ ID NO: 615417 - RNA, 19 nt, Homo sapiens
  misc_RNA (1)...(19): siRNA sense strand
gaacuacggugugaagacu

SEQ ID NO: 615418 - RNA, 19 nt, Homo sapiens
  misc_RNA (1)...(19): siRNA sense strand
acuaugaccucgagucuga

SEQ ID NO: 615419 - RNA, 19 nt, Homo sapiens
  misc_RNA (1)...(19): siRNA sense strand
ggacagagcacaggaaagg

SEQ ID NO: 615420 - RNA, 19 nt, Homo sapiens
  misc_RNA (1)...(19): siRNA sense strand
caacuaugcuacuaaagac

SEQ ID NO: 615421 - RNA, 19 nt, Homo sapiens
  misc_RNA (1)...(19): siRNA sense strand
guucaccgauucagccauu

SEQ ID NO: 615422 - RNA, 19 nt, Homo sapiens
  misc_RNA (1)...(19): siRNA sense strand
gaaauguucaaguucaaug

SEQ ID NO: 615423 - RNA, 19 nt, Homo sapiens
  misc_RNA (1)...(19): siRNA sense strand
ucaacuaugcuacuaaaga

SEQ ID NO: 615424 - RNA, 19 nt, Homo sapiens
  misc_RNA (1)...(19): siRNA sense strand
gugaagacuaccuaugaua

SEQ ID NO: 615425 - RNA, 19 nt, Homo sapiens
  misc_RNA (1)...(19): siRNA sense strand
cuucaacuaugcuacuaaa

SEQ ID NO: 615426 - RNA, 19 nt, Homo sapiens
  misc_RNA (1)...(19): siRNA sense strand
gcaacagcgacgacuauga

SEQ ID NO: 615427 - RNA, 19 nt, Homo sapiens
  misc_RNA (1)...(19): siRNA sense strand
uaagccaagugaugucaug

SEQ ID NO: 615428 - RNA, 19 nt, Homo sapiens
  misc_RNA (1)...(19): siRNA sense strand
gcacugaagaggagaagca

SEQ ID NO: 615429 - RNA, 19 nt, Homo sapiens
  misc_RNA (1)...(19): siRNA sense strand
uaugauagcagucuuucuu

SEQ ID NO: 615430 - RNA, 19 nt, Homo sapiens
  misc_RNA (1)...(19): siRNA sense strand
gccaagugaugucaugcuu

SEQ ID NO: 615431 - RNA, 19 nt, Homo sapiens
  misc_RNA (1)...(19): siRNA sense strand
gugugaagacuaccuauga

SEQ ID NO: 615432 - RNA, 19 nt, Homo sapiens
  misc_RNA (1)...(19): siRNA sense strand
gacgcuaagcucaaaguuu

SEQ ID NO: 615433 - RNA, 19 nt, Homo sapiens
  misc_RNA (1)...(19): siRNA sense strand
gauagcagucuuucuucuu

SEQ ID NO: 615434 - RNA, 19 nt, Homo sapiens
  misc_RNA (1)...(19): siRNA sense strand
cuuguucacuuccgaaaug

SEQ ID NO: 615435 - RNA, 19 nt, Homo sapiens
  misc_RNA (1)...(19): siRNA sense strand
ggagaacuacggugugaag

SEQ ID NO: 615436 - RNA, 19 nt, Homo sapiens
  misc_RNA (1)...(19): siRNA sense strand
ccauugccaugaacucgaa

SEQ ID NO: 615437 - RNA, 19 nt, Homo sapiens
  misc_RNA (1)...(19): siRNA sense strand
gacuucaacuaugcuacua

SEQ ID NO: 615438 - RNA, 19 nt, Homo sapiens
  misc_RNA (1)...(19): siRNA sense strand
cuuauacggugcccuuaga

SEQ ID NO: 615439 - RNA, 19 nt, Homo sapiens
  misc_RNA (1)...(19): siRNA sense strand
aagacaaguucaccgauuc

SEQ ID NO: 615440 - RNA, 19 nt, Homo sapiens
  misc_RNA (1)...(19): siRNA sense strand
cagcaacagcgacgacuau

SEQ ID NO: 615441 - RNA, 19 nt, Homo sapiens
  misc_RNA (1)...(19): siRNA sense strand
caacagcgacgacuaugac

SEQ ID NO: 615442 - RNA, 19 nt, Homo sapiens
  misc_RNA (1)...(19): siRNA sense strand
ugucaugcuuguucacuuc

SEQ ID NO: 615443 - RNA, 19 nt, Homo sapiens
  misc_RNA (1)...(19): siRNA sense strand
agucugacauguccaaugg

SEQ ID NO: 615444 - RNA, 19 nt, Homo sapiens
  misc_RNA (1)...(19): siRNA sense strand
uagcagucuuucuucuuau

SEQ ID NO: 615445 - RNA, 19 nt, Homo sapiens
  misc_RNA (1)...(19): siRNA sense strand
uugaaggcgucuacaacaa

SEQ ID NO: 615446 - RNA, 19 nt, Homo sapiens
  misc_RNA (1)...(19): siRNA sense strand
ggaucgccauggagaacga

SEQ ID NO: 615447 - RNA, 19 nt, Homo sapiens
  misc_RNA (1)...(19): siRNA sense strand
agcagucuuucuucuuaua

SEQ ID NO: 615448 - RNA, 19 nt, Homo sapiens
  misc_RNA (1)...(19): siRNA sense strand
guucacuuccgaaauguug

SEQ ID NO: 615449 - RNA, 19 nt, Homo sapiens
  misc_RNA (1)...(19): siRNA sense strand
gcauuuccuuacagcuguu

SEQ ID NO: 615450 - RNA, 19 nt, Homo sapiens
  misc_RNA (1)...(19): siRNA sense strand
cuuccgaaauguugacuuc

SEQ ID NO: 615451 - RNA, 19 nt, Homo sapiens
  misc_RNA (1)...(19): siRNA sense strand
ugaaggcgucuacaacaau

SEQ ID NO: 615452 - RNA, 19 nt, Homo sapiens
  misc_RNA (1)...(19): siRNA sense strand
ugugaagacuaccuaugau

SEQ ID NO: 615453 - RNA, 19 nt, Homo sapiens
  misc_RNA (1)...(19): siRNA sense strand
ugauagcagucuuucuucu

SEQ ID NO: 615454 - RNA, 19 nt, Homo sapiens
  misc_RNA (1)...(19): siRNA sense strand
gugaugucaugcuuguuca

SEQ ID NO: 615455 - RNA, 19 nt, Homo sapiens
  misc_RNA (1)...(19): siRNA sense strand
aaaaugguaccacuuauga

SEQ ID NO: 615456 - RNA, 19 nt, Homo sapiens
  misc_RNA (1)...(19): siRNA sense strand
gaaaaggacaacucagaag

SEQ ID NO: 615457 - RNA, 19 nt, Homo sapiens
  misc_RNA (1)...(19): siRNA sense strand
gggagccgaaggcaucuug

SEQ ID NO: 615458 - RNA, 19 nt, Homo sapiens
  misc_RNA (1)...(19): siRNA sense strand
gacgaugggcgcacugaag

SEQ ID NO: 615459 - RNA, 19 nt, Homo sapiens
  misc_RNA (1)...(19): siRNA sense strand
caugaacucgaaagugaau

SEQ ID NO: 615460 - RNA, 19 nt, Homo sapiens
  misc_RNA (1)...(19): siRNA sense strand
gaccucgagucugacaugu

SEQ ID NO: 615461 - RNA, 19 nt, Homo sapiens
  misc_RNA (1)...(19): siRNA sense strand
ccacuugugauguaaaggu

SEQ ID NO: 615462 - RNA, 19 nt, Homo sapiens
  misc_RNA (1)...(19): siRNA sense strand
ggaccccaaugaaauguuc

SEQ ID NO: 615463 - RNA, 19 nt, Homo sapiens
  misc_RNA (1)...(19): siRNA sense strand
ggugugaagacuaccuaug

SEQ ID NO: 615464 - RNA, 19 nt, Homo sapiens
  misc_RNA (1)...(19): siRNA sense strand
uauacggugcccuuagaaa

SEQ ID NO: 615465 - RNA, 19 nt, Homo sapiens
  misc_RNA (1)...(19): siRNA sense strand
gccaugaacucgaaaguga

SEQ ID NO: 615466 - RNA, 19 nt, Homo sapiens
  misc_RNA (1)...(19): siRNA sense strand
gaaggcgucuacaacaauu

SEQ ID NO: 615467 - RNA, 19 nt, Homo sapiens
  misc_RNA (1)...(19): siRNA sense strand
ccaguuggcucgagagauu

SEQ ID NO: 615468 - RNA, 19 nt, Homo sapiens
  misc_RNA (1)...(19): siRNA sense strand
gaggagaacuacgguguga

SEQ ID NO: 615469 - RNA, 19 nt, Homo sapiens
  misc_RNA (1)...(19): siRNA sense strand
gggcuccacuugugaugua

SEQ ID NO: 615470 - RNA, 19 nt, Homo sapiens
  misc_RNA (1)...(19): siRNA sense strand
auagcagucuuucuucuua

SEQ ID NO: 615471 - RNA, 19 nt, Homo sapiens
  misc_RNA (1)...(19): siRNA sense strand
aaagacaaguucaccgauu

SEQ ID NO: 615472 - RNA, 19 nt, Homo sapiens
  misc_RNA (1)...(19): siRNA sense strand
ucaagacgcuaagcucaaa

SEQ ID NO: 615473 - RNA, 19 nt, Homo sapiens
  misc_RNA (1)...(19): siRNA sense strand
gaacuacggugugaagacu

SEQ ID NO: 615474 - RNA, 19 nt, Homo sapiens
  misc_RNA (1)...(19): siRNA sense strand
acuaugaccucgagucuga

SEQ ID NO: 615475 - RNA, 19 nt, Homo sapiens
  misc_RNA (1)...(19): siRNA sense strand
ggacagagcacaggaaagg

SEQ ID NO: 615476 - RNA, 19 nt, Homo sapiens
  misc_RNA (1)...(19): siRNA sense strand
caacuaugcuacuaaagac

SEQ ID NO: 615477 - RNA, 19 nt, Homo sapiens
  misc_RNA (1)...(19): siRNA sense strand
guucaccgauucagccauu

SEQ ID NO: 615478 - RNA, 19 nt, Homo sapiens
  misc_RNA (1)...(19): siRNA sense strand
gaaauguucaaguucaaug

SEQ ID NO: 615479 - RNA, 19 nt, Homo sapiens
  misc_RNA (1)...(19): siRNA sense strand
ucaacuaugcuacuaaaga

SEQ ID NO: 615480 - RNA, 19 nt, Homo sapiens
  misc_RNA (1)...(19): siRNA sense strand
gugaagacuaccuaugaua

SEQ ID NO: 615481 - RNA, 19 nt, Homo sapiens
  misc_RNA (1)...(19): siRNA sense strand
cuucaacuaugcuacuaaa

SEQ ID NO: 615482 - RNA, 19 nt, Homo sapiens
  misc_RNA (1)...(19): siRNA sense strand
gcaacagcgacgacuauga
